United States Patent Application Publication US 2005/0255487 A1 - sequence listing, part 43

SEQ ID NO: 1174421 - RNA, 19 nt, Homo sapiens
  misc_RNA (1)...(19): siRNA sense strand
cgggaaagaucgccagcaa

SEQ ID NO: 1174422 - RNA, 19 nt, Homo sapiens
  misc_RNA (1)...(19): siRNA sense strand
ccaaggaugagcaguuuga

SEQ ID NO: 1174423 - RNA, 19 nt, Homo sapiens
  misc_RNA (1)...(19): siRNA sense strand
gcagggaugaggcaaacaa

SEQ ID NO: 1174424 - RNA, 19 nt, Homo sapiens
  misc_RNA (1)...(19): siRNA sense strand
acaacgaccugcuguggau

SEQ ID NO: 1174425 - RNA, 19 nt, Homo sapiens
  misc_RNA (1)...(19): siRNA sense strand
gggaugaggcaaacaagau

SEQ ID NO: 1174426 - RNA, 19 nt, Homo sapiens
  misc_RNA (1)...(19): siRNA sense strand
ugaaggagagcgacuggaa

SEQ ID NO: 1174427 - RNA, 19 nt, Homo sapiens
  misc_RNA (1)...(19): siRNA sense strand
gcaaacaagaucgcagaga

SEQ ID NO: 1174428 - RNA, 19 nt, Homo sapiens
  misc_RNA (1)...(19): siRNA sense strand
cuaccuggccuccgucaaa

SEQ ID NO: 1174429 - RNA, 19 nt, Homo sapiens
  misc_RNA (1)...(19): siRNA sense strand
ucaaccagaaccucaauga

SEQ ID NO: 1174430 - RNA, 19 nt, Homo sapiens
  misc_RNA (1)...(19): siRNA sense strand
cgacaucaagucacgcauu

SEQ ID NO: 1174431 - RNA, 19 nt, Homo sapiens
  misc_RNA (1)...(19): siRNA sense strand
aaccagaaccucaaugaug

SEQ ID NO: 1174432 - RNA, 19 nt, Homo sapiens
  misc_RNA (1)...(19): siRNA sense strand
gcaacaccuucacggucaa

SEQ ID NO: 1174433 - RNA, 19 nt, Homo sapiens
  misc_RNA (1)...(19): siRNA sense strand
accagaaccucaaugaugu

SEQ ID NO: 1174434 - RNA, 19 nt, Homo sapiens
  misc_RNA (1)...(19): siRNA sense strand
aggaggagcucaucaaagc

SEQ ID NO: 1174435 - RNA, 19 nt, Homo sapiens
  misc_RNA (1)...(19): siRNA sense strand
cgaggaggagcucaucaaa

SEQ ID NO: 1174436 - RNA, 19 nt, Homo sapiens
  misc_RNA (1)...(19): siRNA sense strand
agcagugcguccagaauuu

SEQ ID NO: 1174437 - RNA, 19 nt, Homo sapiens
  misc_RNA (1)...(19): siRNA sense strand
ggaaggcagaugagaccaa

SEQ ID NO: 1174438 - RNA, 19 nt, Homo sapiens
  misc_RNA (1)...(19): siRNA sense strand
ucaaagcccagaagguguu

SEQ ID NO: 1174439 - RNA, 19 nt, Homo sapiens
  misc_RNA (1)...(19): siRNA sense strand
gaggaggagcucaucaaag

SEQ ID NO: 1174440 - RNA, 19 nt, Homo sapiens
  misc_RNA (1)...(19): siRNA sense strand
acaaggagaugagcaagcu

SEQ ID NO: 1174441 - RNA, 19 nt, Homo sapiens
  misc_RNA (1)...(19): siRNA sense strand
ggaugaggcaaacaagauc

SEQ ID NO: 1174442 - RNA, 19 nt, Homo sapiens
  misc_RNA (1)...(19): siRNA sense strand
gaaggaugaagccaaaauu

SEQ ID NO: 1174443 - RNA, 19 nt, Homo sapiens
  misc_RNA (1)...(19): siRNA sense strand
ccacuacgagucccuucaa

SEQ ID NO: 1174444 - RNA, 19 nt, Homo sapiens
  misc_RNA (1)...(19): siRNA sense strand
ggauggauuaccaccagaa

SEQ ID NO: 1174445 - RNA, 19 nt, Homo sapiens
  misc_RNA (1)...(19): siRNA sense strand
caaccagaaccucaaugau

SEQ ID NO: 1174446 - RNA, 19 nt, Homo sapiens
  misc_RNA (1)...(19): siRNA sense strand
gcagugcguccagaauuuc

SEQ ID NO: 1174447 - RNA, 19 nt, Homo sapiens
  misc_RNA (1)...(19): siRNA sense strand
caagaucgcagagaacaac

SEQ ID NO: 1174448 - RNA, 19 nt, Homo sapiens
  misc_RNA (1)...(19): siRNA sense strand
agaccaaggaugagcaguu

SEQ ID NO: 1174449 - RNA, 19 nt, Homo sapiens
  misc_RNA (1)...(19): siRNA sense strand
ugacaacgcgccugcaaaa

SEQ ID NO: 1174450 - RNA, 19 nt, Homo sapiens
  misc_RNA (1)...(19): siRNA sense strand
agaagguguuugaggagau

SEQ ID NO: 1174451 - RNA, 19 nt, Homo sapiens
  misc_RNA (1)...(19): siRNA sense strand
cacuacgagucccuucaaa

SEQ ID NO: 1174452 - RNA, 19 nt, Homo sapiens
  misc_RNA (1)...(19): siRNA sense strand
ucaacacguuccagagcau

SEQ ID NO: 1174453 - RNA, 19 nt, Homo sapiens
  misc_RNA (1)...(19): siRNA sense strand
gccagcaacgugcagaaga

SEQ ID NO: 1174454 - RNA, 19 nt, Homo sapiens
  misc_RNA (1)...(19): siRNA sense strand
cguccagaauuucaacaag

SEQ ID NO: 1174455 - RNA, 19 nt, Homo sapiens
  misc_RNA (1)...(19): siRNA sense strand
uccagaauuucaacaagca

SEQ ID NO: 1174456 - RNA, 19 nt, Homo sapiens
  misc_RNA (1)...(19): siRNA sense strand
cuacacggccacugacaca

SEQ ID NO: 1174457 - RNA, 19 nt, Homo sapiens
  misc_RNA (1)...(19): siRNA sense strand
gcucaaccagaaccucaau

SEQ ID NO: 1174458 - RNA, 19 nt, Homo sapiens
  misc_RNA (1)...(19): siRNA sense strand
uggaacagccgcguagguu

SEQ ID NO: 1174459 - RNA, 19 nt, Homo sapiens
  misc_RNA (1)...(19): siRNA sense strand
gcucaucaaagcccagaag

SEQ ID NO: 1174460 - RNA, 19 nt, Homo sapiens
  misc_RNA (1)...(19): siRNA sense strand
caaacaagaucgcagagaa

SEQ ID NO: 1174461 - RNA, 19 nt, Homo sapiens
  misc_RNA (1)...(19): siRNA sense strand
gcucaaggcuggugaugug

SEQ ID NO: 1174462 - RNA, 19 nt, Homo sapiens
  misc_RNA (1)...(19): siRNA sense strand
gaccaaggaugagcaguuu

SEQ ID NO: 1174463 - RNA, 19 nt, Homo sapiens
  misc_RNA (1)...(19): siRNA sense strand
aaagaaggaugaagccaaa

SEQ ID NO: 1174464 - RNA, 19 nt, Homo sapiens
  misc_RNA (1)...(19): siRNA sense strand
gacaucaagucacgcauug

SEQ ID NO: 1174465 - RNA, 19 nt, Homo sapiens
  misc_RNA (1)...(19): siRNA sense strand
gaacagccgcguagguuuc

SEQ ID NO: 1174466 - RNA, 19 nt, Homo sapiens
  misc_RNA (1)...(19): siRNA sense strand
cagaugagaccaaggauga

SEQ ID NO: 1174467 - RNA, 19 nt, Homo sapiens
  misc_RNA (1)...(19): siRNA sense strand
gagcagugcguccagaauu

SEQ ID NO: 1174468 - RNA, 19 nt, Homo sapiens
  misc_RNA (1)...(19): siRNA sense strand
ccagcaacgugcagaagaa

SEQ ID NO: 1174469 - RNA, 19 nt, Homo sapiens
  misc_RNA (1)...(19): siRNA sense strand
agaaggaucuccggaccua

SEQ ID NO: 1174470 - RNA, 19 nt, Homo sapiens
  misc_RNA (1)...(19): siRNA sense strand
guggagaccuucccagcaa

SEQ ID NO: 1174471 - RNA, 19 nt, Homo sapiens
  misc_RNA (1)...(19): siRNA sense strand
ggcgcaagcugguggacua

SEQ ID NO: 1174472 - RNA, 19 nt, Homo sapiens
  misc_RNA (1)...(19): siRNA sense strand
gaccugcuguggauggauu

SEQ ID NO: 1174473 - RNA, 19 nt, Homo sapiens
  misc_RNA (1)...(19): siRNA sense strand
gaagguguuugaggagaug

SEQ ID NO: 1174474 - RNA, 19 nt, Homo sapiens
  misc_RNA (1)...(19): siRNA sense strand
gcagagaugggcaguaaag

SEQ ID NO: 1174475 - RNA, 19 nt, Homo sapiens
  misc_RNA (1)...(19): siRNA sense strand
cccgagaacuucacugaga

SEQ ID NO: 1174476 - RNA, 19 nt, Homo sapiens
  misc_RNA (1)...(19): siRNA sense strand
gcaagcugguggacuacga

SEQ ID NO: 1174477 - RNA, 19 nt, Homo sapiens
  misc_RNA (1)...(19): siRNA sense strand
ggaacagccgcguagguuu

SEQ ID NO: 1174478 - RNA, 19 nt, Homo sapiens
  misc_RNA (1)...(19): siRNA sense strand
cgggaaagaucgccagcaa

SEQ ID NO: 1174479 - RNA, 19 nt, Homo sapiens
  misc_RNA (1)...(19): siRNA sense strand
ccaaggaugagcaguuuga

SEQ ID NO: 1174480 - RNA, 19 nt, Homo sapiens
  misc_RNA (1)...(19): siRNA sense strand
gcagggaugaggcaaacaa

SEQ ID NO: 1174481 - RNA, 19 nt, Homo sapiens
  misc_RNA (1)...(19): siRNA sense strand
acaacgaccugcuguggau

SEQ ID NO: 1174482 - RNA, 19 nt, Homo sapiens
  misc_RNA (1)...(19): siRNA sense strand
gggaugaggcaaacaagau

SEQ ID NO: 1174483 - RNA, 19 nt, Homo sapiens
  misc_RNA (1)...(19): siRNA sense strand
ugaaggagagcgacuggaa

SEQ ID NO: 1174484 - RNA, 19 nt, Homo sapiens
  misc_RNA (1)...(19): siRNA sense strand
gcaaacaagaucgcagaga

SEQ ID NO: 1174485 - RNA, 19 nt, Homo sapiens
  misc_RNA (1)...(19): siRNA sense strand
cuaccuggccuccgucaaa

SEQ ID NO: 1174486 - RNA, 19 nt, Homo sapiens
  misc_RNA (1)...(19): siRNA sense strand
ucaaccagaaccucaauga

SEQ ID NO: 1174487 - RNA, 19 nt, Homo sapiens
  misc_RNA (1)...(19): siRNA sense strand
cgacaucaagucacgcauu

SEQ ID NO: 1174488 - RNA, 19 nt, Homo sapiens
  misc_RNA (1)...(19): siRNA sense strand
aaccagaaccucaaugaug

SEQ ID NO: 1174489 - RNA, 19 nt, Homo sapiens
  misc_RNA (1)...(19): siRNA sense strand
gcaacaccuucacggucaa

SEQ ID NO: 1174490 - RNA, 19 nt, Homo sapiens
  misc_RNA (1)...(19): siRNA sense strand
accagaaccucaaugaugu

SEQ ID NO: 1174491 - RNA, 19 nt, Homo sapiens
  misc_RNA (1)...(19): siRNA sense strand
aggaggagcucaucaaagc

SEQ ID NO: 1174492 - RNA, 19 nt, Homo sapiens
  misc_RNA (1)...(19): siRNA sense strand
cgaggaggagcucaucaaa

SEQ ID NO: 1174493 - RNA, 19 nt, Homo sapiens
  misc_RNA (1)...(19): siRNA sense strand
agcagugcguccagaauuu

SEQ ID NO: 1174494 - RNA, 19 nt, Homo sapiens
  misc_RNA (1)...(19): siRNA sense strand
ggaaggcagaugagaccaa

SEQ ID NO: 1174495 - RNA, 19 nt, Homo sapiens
  misc_RNA (1)...(19): siRNA sense strand
ucaaagcccagaagguguu

SEQ ID NO: 1174496 - RNA, 19 nt, Homo sapiens
  misc_RNA (1)...(19): siRNA sense strand
gaggaggagcucaucaaag

SEQ ID NO: 1174497 - RNA, 19 nt, Homo sapiens
  misc_RNA (1)...(19): siRNA sense strand
acaaggagaugagcaagcu

SEQ ID NO: 1174498 - RNA, 19 nt, Homo sapiens
  misc_RNA (1)...(19): siRNA sense strand
ggaugaggcaaacaagauc

SEQ ID NO: 1174499 - RNA, 19 nt, Homo sapiens
  misc_RNA (1)...(19): siRNA sense strand
gaaggaugaagccaaaauu

SEQ ID NO: 1174500 - RNA, 19 nt, Homo sapiens
  misc_RNA (1)...(19): siRNA sense strand
ccacuacgagucccuucaa

SEQ ID NO: 1174501 - RNA, 19 nt, Homo sapiens
  misc_RNA (1)...(19): siRNA sense strand
ggauggauuaccaccagaa

SEQ ID NO: 1174502 - RNA, 19 nt, Homo sapiens
  misc_RNA (1)...(19): siRNA sense strand
caaccagaaccucaaugau

SEQ ID NO: 1174503 - RNA, 19 nt, Homo sapiens
  misc_RNA (1)...(19): siRNA sense strand
gcagugcguccagaauuuc

SEQ ID NO: 1174504 - RNA, 19 nt, Homo sapiens
  misc_RNA (1)...(19): siRNA sense strand
caagaucgcagagaacaac

SEQ ID NO: 1174505 - RNA, 19 nt, Homo sapiens
  misc_RNA (1)...(19): siRNA sense strand
agaccaaggaugagcaguu

SEQ ID NO: 1174506 - RNA, 19 nt, Homo sapiens
  misc_RNA (1)...(19): siRNA sense strand
ugacaacgcgccugcaaaa

SEQ ID NO: 1174507 - RNA, 19 nt, Homo sapiens
  misc_RNA (1)...(19): siRNA sense strand
agaagguguuugaggagau

SEQ ID NO: 1174508 - RNA, 19 nt, Homo sapiens
  misc_RNA (1)...(19): siRNA sense strand
cacuacgagucccuucaaa

SEQ ID NO: 1174509 - RNA, 19 nt, Homo sapiens
  misc_RNA (1)...(19): siRNA sense strand
ucaacacguuccagagcau

SEQ ID NO: 1174510 - RNA, 19 nt, Homo sapiens
  misc_RNA (1)...(19): siRNA sense strand
gccagcaacgugcagaaga

SEQ ID NO: 1174511 - RNA, 19 nt, Homo sapiens
  misc_RNA (1)...(19): siRNA sense strand
cguccagaauuucaacaag

SEQ ID NO: 1174512 - RNA, 19 nt, Homo sapiens
  misc_RNA (1)...(19): siRNA sense strand
uccagaauuucaacaagca

SEQ ID NO: 1174513 - RNA, 19 nt, Homo sapiens
  misc_RNA (1)...(19): siRNA sense strand
cuacacggccacugacaca

SEQ ID NO: 1174514 - RNA, 19 nt, Homo sapiens
  misc_RNA (1)...(19): siRNA sense strand
gcucaaccagaaccucaau

SEQ ID NO: 1174515 - RNA, 19 nt, Homo sapiens
  misc_RNA (1)...(19): siRNA sense strand
uggaacagccgcguagguu

SEQ ID NO: 1174516 - RNA, 19 nt, Homo sapiens
  misc_RNA (1)...(19): siRNA sense strand
gcucaucaaagcccagaag

SEQ ID NO: 1174517 - RNA, 19 nt, Homo sapiens
  misc_RNA (1)...(19): siRNA sense strand
caaacaagaucgcagagaa

SEQ ID NO: 1174518 - RNA, 19 nt, Homo sapiens
  misc_RNA (1)...(19): siRNA sense strand
gcucaaggcuggugaugug

SEQ ID NO: 1174519 - RNA, 19 nt, Homo sapiens
  misc_RNA (1)...(19): siRNA sense strand
gaccaaggaugagcaguuu

SEQ ID NO: 1174520 - RNA, 19 nt, Homo sapiens
  misc_RNA (1)...(19): siRNA sense strand
aaagaaggaugaagccaaa

SEQ ID NO: 1174521 - RNA, 19 nt, Homo sapiens
  misc_RNA (1)...(19): siRNA sense strand
gacaucaagucacgcauug

SEQ ID NO: 1174522 - RNA, 19 nt, Homo sapiens
  misc_RNA (1)...(19): siRNA sense strand
gaacagccgcguagguuuc

SEQ ID NO: 1174523 - RNA, 19 nt, Homo sapiens
  misc_RNA (1)...(19): siRNA sense strand
cagaugagaccaaggauga

SEQ ID NO: 1174524 - RNA, 19 nt, Homo sapiens
  misc_RNA (1)...(19): siRNA sense strand
gagcagugcguccagaauu

SEQ ID NO: 1174525 - RNA, 19 nt, Homo sapiens
  misc_RNA (1)...(19): siRNA sense strand
ccagcaacgugcagaagaa

SEQ ID NO: 1174526 - RNA, 19 nt, Homo sapiens
  misc_RNA (1)...(19): siRNA sense strand
agaaggaucuccggaccua

SEQ ID NO: 1174527 - RNA, 19 nt, Homo sapiens
  misc_RNA (1)...(19): siRNA sense strand
guggagaccuucccagcaa

SEQ ID NO: 1174528 - RNA, 19 nt, Homo sapiens
  misc_RNA (1)...(19): siRNA sense strand
ggcgcaagcugguggacua

SEQ ID NO: 1174529 - RNA, 19 nt, Homo sapiens
  misc_RNA (1)...(19): siRNA sense strand
gaccugcuguggauggauu

SEQ ID NO: 1174530 - RNA, 19 nt, Homo sapiens
  misc_RNA (1)...(19): siRNA sense strand
gaagguguuugaggagaug

SEQ ID NO: 1174531 - RNA, 19 nt, Homo sapiens
  misc_RNA (1)...(19): siRNA sense strand
gcagagaugggcaguaaag

SEQ ID NO: 1174532 - RNA, 19 nt, Homo sapiens
  misc_RNA (1)...(19): siRNA sense strand
cccgagaacuucacugaga

SEQ ID NO: 1174533 - RNA, 19 nt, Homo sapiens
  misc_RNA (1)...(19): siRNA sense strand
gcaagcugguggacuacga

SEQ ID NO: 1174534 - RNA, 19 nt, Homo sapiens
  misc_RNA (1)...(19): siRNA sense strand
ggaacagccgcguagguuu

SEQ ID NO: 1174535 - RNA, 19 nt, Homo sapiens
  misc_RNA (1)...(19): siRNA sense strand
cgggaaagaucgccagcaa

SEQ ID NO: 1174536 - RNA, 19 nt, Homo sapiens
  misc_RNA (1)...(19): siRNA sense strand
ccaaggaugagcaguuuga

SEQ ID NO: 1174537 - RNA, 19 nt, Homo sapiens
  misc_RNA (1)...(19): siRNA sense strand
gcagggaugaggcaaacaa

SEQ ID NO: 1174538 - RNA, 19 nt, Homo sapiens
  misc_RNA (1)...(19): siRNA sense strand
acaacgaccugcuguggau

SEQ ID NO: 1174539 - RNA, 19 nt, Homo sapiens
  misc_RNA (1)...(19): siRNA sense strand
gggaugaggcaaacaagau

SEQ ID NO: 1174540 - RNA, 19 nt, Homo sapiens
  misc_RNA (1)...(19): siRNA sense strand
ugaaggagagcgacuggaa

SEQ ID NO: 1174541 - RNA, 19 nt, Homo sapiens
  misc_RNA (1)...(19): siRNA sense strand
gcaaacaagaucgcagaga

SEQ ID NO: 1174542 - RNA, 19 nt, Homo sapiens
  misc_RNA (1)...(19): siRNA sense strand
cuaccuggccuccgucaaa

SEQ ID NO: 1174543 - RNA, 19 nt, Homo sapiens
  misc_RNA (1)...(19): siRNA sense strand
ucaaccagaaccucaauga

SEQ ID NO: 1174544 - RNA, 19 nt, Homo sapiens
  misc_RNA (1)...(19): siRNA sense strand
cgacaucaagucacgcauu

SEQ ID NO: 1174545 - RNA, 19 nt, Homo sapiens
  misc_RNA (1)...(19): siRNA sense strand
aaccagaaccucaaugaug

SEQ ID NO: 1174546 - RNA, 19 nt, Homo sapiens
  misc_RNA (1)...(19): siRNA sense strand
gcaacaccuucacggucaa

SEQ ID NO: 1174547 - RNA, 19 nt, Homo sapiens
  misc_RNA (1)...(19): siRNA sense strand
accagaaccucaaugaugu

SEQ ID NO: 1174548 - RNA, 19 nt, Homo sapiens
  misc_RNA (1)...(19): siRNA sense strand
aggaggagcucaucaaagc

SEQ ID NO: 1174549 - RNA, 19 nt, Homo sapiens
  misc_RNA (1)...(19): siRNA sense strand
cgaggaggagcucaucaaa

SEQ ID NO: 1174550 - RNA, 19 nt, Homo sapiens
  misc_RNA (1)...(19): siRNA sense strand
agcagugcguccagaauuu

SEQ ID NO: 1174551 - RNA, 19 nt, Homo sapiens
  misc_RNA (1)...(19): siRNA sense strand
ggaaggcagaugagaccaa

SEQ ID NO: 1174552 - RNA, 19 nt, Homo sapiens
  misc_RNA (1)...(19): siRNA sense strand
ucaaagcccagaagguguu

SEQ ID NO: 1174553 - RNA, 19 nt, Homo sapiens
  misc_RNA (1)...(19): siRNA sense strand
gaggaggagcucaucaaag

SEQ ID NO: 1174554 - RNA, 19 nt, Homo sapiens
  misc_RNA (1)...(19): siRNA sense strand
acaaggagaugagcaagcu

SEQ ID NO: 1174555 - RNA, 19 nt, Homo sapiens
  misc_RNA (1)...(19): siRNA sense strand
ggaugaggcaaacaagauc

SEQ ID NO: 1174556 - RNA, 19 nt, Homo sapiens
  misc_RNA (1)...(19): siRNA sense strand
gaaggaugaagccaaaauu

SEQ ID NO: 1174557 - RNA, 19 nt, Homo sapiens
  misc_RNA (1)...(19): siRNA sense strand
ccacuacgagucccuucaa

SEQ ID NO: 1174558 - RNA, 19 nt, Homo sapiens
  misc_RNA (1)...(19): siRNA sense strand
ggauggauuaccaccagaa

SEQ ID NO: 1174559 - RNA, 19 nt, Homo sapiens
  misc_RNA (1)...(19): siRNA sense strand
caaccagaaccucaaugau

SEQ ID NO: 1174560 - RNA, 19 nt, Homo sapiens
  misc_RNA (1)...(19): siRNA sense strand
gcagugcguccagaauuuc

SEQ ID NO: 1174561 - RNA, 19 nt, Homo sapiens
  misc_RNA (1)...(19): siRNA sense strand
caagaucgcagagaacaac

SEQ ID NO: 1174562 - RNA, 19 nt, Homo sapiens
  misc_RNA (1)...(19): siRNA sense strand
agaccaaggaugagcaguu

SEQ ID NO: 1174563 - RNA, 19 nt, Homo sapiens
  misc_RNA (1)...(19): siRNA sense strand
ugacaacgcgccugcaaaa

SEQ ID NO: 1174564 - RNA, 19 nt, Homo sapiens
  misc_RNA (1)...(19): siRNA sense strand
agaagguguuugaggagau

SEQ ID NO: 1174565 - RNA, 19 nt, Homo sapiens
  misc_RNA (1)...(19): siRNA sense strand
cacuacgagucccuucaaa

SEQ ID NO: 1174566 - RNA, 19 nt, Homo sapiens
  misc_RNA (1)...(19): siRNA sense strand
ucaacacguuccagagcau

SEQ ID NO: 1174567 - RNA, 19 nt, Homo sapiens
  misc_RNA (1)...(19): siRNA sense strand
gccagcaacgugcagaaga

SEQ ID NO: 1174568 - RNA, 19 nt, Homo sapiens
  misc_RNA (1)...(19): siRNA sense strand
cguccagaauuucaacaag

SEQ ID NO: 1174569 - RNA, 19 nt, Homo sapiens
  misc_RNA (1)...(19): siRNA sense strand
uccagaauuucaacaagca

SEQ ID NO: 1174570 - RNA, 19 nt, Homo sapiens
  misc_RNA (1)...(19): siRNA sense strand
cuacacggccacugacaca

SEQ ID NO: 1174571 - RNA, 19 nt, Homo sapiens
  misc_RNA (1)...(19): siRNA sense strand
gcucaaccagaaccucaau

SEQ ID NO: 1174572 - RNA, 19 nt, Homo sapiens
  misc_RNA (1)...(19): siRNA sense strand
uggaacagccgcguagguu

SEQ ID NO: 1174573 - RNA, 19 nt, Homo sapiens
  misc_RNA (1)...(19): siRNA sense strand
gcucaucaaagcccagaag

SEQ ID NO: 1174574 - RNA, 19 nt, Homo sapiens
  misc_RNA (1)...(19): siRNA sense strand
caaacaagaucgcagagaa

SEQ ID NO: 1174575 - RNA, 19 nt, Homo sapiens
  misc_RNA (1)...(19): siRNA sense strand
gcucaaggcuggugaugug

SEQ ID NO: 1174576 - RNA, 19 nt, Homo sapiens
  misc_RNA (1)...(19): siRNA sense strand
gaccaaggaugagcaguuu

SEQ ID NO: 1174577 - RNA, 19 nt, Homo sapiens
  misc_RNA (1)...(19): siRNA sense strand
aaagaaggaugaagccaaa

SEQ ID NO: 1174578 - RNA, 19 nt, Homo sapiens
  misc_RNA (1)...(19): siRNA sense strand
gacaucaagucacgcauug

SEQ ID NO: 1174579 - RNA, 19 nt, Homo sapiens
  misc_RNA (1)...(19): siRNA sense strand
gaacagccgcguagguuuc

SEQ ID NO: 1174580 - RNA, 19 nt, Homo sapiens
  misc_RNA (1)...(19): siRNA sense strand
cagaugagaccaaggauga

SEQ ID NO: 1174581 - RNA, 19 nt, Homo sapiens
  misc_RNA (1)...(19): siRNA sense strand
gagcagugcguccagaauu

SEQ ID NO: 1174582 - RNA, 19 nt, Homo sapiens
  misc_RNA (1)...(19): siRNA sense strand
ccagcaacgugcagaagaa

SEQ ID NO: 1174583 - RNA, 19 nt, Homo sapiens
  misc_RNA (1)...(19): siRNA sense strand
agaaggaucuccggaccua

SEQ ID NO: 1174584 - RNA, 19 nt, Homo sapiens
  misc_RNA (1)...(19): siRNA sense strand
guggagaccuucccagcaa

SEQ ID NO: 1174585 - RNA, 19 nt, Homo sapiens
  misc_RNA (1)...(19): siRNA sense strand
ggcgcaagcugguggacua

SEQ ID NO: 1174586 - RNA, 19 nt, Homo sapiens
  misc_RNA (1)...(19): siRNA sense strand
gaccugcuguggauggauu

SEQ ID NO: 1174587 - RNA, 19 nt, Homo sapiens
  misc_RNA (1)...(19): siRNA sense strand
gaagguguuugaggagaug

SEQ ID NO: 1174588 - RNA, 19 nt, Homo sapiens
  misc_RNA (1)...(19): siRNA sense strand
gcagagaugggcaguaaag

SEQ ID NO: 1174589 - RNA, 19 nt, Homo sapiens
  misc_RNA (1)...(19): siRNA sense strand
cccgagaacuucacugaga

SEQ ID NO: 1174590 - RNA, 19 nt, Homo sapiens
  misc_RNA (1)...(19): siRNA sense strand
gcaagcugguggacuacga

SEQ ID NO: 1174591 - RNA, 19 nt, Homo sapiens
  misc_RNA (1)...(19): siRNA sense strand
ggaacagccgcguagguuu

SEQ ID NO: 1174592 - RNA, 19 nt, Homo sapiens
  misc_RNA (1)...(19): siRNA sense strand
cgggaaagaucgccagcaa

SEQ ID NO: 1174593 - RNA, 19 nt, Homo sapiens
  misc_RNA (1)...(19): siRNA sense strand
ccaaggaugagcaguuuga

SEQ ID NO: 1174594 - RNA, 19 nt, Homo sapiens
  misc_RNA (1)...(19): siRNA sense strand
gcagggaugaggcaaacaa

SEQ ID NO: 1174595 - RNA, 19 nt, Homo sapiens
  misc_RNA (1)...(19): siRNA sense strand
acaacgaccugcuguggau

SEQ ID NO: 1174596 - RNA, 19 nt, Homo sapiens
  misc_RNA (1)...(19): siRNA sense strand
gggaugaggcaaacaagau

SEQ ID NO: 1174597 - RNA, 19 nt, Homo sapiens
  misc_RNA (1)...(19): siRNA sense strand
ugaaggagagcgacuggaa

SEQ ID NO: 1174598 - RNA, 19 nt, Homo sapiens
  misc_RNA (1)...(19): siRNA sense strand
gcaaacaagaucgcagaga

SEQ ID NO: 1174599 - RNA, 19 nt, Homo sapiens
  misc_RNA (1)...(19): siRNA sense strand
cuaccuggccuccgucaaa

SEQ ID NO: 1174600 - RNA, 19 nt, Homo sapiens
  misc_RNA (1)...(19): siRNA sense strand
ucaaccagaaccucaauga

SEQ ID NO: 1174601 - RNA, 19 nt, Homo sapiens
  misc_RNA (1)...(19): siRNA sense strand
cgacaucaagucacgcauu

SEQ ID NO: 1174602 - RNA, 19 nt, Homo sapiens
  misc_RNA (1)...(19): siRNA sense strand
aaccagaaccucaaugaug

SEQ ID NO: 1174603 - RNA, 19 nt, Homo sapiens
  misc_RNA (1)...(19): siRNA sense strand
gcaacaccuucacggucaa

SEQ ID NO: 1174604 - RNA, 19 nt, Homo sapiens
  misc_RNA (1)...(19): siRNA sense strand
accagaaccucaaugaugu

SEQ ID NO: 1174605 - RNA, 19 nt, Homo sapiens
  misc_RNA (1)...(19): siRNA sense strand
aggaggagcucaucaaagc

SEQ ID NO: 1174606 - RNA, 19 nt, Homo sapiens
  misc_RNA (1)...(19): siRNA sense strand
cgaggaggagcucaucaaa

SEQ ID NO: 1174607 - RNA, 19 nt, Homo sapiens
  misc_RNA (1)...(19): siRNA sense strand
agcagugcguccagaauuu

SEQ ID NO: 1174608 - RNA, 19 nt, Homo sapiens
  misc_RNA (1)...(19): siRNA sense strand
ggaaggcagaugagaccaa

SEQ ID NO: 1174609 - RNA, 19 nt, Homo sapiens
  misc_RNA (1)...(19): siRNA sense strand
ucaaagcccagaagguguu

SEQ ID NO: 1174610 - RNA, 19 nt, Homo sapiens
  misc_RNA (1)...(19): siRNA sense strand
gaggaggagcucaucaaag

SEQ ID NO: 1174611 - RNA, 19 nt, Homo sapiens
  misc_RNA (1)...(19): siRNA sense strand
acaaggagaugagcaagcu

SEQ ID NO: 1174612 - RNA, 19 nt, Homo sapiens
  misc_RNA (1)...(19): siRNA sense strand
ggaugaggcaaacaagauc

SEQ ID NO: 1174613 - RNA, 19 nt, Homo sapiens
  misc_RNA (1)...(19): siRNA sense strand
gaaggaugaagccaaaauu

SEQ ID NO: 1174614 - RNA, 19 nt, Homo sapiens
  misc_RNA (1)...(19): siRNA sense strand
ccacuacgagucccuucaa

SEQ ID NO: 1174615 - RNA, 19 nt, Homo sapiens
  misc_RNA (1)...(19): siRNA sense strand
ggauggauuaccaccagaa

SEQ ID NO: 1174616 - RNA, 19 nt, Homo sapiens
  misc_RNA (1)...(19): siRNA sense strand
caaccagaaccucaaugau

SEQ ID NO: 1174617 - RNA, 19 nt, Homo sapiens
  misc_RNA (1)...(19): siRNA sense strand
gcagugcguccagaauuuc

SEQ ID NO: 1174618 - RNA, 19 nt, Homo sapiens
  misc_RNA (1)...(19): siRNA sense strand
caagaucgcagagaacaac

SEQ ID NO: 1174619 - RNA, 19 nt, Homo sapiens
  misc_RNA (1)...(19): siRNA sense strand
agaccaaggaugagcaguu

SEQ ID NO: 1174620 - RNA, 19 nt, Homo sapiens
  misc_RNA (1)...(19): siRNA sense strand
ugacaacgcgccugcaaaa

SEQ ID NO: 1174621 - RNA, 19 nt, Homo sapiens
  misc_RNA (1)...(19): siRNA sense strand
agaagguguuugaggagau

SEQ ID NO: 1174622 - RNA, 19 nt, Homo sapiens
  misc_RNA (1)...(19): siRNA sense strand
cacuacgagucccuucaaa

SEQ ID NO: 1174623 - RNA, 19 nt, Homo sapiens
  misc_RNA (1)...(19): siRNA sense strand
ucaacacguuccagagcau

SEQ ID NO: 1174624 - RNA, 19 nt, Homo sapiens
  misc_RNA (1)...(19): siRNA sense strand
gccagcaacgugcagaaga

SEQ ID NO: 1174625 - RNA, 19 nt, Homo sapiens
  misc_RNA (1)...(19): siRNA sense strand
cguccagaauuucaacaag

SEQ ID NO: 1174626 - RNA, 19 nt, Homo sapiens
  misc_RNA (1)...(19): siRNA sense strand
uccagaauuucaacaagca

SEQ ID NO: 1174627 - RNA, 19 nt, Homo sapiens
  misc_RNA (1)...(19): siRNA sense strand
cuacacggccacugacaca

SEQ ID NO: 1174628 - RNA, 19 nt, Homo sapiens
  misc_RNA (1)...(19): siRNA sense strand
gcucaaccagaaccucaau

SEQ ID NO: 1174629 - RNA, 19 nt, Homo sapiens
  misc_RNA (1)...(19): siRNA sense strand
uggaacagccgcguagguu

SEQ ID NO: 1174630 - RNA, 19 nt, Homo sapiens
  misc_RNA (1)...(19): siRNA sense strand
gcucaucaaagcccagaag

SEQ ID NO: 1174631 - RNA, 19 nt, Homo sapiens
  misc_RNA (1)...(19): siRNA sense strand
caaacaagaucgcagagaa

SEQ ID NO: 1174632 - RNA, 19 nt, Homo sapiens
  misc_RNA (1)...(19): siRNA sense strand
gcucaaggcuggugaugug

SEQ ID NO: 1174633 - RNA, 19 nt, Homo sapiens
  misc_RNA (1)...(19): siRNA sense strand
gaccaaggaugagcaguuu

SEQ ID NO: 1174634 - RNA, 19 nt, Homo sapiens
  misc_RNA (1)...(19): siRNA sense strand
aaagaaggaugaagccaaa

SEQ ID NO: 1174635 - RNA, 19 nt, Homo sapiens
  misc_RNA (1)...(19): siRNA sense strand
gacaucaagucacgcauug

SEQ ID NO: 1174636 - RNA, 19 nt, Homo sapiens
  misc_RNA (1)...(19): siRNA sense strand
gaacagccgcguagguuuc

SEQ ID NO: 1174637 - RNA, 19 nt, Homo sapiens
  misc_RNA (1)...(19): siRNA sense strand
cagaugagaccaaggauga

SEQ ID NO: 1174638 - RNA, 19 nt, Homo sapiens
  misc_RNA (1)...(19): siRNA sense strand
gagcagugcguccagaauu

SEQ ID NO: 1174639 - RNA, 19 nt, Homo sapiens
  misc_RNA (1)...(19): siRNA sense strand
ccagcaacgugcagaagaa

SEQ ID NO: 1174640 - RNA, 19 nt, Homo sapiens
  misc_RNA (1)...(19): siRNA sense strand
agaaggaucuccggaccua

SEQ ID NO: 1174641 - RNA, 19 nt, Homo sapiens
  misc_RNA (1)...(19): siRNA sense strand
guggagaccuucccagcaa

SEQ ID NO: 1174642 - RNA, 19 nt, Homo sapiens
  misc_RNA (1)...(19): siRNA sense strand
ggcgcaagcugguggacua

SEQ ID NO: 1174643 - RNA, 19 nt, Homo sapiens
  misc_RNA (1)...(19): siRNA sense strand
gaccugcuguggauggauu

SEQ ID NO: 1174644 - RNA, 19 nt, Homo sapiens
  misc_RNA (1)...(19): siRNA sense strand
gaagguguuugaggagaug

SEQ ID NO: 1174645 - RNA, 19 nt, Homo sapiens
  misc_RNA (1)...(19): siRNA sense strand
gcagagaugggcaguaaag

SEQ ID NO: 1174646 - RNA, 19 nt, Homo sapiens
  misc_RNA (1)...(19): siRNA sense strand
cccgagaacuucacugaga

SEQ ID NO: 1174647 - RNA, 19 nt, Homo sapiens
  misc_RNA (1)...(19): siRNA sense strand
gcaagcugguggacuacga

SEQ ID NO: 1174648 - RNA, 19 nt, Homo sapiens
  misc_RNA (1)...(19): siRNA sense strand
ggaacagccgcguagguuu

SEQ ID NO: 1174649 - RNA, 19 nt, Homo sapiens
  misc_RNA (1)...(19): siRNA sense strand
cgggaaagaucgccagcaa

SEQ ID NO: 1174650 - RNA, 19 nt, Homo sapiens
  misc_RNA (1)...(19): siRNA sense strand
ccaaggaugagcaguuuga

SEQ ID NO: 1174651 - RNA, 19 nt, Homo sapiens
  misc_RNA (1)...(19): siRNA sense strand
gcagggaugaggcaaacaa

SEQ ID NO: 1174652 - RNA, 19 nt, Homo sapiens
  misc_RNA (1)...(19): siRNA sense strand
acaacgaccugcuguggau

SEQ ID NO: 1174653 - RNA, 19 nt, Homo sapiens
  misc_RNA (1)...(19): siRNA sense strand
gggaugaggcaaacaagau

SEQ ID NO: 1174654 - RNA, 19 nt, Homo sapiens
  misc_RNA (1)...(19): siRNA sense strand
ugaaggagagcgacuggaa

SEQ ID NO: 1174655 - RNA, 19 nt, Homo sapiens
  misc_RNA (1)...(19): siRNA sense strand
gcaaacaagaucgcagaga

SEQ ID NO: 1174656 - RNA, 19 nt, Homo sapiens
  misc_RNA (1)...(19): siRNA sense strand
cuaccuggccuccgucaaa

SEQ ID NO: 1174657 - RNA, 19 nt, Homo sapiens
  misc_RNA (1)...(19): siRNA sense strand
ucaaccagaaccucaauga

SEQ ID NO: 1174658 - RNA, 19 nt, Homo sapiens
  misc_RNA (1)...(19): siRNA sense strand
cgacaucaagucacgcauu

SEQ ID NO: 1174659 - RNA, 19 nt, Homo sapiens
  misc_RNA (1)...(19): siRNA sense strand
aaccagaaccucaaugaug

SEQ ID NO: 1174660 - RNA, 19 nt, Homo sapiens
  misc_RNA (1)...(19): siRNA sense strand
gcaacaccuucacggucaa

SEQ ID NO: 1174661 - RNA, 19 nt, Homo sapiens
  misc_RNA (1)...(19): siRNA sense strand
accagaaccucaaugaugu

SEQ ID NO: 1174662 - RNA, 19 nt, Homo sapiens
  misc_RNA (1)...(19): siRNA sense strand
aggaggagcucaucaaagc

SEQ ID NO: 1174663 - RNA, 19 nt, Homo sapiens
  misc_RNA (1)...(19): siRNA sense strand
cgaggaggagcucaucaaa

SEQ ID NO: 1174664 - RNA, 19 nt, Homo sapiens
  misc_RNA (1)...(19): siRNA sense strand
agcagugcguccagaauuu

SEQ ID NO: 1174665 - RNA, 19 nt, Homo sapiens
  misc_RNA (1)...(19): siRNA sense strand
ggaaggcagaugagaccaa

SEQ ID NO: 1174666 - RNA, 19 nt, Homo sapiens
  misc_RNA (1)...(19): siRNA sense strand
ucaaagcccagaagguguu

SEQ ID NO: 1174667 - RNA, 19 nt, Homo sapiens
  misc_RNA (1)...(19): siRNA sense strand
gaggaggagcucaucaaag

SEQ ID NO: 1174668 - RNA, 19 nt, Homo sapiens
  misc_RNA (1)...(19): siRNA sense strand
acaaggagaugagcaagcu

SEQ ID NO: 1174669 - RNA, 19 nt, Homo sapiens
  misc_RNA (1)...(19): siRNA sense strand
ggaugaggcaaacaagauc

SEQ ID NO: 1174670 - RNA, 19 nt, Homo sapiens
  misc_RNA (1)...(19): siRNA sense strand
gaaggaugaagccaaaauu

SEQ ID NO: 1174671 - RNA, 19 nt, Homo sapiens
  misc_RNA (1)...(19): siRNA sense strand
ccacuacgagucccuucaa

SEQ ID NO: 1174672 - RNA, 19 nt, Homo sapiens
  misc_RNA (1)...(19): siRNA sense strand
ggauggauuaccaccagaa

SEQ ID NO: 1174673 - RNA, 19 nt, Homo sapiens
  misc_RNA (1)...(19): siRNA sense strand
caaccagaaccucaaugau

SEQ ID NO: 1174674 - RNA, 19 nt, Homo sapiens
  misc_RNA (1)...(19): siRNA sense strand
gcagugcguccagaauuuc

SEQ ID NO: 1174675 - RNA, 19 nt, Homo sapiens
  misc_RNA (1)...(19): siRNA sense strand
caagaucgcagagaacaac

SEQ ID NO: 1174676 - RNA, 19 nt, Homo sapiens
  misc_RNA (1)...(19): siRNA sense strand
agaccaaggaugagcaguu

SEQ ID NO: 1174677 - RNA, 19 nt, Homo sapiens
  misc_RNA (1)...(19): siRNA sense strand
ugacaacgcgccugcaaaa

SEQ ID NO: 1174678 - RNA, 19 nt, Homo sapiens
  misc_RNA (1)...(19): siRNA sense strand
agaagguguuugaggagau

SEQ ID NO: 1174679 - RNA, 19 nt, Homo sapiens
  misc_RNA (1)...(19): siRNA sense strand
cacuacgagucccuucaaa

SEQ ID NO: 1174680 - RNA, 19 nt, Homo sapiens
  misc_RNA (1)...(19): siRNA sense strand
ucaacacguuccagagcau

SEQ ID NO: 1174681 - RNA, 19 nt, Homo sapiens
  misc_RNA (1)...(19): siRNA sense strand
gccagcaacgugcagaaga

SEQ ID NO: 1174682 - RNA, 19 nt, Homo sapiens
  misc_RNA (1)...(19): siRNA sense strand
cguccagaauuucaacaag

SEQ ID NO: 1174683 - RNA, 19 nt, Homo sapiens
  misc_RNA (1)...(19): siRNA sense strand
uccagaauuucaacaagca

SEQ ID NO: 1174684 - RNA, 19 nt, Homo sapiens
  misc_RNA (1)...(19): siRNA sense strand
cuacacggccacugacaca

SEQ ID NO: 1174685 - RNA, 19 nt, Homo sapiens
  misc_RNA (1)...(19): siRNA sense strand
gcucaaccagaaccucaau

SEQ ID NO: 1174686 - RNA, 19 nt, Homo sapiens
  misc_RNA (1)...(19): siRNA sense strand
uggaacagccgcguagguu

SEQ ID NO: 1174687 - RNA, 19 nt, Homo sapiens
  misc_RNA (1)...(19): siRNA sense strand
gcucaucaaagcccagaag

SEQ ID NO: 1174688 - RNA, 19 nt, Homo sapiens
  misc_RNA (1)...(19): siRNA sense strand
caaacaagaucgcagagaa

SEQ ID NO: 1174689 - RNA, 19 nt, Homo sapiens
  misc_RNA (1)...(19): siRNA sense strand
gcucaaggcuggugaugug

SEQ ID NO: 1174690 - RNA, 19 nt, Homo sapiens
  misc_RNA (1)...(19): siRNA sense strand
gaccaaggaugagcaguuu

SEQ ID NO: 1174691 - RNA, 19 nt, Homo sapiens
  misc_RNA (1)...(19): siRNA sense strand
aaagaaggaugaagccaaa

SEQ ID NO: 1174692 - RNA, 19 nt, Homo sapiens
  misc_RNA (1)...(19): siRNA sense strand
gacaucaagucacgcauug

SEQ ID NO: 1174693 - RNA, 19 nt, Homo sapiens
  misc_RNA (1)...(19): siRNA sense strand
gaacagccgcguagguuuc

SEQ ID NO: 1174694 - RNA, 19 nt, Homo sapiens
  misc_RNA (1)...(19): siRNA sense strand
cagaugagaccaaggauga

SEQ ID NO: 1174695 - RNA, 19 nt, Homo sapiens
  misc_RNA (1)...(19): siRNA sense strand
gagcagugcguccagaauu

SEQ ID NO: 1174696 - RNA, 19 nt, Homo sapiens
  misc_RNA (1)...(19): siRNA sense strand
ccagcaacgugcagaagaa

SEQ ID NO: 1174697 - RNA, 19 nt, Homo sapiens
  misc_RNA (1)...(19): siRNA sense strand
agaaggaucuccggaccua

SEQ ID NO: 1174698 - RNA, 19 nt, Homo sapiens
  misc_RNA (1)...(19): siRNA sense strand
guggagaccuucccagcaa

SEQ ID NO: 1174699 - RNA, 19 nt, Homo sapiens
  misc_RNA (1)...(19): siRNA sense strand
ggcgcaagcugguggacua

SEQ ID NO: 1174700 - RNA, 19 nt, Homo sapiens
  misc_RNA (1)...(19): siRNA sense strand
gaccugcuguggauggauu

SEQ ID NO: 1174701 - RNA, 19 nt, Homo sapiens
  misc_RNA (1)...(19): siRNA sense strand
gaagguguuugaggagaug

SEQ ID NO: 1174702 - RNA, 19 nt, Homo sapiens
  misc_RNA (1)...(19): siRNA sense strand
gcagagaugggcaguaaag

SEQ ID NO: 1174703 - RNA, 19 nt, Homo sapiens
  misc_RNA (1)...(19): siRNA sense strand
cccgagaacuucacugaga

SEQ ID NO: 1174704 - RNA, 19 nt, Homo sapiens
  misc_RNA (1)...(19): siRNA sense strand
gcaagcugguggacuacga

SEQ ID NO: 1174705 - RNA, 19 nt, Homo sapiens
  misc_RNA (1)...(19): siRNA sense strand
ggaacagccgcguagguuu

SEQ ID NO: 1174706 - RNA, 19 nt, Homo sapiens
  misc_RNA (1)...(19): siRNA sense strand
cgggaaagaucgccagcaa

SEQ ID NO: 1174707 - RNA, 19 nt, Homo sapiens
  misc_RNA (1)...(19): siRNA sense strand
ccaaggaugagcaguuuga

SEQ ID NO: 1174708 - RNA, 19 nt, Homo sapiens
  misc_RNA (1)...(19): siRNA sense strand
gcagggaugaggcaaacaa

SEQ ID NO: 1174709 - RNA, 19 nt, Homo sapiens
  misc_RNA (1)...(19): siRNA sense strand
acaacgaccugcuguggau

SEQ ID NO: 1174710 - RNA, 19 nt, Homo sapiens
  misc_RNA (1)...(19): siRNA sense strand
gggaugaggcaaacaagau

SEQ ID NO: 1174711 - RNA, 19 nt, Homo sapiens
  misc_RNA (1)...(19): siRNA sense strand
ugaaggagagcgacuggaa

SEQ ID NO: 1174712 - RNA, 19 nt, Homo sapiens
  misc_RNA (1)...(19): siRNA sense strand
gcaaacaagaucgcagaga

SEQ ID NO: 1174713 - RNA, 19 nt, Homo sapiens
  misc_RNA (1)...(19): siRNA sense strand
cuaccuggccuccgucaaa

SEQ ID NO: 1174714 - RNA, 19 nt, Homo sapiens
  misc_RNA (1)...(19): siRNA sense strand
ucaaccagaaccucaauga

SEQ ID NO: 1174715 - RNA, 19 nt, Homo sapiens
  misc_RNA (1)...(19): siRNA sense strand
cgacaucaagucacgcauu

SEQ ID NO: 1174716 - RNA, 19 nt, Homo sapiens
  misc_RNA (1)...(19): siRNA sense strand
aaccagaaccucaaugaug

SEQ ID NO: 1174717 - RNA, 19 nt, Homo sapiens
  misc_RNA (1)...(19): siRNA sense strand
gcaacaccuucacggucaa

SEQ ID NO: 1174718 - RNA, 19 nt, Homo sapiens
  misc_RNA (1)...(19): siRNA sense strand
accagaaccucaaugaugu

SEQ ID NO: 1174719 - RNA, 19 nt, Homo sapiens
  misc_RNA (1)...(19): siRNA sense strand
aggaggagcucaucaaagc

SEQ ID NO: 1174720 - RNA, 19 nt, Homo sapiens
  misc_RNA (1)...(19): siRNA sense strand
cgaggaggagcucaucaaa

SEQ ID NO: 1174721 - RNA, 19 nt, Homo sapiens
  misc_RNA (1)...(19): siRNA sense strand
agcagugcguccagaauuu

SEQ ID NO: 1174722 - RNA, 19 nt, Homo sapiens
  misc_RNA (1)...(19): siRNA sense strand
ggaaggcagaugagaccaa

SEQ ID NO: 1174723 - RNA, 19 nt, Homo sapiens
  misc_RNA (1)...(19): siRNA sense strand
ucaaagcccagaagguguu

SEQ ID NO: 1174724 - RNA, 19 nt, Homo sapiens
  misc_RNA (1)...(19): siRNA sense strand
gaggaggagcucaucaaag

SEQ ID NO: 1174725 - RNA, 19 nt, Homo sapiens
  misc_RNA (1)...(19): siRNA sense strand
acaaggagaugagcaagcu

SEQ ID NO: 1174726 - RNA, 19 nt, Homo sapiens
  misc_RNA (1)...(19): siRNA sense strand
ggaugaggcaaacaagauc

SEQ ID NO: 1174727 - RNA, 19 nt, Homo sapiens
  misc_RNA (1)...(19): siRNA sense strand
gaaggaugaagccaaaauu

SEQ ID NO: 1174728 - RNA, 19 nt, Homo sapiens
  misc_RNA (1)...(19): siRNA sense strand
ccacuacgagucccuucaa

SEQ ID NO: 1174729 - RNA, 19 nt, Homo sapiens
  misc_RNA (1)...(19): siRNA sense strand
ggauggauuaccaccagaa

SEQ ID NO: 1174730 - RNA, 19 nt, Homo sapiens
  misc_RNA (1)...(19): siRNA sense strand
caaccagaaccucaaugau

SEQ ID NO: 1174731 - RNA, 19 nt, Homo sapiens
  misc_RNA (1)...(19): siRNA sense strand
gcagugcguccagaauuuc

SEQ ID NO: 1174732 - RNA, 19 nt, Homo sapiens
  misc_RNA (1)...(19): siRNA sense strand
caagaucgcagagaacaac

SEQ ID NO: 1174733 - RNA, 19 nt, Homo sapiens
  misc_RNA (1)...(19): siRNA sense strand
agaccaaggaugagcaguu

SEQ ID NO: 1174734 - RNA, 19 nt, Homo sapiens
  misc_RNA (1)...(19): siRNA sense strand
ugacaacgcgccugcaaaa

SEQ ID NO: 1174735 - RNA, 19 nt, Homo sapiens
  misc_RNA (1)...(19): siRNA sense strand
agaagguguuugaggagau

SEQ ID NO: 1174736 - RNA, 19 nt, Homo sapiens
  misc_RNA (1)...(19): siRNA sense strand
cacuacgagucccuucaaa

SEQ ID NO: 1174737 - RNA, 19 nt, Homo sapiens
  misc_RNA (1)...(19): siRNA sense strand
ucaacacguuccagagcau

SEQ ID NO: 1174738 - RNA, 19 nt, Homo sapiens
  misc_RNA (1)...(19): siRNA sense strand
gccagcaacgugcagaaga

SEQ ID NO: 1174739 - RNA, 19 nt, Homo sapiens
  misc_RNA (1)...(19): siRNA sense strand
cguccagaauuucaacaag

SEQ ID NO: 1174740 - RNA, 19 nt, Homo sapiens
  misc_RNA (1)...(19): siRNA sense strand
uccagaauuucaacaagca

SEQ ID NO: 1174741 - RNA, 19 nt, Homo sapiens
  misc_RNA (1)...(19): siRNA sense strand
cuacacggccacugacaca

SEQ ID NO: 1174742 - RNA, 19 nt, Homo sapiens
  misc_RNA (1)...(19): siRNA sense strand
gcucaaccagaaccucaau

SEQ ID NO: 1174743 - RNA, 19 nt, Homo sapiens
  misc_RNA (1)...(19): siRNA sense strand
uggaacagccgcguagguu

SEQ ID NO: 1174744 - RNA, 19 nt, Homo sapiens
  misc_RNA (1)...(19): siRNA sense strand
gcucaucaaagcccagaag

SEQ ID NO: 1174745 - RNA, 19 nt, Homo sapiens
  misc_RNA (1)...(19): siRNA sense strand
caaacaagaucgcagagaa

SEQ ID NO: 1174746 - RNA, 19 nt, Homo sapiens
  misc_RNA (1)...(19): siRNA sense strand
gcucaaggcuggugaugug

SEQ ID NO: 1174747 - RNA, 19 nt, Homo sapiens
  misc_RNA (1)...(19): siRNA sense strand
gaccaaggaugagcaguuu

SEQ ID NO: 1174748 - RNA, 19 nt, Homo sapiens
  misc_RNA (1)...(19): siRNA sense strand
aaagaaggaugaagccaaa

SEQ ID NO: 1174749 - RNA, 19 nt, Homo sapiens
  misc_RNA (1)...(19): siRNA sense strand
gacaucaagucacgcauug

SEQ ID NO: 1174750 - RNA, 19 nt, Homo sapiens
  misc_RNA (1)...(19): siRNA sense strand
gaacagccgcguagguuuc

SEQ ID NO: 1174751 - RNA, 19 nt, Homo sapiens
  misc_RNA (1)...(19): siRNA sense strand
cagaugagaccaaggauga

SEQ ID NO: 1174752 - RNA, 19 nt, Homo sapiens
  misc_RNA (1)...(19): siRNA sense strand
gagcagugcguccagaauu

SEQ ID NO: 1174753 - RNA, 19 nt, Homo sapiens
  misc_RNA (1)...(19): siRNA sense strand
ccagcaacgugcagaagaa

SEQ ID NO: 1174754 - RNA, 19 nt, Homo sapiens
  misc_RNA (1)...(19): siRNA sense strand
agaaggaucuccggaccua

SEQ ID NO: 1174755 - RNA, 19 nt, Homo sapiens
  misc_RNA (1)...(19): siRNA sense strand
guggagaccuucccagcaa

SEQ ID NO: 1174756 - RNA, 19 nt, Homo sapiens
  misc_RNA (1)...(19): siRNA sense strand
ggcgcaagcugguggacua

SEQ ID NO: 1174757 - RNA, 19 nt, Homo sapiens
  misc_RNA (1)...(19): siRNA sense strand
gaccugcuguggauggauu

SEQ ID NO: 1174758 - RNA, 19 nt, Homo sapiens
  misc_RNA (1)...(19): siRNA sense strand
gaagguguuugaggagaug

SEQ ID NO: 1174759 - RNA, 19 nt, Homo sapiens
  misc_RNA (1)...(19): siRNA sense strand
gcagagaugggcaguaaag

SEQ ID NO: 1174760 - RNA, 19 nt, Homo sapiens
  misc_RNA (1)...(19): siRNA sense strand
cccgagaacuucacugaga

SEQ ID NO: 1174761 - RNA, 19 nt, Homo sapiens
  misc_RNA (1)...(19): siRNA sense strand
gcaagcugguggacuacga

SEQ ID NO: 1174762 - RNA, 19 nt, Homo sapiens
  misc_RNA (1)...(19): siRNA sense strand
ggaacagccgcguagguuu

SEQ ID NO: 1174763 - RNA, 19 nt, Homo sapiens
  misc_RNA (1)...(19): siRNA sense strand
cgggaaagaucgccagcaa

SEQ ID NO: 1174764 - RNA, 19 nt, Homo sapiens
  misc_RNA (1)...(19): siRNA sense strand
ccaaggaugagcaguuuga

SEQ ID NO: 1174765 - RNA, 19 nt, Homo sapiens
  misc_RNA (1)...(19): siRNA sense strand
gcagggaugaggcaaacaa

SEQ ID NO: 1174766 - RNA, 19 nt, Homo sapiens
  misc_RNA (1)...(19): siRNA sense strand
acaacgaccugcuguggau

SEQ ID NO: 1174767 - RNA, 19 nt, Homo sapiens
  misc_RNA (1)...(19): siRNA sense strand
gggaugaggcaaacaagau

SEQ ID NO: 1174768 - RNA, 19 nt, Homo sapiens
  misc_RNA (1)...(19): siRNA sense strand
ugaaggagagcgacuggaa

SEQ ID NO: 1174769 - RNA, 19 nt, Homo sapiens
  misc_RNA (1)...(19): siRNA sense strand
gcaaacaagaucgcagaga

SEQ ID NO: 1174770 - RNA, 19 nt, Homo sapiens
  misc_RNA (1)...(19): siRNA sense strand
cuaccuggccuccgucaaa

SEQ ID NO: 1174771 - RNA, 19 nt, Homo sapiens
  misc_RNA (1)...(19): siRNA sense strand
ucaaccagaaccucaauga

SEQ ID NO: 1174772 - RNA, 19 nt, Homo sapiens
  misc_RNA (1)...(19): siRNA sense strand
cgacaucaagucacgcauu

SEQ ID NO: 1174773 - RNA, 19 nt, Homo sapiens
  misc_RNA (1)...(19): siRNA sense strand
aaccagaaccucaaugaug

SEQ ID NO: 1174774 - RNA, 19 nt, Homo sapiens
  misc_RNA (1)...(19): siRNA sense strand
gcaacaccuucacggucaa

SEQ ID NO: 1174775 - RNA, 19 nt, Homo sapiens
  misc_RNA (1)...(19): siRNA sense strand
accagaaccucaaugaugu

SEQ ID NO: 1174776 - RNA, 19 nt, Homo sapiens
  misc_RNA (1)...(19): siRNA sense strand
aggaggagcucaucaaagc

SEQ ID NO: 1174777 - RNA, 19 nt, Homo sapiens
  misc_RNA (1)...(19): siRNA sense strand
cgaggaggagcucaucaaa

SEQ ID NO: 1174778 - RNA, 19 nt, Homo sapiens
  misc_RNA (1)...(19): siRNA sense strand
agcagugcguccagaauuu

SEQ ID NO: 1174779 - RNA, 19 nt, Homo sapiens
  misc_RNA (1)...(19): siRNA sense strand
ggaaggcagaugagaccaa

SEQ ID NO: 1174780 - RNA, 19 nt, Homo sapiens
  misc_RNA (1)...(19): siRNA sense strand
ucaaagcccagaagguguu

SEQ ID NO: 1174781 - RNA, 19 nt, Homo sapiens
  misc_RNA (1)...(19): siRNA sense strand
gaggaggagcucaucaaag

SEQ ID NO: 1174782 - RNA, 19 nt, Homo sapiens
  misc_RNA (1)...(19): siRNA sense strand
acaaggagaugagcaagcu

SEQ ID NO: 1174783 - RNA, 19 nt, Homo sapiens
  misc_RNA (1)...(19): siRNA sense strand
ggaugaggcaaacaagauc

SEQ ID NO: 1174784 - RNA, 19 nt, Homo sapiens
  misc_RNA (1)...(19): siRNA sense strand
gaaggaugaagccaaaauu

SEQ ID NO: 1174785 - RNA, 19 nt, Homo sapiens
  misc_RNA (1)...(19): siRNA sense strand
ccacuacgagucccuucaa

SEQ ID NO: 1174786 - RNA, 19 nt, Homo sapiens
  misc_RNA (1)...(19): siRNA sense strand
ggauggauuaccaccagaa

SEQ ID NO: 1174787 - RNA, 19 nt, Homo sapiens
  misc_RNA (1)...(19): siRNA sense strand
caaccagaaccucaaugau

SEQ ID NO: 1174788 - RNA, 19 nt, Homo sapiens
  misc_RNA (1)...(19): siRNA sense strand
gcagugcguccagaauuuc

SEQ ID NO: 1174789 - RNA, 19 nt, Homo sapiens
  misc_RNA (1)...(19): siRNA sense strand
caagaucgcagagaacaac

SEQ ID NO: 1174790 - RNA, 19 nt, Homo sapiens
  misc_RNA (1)...(19): siRNA sense strand
agaccaaggaugagcaguu

SEQ ID NO: 1174791 - RNA, 19 nt, Homo sapiens
  misc_RNA (1)...(19): siRNA sense strand
ugacaacgcgccugcaaaa

SEQ ID NO: 1174792 - RNA, 19 nt, Homo sapiens
  misc_RNA (1)...(19): siRNA sense strand
agaagguguuugaggagau

SEQ ID NO: 1174793 - RNA, 19 nt, Homo sapiens
  misc_RNA (1)...(19): siRNA sense strand
cacuacgagucccuucaaa

SEQ ID NO: 1174794 - RNA, 19 nt, Homo sapiens
  misc_RNA (1)...(19): siRNA sense strand
ucaacacguuccagagcau

SEQ ID NO: 1174795 - RNA, 19 nt, Homo sapiens
  misc_RNA (1)...(19): siRNA sense strand
gccagcaacgugcagaaga

SEQ ID NO: 1174796 - RNA, 19 nt, Homo sapiens
  misc_RNA (1)...(19): siRNA sense strand
cguccagaauuucaacaag

SEQ ID NO: 1174797 - RNA, 19 nt, Homo sapiens
  misc_RNA (1)...(19): siRNA sense strand
uccagaauuucaacaagca

SEQ ID NO: 1174798 - RNA, 19 nt, Homo sapiens
  misc_RNA (1)...(19): siRNA sense strand
cuacacggccacugacaca

SEQ ID NO: 1174799 - RNA, 19 nt, Homo sapiens
  misc_RNA (1)...(19): siRNA sense strand
gcucaaccagaaccucaau

SEQ ID NO: 1174800 - RNA, 19 nt, Homo sapiens
  misc_RNA (1)...(19): siRNA sense strand
uggaacagccgcguagguu

SEQ ID NO: 1174801 - RNA, 19 nt, Homo sapiens
  misc_RNA (1)...(19): siRNA sense strand
gcucaucaaagcccagaag

SEQ ID NO: 1174802 - RNA, 19 nt, Homo sapiens
  misc_RNA (1)...(19): siRNA sense strand
caaacaagaucgcagagaa

SEQ ID NO: 1174803 - RNA, 19 nt, Homo sapiens
  misc_RNA (1)...(19): siRNA sense strand
gcucaaggcuggugaugug

SEQ ID NO: 1174804 - RNA, 19 nt, Homo sapiens
  misc_RNA (1)...(19): siRNA sense strand
gaccaaggaugagcaguuu

SEQ ID NO: 1174805 - RNA, 19 nt, Homo sapiens
  misc_RNA (1)...(19): siRNA sense strand
aaagaaggaugaagccaaa

SEQ ID NO: 1174806 - RNA, 19 nt, Homo sapiens
  misc_RNA (1)...(19): siRNA sense strand
gacaucaagucacgcauug

SEQ ID NO: 1174807 - RNA, 19 nt, Homo sapiens
  misc_RNA (1)...(19): siRNA sense strand
gaacagccgcguagguuuc

SEQ ID NO: 1174808 - RNA, 19 nt, Homo sapiens
  misc_RNA (1)...(19): siRNA sense strand
cagaugagaccaaggauga

SEQ ID NO: 1174809 - RNA, 19 nt, Homo sapiens
  misc_RNA (1)...(19): siRNA sense strand
gagcagugcguccagaauu

SEQ ID NO: 1174810 - RNA, 19 nt, Homo sapiens
  misc_RNA (1)...(19): siRNA sense strand
ccagcaacgugcagaagaa

SEQ ID NO: 1174811 - RNA, 19 nt, Homo sapiens
  misc_RNA (1)...(19): siRNA sense strand
agaaggaucuccggaccua

SEQ ID NO: 1174812 - RNA, 19 nt, Homo sapiens
  misc_RNA (1)...(19): siRNA sense strand
guggagaccuucccagcaa

SEQ ID NO: 1174813 - RNA, 19 nt, Homo sapiens
  misc_RNA (1)...(19): siRNA sense strand
ggcgcaagcugguggacua

SEQ ID NO: 1174814 - RNA, 19 nt, Homo sapiens
  misc_RNA (1)...(19): siRNA sense strand
gaccugcuguggauggauu

SEQ ID NO: 1174815 - RNA, 19 nt, Homo sapiens
  misc_RNA (1)...(19): siRNA sense strand
gaagguguuugaggagaug

SEQ ID NO: 1174816 - RNA, 19 nt, Homo sapiens
  misc_RNA (1)...(19): siRNA sense strand
gcagagaugggcaguaaag

SEQ ID NO: 1174817 - RNA, 19 nt, Homo sapiens
  misc_RNA (1)...(19): siRNA sense strand
cccgagaacuucacugaga

SEQ ID NO: 1174818 - RNA, 19 nt, Homo sapiens
  misc_RNA (1)...(19): siRNA sense strand
gcaagcugguggacuacga

SEQ ID NO: 1174819 - RNA, 19 nt, Homo sapiens
  misc_RNA (1)...(19): siRNA sense strand
ggaacagccgcguagguuu

SEQ ID NO: 1174820 - RNA, 19 nt, Homo sapiens
  misc_RNA (1)...(19): siRNA sense strand
cgggaaagaucgccagcaa

SEQ ID NO: 1174821 - RNA, 19 nt, Homo sapiens
  misc_RNA (1)...(19): siRNA sense strand
ccaaggaugagcaguuuga

SEQ ID NO: 1174822 - RNA, 19 nt, Homo sapiens
  misc_RNA (1)...(19): siRNA sense strand
gcagggaugaggcaaacaa

SEQ ID NO: 1174823 - RNA, 19 nt, Homo sapiens
  misc_RNA (1)...(19): siRNA sense strand
acaacgaccugcuguggau

SEQ ID NO: 1174824 - RNA, 19 nt, Homo sapiens
  misc_RNA (1)...(19): siRNA sense strand
gggaugaggcaaacaagau

SEQ ID NO: 1174825 - RNA, 19 nt, Homo sapiens
  misc_RNA (1)...(19): siRNA sense strand
ugaaggagagcgacuggaa

SEQ ID NO: 1174826 - RNA, 19 nt, Homo sapiens
  misc_RNA (1)...(19): siRNA sense strand
gcaaacaagaucgcagaga

SEQ ID NO: 1174827 - RNA, 19 nt, Homo sapiens
  misc_RNA (1)...(19): siRNA sense strand
cuaccuggccuccgucaaa

SEQ ID NO: 1174828 - RNA, 19 nt, Homo sapiens
  misc_RNA (1)...(19): siRNA sense strand
ucaaccagaaccucaauga

SEQ ID NO: 1174829 - RNA, 19 nt, Homo sapiens
  misc_RNA (1)...(19): siRNA sense strand
cgacaucaagucacgcauu

SEQ ID NO: 1174830 - RNA, 19 nt, Homo sapiens
  misc_RNA (1)...(19): siRNA sense strand
aaccagaaccucaaugaug

SEQ ID NO: 1174831 - RNA, 19 nt, Homo sapiens
  misc_RNA (1)...(19): siRNA sense strand
gcaacaccuucacggucaa

SEQ ID NO: 1174832 - RNA, 19 nt, Homo sapiens
  misc_RNA (1)...(19): siRNA sense strand
accagaaccucaaugaugu

SEQ ID NO: 1174833 - RNA, 19 nt, Homo sapiens
  misc_RNA (1)...(19): siRNA sense strand
aggaggagcucaucaaagc

SEQ ID NO: 1174834 - RNA, 19 nt, Homo sapiens
  misc_RNA (1)...(19): siRNA sense strand
cgaggaggagcucaucaaa

SEQ ID NO: 1174835 - RNA, 19 nt, Homo sapiens
  misc_RNA (1)...(19): siRNA sense strand
agcagugcguccagaauuu

SEQ ID NO: 1174836 - RNA, 19 nt, Homo sapiens
  misc_RNA (1)...(19): siRNA sense strand
ggaaggcagaugagaccaa

SEQ ID NO: 1174837 - RNA, 19 nt, Homo sapiens
  misc_RNA (1)...(19): siRNA sense strand
ucaaagcccagaagguguu

SEQ ID NO: 1174838 - RNA, 19 nt, Homo sapiens
  misc_RNA (1)...(19): siRNA sense strand
gaggaggagcucaucaaag

SEQ ID NO: 1174839 - RNA, 19 nt, Homo sapiens
  misc_RNA (1)...(19): siRNA sense strand
acaaggagaugagcaagcu

SEQ ID NO: 1174840 - RNA, 19 nt, Homo sapiens
  misc_RNA (1)...(19): siRNA sense strand
ggaugaggcaaacaagauc

SEQ ID NO: 1174841 - RNA, 19 nt, Homo sapiens
  misc_RNA (1)...(19): siRNA sense strand
gaaggaugaagccaaaauu

SEQ ID NO: 1174842 - RNA, 19 nt, Homo sapiens
  misc_RNA (1)...(19): siRNA sense strand
ccacuacgagucccuucaa

SEQ ID NO: 1174843 - RNA, 19 nt, Homo sapiens
  misc_RNA (1)...(19): siRNA sense strand
ggauggauuaccaccagaa

SEQ ID NO: 1174844 - RNA, 19 nt, Homo sapiens
  misc_RNA (1)...(19): siRNA sense strand
caaccagaaccucaaugau

SEQ ID NO: 1174845 - RNA, 19 nt, Homo sapiens
  misc_RNA (1)...(19): siRNA sense strand
gcagugcguccagaauuuc

SEQ ID NO: 1174846 - RNA, 19 nt, Homo sapiens
  misc_RNA (1)...(19): siRNA sense strand
caagaucgcagagaacaac

SEQ ID NO: 1174847 - RNA, 19 nt, Homo sapiens
  misc_RNA (1)...(19): siRNA sense strand
agaccaaggaugagcaguu

SEQ ID NO: 1174848 - RNA, 19 nt, Homo sapiens
  misc_RNA (1)...(19): siRNA sense strand
ugacaacgcgccugcaaaa

SEQ ID NO: 1174849 - RNA, 19 nt, Homo sapiens
  misc_RNA (1)...(19): siRNA sense strand
agaagguguuugaggagau

SEQ ID NO: 1174850 - RNA, 19 nt, Homo sapiens
  misc_RNA (1)...(19): siRNA sense strand
cacuacgagucccuucaaa

SEQ ID NO: 1174851 - RNA, 19 nt, Homo sapiens
  misc_RNA (1)...(19): siRNA sense strand
ucaacacguuccagagcau

SEQ ID NO: 1174852 - RNA, 19 nt, Homo sapiens
  misc_RNA (1)...(19): siRNA sense strand
gccagcaacgugcagaaga

SEQ ID NO: 1174853 - RNA, 19 nt, Homo sapiens
  misc_RNA (1)...(19): siRNA sense strand
cguccagaauuucaacaag

SEQ ID NO: 1174854 - RNA, 19 nt, Homo sapiens
  misc_RNA (1)...(19): siRNA sense strand
uccagaauuucaacaagca

SEQ ID NO: 1174855 - RNA, 19 nt, Homo sapiens
  misc_RNA (1)...(19): siRNA sense strand
cuacacggccacugacaca

SEQ ID NO: 1174856 - RNA, 19 nt, Homo sapiens
  misc_RNA (1)...(19): siRNA sense strand
gcucaaccagaaccucaau

SEQ ID NO: 1174857 - RNA, 19 nt, Homo sapiens
  misc_RNA (1)...(19): siRNA sense strand
uggaacagccgcguagguu

SEQ ID NO: 1174858 - RNA, 19 nt, Homo sapiens
  misc_RNA (1)...(19): siRNA sense strand
gcucaucaaagcccagaag

SEQ ID NO: 1174859 - RNA, 19 nt, Homo sapiens
  misc_RNA (1)...(19): siRNA sense strand
caaacaagaucgcagagaa

SEQ ID NO: 1174860 - RNA, 19 nt, Homo sapiens
  misc_RNA (1)...(19): siRNA sense strand
gcucaaggcuggugaugug

SEQ ID NO: 1174861 - RNA, 19 nt, Homo sapiens
  misc_RNA (1)...(19): siRNA sense strand
gaccaaggaugagcaguuu

SEQ ID NO: 1174862 - RNA, 19 nt, Homo sapiens
  misc_RNA (1)...(19): siRNA sense strand
aaagaaggaugaagccaaa

SEQ ID NO: 1174863 - RNA, 19 nt, Homo sapiens
  misc_RNA (1)...(19): siRNA sense strand
gacaucaagucacgcauug

SEQ ID NO: 1174864 - RNA, 19 nt, Homo sapiens
  misc_RNA (1)...(19): siRNA sense strand
gaacagccgcguagguuuc

SEQ ID NO: 1174865 - RNA, 19 nt, Homo sapiens
  misc_RNA (1)...(19): siRNA sense strand
cagaugagaccaaggauga

SEQ ID NO: 1174866 - RNA, 19 nt, Homo sapiens
  misc_RNA (1)...(19): siRNA sense strand
gagcagugcguccagaauu

SEQ ID NO: 1174867 - RNA, 19 nt, Homo sapiens
  misc_RNA (1)...(19): siRNA sense strand
ccagcaacgugcagaagaa

SEQ ID NO: 1174868 - RNA, 19 nt, Homo sapiens
  misc_RNA (1)...(19): siRNA sense strand
agaaggaucuccggaccua

SEQ ID NO: 1174869 - RNA, 19 nt, Homo sapiens
  misc_RNA (1)...(19): siRNA sense strand
guggagaccuucccagcaa

SEQ ID NO: 1174870 - RNA, 19 nt, Homo sapiens
  misc_RNA (1)...(19): siRNA sense strand
ggcgcaagcugguggacua

SEQ ID NO: 1174871 - RNA, 19 nt, Homo sapiens
  misc_RNA (1)...(19): siRNA sense strand
gaccugcuguggauggauu

SEQ ID NO: 1174872 - RNA, 19 nt, Homo sapiens
  misc_RNA (1)...(19): siRNA sense strand
gaagguguuugaggagaug

SEQ ID NO: 1174873 - RNA, 19 nt, Homo sapiens
  misc_RNA (1)...(19): siRNA sense strand
gcagagaugggcaguaaag

SEQ ID NO: 1174874 - RNA, 19 nt, Homo sapiens
  misc_RNA (1)...(19): siRNA sense strand
cccgagaacuucacugaga

SEQ ID NO: 1174875 - RNA, 19 nt, Homo sapiens
  misc_RNA (1)...(19): siRNA sense strand
gcaagcugguggacuacga

SEQ ID NO: 1174876 - RNA, 19 nt, Homo sapiens
  misc_RNA (1)...(19): siRNA sense strand
ggaacagccgcguagguuu

SEQ ID NO: 1174877 - RNA, 19 nt, Homo sapiens
  misc_RNA (1)...(19): siRNA sense strand
cgggaaagaucgccagcaa

SEQ ID NO: 1174878 - RNA, 19 nt, Homo sapiens
  misc_RNA (1)...(19): siRNA sense strand
ccaaggaugagcaguuuga

SEQ ID NO: 1174879 - RNA, 19 nt, Homo sapiens
  misc_RNA (1)...(19): siRNA sense strand
gcagggaugaggcaaacaa

SEQ ID NO: 1174880 - RNA, 19 nt, Homo sapiens
  misc_RNA (1)...(19): siRNA sense strand
acaacgaccugcuguggau

SEQ ID NO: 1174881 - RNA, 19 nt, Homo sapiens
  misc_RNA (1)...(19): siRNA sense strand
gggaugaggcaaacaagau

SEQ ID NO: 1174882 - RNA, 19 nt, Homo sapiens
  misc_RNA (1)...(19): siRNA sense strand
ugaaggagagcgacuggaa

SEQ ID NO: 1174883 - RNA, 19 nt, Homo sapiens
  misc_RNA (1)...(19): siRNA sense strand
gcaaacaagaucgcagaga

SEQ ID NO: 1174884 - RNA, 19 nt, Homo sapiens
  misc_RNA (1)...(19): siRNA sense strand
cuaccuggccuccgucaaa

SEQ ID NO: 1174885 - RNA, 19 nt, Homo sapiens
  misc_RNA (1)...(19): siRNA sense strand
ucaaccagaaccucaauga

SEQ ID NO: 1174886 - RNA, 19 nt, Homo sapiens
  misc_RNA (1)...(19): siRNA sense strand
cgacaucaagucacgcauu

SEQ ID NO: 1174887 - RNA, 19 nt, Homo sapiens
  misc_RNA (1)...(19): siRNA sense strand
aaccagaaccucaaugaug

SEQ ID NO: 1174888 - RNA, 19 nt, Homo sapiens
  misc_RNA (1)...(19): siRNA sense strand
gcaacaccuucacggucaa

SEQ ID NO: 1174889 - RNA, 19 nt, Homo sapiens
  misc_RNA (1)...(19): siRNA sense strand
accagaaccucaaugaugu

SEQ ID NO: 1174890 - RNA, 19 nt, Homo sapiens
  misc_RNA (1)...(19): siRNA sense strand
aggaggagcucaucaaagc

SEQ ID NO: 1174891 - RNA, 19 nt, Homo sapiens
  misc_RNA (1)...(19): siRNA sense strand
cgaggaggagcucaucaaa

SEQ ID NO: 1174892 - RNA, 19 nt, Homo sapiens
  misc_RNA (1)...(19): siRNA sense strand
agcagugcguccagaauuu

SEQ ID NO: 1174893 - RNA, 19 nt, Homo sapiens
  misc_RNA (1)...(19): siRNA sense strand
ggaaggcagaugagaccaa

SEQ ID NO: 1174894 - RNA, 19 nt, Homo sapiens
  misc_RNA (1)...(19): siRNA sense strand
ucaaagcccagaagguguu

SEQ ID NO: 1174895 - RNA, 19 nt, Homo sapiens
  misc_RNA (1)...(19): siRNA sense strand
gaggaggagcucaucaaag

SEQ ID NO: 1174896 - RNA, 19 nt, Homo sapiens
  misc_RNA (1)...(19): siRNA sense strand
acaaggagaugagcaagcu

SEQ ID NO: 1174897 - RNA, 19 nt, Homo sapiens
  misc_RNA (1)...(19): siRNA sense strand
ggaugaggcaaacaagauc

SEQ ID NO: 1174898 - RNA, 19 nt, Homo sapiens
  misc_RNA (1)...(19): siRNA sense strand
gaaggaugaagccaaaauu

SEQ ID NO: 1174899 - RNA, 19 nt, Homo sapiens
  misc_RNA (1)...(19): siRNA sense strand
ccacuacgagucccuucaa

SEQ ID NO: 1174900 - RNA, 19 nt, Homo sapiens
  misc_RNA (1)...(19): siRNA sense strand
ggauggauuaccaccagaa

SEQ ID NO: 1174901 - RNA, 19 nt, Homo sapiens
  misc_RNA (1)...(19): siRNA sense strand
caaccagaaccucaaugau

SEQ ID NO: 1174902 - RNA, 19 nt, Homo sapiens
  misc_RNA (1)...(19): siRNA sense strand
gcagugcguccagaauuuc

SEQ ID NO: 1174903 - RNA, 19 nt, Homo sapiens
  misc_RNA (1)...(19): siRNA sense strand
caagaucgcagagaacaac

SEQ ID NO: 1174904 - RNA, 19 nt, Homo sapiens
  misc_RNA (1)...(19): siRNA sense strand
agaccaaggaugagcaguu

SEQ ID NO: 1174905 - RNA, 19 nt, Homo sapiens
  misc_RNA (1)...(19): siRNA sense strand
ugacaacgcgccugcaaaa

SEQ ID NO: 1174906 - RNA, 19 nt, Homo sapiens
  misc_RNA (1)...(19): siRNA sense strand
agaagguguuugaggagau

SEQ ID NO: 1174907 - RNA, 19 nt, Homo sapiens
  misc_RNA (1)...(19): siRNA sense strand
cacuacgagucccuucaaa

SEQ ID NO: 1174908 - RNA, 19 nt, Homo sapiens
  misc_RNA (1)...(19): siRNA sense strand
ucaacacguuccagagcau

SEQ ID NO: 1174909 - RNA, 19 nt, Homo sapiens
  misc_RNA (1)...(19): siRNA sense strand
gccagcaacgugcagaaga

SEQ ID NO: 1174910 - RNA, 19 nt, Homo sapiens
  misc_RNA (1)...(19): siRNA sense strand
cguccagaauuucaacaag

SEQ ID NO: 1174911 - RNA, 19 nt, Homo sapiens
  misc_RNA (1)...(19): siRNA sense strand
uccagaauuucaacaagca

SEQ ID NO: 1174912 - RNA, 19 nt, Homo sapiens
  misc_RNA (1)...(19): siRNA sense strand
cuacacggccacugacaca

SEQ ID NO: 1174913 - RNA, 19 nt, Homo sapiens
  misc_RNA (1)...(19): siRNA sense strand
gcucaaccagaaccucaau

SEQ ID NO: 1174914 - RNA, 19 nt, Homo sapiens
  misc_RNA (1)...(19): siRNA sense strand
uggaacagccgcguagguu

SEQ ID NO: 1174915 - RNA, 19 nt, Homo sapiens
  misc_RNA (1)...(19): siRNA sense strand
gcucaucaaagcccagaag

SEQ ID NO: 1174916 - RNA, 19 nt, Homo sapiens
  misc_RNA (1)...(19): siRNA sense strand
caaacaagaucgcagagaa

SEQ ID NO: 1174917 - RNA, 19 nt, Homo sapiens
  misc_RNA (1)...(19): siRNA sense strand
gcucaaggcuggugaugug

SEQ ID NO: 1174918 - RNA, 19 nt, Homo sapiens
  misc_RNA (1)...(19): siRNA sense strand
gaccaaggaugagcaguuu

SEQ ID NO: 1174919 - RNA, 19 nt, Homo sapiens
  misc_RNA (1)...(19): siRNA sense strand
aaagaaggaugaagccaaa

SEQ ID NO: 1174920 - RNA, 19 nt, Homo sapiens
  misc_RNA (1)...(19): siRNA sense strand
gacaucaagucacgcauug

SEQ ID NO: 1174921 - RNA, 19 nt, Homo sapiens
  misc_RNA (1)...(19): siRNA sense strand
gaacagccgcguagguuuc

SEQ ID NO: 1174922 - RNA, 19 nt, Homo sapiens
  misc_RNA (1)...(19): siRNA sense strand
cagaugagaccaaggauga

SEQ ID NO: 1174923 - RNA, 19 nt, Homo sapiens
  misc_RNA (1)...(19): siRNA sense strand
gagcagugcguccagaauu

SEQ ID NO: 1174924 - RNA, 19 nt, Homo sapiens
  misc_RNA (1)...(19): siRNA sense strand
ccagcaacgugcagaagaa

SEQ ID NO: 1174925 - RNA, 19 nt, Homo sapiens
  misc_RNA (1)...(19): siRNA sense strand
agaaggaucuccggaccua

SEQ ID NO: 1174926 - RNA, 19 nt, Homo sapiens
  misc_RNA (1)...(19): siRNA sense strand
guggagaccuucccagcaa

SEQ ID NO: 1174927 - RNA, 19 nt, Homo sapiens
  misc_RNA (1)...(19): siRNA sense strand
ggcgcaagcugguggacua

SEQ ID NO: 1174928 - RNA, 19 nt, Homo sapiens
  misc_RNA (1)...(19): siRNA sense strand
gaccugcuguggauggauu

SEQ ID NO: 1174929 - RNA, 19 nt, Homo sapiens
  misc_RNA (1)...(19): siRNA sense strand
gaagguguuugaggagaug

SEQ ID NO: 1174930 - RNA, 19 nt, Homo sapiens
  misc_RNA (1)...(19): siRNA sense strand
gcagagaugggcaguaaag

SEQ ID NO: 1174931 - RNA, 19 nt, Homo sapiens
  misc_RNA (1)...(19): siRNA sense strand
cccgagaacuucacugaga

SEQ ID NO: 1174932 - RNA, 19 nt, Homo sapiens
  misc_RNA (1)...(19): siRNA sense strand
gcaagcugguggacuacga

SEQ ID NO: 1174933 - RNA, 19 nt, Homo sapiens
  misc_RNA (1)...(19): siRNA sense strand
ggaacagccgcguagguuu

SEQ ID NO: 1174934 - RNA, 19 nt, Homo sapiens
  misc_RNA (1)...(19): siRNA sense strand
cgggaaagaucgccagcaa

SEQ ID NO: 1174935 - RNA, 19 nt, Homo sapiens
  misc_RNA (1)...(19): siRNA sense strand
ccaaggaugagcaguuuga

SEQ ID NO: 1174936 - RNA, 19 nt, Homo sapiens
  misc_RNA (1)...(19): siRNA sense strand
gcagggaugaggcaaacaa

SEQ ID NO: 1174937 - RNA, 19 nt, Homo sapiens
  misc_RNA (1)...(19): siRNA sense strand
acaacgaccugcuguggau

SEQ ID NO: 1174938 - RNA, 19 nt, Homo sapiens
  misc_RNA (1)...(19): siRNA sense strand
gggaugaggcaaacaagau

SEQ ID NO: 1174939 - RNA, 19 nt, Homo sapiens
  misc_RNA (1)...(19): siRNA sense strand
ugaaggagagcgacuggaa

SEQ ID NO: 1174940 - RNA, 19 nt, Homo sapiens
  misc_RNA (1)...(19): siRNA sense strand
gcaaacaagaucgcagaga

SEQ ID NO: 1174941 - RNA, 19 nt, Homo sapiens
  misc_RNA (1)...(19): siRNA sense strand
cuaccuggccuccgucaaa

SEQ ID NO: 1174942 - RNA, 19 nt, Homo sapiens
  misc_RNA (1)...(19): siRNA sense strand
ucaaccagaaccucaauga

SEQ ID NO: 1174943 - RNA, 19 nt, Homo sapiens
  misc_RNA (1)...(19): siRNA sense strand
cgacaucaagucacgcauu

SEQ ID NO: 1174944 - RNA, 19 nt, Homo sapiens
  misc_RNA (1)...(19): siRNA sense strand
aaccagaaccucaaugaug

SEQ ID NO: 1174945 - RNA, 19 nt, Homo sapiens
  misc_RNA (1)...(19): siRNA sense strand
gcaacaccuucacggucaa

SEQ ID NO: 1174946 - RNA, 19 nt, Homo sapiens
  misc_RNA (1)...(19): siRNA sense strand
accagaaccucaaugaugu

SEQ ID NO: 1174947 - RNA, 19 nt, Homo sapiens
  misc_RNA (1)...(19): siRNA sense strand
aggaggagcucaucaaagc

SEQ ID NO: 1174948 - RNA, 19 nt, Homo sapiens
  misc_RNA (1)...(19): siRNA sense strand
cgaggaggagcucaucaaa

SEQ ID NO: 1174949 - RNA, 19 nt, Homo sapiens
  misc_RNA (1)...(19): siRNA sense strand
agcagugcguccagaauuu

SEQ ID NO: 1174950 - RNA, 19 nt, Homo sapiens
  misc_RNA (1)...(19): siRNA sense strand
ggaaggcagaugagaccaa

SEQ ID NO: 1174951 - RNA, 19 nt, Homo sapiens
  misc_RNA (1)...(19): siRNA sense strand
ucaaagcccagaagguguu

SEQ ID NO: 1174952 - RNA, 19 nt, Homo sapiens
  misc_RNA (1)...(19): siRNA sense strand
gaggaggagcucaucaaag

SEQ ID NO: 1174953 - RNA, 19 nt, Homo sapiens
  misc_RNA (1)...(19): siRNA sense strand
acaaggagaugagcaagcu

SEQ ID NO: 1174954 - RNA, 19 nt, Homo sapiens
  misc_RNA (1)...(19): siRNA sense strand
ggaugaggcaaacaagauc

SEQ ID NO: 1174955 - RNA, 19 nt, Homo sapiens
  misc_RNA (1)...(19): siRNA sense strand
gaaggaugaagccaaaauu

SEQ ID NO: 1174956 - RNA, 19 nt, Homo sapiens
  misc_RNA (1)...(19): siRNA sense strand
ccacuacgagucccuucaa

SEQ ID NO: 1174957 - RNA, 19 nt, Homo sapiens
  misc_RNA (1)...(19): siRNA sense strand
ggauggauuaccaccagaa

SEQ ID NO: 1174958 - RNA, 19 nt, Homo sapiens
  misc_RNA (1)...(19): siRNA sense strand
caaccagaaccucaaugau

SEQ ID NO: 1174959 - RNA, 19 nt, Homo sapiens
  misc_RNA (1)...(19): siRNA sense strand
gcagugcguccagaauuuc

SEQ ID NO: 1174960 - RNA, 19 nt, Homo sapiens
  misc_RNA (1)...(19): siRNA sense strand
caagaucgcagagaacaac

SEQ ID NO: 1174961 - RNA, 19 nt, Homo sapiens
  misc_RNA (1)...(19): siRNA sense strand
agaccaaggaugagcaguu

SEQ ID NO: 1174962 - RNA, 19 nt, Homo sapiens
  misc_RNA (1)...(19): siRNA sense strand
ugacaacgcgccugcaaaa

SEQ ID NO: 1174963 - RNA, 19 nt, Homo sapiens
  misc_RNA (1)...(19): siRNA sense strand
agaagguguuugaggagau

SEQ ID NO: 1174964 - RNA, 19 nt, Homo sapiens
  misc_RNA (1)...(19): siRNA sense strand
cacuacgagucccuucaaa

SEQ ID NO: 1174965 - RNA, 19 nt, Homo sapiens
  misc_RNA (1)...(19): siRNA sense strand
ucaacacguuccagagcau

SEQ ID NO: 1174966 - RNA, 19 nt, Homo sapiens
  misc_RNA (1)...(19): siRNA sense strand
gccagcaacgugcagaaga

SEQ ID NO: 1174967 - RNA, 19 nt, Homo sapiens
  misc_RNA (1)...(19): siRNA sense strand
cguccagaauuucaacaag

SEQ ID NO: 1174968 - RNA, 19 nt, Homo sapiens
  misc_RNA (1)...(19): siRNA sense strand
uccagaauuucaacaagca

SEQ ID NO: 1174969 - RNA, 19 nt, Homo sapiens
  misc_RNA (1)...(19): siRNA sense strand
cuacacggccacugacaca

SEQ ID NO: 1174970 - RNA, 19 nt, Homo sapiens
  misc_RNA (1)...(19): siRNA sense strand
gcucaaccagaaccucaau

SEQ ID NO: 1174971 - RNA, 19 nt, Homo sapiens
  misc_RNA (1)...(19): siRNA sense strand
uggaacagccgcguagguu

SEQ ID NO: 1174972 - RNA, 19 nt, Homo sapiens
  misc_RNA (1)...(19): siRNA sense strand
gcucaucaaagcccagaag

SEQ ID NO: 1174973 - RNA, 19 nt, Homo sapiens
  misc_RNA (1)...(19): siRNA sense strand
caaacaagaucgcagagaa

SEQ ID NO: 1174974 - RNA, 19 nt, Homo sapiens
  misc_RNA (1)...(19): siRNA sense strand
gcucaaggcuggugaugug

SEQ ID NO: 1174975 - RNA, 19 nt, Homo sapiens
  misc_RNA (1)...(19): siRNA sense strand
gaccaaggaugagcaguuu

SEQ ID NO: 1174976 - RNA, 19 nt, Homo sapiens
  misc_RNA (1)...(19): siRNA sense strand
aaagaaggaugaagccaaa

SEQ ID NO: 1174977 - RNA, 19 nt, Homo sapiens
  misc_RNA (1)...(19): siRNA sense strand
gacaucaagucacgcauug

SEQ ID NO: 1174978 - RNA, 19 nt, Homo sapiens
  misc_RNA (1)...(19): siRNA sense strand
gaacagccgcguagguuuc

SEQ ID NO: 1174979 - RNA, 19 nt, Homo sapiens
  misc_RNA (1)...(19): siRNA sense strand
cagaugagaccaaggauga

SEQ ID NO: 1174980 - RNA, 19 nt, Homo sapiens
  misc_RNA (1)...(19): siRNA sense strand
gagcagugcguccagaauu

SEQ ID NO: 1174981 - RNA, 19 nt, Homo sapiens
  misc_RNA (1)...(19): siRNA sense strand
ccagcaacgugcagaagaa

SEQ ID NO: 1174982 - RNA, 19 nt, Homo sapiens
  misc_RNA (1)...(19): siRNA sense strand
agaaggaucuccggaccua

SEQ ID NO: 1174983 - RNA, 19 nt, Homo sapiens
  misc_RNA (1)...(19): siRNA sense strand
guggagaccuucccagcaa

SEQ ID NO: 1174984 - RNA, 19 nt, Homo sapiens
  misc_RNA (1)...(19): siRNA sense strand
ggcgcaagcugguggacua

SEQ ID NO: 1174985 - RNA, 19 nt, Homo sapiens
  misc_RNA (1)...(19): siRNA sense strand
gaccugcuguggauggauu

SEQ ID NO: 1174986 - RNA, 19 nt, Homo sapiens
  misc_RNA (1)...(19): siRNA sense strand
gaagguguuugaggagaug

SEQ ID NO: 1174987 - RNA, 19 nt, Homo sapiens
  misc_RNA (1)...(19): siRNA sense strand
gcagagaugggcaguaaag

SEQ ID NO: 1174988 - RNA, 19 nt, Homo sapiens
  misc_RNA (1)...(19): siRNA sense strand
cccgagaacuucacugaga

SEQ ID NO: 1174989 - RNA, 19 nt, Homo sapiens
  misc_RNA (1)...(19): siRNA sense strand
gcaagcugguggacuacga

SEQ ID NO: 1174990 - RNA, 19 nt, Homo sapiens
  misc_RNA (1)...(19): siRNA sense strand
ggaacagccgcguagguuu

SEQ ID NO: 1174991 - RNA, 19 nt, Homo sapiens
  misc_RNA (1)...(19): siRNA sense strand
cgggaaagaucgccagcaa

SEQ ID NO: 1174992 - RNA, 19 nt, Homo sapiens
  misc_RNA (1)...(19): siRNA sense strand
ccaaggaugagcaguuuga

SEQ ID NO: 1174993 - RNA, 19 nt, Homo sapiens
  misc_RNA (1)...(19): siRNA sense strand
gcagggaugaggcaaacaa

SEQ ID NO: 1174994 - RNA, 19 nt, Homo sapiens
  misc_RNA (1)...(19): siRNA sense strand
acaacgaccugcuguggau

SEQ ID NO: 1174995 - RNA, 19 nt, Homo sapiens
  misc_RNA (1)...(19): siRNA sense strand
gggaugaggcaaacaagau

SEQ ID NO: 1174996 - RNA, 19 nt, Homo sapiens
  misc_RNA (1)...(19): siRNA sense strand
ugaaggagagcgacuggaa

SEQ ID NO: 1174997 - RNA, 19 nt, Homo sapiens
  misc_RNA (1)...(19): siRNA sense strand
gcaaacaagaucgcagaga

SEQ ID NO: 1174998 - RNA, 19 nt, Homo sapiens
  misc_RNA (1)...(19): siRNA sense strand
cuaccuggccuccgucaaa

SEQ ID NO: 1174999 - RNA, 19 nt, Homo sapiens
  misc_RNA (1)...(19): siRNA sense strand
ucaaccagaaccucaauga

SEQ ID NO: 1175000 - RNA, 19 nt, Homo sapiens
  misc_RNA (1)...(19): siRNA sense strand
cgacaucaagucacgcauu

SEQ ID NO: 1175001 - RNA, 19 nt, Homo sapiens
  misc_RNA (1)...(19): siRNA sense strand
aaccagaaccucaaugaug

SEQ ID NO: 1175002 - RNA, 19 nt, Homo sapiens
  misc_RNA (1)...(19): siRNA sense strand
gcaacaccuucacggucaa

SEQ ID NO: 1175003 - RNA, 19 nt, Homo sapiens
  misc_RNA (1)...(19): siRNA sense strand
accagaaccucaaugaugu

SEQ ID NO: 1175004 - RNA, 19 nt, Homo sapiens
  misc_RNA (1)...(19): siRNA sense strand
aggaggagcucaucaaagc

SEQ ID NO: 1175005 - RNA, 19 nt, Homo sapiens
  misc_RNA (1)...(19): siRNA sense strand
cgaggaggagcucaucaaa

SEQ ID NO: 1175006 - RNA, 19 nt, Homo sapiens
  misc_RNA (1)...(19): siRNA sense strand
agcagugcguccagaauuu

SEQ ID NO: 1175007 - RNA, 19 nt, Homo sapiens
  misc_RNA (1)...(19): siRNA sense strand
ggaaggcagaugagaccaa

SEQ ID NO: 1175008 - RNA, 19 nt, Homo sapiens
  misc_RNA (1)...(19): siRNA sense strand
ucaaagcccagaagguguu

SEQ ID NO: 1175009 - RNA, 19 nt, Homo sapiens
  misc_RNA (1)...(19): siRNA sense strand
gaggaggagcucaucaaag

SEQ ID NO: 1175010 - RNA, 19 nt, Homo sapiens
  misc_RNA (1)...(19): siRNA sense strand
acaaggagaugagcaagcu

SEQ ID NO: 1175011 - RNA, 19 nt, Homo sapiens
  misc_RNA (1)...(19): siRNA sense strand
ggaugaggcaaacaagauc

SEQ ID NO: 1175012 - RNA, 19 nt, Homo sapiens
  misc_RNA (1)...(19): siRNA sense strand
gaaggaugaagccaaaauu

SEQ ID NO: 1175013 - RNA, 19 nt, Homo sapiens
  misc_RNA (1)...(19): siRNA sense strand
ccacuacgagucccuucaa

SEQ ID NO: 1175014 - RNA, 19 nt, Homo sapiens
  misc_RNA (1)...(19): siRNA sense strand
ggauggauuaccaccagaa

SEQ ID NO: 1175015 - RNA, 19 nt, Homo sapiens
  misc_RNA (1)...(19): siRNA sense strand
caaccagaaccucaaugau

SEQ ID NO: 1175016 - RNA, 19 nt, Homo sapiens
  misc_RNA (1)...(19): siRNA sense strand
gcagugcguccagaauuuc

SEQ ID NO: 1175017 - RNA, 19 nt, Homo sapiens
  misc_RNA (1)...(19): siRNA sense strand
caagaucgcagagaacaac

SEQ ID NO: 1175018 - RNA, 19 nt, Homo sapiens
  misc_RNA (1)...(19): siRNA sense strand
agaccaaggaugagcaguu

SEQ ID NO: 1175019 - RNA, 19 nt, Homo sapiens
  misc_RNA (1)...(19): siRNA sense strand
ugacaacgcgccugcaaaa

SEQ ID NO: 1175020 - RNA, 19 nt, Homo sapiens
  misc_RNA (1)...(19): siRNA sense strand
agaagguguuugaggagau

SEQ ID NO: 1175021 - RNA, 19 nt, Homo sapiens
  misc_RNA (1)...(19): siRNA sense strand
cacuacgagucccuucaaa

SEQ ID NO: 1175022 - RNA, 19 nt, Homo sapiens
  misc_RNA (1)...(19): siRNA sense strand
ucaacacguuccagagcau

SEQ ID NO: 1175023 - RNA, 19 nt, Homo sapiens
  misc_RNA (1)...(19): siRNA sense strand
gccagcaacgugcagaaga

SEQ ID NO: 1175024 - RNA, 19 nt, Homo sapiens
  misc_RNA (1)...(19): siRNA sense strand
cguccagaauuucaacaag

SEQ ID NO: 1175025 - RNA, 19 nt, Homo sapiens
  misc_RNA (1)...(19): siRNA sense strand
uccagaauuucaacaagca

SEQ ID NO: 1175026 - RNA, 19 nt, Homo sapiens
  misc_RNA (1)...(19): siRNA sense strand
cuacacggccacugacaca

SEQ ID NO: 1175027 - RNA, 19 nt, Homo sapiens
  misc_RNA (1)...(19): siRNA sense strand
gcucaaccagaaccucaau

SEQ ID NO: 1175028 - RNA, 19 nt, Homo sapiens
  misc_RNA (1)...(19): siRNA sense strand
uggaacagccgcguagguu

SEQ ID NO: 1175029 - RNA, 19 nt, Homo sapiens
  misc_RNA (1)...(19): siRNA sense strand
gcucaucaaagcccagaag

SEQ ID NO: 1175030 - RNA, 19 nt, Homo sapiens
  misc_RNA (1)...(19): siRNA sense strand
caaacaagaucgcagagaa

SEQ ID NO: 1175031 - RNA, 19 nt, Homo sapiens
  misc_RNA (1)...(19): siRNA sense strand
gcucaaggcuggugaugug

SEQ ID NO: 1175032 - RNA, 19 nt, Homo sapiens
  misc_RNA (1)...(19): siRNA sense strand
gaccaaggaugagcaguuu

SEQ ID NO: 1175033 - RNA, 19 nt, Homo sapiens
  misc_RNA (1)...(19): siRNA sense strand
aaagaaggaugaagccaaa

SEQ ID NO: 1175034 - RNA, 19 nt, Homo sapiens
  misc_RNA (1)...(19): siRNA sense strand
gacaucaagucacgcauug

SEQ ID NO: 1175035 - RNA, 19 nt, Homo sapiens
  misc_RNA (1)...(19): siRNA sense strand
gaacagccgcguagguuuc

SEQ ID NO: 1175036 - RNA, 19 nt, Homo sapiens
  misc_RNA (1)...(19): siRNA sense strand
cagaugagaccaaggauga

SEQ ID NO: 1175037 - RNA, 19 nt, Homo sapiens
  misc_RNA (1)...(19): siRNA sense strand
gagcagugcguccagaauu

SEQ ID NO: 1175038 - RNA, 19 nt, Homo sapiens
  misc_RNA (1)...(19): siRNA sense strand
ccagcaacgugcagaagaa

SEQ ID NO: 1175039 - RNA, 19 nt, Homo sapiens
  misc_RNA (1)...(19): siRNA sense strand
agaaggaucuccggaccua

SEQ ID NO: 1175040 - RNA, 19 nt, Homo sapiens
  misc_RNA (1)...(19): siRNA sense strand
guggagaccuucccagcaa

SEQ ID NO: 1175041 - RNA, 19 nt, Homo sapiens
  misc_RNA (1)...(19): siRNA sense strand
ggcgcaagcugguggacua

SEQ ID NO: 1175042 - RNA, 19 nt, Homo sapiens
  misc_RNA (1)...(19): siRNA sense strand
gaccugcuguggauggauu

SEQ ID NO: 1175043 - RNA, 19 nt, Homo sapiens
  misc_RNA (1)...(19): siRNA sense strand
gaagguguuugaggagaug

SEQ ID NO: 1175044 - RNA, 19 nt, Homo sapiens
  misc_RNA (1)...(19): siRNA sense strand
gcagagaugggcaguaaag

SEQ ID NO: 1175045 - RNA, 19 nt, Homo sapiens
  misc_RNA (1)...(19): siRNA sense strand
cccgagaacuucacugaga

SEQ ID NO: 1175046 - RNA, 19 nt, Homo sapiens
  misc_RNA (1)...(19): siRNA sense strand
gcaagcugguggacuacga

SEQ ID NO: 1175047 - RNA, 19 nt, Homo sapiens
  misc_RNA (1)...(19): siRNA sense strand
ggaacagccgcguagguuu

SEQ ID NO: 1175048 - RNA, 19 nt, Homo sapiens
  misc_RNA (1)...(19): siRNA sense strand
cgggaaagaucgccagcaa

SEQ ID NO: 1175049 - RNA, 19 nt, Homo sapiens
  misc_RNA (1)...(19): siRNA sense strand
ccaaggaugagcaguuuga

SEQ ID NO: 1175050 - RNA, 19 nt, Homo sapiens
  misc_RNA (1)...(19): siRNA sense strand
gcagggaugaggcaaacaa

SEQ ID NO: 1175051 - RNA, 19 nt, Homo sapiens
  misc_RNA (1)...(19): siRNA sense strand
acaacgaccugcuguggau

SEQ ID NO: 1175052 - RNA, 19 nt, Homo sapiens
  misc_RNA (1)...(19): siRNA sense strand
gggaugaggcaaacaagau

SEQ ID NO: 1175053 - RNA, 19 nt, Homo sapiens
  misc_RNA (1)...(19): siRNA sense strand
ugaaggagagcgacuggaa

SEQ ID NO: 1175054 - RNA, 19 nt, Homo sapiens
  misc_RNA (1)...(19): siRNA sense strand
gcaaacaagaucgcagaga

SEQ ID NO: 1175055 - RNA, 19 nt, Homo sapiens
  misc_RNA (1)...(19): siRNA sense strand
cuaccuggccuccgucaaa

SEQ ID NO: 1175056 - RNA, 19 nt, Homo sapiens
  misc_RNA (1)...(19): siRNA sense strand
ucaaccagaaccucaauga

SEQ ID NO: 1175057 - RNA, 19 nt, Homo sapiens
  misc_RNA (1)...(19): siRNA sense strand
cgacaucaagucacgcauu

SEQ ID NO: 1175058 - RNA, 19 nt, Homo sapiens
  misc_RNA (1)...(19): siRNA sense strand
aaccagaaccucaaugaug

SEQ ID NO: 1175059 - RNA, 19 nt, Homo sapiens
  misc_RNA (1)...(19): siRNA sense strand
gcaacaccuucacggucaa

SEQ ID NO: 1175060 - RNA, 19 nt, Homo sapiens
  misc_RNA (1)...(19): siRNA sense strand
accagaaccucaaugaugu

SEQ ID NO: 1175061 - RNA, 19 nt, Homo sapiens
  misc_RNA (1)...(19): siRNA sense strand
aggaggagcucaucaaagc

SEQ ID NO: 1175062 - RNA, 19 nt, Homo sapiens
  misc_RNA (1)...(19): siRNA sense strand
cgaggaggagcucaucaaa

SEQ ID NO: 1175063 - RNA, 19 nt, Homo sapiens
  misc_RNA (1)...(19): siRNA sense strand
agcagugcguccagaauuu

SEQ ID NO: 1175064 - RNA, 19 nt, Homo sapiens
  misc_RNA (1)...(19): siRNA sense strand
ggaaggcagaugagaccaa

SEQ ID NO: 1175065 - RNA, 19 nt, Homo sapiens
  misc_RNA (1)...(19): siRNA sense strand
ucaaagcccagaagguguu

SEQ ID NO: 1175066 - RNA, 19 nt, Homo sapiens
  misc_RNA (1)...(19): siRNA sense strand
gaggaggagcucaucaaag

SEQ ID NO: 1175067 - RNA, 19 nt, Homo sapiens
  misc_RNA (1)...(19): siRNA sense strand
acaaggagaugagcaagcu

SEQ ID NO: 1175068 - RNA, 19 nt, Homo sapiens
  misc_RNA (1)...(19): siRNA sense strand
ggaugaggcaaacaagauc

SEQ ID NO: 1175069 - RNA, 19 nt, Homo sapiens
  misc_RNA (1)...(19): siRNA sense strand
gaaggaugaagccaaaauu

SEQ ID NO: 1175070 - RNA, 19 nt, Homo sapiens
  misc_RNA (1)...(19): siRNA sense strand
ccacuacgagucccuucaa

SEQ ID NO: 1175071 - RNA, 19 nt, Homo sapiens
  misc_RNA (1)...(19): siRNA sense strand
ggauggauuaccaccagaa

SEQ ID NO: 1175072 - RNA, 19 nt, Homo sapiens
  misc_RNA (1)...(19): siRNA sense strand
caaccagaaccucaaugau

SEQ ID NO: 1175073 - RNA, 19 nt, Homo sapiens
  misc_RNA (1)...(19): siRNA sense strand
gcagugcguccagaauuuc

SEQ ID NO: 1175074 - RNA, 19 nt, Homo sapiens
  misc_RNA (1)...(19): siRNA sense strand
caagaucgcagagaacaac

SEQ ID NO: 1175075 - RNA, 19 nt, Homo sapiens
  misc_RNA (1)...(19): siRNA sense strand
agaccaaggaugagcaguu

SEQ ID NO: 1175076 - RNA, 19 nt, Homo sapiens
  misc_RNA (1)...(19): siRNA sense strand
ugacaacgcgccugcaaaa

SEQ ID NO: 1175077 - RNA, 19 nt, Homo sapiens
  misc_RNA (1)...(19): siRNA sense strand
agaagguguuugaggagau

SEQ ID NO: 1175078 - RNA, 19 nt, Homo sapiens
  misc_RNA (1)...(19): siRNA sense strand
cacuacgagucccuucaaa

SEQ ID NO: 1175079 - RNA, 19 nt, Homo sapiens
  misc_RNA (1)...(19): siRNA sense strand
ucaacacguuccagagcau

SEQ ID NO: 1175080 - RNA, 19 nt, Homo sapiens
  misc_RNA (1)...(19): siRNA sense strand
gccagcaacgugcagaaga

SEQ ID NO: 1175081 - RNA, 19 nt, Homo sapiens
  misc_RNA (1)...(19): siRNA sense strand
cguccagaauuucaacaag

SEQ ID NO: 1175082 - RNA, 19 nt, Homo sapiens
  misc_RNA (1)...(19): siRNA sense strand
uccagaauuucaacaagca

SEQ ID NO: 1175083 - RNA, 19 nt, Homo sapiens
  misc_RNA (1)...(19): siRNA sense strand
cuacacggccacugacaca

SEQ ID NO: 1175084 - RNA, 19 nt, Homo sapiens
  misc_RNA (1)...(19): siRNA sense strand
gcucaaccagaaccucaau

SEQ ID NO: 1175085 - RNA, 19 nt, Homo sapiens
  misc_RNA (1)...(19): siRNA sense strand
uggaacagccgcguagguu

SEQ ID NO: 1175086 - RNA, 19 nt, Homo sapiens
  misc_RNA (1)...(19): siRNA sense strand
gcucaucaaagcccagaag

SEQ ID NO: 1175087 - RNA, 19 nt, Homo sapiens
  misc_RNA (1)...(19): siRNA sense strand
caaacaagaucgcagagaa

SEQ ID NO: 1175088 - RNA, 19 nt, Homo sapiens
  misc_RNA (1)...(19): siRNA sense strand
gcucaaggcuggugaugug

SEQ ID NO: 1175089 - RNA, 19 nt, Homo sapiens
  misc_RNA (1)...(19): siRNA sense strand
gaccaaggaugagcaguuu

SEQ ID NO: 1175090 - RNA, 19 nt, Homo sapiens
  misc_RNA (1)...(19): siRNA sense strand
aaagaaggaugaagccaaa

SEQ ID NO: 1175091 - RNA, 19 nt, Homo sapiens
  misc_RNA (1)...(19): siRNA sense strand
gacaucaagucacgcauug

SEQ ID NO: 1175092 - RNA, 19 nt, Homo sapiens
  misc_RNA (1)...(19): siRNA sense strand
gaacagccgcguagguuuc

SEQ ID NO: 1175093 - RNA, 19 nt, Homo sapiens
  misc_RNA (1)...(19): siRNA sense strand
cagaugagaccaaggauga

SEQ ID NO: 1175094 - RNA, 19 nt, Homo sapiens
  misc_RNA (1)...(19): siRNA sense strand
gagcagugcguccagaauu

SEQ ID NO: 1175095 - RNA, 19 nt, Homo sapiens
  misc_RNA (1)...(19): siRNA sense strand
ccagcaacgugcagaagaa

SEQ ID NO: 1175096 - RNA, 19 nt, Homo sapiens
  misc_RNA (1)...(19): siRNA sense strand
agaaggaucuccggaccua

SEQ ID NO: 1175097 - RNA, 19 nt, Homo sapiens
  misc_RNA (1)...(19): siRNA sense strand
guggagaccuucccagcaa

SEQ ID NO: 1175098 - RNA, 19 nt, Homo sapiens
  misc_RNA (1)...(19): siRNA sense strand
ggcgcaagcugguggacua

SEQ ID NO: 1175099 - RNA, 19 nt, Homo sapiens
  misc_RNA (1)...(19): siRNA sense strand
gaccugcuguggauggauu

SEQ ID NO: 1175100 - RNA, 19 nt, Homo sapiens
  misc_RNA (1)...(19): siRNA sense strand
gaagguguuugaggagaug

SEQ ID NO: 1175101 - RNA, 19 nt, Homo sapiens
  misc_RNA (1)...(19): siRNA sense strand
gcagagaugggcaguaaag

SEQ ID NO: 1175102 - RNA, 19 nt, Homo sapiens
  misc_RNA (1)...(19): siRNA sense strand
cccgagaacuucacugaga

SEQ ID NO: 1175103 - RNA, 19 nt, Homo sapiens
  misc_RNA (1)...(19): siRNA sense strand
gcaagcugguggacuacga

SEQ ID NO: 1175104 - RNA, 19 nt, Homo sapiens
  misc_RNA (1)...(19): siRNA sense strand
ggaacagccgcguagguuu

SEQ ID NO: 1175105 - RNA, 19 nt, Homo sapiens
  misc_RNA (1)...(19): siRNA sense strand
cgggaaagaucgccagcaa

SEQ ID NO: 1175106 - RNA, 19 nt, Homo sapiens
  misc_RNA (1)...(19): siRNA sense strand
ccaaggaugagcaguuuga

SEQ ID NO: 1175107 - RNA, 19 nt, Homo sapiens
  misc_RNA (1)...(19): siRNA sense strand
gcagggaugaggcaaacaa

SEQ ID NO: 1175108 - RNA, 19 nt, Homo sapiens
  misc_RNA (1)...(19): siRNA sense strand
acaacgaccugcuguggau

SEQ ID NO: 1175109 - RNA, 19 nt, Homo sapiens
  misc_RNA (1)...(19): siRNA sense strand
gggaugaggcaaacaagau

SEQ ID NO: 1175110 - RNA, 19 nt, Homo sapiens
  misc_RNA (1)...(19): siRNA sense strand
ugaaggagagcgacuggaa

SEQ ID NO: 1175111 - RNA, 19 nt, Homo sapiens
  misc_RNA (1)...(19): siRNA sense strand
gcaaacaagaucgcagaga

SEQ ID NO: 1175112 - RNA, 19 nt, Homo sapiens
  misc_RNA (1)...(19): siRNA sense strand
cuaccuggccuccgucaaa

SEQ ID NO: 1175113 - RNA, 19 nt, Homo sapiens
  misc_RNA (1)...(19): siRNA sense strand
ucaaccagaaccucaauga

SEQ ID NO: 1175114 - RNA, 19 nt, Homo sapiens
  misc_RNA (1)...(19): siRNA sense strand
cgacaucaagucacgcauu

SEQ ID NO: 1175115 - RNA, 19 nt, Homo sapiens
  misc_RNA (1)...(19): siRNA sense strand
aaccagaaccucaaugaug

SEQ ID NO: 1175116 - RNA, 19 nt, Homo sapiens
  misc_RNA (1)...(19): siRNA sense strand
gcaacaccuucacggucaa

SEQ ID NO: 1175117 - RNA, 19 nt, Homo sapiens
  misc_RNA (1)...(19): siRNA sense strand
accagaaccucaaugaugu

SEQ ID NO: 1175118 - RNA, 19 nt, Homo sapiens
  misc_RNA (1)...(19): siRNA sense strand
aggaggagcucaucaaagc

SEQ ID NO: 1175119 - RNA, 19 nt, Homo sapiens
  misc_RNA (1)...(19): siRNA sense strand
cgaggaggagcucaucaaa

SEQ ID NO: 1175120 - RNA, 19 nt, Homo sapiens
  misc_RNA (1)...(19): siRNA sense strand
agcagugcguccagaauuu

SEQ ID NO: 1175121 - RNA, 19 nt, Homo sapiens
  misc_RNA (1)...(19): siRNA sense strand
ggaaggcagaugagaccaa

SEQ ID NO: 1175122 - RNA, 19 nt, Homo sapiens
  misc_RNA (1)...(19): siRNA sense strand
ucaaagcccagaagguguu

SEQ ID NO: 1175123 - RNA, 19 nt, Homo sapiens
  misc_RNA (1)...(19): siRNA sense strand
gaggaggagcucaucaaag

SEQ ID NO: 1175124 - RNA, 19 nt, Homo sapiens
  misc_RNA (1)...(19): siRNA sense strand
acaaggagaugagcaagcu

SEQ ID NO: 1175125 - RNA, 19 nt, Homo sapiens
  misc_RNA (1)...(19): siRNA sense strand
ggaugaggcaaacaagauc

SEQ ID NO: 1175126 - RNA, 19 nt, Homo sapiens
  misc_RNA (1)...(19): siRNA sense strand
gaaggaugaagccaaaauu

SEQ ID NO: 1175127 - RNA, 19 nt, Homo sapiens
  misc_RNA (1)...(19): siRNA sense strand
ccacuacgagucccuucaa

SEQ ID NO: 1175128 - RNA, 19 nt, Homo sapiens
  misc_RNA (1)...(19): siRNA sense strand
ggauggauuaccaccagaa

SEQ ID NO: 1175129 - RNA, 19 nt, Homo sapiens
  misc_RNA (1)...(19): siRNA sense strand
caaccagaaccucaaugau

SEQ ID NO: 1175130 - RNA, 19 nt, Homo sapiens
  misc_RNA (1)...(19): siRNA sense strand
gcagugcguccagaauuuc

SEQ ID NO: 1175131 - RNA, 19 nt, Homo sapiens
  misc_RNA (1)...(19): siRNA sense strand
caagaucgcagagaacaac

SEQ ID NO: 1175132 - RNA, 19 nt, Homo sapiens
  misc_RNA (1)...(19): siRNA sense strand
agaccaaggaugagcaguu

SEQ ID NO: 1175133 - RNA, 19 nt, Homo sapiens
  misc_RNA (1)...(19): siRNA sense strand
ugacaacgcgccugcaaaa

SEQ ID NO: 1175134 - RNA, 19 nt, Homo sapiens
  misc_RNA (1)...(19): siRNA sense strand
agaagguguuugaggagau

SEQ ID NO: 1175135 - RNA, 19 nt, Homo sapiens
  misc_RNA (1)...(19): siRNA sense strand
cacuacgagucccuucaaa

SEQ ID NO: 1175136 - RNA, 19 nt, Homo sapiens
  misc_RNA (1)...(19): siRNA sense strand
ucaacacguuccagagcau

SEQ ID NO: 1175137 - RNA, 19 nt, Homo sapiens
  misc_RNA (1)...(19): siRNA sense strand
gccagcaacgugcagaaga

SEQ ID NO: 1175138 - RNA, 19 nt, Homo sapiens
  misc_RNA (1)...(19): siRNA sense strand
cguccagaauuucaacaag

SEQ ID NO: 1175139 - RNA, 19 nt, Homo sapiens
  misc_RNA (1)...(19): siRNA sense strand
uccagaauuucaacaagca

SEQ ID NO: 1175140 - RNA, 19 nt, Homo sapiens
  misc_RNA (1)...(19): siRNA sense strand
cuacacggccacugacaca

SEQ ID NO: 1175141 - RNA, 19 nt, Homo sapiens
  misc_RNA (1)...(19): siRNA sense strand
gcucaaccagaaccucaau

SEQ ID NO: 1175142 - RNA, 19 nt, Homo sapiens
  misc_RNA (1)...(19): siRNA sense strand
uggaacagccgcguagguu

SEQ ID NO: 1175143 - RNA, 19 nt, Homo sapiens
  misc_RNA (1)...(19): siRNA sense strand
gcucaucaaagcccagaag

SEQ ID NO: 1175144 - RNA, 19 nt, Homo sapiens
  misc_RNA (1)...(19): siRNA sense strand
caaacaagaucgcagagaa

SEQ ID NO: 1175145 - RNA, 19 nt, Homo sapiens
  misc_RNA (1)...(19): siRNA sense strand
gcucaaggcuggugaugug

SEQ ID NO: 1175146 - RNA, 19 nt, Homo sapiens
  misc_RNA (1)...(19): siRNA sense strand
gaccaaggaugagcaguuu

SEQ ID NO: 1175147 - RNA, 19 nt, Homo sapiens
  misc_RNA (1)...(19): siRNA sense strand
aaagaaggaugaagccaaa

SEQ ID NO: 1175148 - RNA, 19 nt, Homo sapiens
  misc_RNA (1)...(19): siRNA sense strand
gacaucaagucacgcauug

SEQ ID NO: 1175149 - RNA, 19 nt, Homo sapiens
  misc_RNA (1)...(19): siRNA sense strand
gaacagccgcguagguuuc

SEQ ID NO: 1175150 - RNA, 19 nt, Homo sapiens
  misc_RNA (1)...(19): siRNA sense strand
cagaugagaccaaggauga

SEQ ID NO: 1175151 - RNA, 19 nt, Homo sapiens
  misc_RNA (1)...(19): siRNA sense strand
gagcagugcguccagaauu

SEQ ID NO: 1175152 - RNA, 19 nt, Homo sapiens
  misc_RNA (1)...(19): siRNA sense strand
ccagcaacgugcagaagaa

SEQ ID NO: 1175153 - RNA, 19 nt, Homo sapiens
  misc_RNA (1)...(19): siRNA sense strand
agaaggaucuccggaccua

SEQ ID NO: 1175154 - RNA, 19 nt, Homo sapiens
  misc_RNA (1)...(19): siRNA sense strand
guggagaccuucccagcaa

SEQ ID NO: 1175155 - RNA, 19 nt, Homo sapiens
  misc_RNA (1)...(19): siRNA sense strand
ggcgcaagcugguggacua

SEQ ID NO: 1175156 - RNA, 19 nt, Homo sapiens
  misc_RNA (1)...(19): siRNA sense strand
gaccugcuguggauggauu

SEQ ID NO: 1175157 - RNA, 19 nt, Homo sapiens
  misc_RNA (1)...(19): siRNA sense strand
gaagguguuugaggagaug

SEQ ID NO: 1175158 - RNA, 19 nt, Homo sapiens
  misc_RNA (1)...(19): siRNA sense strand
gcagagaugggcaguaaag

SEQ ID NO: 1175159 - RNA, 19 nt, Homo sapiens
  misc_RNA (1)...(19): siRNA sense strand
cccgagaacuucacugaga

SEQ ID NO: 1175160 - RNA, 19 nt, Homo sapiens
  misc_RNA (1)...(19): siRNA sense strand
gcaagcugguggacuacga

SEQ ID NO: 1175161 - RNA, 19 nt, Homo sapiens
  misc_RNA (1)...(19): siRNA sense strand
ggaacagccgcguagguuu

SEQ ID NO: 1175162 - RNA, 19 nt, Homo sapiens
  misc_RNA (1)...(19): siRNA sense strand
cgggaaagaucgccagcaa

SEQ ID NO: 1175163 - RNA, 19 nt, Homo sapiens
  misc_RNA (1)...(19): siRNA sense strand
ccaaggaugagcaguuuga

SEQ ID NO: 1175164 - RNA, 19 nt, Homo sapiens
  misc_RNA (1)...(19): siRNA sense strand
gcagggaugaggcaaacaa

SEQ ID NO: 1175165 - RNA, 19 nt, Homo sapiens
  misc_RNA (1)...(19): siRNA sense strand
acaacgaccugcuguggau

SEQ ID NO: 1175166 - RNA, 19 nt, Homo sapiens
  misc_RNA (1)...(19): siRNA sense strand
gggaugaggcaaacaagau

SEQ ID NO: 1175167 - RNA, 19 nt, Homo sapiens
  misc_RNA (1)...(19): siRNA sense strand
ugaaggagagcgacuggaa

SEQ ID NO: 1175168 - RNA, 19 nt, Homo sapiens
  misc_RNA (1)...(19): siRNA sense strand
gcaaacaagaucgcagaga

SEQ ID NO: 1175169 - RNA, 19 nt, Homo sapiens
  misc_RNA (1)...(19): siRNA sense strand
cuaccuggccuccgucaaa

SEQ ID NO: 1175170 - RNA, 19 nt, Homo sapiens
  misc_RNA (1)...(19): siRNA sense strand
ucaaccagaaccucaauga

SEQ ID NO: 1175171 - RNA, 19 nt, Homo sapiens
  misc_RNA (1)...(19): siRNA sense strand
cgacaucaagucacgcauu

SEQ ID NO: 1175172 - RNA, 19 nt, Homo sapiens
  misc_RNA (1)...(19): siRNA sense strand
aaccagaaccucaaugaug

SEQ ID NO: 1175173 - RNA, 19 nt, Homo sapiens
  misc_RNA (1)...(19): siRNA sense strand
gcaacaccuucacggucaa

SEQ ID NO: 1175174 - RNA, 19 nt, Homo sapiens
  misc_RNA (1)...(19): siRNA sense strand
accagaaccucaaugaugu

SEQ ID NO: 1175175 - RNA, 19 nt, Homo sapiens
  misc_RNA (1)...(19): siRNA sense strand
aggaggagcucaucaaagc

SEQ ID NO: 1175176 - RNA, 19 nt, Homo sapiens
  misc_RNA (1)...(19): siRNA sense strand
cgaggaggagcucaucaaa

SEQ ID NO: 1175177 - RNA, 19 nt, Homo sapiens
  misc_RNA (1)...(19): siRNA sense strand
agcagugcguccagaauuu

SEQ ID NO: 1175178 - RNA, 19 nt, Homo sapiens
  misc_RNA (1)...(19): siRNA sense strand
ggaaggcagaugagaccaa

SEQ ID NO: 1175179 - RNA, 19 nt, Homo sapiens
  misc_RNA (1)...(19): siRNA sense strand
ucaaagcccagaagguguu

SEQ ID NO: 1175180 - RNA, 19 nt, Homo sapiens
  misc_RNA (1)...(19): siRNA sense strand
gaggaggagcucaucaaag

SEQ ID NO: 1175181 - RNA, 19 nt, Homo sapiens
  misc_RNA (1)...(19): siRNA sense strand
acaaggagaugagcaagcu

SEQ ID NO: 1175182 - RNA, 19 nt, Homo sapiens
  misc_RNA (1)...(19): siRNA sense strand
ggaugaggcaaacaagauc

SEQ ID NO: 1175183 - RNA, 19 nt, Homo sapiens
  misc_RNA (1)...(19): siRNA sense strand
gaaggaugaagccaaaauu

SEQ ID NO: 1175184 - RNA, 19 nt, Homo sapiens
  misc_RNA (1)...(19): siRNA sense strand
ccacuacgagucccuucaa

SEQ ID NO: 1175185 - RNA, 19 nt, Homo sapiens
  misc_RNA (1)...(19): siRNA sense strand
ggauggauuaccaccagaa

SEQ ID NO: 1175186 - RNA, 19 nt, Homo sapiens
  misc_RNA (1)...(19): siRNA sense strand
caaccagaaccucaaugau

SEQ ID NO: 1175187 - RNA, 19 nt, Homo sapiens
  misc_RNA (1)...(19): siRNA sense strand
gcagugcguccagaauuuc

SEQ ID NO: 1175188 - RNA, 19 nt, Homo sapiens
  misc_RNA (1)...(19): siRNA sense strand
caagaucgcagagaacaac

SEQ ID NO: 1175189 - RNA, 19 nt, Homo sapiens
  misc_RNA (1)...(19): siRNA sense strand
agaccaaggaugagcaguu

SEQ ID NO: 1175190 - RNA, 19 nt, Homo sapiens
  misc_RNA (1)...(19): siRNA sense strand
ugacaacgcgccugcaaaa

SEQ ID NO: 1175191 - RNA, 19 nt, Homo sapiens
  misc_RNA (1)...(19): siRNA sense strand
agaagguguuugaggagau

SEQ ID NO: 1175192 - RNA, 19 nt, Homo sapiens
  misc_RNA (1)...(19): siRNA sense strand
cacuacgagucccuucaaa

SEQ ID NO: 1175193 - RNA, 19 nt, Homo sapiens
  misc_RNA (1)...(19): siRNA sense strand
ucaacacguuccagagcau

SEQ ID NO: 1175194 - RNA, 19 nt, Homo sapiens
  misc_RNA (1)...(19): siRNA sense strand
gccagcaacgugcagaaga

SEQ ID NO: 1175195 - RNA, 19 nt, Homo sapiens
  misc_RNA (1)...(19): siRNA sense strand
cguccagaauuucaacaag

SEQ ID NO: 1175196 - RNA, 19 nt, Homo sapiens
  misc_RNA (1)...(19): siRNA sense strand
uccagaauuucaacaagca

SEQ ID NO: 1175197 - RNA, 19 nt, Homo sapiens
  misc_RNA (1)...(19): siRNA sense strand
cuacacggccacugacaca

SEQ ID NO: 1175198 - RNA, 19 nt, Homo sapiens
  misc_RNA (1)...(19): siRNA sense strand
gcucaaccagaaccucaau

SEQ ID NO: 1175199 - RNA, 19 nt, Homo sapiens
  misc_RNA (1)...(19): siRNA sense strand
uggaacagccgcguagguu

SEQ ID NO: 1175200 - RNA, 19 nt, Homo sapiens
  misc_RNA (1)...(19): siRNA sense strand
gcucaucaaagcccagaag

SEQ ID NO: 1175201 - RNA, 19 nt, Homo sapiens
  misc_RNA (1)...(19): siRNA sense strand
caaacaagaucgcagagaa

SEQ ID NO: 1175202 - RNA, 19 nt, Homo sapiens
  misc_RNA (1)...(19): siRNA sense strand
gcucaaggcuggugaugug

SEQ ID NO: 1175203 - RNA, 19 nt, Homo sapiens
  misc_RNA (1)...(19): siRNA sense strand
gaccaaggaugagcaguuu

SEQ ID NO: 1175204 - RNA, 19 nt, Homo sapiens
  misc_RNA (1)...(19): siRNA sense strand
aaagaaggaugaagccaaa

SEQ ID NO: 1175205 - RNA, 19 nt, Homo sapiens
  misc_RNA (1)...(19): siRNA sense strand
gacaucaagucacgcauug

SEQ ID NO: 1175206 - RNA, 19 nt, Homo sapiens
  misc_RNA (1)...(19): siRNA sense strand
gaacagccgcguagguuuc

SEQ ID NO: 1175207 - RNA, 19 nt, Homo sapiens
  misc_RNA (1)...(19): siRNA sense strand
cagaugagaccaaggauga

SEQ ID NO: 1175208 - RNA, 19 nt, Homo sapiens
  misc_RNA (1)...(19): siRNA sense strand
gagcagugcguccagaauu

SEQ ID NO: 1175209 - RNA, 19 nt, Homo sapiens
  misc_RNA (1)...(19): siRNA sense strand
ccagcaacgugcagaagaa

SEQ ID NO: 1175210 - RNA, 19 nt, Homo sapiens
  misc_RNA (1)...(19): siRNA sense strand
agaaggaucuccggaccua

SEQ ID NO: 1175211 - RNA, 19 nt, Homo sapiens
  misc_RNA (1)...(19): siRNA sense strand
guggagaccuucccagcaa

SEQ ID NO: 1175212 - RNA, 19 nt, Homo sapiens
  misc_RNA (1)...(19): siRNA sense strand
ggcgcaagcugguggacua

SEQ ID NO: 1175213 - RNA, 19 nt, Homo sapiens
  misc_RNA (1)...(19): siRNA sense strand
gaccugcuguggauggauu

SEQ ID NO: 1175214 - RNA, 19 nt, Homo sapiens
  misc_RNA (1)...(19): siRNA sense strand
gaagguguuugaggagaug

SEQ ID NO: 1175215 - RNA, 19 nt, Homo sapiens
  misc_RNA (1)...(19): siRNA sense strand
gcagagaugggcaguaaag

SEQ ID NO: 1175216 - RNA, 19 nt, Homo sapiens
  misc_RNA (1)...(19): siRNA sense strand
cccgagaacuucacugaga

SEQ ID NO: 1175217 - RNA, 19 nt, Homo sapiens
  misc_RNA (1)...(19): siRNA sense strand
gcaagcugguggacuacga

SEQ ID NO: 1175218 - RNA, 19 nt, Homo sapiens
  misc_RNA (1)...(19): siRNA sense strand
ggaacagccgcguagguuu

SEQ ID NO: 1175219 - RNA, 19 nt, Homo sapiens
  misc_RNA (1)...(19): siRNA sense strand
cgggaaagaucgccagcaa

SEQ ID NO: 1175220 - RNA, 19 nt, Homo sapiens
  misc_RNA (1)...(19): siRNA sense strand
ccaaggaugagcaguuuga

SEQ ID NO: 1175221 - RNA, 19 nt, Homo sapiens
  misc_RNA (1)...(19): siRNA sense strand
gcagggaugaggcaaacaa

SEQ ID NO: 1175222 - RNA, 19 nt, Homo sapiens
  misc_RNA (1)...(19): siRNA sense strand
acaacgaccugcuguggau

SEQ ID NO: 1175223 - RNA, 19 nt, Homo sapiens
  misc_RNA (1)...(19): siRNA sense strand
gggaugaggcaaacaagau

SEQ ID NO: 1175224 - RNA, 19 nt, Homo sapiens
  misc_RNA (1)...(19): siRNA sense strand
ugaaggagagcgacuggaa

SEQ ID NO: 1175225 - RNA, 19 nt, Homo sapiens
  misc_RNA (1)...(19): siRNA sense strand
gcaaacaagaucgcagaga

SEQ ID NO: 1175226 - RNA, 19 nt, Homo sapiens
  misc_RNA (1)...(19): siRNA sense strand
cuaccuggccuccgucaaa

SEQ ID NO: 1175227 - RNA, 19 nt, Homo sapiens
  misc_RNA (1)...(19): siRNA sense strand
ucaaccagaaccucaauga

SEQ ID NO: 1175228 - RNA, 19 nt, Homo sapiens
  misc_RNA (1)...(19): siRNA sense strand
cgacaucaagucacgcauu

SEQ ID NO: 1175229 - RNA, 19 nt, Homo sapiens
  misc_RNA (1)...(19): siRNA sense strand
aaccagaaccucaaugaug

SEQ ID NO: 1175230 - RNA, 19 nt, Homo sapiens
  misc_RNA (1)...(19): siRNA sense strand
gcaacaccuucacggucaa

SEQ ID NO: 1175231 - RNA, 19 nt, Homo sapiens
  misc_RNA (1)...(19): siRNA sense strand
accagaaccucaaugaugu

SEQ ID NO: 1175232 - RNA, 19 nt, Homo sapiens
  misc_RNA (1)...(19): siRNA sense strand
aggaggagcucaucaaagc

SEQ ID NO: 1175233 - RNA, 19 nt, Homo sapiens
  misc_RNA (1)...(19): siRNA sense strand
cgaggaggagcucaucaaa

SEQ ID NO: 1175234 - RNA, 19 nt, Homo sapiens
  misc_RNA (1)...(19): siRNA sense strand
agcagugcguccagaauuu

SEQ ID NO: 1175235 - RNA, 19 nt, Homo sapiens
  misc_RNA (1)...(19): siRNA sense strand
ggaaggcagaugagaccaa

SEQ ID NO: 1175236 - RNA, 19 nt, Homo sapiens
  misc_RNA (1)...(19): siRNA sense strand
ucaaagcccagaagguguu

SEQ ID NO: 1175237 - RNA, 19 nt, Homo sapiens
  misc_RNA (1)...(19): siRNA sense strand
gaggaggagcucaucaaag

SEQ ID NO: 1175238 - RNA, 19 nt, Homo sapiens
  misc_RNA (1)...(19): siRNA sense strand
acaaggagaugagcaagcu

SEQ ID NO: 1175239 - RNA, 19 nt, Homo sapiens
  misc_RNA (1)...(19): siRNA sense strand
ggaugaggcaaacaagauc

SEQ ID NO: 1175240 - RNA, 19 nt, Homo sapiens
  misc_RNA (1)...(19): siRNA sense strand
gaaggaugaagccaaaauu

SEQ ID NO: 1175241 - RNA, 19 nt, Homo sapiens
  misc_RNA (1)...(19): siRNA sense strand
ccacuacgagucccuucaa

SEQ ID NO: 1175242 - RNA, 19 nt, Homo sapiens
  misc_RNA (1)...(19): siRNA sense strand
ggauggauuaccaccagaa

SEQ ID NO: 1175243 - RNA, 19 nt, Homo sapiens
  misc_RNA (1)...(19): siRNA sense strand
caaccagaaccucaaugau

SEQ ID NO: 1175244 - RNA, 19 nt, Homo sapiens
  misc_RNA (1)...(19): siRNA sense strand
gcagugcguccagaauuuc

SEQ ID NO: 1175245 - RNA, 19 nt, Homo sapiens
  misc_RNA (1)...(19): siRNA sense strand
caagaucgcagagaacaac

SEQ ID NO: 1175246 - RNA, 19 nt, Homo sapiens
  misc_RNA (1)...(19): siRNA sense strand
agaccaaggaugagcaguu

SEQ ID NO: 1175247 - RNA, 19 nt, Homo sapiens
  misc_RNA (1)...(19): siRNA sense strand
ugacaacgcgccugcaaaa

SEQ ID NO: 1175248 - RNA, 19 nt, Homo sapiens
  misc_RNA (1)...(19): siRNA sense strand
agaagguguuugaggagau

SEQ ID NO: 1175249 - RNA, 19 nt, Homo sapiens
  misc_RNA (1)...(19): siRNA sense strand
cacuacgagucccuucaaa

SEQ ID NO: 1175250 - RNA, 19 nt, Homo sapiens
  misc_RNA (1)...(19): siRNA sense strand
ucaacacguuccagagcau

SEQ ID NO: 1175251 - RNA, 19 nt, Homo sapiens
  misc_RNA (1)...(19): siRNA sense strand
gccagcaacgugcagaaga

SEQ ID NO: 1175252 - RNA, 19 nt, Homo sapiens
  misc_RNA (1)...(19): siRNA sense strand
cguccagaauuucaacaag

SEQ ID NO: 1175253 - RNA, 19 nt, Homo sapiens
  misc_RNA (1)...(19): siRNA sense strand
uccagaauuucaacaagca

SEQ ID NO: 1175254 - RNA, 19 nt, Homo sapiens
  misc_RNA (1)...(19): siRNA sense strand
cuacacggccacugacaca

SEQ ID NO: 1175255 - RNA, 19 nt, Homo sapiens
  misc_RNA (1)...(19): siRNA sense strand
gcucaaccagaaccucaau

SEQ ID NO: 1175256 - RNA, 19 nt, Homo sapiens
  misc_RNA (1)...(19): siRNA sense strand
uggaacagccgcguagguu

SEQ ID NO: 1175257 - RNA, 19 nt, Homo sapiens
  misc_RNA (1)...(19): siRNA sense strand
gcucaucaaagcccagaag

SEQ ID NO: 1175258 - RNA, 19 nt, Homo sapiens
  misc_RNA (1)...(19): siRNA sense strand
caaacaagaucgcagagaa

SEQ ID NO: 1175259 - RNA, 19 nt, Homo sapiens
  misc_RNA (1)...(19): siRNA sense strand
gcucaaggcuggugaugug

SEQ ID NO: 1175260 - RNA, 19 nt, Homo sapiens
  misc_RNA (1)...(19): siRNA sense strand
gaccaaggaugagcaguuu

SEQ ID NO: 1175261 - RNA, 19 nt, Homo sapiens
  misc_RNA (1)...(19): siRNA sense strand
aaagaaggaugaagccaaa

SEQ ID NO: 1175262 - RNA, 19 nt, Homo sapiens
  misc_RNA (1)...(19): siRNA sense strand
gacaucaagucacgcauug

SEQ ID NO: 1175263 - RNA, 19 nt, Homo sapiens
  misc_RNA (1)...(19): siRNA sense strand
gaacagccgcguagguuuc

SEQ ID NO: 1175264 - RNA, 19 nt, Homo sapiens
  misc_RNA (1)...(19): siRNA sense strand
cagaugagaccaaggauga

SEQ ID NO: 1175265 - RNA, 19 nt, Homo sapiens
  misc_RNA (1)...(19): siRNA sense strand
gagcagugcguccagaauu

SEQ ID NO: 1175266 - RNA, 19 nt, Homo sapiens
  misc_RNA (1)...(19): siRNA sense strand
ccagcaacgugcagaagaa

SEQ ID NO: 1175267 - RNA, 19 nt, Homo sapiens
  misc_RNA (1)...(19): siRNA sense strand
agaaggaucuccggaccua

SEQ ID NO: 1175268 - RNA, 19 nt, Homo sapiens
  misc_RNA (1)...(19): siRNA sense strand
guggagaccuucccagcaa

SEQ ID NO: 1175269 - RNA, 19 nt, Homo sapiens
  misc_RNA (1)...(19): siRNA sense strand
ggcgcaagcugguggacua

SEQ ID NO: 1175270 - RNA, 19 nt, Homo sapiens
  misc_RNA (1)...(19): siRNA sense strand
gaccugcuguggauggauu

SEQ ID NO: 1175271 - RNA, 19 nt, Homo sapiens
  misc_RNA (1)...(19): siRNA sense strand
gaagguguuugaggagaug

SEQ ID NO: 1175272 - RNA, 19 nt, Homo sapiens
  misc_RNA (1)...(19): siRNA sense strand
gcagagaugggcaguaaag

SEQ ID NO: 1175273 - RNA, 19 nt, Homo sapiens
  misc_RNA (1)...(19): siRNA sense strand
cccgagaacuucacugaga

SEQ ID NO: 1175274 - RNA, 19 nt, Homo sapiens
  misc_RNA (1)...(19): siRNA sense strand
gcaagcugguggacuacga

SEQ ID NO: 1175275 - RNA, 19 nt, Homo sapiens
  misc_RNA (1)...(19): siRNA sense strand
ggaacagccgcguagguuu

SEQ ID NO: 1175276 - RNA, 19 nt, Homo sapiens
  misc_RNA (1)...(19): siRNA sense strand
cgggaaagaucgccagcaa

SEQ ID NO: 1175277 - RNA, 19 nt, Homo sapiens
  misc_RNA (1)...(19): siRNA sense strand
ccaaggaugagcaguuuga

SEQ ID NO: 1175278 - RNA, 19 nt, Homo sapiens
  misc_RNA (1)...(19): siRNA sense strand
gcagggaugaggcaaacaa

SEQ ID NO: 1175279 - RNA, 19 nt, Homo sapiens
  misc_RNA (1)...(19): siRNA sense strand
acaacgaccugcuguggau

SEQ ID NO: 1175280 - RNA, 19 nt, Homo sapiens
  misc_RNA (1)...(19): siRNA sense strand
gggaugaggcaaacaagau

SEQ ID NO: 1175281 - RNA, 19 nt, Homo sapiens
  misc_RNA (1)...(19): siRNA sense strand
ugaaggagagcgacuggaa

SEQ ID NO: 1175282 - RNA, 19 nt, Homo sapiens
  misc_RNA (1)...(19): siRNA sense strand
gcaaacaagaucgcagaga

SEQ ID NO: 1175283 - RNA, 19 nt, Homo sapiens
  misc_RNA (1)...(19): siRNA sense strand
cuaccuggccuccgucaaa

SEQ ID NO: 1175284 - RNA, 19 nt, Homo sapiens
  misc_RNA (1)...(19): siRNA sense strand
ucaaccagaaccucaauga

SEQ ID NO: 1175285 - RNA, 19 nt, Homo sapiens
  misc_RNA (1)...(19): siRNA sense strand
cgacaucaagucacgcauu

SEQ ID NO: 1175286 - RNA, 19 nt, Homo sapiens
  misc_RNA (1)...(19): siRNA sense strand
aaccagaaccucaaugaug

SEQ ID NO: 1175287 - RNA, 19 nt, Homo sapiens
  misc_RNA (1)...(19): siRNA sense strand
gcaacaccuucacggucaa

SEQ ID NO: 1175288 - RNA, 19 nt, Homo sapiens
  misc_RNA (1)...(19): siRNA sense strand
accagaaccucaaugaugu

SEQ ID NO: 1175289 - RNA, 19 nt, Homo sapiens
  misc_RNA (1)...(19): siRNA sense strand
aggaggagcucaucaaagc

SEQ ID NO: 1175290 - RNA, 19 nt, Homo sapiens
  misc_RNA (1)...(19): siRNA sense strand
cgaggaggagcucaucaaa

SEQ ID NO: 1175291 - RNA, 19 nt, Homo sapiens
  misc_RNA (1)...(19): siRNA sense strand
agcagugcguccagaauuu

SEQ ID NO: 1175292 - RNA, 19 nt, Homo sapiens
  misc_RNA (1)...(19): siRNA sense strand
ggaaggcagaugagaccaa

SEQ ID NO: 1175293 - RNA, 19 nt, Homo sapiens
  misc_RNA (1)...(19): siRNA sense strand
ucaaagcccagaagguguu

SEQ ID NO: 1175294 - RNA, 19 nt, Homo sapiens
  misc_RNA (1)...(19): siRNA sense strand
gaggaggagcucaucaaag

SEQ ID NO: 1175295 - RNA, 19 nt, Homo sapiens
  misc_RNA (1)...(19): siRNA sense strand
acaaggagaugagcaagcu

SEQ ID NO: 1175296 - RNA, 19 nt, Homo sapiens
  misc_RNA (1)...(19): siRNA sense strand
ggaugaggcaaacaagauc

SEQ ID NO: 1175297 - RNA, 19 nt, Homo sapiens
  misc_RNA (1)...(19): siRNA sense strand
gaaggaugaagccaaaauu

SEQ ID NO: 1175298 - RNA, 19 nt, Homo sapiens
  misc_RNA (1)...(19): siRNA sense strand
ccacuacgagucccuucaa

SEQ ID NO: 1175299 - RNA, 19 nt, Homo sapiens
  misc_RNA (1)...(19): siRNA sense strand
ggauggauuaccaccagaa

SEQ ID NO: 1175300 - RNA, 19 nt, Homo sapiens
  misc_RNA (1)...(19): siRNA sense strand
caaccagaaccucaaugau

SEQ ID NO: 1175301 - RNA, 19 nt, Homo sapiens
  misc_RNA (1)...(19): siRNA sense strand
gcagugcguccagaauuuc

SEQ ID NO: 1175302 - RNA, 19 nt, Homo sapiens
  misc_RNA (1)...(19): siRNA sense strand
caagaucgcagagaacaac

SEQ ID NO: 1175303 - RNA, 19 nt, Homo sapiens
  misc_RNA (1)...(19): siRNA sense strand
agaccaaggaugagcaguu

SEQ ID NO: 1175304 - RNA, 19 nt, Homo sapiens
  misc_RNA (1)...(19): siRNA sense strand
ugacaacgcgccugcaaaa

SEQ ID NO: 1175305 - RNA, 19 nt, Homo sapiens
  misc_RNA (1)...(19): siRNA sense strand
agaagguguuugaggagau

SEQ ID NO: 1175306 - RNA, 19 nt, Homo sapiens
  misc_RNA (1)...(19): siRNA sense strand
cacuacgagucccuucaaa

SEQ ID NO: 1175307 - RNA, 19 nt, Homo sapiens
  misc_RNA (1)...(19): siRNA sense strand
ucaacacguuccagagcau

SEQ ID NO: 1175308 - RNA, 19 nt, Homo sapiens
  misc_RNA (1)...(19): siRNA sense strand
gccagcaacgugcagaaga

SEQ ID NO: 1175309 - RNA, 19 nt, Homo sapiens
  misc_RNA (1)...(19): siRNA sense strand
cguccagaauuucaacaag

SEQ ID NO: 1175310 - RNA, 19 nt, Homo sapiens
  misc_RNA (1)...(19): siRNA sense strand
uccagaauuucaacaagca

SEQ ID NO: 1175311 - RNA, 19 nt, Homo sapiens
  misc_RNA (1)...(19): siRNA sense strand
cuacacggccacugacaca

SEQ ID NO: 1175312 - RNA, 19 nt, Homo sapiens
  misc_RNA (1)...(19): siRNA sense strand
gcucaaccagaaccucaau

SEQ ID NO: 1175313 - RNA, 19 nt, Homo sapiens
  misc_RNA (1)...(19): siRNA sense strand
uggaacagccgcguagguu

SEQ ID NO: 1175314 - RNA, 19 nt, Homo sapiens
  misc_RNA (1)...(19): siRNA sense strand
gcucaucaaagcccagaag

SEQ ID NO: 1175315 - RNA, 19 nt, Homo sapiens
  misc_RNA (1)...(19): siRNA sense strand
caaacaagaucgcagagaa

SEQ ID NO: 1175316 - RNA, 19 nt, Homo sapiens
  misc_RNA (1)...(19): siRNA sense strand
gcucaaggcuggugaugug

SEQ ID NO: 1175317 - RNA, 19 nt, Homo sapiens
  misc_RNA (1)...(19): siRNA sense strand
gaccaaggaugagcaguuu

SEQ ID NO: 1175318 - RNA, 19 nt, Homo sapiens
  misc_RNA (1)...(19): siRNA sense strand
aaagaaggaugaagccaaa

SEQ ID NO: 1175319 - RNA, 19 nt, Homo sapiens
  misc_RNA (1)...(19): siRNA sense strand
gacaucaagucacgcauug

SEQ ID NO: 1175320 - RNA, 19 nt, Homo sapiens
  misc_RNA (1)...(19): siRNA sense strand
gaacagccgcguagguuuc

SEQ ID NO: 1175321 - RNA, 19 nt, Homo sapiens
  misc_RNA (1)...(19): siRNA sense strand
cagaugagaccaaggauga

SEQ ID NO: 1175322 - RNA, 19 nt, Homo sapiens
  misc_RNA (1)...(19): siRNA sense strand
gagcagugcguccagaauu

SEQ ID NO: 1175323 - RNA, 19 nt, Homo sapiens
  misc_RNA (1)...(19): siRNA sense strand
ccagcaacgugcagaagaa

SEQ ID NO: 1175324 - RNA, 19 nt, Homo sapiens
  misc_RNA (1)...(19): siRNA sense strand
agaaggaucuccggaccua

SEQ ID NO: 1175325 - RNA, 19 nt, Homo sapiens
  misc_RNA (1)...(19): siRNA sense strand
guggagaccuucccagcaa

SEQ ID NO: 1175326 - RNA, 19 nt, Homo sapiens
  misc_RNA (1)...(19): siRNA sense strand
ggcgcaagcugguggacua

SEQ ID NO: 1175327 - RNA, 19 nt, Homo sapiens
  misc_RNA (1)...(19): siRNA sense strand
gaccugcuguggauggauu

SEQ ID NO: 1175328 - RNA, 19 nt, Homo sapiens
  misc_RNA (1)...(19): siRNA sense strand
gaagguguuugaggagaug

SEQ ID NO: 1175329 - RNA, 19 nt, Homo sapiens
  misc_RNA (1)...(19): siRNA sense strand
gcagagaugggcaguaaag

SEQ ID NO: 1175330 - RNA, 19 nt, Homo sapiens
  misc_RNA (1)...(19): siRNA sense strand
cccgagaacuucacugaga

SEQ ID NO: 1175331 - RNA, 19 nt, Homo sapiens
  misc_RNA (1)...(19): siRNA sense strand
gcaagcugguggacuacga

SEQ ID NO: 1175332 - RNA, 19 nt, Homo sapiens
  misc_RNA (1)...(19): siRNA sense strand
ggaacagccgcguagguuu

SEQ ID NO: 1175333 - RNA, 19 nt, Homo sapiens
  misc_RNA (1)...(19): siRNA sense strand
cgggaaagaucgccagcaa

SEQ ID NO: 1175334 - RNA, 19 nt, Homo sapiens
  misc_RNA (1)...(19): siRNA sense strand
ccaaggaugagcaguuuga

SEQ ID NO: 1175335 - RNA, 19 nt, Homo sapiens
  misc_RNA (1)...(19): siRNA sense strand
gcagggaugaggcaaacaa

SEQ ID NO: 1175336 - RNA, 19 nt, Homo sapiens
  misc_RNA (1)...(19): siRNA sense strand
acaacgaccugcuguggau

SEQ ID NO: 1175337 - RNA, 19 nt, Homo sapiens
  misc_RNA (1)...(19): siRNA sense strand
gggaugaggcaaacaagau

SEQ ID NO: 1175338 - RNA, 19 nt, Homo sapiens
  misc_RNA (1)...(19): siRNA sense strand
ugaaggagagcgacuggaa

SEQ ID NO: 1175339 - RNA, 19 nt, Homo sapiens
  misc_RNA (1)...(19): siRNA sense strand
gcaaacaagaucgcagaga

SEQ ID NO: 1175340 - RNA, 19 nt, Homo sapiens
  misc_RNA (1)...(19): siRNA sense strand
cuaccuggccuccgucaaa

SEQ ID NO: 1175341 - RNA, 19 nt, Homo sapiens
  misc_RNA (1)...(19): siRNA sense strand
ucaaccagaaccucaauga

SEQ ID NO: 1175342 - RNA, 19 nt, Homo sapiens
  misc_RNA (1)...(19): siRNA sense strand
cgacaucaagucacgcauu

SEQ ID NO: 1175343 - RNA, 19 nt, Homo sapiens
  misc_RNA (1)...(19): siRNA sense strand
aaccagaaccucaaugaug

SEQ ID NO: 1175344 - RNA, 19 nt, Homo sapiens
  misc_RNA (1)...(19): siRNA sense strand
gcaacaccuucacggucaa

SEQ ID NO: 1175345 - RNA, 19 nt, Homo sapiens
  misc_RNA (1)...(19): siRNA sense strand
accagaaccucaaugaugu

SEQ ID NO: 1175346 - RNA, 19 nt, Homo sapiens
  misc_RNA (1)...(19): siRNA sense strand
aggaggagcucaucaaagc

SEQ ID NO: 1175347 - RNA, 19 nt, Homo sapiens
  misc_RNA (1)...(19): siRNA sense strand
cgaggaggagcucaucaaa

SEQ ID NO: 1175348 - RNA, 19 nt, Homo sapiens
  misc_RNA (1)...(19): siRNA sense strand
agcagugcguccagaauuu

SEQ ID NO: 1175349 - RNA, 19 nt, Homo sapiens
  misc_RNA (1)...(19): siRNA sense strand
ggaaggcagaugagaccaa

SEQ ID NO: 1175350 - RNA, 19 nt, Homo sapiens
  misc_RNA (1)...(19): siRNA sense strand
ucaaagcccagaagguguu

SEQ ID NO: 1175351 - RNA, 19 nt, Homo sapiens
  misc_RNA (1)...(19): siRNA sense strand
gaggaggagcucaucaaag

SEQ ID NO: 1175352 - RNA, 19 nt, Homo sapiens
  misc_RNA (1)...(19): siRNA sense strand
acaaggagaugagcaagcu

SEQ ID NO: 1175353 - RNA, 19 nt, Homo sapiens
  misc_RNA (1)...(19): siRNA sense strand
ggaugaggcaaacaagauc

SEQ ID NO: 1175354 - RNA, 19 nt, Homo sapiens
  misc_RNA (1)...(19): siRNA sense strand
gaaggaugaagccaaaauu

SEQ ID NO: 1175355 - RNA, 19 nt, Homo sapiens
  misc_RNA (1)...(19): siRNA sense strand
ccacuacgagucccuucaa

SEQ ID NO: 1175356 - RNA, 19 nt, Homo sapiens
  misc_RNA (1)...(19): siRNA sense strand
ggauggauuaccaccagaa

SEQ ID NO: 1175357 - RNA, 19 nt, Homo sapiens
  misc_RNA (1)...(19): siRNA sense strand
caaccagaaccucaaugau

SEQ ID NO: 1175358 - RNA, 19 nt, Homo sapiens
  misc_RNA (1)...(19): siRNA sense strand
gcagugcguccagaauuuc

SEQ ID NO: 1175359 - RNA, 19 nt, Homo sapiens
  misc_RNA (1)...(19): siRNA sense strand
caagaucgcagagaacaac

SEQ ID NO: 1175360 - RNA, 19 nt, Homo sapiens
  misc_RNA (1)...(19): siRNA sense strand
agaccaaggaugagcaguu

SEQ ID NO: 1175361 - RNA, 19 nt, Homo sapiens
  misc_RNA (1)...(19): siRNA sense strand
ugacaacgcgccugcaaaa

SEQ ID NO: 1175362 - RNA, 19 nt, Homo sapiens
  misc_RNA (1)...(19): siRNA sense strand
agaagguguuugaggagau

SEQ ID NO: 1175363 - RNA, 19 nt, Homo sapiens
  misc_RNA (1)...(19): siRNA sense strand
cacuacgagucccuucaaa

SEQ ID NO: 1175364 - RNA, 19 nt, Homo sapiens
  misc_RNA (1)...(19): siRNA sense strand
ucaacacguuccagagcau

SEQ ID NO: 1175365 - RNA, 19 nt, Homo sapiens
  misc_RNA (1)...(19): siRNA sense strand
gccagcaacgugcagaaga

SEQ ID NO: 1175366 - RNA, 19 nt, Homo sapiens
  misc_RNA (1)...(19): siRNA sense strand
cguccagaauuucaacaag

SEQ ID NO: 1175367 - RNA, 19 nt, Homo sapiens
  misc_RNA (1)...(19): siRNA sense strand
uccagaauuucaacaagca

SEQ ID NO: 1175368 - RNA, 19 nt, Homo sapiens
  misc_RNA (1)...(19): siRNA sense strand
cuacacggccacugacaca

SEQ ID NO: 1175369 - RNA, 19 nt, Homo sapiens
  misc_RNA (1)...(19): siRNA sense strand
gcucaaccagaaccucaau

SEQ ID NO: 1175370 - RNA, 19 nt, Homo sapiens
  misc_RNA (1)...(19): siRNA sense strand
uggaacagccgcguagguu

SEQ ID NO: 1175371 - RNA, 19 nt, Homo sapiens
  misc_RNA (1)...(19): siRNA sense strand
gcucaucaaagcccagaag

SEQ ID NO: 1175372 - RNA, 19 nt, Homo sapiens
  misc_RNA (1)...(19): siRNA sense strand
caaacaagaucgcagagaa

SEQ ID NO: 1175373 - RNA, 19 nt, Homo sapiens
  misc_RNA (1)...(19): siRNA sense strand
gcucaaggcuggugaugug

SEQ ID NO: 1175374 - RNA, 19 nt, Homo sapiens
  misc_RNA (1)...(19): siRNA sense strand
gaccaaggaugagcaguuu

SEQ ID NO: 1175375 - RNA, 19 nt, Homo sapiens
  misc_RNA (1)...(19): siRNA sense strand
aaagaaggaugaagccaaa

SEQ ID NO: 1175376 - RNA, 19 nt, Homo sapiens
  misc_RNA (1)...(19): siRNA sense strand
gacaucaagucacgcauug

SEQ ID NO: 1175377 - RNA, 19 nt, Homo sapiens
  misc_RNA (1)...(19): siRNA sense strand
gaacagccgcguagguuuc

SEQ ID NO: 1175378 - RNA, 19 nt, Homo sapiens
  misc_RNA (1)...(19): siRNA sense strand
cagaugagaccaaggauga

SEQ ID NO: 1175379 - RNA, 19 nt, Homo sapiens
  misc_RNA (1)...(19): siRNA sense strand
gagcagugcguccagaauu

SEQ ID NO: 1175380 - RNA, 19 nt, Homo sapiens
  misc_RNA (1)...(19): siRNA sense strand
ccagcaacgugcagaagaa

SEQ ID NO: 1175381 - RNA, 19 nt, Homo sapiens
  misc_RNA (1)...(19): siRNA sense strand
agaaggaucuccggaccua

SEQ ID NO: 1175382 - RNA, 19 nt, Homo sapiens
  misc_RNA (1)...(19): siRNA sense strand
guggagaccuucccagcaa

SEQ ID NO: 1175383 - RNA, 19 nt, Homo sapiens
  misc_RNA (1)...(19): siRNA sense strand
ggcgcaagcugguggacua

SEQ ID NO: 1175384 - RNA, 19 nt, Homo sapiens
  misc_RNA (1)...(19): siRNA sense strand
gaccugcuguggauggauu

SEQ ID NO: 1175385 - RNA, 19 nt, Homo sapiens
  misc_RNA (1)...(19): siRNA sense strand
gaagguguuugaggagaug

SEQ ID NO: 1175386 - RNA, 19 nt, Homo sapiens
  misc_RNA (1)...(19): siRNA sense strand
gcagagaugggcaguaaag

SEQ ID NO: 1175387 - RNA, 19 nt, Homo sapiens
  misc_RNA (1)...(19): siRNA sense strand
cccgagaacuucacugaga

SEQ ID NO: 1175388 - RNA, 19 nt, Homo sapiens
  misc_RNA (1)...(19): siRNA sense strand
gcaagcugguggacuacga

SEQ ID NO: 1175389 - RNA, 19 nt, Homo sapiens
  misc_RNA (1)...(19): siRNA sense strand
ggaacagccgcguagguuu

SEQ ID NO: 1175390 - RNA, 19 nt, Homo sapiens
  misc_RNA (1)...(19): siRNA sense strand
cgggaaagaucgccagcaa

SEQ ID NO: 1175391 - RNA, 19 nt, Homo sapiens
  misc_RNA (1)...(19): siRNA sense strand
ccaaggaugagcaguuuga

SEQ ID NO: 1175392 - RNA, 19 nt, Homo sapiens
  misc_RNA (1)...(19): siRNA sense strand
gcagggaugaggcaaacaa

SEQ ID NO: 1175393 - RNA, 19 nt, Homo sapiens
  misc_RNA (1)...(19): siRNA sense strand
acaacgaccugcuguggau

SEQ ID NO: 1175394 - RNA, 19 nt, Homo sapiens
  misc_RNA (1)...(19): siRNA sense strand
gggaugaggcaaacaagau

SEQ ID NO: 1175395 - RNA, 19 nt, Homo sapiens
  misc_RNA (1)...(19): siRNA sense strand
ugaaggagagcgacuggaa

SEQ ID NO: 1175396 - RNA, 19 nt, Homo sapiens
  misc_RNA (1)...(19): siRNA sense strand
gcaaacaagaucgcagaga

SEQ ID NO: 1175397 - RNA, 19 nt, Homo sapiens
  misc_RNA (1)...(19): siRNA sense strand
cuaccuggccuccgucaaa

SEQ ID NO: 1175398 - RNA, 19 nt, Homo sapiens
  misc_RNA (1)...(19): siRNA sense strand
ucaaccagaaccucaauga

SEQ ID NO: 1175399 - RNA, 19 nt, Homo sapiens
  misc_RNA (1)...(19): siRNA sense strand
cgacaucaagucacgcauu

SEQ ID NO: 1175400 - RNA, 19 nt, Homo sapiens
  misc_RNA (1)...(19): siRNA sense strand
aaccagaaccucaaugaug

SEQ ID NO: 1175401 - RNA, 19 nt, Homo sapiens
  misc_RNA (1)...(19): siRNA sense strand
gcaacaccuucacggucaa

SEQ ID NO: 1175402 - RNA, 19 nt, Homo sapiens
  misc_RNA (1)...(19): siRNA sense strand
accagaaccucaaugaugu

SEQ ID NO: 1175403 - RNA, 19 nt, Homo sapiens
  misc_RNA (1)...(19): siRNA sense strand
aggaggagcucaucaaagc

SEQ ID NO: 1175404 - RNA, 19 nt, Homo sapiens
  misc_RNA (1)...(19): siRNA sense strand
cgaggaggagcucaucaaa

SEQ ID NO: 1175405 - RNA, 19 nt, Homo sapiens
  misc_RNA (1)...(19): siRNA sense strand
agcagugcguccagaauuu

SEQ ID NO: 1175406 - RNA, 19 nt, Homo sapiens
  misc_RNA (1)...(19): siRNA sense strand
ggaaggcagaugagaccaa

SEQ ID NO: 1175407 - RNA, 19 nt, Homo sapiens
  misc_RNA (1)...(19): siRNA sense strand
ucaaagcccagaagguguu

SEQ ID NO: 1175408 - RNA, 19 nt, Homo sapiens
  misc_RNA (1)...(19): siRNA sense strand
gaggaggagcucaucaaag

SEQ ID NO: 1175409 - RNA, 19 nt, Homo sapiens
  misc_RNA (1)...(19): siRNA sense strand
acaaggagaugagcaagcu

SEQ ID NO: 1175410 - RNA, 19 nt, Homo sapiens
  misc_RNA (1)...(19): siRNA sense strand
ggaugaggcaaacaagauc

SEQ ID NO: 1175411 - RNA, 19 nt, Homo sapiens
  misc_RNA (1)...(19): siRNA sense strand
gaaggaugaagccaaaauu

SEQ ID NO: 1175412 - RNA, 19 nt, Homo sapiens
  misc_RNA (1)...(19): siRNA sense strand
ccacuacgagucccuucaa

SEQ ID NO: 1175413 - RNA, 19 nt, Homo sapiens
  misc_RNA (1)...(19): siRNA sense strand
ggauggauuaccaccagaa

SEQ ID NO: 1175414 - RNA, 19 nt, Homo sapiens
  misc_RNA (1)...(19): siRNA sense strand
caaccagaaccucaaugau

SEQ ID NO: 1175415 - RNA, 19 nt, Homo sapiens
  misc_RNA (1)...(19): siRNA sense strand
gcagugcguccagaauuuc

SEQ ID NO: 1175416 - RNA, 19 nt, Homo sapiens
  misc_RNA (1)...(19): siRNA sense strand
caagaucgcagagaacaac

SEQ ID NO: 1175417 - RNA, 19 nt, Homo sapiens
  misc_RNA (1)...(19): siRNA sense strand
agaccaaggaugagcaguu

SEQ ID NO: 1175418 - RNA, 19 nt, Homo sapiens
  misc_RNA (1)...(19): siRNA sense strand
ugacaacgcgccugcaaaa

SEQ ID NO: 1175419 - RNA, 19 nt, Homo sapiens
  misc_RNA (1)...(19): siRNA sense strand
agaagguguuugaggagau

SEQ ID NO: 1175420 - RNA, 19 nt, Homo sapiens
  misc_RNA (1)...(19): siRNA sense strand
cacuacgagucccuucaaa

SEQ ID NO: 1175421 - RNA, 19 nt, Homo sapiens
  misc_RNA (1)...(19): siRNA sense strand
ucaacacguuccagagcau

SEQ ID NO: 1175422 - RNA, 19 nt, Homo sapiens
  misc_RNA (1)...(19): siRNA sense strand
gccagcaacgugcagaaga

SEQ ID NO: 1175423 - RNA, 19 nt, Homo sapiens
  misc_RNA (1)...(19): siRNA sense strand
cguccagaauuucaacaag

SEQ ID NO: 1175424 - RNA, 19 nt, Homo sapiens
  misc_RNA (1)...(19): siRNA sense strand
uccagaauuucaacaagca

SEQ ID NO: 1175425 - RNA, 19 nt, Homo sapiens
  misc_RNA (1)...(19): siRNA sense strand
cuacacggccacugacaca

SEQ ID NO: 1175426 - RNA, 19 nt, Homo sapiens
  misc_RNA (1)...(19): siRNA sense strand
gcucaaccagaaccucaau

SEQ ID NO: 1175427 - RNA, 19 nt, Homo sapiens
  misc_RNA (1)...(19): siRNA sense strand
uggaacagccgcguagguu

SEQ ID NO: 1175428 - RNA, 19 nt, Homo sapiens
  misc_RNA (1)...(19): siRNA sense strand
gcucaucaaagcccagaag

SEQ ID NO: 1175429 - RNA, 19 nt, Homo sapiens
  misc_RNA (1)...(19): siRNA sense strand
caaacaagaucgcagagaa

SEQ ID NO: 1175430 - RNA, 19 nt, Homo sapiens
  misc_RNA (1)...(19): siRNA sense strand
gcucaaggcuggugaugug

SEQ ID NO: 1175431 - RNA, 19 nt, Homo sapiens
  misc_RNA (1)...(19): siRNA sense strand
gaccaaggaugagcaguuu

SEQ ID NO: 1175432 - RNA, 19 nt, Homo sapiens
  misc_RNA (1)...(19): siRNA sense strand
aaagaaggaugaagccaaa

SEQ ID NO: 1175433 - RNA, 19 nt, Homo sapiens
  misc_RNA (1)...(19): siRNA sense strand
gacaucaagucacgcauug

SEQ ID NO: 1175434 - RNA, 19 nt, Homo sapiens
  misc_RNA (1)...(19): siRNA sense strand
gaacagccgcguagguuuc

SEQ ID NO: 1175435 - RNA, 19 nt, Homo sapiens
  misc_RNA (1)...(19): siRNA sense strand
cagaugagaccaaggauga

SEQ ID NO: 1175436 - RNA, 19 nt, Homo sapiens
  misc_RNA (1)...(19): siRNA sense strand
gagcagugcguccagaauu

SEQ ID NO: 1175437 - RNA, 19 nt, Homo sapiens
  misc_RNA (1)...(19): siRNA sense strand
ccagcaacgugcagaagaa

SEQ ID NO: 1175438 - RNA, 19 nt, Homo sapiens
  misc_RNA (1)...(19): siRNA sense strand
agaaggaucuccggaccua

SEQ ID NO: 1175439 - RNA, 19 nt, Homo sapiens
  misc_RNA (1)...(19): siRNA sense strand
guggagaccuucccagcaa

SEQ ID NO: 1175440 - RNA, 19 nt, Homo sapiens
  misc_RNA (1)...(19): siRNA sense strand
ggcgcaagcugguggacua

SEQ ID NO: 1175441 - RNA, 19 nt, Homo sapiens
  misc_RNA (1)...(19): siRNA sense strand
gaccugcuguggauggauu

SEQ ID NO: 1175442 - RNA, 19 nt, Homo sapiens
  misc_RNA (1)...(19): siRNA sense strand
gaagguguuugaggagaug

SEQ ID NO: 1175443 - RNA, 19 nt, Homo sapiens
  misc_RNA (1)...(19): siRNA sense strand
gcagagaugggcaguaaag

SEQ ID NO: 1175444 - RNA, 19 nt, Homo sapiens
  misc_RNA (1)...(19): siRNA sense strand
cccgagaacuucacugaga

SEQ ID NO: 1175445 - RNA, 19 nt, Homo sapiens
  misc_RNA (1)...(19): siRNA sense strand
gcaagcugguggacuacga

SEQ ID NO: 1175446 - RNA, 19 nt, Homo sapiens
  misc_RNA (1)...(19): siRNA sense strand
ggaacagccgcguagguuu

SEQ ID NO: 1175447 - RNA, 19 nt, Homo sapiens
  misc_RNA (1)...(19): siRNA sense strand
cgggaaagaucgccagcaa

SEQ ID NO: 1175448 - RNA, 19 nt, Homo sapiens
  misc_RNA (1)...(19): siRNA sense strand
ccaaggaugagcaguuuga

SEQ ID NO: 1175449 - RNA, 19 nt, Homo sapiens
  misc_RNA (1)...(19): siRNA sense strand
gcagggaugaggcaaacaa

SEQ ID NO: 1175450 - RNA, 19 nt, Homo sapiens
  misc_RNA (1)...(19): siRNA sense strand
acaacgaccugcuguggau

SEQ ID NO: 1175451 - RNA, 19 nt, Homo sapiens
  misc_RNA (1)...(19): siRNA sense strand
gggaugaggcaaacaagau

SEQ ID NO: 1175452 - RNA, 19 nt, Homo sapiens
  misc_RNA (1)...(19): siRNA sense strand
ugaaggagagcgacuggaa

SEQ ID NO: 1175453 - RNA, 19 nt, Homo sapiens
  misc_RNA (1)...(19): siRNA sense strand
gcaaacaagaucgcagaga

SEQ ID NO: 1175454 - RNA, 19 nt, Homo sapiens
  misc_RNA (1)...(19): siRNA sense strand
cuaccuggccuccgucaaa

SEQ ID NO: 1175455 - RNA, 19 nt, Homo sapiens
  misc_RNA (1)...(19): siRNA sense strand
ucaaccagaaccucaauga

SEQ ID NO: 1175456 - RNA, 19 nt, Homo sapiens
  misc_RNA (1)...(19): siRNA sense strand
cgacaucaagucacgcauu

SEQ ID NO: 1175457 - RNA, 19 nt, Homo sapiens
  misc_RNA (1)...(19): siRNA sense strand
aaccagaaccucaaugaug

SEQ ID NO: 1175458 - RNA, 19 nt, Homo sapiens
  misc_RNA (1)...(19): siRNA sense strand
gcaacaccuucacggucaa

SEQ ID NO: 1175459 - RNA, 19 nt, Homo sapiens
  misc_RNA (1)...(19): siRNA sense strand
accagaaccucaaugaugu

SEQ ID NO: 1175460 - RNA, 19 nt, Homo sapiens
  misc_RNA (1)...(19): siRNA sense strand
aggaggagcucaucaaagc

SEQ ID NO: 1175461 - RNA, 19 nt, Homo sapiens
  misc_RNA (1)...(19): siRNA sense strand
cgaggaggagcucaucaaa

SEQ ID NO: 1175462 - RNA, 19 nt, Homo sapiens
  misc_RNA (1)...(19): siRNA sense strand
agcagugcguccagaauuu

SEQ ID NO: 1175463 - RNA, 19 nt, Homo sapiens
  misc_RNA (1)...(19): siRNA sense strand
ggaaggcagaugagaccaa

SEQ ID NO: 1175464 - RNA, 19 nt, Homo sapiens
  misc_RNA (1)...(19): siRNA sense strand
ucaaagcccagaagguguu

SEQ ID NO: 1175465 - RNA, 19 nt, Homo sapiens
  misc_RNA (1)...(19): siRNA sense strand
gaggaggagcucaucaaag

SEQ ID NO: 1175466 - RNA, 19 nt, Homo sapiens
  misc_RNA (1)...(19): siRNA sense strand
acaaggagaugagcaagcu

SEQ ID NO: 1175467 - RNA, 19 nt, Homo sapiens
  misc_RNA (1)...(19): siRNA sense strand
ggaugaggcaaacaagauc

SEQ ID NO: 1175468 - RNA, 19 nt, Homo sapiens
  misc_RNA (1)...(19): siRNA sense strand
gaaggaugaagccaaaauu

SEQ ID NO: 1175469 - RNA, 19 nt, Homo sapiens
  misc_RNA (1)...(19): siRNA sense strand
ccacuacgagucccuucaa

SEQ ID NO: 1175470 - RNA, 19 nt, Homo sapiens
  misc_RNA (1)...(19): siRNA sense strand
ggauggauuaccaccagaa

SEQ ID NO: 1175471 - RNA, 19 nt, Homo sapiens
  misc_RNA (1)...(19): siRNA sense strand
caaccagaaccucaaugau

SEQ ID NO: 1175472 - RNA, 19 nt, Homo sapiens
  misc_RNA (1)...(19): siRNA sense strand
gcagugcguccagaauuuc

SEQ ID NO: 1175473 - RNA, 19 nt, Homo sapiens
  misc_RNA (1)...(19): siRNA sense strand
caagaucgcagagaacaac

SEQ ID NO: 1175474 - RNA, 19 nt, Homo sapiens
  misc_RNA (1)...(19): siRNA sense strand
agaccaaggaugagcaguu

SEQ ID NO: 1175475 - RNA, 19 nt, Homo sapiens
  misc_RNA (1)...(19): siRNA sense strand
ugacaacgcgccugcaaaa

SEQ ID NO: 1175476 - RNA, 19 nt, Homo sapiens
  misc_RNA (1)...(19): siRNA sense strand
agaagguguuugaggagau

SEQ ID NO: 1175477 - RNA, 19 nt, Homo sapiens
  misc_RNA (1)...(19): siRNA sense strand
cacuacgagucccuucaaa

SEQ ID NO: 1175478 - RNA, 19 nt, Homo sapiens
  misc_RNA (1)...(19): siRNA sense strand
ucaacacguuccagagcau

SEQ ID NO: 1175479 - RNA, 19 nt, Homo sapiens
  misc_RNA (1)...(19): siRNA sense strand
gccagcaacgugcagaaga

SEQ ID NO: 1175480 - RNA, 19 nt, Homo sapiens
  misc_RNA (1)...(19): siRNA sense strand
cguccagaauuucaacaag

SEQ ID NO: 1175481 - RNA, 19 nt, Homo sapiens
  misc_RNA (1)...(19): siRNA sense strand
uccagaauuucaacaagca

SEQ ID NO: 1175482 - RNA, 19 nt, Homo sapiens
  misc_RNA (1)...(19): siRNA sense strand
cuacacggccacugacaca

SEQ ID NO: 1175483 - RNA, 19 nt, Homo sapiens
  misc_RNA (1)...(19): siRNA sense strand
gcucaaccagaaccucaau

SEQ ID NO: 1175484 - RNA, 19 nt, Homo sapiens
  misc_RNA (1)...(19): siRNA sense strand
uggaacagccgcguagguu

SEQ ID NO: 1175485 - RNA, 19 nt, Homo sapiens
  misc_RNA (1)...(19): siRNA sense strand
gcucaucaaagcccagaag

SEQ ID NO: 1175486 - RNA, 19 nt, Homo sapiens
  misc_RNA (1)...(19): siRNA sense strand
caaacaagaucgcagagaa

SEQ ID NO: 1175487 - RNA, 19 nt, Homo sapiens
  misc_RNA (1)...(19): siRNA sense strand
gcucaaggcuggugaugug

SEQ ID NO: 1175488 - RNA, 19 nt, Homo sapiens
  misc_RNA (1)...(19): siRNA sense strand
gaccaaggaugagcaguuu

SEQ ID NO: 1175489 - RNA, 19 nt, Homo sapiens
  misc_RNA (1)...(19): siRNA sense strand
aaagaaggaugaagccaaa

SEQ ID NO: 1175490 - RNA, 19 nt, Homo sapiens
  misc_RNA (1)...(19): siRNA sense strand
gacaucaagucacgcauug

SEQ ID NO: 1175491 - RNA, 19 nt, Homo sapiens
  misc_RNA (1)...(19): siRNA sense strand
gaacagccgcguagguuuc

SEQ ID NO: 1175492 - RNA, 19 nt, Homo sapiens
  misc_RNA (1)...(19): siRNA sense strand
cagaugagaccaaggauga

SEQ ID NO: 1175493 - RNA, 19 nt, Homo sapiens
  misc_RNA (1)...(19): siRNA sense strand
gagcagugcguccagaauu

SEQ ID NO: 1175494 - RNA, 19 nt, Homo sapiens
  misc_RNA (1)...(19): siRNA sense strand
ccagcaacgugcagaagaa

SEQ ID NO: 1175495 - RNA, 19 nt, Homo sapiens
  misc_RNA (1)...(19): siRNA sense strand
agaaggaucuccggaccua

SEQ ID NO: 1175496 - RNA, 19 nt, Homo sapiens
  misc_RNA (1)...(19): siRNA sense strand
guggagaccuucccagcaa

SEQ ID NO: 1175497 - RNA, 19 nt, Homo sapiens
  misc_RNA (1)...(19): siRNA sense strand
ggcgcaagcugguggacua

SEQ ID NO: 1175498 - RNA, 19 nt, Homo sapiens
  misc_RNA (1)...(19): siRNA sense strand
gaccugcuguggauggauu

SEQ ID NO: 1175499 - RNA, 19 nt, Homo sapiens
  misc_RNA (1)...(19): siRNA sense strand
gaagguguuugaggagaug

SEQ ID NO: 1175500 - RNA, 19 nt, Homo sapiens
  misc_RNA (1)...(19): siRNA sense strand
gcagagaugggcaguaaag

SEQ ID NO: 1175501 - RNA, 19 nt, Homo sapiens
  misc_RNA (1)...(19): siRNA sense strand
cccgagaacuucacugaga

SEQ ID NO: 1175502 - RNA, 19 nt, Homo sapiens
  misc_RNA (1)...(19): siRNA sense strand
gcaagcugguggacuacga

SEQ ID NO: 1175503 - RNA, 19 nt, Homo sapiens
  misc_RNA (1)...(19): siRNA sense strand
ggaacagccgcguagguuu

SEQ ID NO: 1175504 - RNA, 19 nt, Homo sapiens
  misc_RNA (1)...(19): siRNA sense strand
cgggaaagaucgccagcaa

SEQ ID NO: 1175505 - RNA, 19 nt, Homo sapiens
  misc_RNA (1)...(19): siRNA sense strand
ccaaggaugagcaguuuga

SEQ ID NO: 1175506 - RNA, 19 nt, Homo sapiens
  misc_RNA (1)...(19): siRNA sense strand
gcagggaugaggcaaacaa

SEQ ID NO: 1175507 - RNA, 19 nt, Homo sapiens
  misc_RNA (1)...(19): siRNA sense strand
acaacgaccugcuguggau

SEQ ID NO: 1175508 - RNA, 19 nt, Homo sapiens
  misc_RNA (1)...(19): siRNA sense strand
gggaugaggcaaacaagau

SEQ ID NO: 1175509 - RNA, 19 nt, Homo sapiens
  misc_RNA (1)...(19): siRNA sense strand
ugaaggagagcgacuggaa

SEQ ID NO: 1175510 - RNA, 19 nt, Homo sapiens
  misc_RNA (1)...(19): siRNA sense strand
gcaaacaagaucgcagaga

SEQ ID NO: 1175511 - RNA, 19 nt, Homo sapiens
  misc_RNA (1)...(19): siRNA sense strand
cuaccuggccuccgucaaa

SEQ ID NO: 1175512 - RNA, 19 nt, Homo sapiens
  misc_RNA (1)...(19): siRNA sense strand
ucaaccagaaccucaauga

SEQ ID NO: 1175513 - RNA, 19 nt, Homo sapiens
  misc_RNA (1)...(19): siRNA sense strand
cgacaucaagucacgcauu

SEQ ID NO: 1175514 - RNA, 19 nt, Homo sapiens
  misc_RNA (1)...(19): siRNA sense strand
aaccagaaccucaaugaug

SEQ ID NO: 1175515 - RNA, 19 nt, Homo sapiens
  misc_RNA (1)...(19): siRNA sense strand
gcaacaccuucacggucaa

SEQ ID NO: 1175516 - RNA, 19 nt, Homo sapiens
  misc_RNA (1)...(19): siRNA sense strand
accagaaccucaaugaugu

SEQ ID NO: 1175517 - RNA, 19 nt, Homo sapiens
  misc_RNA (1)...(19): siRNA sense strand
aggaggagcucaucaaagc

SEQ ID NO: 1175518 - RNA, 19 nt, Homo sapiens
  misc_RNA (1)...(19): siRNA sense strand
cgaggaggagcucaucaaa

SEQ ID NO: 1175519 - RNA, 19 nt, Homo sapiens
  misc_RNA (1)...(19): siRNA sense strand
agcagugcguccagaauuu

SEQ ID NO: 1175520 - RNA, 19 nt, Homo sapiens
  misc_RNA (1)...(19): siRNA sense strand
ggaaggcagaugagaccaa

SEQ ID NO: 1175521 - RNA, 19 nt, Homo sapiens
  misc_RNA (1)...(19): siRNA sense strand
ucaaagcccagaagguguu

SEQ ID NO: 1175522 - RNA, 19 nt, Homo sapiens
  misc_RNA (1)...(19): siRNA sense strand
gaggaggagcucaucaaag

SEQ ID NO: 1175523 - RNA, 19 nt, Homo sapiens
  misc_RNA (1)...(19): siRNA sense strand
acaaggagaugagcaagcu

SEQ ID NO: 1175524 - RNA, 19 nt, Homo sapiens
  misc_RNA (1)...(19): siRNA sense strand
ggaugaggcaaacaagauc

SEQ ID NO: 1175525 - RNA, 19 nt, Homo sapiens
  misc_RNA (1)...(19): siRNA sense strand
gaaggaugaagccaaaauu

SEQ ID NO: 1175526 - RNA, 19 nt, Homo sapiens
  misc_RNA (1)...(19): siRNA sense strand
ccacuacgagucccuucaa

SEQ ID NO: 1175527 - RNA, 19 nt, Homo sapiens
  misc_RNA (1)...(19): siRNA sense strand
ggauggauuaccaccagaa

SEQ ID NO: 1175528 - RNA, 19 nt, Homo sapiens
  misc_RNA (1)...(19): siRNA sense strand
caaccagaaccucaaugau

SEQ ID NO: 1175529 - RNA, 19 nt, Homo sapiens
  misc_RNA (1)...(19): siRNA sense strand
gcagugcguccagaauuuc

SEQ ID NO: 1175530 - RNA, 19 nt, Homo sapiens
  misc_RNA (1)...(19): siRNA sense strand
caagaucgcagagaacaac

SEQ ID NO: 1175531 - RNA, 19 nt, Homo sapiens
  misc_RNA (1)...(19): siRNA sense strand
agaccaaggaugagcaguu

SEQ ID NO: 1175532 - RNA, 19 nt, Homo sapiens
  misc_RNA (1)...(19): siRNA sense strand
ugacaacgcgccugcaaaa

SEQ ID NO: 1175533 - RNA, 19 nt, Homo sapiens
  misc_RNA (1)...(19): siRNA sense strand
agaagguguuugaggagau

SEQ ID NO: 1175534 - RNA, 19 nt, Homo sapiens
  misc_RNA (1)...(19): siRNA sense strand
cacuacgagucccuucaaa

SEQ ID NO: 1175535 - RNA, 19 nt, Homo sapiens
  misc_RNA (1)...(19): siRNA sense strand
ucaacacguuccagagcau

SEQ ID NO: 1175536 - RNA, 19 nt, Homo sapiens
  misc_RNA (1)...(19): siRNA sense strand
gccagcaacgugcagaaga

SEQ ID NO: 1175537 - RNA, 19 nt, Homo sapiens
  misc_RNA (1)...(19): siRNA sense strand
cguccagaauuucaacaag

SEQ ID NO: 1175538 - RNA, 19 nt, Homo sapiens
  misc_RNA (1)...(19): siRNA sense strand
uccagaauuucaacaagca

SEQ ID NO: 1175539 - RNA, 19 nt, Homo sapiens
  misc_RNA (1)...(19): siRNA sense strand
cuacacggccacugacaca

SEQ ID NO: 1175540 - RNA, 19 nt, Homo sapiens
  misc_RNA (1)...(19): siRNA sense strand
gcucaaccagaaccucaau

SEQ ID NO: 1175541 - RNA, 19 nt, Homo sapiens
  misc_RNA (1)...(19): siRNA sense strand
uggaacagccgcguagguu

SEQ ID NO: 1175542 - RNA, 19 nt, Homo sapiens
  misc_RNA (1)...(19): siRNA sense strand
gcucaucaaagcccagaag

SEQ ID NO: 1175543 - RNA, 19 nt, Homo sapiens
  misc_RNA (1)...(19): siRNA sense strand
caaacaagaucgcagagaa

SEQ ID NO: 1175544 - RNA, 19 nt, Homo sapiens
  misc_RNA (1)...(19): siRNA sense strand
gcucaaggcuggugaugug

SEQ ID NO: 1175545 - RNA, 19 nt, Homo sapiens
  misc_RNA (1)...(19): siRNA sense strand
gaccaaggaugagcaguuu

SEQ ID NO: 1175546 - RNA, 19 nt, Homo sapiens
  misc_RNA (1)...(19): siRNA sense strand
aaagaaggaugaagccaaa

SEQ ID NO: 1175547 - RNA, 19 nt, Homo sapiens
  misc_RNA (1)...(19): siRNA sense strand
gacaucaagucacgcauug

SEQ ID NO: 1175548 - RNA, 19 nt, Homo sapiens
  misc_RNA (1)...(19): siRNA sense strand
gaacagccgcguagguuuc

SEQ ID NO: 1175549 - RNA, 19 nt, Homo sapiens
  misc_RNA (1)...(19): siRNA sense strand
cagaugagaccaaggauga

SEQ ID NO: 1175550 - RNA, 19 nt, Homo sapiens
  misc_RNA (1)...(19): siRNA sense strand
gagcagugcguccagaauu

SEQ ID NO: 1175551 - RNA, 19 nt, Homo sapiens
  misc_RNA (1)...(19): siRNA sense strand
ccagcaacgugcagaagaa

SEQ ID NO: 1175552 - RNA, 19 nt, Homo sapiens
  misc_RNA (1)...(19): siRNA sense strand
agaaggaucuccggaccua

SEQ ID NO: 1175553 - RNA, 19 nt, Homo sapiens
  misc_RNA (1)...(19): siRNA sense strand
guggagaccuucccagcaa

SEQ ID NO: 1175554 - RNA, 19 nt, Homo sapiens
  misc_RNA (1)...(19): siRNA sense strand
ggcgcaagcugguggacua

SEQ ID NO: 1175555 - RNA, 19 nt, Homo sapiens
  misc_RNA (1)...(19): siRNA sense strand
gaccugcuguggauggauu

SEQ ID NO: 1175556 - RNA, 19 nt, Homo sapiens
  misc_RNA (1)...(19): siRNA sense strand
gaagguguuugaggagaug

SEQ ID NO: 1175557 - RNA, 19 nt, Homo sapiens
  misc_RNA (1)...(19): siRNA sense strand
gcagagaugggcaguaaag

SEQ ID NO: 1175558 - RNA, 19 nt, Homo sapiens
  misc_RNA (1)...(19): siRNA sense strand
cccgagaacuucacugaga

SEQ ID NO: 1175559 - RNA, 19 nt, Homo sapiens
  misc_RNA (1)...(19): siRNA sense strand
gcaagcugguggacuacga

SEQ ID NO: 1175560 - RNA, 19 nt, Homo sapiens
  misc_RNA (1)...(19): siRNA sense strand
ggaacagccgcguagguuu

SEQ ID NO: 1175561 - RNA, 19 nt, Homo sapiens
  misc_RNA (1)...(19): siRNA sense strand
cgggaaagaucgccagcaa

SEQ ID NO: 1175562 - RNA, 19 nt, Homo sapiens
  misc_RNA (1)...(19): siRNA sense strand
ccaaggaugagcaguuuga

SEQ ID NO: 1175563 - RNA, 19 nt, Homo sapiens
  misc_RNA (1)...(19): siRNA sense strand
gcagggaugaggcaaacaa

SEQ ID NO: 1175564 - RNA, 19 nt, Homo sapiens
  misc_RNA (1)...(19): siRNA sense strand
acaacgaccugcuguggau

SEQ ID NO: 1175565 - RNA, 19 nt, Homo sapiens
  misc_RNA (1)...(19): siRNA sense strand
gggaugaggcaaacaagau

SEQ ID NO: 1175566 - RNA, 19 nt, Homo sapiens
  misc_RNA (1)...(19): siRNA sense strand
ugaaggagagcgacuggaa

SEQ ID NO: 1175567 - RNA, 19 nt, Homo sapiens
  misc_RNA (1)...(19): siRNA sense strand
gcaaacaagaucgcagaga

SEQ ID NO: 1175568 - RNA, 19 nt, Homo sapiens
  misc_RNA (1)...(19): siRNA sense strand
cuaccuggccuccgucaaa

SEQ ID NO: 1175569 - RNA, 19 nt, Homo sapiens
  misc_RNA (1)...(19): siRNA sense strand
ucaaccagaaccucaauga

SEQ ID NO: 1175570 - RNA, 19 nt, Homo sapiens
  misc_RNA (1)...(19): siRNA sense strand
cgacaucaagucacgcauu

SEQ ID NO: 1175571 - RNA, 19 nt, Homo sapiens
  misc_RNA (1)...(19): siRNA sense strand
aaccagaaccucaaugaug

SEQ ID NO: 1175572 - RNA, 19 nt, Homo sapiens
  misc_RNA (1)...(19): siRNA sense strand
gcaacaccuucacggucaa

SEQ ID NO: 1175573 - RNA, 19 nt, Homo sapiens
  misc_RNA (1)...(19): siRNA sense strand
accagaaccucaaugaugu

SEQ ID NO: 1175574 - RNA, 19 nt, Homo sapiens
  misc_RNA (1)...(19): siRNA sense strand
aggaggagcucaucaaagc

SEQ ID NO: 1175575 - RNA, 19 nt, Homo sapiens
  misc_RNA (1)...(19): siRNA sense strand
cgaggaggagcucaucaaa

SEQ ID NO: 1175576 - RNA, 19 nt, Homo sapiens
  misc_RNA (1)...(19): siRNA sense strand
agcagugcguccagaauuu

SEQ ID NO: 1175577 - RNA, 19 nt, Homo sapiens
  misc_RNA (1)...(19): siRNA sense strand
ggaaggcagaugagaccaa

SEQ ID NO: 1175578 - RNA, 19 nt, Homo sapiens
  misc_RNA (1)...(19): siRNA sense strand
ucaaagcccagaagguguu

SEQ ID NO: 1175579 - RNA, 19 nt, Homo sapiens
  misc_RNA (1)...(19): siRNA sense strand
gaggaggagcucaucaaag

SEQ ID NO: 1175580 - RNA, 19 nt, Homo sapiens
  misc_RNA (1)...(19): siRNA sense strand
acaaggagaugagcaagcu

SEQ ID NO: 1175581 - RNA, 19 nt, Homo sapiens
  misc_RNA (1)...(19): siRNA sense strand
ggaugaggcaaacaagauc

SEQ ID NO: 1175582 - RNA, 19 nt, Homo sapiens
  misc_RNA (1)...(19): siRNA sense strand
gaaggaugaagccaaaauu

SEQ ID NO: 1175583 - RNA, 19 nt, Homo sapiens
  misc_RNA (1)...(19): siRNA sense strand
ccacuacgagucccuucaa

SEQ ID NO: 1175584 - RNA, 19 nt, Homo sapiens
  misc_RNA (1)...(19): siRNA sense strand
ggauggauuaccaccagaa

SEQ ID NO: 1175585 - RNA, 19 nt, Homo sapiens
  misc_RNA (1)...(19): siRNA sense strand
caaccagaaccucaaugau

SEQ ID NO: 1175586 - RNA, 19 nt, Homo sapiens
  misc_RNA (1)...(19): siRNA sense strand
gcagugcguccagaauuuc

SEQ ID NO: 1175587 - RNA, 19 nt, Homo sapiens
  misc_RNA (1)...(19): siRNA sense strand
caagaucgcagagaacaac

SEQ ID NO: 1175588 - RNA, 19 nt, Homo sapiens
  misc_RNA (1)...(19): siRNA sense strand
agaccaaggaugagcaguu

SEQ ID NO: 1175589 - RNA, 19 nt, Homo sapiens
  misc_RNA (1)...(19): siRNA sense strand
ugacaacgcgccugcaaaa

SEQ ID NO: 1175590 - RNA, 19 nt, Homo sapiens
  misc_RNA (1)...(19): siRNA sense strand
agaagguguuugaggagau

SEQ ID NO: 1175591 - RNA, 19 nt, Homo sapiens
  misc_RNA (1)...(19): siRNA sense strand
cacuacgagucccuucaaa

SEQ ID NO: 1175592 - RNA, 19 nt, Homo sapiens
  misc_RNA (1)...(19): siRNA sense strand
ucaacacguuccagagcau

SEQ ID NO: 1175593 - RNA, 19 nt, Homo sapiens
  misc_RNA (1)...(19): siRNA sense strand
gccagcaacgugcagaaga

SEQ ID NO: 1175594 - RNA, 19 nt, Homo sapiens
  misc_RNA (1)...(19): siRNA sense strand
cguccagaauuucaacaag

SEQ ID NO: 1175595 - RNA, 19 nt, Homo sapiens
  misc_RNA (1)...(19): siRNA sense strand
uccagaauuucaacaagca

SEQ ID NO: 1175596 - RNA, 19 nt, Homo sapiens
  misc_RNA (1)...(19): siRNA sense strand
cuacacggccacugacaca

SEQ ID NO: 1175597 - RNA, 19 nt, Homo sapiens
  misc_RNA (1)...(19): siRNA sense strand
gcucaaccagaaccucaau

SEQ ID NO: 1175598 - RNA, 19 nt, Homo sapiens
  misc_RNA (1)...(19): siRNA sense strand
uggaacagccgcguagguu

SEQ ID NO: 1175599 - RNA, 19 nt, Homo sapiens
  misc_RNA (1)...(19): siRNA sense strand
gcucaucaaagcccagaag

SEQ ID NO: 1175600 - RNA, 19 nt, Homo sapiens
  misc_RNA (1)...(19): siRNA sense strand
caaacaagaucgcagagaa

SEQ ID NO: 1175601 - RNA, 19 nt, Homo sapiens
  misc_RNA (1)...(19): siRNA sense strand
gcucaaggcuggugaugug

SEQ ID NO: 1175602 - RNA, 19 nt, Homo sapiens
  misc_RNA (1)...(19): siRNA sense strand
gaccaaggaugagcaguuu

SEQ ID NO: 1175603 - RNA, 19 nt, Homo sapiens
  misc_RNA (1)...(19): siRNA sense strand
aaagaaggaugaagccaaa

SEQ ID NO: 1175604 - RNA, 19 nt, Homo sapiens
  misc_RNA (1)...(19): siRNA sense strand
gacaucaagucacgcauug

SEQ ID NO: 1175605 - RNA, 19 nt, Homo sapiens
  misc_RNA (1)...(19): siRNA sense strand
gaacagccgcguagguuuc

SEQ ID NO: 1175606 - RNA, 19 nt, Homo sapiens
  misc_RNA (1)...(19): siRNA sense strand
cagaugagaccaaggauga

SEQ ID NO: 1175607 - RNA, 19 nt, Homo sapiens
  misc_RNA (1)...(19): siRNA sense strand
gagcagugcguccagaauu

SEQ ID NO: 1175608 - RNA, 19 nt, Homo sapiens
  misc_RNA (1)...(19): siRNA sense strand
ccagcaacgugcagaagaa

SEQ ID NO: 1175609 - RNA, 19 nt, Homo sapiens
  misc_RNA (1)...(19): siRNA sense strand
agaaggaucuccggaccua

SEQ ID NO: 1175610 - RNA, 19 nt, Homo sapiens
  misc_RNA (1)...(19): siRNA sense strand
guggagaccuucccagcaa

SEQ ID NO: 1175611 - RNA, 19 nt, Homo sapiens
  misc_RNA (1)...(19): siRNA sense strand
ggcgcaagcugguggacua

SEQ ID NO: 1175612 - RNA, 19 nt, Homo sapiens
  misc_RNA (1)...(19): siRNA sense strand
gaccugcuguggauggauu

SEQ ID NO: 1175613 - RNA, 19 nt, Homo sapiens
  misc_RNA (1)...(19): siRNA sense strand
gaagguguuugaggagaug

SEQ ID NO: 1175614 - RNA, 19 nt, Homo sapiens
  misc_RNA (1)...(19): siRNA sense strand
gcagagaugggcaguaaag

SEQ ID NO: 1175615 - RNA, 19 nt, Homo sapiens
  misc_RNA (1)...(19): siRNA sense strand
cccgagaacuucacugaga

SEQ ID NO: 1175616 - RNA, 19 nt, Homo sapiens
  misc_RNA (1)...(19): siRNA sense strand
gcaagcugguggacuacga

SEQ ID NO: 1175617 - RNA, 19 nt, Homo sapiens
  misc_RNA (1)...(19): siRNA sense strand
ggaacagccgcguagguuu

SEQ ID NO: 1175618 - RNA, 19 nt, Homo sapiens
  misc_RNA (1)...(19): siRNA sense strand
cgggaaagaucgccagcaa

SEQ ID NO: 1175619 - RNA, 19 nt, Homo sapiens
  misc_RNA (1)...(19): siRNA sense strand
ccaaggaugagcaguuuga

SEQ ID NO: 1175620 - RNA, 19 nt, Homo sapiens
  misc_RNA (1)...(19): siRNA sense strand
gcagggaugaggcaaacaa

SEQ ID NO: 1175621 - RNA, 19 nt, Homo sapiens
  misc_RNA (1)...(19): siRNA sense strand
acaacgaccugcuguggau

SEQ ID NO: 1175622 - RNA, 19 nt, Homo sapiens
  misc_RNA (1)...(19): siRNA sense strand
gggaugaggcaaacaagau

SEQ ID NO: 1175623 - RNA, 19 nt, Homo sapiens
  misc_RNA (1)...(19): siRNA sense strand
ugaaggagagcgacuggaa

SEQ ID NO: 1175624 - RNA, 19 nt, Homo sapiens
  misc_RNA (1)...(19): siRNA sense strand
gcaaacaagaucgcagaga

SEQ ID NO: 1175625 - RNA, 19 nt, Homo sapiens
  misc_RNA (1)...(19): siRNA sense strand
cuaccuggccuccgucaaa

SEQ ID NO: 1175626 - RNA, 19 nt, Homo sapiens
  misc_RNA (1)...(19): siRNA sense strand
ucaaccagaaccucaauga

SEQ ID NO: 1175627 - RNA, 19 nt, Homo sapiens
  misc_RNA (1)...(19): siRNA sense strand
cgacaucaagucacgcauu

SEQ ID NO: 1175628 - RNA, 19 nt, Homo sapiens
  misc_RNA (1)...(19): siRNA sense strand
aaccagaaccucaaugaug

SEQ ID NO: 1175629 - RNA, 19 nt, Homo sapiens
  misc_RNA (1)...(19): siRNA sense strand
gcaacaccuucacggucaa

SEQ ID NO: 1175630 - RNA, 19 nt, Homo sapiens
  misc_RNA (1)...(19): siRNA sense strand
accagaaccucaaugaugu

SEQ ID NO: 1175631 - RNA, 19 nt, Homo sapiens
  misc_RNA (1)...(19): siRNA sense strand
aggaggagcucaucaaagc

SEQ ID NO: 1175632 - RNA, 19 nt, Homo sapiens
  misc_RNA (1)...(19): siRNA sense strand
cgaggaggagcucaucaaa

SEQ ID NO: 1175633 - RNA, 19 nt, Homo sapiens
  misc_RNA (1)...(19): siRNA sense strand
agcagugcguccagaauuu

SEQ ID NO: 1175634 - RNA, 19 nt, Homo sapiens
  misc_RNA (1)...(19): siRNA sense strand
ggaaggcagaugagaccaa

SEQ ID NO: 1175635 - RNA, 19 nt, Homo sapiens
  misc_RNA (1)...(19): siRNA sense strand
ucaaagcccagaagguguu

SEQ ID NO: 1175636 - RNA, 19 nt, Homo sapiens
  misc_RNA (1)...(19): siRNA sense strand
gaggaggagcucaucaaag

SEQ ID NO: 1175637 - RNA, 19 nt, Homo sapiens
  misc_RNA (1)...(19): siRNA sense strand
acaaggagaugagcaagcu

SEQ ID NO: 1175638 - RNA, 19 nt, Homo sapiens
  misc_RNA (1)...(19): siRNA sense strand
ggaugaggcaaacaagauc

SEQ ID NO: 1175639 - RNA, 19 nt, Homo sapiens
  misc_RNA (1)...(19): siRNA sense strand
gaaggaugaagccaaaauu

SEQ ID NO: 1175640 - RNA, 19 nt, Homo sapiens
  misc_RNA (1)...(19): siRNA sense strand
ccacuacgagucccuucaa

SEQ ID NO: 1175641 - RNA, 19 nt, Homo sapiens
  misc_RNA (1)...(19): siRNA sense strand
ggauggauuaccaccagaa

SEQ ID NO: 1175642 - RNA, 19 nt, Homo sapiens
  misc_RNA (1)...(19): siRNA sense strand
caaccagaaccucaaugau

SEQ ID NO: 1175643 - RNA, 19 nt, Homo sapiens
  misc_RNA (1)...(19): siRNA sense strand
gcagugcguccagaauuuc

SEQ ID NO: 1175644 - RNA, 19 nt, Homo sapiens
  misc_RNA (1)...(19): siRNA sense strand
caagaucgcagagaacaac

SEQ ID NO: 1175645 - RNA, 19 nt, Homo sapiens
  misc_RNA (1)...(19): siRNA sense strand
agaccaaggaugagcaguu

SEQ ID NO: 1175646 - RNA, 19 nt, Homo sapiens
  misc_RNA (1)...(19): siRNA sense strand
ugacaacgcgccugcaaaa

SEQ ID NO: 1175647 - RNA, 19 nt, Homo sapiens
  misc_RNA (1)...(19): siRNA sense strand
agaagguguuugaggagau

SEQ ID NO: 1175648 - RNA, 19 nt, Homo sapiens
  misc_RNA (1)...(19): siRNA sense strand
cacuacgagucccuucaaa

SEQ ID NO: 1175649 - RNA, 19 nt, Homo sapiens
  misc_RNA (1)...(19): siRNA sense strand
ucaacacguuccagagcau

SEQ ID NO: 1175650 - RNA, 19 nt, Homo sapiens
  misc_RNA (1)...(19): siRNA sense strand
gccagcaacgugcagaaga

SEQ ID NO: 1175651 - RNA, 19 nt, Homo sapiens
  misc_RNA (1)...(19): siRNA sense strand
cguccagaauuucaacaag

SEQ ID NO: 1175652 - RNA, 19 nt, Homo sapiens
  misc_RNA (1)...(19): siRNA sense strand
uccagaauuucaacaagca

SEQ ID NO: 1175653 - RNA, 19 nt, Homo sapiens
  misc_RNA (1)...(19): siRNA sense strand
cuacacggccacugacaca

SEQ ID NO: 1175654 - RNA, 19 nt, Homo sapiens
  misc_RNA (1)...(19): siRNA sense strand
gcucaaccagaaccucaau

SEQ ID NO: 1175655 - RNA, 19 nt, Homo sapiens
  misc_RNA (1)...(19): siRNA sense strand
uggaacagccgcguagguu

SEQ ID NO: 1175656 - RNA, 19 nt, Homo sapiens
  misc_RNA (1)...(19): siRNA sense strand
gcucaucaaagcccagaag

SEQ ID NO: 1175657 - RNA, 19 nt, Homo sapiens
  misc_RNA (1)...(19): siRNA sense strand
caaacaagaucgcagagaa

SEQ ID NO: 1175658 - RNA, 19 nt, Homo sapiens
  misc_RNA (1)...(19): siRNA sense strand
gcucaaggcuggugaugug

SEQ ID NO: 1175659 - RNA, 19 nt, Homo sapiens
  misc_RNA (1)...(19): siRNA sense strand
gaccaaggaugagcaguuu

SEQ ID NO: 1175660 - RNA, 19 nt, Homo sapiens
  misc_RNA (1)...(19): siRNA sense strand
aaagaaggaugaagccaaa

SEQ ID NO: 1175661 - RNA, 19 nt, Homo sapiens
  misc_RNA (1)...(19): siRNA sense strand
gacaucaagucacgcauug

SEQ ID NO: 1175662 - RNA, 19 nt, Homo sapiens
  misc_RNA (1)...(19): siRNA sense strand
gaacagccgcguagguuuc

SEQ ID NO: 1175663 - RNA, 19 nt, Homo sapiens
  misc_RNA (1)...(19): siRNA sense strand
cagaugagaccaaggauga

SEQ ID NO: 1175664 - RNA, 19 nt, Homo sapiens
  misc_RNA (1)...(19): siRNA sense strand
gagcagugcguccagaauu

SEQ ID NO: 1175665 - RNA, 19 nt, Homo sapiens
  misc_RNA (1)...(19): siRNA sense strand
ccagcaacgugcagaagaa

SEQ ID NO: 1175666 - RNA, 19 nt, Homo sapiens
  misc_RNA (1)...(19): siRNA sense strand
agaaggaucuccggaccua

SEQ ID NO: 1175667 - RNA, 19 nt, Homo sapiens
  misc_RNA (1)...(19): siRNA sense strand
guggagaccuucccagcaa

SEQ ID NO: 1175668 - RNA, 19 nt, Homo sapiens
  misc_RNA (1)...(19): siRNA sense strand
ggcgcaagcugguggacua

SEQ ID NO: 1175669 - RNA, 19 nt, Homo sapiens
  misc_RNA (1)...(19): siRNA sense strand
gaccugcuguggauggauu

SEQ ID NO: 1175670 - RNA, 19 nt, Homo sapiens
  misc_RNA (1)...(19): siRNA sense strand
gaagguguuugaggagaug

SEQ ID NO: 1175671 - RNA, 19 nt, Homo sapiens
  misc_RNA (1)...(19): siRNA sense strand
gcagagaugggcaguaaag

SEQ ID NO: 1175672 - RNA, 19 nt, Homo sapiens
  misc_RNA (1)...(19): siRNA sense strand
cccgagaacuucacugaga

SEQ ID NO: 1175673 - RNA, 19 nt, Homo sapiens
  misc_RNA (1)...(19): siRNA sense strand
gcaagcugguggacuacga

SEQ ID NO: 1175674 - RNA, 19 nt, Homo sapiens
  misc_RNA (1)...(19): siRNA sense strand
ggaacagccgcguagguuu

SEQ ID NO: 1175675 - RNA, 19 nt, Homo sapiens
  misc_RNA (1)...(19): siRNA sense strand
cgggaaagaucgccagcaa

SEQ ID NO: 1175676 - RNA, 19 nt, Homo sapiens
  misc_RNA (1)...(19): siRNA sense strand
ccaaggaugagcaguuuga

SEQ ID NO: 1175677 - RNA, 19 nt, Homo sapiens
  misc_RNA (1)...(19): siRNA sense strand
gcagggaugaggcaaacaa

SEQ ID NO: 1175678 - RNA, 19 nt, Homo sapiens
  misc_RNA (1)...(19): siRNA sense strand
acaacgaccugcuguggau

SEQ ID NO: 1175679 - RNA, 19 nt, Homo sapiens
  misc_RNA (1)...(19): siRNA sense strand
gggaugaggcaaacaagau

SEQ ID NO: 1175680 - RNA, 19 nt, Homo sapiens
  misc_RNA (1)...(19): siRNA sense strand
ugaaggagagcgacuggaa

SEQ ID NO: 1175681 - RNA, 19 nt, Homo sapiens
  misc_RNA (1)...(19): siRNA sense strand
gcaaacaagaucgcagaga

SEQ ID NO: 1175682 - RNA, 19 nt, Homo sapiens
  misc_RNA (1)...(19): siRNA sense strand
cuaccuggccuccgucaaa

SEQ ID NO: 1175683 - RNA, 19 nt, Homo sapiens
  misc_RNA (1)...(19): siRNA sense strand
ucaaccagaaccucaauga

SEQ ID NO: 1175684 - RNA, 19 nt, Homo sapiens
  misc_RNA (1)...(19): siRNA sense strand
cgacaucaagucacgcauu

SEQ ID NO: 1175685 - RNA, 19 nt, Homo sapiens
  misc_RNA (1)...(19): siRNA sense strand
aaccagaaccucaaugaug

SEQ ID NO: 1175686 - RNA, 19 nt, Homo sapiens
  misc_RNA (1)...(19): siRNA sense strand
gcaacaccuucacggucaa

SEQ ID NO: 1175687 - RNA, 19 nt, Homo sapiens
  misc_RNA (1)...(19): siRNA sense strand
accagaaccucaaugaugu

SEQ ID NO: 1175688 - RNA, 19 nt, Homo sapiens
  misc_RNA (1)...(19): siRNA sense strand
aggaggagcucaucaaagc

SEQ ID NO: 1175689 - RNA, 19 nt, Homo sapiens
  misc_RNA (1)...(19): siRNA sense strand
cgaggaggagcucaucaaa

SEQ ID NO: 1175690 - RNA, 19 nt, Homo sapiens
  misc_RNA (1)...(19): siRNA sense strand
agcagugcguccagaauuu

SEQ ID NO: 1175691 - RNA, 19 nt, Homo sapiens
  misc_RNA (1)...(19): siRNA sense strand
ggaaggcagaugagaccaa

SEQ ID NO: 1175692 - RNA, 19 nt, Homo sapiens
  misc_RNA (1)...(19): siRNA sense strand
ucaaagcccagaagguguu

SEQ ID NO: 1175693 - RNA, 19 nt, Homo sapiens
  misc_RNA (1)...(19): siRNA sense strand
gaggaggagcucaucaaag

SEQ ID NO: 1175694 - RNA, 19 nt, Homo sapiens
  misc_RNA (1)...(19): siRNA sense strand
acaaggagaugagcaagcu

SEQ ID NO: 1175695 - RNA, 19 nt, Homo sapiens
  misc_RNA (1)...(19): siRNA sense strand
ggaugaggcaaacaagauc

SEQ ID NO: 1175696 - RNA, 19 nt, Homo sapiens
  misc_RNA (1)...(19): siRNA sense strand
gaaggaugaagccaaaauu

SEQ ID NO: 1175697 - RNA, 19 nt, Homo sapiens
  misc_RNA (1)...(19): siRNA sense strand
ccacuacgagucccuucaa

SEQ ID NO: 1175698 - RNA, 19 nt, Homo sapiens
  misc_RNA (1)...(19): siRNA sense strand
ggauggauuaccaccagaa

SEQ ID NO: 1175699 - RNA, 19 nt, Homo sapiens
  misc_RNA (1)...(19): siRNA sense strand
caaccagaaccucaaugau

SEQ ID NO: 1175700 - RNA, 19 nt, Homo sapiens
  misc_RNA (1)...(19): siRNA sense strand
gcagugcguccagaauuuc

SEQ ID NO: 1175701 - RNA, 19 nt, Homo sapiens
  misc_RNA (1)...(19): siRNA sense strand
caagaucgcagagaacaac

SEQ ID NO: 1175702 - RNA, 19 nt, Homo sapiens
  misc_RNA (1)...(19): siRNA sense strand
agaccaaggaugagcaguu

SEQ ID NO: 1175703 - RNA, 19 nt, Homo sapiens
  misc_RNA (1)...(19): siRNA sense strand
ugacaacgcgccugcaaaa

SEQ ID NO: 1175704 - RNA, 19 nt, Homo sapiens
  misc_RNA (1)...(19): siRNA sense strand
agaagguguuugaggagau

SEQ ID NO: 1175705 - RNA, 19 nt, Homo sapiens
  misc_RNA (1)...(19): siRNA sense strand
cacuacgagucccuucaaa

SEQ ID NO: 1175706 - RNA, 19 nt, Homo sapiens
  misc_RNA (1)...(19): siRNA sense strand
ucaacacguuccagagcau

SEQ ID NO: 1175707 - RNA, 19 nt, Homo sapiens
  misc_RNA (1)...(19): siRNA sense strand
gccagcaacgugcagaaga

SEQ ID NO: 1175708 - RNA, 19 nt, Homo sapiens
  misc_RNA (1)...(19): siRNA sense strand
cguccagaauuucaacaag

SEQ ID NO: 1175709 - RNA, 19 nt, Homo sapiens
  misc_RNA (1)...(19): siRNA sense strand
uccagaauuucaacaagca

SEQ ID NO: 1175710 - RNA, 19 nt, Homo sapiens
  misc_RNA (1)...(19): siRNA sense strand
cuacacggccacugacaca

SEQ ID NO: 1175711 - RNA, 19 nt, Homo sapiens
  misc_RNA (1)...(19): siRNA sense strand
gcucaaccagaaccucaau

SEQ ID NO: 1175712 - RNA, 19 nt, Homo sapiens
  misc_RNA (1)...(19): siRNA sense strand
uggaacagccgcguagguu

SEQ ID NO: 1175713 - RNA, 19 nt, Homo sapiens
  misc_RNA (1)...(19): siRNA sense strand
gcucaucaaagcccagaag

SEQ ID NO: 1175714 - RNA, 19 nt, Homo sapiens
  misc_RNA (1)...(19): siRNA sense strand
caaacaagaucgcagagaa

SEQ ID NO: 1175715 - RNA, 19 nt, Homo sapiens
  misc_RNA (1)...(19): siRNA sense strand
gcucaaggcuggugaugug

SEQ ID NO: 1175716 - RNA, 19 nt, Homo sapiens
  misc_RNA (1)...(19): siRNA sense strand
gaccaaggaugagcaguuu

SEQ ID NO: 1175717 - RNA, 19 nt, Homo sapiens
  misc_RNA (1)...(19): siRNA sense strand
aaagaaggaugaagccaaa

SEQ ID NO: 1175718 - RNA, 19 nt, Homo sapiens
  misc_RNA (1)...(19): siRNA sense strand
gacaucaagucacgcauug

SEQ ID NO: 1175719 - RNA, 19 nt, Homo sapiens
  misc_RNA (1)...(19): siRNA sense strand
gaacagccgcguagguuuc

SEQ ID NO: 1175720 - RNA, 19 nt, Homo sapiens
  misc_RNA (1)...(19): siRNA sense strand
cagaugagaccaaggauga

SEQ ID NO: 1175721 - RNA, 19 nt, Homo sapiens
  misc_RNA (1)...(19): siRNA sense strand
gagcagugcguccagaauu

SEQ ID NO: 1175722 - RNA, 19 nt, Homo sapiens
  misc_RNA (1)...(19): siRNA sense strand
ccagcaacgugcagaagaa

SEQ ID NO: 1175723 - RNA, 19 nt, Homo sapiens
  misc_RNA (1)...(19): siRNA sense strand
agaaggaucuccggaccua

SEQ ID NO: 1175724 - RNA, 19 nt, Homo sapiens
  misc_RNA (1)...(19): siRNA sense strand
guggagaccuucccagcaa

SEQ ID NO: 1175725 - RNA, 19 nt, Homo sapiens
  misc_RNA (1)...(19): siRNA sense strand
ggcgcaagcugguggacua

SEQ ID NO: 1175726 - RNA, 19 nt, Homo sapiens
  misc_RNA (1)...(19): siRNA sense strand
gaccugcuguggauggauu

SEQ ID NO: 1175727 - RNA, 19 nt, Homo sapiens
  misc_RNA (1)...(19): siRNA sense strand
gaagguguuugaggagaug

SEQ ID NO: 1175728 - RNA, 19 nt, Homo sapiens
  misc_RNA (1)...(19): siRNA sense strand
gcagagaugggcaguaaag

SEQ ID NO: 1175729 - RNA, 19 nt, Homo sapiens
  misc_RNA (1)...(19): siRNA sense strand
cccgagaacuucacugaga

SEQ ID NO: 1175730 - RNA, 19 nt, Homo sapiens
  misc_RNA (1)...(19): siRNA sense strand
gcaagcugguggacuacga

SEQ ID NO: 1175731 - RNA, 19 nt, Homo sapiens
  misc_RNA (1)...(19): siRNA sense strand
ggaacagccgcguagguuu

SEQ ID NO: 1175732 - RNA, 19 nt, Homo sapiens
  misc_RNA (1)...(19): siRNA sense strand
cgggaaagaucgccagcaa

SEQ ID NO: 1175733 - RNA, 19 nt, Homo sapiens
  misc_RNA (1)...(19): siRNA sense strand
ccaaggaugagcaguuuga

SEQ ID NO: 1175734 - RNA, 19 nt, Homo sapiens
  misc_RNA (1)...(19): siRNA sense strand
gcagggaugaggcaaacaa

SEQ ID NO: 1175735 - RNA, 19 nt, Homo sapiens
  misc_RNA (1)...(19): siRNA sense strand
acaacgaccugcuguggau

SEQ ID NO: 1175736 - RNA, 19 nt, Homo sapiens
  misc_RNA (1)...(19): siRNA sense strand
gggaugaggcaaacaagau

SEQ ID NO: 1175737 - RNA, 19 nt, Homo sapiens
  misc_RNA (1)...(19): siRNA sense strand
ugaaggagagcgacuggaa

SEQ ID NO: 1175738 - RNA, 19 nt, Homo sapiens
  misc_RNA (1)...(19): siRNA sense strand
gcaaacaagaucgcagaga

SEQ ID NO: 1175739 - RNA, 19 nt, Homo sapiens
  misc_RNA (1)...(19): siRNA sense strand
cuaccuggccuccgucaaa

SEQ ID NO: 1175740 - RNA, 19 nt, Homo sapiens
  misc_RNA (1)...(19): siRNA sense strand
ucaaccagaaccucaauga

SEQ ID NO: 1175741 - RNA, 19 nt, Homo sapiens
  misc_RNA (1)...(19): siRNA sense strand
cgacaucaagucacgcauu

SEQ ID NO: 1175742 - RNA, 19 nt, Homo sapiens
  misc_RNA (1)...(19): siRNA sense strand
aaccagaaccucaaugaug

SEQ ID NO: 1175743 - RNA, 19 nt, Homo sapiens
  misc_RNA (1)...(19): siRNA sense strand
gcaacaccuucacggucaa

SEQ ID NO: 1175744 - RNA, 19 nt, Homo sapiens
  misc_RNA (1)...(19): siRNA sense strand
accagaaccucaaugaugu

SEQ ID NO: 1175745 - RNA, 19 nt, Homo sapiens
  misc_RNA (1)...(19): siRNA sense strand
aggaggagcucaucaaagc

SEQ ID NO: 1175746 - RNA, 19 nt, Homo sapiens
  misc_RNA (1)...(19): siRNA sense strand
cgaggaggagcucaucaaa

SEQ ID NO: 1175747 - RNA, 19 nt, Homo sapiens
  misc_RNA (1)...(19): siRNA sense strand
agcagugcguccagaauuu

SEQ ID NO: 1175748 - RNA, 19 nt, Homo sapiens
  misc_RNA (1)...(19): siRNA sense strand
ggaaggcagaugagaccaa

SEQ ID NO: 1175749 - RNA, 19 nt, Homo sapiens
  misc_RNA (1)...(19): siRNA sense strand
ucaaagcccagaagguguu

SEQ ID NO: 1175750 - RNA, 19 nt, Homo sapiens
  misc_RNA (1)...(19): siRNA sense strand
gaggaggagcucaucaaag

SEQ ID NO: 1175751 - RNA, 19 nt, Homo sapiens
  misc_RNA (1)...(19): siRNA sense strand
acaaggagaugagcaagcu

SEQ ID NO: 1175752 - RNA, 19 nt, Homo sapiens
  misc_RNA (1)...(19): siRNA sense strand
ggaugaggcaaacaagauc

SEQ ID NO: 1175753 - RNA, 19 nt, Homo sapiens
  misc_RNA (1)...(19): siRNA sense strand
gaaggaugaagccaaaauu

SEQ ID NO: 1175754 - RNA, 19 nt, Homo sapiens
  misc_RNA (1)...(19): siRNA sense strand
ccacuacgagucccuucaa

SEQ ID NO: 1175755 - RNA, 19 nt, Homo sapiens
  misc_RNA (1)...(19): siRNA sense strand
ggauggauuaccaccagaa

SEQ ID NO: 1175756 - RNA, 19 nt, Homo sapiens
  misc_RNA (1)...(19): siRNA sense strand
caaccagaaccucaaugau

SEQ ID NO: 1175757 - RNA, 19 nt, Homo sapiens
  misc_RNA (1)...(19): siRNA sense strand
gcagugcguccagaauuuc

SEQ ID NO: 1175758 - RNA, 19 nt, Homo sapiens
  misc_RNA (1)...(19): siRNA sense strand
caagaucgcagagaacaac

SEQ ID NO: 1175759 - RNA, 19 nt, Homo sapiens
  misc_RNA (1)...(19): siRNA sense strand
agaccaaggaugagcaguu

SEQ ID NO: 1175760 - RNA, 19 nt, Homo sapiens
  misc_RNA (1)...(19): siRNA sense strand
ugacaacgcgccugcaaaa

SEQ ID NO: 1175761 - RNA, 19 nt, Homo sapiens
  misc_RNA (1)...(19): siRNA sense strand
agaagguguuugaggagau

SEQ ID NO: 1175762 - RNA, 19 nt, Homo sapiens
  misc_RNA (1)...(19): siRNA sense strand
cacuacgagucccuucaaa

SEQ ID NO: 1175763 - RNA, 19 nt, Homo sapiens
  misc_RNA (1)...(19): siRNA sense strand
ucaacacguuccagagcau

SEQ ID NO: 1175764 - RNA, 19 nt, Homo sapiens
  misc_RNA (1)...(19): siRNA sense strand
gccagcaacgugcagaaga

SEQ ID NO: 1175765 - RNA, 19 nt, Homo sapiens
  misc_RNA (1)...(19): siRNA sense strand
cguccagaauuucaacaag

SEQ ID NO: 1175766 - RNA, 19 nt, Homo sapiens
  misc_RNA (1)...(19): siRNA sense strand
uccagaauuucaacaagca

SEQ ID NO: 1175767 - RNA, 19 nt, Homo sapiens
  misc_RNA (1)...(19): siRNA sense strand
cuacacggccacugacaca

SEQ ID NO: 1175768 - RNA, 19 nt, Homo sapiens
  misc_RNA (1)...(19): siRNA sense strand
gcucaaccagaaccucaau

SEQ ID NO: 1175769 - RNA, 19 nt, Homo sapiens
  misc_RNA (1)...(19): siRNA sense strand
uggaacagccgcguagguu

SEQ ID NO: 1175770 - RNA, 19 nt, Homo sapiens
  misc_RNA (1)...(19): siRNA sense strand
gcucaucaaagcccagaag

SEQ ID NO: 1175771 - RNA, 19 nt, Homo sapiens
  misc_RNA (1)...(19): siRNA sense strand
caaacaagaucgcagagaa

SEQ ID NO: 1175772 - RNA, 19 nt, Homo sapiens
  misc_RNA (1)...(19): siRNA sense strand
gcucaaggcuggugaugug

SEQ ID NO: 1175773 - RNA, 19 nt, Homo sapiens
  misc_RNA (1)...(19): siRNA sense strand
gaccaaggaugagcaguuu

SEQ ID NO: 1175774 - RNA, 19 nt, Homo sapiens
  misc_RNA (1)...(19): siRNA sense strand
aaagaaggaugaagccaaa

SEQ ID NO: 1175775 - RNA, 19 nt, Homo sapiens
  misc_RNA (1)...(19): siRNA sense strand
gacaucaagucacgcauug

SEQ ID NO: 1175776 - RNA, 19 nt, Homo sapiens
  misc_RNA (1)...(19): siRNA sense strand
gaacagccgcguagguuuc

SEQ ID NO: 1175777 - RNA, 19 nt, Homo sapiens
  misc_RNA (1)...(19): siRNA sense strand
cagaugagaccaaggauga

SEQ ID NO: 1175778 - RNA, 19 nt, Homo sapiens
  misc_RNA (1)...(19): siRNA sense strand
gagcagugcguccagaauu

SEQ ID NO: 1175779 - RNA, 19 nt, Homo sapiens
  misc_RNA (1)...(19): siRNA sense strand
ccagcaacgugcagaagaa

SEQ ID NO: 1175780 - RNA, 19 nt, Homo sapiens
  misc_RNA (1)...(19): siRNA sense strand
agaaggaucuccggaccua

SEQ ID NO: 1175781 - RNA, 19 nt, Homo sapiens
  misc_RNA (1)...(19): siRNA sense strand
guggagaccuucccagcaa

SEQ ID NO: 1175782 - RNA, 19 nt, Homo sapiens
  misc_RNA (1)...(19): siRNA sense strand
ggcgcaagcugguggacua

SEQ ID NO: 1175783 - RNA, 19 nt, Homo sapiens
  misc_RNA (1)...(19): siRNA sense strand
gaccugcuguggauggauu

SEQ ID NO: 1175784 - RNA, 19 nt, Homo sapiens
  misc_RNA (1)...(19): siRNA sense strand
gaagguguuugaggagaug

SEQ ID NO: 1175785 - RNA, 19 nt, Homo sapiens
  misc_RNA (1)...(19): siRNA sense strand
gcagagaugggcaguaaag

SEQ ID NO: 1175786 - RNA, 19 nt, Homo sapiens
  misc_RNA (1)...(19): siRNA sense strand
cccgagaacuucacugaga

SEQ ID NO: 1175787 - RNA, 19 nt, Homo sapiens
  misc_RNA (1)...(19): siRNA sense strand
gcaagcugguggacuacga

SEQ ID NO: 1175788 - RNA, 19 nt, Homo sapiens
  misc_RNA (1)...(19): siRNA sense strand
ggaacagccgcguagguuu

SEQ ID NO: 1175789 - RNA, 19 nt, Homo sapiens
  misc_RNA (1)...(19): siRNA sense strand
cgggaaagaucgccagcaa

SEQ ID NO: 1175790 - RNA, 19 nt, Homo sapiens
  misc_RNA (1)...(19): siRNA sense strand
ccaaggaugagcaguuuga

SEQ ID NO: 1175791 - RNA, 19 nt, Homo sapiens
  misc_RNA (1)...(19): siRNA sense strand
gcagggaugaggcaaacaa

SEQ ID NO: 1175792 - RNA, 19 nt, Homo sapiens
  misc_RNA (1)...(19): siRNA sense strand
acaacgaccugcuguggau

SEQ ID NO: 1175793 - RNA, 19 nt, Homo sapiens
  misc_RNA (1)...(19): siRNA sense strand
gggaugaggcaaacaagau

SEQ ID NO: 1175794 - RNA, 19 nt, Homo sapiens
  misc_RNA (1)...(19): siRNA sense strand
ugaaggagagcgacuggaa

SEQ ID NO: 1175795 - RNA, 19 nt, Homo sapiens
  misc_RNA (1)...(19): siRNA sense strand
gcaaacaagaucgcagaga

SEQ ID NO: 1175796 - RNA, 19 nt, Homo sapiens
  misc_RNA (1)...(19): siRNA sense strand
cuaccuggccuccgucaaa

SEQ ID NO: 1175797 - RNA, 19 nt, Homo sapiens
  misc_RNA (1)...(19): siRNA sense strand
ucaaccagaaccucaauga

SEQ ID NO: 1175798 - RNA, 19 nt, Homo sapiens
  misc_RNA (1)...(19): siRNA sense strand
cgacaucaagucacgcauu

SEQ ID NO: 1175799 - RNA, 19 nt, Homo sapiens
  misc_RNA (1)...(19): siRNA sense strand
aaccagaaccucaaugaug

SEQ ID NO: 1175800 - RNA, 19 nt, Homo sapiens
  misc_RNA (1)...(19): siRNA sense strand
gcaacaccuucacggucaa

SEQ ID NO: 1175801 - RNA, 19 nt, Homo sapiens
  misc_RNA (1)...(19): siRNA sense strand
accagaaccucaaugaugu

SEQ ID NO: 1175802 - RNA, 19 nt, Homo sapiens
  misc_RNA (1)...(19): siRNA sense strand
aggaggagcucaucaaagc

SEQ ID NO: 1175803 - RNA, 19 nt, Homo sapiens
  misc_RNA (1)...(19): siRNA sense strand
cgaggaggagcucaucaaa

SEQ ID NO: 1175804 - RNA, 19 nt, Homo sapiens
  misc_RNA (1)...(19): siRNA sense strand
agcagugcguccagaauuu

SEQ ID NO: 1175805 - RNA, 19 nt, Homo sapiens
  misc_RNA (1)...(19): siRNA sense strand
ggaaggcagaugagaccaa

SEQ ID NO: 1175806 - RNA, 19 nt, Homo sapiens
  misc_RNA (1)...(19): siRNA sense strand
ucaaagcccagaagguguu

SEQ ID NO: 1175807 - RNA, 19 nt, Homo sapiens
  misc_RNA (1)...(19): siRNA sense strand
gaggaggagcucaucaaag

SEQ ID NO: 1175808 - RNA, 19 nt, Homo sapiens
  misc_RNA (1)...(19): siRNA sense strand
acaaggagaugagcaagcu

SEQ ID NO: 1175809 - RNA, 19 nt, Homo sapiens
  misc_RNA (1)...(19): siRNA sense strand
ggaugaggcaaacaagauc

SEQ ID NO: 1175810 - RNA, 19 nt, Homo sapiens
  misc_RNA (1)...(19): siRNA sense strand
gaaggaugaagccaaaauu

SEQ ID NO: 1175811 - RNA, 19 nt, Homo sapiens
  misc_RNA (1)...(19): siRNA sense strand
ccacuacgagucccuucaa

SEQ ID NO: 1175812 - RNA, 19 nt, Homo sapiens
  misc_RNA (1)...(19): siRNA sense strand
ggauggauuaccaccagaa

SEQ ID NO: 1175813 - RNA, 19 nt, Homo sapiens
  misc_RNA (1)...(19): siRNA sense strand
caaccagaaccucaaugau

SEQ ID NO: 1175814 - RNA, 19 nt, Homo sapiens
  misc_RNA (1)...(19): siRNA sense strand
gcagugcguccagaauuuc

SEQ ID NO: 1175815 - RNA, 19 nt, Homo sapiens
  misc_RNA (1)...(19): siRNA sense strand
caagaucgcagagaacaac

SEQ ID NO: 1175816 - RNA, 19 nt, Homo sapiens
  misc_RNA (1)...(19): siRNA sense strand
agaccaaggaugagcaguu

SEQ ID NO: 1175817 - RNA, 19 nt, Homo sapiens
  misc_RNA (1)...(19): siRNA sense strand
ugacaacgcgccugcaaaa

SEQ ID NO: 1175818 - RNA, 19 nt, Homo sapiens
  misc_RNA (1)...(19): siRNA sense strand
agaagguguuugaggagau

SEQ ID NO: 1175819 - RNA, 19 nt, Homo sapiens
  misc_RNA (1)...(19): siRNA sense strand
cacuacgagucccuucaaa

SEQ ID NO: 1175820 - RNA, 19 nt, Homo sapiens
  misc_RNA (1)...(19): siRNA sense strand
ucaacacguuccagagcau

SEQ ID NO: 1175821 - RNA, 19 nt, Homo sapiens
  misc_RNA (1)...(19): siRNA sense strand
gccagcaacgugcagaaga

SEQ ID NO: 1175822 - RNA, 19 nt, Homo sapiens
  misc_RNA (1)...(19): siRNA sense strand
cguccagaauuucaacaag

SEQ ID NO: 1175823 - RNA, 19 nt, Homo sapiens
  misc_RNA (1)...(19): siRNA sense strand
uccagaauuucaacaagca

SEQ ID NO: 1175824 - RNA, 19 nt, Homo sapiens
  misc_RNA (1)...(19): siRNA sense strand
cuacacggccacugacaca

SEQ ID NO: 1175825 - RNA, 19 nt, Homo sapiens
  misc_RNA (1)...(19): siRNA sense strand
gcucaaccagaaccucaau

SEQ ID NO: 1175826 - RNA, 19 nt, Homo sapiens
  misc_RNA (1)...(19): siRNA sense strand
uggaacagccgcguagguu

SEQ ID NO: 1175827 - RNA, 19 nt, Homo sapiens
  misc_RNA (1)...(19): siRNA sense strand
gcucaucaaagcccagaag

SEQ ID NO: 1175828 - RNA, 19 nt, Homo sapiens
  misc_RNA (1)...(19): siRNA sense strand
caaacaagaucgcagagaa

SEQ ID NO: 1175829 - RNA, 19 nt, Homo sapiens
  misc_RNA (1)...(19): siRNA sense strand
gcucaaggcuggugaugug

SEQ ID NO: 1175830 - RNA, 19 nt, Homo sapiens
  misc_RNA (1)...(19): siRNA sense strand
gaccaaggaugagcaguuu

SEQ ID NO: 1175831 - RNA, 19 nt, Homo sapiens
  misc_RNA (1)...(19): siRNA sense strand
aaagaaggaugaagccaaa

SEQ ID NO: 1175832 - RNA, 19 nt, Homo sapiens
  misc_RNA (1)...(19): siRNA sense strand
gacaucaagucacgcauug

SEQ ID NO: 1175833 - RNA, 19 nt, Homo sapiens
  misc_RNA (1)...(19): siRNA sense strand
gaacagccgcguagguuuc

SEQ ID NO: 1175834 - RNA, 19 nt, Homo sapiens
  misc_RNA (1)...(19): siRNA sense strand
cagaugagaccaaggauga

SEQ ID NO: 1175835 - RNA, 19 nt, Homo sapiens
  misc_RNA (1)...(19): siRNA sense strand
gagcagugcguccagaauu

SEQ ID NO: 1175836 - RNA, 19 nt, Homo sapiens
  misc_RNA (1)...(19): siRNA sense strand
ccagcaacgugcagaagaa

SEQ ID NO: 1175837 - RNA, 19 nt, Homo sapiens
  misc_RNA (1)...(19): siRNA sense strand
agaaggaucuccggaccua

SEQ ID NO: 1175838 - RNA, 19 nt, Homo sapiens
  misc_RNA (1)...(19): siRNA sense strand
guggagaccuucccagcaa

SEQ ID NO: 1175839 - RNA, 19 nt, Homo sapiens
  misc_RNA (1)...(19): siRNA sense strand
ggcgcaagcugguggacua

SEQ ID NO: 1175840 - RNA, 19 nt, Homo sapiens
  misc_RNA (1)...(19): siRNA sense strand
gaccugcuguggauggauu

SEQ ID NO: 1175841 - RNA, 19 nt, Homo sapiens
  misc_RNA (1)...(19): siRNA sense strand
gaagguguuugaggagaug

SEQ ID NO: 1175842 - RNA, 19 nt, Homo sapiens
  misc_RNA (1)...(19): siRNA sense strand
gcagagaugggcaguaaag

SEQ ID NO: 1175843 - RNA, 19 nt, Homo sapiens
  misc_RNA (1)...(19): siRNA sense strand
cccgagaacuucacugaga

SEQ ID NO: 1175844 - RNA, 19 nt, Homo sapiens
  misc_RNA (1)...(19): siRNA sense strand
gcaagcugguggacuacga

SEQ ID NO: 1175845 - RNA, 19 nt, Homo sapiens
  misc_RNA (1)...(19): siRNA sense strand
ggaacagccgcguagguuu

SEQ ID NO: 1175846 - RNA, 19 nt, Homo sapiens
  misc_RNA (1)...(19): siRNA sense strand
cgggaaagaucgccagcaa

SEQ ID NO: 1175847 - RNA, 19 nt, Homo sapiens
  misc_RNA (1)...(19): siRNA sense strand
ccaaggaugagcaguuuga

SEQ ID NO: 1175848 - RNA, 19 nt, Homo sapiens
  misc_RNA (1)...(19): siRNA sense strand
gcagggaugaggcaaacaa

SEQ ID NO: 1175849 - RNA, 19 nt, Homo sapiens
  misc_RNA (1)...(19): siRNA sense strand
acaacgaccugcuguggau

SEQ ID NO: 1175850 - RNA, 19 nt, Homo sapiens
  misc_RNA (1)...(19): siRNA sense strand
gggaugaggcaaacaagau

SEQ ID NO: 1175851 - RNA, 19 nt, Homo sapiens
  misc_RNA (1)...(19): siRNA sense strand
ugaaggagagcgacuggaa

SEQ ID NO: 1175852 - RNA, 19 nt, Homo sapiens
  misc_RNA (1)...(19): siRNA sense strand
gcaaacaagaucgcagaga

SEQ ID NO: 1175853 - RNA, 19 nt, Homo sapiens
  misc_RNA (1)...(19): siRNA sense strand
cuaccuggccuccgucaaa

SEQ ID NO: 1175854 - RNA, 19 nt, Homo sapiens
  misc_RNA (1)...(19): siRNA sense strand
ucaaccagaaccucaauga

SEQ ID NO: 1175855 - RNA, 19 nt, Homo sapiens
  misc_RNA (1)...(19): siRNA sense strand
cgacaucaagucacgcauu

SEQ ID NO: 1175856 - RNA, 19 nt, Homo sapiens
  misc_RNA (1)...(19): siRNA sense strand
aaccagaaccucaaugaug

SEQ ID NO: 1175857 - RNA, 19 nt, Homo sapiens
  misc_RNA (1)...(19): siRNA sense strand
gcaacaccuucacggucaa

SEQ ID NO: 1175858 - RNA, 19 nt, Homo sapiens
  misc_RNA (1)...(19): siRNA sense strand
accagaaccucaaugaugu

SEQ ID NO: 1175859 - RNA, 19 nt, Homo sapiens
  misc_RNA (1)...(19): siRNA sense strand
aggaggagcucaucaaagc

SEQ ID NO: 1175860 - RNA, 19 nt, Homo sapiens
  misc_RNA (1)...(19): siRNA sense strand
cgaggaggagcucaucaaa

SEQ ID NO: 1175861 - RNA, 19 nt, Homo sapiens
  misc_RNA (1)...(19): siRNA sense strand
agcagugcguccagaauuu

SEQ ID NO: 1175862 - RNA, 19 nt, Homo sapiens
  misc_RNA (1)...(19): siRNA sense strand
ggaaggcagaugagaccaa

SEQ ID NO: 1175863 - RNA, 19 nt, Homo sapiens
  misc_RNA (1)...(19): siRNA sense strand
ucaaagcccagaagguguu

SEQ ID NO: 1175864 - RNA, 19 nt, Homo sapiens
  misc_RNA (1)...(19): siRNA sense strand
gaggaggagcucaucaaag

SEQ ID NO: 1175865 - RNA, 19 nt, Homo sapiens
  misc_RNA (1)...(19): siRNA sense strand
acaaggagaugagcaagcu

SEQ ID NO: 1175866 - RNA, 19 nt, Homo sapiens
  misc_RNA (1)...(19): siRNA sense strand
ggaugaggcaaacaagauc

SEQ ID NO: 1175867 - RNA, 19 nt, Homo sapiens
  misc_RNA (1)...(19): siRNA sense strand
gaaggaugaagccaaaauu

SEQ ID NO: 1175868 - RNA, 19 nt, Homo sapiens
  misc_RNA (1)...(19): siRNA sense strand
ccacuacgagucccuucaa

SEQ ID NO: 1175869 - RNA, 19 nt, Homo sapiens
  misc_RNA (1)...(19): siRNA sense strand
ggauggauuaccaccagaa

SEQ ID NO: 1175870 - RNA, 19 nt, Homo sapiens
  misc_RNA (1)...(19): siRNA sense strand
caaccagaaccucaaugau

SEQ ID NO: 1175871 - RNA, 19 nt, Homo sapiens
  misc_RNA (1)...(19): siRNA sense strand
gcagugcguccagaauuuc

SEQ ID NO: 1175872 - RNA, 19 nt, Homo sapiens
  misc_RNA (1)...(19): siRNA sense strand
caagaucgcagagaacaac

SEQ ID NO: 1175873 - RNA, 19 nt, Homo sapiens
  misc_RNA (1)...(19): siRNA sense strand
agaccaaggaugagcaguu

SEQ ID NO: 1175874 - RNA, 19 nt, Homo sapiens
  misc_RNA (1)...(19): siRNA sense strand
ugacaacgcgccugcaaaa

SEQ ID NO: 1175875 - RNA, 19 nt, Homo sapiens
  misc_RNA (1)...(19): siRNA sense strand
agaagguguuugaggagau

SEQ ID NO: 1175876 - RNA, 19 nt, Homo sapiens
  misc_RNA (1)...(19): siRNA sense strand
cacuacgagucccuucaaa

SEQ ID NO: 1175877 - RNA, 19 nt, Homo sapiens
  misc_RNA (1)...(19): siRNA sense strand
ucaacacguuccagagcau

SEQ ID NO: 1175878 - RNA, 19 nt, Homo sapiens
  misc_RNA (1)...(19): siRNA sense strand
gccagcaacgugcagaaga

SEQ ID NO: 1175879 - RNA, 19 nt, Homo sapiens
  misc_RNA (1)...(19): siRNA sense strand
cguccagaauuucaacaag

SEQ ID NO: 1175880 - RNA, 19 nt, Homo sapiens
  misc_RNA (1)...(19): siRNA sense strand
uccagaauuucaacaagca

SEQ ID NO: 1175881 - RNA, 19 nt, Homo sapiens
  misc_RNA (1)...(19): siRNA sense strand
cuacacggccacugacaca

SEQ ID NO: 1175882 - RNA, 19 nt, Homo sapiens
  misc_RNA (1)...(19): siRNA sense strand
gcucaaccagaaccucaau

SEQ ID NO: 1175883 - RNA, 19 nt, Homo sapiens
  misc_RNA (1)...(19): siRNA sense strand
uggaacagccgcguagguu

SEQ ID NO: 1175884 - RNA, 19 nt, Homo sapiens
  misc_RNA (1)...(19): siRNA sense strand
gcucaucaaagcccagaag

SEQ ID NO: 1175885 - RNA, 19 nt, Homo sapiens
  misc_RNA (1)...(19): siRNA sense strand
caaacaagaucgcagagaa

SEQ ID NO: 1175886 - RNA, 19 nt, Homo sapiens
  misc_RNA (1)...(19): siRNA sense strand
gcucaaggcuggugaugug

SEQ ID NO: 1175887 - RNA, 19 nt, Homo sapiens
  misc_RNA (1)...(19): siRNA sense strand
gaccaaggaugagcaguuu

SEQ ID NO: 1175888 - RNA, 19 nt, Homo sapiens
  misc_RNA (1)...(19): siRNA sense strand
aaagaaggaugaagccaaa

SEQ ID NO: 1175889 - RNA, 19 nt, Homo sapiens
  misc_RNA (1)...(19): siRNA sense strand
gacaucaagucacgcauug

SEQ ID NO: 1175890 - RNA, 19 nt, Homo sapiens
  misc_RNA (1)...(19): siRNA sense strand
gaacagccgcguagguuuc

SEQ ID NO: 1175891 - RNA, 19 nt, Homo sapiens
  misc_RNA (1)...(19): siRNA sense strand
cagaugagaccaaggauga

SEQ ID NO: 1175892 - RNA, 19 nt, Homo sapiens
  misc_RNA (1)...(19): siRNA sense strand
gagcagugcguccagaauu

SEQ ID NO: 1175893 - RNA, 19 nt, Homo sapiens
  misc_RNA (1)...(19): siRNA sense strand
ccagcaacgugcagaagaa

SEQ ID NO: 1175894 - RNA, 19 nt, Homo sapiens
  misc_RNA (1)...(19): siRNA sense strand
agaaggaucuccggaccua

SEQ ID NO: 1175895 - RNA, 19 nt, Homo sapiens
  misc_RNA (1)...(19): siRNA sense strand
guggagaccuucccagcaa

SEQ ID NO: 1175896 - RNA, 19 nt, Homo sapiens
  misc_RNA (1)...(19): siRNA sense strand
ggcgcaagcugguggacua

SEQ ID NO: 1175897 - RNA, 19 nt, Homo sapiens
  misc_RNA (1)...(19): siRNA sense strand
gaccugcuguggauggauu

SEQ ID NO: 1175898 - RNA, 19 nt, Homo sapiens
  misc_RNA (1)...(19): siRNA sense strand
gaagguguuugaggagaug

SEQ ID NO: 1175899 - RNA, 19 nt, Homo sapiens
  misc_RNA (1)...(19): siRNA sense strand
gcagagaugggcaguaaag

SEQ ID NO: 1175900 - RNA, 19 nt, Homo sapiens
  misc_RNA (1)...(19): siRNA sense strand
cccgagaacuucacugaga

SEQ ID NO: 1175901 - RNA, 19 nt, Homo sapiens
  misc_RNA (1)...(19): siRNA sense strand
gcaagcugguggacuacga

SEQ ID NO: 1175902 - RNA, 19 nt, Homo sapiens
  misc_RNA (1)...(19): siRNA sense strand
ggaacagccgcguagguuu

SEQ ID NO: 1175903 - RNA, 19 nt, Homo sapiens
  misc_RNA (1)...(19): siRNA sense strand
cgggaaagaucgccagcaa

SEQ ID NO: 1175904 - RNA, 19 nt, Homo sapiens
  misc_RNA (1)...(19): siRNA sense strand
ccaaggaugagcaguuuga

SEQ ID NO: 1175905 - RNA, 19 nt, Homo sapiens
  misc_RNA (1)...(19): siRNA sense strand
gcagggaugaggcaaacaa

SEQ ID NO: 1175906 - RNA, 19 nt, Homo sapiens
  misc_RNA (1)...(19): siRNA sense strand
acaacgaccugcuguggau

SEQ ID NO: 1175907 - RNA, 19 nt, Homo sapiens
  misc_RNA (1)...(19): siRNA sense strand
gggaugaggcaaacaagau

SEQ ID NO: 1175908 - RNA, 19 nt, Homo sapiens
  misc_RNA (1)...(19): siRNA sense strand
ugaaggagagcgacuggaa

SEQ ID NO: 1175909 - RNA, 19 nt, Homo sapiens
  misc_RNA (1)...(19): siRNA sense strand
gcaaacaagaucgcagaga

SEQ ID NO: 1175910 - RNA, 19 nt, Homo sapiens
  misc_RNA (1)...(19): siRNA sense strand
cuaccuggccuccgucaaa

SEQ ID NO: 1175911 - RNA, 19 nt, Homo sapiens
  misc_RNA (1)...(19): siRNA sense strand
ucaaccagaaccucaauga

SEQ ID NO: 1175912 - RNA, 19 nt, Homo sapiens
  misc_RNA (1)...(19): siRNA sense strand
cgacaucaagucacgcauu

SEQ ID NO: 1175913 - RNA, 19 nt, Homo sapiens
  misc_RNA (1)...(19): siRNA sense strand
aaccagaaccucaaugaug

SEQ ID NO: 1175914 - RNA, 19 nt, Homo sapiens
  misc_RNA (1)...(19): siRNA sense strand
gcaacaccuucacggucaa

SEQ ID NO: 1175915 - RNA, 19 nt, Homo sapiens
  misc_RNA (1)...(19): siRNA sense strand
accagaaccucaaugaugu

SEQ ID NO: 1175916 - RNA, 19 nt, Homo sapiens
  misc_RNA (1)...(19): siRNA sense strand
aggaggagcucaucaaagc

SEQ ID NO: 1175917 - RNA, 19 nt, Homo sapiens
  misc_RNA (1)...(19): siRNA sense strand
cgaggaggagcucaucaaa

SEQ ID NO: 1175918 - RNA, 19 nt, Homo sapiens
  misc_RNA (1)...(19): siRNA sense strand
agcagugcguccagaauuu

SEQ ID NO: 1175919 - RNA, 19 nt, Homo sapiens
  misc_RNA (1)...(19): siRNA sense strand
ggaaggcagaugagaccaa

SEQ ID NO: 1175920 - RNA, 19 nt, Homo sapiens
  misc_RNA (1)...(19): siRNA sense strand
ucaaagcccagaagguguu

SEQ ID NO: 1175921 - RNA, 19 nt, Homo sapiens
  misc_RNA (1)...(19): siRNA sense strand
gaggaggagcucaucaaag

SEQ ID NO: 1175922 - RNA, 19 nt, Homo sapiens
  misc_RNA (1)...(19): siRNA sense strand
acaaggagaugagcaagcu

SEQ ID NO: 1175923 - RNA, 19 nt, Homo sapiens
  misc_RNA (1)...(19): siRNA sense strand
ggaugaggcaaacaagauc

SEQ ID NO: 1175924 - RNA, 19 nt, Homo sapiens
  misc_RNA (1)...(19): siRNA sense strand
gaaggaugaagccaaaauu

SEQ ID NO: 1175925 - RNA, 19 nt, Homo sapiens
  misc_RNA (1)...(19): siRNA sense strand
ccacuacgagucccuucaa

SEQ ID NO: 1175926 - RNA, 19 nt, Homo sapiens
  misc_RNA (1)...(19): siRNA sense strand
ggauggauuaccaccagaa

SEQ ID NO: 1175927 - RNA, 19 nt, Homo sapiens
  misc_RNA (1)...(19): siRNA sense strand
caaccagaaccucaaugau

SEQ ID NO: 1175928 - RNA, 19 nt, Homo sapiens
  misc_RNA (1)...(19): siRNA sense strand
gcagugcguccagaauuuc

SEQ ID NO: 1175929 - RNA, 19 nt, Homo sapiens
  misc_RNA (1)...(19): siRNA sense strand
caagaucgcagagaacaac

SEQ ID NO: 1175930 - RNA, 19 nt, Homo sapiens
  misc_RNA (1)...(19): siRNA sense strand
agaccaaggaugagcaguu

SEQ ID NO: 1175931 - RNA, 19 nt, Homo sapiens
  misc_RNA (1)...(19): siRNA sense strand
ugacaacgcgccugcaaaa

SEQ ID NO: 1175932 - RNA, 19 nt, Homo sapiens
  misc_RNA (1)...(19): siRNA sense strand
agaagguguuugaggagau

SEQ ID NO: 1175933 - RNA, 19 nt, Homo sapiens
  misc_RNA (1)...(19): siRNA sense strand
cacuacgagucccuucaaa

SEQ ID NO: 1175934 - RNA, 19 nt, Homo sapiens
  misc_RNA (1)...(19): siRNA sense strand
ucaacacguuccagagcau

SEQ ID NO: 1175935 - RNA, 19 nt, Homo sapiens
  misc_RNA (1)...(19): siRNA sense strand
gccagcaacgugcagaaga

SEQ ID NO: 1175936 - RNA, 19 nt, Homo sapiens
  misc_RNA (1)...(19): siRNA sense strand
cguccagaauuucaacaag

SEQ ID NO: 1175937 - RNA, 19 nt, Homo sapiens
  misc_RNA (1)...(19): siRNA sense strand
uccagaauuucaacaagca

SEQ ID NO: 1175938 - RNA, 19 nt, Homo sapiens
  misc_RNA (1)...(19): siRNA sense strand
cuacacggccacugacaca

SEQ ID NO: 1175939 - RNA, 19 nt, Homo sapiens
  misc_RNA (1)...(19): siRNA sense strand
gcucaaccagaaccucaau

SEQ ID NO: 1175940 - RNA, 19 nt, Homo sapiens
  misc_RNA (1)...(19): siRNA sense strand
uggaacagccgcguagguu

SEQ ID NO: 1175941 - RNA, 19 nt, Homo sapiens
  misc_RNA (1)...(19): siRNA sense strand
gcucaucaaagcccagaag

SEQ ID NO: 1175942 - RNA, 19 nt, Homo sapiens
  misc_RNA (1)...(19): siRNA sense strand
caaacaagaucgcagagaa

SEQ ID NO: 1175943 - RNA, 19 nt, Homo sapiens
  misc_RNA (1)...(19): siRNA sense strand
gcucaaggcuggugaugug

SEQ ID NO: 1175944 - RNA, 19 nt, Homo sapiens
  misc_RNA (1)...(19): siRNA sense strand
gaccaaggaugagcaguuu

SEQ ID NO: 1175945 - RNA, 19 nt, Homo sapiens
  misc_RNA (1)...(19): siRNA sense strand
aaagaaggaugaagccaaa

SEQ ID NO: 1175946 - RNA, 19 nt, Homo sapiens
  misc_RNA (1)...(19): siRNA sense strand
gacaucaagucacgcauug

SEQ ID NO: 1175947 - RNA, 19 nt, Homo sapiens
  misc_RNA (1)...(19): siRNA sense strand
gaacagccgcguagguuuc

SEQ ID NO: 1175948 - RNA, 19 nt, Homo sapiens
  misc_RNA (1)...(19): siRNA sense strand
cagaugagaccaaggauga

SEQ ID NO: 1175949 - RNA, 19 nt, Homo sapiens
  misc_RNA (1)...(19): siRNA sense strand
gagcagugcguccagaauu

SEQ ID NO: 1175950 - RNA, 19 nt, Homo sapiens
  misc_RNA (1)...(19): siRNA sense strand
ccagcaacgugcagaagaa

SEQ ID NO: 1175951 - RNA, 19 nt, Homo sapiens
  misc_RNA (1)...(19): siRNA sense strand
agaaggaucuccggaccua

SEQ ID NO: 1175952 - RNA, 19 nt, Homo sapiens
  misc_RNA (1)...(19): siRNA sense strand
guggagaccuucccagcaa

SEQ ID NO: 1175953 - RNA, 19 nt, Homo sapiens
  misc_RNA (1)...(19): siRNA sense strand
ggcgcaagcugguggacua

SEQ ID NO: 1175954 - RNA, 19 nt, Homo sapiens
  misc_RNA (1)...(19): siRNA sense strand
gaccugcuguggauggauu

SEQ ID NO: 1175955 - RNA, 19 nt, Homo sapiens
  misc_RNA (1)...(19): siRNA sense strand
gaagguguuugaggagaug

SEQ ID NO: 1175956 - RNA, 19 nt, Homo sapiens
  misc_RNA (1)...(19): siRNA sense strand
gcagagaugggcaguaaag

SEQ ID NO: 1175957 - RNA, 19 nt, Homo sapiens
  misc_RNA (1)...(19): siRNA sense strand
cccgagaacuucacugaga

SEQ ID NO: 1175958 - RNA, 19 nt, Homo sapiens
  misc_RNA (1)...(19): siRNA sense strand
gcaagcugguggacuacga

SEQ ID NO: 1175959 - RNA, 19 nt, Homo sapiens
  misc_RNA (1)...(19): siRNA sense strand
ggaacagccgcguagguuu

SEQ ID NO: 1175960 - RNA, 19 nt, Homo sapiens
  misc_RNA (1)...(19): siRNA sense strand
cgggaaagaucgccagcaa

SEQ ID NO: 1175961 - RNA, 19 nt, Homo sapiens
  misc_RNA (1)...(19): siRNA sense strand
ccaaggaugagcaguuuga

SEQ ID NO: 1175962 - RNA, 19 nt, Homo sapiens
  misc_RNA (1)...(19): siRNA sense strand
gcagggaugaggcaaacaa

SEQ ID NO: 1175963 - RNA, 19 nt, Homo sapiens
  misc_RNA (1)...(19): siRNA sense strand
acaacgaccugcuguggau

SEQ ID NO: 1175964 - RNA, 19 nt, Homo sapiens
  misc_RNA (1)...(19): siRNA sense strand
gggaugaggcaaacaagau

SEQ ID NO: 1175965 - RNA, 19 nt, Homo sapiens
  misc_RNA (1)...(19): siRNA sense strand
ugaaggagagcgacuggaa

SEQ ID NO: 1175966 - RNA, 19 nt, Homo sapiens
  misc_RNA (1)...(19): siRNA sense strand
gcaaacaagaucgcagaga

SEQ ID NO: 1175967 - RNA, 19 nt, Homo sapiens
  misc_RNA (1)...(19): siRNA sense strand
cuaccuggccuccgucaaa

SEQ ID NO: 1175968 - RNA, 19 nt, Homo sapiens
  misc_RNA (1)...(19): siRNA sense strand
ucaaccagaaccucaauga

SEQ ID NO: 1175969 - RNA, 19 nt, Homo sapiens
  misc_RNA (1)...(19): siRNA sense strand
cgacaucaagucacgcauu

SEQ ID NO: 1175970 - RNA, 19 nt, Homo sapiens
  misc_RNA (1)...(19): siRNA sense strand
aaccagaaccucaaugaug

SEQ ID NO: 1175971 - RNA, 19 nt, Homo sapiens
  misc_RNA (1)...(19): siRNA sense strand
gcaacaccuucacggucaa

SEQ ID NO: 1175972 - RNA, 19 nt, Homo sapiens
  misc_RNA (1)...(19): siRNA sense strand
accagaaccucaaugaugu

SEQ ID NO: 1175973 - RNA, 19 nt, Homo sapiens
  misc_RNA (1)...(19): siRNA sense strand
aggaggagcucaucaaagc

SEQ ID NO: 1175974 - RNA, 19 nt, Homo sapiens
  misc_RNA (1)...(19): siRNA sense strand
cgaggaggagcucaucaaa

SEQ ID NO: 1175975 - RNA, 19 nt, Homo sapiens
  misc_RNA (1)...(19): siRNA sense strand
agcagugcguccagaauuu

SEQ ID NO: 1175976 - RNA, 19 nt, Homo sapiens
  misc_RNA (1)...(19): siRNA sense strand
ggaaggcagaugagaccaa

SEQ ID NO: 1175977 - RNA, 19 nt, Homo sapiens
  misc_RNA (1)...(19): siRNA sense strand
ucaaagcccagaagguguu

SEQ ID NO: 1175978 - RNA, 19 nt, Homo sapiens
  misc_RNA (1)...(19): siRNA sense strand
gaggaggagcucaucaaag

SEQ ID NO: 1175979 - RNA, 19 nt, Homo sapiens
  misc_RNA (1)...(19): siRNA sense strand
acaaggagaugagcaagcu

SEQ ID NO: 1175980 - RNA, 19 nt, Homo sapiens
  misc_RNA (1)...(19): siRNA sense strand
ggaugaggcaaacaagauc

SEQ ID NO: 1175981 - RNA, 19 nt, Homo sapiens
  misc_RNA (1)...(19): siRNA sense strand
gaaggaugaagccaaaauu

SEQ ID NO: 1175982 - RNA, 19 nt, Homo sapiens
  misc_RNA (1)...(19): siRNA sense strand
ccacuacgagucccuucaa

SEQ ID NO: 1175983 - RNA, 19 nt, Homo sapiens
  misc_RNA (1)...(19): siRNA sense strand
ggauggauuaccaccagaa

SEQ ID NO: 1175984 - RNA, 19 nt, Homo sapiens
  misc_RNA (1)...(19): siRNA sense strand
caaccagaaccucaaugau

SEQ ID NO: 1175985 - RNA, 19 nt, Homo sapiens
  misc_RNA (1)...(19): siRNA sense strand
gcagugcguccagaauuuc

SEQ ID NO: 1175986 - RNA, 19 nt, Homo sapiens
  misc_RNA (1)...(19): siRNA sense strand
caagaucgcagagaacaac

SEQ ID NO: 1175987 - RNA, 19 nt, Homo sapiens
  misc_RNA (1)...(19): siRNA sense strand
agaccaaggaugagcaguu

SEQ ID NO: 1175988 - RNA, 19 nt, Homo sapiens
  misc_RNA (1)...(19): siRNA sense strand
ugacaacgcgccugcaaaa

SEQ ID NO: 1175989 - RNA, 19 nt, Homo sapiens
  misc_RNA (1)...(19): siRNA sense strand
agaagguguuugaggagau

SEQ ID NO: 1175990 - RNA, 19 nt, Homo sapiens
  misc_RNA (1)...(19): siRNA sense strand
cacuacgagucccuucaaa

SEQ ID NO: 1175991 - RNA, 19 nt, Homo sapiens
  misc_RNA (1)...(19): siRNA sense strand
ucaacacguuccagagcau

SEQ ID NO: 1175992 - RNA, 19 nt, Homo sapiens
  misc_RNA (1)...(19): siRNA sense strand
gccagcaacgugcagaaga

SEQ ID NO: 1175993 - RNA, 19 nt, Homo sapiens
  misc_RNA (1)...(19): siRNA sense strand
cguccagaauuucaacaag

SEQ ID NO: 1175994 - RNA, 19 nt, Homo sapiens
  misc_RNA (1)...(19): siRNA sense strand
uccagaauuucaacaagca

SEQ ID NO: 1175995 - RNA, 19 nt, Homo sapiens
  misc_RNA (1)...(19): siRNA sense strand
cuacacggccacugacaca

SEQ ID NO: 1175996 - RNA, 19 nt, Homo sapiens
  misc_RNA (1)...(19): siRNA sense strand
gcucaaccagaaccucaau

SEQ ID NO: 1175997 - RNA, 19 nt, Homo sapiens
  misc_RNA (1)...(19): siRNA sense strand
uggaacagccgcguagguu

SEQ ID NO: 1175998 - RNA, 19 nt, Homo sapiens
  misc_RNA (1)...(19): siRNA sense strand
gcucaucaaagcccagaag

SEQ ID NO: 1175999 - RNA, 19 nt, Homo sapiens
  misc_RNA (1)...(19): siRNA sense strand
caaacaagaucgcagagaa

SEQ ID NO: 1176000 - RNA, 19 nt, Homo sapiens
  misc_RNA (1)...(19): siRNA sense strand
gcucaaggcuggugaugug

SEQ ID NO: 1176001 - RNA, 19 nt, Homo sapiens
  misc_RNA (1)...(19): siRNA sense strand
gaccaaggaugagcaguuu

SEQ ID NO: 1176002 - RNA, 19 nt, Homo sapiens
  misc_RNA (1)...(19): siRNA sense strand
aaagaaggaugaagccaaa

SEQ ID NO: 1176003 - RNA, 19 nt, Homo sapiens
  misc_RNA (1)...(19): siRNA sense strand
gacaucaagucacgcauug

SEQ ID NO: 1176004 - RNA, 19 nt, Homo sapiens
  misc_RNA (1)...(19): siRNA sense strand
gaacagccgcguagguuuc

SEQ ID NO: 1176005 - RNA, 19 nt, Homo sapiens
  misc_RNA (1)...(19): siRNA sense strand
cagaugagaccaaggauga

SEQ ID NO: 1176006 - RNA, 19 nt, Homo sapiens
  misc_RNA (1)...(19): siRNA sense strand
gagcagugcguccagaauu

SEQ ID NO: 1176007 - RNA, 19 nt, Homo sapiens
  misc_RNA (1)...(19): siRNA sense strand
ccagcaacgugcagaagaa

SEQ ID NO: 1176008 - RNA, 19 nt, Homo sapiens
  misc_RNA (1)...(19): siRNA sense strand
agaaggaucuccggaccua

SEQ ID NO: 1176009 - RNA, 19 nt, Homo sapiens
  misc_RNA (1)...(19): siRNA sense strand
guggagaccuucccagcaa

SEQ ID NO: 1176010 - RNA, 19 nt, Homo sapiens
  misc_RNA (1)...(19): siRNA sense strand
ggcgcaagcugguggacua

SEQ ID NO: 1176011 - RNA, 19 nt, Homo sapiens
  misc_RNA (1)...(19): siRNA sense strand
gaccugcuguggauggauu

SEQ ID NO: 1176012 - RNA, 19 nt, Homo sapiens
  misc_RNA (1)...(19): siRNA sense strand
gaagguguuugaggagaug

SEQ ID NO: 1176013 - RNA, 19 nt, Homo sapiens
  misc_RNA (1)...(19): siRNA sense strand
gcagagaugggcaguaaag

SEQ ID NO: 1176014 - RNA, 19 nt, Homo sapiens
  misc_RNA (1)...(19): siRNA sense strand
cccgagaacuucacugaga

SEQ ID NO: 1176015 - RNA, 19 nt, Homo sapiens
  misc_RNA (1)...(19): siRNA sense strand
gcaagcugguggacuacga

SEQ ID NO: 1176016 - RNA, 19 nt, Homo sapiens
  misc_RNA (1)...(19): siRNA sense strand
ggaacagccgcguagguuu

SEQ ID NO: 1176017 - RNA, 19 nt, Homo sapiens
  misc_RNA (1)...(19): siRNA sense strand
cgggaaagaucgccagcaa

SEQ ID NO: 1176018 - RNA, 19 nt, Homo sapiens
  misc_RNA (1)...(19): siRNA sense strand
ccaaggaugagcaguuuga

SEQ ID NO: 1176019 - RNA, 19 nt, Homo sapiens
  misc_RNA (1)...(19): siRNA sense strand
gcagggaugaggcaaacaa

SEQ ID NO: 1176020 - RNA, 19 nt, Homo sapiens
  misc_RNA (1)...(19): siRNA sense strand
acaacgaccugcuguggau

SEQ ID NO: 1176021 - RNA, 19 nt, Homo sapiens
  misc_RNA (1)...(19): siRNA sense strand
gggaugaggcaaacaagau

SEQ ID NO: 1176022 - RNA, 19 nt, Homo sapiens
  misc_RNA (1)...(19): siRNA sense strand
ugaaggagagcgacuggaa

SEQ ID NO: 1176023 - RNA, 19 nt, Homo sapiens
  misc_RNA (1)...(19): siRNA sense strand
gcaaacaagaucgcagaga

SEQ ID NO: 1176024 - RNA, 19 nt, Homo sapiens
  misc_RNA (1)...(19): siRNA sense strand
cuaccuggccuccgucaaa

SEQ ID NO: 1176025 - RNA, 19 nt, Homo sapiens
  misc_RNA (1)...(19): siRNA sense strand
ucaaccagaaccucaauga

SEQ ID NO: 1176026 - RNA, 19 nt, Homo sapiens
  misc_RNA (1)...(19): siRNA sense strand
cgacaucaagucacgcauu

SEQ ID NO: 1176027 - RNA, 19 nt, Homo sapiens
  misc_RNA (1)...(19): siRNA sense strand
aaccagaaccucaaugaug

SEQ ID NO: 1176028 - RNA, 19 nt, Homo sapiens
  misc_RNA (1)...(19): siRNA sense strand
gcaacaccuucacggucaa

SEQ ID NO: 1176029 - RNA, 19 nt, Homo sapiens
  misc_RNA (1)...(19): siRNA sense strand
accagaaccucaaugaugu

SEQ ID NO: 1176030 - RNA, 19 nt, Homo sapiens
  misc_RNA (1)...(19): siRNA sense strand
aggaggagcucaucaaagc

SEQ ID NO: 1176031 - RNA, 19 nt, Homo sapiens
  misc_RNA (1)...(19): siRNA sense strand
cgaggaggagcucaucaaa

SEQ ID NO: 1176032 - RNA, 19 nt, Homo sapiens
  misc_RNA (1)...(19): siRNA sense strand
agcagugcguccagaauuu

SEQ ID NO: 1176033 - RNA, 19 nt, Homo sapiens
  misc_RNA (1)...(19): siRNA sense strand
ggaaggcagaugagaccaa

SEQ ID NO: 1176034 - RNA, 19 nt, Homo sapiens
  misc_RNA (1)...(19): siRNA sense strand
ucaaagcccagaagguguu

SEQ ID NO: 1176035 - RNA, 19 nt, Homo sapiens
  misc_RNA (1)...(19): siRNA sense strand
gaggaggagcucaucaaag

SEQ ID NO: 1176036 - RNA, 19 nt, Homo sapiens
  misc_RNA (1)...(19): siRNA sense strand
acaaggagaugagcaagcu

SEQ ID NO: 1176037 - RNA, 19 nt, Homo sapiens
  misc_RNA (1)...(19): siRNA sense strand
ggaugaggcaaacaagauc

SEQ ID NO: 1176038 - RNA, 19 nt, Homo sapiens
  misc_RNA (1)...(19): siRNA sense strand
gaaggaugaagccaaaauu

SEQ ID NO: 1176039 - RNA, 19 nt, Homo sapiens
  misc_RNA (1)...(19): siRNA sense strand
ccacuacgagucccuucaa

SEQ ID NO: 1176040 - RNA, 19 nt, Homo sapiens
  misc_RNA (1)...(19): siRNA sense strand
ggauggauuaccaccagaa

SEQ ID NO: 1176041 - RNA, 19 nt, Homo sapiens
  misc_RNA (1)...(19): siRNA sense strand
caaccagaaccucaaugau

SEQ ID NO: 1176042 - RNA, 19 nt, Homo sapiens
  misc_RNA (1)...(19): siRNA sense strand
gcagugcguccagaauuuc

SEQ ID NO: 1176043 - RNA, 19 nt, Homo sapiens
  misc_RNA (1)...(19): siRNA sense strand
caagaucgcagagaacaac

SEQ ID NO: 1176044 - RNA, 19 nt, Homo sapiens
  misc_RNA (1)...(19): siRNA sense strand
agaccaaggaugagcaguu

SEQ ID NO: 1176045 - RNA, 19 nt, Homo sapiens
  misc_RNA (1)...(19): siRNA sense strand
ugacaacgcgccugcaaaa

SEQ ID NO: 1176046 - RNA, 19 nt, Homo sapiens
  misc_RNA (1)...(19): siRNA sense strand
agaagguguuugaggagau

SEQ ID NO: 1176047 - RNA, 19 nt, Homo sapiens
  misc_RNA (1)...(19): siRNA sense strand
cacuacgagucccuucaaa

SEQ ID NO: 1176048 - RNA, 19 nt, Homo sapiens
  misc_RNA (1)...(19): siRNA sense strand
ucaacacguuccagagcau

SEQ ID NO: 1176049 - RNA, 19 nt, Homo sapiens
  misc_RNA (1)...(19): siRNA sense strand
gccagcaacgugcagaaga

SEQ ID NO: 1176050 - RNA, 19 nt, Homo sapiens
  misc_RNA (1)...(19): siRNA sense strand
cguccagaauuucaacaag

SEQ ID NO: 1176051 - RNA, 19 nt, Homo sapiens
  misc_RNA (1)...(19): siRNA sense strand
uccagaauuucaacaagca

SEQ ID NO: 1176052 - RNA, 19 nt, Homo sapiens
  misc_RNA (1)...(19): siRNA sense strand
cuacacggccacugacaca

SEQ ID NO: 1176053 - RNA, 19 nt, Homo sapiens
  misc_RNA (1)...(19): siRNA sense strand
gcucaaccagaaccucaau

SEQ ID NO: 1176054 - RNA, 19 nt, Homo sapiens
  misc_RNA (1)...(19): siRNA sense strand
uggaacagccgcguagguu

SEQ ID NO: 1176055 - RNA, 19 nt, Homo sapiens
  misc_RNA (1)...(19): siRNA sense strand
gcucaucaaagcccagaag

SEQ ID NO: 1176056 - RNA, 19 nt, Homo sapiens
  misc_RNA (1)...(19): siRNA sense strand
caaacaagaucgcagagaa

SEQ ID NO: 1176057 - RNA, 19 nt, Homo sapiens
  misc_RNA (1)...(19): siRNA sense strand
gcucaaggcuggugaugug

SEQ ID NO: 1176058 - RNA, 19 nt, Homo sapiens
  misc_RNA (1)...(19): siRNA sense strand
gaccaaggaugagcaguuu

SEQ ID NO: 1176059 - RNA, 19 nt, Homo sapiens
  misc_RNA (1)...(19): siRNA sense strand
aaagaaggaugaagccaaa

SEQ ID NO: 1176060 - RNA, 19 nt, Homo sapiens
  misc_RNA (1)...(19): siRNA sense strand
gacaucaagucacgcauug

SEQ ID NO: 1176061 - RNA, 19 nt, Homo sapiens
  misc_RNA (1)...(19): siRNA sense strand
gaacagccgcguagguuuc

SEQ ID NO: 1176062 - RNA, 19 nt, Homo sapiens
  misc_RNA (1)...(19): siRNA sense strand
cagaugagaccaaggauga

SEQ ID NO: 1176063 - RNA, 19 nt, Homo sapiens
  misc_RNA (1)...(19): siRNA sense strand
gagcagugcguccagaauu

SEQ ID NO: 1176064 - RNA, 19 nt, Homo sapiens
  misc_RNA (1)...(19): siRNA sense strand
ccagcaacgugcagaagaa

SEQ ID NO: 1176065 - RNA, 19 nt, Homo sapiens
  misc_RNA (1)...(19): siRNA sense strand
agaaggaucuccggaccua

SEQ ID NO: 1176066 - RNA, 19 nt, Homo sapiens
  misc_RNA (1)...(19): siRNA sense strand
guggagaccuucccagcaa

SEQ ID NO: 1176067 - RNA, 19 nt, Homo sapiens
  misc_RNA (1)...(19): siRNA sense strand
ggcgcaagcugguggacua

SEQ ID NO: 1176068 - RNA, 19 nt, Homo sapiens
  misc_RNA (1)...(19): siRNA sense strand
gaccugcuguggauggauu

SEQ ID NO: 1176069 - RNA, 19 nt, Homo sapiens
  misc_RNA (1)...(19): siRNA sense strand
gaagguguuugaggagaug

SEQ ID NO: 1176070 - RNA, 19 nt, Homo sapiens
  misc_RNA (1)...(19): siRNA sense strand
gcagagaugggcaguaaag

SEQ ID NO: 1176071 - RNA, 19 nt, Homo sapiens
  misc_RNA (1)...(19): siRNA sense strand
cccgagaacuucacugaga

SEQ ID NO: 1176072 - RNA, 19 nt, Homo sapiens
  misc_RNA (1)...(19): siRNA sense strand
gcaagcugguggacuacga

SEQ ID NO: 1176073 - RNA, 19 nt, Homo sapiens
  misc_RNA (1)...(19): siRNA sense strand
ggaacagccgcguagguuu

SEQ ID NO: 1176074 - RNA, 19 nt, Homo sapiens
  misc_RNA (1)...(19): siRNA sense strand
cgggaaagaucgccagcaa

SEQ ID NO: 1176075 - RNA, 19 nt, Homo sapiens
  misc_RNA (1)...(19): siRNA sense strand
ccaaggaugagcaguuuga

SEQ ID NO: 1176076 - RNA, 19 nt, Homo sapiens
  misc_RNA (1)...(19): siRNA sense strand
gcagggaugaggcaaacaa

SEQ ID NO: 1176077 - RNA, 19 nt, Homo sapiens
  misc_RNA (1)...(19): siRNA sense strand
acaacgaccugcuguggau

SEQ ID NO: 1176078 - RNA, 19 nt, Homo sapiens
  misc_RNA (1)...(19): siRNA sense strand
gggaugaggcaaacaagau

SEQ ID NO: 1176079 - RNA, 19 nt, Homo sapiens
  misc_RNA (1)...(19): siRNA sense strand
ugaaggagagcgacuggaa

SEQ ID NO: 1176080 - RNA, 19 nt, Homo sapiens
  misc_RNA (1)...(19): siRNA sense strand
gcaaacaagaucgcagaga

SEQ ID NO: 1176081 - RNA, 19 nt, Homo sapiens
  misc_RNA (1)...(19): siRNA sense strand
cuaccuggccuccgucaaa

SEQ ID NO: 1176082 - RNA, 19 nt, Homo sapiens
  misc_RNA (1)...(19): siRNA sense strand
ucaaccagaaccucaauga

SEQ ID NO: 1176083 - RNA, 19 nt, Homo sapiens
  misc_RNA (1)...(19): siRNA sense strand
cgacaucaagucacgcauu

SEQ ID NO: 1176084 - RNA, 19 nt, Homo sapiens
  misc_RNA (1)...(19): siRNA sense strand
aaccagaaccucaaugaug

SEQ ID NO: 1176085 - RNA, 19 nt, Homo sapiens
  misc_RNA (1)...(19): siRNA sense strand
gcaacaccuucacggucaa

SEQ ID NO: 1176086 - RNA, 19 nt, Homo sapiens
  misc_RNA (1)...(19): siRNA sense strand
accagaaccucaaugaugu

SEQ ID NO: 1176087 - RNA, 19 nt, Homo sapiens
  misc_RNA (1)...(19): siRNA sense strand
aggaggagcucaucaaagc

SEQ ID NO: 1176088 - RNA, 19 nt, Homo sapiens
  misc_RNA (1)...(19): siRNA sense strand
cgaggaggagcucaucaaa

SEQ ID NO: 1176089 - RNA, 19 nt, Homo sapiens
  misc_RNA (1)...(19): siRNA sense strand
agcagugcguccagaauuu

SEQ ID NO: 1176090 - RNA, 19 nt, Homo sapiens
  misc_RNA (1)...(19): siRNA sense strand
ggaaggcagaugagaccaa

SEQ ID NO: 1176091 - RNA, 19 nt, Homo sapiens
  misc_RNA (1)...(19): siRNA sense strand
ucaaagcccagaagguguu

SEQ ID NO: 1176092 - RNA, 19 nt, Homo sapiens
  misc_RNA (1)...(19): siRNA sense strand
gaggaggagcucaucaaag

SEQ ID NO: 1176093 - RNA, 19 nt, Homo sapiens
  misc_RNA (1)...(19): siRNA sense strand
acaaggagaugagcaagcu

SEQ ID NO: 1176094 - RNA, 19 nt, Homo sapiens
  misc_RNA (1)...(19): siRNA sense strand
ggaugaggcaaacaagauc

SEQ ID NO: 1176095 - RNA, 19 nt, Homo sapiens
  misc_RNA (1)...(19): siRNA sense strand
gaaggaugaagccaaaauu

SEQ ID NO: 1176096 - RNA, 19 nt, Homo sapiens
  misc_RNA (1)...(19): siRNA sense strand
ccacuacgagucccuucaa

SEQ ID NO: 1176097 - RNA, 19 nt, Homo sapiens
  misc_RNA (1)...(19): siRNA sense strand
ggauggauuaccaccagaa

SEQ ID NO: 1176098 - RNA, 19 nt, Homo sapiens
  misc_RNA (1)...(19): siRNA sense strand
caaccagaaccucaaugau

SEQ ID NO: 1176099 - RNA, 19 nt, Homo sapiens
  misc_RNA (1)...(19): siRNA sense strand
gcagugcguccagaauuuc

SEQ ID NO: 1176100 - RNA, 19 nt, Homo sapiens
  misc_RNA (1)...(19): siRNA sense strand
caagaucgcagagaacaac

SEQ ID NO: 1176101 - RNA, 19 nt, Homo sapiens
  misc_RNA (1)...(19): siRNA sense strand
agaccaaggaugagcaguu

SEQ ID NO: 1176102 - RNA, 19 nt, Homo sapiens
  misc_RNA (1)...(19): siRNA sense strand
ugacaacgcgccugcaaaa

SEQ ID NO: 1176103 - RNA, 19 nt, Homo sapiens
  misc_RNA (1)...(19): siRNA sense strand
agaagguguuugaggagau

SEQ ID NO: 1176104 - RNA, 19 nt, Homo sapiens
  misc_RNA (1)...(19): siRNA sense strand
cacuacgagucccuucaaa

SEQ ID NO: 1176105 - RNA, 19 nt, Homo sapiens
  misc_RNA (1)...(19): siRNA sense strand
ucaacacguuccagagcau

SEQ ID NO: 1176106 - RNA, 19 nt, Homo sapiens
  misc_RNA (1)...(19): siRNA sense strand
gccagcaacgugcagaaga

SEQ ID NO: 1176107 - RNA, 19 nt, Homo sapiens
  misc_RNA (1)...(19): siRNA sense strand
cguccagaauuucaacaag

SEQ ID NO: 1176108 - RNA, 19 nt, Homo sapiens
  misc_RNA (1)...(19): siRNA sense strand
uccagaauuucaacaagca

SEQ ID NO: 1176109 - RNA, 19 nt, Homo sapiens
  misc_RNA (1)...(19): siRNA sense strand
cuacacggccacugacaca

SEQ ID NO: 1176110 - RNA, 19 nt, Homo sapiens
  misc_RNA (1)...(19): siRNA sense strand
gcucaaccagaaccucaau

SEQ ID NO: 1176111 - RNA, 19 nt, Homo sapiens
  misc_RNA (1)...(19): siRNA sense strand
uggaacagccgcguagguu

SEQ ID NO: 1176112 - RNA, 19 nt, Homo sapiens
  misc_RNA (1)...(19): siRNA sense strand
gcucaucaaagcccagaag

SEQ ID NO: 1176113 - RNA, 19 nt, Homo sapiens
  misc_RNA (1)...(19): siRNA sense strand
caaacaagaucgcagagaa

SEQ ID NO: 1176114 - RNA, 19 nt, Homo sapiens
  misc_RNA (1)...(19): siRNA sense strand
gcucaaggcuggugaugug

SEQ ID NO: 1176115 - RNA, 19 nt, Homo sapiens
  misc_RNA (1)...(19): siRNA sense strand
gaccaaggaugagcaguuu

SEQ ID NO: 1176116 - RNA, 19 nt, Homo sapiens
  misc_RNA (1)...(19): siRNA sense strand
aaagaaggaugaagccaaa

SEQ ID NO: 1176117 - RNA, 19 nt, Homo sapiens
  misc_RNA (1)...(19): siRNA sense strand
gacaucaagucacgcauug

SEQ ID NO: 1176118 - RNA, 19 nt, Homo sapiens
  misc_RNA (1)...(19): siRNA sense strand
gaacagccgcguagguuuc

SEQ ID NO: 1176119 - RNA, 19 nt, Homo sapiens
  misc_RNA (1)...(19): siRNA sense strand
cagaugagaccaaggauga

SEQ ID NO: 1176120 - RNA, 19 nt, Homo sapiens
  misc_RNA (1)...(19): siRNA sense strand
gagcagugcguccagaauu

SEQ ID NO: 1176121 - RNA, 19 nt, Homo sapiens
  misc_RNA (1)...(19): siRNA sense strand
ccagcaacgugcagaagaa

SEQ ID NO: 1176122 - RNA, 19 nt, Homo sapiens
  misc_RNA (1)...(19): siRNA sense strand
agaaggaucuccggaccua

SEQ ID NO: 1176123 - RNA, 19 nt, Homo sapiens
  misc_RNA (1)...(19): siRNA sense strand
guggagaccuucccagcaa

SEQ ID NO: 1176124 - RNA, 19 nt, Homo sapiens
  misc_RNA (1)...(19): siRNA sense strand
ggcgcaagcugguggacua

SEQ ID NO: 1176125 - RNA, 19 nt, Homo sapiens
  misc_RNA (1)...(19): siRNA sense strand
gaccugcuguggauggauu

SEQ ID NO: 1176126 - RNA, 19 nt, Homo sapiens
  misc_RNA (1)...(19): siRNA sense strand
gaagguguuugaggagaug

SEQ ID NO: 1176127 - RNA, 19 nt, Homo sapiens
  misc_RNA (1)...(19): siRNA sense strand
gcagagaugggcaguaaag

SEQ ID NO: 1176128 - RNA, 19 nt, Homo sapiens
  misc_RNA (1)...(19): siRNA sense strand
cccgagaacuucacugaga

SEQ ID NO: 1176129 - RNA, 19 nt, Homo sapiens
  misc_RNA (1)...(19): siRNA sense strand
gcaagcugguggacuacga

SEQ ID NO: 1176130 - RNA, 19 nt, Homo sapiens
  misc_RNA (1)...(19): siRNA sense strand
ggaacagccgcguagguuu

SEQ ID NO: 1176131 - RNA, 19 nt, Homo sapiens
  misc_RNA (1)...(19): siRNA sense strand
cgggaaagaucgccagcaa

SEQ ID NO: 1176132 - RNA, 19 nt, Homo sapiens
  misc_RNA (1)...(19): siRNA sense strand
ccaaggaugagcaguuuga

SEQ ID NO: 1176133 - RNA, 19 nt, Homo sapiens
  misc_RNA (1)...(19): siRNA sense strand
gcagggaugaggcaaacaa

SEQ ID NO: 1176134 - RNA, 19 nt, Homo sapiens
  misc_RNA (1)...(19): siRNA sense strand
acaacgaccugcuguggau

SEQ ID NO: 1176135 - RNA, 19 nt, Homo sapiens
  misc_RNA (1)...(19): siRNA sense strand
gggaugaggcaaacaagau

SEQ ID NO: 1176136 - RNA, 19 nt, Homo sapiens
  misc_RNA (1)...(19): siRNA sense strand
ugaaggagagcgacuggaa

SEQ ID NO: 1176137 - RNA, 19 nt, Homo sapiens
  misc_RNA (1)...(19): siRNA sense strand
gcaaacaagaucgcagaga

SEQ ID NO: 1176138 - RNA, 19 nt, Homo sapiens
  misc_RNA (1)...(19): siRNA sense strand
cuaccuggccuccgucaaa

SEQ ID NO: 1176139 - RNA, 19 nt, Homo sapiens
  misc_RNA (1)...(19): siRNA sense strand
ucaaccagaaccucaauga

SEQ ID NO: 1176140 - RNA, 19 nt, Homo sapiens
  misc_RNA (1)...(19): siRNA sense strand
cgacaucaagucacgcauu

SEQ ID NO: 1176141 - RNA, 19 nt, Homo sapiens
  misc_RNA (1)...(19): siRNA sense strand
aaccagaaccucaaugaug

SEQ ID NO: 1176142 - RNA, 19 nt, Homo sapiens
  misc_RNA (1)...(19): siRNA sense strand
gcaacaccuucacggucaa

SEQ ID NO: 1176143 - RNA, 19 nt, Homo sapiens
  misc_RNA (1)...(19): siRNA sense strand
accagaaccucaaugaugu

SEQ ID NO: 1176144 - RNA, 19 nt, Homo sapiens
  misc_RNA (1)...(19): siRNA sense strand
aggaggagcucaucaaagc

SEQ ID NO: 1176145 - RNA, 19 nt, Homo sapiens
  misc_RNA (1)...(19): siRNA sense strand
cgaggaggagcucaucaaa

SEQ ID NO: 1176146 - RNA, 19 nt, Homo sapiens
  misc_RNA (1)...(19): siRNA sense strand
agcagugcguccagaauuu

SEQ ID NO: 1176147 - RNA, 19 nt, Homo sapiens
  misc_RNA (1)...(19): siRNA sense strand
ggaaggcagaugagaccaa

SEQ ID NO: 1176148 - RNA, 19 nt, Homo sapiens
  misc_RNA (1)...(19): siRNA sense strand
ucaaagcccagaagguguu

SEQ ID NO: 1176149 - RNA, 19 nt, Homo sapiens
  misc_RNA (1)...(19): siRNA sense strand
gaggaggagcucaucaaag

SEQ ID NO: 1176150 - RNA, 19 nt, Homo sapiens
  misc_RNA (1)...(19): siRNA sense strand
acaaggagaugagcaagcu

SEQ ID NO: 1176151 - RNA, 19 nt, Homo sapiens
  misc_RNA (1)...(19): siRNA sense strand
ggaugaggcaaacaagauc

SEQ ID NO: 1176152 - RNA, 19 nt, Homo sapiens
  misc_RNA (1)...(19): siRNA sense strand
gaaggaugaagccaaaauu

SEQ ID NO: 1176153 - RNA, 19 nt, Homo sapiens
  misc_RNA (1)...(19): siRNA sense strand
ccacuacgagucccuucaa

SEQ ID NO: 1176154 - RNA, 19 nt, Homo sapiens
  misc_RNA (1)...(19): siRNA sense strand
ggauggauuaccaccagaa

SEQ ID NO: 1176155 - RNA, 19 nt, Homo sapiens
  misc_RNA (1)...(19): siRNA sense strand
caaccagaaccucaaugau

SEQ ID NO: 1176156 - RNA, 19 nt, Homo sapiens
  misc_RNA (1)...(19): siRNA sense strand
gcagugcguccagaauuuc

SEQ ID NO: 1176157 - RNA, 19 nt, Homo sapiens
  misc_RNA (1)...(19): siRNA sense strand
caagaucgcagagaacaac

SEQ ID NO: 1176158 - RNA, 19 nt, Homo sapiens
  misc_RNA (1)...(19): siRNA sense strand
agaccaaggaugagcaguu

SEQ ID NO: 1176159 - RNA, 19 nt, Homo sapiens
  misc_RNA (1)...(19): siRNA sense strand
ugacaacgcgccugcaaaa

SEQ ID NO: 1176160 - RNA, 19 nt, Homo sapiens
  misc_RNA (1)...(19): siRNA sense strand
agaagguguuugaggagau

SEQ ID NO: 1176161 - RNA, 19 nt, Homo sapiens
  misc_RNA (1)...(19): siRNA sense strand
cacuacgagucccuucaaa

SEQ ID NO: 1176162 - RNA, 19 nt, Homo sapiens
  misc_RNA (1)...(19): siRNA sense strand
ucaacacguuccagagcau

SEQ ID NO: 1176163 - RNA, 19 nt, Homo sapiens
  misc_RNA (1)...(19): siRNA sense strand
gccagcaacgugcagaaga

SEQ ID NO: 1176164 - RNA, 19 nt, Homo sapiens
  misc_RNA (1)...(19): siRNA sense strand
cguccagaauuucaacaag

SEQ ID NO: 1176165 - RNA, 19 nt, Homo sapiens
  misc_RNA (1)...(19): siRNA sense strand
uccagaauuucaacaagca

SEQ ID NO: 1176166 - RNA, 19 nt, Homo sapiens
  misc_RNA (1)...(19): siRNA sense strand
cuacacggccacugacaca

SEQ ID NO: 1176167 - RNA, 19 nt, Homo sapiens
  misc_RNA (1)...(19): siRNA sense strand
gcucaaccagaaccucaau

SEQ ID NO: 1176168 - RNA, 19 nt, Homo sapiens
  misc_RNA (1)...(19): siRNA sense strand
uggaacagccgcguagguu

SEQ ID NO: 1176169 - RNA, 19 nt, Homo sapiens
  misc_RNA (1)...(19): siRNA sense strand
gcucaucaaagcccagaag

SEQ ID NO: 1176170 - RNA, 19 nt, Homo sapiens
  misc_RNA (1)...(19): siRNA sense strand
caaacaagaucgcagagaa

SEQ ID NO: 1176171 - RNA, 19 nt, Homo sapiens
  misc_RNA (1)...(19): siRNA sense strand
gcucaaggcuggugaugug

SEQ ID NO: 1176172 - RNA, 19 nt, Homo sapiens
  misc_RNA (1)...(19): siRNA sense strand
gaccaaggaugagcaguuu

SEQ ID NO: 1176173 - RNA, 19 nt, Homo sapiens
  misc_RNA (1)...(19): siRNA sense strand
aaagaaggaugaagccaaa

SEQ ID NO: 1176174 - RNA, 19 nt, Homo sapiens
  misc_RNA (1)...(19): siRNA sense strand
gacaucaagucacgcauug

SEQ ID NO: 1176175 - RNA, 19 nt, Homo sapiens
  misc_RNA (1)...(19): siRNA sense strand
gaacagccgcguagguuuc

SEQ ID NO: 1176176 - RNA, 19 nt, Homo sapiens
  misc_RNA (1)...(19): siRNA sense strand
cagaugagaccaaggauga

SEQ ID NO: 1176177 - RNA, 19 nt, Homo sapiens
  misc_RNA (1)...(19): siRNA sense strand
gagcagugcguccagaauu

SEQ ID NO: 1176178 - RNA, 19 nt, Homo sapiens
  misc_RNA (1)...(19): siRNA sense strand
ccagcaacgugcagaagaa

SEQ ID NO: 1176179 - RNA, 19 nt, Homo sapiens
  misc_RNA (1)...(19): siRNA sense strand
agaaggaucuccggaccua

SEQ ID NO: 1176180 - RNA, 19 nt, Homo sapiens
  misc_RNA (1)...(19): siRNA sense strand
guggagaccuucccagcaa

SEQ ID NO: 1176181 - RNA, 19 nt, Homo sapiens
  misc_RNA (1)...(19): siRNA sense strand
ggcgcaagcugguggacua

SEQ ID NO: 1176182 - RNA, 19 nt, Homo sapiens
  misc_RNA (1)...(19): siRNA sense strand
gaccugcuguggauggauu

SEQ ID NO: 1176183 - RNA, 19 nt, Homo sapiens
  misc_RNA (1)...(19): siRNA sense strand
gaagguguuugaggagaug

SEQ ID NO: 1176184 - RNA, 19 nt, Homo sapiens
  misc_RNA (1)...(19): siRNA sense strand
gcagagaugggcaguaaag

SEQ ID NO: 1176185 - RNA, 19 nt, Homo sapiens
  misc_RNA (1)...(19): siRNA sense strand
cccgagaacuucacugaga

SEQ ID NO: 1176186 - RNA, 19 nt, Homo sapiens
  misc_RNA (1)...(19): siRNA sense strand
gcaagcugguggacuacga

SEQ ID NO: 1176187 - RNA, 19 nt, Homo sapiens
  misc_RNA (1)...(19): siRNA sense strand
ggaacagccgcguagguuu

SEQ ID NO: 1176188 - RNA, 19 nt, Homo sapiens
  misc_RNA (1)...(19): siRNA sense strand
cgggaaagaucgccagcaa

SEQ ID NO: 1176189 - RNA, 19 nt, Homo sapiens
  misc_RNA (1)...(19): siRNA sense strand
ccaaggaugagcaguuuga

SEQ ID NO: 1176190 - RNA, 19 nt, Homo sapiens
  misc_RNA (1)...(19): siRNA sense strand
gcagggaugaggcaaacaa

SEQ ID NO: 1176191 - RNA, 19 nt, Homo sapiens
  misc_RNA (1)...(19): siRNA sense strand
acaacgaccugcuguggau

SEQ ID NO: 1176192 - RNA, 19 nt, Homo sapiens
  misc_RNA (1)...(19): siRNA sense strand
gggaugaggcaaacaagau

SEQ ID NO: 1176193 - RNA, 19 nt, Homo sapiens
  misc_RNA (1)...(19): siRNA sense strand
ugaaggagagcgacuggaa

SEQ ID NO: 1176194 - RNA, 19 nt, Homo sapiens
  misc_RNA (1)...(19): siRNA sense strand
gcaaacaagaucgcagaga

SEQ ID NO: 1176195 - RNA, 19 nt, Homo sapiens
  misc_RNA (1)...(19): siRNA sense strand
cuaccuggccuccgucaaa

SEQ ID NO: 1176196 - RNA, 19 nt, Homo sapiens
  misc_RNA (1)...(19): siRNA sense strand
ucaaccagaaccucaauga

SEQ ID NO: 1176197 - RNA, 19 nt, Homo sapiens
  misc_RNA (1)...(19): siRNA sense strand
cgacaucaagucacgcauu

SEQ ID NO: 1176198 - RNA, 19 nt, Homo sapiens
  misc_RNA (1)...(19): siRNA sense strand
aaccagaaccucaaugaug

SEQ ID NO: 1176199 - RNA, 19 nt, Homo sapiens
  misc_RNA (1)...(19): siRNA sense strand
gcaacaccuucacggucaa

SEQ ID NO: 1176200 - RNA, 19 nt, Homo sapiens
  misc_RNA (1)...(19): siRNA sense strand
accagaaccucaaugaugu

SEQ ID NO: 1176201 - RNA, 19 nt, Homo sapiens
  misc_RNA (1)...(19): siRNA sense strand
aggaggagcucaucaaagc

SEQ ID NO: 1176202 - RNA, 19 nt, Homo sapiens
  misc_RNA (1)...(19): siRNA sense strand
cgaggaggagcucaucaaa

SEQ ID NO: 1176203 - RNA, 19 nt, Homo sapiens
  misc_RNA (1)...(19): siRNA sense strand
agcagugcguccagaauuu

SEQ ID NO: 1176204 - RNA, 19 nt, Homo sapiens
  misc_RNA (1)...(19): siRNA sense strand
ggaaggcagaugagaccaa

SEQ ID NO: 1176205 - RNA, 19 nt, Homo sapiens
  misc_RNA (1)...(19): siRNA sense strand
ucaaagcccagaagguguu

SEQ ID NO: 1176206 - RNA, 19 nt, Homo sapiens
  misc_RNA (1)...(19): siRNA sense strand
gaggaggagcucaucaaag

SEQ ID NO: 1176207 - RNA, 19 nt, Homo sapiens
  misc_RNA (1)...(19): siRNA sense strand
acaaggagaugagcaagcu

SEQ ID NO: 1176208 - RNA, 19 nt, Homo sapiens
  misc_RNA (1)...(19): siRNA sense strand
ggaugaggcaaacaagauc

SEQ ID NO: 1176209 - RNA, 19 nt, Homo sapiens
  misc_RNA (1)...(19): siRNA sense strand
gaaggaugaagccaaaauu

SEQ ID NO: 1176210 - RNA, 19 nt, Homo sapiens
  misc_RNA (1)...(19): siRNA sense strand
ccacuacgagucccuucaa

SEQ ID NO: 1176211 - RNA, 19 nt, Homo sapiens
  misc_RNA (1)...(19): siRNA sense strand
ggauggauuaccaccagaa

SEQ ID NO: 1176212 - RNA, 19 nt, Homo sapiens
  misc_RNA (1)...(19): siRNA sense strand
caaccagaaccucaaugau

SEQ ID NO: 1176213 - RNA, 19 nt, Homo sapiens
  misc_RNA (1)...(19): siRNA sense strand
gcagugcguccagaauuuc

SEQ ID NO: 1176214 - RNA, 19 nt, Homo sapiens
  misc_RNA (1)...(19): siRNA sense strand
caagaucgcagagaacaac

SEQ ID NO: 1176215 - RNA, 19 nt, Homo sapiens
  misc_RNA (1)...(19): siRNA sense strand
agaccaaggaugagcaguu

SEQ ID NO: 1176216 - RNA, 19 nt, Homo sapiens
  misc_RNA (1)...(19): siRNA sense strand
ugacaacgcgccugcaaaa

SEQ ID NO: 1176217 - RNA, 19 nt, Homo sapiens
  misc_RNA (1)...(19): siRNA sense strand
agaagguguuugaggagau

SEQ ID NO: 1176218 - RNA, 19 nt, Homo sapiens
  misc_RNA (1)...(19): siRNA sense strand
cacuacgagucccuucaaa

SEQ ID NO: 1176219 - RNA, 19 nt, Homo sapiens
  misc_RNA (1)...(19): siRNA sense strand
ucaacacguuccagagcau

SEQ ID NO: 1176220 - RNA, 19 nt, Homo sapiens
  misc_RNA (1)...(19): siRNA sense strand
gccagcaacgugcagaaga

SEQ ID NO: 1176221 - RNA, 19 nt, Homo sapiens
  misc_RNA (1)...(19): siRNA sense strand
cguccagaauuucaacaag

SEQ ID NO: 1176222 - RNA, 19 nt, Homo sapiens
  misc_RNA (1)...(19): siRNA sense strand
uccagaauuucaacaagca

SEQ ID NO: 1176223 - RNA, 19 nt, Homo sapiens
  misc_RNA (1)...(19): siRNA sense strand
cuacacggccacugacaca

SEQ ID NO: 1176224 - RNA, 19 nt, Homo sapiens
  misc_RNA (1)...(19): siRNA sense strand
gcucaaccagaaccucaau

SEQ ID NO: 1176225 - RNA, 19 nt, Homo sapiens
  misc_RNA (1)...(19): siRNA sense strand
uggaacagccgcguagguu

SEQ ID NO: 1176226 - RNA, 19 nt, Homo sapiens
  misc_RNA (1)...(19): siRNA sense strand
gcucaucaaagcccagaag

SEQ ID NO: 1176227 - RNA, 19 nt, Homo sapiens
  misc_RNA (1)...(19): siRNA sense strand
caaacaagaucgcagagaa

SEQ ID NO: 1176228 - RNA, 19 nt, Homo sapiens
  misc_RNA (1)...(19): siRNA sense strand
gcucaaggcuggugaugug

SEQ ID NO: 1176229 - RNA, 19 nt, Homo sapiens
  misc_RNA (1)...(19): siRNA sense strand
gaccaaggaugagcaguuu

SEQ ID NO: 1176230 - RNA, 19 nt, Homo sapiens
  misc_RNA (1)...(19): siRNA sense strand
aaagaaggaugaagccaaa

SEQ ID NO: 1176231 - RNA, 19 nt, Homo sapiens
  misc_RNA (1)...(19): siRNA sense strand
gacaucaagucacgcauug

SEQ ID NO: 1176232 - RNA, 19 nt, Homo sapiens
  misc_RNA (1)...(19): siRNA sense strand
gaacagccgcguagguuuc

SEQ ID NO: 1176233 - RNA, 19 nt, Homo sapiens
  misc_RNA (1)...(19): siRNA sense strand
cagaugagaccaaggauga

SEQ ID NO: 1176234 - RNA, 19 nt, Homo sapiens
  misc_RNA (1)...(19): siRNA sense strand
gagcagugcguccagaauu

SEQ ID NO: 1176235 - RNA, 19 nt, Homo sapiens
  misc_RNA (1)...(19): siRNA sense strand
ccagcaacgugcagaagaa

SEQ ID NO: 1176236 - RNA, 19 nt, Homo sapiens
  misc_RNA (1)...(19): siRNA sense strand
agaaggaucuccggaccua

SEQ ID NO: 1176237 - RNA, 19 nt, Homo sapiens
  misc_RNA (1)...(19): siRNA sense strand
guggagaccuucccagcaa

SEQ ID NO: 1176238 - RNA, 19 nt, Homo sapiens
  misc_RNA (1)...(19): siRNA sense strand
ggcgcaagcugguggacua

SEQ ID NO: 1176239 - RNA, 19 nt, Homo sapiens
  misc_RNA (1)...(19): siRNA sense strand
gaccugcuguggauggauu

SEQ ID NO: 1176240 - RNA, 19 nt, Homo sapiens
  misc_RNA (1)...(19): siRNA sense strand
gaagguguuugaggagaug

SEQ ID NO: 1176241 - RNA, 19 nt, Homo sapiens
  misc_RNA (1)...(19): siRNA sense strand
gcagagaugggcaguaaag

SEQ ID NO: 1176242 - RNA, 19 nt, Homo sapiens
  misc_RNA (1)...(19): siRNA sense strand
cccgagaacuucacugaga

SEQ ID NO: 1176243 - RNA, 19 nt, Homo sapiens
  misc_RNA (1)...(19): siRNA sense strand
gcaagcugguggacuacga

SEQ ID NO: 1176244 - RNA, 19 nt, Homo sapiens
  misc_RNA (1)...(19): siRNA sense strand
ggaacagccgcguagguuu

SEQ ID NO: 1176245 - RNA, 19 nt, Homo sapiens
  misc_RNA (1)...(19): siRNA sense strand
cgggaaagaucgccagcaa

SEQ ID NO: 1176246 - RNA, 19 nt, Homo sapiens
  misc_RNA (1)...(19): siRNA sense strand
ccaaggaugagcaguuuga

SEQ ID NO: 1176247 - RNA, 19 nt, Homo sapiens
  misc_RNA (1)...(19): siRNA sense strand
gcagggaugaggcaaacaa

SEQ ID NO: 1176248 - RNA, 19 nt, Homo sapiens
  misc_RNA (1)...(19): siRNA sense strand
acaacgaccugcuguggau

SEQ ID NO: 1176249 - RNA, 19 nt, Homo sapiens
  misc_RNA (1)...(19): siRNA sense strand
gggaugaggcaaacaagau

SEQ ID NO: 1176250 - RNA, 19 nt, Homo sapiens
  misc_RNA (1)...(19): siRNA sense strand
ugaaggagagcgacuggaa

SEQ ID NO: 1176251 - RNA, 19 nt, Homo sapiens
  misc_RNA (1)...(19): siRNA sense strand
gcaaacaagaucgcagaga

SEQ ID NO: 1176252 - RNA, 19 nt, Homo sapiens
  misc_RNA (1)...(19): siRNA sense strand
cuaccuggccuccgucaaa

SEQ ID NO: 1176253 - RNA, 19 nt, Homo sapiens
  misc_RNA (1)...(19): siRNA sense strand
ucaaccagaaccucaauga

SEQ ID NO: 1176254 - RNA, 19 nt, Homo sapiens
  misc_RNA (1)...(19): siRNA sense strand
cgacaucaagucacgcauu

SEQ ID NO: 1176255 - RNA, 19 nt, Homo sapiens
  misc_RNA (1)...(19): siRNA sense strand
aaccagaaccucaaugaug

SEQ ID NO: 1176256 - RNA, 19 nt, Homo sapiens
  misc_RNA (1)...(19): siRNA sense strand
gcaacaccuucacggucaa

SEQ ID NO: 1176257 - RNA, 19 nt, Homo sapiens
  misc_RNA (1)...(19): siRNA sense strand
accagaaccucaaugaugu

SEQ ID NO: 1176258 - RNA, 19 nt, Homo sapiens
  misc_RNA (1)...(19): siRNA sense strand
aggaggagcucaucaaagc

SEQ ID NO: 1176259 - RNA, 19 nt, Homo sapiens
  misc_RNA (1)...(19): siRNA sense strand
cgaggaggagcucaucaaa

SEQ ID NO: 1176260 - RNA, 19 nt, Homo sapiens
  misc_RNA (1)...(19): siRNA sense strand
agcagugcguccagaauuu

SEQ ID NO: 1176261 - RNA, 19 nt, Homo sapiens
  misc_RNA (1)...(19): siRNA sense strand
ggaaggcagaugagaccaa

SEQ ID NO: 1176262 - RNA, 19 nt, Homo sapiens
  misc_RNA (1)...(19): siRNA sense strand
ucaaagcccagaagguguu

SEQ ID NO: 1176263 - RNA, 19 nt, Homo sapiens
  misc_RNA (1)...(19): siRNA sense strand
gaggaggagcucaucaaag

SEQ ID NO: 1176264 - RNA, 19 nt, Homo sapiens
  misc_RNA (1)...(19): siRNA sense strand
acaaggagaugagcaagcu

SEQ ID NO: 1176265 - RNA, 19 nt, Homo sapiens
  misc_RNA (1)...(19): siRNA sense strand
ggaugaggcaaacaagauc

SEQ ID NO: 1176266 - RNA, 19 nt, Homo sapiens
  misc_RNA (1)...(19): siRNA sense strand
gaaggaugaagccaaaauu

SEQ ID NO: 1176267 - RNA, 19 nt, Homo sapiens
  misc_RNA (1)...(19): siRNA sense strand
ccacuacgagucccuucaa

SEQ ID NO: 1176268 - RNA, 19 nt, Homo sapiens
  misc_RNA (1)...(19): siRNA sense strand
ggauggauuaccaccagaa

SEQ ID NO: 1176269 - RNA, 19 nt, Homo sapiens
  misc_RNA (1)...(19): siRNA sense strand
caaccagaaccucaaugau

SEQ ID NO: 1176270 - RNA, 19 nt, Homo sapiens
  misc_RNA (1)...(19): siRNA sense strand
gcagugcguccagaauuuc

SEQ ID NO: 1176271 - RNA, 19 nt, Homo sapiens
  misc_RNA (1)...(19): siRNA sense strand
caagaucgcagagaacaac

SEQ ID NO: 1176272 - RNA, 19 nt, Homo sapiens
  misc_RNA (1)...(19): siRNA sense strand
agaccaaggaugagcaguu

SEQ ID NO: 1176273 - RNA, 19 nt, Homo sapiens
  misc_RNA (1)...(19): siRNA sense strand
ugacaacgcgccugcaaaa

SEQ ID NO: 1176274 - RNA, 19 nt, Homo sapiens
  misc_RNA (1)...(19): siRNA sense strand
agaagguguuugaggagau

SEQ ID NO: 1176275 - RNA, 19 nt, Homo sapiens
  misc_RNA (1)...(19): siRNA sense strand
cacuacgagucccuucaaa

SEQ ID NO: 1176276 - RNA, 19 nt, Homo sapiens
  misc_RNA (1)...(19): siRNA sense strand
ucaacacguuccagagcau

SEQ ID NO: 1176277 - RNA, 19 nt, Homo sapiens
  misc_RNA (1)...(19): siRNA sense strand
gccagcaacgugcagaaga

SEQ ID NO: 1176278 - RNA, 19 nt, Homo sapiens
  misc_RNA (1)...(19): siRNA sense strand
cguccagaauuucaacaag

SEQ ID NO: 1176279 - RNA, 19 nt, Homo sapiens
  misc_RNA (1)...(19): siRNA sense strand
uccagaauuucaacaagca

SEQ ID NO: 1176280 - RNA, 19 nt, Homo sapiens
  misc_RNA (1)...(19): siRNA sense strand
cuacacggccacugacaca

SEQ ID NO: 1176281 - RNA, 19 nt, Homo sapiens
  misc_RNA (1)...(19): siRNA sense strand
gcucaaccagaaccucaau

SEQ ID NO: 1176282 - RNA, 19 nt, Homo sapiens
  misc_RNA (1)...(19): siRNA sense strand
uggaacagccgcguagguu

SEQ ID NO: 1176283 - RNA, 19 nt, Homo sapiens
  misc_RNA (1)...(19): siRNA sense strand
gcucaucaaagcccagaag

SEQ ID NO: 1176284 - RNA, 19 nt, Homo sapiens
  misc_RNA (1)...(19): siRNA sense strand
caaacaagaucgcagagaa

SEQ ID NO: 1176285 - RNA, 19 nt, Homo sapiens
  misc_RNA (1)...(19): siRNA sense strand
gcucaaggcuggugaugug

SEQ ID NO: 1176286 - RNA, 19 nt, Homo sapiens
  misc_RNA (1)...(19): siRNA sense strand
gaccaaggaugagcaguuu

SEQ ID NO: 1176287 - RNA, 19 nt, Homo sapiens
  misc_RNA (1)...(19): siRNA sense strand
aaagaaggaugaagccaaa

SEQ ID NO: 1176288 - RNA, 19 nt, Homo sapiens
  misc_RNA (1)...(19): siRNA sense strand
gacaucaagucacgcauug

SEQ ID NO: 1176289 - RNA, 19 nt, Homo sapiens
  misc_RNA (1)...(19): siRNA sense strand
gaacagccgcguagguuuc

SEQ ID NO: 1176290 - RNA, 19 nt, Homo sapiens
  misc_RNA (1)...(19): siRNA sense strand
cagaugagaccaaggauga

SEQ ID NO: 1176291 - RNA, 19 nt, Homo sapiens
  misc_RNA (1)...(19): siRNA sense strand
gagcagugcguccagaauu

SEQ ID NO: 1176292 - RNA, 19 nt, Homo sapiens
  misc_RNA (1)...(19): siRNA sense strand
ccagcaacgugcagaagaa

SEQ ID NO: 1176293 - RNA, 19 nt, Homo sapiens
  misc_RNA (1)...(19): siRNA sense strand
agaaggaucuccggaccua

SEQ ID NO: 1176294 - RNA, 19 nt, Homo sapiens
  misc_RNA (1)...(19): siRNA sense strand
guggagaccuucccagcaa

SEQ ID NO: 1176295 - RNA, 19 nt, Homo sapiens
  misc_RNA (1)...(19): siRNA sense strand
ggcgcaagcugguggacua

SEQ ID NO: 1176296 - RNA, 19 nt, Homo sapiens
  misc_RNA (1)...(19): siRNA sense strand
gaccugcuguggauggauu

SEQ ID NO: 1176297 - RNA, 19 nt, Homo sapiens
  misc_RNA (1)...(19): siRNA sense strand
gaagguguuugaggagaug

SEQ ID NO: 1176298 - RNA, 19 nt, Homo sapiens
  misc_RNA (1)...(19): siRNA sense strand
gcagagaugggcaguaaag

SEQ ID NO: 1176299 - RNA, 19 nt, Homo sapiens
  misc_RNA (1)...(19): siRNA sense strand
cccgagaacuucacugaga

SEQ ID NO: 1176300 - RNA, 19 nt, Homo sapiens
  misc_RNA (1)...(19): siRNA sense strand
gcaagcugguggacuacga

SEQ ID NO: 1176301 - RNA, 19 nt, Homo sapiens
  misc_RNA (1)...(19): siRNA sense strand
ggaacagccgcguagguuu

SEQ ID NO: 1176302 - RNA, 19 nt, Homo sapiens
  misc_RNA (1)...(19): siRNA sense strand
cgggaaagaucgccagcaa

SEQ ID NO: 1176303 - RNA, 19 nt, Homo sapiens
  misc_RNA (1)...(19): siRNA sense strand
ccaaggaugagcaguuuga

SEQ ID NO: 1176304 - RNA, 19 nt, Homo sapiens
  misc_RNA (1)...(19): siRNA sense strand
gcagggaugaggcaaacaa

SEQ ID NO: 1176305 - RNA, 19 nt, Homo sapiens
  misc_RNA (1)...(19): siRNA sense strand
acaacgaccugcuguggau

SEQ ID NO: 1176306 - RNA, 19 nt, Homo sapiens
  misc_RNA (1)...(19): siRNA sense strand
gggaugaggcaaacaagau

SEQ ID NO: 1176307 - RNA, 19 nt, Homo sapiens
  misc_RNA (1)...(19): siRNA sense strand
ugaaggagagcgacuggaa

SEQ ID NO: 1176308 - RNA, 19 nt, Homo sapiens
  misc_RNA (1)...(19): siRNA sense strand
gcaaacaagaucgcagaga

SEQ ID NO: 1176309 - RNA, 19 nt, Homo sapiens
  misc_RNA (1)...(19): siRNA sense strand
cuaccuggccuccgucaaa

SEQ ID NO: 1176310 - RNA, 19 nt, Homo sapiens
  misc_RNA (1)...(19): siRNA sense strand
ucaaccagaaccucaauga

SEQ ID NO: 1176311 - RNA, 19 nt, Homo sapiens
  misc_RNA (1)...(19): siRNA sense strand
cgacaucaagucacgcauu

SEQ ID NO: 1176312 - RNA, 19 nt, Homo sapiens
  misc_RNA (1)...(19): siRNA sense strand
aaccagaaccucaaugaug

SEQ ID NO: 1176313 - RNA, 19 nt, Homo sapiens
  misc_RNA (1)...(19): siRNA sense strand
gcaacaccuucacggucaa

SEQ ID NO: 1176314 - RNA, 19 nt, Homo sapiens
  misc_RNA (1)...(19): siRNA sense strand
accagaaccucaaugaugu

SEQ ID NO: 1176315 - RNA, 19 nt, Homo sapiens
  misc_RNA (1)...(19): siRNA sense strand
aggaggagcucaucaaagc

SEQ ID NO: 1176316 - RNA, 19 nt, Homo sapiens
  misc_RNA (1)...(19): siRNA sense strand
cgaggaggagcucaucaaa

SEQ ID NO: 1176317 - RNA, 19 nt, Homo sapiens
  misc_RNA (1)...(19): siRNA sense strand
agcagugcguccagaauuu

SEQ ID NO: 1176318 - RNA, 19 nt, Homo sapiens
  misc_RNA (1)...(19): siRNA sense strand
ggaaggcagaugagaccaa

SEQ ID NO: 1176319 - RNA, 19 nt, Homo sapiens
  misc_RNA (1)...(19): siRNA sense strand
ucaaagcccagaagguguu

SEQ ID NO: 1176320 - RNA, 19 nt, Homo sapiens
  misc_RNA (1)...(19): siRNA sense strand
gaggaggagcucaucaaag

SEQ ID NO: 1176321 - RNA, 19 nt, Homo sapiens
  misc_RNA (1)...(19): siRNA sense strand
acaaggagaugagcaagcu

SEQ ID NO: 1176322 - RNA, 19 nt, Homo sapiens
  misc_RNA (1)...(19): siRNA sense strand
ggaugaggcaaacaagauc

SEQ ID NO: 1176323 - RNA, 19 nt, Homo sapiens
  misc_RNA (1)...(19): siRNA sense strand
gaaggaugaagccaaaauu

SEQ ID NO: 1176324 - RNA, 19 nt, Homo sapiens
  misc_RNA (1)...(19): siRNA sense strand
ccacuacgagucccuucaa

SEQ ID NO: 1176325 - RNA, 19 nt, Homo sapiens
  misc_RNA (1)...(19): siRNA sense strand
ggauggauuaccaccagaa

SEQ ID NO: 1176326 - RNA, 19 nt, Homo sapiens
  misc_RNA (1)...(19): siRNA sense strand
caaccagaaccucaaugau

SEQ ID NO: 1176327 - RNA, 19 nt, Homo sapiens
  misc_RNA (1)...(19): siRNA sense strand
gcagugcguccagaauuuc

SEQ ID NO: 1176328 - RNA, 19 nt, Homo sapiens
  misc_RNA (1)...(19): siRNA sense strand
caagaucgcagagaacaac

SEQ ID NO: 1176329 - RNA, 19 nt, Homo sapiens
  misc_RNA (1)...(19): siRNA sense strand
agaccaaggaugagcaguu

SEQ ID NO: 1176330 - RNA, 19 nt, Homo sapiens
  misc_RNA (1)...(19): siRNA sense strand
ugacaacgcgccugcaaaa

SEQ ID NO: 1176331 - RNA, 19 nt, Homo sapiens
  misc_RNA (1)...(19): siRNA sense strand
agaagguguuugaggagau

SEQ ID NO: 1176332 - RNA, 19 nt, Homo sapiens
  misc_RNA (1)...(19): siRNA sense strand
cacuacgagucccuucaaa

SEQ ID NO: 1176333 - RNA, 19 nt, Homo sapiens
  misc_RNA (1)...(19): siRNA sense strand
ucaacacguuccagagcau

SEQ ID NO: 1176334 - RNA, 19 nt, Homo sapiens
  misc_RNA (1)...(19): siRNA sense strand
gccagcaacgugcagaaga

SEQ ID NO: 1176335 - RNA, 19 nt, Homo sapiens
  misc_RNA (1)...(19): siRNA sense strand
cguccagaauuucaacaag

SEQ ID NO: 1176336 - RNA, 19 nt, Homo sapiens
  misc_RNA (1)...(19): siRNA sense strand
uccagaauuucaacaagca

SEQ ID NO: 1176337 - RNA, 19 nt, Homo sapiens
  misc_RNA (1)...(19): siRNA sense strand
cuacacggccacugacaca

SEQ ID NO: 1176338 - RNA, 19 nt, Homo sapiens
  misc_RNA (1)...(19): siRNA sense strand
gcucaaccagaaccucaau

SEQ ID NO: 1176339 - RNA, 19 nt, Homo sapiens
  misc_RNA (1)...(19): siRNA sense strand
uggaacagccgcguagguu

SEQ ID NO: 1176340 - RNA, 19 nt, Homo sapiens
  misc_RNA (1)...(19): siRNA sense strand
gcucaucaaagcccagaag

SEQ ID NO: 1176341 - RNA, 19 nt, Homo sapiens
  misc_RNA (1)...(19): siRNA sense strand
caaacaagaucgcagagaa

SEQ ID NO: 1176342 - RNA, 19 nt, Homo sapiens
  misc_RNA (1)...(19): siRNA sense strand
gcucaaggcuggugaugug

SEQ ID NO: 1176343 - RNA, 19 nt, Homo sapiens
  misc_RNA (1)...(19): siRNA sense strand
gaccaaggaugagcaguuu

SEQ ID NO: 1176344 - RNA, 19 nt, Homo sapiens
  misc_RNA (1)...(19): siRNA sense strand
aaagaaggaugaagccaaa

SEQ ID NO: 1176345 - RNA, 19 nt, Homo sapiens
  misc_RNA (1)...(19): siRNA sense strand
gacaucaagucacgcauug

SEQ ID NO: 1176346 - RNA, 19 nt, Homo sapiens
  misc_RNA (1)...(19): siRNA sense strand
gaacagccgcguagguuuc

SEQ ID NO: 1176347 - RNA, 19 nt, Homo sapiens
  misc_RNA (1)...(19): siRNA sense strand
cagaugagaccaaggauga

SEQ ID NO: 1176348 - RNA, 19 nt, Homo sapiens
  misc_RNA (1)...(19): siRNA sense strand
gagcagugcguccagaauu

SEQ ID NO: 1176349 - RNA, 19 nt, Homo sapiens
  misc_RNA (1)...(19): siRNA sense strand
ccagcaacgugcagaagaa

SEQ ID NO: 1176350 - RNA, 19 nt, Homo sapiens
  misc_RNA (1)...(19): siRNA sense strand
agaaggaucuccggaccua

SEQ ID NO: 1176351 - RNA, 19 nt, Homo sapiens
  misc_RNA (1)...(19): siRNA sense strand
guggagaccuucccagcaa

SEQ ID NO: 1176352 - RNA, 19 nt, Homo sapiens
  misc_RNA (1)...(19): siRNA sense strand
ggcgcaagcugguggacua

SEQ ID NO: 1176353 - RNA, 19 nt, Homo sapiens
  misc_RNA (1)...(19): siRNA sense strand
gaccugcuguggauggauu

SEQ ID NO: 1176354 - RNA, 19 nt, Homo sapiens
  misc_RNA (1)...(19): siRNA sense strand
gaagguguuugaggagaug

SEQ ID NO: 1176355 - RNA, 19 nt, Homo sapiens
  misc_RNA (1)...(19): siRNA sense strand
gcagagaugggcaguaaag

SEQ ID NO: 1176356 - RNA, 19 nt, Homo sapiens
  misc_RNA (1)...(19): siRNA sense strand
cccgagaacuucacugaga

SEQ ID NO: 1176357 - RNA, 19 nt, Homo sapiens
  misc_RNA (1)...(19): siRNA sense strand
gcaagcugguggacuacga

SEQ ID NO: 1176358 - RNA, 19 nt, Homo sapiens
  misc_RNA (1)...(19): siRNA sense strand
ggaacagccgcguagguuu

SEQ ID NO: 1176359 - RNA, 19 nt, Homo sapiens
  misc_RNA (1)...(19): siRNA sense strand
cgggaaagaucgccagcaa

SEQ ID NO: 1176360 - RNA, 19 nt, Homo sapiens
  misc_RNA (1)...(19): siRNA sense strand
ccaaggaugagcaguuuga

SEQ ID NO: 1176361 - RNA, 19 nt, Homo sapiens
  misc_RNA (1)...(19): siRNA sense strand
gcagggaugaggcaaacaa

SEQ ID NO: 1176362 - RNA, 19 nt, Homo sapiens
  misc_RNA (1)...(19): siRNA sense strand
acaacgaccugcuguggau

SEQ ID NO: 1176363 - RNA, 19 nt, Homo sapiens
  misc_RNA (1)...(19): siRNA sense strand
gggaugaggcaaacaagau

SEQ ID NO: 1176364 - RNA, 19 nt, Homo sapiens
  misc_RNA (1)...(19): siRNA sense strand
ugaaggagagcgacuggaa

SEQ ID NO: 1176365 - RNA, 19 nt, Homo sapiens
  misc_RNA (1)...(19): siRNA sense strand
gcaaacaagaucgcagaga

SEQ ID NO: 1176366 - RNA, 19 nt, Homo sapiens
  misc_RNA (1)...(19): siRNA sense strand
cuaccuggccuccgucaaa

SEQ ID NO: 1176367 - RNA, 19 nt, Homo sapiens
  misc_RNA (1)...(19): siRNA sense strand
ucaaccagaaccucaauga

SEQ ID NO: 1176368 - RNA, 19 nt, Homo sapiens
  misc_RNA (1)...(19): siRNA sense strand
cgacaucaagucacgcauu

SEQ ID NO: 1176369 - RNA, 19 nt, Homo sapiens
  misc_RNA (1)...(19): siRNA sense strand
aaccagaaccucaaugaug

SEQ ID NO: 1176370 - RNA, 19 nt, Homo sapiens
  misc_RNA (1)...(19): siRNA sense strand
gcaacaccuucacggucaa

SEQ ID NO: 1176371 - RNA, 19 nt, Homo sapiens
  misc_RNA (1)...(19): siRNA sense strand
accagaaccucaaugaugu

SEQ ID NO: 1176372 - RNA, 19 nt, Homo sapiens
  misc_RNA (1)...(19): siRNA sense strand
aggaggagcucaucaaagc

SEQ ID NO: 1176373 - RNA, 19 nt, Homo sapiens
  misc_RNA (1)...(19): siRNA sense strand
cgaggaggagcucaucaaa

SEQ ID NO: 1176374 - RNA, 19 nt, Homo sapiens
  misc_RNA (1)...(19): siRNA sense strand
agcagugcguccagaauuu

SEQ ID NO: 1176375 - RNA, 19 nt, Homo sapiens
  misc_RNA (1)...(19): siRNA sense strand
ggaaggcagaugagaccaa

SEQ ID NO: 1176376 - RNA, 19 nt, Homo sapiens
  misc_RNA (1)...(19): siRNA sense strand
ucaaagcccagaagguguu

SEQ ID NO: 1176377 - RNA, 19 nt, Homo sapiens
  misc_RNA (1)...(19): siRNA sense strand
gaggaggagcucaucaaag

SEQ ID NO: 1176378 - RNA, 19 nt, Homo sapiens
  misc_RNA (1)...(19): siRNA sense strand
acaaggagaugagcaagcu

SEQ ID NO: 1176379 - RNA, 19 nt, Homo sapiens
  misc_RNA (1)...(19): siRNA sense strand
ggaugaggcaaacaagauc

SEQ ID NO: 1176380 - RNA, 19 nt, Homo sapiens
  misc_RNA (1)...(19): siRNA sense strand
gaaggaugaagccaaaauu

SEQ ID NO: 1176381 - RNA, 19 nt, Homo sapiens
  misc_RNA (1)...(19): siRNA sense strand
ccacuacgagucccuucaa

SEQ ID NO: 1176382 - RNA, 19 nt, Homo sapiens
  misc_RNA (1)...(19): siRNA sense strand
ggauggauuaccaccagaa

SEQ ID NO: 1176383 - RNA, 19 nt, Homo sapiens
  misc_RNA (1)...(19): siRNA sense strand
caaccagaaccucaaugau

SEQ ID NO: 1176384 - RNA, 19 nt, Homo sapiens
  misc_RNA (1)...(19): siRNA sense strand
gcagugcguccagaauuuc

SEQ ID NO: 1176385 - RNA, 19 nt, Homo sapiens
  misc_RNA (1)...(19): siRNA sense strand
caagaucgcagagaacaac

SEQ ID NO: 1176386 - RNA, 19 nt, Homo sapiens
  misc_RNA (1)...(19): siRNA sense strand
agaccaaggaugagcaguu

SEQ ID NO: 1176387 - RNA, 19 nt, Homo sapiens
  misc_RNA (1)...(19): siRNA sense strand
ugacaacgcgccugcaaaa

SEQ ID NO: 1176388 - RNA, 19 nt, Homo sapiens
  misc_RNA (1)...(19): siRNA sense strand
agaagguguuugaggagau

SEQ ID NO: 1176389 - RNA, 19 nt, Homo sapiens
  misc_RNA (1)...(19): siRNA sense strand
cacuacgagucccuucaaa

SEQ ID NO: 1176390 - RNA, 19 nt, Homo sapiens
  misc_RNA (1)...(19): siRNA sense strand
ucaacacguuccagagcau

SEQ ID NO: 1176391 - RNA, 19 nt, Homo sapiens
  misc_RNA (1)...(19): siRNA sense strand
gccagcaacgugcagaaga

SEQ ID NO: 1176392 - RNA, 19 nt, Homo sapiens
  misc_RNA (1)...(19): siRNA sense strand
cguccagaauuucaacaag

SEQ ID NO: 1176393 - RNA, 19 nt, Homo sapiens
  misc_RNA (1)...(19): siRNA sense strand
uccagaauuucaacaagca

SEQ ID NO: 1176394 - RNA, 19 nt, Homo sapiens
  misc_RNA (1)...(19): siRNA sense strand
cuacacggccacugacaca

SEQ ID NO: 1176395 - RNA, 19 nt, Homo sapiens
  misc_RNA (1)...(19): siRNA sense strand
gcucaaccagaaccucaau

SEQ ID NO: 1176396 - RNA, 19 nt, Homo sapiens
  misc_RNA (1)...(19): siRNA sense strand
uggaacagccgcguagguu

SEQ ID NO: 1176397 - RNA, 19 nt, Homo sapiens
  misc_RNA (1)...(19): siRNA sense strand
gcucaucaaagcccagaag

SEQ ID NO: 1176398 - RNA, 19 nt, Homo sapiens
  misc_RNA (1)...(19): siRNA sense strand
caaacaagaucgcagagaa

SEQ ID NO: 1176399 - RNA, 19 nt, Homo sapiens
  misc_RNA (1)...(19): siRNA sense strand
gcucaaggcuggugaugug

SEQ ID NO: 1176400 - RNA, 19 nt, Homo sapiens
  misc_RNA (1)...(19): siRNA sense strand
gaccaaggaugagcaguuu

SEQ ID NO: 1176401 - RNA, 19 nt, Homo sapiens
  misc_RNA (1)...(19): siRNA sense strand
aaagaaggaugaagccaaa

SEQ ID NO: 1176402 - RNA, 19 nt, Homo sapiens
  misc_RNA (1)...(19): siRNA sense strand
gacaucaagucacgcauug

SEQ ID NO: 1176403 - RNA, 19 nt, Homo sapiens
  misc_RNA (1)...(19): siRNA sense strand
gaacagccgcguagguuuc

SEQ ID NO: 1176404 - RNA, 19 nt, Homo sapiens
  misc_RNA (1)...(19): siRNA sense strand
cagaugagaccaaggauga

SEQ ID NO: 1176405 - RNA, 19 nt, Homo sapiens
  misc_RNA (1)...(19): siRNA sense strand
gagcagugcguccagaauu

SEQ ID NO: 1176406 - RNA, 19 nt, Homo sapiens
  misc_RNA (1)...(19): siRNA sense strand
ccagcaacgugcagaagaa

SEQ ID NO: 1176407 - RNA, 19 nt, Homo sapiens
  misc_RNA (1)...(19): siRNA sense strand
agaaggaucuccggaccua

SEQ ID NO: 1176408 - RNA, 19 nt, Homo sapiens
  misc_RNA (1)...(19): siRNA sense strand
guggagaccuucccagcaa

SEQ ID NO: 1176409 - RNA, 19 nt, Homo sapiens
  misc_RNA (1)...(19): siRNA sense strand
ggcgcaagcugguggacua

SEQ ID NO: 1176410 - RNA, 19 nt, Homo sapiens
  misc_RNA (1)...(19): siRNA sense strand
gaccugcuguggauggauu

SEQ ID NO: 1176411 - RNA, 19 nt, Homo sapiens
  misc_RNA (1)...(19): siRNA sense strand
gaagguguuugaggagaug

SEQ ID NO: 1176412 - RNA, 19 nt, Homo sapiens
  misc_RNA (1)...(19): siRNA sense strand
gcagagaugggcaguaaag

SEQ ID NO: 1176413 - RNA, 19 nt, Homo sapiens
  misc_RNA (1)...(19): siRNA sense strand
cccgagaacuucacugaga

SEQ ID NO: 1176414 - RNA, 19 nt, Homo sapiens
  misc_RNA (1)...(19): siRNA sense strand
gcaagcugguggacuacga

SEQ ID NO: 1176415 - RNA, 19 nt, Homo sapiens
  misc_RNA (1)...(19): siRNA sense strand
ggaacagccgcguagguuu

SEQ ID NO: 1176416 - RNA, 19 nt, Homo sapiens
  misc_RNA (1)...(19): siRNA sense strand
cgggaaagaucgccagcaa

SEQ ID NO: 1176417 - RNA, 19 nt, Homo sapiens
  misc_RNA (1)...(19): siRNA sense strand
ccaaggaugagcaguuuga

SEQ ID NO: 1176418 - RNA, 19 nt, Homo sapiens
  misc_RNA (1)...(19): siRNA sense strand
gcagggaugaggcaaacaa

SEQ ID NO: 1176419 - RNA, 19 nt, Homo sapiens
  misc_RNA (1)...(19): siRNA sense strand
acaacgaccugcuguggau

SEQ ID NO: 1176420 - RNA, 19 nt, Homo sapiens
  misc_RNA (1)...(19): siRNA sense strand
gggaugaggcaaacaagau

SEQ ID NO: 1176421 - RNA, 19 nt, Homo sapiens
  misc_RNA (1)...(19): siRNA sense strand
ugaaggagagcgacuggaa

SEQ ID NO: 1176422 - RNA, 19 nt, Homo sapiens
  misc_RNA (1)...(19): siRNA sense strand
gcaaacaagaucgcagaga

SEQ ID NO: 1176423 - RNA, 19 nt, Homo sapiens
  misc_RNA (1)...(19): siRNA sense strand
cuaccuggccuccgucaaa

SEQ ID NO: 1176424 - RNA, 19 nt, Homo sapiens
  misc_RNA (1)...(19): siRNA sense strand
ucaaccagaaccucaauga

SEQ ID NO: 1176425 - RNA, 19 nt, Homo sapiens
  misc_RNA (1)...(19): siRNA sense strand
cgacaucaagucacgcauu

SEQ ID NO: 1176426 - RNA, 19 nt, Homo sapiens
  misc_RNA (1)...(19): siRNA sense strand
aaccagaaccucaaugaug

SEQ ID NO: 1176427 - RNA, 19 nt, Homo sapiens
  misc_RNA (1)...(19): siRNA sense strand
gcaacaccuucacggucaa

SEQ ID NO: 1176428 - RNA, 19 nt, Homo sapiens
  misc_RNA (1)...(19): siRNA sense strand
accagaaccucaaugaugu

SEQ ID NO: 1176429 - RNA, 19 nt, Homo sapiens
  misc_RNA (1)...(19): siRNA sense strand
aggaggagcucaucaaagc

SEQ ID NO: 1176430 - RNA, 19 nt, Homo sapiens
  misc_RNA (1)...(19): siRNA sense strand
cgaggaggagcucaucaaa

SEQ ID NO: 1176431 - RNA, 19 nt, Homo sapiens
  misc_RNA (1)...(19): siRNA sense strand
agcagugcguccagaauuu

SEQ ID NO: 1176432 - RNA, 19 nt, Homo sapiens
  misc_RNA (1)...(19): siRNA sense strand
ggaaggcagaugagaccaa

SEQ ID NO: 1176433 - RNA, 19 nt, Homo sapiens
  misc_RNA (1)...(19): siRNA sense strand
ucaaagcccagaagguguu

SEQ ID NO: 1176434 - RNA, 19 nt, Homo sapiens
  misc_RNA (1)...(19): siRNA sense strand
gaggaggagcucaucaaag

SEQ ID NO: 1176435 - RNA, 19 nt, Homo sapiens
  misc_RNA (1)...(19): siRNA sense strand
acaaggagaugagcaagcu

SEQ ID NO: 1176436 - RNA, 19 nt, Homo sapiens
  misc_RNA (1)...(19): siRNA sense strand
ggaugaggcaaacaagauc

SEQ ID NO: 1176437 - RNA, 19 nt, Homo sapiens
  misc_RNA (1)...(19): siRNA sense strand
gaaggaugaagccaaaauu

SEQ ID NO: 1176438 - RNA, 19 nt, Homo sapiens
  misc_RNA (1)...(19): siRNA sense strand
ccacuacgagucccuucaa

SEQ ID NO: 1176439 - RNA, 19 nt, Homo sapiens
  misc_RNA (1)...(19): siRNA sense strand
ggauggauuaccaccagaa

SEQ ID NO: 1176440 - RNA, 19 nt, Homo sapiens
  misc_RNA (1)...(19): siRNA sense strand
caaccagaaccucaaugau

SEQ ID NO: 1176441 - RNA, 19 nt, Homo sapiens
  misc_RNA (1)...(19): siRNA sense strand
gcagugcguccagaauuuc

SEQ ID NO: 1176442 - RNA, 19 nt, Homo sapiens
  misc_RNA (1)...(19): siRNA sense strand
caagaucgcagagaacaac

SEQ ID NO: 1176443 - RNA, 19 nt, Homo sapiens
  misc_RNA (1)...(19): siRNA sense strand
agaccaaggaugagcaguu

SEQ ID NO: 1176444 - RNA, 19 nt, Homo sapiens
  misc_RNA (1)...(19): siRNA sense strand
ugacaacgcgccugcaaaa

SEQ ID NO: 1176445 - RNA, 19 nt, Homo sapiens
  misc_RNA (1)...(19): siRNA sense strand
agaagguguuugaggagau

SEQ ID NO: 1176446 - RNA, 19 nt, Homo sapiens
  misc_RNA (1)...(19): siRNA sense strand
cacuacgagucccuucaaa

SEQ ID NO: 1176447 - RNA, 19 nt, Homo sapiens
  misc_RNA (1)...(19): siRNA sense strand
ucaacacguuccagagcau

SEQ ID NO: 1176448 - RNA, 19 nt, Homo sapiens
  misc_RNA (1)...(19): siRNA sense strand
gccagcaacgugcagaaga

SEQ ID NO: 1176449 - RNA, 19 nt, Homo sapiens
  misc_RNA (1)...(19): siRNA sense strand
cguccagaauuucaacaag

SEQ ID NO: 1176450 - RNA, 19 nt, Homo sapiens
  misc_RNA (1)...(19): siRNA sense strand
uccagaauuucaacaagca

SEQ ID NO: 1176451 - RNA, 19 nt, Homo sapiens
  misc_RNA (1)...(19): siRNA sense strand
cuacacggccacugacaca

SEQ ID NO: 1176452 - RNA, 19 nt, Homo sapiens
  misc_RNA (1)...(19): siRNA sense strand
gcucaaccagaaccucaau

SEQ ID NO: 1176453 - RNA, 19 nt, Homo sapiens
  misc_RNA (1)...(19): siRNA sense strand
uggaacagccgcguagguu

SEQ ID NO: 1176454 - RNA, 19 nt, Homo sapiens
  misc_RNA (1)...(19): siRNA sense strand
gcucaucaaagcccagaag

SEQ ID NO: 1176455 - RNA, 19 nt, Homo sapiens
  misc_RNA (1)...(19): siRNA sense strand
caaacaagaucgcagagaa

SEQ ID NO: 1176456 - RNA, 19 nt, Homo sapiens
  misc_RNA (1)...(19): siRNA sense strand
gcucaaggcuggugaugug

SEQ ID NO: 1176457 - RNA, 19 nt, Homo sapiens
  misc_RNA (1)...(19): siRNA sense strand
gaccaaggaugagcaguuu

SEQ ID NO: 1176458 - RNA, 19 nt, Homo sapiens
  misc_RNA (1)...(19): siRNA sense strand
aaagaaggaugaagccaaa

SEQ ID NO: 1176459 - RNA, 19 nt, Homo sapiens
  misc_RNA (1)...(19): siRNA sense strand
gacaucaagucacgcauug

SEQ ID NO: 1176460 - RNA, 19 nt, Homo sapiens
  misc_RNA (1)...(19): siRNA sense strand
gaacagccgcguagguuuc

SEQ ID NO: 1176461 - RNA, 19 nt, Homo sapiens
  misc_RNA (1)...(19): siRNA sense strand
cagaugagaccaaggauga

SEQ ID NO: 1176462 - RNA, 19 nt, Homo sapiens
  misc_RNA (1)...(19): siRNA sense strand
gagcagugcguccagaauu

SEQ ID NO: 1176463 - RNA, 19 nt, Homo sapiens
  misc_RNA (1)...(19): siRNA sense strand
ccagcaacgugcagaagaa

SEQ ID NO: 1176464 - RNA, 19 nt, Homo sapiens
  misc_RNA (1)...(19): siRNA sense strand
agaaggaucuccggaccua

SEQ ID NO: 1176465 - RNA, 19 nt, Homo sapiens
  misc_RNA (1)...(19): siRNA sense strand
guggagaccuucccagcaa

SEQ ID NO: 1176466 - RNA, 19 nt, Homo sapiens
  misc_RNA (1)...(19): siRNA sense strand
ggcgcaagcugguggacua

SEQ ID NO: 1176467 - RNA, 19 nt, Homo sapiens
  misc_RNA (1)...(19): siRNA sense strand
gaccugcuguggauggauu

SEQ ID NO: 1176468 - RNA, 19 nt, Homo sapiens
  misc_RNA (1)...(19): siRNA sense strand
gaagguguuugaggagaug

SEQ ID NO: 1176469 - RNA, 19 nt, Homo sapiens
  misc_RNA (1)...(19): siRNA sense strand
gcagagaugggcaguaaag

SEQ ID NO: 1176470 - RNA, 19 nt, Homo sapiens
  misc_RNA (1)...(19): siRNA sense strand
cccgagaacuucacugaga

SEQ ID NO: 1176471 - RNA, 19 nt, Homo sapiens
  misc_RNA (1)...(19): siRNA sense strand
gcaagcugguggacuacga

SEQ ID NO: 1176472 - RNA, 19 nt, Homo sapiens
  misc_RNA (1)...(19): siRNA sense strand
ggaacagccgcguagguuu

SEQ ID NO: 1176473 - RNA, 19 nt, Homo sapiens
  misc_RNA (1)...(19): siRNA sense strand
cgggaaagaucgccagcaa

SEQ ID NO: 1176474 - RNA, 19 nt, Homo sapiens
  misc_RNA (1)...(19): siRNA sense strand
ccaaggaugagcaguuuga

SEQ ID NO: 1176475 - RNA, 19 nt, Homo sapiens
  misc_RNA (1)...(19): siRNA sense strand
gcagggaugaggcaaacaa

SEQ ID NO: 1176476 - RNA, 19 nt, Homo sapiens
  misc_RNA (1)...(19): siRNA sense strand
acaacgaccugcuguggau

SEQ ID NO: 1176477 - RNA, 19 nt, Homo sapiens
  misc_RNA (1)...(19): siRNA sense strand
gggaugaggcaaacaagau

SEQ ID NO: 1176478 - RNA, 19 nt, Homo sapiens
  misc_RNA (1)...(19): siRNA sense strand
ugaaggagagcgacuggaa

SEQ ID NO: 1176479 - RNA, 19 nt, Homo sapiens
  misc_RNA (1)...(19): siRNA sense strand
gcaaacaagaucgcagaga

SEQ ID NO: 1176480 - RNA, 19 nt, Homo sapiens
  misc_RNA (1)...(19): siRNA sense strand
cuaccuggccuccgucaaa

SEQ ID NO: 1176481 - RNA, 19 nt, Homo sapiens
  misc_RNA (1)...(19): siRNA sense strand
ucaaccagaaccucaauga

SEQ ID NO: 1176482 - RNA, 19 nt, Homo sapiens
  misc_RNA (1)...(19): siRNA sense strand
cgacaucaagucacgcauu

SEQ ID NO: 1176483 - RNA, 19 nt, Homo sapiens
  misc_RNA (1)...(19): siRNA sense strand
aaccagaaccucaaugaug

SEQ ID NO: 1176484 - RNA, 19 nt, Homo sapiens
  misc_RNA (1)...(19): siRNA sense strand
gcaacaccuucacggucaa

SEQ ID NO: 1176485 - RNA, 19 nt, Homo sapiens
  misc_RNA (1)...(19): siRNA sense strand
accagaaccucaaugaugu

SEQ ID NO: 1176486 - RNA, 19 nt, Homo sapiens
  misc_RNA (1)...(19): siRNA sense strand
aggaggagcucaucaaagc

SEQ ID NO: 1176487 - RNA, 19 nt, Homo sapiens
  misc_RNA (1)...(19): siRNA sense strand
cgaggaggagcucaucaaa

SEQ ID NO: 1176488 - RNA, 19 nt, Homo sapiens
  misc_RNA (1)...(19): siRNA sense strand
agcagugcguccagaauuu

SEQ ID NO: 1176489 - RNA, 19 nt, Homo sapiens
  misc_RNA (1)...(19): siRNA sense strand
ggaaggcagaugagaccaa

SEQ ID NO: 1176490 - RNA, 19 nt, Homo sapiens
  misc_RNA (1)...(19): siRNA sense strand
ucaaagcccagaagguguu

SEQ ID NO: 1176491 - RNA, 19 nt, Homo sapiens
  misc_RNA (1)...(19): siRNA sense strand
gaggaggagcucaucaaag

SEQ ID NO: 1176492 - RNA, 19 nt, Homo sapiens
  misc_RNA (1)...(19): siRNA sense strand
acaaggagaugagcaagcu

SEQ ID NO: 1176493 - RNA, 19 nt, Homo sapiens
  misc_RNA (1)...(19): siRNA sense strand
ggaugaggcaaacaagauc

SEQ ID NO: 1176494 - RNA, 19 nt, Homo sapiens
  misc_RNA (1)...(19): siRNA sense strand
gaaggaugaagccaaaauu

SEQ ID NO: 1176495 - RNA, 19 nt, Homo sapiens
  misc_RNA (1)...(19): siRNA sense strand
ccacuacgagucccuucaa

SEQ ID NO: 1176496 - RNA, 19 nt, Homo sapiens
  misc_RNA (1)...(19): siRNA sense strand
ggauggauuaccaccagaa

SEQ ID NO: 1176497 - RNA, 19 nt, Homo sapiens
  misc_RNA (1)...(19): siRNA sense strand
caaccagaaccucaaugau

SEQ ID NO: 1176498 - RNA, 19 nt, Homo sapiens
  misc_RNA (1)...(19): siRNA sense strand
gcagugcguccagaauuuc

SEQ ID NO: 1176499 - RNA, 19 nt, Homo sapiens
  misc_RNA (1)...(19): siRNA sense strand
caagaucgcagagaacaac

SEQ ID NO: 1176500 - RNA, 19 nt, Homo sapiens
  misc_RNA (1)...(19): siRNA sense strand
agaccaaggaugagcaguu

SEQ ID NO: 1176501 - RNA, 19 nt, Homo sapiens
  misc_RNA (1)...(19): siRNA sense strand
ugacaacgcgccugcaaaa

SEQ ID NO: 1176502 - RNA, 19 nt, Homo sapiens
  misc_RNA (1)...(19): siRNA sense strand
agaagguguuugaggagau

SEQ ID NO: 1176503 - RNA, 19 nt, Homo sapiens
  misc_RNA (1)...(19): siRNA sense strand
cacuacgagucccuucaaa

SEQ ID NO: 1176504 - RNA, 19 nt, Homo sapiens
  misc_RNA (1)...(19): siRNA sense strand
ucaacacguuccagagcau

SEQ ID NO: 1176505 - RNA, 19 nt, Homo sapiens
  misc_RNA (1)...(19): siRNA sense strand
gccagcaacgugcagaaga

SEQ ID NO: 1176506 - RNA, 19 nt, Homo sapiens
  misc_RNA (1)...(19): siRNA sense strand
cguccagaauuucaacaag

SEQ ID NO: 1176507 - RNA, 19 nt, Homo sapiens
  misc_RNA (1)...(19): siRNA sense strand
uccagaauuucaacaagca

SEQ ID NO: 1176508 - RNA, 19 nt, Homo sapiens
  misc_RNA (1)...(19): siRNA sense strand
cuacacggccacugacaca

SEQ ID NO: 1176509 - RNA, 19 nt, Homo sapiens
  misc_RNA (1)...(19): siRNA sense strand
gcucaaccagaaccucaau

SEQ ID NO: 1176510 - RNA, 19 nt, Homo sapiens
  misc_RNA (1)...(19): siRNA sense strand
uggaacagccgcguagguu

SEQ ID NO: 1176511 - RNA, 19 nt, Homo sapiens
  misc_RNA (1)...(19): siRNA sense strand
gcucaucaaagcccagaag

SEQ ID NO: 1176512 - RNA, 19 nt, Homo sapiens
  misc_RNA (1)...(19): siRNA sense strand
caaacaagaucgcagagaa

SEQ ID NO: 1176513 - RNA, 19 nt, Homo sapiens
  misc_RNA (1)...(19): siRNA sense strand
gcucaaggcuggugaugug

SEQ ID NO: 1176514 - RNA, 19 nt, Homo sapiens
  misc_RNA (1)...(19): siRNA sense strand
gaccaaggaugagcaguuu

SEQ ID NO: 1176515 - RNA, 19 nt, Homo sapiens
  misc_RNA (1)...(19): siRNA sense strand
aaagaaggaugaagccaaa

SEQ ID NO: 1176516 - RNA, 19 nt, Homo sapiens
  misc_RNA (1)...(19): siRNA sense strand
gacaucaagucacgcauug

SEQ ID NO: 1176517 - RNA, 19 nt, Homo sapiens
  misc_RNA (1)...(19): siRNA sense strand
gaacagccgcguagguuuc

SEQ ID NO: 1176518 - RNA, 19 nt, Homo sapiens
  misc_RNA (1)...(19): siRNA sense strand
cagaugagaccaaggauga

SEQ ID NO: 1176519 - RNA, 19 nt, Homo sapiens
  misc_RNA (1)...(19): siRNA sense strand
gagcagugcguccagaauu

SEQ ID NO: 1176520 - RNA, 19 nt, Homo sapiens
  misc_RNA (1)...(19): siRNA sense strand
ccagcaacgugcagaagaa

SEQ ID NO: 1176521 - RNA, 19 nt, Homo sapiens
  misc_RNA (1)...(19): siRNA sense strand
agaaggaucuccggaccua

SEQ ID NO: 1176522 - RNA, 19 nt, Homo sapiens
  misc_RNA (1)...(19): siRNA sense strand
guggagaccuucccagcaa

SEQ ID NO: 1176523 - RNA, 19 nt, Homo sapiens
  misc_RNA (1)...(19): siRNA sense strand
ggcgcaagcugguggacua

SEQ ID NO: 1176524 - RNA, 19 nt, Homo sapiens
  misc_RNA (1)...(19): siRNA sense strand
gaccugcuguggauggauu

SEQ ID NO: 1176525 - RNA, 19 nt, Homo sapiens
  misc_RNA (1)...(19): siRNA sense strand
gaagguguuugaggagaug

SEQ ID NO: 1176526 - RNA, 19 nt, Homo sapiens
  misc_RNA (1)...(19): siRNA sense strand
gcagagaugggcaguaaag

SEQ ID NO: 1176527 - RNA, 19 nt, Homo sapiens
  misc_RNA (1)...(19): siRNA sense strand
cccgagaacuucacugaga

SEQ ID NO: 1176528 - RNA, 19 nt, Homo sapiens
  misc_RNA (1)...(19): siRNA sense strand
gcaagcugguggacuacga

SEQ ID NO: 1176529 - RNA, 19 nt, Homo sapiens
  misc_RNA (1)...(19): siRNA sense strand
ggaacagccgcguagguuu

SEQ ID NO: 1176530 - RNA, 19 nt, Homo sapiens
  misc_RNA (1)...(19): siRNA sense strand
cgggaaagaucgccagcaa

SEQ ID NO: 1176531 - RNA, 19 nt, Homo sapiens
  misc_RNA (1)...(19): siRNA sense strand
ccaaggaugagcaguuuga

SEQ ID NO: 1176532 - RNA, 19 nt, Homo sapiens
  misc_RNA (1)...(19): siRNA sense strand
gcagggaugaggcaaacaa

SEQ ID NO: 1176533 - RNA, 19 nt, Homo sapiens
  misc_RNA (1)...(19): siRNA sense strand
acaacgaccugcuguggau

SEQ ID NO: 1176534 - RNA, 19 nt, Homo sapiens
  misc_RNA (1)...(19): siRNA sense strand
gggaugaggcaaacaagau

SEQ ID NO: 1176535 - RNA, 19 nt, Homo sapiens
  misc_RNA (1)...(19): siRNA sense strand
ugaaggagagcgacuggaa

SEQ ID NO: 1176536 - RNA, 19 nt, Homo sapiens
  misc_RNA (1)...(19): siRNA sense strand
gcaaacaagaucgcagaga

SEQ ID NO: 1176537 - RNA, 19 nt, Homo sapiens
  misc_RNA (1)...(19): siRNA sense strand
cuaccuggccuccgucaaa

SEQ ID NO: 1176538 - RNA, 19 nt, Homo sapiens
  misc_RNA (1)...(19): siRNA sense strand
ucaaccagaaccucaauga

SEQ ID NO: 1176539 - RNA, 19 nt, Homo sapiens
  misc_RNA (1)...(19): siRNA sense strand
cgacaucaagucacgcauu

SEQ ID NO: 1176540 - RNA, 19 nt, Homo sapiens
  misc_RNA (1)...(19): siRNA sense strand
aaccagaaccucaaugaug

SEQ ID NO: 1176541 - RNA, 19 nt, Homo sapiens
  misc_RNA (1)...(19): siRNA sense strand
gcaacaccuucacggucaa

SEQ ID NO: 1176542 - RNA, 19 nt, Homo sapiens
  misc_RNA (1)...(19): siRNA sense strand
accagaaccucaaugaugu

SEQ ID NO: 1176543 - RNA, 19 nt, Homo sapiens
  misc_RNA (1)...(19): siRNA sense strand
aggaggagcucaucaaagc

SEQ ID NO: 1176544 - RNA, 19 nt, Homo sapiens
  misc_RNA (1)...(19): siRNA sense strand
cgaggaggagcucaucaaa

SEQ ID NO: 1176545 - RNA, 19 nt, Homo sapiens
  misc_RNA (1)...(19): siRNA sense strand
agcagugcguccagaauuu

SEQ ID NO: 1176546 - RNA, 19 nt, Homo sapiens
  misc_RNA (1)...(19): siRNA sense strand
ggaaggcagaugagaccaa

SEQ ID NO: 1176547 - RNA, 19 nt, Homo sapiens
  misc_RNA (1)...(19): siRNA sense strand
ucaaagcccagaagguguu

SEQ ID NO: 1176548 - RNA, 19 nt, Homo sapiens
  misc_RNA (1)...(19): siRNA sense strand
gaggaggagcucaucaaag

SEQ ID NO: 1176549 - RNA, 19 nt, Homo sapiens
  misc_RNA (1)...(19): siRNA sense strand
acaaggagaugagcaagcu

SEQ ID NO: 1176550 - RNA, 19 nt, Homo sapiens
  misc_RNA (1)...(19): siRNA sense strand
ggaugaggcaaacaagauc

SEQ ID NO: 1176551 - RNA, 19 nt, Homo sapiens
  misc_RNA (1)...(19): siRNA sense strand
gaaggaugaagccaaaauu

SEQ ID NO: 1176552 - RNA, 19 nt, Homo sapiens
  misc_RNA (1)...(19): siRNA sense strand
ccacuacgagucccuucaa

SEQ ID NO: 1176553 - RNA, 19 nt, Homo sapiens
  misc_RNA (1)...(19): siRNA sense strand
ggauggauuaccaccagaa

SEQ ID NO: 1176554 - RNA, 19 nt, Homo sapiens
  misc_RNA (1)...(19): siRNA sense strand
caaccagaaccucaaugau

SEQ ID NO: 1176555 - RNA, 19 nt, Homo sapiens
  misc_RNA (1)...(19): siRNA sense strand
gcagugcguccagaauuuc

SEQ ID NO: 1176556 - RNA, 19 nt, Homo sapiens
  misc_RNA (1)...(19): siRNA sense strand
caagaucgcagagaacaac

SEQ ID NO: 1176557 - RNA, 19 nt, Homo sapiens
  misc_RNA (1)...(19): siRNA sense strand
agaccaaggaugagcaguu

SEQ ID NO: 1176558 - RNA, 19 nt, Homo sapiens
  misc_RNA (1)...(19): siRNA sense strand
ugacaacgcgccugcaaaa

SEQ ID NO: 1176559 - RNA, 19 nt, Homo sapiens
  misc_RNA (1)...(19): siRNA sense strand
agaagguguuugaggagau

SEQ ID NO: 1176560 - RNA, 19 nt, Homo sapiens
  misc_RNA (1)...(19): siRNA sense strand
cacuacgagucccuucaaa

SEQ ID NO: 1176561 - RNA, 19 nt, Homo sapiens
  misc_RNA (1)...(19): siRNA sense strand
ucaacacguuccagagcau

SEQ ID NO: 1176562 - RNA, 19 nt, Homo sapiens
  misc_RNA (1)...(19): siRNA sense strand
gccagcaacgugcagaaga

SEQ ID NO: 1176563 - RNA, 19 nt, Homo sapiens
  misc_RNA (1)...(19): siRNA sense strand
cguccagaauuucaacaag

SEQ ID NO: 1176564 - RNA, 19 nt, Homo sapiens
  misc_RNA (1)...(19): siRNA sense strand
uccagaauuucaacaagca

SEQ ID NO: 1176565 - RNA, 19 nt, Homo sapiens
  misc_RNA (1)...(19): siRNA sense strand
cuacacggccacugacaca

SEQ ID NO: 1176566 - RNA, 19 nt, Homo sapiens
  misc_RNA (1)...(19): siRNA sense strand
gcucaaccagaaccucaau

SEQ ID NO: 1176567 - RNA, 19 nt, Homo sapiens
  misc_RNA (1)...(19): siRNA sense strand
uggaacagccgcguagguu

SEQ ID NO: 1176568 - RNA, 19 nt, Homo sapiens
  misc_RNA (1)...(19): siRNA sense strand
gcucaucaaagcccagaag

SEQ ID NO: 1176569 - RNA, 19 nt, Homo sapiens
  misc_RNA (1)...(19): siRNA sense strand
caaacaagaucgcagagaa

SEQ ID NO: 1176570 - RNA, 19 nt, Homo sapiens
  misc_RNA (1)...(19): siRNA sense strand
gcucaaggcuggugaugug

SEQ ID NO: 1176571 - RNA, 19 nt, Homo sapiens
  misc_RNA (1)...(19): siRNA sense strand
gaccaaggaugagcaguuu

SEQ ID NO: 1176572 - RNA, 19 nt, Homo sapiens
  misc_RNA (1)...(19): siRNA sense strand
aaagaaggaugaagccaaa

SEQ ID NO: 1176573 - RNA, 19 nt, Homo sapiens
  misc_RNA (1)...(19): siRNA sense strand
gacaucaagucacgcauug

SEQ ID NO: 1176574 - RNA, 19 nt, Homo sapiens
  misc_RNA (1)...(19): siRNA sense strand
gaacagccgcguagguuuc

SEQ ID NO: 1176575 - RNA, 19 nt, Homo sapiens
  misc_RNA (1)...(19): siRNA sense strand
cagaugagaccaaggauga

SEQ ID NO: 1176576 - RNA, 19 nt, Homo sapiens
  misc_RNA (1)...(19): siRNA sense strand
gagcagugcguccagaauu

SEQ ID NO: 1176577 - RNA, 19 nt, Homo sapiens
  misc_RNA (1)...(19): siRNA sense strand
ccagcaacgugcagaagaa

SEQ ID NO: 1176578 - RNA, 19 nt, Homo sapiens
  misc_RNA (1)...(19): siRNA sense strand
agaaggaucuccggaccua

SEQ ID NO: 1176579 - RNA, 19 nt, Homo sapiens
  misc_RNA (1)...(19): siRNA sense strand
guggagaccuucccagcaa

SEQ ID NO: 1176580 - RNA, 19 nt, Homo sapiens
  misc_RNA (1)...(19): siRNA sense strand
ggcgcaagcugguggacua

SEQ ID NO: 1176581 - RNA, 19 nt, Homo sapiens
  misc_RNA (1)...(19): siRNA sense strand
gaccugcuguggauggauu

SEQ ID NO: 1176582 - RNA, 19 nt, Homo sapiens
  misc_RNA (1)...(19): siRNA sense strand
gaagguguuugaggagaug

SEQ ID NO: 1176583 - RNA, 19 nt, Homo sapiens
  misc_RNA (1)...(19): siRNA sense strand
gcagagaugggcaguaaag

SEQ ID NO: 1176584 - RNA, 19 nt, Homo sapiens
  misc_RNA (1)...(19): siRNA sense strand
cccgagaacuucacugaga

SEQ ID NO: 1176585 - RNA, 19 nt, Homo sapiens
  misc_RNA (1)...(19): siRNA sense strand
gcaagcugguggacuacga

SEQ ID NO: 1176586 - RNA, 19 nt, Homo sapiens
  misc_RNA (1)...(19): siRNA sense strand
ggaacagccgcguagguuu

SEQ ID NO: 1176587 - RNA, 19 nt, Homo sapiens
  misc_RNA (1)...(19): siRNA sense strand
cgggaaagaucgccagcaa

SEQ ID NO: 1176588 - RNA, 19 nt, Homo sapiens
  misc_RNA (1)...(19): siRNA sense strand
ccaaggaugagcaguuuga

SEQ ID NO: 1176589 - RNA, 19 nt, Homo sapiens
  misc_RNA (1)...(19): siRNA sense strand
gcagggaugaggcaaacaa

SEQ ID NO: 1176590 - RNA, 19 nt, Homo sapiens
  misc_RNA (1)...(19): siRNA sense strand
acaacgaccugcuguggau

SEQ ID NO: 1176591 - RNA, 19 nt, Homo sapiens
  misc_RNA (1)...(19): siRNA sense strand
gggaugaggcaaacaagau

SEQ ID NO: 1176592 - RNA, 19 nt, Homo sapiens
  misc_RNA (1)...(19): siRNA sense strand
ugaaggagagcgacuggaa

SEQ ID NO: 1176593 - RNA, 19 nt, Homo sapiens
  misc_RNA (1)...(19): siRNA sense strand
gcaaacaagaucgcagaga

SEQ ID NO: 1176594 - RNA, 19 nt, Homo sapiens
  misc_RNA (1)...(19): siRNA sense strand
cuaccuggccuccgucaaa

SEQ ID NO: 1176595 - RNA, 19 nt, Homo sapiens
  misc_RNA (1)...(19): siRNA sense strand
ucaaccagaaccucaauga

SEQ ID NO: 1176596 - RNA, 19 nt, Homo sapiens
  misc_RNA (1)...(19): siRNA sense strand
cgacaucaagucacgcauu

SEQ ID NO: 1176597 - RNA, 19 nt, Homo sapiens
  misc_RNA (1)...(19): siRNA sense strand
aaccagaaccucaaugaug

SEQ ID NO: 1176598 - RNA, 19 nt, Homo sapiens
  misc_RNA (1)...(19): siRNA sense strand
gcaacaccuucacggucaa

SEQ ID NO: 1176599 - RNA, 19 nt, Homo sapiens
  misc_RNA (1)...(19): siRNA sense strand
accagaaccucaaugaugu

SEQ ID NO: 1176600 - RNA, 19 nt, Homo sapiens
  misc_RNA (1)...(19): siRNA sense strand
aggaggagcucaucaaagc

SEQ ID NO: 1176601 - RNA, 19 nt, Homo sapiens
  misc_RNA (1)...(19): siRNA sense strand
cgaggaggagcucaucaaa

SEQ ID NO: 1176602 - RNA, 19 nt, Homo sapiens
  misc_RNA (1)...(19): siRNA sense strand
agcagugcguccagaauuu

SEQ ID NO: 1176603 - RNA, 19 nt, Homo sapiens
  misc_RNA (1)...(19): siRNA sense strand
ggaaggcagaugagaccaa

SEQ ID NO: 1176604 - RNA, 19 nt, Homo sapiens
  misc_RNA (1)...(19): siRNA sense strand
ucaaagcccagaagguguu

SEQ ID NO: 1176605 - RNA, 19 nt, Homo sapiens
  misc_RNA (1)...(19): siRNA sense strand
gaggaggagcucaucaaag

SEQ ID NO: 1176606 - RNA, 19 nt, Homo sapiens
  misc_RNA (1)...(19): siRNA sense strand
acaaggagaugagcaagcu

SEQ ID NO: 1176607 - RNA, 19 nt, Homo sapiens
  misc_RNA (1)...(19): siRNA sense strand
ggaugaggcaaacaagauc

SEQ ID NO: 1176608 - RNA, 19 nt, Homo sapiens
  misc_RNA (1)...(19): siRNA sense strand
gaaggaugaagccaaaauu

SEQ ID NO: 1176609 - RNA, 19 nt, Homo sapiens
  misc_RNA (1)...(19): siRNA sense strand
ccacuacgagucccuucaa

SEQ ID NO: 1176610 - RNA, 19 nt, Homo sapiens
  misc_RNA (1)...(19): siRNA sense strand
ggauggauuaccaccagaa

SEQ ID NO: 1176611 - RNA, 19 nt, Homo sapiens
  misc_RNA (1)...(19): siRNA sense strand
caaccagaaccucaaugau

SEQ ID NO: 1176612 - RNA, 19 nt, Homo sapiens
  misc_RNA (1)...(19): siRNA sense strand
gcagugcguccagaauuuc

SEQ ID NO: 1176613 - RNA, 19 nt, Homo sapiens
  misc_RNA (1)...(19): siRNA sense strand
caagaucgcagagaacaac

SEQ ID NO: 1176614 - RNA, 19 nt, Homo sapiens
  misc_RNA (1)...(19): siRNA sense strand
agaccaaggaugagcaguu

SEQ ID NO: 1176615 - RNA, 19 nt, Homo sapiens
  misc_RNA (1)...(19): siRNA sense strand
ugacaacgcgccugcaaaa

SEQ ID NO: 1176616 - RNA, 19 nt, Homo sapiens
  misc_RNA (1)...(19): siRNA sense strand
agaagguguuugaggagau

SEQ ID NO: 1176617 - RNA, 19 nt, Homo sapiens
  misc_RNA (1)...(19): siRNA sense strand
cacuacgagucccuucaaa

SEQ ID NO: 1176618 - RNA, 19 nt, Homo sapiens
  misc_RNA (1)...(19): siRNA sense strand
ucaacacguuccagagcau

SEQ ID NO: 1176619 - RNA, 19 nt, Homo sapiens
  misc_RNA (1)...(19): siRNA sense strand
gccagcaacgugcagaaga

SEQ ID NO: 1176620 - RNA, 19 nt, Homo sapiens
  misc_RNA (1)...(19): siRNA sense strand
cguccagaauuucaacaag

SEQ ID NO: 1176621 - RNA, 19 nt, Homo sapiens
  misc_RNA (1)...(19): siRNA sense strand
uccagaauuucaacaagca

SEQ ID NO: 1176622 - RNA, 19 nt, Homo sapiens
  misc_RNA (1)...(19): siRNA sense strand
cuacacggccacugacaca

SEQ ID NO: 1176623 - RNA, 19 nt, Homo sapiens
  misc_RNA (1)...(19): siRNA sense strand
gcucaaccagaaccucaau

SEQ ID NO: 1176624 - RNA, 19 nt, Homo sapiens
  misc_RNA (1)...(19): siRNA sense strand
uggaacagccgcguagguu

SEQ ID NO: 1176625 - RNA, 19 nt, Homo sapiens
  misc_RNA (1)...(19): siRNA sense strand
gcucaucaaagcccagaag

SEQ ID NO: 1176626 - RNA, 19 nt, Homo sapiens
  misc_RNA (1)...(19): siRNA sense strand
caaacaagaucgcagagaa

SEQ ID NO: 1176627 - RNA, 19 nt, Homo sapiens
  misc_RNA (1)...(19): siRNA sense strand
gcucaaggcuggugaugug

SEQ ID NO: 1176628 - RNA, 19 nt, Homo sapiens
  misc_RNA (1)...(19): siRNA sense strand
gaccaaggaugagcaguuu

SEQ ID NO: 1176629 - RNA, 19 nt, Homo sapiens
  misc_RNA (1)...(19): siRNA sense strand
aaagaaggaugaagccaaa

SEQ ID NO: 1176630 - RNA, 19 nt, Homo sapiens
  misc_RNA (1)...(19): siRNA sense strand
gacaucaagucacgcauug

SEQ ID NO: 1176631 - RNA, 19 nt, Homo sapiens
  misc_RNA (1)...(19): siRNA sense strand
gaacagccgcguagguuuc

SEQ ID NO: 1176632 - RNA, 19 nt, Homo sapiens
  misc_RNA (1)...(19): siRNA sense strand
cagaugagaccaaggauga

SEQ ID NO: 1176633 - RNA, 19 nt, Homo sapiens
  misc_RNA (1)...(19): siRNA sense strand
gagcagugcguccagaauu

SEQ ID NO: 1176634 - RNA, 19 nt, Homo sapiens
  misc_RNA (1)...(19): siRNA sense strand
ccagcaacgugcagaagaa

SEQ ID NO: 1176635 - RNA, 19 nt, Homo sapiens
  misc_RNA (1)...(19): siRNA sense strand
agaaggaucuccggaccua

SEQ ID NO: 1176636 - RNA, 19 nt, Homo sapiens
  misc_RNA (1)...(19): siRNA sense strand
guggagaccuucccagcaa

SEQ ID NO: 1176637 - RNA, 19 nt, Homo sapiens
  misc_RNA (1)...(19): siRNA sense strand
ggcgcaagcugguggacua

SEQ ID NO: 1176638 - RNA, 19 nt, Homo sapiens
  misc_RNA (1)...(19): siRNA sense strand
gaccugcuguggauggauu

SEQ ID NO: 1176639 - RNA, 19 nt, Homo sapiens
  misc_RNA (1)...(19): siRNA sense strand
gaagguguuugaggagaug

SEQ ID NO: 1176640 - RNA, 19 nt, Homo sapiens
  misc_RNA (1)...(19): siRNA sense strand
gcagagaugggcaguaaag

SEQ ID NO: 1176641 - RNA, 19 nt, Homo sapiens
  misc_RNA (1)...(19): siRNA sense strand
cccgagaacuucacugaga

SEQ ID NO: 1176642 - RNA, 19 nt, Homo sapiens
  misc_RNA (1)...(19): siRNA sense strand
gcaagcugguggacuacga

SEQ ID NO: 1176643 - RNA, 19 nt, Homo sapiens
  misc_RNA (1)...(19): siRNA sense strand
ggaacagccgcguagguuu

SEQ ID NO: 1176644 - RNA, 19 nt, Homo sapiens
  misc_RNA (1)...(19): siRNA sense strand
cgggaaagaucgccagcaa

SEQ ID NO: 1176645 - RNA, 19 nt, Homo sapiens
  misc_RNA (1)...(19): siRNA sense strand
ccaaggaugagcaguuuga

SEQ ID NO: 1176646 - RNA, 19 nt, Homo sapiens
  misc_RNA (1)...(19): siRNA sense strand
gcagggaugaggcaaacaa

SEQ ID NO: 1176647 - RNA, 19 nt, Homo sapiens
  misc_RNA (1)...(19): siRNA sense strand
acaacgaccugcuguggau

SEQ ID NO: 1176648 - RNA, 19 nt, Homo sapiens
  misc_RNA (1)...(19): siRNA sense strand
gggaugaggcaaacaagau

SEQ ID NO: 1176649 - RNA, 19 nt, Homo sapiens
  misc_RNA (1)...(19): siRNA sense strand
ugaaggagagcgacuggaa

SEQ ID NO: 1176650 - RNA, 19 nt, Homo sapiens
  misc_RNA (1)...(19): siRNA sense strand
gcaaacaagaucgcagaga

SEQ ID NO: 1176651 - RNA, 19 nt, Homo sapiens
  misc_RNA (1)...(19): siRNA sense strand
cuaccuggccuccgucaaa

SEQ ID NO: 1176652 - RNA, 19 nt, Homo sapiens
  misc_RNA (1)...(19): siRNA sense strand
ucaaccagaaccucaauga

SEQ ID NO: 1176653 - RNA, 19 nt, Homo sapiens
  misc_RNA (1)...(19): siRNA sense strand
cgacaucaagucacgcauu

SEQ ID NO: 1176654 - RNA, 19 nt, Homo sapiens
  misc_RNA (1)...(19): siRNA sense strand
aaccagaaccucaaugaug

SEQ ID NO: 1176655 - RNA, 19 nt, Homo sapiens
  misc_RNA (1)...(19): siRNA sense strand
gcaacaccuucacggucaa

SEQ ID NO: 1176656 - RNA, 19 nt, Homo sapiens
  misc_RNA (1)...(19): siRNA sense strand
accagaaccucaaugaugu

SEQ ID NO: 1176657 - RNA, 19 nt, Homo sapiens
  misc_RNA (1)...(19): siRNA sense strand
aggaggagcucaucaaagc

SEQ ID NO: 1176658 - RNA, 19 nt, Homo sapiens
  misc_RNA (1)...(19): siRNA sense strand
cgaggaggagcucaucaaa

SEQ ID NO: 1176659 - RNA, 19 nt, Homo sapiens
  misc_RNA (1)...(19): siRNA sense strand
agcagugcguccagaauuu

SEQ ID NO: 1176660 - RNA, 19 nt, Homo sapiens
  misc_RNA (1)...(19): siRNA sense strand
ggaaggcagaugagaccaa

SEQ ID NO: 1176661 - RNA, 19 nt, Homo sapiens
  misc_RNA (1)...(19): siRNA sense strand
ucaaagcccagaagguguu

SEQ ID NO: 1176662 - RNA, 19 nt, Homo sapiens
  misc_RNA (1)...(19): siRNA sense strand
gaggaggagcucaucaaag

SEQ ID NO: 1176663 - RNA, 19 nt, Homo sapiens
  misc_RNA (1)...(19): siRNA sense strand
acaaggagaugagcaagcu

SEQ ID NO: 1176664 - RNA, 19 nt, Homo sapiens
  misc_RNA (1)...(19): siRNA sense strand
ggaugaggcaaacaagauc

SEQ ID NO: 1176665 - RNA, 19 nt, Homo sapiens
  misc_RNA (1)...(19): siRNA sense strand
gaaggaugaagccaaaauu

SEQ ID NO: 1176666 - RNA, 19 nt, Homo sapiens
  misc_RNA (1)...(19): siRNA sense strand
ccacuacgagucccuucaa

SEQ ID NO: 1176667 - RNA, 19 nt, Homo sapiens
  misc_RNA (1)...(19): siRNA sense strand
ggauggauuaccaccagaa

SEQ ID NO: 1176668 - RNA, 19 nt, Homo sapiens
  misc_RNA (1)...(19): siRNA sense strand
caaccagaaccucaaugau

SEQ ID NO: 1176669 - RNA, 19 nt, Homo sapiens
  misc_RNA (1)...(19): siRNA sense strand
gcagugcguccagaauuuc

SEQ ID NO: 1176670 - RNA, 19 nt, Homo sapiens
  misc_RNA (1)...(19): siRNA sense strand
caagaucgcagagaacaac

SEQ ID NO: 1176671 - RNA, 19 nt, Homo sapiens
  misc_RNA (1)...(19): siRNA sense strand
agaccaaggaugagcaguu

SEQ ID NO: 1176672 - RNA, 19 nt, Homo sapiens
  misc_RNA (1)...(19): siRNA sense strand
ugacaacgcgccugcaaaa

SEQ ID NO: 1176673 - RNA, 19 nt, Homo sapiens
  misc_RNA (1)...(19): siRNA sense strand
agaagguguuugaggagau

SEQ ID NO: 1176674 - RNA, 19 nt, Homo sapiens
  misc_RNA (1)...(19): siRNA sense strand
cacuacgagucccuucaaa

SEQ ID NO: 1176675 - RNA, 19 nt, Homo sapiens
  misc_RNA (1)...(19): siRNA sense strand
ucaacacguuccagagcau

SEQ ID NO: 1176676 - RNA, 19 nt, Homo sapiens
  misc_RNA (1)...(19): siRNA sense strand
gccagcaacgugcagaaga

SEQ ID NO: 1176677 - RNA, 19 nt, Homo sapiens
  misc_RNA (1)...(19): siRNA sense strand
cguccagaauuucaacaag

SEQ ID NO: 1176678 - RNA, 19 nt, Homo sapiens
  misc_RNA (1)...(19): siRNA sense strand
uccagaauuucaacaagca

SEQ ID NO: 1176679 - RNA, 19 nt, Homo sapiens
  misc_RNA (1)...(19): siRNA sense strand
cuacacggccacugacaca

SEQ ID NO: 1176680 - RNA, 19 nt, Homo sapiens
  misc_RNA (1)...(19): siRNA sense strand
gcucaaccagaaccucaau

SEQ ID NO: 1176681 - RNA, 19 nt, Homo sapiens
  misc_RNA (1)...(19): siRNA sense strand
uggaacagccgcguagguu

SEQ ID NO: 1176682 - RNA, 19 nt, Homo sapiens
  misc_RNA (1)...(19): siRNA sense strand
gcucaucaaagcccagaag

SEQ ID NO: 1176683 - RNA, 19 nt, Homo sapiens
  misc_RNA (1)...(19): siRNA sense strand
caaacaagaucgcagagaa

SEQ ID NO: 1176684 - RNA, 19 nt, Homo sapiens
  misc_RNA (1)...(19): siRNA sense strand
gcucaaggcuggugaugug

SEQ ID NO: 1176685 - RNA, 19 nt, Homo sapiens
  misc_RNA (1)...(19): siRNA sense strand
gaccaaggaugagcaguuu

SEQ ID NO: 1176686 - RNA, 19 nt, Homo sapiens
  misc_RNA (1)...(19): siRNA sense strand
aaagaaggaugaagccaaa

SEQ ID NO: 1176687 - RNA, 19 nt, Homo sapiens
  misc_RNA (1)...(19): siRNA sense strand
gacaucaagucacgcauug

SEQ ID NO: 1176688 - RNA, 19 nt, Homo sapiens
  misc_RNA (1)...(19): siRNA sense strand
gaacagccgcguagguuuc

SEQ ID NO: 1176689 - RNA, 19 nt, Homo sapiens
  misc_RNA (1)...(19): siRNA sense strand
cagaugagaccaaggauga

SEQ ID NO: 1176690 - RNA, 19 nt, Homo sapiens
  misc_RNA (1)...(19): siRNA sense strand
gagcagugcguccagaauu

SEQ ID NO: 1176691 - RNA, 19 nt, Homo sapiens
  misc_RNA (1)...(19): siRNA sense strand
ccagcaacgugcagaagaa

SEQ ID NO: 1176692 - RNA, 19 nt, Homo sapiens
  misc_RNA (1)...(19): siRNA sense strand
agaaggaucuccggaccua

SEQ ID NO: 1176693 - RNA, 19 nt, Homo sapiens
  misc_RNA (1)...(19): siRNA sense strand
guggagaccuucccagcaa

SEQ ID NO: 1176694 - RNA, 19 nt, Homo sapiens
  misc_RNA (1)...(19): siRNA sense strand
ggcgcaagcugguggacua

SEQ ID NO: 1176695 - RNA, 19 nt, Homo sapiens
  misc_RNA (1)...(19): siRNA sense strand
gaccugcuguggauggauu

SEQ ID NO: 1176696 - RNA, 19 nt, Homo sapiens
  misc_RNA (1)...(19): siRNA sense strand
gaagguguuugaggagaug

SEQ ID NO: 1176697 - RNA, 19 nt, Homo sapiens
  misc_RNA (1)...(19): siRNA sense strand
gcagagaugggcaguaaag

SEQ ID NO: 1176698 - RNA, 19 nt, Homo sapiens
  misc_RNA (1)...(19): siRNA sense strand
cccgagaacuucacugaga

SEQ ID NO: 1176699 - RNA, 19 nt, Homo sapiens
  misc_RNA (1)...(19): siRNA sense strand
gcaagcugguggacuacga

SEQ ID NO: 1176700 - RNA, 19 nt, Homo sapiens
  misc_RNA (1)...(19): siRNA sense strand
ggaacagccgcguagguuu

SEQ ID NO: 1176701 - RNA, 19 nt, Homo sapiens
  misc_RNA (1)...(19): siRNA sense strand
cgggaaagaucgccagcaa

SEQ ID NO: 1176702 - RNA, 19 nt, Homo sapiens
  misc_RNA (1)...(19): siRNA sense strand
ccaaggaugagcaguuuga

SEQ ID NO: 1176703 - RNA, 19 nt, Homo sapiens
  misc_RNA (1)...(19): siRNA sense strand
gcagggaugaggcaaacaa

SEQ ID NO: 1176704 - RNA, 19 nt, Homo sapiens
  misc_RNA (1)...(19): siRNA sense strand
acaacgaccugcuguggau

SEQ ID NO: 1176705 - RNA, 19 nt, Homo sapiens
  misc_RNA (1)...(19): siRNA sense strand
gggaugaggcaaacaagau

SEQ ID NO: 1176706 - RNA, 19 nt, Homo sapiens
  misc_RNA (1)...(19): siRNA sense strand
ugaaggagagcgacuggaa

SEQ ID NO: 1176707 - RNA, 19 nt, Homo sapiens
  misc_RNA (1)...(19): siRNA sense strand
gcaaacaagaucgcagaga

SEQ ID NO: 1176708 - RNA, 19 nt, Homo sapiens
  misc_RNA (1)...(19): siRNA sense strand
cuaccuggccuccgucaaa

SEQ ID NO: 1176709 - RNA, 19 nt, Homo sapiens
  misc_RNA (1)...(19): siRNA sense strand
ucaaccagaaccucaauga

SEQ ID NO: 1176710 - RNA, 19 nt, Homo sapiens
  misc_RNA (1)...(19): siRNA sense strand
cgacaucaagucacgcauu

SEQ ID NO: 1176711 - RNA, 19 nt, Homo sapiens
  misc_RNA (1)...(19): siRNA sense strand
aaccagaaccucaaugaug

SEQ ID NO: 1176712 - RNA, 19 nt, Homo sapiens
  misc_RNA (1)...(19): siRNA sense strand
gcaacaccuucacggucaa

SEQ ID NO: 1176713 - RNA, 19 nt, Homo sapiens
  misc_RNA (1)...(19): siRNA sense strand
accagaaccucaaugaugu

SEQ ID NO: 1176714 - RNA, 19 nt, Homo sapiens
  misc_RNA (1)...(19): siRNA sense strand
aggaggagcucaucaaagc

SEQ ID NO: 1176715 - RNA, 19 nt, Homo sapiens
  misc_RNA (1)...(19): siRNA sense strand
cgaggaggagcucaucaaa

SEQ ID NO: 1176716 - RNA, 19 nt, Homo sapiens
  misc_RNA (1)...(19): siRNA sense strand
agcagugcguccagaauuu

SEQ ID NO: 1176717 - RNA, 19 nt, Homo sapiens
  misc_RNA (1)...(19): siRNA sense strand
ggaaggcagaugagaccaa

SEQ ID NO: 1176718 - RNA, 19 nt, Homo sapiens
  misc_RNA (1)...(19): siRNA sense strand
ucaaagcccagaagguguu

SEQ ID NO: 1176719 - RNA, 19 nt, Homo sapiens
  misc_RNA (1)...(19): siRNA sense strand
gaggaggagcucaucaaag

SEQ ID NO: 1176720 - RNA, 19 nt, Homo sapiens
  misc_RNA (1)...(19): siRNA sense strand
acaaggagaugagcaagcu

SEQ ID NO: 1176721 - RNA, 19 nt, Homo sapiens
  misc_RNA (1)...(19): siRNA sense strand
ggaugaggcaaacaagauc

SEQ ID NO: 1176722 - RNA, 19 nt, Homo sapiens
  misc_RNA (1)...(19): siRNA sense strand
gaaggaugaagccaaaauu

SEQ ID NO: 1176723 - RNA, 19 nt, Homo sapiens
  misc_RNA (1)...(19): siRNA sense strand
ccacuacgagucccuucaa

SEQ ID NO: 1176724 - RNA, 19 nt, Homo sapiens
  misc_RNA (1)...(19): siRNA sense strand
ggauggauuaccaccagaa

SEQ ID NO: 1176725 - RNA, 19 nt, Homo sapiens
  misc_RNA (1)...(19): siRNA sense strand
caaccagaaccucaaugau

SEQ ID NO: 1176726 - RNA, 19 nt, Homo sapiens
  misc_RNA (1)...(19): siRNA sense strand
gcagugcguccagaauuuc

SEQ ID NO: 1176727 - RNA, 19 nt, Homo sapiens
  misc_RNA (1)...(19): siRNA sense strand
caagaucgcagagaacaac

SEQ ID NO: 1176728 - RNA, 19 nt, Homo sapiens
  misc_RNA (1)...(19): siRNA sense strand
agaccaaggaugagcaguu

SEQ ID NO: 1176729 - RNA, 19 nt, Homo sapiens
  misc_RNA (1)...(19): siRNA sense strand
ugacaacgcgccugcaaaa

SEQ ID NO: 1176730 - RNA, 19 nt, Homo sapiens
  misc_RNA (1)...(19): siRNA sense strand
agaagguguuugaggagau

SEQ ID NO: 1176731 - RNA, 19 nt, Homo sapiens
  misc_RNA (1)...(19): siRNA sense strand
cacuacgagucccuucaaa

SEQ ID NO: 1176732 - RNA, 19 nt, Homo sapiens
  misc_RNA (1)...(19): siRNA sense strand
ucaacacguuccagagcau

SEQ ID NO: 1176733 - RNA, 19 nt, Homo sapiens
  misc_RNA (1)...(19): siRNA sense strand
gccagcaacgugcagaaga

SEQ ID NO: 1176734 - RNA, 19 nt, Homo sapiens
  misc_RNA (1)...(19): siRNA sense strand
cguccagaauuucaacaag

SEQ ID NO: 1176735 - RNA, 19 nt, Homo sapiens
  misc_RNA (1)...(19): siRNA sense strand
uccagaauuucaacaagca

SEQ ID NO: 1176736 - RNA, 19 nt, Homo sapiens
  misc_RNA (1)...(19): siRNA sense strand
cuacacggccacugacaca

SEQ ID NO: 1176737 - RNA, 19 nt, Homo sapiens
  misc_RNA (1)...(19): siRNA sense strand
gcucaaccagaaccucaau

SEQ ID NO: 1176738 - RNA, 19 nt, Homo sapiens
  misc_RNA (1)...(19): siRNA sense strand
uggaacagccgcguagguu

SEQ ID NO: 1176739 - RNA, 19 nt, Homo sapiens
  misc_RNA (1)...(19): siRNA sense strand
gcucaucaaagcccagaag

SEQ ID NO: 1176740 - RNA, 19 nt, Homo sapiens
  misc_RNA (1)...(19): siRNA sense strand
caaacaagaucgcagagaa

SEQ ID NO: 1176741 - RNA, 19 nt, Homo sapiens
  misc_RNA (1)...(19): siRNA sense strand
gcucaaggcuggugaugug

SEQ ID NO: 1176742 - RNA, 19 nt, Homo sapiens
  misc_RNA (1)...(19): siRNA sense strand
gaccaaggaugagcaguuu

SEQ ID NO: 1176743 - RNA, 19 nt, Homo sapiens
  misc_RNA (1)...(19): siRNA sense strand
aaagaaggaugaagccaaa

SEQ ID NO: 1176744 - RNA, 19 nt, Homo sapiens
  misc_RNA (1)...(19): siRNA sense strand
gacaucaagucacgcauug

SEQ ID NO: 1176745 - RNA, 19 nt, Homo sapiens
  misc_RNA (1)...(19): siRNA sense strand
gaacagccgcguagguuuc

SEQ ID NO: 1176746 - RNA, 19 nt, Homo sapiens
  misc_RNA (1)...(19): siRNA sense strand
cagaugagaccaaggauga

SEQ ID NO: 1176747 - RNA, 19 nt, Homo sapiens
  misc_RNA (1)...(19): siRNA sense strand
gagcagugcguccagaauu

SEQ ID NO: 1176748 - RNA, 19 nt, Homo sapiens
  misc_RNA (1)...(19): siRNA sense strand
ccagcaacgugcagaagaa

SEQ ID NO: 1176749 - RNA, 19 nt, Homo sapiens
  misc_RNA (1)...(19): siRNA sense strand
agaaggaucuccggaccua

SEQ ID NO: 1176750 - RNA, 19 nt, Homo sapiens
  misc_RNA (1)...(19): siRNA sense strand
guggagaccuucccagcaa

SEQ ID NO: 1176751 - RNA, 19 nt, Homo sapiens
  misc_RNA (1)...(19): siRNA sense strand
ggcgcaagcugguggacua

SEQ ID NO: 1176752 - RNA, 19 nt, Homo sapiens
  misc_RNA (1)...(19): siRNA sense strand
gaccugcuguggauggauu

SEQ ID NO: 1176753 - RNA, 19 nt, Homo sapiens
  misc_RNA (1)...(19): siRNA sense strand
gaagguguuugaggagaug

SEQ ID NO: 1176754 - RNA, 19 nt, Homo sapiens
  misc_RNA (1)...(19): siRNA sense strand
gcagagaugggcaguaaag

SEQ ID NO: 1176755 - RNA, 19 nt, Homo sapiens
  misc_RNA (1)...(19): siRNA sense strand
cccgagaacuucacugaga

SEQ ID NO: 1176756 - RNA, 19 nt, Homo sapiens
  misc_RNA (1)...(19): siRNA sense strand
gcaagcugguggacuacga

SEQ ID NO: 1176757 - RNA, 19 nt, Homo sapiens
  misc_RNA (1)...(19): siRNA sense strand
ggaacagccgcguagguuu

SEQ ID NO: 1176758 - RNA, 19 nt, Homo sapiens
  misc_RNA (1)...(19): siRNA sense strand
cgggaaagaucgccagcaa

SEQ ID NO: 1176759 - RNA, 19 nt, Homo sapiens
  misc_RNA (1)...(19): siRNA sense strand
ccaaggaugagcaguuuga

SEQ ID NO: 1176760 - RNA, 19 nt, Homo sapiens
  misc_RNA (1)...(19): siRNA sense strand
gcagggaugaggcaaacaa

SEQ ID NO: 1176761 - RNA, 19 nt, Homo sapiens
  misc_RNA (1)...(19): siRNA sense strand
acaacgaccugcuguggau

SEQ ID NO: 1176762 - RNA, 19 nt, Homo sapiens
  misc_RNA (1)...(19): siRNA sense strand
gggaugaggcaaacaagau

SEQ ID NO: 1176763 - RNA, 19 nt, Homo sapiens
  misc_RNA (1)...(19): siRNA sense strand
ugaaggagagcgacuggaa

SEQ ID NO: 1176764 - RNA, 19 nt, Homo sapiens
  misc_RNA (1)...(19): siRNA sense strand
gcaaacaagaucgcagaga

SEQ ID NO: 1176765 - RNA, 19 nt, Homo sapiens
  misc_RNA (1)...(19): siRNA sense strand
cuaccuggccuccgucaaa

SEQ ID NO: 1176766 - RNA, 19 nt, Homo sapiens
  misc_RNA (1)...(19): siRNA sense strand
ucaaccagaaccucaauga

SEQ ID NO: 1176767 - RNA, 19 nt, Homo sapiens
  misc_RNA (1)...(19): siRNA sense strand
cgacaucaagucacgcauu

SEQ ID NO: 1176768 - RNA, 19 nt, Homo sapiens
  misc_RNA (1)...(19): siRNA sense strand
aaccagaaccucaaugaug

SEQ ID NO: 1176769 - RNA, 19 nt, Homo sapiens
  misc_RNA (1)...(19): siRNA sense strand
gcaacaccuucacggucaa

SEQ ID NO: 1176770 - RNA, 19 nt, Homo sapiens
  misc_RNA (1)...(19): siRNA sense strand
accagaaccucaaugaugu

SEQ ID NO: 1176771 - RNA, 19 nt, Homo sapiens
  misc_RNA (1)...(19): siRNA sense strand
aggaggagcucaucaaagc

SEQ ID NO: 1176772 - RNA, 19 nt, Homo sapiens
  misc_RNA (1)...(19): siRNA sense strand
cgaggaggagcucaucaaa

SEQ ID NO: 1176773 - RNA, 19 nt, Homo sapiens
  misc_RNA (1)...(19): siRNA sense strand
agcagugcguccagaauuu

SEQ ID NO: 1176774 - RNA, 19 nt, Homo sapiens
  misc_RNA (1)...(19): siRNA sense strand
ggaaggcagaugagaccaa

SEQ ID NO: 1176775 - RNA, 19 nt, Homo sapiens
  misc_RNA (1)...(19): siRNA sense strand
ucaaagcccagaagguguu

SEQ ID NO: 1176776 - RNA, 19 nt, Homo sapiens
  misc_RNA (1)...(19): siRNA sense strand
gaggaggagcucaucaaag

SEQ ID NO: 1176777 - RNA, 19 nt, Homo sapiens
  misc_RNA (1)...(19): siRNA sense strand
acaaggagaugagcaagcu

SEQ ID NO: 1176778 - RNA, 19 nt, Homo sapiens
  misc_RNA (1)...(19): siRNA sense strand
ggaugaggcaaacaagauc

SEQ ID NO: 1176779 - RNA, 19 nt, Homo sapiens
  misc_RNA (1)...(19): siRNA sense strand
gaaggaugaagccaaaauu

SEQ ID NO: 1176780 - RNA, 19 nt, Homo sapiens
  misc_RNA (1)...(19): siRNA sense strand
ccacuacgagucccuucaa

SEQ ID NO: 1176781 - RNA, 19 nt, Homo sapiens
  misc_RNA (1)...(19): siRNA sense strand
ggauggauuaccaccagaa

SEQ ID NO: 1176782 - RNA, 19 nt, Homo sapiens
  misc_RNA (1)...(19): siRNA sense strand
caaccagaaccucaaugau

SEQ ID NO: 1176783 - RNA, 19 nt, Homo sapiens
  misc_RNA (1)...(19): siRNA sense strand
gcagugcguccagaauuuc

SEQ ID NO: 1176784 - RNA, 19 nt, Homo sapiens
  misc_RNA (1)...(19): siRNA sense strand
caagaucgcagagaacaac

SEQ ID NO: 1176785 - RNA, 19 nt, Homo sapiens
  misc_RNA (1)...(19): siRNA sense strand
agaccaaggaugagcaguu

SEQ ID NO: 1176786 - RNA, 19 nt, Homo sapiens
  misc_RNA (1)...(19): siRNA sense strand
ugacaacgcgccugcaaaa

SEQ ID NO: 1176787 - RNA, 19 nt, Homo sapiens
  misc_RNA (1)...(19): siRNA sense strand
agaagguguuugaggagau

SEQ ID NO: 1176788 - RNA, 19 nt, Homo sapiens
  misc_RNA (1)...(19): siRNA sense strand
cacuacgagucccuucaaa

SEQ ID NO: 1176789 - RNA, 19 nt, Homo sapiens
  misc_RNA (1)...(19): siRNA sense strand
ucaacacguuccagagcau

SEQ ID NO: 1176790 - RNA, 19 nt, Homo sapiens
  misc_RNA (1)...(19): siRNA sense strand
gccagcaacgugcagaaga

SEQ ID NO: 1176791 - RNA, 19 nt, Homo sapiens
  misc_RNA (1)...(19): siRNA sense strand
cguccagaauuucaacaag

SEQ ID NO: 1176792 - RNA, 19 nt, Homo sapiens
  misc_RNA (1)...(19): siRNA sense strand
uccagaauuucaacaagca

SEQ ID NO: 1176793 - RNA, 19 nt, Homo sapiens
  misc_RNA (1)...(19): siRNA sense strand
cuacacggccacugacaca

SEQ ID NO: 1176794 - RNA, 19 nt, Homo sapiens
  misc_RNA (1)...(19): siRNA sense strand
gcucaaccagaaccucaau

SEQ ID NO: 1176795 - RNA, 19 nt, Homo sapiens
  misc_RNA (1)...(19): siRNA sense strand
uggaacagccgcguagguu

SEQ ID NO: 1176796 - RNA, 19 nt, Homo sapiens
  misc_RNA (1)...(19): siRNA sense strand
gcucaucaaagcccagaag

SEQ ID NO: 1176797 - RNA, 19 nt, Homo sapiens
  misc_RNA (1)...(19): siRNA sense strand
caaacaagaucgcagagaa

SEQ ID NO: 1176798 - RNA, 19 nt, Homo sapiens
  misc_RNA (1)...(19): siRNA sense strand
gcucaaggcuggugaugug

SEQ ID NO: 1176799 - RNA, 19 nt, Homo sapiens
  misc_RNA (1)...(19): siRNA sense strand
gaccaaggaugagcaguuu

SEQ ID NO: 1176800 - RNA, 19 nt, Homo sapiens
  misc_RNA (1)...(19): siRNA sense strand
aaagaaggaugaagccaaa

SEQ ID NO: 1176801 - RNA, 19 nt, Homo sapiens
  misc_RNA (1)...(19): siRNA sense strand
gacaucaagucacgcauug

SEQ ID NO: 1176802 - RNA, 19 nt, Homo sapiens
  misc_RNA (1)...(19): siRNA sense strand
gaacagccgcguagguuuc

SEQ ID NO: 1176803 - RNA, 19 nt, Homo sapiens
  misc_RNA (1)...(19): siRNA sense strand
cagaugagaccaaggauga

SEQ ID NO: 1176804 - RNA, 19 nt, Homo sapiens
  misc_RNA (1)...(19): siRNA sense strand
gagcagugcguccagaauu

SEQ ID NO: 1176805 - RNA, 19 nt, Homo sapiens
  misc_RNA (1)...(19): siRNA sense strand
ccagcaacgugcagaagaa

SEQ ID NO: 1176806 - RNA, 19 nt, Homo sapiens
  misc_RNA (1)...(19): siRNA sense strand
agaaggaucuccggaccua

SEQ ID NO: 1176807 - RNA, 19 nt, Homo sapiens
  misc_RNA (1)...(19): siRNA sense strand
guggagaccuucccagcaa

SEQ ID NO: 1176808 - RNA, 19 nt, Homo sapiens
  misc_RNA (1)...(19): siRNA sense strand
ggcgcaagcugguggacua

SEQ ID NO: 1176809 - RNA, 19 nt, Homo sapiens
  misc_RNA (1)...(19): siRNA sense strand
gaccugcuguggauggauu

SEQ ID NO: 1176810 - RNA, 19 nt, Homo sapiens
  misc_RNA (1)...(19): siRNA sense strand
gaagguguuugaggagaug

SEQ ID NO: 1176811 - RNA, 19 nt, Homo sapiens
  misc_RNA (1)...(19): siRNA sense strand
gcagagaugggcaguaaag

SEQ ID NO: 1176812 - RNA, 19 nt, Homo sapiens
  misc_RNA (1)...(19): siRNA sense strand
cccgagaacuucacugaga

SEQ ID NO: 1176813 - RNA, 19 nt, Homo sapiens
  misc_RNA (1)...(19): siRNA sense strand
gcaagcugguggacuacga

SEQ ID NO: 1176814 - RNA, 19 nt, Homo sapiens
  misc_RNA (1)...(19): siRNA sense strand
ggaacagccgcguagguuu

SEQ ID NO: 1176815 - RNA, 19 nt, Homo sapiens
  misc_RNA (1)...(19): siRNA sense strand
cgggaaagaucgccagcaa

SEQ ID NO: 1176816 - RNA, 19 nt, Homo sapiens
  misc_RNA (1)...(19): siRNA sense strand
ccaaggaugagcaguuuga

SEQ ID NO: 1176817 - RNA, 19 nt, Homo sapiens
  misc_RNA (1)...(19): siRNA sense strand
gcagggaugaggcaaacaa

SEQ ID NO: 1176818 - RNA, 19 nt, Homo sapiens
  misc_RNA (1)...(19): siRNA sense strand
acaacgaccugcuguggau

SEQ ID NO: 1176819 - RNA, 19 nt, Homo sapiens
  misc_RNA (1)...(19): siRNA sense strand
gggaugaggcaaacaagau

SEQ ID NO: 1176820 - RNA, 19 nt, Homo sapiens
  misc_RNA (1)...(19): siRNA sense strand
ugaaggagagcgacuggaa

SEQ ID NO: 1176821 - RNA, 19 nt, Homo sapiens
  misc_RNA (1)...(19): siRNA sense strand
gcaaacaagaucgcagaga

SEQ ID NO: 1176822 - RNA, 19 nt, Homo sapiens
  misc_RNA (1)...(19): siRNA sense strand
cuaccuggccuccgucaaa

SEQ ID NO: 1176823 - RNA, 19 nt, Homo sapiens
  misc_RNA (1)...(19): siRNA sense strand
ucaaccagaaccucaauga

SEQ ID NO: 1176824 - RNA, 19 nt, Homo sapiens
  misc_RNA (1)...(19): siRNA sense strand
cgacaucaagucacgcauu

SEQ ID NO: 1176825 - RNA, 19 nt, Homo sapiens
  misc_RNA (1)...(19): siRNA sense strand
aaccagaaccucaaugaug

SEQ ID NO: 1176826 - RNA, 19 nt, Homo sapiens
  misc_RNA (1)...(19): siRNA sense strand
gcaacaccuucacggucaa

SEQ ID NO: 1176827 - RNA, 19 nt, Homo sapiens
  misc_RNA (1)...(19): siRNA sense strand
accagaaccucaaugaugu

SEQ ID NO: 1176828 - RNA, 19 nt, Homo sapiens
  misc_RNA (1)...(19): siRNA sense strand
aggaggagcucaucaaagc

SEQ ID NO: 1176829 - RNA, 19 nt, Homo sapiens
  misc_RNA (1)...(19): siRNA sense strand
cgaggaggagcucaucaaa

SEQ ID NO: 1176830 - RNA, 19 nt, Homo sapiens
  misc_RNA (1)...(19): siRNA sense strand
agcagugcguccagaauuu

SEQ ID NO: 1176831 - RNA, 19 nt, Homo sapiens
  misc_RNA (1)...(19): siRNA sense strand
ggaaggcagaugagaccaa

SEQ ID NO: 1176832 - RNA, 19 nt, Homo sapiens
  misc_RNA (1)...(19): siRNA sense strand
ucaaagcccagaagguguu

SEQ ID NO: 1176833 - RNA, 19 nt, Homo sapiens
  misc_RNA (1)...(19): siRNA sense strand
gaggaggagcucaucaaag

SEQ ID NO: 1176834 - RNA, 19 nt, Homo sapiens
  misc_RNA (1)...(19): siRNA sense strand
acaaggagaugagcaagcu

SEQ ID NO: 1176835 - RNA, 19 nt, Homo sapiens
  misc_RNA (1)...(19): siRNA sense strand
ggaugaggcaaacaagauc

SEQ ID NO: 1176836 - RNA, 19 nt, Homo sapiens
  misc_RNA (1)...(19): siRNA sense strand
gaaggaugaagccaaaauu

SEQ ID NO: 1176837 - RNA, 19 nt, Homo sapiens
  misc_RNA (1)...(19): siRNA sense strand
ccacuacgagucccuucaa

SEQ ID NO: 1176838 - RNA, 19 nt, Homo sapiens
  misc_RNA (1)...(19): siRNA sense strand
ggauggauuaccaccagaa

SEQ ID NO: 1176839 - RNA, 19 nt, Homo sapiens
  misc_RNA (1)...(19): siRNA sense strand
caaccagaaccucaaugau

SEQ ID NO: 1176840 - RNA, 19 nt, Homo sapiens
  misc_RNA (1)...(19): siRNA sense strand
gcagugcguccagaauuuc

SEQ ID NO: 1176841 - RNA, 19 nt, Homo sapiens
  misc_RNA (1)...(19): siRNA sense strand
caagaucgcagagaacaac

SEQ ID NO: 1176842 - RNA, 19 nt, Homo sapiens
  misc_RNA (1)...(19): siRNA sense strand
agaccaaggaugagcaguu

SEQ ID NO: 1176843 - RNA, 19 nt, Homo sapiens
  misc_RNA (1)...(19): siRNA sense strand
ugacaacgcgccugcaaaa

SEQ ID NO: 1176844 - RNA, 19 nt, Homo sapiens
  misc_RNA (1)...(19): siRNA sense strand
agaagguguuugaggagau

SEQ ID NO: 1176845 - RNA, 19 nt, Homo sapiens
  misc_RNA (1)...(19): siRNA sense strand
cacuacgagucccuucaaa

SEQ ID NO: 1176846 - RNA, 19 nt, Homo sapiens
  misc_RNA (1)...(19): siRNA sense strand
ucaacacguuccagagcau

SEQ ID NO: 1176847 - RNA, 19 nt, Homo sapiens
  misc_RNA (1)...(19): siRNA sense strand
gccagcaacgugcagaaga

SEQ ID NO: 1176848 - RNA, 19 nt, Homo sapiens
  misc_RNA (1)...(19): siRNA sense strand
cguccagaauuucaacaag

SEQ ID NO: 1176849 - RNA, 19 nt, Homo sapiens
  misc_RNA (1)...(19): siRNA sense strand
uccagaauuucaacaagca

SEQ ID NO: 1176850 - RNA, 19 nt, Homo sapiens
  misc_RNA (1)...(19): siRNA sense strand
cuacacggccacugacaca

SEQ ID NO: 1176851 - RNA, 19 nt, Homo sapiens
  misc_RNA (1)...(19): siRNA sense strand
gcucaaccagaaccucaau

SEQ ID NO: 1176852 - RNA, 19 nt, Homo sapiens
  misc_RNA (1)...(19): siRNA sense strand
uggaacagccgcguagguu

SEQ ID NO: 1176853 - RNA, 19 nt, Homo sapiens
  misc_RNA (1)...(19): siRNA sense strand
gcucaucaaagcccagaag

SEQ ID NO: 1176854 - RNA, 19 nt, Homo sapiens
  misc_RNA (1)...(19): siRNA sense strand
caaacaagaucgcagagaa

SEQ ID NO: 1176855 - RNA, 19 nt, Homo sapiens
  misc_RNA (1)...(19): siRNA sense strand
gcucaaggcuggugaugug

SEQ ID NO: 1176856 - RNA, 19 nt, Homo sapiens
  misc_RNA (1)...(19): siRNA sense strand
gaccaaggaugagcaguuu

SEQ ID NO: 1176857 - RNA, 19 nt, Homo sapiens
  misc_RNA (1)...(19): siRNA sense strand
aaagaaggaugaagccaaa

SEQ ID NO: 1176858 - RNA, 19 nt, Homo sapiens
  misc_RNA (1)...(19): siRNA sense strand
gacaucaagucacgcauug

SEQ ID NO: 1176859 - RNA, 19 nt, Homo sapiens
  misc_RNA (1)...(19): siRNA sense strand
gaacagccgcguagguuuc

SEQ ID NO: 1176860 - RNA, 19 nt, Homo sapiens
  misc_RNA (1)...(19): siRNA sense strand
cagaugagaccaaggauga

SEQ ID NO: 1176861 - RNA, 19 nt, Homo sapiens
  misc_RNA (1)...(19): siRNA sense strand
gagcagugcguccagaauu

SEQ ID NO: 1176862 - RNA, 19 nt, Homo sapiens
  misc_RNA (1)...(19): siRNA sense strand
ccagcaacgugcagaagaa

SEQ ID NO: 1176863 - RNA, 19 nt, Homo sapiens
  misc_RNA (1)...(19): siRNA sense strand
agaaggaucuccggaccua

SEQ ID NO: 1176864 - RNA, 19 nt, Homo sapiens
  misc_RNA (1)...(19): siRNA sense strand
guggagaccuucccagcaa

SEQ ID NO: 1176865 - RNA, 19 nt, Homo sapiens
  misc_RNA (1)...(19): siRNA sense strand
ggcgcaagcugguggacua

SEQ ID NO: 1176866 - RNA, 19 nt, Homo sapiens
  misc_RNA (1)...(19): siRNA sense strand
gaccugcuguggauggauu

SEQ ID NO: 1176867 - RNA, 19 nt, Homo sapiens
  misc_RNA (1)...(19): siRNA sense strand
gaagguguuugaggagaug

SEQ ID NO: 1176868 - RNA, 19 nt, Homo sapiens
  misc_RNA (1)...(19): siRNA sense strand
gcagagaugggcaguaaag

SEQ ID NO: 1176869 - RNA, 19 nt, Homo sapiens
  misc_RNA (1)...(19): siRNA sense strand
cccgagaacuucacugaga

SEQ ID NO: 1176870 - RNA, 19 nt, Homo sapiens
  misc_RNA (1)...(19): siRNA sense strand
gcaagcugguggacuacga

SEQ ID NO: 1176871 - RNA, 19 nt, Homo sapiens
  misc_RNA (1)...(19): siRNA sense strand
ggaacagccgcguagguuu

SEQ ID NO: 1176872 - RNA, 19 nt, Homo sapiens
  misc_RNA (1)...(19): siRNA sense strand
cgggaaagaucgccagcaa

SEQ ID NO: 1176873 - RNA, 19 nt, Homo sapiens
  misc_RNA (1)...(19): siRNA sense strand
ccaaggaugagcaguuuga

SEQ ID NO: 1176874 - RNA, 19 nt, Homo sapiens
  misc_RNA (1)...(19): siRNA sense strand
gcagggaugaggcaaacaa

SEQ ID NO: 1176875 - RNA, 19 nt, Homo sapiens
  misc_RNA (1)...(19): siRNA sense strand
acaacgaccugcuguggau

SEQ ID NO: 1176876 - RNA, 19 nt, Homo sapiens
  misc_RNA (1)...(19): siRNA sense strand
gggaugaggcaaacaagau

SEQ ID NO: 1176877 - RNA, 19 nt, Homo sapiens
  misc_RNA (1)...(19): siRNA sense strand
ugaaggagagcgacuggaa

SEQ ID NO: 1176878 - RNA, 19 nt, Homo sapiens
  misc_RNA (1)...(19): siRNA sense strand
gcaaacaagaucgcagaga

SEQ ID NO: 1176879 - RNA, 19 nt, Homo sapiens
  misc_RNA (1)...(19): siRNA sense strand
cuaccuggccuccgucaaa

SEQ ID NO: 1176880 - RNA, 19 nt, Homo sapiens
  misc_RNA (1)...(19): siRNA sense strand
ucaaccagaaccucaauga

SEQ ID NO: 1176881 - RNA, 19 nt, Homo sapiens
  misc_RNA (1)...(19): siRNA sense strand
cgacaucaagucacgcauu

SEQ ID NO: 1176882 - RNA, 19 nt, Homo sapiens
  misc_RNA (1)...(19): siRNA sense strand
aaccagaaccucaaugaug

SEQ ID NO: 1176883 - RNA, 19 nt, Homo sapiens
  misc_RNA (1)...(19): siRNA sense strand
gcaacaccuucacggucaa

SEQ ID NO: 1176884 - RNA, 19 nt, Homo sapiens
  misc_RNA (1)...(19): siRNA sense strand
accagaaccucaaugaugu

SEQ ID NO: 1176885 - RNA, 19 nt, Homo sapiens
  misc_RNA (1)...(19): siRNA sense strand
aggaggagcucaucaaagc

SEQ ID NO: 1176886 - RNA, 19 nt, Homo sapiens
  misc_RNA (1)...(19): siRNA sense strand
cgaggaggagcucaucaaa

SEQ ID NO: 1176887 - RNA, 19 nt, Homo sapiens
  misc_RNA (1)...(19): siRNA sense strand
agcagugcguccagaauuu

SEQ ID NO: 1176888 - RNA, 19 nt, Homo sapiens
  misc_RNA (1)...(19): siRNA sense strand
ggaaggcagaugagaccaa

SEQ ID NO: 1176889 - RNA, 19 nt, Homo sapiens
  misc_RNA (1)...(19): siRNA sense strand
ucaaagcccagaagguguu

SEQ ID NO: 1176890 - RNA, 19 nt, Homo sapiens
  misc_RNA (1)...(19): siRNA sense strand
gaggaggagcucaucaaag

SEQ ID NO: 1176891 - RNA, 19 nt, Homo sapiens
  misc_RNA (1)...(19): siRNA sense strand
acaaggagaugagcaagcu

SEQ ID NO: 1176892 - RNA, 19 nt, Homo sapiens
  misc_RNA (1)...(19): siRNA sense strand
ggaugaggcaaacaagauc

SEQ ID NO: 1176893 - RNA, 19 nt, Homo sapiens
  misc_RNA (1)...(19): siRNA sense strand
gaaggaugaagccaaaauu

SEQ ID NO: 1176894 - RNA, 19 nt, Homo sapiens
  misc_RNA (1)...(19): siRNA sense strand
ccacuacgagucccuucaa

SEQ ID NO: 1176895 - RNA, 19 nt, Homo sapiens
  misc_RNA (1)...(19): siRNA sense strand
ggauggauuaccaccagaa

SEQ ID NO: 1176896 - RNA, 19 nt, Homo sapiens
  misc_RNA (1)...(19): siRNA sense strand
caaccagaaccucaaugau

SEQ ID NO: 1176897 - RNA, 19 nt, Homo sapiens
  misc_RNA (1)...(19): siRNA sense strand
gcagugcguccagaauuuc

SEQ ID NO: 1176898 - RNA, 19 nt, Homo sapiens
  misc_RNA (1)...(19): siRNA sense strand
caagaucgcagagaacaac

SEQ ID NO: 1176899 - RNA, 19 nt, Homo sapiens
  misc_RNA (1)...(19): siRNA sense strand
agaccaaggaugagcaguu

SEQ ID NO: 1176900 - RNA, 19 nt, Homo sapiens
  misc_RNA (1)...(19): siRNA sense strand
ugacaacgcgccugcaaaa

SEQ ID NO: 1176901 - RNA, 19 nt, Homo sapiens
  misc_RNA (1)...(19): siRNA sense strand
agaagguguuugaggagau

SEQ ID NO: 1176902 - RNA, 19 nt, Homo sapiens
  misc_RNA (1)...(19): siRNA sense strand
cacuacgagucccuucaaa

SEQ ID NO: 1176903 - RNA, 19 nt, Homo sapiens
  misc_RNA (1)...(19): siRNA sense strand
ucaacacguuccagagcau

SEQ ID NO: 1176904 - RNA, 19 nt, Homo sapiens
  misc_RNA (1)...(19): siRNA sense strand
gccagcaacgugcagaaga

SEQ ID NO: 1176905 - RNA, 19 nt, Homo sapiens
  misc_RNA (1)...(19): siRNA sense strand
cguccagaauuucaacaag

SEQ ID NO: 1176906 - RNA, 19 nt, Homo sapiens
  misc_RNA (1)...(19): siRNA sense strand
uccagaauuucaacaagca

SEQ ID NO: 1176907 - RNA, 19 nt, Homo sapiens
  misc_RNA (1)...(19): siRNA sense strand
cuacacggccacugacaca

SEQ ID NO: 1176908 - RNA, 19 nt, Homo sapiens
  misc_RNA (1)...(19): siRNA sense strand
gcucaaccagaaccucaau

SEQ ID NO: 1176909 - RNA, 19 nt, Homo sapiens
  misc_RNA (1)...(19): siRNA sense strand
uggaacagccgcguagguu

SEQ ID NO: 1176910 - RNA, 19 nt, Homo sapiens
  misc_RNA (1)...(19): siRNA sense strand
gcucaucaaagcccagaag

SEQ ID NO: 1176911 - RNA, 19 nt, Homo sapiens
  misc_RNA (1)...(19): siRNA sense strand
caaacaagaucgcagagaa

SEQ ID NO: 1176912 - RNA, 19 nt, Homo sapiens
  misc_RNA (1)...(19): siRNA sense strand
gcucaaggcuggugaugug

SEQ ID NO: 1176913 - RNA, 19 nt, Homo sapiens
  misc_RNA (1)...(19): siRNA sense strand
gaccaaggaugagcaguuu

SEQ ID NO: 1176914 - RNA, 19 nt, Homo sapiens
  misc_RNA (1)...(19): siRNA sense strand
aaagaaggaugaagccaaa

SEQ ID NO: 1176915 - RNA, 19 nt, Homo sapiens
  misc_RNA (1)...(19): siRNA sense strand
gacaucaagucacgcauug

SEQ ID NO: 1176916 - RNA, 19 nt, Homo sapiens
  misc_RNA (1)...(19): siRNA sense strand
gaacagccgcguagguuuc

SEQ ID NO: 1176917 - RNA, 19 nt, Homo sapiens
  misc_RNA (1)...(19): siRNA sense strand
cagaugagaccaaggauga

SEQ ID NO: 1176918 - RNA, 19 nt, Homo sapiens
  misc_RNA (1)...(19): siRNA sense strand
gagcagugcguccagaauu

SEQ ID NO: 1176919 - RNA, 19 nt, Homo sapiens
  misc_RNA (1)...(19): siRNA sense strand
ccagcaacgugcagaagaa

SEQ ID NO: 1176920 - RNA, 19 nt, Homo sapiens
  misc_RNA (1)...(19): siRNA sense strand
agaaggaucuccggaccua

SEQ ID NO: 1176921 - RNA, 19 nt, Homo sapiens
  misc_RNA (1)...(19): siRNA sense strand
guggagaccuucccagcaa

SEQ ID NO: 1176922 - RNA, 19 nt, Homo sapiens
  misc_RNA (1)...(19): siRNA sense strand
ggcgcaagcugguggacua

SEQ ID NO: 1176923 - RNA, 19 nt, Homo sapiens
  misc_RNA (1)...(19): siRNA sense strand
gaccugcuguggauggauu

SEQ ID NO: 1176924 - RNA, 19 nt, Homo sapiens
  misc_RNA (1)...(19): siRNA sense strand
gaagguguuugaggagaug

SEQ ID NO: 1176925 - RNA, 19 nt, Homo sapiens
  misc_RNA (1)...(19): siRNA sense strand
gcagagaugggcaguaaag

SEQ ID NO: 1176926 - RNA, 19 nt, Homo sapiens
  misc_RNA (1)...(19): siRNA sense strand
cccgagaacuucacugaga

SEQ ID NO: 1176927 - RNA, 19 nt, Homo sapiens
  misc_RNA (1)...(19): siRNA sense strand
gcaagcugguggacuacga

SEQ ID NO: 1176928 - RNA, 19 nt, Homo sapiens
  misc_RNA (1)...(19): siRNA sense strand
ggaacagccgcguagguuu

SEQ ID NO: 1176929 - RNA, 19 nt, Homo sapiens
  misc_RNA (1)...(19): siRNA sense strand
cgggaaagaucgccagcaa

SEQ ID NO: 1176930 - RNA, 19 nt, Homo sapiens
  misc_RNA (1)...(19): siRNA sense strand
ccaaggaugagcaguuuga

SEQ ID NO: 1176931 - RNA, 19 nt, Homo sapiens
  misc_RNA (1)...(19): siRNA sense strand
gcagggaugaggcaaacaa

SEQ ID NO: 1176932 - RNA, 19 nt, Homo sapiens
  misc_RNA (1)...(19): siRNA sense strand
acaacgaccugcuguggau

SEQ ID NO: 1176933 - RNA, 19 nt, Homo sapiens
  misc_RNA (1)...(19): siRNA sense strand
gggaugaggcaaacaagau

SEQ ID NO: 1176934 - RNA, 19 nt, Homo sapiens
  misc_RNA (1)...(19): siRNA sense strand
ugaaggagagcgacuggaa

SEQ ID NO: 1176935 - RNA, 19 nt, Homo sapiens
  misc_RNA (1)...(19): siRNA sense strand
gcaaacaagaucgcagaga

SEQ ID NO: 1176936 - RNA, 19 nt, Homo sapiens
  misc_RNA (1)...(19): siRNA sense strand
cuaccuggccuccgucaaa

SEQ ID NO: 1176937 - RNA, 19 nt, Homo sapiens
  misc_RNA (1)...(19): siRNA sense strand
ucaaccagaaccucaauga

SEQ ID NO: 1176938 - RNA, 19 nt, Homo sapiens
  misc_RNA (1)...(19): siRNA sense strand
cgacaucaagucacgcauu

SEQ ID NO: 1176939 - RNA, 19 nt, Homo sapiens
  misc_RNA (1)...(19): siRNA sense strand
aaccagaaccucaaugaug

SEQ ID NO: 1176940 - RNA, 19 nt, Homo sapiens
  misc_RNA (1)...(19): siRNA sense strand
gcaacaccuucacggucaa

SEQ ID NO: 1176941 - RNA, 19 nt, Homo sapiens
  misc_RNA (1)...(19): siRNA sense strand
accagaaccucaaugaugu

SEQ ID NO: 1176942 - RNA, 19 nt, Homo sapiens
  misc_RNA (1)...(19): siRNA sense strand
aggaggagcucaucaaagc

SEQ ID NO: 1176943 - RNA, 19 nt, Homo sapiens
  misc_RNA (1)...(19): siRNA sense strand
cgaggaggagcucaucaaa

SEQ ID NO: 1176944 - RNA, 19 nt, Homo sapiens
  misc_RNA (1)...(19): siRNA sense strand
agcagugcguccagaauuu

SEQ ID NO: 1176945 - RNA, 19 nt, Homo sapiens
  misc_RNA (1)...(19): siRNA sense strand
ggaaggcagaugagaccaa

SEQ ID NO: 1176946 - RNA, 19 nt, Homo sapiens
  misc_RNA (1)...(19): siRNA sense strand
ucaaagcccagaagguguu

SEQ ID NO: 1176947 - RNA, 19 nt, Homo sapiens
  misc_RNA (1)...(19): siRNA sense strand
gaggaggagcucaucaaag

SEQ ID NO: 1176948 - RNA, 19 nt, Homo sapiens
  misc_RNA (1)...(19): siRNA sense strand
acaaggagaugagcaagcu

SEQ ID NO: 1176949 - RNA, 19 nt, Homo sapiens
  misc_RNA (1)...(19): siRNA sense strand
ggaugaggcaaacaagauc

SEQ ID NO: 1176950 - RNA, 19 nt, Homo sapiens
  misc_RNA (1)...(19): siRNA sense strand
gaaggaugaagccaaaauu

SEQ ID NO: 1176951 - RNA, 19 nt, Homo sapiens
  misc_RNA (1)...(19): siRNA sense strand
ccacuacgagucccuucaa

SEQ ID NO: 1176952 - RNA, 19 nt, Homo sapiens
  misc_RNA (1)...(19): siRNA sense strand
ggauggauuaccaccagaa

SEQ ID NO: 1176953 - RNA, 19 nt, Homo sapiens
  misc_RNA (1)...(19): siRNA sense strand
caaccagaaccucaaugau

SEQ ID NO: 1176954 - RNA, 19 nt, Homo sapiens
  misc_RNA (1)...(19): siRNA sense strand
gcagugcguccagaauuuc

SEQ ID NO: 1176955 - RNA, 19 nt, Homo sapiens
  misc_RNA (1)...(19): siRNA sense strand
caagaucgcagagaacaac

SEQ ID NO: 1176956 - RNA, 19 nt, Homo sapiens
  misc_RNA (1)...(19): siRNA sense strand
agaccaaggaugagcaguu

SEQ ID NO: 1176957 - RNA, 19 nt, Homo sapiens
  misc_RNA (1)...(19): siRNA sense strand
ugacaacgcgccugcaaaa

SEQ ID NO: 1176958 - RNA, 19 nt, Homo sapiens
  misc_RNA (1)...(19): siRNA sense strand
agaagguguuugaggagau

SEQ ID NO: 1176959 - RNA, 19 nt, Homo sapiens
  misc_RNA (1)...(19): siRNA sense strand
cacuacgagucccuucaaa

SEQ ID NO: 1176960 - RNA, 19 nt, Homo sapiens
  misc_RNA (1)...(19): siRNA sense strand
ucaacacguuccagagcau

SEQ ID NO: 1176961 - RNA, 19 nt, Homo sapiens
  misc_RNA (1)...(19): siRNA sense strand
gccagcaacgugcagaaga

SEQ ID NO: 1176962 - RNA, 19 nt, Homo sapiens
  misc_RNA (1)...(19): siRNA sense strand
cguccagaauuucaacaag

SEQ ID NO: 1176963 - RNA, 19 nt, Homo sapiens
  misc_RNA (1)...(19): siRNA sense strand
uccagaauuucaacaagca

SEQ ID NO: 1176964 - RNA, 19 nt, Homo sapiens
  misc_RNA (1)...(19): siRNA sense strand
cuacacggccacugacaca

SEQ ID NO: 1176965 - RNA, 19 nt, Homo sapiens
  misc_RNA (1)...(19): siRNA sense strand
gcucaaccagaaccucaau

SEQ ID NO: 1176966 - RNA, 19 nt, Homo sapiens
  misc_RNA (1)...(19): siRNA sense strand
uggaacagccgcguagguu

SEQ ID NO: 1176967 - RNA, 19 nt, Homo sapiens
  misc_RNA (1)...(19): siRNA sense strand
gcucaucaaagcccagaag

SEQ ID NO: 1176968 - RNA, 19 nt, Homo sapiens
  misc_RNA (1)...(19): siRNA sense strand
caaacaagaucgcagagaa

SEQ ID NO: 1176969 - RNA, 19 nt, Homo sapiens
  misc_RNA (1)...(19): siRNA sense strand
gcucaaggcuggugaugug

SEQ ID NO: 1176970 - RNA, 19 nt, Homo sapiens
  misc_RNA (1)...(19): siRNA sense strand
gaccaaggaugagcaguuu

SEQ ID NO: 1176971 - RNA, 19 nt, Homo sapiens
  misc_RNA (1)...(19): siRNA sense strand
aaagaaggaugaagccaaa

SEQ ID NO: 1176972 - RNA, 19 nt, Homo sapiens
  misc_RNA (1)...(19): siRNA sense strand
gacaucaagucacgcauug

SEQ ID NO: 1176973 - RNA, 19 nt, Homo sapiens
  misc_RNA (1)...(19): siRNA sense strand
gaacagccgcguagguuuc

SEQ ID NO: 1176974 - RNA, 19 nt, Homo sapiens
  misc_RNA (1)...(19): siRNA sense strand
cagaugagaccaaggauga

SEQ ID NO: 1176975 - RNA, 19 nt, Homo sapiens
  misc_RNA (1)...(19): siRNA sense strand
gagcagugcguccagaauu

SEQ ID NO: 1176976 - RNA, 19 nt, Homo sapiens
  misc_RNA (1)...(19): siRNA sense strand
ccagcaacgugcagaagaa

SEQ ID NO: 1176977 - RNA, 19 nt, Homo sapiens
  misc_RNA (1)...(19): siRNA sense strand
agaaggaucuccggaccua

SEQ ID NO: 1176978 - RNA, 19 nt, Homo sapiens
  misc_RNA (1)...(19): siRNA sense strand
guggagaccuucccagcaa

SEQ ID NO: 1176979 - RNA, 19 nt, Homo sapiens
  misc_RNA (1)...(19): siRNA sense strand
ggcgcaagcugguggacua

SEQ ID NO: 1176980 - RNA, 19 nt, Homo sapiens
  misc_RNA (1)...(19): siRNA sense strand
gaccugcuguggauggauu

SEQ ID NO: 1176981 - RNA, 19 nt, Homo sapiens
  misc_RNA (1)...(19): siRNA sense strand
gaagguguuugaggagaug

SEQ ID NO: 1176982 - RNA, 19 nt, Homo sapiens
  misc_RNA (1)...(19): siRNA sense strand
gcagagaugggcaguaaag

SEQ ID NO: 1176983 - RNA, 19 nt, Homo sapiens
  misc_RNA (1)...(19): siRNA sense strand
cccgagaacuucacugaga

SEQ ID NO: 1176984 - RNA, 19 nt, Homo sapiens
  misc_RNA (1)...(19): siRNA sense strand
gcaagcugguggacuacga

SEQ ID NO: 1176985 - RNA, 19 nt, Homo sapiens
  misc_RNA (1)...(19): siRNA sense strand
ggaacagccgcguagguuu

SEQ ID NO: 1176986 - RNA, 19 nt, Homo sapiens
  misc_RNA (1)...(19): siRNA sense strand
cgggaaagaucgccagcaa

SEQ ID NO: 1176987 - RNA, 19 nt, Homo sapiens
  misc_RNA (1)...(19): siRNA sense strand
ccaaggaugagcaguuuga

SEQ ID NO: 1176988 - RNA, 19 nt, Homo sapiens
  misc_RNA (1)...(19): siRNA sense strand
gcagggaugaggcaaacaa

SEQ ID NO: 1176989 - RNA, 19 nt, Homo sapiens
  misc_RNA (1)...(19): siRNA sense strand
acaacgaccugcuguggau

SEQ ID NO: 1176990 - RNA, 19 nt, Homo sapiens
  misc_RNA (1)...(19): siRNA sense strand
gggaugaggcaaacaagau

SEQ ID NO: 1176991 - RNA, 19 nt, Homo sapiens
  misc_RNA (1)...(19): siRNA sense strand
ugaaggagagcgacuggaa

SEQ ID NO: 1176992 - RNA, 19 nt, Homo sapiens
  misc_RNA (1)...(19): siRNA sense strand
gcaaacaagaucgcagaga

SEQ ID NO: 1176993 - RNA, 19 nt, Homo sapiens
  misc_RNA (1)...(19): siRNA sense strand
cuaccuggccuccgucaaa

SEQ ID NO: 1176994 - RNA, 19 nt, Homo sapiens
  misc_RNA (1)...(19): siRNA sense strand
ucaaccagaaccucaauga

SEQ ID NO: 1176995 - RNA, 19 nt, Homo sapiens
  misc_RNA (1)...(19): siRNA sense strand
cgacaucaagucacgcauu

SEQ ID NO: 1176996 - RNA, 19 nt, Homo sapiens
  misc_RNA (1)...(19): siRNA sense strand
aaccagaaccucaaugaug

SEQ ID NO: 1176997 - RNA, 19 nt, Homo sapiens
  misc_RNA (1)...(19): siRNA sense strand
gcaacaccuucacggucaa

SEQ ID NO: 1176998 - RNA, 19 nt, Homo sapiens
  misc_RNA (1)...(19): siRNA sense strand
accagaaccucaaugaugu

SEQ ID NO: 1176999 - RNA, 19 nt, Homo sapiens
  misc_RNA (1)...(19): siRNA sense strand
aggaggagcucaucaaagc

SEQ ID NO: 1177000 - RNA, 19 nt, Homo sapiens
  misc_RNA (1)...(19): siRNA sense strand
cgaggaggagcucaucaaa

SEQ ID NO: 1177001 - RNA, 19 nt, Homo sapiens
  misc_RNA (1)...(19): siRNA sense strand
agcagugcguccagaauuu

SEQ ID NO: 1177002 - RNA, 19 nt, Homo sapiens
  misc_RNA (1)...(19): siRNA sense strand
ggaaggcagaugagaccaa

SEQ ID NO: 1177003 - RNA, 19 nt, Homo sapiens
  misc_RNA (1)...(19): siRNA sense strand
ucaaagcccagaagguguu

SEQ ID NO: 1177004 - RNA, 19 nt, Homo sapiens
  misc_RNA (1)...(19): siRNA sense strand
gaggaggagcucaucaaag

SEQ ID NO: 1177005 - RNA, 19 nt, Homo sapiens
  misc_RNA (1)...(19): siRNA sense strand
acaaggagaugagcaagcu

SEQ ID NO: 1177006 - RNA, 19 nt, Homo sapiens
  misc_RNA (1)...(19): siRNA sense strand
ggaugaggcaaacaagauc

SEQ ID NO: 1177007 - RNA, 19 nt, Homo sapiens
  misc_RNA (1)...(19): siRNA sense strand
gaaggaugaagccaaaauu

SEQ ID NO: 1177008 - RNA, 19 nt, Homo sapiens
  misc_RNA (1)...(19): siRNA sense strand
ccacuacgagucccuucaa

SEQ ID NO: 1177009 - RNA, 19 nt, Homo sapiens
  misc_RNA (1)...(19): siRNA sense strand
ggauggauuaccaccagaa

SEQ ID NO: 1177010 - RNA, 19 nt, Homo sapiens
  misc_RNA (1)...(19): siRNA sense strand
caaccagaaccucaaugau

SEQ ID NO: 1177011 - RNA, 19 nt, Homo sapiens
  misc_RNA (1)...(19): siRNA sense strand
gcagugcguccagaauuuc

SEQ ID NO: 1177012 - RNA, 19 nt, Homo sapiens
  misc_RNA (1)...(19): siRNA sense strand
caagaucgcagagaacaac

SEQ ID NO: 1177013 - RNA, 19 nt, Homo sapiens
  misc_RNA (1)...(19): siRNA sense strand
agaccaaggaugagcaguu

SEQ ID NO: 1177014 - RNA, 19 nt, Homo sapiens
  misc_RNA (1)...(19): siRNA sense strand
ugacaacgcgccugcaaaa

SEQ ID NO: 1177015 - RNA, 19 nt, Homo sapiens
  misc_RNA (1)...(19): siRNA sense strand
agaagguguuugaggagau

SEQ ID NO: 1177016 - RNA, 19 nt, Homo sapiens
  misc_RNA (1)...(19): siRNA sense strand
cacuacgagucccuucaaa

SEQ ID NO: 1177017 - RNA, 19 nt, Homo sapiens
  misc_RNA (1)...(19): siRNA sense strand
ucaacacguuccagagcau

SEQ ID NO: 1177018 - RNA, 19 nt, Homo sapiens
  misc_RNA (1)...(19): siRNA sense strand
gccagcaacgugcagaaga

SEQ ID NO: 1177019 - RNA, 19 nt, Homo sapiens
  misc_RNA (1)...(19): siRNA sense strand
cguccagaauuucaacaag

SEQ ID NO: 1177020 - RNA, 19 nt, Homo sapiens
  misc_RNA (1)...(19): siRNA sense strand
uccagaauuucaacaagca

SEQ ID NO: 1177021 - RNA, 19 nt, Homo sapiens
  misc_RNA (1)...(19): siRNA sense strand
cuacacggccacugacaca

SEQ ID NO: 1177022 - RNA, 19 nt, Homo sapiens
  misc_RNA (1)...(19): siRNA sense strand
gcucaaccagaaccucaau

SEQ ID NO: 1177023 - RNA, 19 nt, Homo sapiens
  misc_RNA (1)...(19): siRNA sense strand
uggaacagccgcguagguu

SEQ ID NO: 1177024 - RNA, 19 nt, Homo sapiens
  misc_RNA (1)...(19): siRNA sense strand
gcucaucaaagcccagaag

SEQ ID NO: 1177025 - RNA, 19 nt, Homo sapiens
  misc_RNA (1)...(19): siRNA sense strand
caaacaagaucgcagagaa

SEQ ID NO: 1177026 - RNA, 19 nt, Homo sapiens
  misc_RNA (1)...(19): siRNA sense strand
gcucaaggcuggugaugug

SEQ ID NO: 1177027 - RNA, 19 nt, Homo sapiens
  misc_RNA (1)...(19): siRNA sense strand
gaccaaggaugagcaguuu

SEQ ID NO: 1177028 - RNA, 19 nt, Homo sapiens
  misc_RNA (1)...(19): siRNA sense strand
aaagaaggaugaagccaaa

SEQ ID NO: 1177029 - RNA, 19 nt, Homo sapiens
  misc_RNA (1)...(19): siRNA sense strand
gacaucaagucacgcauug

SEQ ID NO: 1177030 - RNA, 19 nt, Homo sapiens
  misc_RNA (1)...(19): siRNA sense strand
gaacagccgcguagguuuc

SEQ ID NO: 1177031 - RNA, 19 nt, Homo sapiens
  misc_RNA (1)...(19): siRNA sense strand
cagaugagaccaaggauga

SEQ ID NO: 1177032 - RNA, 19 nt, Homo sapiens
  misc_RNA (1)...(19): siRNA sense strand
gagcagugcguccagaauu

SEQ ID NO: 1177033 - RNA, 19 nt, Homo sapiens
  misc_RNA (1)...(19): siRNA sense strand
ccagcaacgugcagaagaa

SEQ ID NO: 1177034 - RNA, 19 nt, Homo sapiens
  misc_RNA (1)...(19): siRNA sense strand
agaaggaucuccggaccua

SEQ ID NO: 1177035 - RNA, 19 nt, Homo sapiens
  misc_RNA (1)...(19): siRNA sense strand
guggagaccuucccagcaa

SEQ ID NO: 1177036 - RNA, 19 nt, Homo sapiens
  misc_RNA (1)...(19): siRNA sense strand
ggcgcaagcugguggacua

SEQ ID NO: 1177037 - RNA, 19 nt, Homo sapiens
  misc_RNA (1)...(19): siRNA sense strand
gaccugcuguggauggauu

SEQ ID NO: 1177038 - RNA, 19 nt, Homo sapiens
  misc_RNA (1)...(19): siRNA sense strand
gaagguguuugaggagaug

SEQ ID NO: 1177039 - RNA, 19 nt, Homo sapiens
  misc_RNA (1)...(19): siRNA sense strand
gcagagaugggcaguaaag

SEQ ID NO: 1177040 - RNA, 19 nt, Homo sapiens
  misc_RNA (1)...(19): siRNA sense strand
cccgagaacuucacugaga

SEQ ID NO: 1177041 - RNA, 19 nt, Homo sapiens
  misc_RNA (1)...(19): siRNA sense strand
gcaagcugguggacuacga

SEQ ID NO: 1177042 - RNA, 19 nt, Homo sapiens
  misc_RNA (1)...(19): siRNA sense strand
ggaacagccgcguagguuu

SEQ ID NO: 1177043 - RNA, 19 nt, Homo sapiens
  misc_RNA (1)...(19): siRNA sense strand
cgggaaagaucgccagcaa

SEQ ID NO: 1177044 - RNA, 19 nt, Homo sapiens
  misc_RNA (1)...(19): siRNA sense strand
ccaaggaugagcaguuuga

SEQ ID NO: 1177045 - RNA, 19 nt, Homo sapiens
  misc_RNA (1)...(19): siRNA sense strand
gcagggaugaggcaaacaa

SEQ ID NO: 1177046 - RNA, 19 nt, Homo sapiens
  misc_RNA (1)...(19): siRNA sense strand
acaacgaccugcuguggau

SEQ ID NO: 1177047 - RNA, 19 nt, Homo sapiens
  misc_RNA (1)...(19): siRNA sense strand
gggaugaggcaaacaagau

SEQ ID NO: 1177048 - RNA, 19 nt, Homo sapiens
  misc_RNA (1)...(19): siRNA sense strand
ugaaggagagcgacuggaa

SEQ ID NO: 1177049 - RNA, 19 nt, Homo sapiens
  misc_RNA (1)...(19): siRNA sense strand
gcaaacaagaucgcagaga

SEQ ID NO: 1177050 - RNA, 19 nt, Homo sapiens
  misc_RNA (1)...(19): siRNA sense strand
cuaccuggccuccgucaaa

SEQ ID NO: 1177051 - RNA, 19 nt, Homo sapiens
  misc_RNA (1)...(19): siRNA sense strand
ucaaccagaaccucaauga

SEQ ID NO: 1177052 - RNA, 19 nt, Homo sapiens
  misc_RNA (1)...(19): siRNA sense strand
cgacaucaagucacgcauu

SEQ ID NO: 1177053 - RNA, 19 nt, Homo sapiens
  misc_RNA (1)...(19): siRNA sense strand
aaccagaaccucaaugaug

SEQ ID NO: 1177054 - RNA, 19 nt, Homo sapiens
  misc_RNA (1)...(19): siRNA sense strand
gcaacaccuucacggucaa

SEQ ID NO: 1177055 - RNA, 19 nt, Homo sapiens
  misc_RNA (1)...(19): siRNA sense strand
accagaaccucaaugaugu

SEQ ID NO: 1177056 - RNA, 19 nt, Homo sapiens
  misc_RNA (1)...(19): siRNA sense strand
aggaggagcucaucaaagc

SEQ ID NO: 1177057 - RNA, 19 nt, Homo sapiens
  misc_RNA (1)...(19): siRNA sense strand
cgaggaggagcucaucaaa

SEQ ID NO: 1177058 - RNA, 19 nt, Homo sapiens
  misc_RNA (1)...(19): siRNA sense strand
agcagugcguccagaauuu

SEQ ID NO: 1177059 - RNA, 19 nt, Homo sapiens
  misc_RNA (1)...(19): siRNA sense strand
ggaaggcagaugagaccaa

SEQ ID NO: 1177060 - RNA, 19 nt, Homo sapiens
  misc_RNA (1)...(19): siRNA sense strand
ucaaagcccagaagguguu

SEQ ID NO: 1177061 - RNA, 19 nt, Homo sapiens
  misc_RNA (1)...(19): siRNA sense strand
gaggaggagcucaucaaag

SEQ ID NO: 1177062 - RNA, 19 nt, Homo sapiens
  misc_RNA (1)...(19): siRNA sense strand
acaaggagaugagcaagcu

SEQ ID NO: 1177063 - RNA, 19 nt, Homo sapiens
  misc_RNA (1)...(19): siRNA sense strand
ggaugaggcaaacaagauc

SEQ ID NO: 1177064 - RNA, 19 nt, Homo sapiens
  misc_RNA (1)...(19): siRNA sense strand
gaaggaugaagccaaaauu

SEQ ID NO: 1177065 - RNA, 19 nt, Homo sapiens
  misc_RNA (1)...(19): siRNA sense strand
ccacuacgagucccuucaa

SEQ ID NO: 1177066 - RNA, 19 nt, Homo sapiens
  misc_RNA (1)...(19): siRNA sense strand
ggauggauuaccaccagaa

SEQ ID NO: 1177067 - RNA, 19 nt, Homo sapiens
  misc_RNA (1)...(19): siRNA sense strand
caaccagaaccucaaugau

SEQ ID NO: 1177068 - RNA, 19 nt, Homo sapiens
  misc_RNA (1)...(19): siRNA sense strand
gcagugcguccagaauuuc

SEQ ID NO: 1177069 - RNA, 19 nt, Homo sapiens
  misc_RNA (1)...(19): siRNA sense strand
caagaucgcagagaacaac

SEQ ID NO: 1177070 - RNA, 19 nt, Homo sapiens
  misc_RNA (1)...(19): siRNA sense strand
agaccaaggaugagcaguu

SEQ ID NO: 1177071 - RNA, 19 nt, Homo sapiens
  misc_RNA (1)...(19): siRNA sense strand
ugacaacgcgccugcaaaa

SEQ ID NO: 1177072 - RNA, 19 nt, Homo sapiens
  misc_RNA (1)...(19): siRNA sense strand
agaagguguuugaggagau

SEQ ID NO: 1177073 - RNA, 19 nt, Homo sapiens
  misc_RNA (1)...(19): siRNA sense strand
cacuacgagucccuucaaa

SEQ ID NO: 1177074 - RNA, 19 nt, Homo sapiens
  misc_RNA (1)...(19): siRNA sense strand
ucaacacguuccagagcau

SEQ ID NO: 1177075 - RNA, 19 nt, Homo sapiens
  misc_RNA (1)...(19): siRNA sense strand
gccagcaacgugcagaaga

SEQ ID NO: 1177076 - RNA, 19 nt, Homo sapiens
  misc_RNA (1)...(19): siRNA sense strand
cguccagaauuucaacaag

SEQ ID NO: 1177077 - RNA, 19 nt, Homo sapiens
  misc_RNA (1)...(19): siRNA sense strand
uccagaauuucaacaagca

SEQ ID NO: 1177078 - RNA, 19 nt, Homo sapiens
  misc_RNA (1)...(19): siRNA sense strand
cuacacggccacugacaca

SEQ ID NO: 1177079 - RNA, 19 nt, Homo sapiens
  misc_RNA (1)...(19): siRNA sense strand
gcucaaccagaaccucaau

SEQ ID NO: 1177080 - RNA, 19 nt, Homo sapiens
  misc_RNA (1)...(19): siRNA sense strand
uggaacagccgcguagguu

SEQ ID NO: 1177081 - RNA, 19 nt, Homo sapiens
  misc_RNA (1)...(19): siRNA sense strand
gcucaucaaagcccagaag

SEQ ID NO: 1177082 - RNA, 19 nt, Homo sapiens
  misc_RNA (1)...(19): siRNA sense strand
caaacaagaucgcagagaa

SEQ ID NO: 1177083 - RNA, 19 nt, Homo sapiens
  misc_RNA (1)...(19): siRNA sense strand
gcucaaggcuggugaugug

SEQ ID NO: 1177084 - RNA, 19 nt, Homo sapiens
  misc_RNA (1)...(19): siRNA sense strand
gaccaaggaugagcaguuu

SEQ ID NO: 1177085 - RNA, 19 nt, Homo sapiens
  misc_RNA (1)...(19): siRNA sense strand
aaagaaggaugaagccaaa

SEQ ID NO: 1177086 - RNA, 19 nt, Homo sapiens
  misc_RNA (1)...(19): siRNA sense strand
gacaucaagucacgcauug

SEQ ID NO: 1177087 - RNA, 19 nt, Homo sapiens
  misc_RNA (1)...(19): siRNA sense strand
gaacagccgcguagguuuc

SEQ ID NO: 1177088 - RNA, 19 nt, Homo sapiens
  misc_RNA (1)...(19): siRNA sense strand
cagaugagaccaaggauga

SEQ ID NO: 1177089 - RNA, 19 nt, Homo sapiens
  misc_RNA (1)...(19): siRNA sense strand
gagcagugcguccagaauu

SEQ ID NO: 1177090 - RNA, 19 nt, Homo sapiens
  misc_RNA (1)...(19): siRNA sense strand
ccagcaacgugcagaagaa

SEQ ID NO: 1177091 - RNA, 19 nt, Homo sapiens
  misc_RNA (1)...(19): siRNA sense strand
agaaggaucuccggaccua

SEQ ID NO: 1177092 - RNA, 19 nt, Homo sapiens
  misc_RNA (1)...(19): siRNA sense strand
guggagaccuucccagcaa

SEQ ID NO: 1177093 - RNA, 19 nt, Homo sapiens
  misc_RNA (1)...(19): siRNA sense strand
ggcgcaagcugguggacua

SEQ ID NO: 1177094 - RNA, 19 nt, Homo sapiens
  misc_RNA (1)...(19): siRNA sense strand
gaccugcuguggauggauu

SEQ ID NO: 1177095 - RNA, 19 nt, Homo sapiens
  misc_RNA (1)...(19): siRNA sense strand
gaagguguuugaggagaug

SEQ ID NO: 1177096 - RNA, 19 nt, Homo sapiens
  misc_RNA (1)...(19): siRNA sense strand
gcagagaugggcaguaaag

SEQ ID NO: 1177097 - RNA, 19 nt, Homo sapiens
  misc_RNA (1)...(19): siRNA sense strand
cccgagaacuucacugaga

SEQ ID NO: 1177098 - RNA, 19 nt, Homo sapiens
  misc_RNA (1)...(19): siRNA sense strand
gcaagcugguggacuacga

SEQ ID NO: 1177099 - RNA, 19 nt, Homo sapiens
  misc_RNA (1)...(19): siRNA sense strand
ggaacagccgcguagguuu

SEQ ID NO: 1177100 - RNA, 19 nt, Homo sapiens
  misc_RNA (1)...(19): siRNA sense strand
cgggaaagaucgccagcaa

SEQ ID NO: 1177101 - RNA, 19 nt, Homo sapiens
  misc_RNA (1)...(19): siRNA sense strand
ccaaggaugagcaguuuga

SEQ ID NO: 1177102 - RNA, 19 nt, Homo sapiens
  misc_RNA (1)...(19): siRNA sense strand
gcagggaugaggcaaacaa

SEQ ID NO: 1177103 - RNA, 19 nt, Homo sapiens
  misc_RNA (1)...(19): siRNA sense strand
acaacgaccugcuguggau

SEQ ID NO: 1177104 - RNA, 19 nt, Homo sapiens
  misc_RNA (1)...(19): siRNA sense strand
gggaugaggcaaacaagau

SEQ ID NO: 1177105 - RNA, 19 nt, Homo sapiens
  misc_RNA (1)...(19): siRNA sense strand
ugaaggagagcgacuggaa

SEQ ID NO: 1177106 - RNA, 19 nt, Homo sapiens
  misc_RNA (1)...(19): siRNA sense strand
gcaaacaagaucgcagaga

SEQ ID NO: 1177107 - RNA, 19 nt, Homo sapiens
  misc_RNA (1)...(19): siRNA sense strand
cuaccuggccuccgucaaa

SEQ ID NO: 1177108 - RNA, 19 nt, Homo sapiens
  misc_RNA (1)...(19): siRNA sense strand
ucaaccagaaccucaauga

SEQ ID NO: 1177109 - RNA, 19 nt, Homo sapiens
  misc_RNA (1)...(19): siRNA sense strand
cgacaucaagucacgcauu

SEQ ID NO: 1177110 - RNA, 19 nt, Homo sapiens
  misc_RNA (1)...(19): siRNA sense strand
aaccagaaccucaaugaug

SEQ ID NO: 1177111 - RNA, 19 nt, Homo sapiens
  misc_RNA (1)...(19): siRNA sense strand
gcaacaccuucacggucaa

SEQ ID NO: 1177112 - RNA, 19 nt, Homo sapiens
  misc_RNA (1)...(19): siRNA sense strand
accagaaccucaaugaugu

SEQ ID NO: 1177113 - RNA, 19 nt, Homo sapiens
  misc_RNA (1)...(19): siRNA sense strand
aggaggagcucaucaaagc

SEQ ID NO: 1177114 - RNA, 19 nt, Homo sapiens
  misc_RNA (1)...(19): siRNA sense strand
cgaggaggagcucaucaaa

SEQ ID NO: 1177115 - RNA, 19 nt, Homo sapiens
  misc_RNA (1)...(19): siRNA sense strand
agcagugcguccagaauuu

SEQ ID NO: 1177116 - RNA, 19 nt, Homo sapiens
  misc_RNA (1)...(19): siRNA sense strand
ggaaggcagaugagaccaa

SEQ ID NO: 1177117 - RNA, 19 nt, Homo sapiens
  misc_RNA (1)...(19): siRNA sense strand
ucaaagcccagaagguguu

SEQ ID NO: 1177118 - RNA, 19 nt, Homo sapiens
  misc_RNA (1)...(19): siRNA sense strand
gaggaggagcucaucaaag

SEQ ID NO: 1177119 - RNA, 19 nt, Homo sapiens
  misc_RNA (1)...(19): siRNA sense strand
acaaggagaugagcaagcu

SEQ ID NO: 1177120 - RNA, 19 nt, Homo sapiens
  misc_RNA (1)...(19): siRNA sense strand
ggaugaggcaaacaagauc

SEQ ID NO: 1177121 - RNA, 19 nt, Homo sapiens
  misc_RNA (1)...(19): siRNA sense strand
gaaggaugaagccaaaauu

SEQ ID NO: 1177122 - RNA, 19 nt, Homo sapiens
  misc_RNA (1)...(19): siRNA sense strand
ccacuacgagucccuucaa

SEQ ID NO: 1177123 - RNA, 19 nt, Homo sapiens
  misc_RNA (1)...(19): siRNA sense strand
ggauggauuaccaccagaa

SEQ ID NO: 1177124 - RNA, 19 nt, Homo sapiens
  misc_RNA (1)...(19): siRNA sense strand
caaccagaaccucaaugau

SEQ ID NO: 1177125 - RNA, 19 nt, Homo sapiens
  misc_RNA (1)...(19): siRNA sense strand
gcagugcguccagaauuuc

SEQ ID NO: 1177126 - RNA, 19 nt, Homo sapiens
  misc_RNA (1)...(19): siRNA sense strand
caagaucgcagagaacaac

SEQ ID NO: 1177127 - RNA, 19 nt, Homo sapiens
  misc_RNA (1)...(19): siRNA sense strand
agaccaaggaugagcaguu

SEQ ID NO: 1177128 - RNA, 19 nt, Homo sapiens
  misc_RNA (1)...(19): siRNA sense strand
ugacaacgcgccugcaaaa

SEQ ID NO: 1177129 - RNA, 19 nt, Homo sapiens
  misc_RNA (1)...(19): siRNA sense strand
agaagguguuugaggagau

SEQ ID NO: 1177130 - RNA, 19 nt, Homo sapiens
  misc_RNA (1)...(19): siRNA sense strand
cacuacgagucccuucaaa

SEQ ID NO: 1177131 - RNA, 19 nt, Homo sapiens
  misc_RNA (1)...(19): siRNA sense strand
ucaacacguuccagagcau

SEQ ID NO: 1177132 - RNA, 19 nt, Homo sapiens
  misc_RNA (1)...(19): siRNA sense strand
gccagcaacgugcagaaga

SEQ ID NO: 1177133 - RNA, 19 nt, Homo sapiens
  misc_RNA (1)...(19): siRNA sense strand
cguccagaauuucaacaag

SEQ ID NO: 1177134 - RNA, 19 nt, Homo sapiens
  misc_RNA (1)...(19): siRNA sense strand
uccagaauuucaacaagca

SEQ ID NO: 1177135 - RNA, 19 nt, Homo sapiens
  misc_RNA (1)...(19): siRNA sense strand
cuacacggccacugacaca

SEQ ID NO: 1177136 - RNA, 19 nt, Homo sapiens
  misc_RNA (1)...(19): siRNA sense strand
gcucaaccagaaccucaau

SEQ ID NO: 1177137 - RNA, 19 nt, Homo sapiens
  misc_RNA (1)...(19): siRNA sense strand
uggaacagccgcguagguu

SEQ ID NO: 1177138 - RNA, 19 nt, Homo sapiens
  misc_RNA (1)...(19): siRNA sense strand
gcucaucaaagcccagaag

SEQ ID NO: 1177139 - RNA, 19 nt, Homo sapiens
  misc_RNA (1)...(19): siRNA sense strand
caaacaagaucgcagagaa

SEQ ID NO: 1177140 - RNA, 19 nt, Homo sapiens
  misc_RNA (1)...(19): siRNA sense strand
gcucaaggcuggugaugug

SEQ ID NO: 1177141 - RNA, 19 nt, Homo sapiens
  misc_RNA (1)...(19): siRNA sense strand
gaccaaggaugagcaguuu

SEQ ID NO: 1177142 - RNA, 19 nt, Homo sapiens
  misc_RNA (1)...(19): siRNA sense strand
aaagaaggaugaagccaaa

SEQ ID NO: 1177143 - RNA, 19 nt, Homo sapiens
  misc_RNA (1)...(19): siRNA sense strand
gacaucaagucacgcauug

SEQ ID NO: 1177144 - RNA, 19 nt, Homo sapiens
  misc_RNA (1)...(19): siRNA sense strand
gaacagccgcguagguuuc

SEQ ID NO: 1177145 - RNA, 19 nt, Homo sapiens
  misc_RNA (1)...(19): siRNA sense strand
cagaugagaccaaggauga

SEQ ID NO: 1177146 - RNA, 19 nt, Homo sapiens
  misc_RNA (1)...(19): siRNA sense strand
gagcagugcguccagaauu

SEQ ID NO: 1177147 - RNA, 19 nt, Homo sapiens
  misc_RNA (1)...(19): siRNA sense strand
ccagcaacgugcagaagaa

SEQ ID NO: 1177148 - RNA, 19 nt, Homo sapiens
  misc_RNA (1)...(19): siRNA sense strand
agaaggaucuccggaccua

SEQ ID NO: 1177149 - RNA, 19 nt, Homo sapiens
  misc_RNA (1)...(19): siRNA sense strand
guggagaccuucccagcaa

SEQ ID NO: 1177150 - RNA, 19 nt, Homo sapiens
  misc_RNA (1)...(19): siRNA sense strand
ggcgcaagcugguggacua

SEQ ID NO: 1177151 - RNA, 19 nt, Homo sapiens
  misc_RNA (1)...(19): siRNA sense strand
gaccugcuguggauggauu

SEQ ID NO: 1177152 - RNA, 19 nt, Homo sapiens
  misc_RNA (1)...(19): siRNA sense strand
gaagguguuugaggagaug

SEQ ID NO: 1177153 - RNA, 19 nt, Homo sapiens
  misc_RNA (1)...(19): siRNA sense strand
gcagagaugggcaguaaag

SEQ ID NO: 1177154 - RNA, 19 nt, Homo sapiens
  misc_RNA (1)...(19): siRNA sense strand
cccgagaacuucacugaga

SEQ ID NO: 1177155 - RNA, 19 nt, Homo sapiens
  misc_RNA (1)...(19): siRNA sense strand
gcaagcugguggacuacga

SEQ ID NO: 1177156 - RNA, 19 nt, Homo sapiens
  misc_RNA (1)...(19): siRNA sense strand
ggaacagccgcguagguuu

SEQ ID NO: 1177157 - RNA, 19 nt, Homo sapiens
  misc_RNA (1)...(19): siRNA sense strand
cgggaaagaucgccagcaa

SEQ ID NO: 1177158 - RNA, 19 nt, Homo sapiens
  misc_RNA (1)...(19): siRNA sense strand
ccaaggaugagcaguuuga

SEQ ID NO: 1177159 - RNA, 19 nt, Homo sapiens
  misc_RNA (1)...(19): siRNA sense strand
gcagggaugaggcaaacaa

SEQ ID NO: 1177160 - RNA, 19 nt, Homo sapiens
  misc_RNA (1)...(19): siRNA sense strand
acaacgaccugcuguggau

SEQ ID NO: 1177161 - RNA, 19 nt, Homo sapiens
  misc_RNA (1)...(19): siRNA sense strand
gggaugaggcaaacaagau

SEQ ID NO: 1177162 - RNA, 19 nt, Homo sapiens
  misc_RNA (1)...(19): siRNA sense strand
ugaaggagagcgacuggaa

SEQ ID NO: 1177163 - RNA, 19 nt, Homo sapiens
  misc_RNA (1)...(19): siRNA sense strand
gcaaacaagaucgcagaga

SEQ ID NO: 1177164 - RNA, 19 nt, Homo sapiens
  misc_RNA (1)...(19): siRNA sense strand
cuaccuggccuccgucaaa

SEQ ID NO: 1177165 - RNA, 19 nt, Homo sapiens
  misc_RNA (1)...(19): siRNA sense strand
ucaaccagaaccucaauga

SEQ ID NO: 1177166 - RNA, 19 nt, Homo sapiens
  misc_RNA (1)...(19): siRNA sense strand
cgacaucaagucacgcauu

SEQ ID NO: 1177167 - RNA, 19 nt, Homo sapiens
  misc_RNA (1)...(19): siRNA sense strand
aaccagaaccucaaugaug

SEQ ID NO: 1177168 - RNA, 19 nt, Homo sapiens
  misc_RNA (1)...(19): siRNA sense strand
gcaacaccuucacggucaa

SEQ ID NO: 1177169 - RNA, 19 nt, Homo sapiens
  misc_RNA (1)...(19): siRNA sense strand
accagaaccucaaugaugu

SEQ ID NO: 1177170 - RNA, 19 nt, Homo sapiens
  misc_RNA (1)...(19): siRNA sense strand
aggaggagcucaucaaagc

SEQ ID NO: 1177171 - RNA, 19 nt, Homo sapiens
  misc_RNA (1)...(19): siRNA sense strand
cgaggaggagcucaucaaa

SEQ ID NO: 1177172 - RNA, 19 nt, Homo sapiens
  misc_RNA (1)...(19): siRNA sense strand
agcagugcguccagaauuu

SEQ ID NO: 1177173 - RNA, 19 nt, Homo sapiens
  misc_RNA (1)...(19): siRNA sense strand
ggaaggcagaugagaccaa

SEQ ID NO: 1177174 - RNA, 19 nt, Homo sapiens
  misc_RNA (1)...(19): siRNA sense strand
ucaaagcccagaagguguu

SEQ ID NO: 1177175 - RNA, 19 nt, Homo sapiens
  misc_RNA (1)...(19): siRNA sense strand
gaggaggagcucaucaaag

SEQ ID NO: 1177176 - RNA, 19 nt, Homo sapiens
  misc_RNA (1)...(19): siRNA sense strand
acaaggagaugagcaagcu

SEQ ID NO: 1177177 - RNA, 19 nt, Homo sapiens
  misc_RNA (1)...(19): siRNA sense strand
ggaugaggcaaacaagauc

SEQ ID NO: 1177178 - RNA, 19 nt, Homo sapiens
  misc_RNA (1)...(19): siRNA sense strand
gaaggaugaagccaaaauu

SEQ ID NO: 1177179 - RNA, 19 nt, Homo sapiens
  misc_RNA (1)...(19): siRNA sense strand
ccacuacgagucccuucaa

SEQ ID NO: 1177180 - RNA, 19 nt, Homo sapiens
  misc_RNA (1)...(19): siRNA sense strand
ggauggauuaccaccagaa

SEQ ID NO: 1177181 - RNA, 19 nt, Homo sapiens
  misc_RNA (1)...(19): siRNA sense strand
caaccagaaccucaaugau

SEQ ID NO: 1177182 - RNA, 19 nt, Homo sapiens
  misc_RNA (1)...(19): siRNA sense strand
gcagugcguccagaauuuc

SEQ ID NO: 1177183 - RNA, 19 nt, Homo sapiens
  misc_RNA (1)...(19): siRNA sense strand
caagaucgcagagaacaac

SEQ ID NO: 1177184 - RNA, 19 nt, Homo sapiens
  misc_RNA (1)...(19): siRNA sense strand
agaccaaggaugagcaguu

SEQ ID NO: 1177185 - RNA, 19 nt, Homo sapiens
  misc_RNA (1)...(19): siRNA sense strand
ugacaacgcgccugcaaaa

SEQ ID NO: 1177186 - RNA, 19 nt, Homo sapiens
  misc_RNA (1)...(19): siRNA sense strand
agaagguguuugaggagau

SEQ ID NO: 1177187 - RNA, 19 nt, Homo sapiens
  misc_RNA (1)...(19): siRNA sense strand
cacuacgagucccuucaaa

SEQ ID NO: 1177188 - RNA, 19 nt, Homo sapiens
  misc_RNA (1)...(19): siRNA sense strand
ucaacacguuccagagcau

SEQ ID NO: 1177189 - RNA, 19 nt, Homo sapiens
  misc_RNA (1)...(19): siRNA sense strand
gccagcaacgugcagaaga

SEQ ID NO: 1177190 - RNA, 19 nt, Homo sapiens
  misc_RNA (1)...(19): siRNA sense strand
cguccagaauuucaacaag

SEQ ID NO: 1177191 - RNA, 19 nt, Homo sapiens
  misc_RNA (1)...(19): siRNA sense strand
uccagaauuucaacaagca

SEQ ID NO: 1177192 - RNA, 19 nt, Homo sapiens
  misc_RNA (1)...(19): siRNA sense strand
cuacacggccacugacaca

SEQ ID NO: 1177193 - RNA, 19 nt, Homo sapiens
  misc_RNA (1)...(19): siRNA sense strand
gcucaaccagaaccucaau

SEQ ID NO: 1177194 - RNA, 19 nt, Homo sapiens
  misc_RNA (1)...(19): siRNA sense strand
uggaacagccgcguagguu

SEQ ID NO: 1177195 - RNA, 19 nt, Homo sapiens
  misc_RNA (1)...(19): siRNA sense strand
gcucaucaaagcccagaag

SEQ ID NO: 1177196 - RNA, 19 nt, Homo sapiens
  misc_RNA (1)...(19): siRNA sense strand
caaacaagaucgcagagaa

SEQ ID NO: 1177197 - RNA, 19 nt, Homo sapiens
  misc_RNA (1)...(19): siRNA sense strand
gcucaaggcuggugaugug

SEQ ID NO: 1177198 - RNA, 19 nt, Homo sapiens
  misc_RNA (1)...(19): siRNA sense strand
gaccaaggaugagcaguuu

SEQ ID NO: 1177199 - RNA, 19 nt, Homo sapiens
  misc_RNA (1)...(19): siRNA sense strand
aaagaaggaugaagccaaa

SEQ ID NO: 1177200 - RNA, 19 nt, Homo sapiens
  misc_RNA (1)...(19): siRNA sense strand
gacaucaagucacgcauug

SEQ ID NO: 1177201 - RNA, 19 nt, Homo sapiens
  misc_RNA (1)...(19): siRNA sense strand
gaacagccgcguagguuuc

SEQ ID NO: 1177202 - RNA, 19 nt, Homo sapiens
  misc_RNA (1)...(19): siRNA sense strand
cagaugagaccaaggauga

SEQ ID NO: 1177203 - RNA, 19 nt, Homo sapiens
  misc_RNA (1)...(19): siRNA sense strand
gagcagugcguccagaauu

SEQ ID NO: 1177204 - RNA, 19 nt, Homo sapiens
  misc_RNA (1)...(19): siRNA sense strand
ccagcaacgugcagaagaa

SEQ ID NO: 1177205 - RNA, 19 nt, Homo sapiens
  misc_RNA (1)...(19): siRNA sense strand
agaaggaucuccggaccua

SEQ ID NO: 1177206 - RNA, 19 nt, Homo sapiens
  misc_RNA (1)...(19): siRNA sense strand
guggagaccuucccagcaa

SEQ ID NO: 1177207 - RNA, 19 nt, Homo sapiens
  misc_RNA (1)...(19): siRNA sense strand
ggcgcaagcugguggacua

SEQ ID NO: 1177208 - RNA, 19 nt, Homo sapiens
  misc_RNA (1)...(19): siRNA sense strand
gaccugcuguggauggauu

SEQ ID NO: 1177209 - RNA, 19 nt, Homo sapiens
  misc_RNA (1)...(19): siRNA sense strand
gaagguguuugaggagaug

SEQ ID NO: 1177210 - RNA, 19 nt, Homo sapiens
  misc_RNA (1)...(19): siRNA sense strand
gcagagaugggcaguaaag

SEQ ID NO: 1177211 - RNA, 19 nt, Homo sapiens
  misc_RNA (1)...(19): siRNA sense strand
cccgagaacuucacugaga

SEQ ID NO: 1177212 - RNA, 19 nt, Homo sapiens
  misc_RNA (1)...(19): siRNA sense strand
gcaagcugguggacuacga

SEQ ID NO: 1177213 - RNA, 19 nt, Homo sapiens
  misc_RNA (1)...(19): siRNA sense strand
ggaacagccgcguagguuu

SEQ ID NO: 1177214 - RNA, 19 nt, Homo sapiens
  misc_RNA (1)...(19): siRNA sense strand
cgggaaagaucgccagcaa

SEQ ID NO: 1177215 - RNA, 19 nt, Homo sapiens
  misc_RNA (1)...(19): siRNA sense strand
ccaaggaugagcaguuuga

SEQ ID NO: 1177216 - RNA, 19 nt, Homo sapiens
  misc_RNA (1)...(19): siRNA sense strand
gcagggaugaggcaaacaa

SEQ ID NO: 1177217 - RNA, 19 nt, Homo sapiens
  misc_RNA (1)...(19): siRNA sense strand
acaacgaccugcuguggau

SEQ ID NO: 1177218 - RNA, 19 nt, Homo sapiens
  misc_RNA (1)...(19): siRNA sense strand
gggaugaggcaaacaagau

SEQ ID NO: 1177219 - RNA, 19 nt, Homo sapiens
  misc_RNA (1)...(19): siRNA sense strand
ugaaggagagcgacuggaa

SEQ ID NO: 1177220 - RNA, 19 nt, Homo sapiens
  misc_RNA (1)...(19): siRNA sense strand
gcaaacaagaucgcagaga

SEQ ID NO: 1177221 - RNA, 19 nt, Homo sapiens
  misc_RNA (1)...(19): siRNA sense strand
cuaccuggccuccgucaaa

SEQ ID NO: 1177222 - RNA, 19 nt, Homo sapiens
  misc_RNA (1)...(19): siRNA sense strand
ucaaccagaaccucaauga

SEQ ID NO: 1177223 - RNA, 19 nt, Homo sapiens
  misc_RNA (1)...(19): siRNA sense strand
cgacaucaagucacgcauu

SEQ ID NO: 1177224 - RNA, 19 nt, Homo sapiens
  misc_RNA (1)...(19): siRNA sense strand
aaccagaaccucaaugaug

SEQ ID NO: 1177225 - RNA, 19 nt, Homo sapiens
  misc_RNA (1)...(19): siRNA sense strand
gcaacaccuucacggucaa

SEQ ID NO: 1177226 - RNA, 19 nt, Homo sapiens
  misc_RNA (1)...(19): siRNA sense strand
accagaaccucaaugaugu

SEQ ID NO: 1177227 - RNA, 19 nt, Homo sapiens
  misc_RNA (1)...(19): siRNA sense strand
aggaggagcucaucaaagc

SEQ ID NO: 1177228 - RNA, 19 nt, Homo sapiens
  misc_RNA (1)...(19): siRNA sense strand
cgaggaggagcucaucaaa

SEQ ID NO: 1177229 - RNA, 19 nt, Homo sapiens
  misc_RNA (1)...(19): siRNA sense strand
agcagugcguccagaauuu

SEQ ID NO: 1177230 - RNA, 19 nt, Homo sapiens
  misc_RNA (1)...(19): siRNA sense strand
ggaaggcagaugagaccaa

SEQ ID NO: 1177231 - RNA, 19 nt, Homo sapiens
  misc_RNA (1)...(19): siRNA sense strand
ucaaagcccagaagguguu

SEQ ID NO: 1177232 - RNA, 19 nt, Homo sapiens
  misc_RNA (1)...(19): siRNA sense strand
gaggaggagcucaucaaag

SEQ ID NO: 1177233 - RNA, 19 nt, Homo sapiens
  misc_RNA (1)...(19): siRNA sense strand
acaaggagaugagcaagcu

SEQ ID NO: 1177234 - RNA, 19 nt, Homo sapiens
  misc_RNA (1)...(19): siRNA sense strand
ggaugaggcaaacaagauc

SEQ ID NO: 1177235 - RNA, 19 nt, Homo sapiens
  misc_RNA (1)...(19): siRNA sense strand
gaaggaugaagccaaaauu

SEQ ID NO: 1177236 - RNA, 19 nt, Homo sapiens
  misc_RNA (1)...(19): siRNA sense strand
ccacuacgagucccuucaa

SEQ ID NO: 1177237 - RNA, 19 nt, Homo sapiens
  misc_RNA (1)...(19): siRNA sense strand
ggauggauuaccaccagaa

SEQ ID NO: 1177238 - RNA, 19 nt, Homo sapiens
  misc_RNA (1)...(19): siRNA sense strand
caaccagaaccucaaugau

SEQ ID NO: 1177239 - RNA, 19 nt, Homo sapiens
  misc_RNA (1)...(19): siRNA sense strand
gcagugcguccagaauuuc

SEQ ID NO: 1177240 - RNA, 19 nt, Homo sapiens
  misc_RNA (1)...(19): siRNA sense strand
caagaucgcagagaacaac

SEQ ID NO: 1177241 - RNA, 19 nt, Homo sapiens
  misc_RNA (1)...(19): siRNA sense strand
agaccaaggaugagcaguu

SEQ ID NO: 1177242 - RNA, 19 nt, Homo sapiens
  misc_RNA (1)...(19): siRNA sense strand
ugacaacgcgccugcaaaa

SEQ ID NO: 1177243 - RNA, 19 nt, Homo sapiens
  misc_RNA (1)...(19): siRNA sense strand
agaagguguuugaggagau

SEQ ID NO: 1177244 - RNA, 19 nt, Homo sapiens
  misc_RNA (1)...(19): siRNA sense strand
cacuacgagucccuucaaa

SEQ ID NO: 1177245 - RNA, 19 nt, Homo sapiens
  misc_RNA (1)...(19): siRNA sense strand
ucaacacguuccagagcau

SEQ ID NO: 1177246 - RNA, 19 nt, Homo sapiens
  misc_RNA (1)...(19): siRNA sense strand
gccagcaacgugcagaaga

SEQ ID NO: 1177247 - RNA, 19 nt, Homo sapiens
  misc_RNA (1)...(19): siRNA sense strand
cguccagaauuucaacaag

SEQ ID NO: 1177248 - RNA, 19 nt, Homo sapiens
  misc_RNA (1)...(19): siRNA sense strand
uccagaauuucaacaagca

SEQ ID NO: 1177249 - RNA, 19 nt, Homo sapiens
  misc_RNA (1)...(19): siRNA sense strand
cuacacggccacugacaca

SEQ ID NO: 1177250 - RNA, 19 nt, Homo sapiens
  misc_RNA (1)...(19): siRNA sense strand
gcucaaccagaaccucaau

SEQ ID NO: 1177251 - RNA, 19 nt, Homo sapiens
  misc_RNA (1)...(19): siRNA sense strand
uggaacagccgcguagguu

SEQ ID NO: 1177252 - RNA, 19 nt, Homo sapiens
  misc_RNA (1)...(19): siRNA sense strand
gcucaucaaagcccagaag

SEQ ID NO: 1177253 - RNA, 19 nt, Homo sapiens
  misc_RNA (1)...(19): siRNA sense strand
caaacaagaucgcagagaa

SEQ ID NO: 1177254 - RNA, 19 nt, Homo sapiens
  misc_RNA (1)...(19): siRNA sense strand
gcucaaggcuggugaugug

SEQ ID NO: 1177255 - RNA, 19 nt, Homo sapiens
  misc_RNA (1)...(19): siRNA sense strand
gaccaaggaugagcaguuu

SEQ ID NO: 1177256 - RNA, 19 nt, Homo sapiens
  misc_RNA (1)...(19): siRNA sense strand
aaagaaggaugaagccaaa

SEQ ID NO: 1177257 - RNA, 19 nt, Homo sapiens
  misc_RNA (1)...(19): siRNA sense strand
gacaucaagucacgcauug

SEQ ID NO: 1177258 - RNA, 19 nt, Homo sapiens
  misc_RNA (1)...(19): siRNA sense strand
gaacagccgcguagguuuc

SEQ ID NO: 1177259 - RNA, 19 nt, Homo sapiens
  misc_RNA (1)...(19): siRNA sense strand
cagaugagaccaaggauga

SEQ ID NO: 1177260 - RNA, 19 nt, Homo sapiens
  misc_RNA (1)...(19): siRNA sense strand
gagcagugcguccagaauu

SEQ ID NO: 1177261 - RNA, 19 nt, Homo sapiens
  misc_RNA (1)...(19): siRNA sense strand
ccagcaacgugcagaagaa

SEQ ID NO: 1177262 - RNA, 19 nt, Homo sapiens
  misc_RNA (1)...(19): siRNA sense strand
agaaggaucuccggaccua

SEQ ID NO: 1177263 - RNA, 19 nt, Homo sapiens
  misc_RNA (1)...(19): siRNA sense strand
guggagaccuucccagcaa

SEQ ID NO: 1177264 - RNA, 19 nt, Homo sapiens
  misc_RNA (1)...(19): siRNA sense strand
ggcgcaagcugguggacua

SEQ ID NO: 1177265 - RNA, 19 nt, Homo sapiens
  misc_RNA (1)...(19): siRNA sense strand
gaccugcuguggauggauu

SEQ ID NO: 1177266 - RNA, 19 nt, Homo sapiens
  misc_RNA (1)...(19): siRNA sense strand
gaagguguuugaggagaug

SEQ ID NO: 1177267 - RNA, 19 nt, Homo sapiens
  misc_RNA (1)...(19): siRNA sense strand
gcagagaugggcaguaaag

SEQ ID NO: 1177268 - RNA, 19 nt, Homo sapiens
  misc_RNA (1)...(19): siRNA sense strand
cccgagaacuucacugaga

SEQ ID NO: 1177269 - RNA, 19 nt, Homo sapiens
  misc_RNA (1)...(19): siRNA sense strand
gcaagcugguggacuacga

SEQ ID NO: 1177270 - RNA, 19 nt, Homo sapiens
  misc_RNA (1)...(19): siRNA sense strand
ggaacagccgcguagguuu

SEQ ID NO: 1177271 - RNA, 19 nt, Homo sapiens
  misc_RNA (1)...(19): siRNA sense strand
cgggaaagaucgccagcaa

SEQ ID NO: 1177272 - RNA, 19 nt, Homo sapiens
  misc_RNA (1)...(19): siRNA sense strand
ccaaggaugagcaguuuga

SEQ ID NO: 1177273 - RNA, 19 nt, Homo sapiens
  misc_RNA (1)...(19): siRNA sense strand
gcagggaugaggcaaacaa

SEQ ID NO: 1177274 - RNA, 19 nt, Homo sapiens
  misc_RNA (1)...(19): siRNA sense strand
acaacgaccugcuguggau

SEQ ID NO: 1177275 - RNA, 19 nt, Homo sapiens
  misc_RNA (1)...(19): siRNA sense strand
gggaugaggcaaacaagau

SEQ ID NO: 1177276 - RNA, 19 nt, Homo sapiens
  misc_RNA (1)...(19): siRNA sense strand
ugaaggagagcgacuggaa

SEQ ID NO: 1177277 - RNA, 19 nt, Homo sapiens
  misc_RNA (1)...(19): siRNA sense strand
gcaaacaagaucgcagaga

SEQ ID NO: 1177278 - RNA, 19 nt, Homo sapiens
  misc_RNA (1)...(19): siRNA sense strand
cuaccuggccuccgucaaa

SEQ ID NO: 1177279 - RNA, 19 nt, Homo sapiens
  misc_RNA (1)...(19): siRNA sense strand
ucaaccagaaccucaauga

SEQ ID NO: 1177280 - RNA, 19 nt, Homo sapiens
  misc_RNA (1)...(19): siRNA sense strand
cgacaucaagucacgcauu

SEQ ID NO: 1177281 - RNA, 19 nt, Homo sapiens
  misc_RNA (1)...(19): siRNA sense strand
aaccagaaccucaaugaug

SEQ ID NO: 1177282 - RNA, 19 nt, Homo sapiens
  misc_RNA (1)...(19): siRNA sense strand
gcaacaccuucacggucaa

SEQ ID NO: 1177283 - RNA, 19 nt, Homo sapiens
  misc_RNA (1)...(19): siRNA sense strand
accagaaccucaaugaugu

SEQ ID NO: 1177284 - RNA, 19 nt, Homo sapiens
  misc_RNA (1)...(19): siRNA sense strand
aggaggagcucaucaaagc

SEQ ID NO: 1177285 - RNA, 19 nt, Homo sapiens
  misc_RNA (1)...(19): siRNA sense strand
cgaggaggagcucaucaaa

SEQ ID NO: 1177286 - RNA, 19 nt, Homo sapiens
  misc_RNA (1)...(19): siRNA sense strand
agcagugcguccagaauuu

SEQ ID NO: 1177287 - RNA, 19 nt, Homo sapiens
  misc_RNA (1)...(19): siRNA sense strand
ggaaggcagaugagaccaa

SEQ ID NO: 1177288 - RNA, 19 nt, Homo sapiens
  misc_RNA (1)...(19): siRNA sense strand
ucaaagcccagaagguguu

SEQ ID NO: 1177289 - RNA, 19 nt, Homo sapiens
  misc_RNA (1)...(19): siRNA sense strand
gaggaggagcucaucaaag

SEQ ID NO: 1177290 - RNA, 19 nt, Homo sapiens
  misc_RNA (1)...(19): siRNA sense strand
acaaggagaugagcaagcu

SEQ ID NO: 1177291 - RNA, 19 nt, Homo sapiens
  misc_RNA (1)...(19): siRNA sense strand
ggaugaggcaaacaagauc

SEQ ID NO: 1177292 - RNA, 19 nt, Homo sapiens
  misc_RNA (1)...(19): siRNA sense strand
gaaggaugaagccaaaauu

SEQ ID NO: 1177293 - RNA, 19 nt, Homo sapiens
  misc_RNA (1)...(19): siRNA sense strand
ccacuacgagucccuucaa

SEQ ID NO: 1177294 - RNA, 19 nt, Homo sapiens
  misc_RNA (1)...(19): siRNA sense strand
ggauggauuaccaccagaa

SEQ ID NO: 1177295 - RNA, 19 nt, Homo sapiens
  misc_RNA (1)...(19): siRNA sense strand
caaccagaaccucaaugau

SEQ ID NO: 1177296 - RNA, 19 nt, Homo sapiens
  misc_RNA (1)...(19): siRNA sense strand
gcagugcguccagaauuuc

SEQ ID NO: 1177297 - RNA, 19 nt, Homo sapiens
  misc_RNA (1)...(19): siRNA sense strand
caagaucgcagagaacaac

SEQ ID NO: 1177298 - RNA, 19 nt, Homo sapiens
  misc_RNA (1)...(19): siRNA sense strand
agaccaaggaugagcaguu

SEQ ID NO: 1177299 - RNA, 19 nt, Homo sapiens
  misc_RNA (1)...(19): siRNA sense strand
ugacaacgcgccugcaaaa

SEQ ID NO: 1177300 - RNA, 19 nt, Homo sapiens
  misc_RNA (1)...(19): siRNA sense strand
agaagguguuugaggagau

SEQ ID NO: 1177301 - RNA, 19 nt, Homo sapiens
  misc_RNA (1)...(19): siRNA sense strand
cacuacgagucccuucaaa

SEQ ID NO: 1177302 - RNA, 19 nt, Homo sapiens
  misc_RNA (1)...(19): siRNA sense strand
ucaacacguuccagagcau

SEQ ID NO: 1177303 - RNA, 19 nt, Homo sapiens
  misc_RNA (1)...(19): siRNA sense strand
gccagcaacgugcagaaga

SEQ ID NO: 1177304 - RNA, 19 nt, Homo sapiens
  misc_RNA (1)...(19): siRNA sense strand
cguccagaauuucaacaag

SEQ ID NO: 1177305 - RNA, 19 nt, Homo sapiens
  misc_RNA (1)...(19): siRNA sense strand
uccagaauuucaacaagca

SEQ ID NO: 1177306 - RNA, 19 nt, Homo sapiens
  misc_RNA (1)...(19): siRNA sense strand
cuacacggccacugacaca

SEQ ID NO: 1177307 - RNA, 19 nt, Homo sapiens
  misc_RNA (1)...(19): siRNA sense strand
gcucaaccagaaccucaau

SEQ ID NO: 1177308 - RNA, 19 nt, Homo sapiens
  misc_RNA (1)...(19): siRNA sense strand
uggaacagccgcguagguu

SEQ ID NO: 1177309 - RNA, 19 nt, Homo sapiens
  misc_RNA (1)...(19): siRNA sense strand
gcucaucaaagcccagaag

SEQ ID NO: 1177310 - RNA, 19 nt, Homo sapiens
  misc_RNA (1)...(19): siRNA sense strand
caaacaagaucgcagagaa

SEQ ID NO: 1177311 - RNA, 19 nt, Homo sapiens
  misc_RNA (1)...(19): siRNA sense strand
gcucaaggcuggugaugug

SEQ ID NO: 1177312 - RNA, 19 nt, Homo sapiens
  misc_RNA (1)...(19): siRNA sense strand
gaccaaggaugagcaguuu

SEQ ID NO: 1177313 - RNA, 19 nt, Homo sapiens
  misc_RNA (1)...(19): siRNA sense strand
aaagaaggaugaagccaaa

SEQ ID NO: 1177314 - RNA, 19 nt, Homo sapiens
  misc_RNA (1)...(19): siRNA sense strand
gacaucaagucacgcauug

SEQ ID NO: 1177315 - RNA, 19 nt, Homo sapiens
  misc_RNA (1)...(19): siRNA sense strand
gaacagccgcguagguuuc

SEQ ID NO: 1177316 - RNA, 19 nt, Homo sapiens
  misc_RNA (1)...(19): siRNA sense strand
cagaugagaccaaggauga

SEQ ID NO: 1177317 - RNA, 19 nt, Homo sapiens
  misc_RNA (1)...(19): siRNA sense strand
gagcagugcguccagaauu

SEQ ID NO: 1177318 - RNA, 19 nt, Homo sapiens
  misc_RNA (1)...(19): siRNA sense strand
ccagcaacgugcagaagaa

SEQ ID NO: 1177319 - RNA, 19 nt, Homo sapiens
  misc_RNA (1)...(19): siRNA sense strand
agaaggaucuccggaccua

SEQ ID NO: 1177320 - RNA, 19 nt, Homo sapiens
  misc_RNA (1)...(19): siRNA sense strand
guggagaccuucccagcaa

SEQ ID NO: 1177321 - RNA, 19 nt, Homo sapiens
  misc_RNA (1)...(19): siRNA sense strand
ggcgcaagcugguggacua

SEQ ID NO: 1177322 - RNA, 19 nt, Homo sapiens
  misc_RNA (1)...(19): siRNA sense strand
gaccugcuguggauggauu

SEQ ID NO: 1177323 - RNA, 19 nt, Homo sapiens
  misc_RNA (1)...(19): siRNA sense strand
gaagguguuugaggagaug

SEQ ID NO: 1177324 - RNA, 19 nt, Homo sapiens
  misc_RNA (1)...(19): siRNA sense strand
gcagagaugggcaguaaag

SEQ ID NO: 1177325 - RNA, 19 nt, Homo sapiens
  misc_RNA (1)...(19): siRNA sense strand
cccgagaacuucacugaga

SEQ ID NO: 1177326 - RNA, 19 nt, Homo sapiens
  misc_RNA (1)...(19): siRNA sense strand
gcaagcugguggacuacga

SEQ ID NO: 1177327 - RNA, 19 nt, Homo sapiens
  misc_RNA (1)...(19): siRNA sense strand
ggaacagccgcguagguuu

SEQ ID NO: 1177328 - RNA, 19 nt, Homo sapiens
  misc_RNA (1)...(19): siRNA sense strand
cgggaaagaucgccagcaa

SEQ ID NO: 1177329 - RNA, 19 nt, Homo sapiens
  misc_RNA (1)...(19): siRNA sense strand
ccaaggaugagcaguuuga

SEQ ID NO: 1177330 - RNA, 19 nt, Homo sapiens
  misc_RNA (1)...(19): siRNA sense strand
gcagggaugaggcaaacaa

SEQ ID NO: 1177331 - RNA, 19 nt, Homo sapiens
  misc_RNA (1)...(19): siRNA sense strand
acaacgaccugcuguggau

SEQ ID NO: 1177332 - RNA, 19 nt, Homo sapiens
  misc_RNA (1)...(19): siRNA sense strand
gggaugaggcaaacaagau

SEQ ID NO: 1177333 - RNA, 19 nt, Homo sapiens
  misc_RNA (1)...(19): siRNA sense strand
ugaaggagagcgacuggaa

SEQ ID NO: 1177334 - RNA, 19 nt, Homo sapiens
  misc_RNA (1)...(19): siRNA sense strand
gcaaacaagaucgcagaga

SEQ ID NO: 1177335 - RNA, 19 nt, Homo sapiens
  misc_RNA (1)...(19): siRNA sense strand
cuaccuggccuccgucaaa

SEQ ID NO: 1177336 - RNA, 19 nt, Homo sapiens
  misc_RNA (1)...(19): siRNA sense strand
ucaaccagaaccucaauga

SEQ ID NO: 1177337 - RNA, 19 nt, Homo sapiens
  misc_RNA (1)...(19): siRNA sense strand
cgacaucaagucacgcauu

SEQ ID NO: 1177338 - RNA, 19 nt, Homo sapiens
  misc_RNA (1)...(19): siRNA sense strand
aaccagaaccucaaugaug

SEQ ID NO: 1177339 - RNA, 19 nt, Homo sapiens
  misc_RNA (1)...(19): siRNA sense strand
gcaacaccuucacggucaa

SEQ ID NO: 1177340 - RNA, 19 nt, Homo sapiens
  misc_RNA (1)...(19): siRNA sense strand
accagaaccucaaugaugu

SEQ ID NO: 1177341 - RNA, 19 nt, Homo sapiens
  misc_RNA (1)...(19): siRNA sense strand
aggaggagcucaucaaagc

SEQ ID NO: 1177342 - RNA, 19 nt, Homo sapiens
  misc_RNA (1)...(19): siRNA sense strand
cgaggaggagcucaucaaa

SEQ ID NO: 1177343 - RNA, 19 nt, Homo sapiens
  misc_RNA (1)...(19): siRNA sense strand
agcagugcguccagaauuu

SEQ ID NO: 1177344 - RNA, 19 nt, Homo sapiens
  misc_RNA (1)...(19): siRNA sense strand
ggaaggcagaugagaccaa

SEQ ID NO: 1177345 - RNA, 19 nt, Homo sapiens
  misc_RNA (1)...(19): siRNA sense strand
ucaaagcccagaagguguu

SEQ ID NO: 1177346 - RNA, 19 nt, Homo sapiens
  misc_RNA (1)...(19): siRNA sense strand
gaggaggagcucaucaaag

SEQ ID NO: 1177347 - RNA, 19 nt, Homo sapiens
  misc_RNA (1)...(19): siRNA sense strand
acaaggagaugagcaagcu

SEQ ID NO: 1177348 - RNA, 19 nt, Homo sapiens
  misc_RNA (1)...(19): siRNA sense strand
ggaugaggcaaacaagauc

SEQ ID NO: 1177349 - RNA, 19 nt, Homo sapiens
  misc_RNA (1)...(19): siRNA sense strand
gaaggaugaagccaaaauu

SEQ ID NO: 1177350 - RNA, 19 nt, Homo sapiens
  misc_RNA (1)...(19): siRNA sense strand
ccacuacgagucccuucaa

SEQ ID NO: 1177351 - RNA, 19 nt, Homo sapiens
  misc_RNA (1)...(19): siRNA sense strand
ggauggauuaccaccagaa

SEQ ID NO: 1177352 - RNA, 19 nt, Homo sapiens
  misc_RNA (1)...(19): siRNA sense strand
caaccagaaccucaaugau

SEQ ID NO: 1177353 - RNA, 19 nt, Homo sapiens
  misc_RNA (1)...(19): siRNA sense strand
gcagugcguccagaauuuc

SEQ ID NO: 1177354 - RNA, 19 nt, Homo sapiens
  misc_RNA (1)...(19): siRNA sense strand
caagaucgcagagaacaac

SEQ ID NO: 1177355 - RNA, 19 nt, Homo sapiens
  misc_RNA (1)...(19): siRNA sense strand
agaccaaggaugagcaguu

SEQ ID NO: 1177356 - RNA, 19 nt, Homo sapiens
  misc_RNA (1)...(19): siRNA sense strand
ugacaacgcgccugcaaaa

SEQ ID NO: 1177357 - RNA, 19 nt, Homo sapiens
  misc_RNA (1)...(19): siRNA sense strand
agaagguguuugaggagau

SEQ ID NO: 1177358 - RNA, 19 nt, Homo sapiens
  misc_RNA (1)...(19): siRNA sense strand
cacuacgagucccuucaaa

SEQ ID NO: 1177359 - RNA, 19 nt, Homo sapiens
  misc_RNA (1)...(19): siRNA sense strand
ucaacacguuccagagcau

SEQ ID NO: 1177360 - RNA, 19 nt, Homo sapiens
  misc_RNA (1)...(19): siRNA sense strand
gccagcaacgugcagaaga

SEQ ID NO: 1177361 - RNA, 19 nt, Homo sapiens
  misc_RNA (1)...(19): siRNA sense strand
cguccagaauuucaacaag

SEQ ID NO: 1177362 - RNA, 19 nt, Homo sapiens
  misc_RNA (1)...(19): siRNA sense strand
uccagaauuucaacaagca

SEQ ID NO: 1177363 - RNA, 19 nt, Homo sapiens
  misc_RNA (1)...(19): siRNA sense strand
cuacacggccacugacaca

SEQ ID NO: 1177364 - RNA, 19 nt, Homo sapiens
  misc_RNA (1)...(19): siRNA sense strand
gcucaaccagaaccucaau

SEQ ID NO: 1177365 - RNA, 19 nt, Homo sapiens
  misc_RNA (1)...(19): siRNA sense strand
uggaacagccgcguagguu

SEQ ID NO: 1177366 - RNA, 19 nt, Homo sapiens
  misc_RNA (1)...(19): siRNA sense strand
gcucaucaaagcccagaag

SEQ ID NO: 1177367 - RNA, 19 nt, Homo sapiens
  misc_RNA (1)...(19): siRNA sense strand
caaacaagaucgcagagaa

SEQ ID NO: 1177368 - RNA, 19 nt, Homo sapiens
  misc_RNA (1)...(19): siRNA sense strand
gcucaaggcuggugaugug

SEQ ID NO: 1177369 - RNA, 19 nt, Homo sapiens
  misc_RNA (1)...(19): siRNA sense strand
gaccaaggaugagcaguuu

SEQ ID NO: 1177370 - RNA, 19 nt, Homo sapiens
  misc_RNA (1)...(19): siRNA sense strand
aaagaaggaugaagccaaa

SEQ ID NO: 1177371 - RNA, 19 nt, Homo sapiens
  misc_RNA (1)...(19): siRNA sense strand
gacaucaagucacgcauug

SEQ ID NO: 1177372 - RNA, 19 nt, Homo sapiens
  misc_RNA (1)...(19): siRNA sense strand
gaacagccgcguagguuuc

SEQ ID NO: 1177373 - RNA, 19 nt, Homo sapiens
  misc_RNA (1)...(19): siRNA sense strand
cagaugagaccaaggauga

SEQ ID NO: 1177374 - RNA, 19 nt, Homo sapiens
  misc_RNA (1)...(19): siRNA sense strand
gagcagugcguccagaauu

SEQ ID NO: 1177375 - RNA, 19 nt, Homo sapiens
  misc_RNA (1)...(19): siRNA sense strand
ccagcaacgugcagaagaa

SEQ ID NO: 1177376 - RNA, 19 nt, Homo sapiens
  misc_RNA (1)...(19): siRNA sense strand
agaaggaucuccggaccua

SEQ ID NO: 1177377 - RNA, 19 nt, Homo sapiens
  misc_RNA (1)...(19): siRNA sense strand
guggagaccuucccagcaa

SEQ ID NO: 1177378 - RNA, 19 nt, Homo sapiens
  misc_RNA (1)...(19): siRNA sense strand
ggcgcaagcugguggacua

SEQ ID NO: 1177379 - RNA, 19 nt, Homo sapiens
  misc_RNA (1)...(19): siRNA sense strand
gaccugcuguggauggauu

SEQ ID NO: 1177380 - RNA, 19 nt, Homo sapiens
  misc_RNA (1)...(19): siRNA sense strand
gaagguguuugaggagaug

SEQ ID NO: 1177381 - RNA, 19 nt, Homo sapiens
  misc_RNA (1)...(19): siRNA sense strand
gcagagaugggcaguaaag

SEQ ID NO: 1177382 - RNA, 19 nt, Homo sapiens
  misc_RNA (1)...(19): siRNA sense strand
cccgagaacuucacugaga

SEQ ID NO: 1177383 - RNA, 19 nt, Homo sapiens
  misc_RNA (1)...(19): siRNA sense strand
gcaagcugguggacuacga

SEQ ID NO: 1177384 - RNA, 19 nt, Homo sapiens
  misc_RNA (1)...(19): siRNA sense strand
ggaacagccgcguagguuu

SEQ ID NO: 1177385 - RNA, 19 nt, Homo sapiens
  misc_RNA (1)...(19): siRNA sense strand
cgggaaagaucgccagcaa

SEQ ID NO: 1177386 - RNA, 19 nt, Homo sapiens
  misc_RNA (1)...(19): siRNA sense strand
ccaaggaugagcaguuuga

SEQ ID NO: 1177387 - RNA, 19 nt, Homo sapiens
  misc_RNA (1)...(19): siRNA sense strand
gcagggaugaggcaaacaa

SEQ ID NO: 1177388 - RNA, 19 nt, Homo sapiens
  misc_RNA (1)...(19): siRNA sense strand
acaacgaccugcuguggau

SEQ ID NO: 1177389 - RNA, 19 nt, Homo sapiens
  misc_RNA (1)...(19): siRNA sense strand
gggaugaggcaaacaagau

SEQ ID NO: 1177390 - RNA, 19 nt, Homo sapiens
  misc_RNA (1)...(19): siRNA sense strand
ugaaggagagcgacuggaa

SEQ ID NO: 1177391 - RNA, 19 nt, Homo sapiens
  misc_RNA (1)...(19): siRNA sense strand
gcaaacaagaucgcagaga

SEQ ID NO: 1177392 - RNA, 19 nt, Homo sapiens
  misc_RNA (1)...(19): siRNA sense strand
cuaccuggccuccgucaaa

SEQ ID NO: 1177393 - RNA, 19 nt, Homo sapiens
  misc_RNA (1)...(19): siRNA sense strand
ucaaccagaaccucaauga

SEQ ID NO: 1177394 - RNA, 19 nt, Homo sapiens
  misc_RNA (1)...(19): siRNA sense strand
cgacaucaagucacgcauu

SEQ ID NO: 1177395 - RNA, 19 nt, Homo sapiens
  misc_RNA (1)...(19): siRNA sense strand
aaccagaaccucaaugaug

SEQ ID NO: 1177396 - RNA, 19 nt, Homo sapiens
  misc_RNA (1)...(19): siRNA sense strand
gcaacaccuucacggucaa

SEQ ID NO: 1177397 - RNA, 19 nt, Homo sapiens
  misc_RNA (1)...(19): siRNA sense strand
accagaaccucaaugaugu

SEQ ID NO: 1177398 - RNA, 19 nt, Homo sapiens
  misc_RNA (1)...(19): siRNA sense strand
aggaggagcucaucaaagc

SEQ ID NO: 1177399 - RNA, 19 nt, Homo sapiens
  misc_RNA (1)...(19): siRNA sense strand
cgaggaggagcucaucaaa

SEQ ID NO: 1177400 - RNA, 19 nt, Homo sapiens
  misc_RNA (1)...(19): siRNA sense strand
agcagugcguccagaauuu

SEQ ID NO: 1177401 - RNA, 19 nt, Homo sapiens
  misc_RNA (1)...(19): siRNA sense strand
ggaaggcagaugagaccaa

SEQ ID NO: 1177402 - RNA, 19 nt, Homo sapiens
  misc_RNA (1)...(19): siRNA sense strand
ucaaagcccagaagguguu

SEQ ID NO: 1177403 - RNA, 19 nt, Homo sapiens
  misc_RNA (1)...(19): siRNA sense strand
gaggaggagcucaucaaag

SEQ ID NO: 1177404 - RNA, 19 nt, Homo sapiens
  misc_RNA (1)...(19): siRNA sense strand
acaaggagaugagcaagcu

SEQ ID NO: 1177405 - RNA, 19 nt, Homo sapiens
  misc_RNA (1)...(19): siRNA sense strand
ggaugaggcaaacaagauc

SEQ ID NO: 1177406 - RNA, 19 nt, Homo sapiens
  misc_RNA (1)...(19): siRNA sense strand
gaaggaugaagccaaaauu

SEQ ID NO: 1177407 - RNA, 19 nt, Homo sapiens
  misc_RNA (1)...(19): siRNA sense strand
ccacuacgagucccuucaa

SEQ ID NO: 1177408 - RNA, 19 nt, Homo sapiens
  misc_RNA (1)...(19): siRNA sense strand
ggauggauuaccaccagaa

SEQ ID NO: 1177409 - RNA, 19 nt, Homo sapiens
  misc_RNA (1)...(19): siRNA sense strand
caaccagaaccucaaugau

SEQ ID NO: 1177410 - RNA, 19 nt, Homo sapiens
  misc_RNA (1)...(19): siRNA sense strand
gcagugcguccagaauuuc

SEQ ID NO: 1177411 - RNA, 19 nt, Homo sapiens
  misc_RNA (1)...(19): siRNA sense strand
caagaucgcagagaacaac

SEQ ID NO: 1177412 - RNA, 19 nt, Homo sapiens
  misc_RNA (1)...(19): siRNA sense strand
agaccaaggaugagcaguu

SEQ ID NO: 1177413 - RNA, 19 nt, Homo sapiens
  misc_RNA (1)...(19): siRNA sense strand
ugacaacgcgccugcaaaa

SEQ ID NO: 1177414 - RNA, 19 nt, Homo sapiens
  misc_RNA (1)...(19): siRNA sense strand
agaagguguuugaggagau

SEQ ID NO: 1177415 - RNA, 19 nt, Homo sapiens
  misc_RNA (1)...(19): siRNA sense strand
cacuacgagucccuucaaa

SEQ ID NO: 1177416 - RNA, 19 nt, Homo sapiens
  misc_RNA (1)...(19): siRNA sense strand
ucaacacguuccagagcau

SEQ ID NO: 1177417 - RNA, 19 nt, Homo sapiens
  misc_RNA (1)...(19): siRNA sense strand
gccagcaacgugcagaaga

SEQ ID NO: 1177418 - RNA, 19 nt, Homo sapiens
  misc_RNA (1)...(19): siRNA sense strand
cguccagaauuucaacaag

SEQ ID NO: 1177419 - RNA, 19 nt, Homo sapiens
  misc_RNA (1)...(19): siRNA sense strand
uccagaauuucaacaagca

SEQ ID NO: 1177420 - RNA, 19 nt, Homo sapiens
  misc_RNA (1)...(19): siRNA sense strand
cuacacggccacugacaca

SEQ ID NO: 1177421 - RNA, 19 nt, Homo sapiens
  misc_RNA (1)...(19): siRNA sense strand
gcucaaccagaaccucaau

SEQ ID NO: 1177422 - RNA, 19 nt, Homo sapiens
  misc_RNA (1)...(19): siRNA sense strand
uggaacagccgcguagguu

SEQ ID NO: 1177423 - RNA, 19 nt, Homo sapiens
  misc_RNA (1)...(19): siRNA sense strand
gcucaucaaagcccagaag

SEQ ID NO: 1177424 - RNA, 19 nt, Homo sapiens
  misc_RNA (1)...(19): siRNA sense strand
caaacaagaucgcagagaa

SEQ ID NO: 1177425 - RNA, 19 nt, Homo sapiens
  misc_RNA (1)...(19): siRNA sense strand
gcucaaggcuggugaugug

SEQ ID NO: 1177426 - RNA, 19 nt, Homo sapiens
  misc_RNA (1)...(19): siRNA sense strand
gaccaaggaugagcaguuu

SEQ ID NO: 1177427 - RNA, 19 nt, Homo sapiens
  misc_RNA (1)...(19): siRNA sense strand
aaagaaggaugaagccaaa

SEQ ID NO: 1177428 - RNA, 19 nt, Homo sapiens
  misc_RNA (1)...(19): siRNA sense strand
gacaucaagucacgcauug

SEQ ID NO: 1177429 - RNA, 19 nt, Homo sapiens
  misc_RNA (1)...(19): siRNA sense strand
gaacagccgcguagguuuc

SEQ ID NO: 1177430 - RNA, 19 nt, Homo sapiens
  misc_RNA (1)...(19): siRNA sense strand
cagaugagaccaaggauga

SEQ ID NO: 1177431 - RNA, 19 nt, Homo sapiens
  misc_RNA (1)...(19): siRNA sense strand
gagcagugcguccagaauu

SEQ ID NO: 1177432 - RNA, 19 nt, Homo sapiens
  misc_RNA (1)...(19): siRNA sense strand
ccagcaacgugcagaagaa

SEQ ID NO: 1177433 - RNA, 19 nt, Homo sapiens
  misc_RNA (1)...(19): siRNA sense strand
agaaggaucuccggaccua

SEQ ID NO: 1177434 - RNA, 19 nt, Homo sapiens
  misc_RNA (1)...(19): siRNA sense strand
guggagaccuucccagcaa

SEQ ID NO: 1177435 - RNA, 19 nt, Homo sapiens
  misc_RNA (1)...(19): siRNA sense strand
ggcgcaagcugguggacua

SEQ ID NO: 1177436 - RNA, 19 nt, Homo sapiens
  misc_RNA (1)...(19): siRNA sense strand
gaccugcuguggauggauu

SEQ ID NO: 1177437 - RNA, 19 nt, Homo sapiens
  misc_RNA (1)...(19): siRNA sense strand
gaagguguuugaggagaug

SEQ ID NO: 1177438 - RNA, 19 nt, Homo sapiens
  misc_RNA (1)...(19): siRNA sense strand
gcagagaugggcaguaaag

SEQ ID NO: 1177439 - RNA, 19 nt, Homo sapiens
  misc_RNA (1)...(19): siRNA sense strand
cccgagaacuucacugaga

SEQ ID NO: 1177440 - RNA, 19 nt, Homo sapiens
  misc_RNA (1)...(19): siRNA sense strand
gcaagcugguggacuacga

SEQ ID NO: 1177441 - RNA, 19 nt, Homo sapiens
  misc_RNA (1)...(19): siRNA sense strand
ggaacagccgcguagguuu

SEQ ID NO: 1177442 - RNA, 19 nt, Homo sapiens
  misc_RNA (1)...(19): siRNA sense strand
cgggaaagaucgccagcaa

SEQ ID NO: 1177443 - RNA, 19 nt, Homo sapiens
  misc_RNA (1)...(19): siRNA sense strand
ccaaggaugagcaguuuga

SEQ ID NO: 1177444 - RNA, 19 nt, Homo sapiens
  misc_RNA (1)...(19): siRNA sense strand
gcagggaugaggcaaacaa

SEQ ID NO: 1177445 - RNA, 19 nt, Homo sapiens
  misc_RNA (1)...(19): siRNA sense strand
acaacgaccugcuguggau

SEQ ID NO: 1177446 - RNA, 19 nt, Homo sapiens
  misc_RNA (1)...(19): siRNA sense strand
gggaugaggcaaacaagau

SEQ ID NO: 1177447 - RNA, 19 nt, Homo sapiens
  misc_RNA (1)...(19): siRNA sense strand
ugaaggagagcgacuggaa

SEQ ID NO: 1177448 - RNA, 19 nt, Homo sapiens
  misc_RNA (1)...(19): siRNA sense strand
gcaaacaagaucgcagaga

SEQ ID NO: 1177449 - RNA, 19 nt, Homo sapiens
  misc_RNA (1)...(19): siRNA sense strand
cuaccuggccuccgucaaa

SEQ ID NO: 1177450 - RNA, 19 nt, Homo sapiens
  misc_RNA (1)...(19): siRNA sense strand
ucaaccagaaccucaauga

SEQ ID NO: 1177451 - RNA, 19 nt, Homo sapiens
  misc_RNA (1)...(19): siRNA sense strand
cgacaucaagucacgcauu

SEQ ID NO: 1177452 - RNA, 19 nt, Homo sapiens
  misc_RNA (1)...(19): siRNA sense strand
aaccagaaccucaaugaug

SEQ ID NO: 1177453 - RNA, 19 nt, Homo sapiens
  misc_RNA (1)...(19): siRNA sense strand
gcaacaccuucacggucaa

SEQ ID NO: 1177454 - RNA, 19 nt, Homo sapiens
  misc_RNA (1)...(19): siRNA sense strand
accagaaccucaaugaugu

SEQ ID NO: 1177455 - RNA, 19 nt, Homo sapiens
  misc_RNA (1)...(19): siRNA sense strand
aggaggagcucaucaaagc

SEQ ID NO: 1177456 - RNA, 19 nt, Homo sapiens
  misc_RNA (1)...(19): siRNA sense strand
cgaggaggagcucaucaaa

SEQ ID NO: 1177457 - RNA, 19 nt, Homo sapiens
  misc_RNA (1)...(19): siRNA sense strand
agcagugcguccagaauuu

SEQ ID NO: 1177458 - RNA, 19 nt, Homo sapiens
  misc_RNA (1)...(19): siRNA sense strand
ggaaggcagaugagaccaa

SEQ ID NO: 1177459 - RNA, 19 nt, Homo sapiens
  misc_RNA (1)...(19): siRNA sense strand
ucaaagcccagaagguguu

SEQ ID NO: 1177460 - RNA, 19 nt, Homo sapiens
  misc_RNA (1)...(19): siRNA sense strand
gaggaggagcucaucaaag

SEQ ID NO: 1177461 - RNA, 19 nt, Homo sapiens
  misc_RNA (1)...(19): siRNA sense strand
acaaggagaugagcaagcu

SEQ ID NO: 1177462 - RNA, 19 nt, Homo sapiens
  misc_RNA (1)...(19): siRNA sense strand
ggaugaggcaaacaagauc

SEQ ID NO: 1177463 - RNA, 19 nt, Homo sapiens
  misc_RNA (1)...(19): siRNA sense strand
gaaggaugaagccaaaauu

SEQ ID NO: 1177464 - RNA, 19 nt, Homo sapiens
  misc_RNA (1)...(19): siRNA sense strand
ccacuacgagucccuucaa

SEQ ID NO: 1177465 - RNA, 19 nt, Homo sapiens
  misc_RNA (1)...(19): siRNA sense strand
ggauggauuaccaccagaa

SEQ ID NO: 1177466 - RNA, 19 nt, Homo sapiens
  misc_RNA (1)...(19): siRNA sense strand
caaccagaaccucaaugau

SEQ ID NO: 1177467 - RNA, 19 nt, Homo sapiens
  misc_RNA (1)...(19): siRNA sense strand
gcagugcguccagaauuuc

SEQ ID NO: 1177468 - RNA, 19 nt, Homo sapiens
  misc_RNA (1)...(19): siRNA sense strand
caagaucgcagagaacaac

SEQ ID NO: 1177469 - RNA, 19 nt, Homo sapiens
  misc_RNA (1)...(19): siRNA sense strand
agaccaaggaugagcaguu

SEQ ID NO: 1177470 - RNA, 19 nt, Homo sapiens
  misc_RNA (1)...(19): siRNA sense strand
ugacaacgcgccugcaaaa

SEQ ID NO: 1177471 - RNA, 19 nt, Homo sapiens
  misc_RNA (1)...(19): siRNA sense strand
agaagguguuugaggagau

SEQ ID NO: 1177472 - RNA, 19 nt, Homo sapiens
  misc_RNA (1)...(19): siRNA sense strand
cacuacgagucccuucaaa

SEQ ID NO: 1177473 - RNA, 19 nt, Homo sapiens
  misc_RNA (1)...(19): siRNA sense strand
ucaacacguuccagagcau

SEQ ID NO: 1177474 - RNA, 19 nt, Homo sapiens
  misc_RNA (1)...(19): siRNA sense strand
gccagcaacgugcagaaga

SEQ ID NO: 1177475 - RNA, 19 nt, Homo sapiens
  misc_RNA (1)...(19): siRNA sense strand
cguccagaauuucaacaag

SEQ ID NO: 1177476 - RNA, 19 nt, Homo sapiens
  misc_RNA (1)...(19): siRNA sense strand
uccagaauuucaacaagca

SEQ ID NO: 1177477 - RNA, 19 nt, Homo sapiens
  misc_RNA (1)...(19): siRNA sense strand
cuacacggccacugacaca

SEQ ID NO: 1177478 - RNA, 19 nt, Homo sapiens
  misc_RNA (1)...(19): siRNA sense strand
gcucaaccagaaccucaau

SEQ ID NO: 1177479 - RNA, 19 nt, Homo sapiens
  misc_RNA (1)...(19): siRNA sense strand
uggaacagccgcguagguu

SEQ ID NO: 1177480 - RNA, 19 nt, Homo sapiens
  misc_RNA (1)...(19): siRNA sense strand
gcucaucaaagcccagaag

SEQ ID NO: 1177481 - RNA, 19 nt, Homo sapiens
  misc_RNA (1)...(19): siRNA sense strand
caaacaagaucgcagagaa

SEQ ID NO: 1177482 - RNA, 19 nt, Homo sapiens
  misc_RNA (1)...(19): siRNA sense strand
gcucaaggcuggugaugug

SEQ ID NO: 1177483 - RNA, 19 nt, Homo sapiens
  misc_RNA (1)...(19): siRNA sense strand
gaccaaggaugagcaguuu

SEQ ID NO: 1177484 - RNA, 19 nt, Homo sapiens
  misc_RNA (1)...(19): siRNA sense strand
aaagaaggaugaagccaaa

SEQ ID NO: 1177485 - RNA, 19 nt, Homo sapiens
  misc_RNA (1)...(19): siRNA sense strand
gacaucaagucacgcauug

SEQ ID NO: 1177486 - RNA, 19 nt, Homo sapiens
  misc_RNA (1)...(19): siRNA sense strand
gaacagccgcguagguuuc

SEQ ID NO: 1177487 - RNA, 19 nt, Homo sapiens
  misc_RNA (1)...(19): siRNA sense strand
cagaugagaccaaggauga

SEQ ID NO: 1177488 - RNA, 19 nt, Homo sapiens
  misc_RNA (1)...(19): siRNA sense strand
gagcagugcguccagaauu

SEQ ID NO: 1177489 - RNA, 19 nt, Homo sapiens
  misc_RNA (1)...(19): siRNA sense strand
ccagcaacgugcagaagaa

SEQ ID NO: 1177490 - RNA, 19 nt, Homo sapiens
  misc_RNA (1)...(19): siRNA sense strand
agaaggaucuccggaccua

SEQ ID NO: 1177491 - RNA, 19 nt, Homo sapiens
  misc_RNA (1)...(19): siRNA sense strand
guggagaccuucccagcaa

SEQ ID NO: 1177492 - RNA, 19 nt, Homo sapiens
  misc_RNA (1)...(19): siRNA sense strand
ggcgcaagcugguggacua

SEQ ID NO: 1177493 - RNA, 19 nt, Homo sapiens
  misc_RNA (1)...(19): siRNA sense strand
gaccugcuguggauggauu

SEQ ID NO: 1177494 - RNA, 19 nt, Homo sapiens
  misc_RNA (1)...(19): siRNA sense strand
gaagguguuugaggagaug

SEQ ID NO: 1177495 - RNA, 19 nt, Homo sapiens
  misc_RNA (1)...(19): siRNA sense strand
gcagagaugggcaguaaag

SEQ ID NO: 1177496 - RNA, 19 nt, Homo sapiens
  misc_RNA (1)...(19): siRNA sense strand
cccgagaacuucacugaga

SEQ ID NO: 1177497 - RNA, 19 nt, Homo sapiens
  misc_RNA (1)...(19): siRNA sense strand
gcaagcugguggacuacga

SEQ ID NO: 1177498 - RNA, 19 nt, Homo sapiens
  misc_RNA (1)...(19): siRNA sense strand
ggaacagccgcguagguuu

SEQ ID NO: 1177499 - RNA, 19 nt, Homo sapiens
  misc_RNA (1)...(19): siRNA sense strand
cgggaaagaucgccagcaa

SEQ ID NO: 1177500 - RNA, 19 nt, Homo sapiens
  misc_RNA (1)...(19): siRNA sense strand
ccaaggaugagcaguuuga

SEQ ID NO: 1177501 - RNA, 19 nt, Homo sapiens
  misc_RNA (1)...(19): siRNA sense strand
gcagggaugaggcaaacaa

SEQ ID NO: 1177502 - RNA, 19 nt, Homo sapiens
  misc_RNA (1)...(19): siRNA sense strand
acaacgaccugcuguggau

SEQ ID NO: 1177503 - RNA, 19 nt, Homo sapiens
  misc_RNA (1)...(19): siRNA sense strand
gggaugaggcaaacaagau

SEQ ID NO: 1177504 - RNA, 19 nt, Homo sapiens
  misc_RNA (1)...(19): siRNA sense strand
ugaaggagagcgacuggaa

SEQ ID NO: 1177505 - RNA, 19 nt, Homo sapiens
  misc_RNA (1)...(19): siRNA sense strand
gcaaacaagaucgcagaga

SEQ ID NO: 1177506 - RNA, 19 nt, Homo sapiens
  misc_RNA (1)...(19): siRNA sense strand
cuaccuggccuccgucaaa

SEQ ID NO: 1177507 - RNA, 19 nt, Homo sapiens
  misc_RNA (1)...(19): siRNA sense strand
ucaaccagaaccucaauga

SEQ ID NO: 1177508 - RNA, 19 nt, Homo sapiens
  misc_RNA (1)...(19): siRNA sense strand
cgacaucaagucacgcauu

SEQ ID NO: 1177509 - RNA, 19 nt, Homo sapiens
  misc_RNA (1)...(19): siRNA sense strand
aaccagaaccucaaugaug

SEQ ID NO: 1177510 - RNA, 19 nt, Homo sapiens
  misc_RNA (1)...(19): siRNA sense strand
gcaacaccuucacggucaa

SEQ ID NO: 1177511 - RNA, 19 nt, Homo sapiens
  misc_RNA (1)...(19): siRNA sense strand
accagaaccucaaugaugu

SEQ ID NO: 1177512 - RNA, 19 nt, Homo sapiens
  misc_RNA (1)...(19): siRNA sense strand
aggaggagcucaucaaagc

SEQ ID NO: 1177513 - RNA, 19 nt, Homo sapiens
  misc_RNA (1)...(19): siRNA sense strand
cgaggaggagcucaucaaa

SEQ ID NO: 1177514 - RNA, 19 nt, Homo sapiens
  misc_RNA (1)...(19): siRNA sense strand
agcagugcguccagaauuu

SEQ ID NO: 1177515 - RNA, 19 nt, Homo sapiens
  misc_RNA (1)...(19): siRNA sense strand
ggaaggcagaugagaccaa

SEQ ID NO: 1177516 - RNA, 19 nt, Homo sapiens
  misc_RNA (1)...(19): siRNA sense strand
ucaaagcccagaagguguu

SEQ ID NO: 1177517 - RNA, 19 nt, Homo sapiens
  misc_RNA (1)...(19): siRNA sense strand
gaggaggagcucaucaaag

SEQ ID NO: 1177518 - RNA, 19 nt, Homo sapiens
  misc_RNA (1)...(19): siRNA sense strand
acaaggagaugagcaagcu

SEQ ID NO: 1177519 - RNA, 19 nt, Homo sapiens
  misc_RNA (1)...(19): siRNA sense strand
ggaugaggcaaacaagauc

SEQ ID NO: 1177520 - RNA, 19 nt, Homo sapiens
  misc_RNA (1)...(19): siRNA sense strand
gaaggaugaagccaaaauu

SEQ ID NO: 1177521 - RNA, 19 nt, Homo sapiens
  misc_RNA (1)...(19): siRNA sense strand
ccacuacgagucccuucaa

SEQ ID NO: 1177522 - RNA, 19 nt, Homo sapiens
  misc_RNA (1)...(19): siRNA sense strand
ggauggauuaccaccagaa

SEQ ID NO: 1177523 - RNA, 19 nt, Homo sapiens
  misc_RNA (1)...(19): siRNA sense strand
caaccagaaccucaaugau

SEQ ID NO: 1177524 - RNA, 19 nt, Homo sapiens
  misc_RNA (1)...(19): siRNA sense strand
gcagugcguccagaauuuc

SEQ ID NO: 1177525 - RNA, 19 nt, Homo sapiens
  misc_RNA (1)...(19): siRNA sense strand
caagaucgcagagaacaac

SEQ ID NO: 1177526 - RNA, 19 nt, Homo sapiens
  misc_RNA (1)...(19): siRNA sense strand
agaccaaggaugagcaguu

SEQ ID NO: 1177527 - RNA, 19 nt, Homo sapiens
  misc_RNA (1)...(19): siRNA sense strand
ugacaacgcgccugcaaaa

SEQ ID NO: 1177528 - RNA, 19 nt, Homo sapiens
  misc_RNA (1)...(19): siRNA sense strand
agaagguguuugaggagau

SEQ ID NO: 1177529 - RNA, 19 nt, Homo sapiens
  misc_RNA (1)...(19): siRNA sense strand
cacuacgagucccuucaaa

SEQ ID NO: 1177530 - RNA, 19 nt, Homo sapiens
  misc_RNA (1)...(19): siRNA sense strand
ucaacacguuccagagcau

SEQ ID NO: 1177531 - RNA, 19 nt, Homo sapiens
  misc_RNA (1)...(19): siRNA sense strand
gccagcaacgugcagaaga

SEQ ID NO: 1177532 - RNA, 19 nt, Homo sapiens
  misc_RNA (1)...(19): siRNA sense strand
cguccagaauuucaacaag

SEQ ID NO: 1177533 - RNA, 19 nt, Homo sapiens
  misc_RNA (1)...(19): siRNA sense strand
uccagaauuucaacaagca

SEQ ID NO: 1177534 - RNA, 19 nt, Homo sapiens
  misc_RNA (1)...(19): siRNA sense strand
cuacacggccacugacaca

SEQ ID NO: 1177535 - RNA, 19 nt, Homo sapiens
  misc_RNA (1)...(19): siRNA sense strand
gcucaaccagaaccucaau

SEQ ID NO: 1177536 - RNA, 19 nt, Homo sapiens
  misc_RNA (1)...(19): siRNA sense strand
uggaacagccgcguagguu

SEQ ID NO: 1177537 - RNA, 19 nt, Homo sapiens
  misc_RNA (1)...(19): siRNA sense strand
gcucaucaaagcccagaag

SEQ ID NO: 1177538 - RNA, 19 nt, Homo sapiens
  misc_RNA (1)...(19): siRNA sense strand
caaacaagaucgcagagaa

SEQ ID NO: 1177539 - RNA, 19 nt, Homo sapiens
  misc_RNA (1)...(19): siRNA sense strand
gcucaaggcuggugaugug

SEQ ID NO: 1177540 - RNA, 19 nt, Homo sapiens
  misc_RNA (1)...(19): siRNA sense strand
gaccaaggaugagcaguuu

SEQ ID NO: 1177541 - RNA, 19 nt, Homo sapiens
  misc_RNA (1)...(19): siRNA sense strand
aaagaaggaugaagccaaa

SEQ ID NO: 1177542 - RNA, 19 nt, Homo sapiens
  misc_RNA (1)...(19): siRNA sense strand
gacaucaagucacgcauug

SEQ ID NO: 1177543 - RNA, 19 nt, Homo sapiens
  misc_RNA (1)...(19): siRNA sense strand
gaacagccgcguagguuuc

SEQ ID NO: 1177544 - RNA, 19 nt, Homo sapiens
  misc_RNA (1)...(19): siRNA sense strand
cagaugagaccaaggauga

SEQ ID NO: 1177545 - RNA, 19 nt, Homo sapiens
  misc_RNA (1)...(19): siRNA sense strand
gagcagugcguccagaauu

SEQ ID NO: 1177546 - RNA, 19 nt, Homo sapiens
  misc_RNA (1)...(19): siRNA sense strand
ccagcaacgugcagaagaa

SEQ ID NO: 1177547 - RNA, 19 nt, Homo sapiens
  misc_RNA (1)...(19): siRNA sense strand
agaaggaucuccggaccua

SEQ ID NO: 1177548 - RNA, 19 nt, Homo sapiens
  misc_RNA (1)...(19): siRNA sense strand
guggagaccuucccagcaa

SEQ ID NO: 1177549 - RNA, 19 nt, Homo sapiens
  misc_RNA (1)...(19): siRNA sense strand
ggcgcaagcugguggacua

SEQ ID NO: 1177550 - RNA, 19 nt, Homo sapiens
  misc_RNA (1)...(19): siRNA sense strand
gaccugcuguggauggauu

SEQ ID NO: 1177551 - RNA, 19 nt, Homo sapiens
  misc_RNA (1)...(19): siRNA sense strand
gaagguguuugaggagaug

SEQ ID NO: 1177552 - RNA, 19 nt, Homo sapiens
  misc_RNA (1)...(19): siRNA sense strand
gcagagaugggcaguaaag

SEQ ID NO: 1177553 - RNA, 19 nt, Homo sapiens
  misc_RNA (1)...(19): siRNA sense strand
cccgagaacuucacugaga

SEQ ID NO: 1177554 - RNA, 19 nt, Homo sapiens
  misc_RNA (1)...(19): siRNA sense strand
gcaagcugguggacuacga

SEQ ID NO: 1177555 - RNA, 19 nt, Homo sapiens
  misc_RNA (1)...(19): siRNA sense strand
ggaacagccgcguagguuu

SEQ ID NO: 1177556 - RNA, 19 nt, Homo sapiens
  misc_RNA (1)...(19): siRNA sense strand
cgggaaagaucgccagcaa

SEQ ID NO: 1177557 - RNA, 19 nt, Homo sapiens
  misc_RNA (1)...(19): siRNA sense strand
ccaaggaugagcaguuuga

SEQ ID NO: 1177558 - RNA, 19 nt, Homo sapiens
  misc_RNA (1)...(19): siRNA sense strand
gcagggaugaggcaaacaa

SEQ ID NO: 1177559 - RNA, 19 nt, Homo sapiens
  misc_RNA (1)...(19): siRNA sense strand
acaacgaccugcuguggau

SEQ ID NO: 1177560 - RNA, 19 nt, Homo sapiens
  misc_RNA (1)...(19): siRNA sense strand
gggaugaggcaaacaagau

SEQ ID NO: 1177561 - RNA, 19 nt, Homo sapiens
  misc_RNA (1)...(19): siRNA sense strand
ugaaggagagcgacuggaa

SEQ ID NO: 1177562 - RNA, 19 nt, Homo sapiens
  misc_RNA (1)...(19): siRNA sense strand
gcaaacaagaucgcagaga

SEQ ID NO: 1177563 - RNA, 19 nt, Homo sapiens
  misc_RNA (1)...(19): siRNA sense strand
cuaccuggccuccgucaaa

SEQ ID NO: 1177564 - RNA, 19 nt, Homo sapiens
  misc_RNA (1)...(19): siRNA sense strand
ucaaccagaaccucaauga

SEQ ID NO: 1177565 - RNA, 19 nt, Homo sapiens
  misc_RNA (1)...(19): siRNA sense strand
cgacaucaagucacgcauu

SEQ ID NO: 1177566 - RNA, 19 nt, Homo sapiens
  misc_RNA (1)...(19): siRNA sense strand
aaccagaaccucaaugaug

SEQ ID NO: 1177567 - RNA, 19 nt, Homo sapiens
  misc_RNA (1)...(19): siRNA sense strand
gcaacaccuucacggucaa

SEQ ID NO: 1177568 - RNA, 19 nt, Homo sapiens
  misc_RNA (1)...(19): siRNA sense strand
accagaaccucaaugaugu

SEQ ID NO: 1177569 - RNA, 19 nt, Homo sapiens
  misc_RNA (1)...(19): siRNA sense strand
aggaggagcucaucaaagc

SEQ ID NO: 1177570 - RNA, 19 nt, Homo sapiens
  misc_RNA (1)...(19): siRNA sense strand
cgaggaggagcucaucaaa

SEQ ID NO: 1177571 - RNA, 19 nt, Homo sapiens
  misc_RNA (1)...(19): siRNA sense strand
agcagugcguccagaauuu

SEQ ID NO: 1177572 - RNA, 19 nt, Homo sapiens
  misc_RNA (1)...(19): siRNA sense strand
ggaaggcagaugagaccaa

SEQ ID NO: 1177573 - RNA, 19 nt, Homo sapiens
  misc_RNA (1)...(19): siRNA sense strand
ucaaagcccagaagguguu

SEQ ID NO: 1177574 - RNA, 19 nt, Homo sapiens
  misc_RNA (1)...(19): siRNA sense strand
gaggaggagcucaucaaag

SEQ ID NO: 1177575 - RNA, 19 nt, Homo sapiens
  misc_RNA (1)...(19): siRNA sense strand
acaaggagaugagcaagcu

SEQ ID NO: 1177576 - RNA, 19 nt, Homo sapiens
  misc_RNA (1)...(19): siRNA sense strand
ggaugaggcaaacaagauc

SEQ ID NO: 1177577 - RNA, 19 nt, Homo sapiens
  misc_RNA (1)...(19): siRNA sense strand
gaaggaugaagccaaaauu

SEQ ID NO: 1177578 - RNA, 19 nt, Homo sapiens
  misc_RNA (1)...(19): siRNA sense strand
ccacuacgagucccuucaa

SEQ ID NO: 1177579 - RNA, 19 nt, Homo sapiens
  misc_RNA (1)...(19): siRNA sense strand
ggauggauuaccaccagaa

SEQ ID NO: 1177580 - RNA, 19 nt, Homo sapiens
  misc_RNA (1)...(19): siRNA sense strand
caaccagaaccucaaugau

SEQ ID NO: 1177581 - RNA, 19 nt, Homo sapiens
  misc_RNA (1)...(19): siRNA sense strand
gcagugcguccagaauuuc

SEQ ID NO: 1177582 - RNA, 19 nt, Homo sapiens
  misc_RNA (1)...(19): siRNA sense strand
caagaucgcagagaacaac

SEQ ID NO: 1177583 - RNA, 19 nt, Homo sapiens
  misc_RNA (1)...(19): siRNA sense strand
agaccaaggaugagcaguu

SEQ ID NO: 1177584 - RNA, 19 nt, Homo sapiens
  misc_RNA (1)...(19): siRNA sense strand
ugacaacgcgccugcaaaa

SEQ ID NO: 1177585 - RNA, 19 nt, Homo sapiens
  misc_RNA (1)...(19): siRNA sense strand
agaagguguuugaggagau

SEQ ID NO: 1177586 - RNA, 19 nt, Homo sapiens
  misc_RNA (1)...(19): siRNA sense strand
cacuacgagucccuucaaa

SEQ ID NO: 1177587 - RNA, 19 nt, Homo sapiens
  misc_RNA (1)...(19): siRNA sense strand
ucaacacguuccagagcau

SEQ ID NO: 1177588 - RNA, 19 nt, Homo sapiens
  misc_RNA (1)...(19): siRNA sense strand
gccagcaacgugcagaaga

SEQ ID NO: 1177589 - RNA, 19 nt, Homo sapiens
  misc_RNA (1)...(19): siRNA sense strand
cguccagaauuucaacaag

SEQ ID NO: 1177590 - RNA, 19 nt, Homo sapiens
  misc_RNA (1)...(19): siRNA sense strand
uccagaauuucaacaagca

SEQ ID NO: 1177591 - RNA, 19 nt, Homo sapiens
  misc_RNA (1)...(19): siRNA sense strand
cuacacggccacugacaca

SEQ ID NO: 1177592 - RNA, 19 nt, Homo sapiens
  misc_RNA (1)...(19): siRNA sense strand
gcucaaccagaaccucaau

SEQ ID NO: 1177593 - RNA, 19 nt, Homo sapiens
  misc_RNA (1)...(19): siRNA sense strand
uggaacagccgcguagguu

SEQ ID NO: 1177594 - RNA, 19 nt, Homo sapiens
  misc_RNA (1)...(19): siRNA sense strand
gcucaucaaagcccagaag

SEQ ID NO: 1177595 - RNA, 19 nt, Homo sapiens
  misc_RNA (1)...(19): siRNA sense strand
caaacaagaucgcagagaa

SEQ ID NO: 1177596 - RNA, 19 nt, Homo sapiens
  misc_RNA (1)...(19): siRNA sense strand
gcucaaggcuggugaugug

SEQ ID NO: 1177597 - RNA, 19 nt, Homo sapiens
  misc_RNA (1)...(19): siRNA sense strand
gaccaaggaugagcaguuu

SEQ ID NO: 1177598 - RNA, 19 nt, Homo sapiens
  misc_RNA (1)...(19): siRNA sense strand
aaagaaggaugaagccaaa

SEQ ID NO: 1177599 - RNA, 19 nt, Homo sapiens
  misc_RNA (1)...(19): siRNA sense strand
gacaucaagucacgcauug

SEQ ID NO: 1177600 - RNA, 19 nt, Homo sapiens
  misc_RNA (1)...(19): siRNA sense strand
gaacagccgcguagguuuc

SEQ ID NO: 1177601 - RNA, 19 nt, Homo sapiens
  misc_RNA (1)...(19): siRNA sense strand
cagaugagaccaaggauga

SEQ ID NO: 1177602 - RNA, 19 nt, Homo sapiens
  misc_RNA (1)...(19): siRNA sense strand
gagcagugcguccagaauu

SEQ ID NO: 1177603 - RNA, 19 nt, Homo sapiens
  misc_RNA (1)...(19): siRNA sense strand
ccagcaacgugcagaagaa

SEQ ID NO: 1177604 - RNA, 19 nt, Homo sapiens
  misc_RNA (1)...(19): siRNA sense strand
agaaggaucuccggaccua

SEQ ID NO: 1177605 - RNA, 19 nt, Homo sapiens
  misc_RNA (1)...(19): siRNA sense strand
guggagaccuucccagcaa

SEQ ID NO: 1177606 - RNA, 19 nt, Homo sapiens
  misc_RNA (1)...(19): siRNA sense strand
ggcgcaagcugguggacua

SEQ ID NO: 1177607 - RNA, 19 nt, Homo sapiens
  misc_RNA (1)...(19): siRNA sense strand
gaccugcuguggauggauu

SEQ ID NO: 1177608 - RNA, 19 nt, Homo sapiens
  misc_RNA (1)...(19): siRNA sense strand
gaagguguuugaggagaug

SEQ ID NO: 1177609 - RNA, 19 nt, Homo sapiens
  misc_RNA (1)...(19): siRNA sense strand
gcagagaugggcaguaaag

SEQ ID NO: 1177610 - RNA, 19 nt, Homo sapiens
  misc_RNA (1)...(19): siRNA sense strand
cccgagaacuucacugaga

SEQ ID NO: 1177611 - RNA, 19 nt, Homo sapiens
  misc_RNA (1)...(19): siRNA sense strand
gcaagcugguggacuacga

SEQ ID NO: 1177612 - RNA, 19 nt, Homo sapiens
  misc_RNA (1)...(19): siRNA sense strand
ggaacagccgcguagguuu

SEQ ID NO: 1177613 - RNA, 19 nt, Homo sapiens
  misc_RNA (1)...(19): siRNA sense strand
cgggaaagaucgccagcaa

SEQ ID NO: 1177614 - RNA, 19 nt, Homo sapiens
  misc_RNA (1)...(19): siRNA sense strand
ccaaggaugagcaguuuga

SEQ ID NO: 1177615 - RNA, 19 nt, Homo sapiens
  misc_RNA (1)...(19): siRNA sense strand
gcagggaugaggcaaacaa

SEQ ID NO: 1177616 - RNA, 19 nt, Homo sapiens
  misc_RNA (1)...(19): siRNA sense strand
acaacgaccugcuguggau

SEQ ID NO: 1177617 - RNA, 19 nt, Homo sapiens
  misc_RNA (1)...(19): siRNA sense strand
gggaugaggcaaacaagau

SEQ ID NO: 1177618 - RNA, 19 nt, Homo sapiens
  misc_RNA (1)...(19): siRNA sense strand
ugaaggagagcgacuggaa

SEQ ID NO: 1177619 - RNA, 19 nt, Homo sapiens
  misc_RNA (1)...(19): siRNA sense strand
gcaaacaagaucgcagaga

SEQ ID NO: 1177620 - RNA, 19 nt, Homo sapiens
  misc_RNA (1)...(19): siRNA sense strand
cuaccuggccuccgucaaa

SEQ ID NO: 1177621 - RNA, 19 nt, Homo sapiens
  misc_RNA (1)...(19): siRNA sense strand
ucaaccagaaccucaauga

SEQ ID NO: 1177622 - RNA, 19 nt, Homo sapiens
  misc_RNA (1)...(19): siRNA sense strand
cgacaucaagucacgcauu

SEQ ID NO: 1177623 - RNA, 19 nt, Homo sapiens
  misc_RNA (1)...(19): siRNA sense strand
aaccagaaccucaaugaug

SEQ ID NO: 1177624 - RNA, 19 nt, Homo sapiens
  misc_RNA (1)...(19): siRNA sense strand
gcaacaccuucacggucaa

SEQ ID NO: 1177625 - RNA, 19 nt, Homo sapiens
  misc_RNA (1)...(19): siRNA sense strand
accagaaccucaaugaugu

SEQ ID NO: 1177626 - RNA, 19 nt, Homo sapiens
  misc_RNA (1)...(19): siRNA sense strand
aggaggagcucaucaaagc

SEQ ID NO: 1177627 - RNA, 19 nt, Homo sapiens
  misc_RNA (1)...(19): siRNA sense strand
cgaggaggagcucaucaaa

SEQ ID NO: 1177628 - RNA, 19 nt, Homo sapiens
  misc_RNA (1)...(19): siRNA sense strand
agcagugcguccagaauuu

SEQ ID NO: 1177629 - RNA, 19 nt, Homo sapiens
  misc_RNA (1)...(19): siRNA sense strand
ggaaggcagaugagaccaa

SEQ ID NO: 1177630 - RNA, 19 nt, Homo sapiens
  misc_RNA (1)...(19): siRNA sense strand
ucaaagcccagaagguguu

SEQ ID NO: 1177631 - RNA, 19 nt, Homo sapiens
  misc_RNA (1)...(19): siRNA sense strand
gaggaggagcucaucaaag

SEQ ID NO: 1177632 - RNA, 19 nt, Homo sapiens
  misc_RNA (1)...(19): siRNA sense strand
acaaggagaugagcaagcu

SEQ ID NO: 1177633 - RNA, 19 nt, Homo sapiens
  misc_RNA (1)...(19): siRNA sense strand
ggaugaggcaaacaagauc

SEQ ID NO: 1177634 - RNA, 19 nt, Homo sapiens
  misc_RNA (1)...(19): siRNA sense strand
gaaggaugaagccaaaauu

SEQ ID NO: 1177635 - RNA, 19 nt, Homo sapiens
  misc_RNA (1)...(19): siRNA sense strand
ccacuacgagucccuucaa

SEQ ID NO: 1177636 - RNA, 19 nt, Homo sapiens
  misc_RNA (1)...(19): siRNA sense strand
ggauggauuaccaccagaa

SEQ ID NO: 1177637 - RNA, 19 nt, Homo sapiens
  misc_RNA (1)...(19): siRNA sense strand
caaccagaaccucaaugau

SEQ ID NO: 1177638 - RNA, 19 nt, Homo sapiens
  misc_RNA (1)...(19): siRNA sense strand
gcagugcguccagaauuuc

SEQ ID NO: 1177639 - RNA, 19 nt, Homo sapiens
  misc_RNA (1)...(19): siRNA sense strand
caagaucgcagagaacaac

SEQ ID NO: 1177640 - RNA, 19 nt, Homo sapiens
  misc_RNA (1)...(19): siRNA sense strand
agaccaaggaugagcaguu

SEQ ID NO: 1177641 - RNA, 19 nt, Homo sapiens
  misc_RNA (1)...(19): siRNA sense strand
ugacaacgcgccugcaaaa

SEQ ID NO: 1177642 - RNA, 19 nt, Homo sapiens
  misc_RNA (1)...(19): siRNA sense strand
agaagguguuugaggagau

SEQ ID NO: 1177643 - RNA, 19 nt, Homo sapiens
  misc_RNA (1)...(19): siRNA sense strand
cacuacgagucccuucaaa

SEQ ID NO: 1177644 - RNA, 19 nt, Homo sapiens
  misc_RNA (1)...(19): siRNA sense strand
ucaacacguuccagagcau

SEQ ID NO: 1177645 - RNA, 19 nt, Homo sapiens
  misc_RNA (1)...(19): siRNA sense strand
gccagcaacgugcagaaga

SEQ ID NO: 1177646 - RNA, 19 nt, Homo sapiens
  misc_RNA (1)...(19): siRNA sense strand
cguccagaauuucaacaag

SEQ ID NO: 1177647 - RNA, 19 nt, Homo sapiens
  misc_RNA (1)...(19): siRNA sense strand
uccagaauuucaacaagca

SEQ ID NO: 1177648 - RNA, 19 nt, Homo sapiens
  misc_RNA (1)...(19): siRNA sense strand
cuacacggccacugacaca

SEQ ID NO: 1177649 - RNA, 19 nt, Homo sapiens
  misc_RNA (1)...(19): siRNA sense strand
gcucaaccagaaccucaau

SEQ ID NO: 1177650 - RNA, 19 nt, Homo sapiens
  misc_RNA (1)...(19): siRNA sense strand
uggaacagccgcguagguu

SEQ ID NO: 1177651 - RNA, 19 nt, Homo sapiens
  misc_RNA (1)...(19): siRNA sense strand
gcucaucaaagcccagaag

SEQ ID NO: 1177652 - RNA, 19 nt, Homo sapiens
  misc_RNA (1)...(19): siRNA sense strand
caaacaagaucgcagagaa

SEQ ID NO: 1177653 - RNA, 19 nt, Homo sapiens
  misc_RNA (1)...(19): siRNA sense strand
gcucaaggcuggugaugug

SEQ ID NO: 1177654 - RNA, 19 nt, Homo sapiens
  misc_RNA (1)...(19): siRNA sense strand
gaccaaggaugagcaguuu

SEQ ID NO: 1177655 - RNA, 19 nt, Homo sapiens
  misc_RNA (1)...(19): siRNA sense strand
aaagaaggaugaagccaaa

SEQ ID NO: 1177656 - RNA, 19 nt, Homo sapiens
  misc_RNA (1)...(19): siRNA sense strand
gacaucaagucacgcauug

SEQ ID NO: 1177657 - RNA, 19 nt, Homo sapiens
  misc_RNA (1)...(19): siRNA sense strand
gaacagccgcguagguuuc

SEQ ID NO: 1177658 - RNA, 19 nt, Homo sapiens
  misc_RNA (1)...(19): siRNA sense strand
cagaugagaccaaggauga

SEQ ID NO: 1177659 - RNA, 19 nt, Homo sapiens
  misc_RNA (1)...(19): siRNA sense strand
gagcagugcguccagaauu

SEQ ID NO: 1177660 - RNA, 19 nt, Homo sapiens
  misc_RNA (1)...(19): siRNA sense strand
ccagcaacgugcagaagaa

SEQ ID NO: 1177661 - RNA, 19 nt, Homo sapiens
  misc_RNA (1)...(19): siRNA sense strand
agaaggaucuccggaccua

SEQ ID NO: 1177662 - RNA, 19 nt, Homo sapiens
  misc_RNA (1)...(19): siRNA sense strand
guggagaccuucccagcaa

SEQ ID NO: 1177663 - RNA, 19 nt, Homo sapiens
  misc_RNA (1)...(19): siRNA sense strand
ggcgcaagcugguggacua

SEQ ID NO: 1177664 - RNA, 19 nt, Homo sapiens
  misc_RNA (1)...(19): siRNA sense strand
gaccugcuguggauggauu

SEQ ID NO: 1177665 - RNA, 19 nt, Homo sapiens
  misc_RNA (1)...(19): siRNA sense strand
gaagguguuugaggagaug

SEQ ID NO: 1177666 - RNA, 19 nt, Homo sapiens
  misc_RNA (1)...(19): siRNA sense strand
gcagagaugggcaguaaag

SEQ ID NO: 1177667 - RNA, 19 nt, Homo sapiens
  misc_RNA (1)...(19): siRNA sense strand
cccgagaacuucacugaga

SEQ ID NO: 1177668 - RNA, 19 nt, Homo sapiens
  misc_RNA (1)...(19): siRNA sense strand
gcaagcugguggacuacga

SEQ ID NO: 1177669 - RNA, 19 nt, Homo sapiens
  misc_RNA (1)...(19): siRNA sense strand
ggaacagccgcguagguuu

SEQ ID NO: 1177670 - RNA, 19 nt, Homo sapiens
  misc_RNA (1)...(19): siRNA sense strand
cgggaaagaucgccagcaa

SEQ ID NO: 1177671 - RNA, 19 nt, Homo sapiens
  misc_RNA (1)...(19): siRNA sense strand
ccaaggaugagcaguuuga

SEQ ID NO: 1177672 - RNA, 19 nt, Homo sapiens
  misc_RNA (1)...(19): siRNA sense strand
gcagggaugaggcaaacaa

SEQ ID NO: 1177673 - RNA, 19 nt, Homo sapiens
  misc_RNA (1)...(19): siRNA sense strand
acaacgaccugcuguggau

SEQ ID NO: 1177674 - RNA, 19 nt, Homo sapiens
  misc_RNA (1)...(19): siRNA sense strand
gggaugaggcaaacaagau

SEQ ID NO: 1177675 - RNA, 19 nt, Homo sapiens
  misc_RNA (1)...(19): siRNA sense strand
ugaaggagagcgacuggaa

SEQ ID NO: 1177676 - RNA, 19 nt, Homo sapiens
  misc_RNA (1)...(19): siRNA sense strand
gcaaacaagaucgcagaga

SEQ ID NO: 1177677 - RNA, 19 nt, Homo sapiens
  misc_RNA (1)...(19): siRNA sense strand
cuaccuggccuccgucaaa

SEQ ID NO: 1177678 - RNA, 19 nt, Homo sapiens
  misc_RNA (1)...(19): siRNA sense strand
ucaaccagaaccucaauga

SEQ ID NO: 1177679 - RNA, 19 nt, Homo sapiens
  misc_RNA (1)...(19): siRNA sense strand
cgacaucaagucacgcauu

SEQ ID NO: 1177680 - RNA, 19 nt, Homo sapiens
  misc_RNA (1)...(19): siRNA sense strand
aaccagaaccucaaugaug

SEQ ID NO: 1177681 - RNA, 19 nt, Homo sapiens
  misc_RNA (1)...(19): siRNA sense strand
gcaacaccuucacggucaa

SEQ ID NO: 1177682 - RNA, 19 nt, Homo sapiens
  misc_RNA (1)...(19): siRNA sense strand
accagaaccucaaugaugu

SEQ ID NO: 1177683 - RNA, 19 nt, Homo sapiens
  misc_RNA (1)...(19): siRNA sense strand
aggaggagcucaucaaagc

SEQ ID NO: 1177684 - RNA, 19 nt, Homo sapiens
  misc_RNA (1)...(19): siRNA sense strand
cgaggaggagcucaucaaa

SEQ ID NO: 1177685 - RNA, 19 nt, Homo sapiens
  misc_RNA (1)...(19): siRNA sense strand
agcagugcguccagaauuu

SEQ ID NO: 1177686 - RNA, 19 nt, Homo sapiens
  misc_RNA (1)...(19): siRNA sense strand
ggaaggcagaugagaccaa

SEQ ID NO: 1177687 - RNA, 19 nt, Homo sapiens
  misc_RNA (1)...(19): siRNA sense strand
ucaaagcccagaagguguu

SEQ ID NO: 1177688 - RNA, 19 nt, Homo sapiens
  misc_RNA (1)...(19): siRNA sense strand
gaggaggagcucaucaaag

SEQ ID NO: 1177689 - RNA, 19 nt, Homo sapiens
  misc_RNA (1)...(19): siRNA sense strand
acaaggagaugagcaagcu

SEQ ID NO: 1177690 - RNA, 19 nt, Homo sapiens
  misc_RNA (1)...(19): siRNA sense strand
ggaugaggcaaacaagauc

SEQ ID NO: 1177691 - RNA, 19 nt, Homo sapiens
  misc_RNA (1)...(19): siRNA sense strand
gaaggaugaagccaaaauu

SEQ ID NO: 1177692 - RNA, 19 nt, Homo sapiens
  misc_RNA (1)...(19): siRNA sense strand
ccacuacgagucccuucaa

SEQ ID NO: 1177693 - RNA, 19 nt, Homo sapiens
  misc_RNA (1)...(19): siRNA sense strand
ggauggauuaccaccagaa

SEQ ID NO: 1177694 - RNA, 19 nt, Homo sapiens
  misc_RNA (1)...(19): siRNA sense strand
caaccagaaccucaaugau

SEQ ID NO: 1177695 - RNA, 19 nt, Homo sapiens
  misc_RNA (1)...(19): siRNA sense strand
gcagugcguccagaauuuc

SEQ ID NO: 1177696 - RNA, 19 nt, Homo sapiens
  misc_RNA (1)...(19): siRNA sense strand
caagaucgcagagaacaac

SEQ ID NO: 1177697 - RNA, 19 nt, Homo sapiens
  misc_RNA (1)...(19): siRNA sense strand
agaccaaggaugagcaguu

SEQ ID NO: 1177698 - RNA, 19 nt, Homo sapiens
  misc_RNA (1)...(19): siRNA sense strand
ugacaacgcgccugcaaaa

SEQ ID NO: 1177699 - RNA, 19 nt, Homo sapiens
  misc_RNA (1)...(19): siRNA sense strand
agaagguguuugaggagau

SEQ ID NO: 1177700 - RNA, 19 nt, Homo sapiens
  misc_RNA (1)...(19): siRNA sense strand
cacuacgagucccuucaaa

SEQ ID NO: 1177701 - RNA, 19 nt, Homo sapiens
  misc_RNA (1)...(19): siRNA sense strand
ucaacacguuccagagcau

SEQ ID NO: 1177702 - RNA, 19 nt, Homo sapiens
  misc_RNA (1)...(19): siRNA sense strand
gccagcaacgugcagaaga

SEQ ID NO: 1177703 - RNA, 19 nt, Homo sapiens
  misc_RNA (1)...(19): siRNA sense strand
cguccagaauuucaacaag

SEQ ID NO: 1177704 - RNA, 19 nt, Homo sapiens
  misc_RNA (1)...(19): siRNA sense strand
uccagaauuucaacaagca

SEQ ID NO: 1177705 - RNA, 19 nt, Homo sapiens
  misc_RNA (1)...(19): siRNA sense strand
cuacacggccacugacaca

SEQ ID NO: 1177706 - RNA, 19 nt, Homo sapiens
  misc_RNA (1)...(19): siRNA sense strand
gcucaaccagaaccucaau

SEQ ID NO: 1177707 - RNA, 19 nt, Homo sapiens
  misc_RNA (1)...(19): siRNA sense strand
uggaacagccgcguagguu

SEQ ID NO: 1177708 - RNA, 19 nt, Homo sapiens
  misc_RNA (1)...(19): siRNA sense strand
gcucaucaaagcccagaag

SEQ ID NO: 1177709 - RNA, 19 nt, Homo sapiens
  misc_RNA (1)...(19): siRNA sense strand
caaacaagaucgcagagaa

SEQ ID NO: 1177710 - RNA, 19 nt, Homo sapiens
  misc_RNA (1)...(19): siRNA sense strand
gcucaaggcuggugaugug

SEQ ID NO: 1177711 - RNA, 19 nt, Homo sapiens
  misc_RNA (1)...(19): siRNA sense strand
gaccaaggaugagcaguuu

SEQ ID NO: 1177712 - RNA, 19 nt, Homo sapiens
  misc_RNA (1)...(19): siRNA sense strand
aaagaaggaugaagccaaa

SEQ ID NO: 1177713 - RNA, 19 nt, Homo sapiens
  misc_RNA (1)...(19): siRNA sense strand
gacaucaagucacgcauug

SEQ ID NO: 1177714 - RNA, 19 nt, Homo sapiens
  misc_RNA (1)...(19): siRNA sense strand
gaacagccgcguagguuuc

SEQ ID NO: 1177715 - RNA, 19 nt, Homo sapiens
  misc_RNA (1)...(19): siRNA sense strand
cagaugagaccaaggauga

SEQ ID NO: 1177716 - RNA, 19 nt, Homo sapiens
  misc_RNA (1)...(19): siRNA sense strand
gagcagugcguccagaauu

SEQ ID NO: 1177717 - RNA, 19 nt, Homo sapiens
  misc_RNA (1)...(19): siRNA sense strand
ccagcaacgugcagaagaa

SEQ ID NO: 1177718 - RNA, 19 nt, Homo sapiens
  misc_RNA (1)...(19): siRNA sense strand
agaaggaucuccggaccua

SEQ ID NO: 1177719 - RNA, 19 nt, Homo sapiens
  misc_RNA (1)...(19): siRNA sense strand
guggagaccuucccagcaa

SEQ ID NO: 1177720 - RNA, 19 nt, Homo sapiens
  misc_RNA (1)...(19): siRNA sense strand
ggcgcaagcugguggacua

SEQ ID NO: 1177721 - RNA, 19 nt, Homo sapiens
  misc_RNA (1)...(19): siRNA sense strand
gaccugcuguggauggauu

SEQ ID NO: 1177722 - RNA, 19 nt, Homo sapiens
  misc_RNA (1)...(19): siRNA sense strand
gaagguguuugaggagaug

SEQ ID NO: 1177723 - RNA, 19 nt, Homo sapiens
  misc_RNA (1)...(19): siRNA sense strand
gcagagaugggcaguaaag

SEQ ID NO: 1177724 - RNA, 19 nt, Homo sapiens
  misc_RNA (1)...(19): siRNA sense strand
cccgagaacuucacugaga

SEQ ID NO: 1177725 - RNA, 19 nt, Homo sapiens
  misc_RNA (1)...(19): siRNA sense strand
gcaagcugguggacuacga

SEQ ID NO: 1177726 - RNA, 19 nt, Homo sapiens
  misc_RNA (1)...(19): siRNA sense strand
ggaacagccgcguagguuu

SEQ ID NO: 1177727 - RNA, 19 nt, Homo sapiens
  misc_RNA (1)...(19): siRNA sense strand
cgggaaagaucgccagcaa

SEQ ID NO: 1177728 - RNA, 19 nt, Homo sapiens
  misc_RNA (1)...(19): siRNA sense strand
ccaaggaugagcaguuuga

SEQ ID NO: 1177729 - RNA, 19 nt, Homo sapiens
  misc_RNA (1)...(19): siRNA sense strand
gcagggaugaggcaaacaa

SEQ ID NO: 1177730 - RNA, 19 nt, Homo sapiens
  misc_RNA (1)...(19): siRNA sense strand
acaacgaccugcuguggau

SEQ ID NO: 1177731 - RNA, 19 nt, Homo sapiens
  misc_RNA (1)...(19): siRNA sense strand
gggaugaggcaaacaagau

SEQ ID NO: 1177732 - RNA, 19 nt, Homo sapiens
  misc_RNA (1)...(19): siRNA sense strand
ugaaggagagcgacuggaa

SEQ ID NO: 1177733 - RNA, 19 nt, Homo sapiens
  misc_RNA (1)...(19): siRNA sense strand
gcaaacaagaucgcagaga

SEQ ID NO: 1177734 - RNA, 19 nt, Homo sapiens
  misc_RNA (1)...(19): siRNA sense strand
cuaccuggccuccgucaaa

SEQ ID NO: 1177735 - RNA, 19 nt, Homo sapiens
  misc_RNA (1)...(19): siRNA sense strand
ucaaccagaaccucaauga

SEQ ID NO: 1177736 - RNA, 19 nt, Homo sapiens
  misc_RNA (1)...(19): siRNA sense strand
cgacaucaagucacgcauu

SEQ ID NO: 1177737 - RNA, 19 nt, Homo sapiens
  misc_RNA (1)...(19): siRNA sense strand
aaccagaaccucaaugaug

SEQ ID NO: 1177738 - RNA, 19 nt, Homo sapiens
  misc_RNA (1)...(19): siRNA sense strand
gcaacaccuucacggucaa

SEQ ID NO: 1177739 - RNA, 19 nt, Homo sapiens
  misc_RNA (1)...(19): siRNA sense strand
accagaaccucaaugaugu

SEQ ID NO: 1177740 - RNA, 19 nt, Homo sapiens
  misc_RNA (1)...(19): siRNA sense strand
aggaggagcucaucaaagc

SEQ ID NO: 1177741 - RNA, 19 nt, Homo sapiens
  misc_RNA (1)...(19): siRNA sense strand
cgaggaggagcucaucaaa

SEQ ID NO: 1177742 - RNA, 19 nt, Homo sapiens
  misc_RNA (1)...(19): siRNA sense strand
agcagugcguccagaauuu

SEQ ID NO: 1177743 - RNA, 19 nt, Homo sapiens
  misc_RNA (1)...(19): siRNA sense strand
ggaaggcagaugagaccaa

SEQ ID NO: 1177744 - RNA, 19 nt, Homo sapiens
  misc_RNA (1)...(19): siRNA sense strand
ucaaagcccagaagguguu

SEQ ID NO: 1177745 - RNA, 19 nt, Homo sapiens
  misc_RNA (1)...(19): siRNA sense strand
gaggaggagcucaucaaag

SEQ ID NO: 1177746 - RNA, 19 nt, Homo sapiens
  misc_RNA (1)...(19): siRNA sense strand
acaaggagaugagcaagcu

SEQ ID NO: 1177747 - RNA, 19 nt, Homo sapiens
  misc_RNA (1)...(19): siRNA sense strand
ggaugaggcaaacaagauc

SEQ ID NO: 1177748 - RNA, 19 nt, Homo sapiens
  misc_RNA (1)...(19): siRNA sense strand
gaaggaugaagccaaaauu

SEQ ID NO: 1177749 - RNA, 19 nt, Homo sapiens
  misc_RNA (1)...(19): siRNA sense strand
ccacuacgagucccuucaa

SEQ ID NO: 1177750 - RNA, 19 nt, Homo sapiens
  misc_RNA (1)...(19): siRNA sense strand
ggauggauuaccaccagaa

SEQ ID NO: 1177751 - RNA, 19 nt, Homo sapiens
  misc_RNA (1)...(19): siRNA sense strand
caaccagaaccucaaugau

SEQ ID NO: 1177752 - RNA, 19 nt, Homo sapiens
  misc_RNA (1)...(19): siRNA sense strand
gcagugcguccagaauuuc

SEQ ID NO: 1177753 - RNA, 19 nt, Homo sapiens
  misc_RNA (1)...(19): siRNA sense strand
caagaucgcagagaacaac

SEQ ID NO: 1177754 - RNA, 19 nt, Homo sapiens
  misc_RNA (1)...(19): siRNA sense strand
agaccaaggaugagcaguu

SEQ ID NO: 1177755 - RNA, 19 nt, Homo sapiens
  misc_RNA (1)...(19): siRNA sense strand
ugacaacgcgccugcaaaa

SEQ ID NO: 1177756 - RNA, 19 nt, Homo sapiens
  misc_RNA (1)...(19): siRNA sense strand
agaagguguuugaggagau

SEQ ID NO: 1177757 - RNA, 19 nt, Homo sapiens
  misc_RNA (1)...(19): siRNA sense strand
cacuacgagucccuucaaa

SEQ ID NO: 1177758 - RNA, 19 nt, Homo sapiens
  misc_RNA (1)...(19): siRNA sense strand
ucaacacguuccagagcau

SEQ ID NO: 1177759 - RNA, 19 nt, Homo sapiens
  misc_RNA (1)...(19): siRNA sense strand
gccagcaacgugcagaaga

SEQ ID NO: 1177760 - RNA, 19 nt, Homo sapiens
  misc_RNA (1)...(19): siRNA sense strand
cguccagaauuucaacaag

SEQ ID NO: 1177761 - RNA, 19 nt, Homo sapiens
  misc_RNA (1)...(19): siRNA sense strand
uccagaauuucaacaagca

SEQ ID NO: 1177762 - RNA, 19 nt, Homo sapiens
  misc_RNA (1)...(19): siRNA sense strand
cuacacggccacugacaca

SEQ ID NO: 1177763 - RNA, 19 nt, Homo sapiens
  misc_RNA (1)...(19): siRNA sense strand
gcucaaccagaaccucaau

SEQ ID NO: 1177764 - RNA, 19 nt, Homo sapiens
  misc_RNA (1)...(19): siRNA sense strand
uggaacagccgcguagguu

SEQ ID NO: 1177765 - RNA, 19 nt, Homo sapiens
  misc_RNA (1)...(19): siRNA sense strand
gcucaucaaagcccagaag

SEQ ID NO: 1177766 - RNA, 19 nt, Homo sapiens
  misc_RNA (1)...(19): siRNA sense strand
caaacaagaucgcagagaa

SEQ ID NO: 1177767 - RNA, 19 nt, Homo sapiens
  misc_RNA (1)...(19): siRNA sense strand
gcucaaggcuggugaugug

SEQ ID NO: 1177768 - RNA, 19 nt, Homo sapiens
  misc_RNA (1)...(19): siRNA sense strand
gaccaaggaugagcaguuu

SEQ ID NO: 1177769 - RNA, 19 nt, Homo sapiens
  misc_RNA (1)...(19): siRNA sense strand
aaagaaggaugaagccaaa

SEQ ID NO: 1177770 - RNA, 19 nt, Homo sapiens
  misc_RNA (1)...(19): siRNA sense strand
gacaucaagucacgcauug

SEQ ID NO: 1177771 - RNA, 19 nt, Homo sapiens
  misc_RNA (1)...(19): siRNA sense strand
gaacagccgcguagguuuc

SEQ ID NO: 1177772 - RNA, 19 nt, Homo sapiens
  misc_RNA (1)...(19): siRNA sense strand
cagaugagaccaaggauga

SEQ ID NO: 1177773 - RNA, 19 nt, Homo sapiens
  misc_RNA (1)...(19): siRNA sense strand
gagcagugcguccagaauu

SEQ ID NO: 1177774 - RNA, 19 nt, Homo sapiens
  misc_RNA (1)...(19): siRNA sense strand
ccagcaacgugcagaagaa

SEQ ID NO: 1177775 - RNA, 19 nt, Homo sapiens
  misc_RNA (1)...(19): siRNA sense strand
agaaggaucuccggaccua

SEQ ID NO: 1177776 - RNA, 19 nt, Homo sapiens
  misc_RNA (1)...(19): siRNA sense strand
guggagaccuucccagcaa

SEQ ID NO: 1177777 - RNA, 19 nt, Homo sapiens
  misc_RNA (1)...(19): siRNA sense strand
ggcgcaagcugguggacua

SEQ ID NO: 1177778 - RNA, 19 nt, Homo sapiens
  misc_RNA (1)...(19): siRNA sense strand
gaccugcuguggauggauu

SEQ ID NO: 1177779 - RNA, 19 nt, Homo sapiens
  misc_RNA (1)...(19): siRNA sense strand
gaagguguuugaggagaug

SEQ ID NO: 1177780 - RNA, 19 nt, Homo sapiens
  misc_RNA (1)...(19): siRNA sense strand
gcagagaugggcaguaaag

SEQ ID NO: 1177781 - RNA, 19 nt, Homo sapiens
  misc_RNA (1)...(19): siRNA sense strand
cccgagaacuucacugaga

SEQ ID NO: 1177782 - RNA, 19 nt, Homo sapiens
  misc_RNA (1)...(19): siRNA sense strand
gcaagcugguggacuacga

SEQ ID NO: 1177783 - RNA, 19 nt, Homo sapiens
  misc_RNA (1)...(19): siRNA sense strand
ggaacagccgcguagguuu

SEQ ID NO: 1177784 - RNA, 19 nt, Homo sapiens
  misc_RNA (1)...(19): siRNA sense strand
cgggaaagaucgccagcaa

SEQ ID NO: 1177785 - RNA, 19 nt, Homo sapiens
  misc_RNA (1)...(19): siRNA sense strand
ccaaggaugagcaguuuga

SEQ ID NO: 1177786 - RNA, 19 nt, Homo sapiens
  misc_RNA (1)...(19): siRNA sense strand
gcagggaugaggcaaacaa

SEQ ID NO: 1177787 - RNA, 19 nt, Homo sapiens
  misc_RNA (1)...(19): siRNA sense strand
acaacgaccugcuguggau

SEQ ID NO: 1177788 - RNA, 19 nt, Homo sapiens
  misc_RNA (1)...(19): siRNA sense strand
gggaugaggcaaacaagau

SEQ ID NO: 1177789 - RNA, 19 nt, Homo sapiens
  misc_RNA (1)...(19): siRNA sense strand
ugaaggagagcgacuggaa

SEQ ID NO: 1177790 - RNA, 19 nt, Homo sapiens
  misc_RNA (1)...(19): siRNA sense strand
gcaaacaagaucgcagaga

SEQ ID NO: 1177791 - RNA, 19 nt, Homo sapiens
  misc_RNA (1)...(19): siRNA sense strand
cuaccuggccuccgucaaa

SEQ ID NO: 1177792 - RNA, 19 nt, Homo sapiens
  misc_RNA (1)...(19): siRNA sense strand
ucaaccagaaccucaauga

SEQ ID NO: 1177793 - RNA, 19 nt, Homo sapiens
  misc_RNA (1)...(19): siRNA sense strand
cgacaucaagucacgcauu

SEQ ID NO: 1177794 - RNA, 19 nt, Homo sapiens
  misc_RNA (1)...(19): siRNA sense strand
aaccagaaccucaaugaug

SEQ ID NO: 1177795 - RNA, 19 nt, Homo sapiens
  misc_RNA (1)...(19): siRNA sense strand
gcaacaccuucacggucaa

SEQ ID NO: 1177796 - RNA, 19 nt, Homo sapiens
  misc_RNA (1)...(19): siRNA sense strand
accagaaccucaaugaugu

SEQ ID NO: 1177797 - RNA, 19 nt, Homo sapiens
  misc_RNA (1)...(19): siRNA sense strand
aggaggagcucaucaaagc

SEQ ID NO: 1177798 - RNA, 19 nt, Homo sapiens
  misc_RNA (1)...(19): siRNA sense strand
cgaggaggagcucaucaaa

SEQ ID NO: 1177799 - RNA, 19 nt, Homo sapiens
  misc_RNA (1)...(19): siRNA sense strand
agcagugcguccagaauuu

SEQ ID NO: 1177800 - RNA, 19 nt, Homo sapiens
  misc_RNA (1)...(19): siRNA sense strand
ggaaggcagaugagaccaa

SEQ ID NO: 1177801 - RNA, 19 nt, Homo sapiens
  misc_RNA (1)...(19): siRNA sense strand
ucaaagcccagaagguguu

SEQ ID NO: 1177802 - RNA, 19 nt, Homo sapiens
  misc_RNA (1)...(19): siRNA sense strand
gaggaggagcucaucaaag

SEQ ID NO: 1177803 - RNA, 19 nt, Homo sapiens
  misc_RNA (1)...(19): siRNA sense strand
acaaggagaugagcaagcu

SEQ ID NO: 1177804 - RNA, 19 nt, Homo sapiens
  misc_RNA (1)...(19): siRNA sense strand
ggaugaggcaaacaagauc

SEQ ID NO: 1177805 - RNA, 19 nt, Homo sapiens
  misc_RNA (1)...(19): siRNA sense strand
gaaggaugaagccaaaauu

SEQ ID NO: 1177806 - RNA, 19 nt, Homo sapiens
  misc_RNA (1)...(19): siRNA sense strand
ccacuacgagucccuucaa

SEQ ID NO: 1177807 - RNA, 19 nt, Homo sapiens
  misc_RNA (1)...(19): siRNA sense strand
ggauggauuaccaccagaa

SEQ ID NO: 1177808 - RNA, 19 nt, Homo sapiens
  misc_RNA (1)...(19): siRNA sense strand
caaccagaaccucaaugau

SEQ ID NO: 1177809 - RNA, 19 nt, Homo sapiens
  misc_RNA (1)...(19): siRNA sense strand
gcagugcguccagaauuuc

SEQ ID NO: 1177810 - RNA, 19 nt, Homo sapiens
  misc_RNA (1)...(19): siRNA sense strand
caagaucgcagagaacaac

SEQ ID NO: 1177811 - RNA, 19 nt, Homo sapiens
  misc_RNA (1)...(19): siRNA sense strand
agaccaaggaugagcaguu

SEQ ID NO: 1177812 - RNA, 19 nt, Homo sapiens
  misc_RNA (1)...(19): siRNA sense strand
ugacaacgcgccugcaaaa

SEQ ID NO: 1177813 - RNA, 19 nt, Homo sapiens
  misc_RNA (1)...(19): siRNA sense strand
agaagguguuugaggagau

SEQ ID NO: 1177814 - RNA, 19 nt, Homo sapiens
  misc_RNA (1)...(19): siRNA sense strand
cacuacgagucccuucaaa

SEQ ID NO: 1177815 - RNA, 19 nt, Homo sapiens
  misc_RNA (1)...(19): siRNA sense strand
ucaacacguuccagagcau

SEQ ID NO: 1177816 - RNA, 19 nt, Homo sapiens
  misc_RNA (1)...(19): siRNA sense strand
gccagcaacgugcagaaga

SEQ ID NO: 1177817 - RNA, 19 nt, Homo sapiens
  misc_RNA (1)...(19): siRNA sense strand
cguccagaauuucaacaag

SEQ ID NO: 1177818 - RNA, 19 nt, Homo sapiens
  misc_RNA (1)...(19): siRNA sense strand
uccagaauuucaacaagca

SEQ ID NO: 1177819 - RNA, 19 nt, Homo sapiens
  misc_RNA (1)...(19): siRNA sense strand
cuacacggccacugacaca

SEQ ID NO: 1177820 - RNA, 19 nt, Homo sapiens
  misc_RNA (1)...(19): siRNA sense strand
gcucaaccagaaccucaau

SEQ ID NO: 1177821 - RNA, 19 nt, Homo sapiens
  misc_RNA (1)...(19): siRNA sense strand
uggaacagccgcguagguu

SEQ ID NO: 1177822 - RNA, 19 nt, Homo sapiens
  misc_RNA (1)...(19): siRNA sense strand
gcucaucaaagcccagaag

SEQ ID NO: 1177823 - RNA, 19 nt, Homo sapiens
  misc_RNA (1)...(19): siRNA sense strand
caaacaagaucgcagagaa

SEQ ID NO: 1177824 - RNA, 19 nt, Homo sapiens
  misc_RNA (1)...(19): siRNA sense strand
gcucaaggcuggugaugug

SEQ ID NO: 1177825 - RNA, 19 nt, Homo sapiens
  misc_RNA (1)...(19): siRNA sense strand
gaccaaggaugagcaguuu

SEQ ID NO: 1177826 - RNA, 19 nt, Homo sapiens
  misc_RNA (1)...(19): siRNA sense strand
aaagaaggaugaagccaaa

SEQ ID NO: 1177827 - RNA, 19 nt, Homo sapiens
  misc_RNA (1)...(19): siRNA sense strand
gacaucaagucacgcauug

SEQ ID NO: 1177828 - RNA, 19 nt, Homo sapiens
  misc_RNA (1)...(19): siRNA sense strand
gaacagccgcguagguuuc

SEQ ID NO: 1177829 - RNA, 19 nt, Homo sapiens
  misc_RNA (1)...(19): siRNA sense strand
cagaugagaccaaggauga

SEQ ID NO: 1177830 - RNA, 19 nt, Homo sapiens
  misc_RNA (1)...(19): siRNA sense strand
gagcagugcguccagaauu

SEQ ID NO: 1177831 - RNA, 19 nt, Homo sapiens
  misc_RNA (1)...(19): siRNA sense strand
ccagcaacgugcagaagaa

SEQ ID NO: 1177832 - RNA, 19 nt, Homo sapiens
  misc_RNA (1)...(19): siRNA sense strand
agaaggaucuccggaccua

SEQ ID NO: 1177833 - RNA, 19 nt, Homo sapiens
  misc_RNA (1)...(19): siRNA sense strand
guggagaccuucccagcaa

SEQ ID NO: 1177834 - RNA, 19 nt, Homo sapiens
  misc_RNA (1)...(19): siRNA sense strand
ggcgcaagcugguggacua

SEQ ID NO: 1177835 - RNA, 19 nt, Homo sapiens
  misc_RNA (1)...(19): siRNA sense strand
gaccugcuguggauggauu

SEQ ID NO: 1177836 - RNA, 19 nt, Homo sapiens
  misc_RNA (1)...(19): siRNA sense strand
gaagguguuugaggagaug

SEQ ID NO: 1177837 - RNA, 19 nt, Homo sapiens
  misc_RNA (1)...(19): siRNA sense strand
gcagagaugggcaguaaag

SEQ ID NO: 1177838 - RNA, 19 nt, Homo sapiens
  misc_RNA (1)...(19): siRNA sense strand
cccgagaacuucacugaga

SEQ ID NO: 1177839 - RNA, 19 nt, Homo sapiens
  misc_RNA (1)...(19): siRNA sense strand
gcaagcugguggacuacga

SEQ ID NO: 1177840 - RNA, 19 nt, Homo sapiens
  misc_RNA (1)...(19): siRNA sense strand
ggaacagccgcguagguuu

SEQ ID NO: 1177841 - RNA, 19 nt, Homo sapiens
  misc_RNA (1)...(19): siRNA sense strand
cgggaaagaucgccagcaa

SEQ ID NO: 1177842 - RNA, 19 nt, Homo sapiens
  misc_RNA (1)...(19): siRNA sense strand
ccaaggaugagcaguuuga

SEQ ID NO: 1177843 - RNA, 19 nt, Homo sapiens
  misc_RNA (1)...(19): siRNA sense strand
gcagggaugaggcaaacaa

SEQ ID NO: 1177844 - RNA, 19 nt, Homo sapiens
  misc_RNA (1)...(19): siRNA sense strand
acaacgaccugcuguggau

SEQ ID NO: 1177845 - RNA, 19 nt, Homo sapiens
  misc_RNA (1)...(19): siRNA sense strand
gggaugaggcaaacaagau

SEQ ID NO: 1177846 - RNA, 19 nt, Homo sapiens
  misc_RNA (1)...(19): siRNA sense strand
ugaaggagagcgacuggaa

SEQ ID NO: 1177847 - RNA, 19 nt, Homo sapiens
  misc_RNA (1)...(19): siRNA sense strand
gcaaacaagaucgcagaga

SEQ ID NO: 1177848 - RNA, 19 nt, Homo sapiens
  misc_RNA (1)...(19): siRNA sense strand
cuaccuggccuccgucaaa

SEQ ID NO: 1177849 - RNA, 19 nt, Homo sapiens
  misc_RNA (1)...(19): siRNA sense strand
ucaaccagaaccucaauga

SEQ ID NO: 1177850 - RNA, 19 nt, Homo sapiens
  misc_RNA (1)...(19): siRNA sense strand
cgacaucaagucacgcauu

SEQ ID NO: 1177851 - RNA, 19 nt, Homo sapiens
  misc_RNA (1)...(19): siRNA sense strand
aaccagaaccucaaugaug

SEQ ID NO: 1177852 - RNA, 19 nt, Homo sapiens
  misc_RNA (1)...(19): siRNA sense strand
gcaacaccuucacggucaa

SEQ ID NO: 1177853 - RNA, 19 nt, Homo sapiens
  misc_RNA (1)...(19): siRNA sense strand
accagaaccucaaugaugu

SEQ ID NO: 1177854 - RNA, 19 nt, Homo sapiens
  misc_RNA (1)...(19): siRNA sense strand
aggaggagcucaucaaagc

SEQ ID NO: 1177855 - RNA, 19 nt, Homo sapiens
  misc_RNA (1)...(19): siRNA sense strand
cgaggaggagcucaucaaa

SEQ ID NO: 1177856 - RNA, 19 nt, Homo sapiens
  misc_RNA (1)...(19): siRNA sense strand
agcagugcguccagaauuu

SEQ ID NO: 1177857 - RNA, 19 nt, Homo sapiens
  misc_RNA (1)...(19): siRNA sense strand
ggaaggcagaugagaccaa

SEQ ID NO: 1177858 - RNA, 19 nt, Homo sapiens
  misc_RNA (1)...(19): siRNA sense strand
ucaaagcccagaagguguu

SEQ ID NO: 1177859 - RNA, 19 nt, Homo sapiens
  misc_RNA (1)...(19): siRNA sense strand
gaggaggagcucaucaaag

SEQ ID NO: 1177860 - RNA, 19 nt, Homo sapiens
  misc_RNA (1)...(19): siRNA sense strand
acaaggagaugagcaagcu

SEQ ID NO: 1177861 - RNA, 19 nt, Homo sapiens
  misc_RNA (1)...(19): siRNA sense strand
ggaugaggcaaacaagauc

SEQ ID NO: 1177862 - RNA, 19 nt, Homo sapiens
  misc_RNA (1)...(19): siRNA sense strand
gaaggaugaagccaaaauu

SEQ ID NO: 1177863 - RNA, 19 nt, Homo sapiens
  misc_RNA (1)...(19): siRNA sense strand
ccacuacgagucccuucaa

SEQ ID NO: 1177864 - RNA, 19 nt, Homo sapiens
  misc_RNA (1)...(19): siRNA sense strand
ggauggauuaccaccagaa

SEQ ID NO: 1177865 - RNA, 19 nt, Homo sapiens
  misc_RNA (1)...(19): siRNA sense strand
caaccagaaccucaaugau

SEQ ID NO: 1177866 - RNA, 19 nt, Homo sapiens
  misc_RNA (1)...(19): siRNA sense strand
gcagugcguccagaauuuc

SEQ ID NO: 1177867 - RNA, 19 nt, Homo sapiens
  misc_RNA (1)...(19): siRNA sense strand
caagaucgcagagaacaac

SEQ ID NO: 1177868 - RNA, 19 nt, Homo sapiens
  misc_RNA (1)...(19): siRNA sense strand
agaccaaggaugagcaguu

SEQ ID NO: 1177869 - RNA, 19 nt, Homo sapiens
  misc_RNA (1)...(19): siRNA sense strand
ugacaacgcgccugcaaaa

SEQ ID NO: 1177870 - RNA, 19 nt, Homo sapiens
  misc_RNA (1)...(19): siRNA sense strand
agaagguguuugaggagau

SEQ ID NO: 1177871 - RNA, 19 nt, Homo sapiens
  misc_RNA (1)...(19): siRNA sense strand
cacuacgagucccuucaaa

SEQ ID NO: 1177872 - RNA, 19 nt, Homo sapiens
  misc_RNA (1)...(19): siRNA sense strand
ucaacacguuccagagcau

SEQ ID NO: 1177873 - RNA, 19 nt, Homo sapiens
  misc_RNA (1)...(19): siRNA sense strand
gccagcaacgugcagaaga

SEQ ID NO: 1177874 - RNA, 19 nt, Homo sapiens
  misc_RNA (1)...(19): siRNA sense strand
cguccagaauuucaacaag

SEQ ID NO: 1177875 - RNA, 19 nt, Homo sapiens
  misc_RNA (1)...(19): siRNA sense strand
uccagaauuucaacaagca

SEQ ID NO: 1177876 - RNA, 19 nt, Homo sapiens
  misc_RNA (1)...(19): siRNA sense strand
cuacacggccacugacaca

SEQ ID NO: 1177877 - RNA, 19 nt, Homo sapiens
  misc_RNA (1)...(19): siRNA sense strand
gcucaaccagaaccucaau

SEQ ID NO: 1177878 - RNA, 19 nt, Homo sapiens
  misc_RNA (1)...(19): siRNA sense strand
uggaacagccgcguagguu

SEQ ID NO: 1177879 - RNA, 19 nt, Homo sapiens
  misc_RNA (1)...(19): siRNA sense strand
gcucaucaaagcccagaag

SEQ ID NO: 1177880 - RNA, 19 nt, Homo sapiens
  misc_RNA (1)...(19): siRNA sense strand
caaacaagaucgcagagaa

SEQ ID NO: 1177881 - RNA, 19 nt, Homo sapiens
  misc_RNA (1)...(19): siRNA sense strand
gcucaaggcuggugaugug

SEQ ID NO: 1177882 - RNA, 19 nt, Homo sapiens
  misc_RNA (1)...(19): siRNA sense strand
gaccaaggaugagcaguuu

SEQ ID NO: 1177883 - RNA, 19 nt, Homo sapiens
  misc_RNA (1)...(19): siRNA sense strand
aaagaaggaugaagccaaa

SEQ ID NO: 1177884 - RNA, 19 nt, Homo sapiens
  misc_RNA (1)...(19): siRNA sense strand
gacaucaagucacgcauug

SEQ ID NO: 1177885 - RNA, 19 nt, Homo sapiens
  misc_RNA (1)...(19): siRNA sense strand
gaacagccgcguagguuuc

SEQ ID NO: 1177886 - RNA, 19 nt, Homo sapiens
  misc_RNA (1)...(19): siRNA sense strand
cagaugagaccaaggauga

SEQ ID NO: 1177887 - RNA, 19 nt, Homo sapiens
  misc_RNA (1)...(19): siRNA sense strand
gagcagugcguccagaauu

SEQ ID NO: 1177888 - RNA, 19 nt, Homo sapiens
  misc_RNA (1)...(19): siRNA sense strand
ccagcaacgugcagaagaa

SEQ ID NO: 1177889 - RNA, 19 nt, Homo sapiens
  misc_RNA (1)...(19): siRNA sense strand
agaaggaucuccggaccua

SEQ ID NO: 1177890 - RNA, 19 nt, Homo sapiens
  misc_RNA (1)...(19): siRNA sense strand
guggagaccuucccagcaa

SEQ ID NO: 1177891 - RNA, 19 nt, Homo sapiens
  misc_RNA (1)...(19): siRNA sense strand
ggcgcaagcugguggacua

SEQ ID NO: 1177892 - RNA, 19 nt, Homo sapiens
  misc_RNA (1)...(19): siRNA sense strand
gaccugcuguggauggauu

SEQ ID NO: 1177893 - RNA, 19 nt, Homo sapiens
  misc_RNA (1)...(19): siRNA sense strand
gaagguguuugaggagaug

SEQ ID NO: 1177894 - RNA, 19 nt, Homo sapiens
  misc_RNA (1)...(19): siRNA sense strand
gcagagaugggcaguaaag

SEQ ID NO: 1177895 - RNA, 19 nt, Homo sapiens
  misc_RNA (1)...(19): siRNA sense strand
cccgagaacuucacugaga

SEQ ID NO: 1177896 - RNA, 19 nt, Homo sapiens
  misc_RNA (1)...(19): siRNA sense strand
gcaagcugguggacuacga

SEQ ID NO: 1177897 - RNA, 19 nt, Homo sapiens
  misc_RNA (1)...(19): siRNA sense strand
ggaacagccgcguagguuu

SEQ ID NO: 1177898 - RNA, 19 nt, Homo sapiens
  misc_RNA (1)...(19): siRNA sense strand
cgggaaagaucgccagcaa

SEQ ID NO: 1177899 - RNA, 19 nt, Homo sapiens
  misc_RNA (1)...(19): siRNA sense strand
ccaaggaugagcaguuuga

SEQ ID NO: 1177900 - RNA, 19 nt, Homo sapiens
  misc_RNA (1)...(19): siRNA sense strand
gcagggaugaggcaaacaa

SEQ ID NO: 1177901 - RNA, 19 nt, Homo sapiens
  misc_RNA (1)...(19): siRNA sense strand
acaacgaccugcuguggau

SEQ ID NO: 1177902 - RNA, 19 nt, Homo sapiens
  misc_RNA (1)...(19): siRNA sense strand
gggaugaggcaaacaagau

SEQ ID NO: 1177903 - RNA, 19 nt, Homo sapiens
  misc_RNA (1)...(19): siRNA sense strand
ugaaggagagcgacuggaa

SEQ ID NO: 1177904 - RNA, 19 nt, Homo sapiens
  misc_RNA (1)...(19): siRNA sense strand
gcaaacaagaucgcagaga

SEQ ID NO: 1177905 - RNA, 19 nt, Homo sapiens
  misc_RNA (1)...(19): siRNA sense strand
cuaccuggccuccgucaaa

SEQ ID NO: 1177906 - RNA, 19 nt, Homo sapiens
  misc_RNA (1)...(19): siRNA sense strand
ucaaccagaaccucaauga

SEQ ID NO: 1177907 - RNA, 19 nt, Homo sapiens
  misc_RNA (1)...(19): siRNA sense strand
cgacaucaagucacgcauu

SEQ ID NO: 1177908 - RNA, 19 nt, Homo sapiens
  misc_RNA (1)...(19): siRNA sense strand
aaccagaaccucaaugaug

SEQ ID NO: 1177909 - RNA, 19 nt, Homo sapiens
  misc_RNA (1)...(19): siRNA sense strand
gcaacaccuucacggucaa

SEQ ID NO: 1177910 - RNA, 19 nt, Homo sapiens
  misc_RNA (1)...(19): siRNA sense strand
accagaaccucaaugaugu

SEQ ID NO: 1177911 - RNA, 19 nt, Homo sapiens
  misc_RNA (1)...(19): siRNA sense strand
aggaggagcucaucaaagc

SEQ ID NO: 1177912 - RNA, 19 nt, Homo sapiens
  misc_RNA (1)...(19): siRNA sense strand
cgaggaggagcucaucaaa

SEQ ID NO: 1177913 - RNA, 19 nt, Homo sapiens
  misc_RNA (1)...(19): siRNA sense strand
agcagugcguccagaauuu

SEQ ID NO: 1177914 - RNA, 19 nt, Homo sapiens
  misc_RNA (1)...(19): siRNA sense strand
ggaaggcagaugagaccaa

SEQ ID NO: 1177915 - RNA, 19 nt, Homo sapiens
  misc_RNA (1)...(19): siRNA sense strand
ucaaagcccagaagguguu

SEQ ID NO: 1177916 - RNA, 19 nt, Homo sapiens
  misc_RNA (1)...(19): siRNA sense strand
gaggaggagcucaucaaag

SEQ ID NO: 1177917 - RNA, 19 nt, Homo sapiens
  misc_RNA (1)...(19): siRNA sense strand
acaaggagaugagcaagcu

SEQ ID NO: 1177918 - RNA, 19 nt, Homo sapiens
  misc_RNA (1)...(19): siRNA sense strand
ggaugaggcaaacaagauc

SEQ ID NO: 1177919 - RNA, 19 nt, Homo sapiens
  misc_RNA (1)...(19): siRNA sense strand
gaaggaugaagccaaaauu

SEQ ID NO: 1177920 - RNA, 19 nt, Homo sapiens
  misc_RNA (1)...(19): siRNA sense strand
ccacuacgagucccuucaa

SEQ ID NO: 1177921 - RNA, 19 nt, Homo sapiens
  misc_RNA (1)...(19): siRNA sense strand
ggauggauuaccaccagaa

SEQ ID NO: 1177922 - RNA, 19 nt, Homo sapiens
  misc_RNA (1)...(19): siRNA sense strand
caaccagaaccucaaugau

SEQ ID NO: 1177923 - RNA, 19 nt, Homo sapiens
  misc_RNA (1)...(19): siRNA sense strand
gcagugcguccagaauuuc

SEQ ID NO: 1177924 - RNA, 19 nt, Homo sapiens
  misc_RNA (1)...(19): siRNA sense strand
caagaucgcagagaacaac

SEQ ID NO: 1177925 - RNA, 19 nt, Homo sapiens
  misc_RNA (1)...(19): siRNA sense strand
agaccaaggaugagcaguu

SEQ ID NO: 1177926 - RNA, 19 nt, Homo sapiens
  misc_RNA (1)...(19): siRNA sense strand
ugacaacgcgccugcaaaa

SEQ ID NO: 1177927 - RNA, 19 nt, Homo sapiens
  misc_RNA (1)...(19): siRNA sense strand
agaagguguuugaggagau

SEQ ID NO: 1177928 - RNA, 19 nt, Homo sapiens
  misc_RNA (1)...(19): siRNA sense strand
cacuacgagucccuucaaa

SEQ ID NO: 1177929 - RNA, 19 nt, Homo sapiens
  misc_RNA (1)...(19): siRNA sense strand
ucaacacguuccagagcau

SEQ ID NO: 1177930 - RNA, 19 nt, Homo sapiens
  misc_RNA (1)...(19): siRNA sense strand
gccagcaacgugcagaaga

SEQ ID NO: 1177931 - RNA, 19 nt, Homo sapiens
  misc_RNA (1)...(19): siRNA sense strand
cguccagaauuucaacaag

SEQ ID NO: 1177932 - RNA, 19 nt, Homo sapiens
  misc_RNA (1)...(19): siRNA sense strand
uccagaauuucaacaagca

SEQ ID NO: 1177933 - RNA, 19 nt, Homo sapiens
  misc_RNA (1)...(19): siRNA sense strand
cuacacggccacugacaca

SEQ ID NO: 1177934 - RNA, 19 nt, Homo sapiens
  misc_RNA (1)...(19): siRNA sense strand
gcucaaccagaaccucaau

SEQ ID NO: 1177935 - RNA, 19 nt, Homo sapiens
  misc_RNA (1)...(19): siRNA sense strand
uggaacagccgcguagguu

SEQ ID NO: 1177936 - RNA, 19 nt, Homo sapiens
  misc_RNA (1)...(19): siRNA sense strand
gcucaucaaagcccagaag

SEQ ID NO: 1177937 - RNA, 19 nt, Homo sapiens
  misc_RNA (1)...(19): siRNA sense strand
caaacaagaucgcagagaa

SEQ ID NO: 1177938 - RNA, 19 nt, Homo sapiens
  misc_RNA (1)...(19): siRNA sense strand
gcucaaggcuggugaugug

SEQ ID NO: 1177939 - RNA, 19 nt, Homo sapiens
  misc_RNA (1)...(19): siRNA sense strand
gaccaaggaugagcaguuu

SEQ ID NO: 1177940 - RNA, 19 nt, Homo sapiens
  misc_RNA (1)...(19): siRNA sense strand
aaagaaggaugaagccaaa

SEQ ID NO: 1177941 - RNA, 19 nt, Homo sapiens
  misc_RNA (1)...(19): siRNA sense strand
gacaucaagucacgcauug

SEQ ID NO: 1177942 - RNA, 19 nt, Homo sapiens
  misc_RNA (1)...(19): siRNA sense strand
gaacagccgcguagguuuc

SEQ ID NO: 1177943 - RNA, 19 nt, Homo sapiens
  misc_RNA (1)...(19): siRNA sense strand
cagaugagaccaaggauga

SEQ ID NO: 1177944 - RNA, 19 nt, Homo sapiens
  misc_RNA (1)...(19): siRNA sense strand
gagcagugcguccagaauu

SEQ ID NO: 1177945 - RNA, 19 nt, Homo sapiens
  misc_RNA (1)...(19): siRNA sense strand
ccagcaacgugcagaagaa

SEQ ID NO: 1177946 - RNA, 19 nt, Homo sapiens
  misc_RNA (1)...(19): siRNA sense strand
agaaggaucuccggaccua

SEQ ID NO: 1177947 - RNA, 19 nt, Homo sapiens
  misc_RNA (1)...(19): siRNA sense strand
guggagaccuucccagcaa

SEQ ID NO: 1177948 - RNA, 19 nt, Homo sapiens
  misc_RNA (1)...(19): siRNA sense strand
ggcgcaagcugguggacua

SEQ ID NO: 1177949 - RNA, 19 nt, Homo sapiens
  misc_RNA (1)...(19): siRNA sense strand
gaccugcuguggauggauu

SEQ ID NO: 1177950 - RNA, 19 nt, Homo sapiens
  misc_RNA (1)...(19): siRNA sense strand
gaagguguuugaggagaug

SEQ ID NO: 1177951 - RNA, 19 nt, Homo sapiens
  misc_RNA (1)...(19): siRNA sense strand
gcagagaugggcaguaaag

SEQ ID NO: 1177952 - RNA, 19 nt, Homo sapiens
  misc_RNA (1)...(19): siRNA sense strand
cccgagaacuucacugaga

SEQ ID NO: 1177953 - RNA, 19 nt, Homo sapiens
  misc_RNA (1)...(19): siRNA sense strand
gcaagcugguggacuacga

SEQ ID NO: 1177954 - RNA, 19 nt, Homo sapiens
  misc_RNA (1)...(19): siRNA sense strand
ggaacagccgcguagguuu

SEQ ID NO: 1177955 - RNA, 19 nt, Homo sapiens
  misc_RNA (1)...(19): siRNA sense strand
cgggaaagaucgccagcaa

SEQ ID NO: 1177956 - RNA, 19 nt, Homo sapiens
  misc_RNA (1)...(19): siRNA sense strand
ccaaggaugagcaguuuga

SEQ ID NO: 1177957 - RNA, 19 nt, Homo sapiens
  misc_RNA (1)...(19): siRNA sense strand
gcagggaugaggcaaacaa

SEQ ID NO: 1177958 - RNA, 19 nt, Homo sapiens
  misc_RNA (1)...(19): siRNA sense strand
acaacgaccugcuguggau

SEQ ID NO: 1177959 - RNA, 19 nt, Homo sapiens
  misc_RNA (1)...(19): siRNA sense strand
gggaugaggcaaacaagau

SEQ ID NO: 1177960 - RNA, 19 nt, Homo sapiens
  misc_RNA (1)...(19): siRNA sense strand
ugaaggagagcgacuggaa

SEQ ID NO: 1177961 - RNA, 19 nt, Homo sapiens
  misc_RNA (1)...(19): siRNA sense strand
gcaaacaagaucgcagaga

SEQ ID NO: 1177962 - RNA, 19 nt, Homo sapiens
  misc_RNA (1)...(19): siRNA sense strand
cuaccuggccuccgucaaa

SEQ ID NO: 1177963 - RNA, 19 nt, Homo sapiens
  misc_RNA (1)...(19): siRNA sense strand
ucaaccagaaccucaauga

SEQ ID NO: 1177964 - RNA, 19 nt, Homo sapiens
  misc_RNA (1)...(19): siRNA sense strand
cgacaucaagucacgcauu

SEQ ID NO: 1177965 - RNA, 19 nt, Homo sapiens
  misc_RNA (1)...(19): siRNA sense strand
aaccagaaccucaaugaug

SEQ ID NO: 1177966 - RNA, 19 nt, Homo sapiens
  misc_RNA (1)...(19): siRNA sense strand
gcaacaccuucacggucaa

SEQ ID NO: 1177967 - RNA, 19 nt, Homo sapiens
  misc_RNA (1)...(19): siRNA sense strand
accagaaccucaaugaugu

SEQ ID NO: 1177968 - RNA, 19 nt, Homo sapiens
  misc_RNA (1)...(19): siRNA sense strand
aggaggagcucaucaaagc

SEQ ID NO: 1177969 - RNA, 19 nt, Homo sapiens
  misc_RNA (1)...(19): siRNA sense strand
cgaggaggagcucaucaaa

SEQ ID NO: 1177970 - RNA, 19 nt, Homo sapiens
  misc_RNA (1)...(19): siRNA sense strand
agcagugcguccagaauuu

SEQ ID NO: 1177971 - RNA, 19 nt, Homo sapiens
  misc_RNA (1)...(19): siRNA sense strand
ggaaggcagaugagaccaa

SEQ ID NO: 1177972 - RNA, 19 nt, Homo sapiens
  misc_RNA (1)...(19): siRNA sense strand
ucaaagcccagaagguguu

SEQ ID NO: 1177973 - RNA, 19 nt, Homo sapiens
  misc_RNA (1)...(19): siRNA sense strand
gaggaggagcucaucaaag

SEQ ID NO: 1177974 - RNA, 19 nt, Homo sapiens
  misc_RNA (1)...(19): siRNA sense strand
acaaggagaugagcaagcu

SEQ ID NO: 1177975 - RNA, 19 nt, Homo sapiens
  misc_RNA (1)...(19): siRNA sense strand
ggaugaggcaaacaagauc

SEQ ID NO: 1177976 - RNA, 19 nt, Homo sapiens
  misc_RNA (1)...(19): siRNA sense strand
gaaggaugaagccaaaauu

SEQ ID NO: 1177977 - RNA, 19 nt, Homo sapiens
  misc_RNA (1)...(19): siRNA sense strand
ccacuacgagucccuucaa

SEQ ID NO: 1177978 - RNA, 19 nt, Homo sapiens
  misc_RNA (1)...(19): siRNA sense strand
ggauggauuaccaccagaa

SEQ ID NO: 1177979 - RNA, 19 nt, Homo sapiens
  misc_RNA (1)...(19): siRNA sense strand
caaccagaaccucaaugau

SEQ ID NO: 1177980 - RNA, 19 nt, Homo sapiens
  misc_RNA (1)...(19): siRNA sense strand
gcagugcguccagaauuuc

SEQ ID NO: 1177981 - RNA, 19 nt, Homo sapiens
  misc_RNA (1)...(19): siRNA sense strand
caagaucgcagagaacaac

SEQ ID NO: 1177982 - RNA, 19 nt, Homo sapiens
  misc_RNA (1)...(19): siRNA sense strand
agaccaaggaugagcaguu

SEQ ID NO: 1177983 - RNA, 19 nt, Homo sapiens
  misc_RNA (1)...(19): siRNA sense strand
ugacaacgcgccugcaaaa

SEQ ID NO: 1177984 - RNA, 19 nt, Homo sapiens
  misc_RNA (1)...(19): siRNA sense strand
agaagguguuugaggagau

SEQ ID NO: 1177985 - RNA, 19 nt, Homo sapiens
  misc_RNA (1)...(19): siRNA sense strand
cacuacgagucccuucaaa

SEQ ID NO: 1177986 - RNA, 19 nt, Homo sapiens
  misc_RNA (1)...(19): siRNA sense strand
ucaacacguuccagagcau

SEQ ID NO: 1177987 - RNA, 19 nt, Homo sapiens
  misc_RNA (1)...(19): siRNA sense strand
gccagcaacgugcagaaga

SEQ ID NO: 1177988 - RNA, 19 nt, Homo sapiens
  misc_RNA (1)...(19): siRNA sense strand
cguccagaauuucaacaag

SEQ ID NO: 1177989 - RNA, 19 nt, Homo sapiens
  misc_RNA (1)...(19): siRNA sense strand
uccagaauuucaacaagca

SEQ ID NO: 1177990 - RNA, 19 nt, Homo sapiens
  misc_RNA (1)...(19): siRNA sense strand
cuacacggccacugacaca

SEQ ID NO: 1177991 - RNA, 19 nt, Homo sapiens
  misc_RNA (1)...(19): siRNA sense strand
gcucaaccagaaccucaau

SEQ ID NO: 1177992 - RNA, 19 nt, Homo sapiens
  misc_RNA (1)...(19): siRNA sense strand
uggaacagccgcguagguu

SEQ ID NO: 1177993 - RNA, 19 nt, Homo sapiens
  misc_RNA (1)...(19): siRNA sense strand
gcucaucaaagcccagaag

SEQ ID NO: 1177994 - RNA, 19 nt, Homo sapiens
  misc_RNA (1)...(19): siRNA sense strand
caaacaagaucgcagagaa

SEQ ID NO: 1177995 - RNA, 19 nt, Homo sapiens
  misc_RNA (1)...(19): siRNA sense strand
gcucaaggcuggugaugug

SEQ ID NO: 1177996 - RNA, 19 nt, Homo sapiens
  misc_RNA (1)...(19): siRNA sense strand
gaccaaggaugagcaguuu

SEQ ID NO: 1177997 - RNA, 19 nt, Homo sapiens
  misc_RNA (1)...(19): siRNA sense strand
aaagaaggaugaagccaaa

SEQ ID NO: 1177998 - RNA, 19 nt, Homo sapiens
  misc_RNA (1)...(19): siRNA sense strand
gacaucaagucacgcauug

SEQ ID NO: 1177999 - RNA, 19 nt, Homo sapiens
  misc_RNA (1)...(19): siRNA sense strand
gaacagccgcguagguuuc

SEQ ID NO: 1178000 - RNA, 19 nt, Homo sapiens
  misc_RNA (1)...(19): siRNA sense strand
cagaugagaccaaggauga

SEQ ID NO: 1178001 - RNA, 19 nt, Homo sapiens
  misc_RNA (1)...(19): siRNA sense strand
gagcagugcguccagaauu

SEQ ID NO: 1178002 - RNA, 19 nt, Homo sapiens
  misc_RNA (1)...(19): siRNA sense strand
ccagcaacgugcagaagaa

SEQ ID NO: 1178003 - RNA, 19 nt, Homo sapiens
  misc_RNA (1)...(19): siRNA sense strand
agaaggaucuccggaccua

SEQ ID NO: 1178004 - RNA, 19 nt, Homo sapiens
  misc_RNA (1)...(19): siRNA sense strand
guggagaccuucccagcaa

SEQ ID NO: 1178005 - RNA, 19 nt, Homo sapiens
  misc_RNA (1)...(19): siRNA sense strand
ggcgcaagcugguggacua

SEQ ID NO: 1178006 - RNA, 19 nt, Homo sapiens
  misc_RNA (1)...(19): siRNA sense strand
gaccugcuguggauggauu

SEQ ID NO: 1178007 - RNA, 19 nt, Homo sapiens
  misc_RNA (1)...(19): siRNA sense strand
gaagguguuugaggagaug

SEQ ID NO: 1178008 - RNA, 19 nt, Homo sapiens
  misc_RNA (1)...(19): siRNA sense strand
gcagagaugggcaguaaag

SEQ ID NO: 1178009 - RNA, 19 nt, Homo sapiens
  misc_RNA (1)...(19): siRNA sense strand
cccgagaacuucacugaga

SEQ ID NO: 1178010 - RNA, 19 nt, Homo sapiens
  misc_RNA (1)...(19): siRNA sense strand
gcaagcugguggacuacga

SEQ ID NO: 1178011 - RNA, 19 nt, Homo sapiens
  misc_RNA (1)...(19): siRNA sense strand
ggaacagccgcguagguuu

SEQ ID NO: 1178012 - RNA, 19 nt, Homo sapiens
  misc_RNA (1)...(19): siRNA sense strand
cgggaaagaucgccagcaa

SEQ ID NO: 1178013 - RNA, 19 nt, Homo sapiens
  misc_RNA (1)...(19): siRNA sense strand
ccaaggaugagcaguuuga

SEQ ID NO: 1178014 - RNA, 19 nt, Homo sapiens
  misc_RNA (1)...(19): siRNA sense strand
gcagggaugaggcaaacaa

SEQ ID NO: 1178015 - RNA, 19 nt, Homo sapiens
  misc_RNA (1)...(19): siRNA sense strand
acaacgaccugcuguggau

SEQ ID NO: 1178016 - RNA, 19 nt, Homo sapiens
  misc_RNA (1)...(19): siRNA sense strand
gggaugaggcaaacaagau

SEQ ID NO: 1178017 - RNA, 19 nt, Homo sapiens
  misc_RNA (1)...(19): siRNA sense strand
ugaaggagagcgacuggaa

SEQ ID NO: 1178018 - RNA, 19 nt, Homo sapiens
  misc_RNA (1)...(19): siRNA sense strand
gcaaacaagaucgcagaga

SEQ ID NO: 1178019 - RNA, 19 nt, Homo sapiens
  misc_RNA (1)...(19): siRNA sense strand
cuaccuggccuccgucaaa

SEQ ID NO: 1178020 - RNA, 19 nt, Homo sapiens
  misc_RNA (1)...(19): siRNA sense strand
ucaaccagaaccucaauga

SEQ ID NO: 1178021 - RNA, 19 nt, Homo sapiens
  misc_RNA (1)...(19): siRNA sense strand
cgacaucaagucacgcauu

SEQ ID NO: 1178022 - RNA, 19 nt, Homo sapiens
  misc_RNA (1)...(19): siRNA sense strand
aaccagaaccucaaugaug

SEQ ID NO: 1178023 - RNA, 19 nt, Homo sapiens
  misc_RNA (1)...(19): siRNA sense strand
gcaacaccuucacggucaa

SEQ ID NO: 1178024 - RNA, 19 nt, Homo sapiens
  misc_RNA (1)...(19): siRNA sense strand
accagaaccucaaugaugu

SEQ ID NO: 1178025 - RNA, 19 nt, Homo sapiens
  misc_RNA (1)...(19): siRNA sense strand
aggaggagcucaucaaagc

SEQ ID NO: 1178026 - RNA, 19 nt, Homo sapiens
  misc_RNA (1)...(19): siRNA sense strand
cgaggaggagcucaucaaa

SEQ ID NO: 1178027 - RNA, 19 nt, Homo sapiens
  misc_RNA (1)...(19): siRNA sense strand
agcagugcguccagaauuu

SEQ ID NO: 1178028 - RNA, 19 nt, Homo sapiens
  misc_RNA (1)...(19): siRNA sense strand
ggaaggcagaugagaccaa

SEQ ID NO: 1178029 - RNA, 19 nt, Homo sapiens
  misc_RNA (1)...(19): siRNA sense strand
ucaaagcccagaagguguu

SEQ ID NO: 1178030 - RNA, 19 nt, Homo sapiens
  misc_RNA (1)...(19): siRNA sense strand
gaggaggagcucaucaaag

SEQ ID NO: 1178031 - RNA, 19 nt, Homo sapiens
  misc_RNA (1)...(19): siRNA sense strand
acaaggagaugagcaagcu

SEQ ID NO: 1178032 - RNA, 19 nt, Homo sapiens
  misc_RNA (1)...(19): siRNA sense strand
ggaugaggcaaacaagauc

SEQ ID NO: 1178033 - RNA, 19 nt, Homo sapiens
  misc_RNA (1)...(19): siRNA sense strand
gaaggaugaagccaaaauu

SEQ ID NO: 1178034 - RNA, 19 nt, Homo sapiens
  misc_RNA (1)...(19): siRNA sense strand
ccacuacgagucccuucaa

SEQ ID NO: 1178035 - RNA, 19 nt, Homo sapiens
  misc_RNA (1)...(19): siRNA sense strand
ggauggauuaccaccagaa

SEQ ID NO: 1178036 - RNA, 19 nt, Homo sapiens
  misc_RNA (1)...(19): siRNA sense strand
caaccagaaccucaaugau

SEQ ID NO: 1178037 - RNA, 19 nt, Homo sapiens
  misc_RNA (1)...(19): siRNA sense strand
gcagugcguccagaauuuc

SEQ ID NO: 1178038 - RNA, 19 nt, Homo sapiens
  misc_RNA (1)...(19): siRNA sense strand
caagaucgcagagaacaac

SEQ ID NO: 1178039 - RNA, 19 nt, Homo sapiens
  misc_RNA (1)...(19): siRNA sense strand
agaccaaggaugagcaguu

SEQ ID NO: 1178040 - RNA, 19 nt, Homo sapiens
  misc_RNA (1)...(19): siRNA sense strand
ugacaacgcgccugcaaaa

SEQ ID NO: 1178041 - RNA, 19 nt, Homo sapiens
  misc_RNA (1)...(19): siRNA sense strand
agaagguguuugaggagau

SEQ ID NO: 1178042 - RNA, 19 nt, Homo sapiens
  misc_RNA (1)...(19): siRNA sense strand
cacuacgagucccuucaaa

SEQ ID NO: 1178043 - RNA, 19 nt, Homo sapiens
  misc_RNA (1)...(19): siRNA sense strand
ucaacacguuccagagcau

SEQ ID NO: 1178044 - RNA, 19 nt, Homo sapiens
  misc_RNA (1)...(19): siRNA sense strand
gccagcaacgugcagaaga

SEQ ID NO: 1178045 - RNA, 19 nt, Homo sapiens
  misc_RNA (1)...(19): siRNA sense strand
cguccagaauuucaacaag

SEQ ID NO: 1178046 - RNA, 19 nt, Homo sapiens
  misc_RNA (1)...(19): siRNA sense strand
uccagaauuucaacaagca

SEQ ID NO: 1178047 - RNA, 19 nt, Homo sapiens
  misc_RNA (1)...(19): siRNA sense strand
cuacacggccacugacaca

SEQ ID NO: 1178048 - RNA, 19 nt, Homo sapiens
  misc_RNA (1)...(19): siRNA sense strand
gcucaaccagaaccucaau

SEQ ID NO: 1178049 - RNA, 19 nt, Homo sapiens
  misc_RNA (1)...(19): siRNA sense strand
uggaacagccgcguagguu

SEQ ID NO: 1178050 - RNA, 19 nt, Homo sapiens
  misc_RNA (1)...(19): siRNA sense strand
gcucaucaaagcccagaag

SEQ ID NO: 1178051 - RNA, 19 nt, Homo sapiens
  misc_RNA (1)...(19): siRNA sense strand
caaacaagaucgcagagaa

SEQ ID NO: 1178052 - RNA, 19 nt, Homo sapiens
  misc_RNA (1)...(19): siRNA sense strand
gcucaaggcuggugaugug

SEQ ID NO: 1178053 - RNA, 19 nt, Homo sapiens
  misc_RNA (1)...(19): siRNA sense strand
gaccaaggaugagcaguuu

SEQ ID NO: 1178054 - RNA, 19 nt, Homo sapiens
  misc_RNA (1)...(19): siRNA sense strand
aaagaaggaugaagccaaa

SEQ ID NO: 1178055 - RNA, 19 nt, Homo sapiens
  misc_RNA (1)...(19): siRNA sense strand
gacaucaagucacgcauug

SEQ ID NO: 1178056 - RNA, 19 nt, Homo sapiens
  misc_RNA (1)...(19): siRNA sense strand
gaacagccgcguagguuuc

SEQ ID NO: 1178057 - RNA, 19 nt, Homo sapiens
  misc_RNA (1)...(19): siRNA sense strand
cagaugagaccaaggauga

SEQ ID NO: 1178058 - RNA, 19 nt, Homo sapiens
  misc_RNA (1)...(19): siRNA sense strand
gagcagugcguccagaauu

SEQ ID NO: 1178059 - RNA, 19 nt, Homo sapiens
  misc_RNA (1)...(19): siRNA sense strand
ccagcaacgugcagaagaa

SEQ ID NO: 1178060 - RNA, 19 nt, Homo sapiens
  misc_RNA (1)...(19): siRNA sense strand
agaaggaucuccggaccua

SEQ ID NO: 1178061 - RNA, 19 nt, Homo sapiens
  misc_RNA (1)...(19): siRNA sense strand
guggagaccuucccagcaa

SEQ ID NO: 1178062 - RNA, 19 nt, Homo sapiens
  misc_RNA (1)...(19): siRNA sense strand
ggcgcaagcugguggacua

SEQ ID NO: 1178063 - RNA, 19 nt, Homo sapiens
  misc_RNA (1)...(19): siRNA sense strand
gaccugcuguggauggauu

SEQ ID NO: 1178064 - RNA, 19 nt, Homo sapiens
  misc_RNA (1)...(19): siRNA sense strand
gaagguguuugaggagaug

SEQ ID NO: 1178065 - RNA, 19 nt, Homo sapiens
  misc_RNA (1)...(19): siRNA sense strand
gcagagaugggcaguaaag

SEQ ID NO: 1178066 - RNA, 19 nt, Homo sapiens
  misc_RNA (1)...(19): siRNA sense strand
cccgagaacuucacugaga

SEQ ID NO: 1178067 - RNA, 19 nt, Homo sapiens
  misc_RNA (1)...(19): siRNA sense strand
gcaagcugguggacuacga

SEQ ID NO: 1178068 - RNA, 19 nt, Homo sapiens
  misc_RNA (1)...(19): siRNA sense strand
ggaacagccgcguagguuu

SEQ ID NO: 1178069 - RNA, 19 nt, Homo sapiens
  misc_RNA (1)...(19): siRNA sense strand
cgggaaagaucgccagcaa

SEQ ID NO: 1178070 - RNA, 19 nt, Homo sapiens
  misc_RNA (1)...(19): siRNA sense strand
ccaaggaugagcaguuuga

SEQ ID NO: 1178071 - RNA, 19 nt, Homo sapiens
  misc_RNA (1)...(19): siRNA sense strand
gcagggaugaggcaaacaa

SEQ ID NO: 1178072 - RNA, 19 nt, Homo sapiens
  misc_RNA (1)...(19): siRNA sense strand
acaacgaccugcuguggau

SEQ ID NO: 1178073 - RNA, 19 nt, Homo sapiens
  misc_RNA (1)...(19): siRNA sense strand
gggaugaggcaaacaagau

SEQ ID NO: 1178074 - RNA, 19 nt, Homo sapiens
  misc_RNA (1)...(19): siRNA sense strand
ugaaggagagcgacuggaa

SEQ ID NO: 1178075 - RNA, 19 nt, Homo sapiens
  misc_RNA (1)...(19): siRNA sense strand
gcaaacaagaucgcagaga

SEQ ID NO: 1178076 - RNA, 19 nt, Homo sapiens
  misc_RNA (1)...(19): siRNA sense strand
cuaccuggccuccgucaaa

SEQ ID NO: 1178077 - RNA, 19 nt, Homo sapiens
  misc_RNA (1)...(19): siRNA sense strand
ucaaccagaaccucaauga

SEQ ID NO: 1178078 - RNA, 19 nt, Homo sapiens
  misc_RNA (1)...(19): siRNA sense strand
cgacaucaagucacgcauu

SEQ ID NO: 1178079 - RNA, 19 nt, Homo sapiens
  misc_RNA (1)...(19): siRNA sense strand
aaccagaaccucaaugaug

SEQ ID NO: 1178080 - RNA, 19 nt, Homo sapiens
  misc_RNA (1)...(19): siRNA sense strand
gcaacaccuucacggucaa

SEQ ID NO: 1178081 - RNA, 19 nt, Homo sapiens
  misc_RNA (1)...(19): siRNA sense strand
accagaaccucaaugaugu

SEQ ID NO: 1178082 - RNA, 19 nt, Homo sapiens
  misc_RNA (1)...(19): siRNA sense strand
aggaggagcucaucaaagc

SEQ ID NO: 1178083 - RNA, 19 nt, Homo sapiens
  misc_RNA (1)...(19): siRNA sense strand
cgaggaggagcucaucaaa

SEQ ID NO: 1178084 - RNA, 19 nt, Homo sapiens
  misc_RNA (1)...(19): siRNA sense strand
agcagugcguccagaauuu

SEQ ID NO: 1178085 - RNA, 19 nt, Homo sapiens
  misc_RNA (1)...(19): siRNA sense strand
ggaaggcagaugagaccaa

SEQ ID NO: 1178086 - RNA, 19 nt, Homo sapiens
  misc_RNA (1)...(19): siRNA sense strand
ucaaagcccagaagguguu

SEQ ID NO: 1178087 - RNA, 19 nt, Homo sapiens
  misc_RNA (1)...(19): siRNA sense strand
gaggaggagcucaucaaag

SEQ ID NO: 1178088 - RNA, 19 nt, Homo sapiens
  misc_RNA (1)...(19): siRNA sense strand
acaaggagaugagcaagcu

SEQ ID NO: 1178089 - RNA, 19 nt, Homo sapiens
  misc_RNA (1)...(19): siRNA sense strand
ggaugaggcaaacaagauc

SEQ ID NO: 1178090 - RNA, 19 nt, Homo sapiens
  misc_RNA (1)...(19): siRNA sense strand
gaaggaugaagccaaaauu

SEQ ID NO: 1178091 - RNA, 19 nt, Homo sapiens
  misc_RNA (1)...(19): siRNA sense strand
ccacuacgagucccuucaa

SEQ ID NO: 1178092 - RNA, 19 nt, Homo sapiens
  misc_RNA (1)...(19): siRNA sense strand
ggauggauuaccaccagaa

SEQ ID NO: 1178093 - RNA, 19 nt, Homo sapiens
  misc_RNA (1)...(19): siRNA sense strand
caaccagaaccucaaugau

SEQ ID NO: 1178094 - RNA, 19 nt, Homo sapiens
  misc_RNA (1)...(19): siRNA sense strand
gcagugcguccagaauuuc

SEQ ID NO: 1178095 - RNA, 19 nt, Homo sapiens
  misc_RNA (1)...(19): siRNA sense strand
caagaucgcagagaacaac

SEQ ID NO: 1178096 - RNA, 19 nt, Homo sapiens
  misc_RNA (1)...(19): siRNA sense strand
agaccaaggaugagcaguu

SEQ ID NO: 1178097 - RNA, 19 nt, Homo sapiens
  misc_RNA (1)...(19): siRNA sense strand
ugacaacgcgccugcaaaa

SEQ ID NO: 1178098 - RNA, 19 nt, Homo sapiens
  misc_RNA (1)...(19): siRNA sense strand
agaagguguuugaggagau

SEQ ID NO: 1178099 - RNA, 19 nt, Homo sapiens
  misc_RNA (1)...(19): siRNA sense strand
cacuacgagucccuucaaa

SEQ ID NO: 1178100 - RNA, 19 nt, Homo sapiens
  misc_RNA (1)...(19): siRNA sense strand
ucaacacguuccagagcau

SEQ ID NO: 1178101 - RNA, 19 nt, Homo sapiens
  misc_RNA (1)...(19): siRNA sense strand
gccagcaacgugcagaaga

SEQ ID NO: 1178102 - RNA, 19 nt, Homo sapiens
  misc_RNA (1)...(19): siRNA sense strand
cguccagaauuucaacaag

SEQ ID NO: 1178103 - RNA, 19 nt, Homo sapiens
  misc_RNA (1)...(19): siRNA sense strand
uccagaauuucaacaagca

SEQ ID NO: 1178104 - RNA, 19 nt, Homo sapiens
  misc_RNA (1)...(19): siRNA sense strand
cuacacggccacugacaca

SEQ ID NO: 1178105 - RNA, 19 nt, Homo sapiens
  misc_RNA (1)...(19): siRNA sense strand
gcucaaccagaaccucaau

SEQ ID NO: 1178106 - RNA, 19 nt, Homo sapiens
  misc_RNA (1)...(19): siRNA sense strand
uggaacagccgcguagguu

SEQ ID NO: 1178107 - RNA, 19 nt, Homo sapiens
  misc_RNA (1)...(19): siRNA sense strand
gcucaucaaagcccagaag

SEQ ID NO: 1178108 - RNA, 19 nt, Homo sapiens
  misc_RNA (1)...(19): siRNA sense strand
caaacaagaucgcagagaa

SEQ ID NO: 1178109 - RNA, 19 nt, Homo sapiens
  misc_RNA (1)...(19): siRNA sense strand
gcucaaggcuggugaugug

SEQ ID NO: 1178110 - RNA, 19 nt, Homo sapiens
  misc_RNA (1)...(19): siRNA sense strand
gaccaaggaugagcaguuu

SEQ ID NO: 1178111 - RNA, 19 nt, Homo sapiens
  misc_RNA (1)...(19): siRNA sense strand
aaagaaggaugaagccaaa

SEQ ID NO: 1178112 - RNA, 19 nt, Homo sapiens
  misc_RNA (1)...(19): siRNA sense strand
gacaucaagucacgcauug

SEQ ID NO: 1178113 - RNA, 19 nt, Homo sapiens
  misc_RNA (1)...(19): siRNA sense strand
gaacagccgcguagguuuc

SEQ ID NO: 1178114 - RNA, 19 nt, Homo sapiens
  misc_RNA (1)...(19): siRNA sense strand
cagaugagaccaaggauga

SEQ ID NO: 1178115 - RNA, 19 nt, Homo sapiens
  misc_RNA (1)...(19): siRNA sense strand
gagcagugcguccagaauu

SEQ ID NO: 1178116 - RNA, 19 nt, Homo sapiens
  misc_RNA (1)...(19): siRNA sense strand
ccagcaacgugcagaagaa

SEQ ID NO: 1178117 - RNA, 19 nt, Homo sapiens
  misc_RNA (1)...(19): siRNA sense strand
agaaggaucuccggaccua

SEQ ID NO: 1178118 - RNA, 19 nt, Homo sapiens
  misc_RNA (1)...(19): siRNA sense strand
guggagaccuucccagcaa

SEQ ID NO: 1178119 - RNA, 19 nt, Homo sapiens
  misc_RNA (1)...(19): siRNA sense strand
ggcgcaagcugguggacua

SEQ ID NO: 1178120 - RNA, 19 nt, Homo sapiens
  misc_RNA (1)...(19): siRNA sense strand
gaccugcuguggauggauu

SEQ ID NO: 1178121 - RNA, 19 nt, Homo sapiens
  misc_RNA (1)...(19): siRNA sense strand
gaagguguuugaggagaug

SEQ ID NO: 1178122 - RNA, 19 nt, Homo sapiens
  misc_RNA (1)...(19): siRNA sense strand
gcagagaugggcaguaaag

SEQ ID NO: 1178123 - RNA, 19 nt, Homo sapiens
  misc_RNA (1)...(19): siRNA sense strand
cccgagaacuucacugaga

SEQ ID NO: 1178124 - RNA, 19 nt, Homo sapiens
  misc_RNA (1)...(19): siRNA sense strand
gcaagcugguggacuacga

SEQ ID NO: 1178125 - RNA, 19 nt, Homo sapiens
  misc_RNA (1)...(19): siRNA sense strand
ggaacagccgcguagguuu

SEQ ID NO: 1178126 - RNA, 19 nt, Homo sapiens
  misc_RNA (1)...(19): siRNA sense strand
cgggaaagaucgccagcaa

SEQ ID NO: 1178127 - RNA, 19 nt, Homo sapiens
  misc_RNA (1)...(19): siRNA sense strand
ccaaggaugagcaguuuga

SEQ ID NO: 1178128 - RNA, 19 nt, Homo sapiens
  misc_RNA (1)...(19): siRNA sense strand
gcagggaugaggcaaacaa

SEQ ID NO: 1178129 - RNA, 19 nt, Homo sapiens
  misc_RNA (1)...(19): siRNA sense strand
acaacgaccugcuguggau

SEQ ID NO: 1178130 - RNA, 19 nt, Homo sapiens
  misc_RNA (1)...(19): siRNA sense strand
gggaugaggcaaacaagau

SEQ ID NO: 1178131 - RNA, 19 nt, Homo sapiens
  misc_RNA (1)...(19): siRNA sense strand
ugaaggagagcgacuggaa

SEQ ID NO: 1178132 - RNA, 19 nt, Homo sapiens
  misc_RNA (1)...(19): siRNA sense strand
gcaaacaagaucgcagaga

SEQ ID NO: 1178133 - RNA, 19 nt, Homo sapiens
  misc_RNA (1)...(19): siRNA sense strand
cuaccuggccuccgucaaa

SEQ ID NO: 1178134 - RNA, 19 nt, Homo sapiens
  misc_RNA (1)...(19): siRNA sense strand
ucaaccagaaccucaauga

SEQ ID NO: 1178135 - RNA, 19 nt, Homo sapiens
  misc_RNA (1)...(19): siRNA sense strand
cgacaucaagucacgcauu

SEQ ID NO: 1178136 - RNA, 19 nt, Homo sapiens
  misc_RNA (1)...(19): siRNA sense strand
aaccagaaccucaaugaug

SEQ ID NO: 1178137 - RNA, 19 nt, Homo sapiens
  misc_RNA (1)...(19): siRNA sense strand
gcaacaccuucacggucaa

SEQ ID NO: 1178138 - RNA, 19 nt, Homo sapiens
  misc_RNA (1)...(19): siRNA sense strand
accagaaccucaaugaugu

SEQ ID NO: 1178139 - RNA, 19 nt, Homo sapiens
  misc_RNA (1)...(19): siRNA sense strand
aggaggagcucaucaaagc

SEQ ID NO: 1178140 - RNA, 19 nt, Homo sapiens
  misc_RNA (1)...(19): siRNA sense strand
cgaggaggagcucaucaaa

SEQ ID NO: 1178141 - RNA, 19 nt, Homo sapiens
  misc_RNA (1)...(19): siRNA sense strand
agcagugcguccagaauuu

SEQ ID NO: 1178142 - RNA, 19 nt, Homo sapiens
  misc_RNA (1)...(19): siRNA sense strand
ggaaggcagaugagaccaa

SEQ ID NO: 1178143 - RNA, 19 nt, Homo sapiens
  misc_RNA (1)...(19): siRNA sense strand
ucaaagcccagaagguguu

SEQ ID NO: 1178144 - RNA, 19 nt, Homo sapiens
  misc_RNA (1)...(19): siRNA sense strand
gaggaggagcucaucaaag

SEQ ID NO: 1178145 - RNA, 19 nt, Homo sapiens
  misc_RNA (1)...(19): siRNA sense strand
acaaggagaugagcaagcu

SEQ ID NO: 1178146 - RNA, 19 nt, Homo sapiens
  misc_RNA (1)...(19): siRNA sense strand
ggaugaggcaaacaagauc

SEQ ID NO: 1178147 - RNA, 19 nt, Homo sapiens
  misc_RNA (1)...(19): siRNA sense strand
gaaggaugaagccaaaauu

SEQ ID NO: 1178148 - RNA, 19 nt, Homo sapiens
  misc_RNA (1)...(19): siRNA sense strand
ccacuacgagucccuucaa

SEQ ID NO: 1178149 - RNA, 19 nt, Homo sapiens
  misc_RNA (1)...(19): siRNA sense strand
ggauggauuaccaccagaa

SEQ ID NO: 1178150 - RNA, 19 nt, Homo sapiens
  misc_RNA (1)...(19): siRNA sense strand
caaccagaaccucaaugau

SEQ ID NO: 1178151 - RNA, 19 nt, Homo sapiens
  misc_RNA (1)...(19): siRNA sense strand
gcagugcguccagaauuuc

SEQ ID NO: 1178152 - RNA, 19 nt, Homo sapiens
  misc_RNA (1)...(19): siRNA sense strand
caagaucgcagagaacaac

SEQ ID NO: 1178153 - RNA, 19 nt, Homo sapiens
  misc_RNA (1)...(19): siRNA sense strand
agaccaaggaugagcaguu

SEQ ID NO: 1178154 - RNA, 19 nt, Homo sapiens
  misc_RNA (1)...(19): siRNA sense strand
ugacaacgcgccugcaaaa

SEQ ID NO: 1178155 - RNA, 19 nt, Homo sapiens
  misc_RNA (1)...(19): siRNA sense strand
agaagguguuugaggagau

SEQ ID NO: 1178156 - RNA, 19 nt, Homo sapiens
  misc_RNA (1)...(19): siRNA sense strand
cacuacgagucccuucaaa

SEQ ID NO: 1178157 - RNA, 19 nt, Homo sapiens
  misc_RNA (1)...(19): siRNA sense strand
ucaacacguuccagagcau

SEQ ID NO: 1178158 - RNA, 19 nt, Homo sapiens
  misc_RNA (1)...(19): siRNA sense strand
gccagcaacgugcagaaga

SEQ ID NO: 1178159 - RNA, 19 nt, Homo sapiens
  misc_RNA (1)...(19): siRNA sense strand
cguccagaauuucaacaag

SEQ ID NO: 1178160 - RNA, 19 nt, Homo sapiens
  misc_RNA (1)...(19): siRNA sense strand
uccagaauuucaacaagca

SEQ ID NO: 1178161 - RNA, 19 nt, Homo sapiens
  misc_RNA (1)...(19): siRNA sense strand
cuacacggccacugacaca

SEQ ID NO: 1178162 - RNA, 19 nt, Homo sapiens
  misc_RNA (1)...(19): siRNA sense strand
gcucaaccagaaccucaau

SEQ ID NO: 1178163 - RNA, 19 nt, Homo sapiens
  misc_RNA (1)...(19): siRNA sense strand
uggaacagccgcguagguu

SEQ ID NO: 1178164 - RNA, 19 nt, Homo sapiens
  misc_RNA (1)...(19): siRNA sense strand
gcucaucaaagcccagaag

SEQ ID NO: 1178165 - RNA, 19 nt, Homo sapiens
  misc_RNA (1)...(19): siRNA sense strand
caaacaagaucgcagagaa

SEQ ID NO: 1178166 - RNA, 19 nt, Homo sapiens
  misc_RNA (1)...(19): siRNA sense strand
gcucaaggcuggugaugug

SEQ ID NO: 1178167 - RNA, 19 nt, Homo sapiens
  misc_RNA (1)...(19): siRNA sense strand
gaccaaggaugagcaguuu

SEQ ID NO: 1178168 - RNA, 19 nt, Homo sapiens
  misc_RNA (1)...(19): siRNA sense strand
aaagaaggaugaagccaaa

SEQ ID NO: 1178169 - RNA, 19 nt, Homo sapiens
  misc_RNA (1)...(19): siRNA sense strand
gacaucaagucacgcauug

SEQ ID NO: 1178170 - RNA, 19 nt, Homo sapiens
  misc_RNA (1)...(19): siRNA sense strand
gaacagccgcguagguuuc

SEQ ID NO: 1178171 - RNA, 19 nt, Homo sapiens
  misc_RNA (1)...(19): siRNA sense strand
cagaugagaccaaggauga

SEQ ID NO: 1178172 - RNA, 19 nt, Homo sapiens
  misc_RNA (1)...(19): siRNA sense strand
gagcagugcguccagaauu

SEQ ID NO: 1178173 - RNA, 19 nt, Homo sapiens
  misc_RNA (1)...(19): siRNA sense strand
ccagcaacgugcagaagaa

SEQ ID NO: 1178174 - RNA, 19 nt, Homo sapiens
  misc_RNA (1)...(19): siRNA sense strand
agaaggaucuccggaccua

SEQ ID NO: 1178175 - RNA, 19 nt, Homo sapiens
  misc_RNA (1)...(19): siRNA sense strand
guggagaccuucccagcaa

SEQ ID NO: 1178176 - RNA, 19 nt, Homo sapiens
  misc_RNA (1)...(19): siRNA sense strand
ggcgcaagcugguggacua

SEQ ID NO: 1178177 - RNA, 19 nt, Homo sapiens
  misc_RNA (1)...(19): siRNA sense strand
gaccugcuguggauggauu

SEQ ID NO: 1178178 - RNA, 19 nt, Homo sapiens
  misc_RNA (1)...(19): siRNA sense strand
gaagguguuugaggagaug

SEQ ID NO: 1178179 - RNA, 19 nt, Homo sapiens
  misc_RNA (1)...(19): siRNA sense strand
gcagagaugggcaguaaag

SEQ ID NO: 1178180 - RNA, 19 nt, Homo sapiens
  misc_RNA (1)...(19): siRNA sense strand
cccgagaacuucacugaga

SEQ ID NO: 1178181 - RNA, 19 nt, Homo sapiens
  misc_RNA (1)...(19): siRNA sense strand
gcaagcugguggacuacga

SEQ ID NO: 1178182 - RNA, 19 nt, Homo sapiens
  misc_RNA (1)...(19): siRNA sense strand
ggaacagccgcguagguuu

SEQ ID NO: 1178183 - RNA, 19 nt, Homo sapiens
  misc_RNA (1)...(19): siRNA sense strand
cgggaaagaucgccagcaa

SEQ ID NO: 1178184 - RNA, 19 nt, Homo sapiens
  misc_RNA (1)...(19): siRNA sense strand
ccaaggaugagcaguuuga

SEQ ID NO: 1178185 - RNA, 19 nt, Homo sapiens
  misc_RNA (1)...(19): siRNA sense strand
gcagggaugaggcaaacaa

SEQ ID NO: 1178186 - RNA, 19 nt, Homo sapiens
  misc_RNA (1)...(19): siRNA sense strand
acaacgaccugcuguggau

SEQ ID NO: 1178187 - RNA, 19 nt, Homo sapiens
  misc_RNA (1)...(19): siRNA sense strand
gggaugaggcaaacaagau

SEQ ID NO: 1178188 - RNA, 19 nt, Homo sapiens
  misc_RNA (1)...(19): siRNA sense strand
ugaaggagagcgacuggaa

SEQ ID NO: 1178189 - RNA, 19 nt, Homo sapiens
  misc_RNA (1)...(19): siRNA sense strand
gcaaacaagaucgcagaga

SEQ ID NO: 1178190 - RNA, 19 nt, Homo sapiens
  misc_RNA (1)...(19): siRNA sense strand
cuaccuggccuccgucaaa

SEQ ID NO: 1178191 - RNA, 19 nt, Homo sapiens
  misc_RNA (1)...(19): siRNA sense strand
ucaaccagaaccucaauga

SEQ ID NO: 1178192 - RNA, 19 nt, Homo sapiens
  misc_RNA (1)...(19): siRNA sense strand
cgacaucaagucacgcauu

SEQ ID NO: 1178193 - RNA, 19 nt, Homo sapiens
  misc_RNA (1)...(19): siRNA sense strand
aaccagaaccucaaugaug

SEQ ID NO: 1178194 - RNA, 19 nt, Homo sapiens
  misc_RNA (1)...(19): siRNA sense strand
gcaacaccuucacggucaa

SEQ ID NO: 1178195 - RNA, 19 nt, Homo sapiens
  misc_RNA (1)...(19): siRNA sense strand
accagaaccucaaugaugu

SEQ ID NO: 1178196 - RNA, 19 nt, Homo sapiens
  misc_RNA (1)...(19): siRNA sense strand
aggaggagcucaucaaagc

SEQ ID NO: 1178197 - RNA, 19 nt, Homo sapiens
  misc_RNA (1)...(19): siRNA sense strand
cgaggaggagcucaucaaa

SEQ ID NO: 1178198 - RNA, 19 nt, Homo sapiens
  misc_RNA (1)...(19): siRNA sense strand
agcagugcguccagaauuu

SEQ ID NO: 1178199 - RNA, 19 nt, Homo sapiens
  misc_RNA (1)...(19): siRNA sense strand
ggaaggcagaugagaccaa

SEQ ID NO: 1178200 - RNA, 19 nt, Homo sapiens
  misc_RNA (1)...(19): siRNA sense strand
ucaaagcccagaagguguu

SEQ ID NO: 1178201 - RNA, 19 nt, Homo sapiens
  misc_RNA (1)...(19): siRNA sense strand
gaggaggagcucaucaaag

SEQ ID NO: 1178202 - RNA, 19 nt, Homo sapiens
  misc_RNA (1)...(19): siRNA sense strand
acaaggagaugagcaagcu

SEQ ID NO: 1178203 - RNA, 19 nt, Homo sapiens
  misc_RNA (1)...(19): siRNA sense strand
ggaugaggcaaacaagauc

SEQ ID NO: 1178204 - RNA, 19 nt, Homo sapiens
  misc_RNA (1)...(19): siRNA sense strand
gaaggaugaagccaaaauu

SEQ ID NO: 1178205 - RNA, 19 nt, Homo sapiens
  misc_RNA (1)...(19): siRNA sense strand
ccacuacgagucccuucaa

SEQ ID NO: 1178206 - RNA, 19 nt, Homo sapiens
  misc_RNA (1)...(19): siRNA sense strand
ggauggauuaccaccagaa

SEQ ID NO: 1178207 - RNA, 19 nt, Homo sapiens
  misc_RNA (1)...(19): siRNA sense strand
caaccagaaccucaaugau

SEQ ID NO: 1178208 - RNA, 19 nt, Homo sapiens
  misc_RNA (1)...(19): siRNA sense strand
gcagugcguccagaauuuc

SEQ ID NO: 1178209 - RNA, 19 nt, Homo sapiens
  misc_RNA (1)...(19): siRNA sense strand
caagaucgcagagaacaac

SEQ ID NO: 1178210 - RNA, 19 nt, Homo sapiens
  misc_RNA (1)...(19): siRNA sense strand
agaccaaggaugagcaguu

SEQ ID NO: 1178211 - RNA, 19 nt, Homo sapiens
  misc_RNA (1)...(19): siRNA sense strand
ugacaacgcgccugcaaaa

SEQ ID NO: 1178212 - RNA, 19 nt, Homo sapiens
  misc_RNA (1)...(19): siRNA sense strand
agaagguguuugaggagau

SEQ ID NO: 1178213 - RNA, 19 nt, Homo sapiens
  misc_RNA (1)...(19): siRNA sense strand
cacuacgagucccuucaaa

SEQ ID NO: 1178214 - RNA, 19 nt, Homo sapiens
  misc_RNA (1)...(19): siRNA sense strand
ucaacacguuccagagcau

SEQ ID NO: 1178215 - RNA, 19 nt, Homo sapiens
  misc_RNA (1)...(19): siRNA sense strand
gccagcaacgugcagaaga

SEQ ID NO: 1178216 - RNA, 19 nt, Homo sapiens
  misc_RNA (1)...(19): siRNA sense strand
cguccagaauuucaacaag

SEQ ID NO: 1178217 - RNA, 19 nt, Homo sapiens
  misc_RNA (1)...(19): siRNA sense strand
uccagaauuucaacaagca

SEQ ID NO: 1178218 - RNA, 19 nt, Homo sapiens
  misc_RNA (1)...(19): siRNA sense strand
cuacacggccacugacaca

SEQ ID NO: 1178219 - RNA, 19 nt, Homo sapiens
  misc_RNA (1)...(19): siRNA sense strand
gcucaaccagaaccucaau

SEQ ID NO: 1178220 - RNA, 19 nt, Homo sapiens
  misc_RNA (1)...(19): siRNA sense strand
uggaacagccgcguagguu

SEQ ID NO: 1178221 - RNA, 19 nt, Homo sapiens
  misc_RNA (1)...(19): siRNA sense strand
gcucaucaaagcccagaag

SEQ ID NO: 1178222 - RNA, 19 nt, Homo sapiens
  misc_RNA (1)...(19): siRNA sense strand
caaacaagaucgcagagaa

SEQ ID NO: 1178223 - RNA, 19 nt, Homo sapiens
  misc_RNA (1)...(19): siRNA sense strand
gcucaaggcuggugaugug

SEQ ID NO: 1178224 - RNA, 19 nt, Homo sapiens
  misc_RNA (1)...(19): siRNA sense strand
gaccaaggaugagcaguuu

SEQ ID NO: 1178225 - RNA, 19 nt, Homo sapiens
  misc_RNA (1)...(19): siRNA sense strand
aaagaaggaugaagccaaa

SEQ ID NO: 1178226 - RNA, 19 nt, Homo sapiens
  misc_RNA (1)...(19): siRNA sense strand
gacaucaagucacgcauug

SEQ ID NO: 1178227 - RNA, 19 nt, Homo sapiens
  misc_RNA (1)...(19): siRNA sense strand
gaacagccgcguagguuuc

SEQ ID NO: 1178228 - RNA, 19 nt, Homo sapiens
  misc_RNA (1)...(19): siRNA sense strand
cagaugagaccaaggauga

SEQ ID NO: 1178229 - RNA, 19 nt, Homo sapiens
  misc_RNA (1)...(19): siRNA sense strand
gagcagugcguccagaauu

SEQ ID NO: 1178230 - RNA, 19 nt, Homo sapiens
  misc_RNA (1)...(19): siRNA sense strand
ccagcaacgugcagaagaa

SEQ ID NO: 1178231 - RNA, 19 nt, Homo sapiens
  misc_RNA (1)...(19): siRNA sense strand
agaaggaucuccggaccua

SEQ ID NO: 1178232 - RNA, 19 nt, Homo sapiens
  misc_RNA (1)...(19): siRNA sense strand
guggagaccuucccagcaa

SEQ ID NO: 1178233 - RNA, 19 nt, Homo sapiens
  misc_RNA (1)...(19): siRNA sense strand
ggcgcaagcugguggacua

SEQ ID NO: 1178234 - RNA, 19 nt, Homo sapiens
  misc_RNA (1)...(19): siRNA sense strand
gaccugcuguggauggauu

SEQ ID NO: 1178235 - RNA, 19 nt, Homo sapiens
  misc_RNA (1)...(19): siRNA sense strand
gaagguguuugaggagaug

SEQ ID NO: 1178236 - RNA, 19 nt, Homo sapiens
  misc_RNA (1)...(19): siRNA sense strand
gcagagaugggcaguaaag

SEQ ID NO: 1178237 - RNA, 19 nt, Homo sapiens
  misc_RNA (1)...(19): siRNA sense strand
cccgagaacuucacugaga

SEQ ID NO: 1178238 - RNA, 19 nt, Homo sapiens
  misc_RNA (1)...(19): siRNA sense strand
gcaagcugguggacuacga

SEQ ID NO: 1178239 - RNA, 19 nt, Homo sapiens
  misc_RNA (1)...(19): siRNA sense strand
ggaacagccgcguagguuu

SEQ ID NO: 1178240 - RNA, 19 nt, Homo sapiens
  misc_RNA (1)...(19): siRNA sense strand
cgggaaagaucgccagcaa

SEQ ID NO: 1178241 - RNA, 19 nt, Homo sapiens
  misc_RNA (1)...(19): siRNA sense strand
ccaaggaugagcaguuuga

SEQ ID NO: 1178242 - RNA, 19 nt, Homo sapiens
  misc_RNA (1)...(19): siRNA sense strand
gcagggaugaggcaaacaa

SEQ ID NO: 1178243 - RNA, 19 nt, Homo sapiens
  misc_RNA (1)...(19): siRNA sense strand
acaacgaccugcuguggau

SEQ ID NO: 1178244 - RNA, 19 nt, Homo sapiens
  misc_RNA (1)...(19): siRNA sense strand
gggaugaggcaaacaagau

SEQ ID NO: 1178245 - RNA, 19 nt, Homo sapiens
  misc_RNA (1)...(19): siRNA sense strand
ugaaggagagcgacuggaa

SEQ ID NO: 1178246 - RNA, 19 nt, Homo sapiens
  misc_RNA (1)...(19): siRNA sense strand
gcaaacaagaucgcagaga

SEQ ID NO: 1178247 - RNA, 19 nt, Homo sapiens
  misc_RNA (1)...(19): siRNA sense strand
cuaccuggccuccgucaaa

SEQ ID NO: 1178248 - RNA, 19 nt, Homo sapiens
  misc_RNA (1)...(19): siRNA sense strand
ucaaccagaaccucaauga

SEQ ID NO: 1178249 - RNA, 19 nt, Homo sapiens
  misc_RNA (1)...(19): siRNA sense strand
cgacaucaagucacgcauu

SEQ ID NO: 1178250 - RNA, 19 nt, Homo sapiens
  misc_RNA (1)...(19): siRNA sense strand
aaccagaaccucaaugaug

SEQ ID NO: 1178251 - RNA, 19 nt, Homo sapiens
  misc_RNA (1)...(19): siRNA sense strand
gcaacaccuucacggucaa

SEQ ID NO: 1178252 - RNA, 19 nt, Homo sapiens
  misc_RNA (1)...(19): siRNA sense strand
accagaaccucaaugaugu

SEQ ID NO: 1178253 - RNA, 19 nt, Homo sapiens
  misc_RNA (1)...(19): siRNA sense strand
aggaggagcucaucaaagc

SEQ ID NO: 1178254 - RNA, 19 nt, Homo sapiens
  misc_RNA (1)...(19): siRNA sense strand
cgaggaggagcucaucaaa

SEQ ID NO: 1178255 - RNA, 19 nt, Homo sapiens
  misc_RNA (1)...(19): siRNA sense strand
agcagugcguccagaauuu

SEQ ID NO: 1178256 - RNA, 19 nt, Homo sapiens
  misc_RNA (1)...(19): siRNA sense strand
ggaaggcagaugagaccaa

SEQ ID NO: 1178257 - RNA, 19 nt, Homo sapiens
  misc_RNA (1)...(19): siRNA sense strand
ucaaagcccagaagguguu

SEQ ID NO: 1178258 - RNA, 19 nt, Homo sapiens
  misc_RNA (1)...(19): siRNA sense strand
gaggaggagcucaucaaag

SEQ ID NO: 1178259 - RNA, 19 nt, Homo sapiens
  misc_RNA (1)...(19): siRNA sense strand
acaaggagaugagcaagcu

SEQ ID NO: 1178260 - RNA, 19 nt, Homo sapiens
  misc_RNA (1)...(19): siRNA sense strand
ggaugaggcaaacaagauc

SEQ ID NO: 1178261 - RNA, 19 nt, Homo sapiens
  misc_RNA (1)...(19): siRNA sense strand
gaaggaugaagccaaaauu

SEQ ID NO: 1178262 - RNA, 19 nt, Homo sapiens
  misc_RNA (1)...(19): siRNA sense strand
ccacuacgagucccuucaa

SEQ ID NO: 1178263 - RNA, 19 nt, Homo sapiens
  misc_RNA (1)...(19): siRNA sense strand
ggauggauuaccaccagaa

SEQ ID NO: 1178264 - RNA, 19 nt, Homo sapiens
  misc_RNA (1)...(19): siRNA sense strand
caaccagaaccucaaugau

SEQ ID NO: 1178265 - RNA, 19 nt, Homo sapiens
  misc_RNA (1)...(19): siRNA sense strand
gcagugcguccagaauuuc

SEQ ID NO: 1178266 - RNA, 19 nt, Homo sapiens
  misc_RNA (1)...(19): siRNA sense strand
caagaucgcagagaacaac

SEQ ID NO: 1178267 - RNA, 19 nt, Homo sapiens
  misc_RNA (1)...(19): siRNA sense strand
agaccaaggaugagcaguu

SEQ ID NO: 1178268 - RNA, 19 nt, Homo sapiens
  misc_RNA (1)...(19): siRNA sense strand
ugacaacgcgccugcaaaa

SEQ ID NO: 1178269 - RNA, 19 nt, Homo sapiens
  misc_RNA (1)...(19): siRNA sense strand
agaagguguuugaggagau

SEQ ID NO: 1178270 - RNA, 19 nt, Homo sapiens
  misc_RNA (1)...(19): siRNA sense strand
cacuacgagucccuucaaa

SEQ ID NO: 1178271 - RNA, 19 nt, Homo sapiens
  misc_RNA (1)...(19): siRNA sense strand
ucaacacguuccagagcau

SEQ ID NO: 1178272 - RNA, 19 nt, Homo sapiens
  misc_RNA (1)...(19): siRNA sense strand
gccagcaacgugcagaaga

SEQ ID NO: 1178273 - RNA, 19 nt, Homo sapiens
  misc_RNA (1)...(19): siRNA sense strand
cguccagaauuucaacaag

SEQ ID NO: 1178274 - RNA, 19 nt, Homo sapiens
  misc_RNA (1)...(19): siRNA sense strand
uccagaauuucaacaagca

SEQ ID NO: 1178275 - RNA, 19 nt, Homo sapiens
  misc_RNA (1)...(19): siRNA sense strand
cuacacggccacugacaca

SEQ ID NO: 1178276 - RNA, 19 nt, Homo sapiens
  misc_RNA (1)...(19): siRNA sense strand
gcucaaccagaaccucaau

SEQ ID NO: 1178277 - RNA, 19 nt, Homo sapiens
  misc_RNA (1)...(19): siRNA sense strand
uggaacagccgcguagguu

SEQ ID NO: 1178278 - RNA, 19 nt, Homo sapiens
  misc_RNA (1)...(19): siRNA sense strand
gcucaucaaagcccagaag

SEQ ID NO: 1178279 - RNA, 19 nt, Homo sapiens
  misc_RNA (1)...(19): siRNA sense strand
caaacaagaucgcagagaa

SEQ ID NO: 1178280 - RNA, 19 nt, Homo sapiens
  misc_RNA (1)...(19): siRNA sense strand
gcucaaggcuggugaugug

SEQ ID NO: 1178281 - RNA, 19 nt, Homo sapiens
  misc_RNA (1)...(19): siRNA sense strand
gaccaaggaugagcaguuu

SEQ ID NO: 1178282 - RNA, 19 nt, Homo sapiens
  misc_RNA (1)...(19): siRNA sense strand
aaagaaggaugaagccaaa

SEQ ID NO: 1178283 - RNA, 19 nt, Homo sapiens
  misc_RNA (1)...(19): siRNA sense strand
gacaucaagucacgcauug

SEQ ID NO: 1178284 - RNA, 19 nt, Homo sapiens
  misc_RNA (1)...(19): siRNA sense strand
gaacagccgcguagguuuc

SEQ ID NO: 1178285 - RNA, 19 nt, Homo sapiens
  misc_RNA (1)...(19): siRNA sense strand
cagaugagaccaaggauga

SEQ ID NO: 1178286 - RNA, 19 nt, Homo sapiens
  misc_RNA (1)...(19): siRNA sense strand
gagcagugcguccagaauu

SEQ ID NO: 1178287 - RNA, 19 nt, Homo sapiens
  misc_RNA (1)...(19): siRNA sense strand
ccagcaacgugcagaagaa

SEQ ID NO: 1178288 - RNA, 19 nt, Homo sapiens
  misc_RNA (1)...(19): siRNA sense strand
agaaggaucuccggaccua

SEQ ID NO: 1178289 - RNA, 19 nt, Homo sapiens
  misc_RNA (1)...(19): siRNA sense strand
guggagaccuucccagcaa

SEQ ID NO: 1178290 - RNA, 19 nt, Homo sapiens
  misc_RNA (1)...(19): siRNA sense strand
ggcgcaagcugguggacua

SEQ ID NO: 1178291 - RNA, 19 nt, Homo sapiens
  misc_RNA (1)...(19): siRNA sense strand
gaccugcuguggauggauu

SEQ ID NO: 1178292 - RNA, 19 nt, Homo sapiens
  misc_RNA (1)...(19): siRNA sense strand
gaagguguuugaggagaug

SEQ ID NO: 1178293 - RNA, 19 nt, Homo sapiens
  misc_RNA (1)...(19): siRNA sense strand
gcagagaugggcaguaaag

SEQ ID NO: 1178294 - RNA, 19 nt, Homo sapiens
  misc_RNA (1)...(19): siRNA sense strand
cccgagaacuucacugaga

SEQ ID NO: 1178295 - RNA, 19 nt, Homo sapiens
  misc_RNA (1)...(19): siRNA sense strand
gcaagcugguggacuacga

SEQ ID NO: 1178296 - RNA, 19 nt, Homo sapiens
  misc_RNA (1)...(19): siRNA sense strand
ggaacagccgcguagguuu

SEQ ID NO: 1178297 - RNA, 19 nt, Homo sapiens
  misc_RNA (1)...(19): siRNA sense strand
cgggaaagaucgccagcaa

SEQ ID NO: 1178298 - RNA, 19 nt, Homo sapiens
  misc_RNA (1)...(19): siRNA sense strand
ccaaggaugagcaguuuga

SEQ ID NO: 1178299 - RNA, 19 nt, Homo sapiens
  misc_RNA (1)...(19): siRNA sense strand
gcagggaugaggcaaacaa

SEQ ID NO: 1178300 - RNA, 19 nt, Homo sapiens
  misc_RNA (1)...(19): siRNA sense strand
acaacgaccugcuguggau

SEQ ID NO: 1178301 - RNA, 19 nt, Homo sapiens
  misc_RNA (1)...(19): siRNA sense strand
gggaugaggcaaacaagau

SEQ ID NO: 1178302 - RNA, 19 nt, Homo sapiens
  misc_RNA (1)...(19): siRNA sense strand
ugaaggagagcgacuggaa

SEQ ID NO: 1178303 - RNA, 19 nt, Homo sapiens
  misc_RNA (1)...(19): siRNA sense strand
gcaaacaagaucgcagaga

SEQ ID NO: 1178304 - RNA, 19 nt, Homo sapiens
  misc_RNA (1)...(19): siRNA sense strand
cuaccuggccuccgucaaa

SEQ ID NO: 1178305 - RNA, 19 nt, Homo sapiens
  misc_RNA (1)...(19): siRNA sense strand
ucaaccagaaccucaauga

SEQ ID NO: 1178306 - RNA, 19 nt, Homo sapiens
  misc_RNA (1)...(19): siRNA sense strand
cgacaucaagucacgcauu

SEQ ID NO: 1178307 - RNA, 19 nt, Homo sapiens
  misc_RNA (1)...(19): siRNA sense strand
aaccagaaccucaaugaug

SEQ ID NO: 1178308 - RNA, 19 nt, Homo sapiens
  misc_RNA (1)...(19): siRNA sense strand
gcaacaccuucacggucaa

SEQ ID NO: 1178309 - RNA, 19 nt, Homo sapiens
  misc_RNA (1)...(19): siRNA sense strand
accagaaccucaaugaugu

SEQ ID NO: 1178310 - RNA, 19 nt, Homo sapiens
  misc_RNA (1)...(19): siRNA sense strand
aggaggagcucaucaaagc

SEQ ID NO: 1178311 - RNA, 19 nt, Homo sapiens
  misc_RNA (1)...(19): siRNA sense strand
cgaggaggagcucaucaaa

SEQ ID NO: 1178312 - RNA, 19 nt, Homo sapiens
  misc_RNA (1)...(19): siRNA sense strand
agcagugcguccagaauuu

SEQ ID NO: 1178313 - RNA, 19 nt, Homo sapiens
  misc_RNA (1)...(19): siRNA sense strand
ggaaggcagaugagaccaa

SEQ ID NO: 1178314 - RNA, 19 nt, Homo sapiens
  misc_RNA (1)...(19): siRNA sense strand
ucaaagcccagaagguguu

SEQ ID NO: 1178315 - RNA, 19 nt, Homo sapiens
  misc_RNA (1)...(19): siRNA sense strand
gaggaggagcucaucaaag

SEQ ID NO: 1178316 - RNA, 19 nt, Homo sapiens
  misc_RNA (1)...(19): siRNA sense strand
acaaggagaugagcaagcu

SEQ ID NO: 1178317 - RNA, 19 nt, Homo sapiens
  misc_RNA (1)...(19): siRNA sense strand
ggaugaggcaaacaagauc

SEQ ID NO: 1178318 - RNA, 19 nt, Homo sapiens
  misc_RNA (1)...(19): siRNA sense strand
gaaggaugaagccaaaauu

SEQ ID NO: 1178319 - RNA, 19 nt, Homo sapiens
  misc_RNA (1)...(19): siRNA sense strand
ccacuacgagucccuucaa

SEQ ID NO: 1178320 - RNA, 19 nt, Homo sapiens
  misc_RNA (1)...(19): siRNA sense strand
ggauggauuaccaccagaa

SEQ ID NO: 1178321 - RNA, 19 nt, Homo sapiens
  misc_RNA (1)...(19): siRNA sense strand
caaccagaaccucaaugau

SEQ ID NO: 1178322 - RNA, 19 nt, Homo sapiens
  misc_RNA (1)...(19): siRNA sense strand
gcagugcguccagaauuuc

SEQ ID NO: 1178323 - RNA, 19 nt, Homo sapiens
  misc_RNA (1)...(19): siRNA sense strand
caagaucgcagagaacaac

SEQ ID NO: 1178324 - RNA, 19 nt, Homo sapiens
  misc_RNA (1)...(19): siRNA sense strand
agaccaaggaugagcaguu

SEQ ID NO: 1178325 - RNA, 19 nt, Homo sapiens
  misc_RNA (1)...(19): siRNA sense strand
ugacaacgcgccugcaaaa

SEQ ID NO: 1178326 - RNA, 19 nt, Homo sapiens
  misc_RNA (1)...(19): siRNA sense strand
agaagguguuugaggagau

SEQ ID NO: 1178327 - RNA, 19 nt, Homo sapiens
  misc_RNA (1)...(19): siRNA sense strand
cacuacgagucccuucaaa

SEQ ID NO: 1178328 - RNA, 19 nt, Homo sapiens
  misc_RNA (1)...(19): siRNA sense strand
ucaacacguuccagagcau

SEQ ID NO: 1178329 - RNA, 19 nt, Homo sapiens
  misc_RNA (1)...(19): siRNA sense strand
gccagcaacgugcagaaga

SEQ ID NO: 1178330 - RNA, 19 nt, Homo sapiens
  misc_RNA (1)...(19): siRNA sense strand
cguccagaauuucaacaag

SEQ ID NO: 1178331 - RNA, 19 nt, Homo sapiens
  misc_RNA (1)...(19): siRNA sense strand
uccagaauuucaacaagca

SEQ ID NO: 1178332 - RNA, 19 nt, Homo sapiens
  misc_RNA (1)...(19): siRNA sense strand
cuacacggccacugacaca

SEQ ID NO: 1178333 - RNA, 19 nt, Homo sapiens
  misc_RNA (1)...(19): siRNA sense strand
gcucaaccagaaccucaau

SEQ ID NO: 1178334 - RNA, 19 nt, Homo sapiens
  misc_RNA (1)...(19): siRNA sense strand
uggaacagccgcguagguu

SEQ ID NO: 1178335 - RNA, 19 nt, Homo sapiens
  misc_RNA (1)...(19): siRNA sense strand
gcucaucaaagcccagaag

SEQ ID NO: 1178336 - RNA, 19 nt, Homo sapiens
  misc_RNA (1)...(19): siRNA sense strand
caaacaagaucgcagagaa

SEQ ID NO: 1178337 - RNA, 19 nt, Homo sapiens
  misc_RNA (1)...(19): siRNA sense strand
gcucaaggcuggugaugug

SEQ ID NO: 1178338 - RNA, 19 nt, Homo sapiens
  misc_RNA (1)...(19): siRNA sense strand
gaccaaggaugagcaguuu

SEQ ID NO: 1178339 - RNA, 19 nt, Homo sapiens
  misc_RNA (1)...(19): siRNA sense strand
aaagaaggaugaagccaaa

SEQ ID NO: 1178340 - RNA, 19 nt, Homo sapiens
  misc_RNA (1)...(19): siRNA sense strand
gacaucaagucacgcauug

SEQ ID NO: 1178341 - RNA, 19 nt, Homo sapiens
  misc_RNA (1)...(19): siRNA sense strand
gaacagccgcguagguuuc

SEQ ID NO: 1178342 - RNA, 19 nt, Homo sapiens
  misc_RNA (1)...(19): siRNA sense strand
cagaugagaccaaggauga

SEQ ID NO: 1178343 - RNA, 19 nt, Homo sapiens
  misc_RNA (1)...(19): siRNA sense strand
gagcagugcguccagaauu

SEQ ID NO: 1178344 - RNA, 19 nt, Homo sapiens
  misc_RNA (1)...(19): siRNA sense strand
ccagcaacgugcagaagaa

SEQ ID NO: 1178345 - RNA, 19 nt, Homo sapiens
  misc_RNA (1)...(19): siRNA sense strand
agaaggaucuccggaccua

SEQ ID NO: 1178346 - RNA, 19 nt, Homo sapiens
  misc_RNA (1)...(19): siRNA sense strand
guggagaccuucccagcaa

SEQ ID NO: 1178347 - RNA, 19 nt, Homo sapiens
  misc_RNA (1)...(19): siRNA sense strand
ggcgcaagcugguggacua

SEQ ID NO: 1178348 - RNA, 19 nt, Homo sapiens
  misc_RNA (1)...(19): siRNA sense strand
gaccugcuguggauggauu

SEQ ID NO: 1178349 - RNA, 19 nt, Homo sapiens
  misc_RNA (1)...(19): siRNA sense strand
gaagguguuugaggagaug

SEQ ID NO: 1178350 - RNA, 19 nt, Homo sapiens
  misc_RNA (1)...(19): siRNA sense strand
gcagagaugggcaguaaag

SEQ ID NO: 1178351 - RNA, 19 nt, Homo sapiens
  misc_RNA (1)...(19): siRNA sense strand
cccgagaacuucacugaga

SEQ ID NO: 1178352 - RNA, 19 nt, Homo sapiens
  misc_RNA (1)...(19): siRNA sense strand
gcaagcugguggacuacga

SEQ ID NO: 1178353 - RNA, 19 nt, Homo sapiens
  misc_RNA (1)...(19): siRNA sense strand
ggaacagccgcguagguuu

SEQ ID NO: 1178354 - RNA, 19 nt, Homo sapiens
  misc_RNA (1)...(19): siRNA sense strand
cgggaaagaucgccagcaa

SEQ ID NO: 1178355 - RNA, 19 nt, Homo sapiens
  misc_RNA (1)...(19): siRNA sense strand
ccaaggaugagcaguuuga

SEQ ID NO: 1178356 - RNA, 19 nt, Homo sapiens
  misc_RNA (1)...(19): siRNA sense strand
gcagggaugaggcaaacaa

SEQ ID NO: 1178357 - RNA, 19 nt, Homo sapiens
  misc_RNA (1)...(19): siRNA sense strand
acaacgaccugcuguggau

SEQ ID NO: 1178358 - RNA, 19 nt, Homo sapiens
  misc_RNA (1)...(19): siRNA sense strand
gggaugaggcaaacaagau

SEQ ID NO: 1178359 - RNA, 19 nt, Homo sapiens
  misc_RNA (1)...(19): siRNA sense strand
ugaaggagagcgacuggaa

SEQ ID NO: 1178360 - RNA, 19 nt, Homo sapiens
  misc_RNA (1)...(19): siRNA sense strand
gcaaacaagaucgcagaga

SEQ ID NO: 1178361 - RNA, 19 nt, Homo sapiens
  misc_RNA (1)...(19): siRNA sense strand
cuaccuggccuccgucaaa

SEQ ID NO: 1178362 - RNA, 19 nt, Homo sapiens
  misc_RNA (1)...(19): siRNA sense strand
ucaaccagaaccucaauga

SEQ ID NO: 1178363 - RNA, 19 nt, Homo sapiens
  misc_RNA (1)...(19): siRNA sense strand
cgacaucaagucacgcauu

SEQ ID NO: 1178364 - RNA, 19 nt, Homo sapiens
  misc_RNA (1)...(19): siRNA sense strand
aaccagaaccucaaugaug

SEQ ID NO: 1178365 - RNA, 19 nt, Homo sapiens
  misc_RNA (1)...(19): siRNA sense strand
gcaacaccuucacggucaa

SEQ ID NO: 1178366 - RNA, 19 nt, Homo sapiens
  misc_RNA (1)...(19): siRNA sense strand
accagaaccucaaugaugu

SEQ ID NO: 1178367 - RNA, 19 nt, Homo sapiens
  misc_RNA (1)...(19): siRNA sense strand
aggaggagcucaucaaagc

SEQ ID NO: 1178368 - RNA, 19 nt, Homo sapiens
  misc_RNA (1)...(19): siRNA sense strand
cgaggaggagcucaucaaa

SEQ ID NO: 1178369 - RNA, 19 nt, Homo sapiens
  misc_RNA (1)...(19): siRNA sense strand
agcagugcguccagaauuu

SEQ ID NO: 1178370 - RNA, 19 nt, Homo sapiens
  misc_RNA (1)...(19): siRNA sense strand
ggaaggcagaugagaccaa

SEQ ID NO: 1178371 - RNA, 19 nt, Homo sapiens
  misc_RNA (1)...(19): siRNA sense strand
ucaaagcccagaagguguu

SEQ ID NO: 1178372 - RNA, 19 nt, Homo sapiens
  misc_RNA (1)...(19): siRNA sense strand
gaggaggagcucaucaaag

SEQ ID NO: 1178373 - RNA, 19 nt, Homo sapiens
  misc_RNA (1)...(19): siRNA sense strand
acaaggagaugagcaagcu

SEQ ID NO: 1178374 - RNA, 19 nt, Homo sapiens
  misc_RNA (1)...(19): siRNA sense strand
ggaugaggcaaacaagauc

SEQ ID NO: 1178375 - RNA, 19 nt, Homo sapiens
  misc_RNA (1)...(19): siRNA sense strand
gaaggaugaagccaaaauu

SEQ ID NO: 1178376 - RNA, 19 nt, Homo sapiens
  misc_RNA (1)...(19): siRNA sense strand
ccacuacgagucccuucaa

SEQ ID NO: 1178377 - RNA, 19 nt, Homo sapiens
  misc_RNA (1)...(19): siRNA sense strand
ggauggauuaccaccagaa

SEQ ID NO: 1178378 - RNA, 19 nt, Homo sapiens
  misc_RNA (1)...(19): siRNA sense strand
caaccagaaccucaaugau

SEQ ID NO: 1178379 - RNA, 19 nt, Homo sapiens
  misc_RNA (1)...(19): siRNA sense strand
gcagugcguccagaauuuc

SEQ ID NO: 1178380 - RNA, 19 nt, Homo sapiens
  misc_RNA (1)...(19): siRNA sense strand
caagaucgcagagaacaac

SEQ ID NO: 1178381 - RNA, 19 nt, Homo sapiens
  misc_RNA (1)...(19): siRNA sense strand
agaccaaggaugagcaguu

SEQ ID NO: 1178382 - RNA, 19 nt, Homo sapiens
  misc_RNA (1)...(19): siRNA sense strand
ugacaacgcgccugcaaaa

SEQ ID NO: 1178383 - RNA, 19 nt, Homo sapiens
  misc_RNA (1)...(19): siRNA sense strand
agaagguguuugaggagau

SEQ ID NO: 1178384 - RNA, 19 nt, Homo sapiens
  misc_RNA (1)...(19): siRNA sense strand
cacuacgagucccuucaaa

SEQ ID NO: 1178385 - RNA, 19 nt, Homo sapiens
  misc_RNA (1)...(19): siRNA sense strand
ucaacacguuccagagcau

SEQ ID NO: 1178386 - RNA, 19 nt, Homo sapiens
  misc_RNA (1)...(19): siRNA sense strand
gccagcaacgugcagaaga

SEQ ID NO: 1178387 - RNA, 19 nt, Homo sapiens
  misc_RNA (1)...(19): siRNA sense strand
cguccagaauuucaacaag

SEQ ID NO: 1178388 - RNA, 19 nt, Homo sapiens
  misc_RNA (1)...(19): siRNA sense strand
uccagaauuucaacaagca

SEQ ID NO: 1178389 - RNA, 19 nt, Homo sapiens
  misc_RNA (1)...(19): siRNA sense strand
cuacacggccacugacaca

SEQ ID NO: 1178390 - RNA, 19 nt, Homo sapiens
  misc_RNA (1)...(19): siRNA sense strand
gcucaaccagaaccucaau

SEQ ID NO: 1178391 - RNA, 19 nt, Homo sapiens
  misc_RNA (1)...(19): siRNA sense strand
uggaacagccgcguagguu

SEQ ID NO: 1178392 - RNA, 19 nt, Homo sapiens
  misc_RNA (1)...(19): siRNA sense strand
gcucaucaaagcccagaag

SEQ ID NO: 1178393 - RNA, 19 nt, Homo sapiens
  misc_RNA (1)...(19): siRNA sense strand
caaacaagaucgcagagaa

SEQ ID NO: 1178394 - RNA, 19 nt, Homo sapiens
  misc_RNA (1)...(19): siRNA sense strand
gcucaaggcuggugaugug

SEQ ID NO: 1178395 - RNA, 19 nt, Homo sapiens
  misc_RNA (1)...(19): siRNA sense strand
gaccaaggaugagcaguuu

SEQ ID NO: 1178396 - RNA, 19 nt, Homo sapiens
  misc_RNA (1)...(19): siRNA sense strand
aaagaaggaugaagccaaa

SEQ ID NO: 1178397 - RNA, 19 nt, Homo sapiens
  misc_RNA (1)...(19): siRNA sense strand
gacaucaagucacgcauug

SEQ ID NO: 1178398 - RNA, 19 nt, Homo sapiens
  misc_RNA (1)...(19): siRNA sense strand
gaacagccgcguagguuuc

SEQ ID NO: 1178399 - RNA, 19 nt, Homo sapiens
  misc_RNA (1)...(19): siRNA sense strand
cagaugagaccaaggauga

SEQ ID NO: 1178400 - RNA, 19 nt, Homo sapiens
  misc_RNA (1)...(19): siRNA sense strand
gagcagugcguccagaauu

SEQ ID NO: 1178401 - RNA, 19 nt, Homo sapiens
  misc_RNA (1)...(19): siRNA sense strand
ccagcaacgugcagaagaa

SEQ ID NO: 1178402 - RNA, 19 nt, Homo sapiens
  misc_RNA (1)...(19): siRNA sense strand
agaaggaucuccggaccua

SEQ ID NO: 1178403 - RNA, 19 nt, Homo sapiens
  misc_RNA (1)...(19): siRNA sense strand
guggagaccuucccagcaa

SEQ ID NO: 1178404 - RNA, 19 nt, Homo sapiens
  misc_RNA (1)...(19): siRNA sense strand
ggcgcaagcugguggacua

SEQ ID NO: 1178405 - RNA, 19 nt, Homo sapiens
  misc_RNA (1)...(19): siRNA sense strand
gaccugcuguggauggauu

SEQ ID NO: 1178406 - RNA, 19 nt, Homo sapiens
  misc_RNA (1)...(19): siRNA sense strand
gaagguguuugaggagaug

SEQ ID NO: 1178407 - RNA, 19 nt, Homo sapiens
  misc_RNA (1)...(19): siRNA sense strand
gcagagaugggcaguaaag

SEQ ID NO: 1178408 - RNA, 19 nt, Homo sapiens
  misc_RNA (1)...(19): siRNA sense strand
cccgagaacuucacugaga

SEQ ID NO: 1178409 - RNA, 19 nt, Homo sapiens
  misc_RNA (1)...(19): siRNA sense strand
gcaagcugguggacuacga

SEQ ID NO: 1178410 - RNA, 19 nt, Homo sapiens
  misc_RNA (1)...(19): siRNA sense strand
ggaacagccgcguagguuu

SEQ ID NO: 1178411 - RNA, 19 nt, Homo sapiens
  misc_RNA (1)...(19): siRNA sense strand
cgggaaagaucgccagcaa

SEQ ID NO: 1178412 - RNA, 19 nt, Homo sapiens
  misc_RNA (1)...(19): siRNA sense strand
ccaaggaugagcaguuuga

SEQ ID NO: 1178413 - RNA, 19 nt, Homo sapiens
  misc_RNA (1)...(19): siRNA sense strand
gcagggaugaggcaaacaa

SEQ ID NO: 1178414 - RNA, 19 nt, Homo sapiens
  misc_RNA (1)...(19): siRNA sense strand
acaacgaccugcuguggau

SEQ ID NO: 1178415 - RNA, 19 nt, Homo sapiens
  misc_RNA (1)...(19): siRNA sense strand
gggaugaggcaaacaagau

SEQ ID NO: 1178416 - RNA, 19 nt, Homo sapiens
  misc_RNA (1)...(19): siRNA sense strand
ugaaggagagcgacuggaa

SEQ ID NO: 1178417 - RNA, 19 nt, Homo sapiens
  misc_RNA (1)...(19): siRNA sense strand
gcaaacaagaucgcagaga

SEQ ID NO: 1178418 - RNA, 19 nt, Homo sapiens
  misc_RNA (1)...(19): siRNA sense strand
cuaccuggccuccgucaaa

SEQ ID NO: 1178419 - RNA, 19 nt, Homo sapiens
  misc_RNA (1)...(19): siRNA sense strand
ucaaccagaaccucaauga

SEQ ID NO: 1178420 - RNA, 19 nt, Homo sapiens
  misc_RNA (1)...(19): siRNA sense strand
cgacaucaagucacgcauu

SEQ ID NO: 1178421 - RNA, 19 nt, Homo sapiens
  misc_RNA (1)...(19): siRNA sense strand
aaccagaaccucaaugaug

SEQ ID NO: 1178422 - RNA, 19 nt, Homo sapiens
  misc_RNA (1)...(19): siRNA sense strand
gcaacaccuucacggucaa

SEQ ID NO: 1178423 - RNA, 19 nt, Homo sapiens
  misc_RNA (1)...(19): siRNA sense strand
accagaaccucaaugaugu

SEQ ID NO: 1178424 - RNA, 19 nt, Homo sapiens
  misc_RNA (1)...(19): siRNA sense strand
aggaggagcucaucaaagc

SEQ ID NO: 1178425 - RNA, 19 nt, Homo sapiens
  misc_RNA (1)...(19): siRNA sense strand
cgaggaggagcucaucaaa

SEQ ID NO: 1178426 - RNA, 19 nt, Homo sapiens
  misc_RNA (1)...(19): siRNA sense strand
agcagugcguccagaauuu

SEQ ID NO: 1178427 - RNA, 19 nt, Homo sapiens
  misc_RNA (1)...(19): siRNA sense strand
ggaaggcagaugagaccaa

SEQ ID NO: 1178428 - RNA, 19 nt, Homo sapiens
  misc_RNA (1)...(19): siRNA sense strand
ucaaagcccagaagguguu

SEQ ID NO: 1178429 - RNA, 19 nt, Homo sapiens
  misc_RNA (1)...(19): siRNA sense strand
gaggaggagcucaucaaag

SEQ ID NO: 1178430 - RNA, 19 nt, Homo sapiens
  misc_RNA (1)...(19): siRNA sense strand
acaaggagaugagcaagcu

SEQ ID NO: 1178431 - RNA, 19 nt, Homo sapiens
  misc_RNA (1)...(19): siRNA sense strand
ggaugaggcaaacaagauc

SEQ ID NO: 1178432 - RNA, 19 nt, Homo sapiens
  misc_RNA (1)...(19): siRNA sense strand
gaaggaugaagccaaaauu

SEQ ID NO: 1178433 - RNA, 19 nt, Homo sapiens
  misc_RNA (1)...(19): siRNA sense strand
ccacuacgagucccuucaa

SEQ ID NO: 1178434 - RNA, 19 nt, Homo sapiens
  misc_RNA (1)...(19): siRNA sense strand
ggauggauuaccaccagaa

SEQ ID NO: 1178435 - RNA, 19 nt, Homo sapiens
  misc_RNA (1)...(19): siRNA sense strand
caaccagaaccucaaugau

SEQ ID NO: 1178436 - RNA, 19 nt, Homo sapiens
  misc_RNA (1)...(19): siRNA sense strand
gcagugcguccagaauuuc

SEQ ID NO: 1178437 - RNA, 19 nt, Homo sapiens
  misc_RNA (1)...(19): siRNA sense strand
caagaucgcagagaacaac

SEQ ID NO: 1178438 - RNA, 19 nt, Homo sapiens
  misc_RNA (1)...(19): siRNA sense strand
agaccaaggaugagcaguu

SEQ ID NO: 1178439 - RNA, 19 nt, Homo sapiens
  misc_RNA (1)...(19): siRNA sense strand
ugacaacgcgccugcaaaa

SEQ ID NO: 1178440 - RNA, 19 nt, Homo sapiens
  misc_RNA (1)...(19): siRNA sense strand
agaagguguuugaggagau

SEQ ID NO: 1178441 - RNA, 19 nt, Homo sapiens
  misc_RNA (1)...(19): siRNA sense strand
cacuacgagucccuucaaa

SEQ ID NO: 1178442 - RNA, 19 nt, Homo sapiens
  misc_RNA (1)...(19): siRNA sense strand
ucaacacguuccagagcau

SEQ ID NO: 1178443 - RNA, 19 nt, Homo sapiens
  misc_RNA (1)...(19): siRNA sense strand
gccagcaacgugcagaaga

SEQ ID NO: 1178444 - RNA, 19 nt, Homo sapiens
  misc_RNA (1)...(19): siRNA sense strand
cguccagaauuucaacaag

SEQ ID NO: 1178445 - RNA, 19 nt, Homo sapiens
  misc_RNA (1)...(19): siRNA sense strand
uccagaauuucaacaagca

SEQ ID NO: 1178446 - RNA, 19 nt, Homo sapiens
  misc_RNA (1)...(19): siRNA sense strand
cuacacggccacugacaca

SEQ ID NO: 1178447 - RNA, 19 nt, Homo sapiens
  misc_RNA (1)...(19): siRNA sense strand
gcucaaccagaaccucaau

SEQ ID NO: 1178448 - RNA, 19 nt, Homo sapiens
  misc_RNA (1)...(19): siRNA sense strand
uggaacagccgcguagguu

SEQ ID NO: 1178449 - RNA, 19 nt, Homo sapiens
  misc_RNA (1)...(19): siRNA sense strand
gcucaucaaagcccagaag

SEQ ID NO: 1178450 - RNA, 19 nt, Homo sapiens
  misc_RNA (1)...(19): siRNA sense strand
caaacaagaucgcagagaa

SEQ ID NO: 1178451 - RNA, 19 nt, Homo sapiens
  misc_RNA (1)...(19): siRNA sense strand
gcucaaggcuggugaugug

SEQ ID NO: 1178452 - RNA, 19 nt, Homo sapiens
  misc_RNA (1)...(19): siRNA sense strand
gaccaaggaugagcaguuu

SEQ ID NO: 1178453 - RNA, 19 nt, Homo sapiens
  misc_RNA (1)...(19): siRNA sense strand
aaagaaggaugaagccaaa

SEQ ID NO: 1178454 - RNA, 19 nt, Homo sapiens
  misc_RNA (1)...(19): siRNA sense strand
gacaucaagucacgcauug

SEQ ID NO: 1178455 - RNA, 19 nt, Homo sapiens
  misc_RNA (1)...(19): siRNA sense strand
gaacagccgcguagguuuc

SEQ ID NO: 1178456 - RNA, 19 nt, Homo sapiens
  misc_RNA (1)...(19): siRNA sense strand
cagaugagaccaaggauga

SEQ ID NO: 1178457 - RNA, 19 nt, Homo sapiens
  misc_RNA (1)...(19): siRNA sense strand
gagcagugcguccagaauu

SEQ ID NO: 1178458 - RNA, 19 nt, Homo sapiens
  misc_RNA (1)...(19): siRNA sense strand
ccagcaacgugcagaagaa

SEQ ID NO: 1178459 - RNA, 19 nt, Homo sapiens
  misc_RNA (1)...(19): siRNA sense strand
agaaggaucuccggaccua

SEQ ID NO: 1178460 - RNA, 19 nt, Homo sapiens
  misc_RNA (1)...(19): siRNA sense strand
guggagaccuucccagcaa

SEQ ID NO: 1178461 - RNA, 19 nt, Homo sapiens
  misc_RNA (1)...(19): siRNA sense strand
ggcgcaagcugguggacua

SEQ ID NO: 1178462 - RNA, 19 nt, Homo sapiens
  misc_RNA (1)...(19): siRNA sense strand
gaccugcuguggauggauu

SEQ ID NO: 1178463 - RNA, 19 nt, Homo sapiens
  misc_RNA (1)...(19): siRNA sense strand
gaagguguuugaggagaug

SEQ ID NO: 1178464 - RNA, 19 nt, Homo sapiens
  misc_RNA (1)...(19): siRNA sense strand
gcagagaugggcaguaaag

SEQ ID NO: 1178465 - RNA, 19 nt, Homo sapiens
  misc_RNA (1)...(19): siRNA sense strand
cccgagaacuucacugaga

SEQ ID NO: 1178466 - RNA, 19 nt, Homo sapiens
  misc_RNA (1)...(19): siRNA sense strand
gcaagcugguggacuacga

SEQ ID NO: 1178467 - RNA, 19 nt, Homo sapiens
  misc_RNA (1)...(19): siRNA sense strand
ggaacagccgcguagguuu

SEQ ID NO: 1178468 - RNA, 19 nt, Homo sapiens
  misc_RNA (1)...(19): siRNA sense strand
cgggaaagaucgccagcaa

SEQ ID NO: 1178469 - RNA, 19 nt, Homo sapiens
  misc_RNA (1)...(19): siRNA sense strand
ccaaggaugagcaguuuga

SEQ ID NO: 1178470 - RNA, 19 nt, Homo sapiens
  misc_RNA (1)...(19): siRNA sense strand
gcagggaugaggcaaacaa

SEQ ID NO: 1178471 - RNA, 19 nt, Homo sapiens
  misc_RNA (1)...(19): siRNA sense strand
acaacgaccugcuguggau

SEQ ID NO: 1178472 - RNA, 19 nt, Homo sapiens
  misc_RNA (1)...(19): siRNA sense strand
gggaugaggcaaacaagau

SEQ ID NO: 1178473 - RNA, 19 nt, Homo sapiens
  misc_RNA (1)...(19): siRNA sense strand
ugaaggagagcgacuggaa

SEQ ID NO: 1178474 - RNA, 19 nt, Homo sapiens
  misc_RNA (1)...(19): siRNA sense strand
gcaaacaagaucgcagaga

SEQ ID NO: 1178475 - RNA, 19 nt, Homo sapiens
  misc_RNA (1)...(19): siRNA sense strand
cuaccuggccuccgucaaa

SEQ ID NO: 1178476 - RNA, 19 nt, Homo sapiens
  misc_RNA (1)...(19): siRNA sense strand
ucaaccagaaccucaauga

SEQ ID NO: 1178477 - RNA, 19 nt, Homo sapiens
  misc_RNA (1)...(19): siRNA sense strand
cgacaucaagucacgcauu

SEQ ID NO: 1178478 - RNA, 19 nt, Homo sapiens
  misc_RNA (1)...(19): siRNA sense strand
aaccagaaccucaaugaug

SEQ ID NO: 1178479 - RNA, 19 nt, Homo sapiens
  misc_RNA (1)...(19): siRNA sense strand
gcaacaccuucacggucaa

SEQ ID NO: 1178480 - RNA, 19 nt, Homo sapiens
  misc_RNA (1)...(19): siRNA sense strand
accagaaccucaaugaugu

SEQ ID NO: 1178481 - RNA, 19 nt, Homo sapiens
  misc_RNA (1)...(19): siRNA sense strand
aggaggagcucaucaaagc

SEQ ID NO: 1178482 - RNA, 19 nt, Homo sapiens
  misc_RNA (1)...(19): siRNA sense strand
cgaggaggagcucaucaaa

SEQ ID NO: 1178483 - RNA, 19 nt, Homo sapiens
  misc_RNA (1)...(19): siRNA sense strand
agcagugcguccagaauuu

SEQ ID NO: 1178484 - RNA, 19 nt, Homo sapiens
  misc_RNA (1)...(19): siRNA sense strand
ggaaggcagaugagaccaa

SEQ ID NO: 1178485 - RNA, 19 nt, Homo sapiens
  misc_RNA (1)...(19): siRNA sense strand
ucaaagcccagaagguguu

SEQ ID NO: 1178486 - RNA, 19 nt, Homo sapiens
  misc_RNA (1)...(19): siRNA sense strand
gaggaggagcucaucaaag

SEQ ID NO: 1178487 - RNA, 19 nt, Homo sapiens
  misc_RNA (1)...(19): siRNA sense strand
acaaggagaugagcaagcu

SEQ ID NO: 1178488 - RNA, 19 nt, Homo sapiens
  misc_RNA (1)...(19): siRNA sense strand
ggaugaggcaaacaagauc

SEQ ID NO: 1178489 - RNA, 19 nt, Homo sapiens
  misc_RNA (1)...(19): siRNA sense strand
gaaggaugaagccaaaauu

SEQ ID NO: 1178490 - RNA, 19 nt, Homo sapiens
  misc_RNA (1)...(19): siRNA sense strand
ccacuacgagucccuucaa

SEQ ID NO: 1178491 - RNA, 19 nt, Homo sapiens
  misc_RNA (1)...(19): siRNA sense strand
ggauggauuaccaccagaa

SEQ ID NO: 1178492 - RNA, 19 nt, Homo sapiens
  misc_RNA (1)...(19): siRNA sense strand
caaccagaaccucaaugau

SEQ ID NO: 1178493 - RNA, 19 nt, Homo sapiens
  misc_RNA (1)...(19): siRNA sense strand
gcagugcguccagaauuuc

SEQ ID NO: 1178494 - RNA, 19 nt, Homo sapiens
  misc_RNA (1)...(19): siRNA sense strand
caagaucgcagagaacaac

SEQ ID NO: 1178495 - RNA, 19 nt, Homo sapiens
  misc_RNA (1)...(19): siRNA sense strand
agaccaaggaugagcaguu

SEQ ID NO: 1178496 - RNA, 19 nt, Homo sapiens
  misc_RNA (1)...(19): siRNA sense strand
ugacaacgcgccugcaaaa

SEQ ID NO: 1178497 - RNA, 19 nt, Homo sapiens
  misc_RNA (1)...(19): siRNA sense strand
agaagguguuugaggagau

SEQ ID NO: 1178498 - RNA, 19 nt, Homo sapiens
  misc_RNA (1)...(19): siRNA sense strand
cacuacgagucccuucaaa

SEQ ID NO: 1178499 - RNA, 19 nt, Homo sapiens
  misc_RNA (1)...(19): siRNA sense strand
ucaacacguuccagagcau

SEQ ID NO: 1178500 - RNA, 19 nt, Homo sapiens
  misc_RNA (1)...(19): siRNA sense strand
gccagcaacgugcagaaga

SEQ ID NO: 1178501 - RNA, 19 nt, Homo sapiens
  misc_RNA (1)...(19): siRNA sense strand
cguccagaauuucaacaag

SEQ ID NO: 1178502 - RNA, 19 nt, Homo sapiens
  misc_RNA (1)...(19): siRNA sense strand
uccagaauuucaacaagca

SEQ ID NO: 1178503 - RNA, 19 nt, Homo sapiens
  misc_RNA (1)...(19): siRNA sense strand
cuacacggccacugacaca

SEQ ID NO: 1178504 - RNA, 19 nt, Homo sapiens
  misc_RNA (1)...(19): siRNA sense strand
gcucaaccagaaccucaau

SEQ ID NO: 1178505 - RNA, 19 nt, Homo sapiens
  misc_RNA (1)...(19): siRNA sense strand
uggaacagccgcguagguu

SEQ ID NO: 1178506 - RNA, 19 nt, Homo sapiens
  misc_RNA (1)...(19): siRNA sense strand
gcucaucaaagcccagaag

SEQ ID NO: 1178507 - RNA, 19 nt, Homo sapiens
  misc_RNA (1)...(19): siRNA sense strand
caaacaagaucgcagagaa

SEQ ID NO: 1178508 - RNA, 19 nt, Homo sapiens
  misc_RNA (1)...(19): siRNA sense strand
gcucaaggcuggugaugug

SEQ ID NO: 1178509 - RNA, 19 nt, Homo sapiens
  misc_RNA (1)...(19): siRNA sense strand
gaccaaggaugagcaguuu

SEQ ID NO: 1178510 - RNA, 19 nt, Homo sapiens
  misc_RNA (1)...(19): siRNA sense strand
aaagaaggaugaagccaaa

SEQ ID NO: 1178511 - RNA, 19 nt, Homo sapiens
  misc_RNA (1)...(19): siRNA sense strand
gacaucaagucacgcauug

SEQ ID NO: 1178512 - RNA, 19 nt, Homo sapiens
  misc_RNA (1)...(19): siRNA sense strand
gaacagccgcguagguuuc

SEQ ID NO: 1178513 - RNA, 19 nt, Homo sapiens
  misc_RNA (1)...(19): siRNA sense strand
cagaugagaccaaggauga

SEQ ID NO: 1178514 - RNA, 19 nt, Homo sapiens
  misc_RNA (1)...(19): siRNA sense strand
gagcagugcguccagaauu

SEQ ID NO: 1178515 - RNA, 19 nt, Homo sapiens
  misc_RNA (1)...(19): siRNA sense strand
ccagcaacgugcagaagaa

SEQ ID NO: 1178516 - RNA, 19 nt, Homo sapiens
  misc_RNA (1)...(19): siRNA sense strand
agaaggaucuccggaccua

SEQ ID NO: 1178517 - RNA, 19 nt, Homo sapiens
  misc_RNA (1)...(19): siRNA sense strand
guggagaccuucccagcaa

SEQ ID NO: 1178518 - RNA, 19 nt, Homo sapiens
  misc_RNA (1)...(19): siRNA sense strand
ggcgcaagcugguggacua

SEQ ID NO: 1178519 - RNA, 19 nt, Homo sapiens
  misc_RNA (1)...(19): siRNA sense strand
gaccugcuguggauggauu

SEQ ID NO: 1178520 - RNA, 19 nt, Homo sapiens
  misc_RNA (1)...(19): siRNA sense strand
gaagguguuugaggagaug

SEQ ID NO: 1178521 - RNA, 19 nt, Homo sapiens
  misc_RNA (1)...(19): siRNA sense strand
gcagagaugggcaguaaag

SEQ ID NO: 1178522 - RNA, 19 nt, Homo sapiens
  misc_RNA (1)...(19): siRNA sense strand
cccgagaacuucacugaga

SEQ ID NO: 1178523 - RNA, 19 nt, Homo sapiens
  misc_RNA (1)...(19): siRNA sense strand
gcaagcugguggacuacga

SEQ ID NO: 1178524 - RNA, 19 nt, Homo sapiens
  misc_RNA (1)...(19): siRNA sense strand
ggaacagccgcguagguuu

SEQ ID NO: 1178525 - RNA, 19 nt, Homo sapiens
  misc_RNA (1)...(19): siRNA sense strand
cgggaaagaucgccagcaa

SEQ ID NO: 1178526 - RNA, 19 nt, Homo sapiens
  misc_RNA (1)...(19): siRNA sense strand
ccaaggaugagcaguuuga

SEQ ID NO: 1178527 - RNA, 19 nt, Homo sapiens
  misc_RNA (1)...(19): siRNA sense strand
gcagggaugaggcaaacaa

SEQ ID NO: 1178528 - RNA, 19 nt, Homo sapiens
  misc_RNA (1)...(19): siRNA sense strand
acaacgaccugcuguggau

SEQ ID NO: 1178529 - RNA, 19 nt, Homo sapiens
  misc_RNA (1)...(19): siRNA sense strand
gggaugaggcaaacaagau

SEQ ID NO: 1178530 - RNA, 19 nt, Homo sapiens
  misc_RNA (1)...(19): siRNA sense strand
ugaaggagagcgacuggaa

SEQ ID NO: 1178531 - RNA, 19 nt, Homo sapiens
  misc_RNA (1)...(19): siRNA sense strand
gcaaacaagaucgcagaga

SEQ ID NO: 1178532 - RNA, 19 nt, Homo sapiens
  misc_RNA (1)...(19): siRNA sense strand
cuaccuggccuccgucaaa

SEQ ID NO: 1178533 - RNA, 19 nt, Homo sapiens
  misc_RNA (1)...(19): siRNA sense strand
ucaaccagaaccucaauga

SEQ ID NO: 1178534 - RNA, 19 nt, Homo sapiens
  misc_RNA (1)...(19): siRNA sense strand
cgacaucaagucacgcauu

SEQ ID NO: 1178535 - RNA, 19 nt, Homo sapiens
  misc_RNA (1)...(19): siRNA sense strand
aaccagaaccucaaugaug

SEQ ID NO: 1178536 - RNA, 19 nt, Homo sapiens
  misc_RNA (1)...(19): siRNA sense strand
gcaacaccuucacggucaa

SEQ ID NO: 1178537 - RNA, 19 nt, Homo sapiens
  misc_RNA (1)...(19): siRNA sense strand
accagaaccucaaugaugu

SEQ ID NO: 1178538 - RNA, 19 nt, Homo sapiens
  misc_RNA (1)...(19): siRNA sense strand
aggaggagcucaucaaagc

SEQ ID NO: 1178539 - RNA, 19 nt, Homo sapiens
  misc_RNA (1)...(19): siRNA sense strand
cgaggaggagcucaucaaa

SEQ ID NO: 1178540 - RNA, 19 nt, Homo sapiens
  misc_RNA (1)...(19): siRNA sense strand
agcagugcguccagaauuu

SEQ ID NO: 1178541 - RNA, 19 nt, Homo sapiens
  misc_RNA (1)...(19): siRNA sense strand
ggaaggcagaugagaccaa

SEQ ID NO: 1178542 - RNA, 19 nt, Homo sapiens
  misc_RNA (1)...(19): siRNA sense strand
ucaaagcccagaagguguu

SEQ ID NO: 1178543 - RNA, 19 nt, Homo sapiens
  misc_RNA (1)...(19): siRNA sense strand
gaggaggagcucaucaaag

SEQ ID NO: 1178544 - RNA, 19 nt, Homo sapiens
  misc_RNA (1)...(19): siRNA sense strand
acaaggagaugagcaagcu

SEQ ID NO: 1178545 - RNA, 19 nt, Homo sapiens
  misc_RNA (1)...(19): siRNA sense strand
ggaugaggcaaacaagauc

SEQ ID NO: 1178546 - RNA, 19 nt, Homo sapiens
  misc_RNA (1)...(19): siRNA sense strand
gaaggaugaagccaaaauu

SEQ ID NO: 1178547 - RNA, 19 nt, Homo sapiens
  misc_RNA (1)...(19): siRNA sense strand
ccacuacgagucccuucaa

SEQ ID NO: 1178548 - RNA, 19 nt, Homo sapiens
  misc_RNA (1)...(19): siRNA sense strand
ggauggauuaccaccagaa

SEQ ID NO: 1178549 - RNA, 19 nt, Homo sapiens
  misc_RNA (1)...(19): siRNA sense strand
caaccagaaccucaaugau

SEQ ID NO: 1178550 - RNA, 19 nt, Homo sapiens
  misc_RNA (1)...(19): siRNA sense strand
gcagugcguccagaauuuc

SEQ ID NO: 1178551 - RNA, 19 nt, Homo sapiens
  misc_RNA (1)...(19): siRNA sense strand
caagaucgcagagaacaac

SEQ ID NO: 1178552 - RNA, 19 nt, Homo sapiens
  misc_RNA (1)...(19): siRNA sense strand
agaccaaggaugagcaguu

SEQ ID NO: 1178553 - RNA, 19 nt, Homo sapiens
  misc_RNA (1)...(19): siRNA sense strand
ugacaacgcgccugcaaaa

SEQ ID NO: 1178554 - RNA, 19 nt, Homo sapiens
  misc_RNA (1)...(19): siRNA sense strand
agaagguguuugaggagau

SEQ ID NO: 1178555 - RNA, 19 nt, Homo sapiens
  misc_RNA (1)...(19): siRNA sense strand
cacuacgagucccuucaaa

SEQ ID NO: 1178556 - RNA, 19 nt, Homo sapiens
  misc_RNA (1)...(19): siRNA sense strand
ucaacacguuccagagcau

SEQ ID NO: 1178557 - RNA, 19 nt, Homo sapiens
  misc_RNA (1)...(19): siRNA sense strand
gccagcaacgugcagaaga

SEQ ID NO: 1178558 - RNA, 19 nt, Homo sapiens
  misc_RNA (1)...(19): siRNA sense strand
cguccagaauuucaacaag

SEQ ID NO: 1178559 - RNA, 19 nt, Homo sapiens
  misc_RNA (1)...(19): siRNA sense strand
uccagaauuucaacaagca

SEQ ID NO: 1178560 - RNA, 19 nt, Homo sapiens
  misc_RNA (1)...(19): siRNA sense strand
cuacacggccacugacaca

SEQ ID NO: 1178561 - RNA, 19 nt, Homo sapiens
  misc_RNA (1)...(19): siRNA sense strand
gcucaaccagaaccucaau

SEQ ID NO: 1178562 - RNA, 19 nt, Homo sapiens
  misc_RNA (1)...(19): siRNA sense strand
uggaacagccgcguagguu

SEQ ID NO: 1178563 - RNA, 19 nt, Homo sapiens
  misc_RNA (1)...(19): siRNA sense strand
gcucaucaaagcccagaag

SEQ ID NO: 1178564 - RNA, 19 nt, Homo sapiens
  misc_RNA (1)...(19): siRNA sense strand
caaacaagaucgcagagaa

SEQ ID NO: 1178565 - RNA, 19 nt, Homo sapiens
  misc_RNA (1)...(19): siRNA sense strand
gcucaaggcuggugaugug

SEQ ID NO: 1178566 - RNA, 19 nt, Homo sapiens
  misc_RNA (1)...(19): siRNA sense strand
gaccaaggaugagcaguuu

SEQ ID NO: 1178567 - RNA, 19 nt, Homo sapiens
  misc_RNA (1)...(19): siRNA sense strand
aaagaaggaugaagccaaa

SEQ ID NO: 1178568 - RNA, 19 nt, Homo sapiens
  misc_RNA (1)...(19): siRNA sense strand
gacaucaagucacgcauug

SEQ ID NO: 1178569 - RNA, 19 nt, Homo sapiens
  misc_RNA (1)...(19): siRNA sense strand
gaacagccgcguagguuuc

SEQ ID NO: 1178570 - RNA, 19 nt, Homo sapiens
  misc_RNA (1)...(19): siRNA sense strand
cagaugagaccaaggauga

SEQ ID NO: 1178571 - RNA, 19 nt, Homo sapiens
  misc_RNA (1)...(19): siRNA sense strand
gagcagugcguccagaauu

SEQ ID NO: 1178572 - RNA, 19 nt, Homo sapiens
  misc_RNA (1)...(19): siRNA sense strand
ccagcaacgugcagaagaa

SEQ ID NO: 1178573 - RNA, 19 nt, Homo sapiens
  misc_RNA (1)...(19): siRNA sense strand
agaaggaucuccggaccua

SEQ ID NO: 1178574 - RNA, 19 nt, Homo sapiens
  misc_RNA (1)...(19): siRNA sense strand
guggagaccuucccagcaa

SEQ ID NO: 1178575 - RNA, 19 nt, Homo sapiens
  misc_RNA (1)...(19): siRNA sense strand
ggcgcaagcugguggacua

SEQ ID NO: 1178576 - RNA, 19 nt, Homo sapiens
  misc_RNA (1)...(19): siRNA sense strand
gaccugcuguggauggauu

SEQ ID NO: 1178577 - RNA, 19 nt, Homo sapiens
  misc_RNA (1)...(19): siRNA sense strand
gaagguguuugaggagaug

SEQ ID NO: 1178578 - RNA, 19 nt, Homo sapiens
  misc_RNA (1)...(19): siRNA sense strand
gcagagaugggcaguaaag

SEQ ID NO: 1178579 - RNA, 19 nt, Homo sapiens
  misc_RNA (1)...(19): siRNA sense strand
cccgagaacuucacugaga

SEQ ID NO: 1178580 - RNA, 19 nt, Homo sapiens
  misc_RNA (1)...(19): siRNA sense strand
gcaagcugguggacuacga

SEQ ID NO: 1178581 - RNA, 19 nt, Homo sapiens
  misc_RNA (1)...(19): siRNA sense strand
ggaacagccgcguagguuu

SEQ ID NO: 1178582 - RNA, 19 nt, Homo sapiens
  misc_RNA (1)...(19): siRNA sense strand
cgggaaagaucgccagcaa

SEQ ID NO: 1178583 - RNA, 19 nt, Homo sapiens
  misc_RNA (1)...(19): siRNA sense strand
ccaaggaugagcaguuuga

SEQ ID NO: 1178584 - RNA, 19 nt, Homo sapiens
  misc_RNA (1)...(19): siRNA sense strand
gcagggaugaggcaaacaa

SEQ ID NO: 1178585 - RNA, 19 nt, Homo sapiens
  misc_RNA (1)...(19): siRNA sense strand
acaacgaccugcuguggau

SEQ ID NO: 1178586 - RNA, 19 nt, Homo sapiens
  misc_RNA (1)...(19): siRNA sense strand
gggaugaggcaaacaagau

SEQ ID NO: 1178587 - RNA, 19 nt, Homo sapiens
  misc_RNA (1)...(19): siRNA sense strand
ugaaggagagcgacuggaa

SEQ ID NO: 1178588 - RNA, 19 nt, Homo sapiens
  misc_RNA (1)...(19): siRNA sense strand
gcaaacaagaucgcagaga

SEQ ID NO: 1178589 - RNA, 19 nt, Homo sapiens
  misc_RNA (1)...(19): siRNA sense strand
cuaccuggccuccgucaaa

SEQ ID NO: 1178590 - RNA, 19 nt, Homo sapiens
  misc_RNA (1)...(19): siRNA sense strand
ucaaccagaaccucaauga

SEQ ID NO: 1178591 - RNA, 19 nt, Homo sapiens
  misc_RNA (1)...(19): siRNA sense strand
cgacaucaagucacgcauu

SEQ ID NO: 1178592 - RNA, 19 nt, Homo sapiens
  misc_RNA (1)...(19): siRNA sense strand
aaccagaaccucaaugaug

SEQ ID NO: 1178593 - RNA, 19 nt, Homo sapiens
  misc_RNA (1)...(19): siRNA sense strand
gcaacaccuucacggucaa

SEQ ID NO: 1178594 - RNA, 19 nt, Homo sapiens
  misc_RNA (1)...(19): siRNA sense strand
accagaaccucaaugaugu

SEQ ID NO: 1178595 - RNA, 19 nt, Homo sapiens
  misc_RNA (1)...(19): siRNA sense strand
aggaggagcucaucaaagc

SEQ ID NO: 1178596 - RNA, 19 nt, Homo sapiens
  misc_RNA (1)...(19): siRNA sense strand
cgaggaggagcucaucaaa

SEQ ID NO: 1178597 - RNA, 19 nt, Homo sapiens
  misc_RNA (1)...(19): siRNA sense strand
agcagugcguccagaauuu

SEQ ID NO: 1178598 - RNA, 19 nt, Homo sapiens
  misc_RNA (1)...(19): siRNA sense strand
ggaaggcagaugagaccaa

SEQ ID NO: 1178599 - RNA, 19 nt, Homo sapiens
  misc_RNA (1)...(19): siRNA sense strand
ucaaagcccagaagguguu

SEQ ID NO: 1178600 - RNA, 19 nt, Homo sapiens
  misc_RNA (1)...(19): siRNA sense strand
gaggaggagcucaucaaag

SEQ ID NO: 1178601 - RNA, 19 nt, Homo sapiens
  misc_RNA (1)...(19): siRNA sense strand
acaaggagaugagcaagcu

SEQ ID NO: 1178602 - RNA, 19 nt, Homo sapiens
  misc_RNA (1)...(19): siRNA sense strand
ggaugaggcaaacaagauc

SEQ ID NO: 1178603 - RNA, 19 nt, Homo sapiens
  misc_RNA (1)...(19): siRNA sense strand
gaaggaugaagccaaaauu

SEQ ID NO: 1178604 - RNA, 19 nt, Homo sapiens
  misc_RNA (1)...(19): siRNA sense strand
ccacuacgagucccuucaa

SEQ ID NO: 1178605 - RNA, 19 nt, Homo sapiens
  misc_RNA (1)...(19): siRNA sense strand
ggauggauuaccaccagaa

SEQ ID NO: 1178606 - RNA, 19 nt, Homo sapiens
  misc_RNA (1)...(19): siRNA sense strand
caaccagaaccucaaugau

SEQ ID NO: 1178607 - RNA, 19 nt, Homo sapiens
  misc_RNA (1)...(19): siRNA sense strand
gcagugcguccagaauuuc

SEQ ID NO: 1178608 - RNA, 19 nt, Homo sapiens
  misc_RNA (1)...(19): siRNA sense strand
caagaucgcagagaacaac

SEQ ID NO: 1178609 - RNA, 19 nt, Homo sapiens
  misc_RNA (1)...(19): siRNA sense strand
agaccaaggaugagcaguu

SEQ ID NO: 1178610 - RNA, 19 nt, Homo sapiens
  misc_RNA (1)...(19): siRNA sense strand
ugacaacgcgccugcaaaa

SEQ ID NO: 1178611 - RNA, 19 nt, Homo sapiens
  misc_RNA (1)...(19): siRNA sense strand
agaagguguuugaggagau

SEQ ID NO: 1178612 - RNA, 19 nt, Homo sapiens
  misc_RNA (1)...(19): siRNA sense strand
cacuacgagucccuucaaa

SEQ ID NO: 1178613 - RNA, 19 nt, Homo sapiens
  misc_RNA (1)...(19): siRNA sense strand
ucaacacguuccagagcau

SEQ ID NO: 1178614 - RNA, 19 nt, Homo sapiens
  misc_RNA (1)...(19): siRNA sense strand
gccagcaacgugcagaaga

SEQ ID NO: 1178615 - RNA, 19 nt, Homo sapiens
  misc_RNA (1)...(19): siRNA sense strand
cguccagaauuucaacaag

SEQ ID NO: 1178616 - RNA, 19 nt, Homo sapiens
  misc_RNA (1)...(19): siRNA sense strand
uccagaauuucaacaagca

SEQ ID NO: 1178617 - RNA, 19 nt, Homo sapiens
  misc_RNA (1)...(19): siRNA sense strand
cuacacggccacugacaca

SEQ ID NO: 1178618 - RNA, 19 nt, Homo sapiens
  misc_RNA (1)...(19): siRNA sense strand
gcucaaccagaaccucaau

SEQ ID NO: 1178619 - RNA, 19 nt, Homo sapiens
  misc_RNA (1)...(19): siRNA sense strand
uggaacagccgcguagguu

SEQ ID NO: 1178620 - RNA, 19 nt, Homo sapiens
  misc_RNA (1)...(19): siRNA sense strand
gcucaucaaagcccagaag

SEQ ID NO: 1178621 - RNA, 19 nt, Homo sapiens
  misc_RNA (1)...(19): siRNA sense strand
caaacaagaucgcagagaa

SEQ ID NO: 1178622 - RNA, 19 nt, Homo sapiens
  misc_RNA (1)...(19): siRNA sense strand
gcucaaggcuggugaugug

SEQ ID NO: 1178623 - RNA, 19 nt, Homo sapiens
  misc_RNA (1)...(19): siRNA sense strand
gaccaaggaugagcaguuu

SEQ ID NO: 1178624 - RNA, 19 nt, Homo sapiens
  misc_RNA (1)...(19): siRNA sense strand
aaagaaggaugaagccaaa

SEQ ID NO: 1178625 - RNA, 19 nt, Homo sapiens
  misc_RNA (1)...(19): siRNA sense strand
gacaucaagucacgcauug

SEQ ID NO: 1178626 - RNA, 19 nt, Homo sapiens
  misc_RNA (1)...(19): siRNA sense strand
gaacagccgcguagguuuc

SEQ ID NO: 1178627 - RNA, 19 nt, Homo sapiens
  misc_RNA (1)...(19): siRNA sense strand
cagaugagaccaaggauga

SEQ ID NO: 1178628 - RNA, 19 nt, Homo sapiens
  misc_RNA (1)...(19): siRNA sense strand
gagcagugcguccagaauu

SEQ ID NO: 1178629 - RNA, 19 nt, Homo sapiens
  misc_RNA (1)...(19): siRNA sense strand
ccagcaacgugcagaagaa

SEQ ID NO: 1178630 - RNA, 19 nt, Homo sapiens
  misc_RNA (1)...(19): siRNA sense strand
agaaggaucuccggaccua

SEQ ID NO: 1178631 - RNA, 19 nt, Homo sapiens
  misc_RNA (1)...(19): siRNA sense strand
guggagaccuucccagcaa

SEQ ID NO: 1178632 - RNA, 19 nt, Homo sapiens
  misc_RNA (1)...(19): siRNA sense strand
ggcgcaagcugguggacua

SEQ ID NO: 1178633 - RNA, 19 nt, Homo sapiens
  misc_RNA (1)...(19): siRNA sense strand
gaccugcuguggauggauu

SEQ ID NO: 1178634 - RNA, 19 nt, Homo sapiens
  misc_RNA (1)...(19): siRNA sense strand
gaagguguuugaggagaug

SEQ ID NO: 1178635 - RNA, 19 nt, Homo sapiens
  misc_RNA (1)...(19): siRNA sense strand
gcagagaugggcaguaaag

SEQ ID NO: 1178636 - RNA, 19 nt, Homo sapiens
  misc_RNA (1)...(19): siRNA sense strand
cccgagaacuucacugaga

SEQ ID NO: 1178637 - RNA, 19 nt, Homo sapiens
  misc_RNA (1)...(19): siRNA sense strand
gcaagcugguggacuacga

SEQ ID NO: 1178638 - RNA, 19 nt, Homo sapiens
  misc_RNA (1)...(19): siRNA sense strand
ggaacagccgcguagguuu

SEQ ID NO: 1178639 - RNA, 19 nt, Homo sapiens
  misc_RNA (1)...(19): siRNA sense strand
cgggaaagaucgccagcaa

SEQ ID NO: 1178640 - RNA, 19 nt, Homo sapiens
  misc_RNA (1)...(19): siRNA sense strand
ccaaggaugagcaguuuga

SEQ ID NO: 1178641 - RNA, 19 nt, Homo sapiens
  misc_RNA (1)...(19): siRNA sense strand
gcagggaugaggcaaacaa

SEQ ID NO: 1178642 - RNA, 19 nt, Homo sapiens
  misc_RNA (1)...(19): siRNA sense strand
acaacgaccugcuguggau

SEQ ID NO: 1178643 - RNA, 19 nt, Homo sapiens
  misc_RNA (1)...(19): siRNA sense strand
gggaugaggcaaacaagau

SEQ ID NO: 1178644 - RNA, 19 nt, Homo sapiens
  misc_RNA (1)...(19): siRNA sense strand
ugaaggagagcgacuggaa

SEQ ID NO: 1178645 - RNA, 19 nt, Homo sapiens
  misc_RNA (1)...(19): siRNA sense strand
gcaaacaagaucgcagaga

SEQ ID NO: 1178646 - RNA, 19 nt, Homo sapiens
  misc_RNA (1)...(19): siRNA sense strand
cuaccuggccuccgucaaa

SEQ ID NO: 1178647 - RNA, 19 nt, Homo sapiens
  misc_RNA (1)...(19): siRNA sense strand
ucaaccagaaccucaauga

SEQ ID NO: 1178648 - RNA, 19 nt, Homo sapiens
  misc_RNA (1)...(19): siRNA sense strand
cgacaucaagucacgcauu

SEQ ID NO: 1178649 - RNA, 19 nt, Homo sapiens
  misc_RNA (1)...(19): siRNA sense strand
aaccagaaccucaaugaug

SEQ ID NO: 1178650 - RNA, 19 nt, Homo sapiens
  misc_RNA (1)...(19): siRNA sense strand
gcaacaccuucacggucaa

SEQ ID NO: 1178651 - RNA, 19 nt, Homo sapiens
  misc_RNA (1)...(19): siRNA sense strand
accagaaccucaaugaugu

SEQ ID NO: 1178652 - RNA, 19 nt, Homo sapiens
  misc_RNA (1)...(19): siRNA sense strand
aggaggagcucaucaaagc

SEQ ID NO: 1178653 - RNA, 19 nt, Homo sapiens
  misc_RNA (1)...(19): siRNA sense strand
cgaggaggagcucaucaaa

SEQ ID NO: 1178654 - RNA, 19 nt, Homo sapiens
  misc_RNA (1)...(19): siRNA sense strand
agcagugcguccagaauuu

SEQ ID NO: 1178655 - RNA, 19 nt, Homo sapiens
  misc_RNA (1)...(19): siRNA sense strand
ggaaggcagaugagaccaa

SEQ ID NO: 1178656 - RNA, 19 nt, Homo sapiens
  misc_RNA (1)...(19): siRNA sense strand
ucaaagcccagaagguguu

SEQ ID NO: 1178657 - RNA, 19 nt, Homo sapiens
  misc_RNA (1)...(19): siRNA sense strand
gaggaggagcucaucaaag

SEQ ID NO: 1178658 - RNA, 19 nt, Homo sapiens
  misc_RNA (1)...(19): siRNA sense strand
acaaggagaugagcaagcu

SEQ ID NO: 1178659 - RNA, 19 nt, Homo sapiens
  misc_RNA (1)...(19): siRNA sense strand
ggaugaggcaaacaagauc

SEQ ID NO: 1178660 - RNA, 19 nt, Homo sapiens
  misc_RNA (1)...(19): siRNA sense strand
gaaggaugaagccaaaauu

SEQ ID NO: 1178661 - RNA, 19 nt, Homo sapiens
  misc_RNA (1)...(19): siRNA sense strand
ccacuacgagucccuucaa

SEQ ID NO: 1178662 - RNA, 19 nt, Homo sapiens
  misc_RNA (1)...(19): siRNA sense strand
ggauggauuaccaccagaa

SEQ ID NO: 1178663 - RNA, 19 nt, Homo sapiens
  misc_RNA (1)...(19): siRNA sense strand
caaccagaaccucaaugau

SEQ ID NO: 1178664 - RNA, 19 nt, Homo sapiens
  misc_RNA (1)...(19): siRNA sense strand
gcagugcguccagaauuuc

SEQ ID NO: 1178665 - RNA, 19 nt, Homo sapiens
  misc_RNA (1)...(19): siRNA sense strand
caagaucgcagagaacaac

SEQ ID NO: 1178666 - RNA, 19 nt, Homo sapiens
  misc_RNA (1)...(19): siRNA sense strand
agaccaaggaugagcaguu

SEQ ID NO: 1178667 - RNA, 19 nt, Homo sapiens
  misc_RNA (1)...(19): siRNA sense strand
ugacaacgcgccugcaaaa

SEQ ID NO: 1178668 - RNA, 19 nt, Homo sapiens
  misc_RNA (1)...(19): siRNA sense strand
agaagguguuugaggagau

SEQ ID NO: 1178669 - RNA, 19 nt, Homo sapiens
  misc_RNA (1)...(19): siRNA sense strand
cacuacgagucccuucaaa

SEQ ID NO: 1178670 - RNA, 19 nt, Homo sapiens
  misc_RNA (1)...(19): siRNA sense strand
ucaacacguuccagagcau

SEQ ID NO: 1178671 - RNA, 19 nt, Homo sapiens
  misc_RNA (1)...(19): siRNA sense strand
gccagcaacgugcagaaga

SEQ ID NO: 1178672 - RNA, 19 nt, Homo sapiens
  misc_RNA (1)...(19): siRNA sense strand
cguccagaauuucaacaag

SEQ ID NO: 1178673 - RNA, 19 nt, Homo sapiens
  misc_RNA (1)...(19): siRNA sense strand
uccagaauuucaacaagca

SEQ ID NO: 1178674 - RNA, 19 nt, Homo sapiens
  misc_RNA (1)...(19): siRNA sense strand
cuacacggccacugacaca

SEQ ID NO: 1178675 - RNA, 19 nt, Homo sapiens
  misc_RNA (1)...(19): siRNA sense strand
gcucaaccagaaccucaau

SEQ ID NO: 1178676 - RNA, 19 nt, Homo sapiens
  misc_RNA (1)...(19): siRNA sense strand
uggaacagccgcguagguu

SEQ ID NO: 1178677 - RNA, 19 nt, Homo sapiens
  misc_RNA (1)...(19): siRNA sense strand
gcucaucaaagcccagaag

SEQ ID NO: 1178678 - RNA, 19 nt, Homo sapiens
  misc_RNA (1)...(19): siRNA sense strand
caaacaagaucgcagagaa

SEQ ID NO: 1178679 - RNA, 19 nt, Homo sapiens
  misc_RNA (1)...(19): siRNA sense strand
gcucaaggcuggugaugug

SEQ ID NO: 1178680 - RNA, 19 nt, Homo sapiens
  misc_RNA (1)...(19): siRNA sense strand
gaccaaggaugagcaguuu

SEQ ID NO: 1178681 - RNA, 19 nt, Homo sapiens
  misc_RNA (1)...(19): siRNA sense strand
aaagaaggaugaagccaaa

SEQ ID NO: 1178682 - RNA, 19 nt, Homo sapiens
  misc_RNA (1)...(19): siRNA sense strand
gacaucaagucacgcauug

SEQ ID NO: 1178683 - RNA, 19 nt, Homo sapiens
  misc_RNA (1)...(19): siRNA sense strand
gaacagccgcguagguuuc

SEQ ID NO: 1178684 - RNA, 19 nt, Homo sapiens
  misc_RNA (1)...(19): siRNA sense strand
cagaugagaccaaggauga

SEQ ID NO: 1178685 - RNA, 19 nt, Homo sapiens
  misc_RNA (1)...(19): siRNA sense strand
gagcagugcguccagaauu

SEQ ID NO: 1178686 - RNA, 19 nt, Homo sapiens
  misc_RNA (1)...(19): siRNA sense strand
ccagcaacgugcagaagaa

SEQ ID NO: 1178687 - RNA, 19 nt, Homo sapiens
  misc_RNA (1)...(19): siRNA sense strand
agaaggaucuccggaccua

SEQ ID NO: 1178688 - RNA, 19 nt, Homo sapiens
  misc_RNA (1)...(19): siRNA sense strand
guggagaccuucccagcaa

SEQ ID NO: 1178689 - RNA, 19 nt, Homo sapiens
  misc_RNA (1)...(19): siRNA sense strand
ggcgcaagcugguggacua

SEQ ID NO: 1178690 - RNA, 19 nt, Homo sapiens
  misc_RNA (1)...(19): siRNA sense strand
gaccugcuguggauggauu

SEQ ID NO: 1178691 - RNA, 19 nt, Homo sapiens
  misc_RNA (1)...(19): siRNA sense strand
gaagguguuugaggagaug

SEQ ID NO: 1178692 - RNA, 19 nt, Homo sapiens
  misc_RNA (1)...(19): siRNA sense strand
gcagagaugggcaguaaag

SEQ ID NO: 1178693 - RNA, 19 nt, Homo sapiens
  misc_RNA (1)...(19): siRNA sense strand
cccgagaacuucacugaga

SEQ ID NO: 1178694 - RNA, 19 nt, Homo sapiens
  misc_RNA (1)...(19): siRNA sense strand
gcaagcugguggacuacga

SEQ ID NO: 1178695 - RNA, 19 nt, Homo sapiens
  misc_RNA (1)...(19): siRNA sense strand
ggaacagccgcguagguuu

SEQ ID NO: 1178696 - RNA, 19 nt, Homo sapiens
  misc_RNA (1)...(19): siRNA sense strand
cgggaaagaucgccagcaa

SEQ ID NO: 1178697 - RNA, 19 nt, Homo sapiens
  misc_RNA (1)...(19): siRNA sense strand
ccaaggaugagcaguuuga

SEQ ID NO: 1178698 - RNA, 19 nt, Homo sapiens
  misc_RNA (1)...(19): siRNA sense strand
gcagggaugaggcaaacaa

SEQ ID NO: 1178699 - RNA, 19 nt, Homo sapiens
  misc_RNA (1)...(19): siRNA sense strand
acaacgaccugcuguggau

SEQ ID NO: 1178700 - RNA, 19 nt, Homo sapiens
  misc_RNA (1)...(19): siRNA sense strand
gggaugaggcaaacaagau

SEQ ID NO: 1178701 - RNA, 19 nt, Homo sapiens
  misc_RNA (1)...(19): siRNA sense strand
ugaaggagagcgacuggaa

SEQ ID NO: 1178702 - RNA, 19 nt, Homo sapiens
  misc_RNA (1)...(19): siRNA sense strand
gcaaacaagaucgcagaga

SEQ ID NO: 1178703 - RNA, 19 nt, Homo sapiens
  misc_RNA (1)...(19): siRNA sense strand
cuaccuggccuccgucaaa

SEQ ID NO: 1178704 - RNA, 19 nt, Homo sapiens
  misc_RNA (1)...(19): siRNA sense strand
ucaaccagaaccucaauga

SEQ ID NO: 1178705 - RNA, 19 nt, Homo sapiens
  misc_RNA (1)...(19): siRNA sense strand
cgacaucaagucacgcauu

SEQ ID NO: 1178706 - RNA, 19 nt, Homo sapiens
  misc_RNA (1)...(19): siRNA sense strand
aaccagaaccucaaugaug

SEQ ID NO: 1178707 - RNA, 19 nt, Homo sapiens
  misc_RNA (1)...(19): siRNA sense strand
gcaacaccuucacggucaa

SEQ ID NO: 1178708 - RNA, 19 nt, Homo sapiens
  misc_RNA (1)...(19): siRNA sense strand
accagaaccucaaugaugu

SEQ ID NO: 1178709 - RNA, 19 nt, Homo sapiens
  misc_RNA (1)...(19): siRNA sense strand
aggaggagcucaucaaagc

SEQ ID NO: 1178710 - RNA, 19 nt, Homo sapiens
  misc_RNA (1)...(19): siRNA sense strand
cgaggaggagcucaucaaa

SEQ ID NO: 1178711 - RNA, 19 nt, Homo sapiens
  misc_RNA (1)...(19): siRNA sense strand
agcagugcguccagaauuu

SEQ ID NO: 1178712 - RNA, 19 nt, Homo sapiens
  misc_RNA (1)...(19): siRNA sense strand
ggaaggcagaugagaccaa

SEQ ID NO: 1178713 - RNA, 19 nt, Homo sapiens
  misc_RNA (1)...(19): siRNA sense strand
ucaaagcccagaagguguu

SEQ ID NO: 1178714 - RNA, 19 nt, Homo sapiens
  misc_RNA (1)...(19): siRNA sense strand
gaggaggagcucaucaaag

SEQ ID NO: 1178715 - RNA, 19 nt, Homo sapiens
  misc_RNA (1)...(19): siRNA sense strand
acaaggagaugagcaagcu

SEQ ID NO: 1178716 - RNA, 19 nt, Homo sapiens
  misc_RNA (1)...(19): siRNA sense strand
ggaugaggcaaacaagauc

SEQ ID NO: 1178717 - RNA, 19 nt, Homo sapiens
  misc_RNA (1)...(19): siRNA sense strand
gaaggaugaagccaaaauu

SEQ ID NO: 1178718 - RNA, 19 nt, Homo sapiens
  misc_RNA (1)...(19): siRNA sense strand
ccacuacgagucccuucaa

SEQ ID NO: 1178719 - RNA, 19 nt, Homo sapiens
  misc_RNA (1)...(19): siRNA sense strand
ggauggauuaccaccagaa

SEQ ID NO: 1178720 - RNA, 19 nt, Homo sapiens
  misc_RNA (1)...(19): siRNA sense strand
caaccagaaccucaaugau

SEQ ID NO: 1178721 - RNA, 19 nt, Homo sapiens
  misc_RNA (1)...(19): siRNA sense strand
gcagugcguccagaauuuc

SEQ ID NO: 1178722 - RNA, 19 nt, Homo sapiens
  misc_RNA (1)...(19): siRNA sense strand
caagaucgcagagaacaac

SEQ ID NO: 1178723 - RNA, 19 nt, Homo sapiens
  misc_RNA (1)...(19): siRNA sense strand
agaccaaggaugagcaguu

SEQ ID NO: 1178724 - RNA, 19 nt, Homo sapiens
  misc_RNA (1)...(19): siRNA sense strand
ugacaacgcgccugcaaaa

SEQ ID NO: 1178725 - RNA, 19 nt, Homo sapiens
  misc_RNA (1)...(19): siRNA sense strand
agaagguguuugaggagau

SEQ ID NO: 1178726 - RNA, 19 nt, Homo sapiens
  misc_RNA (1)...(19): siRNA sense strand
cacuacgagucccuucaaa

SEQ ID NO: 1178727 - RNA, 19 nt, Homo sapiens
  misc_RNA (1)...(19): siRNA sense strand
ucaacacguuccagagcau

SEQ ID NO: 1178728 - RNA, 19 nt, Homo sapiens
  misc_RNA (1)...(19): siRNA sense strand
gccagcaacgugcagaaga

SEQ ID NO: 1178729 - RNA, 19 nt, Homo sapiens
  misc_RNA (1)...(19): siRNA sense strand
cguccagaauuucaacaag

SEQ ID NO: 1178730 - RNA, 19 nt, Homo sapiens
  misc_RNA (1)...(19): siRNA sense strand
uccagaauuucaacaagca

SEQ ID NO: 1178731 - RNA, 19 nt, Homo sapiens
  misc_RNA (1)...(19): siRNA sense strand
cuacacggccacugacaca

SEQ ID NO: 1178732 - RNA, 19 nt, Homo sapiens
  misc_RNA (1)...(19): siRNA sense strand
gcucaaccagaaccucaau

SEQ ID NO: 1178733 - RNA, 19 nt, Homo sapiens
  misc_RNA (1)...(19): siRNA sense strand
uggaacagccgcguagguu

SEQ ID NO: 1178734 - RNA, 19 nt, Homo sapiens
  misc_RNA (1)...(19): siRNA sense strand
gcucaucaaagcccagaag

SEQ ID NO: 1178735 - RNA, 19 nt, Homo sapiens
  misc_RNA (1)...(19): siRNA sense strand
ccucaugccugcccagaaa

SEQ ID NO: 1178736 - RNA, 19 nt, Homo sapiens
  misc_RNA (1)...(19): siRNA sense strand
gggcaggugugcauaucaa

SEQ ID NO: 1178737 - RNA, 19 nt, Homo sapiens
  misc_RNA (1)...(19): siRNA sense strand
gcacaagaccgaccucaac

SEQ ID NO: 1178738 - RNA, 19 nt, Homo sapiens
  misc_RNA (1)...(19): siRNA sense strand
gcucaucgacgaccacuuc

SEQ ID NO: 1178739 - RNA, 19 nt, Homo sapiens
  misc_RNA (1)...(19): siRNA sense strand
gggcaagcaugagaaguuc

SEQ ID NO: 1178740 - RNA, 19 nt, Homo sapiens
  misc_RNA (1)...(19): siRNA sense strand
gcuacaagcccagcgauga

SEQ ID NO: 1178741 - RNA, 19 nt, Homo sapiens
  misc_RNA (1)...(19): siRNA sense strand
ccuacgaaguguucaagga

SEQ ID NO: 1178742 - RNA, 19 nt, Homo sapiens
  misc_RNA (1)...(19): siRNA sense strand
ucacccagauugaaacucu

SEQ ID NO: 1178743 - RNA, 19 nt, Homo sapiens
  misc_RNA (1)...(19): siRNA sense strand
gaccugagcgcccacaaca

SEQ ID NO: 1178744 - RNA, 19 nt, Homo sapiens
  misc_RNA (1)...(19): siRNA sense strand
cgcgguaucuggcacaaug

SEQ ID NO: 1178745 - RNA, 19 nt, Homo sapiens
  misc_RNA (1)...(19): siRNA sense strand
ggccacccguacaucauga

SEQ ID NO: 1178746 - RNA, 19 nt, Homo sapiens
  misc_RNA (1)...(19): siRNA sense strand
ggccaucgacgaccucaug

SEQ ID NO: 1178747 - RNA, 19 nt, Homo sapiens
  misc_RNA (1)...(19): siRNA sense strand
ggaguccuacgaaguguuc

SEQ ID NO: 1178748 - RNA, 19 nt, Homo sapiens
  misc_RNA (1)...(19): siRNA sense strand
gaaguucucggaggugcuu

SEQ ID NO: 1178749 - RNA, 19 nt, Homo sapiens
  misc_RNA (1)...(19): siRNA sense strand
cgacgaccacuuccucuuc

SEQ ID NO: 1178750 - RNA, 19 nt, Homo sapiens
  misc_RNA (1)...(19): siRNA sense strand
gauacuacgcgcucaagag

SEQ ID NO: 1178751 - RNA, 19 nt, Homo sapiens
  misc_RNA (1)...(19): siRNA sense strand
ggccucacccagauugaaa

SEQ ID NO: 1178752 - RNA, 19 nt, Homo sapiens
  misc_RNA (1)...(19): siRNA sense strand
gcccagcgaugagcacaag

SEQ ID NO: 1178753 - RNA, 19 nt, Homo sapiens
  misc_RNA (1)...(19): siRNA sense strand
acaaugacaauaagaccuu

SEQ ID NO: 1178754 - RNA, 19 nt, Homo sapiens
  misc_RNA (1)...(19): siRNA sense strand
gcgggcaggugugcauauc

SEQ ID NO: 1178755 - RNA, 19 nt, Homo sapiens
  misc_RNA (1)...(19): siRNA sense strand
guaucuggcacaaugacaa

SEQ ID NO: 1178756 - RNA, 19 nt, Homo sapiens
  misc_RNA (1)...(19): siRNA sense strand
agguggagcuggugcagau

SEQ ID NO: 1178757 - RNA, 19 nt, Homo sapiens
  misc_RNA (1)...(19): siRNA sense strand
ugggcaagcaugagaaguu

SEQ ID NO: 1178758 - RNA, 19 nt, Homo sapiens
  misc_RNA (1)...(19): siRNA sense strand
ucuggcacaaugacaauaa

SEQ ID NO: 1178759 - RNA, 19 nt, Homo sapiens
  misc_RNA (1)...(19): siRNA sense strand
cuacgaaguguucaaggau

SEQ ID NO: 1178760 - RNA, 19 nt, Homo sapiens
  misc_RNA (1)...(19): siRNA sense strand
acaaccacauggccaaggu

SEQ ID NO: 1178761 - RNA, 19 nt, Homo sapiens
  misc_RNA (1)...(19): siRNA sense strand
gaagacaucugcaaauauu

SEQ ID NO: 1178762 - RNA, 19 nt, Homo sapiens
  misc_RNA (1)...(19): siRNA sense strand
gaauauaacugcuuggaaa

SEQ ID NO: 1178763 - RNA, 19 nt, Homo sapiens
  misc_RNA (1)...(19): siRNA sense strand
gguauuauuuggagucuua

SEQ ID NO: 1178764 - RNA, 19 nt, Homo sapiens
  misc_RNA (1)...(19): siRNA sense strand
gaaggaagauacagcuuug

SEQ ID NO: 1178765 - RNA, 19 nt, Homo sapiens
  misc_RNA (1)...(19): siRNA sense strand
gcaaauauuucugcauuga

SEQ ID NO: 1178766 - RNA, 19 nt, Homo sapiens
  misc_RNA (1)...(19): siRNA sense strand
ggaaauacuuggcaaaaua

SEQ ID NO: 1178767 - RNA, 19 nt, Homo sapiens
  misc_RNA (1)...(19): siRNA sense strand
gaagaguuauguagaaaug

SEQ ID NO: 1178768 - RNA, 19 nt, Homo sapiens
  misc_RNA (1)...(19): siRNA sense strand
gcucggaagugaaauucua

SEQ ID NO: 1178769 - RNA, 19 nt, Homo sapiens
  misc_RNA (1)...(19): siRNA sense strand
ggaauuccauacauuacuu

SEQ ID NO: 1178770 - RNA, 19 nt, Homo sapiens
  misc_RNA (1)...(19): siRNA sense strand
aagagguacucaccaauua

SEQ ID NO: 1178771 - RNA, 19 nt, Homo sapiens
  misc_RNA (1)...(19): siRNA sense strand
ggaaacaucugugcucagu

SEQ ID NO: 1178772 - RNA, 19 nt, Homo sapiens
  misc_RNA (1)...(19): siRNA sense strand
uauuauaccuggucugaaa

SEQ ID NO: 1178773 - RNA, 19 nt, Homo sapiens
  misc_RNA (1)...(19): siRNA sense strand
aaacauacguagaaacugu

SEQ ID NO: 1178774 - RNA, 19 nt, Homo sapiens
  misc_RNA (1)...(19): siRNA sense strand
uggaagacaucugcaaaua

SEQ ID NO: 1178775 - RNA, 19 nt, Homo sapiens
  misc_RNA (1)...(19): siRNA sense strand
ggaaggaagauacagcuuu

SEQ ID NO: 1178776 - RNA, 19 nt, Homo sapiens
  misc_RNA (1)...(19): siRNA sense strand
ggaaaagguuguagauauu

SEQ ID NO: 1178777 - RNA, 19 nt, Homo sapiens
  misc_RNA (1)...(19): siRNA sense strand
aaagcaacauggagaguuu

SEQ ID NO: 1178778 - RNA, 19 nt, Homo sapiens
  misc_RNA (1)...(19): siRNA sense strand
cauuauaccuucugcauca

SEQ ID NO: 1178779 - RNA, 19 nt, Homo sapiens
  misc_RNA (1)...(19): siRNA sense strand
uuaaagaucuccuuacaac

SEQ ID NO: 1178780 - RNA, 19 nt, Homo sapiens
  misc_RNA (1)...(19): siRNA sense strand
gcccauaucuacuuauaca

SEQ ID NO: 1178781 - RNA, 19 nt, Homo sapiens
  misc_RNA (1)...(19): siRNA sense strand
ggaagacaucugcaaauau

SEQ ID NO: 1178782 - RNA, 19 nt, Homo sapiens
  misc_RNA (1)...(19): siRNA sense strand
aaagcaagaucaccaaauc

SEQ ID NO: 1178783 - RNA, 19 nt, Homo sapiens
  misc_RNA (1)...(19): siRNA sense strand
caagagguacucaccaauu

SEQ ID NO: 1178784 - RNA, 19 nt, Homo sapiens
  misc_RNA (1)...(19): siRNA sense strand
uguaccaucucauaaauug

SEQ ID NO: 1178785 - RNA, 19 nt, Homo sapiens
  misc_RNA (1)...(19): siRNA sense strand
ccaauuaugcauaugauga

SEQ ID NO: 1178786 - RNA, 19 nt, Homo sapiens
  misc_RNA (1)...(19): siRNA sense strand
uuccuuggcuucaaacaua

SEQ ID NO: 1178787 - RNA, 19 nt, Homo sapiens
  misc_RNA (1)...(19): siRNA sense strand
ugugacagaugaugaagaa

SEQ ID NO: 1178788 - RNA, 19 nt, Homo sapiens
  misc_RNA (1)...(19): siRNA sense strand
auauuggcgucaugaauua

SEQ ID NO: 1178789 - RNA, 19 nt, Homo sapiens
  misc_RNA (1)...(19): siRNA sense strand
gcucaguggugcaggaaug

SEQ ID NO: 1178790 - RNA, 19 nt, Homo sapiens
  misc_RNA (1)...(19): siRNA sense strand
caaaugcccauaucuacuu

SEQ ID NO: 1178791 - RNA, 19 nt, Homo sapiens
  misc_RNA (1)...(19): siRNA sense strand
gugaagaguuauguagaaa

SEQ ID NO: 1178792 - RNA, 19 nt, Homo sapiens
  misc_RNA (1)...(19): siRNA sense strand
gacagaugaugaagaagug

SEQ ID NO: 1178793 - RNA, 19 nt, Homo sapiens
  misc_RNA (1)...(19): siRNA sense strand
gauuguaccaucucauaaa

SEQ ID NO: 1178794 - RNA, 19 nt, Homo sapiens
  misc_RNA (1)...(19): siRNA sense strand
gaagcucggaagugaaauu

SEQ ID NO: 1178795 - RNA, 19 nt, Homo sapiens
  misc_RNA (1)...(19): siRNA sense strand
cggaugcacuaagaauaua

SEQ ID NO: 1178796 - RNA, 19 nt, Homo sapiens
  misc_RNA (1)...(19): siRNA sense strand
ugugaagaguuauguagaa

SEQ ID NO: 1178797 - RNA, 19 nt, Homo sapiens
  misc_RNA (1)...(19): siRNA sense strand
caacauggagaguuucaau

SEQ ID NO: 1178798 - RNA, 19 nt, Homo sapiens
  misc_RNA (1)...(19): siRNA sense strand
gaugaagagaucugugaaa

SEQ ID NO: 1178799 - RNA, 19 nt, Homo sapiens
  misc_RNA (1)...(19): siRNA sense strand
aaaugcccauaucuacuua

SEQ ID NO: 1178800 - RNA, 19 nt, Homo sapiens
  misc_RNA (1)...(19): siRNA sense strand
ggaugauuaugcuuacaau

SEQ ID NO: 1178801 - RNA, 19 nt, Homo sapiens
  misc_RNA (1)...(19): siRNA sense strand
uggagaguuucaauacuuu

SEQ ID NO: 1178802 - RNA, 19 nt, Homo sapiens
  misc_RNA (1)...(19): siRNA sense strand
agauggagcccaagaggua

SEQ ID NO: 1178803 - RNA, 19 nt, Homo sapiens
  misc_RNA (1)...(19): siRNA sense strand
gaagauggaauugucaaag

SEQ ID NO: 1178804 - RNA, 19 nt, Homo sapiens
  misc_RNA (1)...(19): siRNA sense strand
aauauuggcgucaugaauu

SEQ ID NO: 1178805 - RNA, 19 nt, Homo sapiens
  misc_RNA (1)...(19): siRNA sense strand
gaaaugcuggaauucuaug

SEQ ID NO: 1178806 - RNA, 19 nt, Homo sapiens
  misc_RNA (1)...(19): siRNA sense strand
aaagaucuccuuacaacau

SEQ ID NO: 1178807 - RNA, 19 nt, Homo sapiens
  misc_RNA (1)...(19): siRNA sense strand
gaugcuaagagaaaucuga

SEQ ID NO: 1178808 - RNA, 19 nt, Homo sapiens
  misc_RNA (1)...(19): siRNA sense strand
gagguacucaccaauuaug

SEQ ID NO: 1178809 - RNA, 19 nt, Homo sapiens
  misc_RNA (1)...(19): siRNA sense strand
caucauggaaugcuuaaag

SEQ ID NO: 1178810 - RNA, 19 nt, Homo sapiens
  misc_RNA (1)...(19): siRNA sense strand
uguggcugguuuacuguua

SEQ ID NO: 1178811 - RNA, 19 nt, Homo sapiens
  misc_RNA (1)...(19): siRNA sense strand
gguuggagguauuauuugg

SEQ ID NO: 1178812 - RNA, 19 nt, Homo sapiens
  misc_RNA (1)...(19): siRNA sense strand
cuucaaacauacguagaaa

SEQ ID NO: 1178813 - RNA, 19 nt, Homo sapiens
  misc_RNA (1)...(19): siRNA sense strand
uuuggaagcucggaaguga

SEQ ID NO: 1178814 - RNA, 19 nt, Homo sapiens
  misc_RNA (1)...(19): siRNA sense strand
uauaacugcuuggaaauac

SEQ ID NO: 1178815 - RNA, 19 nt, Homo sapiens
  misc_RNA (1)...(19): siRNA sense strand
cccaagagguacucaccaa

SEQ ID NO: 1178816 - RNA, 19 nt, Homo sapiens
  misc_RNA (1)...(19): siRNA sense strand
gcuggaagacaucugcaaa

SEQ ID NO: 1178817 - RNA, 19 nt, Homo sapiens
  misc_RNA (1)...(19): siRNA sense strand
ccuuacaacaugcauuaua

SEQ ID NO: 1178818 - RNA, 19 nt, Homo sapiens
  misc_RNA (1)...(19): siRNA sense strand
cauggaaugcuuaaagaug

SEQ ID NO: 1178819 - RNA, 19 nt, Homo sapiens
  misc_RNA (1)...(19): siRNA sense strand
ggaugcacuaagaauauaa

SEQ ID NO: 1178820 - RNA, 19 nt, Homo sapiens
  misc_RNA (1)...(19): siRNA sense strand
caaauccaaaugcccauau

SEQ ID NO: 1178821 - RNA, 19 nt, Homo sapiens
  misc_RNA (1)...(19): siRNA sense strand
ucaccaauuaugcauauga

SEQ ID NO: 1178822 - RNA, 19 nt, Homo sapiens
  misc_RNA (1)...(19): siRNA sense strand
acucaccaauuaugcauau

SEQ ID NO: 1178823 - RNA, 19 nt, Homo sapiens
  misc_RNA (1)...(19): siRNA sense strand
ugacagaugaugaagaagu

SEQ ID NO: 1178824 - RNA, 19 nt, Homo sapiens
  misc_RNA (1)...(19): siRNA sense strand
aaaagaagauggaauuguc

SEQ ID NO: 1178825 - RNA, 19 nt, Homo sapiens
  misc_RNA (1)...(19): siRNA sense strand
aaccacagcuggaagacau

SEQ ID NO: 1178826 - RNA, 19 nt, Homo sapiens
  misc_RNA (1)...(19): siRNA sense strand
ucaaacauacguagaaacu

SEQ ID NO: 1178827 - RNA, 19 nt, Homo sapiens
  misc_RNA (1)...(19): siRNA sense strand
uaaagcaagaucaccaaau

SEQ ID NO: 1178828 - RNA, 19 nt, Homo sapiens
  misc_RNA (1)...(19): siRNA sense strand
aggaaaagguuguagauau

SEQ ID NO: 1178829 - RNA, 19 nt, Homo sapiens
  misc_RNA (1)...(19): siRNA sense strand
acagaaggcaccaagauca

SEQ ID NO: 1178830 - RNA, 19 nt, Homo sapiens
  misc_RNA (1)...(19): siRNA sense strand
ugauuaugcuuacaaugca

SEQ ID NO: 1178831 - RNA, 19 nt, Homo sapiens
  misc_RNA (1)...(19): siRNA sense strand
uuaagcggaugaagagauc

SEQ ID NO: 1178832 - RNA, 19 nt, Homo sapiens
  misc_RNA (1)...(19): siRNA sense strand
cuuacaacaugcauuauac

SEQ ID NO: 1178833 - RNA, 19 nt, Homo sapiens
  misc_RNA (1)...(19): siRNA sense strand
ggaugaagagaucugugaa

SEQ ID NO: 1178834 - RNA, 19 nt, Homo sapiens
  misc_RNA (1)...(19): siRNA sense strand
aaauuaagcggaugaagag

SEQ ID NO: 1178835 - RNA, 19 nt, Homo sapiens
  misc_RNA (1)...(19): siRNA sense strand
auggagaguuucaauacuu

SEQ ID NO: 1178836 - RNA, 19 nt, Homo sapiens
  misc_RNA (1)...(19): siRNA sense strand
gccggaugcacuaagaaua

SEQ ID NO: 1178837 - RNA, 19 nt, Homo sapiens
  misc_RNA (1)...(19): siRNA sense strand
cuaagagaaaucugaguga

SEQ ID NO: 1178838 - RNA, 19 nt, Homo sapiens
  misc_RNA (1)...(19): siRNA sense strand
gaagaaguggaaacaucug

SEQ ID NO: 1178839 - RNA, 19 nt, Homo sapiens
  misc_RNA (1)...(19): siRNA sense strand
gcuucaaacauacguagaa

SEQ ID NO: 1178840 - RNA, 19 nt, Homo sapiens
  misc_RNA (1)...(19): siRNA sense strand
ccggaugcacuaagaauau

SEQ ID NO: 1178841 - RNA, 19 nt, Homo sapiens
  misc_RNA (1)...(19): siRNA sense strand
gacagaaggcaccaagauc

SEQ ID NO: 1178842 - RNA, 19 nt, Homo sapiens
  misc_RNA (1)...(19): siRNA sense strand
gauuaaaauuccuggaguu

SEQ ID NO: 1178843 - RNA, 19 nt, Homo sapiens
  misc_RNA (1)...(19): siRNA sense strand
augaagaaguggaaacauc

SEQ ID NO: 1178844 - RNA, 19 nt, Homo sapiens
  misc_RNA (1)...(19): siRNA sense strand
gaaaagaagauggaauugu

SEQ ID NO: 1178845 - RNA, 19 nt, Homo sapiens
  misc_RNA (1)...(19): siRNA sense strand
uugcguggguucaagaaga

SEQ ID NO: 1178846 - RNA, 19 nt, Homo sapiens
  misc_RNA (1)...(19): siRNA sense strand
agaagaacaccguaaacug

SEQ ID NO: 1178847 - RNA, 19 nt, Homo sapiens
  misc_RNA (1)...(19): siRNA sense strand
agacagaaggcaccaagau

SEQ ID NO: 1178848 - RNA, 19 nt, Homo sapiens
  misc_RNA (1)...(19): siRNA sense strand
caccaauuaugcauaugau

SEQ ID NO: 1178849 - RNA, 19 nt, Homo sapiens
  misc_RNA (1)...(19): siRNA sense strand
uggaagcucggaagugaaa

SEQ ID NO: 1178850 - RNA, 19 nt, Homo sapiens
  misc_RNA (1)...(19): siRNA sense strand
uaaaauuccuggaguuugg

SEQ ID NO: 1178851 - RNA, 19 nt, Homo sapiens
  misc_RNA (1)...(19): siRNA sense strand
agacaucugcaaauauuuc

SEQ ID NO: 1178852 - RNA, 19 nt, Homo sapiens
  misc_RNA (1)...(19): siRNA sense strand
auguagaaaugcuggaauu

SEQ ID NO: 1178853 - RNA, 19 nt, Homo sapiens
  misc_RNA (1)...(19): siRNA sense strand
uguagauauuuccgguaua

SEQ ID NO: 1178854 - RNA, 19 nt, Homo sapiens
  misc_RNA (1)...(19): siRNA sense strand
uaacugcuuggaaauacuu

SEQ ID NO: 1178855 - RNA, 19 nt, Homo sapiens
  misc_RNA (1)...(19): siRNA sense strand
augcccauaucuacuuaua

SEQ ID NO: 1178856 - RNA, 19 nt, Homo sapiens
  misc_RNA (1)...(19): siRNA sense strand
cuccuuacaacaugcauua

SEQ ID NO: 1178857 - RNA, 19 nt, Homo sapiens
  misc_RNA (1)...(19): siRNA sense strand
caaagcuugauaaggauga

SEQ ID NO: 1178858 - RNA, 19 nt, Homo sapiens
  misc_RNA (1)...(19): siRNA sense strand
cggaugaagagaucuguga

SEQ ID NO: 1178859 - RNA, 19 nt, Homo sapiens
  misc_RNA (1)...(19): siRNA sense strand
cagaaggcaccaagaucaa

SEQ ID NO: 1178860 - RNA, 19 nt, Homo sapiens
  misc_RNA (1)...(19): siRNA sense strand
aagaucuccuuacaacaug

SEQ ID NO: 1178861 - RNA, 19 nt, Homo sapiens
  misc_RNA (1)...(19): siRNA sense strand
gaagacaucugcaaauauu

SEQ ID NO: 1178862 - RNA, 19 nt, Homo sapiens
  misc_RNA (1)...(19): siRNA sense strand
gaauauaacugcuuggaaa

SEQ ID NO: 1178863 - RNA, 19 nt, Homo sapiens
  misc_RNA (1)...(19): siRNA sense strand
gguauuauuuggagucuua

SEQ ID NO: 1178864 - RNA, 19 nt, Homo sapiens
  misc_RNA (1)...(19): siRNA sense strand
gaaggaagauacagcuuug

SEQ ID NO: 1178865 - RNA, 19 nt, Homo sapiens
  misc_RNA (1)...(19): siRNA sense strand
gcaaauauuucugcauuga

SEQ ID NO: 1178866 - RNA, 19 nt, Homo sapiens
  misc_RNA (1)...(19): siRNA sense strand
ggaaauacuuggcaaaaua

SEQ ID NO: 1178867 - RNA, 19 nt, Homo sapiens
  misc_RNA (1)...(19): siRNA sense strand
gaagaguuauguagaaaug

SEQ ID NO: 1178868 - RNA, 19 nt, Homo sapiens
  misc_RNA (1)...(19): siRNA sense strand
ggaauuccauacauuacuu

SEQ ID NO: 1178869 - RNA, 19 nt, Homo sapiens
  misc_RNA (1)...(19): siRNA sense strand
aagagguacucaccaauua

SEQ ID NO: 1178870 - RNA, 19 nt, Homo sapiens
  misc_RNA (1)...(19): siRNA sense strand
uauuauaccuggucugaaa

SEQ ID NO: 1178871 - RNA, 19 nt, Homo sapiens
  misc_RNA (1)...(19): siRNA sense strand
uggaagacaucugcaaaua

SEQ ID NO: 1178872 - RNA, 19 nt, Homo sapiens
  misc_RNA (1)...(19): siRNA sense strand
ggaaggaagauacagcuuu

SEQ ID NO: 1178873 - RNA, 19 nt, Homo sapiens
  misc_RNA (1)...(19): siRNA sense strand
ggaaaagguuguagauauu

SEQ ID NO: 1178874 - RNA, 19 nt, Homo sapiens
  misc_RNA (1)...(19): siRNA sense strand
cauuauaccuucugcauca

SEQ ID NO: 1178875 - RNA, 19 nt, Homo sapiens
  misc_RNA (1)...(19): siRNA sense strand
uuaaagaucuccuuacaac

SEQ ID NO: 1178876 - RNA, 19 nt, Homo sapiens
  misc_RNA (1)...(19): siRNA sense strand
gcccauaucuacuuauaca

SEQ ID NO: 1178877 - RNA, 19 nt, Homo sapiens
  misc_RNA (1)...(19): siRNA sense strand
ggaagacaucugcaaauau

SEQ ID NO: 1178878 - RNA, 19 nt, Homo sapiens
  misc_RNA (1)...(19): siRNA sense strand
aaagcaagaucaccaaauc

SEQ ID NO: 1178879 - RNA, 19 nt, Homo sapiens
  misc_RNA (1)...(19): siRNA sense strand
caagagguacucaccaauu

SEQ ID NO: 1178880 - RNA, 19 nt, Homo sapiens
  misc_RNA (1)...(19): siRNA sense strand
uguaccaucucauaaauug

SEQ ID NO: 1178881 - RNA, 19 nt, Homo sapiens
  misc_RNA (1)...(19): siRNA sense strand
ccaauuaugcauaugauga

SEQ ID NO: 1178882 - RNA, 19 nt, Homo sapiens
  misc_RNA (1)...(19): siRNA sense strand
auauuggcgucaugaauua

SEQ ID NO: 1178883 - RNA, 19 nt, Homo sapiens
  misc_RNA (1)...(19): siRNA sense strand
gugaagaguuauguagaaa

SEQ ID NO: 1178884 - RNA, 19 nt, Homo sapiens
  misc_RNA (1)...(19): siRNA sense strand
caaaugcccauaucuacuu

SEQ ID NO: 1178885 - RNA, 19 nt, Homo sapiens
  misc_RNA (1)...(19): siRNA sense strand
gauuguaccaucucauaaa

SEQ ID NO: 1178886 - RNA, 19 nt, Homo sapiens
  misc_RNA (1)...(19): siRNA sense strand
ugugaagaguuauguagaa

SEQ ID NO: 1178887 - RNA, 19 nt, Homo sapiens
  misc_RNA (1)...(19): siRNA sense strand
cggaugcacuaagaauaua

SEQ ID NO: 1178888 - RNA, 19 nt, Homo sapiens
  misc_RNA (1)...(19): siRNA sense strand
ggaugauuaugcuuacaau

SEQ ID NO: 1178889 - RNA, 19 nt, Homo sapiens
  misc_RNA (1)...(19): siRNA sense strand
gaugaagagaucugugaaa

SEQ ID NO: 1178890 - RNA, 19 nt, Homo sapiens
  misc_RNA (1)...(19): siRNA sense strand
aaaugcccauaucuacuua

SEQ ID NO: 1178891 - RNA, 19 nt, Homo sapiens
  misc_RNA (1)...(19): siRNA sense strand
agauggagcccaagaggua

SEQ ID NO: 1178892 - RNA, 19 nt, Homo sapiens
  misc_RNA (1)...(19): siRNA sense strand
gaagauggaauugucaaag

SEQ ID NO: 1178893 - RNA, 19 nt, Homo sapiens
  misc_RNA (1)...(19): siRNA sense strand
gaaaugcuggaauucuaug

SEQ ID NO: 1178894 - RNA, 19 nt, Homo sapiens
  misc_RNA (1)...(19): siRNA sense strand
aauauuggcgucaugaauu

SEQ ID NO: 1178895 - RNA, 19 nt, Homo sapiens
  misc_RNA (1)...(19): siRNA sense strand
aaagaucuccuuacaacau

SEQ ID NO: 1178896 - RNA, 19 nt, Homo sapiens
  misc_RNA (1)...(19): siRNA sense strand
gaugcuaagagaaaucuga

SEQ ID NO: 1178897 - RNA, 19 nt, Homo sapiens
  misc_RNA (1)...(19): siRNA sense strand
gagguacucaccaauuaug

SEQ ID NO: 1178898 - RNA, 19 nt, Homo sapiens
  misc_RNA (1)...(19): siRNA sense strand
caucauggaaugcuuaaag

SEQ ID NO: 1178899 - RNA, 19 nt, Homo sapiens
  misc_RNA (1)...(19): siRNA sense strand
uguggcugguuuacuguua

SEQ ID NO: 1178900 - RNA, 19 nt, Homo sapiens
  misc_RNA (1)...(19): siRNA sense strand
gguuggagguauuauuugg

SEQ ID NO: 1178901 - RNA, 19 nt, Homo sapiens
  misc_RNA (1)...(19): siRNA sense strand
gcuggaagacaucugcaaa

SEQ ID NO: 1178902 - RNA, 19 nt, Homo sapiens
  misc_RNA (1)...(19): siRNA sense strand
ccuuacaacaugcauuaua

SEQ ID NO: 1178903 - RNA, 19 nt, Homo sapiens
  misc_RNA (1)...(19): siRNA sense strand
uauaacugcuuggaaauac

SEQ ID NO: 1178904 - RNA, 19 nt, Homo sapiens
  misc_RNA (1)...(19): siRNA sense strand
cccaagagguacucaccaa

SEQ ID NO: 1178905 - RNA, 19 nt, Homo sapiens
  misc_RNA (1)...(19): siRNA sense strand
aaaagaagauggaauuguc

SEQ ID NO: 1178906 - RNA, 19 nt, Homo sapiens
  misc_RNA (1)...(19): siRNA sense strand
ggaugcacuaagaauauaa

SEQ ID NO: 1178907 - RNA, 19 nt, Homo sapiens
  misc_RNA (1)...(19): siRNA sense strand
cauggaaugcuuaaagaug

SEQ ID NO: 1178908 - RNA, 19 nt, Homo sapiens
  misc_RNA (1)...(19): siRNA sense strand
caaauccaaaugcccauau

SEQ ID NO: 1178909 - RNA, 19 nt, Homo sapiens
  misc_RNA (1)...(19): siRNA sense strand
ucaccaauuaugcauauga

SEQ ID NO: 1178910 - RNA, 19 nt, Homo sapiens
  misc_RNA (1)...(19): siRNA sense strand
acucaccaauuaugcauau

SEQ ID NO: 1178911 - RNA, 19 nt, Homo sapiens
  misc_RNA (1)...(19): siRNA sense strand
aaccacagcuggaagacau

SEQ ID NO: 1178912 - RNA, 19 nt, Homo sapiens
  misc_RNA (1)...(19): siRNA sense strand
uaaagcaagaucaccaaau

SEQ ID NO: 1178913 - RNA, 19 nt, Homo sapiens
  misc_RNA (1)...(19): siRNA sense strand
aggaaaagguuguagauau

SEQ ID NO: 1178914 - RNA, 19 nt, Homo sapiens
  misc_RNA (1)...(19): siRNA sense strand
acagaaggcaccaagauca

SEQ ID NO: 1178915 - RNA, 19 nt, Homo sapiens
  misc_RNA (1)...(19): siRNA sense strand
ugauuaugcuuacaaugca

SEQ ID NO: 1178916 - RNA, 19 nt, Homo sapiens
  misc_RNA (1)...(19): siRNA sense strand
uuaagcggaugaagagauc

SEQ ID NO: 1178917 - RNA, 19 nt, Homo sapiens
  misc_RNA (1)...(19): siRNA sense strand
cuuacaacaugcauuauac

SEQ ID NO: 1178918 - RNA, 19 nt, Homo sapiens
  misc_RNA (1)...(19): siRNA sense strand
ggaugaagagaucugugaa

SEQ ID NO: 1178919 - RNA, 19 nt, Homo sapiens
  misc_RNA (1)...(19): siRNA sense strand
aaauuaagcggaugaagag

SEQ ID NO: 1178920 - RNA, 19 nt, Homo sapiens
  misc_RNA (1)...(19): siRNA sense strand
gccggaugcacuaagaaua

SEQ ID NO: 1178921 - RNA, 19 nt, Homo sapiens
  misc_RNA (1)...(19): siRNA sense strand
gauuaaaauuccuggaguu

SEQ ID NO: 1178922 - RNA, 19 nt, Homo sapiens
  misc_RNA (1)...(19): siRNA sense strand
cuaagagaaaucugaguga

SEQ ID NO: 1178923 - RNA, 19 nt, Homo sapiens
  misc_RNA (1)...(19): siRNA sense strand
ccggaugcacuaagaauau

SEQ ID NO: 1178924 - RNA, 19 nt, Homo sapiens
  misc_RNA (1)...(19): siRNA sense strand
gacagaaggcaccaagauc

SEQ ID NO: 1178925 - RNA, 19 nt, Homo sapiens
  misc_RNA (1)...(19): siRNA sense strand
gaaaagaagauggaauugu

SEQ ID NO: 1178926 - RNA, 19 nt, Homo sapiens
  misc_RNA (1)...(19): siRNA sense strand
uugcguggguucaagaaga

SEQ ID NO: 1178927 - RNA, 19 nt, Homo sapiens
  misc_RNA (1)...(19): siRNA sense strand
agaagaacaccguaaacug

SEQ ID NO: 1178928 - RNA, 19 nt, Homo sapiens
  misc_RNA (1)...(19): siRNA sense strand
agacagaaggcaccaagau

SEQ ID NO: 1178929 - RNA, 19 nt, Homo sapiens
  misc_RNA (1)...(19): siRNA sense strand
caccaauuaugcauaugau

SEQ ID NO: 1178930 - RNA, 19 nt, Homo sapiens
  misc_RNA (1)...(19): siRNA sense strand
uaaaauuccuggaguuugg

SEQ ID NO: 1178931 - RNA, 19 nt, Homo sapiens
  misc_RNA (1)...(19): siRNA sense strand
agacaucugcaaauauuuc

SEQ ID NO: 1178932 - RNA, 19 nt, Homo sapiens
  misc_RNA (1)...(19): siRNA sense strand
auguagaaaugcuggaauu

SEQ ID NO: 1178933 - RNA, 19 nt, Homo sapiens
  misc_RNA (1)...(19): siRNA sense strand
uguagauauuuccgguaua

SEQ ID NO: 1178934 - RNA, 19 nt, Homo sapiens
  misc_RNA (1)...(19): siRNA sense strand
uaacugcuuggaaauacuu

SEQ ID NO: 1178935 - RNA, 19 nt, Homo sapiens
  misc_RNA (1)...(19): siRNA sense strand
cuccuuacaacaugcauua

SEQ ID NO: 1178936 - RNA, 19 nt, Homo sapiens
  misc_RNA (1)...(19): siRNA sense strand
augcccauaucuacuuaua

SEQ ID NO: 1178937 - RNA, 19 nt, Homo sapiens
  misc_RNA (1)...(19): siRNA sense strand
caaagcuugauaaggauga

SEQ ID NO: 1178938 - RNA, 19 nt, Homo sapiens
  misc_RNA (1)...(19): siRNA sense strand
cggaugaagagaucuguga

SEQ ID NO: 1178939 - RNA, 19 nt, Homo sapiens
  misc_RNA (1)...(19): siRNA sense strand
aagaucuccuuacaacaug

SEQ ID NO: 1178940 - RNA, 19 nt, Homo sapiens
  misc_RNA (1)...(19): siRNA sense strand
cagaaggcaccaagaucaa

SEQ ID NO: 1178941 - RNA, 19 nt, Homo sapiens
  misc_RNA (1)...(19): siRNA sense strand
ugagugaggcagagacaug

SEQ ID NO: 1178942 - RNA, 19 nt, Homo sapiens
  misc_RNA (1)...(19): siRNA sense strand
gauggaauugucaaagcuu

SEQ ID NO: 1178943 - RNA, 19 nt, Homo sapiens
  misc_RNA (1)...(19): siRNA sense strand
uuguagauauuuccgguau

SEQ ID NO: 1178944 - RNA, 19 nt, Homo sapiens
  misc_RNA (1)...(19): siRNA sense strand
cugguuuacuguuaggaaa

SEQ ID NO: 1178945 - RNA, 19 nt, Homo sapiens
  misc_RNA (1)...(19): siRNA sense strand
aaauauuggcgucaugaau

SEQ ID NO: 1178946 - RNA, 19 nt, Homo sapiens
  misc_RNA (1)...(19): siRNA sense strand
aaagugauuggaaggaaga

SEQ ID NO: 1178947 - RNA, 19 nt, Homo sapiens
  misc_RNA (1)...(19): siRNA sense strand
gaaggcaccaagaucaaaa

SEQ ID NO: 1178948 - RNA, 19 nt, Homo sapiens
  misc_RNA (1)...(19): siRNA sense strand
aaagaagauggaauuguca

SEQ ID NO: 1178949 - RNA, 19 nt, Homo sapiens
  misc_RNA (1)...(19): siRNA sense strand
ccaaaugcccauaucuacu

SEQ ID NO: 1178950 - RNA, 19 nt, Homo sapiens
  misc_RNA (1)...(19): siRNA sense strand
gaugauuaugcuuacaaug

SEQ ID NO: 1178951 - RNA, 19 nt, Homo sapiens
  misc_RNA (1)...(19): siRNA sense strand
aaaauuaagcggaugaaga

SEQ ID NO: 1178952 - RNA, 19 nt, Homo sapiens
  misc_RNA (1)...(19): siRNA sense strand
agaauauaacugcuuggaa

SEQ ID NO: 1178953 - RNA, 19 nt, Homo sapiens
  misc_RNA (1)...(19): siRNA sense strand
gagacagaaggcaccaaga

SEQ ID NO: 1178954 - RNA, 19 nt, Homo sapiens
  misc_RNA (1)...(19): siRNA sense strand
ucaaauccaaaugcccaua

SEQ ID NO: 1178955 - RNA, 19 nt, Homo sapiens
  misc_RNA (1)...(19): siRNA sense strand
guacucaccaauuaugcau

SEQ ID NO: 1178956 - RNA, 19 nt, Homo sapiens
  misc_RNA (1)...(19): siRNA sense strand
aagauggaauugucaaagc

SEQ ID NO: 1178957 - RNA, 19 nt, Homo sapiens
  misc_RNA (1)...(19): siRNA sense strand
gcaguagcccaggaugugu

SEQ ID NO: 1178958 - RNA, 19 nt, Homo sapiens
  misc_RNA (1)...(19): siRNA sense strand
cucauaaauugauguugga

SEQ ID NO: 1178959 - RNA, 19 nt, Homo sapiens
  misc_RNA (1)...(19): siRNA sense strand
gagguauuauuuggagucu

SEQ ID NO: 1178960 - RNA, 19 nt, Homo sapiens
  misc_RNA (1)...(19): siRNA sense strand
aaaagaagaacaccguaaa

SEQ ID NO: 1178961 - RNA, 19 nt, Homo sapiens
  misc_RNA (1)...(19): siRNA sense strand
ggaauugaccugaauaaua

SEQ ID NO: 1178962 - RNA, 19 nt, Homo sapiens
  misc_RNA (1)...(19): siRNA sense strand
gaauugaccugaauaauag

SEQ ID NO: 1178963 - RNA, 19 nt, Homo sapiens
  misc_RNA (1)...(19): siRNA sense strand
gagaagaccucagauguga

SEQ ID NO: 1178964 - RNA, 19 nt, Homo sapiens
  misc_RNA (1)...(19): siRNA sense strand
gauaagagauuggaggauu

SEQ ID NO: 1178965 - RNA, 19 nt, Homo sapiens
  misc_RNA (1)...(19): siRNA sense strand
gaaucuuccucuacacuua

SEQ ID NO: 1178966 - RNA, 19 nt, Homo sapiens
  misc_RNA (1)...(19): siRNA sense strand
cagaaucacuugcugcuuu

SEQ ID NO: 1178967 - RNA, 19 nt, Homo sapiens
  misc_RNA (1)...(19): siRNA sense strand
gaagucaccauuucuguaa

SEQ ID NO: 1178968 - RNA, 19 nt, Homo sapiens
  misc_RNA (1)...(19): siRNA sense strand
gcuaaaccaauaccaauua

SEQ ID NO: 1178969 - RNA, 19 nt, Homo sapiens
  misc_RNA (1)...(19): siRNA sense strand
gaucccaacuguuucguuu

SEQ ID NO: 1178970 - RNA, 19 nt, Homo sapiens
  misc_RNA (1)...(19): siRNA sense strand
gaagaugacauuuggaaga

SEQ ID NO: 1178971 - RNA, 19 nt, Homo sapiens
  misc_RNA (1)...(19): siRNA sense strand
gaacuaacagcacucagaa

SEQ ID NO: 1178972 - RNA, 19 nt, Homo sapiens
  misc_RNA (1)...(19): siRNA sense strand
ggacaaccauggagaaggu

SEQ ID NO: 1178973 - RNA, 19 nt, Homo sapiens
  misc_RNA (1)...(19): siRNA sense strand
gaugugaaguccauuaaag

SEQ ID NO: 1178974 - RNA, 19 nt, Homo sapiens
  misc_RNA (1)...(19): siRNA sense strand
gaaagugaaaggcaaagaa

SEQ ID NO: 1178975 - RNA, 19 nt, Homo sapiens
  misc_RNA (1)...(19): siRNA sense strand
agaaaugggugcaaggaaa

SEQ ID NO: 1178976 - RNA, 19 nt, Homo sapiens
  misc_RNA (1)...(19): siRNA sense strand
gagccugucucuccaucua

SEQ ID NO: 1178977 - RNA, 19 nt, Homo sapiens
  misc_RNA (1)...(19): siRNA sense strand
ucaguaugaucaaccguua

SEQ ID NO: 1178978 - RNA, 19 nt, Homo sapiens
  misc_RNA (1)...(19): siRNA sense strand
gagaccaaaucaagccuuu

SEQ ID NO: 1178979 - RNA, 19 nt, Homo sapiens
  misc_RNA (1)...(19): siRNA sense strand
gaacaagaugcagugaaua

SEQ ID NO: 1178980 - RNA, 19 nt, Homo sapiens
  misc_RNA (1)...(19): siRNA sense strand
guaaauaccagauugaagu

SEQ ID NO: 1178981 - RNA, 19 nt, Homo sapiens
  misc_RNA (1)...(19): siRNA sense strand
cagaagcaaugagaaauga

SEQ ID NO: 1178982 - RNA, 19 nt, Homo sapiens
  misc_RNA (1)...(19): siRNA sense strand
gguuagaggcugaaaguuu

SEQ ID NO: 1178983 - RNA, 19 nt, Homo sapiens
  misc_RNA (1)...(19): siRNA sense strand
gagcuagcuuggaagauug

SEQ ID NO: 1178984 - RNA, 19 nt, Homo sapiens
  misc_RNA (1)...(19): siRNA sense strand
gaaggaauugaccugaaua

SEQ ID NO: 1178985 - RNA, 19 nt, Homo sapiens
  misc_RNA (1)...(19): siRNA sense strand
ggacagccacacuuaagaa

SEQ ID NO: 1178986 - RNA, 19 nt, Homo sapiens
  misc_RNA (1)...(19): siRNA sense strand
gaucaaccguuagagaaau

SEQ ID NO: 1178987 - RNA, 19 nt, Homo sapiens
  misc_RNA (1)...(19): siRNA sense strand
gcaaggaaauacugaugag

SEQ ID NO: 1178988 - RNA, 19 nt, Homo sapiens
  misc_RNA (1)...(19): siRNA sense strand
ccaaaucaagccuuucuaa

SEQ ID NO: 1178989 - RNA, 19 nt, Homo sapiens
  misc_RNA (1)...(19): siRNA sense strand
gaucuugucuggacuacca

SEQ ID NO: 1178990 - RNA, 19 nt, Homo sapiens
  misc_RNA (1)...(19): siRNA sense strand
cauuaaagcuucaauaucc

SEQ ID NO: 1178991 - RNA, 19 nt, Homo sapiens
  misc_RNA (1)...(19): siRNA sense strand
cacaagcuaugaagaaaug

SEQ ID NO: 1178992 - RNA, 19 nt, Homo sapiens
  misc_RNA (1)...(19): siRNA sense strand
gcacaguccauagucuuua

SEQ ID NO: 1178993 - RNA, 19 nt, Homo sapiens
  misc_RNA (1)...(19): siRNA sense strand
caagucauguugcaaucaa

SEQ ID NO: 1178994 - RNA, 19 nt, Homo sapiens
  misc_RNA (1)...(19): siRNA sense strand
gacauucucuucugugagu

SEQ ID NO: 1178995 - RNA, 19 nt, Homo sapiens
  misc_RNA (1)...(19): siRNA sense strand
aagaugcagugaauacuuu

SEQ ID NO: 1178996 - RNA, 19 nt, Homo sapiens
  misc_RNA (1)...(19): siRNA sense strand
agaacaagaugcagugaau

SEQ ID NO: 1178997 - RNA, 19 nt, Homo sapiens
  misc_RNA (1)...(19): siRNA sense strand
aggaagagcuagcuuggaa

SEQ ID NO: 1178998 - RNA, 19 nt, Homo sapiens
  misc_RNA (1)...(19): siRNA sense strand
acaacuuggucgcgaauaa

SEQ ID NO: 1178999 - RNA, 19 nt, Homo sapiens
  misc_RNA (1)...(19): siRNA sense strand
gaagagcuagcuuggaaga

SEQ ID NO: 1179000 - RNA, 19 nt, Homo sapiens
  misc_RNA (1)...(19): siRNA sense strand
acacuauuguccucccuua

SEQ ID NO: 1179001 - RNA, 19 nt, Homo sapiens
  misc_RNA (1)...(19): siRNA sense strand
gauccagaaucuuuauauc

SEQ ID NO: 1179002 - RNA, 19 nt, Homo sapiens
  misc_RNA (1)...(19): siRNA sense strand
ugaugauguuguacgauua

SEQ ID NO: 1179003 - RNA, 19 nt, Homo sapiens
  misc_RNA (1)...(19): siRNA sense strand
acagaaugaugccaugauu

SEQ ID NO: 1179004 - RNA, 19 nt, Homo sapiens
  misc_RNA (1)...(19): siRNA sense strand
gacaggaggcacagaauga

SEQ ID NO: 1179005 - RNA, 19 nt, Homo sapiens
  misc_RNA (1)...(19): siRNA sense strand
ucagcacaguuguuuauga

SEQ ID NO: 1179006 - RNA, 19 nt, Homo sapiens
  misc_RNA (1)...(19): siRNA sense strand
gaaaugggugcaaggaaau

SEQ ID NO: 1179007 - RNA, 19 nt, Homo sapiens
  misc_RNA (1)...(19): siRNA sense strand
guccagcaaucuuuauuau

SEQ ID NO: 1179008 - RNA, 19 nt, Homo sapiens
  misc_RNA (1)...(19): siRNA sense strand
guuguacgauuagaaauug

SEQ ID NO: 1179009 - RNA, 19 nt, Homo sapiens
  misc_RNA (1)...(19): siRNA sense strand
cagaaggaauugaccugaa

SEQ ID NO: 1179010 - RNA, 19 nt, Homo sapiens
  misc_RNA (1)...(19): siRNA sense strand
aaaucaagccuuucuaaga

SEQ ID NO: 1179011 - RNA, 19 nt, Homo sapiens
  misc_RNA (1)...(19): siRNA sense strand
agagcuagcuuggaagauu

SEQ ID NO: 1179012 - RNA, 19 nt, Homo sapiens
  misc_RNA (1)...(19): siRNA sense strand
gauguuguacgauuagaaa

SEQ ID NO: 1179013 - RNA, 19 nt, Homo sapiens
  misc_RNA (1)...(19): siRNA sense strand
gcucagcacaguuguuuau

SEQ ID NO: 1179014 - RNA, 19 nt, Homo sapiens
  misc_RNA (1)...(19): siRNA sense strand
gaagaaaugggugcaagga

SEQ ID NO: 1179015 - RNA, 19 nt, Homo sapiens
  misc_RNA (1)...(19): siRNA sense strand
ggacauaugccgggaagau

SEQ ID NO: 1179016 - RNA, 19 nt, Homo sapiens
  misc_RNA (1)...(19): siRNA sense strand
cagauaacuuccagucuca

SEQ ID NO: 1179017 - RNA, 19 nt, Homo sapiens
  misc_RNA (1)...(19): siRNA sense strand
gcaggacagccacacuuaa

SEQ ID NO: 1179018 - RNA, 19 nt, Homo sapiens
  misc_RNA (1)...(19): siRNA sense strand
gcaaggauuuguggagaag

SEQ ID NO: 1179019 - RNA, 19 nt, Homo sapiens
  misc_RNA (1)...(19): siRNA sense strand
gcaaagaacaagagaagac

SEQ ID NO: 1179020 - RNA, 19 nt, Homo sapiens
  misc_RNA (1)...(19): siRNA sense strand
acaguagccaguagaaaua

SEQ ID NO: 1179021 - RNA, 19 nt, Homo sapiens
  misc_RNA (1)...(19): siRNA sense strand
gggaagaugacauuuggaa

SEQ ID NO: 1179022 - RNA, 19 nt, Homo sapiens
  misc_RNA (1)...(19): siRNA sense strand
uggauuugaugauguugua

SEQ ID NO: 1179023 - RNA, 19 nt, Homo sapiens
  misc_RNA (1)...(19): siRNA sense strand
caagagaagaccucagaug

SEQ ID NO: 1179024 - RNA, 19 nt, Homo sapiens
  misc_RNA (1)...(19): siRNA sense strand
ggacaggaggcacagaaug

SEQ ID NO: 1179025 - RNA, 19 nt, Homo sapiens
  misc_RNA (1)...(19): siRNA sense strand
ggaugcagugaauaucuua

SEQ ID NO: 1179026 - RNA, 19 nt, Homo sapiens
  misc_RNA (1)...(19): siRNA sense strand
gaaauggccagagcaggaa

SEQ ID NO: 1179027 - RNA, 19 nt, Homo sapiens
  misc_RNA (1)...(19): siRNA sense strand
agaaggaauugaccugaau

SEQ ID NO: 1179028 - RNA, 19 nt, Homo sapiens
  misc_RNA (1)...(19): siRNA sense strand
aauaagagcacacagucua

SEQ ID NO: 1179029 - RNA, 19 nt, Homo sapiens
  misc_RNA (1)...(19): siRNA sense strand
cgaagucaccauuucugua

SEQ ID NO: 1179030 - RNA, 19 nt, Homo sapiens
  misc_RNA (1)...(19): siRNA sense strand
gcagcaggcucaguaugau

SEQ ID NO: 1179031 - RNA, 19 nt, Homo sapiens
  misc_RNA (1)...(19): siRNA sense strand
guuagaggcugaaaguuuu

SEQ ID NO: 1179032 - RNA, 19 nt, Homo sapiens
  misc_RNA (1)...(19): siRNA sense strand
gaaaggcaaagaacaagag

SEQ ID NO: 1179033 - RNA, 19 nt, Homo sapiens
  misc_RNA (1)...(19): siRNA sense strand
uuacagaagcaaugagaaa

SEQ ID NO: 1179034 - RNA, 19 nt, Homo sapiens
  misc_RNA (1)...(19): siRNA sense strand
gacaucauagcaaggauuu

SEQ ID NO: 1179035 - RNA, 19 nt, Homo sapiens
  misc_RNA (1)...(19): siRNA sense strand
gcaaugagaaaugacauca

SEQ ID NO: 1179036 - RNA, 19 nt, Homo sapiens
  misc_RNA (1)...(19): siRNA sense strand
gaagaccucagaugugaag

SEQ ID NO: 1179037 - RNA, 19 nt, Homo sapiens
  misc_RNA (1)...(19): siRNA sense strand
ggauccagaaucuuuauau

SEQ ID NO: 1179038 - RNA, 19 nt, Homo sapiens
  misc_RNA (1)...(19): siRNA sense strand
caagaugcagugaauacuu

SEQ ID NO: 1179039 - RNA, 19 nt, Homo sapiens
  misc_RNA (1)...(19): siRNA sense strand
ucagaugugaaguccauua

SEQ ID NO: 1179040 - RNA, 19 nt, Homo sapiens
  misc_RNA (1)...(19): siRNA sense strand
gcagugaauaucuuacaau

SEQ ID NO: 1179041 - RNA, 19 nt, Homo sapiens
  misc_RNA (1)...(19): siRNA sense strand
gaagugcugaccaguggaa

SEQ ID NO: 1179042 - RNA, 19 nt, Homo sapiens
  misc_RNA (1)...(19): siRNA sense strand
gaagcaaugagaaaugaca

SEQ ID NO: 1179043 - RNA, 19 nt, Homo sapiens
  misc_RNA (1)...(19): siRNA sense strand
uguccucccuuacuucauu

SEQ ID NO: 1179044 - RNA, 19 nt, Homo sapiens
  misc_RNA (1)...(19): siRNA sense strand
aaucaagccuuucuaagac

SEQ ID NO: 1179045 - RNA, 19 nt, Homo sapiens
  misc_RNA (1)...(19): siRNA sense strand
gcaggaccaagucauguug

SEQ ID NO: 1179046 - RNA, 19 nt, Homo sapiens
  misc_RNA (1)...(19): siRNA sense strand
ccucagaugugaaguccau

SEQ ID NO: 1179047 - RNA, 19 nt, Homo sapiens
  misc_RNA (1)...(19): siRNA sense strand
guaaggaaaucaaaaggau

SEQ ID NO: 1179048 - RNA, 19 nt, Homo sapiens
  misc_RNA (1)...(19): siRNA sense strand
ucgaggagaugaauuucug

SEQ ID NO: 1179049 - RNA, 19 nt, Homo sapiens
  misc_RNA (1)...(19): siRNA sense strand
cagccacacuuaagaagca

SEQ ID NO: 1179050 - RNA, 19 nt, Homo sapiens
  misc_RNA (1)...(19): siRNA sense strand
uugaugauguuguacgauu

SEQ ID NO: 1179051 - RNA, 19 nt, Homo sapiens
  misc_RNA (1)...(19): siRNA sense strand
agucagcccucuuuuauuu

SEQ ID NO: 1179052 - RNA, 19 nt, Homo sapiens
  misc_RNA (1)...(19): siRNA sense strand
gguucgaggagaugaauuu

SEQ ID NO: 1179053 - RNA, 19 nt, Homo sapiens
  misc_RNA (1)...(19): siRNA sense strand
ucccuuacuucauucaauu

SEQ ID NO: 1179054 - RNA, 19 nt, Homo sapiens
  misc_RNA (1)...(19): siRNA sense strand
cagaaugaugccaugauuu

SEQ ID NO: 1179055 - RNA, 19 nt, Homo sapiens
  misc_RNA (1)...(19): siRNA sense strand
gcacagaaugaugccauga

SEQ ID NO: 1179056 - RNA, 19 nt, Homo sapiens
  misc_RNA (1)...(19): siRNA sense strand
cauggaaacccaagaaucu

SEQ ID NO: 1179057 - RNA, 19 nt, Homo sapiens
  misc_RNA (1)...(19): siRNA sense strand
gagcaggaacucaccaagu

SEQ ID NO: 1179058 - RNA, 19 nt, Homo sapiens
  misc_RNA (1)...(19): siRNA sense strand
agaugcugcuaaaccaaua

SEQ ID NO: 1179059 - RNA, 19 nt, Homo sapiens
  misc_RNA (1)...(19): siRNA sense strand
ccgggaagaugacauuugg

SEQ ID NO: 1179060 - RNA, 19 nt, Homo sapiens
  misc_RNA (1)...(19): siRNA sense strand
ccucuuggauuugaugaug

SEQ ID NO: 1179061 - RNA, 19 nt, Homo sapiens
  misc_RNA (1)...(19): siRNA sense strand
caacuccagcaucgacaaa

SEQ ID NO: 1179062 - RNA, 19 nt, Homo sapiens
  misc_RNA (1)...(19): siRNA sense strand
ggacgcagacagcaucaac

SEQ ID NO: 1179063 - RNA, 19 nt, Homo sapiens
  misc_RNA (1)...(19): siRNA sense strand
ccuacagaaucuccuacga

SEQ ID NO: 1179064 - RNA, 19 nt, Homo sapiens
  misc_RNA (1)...(19): siRNA sense strand
caacaaaucuucacuuaga

SEQ ID NO: 1179065 - RNA, 19 nt, Homo sapiens
  misc_RNA (1)...(19): siRNA sense strand
gaucaaagcugguauuuag

SEQ ID NO: 1179066 - RNA, 19 nt, Homo sapiens
  misc_RNA (1)...(19): siRNA sense strand
gaacgaaagucaccugaaa

SEQ ID NO: 1179067 - RNA, 19 nt, Homo sapiens
  misc_RNA (1)...(19): siRNA sense strand
gguagaaccuucagcuuua

SEQ ID NO: 1179068 - RNA, 19 nt, Homo sapiens
  misc_RNA (1)...(19): siRNA sense strand
gaagcuaugucaacuauug

SEQ ID NO: 1179069 - RNA, 19 nt, Homo sapiens
  misc_RNA (1)...(19): siRNA sense strand
uaagacgacuucugauuua

SEQ ID NO: 1179070 - RNA, 19 nt, Homo sapiens
  misc_RNA (1)...(19): siRNA sense strand
ccaaugguguugaaacuua

SEQ ID NO: 1179071 - RNA, 19 nt, Homo sapiens
  misc_RNA (1)...(19): siRNA sense strand
gcacauauaugcugcaaag

SEQ ID NO: 1179072 - RNA, 19 nt, Homo sapiens
  misc_RNA (1)...(19): siRNA sense strand
gaaauuucuuccugucuaa

SEQ ID NO: 1179073 - RNA, 19 nt, Homo sapiens
  misc_RNA (1)...(19): siRNA sense strand
gaaagcaggugucaauagu

SEQ ID NO: 1179074 - RNA, 19 nt, Homo sapiens
  misc_RNA (1)...(19): siRNA sense strand
gaagguguguguggaauuu

SEQ ID NO: 1179075 - RNA, 19 nt, Homo sapiens
  misc_RNA (1)...(19): siRNA sense strand
ggagaccacuucugucaaa

SEQ ID NO: 1179076 - RNA, 19 nt, Homo sapiens
  misc_RNA (1)...(19): siRNA sense strand
gaagcgagcugucaaaggu

SEQ ID NO: 1179077 - RNA, 19 nt, Homo sapiens
  misc_RNA (1)...(19): siRNA sense strand
aaacacugcuucuggcuua

SEQ ID NO: 1179078 - RNA, 19 nt, Homo sapiens
  misc_RNA (1)...(19): siRNA sense strand
gcacaguccuccauacguu

SEQ ID NO: 1179079 - RNA, 19 nt, Homo sapiens
  misc_RNA (1)...(19): siRNA sense strand
guauuuagaccgaucauua

SEQ ID NO: 1179080 - RNA, 19 nt, Homo sapiens
  misc_RNA (1)...(19): siRNA sense strand
ggagaaaguuggccgguau

SEQ ID NO: 1179081 - RNA, 19 nt, Homo sapiens
  misc_RNA (1)...(19): siRNA sense strand
gacaaacacugaucaggaa

SEQ ID NO: 1179082 - RNA, 19 nt, Homo sapiens
  misc_RNA (1)...(19): siRNA sense strand
gcaauuggcuugugguuac

SEQ ID NO: 1179083 - RNA, 19 nt, Homo sapiens
  misc_RNA (1)...(19): siRNA sense strand
ccuaauaacuguucaggaa

SEQ ID NO: 1179084 - RNA, 19 nt, Homo sapiens
  misc_RNA (1)...(19): siRNA sense strand
cuacaaaggcuucuucuaa

SEQ ID NO: 1179085 - RNA, 19 nt, Homo sapiens
  misc_RNA (1)...(19): siRNA sense strand
gaaaauggacucaagaaua

SEQ ID NO: 1179086 - RNA, 19 nt, Homo sapiens
  misc_RNA (1)...(19): siRNA sense strand
uaagaggccucaaggacua

SEQ ID NO: 1179087 - RNA, 19 nt, Homo sapiens
  misc_RNA (1)...(19): siRNA sense strand
caaaguggcugaagauuuu

SEQ ID NO: 1179088 - RNA, 19 nt, Homo sapiens
  misc_RNA (1)...(19): siRNA sense strand
ggaaguagaccuaguuaau

SEQ ID NO: 1179089 - RNA, 19 nt, Homo sapiens
  misc_RNA (1)...(19): siRNA sense strand
gauuggaacuggagacuug

SEQ ID NO: 1179090 - RNA, 19 nt, Homo sapiens
  misc_RNA (1)...(19): siRNA sense strand
caacaacaauucugguuuc

SEQ ID NO: 1179091 - RNA, 19 nt, Homo sapiens
  misc_RNA (1)...(19): siRNA sense strand
gaaaagcacucuaugaugu

SEQ ID NO: 1179092 - RNA, 19 nt, Homo sapiens
  misc_RNA (1)...(19): siRNA sense strand
guacucagccuaagacaaa

SEQ ID NO: 1179093 - RNA, 19 nt, Homo sapiens
  misc_RNA (1)...(19): siRNA sense strand
gaaagcuguuguucaagaa

SEQ ID NO: 1179094 - RNA, 19 nt, Homo sapiens
  misc_RNA (1)...(19): siRNA sense strand
gaaguagaccuaguuaauu

SEQ ID NO: 1179095 - RNA, 19 nt, Homo sapiens
  misc_RNA (1)...(19): siRNA sense strand
ucaaggaugucauaaacaa

SEQ ID NO: 1179096 - RNA, 19 nt, Homo sapiens
  misc_RNA (1)...(19): siRNA sense strand
ggaaauauggaacaacaaa

SEQ ID NO: 1179097 - RNA, 19 nt, Homo sapiens
  misc_RNA (1)...(19): siRNA sense strand
gaaggacucaccuguguuu

SEQ ID NO: 1179098 - RNA, 19 nt, Homo sapiens
  misc_RNA (1)...(19): siRNA sense strand
ucaaaguccucucagauug

SEQ ID NO: 1179099 - RNA, 19 nt, Homo sapiens
  misc_RNA (1)...(19): siRNA sense strand
guucaaggcugggcuauug

SEQ ID NO: 1179100 - RNA, 19 nt, Homo sapiens
  misc_RNA (1)...(19): siRNA sense strand
ccucuaggcugccaaacua

SEQ ID NO: 1179101 - RNA, 19 nt, Homo sapiens
  misc_RNA (1)...(19): siRNA sense strand
gaagaagaaguccuuaaga

SEQ ID NO: 1179102 - RNA, 19 nt, Homo sapiens
  misc_RNA (1)...(19): siRNA sense strand
gacuuucucuuacggauaa

SEQ ID NO: 1179103 - RNA, 19 nt, Homo sapiens
  misc_RNA (1)...(19): siRNA sense strand
gcacaucuccucuaaacug

SEQ ID NO: 1179104 - RNA, 19 nt, Homo sapiens
  misc_RNA (1)...(19): siRNA sense strand
gaacaucguggcacaguug

SEQ ID NO: 1179105 - RNA, 19 nt, Homo sapiens
  misc_RNA (1)...(19): siRNA sense strand
ugucaaagguguucgagaa

SEQ ID NO: 1179106 - RNA, 19 nt, Homo sapiens
  misc_RNA (1)...(19): siRNA sense strand
gaagagcaaggucaagaaa

SEQ ID NO: 1179107 - RNA, 19 nt, Homo sapiens
  misc_RNA (1)...(19): siRNA sense strand
caaagguguucgagaaaug

SEQ ID NO: 1179108 - RNA, 19 nt, Homo sapiens
  misc_RNA (1)...(19): siRNA sense strand
gaacaacaaaucuucacuu

SEQ ID NO: 1179109 - RNA, 19 nt, Homo sapiens
  misc_RNA (1)...(19): siRNA sense strand
caaccaacaaugccaauuu

SEQ ID NO: 1179110 - RNA, 19 nt, Homo sapiens
  misc_RNA (1)...(19): siRNA sense strand
gaucacagaauuuaaagga

SEQ ID NO: 1179111 - RNA, 19 nt, Homo sapiens
  misc_RNA (1)...(19): siRNA sense strand
uaugaugccuuccagguuu

SEQ ID NO: 1179112 - RNA, 19 nt, Homo sapiens
  misc_RNA (1)...(19): siRNA sense strand
cagaaggacucaccugugu

SEQ ID NO: 1179113 - RNA, 19 nt, Homo sapiens
  misc_RNA (1)...(19): siRNA sense strand
ggauggauuugaagauguu

SEQ ID NO: 1179114 - RNA, 19 nt, Homo sapiens
  misc_RNA (1)...(19): siRNA sense strand
caaacaaguaugacaauga

SEQ ID NO: 1179115 - RNA, 19 nt, Homo sapiens
  misc_RNA (1)...(19): siRNA sense strand
ggagaagauuuuagagaua

SEQ ID NO: 1179116 - RNA, 19 nt, Homo sapiens
  misc_RNA (1)...(19): siRNA sense strand
gcaagaagaagaaguccuu

SEQ ID NO: 1179117 - RNA, 19 nt, Homo sapiens
  misc_RNA (1)...(19): siRNA sense strand
guaugacaaugaagcaauu

SEQ ID NO: 1179118 - RNA, 19 nt, Homo sapiens
  misc_RNA (1)...(19): siRNA sense strand
uuauauagcugcaucaaag

SEQ ID NO: 1179119 - RNA, 19 nt, Homo sapiens
  misc_RNA (1)...(19): siRNA sense strand
gaagaucggaaauauggaa

SEQ ID NO: 1179120 - RNA, 19 nt, Homo sapiens
  misc_RNA (1)...(19): siRNA sense strand
gaagauguuccaaaucguu

SEQ ID NO: 1179121 - RNA, 19 nt, Homo sapiens
  misc_RNA (1)...(19): siRNA sense strand
cauaacuucuguucgcuuu

SEQ ID NO: 1179122 - RNA, 19 nt, Homo sapiens
  misc_RNA (1)...(19): siRNA sense strand
cagcuaaugucauggucua

SEQ ID NO: 1179123 - RNA, 19 nt, Homo sapiens
  misc_RNA (1)...(19): siRNA sense strand
aaguagaccuaguuaauug

SEQ ID NO: 1179124 - RNA, 19 nt, Homo sapiens
  misc_RNA (1)...(19): siRNA sense strand
gcaacaacaauucugguuu

SEQ ID NO: 1179125 - RNA, 19 nt, Homo sapiens
  misc_RNA (1)...(19): siRNA sense strand
gcaggugucaauagugaua

SEQ ID NO: 1179126 - RNA, 19 nt, Homo sapiens
  misc_RNA (1)...(19): siRNA sense strand
aaacgcaagucuucugaga

SEQ ID NO: 1179127 - RNA, 19 nt, Homo sapiens
  misc_RNA (1)...(19): siRNA sense strand
gaaagaugcaguugcuaug

SEQ ID NO: 1179128 - RNA, 19 nt, Homo sapiens
  misc_RNA (1)...(19): siRNA sense strand
gcagaaucccucaguguug

SEQ ID NO: 1179129 - RNA, 19 nt, Homo sapiens
  misc_RNA (1)...(19): siRNA sense strand
gagaaagaauugccaacag

SEQ ID NO: 1179130 - RNA, 19 nt, Homo sapiens
  misc_RNA (1)...(19): siRNA sense strand
gaguauguguggacugcua

SEQ ID NO: 1179131 - RNA, 19 nt, Homo sapiens
  misc_RNA (1)...(19): siRNA sense strand
cagcaaccguuauaaaugg

SEQ ID NO: 1179132 - RNA, 19 nt, Homo sapiens
  misc_RNA (1)...(19): siRNA sense strand
ucaaaguggcugaagauuu

SEQ ID NO: 1179133 - RNA, 19 nt, Homo sapiens
  misc_RNA (1)...(19): siRNA sense strand
gcaucaaaguggcugaaga

SEQ ID NO: 1179134 - RNA, 19 nt, Homo sapiens
  misc_RNA (1)...(19): siRNA sense strand
acuauuggcuuugugauaa

SEQ ID NO: 1179135 - RNA, 19 nt, Homo sapiens
  misc_RNA (1)...(19): siRNA sense strand
cagcacaucuccucuaaac

SEQ ID NO: 1179136 - RNA, 19 nt, Homo sapiens
  misc_RNA (1)...(19): siRNA sense strand
gccagcacaucuccucuaa

SEQ ID NO: 1179137 - RNA, 19 nt, Homo sapiens
  misc_RNA (1)...(19): siRNA sense strand
ggaugaagagaaagaauug

SEQ ID NO: 1179138 - RNA, 19 nt, Homo sapiens
  misc_RNA (1)...(19): siRNA sense strand
agacccagcuaaacucaaa

SEQ ID NO: 1179139 - RNA, 19 nt, Homo sapiens
  misc_RNA (1)...(19): siRNA sense strand
ugaagaauguuaucuacca

SEQ ID NO: 1179140 - RNA, 19 nt, Homo sapiens
  misc_RNA (1)...(19): siRNA sense strand
uuagaccgaucauuaagaa

SEQ ID NO: 1179141 - RNA, 19 nt, Homo sapiens
  misc_RNA (1)...(19): siRNA sense strand
gaucggaaauauggaacaa

SEQ ID NO: 1179142 - RNA, 19 nt, Homo sapiens
  misc_RNA (1)...(19): siRNA sense strand
gcgggaaugucaacaagga

SEQ ID NO: 1179143 - RNA, 19 nt, Homo sapiens
  misc_RNA (1)...(19): siRNA sense strand
acagacagguugcuuggaa

SEQ ID NO: 1179144 - RNA, 19 nt, Homo sapiens
  misc_RNA (1)...(19): siRNA sense strand
guacaguggccugcaauaa

SEQ ID NO: 1179145 - RNA, 19 nt, Homo sapiens
  misc_RNA (1)...(19): siRNA sense strand
uaucuaccaugcagugaaa

SEQ ID NO: 1179146 - RNA, 19 nt, Homo sapiens
  misc_RNA (1)...(19): siRNA sense strand
agacauuguucauucugua

SEQ ID NO: 1179147 - RNA, 19 nt, Homo sapiens
  misc_RNA (1)...(19): siRNA sense strand
cgagaaaugugugaugugu

SEQ ID NO: 1179148 - RNA, 19 nt, Homo sapiens
  misc_RNA (1)...(19): siRNA sense strand
guucaagaagcaacaauaa

SEQ ID NO: 1179149 - RNA, 19 nt, Homo sapiens
  misc_RNA (1)...(19): siRNA sense strand
aagcaggugucaauaguga

SEQ ID NO: 1179150 - RNA, 19 nt, Homo sapiens
  misc_RNA (1)...(19): siRNA sense strand
ucugggagaucaacaaaga

SEQ ID NO: 1179151 - RNA, 19 nt, Homo sapiens
  misc_RNA (1)...(19): siRNA sense strand
ggagaucaacaaagaguau

SEQ ID NO: 1179152 - RNA, 19 nt, Homo sapiens
  misc_RNA (1)...(19): siRNA sense strand
caaaggacacggagaagau

SEQ ID NO: 1179153 - RNA, 19 nt, Homo sapiens
  misc_RNA (1)...(19): siRNA sense strand
gcaggaaguagaccuaguu

SEQ ID NO: 1179154 - RNA, 19 nt, Homo sapiens
  misc_RNA (1)...(19): siRNA sense strand
cgacuucugauuuaucuaa

SEQ ID NO: 1179155 - RNA, 19 nt, Homo sapiens
  misc_RNA (1)...(19): siRNA sense strand
ugacaucuuugccucuuug

SEQ ID NO: 1179156 - RNA, 19 nt, Homo sapiens
  misc_RNA (1)...(19): siRNA sense strand
gcaaacugcccuuguucaa

SEQ ID NO: 1179157 - RNA, 19 nt, Homo sapiens
  misc_RNA (1)...(19): siRNA sense strand
gagguuacaauucaacaaa

SEQ ID NO: 1179158 - RNA, 19 nt, Homo sapiens
  misc_RNA (1)...(19): siRNA sense strand
gacagucuccgcaaggaua

SEQ ID NO: 1179159 - RNA, 19 nt, Homo sapiens
  misc_RNA (1)...(19): siRNA sense strand
ggaagucgguuuugacaga

SEQ ID NO: 1179160 - RNA, 19 nt, Homo sapiens
  misc_RNA (1)...(19): siRNA sense strand
cugacgaacucacaauaaa

SEQ ID NO: 1179161 - RNA, 19 nt, Homo sapiens
  misc_RNA (1)...(19): siRNA sense strand
ucacgaagauaaauuacag

SEQ ID NO: 1179162 - RNA, 19 nt, Homo sapiens
  misc_RNA (1)...(19): siRNA sense strand
cacaucagguucauaacuu

SEQ ID NO: 1179163 - RNA, 19 nt, Homo sapiens
  misc_RNA (1)...(19): siRNA sense strand
acaccgacguuaccaagaa

SEQ ID NO: 1179164 - RNA, 19 nt, Homo sapiens
  misc_RNA (1)...(19): siRNA sense strand
gagacgaccuggacccuaa

SEQ ID NO: 1179165 - RNA, 19 nt, Homo sapiens
  misc_RNA (1)...(19): siRNA sense strand
agacugaccucaaccauga

SEQ ID NO: 1179166 - RNA, 19 nt, Homo sapiens
  misc_RNA (1)...(19): siRNA sense strand
gcacaagacugaccucaac

SEQ ID NO: 1179167 - RNA, 19 nt, Homo sapiens
  misc_RNA (1)...(19): siRNA sense strand
gagaagaaguuggagaaag

SEQ ID NO: 1179168 - RNA, 19 nt, Homo sapiens
  misc_RNA (1)...(19): siRNA sense strand
gggaaguacuacccucuga

SEQ ID NO: 1179169 - RNA, 19 nt, Homo sapiens
  misc_RNA (1)...(19): siRNA sense strand
gcguagggcugcagaagau

SEQ ID NO: 1179170 - RNA, 19 nt, Homo sapiens
  misc_RNA (1)...(19): siRNA sense strand
acaagaagcugcgggacaa

SEQ ID NO: 1179171 - RNA, 19 nt, Homo sapiens
  misc_RNA (1)...(19): siRNA sense strand
ugaagagcaugacggagaa

SEQ ID NO: 1179172 - RNA, 19 nt, Homo sapiens
  misc_RNA (1)...(19): siRNA sense strand
ggaaauggagaagaaguug

SEQ ID NO: 1179173 - RNA, 19 nt, Homo sapiens
  misc_RNA (1)...(19): siRNA sense strand
agaagaaguuggagaaagg

SEQ ID NO: 1179174 - RNA, 19 nt, Homo sapiens
  misc_RNA (1)...(19): siRNA sense strand
ccaucuggcuucacuguag

SEQ ID NO: 1179175 - RNA, 19 nt, Homo sapiens
  misc_RNA (1)...(19): siRNA sense strand
guaacacccacaacaaguu

SEQ ID NO: 1179176 - RNA, 19 nt, Homo sapiens
  misc_RNA (1)...(19): siRNA sense strand
gaaguacuacccucugaag

SEQ ID NO: 1179177 - RNA, 19 nt, Homo sapiens
  misc_RNA (1)...(19): siRNA sense strand
gcagaagauugaggagauc

SEQ ID NO: 1179178 - RNA, 19 nt, Homo sapiens
  misc_RNA (1)...(19): siRNA sense strand
gccgugggcucaguauuug

SEQ ID NO: 1179179 - RNA, 19 nt, Homo sapiens
  misc_RNA (1)...(19): siRNA sense strand
gcaaacauaacaaccacau

SEQ ID NO: 1179180 - RNA, 19 nt, Homo sapiens
  misc_RNA (1)...(19): siRNA sense strand
ggagaagaaguuggagaaa

SEQ ID NO: 1179181 - RNA, 19 nt, Homo sapiens
  misc_RNA (1)...(19): siRNA sense strand
gcuacaaacccacugacaa

SEQ ID NO: 1179182 - RNA, 19 nt, Homo sapiens
  misc_RNA (1)...(19): siRNA sense strand
ggaaguacuacccucugaa

SEQ ID NO: 1179183 - RNA, 19 nt, Homo sapiens
  misc_RNA (1)...(19): siRNA sense strand
ggugguggauggugugaag

SEQ ID NO: 1179184 - RNA, 19 nt, Homo sapiens
  misc_RNA (1)...(19): siRNA sense strand
gcugggcucguccgaagua

SEQ ID NO: 1179185 - RNA, 19 nt, Homo sapiens
  misc_RNA (1)...(19): siRNA sense strand
guacugacccuugaacucu

SEQ ID NO: 1179186 - RNA, 19 nt, Homo sapiens
  misc_RNA (1)...(19): siRNA sense strand
gggcucguccgaaguagaa

SEQ ID NO: 1179187 - RNA, 19 nt, Homo sapiens
  misc_RNA (1)...(19): siRNA sense strand
cuacaaacccacugacaag

SEQ ID NO: 1179188 - RNA, 19 nt, Homo sapiens
  misc_RNA (1)...(19): siRNA sense strand
cguggcaucuggcacaaug

SEQ ID NO: 1179189 - RNA, 19 nt, Homo sapiens
  misc_RNA (1)...(19): siRNA sense strand
gaccucagcaaacauaaca

SEQ ID NO: 1179190 - RNA, 19 nt, Homo sapiens
  misc_RNA (1)...(19): siRNA sense strand
gguaacacccacaacaagu

SEQ ID NO: 1179191 - RNA, 19 nt, Homo sapiens
  misc_RNA (1)...(19): siRNA sense strand
ugguggaaauggagaagaa

SEQ ID NO: 1179192 - RNA, 19 nt, Homo sapiens
  misc_RNA (1)...(19): siRNA sense strand
ugcagaagauugaggagau

SEQ ID NO: 1179193 - RNA, 19 nt, Homo sapiens
  misc_RNA (1)...(19): siRNA sense strand
uggcuucacuguagacgau

SEQ ID NO: 1179194 - RNA, 19 nt, Homo sapiens
  misc_RNA (1)...(19): siRNA sense strand
gcaucaagggcuacacguu

SEQ ID NO: 1179195 - RNA, 19 nt, Homo sapiens
  misc_RNA (1)...(19): siRNA sense strand
cuacgaaguuuucaaggaa

SEQ ID NO: 1179196 - RNA, 19 nt, Homo sapiens
  misc_RNA (1)...(19): siRNA sense strand
caucuggcuucacuguaga

SEQ ID NO: 1179197 - RNA, 19 nt, Homo sapiens
  misc_RNA (1)...(19): siRNA sense strand
guggaggcgugcaugugaa

SEQ ID NO: 1179198 - RNA, 19 nt, Homo sapiens
  misc_RNA (1)...(19): siRNA sense strand
uaacacccacaacaaguuc

SEQ ID NO: 1179199 - RNA, 19 nt, Homo sapiens
  misc_RNA (1)...(19): siRNA sense strand
gcaucuggcacaaugacaa

SEQ ID NO: 1179200 - RNA, 19 nt, Homo sapiens
  misc_RNA (1)...(19): siRNA sense strand
ccacauggccaagguacug

SEQ ID NO: 1179201 - RNA, 19 nt, Homo sapiens
  misc_RNA (1)...(19): siRNA sense strand
cugacaagcacaagacuga

SEQ ID NO: 1179202 - RNA, 19 nt, Homo sapiens
  misc_RNA (1)...(19): siRNA sense strand
ugccgugggcucaguauuu

SEQ ID NO: 1179203 - RNA, 19 nt, Homo sapiens
  misc_RNA (1)...(19): siRNA sense strand
guagggcugcagaagauug

SEQ ID NO: 1179204 - RNA, 19 nt, Homo sapiens
  misc_RNA (1)...(19): siRNA sense strand
gagacuccaucuggcuuca

SEQ ID NO: 1179205 - RNA, 19 nt, Homo sapiens
  misc_RNA (1)...(19): siRNA sense strand
uggagaagaaguuggagaa

SEQ ID NO: 1179206 - RNA, 19 nt, Homo sapiens
  misc_RNA (1)...(19): siRNA sense strand
ugaagcucaugguggaaau

SEQ ID NO: 1179207 - RNA, 19 nt, Homo sapiens
  misc_RNA (1)...(19): siRNA sense strand
caaccacauggccaaggua

SEQ ID NO: 1179208 - RNA, 19 nt, Homo sapiens
  misc_RNA (1)...(19): siRNA sense strand
gcacuggccgcagcaucaa

SEQ ID NO: 1179209 - RNA, 19 nt, Homo sapiens
  misc_RNA (1)...(19): siRNA sense strand
acaaugacaacaagagcuu

SEQ ID NO: 1179210 - RNA, 19 nt, Homo sapiens
  misc_RNA (1)...(19): siRNA sense strand
aaauggagaagaaguugga

SEQ ID NO: 1179211 - RNA, 19 nt, Homo sapiens
  misc_RNA (1)...(19): siRNA sense strand
uacugacccuugaacucua

SEQ ID NO: 1179212 - RNA, 19 nt, Homo sapiens
  misc_RNA (1)...(19): siRNA sense strand
cguggaggcgugcauguga

SEQ ID NO: 1179213 - RNA, 19 nt, Homo sapiens
  misc_RNA (1)...(19): siRNA sense strand
gugcucaccugcccaucca

SEQ ID NO: 1179214 - RNA, 19 nt, Homo sapiens
  misc_RNA (1)...(19): siRNA sense strand
cugcguggcuggugaugag

SEQ ID NO: 1179215 - RNA, 19 nt, Homo sapiens
  misc_RNA (1)...(19): siRNA sense strand
cgaccuggacccuaacuac

SEQ ID NO: 1179216 - RNA, 19 nt, Homo sapiens
  misc_RNA (1)...(19): siRNA sense strand
uggaaauggagaagaaguu

SEQ ID NO: 1179217 - RNA, 19 nt, Homo sapiens
  misc_RNA (1)...(19): siRNA sense strand
gugaagcucaugguggaaa

SEQ ID NO: 1179218 - RNA, 19 nt, Homo sapiens
  misc_RNA (1)...(19): siRNA sense strand
acaaccacauggccaaggu

SEQ ID NO: 1179219 - RNA, 19 nt, Homo sapiens
  misc_RNA (1)...(19): siRNA sense strand
ccaguucucucucuaccua

SEQ ID NO: 1179220 - RNA, 19 nt, Homo sapiens
  misc_RNA (1)...(19): siRNA sense strand
ggaagcugaugcuggagaa

SEQ ID NO: 1179221 - RNA, 19 nt, Homo sapiens
  misc_RNA (1)...(19): siRNA sense strand
ugaagaugcuggacacuca

SEQ ID NO: 1179222 - RNA, 19 nt, Homo sapiens
  misc_RNA (1)...(19): siRNA sense strand
gcacuaagaagaagacagu

SEQ ID NO: 1179223 - RNA, 19 nt, Homo sapiens
  misc_RNA (1)...(19): siRNA sense strand
gcacacacccguccucucu

SEQ ID NO: 1179224 - RNA, 19 nt, Homo sapiens
  misc_RNA (1)...(19): siRNA sense strand
guacccaguucucucucua

SEQ ID NO: 1179225 - RNA, 19 nt, Homo sapiens
  misc_RNA (1)...(19): siRNA sense strand
gaucagccgguuccucuug

SEQ ID NO: 1179226 - RNA, 19 nt, Homo sapiens
  misc_RNA (1)...(19): siRNA sense strand
gaggaugggcugcggcaaa

SEQ ID NO: 1179227 - RNA, 19 nt, Homo sapiens
  misc_RNA (1)...(19): siRNA sense strand
gacaccagcuccccucaua

SEQ ID NO: 1179228 - RNA, 19 nt, Homo sapiens
  misc_RNA (1)...(19): siRNA sense strand
ggaugugacugagcagauc

SEQ ID NO: 1179229 - RNA, 19 nt, Homo sapiens
  misc_RNA (1)...(19): siRNA sense strand
gaaagcaccgaccauaggu

SEQ ID NO: 1179230 - RNA, 19 nt, Homo sapiens
  misc_RNA (1)...(19): siRNA sense strand
agaagacaguggucagugu

SEQ ID NO: 1179231 - RNA, 19 nt, Homo sapiens
  misc_RNA (1)...(19): siRNA sense strand
ucauggagacguagccuuu

SEQ ID NO: 1179232 - RNA, 19 nt, Homo sapiens
  misc_RNA (1)...(19): siRNA sense strand
ggcgggagaugucuucuac

SEQ ID NO: 1179233 - RNA, 19 nt, Homo sapiens
  misc_RNA (1)...(19): siRNA sense strand
gaagaagacaguggucagu

SEQ ID NO: 1179234 - RNA, 19 nt, Homo sapiens
  misc_RNA (1)...(19): siRNA sense strand
ggacaggcugcauuuccaa

SEQ ID NO: 1179235 - RNA, 19 nt, Homo sapiens
  misc_RNA (1)...(19): siRNA sense strand
ccugaaagcaccgaccaua

SEQ ID NO: 1179236 - RNA, 19 nt, Homo sapiens
  misc_RNA (1)...(19): siRNA sense strand
gcuguggucuguugcuuuu

SEQ ID NO: 1179237 - RNA, 19 nt, Homo sapiens
  misc_RNA (1)...(19): siRNA sense strand
acacacccguccucucuag

SEQ ID NO: 1179238 - RNA, 19 nt, Homo sapiens
  misc_RNA (1)...(19): siRNA sense strand
ggacagcacccaccuucac

SEQ ID NO: 1179239 - RNA, 19 nt, Homo sapiens
  misc_RNA (1)...(19): siRNA sense strand
gggagccgcacuaagaaga

SEQ ID NO: 1179240 - RNA, 19 nt, Homo sapiens
  misc_RNA (1)...(19): siRNA sense strand
cgggagaugucuucuacca

SEQ ID NO: 1179241 - RNA, 19 nt, Homo sapiens
  misc_RNA (1)...(19): siRNA sense strand
gcaccggagugaagaugcu

SEQ ID NO: 1179242 - RNA, 19 nt, Homo sapiens
  misc_RNA (1)...(19): siRNA sense strand
uagaggacaagcucaguga

SEQ ID NO: 1179243 - RNA, 19 nt, Homo sapiens
  misc_RNA (1)...(19): siRNA sense strand
ugaaagcaccgaccauagg

SEQ ID NO: 1179244 - RNA, 19 nt, Homo sapiens
  misc_RNA (1)...(19): siRNA sense strand
ggagccgcacuaagaagaa

SEQ ID NO: 1179245 - RNA, 19 nt, Homo sapiens
  misc_RNA (1)...(19): siRNA sense strand
gggaacguguccugcuuac

SEQ ID NO: 1179246 - RNA, 19 nt, Homo sapiens
  misc_RNA (1)...(19): siRNA sense strand
agacaguggucagugugaa

SEQ ID NO: 1179247 - RNA, 19 nt, Homo sapiens
  misc_RNA (1)...(19): siRNA sense strand
gccgguuccucuuggauca

SEQ ID NO: 1179248 - RNA, 19 nt, Homo sapiens
  misc_RNA (1)...(19): siRNA sense strand
gcggagggaggaagaggaa

SEQ ID NO: 1179249 - RNA, 19 nt, Homo sapiens
  misc_RNA (1)...(19): siRNA sense strand
ugccgaugcugaaguggaa

SEQ ID NO: 1179250 - RNA, 19 nt, Homo sapiens
  misc_RNA (1)...(19): siRNA sense strand
agcugaugcuggagaauuu

SEQ ID NO: 1179251 - RNA, 19 nt, Homo sapiens
  misc_RNA (1)...(19): siRNA sense strand
ucgacucccucccugcauu

SEQ ID NO: 1179252 - RNA, 19 nt, Homo sapiens
  misc_RNA (1)...(19): siRNA sense strand
caucagagcagcggcagau

SEQ ID NO: 1179253 - RNA, 19 nt, Homo sapiens
  misc_RNA (1)...(19): siRNA sense strand
ugaaggcccugcuaaaagu

SEQ ID NO: 1179254 - RNA, 19 nt, Homo sapiens
  misc_RNA (1)...(19): siRNA sense strand
gagccgcacuaagaagaag

SEQ ID NO: 1179255 - RNA, 19 nt, Homo sapiens
  misc_RNA (1)...(19): siRNA sense strand
agucaggccuagaggacaa

SEQ ID NO: 1179256 - RNA, 19 nt, Homo sapiens
  misc_RNA (1)...(19): siRNA sense strand
cgacucccucccugcauuu

SEQ ID NO: 1179257 - RNA, 19 nt, Homo sapiens
  misc_RNA (1)...(19): siRNA sense strand
gcccaggacaggcugcauu

SEQ ID NO: 1179258 - RNA, 19 nt, Homo sapiens
  misc_RNA (1)...(19): siRNA sense strand
gggcuguggucuguugcuu

SEQ ID NO: 1179259 - RNA, 19 nt, Homo sapiens
  misc_RNA (1)...(19): siRNA sense strand
gcucaguggccauguggau

SEQ ID NO: 1179260 - RNA, 19 nt, Homo sapiens
  misc_RNA (1)...(19): siRNA sense strand
gaugggcugcggcaaaucu

SEQ ID NO: 1179261 - RNA, 19 nt, Homo sapiens
  misc_RNA (1)...(19): siRNA sense strand
aggaugggcugcggcaaau

SEQ ID NO: 1179262 - RNA, 19 nt, Homo sapiens
  misc_RNA (1)...(19): siRNA sense strand
guguccugcuuacccagua

SEQ ID NO: 1179263 - RNA, 19 nt, Homo sapiens
  misc_RNA (1)...(19): siRNA sense strand
gcugaaggcccugcuaaaa

SEQ ID NO: 1179264 - RNA, 19 nt, Homo sapiens
  misc_RNA (1)...(19): siRNA sense strand
ccaguucucucucuaccua

SEQ ID NO: 1179265 - RNA, 19 nt, Homo sapiens
  misc_RNA (1)...(19): siRNA sense strand
ggaagcugaugcuggagaa

SEQ ID NO: 1179266 - RNA, 19 nt, Homo sapiens
  misc_RNA (1)...(19): siRNA sense strand
ugaagaugcuggacacuca

SEQ ID NO: 1179267 - RNA, 19 nt, Homo sapiens
  misc_RNA (1)...(19): siRNA sense strand
gcacuaagaagaagacagu

SEQ ID NO: 1179268 - RNA, 19 nt, Homo sapiens
  misc_RNA (1)...(19): siRNA sense strand
gcacacacccguccucucu

SEQ ID NO: 1179269 - RNA, 19 nt, Homo sapiens
  misc_RNA (1)...(19): siRNA sense strand
guacccaguucucucucua

SEQ ID NO: 1179270 - RNA, 19 nt, Homo sapiens
  misc_RNA (1)...(19): siRNA sense strand
gaucagccgguuccucuug

SEQ ID NO: 1179271 - RNA, 19 nt, Homo sapiens
  misc_RNA (1)...(19): siRNA sense strand
gaggaugggcugcggcaaa

SEQ ID NO: 1179272 - RNA, 19 nt, Homo sapiens
  misc_RNA (1)...(19): siRNA sense strand
gacaccagcuccccucaua

SEQ ID NO: 1179273 - RNA, 19 nt, Homo sapiens
  misc_RNA (1)...(19): siRNA sense strand
agaagacaguggucagugu

SEQ ID NO: 1179274 - RNA, 19 nt, Homo sapiens
  misc_RNA (1)...(19): siRNA sense strand
gaaagcaccgaccauaggu

SEQ ID NO: 1179275 - RNA, 19 nt, Homo sapiens
  misc_RNA (1)...(19): siRNA sense strand
ggaugugacugagcagauc

SEQ ID NO: 1179276 - RNA, 19 nt, Homo sapiens
  misc_RNA (1)...(19): siRNA sense strand
ucauggagacguagccuuu

SEQ ID NO: 1179277 - RNA, 19 nt, Homo sapiens
  misc_RNA (1)...(19): siRNA sense strand
ggcgggagaugucuucuac

SEQ ID NO: 1179278 - RNA, 19 nt, Homo sapiens
  misc_RNA (1)...(19): siRNA sense strand
gaagaagacaguggucagu

SEQ ID NO: 1179279 - RNA, 19 nt, Homo sapiens
  misc_RNA (1)...(19): siRNA sense strand
ggacaggcugcauuuccaa

SEQ ID NO: 1179280 - RNA, 19 nt, Homo sapiens
  misc_RNA (1)...(19): siRNA sense strand
ccugaaagcaccgaccaua

SEQ ID NO: 1179281 - RNA, 19 nt, Homo sapiens
  misc_RNA (1)...(19): siRNA sense strand
gcuguggucuguugcuuuu

SEQ ID NO: 1179282 - RNA, 19 nt, Homo sapiens
  misc_RNA (1)...(19): siRNA sense strand
acacacccguccucucuag

SEQ ID NO: 1179283 - RNA, 19 nt, Homo sapiens
  misc_RNA (1)...(19): siRNA sense strand
ggacagcacccaccuucac

SEQ ID NO: 1179284 - RNA, 19 nt, Homo sapiens
  misc_RNA (1)...(19): siRNA sense strand
gggagccgcacuaagaaga

SEQ ID NO: 1179285 - RNA, 19 nt, Homo sapiens
  misc_RNA (1)...(19): siRNA sense strand
cgggagaugucuucuacca

SEQ ID NO: 1179286 - RNA, 19 nt, Homo sapiens
  misc_RNA (1)...(19): siRNA sense strand
gcaccggagugaagaugcu

SEQ ID NO: 1179287 - RNA, 19 nt, Homo sapiens
  misc_RNA (1)...(19): siRNA sense strand
uagaggacaagcucaguga

SEQ ID NO: 1179288 - RNA, 19 nt, Homo sapiens
  misc_RNA (1)...(19): siRNA sense strand
ugaaagcaccgaccauagg

SEQ ID NO: 1179289 - RNA, 19 nt, Homo sapiens
  misc_RNA (1)...(19): siRNA sense strand
ggagccgcacuaagaagaa

SEQ ID NO: 1179290 - RNA, 19 nt, Homo sapiens
  misc_RNA (1)...(19): siRNA sense strand
gggaacguguccugcuuac

SEQ ID NO: 1179291 - RNA, 19 nt, Homo sapiens
  misc_RNA (1)...(19): siRNA sense strand
agacaguggucagugugaa

SEQ ID NO: 1179292 - RNA, 19 nt, Homo sapiens
  misc_RNA (1)...(19): siRNA sense strand
gccgguuccucuuggauca

SEQ ID NO: 1179293 - RNA, 19 nt, Homo sapiens
  misc_RNA (1)...(19): siRNA sense strand
gcggagggaggaagaggaa

SEQ ID NO: 1179294 - RNA, 19 nt, Homo sapiens
  misc_RNA (1)...(19): siRNA sense strand
ugccgaugcugaaguggaa

SEQ ID NO: 1179295 - RNA, 19 nt, Homo sapiens
  misc_RNA (1)...(19): siRNA sense strand
agcugaugcuggagaauuu

SEQ ID NO: 1179296 - RNA, 19 nt, Homo sapiens
  misc_RNA (1)...(19): siRNA sense strand
ucgacucccucccugcauu

SEQ ID NO: 1179297 - RNA, 19 nt, Homo sapiens
  misc_RNA (1)...(19): siRNA sense strand
caucagagcagcggcagau

SEQ ID NO: 1179298 - RNA, 19 nt, Homo sapiens
  misc_RNA (1)...(19): siRNA sense strand
ugaaggcccugcuaaaagu

SEQ ID NO: 1179299 - RNA, 19 nt, Homo sapiens
  misc_RNA (1)...(19): siRNA sense strand
gcccaggacaggcugcauu

SEQ ID NO: 1179300 - RNA, 19 nt, Homo sapiens
  misc_RNA (1)...(19): siRNA sense strand
agucaggccuagaggacaa

SEQ ID NO: 1179301 - RNA, 19 nt, Homo sapiens
  misc_RNA (1)...(19): siRNA sense strand
gagccgcacuaagaagaag

SEQ ID NO: 1179302 - RNA, 19 nt, Homo sapiens
  misc_RNA (1)...(19): siRNA sense strand
cgacucccucccugcauuu

SEQ ID NO: 1179303 - RNA, 19 nt, Homo sapiens
  misc_RNA (1)...(19): siRNA sense strand
gggcuguggucuguugcuu

SEQ ID NO: 1179304 - RNA, 19 nt, Homo sapiens
  misc_RNA (1)...(19): siRNA sense strand
gcucaguggccauguggau

SEQ ID NO: 1179305 - RNA, 19 nt, Homo sapiens
  misc_RNA (1)...(19): siRNA sense strand
gaugggcugcggcaaaucu

SEQ ID NO: 1179306 - RNA, 19 nt, Homo sapiens
  misc_RNA (1)...(19): siRNA sense strand
aggaugggcugcggcaaau

SEQ ID NO: 1179307 - RNA, 19 nt, Homo sapiens
  misc_RNA (1)...(19): siRNA sense strand
guguccugcuuacccagua

SEQ ID NO: 1179308 - RNA, 19 nt, Homo sapiens
  misc_RNA (1)...(19): siRNA sense strand
gcugaaggcccugcuaaaa

SEQ ID NO: 1179309 - RNA, 19 nt, Homo sapiens
  misc_RNA (1)...(19): siRNA sense strand
aaagaaaccuccuaucugu

SEQ ID NO: 1179310 - RNA, 19 nt, Homo sapiens
  misc_RNA (1)...(19): siRNA sense strand
gagcuaaaguuaaucuguu

SEQ ID NO: 1179311 - RNA, 19 nt, Homo sapiens
  misc_RNA (1)...(19): siRNA sense strand
gaaagaaaccuccuaucug

SEQ ID NO: 1179312 - RNA, 19 nt, Homo sapiens
  misc_RNA (1)...(19): siRNA sense strand
agacugagcuaaaguuaau

SEQ ID NO: 1179313 - RNA, 19 nt, Homo sapiens
  misc_RNA (1)...(19): siRNA sense strand
guuaaucuguugugacauu

SEQ ID NO: 1179314 - RNA, 19 nt, Homo sapiens
  misc_RNA (1)...(19): siRNA sense strand
gugaagagcagaauaaaga

SEQ ID NO: 1179315 - RNA, 19 nt, Homo sapiens
  misc_RNA (1)...(19): siRNA sense strand
gcugacaguugaagaaaga

SEQ ID NO: 1179316 - RNA, 19 nt, Homo sapiens
  misc_RNA (1)...(19): siRNA sense strand
ggaaggaggcugcggagaa

SEQ ID NO: 1179317 - RNA, 19 nt, Homo sapiens
  misc_RNA (1)...(19): siRNA sense strand
gaagaaagaaaccuccuau

SEQ ID NO: 1179318 - RNA, 19 nt, Homo sapiens
  misc_RNA (1)...(19): siRNA sense strand
gugauaaucugacacuaug

SEQ ID NO: 1179319 - RNA, 19 nt, Homo sapiens
  misc_RNA (1)...(19): siRNA sense strand
gaaaugguggagucaauga

SEQ ID NO: 1179320 - RNA, 19 nt, Homo sapiens
  misc_RNA (1)...(19): siRNA sense strand
uaaagcugcuagugauauu

SEQ ID NO: 1179321 - RNA, 19 nt, Homo sapiens
  misc_RNA (1)...(19): siRNA sense strand
gaaaguagcagggauggau

SEQ ID NO: 1179322 - RNA, 19 nt, Homo sapiens
  misc_RNA (1)...(19): siRNA sense strand
ggcaaaugguugagacuga

SEQ ID NO: 1179323 - RNA, 19 nt, Homo sapiens
  misc_RNA (1)...(19): siRNA sense strand
ccuccuaucuguugcauau

SEQ ID NO: 1179324 - RNA, 19 nt, Homo sapiens
  misc_RNA (1)...(19): siRNA sense strand
cagcagcauugaacagaaa

SEQ ID NO: 1179325 - RNA, 19 nt, Homo sapiens
  misc_RNA (1)...(19): siRNA sense strand
gcauugaacagaaagaaga

SEQ ID NO: 1179326 - RNA, 19 nt, Homo sapiens
  misc_RNA (1)...(19): siRNA sense strand
gaaggaggcugcggagaac

SEQ ID NO: 1179327 - RNA, 19 nt, Homo sapiens
  misc_RNA (1)...(19): siRNA sense strand
uuauaaagcugcuagugau

SEQ ID NO: 1179328 - RNA, 19 nt, Homo sapiens
  misc_RNA (1)...(19): siRNA sense strand
agaauaaucagcagcauug

SEQ ID NO: 1179329 - RNA, 19 nt, Homo sapiens
  misc_RNA (1)...(19): siRNA sense strand
ggacaaacaccucauucca

SEQ ID NO: 1179330 - RNA, 19 nt, Homo sapiens
  misc_RNA (1)...(19): siRNA sense strand
gcaauugcagaacuggaua

SEQ ID NO: 1179331 - RNA, 19 nt, Homo sapiens
  misc_RNA (1)...(19): siRNA sense strand
gagaauaaucagcagcauu

SEQ ID NO: 1179332 - RNA, 19 nt, Homo sapiens
  misc_RNA (1)...(19): siRNA sense strand
gaggagaagacaagcuaaa

SEQ ID NO: 1179333 - RNA, 19 nt, Homo sapiens
  misc_RNA (1)...(19): siRNA sense strand
gggaggagaagacaagcua

SEQ ID NO: 1179334 - RNA, 19 nt, Homo sapiens
  misc_RNA (1)...(19): siRNA sense strand
gagacugagcuaaaguuaa

SEQ ID NO: 1179335 - RNA, 19 nt, Homo sapiens
  misc_RNA (1)...(19): siRNA sense strand
ggagcugacaguugaagaa

SEQ ID NO: 1179336 - RNA, 19 nt, Homo sapiens
  misc_RNA (1)...(19): siRNA sense strand
aguccaagguuuucuauua

SEQ ID NO: 1179337 - RNA, 19 nt, Homo sapiens
  misc_RNA (1)...(19): siRNA sense strand
agaaaccuccuaucuguug

SEQ ID NO: 1179338 - RNA, 19 nt, Homo sapiens
  misc_RNA (1)...(19): siRNA sense strand
agaaagaaaccuccuaucu

SEQ ID NO: 1179339 - RNA, 19 nt, Homo sapiens
  misc_RNA (1)...(19): siRNA sense strand
gcuuaggucuugcucucaa

SEQ ID NO: 1179340 - RNA, 19 nt, Homo sapiens
  misc_RNA (1)...(19): siRNA sense strand
gauaaucugacacuaugga

SEQ ID NO: 1179341 - RNA, 19 nt, Homo sapiens
  misc_RNA (1)...(19): siRNA sense strand
gagcugacaguugaagaaa

SEQ ID NO: 1179342 - RNA, 19 nt, Homo sapiens
  misc_RNA (1)...(19): siRNA sense strand
gugaagaaagcuauaagga

SEQ ID NO: 1179343 - RNA, 19 nt, Homo sapiens
  misc_RNA (1)...(19): siRNA sense strand
uccuaucuguugcauauaa

SEQ ID NO: 1179344 - RNA, 19 nt, Homo sapiens
  misc_RNA (1)...(19): siRNA sense strand
ugagacugagcuaaaguua

SEQ ID NO: 1179345 - RNA, 19 nt, Homo sapiens
  misc_RNA (1)...(19): siRNA sense strand
acuauggacuucagacaug

SEQ ID NO: 1179346 - RNA, 19 nt, Homo sapiens
  misc_RNA (1)...(19): siRNA sense strand
gauguggagcugacaguug

SEQ ID NO: 1179347 - RNA, 19 nt, Homo sapiens
  misc_RNA (1)...(19): siRNA sense strand
uggauacgcugagugaaga

SEQ ID NO: 1179348 - RNA, 19 nt, Homo sapiens
  misc_RNA (1)...(19): siRNA sense strand
gggaauaucggcaaauggu

SEQ ID NO: 1179349 - RNA, 19 nt, Homo sapiens
  misc_RNA (1)...(19): siRNA sense strand
aaguuaaucuguugugaca

SEQ ID NO: 1179350 - RNA, 19 nt, Homo sapiens
  misc_RNA (1)...(19): siRNA sense strand
gaagagcagaauaaagaag

SEQ ID NO: 1179351 - RNA, 19 nt, Homo sapiens
  misc_RNA (1)...(19): siRNA sense strand
cuacacuuaucaugcaguu

SEQ ID NO: 1179352 - RNA, 19 nt, Homo sapiens
  misc_RNA (1)...(19): siRNA sense strand
uauaaagcugcuagugaua

SEQ ID NO: 1179353 - RNA, 19 nt, Homo sapiens
  misc_RNA (1)...(19): siRNA sense strand
gcugagcgauacgacgaaa

SEQ ID NO: 1179354 - RNA, 19 nt, Homo sapiens
  misc_RNA (1)...(19): siRNA sense strand
guuguuacgugauaaucug

SEQ ID NO: 1179355 - RNA, 19 nt, Homo sapiens
  misc_RNA (1)...(19): siRNA sense strand
ucagcagcauugaacagaa

SEQ ID NO: 1179356 - RNA, 19 nt, Homo sapiens
  misc_RNA (1)...(19): siRNA sense strand
ggacucuacacuuaucaug

SEQ ID NO: 1179357 - RNA, 19 nt, Homo sapiens
  misc_RNA (1)...(19): siRNA sense strand
ggaauaucggcaaaugguu

SEQ ID NO: 1179358 - RNA, 19 nt, Homo sapiens
  misc_RNA (1)...(19): siRNA sense strand
caagggaggagaagacaag

SEQ ID NO: 1179359 - RNA, 19 nt, Homo sapiens
  misc_RNA (1)...(19): siRNA sense strand
ccacaggaaacgacaggaa

SEQ ID NO: 1179360 - RNA, 19 nt, Homo sapiens
  misc_RNA (1)...(19): siRNA sense strand
ggaggagaagacaagcuaa

SEQ ID NO: 1179361 - RNA, 19 nt, Homo sapiens
  misc_RNA (1)...(19): siRNA sense strand
uggagucaaugaagaaagu

SEQ ID NO: 1179362 - RNA, 19 nt, Homo sapiens
  misc_RNA (1)...(19): siRNA sense strand
augcaguuguuacgugaua

SEQ ID NO: 1179363 - RNA, 19 nt, Homo sapiens
  misc_RNA (1)...(19): siRNA sense strand
cuuauaaagcugcuaguga

SEQ ID NO: 1179364 - RNA, 19 nt, Homo sapiens
  misc_RNA (1)...(19): siRNA sense strand
acacuuaucaugcaguugu

SEQ ID NO: 1179365 - RNA, 19 nt, Homo sapiens
  misc_RNA (1)...(19): siRNA sense strand
ggagaauaaucagcagcau

SEQ ID NO: 1179366 - RNA, 19 nt, Homo sapiens
  misc_RNA (1)...(19): siRNA sense strand
gcaggacguggaagacgaa

SEQ ID NO: 1179367 - RNA, 19 nt, Homo sapiens
  misc_RNA (1)...(19): siRNA sense strand
uggauguacuggacaaaca

SEQ ID NO: 1179368 - RNA, 19 nt, Homo sapiens
  misc_RNA (1)...(19): siRNA sense strand
ugaagaaagaaaccuccua

SEQ ID NO: 1179369 - RNA, 19 nt, Homo sapiens
  misc_RNA (1)...(19): siRNA sense strand
ccaccaacgcauccuauuc

SEQ ID NO: 1179370 - RNA, 19 nt, Homo sapiens
  misc_RNA (1)...(19): siRNA sense strand
ccgagcaggcugagcgaua

SEQ ID NO: 1179371 - RNA, 19 nt, Homo sapiens
  misc_RNA (1)...(19): siRNA sense strand
gaauaaucagcagcauuga

SEQ ID NO: 1179372 - RNA, 19 nt, Homo sapiens
  misc_RNA (1)...(19): siRNA sense strand
cgugauaaucugacacuau

SEQ ID NO: 1179373 - RNA, 19 nt, Homo sapiens
  misc_RNA (1)...(19): siRNA sense strand
cuagugauauugcaaugac

SEQ ID NO: 1179374 - RNA, 19 nt, Homo sapiens
  misc_RNA (1)...(19): siRNA sense strand
acgaaaugguggagucaau

SEQ ID NO: 1179375 - RNA, 19 nt, Homo sapiens
  misc_RNA (1)...(19): siRNA sense strand
gguugagacugagcuaaag

SEQ ID NO: 1179376 - RNA, 19 nt, Homo sapiens
  misc_RNA (1)...(19): siRNA sense strand
ugaagagcagaauaaagaa

SEQ ID NO: 1179377 - RNA, 19 nt, Homo sapiens
  misc_RNA (1)...(19): siRNA sense strand
ugagcgauacgacgaaaug

SEQ ID NO: 1179378 - RNA, 19 nt, Homo sapiens
  misc_RNA (1)...(19): siRNA sense strand
gcuauaaggacucuacacu

SEQ ID NO: 1179379 - RNA, 19 nt, Homo sapiens
  misc_RNA (1)...(19): siRNA sense strand
ugagugaagaaagcuauaa

SEQ ID NO: 1179380 - RNA, 19 nt, Homo sapiens
  misc_RNA (1)...(19): siRNA sense strand
cagaauuugccacaggaaa

SEQ ID NO: 1179381 - RNA, 19 nt, Homo sapiens
  misc_RNA (1)...(19): siRNA sense strand
auguggagcugacaguuga

SEQ ID NO: 1179382 - RNA, 19 nt, Homo sapiens
  misc_RNA (1)...(19): siRNA sense strand
gcaguuguuacgugauaau

SEQ ID NO: 1179383 - RNA, 19 nt, Homo sapiens
  misc_RNA (1)...(19): siRNA sense strand
acucuacacuuaucaugca

SEQ ID NO: 1179384 - RNA, 19 nt, Homo sapiens
  misc_RNA (1)...(19): siRNA sense strand
ggagucaaugaagaaagua

SEQ ID NO: 1179385 - RNA, 19 nt, Homo sapiens
  misc_RNA (1)...(19): siRNA sense strand
ucgggaauaucggcaaaug

SEQ ID NO: 1179386 - RNA, 19 nt, Homo sapiens
  misc_RNA (1)...(19): siRNA sense strand
caugcagggugacggugaa

SEQ ID NO: 1179387 - RNA, 19 nt, Homo sapiens
  misc_RNA (1)...(19): siRNA sense strand
cgagcaggcugagcgauac

SEQ ID NO: 1179388 - RNA, 19 nt, Homo sapiens
  misc_RNA (1)...(19): siRNA sense strand
gcagaauuugccacaggaa

SEQ ID NO: 1179389 - RNA, 19 nt, Homo sapiens
  misc_RNA (1)...(19): siRNA sense strand
ggacguggaagacgaaaau

SEQ ID NO: 1179390 - RNA, 19 nt, Homo sapiens
  misc_RNA (1)...(19): siRNA sense strand
cuauaaggacucuacacuu

SEQ ID NO: 1179391 - RNA, 19 nt, Homo sapiens
  misc_RNA (1)...(19): siRNA sense strand
aaacaagggaggagaagac

SEQ ID NO: 1179392 - RNA, 19 nt, Homo sapiens
  misc_RNA (1)...(19): siRNA sense strand
ggaagacgaaaaucaguga

SEQ ID NO: 1179393 - RNA, 19 nt, Homo sapiens
  misc_RNA (1)...(19): siRNA sense strand
cgaaaugguggagucaaug

SEQ ID NO: 1179394 - RNA, 19 nt, Homo sapiens
  misc_RNA (1)...(19): siRNA sense strand
ggugaagagcagaauaaag

SEQ ID NO: 1179395 - RNA, 19 nt, Homo sapiens
  misc_RNA (1)...(19): siRNA sense strand
gaacagaaagaagaaaaca

SEQ ID NO: 1179396 - RNA, 19 nt, Homo sapiens
  misc_RNA (1)...(19): siRNA sense strand
gacggugaagagcagaaua

SEQ ID NO: 1179397 - RNA, 19 nt, Homo sapiens
  misc_RNA (1)...(19): siRNA sense strand
aaucugacacuauggacuu

SEQ ID NO: 1179398 - RNA, 19 nt, Homo sapiens
  misc_RNA (1)...(19): siRNA sense strand
ugacaguugaagaaagaaa

SEQ ID NO: 1179399 - RNA, 19 nt, Homo sapiens
  misc_RNA (1)...(19): siRNA sense strand
gcuagugauauugcaauga

SEQ ID NO: 1179400 - RNA, 19 nt, Homo sapiens
  misc_RNA (1)...(19): siRNA sense strand
cagcauugaacagaaagaa

SEQ ID NO: 1179401 - RNA, 19 nt, Homo sapiens
  misc_RNA (1)...(19): siRNA sense strand
acggugaagagcagaauaa

SEQ ID NO: 1179402 - RNA, 19 nt, Homo sapiens
  misc_RNA (1)...(19): siRNA sense strand
gcagggugacggugaagag

SEQ ID NO: 1179403 - RNA, 19 nt, Homo sapiens
  misc_RNA (1)...(19): siRNA sense strand
ucuguugcauauaagaaug

SEQ ID NO: 1179404 - RNA, 19 nt, Homo sapiens
  misc_RNA (1)...(19): siRNA sense strand
gcugagugaagaaagcuau

SEQ ID NO: 1179405 - RNA, 19 nt, Homo sapiens
  misc_RNA (1)...(19): siRNA sense strand
guauucuacuacgaaauuc

SEQ ID NO: 1179406 - RNA, 19 nt, Homo sapiens
  misc_RNA (1)...(19): siRNA sense strand
gauauugcaaugacagaac

SEQ ID NO: 1179407 - RNA, 19 nt, Homo sapiens
  misc_RNA (1)...(19): siRNA sense strand
guccaagguuuucuauuau

SEQ ID NO: 1179408 - RNA, 19 nt, Homo sapiens
  misc_RNA (1)...(19): siRNA sense strand
agaaagcuauaaggacucu

SEQ ID NO: 1179409 - RNA, 19 nt, Homo sapiens
  misc_RNA (1)...(19): siRNA sense strand
ugaagaauaucaaguguga

SEQ ID NO: 1179410 - RNA, 19 nt, Homo sapiens
  misc_RNA (1)...(19): siRNA sense strand
gaucggagagggagaguuu

SEQ ID NO: 1179411 - RNA, 19 nt, Homo sapiens
  misc_RNA (1)...(19): siRNA sense strand
ucugggaggucuucucaua

SEQ ID NO: 1179412 - RNA, 19 nt, Homo sapiens
  misc_RNA (1)...(19): siRNA sense strand
gcaacauccuggucucaga

SEQ ID NO: 1179413 - RNA, 19 nt, Homo sapiens
  misc_RNA (1)...(19): siRNA sense strand
ccgcucagcuccugcaguu

SEQ ID NO: 1179414 - RNA, 19 nt, Homo sapiens
  misc_RNA (1)...(19): siRNA sense strand
uacugaaccugcagcauuu

SEQ ID NO: 1179415 - RNA, 19 nt, Homo sapiens
  misc_RNA (1)...(19): siRNA sense strand
uuacugaaccugcagcauu

SEQ ID NO: 1179416 - RNA, 19 nt, Homo sapiens
  misc_RNA (1)...(19): siRNA sense strand
uggaguaccuggagagcaa

SEQ ID NO: 1179417 - RNA, 19 nt, Homo sapiens
  misc_RNA (1)...(19): siRNA sense strand
uggacaugguggagcauua

SEQ ID NO: 1179418 - RNA, 19 nt, Homo sapiens
  misc_RNA (1)...(19): siRNA sense strand
ugggaggucuucucauaug

SEQ ID NO: 1179419 - RNA, 19 nt, Homo sapiens
  misc_RNA (1)...(19): siRNA sense strand
ggaaacacgggaccaaguc

SEQ ID NO: 1179420 - RNA, 19 nt, Homo sapiens
  misc_RNA (1)...(19): siRNA sense strand
gcaaccuggugaacuuucu

SEQ ID NO: 1179421 - RNA, 19 nt, Homo sapiens
  misc_RNA (1)...(19): siRNA sense strand
ggaaggggcuagacucaag

SEQ ID NO: 1179422 - RNA, 19 nt, Homo sapiens
  misc_RNA (1)...(19): siRNA sense strand
cccaguguaucaccaaaug

SEQ ID NO: 1179423 - RNA, 19 nt, Homo sapiens
  misc_RNA (1)...(19): siRNA sense strand
agucggaugucuggaguuu

SEQ ID NO: 1179424 - RNA, 19 nt, Homo sapiens
  misc_RNA (1)...(19): siRNA sense strand
gaagaugcaacacgagaac

SEQ ID NO: 1179425 - RNA, 19 nt, Homo sapiens
  misc_RNA (1)...(19): siRNA sense strand
gaaccugcagcauuugaca

SEQ ID NO: 1179426 - RNA, 19 nt, Homo sapiens
  misc_RNA (1)...(19): siRNA sense strand
cgugaagaauaucaagugu

SEQ ID NO: 1179427 - RNA, 19 nt, Homo sapiens
  misc_RNA (1)...(19): siRNA sense strand
gcaagggcaaccuggugaa

SEQ ID NO: 1179428 - RNA, 19 nt, Homo sapiens
  misc_RNA (1)...(19): siRNA sense strand
gccgcgacgucauccacua

SEQ ID NO: 1179429 - RNA, 19 nt, Homo sapiens
  misc_RNA (1)...(19): siRNA sense strand
gcccgaggcucucaaacac

SEQ ID NO: 1179430 - RNA, 19 nt, Homo sapiens
  misc_RNA (1)...(19): siRNA sense strand
gcaaggacaagggcgcuau

SEQ ID NO: 1179431 - RNA, 19 nt, Homo sapiens
  misc_RNA (1)...(19): siRNA sense strand
gcgagaacaagagcuggua

SEQ ID NO: 1179432 - RNA, 19 nt, Homo sapiens
  misc_RNA (1)...(19): siRNA sense strand
ggaggucuucucauaugga

SEQ ID NO: 1179433 - RNA, 19 nt, Homo sapiens
  misc_RNA (1)...(19): siRNA sense strand
ggccaaggucagcgacuuu

SEQ ID NO: 1179434 - RNA, 19 nt, Homo sapiens
  misc_RNA (1)...(19): siRNA sense strand
ggcuguacauugucaugga

SEQ ID NO: 1179435 - RNA, 19 nt, Homo sapiens
  misc_RNA (1)...(19): siRNA sense strand
ggcaaaagguggccgugaa

SEQ ID NO: 1179436 - RNA, 19 nt, Homo sapiens
  misc_RNA (1)...(19): siRNA sense strand
gcucugggaggucuucuca

SEQ ID NO: 1179437 - RNA, 19 nt, Homo sapiens
  misc_RNA (1)...(19): siRNA sense strand
cgaagaugcaacacgagaa

SEQ ID NO: 1179438 - RNA, 19 nt, Homo sapiens
  misc_RNA (1)...(19): siRNA sense strand
aaagguggccgugaagaau

SEQ ID NO: 1179439 - RNA, 19 nt, Homo sapiens
  misc_RNA (1)...(19): siRNA sense strand
gggaggucuucucauaugg

SEQ ID NO: 1179440 - RNA, 19 nt, Homo sapiens
  misc_RNA (1)...(19): siRNA sense strand
gcucagcuccugcaguuuu

SEQ ID NO: 1179441 - RNA, 19 nt, Homo sapiens
  misc_RNA (1)...(19): siRNA sense strand
aagguggccgugaagaaua

SEQ ID NO: 1179442 - RNA, 19 nt, Homo sapiens
  misc_RNA (1)...(19): siRNA sense strand
gcacccaguguaucaccaa

SEQ ID NO: 1179443 - RNA, 19 nt, Homo sapiens
  misc_RNA (1)...(19): siRNA sense strand
ggacaugguggagcauuac

SEQ ID NO: 1179444 - RNA, 19 nt, Homo sapiens
  misc_RNA (1)...(19): siRNA sense strand
agggcaaccuggugaacuu

SEQ ID NO: 1179445 - RNA, 19 nt, Homo sapiens
  misc_RNA (1)...(19): siRNA sense strand
ucauggagcacgugagcaa

SEQ ID NO: 1179446 - RNA, 19 nt, Homo sapiens
  misc_RNA (1)...(19): siRNA sense strand
gaugaggccguguucuucu

SEQ ID NO: 1179447 - RNA, 19 nt, Homo sapiens
  misc_RNA (1)...(19): siRNA sense strand
ugucggaggccguggagaa

SEQ ID NO: 1179448 - RNA, 19 nt, Homo sapiens
  misc_RNA (1)...(19): siRNA sense strand
gagcugguaccgcgucaag

SEQ ID NO: 1179449 - RNA, 19 nt, Homo sapiens
  misc_RNA (1)...(19): siRNA sense strand
gugaguaccuggggcaaaa

SEQ ID NO: 1179450 - RNA, 19 nt, Homo sapiens
  misc_RNA (1)...(19): siRNA sense strand
gacauugggagcacagauc

SEQ ID NO: 1179451 - RNA, 19 nt, Homo sapiens
  misc_RNA (1)...(19): siRNA sense strand
gcaaacuggccgagaagcu

SEQ ID NO: 1179452 - RNA, 19 nt, Homo sapiens
  misc_RNA (1)...(19): siRNA sense strand
ccuaaaaugucacugaaag

SEQ ID NO: 1179453 - RNA, 19 nt, Homo sapiens
  misc_RNA (1)...(19): siRNA sense strand
gcugguaccgcgucaagca

SEQ ID NO: 1179454 - RNA, 19 nt, Homo sapiens
  misc_RNA (1)...(19): siRNA sense strand
gggcaaccuggugaacuuu

SEQ ID NO: 1179455 - RNA, 19 nt, Homo sapiens
  misc_RNA (1)...(19): siRNA sense strand
cgacggccaccucacaauc

SEQ ID NO: 1179456 - RNA, 19 nt, Homo sapiens
  misc_RNA (1)...(19): siRNA sense strand
ggugagaccaaagcggaaa

SEQ ID NO: 1179457 - RNA, 19 nt, Homo sapiens
  misc_RNA (1)...(19): siRNA sense strand
ucgaugaggccguguucuu

SEQ ID NO: 1179458 - RNA, 19 nt, Homo sapiens
  misc_RNA (1)...(19): siRNA sense strand
ugaagaauaucaaguguga

SEQ ID NO: 1179459 - RNA, 19 nt, Homo sapiens
  misc_RNA (1)...(19): siRNA sense strand
gaucggagagggagaguuu

SEQ ID NO: 1179460 - RNA, 19 nt, Homo sapiens
  misc_RNA (1)...(19): siRNA sense strand
ucugggaggucuucucaua

SEQ ID NO: 1179461 - RNA, 19 nt, Homo sapiens
  misc_RNA (1)...(19): siRNA sense strand
gcaacauccuggucucaga

SEQ ID NO: 1179462 - RNA, 19 nt, Homo sapiens
  misc_RNA (1)...(19): siRNA sense strand
ccgcucagcuccugcaguu

SEQ ID NO: 1179463 - RNA, 19 nt, Homo sapiens
  misc_RNA (1)...(19): siRNA sense strand
uacugaaccugcagcauuu

SEQ ID NO: 1179464 - RNA, 19 nt, Homo sapiens
  misc_RNA (1)...(19): siRNA sense strand
uuacugaaccugcagcauu

SEQ ID NO: 1179465 - RNA, 19 nt, Homo sapiens
  misc_RNA (1)...(19): siRNA sense strand
uggaguaccuggagagcaa

SEQ ID NO: 1179466 - RNA, 19 nt, Homo sapiens
  misc_RNA (1)...(19): siRNA sense strand
uggacaugguggagcauua

SEQ ID NO: 1179467 - RNA, 19 nt, Homo sapiens
  misc_RNA (1)...(19): siRNA sense strand
ugggaggucuucucauaug

SEQ ID NO: 1179468 - RNA, 19 nt, Homo sapiens
  misc_RNA (1)...(19): siRNA sense strand
ggaaacacgggaccaaguc

SEQ ID NO: 1179469 - RNA, 19 nt, Homo sapiens
  misc_RNA (1)...(19): siRNA sense strand
gcaaccuggugaacuuucu

SEQ ID NO: 1179470 - RNA, 19 nt, Homo sapiens
  misc_RNA (1)...(19): siRNA sense strand
ggaaggggcuagacucaag

SEQ ID NO: 1179471 - RNA, 19 nt, Homo sapiens
  misc_RNA (1)...(19): siRNA sense strand
cccaguguaucaccaaaug

SEQ ID NO: 1179472 - RNA, 19 nt, Homo sapiens
  misc_RNA (1)...(19): siRNA sense strand
agucggaugucuggaguuu

SEQ ID NO: 1179473 - RNA, 19 nt, Homo sapiens
  misc_RNA (1)...(19): siRNA sense strand
gaagaugcaacacgagaac

SEQ ID NO: 1179474 - RNA, 19 nt, Homo sapiens
  misc_RNA (1)...(19): siRNA sense strand
gaaccugcagcauuugaca

SEQ ID NO: 1179475 - RNA, 19 nt, Homo sapiens
  misc_RNA (1)...(19): siRNA sense strand
cgugaagaauaucaagugu

SEQ ID NO: 1179476 - RNA, 19 nt, Homo sapiens
  misc_RNA (1)...(19): siRNA sense strand
gcaagggcaaccuggugaa

SEQ ID NO: 1179477 - RNA, 19 nt, Homo sapiens
  misc_RNA (1)...(19): siRNA sense strand
gccgcgacgucauccacua

SEQ ID NO: 1179478 - RNA, 19 nt, Homo sapiens
  misc_RNA (1)...(19): siRNA sense strand
gcccgaggcucucaaacac

SEQ ID NO: 1179479 - RNA, 19 nt, Homo sapiens
  misc_RNA (1)...(19): siRNA sense strand
gcaaggacaagggcgcuau

SEQ ID NO: 1179480 - RNA, 19 nt, Homo sapiens
  misc_RNA (1)...(19): siRNA sense strand
ggcuguacauugucaugga

SEQ ID NO: 1179481 - RNA, 19 nt, Homo sapiens
  misc_RNA (1)...(19): siRNA sense strand
ggaggucuucucauaugga

SEQ ID NO: 1179482 - RNA, 19 nt, Homo sapiens
  misc_RNA (1)...(19): siRNA sense strand
gcgagaacaagagcuggua

SEQ ID NO: 1179483 - RNA, 19 nt, Homo sapiens
  misc_RNA (1)...(19): siRNA sense strand
ggccaaggucagcgacuuu

SEQ ID NO: 1179484 - RNA, 19 nt, Homo sapiens
  misc_RNA (1)...(19): siRNA sense strand
ggcaaaagguggccgugaa

SEQ ID NO: 1179485 - RNA, 19 nt, Homo sapiens
  misc_RNA (1)...(19): siRNA sense strand
gcucugggaggucuucuca

SEQ ID NO: 1179486 - RNA, 19 nt, Homo sapiens
  misc_RNA (1)...(19): siRNA sense strand
cgaagaugcaacacgagaa

SEQ ID NO: 1179487 - RNA, 19 nt, Homo sapiens
  misc_RNA (1)...(19): siRNA sense strand
aaagguggccgugaagaau

SEQ ID NO: 1179488 - RNA, 19 nt, Homo sapiens
  misc_RNA (1)...(19): siRNA sense strand
gggaggucuucucauaugg

SEQ ID NO: 1179489 - RNA, 19 nt, Homo sapiens
  misc_RNA (1)...(19): siRNA sense strand
gcucagcuccugcaguuuu

SEQ ID NO: 1179490 - RNA, 19 nt, Homo sapiens
  misc_RNA (1)...(19): siRNA sense strand
aagguggccgugaagaaua

SEQ ID NO: 1179491 - RNA, 19 nt, Homo sapiens
  misc_RNA (1)...(19): siRNA sense strand
gcacccaguguaucaccaa

SEQ ID NO: 1179492 - RNA, 19 nt, Homo sapiens
  misc_RNA (1)...(19): siRNA sense strand
ggacaugguggagcauuac

SEQ ID NO: 1179493 - RNA, 19 nt, Homo sapiens
  misc_RNA (1)...(19): siRNA sense strand
agggcaaccuggugaacuu

SEQ ID NO: 1179494 - RNA, 19 nt, Homo sapiens
  misc_RNA (1)...(19): siRNA sense strand
ucauggagcacgugagcaa

SEQ ID NO: 1179495 - RNA, 19 nt, Homo sapiens
  misc_RNA (1)...(19): siRNA sense strand
gaugaggccguguucuucu

SEQ ID NO: 1179496 - RNA, 19 nt, Homo sapiens
  misc_RNA (1)...(19): siRNA sense strand
ugucggaggccguggagaa

SEQ ID NO: 1179497 - RNA, 19 nt, Homo sapiens
  misc_RNA (1)...(19): siRNA sense strand
gugaguaccuggggcaaaa

SEQ ID NO: 1179498 - RNA, 19 nt, Homo sapiens
  misc_RNA (1)...(19): siRNA sense strand
gagcugguaccgcgucaag

SEQ ID NO: 1179499 - RNA, 19 nt, Homo sapiens
  misc_RNA (1)...(19): siRNA sense strand
gcugguaccgcgucaagca

SEQ ID NO: 1179500 - RNA, 19 nt, Homo sapiens
  misc_RNA (1)...(19): siRNA sense strand
gcaaacuggccgagaagcu

SEQ ID NO: 1179501 - RNA, 19 nt, Homo sapiens
  misc_RNA (1)...(19): siRNA sense strand
ccuaaaaugucacugaaag

SEQ ID NO: 1179502 - RNA, 19 nt, Homo sapiens
  misc_RNA (1)...(19): siRNA sense strand
gacauugggagcacagauc

SEQ ID NO: 1179503 - RNA, 19 nt, Homo sapiens
  misc_RNA (1)...(19): siRNA sense strand
cgacggccaccucacaauc

SEQ ID NO: 1179504 - RNA, 19 nt, Homo sapiens
  misc_RNA (1)...(19): siRNA sense strand
gggcaaccuggugaacuuu

SEQ ID NO: 1179505 - RNA, 19 nt, Homo sapiens
  misc_RNA (1)...(19): siRNA sense strand
ggugagaccaaagcggaaa

SEQ ID NO: 1179506 - RNA, 19 nt, Homo sapiens
  misc_RNA (1)...(19): siRNA sense strand
ucgaugaggccguguucuu

SEQ ID NO: 1179507 - RNA, 19 nt, Homo sapiens
  misc_RNA (1)...(19): siRNA sense strand
ugaagaauaucaaguguga

SEQ ID NO: 1179508 - RNA, 19 nt, Homo sapiens
  misc_RNA (1)...(19): siRNA sense strand
gaucggagagggagaguuu

SEQ ID NO: 1179509 - RNA, 19 nt, Homo sapiens
  misc_RNA (1)...(19): siRNA sense strand
ucugggaggucuucucaua

SEQ ID NO: 1179510 - RNA, 19 nt, Homo sapiens
  misc_RNA (1)...(19): siRNA sense strand
gcaacauccuggucucaga

SEQ ID NO: 1179511 - RNA, 19 nt, Homo sapiens
  misc_RNA (1)...(19): siRNA sense strand
ccgcucagcuccugcaguu

SEQ ID NO: 1179512 - RNA, 19 nt, Homo sapiens
  misc_RNA (1)...(19): siRNA sense strand
uacugaaccugcagcauuu

SEQ ID NO: 1179513 - RNA, 19 nt, Homo sapiens
  misc_RNA (1)...(19): siRNA sense strand
uuacugaaccugcagcauu

SEQ ID NO: 1179514 - RNA, 19 nt, Homo sapiens
  misc_RNA (1)...(19): siRNA sense strand
uggaguaccuggagagcaa

SEQ ID NO: 1179515 - RNA, 19 nt, Homo sapiens
  misc_RNA (1)...(19): siRNA sense strand
uggacaugguggagcauua

SEQ ID NO: 1179516 - RNA, 19 nt, Homo sapiens
  misc_RNA (1)...(19): siRNA sense strand
ugggaggucuucucauaug

SEQ ID NO: 1179517 - RNA, 19 nt, Homo sapiens
  misc_RNA (1)...(19): siRNA sense strand
ggaaacacgggaccaaguc

SEQ ID NO: 1179518 - RNA, 19 nt, Homo sapiens
  misc_RNA (1)...(19): siRNA sense strand
gcaaccuggugaacuuucu

SEQ ID NO: 1179519 - RNA, 19 nt, Homo sapiens
  misc_RNA (1)...(19): siRNA sense strand
ggaaggggcuagacucaag

SEQ ID NO: 1179520 - RNA, 19 nt, Homo sapiens
  misc_RNA (1)...(19): siRNA sense strand
cccaguguaucaccaaaug

SEQ ID NO: 1179521 - RNA, 19 nt, Homo sapiens
  misc_RNA (1)...(19): siRNA sense strand
agucggaugucuggaguuu

SEQ ID NO: 1179522 - RNA, 19 nt, Homo sapiens
  misc_RNA (1)...(19): siRNA sense strand
gaagaugcaacacgagaac

SEQ ID NO: 1179523 - RNA, 19 nt, Homo sapiens
  misc_RNA (1)...(19): siRNA sense strand
gaaccugcagcauuugaca

SEQ ID NO: 1179524 - RNA, 19 nt, Homo sapiens
  misc_RNA (1)...(19): siRNA sense strand
cgugaagaauaucaagugu

SEQ ID NO: 1179525 - RNA, 19 nt, Homo sapiens
  misc_RNA (1)...(19): siRNA sense strand
gcaagggcaaccuggugaa

SEQ ID NO: 1179526 - RNA, 19 nt, Homo sapiens
  misc_RNA (1)...(19): siRNA sense strand
gccgcgacgucauccacua

SEQ ID NO: 1179527 - RNA, 19 nt, Homo sapiens
  misc_RNA (1)...(19): siRNA sense strand
gcccgaggcucucaaacac

SEQ ID NO: 1179528 - RNA, 19 nt, Homo sapiens
  misc_RNA (1)...(19): siRNA sense strand
gcaaggacaagggcgcuau

SEQ ID NO: 1179529 - RNA, 19 nt, Homo sapiens
  misc_RNA (1)...(19): siRNA sense strand
gcgagaacaagagcuggua

SEQ ID NO: 1179530 - RNA, 19 nt, Homo sapiens
  misc_RNA (1)...(19): siRNA sense strand
ggaggucuucucauaugga

SEQ ID NO: 1179531 - RNA, 19 nt, Homo sapiens
  misc_RNA (1)...(19): siRNA sense strand
ggccaaggucagcgacuuu

SEQ ID NO: 1179532 - RNA, 19 nt, Homo sapiens
  misc_RNA (1)...(19): siRNA sense strand
ggcuguacauugucaugga

SEQ ID NO: 1179533 - RNA, 19 nt, Homo sapiens
  misc_RNA (1)...(19): siRNA sense strand
ggcaaaagguggccgugaa

SEQ ID NO: 1179534 - RNA, 19 nt, Homo sapiens
  misc_RNA (1)...(19): siRNA sense strand
gcucugggaggucuucuca

SEQ ID NO: 1179535 - RNA, 19 nt, Homo sapiens
  misc_RNA (1)...(19): siRNA sense strand
cgaagaugcaacacgagaa

SEQ ID NO: 1179536 - RNA, 19 nt, Homo sapiens
  misc_RNA (1)...(19): siRNA sense strand
aaagguggccgugaagaau

SEQ ID NO: 1179537 - RNA, 19 nt, Homo sapiens
  misc_RNA (1)...(19): siRNA sense strand
gggaggucuucucauaugg

SEQ ID NO: 1179538 - RNA, 19 nt, Homo sapiens
  misc_RNA (1)...(19): siRNA sense strand
gcucagcuccugcaguuuu

SEQ ID NO: 1179539 - RNA, 19 nt, Homo sapiens
  misc_RNA (1)...(19): siRNA sense strand
aagguggccgugaagaaua

SEQ ID NO: 1179540 - RNA, 19 nt, Homo sapiens
  misc_RNA (1)...(19): siRNA sense strand
gcacccaguguaucaccaa

SEQ ID NO: 1179541 - RNA, 19 nt, Homo sapiens
  misc_RNA (1)...(19): siRNA sense strand
ggacaugguggagcauuac

SEQ ID NO: 1179542 - RNA, 19 nt, Homo sapiens
  misc_RNA (1)...(19): siRNA sense strand
agggcaaccuggugaacuu

SEQ ID NO: 1179543 - RNA, 19 nt, Homo sapiens
  misc_RNA (1)...(19): siRNA sense strand
ucauggagcacgugagcaa

SEQ ID NO: 1179544 - RNA, 19 nt, Homo sapiens
  misc_RNA (1)...(19): siRNA sense strand
gaugaggccguguucuucu

SEQ ID NO: 1179545 - RNA, 19 nt, Homo sapiens
  misc_RNA (1)...(19): siRNA sense strand
ugucggaggccguggagaa

SEQ ID NO: 1179546 - RNA, 19 nt, Homo sapiens
  misc_RNA (1)...(19): siRNA sense strand
gagcugguaccgcgucaag

SEQ ID NO: 1179547 - RNA, 19 nt, Homo sapiens
  misc_RNA (1)...(19): siRNA sense strand
gugaguaccuggggcaaaa

SEQ ID NO: 1179548 - RNA, 19 nt, Homo sapiens
  misc_RNA (1)...(19): siRNA sense strand
gacauugggagcacagauc

SEQ ID NO: 1179549 - RNA, 19 nt, Homo sapiens
  misc_RNA (1)...(19): siRNA sense strand
gcaaacuggccgagaagcu

SEQ ID NO: 1179550 - RNA, 19 nt, Homo sapiens
  misc_RNA (1)...(19): siRNA sense strand
ccuaaaaugucacugaaag

SEQ ID NO: 1179551 - RNA, 19 nt, Homo sapiens
  misc_RNA (1)...(19): siRNA sense strand
gcugguaccgcgucaagca

SEQ ID NO: 1179552 - RNA, 19 nt, Homo sapiens
  misc_RNA (1)...(19): siRNA sense strand
gggcaaccuggugaacuuu

SEQ ID NO: 1179553 - RNA, 19 nt, Homo sapiens
  misc_RNA (1)...(19): siRNA sense strand
cgacggccaccucacaauc

SEQ ID NO: 1179554 - RNA, 19 nt, Homo sapiens
  misc_RNA (1)...(19): siRNA sense strand
ggugagaccaaagcggaaa

SEQ ID NO: 1179555 - RNA, 19 nt, Homo sapiens
  misc_RNA (1)...(19): siRNA sense strand
ucgaugaggccguguucuu

SEQ ID NO: 1179556 - RNA, 19 nt, Homo sapiens
  misc_RNA (1)...(19): siRNA sense strand
ugaagaauaucaaguguga

SEQ ID NO: 1179557 - RNA, 19 nt, Homo sapiens
  misc_RNA (1)...(19): siRNA sense strand
gaucggagagggagaguuu

SEQ ID NO: 1179558 - RNA, 19 nt, Homo sapiens
  misc_RNA (1)...(19): siRNA sense strand
ucugggaggucuucucaua

SEQ ID NO: 1179559 - RNA, 19 nt, Homo sapiens
  misc_RNA (1)...(19): siRNA sense strand
gcaacauccuggucucaga

SEQ ID NO: 1179560 - RNA, 19 nt, Homo sapiens
  misc_RNA (1)...(19): siRNA sense strand
ccgcucagcuccugcaguu

SEQ ID NO: 1179561 - RNA, 19 nt, Homo sapiens
  misc_RNA (1)...(19): siRNA sense strand
uacugaaccugcagcauuu

SEQ ID NO: 1179562 - RNA, 19 nt, Homo sapiens
  misc_RNA (1)...(19): siRNA sense strand
uuacugaaccugcagcauu

SEQ ID NO: 1179563 - RNA, 19 nt, Homo sapiens
  misc_RNA (1)...(19): siRNA sense strand
uggaguaccuggagagcaa

SEQ ID NO: 1179564 - RNA, 19 nt, Homo sapiens
  misc_RNA (1)...(19): siRNA sense strand
uggacaugguggagcauua

SEQ ID NO: 1179565 - RNA, 19 nt, Homo sapiens
  misc_RNA (1)...(19): siRNA sense strand
ugggaggucuucucauaug

SEQ ID NO: 1179566 - RNA, 19 nt, Homo sapiens
  misc_RNA (1)...(19): siRNA sense strand
ggaaacacgggaccaaguc

SEQ ID NO: 1179567 - RNA, 19 nt, Homo sapiens
  misc_RNA (1)...(19): siRNA sense strand
gcaaccuggugaacuuucu

SEQ ID NO: 1179568 - RNA, 19 nt, Homo sapiens
  misc_RNA (1)...(19): siRNA sense strand
ggaaggggcuagacucaag

SEQ ID NO: 1179569 - RNA, 19 nt, Homo sapiens
  misc_RNA (1)...(19): siRNA sense strand
cccaguguaucaccaaaug

SEQ ID NO: 1179570 - RNA, 19 nt, Homo sapiens
  misc_RNA (1)...(19): siRNA sense strand
agucggaugucuggaguuu

SEQ ID NO: 1179571 - RNA, 19 nt, Homo sapiens
  misc_RNA (1)...(19): siRNA sense strand
gaagaugcaacacgagaac

SEQ ID NO: 1179572 - RNA, 19 nt, Homo sapiens
  misc_RNA (1)...(19): siRNA sense strand
gaaccugcagcauuugaca

SEQ ID NO: 1179573 - RNA, 19 nt, Homo sapiens
  misc_RNA (1)...(19): siRNA sense strand
cgugaagaauaucaagugu

SEQ ID NO: 1179574 - RNA, 19 nt, Homo sapiens
  misc_RNA (1)...(19): siRNA sense strand
gcaagggcaaccuggugaa

SEQ ID NO: 1179575 - RNA, 19 nt, Homo sapiens
  misc_RNA (1)...(19): siRNA sense strand
gccgcgacgucauccacua

SEQ ID NO: 1179576 - RNA, 19 nt, Homo sapiens
  misc_RNA (1)...(19): siRNA sense strand
gcccgaggcucucaaacac

SEQ ID NO: 1179577 - RNA, 19 nt, Homo sapiens
  misc_RNA (1)...(19): siRNA sense strand
gcaaggacaagggcgcuau

SEQ ID NO: 1179578 - RNA, 19 nt, Homo sapiens
  misc_RNA (1)...(19): siRNA sense strand
gcgagaacaagagcuggua

SEQ ID NO: 1179579 - RNA, 19 nt, Homo sapiens
  misc_RNA (1)...(19): siRNA sense strand
ggaggucuucucauaugga

SEQ ID NO: 1179580 - RNA, 19 nt, Homo sapiens
  misc_RNA (1)...(19): siRNA sense strand
ggccaaggucagcgacuuu

SEQ ID NO: 1179581 - RNA, 19 nt, Homo sapiens
  misc_RNA (1)...(19): siRNA sense strand
ggcuguacauugucaugga

SEQ ID NO: 1179582 - RNA, 19 nt, Homo sapiens
  misc_RNA (1)...(19): siRNA sense strand
ggcaaaagguggccgugaa

SEQ ID NO: 1179583 - RNA, 19 nt, Homo sapiens
  misc_RNA (1)...(19): siRNA sense strand
gcucugggaggucuucuca

SEQ ID NO: 1179584 - RNA, 19 nt, Homo sapiens
  misc_RNA (1)...(19): siRNA sense strand
cgaagaugcaacacgagaa

SEQ ID NO: 1179585 - RNA, 19 nt, Homo sapiens
  misc_RNA (1)...(19): siRNA sense strand
aaagguggccgugaagaau

SEQ ID NO: 1179586 - RNA, 19 nt, Homo sapiens
  misc_RNA (1)...(19): siRNA sense strand
gggaggucuucucauaugg

SEQ ID NO: 1179587 - RNA, 19 nt, Homo sapiens
  misc_RNA (1)...(19): siRNA sense strand
gcucagcuccugcaguuuu

SEQ ID NO: 1179588 - RNA, 19 nt, Homo sapiens
  misc_RNA (1)...(19): siRNA sense strand
aagguggccgugaagaaua

SEQ ID NO: 1179589 - RNA, 19 nt, Homo sapiens
  misc_RNA (1)...(19): siRNA sense strand
gcacccaguguaucaccaa

SEQ ID NO: 1179590 - RNA, 19 nt, Homo sapiens
  misc_RNA (1)...(19): siRNA sense strand
ggacaugguggagcauuac

SEQ ID NO: 1179591 - RNA, 19 nt, Homo sapiens
  misc_RNA (1)...(19): siRNA sense strand
agggcaaccuggugaacuu

SEQ ID NO: 1179592 - RNA, 19 nt, Homo sapiens
  misc_RNA (1)...(19): siRNA sense strand
ucauggagcacgugagcaa

SEQ ID NO: 1179593 - RNA, 19 nt, Homo sapiens
  misc_RNA (1)...(19): siRNA sense strand
gaugaggccguguucuucu

SEQ ID NO: 1179594 - RNA, 19 nt, Homo sapiens
  misc_RNA (1)...(19): siRNA sense strand
ugucggaggccguggagaa

SEQ ID NO: 1179595 - RNA, 19 nt, Homo sapiens
  misc_RNA (1)...(19): siRNA sense strand
gagcugguaccgcgucaag

SEQ ID NO: 1179596 - RNA, 19 nt, Homo sapiens
  misc_RNA (1)...(19): siRNA sense strand
gugaguaccuggggcaaaa

SEQ ID NO: 1179597 - RNA, 19 nt, Homo sapiens
  misc_RNA (1)...(19): siRNA sense strand
gacauugggagcacagauc

SEQ ID NO: 1179598 - RNA, 19 nt, Homo sapiens
  misc_RNA (1)...(19): siRNA sense strand
gcaaacuggccgagaagcu

SEQ ID NO: 1179599 - RNA, 19 nt, Homo sapiens
  misc_RNA (1)...(19): siRNA sense strand
ccuaaaaugucacugaaag

SEQ ID NO: 1179600 - RNA, 19 nt, Homo sapiens
  misc_RNA (1)...(19): siRNA sense strand
gcugguaccgcgucaagca

SEQ ID NO: 1179601 - RNA, 19 nt, Homo sapiens
  misc_RNA (1)...(19): siRNA sense strand
gggcaaccuggugaacuuu

SEQ ID NO: 1179602 - RNA, 19 nt, Homo sapiens
  misc_RNA (1)...(19): siRNA sense strand
cgacggccaccucacaauc

SEQ ID NO: 1179603 - RNA, 19 nt, Homo sapiens
  misc_RNA (1)...(19): siRNA sense strand
ggugagaccaaagcggaaa

SEQ ID NO: 1179604 - RNA, 19 nt, Homo sapiens
  misc_RNA (1)...(19): siRNA sense strand
ucgaugaggccguguucuu

SEQ ID NO: 1179605 - RNA, 19 nt, Homo sapiens
  misc_RNA (1)...(19): siRNA sense strand
ugaagaauaucaaguguga

SEQ ID NO: 1179606 - RNA, 19 nt, Homo sapiens
  misc_RNA (1)...(19): siRNA sense strand
gaucggagagggagaguuu

SEQ ID NO: 1179607 - RNA, 19 nt, Homo sapiens
  misc_RNA (1)...(19): siRNA sense strand
ucugggaggucuucucaua

SEQ ID NO: 1179608 - RNA, 19 nt, Homo sapiens
  misc_RNA (1)...(19): siRNA sense strand
gcaacauccuggucucaga

SEQ ID NO: 1179609 - RNA, 19 nt, Homo sapiens
  misc_RNA (1)...(19): siRNA sense strand
ccgcucagcuccugcaguu

SEQ ID NO: 1179610 - RNA, 19 nt, Homo sapiens
  misc_RNA (1)...(19): siRNA sense strand
uacugaaccugcagcauuu

SEQ ID NO: 1179611 - RNA, 19 nt, Homo sapiens
  misc_RNA (1)...(19): siRNA sense strand
uuacugaaccugcagcauu

SEQ ID NO: 1179612 - RNA, 19 nt, Homo sapiens
  misc_RNA (1)...(19): siRNA sense strand
uggaguaccuggagagcaa

SEQ ID NO: 1179613 - RNA, 19 nt, Homo sapiens
  misc_RNA (1)...(19): siRNA sense strand
uggacaugguggagcauua

SEQ ID NO: 1179614 - RNA, 19 nt, Homo sapiens
  misc_RNA (1)...(19): siRNA sense strand
ugggaggucuucucauaug

SEQ ID NO: 1179615 - RNA, 19 nt, Homo sapiens
  misc_RNA (1)...(19): siRNA sense strand
ggaaacacgggaccaaguc

SEQ ID NO: 1179616 - RNA, 19 nt, Homo sapiens
  misc_RNA (1)...(19): siRNA sense strand
gcaaccuggugaacuuucu

SEQ ID NO: 1179617 - RNA, 19 nt, Homo sapiens
  misc_RNA (1)...(19): siRNA sense strand
ggaaggggcuagacucaag

SEQ ID NO: 1179618 - RNA, 19 nt, Homo sapiens
  misc_RNA (1)...(19): siRNA sense strand
cccaguguaucaccaaaug

SEQ ID NO: 1179619 - RNA, 19 nt, Homo sapiens
  misc_RNA (1)...(19): siRNA sense strand
agucggaugucuggaguuu

SEQ ID NO: 1179620 - RNA, 19 nt, Homo sapiens
  misc_RNA (1)...(19): siRNA sense strand
gaagaugcaacacgagaac

SEQ ID NO: 1179621 - RNA, 19 nt, Homo sapiens
  misc_RNA (1)...(19): siRNA sense strand
gaaccugcagcauuugaca

SEQ ID NO: 1179622 - RNA, 19 nt, Homo sapiens
  misc_RNA (1)...(19): siRNA sense strand
cgugaagaauaucaagugu

SEQ ID NO: 1179623 - RNA, 19 nt, Homo sapiens
  misc_RNA (1)...(19): siRNA sense strand
gcaagggcaaccuggugaa

SEQ ID NO: 1179624 - RNA, 19 nt, Homo sapiens
  misc_RNA (1)...(19): siRNA sense strand
gccgcgacgucauccacua

SEQ ID NO: 1179625 - RNA, 19 nt, Homo sapiens
  misc_RNA (1)...(19): siRNA sense strand
gcccgaggcucucaaacac

SEQ ID NO: 1179626 - RNA, 19 nt, Homo sapiens
  misc_RNA (1)...(19): siRNA sense strand
gcaaggacaagggcgcuau

SEQ ID NO: 1179627 - RNA, 19 nt, Homo sapiens
  misc_RNA (1)...(19): siRNA sense strand
ggcuguacauugucaugga

SEQ ID NO: 1179628 - RNA, 19 nt, Homo sapiens
  misc_RNA (1)...(19): siRNA sense strand
ggaggucuucucauaugga

SEQ ID NO: 1179629 - RNA, 19 nt, Homo sapiens
  misc_RNA (1)...(19): siRNA sense strand
gcgagaacaagagcuggua

SEQ ID NO: 1179630 - RNA, 19 nt, Homo sapiens
  misc_RNA (1)...(19): siRNA sense strand
ggccaaggucagcgacuuu

SEQ ID NO: 1179631 - RNA, 19 nt, Homo sapiens
  misc_RNA (1)...(19): siRNA sense strand
ggcaaaagguggccgugaa

SEQ ID NO: 1179632 - RNA, 19 nt, Homo sapiens
  misc_RNA (1)...(19): siRNA sense strand
gcucugggaggucuucuca

SEQ ID NO: 1179633 - RNA, 19 nt, Homo sapiens
  misc_RNA (1)...(19): siRNA sense strand
cgaagaugcaacacgagaa

SEQ ID NO: 1179634 - RNA, 19 nt, Homo sapiens
  misc_RNA (1)...(19): siRNA sense strand
aaagguggccgugaagaau

SEQ ID NO: 1179635 - RNA, 19 nt, Homo sapiens
  misc_RNA (1)...(19): siRNA sense strand
gggaggucuucucauaugg

SEQ ID NO: 1179636 - RNA, 19 nt, Homo sapiens
  misc_RNA (1)...(19): siRNA sense strand
gcucagcuccugcaguuuu

SEQ ID NO: 1179637 - RNA, 19 nt, Homo sapiens
  misc_RNA (1)...(19): siRNA sense strand
aagguggccgugaagaaua

SEQ ID NO: 1179638 - RNA, 19 nt, Homo sapiens
  misc_RNA (1)...(19): siRNA sense strand
gcacccaguguaucaccaa

SEQ ID NO: 1179639 - RNA, 19 nt, Homo sapiens
  misc_RNA (1)...(19): siRNA sense strand
ggacaugguggagcauuac

SEQ ID NO: 1179640 - RNA, 19 nt, Homo sapiens
  misc_RNA (1)...(19): siRNA sense strand
agggcaaccuggugaacuu

SEQ ID NO: 1179641 - RNA, 19 nt, Homo sapiens
  misc_RNA (1)...(19): siRNA sense strand
ucauggagcacgugagcaa

SEQ ID NO: 1179642 - RNA, 19 nt, Homo sapiens
  misc_RNA (1)...(19): siRNA sense strand
gaugaggccguguucuucu

SEQ ID NO: 1179643 - RNA, 19 nt, Homo sapiens
  misc_RNA (1)...(19): siRNA sense strand
ugucggaggccguggagaa

SEQ ID NO: 1179644 - RNA, 19 nt, Homo sapiens
  misc_RNA (1)...(19): siRNA sense strand
gugaguaccuggggcaaaa

SEQ ID NO: 1179645 - RNA, 19 nt, Homo sapiens
  misc_RNA (1)...(19): siRNA sense strand
gagcugguaccgcgucaag

SEQ ID NO: 1179646 - RNA, 19 nt, Homo sapiens
  misc_RNA (1)...(19): siRNA sense strand
gcugguaccgcgucaagca

SEQ ID NO: 1179647 - RNA, 19 nt, Homo sapiens
  misc_RNA (1)...(19): siRNA sense strand
gcaaacuggccgagaagcu

SEQ ID NO: 1179648 - RNA, 19 nt, Homo sapiens
  misc_RNA (1)...(19): siRNA sense strand
ccuaaaaugucacugaaag

SEQ ID NO: 1179649 - RNA, 19 nt, Homo sapiens
  misc_RNA (1)...(19): siRNA sense strand
gacauugggagcacagauc

SEQ ID NO: 1179650 - RNA, 19 nt, Homo sapiens
  misc_RNA (1)...(19): siRNA sense strand
cgacggccaccucacaauc

SEQ ID NO: 1179651 - RNA, 19 nt, Homo sapiens
  misc_RNA (1)...(19): siRNA sense strand
gggcaaccuggugaacuuu

SEQ ID NO: 1179652 - RNA, 19 nt, Homo sapiens
  misc_RNA (1)...(19): siRNA sense strand
ggugagaccaaagcggaaa

SEQ ID NO: 1179653 - RNA, 19 nt, Homo sapiens
  misc_RNA (1)...(19): siRNA sense strand
ucgaugaggccguguucuu

SEQ ID NO: 1179654 - RNA, 19 nt, Homo sapiens
  misc_RNA (1)...(19): siRNA sense strand
ugaagaauaucaaguguga

SEQ ID NO: 1179655 - RNA, 19 nt, Homo sapiens
  misc_RNA (1)...(19): siRNA sense strand
gaucggagagggagaguuu

SEQ ID NO: 1179656 - RNA, 19 nt, Homo sapiens
  misc_RNA (1)...(19): siRNA sense strand
ucugggaggucuucucaua

SEQ ID NO: 1179657 - RNA, 19 nt, Homo sapiens
  misc_RNA (1)...(19): siRNA sense strand
gcaacauccuggucucaga

SEQ ID NO: 1179658 - RNA, 19 nt, Homo sapiens
  misc_RNA (1)...(19): siRNA sense strand
ccgcucagcuccugcaguu

SEQ ID NO: 1179659 - RNA, 19 nt, Homo sapiens
  misc_RNA (1)...(19): siRNA sense strand
uacugaaccugcagcauuu

SEQ ID NO: 1179660 - RNA, 19 nt, Homo sapiens
  misc_RNA (1)...(19): siRNA sense strand
uuacugaaccugcagcauu

SEQ ID NO: 1179661 - RNA, 19 nt, Homo sapiens
  misc_RNA (1)...(19): siRNA sense strand
uggaguaccuggagagcaa

SEQ ID NO: 1179662 - RNA, 19 nt, Homo sapiens
  misc_RNA (1)...(19): siRNA sense strand
uggacaugguggagcauua

SEQ ID NO: 1179663 - RNA, 19 nt, Homo sapiens
  misc_RNA (1)...(19): siRNA sense strand
ugggaggucuucucauaug

SEQ ID NO: 1179664 - RNA, 19 nt, Homo sapiens
  misc_RNA (1)...(19): siRNA sense strand
ggaaacacgggaccaaguc

SEQ ID NO: 1179665 - RNA, 19 nt, Homo sapiens
  misc_RNA (1)...(19): siRNA sense strand
gcaaccuggugaacuuucu

SEQ ID NO: 1179666 - RNA, 19 nt, Homo sapiens
  misc_RNA (1)...(19): siRNA sense strand
ggaaggggcuagacucaag

SEQ ID NO: 1179667 - RNA, 19 nt, Homo sapiens
  misc_RNA (1)...(19): siRNA sense strand
cccaguguaucaccaaaug

SEQ ID NO: 1179668 - RNA, 19 nt, Homo sapiens
  misc_RNA (1)...(19): siRNA sense strand
agucggaugucuggaguuu

SEQ ID NO: 1179669 - RNA, 19 nt, Homo sapiens
  misc_RNA (1)...(19): siRNA sense strand
gaagaugcaacacgagaac

SEQ ID NO: 1179670 - RNA, 19 nt, Homo sapiens
  misc_RNA (1)...(19): siRNA sense strand
gaaccugcagcauuugaca

SEQ ID NO: 1179671 - RNA, 19 nt, Homo sapiens
  misc_RNA (1)...(19): siRNA sense strand
cgugaagaauaucaagugu

SEQ ID NO: 1179672 - RNA, 19 nt, Homo sapiens
  misc_RNA (1)...(19): siRNA sense strand
gcaagggcaaccuggugaa

SEQ ID NO: 1179673 - RNA, 19 nt, Homo sapiens
  misc_RNA (1)...(19): siRNA sense strand
gccgcgacgucauccacua

SEQ ID NO: 1179674 - RNA, 19 nt, Homo sapiens
  misc_RNA (1)...(19): siRNA sense strand
gcccgaggcucucaaacac

SEQ ID NO: 1179675 - RNA, 19 nt, Homo sapiens
  misc_RNA (1)...(19): siRNA sense strand
gcaaggacaagggcgcuau

SEQ ID NO: 1179676 - RNA, 19 nt, Homo sapiens
  misc_RNA (1)...(19): siRNA sense strand
gcgagaacaagagcuggua

SEQ ID NO: 1179677 - RNA, 19 nt, Homo sapiens
  misc_RNA (1)...(19): siRNA sense strand
ggaggucuucucauaugga

SEQ ID NO: 1179678 - RNA, 19 nt, Homo sapiens
  misc_RNA (1)...(19): siRNA sense strand
ggccaaggucagcgacuuu

SEQ ID NO: 1179679 - RNA, 19 nt, Homo sapiens
  misc_RNA (1)...(19): siRNA sense strand
ggcuguacauugucaugga

SEQ ID NO: 1179680 - RNA, 19 nt, Homo sapiens
  misc_RNA (1)...(19): siRNA sense strand
ggcaaaagguggccgugaa

SEQ ID NO: 1179681 - RNA, 19 nt, Homo sapiens
  misc_RNA (1)...(19): siRNA sense strand
gcucugggaggucuucuca

SEQ ID NO: 1179682 - RNA, 19 nt, Homo sapiens
  misc_RNA (1)...(19): siRNA sense strand
cgaagaugcaacacgagaa

SEQ ID NO: 1179683 - RNA, 19 nt, Homo sapiens
  misc_RNA (1)...(19): siRNA sense strand
aaagguggccgugaagaau

SEQ ID NO: 1179684 - RNA, 19 nt, Homo sapiens
  misc_RNA (1)...(19): siRNA sense strand
gggaggucuucucauaugg

SEQ ID NO: 1179685 - RNA, 19 nt, Homo sapiens
  misc_RNA (1)...(19): siRNA sense strand
gcucagcuccugcaguuuu

SEQ ID NO: 1179686 - RNA, 19 nt, Homo sapiens
  misc_RNA (1)...(19): siRNA sense strand
aagguggccgugaagaaua

SEQ ID NO: 1179687 - RNA, 19 nt, Homo sapiens
  misc_RNA (1)...(19): siRNA sense strand
gcacccaguguaucaccaa

SEQ ID NO: 1179688 - RNA, 19 nt, Homo sapiens
  misc_RNA (1)...(19): siRNA sense strand
ggacaugguggagcauuac

SEQ ID NO: 1179689 - RNA, 19 nt, Homo sapiens
  misc_RNA (1)...(19): siRNA sense strand
agggcaaccuggugaacuu

SEQ ID NO: 1179690 - RNA, 19 nt, Homo sapiens
  misc_RNA (1)...(19): siRNA sense strand
ucauggagcacgugagcaa

SEQ ID NO: 1179691 - RNA, 19 nt, Homo sapiens
  misc_RNA (1)...(19): siRNA sense strand
gaugaggccguguucuucu

SEQ ID NO: 1179692 - RNA, 19 nt, Homo sapiens
  misc_RNA (1)...(19): siRNA sense strand
ugucggaggccguggagaa

SEQ ID NO: 1179693 - RNA, 19 nt, Homo sapiens
  misc_RNA (1)...(19): siRNA sense strand
gagcugguaccgcgucaag

SEQ ID NO: 1179694 - RNA, 19 nt, Homo sapiens
  misc_RNA (1)...(19): siRNA sense strand
gugaguaccuggggcaaaa

SEQ ID NO: 1179695 - RNA, 19 nt, Homo sapiens
  misc_RNA (1)...(19): siRNA sense strand
gacauugggagcacagauc

SEQ ID NO: 1179696 - RNA, 19 nt, Homo sapiens
  misc_RNA (1)...(19): siRNA sense strand
gcaaacuggccgagaagcu

SEQ ID NO: 1179697 - RNA, 19 nt, Homo sapiens
  misc_RNA (1)...(19): siRNA sense strand
ccuaaaaugucacugaaag

SEQ ID NO: 1179698 - RNA, 19 nt, Homo sapiens
  misc_RNA (1)...(19): siRNA sense strand
gcugguaccgcgucaagca

SEQ ID NO: 1179699 - RNA, 19 nt, Homo sapiens
  misc_RNA (1)...(19): siRNA sense strand
gggcaaccuggugaacuuu

SEQ ID NO: 1179700 - RNA, 19 nt, Homo sapiens
  misc_RNA (1)...(19): siRNA sense strand
cgacggccaccucacaauc

SEQ ID NO: 1179701 - RNA, 19 nt, Homo sapiens
  misc_RNA (1)...(19): siRNA sense strand
ggugagaccaaagcggaaa

SEQ ID NO: 1179702 - RNA, 19 nt, Homo sapiens
  misc_RNA (1)...(19): siRNA sense strand
ucgaugaggccguguucuu

SEQ ID NO: 1179703 - RNA, 19 nt, Homo sapiens
  misc_RNA (1)...(19): siRNA sense strand
ugaagaauaucaaguguga

SEQ ID NO: 1179704 - RNA, 19 nt, Homo sapiens
  misc_RNA (1)...(19): siRNA sense strand
gaucggagagggagaguuu

SEQ ID NO: 1179705 - RNA, 19 nt, Homo sapiens
  misc_RNA (1)...(19): siRNA sense strand
ucugggaggucuucucaua

SEQ ID NO: 1179706 - RNA, 19 nt, Homo sapiens
  misc_RNA (1)...(19): siRNA sense strand
gcaacauccuggucucaga

SEQ ID NO: 1179707 - RNA, 19 nt, Homo sapiens
  misc_RNA (1)...(19): siRNA sense strand
ccgcucagcuccugcaguu

SEQ ID NO: 1179708 - RNA, 19 nt, Homo sapiens
  misc_RNA (1)...(19): siRNA sense strand
uacugaaccugcagcauuu

SEQ ID NO: 1179709 - RNA, 19 nt, Homo sapiens
  misc_RNA (1)...(19): siRNA sense strand
uuacugaaccugcagcauu

SEQ ID NO: 1179710 - RNA, 19 nt, Homo sapiens
  misc_RNA (1)...(19): siRNA sense strand
uggaguaccuggagagcaa

SEQ ID NO: 1179711 - RNA, 19 nt, Homo sapiens
  misc_RNA (1)...(19): siRNA sense strand
uggacaugguggagcauua

SEQ ID NO: 1179712 - RNA, 19 nt, Homo sapiens
  misc_RNA (1)...(19): siRNA sense strand
ugggaggucuucucauaug

SEQ ID NO: 1179713 - RNA, 19 nt, Homo sapiens
  misc_RNA (1)...(19): siRNA sense strand
ggaaacacgggaccaaguc

SEQ ID NO: 1179714 - RNA, 19 nt, Homo sapiens
  misc_RNA (1)...(19): siRNA sense strand
gcaaccuggugaacuuucu

SEQ ID NO: 1179715 - RNA, 19 nt, Homo sapiens
  misc_RNA (1)...(19): siRNA sense strand
ggaaggggcuagacucaag

SEQ ID NO: 1179716 - RNA, 19 nt, Homo sapiens
  misc_RNA (1)...(19): siRNA sense strand
cccaguguaucaccaaaug

SEQ ID NO: 1179717 - RNA, 19 nt, Homo sapiens
  misc_RNA (1)...(19): siRNA sense strand
agucggaugucuggaguuu

SEQ ID NO: 1179718 - RNA, 19 nt, Homo sapiens
  misc_RNA (1)...(19): siRNA sense strand
gaagaugcaacacgagaac

SEQ ID NO: 1179719 - RNA, 19 nt, Homo sapiens
  misc_RNA (1)...(19): siRNA sense strand
gaaccugcagcauuugaca

SEQ ID NO: 1179720 - RNA, 19 nt, Homo sapiens
  misc_RNA (1)...(19): siRNA sense strand
cgugaagaauaucaagugu

SEQ ID NO: 1179721 - RNA, 19 nt, Homo sapiens
  misc_RNA (1)...(19): siRNA sense strand
gcaagggcaaccuggugaa

SEQ ID NO: 1179722 - RNA, 19 nt, Homo sapiens
  misc_RNA (1)...(19): siRNA sense strand
gccgcgacgucauccacua

SEQ ID NO: 1179723 - RNA, 19 nt, Homo sapiens
  misc_RNA (1)...(19): siRNA sense strand
gcccgaggcucucaaacac

SEQ ID NO: 1179724 - RNA, 19 nt, Homo sapiens
  misc_RNA (1)...(19): siRNA sense strand
gcaaggacaagggcgcuau

SEQ ID NO: 1179725 - RNA, 19 nt, Homo sapiens
  misc_RNA (1)...(19): siRNA sense strand
gcgagaacaagagcuggua

SEQ ID NO: 1179726 - RNA, 19 nt, Homo sapiens
  misc_RNA (1)...(19): siRNA sense strand
ggaggucuucucauaugga

SEQ ID NO: 1179727 - RNA, 19 nt, Homo sapiens
  misc_RNA (1)...(19): siRNA sense strand
ggccaaggucagcgacuuu

SEQ ID NO: 1179728 - RNA, 19 nt, Homo sapiens
  misc_RNA (1)...(19): siRNA sense strand
ggcuguacauugucaugga

SEQ ID NO: 1179729 - RNA, 19 nt, Homo sapiens
  misc_RNA (1)...(19): siRNA sense strand
ggcaaaagguggccgugaa

SEQ ID NO: 1179730 - RNA, 19 nt, Homo sapiens
  misc_RNA (1)...(19): siRNA sense strand
gcucugggaggucuucuca

SEQ ID NO: 1179731 - RNA, 19 nt, Homo sapiens
  misc_RNA (1)...(19): siRNA sense strand
cgaagaugcaacacgagaa

SEQ ID NO: 1179732 - RNA, 19 nt, Homo sapiens
  misc_RNA (1)...(19): siRNA sense strand
aaagguggccgugaagaau

SEQ ID NO: 1179733 - RNA, 19 nt, Homo sapiens
  misc_RNA (1)...(19): siRNA sense strand
gggaggucuucucauaugg

SEQ ID NO: 1179734 - RNA, 19 nt, Homo sapiens
  misc_RNA (1)...(19): siRNA sense strand
gcucagcuccugcaguuuu

SEQ ID NO: 1179735 - RNA, 19 nt, Homo sapiens
  misc_RNA (1)...(19): siRNA sense strand
aagguggccgugaagaaua

SEQ ID NO: 1179736 - RNA, 19 nt, Homo sapiens
  misc_RNA (1)...(19): siRNA sense strand
gcacccaguguaucaccaa

SEQ ID NO: 1179737 - RNA, 19 nt, Homo sapiens
  misc_RNA (1)...(19): siRNA sense strand
ggacaugguggagcauuac

SEQ ID NO: 1179738 - RNA, 19 nt, Homo sapiens
  misc_RNA (1)...(19): siRNA sense strand
agggcaaccuggugaacuu

SEQ ID NO: 1179739 - RNA, 19 nt, Homo sapiens
  misc_RNA (1)...(19): siRNA sense strand
ucauggagcacgugagcaa

SEQ ID NO: 1179740 - RNA, 19 nt, Homo sapiens
  misc_RNA (1)...(19): siRNA sense strand
gaugaggccguguucuucu

SEQ ID NO: 1179741 - RNA, 19 nt, Homo sapiens
  misc_RNA (1)...(19): siRNA sense strand
ugucggaggccguggagaa

SEQ ID NO: 1179742 - RNA, 19 nt, Homo sapiens
  misc_RNA (1)...(19): siRNA sense strand
gagcugguaccgcgucaag

SEQ ID NO: 1179743 - RNA, 19 nt, Homo sapiens
  misc_RNA (1)...(19): siRNA sense strand
gugaguaccuggggcaaaa

SEQ ID NO: 1179744 - RNA, 19 nt, Homo sapiens
  misc_RNA (1)...(19): siRNA sense strand
gacauugggagcacagauc

SEQ ID NO: 1179745 - RNA, 19 nt, Homo sapiens
  misc_RNA (1)...(19): siRNA sense strand
gcaaacuggccgagaagcu

SEQ ID NO: 1179746 - RNA, 19 nt, Homo sapiens
  misc_RNA (1)...(19): siRNA sense strand
ccuaaaaugucacugaaag

SEQ ID NO: 1179747 - RNA, 19 nt, Homo sapiens
  misc_RNA (1)...(19): siRNA sense strand
gcugguaccgcgucaagca

SEQ ID NO: 1179748 - RNA, 19 nt, Homo sapiens
  misc_RNA (1)...(19): siRNA sense strand
gggcaaccuggugaacuuu

SEQ ID NO: 1179749 - RNA, 19 nt, Homo sapiens
  misc_RNA (1)...(19): siRNA sense strand
cgacggccaccucacaauc

SEQ ID NO: 1179750 - RNA, 19 nt, Homo sapiens
  misc_RNA (1)...(19): siRNA sense strand
ggugagaccaaagcggaaa

SEQ ID NO: 1179751 - RNA, 19 nt, Homo sapiens
  misc_RNA (1)...(19): siRNA sense strand
ucgaugaggccguguucuu

SEQ ID NO: 1179752 - RNA, 19 nt, Homo sapiens
  misc_RNA (1)...(19): siRNA sense strand
ugaagaauaucaaguguga

SEQ ID NO: 1179753 - RNA, 19 nt, Homo sapiens
  misc_RNA (1)...(19): siRNA sense strand
gaucggagagggagaguuu

SEQ ID NO: 1179754 - RNA, 19 nt, Homo sapiens
  misc_RNA (1)...(19): siRNA sense strand
ucugggaggucuucucaua

SEQ ID NO: 1179755 - RNA, 19 nt, Homo sapiens
  misc_RNA (1)...(19): siRNA sense strand
gcaacauccuggucucaga

SEQ ID NO: 1179756 - RNA, 19 nt, Homo sapiens
  misc_RNA (1)...(19): siRNA sense strand
ccgcucagcuccugcaguu

SEQ ID NO: 1179757 - RNA, 19 nt, Homo sapiens
  misc_RNA (1)...(19): siRNA sense strand
uacugaaccugcagcauuu

SEQ ID NO: 1179758 - RNA, 19 nt, Homo sapiens
  misc_RNA (1)...(19): siRNA sense strand
uuacugaaccugcagcauu

SEQ ID NO: 1179759 - RNA, 19 nt, Homo sapiens
  misc_RNA (1)...(19): siRNA sense strand
uggaguaccuggagagcaa

SEQ ID NO: 1179760 - RNA, 19 nt, Homo sapiens
  misc_RNA (1)...(19): siRNA sense strand
uggacaugguggagcauua

SEQ ID NO: 1179761 - RNA, 19 nt, Homo sapiens
  misc_RNA (1)...(19): siRNA sense strand
ugggaggucuucucauaug

SEQ ID NO: 1179762 - RNA, 19 nt, Homo sapiens
  misc_RNA (1)...(19): siRNA sense strand
ggaaacacgggaccaaguc

SEQ ID NO: 1179763 - RNA, 19 nt, Homo sapiens
  misc_RNA (1)...(19): siRNA sense strand
gcaaccuggugaacuuucu

SEQ ID NO: 1179764 - RNA, 19 nt, Homo sapiens
  misc_RNA (1)...(19): siRNA sense strand
ggaaggggcuagacucaag

SEQ ID NO: 1179765 - RNA, 19 nt, Homo sapiens
  misc_RNA (1)...(19): siRNA sense strand
cccaguguaucaccaaaug

SEQ ID NO: 1179766 - RNA, 19 nt, Homo sapiens
  misc_RNA (1)...(19): siRNA sense strand
agucggaugucuggaguuu

SEQ ID NO: 1179767 - RNA, 19 nt, Homo sapiens
  misc_RNA (1)...(19): siRNA sense strand
gaagaugcaacacgagaac

SEQ ID NO: 1179768 - RNA, 19 nt, Homo sapiens
  misc_RNA (1)...(19): siRNA sense strand
gaaccugcagcauuugaca

SEQ ID NO: 1179769 - RNA, 19 nt, Homo sapiens
  misc_RNA (1)...(19): siRNA sense strand
cgugaagaauaucaagugu

SEQ ID NO: 1179770 - RNA, 19 nt, Homo sapiens
  misc_RNA (1)...(19): siRNA sense strand
gcaagggcaaccuggugaa

SEQ ID NO: 1179771 - RNA, 19 nt, Homo sapiens
  misc_RNA (1)...(19): siRNA sense strand
gccgcgacgucauccacua

SEQ ID NO: 1179772 - RNA, 19 nt, Homo sapiens
  misc_RNA (1)...(19): siRNA sense strand
gcccgaggcucucaaacac

SEQ ID NO: 1179773 - RNA, 19 nt, Homo sapiens
  misc_RNA (1)...(19): siRNA sense strand
gcaaggacaagggcgcuau

SEQ ID NO: 1179774 - RNA, 19 nt, Homo sapiens
  misc_RNA (1)...(19): siRNA sense strand
ggcuguacauugucaugga

SEQ ID NO: 1179775 - RNA, 19 nt, Homo sapiens
  misc_RNA (1)...(19): siRNA sense strand
ggaggucuucucauaugga

SEQ ID NO: 1179776 - RNA, 19 nt, Homo sapiens
  misc_RNA (1)...(19): siRNA sense strand
gcgagaacaagagcuggua

SEQ ID NO: 1179777 - RNA, 19 nt, Homo sapiens
  misc_RNA (1)...(19): siRNA sense strand
ggccaaggucagcgacuuu

SEQ ID NO: 1179778 - RNA, 19 nt, Homo sapiens
  misc_RNA (1)...(19): siRNA sense strand
ggcaaaagguggccgugaa

SEQ ID NO: 1179779 - RNA, 19 nt, Homo sapiens
  misc_RNA (1)...(19): siRNA sense strand
gcucugggaggucuucuca

SEQ ID NO: 1179780 - RNA, 19 nt, Homo sapiens
  misc_RNA (1)...(19): siRNA sense strand
cgaagaugcaacacgagaa

SEQ ID NO: 1179781 - RNA, 19 nt, Homo sapiens
  misc_RNA (1)...(19): siRNA sense strand
aaagguggccgugaagaau

SEQ ID NO: 1179782 - RNA, 19 nt, Homo sapiens
  misc_RNA (1)...(19): siRNA sense strand
gggaggucuucucauaugg

SEQ ID NO: 1179783 - RNA, 19 nt, Homo sapiens
  misc_RNA (1)...(19): siRNA sense strand
gcucagcuccugcaguuuu

SEQ ID NO: 1179784 - RNA, 19 nt, Homo sapiens
  misc_RNA (1)...(19): siRNA sense strand
aagguggccgugaagaaua

SEQ ID NO: 1179785 - RNA, 19 nt, Homo sapiens
  misc_RNA (1)...(19): siRNA sense strand
gcacccaguguaucaccaa

SEQ ID NO: 1179786 - RNA, 19 nt, Homo sapiens
  misc_RNA (1)...(19): siRNA sense strand
ggacaugguggagcauuac

SEQ ID NO: 1179787 - RNA, 19 nt, Homo sapiens
  misc_RNA (1)...(19): siRNA sense strand
agggcaaccuggugaacuu

SEQ ID NO: 1179788 - RNA, 19 nt, Homo sapiens
  misc_RNA (1)...(19): siRNA sense strand
ucauggagcacgugagcaa

SEQ ID NO: 1179789 - RNA, 19 nt, Homo sapiens
  misc_RNA (1)...(19): siRNA sense strand
gaugaggccguguucuucu

SEQ ID NO: 1179790 - RNA, 19 nt, Homo sapiens
  misc_RNA (1)...(19): siRNA sense strand
ugucggaggccguggagaa

SEQ ID NO: 1179791 - RNA, 19 nt, Homo sapiens
  misc_RNA (1)...(19): siRNA sense strand
gugaguaccuggggcaaaa

SEQ ID NO: 1179792 - RNA, 19 nt, Homo sapiens
  misc_RNA (1)...(19): siRNA sense strand
gagcugguaccgcgucaag

SEQ ID NO: 1179793 - RNA, 19 nt, Homo sapiens
  misc_RNA (1)...(19): siRNA sense strand
gcugguaccgcgucaagca

SEQ ID NO: 1179794 - RNA, 19 nt, Homo sapiens
  misc_RNA (1)...(19): siRNA sense strand
gcaaacuggccgagaagcu

SEQ ID NO: 1179795 - RNA, 19 nt, Homo sapiens
  misc_RNA (1)...(19): siRNA sense strand
ccuaaaaugucacugaaag

SEQ ID NO: 1179796 - RNA, 19 nt, Homo sapiens
  misc_RNA (1)...(19): siRNA sense strand
gacauugggagcacagauc

SEQ ID NO: 1179797 - RNA, 19 nt, Homo sapiens
  misc_RNA (1)...(19): siRNA sense strand
cgacggccaccucacaauc

SEQ ID NO: 1179798 - RNA, 19 nt, Homo sapiens
  misc_RNA (1)...(19): siRNA sense strand
gggcaaccuggugaacuuu

SEQ ID NO: 1179799 - RNA, 19 nt, Homo sapiens
  misc_RNA (1)...(19): siRNA sense strand
ggugagaccaaagcggaaa

SEQ ID NO: 1179800 - RNA, 19 nt, Homo sapiens
  misc_RNA (1)...(19): siRNA sense strand
ucgaugaggccguguucuu

SEQ ID NO: 1179801 - RNA, 19 nt, Homo sapiens
  misc_RNA (1)...(19): siRNA sense strand
ugaagaauaucaaguguga

SEQ ID NO: 1179802 - RNA, 19 nt, Homo sapiens
  misc_RNA (1)...(19): siRNA sense strand
gaucggagagggagaguuu

SEQ ID NO: 1179803 - RNA, 19 nt, Homo sapiens
  misc_RNA (1)...(19): siRNA sense strand
ucugggaggucuucucaua

SEQ ID NO: 1179804 - RNA, 19 nt, Homo sapiens
  misc_RNA (1)...(19): siRNA sense strand
gcaacauccuggucucaga

SEQ ID NO: 1179805 - RNA, 19 nt, Homo sapiens
  misc_RNA (1)...(19): siRNA sense strand
ccgcucagcuccugcaguu

SEQ ID NO: 1179806 - RNA, 19 nt, Homo sapiens
  misc_RNA (1)...(19): siRNA sense strand
uacugaaccugcagcauuu

SEQ ID NO: 1179807 - RNA, 19 nt, Homo sapiens
  misc_RNA (1)...(19): siRNA sense strand
uuacugaaccugcagcauu

SEQ ID NO: 1179808 - RNA, 19 nt, Homo sapiens
  misc_RNA (1)...(19): siRNA sense strand
uggaguaccuggagagcaa

SEQ ID NO: 1179809 - RNA, 19 nt, Homo sapiens
  misc_RNA (1)...(19): siRNA sense strand
uggacaugguggagcauua

SEQ ID NO: 1179810 - RNA, 19 nt, Homo sapiens
  misc_RNA (1)...(19): siRNA sense strand
ugggaggucuucucauaug

SEQ ID NO: 1179811 - RNA, 19 nt, Homo sapiens
  misc_RNA (1)...(19): siRNA sense strand
ggaaacacgggaccaaguc

SEQ ID NO: 1179812 - RNA, 19 nt, Homo sapiens
  misc_RNA (1)...(19): siRNA sense strand
gcaaccuggugaacuuucu

SEQ ID NO: 1179813 - RNA, 19 nt, Homo sapiens
  misc_RNA (1)...(19): siRNA sense strand
ggaaggggcuagacucaag

SEQ ID NO: 1179814 - RNA, 19 nt, Homo sapiens
  misc_RNA (1)...(19): siRNA sense strand
cccaguguaucaccaaaug

SEQ ID NO: 1179815 - RNA, 19 nt, Homo sapiens
  misc_RNA (1)...(19): siRNA sense strand
agucggaugucuggaguuu

SEQ ID NO: 1179816 - RNA, 19 nt, Homo sapiens
  misc_RNA (1)...(19): siRNA sense strand
gaagaugcaacacgagaac

SEQ ID NO: 1179817 - RNA, 19 nt, Homo sapiens
  misc_RNA (1)...(19): siRNA sense strand
gaaccugcagcauuugaca

SEQ ID NO: 1179818 - RNA, 19 nt, Homo sapiens
  misc_RNA (1)...(19): siRNA sense strand
cgugaagaauaucaagugu

SEQ ID NO: 1179819 - RNA, 19 nt, Homo sapiens
  misc_RNA (1)...(19): siRNA sense strand
gcaagggcaaccuggugaa

SEQ ID NO: 1179820 - RNA, 19 nt, Homo sapiens
  misc_RNA (1)...(19): siRNA sense strand
gccgcgacgucauccacua

SEQ ID NO: 1179821 - RNA, 19 nt, Homo sapiens
  misc_RNA (1)...(19): siRNA sense strand
gcccgaggcucucaaacac

SEQ ID NO: 1179822 - RNA, 19 nt, Homo sapiens
  misc_RNA (1)...(19): siRNA sense strand
gcaaggacaagggcgcuau

SEQ ID NO: 1179823 - RNA, 19 nt, Homo sapiens
  misc_RNA (1)...(19): siRNA sense strand
gcgagaacaagagcuggua

SEQ ID NO: 1179824 - RNA, 19 nt, Homo sapiens
  misc_RNA (1)...(19): siRNA sense strand
ggaggucuucucauaugga

SEQ ID NO: 1179825 - RNA, 19 nt, Homo sapiens
  misc_RNA (1)...(19): siRNA sense strand
ggccaaggucagcgacuuu

SEQ ID NO: 1179826 - RNA, 19 nt, Homo sapiens
  misc_RNA (1)...(19): siRNA sense strand
ggcuguacauugucaugga

SEQ ID NO: 1179827 - RNA, 19 nt, Homo sapiens
  misc_RNA (1)...(19): siRNA sense strand
ggcaaaagguggccgugaa

SEQ ID NO: 1179828 - RNA, 19 nt, Homo sapiens
  misc_RNA (1)...(19): siRNA sense strand
gcucugggaggucuucuca

SEQ ID NO: 1179829 - RNA, 19 nt, Homo sapiens
  misc_RNA (1)...(19): siRNA sense strand
cgaagaugcaacacgagaa

SEQ ID NO: 1179830 - RNA, 19 nt, Homo sapiens
  misc_RNA (1)...(19): siRNA sense strand
aaagguggccgugaagaau

SEQ ID NO: 1179831 - RNA, 19 nt, Homo sapiens
  misc_RNA (1)...(19): siRNA sense strand
gggaggucuucucauaugg

SEQ ID NO: 1179832 - RNA, 19 nt, Homo sapiens
  misc_RNA (1)...(19): siRNA sense strand
gcucagcuccugcaguuuu

SEQ ID NO: 1179833 - RNA, 19 nt, Homo sapiens
  misc_RNA (1)...(19): siRNA sense strand
aagguggccgugaagaaua

SEQ ID NO: 1179834 - RNA, 19 nt, Homo sapiens
  misc_RNA (1)...(19): siRNA sense strand
gcacccaguguaucaccaa

SEQ ID NO: 1179835 - RNA, 19 nt, Homo sapiens
  misc_RNA (1)...(19): siRNA sense strand
ggacaugguggagcauuac

SEQ ID NO: 1179836 - RNA, 19 nt, Homo sapiens
  misc_RNA (1)...(19): siRNA sense strand
agggcaaccuggugaacuu

SEQ ID NO: 1179837 - RNA, 19 nt, Homo sapiens
  misc_RNA (1)...(19): siRNA sense strand
ucauggagcacgugagcaa

SEQ ID NO: 1179838 - RNA, 19 nt, Homo sapiens
  misc_RNA (1)...(19): siRNA sense strand
gaugaggccguguucuucu

SEQ ID NO: 1179839 - RNA, 19 nt, Homo sapiens
  misc_RNA (1)...(19): siRNA sense strand
ugucggaggccguggagaa

SEQ ID NO: 1179840 - RNA, 19 nt, Homo sapiens
  misc_RNA (1)...(19): siRNA sense strand
gagcugguaccgcgucaag

SEQ ID NO: 1179841 - RNA, 19 nt, Homo sapiens
  misc_RNA (1)...(19): siRNA sense strand
gugaguaccuggggcaaaa

SEQ ID NO: 1179842 - RNA, 19 nt, Homo sapiens
  misc_RNA (1)...(19): siRNA sense strand
gacauugggagcacagauc

SEQ ID NO: 1179843 - RNA, 19 nt, Homo sapiens
  misc_RNA (1)...(19): siRNA sense strand
gcaaacuggccgagaagcu

SEQ ID NO: 1179844 - RNA, 19 nt, Homo sapiens
  misc_RNA (1)...(19): siRNA sense strand
ccuaaaaugucacugaaag

SEQ ID NO: 1179845 - RNA, 19 nt, Homo sapiens
  misc_RNA (1)...(19): siRNA sense strand
gcugguaccgcgucaagca

SEQ ID NO: 1179846 - RNA, 19 nt, Homo sapiens
  misc_RNA (1)...(19): siRNA sense strand
gggcaaccuggugaacuuu

SEQ ID NO: 1179847 - RNA, 19 nt, Homo sapiens
  misc_RNA (1)...(19): siRNA sense strand
cgacggccaccucacaauc

SEQ ID NO: 1179848 - RNA, 19 nt, Homo sapiens
  misc_RNA (1)...(19): siRNA sense strand
ggugagaccaaagcggaaa

SEQ ID NO: 1179849 - RNA, 19 nt, Homo sapiens
  misc_RNA (1)...(19): siRNA sense strand
ucgaugaggccguguucuu

SEQ ID NO: 1179850 - RNA, 19 nt, Homo sapiens
  misc_RNA (1)...(19): siRNA sense strand
ggaagaucauccaguguuu

SEQ ID NO: 1179851 - RNA, 19 nt, Homo sapiens
  misc_RNA (1)...(19): siRNA sense strand
gaagagaccaauauuccua

SEQ ID NO: 1179852 - RNA, 19 nt, Homo sapiens
  misc_RNA (1)...(19): siRNA sense strand
gagaagguguuacggaaau

SEQ ID NO: 1179853 - RNA, 19 nt, Homo sapiens
  misc_RNA (1)...(19): siRNA sense strand
aaagagagaugacagcaau

SEQ ID NO: 1179854 - RNA, 19 nt, Homo sapiens
  misc_RNA (1)...(19): siRNA sense strand
ggaaaucggccuacaagau

SEQ ID NO: 1179855 - RNA, 19 nt, Homo sapiens
  misc_RNA (1)...(19): siRNA sense strand
gaagaaggaauuugaacug

SEQ ID NO: 1179856 - RNA, 19 nt, Homo sapiens
  misc_RNA (1)...(19): siRNA sense strand
gcaagauccucugcuucua

SEQ ID NO: 1179857 - RNA, 19 nt, Homo sapiens
  misc_RNA (1)...(19): siRNA sense strand
uaaagaucaucaagaagga

SEQ ID NO: 1179858 - RNA, 19 nt, Homo sapiens
  misc_RNA (1)...(19): siRNA sense strand
gcaaguacagcaacgagaa

SEQ ID NO: 1179859 - RNA, 19 nt, Homo sapiens
  misc_RNA (1)...(19): siRNA sense strand
ucaagauuaucgagguuaa

SEQ ID NO: 1179860 - RNA, 19 nt, Homo sapiens
  misc_RNA (1)...(19): siRNA sense strand
gcaaguggagaagguguua

SEQ ID NO: 1179861 - RNA, 19 nt, Homo sapiens
  misc_RNA (1)...(19): siRNA sense strand
ggacaucauugccuugaac

SEQ ID NO: 1179862 - RNA, 19 nt, Homo sapiens
  misc_RNA (1)...(19): siRNA sense strand
gagccuggaugaaaucuac

SEQ ID NO: 1179863 - RNA, 19 nt, Homo sapiens
  misc_RNA (1)...(19): siRNA sense strand
gcgcauguaugacgugaca

SEQ ID NO: 1179864 - RNA, 19 nt, Homo sapiens
  misc_RNA (1)...(19): siRNA sense strand
ccaagcacgucauggaugu

SEQ ID NO: 1179865 - RNA, 19 nt, Homo sapiens
  misc_RNA (1)...(19): siRNA sense strand
ggagaaggacgacaaggau

SEQ ID NO: 1179866 - RNA, 19 nt, Homo sapiens
  misc_RNA (1)...(19): siRNA sense strand
gcauggaggacgucaagaa

SEQ ID NO: 1179867 - RNA, 19 nt, Homo sapiens
  misc_RNA (1)...(19): siRNA sense strand
gggaagaucauccaguguu

SEQ ID NO: 1179868 - RNA, 19 nt, Homo sapiens
  misc_RNA (1)...(19): siRNA sense strand
guauggagaugaucaacgu

SEQ ID NO: 1179869 - RNA, 19 nt, Homo sapiens
  misc_RNA (1)...(19): siRNA sense strand
ccaaggugcuguucaucug

SEQ ID NO: 1179870 - RNA, 19 nt, Homo sapiens
  misc_RNA (1)...(19): siRNA sense strand
ugacugacguggcugagau

SEQ ID NO: 1179871 - RNA, 19 nt, Homo sapiens
  misc_RNA (1)...(19): siRNA sense strand
ccgagaaccugcaggacuu

SEQ ID NO: 1179872 - RNA, 19 nt, Homo sapiens
  misc_RNA (1)...(19): siRNA sense strand
ccaacuuccuggaccacua

SEQ ID NO: 1179873 - RNA, 19 nt, Homo sapiens
  misc_RNA (1)...(19): siRNA sense strand
ggagaagguguuacggaaa

SEQ ID NO: 1179874 - RNA, 19 nt, Homo sapiens
  misc_RNA (1)...(19): siRNA sense strand
aagaaggaauuugaacuga

SEQ ID NO: 1179875 - RNA, 19 nt, Homo sapiens
  misc_RNA (1)...(19): siRNA sense strand
cgagaguacuuccgcuuca

SEQ ID NO: 1179876 - RNA, 19 nt, Homo sapiens
  misc_RNA (1)...(19): siRNA sense strand
ucaagcagacccaccguaa

SEQ ID NO: 1179877 - RNA, 19 nt, Homo sapiens
  misc_RNA (1)...(19): siRNA sense strand
gggacaagcugcgcaugau

SEQ ID NO: 1179878 - RNA, 19 nt, Homo sapiens
  misc_RNA (1)...(19): siRNA sense strand
ugacguggcugagaucaag

SEQ ID NO: 1179879 - RNA, 19 nt, Homo sapiens
  misc_RNA (1)...(19): siRNA sense strand
caagauccucugcuucuau

SEQ ID NO: 1179880 - RNA, 19 nt, Homo sapiens
  misc_RNA (1)...(19): siRNA sense strand
agaaacgcauccuggaguu

SEQ ID NO: 1179881 - RNA, 19 nt, Homo sapiens
  misc_RNA (1)...(19): siRNA sense strand
agcuaaagaucaucaagaa

SEQ ID NO: 1179882 - RNA, 19 nt, Homo sapiens
  misc_RNA (1)...(19): siRNA sense strand
gaagaucauccaguguuug

SEQ ID NO: 1179883 - RNA, 19 nt, Homo sapiens
  misc_RNA (1)...(19): siRNA sense strand
gagcaaggccaagcuguca

SEQ ID NO: 1179884 - RNA, 19 nt, Homo sapiens
  misc_RNA (1)...(19): siRNA sense strand
ggaggugcacuucguggaa

SEQ ID NO: 1179885 - RNA, 19 nt, Homo sapiens
  misc_RNA (1)...(19): siRNA sense strand
ucgagagccuggaugaaau

SEQ ID NO: 1179886 - RNA, 19 nt, Homo sapiens
  misc_RNA (1)...(19): siRNA sense strand
cgccagagccuuccucaug

SEQ ID NO: 1179887 - RNA, 19 nt, Homo sapiens
  misc_RNA (1)...(19): siRNA sense strand
gggagucagugcugcagau

SEQ ID NO: 1179888 - RNA, 19 nt, Homo sapiens
  misc_RNA (1)...(19): siRNA sense strand
uaucaagauuaucgagguu

SEQ ID NO: 1179889 - RNA, 19 nt, Homo sapiens
  misc_RNA (1)...(19): siRNA sense strand
cacagaagaguccauauca

SEQ ID NO: 1179890 - RNA, 19 nt, Homo sapiens
  misc_RNA (1)...(19): siRNA sense strand
aggcagugcuggaggaaga

SEQ ID NO: 1179891 - RNA, 19 nt, Homo sapiens
  misc_RNA (1)...(19): siRNA sense strand
gaccauccgggacaucauu

SEQ ID NO: 1179892 - RNA, 19 nt, Homo sapiens
  misc_RNA (1)...(19): siRNA sense strand
gaucauccaguguuugaag

SEQ ID NO: 1179893 - RNA, 19 nt, Homo sapiens
  misc_RNA (1)...(19): siRNA sense strand
cauggaggacgucaagaaa

SEQ ID NO: 1179894 - RNA, 19 nt, Homo sapiens
  misc_RNA (1)...(19): siRNA sense strand
cagcuaaagaucaucaaga

SEQ ID NO: 1179895 - RNA, 19 nt, Homo sapiens
  misc_RNA (1)...(19): siRNA sense strand
cugcagagaucgugaagac

SEQ ID NO: 1179896 - RNA, 19 nt, Homo sapiens
  misc_RNA (1)...(19): siRNA sense strand
gucgagagccuggaugaaa

SEQ ID NO: 1179897 - RNA, 19 nt, Homo sapiens
  misc_RNA (1)...(19): siRNA sense strand
agaagcaaguggagaaggu

SEQ ID NO: 1179898 - RNA, 19 nt, Homo sapiens
  misc_RNA (1)...(19): siRNA sense strand
ucgacgagguggacaagau

SEQ ID NO: 1179899 - RNA, 19 nt, Homo sapiens
  misc_RNA (1)...(19): siRNA sense strand
gagcagcuaaagaucauca

SEQ ID NO: 1179900 - RNA, 19 nt, Homo sapiens
  misc_RNA (1)...(19): siRNA sense strand
gcugaagaaggaauuugaa

SEQ ID NO: 1179901 - RNA, 19 nt, Homo sapiens
  misc_RNA (1)...(19): siRNA sense strand
aggagaagcuggccauugc

SEQ ID NO: 1179902 - RNA, 19 nt, Homo sapiens
  misc_RNA (1)...(19): siRNA sense strand
uaugucggcgucuuucuaa

SEQ ID NO: 1179903 - RNA, 19 nt, Homo sapiens
  misc_RNA (1)...(19): siRNA sense strand
gcacuucguggaacacuac

SEQ ID NO: 1179904 - RNA, 19 nt, Homo sapiens
  misc_RNA (1)...(19): siRNA sense strand
ccguggagcgcauguauga

SEQ ID NO: 1179905 - RNA, 19 nt, Homo sapiens
  misc_RNA (1)...(19): siRNA sense strand
ggcaagauccucugcuucu

SEQ ID NO: 1179906 - RNA, 19 nt, Homo sapiens
  misc_RNA (1)...(19): siRNA sense strand
gggacaucauugccuugaa

SEQ ID NO: 1179907 - RNA, 19 nt, Homo sapiens
  misc_RNA (1)...(19): siRNA sense strand
ggacaagcugcgcaugauc

SEQ ID NO: 1179908 - RNA, 19 nt, Homo sapiens
  misc_RNA (1)...(19): siRNA sense strand
gcaaggccaagcugucauc

SEQ ID NO: 1179909 - RNA, 19 nt, Homo sapiens
  misc_RNA (1)...(19): siRNA sense strand
gagaccguauggagaugau

SEQ ID NO: 1179910 - RNA, 19 nt, Homo sapiens
  misc_RNA (1)...(19): siRNA sense strand
aagauccucugcuucuaug

SEQ ID NO: 1179911 - RNA, 19 nt, Homo sapiens
  misc_RNA (1)...(19): siRNA sense strand
ugguugagcugcugagaag

SEQ ID NO: 1179912 - RNA, 19 nt, Homo sapiens
  misc_RNA (1)...(19): siRNA sense strand
agucagugcugcagaugau

SEQ ID NO: 1179913 - RNA, 19 nt, Homo sapiens
  misc_RNA (1)...(19): siRNA sense strand
uaaagagagaugacagcaa

SEQ ID NO: 1179914 - RNA, 19 nt, Homo sapiens
  misc_RNA (1)...(19): siRNA sense strand
uagacuggcucacguccau

SEQ ID NO: 1179915 - RNA, 19 nt, Homo sapiens
  misc_RNA (1)...(19): siRNA sense strand
acacagaagaguccauauc

SEQ ID NO: 1179916 - RNA, 19 nt, Homo sapiens
  misc_RNA (1)...(19): siRNA sense strand
gaacacuaccgggagaucu

SEQ ID NO: 1179917 - RNA, 19 nt, Homo sapiens
  misc_RNA (1)...(19): siRNA sense strand
aagaucauccaguguuuga

SEQ ID NO: 1179918 - RNA, 19 nt, Homo sapiens
  misc_RNA (1)...(19): siRNA sense strand
agagagaugacagcaauga

SEQ ID NO: 1179919 - RNA, 19 nt, Homo sapiens
  misc_RNA (1)...(19): siRNA sense strand
ggagguagagaacguuguc

SEQ ID NO: 1179920 - RNA, 19 nt, Homo sapiens
  misc_RNA (1)...(19): siRNA sense strand
ggaguucauugccguuagc

SEQ ID NO: 1179921 - RNA, 19 nt, Homo sapiens
  misc_RNA (1)...(19): siRNA sense strand
aagcagacccaccguaagu

SEQ ID NO: 1179922 - RNA, 19 nt, Homo sapiens
  misc_RNA (1)...(19): siRNA sense strand
ccagagccuuccucaugca

SEQ ID NO: 1179923 - RNA, 19 nt, Homo sapiens
  misc_RNA (1)...(19): siRNA sense strand
gugcugacgcugcucauca

SEQ ID NO: 1179924 - RNA, 19 nt, Homo sapiens
  misc_RNA (1)...(19): siRNA sense strand
cagagcagaaugccaacuu

SEQ ID NO: 1179925 - RNA, 19 nt, Homo sapiens
  misc_RNA (1)...(19): siRNA sense strand
caggagcagcuaaagauca

SEQ ID NO: 1179926 - RNA, 19 nt, Homo sapiens
  misc_RNA (1)...(19): siRNA sense strand
gcaggagcagcuaaagauc

SEQ ID NO: 1179927 - RNA, 19 nt, Homo sapiens
  misc_RNA (1)...(19): siRNA sense strand
gcagacccaccguaaguac

SEQ ID NO: 1179928 - RNA, 19 nt, Homo sapiens
  misc_RNA (1)...(19): siRNA sense strand
cgucaugggacacagaaga

SEQ ID NO: 1179929 - RNA, 19 nt, Homo sapiens
  misc_RNA (1)...(19): siRNA sense strand
cagccgagaacaagaagga

SEQ ID NO: 1179930 - RNA, 19 nt, Homo sapiens
  misc_RNA (1)...(19): siRNA sense strand
ugccaagggugacaaggau

SEQ ID NO: 1179931 - RNA, 19 nt, Homo sapiens
  misc_RNA (1)...(19): siRNA sense strand
agagcagaaugccaacuuc

SEQ ID NO: 1179932 - RNA, 19 nt, Homo sapiens
  misc_RNA (1)...(19): siRNA sense strand
caagauuaucgagguuaaa

SEQ ID NO: 1179933 - RNA, 19 nt, Homo sapiens
  misc_RNA (1)...(19): siRNA sense strand
caaugucacccgcaacuac

SEQ ID NO: 1179934 - RNA, 19 nt, Homo sapiens
  misc_RNA (1)...(19): siRNA sense strand
gcacgucauggauguugug

SEQ ID NO: 1179935 - RNA, 19 nt, Homo sapiens
  misc_RNA (1)...(19): siRNA sense strand
gaaacgcauccuggaguuc

SEQ ID NO: 1179936 - RNA, 19 nt, Homo sapiens
  misc_RNA (1)...(19): siRNA sense strand
caggagaagcuggccauug

SEQ ID NO: 1179937 - RNA, 19 nt, Homo sapiens
  misc_RNA (1)...(19): siRNA sense strand
gacgauccccgauguguuu

SEQ ID NO: 1179938 - RNA, 19 nt, Homo sapiens
  misc_RNA (1)...(19): siRNA sense strand
ucaaggagaagaccauugc

SEQ ID NO: 1179939 - RNA, 19 nt, Homo sapiens
  misc_RNA (1)...(19): siRNA sense strand
gaccguauggagaugauca

SEQ ID NO: 1179940 - RNA, 19 nt, Homo sapiens
  misc_RNA (1)...(19): siRNA sense strand
gcgagaccguauggagaug

SEQ ID NO: 1179941 - RNA, 19 nt, Homo sapiens
  misc_RNA (1)...(19): siRNA sense strand
gaucgucaugggacacaga

SEQ ID NO: 1179942 - RNA, 19 nt, Homo sapiens
  misc_RNA (1)...(19): siRNA sense strand
acagaagaguccauaucag

SEQ ID NO: 1179943 - RNA, 19 nt, Homo sapiens
  misc_RNA (1)...(19): siRNA sense strand
cgaccuggcagccuucauc

SEQ ID NO: 1179944 - RNA, 19 nt, Homo sapiens
  misc_RNA (1)...(19): siRNA sense strand
uguccaaggugcuguucau

SEQ ID NO: 1179945 - RNA, 19 nt, Homo sapiens
  misc_RNA (1)...(19): siRNA sense strand
aagagaccaauauuccuaa

SEQ ID NO: 1179946 - RNA, 19 nt, Homo sapiens
  misc_RNA (1)...(19): siRNA sense strand
aaacgcauccuggaguuca

SEQ ID NO: 1179947 - RNA, 19 nt, Homo sapiens
  misc_RNA (1)...(19): siRNA sense strand
guugagcugcugagaagga

SEQ ID NO: 1179948 - RNA, 19 nt, Homo sapiens
  misc_RNA (1)...(19): siRNA sense strand
gagaguacuuccgcuucag

SEQ ID NO: 1179949 - RNA, 19 nt, Homo sapiens
  misc_RNA (1)...(19): siRNA sense strand
guggguaagaccagcauug

SEQ ID NO: 1179950 - RNA, 19 nt, Homo sapiens
  misc_RNA (1)...(19): siRNA sense strand
ccaaggacaugaagaacaa

SEQ ID NO: 1179951 - RNA, 19 nt, Homo sapiens
  misc_RNA (1)...(19): siRNA sense strand
ucaagaaggucaagucaca

SEQ ID NO: 1179952 - RNA, 19 nt, Homo sapiens
  misc_RNA (1)...(19): siRNA sense strand
uggagaagcugcugguuca

SEQ ID NO: 1179953 - RNA, 19 nt, Homo sapiens
  misc_RNA (1)...(19): siRNA sense strand
ggacucguacccucgcuuu

SEQ ID NO: 1179954 - RNA, 19 nt, Homo sapiens
  misc_RNA (1)...(19): siRNA sense strand
gcuucgaccuggcacagaa

SEQ ID NO: 1179955 - RNA, 19 nt, Homo sapiens
  misc_RNA (1)...(19): siRNA sense strand
agaagcugcugguucacaa

SEQ ID NO: 1179956 - RNA, 19 nt, Homo sapiens
  misc_RNA (1)...(19): siRNA sense strand
gugaggagaaucuggaguu

SEQ ID NO: 1179957 - RNA, 19 nt, Homo sapiens
  misc_RNA (1)...(19): siRNA sense strand
gaagcugcugguucacaaa

SEQ ID NO: 1179958 - RNA, 19 nt, Homo sapiens
  misc_RNA (1)...(19): siRNA sense strand
cauccaaggccaagaagau

SEQ ID NO: 1179959 - RNA, 19 nt, Homo sapiens
  misc_RNA (1)...(19): siRNA sense strand
gcugcugguucacaaauac

SEQ ID NO: 1179960 - RNA, 19 nt, Homo sapiens
  misc_RNA (1)...(19): siRNA sense strand
ucacaaauacggguuagca

SEQ ID NO: 1179961 - RNA, 19 nt, Homo sapiens
  misc_RNA (1)...(19): siRNA sense strand
cuuauuaaccagaagaaga

SEQ ID NO: 1179962 - RNA, 19 nt, Homo sapiens
  misc_RNA (1)...(19): siRNA sense strand
cauucaagcccaccucaga

SEQ ID NO: 1179963 - RNA, 19 nt, Homo sapiens
  misc_RNA (1)...(19): siRNA sense strand
ugaggagaaucuggaguuc

SEQ ID NO: 1179964 - RNA, 19 nt, Homo sapiens
  misc_RNA (1)...(19): siRNA sense strand
gggcaaggcagacaaaaug

SEQ ID NO: 1179965 - RNA, 19 nt, Homo sapiens
  misc_RNA (1)...(19): siRNA sense strand
caucuucgggcucauggaa

SEQ ID NO: 1179966 - RNA, 19 nt, Homo sapiens
  misc_RNA (1)...(19): siRNA sense strand
gccaaggacaugaagaaca

SEQ ID NO: 1179967 - RNA, 19 nt, Homo sapiens
  misc_RNA (1)...(19): siRNA sense strand
ugaguucagugaggagaau

SEQ ID NO: 1179968 - RNA, 19 nt, Homo sapiens
  misc_RNA (1)...(19): siRNA sense strand
gagaagcugcugguucaca

SEQ ID NO: 1179969 - RNA, 19 nt, Homo sapiens
  misc_RNA (1)...(19): siRNA sense strand
ggaccuuauuaaccagaag

SEQ ID NO: 1179970 - RNA, 19 nt, Homo sapiens
  misc_RNA (1)...(19): siRNA sense strand
gggagcacaccaaggacaa

SEQ ID NO: 1179971 - RNA, 19 nt, Homo sapiens
  misc_RNA (1)...(19): siRNA sense strand
gaccucuaccuggaccuua

SEQ ID NO: 1179972 - RNA, 19 nt, Homo sapiens
  misc_RNA (1)...(19): siRNA sense strand
gaccuuauuaaccagaaga

SEQ ID NO: 1179973 - RNA, 19 nt, Homo sapiens
  misc_RNA (1)...(19): siRNA sense strand
ccaaggacaugaagaacaa

SEQ ID NO: 1179974 - RNA, 19 nt, Homo sapiens
  misc_RNA (1)...(19): siRNA sense strand
ucaagaaggucaagucaca

SEQ ID NO: 1179975 - RNA, 19 nt, Homo sapiens
  misc_RNA (1)...(19): siRNA sense strand
uggagaagcugcugguuca

SEQ ID NO: 1179976 - RNA, 19 nt, Homo sapiens
  misc_RNA (1)...(19): siRNA sense strand
ggacucguacccucgcuuu

SEQ ID NO: 1179977 - RNA, 19 nt, Homo sapiens
  misc_RNA (1)...(19): siRNA sense strand
gcuucgaccuggcacagaa

SEQ ID NO: 1179978 - RNA, 19 nt, Homo sapiens
  misc_RNA (1)...(19): siRNA sense strand
agaagcugcugguucacaa

SEQ ID NO: 1179979 - RNA, 19 nt, Homo sapiens
  misc_RNA (1)...(19): siRNA sense strand
gugaggagaaucuggaguu

SEQ ID NO: 1179980 - RNA, 19 nt, Homo sapiens
  misc_RNA (1)...(19): siRNA sense strand
gaagcugcugguucacaaa

SEQ ID NO: 1179981 - RNA, 19 nt, Homo sapiens
  misc_RNA (1)...(19): siRNA sense strand
cauccaaggccaagaagau

SEQ ID NO: 1179982 - RNA, 19 nt, Homo sapiens
  misc_RNA (1)...(19): siRNA sense strand
gcugcugguucacaaauac

SEQ ID NO: 1179983 - RNA, 19 nt, Homo sapiens
  misc_RNA (1)...(19): siRNA sense strand
ucacaaauacggguuagca

SEQ ID NO: 1179984 - RNA, 19 nt, Homo sapiens
  misc_RNA (1)...(19): siRNA sense strand
cuuauuaaccagaagaaga

SEQ ID NO: 1179985 - RNA, 19 nt, Homo sapiens
  misc_RNA (1)...(19): siRNA sense strand
cauucaagcccaccucaga

SEQ ID NO: 1179986 - RNA, 19 nt, Homo sapiens
  misc_RNA (1)...(19): siRNA sense strand
ugaggagaaucuggaguuc

SEQ ID NO: 1179987 - RNA, 19 nt, Homo sapiens
  misc_RNA (1)...(19): siRNA sense strand
gggcaaggcagacaaaaug

SEQ ID NO: 1179988 - RNA, 19 nt, Homo sapiens
  misc_RNA (1)...(19): siRNA sense strand
caucuucgggcucauggaa

SEQ ID NO: 1179989 - RNA, 19 nt, Homo sapiens
  misc_RNA (1)...(19): siRNA sense strand
gccaaggacaugaagaaca

SEQ ID NO: 1179990 - RNA, 19 nt, Homo sapiens
  misc_RNA (1)...(19): siRNA sense strand
ugaguucagugaggagaau

SEQ ID NO: 1179991 - RNA, 19 nt, Homo sapiens
  misc_RNA (1)...(19): siRNA sense strand
gagaagcugcugguucaca

SEQ ID NO: 1179992 - RNA, 19 nt, Homo sapiens
  misc_RNA (1)...(19): siRNA sense strand
ggaccuuauuaaccagaag

SEQ ID NO: 1179993 - RNA, 19 nt, Homo sapiens
  misc_RNA (1)...(19): siRNA sense strand
gggagcacaccaaggacaa

SEQ ID NO: 1179994 - RNA, 19 nt, Homo sapiens
  misc_RNA (1)...(19): siRNA sense strand
gaccucuaccuggaccuua

SEQ ID NO: 1179995 - RNA, 19 nt, Homo sapiens
  misc_RNA (1)...(19): siRNA sense strand
gaccuuauuaaccagaaga

SEQ ID NO: 1179996 - RNA, 19 nt, Homo sapiens
  misc_RNA (1)...(19): siRNA sense strand
ccaaggacaugaagaacaa

SEQ ID NO: 1179997 - RNA, 19 nt, Homo sapiens
  misc_RNA (1)...(19): siRNA sense strand
ucaagaaggucaagucaca

SEQ ID NO: 1179998 - RNA, 19 nt, Homo sapiens
  misc_RNA (1)...(19): siRNA sense strand
uggagaagcugcugguuca

SEQ ID NO: 1179999 - RNA, 19 nt, Homo sapiens
  misc_RNA (1)...(19): siRNA sense strand
ggacucguacccucgcuuu

SEQ ID NO: 1180000 - RNA, 19 nt, Homo sapiens
  misc_RNA (1)...(19): siRNA sense strand
gcuucgaccuggcacagaa

SEQ ID NO: 1180001 - RNA, 19 nt, Homo sapiens
  misc_RNA (1)...(19): siRNA sense strand
agaagcugcugguucacaa

SEQ ID NO: 1180002 - RNA, 19 nt, Homo sapiens
  misc_RNA (1)...(19): siRNA sense strand
gugaggagaaucuggaguu

SEQ ID NO: 1180003 - RNA, 19 nt, Homo sapiens
  misc_RNA (1)...(19): siRNA sense strand
gaagcugcugguucacaaa

SEQ ID NO: 1180004 - RNA, 19 nt, Homo sapiens
  misc_RNA (1)...(19): siRNA sense strand
cauccaaggccaagaagau

SEQ ID NO: 1180005 - RNA, 19 nt, Homo sapiens
  misc_RNA (1)...(19): siRNA sense strand
gcugcugguucacaaauac

SEQ ID NO: 1180006 - RNA, 19 nt, Homo sapiens
  misc_RNA (1)...(19): siRNA sense strand
ucacaaauacggguuagca

SEQ ID NO: 1180007 - RNA, 19 nt, Homo sapiens
  misc_RNA (1)...(19): siRNA sense strand
cuuauuaaccagaagaaga

SEQ ID NO: 1180008 - RNA, 19 nt, Homo sapiens
  misc_RNA (1)...(19): siRNA sense strand
cauucaagcccaccucaga

SEQ ID NO: 1180009 - RNA, 19 nt, Homo sapiens
  misc_RNA (1)...(19): siRNA sense strand
ugaggagaaucuggaguuc

SEQ ID NO: 1180010 - RNA, 19 nt, Homo sapiens
  misc_RNA (1)...(19): siRNA sense strand
gggcaaggcagacaaaaug

SEQ ID NO: 1180011 - RNA, 19 nt, Homo sapiens
  misc_RNA (1)...(19): siRNA sense strand
caucuucgggcucauggaa

SEQ ID NO: 1180012 - RNA, 19 nt, Homo sapiens
  misc_RNA (1)...(19): siRNA sense strand
gccaaggacaugaagaaca

SEQ ID NO: 1180013 - RNA, 19 nt, Homo sapiens
  misc_RNA (1)...(19): siRNA sense strand
ugaguucagugaggagaau

SEQ ID NO: 1180014 - RNA, 19 nt, Homo sapiens
  misc_RNA (1)...(19): siRNA sense strand
gagaagcugcugguucaca

SEQ ID NO: 1180015 - RNA, 19 nt, Homo sapiens
  misc_RNA (1)...(19): siRNA sense strand
ggaccuuauuaaccagaag

SEQ ID NO: 1180016 - RNA, 19 nt, Homo sapiens
  misc_RNA (1)...(19): siRNA sense strand
gggagcacaccaaggacaa

SEQ ID NO: 1180017 - RNA, 19 nt, Homo sapiens
  misc_RNA (1)...(19): siRNA sense strand
gaccucuaccuggaccuua

SEQ ID NO: 1180018 - RNA, 19 nt, Homo sapiens
  misc_RNA (1)...(19): siRNA sense strand
gaccuuauuaaccagaaga

SEQ ID NO: 1180019 - RNA, 19 nt, Homo sapiens
  misc_RNA (1)...(19): siRNA sense strand
ucaagaaggucaagucaca

SEQ ID NO: 1180020 - RNA, 19 nt, Homo sapiens
  misc_RNA (1)...(19): siRNA sense strand
uggagaagcugcugguuca

SEQ ID NO: 1180021 - RNA, 19 nt, Homo sapiens
  misc_RNA (1)...(19): siRNA sense strand
ggacucguacccucgcuuu

SEQ ID NO: 1180022 - RNA, 19 nt, Homo sapiens
  misc_RNA (1)...(19): siRNA sense strand
gcuucgaccuggcacagaa

SEQ ID NO: 1180023 - RNA, 19 nt, Homo sapiens
  misc_RNA (1)...(19): siRNA sense strand
agaagcugcugguucacaa

SEQ ID NO: 1180024 - RNA, 19 nt, Homo sapiens
  misc_RNA (1)...(19): siRNA sense strand
gugaggagaaucuggaguu

SEQ ID NO: 1180025 - RNA, 19 nt, Homo sapiens
  misc_RNA (1)...(19): siRNA sense strand
gaagcugcugguucacaaa

SEQ ID NO: 1180026 - RNA, 19 nt, Homo sapiens
  misc_RNA (1)...(19): siRNA sense strand
cauccaaggccaagaagau

SEQ ID NO: 1180027 - RNA, 19 nt, Homo sapiens
  misc_RNA (1)...(19): siRNA sense strand
gcugcugguucacaaauac

SEQ ID NO: 1180028 - RNA, 19 nt, Homo sapiens
  misc_RNA (1)...(19): siRNA sense strand
ucacaaauacggguuagca

SEQ ID NO: 1180029 - RNA, 19 nt, Homo sapiens
  misc_RNA (1)...(19): siRNA sense strand
cuuauuaaccagaagaaga

SEQ ID NO: 1180030 - RNA, 19 nt, Homo sapiens
  misc_RNA (1)...(19): siRNA sense strand
cauucaagcccaccucaga

SEQ ID NO: 1180031 - RNA, 19 nt, Homo sapiens
  misc_RNA (1)...(19): siRNA sense strand
ugaggagaaucuggaguuc

SEQ ID NO: 1180032 - RNA, 19 nt, Homo sapiens
  misc_RNA (1)...(19): siRNA sense strand
ugaguucagugaggagaau

SEQ ID NO: 1180033 - RNA, 19 nt, Homo sapiens
  misc_RNA (1)...(19): siRNA sense strand
caucuucgggcucauggaa

SEQ ID NO: 1180034 - RNA, 19 nt, Homo sapiens
  misc_RNA (1)...(19): siRNA sense strand
gggcaaggcagacaaaaug

SEQ ID NO: 1180035 - RNA, 19 nt, Homo sapiens
  misc_RNA (1)...(19): siRNA sense strand
gagaagcugcugguucaca

SEQ ID NO: 1180036 - RNA, 19 nt, Homo sapiens
  misc_RNA (1)...(19): siRNA sense strand
ggaccuuauuaaccagaag

SEQ ID NO: 1180037 - RNA, 19 nt, Homo sapiens
  misc_RNA (1)...(19): siRNA sense strand
gggagcacaccaaggacaa

SEQ ID NO: 1180038 - RNA, 19 nt, Homo sapiens
  misc_RNA (1)...(19): siRNA sense strand
gaccucuaccuggaccuua

SEQ ID NO: 1180039 - RNA, 19 nt, Homo sapiens
  misc_RNA (1)...(19): siRNA sense strand
gaccuuauuaaccagaaga

SEQ ID NO: 1180040 - RNA, 19 nt, Homo sapiens
  misc_RNA (1)...(19): siRNA sense strand
ccaaggacaugaagaacaa

SEQ ID NO: 1180041 - RNA, 19 nt, Homo sapiens
  misc_RNA (1)...(19): siRNA sense strand
ucaagaaggucaagucaca

SEQ ID NO: 1180042 - RNA, 19 nt, Homo sapiens
  misc_RNA (1)...(19): siRNA sense strand
uggagaagcugcugguuca

SEQ ID NO: 1180043 - RNA, 19 nt, Homo sapiens
  misc_RNA (1)...(19): siRNA sense strand
ggacucguacccucgcuuu

SEQ ID NO: 1180044 - RNA, 19 nt, Homo sapiens
  misc_RNA (1)...(19): siRNA sense strand
gcuucgaccuggcacagaa

SEQ ID NO: 1180045 - RNA, 19 nt, Homo sapiens
  misc_RNA (1)...(19): siRNA sense strand
agaagcugcugguucacaa

SEQ ID NO: 1180046 - RNA, 19 nt, Homo sapiens
  misc_RNA (1)...(19): siRNA sense strand
gugaggagaaucuggaguu

SEQ ID NO: 1180047 - RNA, 19 nt, Homo sapiens
  misc_RNA (1)...(19): siRNA sense strand
gaagcugcugguucacaaa

SEQ ID NO: 1180048 - RNA, 19 nt, Homo sapiens
  misc_RNA (1)...(19): siRNA sense strand
cauccaaggccaagaagau

SEQ ID NO: 1180049 - RNA, 19 nt, Homo sapiens
  misc_RNA (1)...(19): siRNA sense strand
gcugcugguucacaaauac

SEQ ID NO: 1180050 - RNA, 19 nt, Homo sapiens
  misc_RNA (1)...(19): siRNA sense strand
ucacaaauacggguuagca

SEQ ID NO: 1180051 - RNA, 19 nt, Homo sapiens
  misc_RNA (1)...(19): siRNA sense strand
cuuauuaaccagaagaaga

SEQ ID NO: 1180052 - RNA, 19 nt, Homo sapiens
  misc_RNA (1)...(19): siRNA sense strand
cauucaagcccaccucaga

SEQ ID NO: 1180053 - RNA, 19 nt, Homo sapiens
  misc_RNA (1)...(19): siRNA sense strand
ugaggagaaucuggaguuc

SEQ ID NO: 1180054 - RNA, 19 nt, Homo sapiens
  misc_RNA (1)...(19): siRNA sense strand
gggcaaggcagacaaaaug

SEQ ID NO: 1180055 - RNA, 19 nt, Homo sapiens
  misc_RNA (1)...(19): siRNA sense strand
caucuucgggcucauggaa

SEQ ID NO: 1180056 - RNA, 19 nt, Homo sapiens
  misc_RNA (1)...(19): siRNA sense strand
gccaaggacaugaagaaca

SEQ ID NO: 1180057 - RNA, 19 nt, Homo sapiens
  misc_RNA (1)...(19): siRNA sense strand
ugaguucagugaggagaau

SEQ ID NO: 1180058 - RNA, 19 nt, Homo sapiens
  misc_RNA (1)...(19): siRNA sense strand
gagaagcugcugguucaca

SEQ ID NO: 1180059 - RNA, 19 nt, Homo sapiens
  misc_RNA (1)...(19): siRNA sense strand
ggaccuuauuaaccagaag

SEQ ID NO: 1180060 - RNA, 19 nt, Homo sapiens
  misc_RNA (1)...(19): siRNA sense strand
gggagcacaccaaggacaa

SEQ ID NO: 1180061 - RNA, 19 nt, Homo sapiens
  misc_RNA (1)...(19): siRNA sense strand
gaccucuaccuggaccuua

SEQ ID NO: 1180062 - RNA, 19 nt, Homo sapiens
  misc_RNA (1)...(19): siRNA sense strand
gaccuuauuaaccagaaga

SEQ ID NO: 1180063 - RNA, 19 nt, Homo sapiens
  misc_RNA (1)...(19): siRNA sense strand
ccaaggacaugaagaacaa

SEQ ID NO: 1180064 - RNA, 19 nt, Homo sapiens
  misc_RNA (1)...(19): siRNA sense strand
ucaagaaggucaagucaca

SEQ ID NO: 1180065 - RNA, 19 nt, Homo sapiens
  misc_RNA (1)...(19): siRNA sense strand
uggagaagcugcugguuca

SEQ ID NO: 1180066 - RNA, 19 nt, Homo sapiens
  misc_RNA (1)...(19): siRNA sense strand
ggacucguacccucgcuuu

SEQ ID NO: 1180067 - RNA, 19 nt, Homo sapiens
  misc_RNA (1)...(19): siRNA sense strand
gcuucgaccuggcacagaa

SEQ ID NO: 1180068 - RNA, 19 nt, Homo sapiens
  misc_RNA (1)...(19): siRNA sense strand
agaagcugcugguucacaa

SEQ ID NO: 1180069 - RNA, 19 nt, Homo sapiens
  misc_RNA (1)...(19): siRNA sense strand
gugaggagaaucuggaguu

SEQ ID NO: 1180070 - RNA, 19 nt, Homo sapiens
  misc_RNA (1)...(19): siRNA sense strand
gaagcugcugguucacaaa

SEQ ID NO: 1180071 - RNA, 19 nt, Homo sapiens
  misc_RNA (1)...(19): siRNA sense strand
cauccaaggccaagaagau

SEQ ID NO: 1180072 - RNA, 19 nt, Homo sapiens
  misc_RNA (1)...(19): siRNA sense strand
gcugcugguucacaaauac

SEQ ID NO: 1180073 - RNA, 19 nt, Homo sapiens
  misc_RNA (1)...(19): siRNA sense strand
ucacaaauacggguuagca

SEQ ID NO: 1180074 - RNA, 19 nt, Homo sapiens
  misc_RNA (1)...(19): siRNA sense strand
cuuauuaaccagaagaaga

SEQ ID NO: 1180075 - RNA, 19 nt, Homo sapiens
  misc_RNA (1)...(19): siRNA sense strand
cauucaagcccaccucaga

SEQ ID NO: 1180076 - RNA, 19 nt, Homo sapiens
  misc_RNA (1)...(19): siRNA sense strand
ugaggagaaucuggaguuc

SEQ ID NO: 1180077 - RNA, 19 nt, Homo sapiens
  misc_RNA (1)...(19): siRNA sense strand
gggcaaggcagacaaaaug

SEQ ID NO: 1180078 - RNA, 19 nt, Homo sapiens
  misc_RNA (1)...(19): siRNA sense strand
caucuucgggcucauggaa

SEQ ID NO: 1180079 - RNA, 19 nt, Homo sapiens
  misc_RNA (1)...(19): siRNA sense strand
gccaaggacaugaagaaca

SEQ ID NO: 1180080 - RNA, 19 nt, Homo sapiens
  misc_RNA (1)...(19): siRNA sense strand
ugaguucagugaggagaau

SEQ ID NO: 1180081 - RNA, 19 nt, Homo sapiens
  misc_RNA (1)...(19): siRNA sense strand
gagaagcugcugguucaca

SEQ ID NO: 1180082 - RNA, 19 nt, Homo sapiens
  misc_RNA (1)...(19): siRNA sense strand
ggaccuuauuaaccagaag

SEQ ID NO: 1180083 - RNA, 19 nt, Homo sapiens
  misc_RNA (1)...(19): siRNA sense strand
gggagcacaccaaggacaa

SEQ ID NO: 1180084 - RNA, 19 nt, Homo sapiens
  misc_RNA (1)...(19): siRNA sense strand
gaccucuaccuggaccuua

SEQ ID NO: 1180085 - RNA, 19 nt, Homo sapiens
  misc_RNA (1)...(19): siRNA sense strand
gaccuuauuaaccagaaga

SEQ ID NO: 1180086 - RNA, 19 nt, Homo sapiens
  misc_RNA (1)...(19): siRNA sense strand
ccaaggacaugaagaacaa

SEQ ID NO: 1180087 - RNA, 19 nt, Homo sapiens
  misc_RNA (1)...(19): siRNA sense strand
ucaagaaggucaagucaca

SEQ ID NO: 1180088 - RNA, 19 nt, Homo sapiens
  misc_RNA (1)...(19): siRNA sense strand
uggagaagcugcugguuca

SEQ ID NO: 1180089 - RNA, 19 nt, Homo sapiens
  misc_RNA (1)...(19): siRNA sense strand
ggacucguacccucgcuuu

SEQ ID NO: 1180090 - RNA, 19 nt, Homo sapiens
  misc_RNA (1)...(19): siRNA sense strand
gcuucgaccuggcacagaa

SEQ ID NO: 1180091 - RNA, 19 nt, Homo sapiens
  misc_RNA (1)...(19): siRNA sense strand
agaagcugcugguucacaa

SEQ ID NO: 1180092 - RNA, 19 nt, Homo sapiens
  misc_RNA (1)...(19): siRNA sense strand
gugaggagaaucuggaguu

SEQ ID NO: 1180093 - RNA, 19 nt, Homo sapiens
  misc_RNA (1)...(19): siRNA sense strand
gaagcugcugguucacaaa

SEQ ID NO: 1180094 - RNA, 19 nt, Homo sapiens
  misc_RNA (1)...(19): siRNA sense strand
cauccaaggccaagaagau

SEQ ID NO: 1180095 - RNA, 19 nt, Homo sapiens
  misc_RNA (1)...(19): siRNA sense strand
gcugcugguucacaaauac

SEQ ID NO: 1180096 - RNA, 19 nt, Homo sapiens
  misc_RNA (1)...(19): siRNA sense strand
ucacaaauacggguuagca

SEQ ID NO: 1180097 - RNA, 19 nt, Homo sapiens
  misc_RNA (1)...(19): siRNA sense strand
cuuauuaaccagaagaaga

SEQ ID NO: 1180098 - RNA, 19 nt, Homo sapiens
  misc_RNA (1)...(19): siRNA sense strand
cauucaagcccaccucaga

SEQ ID NO: 1180099 - RNA, 19 nt, Homo sapiens
  misc_RNA (1)...(19): siRNA sense strand
ugaggagaaucuggaguuc

SEQ ID NO: 1180100 - RNA, 19 nt, Homo sapiens
  misc_RNA (1)...(19): siRNA sense strand
gggcaaggcagacaaaaug

SEQ ID NO: 1180101 - RNA, 19 nt, Homo sapiens
  misc_RNA (1)...(19): siRNA sense strand
caucuucgggcucauggaa

SEQ ID NO: 1180102 - RNA, 19 nt, Homo sapiens
  misc_RNA (1)...(19): siRNA sense strand
gccaaggacaugaagaaca

SEQ ID NO: 1180103 - RNA, 19 nt, Homo sapiens
  misc_RNA (1)...(19): siRNA sense strand
ugaguucagugaggagaau

SEQ ID NO: 1180104 - RNA, 19 nt, Homo sapiens
  misc_RNA (1)...(19): siRNA sense strand
gagaagcugcugguucaca

SEQ ID NO: 1180105 - RNA, 19 nt, Homo sapiens
  misc_RNA (1)...(19): siRNA sense strand
ggaccuuauuaaccagaag

SEQ ID NO: 1180106 - RNA, 19 nt, Homo sapiens
  misc_RNA (1)...(19): siRNA sense strand
gggagcacaccaaggacaa

SEQ ID NO: 1180107 - RNA, 19 nt, Homo sapiens
  misc_RNA (1)...(19): siRNA sense strand
gaccucuaccuggaccuua

SEQ ID NO: 1180108 - RNA, 19 nt, Homo sapiens
  misc_RNA (1)...(19): siRNA sense strand
gaccuuauuaaccagaaga

SEQ ID NO: 1180109 - RNA, 19 nt, Homo sapiens
  misc_RNA (1)...(19): siRNA sense strand
ccaaggacaugaagaacaa

SEQ ID NO: 1180110 - RNA, 19 nt, Homo sapiens
  misc_RNA (1)...(19): siRNA sense strand
ucaagaaggucaagucaca

SEQ ID NO: 1180111 - RNA, 19 nt, Homo sapiens
  misc_RNA (1)...(19): siRNA sense strand
uggagaagcugcugguuca

SEQ ID NO: 1180112 - RNA, 19 nt, Homo sapiens
  misc_RNA (1)...(19): siRNA sense strand
ggacucguacccucgcuuu

SEQ ID NO: 1180113 - RNA, 19 nt, Homo sapiens
  misc_RNA (1)...(19): siRNA sense strand
gcuucgaccuggcacagaa

SEQ ID NO: 1180114 - RNA, 19 nt, Homo sapiens
  misc_RNA (1)...(19): siRNA sense strand
agaagcugcugguucacaa

SEQ ID NO: 1180115 - RNA, 19 nt, Homo sapiens
  misc_RNA (1)...(19): siRNA sense strand
gugaggagaaucuggaguu

SEQ ID NO: 1180116 - RNA, 19 nt, Homo sapiens
  misc_RNA (1)...(19): siRNA sense strand
gaagcugcugguucacaaa

SEQ ID NO: 1180117 - RNA, 19 nt, Homo sapiens
  misc_RNA (1)...(19): siRNA sense strand
cauccaaggccaagaagau

SEQ ID NO: 1180118 - RNA, 19 nt, Homo sapiens
  misc_RNA (1)...(19): siRNA sense strand
gcugcugguucacaaauac

SEQ ID NO: 1180119 - RNA, 19 nt, Homo sapiens
  misc_RNA (1)...(19): siRNA sense strand
ucacaaauacggguuagca

SEQ ID NO: 1180120 - RNA, 19 nt, Homo sapiens
  misc_RNA (1)...(19): siRNA sense strand
cuuauuaaccagaagaaga

SEQ ID NO: 1180121 - RNA, 19 nt, Homo sapiens
  misc_RNA (1)...(19): siRNA sense strand
cauucaagcccaccucaga

SEQ ID NO: 1180122 - RNA, 19 nt, Homo sapiens
  misc_RNA (1)...(19): siRNA sense strand
ugaggagaaucuggaguuc

SEQ ID NO: 1180123 - RNA, 19 nt, Homo sapiens
  misc_RNA (1)...(19): siRNA sense strand
gggcaaggcagacaaaaug

SEQ ID NO: 1180124 - RNA, 19 nt, Homo sapiens
  misc_RNA (1)...(19): siRNA sense strand
caucuucgggcucauggaa

SEQ ID NO: 1180125 - RNA, 19 nt, Homo sapiens
  misc_RNA (1)...(19): siRNA sense strand
gccaaggacaugaagaaca

SEQ ID NO: 1180126 - RNA, 19 nt, Homo sapiens
  misc_RNA (1)...(19): siRNA sense strand
ugaguucagugaggagaau

SEQ ID NO: 1180127 - RNA, 19 nt, Homo sapiens
  misc_RNA (1)...(19): siRNA sense strand
gagaagcugcugguucaca

SEQ ID NO: 1180128 - RNA, 19 nt, Homo sapiens
  misc_RNA (1)...(19): siRNA sense strand
ggaccuuauuaaccagaag

SEQ ID NO: 1180129 - RNA, 19 nt, Homo sapiens
  misc_RNA (1)...(19): siRNA sense strand
gggagcacaccaaggacaa

SEQ ID NO: 1180130 - RNA, 19 nt, Homo sapiens
  misc_RNA (1)...(19): siRNA sense strand
gaccucuaccuggaccuua

SEQ ID NO: 1180131 - RNA, 19 nt, Homo sapiens
  misc_RNA (1)...(19): siRNA sense strand
gaccuuauuaaccagaaga

SEQ ID NO: 1180132 - RNA, 19 nt, Homo sapiens
  misc_RNA (1)...(19): siRNA sense strand
ccaaggacaugaagaacaa

SEQ ID NO: 1180133 - RNA, 19 nt, Homo sapiens
  misc_RNA (1)...(19): siRNA sense strand
ucaagaaggucaagucaca

SEQ ID NO: 1180134 - RNA, 19 nt, Homo sapiens
  misc_RNA (1)...(19): siRNA sense strand
uggagaagcugcugguuca

SEQ ID NO: 1180135 - RNA, 19 nt, Homo sapiens
  misc_RNA (1)...(19): siRNA sense strand
ggacucguacccucgcuuu

SEQ ID NO: 1180136 - RNA, 19 nt, Homo sapiens
  misc_RNA (1)...(19): siRNA sense strand
gcuucgaccuggcacagaa

SEQ ID NO: 1180137 - RNA, 19 nt, Homo sapiens
  misc_RNA (1)...(19): siRNA sense strand
agaagcugcugguucacaa

SEQ ID NO: 1180138 - RNA, 19 nt, Homo sapiens
  misc_RNA (1)...(19): siRNA sense strand
gugaggagaaucuggaguu

SEQ ID NO: 1180139 - RNA, 19 nt, Homo sapiens
  misc_RNA (1)...(19): siRNA sense strand
gaagcugcugguucacaaa

SEQ ID NO: 1180140 - RNA, 19 nt, Homo sapiens
  misc_RNA (1)...(19): siRNA sense strand
cauccaaggccaagaagau

SEQ ID NO: 1180141 - RNA, 19 nt, Homo sapiens
  misc_RNA (1)...(19): siRNA sense strand
gcugcugguucacaaauac

SEQ ID NO: 1180142 - RNA, 19 nt, Homo sapiens
  misc_RNA (1)...(19): siRNA sense strand
ucacaaauacggguuagca

SEQ ID NO: 1180143 - RNA, 19 nt, Homo sapiens
  misc_RNA (1)...(19): siRNA sense strand
cuuauuaaccagaagaaga

SEQ ID NO: 1180144 - RNA, 19 nt, Homo sapiens
  misc_RNA (1)...(19): siRNA sense strand
cauucaagcccaccucaga

SEQ ID NO: 1180145 - RNA, 19 nt, Homo sapiens
  misc_RNA (1)...(19): siRNA sense strand
ugaggagaaucuggaguuc

SEQ ID NO: 1180146 - RNA, 19 nt, Homo sapiens
  misc_RNA (1)...(19): siRNA sense strand
gggcaaggcagacaaaaug

SEQ ID NO: 1180147 - RNA, 19 nt, Homo sapiens
  misc_RNA (1)...(19): siRNA sense strand
caucuucgggcucauggaa

SEQ ID NO: 1180148 - RNA, 19 nt, Homo sapiens
  misc_RNA (1)...(19): siRNA sense strand
gccaaggacaugaagaaca

SEQ ID NO: 1180149 - RNA, 19 nt, Homo sapiens
  misc_RNA (1)...(19): siRNA sense strand
ugaguucagugaggagaau

SEQ ID NO: 1180150 - RNA, 19 nt, Homo sapiens
  misc_RNA (1)...(19): siRNA sense strand
gagaagcugcugguucaca

SEQ ID NO: 1180151 - RNA, 19 nt, Homo sapiens
  misc_RNA (1)...(19): siRNA sense strand
ggaccuuauuaaccagaag

SEQ ID NO: 1180152 - RNA, 19 nt, Homo sapiens
  misc_RNA (1)...(19): siRNA sense strand
gggagcacaccaaggacaa

SEQ ID NO: 1180153 - RNA, 19 nt, Homo sapiens
  misc_RNA (1)...(19): siRNA sense strand
gaccucuaccuggaccuua

SEQ ID NO: 1180154 - RNA, 19 nt, Homo sapiens
  misc_RNA (1)...(19): siRNA sense strand
gaccuuauuaaccagaaga

SEQ ID NO: 1180155 - RNA, 19 nt, Homo sapiens
  misc_RNA (1)...(19): siRNA sense strand
ucaagaaggucaagucaca

SEQ ID NO: 1180156 - RNA, 19 nt, Homo sapiens
  misc_RNA (1)...(19): siRNA sense strand
uggagaagcugcugguuca

SEQ ID NO: 1180157 - RNA, 19 nt, Homo sapiens
  misc_RNA (1)...(19): siRNA sense strand
ggacucguacccucgcuuu

SEQ ID NO: 1180158 - RNA, 19 nt, Homo sapiens
  misc_RNA (1)...(19): siRNA sense strand
gcuucgaccuggcacagaa

SEQ ID NO: 1180159 - RNA, 19 nt, Homo sapiens
  misc_RNA (1)...(19): siRNA sense strand
agaagcugcugguucacaa

SEQ ID NO: 1180160 - RNA, 19 nt, Homo sapiens
  misc_RNA (1)...(19): siRNA sense strand
gugaggagaaucuggaguu

SEQ ID NO: 1180161 - RNA, 19 nt, Homo sapiens
  misc_RNA (1)...(19): siRNA sense strand
gaagcugcugguucacaaa

SEQ ID NO: 1180162 - RNA, 19 nt, Homo sapiens
  misc_RNA (1)...(19): siRNA sense strand
cauccaaggccaagaagau

SEQ ID NO: 1180163 - RNA, 19 nt, Homo sapiens
  misc_RNA (1)...(19): siRNA sense strand
gcugcugguucacaaauac

SEQ ID NO: 1180164 - RNA, 19 nt, Homo sapiens
  misc_RNA (1)...(19): siRNA sense strand
ucacaaauacggguuagca

SEQ ID NO: 1180165 - RNA, 19 nt, Homo sapiens
  misc_RNA (1)...(19): siRNA sense strand
cuuauuaaccagaagaaga

SEQ ID NO: 1180166 - RNA, 19 nt, Homo sapiens
  misc_RNA (1)...(19): siRNA sense strand
cauucaagcccaccucaga

SEQ ID NO: 1180167 - RNA, 19 nt, Homo sapiens
  misc_RNA (1)...(19): siRNA sense strand
ugaggagaaucuggaguuc

SEQ ID NO: 1180168 - RNA, 19 nt, Homo sapiens
  misc_RNA (1)...(19): siRNA sense strand
ugaguucagugaggagaau

SEQ ID NO: 1180169 - RNA, 19 nt, Homo sapiens
  misc_RNA (1)...(19): siRNA sense strand
caucuucgggcucauggaa

SEQ ID NO: 1180170 - RNA, 19 nt, Homo sapiens
  misc_RNA (1)...(19): siRNA sense strand
gggcaaggcagacaaaaug

SEQ ID NO: 1180171 - RNA, 19 nt, Homo sapiens
  misc_RNA (1)...(19): siRNA sense strand
gagaagcugcugguucaca

SEQ ID NO: 1180172 - RNA, 19 nt, Homo sapiens
  misc_RNA (1)...(19): siRNA sense strand
ggaccuuauuaaccagaag

SEQ ID NO: 1180173 - RNA, 19 nt, Homo sapiens
  misc_RNA (1)...(19): siRNA sense strand
gggagcacaccaaggacaa

SEQ ID NO: 1180174 - RNA, 19 nt, Homo sapiens
  misc_RNA (1)...(19): siRNA sense strand
gaccucuaccuggaccuua

SEQ ID NO: 1180175 - RNA, 19 nt, Homo sapiens
  misc_RNA (1)...(19): siRNA sense strand
gaccuuauuaaccagaaga

SEQ ID NO: 1180176 - RNA, 19 nt, Homo sapiens
  misc_RNA (1)...(19): siRNA sense strand
ccaaggacaugaagaacaa

SEQ ID NO: 1180177 - RNA, 19 nt, Homo sapiens
  misc_RNA (1)...(19): siRNA sense strand
ucaagaaggucaagucaca

SEQ ID NO: 1180178 - RNA, 19 nt, Homo sapiens
  misc_RNA (1)...(19): siRNA sense strand
uggagaagcugcugguuca

SEQ ID NO: 1180179 - RNA, 19 nt, Homo sapiens
  misc_RNA (1)...(19): siRNA sense strand
ggacucguacccucgcuuu

SEQ ID NO: 1180180 - RNA, 19 nt, Homo sapiens
  misc_RNA (1)...(19): siRNA sense strand
gcuucgaccuggcacagaa

SEQ ID NO: 1180181 - RNA, 19 nt, Homo sapiens
  misc_RNA (1)...(19): siRNA sense strand
agaagcugcugguucacaa

SEQ ID NO: 1180182 - RNA, 19 nt, Homo sapiens
  misc_RNA (1)...(19): siRNA sense strand
gugaggagaaucuggaguu

SEQ ID NO: 1180183 - RNA, 19 nt, Homo sapiens
  misc_RNA (1)...(19): siRNA sense strand
gaagcugcugguucacaaa

SEQ ID NO: 1180184 - RNA, 19 nt, Homo sapiens
  misc_RNA (1)...(19): siRNA sense strand
cauccaaggccaagaagau

SEQ ID NO: 1180185 - RNA, 19 nt, Homo sapiens
  misc_RNA (1)...(19): siRNA sense strand
gcugcugguucacaaauac

SEQ ID NO: 1180186 - RNA, 19 nt, Homo sapiens
  misc_RNA (1)...(19): siRNA sense strand
ucacaaauacggguuagca

SEQ ID NO: 1180187 - RNA, 19 nt, Homo sapiens
  misc_RNA (1)...(19): siRNA sense strand
cuuauuaaccagaagaaga

SEQ ID NO: 1180188 - RNA, 19 nt, Homo sapiens
  misc_RNA (1)...(19): siRNA sense strand
cauucaagcccaccucaga

SEQ ID NO: 1180189 - RNA, 19 nt, Homo sapiens
  misc_RNA (1)...(19): siRNA sense strand
ugaggagaaucuggaguuc

SEQ ID NO: 1180190 - RNA, 19 nt, Homo sapiens
  misc_RNA (1)...(19): siRNA sense strand
gggcaaggcagacaaaaug

SEQ ID NO: 1180191 - RNA, 19 nt, Homo sapiens
  misc_RNA (1)...(19): siRNA sense strand
caucuucgggcucauggaa

SEQ ID NO: 1180192 - RNA, 19 nt, Homo sapiens
  misc_RNA (1)...(19): siRNA sense strand
gccaaggacaugaagaaca

SEQ ID NO: 1180193 - RNA, 19 nt, Homo sapiens
  misc_RNA (1)...(19): siRNA sense strand
ugaguucagugaggagaau

SEQ ID NO: 1180194 - RNA, 19 nt, Homo sapiens
  misc_RNA (1)...(19): siRNA sense strand
gagaagcugcugguucaca

SEQ ID NO: 1180195 - RNA, 19 nt, Homo sapiens
  misc_RNA (1)...(19): siRNA sense strand
ggaccuuauuaaccagaag

SEQ ID NO: 1180196 - RNA, 19 nt, Homo sapiens
  misc_RNA (1)...(19): siRNA sense strand
gggagcacaccaaggacaa

SEQ ID NO: 1180197 - RNA, 19 nt, Homo sapiens
  misc_RNA (1)...(19): siRNA sense strand
gaccucuaccuggaccuua

SEQ ID NO: 1180198 - RNA, 19 nt, Homo sapiens
  misc_RNA (1)...(19): siRNA sense strand
gaccuuauuaaccagaaga

SEQ ID NO: 1180199 - RNA, 19 nt, Homo sapiens
  misc_RNA (1)...(19): siRNA sense strand
ccaaggacaugaagaacaa

SEQ ID NO: 1180200 - RNA, 19 nt, Homo sapiens
  misc_RNA (1)...(19): siRNA sense strand
ucaagaaggucaagucaca

SEQ ID NO: 1180201 - RNA, 19 nt, Homo sapiens
  misc_RNA (1)...(19): siRNA sense strand
uggagaagcugcugguuca

SEQ ID NO: 1180202 - RNA, 19 nt, Homo sapiens
  misc_RNA (1)...(19): siRNA sense strand
ggacucguacccucgcuuu

SEQ ID NO: 1180203 - RNA, 19 nt, Homo sapiens
  misc_RNA (1)...(19): siRNA sense strand
gcuucgaccuggcacagaa

SEQ ID NO: 1180204 - RNA, 19 nt, Homo sapiens
  misc_RNA (1)...(19): siRNA sense strand
agaagcugcugguucacaa

SEQ ID NO: 1180205 - RNA, 19 nt, Homo sapiens
  misc_RNA (1)...(19): siRNA sense strand
gugaggagaaucuggaguu

SEQ ID NO: 1180206 - RNA, 19 nt, Homo sapiens
  misc_RNA (1)...(19): siRNA sense strand
gaagcugcugguucacaaa

SEQ ID NO: 1180207 - RNA, 19 nt, Homo sapiens
  misc_RNA (1)...(19): siRNA sense strand
cauccaaggccaagaagau

SEQ ID NO: 1180208 - RNA, 19 nt, Homo sapiens
  misc_RNA (1)...(19): siRNA sense strand
gcugcugguucacaaauac

SEQ ID NO: 1180209 - RNA, 19 nt, Homo sapiens
  misc_RNA (1)...(19): siRNA sense strand
ucacaaauacggguuagca

SEQ ID NO: 1180210 - RNA, 19 nt, Homo sapiens
  misc_RNA (1)...(19): siRNA sense strand
cuuauuaaccagaagaaga

SEQ ID NO: 1180211 - RNA, 19 nt, Homo sapiens
  misc_RNA (1)...(19): siRNA sense strand
cauucaagcccaccucaga

SEQ ID NO: 1180212 - RNA, 19 nt, Homo sapiens
  misc_RNA (1)...(19): siRNA sense strand
ugaggagaaucuggaguuc

SEQ ID NO: 1180213 - RNA, 19 nt, Homo sapiens
  misc_RNA (1)...(19): siRNA sense strand
gggcaaggcagacaaaaug

SEQ ID NO: 1180214 - RNA, 19 nt, Homo sapiens
  misc_RNA (1)...(19): siRNA sense strand
caucuucgggcucauggaa

SEQ ID NO: 1180215 - RNA, 19 nt, Homo sapiens
  misc_RNA (1)...(19): siRNA sense strand
gccaaggacaugaagaaca

SEQ ID NO: 1180216 - RNA, 19 nt, Homo sapiens
  misc_RNA (1)...(19): siRNA sense strand
ugaguucagugaggagaau

SEQ ID NO: 1180217 - RNA, 19 nt, Homo sapiens
  misc_RNA (1)...(19): siRNA sense strand
gagaagcugcugguucaca

SEQ ID NO: 1180218 - RNA, 19 nt, Homo sapiens
  misc_RNA (1)...(19): siRNA sense strand
ggaccuuauuaaccagaag

SEQ ID NO: 1180219 - RNA, 19 nt, Homo sapiens
  misc_RNA (1)...(19): siRNA sense strand
gggagcacaccaaggacaa

SEQ ID NO: 1180220 - RNA, 19 nt, Homo sapiens
  misc_RNA (1)...(19): siRNA sense strand
gaccucuaccuggaccuua

SEQ ID NO: 1180221 - RNA, 19 nt, Homo sapiens
  misc_RNA (1)...(19): siRNA sense strand
gaccuuauuaaccagaaga

SEQ ID NO: 1180222 - RNA, 19 nt, Homo sapiens
  misc_RNA (1)...(19): siRNA sense strand
ccgcaaggacuacgucuaa

SEQ ID NO: 1180223 - RNA, 19 nt, Homo sapiens
  misc_RNA (1)...(19): siRNA sense strand
ccaccaaggucgucuacuc

SEQ ID NO: 1180224 - RNA, 19 nt, Homo sapiens
  misc_RNA (1)...(19): siRNA sense strand
gggagggccuguggaugaa

SEQ ID NO: 1180225 - RNA, 19 nt, Homo sapiens
  misc_RNA (1)...(19): siRNA sense strand
gcuacgaccgcaaggacua

SEQ ID NO: 1180226 - RNA, 19 nt, Homo sapiens
  misc_RNA (1)...(19): siRNA sense strand
ugggagggccuguggauga

SEQ ID NO: 1180227 - RNA, 19 nt, Homo sapiens
  misc_RNA (1)...(19): siRNA sense strand
agaaguacacggccaccaa

SEQ ID NO: 1180228 - RNA, 19 nt, Homo sapiens
  misc_RNA (1)...(19): siRNA sense strand
ggucggccaacaccauuau

SEQ ID NO: 1180229 - RNA, 19 nt, Homo sapiens
  misc_RNA (1)...(19): siRNA sense strand
uaacaaagaucccgucaua

SEQ ID NO: 1180230 - RNA, 19 nt, Homo sapiens
  misc_RNA (1)...(19): siRNA sense strand
gcacaaacauggaaaguca

SEQ ID NO: 1180231 - RNA, 19 nt, Homo sapiens
  misc_RNA (1)...(19): siRNA sense strand
ggaagauagugguuuauuu

SEQ ID NO: 1180232 - RNA, 19 nt, Homo sapiens
  misc_RNA (1)...(19): siRNA sense strand
gaaggaaucugcuaaggau

SEQ ID NO: 1180233 - RNA, 19 nt, Homo sapiens
  misc_RNA (1)...(19): siRNA sense strand
gaagagaaguuggauauag

SEQ ID NO: 1180234 - RNA, 19 nt, Homo sapiens
  misc_RNA (1)...(19): siRNA sense strand
gaugugaccuuuacaacaa

SEQ ID NO: 1180235 - RNA, 19 nt, Homo sapiens
  misc_RNA (1)...(19): siRNA sense strand
ggaugagcaugccaauuua

SEQ ID NO: 1180236 - RNA, 19 nt, Homo sapiens
  misc_RNA (1)...(19): siRNA sense strand
aaggaaagcuugccuguuu

SEQ ID NO: 1180237 - RNA, 19 nt, Homo sapiens
  misc_RNA (1)...(19): siRNA sense strand
gaugaaagaugauauagag

SEQ ID NO: 1180238 - RNA, 19 nt, Homo sapiens
  misc_RNA (1)...(19): siRNA sense strand
gacagaugcugcucauaua

SEQ ID NO: 1180239 - RNA, 19 nt, Homo sapiens
  misc_RNA (1)...(19): siRNA sense strand
gcacuuaccuguguagaug

SEQ ID NO: 1180240 - RNA, 19 nt, Homo sapiens
  misc_RNA (1)...(19): siRNA sense strand
gagugaagcuuuaucaaau

SEQ ID NO: 1180241 - RNA, 19 nt, Homo sapiens
  misc_RNA (1)...(19): siRNA sense strand
caaaugauccugcaauuau

SEQ ID NO: 1180242 - RNA, 19 nt, Homo sapiens
  misc_RNA (1)...(19): siRNA sense strand
gaacaaacuuuagagacuu

SEQ ID NO: 1180243 - RNA, 19 nt, Homo sapiens
  misc_RNA (1)...(19): siRNA sense strand
ggagauaggauucaugaaa

SEQ ID NO: 1180244 - RNA, 19 nt, Homo sapiens
  misc_RNA (1)...(19): siRNA sense strand
ggagaagaaucacaguuga

SEQ ID NO: 1180245 - RNA, 19 nt, Homo sapiens
  misc_RNA (1)...(19): siRNA sense strand
gauaagagcaaaucaguga

SEQ ID NO: 1180246 - RNA, 19 nt, Homo sapiens
  misc_RNA (1)...(19): siRNA sense strand
ggauuuagcugcaguuucu

SEQ ID NO: 1180247 - RNA, 19 nt, Homo sapiens
  misc_RNA (1)...(19): siRNA sense strand
ggaagaagguucaguuugc

SEQ ID NO: 1180248 - RNA, 19 nt, Homo sapiens
  misc_RNA (1)...(19): siRNA sense strand
ccacuuagccaucaaauug

SEQ ID NO: 1180249 - RNA, 19 nt, Homo sapiens
  misc_RNA (1)...(19): siRNA sense strand
acaaggaacuguuaauguu

SEQ ID NO: 1180250 - RNA, 19 nt, Homo sapiens
  misc_RNA (1)...(19): siRNA sense strand
caaaggaguuucuauaggu

SEQ ID NO: 1180251 - RNA, 19 nt, Homo sapiens
  misc_RNA (1)...(19): siRNA sense strand
ucacauacuuucucaucua

SEQ ID NO: 1180252 - RNA, 19 nt, Homo sapiens
  misc_RNA (1)...(19): siRNA sense strand
aaaggagucucuucaugua

SEQ ID NO: 1180253 - RNA, 19 nt, Homo sapiens
  misc_RNA (1)...(19): siRNA sense strand
gaaaggagucucuucaugu

SEQ ID NO: 1180254 - RNA, 19 nt, Homo sapiens
  misc_RNA (1)...(19): siRNA sense strand
uaacugaggucacauuucu

SEQ ID NO: 1180255 - RNA, 19 nt, Homo sapiens
  misc_RNA (1)...(19): siRNA sense strand
gaagauaaacagaaaguca

SEQ ID NO: 1180256 - RNA, 19 nt, Homo sapiens
  misc_RNA (1)...(19): siRNA sense strand
cagcagaagucauuacaga

SEQ ID NO: 1180257 - RNA, 19 nt, Homo sapiens
  misc_RNA (1)...(19): siRNA sense strand
guuagugucucuacggaua

SEQ ID NO: 1180258 - RNA, 19 nt, Homo sapiens
  misc_RNA (1)...(19): siRNA sense strand
cuaccgaucuguuaaauca

SEQ ID NO: 1180259 - RNA, 19 nt, Homo sapiens
  misc_RNA (1)...(19): siRNA sense strand
acaaucacaugaagacuaa

SEQ ID NO: 1180260 - RNA, 19 nt, Homo sapiens
  misc_RNA (1)...(19): siRNA sense strand
agaauuagccaaagaguuu

SEQ ID NO: 1180261 - RNA, 19 nt, Homo sapiens
  misc_RNA (1)...(19): siRNA sense strand
guacuaggcucaguucuuc

SEQ ID NO: 1180262 - RNA, 19 nt, Homo sapiens
  misc_RNA (1)...(19): siRNA sense strand
guaaauaugcuacugguau

SEQ ID NO: 1180263 - RNA, 19 nt, Homo sapiens
  misc_RNA (1)...(19): siRNA sense strand
gaaagaugauauagaggau

SEQ ID NO: 1180264 - RNA, 19 nt, Homo sapiens
  misc_RNA (1)...(19): siRNA sense strand
gaacauuacugugcuaagg

SEQ ID NO: 1180265 - RNA, 19 nt, Homo sapiens
  misc_RNA (1)...(19): siRNA sense strand
ggccaaggcucaucuguca

SEQ ID NO: 1180266 - RNA, 19 nt, Homo sapiens
  misc_RNA (1)...(19): siRNA sense strand
cauguuugcugaccgguua

SEQ ID NO: 1180267 - RNA, 19 nt, Homo sapiens
  misc_RNA (1)...(19): siRNA sense strand
ggauucagacucagaagua

SEQ ID NO: 1180268 - RNA, 19 nt, Homo sapiens
  misc_RNA (1)...(19): siRNA sense strand
gauagugguuuauuuaguc

SEQ ID NO: 1180269 - RNA, 19 nt, Homo sapiens
  misc_RNA (1)...(19): siRNA sense strand
uuagagacuugccuguuua

SEQ ID NO: 1180270 - RNA, 19 nt, Homo sapiens
  misc_RNA (1)...(19): siRNA sense strand
caacuaaugacgauauuga

SEQ ID NO: 1180271 - RNA, 19 nt, Homo sapiens
  misc_RNA (1)...(19): siRNA sense strand
guagugaaguuguaugcaa

SEQ ID NO: 1180272 - RNA, 19 nt, Homo sapiens
  misc_RNA (1)...(19): siRNA sense strand
aaagaagaguucauguuga

SEQ ID NO: 1180273 - RNA, 19 nt, Homo sapiens
  misc_RNA (1)...(19): siRNA sense strand
gugaaagugugacagauga

SEQ ID NO: 1180274 - RNA, 19 nt, Homo sapiens
  misc_RNA (1)...(19): siRNA sense strand
guggauccguuuauucuuu

SEQ ID NO: 1180275 - RNA, 19 nt, Homo sapiens
  misc_RNA (1)...(19): siRNA sense strand
agaaaagucucccaaauuu

SEQ ID NO: 1180276 - RNA, 19 nt, Homo sapiens
  misc_RNA (1)...(19): siRNA sense strand
ggaaugcuuugugucauga

SEQ ID NO: 1180277 - RNA, 19 nt, Homo sapiens
  misc_RNA (1)...(19): siRNA sense strand
gguuacuggucaucauuua

SEQ ID NO: 1180278 - RNA, 19 nt, Homo sapiens
  misc_RNA (1)...(19): siRNA sense strand
gaaagccaacuccucguaa

SEQ ID NO: 1180279 - RNA, 19 nt, Homo sapiens
  misc_RNA (1)...(19): siRNA sense strand
gcuuaaaugugcaaaguca

SEQ ID NO: 1180280 - RNA, 19 nt, Homo sapiens
  misc_RNA (1)...(19): siRNA sense strand
uuaacucacugcucacuuu

SEQ ID NO: 1180281 - RNA, 19 nt, Homo sapiens
  misc_RNA (1)...(19): siRNA sense strand
ccaaaugauccugcaauua

SEQ ID NO: 1180282 - RNA, 19 nt, Homo sapiens
  misc_RNA (1)...(19): siRNA sense strand
cagcuugucucagaaauau

SEQ ID NO: 1180283 - RNA, 19 nt, Homo sapiens
  misc_RNA (1)...(19): siRNA sense strand
aagcagauauucacaaaca

SEQ ID NO: 1180284 - RNA, 19 nt, Homo sapiens
  misc_RNA (1)...(19): siRNA sense strand
agaagcagauauucacaaa

SEQ ID NO: 1180285 - RNA, 19 nt, Homo sapiens
  misc_RNA (1)...(19): siRNA sense strand
aagggaagauagugguuua

SEQ ID NO: 1180286 - RNA, 19 nt, Homo sapiens
  misc_RNA (1)...(19): siRNA sense strand
gguaauagugaguugauaa

SEQ ID NO: 1180287 - RNA, 19 nt, Homo sapiens
  misc_RNA (1)...(19): siRNA sense strand
gcaaaaguccgaaauugua

SEQ ID NO: 1180288 - RNA, 19 nt, Homo sapiens
  misc_RNA (1)...(19): siRNA sense strand
uagagacacugccaucuug

SEQ ID NO: 1180289 - RNA, 19 nt, Homo sapiens
  misc_RNA (1)...(19): siRNA sense strand
gcugaccgguuaucuaaau

SEQ ID NO: 1180290 - RNA, 19 nt, Homo sapiens
  misc_RNA (1)...(19): siRNA sense strand
gcagaguuccucaaaauua

SEQ ID NO: 1180291 - RNA, 19 nt, Homo sapiens
  misc_RNA (1)...(19): siRNA sense strand
caaacacaguugcuagguu

SEQ ID NO: 1180292 - RNA, 19 nt, Homo sapiens
  misc_RNA (1)...(19): siRNA sense strand
cuucaaagccauacaauga

SEQ ID NO: 1180293 - RNA, 19 nt, Homo sapiens
  misc_RNA (1)...(19): siRNA sense strand
gaaguugagaguagugaaa

SEQ ID NO: 1180294 - RNA, 19 nt, Homo sapiens
  misc_RNA (1)...(19): siRNA sense strand
gaaauguaauaccugauac

SEQ ID NO: 1180295 - RNA, 19 nt, Homo sapiens
  misc_RNA (1)...(19): siRNA sense strand
guaaagaagcagauauuca

SEQ ID NO: 1180296 - RNA, 19 nt, Homo sapiens
  misc_RNA (1)...(19): siRNA sense strand
gagauaggauucaugaaaa

SEQ ID NO: 1180297 - RNA, 19 nt, Homo sapiens
  misc_RNA (1)...(19): siRNA sense strand
gaacuagaacaaacuuuag

SEQ ID NO: 1180298 - RNA, 19 nt, Homo sapiens
  misc_RNA (1)...(19): siRNA sense strand
cagcagaucuuguggaaaa

SEQ ID NO: 1180299 - RNA, 19 nt, Homo sapiens
  misc_RNA (1)...(19): siRNA sense strand
agaaaggagucucuucaug

SEQ ID NO: 1180300 - RNA, 19 nt, Homo sapiens
  misc_RNA (1)...(19): siRNA sense strand
acaaagagcaccaccaaga

SEQ ID NO: 1180301 - RNA, 19 nt, Homo sapiens
  misc_RNA (1)...(19): siRNA sense strand
guuccagaauguaaaguuu

SEQ ID NO: 1180302 - RNA, 19 nt, Homo sapiens
  misc_RNA (1)...(19): siRNA sense strand
gcaaugcagugaagcuagu

SEQ ID NO: 1180303 - RNA, 19 nt, Homo sapiens
  misc_RNA (1)...(19): siRNA sense strand
ucaaagccauacaaugaug

SEQ ID NO: 1180304 - RNA, 19 nt, Homo sapiens
  misc_RNA (1)...(19): siRNA sense strand
ggauauagaggcuguagug

SEQ ID NO: 1180305 - RNA, 19 nt, Homo sapiens
  misc_RNA (1)...(19): siRNA sense strand
acacacauccuuucucuug

SEQ ID NO: 1180306 - RNA, 19 nt, Homo sapiens
  misc_RNA (1)...(19): siRNA sense strand
gaagaagguucaguuugca

SEQ ID NO: 1180307 - RNA, 19 nt, Homo sapiens
  misc_RNA (1)...(19): siRNA sense strand
gaaagucagagacagaaau

SEQ ID NO: 1180308 - RNA, 19 nt, Homo sapiens
  misc_RNA (1)...(19): siRNA sense strand
gcagugcauuuaaagacuu

SEQ ID NO: 1180309 - RNA, 19 nt, Homo sapiens
  misc_RNA (1)...(19): siRNA sense strand
aaggaacuaugcaguguaa

SEQ ID NO: 1180310 - RNA, 19 nt, Homo sapiens
  misc_RNA (1)...(19): siRNA sense strand
uauagaggauucagacuca

SEQ ID NO: 1180311 - RNA, 19 nt, Homo sapiens
  misc_RNA (1)...(19): siRNA sense strand
gagaaggcagcgugcauuu

SEQ ID NO: 1180312 - RNA, 19 nt, Homo sapiens
  misc_RNA (1)...(19): siRNA sense strand
caaagagcaccaccaagaa

SEQ ID NO: 1180313 - RNA, 19 nt, Homo sapiens
  misc_RNA (1)...(19): siRNA sense strand
caaggaacuguuaauguuu

SEQ ID NO: 1180314 - RNA, 19 nt, Homo sapiens
  misc_RNA (1)...(19): siRNA sense strand
gaaguggauccguuuauuc

SEQ ID NO: 1180315 - RNA, 19 nt, Homo sapiens
  misc_RNA (1)...(19): siRNA sense strand
aagagaaguuggauauaga

SEQ ID NO: 1180316 - RNA, 19 nt, Homo sapiens
  misc_RNA (1)...(19): siRNA sense strand
uccaucaacuccucuagua

SEQ ID NO: 1180317 - RNA, 19 nt, Homo sapiens
  misc_RNA (1)...(19): siRNA sense strand
ucagugaucccaaauauag

SEQ ID NO: 1180318 - RNA, 19 nt, Homo sapiens
  misc_RNA (1)...(19): siRNA sense strand
gcccuucucccauaucaua

SEQ ID NO: 1180319 - RNA, 19 nt, Homo sapiens
  misc_RNA (1)...(19): siRNA sense strand
caaaaccagugcaggaaua

SEQ ID NO: 1180320 - RNA, 19 nt, Homo sapiens
  misc_RNA (1)...(19): siRNA sense strand
caacaaaggcagcaguuag

SEQ ID NO: 1180321 - RNA, 19 nt, Homo sapiens
  misc_RNA (1)...(19): siRNA sense strand
caccaagacuuaggauuga

SEQ ID NO: 1180322 - RNA, 19 nt, Homo sapiens
  misc_RNA (1)...(19): siRNA sense strand
gaaacaaucacaugaagac

SEQ ID NO: 1180323 - RNA, 19 nt, Homo sapiens
  misc_RNA (1)...(19): siRNA sense strand
caauuuaacugaggucaca

SEQ ID NO: 1180324 - RNA, 19 nt, Homo sapiens
  misc_RNA (1)...(19): siRNA sense strand
ucaguuugcagaagcauua

SEQ ID NO: 1180325 - RNA, 19 nt, Homo sapiens
  misc_RNA (1)...(19): siRNA sense strand
aaacucaugcgaucucuuu

SEQ ID NO: 1180326 - RNA, 19 nt, Homo sapiens
  misc_RNA (1)...(19): siRNA sense strand
caagggagaauuagccaaa

SEQ ID NO: 1180327 - RNA, 19 nt, Homo sapiens
  misc_RNA (1)...(19): siRNA sense strand
gaaggaacuaugcagugua

SEQ ID NO: 1180328 - RNA, 19 nt, Homo sapiens
  misc_RNA (1)...(19): siRNA sense strand
ggacauaaagaacuaccuu

SEQ ID NO: 1180329 - RNA, 19 nt, Homo sapiens
  misc_RNA (1)...(19): siRNA sense strand
uaacaaagaucccgucaua

SEQ ID NO: 1180330 - RNA, 19 nt, Homo sapiens
  misc_RNA (1)...(19): siRNA sense strand
gcacaaacauggaaaguca

SEQ ID NO: 1180331 - RNA, 19 nt, Homo sapiens
  misc_RNA (1)...(19): siRNA sense strand
ggaagauagugguuuauuu

SEQ ID NO: 1180332 - RNA, 19 nt, Homo sapiens
  misc_RNA (1)...(19): siRNA sense strand
gaaggaaucugcuaaggau

SEQ ID NO: 1180333 - RNA, 19 nt, Homo sapiens
  misc_RNA (1)...(19): siRNA sense strand
gaagagaaguuggauauag

SEQ ID NO: 1180334 - RNA, 19 nt, Homo sapiens
  misc_RNA (1)...(19): siRNA sense strand
gaugugaccuuuacaacaa

SEQ ID NO: 1180335 - RNA, 19 nt, Homo sapiens
  misc_RNA (1)...(19): siRNA sense strand
ggaugagcaugccaauuua

SEQ ID NO: 1180336 - RNA, 19 nt, Homo sapiens
  misc_RNA (1)...(19): siRNA sense strand
aaggaaagcuugccuguuu

SEQ ID NO: 1180337 - RNA, 19 nt, Homo sapiens
  misc_RNA (1)...(19): siRNA sense strand
gaugaaagaugauauagag

SEQ ID NO: 1180338 - RNA, 19 nt, Homo sapiens
  misc_RNA (1)...(19): siRNA sense strand
gacagaugcugcucauaua

SEQ ID NO: 1180339 - RNA, 19 nt, Homo sapiens
  misc_RNA (1)...(19): siRNA sense strand
gcacuuaccuguguagaug

SEQ ID NO: 1180340 - RNA, 19 nt, Homo sapiens
  misc_RNA (1)...(19): siRNA sense strand
gagugaagcuuuaucaaau

SEQ ID NO: 1180341 - RNA, 19 nt, Homo sapiens
  misc_RNA (1)...(19): siRNA sense strand
caaaugauccugcaauuau

SEQ ID NO: 1180342 - RNA, 19 nt, Homo sapiens
  misc_RNA (1)...(19): siRNA sense strand
gaacaaacuuuagagacuu

SEQ ID NO: 1180343 - RNA, 19 nt, Homo sapiens
  misc_RNA (1)...(19): siRNA sense strand
ggagauaggauucaugaaa

SEQ ID NO: 1180344 - RNA, 19 nt, Homo sapiens
  misc_RNA (1)...(19): siRNA sense strand
ggagaagaaucacaguuga

SEQ ID NO: 1180345 - RNA, 19 nt, Homo sapiens
  misc_RNA (1)...(19): siRNA sense strand
gauaagagcaaaucaguga

SEQ ID NO: 1180346 - RNA, 19 nt, Homo sapiens
  misc_RNA (1)...(19): siRNA sense strand
ggauuuagcugcaguuucu

SEQ ID NO: 1180347 - RNA, 19 nt, Homo sapiens
  misc_RNA (1)...(19): siRNA sense strand
ggaagaagguucaguuugc

SEQ ID NO: 1180348 - RNA, 19 nt, Homo sapiens
  misc_RNA (1)...(19): siRNA sense strand
ccacuuagccaucaaauug

SEQ ID NO: 1180349 - RNA, 19 nt, Homo sapiens
  misc_RNA (1)...(19): siRNA sense strand
acaaggaacuguuaauguu

SEQ ID NO: 1180350 - RNA, 19 nt, Homo sapiens
  misc_RNA (1)...(19): siRNA sense strand
caaaggaguuucuauaggu

SEQ ID NO: 1180351 - RNA, 19 nt, Homo sapiens
  misc_RNA (1)...(19): siRNA sense strand
ucacauacuuucucaucua

SEQ ID NO: 1180352 - RNA, 19 nt, Homo sapiens
  misc_RNA (1)...(19): siRNA sense strand
aaaggagucucuucaugua

SEQ ID NO: 1180353 - RNA, 19 nt, Homo sapiens
  misc_RNA (1)...(19): siRNA sense strand
gaaaggagucucuucaugu

SEQ ID NO: 1180354 - RNA, 19 nt, Homo sapiens
  misc_RNA (1)...(19): siRNA sense strand
uaacugaggucacauuucu

SEQ ID NO: 1180355 - RNA, 19 nt, Homo sapiens
  misc_RNA (1)...(19): siRNA sense strand
gaagauaaacagaaaguca

SEQ ID NO: 1180356 - RNA, 19 nt, Homo sapiens
  misc_RNA (1)...(19): siRNA sense strand
cagcagaagucauuacaga

SEQ ID NO: 1180357 - RNA, 19 nt, Homo sapiens
  misc_RNA (1)...(19): siRNA sense strand
guuagugucucuacggaua

SEQ ID NO: 1180358 - RNA, 19 nt, Homo sapiens
  misc_RNA (1)...(19): siRNA sense strand
cuaccgaucuguuaaauca

SEQ ID NO: 1180359 - RNA, 19 nt, Homo sapiens
  misc_RNA (1)...(19): siRNA sense strand
acaaucacaugaagacuaa

SEQ ID NO: 1180360 - RNA, 19 nt, Homo sapiens
  misc_RNA (1)...(19): siRNA sense strand
agaauuagccaaagaguuu

SEQ ID NO: 1180361 - RNA, 19 nt, Homo sapiens
  misc_RNA (1)...(19): siRNA sense strand
guacuaggcucaguucuuc

SEQ ID NO: 1180362 - RNA, 19 nt, Homo sapiens
  misc_RNA (1)...(19): siRNA sense strand
guaaauaugcuacugguau

SEQ ID NO: 1180363 - RNA, 19 nt, Homo sapiens
  misc_RNA (1)...(19): siRNA sense strand
gaaagaugauauagaggau

SEQ ID NO: 1180364 - RNA, 19 nt, Homo sapiens
  misc_RNA (1)...(19): siRNA sense strand
gaacauuacugugcuaagg

SEQ ID NO: 1180365 - RNA, 19 nt, Homo sapiens
  misc_RNA (1)...(19): siRNA sense strand
ggccaaggcucaucuguca

SEQ ID NO: 1180366 - RNA, 19 nt, Homo sapiens
  misc_RNA (1)...(19): siRNA sense strand
cauguuugcugaccgguua

SEQ ID NO: 1180367 - RNA, 19 nt, Homo sapiens
  misc_RNA (1)...(19): siRNA sense strand
ggauucagacucagaagua

SEQ ID NO: 1180368 - RNA, 19 nt, Homo sapiens
  misc_RNA (1)...(19): siRNA sense strand
gauagugguuuauuuaguc

SEQ ID NO: 1180369 - RNA, 19 nt, Homo sapiens
  misc_RNA (1)...(19): siRNA sense strand
uuagagacuugccuguuua

SEQ ID NO: 1180370 - RNA, 19 nt, Homo sapiens
  misc_RNA (1)...(19): siRNA sense strand
caacuaaugacgauauuga

SEQ ID NO: 1180371 - RNA, 19 nt, Homo sapiens
  misc_RNA (1)...(19): siRNA sense strand
guagugaaguuguaugcaa

SEQ ID NO: 1180372 - RNA, 19 nt, Homo sapiens
  misc_RNA (1)...(19): siRNA sense strand
aaagaagaguucauguuga

SEQ ID NO: 1180373 - RNA, 19 nt, Homo sapiens
  misc_RNA (1)...(19): siRNA sense strand
gugaaagugugacagauga

SEQ ID NO: 1180374 - RNA, 19 nt, Homo sapiens
  misc_RNA (1)...(19): siRNA sense strand
guggauccguuuauucuuu

SEQ ID NO: 1180375 - RNA, 19 nt, Homo sapiens
  misc_RNA (1)...(19): siRNA sense strand
agaaaagucucccaaauuu

SEQ ID NO: 1180376 - RNA, 19 nt, Homo sapiens
  misc_RNA (1)...(19): siRNA sense strand
ggaaugcuuugugucauga

SEQ ID NO: 1180377 - RNA, 19 nt, Homo sapiens
  misc_RNA (1)...(19): siRNA sense strand
gguuacuggucaucauuua

SEQ ID NO: 1180378 - RNA, 19 nt, Homo sapiens
  misc_RNA (1)...(19): siRNA sense strand
gaaagccaacuccucguaa

SEQ ID NO: 1180379 - RNA, 19 nt, Homo sapiens
  misc_RNA (1)...(19): siRNA sense strand
gcuuaaaugugcaaaguca

SEQ ID NO: 1180380 - RNA, 19 nt, Homo sapiens
  misc_RNA (1)...(19): siRNA sense strand
uuaacucacugcucacuuu

SEQ ID NO: 1180381 - RNA, 19 nt, Homo sapiens
  misc_RNA (1)...(19): siRNA sense strand
ccaaaugauccugcaauua

SEQ ID NO: 1180382 - RNA, 19 nt, Homo sapiens
  misc_RNA (1)...(19): siRNA sense strand
cagcuugucucagaaauau

SEQ ID NO: 1180383 - RNA, 19 nt, Homo sapiens
  misc_RNA (1)...(19): siRNA sense strand
aagcagauauucacaaaca

SEQ ID NO: 1180384 - RNA, 19 nt, Homo sapiens
  misc_RNA (1)...(19): siRNA sense strand
agaagcagauauucacaaa

SEQ ID NO: 1180385 - RNA, 19 nt, Homo sapiens
  misc_RNA (1)...(19): siRNA sense strand
aagggaagauagugguuua

SEQ ID NO: 1180386 - RNA, 19 nt, Homo sapiens
  misc_RNA (1)...(19): siRNA sense strand
gguaauagugaguugauaa

SEQ ID NO: 1180387 - RNA, 19 nt, Homo sapiens
  misc_RNA (1)...(19): siRNA sense strand
gcaaaaguccgaaauugua

SEQ ID NO: 1180388 - RNA, 19 nt, Homo sapiens
  misc_RNA (1)...(19): siRNA sense strand
uagagacacugccaucuug

SEQ ID NO: 1180389 - RNA, 19 nt, Homo sapiens
  misc_RNA (1)...(19): siRNA sense strand
gcugaccgguuaucuaaau

SEQ ID NO: 1180390 - RNA, 19 nt, Homo sapiens
  misc_RNA (1)...(19): siRNA sense strand
gcagaguuccucaaaauua

SEQ ID NO: 1180391 - RNA, 19 nt, Homo sapiens
  misc_RNA (1)...(19): siRNA sense strand
caaacacaguugcuagguu

SEQ ID NO: 1180392 - RNA, 19 nt, Homo sapiens
  misc_RNA (1)...(19): siRNA sense strand
cuucaaagccauacaauga

SEQ ID NO: 1180393 - RNA, 19 nt, Homo sapiens
  misc_RNA (1)...(19): siRNA sense strand
gaaguugagaguagugaaa

SEQ ID NO: 1180394 - RNA, 19 nt, Homo sapiens
  misc_RNA (1)...(19): siRNA sense strand
gaaauguaauaccugauac

SEQ ID NO: 1180395 - RNA, 19 nt, Homo sapiens
  misc_RNA (1)...(19): siRNA sense strand
guaaagaagcagauauuca

SEQ ID NO: 1180396 - RNA, 19 nt, Homo sapiens
  misc_RNA (1)...(19): siRNA sense strand
gagauaggauucaugaaaa

SEQ ID NO: 1180397 - RNA, 19 nt, Homo sapiens
  misc_RNA (1)...(19): siRNA sense strand
gaacuagaacaaacuuuag

SEQ ID NO: 1180398 - RNA, 19 nt, Homo sapiens
  misc_RNA (1)...(19): siRNA sense strand
cagcagaucuuguggaaaa

SEQ ID NO: 1180399 - RNA, 19 nt, Homo sapiens
  misc_RNA (1)...(19): siRNA sense strand
agaaaggagucucuucaug

SEQ ID NO: 1180400 - RNA, 19 nt, Homo sapiens
  misc_RNA (1)...(19): siRNA sense strand
acaaagagcaccaccaaga

SEQ ID NO: 1180401 - RNA, 19 nt, Homo sapiens
  misc_RNA (1)...(19): siRNA sense strand
guuccagaauguaaaguuu

SEQ ID NO: 1180402 - RNA, 19 nt, Homo sapiens
  misc_RNA (1)...(19): siRNA sense strand
gcaaugcagugaagcuagu

SEQ ID NO: 1180403 - RNA, 19 nt, Homo sapiens
  misc_RNA (1)...(19): siRNA sense strand
ucaaagccauacaaugaug

SEQ ID NO: 1180404 - RNA, 19 nt, Homo sapiens
  misc_RNA (1)...(19): siRNA sense strand
ggauauagaggcuguagug

SEQ ID NO: 1180405 - RNA, 19 nt, Homo sapiens
  misc_RNA (1)...(19): siRNA sense strand
acacacauccuuucucuug

SEQ ID NO: 1180406 - RNA, 19 nt, Homo sapiens
  misc_RNA (1)...(19): siRNA sense strand
gaagaagguucaguuugca

SEQ ID NO: 1180407 - RNA, 19 nt, Homo sapiens
  misc_RNA (1)...(19): siRNA sense strand
gaaagucagagacagaaau

SEQ ID NO: 1180408 - RNA, 19 nt, Homo sapiens
  misc_RNA (1)...(19): siRNA sense strand
gcagugcauuuaaagacuu

SEQ ID NO: 1180409 - RNA, 19 nt, Homo sapiens
  misc_RNA (1)...(19): siRNA sense strand
aaggaacuaugcaguguaa

SEQ ID NO: 1180410 - RNA, 19 nt, Homo sapiens
  misc_RNA (1)...(19): siRNA sense strand
uauagaggauucagacuca

SEQ ID NO: 1180411 - RNA, 19 nt, Homo sapiens
  misc_RNA (1)...(19): siRNA sense strand
gagaaggcagcgugcauuu

SEQ ID NO: 1180412 - RNA, 19 nt, Homo sapiens
  misc_RNA (1)...(19): siRNA sense strand
caaagagcaccaccaagaa

SEQ ID NO: 1180413 - RNA, 19 nt, Homo sapiens
  misc_RNA (1)...(19): siRNA sense strand
caaggaacuguuaauguuu

SEQ ID NO: 1180414 - RNA, 19 nt, Homo sapiens
  misc_RNA (1)...(19): siRNA sense strand
gaaguggauccguuuauuc

SEQ ID NO: 1180415 - RNA, 19 nt, Homo sapiens
  misc_RNA (1)...(19): siRNA sense strand
aagagaaguuggauauaga

SEQ ID NO: 1180416 - RNA, 19 nt, Homo sapiens
  misc_RNA (1)...(19): siRNA sense strand
uccaucaacuccucuagua

SEQ ID NO: 1180417 - RNA, 19 nt, Homo sapiens
  misc_RNA (1)...(19): siRNA sense strand
ucagugaucccaaauauag

SEQ ID NO: 1180418 - RNA, 19 nt, Homo sapiens
  misc_RNA (1)...(19): siRNA sense strand
gcccuucucccauaucaua

SEQ ID NO: 1180419 - RNA, 19 nt, Homo sapiens
  misc_RNA (1)...(19): siRNA sense strand
caaaaccagugcaggaaua

SEQ ID NO: 1180420 - RNA, 19 nt, Homo sapiens
  misc_RNA (1)...(19): siRNA sense strand
caacaaaggcagcaguuag

SEQ ID NO: 1180421 - RNA, 19 nt, Homo sapiens
  misc_RNA (1)...(19): siRNA sense strand
caccaagacuuaggauuga

SEQ ID NO: 1180422 - RNA, 19 nt, Homo sapiens
  misc_RNA (1)...(19): siRNA sense strand
gaaacaaucacaugaagac

SEQ ID NO: 1180423 - RNA, 19 nt, Homo sapiens
  misc_RNA (1)...(19): siRNA sense strand
caauuuaacugaggucaca

SEQ ID NO: 1180424 - RNA, 19 nt, Homo sapiens
  misc_RNA (1)...(19): siRNA sense strand
ucaguuugcagaagcauua

SEQ ID NO: 1180425 - RNA, 19 nt, Homo sapiens
  misc_RNA (1)...(19): siRNA sense strand
aaacucaugcgaucucuuu

SEQ ID NO: 1180426 - RNA, 19 nt, Homo sapiens
  misc_RNA (1)...(19): siRNA sense strand
caagggagaauuagccaaa

SEQ ID NO: 1180427 - RNA, 19 nt, Homo sapiens
  misc_RNA (1)...(19): siRNA sense strand
gaaggaacuaugcagugua

SEQ ID NO: 1180428 - RNA, 19 nt, Homo sapiens
  misc_RNA (1)...(19): siRNA sense strand
ggacauaaagaacuaccuu

SEQ ID NO: 1180429 - RNA, 19 nt, Homo sapiens
  misc_RNA (1)...(19): siRNA sense strand
gguacaggcugaacgacua

SEQ ID NO: 1180430 - RNA, 19 nt, Homo sapiens
  misc_RNA (1)...(19): siRNA sense strand
gcaugaaguuugagauugg

SEQ ID NO: 1180431 - RNA, 19 nt, Homo sapiens
  misc_RNA (1)...(19): siRNA sense strand
ugaaagggcucuggaugga

SEQ ID NO: 1180432 - RNA, 19 nt, Homo sapiens
  misc_RNA (1)...(19): siRNA sense strand
gccaccagcugccuacaaa

SEQ ID NO: 1180433 - RNA, 19 nt, Homo sapiens
  misc_RNA (1)...(19): siRNA sense strand
ccaacgacguggugcagaa

SEQ ID NO: 1180434 - RNA, 19 nt, Homo sapiens
  misc_RNA (1)...(19): siRNA sense strand
ggcaugaaguuugagauug

SEQ ID NO: 1180435 - RNA, 19 nt, Homo sapiens
  misc_RNA (1)...(19): siRNA sense strand
gcacguugaucaccaccau

SEQ ID NO: 1180436 - RNA, 19 nt, Homo sapiens
  misc_RNA (1)...(19): siRNA sense strand
gcugaacgacuacguguga

SEQ ID NO: 1180437 - RNA, 19 nt, Homo sapiens
  misc_RNA (1)...(19): siRNA sense strand
gcacagcacaggcaucuac

SEQ ID NO: 1180438 - RNA, 19 nt, Homo sapiens
  misc_RNA (1)...(19): siRNA sense strand
ccagcggcaugaaguuuga

SEQ ID NO: 1180439 - RNA, 19 nt, Homo sapiens
  misc_RNA (1)...(19): siRNA sense strand
ggccguguccuaccugaaa

SEQ ID NO: 1180440 - RNA, 19 nt, Homo sapiens
  misc_RNA (1)...(19): siRNA sense strand
gcacgugggcaccaacauc

SEQ ID NO: 1180441 - RNA, 19 nt, Homo sapiens
  misc_RNA (1)...(19): siRNA sense strand
ccaccacgaccacugcaaa

SEQ ID NO: 1180442 - RNA, 19 nt, Homo sapiens
  misc_RNA (1)...(19): siRNA sense strand
caccagcugccuacaaaga

SEQ ID NO: 1180443 - RNA, 19 nt, Homo sapiens
  misc_RNA (1)...(19): siRNA sense strand
cggcaugaaguuugagauu

SEQ ID NO: 1180444 - RNA, 19 nt, Homo sapiens
  misc_RNA (1)...(19): siRNA sense strand
ccagcugccuacaaagaca

SEQ ID NO: 1180445 - RNA, 19 nt, Homo sapiens
  misc_RNA (1)...(19): siRNA sense strand
gcccagcggcaugaaguuu

SEQ ID NO: 1180446 - RNA, 19 nt, Homo sapiens
  misc_RNA (1)...(19): siRNA sense strand
gguacaggcugaacgacua

SEQ ID NO: 1180447 - RNA, 19 nt, Homo sapiens
  misc_RNA (1)...(19): siRNA sense strand
gcaugaaguuugagauugg

SEQ ID NO: 1180448 - RNA, 19 nt, Homo sapiens
  misc_RNA (1)...(19): siRNA sense strand
ugaaagggcucuggaugga

SEQ ID NO: 1180449 - RNA, 19 nt, Homo sapiens
  misc_RNA (1)...(19): siRNA sense strand
gccaccagcugccuacaaa

SEQ ID NO: 1180450 - RNA, 19 nt, Homo sapiens
  misc_RNA (1)...(19): siRNA sense strand
ccaacgacguggugcagaa

SEQ ID NO: 1180451 - RNA, 19 nt, Homo sapiens
  misc_RNA (1)...(19): siRNA sense strand
ggcaugaaguuugagauug

SEQ ID NO: 1180452 - RNA, 19 nt, Homo sapiens
  misc_RNA (1)...(19): siRNA sense strand
gcacguugaucaccaccau

SEQ ID NO: 1180453 - RNA, 19 nt, Homo sapiens
  misc_RNA (1)...(19): siRNA sense strand
gcugaacgacuacguguga

SEQ ID NO: 1180454 - RNA, 19 nt, Homo sapiens
  misc_RNA (1)...(19): siRNA sense strand
gcacagcacaggcaucuac

SEQ ID NO: 1180455 - RNA, 19 nt, Homo sapiens
  misc_RNA (1)...(19): siRNA sense strand
ccagcggcaugaaguuuga

SEQ ID NO: 1180456 - RNA, 19 nt, Homo sapiens
  misc_RNA (1)...(19): siRNA sense strand
ggccguguccuaccugaaa

SEQ ID NO: 1180457 - RNA, 19 nt, Homo sapiens
  misc_RNA (1)...(19): siRNA sense strand
gcacgugggcaccaacauc

SEQ ID NO: 1180458 - RNA, 19 nt, Homo sapiens
  misc_RNA (1)...(19): siRNA sense strand
ccaccacgaccacugcaaa

SEQ ID NO: 1180459 - RNA, 19 nt, Homo sapiens
  misc_RNA (1)...(19): siRNA sense strand
caccagcugccuacaaaga

SEQ ID NO: 1180460 - RNA, 19 nt, Homo sapiens
  misc_RNA (1)...(19): siRNA sense strand
cggcaugaaguuugagauu

SEQ ID NO: 1180461 - RNA, 19 nt, Homo sapiens
  misc_RNA (1)...(19): siRNA sense strand
ccagcugccuacaaagaca

SEQ ID NO: 1180462 - RNA, 19 nt, Homo sapiens
  misc_RNA (1)...(19): siRNA sense strand
gcccagcggcaugaaguuu

SEQ ID NO: 1180463 - RNA, 19 nt, Homo sapiens
  misc_RNA (1)...(19): siRNA sense strand
gguacaggcugaacgacua

SEQ ID NO: 1180464 - RNA, 19 nt, Homo sapiens
  misc_RNA (1)...(19): siRNA sense strand
gcaugaaguuugagauugg

SEQ ID NO: 1180465 - RNA, 19 nt, Homo sapiens
  misc_RNA (1)...(19): siRNA sense strand
ugaaagggcucuggaugga

SEQ ID NO: 1180466 - RNA, 19 nt, Homo sapiens
  misc_RNA (1)...(19): siRNA sense strand
gccaccagcugccuacaaa

SEQ ID NO: 1180467 - RNA, 19 nt, Homo sapiens
  misc_RNA (1)...(19): siRNA sense strand
ccaacgacguggugcagaa

SEQ ID NO: 1180468 - RNA, 19 nt, Homo sapiens
  misc_RNA (1)...(19): siRNA sense strand
ggcaugaaguuugagauug

SEQ ID NO: 1180469 - RNA, 19 nt, Homo sapiens
  misc_RNA (1)...(19): siRNA sense strand
gcacguugaucaccaccau

SEQ ID NO: 1180470 - RNA, 19 nt, Homo sapiens
  misc_RNA (1)...(19): siRNA sense strand
gcugaacgacuacguguga

SEQ ID NO: 1180471 - RNA, 19 nt, Homo sapiens
  misc_RNA (1)...(19): siRNA sense strand
gcacagcacaggcaucuac

SEQ ID NO: 1180472 - RNA, 19 nt, Homo sapiens
  misc_RNA (1)...(19): siRNA sense strand
ccagcggcaugaaguuuga

SEQ ID NO: 1180473 - RNA, 19 nt, Homo sapiens
  misc_RNA (1)...(19): siRNA sense strand
ggccguguccuaccugaaa

SEQ ID NO: 1180474 - RNA, 19 nt, Homo sapiens
  misc_RNA (1)...(19): siRNA sense strand
gcacgugggcaccaacauc

SEQ ID NO: 1180475 - RNA, 19 nt, Homo sapiens
  misc_RNA (1)...(19): siRNA sense strand
ccaccacgaccacugcaaa

SEQ ID NO: 1180476 - RNA, 19 nt, Homo sapiens
  misc_RNA (1)...(19): siRNA sense strand
caccagcugccuacaaaga

SEQ ID NO: 1180477 - RNA, 19 nt, Homo sapiens
  misc_RNA (1)...(19): siRNA sense strand
cggcaugaaguuugagauu

SEQ ID NO: 1180478 - RNA, 19 nt, Homo sapiens
  misc_RNA (1)...(19): siRNA sense strand
ccagcugccuacaaagaca

SEQ ID NO: 1180479 - RNA, 19 nt, Homo sapiens
  misc_RNA (1)...(19): siRNA sense strand
gcccagcggcaugaaguuu

SEQ ID NO: 1180480 - RNA, 19 nt, Homo sapiens
  misc_RNA (1)...(19): siRNA sense strand
gguacaggcugaacgacua

SEQ ID NO: 1180481 - RNA, 19 nt, Homo sapiens
  misc_RNA (1)...(19): siRNA sense strand
gcaugaaguuugagauugg

SEQ ID NO: 1180482 - RNA, 19 nt, Homo sapiens
  misc_RNA (1)...(19): siRNA sense strand
ugaaagggcucuggaugga

SEQ ID NO: 1180483 - RNA, 19 nt, Homo sapiens
  misc_RNA (1)...(19): siRNA sense strand
gccaccagcugccuacaaa

SEQ ID NO: 1180484 - RNA, 19 nt, Homo sapiens
  misc_RNA (1)...(19): siRNA sense strand
ccaacgacguggugcagaa

SEQ ID NO: 1180485 - RNA, 19 nt, Homo sapiens
  misc_RNA (1)...(19): siRNA sense strand
ggcaugaaguuugagauug

SEQ ID NO: 1180486 - RNA, 19 nt, Homo sapiens
  misc_RNA (1)...(19): siRNA sense strand
gcacguugaucaccaccau

SEQ ID NO: 1180487 - RNA, 19 nt, Homo sapiens
  misc_RNA (1)...(19): siRNA sense strand
gcugaacgacuacguguga

SEQ ID NO: 1180488 - RNA, 19 nt, Homo sapiens
  misc_RNA (1)...(19): siRNA sense strand
gcacagcacaggcaucuac

SEQ ID NO: 1180489 - RNA, 19 nt, Homo sapiens
  misc_RNA (1)...(19): siRNA sense strand
ccagcggcaugaaguuuga

SEQ ID NO: 1180490 - RNA, 19 nt, Homo sapiens
  misc_RNA (1)...(19): siRNA sense strand
ggccguguccuaccugaaa

SEQ ID NO: 1180491 - RNA, 19 nt, Homo sapiens
  misc_RNA (1)...(19): siRNA sense strand
gcacgugggcaccaacauc

SEQ ID NO: 1180492 - RNA, 19 nt, Homo sapiens
  misc_RNA (1)...(19): siRNA sense strand
ccaccacgaccacugcaaa

SEQ ID NO: 1180493 - RNA, 19 nt, Homo sapiens
  misc_RNA (1)...(19): siRNA sense strand
caccagcugccuacaaaga

SEQ ID NO: 1180494 - RNA, 19 nt, Homo sapiens
  misc_RNA (1)...(19): siRNA sense strand
cggcaugaaguuugagauu

SEQ ID NO: 1180495 - RNA, 19 nt, Homo sapiens
  misc_RNA (1)...(19): siRNA sense strand
ccagcugccuacaaagaca

SEQ ID NO: 1180496 - RNA, 19 nt, Homo sapiens
  misc_RNA (1)...(19): siRNA sense strand
gcccagcggcaugaaguuu

SEQ ID NO: 1180497 - RNA, 19 nt, Homo sapiens
  misc_RNA (1)...(19): siRNA sense strand
gaaggaggcugaagaggaa

SEQ ID NO: 1180498 - RNA, 19 nt, Homo sapiens
  misc_RNA (1)...(19): siRNA sense strand
gaaccaguauucuuacauu

SEQ ID NO: 1180499 - RNA, 19 nt, Homo sapiens
  misc_RNA (1)...(19): siRNA sense strand
gaaggcagcugcacguguu

SEQ ID NO: 1180500 - RNA, 19 nt, Homo sapiens
  misc_RNA (1)...(19): siRNA sense strand
ggacuggccucaucaaauc

SEQ ID NO: 1180501 - RNA, 19 nt, Homo sapiens
  misc_RNA (1)...(19): siRNA sense strand
gaaaacaaaugaaccagua

SEQ ID NO: 1180502 - RNA, 19 nt, Homo sapiens
  misc_RNA (1)...(19): siRNA sense strand
caaagagugucucaucaga

SEQ ID NO: 1180503 - RNA, 19 nt, Homo sapiens
  misc_RNA (1)...(19): siRNA sense strand
aagagugucucaucagaua

SEQ ID NO: 1180504 - RNA, 19 nt, Homo sapiens
  misc_RNA (1)...(19): siRNA sense strand
gaaaauaagcgacgacauu

SEQ ID NO: 1180505 - RNA, 19 nt, Homo sapiens
  misc_RNA (1)...(19): siRNA sense strand
gaaaggaaaccuguaggaa

SEQ ID NO: 1180506 - RNA, 19 nt, Homo sapiens
  misc_RNA (1)...(19): siRNA sense strand
ggaccgaucccacugaaga

SEQ ID NO: 1180507 - RNA, 19 nt, Homo sapiens
  misc_RNA (1)...(19): siRNA sense strand
caaaugaaccaguauucuu

SEQ ID NO: 1180508 - RNA, 19 nt, Homo sapiens
  misc_RNA (1)...(19): siRNA sense strand
gaagaugaugagaagcuua

SEQ ID NO: 1180509 - RNA, 19 nt, Homo sapiens
  misc_RNA (1)...(19): siRNA sense strand
gugaagagcuggcugaaaa

SEQ ID NO: 1180510 - RNA, 19 nt, Homo sapiens
  misc_RNA (1)...(19): siRNA sense strand
ggcagagcaugaagacuuu

SEQ ID NO: 1180511 - RNA, 19 nt, Homo sapiens
  misc_RNA (1)...(19): siRNA sense strand
agaccauccuguauaagua

SEQ ID NO: 1180512 - RNA, 19 nt, Homo sapiens
  misc_RNA (1)...(19): siRNA sense strand
caucagauaugcccaagag

SEQ ID NO: 1180513 - RNA, 19 nt, Homo sapiens
  misc_RNA (1)...(19): siRNA sense strand
ucaaagugcucaguaguca

SEQ ID NO: 1180514 - RNA, 19 nt, Homo sapiens
  misc_RNA (1)...(19): siRNA sense strand
gugcgcagaugcucacuug

SEQ ID NO: 1180515 - RNA, 19 nt, Homo sapiens
  misc_RNA (1)...(19): siRNA sense strand
ggagaagccuguggagaag

SEQ ID NO: 1180516 - RNA, 19 nt, Homo sapiens
  misc_RNA (1)...(19): siRNA sense strand
caaaggacacuaugcaauc

SEQ ID NO: 1180517 - RNA, 19 nt, Homo sapiens
  misc_RNA (1)...(19): siRNA sense strand
gaccauuucugccaacauc

SEQ ID NO: 1180518 - RNA, 19 nt, Homo sapiens
  misc_RNA (1)...(19): siRNA sense strand
caggagcugucaccagaaa

SEQ ID NO: 1180519 - RNA, 19 nt, Homo sapiens
  misc_RNA (1)...(19): siRNA sense strand
gagugucgcugcugcuaug

SEQ ID NO: 1180520 - RNA, 19 nt, Homo sapiens
  misc_RNA (1)...(19): siRNA sense strand
ugaacaaggugacauaaaa

SEQ ID NO: 1180521 - RNA, 19 nt, Homo sapiens
  misc_RNA (1)...(19): siRNA sense strand
gcgcagaugcucacuuguu

SEQ ID NO: 1180522 - RNA, 19 nt, Homo sapiens
  misc_RNA (1)...(19): siRNA sense strand
gaacagaaaagaaagaaug

SEQ ID NO: 1180523 - RNA, 19 nt, Homo sapiens
  misc_RNA (1)...(19): siRNA sense strand
acagugaugugaagagguu

SEQ ID NO: 1180524 - RNA, 19 nt, Homo sapiens
  misc_RNA (1)...(19): siRNA sense strand
cccagaccauccuguauaa

SEQ ID NO: 1180525 - RNA, 19 nt, Homo sapiens
  misc_RNA (1)...(19): siRNA sense strand
aauaagcgacgacauugua

SEQ ID NO: 1180526 - RNA, 19 nt, Homo sapiens
  misc_RNA (1)...(19): siRNA sense strand
caacuucccacucaacaug

SEQ ID NO: 1180527 - RNA, 19 nt, Homo sapiens
  misc_RNA (1)...(19): siRNA sense strand
ggagagaacaccuucaaac

SEQ ID NO: 1180528 - RNA, 19 nt, Homo sapiens
  misc_RNA (1)...(19): siRNA sense strand
aaggaaaccuguaggaagu

SEQ ID NO: 1180529 - RNA, 19 nt, Homo sapiens
  misc_RNA (1)...(19): siRNA sense strand
ccaguauucuuacauugau

SEQ ID NO: 1180530 - RNA, 19 nt, Homo sapiens
  misc_RNA (1)...(19): siRNA sense strand
uaccguaccucuauugaag

SEQ ID NO: 1180531 - RNA, 19 nt, Homo sapiens
  misc_RNA (1)...(19): siRNA sense strand
gaugaaugaagaacaguau

SEQ ID NO: 1180532 - RNA, 19 nt, Homo sapiens
  misc_RNA (1)...(19): siRNA sense strand
ccacagaugccacccuaug

SEQ ID NO: 1180533 - RNA, 19 nt, Homo sapiens
  misc_RNA (1)...(19): siRNA sense strand
gaacaccuucaaacgcauu

SEQ ID NO: 1180534 - RNA, 19 nt, Homo sapiens
  misc_RNA (1)...(19): siRNA sense strand
gaugaugagaagcuuauug

SEQ ID NO: 1180535 - RNA, 19 nt, Homo sapiens
  misc_RNA (1)...(19): siRNA sense strand
ccacugaagaugaugagaa

SEQ ID NO: 1180536 - RNA, 19 nt, Homo sapiens
  misc_RNA (1)...(19): siRNA sense strand
ggaaaccuguaggaagugu

SEQ ID NO: 1180537 - RNA, 19 nt, Homo sapiens
  misc_RNA (1)...(19): siRNA sense strand
aaaggacacuaugcaauca

SEQ ID NO: 1180538 - RNA, 19 nt, Homo sapiens
  misc_RNA (1)...(19): siRNA sense strand
gaaugaagaacaguaucaa

SEQ ID NO: 1180539 - RNA, 19 nt, Homo sapiens
  misc_RNA (1)...(19): siRNA sense strand
uggagaagccuguggagaa

SEQ ID NO: 1180540 - RNA, 19 nt, Homo sapiens
  misc_RNA (1)...(19): siRNA sense strand
gaggauguucuuucuugaa

SEQ ID NO: 1180541 - RNA, 19 nt, Homo sapiens
  misc_RNA (1)...(19): siRNA sense strand
aacaagagcaggaguucua

SEQ ID NO: 1180542 - RNA, 19 nt, Homo sapiens
  misc_RNA (1)...(19): siRNA sense strand
gcaaagagugucucaucag

SEQ ID NO: 1180543 - RNA, 19 nt, Homo sapiens
  misc_RNA (1)...(19): siRNA sense strand
aaagaaagaauggagagaa

SEQ ID NO: 1180544 - RNA, 19 nt, Homo sapiens
  misc_RNA (1)...(19): siRNA sense strand
gcucaaaggacacuaugca

SEQ ID NO: 1180545 - RNA, 19 nt, Homo sapiens
  misc_RNA (1)...(19): siRNA sense strand
caacgugcgggucaacuau

SEQ ID NO: 1180546 - RNA, 19 nt, Homo sapiens
  misc_RNA (1)...(19): siRNA sense strand
ugagaagcuuauugaggaa

SEQ ID NO: 1180547 - RNA, 19 nt, Homo sapiens
  misc_RNA (1)...(19): siRNA sense strand
ugucgaguuucuauuaaug

SEQ ID NO: 1180548 - RNA, 19 nt, Homo sapiens
  misc_RNA (1)...(19): siRNA sense strand
gggacuggccucaucaaau

SEQ ID NO: 1180549 - RNA, 19 nt, Homo sapiens
  misc_RNA (1)...(19): siRNA sense strand
cgaaaggaaaccuguagga

SEQ ID NO: 1180550 - RNA, 19 nt, Homo sapiens
  misc_RNA (1)...(19): siRNA sense strand
ugaccgacgugcucuccuu

SEQ ID NO: 1180551 - RNA, 19 nt, Homo sapiens
  misc_RNA (1)...(19): siRNA sense strand
ucaaaggacacuaugcaau

SEQ ID NO: 1180552 - RNA, 19 nt, Homo sapiens
  misc_RNA (1)...(19): siRNA sense strand
guaccucuauugaagaaaa

SEQ ID NO: 1180553 - RNA, 19 nt, Homo sapiens
  misc_RNA (1)...(19): siRNA sense strand
gcaacaagagcaggaguuc

SEQ ID NO: 1180554 - RNA, 19 nt, Homo sapiens
  misc_RNA (1)...(19): siRNA sense strand
ugaaugaagaacaguauca

SEQ ID NO: 1180555 - RNA, 19 nt, Homo sapiens
  misc_RNA (1)...(19): siRNA sense strand
ucugucgaguuucuauuaa

SEQ ID NO: 1180556 - RNA, 19 nt, Homo sapiens
  misc_RNA (1)...(19): siRNA sense strand
gaagaacaguaucaaaagg

SEQ ID NO: 1180557 - RNA, 19 nt, Homo sapiens
  misc_RNA (1)...(19): siRNA sense strand
uggcagagcaugaagacuu

SEQ ID NO: 1180558 - RNA, 19 nt, Homo sapiens
  misc_RNA (1)...(19): siRNA sense strand
uugaggaaauccagaagga

SEQ ID NO: 1180559 - RNA, 19 nt, Homo sapiens
  misc_RNA (1)...(19): siRNA sense strand
cgcagaugcucacuuguuc

SEQ ID NO: 1180560 - RNA, 19 nt, Homo sapiens
  misc_RNA (1)...(19): siRNA sense strand
gagagaacaccuucaaacg

SEQ ID NO: 1180561 - RNA, 19 nt, Homo sapiens
  misc_RNA (1)...(19): siRNA sense strand
gaagaggaacagaaaagaa

SEQ ID NO: 1180562 - RNA, 19 nt, Homo sapiens
  misc_RNA (1)...(19): siRNA sense strand
gucagggacucuggaaaga

SEQ ID NO: 1180563 - RNA, 19 nt, Homo sapiens
  misc_RNA (1)...(19): siRNA sense strand
acagaugaaugaagaacag

SEQ ID NO: 1180564 - RNA, 19 nt, Homo sapiens
  misc_RNA (1)...(19): siRNA sense strand
caaccugcccaugcacuuu

SEQ ID NO: 1180565 - RNA, 19 nt, Homo sapiens
  misc_RNA (1)...(19): siRNA sense strand
aagagcaggaguucuauga

SEQ ID NO: 1180566 - RNA, 19 nt, Homo sapiens
  misc_RNA (1)...(19): siRNA sense strand
ccaacgugcgggucaacua

SEQ ID NO: 1180567 - RNA, 19 nt, Homo sapiens
  misc_RNA (1)...(19): siRNA sense strand
uucaacaacuucccacuca

SEQ ID NO: 1180568 - RNA, 19 nt, Homo sapiens
  misc_RNA (1)...(19): siRNA sense strand
gaaagaauggagagaacac

SEQ ID NO: 1180569 - RNA, 19 nt, Homo sapiens
  misc_RNA (1)...(19): siRNA sense strand
gaagcuuauugaggaaauc

SEQ ID NO: 1180570 - RNA, 19 nt, Homo sapiens
  misc_RNA (1)...(19): siRNA sense strand
ugaagaugaugagaagcuu

SEQ ID NO: 1180571 - RNA, 19 nt, Homo sapiens
  misc_RNA (1)...(19): siRNA sense strand
ugcaaagagugucucauca

SEQ ID NO: 1180572 - RNA, 19 nt, Homo sapiens
  misc_RNA (1)...(19): siRNA sense strand
cccuacagaugaaugaaga

SEQ ID NO: 1180573 - RNA, 19 nt, Homo sapiens
  misc_RNA (1)...(19): siRNA sense strand
agaggauguucuuucuuga

SEQ ID NO: 1180574 - RNA, 19 nt, Homo sapiens
  misc_RNA (1)...(19): siRNA sense strand
ucaacaacuucccacucaa

SEQ ID NO: 1180575 - RNA, 19 nt, Homo sapiens
  misc_RNA (1)...(19): siRNA sense strand
aagaaagaauggagagaac

SEQ ID NO: 1180576 - RNA, 19 nt, Homo sapiens
  misc_RNA (1)...(19): siRNA sense strand
cacugaagaugaugagaag

SEQ ID NO: 1180577 - RNA, 19 nt, Homo sapiens
  misc_RNA (1)...(19): siRNA sense strand
gcugcaaccgcaugucuug

SEQ ID NO: 1180578 - RNA, 19 nt, Homo sapiens
  misc_RNA (1)...(19): siRNA sense strand
acuaugcaaucacccgaaa

SEQ ID NO: 1180579 - RNA, 19 nt, Homo sapiens
  misc_RNA (1)...(19): siRNA sense strand
ccguaccucuauugaagaa

SEQ ID NO: 1180580 - RNA, 19 nt, Homo sapiens
  misc_RNA (1)...(19): siRNA sense strand
cagggacucuggaaagaac

SEQ ID NO: 1180581 - RNA, 19 nt, Homo sapiens
  misc_RNA (1)...(19): siRNA sense strand
guuugaacaaggugacaua

SEQ ID NO: 1180582 - RNA, 19 nt, Homo sapiens
  misc_RNA (1)...(19): siRNA sense strand
gcucacuuguucugcaaag

SEQ ID NO: 1180583 - RNA, 19 nt, Homo sapiens
  misc_RNA (1)...(19): siRNA sense strand
aaggauggccagcugauug

SEQ ID NO: 1180584 - RNA, 19 nt, Homo sapiens
  misc_RNA (1)...(19): siRNA sense strand
gagugucucaucagauaug

SEQ ID NO: 1180585 - RNA, 19 nt, Homo sapiens
  misc_RNA (1)...(19): siRNA sense strand
gagcagaaaaucaaagaga

SEQ ID NO: 1180586 - RNA, 19 nt, Homo sapiens
  misc_RNA (1)...(19): siRNA sense strand
gagcucaaaggacacuaug

SEQ ID NO: 1180587 - RNA, 19 nt, Homo sapiens
  misc_RNA (1)...(19): siRNA sense strand
caacaacuucccacucaac

SEQ ID NO: 1180588 - RNA, 19 nt, Homo sapiens
  misc_RNA (1)...(19): siRNA sense strand
cagaccauccuguauaagu

SEQ ID NO: 1180589 - RNA, 19 nt, Homo sapiens
  misc_RNA (1)...(19): siRNA sense strand
aaccaguauucuuacauug

SEQ ID NO: 1180590 - RNA, 19 nt, Homo sapiens
  misc_RNA (1)...(19): siRNA sense strand
agaagcuuauugaggaaau

SEQ ID NO: 1180591 - RNA, 19 nt, Homo sapiens
  misc_RNA (1)...(19): siRNA sense strand
ggacucuggaaagaacaua

SEQ ID NO: 1180592 - RNA, 19 nt, Homo sapiens
  misc_RNA (1)...(19): siRNA sense strand
agguucagcuguccuaauc

SEQ ID NO: 1180593 - RNA, 19 nt, Homo sapiens
  misc_RNA (1)...(19): siRNA sense strand
gcucaguagucaggacauc

SEQ ID NO: 1180594 - RNA, 19 nt, Homo sapiens
  misc_RNA (1)...(19): siRNA sense strand
gagaagcuuauugaggaaa

SEQ ID NO: 1180595 - RNA, 19 nt, Homo sapiens
  misc_RNA (1)...(19): siRNA sense strand
ugccaggaguguucaagau

SEQ ID NO: 1180596 - RNA, 19 nt, Homo sapiens
  misc_RNA (1)...(19): siRNA sense strand
ugcuaccucugucgaguuu

SEQ ID NO: 1180597 - RNA, 19 nt, Homo sapiens
  misc_RNA (1)...(19): siRNA sense strand
gcaagaagcugagaaagag

SEQ ID NO: 1180598 - RNA, 19 nt, Homo sapiens
  misc_RNA (1)...(19): siRNA sense strand
gcaagaagaacaugaauuc

SEQ ID NO: 1180599 - RNA, 19 nt, Homo sapiens
  misc_RNA (1)...(19): siRNA sense strand
gcaacgacaccuacuuaua

SEQ ID NO: 1180600 - RNA, 19 nt, Homo sapiens
  misc_RNA (1)...(19): siRNA sense strand
caacgacaccuacuuauau

SEQ ID NO: 1180601 - RNA, 19 nt, Homo sapiens
  misc_RNA (1)...(19): siRNA sense strand
cgacgggaguggaguauau

SEQ ID NO: 1180602 - RNA, 19 nt, Homo sapiens
  misc_RNA (1)...(19): siRNA sense strand
gagaaagaguuuaauuugc

SEQ ID NO: 1180603 - RNA, 19 nt, Homo sapiens
  misc_RNA (1)...(19): siRNA sense strand
acacucaacuucuucauuc

SEQ ID NO: 1180604 - RNA, 19 nt, Homo sapiens
  misc_RNA (1)...(19): siRNA sense strand
cagcaacgacaccuacuua

SEQ ID NO: 1180605 - RNA, 19 nt, Homo sapiens
  misc_RNA (1)...(19): siRNA sense strand
gggcagaaaccucagauga

SEQ ID NO: 1180606 - RNA, 19 nt, Homo sapiens
  misc_RNA (1)...(19): siRNA sense strand
ggaguggaguauauaguca

SEQ ID NO: 1180607 - RNA, 19 nt, Homo sapiens
  misc_RNA (1)...(19): siRNA sense strand
gaauucaacacucaacuuc

SEQ ID NO: 1180608 - RNA, 19 nt, Homo sapiens
  misc_RNA (1)...(19): siRNA sense strand
gggaucggaugcuggagaa

SEQ ID NO: 1180609 - RNA, 19 nt, Homo sapiens
  misc_RNA (1)...(19): siRNA sense strand
gcugagaaagaguuuaauu

SEQ ID NO: 1180610 - RNA, 19 nt, Homo sapiens
  misc_RNA (1)...(19): siRNA sense strand
caagcugggucacuuccaa

SEQ ID NO: 1180611 - RNA, 19 nt, Homo sapiens
  misc_RNA (1)...(19): siRNA sense strand
agaagaacaugaauucaac

SEQ ID NO: 1180612 - RNA, 19 nt, Homo sapiens
  misc_RNA (1)...(19): siRNA sense strand
guccagaggcuaauucgaa

SEQ ID NO: 1180613 - RNA, 19 nt, Homo sapiens
  misc_RNA (1)...(19): siRNA sense strand
ccaaaugcaagaggaauga

SEQ ID NO: 1180614 - RNA, 19 nt, Homo sapiens
  misc_RNA (1)...(19): siRNA sense strand
gaguuuaauuugcgagucu

SEQ ID NO: 1180615 - RNA, 19 nt, Homo sapiens
  misc_RNA (1)...(19): siRNA sense strand
aaagcaagaagcugagaaa

SEQ ID NO: 1180616 - RNA, 19 nt, Homo sapiens
  misc_RNA (1)...(19): siRNA sense strand
ggaccaaaugcaagaggaa

SEQ ID NO: 1180617 - RNA, 19 nt, Homo sapiens
  misc_RNA (1)...(19): siRNA sense strand
aagcugagaaagaguuuaa

SEQ ID NO: 1180618 - RNA, 19 nt, Homo sapiens
  misc_RNA (1)...(19): siRNA sense strand
gggagggcuuccagcagaa

SEQ ID NO: 1180619 - RNA, 19 nt, Homo sapiens
  misc_RNA (1)...(19): siRNA sense strand
ugcccuggauaaacuauuu

SEQ ID NO: 1180620 - RNA, 19 nt, Homo sapiens
  misc_RNA (1)...(19): siRNA sense strand
gaagaacaugaauucaaca

SEQ ID NO: 1180621 - RNA, 19 nt, Homo sapiens
  misc_RNA (1)...(19): siRNA sense strand
uggaguauauagucacugu

SEQ ID NO: 1180622 - RNA, 19 nt, Homo sapiens
  misc_RNA (1)...(19): siRNA sense strand
gagcaagaagaacaugaau

SEQ ID NO: 1180623 - RNA, 19 nt, Homo sapiens
  misc_RNA (1)...(19): siRNA sense strand
auucaacacucaacuucuu

SEQ ID NO: 1180624 - RNA, 19 nt, Homo sapiens
  misc_RNA (1)...(19): siRNA sense strand
aacaugaauucaacacuca

SEQ ID NO: 1180625 - RNA, 19 nt, Homo sapiens
  misc_RNA (1)...(19): siRNA sense strand
gaagcugagaaagaguuua

SEQ ID NO: 1180626 - RNA, 19 nt, Homo sapiens
  misc_RNA (1)...(19): siRNA sense strand
caaagcaagaagcugagaa

SEQ ID NO: 1180627 - RNA, 19 nt, Homo sapiens
  misc_RNA (1)...(19): siRNA sense strand
uaucgaguccagaggcuaa

SEQ ID NO: 1180628 - RNA, 19 nt, Homo sapiens
  misc_RNA (1)...(19): siRNA sense strand
gcaaagcaagaagcugaga

SEQ ID NO: 1180629 - RNA, 19 nt, Homo sapiens
  misc_RNA (1)...(19): siRNA sense strand
ugaauucaacacucaacuu

SEQ ID NO: 1180630 - RNA, 19 nt, Homo sapiens
  misc_RNA (1)...(19): siRNA sense strand
ugagcaagaagaacaugaa

SEQ ID NO: 1180631 - RNA, 19 nt, Homo sapiens
  misc_RNA (1)...(19): siRNA sense strand
gggaguggaguauauaguc

SEQ ID NO: 1180632 - RNA, 19 nt, Homo sapiens
  misc_RNA (1)...(19): siRNA sense strand
gacgggaguggaguauaua

SEQ ID NO: 1180633 - RNA, 19 nt, Homo sapiens
  misc_RNA (1)...(19): siRNA sense strand
caagaagaacaugaauuca

SEQ ID NO: 1180634 - RNA, 19 nt, Homo sapiens
  misc_RNA (1)...(19): siRNA sense strand
ugacgacgggaguggagua

SEQ ID NO: 1180635 - RNA, 19 nt, Homo sapiens
  misc_RNA (1)...(19): siRNA sense strand
cauucaauccuacaacaau

SEQ ID NO: 1180636 - RNA, 19 nt, Homo sapiens
  misc_RNA (1)...(19): siRNA sense strand
ccgagcaugugggcagaaa

SEQ ID NO: 1180637 - RNA, 19 nt, Homo sapiens
  misc_RNA (1)...(19): siRNA sense strand
uuaauuugcgagucuuuga

SEQ ID NO: 1180638 - RNA, 19 nt, Homo sapiens
  misc_RNA (1)...(19): siRNA sense strand
cgacaccuacuuauaucga

SEQ ID NO: 1180639 - RNA, 19 nt, Homo sapiens
  misc_RNA (1)...(19): siRNA sense strand
agcaagaagcugagaaaga

SEQ ID NO: 1180640 - RNA, 19 nt, Homo sapiens
  misc_RNA (1)...(19): siRNA sense strand
aauuugcgagucuuugaua

SEQ ID NO: 1180641 - RNA, 19 nt, Homo sapiens
  misc_RNA (1)...(19): siRNA sense strand
gcgagucuuugauauacac

SEQ ID NO: 1180642 - RNA, 19 nt, Homo sapiens
  misc_RNA (1)...(19): siRNA sense strand
aacgacaccuacuuauauc

SEQ ID NO: 1180643 - RNA, 19 nt, Homo sapiens
  misc_RNA (1)...(19): siRNA sense strand
ucaacuucuucauucaauc

SEQ ID NO: 1180644 - RNA, 19 nt, Homo sapiens
  misc_RNA (1)...(19): siRNA sense strand
auucaauccuacaacaaug

SEQ ID NO: 1180645 - RNA, 19 nt, Homo sapiens
  misc_RNA (1)...(19): siRNA sense strand
gcuaagagcucuauaauuu

SEQ ID NO: 1180646 - RNA, 19 nt, Homo sapiens
  misc_RNA (1)...(19): siRNA sense strand
gaagugggcugaagaauuu

SEQ ID NO: 1180647 - RNA, 19 nt, Homo sapiens
  misc_RNA (1)...(19): siRNA sense strand
gcaaagaacuucaucuaaa

SEQ ID NO: 1180648 - RNA, 19 nt, Homo sapiens
  misc_RNA (1)...(19): siRNA sense strand
ggaacuagcucuucagaaa

SEQ ID NO: 1180649 - RNA, 19 nt, Homo sapiens
  misc_RNA (1)...(19): siRNA sense strand
ccaaagagaugauuaagaa

SEQ ID NO: 1180650 - RNA, 19 nt, Homo sapiens
  misc_RNA (1)...(19): siRNA sense strand
ggaaguaacucugauauga

SEQ ID NO: 1180651 - RNA, 19 nt, Homo sapiens
  misc_RNA (1)...(19): siRNA sense strand
gaggaaaccuucaauugua

SEQ ID NO: 1180652 - RNA, 19 nt, Homo sapiens
  misc_RNA (1)...(19): siRNA sense strand
gauaguagcucaaguggaa

SEQ ID NO: 1180653 - RNA, 19 nt, Homo sapiens
  misc_RNA (1)...(19): siRNA sense strand
gcagagaaauuccuaaaga

SEQ ID NO: 1180654 - RNA, 19 nt, Homo sapiens
  misc_RNA (1)...(19): siRNA sense strand
ggaaagaguucaaggaaga

SEQ ID NO: 1180655 - RNA, 19 nt, Homo sapiens
  misc_RNA (1)...(19): siRNA sense strand
gaagaugcgucuaaugaaa

SEQ ID NO: 1180656 - RNA, 19 nt, Homo sapiens
  misc_RNA (1)...(19): siRNA sense strand
gaagaaaggugagcaguga

SEQ ID NO: 1180657 - RNA, 19 nt, Homo sapiens
  misc_RNA (1)...(19): siRNA sense strand
gagaagcaaucuacaauga

SEQ ID NO: 1180658 - RNA, 19 nt, Homo sapiens
  misc_RNA (1)...(19): siRNA sense strand
gaacauacauccagauuuu

SEQ ID NO: 1180659 - RNA, 19 nt, Homo sapiens
  misc_RNA (1)...(19): siRNA sense strand
gacaacaggucaaucauuu

SEQ ID NO: 1180660 - RNA, 19 nt, Homo sapiens
  misc_RNA (1)...(19): siRNA sense strand
gaacaccacuucaaaauaa

SEQ ID NO: 1180661 - RNA, 19 nt, Homo sapiens
  misc_RNA (1)...(19): siRNA sense strand
gaagcaagcugacauuaca

SEQ ID NO: 1180662 - RNA, 19 nt, Homo sapiens
  misc_RNA (1)...(19): siRNA sense strand
gaugaaaccuccaugaguu

SEQ ID NO: 1180663 - RNA, 19 nt, Homo sapiens
  misc_RNA (1)...(19): siRNA sense strand
gaugaagccuuaucuaaau

SEQ ID NO: 1180664 - RNA, 19 nt, Homo sapiens
  misc_RNA (1)...(19): siRNA sense strand
gcaagaagauggugguguu

SEQ ID NO: 1180665 - RNA, 19 nt, Homo sapiens
  misc_RNA (1)...(19): siRNA sense strand
ggaaaguucugaagauaau

SEQ ID NO: 1180666 - RNA, 19 nt, Homo sapiens
  misc_RNA (1)...(19): siRNA sense strand
caaagagcauaaagucaua

SEQ ID NO: 1180667 - RNA, 19 nt, Homo sapiens
  misc_RNA (1)...(19): siRNA sense strand
gccaggagcuugauguuaa

SEQ ID NO: 1180668 - RNA, 19 nt, Homo sapiens
  misc_RNA (1)...(19): siRNA sense strand
gaggaaaguucugaagaua

SEQ ID NO: 1180669 - RNA, 19 nt, Homo sapiens
  misc_RNA (1)...(19): siRNA sense strand
gaaagaagaugguuguaac

SEQ ID NO: 1180670 - RNA, 19 nt, Homo sapiens
  misc_RNA (1)...(19): siRNA sense strand
gguuguaacucuucugaua

SEQ ID NO: 1180671 - RNA, 19 nt, Homo sapiens
  misc_RNA (1)...(19): siRNA sense strand
gaccaugcguuucaacaua

SEQ ID NO: 1180672 - RNA, 19 nt, Homo sapiens
  misc_RNA (1)...(19): siRNA sense strand
gauguuagcuggauguguu

SEQ ID NO: 1180673 - RNA, 19 nt, Homo sapiens
  misc_RNA (1)...(19): siRNA sense strand
gaacaaggucugcaaagaa

SEQ ID NO: 1180674 - RNA, 19 nt, Homo sapiens
  misc_RNA (1)...(19): siRNA sense strand
gaagcaaucuacaaugaug

SEQ ID NO: 1180675 - RNA, 19 nt, Homo sapiens
  misc_RNA (1)...(19): siRNA sense strand
cagaguauauucagaguuu

SEQ ID NO: 1180676 - RNA, 19 nt, Homo sapiens
  misc_RNA (1)...(19): siRNA sense strand
gaggagguauuaaaucaaa

SEQ ID NO: 1180677 - RNA, 19 nt, Homo sapiens
  misc_RNA (1)...(19): siRNA sense strand
gaaagcaaguugaauacau

SEQ ID NO: 1180678 - RNA, 19 nt, Homo sapiens
  misc_RNA (1)...(19): siRNA sense strand
agacuuaaauuccgaguuu

SEQ ID NO: 1180679 - RNA, 19 nt, Homo sapiens
  misc_RNA (1)...(19): siRNA sense strand
ggauauaauuucagcugua

SEQ ID NO: 1180680 - RNA, 19 nt, Homo sapiens
  misc_RNA (1)...(19): siRNA sense strand
caacagaggagguauuaaa

SEQ ID NO: 1180681 - RNA, 19 nt, Homo sapiens
  misc_RNA (1)...(19): siRNA sense strand
caaaguauguagaaucaga

SEQ ID NO: 1180682 - RNA, 19 nt, Homo sapiens
  misc_RNA (1)...(19): siRNA sense strand
uaacaggugugggcaauaa

SEQ ID NO: 1180683 - RNA, 19 nt, Homo sapiens
  misc_RNA (1)...(19): siRNA sense strand
agucauagaugcuaaguuu

SEQ ID NO: 1180684 - RNA, 19 nt, Homo sapiens
  misc_RNA (1)...(19): siRNA sense strand
gauggaugcuguaaacaaa

SEQ ID NO: 1180685 - RNA, 19 nt, Homo sapiens
  misc_RNA (1)...(19): siRNA sense strand
agaagaaccucaauaugaa

SEQ ID NO: 1180686 - RNA, 19 nt, Homo sapiens
  misc_RNA (1)...(19): siRNA sense strand
gagaucgacuuccuaagaa

SEQ ID NO: 1180687 - RNA, 19 nt, Homo sapiens
  misc_RNA (1)...(19): siRNA sense strand
gaagaagaguugacugaag

SEQ ID NO: 1180688 - RNA, 19 nt, Homo sapiens
  misc_RNA (1)...(19): siRNA sense strand
guacuucucuuugaaauuc

SEQ ID NO: 1180689 - RNA, 19 nt, Homo sapiens
  misc_RNA (1)...(19): siRNA sense strand
gaugaaggccauauucuaa

SEQ ID NO: 1180690 - RNA, 19 nt, Homo sapiens
  misc_RNA (1)...(19): siRNA sense strand
gguggaaacuugauuuguu

SEQ ID NO: 1180691 - RNA, 19 nt, Homo sapiens
  misc_RNA (1)...(19): siRNA sense strand
cuacuuagaucacuuaaca

SEQ ID NO: 1180692 - RNA, 19 nt, Homo sapiens
  misc_RNA (1)...(19): siRNA sense strand
gcuugagguuucugaauua

SEQ ID NO: 1180693 - RNA, 19 nt, Homo sapiens
  misc_RNA (1)...(19): siRNA sense strand
guauuaagguucaagaaga

SEQ ID NO: 1180694 - RNA, 19 nt, Homo sapiens
  misc_RNA (1)...(19): siRNA sense strand
agaagaaucugaagaaaca

SEQ ID NO: 1180695 - RNA, 19 nt, Homo sapiens
  misc_RNA (1)...(19): siRNA sense strand
ggaaagaugauaaaggaaa

SEQ ID NO: 1180696 - RNA, 19 nt, Homo sapiens
  misc_RNA (1)...(19): siRNA sense strand
gaaaucaguucugcuacaa

SEQ ID NO: 1180697 - RNA, 19 nt, Homo sapiens
  misc_RNA (1)...(19): siRNA sense strand
gaaaacagguagauaguga

SEQ ID NO: 1180698 - RNA, 19 nt, Homo sapiens
  misc_RNA (1)...(19): siRNA sense strand
guacaggcguuagcauuaa

SEQ ID NO: 1180699 - RNA, 19 nt, Homo sapiens
  misc_RNA (1)...(19): siRNA sense strand
gcaaguaacuaagcaguca

SEQ ID NO: 1180700 - RNA, 19 nt, Homo sapiens
  misc_RNA (1)...(19): siRNA sense strand
aaagaaaucuccagguuca

SEQ ID NO: 1180701 - RNA, 19 nt, Homo sapiens
  misc_RNA (1)...(19): siRNA sense strand
ugagagaggugauagaaau

SEQ ID NO: 1180702 - RNA, 19 nt, Homo sapiens
  misc_RNA (1)...(19): siRNA sense strand
gaaacuugauuuguuguga

SEQ ID NO: 1180703 - RNA, 19 nt, Homo sapiens
  misc_RNA (1)...(19): siRNA sense strand
gaauauguguuagcuguga

SEQ ID NO: 1180704 - RNA, 19 nt, Homo sapiens
  misc_RNA (1)...(19): siRNA sense strand
gaguaucauuguaugguua

SEQ ID NO: 1180705 - RNA, 19 nt, Homo sapiens
  misc_RNA (1)...(19): siRNA sense strand
caaaguggcucaucaucau

SEQ ID NO: 1180706 - RNA, 19 nt, Homo sapiens
  misc_RNA (1)...(19): siRNA sense strand
caucugauacugagaaaua

SEQ ID NO: 1180707 - RNA, 19 nt, Homo sapiens
  misc_RNA (1)...(19): siRNA sense strand
guggagaguucaucuguaa

SEQ ID NO: 1180708 - RNA, 19 nt, Homo sapiens
  misc_RNA (1)...(19): siRNA sense strand
gaagcuaaacuuucaagaa

SEQ ID NO: 1180709 - RNA, 19 nt, Homo sapiens
  misc_RNA (1)...(19): siRNA sense strand
caaagaagaagaagaguug

SEQ ID NO: 1180710 - RNA, 19 nt, Homo sapiens
  misc_RNA (1)...(19): siRNA sense strand
gugaagagucggaaacuua

SEQ ID NO: 1180711 - RNA, 19 nt, Homo sapiens
  misc_RNA (1)...(19): siRNA sense strand
aagagaaacucccuaagaa

SEQ ID NO: 1180712 - RNA, 19 nt, Homo sapiens
  misc_RNA (1)...(19): siRNA sense strand
acaaagaaaucuccagguu

SEQ ID NO: 1180713 - RNA, 19 nt, Homo sapiens
  misc_RNA (1)...(19): siRNA sense strand
cagcggagcuauaaacaga

SEQ ID NO: 1180714 - RNA, 19 nt, Homo sapiens
  misc_RNA (1)...(19): siRNA sense strand
caaagaagacuaguucaaa

SEQ ID NO: 1180715 - RNA, 19 nt, Homo sapiens
  misc_RNA (1)...(19): siRNA sense strand
gaagagaagcaaucuacaa

SEQ ID NO: 1180716 - RNA, 19 nt, Homo sapiens
  misc_RNA (1)...(19): siRNA sense strand
ugaaugagcuuacugaacu

SEQ ID NO: 1180717 - RNA, 19 nt, Homo sapiens
  misc_RNA (1)...(19): siRNA sense strand
ggagaagacagaagauaaa

SEQ ID NO: 1180718 - RNA, 19 nt, Homo sapiens
  misc_RNA (1)...(19): siRNA sense strand
cggagaaucuggagaagaa

SEQ ID NO: 1180719 - RNA, 19 nt, Homo sapiens
  misc_RNA (1)...(19): siRNA sense strand
gaauagaauugccaagaag

SEQ ID NO: 1180720 - RNA, 19 nt, Homo sapiens
  misc_RNA (1)...(19): siRNA sense strand
gcagaaggcacaguugaua

SEQ ID NO: 1180721 - RNA, 19 nt, Homo sapiens
  misc_RNA (1)...(19): siRNA sense strand
cagaggagguauuaaauca

SEQ ID NO: 1180722 - RNA, 19 nt, Homo sapiens
  misc_RNA (1)...(19): siRNA sense strand
aagaagaaccucaauauga

SEQ ID NO: 1180723 - RNA, 19 nt, Homo sapiens
  misc_RNA (1)...(19): siRNA sense strand
cagcguauuugagaauuua

SEQ ID NO: 1180724 - RNA, 19 nt, Homo sapiens
  misc_RNA (1)...(19): siRNA sense strand
gagccagacuuauuagaug

SEQ ID NO: 1180725 - RNA, 19 nt, Homo sapiens
  misc_RNA (1)...(19): siRNA sense strand
gaagacagaagauaaagau

SEQ ID NO: 1180726 - RNA, 19 nt, Homo sapiens
  misc_RNA (1)...(19): siRNA sense strand
ucaaggaggaggauuauuu

SEQ ID NO: 1180727 - RNA, 19 nt, Homo sapiens
  misc_RNA (1)...(19): siRNA sense strand
gaggaacaaagaacaaaua

SEQ ID NO: 1180728 - RNA, 19 nt, Homo sapiens
  misc_RNA (1)...(19): siRNA sense strand
gaacaacaguaugaaucuu

SEQ ID NO: 1180729 - RNA, 19 nt, Homo sapiens
  misc_RNA (1)...(19): siRNA sense strand
cagagaaauuccuaaagaa

SEQ ID NO: 1180730 - RNA, 19 nt, Homo sapiens
  misc_RNA (1)...(19): siRNA sense strand
gaagagagacgaaaacgua

SEQ ID NO: 1180731 - RNA, 19 nt, Homo sapiens
  misc_RNA (1)...(19): siRNA sense strand
uaaaugaagaugcgucuaa

SEQ ID NO: 1180732 - RNA, 19 nt, Homo sapiens
  misc_RNA (1)...(19): siRNA sense strand
gcugaagaauuuaaugaug

SEQ ID NO: 1180733 - RNA, 19 nt, Homo sapiens
  misc_RNA (1)...(19): siRNA sense strand
ggacucauccuugguguuu

SEQ ID NO: 1180734 - RNA, 19 nt, Homo sapiens
  misc_RNA (1)...(19): siRNA sense strand
gaagacuaguucaaauugu

SEQ ID NO: 1180735 - RNA, 19 nt, Homo sapiens
  misc_RNA (1)...(19): siRNA sense strand
ggacaacaggucaaucauu

SEQ ID NO: 1180736 - RNA, 19 nt, Homo sapiens
  misc_RNA (1)...(19): siRNA sense strand
aagaacacauuguaggaua

SEQ ID NO: 1180737 - RNA, 19 nt, Homo sapiens
  misc_RNA (1)...(19): siRNA sense strand
gaauccaucuuaugacauc

SEQ ID NO: 1180738 - RNA, 19 nt, Homo sapiens
  misc_RNA (1)...(19): siRNA sense strand
gugagaggacgauuauuua

SEQ ID NO: 1180739 - RNA, 19 nt, Homo sapiens
  misc_RNA (1)...(19): siRNA sense strand
ggaaagauuauacagcauu

SEQ ID NO: 1180740 - RNA, 19 nt, Homo sapiens
  misc_RNA (1)...(19): siRNA sense strand
gagaggugauagaaauuga

SEQ ID NO: 1180741 - RNA, 19 nt, Homo sapiens
  misc_RNA (1)...(19): siRNA sense strand
gaagguggaaacuugauuu

SEQ ID NO: 1180742 - RNA, 19 nt, Homo sapiens
  misc_RNA (1)...(19): siRNA sense strand
ugacaaugauguugaagug

SEQ ID NO: 1180743 - RNA, 19 nt, Homo sapiens
  misc_RNA (1)...(19): siRNA sense strand
gggagaagacagaagauaa

SEQ ID NO: 1180744 - RNA, 19 nt, Homo sapiens
  misc_RNA (1)...(19): siRNA sense strand
ccucauaucucuggacuug

SEQ ID NO: 1180745 - RNA, 19 nt, Homo sapiens
  misc_RNA (1)...(19): siRNA sense strand
gcuaagagcucuauaauuu

SEQ ID NO: 1180746 - RNA, 19 nt, Homo sapiens
  misc_RNA (1)...(19): siRNA sense strand
gaagugggcugaagaauuu

SEQ ID NO: 1180747 - RNA, 19 nt, Homo sapiens
  misc_RNA (1)...(19): siRNA sense strand
gcaaagaacuucaucuaaa

SEQ ID NO: 1180748 - RNA, 19 nt, Homo sapiens
  misc_RNA (1)...(19): siRNA sense strand
ggaacuagcucuucagaaa

SEQ ID NO: 1180749 - RNA, 19 nt, Homo sapiens
  misc_RNA (1)...(19): siRNA sense strand
ccaaagagaugauuaagaa

SEQ ID NO: 1180750 - RNA, 19 nt, Homo sapiens
  misc_RNA (1)...(19): siRNA sense strand
ggaaguaacucugauauga

SEQ ID NO: 1180751 - RNA, 19 nt, Homo sapiens
  misc_RNA (1)...(19): siRNA sense strand
gaggaaaccuucaauugua

SEQ ID NO: 1180752 - RNA, 19 nt, Homo sapiens
  misc_RNA (1)...(19): siRNA sense strand
gauaguagcucaaguggaa

SEQ ID NO: 1180753 - RNA, 19 nt, Homo sapiens
  misc_RNA (1)...(19): siRNA sense strand
gcagagaaauuccuaaaga

SEQ ID NO: 1180754 - RNA, 19 nt, Homo sapiens
  misc_RNA (1)...(19): siRNA sense strand
ggaaagaguucaaggaaga

SEQ ID NO: 1180755 - RNA, 19 nt, Homo sapiens
  misc_RNA (1)...(19): siRNA sense strand
gaagaugcgucuaaugaaa

SEQ ID NO: 1180756 - RNA, 19 nt, Homo sapiens
  misc_RNA (1)...(19): siRNA sense strand
gaagaaaggugagcaguga

SEQ ID NO: 1180757 - RNA, 19 nt, Homo sapiens
  misc_RNA (1)...(19): siRNA sense strand
gagaagcaaucuacaauga

SEQ ID NO: 1180758 - RNA, 19 nt, Homo sapiens
  misc_RNA (1)...(19): siRNA sense strand
gaacauacauccagauuuu

SEQ ID NO: 1180759 - RNA, 19 nt, Homo sapiens
  misc_RNA (1)...(19): siRNA sense strand
gacaacaggucaaucauuu

SEQ ID NO: 1180760 - RNA, 19 nt, Homo sapiens
  misc_RNA (1)...(19): siRNA sense strand
gaacaccacuucaaaauaa

SEQ ID NO: 1180761 - RNA, 19 nt, Homo sapiens
  misc_RNA (1)...(19): siRNA sense strand
gaagcaagcugacauuaca

SEQ ID NO: 1180762 - RNA, 19 nt, Homo sapiens
  misc_RNA (1)...(19): siRNA sense strand
gaugaaaccuccaugaguu

SEQ ID NO: 1180763 - RNA, 19 nt, Homo sapiens
  misc_RNA (1)...(19): siRNA sense strand
gaugaagccuuaucuaaau

SEQ ID NO: 1180764 - RNA, 19 nt, Homo sapiens
  misc_RNA (1)...(19): siRNA sense strand
gcaagaagauggugguguu

SEQ ID NO: 1180765 - RNA, 19 nt, Homo sapiens
  misc_RNA (1)...(19): siRNA sense strand
ggaaaguucugaagauaau

SEQ ID NO: 1180766 - RNA, 19 nt, Homo sapiens
  misc_RNA (1)...(19): siRNA sense strand
caaagagcauaaagucaua

SEQ ID NO: 1180767 - RNA, 19 nt, Homo sapiens
  misc_RNA (1)...(19): siRNA sense strand
gccaggagcuugauguuaa

SEQ ID NO: 1180768 - RNA, 19 nt, Homo sapiens
  misc_RNA (1)...(19): siRNA sense strand
gaggaaaguucugaagaua

SEQ ID NO: 1180769 - RNA, 19 nt, Homo sapiens
  misc_RNA (1)...(19): siRNA sense strand
gaaagaagaugguuguaac

SEQ ID NO: 1180770 - RNA, 19 nt, Homo sapiens
  misc_RNA (1)...(19): siRNA sense strand
gguuguaacucuucugaua

SEQ ID NO: 1180771 - RNA, 19 nt, Homo sapiens
  misc_RNA (1)...(19): siRNA sense strand
gaccaugcguuucaacaua

SEQ ID NO: 1180772 - RNA, 19 nt, Homo sapiens
  misc_RNA (1)...(19): siRNA sense strand
gauguuagcuggauguguu

SEQ ID NO: 1180773 - RNA, 19 nt, Homo sapiens
  misc_RNA (1)...(19): siRNA sense strand
gaacaaggucugcaaagaa

SEQ ID NO: 1180774 - RNA, 19 nt, Homo sapiens
  misc_RNA (1)...(19): siRNA sense strand
gaagcaaucuacaaugaug

SEQ ID NO: 1180775 - RNA, 19 nt, Homo sapiens
  misc_RNA (1)...(19): siRNA sense strand
cagaguauauucagaguuu

SEQ ID NO: 1180776 - RNA, 19 nt, Homo sapiens
  misc_RNA (1)...(19): siRNA sense strand
gaggagguauuaaaucaaa

SEQ ID NO: 1180777 - RNA, 19 nt, Homo sapiens
  misc_RNA (1)...(19): siRNA sense strand
gaaagcaaguugaauacau

SEQ ID NO: 1180778 - RNA, 19 nt, Homo sapiens
  misc_RNA (1)...(19): siRNA sense strand
agacuuaaauuccgaguuu

SEQ ID NO: 1180779 - RNA, 19 nt, Homo sapiens
  misc_RNA (1)...(19): siRNA sense strand
ggauauaauuucagcugua

SEQ ID NO: 1180780 - RNA, 19 nt, Homo sapiens
  misc_RNA (1)...(19): siRNA sense strand
caacagaggagguauuaaa

SEQ ID NO: 1180781 - RNA, 19 nt, Homo sapiens
  misc_RNA (1)...(19): siRNA sense strand
caaaguauguagaaucaga

SEQ ID NO: 1180782 - RNA, 19 nt, Homo sapiens
  misc_RNA (1)...(19): siRNA sense strand
uaacaggugugggcaauaa

SEQ ID NO: 1180783 - RNA, 19 nt, Homo sapiens
  misc_RNA (1)...(19): siRNA sense strand
agucauagaugcuaaguuu

SEQ ID NO: 1180784 - RNA, 19 nt, Homo sapiens
  misc_RNA (1)...(19): siRNA sense strand
gauggaugcuguaaacaaa

SEQ ID NO: 1180785 - RNA, 19 nt, Homo sapiens
  misc_RNA (1)...(19): siRNA sense strand
agaagaaccucaauaugaa

SEQ ID NO: 1180786 - RNA, 19 nt, Homo sapiens
  misc_RNA (1)...(19): siRNA sense strand
gagaucgacuuccuaagaa

SEQ ID NO: 1180787 - RNA, 19 nt, Homo sapiens
  misc_RNA (1)...(19): siRNA sense strand
gaagaagaguugacugaag

SEQ ID NO: 1180788 - RNA, 19 nt, Homo sapiens
  misc_RNA (1)...(19): siRNA sense strand
guacuucucuuugaaauuc

SEQ ID NO: 1180789 - RNA, 19 nt, Homo sapiens
  misc_RNA (1)...(19): siRNA sense strand
gaugaaggccauauucuaa

SEQ ID NO: 1180790 - RNA, 19 nt, Homo sapiens
  misc_RNA (1)...(19): siRNA sense strand
gguggaaacuugauuuguu

SEQ ID NO: 1180791 - RNA, 19 nt, Homo sapiens
  misc_RNA (1)...(19): siRNA sense strand
cuacuuagaucacuuaaca

SEQ ID NO: 1180792 - RNA, 19 nt, Homo sapiens
  misc_RNA (1)...(19): siRNA sense strand
gcuugagguuucugaauua

SEQ ID NO: 1180793 - RNA, 19 nt, Homo sapiens
  misc_RNA (1)...(19): siRNA sense strand
guauuaagguucaagaaga

SEQ ID NO: 1180794 - RNA, 19 nt, Homo sapiens
  misc_RNA (1)...(19): siRNA sense strand
agaagaaucugaagaaaca

SEQ ID NO: 1180795 - RNA, 19 nt, Homo sapiens
  misc_RNA (1)...(19): siRNA sense strand
ggaaagaugauaaaggaaa

SEQ ID NO: 1180796 - RNA, 19 nt, Homo sapiens
  misc_RNA (1)...(19): siRNA sense strand
gaaaucaguucugcuacaa

SEQ ID NO: 1180797 - RNA, 19 nt, Homo sapiens
  misc_RNA (1)...(19): siRNA sense strand
gaaaacagguagauaguga

SEQ ID NO: 1180798 - RNA, 19 nt, Homo sapiens
  misc_RNA (1)...(19): siRNA sense strand
guacaggcguuagcauuaa

SEQ ID NO: 1180799 - RNA, 19 nt, Homo sapiens
  misc_RNA (1)...(19): siRNA sense strand
gcaaguaacuaagcaguca

SEQ ID NO: 1180800 - RNA, 19 nt, Homo sapiens
  misc_RNA (1)...(19): siRNA sense strand
aaagaaaucuccagguuca

SEQ ID NO: 1180801 - RNA, 19 nt, Homo sapiens
  misc_RNA (1)...(19): siRNA sense strand
ugagagaggugauagaaau

SEQ ID NO: 1180802 - RNA, 19 nt, Homo sapiens
  misc_RNA (1)...(19): siRNA sense strand
gaaacuugauuuguuguga

SEQ ID NO: 1180803 - RNA, 19 nt, Homo sapiens
  misc_RNA (1)...(19): siRNA sense strand
gaauauguguuagcuguga

SEQ ID NO: 1180804 - RNA, 19 nt, Homo sapiens
  misc_RNA (1)...(19): siRNA sense strand
gaguaucauuguaugguua

SEQ ID NO: 1180805 - RNA, 19 nt, Homo sapiens
  misc_RNA (1)...(19): siRNA sense strand
caaaguggcucaucaucau

SEQ ID NO: 1180806 - RNA, 19 nt, Homo sapiens
  misc_RNA (1)...(19): siRNA sense strand
caucugauacugagaaaua

SEQ ID NO: 1180807 - RNA, 19 nt, Homo sapiens
  misc_RNA (1)...(19): siRNA sense strand
guggagaguucaucuguaa

SEQ ID NO: 1180808 - RNA, 19 nt, Homo sapiens
  misc_RNA (1)...(19): siRNA sense strand
gaagcuaaacuuucaagaa

SEQ ID NO: 1180809 - RNA, 19 nt, Homo sapiens
  misc_RNA (1)...(19): siRNA sense strand
caaagaagaagaagaguug

SEQ ID NO: 1180810 - RNA, 19 nt, Homo sapiens
  misc_RNA (1)...(19): siRNA sense strand
gugaagagucggaaacuua

SEQ ID NO: 1180811 - RNA, 19 nt, Homo sapiens
  misc_RNA (1)...(19): siRNA sense strand
aagagaaacucccuaagaa

SEQ ID NO: 1180812 - RNA, 19 nt, Homo sapiens
  misc_RNA (1)...(19): siRNA sense strand
acaaagaaaucuccagguu

SEQ ID NO: 1180813 - RNA, 19 nt, Homo sapiens
  misc_RNA (1)...(19): siRNA sense strand
cagcggagcuauaaacaga

SEQ ID NO: 1180814 - RNA, 19 nt, Homo sapiens
  misc_RNA (1)...(19): siRNA sense strand
caaagaagacuaguucaaa

SEQ ID NO: 1180815 - RNA, 19 nt, Homo sapiens
  misc_RNA (1)...(19): siRNA sense strand
gaagagaagcaaucuacaa

SEQ ID NO: 1180816 - RNA, 19 nt, Homo sapiens
  misc_RNA (1)...(19): siRNA sense strand
ugaaugagcuuacugaacu

SEQ ID NO: 1180817 - RNA, 19 nt, Homo sapiens
  misc_RNA (1)...(19): siRNA sense strand
ggagaagacagaagauaaa

SEQ ID NO: 1180818 - RNA, 19 nt, Homo sapiens
  misc_RNA (1)...(19): siRNA sense strand
cggagaaucuggagaagaa

SEQ ID NO: 1180819 - RNA, 19 nt, Homo sapiens
  misc_RNA (1)...(19): siRNA sense strand
gaauagaauugccaagaag

SEQ ID NO: 1180820 - RNA, 19 nt, Homo sapiens
  misc_RNA (1)...(19): siRNA sense strand
gcagaaggcacaguugaua

SEQ ID NO: 1180821 - RNA, 19 nt, Homo sapiens
  misc_RNA (1)...(19): siRNA sense strand
cagaggagguauuaaauca

SEQ ID NO: 1180822 - RNA, 19 nt, Homo sapiens
  misc_RNA (1)...(19): siRNA sense strand
aagaagaaccucaauauga

SEQ ID NO: 1180823 - RNA, 19 nt, Homo sapiens
  misc_RNA (1)...(19): siRNA sense strand
cagcguauuugagaauuua

SEQ ID NO: 1180824 - RNA, 19 nt, Homo sapiens
  misc_RNA (1)...(19): siRNA sense strand
gagccagacuuauuagaug

SEQ ID NO: 1180825 - RNA, 19 nt, Homo sapiens
  misc_RNA (1)...(19): siRNA sense strand
gaagacagaagauaaagau

SEQ ID NO: 1180826 - RNA, 19 nt, Homo sapiens
  misc_RNA (1)...(19): siRNA sense strand
ucaaggaggaggauuauuu

SEQ ID NO: 1180827 - RNA, 19 nt, Homo sapiens
  misc_RNA (1)...(19): siRNA sense strand
gaggaacaaagaacaaaua

SEQ ID NO: 1180828 - RNA, 19 nt, Homo sapiens
  misc_RNA (1)...(19): siRNA sense strand
gaacaacaguaugaaucuu

SEQ ID NO: 1180829 - RNA, 19 nt, Homo sapiens
  misc_RNA (1)...(19): siRNA sense strand
cagagaaauuccuaaagaa

SEQ ID NO: 1180830 - RNA, 19 nt, Homo sapiens
  misc_RNA (1)...(19): siRNA sense strand
gaagagagacgaaaacgua

SEQ ID NO: 1180831 - RNA, 19 nt, Homo sapiens
  misc_RNA (1)...(19): siRNA sense strand
uaaaugaagaugcgucuaa

SEQ ID NO: 1180832 - RNA, 19 nt, Homo sapiens
  misc_RNA (1)...(19): siRNA sense strand
gcugaagaauuuaaugaug

SEQ ID NO: 1180833 - RNA, 19 nt, Homo sapiens
  misc_RNA (1)...(19): siRNA sense strand
ggacucauccuugguguuu

SEQ ID NO: 1180834 - RNA, 19 nt, Homo sapiens
  misc_RNA (1)...(19): siRNA sense strand
gaagacuaguucaaauugu

SEQ ID NO: 1180835 - RNA, 19 nt, Homo sapiens
  misc_RNA (1)...(19): siRNA sense strand
ggacaacaggucaaucauu

SEQ ID NO: 1180836 - RNA, 19 nt, Homo sapiens
  misc_RNA (1)...(19): siRNA sense strand
aagaacacauuguaggaua

SEQ ID NO: 1180837 - RNA, 19 nt, Homo sapiens
  misc_RNA (1)...(19): siRNA sense strand
gaauccaucuuaugacauc

SEQ ID NO: 1180838 - RNA, 19 nt, Homo sapiens
  misc_RNA (1)...(19): siRNA sense strand
gugagaggacgauuauuua

SEQ ID NO: 1180839 - RNA, 19 nt, Homo sapiens
  misc_RNA (1)...(19): siRNA sense strand
ggaaagauuauacagcauu

SEQ ID NO: 1180840 - RNA, 19 nt, Homo sapiens
  misc_RNA (1)...(19): siRNA sense strand
gagaggugauagaaauuga

SEQ ID NO: 1180841 - RNA, 19 nt, Homo sapiens
  misc_RNA (1)...(19): siRNA sense strand
gaagguggaaacuugauuu

SEQ ID NO: 1180842 - RNA, 19 nt, Homo sapiens
  misc_RNA (1)...(19): siRNA sense strand
ugacaaugauguugaagug

SEQ ID NO: 1180843 - RNA, 19 nt, Homo sapiens
  misc_RNA (1)...(19): siRNA sense strand
gggagaagacagaagauaa

SEQ ID NO: 1180844 - RNA, 19 nt, Homo sapiens
  misc_RNA (1)...(19): siRNA sense strand
ccucauaucucuggacuug

SEQ ID NO: 1180845 - RNA, 19 nt, Homo sapiens
  misc_RNA (1)...(19): siRNA sense strand
gcuaagagcucuauaauuu

SEQ ID NO: 1180846 - RNA, 19 nt, Homo sapiens
  misc_RNA (1)...(19): siRNA sense strand
gaagugggcugaagaauuu

SEQ ID NO: 1180847 - RNA, 19 nt, Homo sapiens
  misc_RNA (1)...(19): siRNA sense strand
gcaaagaacuucaucuaaa

SEQ ID NO: 1180848 - RNA, 19 nt, Homo sapiens
  misc_RNA (1)...(19): siRNA sense strand
ccaaagagaugauuaagaa

SEQ ID NO: 1180849 - RNA, 19 nt, Homo sapiens
  misc_RNA (1)...(19): siRNA sense strand
gauaguagcucaaguggaa

SEQ ID NO: 1180850 - RNA, 19 nt, Homo sapiens
  misc_RNA (1)...(19): siRNA sense strand
gcagagaaauuccuaaaga

SEQ ID NO: 1180851 - RNA, 19 nt, Homo sapiens
  misc_RNA (1)...(19): siRNA sense strand
ggaaagaguucaaggaaga

SEQ ID NO: 1180852 - RNA, 19 nt, Homo sapiens
  misc_RNA (1)...(19): siRNA sense strand
gaagaaaggugagcaguga

SEQ ID NO: 1180853 - RNA, 19 nt, Homo sapiens
  misc_RNA (1)...(19): siRNA sense strand
gagaagcaaucuacaauga

SEQ ID NO: 1180854 - RNA, 19 nt, Homo sapiens
  misc_RNA (1)...(19): siRNA sense strand
gaacauacauccagauuuu

SEQ ID NO: 1180855 - RNA, 19 nt, Homo sapiens
  misc_RNA (1)...(19): siRNA sense strand
gaacaccacuucaaaauaa

SEQ ID NO: 1180856 - RNA, 19 nt, Homo sapiens
  misc_RNA (1)...(19): siRNA sense strand
gaagcaagcugacauuaca

SEQ ID NO: 1180857 - RNA, 19 nt, Homo sapiens
  misc_RNA (1)...(19): siRNA sense strand
gaugaaaccuccaugaguu

SEQ ID NO: 1180858 - RNA, 19 nt, Homo sapiens
  misc_RNA (1)...(19): siRNA sense strand
gaugaagccuuaucuaaau

SEQ ID NO: 1180859 - RNA, 19 nt, Homo sapiens
  misc_RNA (1)...(19): siRNA sense strand
gcaagaagauggugguguu

SEQ ID NO: 1180860 - RNA, 19 nt, Homo sapiens
  misc_RNA (1)...(19): siRNA sense strand
ggaaaguucugaagauaau

SEQ ID NO: 1180861 - RNA, 19 nt, Homo sapiens
  misc_RNA (1)...(19): siRNA sense strand
caaagagcauaaagucaua

SEQ ID NO: 1180862 - RNA, 19 nt, Homo sapiens
  misc_RNA (1)...(19): siRNA sense strand
gccaggagcuugauguuaa

SEQ ID NO: 1180863 - RNA, 19 nt, Homo sapiens
  misc_RNA (1)...(19): siRNA sense strand
gaggaaaguucugaagaua

SEQ ID NO: 1180864 - RNA, 19 nt, Homo sapiens
  misc_RNA (1)...(19): siRNA sense strand
gaaagaagaugguuguaac

SEQ ID NO: 1180865 - RNA, 19 nt, Homo sapiens
  misc_RNA (1)...(19): siRNA sense strand
gguuguaacucuucugaua

SEQ ID NO: 1180866 - RNA, 19 nt, Homo sapiens
  misc_RNA (1)...(19): siRNA sense strand
gaccaugcguuucaacaua

SEQ ID NO: 1180867 - RNA, 19 nt, Homo sapiens
  misc_RNA (1)...(19): siRNA sense strand
gauguuagcuggauguguu

SEQ ID NO: 1180868 - RNA, 19 nt, Homo sapiens
  misc_RNA (1)...(19): siRNA sense strand
gaacaaggucugcaaagaa

SEQ ID NO: 1180869 - RNA, 19 nt, Homo sapiens
  misc_RNA (1)...(19): siRNA sense strand
gaagcaaucuacaaugaug

SEQ ID NO: 1180870 - RNA, 19 nt, Homo sapiens
  misc_RNA (1)...(19): siRNA sense strand
cagaguauauucagaguuu

SEQ ID NO: 1180871 - RNA, 19 nt, Homo sapiens
  misc_RNA (1)...(19): siRNA sense strand
gaggagguauuaaaucaaa

SEQ ID NO: 1180872 - RNA, 19 nt, Homo sapiens
  misc_RNA (1)...(19): siRNA sense strand
agacuuaaauuccgaguuu

SEQ ID NO: 1180873 - RNA, 19 nt, Homo sapiens
  misc_RNA (1)...(19): siRNA sense strand
ggauauaauuucagcugua

SEQ ID NO: 1180874 - RNA, 19 nt, Homo sapiens
  misc_RNA (1)...(19): siRNA sense strand
caacagaggagguauuaaa

SEQ ID NO: 1180875 - RNA, 19 nt, Homo sapiens
  misc_RNA (1)...(19): siRNA sense strand
gauggaugcuguaaacaaa

SEQ ID NO: 1180876 - RNA, 19 nt, Homo sapiens
  misc_RNA (1)...(19): siRNA sense strand
uaacaggugugggcaauaa

SEQ ID NO: 1180877 - RNA, 19 nt, Homo sapiens
  misc_RNA (1)...(19): siRNA sense strand
agucauagaugcuaaguuu

SEQ ID NO: 1180878 - RNA, 19 nt, Homo sapiens
  misc_RNA (1)...(19): siRNA sense strand
agaagaaccucaauaugaa

SEQ ID NO: 1180879 - RNA, 19 nt, Homo sapiens
  misc_RNA (1)...(19): siRNA sense strand
gagaucgacuuccuaagaa

SEQ ID NO: 1180880 - RNA, 19 nt, Homo sapiens
  misc_RNA (1)...(19): siRNA sense strand
gaagaagaguugacugaag

SEQ ID NO: 1180881 - RNA, 19 nt, Homo sapiens
  misc_RNA (1)...(19): siRNA sense strand
guacuucucuuugaaauuc

SEQ ID NO: 1180882 - RNA, 19 nt, Homo sapiens
  misc_RNA (1)...(19): siRNA sense strand
gaugaaggccauauucuaa

SEQ ID NO: 1180883 - RNA, 19 nt, Homo sapiens
  misc_RNA (1)...(19): siRNA sense strand
gaaaucaguucugcuacaa

SEQ ID NO: 1180884 - RNA, 19 nt, Homo sapiens
  misc_RNA (1)...(19): siRNA sense strand
cuacuuagaucacuuaaca

SEQ ID NO: 1180885 - RNA, 19 nt, Homo sapiens
  misc_RNA (1)...(19): siRNA sense strand
gguggaaacuugauuuguu

SEQ ID NO: 1180886 - RNA, 19 nt, Homo sapiens
  misc_RNA (1)...(19): siRNA sense strand
gcuugagguuucugaauua

SEQ ID NO: 1180887 - RNA, 19 nt, Homo sapiens
  misc_RNA (1)...(19): siRNA sense strand
guauuaagguucaagaaga

SEQ ID NO: 1180888 - RNA, 19 nt, Homo sapiens
  misc_RNA (1)...(19): siRNA sense strand
ggaaagaugauaaaggaaa

SEQ ID NO: 1180889 - RNA, 19 nt, Homo sapiens
  misc_RNA (1)...(19): siRNA sense strand
gaaaacagguagauaguga

SEQ ID NO: 1180890 - RNA, 19 nt, Homo sapiens
  misc_RNA (1)...(19): siRNA sense strand
guacaggcguuagcauuaa

SEQ ID NO: 1180891 - RNA, 19 nt, Homo sapiens
  misc_RNA (1)...(19): siRNA sense strand
gcaaguaacuaagcaguca

SEQ ID NO: 1180892 - RNA, 19 nt, Homo sapiens
  misc_RNA (1)...(19): siRNA sense strand
aaagaaaucuccagguuca

SEQ ID NO: 1180893 - RNA, 19 nt, Homo sapiens
  misc_RNA (1)...(19): siRNA sense strand
ugagagaggugauagaaau

SEQ ID NO: 1180894 - RNA, 19 nt, Homo sapiens
  misc_RNA (1)...(19): siRNA sense strand
guggagaguucaucuguaa

SEQ ID NO: 1180895 - RNA, 19 nt, Homo sapiens
  misc_RNA (1)...(19): siRNA sense strand
gaauauguguuagcuguga

SEQ ID NO: 1180896 - RNA, 19 nt, Homo sapiens
  misc_RNA (1)...(19): siRNA sense strand
gaguaucauuguaugguua

SEQ ID NO: 1180897 - RNA, 19 nt, Homo sapiens
  misc_RNA (1)...(19): siRNA sense strand
gaaacuugauuuguuguga

SEQ ID NO: 1180898 - RNA, 19 nt, Homo sapiens
  misc_RNA (1)...(19): siRNA sense strand
caaaguggcucaucaucau

SEQ ID NO: 1180899 - RNA, 19 nt, Homo sapiens
  misc_RNA (1)...(19): siRNA sense strand
caucugauacugagaaaua

SEQ ID NO: 1180900 - RNA, 19 nt, Homo sapiens
  misc_RNA (1)...(19): siRNA sense strand
gaagcuaaacuuucaagaa

SEQ ID NO: 1180901 - RNA, 19 nt, Homo sapiens
  misc_RNA (1)...(19): siRNA sense strand
caaagaagaagaagaguug

SEQ ID NO: 1180902 - RNA, 19 nt, Homo sapiens
  misc_RNA (1)...(19): siRNA sense strand
gugaagagucggaaacuua

SEQ ID NO: 1180903 - RNA, 19 nt, Homo sapiens
  misc_RNA (1)...(19): siRNA sense strand
aagagaaacucccuaagaa

SEQ ID NO: 1180904 - RNA, 19 nt, Homo sapiens
  misc_RNA (1)...(19): siRNA sense strand
acaaagaaaucuccagguu

SEQ ID NO: 1180905 - RNA, 19 nt, Homo sapiens
  misc_RNA (1)...(19): siRNA sense strand
cagcggagcuauaaacaga

SEQ ID NO: 1180906 - RNA, 19 nt, Homo sapiens
  misc_RNA (1)...(19): siRNA sense strand
caaagaagacuaguucaaa

SEQ ID NO: 1180907 - RNA, 19 nt, Homo sapiens
  misc_RNA (1)...(19): siRNA sense strand
gaagagaagcaaucuacaa

SEQ ID NO: 1180908 - RNA, 19 nt, Homo sapiens
  misc_RNA (1)...(19): siRNA sense strand
ugaaugagcuuacugaacu

SEQ ID NO: 1180909 - RNA, 19 nt, Homo sapiens
  misc_RNA (1)...(19): siRNA sense strand
ggagaagacagaagauaaa

SEQ ID NO: 1180910 - RNA, 19 nt, Homo sapiens
  misc_RNA (1)...(19): siRNA sense strand
cggagaaucuggagaagaa

SEQ ID NO: 1180911 - RNA, 19 nt, Homo sapiens
  misc_RNA (1)...(19): siRNA sense strand
gaauagaauugccaagaag

SEQ ID NO: 1180912 - RNA, 19 nt, Homo sapiens
  misc_RNA (1)...(19): siRNA sense strand
gcagaaggcacaguugaua

SEQ ID NO: 1180913 - RNA, 19 nt, Homo sapiens
  misc_RNA (1)...(19): siRNA sense strand
cagaggagguauuaaauca

SEQ ID NO: 1180914 - RNA, 19 nt, Homo sapiens
  misc_RNA (1)...(19): siRNA sense strand
aagaagaaccucaauauga

SEQ ID NO: 1180915 - RNA, 19 nt, Homo sapiens
  misc_RNA (1)...(19): siRNA sense strand
cagcguauuugagaauuua

SEQ ID NO: 1180916 - RNA, 19 nt, Homo sapiens
  misc_RNA (1)...(19): siRNA sense strand
gagccagacuuauuagaug

SEQ ID NO: 1180917 - RNA, 19 nt, Homo sapiens
  misc_RNA (1)...(19): siRNA sense strand
gaagacagaagauaaagau

SEQ ID NO: 1180918 - RNA, 19 nt, Homo sapiens
  misc_RNA (1)...(19): siRNA sense strand
ucaaggaggaggauuauuu

SEQ ID NO: 1180919 - RNA, 19 nt, Homo sapiens
  misc_RNA (1)...(19): siRNA sense strand
gaggaacaaagaacaaaua

SEQ ID NO: 1180920 - RNA, 19 nt, Homo sapiens
  misc_RNA (1)...(19): siRNA sense strand
gaacaacaguaugaaucuu

SEQ ID NO: 1180921 - RNA, 19 nt, Homo sapiens
  misc_RNA (1)...(19): siRNA sense strand
cagagaaauuccuaaagaa

SEQ ID NO: 1180922 - RNA, 19 nt, Homo sapiens
  misc_RNA (1)...(19): siRNA sense strand
gaagagagacgaaaacgua

SEQ ID NO: 1180923 - RNA, 19 nt, Homo sapiens
  misc_RNA (1)...(19): siRNA sense strand
gaagacuaguucaaauugu

SEQ ID NO: 1180924 - RNA, 19 nt, Homo sapiens
  misc_RNA (1)...(19): siRNA sense strand
gcugaagaauuuaaugaug

SEQ ID NO: 1180925 - RNA, 19 nt, Homo sapiens
  misc_RNA (1)...(19): siRNA sense strand
ggacucauccuugguguuu

SEQ ID NO: 1180926 - RNA, 19 nt, Homo sapiens
  misc_RNA (1)...(19): siRNA sense strand
gaagguggaaacuugauuu

SEQ ID NO: 1180927 - RNA, 19 nt, Homo sapiens
  misc_RNA (1)...(19): siRNA sense strand
aagaacacauuguaggaua

SEQ ID NO: 1180928 - RNA, 19 nt, Homo sapiens
  misc_RNA (1)...(19): siRNA sense strand
gaauccaucuuaugacauc

SEQ ID NO: 1180929 - RNA, 19 nt, Homo sapiens
  misc_RNA (1)...(19): siRNA sense strand
gugagaggacgauuauuua

SEQ ID NO: 1180930 - RNA, 19 nt, Homo sapiens
  misc_RNA (1)...(19): siRNA sense strand
ggaaagauuauacagcauu

SEQ ID NO: 1180931 - RNA, 19 nt, Homo sapiens
  misc_RNA (1)...(19): siRNA sense strand
gagaggugauagaaauuga

SEQ ID NO: 1180932 - RNA, 19 nt, Homo sapiens
  misc_RNA (1)...(19): siRNA sense strand
gacaacagaggagguauua

SEQ ID NO: 1180933 - RNA, 19 nt, Homo sapiens
  misc_RNA (1)...(19): siRNA sense strand
gggagaagacagaagauaa

SEQ ID NO: 1180934 - RNA, 19 nt, Homo sapiens
  misc_RNA (1)...(19): siRNA sense strand
ccucauaucucuggacuug

SEQ ID NO: 1180935 - RNA, 19 nt, Homo sapiens
  misc_RNA (1)...(19): siRNA sense strand
ugacaaugauguugaagug

SEQ ID NO: 1180936 - RNA, 19 nt, Homo sapiens
  misc_RNA (1)...(19): siRNA sense strand
cgacaaugauccugagaau

SEQ ID NO: 1180937 - RNA, 19 nt, Homo sapiens
  misc_RNA (1)...(19): siRNA sense strand
aagcagcgaugaacagaaa

SEQ ID NO: 1180938 - RNA, 19 nt, Homo sapiens
  misc_RNA (1)...(19): siRNA sense strand
gaauggagcauaugguaga

SEQ ID NO: 1180939 - RNA, 19 nt, Homo sapiens
  misc_RNA (1)...(19): siRNA sense strand
gaguaagaauggagcauau

SEQ ID NO: 1180940 - RNA, 19 nt, Homo sapiens
  misc_RNA (1)...(19): siRNA sense strand
gagauaaagagcaugagua

SEQ ID NO: 1180941 - RNA, 19 nt, Homo sapiens
  misc_RNA (1)...(19): siRNA sense strand
gaauuuauagccucagauu

SEQ ID NO: 1180942 - RNA, 19 nt, Homo sapiens
  misc_RNA (1)...(19): siRNA sense strand
ggaaggagaacaugaaucu

SEQ ID NO: 1180943 - RNA, 19 nt, Homo sapiens
  misc_RNA (1)...(19): siRNA sense strand
agaguugacugaagaagaa

SEQ ID NO: 1180944 - RNA, 19 nt, Homo sapiens
  misc_RNA (1)...(19): siRNA sense strand
gaagaagugggcugaagaa

SEQ ID NO: 1180945 - RNA, 19 nt, Homo sapiens
  misc_RNA (1)...(19): siRNA sense strand
gcuaagagcucuauaauuu

SEQ ID NO: 1180946 - RNA, 19 nt, Homo sapiens
  misc_RNA (1)...(19): siRNA sense strand
gaagugggcugaagaauuu

SEQ ID NO: 1180947 - RNA, 19 nt, Homo sapiens
  misc_RNA (1)...(19): siRNA sense strand
gcaaagaacuucaucuaaa

SEQ ID NO: 1180948 - RNA, 19 nt, Homo sapiens
  misc_RNA (1)...(19): siRNA sense strand
ggaacuagcucuucagaaa

SEQ ID NO: 1180949 - RNA, 19 nt, Homo sapiens
  misc_RNA (1)...(19): siRNA sense strand
ccaaagagaugauuaagaa

SEQ ID NO: 1180950 - RNA, 19 nt, Homo sapiens
  misc_RNA (1)...(19): siRNA sense strand
ggaaguaacucugauauga

SEQ ID NO: 1180951 - RNA, 19 nt, Homo sapiens
  misc_RNA (1)...(19): siRNA sense strand
gaggaaaccuucaauugua

SEQ ID NO: 1180952 - RNA, 19 nt, Homo sapiens
  misc_RNA (1)...(19): siRNA sense strand
gauaguagcucaaguggaa

SEQ ID NO: 1180953 - RNA, 19 nt, Homo sapiens
  misc_RNA (1)...(19): siRNA sense strand
gcagagaaauuccuaaaga

SEQ ID NO: 1180954 - RNA, 19 nt, Homo sapiens
  misc_RNA (1)...(19): siRNA sense strand
ggaaagaguucaaggaaga

SEQ ID NO: 1180955 - RNA, 19 nt, Homo sapiens
  misc_RNA (1)...(19): siRNA sense strand
gaagaugcgucuaaugaaa

SEQ ID NO: 1180956 - RNA, 19 nt, Homo sapiens
  misc_RNA (1)...(19): siRNA sense strand
gaagaaaggugagcaguga

SEQ ID NO: 1180957 - RNA, 19 nt, Homo sapiens
  misc_RNA (1)...(19): siRNA sense strand
gagaagcaaucuacaauga

SEQ ID NO: 1180958 - RNA, 19 nt, Homo sapiens
  misc_RNA (1)...(19): siRNA sense strand
gaacauacauccagauuuu

SEQ ID NO: 1180959 - RNA, 19 nt, Homo sapiens
  misc_RNA (1)...(19): siRNA sense strand
gacaacaggucaaucauuu

SEQ ID NO: 1180960 - RNA, 19 nt, Homo sapiens
  misc_RNA (1)...(19): siRNA sense strand
gaacaccacuucaaaauaa

SEQ ID NO: 1180961 - RNA, 19 nt, Homo sapiens
  misc_RNA (1)...(19): siRNA sense strand
gaagcaagcugacauuaca

SEQ ID NO: 1180962 - RNA, 19 nt, Homo sapiens
  misc_RNA (1)...(19): siRNA sense strand
gaugaaaccuccaugaguu

SEQ ID NO: 1180963 - RNA, 19 nt, Homo sapiens
  misc_RNA (1)...(19): siRNA sense strand
gaugaagccuuaucuaaau

SEQ ID NO: 1180964 - RNA, 19 nt, Homo sapiens
  misc_RNA (1)...(19): siRNA sense strand
gcaagaagauggugguguu

SEQ ID NO: 1180965 - RNA, 19 nt, Homo sapiens
  misc_RNA (1)...(19): siRNA sense strand
ggaaaguucugaagauaau

SEQ ID NO: 1180966 - RNA, 19 nt, Homo sapiens
  misc_RNA (1)...(19): siRNA sense strand
caaagagcauaaagucaua

SEQ ID NO: 1180967 - RNA, 19 nt, Homo sapiens
  misc_RNA (1)...(19): siRNA sense strand
gccaggagcuugauguuaa

SEQ ID NO: 1180968 - RNA, 19 nt, Homo sapiens
  misc_RNA (1)...(19): siRNA sense strand
gaggaaaguucugaagaua

SEQ ID NO: 1180969 - RNA, 19 nt, Homo sapiens
  misc_RNA (1)...(19): siRNA sense strand
gaaagaagaugguuguaac

SEQ ID NO: 1180970 - RNA, 19 nt, Homo sapiens
  misc_RNA (1)...(19): siRNA sense strand
gguuguaacucuucugaua

SEQ ID NO: 1180971 - RNA, 19 nt, Homo sapiens
  misc_RNA (1)...(19): siRNA sense strand
gaccaugcguuucaacaua

SEQ ID NO: 1180972 - RNA, 19 nt, Homo sapiens
  misc_RNA (1)...(19): siRNA sense strand
gauguuagcuggauguguu

SEQ ID NO: 1180973 - RNA, 19 nt, Homo sapiens
  misc_RNA (1)...(19): siRNA sense strand
gaacaaggucugcaaagaa

SEQ ID NO: 1180974 - RNA, 19 nt, Homo sapiens
  misc_RNA (1)...(19): siRNA sense strand
gaagcaaucuacaaugaug

SEQ ID NO: 1180975 - RNA, 19 nt, Homo sapiens
  misc_RNA (1)...(19): siRNA sense strand
cagaguauauucagaguuu

SEQ ID NO: 1180976 - RNA, 19 nt, Homo sapiens
  misc_RNA (1)...(19): siRNA sense strand
gaggagguauuaaaucaaa

SEQ ID NO: 1180977 - RNA, 19 nt, Homo sapiens
  misc_RNA (1)...(19): siRNA sense strand
gaaagcaaguugaauacau

SEQ ID NO: 1180978 - RNA, 19 nt, Homo sapiens
  misc_RNA (1)...(19): siRNA sense strand
agacuuaaauuccgaguuu

SEQ ID NO: 1180979 - RNA, 19 nt, Homo sapiens
  misc_RNA (1)...(19): siRNA sense strand
ggauauaauuucagcugua

SEQ ID NO: 1180980 - RNA, 19 nt, Homo sapiens
  misc_RNA (1)...(19): siRNA sense strand
caacagaggagguauuaaa

SEQ ID NO: 1180981 - RNA, 19 nt, Homo sapiens
  misc_RNA (1)...(19): siRNA sense strand
caaaguauguagaaucaga

SEQ ID NO: 1180982 - RNA, 19 nt, Homo sapiens
  misc_RNA (1)...(19): siRNA sense strand
uaacaggugugggcaauaa

SEQ ID NO: 1180983 - RNA, 19 nt, Homo sapiens
  misc_RNA (1)...(19): siRNA sense strand
agucauagaugcuaaguuu

SEQ ID NO: 1180984 - RNA, 19 nt, Homo sapiens
  misc_RNA (1)...(19): siRNA sense strand
gauggaugcuguaaacaaa

SEQ ID NO: 1180985 - RNA, 19 nt, Homo sapiens
  misc_RNA (1)...(19): siRNA sense strand
agaagaaccucaauaugaa

SEQ ID NO: 1180986 - RNA, 19 nt, Homo sapiens
  misc_RNA (1)...(19): siRNA sense strand
gagaucgacuuccuaagaa

SEQ ID NO: 1180987 - RNA, 19 nt, Homo sapiens
  misc_RNA (1)...(19): siRNA sense strand
gaagaagaguugacugaag

SEQ ID NO: 1180988 - RNA, 19 nt, Homo sapiens
  misc_RNA (1)...(19): siRNA sense strand
guacuucucuuugaaauuc

SEQ ID NO: 1180989 - RNA, 19 nt, Homo sapiens
  misc_RNA (1)...(19): siRNA sense strand
gaugaaggccauauucuaa

SEQ ID NO: 1180990 - RNA, 19 nt, Homo sapiens
  misc_RNA (1)...(19): siRNA sense strand
gguggaaacuugauuuguu

SEQ ID NO: 1180991 - RNA, 19 nt, Homo sapiens
  misc_RNA (1)...(19): siRNA sense strand
cuacuuagaucacuuaaca

SEQ ID NO: 1180992 - RNA, 19 nt, Homo sapiens
  misc_RNA (1)...(19): siRNA sense strand
gcuugagguuucugaauua

SEQ ID NO: 1180993 - RNA, 19 nt, Homo sapiens
  misc_RNA (1)...(19): siRNA sense strand
guauuaagguucaagaaga

SEQ ID NO: 1180994 - RNA, 19 nt, Homo sapiens
  misc_RNA (1)...(19): siRNA sense strand
agaagaaucugaagaaaca

SEQ ID NO: 1180995 - RNA, 19 nt, Homo sapiens
  misc_RNA (1)...(19): siRNA sense strand
ggaaagaugauaaaggaaa

SEQ ID NO: 1180996 - RNA, 19 nt, Homo sapiens
  misc_RNA (1)...(19): siRNA sense strand
gaaaucaguucugcuacaa

SEQ ID NO: 1180997 - RNA, 19 nt, Homo sapiens
  misc_RNA (1)...(19): siRNA sense strand
gaaaacagguagauaguga

SEQ ID NO: 1180998 - RNA, 19 nt, Homo sapiens
  misc_RNA (1)...(19): siRNA sense strand
guacaggcguuagcauuaa

SEQ ID NO: 1180999 - RNA, 19 nt, Homo sapiens
  misc_RNA (1)...(19): siRNA sense strand
gcaaguaacuaagcaguca

SEQ ID NO: 1181000 - RNA, 19 nt, Homo sapiens
  misc_RNA (1)...(19): siRNA sense strand
aaagaaaucuccagguuca

SEQ ID NO: 1181001 - RNA, 19 nt, Homo sapiens
  misc_RNA (1)...(19): siRNA sense strand
ugagagaggugauagaaau

SEQ ID NO: 1181002 - RNA, 19 nt, Homo sapiens
  misc_RNA (1)...(19): siRNA sense strand
gaaacuugauuuguuguga

SEQ ID NO: 1181003 - RNA, 19 nt, Homo sapiens
  misc_RNA (1)...(19): siRNA sense strand
gaauauguguuagcuguga

SEQ ID NO: 1181004 - RNA, 19 nt, Homo sapiens
  misc_RNA (1)...(19): siRNA sense strand
gaguaucauuguaugguua

SEQ ID NO: 1181005 - RNA, 19 nt, Homo sapiens
  misc_RNA (1)...(19): siRNA sense strand
caaaguggcucaucaucau

SEQ ID NO: 1181006 - RNA, 19 nt, Homo sapiens
  misc_RNA (1)...(19): siRNA sense strand
caucugauacugagaaaua

SEQ ID NO: 1181007 - RNA, 19 nt, Homo sapiens
  misc_RNA (1)...(19): siRNA sense strand
guggagaguucaucuguaa

SEQ ID NO: 1181008 - RNA, 19 nt, Homo sapiens
  misc_RNA (1)...(19): siRNA sense strand
gaagcuaaacuuucaagaa

SEQ ID NO: 1181009 - RNA, 19 nt, Homo sapiens
  misc_RNA (1)...(19): siRNA sense strand
caaagaagaagaagaguug

SEQ ID NO: 1181010 - RNA, 19 nt, Homo sapiens
  misc_RNA (1)...(19): siRNA sense strand
gugaagagucggaaacuua

SEQ ID NO: 1181011 - RNA, 19 nt, Homo sapiens
  misc_RNA (1)...(19): siRNA sense strand
aagagaaacucccuaagaa

SEQ ID NO: 1181012 - RNA, 19 nt, Homo sapiens
  misc_RNA (1)...(19): siRNA sense strand
acaaagaaaucuccagguu

SEQ ID NO: 1181013 - RNA, 19 nt, Homo sapiens
  misc_RNA (1)...(19): siRNA sense strand
cagcggagcuauaaacaga

SEQ ID NO: 1181014 - RNA, 19 nt, Homo sapiens
  misc_RNA (1)...(19): siRNA sense strand
caaagaagacuaguucaaa

SEQ ID NO: 1181015 - RNA, 19 nt, Homo sapiens
  misc_RNA (1)...(19): siRNA sense strand
gaagagaagcaaucuacaa

SEQ ID NO: 1181016 - RNA, 19 nt, Homo sapiens
  misc_RNA (1)...(19): siRNA sense strand
ugaaugagcuuacugaacu

SEQ ID NO: 1181017 - RNA, 19 nt, Homo sapiens
  misc_RNA (1)...(19): siRNA sense strand
ggagaagacagaagauaaa

SEQ ID NO: 1181018 - RNA, 19 nt, Homo sapiens
  misc_RNA (1)...(19): siRNA sense strand
cggagaaucuggagaagaa

SEQ ID NO: 1181019 - RNA, 19 nt, Homo sapiens
  misc_RNA (1)...(19): siRNA sense strand
gaauagaauugccaagaag

SEQ ID NO: 1181020 - RNA, 19 nt, Homo sapiens
  misc_RNA (1)...(19): siRNA sense strand
gcagaaggcacaguugaua

SEQ ID NO: 1181021 - RNA, 19 nt, Homo sapiens
  misc_RNA (1)...(19): siRNA sense strand
cagaggagguauuaaauca

SEQ ID NO: 1181022 - RNA, 19 nt, Homo sapiens
  misc_RNA (1)...(19): siRNA sense strand
aagaagaaccucaauauga

SEQ ID NO: 1181023 - RNA, 19 nt, Homo sapiens
  misc_RNA (1)...(19): siRNA sense strand
cagcguauuugagaauuua

SEQ ID NO: 1181024 - RNA, 19 nt, Homo sapiens
  misc_RNA (1)...(19): siRNA sense strand
gagccagacuuauuagaug

SEQ ID NO: 1181025 - RNA, 19 nt, Homo sapiens
  misc_RNA (1)...(19): siRNA sense strand
gaagacagaagauaaagau

SEQ ID NO: 1181026 - RNA, 19 nt, Homo sapiens
  misc_RNA (1)...(19): siRNA sense strand
ucaaggaggaggauuauuu

SEQ ID NO: 1181027 - RNA, 19 nt, Homo sapiens
  misc_RNA (1)...(19): siRNA sense strand
gaggaacaaagaacaaaua

SEQ ID NO: 1181028 - RNA, 19 nt, Homo sapiens
  misc_RNA (1)...(19): siRNA sense strand
gaacaacaguaugaaucuu

SEQ ID NO: 1181029 - RNA, 19 nt, Homo sapiens
  misc_RNA (1)...(19): siRNA sense strand
cagagaaauuccuaaagaa

SEQ ID NO: 1181030 - RNA, 19 nt, Homo sapiens
  misc_RNA (1)...(19): siRNA sense strand
gaagagagacgaaaacgua

SEQ ID NO: 1181031 - RNA, 19 nt, Homo sapiens
  misc_RNA (1)...(19): siRNA sense strand
uaaaugaagaugcgucuaa

SEQ ID NO: 1181032 - RNA, 19 nt, Homo sapiens
  misc_RNA (1)...(19): siRNA sense strand
gcugaagaauuuaaugaug

SEQ ID NO: 1181033 - RNA, 19 nt, Homo sapiens
  misc_RNA (1)...(19): siRNA sense strand
ggacucauccuugguguuu

SEQ ID NO: 1181034 - RNA, 19 nt, Homo sapiens
  misc_RNA (1)...(19): siRNA sense strand
gaagacuaguucaaauugu

SEQ ID NO: 1181035 - RNA, 19 nt, Homo sapiens
  misc_RNA (1)...(19): siRNA sense strand
ggacaacaggucaaucauu

SEQ ID NO: 1181036 - RNA, 19 nt, Homo sapiens
  misc_RNA (1)...(19): siRNA sense strand
aagaacacauuguaggaua

SEQ ID NO: 1181037 - RNA, 19 nt, Homo sapiens
  misc_RNA (1)...(19): siRNA sense strand
gaauccaucuuaugacauc

SEQ ID NO: 1181038 - RNA, 19 nt, Homo sapiens
  misc_RNA (1)...(19): siRNA sense strand
gugagaggacgauuauuua

SEQ ID NO: 1181039 - RNA, 19 nt, Homo sapiens
  misc_RNA (1)...(19): siRNA sense strand
ggaaagauuauacagcauu

SEQ ID NO: 1181040 - RNA, 19 nt, Homo sapiens
  misc_RNA (1)...(19): siRNA sense strand
gagaggugauagaaauuga

SEQ ID NO: 1181041 - RNA, 19 nt, Homo sapiens
  misc_RNA (1)...(19): siRNA sense strand
gaagguggaaacuugauuu

SEQ ID NO: 1181042 - RNA, 19 nt, Homo sapiens
  misc_RNA (1)...(19): siRNA sense strand
ugacaaugauguugaagug

SEQ ID NO: 1181043 - RNA, 19 nt, Homo sapiens
  misc_RNA (1)...(19): siRNA sense strand
gggagaagacagaagauaa

SEQ ID NO: 1181044 - RNA, 19 nt, Homo sapiens
  misc_RNA (1)...(19): siRNA sense strand
ccucauaucucuggacuug

SEQ ID NO: 1181045 - RNA, 19 nt, Homo sapiens
  misc_RNA (1)...(19): siRNA sense strand
gcuaagagcucuauaauuu

SEQ ID NO: 1181046 - RNA, 19 nt, Homo sapiens
  misc_RNA (1)...(19): siRNA sense strand
gaagugggcugaagaauuu

SEQ ID NO: 1181047 - RNA, 19 nt, Homo sapiens
  misc_RNA (1)...(19): siRNA sense strand
gcaaagaacuucaucuaaa

SEQ ID NO: 1181048 - RNA, 19 nt, Homo sapiens
  misc_RNA (1)...(19): siRNA sense strand
ggaacuagcucuucagaaa

SEQ ID NO: 1181049 - RNA, 19 nt, Homo sapiens
  misc_RNA (1)...(19): siRNA sense strand
ccaaagagaugauuaagaa

SEQ ID NO: 1181050 - RNA, 19 nt, Homo sapiens
  misc_RNA (1)...(19): siRNA sense strand
ggaaguaacucugauauga

SEQ ID NO: 1181051 - RNA, 19 nt, Homo sapiens
  misc_RNA (1)...(19): siRNA sense strand
gaggaaaccuucaauugua

SEQ ID NO: 1181052 - RNA, 19 nt, Homo sapiens
  misc_RNA (1)...(19): siRNA sense strand
gauaguagcucaaguggaa

SEQ ID NO: 1181053 - RNA, 19 nt, Homo sapiens
  misc_RNA (1)...(19): siRNA sense strand
gcagagaaauuccuaaaga

SEQ ID NO: 1181054 - RNA, 19 nt, Homo sapiens
  misc_RNA (1)...(19): siRNA sense strand
ggaaagaguucaaggaaga

SEQ ID NO: 1181055 - RNA, 19 nt, Homo sapiens
  misc_RNA (1)...(19): siRNA sense strand
gaagaugcgucuaaugaaa

SEQ ID NO: 1181056 - RNA, 19 nt, Homo sapiens
  misc_RNA (1)...(19): siRNA sense strand
gaagaaaggugagcaguga

SEQ ID NO: 1181057 - RNA, 19 nt, Homo sapiens
  misc_RNA (1)...(19): siRNA sense strand
gagaagcaaucuacaauga

SEQ ID NO: 1181058 - RNA, 19 nt, Homo sapiens
  misc_RNA (1)...(19): siRNA sense strand
gaacauacauccagauuuu

SEQ ID NO: 1181059 - RNA, 19 nt, Homo sapiens
  misc_RNA (1)...(19): siRNA sense strand
gacaacaggucaaucauuu

SEQ ID NO: 1181060 - RNA, 19 nt, Homo sapiens
  misc_RNA (1)...(19): siRNA sense strand
gaacaccacuucaaaauaa

SEQ ID NO: 1181061 - RNA, 19 nt, Homo sapiens
  misc_RNA (1)...(19): siRNA sense strand
gaagcaagcugacauuaca

SEQ ID NO: 1181062 - RNA, 19 nt, Homo sapiens
  misc_RNA (1)...(19): siRNA sense strand
gaugaaaccuccaugaguu

SEQ ID NO: 1181063 - RNA, 19 nt, Homo sapiens
  misc_RNA (1)...(19): siRNA sense strand
gaugaagccuuaucuaaau

SEQ ID NO: 1181064 - RNA, 19 nt, Homo sapiens
  misc_RNA (1)...(19): siRNA sense strand
gcaagaagauggugguguu

SEQ ID NO: 1181065 - RNA, 19 nt, Homo sapiens
  misc_RNA (1)...(19): siRNA sense strand
ggaaaguucugaagauaau

SEQ ID NO: 1181066 - RNA, 19 nt, Homo sapiens
  misc_RNA (1)...(19): siRNA sense strand
caaagagcauaaagucaua

SEQ ID NO: 1181067 - RNA, 19 nt, Homo sapiens
  misc_RNA (1)...(19): siRNA sense strand
gccaggagcuugauguuaa

SEQ ID NO: 1181068 - RNA, 19 nt, Homo sapiens
  misc_RNA (1)...(19): siRNA sense strand
gaggaaaguucugaagaua

SEQ ID NO: 1181069 - RNA, 19 nt, Homo sapiens
  misc_RNA (1)...(19): siRNA sense strand
gaaagaagaugguuguaac

SEQ ID NO: 1181070 - RNA, 19 nt, Homo sapiens
  misc_RNA (1)...(19): siRNA sense strand
gguuguaacucuucugaua

SEQ ID NO: 1181071 - RNA, 19 nt, Homo sapiens
  misc_RNA (1)...(19): siRNA sense strand
gaccaugcguuucaacaua

SEQ ID NO: 1181072 - RNA, 19 nt, Homo sapiens
  misc_RNA (1)...(19): siRNA sense strand
gauguuagcuggauguguu

SEQ ID NO: 1181073 - RNA, 19 nt, Homo sapiens
  misc_RNA (1)...(19): siRNA sense strand
gaacaaggucugcaaagaa

SEQ ID NO: 1181074 - RNA, 19 nt, Homo sapiens
  misc_RNA (1)...(19): siRNA sense strand
gaagcaaucuacaaugaug

SEQ ID NO: 1181075 - RNA, 19 nt, Homo sapiens
  misc_RNA (1)...(19): siRNA sense strand
cagaguauauucagaguuu

SEQ ID NO: 1181076 - RNA, 19 nt, Homo sapiens
  misc_RNA (1)...(19): siRNA sense strand
gaggagguauuaaaucaaa

SEQ ID NO: 1181077 - RNA, 19 nt, Homo sapiens
  misc_RNA (1)...(19): siRNA sense strand
gaaagcaaguugaauacau

SEQ ID NO: 1181078 - RNA, 19 nt, Homo sapiens
  misc_RNA (1)...(19): siRNA sense strand
agacuuaaauuccgaguuu

SEQ ID NO: 1181079 - RNA, 19 nt, Homo sapiens
  misc_RNA (1)...(19): siRNA sense strand
ggauauaauuucagcugua

SEQ ID NO: 1181080 - RNA, 19 nt, Homo sapiens
  misc_RNA (1)...(19): siRNA sense strand
caacagaggagguauuaaa

SEQ ID NO: 1181081 - RNA, 19 nt, Homo sapiens
  misc_RNA (1)...(19): siRNA sense strand
caaaguauguagaaucaga

SEQ ID NO: 1181082 - RNA, 19 nt, Homo sapiens
  misc_RNA (1)...(19): siRNA sense strand
uaacaggugugggcaauaa

SEQ ID NO: 1181083 - RNA, 19 nt, Homo sapiens
  misc_RNA (1)...(19): siRNA sense strand
agucauagaugcuaaguuu

SEQ ID NO: 1181084 - RNA, 19 nt, Homo sapiens
  misc_RNA (1)...(19): siRNA sense strand
gauggaugcuguaaacaaa

SEQ ID NO: 1181085 - RNA, 19 nt, Homo sapiens
  misc_RNA (1)...(19): siRNA sense strand
agaagaaccucaauaugaa

SEQ ID NO: 1181086 - RNA, 19 nt, Homo sapiens
  misc_RNA (1)...(19): siRNA sense strand
gagaucgacuuccuaagaa

SEQ ID NO: 1181087 - RNA, 19 nt, Homo sapiens
  misc_RNA (1)...(19): siRNA sense strand
gaagaagaguugacugaag

SEQ ID NO: 1181088 - RNA, 19 nt, Homo sapiens
  misc_RNA (1)...(19): siRNA sense strand
guacuucucuuugaaauuc

SEQ ID NO: 1181089 - RNA, 19 nt, Homo sapiens
  misc_RNA (1)...(19): siRNA sense strand
gaugaaggccauauucuaa

SEQ ID NO: 1181090 - RNA, 19 nt, Homo sapiens
  misc_RNA (1)...(19): siRNA sense strand
gguggaaacuugauuuguu

SEQ ID NO: 1181091 - RNA, 19 nt, Homo sapiens
  misc_RNA (1)...(19): siRNA sense strand
cuacuuagaucacuuaaca

SEQ ID NO: 1181092 - RNA, 19 nt, Homo sapiens
  misc_RNA (1)...(19): siRNA sense strand
gcuugagguuucugaauua

SEQ ID NO: 1181093 - RNA, 19 nt, Homo sapiens
  misc_RNA (1)...(19): siRNA sense strand
guauuaagguucaagaaga

SEQ ID NO: 1181094 - RNA, 19 nt, Homo sapiens
  misc_RNA (1)...(19): siRNA sense strand
agaagaaucugaagaaaca

SEQ ID NO: 1181095 - RNA, 19 nt, Homo sapiens
  misc_RNA (1)...(19): siRNA sense strand
ggaaagaugauaaaggaaa

SEQ ID NO: 1181096 - RNA, 19 nt, Homo sapiens
  misc_RNA (1)...(19): siRNA sense strand
gaaaucaguucugcuacaa

SEQ ID NO: 1181097 - RNA, 19 nt, Homo sapiens
  misc_RNA (1)...(19): siRNA sense strand
gaaaacagguagauaguga

SEQ ID NO: 1181098 - RNA, 19 nt, Homo sapiens
  misc_RNA (1)...(19): siRNA sense strand
guacaggcguuagcauuaa

SEQ ID NO: 1181099 - RNA, 19 nt, Homo sapiens
  misc_RNA (1)...(19): siRNA sense strand
gcaaguaacuaagcaguca

SEQ ID NO: 1181100 - RNA, 19 nt, Homo sapiens
  misc_RNA (1)...(19): siRNA sense strand
aaagaaaucuccagguuca

SEQ ID NO: 1181101 - RNA, 19 nt, Homo sapiens
  misc_RNA (1)...(19): siRNA sense strand
ugagagaggugauagaaau

SEQ ID NO: 1181102 - RNA, 19 nt, Homo sapiens
  misc_RNA (1)...(19): siRNA sense strand
gaaacuugauuuguuguga

SEQ ID NO: 1181103 - RNA, 19 nt, Homo sapiens
  misc_RNA (1)...(19): siRNA sense strand
gaauauguguuagcuguga

SEQ ID NO: 1181104 - RNA, 19 nt, Homo sapiens
  misc_RNA (1)...(19): siRNA sense strand
gaguaucauuguaugguua

SEQ ID NO: 1181105 - RNA, 19 nt, Homo sapiens
  misc_RNA (1)...(19): siRNA sense strand
caaaguggcucaucaucau

SEQ ID NO: 1181106 - RNA, 19 nt, Homo sapiens
  misc_RNA (1)...(19): siRNA sense strand
caucugauacugagaaaua

SEQ ID NO: 1181107 - RNA, 19 nt, Homo sapiens
  misc_RNA (1)...(19): siRNA sense strand
guggagaguucaucuguaa

SEQ ID NO: 1181108 - RNA, 19 nt, Homo sapiens
  misc_RNA (1)...(19): siRNA sense strand
gaagcuaaacuuucaagaa

SEQ ID NO: 1181109 - RNA, 19 nt, Homo sapiens
  misc_RNA (1)...(19): siRNA sense strand
caaagaagaagaagaguug

SEQ ID NO: 1181110 - RNA, 19 nt, Homo sapiens
  misc_RNA (1)...(19): siRNA sense strand
gugaagagucggaaacuua

SEQ ID NO: 1181111 - RNA, 19 nt, Homo sapiens
  misc_RNA (1)...(19): siRNA sense strand
aagagaaacucccuaagaa

SEQ ID NO: 1181112 - RNA, 19 nt, Homo sapiens
  misc_RNA (1)...(19): siRNA sense strand
acaaagaaaucuccagguu

SEQ ID NO: 1181113 - RNA, 19 nt, Homo sapiens
  misc_RNA (1)...(19): siRNA sense strand
cagcggagcuauaaacaga

SEQ ID NO: 1181114 - RNA, 19 nt, Homo sapiens
  misc_RNA (1)...(19): siRNA sense strand
caaagaagacuaguucaaa

SEQ ID NO: 1181115 - RNA, 19 nt, Homo sapiens
  misc_RNA (1)...(19): siRNA sense strand
gaagagaagcaaucuacaa

SEQ ID NO: 1181116 - RNA, 19 nt, Homo sapiens
  misc_RNA (1)...(19): siRNA sense strand
ugaaugagcuuacugaacu

SEQ ID NO: 1181117 - RNA, 19 nt, Homo sapiens
  misc_RNA (1)...(19): siRNA sense strand
ggagaagacagaagauaaa

SEQ ID NO: 1181118 - RNA, 19 nt, Homo sapiens
  misc_RNA (1)...(19): siRNA sense strand
cggagaaucuggagaagaa

SEQ ID NO: 1181119 - RNA, 19 nt, Homo sapiens
  misc_RNA (1)...(19): siRNA sense strand
gaauagaauugccaagaag

SEQ ID NO: 1181120 - RNA, 19 nt, Homo sapiens
  misc_RNA (1)...(19): siRNA sense strand
gcagaaggcacaguugaua

SEQ ID NO: 1181121 - RNA, 19 nt, Homo sapiens
  misc_RNA (1)...(19): siRNA sense strand
cagaggagguauuaaauca

SEQ ID NO: 1181122 - RNA, 19 nt, Homo sapiens
  misc_RNA (1)...(19): siRNA sense strand
aagaagaaccucaauauga

SEQ ID NO: 1181123 - RNA, 19 nt, Homo sapiens
  misc_RNA (1)...(19): siRNA sense strand
cagcguauuugagaauuua

SEQ ID NO: 1181124 - RNA, 19 nt, Homo sapiens
  misc_RNA (1)...(19): siRNA sense strand
gagccagacuuauuagaug

SEQ ID NO: 1181125 - RNA, 19 nt, Homo sapiens
  misc_RNA (1)...(19): siRNA sense strand
gaagacagaagauaaagau

SEQ ID NO: 1181126 - RNA, 19 nt, Homo sapiens
  misc_RNA (1)...(19): siRNA sense strand
ucaaggaggaggauuauuu

SEQ ID NO: 1181127 - RNA, 19 nt, Homo sapiens
  misc_RNA (1)...(19): siRNA sense strand
gaggaacaaagaacaaaua

SEQ ID NO: 1181128 - RNA, 19 nt, Homo sapiens
  misc_RNA (1)...(19): siRNA sense strand
gaacaacaguaugaaucuu

SEQ ID NO: 1181129 - RNA, 19 nt, Homo sapiens
  misc_RNA (1)...(19): siRNA sense strand
cagagaaauuccuaaagaa

SEQ ID NO: 1181130 - RNA, 19 nt, Homo sapiens
  misc_RNA (1)...(19): siRNA sense strand
gaagagagacgaaaacgua

SEQ ID NO: 1181131 - RNA, 19 nt, Homo sapiens
  misc_RNA (1)...(19): siRNA sense strand
uaaaugaagaugcgucuaa

SEQ ID NO: 1181132 - RNA, 19 nt, Homo sapiens
  misc_RNA (1)...(19): siRNA sense strand
gcugaagaauuuaaugaug

SEQ ID NO: 1181133 - RNA, 19 nt, Homo sapiens
  misc_RNA (1)...(19): siRNA sense strand
ggacucauccuugguguuu

SEQ ID NO: 1181134 - RNA, 19 nt, Homo sapiens
  misc_RNA (1)...(19): siRNA sense strand
gaagacuaguucaaauugu

SEQ ID NO: 1181135 - RNA, 19 nt, Homo sapiens
  misc_RNA (1)...(19): siRNA sense strand
ggacaacaggucaaucauu

SEQ ID NO: 1181136 - RNA, 19 nt, Homo sapiens
  misc_RNA (1)...(19): siRNA sense strand
aagaacacauuguaggaua

SEQ ID NO: 1181137 - RNA, 19 nt, Homo sapiens
  misc_RNA (1)...(19): siRNA sense strand
gaauccaucuuaugacauc

SEQ ID NO: 1181138 - RNA, 19 nt, Homo sapiens
  misc_RNA (1)...(19): siRNA sense strand
gugagaggacgauuauuua

SEQ ID NO: 1181139 - RNA, 19 nt, Homo sapiens
  misc_RNA (1)...(19): siRNA sense strand
ggaaagauuauacagcauu

SEQ ID NO: 1181140 - RNA, 19 nt, Homo sapiens
  misc_RNA (1)...(19): siRNA sense strand
gagaggugauagaaauuga

SEQ ID NO: 1181141 - RNA, 19 nt, Homo sapiens
  misc_RNA (1)...(19): siRNA sense strand
gaagguggaaacuugauuu

SEQ ID NO: 1181142 - RNA, 19 nt, Homo sapiens
  misc_RNA (1)...(19): siRNA sense strand
ugacaaugauguugaagug

SEQ ID NO: 1181143 - RNA, 19 nt, Homo sapiens
  misc_RNA (1)...(19): siRNA sense strand
gggagaagacagaagauaa

SEQ ID NO: 1181144 - RNA, 19 nt, Homo sapiens
  misc_RNA (1)...(19): siRNA sense strand
ccucauaucucuggacuug

SEQ ID NO: 1181145 - RNA, 19 nt, Homo sapiens
  misc_RNA (1)...(19): siRNA sense strand
gcuaagagcucuauaauuu

SEQ ID NO: 1181146 - RNA, 19 nt, Homo sapiens
  misc_RNA (1)...(19): siRNA sense strand
gaagugggcugaagaauuu

SEQ ID NO: 1181147 - RNA, 19 nt, Homo sapiens
  misc_RNA (1)...(19): siRNA sense strand
gcaaagaacuucaucuaaa

SEQ ID NO: 1181148 - RNA, 19 nt, Homo sapiens
  misc_RNA (1)...(19): siRNA sense strand
ccaaagagaugauuaagaa

SEQ ID NO: 1181149 - RNA, 19 nt, Homo sapiens
  misc_RNA (1)...(19): siRNA sense strand
gauaguagcucaaguggaa

SEQ ID NO: 1181150 - RNA, 19 nt, Homo sapiens
  misc_RNA (1)...(19): siRNA sense strand
gcagagaaauuccuaaaga

SEQ ID NO: 1181151 - RNA, 19 nt, Homo sapiens
  misc_RNA (1)...(19): siRNA sense strand
ggaaagaguucaaggaaga

SEQ ID NO: 1181152 - RNA, 19 nt, Homo sapiens
  misc_RNA (1)...(19): siRNA sense strand
gaagaaaggugagcaguga

SEQ ID NO: 1181153 - RNA, 19 nt, Homo sapiens
  misc_RNA (1)...(19): siRNA sense strand
gagaagcaaucuacaauga

SEQ ID NO: 1181154 - RNA, 19 nt, Homo sapiens
  misc_RNA (1)...(19): siRNA sense strand
gaacauacauccagauuuu

SEQ ID NO: 1181155 - RNA, 19 nt, Homo sapiens
  misc_RNA (1)...(19): siRNA sense strand
gaacaccacuucaaaauaa

SEQ ID NO: 1181156 - RNA, 19 nt, Homo sapiens
  misc_RNA (1)...(19): siRNA sense strand
gaagcaagcugacauuaca

SEQ ID NO: 1181157 - RNA, 19 nt, Homo sapiens
  misc_RNA (1)...(19): siRNA sense strand
gaugaaaccuccaugaguu

SEQ ID NO: 1181158 - RNA, 19 nt, Homo sapiens
  misc_RNA (1)...(19): siRNA sense strand
gaugaagccuuaucuaaau

SEQ ID NO: 1181159 - RNA, 19 nt, Homo sapiens
  misc_RNA (1)...(19): siRNA sense strand
gcaagaagauggugguguu

SEQ ID NO: 1181160 - RNA, 19 nt, Homo sapiens
  misc_RNA (1)...(19): siRNA sense strand
ggaaaguucugaagauaau

SEQ ID NO: 1181161 - RNA, 19 nt, Homo sapiens
  misc_RNA (1)...(19): siRNA sense strand
caaagagcauaaagucaua

SEQ ID NO: 1181162 - RNA, 19 nt, Homo sapiens
  misc_RNA (1)...(19): siRNA sense strand
gccaggagcuugauguuaa

SEQ ID NO: 1181163 - RNA, 19 nt, Homo sapiens
  misc_RNA (1)...(19): siRNA sense strand
gaggaaaguucugaagaua

SEQ ID NO: 1181164 - RNA, 19 nt, Homo sapiens
  misc_RNA (1)...(19): siRNA sense strand
gaaagaagaugguuguaac

SEQ ID NO: 1181165 - RNA, 19 nt, Homo sapiens
  misc_RNA (1)...(19): siRNA sense strand
gguuguaacucuucugaua

SEQ ID NO: 1181166 - RNA, 19 nt, Homo sapiens
  misc_RNA (1)...(19): siRNA sense strand
gaccaugcguuucaacaua

SEQ ID NO: 1181167 - RNA, 19 nt, Homo sapiens
  misc_RNA (1)...(19): siRNA sense strand
gauguuagcuggauguguu

SEQ ID NO: 1181168 - RNA, 19 nt, Homo sapiens
  misc_RNA (1)...(19): siRNA sense strand
gaacaaggucugcaaagaa

SEQ ID NO: 1181169 - RNA, 19 nt, Homo sapiens
  misc_RNA (1)...(19): siRNA sense strand
gaagcaaucuacaaugaug

SEQ ID NO: 1181170 - RNA, 19 nt, Homo sapiens
  misc_RNA (1)...(19): siRNA sense strand
cagaguauauucagaguuu

SEQ ID NO: 1181171 - RNA, 19 nt, Homo sapiens
  misc_RNA (1)...(19): siRNA sense strand
gaggagguauuaaaucaaa

SEQ ID NO: 1181172 - RNA, 19 nt, Homo sapiens
  misc_RNA (1)...(19): siRNA sense strand
agacuuaaauuccgaguuu

SEQ ID NO: 1181173 - RNA, 19 nt, Homo sapiens
  misc_RNA (1)...(19): siRNA sense strand
ggauauaauuucagcugua

SEQ ID NO: 1181174 - RNA, 19 nt, Homo sapiens
  misc_RNA (1)...(19): siRNA sense strand
caacagaggagguauuaaa

SEQ ID NO: 1181175 - RNA, 19 nt, Homo sapiens
  misc_RNA (1)...(19): siRNA sense strand
gauggaugcuguaaacaaa

SEQ ID NO: 1181176 - RNA, 19 nt, Homo sapiens
  misc_RNA (1)...(19): siRNA sense strand
uaacaggugugggcaauaa

SEQ ID NO: 1181177 - RNA, 19 nt, Homo sapiens
  misc_RNA (1)...(19): siRNA sense strand
agucauagaugcuaaguuu

SEQ ID NO: 1181178 - RNA, 19 nt, Homo sapiens
  misc_RNA (1)...(19): siRNA sense strand
agaagaaccucaauaugaa

SEQ ID NO: 1181179 - RNA, 19 nt, Homo sapiens
  misc_RNA (1)...(19): siRNA sense strand
gagaucgacuuccuaagaa

SEQ ID NO: 1181180 - RNA, 19 nt, Homo sapiens
  misc_RNA (1)...(19): siRNA sense strand
gaagaagaguugacugaag

SEQ ID NO: 1181181 - RNA, 19 nt, Homo sapiens
  misc_RNA (1)...(19): siRNA sense strand
guacuucucuuugaaauuc

SEQ ID NO: 1181182 - RNA, 19 nt, Homo sapiens
  misc_RNA (1)...(19): siRNA sense strand
gaugaaggccauauucuaa

SEQ ID NO: 1181183 - RNA, 19 nt, Homo sapiens
  misc_RNA (1)...(19): siRNA sense strand
gaaaucaguucugcuacaa

SEQ ID NO: 1181184 - RNA, 19 nt, Homo sapiens
  misc_RNA (1)...(19): siRNA sense strand
cuacuuagaucacuuaaca

SEQ ID NO: 1181185 - RNA, 19 nt, Homo sapiens
  misc_RNA (1)...(19): siRNA sense strand
gguggaaacuugauuuguu

SEQ ID NO: 1181186 - RNA, 19 nt, Homo sapiens
  misc_RNA (1)...(19): siRNA sense strand
gcuugagguuucugaauua

SEQ ID NO: 1181187 - RNA, 19 nt, Homo sapiens
  misc_RNA (1)...(19): siRNA sense strand
guauuaagguucaagaaga

SEQ ID NO: 1181188 - RNA, 19 nt, Homo sapiens
  misc_RNA (1)...(19): siRNA sense strand
ggaaagaugauaaaggaaa

SEQ ID NO: 1181189 - RNA, 19 nt, Homo sapiens
  misc_RNA (1)...(19): siRNA sense strand
gaaaacagguagauaguga

SEQ ID NO: 1181190 - RNA, 19 nt, Homo sapiens
  misc_RNA (1)...(19): siRNA sense strand
guacaggcguuagcauuaa

SEQ ID NO: 1181191 - RNA, 19 nt, Homo sapiens
  misc_RNA (1)...(19): siRNA sense strand
gcaaguaacuaagcaguca

SEQ ID NO: 1181192 - RNA, 19 nt, Homo sapiens
  misc_RNA (1)...(19): siRNA sense strand
aaagaaaucuccagguuca

SEQ ID NO: 1181193 - RNA, 19 nt, Homo sapiens
  misc_RNA (1)...(19): siRNA sense strand
ugagagaggugauagaaau

SEQ ID NO: 1181194 - RNA, 19 nt, Homo sapiens
  misc_RNA (1)...(19): siRNA sense strand
guggagaguucaucuguaa

SEQ ID NO: 1181195 - RNA, 19 nt, Homo sapiens
  misc_RNA (1)...(19): siRNA sense strand
gaauauguguuagcuguga

SEQ ID NO: 1181196 - RNA, 19 nt, Homo sapiens
  misc_RNA (1)...(19): siRNA sense strand
gaguaucauuguaugguua

SEQ ID NO: 1181197 - RNA, 19 nt, Homo sapiens
  misc_RNA (1)...(19): siRNA sense strand
gaaacuugauuuguuguga

SEQ ID NO: 1181198 - RNA, 19 nt, Homo sapiens
  misc_RNA (1)...(19): siRNA sense strand
caaaguggcucaucaucau

SEQ ID NO: 1181199 - RNA, 19 nt, Homo sapiens
  misc_RNA (1)...(19): siRNA sense strand
caucugauacugagaaaua

SEQ ID NO: 1181200 - RNA, 19 nt, Homo sapiens
  misc_RNA (1)...(19): siRNA sense strand
gaagcuaaacuuucaagaa

SEQ ID NO: 1181201 - RNA, 19 nt, Homo sapiens
  misc_RNA (1)...(19): siRNA sense strand
caaagaagaagaagaguug

SEQ ID NO: 1181202 - RNA, 19 nt, Homo sapiens
  misc_RNA (1)...(19): siRNA sense strand
gugaagagucggaaacuua

SEQ ID NO: 1181203 - RNA, 19 nt, Homo sapiens
  misc_RNA (1)...(19): siRNA sense strand
aagagaaacucccuaagaa

SEQ ID NO: 1181204 - RNA, 19 nt, Homo sapiens
  misc_RNA (1)...(19): siRNA sense strand
acaaagaaaucuccagguu

SEQ ID NO: 1181205 - RNA, 19 nt, Homo sapiens
  misc_RNA (1)...(19): siRNA sense strand
cagcggagcuauaaacaga

SEQ ID NO: 1181206 - RNA, 19 nt, Homo sapiens
  misc_RNA (1)...(19): siRNA sense strand
caaagaagacuaguucaaa

SEQ ID NO: 1181207 - RNA, 19 nt, Homo sapiens
  misc_RNA (1)...(19): siRNA sense strand
gaagagaagcaaucuacaa

SEQ ID NO: 1181208 - RNA, 19 nt, Homo sapiens
  misc_RNA (1)...(19): siRNA sense strand
ugaaugagcuuacugaacu

SEQ ID NO: 1181209 - RNA, 19 nt, Homo sapiens
  misc_RNA (1)...(19): siRNA sense strand
ggagaagacagaagauaaa

SEQ ID NO: 1181210 - RNA, 19 nt, Homo sapiens
  misc_RNA (1)...(19): siRNA sense strand
cggagaaucuggagaagaa

SEQ ID NO: 1181211 - RNA, 19 nt, Homo sapiens
  misc_RNA (1)...(19): siRNA sense strand
gaauagaauugccaagaag

SEQ ID NO: 1181212 - RNA, 19 nt, Homo sapiens
  misc_RNA (1)...(19): siRNA sense strand
gcagaaggcacaguugaua

SEQ ID NO: 1181213 - RNA, 19 nt, Homo sapiens
  misc_RNA (1)...(19): siRNA sense strand
cagaggagguauuaaauca

SEQ ID NO: 1181214 - RNA, 19 nt, Homo sapiens
  misc_RNA (1)...(19): siRNA sense strand
aagaagaaccucaauauga

SEQ ID NO: 1181215 - RNA, 19 nt, Homo sapiens
  misc_RNA (1)...(19): siRNA sense strand
cagcguauuugagaauuua

SEQ ID NO: 1181216 - RNA, 19 nt, Homo sapiens
  misc_RNA (1)...(19): siRNA sense strand
gagccagacuuauuagaug

SEQ ID NO: 1181217 - RNA, 19 nt, Homo sapiens
  misc_RNA (1)...(19): siRNA sense strand
gaagacagaagauaaagau

SEQ ID NO: 1181218 - RNA, 19 nt, Homo sapiens
  misc_RNA (1)...(19): siRNA sense strand
ucaaggaggaggauuauuu

SEQ ID NO: 1181219 - RNA, 19 nt, Homo sapiens
  misc_RNA (1)...(19): siRNA sense strand
gaggaacaaagaacaaaua

SEQ ID NO: 1181220 - RNA, 19 nt, Homo sapiens
  misc_RNA (1)...(19): siRNA sense strand
gaacaacaguaugaaucuu

SEQ ID NO: 1181221 - RNA, 19 nt, Homo sapiens
  misc_RNA (1)...(19): siRNA sense strand
cagagaaauuccuaaagaa

SEQ ID NO: 1181222 - RNA, 19 nt, Homo sapiens
  misc_RNA (1)...(19): siRNA sense strand
gaagagagacgaaaacgua

SEQ ID NO: 1181223 - RNA, 19 nt, Homo sapiens
  misc_RNA (1)...(19): siRNA sense strand
gaagacuaguucaaauugu

SEQ ID NO: 1181224 - RNA, 19 nt, Homo sapiens
  misc_RNA (1)...(19): siRNA sense strand
gcugaagaauuuaaugaug

SEQ ID NO: 1181225 - RNA, 19 nt, Homo sapiens
  misc_RNA (1)...(19): siRNA sense strand
ggacucauccuugguguuu

SEQ ID NO: 1181226 - RNA, 19 nt, Homo sapiens
  misc_RNA (1)...(19): siRNA sense strand
gaagguggaaacuugauuu

SEQ ID NO: 1181227 - RNA, 19 nt, Homo sapiens
  misc_RNA (1)...(19): siRNA sense strand
aagaacacauuguaggaua

SEQ ID NO: 1181228 - RNA, 19 nt, Homo sapiens
  misc_RNA (1)...(19): siRNA sense strand
gaauccaucuuaugacauc

SEQ ID NO: 1181229 - RNA, 19 nt, Homo sapiens
  misc_RNA (1)...(19): siRNA sense strand
gugagaggacgauuauuua

SEQ ID NO: 1181230 - RNA, 19 nt, Homo sapiens
  misc_RNA (1)...(19): siRNA sense strand
ggaaagauuauacagcauu

SEQ ID NO: 1181231 - RNA, 19 nt, Homo sapiens
  misc_RNA (1)...(19): siRNA sense strand
gagaggugauagaaauuga

SEQ ID NO: 1181232 - RNA, 19 nt, Homo sapiens
  misc_RNA (1)...(19): siRNA sense strand
gacaacagaggagguauua

SEQ ID NO: 1181233 - RNA, 19 nt, Homo sapiens
  misc_RNA (1)...(19): siRNA sense strand
gggagaagacagaagauaa

SEQ ID NO: 1181234 - RNA, 19 nt, Homo sapiens
  misc_RNA (1)...(19): siRNA sense strand
ccucauaucucuggacuug

SEQ ID NO: 1181235 - RNA, 19 nt, Homo sapiens
  misc_RNA (1)...(19): siRNA sense strand
ugacaaugauguugaagug

SEQ ID NO: 1181236 - RNA, 19 nt, Homo sapiens
  misc_RNA (1)...(19): siRNA sense strand
cgacaaugauccugagaau

SEQ ID NO: 1181237 - RNA, 19 nt, Homo sapiens
  misc_RNA (1)...(19): siRNA sense strand
aagcagcgaugaacagaaa

SEQ ID NO: 1181238 - RNA, 19 nt, Homo sapiens
  misc_RNA (1)...(19): siRNA sense strand
gaauggagcauaugguaga

SEQ ID NO: 1181239 - RNA, 19 nt, Homo sapiens
  misc_RNA (1)...(19): siRNA sense strand
gaguaagaauggagcauau

SEQ ID NO: 1181240 - RNA, 19 nt, Homo sapiens
  misc_RNA (1)...(19): siRNA sense strand
gagauaaagagcaugagua

SEQ ID NO: 1181241 - RNA, 19 nt, Homo sapiens
  misc_RNA (1)...(19): siRNA sense strand
gaauuuauagccucagauu

SEQ ID NO: 1181242 - RNA, 19 nt, Homo sapiens
  misc_RNA (1)...(19): siRNA sense strand
ggaaggagaacaugaaucu

SEQ ID NO: 1181243 - RNA, 19 nt, Homo sapiens
  misc_RNA (1)...(19): siRNA sense strand
agaguugacugaagaagaa

SEQ ID NO: 1181244 - RNA, 19 nt, Homo sapiens
  misc_RNA (1)...(19): siRNA sense strand
gaagaagugggcugaagaa

SEQ ID NO: 1181245 - RNA, 19 nt, Homo sapiens
  misc_RNA (1)...(19): siRNA sense strand
ggaagaaacuaaagaacaa

SEQ ID NO: 1181246 - RNA, 19 nt, Homo sapiens
  misc_RNA (1)...(19): siRNA sense strand
gacacaagcucacgugaua

SEQ ID NO: 1181247 - RNA, 19 nt, Homo sapiens
  misc_RNA (1)...(19): siRNA sense strand
cgacagaaguguuugauga

SEQ ID NO: 1181248 - RNA, 19 nt, Homo sapiens
  misc_RNA (1)...(19): siRNA sense strand
gagagaaucugcaaaguca

SEQ ID NO: 1181249 - RNA, 19 nt, Homo sapiens
  misc_RNA (1)...(19): siRNA sense strand
auaaagagauggcuacuaa

SEQ ID NO: 1181250 - RNA, 19 nt, Homo sapiens
  misc_RNA (1)...(19): siRNA sense strand
agaagaagcugaauguaaa

SEQ ID NO: 1181251 - RNA, 19 nt, Homo sapiens
  misc_RNA (1)...(19): siRNA sense strand
caaacaaucuacagagaaa

SEQ ID NO: 1181252 - RNA, 19 nt, Homo sapiens
  misc_RNA (1)...(19): siRNA sense strand
gaccaugacuguugaggua

SEQ ID NO: 1181253 - RNA, 19 nt, Homo sapiens
  misc_RNA (1)...(19): siRNA sense strand
gaaggaggaugaaguggaa

SEQ ID NO: 1181254 - RNA, 19 nt, Homo sapiens
  misc_RNA (1)...(19): siRNA sense strand
guagaagguuccacuguaa

SEQ ID NO: 1181255 - RNA, 19 nt, Homo sapiens
  misc_RNA (1)...(19): siRNA sense strand
caaaggaagucagcaguuu

SEQ ID NO: 1181256 - RNA, 19 nt, Homo sapiens
  misc_RNA (1)...(19): siRNA sense strand
gguagaagguuccacugua

SEQ ID NO: 1181257 - RNA, 19 nt, Homo sapiens
  misc_RNA (1)...(19): siRNA sense strand
caaagugaguguagcaauu

SEQ ID NO: 1181258 - RNA, 19 nt, Homo sapiens
  misc_RNA (1)...(19): siRNA sense strand
gacagaaccucuugaacaa

SEQ ID NO: 1181259 - RNA, 19 nt, Homo sapiens
  misc_RNA (1)...(19): siRNA sense strand
gaaggaggaugcccaggaa

SEQ ID NO: 1181260 - RNA, 19 nt, Homo sapiens
  misc_RNA (1)...(19): siRNA sense strand
gaaacaggaucaaccuuca

SEQ ID NO: 1181261 - RNA, 19 nt, Homo sapiens
  misc_RNA (1)...(19): siRNA sense strand
gaagucagaugaagucgau

SEQ ID NO: 1181262 - RNA, 19 nt, Homo sapiens
  misc_RNA (1)...(19): siRNA sense strand
gagcacagccucugaaaug

SEQ ID NO: 1181263 - RNA, 19 nt, Homo sapiens
  misc_RNA (1)...(19): siRNA sense strand
gcaaagccacgcagaaauu

SEQ ID NO: 1181264 - RNA, 19 nt, Homo sapiens
  misc_RNA (1)...(19): siRNA sense strand
ucaagaggcugaccaguau

SEQ ID NO: 1181265 - RNA, 19 nt, Homo sapiens
  misc_RNA (1)...(19): siRNA sense strand
gaaacuguauccauucugu

SEQ ID NO: 1181266 - RNA, 19 nt, Homo sapiens
  misc_RNA (1)...(19): siRNA sense strand
gaagcagcauccaaagaaa

SEQ ID NO: 1181267 - RNA, 19 nt, Homo sapiens
  misc_RNA (1)...(19): siRNA sense strand
ggaaagugauaaagaagau

SEQ ID NO: 1181268 - RNA, 19 nt, Homo sapiens
  misc_RNA (1)...(19): siRNA sense strand
ccacugagguguccaagga

SEQ ID NO: 1181269 - RNA, 19 nt, Homo sapiens
  misc_RNA (1)...(19): siRNA sense strand
ggacaagcacauucugaua

SEQ ID NO: 1181270 - RNA, 19 nt, Homo sapiens
  misc_RNA (1)...(19): siRNA sense strand
caacgaagaugacucugau

SEQ ID NO: 1181271 - RNA, 19 nt, Homo sapiens
  misc_RNA (1)...(19): siRNA sense strand
ucacugaaguugcccuuaa

SEQ ID NO: 1181272 - RNA, 19 nt, Homo sapiens
  misc_RNA (1)...(19): siRNA sense strand
gagggcagcuaccauuauu

SEQ ID NO: 1181273 - RNA, 19 nt, Homo sapiens
  misc_RNA (1)...(19): siRNA sense strand
gaugguaguucaagucgaa

SEQ ID NO: 1181274 - RNA, 19 nt, Homo sapiens
  misc_RNA (1)...(19): siRNA sense strand
gcaguaaacuuguccaaaa

SEQ ID NO: 1181275 - RNA, 19 nt, Homo sapiens
  misc_RNA (1)...(19): siRNA sense strand
gaaaaggucuuaggagaaa

SEQ ID NO: 1181276 - RNA, 19 nt, Homo sapiens
  misc_RNA (1)...(19): siRNA sense strand
ggaggagacacccgaaaua

SEQ ID NO: 1181277 - RNA, 19 nt, Homo sapiens
  misc_RNA (1)...(19): siRNA sense strand
ccaguaugcugaugagaaa

SEQ ID NO: 1181278 - RNA, 19 nt, Homo sapiens
  misc_RNA (1)...(19): siRNA sense strand
gcagggaaguccacuaaag

SEQ ID NO: 1181279 - RNA, 19 nt, Homo sapiens
  misc_RNA (1)...(19): siRNA sense strand
ggaagacacucuagagcau

SEQ ID NO: 1181280 - RNA, 19 nt, Homo sapiens
  misc_RNA (1)...(19): siRNA sense strand
cagaagaagcugaauguaa

SEQ ID NO: 1181281 - RNA, 19 nt, Homo sapiens
  misc_RNA (1)...(19): siRNA sense strand
gagaaguaauugcagaaga

SEQ ID NO: 1181282 - RNA, 19 nt, Homo sapiens
  misc_RNA (1)...(19): siRNA sense strand
ggaaauccaugaggagaau

SEQ ID NO: 1181283 - RNA, 19 nt, Homo sapiens
  misc_RNA (1)...(19): siRNA sense strand
gaaagagacggauguagug

SEQ ID NO: 1181284 - RNA, 19 nt, Homo sapiens
  misc_RNA (1)...(19): siRNA sense strand
ggagaaagaaggagaggaa

SEQ ID NO: 1181285 - RNA, 19 nt, Homo sapiens
  misc_RNA (1)...(19): siRNA sense strand
gaagaaacagccaccgaaa

SEQ ID NO: 1181286 - RNA, 19 nt, Homo sapiens
  misc_RNA (1)...(19): siRNA sense strand
ggagacacccgaaauaauc

SEQ ID NO: 1181287 - RNA, 19 nt, Homo sapiens
  misc_RNA (1)...(19): siRNA sense strand
gagaucacgugucuggaaa

SEQ ID NO: 1181288 - RNA, 19 nt, Homo sapiens
  misc_RNA (1)...(19): siRNA sense strand
ggaaagagaaguaauugca

SEQ ID NO: 1181289 - RNA, 19 nt, Homo sapiens
  misc_RNA (1)...(19): siRNA sense strand
ggagaaacugccaacauuu

SEQ ID NO: 1181290 - RNA, 19 nt, Homo sapiens
  misc_RNA (1)...(19): siRNA sense strand
gagcaaagccacgcagaaa

SEQ ID NO: 1181291 - RNA, 19 nt, Homo sapiens
  misc_RNA (1)...(19): siRNA sense strand
gcacagugaaucagauaaa

SEQ ID NO: 1181292 - RNA, 19 nt, Homo sapiens
  misc_RNA (1)...(19): siRNA sense strand
gaaaagaccaugacuguug

SEQ ID NO: 1181293 - RNA, 19 nt, Homo sapiens
  misc_RNA (1)...(19): siRNA sense strand
gaugaaacaccaauuacuu

SEQ ID NO: 1181294 - RNA, 19 nt, Homo sapiens
  misc_RNA (1)...(19): siRNA sense strand
gaagaaagagacggaugua

SEQ ID NO: 1181295 - RNA, 19 nt, Homo sapiens
  misc_RNA (1)...(19): siRNA sense strand
agaaguaauugcagaagaa

SEQ ID NO: 1181296 - RNA, 19 nt, Homo sapiens
  misc_RNA (1)...(19): siRNA sense strand
caaagaaagcgaacccaaa

SEQ ID NO: 1181297 - RNA, 19 nt, Homo sapiens
  misc_RNA (1)...(19): siRNA sense strand
uggcguaccugacauagaa

SEQ ID NO: 1181298 - RNA, 19 nt, Homo sapiens
  misc_RNA (1)...(19): siRNA sense strand
aaauagaaguccaccaaga

SEQ ID NO: 1181299 - RNA, 19 nt, Homo sapiens
  misc_RNA (1)...(19): siRNA sense strand
caacccaugugaaugaaga

SEQ ID NO: 1181300 - RNA, 19 nt, Homo sapiens
  misc_RNA (1)...(19): siRNA sense strand
gaggagacacccgaaauaa

SEQ ID NO: 1181301 - RNA, 19 nt, Homo sapiens
  misc_RNA (1)...(19): siRNA sense strand
agagagagaugguaguuca

SEQ ID NO: 1181302 - RNA, 19 nt, Homo sapiens
  misc_RNA (1)...(19): siRNA sense strand
acaagcacauucugauauu

SEQ ID NO: 1181303 - RNA, 19 nt, Homo sapiens
  misc_RNA (1)...(19): siRNA sense strand
gauguaguguugaaaguag

SEQ ID NO: 1181304 - RNA, 19 nt, Homo sapiens
  misc_RNA (1)...(19): siRNA sense strand
uagcaagucugcagaaucu

SEQ ID NO: 1181305 - RNA, 19 nt, Homo sapiens
  misc_RNA (1)...(19): siRNA sense strand
auagagaagucacuaguug

SEQ ID NO: 1181306 - RNA, 19 nt, Homo sapiens
  misc_RNA (1)...(19): siRNA sense strand
agagauggcuacuaaguca

SEQ ID NO: 1181307 - RNA, 19 nt, Homo sapiens
  misc_RNA (1)...(19): siRNA sense strand
aggagaaacugccaacauu

SEQ ID NO: 1181308 - RNA, 19 nt, Homo sapiens
  misc_RNA (1)...(19): siRNA sense strand
gaaagacgagauuguggaa

SEQ ID NO: 1181309 - RNA, 19 nt, Homo sapiens
  misc_RNA (1)...(19): siRNA sense strand
gaagagaccacagaaaugg

SEQ ID NO: 1181310 - RNA, 19 nt, Homo sapiens
  misc_RNA (1)...(19): siRNA sense strand
gggaggagaccaccagaaa

SEQ ID NO: 1181311 - RNA, 19 nt, Homo sapiens
  misc_RNA (1)...(19): siRNA sense strand
caaaagagacuccgauaaa

SEQ ID NO: 1181312 - RNA, 19 nt, Homo sapiens
  misc_RNA (1)...(19): siRNA sense strand
caggaugaaacaccaauua

SEQ ID NO: 1181313 - RNA, 19 nt, Homo sapiens
  misc_RNA (1)...(19): siRNA sense strand
ggaugaugcucuugaacug

SEQ ID NO: 1181314 - RNA, 19 nt, Homo sapiens
  misc_RNA (1)...(19): siRNA sense strand
gcagagagcagaggcagaa

SEQ ID NO: 1181315 - RNA, 19 nt, Homo sapiens
  misc_RNA (1)...(19): siRNA sense strand
ugacagaaccucuugaaca

SEQ ID NO: 1181316 - RNA, 19 nt, Homo sapiens
  misc_RNA (1)...(19): siRNA sense strand
gauaucugcuucagugaca

SEQ ID NO: 1181317 - RNA, 19 nt, Homo sapiens
  misc_RNA (1)...(19): siRNA sense strand
aaacggagguggaagaaac

SEQ ID NO: 1181318 - RNA, 19 nt, Homo sapiens
  misc_RNA (1)...(19): siRNA sense strand
agucagaacuuacagaauc

SEQ ID NO: 1181319 - RNA, 19 nt, Homo sapiens
  misc_RNA (1)...(19): siRNA sense strand
cgucgggucugaagaaaga

SEQ ID NO: 1181320 - RNA, 19 nt, Homo sapiens
  misc_RNA (1)...(19): siRNA sense strand
gaaauggugucagcagucu

SEQ ID NO: 1181321 - RNA, 19 nt, Homo sapiens
  misc_RNA (1)...(19): siRNA sense strand
cagcuaccauuauugaaga

SEQ ID NO: 1181322 - RNA, 19 nt, Homo sapiens
  misc_RNA (1)...(19): siRNA sense strand
aagaugagcuggacaaggu

SEQ ID NO: 1181323 - RNA, 19 nt, Homo sapiens
  misc_RNA (1)...(19): siRNA sense strand
ggagaucacgugucuggaa

SEQ ID NO: 1181324 - RNA, 19 nt, Homo sapiens
  misc_RNA (1)...(19): siRNA sense strand
ccucugaaaugcaagaaga

SEQ ID NO: 1181325 - RNA, 19 nt, Homo sapiens
  misc_RNA (1)...(19): siRNA sense strand
ggaaguagaauugcaggaa

SEQ ID NO: 1181326 - RNA, 19 nt, Homo sapiens
  misc_RNA (1)...(19): siRNA sense strand
gcaaaggaagucagcaguu

SEQ ID NO: 1181327 - RNA, 19 nt, Homo sapiens
  misc_RNA (1)...(19): siRNA sense strand
gaaaagcgaagacuccaua

SEQ ID NO: 1181328 - RNA, 19 nt, Homo sapiens
  misc_RNA (1)...(19): siRNA sense strand
ggaaggagaagagaaacaa

SEQ ID NO: 1181329 - RNA, 19 nt, Homo sapiens
  misc_RNA (1)...(19): siRNA sense strand
gaaacaagagagagaaucu

SEQ ID NO: 1181330 - RNA, 19 nt, Homo sapiens
  misc_RNA (1)...(19): siRNA sense strand
ucaggaggcuuaaccaaag

SEQ ID NO: 1181331 - RNA, 19 nt, Homo sapiens
  misc_RNA (1)...(19): siRNA sense strand
caagcacauucugauauuu

SEQ ID NO: 1181332 - RNA, 19 nt, Homo sapiens
  misc_RNA (1)...(19): siRNA sense strand
gacaagcacauucugauau

SEQ ID NO: 1181333 - RNA, 19 nt, Homo sapiens
  misc_RNA (1)...(19): siRNA sense strand
gacagccguugaccaguuu

SEQ ID NO: 1181334 - RNA, 19 nt, Homo sapiens
  misc_RNA (1)...(19): siRNA sense strand
guguagcaauugaggauuu

SEQ ID NO: 1181335 - RNA, 19 nt, Homo sapiens
  misc_RNA (1)...(19): siRNA sense strand
ggacagaagaagcugaaug

SEQ ID NO: 1181336 - RNA, 19 nt, Homo sapiens
  misc_RNA (1)...(19): siRNA sense strand
gaagacacucuagagcaua

SEQ ID NO: 1181337 - RNA, 19 nt, Homo sapiens
  misc_RNA (1)...(19): siRNA sense strand
ucgaacagauuccuucuuc

SEQ ID NO: 1181338 - RNA, 19 nt, Homo sapiens
  misc_RNA (1)...(19): siRNA sense strand
gagagucagguucauauga

SEQ ID NO: 1181339 - RNA, 19 nt, Homo sapiens
  misc_RNA (1)...(19): siRNA sense strand
ugaguaugaugcuguagaa

SEQ ID NO: 1181340 - RNA, 19 nt, Homo sapiens
  misc_RNA (1)...(19): siRNA sense strand
cagagaagccugacacugu

SEQ ID NO: 1181341 - RNA, 19 nt, Homo sapiens
  misc_RNA (1)...(19): siRNA sense strand
gaagaauccugggucucaa

SEQ ID NO: 1181342 - RNA, 19 nt, Homo sapiens
  misc_RNA (1)...(19): siRNA sense strand
gaaaugcaagaagaaauga

SEQ ID NO: 1181343 - RNA, 19 nt, Homo sapiens
  misc_RNA (1)...(19): siRNA sense strand
guuaucagcugaauaugag

SEQ ID NO: 1181344 - RNA, 19 nt, Homo sapiens
  misc_RNA (1)...(19): siRNA sense strand
agaaagcaauuuagaagag

SEQ ID NO: 1181345 - RNA, 19 nt, Homo sapiens
  misc_RNA (1)...(19): siRNA sense strand
ggaagaaacuaaagaacaa

SEQ ID NO: 1181346 - RNA, 19 nt, Homo sapiens
  misc_RNA (1)...(19): siRNA sense strand
gacacaagcucacgugaua

SEQ ID NO: 1181347 - RNA, 19 nt, Homo sapiens
  misc_RNA (1)...(19): siRNA sense strand
cgacagaaguguuugauga

SEQ ID NO: 1181348 - RNA, 19 nt, Homo sapiens
  misc_RNA (1)...(19): siRNA sense strand
gagagaaucugcaaaguca

SEQ ID NO: 1181349 - RNA, 19 nt, Homo sapiens
  misc_RNA (1)...(19): siRNA sense strand
auaaagagauggcuacuaa

SEQ ID NO: 1181350 - RNA, 19 nt, Homo sapiens
  misc_RNA (1)...(19): siRNA sense strand
agaagaagcugaauguaaa

SEQ ID NO: 1181351 - RNA, 19 nt, Homo sapiens
  misc_RNA (1)...(19): siRNA sense strand
caaacaaucuacagagaaa

SEQ ID NO: 1181352 - RNA, 19 nt, Homo sapiens
  misc_RNA (1)...(19): siRNA sense strand
gaccaugacuguugaggua

SEQ ID NO: 1181353 - RNA, 19 nt, Homo sapiens
  misc_RNA (1)...(19): siRNA sense strand
gaaggaggaugaaguggaa

SEQ ID NO: 1181354 - RNA, 19 nt, Homo sapiens
  misc_RNA (1)...(19): siRNA sense strand
guagaagguuccacuguaa

SEQ ID NO: 1181355 - RNA, 19 nt, Homo sapiens
  misc_RNA (1)...(19): siRNA sense strand
caaaggaagucagcaguuu

SEQ ID NO: 1181356 - RNA, 19 nt, Homo sapiens
  misc_RNA (1)...(19): siRNA sense strand
gguagaagguuccacugua

SEQ ID NO: 1181357 - RNA, 19 nt, Homo sapiens
  misc_RNA (1)...(19): siRNA sense strand
caaagugaguguagcaauu

SEQ ID NO: 1181358 - RNA, 19 nt, Homo sapiens
  misc_RNA (1)...(19): siRNA sense strand
gacagaaccucuugaacaa

SEQ ID NO: 1181359 - RNA, 19 nt, Homo sapiens
  misc_RNA (1)...(19): siRNA sense strand
gaaggaggaugcccaggaa

SEQ ID NO: 1181360 - RNA, 19 nt, Homo sapiens
  misc_RNA (1)...(19): siRNA sense strand
gaaacaggaucaaccuuca

SEQ ID NO: 1181361 - RNA, 19 nt, Homo sapiens
  misc_RNA (1)...(19): siRNA sense strand
gaagucagaugaagucgau

SEQ ID NO: 1181362 - RNA, 19 nt, Homo sapiens
  misc_RNA (1)...(19): siRNA sense strand
gagcacagccucugaaaug

SEQ ID NO: 1181363 - RNA, 19 nt, Homo sapiens
  misc_RNA (1)...(19): siRNA sense strand
gcaaagccacgcagaaauu

SEQ ID NO: 1181364 - RNA, 19 nt, Homo sapiens
  misc_RNA (1)...(19): siRNA sense strand
ucaagaggcugaccaguau

SEQ ID NO: 1181365 - RNA, 19 nt, Homo sapiens
  misc_RNA (1)...(19): siRNA sense strand
gaaacuguauccauucugu

SEQ ID NO: 1181366 - RNA, 19 nt, Homo sapiens
  misc_RNA (1)...(19): siRNA sense strand
gaagcagcauccaaagaaa

SEQ ID NO: 1181367 - RNA, 19 nt, Homo sapiens
  misc_RNA (1)...(19): siRNA sense strand
ggaaagugauaaagaagau

SEQ ID NO: 1181368 - RNA, 19 nt, Homo sapiens
  misc_RNA (1)...(19): siRNA sense strand
ccacugagguguccaagga

SEQ ID NO: 1181369 - RNA, 19 nt, Homo sapiens
  misc_RNA (1)...(19): siRNA sense strand
ggacaagcacauucugaua

SEQ ID NO: 1181370 - RNA, 19 nt, Homo sapiens
  misc_RNA (1)...(19): siRNA sense strand
caacgaagaugacucugau

SEQ ID NO: 1181371 - RNA, 19 nt, Homo sapiens
  misc_RNA (1)...(19): siRNA sense strand
ucacugaaguugcccuuaa

SEQ ID NO: 1181372 - RNA, 19 nt, Homo sapiens
  misc_RNA (1)...(19): siRNA sense strand
gagggcagcuaccauuauu

SEQ ID NO: 1181373 - RNA, 19 nt, Homo sapiens
  misc_RNA (1)...(19): siRNA sense strand
gaugguaguucaagucgaa

SEQ ID NO: 1181374 - RNA, 19 nt, Homo sapiens
  misc_RNA (1)...(19): siRNA sense strand
gcaguaaacuuguccaaaa

SEQ ID NO: 1181375 - RNA, 19 nt, Homo sapiens
  misc_RNA (1)...(19): siRNA sense strand
gaaaaggucuuaggagaaa

SEQ ID NO: 1181376 - RNA, 19 nt, Homo sapiens
  misc_RNA (1)...(19): siRNA sense strand
ggaggagacacccgaaaua

SEQ ID NO: 1181377 - RNA, 19 nt, Homo sapiens
  misc_RNA (1)...(19): siRNA sense strand
ccaguaugcugaugagaaa

SEQ ID NO: 1181378 - RNA, 19 nt, Homo sapiens
  misc_RNA (1)...(19): siRNA sense strand
gcagggaaguccacuaaag

SEQ ID NO: 1181379 - RNA, 19 nt, Homo sapiens
  misc_RNA (1)...(19): siRNA sense strand
ggaagacacucuagagcau

SEQ ID NO: 1181380 - RNA, 19 nt, Homo sapiens
  misc_RNA (1)...(19): siRNA sense strand
cagaagaagcugaauguaa

SEQ ID NO: 1181381 - RNA, 19 nt, Homo sapiens
  misc_RNA (1)...(19): siRNA sense strand
gagaaguaauugcagaaga

SEQ ID NO: 1181382 - RNA, 19 nt, Homo sapiens
  misc_RNA (1)...(19): siRNA sense strand
ggaaauccaugaggagaau

SEQ ID NO: 1181383 - RNA, 19 nt, Homo sapiens
  misc_RNA (1)...(19): siRNA sense strand
gaaagagacggauguagug

SEQ ID NO: 1181384 - RNA, 19 nt, Homo sapiens
  misc_RNA (1)...(19): siRNA sense strand
ggagaaagaaggagaggaa

SEQ ID NO: 1181385 - RNA, 19 nt, Homo sapiens
  misc_RNA (1)...(19): siRNA sense strand
gaagaaacagccaccgaaa

SEQ ID NO: 1181386 - RNA, 19 nt, Homo sapiens
  misc_RNA (1)...(19): siRNA sense strand
ggagacacccgaaauaauc

SEQ ID NO: 1181387 - RNA, 19 nt, Homo sapiens
  misc_RNA (1)...(19): siRNA sense strand
gagaucacgugucuggaaa

SEQ ID NO: 1181388 - RNA, 19 nt, Homo sapiens
  misc_RNA (1)...(19): siRNA sense strand
ggaaagagaaguaauugca

SEQ ID NO: 1181389 - RNA, 19 nt, Homo sapiens
  misc_RNA (1)...(19): siRNA sense strand
ggagaaacugccaacauuu

SEQ ID NO: 1181390 - RNA, 19 nt, Homo sapiens
  misc_RNA (1)...(19): siRNA sense strand
gagcaaagccacgcagaaa

SEQ ID NO: 1181391 - RNA, 19 nt, Homo sapiens
  misc_RNA (1)...(19): siRNA sense strand
gcacagugaaucagauaaa

SEQ ID NO: 1181392 - RNA, 19 nt, Homo sapiens
  misc_RNA (1)...(19): siRNA sense strand
gaaaagaccaugacuguug

SEQ ID NO: 1181393 - RNA, 19 nt, Homo sapiens
  misc_RNA (1)...(19): siRNA sense strand
gaugaaacaccaauuacuu

SEQ ID NO: 1181394 - RNA, 19 nt, Homo sapiens
  misc_RNA (1)...(19): siRNA sense strand
gaagaaagagacggaugua

SEQ ID NO: 1181395 - RNA, 19 nt, Homo sapiens
  misc_RNA (1)...(19): siRNA sense strand
agaaguaauugcagaagaa

SEQ ID NO: 1181396 - RNA, 19 nt, Homo sapiens
  misc_RNA (1)...(19): siRNA sense strand
caaagaaagcgaacccaaa

SEQ ID NO: 1181397 - RNA, 19 nt, Homo sapiens
  misc_RNA (1)...(19): siRNA sense strand
uggcguaccugacauagaa

SEQ ID NO: 1181398 - RNA, 19 nt, Homo sapiens
  misc_RNA (1)...(19): siRNA sense strand
aaauagaaguccaccaaga

SEQ ID NO: 1181399 - RNA, 19 nt, Homo sapiens
  misc_RNA (1)...(19): siRNA sense strand
caacccaugugaaugaaga

SEQ ID NO: 1181400 - RNA, 19 nt, Homo sapiens
  misc_RNA (1)...(19): siRNA sense strand
gaggagacacccgaaauaa

SEQ ID NO: 1181401 - RNA, 19 nt, Homo sapiens
  misc_RNA (1)...(19): siRNA sense strand
agagagagaugguaguuca

SEQ ID NO: 1181402 - RNA, 19 nt, Homo sapiens
  misc_RNA (1)...(19): siRNA sense strand
acaagcacauucugauauu

SEQ ID NO: 1181403 - RNA, 19 nt, Homo sapiens
  misc_RNA (1)...(19): siRNA sense strand
gauguaguguugaaaguag

SEQ ID NO: 1181404 - RNA, 19 nt, Homo sapiens
  misc_RNA (1)...(19): siRNA sense strand
uagcaagucugcagaaucu

SEQ ID NO: 1181405 - RNA, 19 nt, Homo sapiens
  misc_RNA (1)...(19): siRNA sense strand
auagagaagucacuaguug

SEQ ID NO: 1181406 - RNA, 19 nt, Homo sapiens
  misc_RNA (1)...(19): siRNA sense strand
agagauggcuacuaaguca

SEQ ID NO: 1181407 - RNA, 19 nt, Homo sapiens
  misc_RNA (1)...(19): siRNA sense strand
aggagaaacugccaacauu

SEQ ID NO: 1181408 - RNA, 19 nt, Homo sapiens
  misc_RNA (1)...(19): siRNA sense strand
gaaagacgagauuguggaa

SEQ ID NO: 1181409 - RNA, 19 nt, Homo sapiens
  misc_RNA (1)...(19): siRNA sense strand
gaagagaccacagaaaugg

SEQ ID NO: 1181410 - RNA, 19 nt, Homo sapiens
  misc_RNA (1)...(19): siRNA sense strand
gggaggagaccaccagaaa

SEQ ID NO: 1181411 - RNA, 19 nt, Homo sapiens
  misc_RNA (1)...(19): siRNA sense strand
caaaagagacuccgauaaa

SEQ ID NO: 1181412 - RNA, 19 nt, Homo sapiens
  misc_RNA (1)...(19): siRNA sense strand
caggaugaaacaccaauua

SEQ ID NO: 1181413 - RNA, 19 nt, Homo sapiens
  misc_RNA (1)...(19): siRNA sense strand
ggaugaugcucuugaacug

SEQ ID NO: 1181414 - RNA, 19 nt, Homo sapiens
  misc_RNA (1)...(19): siRNA sense strand
gcagagagcagaggcagaa

SEQ ID NO: 1181415 - RNA, 19 nt, Homo sapiens
  misc_RNA (1)...(19): siRNA sense strand
ugacagaaccucuugaaca

SEQ ID NO: 1181416 - RNA, 19 nt, Homo sapiens
  misc_RNA (1)...(19): siRNA sense strand
gauaucugcuucagugaca

SEQ ID NO: 1181417 - RNA, 19 nt, Homo sapiens
  misc_RNA (1)...(19): siRNA sense strand
aaacggagguggaagaaac

SEQ ID NO: 1181418 - RNA, 19 nt, Homo sapiens
  misc_RNA (1)...(19): siRNA sense strand
agucagaacuuacagaauc

SEQ ID NO: 1181419 - RNA, 19 nt, Homo sapiens
  misc_RNA (1)...(19): siRNA sense strand
cgucgggucugaagaaaga

SEQ ID NO: 1181420 - RNA, 19 nt, Homo sapiens
  misc_RNA (1)...(19): siRNA sense strand
gaaauggugucagcagucu

SEQ ID NO: 1181421 - RNA, 19 nt, Homo sapiens
  misc_RNA (1)...(19): siRNA sense strand
cagcuaccauuauugaaga

SEQ ID NO: 1181422 - RNA, 19 nt, Homo sapiens
  misc_RNA (1)...(19): siRNA sense strand
aagaugagcuggacaaggu

SEQ ID NO: 1181423 - RNA, 19 nt, Homo sapiens
  misc_RNA (1)...(19): siRNA sense strand
ggagaucacgugucuggaa

SEQ ID NO: 1181424 - RNA, 19 nt, Homo sapiens
  misc_RNA (1)...(19): siRNA sense strand
ccucugaaaugcaagaaga

SEQ ID NO: 1181425 - RNA, 19 nt, Homo sapiens
  misc_RNA (1)...(19): siRNA sense strand
ggaaguagaauugcaggaa

SEQ ID NO: 1181426 - RNA, 19 nt, Homo sapiens
  misc_RNA (1)...(19): siRNA sense strand
gcaaaggaagucagcaguu

SEQ ID NO: 1181427 - RNA, 19 nt, Homo sapiens
  misc_RNA (1)...(19): siRNA sense strand
gaaaagcgaagacuccaua

SEQ ID NO: 1181428 - RNA, 19 nt, Homo sapiens
  misc_RNA (1)...(19): siRNA sense strand
ggaaggagaagagaaacaa

SEQ ID NO: 1181429 - RNA, 19 nt, Homo sapiens
  misc_RNA (1)...(19): siRNA sense strand
gaaacaagagagagaaucu

SEQ ID NO: 1181430 - RNA, 19 nt, Homo sapiens
  misc_RNA (1)...(19): siRNA sense strand
ucaggaggcuuaaccaaag

SEQ ID NO: 1181431 - RNA, 19 nt, Homo sapiens
  misc_RNA (1)...(19): siRNA sense strand
caagcacauucugauauuu

SEQ ID NO: 1181432 - RNA, 19 nt, Homo sapiens
  misc_RNA (1)...(19): siRNA sense strand
gacaagcacauucugauau

SEQ ID NO: 1181433 - RNA, 19 nt, Homo sapiens
  misc_RNA (1)...(19): siRNA sense strand
gacagccguugaccaguuu

SEQ ID NO: 1181434 - RNA, 19 nt, Homo sapiens
  misc_RNA (1)...(19): siRNA sense strand
guguagcaauugaggauuu

SEQ ID NO: 1181435 - RNA, 19 nt, Homo sapiens
  misc_RNA (1)...(19): siRNA sense strand
ggacagaagaagcugaaug

SEQ ID NO: 1181436 - RNA, 19 nt, Homo sapiens
  misc_RNA (1)...(19): siRNA sense strand
gaagacacucuagagcaua

SEQ ID NO: 1181437 - RNA, 19 nt, Homo sapiens
  misc_RNA (1)...(19): siRNA sense strand
ucgaacagauuccuucuuc

SEQ ID NO: 1181438 - RNA, 19 nt, Homo sapiens
  misc_RNA (1)...(19): siRNA sense strand
gagagucagguucauauga

SEQ ID NO: 1181439 - RNA, 19 nt, Homo sapiens
  misc_RNA (1)...(19): siRNA sense strand
ugaguaugaugcuguagaa

SEQ ID NO: 1181440 - RNA, 19 nt, Homo sapiens
  misc_RNA (1)...(19): siRNA sense strand
cagagaagccugacacugu

SEQ ID NO: 1181441 - RNA, 19 nt, Homo sapiens
  misc_RNA (1)...(19): siRNA sense strand
gaagaauccugggucucaa

SEQ ID NO: 1181442 - RNA, 19 nt, Homo sapiens
  misc_RNA (1)...(19): siRNA sense strand
gaaaugcaagaagaaauga

SEQ ID NO: 1181443 - RNA, 19 nt, Homo sapiens
  misc_RNA (1)...(19): siRNA sense strand
guuaucagcugaauaugag

SEQ ID NO: 1181444 - RNA, 19 nt, Homo sapiens
  misc_RNA (1)...(19): siRNA sense strand
agaaagcaauuuagaagag

SEQ ID NO: 1181445 - RNA, 19 nt, Homo sapiens
  misc_RNA (1)...(19): siRNA sense strand
gcaaauggacggaauguuu

SEQ ID NO: 1181446 - RNA, 19 nt, Homo sapiens
  misc_RNA (1)...(19): siRNA sense strand
gggagaaacguaugaauua

SEQ ID NO: 1181447 - RNA, 19 nt, Homo sapiens
  misc_RNA (1)...(19): siRNA sense strand
ggagaaacguaugaauuaa

SEQ ID NO: 1181448 - RNA, 19 nt, Homo sapiens
  misc_RNA (1)...(19): siRNA sense strand
gaacggagaggaagaauuc

SEQ ID NO: 1181449 - RNA, 19 nt, Homo sapiens
  misc_RNA (1)...(19): siRNA sense strand
gcauagauccuguuucgua

SEQ ID NO: 1181450 - RNA, 19 nt, Homo sapiens
  misc_RNA (1)...(19): siRNA sense strand
ccacagaacuggacauaag

SEQ ID NO: 1181451 - RNA, 19 nt, Homo sapiens
  misc_RNA (1)...(19): siRNA sense strand
gaaaagaacuucacaaggu

SEQ ID NO: 1181452 - RNA, 19 nt, Homo sapiens
  misc_RNA (1)...(19): siRNA sense strand
gaaagucacgggaaugauu

SEQ ID NO: 1181453 - RNA, 19 nt, Homo sapiens
  misc_RNA (1)...(19): siRNA sense strand
uaaaccguguggauuauuu

SEQ ID NO: 1181454 - RNA, 19 nt, Homo sapiens
  misc_RNA (1)...(19): siRNA sense strand
caagagaacggaauucaga

SEQ ID NO: 1181455 - RNA, 19 nt, Homo sapiens
  misc_RNA (1)...(19): siRNA sense strand
gaacuggacauaagugugu

SEQ ID NO: 1181456 - RNA, 19 nt, Homo sapiens
  misc_RNA (1)...(19): siRNA sense strand
cggaaggucucaaccauga

SEQ ID NO: 1181457 - RNA, 19 nt, Homo sapiens
  misc_RNA (1)...(19): siRNA sense strand
cagggaagauuuaggauuc

SEQ ID NO: 1181458 - RNA, 19 nt, Homo sapiens
  misc_RNA (1)...(19): siRNA sense strand
gggcauagauccuguuucg

SEQ ID NO: 1181459 - RNA, 19 nt, Homo sapiens
  misc_RNA (1)...(19): siRNA sense strand
ggaccauccugaagaagug

SEQ ID NO: 1181460 - RNA, 19 nt, Homo sapiens
  misc_RNA (1)...(19): siRNA sense strand
gaaaggccaagcuggauga

SEQ ID NO: 1181461 - RNA, 19 nt, Homo sapiens
  misc_RNA (1)...(19): siRNA sense strand
gcccagauguauaauuuca

SEQ ID NO: 1181462 - RNA, 19 nt, Homo sapiens
  misc_RNA (1)...(19): siRNA sense strand
cugcccagauguauaauuu

SEQ ID NO: 1181463 - RNA, 19 nt, Homo sapiens
  misc_RNA (1)...(19): siRNA sense strand
gaaggacacauucaagaca

SEQ ID NO: 1181464 - RNA, 19 nt, Homo sapiens
  misc_RNA (1)...(19): siRNA sense strand
uagauccuguuucguauga

SEQ ID NO: 1181465 - RNA, 19 nt, Homo sapiens
  misc_RNA (1)...(19): siRNA sense strand
cauagauccuguuucguau

SEQ ID NO: 1181466 - RNA, 19 nt, Homo sapiens
  misc_RNA (1)...(19): siRNA sense strand
gaacggaauucagaaacac

SEQ ID NO: 1181467 - RNA, 19 nt, Homo sapiens
  misc_RNA (1)...(19): siRNA sense strand
ucacgggaaugauugacuu

SEQ ID NO: 1181468 - RNA, 19 nt, Homo sapiens
  misc_RNA (1)...(19): siRNA sense strand
gauccuguuucguaugaau

SEQ ID NO: 1181469 - RNA, 19 nt, Homo sapiens
  misc_RNA (1)...(19): siRNA sense strand
caagguggaaggacacauu

SEQ ID NO: 1181470 - RNA, 19 nt, Homo sapiens
  misc_RNA (1)...(19): siRNA sense strand
aggccaagcuggaugaaga

SEQ ID NO: 1181471 - RNA, 19 nt, Homo sapiens
  misc_RNA (1)...(19): siRNA sense strand
ugacuuagacaccagcaaa

SEQ ID NO: 1181472 - RNA, 19 nt, Homo sapiens
  misc_RNA (1)...(19): siRNA sense strand
uaugaucuauggcaaaugg

SEQ ID NO: 1181473 - RNA, 19 nt, Homo sapiens
  misc_RNA (1)...(19): siRNA sense strand
gcucccauguucagcagaa

SEQ ID NO: 1181474 - RNA, 19 nt, Homo sapiens
  misc_RNA (1)...(19): siRNA sense strand
cuuuaaaccguguggauua

SEQ ID NO: 1181475 - RNA, 19 nt, Homo sapiens
  misc_RNA (1)...(19): siRNA sense strand
gaggaccggcaaaccauuu

SEQ ID NO: 1181476 - RNA, 19 nt, Homo sapiens
  misc_RNA (1)...(19): siRNA sense strand
ucaacgagccucugagcuu

SEQ ID NO: 1181477 - RNA, 19 nt, Homo sapiens
  misc_RNA (1)...(19): siRNA sense strand
aagcugcucuggaggauca

SEQ ID NO: 1181478 - RNA, 19 nt, Homo sapiens
  misc_RNA (1)...(19): siRNA sense strand
gaagcucuuuaugaucuau

SEQ ID NO: 1181479 - RNA, 19 nt, Homo sapiens
  misc_RNA (1)...(19): siRNA sense strand
ggagaggaccggcaaacca

SEQ ID NO: 1181480 - RNA, 19 nt, Homo sapiens
  misc_RNA (1)...(19): siRNA sense strand
gcaagcugcucuggaggau

SEQ ID NO: 1181481 - RNA, 19 nt, Homo sapiens
  misc_RNA (1)...(19): siRNA sense strand
gaagauuuaggauucagau

SEQ ID NO: 1181482 - RNA, 19 nt, Homo sapiens
  misc_RNA (1)...(19): siRNA sense strand
gggaaugauugacuuagac

SEQ ID NO: 1181483 - RNA, 19 nt, Homo sapiens
  misc_RNA (1)...(19): siRNA sense strand
cgggaaugauugacuuaga

SEQ ID NO: 1181484 - RNA, 19 nt, Homo sapiens
  misc_RNA (1)...(19): siRNA sense strand
cagaaagucacgggaauga

SEQ ID NO: 1181485 - RNA, 19 nt, Homo sapiens
  misc_RNA (1)...(19): siRNA sense strand
agaacggaauucagaaaca

SEQ ID NO: 1181486 - RNA, 19 nt, Homo sapiens
  misc_RNA (1)...(19): siRNA sense strand
ggaccggcaaaccauuuaa

SEQ ID NO: 1181487 - RNA, 19 nt, Homo sapiens
  misc_RNA (1)...(19): siRNA sense strand
ucgggaagcuguggauaga

SEQ ID NO: 1181488 - RNA, 19 nt, Homo sapiens
  misc_RNA (1)...(19): siRNA sense strand
ggaaggacacauucaagac

SEQ ID NO: 1181489 - RNA, 19 nt, Homo sapiens
  misc_RNA (1)...(19): siRNA sense strand
uggagaggaugcagucugu

SEQ ID NO: 1181490 - RNA, 19 nt, Homo sapiens
  misc_RNA (1)...(19): siRNA sense strand
ugggagaaacguaugaauu

SEQ ID NO: 1181491 - RNA, 19 nt, Homo sapiens
  misc_RNA (1)...(19): siRNA sense strand
ccguguggauuauuuggaa

SEQ ID NO: 1181492 - RNA, 19 nt, Homo sapiens
  misc_RNA (1)...(19): siRNA sense strand
gagaaaggccaagcuggau

SEQ ID NO: 1181493 - RNA, 19 nt, Homo sapiens
  misc_RNA (1)...(19): siRNA sense strand
ggaaugauugacuuagaca

SEQ ID NO: 1181494 - RNA, 19 nt, Homo sapiens
  misc_RNA (1)...(19): siRNA sense strand
aaggacacauucaagacaa

SEQ ID NO: 1181495 - RNA, 19 nt, Homo sapiens
  misc_RNA (1)...(19): siRNA sense strand
gagaggaccggcaaaccau

SEQ ID NO: 1181496 - RNA, 19 nt, Homo sapiens
  misc_RNA (1)...(19): siRNA sense strand
caaccaugacuuccuguuc

SEQ ID NO: 1181497 - RNA, 19 nt, Homo sapiens
  misc_RNA (1)...(19): siRNA sense strand
uaucggaacaggucaguca

SEQ ID NO: 1181498 - RNA, 19 nt, Homo sapiens
  misc_RNA (1)...(19): siRNA sense strand
agacaggcauggagaagac

SEQ ID NO: 1181499 - RNA, 19 nt, Homo sapiens
  misc_RNA (1)...(19): siRNA sense strand
aauccacucuugggagaaa

SEQ ID NO: 1181500 - RNA, 19 nt, Homo sapiens
  misc_RNA (1)...(19): siRNA sense strand
uguggaccauccugaagaa

SEQ ID NO: 1181501 - RNA, 19 nt, Homo sapiens
  misc_RNA (1)...(19): siRNA sense strand
ggacaguggagauuuuaaa

SEQ ID NO: 1181502 - RNA, 19 nt, Homo sapiens
  misc_RNA (1)...(19): siRNA sense strand
ucagggaagauuuaggauu

SEQ ID NO: 1181503 - RNA, 19 nt, Homo sapiens
  misc_RNA (1)...(19): siRNA sense strand
gaggagaagcagagagaag

SEQ ID NO: 1181504 - RNA, 19 nt, Homo sapiens
  misc_RNA (1)...(19): siRNA sense strand
ggagaauggcaacauggau

SEQ ID NO: 1181505 - RNA, 19 nt, Homo sapiens
  misc_RNA (1)...(19): siRNA sense strand
gguggaaggacacauucaa

SEQ ID NO: 1181506 - RNA, 19 nt, Homo sapiens
  misc_RNA (1)...(19): siRNA sense strand
gacauaagugugugcuuca

SEQ ID NO: 1181507 - RNA, 19 nt, Homo sapiens
  misc_RNA (1)...(19): siRNA sense strand
ggaagauuuaggauucaga

SEQ ID NO: 1181508 - RNA, 19 nt, Homo sapiens
  misc_RNA (1)...(19): siRNA sense strand
ucagauuuauaucggaaca

SEQ ID NO: 1181509 - RNA, 19 nt, Homo sapiens
  misc_RNA (1)...(19): siRNA sense strand
agagaacggaauucagaaa

SEQ ID NO: 1181510 - RNA, 19 nt, Homo sapiens
  misc_RNA (1)...(19): siRNA sense strand
aggagcggcuggaggagaa

SEQ ID NO: 1181511 - RNA, 19 nt, Homo sapiens
  misc_RNA (1)...(19): siRNA sense strand
gagacaggcauggagaaga

SEQ ID NO: 1181512 - RNA, 19 nt, Homo sapiens
  misc_RNA (1)...(19): siRNA sense strand
gugugugcuucacuuuaaa

SEQ ID NO: 1181513 - RNA, 19 nt, Homo sapiens
  misc_RNA (1)...(19): siRNA sense strand
uggaaggacacauucaaga

SEQ ID NO: 1181514 - RNA, 19 nt, Homo sapiens
  misc_RNA (1)...(19): siRNA sense strand
cgacugcccagauaucuac

SEQ ID NO: 1181515 - RNA, 19 nt, Homo sapiens
  misc_RNA (1)...(19): siRNA sense strand
gagaacggaauucagaaac

SEQ ID NO: 1181516 - RNA, 19 nt, Homo sapiens
  misc_RNA (1)...(19): siRNA sense strand
aaagucacgggaaugauug

SEQ ID NO: 1181517 - RNA, 19 nt, Homo sapiens
  misc_RNA (1)...(19): siRNA sense strand
ugcagcggaucacggagua

SEQ ID NO: 1181518 - RNA, 19 nt, Homo sapiens
  misc_RNA (1)...(19): siRNA sense strand
uuuaaaccguguggauuau

SEQ ID NO: 1181519 - RNA, 19 nt, Homo sapiens
  misc_RNA (1)...(19): siRNA sense strand
gaaggucucaaccaugacu

SEQ ID NO: 1181520 - RNA, 19 nt, Homo sapiens
  misc_RNA (1)...(19): siRNA sense strand
agaagcucuuuaugaucua

SEQ ID NO: 1181521 - RNA, 19 nt, Homo sapiens
  misc_RNA (1)...(19): siRNA sense strand
cugcccagauaucuacuga

SEQ ID NO: 1181522 - RNA, 19 nt, Homo sapiens
  misc_RNA (1)...(19): siRNA sense strand
uauggcaaauggacggaau

SEQ ID NO: 1181523 - RNA, 19 nt, Homo sapiens
  misc_RNA (1)...(19): siRNA sense strand
ggagaagcagagagaagca

SEQ ID NO: 1181524 - RNA, 19 nt, Homo sapiens
  misc_RNA (1)...(19): siRNA sense strand
ggauuacuuugagcggaau

SEQ ID NO: 1181525 - RNA, 19 nt, Homo sapiens
  misc_RNA (1)...(19): siRNA sense strand
gguucuacccaggcaauaa

SEQ ID NO: 1181526 - RNA, 19 nt, Homo sapiens
  misc_RNA (1)...(19): siRNA sense strand
gaccggcaaaccauuuaau

SEQ ID NO: 1181527 - RNA, 19 nt, Homo sapiens
  misc_RNA (1)...(19): siRNA sense strand
ggagacaggcauggagaag

SEQ ID NO: 1181528 - RNA, 19 nt, Homo sapiens
  misc_RNA (1)...(19): siRNA sense strand
cggcaaaccauuuaaucca

SEQ ID NO: 1181529 - RNA, 19 nt, Homo sapiens
  misc_RNA (1)...(19): siRNA sense strand
ggaggagaagcagagagaa

SEQ ID NO: 1181530 - RNA, 19 nt, Homo sapiens
  misc_RNA (1)...(19): siRNA sense strand
uggaggagaagcagagaga

SEQ ID NO: 1181531 - RNA, 19 nt, Homo sapiens
  misc_RNA (1)...(19): siRNA sense strand
gcaaauggacggaauguuu

SEQ ID NO: 1181532 - RNA, 19 nt, Homo sapiens
  misc_RNA (1)...(19): siRNA sense strand
gggagaaacguaugaauua

SEQ ID NO: 1181533 - RNA, 19 nt, Homo sapiens
  misc_RNA (1)...(19): siRNA sense strand
ggagaaacguaugaauuaa

SEQ ID NO: 1181534 - RNA, 19 nt, Homo sapiens
  misc_RNA (1)...(19): siRNA sense strand
gaacggagaggaagaauuc

SEQ ID NO: 1181535 - RNA, 19 nt, Homo sapiens
  misc_RNA (1)...(19): siRNA sense strand
gcauagauccuguuucgua

SEQ ID NO: 1181536 - RNA, 19 nt, Homo sapiens
  misc_RNA (1)...(19): siRNA sense strand
ccacagaacuggacauaag

SEQ ID NO: 1181537 - RNA, 19 nt, Homo sapiens
  misc_RNA (1)...(19): siRNA sense strand
gaaaagaacuucacaaggu

SEQ ID NO: 1181538 - RNA, 19 nt, Homo sapiens
  misc_RNA (1)...(19): siRNA sense strand
gaaagucacgggaaugauu

SEQ ID NO: 1181539 - RNA, 19 nt, Homo sapiens
  misc_RNA (1)...(19): siRNA sense strand
uaaaccguguggauuauuu

SEQ ID NO: 1181540 - RNA, 19 nt, Homo sapiens
  misc_RNA (1)...(19): siRNA sense strand
caagagaacggaauucaga

SEQ ID NO: 1181541 - RNA, 19 nt, Homo sapiens
  misc_RNA (1)...(19): siRNA sense strand
gaacuggacauaagugugu

SEQ ID NO: 1181542 - RNA, 19 nt, Homo sapiens
  misc_RNA (1)...(19): siRNA sense strand
cggaaggucucaaccauga

SEQ ID NO: 1181543 - RNA, 19 nt, Homo sapiens
  misc_RNA (1)...(19): siRNA sense strand
cagggaagauuuaggauuc

SEQ ID NO: 1181544 - RNA, 19 nt, Homo sapiens
  misc_RNA (1)...(19): siRNA sense strand
gggcauagauccuguuucg

SEQ ID NO: 1181545 - RNA, 19 nt, Homo sapiens
  misc_RNA (1)...(19): siRNA sense strand
ggaccauccugaagaagug

SEQ ID NO: 1181546 - RNA, 19 nt, Homo sapiens
  misc_RNA (1)...(19): siRNA sense strand
gaaaggccaagcuggauga

SEQ ID NO: 1181547 - RNA, 19 nt, Homo sapiens
  misc_RNA (1)...(19): siRNA sense strand
gcccagauguauaauuuca

SEQ ID NO: 1181548 - RNA, 19 nt, Homo sapiens
  misc_RNA (1)...(19): siRNA sense strand
cugcccagauguauaauuu

SEQ ID NO: 1181549 - RNA, 19 nt, Homo sapiens
  misc_RNA (1)...(19): siRNA sense strand
gaaggacacauucaagaca

SEQ ID NO: 1181550 - RNA, 19 nt, Homo sapiens
  misc_RNA (1)...(19): siRNA sense strand
uagauccuguuucguauga

SEQ ID NO: 1181551 - RNA, 19 nt, Homo sapiens
  misc_RNA (1)...(19): siRNA sense strand
cauagauccuguuucguau

SEQ ID NO: 1181552 - RNA, 19 nt, Homo sapiens
  misc_RNA (1)...(19): siRNA sense strand
gaacggaauucagaaacac

SEQ ID NO: 1181553 - RNA, 19 nt, Homo sapiens
  misc_RNA (1)...(19): siRNA sense strand
ucacgggaaugauugacuu

SEQ ID NO: 1181554 - RNA, 19 nt, Homo sapiens
  misc_RNA (1)...(19): siRNA sense strand
gauccuguuucguaugaau

SEQ ID NO: 1181555 - RNA, 19 nt, Homo sapiens
  misc_RNA (1)...(19): siRNA sense strand
caagguggaaggacacauu

SEQ ID NO: 1181556 - RNA, 19 nt, Homo sapiens
  misc_RNA (1)...(19): siRNA sense strand
aggccaagcuggaugaaga

SEQ ID NO: 1181557 - RNA, 19 nt, Homo sapiens
  misc_RNA (1)...(19): siRNA sense strand
ugacuuagacaccagcaaa

SEQ ID NO: 1181558 - RNA, 19 nt, Homo sapiens
  misc_RNA (1)...(19): siRNA sense strand
uaugaucuauggcaaaugg

SEQ ID NO: 1181559 - RNA, 19 nt, Homo sapiens
  misc_RNA (1)...(19): siRNA sense strand
gcucccauguucagcagaa

SEQ ID NO: 1181560 - RNA, 19 nt, Homo sapiens
  misc_RNA (1)...(19): siRNA sense strand
cuuuaaaccguguggauua

SEQ ID NO: 1181561 - RNA, 19 nt, Homo sapiens
  misc_RNA (1)...(19): siRNA sense strand
gaggaccggcaaaccauuu

SEQ ID NO: 1181562 - RNA, 19 nt, Homo sapiens
  misc_RNA (1)...(19): siRNA sense strand
ucaacgagccucugagcuu

SEQ ID NO: 1181563 - RNA, 19 nt, Homo sapiens
  misc_RNA (1)...(19): siRNA sense strand
aagcugcucuggaggauca

SEQ ID NO: 1181564 - RNA, 19 nt, Homo sapiens
  misc_RNA (1)...(19): siRNA sense strand
gaagcucuuuaugaucuau

SEQ ID NO: 1181565 - RNA, 19 nt, Homo sapiens
  misc_RNA (1)...(19): siRNA sense strand
ggagaggaccggcaaacca

SEQ ID NO: 1181566 - RNA, 19 nt, Homo sapiens
  misc_RNA (1)...(19): siRNA sense strand
gcaagcugcucuggaggau

SEQ ID NO: 1181567 - RNA, 19 nt, Homo sapiens
  misc_RNA (1)...(19): siRNA sense strand
gaagauuuaggauucagau

SEQ ID NO: 1181568 - RNA, 19 nt, Homo sapiens
  misc_RNA (1)...(19): siRNA sense strand
gggaaugauugacuuagac

SEQ ID NO: 1181569 - RNA, 19 nt, Homo sapiens
  misc_RNA (1)...(19): siRNA sense strand
cgggaaugauugacuuaga

SEQ ID NO: 1181570 - RNA, 19 nt, Homo sapiens
  misc_RNA (1)...(19): siRNA sense strand
cagaaagucacgggaauga

SEQ ID NO: 1181571 - RNA, 19 nt, Homo sapiens
  misc_RNA (1)...(19): siRNA sense strand
agaacggaauucagaaaca

SEQ ID NO: 1181572 - RNA, 19 nt, Homo sapiens
  misc_RNA (1)...(19): siRNA sense strand
ggaccggcaaaccauuuaa

SEQ ID NO: 1181573 - RNA, 19 nt, Homo sapiens
  misc_RNA (1)...(19): siRNA sense strand
ucgggaagcuguggauaga

SEQ ID NO: 1181574 - RNA, 19 nt, Homo sapiens
  misc_RNA (1)...(19): siRNA sense strand
ggaaggacacauucaagac

SEQ ID NO: 1181575 - RNA, 19 nt, Homo sapiens
  misc_RNA (1)...(19): siRNA sense strand
uggagaggaugcagucugu

SEQ ID NO: 1181576 - RNA, 19 nt, Homo sapiens
  misc_RNA (1)...(19): siRNA sense strand
ugggagaaacguaugaauu

SEQ ID NO: 1181577 - RNA, 19 nt, Homo sapiens
  misc_RNA (1)...(19): siRNA sense strand
ccguguggauuauuuggaa

SEQ ID NO: 1181578 - RNA, 19 nt, Homo sapiens
  misc_RNA (1)...(19): siRNA sense strand
gagaaaggccaagcuggau

SEQ ID NO: 1181579 - RNA, 19 nt, Homo sapiens
  misc_RNA (1)...(19): siRNA sense strand
ggaaugauugacuuagaca

SEQ ID NO: 1181580 - RNA, 19 nt, Homo sapiens
  misc_RNA (1)...(19): siRNA sense strand
aaggacacauucaagacaa

SEQ ID NO: 1181581 - RNA, 19 nt, Homo sapiens
  misc_RNA (1)...(19): siRNA sense strand
gagaggaccggcaaaccau

SEQ ID NO: 1181582 - RNA, 19 nt, Homo sapiens
  misc_RNA (1)...(19): siRNA sense strand
caaccaugacuuccuguuc

SEQ ID NO: 1181583 - RNA, 19 nt, Homo sapiens
  misc_RNA (1)...(19): siRNA sense strand
uaucggaacaggucaguca

SEQ ID NO: 1181584 - RNA, 19 nt, Homo sapiens
  misc_RNA (1)...(19): siRNA sense strand
agacaggcauggagaagac

SEQ ID NO: 1181585 - RNA, 19 nt, Homo sapiens
  misc_RNA (1)...(19): siRNA sense strand
aauccacucuugggagaaa

SEQ ID NO: 1181586 - RNA, 19 nt, Homo sapiens
  misc_RNA (1)...(19): siRNA sense strand
uguggaccauccugaagaa

SEQ ID NO: 1181587 - RNA, 19 nt, Homo sapiens
  misc_RNA (1)...(19): siRNA sense strand
ggacaguggagauuuuaaa

SEQ ID NO: 1181588 - RNA, 19 nt, Homo sapiens
  misc_RNA (1)...(19): siRNA sense strand
ucagggaagauuuaggauu

SEQ ID NO: 1181589 - RNA, 19 nt, Homo sapiens
  misc_RNA (1)...(19): siRNA sense strand
gaggagaagcagagagaag

SEQ ID NO: 1181590 - RNA, 19 nt, Homo sapiens
  misc_RNA (1)...(19): siRNA sense strand
ggagaauggcaacauggau

SEQ ID NO: 1181591 - RNA, 19 nt, Homo sapiens
  misc_RNA (1)...(19): siRNA sense strand
gguggaaggacacauucaa

SEQ ID NO: 1181592 - RNA, 19 nt, Homo sapiens
  misc_RNA (1)...(19): siRNA sense strand
gacauaagugugugcuuca

SEQ ID NO: 1181593 - RNA, 19 nt, Homo sapiens
  misc_RNA (1)...(19): siRNA sense strand
ggaagauuuaggauucaga

SEQ ID NO: 1181594 - RNA, 19 nt, Homo sapiens
  misc_RNA (1)...(19): siRNA sense strand
ucagauuuauaucggaaca

SEQ ID NO: 1181595 - RNA, 19 nt, Homo sapiens
  misc_RNA (1)...(19): siRNA sense strand
agagaacggaauucagaaa

SEQ ID NO: 1181596 - RNA, 19 nt, Homo sapiens
  misc_RNA (1)...(19): siRNA sense strand
aggagcggcuggaggagaa

SEQ ID NO: 1181597 - RNA, 19 nt, Homo sapiens
  misc_RNA (1)...(19): siRNA sense strand
gagacaggcauggagaaga

SEQ ID NO: 1181598 - RNA, 19 nt, Homo sapiens
  misc_RNA (1)...(19): siRNA sense strand
gugugugcuucacuuuaaa

SEQ ID NO: 1181599 - RNA, 19 nt, Homo sapiens
  misc_RNA (1)...(19): siRNA sense strand
uggaaggacacauucaaga

SEQ ID NO: 1181600 - RNA, 19 nt, Homo sapiens
  misc_RNA (1)...(19): siRNA sense strand
cgacugcccagauaucuac

SEQ ID NO: 1181601 - RNA, 19 nt, Homo sapiens
  misc_RNA (1)...(19): siRNA sense strand
gagaacggaauucagaaac

SEQ ID NO: 1181602 - RNA, 19 nt, Homo sapiens
  misc_RNA (1)...(19): siRNA sense strand
aaagucacgggaaugauug

SEQ ID NO: 1181603 - RNA, 19 nt, Homo sapiens
  misc_RNA (1)...(19): siRNA sense strand
ugcagcggaucacggagua

SEQ ID NO: 1181604 - RNA, 19 nt, Homo sapiens
  misc_RNA (1)...(19): siRNA sense strand
uuuaaaccguguggauuau

SEQ ID NO: 1181605 - RNA, 19 nt, Homo sapiens
  misc_RNA (1)...(19): siRNA sense strand
gaaggucucaaccaugacu

SEQ ID NO: 1181606 - RNA, 19 nt, Homo sapiens
  misc_RNA (1)...(19): siRNA sense strand
agaagcucuuuaugaucua

SEQ ID NO: 1181607 - RNA, 19 nt, Homo sapiens
  misc_RNA (1)...(19): siRNA sense strand
cugcccagauaucuacuga

SEQ ID NO: 1181608 - RNA, 19 nt, Homo sapiens
  misc_RNA (1)...(19): siRNA sense strand
uauggcaaauggacggaau

SEQ ID NO: 1181609 - RNA, 19 nt, Homo sapiens
  misc_RNA (1)...(19): siRNA sense strand
ggagaagcagagagaagca

SEQ ID NO: 1181610 - RNA, 19 nt, Homo sapiens
  misc_RNA (1)...(19): siRNA sense strand
ggauuacuuugagcggaau

SEQ ID NO: 1181611 - RNA, 19 nt, Homo sapiens
  misc_RNA (1)...(19): siRNA sense strand
gguucuacccaggcaauaa

SEQ ID NO: 1181612 - RNA, 19 nt, Homo sapiens
  misc_RNA (1)...(19): siRNA sense strand
gaccggcaaaccauuuaau

SEQ ID NO: 1181613 - RNA, 19 nt, Homo sapiens
  misc_RNA (1)...(19): siRNA sense strand
ggagacaggcauggagaag

SEQ ID NO: 1181614 - RNA, 19 nt, Homo sapiens
  misc_RNA (1)...(19): siRNA sense strand
cggcaaaccauuuaaucca

SEQ ID NO: 1181615 - RNA, 19 nt, Homo sapiens
  misc_RNA (1)...(19): siRNA sense strand
ggaggagaagcagagagaa

SEQ ID NO: 1181616 - RNA, 19 nt, Homo sapiens
  misc_RNA (1)...(19): siRNA sense strand
uggaggagaagcagagaga

SEQ ID NO: 1181617 - RNA, 19 nt, Homo sapiens
  misc_RNA (1)...(19): siRNA sense strand
gaagaaggguuccaagaag

SEQ ID NO: 1181618 - RNA, 19 nt, Homo sapiens
  misc_RNA (1)...(19): siRNA sense strand
gaagaaggauggcaagaag

SEQ ID NO: 1181619 - RNA, 19 nt, Homo sapiens
  misc_RNA (1)...(19): siRNA sense strand
aacaagcgcucgaccauua

SEQ ID NO: 1181620 - RNA, 19 nt, Homo sapiens
  misc_RNA (1)...(19): siRNA sense strand
ccaaggcugucaccaagua

SEQ ID NO: 1181621 - RNA, 19 nt, Homo sapiens
  misc_RNA (1)...(19): siRNA sense strand
caucaugaauuccuucguu

SEQ ID NO: 1181622 - RNA, 19 nt, Homo sapiens
  misc_RNA (1)...(19): siRNA sense strand
cgaagaaggguuccaagaa

SEQ ID NO: 1181623 - RNA, 19 nt, Homo sapiens
  misc_RNA (1)...(19): siRNA sense strand
guauacaagcuccaaguaa

SEQ ID NO: 1181624 - RNA, 19 nt, Homo sapiens
  misc_RNA (1)...(19): siRNA sense strand
ccaagaaggcugugaccaa

SEQ ID NO: 1181625 - RNA, 19 nt, Homo sapiens
  misc_RNA (1)...(19): siRNA sense strand
gcuacuccguguaugugua

SEQ ID NO: 1181626 - RNA, 19 nt, Homo sapiens
  misc_RNA (1)...(19): siRNA sense strand
ugaccaaggcgcagaagaa

SEQ ID NO: 1181627 - RNA, 19 nt, Homo sapiens
  misc_RNA (1)...(19): siRNA sense strand
ccaaggcgcagaagaagga

SEQ ID NO: 1181628 - RNA, 19 nt, Homo sapiens
  misc_RNA (1)...(19): siRNA sense strand
guaccaaggcugucaccaa

SEQ ID NO: 1181629 - RNA, 19 nt, Homo sapiens
  misc_RNA (1)...(19): siRNA sense strand
caacaagcgcucgaccauu

SEQ ID NO: 1181630 - RNA, 19 nt, Homo sapiens
  misc_RNA (1)...(19): siRNA sense strand
gaagguaccaaggcuguca

SEQ ID NO: 1181631 - RNA, 19 nt, Homo sapiens
  misc_RNA (1)...(19): siRNA sense strand
aucaugaauuccuucguua

SEQ ID NO: 1181632 - RNA, 19 nt, Homo sapiens
  misc_RNA (1)...(19): siRNA sense strand
agaagaaggauggcaagaa

SEQ ID NO: 1181633 - RNA, 19 nt, Homo sapiens
  misc_RNA (1)...(19): siRNA sense strand
gagcuacuccguguaugug

SEQ ID NO: 1181634 - RNA, 19 nt, Homo sapiens
  misc_RNA (1)...(19): siRNA sense strand
ucaugaauuccuucguuaa

SEQ ID NO: 1181635 - RNA, 19 nt, Homo sapiens
  misc_RNA (1)...(19): siRNA sense strand
auacuggcaucucauccaa

SEQ ID NO: 1181636 - RNA, 19 nt, Homo sapiens
  misc_RNA (1)...(19): siRNA sense strand
ccgaagaaggguuccaaga

SEQ ID NO: 1181637 - RNA, 19 nt, Homo sapiens
  misc_RNA (1)...(19): siRNA sense strand
gcagucguaaggagagcua

SEQ ID NO: 1181638 - RNA, 19 nt, Homo sapiens
  misc_RNA (1)...(19): siRNA sense strand
gagagcuacuccguguaug

SEQ ID NO: 1181639 - RNA, 19 nt, Homo sapiens
  misc_RNA (1)...(19): siRNA sense strand
gcacgcaguguccgaaggu

SEQ ID NO: 1181640 - RNA, 19 nt, Homo sapiens
  misc_RNA (1)...(19): siRNA sense strand
gaccaaggcgcagaagaag

SEQ ID NO: 1181641 - RNA, 19 nt, Homo sapiens
  misc_RNA (1)...(19): siRNA sense strand
gauacuggcaucucaucca

SEQ ID NO: 1181642 - RNA, 19 nt, Homo sapiens
  misc_RNA (1)...(19): siRNA sense strand
aguauacaagcuccaagua

SEQ ID NO: 1181643 - RNA, 19 nt, Homo sapiens
  misc_RNA (1)...(19): siRNA sense strand
gcugucaccaaguauacaa

SEQ ID NO: 1181644 - RNA, 19 nt, Homo sapiens
  misc_RNA (1)...(19): siRNA sense strand
ccaaguauacaagcuccaa

SEQ ID NO: 1181645 - RNA, 19 nt, Homo sapiens
  misc_RNA (1)...(19): siRNA sense strand
gaagagugccucgaguuua

SEQ ID NO: 1181646 - RNA, 19 nt, Homo sapiens
  misc_RNA (1)...(19): siRNA sense strand
ggagaucuauucccacaug

SEQ ID NO: 1181647 - RNA, 19 nt, Homo sapiens
  misc_RNA (1)...(19): siRNA sense strand
ucaagcagaugaagauuau

SEQ ID NO: 1181648 - RNA, 19 nt, Homo sapiens
  misc_RNA (1)...(19): siRNA sense strand
gaucucaacuuccggaugu

SEQ ID NO: 1181649 - RNA, 19 nt, Homo sapiens
  misc_RNA (1)...(19): siRNA sense strand
ggaagagugccucgaguuu

SEQ ID NO: 1181650 - RNA, 19 nt, Homo sapiens
  misc_RNA (1)...(19): siRNA sense strand
gaacgucaaauuugucuuc

SEQ ID NO: 1181651 - RNA, 19 nt, Homo sapiens
  misc_RNA (1)...(19): siRNA sense strand
gaaagaggacgcugagaag

SEQ ID NO: 1181652 - RNA, 19 nt, Homo sapiens
  misc_RNA (1)...(19): siRNA sense strand
caagaccacuggcaucauc

SEQ ID NO: 1181653 - RNA, 19 nt, Homo sapiens
  misc_RNA (1)...(19): siRNA sense strand
gcacauggcagacacuauc

SEQ ID NO: 1181654 - RNA, 19 nt, Homo sapiens
  misc_RNA (1)...(19): siRNA sense strand
ucaaggagaaccucaaaga

SEQ ID NO: 1181655 - RNA, 19 nt, Homo sapiens
  misc_RNA (1)...(19): siRNA sense strand
aagagugccucgaguuuau

SEQ ID NO: 1181656 - RNA, 19 nt, Homo sapiens
  misc_RNA (1)...(19): siRNA sense strand
ugaaagaggacgcugagaa

SEQ ID NO: 1181657 - RNA, 19 nt, Homo sapiens
  misc_RNA (1)...(19): siRNA sense strand
gaagagcaccaucgucaag

SEQ ID NO: 1181658 - RNA, 19 nt, Homo sapiens
  misc_RNA (1)...(19): siRNA sense strand
cuucaaggaucucaacuuc

SEQ ID NO: 1181659 - RNA, 19 nt, Homo sapiens
  misc_RNA (1)...(19): siRNA sense strand
ucaccgacaucaucaucaa

SEQ ID NO: 1181660 - RNA, 19 nt, Homo sapiens
  misc_RNA (1)...(19): siRNA sense strand
gcacgaugcccaaggagau

SEQ ID NO: 1181661 - RNA, 19 nt, Homo sapiens
  misc_RNA (1)...(19): siRNA sense strand
ccaucgugcucuuccuuaa

SEQ ID NO: 1181662 - RNA, 19 nt, Homo sapiens
  misc_RNA (1)...(19): siRNA sense strand
gucaagcagaugaagauua

SEQ ID NO: 1181663 - RNA, 19 nt, Homo sapiens
  misc_RNA (1)...(19): siRNA sense strand
gagaucuauucccacauga

SEQ ID NO: 1181664 - RNA, 19 nt, Homo sapiens
  misc_RNA (1)...(19): siRNA sense strand
acacgcagaacgucaaauu

SEQ ID NO: 1181665 - RNA, 19 nt, Homo sapiens
  misc_RNA (1)...(19): siRNA sense strand
ggcgugaccugcaucaucu

SEQ ID NO: 1181666 - RNA, 19 nt, Homo sapiens
  misc_RNA (1)...(19): siRNA sense strand
cgcagaacgucaaauuugu

SEQ ID NO: 1181667 - RNA, 19 nt, Homo sapiens
  misc_RNA (1)...(19): siRNA sense strand
agacgcaguucuccuucaa

SEQ ID NO: 1181668 - RNA, 19 nt, Homo sapiens
  misc_RNA (1)...(19): siRNA sense strand
caucaaggagaaccucaaa

SEQ ID NO: 1181669 - RNA, 19 nt, Homo sapiens
  misc_RNA (1)...(19): siRNA sense strand
acgcagaacgucaaauuug

SEQ ID NO: 1181670 - RNA, 19 nt, Homo sapiens
  misc_RNA (1)...(19): siRNA sense strand
gcaccaucgucaagcagau

SEQ ID NO: 1181671 - RNA, 19 nt, Homo sapiens
  misc_RNA (1)...(19): siRNA sense strand
cgacguccaucgugcucuu

SEQ ID NO: 1181672 - RNA, 19 nt, Homo sapiens
  misc_RNA (1)...(19): siRNA sense strand
ggaagagcaccaucgucaa

SEQ ID NO: 1181673 - RNA, 19 nt, Homo sapiens
  misc_RNA (1)...(19): siRNA sense strand
gcaucuguuucccggacua

SEQ ID NO: 1181674 - RNA, 19 nt, Homo sapiens
  misc_RNA (1)...(19): siRNA sense strand
gaccuggagcgccugguaa

SEQ ID NO: 1181675 - RNA, 19 nt, Homo sapiens
  misc_RNA (1)...(19): siRNA sense strand
gcagaacgucaaauuuguc

SEQ ID NO: 1181676 - RNA, 19 nt, Homo sapiens
  misc_RNA (1)...(19): siRNA sense strand
ggacggguacucgcuggaa

SEQ ID NO: 1181677 - RNA, 19 nt, Homo sapiens
  misc_RNA (1)...(19): siRNA sense strand
ggagaaccucaaagacugu

SEQ ID NO: 1181678 - RNA, 19 nt, Homo sapiens
  misc_RNA (1)...(19): siRNA sense strand
ggaggacgacgaagugaac

SEQ ID NO: 1181679 - RNA, 19 nt, Homo sapiens
  misc_RNA (1)...(19): siRNA sense strand
gcuaguggaggacgacgaa

SEQ ID NO: 1181680 - RNA, 19 nt, Homo sapiens
  misc_RNA (1)...(19): siRNA sense strand
gggcgugaccugcaucauc

SEQ ID NO: 1181681 - RNA, 19 nt, Homo sapiens
  misc_RNA (1)...(19): siRNA sense strand
agaggacgcugagaaggau

SEQ ID NO: 1181682 - RNA, 19 nt, Homo sapiens
  misc_RNA (1)...(19): siRNA sense strand
ugaccacacucaacaucca

SEQ ID NO: 1181683 - RNA, 19 nt, Homo sapiens
  misc_RNA (1)...(19): siRNA sense strand
gaguuuaucgccaucaucu

SEQ ID NO: 1181684 - RNA, 19 nt, Homo sapiens
  misc_RNA (1)...(19): siRNA sense strand
cccggaagcugaugcacau

SEQ ID NO: 1181685 - RNA, 19 nt, Homo sapiens
  misc_RNA (1)...(19): siRNA sense strand
ggccagugcugaggagaag

SEQ ID NO: 1181686 - RNA, 19 nt, Homo sapiens
  misc_RNA (1)...(19): siRNA sense strand
agacuguggccucuucuga

SEQ ID NO: 1181687 - RNA, 19 nt, Homo sapiens
  misc_RNA (1)...(19): siRNA sense strand
gccaugaccacacucaaca

SEQ ID NO: 1181688 - RNA, 19 nt, Homo sapiens
  misc_RNA (1)...(19): siRNA sense strand
ccacacucaacauccagua

SEQ ID NO: 1181689 - RNA, 19 nt, Homo sapiens
  misc_RNA (1)...(19): siRNA sense strand
ugaccugcaucaucuucau

SEQ ID NO: 1181690 - RNA, 19 nt, Homo sapiens
  misc_RNA (1)...(19): siRNA sense strand
acgagagccugcaccuguu

SEQ ID NO: 1181691 - RNA, 19 nt, Homo sapiens
  misc_RNA (1)...(19): siRNA sense strand
aagaggacgcugagaagga

SEQ ID NO: 1181692 - RNA, 19 nt, Homo sapiens
  misc_RNA (1)...(19): siRNA sense strand
gcaccucagcaucuguuuc

SEQ ID NO: 1181693 - RNA, 19 nt, Homo sapiens
  misc_RNA (1)...(19): siRNA sense strand
gcgcaccucagcaucuguu

SEQ ID NO: 1181694 - RNA, 19 nt, Homo sapiens
  misc_RNA (1)...(19): siRNA sense strand
cacgcagaacgucaaauuu

SEQ ID NO: 1181695 - RNA, 19 nt, Homo sapiens
  misc_RNA (1)...(19): siRNA sense strand
cgacacgcagaacgucaaa

SEQ ID NO: 1181696 - RNA, 19 nt, Homo sapiens
  misc_RNA (1)...(19): siRNA sense strand
caaggagaaccucaaagac

SEQ ID NO: 1181697 - RNA, 19 nt, Homo sapiens
  misc_RNA (1)...(19): siRNA sense strand
gaagagugccucgaguuua

SEQ ID NO: 1181698 - RNA, 19 nt, Homo sapiens
  misc_RNA (1)...(19): siRNA sense strand
ggagaucuauucccacaug

SEQ ID NO: 1181699 - RNA, 19 nt, Homo sapiens
  misc_RNA (1)...(19): siRNA sense strand
ucaagcagaugaagauuau

SEQ ID NO: 1181700 - RNA, 19 nt, Homo sapiens
  misc_RNA (1)...(19): siRNA sense strand
gaucucaacuuccggaugu

SEQ ID NO: 1181701 - RNA, 19 nt, Homo sapiens
  misc_RNA (1)...(19): siRNA sense strand
ggaagagugccucgaguuu

SEQ ID NO: 1181702 - RNA, 19 nt, Homo sapiens
  misc_RNA (1)...(19): siRNA sense strand
gaacgucaaauuugucuuc

SEQ ID NO: 1181703 - RNA, 19 nt, Homo sapiens
  misc_RNA (1)...(19): siRNA sense strand
gaaagaggacgcugagaag

SEQ ID NO: 1181704 - RNA, 19 nt, Homo sapiens
  misc_RNA (1)...(19): siRNA sense strand
caagaccacuggcaucauc

SEQ ID NO: 1181705 - RNA, 19 nt, Homo sapiens
  misc_RNA (1)...(19): siRNA sense strand
gcacauggcagacacuauc

SEQ ID NO: 1181706 - RNA, 19 nt, Homo sapiens
  misc_RNA (1)...(19): siRNA sense strand
ucaaggagaaccucaaaga

SEQ ID NO: 1181707 - RNA, 19 nt, Homo sapiens
  misc_RNA (1)...(19): siRNA sense strand
aagagugccucgaguuuau

SEQ ID NO: 1181708 - RNA, 19 nt, Homo sapiens
  misc_RNA (1)...(19): siRNA sense strand
ugaaagaggacgcugagaa

SEQ ID NO: 1181709 - RNA, 19 nt, Homo sapiens
  misc_RNA (1)...(19): siRNA sense strand
gaagagcaccaucgucaag

SEQ ID NO: 1181710 - RNA, 19 nt, Homo sapiens
  misc_RNA (1)...(19): siRNA sense strand
cuucaaggaucucaacuuc

SEQ ID NO: 1181711 - RNA, 19 nt, Homo sapiens
  misc_RNA (1)...(19): siRNA sense strand
ucaccgacaucaucaucaa

SEQ ID NO: 1181712 - RNA, 19 nt, Homo sapiens
  misc_RNA (1)...(19): siRNA sense strand
gcacgaugcccaaggagau

SEQ ID NO: 1181713 - RNA, 19 nt, Homo sapiens
  misc_RNA (1)...(19): siRNA sense strand
ccaucgugcucuuccuuaa

SEQ ID NO: 1181714 - RNA, 19 nt, Homo sapiens
  misc_RNA (1)...(19): siRNA sense strand
gucaagcagaugaagauua

SEQ ID NO: 1181715 - RNA, 19 nt, Homo sapiens
  misc_RNA (1)...(19): siRNA sense strand
gagaucuauucccacauga

SEQ ID NO: 1181716 - RNA, 19 nt, Homo sapiens
  misc_RNA (1)...(19): siRNA sense strand
acacgcagaacgucaaauu

SEQ ID NO: 1181717 - RNA, 19 nt, Homo sapiens
  misc_RNA (1)...(19): siRNA sense strand
ggcgugaccugcaucaucu

SEQ ID NO: 1181718 - RNA, 19 nt, Homo sapiens
  misc_RNA (1)...(19): siRNA sense strand
cgcagaacgucaaauuugu

SEQ ID NO: 1181719 - RNA, 19 nt, Homo sapiens
  misc_RNA (1)...(19): siRNA sense strand
agacgcaguucuccuucaa

SEQ ID NO: 1181720 - RNA, 19 nt, Homo sapiens
  misc_RNA (1)...(19): siRNA sense strand
caucaaggagaaccucaaa

SEQ ID NO: 1181721 - RNA, 19 nt, Homo sapiens
  misc_RNA (1)...(19): siRNA sense strand
acgcagaacgucaaauuug

SEQ ID NO: 1181722 - RNA, 19 nt, Homo sapiens
  misc_RNA (1)...(19): siRNA sense strand
gcaccaucgucaagcagau

SEQ ID NO: 1181723 - RNA, 19 nt, Homo sapiens
  misc_RNA (1)...(19): siRNA sense strand
cgacguccaucgugcucuu

SEQ ID NO: 1181724 - RNA, 19 nt, Homo sapiens
  misc_RNA (1)...(19): siRNA sense strand
ggaagagcaccaucgucaa

SEQ ID NO: 1181725 - RNA, 19 nt, Homo sapiens
  misc_RNA (1)...(19): siRNA sense strand
gcaucuguuucccggacua

SEQ ID NO: 1181726 - RNA, 19 nt, Homo sapiens
  misc_RNA (1)...(19): siRNA sense strand
gaccuggagcgccugguaa

SEQ ID NO: 1181727 - RNA, 19 nt, Homo sapiens
  misc_RNA (1)...(19): siRNA sense strand
gcagaacgucaaauuuguc

SEQ ID NO: 1181728 - RNA, 19 nt, Homo sapiens
  misc_RNA (1)...(19): siRNA sense strand
ggacggguacucgcuggaa

SEQ ID NO: 1181729 - RNA, 19 nt, Homo sapiens
  misc_RNA (1)...(19): siRNA sense strand
ggagaaccucaaagacugu

SEQ ID NO: 1181730 - RNA, 19 nt, Homo sapiens
  misc_RNA (1)...(19): siRNA sense strand
ggaggacgacgaagugaac

SEQ ID NO: 1181731 - RNA, 19 nt, Homo sapiens
  misc_RNA (1)...(19): siRNA sense strand
gcuaguggaggacgacgaa

SEQ ID NO: 1181732 - RNA, 19 nt, Homo sapiens
  misc_RNA (1)...(19): siRNA sense strand
gggcgugaccugcaucauc

SEQ ID NO: 1181733 - RNA, 19 nt, Homo sapiens
  misc_RNA (1)...(19): siRNA sense strand
agaggacgcugagaaggau

SEQ ID NO: 1181734 - RNA, 19 nt, Homo sapiens
  misc_RNA (1)...(19): siRNA sense strand
ugaccacacucaacaucca

SEQ ID NO: 1181735 - RNA, 19 nt, Homo sapiens
  misc_RNA (1)...(19): siRNA sense strand
gaguuuaucgccaucaucu

SEQ ID NO: 1181736 - RNA, 19 nt, Homo sapiens
  misc_RNA (1)...(19): siRNA sense strand
cccggaagcugaugcacau

SEQ ID NO: 1181737 - RNA, 19 nt, Homo sapiens
  misc_RNA (1)...(19): siRNA sense strand
ggccagugcugaggagaag

SEQ ID NO: 1181738 - RNA, 19 nt, Homo sapiens
  misc_RNA (1)...(19): siRNA sense strand
agacuguggccucuucuga

SEQ ID NO: 1181739 - RNA, 19 nt, Homo sapiens
  misc_RNA (1)...(19): siRNA sense strand
gccaugaccacacucaaca

SEQ ID NO: 1181740 - RNA, 19 nt, Homo sapiens
  misc_RNA (1)...(19): siRNA sense strand
ccacacucaacauccagua

SEQ ID NO: 1181741 - RNA, 19 nt, Homo sapiens
  misc_RNA (1)...(19): siRNA sense strand
ugaccugcaucaucuucau

SEQ ID NO: 1181742 - RNA, 19 nt, Homo sapiens
  misc_RNA (1)...(19): siRNA sense strand
acgagagccugcaccuguu

SEQ ID NO: 1181743 - RNA, 19 nt, Homo sapiens
  misc_RNA (1)...(19): siRNA sense strand
aagaggacgcugagaagga

SEQ ID NO: 1181744 - RNA, 19 nt, Homo sapiens
  misc_RNA (1)...(19): siRNA sense strand
gcaccucagcaucuguuuc

SEQ ID NO: 1181745 - RNA, 19 nt, Homo sapiens
  misc_RNA (1)...(19): siRNA sense strand
gcgcaccucagcaucuguu

SEQ ID NO: 1181746 - RNA, 19 nt, Homo sapiens
  misc_RNA (1)...(19): siRNA sense strand
cacgcagaacgucaaauuu

SEQ ID NO: 1181747 - RNA, 19 nt, Homo sapiens
  misc_RNA (1)...(19): siRNA sense strand
cgacacgcagaacgucaaa

SEQ ID NO: 1181748 - RNA, 19 nt, Homo sapiens
  misc_RNA (1)...(19): siRNA sense strand
caaggagaaccucaaagac

SEQ ID NO: 1181749 - RNA, 19 nt, Homo sapiens
  misc_RNA (1)...(19): siRNA sense strand
gaagaacaccuguauauuc

SEQ ID NO: 1181750 - RNA, 19 nt, Homo sapiens
  misc_RNA (1)...(19): siRNA sense strand
gcaaauaaguuggugaaau

SEQ ID NO: 1181751 - RNA, 19 nt, Homo sapiens
  misc_RNA (1)...(19): siRNA sense strand
gaacaccuguauauucuug

SEQ ID NO: 1181752 - RNA, 19 nt, Homo sapiens
  misc_RNA (1)...(19): siRNA sense strand
caacgacuaugaagaauuc

SEQ ID NO: 1181753 - RNA, 19 nt, Homo sapiens
  misc_RNA (1)...(19): siRNA sense strand
agaaugaugucuucgauuu

SEQ ID NO: 1181754 - RNA, 19 nt, Homo sapiens
  misc_RNA (1)...(19): siRNA sense strand
gcaccuggaugaugaguau

SEQ ID NO: 1181755 - RNA, 19 nt, Homo sapiens
  misc_RNA (1)...(19): siRNA sense strand
ccaagcaccuggaugauga

SEQ ID NO: 1181756 - RNA, 19 nt, Homo sapiens
  misc_RNA (1)...(19): siRNA sense strand
cggaaacacuugccaauga

SEQ ID NO: 1181757 - RNA, 19 nt, Homo sapiens
  misc_RNA (1)...(19): siRNA sense strand
agaaguaccuggaauacaa

SEQ ID NO: 1181758 - RNA, 19 nt, Homo sapiens
  misc_RNA (1)...(19): siRNA sense strand
gagcugggaugacauacaa

SEQ ID NO: 1181759 - RNA, 19 nt, Homo sapiens
  misc_RNA (1)...(19): siRNA sense strand
ugaaggagaucgacaagga

SEQ ID NO: 1181760 - RNA, 19 nt, Homo sapiens
  misc_RNA (1)...(19): siRNA sense strand
gcgcagacaugcugaagga

SEQ ID NO: 1181761 - RNA, 19 nt, Homo sapiens
  misc_RNA (1)...(19): siRNA sense strand
gugaaauaccugaugauua

SEQ ID NO: 1181762 - RNA, 19 nt, Homo sapiens
  misc_RNA (1)...(19): siRNA sense strand
gcagaccucccagauguua

SEQ ID NO: 1181763 - RNA, 19 nt, Homo sapiens
  misc_RNA (1)...(19): siRNA sense strand
ggagagggcaaauaaguug

SEQ ID NO: 1181764 - RNA, 19 nt, Homo sapiens
  misc_RNA (1)...(19): siRNA sense strand
ggaagaacaccuguauauu

SEQ ID NO: 1181765 - RNA, 19 nt, Homo sapiens
  misc_RNA (1)...(19): siRNA sense strand
ucggaaagcuacaguguug

SEQ ID NO: 1181766 - RNA, 19 nt, Homo sapiens
  misc_RNA (1)...(19): siRNA sense strand
gaugaacauuucccugaga

SEQ ID NO: 1181767 - RNA, 19 nt, Homo sapiens
  misc_RNA (1)...(19): siRNA sense strand
gacaauggauguggauaug

SEQ ID NO: 1181768 - RNA, 19 nt, Homo sapiens
  misc_RNA (1)...(19): siRNA sense strand
ggaugaugcuuucaagaca

SEQ ID NO: 1181769 - RNA, 19 nt, Homo sapiens
  misc_RNA (1)...(19): siRNA sense strand
ccgcagaccucccagaugu

SEQ ID NO: 1181770 - RNA, 19 nt, Homo sapiens
  misc_RNA (1)...(19): siRNA sense strand
gaacauuucccugagauca

SEQ ID NO: 1181771 - RNA, 19 nt, Homo sapiens
  misc_RNA (1)...(19): siRNA sense strand
gagcaucacagcccucauu

SEQ ID NO: 1181772 - RNA, 19 nt, Homo sapiens
  misc_RNA (1)...(19): siRNA sense strand
cagagaauaugaugaacau

SEQ ID NO: 1181773 - RNA, 19 nt, Homo sapiens
  misc_RNA (1)...(19): siRNA sense strand
gcaacccaccugaguauga

SEQ ID NO: 1181774 - RNA, 19 nt, Homo sapiens
  misc_RNA (1)...(19): siRNA sense strand
ggaaacacuugccaaugag

SEQ ID NO: 1181775 - RNA, 19 nt, Homo sapiens
  misc_RNA (1)...(19): siRNA sense strand
caaggaagaacaccuguau

SEQ ID NO: 1181776 - RNA, 19 nt, Homo sapiens
  misc_RNA (1)...(19): siRNA sense strand
ggaaagcuacaguguugaa

SEQ ID NO: 1181777 - RNA, 19 nt, Homo sapiens
  misc_RNA (1)...(19): siRNA sense strand
gaugaugcuuucaagacaa

SEQ ID NO: 1181778 - RNA, 19 nt, Homo sapiens
  misc_RNA (1)...(19): siRNA sense strand
ugacauccauauccucaga

SEQ ID NO: 1181779 - RNA, 19 nt, Homo sapiens
  misc_RNA (1)...(19): siRNA sense strand
caacccaccugaguaugaa

SEQ ID NO: 1181780 - RNA, 19 nt, Homo sapiens
  misc_RNA (1)...(19): siRNA sense strand
gcaagaggaccaagaaguc

SEQ ID NO: 1181781 - RNA, 19 nt, Homo sapiens
  misc_RNA (1)...(19): siRNA sense strand
ggaaggcucauuucuugga

SEQ ID NO: 1181782 - RNA, 19 nt, Homo sapiens
  misc_RNA (1)...(19): siRNA sense strand
ggaugaggguagcgacgaa

SEQ ID NO: 1181783 - RNA, 19 nt, Homo sapiens
  misc_RNA (1)...(19): siRNA sense strand
caugagaccagcaagauga

SEQ ID NO: 1181784 - RNA, 19 nt, Homo sapiens
  misc_RNA (1)...(19): siRNA sense strand
gcaacgacuaugaagaauu

SEQ ID NO: 1181785 - RNA, 19 nt, Homo sapiens
  misc_RNA (1)...(19): siRNA sense strand
ccagaaugaugucuucgau

SEQ ID NO: 1181786 - RNA, 19 nt, Homo sapiens
  misc_RNA (1)...(19): siRNA sense strand
cuacaguguugaagacaug

SEQ ID NO: 1181787 - RNA, 19 nt, Homo sapiens
  misc_RNA (1)...(19): siRNA sense strand
cagauaccaucaguacauu

SEQ ID NO: 1181788 - RNA, 19 nt, Homo sapiens
  misc_RNA (1)...(19): siRNA sense strand
auggaaggcucauuucuug

SEQ ID NO: 1181789 - RNA, 19 nt, Homo sapiens
  misc_RNA (1)...(19): siRNA sense strand
ggagaucgacaaggaagaa

SEQ ID NO: 1181790 - RNA, 19 nt, Homo sapiens
  misc_RNA (1)...(19): siRNA sense strand
gaaggagaucgacaaggaa

SEQ ID NO: 1181791 - RNA, 19 nt, Homo sapiens
  misc_RNA (1)...(19): siRNA sense strand
ggguggagccucagaaugu

SEQ ID NO: 1181792 - RNA, 19 nt, Homo sapiens
  misc_RNA (1)...(19): siRNA sense strand
ggugaaauaccugaugauu

SEQ ID NO: 1181793 - RNA, 19 nt, Homo sapiens
  misc_RNA (1)...(19): siRNA sense strand
cagaugacuuugugaagca

SEQ ID NO: 1181794 - RNA, 19 nt, Homo sapiens
  misc_RNA (1)...(19): siRNA sense strand
cagcucgccuccuuggaaa

SEQ ID NO: 1181795 - RNA, 19 nt, Homo sapiens
  misc_RNA (1)...(19): siRNA sense strand
ugaagaauucggugcguuu

SEQ ID NO: 1181796 - RNA, 19 nt, Homo sapiens
  misc_RNA (1)...(19): siRNA sense strand
ccagauaccaucaguacau

SEQ ID NO: 1181797 - RNA, 19 nt, Homo sapiens
  misc_RNA (1)...(19): siRNA sense strand
gaugagggcccagaugaau

SEQ ID NO: 1181798 - RNA, 19 nt, Homo sapiens
  misc_RNA (1)...(19): siRNA sense strand
aggaagaacaccuguauau

SEQ ID NO: 1181799 - RNA, 19 nt, Homo sapiens
  misc_RNA (1)...(19): siRNA sense strand
ggauccaccugaaggagau

SEQ ID NO: 1181800 - RNA, 19 nt, Homo sapiens
  misc_RNA (1)...(19): siRNA sense strand
gcagcuggauccggaaaca

SEQ ID NO: 1181801 - RNA, 19 nt, Homo sapiens
  misc_RNA (1)...(19): siRNA sense strand
gggaugaggacggagauuu

SEQ ID NO: 1181802 - RNA, 19 nt, Homo sapiens
  misc_RNA (1)...(19): siRNA sense strand
cagaugagggcccagauga

SEQ ID NO: 1181803 - RNA, 19 nt, Homo sapiens
  misc_RNA (1)...(19): siRNA sense strand
agaugaggguccugagauu

SEQ ID NO: 1181804 - RNA, 19 nt, Homo sapiens
  misc_RNA (1)...(19): siRNA sense strand
gggcaaauaaguuggugaa

SEQ ID NO: 1181805 - RNA, 19 nt, Homo sapiens
  misc_RNA (1)...(19): siRNA sense strand
gggccagaaugaugucuuc

SEQ ID NO: 1181806 - RNA, 19 nt, Homo sapiens
  misc_RNA (1)...(19): siRNA sense strand
gaggcaagaggaccaagaa

SEQ ID NO: 1181807 - RNA, 19 nt, Homo sapiens
  misc_RNA (1)...(19): siRNA sense strand
gguggagccucagaauguu

SEQ ID NO: 1181808 - RNA, 19 nt, Homo sapiens
  misc_RNA (1)...(19): siRNA sense strand
ugagauucaucgcccagaa

SEQ ID NO: 1181809 - RNA, 19 nt, Homo sapiens
  misc_RNA (1)...(19): siRNA sense strand
ugauuaaggacuacaagaa

SEQ ID NO: 1181810 - RNA, 19 nt, Homo sapiens
  misc_RNA (1)...(19): siRNA sense strand
gaaacacuugccaaugaga

SEQ ID NO: 1181811 - RNA, 19 nt, Homo sapiens
  misc_RNA (1)...(19): siRNA sense strand
cagcaacccaccugaguau

SEQ ID NO: 1181812 - RNA, 19 nt, Homo sapiens
  misc_RNA (1)...(19): siRNA sense strand
gaagaauucggugcguuug

SEQ ID NO: 1181813 - RNA, 19 nt, Homo sapiens
  misc_RNA (1)...(19): siRNA sense strand
gauuaaggacuacaagaag

SEQ ID NO: 1181814 - RNA, 19 nt, Homo sapiens
  misc_RNA (1)...(19): siRNA sense strand
aaugaugucuucgauuuca

SEQ ID NO: 1181815 - RNA, 19 nt, Homo sapiens
  misc_RNA (1)...(19): siRNA sense strand
gcagcgaggaggagagaga

SEQ ID NO: 1181816 - RNA, 19 nt, Homo sapiens
  misc_RNA (1)...(19): siRNA sense strand
gaaugaugucuucgauuuc

SEQ ID NO: 1181817 - RNA, 19 nt, Homo sapiens
  misc_RNA (1)...(19): siRNA sense strand
caagaugaggguccugaga

SEQ ID NO: 1181818 - RNA, 19 nt, Homo sapiens
  misc_RNA (1)...(19): siRNA sense strand
gaagcagaaguaccuggaa

SEQ ID NO: 1181819 - RNA, 19 nt, Homo sapiens
  misc_RNA (1)...(19): siRNA sense strand
gaaggcaacgacuaugaag

SEQ ID NO: 1181820 - RNA, 19 nt, Homo sapiens
  misc_RNA (1)...(19): siRNA sense strand
caggagagggcaaauaagu

SEQ ID NO: 1181821 - RNA, 19 nt, Homo sapiens
  misc_RNA (1)...(19): siRNA sense strand
ggauauggccgaggaacau

SEQ ID NO: 1181822 - RNA, 19 nt, Homo sapiens
  misc_RNA (1)...(19): siRNA sense strand
gcagaaguaccuggaauac

SEQ ID NO: 1181823 - RNA, 19 nt, Homo sapiens
  misc_RNA (1)...(19): siRNA sense strand
aagcagaaguaccuggaau

SEQ ID NO: 1181824 - RNA, 19 nt, Homo sapiens
  misc_RNA (1)...(19): siRNA sense strand
acauuucccugagaucauu

SEQ ID NO: 1181825 - RNA, 19 nt, Homo sapiens
  misc_RNA (1)...(19): siRNA sense strand
ugaaggcaacgacuaugaa

SEQ ID NO: 1181826 - RNA, 19 nt, Homo sapiens
  misc_RNA (1)...(19): siRNA sense strand
gggaggaagagaugguuga

SEQ ID NO: 1181827 - RNA, 19 nt, Homo sapiens
  misc_RNA (1)...(19): siRNA sense strand
ggaugaagcgcugauugga

SEQ ID NO: 1181828 - RNA, 19 nt, Homo sapiens
  misc_RNA (1)...(19): siRNA sense strand
ugagggcccagaugaauau

SEQ ID NO: 1181829 - RNA, 19 nt, Homo sapiens
  misc_RNA (1)...(19): siRNA sense strand
aggcaacgacuaugaagaa

SEQ ID NO: 1181830 - RNA, 19 nt, Homo sapiens
  misc_RNA (1)...(19): siRNA sense strand
uccaggccuucgcaucuua

SEQ ID NO: 1181831 - RNA, 19 nt, Homo sapiens
  misc_RNA (1)...(19): siRNA sense strand
auuaaggacuacaagaaga

SEQ ID NO: 1181832 - RNA, 19 nt, Homo sapiens
  misc_RNA (1)...(19): siRNA sense strand
ugcaggagagggcaaauaa

SEQ ID NO: 1181833 - RNA, 19 nt, Homo sapiens
  misc_RNA (1)...(19): siRNA sense strand
agauguuagucaccaguaa

SEQ ID NO: 1181834 - RNA, 19 nt, Homo sapiens
  misc_RNA (1)...(19): siRNA sense strand
caacguacacccuggaaaa

SEQ ID NO: 1181835 - RNA, 19 nt, Homo sapiens
  misc_RNA (1)...(19): siRNA sense strand
ccacccaccuggagagcau

SEQ ID NO: 1181836 - RNA, 19 nt, Homo sapiens
  misc_RNA (1)...(19): siRNA sense strand
ggaggaagagaugguugaa

SEQ ID NO: 1181837 - RNA, 19 nt, Homo sapiens
  misc_RNA (1)...(19): siRNA sense strand
ggaggcaagaggaccaaga

SEQ ID NO: 1181838 - RNA, 19 nt, Homo sapiens
  misc_RNA (1)...(19): siRNA sense strand
cgucagcaguggcaccaau

SEQ ID NO: 1181839 - RNA, 19 nt, Homo sapiens
  misc_RNA (1)...(19): siRNA sense strand
gggaggcacuacgcaagau

SEQ ID NO: 1181840 - RNA, 19 nt, Homo sapiens
  misc_RNA (1)...(19): siRNA sense strand
gcaacguacacccuggaaa

SEQ ID NO: 1181841 - RNA, 19 nt, Homo sapiens
  misc_RNA (1)...(19): siRNA sense strand
gagcagcgaggaggagaga

SEQ ID NO: 1181842 - RNA, 19 nt, Homo sapiens
  misc_RNA (1)...(19): siRNA sense strand
ggccagauaccaucaguac

SEQ ID NO: 1181843 - RNA, 19 nt, Homo sapiens
  misc_RNA (1)...(19): siRNA sense strand
guggagcugggaugacaua

SEQ ID NO: 1181844 - RNA, 19 nt, Homo sapiens
  misc_RNA (1)...(19): siRNA sense strand
agacaauggauguggauau

SEQ ID NO: 1181845 - RNA, 19 nt, Homo sapiens
  misc_RNA (1)...(19): siRNA sense strand
caggcugagucuccucuug

SEQ ID NO: 1181846 - RNA, 19 nt, Homo sapiens
  misc_RNA (1)...(19): siRNA sense strand
ucauugaacgagcaacgua

SEQ ID NO: 1181847 - RNA, 19 nt, Homo sapiens
  misc_RNA (1)...(19): siRNA sense strand
caucaagcgcgcagacaug

SEQ ID NO: 1181848 - RNA, 19 nt, Homo sapiens
  misc_RNA (1)...(19): siRNA sense strand
gcuacaguguugaagacau

SEQ ID NO: 1181849 - RNA, 19 nt, Homo sapiens
  misc_RNA (1)...(19): siRNA sense strand
gaagaacaccuguauauuc

SEQ ID NO: 1181850 - RNA, 19 nt, Homo sapiens
  misc_RNA (1)...(19): siRNA sense strand
gcaaauaaguuggugaaau

SEQ ID NO: 1181851 - RNA, 19 nt, Homo sapiens
  misc_RNA (1)...(19): siRNA sense strand
gaacaccuguauauucuug

SEQ ID NO: 1181852 - RNA, 19 nt, Homo sapiens
  misc_RNA (1)...(19): siRNA sense strand
caacgacuaugaagaauuc

SEQ ID NO: 1181853 - RNA, 19 nt, Homo sapiens
  misc_RNA (1)...(19): siRNA sense strand
agaaugaugucuucgauuu

SEQ ID NO: 1181854 - RNA, 19 nt, Homo sapiens
  misc_RNA (1)...(19): siRNA sense strand
gcaccuggaugaugaguau

SEQ ID NO: 1181855 - RNA, 19 nt, Homo sapiens
  misc_RNA (1)...(19): siRNA sense strand
ccaagcaccuggaugauga

SEQ ID NO: 1181856 - RNA, 19 nt, Homo sapiens
  misc_RNA (1)...(19): siRNA sense strand
cggaaacacuugccaauga

SEQ ID NO: 1181857 - RNA, 19 nt, Homo sapiens
  misc_RNA (1)...(19): siRNA sense strand
agaaguaccuggaauacaa

SEQ ID NO: 1181858 - RNA, 19 nt, Homo sapiens
  misc_RNA (1)...(19): siRNA sense strand
gagcugggaugacauacaa

SEQ ID NO: 1181859 - RNA, 19 nt, Homo sapiens
  misc_RNA (1)...(19): siRNA sense strand
ugaaggagaucgacaagga

SEQ ID NO: 1181860 - RNA, 19 nt, Homo sapiens
  misc_RNA (1)...(19): siRNA sense strand
gcgcagacaugcugaagga

SEQ ID NO: 1181861 - RNA, 19 nt, Homo sapiens
  misc_RNA (1)...(19): siRNA sense strand
gugaaauaccugaugauua

SEQ ID NO: 1181862 - RNA, 19 nt, Homo sapiens
  misc_RNA (1)...(19): siRNA sense strand
gcagaccucccagauguua

SEQ ID NO: 1181863 - RNA, 19 nt, Homo sapiens
  misc_RNA (1)...(19): siRNA sense strand
ggagagggcaaauaaguug

SEQ ID NO: 1181864 - RNA, 19 nt, Homo sapiens
  misc_RNA (1)...(19): siRNA sense strand
ggaagaacaccuguauauu

SEQ ID NO: 1181865 - RNA, 19 nt, Homo sapiens
  misc_RNA (1)...(19): siRNA sense strand
ucggaaagcuacaguguug

SEQ ID NO: 1181866 - RNA, 19 nt, Homo sapiens
  misc_RNA (1)...(19): siRNA sense strand
gaugaacauuucccugaga

SEQ ID NO: 1181867 - RNA, 19 nt, Homo sapiens
  misc_RNA (1)...(19): siRNA sense strand
gacaauggauguggauaug

SEQ ID NO: 1181868 - RNA, 19 nt, Homo sapiens
  misc_RNA (1)...(19): siRNA sense strand
ggaugaugcuuucaagaca

SEQ ID NO: 1181869 - RNA, 19 nt, Homo sapiens
  misc_RNA (1)...(19): siRNA sense strand
ccgcagaccucccagaugu

SEQ ID NO: 1181870 - RNA, 19 nt, Homo sapiens
  misc_RNA (1)...(19): siRNA sense strand
gaacauuucccugagauca

SEQ ID NO: 1181871 - RNA, 19 nt, Homo sapiens
  misc_RNA (1)...(19): siRNA sense strand
gagcaucacagcccucauu

SEQ ID NO: 1181872 - RNA, 19 nt, Homo sapiens
  misc_RNA (1)...(19): siRNA sense strand
cagagaauaugaugaacau

SEQ ID NO: 1181873 - RNA, 19 nt, Homo sapiens
  misc_RNA (1)...(19): siRNA sense strand
gcaacccaccugaguauga

SEQ ID NO: 1181874 - RNA, 19 nt, Homo sapiens
  misc_RNA (1)...(19): siRNA sense strand
ggaaacacuugccaaugag

SEQ ID NO: 1181875 - RNA, 19 nt, Homo sapiens
  misc_RNA (1)...(19): siRNA sense strand
caaggaagaacaccuguau

SEQ ID NO: 1181876 - RNA, 19 nt, Homo sapiens
  misc_RNA (1)...(19): siRNA sense strand
ggaaagcuacaguguugaa

SEQ ID NO: 1181877 - RNA, 19 nt, Homo sapiens
  misc_RNA (1)...(19): siRNA sense strand
gaugaugcuuucaagacaa

SEQ ID NO: 1181878 - RNA, 19 nt, Homo sapiens
  misc_RNA (1)...(19): siRNA sense strand
ugacauccauauccucaga

SEQ ID NO: 1181879 - RNA, 19 nt, Homo sapiens
  misc_RNA (1)...(19): siRNA sense strand
caacccaccugaguaugaa

SEQ ID NO: 1181880 - RNA, 19 nt, Homo sapiens
  misc_RNA (1)...(19): siRNA sense strand
gcaagaggaccaagaaguc

SEQ ID NO: 1181881 - RNA, 19 nt, Homo sapiens
  misc_RNA (1)...(19): siRNA sense strand
ggaaggcucauuucuugga

SEQ ID NO: 1181882 - RNA, 19 nt, Homo sapiens
  misc_RNA (1)...(19): siRNA sense strand
ggaugaggguagcgacgaa

SEQ ID NO: 1181883 - RNA, 19 nt, Homo sapiens
  misc_RNA (1)...(19): siRNA sense strand
caugagaccagcaagauga

SEQ ID NO: 1181884 - RNA, 19 nt, Homo sapiens
  misc_RNA (1)...(19): siRNA sense strand
gcaacgacuaugaagaauu

SEQ ID NO: 1181885 - RNA, 19 nt, Homo sapiens
  misc_RNA (1)...(19): siRNA sense strand
ccagaaugaugucuucgau

SEQ ID NO: 1181886 - RNA, 19 nt, Homo sapiens
  misc_RNA (1)...(19): siRNA sense strand
cuacaguguugaagacaug

SEQ ID NO: 1181887 - RNA, 19 nt, Homo sapiens
  misc_RNA (1)...(19): siRNA sense strand
cagauaccaucaguacauu

SEQ ID NO: 1181888 - RNA, 19 nt, Homo sapiens
  misc_RNA (1)...(19): siRNA sense strand
auggaaggcucauuucuug

SEQ ID NO: 1181889 - RNA, 19 nt, Homo sapiens
  misc_RNA (1)...(19): siRNA sense strand
ggagaucgacaaggaagaa

SEQ ID NO: 1181890 - RNA, 19 nt, Homo sapiens
  misc_RNA (1)...(19): siRNA sense strand
gaaggagaucgacaaggaa

SEQ ID NO: 1181891 - RNA, 19 nt, Homo sapiens
  misc_RNA (1)...(19): siRNA sense strand
ggguggagccucagaaugu

SEQ ID NO: 1181892 - RNA, 19 nt, Homo sapiens
  misc_RNA (1)...(19): siRNA sense strand
ggugaaauaccugaugauu

SEQ ID NO: 1181893 - RNA, 19 nt, Homo sapiens
  misc_RNA (1)...(19): siRNA sense strand
cagaugacuuugugaagca

SEQ ID NO: 1181894 - RNA, 19 nt, Homo sapiens
  misc_RNA (1)...(19): siRNA sense strand
cagcucgccuccuuggaaa

SEQ ID NO: 1181895 - RNA, 19 nt, Homo sapiens
  misc_RNA (1)...(19): siRNA sense strand
ugaagaauucggugcguuu

SEQ ID NO: 1181896 - RNA, 19 nt, Homo sapiens
  misc_RNA (1)...(19): siRNA sense strand
ccagauaccaucaguacau

SEQ ID NO: 1181897 - RNA, 19 nt, Homo sapiens
  misc_RNA (1)...(19): siRNA sense strand
gaugagggcccagaugaau

SEQ ID NO: 1181898 - RNA, 19 nt, Homo sapiens
  misc_RNA (1)...(19): siRNA sense strand
aggaagaacaccuguauau

SEQ ID NO: 1181899 - RNA, 19 nt, Homo sapiens
  misc_RNA (1)...(19): siRNA sense strand
ggauccaccugaaggagau

SEQ ID NO: 1181900 - RNA, 19 nt, Homo sapiens
  misc_RNA (1)...(19): siRNA sense strand
gcagcuggauccggaaaca

SEQ ID NO: 1181901 - RNA, 19 nt, Homo sapiens
  misc_RNA (1)...(19): siRNA sense strand
gggaugaggacggagauuu

SEQ ID NO: 1181902 - RNA, 19 nt, Homo sapiens
  misc_RNA (1)...(19): siRNA sense strand
cagaugagggcccagauga

SEQ ID NO: 1181903 - RNA, 19 nt, Homo sapiens
  misc_RNA (1)...(19): siRNA sense strand
agaugaggguccugagauu

SEQ ID NO: 1181904 - RNA, 19 nt, Homo sapiens
  misc_RNA (1)...(19): siRNA sense strand
gggcaaauaaguuggugaa

SEQ ID NO: 1181905 - RNA, 19 nt, Homo sapiens
  misc_RNA (1)...(19): siRNA sense strand
gggccagaaugaugucuuc

SEQ ID NO: 1181906 - RNA, 19 nt, Homo sapiens
  misc_RNA (1)...(19): siRNA sense strand
gaggcaagaggaccaagaa

SEQ ID NO: 1181907 - RNA, 19 nt, Homo sapiens
  misc_RNA (1)...(19): siRNA sense strand
gguggagccucagaauguu

SEQ ID NO: 1181908 - RNA, 19 nt, Homo sapiens
  misc_RNA (1)...(19): siRNA sense strand
ugagauucaucgcccagaa

SEQ ID NO: 1181909 - RNA, 19 nt, Homo sapiens
  misc_RNA (1)...(19): siRNA sense strand
ugauuaaggacuacaagaa

SEQ ID NO: 1181910 - RNA, 19 nt, Homo sapiens
  misc_RNA (1)...(19): siRNA sense strand
gaaacacuugccaaugaga

SEQ ID NO: 1181911 - RNA, 19 nt, Homo sapiens
  misc_RNA (1)...(19): siRNA sense strand
cagcaacccaccugaguau

SEQ ID NO: 1181912 - RNA, 19 nt, Homo sapiens
  misc_RNA (1)...(19): siRNA sense strand
gaagaauucggugcguuug

SEQ ID NO: 1181913 - RNA, 19 nt, Homo sapiens
  misc_RNA (1)...(19): siRNA sense strand
gauuaaggacuacaagaag

SEQ ID NO: 1181914 - RNA, 19 nt, Homo sapiens
  misc_RNA (1)...(19): siRNA sense strand
aaugaugucuucgauuuca

SEQ ID NO: 1181915 - RNA, 19 nt, Homo sapiens
  misc_RNA (1)...(19): siRNA sense strand
gcagcgaggaggagagaga

SEQ ID NO: 1181916 - RNA, 19 nt, Homo sapiens
  misc_RNA (1)...(19): siRNA sense strand
gaaugaugucuucgauuuc

SEQ ID NO: 1181917 - RNA, 19 nt, Homo sapiens
  misc_RNA (1)...(19): siRNA sense strand
caagaugaggguccugaga

SEQ ID NO: 1181918 - RNA, 19 nt, Homo sapiens
  misc_RNA (1)...(19): siRNA sense strand
gaagcagaaguaccuggaa

SEQ ID NO: 1181919 - RNA, 19 nt, Homo sapiens
  misc_RNA (1)...(19): siRNA sense strand
gaaggcaacgacuaugaag

SEQ ID NO: 1181920 - RNA, 19 nt, Homo sapiens
  misc_RNA (1)...(19): siRNA sense strand
caggagagggcaaauaagu

SEQ ID NO: 1181921 - RNA, 19 nt, Homo sapiens
  misc_RNA (1)...(19): siRNA sense strand
ggauauggccgaggaacau

SEQ ID NO: 1181922 - RNA, 19 nt, Homo sapiens
  misc_RNA (1)...(19): siRNA sense strand
gcagaaguaccuggaauac

SEQ ID NO: 1181923 - RNA, 19 nt, Homo sapiens
  misc_RNA (1)...(19): siRNA sense strand
aagcagaaguaccuggaau

SEQ ID NO: 1181924 - RNA, 19 nt, Homo sapiens
  misc_RNA (1)...(19): siRNA sense strand
acauuucccugagaucauu

SEQ ID NO: 1181925 - RNA, 19 nt, Homo sapiens
  misc_RNA (1)...(19): siRNA sense strand
ugaaggcaacgacuaugaa

SEQ ID NO: 1181926 - RNA, 19 nt, Homo sapiens
  misc_RNA (1)...(19): siRNA sense strand
gggaggaagagaugguuga

SEQ ID NO: 1181927 - RNA, 19 nt, Homo sapiens
  misc_RNA (1)...(19): siRNA sense strand
ggaugaagcgcugauugga

SEQ ID NO: 1181928 - RNA, 19 nt, Homo sapiens
  misc_RNA (1)...(19): siRNA sense strand
ugagggcccagaugaauau

SEQ ID NO: 1181929 - RNA, 19 nt, Homo sapiens
  misc_RNA (1)...(19): siRNA sense strand
aggcaacgacuaugaagaa

SEQ ID NO: 1181930 - RNA, 19 nt, Homo sapiens
  misc_RNA (1)...(19): siRNA sense strand
uccaggccuucgcaucuua

SEQ ID NO: 1181931 - RNA, 19 nt, Homo sapiens
  misc_RNA (1)...(19): siRNA sense strand
auuaaggacuacaagaaga

SEQ ID NO: 1181932 - RNA, 19 nt, Homo sapiens
  misc_RNA (1)...(19): siRNA sense strand
ugcaggagagggcaaauaa

SEQ ID NO: 1181933 - RNA, 19 nt, Homo sapiens
  misc_RNA (1)...(19): siRNA sense strand
agauguuagucaccaguaa

SEQ ID NO: 1181934 - RNA, 19 nt, Homo sapiens
  misc_RNA (1)...(19): siRNA sense strand
caacguacacccuggaaaa

SEQ ID NO: 1181935 - RNA, 19 nt, Homo sapiens
  misc_RNA (1)...(19): siRNA sense strand
ccacccaccuggagagcau

SEQ ID NO: 1181936 - RNA, 19 nt, Homo sapiens
  misc_RNA (1)...(19): siRNA sense strand
ggaggaagagaugguugaa

SEQ ID NO: 1181937 - RNA, 19 nt, Homo sapiens
  misc_RNA (1)...(19): siRNA sense strand
ggaggcaagaggaccaaga

SEQ ID NO: 1181938 - RNA, 19 nt, Homo sapiens
  misc_RNA (1)...(19): siRNA sense strand
cgucagcaguggcaccaau

SEQ ID NO: 1181939 - RNA, 19 nt, Homo sapiens
  misc_RNA (1)...(19): siRNA sense strand
gggaggcacuacgcaagau

SEQ ID NO: 1181940 - RNA, 19 nt, Homo sapiens
  misc_RNA (1)...(19): siRNA sense strand
gcaacguacacccuggaaa

SEQ ID NO: 1181941 - RNA, 19 nt, Homo sapiens
  misc_RNA (1)...(19): siRNA sense strand
gagcagcgaggaggagaga

SEQ ID NO: 1181942 - RNA, 19 nt, Homo sapiens
  misc_RNA (1)...(19): siRNA sense strand
ggccagauaccaucaguac

SEQ ID NO: 1181943 - RNA, 19 nt, Homo sapiens
  misc_RNA (1)...(19): siRNA sense strand
guggagcugggaugacaua

SEQ ID NO: 1181944 - RNA, 19 nt, Homo sapiens
  misc_RNA (1)...(19): siRNA sense strand
agacaauggauguggauau

SEQ ID NO: 1181945 - RNA, 19 nt, Homo sapiens
  misc_RNA (1)...(19): siRNA sense strand
caggcugagucuccucuug

SEQ ID NO: 1181946 - RNA, 19 nt, Homo sapiens
  misc_RNA (1)...(19): siRNA sense strand
ucauugaacgagcaacgua

SEQ ID NO: 1181947 - RNA, 19 nt, Homo sapiens
  misc_RNA (1)...(19): siRNA sense strand
caucaagcgcgcagacaug

SEQ ID NO: 1181948 - RNA, 19 nt, Homo sapiens
  misc_RNA (1)...(19): siRNA sense strand
gcuacaguguugaagacau

SEQ ID NO: 1181949 - RNA, 19 nt, Homo sapiens
  misc_RNA (1)...(19): siRNA sense strand
gaagaacaccuguauauuc

SEQ ID NO: 1181950 - RNA, 19 nt, Homo sapiens
  misc_RNA (1)...(19): siRNA sense strand
gcaaauaaguuggugaaau

SEQ ID NO: 1181951 - RNA, 19 nt, Homo sapiens
  misc_RNA (1)...(19): siRNA sense strand
gaacaccuguauauucuug

SEQ ID NO: 1181952 - RNA, 19 nt, Homo sapiens
  misc_RNA (1)...(19): siRNA sense strand
caacgacuaugaagaauuc

SEQ ID NO: 1181953 - RNA, 19 nt, Homo sapiens
  misc_RNA (1)...(19): siRNA sense strand
agaaugaugucuucgauuu

SEQ ID NO: 1181954 - RNA, 19 nt, Homo sapiens
  misc_RNA (1)...(19): siRNA sense strand
gcaccuggaugaugaguau

SEQ ID NO: 1181955 - RNA, 19 nt, Homo sapiens
  misc_RNA (1)...(19): siRNA sense strand
ccaagcaccuggaugauga

SEQ ID NO: 1181956 - RNA, 19 nt, Homo sapiens
  misc_RNA (1)...(19): siRNA sense strand
cggaaacacuugccaauga

SEQ ID NO: 1181957 - RNA, 19 nt, Homo sapiens
  misc_RNA (1)...(19): siRNA sense strand
agaaguaccuggaauacaa

SEQ ID NO: 1181958 - RNA, 19 nt, Homo sapiens
  misc_RNA (1)...(19): siRNA sense strand
gagcugggaugacauacaa

SEQ ID NO: 1181959 - RNA, 19 nt, Homo sapiens
  misc_RNA (1)...(19): siRNA sense strand
ugaaggagaucgacaagga

SEQ ID NO: 1181960 - RNA, 19 nt, Homo sapiens
  misc_RNA (1)...(19): siRNA sense strand
gcgcagacaugcugaagga

SEQ ID NO: 1181961 - RNA, 19 nt, Homo sapiens
  misc_RNA (1)...(19): siRNA sense strand
gugaaauaccugaugauua

SEQ ID NO: 1181962 - RNA, 19 nt, Homo sapiens
  misc_RNA (1)...(19): siRNA sense strand
gcagaccucccagauguua

SEQ ID NO: 1181963 - RNA, 19 nt, Homo sapiens
  misc_RNA (1)...(19): siRNA sense strand
ggagagggcaaauaaguug

SEQ ID NO: 1181964 - RNA, 19 nt, Homo sapiens
  misc_RNA (1)...(19): siRNA sense strand
ggaagaacaccuguauauu

SEQ ID NO: 1181965 - RNA, 19 nt, Homo sapiens
  misc_RNA (1)...(19): siRNA sense strand
ucggaaagcuacaguguug

SEQ ID NO: 1181966 - RNA, 19 nt, Homo sapiens
  misc_RNA (1)...(19): siRNA sense strand
gaugaacauuucccugaga

SEQ ID NO: 1181967 - RNA, 19 nt, Homo sapiens
  misc_RNA (1)...(19): siRNA sense strand
gacaauggauguggauaug

SEQ ID NO: 1181968 - RNA, 19 nt, Homo sapiens
  misc_RNA (1)...(19): siRNA sense strand
ggaugaugcuuucaagaca

SEQ ID NO: 1181969 - RNA, 19 nt, Homo sapiens
  misc_RNA (1)...(19): siRNA sense strand
ccgcagaccucccagaugu

SEQ ID NO: 1181970 - RNA, 19 nt, Homo sapiens
  misc_RNA (1)...(19): siRNA sense strand
gaacauuucccugagauca

SEQ ID NO: 1181971 - RNA, 19 nt, Homo sapiens
  misc_RNA (1)...(19): siRNA sense strand
gagcaucacagcccucauu

SEQ ID NO: 1181972 - RNA, 19 nt, Homo sapiens
  misc_RNA (1)...(19): siRNA sense strand
cagagaauaugaugaacau

SEQ ID NO: 1181973 - RNA, 19 nt, Homo sapiens
  misc_RNA (1)...(19): siRNA sense strand
gcaacccaccugaguauga

SEQ ID NO: 1181974 - RNA, 19 nt, Homo sapiens
  misc_RNA (1)...(19): siRNA sense strand
ggaaacacuugccaaugag

SEQ ID NO: 1181975 - RNA, 19 nt, Homo sapiens
  misc_RNA (1)...(19): siRNA sense strand
caaggaagaacaccuguau

SEQ ID NO: 1181976 - RNA, 19 nt, Homo sapiens
  misc_RNA (1)...(19): siRNA sense strand
ggaaagcuacaguguugaa

SEQ ID NO: 1181977 - RNA, 19 nt, Homo sapiens
  misc_RNA (1)...(19): siRNA sense strand
gaugaugcuuucaagacaa

SEQ ID NO: 1181978 - RNA, 19 nt, Homo sapiens
  misc_RNA (1)...(19): siRNA sense strand
ugacauccauauccucaga

SEQ ID NO: 1181979 - RNA, 19 nt, Homo sapiens
  misc_RNA (1)...(19): siRNA sense strand
caacccaccugaguaugaa

SEQ ID NO: 1181980 - RNA, 19 nt, Homo sapiens
  misc_RNA (1)...(19): siRNA sense strand
gcaagaggaccaagaaguc

SEQ ID NO: 1181981 - RNA, 19 nt, Homo sapiens
  misc_RNA (1)...(19): siRNA sense strand
ggaaggcucauuucuugga

SEQ ID NO: 1181982 - RNA, 19 nt, Homo sapiens
  misc_RNA (1)...(19): siRNA sense strand
ggaugaggguagcgacgaa

SEQ ID NO: 1181983 - RNA, 19 nt, Homo sapiens
  misc_RNA (1)...(19): siRNA sense strand
caugagaccagcaagauga

SEQ ID NO: 1181984 - RNA, 19 nt, Homo sapiens
  misc_RNA (1)...(19): siRNA sense strand
gcaacgacuaugaagaauu

SEQ ID NO: 1181985 - RNA, 19 nt, Homo sapiens
  misc_RNA (1)...(19): siRNA sense strand
ccagaaugaugucuucgau

SEQ ID NO: 1181986 - RNA, 19 nt, Homo sapiens
  misc_RNA (1)...(19): siRNA sense strand
cuacaguguugaagacaug

SEQ ID NO: 1181987 - RNA, 19 nt, Homo sapiens
  misc_RNA (1)...(19): siRNA sense strand
cagauaccaucaguacauu

SEQ ID NO: 1181988 - RNA, 19 nt, Homo sapiens
  misc_RNA (1)...(19): siRNA sense strand
auggaaggcucauuucuug

SEQ ID NO: 1181989 - RNA, 19 nt, Homo sapiens
  misc_RNA (1)...(19): siRNA sense strand
ggagaucgacaaggaagaa

SEQ ID NO: 1181990 - RNA, 19 nt, Homo sapiens
  misc_RNA (1)...(19): siRNA sense strand
gaaggagaucgacaaggaa

SEQ ID NO: 1181991 - RNA, 19 nt, Homo sapiens
  misc_RNA (1)...(19): siRNA sense strand
ggguggagccucagaaugu

SEQ ID NO: 1181992 - RNA, 19 nt, Homo sapiens
  misc_RNA (1)...(19): siRNA sense strand
ggugaaauaccugaugauu

SEQ ID NO: 1181993 - RNA, 19 nt, Homo sapiens
  misc_RNA (1)...(19): siRNA sense strand
cagaugacuuugugaagca

SEQ ID NO: 1181994 - RNA, 19 nt, Homo sapiens
  misc_RNA (1)...(19): siRNA sense strand
cagcucgccuccuuggaaa

SEQ ID NO: 1181995 - RNA, 19 nt, Homo sapiens
  misc_RNA (1)...(19): siRNA sense strand
ugaagaauucggugcguuu

SEQ ID NO: 1181996 - RNA, 19 nt, Homo sapiens
  misc_RNA (1)...(19): siRNA sense strand
ccagauaccaucaguacau

SEQ ID NO: 1181997 - RNA, 19 nt, Homo sapiens
  misc_RNA (1)...(19): siRNA sense strand
gaugagggcccagaugaau

SEQ ID NO: 1181998 - RNA, 19 nt, Homo sapiens
  misc_RNA (1)...(19): siRNA sense strand
aggaagaacaccuguauau

SEQ ID NO: 1181999 - RNA, 19 nt, Homo sapiens
  misc_RNA (1)...(19): siRNA sense strand
ggauccaccugaaggagau

SEQ ID NO: 1182000 - RNA, 19 nt, Homo sapiens
  misc_RNA (1)...(19): siRNA sense strand
gcagcuggauccggaaaca

SEQ ID NO: 1182001 - RNA, 19 nt, Homo sapiens
  misc_RNA (1)...(19): siRNA sense strand
gggaugaggacggagauuu

SEQ ID NO: 1182002 - RNA, 19 nt, Homo sapiens
  misc_RNA (1)...(19): siRNA sense strand
cagaugagggcccagauga

SEQ ID NO: 1182003 - RNA, 19 nt, Homo sapiens
  misc_RNA (1)...(19): siRNA sense strand
agaugaggguccugagauu

SEQ ID NO: 1182004 - RNA, 19 nt, Homo sapiens
  misc_RNA (1)...(19): siRNA sense strand
gggcaaauaaguuggugaa

SEQ ID NO: 1182005 - RNA, 19 nt, Homo sapiens
  misc_RNA (1)...(19): siRNA sense strand
gggccagaaugaugucuuc

SEQ ID NO: 1182006 - RNA, 19 nt, Homo sapiens
  misc_RNA (1)...(19): siRNA sense strand
gaggcaagaggaccaagaa

SEQ ID NO: 1182007 - RNA, 19 nt, Homo sapiens
  misc_RNA (1)...(19): siRNA sense strand
gguggagccucagaauguu

SEQ ID NO: 1182008 - RNA, 19 nt, Homo sapiens
  misc_RNA (1)...(19): siRNA sense strand
ugagauucaucgcccagaa

SEQ ID NO: 1182009 - RNA, 19 nt, Homo sapiens
  misc_RNA (1)...(19): siRNA sense strand
ugauuaaggacuacaagaa

SEQ ID NO: 1182010 - RNA, 19 nt, Homo sapiens
  misc_RNA (1)...(19): siRNA sense strand
gaaacacuugccaaugaga

SEQ ID NO: 1182011 - RNA, 19 nt, Homo sapiens
  misc_RNA (1)...(19): siRNA sense strand
cagcaacccaccugaguau

SEQ ID NO: 1182012 - RNA, 19 nt, Homo sapiens
  misc_RNA (1)...(19): siRNA sense strand
gaagaauucggugcguuug

SEQ ID NO: 1182013 - RNA, 19 nt, Homo sapiens
  misc_RNA (1)...(19): siRNA sense strand
gauuaaggacuacaagaag

SEQ ID NO: 1182014 - RNA, 19 nt, Homo sapiens
  misc_RNA (1)...(19): siRNA sense strand
aaugaugucuucgauuuca

SEQ ID NO: 1182015 - RNA, 19 nt, Homo sapiens
  misc_RNA (1)...(19): siRNA sense strand
gcagcgaggaggagagaga

SEQ ID NO: 1182016 - RNA, 19 nt, Homo sapiens
  misc_RNA (1)...(19): siRNA sense strand
gaaugaugucuucgauuuc

SEQ ID NO: 1182017 - RNA, 19 nt, Homo sapiens
  misc_RNA (1)...(19): siRNA sense strand
caagaugaggguccugaga

SEQ ID NO: 1182018 - RNA, 19 nt, Homo sapiens
  misc_RNA (1)...(19): siRNA sense strand
gaagcagaaguaccuggaa

SEQ ID NO: 1182019 - RNA, 19 nt, Homo sapiens
  misc_RNA (1)...(19): siRNA sense strand
gaaggcaacgacuaugaag

SEQ ID NO: 1182020 - RNA, 19 nt, Homo sapiens
  misc_RNA (1)...(19): siRNA sense strand
caggagagggcaaauaagu

SEQ ID NO: 1182021 - RNA, 19 nt, Homo sapiens
  misc_RNA (1)...(19): siRNA sense strand
ggauauggccgaggaacau

SEQ ID NO: 1182022 - RNA, 19 nt, Homo sapiens
  misc_RNA (1)...(19): siRNA sense strand
gcagaaguaccuggaauac

SEQ ID NO: 1182023 - RNA, 19 nt, Homo sapiens
  misc_RNA (1)...(19): siRNA sense strand
aagcagaaguaccuggaau

SEQ ID NO: 1182024 - RNA, 19 nt, Homo sapiens
  misc_RNA (1)...(19): siRNA sense strand
acauuucccugagaucauu

SEQ ID NO: 1182025 - RNA, 19 nt, Homo sapiens
  misc_RNA (1)...(19): siRNA sense strand
ugaaggcaacgacuaugaa

SEQ ID NO: 1182026 - RNA, 19 nt, Homo sapiens
  misc_RNA (1)...(19): siRNA sense strand
gggaggaagagaugguuga

SEQ ID NO: 1182027 - RNA, 19 nt, Homo sapiens
  misc_RNA (1)...(19): siRNA sense strand
ggaugaagcgcugauugga

SEQ ID NO: 1182028 - RNA, 19 nt, Homo sapiens
  misc_RNA (1)...(19): siRNA sense strand
ugagggcccagaugaauau

SEQ ID NO: 1182029 - RNA, 19 nt, Homo sapiens
  misc_RNA (1)...(19): siRNA sense strand
aggcaacgacuaugaagaa

SEQ ID NO: 1182030 - RNA, 19 nt, Homo sapiens
  misc_RNA (1)...(19): siRNA sense strand
uccaggccuucgcaucuua

SEQ ID NO: 1182031 - RNA, 19 nt, Homo sapiens
  misc_RNA (1)...(19): siRNA sense strand
auuaaggacuacaagaaga

SEQ ID NO: 1182032 - RNA, 19 nt, Homo sapiens
  misc_RNA (1)...(19): siRNA sense strand
ugcaggagagggcaaauaa

SEQ ID NO: 1182033 - RNA, 19 nt, Homo sapiens
  misc_RNA (1)...(19): siRNA sense strand
agauguuagucaccaguaa

SEQ ID NO: 1182034 - RNA, 19 nt, Homo sapiens
  misc_RNA (1)...(19): siRNA sense strand
caacguacacccuggaaaa

SEQ ID NO: 1182035 - RNA, 19 nt, Homo sapiens
  misc_RNA (1)...(19): siRNA sense strand
ccacccaccuggagagcau

SEQ ID NO: 1182036 - RNA, 19 nt, Homo sapiens
  misc_RNA (1)...(19): siRNA sense strand
ggaggaagagaugguugaa

SEQ ID NO: 1182037 - RNA, 19 nt, Homo sapiens
  misc_RNA (1)...(19): siRNA sense strand
ggaggcaagaggaccaaga

SEQ ID NO: 1182038 - RNA, 19 nt, Homo sapiens
  misc_RNA (1)...(19): siRNA sense strand
cgucagcaguggcaccaau

SEQ ID NO: 1182039 - RNA, 19 nt, Homo sapiens
  misc_RNA (1)...(19): siRNA sense strand
gggaggcacuacgcaagau

SEQ ID NO: 1182040 - RNA, 19 nt, Homo sapiens
  misc_RNA (1)...(19): siRNA sense strand
gcaacguacacccuggaaa

SEQ ID NO: 1182041 - RNA, 19 nt, Homo sapiens
  misc_RNA (1)...(19): siRNA sense strand
gagcagcgaggaggagaga

SEQ ID NO: 1182042 - RNA, 19 nt, Homo sapiens
  misc_RNA (1)...(19): siRNA sense strand
ggccagauaccaucaguac

SEQ ID NO: 1182043 - RNA, 19 nt, Homo sapiens
  misc_RNA (1)...(19): siRNA sense strand
guggagcugggaugacaua

SEQ ID NO: 1182044 - RNA, 19 nt, Homo sapiens
  misc_RNA (1)...(19): siRNA sense strand
agacaauggauguggauau

SEQ ID NO: 1182045 - RNA, 19 nt, Homo sapiens
  misc_RNA (1)...(19): siRNA sense strand
caggcugagucuccucuug

SEQ ID NO: 1182046 - RNA, 19 nt, Homo sapiens
  misc_RNA (1)...(19): siRNA sense strand
ucauugaacgagcaacgua

SEQ ID NO: 1182047 - RNA, 19 nt, Homo sapiens
  misc_RNA (1)...(19): siRNA sense strand
caucaagcgcgcagacaug

SEQ ID NO: 1182048 - RNA, 19 nt, Homo sapiens
  misc_RNA (1)...(19): siRNA sense strand
gcuacaguguugaagacau

SEQ ID NO: 1182049 - RNA, 19 nt, Homo sapiens
  misc_RNA (1)...(19): siRNA sense strand
gcacagaaaugaaaugaaa

SEQ ID NO: 1182050 - RNA, 19 nt, Homo sapiens
  misc_RNA (1)...(19): siRNA sense strand
gaaagaaaccauugacuua

SEQ ID NO: 1182051 - RNA, 19 nt, Homo sapiens
  misc_RNA (1)...(19): siRNA sense strand
ugacauagcuuccauuauu

SEQ ID NO: 1182052 - RNA, 19 nt, Homo sapiens
  misc_RNA (1)...(19): siRNA sense strand
aaaccuggaugaagaauua

SEQ ID NO: 1182053 - RNA, 19 nt, Homo sapiens
  misc_RNA (1)...(19): siRNA sense strand
uaugugaacuggagaaaua

SEQ ID NO: 1182054 - RNA, 19 nt, Homo sapiens
  misc_RNA (1)...(19): siRNA sense strand
gaaauacgagagaggauua

SEQ ID NO: 1182055 - RNA, 19 nt, Homo sapiens
  misc_RNA (1)...(19): siRNA sense strand
gaagaaggcaucaguaaug

SEQ ID NO: 1182056 - RNA, 19 nt, Homo sapiens
  misc_RNA (1)...(19): siRNA sense strand
acaaagagaugguagacua

SEQ ID NO: 1182057 - RNA, 19 nt, Homo sapiens
  misc_RNA (1)...(19): siRNA sense strand
gaccagauguacauuauug

SEQ ID NO: 1182058 - RNA, 19 nt, Homo sapiens
  misc_RNA (1)...(19): siRNA sense strand
caaccgagcuugcacuuca

SEQ ID NO: 1182059 - RNA, 19 nt, Homo sapiens
  misc_RNA (1)...(19): siRNA sense strand
gaccaacaaucgaauaaga

SEQ ID NO: 1182060 - RNA, 19 nt, Homo sapiens
  misc_RNA (1)...(19): siRNA sense strand
gaggauggauuacagaaau

SEQ ID NO: 1182061 - RNA, 19 nt, Homo sapiens
  misc_RNA (1)...(19): siRNA sense strand
gacaguagaggauggauua

SEQ ID NO: 1182062 - RNA, 19 nt, Homo sapiens
  misc_RNA (1)...(19): siRNA sense strand
gugcauagacauacuguua

SEQ ID NO: 1182063 - RNA, 19 nt, Homo sapiens
  misc_RNA (1)...(19): siRNA sense strand
ugccauaucuucucuauug

SEQ ID NO: 1182064 - RNA, 19 nt, Homo sapiens
  misc_RNA (1)...(19): siRNA sense strand
gagaccagauguacauuau

SEQ ID NO: 1182065 - RNA, 19 nt, Homo sapiens
  misc_RNA (1)...(19): siRNA sense strand
gaaggcaucaguaaugaaa

SEQ ID NO: 1182066 - RNA, 19 nt, Homo sapiens
  misc_RNA (1)...(19): siRNA sense strand
gaacuuugucagagaauaa

SEQ ID NO: 1182067 - RNA, 19 nt, Homo sapiens
  misc_RNA (1)...(19): siRNA sense strand
gcauagacauacuguuaga

SEQ ID NO: 1182068 - RNA, 19 nt, Homo sapiens
  misc_RNA (1)...(19): siRNA sense strand
cgagagaggauuaaucuuu

SEQ ID NO: 1182069 - RNA, 19 nt, Homo sapiens
  misc_RNA (1)...(19): siRNA sense strand
gaacuagaacugaaggauu

SEQ ID NO: 1182070 - RNA, 19 nt, Homo sapiens
  misc_RNA (1)...(19): siRNA sense strand
ugucugugcuuuaagaaua

SEQ ID NO: 1182071 - RNA, 19 nt, Homo sapiens
  misc_RNA (1)...(19): siRNA sense strand
ugaaguaccagaucauuaa

SEQ ID NO: 1182072 - RNA, 19 nt, Homo sapiens
  misc_RNA (1)...(19): siRNA sense strand
ugaagaagcagauuccuuu

SEQ ID NO: 1182073 - RNA, 19 nt, Homo sapiens
  misc_RNA (1)...(19): siRNA sense strand
gccaugagcuaucuaagga

SEQ ID NO: 1182074 - RNA, 19 nt, Homo sapiens
  misc_RNA (1)...(19): siRNA sense strand
ggacuuugaacguucuuua

SEQ ID NO: 1182075 - RNA, 19 nt, Homo sapiens
  misc_RNA (1)...(19): siRNA sense strand
guacacgcuugaaagagua

SEQ ID NO: 1182076 - RNA, 19 nt, Homo sapiens
  misc_RNA (1)...(19): siRNA sense strand
ggaugucugugcuuuaaga

SEQ ID NO: 1182077 - RNA, 19 nt, Homo sapiens
  misc_RNA (1)...(19): siRNA sense strand
uaagaugucugguuugucu

SEQ ID NO: 1182078 - RNA, 19 nt, Homo sapiens
  misc_RNA (1)...(19): siRNA sense strand
gagauuauuugguagcaau

SEQ ID NO: 1182079 - RNA, 19 nt, Homo sapiens
  misc_RNA (1)...(19): siRNA sense strand
acuauaagaugucugguuu

SEQ ID NO: 1182080 - RNA, 19 nt, Homo sapiens
  misc_RNA (1)...(19): siRNA sense strand
gaaaagccauucagagaug

SEQ ID NO: 1182081 - RNA, 19 nt, Homo sapiens
  misc_RNA (1)...(19): siRNA sense strand
ggcuggagauuauuuggua

SEQ ID NO: 1182082 - RNA, 19 nt, Homo sapiens
  misc_RNA (1)...(19): siRNA sense strand
uauaugugguccuucauuu

SEQ ID NO: 1182083 - RNA, 19 nt, Homo sapiens
  misc_RNA (1)...(19): siRNA sense strand
gaauaagacggacagaaga

SEQ ID NO: 1182084 - RNA, 19 nt, Homo sapiens
  misc_RNA (1)...(19): siRNA sense strand
cagucuggauuaucuguua

SEQ ID NO: 1182085 - RNA, 19 nt, Homo sapiens
  misc_RNA (1)...(19): siRNA sense strand
gguagcaauugaagagaaa

SEQ ID NO: 1182086 - RNA, 19 nt, Homo sapiens
  misc_RNA (1)...(19): siRNA sense strand
cauauucucuguaguccuu

SEQ ID NO: 1182087 - RNA, 19 nt, Homo sapiens
  misc_RNA (1)...(19): siRNA sense strand
aacuagaacugaaggauuu

SEQ ID NO: 1182088 - RNA, 19 nt, Homo sapiens
  misc_RNA (1)...(19): siRNA sense strand
gaaccucggcuguugauuc

SEQ ID NO: 1182089 - RNA, 19 nt, Homo sapiens
  misc_RNA (1)...(19): siRNA sense strand
uaccagaccgguucucuua

SEQ ID NO: 1182090 - RNA, 19 nt, Homo sapiens
  misc_RNA (1)...(19): siRNA sense strand
gagagaggauuaaucuuuu

SEQ ID NO: 1182091 - RNA, 19 nt, Homo sapiens
  misc_RNA (1)...(19): siRNA sense strand
cagugcagcuguacaaaga

SEQ ID NO: 1182092 - RNA, 19 nt, Homo sapiens
  misc_RNA (1)...(19): siRNA sense strand
ggguggaauuuguauauug

SEQ ID NO: 1182093 - RNA, 19 nt, Homo sapiens
  misc_RNA (1)...(19): siRNA sense strand
ggagggaccauucagcaaa

SEQ ID NO: 1182094 - RNA, 19 nt, Homo sapiens
  misc_RNA (1)...(19): siRNA sense strand
cgaaagaaaccauugacuu

SEQ ID NO: 1182095 - RNA, 19 nt, Homo sapiens
  misc_RNA (1)...(19): siRNA sense strand
gacauagcuuccauuauuc

SEQ ID NO: 1182096 - RNA, 19 nt, Homo sapiens
  misc_RNA (1)...(19): siRNA sense strand
cagaagaaggcaucaguaa

SEQ ID NO: 1182097 - RNA, 19 nt, Homo sapiens
  misc_RNA (1)...(19): siRNA sense strand
gaggaauucucacuauugg

SEQ ID NO: 1182098 - RNA, 19 nt, Homo sapiens
  misc_RNA (1)...(19): siRNA sense strand
guugguauguggcuucauu

SEQ ID NO: 1182099 - RNA, 19 nt, Homo sapiens
  misc_RNA (1)...(19): siRNA sense strand
gagaugaaguugguaugug

SEQ ID NO: 1182100 - RNA, 19 nt, Homo sapiens
  misc_RNA (1)...(19): siRNA sense strand
cuacaugguugucaaaucu

SEQ ID NO: 1182101 - RNA, 19 nt, Homo sapiens
  misc_RNA (1)...(19): siRNA sense strand
cucguuggcugcacaaaua

SEQ ID NO: 1182102 - RNA, 19 nt, Homo sapiens
  misc_RNA (1)...(19): siRNA sense strand
cuacauuucuacgugcuua

SEQ ID NO: 1182103 - RNA, 19 nt, Homo sapiens
  misc_RNA (1)...(19): siRNA sense strand
ggaaagcugugggcaccuu

SEQ ID NO: 1182104 - RNA, 19 nt, Homo sapiens
  misc_RNA (1)...(19): siRNA sense strand
uuucacagcuugagucaga

SEQ ID NO: 1182105 - RNA, 19 nt, Homo sapiens
  misc_RNA (1)...(19): siRNA sense strand
caaaucuguugaauugaug

SEQ ID NO: 1182106 - RNA, 19 nt, Homo sapiens
  misc_RNA (1)...(19): siRNA sense strand
gaacaucggaggaucugau

SEQ ID NO: 1182107 - RNA, 19 nt, Homo sapiens
  misc_RNA (1)...(19): siRNA sense strand
gcuggauacuucuggguuu

SEQ ID NO: 1182108 - RNA, 19 nt, Homo sapiens
  misc_RNA (1)...(19): siRNA sense strand
gguggaauuuguauauugu

SEQ ID NO: 1182109 - RNA, 19 nt, Homo sapiens
  misc_RNA (1)...(19): siRNA sense strand
ugaacagucuggauuaucu

SEQ ID NO: 1182110 - RNA, 19 nt, Homo sapiens
  misc_RNA (1)...(19): siRNA sense strand
gcuggaaccuggagagaag

SEQ ID NO: 1182111 - RNA, 19 nt, Homo sapiens
  misc_RNA (1)...(19): siRNA sense strand
gaaaagauaccaguguuaa

SEQ ID NO: 1182112 - RNA, 19 nt, Homo sapiens
  misc_RNA (1)...(19): siRNA sense strand
ccgguucucuuacaucuga

SEQ ID NO: 1182113 - RNA, 19 nt, Homo sapiens
  misc_RNA (1)...(19): siRNA sense strand
cggaggaucugauaaaugc

SEQ ID NO: 1182114 - RNA, 19 nt, Homo sapiens
  misc_RNA (1)...(19): siRNA sense strand
gaugguagacuauagcaau

SEQ ID NO: 1182115 - RNA, 19 nt, Homo sapiens
  misc_RNA (1)...(19): siRNA sense strand
guauggaugucugugcuuu

SEQ ID NO: 1182116 - RNA, 19 nt, Homo sapiens
  misc_RNA (1)...(19): siRNA sense strand
gaucuugacaugcacagaa

SEQ ID NO: 1182117 - RNA, 19 nt, Homo sapiens
  misc_RNA (1)...(19): siRNA sense strand
uauaagaugucugguuugu

SEQ ID NO: 1182118 - RNA, 19 nt, Homo sapiens
  misc_RNA (1)...(19): siRNA sense strand
gaauacagcuuuucauagg

SEQ ID NO: 1182119 - RNA, 19 nt, Homo sapiens
  misc_RNA (1)...(19): siRNA sense strand
uaauaucacuccuguugag

SEQ ID NO: 1182120 - RNA, 19 nt, Homo sapiens
  misc_RNA (1)...(19): siRNA sense strand
gacaugcacagaaaugaaa

SEQ ID NO: 1182121 - RNA, 19 nt, Homo sapiens
  misc_RNA (1)...(19): siRNA sense strand
aaugggagaucuugacaug

SEQ ID NO: 1182122 - RNA, 19 nt, Homo sapiens
  misc_RNA (1)...(19): siRNA sense strand
caaaauaccuccuguagcu

SEQ ID NO: 1182123 - RNA, 19 nt, Homo sapiens
  misc_RNA (1)...(19): siRNA sense strand
gagaaaagauaccaguguu

SEQ ID NO: 1182124 - RNA, 19 nt, Homo sapiens
  misc_RNA (1)...(19): siRNA sense strand
aagaaggcaucaguaauga

SEQ ID NO: 1182125 - RNA, 19 nt, Homo sapiens
  misc_RNA (1)...(19): siRNA sense strand
cgaauaagacggacagaag

SEQ ID NO: 1182126 - RNA, 19 nt, Homo sapiens
  misc_RNA (1)...(19): siRNA sense strand
cggaggcagucauuccaua

SEQ ID NO: 1182127 - RNA, 19 nt, Homo sapiens
  misc_RNA (1)...(19): siRNA sense strand
gaacagugcauagacauac

SEQ ID NO: 1182128 - RNA, 19 nt, Homo sapiens
  misc_RNA (1)...(19): siRNA sense strand
caucggaggaucugauaaa

SEQ ID NO: 1182129 - RNA, 19 nt, Homo sapiens
  misc_RNA (1)...(19): siRNA sense strand
uuaaggugcuuugugcuaa

SEQ ID NO: 1182130 - RNA, 19 nt, Homo sapiens
  misc_RNA (1)...(19): siRNA sense strand
cguccuaugucuugucuga

SEQ ID NO: 1182131 - RNA, 19 nt, Homo sapiens
  misc_RNA (1)...(19): siRNA sense strand
ugaugucagucuaccagua

SEQ ID NO: 1182132 - RNA, 19 nt, Homo sapiens
  misc_RNA (1)...(19): siRNA sense strand
gaggcuggguggaauuugu

SEQ ID NO: 1182133 - RNA, 19 nt, Homo sapiens
  misc_RNA (1)...(19): siRNA sense strand
cauaagaccaacaaucgaa

SEQ ID NO: 1182134 - RNA, 19 nt, Homo sapiens
  misc_RNA (1)...(19): siRNA sense strand
uggcaugucucccagaugu

SEQ ID NO: 1182135 - RNA, 19 nt, Homo sapiens
  misc_RNA (1)...(19): siRNA sense strand
caaaagugguucagauguu

SEQ ID NO: 1182136 - RNA, 19 nt, Homo sapiens
  misc_RNA (1)...(19): siRNA sense strand
ucaccuugccauacuauaa

SEQ ID NO: 1182137 - RNA, 19 nt, Homo sapiens
  misc_RNA (1)...(19): siRNA sense strand
ggagagaaggcagagcuuu

SEQ ID NO: 1182138 - RNA, 19 nt, Homo sapiens
  misc_RNA (1)...(19): siRNA sense strand
agaagacagucacccaaga

SEQ ID NO: 1182139 - RNA, 19 nt, Homo sapiens
  misc_RNA (1)...(19): siRNA sense strand
aggcaucaguaaugaaauu

SEQ ID NO: 1182140 - RNA, 19 nt, Homo sapiens
  misc_RNA (1)...(19): siRNA sense strand
uaagaccaacaaucgaaua

SEQ ID NO: 1182141 - RNA, 19 nt, Homo sapiens
  misc_RNA (1)...(19): siRNA sense strand
uggcugcacaaauaaauua

SEQ ID NO: 1182142 - RNA, 19 nt, Homo sapiens
  misc_RNA (1)...(19): siRNA sense strand
agaugguacugcaacauuu

SEQ ID NO: 1182143 - RNA, 19 nt, Homo sapiens
  misc_RNA (1)...(19): siRNA sense strand
gagcuugcacuucacuuga

SEQ ID NO: 1182144 - RNA, 19 nt, Homo sapiens
  misc_RNA (1)...(19): siRNA sense strand
ccagaccgguucucuuaca

SEQ ID NO: 1182145 - RNA, 19 nt, Homo sapiens
  misc_RNA (1)...(19): siRNA sense strand
gauauuucguccuaugucu

SEQ ID NO: 1182146 - RNA, 19 nt, Homo sapiens
  misc_RNA (1)...(19): siRNA sense strand
uaaaaggacugaaaacucu

SEQ ID NO: 1182147 - RNA, 19 nt, Homo sapiens
  misc_RNA (1)...(19): siRNA sense strand
aaacucacaucacaguaca

SEQ ID NO: 1182148 - RNA, 19 nt, Homo sapiens
  misc_RNA (1)...(19): siRNA sense strand
gcagucauuccauaugcua

SEQ ID NO: 1182149 - RNA, 19 nt, Homo sapiens
  misc_RNA (1)...(19): siRNA sense strand
caggagagcuggucuuuga

SEQ ID NO: 1182150 - RNA, 19 nt, Homo sapiens
  misc_RNA (1)...(19): siRNA sense strand
gaaggagaauucaaacaga

SEQ ID NO: 1182151 - RNA, 19 nt, Homo sapiens
  misc_RNA (1)...(19): siRNA sense strand
ggacacccaugacuucaaa

SEQ ID NO: 1182152 - RNA, 19 nt, Homo sapiens
  misc_RNA (1)...(19): siRNA sense strand
gaauacaccugguucaaag

SEQ ID NO: 1182153 - RNA, 19 nt, Homo sapiens
  misc_RNA (1)...(19): siRNA sense strand
cgaguaagaaggugauuua

SEQ ID NO: 1182154 - RNA, 19 nt, Homo sapiens
  misc_RNA (1)...(19): siRNA sense strand
gaauaauccugugaaguug

SEQ ID NO: 1182155 - RNA, 19 nt, Homo sapiens
  misc_RNA (1)...(19): siRNA sense strand
agaauaauccugugaaguu

SEQ ID NO: 1182156 - RNA, 19 nt, Homo sapiens
  misc_RNA (1)...(19): siRNA sense strand
caacugguaucaccuucaa

SEQ ID NO: 1182157 - RNA, 19 nt, Homo sapiens
  misc_RNA (1)...(19): siRNA sense strand
ggauagugaugccuacgaa

SEQ ID NO: 1182158 - RNA, 19 nt, Homo sapiens
  misc_RNA (1)...(19): siRNA sense strand
gaaagggacuucgaguaag

SEQ ID NO: 1182159 - RNA, 19 nt, Homo sapiens
  misc_RNA (1)...(19): siRNA sense strand
guucaaagaugggauagug

SEQ ID NO: 1182160 - RNA, 19 nt, Homo sapiens
  misc_RNA (1)...(19): siRNA sense strand
agaaagggacuucgaguaa

SEQ ID NO: 1182161 - RNA, 19 nt, Homo sapiens
  misc_RNA (1)...(19): siRNA sense strand
cauccaagccuacaguuaa

SEQ ID NO: 1182162 - RNA, 19 nt, Homo sapiens
  misc_RNA (1)...(19): siRNA sense strand
gaacaaagaaagggacuuc

SEQ ID NO: 1182163 - RNA, 19 nt, Homo sapiens
  misc_RNA (1)...(19): siRNA sense strand
ucaaacagaccucgucauu

SEQ ID NO: 1182164 - RNA, 19 nt, Homo sapiens
  misc_RNA (1)...(19): siRNA sense strand
ggaagacacugggacauac

SEQ ID NO: 1182165 - RNA, 19 nt, Homo sapiens
  misc_RNA (1)...(19): siRNA sense strand
acacuuguauggucucuga

SEQ ID NO: 1182166 - RNA, 19 nt, Homo sapiens
  misc_RNA (1)...(19): siRNA sense strand
aaacagaccucgucauucc

SEQ ID NO: 1182167 - RNA, 19 nt, Homo sapiens
  misc_RNA (1)...(19): siRNA sense strand
aaagggacuucgaguaaga

SEQ ID NO: 1182168 - RNA, 19 nt, Homo sapiens
  misc_RNA (1)...(19): siRNA sense strand
gggaagacacugggacaua

SEQ ID NO: 1182169 - RNA, 19 nt, Homo sapiens
  misc_RNA (1)...(19): siRNA sense strand
cagcaacucuuccuauguc

SEQ ID NO: 1182170 - RNA, 19 nt, Homo sapiens
  misc_RNA (1)...(19): siRNA sense strand
gcaucugguuugccuauag

SEQ ID NO: 1182171 - RNA, 19 nt, Homo sapiens
  misc_RNA (1)...(19): siRNA sense strand
ggaaggcggcaacagcuau

SEQ ID NO: 1182172 - RNA, 19 nt, Homo sapiens
  misc_RNA (1)...(19): siRNA sense strand
aagaaagggacuucgagua

SEQ ID NO: 1182173 - RNA, 19 nt, Homo sapiens
  misc_RNA (1)...(19): siRNA sense strand
ccucugauacuggagaaua

SEQ ID NO: 1182174 - RNA, 19 nt, Homo sapiens
  misc_RNA (1)...(19): siRNA sense strand
uguugugccucuucauauu

SEQ ID NO: 1182175 - RNA, 19 nt, Homo sapiens
  misc_RNA (1)...(19): siRNA sense strand
gaagacacugggacauaca

SEQ ID NO: 1182176 - RNA, 19 nt, Homo sapiens
  misc_RNA (1)...(19): siRNA sense strand
ggagagcuggucuuugauc

SEQ ID NO: 1182177 - RNA, 19 nt, Homo sapiens
  misc_RNA (1)...(19): siRNA sense strand
aaacuguugugccucuuca

SEQ ID NO: 1182178 - RNA, 19 nt, Homo sapiens
  misc_RNA (1)...(19): siRNA sense strand
ccauccaagccuacaguua

SEQ ID NO: 1182179 - RNA, 19 nt, Homo sapiens
  misc_RNA (1)...(19): siRNA sense strand
gagaauaauccugugaagu

SEQ ID NO: 1182180 - RNA, 19 nt, Homo sapiens
  misc_RNA (1)...(19): siRNA sense strand
ugagaauaauccugugaag

SEQ ID NO: 1182181 - RNA, 19 nt, Homo sapiens
  misc_RNA (1)...(19): siRNA sense strand
gaaacuguugugccucuuc

SEQ ID NO: 1182182 - RNA, 19 nt, Homo sapiens
  misc_RNA (1)...(19): siRNA sense strand
cgaggccacuuugacagaa

SEQ ID NO: 1182183 - RNA, 19 nt, Homo sapiens
  misc_RNA (1)...(19): siRNA sense strand
gacaugcucagaacaagau

SEQ ID NO: 1182184 - RNA, 19 nt, Homo sapiens
  misc_RNA (1)...(19): siRNA sense strand
cguggcagccguccuugua

SEQ ID NO: 1182185 - RNA, 19 nt, Homo sapiens
  misc_RNA (1)...(19): siRNA sense strand
caaacagaccucgucauuc

SEQ ID NO: 1182186 - RNA, 19 nt, Homo sapiens
  misc_RNA (1)...(19): siRNA sense strand
acacugggacauacacuug

SEQ ID NO: 1182187 - RNA, 19 nt, Homo sapiens
  misc_RNA (1)...(19): siRNA sense strand
gaaccgggcagugcugaca

SEQ ID NO: 1182188 - RNA, 19 nt, Homo sapiens
  misc_RNA (1)...(19): siRNA sense strand
gaaggcggcaacagcuaug

SEQ ID NO: 1182189 - RNA, 19 nt, Homo sapiens
  misc_RNA (1)...(19): siRNA sense strand
ggaaacuguugugccucuu

SEQ ID NO: 1182190 - RNA, 19 nt, Homo sapiens
  misc_RNA (1)...(19): siRNA sense strand
ucaaagaugggauagugau

SEQ ID NO: 1182191 - RNA, 19 nt, Homo sapiens
  misc_RNA (1)...(19): siRNA sense strand
caaagaugggauagugaug

SEQ ID NO: 1182192 - RNA, 19 nt, Homo sapiens
  misc_RNA (1)...(19): siRNA sense strand
caacaggagagcuggucuu

SEQ ID NO: 1182193 - RNA, 19 nt, Homo sapiens
  misc_RNA (1)...(19): siRNA sense strand
caagaugguuccccaccuu

SEQ ID NO: 1182194 - RNA, 19 nt, Homo sapiens
  misc_RNA (1)...(19): siRNA sense strand
acaaagaaagggacuucga

SEQ ID NO: 1182195 - RNA, 19 nt, Homo sapiens
  misc_RNA (1)...(19): siRNA sense strand
ugacaugcucagaacaaga

SEQ ID NO: 1182196 - RNA, 19 nt, Homo sapiens
  misc_RNA (1)...(19): siRNA sense strand
guugugccucuucauauug

SEQ ID NO: 1182197 - RNA, 19 nt, Homo sapiens
  misc_RNA (1)...(19): siRNA sense strand
caucguggcagccguccuu

SEQ ID NO: 1182198 - RNA, 19 nt, Homo sapiens
  misc_RNA (1)...(19): siRNA sense strand
ggaccgggugaccuucuug

SEQ ID NO: 1182199 - RNA, 19 nt, Homo sapiens
  misc_RNA (1)...(19): siRNA sense strand
ccgaagugaaggagaauuc

SEQ ID NO: 1182200 - RNA, 19 nt, Homo sapiens
  misc_RNA (1)...(19): siRNA sense strand
aggcgcaagucgagaggaa

SEQ ID NO: 1182201 - RNA, 19 nt, Homo sapiens
  misc_RNA (1)...(19): siRNA sense strand
caggagagcuggucuuuga

SEQ ID NO: 1182202 - RNA, 19 nt, Homo sapiens
  misc_RNA (1)...(19): siRNA sense strand
gaaggagaauucaaacaga

SEQ ID NO: 1182203 - RNA, 19 nt, Homo sapiens
  misc_RNA (1)...(19): siRNA sense strand
ggacacccaugacuucaaa

SEQ ID NO: 1182204 - RNA, 19 nt, Homo sapiens
  misc_RNA (1)...(19): siRNA sense strand
gaauacaccugguucaaag

SEQ ID NO: 1182205 - RNA, 19 nt, Homo sapiens
  misc_RNA (1)...(19): siRNA sense strand
cgaguaagaaggugauuua

SEQ ID NO: 1182206 - RNA, 19 nt, Homo sapiens
  misc_RNA (1)...(19): siRNA sense strand
gaauaauccugugaaguug

SEQ ID NO: 1182207 - RNA, 19 nt, Homo sapiens
  misc_RNA (1)...(19): siRNA sense strand
agaauaauccugugaaguu

SEQ ID NO: 1182208 - RNA, 19 nt, Homo sapiens
  misc_RNA (1)...(19): siRNA sense strand
caacugguaucaccuucaa

SEQ ID NO: 1182209 - RNA, 19 nt, Homo sapiens
  misc_RNA (1)...(19): siRNA sense strand
ggauagugaugccuacgaa

SEQ ID NO: 1182210 - RNA, 19 nt, Homo sapiens
  misc_RNA (1)...(19): siRNA sense strand
gaaagggacuucgaguaag

SEQ ID NO: 1182211 - RNA, 19 nt, Homo sapiens
  misc_RNA (1)...(19): siRNA sense strand
guucaaagaugggauagug

SEQ ID NO: 1182212 - RNA, 19 nt, Homo sapiens
  misc_RNA (1)...(19): siRNA sense strand
agaaagggacuucgaguaa

SEQ ID NO: 1182213 - RNA, 19 nt, Homo sapiens
  misc_RNA (1)...(19): siRNA sense strand
cauccaagccuacaguuaa

SEQ ID NO: 1182214 - RNA, 19 nt, Homo sapiens
  misc_RNA (1)...(19): siRNA sense strand
gaacaaagaaagggacuuc

SEQ ID NO: 1182215 - RNA, 19 nt, Homo sapiens
  misc_RNA (1)...(19): siRNA sense strand
ucaaacagaccucgucauu

SEQ ID NO: 1182216 - RNA, 19 nt, Homo sapiens
  misc_RNA (1)...(19): siRNA sense strand
ggaagacacugggacauac

SEQ ID NO: 1182217 - RNA, 19 nt, Homo sapiens
  misc_RNA (1)...(19): siRNA sense strand
acacuuguauggucucuga

SEQ ID NO: 1182218 - RNA, 19 nt, Homo sapiens
  misc_RNA (1)...(19): siRNA sense strand
aaacagaccucgucauucc

SEQ ID NO: 1182219 - RNA, 19 nt, Homo sapiens
  misc_RNA (1)...(19): siRNA sense strand
aaagggacuucgaguaaga

SEQ ID NO: 1182220 - RNA, 19 nt, Homo sapiens
  misc_RNA (1)...(19): siRNA sense strand
gggaagacacugggacaua

SEQ ID NO: 1182221 - RNA, 19 nt, Homo sapiens
  misc_RNA (1)...(19): siRNA sense strand
cagcaacucuuccuauguc

SEQ ID NO: 1182222 - RNA, 19 nt, Homo sapiens
  misc_RNA (1)...(19): siRNA sense strand
gcaucugguuugccuauag

SEQ ID NO: 1182223 - RNA, 19 nt, Homo sapiens
  misc_RNA (1)...(19): siRNA sense strand
ggaaggcggcaacagcuau

SEQ ID NO: 1182224 - RNA, 19 nt, Homo sapiens
  misc_RNA (1)...(19): siRNA sense strand
aagaaagggacuucgagua

SEQ ID NO: 1182225 - RNA, 19 nt, Homo sapiens
  misc_RNA (1)...(19): siRNA sense strand
ccucugauacuggagaaua

SEQ ID NO: 1182226 - RNA, 19 nt, Homo sapiens
  misc_RNA (1)...(19): siRNA sense strand
uguugugccucuucauauu

SEQ ID NO: 1182227 - RNA, 19 nt, Homo sapiens
  misc_RNA (1)...(19): siRNA sense strand
gaagacacugggacauaca

SEQ ID NO: 1182228 - RNA, 19 nt, Homo sapiens
  misc_RNA (1)...(19): siRNA sense strand
ggagagcuggucuuugauc

SEQ ID NO: 1182229 - RNA, 19 nt, Homo sapiens
  misc_RNA (1)...(19): siRNA sense strand
aaacuguugugccucuuca

SEQ ID NO: 1182230 - RNA, 19 nt, Homo sapiens
  misc_RNA (1)...(19): siRNA sense strand
ccauccaagccuacaguua

SEQ ID NO: 1182231 - RNA, 19 nt, Homo sapiens
  misc_RNA (1)...(19): siRNA sense strand
gagaauaauccugugaagu

SEQ ID NO: 1182232 - RNA, 19 nt, Homo sapiens
  misc_RNA (1)...(19): siRNA sense strand
ugagaauaauccugugaag

SEQ ID NO: 1182233 - RNA, 19 nt, Homo sapiens
  misc_RNA (1)...(19): siRNA sense strand
gaaacuguugugccucuuc

SEQ ID NO: 1182234 - RNA, 19 nt, Homo sapiens
  misc_RNA (1)...(19): siRNA sense strand
cgaggccacuuugacagaa

SEQ ID NO: 1182235 - RNA, 19 nt, Homo sapiens
  misc_RNA (1)...(19): siRNA sense strand
gacaugcucagaacaagau

SEQ ID NO: 1182236 - RNA, 19 nt, Homo sapiens
  misc_RNA (1)...(19): siRNA sense strand
cguggcagccguccuugua

SEQ ID NO: 1182237 - RNA, 19 nt, Homo sapiens
  misc_RNA (1)...(19): siRNA sense strand
caaacagaccucgucauuc

SEQ ID NO: 1182238 - RNA, 19 nt, Homo sapiens
  misc_RNA (1)...(19): siRNA sense strand
acacugggacauacacuug

SEQ ID NO: 1182239 - RNA, 19 nt, Homo sapiens
  misc_RNA (1)...(19): siRNA sense strand
gaaccgggcagugcugaca

SEQ ID NO: 1182240 - RNA, 19 nt, Homo sapiens
  misc_RNA (1)...(19): siRNA sense strand
gaaggcggcaacagcuaug

SEQ ID NO: 1182241 - RNA, 19 nt, Homo sapiens
  misc_RNA (1)...(19): siRNA sense strand
ggaaacuguugugccucuu

SEQ ID NO: 1182242 - RNA, 19 nt, Homo sapiens
  misc_RNA (1)...(19): siRNA sense strand
ucaaagaugggauagugau

SEQ ID NO: 1182243 - RNA, 19 nt, Homo sapiens
  misc_RNA (1)...(19): siRNA sense strand
caaagaugggauagugaug

SEQ ID NO: 1182244 - RNA, 19 nt, Homo sapiens
  misc_RNA (1)...(19): siRNA sense strand
caacaggagagcuggucuu

SEQ ID NO: 1182245 - RNA, 19 nt, Homo sapiens
  misc_RNA (1)...(19): siRNA sense strand
caagaugguuccccaccuu

SEQ ID NO: 1182246 - RNA, 19 nt, Homo sapiens
  misc_RNA (1)...(19): siRNA sense strand
acaaagaaagggacuucga

SEQ ID NO: 1182247 - RNA, 19 nt, Homo sapiens
  misc_RNA (1)...(19): siRNA sense strand
ugacaugcucagaacaaga

SEQ ID NO: 1182248 - RNA, 19 nt, Homo sapiens
  misc_RNA (1)...(19): siRNA sense strand
guugugccucuucauauug

SEQ ID NO: 1182249 - RNA, 19 nt, Homo sapiens
  misc_RNA (1)...(19): siRNA sense strand
caucguggcagccguccuu

SEQ ID NO: 1182250 - RNA, 19 nt, Homo sapiens
  misc_RNA (1)...(19): siRNA sense strand
ggaccgggugaccuucuug

SEQ ID NO: 1182251 - RNA, 19 nt, Homo sapiens
  misc_RNA (1)...(19): siRNA sense strand
ccgaagugaaggagaauuc

SEQ ID NO: 1182252 - RNA, 19 nt, Homo sapiens
  misc_RNA (1)...(19): siRNA sense strand
aggcgcaagucgagaggaa

SEQ ID NO: 1182253 - RNA, 19 nt, Homo sapiens
  misc_RNA (1)...(19): siRNA sense strand
caggagagcuggucuuuga

SEQ ID NO: 1182254 - RNA, 19 nt, Homo sapiens
  misc_RNA (1)...(19): siRNA sense strand
gaaggagaauucaaacaga

SEQ ID NO: 1182255 - RNA, 19 nt, Homo sapiens
  misc_RNA (1)...(19): siRNA sense strand
ggacacccaugacuucaaa

SEQ ID NO: 1182256 - RNA, 19 nt, Homo sapiens
  misc_RNA (1)...(19): siRNA sense strand
gaauacaccugguucaaag

SEQ ID NO: 1182257 - RNA, 19 nt, Homo sapiens
  misc_RNA (1)...(19): siRNA sense strand
cgaguaagaaggugauuua

SEQ ID NO: 1182258 - RNA, 19 nt, Homo sapiens
  misc_RNA (1)...(19): siRNA sense strand
gaauaauccugugaaguug

SEQ ID NO: 1182259 - RNA, 19 nt, Homo sapiens
  misc_RNA (1)...(19): siRNA sense strand
agaauaauccugugaaguu

SEQ ID NO: 1182260 - RNA, 19 nt, Homo sapiens
  misc_RNA (1)...(19): siRNA sense strand
caacugguaucaccuucaa

SEQ ID NO: 1182261 - RNA, 19 nt, Homo sapiens
  misc_RNA (1)...(19): siRNA sense strand
ggauagugaugccuacgaa

SEQ ID NO: 1182262 - RNA, 19 nt, Homo sapiens
  misc_RNA (1)...(19): siRNA sense strand
gaaagggacuucgaguaag

SEQ ID NO: 1182263 - RNA, 19 nt, Homo sapiens
  misc_RNA (1)...(19): siRNA sense strand
guucaaagaugggauagug

SEQ ID NO: 1182264 - RNA, 19 nt, Homo sapiens
  misc_RNA (1)...(19): siRNA sense strand
agaaagggacuucgaguaa

SEQ ID NO: 1182265 - RNA, 19 nt, Homo sapiens
  misc_RNA (1)...(19): siRNA sense strand
cauccaagccuacaguuaa

SEQ ID NO: 1182266 - RNA, 19 nt, Homo sapiens
  misc_RNA (1)...(19): siRNA sense strand
gaacaaagaaagggacuuc

SEQ ID NO: 1182267 - RNA, 19 nt, Homo sapiens
  misc_RNA (1)...(19): siRNA sense strand
ucaaacagaccucgucauu

SEQ ID NO: 1182268 - RNA, 19 nt, Homo sapiens
  misc_RNA (1)...(19): siRNA sense strand
ggaagacacugggacauac

SEQ ID NO: 1182269 - RNA, 19 nt, Homo sapiens
  misc_RNA (1)...(19): siRNA sense strand
acacuuguauggucucuga

SEQ ID NO: 1182270 - RNA, 19 nt, Homo sapiens
  misc_RNA (1)...(19): siRNA sense strand
aaacagaccucgucauucc

SEQ ID NO: 1182271 - RNA, 19 nt, Homo sapiens
  misc_RNA (1)...(19): siRNA sense strand
aaagggacuucgaguaaga

SEQ ID NO: 1182272 - RNA, 19 nt, Homo sapiens
  misc_RNA (1)...(19): siRNA sense strand
gggaagacacugggacaua

SEQ ID NO: 1182273 - RNA, 19 nt, Homo sapiens
  misc_RNA (1)...(19): siRNA sense strand
cagcaacucuuccuauguc

SEQ ID NO: 1182274 - RNA, 19 nt, Homo sapiens
  misc_RNA (1)...(19): siRNA sense strand
gcaucugguuugccuauag

SEQ ID NO: 1182275 - RNA, 19 nt, Homo sapiens
  misc_RNA (1)...(19): siRNA sense strand
ggaaggcggcaacagcuau

SEQ ID NO: 1182276 - RNA, 19 nt, Homo sapiens
  misc_RNA (1)...(19): siRNA sense strand
aagaaagggacuucgagua

SEQ ID NO: 1182277 - RNA, 19 nt, Homo sapiens
  misc_RNA (1)...(19): siRNA sense strand
ccucugauacuggagaaua

SEQ ID NO: 1182278 - RNA, 19 nt, Homo sapiens
  misc_RNA (1)...(19): siRNA sense strand
uguugugccucuucauauu

SEQ ID NO: 1182279 - RNA, 19 nt, Homo sapiens
  misc_RNA (1)...(19): siRNA sense strand
gaagacacugggacauaca

SEQ ID NO: 1182280 - RNA, 19 nt, Homo sapiens
  misc_RNA (1)...(19): siRNA sense strand
ggagagcuggucuuugauc

SEQ ID NO: 1182281 - RNA, 19 nt, Homo sapiens
  misc_RNA (1)...(19): siRNA sense strand
aaacuguugugccucuuca

SEQ ID NO: 1182282 - RNA, 19 nt, Homo sapiens
  misc_RNA (1)...(19): siRNA sense strand
ccauccaagccuacaguua

SEQ ID NO: 1182283 - RNA, 19 nt, Homo sapiens
  misc_RNA (1)...(19): siRNA sense strand
gagaauaauccugugaagu

SEQ ID NO: 1182284 - RNA, 19 nt, Homo sapiens
  misc_RNA (1)...(19): siRNA sense strand
ugagaauaauccugugaag

SEQ ID NO: 1182285 - RNA, 19 nt, Homo sapiens
  misc_RNA (1)...(19): siRNA sense strand
gaaacuguugugccucuuc

SEQ ID NO: 1182286 - RNA, 19 nt, Homo sapiens
  misc_RNA (1)...(19): siRNA sense strand
cgaggccacuuugacagaa

SEQ ID NO: 1182287 - RNA, 19 nt, Homo sapiens
  misc_RNA (1)...(19): siRNA sense strand
gacaugcucagaacaagau

SEQ ID NO: 1182288 - RNA, 19 nt, Homo sapiens
  misc_RNA (1)...(19): siRNA sense strand
cguggcagccguccuugua

SEQ ID NO: 1182289 - RNA, 19 nt, Homo sapiens
  misc_RNA (1)...(19): siRNA sense strand
caaacagaccucgucauuc

SEQ ID NO: 1182290 - RNA, 19 nt, Homo sapiens
  misc_RNA (1)...(19): siRNA sense strand
acacugggacauacacuug

SEQ ID NO: 1182291 - RNA, 19 nt, Homo sapiens
  misc_RNA (1)...(19): siRNA sense strand
gaaccgggcagugcugaca

SEQ ID NO: 1182292 - RNA, 19 nt, Homo sapiens
  misc_RNA (1)...(19): siRNA sense strand
gaaggcggcaacagcuaug

SEQ ID NO: 1182293 - RNA, 19 nt, Homo sapiens
  misc_RNA (1)...(19): siRNA sense strand
ggaaacuguugugccucuu

SEQ ID NO: 1182294 - RNA, 19 nt, Homo sapiens
  misc_RNA (1)...(19): siRNA sense strand
ucaaagaugggauagugau

SEQ ID NO: 1182295 - RNA, 19 nt, Homo sapiens
  misc_RNA (1)...(19): siRNA sense strand
caaagaugggauagugaug

SEQ ID NO: 1182296 - RNA, 19 nt, Homo sapiens
  misc_RNA (1)...(19): siRNA sense strand
caacaggagagcuggucuu

SEQ ID NO: 1182297 - RNA, 19 nt, Homo sapiens
  misc_RNA (1)...(19): siRNA sense strand
caagaugguuccccaccuu

SEQ ID NO: 1182298 - RNA, 19 nt, Homo sapiens
  misc_RNA (1)...(19): siRNA sense strand
acaaagaaagggacuucga

SEQ ID NO: 1182299 - RNA, 19 nt, Homo sapiens
  misc_RNA (1)...(19): siRNA sense strand
ugacaugcucagaacaaga

SEQ ID NO: 1182300 - RNA, 19 nt, Homo sapiens
  misc_RNA (1)...(19): siRNA sense strand
guugugccucuucauauug

SEQ ID NO: 1182301 - RNA, 19 nt, Homo sapiens
  misc_RNA (1)...(19): siRNA sense strand
caucguggcagccguccuu

SEQ ID NO: 1182302 - RNA, 19 nt, Homo sapiens
  misc_RNA (1)...(19): siRNA sense strand
ggaccgggugaccuucuug

SEQ ID NO: 1182303 - RNA, 19 nt, Homo sapiens
  misc_RNA (1)...(19): siRNA sense strand
ccgaagugaaggagaauuc

SEQ ID NO: 1182304 - RNA, 19 nt, Homo sapiens
  misc_RNA (1)...(19): siRNA sense strand
aggcgcaagucgagaggaa

SEQ ID NO: 1182305 - RNA, 19 nt, Homo sapiens
  misc_RNA (1)...(19): siRNA sense strand
caggagagcuggucuuuga

SEQ ID NO: 1182306 - RNA, 19 nt, Homo sapiens
  misc_RNA (1)...(19): siRNA sense strand
gaaggagaauucaaacaga

SEQ ID NO: 1182307 - RNA, 19 nt, Homo sapiens
  misc_RNA (1)...(19): siRNA sense strand
ggacacccaugacuucaaa

SEQ ID NO: 1182308 - RNA, 19 nt, Homo sapiens
  misc_RNA (1)...(19): siRNA sense strand
gaauacaccugguucaaag

SEQ ID NO: 1182309 - RNA, 19 nt, Homo sapiens
  misc_RNA (1)...(19): siRNA sense strand
cgaguaagaaggugauuua

SEQ ID NO: 1182310 - RNA, 19 nt, Homo sapiens
  misc_RNA (1)...(19): siRNA sense strand
gaauaauccugugaaguug

SEQ ID NO: 1182311 - RNA, 19 nt, Homo sapiens
  misc_RNA (1)...(19): siRNA sense strand
agaauaauccugugaaguu

SEQ ID NO: 1182312 - RNA, 19 nt, Homo sapiens
  misc_RNA (1)...(19): siRNA sense strand
caacugguaucaccuucaa

SEQ ID NO: 1182313 - RNA, 19 nt, Homo sapiens
  misc_RNA (1)...(19): siRNA sense strand
ggauagugaugccuacgaa

SEQ ID NO: 1182314 - RNA, 19 nt, Homo sapiens
  misc_RNA (1)...(19): siRNA sense strand
gaaagggacuucgaguaag

SEQ ID NO: 1182315 - RNA, 19 nt, Homo sapiens
  misc_RNA (1)...(19): siRNA sense strand
guucaaagaugggauagug

SEQ ID NO: 1182316 - RNA, 19 nt, Homo sapiens
  misc_RNA (1)...(19): siRNA sense strand
agaaagggacuucgaguaa

SEQ ID NO: 1182317 - RNA, 19 nt, Homo sapiens
  misc_RNA (1)...(19): siRNA sense strand
cauccaagccuacaguuaa

SEQ ID NO: 1182318 - RNA, 19 nt, Homo sapiens
  misc_RNA (1)...(19): siRNA sense strand
gaacaaagaaagggacuuc

SEQ ID NO: 1182319 - RNA, 19 nt, Homo sapiens
  misc_RNA (1)...(19): siRNA sense strand
ucaaacagaccucgucauu

SEQ ID NO: 1182320 - RNA, 19 nt, Homo sapiens
  misc_RNA (1)...(19): siRNA sense strand
ggaagacacugggacauac

SEQ ID NO: 1182321 - RNA, 19 nt, Homo sapiens
  misc_RNA (1)...(19): siRNA sense strand
acacuuguauggucucuga

SEQ ID NO: 1182322 - RNA, 19 nt, Homo sapiens
  misc_RNA (1)...(19): siRNA sense strand
aaacagaccucgucauucc

SEQ ID NO: 1182323 - RNA, 19 nt, Homo sapiens
  misc_RNA (1)...(19): siRNA sense strand
aaagggacuucgaguaaga

SEQ ID NO: 1182324 - RNA, 19 nt, Homo sapiens
  misc_RNA (1)...(19): siRNA sense strand
gggaagacacugggacaua

SEQ ID NO: 1182325 - RNA, 19 nt, Homo sapiens
  misc_RNA (1)...(19): siRNA sense strand
cagcaacucuuccuauguc

SEQ ID NO: 1182326 - RNA, 19 nt, Homo sapiens
  misc_RNA (1)...(19): siRNA sense strand
gcaucugguuugccuauag

SEQ ID NO: 1182327 - RNA, 19 nt, Homo sapiens
  misc_RNA (1)...(19): siRNA sense strand
ggaaggcggcaacagcuau

SEQ ID NO: 1182328 - RNA, 19 nt, Homo sapiens
  misc_RNA (1)...(19): siRNA sense strand
aagaaagggacuucgagua

SEQ ID NO: 1182329 - RNA, 19 nt, Homo sapiens
  misc_RNA (1)...(19): siRNA sense strand
ccucugauacuggagaaua

SEQ ID NO: 1182330 - RNA, 19 nt, Homo sapiens
  misc_RNA (1)...(19): siRNA sense strand
uguugugccucuucauauu

SEQ ID NO: 1182331 - RNA, 19 nt, Homo sapiens
  misc_RNA (1)...(19): siRNA sense strand
gaagacacugggacauaca

SEQ ID NO: 1182332 - RNA, 19 nt, Homo sapiens
  misc_RNA (1)...(19): siRNA sense strand
ggagagcuggucuuugauc

SEQ ID NO: 1182333 - RNA, 19 nt, Homo sapiens
  misc_RNA (1)...(19): siRNA sense strand
aaacuguugugccucuuca

SEQ ID NO: 1182334 - RNA, 19 nt, Homo sapiens
  misc_RNA (1)...(19): siRNA sense strand
ccauccaagccuacaguua

SEQ ID NO: 1182335 - RNA, 19 nt, Homo sapiens
  misc_RNA (1)...(19): siRNA sense strand
gagaauaauccugugaagu

SEQ ID NO: 1182336 - RNA, 19 nt, Homo sapiens
  misc_RNA (1)...(19): siRNA sense strand
ugagaauaauccugugaag

SEQ ID NO: 1182337 - RNA, 19 nt, Homo sapiens
  misc_RNA (1)...(19): siRNA sense strand
gaaacuguugugccucuuc

SEQ ID NO: 1182338 - RNA, 19 nt, Homo sapiens
  misc_RNA (1)...(19): siRNA sense strand
cgaggccacuuugacagaa

SEQ ID NO: 1182339 - RNA, 19 nt, Homo sapiens
  misc_RNA (1)...(19): siRNA sense strand
gacaugcucagaacaagau

SEQ ID NO: 1182340 - RNA, 19 nt, Homo sapiens
  misc_RNA (1)...(19): siRNA sense strand
cguggcagccguccuugua

SEQ ID NO: 1182341 - RNA, 19 nt, Homo sapiens
  misc_RNA (1)...(19): siRNA sense strand
caaacagaccucgucauuc

SEQ ID NO: 1182342 - RNA, 19 nt, Homo sapiens
  misc_RNA (1)...(19): siRNA sense strand
acacugggacauacacuug

SEQ ID NO: 1182343 - RNA, 19 nt, Homo sapiens
  misc_RNA (1)...(19): siRNA sense strand
gaaccgggcagugcugaca

SEQ ID NO: 1182344 - RNA, 19 nt, Homo sapiens
  misc_RNA (1)...(19): siRNA sense strand
gaaggcggcaacagcuaug

SEQ ID NO: 1182345 - RNA, 19 nt, Homo sapiens
  misc_RNA (1)...(19): siRNA sense strand
ggaaacuguugugccucuu

SEQ ID NO: 1182346 - RNA, 19 nt, Homo sapiens
  misc_RNA (1)...(19): siRNA sense strand
ucaaagaugggauagugau

SEQ ID NO: 1182347 - RNA, 19 nt, Homo sapiens
  misc_RNA (1)...(19): siRNA sense strand
caaagaugggauagugaug

SEQ ID NO: 1182348 - RNA, 19 nt, Homo sapiens
  misc_RNA (1)...(19): siRNA sense strand
caacaggagagcuggucuu

SEQ ID NO: 1182349 - RNA, 19 nt, Homo sapiens
  misc_RNA (1)...(19): siRNA sense strand
caagaugguuccccaccuu

SEQ ID NO: 1182350 - RNA, 19 nt, Homo sapiens
  misc_RNA (1)...(19): siRNA sense strand
acaaagaaagggacuucga

SEQ ID NO: 1182351 - RNA, 19 nt, Homo sapiens
  misc_RNA (1)...(19): siRNA sense strand
ugacaugcucagaacaaga

SEQ ID NO: 1182352 - RNA, 19 nt, Homo sapiens
  misc_RNA (1)...(19): siRNA sense strand
guugugccucuucauauug

SEQ ID NO: 1182353 - RNA, 19 nt, Homo sapiens
  misc_RNA (1)...(19): siRNA sense strand
caucguggcagccguccuu

SEQ ID NO: 1182354 - RNA, 19 nt, Homo sapiens
  misc_RNA (1)...(19): siRNA sense strand
ggaccgggugaccuucuug

SEQ ID NO: 1182355 - RNA, 19 nt, Homo sapiens
  misc_RNA (1)...(19): siRNA sense strand
ccgaagugaaggagaauuc

SEQ ID NO: 1182356 - RNA, 19 nt, Homo sapiens
  misc_RNA (1)...(19): siRNA sense strand
aggcgcaagucgagaggaa

SEQ ID NO: 1182357 - RNA, 19 nt, Homo sapiens
  misc_RNA (1)...(19): siRNA sense strand
caggagagcuggucuuuga

SEQ ID NO: 1182358 - RNA, 19 nt, Homo sapiens
  misc_RNA (1)...(19): siRNA sense strand
gaaggagaauucaaacaga

SEQ ID NO: 1182359 - RNA, 19 nt, Homo sapiens
  misc_RNA (1)...(19): siRNA sense strand
ggacacccaugacuucaaa

SEQ ID NO: 1182360 - RNA, 19 nt, Homo sapiens
  misc_RNA (1)...(19): siRNA sense strand
gaauacaccugguucaaag

SEQ ID NO: 1182361 - RNA, 19 nt, Homo sapiens
  misc_RNA (1)...(19): siRNA sense strand
cgaguaagaaggugauuua

SEQ ID NO: 1182362 - RNA, 19 nt, Homo sapiens
  misc_RNA (1)...(19): siRNA sense strand
gaauaauccugugaaguug

SEQ ID NO: 1182363 - RNA, 19 nt, Homo sapiens
  misc_RNA (1)...(19): siRNA sense strand
agaauaauccugugaaguu

SEQ ID NO: 1182364 - RNA, 19 nt, Homo sapiens
  misc_RNA (1)...(19): siRNA sense strand
caacugguaucaccuucaa

SEQ ID NO: 1182365 - RNA, 19 nt, Homo sapiens
  misc_RNA (1)...(19): siRNA sense strand
ggauagugaugccuacgaa

SEQ ID NO: 1182366 - RNA, 19 nt, Homo sapiens
  misc_RNA (1)...(19): siRNA sense strand
gaaagggacuucgaguaag

SEQ ID NO: 1182367 - RNA, 19 nt, Homo sapiens
  misc_RNA (1)...(19): siRNA sense strand
guucaaagaugggauagug

SEQ ID NO: 1182368 - RNA, 19 nt, Homo sapiens
  misc_RNA (1)...(19): siRNA sense strand
agaaagggacuucgaguaa

SEQ ID NO: 1182369 - RNA, 19 nt, Homo sapiens
  misc_RNA (1)...(19): siRNA sense strand
cauccaagccuacaguuaa

SEQ ID NO: 1182370 - RNA, 19 nt, Homo sapiens
  misc_RNA (1)...(19): siRNA sense strand
gaacaaagaaagggacuuc

SEQ ID NO: 1182371 - RNA, 19 nt, Homo sapiens
  misc_RNA (1)...(19): siRNA sense strand
ucaaacagaccucgucauu

SEQ ID NO: 1182372 - RNA, 19 nt, Homo sapiens
  misc_RNA (1)...(19): siRNA sense strand
ggaagacacugggacauac

SEQ ID NO: 1182373 - RNA, 19 nt, Homo sapiens
  misc_RNA (1)...(19): siRNA sense strand
acacuuguauggucucuga

SEQ ID NO: 1182374 - RNA, 19 nt, Homo sapiens
  misc_RNA (1)...(19): siRNA sense strand
aaacagaccucgucauucc

SEQ ID NO: 1182375 - RNA, 19 nt, Homo sapiens
  misc_RNA (1)...(19): siRNA sense strand
aaagggacuucgaguaaga

SEQ ID NO: 1182376 - RNA, 19 nt, Homo sapiens
  misc_RNA (1)...(19): siRNA sense strand
gggaagacacugggacaua

SEQ ID NO: 1182377 - RNA, 19 nt, Homo sapiens
  misc_RNA (1)...(19): siRNA sense strand
cagcaacucuuccuauguc

SEQ ID NO: 1182378 - RNA, 19 nt, Homo sapiens
  misc_RNA (1)...(19): siRNA sense strand
gcaucugguuugccuauag

SEQ ID NO: 1182379 - RNA, 19 nt, Homo sapiens
  misc_RNA (1)...(19): siRNA sense strand
ggaaggcggcaacagcuau

SEQ ID NO: 1182380 - RNA, 19 nt, Homo sapiens
  misc_RNA (1)...(19): siRNA sense strand
aagaaagggacuucgagua

SEQ ID NO: 1182381 - RNA, 19 nt, Homo sapiens
  misc_RNA (1)...(19): siRNA sense strand
ccucugauacuggagaaua

SEQ ID NO: 1182382 - RNA, 19 nt, Homo sapiens
  misc_RNA (1)...(19): siRNA sense strand
uguugugccucuucauauu

SEQ ID NO: 1182383 - RNA, 19 nt, Homo sapiens
  misc_RNA (1)...(19): siRNA sense strand
gaagacacugggacauaca

SEQ ID NO: 1182384 - RNA, 19 nt, Homo sapiens
  misc_RNA (1)...(19): siRNA sense strand
ggagagcuggucuuugauc

SEQ ID NO: 1182385 - RNA, 19 nt, Homo sapiens
  misc_RNA (1)...(19): siRNA sense strand
aaacuguugugccucuuca

SEQ ID NO: 1182386 - RNA, 19 nt, Homo sapiens
  misc_RNA (1)...(19): siRNA sense strand
ccauccaagccuacaguua

SEQ ID NO: 1182387 - RNA, 19 nt, Homo sapiens
  misc_RNA (1)...(19): siRNA sense strand
gagaauaauccugugaagu

SEQ ID NO: 1182388 - RNA, 19 nt, Homo sapiens
  misc_RNA (1)...(19): siRNA sense strand
ugagaauaauccugugaag

SEQ ID NO: 1182389 - RNA, 19 nt, Homo sapiens
  misc_RNA (1)...(19): siRNA sense strand
gaaacuguugugccucuuc

SEQ ID NO: 1182390 - RNA, 19 nt, Homo sapiens
  misc_RNA (1)...(19): siRNA sense strand
cgaggccacuuugacagaa

SEQ ID NO: 1182391 - RNA, 19 nt, Homo sapiens
  misc_RNA (1)...(19): siRNA sense strand
gacaugcucagaacaagau

SEQ ID NO: 1182392 - RNA, 19 nt, Homo sapiens
  misc_RNA (1)...(19): siRNA sense strand
cguggcagccguccuugua

SEQ ID NO: 1182393 - RNA, 19 nt, Homo sapiens
  misc_RNA (1)...(19): siRNA sense strand
caaacagaccucgucauuc

SEQ ID NO: 1182394 - RNA, 19 nt, Homo sapiens
  misc_RNA (1)...(19): siRNA sense strand
acacugggacauacacuug

SEQ ID NO: 1182395 - RNA, 19 nt, Homo sapiens
  misc_RNA (1)...(19): siRNA sense strand
gaaccgggcagugcugaca

SEQ ID NO: 1182396 - RNA, 19 nt, Homo sapiens
  misc_RNA (1)...(19): siRNA sense strand
gaaggcggcaacagcuaug

SEQ ID NO: 1182397 - RNA, 19 nt, Homo sapiens
  misc_RNA (1)...(19): siRNA sense strand
ggaaacuguugugccucuu

SEQ ID NO: 1182398 - RNA, 19 nt, Homo sapiens
  misc_RNA (1)...(19): siRNA sense strand
ucaaagaugggauagugau

SEQ ID NO: 1182399 - RNA, 19 nt, Homo sapiens
  misc_RNA (1)...(19): siRNA sense strand
caaagaugggauagugaug

SEQ ID NO: 1182400 - RNA, 19 nt, Homo sapiens
  misc_RNA (1)...(19): siRNA sense strand
caacaggagagcuggucuu

SEQ ID NO: 1182401 - RNA, 19 nt, Homo sapiens
  misc_RNA (1)...(19): siRNA sense strand
caagaugguuccccaccuu

SEQ ID NO: 1182402 - RNA, 19 nt, Homo sapiens
  misc_RNA (1)...(19): siRNA sense strand
acaaagaaagggacuucga

SEQ ID NO: 1182403 - RNA, 19 nt, Homo sapiens
  misc_RNA (1)...(19): siRNA sense strand
ugacaugcucagaacaaga

SEQ ID NO: 1182404 - RNA, 19 nt, Homo sapiens
  misc_RNA (1)...(19): siRNA sense strand
guugugccucuucauauug

SEQ ID NO: 1182405 - RNA, 19 nt, Homo sapiens
  misc_RNA (1)...(19): siRNA sense strand
caucguggcagccguccuu

SEQ ID NO: 1182406 - RNA, 19 nt, Homo sapiens
  misc_RNA (1)...(19): siRNA sense strand
ggaccgggugaccuucuug

SEQ ID NO: 1182407 - RNA, 19 nt, Homo sapiens
  misc_RNA (1)...(19): siRNA sense strand
ccgaagugaaggagaauuc

SEQ ID NO: 1182408 - RNA, 19 nt, Homo sapiens
  misc_RNA (1)...(19): siRNA sense strand
aggcgcaagucgagaggaa

SEQ ID NO: 1182409 - RNA, 19 nt, Homo sapiens
  misc_RNA (1)...(19): siRNA sense strand
caggagagcuggucuuuga

SEQ ID NO: 1182410 - RNA, 19 nt, Homo sapiens
  misc_RNA (1)...(19): siRNA sense strand
gaaggagaauucaaacaga

SEQ ID NO: 1182411 - RNA, 19 nt, Homo sapiens
  misc_RNA (1)...(19): siRNA sense strand
ggacacccaugacuucaaa

SEQ ID NO: 1182412 - RNA, 19 nt, Homo sapiens
  misc_RNA (1)...(19): siRNA sense strand
gaauacaccugguucaaag

SEQ ID NO: 1182413 - RNA, 19 nt, Homo sapiens
  misc_RNA (1)...(19): siRNA sense strand
cgaguaagaaggugauuua

SEQ ID NO: 1182414 - RNA, 19 nt, Homo sapiens
  misc_RNA (1)...(19): siRNA sense strand
gaauaauccugugaaguug

SEQ ID NO: 1182415 - RNA, 19 nt, Homo sapiens
  misc_RNA (1)...(19): siRNA sense strand
agaauaauccugugaaguu

SEQ ID NO: 1182416 - RNA, 19 nt, Homo sapiens
  misc_RNA (1)...(19): siRNA sense strand
caacugguaucaccuucaa

SEQ ID NO: 1182417 - RNA, 19 nt, Homo sapiens
  misc_RNA (1)...(19): siRNA sense strand
ggauagugaugccuacgaa

SEQ ID NO: 1182418 - RNA, 19 nt, Homo sapiens
  misc_RNA (1)...(19): siRNA sense strand
gaaagggacuucgaguaag

SEQ ID NO: 1182419 - RNA, 19 nt, Homo sapiens
  misc_RNA (1)...(19): siRNA sense strand
guucaaagaugggauagug

SEQ ID NO: 1182420 - RNA, 19 nt, Homo sapiens
  misc_RNA (1)...(19): siRNA sense strand
agaaagggacuucgaguaa

SEQ ID NO: 1182421 - RNA, 19 nt, Homo sapiens
  misc_RNA (1)...(19): siRNA sense strand
cauccaagccuacaguuaa

SEQ ID NO: 1182422 - RNA, 19 nt, Homo sapiens
  misc_RNA (1)...(19): siRNA sense strand
gaacaaagaaagggacuuc

SEQ ID NO: 1182423 - RNA, 19 nt, Homo sapiens
  misc_RNA (1)...(19): siRNA sense strand
ucaaacagaccucgucauu

SEQ ID NO: 1182424 - RNA, 19 nt, Homo sapiens
  misc_RNA (1)...(19): siRNA sense strand
ggaagacacugggacauac

SEQ ID NO: 1182425 - RNA, 19 nt, Homo sapiens
  misc_RNA (1)...(19): siRNA sense strand
acacuuguauggucucuga

SEQ ID NO: 1182426 - RNA, 19 nt, Homo sapiens
  misc_RNA (1)...(19): siRNA sense strand
aaacagaccucgucauucc

SEQ ID NO: 1182427 - RNA, 19 nt, Homo sapiens
  misc_RNA (1)...(19): siRNA sense strand
aaagggacuucgaguaaga

SEQ ID NO: 1182428 - RNA, 19 nt, Homo sapiens
  misc_RNA (1)...(19): siRNA sense strand
gggaagacacugggacaua

SEQ ID NO: 1182429 - RNA, 19 nt, Homo sapiens
  misc_RNA (1)...(19): siRNA sense strand
cagcaacucuuccuauguc

SEQ ID NO: 1182430 - RNA, 19 nt, Homo sapiens
  misc_RNA (1)...(19): siRNA sense strand
gcaucugguuugccuauag

SEQ ID NO: 1182431 - RNA, 19 nt, Homo sapiens
  misc_RNA (1)...(19): siRNA sense strand
ggaaggcggcaacagcuau

SEQ ID NO: 1182432 - RNA, 19 nt, Homo sapiens
  misc_RNA (1)...(19): siRNA sense strand
aagaaagggacuucgagua

SEQ ID NO: 1182433 - RNA, 19 nt, Homo sapiens
  misc_RNA (1)...(19): siRNA sense strand
ccucugauacuggagaaua

SEQ ID NO: 1182434 - RNA, 19 nt, Homo sapiens
  misc_RNA (1)...(19): siRNA sense strand
uguugugccucuucauauu

SEQ ID NO: 1182435 - RNA, 19 nt, Homo sapiens
  misc_RNA (1)...(19): siRNA sense strand
gaagacacugggacauaca

SEQ ID NO: 1182436 - RNA, 19 nt, Homo sapiens
  misc_RNA (1)...(19): siRNA sense strand
ggagagcuggucuuugauc

SEQ ID NO: 1182437 - RNA, 19 nt, Homo sapiens
  misc_RNA (1)...(19): siRNA sense strand
aaacuguugugccucuuca

SEQ ID NO: 1182438 - RNA, 19 nt, Homo sapiens
  misc_RNA (1)...(19): siRNA sense strand
ccauccaagccuacaguua

SEQ ID NO: 1182439 - RNA, 19 nt, Homo sapiens
  misc_RNA (1)...(19): siRNA sense strand
gagaauaauccugugaagu

SEQ ID NO: 1182440 - RNA, 19 nt, Homo sapiens
  misc_RNA (1)...(19): siRNA sense strand
ugagaauaauccugugaag

SEQ ID NO: 1182441 - RNA, 19 nt, Homo sapiens
  misc_RNA (1)...(19): siRNA sense strand
gaaacuguugugccucuuc

SEQ ID NO: 1182442 - RNA, 19 nt, Homo sapiens
  misc_RNA (1)...(19): siRNA sense strand
cgaggccacuuugacagaa

SEQ ID NO: 1182443 - RNA, 19 nt, Homo sapiens
  misc_RNA (1)...(19): siRNA sense strand
gacaugcucagaacaagau

SEQ ID NO: 1182444 - RNA, 19 nt, Homo sapiens
  misc_RNA (1)...(19): siRNA sense strand
cguggcagccguccuugua

SEQ ID NO: 1182445 - RNA, 19 nt, Homo sapiens
  misc_RNA (1)...(19): siRNA sense strand
caaacagaccucgucauuc

SEQ ID NO: 1182446 - RNA, 19 nt, Homo sapiens
  misc_RNA (1)...(19): siRNA sense strand
acacugggacauacacuug

SEQ ID NO: 1182447 - RNA, 19 nt, Homo sapiens
  misc_RNA (1)...(19): siRNA sense strand
gaaccgggcagugcugaca

SEQ ID NO: 1182448 - RNA, 19 nt, Homo sapiens
  misc_RNA (1)...(19): siRNA sense strand
gaaggcggcaacagcuaug

SEQ ID NO: 1182449 - RNA, 19 nt, Homo sapiens
  misc_RNA (1)...(19): siRNA sense strand
ggaaacuguugugccucuu

SEQ ID NO: 1182450 - RNA, 19 nt, Homo sapiens
  misc_RNA (1)...(19): siRNA sense strand
ucaaagaugggauagugau

SEQ ID NO: 1182451 - RNA, 19 nt, Homo sapiens
  misc_RNA (1)...(19): siRNA sense strand
caaagaugggauagugaug

SEQ ID NO: 1182452 - RNA, 19 nt, Homo sapiens
  misc_RNA (1)...(19): siRNA sense strand
caacaggagagcuggucuu

SEQ ID NO: 1182453 - RNA, 19 nt, Homo sapiens
  misc_RNA (1)...(19): siRNA sense strand
caagaugguuccccaccuu

SEQ ID NO: 1182454 - RNA, 19 nt, Homo sapiens
  misc_RNA (1)...(19): siRNA sense strand
acaaagaaagggacuucga

SEQ ID NO: 1182455 - RNA, 19 nt, Homo sapiens
  misc_RNA (1)...(19): siRNA sense strand
ugacaugcucagaacaaga

SEQ ID NO: 1182456 - RNA, 19 nt, Homo sapiens
  misc_RNA (1)...(19): siRNA sense strand
guugugccucuucauauug

SEQ ID NO: 1182457 - RNA, 19 nt, Homo sapiens
  misc_RNA (1)...(19): siRNA sense strand
caucguggcagccguccuu

SEQ ID NO: 1182458 - RNA, 19 nt, Homo sapiens
  misc_RNA (1)...(19): siRNA sense strand
ggaccgggugaccuucuug

SEQ ID NO: 1182459 - RNA, 19 nt, Homo sapiens
  misc_RNA (1)...(19): siRNA sense strand
ccgaagugaaggagaauuc

SEQ ID NO: 1182460 - RNA, 19 nt, Homo sapiens
  misc_RNA (1)...(19): siRNA sense strand
aggcgcaagucgagaggaa

SEQ ID NO: 1182461 - RNA, 19 nt, Homo sapiens
  misc_RNA (1)...(19): siRNA sense strand
caggagagcuggucuuuga

SEQ ID NO: 1182462 - RNA, 19 nt, Homo sapiens
  misc_RNA (1)...(19): siRNA sense strand
gaaggagaauucaaacaga

SEQ ID NO: 1182463 - RNA, 19 nt, Homo sapiens
  misc_RNA (1)...(19): siRNA sense strand
ggacacccaugacuucaaa

SEQ ID NO: 1182464 - RNA, 19 nt, Homo sapiens
  misc_RNA (1)...(19): siRNA sense strand
gaauacaccugguucaaag

SEQ ID NO: 1182465 - RNA, 19 nt, Homo sapiens
  misc_RNA (1)...(19): siRNA sense strand
cgaguaagaaggugauuua

SEQ ID NO: 1182466 - RNA, 19 nt, Homo sapiens
  misc_RNA (1)...(19): siRNA sense strand
gaauaauccugugaaguug

SEQ ID NO: 1182467 - RNA, 19 nt, Homo sapiens
  misc_RNA (1)...(19): siRNA sense strand
agaauaauccugugaaguu

SEQ ID NO: 1182468 - RNA, 19 nt, Homo sapiens
  misc_RNA (1)...(19): siRNA sense strand
caacugguaucaccuucaa

SEQ ID NO: 1182469 - RNA, 19 nt, Homo sapiens
  misc_RNA (1)...(19): siRNA sense strand
ggauagugaugccuacgaa

SEQ ID NO: 1182470 - RNA, 19 nt, Homo sapiens
  misc_RNA (1)...(19): siRNA sense strand
gaaagggacuucgaguaag

SEQ ID NO: 1182471 - RNA, 19 nt, Homo sapiens
  misc_RNA (1)...(19): siRNA sense strand
guucaaagaugggauagug

SEQ ID NO: 1182472 - RNA, 19 nt, Homo sapiens
  misc_RNA (1)...(19): siRNA sense strand
agaaagggacuucgaguaa

SEQ ID NO: 1182473 - RNA, 19 nt, Homo sapiens
  misc_RNA (1)...(19): siRNA sense strand
cauccaagccuacaguuaa

SEQ ID NO: 1182474 - RNA, 19 nt, Homo sapiens
  misc_RNA (1)...(19): siRNA sense strand
gaacaaagaaagggacuuc

SEQ ID NO: 1182475 - RNA, 19 nt, Homo sapiens
  misc_RNA (1)...(19): siRNA sense strand
ucaaacagaccucgucauu

SEQ ID NO: 1182476 - RNA, 19 nt, Homo sapiens
  misc_RNA (1)...(19): siRNA sense strand
ggaagacacugggacauac

SEQ ID NO: 1182477 - RNA, 19 nt, Homo sapiens
  misc_RNA (1)...(19): siRNA sense strand
acacuuguauggucucuga

SEQ ID NO: 1182478 - RNA, 19 nt, Homo sapiens
  misc_RNA (1)...(19): siRNA sense strand
aaacagaccucgucauucc

SEQ ID NO: 1182479 - RNA, 19 nt, Homo sapiens
  misc_RNA (1)...(19): siRNA sense strand
aaagggacuucgaguaaga

SEQ ID NO: 1182480 - RNA, 19 nt, Homo sapiens
  misc_RNA (1)...(19): siRNA sense strand
gggaagacacugggacaua

SEQ ID NO: 1182481 - RNA, 19 nt, Homo sapiens
  misc_RNA (1)...(19): siRNA sense strand
cagcaacucuuccuauguc

SEQ ID NO: 1182482 - RNA, 19 nt, Homo sapiens
  misc_RNA (1)...(19): siRNA sense strand
gcaucugguuugccuauag

SEQ ID NO: 1182483 - RNA, 19 nt, Homo sapiens
  misc_RNA (1)...(19): siRNA sense strand
ggaaggcggcaacagcuau

SEQ ID NO: 1182484 - RNA, 19 nt, Homo sapiens
  misc_RNA (1)...(19): siRNA sense strand
aagaaagggacuucgagua

SEQ ID NO: 1182485 - RNA, 19 nt, Homo sapiens
  misc_RNA (1)...(19): siRNA sense strand
ccucugauacuggagaaua

SEQ ID NO: 1182486 - RNA, 19 nt, Homo sapiens
  misc_RNA (1)...(19): siRNA sense strand
uguugugccucuucauauu

SEQ ID NO: 1182487 - RNA, 19 nt, Homo sapiens
  misc_RNA (1)...(19): siRNA sense strand
gaagacacugggacauaca

SEQ ID NO: 1182488 - RNA, 19 nt, Homo sapiens
  misc_RNA (1)...(19): siRNA sense strand
ggagagcuggucuuugauc

SEQ ID NO: 1182489 - RNA, 19 nt, Homo sapiens
  misc_RNA (1)...(19): siRNA sense strand
aaacuguugugccucuuca

SEQ ID NO: 1182490 - RNA, 19 nt, Homo sapiens
  misc_RNA (1)...(19): siRNA sense strand
ccauccaagccuacaguua

SEQ ID NO: 1182491 - RNA, 19 nt, Homo sapiens
  misc_RNA (1)...(19): siRNA sense strand
gagaauaauccugugaagu

SEQ ID NO: 1182492 - RNA, 19 nt, Homo sapiens
  misc_RNA (1)...(19): siRNA sense strand
ugagaauaauccugugaag

SEQ ID NO: 1182493 - RNA, 19 nt, Homo sapiens
  misc_RNA (1)...(19): siRNA sense strand
gaaacuguugugccucuuc

SEQ ID NO: 1182494 - RNA, 19 nt, Homo sapiens
  misc_RNA (1)...(19): siRNA sense strand
cgaggccacuuugacagaa

SEQ ID NO: 1182495 - RNA, 19 nt, Homo sapiens
  misc_RNA (1)...(19): siRNA sense strand
gacaugcucagaacaagau

SEQ ID NO: 1182496 - RNA, 19 nt, Homo sapiens
  misc_RNA (1)...(19): siRNA sense strand
cguggcagccguccuugua

SEQ ID NO: 1182497 - RNA, 19 nt, Homo sapiens
  misc_RNA (1)...(19): siRNA sense strand
caaacagaccucgucauuc

SEQ ID NO: 1182498 - RNA, 19 nt, Homo sapiens
  misc_RNA (1)...(19): siRNA sense strand
acacugggacauacacuug

SEQ ID NO: 1182499 - RNA, 19 nt, Homo sapiens
  misc_RNA (1)...(19): siRNA sense strand
gaaccgggcagugcugaca

SEQ ID NO: 1182500 - RNA, 19 nt, Homo sapiens
  misc_RNA (1)...(19): siRNA sense strand
gaaggcggcaacagcuaug

SEQ ID NO: 1182501 - RNA, 19 nt, Homo sapiens
  misc_RNA (1)...(19): siRNA sense strand
ggaaacuguugugccucuu

SEQ ID NO: 1182502 - RNA, 19 nt, Homo sapiens
  misc_RNA (1)...(19): siRNA sense strand
ucaaagaugggauagugau

SEQ ID NO: 1182503 - RNA, 19 nt, Homo sapiens
  misc_RNA (1)...(19): siRNA sense strand
caaagaugggauagugaug

SEQ ID NO: 1182504 - RNA, 19 nt, Homo sapiens
  misc_RNA (1)...(19): siRNA sense strand
caacaggagagcuggucuu

SEQ ID NO: 1182505 - RNA, 19 nt, Homo sapiens
  misc_RNA (1)...(19): siRNA sense strand
caagaugguuccccaccuu

SEQ ID NO: 1182506 - RNA, 19 nt, Homo sapiens
  misc_RNA (1)...(19): siRNA sense strand
acaaagaaagggacuucga

SEQ ID NO: 1182507 - RNA, 19 nt, Homo sapiens
  misc_RNA (1)...(19): siRNA sense strand
ugacaugcucagaacaaga

SEQ ID NO: 1182508 - RNA, 19 nt, Homo sapiens
  misc_RNA (1)...(19): siRNA sense strand
guugugccucuucauauug

SEQ ID NO: 1182509 - RNA, 19 nt, Homo sapiens
  misc_RNA (1)...(19): siRNA sense strand
caucguggcagccguccuu

SEQ ID NO: 1182510 - RNA, 19 nt, Homo sapiens
  misc_RNA (1)...(19): siRNA sense strand
ggaccgggugaccuucuug

SEQ ID NO: 1182511 - RNA, 19 nt, Homo sapiens
  misc_RNA (1)...(19): siRNA sense strand
ccgaagugaaggagaauuc

SEQ ID NO: 1182512 - RNA, 19 nt, Homo sapiens
  misc_RNA (1)...(19): siRNA sense strand
aggcgcaagucgagaggaa

SEQ ID NO: 1182513 - RNA, 19 nt, Homo sapiens
  misc_RNA (1)...(19): siRNA sense strand
caggagagcuggucuuuga

SEQ ID NO: 1182514 - RNA, 19 nt, Homo sapiens
  misc_RNA (1)...(19): siRNA sense strand
gaaggagaauucaaacaga

SEQ ID NO: 1182515 - RNA, 19 nt, Homo sapiens
  misc_RNA (1)...(19): siRNA sense strand
ggacacccaugacuucaaa

SEQ ID NO: 1182516 - RNA, 19 nt, Homo sapiens
  misc_RNA (1)...(19): siRNA sense strand
gaauacaccugguucaaag

SEQ ID NO: 1182517 - RNA, 19 nt, Homo sapiens
  misc_RNA (1)...(19): siRNA sense strand
cgaguaagaaggugauuua

SEQ ID NO: 1182518 - RNA, 19 nt, Homo sapiens
  misc_RNA (1)...(19): siRNA sense strand
gaauaauccugugaaguug

SEQ ID NO: 1182519 - RNA, 19 nt, Homo sapiens
  misc_RNA (1)...(19): siRNA sense strand
agaauaauccugugaaguu

SEQ ID NO: 1182520 - RNA, 19 nt, Homo sapiens
  misc_RNA (1)...(19): siRNA sense strand
caacugguaucaccuucaa

SEQ ID NO: 1182521 - RNA, 19 nt, Homo sapiens
  misc_RNA (1)...(19): siRNA sense strand
ggauagugaugccuacgaa

SEQ ID NO: 1182522 - RNA, 19 nt, Homo sapiens
  misc_RNA (1)...(19): siRNA sense strand
gaaagggacuucgaguaag

SEQ ID NO: 1182523 - RNA, 19 nt, Homo sapiens
  misc_RNA (1)...(19): siRNA sense strand
guucaaagaugggauagug

SEQ ID NO: 1182524 - RNA, 19 nt, Homo sapiens
  misc_RNA (1)...(19): siRNA sense strand
agaaagggacuucgaguaa

SEQ ID NO: 1182525 - RNA, 19 nt, Homo sapiens
  misc_RNA (1)...(19): siRNA sense strand
cauccaagccuacaguuaa

SEQ ID NO: 1182526 - RNA, 19 nt, Homo sapiens
  misc_RNA (1)...(19): siRNA sense strand
gaacaaagaaagggacuuc

SEQ ID NO: 1182527 - RNA, 19 nt, Homo sapiens
  misc_RNA (1)...(19): siRNA sense strand
ucaaacagaccucgucauu

SEQ ID NO: 1182528 - RNA, 19 nt, Homo sapiens
  misc_RNA (1)...(19): siRNA sense strand
ggaagacacugggacauac

SEQ ID NO: 1182529 - RNA, 19 nt, Homo sapiens
  misc_RNA (1)...(19): siRNA sense strand
acacuuguauggucucuga

SEQ ID NO: 1182530 - RNA, 19 nt, Homo sapiens
  misc_RNA (1)...(19): siRNA sense strand
aaacagaccucgucauucc

SEQ ID NO: 1182531 - RNA, 19 nt, Homo sapiens
  misc_RNA (1)...(19): siRNA sense strand
aaagggacuucgaguaaga

SEQ ID NO: 1182532 - RNA, 19 nt, Homo sapiens
  misc_RNA (1)...(19): siRNA sense strand
gggaagacacugggacaua

SEQ ID NO: 1182533 - RNA, 19 nt, Homo sapiens
  misc_RNA (1)...(19): siRNA sense strand
cagcaacucuuccuauguc

SEQ ID NO: 1182534 - RNA, 19 nt, Homo sapiens
  misc_RNA (1)...(19): siRNA sense strand
gcaucugguuugccuauag

SEQ ID NO: 1182535 - RNA, 19 nt, Homo sapiens
  misc_RNA (1)...(19): siRNA sense strand
ggaaggcggcaacagcuau

SEQ ID NO: 1182536 - RNA, 19 nt, Homo sapiens
  misc_RNA (1)...(19): siRNA sense strand
aagaaagggacuucgagua

SEQ ID NO: 1182537 - RNA, 19 nt, Homo sapiens
  misc_RNA (1)...(19): siRNA sense strand
ccucugauacuggagaaua

SEQ ID NO: 1182538 - RNA, 19 nt, Homo sapiens
  misc_RNA (1)...(19): siRNA sense strand
uguugugccucuucauauu

SEQ ID NO: 1182539 - RNA, 19 nt, Homo sapiens
  misc_RNA (1)...(19): siRNA sense strand
gaagacacugggacauaca

SEQ ID NO: 1182540 - RNA, 19 nt, Homo sapiens
  misc_RNA (1)...(19): siRNA sense strand
ggagagcuggucuuugauc

SEQ ID NO: 1182541 - RNA, 19 nt, Homo sapiens
  misc_RNA (1)...(19): siRNA sense strand
aaacuguugugccucuuca

SEQ ID NO: 1182542 - RNA, 19 nt, Homo sapiens
  misc_RNA (1)...(19): siRNA sense strand
ccauccaagccuacaguua

SEQ ID NO: 1182543 - RNA, 19 nt, Homo sapiens
  misc_RNA (1)...(19): siRNA sense strand
gagaauaauccugugaagu

SEQ ID NO: 1182544 - RNA, 19 nt, Homo sapiens
  misc_RNA (1)...(19): siRNA sense strand
ugagaauaauccugugaag

SEQ ID NO: 1182545 - RNA, 19 nt, Homo sapiens
  misc_RNA (1)...(19): siRNA sense strand
gaaacuguugugccucuuc

SEQ ID NO: 1182546 - RNA, 19 nt, Homo sapiens
  misc_RNA (1)...(19): siRNA sense strand
cgaggccacuuugacagaa

SEQ ID NO: 1182547 - RNA, 19 nt, Homo sapiens
  misc_RNA (1)...(19): siRNA sense strand
gacaugcucagaacaagau

SEQ ID NO: 1182548 - RNA, 19 nt, Homo sapiens
  misc_RNA (1)...(19): siRNA sense strand
cguggcagccguccuugua

SEQ ID NO: 1182549 - RNA, 19 nt, Homo sapiens
  misc_RNA (1)...(19): siRNA sense strand
caaacagaccucgucauuc

SEQ ID NO: 1182550 - RNA, 19 nt, Homo sapiens
  misc_RNA (1)...(19): siRNA sense strand
acacugggacauacacuug

SEQ ID NO: 1182551 - RNA, 19 nt, Homo sapiens
  misc_RNA (1)...(19): siRNA sense strand
gaaccgggcagugcugaca

SEQ ID NO: 1182552 - RNA, 19 nt, Homo sapiens
  misc_RNA (1)...(19): siRNA sense strand
gaaggcggcaacagcuaug

SEQ ID NO: 1182553 - RNA, 19 nt, Homo sapiens
  misc_RNA (1)...(19): siRNA sense strand
ggaaacuguugugccucuu

SEQ ID NO: 1182554 - RNA, 19 nt, Homo sapiens
  misc_RNA (1)...(19): siRNA sense strand
ucaaagaugggauagugau

SEQ ID NO: 1182555 - RNA, 19 nt, Homo sapiens
  misc_RNA (1)...(19): siRNA sense strand
caaagaugggauagugaug

SEQ ID NO: 1182556 - RNA, 19 nt, Homo sapiens
  misc_RNA (1)...(19): siRNA sense strand
caacaggagagcuggucuu

SEQ ID NO: 1182557 - RNA, 19 nt, Homo sapiens
  misc_RNA (1)...(19): siRNA sense strand
caagaugguuccccaccuu

SEQ ID NO: 1182558 - RNA, 19 nt, Homo sapiens
  misc_RNA (1)...(19): siRNA sense strand
acaaagaaagggacuucga

SEQ ID NO: 1182559 - RNA, 19 nt, Homo sapiens
  misc_RNA (1)...(19): siRNA sense strand
ugacaugcucagaacaaga

SEQ ID NO: 1182560 - RNA, 19 nt, Homo sapiens
  misc_RNA (1)...(19): siRNA sense strand
guugugccucuucauauug

SEQ ID NO: 1182561 - RNA, 19 nt, Homo sapiens
  misc_RNA (1)...(19): siRNA sense strand
caucguggcagccguccuu

SEQ ID NO: 1182562 - RNA, 19 nt, Homo sapiens
  misc_RNA (1)...(19): siRNA sense strand
ggaccgggugaccuucuug

SEQ ID NO: 1182563 - RNA, 19 nt, Homo sapiens
  misc_RNA (1)...(19): siRNA sense strand
ccgaagugaaggagaauuc

SEQ ID NO: 1182564 - RNA, 19 nt, Homo sapiens
  misc_RNA (1)...(19): siRNA sense strand
aggcgcaagucgagaggaa

SEQ ID NO: 1182565 - RNA, 19 nt, Homo sapiens
  misc_RNA (1)...(19): siRNA sense strand
caggagagcuggucuuuga

SEQ ID NO: 1182566 - RNA, 19 nt, Homo sapiens
  misc_RNA (1)...(19): siRNA sense strand
gaaggagaauucaaacaga

SEQ ID NO: 1182567 - RNA, 19 nt, Homo sapiens
  misc_RNA (1)...(19): siRNA sense strand
ggacacccaugacuucaaa

SEQ ID NO: 1182568 - RNA, 19 nt, Homo sapiens
  misc_RNA (1)...(19): siRNA sense strand
gaauacaccugguucaaag

SEQ ID NO: 1182569 - RNA, 19 nt, Homo sapiens
  misc_RNA (1)...(19): siRNA sense strand
cgaguaagaaggugauuua

SEQ ID NO: 1182570 - RNA, 19 nt, Homo sapiens
  misc_RNA (1)...(19): siRNA sense strand
gaauaauccugugaaguug

SEQ ID NO: 1182571 - RNA, 19 nt, Homo sapiens
  misc_RNA (1)...(19): siRNA sense strand
agaauaauccugugaaguu

SEQ ID NO: 1182572 - RNA, 19 nt, Homo sapiens
  misc_RNA (1)...(19): siRNA sense strand
caacugguaucaccuucaa

SEQ ID NO: 1182573 - RNA, 19 nt, Homo sapiens
  misc_RNA (1)...(19): siRNA sense strand
ggauagugaugccuacgaa

SEQ ID NO: 1182574 - RNA, 19 nt, Homo sapiens
  misc_RNA (1)...(19): siRNA sense strand
gaaagggacuucgaguaag

SEQ ID NO: 1182575 - RNA, 19 nt, Homo sapiens
  misc_RNA (1)...(19): siRNA sense strand
guucaaagaugggauagug

SEQ ID NO: 1182576 - RNA, 19 nt, Homo sapiens
  misc_RNA (1)...(19): siRNA sense strand
agaaagggacuucgaguaa

SEQ ID NO: 1182577 - RNA, 19 nt, Homo sapiens
  misc_RNA (1)...(19): siRNA sense strand
cauccaagccuacaguuaa

SEQ ID NO: 1182578 - RNA, 19 nt, Homo sapiens
  misc_RNA (1)...(19): siRNA sense strand
gaacaaagaaagggacuuc

SEQ ID NO: 1182579 - RNA, 19 nt, Homo sapiens
  misc_RNA (1)...(19): siRNA sense strand
ucaaacagaccucgucauu

SEQ ID NO: 1182580 - RNA, 19 nt, Homo sapiens
  misc_RNA (1)...(19): siRNA sense strand
ggaagacacugggacauac

SEQ ID NO: 1182581 - RNA, 19 nt, Homo sapiens
  misc_RNA (1)...(19): siRNA sense strand
acacuuguauggucucuga

SEQ ID NO: 1182582 - RNA, 19 nt, Homo sapiens
  misc_RNA (1)...(19): siRNA sense strand
aaacagaccucgucauucc

SEQ ID NO: 1182583 - RNA, 19 nt, Homo sapiens
  misc_RNA (1)...(19): siRNA sense strand
aaagggacuucgaguaaga

SEQ ID NO: 1182584 - RNA, 19 nt, Homo sapiens
  misc_RNA (1)...(19): siRNA sense strand
gggaagacacugggacaua

SEQ ID NO: 1182585 - RNA, 19 nt, Homo sapiens
  misc_RNA (1)...(19): siRNA sense strand
cagcaacucuuccuauguc

SEQ ID NO: 1182586 - RNA, 19 nt, Homo sapiens
  misc_RNA (1)...(19): siRNA sense strand
gcaucugguuugccuauag

SEQ ID NO: 1182587 - RNA, 19 nt, Homo sapiens
  misc_RNA (1)...(19): siRNA sense strand
ggaaggcggcaacagcuau

SEQ ID NO: 1182588 - RNA, 19 nt, Homo sapiens
  misc_RNA (1)...(19): siRNA sense strand
aagaaagggacuucgagua

SEQ ID NO: 1182589 - RNA, 19 nt, Homo sapiens
  misc_RNA (1)...(19): siRNA sense strand
ccucugauacuggagaaua

SEQ ID NO: 1182590 - RNA, 19 nt, Homo sapiens
  misc_RNA (1)...(19): siRNA sense strand
uguugugccucuucauauu

SEQ ID NO: 1182591 - RNA, 19 nt, Homo sapiens
  misc_RNA (1)...(19): siRNA sense strand
gaagacacugggacauaca

SEQ ID NO: 1182592 - RNA, 19 nt, Homo sapiens
  misc_RNA (1)...(19): siRNA sense strand
ggagagcuggucuuugauc

SEQ ID NO: 1182593 - RNA, 19 nt, Homo sapiens
  misc_RNA (1)...(19): siRNA sense strand
aaacuguugugccucuuca

SEQ ID NO: 1182594 - RNA, 19 nt, Homo sapiens
  misc_RNA (1)...(19): siRNA sense strand
ccauccaagccuacaguua

SEQ ID NO: 1182595 - RNA, 19 nt, Homo sapiens
  misc_RNA (1)...(19): siRNA sense strand
gagaauaauccugugaagu

SEQ ID NO: 1182596 - RNA, 19 nt, Homo sapiens
  misc_RNA (1)...(19): siRNA sense strand
ugagaauaauccugugaag

SEQ ID NO: 1182597 - RNA, 19 nt, Homo sapiens
  misc_RNA (1)...(19): siRNA sense strand
gaaacuguugugccucuuc

SEQ ID NO: 1182598 - RNA, 19 nt, Homo sapiens
  misc_RNA (1)...(19): siRNA sense strand
cgaggccacuuugacagaa

SEQ ID NO: 1182599 - RNA, 19 nt, Homo sapiens
  misc_RNA (1)...(19): siRNA sense strand
gacaugcucagaacaagau

SEQ ID NO: 1182600 - RNA, 19 nt, Homo sapiens
  misc_RNA (1)...(19): siRNA sense strand
cguggcagccguccuugua

SEQ ID NO: 1182601 - RNA, 19 nt, Homo sapiens
  misc_RNA (1)...(19): siRNA sense strand
caaacagaccucgucauuc

SEQ ID NO: 1182602 - RNA, 19 nt, Homo sapiens
  misc_RNA (1)...(19): siRNA sense strand
acacugggacauacacuug

SEQ ID NO: 1182603 - RNA, 19 nt, Homo sapiens
  misc_RNA (1)...(19): siRNA sense strand
gaaccgggcagugcugaca

SEQ ID NO: 1182604 - RNA, 19 nt, Homo sapiens
  misc_RNA (1)...(19): siRNA sense strand
gaaggcggcaacagcuaug

SEQ ID NO: 1182605 - RNA, 19 nt, Homo sapiens
  misc_RNA (1)...(19): siRNA sense strand
ggaaacuguugugccucuu

SEQ ID NO: 1182606 - RNA, 19 nt, Homo sapiens
  misc_RNA (1)...(19): siRNA sense strand
ucaaagaugggauagugau

SEQ ID NO: 1182607 - RNA, 19 nt, Homo sapiens
  misc_RNA (1)...(19): siRNA sense strand
caaagaugggauagugaug

SEQ ID NO: 1182608 - RNA, 19 nt, Homo sapiens
  misc_RNA (1)...(19): siRNA sense strand
caacaggagagcuggucuu

SEQ ID NO: 1182609 - RNA, 19 nt, Homo sapiens
  misc_RNA (1)...(19): siRNA sense strand
caagaugguuccccaccuu

SEQ ID NO: 1182610 - RNA, 19 nt, Homo sapiens
  misc_RNA (1)...(19): siRNA sense strand
acaaagaaagggacuucga

SEQ ID NO: 1182611 - RNA, 19 nt, Homo sapiens
  misc_RNA (1)...(19): siRNA sense strand
ugacaugcucagaacaaga

SEQ ID NO: 1182612 - RNA, 19 nt, Homo sapiens
  misc_RNA (1)...(19): siRNA sense strand
guugugccucuucauauug

SEQ ID NO: 1182613 - RNA, 19 nt, Homo sapiens
  misc_RNA (1)...(19): siRNA sense strand
caucguggcagccguccuu

SEQ ID NO: 1182614 - RNA, 19 nt, Homo sapiens
  misc_RNA (1)...(19): siRNA sense strand
ggaccgggugaccuucuug

SEQ ID NO: 1182615 - RNA, 19 nt, Homo sapiens
  misc_RNA (1)...(19): siRNA sense strand
ccgaagugaaggagaauuc

SEQ ID NO: 1182616 - RNA, 19 nt, Homo sapiens
  misc_RNA (1)...(19): siRNA sense strand
aggcgcaagucgagaggaa

SEQ ID NO: 1182617 - RNA, 19 nt, Homo sapiens
  misc_RNA (1)...(19): siRNA sense strand
caggagagcuggucuuuga

SEQ ID NO: 1182618 - RNA, 19 nt, Homo sapiens
  misc_RNA (1)...(19): siRNA sense strand
gaaggagaauucaaacaga

SEQ ID NO: 1182619 - RNA, 19 nt, Homo sapiens
  misc_RNA (1)...(19): siRNA sense strand
ggacacccaugacuucaaa

SEQ ID NO: 1182620 - RNA, 19 nt, Homo sapiens
  misc_RNA (1)...(19): siRNA sense strand
gaauacaccugguucaaag

SEQ ID NO: 1182621 - RNA, 19 nt, Homo sapiens
  misc_RNA (1)...(19): siRNA sense strand
cgaguaagaaggugauuua

SEQ ID NO: 1182622 - RNA, 19 nt, Homo sapiens
  misc_RNA (1)...(19): siRNA sense strand
gaauaauccugugaaguug

SEQ ID NO: 1182623 - RNA, 19 nt, Homo sapiens
  misc_RNA (1)...(19): siRNA sense strand
agaauaauccugugaaguu

SEQ ID NO: 1182624 - RNA, 19 nt, Homo sapiens
  misc_RNA (1)...(19): siRNA sense strand
caacugguaucaccuucaa

SEQ ID NO: 1182625 - RNA, 19 nt, Homo sapiens
  misc_RNA (1)...(19): siRNA sense strand
ggauagugaugccuacgaa

SEQ ID NO: 1182626 - RNA, 19 nt, Homo sapiens
  misc_RNA (1)...(19): siRNA sense strand
gaaagggacuucgaguaag

SEQ ID NO: 1182627 - RNA, 19 nt, Homo sapiens
  misc_RNA (1)...(19): siRNA sense strand
guucaaagaugggauagug

SEQ ID NO: 1182628 - RNA, 19 nt, Homo sapiens
  misc_RNA (1)...(19): siRNA sense strand
agaaagggacuucgaguaa

SEQ ID NO: 1182629 - RNA, 19 nt, Homo sapiens
  misc_RNA (1)...(19): siRNA sense strand
cauccaagccuacaguuaa

SEQ ID NO: 1182630 - RNA, 19 nt, Homo sapiens
  misc_RNA (1)...(19): siRNA sense strand
gaacaaagaaagggacuuc

SEQ ID NO: 1182631 - RNA, 19 nt, Homo sapiens
  misc_RNA (1)...(19): siRNA sense strand
ucaaacagaccucgucauu

SEQ ID NO: 1182632 - RNA, 19 nt, Homo sapiens
  misc_RNA (1)...(19): siRNA sense strand
ggaagacacugggacauac

SEQ ID NO: 1182633 - RNA, 19 nt, Homo sapiens
  misc_RNA (1)...(19): siRNA sense strand
acacuuguauggucucuga

SEQ ID NO: 1182634 - RNA, 19 nt, Homo sapiens
  misc_RNA (1)...(19): siRNA sense strand
aaacagaccucgucauucc

SEQ ID NO: 1182635 - RNA, 19 nt, Homo sapiens
  misc_RNA (1)...(19): siRNA sense strand
aaagggacuucgaguaaga

SEQ ID NO: 1182636 - RNA, 19 nt, Homo sapiens
  misc_RNA (1)...(19): siRNA sense strand
gggaagacacugggacaua

SEQ ID NO: 1182637 - RNA, 19 nt, Homo sapiens
  misc_RNA (1)...(19): siRNA sense strand
cagcaacucuuccuauguc

SEQ ID NO: 1182638 - RNA, 19 nt, Homo sapiens
  misc_RNA (1)...(19): siRNA sense strand
gcaucugguuugccuauag

SEQ ID NO: 1182639 - RNA, 19 nt, Homo sapiens
  misc_RNA (1)...(19): siRNA sense strand
ggaaggcggcaacagcuau

SEQ ID NO: 1182640 - RNA, 19 nt, Homo sapiens
  misc_RNA (1)...(19): siRNA sense strand
aagaaagggacuucgagua

SEQ ID NO: 1182641 - RNA, 19 nt, Homo sapiens
  misc_RNA (1)...(19): siRNA sense strand
ccucugauacuggagaaua

SEQ ID NO: 1182642 - RNA, 19 nt, Homo sapiens
  misc_RNA (1)...(19): siRNA sense strand
uguugugccucuucauauu

SEQ ID NO: 1182643 - RNA, 19 nt, Homo sapiens
  misc_RNA (1)...(19): siRNA sense strand
gaagacacugggacauaca

SEQ ID NO: 1182644 - RNA, 19 nt, Homo sapiens
  misc_RNA (1)...(19): siRNA sense strand
ggagagcuggucuuugauc

SEQ ID NO: 1182645 - RNA, 19 nt, Homo sapiens
  misc_RNA (1)...(19): siRNA sense strand
aaacuguugugccucuuca

SEQ ID NO: 1182646 - RNA, 19 nt, Homo sapiens
  misc_RNA (1)...(19): siRNA sense strand
ccauccaagccuacaguua

SEQ ID NO: 1182647 - RNA, 19 nt, Homo sapiens
  misc_RNA (1)...(19): siRNA sense strand
gagaauaauccugugaagu

SEQ ID NO: 1182648 - RNA, 19 nt, Homo sapiens
  misc_RNA (1)...(19): siRNA sense strand
ugagaauaauccugugaag

SEQ ID NO: 1182649 - RNA, 19 nt, Homo sapiens
  misc_RNA (1)...(19): siRNA sense strand
gaaacuguugugccucuuc

SEQ ID NO: 1182650 - RNA, 19 nt, Homo sapiens
  misc_RNA (1)...(19): siRNA sense strand
cgaggccacuuugacagaa

SEQ ID NO: 1182651 - RNA, 19 nt, Homo sapiens
  misc_RNA (1)...(19): siRNA sense strand
gacaugcucagaacaagau

SEQ ID NO: 1182652 - RNA, 19 nt, Homo sapiens
  misc_RNA (1)...(19): siRNA sense strand
cguggcagccguccuugua

SEQ ID NO: 1182653 - RNA, 19 nt, Homo sapiens
  misc_RNA (1)...(19): siRNA sense strand
caaacagaccucgucauuc

SEQ ID NO: 1182654 - RNA, 19 nt, Homo sapiens
  misc_RNA (1)...(19): siRNA sense strand
acacugggacauacacuug

SEQ ID NO: 1182655 - RNA, 19 nt, Homo sapiens
  misc_RNA (1)...(19): siRNA sense strand
gaaccgggcagugcugaca

SEQ ID NO: 1182656 - RNA, 19 nt, Homo sapiens
  misc_RNA (1)...(19): siRNA sense strand
gaaggcggcaacagcuaug

SEQ ID NO: 1182657 - RNA, 19 nt, Homo sapiens
  misc_RNA (1)...(19): siRNA sense strand
ggaaacuguugugccucuu

SEQ ID NO: 1182658 - RNA, 19 nt, Homo sapiens
  misc_RNA (1)...(19): siRNA sense strand
ucaaagaugggauagugau

SEQ ID NO: 1182659 - RNA, 19 nt, Homo sapiens
  misc_RNA (1)...(19): siRNA sense strand
caaagaugggauagugaug

SEQ ID NO: 1182660 - RNA, 19 nt, Homo sapiens
  misc_RNA (1)...(19): siRNA sense strand
caacaggagagcuggucuu

SEQ ID NO: 1182661 - RNA, 19 nt, Homo sapiens
  misc_RNA (1)...(19): siRNA sense strand
caagaugguuccccaccuu

SEQ ID NO: 1182662 - RNA, 19 nt, Homo sapiens
  misc_RNA (1)...(19): siRNA sense strand
acaaagaaagggacuucga

SEQ ID NO: 1182663 - RNA, 19 nt, Homo sapiens
  misc_RNA (1)...(19): siRNA sense strand
ugacaugcucagaacaaga

SEQ ID NO: 1182664 - RNA, 19 nt, Homo sapiens
  misc_RNA (1)...(19): siRNA sense strand
guugugccucuucauauug

SEQ ID NO: 1182665 - RNA, 19 nt, Homo sapiens
  misc_RNA (1)...(19): siRNA sense strand
caucguggcagccguccuu

SEQ ID NO: 1182666 - RNA, 19 nt, Homo sapiens
  misc_RNA (1)...(19): siRNA sense strand
ggaccgggugaccuucuug

SEQ ID NO: 1182667 - RNA, 19 nt, Homo sapiens
  misc_RNA (1)...(19): siRNA sense strand
ccgaagugaaggagaauuc

SEQ ID NO: 1182668 - RNA, 19 nt, Homo sapiens
  misc_RNA (1)...(19): siRNA sense strand
aggcgcaagucgagaggaa

SEQ ID NO: 1182669 - RNA, 19 nt, Homo sapiens
  misc_RNA (1)...(19): siRNA sense strand
caggagagcuggucuuuga

SEQ ID NO: 1182670 - RNA, 19 nt, Homo sapiens
  misc_RNA (1)...(19): siRNA sense strand
gaaggagaauucaaacaga

SEQ ID NO: 1182671 - RNA, 19 nt, Homo sapiens
  misc_RNA (1)...(19): siRNA sense strand
ggacacccaugacuucaaa

SEQ ID NO: 1182672 - RNA, 19 nt, Homo sapiens
  misc_RNA (1)...(19): siRNA sense strand
gaauacaccugguucaaag

SEQ ID NO: 1182673 - RNA, 19 nt, Homo sapiens
  misc_RNA (1)...(19): siRNA sense strand
cgaguaagaaggugauuua

SEQ ID NO: 1182674 - RNA, 19 nt, Homo sapiens
  misc_RNA (1)...(19): siRNA sense strand
gaauaauccugugaaguug

SEQ ID NO: 1182675 - RNA, 19 nt, Homo sapiens
  misc_RNA (1)...(19): siRNA sense strand
agaauaauccugugaaguu

SEQ ID NO: 1182676 - RNA, 19 nt, Homo sapiens
  misc_RNA (1)...(19): siRNA sense strand
caacugguaucaccuucaa

SEQ ID NO: 1182677 - RNA, 19 nt, Homo sapiens
  misc_RNA (1)...(19): siRNA sense strand
ggauagugaugccuacgaa

SEQ ID NO: 1182678 - RNA, 19 nt, Homo sapiens
  misc_RNA (1)...(19): siRNA sense strand
gaaagggacuucgaguaag

SEQ ID NO: 1182679 - RNA, 19 nt, Homo sapiens
  misc_RNA (1)...(19): siRNA sense strand
guucaaagaugggauagug

SEQ ID NO: 1182680 - RNA, 19 nt, Homo sapiens
  misc_RNA (1)...(19): siRNA sense strand
agaaagggacuucgaguaa

SEQ ID NO: 1182681 - RNA, 19 nt, Homo sapiens
  misc_RNA (1)...(19): siRNA sense strand
cauccaagccuacaguuaa

SEQ ID NO: 1182682 - RNA, 19 nt, Homo sapiens
  misc_RNA (1)...(19): siRNA sense strand
gaacaaagaaagggacuuc

SEQ ID NO: 1182683 - RNA, 19 nt, Homo sapiens
  misc_RNA (1)...(19): siRNA sense strand
ucaaacagaccucgucauu

SEQ ID NO: 1182684 - RNA, 19 nt, Homo sapiens
  misc_RNA (1)...(19): siRNA sense strand
ggaagacacugggacauac

SEQ ID NO: 1182685 - RNA, 19 nt, Homo sapiens
  misc_RNA (1)...(19): siRNA sense strand
acacuuguauggucucuga

SEQ ID NO: 1182686 - RNA, 19 nt, Homo sapiens
  misc_RNA (1)...(19): siRNA sense strand
aaacagaccucgucauucc

SEQ ID NO: 1182687 - RNA, 19 nt, Homo sapiens
  misc_RNA (1)...(19): siRNA sense strand
aaagggacuucgaguaaga

SEQ ID NO: 1182688 - RNA, 19 nt, Homo sapiens
  misc_RNA (1)...(19): siRNA sense strand
gggaagacacugggacaua

SEQ ID NO: 1182689 - RNA, 19 nt, Homo sapiens
  misc_RNA (1)...(19): siRNA sense strand
cagcaacucuuccuauguc

SEQ ID NO: 1182690 - RNA, 19 nt, Homo sapiens
  misc_RNA (1)...(19): siRNA sense strand
gcaucugguuugccuauag

SEQ ID NO: 1182691 - RNA, 19 nt, Homo sapiens
  misc_RNA (1)...(19): siRNA sense strand
ggaaggcggcaacagcuau

SEQ ID NO: 1182692 - RNA, 19 nt, Homo sapiens
  misc_RNA (1)...(19): siRNA sense strand
aagaaagggacuucgagua

SEQ ID NO: 1182693 - RNA, 19 nt, Homo sapiens
  misc_RNA (1)...(19): siRNA sense strand
ccucugauacuggagaaua

SEQ ID NO: 1182694 - RNA, 19 nt, Homo sapiens
  misc_RNA (1)...(19): siRNA sense strand
uguugugccucuucauauu

SEQ ID NO: 1182695 - RNA, 19 nt, Homo sapiens
  misc_RNA (1)...(19): siRNA sense strand
gaagacacugggacauaca

SEQ ID NO: 1182696 - RNA, 19 nt, Homo sapiens
  misc_RNA (1)...(19): siRNA sense strand
ggagagcuggucuuugauc

SEQ ID NO: 1182697 - RNA, 19 nt, Homo sapiens
  misc_RNA (1)...(19): siRNA sense strand
aaacuguugugccucuuca

SEQ ID NO: 1182698 - RNA, 19 nt, Homo sapiens
  misc_RNA (1)...(19): siRNA sense strand
ccauccaagccuacaguua

SEQ ID NO: 1182699 - RNA, 19 nt, Homo sapiens
  misc_RNA (1)...(19): siRNA sense strand
gagaauaauccugugaagu

SEQ ID NO: 1182700 - RNA, 19 nt, Homo sapiens
  misc_RNA (1)...(19): siRNA sense strand
ugagaauaauccugugaag

SEQ ID NO: 1182701 - RNA, 19 nt, Homo sapiens
  misc_RNA (1)...(19): siRNA sense strand
gaaacuguugugccucuuc

SEQ ID NO: 1182702 - RNA, 19 nt, Homo sapiens
  misc_RNA (1)...(19): siRNA sense strand
cgaggccacuuugacagaa

SEQ ID NO: 1182703 - RNA, 19 nt, Homo sapiens
  misc_RNA (1)...(19): siRNA sense strand
gacaugcucagaacaagau

SEQ ID NO: 1182704 - RNA, 19 nt, Homo sapiens
  misc_RNA (1)...(19): siRNA sense strand
cguggcagccguccuugua

SEQ ID NO: 1182705 - RNA, 19 nt, Homo sapiens
  misc_RNA (1)...(19): siRNA sense strand
caaacagaccucgucauuc

SEQ ID NO: 1182706 - RNA, 19 nt, Homo sapiens
  misc_RNA (1)...(19): siRNA sense strand
acacugggacauacacuug

SEQ ID NO: 1182707 - RNA, 19 nt, Homo sapiens
  misc_RNA (1)...(19): siRNA sense strand
gaaccgggcagugcugaca

SEQ ID NO: 1182708 - RNA, 19 nt, Homo sapiens
  misc_RNA (1)...(19): siRNA sense strand
gaaggcggcaacagcuaug

SEQ ID NO: 1182709 - RNA, 19 nt, Homo sapiens
  misc_RNA (1)...(19): siRNA sense strand
ggaaacuguugugccucuu

SEQ ID NO: 1182710 - RNA, 19 nt, Homo sapiens
  misc_RNA (1)...(19): siRNA sense strand
ucaaagaugggauagugau

SEQ ID NO: 1182711 - RNA, 19 nt, Homo sapiens
  misc_RNA (1)...(19): siRNA sense strand
caaagaugggauagugaug

SEQ ID NO: 1182712 - RNA, 19 nt, Homo sapiens
  misc_RNA (1)...(19): siRNA sense strand
caacaggagagcuggucuu

SEQ ID NO: 1182713 - RNA, 19 nt, Homo sapiens
  misc_RNA (1)...(19): siRNA sense strand
caagaugguuccccaccuu

SEQ ID NO: 1182714 - RNA, 19 nt, Homo sapiens
  misc_RNA (1)...(19): siRNA sense strand
acaaagaaagggacuucga

SEQ ID NO: 1182715 - RNA, 19 nt, Homo sapiens
  misc_RNA (1)...(19): siRNA sense strand
ugacaugcucagaacaaga

SEQ ID NO: 1182716 - RNA, 19 nt, Homo sapiens
  misc_RNA (1)...(19): siRNA sense strand
guugugccucuucauauug

SEQ ID NO: 1182717 - RNA, 19 nt, Homo sapiens
  misc_RNA (1)...(19): siRNA sense strand
caucguggcagccguccuu

SEQ ID NO: 1182718 - RNA, 19 nt, Homo sapiens
  misc_RNA (1)...(19): siRNA sense strand
ggaccgggugaccuucuug

SEQ ID NO: 1182719 - RNA, 19 nt, Homo sapiens
  misc_RNA (1)...(19): siRNA sense strand
ccgaagugaaggagaauuc

SEQ ID NO: 1182720 - RNA, 19 nt, Homo sapiens
  misc_RNA (1)...(19): siRNA sense strand
aggcgcaagucgagaggaa

SEQ ID NO: 1182721 - RNA, 19 nt, Homo sapiens
  misc_RNA (1)...(19): siRNA sense strand
caggagagcuggucuuuga

SEQ ID NO: 1182722 - RNA, 19 nt, Homo sapiens
  misc_RNA (1)...(19): siRNA sense strand
gaaggagaauucaaacaga

SEQ ID NO: 1182723 - RNA, 19 nt, Homo sapiens
  misc_RNA (1)...(19): siRNA sense strand
ggacacccaugacuucaaa

SEQ ID NO: 1182724 - RNA, 19 nt, Homo sapiens
  misc_RNA (1)...(19): siRNA sense strand
gaauacaccugguucaaag

SEQ ID NO: 1182725 - RNA, 19 nt, Homo sapiens
  misc_RNA (1)...(19): siRNA sense strand
cgaguaagaaggugauuua

SEQ ID NO: 1182726 - RNA, 19 nt, Homo sapiens
  misc_RNA (1)...(19): siRNA sense strand
gaauaauccugugaaguug

SEQ ID NO: 1182727 - RNA, 19 nt, Homo sapiens
  misc_RNA (1)...(19): siRNA sense strand
agaauaauccugugaaguu

SEQ ID NO: 1182728 - RNA, 19 nt, Homo sapiens
  misc_RNA (1)...(19): siRNA sense strand
caacugguaucaccuucaa

SEQ ID NO: 1182729 - RNA, 19 nt, Homo sapiens
  misc_RNA (1)...(19): siRNA sense strand
ggauagugaugccuacgaa

SEQ ID NO: 1182730 - RNA, 19 nt, Homo sapiens
  misc_RNA (1)...(19): siRNA sense strand
gaaagggacuucgaguaag

SEQ ID NO: 1182731 - RNA, 19 nt, Homo sapiens
  misc_RNA (1)...(19): siRNA sense strand
guucaaagaugggauagug

SEQ ID NO: 1182732 - RNA, 19 nt, Homo sapiens
  misc_RNA (1)...(19): siRNA sense strand
agaaagggacuucgaguaa

SEQ ID NO: 1182733 - RNA, 19 nt, Homo sapiens
  misc_RNA (1)...(19): siRNA sense strand
cauccaagccuacaguuaa

SEQ ID NO: 1182734 - RNA, 19 nt, Homo sapiens
  misc_RNA (1)...(19): siRNA sense strand
gaacaaagaaagggacuuc

SEQ ID NO: 1182735 - RNA, 19 nt, Homo sapiens
  misc_RNA (1)...(19): siRNA sense strand
ucaaacagaccucgucauu

SEQ ID NO: 1182736 - RNA, 19 nt, Homo sapiens
  misc_RNA (1)...(19): siRNA sense strand
ggaagacacugggacauac

SEQ ID NO: 1182737 - RNA, 19 nt, Homo sapiens
  misc_RNA (1)...(19): siRNA sense strand
acacuuguauggucucuga

SEQ ID NO: 1182738 - RNA, 19 nt, Homo sapiens
  misc_RNA (1)...(19): siRNA sense strand
aaacagaccucgucauucc

SEQ ID NO: 1182739 - RNA, 19 nt, Homo sapiens
  misc_RNA (1)...(19): siRNA sense strand
aaagggacuucgaguaaga

SEQ ID NO: 1182740 - RNA, 19 nt, Homo sapiens
  misc_RNA (1)...(19): siRNA sense strand
gggaagacacugggacaua

SEQ ID NO: 1182741 - RNA, 19 nt, Homo sapiens
  misc_RNA (1)...(19): siRNA sense strand
cagcaacucuuccuauguc

SEQ ID NO: 1182742 - RNA, 19 nt, Homo sapiens
  misc_RNA (1)...(19): siRNA sense strand
gcaucugguuugccuauag

SEQ ID NO: 1182743 - RNA, 19 nt, Homo sapiens
  misc_RNA (1)...(19): siRNA sense strand
ggaaggcggcaacagcuau

SEQ ID NO: 1182744 - RNA, 19 nt, Homo sapiens
  misc_RNA (1)...(19): siRNA sense strand
aagaaagggacuucgagua

SEQ ID NO: 1182745 - RNA, 19 nt, Homo sapiens
  misc_RNA (1)...(19): siRNA sense strand
ccucugauacuggagaaua

SEQ ID NO: 1182746 - RNA, 19 nt, Homo sapiens
  misc_RNA (1)...(19): siRNA sense strand
uguugugccucuucauauu

SEQ ID NO: 1182747 - RNA, 19 nt, Homo sapiens
  misc_RNA (1)...(19): siRNA sense strand
gaagacacugggacauaca

SEQ ID NO: 1182748 - RNA, 19 nt, Homo sapiens
  misc_RNA (1)...(19): siRNA sense strand
ggagagcuggucuuugauc

SEQ ID NO: 1182749 - RNA, 19 nt, Homo sapiens
  misc_RNA (1)...(19): siRNA sense strand
aaacuguugugccucuuca

SEQ ID NO: 1182750 - RNA, 19 nt, Homo sapiens
  misc_RNA (1)...(19): siRNA sense strand
ccauccaagccuacaguua

SEQ ID NO: 1182751 - RNA, 19 nt, Homo sapiens
  misc_RNA (1)...(19): siRNA sense strand
gagaauaauccugugaagu

SEQ ID NO: 1182752 - RNA, 19 nt, Homo sapiens
  misc_RNA (1)...(19): siRNA sense strand
ugagaauaauccugugaag

SEQ ID NO: 1182753 - RNA, 19 nt, Homo sapiens
  misc_RNA (1)...(19): siRNA sense strand
gaaacuguugugccucuuc

SEQ ID NO: 1182754 - RNA, 19 nt, Homo sapiens
  misc_RNA (1)...(19): siRNA sense strand
cgaggccacuuugacagaa

SEQ ID NO: 1182755 - RNA, 19 nt, Homo sapiens
  misc_RNA (1)...(19): siRNA sense strand
gacaugcucagaacaagau

SEQ ID NO: 1182756 - RNA, 19 nt, Homo sapiens
  misc_RNA (1)...(19): siRNA sense strand
cguggcagccguccuugua

SEQ ID NO: 1182757 - RNA, 19 nt, Homo sapiens
  misc_RNA (1)...(19): siRNA sense strand
caaacagaccucgucauuc

SEQ ID NO: 1182758 - RNA, 19 nt, Homo sapiens
  misc_RNA (1)...(19): siRNA sense strand
acacugggacauacacuug

SEQ ID NO: 1182759 - RNA, 19 nt, Homo sapiens
  misc_RNA (1)...(19): siRNA sense strand
gaaccgggcagugcugaca

SEQ ID NO: 1182760 - RNA, 19 nt, Homo sapiens
  misc_RNA (1)...(19): siRNA sense strand
gaaggcggcaacagcuaug

SEQ ID NO: 1182761 - RNA, 19 nt, Homo sapiens
  misc_RNA (1)...(19): siRNA sense strand
ggaaacuguugugccucuu

SEQ ID NO: 1182762 - RNA, 19 nt, Homo sapiens
  misc_RNA (1)...(19): siRNA sense strand
ucaaagaugggauagugau

SEQ ID NO: 1182763 - RNA, 19 nt, Homo sapiens
  misc_RNA (1)...(19): siRNA sense strand
caaagaugggauagugaug

SEQ ID NO: 1182764 - RNA, 19 nt, Homo sapiens
  misc_RNA (1)...(19): siRNA sense strand
caacaggagagcuggucuu

SEQ ID NO: 1182765 - RNA, 19 nt, Homo sapiens
  misc_RNA (1)...(19): siRNA sense strand
caagaugguuccccaccuu

SEQ ID NO: 1182766 - RNA, 19 nt, Homo sapiens
  misc_RNA (1)...(19): siRNA sense strand
acaaagaaagggacuucga

SEQ ID NO: 1182767 - RNA, 19 nt, Homo sapiens
  misc_RNA (1)...(19): siRNA sense strand
ugacaugcucagaacaaga

SEQ ID NO: 1182768 - RNA, 19 nt, Homo sapiens
  misc_RNA (1)...(19): siRNA sense strand
guugugccucuucauauug

SEQ ID NO: 1182769 - RNA, 19 nt, Homo sapiens
  misc_RNA (1)...(19): siRNA sense strand
caucguggcagccguccuu

SEQ ID NO: 1182770 - RNA, 19 nt, Homo sapiens
  misc_RNA (1)...(19): siRNA sense strand
ggaccgggugaccuucuug

SEQ ID NO: 1182771 - RNA, 19 nt, Homo sapiens
  misc_RNA (1)...(19): siRNA sense strand
ccgaagugaaggagaauuc

SEQ ID NO: 1182772 - RNA, 19 nt, Homo sapiens
  misc_RNA (1)...(19): siRNA sense strand
aggcgcaagucgagaggaa

SEQ ID NO: 1182773 - RNA, 19 nt, Homo sapiens
  misc_RNA (1)...(19): siRNA sense strand
caggagagcuggucuuuga

SEQ ID NO: 1182774 - RNA, 19 nt, Homo sapiens
  misc_RNA (1)...(19): siRNA sense strand
gaaggagaauucaaacaga

SEQ ID NO: 1182775 - RNA, 19 nt, Homo sapiens
  misc_RNA (1)...(19): siRNA sense strand
ggacacccaugacuucaaa

SEQ ID NO: 1182776 - RNA, 19 nt, Homo sapiens
  misc_RNA (1)...(19): siRNA sense strand
gaauacaccugguucaaag

SEQ ID NO: 1182777 - RNA, 19 nt, Homo sapiens
  misc_RNA (1)...(19): siRNA sense strand
cgaguaagaaggugauuua

SEQ ID NO: 1182778 - RNA, 19 nt, Homo sapiens
  misc_RNA (1)...(19): siRNA sense strand
gaauaauccugugaaguug

SEQ ID NO: 1182779 - RNA, 19 nt, Homo sapiens
  misc_RNA (1)...(19): siRNA sense strand
agaauaauccugugaaguu

SEQ ID NO: 1182780 - RNA, 19 nt, Homo sapiens
  misc_RNA (1)...(19): siRNA sense strand
caacugguaucaccuucaa

SEQ ID NO: 1182781 - RNA, 19 nt, Homo sapiens
  misc_RNA (1)...(19): siRNA sense strand
ggauagugaugccuacgaa

SEQ ID NO: 1182782 - RNA, 19 nt, Homo sapiens
  misc_RNA (1)...(19): siRNA sense strand
gaaagggacuucgaguaag

SEQ ID NO: 1182783 - RNA, 19 nt, Homo sapiens
  misc_RNA (1)...(19): siRNA sense strand
guucaaagaugggauagug

SEQ ID NO: 1182784 - RNA, 19 nt, Homo sapiens
  misc_RNA (1)...(19): siRNA sense strand
agaaagggacuucgaguaa

SEQ ID NO: 1182785 - RNA, 19 nt, Homo sapiens
  misc_RNA (1)...(19): siRNA sense strand
cauccaagccuacaguuaa

SEQ ID NO: 1182786 - RNA, 19 nt, Homo sapiens
  misc_RNA (1)...(19): siRNA sense strand
gaacaaagaaagggacuuc

SEQ ID NO: 1182787 - RNA, 19 nt, Homo sapiens
  misc_RNA (1)...(19): siRNA sense strand
ucaaacagaccucgucauu

SEQ ID NO: 1182788 - RNA, 19 nt, Homo sapiens
  misc_RNA (1)...(19): siRNA sense strand
ggaagacacugggacauac

SEQ ID NO: 1182789 - RNA, 19 nt, Homo sapiens
  misc_RNA (1)...(19): siRNA sense strand
acacuuguauggucucuga

SEQ ID NO: 1182790 - RNA, 19 nt, Homo sapiens
  misc_RNA (1)...(19): siRNA sense strand
aaacagaccucgucauucc

SEQ ID NO: 1182791 - RNA, 19 nt, Homo sapiens
  misc_RNA (1)...(19): siRNA sense strand
aaagggacuucgaguaaga

SEQ ID NO: 1182792 - RNA, 19 nt, Homo sapiens
  misc_RNA (1)...(19): siRNA sense strand
gggaagacacugggacaua

SEQ ID NO: 1182793 - RNA, 19 nt, Homo sapiens
  misc_RNA (1)...(19): siRNA sense strand
cagcaacucuuccuauguc

SEQ ID NO: 1182794 - RNA, 19 nt, Homo sapiens
  misc_RNA (1)...(19): siRNA sense strand
gcaucugguuugccuauag

SEQ ID NO: 1182795 - RNA, 19 nt, Homo sapiens
  misc_RNA (1)...(19): siRNA sense strand
ggaaggcggcaacagcuau

SEQ ID NO: 1182796 - RNA, 19 nt, Homo sapiens
  misc_RNA (1)...(19): siRNA sense strand
aagaaagggacuucgagua

SEQ ID NO: 1182797 - RNA, 19 nt, Homo sapiens
  misc_RNA (1)...(19): siRNA sense strand
ccucugauacuggagaaua

SEQ ID NO: 1182798 - RNA, 19 nt, Homo sapiens
  misc_RNA (1)...(19): siRNA sense strand
uguugugccucuucauauu

SEQ ID NO: 1182799 - RNA, 19 nt, Homo sapiens
  misc_RNA (1)...(19): siRNA sense strand
gaagacacugggacauaca

SEQ ID NO: 1182800 - RNA, 19 nt, Homo sapiens
  misc_RNA (1)...(19): siRNA sense strand
ggagagcuggucuuugauc

SEQ ID NO: 1182801 - RNA, 19 nt, Homo sapiens
  misc_RNA (1)...(19): siRNA sense strand
aaacuguugugccucuuca

SEQ ID NO: 1182802 - RNA, 19 nt, Homo sapiens
  misc_RNA (1)...(19): siRNA sense strand
ccauccaagccuacaguua

SEQ ID NO: 1182803 - RNA, 19 nt, Homo sapiens
  misc_RNA (1)...(19): siRNA sense strand
gagaauaauccugugaagu

SEQ ID NO: 1182804 - RNA, 19 nt, Homo sapiens
  misc_RNA (1)...(19): siRNA sense strand
ugagaauaauccugugaag

SEQ ID NO: 1182805 - RNA, 19 nt, Homo sapiens
  misc_RNA (1)...(19): siRNA sense strand
gaaacuguugugccucuuc

SEQ ID NO: 1182806 - RNA, 19 nt, Homo sapiens
  misc_RNA (1)...(19): siRNA sense strand
cgaggccacuuugacagaa

SEQ ID NO: 1182807 - RNA, 19 nt, Homo sapiens
  misc_RNA (1)...(19): siRNA sense strand
gacaugcucagaacaagau

SEQ ID NO: 1182808 - RNA, 19 nt, Homo sapiens
  misc_RNA (1)...(19): siRNA sense strand
cguggcagccguccuugua

SEQ ID NO: 1182809 - RNA, 19 nt, Homo sapiens
  misc_RNA (1)...(19): siRNA sense strand
caaacagaccucgucauuc

SEQ ID NO: 1182810 - RNA, 19 nt, Homo sapiens
  misc_RNA (1)...(19): siRNA sense strand
acacugggacauacacuug

SEQ ID NO: 1182811 - RNA, 19 nt, Homo sapiens
  misc_RNA (1)...(19): siRNA sense strand
gaaccgggcagugcugaca

SEQ ID NO: 1182812 - RNA, 19 nt, Homo sapiens
  misc_RNA (1)...(19): siRNA sense strand
gaaggcggcaacagcuaug

SEQ ID NO: 1182813 - RNA, 19 nt, Homo sapiens
  misc_RNA (1)...(19): siRNA sense strand
ggaaacuguugugccucuu

SEQ ID NO: 1182814 - RNA, 19 nt, Homo sapiens
  misc_RNA (1)...(19): siRNA sense strand
ucaaagaugggauagugau

SEQ ID NO: 1182815 - RNA, 19 nt, Homo sapiens
  misc_RNA (1)...(19): siRNA sense strand
caaagaugggauagugaug

SEQ ID NO: 1182816 - RNA, 19 nt, Homo sapiens
  misc_RNA (1)...(19): siRNA sense strand
caacaggagagcuggucuu

SEQ ID NO: 1182817 - RNA, 19 nt, Homo sapiens
  misc_RNA (1)...(19): siRNA sense strand
caagaugguuccccaccuu

SEQ ID NO: 1182818 - RNA, 19 nt, Homo sapiens
  misc_RNA (1)...(19): siRNA sense strand
acaaagaaagggacuucga

SEQ ID NO: 1182819 - RNA, 19 nt, Homo sapiens
  misc_RNA (1)...(19): siRNA sense strand
ugacaugcucagaacaaga

SEQ ID NO: 1182820 - RNA, 19 nt, Homo sapiens
  misc_RNA (1)...(19): siRNA sense strand
guugugccucuucauauug

SEQ ID NO: 1182821 - RNA, 19 nt, Homo sapiens
  misc_RNA (1)...(19): siRNA sense strand
caucguggcagccguccuu

SEQ ID NO: 1182822 - RNA, 19 nt, Homo sapiens
  misc_RNA (1)...(19): siRNA sense strand
ggaccgggugaccuucuug

SEQ ID NO: 1182823 - RNA, 19 nt, Homo sapiens
  misc_RNA (1)...(19): siRNA sense strand
ccgaagugaaggagaauuc

SEQ ID NO: 1182824 - RNA, 19 nt, Homo sapiens
  misc_RNA (1)...(19): siRNA sense strand
aggcgcaagucgagaggaa

SEQ ID NO: 1182825 - RNA, 19 nt, Homo sapiens
  misc_RNA (1)...(19): siRNA sense strand
caggagagcuggucuuuga

SEQ ID NO: 1182826 - RNA, 19 nt, Homo sapiens
  misc_RNA (1)...(19): siRNA sense strand
gaaggagaauucaaacaga

SEQ ID NO: 1182827 - RNA, 19 nt, Homo sapiens
  misc_RNA (1)...(19): siRNA sense strand
ggacacccaugacuucaaa

SEQ ID NO: 1182828 - RNA, 19 nt, Homo sapiens
  misc_RNA (1)...(19): siRNA sense strand
gaauacaccugguucaaag

SEQ ID NO: 1182829 - RNA, 19 nt, Homo sapiens
  misc_RNA (1)...(19): siRNA sense strand
cgaguaagaaggugauuua

SEQ ID NO: 1182830 - RNA, 19 nt, Homo sapiens
  misc_RNA (1)...(19): siRNA sense strand
gaauaauccugugaaguug

SEQ ID NO: 1182831 - RNA, 19 nt, Homo sapiens
  misc_RNA (1)...(19): siRNA sense strand
agaauaauccugugaaguu

SEQ ID NO: 1182832 - RNA, 19 nt, Homo sapiens
  misc_RNA (1)...(19): siRNA sense strand
caacugguaucaccuucaa

SEQ ID NO: 1182833 - RNA, 19 nt, Homo sapiens
  misc_RNA (1)...(19): siRNA sense strand
ggauagugaugccuacgaa

SEQ ID NO: 1182834 - RNA, 19 nt, Homo sapiens
  misc_RNA (1)...(19): siRNA sense strand
gaaagggacuucgaguaag

SEQ ID NO: 1182835 - RNA, 19 nt, Homo sapiens
  misc_RNA (1)...(19): siRNA sense strand
guucaaagaugggauagug

SEQ ID NO: 1182836 - RNA, 19 nt, Homo sapiens
  misc_RNA (1)...(19): siRNA sense strand
agaaagggacuucgaguaa

SEQ ID NO: 1182837 - RNA, 19 nt, Homo sapiens
  misc_RNA (1)...(19): siRNA sense strand
cauccaagccuacaguuaa

SEQ ID NO: 1182838 - RNA, 19 nt, Homo sapiens
  misc_RNA (1)...(19): siRNA sense strand
gaacaaagaaagggacuuc

SEQ ID NO: 1182839 - RNA, 19 nt, Homo sapiens
  misc_RNA (1)...(19): siRNA sense strand
ucaaacagaccucgucauu

SEQ ID NO: 1182840 - RNA, 19 nt, Homo sapiens
  misc_RNA (1)...(19): siRNA sense strand
ggaagacacugggacauac

SEQ ID NO: 1182841 - RNA, 19 nt, Homo sapiens
  misc_RNA (1)...(19): siRNA sense strand
acacuuguauggucucuga

SEQ ID NO: 1182842 - RNA, 19 nt, Homo sapiens
  misc_RNA (1)...(19): siRNA sense strand
aaacagaccucgucauucc

SEQ ID NO: 1182843 - RNA, 19 nt, Homo sapiens
  misc_RNA (1)...(19): siRNA sense strand
aaagggacuucgaguaaga

SEQ ID NO: 1182844 - RNA, 19 nt, Homo sapiens
  misc_RNA (1)...(19): siRNA sense strand
gggaagacacugggacaua

SEQ ID NO: 1182845 - RNA, 19 nt, Homo sapiens
  misc_RNA (1)...(19): siRNA sense strand
cagcaacucuuccuauguc

SEQ ID NO: 1182846 - RNA, 19 nt, Homo sapiens
  misc_RNA (1)...(19): siRNA sense strand
gcaucugguuugccuauag

SEQ ID NO: 1182847 - RNA, 19 nt, Homo sapiens
  misc_RNA (1)...(19): siRNA sense strand
ggaaggcggcaacagcuau

SEQ ID NO: 1182848 - RNA, 19 nt, Homo sapiens
  misc_RNA (1)...(19): siRNA sense strand
aagaaagggacuucgagua

SEQ ID NO: 1182849 - RNA, 19 nt, Homo sapiens
  misc_RNA (1)...(19): siRNA sense strand
ccucugauacuggagaaua

SEQ ID NO: 1182850 - RNA, 19 nt, Homo sapiens
  misc_RNA (1)...(19): siRNA sense strand
uguugugccucuucauauu

SEQ ID NO: 1182851 - RNA, 19 nt, Homo sapiens
  misc_RNA (1)...(19): siRNA sense strand
gaagacacugggacauaca

SEQ ID NO: 1182852 - RNA, 19 nt, Homo sapiens
  misc_RNA (1)...(19): siRNA sense strand
ggagagcuggucuuugauc

SEQ ID NO: 1182853 - RNA, 19 nt, Homo sapiens
  misc_RNA (1)...(19): siRNA sense strand
aaacuguugugccucuuca

SEQ ID NO: 1182854 - RNA, 19 nt, Homo sapiens
  misc_RNA (1)...(19): siRNA sense strand
ccauccaagccuacaguua

SEQ ID NO: 1182855 - RNA, 19 nt, Homo sapiens
  misc_RNA (1)...(19): siRNA sense strand
gagaauaauccugugaagu

SEQ ID NO: 1182856 - RNA, 19 nt, Homo sapiens
  misc_RNA (1)...(19): siRNA sense strand
ugagaauaauccugugaag

SEQ ID NO: 1182857 - RNA, 19 nt, Homo sapiens
  misc_RNA (1)...(19): siRNA sense strand
gaaacuguugugccucuuc

SEQ ID NO: 1182858 - RNA, 19 nt, Homo sapiens
  misc_RNA (1)...(19): siRNA sense strand
cgaggccacuuugacagaa

SEQ ID NO: 1182859 - RNA, 19 nt, Homo sapiens
  misc_RNA (1)...(19): siRNA sense strand
gacaugcucagaacaagau

SEQ ID NO: 1182860 - RNA, 19 nt, Homo sapiens
  misc_RNA (1)...(19): siRNA sense strand
cguggcagccguccuugua

SEQ ID NO: 1182861 - RNA, 19 nt, Homo sapiens
  misc_RNA (1)...(19): siRNA sense strand
caaacagaccucgucauuc

SEQ ID NO: 1182862 - RNA, 19 nt, Homo sapiens
  misc_RNA (1)...(19): siRNA sense strand
acacugggacauacacuug

SEQ ID NO: 1182863 - RNA, 19 nt, Homo sapiens
  misc_RNA (1)...(19): siRNA sense strand
gaaccgggcagugcugaca

SEQ ID NO: 1182864 - RNA, 19 nt, Homo sapiens
  misc_RNA (1)...(19): siRNA sense strand
gaaggcggcaacagcuaug

SEQ ID NO: 1182865 - RNA, 19 nt, Homo sapiens
  misc_RNA (1)...(19): siRNA sense strand
ggaaacuguugugccucuu

SEQ ID NO: 1182866 - RNA, 19 nt, Homo sapiens
  misc_RNA (1)...(19): siRNA sense strand
ucaaagaugggauagugau

SEQ ID NO: 1182867 - RNA, 19 nt, Homo sapiens
  misc_RNA (1)...(19): siRNA sense strand
caaagaugggauagugaug

SEQ ID NO: 1182868 - RNA, 19 nt, Homo sapiens
  misc_RNA (1)...(19): siRNA sense strand
caacaggagagcuggucuu

SEQ ID NO: 1182869 - RNA, 19 nt, Homo sapiens
  misc_RNA (1)...(19): siRNA sense strand
caagaugguuccccaccuu

SEQ ID NO: 1182870 - RNA, 19 nt, Homo sapiens
  misc_RNA (1)...(19): siRNA sense strand
acaaagaaagggacuucga

SEQ ID NO: 1182871 - RNA, 19 nt, Homo sapiens
  misc_RNA (1)...(19): siRNA sense strand
ugacaugcucagaacaaga

SEQ ID NO: 1182872 - RNA, 19 nt, Homo sapiens
  misc_RNA (1)...(19): siRNA sense strand
guugugccucuucauauug

SEQ ID NO: 1182873 - RNA, 19 nt, Homo sapiens
  misc_RNA (1)...(19): siRNA sense strand
caucguggcagccguccuu

SEQ ID NO: 1182874 - RNA, 19 nt, Homo sapiens
  misc_RNA (1)...(19): siRNA sense strand
ggaccgggugaccuucuug

SEQ ID NO: 1182875 - RNA, 19 nt, Homo sapiens
  misc_RNA (1)...(19): siRNA sense strand
ccgaagugaaggagaauuc

SEQ ID NO: 1182876 - RNA, 19 nt, Homo sapiens
  misc_RNA (1)...(19): siRNA sense strand
aggcgcaagucgagaggaa

SEQ ID NO: 1182877 - RNA, 19 nt, Homo sapiens
  misc_RNA (1)...(19): siRNA sense strand
caggagagcuggucuuuga

SEQ ID NO: 1182878 - RNA, 19 nt, Homo sapiens
  misc_RNA (1)...(19): siRNA sense strand
gaaggagaauucaaacaga

SEQ ID NO: 1182879 - RNA, 19 nt, Homo sapiens
  misc_RNA (1)...(19): siRNA sense strand
ggacacccaugacuucaaa

SEQ ID NO: 1182880 - RNA, 19 nt, Homo sapiens
  misc_RNA (1)...(19): siRNA sense strand
gaauacaccugguucaaag

SEQ ID NO: 1182881 - RNA, 19 nt, Homo sapiens
  misc_RNA (1)...(19): siRNA sense strand
cgaguaagaaggugauuua

SEQ ID NO: 1182882 - RNA, 19 nt, Homo sapiens
  misc_RNA (1)...(19): siRNA sense strand
gaauaauccugugaaguug

SEQ ID NO: 1182883 - RNA, 19 nt, Homo sapiens
  misc_RNA (1)...(19): siRNA sense strand
agaauaauccugugaaguu

SEQ ID NO: 1182884 - RNA, 19 nt, Homo sapiens
  misc_RNA (1)...(19): siRNA sense strand
caacugguaucaccuucaa

SEQ ID NO: 1182885 - RNA, 19 nt, Homo sapiens
  misc_RNA (1)...(19): siRNA sense strand
ggauagugaugccuacgaa

SEQ ID NO: 1182886 - RNA, 19 nt, Homo sapiens
  misc_RNA (1)...(19): siRNA sense strand
gaaagggacuucgaguaag

SEQ ID NO: 1182887 - RNA, 19 nt, Homo sapiens
  misc_RNA (1)...(19): siRNA sense strand
guucaaagaugggauagug

SEQ ID NO: 1182888 - RNA, 19 nt, Homo sapiens
  misc_RNA (1)...(19): siRNA sense strand
agaaagggacuucgaguaa

SEQ ID NO: 1182889 - RNA, 19 nt, Homo sapiens
  misc_RNA (1)...(19): siRNA sense strand
cauccaagccuacaguuaa

SEQ ID NO: 1182890 - RNA, 19 nt, Homo sapiens
  misc_RNA (1)...(19): siRNA sense strand
gaacaaagaaagggacuuc

SEQ ID NO: 1182891 - RNA, 19 nt, Homo sapiens
  misc_RNA (1)...(19): siRNA sense strand
ucaaacagaccucgucauu

SEQ ID NO: 1182892 - RNA, 19 nt, Homo sapiens
  misc_RNA (1)...(19): siRNA sense strand
ggaagacacugggacauac

SEQ ID NO: 1182893 - RNA, 19 nt, Homo sapiens
  misc_RNA (1)...(19): siRNA sense strand
acacuuguauggucucuga

SEQ ID NO: 1182894 - RNA, 19 nt, Homo sapiens
  misc_RNA (1)...(19): siRNA sense strand
aaacagaccucgucauucc

SEQ ID NO: 1182895 - RNA, 19 nt, Homo sapiens
  misc_RNA (1)...(19): siRNA sense strand
aaagggacuucgaguaaga

SEQ ID NO: 1182896 - RNA, 19 nt, Homo sapiens
  misc_RNA (1)...(19): siRNA sense strand
gggaagacacugggacaua

SEQ ID NO: 1182897 - RNA, 19 nt, Homo sapiens
  misc_RNA (1)...(19): siRNA sense strand
cagcaacucuuccuauguc

SEQ ID NO: 1182898 - RNA, 19 nt, Homo sapiens
  misc_RNA (1)...(19): siRNA sense strand
gcaucugguuugccuauag

SEQ ID NO: 1182899 - RNA, 19 nt, Homo sapiens
  misc_RNA (1)...(19): siRNA sense strand
ggaaggcggcaacagcuau

SEQ ID NO: 1182900 - RNA, 19 nt, Homo sapiens
  misc_RNA (1)...(19): siRNA sense strand
aagaaagggacuucgagua

SEQ ID NO: 1182901 - RNA, 19 nt, Homo sapiens
  misc_RNA (1)...(19): siRNA sense strand
ccucugauacuggagaaua

SEQ ID NO: 1182902 - RNA, 19 nt, Homo sapiens
  misc_RNA (1)...(19): siRNA sense strand
uguugugccucuucauauu

SEQ ID NO: 1182903 - RNA, 19 nt, Homo sapiens
  misc_RNA (1)...(19): siRNA sense strand
gaagacacugggacauaca

SEQ ID NO: 1182904 - RNA, 19 nt, Homo sapiens
  misc_RNA (1)...(19): siRNA sense strand
ggagagcuggucuuugauc

SEQ ID NO: 1182905 - RNA, 19 nt, Homo sapiens
  misc_RNA (1)...(19): siRNA sense strand
aaacuguugugccucuuca

SEQ ID NO: 1182906 - RNA, 19 nt, Homo sapiens
  misc_RNA (1)...(19): siRNA sense strand
ccauccaagccuacaguua

SEQ ID NO: 1182907 - RNA, 19 nt, Homo sapiens
  misc_RNA (1)...(19): siRNA sense strand
gagaauaauccugugaagu

SEQ ID NO: 1182908 - RNA, 19 nt, Homo sapiens
  misc_RNA (1)...(19): siRNA sense strand
ugagaauaauccugugaag

SEQ ID NO: 1182909 - RNA, 19 nt, Homo sapiens
  misc_RNA (1)...(19): siRNA sense strand
gaaacuguugugccucuuc

SEQ ID NO: 1182910 - RNA, 19 nt, Homo sapiens
  misc_RNA (1)...(19): siRNA sense strand
cgaggccacuuugacagaa

SEQ ID NO: 1182911 - RNA, 19 nt, Homo sapiens
  misc_RNA (1)...(19): siRNA sense strand
gacaugcucagaacaagau

SEQ ID NO: 1182912 - RNA, 19 nt, Homo sapiens
  misc_RNA (1)...(19): siRNA sense strand
cguggcagccguccuugua

SEQ ID NO: 1182913 - RNA, 19 nt, Homo sapiens
  misc_RNA (1)...(19): siRNA sense strand
caaacagaccucgucauuc

SEQ ID NO: 1182914 - RNA, 19 nt, Homo sapiens
  misc_RNA (1)...(19): siRNA sense strand
acacugggacauacacuug

SEQ ID NO: 1182915 - RNA, 19 nt, Homo sapiens
  misc_RNA (1)...(19): siRNA sense strand
gaaccgggcagugcugaca

SEQ ID NO: 1182916 - RNA, 19 nt, Homo sapiens
  misc_RNA (1)...(19): siRNA sense strand
gaaggcggcaacagcuaug

SEQ ID NO: 1182917 - RNA, 19 nt, Homo sapiens
  misc_RNA (1)...(19): siRNA sense strand
ggaaacuguugugccucuu

SEQ ID NO: 1182918 - RNA, 19 nt, Homo sapiens
  misc_RNA (1)...(19): siRNA sense strand
ucaaagaugggauagugau

SEQ ID NO: 1182919 - RNA, 19 nt, Homo sapiens
  misc_RNA (1)...(19): siRNA sense strand
caaagaugggauagugaug

SEQ ID NO: 1182920 - RNA, 19 nt, Homo sapiens
  misc_RNA (1)...(19): siRNA sense strand
caacaggagagcuggucuu

SEQ ID NO: 1182921 - RNA, 19 nt, Homo sapiens
  misc_RNA (1)...(19): siRNA sense strand
caagaugguuccccaccuu

SEQ ID NO: 1182922 - RNA, 19 nt, Homo sapiens
  misc_RNA (1)...(19): siRNA sense strand
acaaagaaagggacuucga

SEQ ID NO: 1182923 - RNA, 19 nt, Homo sapiens
  misc_RNA (1)...(19): siRNA sense strand
ugacaugcucagaacaaga

SEQ ID NO: 1182924 - RNA, 19 nt, Homo sapiens
  misc_RNA (1)...(19): siRNA sense strand
guugugccucuucauauug

SEQ ID NO: 1182925 - RNA, 19 nt, Homo sapiens
  misc_RNA (1)...(19): siRNA sense strand
caucguggcagccguccuu

SEQ ID NO: 1182926 - RNA, 19 nt, Homo sapiens
  misc_RNA (1)...(19): siRNA sense strand
ggaccgggugaccuucuug

SEQ ID NO: 1182927 - RNA, 19 nt, Homo sapiens
  misc_RNA (1)...(19): siRNA sense strand
ccgaagugaaggagaauuc

SEQ ID NO: 1182928 - RNA, 19 nt, Homo sapiens
  misc_RNA (1)...(19): siRNA sense strand
aggcgcaagucgagaggaa

SEQ ID NO: 1182929 - RNA, 19 nt, Homo sapiens
  misc_RNA (1)...(19): siRNA sense strand
caggagagcuggucuuuga

SEQ ID NO: 1182930 - RNA, 19 nt, Homo sapiens
  misc_RNA (1)...(19): siRNA sense strand
gaaggagaauucaaacaga

SEQ ID NO: 1182931 - RNA, 19 nt, Homo sapiens
  misc_RNA (1)...(19): siRNA sense strand
ggacacccaugacuucaaa

SEQ ID NO: 1182932 - RNA, 19 nt, Homo sapiens
  misc_RNA (1)...(19): siRNA sense strand
gaauacaccugguucaaag

SEQ ID NO: 1182933 - RNA, 19 nt, Homo sapiens
  misc_RNA (1)...(19): siRNA sense strand
cgaguaagaaggugauuua

SEQ ID NO: 1182934 - RNA, 19 nt, Homo sapiens
  misc_RNA (1)...(19): siRNA sense strand
gaauaauccugugaaguug

SEQ ID NO: 1182935 - RNA, 19 nt, Homo sapiens
  misc_RNA (1)...(19): siRNA sense strand
agaauaauccugugaaguu

SEQ ID NO: 1182936 - RNA, 19 nt, Homo sapiens
  misc_RNA (1)...(19): siRNA sense strand
caacugguaucaccuucaa

SEQ ID NO: 1182937 - RNA, 19 nt, Homo sapiens
  misc_RNA (1)...(19): siRNA sense strand
ggauagugaugccuacgaa

SEQ ID NO: 1182938 - RNA, 19 nt, Homo sapiens
  misc_RNA (1)...(19): siRNA sense strand
gaaagggacuucgaguaag

SEQ ID NO: 1182939 - RNA, 19 nt, Homo sapiens
  misc_RNA (1)...(19): siRNA sense strand
guucaaagaugggauagug

SEQ ID NO: 1182940 - RNA, 19 nt, Homo sapiens
  misc_RNA (1)...(19): siRNA sense strand
agaaagggacuucgaguaa

SEQ ID NO: 1182941 - RNA, 19 nt, Homo sapiens
  misc_RNA (1)...(19): siRNA sense strand
cauccaagccuacaguuaa

SEQ ID NO: 1182942 - RNA, 19 nt, Homo sapiens
  misc_RNA (1)...(19): siRNA sense strand
gaacaaagaaagggacuuc

SEQ ID NO: 1182943 - RNA, 19 nt, Homo sapiens
  misc_RNA (1)...(19): siRNA sense strand
ucaaacagaccucgucauu

SEQ ID NO: 1182944 - RNA, 19 nt, Homo sapiens
  misc_RNA (1)...(19): siRNA sense strand
ggaagacacugggacauac

SEQ ID NO: 1182945 - RNA, 19 nt, Homo sapiens
  misc_RNA (1)...(19): siRNA sense strand
acacuuguauggucucuga

SEQ ID NO: 1182946 - RNA, 19 nt, Homo sapiens
  misc_RNA (1)...(19): siRNA sense strand
aaacagaccucgucauucc

SEQ ID NO: 1182947 - RNA, 19 nt, Homo sapiens
  misc_RNA (1)...(19): siRNA sense strand
aaagggacuucgaguaaga

SEQ ID NO: 1182948 - RNA, 19 nt, Homo sapiens
  misc_RNA (1)...(19): siRNA sense strand
gggaagacacugggacaua

SEQ ID NO: 1182949 - RNA, 19 nt, Homo sapiens
  misc_RNA (1)...(19): siRNA sense strand
cagcaacucuuccuauguc

SEQ ID NO: 1182950 - RNA, 19 nt, Homo sapiens
  misc_RNA (1)...(19): siRNA sense strand
gcaucugguuugccuauag

SEQ ID NO: 1182951 - RNA, 19 nt, Homo sapiens
  misc_RNA (1)...(19): siRNA sense strand
ggaaggcggcaacagcuau

SEQ ID NO: 1182952 - RNA, 19 nt, Homo sapiens
  misc_RNA (1)...(19): siRNA sense strand
aagaaagggacuucgagua

SEQ ID NO: 1182953 - RNA, 19 nt, Homo sapiens
  misc_RNA (1)...(19): siRNA sense strand
ccucugauacuggagaaua

SEQ ID NO: 1182954 - RNA, 19 nt, Homo sapiens
  misc_RNA (1)...(19): siRNA sense strand
uguugugccucuucauauu

SEQ ID NO: 1182955 - RNA, 19 nt, Homo sapiens
  misc_RNA (1)...(19): siRNA sense strand
gaagacacugggacauaca

SEQ ID NO: 1182956 - RNA, 19 nt, Homo sapiens
  misc_RNA (1)...(19): siRNA sense strand
ggagagcuggucuuugauc

SEQ ID NO: 1182957 - RNA, 19 nt, Homo sapiens
  misc_RNA (1)...(19): siRNA sense strand
aaacuguugugccucuuca

SEQ ID NO: 1182958 - RNA, 19 nt, Homo sapiens
  misc_RNA (1)...(19): siRNA sense strand
ccauccaagccuacaguua

SEQ ID NO: 1182959 - RNA, 19 nt, Homo sapiens
  misc_RNA (1)...(19): siRNA sense strand
gagaauaauccugugaagu

SEQ ID NO: 1182960 - RNA, 19 nt, Homo sapiens
  misc_RNA (1)...(19): siRNA sense strand
ugagaauaauccugugaag

SEQ ID NO: 1182961 - RNA, 19 nt, Homo sapiens
  misc_RNA (1)...(19): siRNA sense strand
gaaacuguugugccucuuc

SEQ ID NO: 1182962 - RNA, 19 nt, Homo sapiens
  misc_RNA (1)...(19): siRNA sense strand
cgaggccacuuugacagaa

SEQ ID NO: 1182963 - RNA, 19 nt, Homo sapiens
  misc_RNA (1)...(19): siRNA sense strand
gacaugcucagaacaagau

SEQ ID NO: 1182964 - RNA, 19 nt, Homo sapiens
  misc_RNA (1)...(19): siRNA sense strand
cguggcagccguccuugua

SEQ ID NO: 1182965 - RNA, 19 nt, Homo sapiens
  misc_RNA (1)...(19): siRNA sense strand
caaacagaccucgucauuc

SEQ ID NO: 1182966 - RNA, 19 nt, Homo sapiens
  misc_RNA (1)...(19): siRNA sense strand
acacugggacauacacuug

SEQ ID NO: 1182967 - RNA, 19 nt, Homo sapiens
  misc_RNA (1)...(19): siRNA sense strand
gaaccgggcagugcugaca

SEQ ID NO: 1182968 - RNA, 19 nt, Homo sapiens
  misc_RNA (1)...(19): siRNA sense strand
gaaggcggcaacagcuaug

SEQ ID NO: 1182969 - RNA, 19 nt, Homo sapiens
  misc_RNA (1)...(19): siRNA sense strand
ggaaacuguugugccucuu

SEQ ID NO: 1182970 - RNA, 19 nt, Homo sapiens
  misc_RNA (1)...(19): siRNA sense strand
ucaaagaugggauagugau

SEQ ID NO: 1182971 - RNA, 19 nt, Homo sapiens
  misc_RNA (1)...(19): siRNA sense strand
caaagaugggauagugaug

SEQ ID NO: 1182972 - RNA, 19 nt, Homo sapiens
  misc_RNA (1)...(19): siRNA sense strand
caacaggagagcuggucuu

SEQ ID NO: 1182973 - RNA, 19 nt, Homo sapiens
  misc_RNA (1)...(19): siRNA sense strand
caagaugguuccccaccuu

SEQ ID NO: 1182974 - RNA, 19 nt, Homo sapiens
  misc_RNA (1)...(19): siRNA sense strand
acaaagaaagggacuucga

SEQ ID NO: 1182975 - RNA, 19 nt, Homo sapiens
  misc_RNA (1)...(19): siRNA sense strand
ugacaugcucagaacaaga

SEQ ID NO: 1182976 - RNA, 19 nt, Homo sapiens
  misc_RNA (1)...(19): siRNA sense strand
guugugccucuucauauug

SEQ ID NO: 1182977 - RNA, 19 nt, Homo sapiens
  misc_RNA (1)...(19): siRNA sense strand
caucguggcagccguccuu

SEQ ID NO: 1182978 - RNA, 19 nt, Homo sapiens
  misc_RNA (1)...(19): siRNA sense strand
ggaccgggugaccuucuug

SEQ ID NO: 1182979 - RNA, 19 nt, Homo sapiens
  misc_RNA (1)...(19): siRNA sense strand
ccgaagugaaggagaauuc

SEQ ID NO: 1182980 - RNA, 19 nt, Homo sapiens
  misc_RNA (1)...(19): siRNA sense strand
aggcgcaagucgagaggaa

SEQ ID NO: 1182981 - RNA, 19 nt, Homo sapiens
  misc_RNA (1)...(19): siRNA sense strand
caggagagcuggucuuuga

SEQ ID NO: 1182982 - RNA, 19 nt, Homo sapiens
  misc_RNA (1)...(19): siRNA sense strand
gaaggagaauucaaacaga

SEQ ID NO: 1182983 - RNA, 19 nt, Homo sapiens
  misc_RNA (1)...(19): siRNA sense strand
ggacacccaugacuucaaa

SEQ ID NO: 1182984 - RNA, 19 nt, Homo sapiens
  misc_RNA (1)...(19): siRNA sense strand
gaauacaccugguucaaag

SEQ ID NO: 1182985 - RNA, 19 nt, Homo sapiens
  misc_RNA (1)...(19): siRNA sense strand
cgaguaagaaggugauuua

SEQ ID NO: 1182986 - RNA, 19 nt, Homo sapiens
  misc_RNA (1)...(19): siRNA sense strand
gaauaauccugugaaguug

SEQ ID NO: 1182987 - RNA, 19 nt, Homo sapiens
  misc_RNA (1)...(19): siRNA sense strand
agaauaauccugugaaguu

SEQ ID NO: 1182988 - RNA, 19 nt, Homo sapiens
  misc_RNA (1)...(19): siRNA sense strand
caacugguaucaccuucaa

SEQ ID NO: 1182989 - RNA, 19 nt, Homo sapiens
  misc_RNA (1)...(19): siRNA sense strand
ggauagugaugccuacgaa

SEQ ID NO: 1182990 - RNA, 19 nt, Homo sapiens
  misc_RNA (1)...(19): siRNA sense strand
gaaagggacuucgaguaag

SEQ ID NO: 1182991 - RNA, 19 nt, Homo sapiens
  misc_RNA (1)...(19): siRNA sense strand
guucaaagaugggauagug

SEQ ID NO: 1182992 - RNA, 19 nt, Homo sapiens
  misc_RNA (1)...(19): siRNA sense strand
agaaagggacuucgaguaa

SEQ ID NO: 1182993 - RNA, 19 nt, Homo sapiens
  misc_RNA (1)...(19): siRNA sense strand
cauccaagccuacaguuaa

SEQ ID NO: 1182994 - RNA, 19 nt, Homo sapiens
  misc_RNA (1)...(19): siRNA sense strand
gaacaaagaaagggacuuc

SEQ ID NO: 1182995 - RNA, 19 nt, Homo sapiens
  misc_RNA (1)...(19): siRNA sense strand
ucaaacagaccucgucauu

SEQ ID NO: 1182996 - RNA, 19 nt, Homo sapiens
  misc_RNA (1)...(19): siRNA sense strand
ggaagacacugggacauac

SEQ ID NO: 1182997 - RNA, 19 nt, Homo sapiens
  misc_RNA (1)...(19): siRNA sense strand
acacuuguauggucucuga

SEQ ID NO: 1182998 - RNA, 19 nt, Homo sapiens
  misc_RNA (1)...(19): siRNA sense strand
aaacagaccucgucauucc

SEQ ID NO: 1182999 - RNA, 19 nt, Homo sapiens
  misc_RNA (1)...(19): siRNA sense strand
aaagggacuucgaguaaga

SEQ ID NO: 1183000 - RNA, 19 nt, Homo sapiens
  misc_RNA (1)...(19): siRNA sense strand
gggaagacacugggacaua

SEQ ID NO: 1183001 - RNA, 19 nt, Homo sapiens
  misc_RNA (1)...(19): siRNA sense strand
cagcaacucuuccuauguc

SEQ ID NO: 1183002 - RNA, 19 nt, Homo sapiens
  misc_RNA (1)...(19): siRNA sense strand
gcaucugguuugccuauag

SEQ ID NO: 1183003 - RNA, 19 nt, Homo sapiens
  misc_RNA (1)...(19): siRNA sense strand
ggaaggcggcaacagcuau

SEQ ID NO: 1183004 - RNA, 19 nt, Homo sapiens
  misc_RNA (1)...(19): siRNA sense strand
aagaaagggacuucgagua

SEQ ID NO: 1183005 - RNA, 19 nt, Homo sapiens
  misc_RNA (1)...(19): siRNA sense strand
ccucugauacuggagaaua

SEQ ID NO: 1183006 - RNA, 19 nt, Homo sapiens
  misc_RNA (1)...(19): siRNA sense strand
uguugugccucuucauauu

SEQ ID NO: 1183007 - RNA, 19 nt, Homo sapiens
  misc_RNA (1)...(19): siRNA sense strand
gaagacacugggacauaca

SEQ ID NO: 1183008 - RNA, 19 nt, Homo sapiens
  misc_RNA (1)...(19): siRNA sense strand
ggagagcuggucuuugauc

SEQ ID NO: 1183009 - RNA, 19 nt, Homo sapiens
  misc_RNA (1)...(19): siRNA sense strand
aaacuguugugccucuuca

SEQ ID NO: 1183010 - RNA, 19 nt, Homo sapiens
  misc_RNA (1)...(19): siRNA sense strand
ccauccaagccuacaguua

SEQ ID NO: 1183011 - RNA, 19 nt, Homo sapiens
  misc_RNA (1)...(19): siRNA sense strand
gagaauaauccugugaagu

SEQ ID NO: 1183012 - RNA, 19 nt, Homo sapiens
  misc_RNA (1)...(19): siRNA sense strand
ugagaauaauccugugaag

SEQ ID NO: 1183013 - RNA, 19 nt, Homo sapiens
  misc_RNA (1)...(19): siRNA sense strand
gaaacuguugugccucuuc

SEQ ID NO: 1183014 - RNA, 19 nt, Homo sapiens
  misc_RNA (1)...(19): siRNA sense strand
cgaggccacuuugacagaa

SEQ ID NO: 1183015 - RNA, 19 nt, Homo sapiens
  misc_RNA (1)...(19): siRNA sense strand
gacaugcucagaacaagau

SEQ ID NO: 1183016 - RNA, 19 nt, Homo sapiens
  misc_RNA (1)...(19): siRNA sense strand
cguggcagccguccuugua

SEQ ID NO: 1183017 - RNA, 19 nt, Homo sapiens
  misc_RNA (1)...(19): siRNA sense strand
caaacagaccucgucauuc

SEQ ID NO: 1183018 - RNA, 19 nt, Homo sapiens
  misc_RNA (1)...(19): siRNA sense strand
acacugggacauacacuug

SEQ ID NO: 1183019 - RNA, 19 nt, Homo sapiens
  misc_RNA (1)...(19): siRNA sense strand
gaaccgggcagugcugaca

SEQ ID NO: 1183020 - RNA, 19 nt, Homo sapiens
  misc_RNA (1)...(19): siRNA sense strand
gaaggcggcaacagcuaug

SEQ ID NO: 1183021 - RNA, 19 nt, Homo sapiens
  misc_RNA (1)...(19): siRNA sense strand
ggaaacuguugugccucuu

SEQ ID NO: 1183022 - RNA, 19 nt, Homo sapiens
  misc_RNA (1)...(19): siRNA sense strand
ucaaagaugggauagugau

SEQ ID NO: 1183023 - RNA, 19 nt, Homo sapiens
  misc_RNA (1)...(19): siRNA sense strand
caaagaugggauagugaug

SEQ ID NO: 1183024 - RNA, 19 nt, Homo sapiens
  misc_RNA (1)...(19): siRNA sense strand
caacaggagagcuggucuu

SEQ ID NO: 1183025 - RNA, 19 nt, Homo sapiens
  misc_RNA (1)...(19): siRNA sense strand
caagaugguuccccaccuu

SEQ ID NO: 1183026 - RNA, 19 nt, Homo sapiens
  misc_RNA (1)...(19): siRNA sense strand
acaaagaaagggacuucga

SEQ ID NO: 1183027 - RNA, 19 nt, Homo sapiens
  misc_RNA (1)...(19): siRNA sense strand
ugacaugcucagaacaaga

SEQ ID NO: 1183028 - RNA, 19 nt, Homo sapiens
  misc_RNA (1)...(19): siRNA sense strand
guugugccucuucauauug

SEQ ID NO: 1183029 - RNA, 19 nt, Homo sapiens
  misc_RNA (1)...(19): siRNA sense strand
caucguggcagccguccuu

SEQ ID NO: 1183030 - RNA, 19 nt, Homo sapiens
  misc_RNA (1)...(19): siRNA sense strand
ggaccgggugaccuucuug

SEQ ID NO: 1183031 - RNA, 19 nt, Homo sapiens
  misc_RNA (1)...(19): siRNA sense strand
ccgaagugaaggagaauuc

SEQ ID NO: 1183032 - RNA, 19 nt, Homo sapiens
  misc_RNA (1)...(19): siRNA sense strand
aggcgcaagucgagaggaa

SEQ ID NO: 1183033 - RNA, 19 nt, Homo sapiens
  misc_RNA (1)...(19): siRNA sense strand
caggagagcuggucuuuga

SEQ ID NO: 1183034 - RNA, 19 nt, Homo sapiens
  misc_RNA (1)...(19): siRNA sense strand
gaaggagaauucaaacaga

SEQ ID NO: 1183035 - RNA, 19 nt, Homo sapiens
  misc_RNA (1)...(19): siRNA sense strand
ggacacccaugacuucaaa

SEQ ID NO: 1183036 - RNA, 19 nt, Homo sapiens
  misc_RNA (1)...(19): siRNA sense strand
gaauacaccugguucaaag

SEQ ID NO: 1183037 - RNA, 19 nt, Homo sapiens
  misc_RNA (1)...(19): siRNA sense strand
cgaguaagaaggugauuua

SEQ ID NO: 1183038 - RNA, 19 nt, Homo sapiens
  misc_RNA (1)...(19): siRNA sense strand
gaauaauccugugaaguug

SEQ ID NO: 1183039 - RNA, 19 nt, Homo sapiens
  misc_RNA (1)...(19): siRNA sense strand
agaauaauccugugaaguu

SEQ ID NO: 1183040 - RNA, 19 nt, Homo sapiens
  misc_RNA (1)...(19): siRNA sense strand
caacugguaucaccuucaa

SEQ ID NO: 1183041 - RNA, 19 nt, Homo sapiens
  misc_RNA (1)...(19): siRNA sense strand
ggauagugaugccuacgaa

SEQ ID NO: 1183042 - RNA, 19 nt, Homo sapiens
  misc_RNA (1)...(19): siRNA sense strand
gaaagggacuucgaguaag

SEQ ID NO: 1183043 - RNA, 19 nt, Homo sapiens
  misc_RNA (1)...(19): siRNA sense strand
guucaaagaugggauagug

SEQ ID NO: 1183044 - RNA, 19 nt, Homo sapiens
  misc_RNA (1)...(19): siRNA sense strand
agaaagggacuucgaguaa

SEQ ID NO: 1183045 - RNA, 19 nt, Homo sapiens
  misc_RNA (1)...(19): siRNA sense strand
cauccaagccuacaguuaa

SEQ ID NO: 1183046 - RNA, 19 nt, Homo sapiens
  misc_RNA (1)...(19): siRNA sense strand
gaacaaagaaagggacuuc

SEQ ID NO: 1183047 - RNA, 19 nt, Homo sapiens
  misc_RNA (1)...(19): siRNA sense strand
ucaaacagaccucgucauu

SEQ ID NO: 1183048 - RNA, 19 nt, Homo sapiens
  misc_RNA (1)...(19): siRNA sense strand
ggaagacacugggacauac

SEQ ID NO: 1183049 - RNA, 19 nt, Homo sapiens
  misc_RNA (1)...(19): siRNA sense strand
acacuuguauggucucuga

SEQ ID NO: 1183050 - RNA, 19 nt, Homo sapiens
  misc_RNA (1)...(19): siRNA sense strand
aaacagaccucgucauucc

SEQ ID NO: 1183051 - RNA, 19 nt, Homo sapiens
  misc_RNA (1)...(19): siRNA sense strand
aaagggacuucgaguaaga

SEQ ID NO: 1183052 - RNA, 19 nt, Homo sapiens
  misc_RNA (1)...(19): siRNA sense strand
gggaagacacugggacaua

SEQ ID NO: 1183053 - RNA, 19 nt, Homo sapiens
  misc_RNA (1)...(19): siRNA sense strand
cagcaacucuuccuauguc

SEQ ID NO: 1183054 - RNA, 19 nt, Homo sapiens
  misc_RNA (1)...(19): siRNA sense strand
gcaucugguuugccuauag

SEQ ID NO: 1183055 - RNA, 19 nt, Homo sapiens
  misc_RNA (1)...(19): siRNA sense strand
ggaaggcggcaacagcuau

SEQ ID NO: 1183056 - RNA, 19 nt, Homo sapiens
  misc_RNA (1)...(19): siRNA sense strand
aagaaagggacuucgagua

SEQ ID NO: 1183057 - RNA, 19 nt, Homo sapiens
  misc_RNA (1)...(19): siRNA sense strand
ccucugauacuggagaaua

SEQ ID NO: 1183058 - RNA, 19 nt, Homo sapiens
  misc_RNA (1)...(19): siRNA sense strand
uguugugccucuucauauu

SEQ ID NO: 1183059 - RNA, 19 nt, Homo sapiens
  misc_RNA (1)...(19): siRNA sense strand
gaagacacugggacauaca

SEQ ID NO: 1183060 - RNA, 19 nt, Homo sapiens
  misc_RNA (1)...(19): siRNA sense strand
ggagagcuggucuuugauc

SEQ ID NO: 1183061 - RNA, 19 nt, Homo sapiens
  misc_RNA (1)...(19): siRNA sense strand
aaacuguugugccucuuca

SEQ ID NO: 1183062 - RNA, 19 nt, Homo sapiens
  misc_RNA (1)...(19): siRNA sense strand
ccauccaagccuacaguua

SEQ ID NO: 1183063 - RNA, 19 nt, Homo sapiens
  misc_RNA (1)...(19): siRNA sense strand
gagaauaauccugugaagu

SEQ ID NO: 1183064 - RNA, 19 nt, Homo sapiens
  misc_RNA (1)...(19): siRNA sense strand
ugagaauaauccugugaag

SEQ ID NO: 1183065 - RNA, 19 nt, Homo sapiens
  misc_RNA (1)...(19): siRNA sense strand
gaaacuguugugccucuuc

SEQ ID NO: 1183066 - RNA, 19 nt, Homo sapiens
  misc_RNA (1)...(19): siRNA sense strand
cgaggccacuuugacagaa

SEQ ID NO: 1183067 - RNA, 19 nt, Homo sapiens
  misc_RNA (1)...(19): siRNA sense strand
gacaugcucagaacaagau

SEQ ID NO: 1183068 - RNA, 19 nt, Homo sapiens
  misc_RNA (1)...(19): siRNA sense strand
cguggcagccguccuugua

SEQ ID NO: 1183069 - RNA, 19 nt, Homo sapiens
  misc_RNA (1)...(19): siRNA sense strand
caaacagaccucgucauuc

SEQ ID NO: 1183070 - RNA, 19 nt, Homo sapiens
  misc_RNA (1)...(19): siRNA sense strand
acacugggacauacacuug

SEQ ID NO: 1183071 - RNA, 19 nt, Homo sapiens
  misc_RNA (1)...(19): siRNA sense strand
gaaccgggcagugcugaca

SEQ ID NO: 1183072 - RNA, 19 nt, Homo sapiens
  misc_RNA (1)...(19): siRNA sense strand
gaaggcggcaacagcuaug

SEQ ID NO: 1183073 - RNA, 19 nt, Homo sapiens
  misc_RNA (1)...(19): siRNA sense strand
ggaaacuguugugccucuu

SEQ ID NO: 1183074 - RNA, 19 nt, Homo sapiens
  misc_RNA (1)...(19): siRNA sense strand
ucaaagaugggauagugau

SEQ ID NO: 1183075 - RNA, 19 nt, Homo sapiens
  misc_RNA (1)...(19): siRNA sense strand
caaagaugggauagugaug

SEQ ID NO: 1183076 - RNA, 19 nt, Homo sapiens
  misc_RNA (1)...(19): siRNA sense strand
caacaggagagcuggucuu

SEQ ID NO: 1183077 - RNA, 19 nt, Homo sapiens
  misc_RNA (1)...(19): siRNA sense strand
caagaugguuccccaccuu

SEQ ID NO: 1183078 - RNA, 19 nt, Homo sapiens
  misc_RNA (1)...(19): siRNA sense strand
acaaagaaagggacuucga

SEQ ID NO: 1183079 - RNA, 19 nt, Homo sapiens
  misc_RNA (1)...(19): siRNA sense strand
ugacaugcucagaacaaga

SEQ ID NO: 1183080 - RNA, 19 nt, Homo sapiens
  misc_RNA (1)...(19): siRNA sense strand
guugugccucuucauauug

SEQ ID NO: 1183081 - RNA, 19 nt, Homo sapiens
  misc_RNA (1)...(19): siRNA sense strand
caucguggcagccguccuu

SEQ ID NO: 1183082 - RNA, 19 nt, Homo sapiens
  misc_RNA (1)...(19): siRNA sense strand
ggaccgggugaccuucuug

SEQ ID NO: 1183083 - RNA, 19 nt, Homo sapiens
  misc_RNA (1)...(19): siRNA sense strand
ccgaagugaaggagaauuc

SEQ ID NO: 1183084 - RNA, 19 nt, Homo sapiens
  misc_RNA (1)...(19): siRNA sense strand
aggcgcaagucgagaggaa

SEQ ID NO: 1183085 - RNA, 19 nt, Homo sapiens
  misc_RNA (1)...(19): siRNA sense strand
caggagagcuggucuuuga

SEQ ID NO: 1183086 - RNA, 19 nt, Homo sapiens
  misc_RNA (1)...(19): siRNA sense strand
gaaggagaauucaaacaga

SEQ ID NO: 1183087 - RNA, 19 nt, Homo sapiens
  misc_RNA (1)...(19): siRNA sense strand
ggacacccaugacuucaaa

SEQ ID NO: 1183088 - RNA, 19 nt, Homo sapiens
  misc_RNA (1)...(19): siRNA sense strand
gaauacaccugguucaaag

SEQ ID NO: 1183089 - RNA, 19 nt, Homo sapiens
  misc_RNA (1)...(19): siRNA sense strand
cgaguaagaaggugauuua

SEQ ID NO: 1183090 - RNA, 19 nt, Homo sapiens
  misc_RNA (1)...(19): siRNA sense strand
gaauaauccugugaaguug

SEQ ID NO: 1183091 - RNA, 19 nt, Homo sapiens
  misc_RNA (1)...(19): siRNA sense strand
agaauaauccugugaaguu

SEQ ID NO: 1183092 - RNA, 19 nt, Homo sapiens
  misc_RNA (1)...(19): siRNA sense strand
caacugguaucaccuucaa

SEQ ID NO: 1183093 - RNA, 19 nt, Homo sapiens
  misc_RNA (1)...(19): siRNA sense strand
ggauagugaugccuacgaa

SEQ ID NO: 1183094 - RNA, 19 nt, Homo sapiens
  misc_RNA (1)...(19): siRNA sense strand
gaaagggacuucgaguaag

SEQ ID NO: 1183095 - RNA, 19 nt, Homo sapiens
  misc_RNA (1)...(19): siRNA sense strand
guucaaagaugggauagug

SEQ ID NO: 1183096 - RNA, 19 nt, Homo sapiens
  misc_RNA (1)...(19): siRNA sense strand
agaaagggacuucgaguaa

SEQ ID NO: 1183097 - RNA, 19 nt, Homo sapiens
  misc_RNA (1)...(19): siRNA sense strand
cauccaagccuacaguuaa

SEQ ID NO: 1183098 - RNA, 19 nt, Homo sapiens
  misc_RNA (1)...(19): siRNA sense strand
gaacaaagaaagggacuuc

SEQ ID NO: 1183099 - RNA, 19 nt, Homo sapiens
  misc_RNA (1)...(19): siRNA sense strand
ucaaacagaccucgucauu

SEQ ID NO: 1183100 - RNA, 19 nt, Homo sapiens
  misc_RNA (1)...(19): siRNA sense strand
ggaagacacugggacauac

SEQ ID NO: 1183101 - RNA, 19 nt, Homo sapiens
  misc_RNA (1)...(19): siRNA sense strand
acacuuguauggucucuga

SEQ ID NO: 1183102 - RNA, 19 nt, Homo sapiens
  misc_RNA (1)...(19): siRNA sense strand
aaacagaccucgucauucc

SEQ ID NO: 1183103 - RNA, 19 nt, Homo sapiens
  misc_RNA (1)...(19): siRNA sense strand
aaagggacuucgaguaaga

SEQ ID NO: 1183104 - RNA, 19 nt, Homo sapiens
  misc_RNA (1)...(19): siRNA sense strand
gggaagacacugggacaua

SEQ ID NO: 1183105 - RNA, 19 nt, Homo sapiens
  misc_RNA (1)...(19): siRNA sense strand
cagcaacucuuccuauguc

SEQ ID NO: 1183106 - RNA, 19 nt, Homo sapiens
  misc_RNA (1)...(19): siRNA sense strand
gcaucugguuugccuauag

SEQ ID NO: 1183107 - RNA, 19 nt, Homo sapiens
  misc_RNA (1)...(19): siRNA sense strand
ggaaggcggcaacagcuau

SEQ ID NO: 1183108 - RNA, 19 nt, Homo sapiens
  misc_RNA (1)...(19): siRNA sense strand
aagaaagggacuucgagua

SEQ ID NO: 1183109 - RNA, 19 nt, Homo sapiens
  misc_RNA (1)...(19): siRNA sense strand
ccucugauacuggagaaua

SEQ ID NO: 1183110 - RNA, 19 nt, Homo sapiens
  misc_RNA (1)...(19): siRNA sense strand
uguugugccucuucauauu

SEQ ID NO: 1183111 - RNA, 19 nt, Homo sapiens
  misc_RNA (1)...(19): siRNA sense strand
gaagacacugggacauaca

SEQ ID NO: 1183112 - RNA, 19 nt, Homo sapiens
  misc_RNA (1)...(19): siRNA sense strand
ggagagcuggucuuugauc

SEQ ID NO: 1183113 - RNA, 19 nt, Homo sapiens
  misc_RNA (1)...(19): siRNA sense strand
aaacuguugugccucuuca

SEQ ID NO: 1183114 - RNA, 19 nt, Homo sapiens
  misc_RNA (1)...(19): siRNA sense strand
ccauccaagccuacaguua

SEQ ID NO: 1183115 - RNA, 19 nt, Homo sapiens
  misc_RNA (1)...(19): siRNA sense strand
gagaauaauccugugaagu

SEQ ID NO: 1183116 - RNA, 19 nt, Homo sapiens
  misc_RNA (1)...(19): siRNA sense strand
ugagaauaauccugugaag

SEQ ID NO: 1183117 - RNA, 19 nt, Homo sapiens
  misc_RNA (1)...(19): siRNA sense strand
gaaacuguugugccucuuc

SEQ ID NO: 1183118 - RNA, 19 nt, Homo sapiens
  misc_RNA (1)...(19): siRNA sense strand
cgaggccacuuugacagaa

SEQ ID NO: 1183119 - RNA, 19 nt, Homo sapiens
  misc_RNA (1)...(19): siRNA sense strand
gacaugcucagaacaagau

SEQ ID NO: 1183120 - RNA, 19 nt, Homo sapiens
  misc_RNA (1)...(19): siRNA sense strand
cguggcagccguccuugua

SEQ ID NO: 1183121 - RNA, 19 nt, Homo sapiens
  misc_RNA (1)...(19): siRNA sense strand
caaacagaccucgucauuc

SEQ ID NO: 1183122 - RNA, 19 nt, Homo sapiens
  misc_RNA (1)...(19): siRNA sense strand
acacugggacauacacuug

SEQ ID NO: 1183123 - RNA, 19 nt, Homo sapiens
  misc_RNA (1)...(19): siRNA sense strand
gaaccgggcagugcugaca

SEQ ID NO: 1183124 - RNA, 19 nt, Homo sapiens
  misc_RNA (1)...(19): siRNA sense strand
gaaggcggcaacagcuaug

SEQ ID NO: 1183125 - RNA, 19 nt, Homo sapiens
  misc_RNA (1)...(19): siRNA sense strand
ggaaacuguugugccucuu

SEQ ID NO: 1183126 - RNA, 19 nt, Homo sapiens
  misc_RNA (1)...(19): siRNA sense strand
ucaaagaugggauagugau

SEQ ID NO: 1183127 - RNA, 19 nt, Homo sapiens
  misc_RNA (1)...(19): siRNA sense strand
caaagaugggauagugaug

SEQ ID NO: 1183128 - RNA, 19 nt, Homo sapiens
  misc_RNA (1)...(19): siRNA sense strand
caacaggagagcuggucuu

SEQ ID NO: 1183129 - RNA, 19 nt, Homo sapiens
  misc_RNA (1)...(19): siRNA sense strand
caagaugguuccccaccuu

SEQ ID NO: 1183130 - RNA, 19 nt, Homo sapiens
  misc_RNA (1)...(19): siRNA sense strand
acaaagaaagggacuucga

SEQ ID NO: 1183131 - RNA, 19 nt, Homo sapiens
  misc_RNA (1)...(19): siRNA sense strand
ugacaugcucagaacaaga

SEQ ID NO: 1183132 - RNA, 19 nt, Homo sapiens
  misc_RNA (1)...(19): siRNA sense strand
guugugccucuucauauug

SEQ ID NO: 1183133 - RNA, 19 nt, Homo sapiens
  misc_RNA (1)...(19): siRNA sense strand
caucguggcagccguccuu

SEQ ID NO: 1183134 - RNA, 19 nt, Homo sapiens
  misc_RNA (1)...(19): siRNA sense strand
ggaccgggugaccuucuug

SEQ ID NO: 1183135 - RNA, 19 nt, Homo sapiens
  misc_RNA (1)...(19): siRNA sense strand
ccgaagugaaggagaauuc

SEQ ID NO: 1183136 - RNA, 19 nt, Homo sapiens
  misc_RNA (1)...(19): siRNA sense strand
aggcgcaagucgagaggaa

SEQ ID NO: 1183137 - RNA, 19 nt, Homo sapiens
  misc_RNA (1)...(19): siRNA sense strand
caggagagcuggucuuuga

SEQ ID NO: 1183138 - RNA, 19 nt, Homo sapiens
  misc_RNA (1)...(19): siRNA sense strand
gaaggagaauucaaacaga

SEQ ID NO: 1183139 - RNA, 19 nt, Homo sapiens
  misc_RNA (1)...(19): siRNA sense strand
ggacacccaugacuucaaa

SEQ ID NO: 1183140 - RNA, 19 nt, Homo sapiens
  misc_RNA (1)...(19): siRNA sense strand
gaauacaccugguucaaag

SEQ ID NO: 1183141 - RNA, 19 nt, Homo sapiens
  misc_RNA (1)...(19): siRNA sense strand
cgaguaagaaggugauuua

SEQ ID NO: 1183142 - RNA, 19 nt, Homo sapiens
  misc_RNA (1)...(19): siRNA sense strand
gaauaauccugugaaguug

SEQ ID NO: 1183143 - RNA, 19 nt, Homo sapiens
  misc_RNA (1)...(19): siRNA sense strand
agaauaauccugugaaguu

SEQ ID NO: 1183144 - RNA, 19 nt, Homo sapiens
  misc_RNA (1)...(19): siRNA sense strand
caacugguaucaccuucaa

SEQ ID NO: 1183145 - RNA, 19 nt, Homo sapiens
  misc_RNA (1)...(19): siRNA sense strand
ggauagugaugccuacgaa

SEQ ID NO: 1183146 - RNA, 19 nt, Homo sapiens
  misc_RNA (1)...(19): siRNA sense strand
gaaagggacuucgaguaag

SEQ ID NO: 1183147 - RNA, 19 nt, Homo sapiens
  misc_RNA (1)...(19): siRNA sense strand
guucaaagaugggauagug

SEQ ID NO: 1183148 - RNA, 19 nt, Homo sapiens
  misc_RNA (1)...(19): siRNA sense strand
agaaagggacuucgaguaa

SEQ ID NO: 1183149 - RNA, 19 nt, Homo sapiens
  misc_RNA (1)...(19): siRNA sense strand
cauccaagccuacaguuaa

SEQ ID NO: 1183150 - RNA, 19 nt, Homo sapiens
  misc_RNA (1)...(19): siRNA sense strand
gaacaaagaaagggacuuc

SEQ ID NO: 1183151 - RNA, 19 nt, Homo sapiens
  misc_RNA (1)...(19): siRNA sense strand
ucaaacagaccucgucauu

SEQ ID NO: 1183152 - RNA, 19 nt, Homo sapiens
  misc_RNA (1)...(19): siRNA sense strand
ggaagacacugggacauac

SEQ ID NO: 1183153 - RNA, 19 nt, Homo sapiens
  misc_RNA (1)...(19): siRNA sense strand
acacuuguauggucucuga

SEQ ID NO: 1183154 - RNA, 19 nt, Homo sapiens
  misc_RNA (1)...(19): siRNA sense strand
aaacagaccucgucauucc

SEQ ID NO: 1183155 - RNA, 19 nt, Homo sapiens
  misc_RNA (1)...(19): siRNA sense strand
aaagggacuucgaguaaga

SEQ ID NO: 1183156 - RNA, 19 nt, Homo sapiens
  misc_RNA (1)...(19): siRNA sense strand
gggaagacacugggacaua

SEQ ID NO: 1183157 - RNA, 19 nt, Homo sapiens
  misc_RNA (1)...(19): siRNA sense strand
cagcaacucuuccuauguc

SEQ ID NO: 1183158 - RNA, 19 nt, Homo sapiens
  misc_RNA (1)...(19): siRNA sense strand
gcaucugguuugccuauag

SEQ ID NO: 1183159 - RNA, 19 nt, Homo sapiens
  misc_RNA (1)...(19): siRNA sense strand
ggaaggcggcaacagcuau

SEQ ID NO: 1183160 - RNA, 19 nt, Homo sapiens
  misc_RNA (1)...(19): siRNA sense strand
aagaaagggacuucgagua

SEQ ID NO: 1183161 - RNA, 19 nt, Homo sapiens
  misc_RNA (1)...(19): siRNA sense strand
ccucugauacuggagaaua

SEQ ID NO: 1183162 - RNA, 19 nt, Homo sapiens
  misc_RNA (1)...(19): siRNA sense strand
uguugugccucuucauauu

SEQ ID NO: 1183163 - RNA, 19 nt, Homo sapiens
  misc_RNA (1)...(19): siRNA sense strand
gaagacacugggacauaca

SEQ ID NO: 1183164 - RNA, 19 nt, Homo sapiens
  misc_RNA (1)...(19): siRNA sense strand
ggagagcuggucuuugauc

SEQ ID NO: 1183165 - RNA, 19 nt, Homo sapiens
  misc_RNA (1)...(19): siRNA sense strand
aaacuguugugccucuuca

SEQ ID NO: 1183166 - RNA, 19 nt, Homo sapiens
  misc_RNA (1)...(19): siRNA sense strand
ccauccaagccuacaguua

SEQ ID NO: 1183167 - RNA, 19 nt, Homo sapiens
  misc_RNA (1)...(19): siRNA sense strand
gagaauaauccugugaagu

SEQ ID NO: 1183168 - RNA, 19 nt, Homo sapiens
  misc_RNA (1)...(19): siRNA sense strand
ugagaauaauccugugaag

SEQ ID NO: 1183169 - RNA, 19 nt, Homo sapiens
  misc_RNA (1)...(19): siRNA sense strand
gaaacuguugugccucuuc

SEQ ID NO: 1183170 - RNA, 19 nt, Homo sapiens
  misc_RNA (1)...(19): siRNA sense strand
cgaggccacuuugacagaa

SEQ ID NO: 1183171 - RNA, 19 nt, Homo sapiens
  misc_RNA (1)...(19): siRNA sense strand
gacaugcucagaacaagau

SEQ ID NO: 1183172 - RNA, 19 nt, Homo sapiens
  misc_RNA (1)...(19): siRNA sense strand
cguggcagccguccuugua

SEQ ID NO: 1183173 - RNA, 19 nt, Homo sapiens
  misc_RNA (1)...(19): siRNA sense strand
caaacagaccucgucauuc

SEQ ID NO: 1183174 - RNA, 19 nt, Homo sapiens
  misc_RNA (1)...(19): siRNA sense strand
acacugggacauacacuug

SEQ ID NO: 1183175 - RNA, 19 nt, Homo sapiens
  misc_RNA (1)...(19): siRNA sense strand
gaaccgggcagugcugaca

SEQ ID NO: 1183176 - RNA, 19 nt, Homo sapiens
  misc_RNA (1)...(19): siRNA sense strand
gaaggcggcaacagcuaug

SEQ ID NO: 1183177 - RNA, 19 nt, Homo sapiens
  misc_RNA (1)...(19): siRNA sense strand
ggaaacuguugugccucuu

SEQ ID NO: 1183178 - RNA, 19 nt, Homo sapiens
  misc_RNA (1)...(19): siRNA sense strand
ucaaagaugggauagugau

SEQ ID NO: 1183179 - RNA, 19 nt, Homo sapiens
  misc_RNA (1)...(19): siRNA sense strand
caaagaugggauagugaug

SEQ ID NO: 1183180 - RNA, 19 nt, Homo sapiens
  misc_RNA (1)...(19): siRNA sense strand
caacaggagagcuggucuu

SEQ ID NO: 1183181 - RNA, 19 nt, Homo sapiens
  misc_RNA (1)...(19): siRNA sense strand
caagaugguuccccaccuu

SEQ ID NO: 1183182 - RNA, 19 nt, Homo sapiens
  misc_RNA (1)...(19): siRNA sense strand
acaaagaaagggacuucga

SEQ ID NO: 1183183 - RNA, 19 nt, Homo sapiens
  misc_RNA (1)...(19): siRNA sense strand
ugacaugcucagaacaaga

SEQ ID NO: 1183184 - RNA, 19 nt, Homo sapiens
  misc_RNA (1)...(19): siRNA sense strand
guugugccucuucauauug

SEQ ID NO: 1183185 - RNA, 19 nt, Homo sapiens
  misc_RNA (1)...(19): siRNA sense strand
caucguggcagccguccuu

SEQ ID NO: 1183186 - RNA, 19 nt, Homo sapiens
  misc_RNA (1)...(19): siRNA sense strand
ggaccgggugaccuucuug

SEQ ID NO: 1183187 - RNA, 19 nt, Homo sapiens
  misc_RNA (1)...(19): siRNA sense strand
ccgaagugaaggagaauuc

SEQ ID NO: 1183188 - RNA, 19 nt, Homo sapiens
  misc_RNA (1)...(19): siRNA sense strand
aggcgcaagucgagaggaa

SEQ ID NO: 1183189 - RNA, 19 nt, Homo sapiens
  misc_RNA (1)...(19): siRNA sense strand
cgacaaaccuggcgucuau

SEQ ID NO: 1183190 - RNA, 19 nt, Homo sapiens
  misc_RNA (1)...(19): siRNA sense strand
uaccuggacuggaucaaga

SEQ ID NO: 1183191 - RNA, 19 nt, Homo sapiens
  misc_RNA (1)...(19): siRNA sense strand
uggacuggaucaagaagau

SEQ ID NO: 1183192 - RNA, 19 nt, Homo sapiens
  misc_RNA (1)...(19): siRNA sense strand
gccgcuaccuggacuggau

SEQ ID NO: 1183193 - RNA, 19 nt, Homo sapiens
  misc_RNA (1)...(19): siRNA sense strand
ggauguuccugcucuugcu

SEQ ID NO: 1183194 - RNA, 19 nt, Homo sapiens
  misc_RNA (1)...(19): siRNA sense strand
cgacaaaccuggcgucuau

SEQ ID NO: 1183195 - RNA, 19 nt, Homo sapiens
  misc_RNA (1)...(19): siRNA sense strand
uaccuggacuggaucaaga

SEQ ID NO: 1183196 - RNA, 19 nt, Homo sapiens
  misc_RNA (1)...(19): siRNA sense strand
uggacuggaucaagaagau

SEQ ID NO: 1183197 - RNA, 19 nt, Homo sapiens
  misc_RNA (1)...(19): siRNA sense strand
gccgcuaccuggacuggau

SEQ ID NO: 1183198 - RNA, 19 nt, Homo sapiens
  misc_RNA (1)...(19): siRNA sense strand
ggauguuccugcucuugcu

SEQ ID NO: 1183199 - RNA, 19 nt, Homo sapiens
  misc_RNA (1)...(19): siRNA sense strand
cgacaaaccuggcgucuau

SEQ ID NO: 1183200 - RNA, 19 nt, Homo sapiens
  misc_RNA (1)...(19): siRNA sense strand
uaccuggacuggaucaaga

SEQ ID NO: 1183201 - RNA, 19 nt, Homo sapiens
  misc_RNA (1)...(19): siRNA sense strand
uggacuggaucaagaagau

SEQ ID NO: 1183202 - RNA, 19 nt, Homo sapiens
  misc_RNA (1)...(19): siRNA sense strand
gccgcuaccuggacuggau

SEQ ID NO: 1183203 - RNA, 19 nt, Homo sapiens
  misc_RNA (1)...(19): siRNA sense strand
ggauguuccugcucuugcu

SEQ ID NO: 1183204 - RNA, 19 nt, Homo sapiens
  misc_RNA (1)...(19): siRNA sense strand
ggauguuccugcucuugcu

SEQ ID NO: 1183205 - RNA, 19 nt, Homo sapiens
  misc_RNA (1)...(19): siRNA sense strand
cgacaaaccuggcgucuau

SEQ ID NO: 1183206 - RNA, 19 nt, Homo sapiens
  misc_RNA (1)...(19): siRNA sense strand
uaccuggacuggaucaaga

SEQ ID NO: 1183207 - RNA, 19 nt, Homo sapiens
  misc_RNA (1)...(19): siRNA sense strand
uggacuggaucaagaagau

SEQ ID NO: 1183208 - RNA, 19 nt, Homo sapiens
  misc_RNA (1)...(19): siRNA sense strand
gccgcuaccuggacuggau

SEQ ID NO: 1183209 - RNA, 19 nt, Homo sapiens
  misc_RNA (1)...(19): siRNA sense strand
ggauguuccugcucuugcu

SEQ ID NO: 1183210 - RNA, 19 nt, Homo sapiens
  misc_RNA (1)...(19): siRNA sense strand
cgacaaaccuggcgucuau

SEQ ID NO: 1183211 - RNA, 19 nt, Homo sapiens
  misc_RNA (1)...(19): siRNA sense strand
uaccuggacuggaucaaga

SEQ ID NO: 1183212 - RNA, 19 nt, Homo sapiens
  misc_RNA (1)...(19): siRNA sense strand
uggacuggaucaagaagau

SEQ ID NO: 1183213 - RNA, 19 nt, Homo sapiens
  misc_RNA (1)...(19): siRNA sense strand
gccgcuaccuggacuggau

SEQ ID NO: 1183214 - RNA, 19 nt, Homo sapiens
  misc_RNA (1)...(19): siRNA sense strand
ggauguuccugcucuugcu

SEQ ID NO: 1183215 - RNA, 19 nt, Homo sapiens
  misc_RNA (1)...(19): siRNA sense strand
cgacaaaccuggcgucuau

SEQ ID NO: 1183216 - RNA, 19 nt, Homo sapiens
  misc_RNA (1)...(19): siRNA sense strand
uaccuggacuggaucaaga

SEQ ID NO: 1183217 - RNA, 19 nt, Homo sapiens
  misc_RNA (1)...(19): siRNA sense strand
uggacuggaucaagaagau

SEQ ID NO: 1183218 - RNA, 19 nt, Homo sapiens
  misc_RNA (1)...(19): siRNA sense strand
gccgcuaccuggacuggau

SEQ ID NO: 1183219 - RNA, 19 nt, Homo sapiens
  misc_RNA (1)...(19): siRNA sense strand
ggauguuccugcucuugcu

SEQ ID NO: 1183220 - RNA, 19 nt, Homo sapiens
  misc_RNA (1)...(19): siRNA sense strand
ggauguuccugcucuugcu

SEQ ID NO: 1183221 - RNA, 19 nt, Homo sapiens
  misc_RNA (1)...(19): siRNA sense strand
cgacaaaccuggcgucuau

SEQ ID NO: 1183222 - RNA, 19 nt, Homo sapiens
  misc_RNA (1)...(19): siRNA sense strand
uaccuggacuggaucaaga

SEQ ID NO: 1183223 - RNA, 19 nt, Homo sapiens
  misc_RNA (1)...(19): siRNA sense strand
uggacuggaucaagaagau

SEQ ID NO: 1183224 - RNA, 19 nt, Homo sapiens
  misc_RNA (1)...(19): siRNA sense strand
gccgcuaccuggacuggau

SEQ ID NO: 1183225 - RNA, 19 nt, Homo sapiens
  misc_RNA (1)...(19): siRNA sense strand
ggauguuccugcucuugcu

SEQ ID NO: 1183226 - RNA, 19 nt, Homo sapiens
  misc_RNA (1)...(19): siRNA sense strand
cgacaaaccuggcgucuau

SEQ ID NO: 1183227 - RNA, 19 nt, Homo sapiens
  misc_RNA (1)...(19): siRNA sense strand
uaccuggacuggaucaaga

SEQ ID NO: 1183228 - RNA, 19 nt, Homo sapiens
  misc_RNA (1)...(19): siRNA sense strand
uggacuggaucaagaagau

SEQ ID NO: 1183229 - RNA, 19 nt, Homo sapiens
  misc_RNA (1)...(19): siRNA sense strand
gccgcuaccuggacuggau

SEQ ID NO: 1183230 - RNA, 19 nt, Homo sapiens
  misc_RNA (1)...(19): siRNA sense strand
ggauguuccugcucuugcu

SEQ ID NO: 1183231 - RNA, 19 nt, Homo sapiens
  misc_RNA (1)...(19): siRNA sense strand
cgacaaaccuggcgucuau

SEQ ID NO: 1183232 - RNA, 19 nt, Homo sapiens
  misc_RNA (1)...(19): siRNA sense strand
uaccuggacuggaucaaga

SEQ ID NO: 1183233 - RNA, 19 nt, Homo sapiens
  misc_RNA (1)...(19): siRNA sense strand
uggacuggaucaagaagau

SEQ ID NO: 1183234 - RNA, 19 nt, Homo sapiens
  misc_RNA (1)...(19): siRNA sense strand
gccgcuaccuggacuggau

SEQ ID NO: 1183235 - RNA, 19 nt, Homo sapiens
  misc_RNA (1)...(19): siRNA sense strand
ggauguuccugcucuugcu

SEQ ID NO: 1183236 - RNA, 19 nt, Homo sapiens
  misc_RNA (1)...(19): siRNA sense strand
ggauguuccugcucuugcu

SEQ ID NO: 1183237 - RNA, 19 nt, Homo sapiens
  misc_RNA (1)...(19): siRNA sense strand
gaagaugauugcagagaca

SEQ ID NO: 1183238 - RNA, 19 nt, Homo sapiens
  misc_RNA (1)...(19): siRNA sense strand
agaagucacugaaagaguu

SEQ ID NO: 1183239 - RNA, 19 nt, Homo sapiens
  misc_RNA (1)...(19): siRNA sense strand
gcaacgacaaggugauuaa

SEQ ID NO: 1183240 - RNA, 19 nt, Homo sapiens
  misc_RNA (1)...(19): siRNA sense strand
ugaggccucugaugaauga

SEQ ID NO: 1183241 - RNA, 19 nt, Homo sapiens
  misc_RNA (1)...(19): siRNA sense strand
gacuauggaagaaucauua

SEQ ID NO: 1183242 - RNA, 19 nt, Homo sapiens
  misc_RNA (1)...(19): siRNA sense strand
uggagaagcucaagaaguc

SEQ ID NO: 1183243 - RNA, 19 nt, Homo sapiens
  misc_RNA (1)...(19): siRNA sense strand
gggaagaugcuaagaaauc

SEQ ID NO: 1183244 - RNA, 19 nt, Homo sapiens
  misc_RNA (1)...(19): siRNA sense strand
gaggagaucgaguacauga

SEQ ID NO: 1183245 - RNA, 19 nt, Homo sapiens
  misc_RNA (1)...(19): siRNA sense strand
uaagaaaucccgggacuau

SEQ ID NO: 1183246 - RNA, 19 nt, Homo sapiens
  misc_RNA (1)...(19): siRNA sense strand
uagaggagaucgaguacau

SEQ ID NO: 1183247 - RNA, 19 nt, Homo sapiens
  misc_RNA (1)...(19): siRNA sense strand
ccucggagcugagugagaa

SEQ ID NO: 1183248 - RNA, 19 nt, Homo sapiens
  misc_RNA (1)...(19): siRNA sense strand
gaaccaaauuguggagaag

SEQ ID NO: 1183249 - RNA, 19 nt, Homo sapiens
  misc_RNA (1)...(19): siRNA sense strand
aaggagagguucgaccaua

SEQ ID NO: 1183250 - RNA, 19 nt, Homo sapiens
  misc_RNA (1)...(19): siRNA sense strand
gaauggaacgccuacuaug

SEQ ID NO: 1183251 - RNA, 19 nt, Homo sapiens
  misc_RNA (1)...(19): siRNA sense strand
acgacaaggugauuaagaa

SEQ ID NO: 1183252 - RNA, 19 nt, Homo sapiens
  misc_RNA (1)...(19): siRNA sense strand
caagaugacccagcacuga

SEQ ID NO: 1183253 - RNA, 19 nt, Homo sapiens
  misc_RNA (1)...(19): siRNA sense strand
ucgaguacaugauccagaa

SEQ ID NO: 1183254 - RNA, 19 nt, Homo sapiens
  misc_RNA (1)...(19): siRNA sense strand
acaaggugauuaagaagau

SEQ ID NO: 1183255 - RNA, 19 nt, Homo sapiens
  misc_RNA (1)...(19): siRNA sense strand
ggaggaggccauccaguuc

SEQ ID NO: 1183256 - RNA, 19 nt, Homo sapiens
  misc_RNA (1)...(19): siRNA sense strand
ggaacucagugguccucaa

SEQ ID NO: 1183257 - RNA, 19 nt, Homo sapiens
  misc_RNA (1)...(19): siRNA sense strand
gcucaagaagucacugaaa

SEQ ID NO: 1183258 - RNA, 19 nt, Homo sapiens
  misc_RNA (1)...(19): siRNA sense strand
ucaagaagucacugaaaga

SEQ ID NO: 1183259 - RNA, 19 nt, Homo sapiens
  misc_RNA (1)...(19): siRNA sense strand
ggugaggccucugaugaau

SEQ ID NO: 1183260 - RNA, 19 nt, Homo sapiens
  misc_RNA (1)...(19): siRNA sense strand
ggacuauggaagaaucauu

SEQ ID NO: 1183261 - RNA, 19 nt, Homo sapiens
  misc_RNA (1)...(19): siRNA sense strand
cggaugagcccguggagaa

SEQ ID NO: 1183262 - RNA, 19 nt, Homo sapiens
  misc_RNA (1)...(19): siRNA sense strand
aaggaucuguacccaguaa

SEQ ID NO: 1183263 - RNA, 19 nt, Homo sapiens
  misc_RNA (1)...(19): siRNA sense strand
agaaccaaauuguggagaa

SEQ ID NO: 1183264 - RNA, 19 nt, Homo sapiens
  misc_RNA (1)...(19): siRNA sense strand
gaacucagugguccucaag

SEQ ID NO: 1183265 - RNA, 19 nt, Homo sapiens
  misc_RNA (1)...(19): siRNA sense strand
ggaagaugcuaagaaaucc

SEQ ID NO: 1183266 - RNA, 19 nt, Homo sapiens
  misc_RNA (1)...(19): siRNA sense strand
gacaaggugauuaagaaga

SEQ ID NO: 1183267 - RNA, 19 nt, Homo sapiens
  misc_RNA (1)...(19): siRNA sense strand
ggccucugaugaaugauga

SEQ ID NO: 1183268 - RNA, 19 nt, Homo sapiens
  misc_RNA (1)...(19): siRNA sense strand
gauccuaccauggcaagaa

SEQ ID NO: 1183269 - RNA, 19 nt, Homo sapiens
  misc_RNA (1)...(19): siRNA sense strand
ugaauggaacgccuacuau

SEQ ID NO: 1183270 - RNA, 19 nt, Homo sapiens
  misc_RNA (1)...(19): siRNA sense strand
ggagcugagugagaacaug

SEQ ID NO: 1183271 - RNA, 19 nt, Homo sapiens
  misc_RNA (1)...(19): siRNA sense strand
gaucuguacccaguaauca

SEQ ID NO: 1183272 - RNA, 19 nt, Homo sapiens
  misc_RNA (1)...(19): siRNA sense strand
ggaggugguguacguccua

SEQ ID NO: 1183273 - RNA, 19 nt, Homo sapiens
  misc_RNA (1)...(19): siRNA sense strand
ccugcuacguggacaagaa

SEQ ID NO: 1183274 - RNA, 19 nt, Homo sapiens
  misc_RNA (1)...(19): siRNA sense strand
gaaaucccgggacuaugga

SEQ ID NO: 1183275 - RNA, 19 nt, Homo sapiens
  misc_RNA (1)...(19): siRNA sense strand
aauggaacgccuacuauga

SEQ ID NO: 1183276 - RNA, 19 nt, Homo sapiens
  misc_RNA (1)...(19): siRNA sense strand
ugccgccacucgcuacaua

SEQ ID NO: 1183277 - RNA, 19 nt, Homo sapiens
  misc_RNA (1)...(19): siRNA sense strand
gcaggacgagcucuacauc

SEQ ID NO: 1183278 - RNA, 19 nt, Homo sapiens
  misc_RNA (1)...(19): siRNA sense strand
gaucagcgaggccgugaag

SEQ ID NO: 1183279 - RNA, 19 nt, Homo sapiens
  misc_RNA (1)...(19): siRNA sense strand
ggagagguucgaccauauc

SEQ ID NO: 1183280 - RNA, 19 nt, Homo sapiens
  misc_RNA (1)...(19): siRNA sense strand
gggcgugguccucgucauu

SEQ ID NO: 1183281 - RNA, 19 nt, Homo sapiens
  misc_RNA (1)...(19): siRNA sense strand
uauggaagaaucauuagug

SEQ ID NO: 1183282 - RNA, 19 nt, Homo sapiens
  misc_RNA (1)...(19): siRNA sense strand
gaggaggccauccaguuca

SEQ ID NO: 1183283 - RNA, 19 nt, Homo sapiens
  misc_RNA (1)...(19): siRNA sense strand
gugauuaagaagaugauug

SEQ ID NO: 1183284 - RNA, 19 nt, Homo sapiens
  misc_RNA (1)...(19): siRNA sense strand
agaaaucccgggacuaugg

SEQ ID NO: 1183285 - RNA, 19 nt, Homo sapiens
  misc_RNA (1)...(19): siRNA sense strand
caaggugauuaagaagaug

SEQ ID NO: 1183286 - RNA, 19 nt, Homo sapiens
  misc_RNA (1)...(19): siRNA sense strand
aggagagguucgaccauau

SEQ ID NO: 1183287 - RNA, 19 nt, Homo sapiens
  misc_RNA (1)...(19): siRNA sense strand
gaagucacugaaagaguuc

SEQ ID NO: 1183288 - RNA, 19 nt, Homo sapiens
  misc_RNA (1)...(19): siRNA sense strand
cucaagaagucacugaaag

SEQ ID NO: 1183289 - RNA, 19 nt, Homo sapiens
  misc_RNA (1)...(19): siRNA sense strand
gauccagaaccaaauugug

SEQ ID NO: 1183290 - RNA, 19 nt, Homo sapiens
  misc_RNA (1)...(19): siRNA sense strand
ccacaucaccuugcacucu

SEQ ID NO: 1183291 - RNA, 19 nt, Homo sapiens
  misc_RNA (1)...(19): siRNA sense strand
gaugagcccguggagaaga

SEQ ID NO: 1183292 - RNA, 19 nt, Homo sapiens
  misc_RNA (1)...(19): siRNA sense strand
cagcaacgacaaggugauu

SEQ ID NO: 1183293 - RNA, 19 nt, Homo sapiens
  misc_RNA (1)...(19): siRNA sense strand
cggggaagaugcuaagaaa

SEQ ID NO: 1183294 - RNA, 19 nt, Homo sapiens
  misc_RNA (1)...(19): siRNA sense strand
caagaagucacugaaagag

SEQ ID NO: 1183295 - RNA, 19 nt, Homo sapiens
  misc_RNA (1)...(19): siRNA sense strand
ggaagagucccugcuacgu

SEQ ID NO: 1183296 - RNA, 19 nt, Homo sapiens
  misc_RNA (1)...(19): siRNA sense strand
ggaucuguacccaguaauc

SEQ ID NO: 1183297 - RNA, 19 nt, Homo sapiens
  misc_RNA (1)...(19): siRNA sense strand
gaccugcacaagaaugaau

SEQ ID NO: 1183298 - RNA, 19 nt, Homo sapiens
  misc_RNA (1)...(19): siRNA sense strand
guggagaagcucaagaagu

SEQ ID NO: 1183299 - RNA, 19 nt, Homo sapiens
  misc_RNA (1)...(19): siRNA sense strand
gguucgaccauauccugua

SEQ ID NO: 1183300 - RNA, 19 nt, Homo sapiens
  misc_RNA (1)...(19): siRNA sense strand
guucgaccauauccuguac

SEQ ID NO: 1183301 - RNA, 19 nt, Homo sapiens
  misc_RNA (1)...(19): siRNA sense strand
gaggccauccaguucauca

SEQ ID NO: 1183302 - RNA, 19 nt, Homo sapiens
  misc_RNA (1)...(19): siRNA sense strand
cuggugaggccucugauga

SEQ ID NO: 1183303 - RNA, 19 nt, Homo sapiens
  misc_RNA (1)...(19): siRNA sense strand
ccgggacuauggaagaauc

SEQ ID NO: 1183304 - RNA, 19 nt, Homo sapiens
  misc_RNA (1)...(19): siRNA sense strand
gaaugaugaaggccugaag

SEQ ID NO: 1183305 - RNA, 19 nt, Homo sapiens
  misc_RNA (1)...(19): siRNA sense strand
cagaccugcacaagaauga

SEQ ID NO: 1183306 - RNA, 19 nt, Homo sapiens
  misc_RNA (1)...(19): siRNA sense strand
acuaugaggagguggugua

SEQ ID NO: 1183307 - RNA, 19 nt, Homo sapiens
  misc_RNA (1)...(19): siRNA sense strand
cgacaaggugauuaagaag

SEQ ID NO: 1183308 - RNA, 19 nt, Homo sapiens
  misc_RNA (1)...(19): siRNA sense strand
aggacgagcucuacaucca

SEQ ID NO: 1183309 - RNA, 19 nt, Homo sapiens
  misc_RNA (1)...(19): siRNA sense strand
gaauaucuggaccucaaua

SEQ ID NO: 1183310 - RNA, 19 nt, Homo sapiens
  misc_RNA (1)...(19): siRNA sense strand
uaucuggaccucaauauug

SEQ ID NO: 1183311 - RNA, 19 nt, Homo sapiens
  misc_RNA (1)...(19): siRNA sense strand
caccagaguuugagagagu

SEQ ID NO: 1183312 - RNA, 19 nt, Homo sapiens
  misc_RNA (1)...(19): siRNA sense strand
gagaguauuucgggcacaa

SEQ ID NO: 1183313 - RNA, 19 nt, Homo sapiens
  misc_RNA (1)...(19): siRNA sense strand
gggaauugcaaacagcuuu

SEQ ID NO: 1183314 - RNA, 19 nt, Homo sapiens
  misc_RNA (1)...(19): siRNA sense strand
guggauggcugggugguau

SEQ ID NO: 1183315 - RNA, 19 nt, Homo sapiens
  misc_RNA (1)...(19): siRNA sense strand
gcuggcugcugucucuauu

SEQ ID NO: 1183316 - RNA, 19 nt, Homo sapiens
  misc_RNA (1)...(19): siRNA sense strand
ccucaauauugccaagaaa

SEQ ID NO: 1183317 - RNA, 19 nt, Homo sapiens
  misc_RNA (1)...(19): siRNA sense strand
aaacugaggcggcaauucu

SEQ ID NO: 1183318 - RNA, 19 nt, Homo sapiens
  misc_RNA (1)...(19): siRNA sense strand
gauauucagaagcugcuaa

SEQ ID NO: 1183319 - RNA, 19 nt, Homo sapiens
  misc_RNA (1)...(19): siRNA sense strand
guuggaaaggcaagauuaa

SEQ ID NO: 1183320 - RNA, 19 nt, Homo sapiens
  misc_RNA (1)...(19): siRNA sense strand
augaauaucuggaccucaa

SEQ ID NO: 1183321 - RNA, 19 nt, Homo sapiens
  misc_RNA (1)...(19): siRNA sense strand
ggaguuuuauccuauauuc

SEQ ID NO: 1183322 - RNA, 19 nt, Homo sapiens
  misc_RNA (1)...(19): siRNA sense strand
guauuucgggcacaacaaa

SEQ ID NO: 1183323 - RNA, 19 nt, Homo sapiens
  misc_RNA (1)...(19): siRNA sense strand
gcugcugucucuauucucu

SEQ ID NO: 1183324 - RNA, 19 nt, Homo sapiens
  misc_RNA (1)...(19): siRNA sense strand
cggccugucagcaaaguua

SEQ ID NO: 1183325 - RNA, 19 nt, Homo sapiens
  misc_RNA (1)...(19): siRNA sense strand
ggaaaggcaagauuaaaau

SEQ ID NO: 1183326 - RNA, 19 nt, Homo sapiens
  misc_RNA (1)...(19): siRNA sense strand
gaaacugaggcggcaauuc

SEQ ID NO: 1183327 - RNA, 19 nt, Homo sapiens
  misc_RNA (1)...(19): siRNA sense strand
ugggucugguguacauaua

SEQ ID NO: 1183328 - RNA, 19 nt, Homo sapiens
  misc_RNA (1)...(19): siRNA sense strand
ggauggcugggugguauuu

SEQ ID NO: 1183329 - RNA, 19 nt, Homo sapiens
  misc_RNA (1)...(19): siRNA sense strand
agaguuugagagaguauuu

SEQ ID NO: 1183330 - RNA, 19 nt, Homo sapiens
  misc_RNA (1)...(19): siRNA sense strand
aauauugccaagaaacuga

SEQ ID NO: 1183331 - RNA, 19 nt, Homo sapiens
  misc_RNA (1)...(19): siRNA sense strand
ccugucagcaaaguuauuu

SEQ ID NO: 1183332 - RNA, 19 nt, Homo sapiens
  misc_RNA (1)...(19): siRNA sense strand
cuaggugcccugggaauug

SEQ ID NO: 1183333 - RNA, 19 nt, Homo sapiens
  misc_RNA (1)...(19): siRNA sense strand
aguuggaaaggcaagauua

SEQ ID NO: 1183334 - RNA, 19 nt, Homo sapiens
  misc_RNA (1)...(19): siRNA sense strand
gcaaauacauguccuggau

SEQ ID NO: 1183335 - RNA, 19 nt, Homo sapiens
  misc_RNA (1)...(19): siRNA sense strand
acacccagaucugcaaaua

SEQ ID NO: 1183336 - RNA, 19 nt, Homo sapiens
  misc_RNA (1)...(19): siRNA sense strand
uacauguccuggaucaaua

SEQ ID NO: 1183337 - RNA, 19 nt, Homo sapiens
  misc_RNA (1)...(19): siRNA sense strand
gaacggaugagcacgaucu

SEQ ID NO: 1183338 - RNA, 19 nt, Homo sapiens
  misc_RNA (1)...(19): siRNA sense strand
aaauacauguccuggauca

SEQ ID NO: 1183339 - RNA, 19 nt, Homo sapiens
  misc_RNA (1)...(19): siRNA sense strand
cuggaucaauaaagucaua

SEQ ID NO: 1183340 - RNA, 19 nt, Homo sapiens
  misc_RNA (1)...(19): siRNA sense strand
ucacuauccugagcccuaa

SEQ ID NO: 1183341 - RNA, 19 nt, Homo sapiens
  misc_RNA (1)...(19): siRNA sense strand
ggucaccaacaacaugaua

SEQ ID NO: 1183342 - RNA, 19 nt, Homo sapiens
  misc_RNA (1)...(19): siRNA sense strand
ccaggacccuugccagagu

SEQ ID NO: 1183343 - RNA, 19 nt, Homo sapiens
  misc_RNA (1)...(19): siRNA sense strand
acccagaucugcaaauaca

SEQ ID NO: 1183344 - RNA, 19 nt, Homo sapiens
  misc_RNA (1)...(19): siRNA sense strand
uggcaggucucgcucuuca

SEQ ID NO: 1183345 - RNA, 19 nt, Homo sapiens
  misc_RNA (1)...(19): siRNA sense strand
ccugagcccuaaagagugu

SEQ ID NO: 1183346 - RNA, 19 nt, Homo sapiens
  misc_RNA (1)...(19): siRNA sense strand
uguccuggaucaauaaagu

SEQ ID NO: 1183347 - RNA, 19 nt, Homo sapiens
  misc_RNA (1)...(19): siRNA sense strand
agucauacgcuccaacuga

SEQ ID NO: 1183348 - RNA, 19 nt, Homo sapiens
  misc_RNA (1)...(19): siRNA sense strand
gcgaacggaugagcacgau

SEQ ID NO: 1183349 - RNA, 19 nt, Homo sapiens
  misc_RNA (1)...(19): siRNA sense strand
ccagaucugcaaauacaug

SEQ ID NO: 1183350 - RNA, 19 nt, Homo sapiens
  misc_RNA (1)...(19): siRNA sense strand
ggaccacucgcucuguugu

SEQ ID NO: 1183351 - RNA, 19 nt, Homo sapiens
  misc_RNA (1)...(19): siRNA sense strand
ucaccaacaacaugauaug

SEQ ID NO: 1183352 - RNA, 19 nt, Homo sapiens
  misc_RNA (1)...(19): siRNA sense strand
gcaggucucgcucuucaac

SEQ ID NO: 1183353 - RNA, 19 nt, Homo sapiens
  misc_RNA (1)...(19): siRNA sense strand
ccggaccacucgcucuguu

SEQ ID NO: 1183354 - RNA, 19 nt, Homo sapiens
  misc_RNA (1)...(19): siRNA sense strand
auacauguccuggaucaau

SEQ ID NO: 1183355 - RNA, 19 nt, Homo sapiens
  misc_RNA (1)...(19): siRNA sense strand
gcaaauacauguccuggau

SEQ ID NO: 1183356 - RNA, 19 nt, Homo sapiens
  misc_RNA (1)...(19): siRNA sense strand
acacccagaucugcaaaua

SEQ ID NO: 1183357 - RNA, 19 nt, Homo sapiens
  misc_RNA (1)...(19): siRNA sense strand
uacauguccuggaucaaua

SEQ ID NO: 1183358 - RNA, 19 nt, Homo sapiens
  misc_RNA (1)...(19): siRNA sense strand
gaacggaugagcacgaucu

SEQ ID NO: 1183359 - RNA, 19 nt, Homo sapiens
  misc_RNA (1)...(19): siRNA sense strand
aaauacauguccuggauca

SEQ ID NO: 1183360 - RNA, 19 nt, Homo sapiens
  misc_RNA (1)...(19): siRNA sense strand
cuggaucaauaaagucaua

SEQ ID NO: 1183361 - RNA, 19 nt, Homo sapiens
  misc_RNA (1)...(19): siRNA sense strand
ucacuauccugagcccuaa

SEQ ID NO: 1183362 - RNA, 19 nt, Homo sapiens
  misc_RNA (1)...(19): siRNA sense strand
ggucaccaacaacaugaua

SEQ ID NO: 1183363 - RNA, 19 nt, Homo sapiens
  misc_RNA (1)...(19): siRNA sense strand
ccaggacccuugccagagu

SEQ ID NO: 1183364 - RNA, 19 nt, Homo sapiens
  misc_RNA (1)...(19): siRNA sense strand
acccagaucugcaaauaca

SEQ ID NO: 1183365 - RNA, 19 nt, Homo sapiens
  misc_RNA (1)...(19): siRNA sense strand
uggcaggucucgcucuuca

SEQ ID NO: 1183366 - RNA, 19 nt, Homo sapiens
  misc_RNA (1)...(19): siRNA sense strand
ccugagcccuaaagagugu

SEQ ID NO: 1183367 - RNA, 19 nt, Homo sapiens
  misc_RNA (1)...(19): siRNA sense strand
uguccuggaucaauaaagu

SEQ ID NO: 1183368 - RNA, 19 nt, Homo sapiens
  misc_RNA (1)...(19): siRNA sense strand
agucauacgcuccaacuga

SEQ ID NO: 1183369 - RNA, 19 nt, Homo sapiens
  misc_RNA (1)...(19): siRNA sense strand
gcgaacggaugagcacgau

SEQ ID NO: 1183370 - RNA, 19 nt, Homo sapiens
  misc_RNA (1)...(19): siRNA sense strand
ccagaucugcaaauacaug

SEQ ID NO: 1183371 - RNA, 19 nt, Homo sapiens
  misc_RNA (1)...(19): siRNA sense strand
ggaccacucgcucuguugu

SEQ ID NO: 1183372 - RNA, 19 nt, Homo sapiens
  misc_RNA (1)...(19): siRNA sense strand
ucaccaacaacaugauaug

SEQ ID NO: 1183373 - RNA, 19 nt, Homo sapiens
  misc_RNA (1)...(19): siRNA sense strand
gcaggucucgcucuucaac

SEQ ID NO: 1183374 - RNA, 19 nt, Homo sapiens
  misc_RNA (1)...(19): siRNA sense strand
ccggaccacucgcucuguu

SEQ ID NO: 1183375 - RNA, 19 nt, Homo sapiens
  misc_RNA (1)...(19): siRNA sense strand
auacauguccuggaucaau

SEQ ID NO: 1183376 - RNA, 19 nt, Homo sapiens
  misc_RNA (1)...(19): siRNA sense strand
gacaguggcuggacaguuc

SEQ ID NO: 1183377 - RNA, 19 nt, Homo sapiens
  misc_RNA (1)...(19): siRNA sense strand
ggacaguggcuggacaguu

SEQ ID NO: 1183378 - RNA, 19 nt, Homo sapiens
  misc_RNA (1)...(19): siRNA sense strand
gacaguggcuggacaguuc

SEQ ID NO: 1183379 - RNA, 19 nt, Homo sapiens
  misc_RNA (1)...(19): siRNA sense strand
gggagcugcuuugcugaaa

SEQ ID NO: 1183380 - RNA, 19 nt, Homo sapiens
  misc_RNA (1)...(19): siRNA sense strand
ggacaguggcuggacaguu

SEQ ID NO: 1183381 - RNA, 19 nt, Homo sapiens
  misc_RNA (1)...(19): siRNA sense strand
gagcugcuuugcugaaaau

SEQ ID NO: 1183382 - RNA, 19 nt, Homo sapiens
  misc_RNA (1)...(19): siRNA sense strand
ggagcugcuuugcugaaaa

SEQ ID NO: 1183383 - RNA, 19 nt, Homo sapiens
  misc_RNA (1)...(19): siRNA sense strand
gacaguggcuggacaguuc

SEQ ID NO: 1183384 - RNA, 19 nt, Homo sapiens
  misc_RNA (1)...(19): siRNA sense strand
ggacaguggcuggacaguu

SEQ ID NO: 1183385 - RNA, 19 nt, Homo sapiens
  misc_RNA (1)...(19): siRNA sense strand
uaucugaacucuaugcauu

SEQ ID NO: 1183386 - RNA, 19 nt, Homo sapiens
  misc_RNA (1)...(19): siRNA sense strand
gagaaagaguuccacuuca

SEQ ID NO: 1183387 - RNA, 19 nt, Homo sapiens
  misc_RNA (1)...(19): siRNA sense strand
ggagaaagaguuccacuuc

SEQ ID NO: 1183388 - RNA, 19 nt, Homo sapiens
  misc_RNA (1)...(19): siRNA sense strand
agaaagaguuccacuucaa

SEQ ID NO: 1183389 - RNA, 19 nt, Homo sapiens
  misc_RNA (1)...(19): siRNA sense strand
gaaagagucucgacaaaac

SEQ ID NO: 1183390 - RNA, 19 nt, Homo sapiens
  misc_RNA (1)...(19): siRNA sense strand
guggcuaucugaacucuau

SEQ ID NO: 1183391 - RNA, 19 nt, Homo sapiens
  misc_RNA (1)...(19): siRNA sense strand
gaugaaagagucucgacaa

SEQ ID NO: 1183392 - RNA, 19 nt, Homo sapiens
  misc_RNA (1)...(19): siRNA sense strand
ucaacagcgucccguauga

SEQ ID NO: 1183393 - RNA, 19 nt, Homo sapiens
  misc_RNA (1)...(19): siRNA sense strand
ugguggagcuggagaaaga

SEQ ID NO: 1183394 - RNA, 19 nt, Homo sapiens
  misc_RNA (1)...(19): siRNA sense strand
ucacugagcgccagaucaa

SEQ ID NO: 1183395 - RNA, 19 nt, Homo sapiens
  misc_RNA (1)...(19): siRNA sense strand
gaagggcaagggcaugcua

SEQ ID NO: 1183396 - RNA, 19 nt, Homo sapiens
  misc_RNA (1)...(19): siRNA sense strand
cagaaucgccgcaugaagu

SEQ ID NO: 1183397 - RNA, 19 nt, Homo sapiens
  misc_RNA (1)...(19): siRNA sense strand
gggaagaauucaggaagca

SEQ ID NO: 1183398 - RNA, 19 nt, Homo sapiens
  misc_RNA (1)...(19): siRNA sense strand
gaaagaguuccacuucaac

SEQ ID NO: 1183399 - RNA, 19 nt, Homo sapiens
  misc_RNA (1)...(19): siRNA sense strand
ccagcccucuuuggucuaa

SEQ ID NO: 1183400 - RNA, 19 nt, Homo sapiens
  misc_RNA (1)...(19): siRNA sense strand
augaaagagucucgacaaa

SEQ ID NO: 1183401 - RNA, 19 nt, Homo sapiens
  misc_RNA (1)...(19): siRNA sense strand
aagcugcgcuggcgacaag

SEQ ID NO: 1183402 - RNA, 19 nt, Homo sapiens
  misc_RNA (1)...(19): siRNA sense strand
agaaucgccgcaugaagua

SEQ ID NO: 1183403 - RNA, 19 nt, Homo sapiens
  misc_RNA (1)...(19): siRNA sense strand
ggucaacagcgucccguau

SEQ ID NO: 1183404 - RNA, 19 nt, Homo sapiens
  misc_RNA (1)...(19): siRNA sense strand
gcagggcaacggcagcuau

SEQ ID NO: 1183405 - RNA, 19 nt, Homo sapiens
  misc_RNA (1)...(19): siRNA sense strand
cacaguggccaaacaaauc

SEQ ID NO: 1183406 - RNA, 19 nt, Homo sapiens
  misc_RNA (1)...(19): siRNA sense strand
ggagcuggagaaagaguuc

SEQ ID NO: 1183407 - RNA, 19 nt, Homo sapiens
  misc_RNA (1)...(19): siRNA sense strand
ugcauucgcuggucaacag

SEQ ID NO: 1183408 - RNA, 19 nt, Homo sapiens
  misc_RNA (1)...(19): siRNA sense strand
caaaacacaaagcagaaaa

SEQ ID NO: 1183409 - RNA, 19 nt, Homo sapiens
  misc_RNA (1)...(19): siRNA sense strand
gucaacagcgucccguaug

SEQ ID NO: 1183410 - RNA, 19 nt, Homo sapiens
  misc_RNA (1)...(19): siRNA sense strand
gccgguggcuaucugaacu

SEQ ID NO: 1183411 - RNA, 19 nt, Homo sapiens
  misc_RNA (1)...(19): siRNA sense strand
ggcaagggcaugcuaacgu

SEQ ID NO: 1183412 - RNA, 19 nt, Homo sapiens
  misc_RNA (1)...(19): siRNA sense strand
uaucugaacucuaugcauu

SEQ ID NO: 1183413 - RNA, 19 nt, Homo sapiens
  misc_RNA (1)...(19): siRNA sense strand
gagaaagaguuccacuuca

SEQ ID NO: 1183414 - RNA, 19 nt, Homo sapiens
  misc_RNA (1)...(19): siRNA sense strand
ggagaaagaguuccacuuc

SEQ ID NO: 1183415 - RNA, 19 nt, Homo sapiens
  misc_RNA (1)...(19): siRNA sense strand
agaaagaguuccacuucaa

SEQ ID NO: 1183416 - RNA, 19 nt, Homo sapiens
  misc_RNA (1)...(19): siRNA sense strand
gaaagagucucgacaaaac

SEQ ID NO: 1183417 - RNA, 19 nt, Homo sapiens
  misc_RNA (1)...(19): siRNA sense strand
guggcuaucugaacucuau

SEQ ID NO: 1183418 - RNA, 19 nt, Homo sapiens
  misc_RNA (1)...(19): siRNA sense strand
gaugaaagagucucgacaa

SEQ ID NO: 1183419 - RNA, 19 nt, Homo sapiens
  misc_RNA (1)...(19): siRNA sense strand
ucaacagcgucccguauga

SEQ ID NO: 1183420 - RNA, 19 nt, Homo sapiens
  misc_RNA (1)...(19): siRNA sense strand
ugguggagcuggagaaaga

SEQ ID NO: 1183421 - RNA, 19 nt, Homo sapiens
  misc_RNA (1)...(19): siRNA sense strand
ucacugagcgccagaucaa

SEQ ID NO: 1183422 - RNA, 19 nt, Homo sapiens
  misc_RNA (1)...(19): siRNA sense strand
gaagggcaagggcaugcua

SEQ ID NO: 1183423 - RNA, 19 nt, Homo sapiens
  misc_RNA (1)...(19): siRNA sense strand
cagaaucgccgcaugaagu

SEQ ID NO: 1183424 - RNA, 19 nt, Homo sapiens
  misc_RNA (1)...(19): siRNA sense strand
gggaagaauucaggaagca

SEQ ID NO: 1183425 - RNA, 19 nt, Homo sapiens
  misc_RNA (1)...(19): siRNA sense strand
gaaagaguuccacuucaac

SEQ ID NO: 1183426 - RNA, 19 nt, Homo sapiens
  misc_RNA (1)...(19): siRNA sense strand
ccagcccucuuuggucuaa

SEQ ID NO: 1183427 - RNA, 19 nt, Homo sapiens
  misc_RNA (1)...(19): siRNA sense strand
augaaagagucucgacaaa

SEQ ID NO: 1183428 - RNA, 19 nt, Homo sapiens
  misc_RNA (1)...(19): siRNA sense strand
aagcugcgcuggcgacaag

SEQ ID NO: 1183429 - RNA, 19 nt, Homo sapiens
  misc_RNA (1)...(19): siRNA sense strand
agaaucgccgcaugaagua

SEQ ID NO: 1183430 - RNA, 19 nt, Homo sapiens
  misc_RNA (1)...(19): siRNA sense strand
ggucaacagcgucccguau

SEQ ID NO: 1183431 - RNA, 19 nt, Homo sapiens
  misc_RNA (1)...(19): siRNA sense strand
gcagggcaacggcagcuau

SEQ ID NO: 1183432 - RNA, 19 nt, Homo sapiens
  misc_RNA (1)...(19): siRNA sense strand
cacaguggccaaacaaauc

SEQ ID NO: 1183433 - RNA, 19 nt, Homo sapiens
  misc_RNA (1)...(19): siRNA sense strand
ggagcuggagaaagaguuc

SEQ ID NO: 1183434 - RNA, 19 nt, Homo sapiens
  misc_RNA (1)...(19): siRNA sense strand
ugcauucgcuggucaacag

SEQ ID NO: 1183435 - RNA, 19 nt, Homo sapiens
  misc_RNA (1)...(19): siRNA sense strand
caaaacacaaagcagaaaa

SEQ ID NO: 1183436 - RNA, 19 nt, Homo sapiens
  misc_RNA (1)...(19): siRNA sense strand
gucaacagcgucccguaug

SEQ ID NO: 1183437 - RNA, 19 nt, Homo sapiens
  misc_RNA (1)...(19): siRNA sense strand
gccgguggcuaucugaacu

SEQ ID NO: 1183438 - RNA, 19 nt, Homo sapiens
  misc_RNA (1)...(19): siRNA sense strand
ggcaagggcaugcuaacgu

SEQ ID NO: 1183439 - RNA, 19 nt, Homo sapiens
  misc_RNA (1)...(19): siRNA sense strand
uaucugaacucuaugcauu

SEQ ID NO: 1183440 - RNA, 19 nt, Homo sapiens
  misc_RNA (1)...(19): siRNA sense strand
gagaaagaguuccacuuca

SEQ ID NO: 1183441 - RNA, 19 nt, Homo sapiens
  misc_RNA (1)...(19): siRNA sense strand
ggagaaagaguuccacuuc

SEQ ID NO: 1183442 - RNA, 19 nt, Homo sapiens
  misc_RNA (1)...(19): siRNA sense strand
agaaagaguuccacuucaa

SEQ ID NO: 1183443 - RNA, 19 nt, Homo sapiens
  misc_RNA (1)...(19): siRNA sense strand
gaaagagucucgacaaaac

SEQ ID NO: 1183444 - RNA, 19 nt, Homo sapiens
  misc_RNA (1)...(19): siRNA sense strand
guggcuaucugaacucuau

SEQ ID NO: 1183445 - RNA, 19 nt, Homo sapiens
  misc_RNA (1)...(19): siRNA sense strand
ucaacagcgucccguauga

SEQ ID NO: 1183446 - RNA, 19 nt, Homo sapiens
  misc_RNA (1)...(19): siRNA sense strand
ugguggagcuggagaaaga

SEQ ID NO: 1183447 - RNA, 19 nt, Homo sapiens
  misc_RNA (1)...(19): siRNA sense strand
ucacugagcgccagaucaa

SEQ ID NO: 1183448 - RNA, 19 nt, Homo sapiens
  misc_RNA (1)...(19): siRNA sense strand
gaagggcaagggcaugcua

SEQ ID NO: 1183449 - RNA, 19 nt, Homo sapiens
  misc_RNA (1)...(19): siRNA sense strand
cagaaucgccgcaugaagu

SEQ ID NO: 1183450 - RNA, 19 nt, Homo sapiens
  misc_RNA (1)...(19): siRNA sense strand
gggaagaauucaggaagca

SEQ ID NO: 1183451 - RNA, 19 nt, Homo sapiens
  misc_RNA (1)...(19): siRNA sense strand
gaaagaguuccacuucaac

SEQ ID NO: 1183452 - RNA, 19 nt, Homo sapiens
  misc_RNA (1)...(19): siRNA sense strand
ccagcccucuuuggucuaa

SEQ ID NO: 1183453 - RNA, 19 nt, Homo sapiens
  misc_RNA (1)...(19): siRNA sense strand
aagcugcgcuggcgacaag

SEQ ID NO: 1183454 - RNA, 19 nt, Homo sapiens
  misc_RNA (1)...(19): siRNA sense strand
agaaucgccgcaugaagua

SEQ ID NO: 1183455 - RNA, 19 nt, Homo sapiens
  misc_RNA (1)...(19): siRNA sense strand
ggucaacagcgucccguau

SEQ ID NO: 1183456 - RNA, 19 nt, Homo sapiens
  misc_RNA (1)...(19): siRNA sense strand
gcagggcaacggcagcuau

SEQ ID NO: 1183457 - RNA, 19 nt, Homo sapiens
  misc_RNA (1)...(19): siRNA sense strand
ggagcuggagaaagaguuc

SEQ ID NO: 1183458 - RNA, 19 nt, Homo sapiens
  misc_RNA (1)...(19): siRNA sense strand
ugcauucgcuggucaacag

SEQ ID NO: 1183459 - RNA, 19 nt, Homo sapiens
  misc_RNA (1)...(19): siRNA sense strand
ggcaagggcaugcuaacgu

SEQ ID NO: 1183460 - RNA, 19 nt, Homo sapiens
  misc_RNA (1)...(19): siRNA sense strand
caaaacacaaagcagaaaa

SEQ ID NO: 1183461 - RNA, 19 nt, Homo sapiens
  misc_RNA (1)...(19): siRNA sense strand
gucaacagcgucccguaug

SEQ ID NO: 1183462 - RNA, 19 nt, Homo sapiens
  misc_RNA (1)...(19): siRNA sense strand
gccgguggcuaucugaacu

SEQ ID NO: 1183463 - RNA, 19 nt, Homo sapiens
  misc_RNA (1)...(19): siRNA sense strand
ucacagacauugccaaagu

SEQ ID NO: 1183464 - RNA, 19 nt, Homo sapiens
  misc_RNA (1)...(19): siRNA sense strand
caagcaccaucaagccuua

SEQ ID NO: 1183465 - RNA, 19 nt, Homo sapiens
  misc_RNA (1)...(19): siRNA sense strand
gaacaaucaccacaacaug

SEQ ID NO: 1183466 - RNA, 19 nt, Homo sapiens
  misc_RNA (1)...(19): siRNA sense strand
gaaaacuggugagacaaua

SEQ ID NO: 1183467 - RNA, 19 nt, Homo sapiens
  misc_RNA (1)...(19): siRNA sense strand
gggacugucucgcguauca

SEQ ID NO: 1183468 - RNA, 19 nt, Homo sapiens
  misc_RNA (1)...(19): siRNA sense strand
ucuauuaccugaagaaguc

SEQ ID NO: 1183469 - RNA, 19 nt, Homo sapiens
  misc_RNA (1)...(19): siRNA sense strand
caguucaccuugaucauga

SEQ ID NO: 1183470 - RNA, 19 nt, Homo sapiens
  misc_RNA (1)...(19): siRNA sense strand
ggaacaaucaccacaacau

SEQ ID NO: 1183471 - RNA, 19 nt, Homo sapiens
  misc_RNA (1)...(19): siRNA sense strand
caucaaguacccacugaaa

SEQ ID NO: 1183472 - RNA, 19 nt, Homo sapiens
  misc_RNA (1)...(19): siRNA sense strand
ggaauucuaccggaucuau

SEQ ID NO: 1183473 - RNA, 19 nt, Homo sapiens
  misc_RNA (1)...(19): siRNA sense strand
cagaggugaugacagcaaa

SEQ ID NO: 1183474 - RNA, 19 nt, Homo sapiens
  misc_RNA (1)...(19): siRNA sense strand
uggcagcacucuauaagca

SEQ ID NO: 1183475 - RNA, 19 nt, Homo sapiens
  misc_RNA (1)...(19): siRNA sense strand
ggcaggauuugcucaagga

SEQ ID NO: 1183476 - RNA, 19 nt, Homo sapiens
  misc_RNA (1)...(19): siRNA sense strand
aaggcuacauucagaacua

SEQ ID NO: 1183477 - RNA, 19 nt, Homo sapiens
  misc_RNA (1)...(19): siRNA sense strand
gugauguucuggcaggauu

SEQ ID NO: 1183478 - RNA, 19 nt, Homo sapiens
  misc_RNA (1)...(19): siRNA sense strand
gcaguucaccuugaucaug

SEQ ID NO: 1183479 - RNA, 19 nt, Homo sapiens
  misc_RNA (1)...(19): siRNA sense strand
aaacuacaaguacgacaaa

SEQ ID NO: 1183480 - RNA, 19 nt, Homo sapiens
  misc_RNA (1)...(19): siRNA sense strand
acacuaugcuguauuuggu

SEQ ID NO: 1183481 - RNA, 19 nt, Homo sapiens
  misc_RNA (1)...(19): siRNA sense strand
aaacuggugagacaauaaa

SEQ ID NO: 1183482 - RNA, 19 nt, Homo sapiens
  misc_RNA (1)...(19): siRNA sense strand
aauucuaccggaucuauua

SEQ ID NO: 1183483 - RNA, 19 nt, Homo sapiens
  misc_RNA (1)...(19): siRNA sense strand
gcaagcgggugcugcucau

SEQ ID NO: 1183484 - RNA, 19 nt, Homo sapiens
  misc_RNA (1)...(19): siRNA sense strand
cuacguggcagcacucuau

SEQ ID NO: 1183485 - RNA, 19 nt, Homo sapiens
  misc_RNA (1)...(19): siRNA sense strand
aaaugacgcugugcucugu

SEQ ID NO: 1183486 - RNA, 19 nt, Homo sapiens
  misc_RNA (1)...(19): siRNA sense strand
gaauucuaccggaucuauu

SEQ ID NO: 1183487 - RNA, 19 nt, Homo sapiens
  misc_RNA (1)...(19): siRNA sense strand
cuucgugucugaccucuuc

SEQ ID NO: 1183488 - RNA, 19 nt, Homo sapiens
  misc_RNA (1)...(19): siRNA sense strand
gcagaggugaugacagcaa

SEQ ID NO: 1183489 - RNA, 19 nt, Homo sapiens
  misc_RNA (1)...(19): siRNA sense strand
ccugguggccugcugcaua

SEQ ID NO: 1183490 - RNA, 19 nt, Homo sapiens
  misc_RNA (1)...(19): siRNA sense strand
guggccugcugcauaguuu

SEQ ID NO: 1183491 - RNA, 19 nt, Homo sapiens
  misc_RNA (1)...(19): siRNA sense strand
acaagcaccaucccaguga

SEQ ID NO: 1183492 - RNA, 19 nt, Homo sapiens
  misc_RNA (1)...(19): siRNA sense strand
ugacagcaaaguccaggaa

SEQ ID NO: 1183493 - RNA, 19 nt, Homo sapiens
  misc_RNA (1)...(19): siRNA sense strand
cuggugagacaauaaauga

SEQ ID NO: 1183494 - RNA, 19 nt, Homo sapiens
  misc_RNA (1)...(19): siRNA sense strand
caggaacaaucaccacaac

SEQ ID NO: 1183495 - RNA, 19 nt, Homo sapiens
  misc_RNA (1)...(19): siRNA sense strand
gccaucagccagucuuuca

SEQ ID NO: 1183496 - RNA, 19 nt, Homo sapiens
  misc_RNA (1)...(19): siRNA sense strand
ggaucuauuaccugaagaa

SEQ ID NO: 1183497 - RNA, 19 nt, Homo sapiens
  misc_RNA (1)...(19): siRNA sense strand
gaccucuucugccucuuca

SEQ ID NO: 1183498 - RNA, 19 nt, Homo sapiens
  misc_RNA (1)...(19): siRNA sense strand
ccggaucuauuaccugaag

SEQ ID NO: 1183499 - RNA, 19 nt, Homo sapiens
  misc_RNA (1)...(19): siRNA sense strand
cacagacauugccaaagug

SEQ ID NO: 1183500 - RNA, 19 nt, Homo sapiens
  misc_RNA (1)...(19): siRNA sense strand
aacaaucaccacaacauga

SEQ ID NO: 1183501 - RNA, 19 nt, Homo sapiens
  misc_RNA (1)...(19): siRNA sense strand
gugggcugcuuccucuuug

SEQ ID NO: 1183502 - RNA, 19 nt, Homo sapiens
  misc_RNA (1)...(19): siRNA sense strand
uuucaccuguggacauuau

SEQ ID NO: 1183503 - RNA, 19 nt, Homo sapiens
  misc_RNA (1)...(19): siRNA sense strand
caagcaccaucccagugau

SEQ ID NO: 1183504 - RNA, 19 nt, Homo sapiens
  misc_RNA (1)...(19): siRNA sense strand
auucagaacuacagaugca

SEQ ID NO: 1183505 - RNA, 19 nt, Homo sapiens
  misc_RNA (1)...(19): siRNA sense strand
ugaucaugauggccuucua

SEQ ID NO: 1183506 - RNA, 19 nt, Homo sapiens
  misc_RNA (1)...(19): siRNA sense strand
gaucaugauggccuucuac

SEQ ID NO: 1183507 - RNA, 19 nt, Homo sapiens
  misc_RNA (1)...(19): siRNA sense strand
ccuuucaccuguggacauu

SEQ ID NO: 1183508 - RNA, 19 nt, Homo sapiens
  misc_RNA (1)...(19): siRNA sense strand
ccugcguccucacuucuug

SEQ ID NO: 1183509 - RNA, 19 nt, Homo sapiens
  misc_RNA (1)...(19): siRNA sense strand
ccugcuauccggaaggaaa

SEQ ID NO: 1183510 - RNA, 19 nt, Homo sapiens
  misc_RNA (1)...(19): siRNA sense strand
ugcuguauuuggugcuaua

SEQ ID NO: 1183511 - RNA, 19 nt, Homo sapiens
  misc_RNA (1)...(19): siRNA sense strand
ucacagacauugccaaagu

SEQ ID NO: 1183512 - RNA, 19 nt, Homo sapiens
  misc_RNA (1)...(19): siRNA sense strand
caagcaccaucaagccuua

SEQ ID NO: 1183513 - RNA, 19 nt, Homo sapiens
  misc_RNA (1)...(19): siRNA sense strand
gaacaaucaccacaacaug

SEQ ID NO: 1183514 - RNA, 19 nt, Homo sapiens
  misc_RNA (1)...(19): siRNA sense strand
gaaaacuggugagacaaua

SEQ ID NO: 1183515 - RNA, 19 nt, Homo sapiens
  misc_RNA (1)...(19): siRNA sense strand
gggacugucucgcguauca

SEQ ID NO: 1183516 - RNA, 19 nt, Homo sapiens
  misc_RNA (1)...(19): siRNA sense strand
ucuauuaccugaagaaguc

SEQ ID NO: 1183517 - RNA, 19 nt, Homo sapiens
  misc_RNA (1)...(19): siRNA sense strand
caguucaccuugaucauga

SEQ ID NO: 1183518 - RNA, 19 nt, Homo sapiens
  misc_RNA (1)...(19): siRNA sense strand
ggaacaaucaccacaacau

SEQ ID NO: 1183519 - RNA, 19 nt, Homo sapiens
  misc_RNA (1)...(19): siRNA sense strand
caucaaguacccacugaaa

SEQ ID NO: 1183520 - RNA, 19 nt, Homo sapiens
  misc_RNA (1)...(19): siRNA sense strand
ggaauucuaccggaucuau

SEQ ID NO: 1183521 - RNA, 19 nt, Homo sapiens
  misc_RNA (1)...(19): siRNA sense strand
cagaggugaugacagcaaa

SEQ ID NO: 1183522 - RNA, 19 nt, Homo sapiens
  misc_RNA (1)...(19): siRNA sense strand
uggcagcacucuauaagca

SEQ ID NO: 1183523 - RNA, 19 nt, Homo sapiens
  misc_RNA (1)...(19): siRNA sense strand
ggcaggauuugcucaagga

SEQ ID NO: 1183524 - RNA, 19 nt, Homo sapiens
  misc_RNA (1)...(19): siRNA sense strand
aaggcuacauucagaacua

SEQ ID NO: 1183525 - RNA, 19 nt, Homo sapiens
  misc_RNA (1)...(19): siRNA sense strand
gugauguucuggcaggauu

SEQ ID NO: 1183526 - RNA, 19 nt, Homo sapiens
  misc_RNA (1)...(19): siRNA sense strand
gcaguucaccuugaucaug

SEQ ID NO: 1183527 - RNA, 19 nt, Homo sapiens
  misc_RNA (1)...(19): siRNA sense strand
aaacuacaaguacgacaaa

SEQ ID NO: 1183528 - RNA, 19 nt, Homo sapiens
  misc_RNA (1)...(19): siRNA sense strand
acacuaugcuguauuuggu

SEQ ID NO: 1183529 - RNA, 19 nt, Homo sapiens
  misc_RNA (1)...(19): siRNA sense strand
aaacuggugagacaauaaa

SEQ ID NO: 1183530 - RNA, 19 nt, Homo sapiens
  misc_RNA (1)...(19): siRNA sense strand
aauucuaccggaucuauua

SEQ ID NO: 1183531 - RNA, 19 nt, Homo sapiens
  misc_RNA (1)...(19): siRNA sense strand
gcaagcgggugcugcucau

SEQ ID NO: 1183532 - RNA, 19 nt, Homo sapiens
  misc_RNA (1)...(19): siRNA sense strand
cuacguggcagcacucuau

SEQ ID NO: 1183533 - RNA, 19 nt, Homo sapiens
  misc_RNA (1)...(19): siRNA sense strand
aaaugacgcugugcucugu

SEQ ID NO: 1183534 - RNA, 19 nt, Homo sapiens
  misc_RNA (1)...(19): siRNA sense strand
gaauucuaccggaucuauu

SEQ ID NO: 1183535 - RNA, 19 nt, Homo sapiens
  misc_RNA (1)...(19): siRNA sense strand
cuucgugucugaccucuuc

SEQ ID NO: 1183536 - RNA, 19 nt, Homo sapiens
  misc_RNA (1)...(19): siRNA sense strand
gcagaggugaugacagcaa

SEQ ID NO: 1183537 - RNA, 19 nt, Homo sapiens
  misc_RNA (1)...(19): siRNA sense strand
ccugguggccugcugcaua

SEQ ID NO: 1183538 - RNA, 19 nt, Homo sapiens
  misc_RNA (1)...(19): siRNA sense strand
guggccugcugcauaguuu

SEQ ID NO: 1183539 - RNA, 19 nt, Homo sapiens
  misc_RNA (1)...(19): siRNA sense strand
acaagcaccaucccaguga

SEQ ID NO: 1183540 - RNA, 19 nt, Homo sapiens
  misc_RNA (1)...(19): siRNA sense strand
ugacagcaaaguccaggaa

SEQ ID NO: 1183541 - RNA, 19 nt, Homo sapiens
  misc_RNA (1)...(19): siRNA sense strand
cuggugagacaauaaauga

SEQ ID NO: 1183542 - RNA, 19 nt, Homo sapiens
  misc_RNA (1)...(19): siRNA sense strand
caggaacaaucaccacaac

SEQ ID NO: 1183543 - RNA, 19 nt, Homo sapiens
  misc_RNA (1)...(19): siRNA sense strand
gccaucagccagucuuuca

SEQ ID NO: 1183544 - RNA, 19 nt, Homo sapiens
  misc_RNA (1)...(19): siRNA sense strand
ggaucuauuaccugaagaa

SEQ ID NO: 1183545 - RNA, 19 nt, Homo sapiens
  misc_RNA (1)...(19): siRNA sense strand
gaccucuucugccucuuca

SEQ ID NO: 1183546 - RNA, 19 nt, Homo sapiens
  misc_RNA (1)...(19): siRNA sense strand
ccggaucuauuaccugaag

SEQ ID NO: 1183547 - RNA, 19 nt, Homo sapiens
  misc_RNA (1)...(19): siRNA sense strand
cacagacauugccaaagug

SEQ ID NO: 1183548 - RNA, 19 nt, Homo sapiens
  misc_RNA (1)...(19): siRNA sense strand
aacaaucaccacaacauga

SEQ ID NO: 1183549 - RNA, 19 nt, Homo sapiens
  misc_RNA (1)...(19): siRNA sense strand
gugggcugcuuccucuuug

SEQ ID NO: 1183550 - RNA, 19 nt, Homo sapiens
  misc_RNA (1)...(19): siRNA sense strand
uuucaccuguggacauuau

SEQ ID NO: 1183551 - RNA, 19 nt, Homo sapiens
  misc_RNA (1)...(19): siRNA sense strand
caagcaccaucccagugau

SEQ ID NO: 1183552 - RNA, 19 nt, Homo sapiens
  misc_RNA (1)...(19): siRNA sense strand
auucagaacuacagaugca

SEQ ID NO: 1183553 - RNA, 19 nt, Homo sapiens
  misc_RNA (1)...(19): siRNA sense strand
ugaucaugauggccuucua

SEQ ID NO: 1183554 - RNA, 19 nt, Homo sapiens
  misc_RNA (1)...(19): siRNA sense strand
gaucaugauggccuucuac

SEQ ID NO: 1183555 - RNA, 19 nt, Homo sapiens
  misc_RNA (1)...(19): siRNA sense strand
ccuuucaccuguggacauu

SEQ ID NO: 1183556 - RNA, 19 nt, Homo sapiens
  misc_RNA (1)...(19): siRNA sense strand
ccugcguccucacuucuug

SEQ ID NO: 1183557 - RNA, 19 nt, Homo sapiens
  misc_RNA (1)...(19): siRNA sense strand
ccugcuauccggaaggaaa

SEQ ID NO: 1183558 - RNA, 19 nt, Homo sapiens
  misc_RNA (1)...(19): siRNA sense strand
ugcuguauuuggugcuaua

SEQ ID NO: 1183559 - RNA, 19 nt, Homo sapiens
  misc_RNA (1)...(19): siRNA sense strand
gaaagaugcugccuugugu

SEQ ID NO: 1183560 - RNA, 19 nt, Homo sapiens
  misc_RNA (1)...(19): siRNA sense strand
gcaaucaguuccaauguga

SEQ ID NO: 1183561 - RNA, 19 nt, Homo sapiens
  misc_RNA (1)...(19): siRNA sense strand
ugaaacagcugagagauuu

SEQ ID NO: 1183562 - RNA, 19 nt, Homo sapiens
  misc_RNA (1)...(19): siRNA sense strand
gaaugaacaucaaagagaa

SEQ ID NO: 1183563 - RNA, 19 nt, Homo sapiens
  misc_RNA (1)...(19): siRNA sense strand
gagaucagauuauagagaa

SEQ ID NO: 1183564 - RNA, 19 nt, Homo sapiens
  misc_RNA (1)...(19): siRNA sense strand
gcaguuugaucacaagaaa

SEQ ID NO: 1183565 - RNA, 19 nt, Homo sapiens
  misc_RNA (1)...(19): siRNA sense strand
gaugauagcaacaauugua

SEQ ID NO: 1183566 - RNA, 19 nt, Homo sapiens
  misc_RNA (1)...(19): siRNA sense strand
ggagagaucagauuauaga

SEQ ID NO: 1183567 - RNA, 19 nt, Homo sapiens
  misc_RNA (1)...(19): siRNA sense strand
uaggagagaucagauuaua

SEQ ID NO: 1183568 - RNA, 19 nt, Homo sapiens
  misc_RNA (1)...(19): siRNA sense strand
acacgugcaucaucuuaua

SEQ ID NO: 1183569 - RNA, 19 nt, Homo sapiens
  misc_RNA (1)...(19): siRNA sense strand
agagagaccuugagaguca

SEQ ID NO: 1183570 - RNA, 19 nt, Homo sapiens
  misc_RNA (1)...(19): siRNA sense strand
gaacgaguaauugaaauga

SEQ ID NO: 1183571 - RNA, 19 nt, Homo sapiens
  misc_RNA (1)...(19): siRNA sense strand
gaagcaggaaugagaguaa

SEQ ID NO: 1183572 - RNA, 19 nt, Homo sapiens
  misc_RNA (1)...(19): siRNA sense strand
gaaacuagaagaucuuaag

SEQ ID NO: 1183573 - RNA, 19 nt, Homo sapiens
  misc_RNA (1)...(19): siRNA sense strand
cauaggagagaucagauua

SEQ ID NO: 1183574 - RNA, 19 nt, Homo sapiens
  misc_RNA (1)...(19): siRNA sense strand
gagaagagaaacuagaaga

SEQ ID NO: 1183575 - RNA, 19 nt, Homo sapiens
  misc_RNA (1)...(19): siRNA sense strand
guacacgugcaucaucuua

SEQ ID NO: 1183576 - RNA, 19 nt, Homo sapiens
  misc_RNA (1)...(19): siRNA sense strand
ggacagaaugaacaucaaa

SEQ ID NO: 1183577 - RNA, 19 nt, Homo sapiens
  misc_RNA (1)...(19): siRNA sense strand
gaagagaaacuagaagauc

SEQ ID NO: 1183578 - RNA, 19 nt, Homo sapiens
  misc_RNA (1)...(19): siRNA sense strand
gcaccuggaacgaguaauu

SEQ ID NO: 1183579 - RNA, 19 nt, Homo sapiens
  misc_RNA (1)...(19): siRNA sense strand
ccaaugugaugaucuuauc

SEQ ID NO: 1183580 - RNA, 19 nt, Homo sapiens
  misc_RNA (1)...(19): siRNA sense strand
gagaaacuagaagaucuua

SEQ ID NO: 1183581 - RNA, 19 nt, Homo sapiens
  misc_RNA (1)...(19): siRNA sense strand
ugauuugccucauucagaa

SEQ ID NO: 1183582 - RNA, 19 nt, Homo sapiens
  misc_RNA (1)...(19): siRNA sense strand
caaggaauauacggaugaa

SEQ ID NO: 1183583 - RNA, 19 nt, Homo sapiens
  misc_RNA (1)...(19): siRNA sense strand
caauuguacuggacagaau

SEQ ID NO: 1183584 - RNA, 19 nt, Homo sapiens
  misc_RNA (1)...(19): siRNA sense strand
ucgaacggcuucauccuau

SEQ ID NO: 1183585 - RNA, 19 nt, Homo sapiens
  misc_RNA (1)...(19): siRNA sense strand
agaaugaacaucaaagaga

SEQ ID NO: 1183586 - RNA, 19 nt, Homo sapiens
  misc_RNA (1)...(19): siRNA sense strand
ggaacgaguaauugaaaug

SEQ ID NO: 1183587 - RNA, 19 nt, Homo sapiens
  misc_RNA (1)...(19): siRNA sense strand
ggcaaucaguuccaaugug

SEQ ID NO: 1183588 - RNA, 19 nt, Homo sapiens
  misc_RNA (1)...(19): siRNA sense strand
aagagaaacuagaagaucu

SEQ ID NO: 1183589 - RNA, 19 nt, Homo sapiens
  misc_RNA (1)...(19): siRNA sense strand
caccuccaaugcaauauau

SEQ ID NO: 1183590 - RNA, 19 nt, Homo sapiens
  misc_RNA (1)...(19): siRNA sense strand
guuccaaugugaugaucuu

SEQ ID NO: 1183591 - RNA, 19 nt, Homo sapiens
  misc_RNA (1)...(19): siRNA sense strand
gcacuuccaccaccuccaa

SEQ ID NO: 1183592 - RNA, 19 nt, Homo sapiens
  misc_RNA (1)...(19): siRNA sense strand
ggucauaggagagaucaga

SEQ ID NO: 1183593 - RNA, 19 nt, Homo sapiens
  misc_RNA (1)...(19): siRNA sense strand
ggaaagucagggcaucgaa

SEQ ID NO: 1183594 - RNA, 19 nt, Homo sapiens
  misc_RNA (1)...(19): siRNA sense strand
uugaugagaugaaugaaag

SEQ ID NO: 1183595 - RNA, 19 nt, Homo sapiens
  misc_RNA (1)...(19): siRNA sense strand
guacuggacagaaugaaca

SEQ ID NO: 1183596 - RNA, 19 nt, Homo sapiens
  misc_RNA (1)...(19): siRNA sense strand
auaaggagcccugggagua

SEQ ID NO: 1183597 - RNA, 19 nt, Homo sapiens
  misc_RNA (1)...(19): siRNA sense strand
caauggaugcugaugauag

SEQ ID NO: 1183598 - RNA, 19 nt, Homo sapiens
  misc_RNA (1)...(19): siRNA sense strand
ccaccuccaaugcaauaua

SEQ ID NO: 1183599 - RNA, 19 nt, Homo sapiens
  misc_RNA (1)...(19): siRNA sense strand
gugcaucaucuuauaaaug

SEQ ID NO: 1183600 - RNA, 19 nt, Homo sapiens
  misc_RNA (1)...(19): siRNA sense strand
aaggagcccugggaguaua

SEQ ID NO: 1183601 - RNA, 19 nt, Homo sapiens
  misc_RNA (1)...(19): siRNA sense strand
ucacaagaaagaacugaga

SEQ ID NO: 1183602 - RNA, 19 nt, Homo sapiens
  misc_RNA (1)...(19): siRNA sense strand
ugccuuguguguccuaauu

SEQ ID NO: 1183603 - RNA, 19 nt, Homo sapiens
  misc_RNA (1)...(19): siRNA sense strand
ucaaggaauauacggauga

SEQ ID NO: 1183604 - RNA, 19 nt, Homo sapiens
  misc_RNA (1)...(19): siRNA sense strand
cuucuuugccugaugauuu

SEQ ID NO: 1183605 - RNA, 19 nt, Homo sapiens
  misc_RNA (1)...(19): siRNA sense strand
agaaagaugcugccuugug

SEQ ID NO: 1183606 - RNA, 19 nt, Homo sapiens
  misc_RNA (1)...(19): siRNA sense strand
ccuaauugaugagaugaau

SEQ ID NO: 1183607 - RNA, 19 nt, Homo sapiens
  misc_RNA (1)...(19): siRNA sense strand
gaugaaugaaagaccauga

SEQ ID NO: 1183608 - RNA, 19 nt, Homo sapiens
  misc_RNA (1)...(19): siRNA sense strand
caccaccuccaaugcaaua

SEQ ID NO: 1183609 - RNA, 19 nt, Homo sapiens
  misc_RNA (1)...(19): siRNA sense strand
gauagcaacaauuguacug

SEQ ID NO: 1183610 - RNA, 19 nt, Homo sapiens
  misc_RNA (1)...(19): siRNA sense strand
aagcaggaaugagaguaaa

SEQ ID NO: 1183611 - RNA, 19 nt, Homo sapiens
  misc_RNA (1)...(19): siRNA sense strand
gaucacaagaaagaacuga

SEQ ID NO: 1183612 - RNA, 19 nt, Homo sapiens
  misc_RNA (1)...(19): siRNA sense strand
acaagaaagaacugagaaa

SEQ ID NO: 1183613 - RNA, 19 nt, Homo sapiens
  misc_RNA (1)...(19): siRNA sense strand
aaaagacaguuacaugaug

SEQ ID NO: 1183614 - RNA, 19 nt, Homo sapiens
  misc_RNA (1)...(19): siRNA sense strand
ccuuguguguccuaauuga

SEQ ID NO: 1183615 - RNA, 19 nt, Homo sapiens
  misc_RNA (1)...(19): siRNA sense strand
uggcuucuuugccugauga

SEQ ID NO: 1183616 - RNA, 19 nt, Homo sapiens
  misc_RNA (1)...(19): siRNA sense strand
gcuugaaacagcugagaga

SEQ ID NO: 1183617 - RNA, 19 nt, Homo sapiens
  misc_RNA (1)...(19): siRNA sense strand
uaucauccgcccuuuggaa

SEQ ID NO: 1183618 - RNA, 19 nt, Homo sapiens
  misc_RNA (1)...(19): siRNA sense strand
cugaugauagcaacaauug

SEQ ID NO: 1183619 - RNA, 19 nt, Homo sapiens
  misc_RNA (1)...(19): siRNA sense strand
ggugaaccacagcaaguga

SEQ ID NO: 1183620 - RNA, 19 nt, Homo sapiens
  misc_RNA (1)...(19): siRNA sense strand
gaacggcuucauccuaugc

SEQ ID NO: 1183621 - RNA, 19 nt, Homo sapiens
  misc_RNA (1)...(19): siRNA sense strand
uguccuaauugaugagaug

SEQ ID NO: 1183622 - RNA, 19 nt, Homo sapiens
  misc_RNA (1)...(19): siRNA sense strand
cagauuauagagaaagaug

SEQ ID NO: 1183623 - RNA, 19 nt, Homo sapiens
  misc_RNA (1)...(19): siRNA sense strand
acagaaugaacaucaaaga

SEQ ID NO: 1183624 - RNA, 19 nt, Homo sapiens
  misc_RNA (1)...(19): siRNA sense strand
gcugaugauagcaacaauu

SEQ ID NO: 1183625 - RNA, 19 nt, Homo sapiens
  misc_RNA (1)...(19): siRNA sense strand
gaaccaauggaugcugaug

SEQ ID NO: 1183626 - RNA, 19 nt, Homo sapiens
  misc_RNA (1)...(19): siRNA sense strand
gaauugcuuggcuucuuug

SEQ ID NO: 1183627 - RNA, 19 nt, Homo sapiens
  misc_RNA (1)...(19): siRNA sense strand
gcugagagauuucaaaagc

SEQ ID NO: 1183628 - RNA, 19 nt, Homo sapiens
  misc_RNA (1)...(19): siRNA sense strand
caagaaagaacugagaaaa

SEQ ID NO: 1183629 - RNA, 19 nt, Homo sapiens
  misc_RNA (1)...(19): siRNA sense strand
gaucagauuauagagaaag

SEQ ID NO: 1183630 - RNA, 19 nt, Homo sapiens
  misc_RNA (1)...(19): siRNA sense strand
cgaacggcuucauccuaug

SEQ ID NO: 1183631 - RNA, 19 nt, Homo sapiens
  misc_RNA (1)...(19): siRNA sense strand
uaaggagcccugggaguau

SEQ ID NO: 1183632 - RNA, 19 nt, Homo sapiens
  misc_RNA (1)...(19): siRNA sense strand
cuaugcaguuugaucacaa

SEQ ID NO: 1183633 - RNA, 19 nt, Homo sapiens
  misc_RNA (1)...(19): siRNA sense strand
ccaauggaugcugaugaua

SEQ ID NO: 1183634 - RNA, 19 nt, Homo sapiens
  misc_RNA (1)...(19): siRNA sense strand
uguguguccuaauugauga

SEQ ID NO: 1183635 - RNA, 19 nt, Homo sapiens
  misc_RNA (1)...(19): siRNA sense strand
agagaaaauucaggucaua

SEQ ID NO: 1183636 - RNA, 19 nt, Homo sapiens
  misc_RNA (1)...(19): siRNA sense strand
gaaaauucaggucauagga

SEQ ID NO: 1183637 - RNA, 19 nt, Homo sapiens
  misc_RNA (1)...(19): siRNA sense strand
agagaucagauuauagaga

SEQ ID NO: 1183638 - RNA, 19 nt, Homo sapiens
  misc_RNA (1)...(19): siRNA sense strand
cacaagaaagaacugagaa

SEQ ID NO: 1183639 - RNA, 19 nt, Homo sapiens
  misc_RNA (1)...(19): siRNA sense strand
gauguuuggcaaucaguuc

SEQ ID NO: 1183640 - RNA, 19 nt, Homo sapiens
  misc_RNA (1)...(19): siRNA sense strand
accaauggaugcugaugau

SEQ ID NO: 1183641 - RNA, 19 nt, Homo sapiens
  misc_RNA (1)...(19): siRNA sense strand
uggaacgaguaauugaaau

SEQ ID NO: 1183642 - RNA, 19 nt, Homo sapiens
  misc_RNA (1)...(19): siRNA sense strand
ggaauauacggaugaaaau

SEQ ID NO: 1183643 - RNA, 19 nt, Homo sapiens
  misc_RNA (1)...(19): siRNA sense strand
agaaagaacugagaaaacu

SEQ ID NO: 1183644 - RNA, 19 nt, Homo sapiens
  misc_RNA (1)...(19): siRNA sense strand
gaccuugagagucaugaug

SEQ ID NO: 1183645 - RNA, 19 nt, Homo sapiens
  misc_RNA (1)...(19): siRNA sense strand
ucauaggagagaucagauu

SEQ ID NO: 1183646 - RNA, 19 nt, Homo sapiens
  misc_RNA (1)...(19): siRNA sense strand
cuggaacgaguaauugaaa

SEQ ID NO: 1183647 - RNA, 19 nt, Homo sapiens
  misc_RNA (1)...(19): siRNA sense strand
uugaaacagcugagagauu

SEQ ID NO: 1183648 - RNA, 19 nt, Homo sapiens
  misc_RNA (1)...(19): siRNA sense strand
cagaaugaacaucaaagag

SEQ ID NO: 1183649 - RNA, 19 nt, Homo sapiens
  misc_RNA (1)...(19): siRNA sense strand
cgaguaauugaaaugauuc

SEQ ID NO: 1183650 - RNA, 19 nt, Homo sapiens
  misc_RNA (1)...(19): siRNA sense strand
gaaagaacugagaaaacuu

SEQ ID NO: 1183651 - RNA, 19 nt, Homo sapiens
  misc_RNA (1)...(19): siRNA sense strand
aaacagcugagagauuuca

SEQ ID NO: 1183652 - RNA, 19 nt, Homo sapiens
  misc_RNA (1)...(19): siRNA sense strand
acgagaagagaaacuagaa

SEQ ID NO: 1183653 - RNA, 19 nt, Homo sapiens
  misc_RNA (1)...(19): siRNA sense strand
uggacagaaugaacaucaa

SEQ ID NO: 1183654 - RNA, 19 nt, Homo sapiens
  misc_RNA (1)...(19): siRNA sense strand
agaagagaaacuagaagau

SEQ ID NO: 1183655 - RNA, 19 nt, Homo sapiens
  misc_RNA (1)...(19): siRNA sense strand
ccuccaaugcaauauauca

SEQ ID NO: 1183656 - RNA, 19 nt, Homo sapiens
  misc_RNA (1)...(19): siRNA sense strand
gaagguggcugauuugguu

SEQ ID NO: 1183657 - RNA, 19 nt, Homo sapiens
  misc_RNA (1)...(19): siRNA sense strand
cuaagaagguggcugauuu

SEQ ID NO: 1183658 - RNA, 19 nt, Homo sapiens
  misc_RNA (1)...(19): siRNA sense strand
gagcaguaaucacuaagaa

SEQ ID NO: 1183659 - RNA, 19 nt, Homo sapiens
  misc_RNA (1)...(19): siRNA sense strand
ugaaaguccuugaguaugu

SEQ ID NO: 1183660 - RNA, 19 nt, Homo sapiens
  misc_RNA (1)...(19): siRNA sense strand
ggaagcugcucacccaaga

SEQ ID NO: 1183661 - RNA, 19 nt, Homo sapiens
  misc_RNA (1)...(19): siRNA sense strand
cagaaaugcuggagagugu

SEQ ID NO: 1183662 - RNA, 19 nt, Homo sapiens
  misc_RNA (1)...(19): siRNA sense strand
gaaaccagcuaugugaaag

SEQ ID NO: 1183663 - RNA, 19 nt, Homo sapiens
  misc_RNA (1)...(19): siRNA sense strand
ggaggaagagggagucuga

SEQ ID NO: 1183664 - RNA, 19 nt, Homo sapiens
  misc_RNA (1)...(19): siRNA sense strand
caaggucagugcaagaguu

SEQ ID NO: 1183665 - RNA, 19 nt, Homo sapiens
  misc_RNA (1)...(19): siRNA sense strand
gcuggagagugucaucaaa

SEQ ID NO: 1183666 - RNA, 19 nt, Homo sapiens
  misc_RNA (1)...(19): siRNA sense strand
gaaaguccuugaguaugug

SEQ ID NO: 1183667 - RNA, 19 nt, Homo sapiens
  misc_RNA (1)...(19): siRNA sense strand
ccagggagccagucacaaa

SEQ ID NO: 1183668 - RNA, 19 nt, Homo sapiens
  misc_RNA (1)...(19): siRNA sense strand
cagcuggucuuuggcauug

SEQ ID NO: 1183669 - RNA, 19 nt, Homo sapiens
  misc_RNA (1)...(19): siRNA sense strand
gggaggagcugagugugau

SEQ ID NO: 1183670 - RNA, 19 nt, Homo sapiens
  misc_RNA (1)...(19): siRNA sense strand
uggcugauuugguugguuu

SEQ ID NO: 1183671 - RNA, 19 nt, Homo sapiens
  misc_RNA (1)...(19): siRNA sense strand
ugagugugauggaggugua

SEQ ID NO: 1183672 - RNA, 19 nt, Homo sapiens
  misc_RNA (1)...(19): siRNA sense strand
gaaaugcuggagaguguca

SEQ ID NO: 1183673 - RNA, 19 nt, Homo sapiens
  misc_RNA (1)...(19): siRNA sense strand
gaucaaggucagugcaaga

SEQ ID NO: 1183674 - RNA, 19 nt, Homo sapiens
  misc_RNA (1)...(19): siRNA sense strand
ugaaaccagcuaugugaaa

SEQ ID NO: 1183675 - RNA, 19 nt, Homo sapiens
  misc_RNA (1)...(19): siRNA sense strand
gcaaagccucugaguccuu

SEQ ID NO: 1183676 - RNA, 19 nt, Homo sapiens
  misc_RNA (1)...(19): siRNA sense strand
uaagaagguggcugauuug

SEQ ID NO: 1183677 - RNA, 19 nt, Homo sapiens
  misc_RNA (1)...(19): siRNA sense strand
gcacugcaagccugaggaa

SEQ ID NO: 1183678 - RNA, 19 nt, Homo sapiens
  misc_RNA (1)...(19): siRNA sense strand
aaucagaucaugcccaaga

SEQ ID NO: 1183679 - RNA, 19 nt, Homo sapiens
  misc_RNA (1)...(19): siRNA sense strand
uaauuguccuggucaugau

SEQ ID NO: 1183680 - RNA, 19 nt, Homo sapiens
  misc_RNA (1)...(19): siRNA sense strand
ccugagaucuucggcaaag

SEQ ID NO: 1183681 - RNA, 19 nt, Homo sapiens
  misc_RNA (1)...(19): siRNA sense strand
gcagcuggucuuuggcauu

SEQ ID NO: 1183682 - RNA, 19 nt, Homo sapiens
  misc_RNA (1)...(19): siRNA sense strand
ugugaaaguccuugaguau

SEQ ID NO: 1183683 - RNA, 19 nt, Homo sapiens
  misc_RNA (1)...(19): siRNA sense strand
gcugcucacccaagauuug

SEQ ID NO: 1183684 - RNA, 19 nt, Homo sapiens
  misc_RNA (1)...(19): siRNA sense strand
ccacuccuauguccuuguc

SEQ ID NO: 1183685 - RNA, 19 nt, Homo sapiens
  misc_RNA (1)...(19): siRNA sense strand
caagauuuggugcaggaaa

SEQ ID NO: 1183686 - RNA, 19 nt, Homo sapiens
  misc_RNA (1)...(19): siRNA sense strand
uccgagcaguaaucacuaa

SEQ ID NO: 1183687 - RNA, 19 nt, Homo sapiens
  misc_RNA (1)...(19): siRNA sense strand
gauaauuguccuggucaug

SEQ ID NO: 1183688 - RNA, 19 nt, Homo sapiens
  misc_RNA (1)...(19): siRNA sense strand
ccacuaccaucaacuucac

SEQ ID NO: 1183689 - RNA, 19 nt, Homo sapiens
  misc_RNA (1)...(19): siRNA sense strand
ucacaaaggcagaaaugcu

SEQ ID NO: 1183690 - RNA, 19 nt, Homo sapiens
  misc_RNA (1)...(19): siRNA sense strand
gugaaaguccuugaguaug

SEQ ID NO: 1183691 - RNA, 19 nt, Homo sapiens
  misc_RNA (1)...(19): siRNA sense strand
auaauuguccuggucauga

SEQ ID NO: 1183692 - RNA, 19 nt, Homo sapiens
  misc_RNA (1)...(19): siRNA sense strand
ccuugcagcuggucuuugg

SEQ ID NO: 1183693 - RNA, 19 nt, Homo sapiens
  misc_RNA (1)...(19): siRNA sense strand
ccacugcugggucaacaga

SEQ ID NO: 1183694 - RNA, 19 nt, Homo sapiens
  misc_RNA (1)...(19): siRNA sense strand
ccaccggccacuccuaugu

SEQ ID NO: 1183695 - RNA, 19 nt, Homo sapiens
  misc_RNA (1)...(19): siRNA sense strand
augugaaaguccuugagua

SEQ ID NO: 1183696 - RNA, 19 nt, Homo sapiens
  misc_RNA (1)...(19): siRNA sense strand
aagcugcucacccaagauu

SEQ ID NO: 1183697 - RNA, 19 nt, Homo sapiens
  misc_RNA (1)...(19): siRNA sense strand
guuuucugcuccucaaaua

SEQ ID NO: 1183698 - RNA, 19 nt, Homo sapiens
  misc_RNA (1)...(19): siRNA sense strand
gcaggugccggacagugau

SEQ ID NO: 1183699 - RNA, 19 nt, Homo sapiens
  misc_RNA (1)...(19): siRNA sense strand
gauggccugcugggugaua

SEQ ID NO: 1183700 - RNA, 19 nt, Homo sapiens
  misc_RNA (1)...(19): siRNA sense strand
cgagcaguaaucacuaaga

SEQ ID NO: 1183701 - RNA, 19 nt, Homo sapiens
  misc_RNA (1)...(19): siRNA sense strand
ggaaauaucccucguagua

SEQ ID NO: 1183702 - RNA, 19 nt, Homo sapiens
  misc_RNA (1)...(19): siRNA sense strand
ggaagaagcaguucaagua

SEQ ID NO: 1183703 - RNA, 19 nt, Homo sapiens
  misc_RNA (1)...(19): siRNA sense strand
gaaagaagaugugaaugaa

SEQ ID NO: 1183704 - RNA, 19 nt, Homo sapiens
  misc_RNA (1)...(19): siRNA sense strand
gcacugcucucccgguuug

SEQ ID NO: 1183705 - RNA, 19 nt, Homo sapiens
  misc_RNA (1)...(19): siRNA sense strand
agagggaagugguaaauaa

SEQ ID NO: 1183706 - RNA, 19 nt, Homo sapiens
  misc_RNA (1)...(19): siRNA sense strand
ggagagaacacaaggauug

SEQ ID NO: 1183707 - RNA, 19 nt, Homo sapiens
  misc_RNA (1)...(19): siRNA sense strand
ucaaaggacucucuucuag

SEQ ID NO: 1183708 - RNA, 19 nt, Homo sapiens
  misc_RNA (1)...(19): siRNA sense strand
gaacaagagugaggaugau

SEQ ID NO: 1183709 - RNA, 19 nt, Homo sapiens
  misc_RNA (1)...(19): siRNA sense strand
uaauggagaugucaaagga

SEQ ID NO: 1183710 - RNA, 19 nt, Homo sapiens
  misc_RNA (1)...(19): siRNA sense strand
ggagaaagaagaugugaau

SEQ ID NO: 1183711 - RNA, 19 nt, Homo sapiens
  misc_RNA (1)...(19): siRNA sense strand
guggagaacugaccuuaga

SEQ ID NO: 1183712 - RNA, 19 nt, Homo sapiens
  misc_RNA (1)...(19): siRNA sense strand
agucucagcuccugucaua

SEQ ID NO: 1183713 - RNA, 19 nt, Homo sapiens
  misc_RNA (1)...(19): siRNA sense strand
gaagaagcaguucaaguau

SEQ ID NO: 1183714 - RNA, 19 nt, Homo sapiens
  misc_RNA (1)...(19): siRNA sense strand
gggaagugguaaauaaaga

SEQ ID NO: 1183715 - RNA, 19 nt, Homo sapiens
  misc_RNA (1)...(19): siRNA sense strand
gggaggagcugaggcaaau

SEQ ID NO: 1183716 - RNA, 19 nt, Homo sapiens
  misc_RNA (1)...(19): siRNA sense strand
aaaggacucucuucuagga

SEQ ID NO: 1183717 - RNA, 19 nt, Homo sapiens
  misc_RNA (1)...(19): siRNA sense strand
agaaagaagaugugaauga

SEQ ID NO: 1183718 - RNA, 19 nt, Homo sapiens
  misc_RNA (1)...(19): siRNA sense strand
gcgaagcucuuugcugaug

SEQ ID NO: 1183719 - RNA, 19 nt, Homo sapiens
  misc_RNA (1)...(19): siRNA sense strand
gaaauaucccucguaguau

SEQ ID NO: 1183720 - RNA, 19 nt, Homo sapiens
  misc_RNA (1)...(19): siRNA sense strand
gauccagucucccacuuuc

SEQ ID NO: 1183721 - RNA, 19 nt, Homo sapiens
  misc_RNA (1)...(19): siRNA sense strand
gcuccagauucaucaaauu

SEQ ID NO: 1183722 - RNA, 19 nt, Homo sapiens
  misc_RNA (1)...(19): siRNA sense strand
gguacaggguuuacucuca

SEQ ID NO: 1183723 - RNA, 19 nt, Homo sapiens
  misc_RNA (1)...(19): siRNA sense strand
gcucaugaggcguuacaua

SEQ ID NO: 1183724 - RNA, 19 nt, Homo sapiens
  misc_RNA (1)...(19): siRNA sense strand
cagcagaccaucuccauug

SEQ ID NO: 1183725 - RNA, 19 nt, Homo sapiens
  misc_RNA (1)...(19): siRNA sense strand
gcaugaagaugugaagaag

SEQ ID NO: 1183726 - RNA, 19 nt, Homo sapiens
  misc_RNA (1)...(19): siRNA sense strand
gcaagaacauagugaucag

SEQ ID NO: 1183727 - RNA, 19 nt, Homo sapiens
  misc_RNA (1)...(19): siRNA sense strand
ggugugugcugcauugaug

SEQ ID NO: 1183728 - RNA, 19 nt, Homo sapiens
  misc_RNA (1)...(19): siRNA sense strand
gcagagcagcgcuguguau

SEQ ID NO: 1183729 - RNA, 19 nt, Homo sapiens
  misc_RNA (1)...(19): siRNA sense strand
gagggaagugguaaauaaa

SEQ ID NO: 1183730 - RNA, 19 nt, Homo sapiens
  misc_RNA (1)...(19): siRNA sense strand
gagcagcgcuguguaucuc

SEQ ID NO: 1183731 - RNA, 19 nt, Homo sapiens
  misc_RNA (1)...(19): siRNA sense strand
agaggaggauuucuacgaa

SEQ ID NO: 1183732 - RNA, 19 nt, Homo sapiens
  misc_RNA (1)...(19): siRNA sense strand
guaaggaugccaccuauac

SEQ ID NO: 1183733 - RNA, 19 nt, Homo sapiens
  misc_RNA (1)...(19): siRNA sense strand
gagagggaagugguaaaua

SEQ ID NO: 1183734 - RNA, 19 nt, Homo sapiens
  misc_RNA (1)...(19): siRNA sense strand
gaccuccucuggcugauuc

SEQ ID NO: 1183735 - RNA, 19 nt, Homo sapiens
  misc_RNA (1)...(19): siRNA sense strand
gaagaugcaagaacauagu

SEQ ID NO: 1183736 - RNA, 19 nt, Homo sapiens
  misc_RNA (1)...(19): siRNA sense strand
guacccugcugaacucaug

SEQ ID NO: 1183737 - RNA, 19 nt, Homo sapiens
  misc_RNA (1)...(19): siRNA sense strand
aaauaucccucguaguauc

SEQ ID NO: 1183738 - RNA, 19 nt, Homo sapiens
  misc_RNA (1)...(19): siRNA sense strand
ggacacggaucacuuuugu

SEQ ID NO: 1183739 - RNA, 19 nt, Homo sapiens
  misc_RNA (1)...(19): siRNA sense strand
cgagaggcuugggcuagua

SEQ ID NO: 1183740 - RNA, 19 nt, Homo sapiens
  misc_RNA (1)...(19): siRNA sense strand
cagcauacguggagaugag

SEQ ID NO: 1183741 - RNA, 19 nt, Homo sapiens
  misc_RNA (1)...(19): siRNA sense strand
gaaauauacgggcaugaag

SEQ ID NO: 1183742 - RNA, 19 nt, Homo sapiens
  misc_RNA (1)...(19): siRNA sense strand
gaggagcugaggcaaauug

SEQ ID NO: 1183743 - RNA, 19 nt, Homo sapiens
  misc_RNA (1)...(19): siRNA sense strand
agaagcaguucaaguaugg

SEQ ID NO: 1183744 - RNA, 19 nt, Homo sapiens
  misc_RNA (1)...(19): siRNA sense strand
cagcuccugucauacauug

SEQ ID NO: 1183745 - RNA, 19 nt, Homo sapiens
  misc_RNA (1)...(19): siRNA sense strand
gaagugguaaauaaagaug

SEQ ID NO: 1183746 - RNA, 19 nt, Homo sapiens
  misc_RNA (1)...(19): siRNA sense strand
ugaacaagagugaggauga

SEQ ID NO: 1183747 - RNA, 19 nt, Homo sapiens
  misc_RNA (1)...(19): siRNA sense strand
gacaggugguacaggguuu

SEQ ID NO: 1183748 - RNA, 19 nt, Homo sapiens
  misc_RNA (1)...(19): siRNA sense strand
agaugaagaugcaagaaca

SEQ ID NO: 1183749 - RNA, 19 nt, Homo sapiens
  misc_RNA (1)...(19): siRNA sense strand
gaaccaguacccugcugaa

SEQ ID NO: 1183750 - RNA, 19 nt, Homo sapiens
  misc_RNA (1)...(19): siRNA sense strand
ggagagggaagugguaaau

SEQ ID NO: 1183751 - RNA, 19 nt, Homo sapiens
  misc_RNA (1)...(19): siRNA sense strand
gagugaggaugaugagucu

SEQ ID NO: 1183752 - RNA, 19 nt, Homo sapiens
  misc_RNA (1)...(19): siRNA sense strand
aagaagcaguucaaguaug

SEQ ID NO: 1183753 - RNA, 19 nt, Homo sapiens
  misc_RNA (1)...(19): siRNA sense strand
ccaguacccugcugaacuc

SEQ ID NO: 1183754 - RNA, 19 nt, Homo sapiens
  misc_RNA (1)...(19): siRNA sense strand
cagggugugugcugcauug

SEQ ID NO: 1183755 - RNA, 19 nt, Homo sapiens
  misc_RNA (1)...(19): siRNA sense strand
aagagcugcugccucagua

SEQ ID NO: 1183756 - RNA, 19 nt, Homo sapiens
  misc_RNA (1)...(19): siRNA sense strand
ggaagugguaaauaaagau

SEQ ID NO: 1183757 - RNA, 19 nt, Homo sapiens
  misc_RNA (1)...(19): siRNA sense strand
uaguaaggaugccaccuau

SEQ ID NO: 1183758 - RNA, 19 nt, Homo sapiens
  misc_RNA (1)...(19): siRNA sense strand
gaguggagaacugaccuua

SEQ ID NO: 1183759 - RNA, 19 nt, Homo sapiens
  misc_RNA (1)...(19): siRNA sense strand
caaggagagggaaguggua

SEQ ID NO: 1183760 - RNA, 19 nt, Homo sapiens
  misc_RNA (1)...(19): siRNA sense strand
cgaccgagacaaugaccua

SEQ ID NO: 1183761 - RNA, 19 nt, Homo sapiens
  misc_RNA (1)...(19): siRNA sense strand
gagaggcuugggcuaguaa

SEQ ID NO: 1183762 - RNA, 19 nt, Homo sapiens
  misc_RNA (1)...(19): siRNA sense strand
gucaaaggacucucuucua

SEQ ID NO: 1183763 - RNA, 19 nt, Homo sapiens
  misc_RNA (1)...(19): siRNA sense strand
ccuggaagcccaucggauu

SEQ ID NO: 1183764 - RNA, 19 nt, Homo sapiens
  misc_RNA (1)...(19): siRNA sense strand
uggaugugguggagaaaga

SEQ ID NO: 1183765 - RNA, 19 nt, Homo sapiens
  misc_RNA (1)...(19): siRNA sense strand
ucaaguaugggaaccaguu

SEQ ID NO: 1183766 - RNA, 19 nt, Homo sapiens
  misc_RNA (1)...(19): siRNA sense strand
ggcaugaagaugugaagaa

SEQ ID NO: 1183767 - RNA, 19 nt, Homo sapiens
  misc_RNA (1)...(19): siRNA sense strand
ucgugucucugaagucaaa

SEQ ID NO: 1183768 - RNA, 19 nt, Homo sapiens
  misc_RNA (1)...(19): siRNA sense strand
agaaauauacgggcaugaa

SEQ ID NO: 1183769 - RNA, 19 nt, Homo sapiens
  misc_RNA (1)...(19): siRNA sense strand
ggaagcccaucggauugug

SEQ ID NO: 1183770 - RNA, 19 nt, Homo sapiens
  misc_RNA (1)...(19): siRNA sense strand
gaaggagagaacacaagga

SEQ ID NO: 1183771 - RNA, 19 nt, Homo sapiens
  misc_RNA (1)...(19): siRNA sense strand
ucaaauuccaggagaugaa

SEQ ID NO: 1183772 - RNA, 19 nt, Homo sapiens
  misc_RNA (1)...(19): siRNA sense strand
gguggccacuuacacuugu

SEQ ID NO: 1183773 - RNA, 19 nt, Homo sapiens
  misc_RNA (1)...(19): siRNA sense strand
gcgagaggcuugggcuagu

SEQ ID NO: 1183774 - RNA, 19 nt, Homo sapiens
  misc_RNA (1)...(19): siRNA sense strand
gugcugcauugaugaguuc

SEQ ID NO: 1183775 - RNA, 19 nt, Homo sapiens
  misc_RNA (1)...(19): siRNA sense strand
aaucgucacucgugucucu

SEQ ID NO: 1183776 - RNA, 19 nt, Homo sapiens
  misc_RNA (1)...(19): siRNA sense strand
cuaguaaggaugccaccua

SEQ ID NO: 1183777 - RNA, 19 nt, Homo sapiens
  misc_RNA (1)...(19): siRNA sense strand
uugaaccucuggacaugaa

SEQ ID NO: 1183778 - RNA, 19 nt, Homo sapiens
  misc_RNA (1)...(19): siRNA sense strand
gcagcagaccaucuccauu

SEQ ID NO: 1183779 - RNA, 19 nt, Homo sapiens
  misc_RNA (1)...(19): siRNA sense strand
uugaugaguucgacaagau

SEQ ID NO: 1183780 - RNA, 19 nt, Homo sapiens
  misc_RNA (1)...(19): siRNA sense strand
gcauugaugaguucgacaa

SEQ ID NO: 1183781 - RNA, 19 nt, Homo sapiens
  misc_RNA (1)...(19): siRNA sense strand
ugaagaugaacaagaguga

SEQ ID NO: 1183782 - RNA, 19 nt, Homo sapiens
  misc_RNA (1)...(19): siRNA sense strand
gggaagaagcaguucaagu

SEQ ID NO: 1183783 - RNA, 19 nt, Homo sapiens
  misc_RNA (1)...(19): siRNA sense strand
guaucacggugcugguaga

SEQ ID NO: 1183784 - RNA, 19 nt, Homo sapiens
  misc_RNA (1)...(19): siRNA sense strand
cagaggaggauuucuacga

SEQ ID NO: 1183785 - RNA, 19 nt, Homo sapiens
  misc_RNA (1)...(19): siRNA sense strand
ugaagcucaugaggcguua

SEQ ID NO: 1183786 - RNA, 19 nt, Homo sapiens
  misc_RNA (1)...(19): siRNA sense strand
guuugaaccucuggacaug

SEQ ID NO: 1183787 - RNA, 19 nt, Homo sapiens
  misc_RNA (1)...(19): siRNA sense strand
augaugaacucgggaagaa

SEQ ID NO: 1183788 - RNA, 19 nt, Homo sapiens
  misc_RNA (1)...(19): siRNA sense strand
aaauauacgggcaugaaga

SEQ ID NO: 1183789 - RNA, 19 nt, Homo sapiens
  misc_RNA (1)...(19): siRNA sense strand
ggagaugaagaugcaagaa

SEQ ID NO: 1183790 - RNA, 19 nt, Homo sapiens
  misc_RNA (1)...(19): siRNA sense strand
gaugccaccuauacuucug

SEQ ID NO: 1183791 - RNA, 19 nt, Homo sapiens
  misc_RNA (1)...(19): siRNA sense strand
cuaccaggaugaugaacuc

SEQ ID NO: 1183792 - RNA, 19 nt, Homo sapiens
  misc_RNA (1)...(19): siRNA sense strand
ggaaucgucacucgugucu

SEQ ID NO: 1183793 - RNA, 19 nt, Homo sapiens
  misc_RNA (1)...(19): siRNA sense strand
gaugaugaacucgggaaga

SEQ ID NO: 1183794 - RNA, 19 nt, Homo sapiens
  misc_RNA (1)...(19): siRNA sense strand
gcucuggcacgucugagaa

SEQ ID NO: 1183795 - RNA, 19 nt, Homo sapiens
  misc_RNA (1)...(19): siRNA sense strand
gcgagaagcagcccauggu

SEQ ID NO: 1183796 - RNA, 19 nt, Homo sapiens
  misc_RNA (1)...(19): siRNA sense strand
caagagcugcugccucagu

SEQ ID NO: 1183797 - RNA, 19 nt, Homo sapiens
  misc_RNA (1)...(19): siRNA sense strand
guagaaggagagaacacaa

SEQ ID NO: 1183798 - RNA, 19 nt, Homo sapiens
  misc_RNA (1)...(19): siRNA sense strand
gcgcuacgcgaagcucuuu

SEQ ID NO: 1183799 - RNA, 19 nt, Homo sapiens
  misc_RNA (1)...(19): siRNA sense strand
gagaugaagaugcaagaac

SEQ ID NO: 1183800 - RNA, 19 nt, Homo sapiens
  misc_RNA (1)...(19): siRNA sense strand
ucacucgugucucugaagu

SEQ ID NO: 1183801 - RNA, 19 nt, Homo sapiens
  misc_RNA (1)...(19): siRNA sense strand
ggaaauaucccucguagua

SEQ ID NO: 1183802 - RNA, 19 nt, Homo sapiens
  misc_RNA (1)...(19): siRNA sense strand
gaaagaagaugugaaugaa

SEQ ID NO: 1183803 - RNA, 19 nt, Homo sapiens
  misc_RNA (1)...(19): siRNA sense strand
gcacugcucucccgguuug

SEQ ID NO: 1183804 - RNA, 19 nt, Homo sapiens
  misc_RNA (1)...(19): siRNA sense strand
ggagagaacacaaggauug

SEQ ID NO: 1183805 - RNA, 19 nt, Homo sapiens
  misc_RNA (1)...(19): siRNA sense strand
ucaaaggacucucuucuag

SEQ ID NO: 1183806 - RNA, 19 nt, Homo sapiens
  misc_RNA (1)...(19): siRNA sense strand
gaacaagagugaggaugau

SEQ ID NO: 1183807 - RNA, 19 nt, Homo sapiens
  misc_RNA (1)...(19): siRNA sense strand
uaauggagaugucaaagga

SEQ ID NO: 1183808 - RNA, 19 nt, Homo sapiens
  misc_RNA (1)...(19): siRNA sense strand
ggagaaagaagaugugaau

SEQ ID NO: 1183809 - RNA, 19 nt, Homo sapiens
  misc_RNA (1)...(19): siRNA sense strand
guggagaacugaccuuaga

SEQ ID NO: 1183810 - RNA, 19 nt, Homo sapiens
  misc_RNA (1)...(19): siRNA sense strand
agucucagcuccugucaua

SEQ ID NO: 1183811 - RNA, 19 nt, Homo sapiens
  misc_RNA (1)...(19): siRNA sense strand
gggaggagcugaggcaaau

SEQ ID NO: 1183812 - RNA, 19 nt, Homo sapiens
  misc_RNA (1)...(19): siRNA sense strand
aaaggacucucuucuagga

SEQ ID NO: 1183813 - RNA, 19 nt, Homo sapiens
  misc_RNA (1)...(19): siRNA sense strand
agaaagaagaugugaauga

SEQ ID NO: 1183814 - RNA, 19 nt, Homo sapiens
  misc_RNA (1)...(19): siRNA sense strand
gaaauaucccucguaguau

SEQ ID NO: 1183815 - RNA, 19 nt, Homo sapiens
  misc_RNA (1)...(19): siRNA sense strand
gcuccagauucaucaaauu

SEQ ID NO: 1183816 - RNA, 19 nt, Homo sapiens
  misc_RNA (1)...(19): siRNA sense strand
gauccagucucccacuuuc

SEQ ID NO: 1183817 - RNA, 19 nt, Homo sapiens
  misc_RNA (1)...(19): siRNA sense strand
gguacaggguuuacucuca

SEQ ID NO: 1183818 - RNA, 19 nt, Homo sapiens
  misc_RNA (1)...(19): siRNA sense strand
gcucaugaggcguuacaua

SEQ ID NO: 1183819 - RNA, 19 nt, Homo sapiens
  misc_RNA (1)...(19): siRNA sense strand
cagcagaccaucuccauug

SEQ ID NO: 1183820 - RNA, 19 nt, Homo sapiens
  misc_RNA (1)...(19): siRNA sense strand
gcaugaagaugugaagaag

SEQ ID NO: 1183821 - RNA, 19 nt, Homo sapiens
  misc_RNA (1)...(19): siRNA sense strand
gcaagaacauagugaucag

SEQ ID NO: 1183822 - RNA, 19 nt, Homo sapiens
  misc_RNA (1)...(19): siRNA sense strand
ggugugugcugcauugaug

SEQ ID NO: 1183823 - RNA, 19 nt, Homo sapiens
  misc_RNA (1)...(19): siRNA sense strand
gcagagcagcgcuguguau

SEQ ID NO: 1183824 - RNA, 19 nt, Homo sapiens
  misc_RNA (1)...(19): siRNA sense strand
agaggaggauuucuacgaa

SEQ ID NO: 1183825 - RNA, 19 nt, Homo sapiens
  misc_RNA (1)...(19): siRNA sense strand
gagcagcgcuguguaucuc

SEQ ID NO: 1183826 - RNA, 19 nt, Homo sapiens
  misc_RNA (1)...(19): siRNA sense strand
guaaggaugccaccuauac

SEQ ID NO: 1183827 - RNA, 19 nt, Homo sapiens
  misc_RNA (1)...(19): siRNA sense strand
gaagaugcaagaacauagu

SEQ ID NO: 1183828 - RNA, 19 nt, Homo sapiens
  misc_RNA (1)...(19): siRNA sense strand
gaccuccucuggcugauuc

SEQ ID NO: 1183829 - RNA, 19 nt, Homo sapiens
  misc_RNA (1)...(19): siRNA sense strand
aaauaucccucguaguauc

SEQ ID NO: 1183830 - RNA, 19 nt, Homo sapiens
  misc_RNA (1)...(19): siRNA sense strand
ggacacggaucacuuuugu

SEQ ID NO: 1183831 - RNA, 19 nt, Homo sapiens
  misc_RNA (1)...(19): siRNA sense strand
cgagaggcuugggcuagua

SEQ ID NO: 1183832 - RNA, 19 nt, Homo sapiens
  misc_RNA (1)...(19): siRNA sense strand
cagcauacguggagaugag

SEQ ID NO: 1183833 - RNA, 19 nt, Homo sapiens
  misc_RNA (1)...(19): siRNA sense strand
gaaauauacgggcaugaag

SEQ ID NO: 1183834 - RNA, 19 nt, Homo sapiens
  misc_RNA (1)...(19): siRNA sense strand
gaggagcugaggcaaauug

SEQ ID NO: 1183835 - RNA, 19 nt, Homo sapiens
  misc_RNA (1)...(19): siRNA sense strand
cagcuccugucauacauug

SEQ ID NO: 1183836 - RNA, 19 nt, Homo sapiens
  misc_RNA (1)...(19): siRNA sense strand
agaugaagaugcaagaaca

SEQ ID NO: 1183837 - RNA, 19 nt, Homo sapiens
  misc_RNA (1)...(19): siRNA sense strand
ugaacaagagugaggauga

SEQ ID NO: 1183838 - RNA, 19 nt, Homo sapiens
  misc_RNA (1)...(19): siRNA sense strand
gacaggugguacaggguuu

SEQ ID NO: 1183839 - RNA, 19 nt, Homo sapiens
  misc_RNA (1)...(19): siRNA sense strand
gagugaggaugaugagucu

SEQ ID NO: 1183840 - RNA, 19 nt, Homo sapiens
  misc_RNA (1)...(19): siRNA sense strand
cagggugugugcugcauug

SEQ ID NO: 1183841 - RNA, 19 nt, Homo sapiens
  misc_RNA (1)...(19): siRNA sense strand
gaguggagaacugaccuua

SEQ ID NO: 1183842 - RNA, 19 nt, Homo sapiens
  misc_RNA (1)...(19): siRNA sense strand
uaguaaggaugccaccuau

SEQ ID NO: 1183843 - RNA, 19 nt, Homo sapiens
  misc_RNA (1)...(19): siRNA sense strand
cgaccgagacaaugaccua

SEQ ID NO: 1183844 - RNA, 19 nt, Homo sapiens
  misc_RNA (1)...(19): siRNA sense strand
gagaggcuugggcuaguaa

SEQ ID NO: 1183845 - RNA, 19 nt, Homo sapiens
  misc_RNA (1)...(19): siRNA sense strand
gucaaaggacucucuucua

SEQ ID NO: 1183846 - RNA, 19 nt, Homo sapiens
  misc_RNA (1)...(19): siRNA sense strand
ccuggaagcccaucggauu

SEQ ID NO: 1183847 - RNA, 19 nt, Homo sapiens
  misc_RNA (1)...(19): siRNA sense strand
uggaugugguggagaaaga

SEQ ID NO: 1183848 - RNA, 19 nt, Homo sapiens
  misc_RNA (1)...(19): siRNA sense strand
ggcaugaagaugugaagaa

SEQ ID NO: 1183849 - RNA, 19 nt, Homo sapiens
  misc_RNA (1)...(19): siRNA sense strand
gaaggagagaacacaagga

SEQ ID NO: 1183850 - RNA, 19 nt, Homo sapiens
  misc_RNA (1)...(19): siRNA sense strand
ucaaauuccaggagaugaa

SEQ ID NO: 1183851 - RNA, 19 nt, Homo sapiens
  misc_RNA (1)...(19): siRNA sense strand
agaaauauacgggcaugaa

SEQ ID NO: 1183852 - RNA, 19 nt, Homo sapiens
  misc_RNA (1)...(19): siRNA sense strand
ggaagcccaucggauugug

SEQ ID NO: 1183853 - RNA, 19 nt, Homo sapiens
  misc_RNA (1)...(19): siRNA sense strand
gugcugcauugaugaguuc

SEQ ID NO: 1183854 - RNA, 19 nt, Homo sapiens
  misc_RNA (1)...(19): siRNA sense strand
gguggccacuuacacuugu

SEQ ID NO: 1183855 - RNA, 19 nt, Homo sapiens
  misc_RNA (1)...(19): siRNA sense strand
gcgagaggcuugggcuagu

SEQ ID NO: 1183856 - RNA, 19 nt, Homo sapiens
  misc_RNA (1)...(19): siRNA sense strand
guaucacggugcugguaga

SEQ ID NO: 1183857 - RNA, 19 nt, Homo sapiens
  misc_RNA (1)...(19): siRNA sense strand
cuaguaaggaugccaccua

SEQ ID NO: 1183858 - RNA, 19 nt, Homo sapiens
  misc_RNA (1)...(19): siRNA sense strand
uugaaccucuggacaugaa

SEQ ID NO: 1183859 - RNA, 19 nt, Homo sapiens
  misc_RNA (1)...(19): siRNA sense strand
gcagcagaccaucuccauu

SEQ ID NO: 1183860 - RNA, 19 nt, Homo sapiens
  misc_RNA (1)...(19): siRNA sense strand
uugaugaguucgacaagau

SEQ ID NO: 1183861 - RNA, 19 nt, Homo sapiens
  misc_RNA (1)...(19): siRNA sense strand
gcauugaugaguucgacaa

SEQ ID NO: 1183862 - RNA, 19 nt, Homo sapiens
  misc_RNA (1)...(19): siRNA sense strand
ugaagaugaacaagaguga

SEQ ID NO: 1183863 - RNA, 19 nt, Homo sapiens
  misc_RNA (1)...(19): siRNA sense strand
cagaggaggauuucuacga

SEQ ID NO: 1183864 - RNA, 19 nt, Homo sapiens
  misc_RNA (1)...(19): siRNA sense strand
ugaagcucaugaggcguua

SEQ ID NO: 1183865 - RNA, 19 nt, Homo sapiens
  misc_RNA (1)...(19): siRNA sense strand
guuugaaccucuggacaug

SEQ ID NO: 1183866 - RNA, 19 nt, Homo sapiens
  misc_RNA (1)...(19): siRNA sense strand
aaauauacgggcaugaaga

SEQ ID NO: 1183867 - RNA, 19 nt, Homo sapiens
  misc_RNA (1)...(19): siRNA sense strand
ggagaugaagaugcaagaa

SEQ ID NO: 1183868 - RNA, 19 nt, Homo sapiens
  misc_RNA (1)...(19): siRNA sense strand
gaugccaccuauacuucug

SEQ ID NO: 1183869 - RNA, 19 nt, Homo sapiens
  misc_RNA (1)...(19): siRNA sense strand
guagaaggagagaacacaa

SEQ ID NO: 1183870 - RNA, 19 nt, Homo sapiens
  misc_RNA (1)...(19): siRNA sense strand
gcucuggcacgucugagaa

SEQ ID NO: 1183871 - RNA, 19 nt, Homo sapiens
  misc_RNA (1)...(19): siRNA sense strand
gcgagaagcagcccauggu

SEQ ID NO: 1183872 - RNA, 19 nt, Homo sapiens
  misc_RNA (1)...(19): siRNA sense strand
gagaugaagaugcaagaac

SEQ ID NO: 1183873 - RNA, 19 nt, Homo sapiens
  misc_RNA (1)...(19): siRNA sense strand
gaagcccaucggauuguga

SEQ ID NO: 1183874 - RNA, 19 nt, Homo sapiens
  misc_RNA (1)...(19): siRNA sense strand
ggagcagaacauacagcua

SEQ ID NO: 1183875 - RNA, 19 nt, Homo sapiens
  misc_RNA (1)...(19): siRNA sense strand
ccagauucaucaaauucca

SEQ ID NO: 1183876 - RNA, 19 nt, Homo sapiens
  misc_RNA (1)...(19): siRNA sense strand
ccacuuucaugccucugau

SEQ ID NO: 1183877 - RNA, 19 nt, Homo sapiens
  misc_RNA (1)...(19): siRNA sense strand
cacgucagcgucacuggua

SEQ ID NO: 1183878 - RNA, 19 nt, Homo sapiens
  misc_RNA (1)...(19): siRNA sense strand
cuacaucacagcagcauac

SEQ ID NO: 1183879 - RNA, 19 nt, Homo sapiens
  misc_RNA (1)...(19): siRNA sense strand
acaagagugaggaugauga

SEQ ID NO: 1183880 - RNA, 19 nt, Homo sapiens
  misc_RNA (1)...(19): siRNA sense strand
cagcgucacugguauuuuc

SEQ ID NO: 1183881 - RNA, 19 nt, Homo sapiens
  misc_RNA (1)...(19): siRNA sense strand
uccaggagaugaagaugca

SEQ ID NO: 1183882 - RNA, 19 nt, Homo sapiens
  misc_RNA (1)...(19): siRNA sense strand
acacggggcuccagauuca

SEQ ID NO: 1183883 - RNA, 19 nt, Homo sapiens
  misc_RNA (1)...(19): siRNA sense strand
auacgggcaugaagaugug

SEQ ID NO: 1183884 - RNA, 19 nt, Homo sapiens
  misc_RNA (1)...(19): siRNA sense strand
uugcagaggaggauuucua

SEQ ID NO: 1183885 - RNA, 19 nt, Homo sapiens
  misc_RNA (1)...(19): siRNA sense strand
gagaaagaagaugugaaug

SEQ ID NO: 1183886 - RNA, 19 nt, Homo sapiens
  misc_RNA (1)...(19): siRNA sense strand
cccaucggauugugaagau

SEQ ID NO: 1183887 - RNA, 19 nt, Homo sapiens
  misc_RNA (1)...(19): siRNA sense strand
gaugcaagaacauagugau

SEQ ID NO: 1183888 - RNA, 19 nt, Homo sapiens
  misc_RNA (1)...(19): siRNA sense strand
ggcuccagauucaucaaau

SEQ ID NO: 1183889 - RNA, 19 nt, Homo sapiens
  misc_RNA (1)...(19): siRNA sense strand
gggcuccagauucaucaaa

SEQ ID NO: 1183890 - RNA, 19 nt, Homo sapiens
  misc_RNA (1)...(19): siRNA sense strand
ugaagaugcaagaacauag

SEQ ID NO: 1183891 - RNA, 19 nt, Homo sapiens
  misc_RNA (1)...(19): siRNA sense strand
ggcuugggcuaguaaggau

SEQ ID NO: 1183892 - RNA, 19 nt, Homo sapiens
  misc_RNA (1)...(19): siRNA sense strand
ggcccgaccgagacaauga

SEQ ID NO: 1183893 - RNA, 19 nt, Homo sapiens
  misc_RNA (1)...(19): siRNA sense strand
ucucagcuccugucauaca

SEQ ID NO: 1183894 - RNA, 19 nt, Homo sapiens
  misc_RNA (1)...(19): siRNA sense strand
gguagaaggagagaacaca

SEQ ID NO: 1183895 - RNA, 19 nt, Homo sapiens
  misc_RNA (1)...(19): siRNA sense strand
uauacgggcaugaagaugu

SEQ ID NO: 1183896 - RNA, 19 nt, Homo sapiens
  misc_RNA (1)...(19): siRNA sense strand
ugguggaugugguggagaa

SEQ ID NO: 1183897 - RNA, 19 nt, Homo sapiens
  misc_RNA (1)...(19): siRNA sense strand
cucagaaaccuaccuggaa

SEQ ID NO: 1183898 - RNA, 19 nt, Homo sapiens
  misc_RNA (1)...(19): siRNA sense strand
gaugaagaugcaagaacau

SEQ ID NO: 1183899 - RNA, 19 nt, Homo sapiens
  misc_RNA (1)...(19): siRNA sense strand
aacaucaacaucugucuga

SEQ ID NO: 1183900 - RNA, 19 nt, Homo sapiens
  misc_RNA (1)...(19): siRNA sense strand
gggcaacaucaacaucugu

SEQ ID NO: 1183901 - RNA, 19 nt, Homo sapiens
  misc_RNA (1)...(19): siRNA sense strand
ggaagaaccuaauagauga

SEQ ID NO: 1183902 - RNA, 19 nt, Homo sapiens
  misc_RNA (1)...(19): siRNA sense strand
gcagugacauugcagauaa

SEQ ID NO: 1183903 - RNA, 19 nt, Homo sapiens
  misc_RNA (1)...(19): siRNA sense strand
caacuucuaucaaauguca

SEQ ID NO: 1183904 - RNA, 19 nt, Homo sapiens
  misc_RNA (1)...(19): siRNA sense strand
gacaguugauggcgaauuu

SEQ ID NO: 1183905 - RNA, 19 nt, Homo sapiens
  misc_RNA (1)...(19): siRNA sense strand
aaugucaacuccagaaaua

SEQ ID NO: 1183906 - RNA, 19 nt, Homo sapiens
  misc_RNA (1)...(19): siRNA sense strand
gaaacugauugucgauaug

SEQ ID NO: 1183907 - RNA, 19 nt, Homo sapiens
  misc_RNA (1)...(19): siRNA sense strand
gauaaacucuaugccuuga

SEQ ID NO: 1183908 - RNA, 19 nt, Homo sapiens
  misc_RNA (1)...(19): siRNA sense strand
ggaggagaaagaaauuaua

SEQ ID NO: 1183909 - RNA, 19 nt, Homo sapiens
  misc_RNA (1)...(19): siRNA sense strand
gaaugacaggguauauaua

SEQ ID NO: 1183910 - RNA, 19 nt, Homo sapiens
  misc_RNA (1)...(19): siRNA sense strand
cuacccaacuucuaucaaa

SEQ ID NO: 1183911 - RNA, 19 nt, Homo sapiens
  misc_RNA (1)...(19): siRNA sense strand
gcgaauuucugcauuacau

SEQ ID NO: 1183912 - RNA, 19 nt, Homo sapiens
  misc_RNA (1)...(19): siRNA sense strand
uaaacucuaugccuugaau

SEQ ID NO: 1183913 - RNA, 19 nt, Homo sapiens
  misc_RNA (1)...(19): siRNA sense strand
cugugcagcugacauauuu

SEQ ID NO: 1183914 - RNA, 19 nt, Homo sapiens
  misc_RNA (1)...(19): siRNA sense strand
gaaggagccauuuaucauc

SEQ ID NO: 1183915 - RNA, 19 nt, Homo sapiens
  misc_RNA (1)...(19): siRNA sense strand
ugaaugacaggguauauau

SEQ ID NO: 1183916 - RNA, 19 nt, Homo sapiens
  misc_RNA (1)...(19): siRNA sense strand
agaaacugauugucgauau

SEQ ID NO: 1183917 - RNA, 19 nt, Homo sapiens
  misc_RNA (1)...(19): siRNA sense strand
gaagcaagaggccgaagga

SEQ ID NO: 1183918 - RNA, 19 nt, Homo sapiens
  misc_RNA (1)...(19): siRNA sense strand
acgauacugugauaaauga

SEQ ID NO: 1183919 - RNA, 19 nt, Homo sapiens
  misc_RNA (1)...(19): siRNA sense strand
gacaggguauauauaggaa

SEQ ID NO: 1183920 - RNA, 19 nt, Homo sapiens
  misc_RNA (1)...(19): siRNA sense strand
uggaagaaccuaauagaug

SEQ ID NO: 1183921 - RNA, 19 nt, Homo sapiens
  misc_RNA (1)...(19): siRNA sense strand
gagaauuccaaguguugua

SEQ ID NO: 1183922 - RNA, 19 nt, Homo sapiens
  misc_RNA (1)...(19): siRNA sense strand
gauggcgaauuucugcauu

SEQ ID NO: 1183923 - RNA, 19 nt, Homo sapiens
  misc_RNA (1)...(19): siRNA sense strand
ggagccauuuaucaucuug

SEQ ID NO: 1183924 - RNA, 19 nt, Homo sapiens
  misc_RNA (1)...(19): siRNA sense strand
ggaucagagugacaguuga

SEQ ID NO: 1183925 - RNA, 19 nt, Homo sapiens
  misc_RNA (1)...(19): siRNA sense strand
ucagaacgauugcuuugag

SEQ ID NO: 1183926 - RNA, 19 nt, Homo sapiens
  misc_RNA (1)...(19): siRNA sense strand
uuuaucaucuugccaguau

SEQ ID NO: 1183927 - RNA, 19 nt, Homo sapiens
  misc_RNA (1)...(19): siRNA sense strand
cgaaggagccauuuaucau

SEQ ID NO: 1183928 - RNA, 19 nt, Homo sapiens
  misc_RNA (1)...(19): siRNA sense strand
gaacacccagucugcacaa

SEQ ID NO: 1183929 - RNA, 19 nt, Homo sapiens
  misc_RNA (1)...(19): siRNA sense strand
gaagaaccuaauagaugaa

SEQ ID NO: 1183930 - RNA, 19 nt, Homo sapiens
  misc_RNA (1)...(19): siRNA sense strand
gcacaaccuggaagcaaga

SEQ ID NO: 1183931 - RNA, 19 nt, Homo sapiens
  misc_RNA (1)...(19): siRNA sense strand
ucaggaaggaucagaguga

SEQ ID NO: 1183932 - RNA, 19 nt, Homo sapiens
  misc_RNA (1)...(19): siRNA sense strand
uccagacgauacugugaua

SEQ ID NO: 1183933 - RNA, 19 nt, Homo sapiens
  misc_RNA (1)...(19): siRNA sense strand
uaucaucuugccaguauuu

SEQ ID NO: 1183934 - RNA, 19 nt, Homo sapiens
  misc_RNA (1)...(19): siRNA sense strand
agacgauacugugauaaau

SEQ ID NO: 1183935 - RNA, 19 nt, Homo sapiens
  misc_RNA (1)...(19): siRNA sense strand
cagacgauacugugauaaa

SEQ ID NO: 1183936 - RNA, 19 nt, Homo sapiens
  misc_RNA (1)...(19): siRNA sense strand
cauugcagauaaacucuau

SEQ ID NO: 1183937 - RNA, 19 nt, Homo sapiens
  misc_RNA (1)...(19): siRNA sense strand
uaucaaguucgcagcauaa

SEQ ID NO: 1183938 - RNA, 19 nt, Homo sapiens
  misc_RNA (1)...(19): siRNA sense strand
gcuaauuggcagugacauu

SEQ ID NO: 1183939 - RNA, 19 nt, Homo sapiens
  misc_RNA (1)...(19): siRNA sense strand
gcccgagaauuccaagugu

SEQ ID NO: 1183940 - RNA, 19 nt, Homo sapiens
  misc_RNA (1)...(19): siRNA sense strand
gacgauacugugauaaaug

SEQ ID NO: 1183941 - RNA, 19 nt, Homo sapiens
  misc_RNA (1)...(19): siRNA sense strand
caaaugucaacuccagaaa

SEQ ID NO: 1183942 - RNA, 19 nt, Homo sapiens
  misc_RNA (1)...(19): siRNA sense strand
ucaaaugucaacuccagaa

SEQ ID NO: 1183943 - RNA, 19 nt, Homo sapiens
  misc_RNA (1)...(19): siRNA sense strand
cauaaccuuugcccgagaa

SEQ ID NO: 1183944 - RNA, 19 nt, Homo sapiens
  misc_RNA (1)...(19): siRNA sense strand
ugacaggguauauauagga

SEQ ID NO: 1183945 - RNA, 19 nt, Homo sapiens
  misc_RNA (1)...(19): siRNA sense strand
aauuauaucugcucuuugc

SEQ ID NO: 1183946 - RNA, 19 nt, Homo sapiens
  misc_RNA (1)...(19): siRNA sense strand
uccuuuaugucuucaguuu

SEQ ID NO: 1183947 - RNA, 19 nt, Homo sapiens
  misc_RNA (1)...(19): siRNA sense strand
guucgcagcauaaccuuug

SEQ ID NO: 1183948 - RNA, 19 nt, Homo sapiens
  misc_RNA (1)...(19): siRNA sense strand
uuugagcucugaagugguu

SEQ ID NO: 1183949 - RNA, 19 nt, Homo sapiens
  misc_RNA (1)...(19): siRNA sense strand
ggccgaaggagccauuuau

SEQ ID NO: 1183950 - RNA, 19 nt, Homo sapiens
  misc_RNA (1)...(19): siRNA sense strand
cuaauuggcagugacauug

SEQ ID NO: 1183951 - RNA, 19 nt, Homo sapiens
  misc_RNA (1)...(19): siRNA sense strand
ccgaaggagccauuuauca

SEQ ID NO: 1183952 - RNA, 19 nt, Homo sapiens
  misc_RNA (1)...(19): siRNA sense strand
gauauucggcuacccaacu

SEQ ID NO: 1183953 - RNA, 19 nt, Homo sapiens
  misc_RNA (1)...(19): siRNA sense strand
auaucaaguucgcagcaua

SEQ ID NO: 1183954 - RNA, 19 nt, Homo sapiens
  misc_RNA (1)...(19): siRNA sense strand
uauggaagaaccuaauaga

SEQ ID NO: 1183955 - RNA, 19 nt, Homo sapiens
  misc_RNA (1)...(19): siRNA sense strand
cagugacauugcagauaaa

SEQ ID NO: 1183956 - RNA, 19 nt, Homo sapiens
  misc_RNA (1)...(19): siRNA sense strand
ugucugggcuuggguagau

SEQ ID NO: 1183957 - RNA, 19 nt, Homo sapiens
  misc_RNA (1)...(19): siRNA sense strand
cgcuacaucucccgccuuu

SEQ ID NO: 1183958 - RNA, 19 nt, Homo sapiens
  misc_RNA (1)...(19): siRNA sense strand
uaaacucuccuugcuuguu

SEQ ID NO: 1183959 - RNA, 19 nt, Homo sapiens
  misc_RNA (1)...(19): siRNA sense strand
cagaaacugauugucgaua

SEQ ID NO: 1183960 - RNA, 19 nt, Homo sapiens
  misc_RNA (1)...(19): siRNA sense strand
gaucaccccugacacaaca

SEQ ID NO: 1183961 - RNA, 19 nt, Homo sapiens
  misc_RNA (1)...(19): siRNA sense strand
ggguggcaguggauucuuc

SEQ ID NO: 1183962 - RNA, 19 nt, Homo sapiens
  misc_RNA (1)...(19): siRNA sense strand
ugacauugcagauaaacuc

SEQ ID NO: 1183963 - RNA, 19 nt, Homo sapiens
  misc_RNA (1)...(19): siRNA sense strand
ggcagugacauugcagaua

SEQ ID NO: 1183964 - RNA, 19 nt, Homo sapiens
  misc_RNA (1)...(19): siRNA sense strand
gcagaaacugauugucgau

SEQ ID NO: 1183965 - RNA, 19 nt, Homo sapiens
  misc_RNA (1)...(19): siRNA sense strand
ccgagaauuccaaguguug

SEQ ID NO: 1183966 - RNA, 19 nt, Homo sapiens
  misc_RNA (1)...(19): siRNA sense strand
aaggagccauuuaucaucu

SEQ ID NO: 1183967 - RNA, 19 nt, Homo sapiens
  misc_RNA (1)...(19): siRNA sense strand
aaugacaggguauauauag

SEQ ID NO: 1183968 - RNA, 19 nt, Homo sapiens
  misc_RNA (1)...(19): siRNA sense strand
auggcgaauuucugcauua

SEQ ID NO: 1183969 - RNA, 19 nt, Homo sapiens
  misc_RNA (1)...(19): siRNA sense strand
ucuucgggcuccuuuaugu

SEQ ID NO: 1183970 - RNA, 19 nt, Homo sapiens
  misc_RNA (1)...(19): siRNA sense strand
gacacaacauuuucagaau

SEQ ID NO: 1183971 - RNA, 19 nt, Homo sapiens
  misc_RNA (1)...(19): siRNA sense strand
uacccaacuucuaucaaau

SEQ ID NO: 1183972 - RNA, 19 nt, Homo sapiens
  misc_RNA (1)...(19): siRNA sense strand
uuucagaauuccagacgau

SEQ ID NO: 1183973 - RNA, 19 nt, Homo sapiens
  misc_RNA (1)...(19): siRNA sense strand
ggaauuuuguacuguuugu

SEQ ID NO: 1183974 - RNA, 19 nt, Homo sapiens
  misc_RNA (1)...(19): siRNA sense strand
cccaacuucuaucaaaugu

SEQ ID NO: 1183975 - RNA, 19 nt, Homo sapiens
  misc_RNA (1)...(19): siRNA sense strand
caggguauauauaggaaaa

SEQ ID NO: 1183976 - RNA, 19 nt, Homo sapiens
  misc_RNA (1)...(19): siRNA sense strand
gaaccuaauagaugaacac

SEQ ID NO: 1183977 - RNA, 19 nt, Homo sapiens
  misc_RNA (1)...(19): siRNA sense strand
gcuccuuuaugucuucagu

SEQ ID NO: 1183978 - RNA, 19 nt, Homo sapiens
  misc_RNA (1)...(19): siRNA sense strand
ucaucugcuucaugcaauu

SEQ ID NO: 1183979 - RNA, 19 nt, Homo sapiens
  misc_RNA (1)...(19): siRNA sense strand
gucaucugcuucaugcaau

SEQ ID NO: 1183980 - RNA, 19 nt, Homo sapiens
  misc_RNA (1)...(19): siRNA sense strand
gaauuccagacgauacugu

SEQ ID NO: 1183981 - RNA, 19 nt, Homo sapiens
  misc_RNA (1)...(19): siRNA sense strand
uggaggagaaagaaauuau

SEQ ID NO: 1183982 - RNA, 19 nt, Homo sapiens
  misc_RNA (1)...(19): siRNA sense strand
aaacugauugucgauaugu

SEQ ID NO: 1183983 - RNA, 19 nt, Homo sapiens
  misc_RNA (1)...(19): siRNA sense strand
cgaauuucugcauuacauu

SEQ ID NO: 1183984 - RNA, 19 nt, Homo sapiens
  misc_RNA (1)...(19): siRNA sense strand
cgauugcuuugagcucuga

SEQ ID NO: 1183985 - RNA, 19 nt, Homo sapiens
  misc_RNA (1)...(19): siRNA sense strand
caaguucgcagcauaaccu

SEQ ID NO: 1183986 - RNA, 19 nt, Homo sapiens
  misc_RNA (1)...(19): siRNA sense strand
uugaaugacaggguauaua

SEQ ID NO: 1183987 - RNA, 19 nt, Homo sapiens
  misc_RNA (1)...(19): siRNA sense strand
cuucagaacgauugcuuug

SEQ ID NO: 1183988 - RNA, 19 nt, Homo sapiens
  misc_RNA (1)...(19): siRNA sense strand
cccgagaauuccaaguguu

SEQ ID NO: 1183989 - RNA, 19 nt, Homo sapiens
  misc_RNA (1)...(19): siRNA sense strand
uugauaaacucuccuugcu

SEQ ID NO: 1183990 - RNA, 19 nt, Homo sapiens
  misc_RNA (1)...(19): siRNA sense strand
ucacugcagaaacugauug

SEQ ID NO: 1183991 - RNA, 19 nt, Homo sapiens
  misc_RNA (1)...(19): siRNA sense strand
ggaucucuuugccugucuu

SEQ ID NO: 1183992 - RNA, 19 nt, Homo sapiens
  misc_RNA (1)...(19): siRNA sense strand
cacaacauuuucagaauuc

SEQ ID NO: 1183993 - RNA, 19 nt, Homo sapiens
  misc_RNA (1)...(19): siRNA sense strand
ugacacaacauuuucagaa

SEQ ID NO: 1183994 - RNA, 19 nt, Homo sapiens
  misc_RNA (1)...(19): siRNA sense strand
gccaguauuuuauuuguag

SEQ ID NO: 1183995 - RNA, 19 nt, Homo sapiens
  misc_RNA (1)...(19): siRNA sense strand
gauugucgauaugugucuu

SEQ ID NO: 1183996 - RNA, 19 nt, Homo sapiens
  misc_RNA (1)...(19): siRNA sense strand
ugauaaacucuccuugcuu

SEQ ID NO: 1183997 - RNA, 19 nt, Homo sapiens
  misc_RNA (1)...(19): siRNA sense strand
ugaagagacuccaauguaa

SEQ ID NO: 1183998 - RNA, 19 nt, Homo sapiens
  misc_RNA (1)...(19): siRNA sense strand
gcucuacacuguccuguuu

SEQ ID NO: 1183999 - RNA, 19 nt, Homo sapiens
  misc_RNA (1)...(19): siRNA sense strand
ggucuagucuggcaugaaa

SEQ ID NO: 1184000 - RNA, 19 nt, Homo sapiens
  misc_RNA (1)...(19): siRNA sense strand
cuucagaaauuccuugaua

SEQ ID NO: 1184001 - RNA, 19 nt, Homo sapiens
  misc_RNA (1)...(19): siRNA sense strand
caaguuaccuccgucauau

SEQ ID NO: 1184002 - RNA, 19 nt, Homo sapiens
  misc_RNA (1)...(19): siRNA sense strand
gggcuaagauucucucugu

SEQ ID NO: 1184003 - RNA, 19 nt, Homo sapiens
  misc_RNA (1)...(19): siRNA sense strand
acaagaaugugaagaaaug

SEQ ID NO: 1184004 - RNA, 19 nt, Homo sapiens
  misc_RNA (1)...(19): siRNA sense strand
uuacaucugucaagucauu

SEQ ID NO: 1184005 - RNA, 19 nt, Homo sapiens
  misc_RNA (1)...(19): siRNA sense strand
gcucuuuccuuaaaucaga

SEQ ID NO: 1184006 - RNA, 19 nt, Homo sapiens
  misc_RNA (1)...(19): siRNA sense strand
gaucuucucaugauucuga

SEQ ID NO: 1184007 - RNA, 19 nt, Homo sapiens
  misc_RNA (1)...(19): siRNA sense strand
gcaaguccuucagaaauuc

SEQ ID NO: 1184008 - RNA, 19 nt, Homo sapiens
  misc_RNA (1)...(19): siRNA sense strand
gagacaagaaugugaagaa

SEQ ID NO: 1184009 - RNA, 19 nt, Homo sapiens
  misc_RNA (1)...(19): siRNA sense strand
gcuaagauucucucuguug

SEQ ID NO: 1184010 - RNA, 19 nt, Homo sapiens
  misc_RNA (1)...(19): siRNA sense strand
agacaagaaugugaagaaa

SEQ ID NO: 1184011 - RNA, 19 nt, Homo sapiens
  misc_RNA (1)...(19): siRNA sense strand
caaauggccuggcgaugag

SEQ ID NO: 1184012 - RNA, 19 nt, Homo sapiens
  misc_RNA (1)...(19): siRNA sense strand
caagucauuuucuggauua

SEQ ID NO: 1184013 - RNA, 19 nt, Homo sapiens
  misc_RNA (1)...(19): siRNA sense strand
ggaacaggaccacugagaa

SEQ ID NO: 1184014 - RNA, 19 nt, Homo sapiens
  misc_RNA (1)...(19): siRNA sense strand
ucaaguuaccuccgucaua

SEQ ID NO: 1184015 - RNA, 19 nt, Homo sapiens
  misc_RNA (1)...(19): siRNA sense strand
gaacaggaccacugagaac

SEQ ID NO: 1184016 - RNA, 19 nt, Homo sapiens
  misc_RNA (1)...(19): siRNA sense strand
agucuggcaugaaauagua

SEQ ID NO: 1184017 - RNA, 19 nt, Homo sapiens
  misc_RNA (1)...(19): siRNA sense strand
gaacacagucauuucugau

SEQ ID NO: 1184018 - RNA, 19 nt, Homo sapiens
  misc_RNA (1)...(19): siRNA sense strand
gcauucauguucuuacucu

SEQ ID NO: 1184019 - RNA, 19 nt, Homo sapiens
  misc_RNA (1)...(19): siRNA sense strand
gaagaccaccaggccauuu

SEQ ID NO: 1184020 - RNA, 19 nt, Homo sapiens
  misc_RNA (1)...(19): siRNA sense strand
caggaccacugagaacuuu

SEQ ID NO: 1184021 - RNA, 19 nt, Homo sapiens
  misc_RNA (1)...(19): siRNA sense strand
ugcaaguccuucagaaauu

SEQ ID NO: 1184022 - RNA, 19 nt, Homo sapiens
  misc_RNA (1)...(19): siRNA sense strand
uggauccguucaucuauuu

SEQ ID NO: 1184023 - RNA, 19 nt, Homo sapiens
  misc_RNA (1)...(19): siRNA sense strand
ugauaaguaugcugaagug

SEQ ID NO: 1184024 - RNA, 19 nt, Homo sapiens
  misc_RNA (1)...(19): siRNA sense strand
acaaauggccuggcgauga

SEQ ID NO: 1184025 - RNA, 19 nt, Homo sapiens
  misc_RNA (1)...(19): siRNA sense strand
ggaugguggugacccaaau

SEQ ID NO: 1184026 - RNA, 19 nt, Homo sapiens
  misc_RNA (1)...(19): siRNA sense strand
uaaaucagaguucggucua

SEQ ID NO: 1184027 - RNA, 19 nt, Homo sapiens
  misc_RNA (1)...(19): siRNA sense strand
caaaugaagagacuccaau

SEQ ID NO: 1184028 - RNA, 19 nt, Homo sapiens
  misc_RNA (1)...(19): siRNA sense strand
cauuaucauugcuguauuc

SEQ ID NO: 1184029 - RNA, 19 nt, Homo sapiens
  misc_RNA (1)...(19): siRNA sense strand
aauuacaucugucaaguca

SEQ ID NO: 1184030 - RNA, 19 nt, Homo sapiens
  misc_RNA (1)...(19): siRNA sense strand
uuucaaauccggaguaaau

SEQ ID NO: 1184031 - RNA, 19 nt, Homo sapiens
  misc_RNA (1)...(19): siRNA sense strand
gaaaauacucuguucuaug

SEQ ID NO: 1184032 - RNA, 19 nt, Homo sapiens
  misc_RNA (1)...(19): siRNA sense strand
cuaagauucucucuguugu

SEQ ID NO: 1184033 - RNA, 19 nt, Homo sapiens
  misc_RNA (1)...(19): siRNA sense strand
aauacucuguucuauguga

SEQ ID NO: 1184034 - RNA, 19 nt, Homo sapiens
  misc_RNA (1)...(19): siRNA sense strand
guaccggucauacguaaga

SEQ ID NO: 1184035 - RNA, 19 nt, Homo sapiens
  misc_RNA (1)...(19): siRNA sense strand
gauucucucuguugucauc

SEQ ID NO: 1184036 - RNA, 19 nt, Homo sapiens
  misc_RNA (1)...(19): siRNA sense strand
uuucugaucuucucaugau

SEQ ID NO: 1184037 - RNA, 19 nt, Homo sapiens
  misc_RNA (1)...(19): siRNA sense strand
caucugggcauucauguuc

SEQ ID NO: 1184038 - RNA, 19 nt, Homo sapiens
  misc_RNA (1)...(19): siRNA sense strand
augaagagacuccaaugua

SEQ ID NO: 1184039 - RNA, 19 nt, Homo sapiens
  misc_RNA (1)...(19): siRNA sense strand
aaggugaacgucaaaguuu

SEQ ID NO: 1184040 - RNA, 19 nt, Homo sapiens
  misc_RNA (1)...(19): siRNA sense strand
gacaagaaugugaagaaau

SEQ ID NO: 1184041 - RNA, 19 nt, Homo sapiens
  misc_RNA (1)...(19): siRNA sense strand
gggaacaggaccacugaga

SEQ ID NO: 1184042 - RNA, 19 nt, Homo sapiens
  misc_RNA (1)...(19): siRNA sense strand
ccaaacccgggaugucuuu

SEQ ID NO: 1184043 - RNA, 19 nt, Homo sapiens
  misc_RNA (1)...(19): siRNA sense strand
cuuaagaacacagucauuu

SEQ ID NO: 1184044 - RNA, 19 nt, Homo sapiens
  misc_RNA (1)...(19): siRNA sense strand
gaacgucaaaguuuucauu

SEQ ID NO: 1184045 - RNA, 19 nt, Homo sapiens
  misc_RNA (1)...(19): siRNA sense strand
aaaggugaacgucaaaguu

SEQ ID NO: 1184046 - RNA, 19 nt, Homo sapiens
  misc_RNA (1)...(19): siRNA sense strand
gaacgagggguguagguaa

SEQ ID NO: 1184047 - RNA, 19 nt, Homo sapiens
  misc_RNA (1)...(19): siRNA sense strand
aagauucucucuguuguca

SEQ ID NO: 1184048 - RNA, 19 nt, Homo sapiens
  misc_RNA (1)...(19): siRNA sense strand
ugacugcacugcugaaaau

SEQ ID NO: 1184049 - RNA, 19 nt, Homo sapiens
  misc_RNA (1)...(19): siRNA sense strand
cgagagacaagaaugugaa

SEQ ID NO: 1184050 - RNA, 19 nt, Homo sapiens
  misc_RNA (1)...(19): siRNA sense strand
caaauccggaguaaaucaa

SEQ ID NO: 1184051 - RNA, 19 nt, Homo sapiens
  misc_RNA (1)...(19): siRNA sense strand
acacagucauuucugaucu

SEQ ID NO: 1184052 - RNA, 19 nt, Homo sapiens
  misc_RNA (1)...(19): siRNA sense strand
ucuagucuggcaugaaaua

SEQ ID NO: 1184053 - RNA, 19 nt, Homo sapiens
  misc_RNA (1)...(19): siRNA sense strand
gggcauucauguucuuacu

SEQ ID NO: 1184054 - RNA, 19 nt, Homo sapiens
  misc_RNA (1)...(19): siRNA sense strand
cuaacaugauucugaccaa

SEQ ID NO: 1184055 - RNA, 19 nt, Homo sapiens
  misc_RNA (1)...(19): siRNA sense strand
ucaaauccggaguaaauca

SEQ ID NO: 1184056 - RNA, 19 nt, Homo sapiens
  misc_RNA (1)...(19): siRNA sense strand
uuaccuccgucauauuuua

SEQ ID NO: 1184057 - RNA, 19 nt, Homo sapiens
  misc_RNA (1)...(19): siRNA sense strand
gguaaaguccccaggaaaa

SEQ ID NO: 1184058 - RNA, 19 nt, Homo sapiens
  misc_RNA (1)...(19): siRNA sense strand
gaacuguaccggucauacg

SEQ ID NO: 1184059 - RNA, 19 nt, Homo sapiens
  misc_RNA (1)...(19): siRNA sense strand
ccaacaggcagccgagaga

SEQ ID NO: 1184060 - RNA, 19 nt, Homo sapiens
  misc_RNA (1)...(19): siRNA sense strand
aagaccaccaggccauuua

SEQ ID NO: 1184061 - RNA, 19 nt, Homo sapiens
  misc_RNA (1)...(19): siRNA sense strand
ucagaaauuccuugauaag

SEQ ID NO: 1184062 - RNA, 19 nt, Homo sapiens
  misc_RNA (1)...(19): siRNA sense strand
cuggauccguucaucuauu

SEQ ID NO: 1184063 - RNA, 19 nt, Homo sapiens
  misc_RNA (1)...(19): siRNA sense strand
guugucaucugggcauuca

SEQ ID NO: 1184064 - RNA, 19 nt, Homo sapiens
  misc_RNA (1)...(19): siRNA sense strand
gaccaccaggccauuuaaa

SEQ ID NO: 1184065 - RNA, 19 nt, Homo sapiens
  misc_RNA (1)...(19): siRNA sense strand
uuaagaacacagucauuuc

SEQ ID NO: 1184066 - RNA, 19 nt, Homo sapiens
  misc_RNA (1)...(19): siRNA sense strand
guggugacccaaaugaaga

SEQ ID NO: 1184067 - RNA, 19 nt, Homo sapiens
  misc_RNA (1)...(19): siRNA sense strand
gccuggauccguucaucua

SEQ ID NO: 1184068 - RNA, 19 nt, Homo sapiens
  misc_RNA (1)...(19): siRNA sense strand
cgucaaaguuuucauuauc

SEQ ID NO: 1184069 - RNA, 19 nt, Homo sapiens
  misc_RNA (1)...(19): siRNA sense strand
cacagucauuucugaucuu

SEQ ID NO: 1184070 - RNA, 19 nt, Homo sapiens
  misc_RNA (1)...(19): siRNA sense strand
cagaaauuccuugauaagu

SEQ ID NO: 1184071 - RNA, 19 nt, Homo sapiens
  misc_RNA (1)...(19): siRNA sense strand
uaaaacauccaaccccaaa

SEQ ID NO: 1184072 - RNA, 19 nt, Homo sapiens
  misc_RNA (1)...(19): siRNA sense strand
gaugaggauuuucuuucaa

SEQ ID NO: 1184073 - RNA, 19 nt, Homo sapiens
  misc_RNA (1)...(19): siRNA sense strand
ccaaaugaagagacuccaa

SEQ ID NO: 1184074 - RNA, 19 nt, Homo sapiens
  misc_RNA (1)...(19): siRNA sense strand
gguggugacccaaaugaag

SEQ ID NO: 1184075 - RNA, 19 nt, Homo sapiens
  misc_RNA (1)...(19): siRNA sense strand
cuguaccggucauacguaa

SEQ ID NO: 1184076 - RNA, 19 nt, Homo sapiens
  misc_RNA (1)...(19): siRNA sense strand
aaucagaguucggucuagu

SEQ ID NO: 1184077 - RNA, 19 nt, Homo sapiens
  misc_RNA (1)...(19): siRNA sense strand
ugacccaaaugaagagacu

SEQ ID NO: 1184078 - RNA, 19 nt, Homo sapiens
  misc_RNA (1)...(19): siRNA sense strand
aguuaccuccgucauauuu

SEQ ID NO: 1184079 - RNA, 19 nt, Homo sapiens
  misc_RNA (1)...(19): siRNA sense strand
uugcaaguccuucagaaau

SEQ ID NO: 1184080 - RNA, 19 nt, Homo sapiens
  misc_RNA (1)...(19): siRNA sense strand
gcacucugugguuaacuuc

SEQ ID NO: 1184081 - RNA, 19 nt, Homo sapiens
  misc_RNA (1)...(19): siRNA sense strand
ggccuggcgaugaggauuu

SEQ ID NO: 1184082 - RNA, 19 nt, Homo sapiens
  misc_RNA (1)...(19): siRNA sense strand
ucaccucugcgccugguaa

SEQ ID NO: 1184083 - RNA, 19 nt, Homo sapiens
  misc_RNA (1)...(19): siRNA sense strand
ucauguucuuacucucuuu

SEQ ID NO: 1184084 - RNA, 19 nt, Homo sapiens
  misc_RNA (1)...(19): siRNA sense strand
cgaugaggauuuucuuuca

SEQ ID NO: 1184085 - RNA, 19 nt, Homo sapiens
  misc_RNA (1)...(19): siRNA sense strand
aaaugaagagacuccaaug

SEQ ID NO: 1184086 - RNA, 19 nt, Homo sapiens
  misc_RNA (1)...(19): siRNA sense strand
ucccacugcucuacacugu

SEQ ID NO: 1184087 - RNA, 19 nt, Homo sapiens
  misc_RNA (1)...(19): siRNA sense strand
cauuucugaucuucucaug

SEQ ID NO: 1184088 - RNA, 19 nt, Homo sapiens
  misc_RNA (1)...(19): siRNA sense strand
uccugggacugauaacuau

SEQ ID NO: 1184089 - RNA, 19 nt, Homo sapiens
  misc_RNA (1)...(19): siRNA sense strand
gauucugacuuuuccauuc

SEQ ID NO: 1184090 - RNA, 19 nt, Homo sapiens
  misc_RNA (1)...(19): siRNA sense strand
aaagaacuguaccggucau

SEQ ID NO: 1184091 - RNA, 19 nt, Homo sapiens
  misc_RNA (1)...(19): siRNA sense strand
ggcuaagauucucucuguu

SEQ ID NO: 1184092 - RNA, 19 nt, Homo sapiens
  misc_RNA (1)...(19): siRNA sense strand
ugaagagacuccaauguaa

SEQ ID NO: 1184093 - RNA, 19 nt, Homo sapiens
  misc_RNA (1)...(19): siRNA sense strand
gcucuacacuguccuguuu

SEQ ID NO: 1184094 - RNA, 19 nt, Homo sapiens
  misc_RNA (1)...(19): siRNA sense strand
ggucuagucuggcaugaaa

SEQ ID NO: 1184095 - RNA, 19 nt, Homo sapiens
  misc_RNA (1)...(19): siRNA sense strand
cuucagaaauuccuugaua

SEQ ID NO: 1184096 - RNA, 19 nt, Homo sapiens
  misc_RNA (1)...(19): siRNA sense strand
caaguuaccuccgucauau

SEQ ID NO: 1184097 - RNA, 19 nt, Homo sapiens
  misc_RNA (1)...(19): siRNA sense strand
gggcuaagauucucucugu

SEQ ID NO: 1184098 - RNA, 19 nt, Homo sapiens
  misc_RNA (1)...(19): siRNA sense strand
acaagaaugugaagaaaug

SEQ ID NO: 1184099 - RNA, 19 nt, Homo sapiens
  misc_RNA (1)...(19): siRNA sense strand
uuacaucugucaagucauu

SEQ ID NO: 1184100 - RNA, 19 nt, Homo sapiens
  misc_RNA (1)...(19): siRNA sense strand
gcucuuuccuuaaaucaga

SEQ ID NO: 1184101 - RNA, 19 nt, Homo sapiens
  misc_RNA (1)...(19): siRNA sense strand
gaucuucucaugauucuga

SEQ ID NO: 1184102 - RNA, 19 nt, Homo sapiens
  misc_RNA (1)...(19): siRNA sense strand
gcaaguccuucagaaauuc

SEQ ID NO: 1184103 - RNA, 19 nt, Homo sapiens
  misc_RNA (1)...(19): siRNA sense strand
gagacaagaaugugaagaa

SEQ ID NO: 1184104 - RNA, 19 nt, Homo sapiens
  misc_RNA (1)...(19): siRNA sense strand
gcuaagauucucucuguug

SEQ ID NO: 1184105 - RNA, 19 nt, Homo sapiens
  misc_RNA (1)...(19): siRNA sense strand
agacaagaaugugaagaaa

SEQ ID NO: 1184106 - RNA, 19 nt, Homo sapiens
  misc_RNA (1)...(19): siRNA sense strand
caaauggccuggcgaugag

SEQ ID NO: 1184107 - RNA, 19 nt, Homo sapiens
  misc_RNA (1)...(19): siRNA sense strand
caagucauuuucuggauua

SEQ ID NO: 1184108 - RNA, 19 nt, Homo sapiens
  misc_RNA (1)...(19): siRNA sense strand
ggaacaggaccacugagaa

SEQ ID NO: 1184109 - RNA, 19 nt, Homo sapiens
  misc_RNA (1)...(19): siRNA sense strand
ucaaguuaccuccgucaua

SEQ ID NO: 1184110 - RNA, 19 nt, Homo sapiens
  misc_RNA (1)...(19): siRNA sense strand
gaacaggaccacugagaac

SEQ ID NO: 1184111 - RNA, 19 nt, Homo sapiens
  misc_RNA (1)...(19): siRNA sense strand
agucuggcaugaaauagua

SEQ ID NO: 1184112 - RNA, 19 nt, Homo sapiens
  misc_RNA (1)...(19): siRNA sense strand
gaacacagucauuucugau

SEQ ID NO: 1184113 - RNA, 19 nt, Homo sapiens
  misc_RNA (1)...(19): siRNA sense strand
gcauucauguucuuacucu

SEQ ID NO: 1184114 - RNA, 19 nt, Homo sapiens
  misc_RNA (1)...(19): siRNA sense strand
gaagaccaccaggccauuu

SEQ ID NO: 1184115 - RNA, 19 nt, Homo sapiens
  misc_RNA (1)...(19): siRNA sense strand
caggaccacugagaacuuu

SEQ ID NO: 1184116 - RNA, 19 nt, Homo sapiens
  misc_RNA (1)...(19): siRNA sense strand
ugcaaguccuucagaaauu

SEQ ID NO: 1184117 - RNA, 19 nt, Homo sapiens
  misc_RNA (1)...(19): siRNA sense strand
uggauccguucaucuauuu

SEQ ID NO: 1184118 - RNA, 19 nt, Homo sapiens
  misc_RNA (1)...(19): siRNA sense strand
ugauaaguaugcugaagug

SEQ ID NO: 1184119 - RNA, 19 nt, Homo sapiens
  misc_RNA (1)...(19): siRNA sense strand
acaaauggccuggcgauga

SEQ ID NO: 1184120 - RNA, 19 nt, Homo sapiens
  misc_RNA (1)...(19): siRNA sense strand
ggaugguggugacccaaau

SEQ ID NO: 1184121 - RNA, 19 nt, Homo sapiens
  misc_RNA (1)...(19): siRNA sense strand
uaaaucagaguucggucua

SEQ ID NO: 1184122 - RNA, 19 nt, Homo sapiens
  misc_RNA (1)...(19): siRNA sense strand
caaaugaagagacuccaau

SEQ ID NO: 1184123 - RNA, 19 nt, Homo sapiens
  misc_RNA (1)...(19): siRNA sense strand
cauuaucauugcuguauuc

SEQ ID NO: 1184124 - RNA, 19 nt, Homo sapiens
  misc_RNA (1)...(19): siRNA sense strand
aauuacaucugucaaguca

SEQ ID NO: 1184125 - RNA, 19 nt, Homo sapiens
  misc_RNA (1)...(19): siRNA sense strand
uuucaaauccggaguaaau

SEQ ID NO: 1184126 - RNA, 19 nt, Homo sapiens
  misc_RNA (1)...(19): siRNA sense strand
gaaaauacucuguucuaug

SEQ ID NO: 1184127 - RNA, 19 nt, Homo sapiens
  misc_RNA (1)...(19): siRNA sense strand
cuaagauucucucuguugu

SEQ ID NO: 1184128 - RNA, 19 nt, Homo sapiens
  misc_RNA (1)...(19): siRNA sense strand
aauacucuguucuauguga

SEQ ID NO: 1184129 - RNA, 19 nt, Homo sapiens
  misc_RNA (1)...(19): siRNA sense strand
guaccggucauacguaaga

SEQ ID NO: 1184130 - RNA, 19 nt, Homo sapiens
  misc_RNA (1)...(19): siRNA sense strand
gauucucucuguugucauc

SEQ ID NO: 1184131 - RNA, 19 nt, Homo sapiens
  misc_RNA (1)...(19): siRNA sense strand
uuucugaucuucucaugau

SEQ ID NO: 1184132 - RNA, 19 nt, Homo sapiens
  misc_RNA (1)...(19): siRNA sense strand
caucugggcauucauguuc

SEQ ID NO: 1184133 - RNA, 19 nt, Homo sapiens
  misc_RNA (1)...(19): siRNA sense strand
augaagagacuccaaugua

SEQ ID NO: 1184134 - RNA, 19 nt, Homo sapiens
  misc_RNA (1)...(19): siRNA sense strand
aaggugaacgucaaaguuu

SEQ ID NO: 1184135 - RNA, 19 nt, Homo sapiens
  misc_RNA (1)...(19): siRNA sense strand
gacaagaaugugaagaaau

SEQ ID NO: 1184136 - RNA, 19 nt, Homo sapiens
  misc_RNA (1)...(19): siRNA sense strand
gggaacaggaccacugaga

SEQ ID NO: 1184137 - RNA, 19 nt, Homo sapiens
  misc_RNA (1)...(19): siRNA sense strand
ccaaacccgggaugucuuu

SEQ ID NO: 1184138 - RNA, 19 nt, Homo sapiens
  misc_RNA (1)...(19): siRNA sense strand
cuuaagaacacagucauuu

SEQ ID NO: 1184139 - RNA, 19 nt, Homo sapiens
  misc_RNA (1)...(19): siRNA sense strand
gaacgucaaaguuuucauu

SEQ ID NO: 1184140 - RNA, 19 nt, Homo sapiens
  misc_RNA (1)...(19): siRNA sense strand
aaaggugaacgucaaaguu

SEQ ID NO: 1184141 - RNA, 19 nt, Homo sapiens
  misc_RNA (1)...(19): siRNA sense strand
gaacgagggguguagguaa

SEQ ID NO: 1184142 - RNA, 19 nt, Homo sapiens
  misc_RNA (1)...(19): siRNA sense strand
aagauucucucuguuguca

SEQ ID NO: 1184143 - RNA, 19 nt, Homo sapiens
  misc_RNA (1)...(19): siRNA sense strand
ugacugcacugcugaaaau

SEQ ID NO: 1184144 - RNA, 19 nt, Homo sapiens
  misc_RNA (1)...(19): siRNA sense strand
cgagagacaagaaugugaa

SEQ ID NO: 1184145 - RNA, 19 nt, Homo sapiens
  misc_RNA (1)...(19): siRNA sense strand
caaauccggaguaaaucaa

SEQ ID NO: 1184146 - RNA, 19 nt, Homo sapiens
  misc_RNA (1)...(19): siRNA sense strand
acacagucauuucugaucu

SEQ ID NO: 1184147 - RNA, 19 nt, Homo sapiens
  misc_RNA (1)...(19): siRNA sense strand
ucuagucuggcaugaaaua

SEQ ID NO: 1184148 - RNA, 19 nt, Homo sapiens
  misc_RNA (1)...(19): siRNA sense strand
gggcauucauguucuuacu

SEQ ID NO: 1184149 - RNA, 19 nt, Homo sapiens
  misc_RNA (1)...(19): siRNA sense strand
cuaacaugauucugaccaa

SEQ ID NO: 1184150 - RNA, 19 nt, Homo sapiens
  misc_RNA (1)...(19): siRNA sense strand
ucaaauccggaguaaauca

SEQ ID NO: 1184151 - RNA, 19 nt, Homo sapiens
  misc_RNA (1)...(19): siRNA sense strand
uuaccuccgucauauuuua

SEQ ID NO: 1184152 - RNA, 19 nt, Homo sapiens
  misc_RNA (1)...(19): siRNA sense strand
gguaaaguccccaggaaaa

SEQ ID NO: 1184153 - RNA, 19 nt, Homo sapiens
  misc_RNA (1)...(19): siRNA sense strand
gaacuguaccggucauacg

SEQ ID NO: 1184154 - RNA, 19 nt, Homo sapiens
  misc_RNA (1)...(19): siRNA sense strand
ccaacaggcagccgagaga

SEQ ID NO: 1184155 - RNA, 19 nt, Homo sapiens
  misc_RNA (1)...(19): siRNA sense strand
aagaccaccaggccauuua

SEQ ID NO: 1184156 - RNA, 19 nt, Homo sapiens
  misc_RNA (1)...(19): siRNA sense strand
ucagaaauuccuugauaag

SEQ ID NO: 1184157 - RNA, 19 nt, Homo sapiens
  misc_RNA (1)...(19): siRNA sense strand
cuggauccguucaucuauu

SEQ ID NO: 1184158 - RNA, 19 nt, Homo sapiens
  misc_RNA (1)...(19): siRNA sense strand
guugucaucugggcauuca

SEQ ID NO: 1184159 - RNA, 19 nt, Homo sapiens
  misc_RNA (1)...(19): siRNA sense strand
gaccaccaggccauuuaaa

SEQ ID NO: 1184160 - RNA, 19 nt, Homo sapiens
  misc_RNA (1)...(19): siRNA sense strand
uuaagaacacagucauuuc

SEQ ID NO: 1184161 - RNA, 19 nt, Homo sapiens
  misc_RNA (1)...(19): siRNA sense strand
guggugacccaaaugaaga

SEQ ID NO: 1184162 - RNA, 19 nt, Homo sapiens
  misc_RNA (1)...(19): siRNA sense strand
gccuggauccguucaucua

SEQ ID NO: 1184163 - RNA, 19 nt, Homo sapiens
  misc_RNA (1)...(19): siRNA sense strand
cgucaaaguuuucauuauc

SEQ ID NO: 1184164 - RNA, 19 nt, Homo sapiens
  misc_RNA (1)...(19): siRNA sense strand
cacagucauuucugaucuu

SEQ ID NO: 1184165 - RNA, 19 nt, Homo sapiens
  misc_RNA (1)...(19): siRNA sense strand
cagaaauuccuugauaagu

SEQ ID NO: 1184166 - RNA, 19 nt, Homo sapiens
  misc_RNA (1)...(19): siRNA sense strand
uaaaacauccaaccccaaa

SEQ ID NO: 1184167 - RNA, 19 nt, Homo sapiens
  misc_RNA (1)...(19): siRNA sense strand
gaugaggauuuucuuucaa

SEQ ID NO: 1184168 - RNA, 19 nt, Homo sapiens
  misc_RNA (1)...(19): siRNA sense strand
ccaaaugaagagacuccaa

SEQ ID NO: 1184169 - RNA, 19 nt, Homo sapiens
  misc_RNA (1)...(19): siRNA sense strand
gguggugacccaaaugaag

SEQ ID NO: 1184170 - RNA, 19 nt, Homo sapiens
  misc_RNA (1)...(19): siRNA sense strand
cuguaccggucauacguaa

SEQ ID NO: 1184171 - RNA, 19 nt, Homo sapiens
  misc_RNA (1)...(19): siRNA sense strand
aaucagaguucggucuagu

SEQ ID NO: 1184172 - RNA, 19 nt, Homo sapiens
  misc_RNA (1)...(19): siRNA sense strand
ugacccaaaugaagagacu

SEQ ID NO: 1184173 - RNA, 19 nt, Homo sapiens
  misc_RNA (1)...(19): siRNA sense strand
aguuaccuccgucauauuu

SEQ ID NO: 1184174 - RNA, 19 nt, Homo sapiens
  misc_RNA (1)...(19): siRNA sense strand
uugcaaguccuucagaaau

SEQ ID NO: 1184175 - RNA, 19 nt, Homo sapiens
  misc_RNA (1)...(19): siRNA sense strand
gcacucugugguuaacuuc

SEQ ID NO: 1184176 - RNA, 19 nt, Homo sapiens
  misc_RNA (1)...(19): siRNA sense strand
ggccuggcgaugaggauuu

SEQ ID NO: 1184177 - RNA, 19 nt, Homo sapiens
  misc_RNA (1)...(19): siRNA sense strand
ucaccucugcgccugguaa

SEQ ID NO: 1184178 - RNA, 19 nt, Homo sapiens
  misc_RNA (1)...(19): siRNA sense strand
ucauguucuuacucucuuu

SEQ ID NO: 1184179 - RNA, 19 nt, Homo sapiens
  misc_RNA (1)...(19): siRNA sense strand
cgaugaggauuuucuuuca

SEQ ID NO: 1184180 - RNA, 19 nt, Homo sapiens
  misc_RNA (1)...(19): siRNA sense strand
aaaugaagagacuccaaug

SEQ ID NO: 1184181 - RNA, 19 nt, Homo sapiens
  misc_RNA (1)...(19): siRNA sense strand
ucccacugcucuacacugu

SEQ ID NO: 1184182 - RNA, 19 nt, Homo sapiens
  misc_RNA (1)...(19): siRNA sense strand
cauuucugaucuucucaug

SEQ ID NO: 1184183 - RNA, 19 nt, Homo sapiens
  misc_RNA (1)...(19): siRNA sense strand
uccugggacugauaacuau

SEQ ID NO: 1184184 - RNA, 19 nt, Homo sapiens
  misc_RNA (1)...(19): siRNA sense strand
gauucugacuuuuccauuc

SEQ ID NO: 1184185 - RNA, 19 nt, Homo sapiens
  misc_RNA (1)...(19): siRNA sense strand
aaagaacuguaccggucau

SEQ ID NO: 1184186 - RNA, 19 nt, Homo sapiens
  misc_RNA (1)...(19): siRNA sense strand
ggcuaagauucucucuguu

SEQ ID NO: 1184187 - RNA, 19 nt, Homo sapiens
  misc_RNA (1)...(19): siRNA sense strand
gaaaugaaauccaaagcuu

SEQ ID NO: 1184188 - RNA, 19 nt, Homo sapiens
  misc_RNA (1)...(19): siRNA sense strand
gaaagaauggugucaauga

SEQ ID NO: 1184189 - RNA, 19 nt, Homo sapiens
  misc_RNA (1)...(19): siRNA sense strand
uagaugagaucaagaauga

SEQ ID NO: 1184190 - RNA, 19 nt, Homo sapiens
  misc_RNA (1)...(19): siRNA sense strand
gaaagaagcguaugacaca

SEQ ID NO: 1184191 - RNA, 19 nt, Homo sapiens
  misc_RNA (1)...(19): siRNA sense strand
ucaaggacauuacuaguga

SEQ ID NO: 1184192 - RNA, 19 nt, Homo sapiens
  misc_RNA (1)...(19): siRNA sense strand
gaauugaggaagacuguua

SEQ ID NO: 1184193 - RNA, 19 nt, Homo sapiens
  misc_RNA (1)...(19): siRNA sense strand
gaaagaaagaagcguauga

SEQ ID NO: 1184194 - RNA, 19 nt, Homo sapiens
  misc_RNA (1)...(19): siRNA sense strand
ggacauuacuagugacuca

SEQ ID NO: 1184195 - RNA, 19 nt, Homo sapiens
  misc_RNA (1)...(19): siRNA sense strand
gacacuaagucaaguuaaa

SEQ ID NO: 1184196 - RNA, 19 nt, Homo sapiens
  misc_RNA (1)...(19): siRNA sense strand
gaggaagacuguuacuaca

SEQ ID NO: 1184197 - RNA, 19 nt, Homo sapiens
  misc_RNA (1)...(19): siRNA sense strand
ggcaucaacuucauggaaa

SEQ ID NO: 1184198 - RNA, 19 nt, Homo sapiens
  misc_RNA (1)...(19): siRNA sense strand
ggauuggaauugaggaaga

SEQ ID NO: 1184199 - RNA, 19 nt, Homo sapiens
  misc_RNA (1)...(19): siRNA sense strand
aaagaauggugucaaugaa

SEQ ID NO: 1184200 - RNA, 19 nt, Homo sapiens
  misc_RNA (1)...(19): siRNA sense strand
ugacugacaucaacuccaa

SEQ ID NO: 1184201 - RNA, 19 nt, Homo sapiens
  misc_RNA (1)...(19): siRNA sense strand
gcguaugacacauugauua

SEQ ID NO: 1184202 - RNA, 19 nt, Homo sapiens
  misc_RNA (1)...(19): siRNA sense strand
uggaaggccugcaucauga

SEQ ID NO: 1184203 - RNA, 19 nt, Homo sapiens
  misc_RNA (1)...(19): siRNA sense strand
agacacagcagaacagaaa

SEQ ID NO: 1184204 - RNA, 19 nt, Homo sapiens
  misc_RNA (1)...(19): siRNA sense strand
ccaagugacugacaucaac

SEQ ID NO: 1184205 - RNA, 19 nt, Homo sapiens
  misc_RNA (1)...(19): siRNA sense strand
guaauuggcaucaacuuca

SEQ ID NO: 1184206 - RNA, 19 nt, Homo sapiens
  misc_RNA (1)...(19): siRNA sense strand
uuacgucuguugcuagauu

SEQ ID NO: 1184207 - RNA, 19 nt, Homo sapiens
  misc_RNA (1)...(19): siRNA sense strand
guucaacugcuucguaauu

SEQ ID NO: 1184208 - RNA, 19 nt, Homo sapiens
  misc_RNA (1)...(19): siRNA sense strand
caaaauagaugagaucaag

SEQ ID NO: 1184209 - RNA, 19 nt, Homo sapiens
  misc_RNA (1)...(19): siRNA sense strand
guucuuacgucuguugcua

SEQ ID NO: 1184210 - RNA, 19 nt, Homo sapiens
  misc_RNA (1)...(19): siRNA sense strand
ucaacuucauggaaagaaa

SEQ ID NO: 1184211 - RNA, 19 nt, Homo sapiens
  misc_RNA (1)...(19): siRNA sense strand
agaagcguaugacacauug

SEQ ID NO: 1184212 - RNA, 19 nt, Homo sapiens
  misc_RNA (1)...(19): siRNA sense strand
gcuggagucaugacacuaa

SEQ ID NO: 1184213 - RNA, 19 nt, Homo sapiens
  misc_RNA (1)...(19): siRNA sense strand
gaugagaucaagaaugaca

SEQ ID NO: 1184214 - RNA, 19 nt, Homo sapiens
  misc_RNA (1)...(19): siRNA sense strand
ucgaaagaauggugucaau

SEQ ID NO: 1184215 - RNA, 19 nt, Homo sapiens
  misc_RNA (1)...(19): siRNA sense strand
cguaugacacauugauuaa

SEQ ID NO: 1184216 - RNA, 19 nt, Homo sapiens
  misc_RNA (1)...(19): siRNA sense strand
cagagaaaauucagacuau

SEQ ID NO: 1184217 - RNA, 19 nt, Homo sapiens
  misc_RNA (1)...(19): siRNA sense strand
gcaucaacuucauggaaag

SEQ ID NO: 1184218 - RNA, 19 nt, Homo sapiens
  misc_RNA (1)...(19): siRNA sense strand
ugaggaagacuguuacuac

SEQ ID NO: 1184219 - RNA, 19 nt, Homo sapiens
  misc_RNA (1)...(19): siRNA sense strand
ggaaagaaagaagcguaug

SEQ ID NO: 1184220 - RNA, 19 nt, Homo sapiens
  misc_RNA (1)...(19): siRNA sense strand
cacuauugcuggagucaug

SEQ ID NO: 1184221 - RNA, 19 nt, Homo sapiens
  misc_RNA (1)...(19): siRNA sense strand
gcagagaaaauucagacua

SEQ ID NO: 1184222 - RNA, 19 nt, Homo sapiens
  misc_RNA (1)...(19): siRNA sense strand
ggccaauucugccauaagc

SEQ ID NO: 1184223 - RNA, 19 nt, Homo sapiens
  misc_RNA (1)...(19): siRNA sense strand
uaauuggcaucaacuucau

SEQ ID NO: 1184224 - RNA, 19 nt, Homo sapiens
  misc_RNA (1)...(19): siRNA sense strand
aacauggaaucaucaagga

SEQ ID NO: 1184225 - RNA, 19 nt, Homo sapiens
  misc_RNA (1)...(19): siRNA sense strand
caucaacuccaagggauug

SEQ ID NO: 1184226 - RNA, 19 nt, Homo sapiens
  misc_RNA (1)...(19): siRNA sense strand
uacgucuguugcuagauua

SEQ ID NO: 1184227 - RNA, 19 nt, Homo sapiens
  misc_RNA (1)...(19): siRNA sense strand
ggagucaugacacuaaguc

SEQ ID NO: 1184228 - RNA, 19 nt, Homo sapiens
  misc_RNA (1)...(19): siRNA sense strand
cauggaaucaucaaggaau

SEQ ID NO: 1184229 - RNA, 19 nt, Homo sapiens
  misc_RNA (1)...(19): siRNA sense strand
cgaaagaauggugucaaug

SEQ ID NO: 1184230 - RNA, 19 nt, Homo sapiens
  misc_RNA (1)...(19): siRNA sense strand
gcaacaccaagugcaaaga

SEQ ID NO: 1184231 - RNA, 19 nt, Homo sapiens
  misc_RNA (1)...(19): siRNA sense strand
caacaccaagugcaaagag

SEQ ID NO: 1184232 - RNA, 19 nt, Homo sapiens
  misc_RNA (1)...(19): siRNA sense strand
gagaaaauucagacuauca

SEQ ID NO: 1184233 - RNA, 19 nt, Homo sapiens
  misc_RNA (1)...(19): siRNA sense strand
aagaagcguaugacacauu

SEQ ID NO: 1184234 - RNA, 19 nt, Homo sapiens
  misc_RNA (1)...(19): siRNA sense strand
caagacacagcagaacaga

SEQ ID NO: 1184235 - RNA, 19 nt, Homo sapiens
  misc_RNA (1)...(19): siRNA sense strand
ccuccuaccucugguucuu

SEQ ID NO: 1184236 - RNA, 19 nt, Homo sapiens
  misc_RNA (1)...(19): siRNA sense strand
caacuucauggaaagaaag

SEQ ID NO: 1184237 - RNA, 19 nt, Homo sapiens
  misc_RNA (1)...(19): siRNA sense strand
gcuagauuaucguccaaaa

SEQ ID NO: 1184238 - RNA, 19 nt, Homo sapiens
  misc_RNA (1)...(19): siRNA sense strand
uggcaucaacuucauggaa

SEQ ID NO: 1184239 - RNA, 19 nt, Homo sapiens
  misc_RNA (1)...(19): siRNA sense strand
cagcaacaccaagugcaaa

SEQ ID NO: 1184240 - RNA, 19 nt, Homo sapiens
  misc_RNA (1)...(19): siRNA sense strand
ucaacugcuucguaauugg

SEQ ID NO: 1184241 - RNA, 19 nt, Homo sapiens
  misc_RNA (1)...(19): siRNA sense strand
caaugaagccaaaauagau

SEQ ID NO: 1184242 - RNA, 19 nt, Homo sapiens
  misc_RNA (1)...(19): siRNA sense strand
uuaaugcccaagugacuga

SEQ ID NO: 1184243 - RNA, 19 nt, Homo sapiens
  misc_RNA (1)...(19): siRNA sense strand
ggaaggccugcaucaugau

SEQ ID NO: 1184244 - RNA, 19 nt, Homo sapiens
  misc_RNA (1)...(19): siRNA sense strand
cauuacuagugacucagaa

SEQ ID NO: 1184245 - RNA, 19 nt, Homo sapiens
  misc_RNA (1)...(19): siRNA sense strand
uucaacugcuucguaauug

SEQ ID NO: 1184246 - RNA, 19 nt, Homo sapiens
  misc_RNA (1)...(19): siRNA sense strand
aaugcacacucaccagcaa

SEQ ID NO: 1184247 - RNA, 19 nt, Homo sapiens
  misc_RNA (1)...(19): siRNA sense strand
ucagaaaugaaauccaaag

SEQ ID NO: 1184248 - RNA, 19 nt, Homo sapiens
  misc_RNA (1)...(19): siRNA sense strand
ccagcaacaccaagugcaa

SEQ ID NO: 1184249 - RNA, 19 nt, Homo sapiens
  misc_RNA (1)...(19): siRNA sense strand
gaaaugaaauccaaagcuu

SEQ ID NO: 1184250 - RNA, 19 nt, Homo sapiens
  misc_RNA (1)...(19): siRNA sense strand
gaaagaauggugucaauga

SEQ ID NO: 1184251 - RNA, 19 nt, Homo sapiens
  misc_RNA (1)...(19): siRNA sense strand
uagaugagaucaagaauga

SEQ ID NO: 1184252 - RNA, 19 nt, Homo sapiens
  misc_RNA (1)...(19): siRNA sense strand
gaaagaagcguaugacaca

SEQ ID NO: 1184253 - RNA, 19 nt, Homo sapiens
  misc_RNA (1)...(19): siRNA sense strand
ucaaggacauuacuaguga

SEQ ID NO: 1184254 - RNA, 19 nt, Homo sapiens
  misc_RNA (1)...(19): siRNA sense strand
gaauugaggaagacuguua

SEQ ID NO: 1184255 - RNA, 19 nt, Homo sapiens
  misc_RNA (1)...(19): siRNA sense strand
gaaagaaagaagcguauga

SEQ ID NO: 1184256 - RNA, 19 nt, Homo sapiens
  misc_RNA (1)...(19): siRNA sense strand
ggacauuacuagugacuca

SEQ ID NO: 1184257 - RNA, 19 nt, Homo sapiens
  misc_RNA (1)...(19): siRNA sense strand
gacacuaagucaaguuaaa

SEQ ID NO: 1184258 - RNA, 19 nt, Homo sapiens
  misc_RNA (1)...(19): siRNA sense strand
gaggaagacuguuacuaca

SEQ ID NO: 1184259 - RNA, 19 nt, Homo sapiens
  misc_RNA (1)...(19): siRNA sense strand
ggcaucaacuucauggaaa

SEQ ID NO: 1184260 - RNA, 19 nt, Homo sapiens
  misc_RNA (1)...(19): siRNA sense strand
ggauuggaauugaggaaga

SEQ ID NO: 1184261 - RNA, 19 nt, Homo sapiens
  misc_RNA (1)...(19): siRNA sense strand
aaagaauggugucaaugaa

SEQ ID NO: 1184262 - RNA, 19 nt, Homo sapiens
  misc_RNA (1)...(19): siRNA sense strand
ugacugacaucaacuccaa

SEQ ID NO: 1184263 - RNA, 19 nt, Homo sapiens
  misc_RNA (1)...(19): siRNA sense strand
gcguaugacacauugauua

SEQ ID NO: 1184264 - RNA, 19 nt, Homo sapiens
  misc_RNA (1)...(19): siRNA sense strand
uggaaggccugcaucauga

SEQ ID NO: 1184265 - RNA, 19 nt, Homo sapiens
  misc_RNA (1)...(19): siRNA sense strand
agacacagcagaacagaaa

SEQ ID NO: 1184266 - RNA, 19 nt, Homo sapiens
  misc_RNA (1)...(19): siRNA sense strand
ccaagugacugacaucaac

SEQ ID NO: 1184267 - RNA, 19 nt, Homo sapiens
  misc_RNA (1)...(19): siRNA sense strand
guaauuggcaucaacuuca

SEQ ID NO: 1184268 - RNA, 19 nt, Homo sapiens
  misc_RNA (1)...(19): siRNA sense strand
uuacgucuguugcuagauu

SEQ ID NO: 1184269 - RNA, 19 nt, Homo sapiens
  misc_RNA (1)...(19): siRNA sense strand
guucaacugcuucguaauu

SEQ ID NO: 1184270 - RNA, 19 nt, Homo sapiens
  misc_RNA (1)...(19): siRNA sense strand
caaaauagaugagaucaag

SEQ ID NO: 1184271 - RNA, 19 nt, Homo sapiens
  misc_RNA (1)...(19): siRNA sense strand
guucuuacgucuguugcua

SEQ ID NO: 1184272 - RNA, 19 nt, Homo sapiens
  misc_RNA (1)...(19): siRNA sense strand
ucaacuucauggaaagaaa

SEQ ID NO: 1184273 - RNA, 19 nt, Homo sapiens
  misc_RNA (1)...(19): siRNA sense strand
agaagcguaugacacauug

SEQ ID NO: 1184274 - RNA, 19 nt, Homo sapiens
  misc_RNA (1)...(19): siRNA sense strand
gcuggagucaugacacuaa

SEQ ID NO: 1184275 - RNA, 19 nt, Homo sapiens
  misc_RNA (1)...(19): siRNA sense strand
gaugagaucaagaaugaca

SEQ ID NO: 1184276 - RNA, 19 nt, Homo sapiens
  misc_RNA (1)...(19): siRNA sense strand
ucgaaagaauggugucaau

SEQ ID NO: 1184277 - RNA, 19 nt, Homo sapiens
  misc_RNA (1)...(19): siRNA sense strand
cguaugacacauugauuaa

SEQ ID NO: 1184278 - RNA, 19 nt, Homo sapiens
  misc_RNA (1)...(19): siRNA sense strand
cagagaaaauucagacuau

SEQ ID NO: 1184279 - RNA, 19 nt, Homo sapiens
  misc_RNA (1)...(19): siRNA sense strand
gcaucaacuucauggaaag

SEQ ID NO: 1184280 - RNA, 19 nt, Homo sapiens
  misc_RNA (1)...(19): siRNA sense strand
ugaggaagacuguuacuac

SEQ ID NO: 1184281 - RNA, 19 nt, Homo sapiens
  misc_RNA (1)...(19): siRNA sense strand
ggaaagaaagaagcguaug

SEQ ID NO: 1184282 - RNA, 19 nt, Homo sapiens
  misc_RNA (1)...(19): siRNA sense strand
cacuauugcuggagucaug

SEQ ID NO: 1184283 - RNA, 19 nt, Homo sapiens
  misc_RNA (1)...(19): siRNA sense strand
gcagagaaaauucagacua

SEQ ID NO: 1184284 - RNA, 19 nt, Homo sapiens
  misc_RNA (1)...(19): siRNA sense strand
ggccaauucugccauaagc

SEQ ID NO: 1184285 - RNA, 19 nt, Homo sapiens
  misc_RNA (1)...(19): siRNA sense strand
uaauuggcaucaacuucau

SEQ ID NO: 1184286 - RNA, 19 nt, Homo sapiens
  misc_RNA (1)...(19): siRNA sense strand
aacauggaaucaucaagga

SEQ ID NO: 1184287 - RNA, 19 nt, Homo sapiens
  misc_RNA (1)...(19): siRNA sense strand
caucaacuccaagggauug

SEQ ID NO: 1184288 - RNA, 19 nt, Homo sapiens
  misc_RNA (1)...(19): siRNA sense strand
uacgucuguugcuagauua

SEQ ID NO: 1184289 - RNA, 19 nt, Homo sapiens
  misc_RNA (1)...(19): siRNA sense strand
ggagucaugacacuaaguc

SEQ ID NO: 1184290 - RNA, 19 nt, Homo sapiens
  misc_RNA (1)...(19): siRNA sense strand
cauggaaucaucaaggaau

SEQ ID NO: 1184291 - RNA, 19 nt, Homo sapiens
  misc_RNA (1)...(19): siRNA sense strand
cgaaagaauggugucaaug

SEQ ID NO: 1184292 - RNA, 19 nt, Homo sapiens
  misc_RNA (1)...(19): siRNA sense strand
gcaacaccaagugcaaaga

SEQ ID NO: 1184293 - RNA, 19 nt, Homo sapiens
  misc_RNA (1)...(19): siRNA sense strand
caacaccaagugcaaagag

SEQ ID NO: 1184294 - RNA, 19 nt, Homo sapiens
  misc_RNA (1)...(19): siRNA sense strand
gagaaaauucagacuauca

SEQ ID NO: 1184295 - RNA, 19 nt, Homo sapiens
  misc_RNA (1)...(19): siRNA sense strand
aagaagcguaugacacauu

SEQ ID NO: 1184296 - RNA, 19 nt, Homo sapiens
  misc_RNA (1)...(19): siRNA sense strand
caagacacagcagaacaga

SEQ ID NO: 1184297 - RNA, 19 nt, Homo sapiens
  misc_RNA (1)...(19): siRNA sense strand
ccuccuaccucugguucuu

SEQ ID NO: 1184298 - RNA, 19 nt, Homo sapiens
  misc_RNA (1)...(19): siRNA sense strand
caacuucauggaaagaaag

SEQ ID NO: 1184299 - RNA, 19 nt, Homo sapiens
  misc_RNA (1)...(19): siRNA sense strand
gcuagauuaucguccaaaa

SEQ ID NO: 1184300 - RNA, 19 nt, Homo sapiens
  misc_RNA (1)...(19): siRNA sense strand
uggcaucaacuucauggaa

SEQ ID NO: 1184301 - RNA, 19 nt, Homo sapiens
  misc_RNA (1)...(19): siRNA sense strand
cagcaacaccaagugcaaa

SEQ ID NO: 1184302 - RNA, 19 nt, Homo sapiens
  misc_RNA (1)...(19): siRNA sense strand
ucaacugcuucguaauugg

SEQ ID NO: 1184303 - RNA, 19 nt, Homo sapiens
  misc_RNA (1)...(19): siRNA sense strand
caaugaagccaaaauagau

SEQ ID NO: 1184304 - RNA, 19 nt, Homo sapiens
  misc_RNA (1)...(19): siRNA sense strand
uuaaugcccaagugacuga

SEQ ID NO: 1184305 - RNA, 19 nt, Homo sapiens
  misc_RNA (1)...(19): siRNA sense strand
ggaaggccugcaucaugau

SEQ ID NO: 1184306 - RNA, 19 nt, Homo sapiens
  misc_RNA (1)...(19): siRNA sense strand
cauuacuagugacucagaa

SEQ ID NO: 1184307 - RNA, 19 nt, Homo sapiens
  misc_RNA (1)...(19): siRNA sense strand
uucaacugcuucguaauug

SEQ ID NO: 1184308 - RNA, 19 nt, Homo sapiens
  misc_RNA (1)...(19): siRNA sense strand
aaugcacacucaccagcaa

SEQ ID NO: 1184309 - RNA, 19 nt, Homo sapiens
  misc_RNA (1)...(19): siRNA sense strand
ucagaaaugaaauccaaag

SEQ ID NO: 1184310 - RNA, 19 nt, Homo sapiens
  misc_RNA (1)...(19): siRNA sense strand
ccagcaacaccaagugcaa

SEQ ID NO: 1184311 - RNA, 19 nt, Homo sapiens
  misc_RNA (1)...(19): siRNA sense strand
gaauugaggaagacuguua

SEQ ID NO: 1184312 - RNA, 19 nt, Homo sapiens
  misc_RNA (1)...(19): siRNA sense strand
gaggaagacuguuacuaca

SEQ ID NO: 1184313 - RNA, 19 nt, Homo sapiens
  misc_RNA (1)...(19): siRNA sense strand
ggauuggaauugaggaaga

SEQ ID NO: 1184314 - RNA, 19 nt, Homo sapiens
  misc_RNA (1)...(19): siRNA sense strand
ugacugacaucaacuccaa

SEQ ID NO: 1184315 - RNA, 19 nt, Homo sapiens
  misc_RNA (1)...(19): siRNA sense strand
uggaaggccugcaucauga

SEQ ID NO: 1184316 - RNA, 19 nt, Homo sapiens
  misc_RNA (1)...(19): siRNA sense strand
uuacgucuguugcuagauu

SEQ ID NO: 1184317 - RNA, 19 nt, Homo sapiens
  misc_RNA (1)...(19): siRNA sense strand
ccaagugacugacaucaac

SEQ ID NO: 1184318 - RNA, 19 nt, Homo sapiens
  misc_RNA (1)...(19): siRNA sense strand
guucuuacgucuguugcua

SEQ ID NO: 1184319 - RNA, 19 nt, Homo sapiens
  misc_RNA (1)...(19): siRNA sense strand
ugaggaagacuguuacuac

SEQ ID NO: 1184320 - RNA, 19 nt, Homo sapiens
  misc_RNA (1)...(19): siRNA sense strand
ggccaauucugccauaagc

SEQ ID NO: 1184321 - RNA, 19 nt, Homo sapiens
  misc_RNA (1)...(19): siRNA sense strand
aacauggaaucaucaagga

SEQ ID NO: 1184322 - RNA, 19 nt, Homo sapiens
  misc_RNA (1)...(19): siRNA sense strand
uacgucuguugcuagauua

SEQ ID NO: 1184323 - RNA, 19 nt, Homo sapiens
  misc_RNA (1)...(19): siRNA sense strand
caucaacuccaagggauug

SEQ ID NO: 1184324 - RNA, 19 nt, Homo sapiens
  misc_RNA (1)...(19): siRNA sense strand
cauggaaucaucaaggaau

SEQ ID NO: 1184325 - RNA, 19 nt, Homo sapiens
  misc_RNA (1)...(19): siRNA sense strand
gcaacaccaagugcaaaga

SEQ ID NO: 1184326 - RNA, 19 nt, Homo sapiens
  misc_RNA (1)...(19): siRNA sense strand
caacaccaagugcaaagag

SEQ ID NO: 1184327 - RNA, 19 nt, Homo sapiens
  misc_RNA (1)...(19): siRNA sense strand
gcuagauuaucguccaaaa

SEQ ID NO: 1184328 - RNA, 19 nt, Homo sapiens
  misc_RNA (1)...(19): siRNA sense strand
ccuccuaccucugguucuu

SEQ ID NO: 1184329 - RNA, 19 nt, Homo sapiens
  misc_RNA (1)...(19): siRNA sense strand
cagcaacaccaagugcaaa

SEQ ID NO: 1184330 - RNA, 19 nt, Homo sapiens
  misc_RNA (1)...(19): siRNA sense strand
uuaaugcccaagugacuga

SEQ ID NO: 1184331 - RNA, 19 nt, Homo sapiens
  misc_RNA (1)...(19): siRNA sense strand
ggaaggccugcaucaugau

SEQ ID NO: 1184332 - RNA, 19 nt, Homo sapiens
  misc_RNA (1)...(19): siRNA sense strand
aaugcacacucaccagcaa

SEQ ID NO: 1184333 - RNA, 19 nt, Homo sapiens
  misc_RNA (1)...(19): siRNA sense strand
ccagcaacaccaagugcaa

SEQ ID NO: 1184334 - RNA, 19 nt, Homo sapiens
  misc_RNA (1)...(19): siRNA sense strand
gaauugaggaagacuguua

SEQ ID NO: 1184335 - RNA, 19 nt, Homo sapiens
  misc_RNA (1)...(19): siRNA sense strand
gaggaagacuguuacuaca

SEQ ID NO: 1184336 - RNA, 19 nt, Homo sapiens
  misc_RNA (1)...(19): siRNA sense strand
ggauuggaauugaggaaga

SEQ ID NO: 1184337 - RNA, 19 nt, Homo sapiens
  misc_RNA (1)...(19): siRNA sense strand
ugacugacaucaacuccaa

SEQ ID NO: 1184338 - RNA, 19 nt, Homo sapiens
  misc_RNA (1)...(19): siRNA sense strand
uggaaggccugcaucauga

SEQ ID NO: 1184339 - RNA, 19 nt, Homo sapiens
  misc_RNA (1)...(19): siRNA sense strand
uuacgucuguugcuagauu

SEQ ID NO: 1184340 - RNA, 19 nt, Homo sapiens
  misc_RNA (1)...(19): siRNA sense strand
ccaagugacugacaucaac

SEQ ID NO: 1184341 - RNA, 19 nt, Homo sapiens
  misc_RNA (1)...(19): siRNA sense strand
guucuuacgucuguugcua

SEQ ID NO: 1184342 - RNA, 19 nt, Homo sapiens
  misc_RNA (1)...(19): siRNA sense strand
ugaggaagacuguuacuac

SEQ ID NO: 1184343 - RNA, 19 nt, Homo sapiens
  misc_RNA (1)...(19): siRNA sense strand
ggccaauucugccauaagc

SEQ ID NO: 1184344 - RNA, 19 nt, Homo sapiens
  misc_RNA (1)...(19): siRNA sense strand
aacauggaaucaucaagga

SEQ ID NO: 1184345 - RNA, 19 nt, Homo sapiens
  misc_RNA (1)...(19): siRNA sense strand
uacgucuguugcuagauua

SEQ ID NO: 1184346 - RNA, 19 nt, Homo sapiens
  misc_RNA (1)...(19): siRNA sense strand
caucaacuccaagggauug

SEQ ID NO: 1184347 - RNA, 19 nt, Homo sapiens
  misc_RNA (1)...(19): siRNA sense strand
cauggaaucaucaaggaau

SEQ ID NO: 1184348 - RNA, 19 nt, Homo sapiens
  misc_RNA (1)...(19): siRNA sense strand
gcaacaccaagugcaaaga

SEQ ID NO: 1184349 - RNA, 19 nt, Homo sapiens
  misc_RNA (1)...(19): siRNA sense strand
caacaccaagugcaaagag

SEQ ID NO: 1184350 - RNA, 19 nt, Homo sapiens
  misc_RNA (1)...(19): siRNA sense strand
gcuagauuaucguccaaaa

SEQ ID NO: 1184351 - RNA, 19 nt, Homo sapiens
  misc_RNA (1)...(19): siRNA sense strand
ccuccuaccucugguucuu

SEQ ID NO: 1184352 - RNA, 19 nt, Homo sapiens
  misc_RNA (1)...(19): siRNA sense strand
cagcaacaccaagugcaaa

SEQ ID NO: 1184353 - RNA, 19 nt, Homo sapiens
  misc_RNA (1)...(19): siRNA sense strand
uuaaugcccaagugacuga

SEQ ID NO: 1184354 - RNA, 19 nt, Homo sapiens
  misc_RNA (1)...(19): siRNA sense strand
ggaaggccugcaucaugau

SEQ ID NO: 1184355 - RNA, 19 nt, Homo sapiens
  misc_RNA (1)...(19): siRNA sense strand
aaugcacacucaccagcaa

SEQ ID NO: 1184356 - RNA, 19 nt, Homo sapiens
  misc_RNA (1)...(19): siRNA sense strand
ccagcaacaccaagugcaa

SEQ ID NO: 1184357 - RNA, 19 nt, Homo sapiens
  misc_RNA (1)...(19): siRNA sense strand
gaauugaggaagacuguua

SEQ ID NO: 1184358 - RNA, 19 nt, Homo sapiens
  misc_RNA (1)...(19): siRNA sense strand
gaggaagacuguuacuaca

SEQ ID NO: 1184359 - RNA, 19 nt, Homo sapiens
  misc_RNA (1)...(19): siRNA sense strand
ggauuggaauugaggaaga

SEQ ID NO: 1184360 - RNA, 19 nt, Homo sapiens
  misc_RNA (1)...(19): siRNA sense strand
ugacugacaucaacuccaa

SEQ ID NO: 1184361 - RNA, 19 nt, Homo sapiens
  misc_RNA (1)...(19): siRNA sense strand
uggaaggccugcaucauga

SEQ ID NO: 1184362 - RNA, 19 nt, Homo sapiens
  misc_RNA (1)...(19): siRNA sense strand
uuacgucuguugcuagauu

SEQ ID NO: 1184363 - RNA, 19 nt, Homo sapiens
  misc_RNA (1)...(19): siRNA sense strand
ccaagugacugacaucaac

SEQ ID NO: 1184364 - RNA, 19 nt, Homo sapiens
  misc_RNA (1)...(19): siRNA sense strand
guucuuacgucuguugcua

SEQ ID NO: 1184365 - RNA, 19 nt, Homo sapiens
  misc_RNA (1)...(19): siRNA sense strand
ugaggaagacuguuacuac

SEQ ID NO: 1184366 - RNA, 19 nt, Homo sapiens
  misc_RNA (1)...(19): siRNA sense strand
ggccaauucugccauaagc

SEQ ID NO: 1184367 - RNA, 19 nt, Homo sapiens
  misc_RNA (1)...(19): siRNA sense strand
aacauggaaucaucaagga

SEQ ID NO: 1184368 - RNA, 19 nt, Homo sapiens
  misc_RNA (1)...(19): siRNA sense strand
uacgucuguugcuagauua

SEQ ID NO: 1184369 - RNA, 19 nt, Homo sapiens
  misc_RNA (1)...(19): siRNA sense strand
caucaacuccaagggauug

SEQ ID NO: 1184370 - RNA, 19 nt, Homo sapiens
  misc_RNA (1)...(19): siRNA sense strand
cauggaaucaucaaggaau

SEQ ID NO: 1184371 - RNA, 19 nt, Homo sapiens
  misc_RNA (1)...(19): siRNA sense strand
gcaacaccaagugcaaaga

SEQ ID NO: 1184372 - RNA, 19 nt, Homo sapiens
  misc_RNA (1)...(19): siRNA sense strand
caacaccaagugcaaagag

SEQ ID NO: 1184373 - RNA, 19 nt, Homo sapiens
  misc_RNA (1)...(19): siRNA sense strand
gcuagauuaucguccaaaa

SEQ ID NO: 1184374 - RNA, 19 nt, Homo sapiens
  misc_RNA (1)...(19): siRNA sense strand
ccuccuaccucugguucuu

SEQ ID NO: 1184375 - RNA, 19 nt, Homo sapiens
  misc_RNA (1)...(19): siRNA sense strand
cagcaacaccaagugcaaa

SEQ ID NO: 1184376 - RNA, 19 nt, Homo sapiens
  misc_RNA (1)...(19): siRNA sense strand
uuaaugcccaagugacuga

SEQ ID NO: 1184377 - RNA, 19 nt, Homo sapiens
  misc_RNA (1)...(19): siRNA sense strand
ggaaggccugcaucaugau

SEQ ID NO: 1184378 - RNA, 19 nt, Homo sapiens
  misc_RNA (1)...(19): siRNA sense strand
aaugcacacucaccagcaa

SEQ ID NO: 1184379 - RNA, 19 nt, Homo sapiens
  misc_RNA (1)...(19): siRNA sense strand
ccagcaacaccaagugcaa

SEQ ID NO: 1184380 - RNA, 19 nt, Homo sapiens
  misc_RNA (1)...(19): siRNA sense strand
gaauugaggaagacuguua

SEQ ID NO: 1184381 - RNA, 19 nt, Homo sapiens
  misc_RNA (1)...(19): siRNA sense strand
gaggaagacuguuacuaca

SEQ ID NO: 1184382 - RNA, 19 nt, Homo sapiens
  misc_RNA (1)...(19): siRNA sense strand
ggauuggaauugaggaaga

SEQ ID NO: 1184383 - RNA, 19 nt, Homo sapiens
  misc_RNA (1)...(19): siRNA sense strand
ugacugacaucaacuccaa

SEQ ID NO: 1184384 - RNA, 19 nt, Homo sapiens
  misc_RNA (1)...(19): siRNA sense strand
uggaaggccugcaucauga

SEQ ID NO: 1184385 - RNA, 19 nt, Homo sapiens
  misc_RNA (1)...(19): siRNA sense strand
uuacgucuguugcuagauu

SEQ ID NO: 1184386 - RNA, 19 nt, Homo sapiens
  misc_RNA (1)...(19): siRNA sense strand
ccaagugacugacaucaac

SEQ ID NO: 1184387 - RNA, 19 nt, Homo sapiens
  misc_RNA (1)...(19): siRNA sense strand
guucuuacgucuguugcua

SEQ ID NO: 1184388 - RNA, 19 nt, Homo sapiens
  misc_RNA (1)...(19): siRNA sense strand
ugaggaagacuguuacuac

SEQ ID NO: 1184389 - RNA, 19 nt, Homo sapiens
  misc_RNA (1)...(19): siRNA sense strand
ggccaauucugccauaagc

SEQ ID NO: 1184390 - RNA, 19 nt, Homo sapiens
  misc_RNA (1)...(19): siRNA sense strand
aacauggaaucaucaagga

SEQ ID NO: 1184391 - RNA, 19 nt, Homo sapiens
  misc_RNA (1)...(19): siRNA sense strand
uacgucuguugcuagauua

SEQ ID NO: 1184392 - RNA, 19 nt, Homo sapiens
  misc_RNA (1)...(19): siRNA sense strand
caucaacuccaagggauug

SEQ ID NO: 1184393 - RNA, 19 nt, Homo sapiens
  misc_RNA (1)...(19): siRNA sense strand
cauggaaucaucaaggaau

SEQ ID NO: 1184394 - RNA, 19 nt, Homo sapiens
  misc_RNA (1)...(19): siRNA sense strand
gcaacaccaagugcaaaga

SEQ ID NO: 1184395 - RNA, 19 nt, Homo sapiens
  misc_RNA (1)...(19): siRNA sense strand
caacaccaagugcaaagag

SEQ ID NO: 1184396 - RNA, 19 nt, Homo sapiens
  misc_RNA (1)...(19): siRNA sense strand
gcuagauuaucguccaaaa

SEQ ID NO: 1184397 - RNA, 19 nt, Homo sapiens
  misc_RNA (1)...(19): siRNA sense strand
ccuccuaccucugguucuu

SEQ ID NO: 1184398 - RNA, 19 nt, Homo sapiens
  misc_RNA (1)...(19): siRNA sense strand
cagcaacaccaagugcaaa

SEQ ID NO: 1184399 - RNA, 19 nt, Homo sapiens
  misc_RNA (1)...(19): siRNA sense strand
uuaaugcccaagugacuga

SEQ ID NO: 1184400 - RNA, 19 nt, Homo sapiens
  misc_RNA (1)...(19): siRNA sense strand
ggaaggccugcaucaugau

SEQ ID NO: 1184401 - RNA, 19 nt, Homo sapiens
  misc_RNA (1)...(19): siRNA sense strand
aaugcacacucaccagcaa

SEQ ID NO: 1184402 - RNA, 19 nt, Homo sapiens
  misc_RNA (1)...(19): siRNA sense strand
ccagcaacaccaagugcaa

SEQ ID NO: 1184403 - RNA, 19 nt, Homo sapiens
  misc_RNA (1)...(19): siRNA sense strand
gaauugaggaagacuguua

SEQ ID NO: 1184404 - RNA, 19 nt, Homo sapiens
  misc_RNA (1)...(19): siRNA sense strand
gaggaagacuguuacuaca

SEQ ID NO: 1184405 - RNA, 19 nt, Homo sapiens
  misc_RNA (1)...(19): siRNA sense strand
ggauuggaauugaggaaga

SEQ ID NO: 1184406 - RNA, 19 nt, Homo sapiens
  misc_RNA (1)...(19): siRNA sense strand
ugacugacaucaacuccaa

SEQ ID NO: 1184407 - RNA, 19 nt, Homo sapiens
  misc_RNA (1)...(19): siRNA sense strand
uggaaggccugcaucauga

SEQ ID NO: 1184408 - RNA, 19 nt, Homo sapiens
  misc_RNA (1)...(19): siRNA sense strand
uuacgucuguugcuagauu

SEQ ID NO: 1184409 - RNA, 19 nt, Homo sapiens
  misc_RNA (1)...(19): siRNA sense strand
ccaagugacugacaucaac

SEQ ID NO: 1184410 - RNA, 19 nt, Homo sapiens
  misc_RNA (1)...(19): siRNA sense strand
guucuuacgucuguugcua

SEQ ID NO: 1184411 - RNA, 19 nt, Homo sapiens
  misc_RNA (1)...(19): siRNA sense strand
ugaggaagacuguuacuac

SEQ ID NO: 1184412 - RNA, 19 nt, Homo sapiens
  misc_RNA (1)...(19): siRNA sense strand
ggccaauucugccauaagc

SEQ ID NO: 1184413 - RNA, 19 nt, Homo sapiens
  misc_RNA (1)...(19): siRNA sense strand
aacauggaaucaucaagga

SEQ ID NO: 1184414 - RNA, 19 nt, Homo sapiens
  misc_RNA (1)...(19): siRNA sense strand
uacgucuguugcuagauua

SEQ ID NO: 1184415 - RNA, 19 nt, Homo sapiens
  misc_RNA (1)...(19): siRNA sense strand
caucaacuccaagggauug

SEQ ID NO: 1184416 - RNA, 19 nt, Homo sapiens
  misc_RNA (1)...(19): siRNA sense strand
cauggaaucaucaaggaau

SEQ ID NO: 1184417 - RNA, 19 nt, Homo sapiens
  misc_RNA (1)...(19): siRNA sense strand
gcaacaccaagugcaaaga

SEQ ID NO: 1184418 - RNA, 19 nt, Homo sapiens
  misc_RNA (1)...(19): siRNA sense strand
caacaccaagugcaaagag

SEQ ID NO: 1184419 - RNA, 19 nt, Homo sapiens
  misc_RNA (1)...(19): siRNA sense strand
gcuagauuaucguccaaaa

SEQ ID NO: 1184420 - RNA, 19 nt, Homo sapiens
  misc_RNA (1)...(19): siRNA sense strand
ccuccuaccucugguucuu

SEQ ID NO: 1184421 - RNA, 19 nt, Homo sapiens
  misc_RNA (1)...(19): siRNA sense strand
cagcaacaccaagugcaaa

SEQ ID NO: 1184422 - RNA, 19 nt, Homo sapiens
  misc_RNA (1)...(19): siRNA sense strand
uuaaugcccaagugacuga

SEQ ID NO: 1184423 - RNA, 19 nt, Homo sapiens
  misc_RNA (1)...(19): siRNA sense strand
ggaaggccugcaucaugau

SEQ ID NO: 1184424 - RNA, 19 nt, Homo sapiens
  misc_RNA (1)...(19): siRNA sense strand
aaugcacacucaccagcaa

SEQ ID NO: 1184425 - RNA, 19 nt, Homo sapiens
  misc_RNA (1)...(19): siRNA sense strand
ccagcaacaccaagugcaa

SEQ ID NO: 1184426 - RNA, 19 nt, Homo sapiens
  misc_RNA (1)...(19): siRNA sense strand
gaauugaggaagacuguua

SEQ ID NO: 1184427 - RNA, 19 nt, Homo sapiens
  misc_RNA (1)...(19): siRNA sense strand
gaggaagacuguuacuaca

SEQ ID NO: 1184428 - RNA, 19 nt, Homo sapiens
  misc_RNA (1)...(19): siRNA sense strand
ggauuggaauugaggaaga

SEQ ID NO: 1184429 - RNA, 19 nt, Homo sapiens
  misc_RNA (1)...(19): siRNA sense strand
ugacugacaucaacuccaa

SEQ ID NO: 1184430 - RNA, 19 nt, Homo sapiens
  misc_RNA (1)...(19): siRNA sense strand
uggaaggccugcaucauga

SEQ ID NO: 1184431 - RNA, 19 nt, Homo sapiens
  misc_RNA (1)...(19): siRNA sense strand
uuacgucuguugcuagauu

SEQ ID NO: 1184432 - RNA, 19 nt, Homo sapiens
  misc_RNA (1)...(19): siRNA sense strand
ccaagugacugacaucaac

SEQ ID NO: 1184433 - RNA, 19 nt, Homo sapiens
  misc_RNA (1)...(19): siRNA sense strand
guucuuacgucuguugcua

SEQ ID NO: 1184434 - RNA, 19 nt, Homo sapiens
  misc_RNA (1)...(19): siRNA sense strand
ugaggaagacuguuacuac

SEQ ID NO: 1184435 - RNA, 19 nt, Homo sapiens
  misc_RNA (1)...(19): siRNA sense strand
ggccaauucugccauaagc

SEQ ID NO: 1184436 - RNA, 19 nt, Homo sapiens
  misc_RNA (1)...(19): siRNA sense strand
aacauggaaucaucaagga

SEQ ID NO: 1184437 - RNA, 19 nt, Homo sapiens
  misc_RNA (1)...(19): siRNA sense strand
uacgucuguugcuagauua

SEQ ID NO: 1184438 - RNA, 19 nt, Homo sapiens
  misc_RNA (1)...(19): siRNA sense strand
caucaacuccaagggauug

SEQ ID NO: 1184439 - RNA, 19 nt, Homo sapiens
  misc_RNA (1)...(19): siRNA sense strand
cauggaaucaucaaggaau

SEQ ID NO: 1184440 - RNA, 19 nt, Homo sapiens
  misc_RNA (1)...(19): siRNA sense strand
gcaacaccaagugcaaaga

SEQ ID NO: 1184441 - RNA, 19 nt, Homo sapiens
  misc_RNA (1)...(19): siRNA sense strand
caacaccaagugcaaagag

SEQ ID NO: 1184442 - RNA, 19 nt, Homo sapiens
  misc_RNA (1)...(19): siRNA sense strand
gcuagauuaucguccaaaa

SEQ ID NO: 1184443 - RNA, 19 nt, Homo sapiens
  misc_RNA (1)...(19): siRNA sense strand
ccuccuaccucugguucuu

SEQ ID NO: 1184444 - RNA, 19 nt, Homo sapiens
  misc_RNA (1)...(19): siRNA sense strand
cagcaacaccaagugcaaa

SEQ ID NO: 1184445 - RNA, 19 nt, Homo sapiens
  misc_RNA (1)...(19): siRNA sense strand
uuaaugcccaagugacuga

SEQ ID NO: 1184446 - RNA, 19 nt, Homo sapiens
  misc_RNA (1)...(19): siRNA sense strand
ggaaggccugcaucaugau

SEQ ID NO: 1184447 - RNA, 19 nt, Homo sapiens
  misc_RNA (1)...(19): siRNA sense strand
aaugcacacucaccagcaa

SEQ ID NO: 1184448 - RNA, 19 nt, Homo sapiens
  misc_RNA (1)...(19): siRNA sense strand
ccagcaacaccaagugcaa

SEQ ID NO: 1184449 - RNA, 19 nt, Homo sapiens
  misc_RNA (1)...(19): siRNA sense strand
gaucuucacugcagacuua

SEQ ID NO: 1184450 - RNA, 19 nt, Homo sapiens
  misc_RNA (1)...(19): siRNA sense strand
gaacuuaccuucaacuaca

SEQ ID NO: 1184451 - RNA, 19 nt, Homo sapiens
  misc_RNA (1)...(19): siRNA sense strand
gaaaguaaacgucaaagaa

SEQ ID NO: 1184452 - RNA, 19 nt, Homo sapiens
  misc_RNA (1)...(19): siRNA sense strand
gauauuugcuccuaagaaa

SEQ ID NO: 1184453 - RNA, 19 nt, Homo sapiens
  misc_RNA (1)...(19): siRNA sense strand
ggacgagaauucuuugauu

SEQ ID NO: 1184454 - RNA, 19 nt, Homo sapiens
  misc_RNA (1)...(19): siRNA sense strand
gaacugcaguggcuucuug

SEQ ID NO: 1184455 - RNA, 19 nt, Homo sapiens
  misc_RNA (1)...(19): siRNA sense strand
gcaaguggcuuuuggaaua

SEQ ID NO: 1184456 - RNA, 19 nt, Homo sapiens
  misc_RNA (1)...(19): siRNA sense strand
gaacuacccagaagaaauu

SEQ ID NO: 1184457 - RNA, 19 nt, Homo sapiens
  misc_RNA (1)...(19): siRNA sense strand
gaaggaaacugguauugca

SEQ ID NO: 1184458 - RNA, 19 nt, Homo sapiens
  misc_RNA (1)...(19): siRNA sense strand
aaacagaagccucucauua

SEQ ID NO: 1184459 - RNA, 19 nt, Homo sapiens
  misc_RNA (1)...(19): siRNA sense strand
uaagacagcugcaggaaga

SEQ ID NO: 1184460 - RNA, 19 nt, Homo sapiens
  misc_RNA (1)...(19): siRNA sense strand
gcuuauagaugaagaagaa

SEQ ID NO: 1184461 - RNA, 19 nt, Homo sapiens
  misc_RNA (1)...(19): siRNA sense strand
gugaagcucugcuauauug

SEQ ID NO: 1184462 - RNA, 19 nt, Homo sapiens
  misc_RNA (1)...(19): siRNA sense strand
gccgagagcuguugagaaa

SEQ ID NO: 1184463 - RNA, 19 nt, Homo sapiens
  misc_RNA (1)...(19): siRNA sense strand
gaaagacuguuugcaaaug

SEQ ID NO: 1184464 - RNA, 19 nt, Homo sapiens
  misc_RNA (1)...(19): siRNA sense strand
gaucaaagccuucauccaa

SEQ ID NO: 1184465 - RNA, 19 nt, Homo sapiens
  misc_RNA (1)...(19): siRNA sense strand
gaaaguggauggucuaaaa

SEQ ID NO: 1184466 - RNA, 19 nt, Homo sapiens
  misc_RNA (1)...(19): siRNA sense strand
agugagaacucguuaauaa

SEQ ID NO: 1184467 - RNA, 19 nt, Homo sapiens
  misc_RNA (1)...(19): siRNA sense strand
gacaaacccucuccaguga

SEQ ID NO: 1184468 - RNA, 19 nt, Homo sapiens
  misc_RNA (1)...(19): siRNA sense strand
gaucagauauuugcuccua

SEQ ID NO: 1184469 - RNA, 19 nt, Homo sapiens
  misc_RNA (1)...(19): siRNA sense strand
gaaggcaucuacucuuguu

SEQ ID NO: 1184470 - RNA, 19 nt, Homo sapiens
  misc_RNA (1)...(19): siRNA sense strand
gaauggagauacccgugua

SEQ ID NO: 1184471 - RNA, 19 nt, Homo sapiens
  misc_RNA (1)...(19): siRNA sense strand
gaacauugauaucccugaa

SEQ ID NO: 1184472 - RNA, 19 nt, Homo sapiens
  misc_RNA (1)...(19): siRNA sense strand
gacgagaauucuuugauuu

SEQ ID NO: 1184473 - RNA, 19 nt, Homo sapiens
  misc_RNA (1)...(19): siRNA sense strand
gaaccagacuacaaauuca

SEQ ID NO: 1184474 - RNA, 19 nt, Homo sapiens
  misc_RNA (1)...(19): siRNA sense strand
ugaaagauaugcaugauag

SEQ ID NO: 1184475 - RNA, 19 nt, Homo sapiens
  misc_RNA (1)...(19): siRNA sense strand
guaggagucucuaagguuu

SEQ ID NO: 1184476 - RNA, 19 nt, Homo sapiens
  misc_RNA (1)...(19): siRNA sense strand
agaaagagcucugauaauc

SEQ ID NO: 1184477 - RNA, 19 nt, Homo sapiens
  misc_RNA (1)...(19): siRNA sense strand
gcagagcaaucaacaggaa

SEQ ID NO: 1184478 - RNA, 19 nt, Homo sapiens
  misc_RNA (1)...(19): siRNA sense strand
gagcuggacucuguaauga

SEQ ID NO: 1184479 - RNA, 19 nt, Homo sapiens
  misc_RNA (1)...(19): siRNA sense strand
gaacaucaaagccaucaaa

SEQ ID NO: 1184480 - RNA, 19 nt, Homo sapiens
  misc_RNA (1)...(19): siRNA sense strand
gcauaagguuccucagaaa

SEQ ID NO: 1184481 - RNA, 19 nt, Homo sapiens
  misc_RNA (1)...(19): siRNA sense strand
uaaaucaaguggugccuaa

SEQ ID NO: 1184482 - RNA, 19 nt, Homo sapiens
  misc_RNA (1)...(19): siRNA sense strand
cgaagugauuccauuagua

SEQ ID NO: 1184483 - RNA, 19 nt, Homo sapiens
  misc_RNA (1)...(19): siRNA sense strand
ccagacagacugcucauua

SEQ ID NO: 1184484 - RNA, 19 nt, Homo sapiens
  misc_RNA (1)...(19): siRNA sense strand
gagcugcacucaaggagaa

SEQ ID NO: 1184485 - RNA, 19 nt, Homo sapiens
  misc_RNA (1)...(19): siRNA sense strand
ugaaucagcuuccaagugu

SEQ ID NO: 1184486 - RNA, 19 nt, Homo sapiens
  misc_RNA (1)...(19): siRNA sense strand
cagccaagaugcaguguaa

SEQ ID NO: 1184487 - RNA, 19 nt, Homo sapiens
  misc_RNA (1)...(19): siRNA sense strand
cagagaacauguuaucuau

SEQ ID NO: 1184488 - RNA, 19 nt, Homo sapiens
  misc_RNA (1)...(19): siRNA sense strand
caaggagacuguugaggaa

SEQ ID NO: 1184489 - RNA, 19 nt, Homo sapiens
  misc_RNA (1)...(19): siRNA sense strand
aagaagauaugccauuuga

SEQ ID NO: 1184490 - RNA, 19 nt, Homo sapiens
  misc_RNA (1)...(19): siRNA sense strand
caaauucaguacauugcua

SEQ ID NO: 1184491 - RNA, 19 nt, Homo sapiens
  misc_RNA (1)...(19): siRNA sense strand
ugaagaagauaugccauuu

SEQ ID NO: 1184492 - RNA, 19 nt, Homo sapiens
  misc_RNA (1)...(19): siRNA sense strand
gaucagaccugugaacuac

SEQ ID NO: 1184493 - RNA, 19 nt, Homo sapiens
  misc_RNA (1)...(19): siRNA sense strand
ggauucaagugacauagaa

SEQ ID NO: 1184494 - RNA, 19 nt, Homo sapiens
  misc_RNA (1)...(19): siRNA sense strand
gaagauaugccauuugaag

SEQ ID NO: 1184495 - RNA, 19 nt, Homo sapiens
  misc_RNA (1)...(19): siRNA sense strand
gaagugauuccauuaguau

SEQ ID NO: 1184496 - RNA, 19 nt, Homo sapiens
  misc_RNA (1)...(19): siRNA sense strand
caaaggagcgagaagauga

SEQ ID NO: 1184497 - RNA, 19 nt, Homo sapiens
  misc_RNA (1)...(19): siRNA sense strand
gggccacgguuaaauguuu

SEQ ID NO: 1184498 - RNA, 19 nt, Homo sapiens
  misc_RNA (1)...(19): siRNA sense strand
ggcagaagauccuaguaaa

SEQ ID NO: 1184499 - RNA, 19 nt, Homo sapiens
  misc_RNA (1)...(19): siRNA sense strand
gagaacauguuaucuaugc

SEQ ID NO: 1184500 - RNA, 19 nt, Homo sapiens
  misc_RNA (1)...(19): siRNA sense strand
uaggaaacaugcuagaauu

SEQ ID NO: 1184501 - RNA, 19 nt, Homo sapiens
  misc_RNA (1)...(19): siRNA sense strand
gaagaugaguguuuuaguu

SEQ ID NO: 1184502 - RNA, 19 nt, Homo sapiens
  misc_RNA (1)...(19): siRNA sense strand
ugggugagcuuauagauga

SEQ ID NO: 1184503 - RNA, 19 nt, Homo sapiens
  misc_RNA (1)...(19): siRNA sense strand
agaagccucucauuaguaa

SEQ ID NO: 1184504 - RNA, 19 nt, Homo sapiens
  misc_RNA (1)...(19): siRNA sense strand
gaagagcuaccuguccuua

SEQ ID NO: 1184505 - RNA, 19 nt, Homo sapiens
  misc_RNA (1)...(19): siRNA sense strand
guucugauccguugauuaa

SEQ ID NO: 1184506 - RNA, 19 nt, Homo sapiens
  misc_RNA (1)...(19): siRNA sense strand
agacaaagaccgaaucauu

SEQ ID NO: 1184507 - RNA, 19 nt, Homo sapiens
  misc_RNA (1)...(19): siRNA sense strand
cagcaagguuugaggaauu

SEQ ID NO: 1184508 - RNA, 19 nt, Homo sapiens
  misc_RNA (1)...(19): siRNA sense strand
caucugcccuaaucacuuu

SEQ ID NO: 1184509 - RNA, 19 nt, Homo sapiens
  misc_RNA (1)...(19): siRNA sense strand
gagaauggcauaacugaau

SEQ ID NO: 1184510 - RNA, 19 nt, Homo sapiens
  misc_RNA (1)...(19): siRNA sense strand
gaaccuuggccuaaacuuu

SEQ ID NO: 1184511 - RNA, 19 nt, Homo sapiens
  misc_RNA (1)...(19): siRNA sense strand
ggcauaagguuccucagaa

SEQ ID NO: 1184512 - RNA, 19 nt, Homo sapiens
  misc_RNA (1)...(19): siRNA sense strand
gaaaagcaaucgucauguu

SEQ ID NO: 1184513 - RNA, 19 nt, Homo sapiens
  misc_RNA (1)...(19): siRNA sense strand
gaaguggucugugaaugga

SEQ ID NO: 1184514 - RNA, 19 nt, Homo sapiens
  misc_RNA (1)...(19): siRNA sense strand
agaauuaccuggaacuuca

SEQ ID NO: 1184515 - RNA, 19 nt, Homo sapiens
  misc_RNA (1)...(19): siRNA sense strand
acaagaagccaccaccuua

SEQ ID NO: 1184516 - RNA, 19 nt, Homo sapiens
  misc_RNA (1)...(19): siRNA sense strand
cuaaugaacuuuccaggau

SEQ ID NO: 1184517 - RNA, 19 nt, Homo sapiens
  misc_RNA (1)...(19): siRNA sense strand
gagaagagggaaacagaaa

SEQ ID NO: 1184518 - RNA, 19 nt, Homo sapiens
  misc_RNA (1)...(19): siRNA sense strand
gacaaagaccgaaucauug

SEQ ID NO: 1184519 - RNA, 19 nt, Homo sapiens
  misc_RNA (1)...(19): siRNA sense strand
ucugaggaauugcuaguua

SEQ ID NO: 1184520 - RNA, 19 nt, Homo sapiens
  misc_RNA (1)...(19): siRNA sense strand
gagaagaaacgccuuagga

SEQ ID NO: 1184521 - RNA, 19 nt, Homo sapiens
  misc_RNA (1)...(19): siRNA sense strand
gcaaucugauccugguaaa

SEQ ID NO: 1184522 - RNA, 19 nt, Homo sapiens
  misc_RNA (1)...(19): siRNA sense strand
guuaaucucucugaucuga

SEQ ID NO: 1184523 - RNA, 19 nt, Homo sapiens
  misc_RNA (1)...(19): siRNA sense strand
cuacgccacugaaguauga

SEQ ID NO: 1184524 - RNA, 19 nt, Homo sapiens
  misc_RNA (1)...(19): siRNA sense strand
gauaaugggccacuuaaca

SEQ ID NO: 1184525 - RNA, 19 nt, Homo sapiens
  misc_RNA (1)...(19): siRNA sense strand
aaacagcaguggugaaaca

SEQ ID NO: 1184526 - RNA, 19 nt, Homo sapiens
  misc_RNA (1)...(19): siRNA sense strand
uaaugaacuuuccaggaua

SEQ ID NO: 1184527 - RNA, 19 nt, Homo sapiens
  misc_RNA (1)...(19): siRNA sense strand
cuuaauggcuguuugaaau

SEQ ID NO: 1184528 - RNA, 19 nt, Homo sapiens
  misc_RNA (1)...(19): siRNA sense strand
gaagagggaaacagaaaga

SEQ ID NO: 1184529 - RNA, 19 nt, Homo sapiens
  misc_RNA (1)...(19): siRNA sense strand
ugaacaauaugcaugagaa

SEQ ID NO: 1184530 - RNA, 19 nt, Homo sapiens
  misc_RNA (1)...(19): siRNA sense strand
agacaggccuacugacaaa

SEQ ID NO: 1184531 - RNA, 19 nt, Homo sapiens
  misc_RNA (1)...(19): siRNA sense strand
gcaggaagaccgaaagaau

SEQ ID NO: 1184532 - RNA, 19 nt, Homo sapiens
  misc_RNA (1)...(19): siRNA sense strand
ggaaacugguauugcaaug

SEQ ID NO: 1184533 - RNA, 19 nt, Homo sapiens
  misc_RNA (1)...(19): siRNA sense strand
guaagcgcaugaacagauu

SEQ ID NO: 1184534 - RNA, 19 nt, Homo sapiens
  misc_RNA (1)...(19): siRNA sense strand
ucacauaccuauugaacca

SEQ ID NO: 1184535 - RNA, 19 nt, Homo sapiens
  misc_RNA (1)...(19): siRNA sense strand
ggaacuucaucaucaucua

SEQ ID NO: 1184536 - RNA, 19 nt, Homo sapiens
  misc_RNA (1)...(19): siRNA sense strand
gugaauuugugaaugagua

SEQ ID NO: 1184537 - RNA, 19 nt, Homo sapiens
  misc_RNA (1)...(19): siRNA sense strand
aauguuagcuggugcuuug

SEQ ID NO: 1184538 - RNA, 19 nt, Homo sapiens
  misc_RNA (1)...(19): siRNA sense strand
caaucaaguuggacaguga

SEQ ID NO: 1184539 - RNA, 19 nt, Homo sapiens
  misc_RNA (1)...(19): siRNA sense strand
uggaaagacuguuugcaaa

SEQ ID NO: 1184540 - RNA, 19 nt, Homo sapiens
  misc_RNA (1)...(19): siRNA sense strand
gauaagaugagacaugaug

SEQ ID NO: 1184541 - RNA, 19 nt, Homo sapiens
  misc_RNA (1)...(19): siRNA sense strand
gggcagaagauccuaguaa

SEQ ID NO: 1184542 - RNA, 19 nt, Homo sapiens
  misc_RNA (1)...(19): siRNA sense strand
gaaggaacucucuuacaga

SEQ ID NO: 1184543 - RNA, 19 nt, Homo sapiens
  misc_RNA (1)...(19): siRNA sense strand
cagaaucacauaccuauug

SEQ ID NO: 1184544 - RNA, 19 nt, Homo sapiens
  misc_RNA (1)...(19): siRNA sense strand
guaugugggugagcuuaua

SEQ ID NO: 1184545 - RNA, 19 nt, Homo sapiens
  misc_RNA (1)...(19): siRNA sense strand
guaaagcuacugaugagaa

SEQ ID NO: 1184546 - RNA, 19 nt, Homo sapiens
  misc_RNA (1)...(19): siRNA sense strand
gcacuaccaagauauuuga

SEQ ID NO: 1184547 - RNA, 19 nt, Homo sapiens
  misc_RNA (1)...(19): siRNA sense strand
uggcauaacugaaucuugu

SEQ ID NO: 1184548 - RNA, 19 nt, Homo sapiens
  misc_RNA (1)...(19): siRNA sense strand
caaagaagagccuccaguu

SEQ ID NO: 1184549 - RNA, 19 nt, Homo sapiens
  misc_RNA (1)...(19): siRNA sense strand
gaucuucacugcagacuua

SEQ ID NO: 1184550 - RNA, 19 nt, Homo sapiens
  misc_RNA (1)...(19): siRNA sense strand
gaacuuaccuucaacuaca

SEQ ID NO: 1184551 - RNA, 19 nt, Homo sapiens
  misc_RNA (1)...(19): siRNA sense strand
gaaaguaaacgucaaagaa

SEQ ID NO: 1184552 - RNA, 19 nt, Homo sapiens
  misc_RNA (1)...(19): siRNA sense strand
gauauuugcuccuaagaaa

SEQ ID NO: 1184553 - RNA, 19 nt, Homo sapiens
  misc_RNA (1)...(19): siRNA sense strand
ggacgagaauucuuugauu

SEQ ID NO: 1184554 - RNA, 19 nt, Homo sapiens
  misc_RNA (1)...(19): siRNA sense strand
gaacugcaguggcuucuug

SEQ ID NO: 1184555 - RNA, 19 nt, Homo sapiens
  misc_RNA (1)...(19): siRNA sense strand
gcaaguggcuuuuggaaua

SEQ ID NO: 1184556 - RNA, 19 nt, Homo sapiens
  misc_RNA (1)...(19): siRNA sense strand
aaacagaagccucucauua

SEQ ID NO: 1184557 - RNA, 19 nt, Homo sapiens
  misc_RNA (1)...(19): siRNA sense strand
gaaggaaacugguauugca

SEQ ID NO: 1184558 - RNA, 19 nt, Homo sapiens
  misc_RNA (1)...(19): siRNA sense strand
uaagacagcugcaggaaga

SEQ ID NO: 1184559 - RNA, 19 nt, Homo sapiens
  misc_RNA (1)...(19): siRNA sense strand
gcuuauagaugaagaagaa

SEQ ID NO: 1184560 - RNA, 19 nt, Homo sapiens
  misc_RNA (1)...(19): siRNA sense strand
gugaagcucugcuauauug

SEQ ID NO: 1184561 - RNA, 19 nt, Homo sapiens
  misc_RNA (1)...(19): siRNA sense strand
gccgagagcuguugagaaa

SEQ ID NO: 1184562 - RNA, 19 nt, Homo sapiens
  misc_RNA (1)...(19): siRNA sense strand
gaaagacuguuugcaaaug

SEQ ID NO: 1184563 - RNA, 19 nt, Homo sapiens
  misc_RNA (1)...(19): siRNA sense strand
gaucaaagccuucauccaa

SEQ ID NO: 1184564 - RNA, 19 nt, Homo sapiens
  misc_RNA (1)...(19): siRNA sense strand
gaaaguggauggucuaaaa

SEQ ID NO: 1184565 - RNA, 19 nt, Homo sapiens
  misc_RNA (1)...(19): siRNA sense strand
agugagaacucguuaauaa

SEQ ID NO: 1184566 - RNA, 19 nt, Homo sapiens
  misc_RNA (1)...(19): siRNA sense strand
gacaaacccucuccaguga

SEQ ID NO: 1184567 - RNA, 19 nt, Homo sapiens
  misc_RNA (1)...(19): siRNA sense strand
gaucagauauuugcuccua

SEQ ID NO: 1184568 - RNA, 19 nt, Homo sapiens
  misc_RNA (1)...(19): siRNA sense strand
gaaggcaucuacucuuguu

SEQ ID NO: 1184569 - RNA, 19 nt, Homo sapiens
  misc_RNA (1)...(19): siRNA sense strand
gaauggagauacccgugua

SEQ ID NO: 1184570 - RNA, 19 nt, Homo sapiens
  misc_RNA (1)...(19): siRNA sense strand
gaacauugauaucccugaa

SEQ ID NO: 1184571 - RNA, 19 nt, Homo sapiens
  misc_RNA (1)...(19): siRNA sense strand
gacgagaauucuuugauuu

SEQ ID NO: 1184572 - RNA, 19 nt, Homo sapiens
  misc_RNA (1)...(19): siRNA sense strand
gaaccagacuacaaauuca

SEQ ID NO: 1184573 - RNA, 19 nt, Homo sapiens
  misc_RNA (1)...(19): siRNA sense strand
ugaaagauaugcaugauag

SEQ ID NO: 1184574 - RNA, 19 nt, Homo sapiens
  misc_RNA (1)...(19): siRNA sense strand
guaggagucucuaagguuu

SEQ ID NO: 1184575 - RNA, 19 nt, Homo sapiens
  misc_RNA (1)...(19): siRNA sense strand
agaaagagcucugauaauc

SEQ ID NO: 1184576 - RNA, 19 nt, Homo sapiens
  misc_RNA (1)...(19): siRNA sense strand
gcagagcaaucaacaggaa

SEQ ID NO: 1184577 - RNA, 19 nt, Homo sapiens
  misc_RNA (1)...(19): siRNA sense strand
gagcuggacucuguaauga

SEQ ID NO: 1184578 - RNA, 19 nt, Homo sapiens
  misc_RNA (1)...(19): siRNA sense strand
gaacaucaaagccaucaaa

SEQ ID NO: 1184579 - RNA, 19 nt, Homo sapiens
  misc_RNA (1)...(19): siRNA sense strand
gcauaagguuccucagaaa

SEQ ID NO: 1184580 - RNA, 19 nt, Homo sapiens
  misc_RNA (1)...(19): siRNA sense strand
uaaaucaaguggugccuaa

SEQ ID NO: 1184581 - RNA, 19 nt, Homo sapiens
  misc_RNA (1)...(19): siRNA sense strand
cgaagugauuccauuagua

SEQ ID NO: 1184582 - RNA, 19 nt, Homo sapiens
  misc_RNA (1)...(19): siRNA sense strand
ccagacagacugcucauua

SEQ ID NO: 1184583 - RNA, 19 nt, Homo sapiens
  misc_RNA (1)...(19): siRNA sense strand
gagcugcacucaaggagaa

SEQ ID NO: 1184584 - RNA, 19 nt, Homo sapiens
  misc_RNA (1)...(19): siRNA sense strand
ugaaucagcuuccaagugu

SEQ ID NO: 1184585 - RNA, 19 nt, Homo sapiens
  misc_RNA (1)...(19): siRNA sense strand
cagccaagaugcaguguaa

SEQ ID NO: 1184586 - RNA, 19 nt, Homo sapiens
  misc_RNA (1)...(19): siRNA sense strand
cagagaacauguuaucuau

SEQ ID NO: 1184587 - RNA, 19 nt, Homo sapiens
  misc_RNA (1)...(19): siRNA sense strand
caaggagacuguugaggaa

SEQ ID NO: 1184588 - RNA, 19 nt, Homo sapiens
  misc_RNA (1)...(19): siRNA sense strand
aagaagauaugccauuuga

SEQ ID NO: 1184589 - RNA, 19 nt, Homo sapiens
  misc_RNA (1)...(19): siRNA sense strand
caaauucaguacauugcua

SEQ ID NO: 1184590 - RNA, 19 nt, Homo sapiens
  misc_RNA (1)...(19): siRNA sense strand
ugaagaagauaugccauuu

SEQ ID NO: 1184591 - RNA, 19 nt, Homo sapiens
  misc_RNA (1)...(19): siRNA sense strand
ggauucaagugacauagaa

SEQ ID NO: 1184592 - RNA, 19 nt, Homo sapiens
  misc_RNA (1)...(19): siRNA sense strand
gaagauaugccauuugaag

SEQ ID NO: 1184593 - RNA, 19 nt, Homo sapiens
  misc_RNA (1)...(19): siRNA sense strand
gaagugauuccauuaguau

SEQ ID NO: 1184594 - RNA, 19 nt, Homo sapiens
  misc_RNA (1)...(19): siRNA sense strand
caaaggagcgagaagauga

SEQ ID NO: 1184595 - RNA, 19 nt, Homo sapiens
  misc_RNA (1)...(19): siRNA sense strand
gggccacgguuaaauguuu

SEQ ID NO: 1184596 - RNA, 19 nt, Homo sapiens
  misc_RNA (1)...(19): siRNA sense strand
ggcagaagauccuaguaaa

SEQ ID NO: 1184597 - RNA, 19 nt, Homo sapiens
  misc_RNA (1)...(19): siRNA sense strand
gagaacauguuaucuaugc

SEQ ID NO: 1184598 - RNA, 19 nt, Homo sapiens
  misc_RNA (1)...(19): siRNA sense strand
gaagagcuaccuguccuua

SEQ ID NO: 1184599 - RNA, 19 nt, Homo sapiens
  misc_RNA (1)...(19): siRNA sense strand
gaagaugaguguuuuaguu

SEQ ID NO: 1184600 - RNA, 19 nt, Homo sapiens
  misc_RNA (1)...(19): siRNA sense strand
ugggugagcuuauagauga

SEQ ID NO: 1184601 - RNA, 19 nt, Homo sapiens
  misc_RNA (1)...(19): siRNA sense strand
uaggaaacaugcuagaauu

SEQ ID NO: 1184602 - RNA, 19 nt, Homo sapiens
  misc_RNA (1)...(19): siRNA sense strand
agaagccucucauuaguaa

SEQ ID NO: 1184603 - RNA, 19 nt, Homo sapiens
  misc_RNA (1)...(19): siRNA sense strand
guucugauccguugauuaa

SEQ ID NO: 1184604 - RNA, 19 nt, Homo sapiens
  misc_RNA (1)...(19): siRNA sense strand
agacaaagaccgaaucauu

SEQ ID NO: 1184605 - RNA, 19 nt, Homo sapiens
  misc_RNA (1)...(19): siRNA sense strand
cagcaagguuugaggaauu

SEQ ID NO: 1184606 - RNA, 19 nt, Homo sapiens
  misc_RNA (1)...(19): siRNA sense strand
caucugcccuaaucacuuu

SEQ ID NO: 1184607 - RNA, 19 nt, Homo sapiens
  misc_RNA (1)...(19): siRNA sense strand
gagaauggcauaacugaau

SEQ ID NO: 1184608 - RNA, 19 nt, Homo sapiens
  misc_RNA (1)...(19): siRNA sense strand
gaaccuuggccuaaacuuu

SEQ ID NO: 1184609 - RNA, 19 nt, Homo sapiens
  misc_RNA (1)...(19): siRNA sense strand
ggcauaagguuccucagaa

SEQ ID NO: 1184610 - RNA, 19 nt, Homo sapiens
  misc_RNA (1)...(19): siRNA sense strand
gaaaagcaaucgucauguu

SEQ ID NO: 1184611 - RNA, 19 nt, Homo sapiens
  misc_RNA (1)...(19): siRNA sense strand
gaaguggucugugaaugga

SEQ ID NO: 1184612 - RNA, 19 nt, Homo sapiens
  misc_RNA (1)...(19): siRNA sense strand
acaagaagccaccaccuua

SEQ ID NO: 1184613 - RNA, 19 nt, Homo sapiens
  misc_RNA (1)...(19): siRNA sense strand
agaauuaccuggaacuuca

SEQ ID NO: 1184614 - RNA, 19 nt, Homo sapiens
  misc_RNA (1)...(19): siRNA sense strand
cuaaugaacuuuccaggau

SEQ ID NO: 1184615 - RNA, 19 nt, Homo sapiens
  misc_RNA (1)...(19): siRNA sense strand
gagaagagggaaacagaaa

SEQ ID NO: 1184616 - RNA, 19 nt, Homo sapiens
  misc_RNA (1)...(19): siRNA sense strand
gacaaagaccgaaucauug

SEQ ID NO: 1184617 - RNA, 19 nt, Homo sapiens
  misc_RNA (1)...(19): siRNA sense strand
ucugaggaauugcuaguua

SEQ ID NO: 1184618 - RNA, 19 nt, Homo sapiens
  misc_RNA (1)...(19): siRNA sense strand
gagaagaaacgccuuagga

SEQ ID NO: 1184619 - RNA, 19 nt, Homo sapiens
  misc_RNA (1)...(19): siRNA sense strand
gcaaucugauccugguaaa

SEQ ID NO: 1184620 - RNA, 19 nt, Homo sapiens
  misc_RNA (1)...(19): siRNA sense strand
guuaaucucucugaucuga

SEQ ID NO: 1184621 - RNA, 19 nt, Homo sapiens
  misc_RNA (1)...(19): siRNA sense strand
gaagagggaaacagaaaga

SEQ ID NO: 1184622 - RNA, 19 nt, Homo sapiens
  misc_RNA (1)...(19): siRNA sense strand
cuacgccacugaaguauga

SEQ ID NO: 1184623 - RNA, 19 nt, Homo sapiens
  misc_RNA (1)...(19): siRNA sense strand
gauaaugggccacuuaaca

SEQ ID NO: 1184624 - RNA, 19 nt, Homo sapiens
  misc_RNA (1)...(19): siRNA sense strand
aaacagcaguggugaaaca

SEQ ID NO: 1184625 - RNA, 19 nt, Homo sapiens
  misc_RNA (1)...(19): siRNA sense strand
uaaugaacuuuccaggaua

SEQ ID NO: 1184626 - RNA, 19 nt, Homo sapiens
  misc_RNA (1)...(19): siRNA sense strand
cuuaauggcuguuugaaau

SEQ ID NO: 1184627 - RNA, 19 nt, Homo sapiens
  misc_RNA (1)...(19): siRNA sense strand
ugaacaauaugcaugagaa

SEQ ID NO: 1184628 - RNA, 19 nt, Homo sapiens
  misc_RNA (1)...(19): siRNA sense strand
agacaggccuacugacaaa

SEQ ID NO: 1184629 - RNA, 19 nt, Homo sapiens
  misc_RNA (1)...(19): siRNA sense strand
gcaggaagaccgaaagaau

SEQ ID NO: 1184630 - RNA, 19 nt, Homo sapiens
  misc_RNA (1)...(19): siRNA sense strand
ggaaacugguauugcaaug

SEQ ID NO: 1184631 - RNA, 19 nt, Homo sapiens
  misc_RNA (1)...(19): siRNA sense strand
guaagcgcaugaacagauu

SEQ ID NO: 1184632 - RNA, 19 nt, Homo sapiens
  misc_RNA (1)...(19): siRNA sense strand
ucacauaccuauugaacca

SEQ ID NO: 1184633 - RNA, 19 nt, Homo sapiens
  misc_RNA (1)...(19): siRNA sense strand
aauguuagcuggugcuuug

SEQ ID NO: 1184634 - RNA, 19 nt, Homo sapiens
  misc_RNA (1)...(19): siRNA sense strand
ggaacuucaucaucaucua

SEQ ID NO: 1184635 - RNA, 19 nt, Homo sapiens
  misc_RNA (1)...(19): siRNA sense strand
gugaauuugugaaugagua

SEQ ID NO: 1184636 - RNA, 19 nt, Homo sapiens
  misc_RNA (1)...(19): siRNA sense strand
caaucaaguuggacaguga

SEQ ID NO: 1184637 - RNA, 19 nt, Homo sapiens
  misc_RNA (1)...(19): siRNA sense strand
uggaaagacuguuugcaaa

SEQ ID NO: 1184638 - RNA, 19 nt, Homo sapiens
  misc_RNA (1)...(19): siRNA sense strand
gauaagaugagacaugaug

SEQ ID NO: 1184639 - RNA, 19 nt, Homo sapiens
  misc_RNA (1)...(19): siRNA sense strand
gggcagaagauccuaguaa

SEQ ID NO: 1184640 - RNA, 19 nt, Homo sapiens
  misc_RNA (1)...(19): siRNA sense strand
gaaggaacucucuuacaga

SEQ ID NO: 1184641 - RNA, 19 nt, Homo sapiens
  misc_RNA (1)...(19): siRNA sense strand
ugaaggaacucucuuacag

SEQ ID NO: 1184642 - RNA, 19 nt, Homo sapiens
  misc_RNA (1)...(19): siRNA sense strand
guaugugggugagcuuaua

SEQ ID NO: 1184643 - RNA, 19 nt, Homo sapiens
  misc_RNA (1)...(19): siRNA sense strand
guaaagcuacugaugagaa

SEQ ID NO: 1184644 - RNA, 19 nt, Homo sapiens
  misc_RNA (1)...(19): siRNA sense strand
gcacuaccaagauauuuga

SEQ ID NO: 1184645 - RNA, 19 nt, Homo sapiens
  misc_RNA (1)...(19): siRNA sense strand
uggcauaacugaaucuugu

SEQ ID NO: 1184646 - RNA, 19 nt, Homo sapiens
  misc_RNA (1)...(19): siRNA sense strand
caaagaagagccuccaguu

SEQ ID NO: 1184647 - RNA, 19 nt, Homo sapiens
  misc_RNA (1)...(19): siRNA sense strand
cagaaucacauaccuauug

SEQ ID NO: 1184648 - RNA, 19 nt, Homo sapiens
  misc_RNA (1)...(19): siRNA sense strand
cauaguggcuggacagaca

SEQ ID NO: 1184649 - RNA, 19 nt, Homo sapiens
  misc_RNA (1)...(19): siRNA sense strand
ggaaauguaugcagacuuu

SEQ ID NO: 1184650 - RNA, 19 nt, Homo sapiens
  misc_RNA (1)...(19): siRNA sense strand
gagggagccugaagaaaua

SEQ ID NO: 1184651 - RNA, 19 nt, Homo sapiens
  misc_RNA (1)...(19): siRNA sense strand
gaaccaguguccacaauga

SEQ ID NO: 1184652 - RNA, 19 nt, Homo sapiens
  misc_RNA (1)...(19): siRNA sense strand
ucacggagcuucucacuug

SEQ ID NO: 1184653 - RNA, 19 nt, Homo sapiens
  misc_RNA (1)...(19): siRNA sense strand
gagagaaucugaaauugau

SEQ ID NO: 1184654 - RNA, 19 nt, Homo sapiens
  misc_RNA (1)...(19): siRNA sense strand
gaacgacaaucgagugguu

SEQ ID NO: 1184655 - RNA, 19 nt, Homo sapiens
  misc_RNA (1)...(19): siRNA sense strand
ggaauaguguucuugaguu

SEQ ID NO: 1184656 - RNA, 19 nt, Homo sapiens
  misc_RNA (1)...(19): siRNA sense strand
ggaccaggaucucuuaaug

SEQ ID NO: 1184657 - RNA, 19 nt, Homo sapiens
  misc_RNA (1)...(19): siRNA sense strand
gcgcaugucuggacuaaga

SEQ ID NO: 1184658 - RNA, 19 nt, Homo sapiens
  misc_RNA (1)...(19): siRNA sense strand
gggcauggauuuaacaaga

SEQ ID NO: 1184659 - RNA, 19 nt, Homo sapiens
  misc_RNA (1)...(19): siRNA sense strand
gaagcaggauccauuugaa

SEQ ID NO: 1184660 - RNA, 19 nt, Homo sapiens
  misc_RNA (1)...(19): siRNA sense strand
ucacuugcaucuaguagua

SEQ ID NO: 1184661 - RNA, 19 nt, Homo sapiens
  misc_RNA (1)...(19): siRNA sense strand
ggaacaauauaaacucaga

SEQ ID NO: 1184662 - RNA, 19 nt, Homo sapiens
  misc_RNA (1)...(19): siRNA sense strand
guacacagcaucauacuga

SEQ ID NO: 1184663 - RNA, 19 nt, Homo sapiens
  misc_RNA (1)...(19): siRNA sense strand
guacagugaucacauggaa

SEQ ID NO: 1184664 - RNA, 19 nt, Homo sapiens
  misc_RNA (1)...(19): siRNA sense strand
aaaugcagaugaugagaua

SEQ ID NO: 1184665 - RNA, 19 nt, Homo sapiens
  misc_RNA (1)...(19): siRNA sense strand
ucucacaccuucacuguaa

SEQ ID NO: 1184666 - RNA, 19 nt, Homo sapiens
  misc_RNA (1)...(19): siRNA sense strand
guucuugaguucacauaua

SEQ ID NO: 1184667 - RNA, 19 nt, Homo sapiens
  misc_RNA (1)...(19): siRNA sense strand
caaagagacuuaauuagac

SEQ ID NO: 1184668 - RNA, 19 nt, Homo sapiens
  misc_RNA (1)...(19): siRNA sense strand
caaugaagcugggcuguug

SEQ ID NO: 1184669 - RNA, 19 nt, Homo sapiens
  misc_RNA (1)...(19): siRNA sense strand
ggagauggcuggguuuauc

SEQ ID NO: 1184670 - RNA, 19 nt, Homo sapiens
  misc_RNA (1)...(19): siRNA sense strand
gagguagcauccaguguuu

SEQ ID NO: 1184671 - RNA, 19 nt, Homo sapiens
  misc_RNA (1)...(19): siRNA sense strand
guguauggcuauuuaauga

SEQ ID NO: 1184672 - RNA, 19 nt, Homo sapiens
  misc_RNA (1)...(19): siRNA sense strand
ccugggagcuguagaagaa

SEQ ID NO: 1184673 - RNA, 19 nt, Homo sapiens
  misc_RNA (1)...(19): siRNA sense strand
gcaguacagugaucacaug

SEQ ID NO: 1184674 - RNA, 19 nt, Homo sapiens
  misc_RNA (1)...(19): siRNA sense strand
gcaauggagagacaaagua

SEQ ID NO: 1184675 - RNA, 19 nt, Homo sapiens
  misc_RNA (1)...(19): siRNA sense strand
gaauaguguucuugaguuc

SEQ ID NO: 1184676 - RNA, 19 nt, Homo sapiens
  misc_RNA (1)...(19): siRNA sense strand
ucacaaaucaugcuccuuu

SEQ ID NO: 1184677 - RNA, 19 nt, Homo sapiens
  misc_RNA (1)...(19): siRNA sense strand
cgaauugaaugccuuccua

SEQ ID NO: 1184678 - RNA, 19 nt, Homo sapiens
  misc_RNA (1)...(19): siRNA sense strand
gaagaacaacguaguguca

SEQ ID NO: 1184679 - RNA, 19 nt, Homo sapiens
  misc_RNA (1)...(19): siRNA sense strand
gaagaaaggcaucguacug

SEQ ID NO: 1184680 - RNA, 19 nt, Homo sapiens
  misc_RNA (1)...(19): siRNA sense strand
gcugagagaaucugaaauu

SEQ ID NO: 1184681 - RNA, 19 nt, Homo sapiens
  misc_RNA (1)...(19): siRNA sense strand
aagcugggcuguuggagua

SEQ ID NO: 1184682 - RNA, 19 nt, Homo sapiens
  misc_RNA (1)...(19): siRNA sense strand
gaaaggcaucguacugaaa

SEQ ID NO: 1184683 - RNA, 19 nt, Homo sapiens
  misc_RNA (1)...(19): siRNA sense strand
acuaugaacugcuuaaaug

SEQ ID NO: 1184684 - RNA, 19 nt, Homo sapiens
  misc_RNA (1)...(19): siRNA sense strand
gaauaauccuccucugaag

SEQ ID NO: 1184685 - RNA, 19 nt, Homo sapiens
  misc_RNA (1)...(19): siRNA sense strand
guacuaccuuaccucauuu

SEQ ID NO: 1184686 - RNA, 19 nt, Homo sapiens
  misc_RNA (1)...(19): siRNA sense strand
gagaggaagauguguguaa

SEQ ID NO: 1184687 - RNA, 19 nt, Homo sapiens
  misc_RNA (1)...(19): siRNA sense strand
ugcaggagcuguaauauca

SEQ ID NO: 1184688 - RNA, 19 nt, Homo sapiens
  misc_RNA (1)...(19): siRNA sense strand
ggaauggaauaguguucuu

SEQ ID NO: 1184689 - RNA, 19 nt, Homo sapiens
  misc_RNA (1)...(19): siRNA sense strand
ugaaugaacagucuagaaa

SEQ ID NO: 1184690 - RNA, 19 nt, Homo sapiens
  misc_RNA (1)...(19): siRNA sense strand
caauauaaacucagagcua

SEQ ID NO: 1184691 - RNA, 19 nt, Homo sapiens
  misc_RNA (1)...(19): siRNA sense strand
gaguggugcuuccuacauu

SEQ ID NO: 1184692 - RNA, 19 nt, Homo sapiens
  misc_RNA (1)...(19): siRNA sense strand
ggagaagcaggauccauuu

SEQ ID NO: 1184693 - RNA, 19 nt, Homo sapiens
  misc_RNA (1)...(19): siRNA sense strand
gaaguaaagcacaacauca

SEQ ID NO: 1184694 - RNA, 19 nt, Homo sapiens
  misc_RNA (1)...(19): siRNA sense strand
uaccuuaccucauuucaug

SEQ ID NO: 1184695 - RNA, 19 nt, Homo sapiens
  misc_RNA (1)...(19): siRNA sense strand
ccacagagcauaagcauac

SEQ ID NO: 1184696 - RNA, 19 nt, Homo sapiens
  misc_RNA (1)...(19): siRNA sense strand
cagcaugcaucacaucaga

SEQ ID NO: 1184697 - RNA, 19 nt, Homo sapiens
  misc_RNA (1)...(19): siRNA sense strand
gcauaugcucggucaauuu

SEQ ID NO: 1184698 - RNA, 19 nt, Homo sapiens
  misc_RNA (1)...(19): siRNA sense strand
cacaaaucaugcuccuuua

SEQ ID NO: 1184699 - RNA, 19 nt, Homo sapiens
  misc_RNA (1)...(19): siRNA sense strand
cagaggagaccaagucaaa

SEQ ID NO: 1184700 - RNA, 19 nt, Homo sapiens
  misc_RNA (1)...(19): siRNA sense strand
uauguggacuugacuaaau

SEQ ID NO: 1184701 - RNA, 19 nt, Homo sapiens
  misc_RNA (1)...(19): siRNA sense strand
guacagagaggaagaugug

SEQ ID NO: 1184702 - RNA, 19 nt, Homo sapiens
  misc_RNA (1)...(19): siRNA sense strand
gagcagguuucucaucauc

SEQ ID NO: 1184703 - RNA, 19 nt, Homo sapiens
  misc_RNA (1)...(19): siRNA sense strand
uaagggagccauugcuaaa

SEQ ID NO: 1184704 - RNA, 19 nt, Homo sapiens
  misc_RNA (1)...(19): siRNA sense strand
uggaguacuuugugaauga

SEQ ID NO: 1184705 - RNA, 19 nt, Homo sapiens
  misc_RNA (1)...(19): siRNA sense strand
gaaacaggcacaccuugga

SEQ ID NO: 1184706 - RNA, 19 nt, Homo sapiens
  misc_RNA (1)...(19): siRNA sense strand
gcauaagcauacccuggaa

SEQ ID NO: 1184707 - RNA, 19 nt, Homo sapiens
  misc_RNA (1)...(19): siRNA sense strand
cgagggagccugaagaaau

SEQ ID NO: 1184708 - RNA, 19 nt, Homo sapiens
  misc_RNA (1)...(19): siRNA sense strand
gcaaaaggcuggcaguaca

SEQ ID NO: 1184709 - RNA, 19 nt, Homo sapiens
  misc_RNA (1)...(19): siRNA sense strand
cuacauuuauccuagagaa

SEQ ID NO: 1184710 - RNA, 19 nt, Homo sapiens
  misc_RNA (1)...(19): siRNA sense strand
cuacuuccauggcaacuau

SEQ ID NO: 1184711 - RNA, 19 nt, Homo sapiens
  misc_RNA (1)...(19): siRNA sense strand
gcacuggguuagcagacuu

SEQ ID NO: 1184712 - RNA, 19 nt, Homo sapiens
  misc_RNA (1)...(19): siRNA sense strand
ggacaacaaagagacuuaa

SEQ ID NO: 1184713 - RNA, 19 nt, Homo sapiens
  misc_RNA (1)...(19): siRNA sense strand
cugcuuaaaugacugcuuu

SEQ ID NO: 1184714 - RNA, 19 nt, Homo sapiens
  misc_RNA (1)...(19): siRNA sense strand
gaaugaacagucuagaaau

SEQ ID NO: 1184715 - RNA, 19 nt, Homo sapiens
  misc_RNA (1)...(19): siRNA sense strand
gauaaggccacagagcaua

SEQ ID NO: 1184716 - RNA, 19 nt, Homo sapiens
  misc_RNA (1)...(19): siRNA sense strand
ggagaagaguacacauuuu

SEQ ID NO: 1184717 - RNA, 19 nt, Homo sapiens
  misc_RNA (1)...(19): siRNA sense strand
gacaaugguuggagaaggu

SEQ ID NO: 1184718 - RNA, 19 nt, Homo sapiens
  misc_RNA (1)...(19): siRNA sense strand
guaagggagccauugcuaa

SEQ ID NO: 1184719 - RNA, 19 nt, Homo sapiens
  misc_RNA (1)...(19): siRNA sense strand
uaauuuaccuccagaccau

SEQ ID NO: 1184720 - RNA, 19 nt, Homo sapiens
  misc_RNA (1)...(19): siRNA sense strand
gaaauaaaugcagaugaug

SEQ ID NO: 1184721 - RNA, 19 nt, Homo sapiens
  misc_RNA (1)...(19): siRNA sense strand
agaaaggcaucguacugaa

SEQ ID NO: 1184722 - RNA, 19 nt, Homo sapiens
  misc_RNA (1)...(19): siRNA sense strand
gaacuggguggcaaaguca

SEQ ID NO: 1184723 - RNA, 19 nt, Homo sapiens
  misc_RNA (1)...(19): siRNA sense strand
aguacuaccuuaccucauu

SEQ ID NO: 1184724 - RNA, 19 nt, Homo sapiens
  misc_RNA (1)...(19): siRNA sense strand
cauccuacaucucuuguca

SEQ ID NO: 1184725 - RNA, 19 nt, Homo sapiens
  misc_RNA (1)...(19): siRNA sense strand
cgacagcacuggguuagca

SEQ ID NO: 1184726 - RNA, 19 nt, Homo sapiens
  misc_RNA (1)...(19): siRNA sense strand
ugagagaaucugaaauuga

SEQ ID NO: 1184727 - RNA, 19 nt, Homo sapiens
  misc_RNA (1)...(19): siRNA sense strand
gcaucauacugaagcuauu

SEQ ID NO: 1184728 - RNA, 19 nt, Homo sapiens
  misc_RNA (1)...(19): siRNA sense strand
ggaagucagagaaaugaug

SEQ ID NO: 1184729 - RNA, 19 nt, Homo sapiens
  misc_RNA (1)...(19): siRNA sense strand
agaggaagauguguguaaa

SEQ ID NO: 1184730 - RNA, 19 nt, Homo sapiens
  misc_RNA (1)...(19): siRNA sense strand
gaagaaauaaaugcagaug

SEQ ID NO: 1184731 - RNA, 19 nt, Homo sapiens
  misc_RNA (1)...(19): siRNA sense strand
gcaacuaugaacugcuuaa

SEQ ID NO: 1184732 - RNA, 19 nt, Homo sapiens
  misc_RNA (1)...(19): siRNA sense strand
gaagucagagaaaugaugu

SEQ ID NO: 1184733 - RNA, 19 nt, Homo sapiens
  misc_RNA (1)...(19): siRNA sense strand
ggaguacuuugugaaugaa

SEQ ID NO: 1184734 - RNA, 19 nt, Homo sapiens
  misc_RNA (1)...(19): siRNA sense strand
gaacagucuagaaaucaga

SEQ ID NO: 1184735 - RNA, 19 nt, Homo sapiens
  misc_RNA (1)...(19): siRNA sense strand
caucucuugucacagcuua

SEQ ID NO: 1184736 - RNA, 19 nt, Homo sapiens
  misc_RNA (1)...(19): siRNA sense strand
agaauaauccuccucugaa

SEQ ID NO: 1184737 - RNA, 19 nt, Homo sapiens
  misc_RNA (1)...(19): siRNA sense strand
ucagaaaccuagaggaacu

SEQ ID NO: 1184738 - RNA, 19 nt, Homo sapiens
  misc_RNA (1)...(19): siRNA sense strand
ugagauagaggauacaugu

SEQ ID NO: 1184739 - RNA, 19 nt, Homo sapiens
  misc_RNA (1)...(19): siRNA sense strand
gagcgacagcacuggguua

SEQ ID NO: 1184740 - RNA, 19 nt, Homo sapiens
  misc_RNA (1)...(19): siRNA sense strand
uagcagacuucagauaugu

SEQ ID NO: 1184741 - RNA, 19 nt, Homo sapiens
  misc_RNA (1)...(19): siRNA sense strand
cagcugaaguaaagcacaa

SEQ ID NO: 1184742 - RNA, 19 nt, Homo sapiens
  misc_RNA (1)...(19): siRNA sense strand
caaaucaugcuccuuuauc

SEQ ID NO: 1184743 - RNA, 19 nt, Homo sapiens
  misc_RNA (1)...(19): siRNA sense strand
gaaauguaugcagacuuua

SEQ ID NO: 1184744 - RNA, 19 nt, Homo sapiens
  misc_RNA (1)...(19): siRNA sense strand
gaccagcccuuugcaacug

SEQ ID NO: 1184745 - RNA, 19 nt, Homo sapiens
  misc_RNA (1)...(19): siRNA sense strand
uagaggaacuuugcagcuu

SEQ ID NO: 1184746 - RNA, 19 nt, Homo sapiens
  misc_RNA (1)...(19): siRNA sense strand
ucauaaaccacuuuggaaa

SEQ ID NO: 1184747 - RNA, 19 nt, Homo sapiens
  misc_RNA (1)...(19): siRNA sense strand
uggagaagaguacacauuu

SEQ ID NO: 1184748 - RNA, 19 nt, Homo sapiens
  misc_RNA (1)...(19): siRNA sense strand
uugaaugccuuccuacuuc

SEQ ID NO: 1184749 - RNA, 19 nt, Homo sapiens
  misc_RNA (1)...(19): siRNA sense strand
caaaugagguugucacaga

SEQ ID NO: 1184750 - RNA, 19 nt, Homo sapiens
  misc_RNA (1)...(19): siRNA sense strand
gcagagaaaccucaagaaa

SEQ ID NO: 1184751 - RNA, 19 nt, Homo sapiens
  misc_RNA (1)...(19): siRNA sense strand
guacgugggucccuaugaa

SEQ ID NO: 1184752 - RNA, 19 nt, Homo sapiens
  misc_RNA (1)...(19): siRNA sense strand
gagcaucauugcaaacaug

SEQ ID NO: 1184753 - RNA, 19 nt, Homo sapiens
  misc_RNA (1)...(19): siRNA sense strand
caagacaugucauucaagu

SEQ ID NO: 1184754 - RNA, 19 nt, Homo sapiens
  misc_RNA (1)...(19): siRNA sense strand
ggagagugcugggauggaa

SEQ ID NO: 1184755 - RNA, 19 nt, Homo sapiens
  misc_RNA (1)...(19): siRNA sense strand
caacggaugcuuuaucaga

SEQ ID NO: 1184756 - RNA, 19 nt, Homo sapiens
  misc_RNA (1)...(19): siRNA sense strand
agacaugucauucaaguuu

SEQ ID NO: 1184757 - RNA, 19 nt, Homo sapiens
  misc_RNA (1)...(19): siRNA sense strand
acacuugccuggcgaacaa

SEQ ID NO: 1184758 - RNA, 19 nt, Homo sapiens
  misc_RNA (1)...(19): siRNA sense strand
guacaagcauccugacaac

SEQ ID NO: 1184759 - RNA, 19 nt, Homo sapiens
  misc_RNA (1)...(19): siRNA sense strand
ccacagagcaccagcaaag

SEQ ID NO: 1184760 - RNA, 19 nt, Homo sapiens
  misc_RNA (1)...(19): siRNA sense strand
ccagaugacuugugagaac

SEQ ID NO: 1184761 - RNA, 19 nt, Homo sapiens
  misc_RNA (1)...(19): siRNA sense strand
cagcagagauaauggaaac

SEQ ID NO: 1184762 - RNA, 19 nt, Homo sapiens
  misc_RNA (1)...(19): siRNA sense strand
ggcgugagcuggagaagca

SEQ ID NO: 1184763 - RNA, 19 nt, Homo sapiens
  misc_RNA (1)...(19): siRNA sense strand
cacaggagcuugcaacaac

SEQ ID NO: 1184764 - RNA, 19 nt, Homo sapiens
  misc_RNA (1)...(19): siRNA sense strand
ggagaacagccacgucuuc

SEQ ID NO: 1184765 - RNA, 19 nt, Homo sapiens
  misc_RNA (1)...(19): siRNA sense strand
gagcguggccgacaagauc

SEQ ID NO: 1184766 - RNA, 19 nt, Homo sapiens
  misc_RNA (1)...(19): siRNA sense strand
cagcaucacuggcaugaac

SEQ ID NO: 1184767 - RNA, 19 nt, Homo sapiens
  misc_RNA (1)...(19): siRNA sense strand
gcacggguaugagcuccaa

SEQ ID NO: 1184768 - RNA, 19 nt, Homo sapiens
  misc_RNA (1)...(19): siRNA sense strand
gguuauggccugcacagaa

SEQ ID NO: 1184769 - RNA, 19 nt, Homo sapiens
  misc_RNA (1)...(19): siRNA sense strand
caaauuccccgaagacuuu

SEQ ID NO: 1184770 - RNA, 19 nt, Homo sapiens
  misc_RNA (1)...(19): siRNA sense strand
gggaaagccugaggagucu

SEQ ID NO: 1184771 - RNA, 19 nt, Homo sapiens
  misc_RNA (1)...(19): siRNA sense strand
guuauggccugcacagaag

SEQ ID NO: 1184772 - RNA, 19 nt, Homo sapiens
  misc_RNA (1)...(19): siRNA sense strand
ccugaaaacucaacaauca

SEQ ID NO: 1184773 - RNA, 19 nt, Homo sapiens
  misc_RNA (1)...(19): siRNA sense strand
ccaacaagcggagugauug

SEQ ID NO: 1184774 - RNA, 19 nt, Homo sapiens
  misc_RNA (1)...(19): siRNA sense strand
ccagagagcguggagaaug

SEQ ID NO: 1184775 - RNA, 19 nt, Homo sapiens
  misc_RNA (1)...(19): siRNA sense strand
gaugaugaccgcuauucug

SEQ ID NO: 1184776 - RNA, 19 nt, Homo sapiens
  misc_RNA (1)...(19): siRNA sense strand
gacaugucauucaaguuuc

SEQ ID NO: 1184777 - RNA, 19 nt, Homo sapiens
  misc_RNA (1)...(19): siRNA sense strand
caagcauccugacaacauc

SEQ ID NO: 1184778 - RNA, 19 nt, Homo sapiens
  misc_RNA (1)...(19): siRNA sense strand
ugaggagucucgugucucu

SEQ ID NO: 1184779 - RNA, 19 nt, Homo sapiens
  misc_RNA (1)...(19): siRNA sense strand
cagagagcguggagaaugg

SEQ ID NO: 1184780 - RNA, 19 nt, Homo sapiens
  misc_RNA (1)...(19): siRNA sense strand
ccgacaagauccuggacuu

SEQ ID NO: 1184781 - RNA, 19 nt, Homo sapiens
  misc_RNA (1)...(19): siRNA sense strand
agagaaaccucaagaaaag

SEQ ID NO: 1184782 - RNA, 19 nt, Homo sapiens
  misc_RNA (1)...(19): siRNA sense strand
gggacuuugugcacuguga

SEQ ID NO: 1184783 - RNA, 19 nt, Homo sapiens
  misc_RNA (1)...(19): siRNA sense strand
uccaacggaugcuuuauca

SEQ ID NO: 1184784 - RNA, 19 nt, Homo sapiens
  misc_RNA (1)...(19): siRNA sense strand
gagauaauggaaacaucaa

SEQ ID NO: 1184785 - RNA, 19 nt, Homo sapiens
  misc_RNA (1)...(19): siRNA sense strand
gccaacaagcggagugauu

SEQ ID NO: 1184786 - RNA, 19 nt, Homo sapiens
  misc_RNA (1)...(19): siRNA sense strand
ugucucgggucaucuguga

SEQ ID NO: 1184787 - RNA, 19 nt, Homo sapiens
  misc_RNA (1)...(19): siRNA sense strand
gagaacagccacgucuuca

SEQ ID NO: 1184788 - RNA, 19 nt, Homo sapiens
  misc_RNA (1)...(19): siRNA sense strand
gagcagcagagauaaugga

SEQ ID NO: 1184789 - RNA, 19 nt, Homo sapiens
  misc_RNA (1)...(19): siRNA sense strand
gcagagauaauggaaacau

SEQ ID NO: 1184790 - RNA, 19 nt, Homo sapiens
  misc_RNA (1)...(19): siRNA sense strand
gagcuugcaacaacagaga

SEQ ID NO: 1184791 - RNA, 19 nt, Homo sapiens
  misc_RNA (1)...(19): siRNA sense strand
caaaaugcccaaacacuug

SEQ ID NO: 1184792 - RNA, 19 nt, Homo sapiens
  misc_RNA (1)...(19): siRNA sense strand
aaagaaaagucaaccugaa

SEQ ID NO: 1184793 - RNA, 19 nt, Homo sapiens
  misc_RNA (1)...(19): siRNA sense strand
cagagauaauggaaacauc

SEQ ID NO: 1184794 - RNA, 19 nt, Homo sapiens
  misc_RNA (1)...(19): siRNA sense strand
aaguguggcuucccagaga

SEQ ID NO: 1184795 - RNA, 19 nt, Homo sapiens
  misc_RNA (1)...(19): siRNA sense strand
gcugggaggcuuagcugaa

SEQ ID NO: 1184796 - RNA, 19 nt, Homo sapiens
  misc_RNA (1)...(19): siRNA sense strand
uacaagcgaugaaaagaaa

SEQ ID NO: 1184797 - RNA, 19 nt, Homo sapiens
  misc_RNA (1)...(19): siRNA sense strand
cagagaaaccucaagaaaa

SEQ ID NO: 1184798 - RNA, 19 nt, Homo sapiens
  misc_RNA (1)...(19): siRNA sense strand
ccgaggccuuccagcagua

SEQ ID NO: 1184799 - RNA, 19 nt, Homo sapiens
  misc_RNA (1)...(19): siRNA sense strand
caaacuuccugagccaaca

SEQ ID NO: 1184800 - RNA, 19 nt, Homo sapiens
  misc_RNA (1)...(19): siRNA sense strand
aacggaugcuuuaucagaa

SEQ ID NO: 1184801 - RNA, 19 nt, Homo sapiens
  misc_RNA (1)...(19): siRNA sense strand
ggcgcgugcugguguauuc

SEQ ID NO: 1184802 - RNA, 19 nt, Homo sapiens
  misc_RNA (1)...(19): siRNA sense strand
cuggaggccuggagggaaa

SEQ ID NO: 1184803 - RNA, 19 nt, Homo sapiens
  misc_RNA (1)...(19): siRNA sense strand
cacagaugaugaccgcuau

SEQ ID NO: 1184804 - RNA, 19 nt, Homo sapiens
  misc_RNA (1)...(19): siRNA sense strand
gcagcagagauaauggaaa

SEQ ID NO: 1184805 - RNA, 19 nt, Homo sapiens
  misc_RNA (1)...(19): siRNA sense strand
cugggaggcuuagcugaaa

SEQ ID NO: 1184806 - RNA, 19 nt, Homo sapiens
  misc_RNA (1)...(19): siRNA sense strand
aaaugagguugucacagau

SEQ ID NO: 1184807 - RNA, 19 nt, Homo sapiens
  misc_RNA (1)...(19): siRNA sense strand
caaauacaggcccaucaca

SEQ ID NO: 1184808 - RNA, 19 nt, Homo sapiens
  misc_RNA (1)...(19): siRNA sense strand
caacaaucacagcauccaa

SEQ ID NO: 1184809 - RNA, 19 nt, Homo sapiens
  misc_RNA (1)...(19): siRNA sense strand
aggcuuagcugaaaacuuc

SEQ ID NO: 1184810 - RNA, 19 nt, Homo sapiens
  misc_RNA (1)...(19): siRNA sense strand
cuucagcccauggacauua

SEQ ID NO: 1184811 - RNA, 19 nt, Homo sapiens
  misc_RNA (1)...(19): siRNA sense strand
acgccacgaugcagagaaa

SEQ ID NO: 1184812 - RNA, 19 nt, Homo sapiens
  misc_RNA (1)...(19): siRNA sense strand
gcaguacgugggucccuau

SEQ ID NO: 1184813 - RNA, 19 nt, Homo sapiens
  misc_RNA (1)...(19): siRNA sense strand
cuguuugccugucucauug

SEQ ID NO: 1184814 - RNA, 19 nt, Homo sapiens
  misc_RNA (1)...(19): siRNA sense strand
acaagcauccugacaacau

SEQ ID NO: 1184815 - RNA, 19 nt, Homo sapiens
  misc_RNA (1)...(19): siRNA sense strand
gagagggaaagaacuccuu

SEQ ID NO: 1184816 - RNA, 19 nt, Homo sapiens
  misc_RNA (1)...(19): siRNA sense strand
agagauaauggaaacauca

SEQ ID NO: 1184817 - RNA, 19 nt, Homo sapiens
  misc_RNA (1)...(19): siRNA sense strand
gacagcaucacuggcauga

SEQ ID NO: 1184818 - RNA, 19 nt, Homo sapiens
  misc_RNA (1)...(19): siRNA sense strand
ccuguuugccugucucauu

SEQ ID NO: 1184819 - RNA, 19 nt, Homo sapiens
  misc_RNA (1)...(19): siRNA sense strand
ucacaggagcuugcaacaa

SEQ ID NO: 1184820 - RNA, 19 nt, Homo sapiens
  misc_RNA (1)...(19): siRNA sense strand
ugcccgagcagcagagaua

SEQ ID NO: 1184821 - RNA, 19 nt, Homo sapiens
  misc_RNA (1)...(19): siRNA sense strand
acugccagaugacuuguga

SEQ ID NO: 1184822 - RNA, 19 nt, Homo sapiens
  misc_RNA (1)...(19): siRNA sense strand
auggaaacaucaauacaag

SEQ ID NO: 1184823 - RNA, 19 nt, Homo sapiens
  misc_RNA (1)...(19): siRNA sense strand
auacaucgaccacgacauc

SEQ ID NO: 1184824 - RNA, 19 nt, Homo sapiens
  misc_RNA (1)...(19): siRNA sense strand
acaugucauucaaguuuca

SEQ ID NO: 1184825 - RNA, 19 nt, Homo sapiens
  misc_RNA (1)...(19): siRNA sense strand
cggaugcuuuaucagaaga

SEQ ID NO: 1184826 - RNA, 19 nt, Homo sapiens
  misc_RNA (1)...(19): siRNA sense strand
gagguugucacagaugaug

SEQ ID NO: 1184827 - RNA, 19 nt, Homo sapiens
  misc_RNA (1)...(19): siRNA sense strand
gcaaauuccccgaagacuu

SEQ ID NO: 1184828 - RNA, 19 nt, Homo sapiens
  misc_RNA (1)...(19): siRNA sense strand
gaugacuugugagaaccaa

SEQ ID NO: 1184829 - RNA, 19 nt, Homo sapiens
  misc_RNA (1)...(19): siRNA sense strand
gagccaacaagcggaguga

SEQ ID NO: 1184830 - RNA, 19 nt, Homo sapiens
  misc_RNA (1)...(19): siRNA sense strand
ccaggaaggaugggauuuc

SEQ ID NO: 1184831 - RNA, 19 nt, Homo sapiens
  misc_RNA (1)...(19): siRNA sense strand
cagaugaugaccgcuauuc

SEQ ID NO: 1184832 - RNA, 19 nt, Homo sapiens
  misc_RNA (1)...(19): siRNA sense strand
ccugaggagucucgugucu

SEQ ID NO: 1184833 - RNA, 19 nt, Homo sapiens
  misc_RNA (1)...(19): siRNA sense strand
uguacaagcauccugacaa

SEQ ID NO: 1184834 - RNA, 19 nt, Homo sapiens
  misc_RNA (1)...(19): siRNA sense strand
caaaugagguugucacaga

SEQ ID NO: 1184835 - RNA, 19 nt, Homo sapiens
  misc_RNA (1)...(19): siRNA sense strand
gcagagaaaccucaagaaa

SEQ ID NO: 1184836 - RNA, 19 nt, Homo sapiens
  misc_RNA (1)...(19): siRNA sense strand
guacgugggucccuaugaa

SEQ ID NO: 1184837 - RNA, 19 nt, Homo sapiens
  misc_RNA (1)...(19): siRNA sense strand
gagcaucauugcaaacaug

SEQ ID NO: 1184838 - RNA, 19 nt, Homo sapiens
  misc_RNA (1)...(19): siRNA sense strand
caagacaugucauucaagu

SEQ ID NO: 1184839 - RNA, 19 nt, Homo sapiens
  misc_RNA (1)...(19): siRNA sense strand
ggagagugcugggauggaa

SEQ ID NO: 1184840 - RNA, 19 nt, Homo sapiens
  misc_RNA (1)...(19): siRNA sense strand
caacggaugcuuuaucaga

SEQ ID NO: 1184841 - RNA, 19 nt, Homo sapiens
  misc_RNA (1)...(19): siRNA sense strand
agacaugucauucaaguuu

SEQ ID NO: 1184842 - RNA, 19 nt, Homo sapiens
  misc_RNA (1)...(19): siRNA sense strand
acacuugccuggcgaacaa

SEQ ID NO: 1184843 - RNA, 19 nt, Homo sapiens
  misc_RNA (1)...(19): siRNA sense strand
guacaagcauccugacaac

SEQ ID NO: 1184844 - RNA, 19 nt, Homo sapiens
  misc_RNA (1)...(19): siRNA sense strand
ccacagagcaccagcaaag

SEQ ID NO: 1184845 - RNA, 19 nt, Homo sapiens
  misc_RNA (1)...(19): siRNA sense strand
ccagaugacuugugagaac

SEQ ID NO: 1184846 - RNA, 19 nt, Homo sapiens
  misc_RNA (1)...(19): siRNA sense strand
cagcagagauaauggaaac

SEQ ID NO: 1184847 - RNA, 19 nt, Homo sapiens
  misc_RNA (1)...(19): siRNA sense strand
ggcgugagcuggagaagca

SEQ ID NO: 1184848 - RNA, 19 nt, Homo sapiens
  misc_RNA (1)...(19): siRNA sense strand
cacaggagcuugcaacaac

SEQ ID NO: 1184849 - RNA, 19 nt, Homo sapiens
  misc_RNA (1)...(19): siRNA sense strand
ggagaacagccacgucuuc

SEQ ID NO: 1184850 - RNA, 19 nt, Homo sapiens
  misc_RNA (1)...(19): siRNA sense strand
gagcguggccgacaagauc

SEQ ID NO: 1184851 - RNA, 19 nt, Homo sapiens
  misc_RNA (1)...(19): siRNA sense strand
cagcaucacuggcaugaac

SEQ ID NO: 1184852 - RNA, 19 nt, Homo sapiens
  misc_RNA (1)...(19): siRNA sense strand
gcacggguaugagcuccaa

SEQ ID NO: 1184853 - RNA, 19 nt, Homo sapiens
  misc_RNA (1)...(19): siRNA sense strand
gguuauggccugcacagaa

SEQ ID NO: 1184854 - RNA, 19 nt, Homo sapiens
  misc_RNA (1)...(19): siRNA sense strand
caaauuccccgaagacuuu

SEQ ID NO: 1184855 - RNA, 19 nt, Homo sapiens
  misc_RNA (1)...(19): siRNA sense strand
gggaaagccugaggagucu

SEQ ID NO: 1184856 - RNA, 19 nt, Homo sapiens
  misc_RNA (1)...(19): siRNA sense strand
guuauggccugcacagaag

SEQ ID NO: 1184857 - RNA, 19 nt, Homo sapiens
  misc_RNA (1)...(19): siRNA sense strand
ccugaaaacucaacaauca

SEQ ID NO: 1184858 - RNA, 19 nt, Homo sapiens
  misc_RNA (1)...(19): siRNA sense strand
ccaacaagcggagugauug

SEQ ID NO: 1184859 - RNA, 19 nt, Homo sapiens
  misc_RNA (1)...(19): siRNA sense strand
ccagagagcguggagaaug

SEQ ID NO: 1184860 - RNA, 19 nt, Homo sapiens
  misc_RNA (1)...(19): siRNA sense strand
gaugaugaccgcuauucug

SEQ ID NO: 1184861 - RNA, 19 nt, Homo sapiens
  misc_RNA (1)...(19): siRNA sense strand
gacaugucauucaaguuuc

SEQ ID NO: 1184862 - RNA, 19 nt, Homo sapiens
  misc_RNA (1)...(19): siRNA sense strand
caagcauccugacaacauc

SEQ ID NO: 1184863 - RNA, 19 nt, Homo sapiens
  misc_RNA (1)...(19): siRNA sense strand
ugaggagucucgugucucu

SEQ ID NO: 1184864 - RNA, 19 nt, Homo sapiens
  misc_RNA (1)...(19): siRNA sense strand
cagagagcguggagaaugg

SEQ ID NO: 1184865 - RNA, 19 nt, Homo sapiens
  misc_RNA (1)...(19): siRNA sense strand
ccgacaagauccuggacuu

SEQ ID NO: 1184866 - RNA, 19 nt, Homo sapiens
  misc_RNA (1)...(19): siRNA sense strand
agagaaaccucaagaaaag

SEQ ID NO: 1184867 - RNA, 19 nt, Homo sapiens
  misc_RNA (1)...(19): siRNA sense strand
gggacuuugugcacuguga

SEQ ID NO: 1184868 - RNA, 19 nt, Homo sapiens
  misc_RNA (1)...(19): siRNA sense strand
uccaacggaugcuuuauca

SEQ ID NO: 1184869 - RNA, 19 nt, Homo sapiens
  misc_RNA (1)...(19): siRNA sense strand
gagauaauggaaacaucaa

SEQ ID NO: 1184870 - RNA, 19 nt, Homo sapiens
  misc_RNA (1)...(19): siRNA sense strand
gccaacaagcggagugauu

SEQ ID NO: 1184871 - RNA, 19 nt, Homo sapiens
  misc_RNA (1)...(19): siRNA sense strand
ugucucgggucaucuguga

SEQ ID NO: 1184872 - RNA, 19 nt, Homo sapiens
  misc_RNA (1)...(19): siRNA sense strand
gagaacagccacgucuuca

SEQ ID NO: 1184873 - RNA, 19 nt, Homo sapiens
  misc_RNA (1)...(19): siRNA sense strand
gagcagcagagauaaugga

SEQ ID NO: 1184874 - RNA, 19 nt, Homo sapiens
  misc_RNA (1)...(19): siRNA sense strand
gcagagauaauggaaacau

SEQ ID NO: 1184875 - RNA, 19 nt, Homo sapiens
  misc_RNA (1)...(19): siRNA sense strand
gagcuugcaacaacagaga

SEQ ID NO: 1184876 - RNA, 19 nt, Homo sapiens
  misc_RNA (1)...(19): siRNA sense strand
caaaaugcccaaacacuug

SEQ ID NO: 1184877 - RNA, 19 nt, Homo sapiens
  misc_RNA (1)...(19): siRNA sense strand
aaagaaaagucaaccugaa

SEQ ID NO: 1184878 - RNA, 19 nt, Homo sapiens
  misc_RNA (1)...(19): siRNA sense strand
cagagauaauggaaacauc

SEQ ID NO: 1184879 - RNA, 19 nt, Homo sapiens
  misc_RNA (1)...(19): siRNA sense strand
aaguguggcuucccagaga

SEQ ID NO: 1184880 - RNA, 19 nt, Homo sapiens
  misc_RNA (1)...(19): siRNA sense strand
gcugggaggcuuagcugaa

SEQ ID NO: 1184881 - RNA, 19 nt, Homo sapiens
  misc_RNA (1)...(19): siRNA sense strand
uacaagcgaugaaaagaaa

SEQ ID NO: 1184882 - RNA, 19 nt, Homo sapiens
  misc_RNA (1)...(19): siRNA sense strand
cagagaaaccucaagaaaa

SEQ ID NO: 1184883 - RNA, 19 nt, Homo sapiens
  misc_RNA (1)...(19): siRNA sense strand
ccgaggccuuccagcagua

SEQ ID NO: 1184884 - RNA, 19 nt, Homo sapiens
  misc_RNA (1)...(19): siRNA sense strand
caaacuuccugagccaaca

SEQ ID NO: 1184885 - RNA, 19 nt, Homo sapiens
  misc_RNA (1)...(19): siRNA sense strand
aacggaugcuuuaucagaa

SEQ ID NO: 1184886 - RNA, 19 nt, Homo sapiens
  misc_RNA (1)...(19): siRNA sense strand
ggcgcgugcugguguauuc

SEQ ID NO: 1184887 - RNA, 19 nt, Homo sapiens
  misc_RNA (1)...(19): siRNA sense strand
cuggaggccuggagggaaa

SEQ ID NO: 1184888 - RNA, 19 nt, Homo sapiens
  misc_RNA (1)...(19): siRNA sense strand
cacagaugaugaccgcuau

SEQ ID NO: 1184889 - RNA, 19 nt, Homo sapiens
  misc_RNA (1)...(19): siRNA sense strand
gcagcagagauaauggaaa

SEQ ID NO: 1184890 - RNA, 19 nt, Homo sapiens
  misc_RNA (1)...(19): siRNA sense strand
cugggaggcuuagcugaaa

SEQ ID NO: 1184891 - RNA, 19 nt, Homo sapiens
  misc_RNA (1)...(19): siRNA sense strand
aaaugagguugucacagau

SEQ ID NO: 1184892 - RNA, 19 nt, Homo sapiens
  misc_RNA (1)...(19): siRNA sense strand
caaauacaggcccaucaca

SEQ ID NO: 1184893 - RNA, 19 nt, Homo sapiens
  misc_RNA (1)...(19): siRNA sense strand
caacaaucacagcauccaa

SEQ ID NO: 1184894 - RNA, 19 nt, Homo sapiens
  misc_RNA (1)...(19): siRNA sense strand
aggcuuagcugaaaacuuc

SEQ ID NO: 1184895 - RNA, 19 nt, Homo sapiens
  misc_RNA (1)...(19): siRNA sense strand
cuucagcccauggacauua

SEQ ID NO: 1184896 - RNA, 19 nt, Homo sapiens
  misc_RNA (1)...(19): siRNA sense strand
acgccacgaugcagagaaa

SEQ ID NO: 1184897 - RNA, 19 nt, Homo sapiens
  misc_RNA (1)...(19): siRNA sense strand
gcaguacgugggucccuau

SEQ ID NO: 1184898 - RNA, 19 nt, Homo sapiens
  misc_RNA (1)...(19): siRNA sense strand
cuguuugccugucucauug

SEQ ID NO: 1184899 - RNA, 19 nt, Homo sapiens
  misc_RNA (1)...(19): siRNA sense strand
acaagcauccugacaacau

SEQ ID NO: 1184900 - RNA, 19 nt, Homo sapiens
  misc_RNA (1)...(19): siRNA sense strand
gagagggaaagaacuccuu

SEQ ID NO: 1184901 - RNA, 19 nt, Homo sapiens
  misc_RNA (1)...(19): siRNA sense strand
agagauaauggaaacauca

SEQ ID NO: 1184902 - RNA, 19 nt, Homo sapiens
  misc_RNA (1)...(19): siRNA sense strand
gacagcaucacuggcauga

SEQ ID NO: 1184903 - RNA, 19 nt, Homo sapiens
  misc_RNA (1)...(19): siRNA sense strand
ccuguuugccugucucauu

SEQ ID NO: 1184904 - RNA, 19 nt, Homo sapiens
  misc_RNA (1)...(19): siRNA sense strand
ucacaggagcuugcaacaa

SEQ ID NO: 1184905 - RNA, 19 nt, Homo sapiens
  misc_RNA (1)...(19): siRNA sense strand
ugcccgagcagcagagaua

SEQ ID NO: 1184906 - RNA, 19 nt, Homo sapiens
  misc_RNA (1)...(19): siRNA sense strand
acugccagaugacuuguga

SEQ ID NO: 1184907 - RNA, 19 nt, Homo sapiens
  misc_RNA (1)...(19): siRNA sense strand
auggaaacaucaauacaag

SEQ ID NO: 1184908 - RNA, 19 nt, Homo sapiens
  misc_RNA (1)...(19): siRNA sense strand
auacaucgaccacgacauc

SEQ ID NO: 1184909 - RNA, 19 nt, Homo sapiens
  misc_RNA (1)...(19): siRNA sense strand
acaugucauucaaguuuca

SEQ ID NO: 1184910 - RNA, 19 nt, Homo sapiens
  misc_RNA (1)...(19): siRNA sense strand
cggaugcuuuaucagaaga

SEQ ID NO: 1184911 - RNA, 19 nt, Homo sapiens
  misc_RNA (1)...(19): siRNA sense strand
gagguugucacagaugaug

SEQ ID NO: 1184912 - RNA, 19 nt, Homo sapiens
  misc_RNA (1)...(19): siRNA sense strand
gcaaauuccccgaagacuu

SEQ ID NO: 1184913 - RNA, 19 nt, Homo sapiens
  misc_RNA (1)...(19): siRNA sense strand
gaugacuugugagaaccaa

SEQ ID NO: 1184914 - RNA, 19 nt, Homo sapiens
  misc_RNA (1)...(19): siRNA sense strand
gagccaacaagcggaguga

SEQ ID NO: 1184915 - RNA, 19 nt, Homo sapiens
  misc_RNA (1)...(19): siRNA sense strand
ccaggaaggaugggauuuc

SEQ ID NO: 1184916 - RNA, 19 nt, Homo sapiens
  misc_RNA (1)...(19): siRNA sense strand
cagaugaugaccgcuauuc

SEQ ID NO: 1184917 - RNA, 19 nt, Homo sapiens
  misc_RNA (1)...(19): siRNA sense strand
ccugaggagucucgugucu

SEQ ID NO: 1184918 - RNA, 19 nt, Homo sapiens
  misc_RNA (1)...(19): siRNA sense strand
uguacaagcauccugacaa

SEQ ID NO: 1184919 - RNA, 19 nt, Homo sapiens
  misc_RNA (1)...(19): siRNA sense strand
caaaugagguugucacaga

SEQ ID NO: 1184920 - RNA, 19 nt, Homo sapiens
  misc_RNA (1)...(19): siRNA sense strand
gcagagaaaccucaagaaa

SEQ ID NO: 1184921 - RNA, 19 nt, Homo sapiens
  misc_RNA (1)...(19): siRNA sense strand
guacgugggucccuaugaa

SEQ ID NO: 1184922 - RNA, 19 nt, Homo sapiens
  misc_RNA (1)...(19): siRNA sense strand
gagcaucauugcaaacaug

SEQ ID NO: 1184923 - RNA, 19 nt, Homo sapiens
  misc_RNA (1)...(19): siRNA sense strand
caagacaugucauucaagu

SEQ ID NO: 1184924 - RNA, 19 nt, Homo sapiens
  misc_RNA (1)...(19): siRNA sense strand
ggagagugcugggauggaa

SEQ ID NO: 1184925 - RNA, 19 nt, Homo sapiens
  misc_RNA (1)...(19): siRNA sense strand
caacggaugcuuuaucaga

SEQ ID NO: 1184926 - RNA, 19 nt, Homo sapiens
  misc_RNA (1)...(19): siRNA sense strand
agacaugucauucaaguuu

SEQ ID NO: 1184927 - RNA, 19 nt, Homo sapiens
  misc_RNA (1)...(19): siRNA sense strand
acacuugccuggcgaacaa

SEQ ID NO: 1184928 - RNA, 19 nt, Homo sapiens
  misc_RNA (1)...(19): siRNA sense strand
guacaagcauccugacaac

SEQ ID NO: 1184929 - RNA, 19 nt, Homo sapiens
  misc_RNA (1)...(19): siRNA sense strand
ccacagagcaccagcaaag

SEQ ID NO: 1184930 - RNA, 19 nt, Homo sapiens
  misc_RNA (1)...(19): siRNA sense strand
ccagaugacuugugagaac

SEQ ID NO: 1184931 - RNA, 19 nt, Homo sapiens
  misc_RNA (1)...(19): siRNA sense strand
cagcagagauaauggaaac

SEQ ID NO: 1184932 - RNA, 19 nt, Homo sapiens
  misc_RNA (1)...(19): siRNA sense strand
ggcgugagcuggagaagca

SEQ ID NO: 1184933 - RNA, 19 nt, Homo sapiens
  misc_RNA (1)...(19): siRNA sense strand
cacaggagcuugcaacaac

SEQ ID NO: 1184934 - RNA, 19 nt, Homo sapiens
  misc_RNA (1)...(19): siRNA sense strand
ggagaacagccacgucuuc

SEQ ID NO: 1184935 - RNA, 19 nt, Homo sapiens
  misc_RNA (1)...(19): siRNA sense strand
gagcguggccgacaagauc

SEQ ID NO: 1184936 - RNA, 19 nt, Homo sapiens
  misc_RNA (1)...(19): siRNA sense strand
cagcaucacuggcaugaac

SEQ ID NO: 1184937 - RNA, 19 nt, Homo sapiens
  misc_RNA (1)...(19): siRNA sense strand
gcacggguaugagcuccaa

SEQ ID NO: 1184938 - RNA, 19 nt, Homo sapiens
  misc_RNA (1)...(19): siRNA sense strand
gguuauggccugcacagaa

SEQ ID NO: 1184939 - RNA, 19 nt, Homo sapiens
  misc_RNA (1)...(19): siRNA sense strand
caaauuccccgaagacuuu

SEQ ID NO: 1184940 - RNA, 19 nt, Homo sapiens
  misc_RNA (1)...(19): siRNA sense strand
gggaaagccugaggagucu

SEQ ID NO: 1184941 - RNA, 19 nt, Homo sapiens
  misc_RNA (1)...(19): siRNA sense strand
guuauggccugcacagaag

SEQ ID NO: 1184942 - RNA, 19 nt, Homo sapiens
  misc_RNA (1)...(19): siRNA sense strand
ccugaaaacucaacaauca

SEQ ID NO: 1184943 - RNA, 19 nt, Homo sapiens
  misc_RNA (1)...(19): siRNA sense strand
ccaacaagcggagugauug

SEQ ID NO: 1184944 - RNA, 19 nt, Homo sapiens
  misc_RNA (1)...(19): siRNA sense strand
ggacacugcagaacagcuu

SEQ ID NO: 1184945 - RNA, 19 nt, Homo sapiens
  misc_RNA (1)...(19): siRNA sense strand
ccagagagcguggagaaug

SEQ ID NO: 1184946 - RNA, 19 nt, Homo sapiens
  misc_RNA (1)...(19): siRNA sense strand
gaugaugaccgcuauucug

SEQ ID NO: 1184947 - RNA, 19 nt, Homo sapiens
  misc_RNA (1)...(19): siRNA sense strand
gacaugucauucaaguuuc

SEQ ID NO: 1184948 - RNA, 19 nt, Homo sapiens
  misc_RNA (1)...(19): siRNA sense strand
caagcauccugacaacauc

SEQ ID NO: 1184949 - RNA, 19 nt, Homo sapiens
  misc_RNA (1)...(19): siRNA sense strand
ccgacaagauccuggacuu

SEQ ID NO: 1184950 - RNA, 19 nt, Homo sapiens
  misc_RNA (1)...(19): siRNA sense strand
cagagagcguggagaaugg

SEQ ID NO: 1184951 - RNA, 19 nt, Homo sapiens
  misc_RNA (1)...(19): siRNA sense strand
ugaggagucucgugucucu

SEQ ID NO: 1184952 - RNA, 19 nt, Homo sapiens
  misc_RNA (1)...(19): siRNA sense strand
agagaaaccucaagaaaag

SEQ ID NO: 1184953 - RNA, 19 nt, Homo sapiens
  misc_RNA (1)...(19): siRNA sense strand
gggacuuugugcacuguga

SEQ ID NO: 1184954 - RNA, 19 nt, Homo sapiens
  misc_RNA (1)...(19): siRNA sense strand
uccaacggaugcuuuauca

SEQ ID NO: 1184955 - RNA, 19 nt, Homo sapiens
  misc_RNA (1)...(19): siRNA sense strand
gagauaauggaaacaucaa

SEQ ID NO: 1184956 - RNA, 19 nt, Homo sapiens
  misc_RNA (1)...(19): siRNA sense strand
gccaacaagcggagugauu

SEQ ID NO: 1184957 - RNA, 19 nt, Homo sapiens
  misc_RNA (1)...(19): siRNA sense strand
ugucucgggucaucuguga

SEQ ID NO: 1184958 - RNA, 19 nt, Homo sapiens
  misc_RNA (1)...(19): siRNA sense strand
gagaacagccacgucuuca

SEQ ID NO: 1184959 - RNA, 19 nt, Homo sapiens
  misc_RNA (1)...(19): siRNA sense strand
gagcagcagagauaaugga

SEQ ID NO: 1184960 - RNA, 19 nt, Homo sapiens
  misc_RNA (1)...(19): siRNA sense strand
gcagagauaauggaaacau

SEQ ID NO: 1184961 - RNA, 19 nt, Homo sapiens
  misc_RNA (1)...(19): siRNA sense strand
gagcuugcaacaacagaga

SEQ ID NO: 1184962 - RNA, 19 nt, Homo sapiens
  misc_RNA (1)...(19): siRNA sense strand
caaaaugcccaaacacuug

SEQ ID NO: 1184963 - RNA, 19 nt, Homo sapiens
  misc_RNA (1)...(19): siRNA sense strand
aaagaaaagucaaccugaa

SEQ ID NO: 1184964 - RNA, 19 nt, Homo sapiens
  misc_RNA (1)...(19): siRNA sense strand
cagagauaauggaaacauc

SEQ ID NO: 1184965 - RNA, 19 nt, Homo sapiens
  misc_RNA (1)...(19): siRNA sense strand
aaguguggcuucccagaga

SEQ ID NO: 1184966 - RNA, 19 nt, Homo sapiens
  misc_RNA (1)...(19): siRNA sense strand
gcugggaggcuuagcugaa

SEQ ID NO: 1184967 - RNA, 19 nt, Homo sapiens
  misc_RNA (1)...(19): siRNA sense strand
uacaagcgaugaaaagaaa

SEQ ID NO: 1184968 - RNA, 19 nt, Homo sapiens
  misc_RNA (1)...(19): siRNA sense strand
cagagaaaccucaagaaaa

SEQ ID NO: 1184969 - RNA, 19 nt, Homo sapiens
  misc_RNA (1)...(19): siRNA sense strand
ccgaggccuuccagcagua

SEQ ID NO: 1184970 - RNA, 19 nt, Homo sapiens
  misc_RNA (1)...(19): siRNA sense strand
caaacuuccugagccaaca

SEQ ID NO: 1184971 - RNA, 19 nt, Homo sapiens
  misc_RNA (1)...(19): siRNA sense strand
aacggaugcuuuaucagaa

SEQ ID NO: 1184972 - RNA, 19 nt, Homo sapiens
  misc_RNA (1)...(19): siRNA sense strand
ggcgcgugcugguguauuc

SEQ ID NO: 1184973 - RNA, 19 nt, Homo sapiens
  misc_RNA (1)...(19): siRNA sense strand
cuggaggccuggagggaaa

SEQ ID NO: 1184974 - RNA, 19 nt, Homo sapiens
  misc_RNA (1)...(19): siRNA sense strand
cacagaugaugaccgcuau

SEQ ID NO: 1184975 - RNA, 19 nt, Homo sapiens
  misc_RNA (1)...(19): siRNA sense strand
gcagcagagauaauggaaa

SEQ ID NO: 1184976 - RNA, 19 nt, Homo sapiens
  misc_RNA (1)...(19): siRNA sense strand
cugggaggcuuagcugaaa

SEQ ID NO: 1184977 - RNA, 19 nt, Homo sapiens
  misc_RNA (1)...(19): siRNA sense strand
aaaugagguugucacagau

SEQ ID NO: 1184978 - RNA, 19 nt, Homo sapiens
  misc_RNA (1)...(19): siRNA sense strand
caaauacaggcccaucaca

SEQ ID NO: 1184979 - RNA, 19 nt, Homo sapiens
  misc_RNA (1)...(19): siRNA sense strand
caacaaucacagcauccaa

SEQ ID NO: 1184980 - RNA, 19 nt, Homo sapiens
  misc_RNA (1)...(19): siRNA sense strand
aggcuuagcugaaaacuuc

SEQ ID NO: 1184981 - RNA, 19 nt, Homo sapiens
  misc_RNA (1)...(19): siRNA sense strand
cuucagcccauggacauua

SEQ ID NO: 1184982 - RNA, 19 nt, Homo sapiens
  misc_RNA (1)...(19): siRNA sense strand
acgccacgaugcagagaaa

SEQ ID NO: 1184983 - RNA, 19 nt, Homo sapiens
  misc_RNA (1)...(19): siRNA sense strand
gcaguacgugggucccuau

SEQ ID NO: 1184984 - RNA, 19 nt, Homo sapiens
  misc_RNA (1)...(19): siRNA sense strand
guacgacucuuuuccaaac

SEQ ID NO: 1184985 - RNA, 19 nt, Homo sapiens
  misc_RNA (1)...(19): siRNA sense strand
cuguuugccugucucauug

SEQ ID NO: 1184986 - RNA, 19 nt, Homo sapiens
  misc_RNA (1)...(19): siRNA sense strand
acaagcauccugacaacau

SEQ ID NO: 1184987 - RNA, 19 nt, Homo sapiens
  misc_RNA (1)...(19): siRNA sense strand
gagagggaaagaacuccuu

SEQ ID NO: 1184988 - RNA, 19 nt, Homo sapiens
  misc_RNA (1)...(19): siRNA sense strand
agagauaauggaaacauca

SEQ ID NO: 1184989 - RNA, 19 nt, Homo sapiens
  misc_RNA (1)...(19): siRNA sense strand
cugcagaacagcuucaugu

SEQ ID NO: 1184990 - RNA, 19 nt, Homo sapiens
  misc_RNA (1)...(19): siRNA sense strand
gacagcaucacuggcauga

SEQ ID NO: 1184991 - RNA, 19 nt, Homo sapiens
  misc_RNA (1)...(19): siRNA sense strand
ccuguuugccugucucauu

SEQ ID NO: 1184992 - RNA, 19 nt, Homo sapiens
  misc_RNA (1)...(19): siRNA sense strand
ucacaggagcuugcaacaa

SEQ ID NO: 1184993 - RNA, 19 nt, Homo sapiens
  misc_RNA (1)...(19): siRNA sense strand
ugcccgagcagcagagaua

SEQ ID NO: 1184994 - RNA, 19 nt, Homo sapiens
  misc_RNA (1)...(19): siRNA sense strand
acugccagaugacuuguga

SEQ ID NO: 1184995 - RNA, 19 nt, Homo sapiens
  misc_RNA (1)...(19): siRNA sense strand
auggaaacaucaauacaag

SEQ ID NO: 1184996 - RNA, 19 nt, Homo sapiens
  misc_RNA (1)...(19): siRNA sense strand
auacaucgaccacgacauc

SEQ ID NO: 1184997 - RNA, 19 nt, Homo sapiens
  misc_RNA (1)...(19): siRNA sense strand
acaugucauucaaguuuca

SEQ ID NO: 1184998 - RNA, 19 nt, Homo sapiens
  misc_RNA (1)...(19): siRNA sense strand
cggaugcuuuaucagaaga

SEQ ID NO: 1184999 - RNA, 19 nt, Homo sapiens
  misc_RNA (1)...(19): siRNA sense strand
gagguugucacagaugaug

SEQ ID NO: 1185000 - RNA, 19 nt, Homo sapiens
  misc_RNA (1)...(19): siRNA sense strand
gcaaauuccccgaagacuu

SEQ ID NO: 1185001 - RNA, 19 nt, Homo sapiens
  misc_RNA (1)...(19): siRNA sense strand
gaugacuugugagaaccaa

SEQ ID NO: 1185002 - RNA, 19 nt, Homo sapiens
  misc_RNA (1)...(19): siRNA sense strand
gagccaacaagcggaguga

SEQ ID NO: 1185003 - RNA, 19 nt, Homo sapiens
  misc_RNA (1)...(19): siRNA sense strand
ccaggaaggaugggauuuc

SEQ ID NO: 1185004 - RNA, 19 nt, Homo sapiens
  misc_RNA (1)...(19): siRNA sense strand
cagaugaugaccgcuauuc

SEQ ID NO: 1185005 - RNA, 19 nt, Homo sapiens
  misc_RNA (1)...(19): siRNA sense strand
ccugaggagucucgugucu

SEQ ID NO: 1185006 - RNA, 19 nt, Homo sapiens
  misc_RNA (1)...(19): siRNA sense strand
uguacaagcauccugacaa

SEQ ID NO: 1185007 - RNA, 19 nt, Homo sapiens
  misc_RNA (1)...(19): siRNA sense strand
caaaugagguugucacaga

SEQ ID NO: 1185008 - RNA, 19 nt, Homo sapiens
  misc_RNA (1)...(19): siRNA sense strand
gcagagaaaccucaagaaa

SEQ ID NO: 1185009 - RNA, 19 nt, Homo sapiens
  misc_RNA (1)...(19): siRNA sense strand
guacgugggucccuaugaa

SEQ ID NO: 1185010 - RNA, 19 nt, Homo sapiens
  misc_RNA (1)...(19): siRNA sense strand
gagcaucauugcaaacaug

SEQ ID NO: 1185011 - RNA, 19 nt, Homo sapiens
  misc_RNA (1)...(19): siRNA sense strand
caagacaugucauucaagu

SEQ ID NO: 1185012 - RNA, 19 nt, Homo sapiens
  misc_RNA (1)...(19): siRNA sense strand
ggagagugcugggauggaa

SEQ ID NO: 1185013 - RNA, 19 nt, Homo sapiens
  misc_RNA (1)...(19): siRNA sense strand
caacggaugcuuuaucaga

SEQ ID NO: 1185014 - RNA, 19 nt, Homo sapiens
  misc_RNA (1)...(19): siRNA sense strand
agacaugucauucaaguuu

SEQ ID NO: 1185015 - RNA, 19 nt, Homo sapiens
  misc_RNA (1)...(19): siRNA sense strand
acacuugccuggcgaacaa

SEQ ID NO: 1185016 - RNA, 19 nt, Homo sapiens
  misc_RNA (1)...(19): siRNA sense strand
guacaagcauccugacaac

SEQ ID NO: 1185017 - RNA, 19 nt, Homo sapiens
  misc_RNA (1)...(19): siRNA sense strand
ccacagagcaccagcaaag

SEQ ID NO: 1185018 - RNA, 19 nt, Homo sapiens
  misc_RNA (1)...(19): siRNA sense strand
ccagaugacuugugagaac

SEQ ID NO: 1185019 - RNA, 19 nt, Homo sapiens
  misc_RNA (1)...(19): siRNA sense strand
cagcagagauaauggaaac

SEQ ID NO: 1185020 - RNA, 19 nt, Homo sapiens
  misc_RNA (1)...(19): siRNA sense strand
ggcgugagcuggagaagca

SEQ ID NO: 1185021 - RNA, 19 nt, Homo sapiens
  misc_RNA (1)...(19): siRNA sense strand
cacaggagcuugcaacaac

SEQ ID NO: 1185022 - RNA, 19 nt, Homo sapiens
  misc_RNA (1)...(19): siRNA sense strand
ggagaacagccacgucuuc

SEQ ID NO: 1185023 - RNA, 19 nt, Homo sapiens
  misc_RNA (1)...(19): siRNA sense strand
gagcguggccgacaagauc

SEQ ID NO: 1185024 - RNA, 19 nt, Homo sapiens
  misc_RNA (1)...(19): siRNA sense strand
cagcaucacuggcaugaac

SEQ ID NO: 1185025 - RNA, 19 nt, Homo sapiens
  misc_RNA (1)...(19): siRNA sense strand
gcacggguaugagcuccaa

SEQ ID NO: 1185026 - RNA, 19 nt, Homo sapiens
  misc_RNA (1)...(19): siRNA sense strand
gguuauggccugcacagaa

SEQ ID NO: 1185027 - RNA, 19 nt, Homo sapiens
  misc_RNA (1)...(19): siRNA sense strand
caaauuccccgaagacuuu

SEQ ID NO: 1185028 - RNA, 19 nt, Homo sapiens
  misc_RNA (1)...(19): siRNA sense strand
gggaaagccugaggagucu

SEQ ID NO: 1185029 - RNA, 19 nt, Homo sapiens
  misc_RNA (1)...(19): siRNA sense strand
guuauggccugcacagaag

SEQ ID NO: 1185030 - RNA, 19 nt, Homo sapiens
  misc_RNA (1)...(19): siRNA sense strand
ccugaaaacucaacaauca

SEQ ID NO: 1185031 - RNA, 19 nt, Homo sapiens
  misc_RNA (1)...(19): siRNA sense strand
ccaacaagcggagugauug

SEQ ID NO: 1185032 - RNA, 19 nt, Homo sapiens
  misc_RNA (1)...(19): siRNA sense strand
ccagagagcguggagaaug

SEQ ID NO: 1185033 - RNA, 19 nt, Homo sapiens
  misc_RNA (1)...(19): siRNA sense strand
gaugaugaccgcuauucug

SEQ ID NO: 1185034 - RNA, 19 nt, Homo sapiens
  misc_RNA (1)...(19): siRNA sense strand
gacaugucauucaaguuuc

SEQ ID NO: 1185035 - RNA, 19 nt, Homo sapiens
  misc_RNA (1)...(19): siRNA sense strand
caagcauccugacaacauc

SEQ ID NO: 1185036 - RNA, 19 nt, Homo sapiens
  misc_RNA (1)...(19): siRNA sense strand
ugaggagucucgugucucu

SEQ ID NO: 1185037 - RNA, 19 nt, Homo sapiens
  misc_RNA (1)...(19): siRNA sense strand
cagagagcguggagaaugg

SEQ ID NO: 1185038 - RNA, 19 nt, Homo sapiens
  misc_RNA (1)...(19): siRNA sense strand
ccgacaagauccuggacuu

SEQ ID NO: 1185039 - RNA, 19 nt, Homo sapiens
  misc_RNA (1)...(19): siRNA sense strand
agagaaaccucaagaaaag

SEQ ID NO: 1185040 - RNA, 19 nt, Homo sapiens
  misc_RNA (1)...(19): siRNA sense strand
gggacuuugugcacuguga

SEQ ID NO: 1185041 - RNA, 19 nt, Homo sapiens
  misc_RNA (1)...(19): siRNA sense strand
uccaacggaugcuuuauca

SEQ ID NO: 1185042 - RNA, 19 nt, Homo sapiens
  misc_RNA (1)...(19): siRNA sense strand
gagauaauggaaacaucaa

SEQ ID NO: 1185043 - RNA, 19 nt, Homo sapiens
  misc_RNA (1)...(19): siRNA sense strand
gccaacaagcggagugauu

SEQ ID NO: 1185044 - RNA, 19 nt, Homo sapiens
  misc_RNA (1)...(19): siRNA sense strand
ugucucgggucaucuguga

SEQ ID NO: 1185045 - RNA, 19 nt, Homo sapiens
  misc_RNA (1)...(19): siRNA sense strand
gagaacagccacgucuuca

SEQ ID NO: 1185046 - RNA, 19 nt, Homo sapiens
  misc_RNA (1)...(19): siRNA sense strand
gagcagcagagauaaugga

SEQ ID NO: 1185047 - RNA, 19 nt, Homo sapiens
  misc_RNA (1)...(19): siRNA sense strand
gcagagauaauggaaacau

SEQ ID NO: 1185048 - RNA, 19 nt, Homo sapiens
  misc_RNA (1)...(19): siRNA sense strand
gagcuugcaacaacagaga

SEQ ID NO: 1185049 - RNA, 19 nt, Homo sapiens
  misc_RNA (1)...(19): siRNA sense strand
caaaaugcccaaacacuug

SEQ ID NO: 1185050 - RNA, 19 nt, Homo sapiens
  misc_RNA (1)...(19): siRNA sense strand
aaagaaaagucaaccugaa

SEQ ID NO: 1185051 - RNA, 19 nt, Homo sapiens
  misc_RNA (1)...(19): siRNA sense strand
cagagauaauggaaacauc

SEQ ID NO: 1185052 - RNA, 19 nt, Homo sapiens
  misc_RNA (1)...(19): siRNA sense strand
aaguguggcuucccagaga

SEQ ID NO: 1185053 - RNA, 19 nt, Homo sapiens
  misc_RNA (1)...(19): siRNA sense strand
gcugggaggcuuagcugaa

SEQ ID NO: 1185054 - RNA, 19 nt, Homo sapiens
  misc_RNA (1)...(19): siRNA sense strand
uacaagcgaugaaaagaaa

SEQ ID NO: 1185055 - RNA, 19 nt, Homo sapiens
  misc_RNA (1)...(19): siRNA sense strand
cagagaaaccucaagaaaa

SEQ ID NO: 1185056 - RNA, 19 nt, Homo sapiens
  misc_RNA (1)...(19): siRNA sense strand
ccgaggccuuccagcagua

SEQ ID NO: 1185057 - RNA, 19 nt, Homo sapiens
  misc_RNA (1)...(19): siRNA sense strand
caaacuuccugagccaaca

SEQ ID NO: 1185058 - RNA, 19 nt, Homo sapiens
  misc_RNA (1)...(19): siRNA sense strand
aacggaugcuuuaucagaa

SEQ ID NO: 1185059 - RNA, 19 nt, Homo sapiens
  misc_RNA (1)...(19): siRNA sense strand
ggcgcgugcugguguauuc

SEQ ID NO: 1185060 - RNA, 19 nt, Homo sapiens
  misc_RNA (1)...(19): siRNA sense strand
cuggaggccuggagggaaa

SEQ ID NO: 1185061 - RNA, 19 nt, Homo sapiens
  misc_RNA (1)...(19): siRNA sense strand
cacagaugaugaccgcuau

SEQ ID NO: 1185062 - RNA, 19 nt, Homo sapiens
  misc_RNA (1)...(19): siRNA sense strand
gcagcagagauaauggaaa

SEQ ID NO: 1185063 - RNA, 19 nt, Homo sapiens
  misc_RNA (1)...(19): siRNA sense strand
cugggaggcuuagcugaaa

SEQ ID NO: 1185064 - RNA, 19 nt, Homo sapiens
  misc_RNA (1)...(19): siRNA sense strand
aaaugagguugucacagau

SEQ ID NO: 1185065 - RNA, 19 nt, Homo sapiens
  misc_RNA (1)...(19): siRNA sense strand
caaauacaggcccaucaca

SEQ ID NO: 1185066 - RNA, 19 nt, Homo sapiens
  misc_RNA (1)...(19): siRNA sense strand
caacaaucacagcauccaa

SEQ ID NO: 1185067 - RNA, 19 nt, Homo sapiens
  misc_RNA (1)...(19): siRNA sense strand
aggcuuagcugaaaacuuc

SEQ ID NO: 1185068 - RNA, 19 nt, Homo sapiens
  misc_RNA (1)...(19): siRNA sense strand
cuucagcccauggacauua

SEQ ID NO: 1185069 - RNA, 19 nt, Homo sapiens
  misc_RNA (1)...(19): siRNA sense strand
acgccacgaugcagagaaa

SEQ ID NO: 1185070 - RNA, 19 nt, Homo sapiens
  misc_RNA (1)...(19): siRNA sense strand
gcaguacgugggucccuau

SEQ ID NO: 1185071 - RNA, 19 nt, Homo sapiens
  misc_RNA (1)...(19): siRNA sense strand
cuguuugccugucucauug

SEQ ID NO: 1185072 - RNA, 19 nt, Homo sapiens
  misc_RNA (1)...(19): siRNA sense strand
acaagcauccugacaacau

SEQ ID NO: 1185073 - RNA, 19 nt, Homo sapiens
  misc_RNA (1)...(19): siRNA sense strand
gagagggaaagaacuccuu

SEQ ID NO: 1185074 - RNA, 19 nt, Homo sapiens
  misc_RNA (1)...(19): siRNA sense strand
agagauaauggaaacauca

SEQ ID NO: 1185075 - RNA, 19 nt, Homo sapiens
  misc_RNA (1)...(19): siRNA sense strand
gacagcaucacuggcauga

SEQ ID NO: 1185076 - RNA, 19 nt, Homo sapiens
  misc_RNA (1)...(19): siRNA sense strand
ccuguuugccugucucauu

SEQ ID NO: 1185077 - RNA, 19 nt, Homo sapiens
  misc_RNA (1)...(19): siRNA sense strand
ucacaggagcuugcaacaa

SEQ ID NO: 1185078 - RNA, 19 nt, Homo sapiens
  misc_RNA (1)...(19): siRNA sense strand
ugcccgagcagcagagaua

SEQ ID NO: 1185079 - RNA, 19 nt, Homo sapiens
  misc_RNA (1)...(19): siRNA sense strand
acugccagaugacuuguga

SEQ ID NO: 1185080 - RNA, 19 nt, Homo sapiens
  misc_RNA (1)...(19): siRNA sense strand
auggaaacaucaauacaag

SEQ ID NO: 1185081 - RNA, 19 nt, Homo sapiens
  misc_RNA (1)...(19): siRNA sense strand
auacaucgaccacgacauc

SEQ ID NO: 1185082 - RNA, 19 nt, Homo sapiens
  misc_RNA (1)...(19): siRNA sense strand
acaugucauucaaguuuca

SEQ ID NO: 1185083 - RNA, 19 nt, Homo sapiens
  misc_RNA (1)...(19): siRNA sense strand
cggaugcuuuaucagaaga

SEQ ID NO: 1185084 - RNA, 19 nt, Homo sapiens
  misc_RNA (1)...(19): siRNA sense strand
gagguugucacagaugaug

SEQ ID NO: 1185085 - RNA, 19 nt, Homo sapiens
  misc_RNA (1)...(19): siRNA sense strand
gcaaauuccccgaagacuu

SEQ ID NO: 1185086 - RNA, 19 nt, Homo sapiens
  misc_RNA (1)...(19): siRNA sense strand
gaugacuugugagaaccaa

SEQ ID NO: 1185087 - RNA, 19 nt, Homo sapiens
  misc_RNA (1)...(19): siRNA sense strand
gagccaacaagcggaguga

SEQ ID NO: 1185088 - RNA, 19 nt, Homo sapiens
  misc_RNA (1)...(19): siRNA sense strand
ccaggaaggaugggauuuc

SEQ ID NO: 1185089 - RNA, 19 nt, Homo sapiens
  misc_RNA (1)...(19): siRNA sense strand
cagaugaugaccgcuauuc

SEQ ID NO: 1185090 - RNA, 19 nt, Homo sapiens
  misc_RNA (1)...(19): siRNA sense strand
ccugaggagucucgugucu

SEQ ID NO: 1185091 - RNA, 19 nt, Homo sapiens
  misc_RNA (1)...(19): siRNA sense strand
uguacaagcauccugacaa

SEQ ID NO: 1185092 - RNA, 19 nt, Homo sapiens
  misc_RNA (1)...(19): siRNA sense strand
caaaugagguugucacaga

SEQ ID NO: 1185093 - RNA, 19 nt, Homo sapiens
  misc_RNA (1)...(19): siRNA sense strand
gcagagaaaccucaagaaa

SEQ ID NO: 1185094 - RNA, 19 nt, Homo sapiens
  misc_RNA (1)...(19): siRNA sense strand
guacgugggucccuaugaa

SEQ ID NO: 1185095 - RNA, 19 nt, Homo sapiens
  misc_RNA (1)...(19): siRNA sense strand
gagcaucauugcaaacaug

SEQ ID NO: 1185096 - RNA, 19 nt, Homo sapiens
  misc_RNA (1)...(19): siRNA sense strand
caagacaugucauucaagu

SEQ ID NO: 1185097 - RNA, 19 nt, Homo sapiens
  misc_RNA (1)...(19): siRNA sense strand
ggagagugcugggauggaa

SEQ ID NO: 1185098 - RNA, 19 nt, Homo sapiens
  misc_RNA (1)...(19): siRNA sense strand
caacggaugcuuuaucaga

SEQ ID NO: 1185099 - RNA, 19 nt, Homo sapiens
  misc_RNA (1)...(19): siRNA sense strand
agacaugucauucaaguuu

SEQ ID NO: 1185100 - RNA, 19 nt, Homo sapiens
  misc_RNA (1)...(19): siRNA sense strand
acacuugccuggcgaacaa

SEQ ID NO: 1185101 - RNA, 19 nt, Homo sapiens
  misc_RNA (1)...(19): siRNA sense strand
guacaagcauccugacaac

SEQ ID NO: 1185102 - RNA, 19 nt, Homo sapiens
  misc_RNA (1)...(19): siRNA sense strand
ccacagagcaccagcaaag

SEQ ID NO: 1185103 - RNA, 19 nt, Homo sapiens
  misc_RNA (1)...(19): siRNA sense strand
ccagaugacuugugagaac

SEQ ID NO: 1185104 - RNA, 19 nt, Homo sapiens
  misc_RNA (1)...(19): siRNA sense strand
cagcagagauaauggaaac

SEQ ID NO: 1185105 - RNA, 19 nt, Homo sapiens
  misc_RNA (1)...(19): siRNA sense strand
ggcgugagcuggagaagca

SEQ ID NO: 1185106 - RNA, 19 nt, Homo sapiens
  misc_RNA (1)...(19): siRNA sense strand
cacaggagcuugcaacaac

SEQ ID NO: 1185107 - RNA, 19 nt, Homo sapiens
  misc_RNA (1)...(19): siRNA sense strand
ggagaacagccacgucuuc

SEQ ID NO: 1185108 - RNA, 19 nt, Homo sapiens
  misc_RNA (1)...(19): siRNA sense strand
gagcguggccgacaagauc

SEQ ID NO: 1185109 - RNA, 19 nt, Homo sapiens
  misc_RNA (1)...(19): siRNA sense strand
cagcaucacuggcaugaac

SEQ ID NO: 1185110 - RNA, 19 nt, Homo sapiens
  misc_RNA (1)...(19): siRNA sense strand
gcacggguaugagcuccaa

SEQ ID NO: 1185111 - RNA, 19 nt, Homo sapiens
  misc_RNA (1)...(19): siRNA sense strand
gguuauggccugcacagaa

SEQ ID NO: 1185112 - RNA, 19 nt, Homo sapiens
  misc_RNA (1)...(19): siRNA sense strand
caaauuccccgaagacuuu

SEQ ID NO: 1185113 - RNA, 19 nt, Homo sapiens
  misc_RNA (1)...(19): siRNA sense strand
gggaaagccugaggagucu

SEQ ID NO: 1185114 - RNA, 19 nt, Homo sapiens
  misc_RNA (1)...(19): siRNA sense strand
guuauggccugcacagaag

SEQ ID NO: 1185115 - RNA, 19 nt, Homo sapiens
  misc_RNA (1)...(19): siRNA sense strand
ccugaaaacucaacaauca

SEQ ID NO: 1185116 - RNA, 19 nt, Homo sapiens
  misc_RNA (1)...(19): siRNA sense strand
ccaacaagcggagugauug

SEQ ID NO: 1185117 - RNA, 19 nt, Homo sapiens
  misc_RNA (1)...(19): siRNA sense strand
ccagagagcguggagaaug

SEQ ID NO: 1185118 - RNA, 19 nt, Homo sapiens
  misc_RNA (1)...(19): siRNA sense strand
gaugaugaccgcuauucug

SEQ ID NO: 1185119 - RNA, 19 nt, Homo sapiens
  misc_RNA (1)...(19): siRNA sense strand
gacaugucauucaaguuuc

SEQ ID NO: 1185120 - RNA, 19 nt, Homo sapiens
  misc_RNA (1)...(19): siRNA sense strand
caagcauccugacaacauc

SEQ ID NO: 1185121 - RNA, 19 nt, Homo sapiens
  misc_RNA (1)...(19): siRNA sense strand
ugaggagucucgugucucu

SEQ ID NO: 1185122 - RNA, 19 nt, Homo sapiens
  misc_RNA (1)...(19): siRNA sense strand
cagagagcguggagaaugg

SEQ ID NO: 1185123 - RNA, 19 nt, Homo sapiens
  misc_RNA (1)...(19): siRNA sense strand
ccgacaagauccuggacuu

SEQ ID NO: 1185124 - RNA, 19 nt, Homo sapiens
  misc_RNA (1)...(19): siRNA sense strand
agagaaaccucaagaaaag

SEQ ID NO: 1185125 - RNA, 19 nt, Homo sapiens
  misc_RNA (1)...(19): siRNA sense strand
gggacuuugugcacuguga

SEQ ID NO: 1185126 - RNA, 19 nt, Homo sapiens
  misc_RNA (1)...(19): siRNA sense strand
uccaacggaugcuuuauca

SEQ ID NO: 1185127 - RNA, 19 nt, Homo sapiens
  misc_RNA (1)...(19): siRNA sense strand
gagauaauggaaacaucaa

SEQ ID NO: 1185128 - RNA, 19 nt, Homo sapiens
  misc_RNA (1)...(19): siRNA sense strand
gccaacaagcggagugauu

SEQ ID NO: 1185129 - RNA, 19 nt, Homo sapiens
  misc_RNA (1)...(19): siRNA sense strand
ugucucgggucaucuguga

SEQ ID NO: 1185130 - RNA, 19 nt, Homo sapiens
  misc_RNA (1)...(19): siRNA sense strand
gagaacagccacgucuuca

SEQ ID NO: 1185131 - RNA, 19 nt, Homo sapiens
  misc_RNA (1)...(19): siRNA sense strand
gagcagcagagauaaugga

SEQ ID NO: 1185132 - RNA, 19 nt, Homo sapiens
  misc_RNA (1)...(19): siRNA sense strand
gcagagauaauggaaacau

SEQ ID NO: 1185133 - RNA, 19 nt, Homo sapiens
  misc_RNA (1)...(19): siRNA sense strand
gagcuugcaacaacagaga

SEQ ID NO: 1185134 - RNA, 19 nt, Homo sapiens
  misc_RNA (1)...(19): siRNA sense strand
caaaaugcccaaacacuug

SEQ ID NO: 1185135 - RNA, 19 nt, Homo sapiens
  misc_RNA (1)...(19): siRNA sense strand
aaagaaaagucaaccugaa

SEQ ID NO: 1185136 - RNA, 19 nt, Homo sapiens
  misc_RNA (1)...(19): siRNA sense strand
cagagauaauggaaacauc

SEQ ID NO: 1185137 - RNA, 19 nt, Homo sapiens
  misc_RNA (1)...(19): siRNA sense strand
aaguguggcuucccagaga

SEQ ID NO: 1185138 - RNA, 19 nt, Homo sapiens
  misc_RNA (1)...(19): siRNA sense strand
gcugggaggcuuagcugaa

SEQ ID NO: 1185139 - RNA, 19 nt, Homo sapiens
  misc_RNA (1)...(19): siRNA sense strand
uacaagcgaugaaaagaaa

SEQ ID NO: 1185140 - RNA, 19 nt, Homo sapiens
  misc_RNA (1)...(19): siRNA sense strand
cagagaaaccucaagaaaa

SEQ ID NO: 1185141 - RNA, 19 nt, Homo sapiens
  misc_RNA (1)...(19): siRNA sense strand
ccgaggccuuccagcagua

SEQ ID NO: 1185142 - RNA, 19 nt, Homo sapiens
  misc_RNA (1)...(19): siRNA sense strand
caaacuuccugagccaaca

SEQ ID NO: 1185143 - RNA, 19 nt, Homo sapiens
  misc_RNA (1)...(19): siRNA sense strand
aacggaugcuuuaucagaa

SEQ ID NO: 1185144 - RNA, 19 nt, Homo sapiens
  misc_RNA (1)...(19): siRNA sense strand
ggcgcgugcugguguauuc

SEQ ID NO: 1185145 - RNA, 19 nt, Homo sapiens
  misc_RNA (1)...(19): siRNA sense strand
cuggaggccuggagggaaa

SEQ ID NO: 1185146 - RNA, 19 nt, Homo sapiens
  misc_RNA (1)...(19): siRNA sense strand
cacagaugaugaccgcuau

SEQ ID NO: 1185147 - RNA, 19 nt, Homo sapiens
  misc_RNA (1)...(19): siRNA sense strand
gcagcagagauaauggaaa

SEQ ID NO: 1185148 - RNA, 19 nt, Homo sapiens
  misc_RNA (1)...(19): siRNA sense strand
cugggaggcuuagcugaaa

SEQ ID NO: 1185149 - RNA, 19 nt, Homo sapiens
  misc_RNA (1)...(19): siRNA sense strand
aaaugagguugucacagau

SEQ ID NO: 1185150 - RNA, 19 nt, Homo sapiens
  misc_RNA (1)...(19): siRNA sense strand
caaauacaggcccaucaca

SEQ ID NO: 1185151 - RNA, 19 nt, Homo sapiens
  misc_RNA (1)...(19): siRNA sense strand
caacaaucacagcauccaa

SEQ ID NO: 1185152 - RNA, 19 nt, Homo sapiens
  misc_RNA (1)...(19): siRNA sense strand
aggcuuagcugaaaacuuc

SEQ ID NO: 1185153 - RNA, 19 nt, Homo sapiens
  misc_RNA (1)...(19): siRNA sense strand
cuucagcccauggacauua

SEQ ID NO: 1185154 - RNA, 19 nt, Homo sapiens
  misc_RNA (1)...(19): siRNA sense strand
acgccacgaugcagagaaa

SEQ ID NO: 1185155 - RNA, 19 nt, Homo sapiens
  misc_RNA (1)...(19): siRNA sense strand
gcaguacgugggucccuau

SEQ ID NO: 1185156 - RNA, 19 nt, Homo sapiens
  misc_RNA (1)...(19): siRNA sense strand
cuguuugccugucucauug

SEQ ID NO: 1185157 - RNA, 19 nt, Homo sapiens
  misc_RNA (1)...(19): siRNA sense strand
acaagcauccugacaacau

SEQ ID NO: 1185158 - RNA, 19 nt, Homo sapiens
  misc_RNA (1)...(19): siRNA sense strand
gagagggaaagaacuccuu

SEQ ID NO: 1185159 - RNA, 19 nt, Homo sapiens
  misc_RNA (1)...(19): siRNA sense strand
agagauaauggaaacauca

SEQ ID NO: 1185160 - RNA, 19 nt, Homo sapiens
  misc_RNA (1)...(19): siRNA sense strand
gacagcaucacuggcauga

SEQ ID NO: 1185161 - RNA, 19 nt, Homo sapiens
  misc_RNA (1)...(19): siRNA sense strand
ccuguuugccugucucauu

SEQ ID NO: 1185162 - RNA, 19 nt, Homo sapiens
  misc_RNA (1)...(19): siRNA sense strand
ucacaggagcuugcaacaa

SEQ ID NO: 1185163 - RNA, 19 nt, Homo sapiens
  misc_RNA (1)...(19): siRNA sense strand
ugcccgagcagcagagaua

SEQ ID NO: 1185164 - RNA, 19 nt, Homo sapiens
  misc_RNA (1)...(19): siRNA sense strand
acugccagaugacuuguga

SEQ ID NO: 1185165 - RNA, 19 nt, Homo sapiens
  misc_RNA (1)...(19): siRNA sense strand
auggaaacaucaauacaag

SEQ ID NO: 1185166 - RNA, 19 nt, Homo sapiens
  misc_RNA (1)...(19): siRNA sense strand
auacaucgaccacgacauc

SEQ ID NO: 1185167 - RNA, 19 nt, Homo sapiens
  misc_RNA (1)...(19): siRNA sense strand
acaugucauucaaguuuca

SEQ ID NO: 1185168 - RNA, 19 nt, Homo sapiens
  misc_RNA (1)...(19): siRNA sense strand
cggaugcuuuaucagaaga

SEQ ID NO: 1185169 - RNA, 19 nt, Homo sapiens
  misc_RNA (1)...(19): siRNA sense strand
gagguugucacagaugaug

SEQ ID NO: 1185170 - RNA, 19 nt, Homo sapiens
  misc_RNA (1)...(19): siRNA sense strand
gcaaauuccccgaagacuu

SEQ ID NO: 1185171 - RNA, 19 nt, Homo sapiens
  misc_RNA (1)...(19): siRNA sense strand
gaugacuugugagaaccaa

SEQ ID NO: 1185172 - RNA, 19 nt, Homo sapiens
  misc_RNA (1)...(19): siRNA sense strand
gagccaacaagcggaguga

SEQ ID NO: 1185173 - RNA, 19 nt, Homo sapiens
  misc_RNA (1)...(19): siRNA sense strand
ccaggaaggaugggauuuc

SEQ ID NO: 1185174 - RNA, 19 nt, Homo sapiens
  misc_RNA (1)...(19): siRNA sense strand
cagaugaugaccgcuauuc

SEQ ID NO: 1185175 - RNA, 19 nt, Homo sapiens
  misc_RNA (1)...(19): siRNA sense strand
ccugaggagucucgugucu

SEQ ID NO: 1185176 - RNA, 19 nt, Homo sapiens
  misc_RNA (1)...(19): siRNA sense strand
uguacaagcauccugacaa

SEQ ID NO: 1185177 - RNA, 19 nt, Homo sapiens
  misc_RNA (1)...(19): siRNA sense strand
ggacaaugcuguugaauuu

SEQ ID NO: 1185178 - RNA, 19 nt, Homo sapiens
  misc_RNA (1)...(19): siRNA sense strand
gaagagaacugggagagua

SEQ ID NO: 1185179 - RNA, 19 nt, Homo sapiens
  misc_RNA (1)...(19): siRNA sense strand
ggaaagagcccuugcauug

SEQ ID NO: 1185180 - RNA, 19 nt, Homo sapiens
  misc_RNA (1)...(19): siRNA sense strand
caaagaagcugccgggaaa

SEQ ID NO: 1185181 - RNA, 19 nt, Homo sapiens
  misc_RNA (1)...(19): siRNA sense strand
gcacugagcuguggaaaca

SEQ ID NO: 1185182 - RNA, 19 nt, Homo sapiens
  misc_RNA (1)...(19): siRNA sense strand
ccacguggcaucuuuaaua

SEQ ID NO: 1185183 - RNA, 19 nt, Homo sapiens
  misc_RNA (1)...(19): siRNA sense strand
cagcaaaucaugaaguuua

SEQ ID NO: 1185184 - RNA, 19 nt, Homo sapiens
  misc_RNA (1)...(19): siRNA sense strand
ucacauggauauagacaaa

SEQ ID NO: 1185185 - RNA, 19 nt, Homo sapiens
  misc_RNA (1)...(19): siRNA sense strand
caagaugucuggaaaugga

SEQ ID NO: 1185186 - RNA, 19 nt, Homo sapiens
  misc_RNA (1)...(19): siRNA sense strand
gaauugcuauggcguggua

SEQ ID NO: 1185187 - RNA, 19 nt, Homo sapiens
  misc_RNA (1)...(19): siRNA sense strand
acaguguucucuaauguua

SEQ ID NO: 1185188 - RNA, 19 nt, Homo sapiens
  misc_RNA (1)...(19): siRNA sense strand
ugaauauuguuccugguua

SEQ ID NO: 1185189 - RNA, 19 nt, Homo sapiens
  misc_RNA (1)...(19): siRNA sense strand
agaaguauauccuuggaaa

SEQ ID NO: 1185190 - RNA, 19 nt, Homo sapiens
  misc_RNA (1)...(19): siRNA sense strand
ccaaagacauugauaaagc

SEQ ID NO: 1185191 - RNA, 19 nt, Homo sapiens
  misc_RNA (1)...(19): siRNA sense strand
gagcaaacaauacuuucua

SEQ ID NO: 1185192 - RNA, 19 nt, Homo sapiens
  misc_RNA (1)...(19): siRNA sense strand
gaauauuguuccugguuau

SEQ ID NO: 1185193 - RNA, 19 nt, Homo sapiens
  misc_RNA (1)...(19): siRNA sense strand
uauacaaguuggcugauuu

SEQ ID NO: 1185194 - RNA, 19 nt, Homo sapiens
  misc_RNA (1)...(19): siRNA sense strand
gaacagugugggugaauug

SEQ ID NO: 1185195 - RNA, 19 nt, Homo sapiens
  misc_RNA (1)...(19): siRNA sense strand
gaaacacagugguugucaa

SEQ ID NO: 1185196 - RNA, 19 nt, Homo sapiens
  misc_RNA (1)...(19): siRNA sense strand
gauucaagaugucuggaaa

SEQ ID NO: 1185197 - RNA, 19 nt, Homo sapiens
  misc_RNA (1)...(19): siRNA sense strand
ccacaguguucucuaaugu

SEQ ID NO: 1185198 - RNA, 19 nt, Homo sapiens
  misc_RNA (1)...(19): siRNA sense strand
agacauugauaaagccaua

SEQ ID NO: 1185199 - RNA, 19 nt, Homo sapiens
  misc_RNA (1)...(19): siRNA sense strand
ucucuaauguuacagauga

SEQ ID NO: 1185200 - RNA, 19 nt, Homo sapiens
  misc_RNA (1)...(19): siRNA sense strand
gggcagccauuucuucuca

SEQ ID NO: 1185201 - RNA, 19 nt, Homo sapiens
  misc_RNA (1)...(19): siRNA sense strand
gagauaaggaggauguuga

SEQ ID NO: 1185202 - RNA, 19 nt, Homo sapiens
  misc_RNA (1)...(19): siRNA sense strand
gacaaggaacaauaugaua

SEQ ID NO: 1185203 - RNA, 19 nt, Homo sapiens
  misc_RNA (1)...(19): siRNA sense strand
gauccagggccguacaaua

SEQ ID NO: 1185204 - RNA, 19 nt, Homo sapiens
  misc_RNA (1)...(19): siRNA sense strand
gauaaagccauaacaaucu

SEQ ID NO: 1185205 - RNA, 19 nt, Homo sapiens
  misc_RNA (1)...(19): siRNA sense strand
aaagagcccuugcauugug

SEQ ID NO: 1185206 - RNA, 19 nt, Homo sapiens
  misc_RNA (1)...(19): siRNA sense strand
uacaagacaugaaccuauu

SEQ ID NO: 1185207 - RNA, 19 nt, Homo sapiens
  misc_RNA (1)...(19): siRNA sense strand
cacguggcaucuuuaauaa

SEQ ID NO: 1185208 - RNA, 19 nt, Homo sapiens
  misc_RNA (1)...(19): siRNA sense strand
gaaagagcccuugcauugu

SEQ ID NO: 1185209 - RNA, 19 nt, Homo sapiens
  misc_RNA (1)...(19): siRNA sense strand
ggaacagugugggugaauu

SEQ ID NO: 1185210 - RNA, 19 nt, Homo sapiens
  misc_RNA (1)...(19): siRNA sense strand
gcaggaguguuuaccaaag

SEQ ID NO: 1185211 - RNA, 19 nt, Homo sapiens
  misc_RNA (1)...(19): siRNA sense strand
ggcaagaaauuuccugucu

SEQ ID NO: 1185212 - RNA, 19 nt, Homo sapiens
  misc_RNA (1)...(19): siRNA sense strand
gagaguacgguuuccauga

SEQ ID NO: 1185213 - RNA, 19 nt, Homo sapiens
  misc_RNA (1)...(19): siRNA sense strand
uaaggaggauguugacaag

SEQ ID NO: 1185214 - RNA, 19 nt, Homo sapiens
  misc_RNA (1)...(19): siRNA sense strand
caaacaauacuuucuaugg

SEQ ID NO: 1185215 - RNA, 19 nt, Homo sapiens
  misc_RNA (1)...(19): siRNA sense strand
guggaagaaucaauuuaug

SEQ ID NO: 1185216 - RNA, 19 nt, Homo sapiens
  misc_RNA (1)...(19): siRNA sense strand
agacuuaccuguccuacuc

SEQ ID NO: 1185217 - RNA, 19 nt, Homo sapiens
  misc_RNA (1)...(19): siRNA sense strand
gcccucagauugacaagga

SEQ ID NO: 1185218 - RNA, 19 nt, Homo sapiens
  misc_RNA (1)...(19): siRNA sense strand
uaagaaguauauccuugga

SEQ ID NO: 1185219 - RNA, 19 nt, Homo sapiens
  misc_RNA (1)...(19): siRNA sense strand
acaauggagucaaugaaug

SEQ ID NO: 1185220 - RNA, 19 nt, Homo sapiens
  misc_RNA (1)...(19): siRNA sense strand
cagcaggaguguuuaccaa

SEQ ID NO: 1185221 - RNA, 19 nt, Homo sapiens
  misc_RNA (1)...(19): siRNA sense strand
gugaaaaucucucagaaga

SEQ ID NO: 1185222 - RNA, 19 nt, Homo sapiens
  misc_RNA (1)...(19): siRNA sense strand
aaaguagccuucacaggau

SEQ ID NO: 1185223 - RNA, 19 nt, Homo sapiens
  misc_RNA (1)...(19): siRNA sense strand
agaguacgguuuccaugaa

SEQ ID NO: 1185224 - RNA, 19 nt, Homo sapiens
  misc_RNA (1)...(19): siRNA sense strand
gggcgacuauuauacaagu

SEQ ID NO: 1185225 - RNA, 19 nt, Homo sapiens
  misc_RNA (1)...(19): siRNA sense strand
aacaaugaauggcaugauu

SEQ ID NO: 1185226 - RNA, 19 nt, Homo sapiens
  misc_RNA (1)...(19): siRNA sense strand
acaugaaccuauuggugua

SEQ ID NO: 1185227 - RNA, 19 nt, Homo sapiens
  misc_RNA (1)...(19): siRNA sense strand
aaacacagugguugucaaa

SEQ ID NO: 1185228 - RNA, 19 nt, Homo sapiens
  misc_RNA (1)...(19): siRNA sense strand
gcaaacaauacuuucuaug

SEQ ID NO: 1185229 - RNA, 19 nt, Homo sapiens
  misc_RNA (1)...(19): siRNA sense strand
caggaguguuuaccaaaga

SEQ ID NO: 1185230 - RNA, 19 nt, Homo sapiens
  misc_RNA (1)...(19): siRNA sense strand
gacaauggagucaaugaau

SEQ ID NO: 1185231 - RNA, 19 nt, Homo sapiens
  misc_RNA (1)...(19): siRNA sense strand
gaaaaucucucagaagaac

SEQ ID NO: 1185232 - RNA, 19 nt, Homo sapiens
  misc_RNA (1)...(19): siRNA sense strand
ugauaaagccauaacaauc

SEQ ID NO: 1185233 - RNA, 19 nt, Homo sapiens
  misc_RNA (1)...(19): siRNA sense strand
cagugugggugaauugcua

SEQ ID NO: 1185234 - RNA, 19 nt, Homo sapiens
  misc_RNA (1)...(19): siRNA sense strand
gaguacgguuuccaugaau

SEQ ID NO: 1185235 - RNA, 19 nt, Homo sapiens
  misc_RNA (1)...(19): siRNA sense strand
caccagggccaguguugua

SEQ ID NO: 1185236 - RNA, 19 nt, Homo sapiens
  misc_RNA (1)...(19): siRNA sense strand
acucaaggcccucagauug

SEQ ID NO: 1185237 - RNA, 19 nt, Homo sapiens
  misc_RNA (1)...(19): siRNA sense strand
ggaaacacagugguuguca

SEQ ID NO: 1185238 - RNA, 19 nt, Homo sapiens
  misc_RNA (1)...(19): siRNA sense strand
ggagauaaggaggauguug

SEQ ID NO: 1185239 - RNA, 19 nt, Homo sapiens
  misc_RNA (1)...(19): siRNA sense strand
ggaggagcucugccaggua

SEQ ID NO: 1185240 - RNA, 19 nt, Homo sapiens
  misc_RNA (1)...(19): siRNA sense strand
auacaaguuggcugauuua

SEQ ID NO: 1185241 - RNA, 19 nt, Homo sapiens
  misc_RNA (1)...(19): siRNA sense strand
gguagaagaaggagauaag

SEQ ID NO: 1185242 - RNA, 19 nt, Homo sapiens
  misc_RNA (1)...(19): siRNA sense strand
ugacaaggaacaauaugau

SEQ ID NO: 1185243 - RNA, 19 nt, Homo sapiens
  misc_RNA (1)...(19): siRNA sense strand
gaaguauauccuuggaaau

SEQ ID NO: 1185244 - RNA, 19 nt, Homo sapiens
  misc_RNA (1)...(19): siRNA sense strand
gcagccauuucuucucaca

SEQ ID NO: 1185245 - RNA, 19 nt, Homo sapiens
  misc_RNA (1)...(19): siRNA sense strand
guauguggccaaaucauuc

SEQ ID NO: 1185246 - RNA, 19 nt, Homo sapiens
  misc_RNA (1)...(19): siRNA sense strand
cgacaauggagucaaugaa

SEQ ID NO: 1185247 - RNA, 19 nt, Homo sapiens
  misc_RNA (1)...(19): siRNA sense strand
uaugaugaguuuguucgaa

SEQ ID NO: 1185248 - RNA, 19 nt, Homo sapiens
  misc_RNA (1)...(19): siRNA sense strand
ucucucagaagaacucaua

SEQ ID NO: 1185249 - RNA, 19 nt, Homo sapiens
  misc_RNA (1)...(19): siRNA sense strand
guacgguuuccaugaauau

SEQ ID NO: 1185250 - RNA, 19 nt, Homo sapiens
  misc_RNA (1)...(19): siRNA sense strand
cuuaucagcaggaguguuu

SEQ ID NO: 1185251 - RNA, 19 nt, Homo sapiens
  misc_RNA (1)...(19): siRNA sense strand
gagguuggcaaguugauca

SEQ ID NO: 1185252 - RNA, 19 nt, Homo sapiens
  misc_RNA (1)...(19): siRNA sense strand
ggaccagugcagcaaauca

SEQ ID NO: 1185253 - RNA, 19 nt, Homo sapiens
  misc_RNA (1)...(19): siRNA sense strand
gaauuucccguugguuaug

SEQ ID NO: 1185254 - RNA, 19 nt, Homo sapiens
  misc_RNA (1)...(19): siRNA sense strand
ugcagcaaaucaugaaguu

SEQ ID NO: 1185255 - RNA, 19 nt, Homo sapiens
  misc_RNA (1)...(19): siRNA sense strand
guuagcugaugccgacuug

SEQ ID NO: 1185256 - RNA, 19 nt, Homo sapiens
  misc_RNA (1)...(19): siRNA sense strand
gaggaaagagcccuugcau

SEQ ID NO: 1185257 - RNA, 19 nt, Homo sapiens
  misc_RNA (1)...(19): siRNA sense strand
cuucucacauggauauaga

SEQ ID NO: 1185258 - RNA, 19 nt, Homo sapiens
  misc_RNA (1)...(19): siRNA sense strand
guuaugcucauuuggaaga

SEQ ID NO: 1185259 - RNA, 19 nt, Homo sapiens
  misc_RNA (1)...(19): siRNA sense strand
acaaugcuguugaauuugc

SEQ ID NO: 1185260 - RNA, 19 nt, Homo sapiens
  misc_RNA (1)...(19): siRNA sense strand
agaaggagauaaggaggau

SEQ ID NO: 1185261 - RNA, 19 nt, Homo sapiens
  misc_RNA (1)...(19): siRNA sense strand
caauacuuucuauggcuua

SEQ ID NO: 1185262 - RNA, 19 nt, Homo sapiens
  misc_RNA (1)...(19): siRNA sense strand
cagaugagaugcgcauugc

SEQ ID NO: 1185263 - RNA, 19 nt, Homo sapiens
  misc_RNA (1)...(19): siRNA sense strand
gaaagaaggggccaaacug

SEQ ID NO: 1185264 - RNA, 19 nt, Homo sapiens
  misc_RNA (1)...(19): siRNA sense strand
guguugagcgggcuaagaa

SEQ ID NO: 1185265 - RNA, 19 nt, Homo sapiens
  misc_RNA (1)...(19): siRNA sense strand
ggaguagugaauauuguuc

SEQ ID NO: 1185266 - RNA, 19 nt, Homo sapiens
  misc_RNA (1)...(19): siRNA sense strand
gcgacaauggagucaauga

SEQ ID NO: 1185267 - RNA, 19 nt, Homo sapiens
  misc_RNA (1)...(19): siRNA sense strand
gcucugccagguagaagaa

SEQ ID NO: 1185268 - RNA, 19 nt, Homo sapiens
  misc_RNA (1)...(19): siRNA sense strand
acucaccgauuugaagauu

SEQ ID NO: 1185269 - RNA, 19 nt, Homo sapiens
  misc_RNA (1)...(19): siRNA sense strand
gcagcaaaucaugaaguuu

SEQ ID NO: 1185270 - RNA, 19 nt, Homo sapiens
  misc_RNA (1)...(19): siRNA sense strand
ugagcgggcuaagaaguau

SEQ ID NO: 1185271 - RNA, 19 nt, Homo sapiens
  misc_RNA (1)...(19): siRNA sense strand
aacagagguuggcaaguug

SEQ ID NO: 1185272 - RNA, 19 nt, Homo sapiens
  misc_RNA (1)...(19): siRNA sense strand
acauggauauagacaaagu

SEQ ID NO: 1185273 - RNA, 19 nt, Homo sapiens
  misc_RNA (1)...(19): siRNA sense strand
gugaauauuguuccugguu

SEQ ID NO: 1185274 - RNA, 19 nt, Homo sapiens
  misc_RNA (1)...(19): siRNA sense strand
ucuuuaauccugcaacuga

SEQ ID NO: 1185275 - RNA, 19 nt, Homo sapiens
  misc_RNA (1)...(19): siRNA sense strand
aguacgguuuccaugaaua

SEQ ID NO: 1185276 - RNA, 19 nt, Homo sapiens
  misc_RNA (1)...(19): siRNA sense strand
ggauucaagaugucuggaa

SEQ ID NO: 1185277 - RNA, 19 nt, Homo sapiens
  misc_RNA (1)...(19): siRNA sense strand
gcacagacuggccgacuua

SEQ ID NO: 1185278 - RNA, 19 nt, Homo sapiens
  misc_RNA (1)...(19): siRNA sense strand
ggaacaacaucuacugcau

SEQ ID NO: 1185279 - RNA, 19 nt, Homo sapiens
  misc_RNA (1)...(19): siRNA sense strand
gaccagacccuccaggaaa

SEQ ID NO: 1185280 - RNA, 19 nt, Homo sapiens
  misc_RNA (1)...(19): siRNA sense strand
ggucugggcugaacaucga

SEQ ID NO: 1185281 - RNA, 19 nt, Homo sapiens
  misc_RNA (1)...(19): siRNA sense strand
gcacuccuguuuccaagca

SEQ ID NO: 1185282 - RNA, 19 nt, Homo sapiens
  misc_RNA (1)...(19): siRNA sense strand
ggauguuccuaaacugaga

SEQ ID NO: 1185283 - RNA, 19 nt, Homo sapiens
  misc_RNA (1)...(19): siRNA sense strand
ggaccagacccuccaggaa

SEQ ID NO: 1185284 - RNA, 19 nt, Homo sapiens
  misc_RNA (1)...(19): siRNA sense strand
gaagcagacagaucucaug

SEQ ID NO: 1185285 - RNA, 19 nt, Homo sapiens
  misc_RNA (1)...(19): siRNA sense strand
ggagaggucugggcugaac

SEQ ID NO: 1185286 - RNA, 19 nt, Homo sapiens
  misc_RNA (1)...(19): siRNA sense strand
gaaaggcaagagacucaug

SEQ ID NO: 1185287 - RNA, 19 nt, Homo sapiens
  misc_RNA (1)...(19): siRNA sense strand
agaggacgcugcucagucu

SEQ ID NO: 1185288 - RNA, 19 nt, Homo sapiens
  misc_RNA (1)...(19): siRNA sense strand
gcagcugcucgaaagagua

SEQ ID NO: 1185289 - RNA, 19 nt, Homo sapiens
  misc_RNA (1)...(19): siRNA sense strand
gguccuugcacuccuguuu

SEQ ID NO: 1185290 - RNA, 19 nt, Homo sapiens
  misc_RNA (1)...(19): siRNA sense strand
auaggcagcugcucgaaag

SEQ ID NO: 1185291 - RNA, 19 nt, Homo sapiens
  misc_RNA (1)...(19): siRNA sense strand
uggcuaccaucgcuucaug

SEQ ID NO: 1185292 - RNA, 19 nt, Homo sapiens
  misc_RNA (1)...(19): siRNA sense strand
aaaggcaagagacucauga

SEQ ID NO: 1185293 - RNA, 19 nt, Homo sapiens
  misc_RNA (1)...(19): siRNA sense strand
ggcagcugcucgaaagagu

SEQ ID NO: 1185294 - RNA, 19 nt, Homo sapiens
  misc_RNA (1)...(19): siRNA sense strand
ggcugaacaucgaggacuu

SEQ ID NO: 1185295 - RNA, 19 nt, Homo sapiens
  misc_RNA (1)...(19): siRNA sense strand
aggccuggauguuccuaaa

SEQ ID NO: 1185296 - RNA, 19 nt, Homo sapiens
  misc_RNA (1)...(19): siRNA sense strand
gccuggauguuccuaaacu

SEQ ID NO: 1185297 - RNA, 19 nt, Homo sapiens
  misc_RNA (1)...(19): siRNA sense strand
gcucaggaacaacaucuac

SEQ ID NO: 1185298 - RNA, 19 nt, Homo sapiens
  misc_RNA (1)...(19): siRNA sense strand
cagacuggccgacuuagag

SEQ ID NO: 1185299 - RNA, 19 nt, Homo sapiens
  misc_RNA (1)...(19): siRNA sense strand
uauaggcagcugcucgaaa

SEQ ID NO: 1185300 - RNA, 19 nt, Homo sapiens
  misc_RNA (1)...(19): siRNA sense strand
gaacaggaaaguagccuua

SEQ ID NO: 1185301 - RNA, 19 nt, Homo sapiens
  misc_RNA (1)...(19): siRNA sense strand
gcagagcucuuggacauga

SEQ ID NO: 1185302 - RNA, 19 nt, Homo sapiens
  misc_RNA (1)...(19): siRNA sense strand
ggaaagcgcuauugauugc

SEQ ID NO: 1185303 - RNA, 19 nt, Homo sapiens
  misc_RNA (1)...(19): siRNA sense strand
ugagagagaugcugugaau

SEQ ID NO: 1185304 - RNA, 19 nt, Homo sapiens
  misc_RNA (1)...(19): siRNA sense strand
gaagagaaggcgauugcua

SEQ ID NO: 1185305 - RNA, 19 nt, Homo sapiens
  misc_RNA (1)...(19): siRNA sense strand
gaggagcaauugagagaga

SEQ ID NO: 1185306 - RNA, 19 nt, Homo sapiens
  misc_RNA (1)...(19): siRNA sense strand
ugacccagauaauacauuu

SEQ ID NO: 1185307 - RNA, 19 nt, Homo sapiens
  misc_RNA (1)...(19): siRNA sense strand
cugcaaugcuugaaguaua

SEQ ID NO: 1185308 - RNA, 19 nt, Homo sapiens
  misc_RNA (1)...(19): siRNA sense strand
guacagagaggagcaauug

SEQ ID NO: 1185309 - RNA, 19 nt, Homo sapiens
  misc_RNA (1)...(19): siRNA sense strand
gcccagcacuugauguuau

SEQ ID NO: 1185310 - RNA, 19 nt, Homo sapiens
  misc_RNA (1)...(19): siRNA sense strand
ggacaugaacccucggaaa

SEQ ID NO: 1185311 - RNA, 19 nt, Homo sapiens
  misc_RNA (1)...(19): siRNA sense strand
ccacuuaccagaaggauga

SEQ ID NO: 1185312 - RNA, 19 nt, Homo sapiens
  misc_RNA (1)...(19): siRNA sense strand
guugucggcuuauguacua

SEQ ID NO: 1185313 - RNA, 19 nt, Homo sapiens
  misc_RNA (1)...(19): siRNA sense strand
gggaguugcaggucaaaua

SEQ ID NO: 1185314 - RNA, 19 nt, Homo sapiens
  misc_RNA (1)...(19): siRNA sense strand
cuaaggagauaccgggaaa

SEQ ID NO: 1185315 - RNA, 19 nt, Homo sapiens
  misc_RNA (1)...(19): siRNA sense strand
gaugagaacaggaaaguag

SEQ ID NO: 1185316 - RNA, 19 nt, Homo sapiens
  misc_RNA (1)...(19): siRNA sense strand
gagaggagcaauugagaga

SEQ ID NO: 1185317 - RNA, 19 nt, Homo sapiens
  misc_RNA (1)...(19): siRNA sense strand
agaaggcgauugcuagaga

SEQ ID NO: 1185318 - RNA, 19 nt, Homo sapiens
  misc_RNA (1)...(19): siRNA sense strand
ugcaaugcuugaaguauaa

SEQ ID NO: 1185319 - RNA, 19 nt, Homo sapiens
  misc_RNA (1)...(19): siRNA sense strand
caggaaaguagccuuagua

SEQ ID NO: 1185320 - RNA, 19 nt, Homo sapiens
  misc_RNA (1)...(19): siRNA sense strand
ggaguugcaggucaaauau

SEQ ID NO: 1185321 - RNA, 19 nt, Homo sapiens
  misc_RNA (1)...(19): siRNA sense strand
uaauuacugucgaugaaug

SEQ ID NO: 1185322 - RNA, 19 nt, Homo sapiens
  misc_RNA (1)...(19): siRNA sense strand
gaauuuggacgcuggaugu

SEQ ID NO: 1185323 - RNA, 19 nt, Homo sapiens
  misc_RNA (1)...(19): siRNA sense strand
ggacgcuggauguuucaua

SEQ ID NO: 1185324 - RNA, 19 nt, Homo sapiens
  misc_RNA (1)...(19): siRNA sense strand
ggagggaugagaacaggaa

SEQ ID NO: 1185325 - RNA, 19 nt, Homo sapiens
  misc_RNA (1)...(19): siRNA sense strand
aaaguugucggcuuaugua

SEQ ID NO: 1185326 - RNA, 19 nt, Homo sapiens
  misc_RNA (1)...(19): siRNA sense strand
ucggaaagcgcuauugauu

SEQ ID NO: 1185327 - RNA, 19 nt, Homo sapiens
  misc_RNA (1)...(19): siRNA sense strand
ucuggagagugaucuuuaa

SEQ ID NO: 1185328 - RNA, 19 nt, Homo sapiens
  misc_RNA (1)...(19): siRNA sense strand
acaauucgcagagagcuua

SEQ ID NO: 1185329 - RNA, 19 nt, Homo sapiens
  misc_RNA (1)...(19): siRNA sense strand
agagagaugcugugaauca

SEQ ID NO: 1185330 - RNA, 19 nt, Homo sapiens
  misc_RNA (1)...(19): siRNA sense strand
gaguacagacugcuuggaa

SEQ ID NO: 1185331 - RNA, 19 nt, Homo sapiens
  misc_RNA (1)...(19): siRNA sense strand
gacaugaacccucggaaag

SEQ ID NO: 1185332 - RNA, 19 nt, Homo sapiens
  misc_RNA (1)...(19): siRNA sense strand
gagaagagaaggcgauugc

SEQ ID NO: 1185333 - RNA, 19 nt, Homo sapiens
  misc_RNA (1)...(19): siRNA sense strand
caggcaauauuggaaggua

SEQ ID NO: 1185334 - RNA, 19 nt, Homo sapiens
  misc_RNA (1)...(19): siRNA sense strand
cagauaauccuagggaguu

SEQ ID NO: 1185335 - RNA, 19 nt, Homo sapiens
  misc_RNA (1)...(19): siRNA sense strand
gcaugacagugggugaguu

SEQ ID NO: 1185336 - RNA, 19 nt, Homo sapiens
  misc_RNA (1)...(19): siRNA sense strand
uauguuggcacaggcauua

SEQ ID NO: 1185337 - RNA, 19 nt, Homo sapiens
  misc_RNA (1)...(19): siRNA sense strand
gaggagguauuugggguua

SEQ ID NO: 1185338 - RNA, 19 nt, Homo sapiens
  misc_RNA (1)...(19): siRNA sense strand
cggaaagcgcuauugauug

SEQ ID NO: 1185339 - RNA, 19 nt, Homo sapiens
  misc_RNA (1)...(19): siRNA sense strand
aggaaaaguugucggcuua

SEQ ID NO: 1185340 - RNA, 19 nt, Homo sapiens
  misc_RNA (1)...(19): siRNA sense strand
cgcuggauguuucauacua

SEQ ID NO: 1185341 - RNA, 19 nt, Homo sapiens
  misc_RNA (1)...(19): siRNA sense strand
gaaaaguugucggcuuaug

SEQ ID NO: 1185342 - RNA, 19 nt, Homo sapiens
  misc_RNA (1)...(19): siRNA sense strand
ucuaaccacuuaccagaag

SEQ ID NO: 1185343 - RNA, 19 nt, Homo sapiens
  misc_RNA (1)...(19): siRNA sense strand
gucacgcccuggucccuaa

SEQ ID NO: 1185344 - RNA, 19 nt, Homo sapiens
  misc_RNA (1)...(19): siRNA sense strand
gacgcuggauguuucauac

SEQ ID NO: 1185345 - RNA, 19 nt, Homo sapiens
  misc_RNA (1)...(19): siRNA sense strand
ccuggucccuaaggagaua

SEQ ID NO: 1185346 - RNA, 19 nt, Homo sapiens
  misc_RNA (1)...(19): siRNA sense strand
ccgccuagaccaagucauu

SEQ ID NO: 1185347 - RNA, 19 nt, Homo sapiens
  misc_RNA (1)...(19): siRNA sense strand
gagagaugcugugaaucag

SEQ ID NO: 1185348 - RNA, 19 nt, Homo sapiens
  misc_RNA (1)...(19): siRNA sense strand
cuagggaguugcaggucaa

SEQ ID NO: 1185349 - RNA, 19 nt, Homo sapiens
  misc_RNA (1)...(19): siRNA sense strand
ggugccagauguagagaag

SEQ ID NO: 1185350 - RNA, 19 nt, Homo sapiens
  misc_RNA (1)...(19): siRNA sense strand
cauacuacucagaugauaa

SEQ ID NO: 1185351 - RNA, 19 nt, Homo sapiens
  misc_RNA (1)...(19): siRNA sense strand
accaggagaagaagaauuu

SEQ ID NO: 1185352 - RNA, 19 nt, Homo sapiens
  misc_RNA (1)...(19): siRNA sense strand
ggcaugaucccggaaaugu

SEQ ID NO: 1185353 - RNA, 19 nt, Homo sapiens
  misc_RNA (1)...(19): siRNA sense strand
gcccugcaaugcuugaagu

SEQ ID NO: 1185354 - RNA, 19 nt, Homo sapiens
  misc_RNA (1)...(19): siRNA sense strand
ggaugagaacaggaaagua

SEQ ID NO: 1185355 - RNA, 19 nt, Homo sapiens
  misc_RNA (1)...(19): siRNA sense strand
gcaggugccagauguagag

SEQ ID NO: 1185356 - RNA, 19 nt, Homo sapiens
  misc_RNA (1)...(19): siRNA sense strand
acaugaaaauggcuccuua

SEQ ID NO: 1185357 - RNA, 19 nt, Homo sapiens
  misc_RNA (1)...(19): siRNA sense strand
gcaauauuggaagguaauu

SEQ ID NO: 1185358 - RNA, 19 nt, Homo sapiens
  misc_RNA (1)...(19): siRNA sense strand
cagagaggagcaauugaga

SEQ ID NO: 1185359 - RNA, 19 nt, Homo sapiens
  misc_RNA (1)...(19): siRNA sense strand
ggauguuucauacuacuca

SEQ ID NO: 1185360 - RNA, 19 nt, Homo sapiens
  misc_RNA (1)...(19): siRNA sense strand
ccugguuucuugcaguuau

SEQ ID NO: 1185361 - RNA, 19 nt, Homo sapiens
  misc_RNA (1)...(19): siRNA sense strand
acaggaaaguagccuuagu

SEQ ID NO: 1185362 - RNA, 19 nt, Homo sapiens
  misc_RNA (1)...(19): siRNA sense strand
uuacagaagcugguacaga

SEQ ID NO: 1185363 - RNA, 19 nt, Homo sapiens
  misc_RNA (1)...(19): siRNA sense strand
cccagcacuugauguuauu

SEQ ID NO: 1185364 - RNA, 19 nt, Homo sapiens
  misc_RNA (1)...(19): siRNA sense strand
gcaaugcuugaaguauaaa

SEQ ID NO: 1185365 - RNA, 19 nt, Homo sapiens
  misc_RNA (1)...(19): siRNA sense strand
aggcaauauuggaagguaa

SEQ ID NO: 1185366 - RNA, 19 nt, Homo sapiens
  misc_RNA (1)...(19): siRNA sense strand
gggaugagaacaggaaagu

SEQ ID NO: 1185367 - RNA, 19 nt, Homo sapiens
  misc_RNA (1)...(19): siRNA sense strand
auucguguccucaagauaa

SEQ ID NO: 1185368 - RNA, 19 nt, Homo sapiens
  misc_RNA (1)...(19): siRNA sense strand
gcuggauguuucauacuac

SEQ ID NO: 1185369 - RNA, 19 nt, Homo sapiens
  misc_RNA (1)...(19): siRNA sense strand
gaaccaggagaagaagaau

SEQ ID NO: 1185370 - RNA, 19 nt, Homo sapiens
  misc_RNA (1)...(19): siRNA sense strand
uuuggacgcuggauguuuc

SEQ ID NO: 1185371 - RNA, 19 nt, Homo sapiens
  misc_RNA (1)...(19): siRNA sense strand
uugcaguuauugguacuaa

SEQ ID NO: 1185372 - RNA, 19 nt, Homo sapiens
  misc_RNA (1)...(19): siRNA sense strand
ccucggaaagcgcuauuga

SEQ ID NO: 1185373 - RNA, 19 nt, Homo sapiens
  misc_RNA (1)...(19): siRNA sense strand
agaaccaggagaagaagaa

SEQ ID NO: 1185374 - RNA, 19 nt, Homo sapiens
  misc_RNA (1)...(19): siRNA sense strand
uugcaggucaaauaucuaa

SEQ ID NO: 1185375 - RNA, 19 nt, Homo sapiens
  misc_RNA (1)...(19): siRNA sense strand
caugacagugggugaguug

SEQ ID NO: 1185376 - RNA, 19 nt, Homo sapiens
  misc_RNA (1)...(19): siRNA sense strand
uauuugggguuacagauaa

SEQ ID NO: 1185377 - RNA, 19 nt, Homo sapiens
  misc_RNA (1)...(19): siRNA sense strand
gcaggcucuugaggaggua

SEQ ID NO: 1185378 - RNA, 19 nt, Homo sapiens
  misc_RNA (1)...(19): siRNA sense strand
ccagauguagagaagagaa

SEQ ID NO: 1185379 - RNA, 19 nt, Homo sapiens
  misc_RNA (1)...(19): siRNA sense strand
gcaugaucccggaaaugug

SEQ ID NO: 1185380 - RNA, 19 nt, Homo sapiens
  misc_RNA (1)...(19): siRNA sense strand
gaaugucugcaggcucuug

SEQ ID NO: 1185381 - RNA, 19 nt, Homo sapiens
  misc_RNA (1)...(19): siRNA sense strand
gcuggagccuuuguuacag

SEQ ID NO: 1185382 - RNA, 19 nt, Homo sapiens
  misc_RNA (1)...(19): siRNA sense strand
uccagaaccaggagaagaa

SEQ ID NO: 1185383 - RNA, 19 nt, Homo sapiens
  misc_RNA (1)...(19): siRNA sense strand
gguacagagaggagcaauu

SEQ ID NO: 1185384 - RNA, 19 nt, Homo sapiens
  misc_RNA (1)...(19): siRNA sense strand
gaaggaugaggaaaaguug

SEQ ID NO: 1185385 - RNA, 19 nt, Homo sapiens
  misc_RNA (1)...(19): siRNA sense strand
ggcccagcacuugauguua

SEQ ID NO: 1185386 - RNA, 19 nt, Homo sapiens
  misc_RNA (1)...(19): siRNA sense strand
agagaaggcgauugcuaga

SEQ ID NO: 1185387 - RNA, 19 nt, Homo sapiens
  misc_RNA (1)...(19): siRNA sense strand
ggcaauauuggaagguaau

SEQ ID NO: 1185388 - RNA, 19 nt, Homo sapiens
  misc_RNA (1)...(19): siRNA sense strand
gaucuucucuggaauguuc

SEQ ID NO: 1185389 - RNA, 19 nt, Homo sapiens
  misc_RNA (1)...(19): siRNA sense strand
ccacuuaccuuaugucagu

SEQ ID NO: 1185390 - RNA, 19 nt, Homo sapiens
  misc_RNA (1)...(19): siRNA sense strand
caucaacgaaggaaauaua

SEQ ID NO: 1185391 - RNA, 19 nt, Homo sapiens
  misc_RNA (1)...(19): siRNA sense strand
cccaagagcugcccagaga

SEQ ID NO: 1185392 - RNA, 19 nt, Homo sapiens
  misc_RNA (1)...(19): siRNA sense strand
cgaaggaaauauagaucaa

SEQ ID NO: 1185393 - RNA, 19 nt, Homo sapiens
  misc_RNA (1)...(19): siRNA sense strand
ucagugugauccuugcaua

SEQ ID NO: 1185394 - RNA, 19 nt, Homo sapiens
  misc_RNA (1)...(19): siRNA sense strand
gaaggacugugaccagcau

SEQ ID NO: 1185395 - RNA, 19 nt, Homo sapiens
  misc_RNA (1)...(19): siRNA sense strand
caacgaaggaaauauagau

SEQ ID NO: 1185396 - RNA, 19 nt, Homo sapiens
  misc_RNA (1)...(19): siRNA sense strand
gcagagccuugucguuaca

SEQ ID NO: 1185397 - RNA, 19 nt, Homo sapiens
  misc_RNA (1)...(19): siRNA sense strand
guucgcaacugcaccauca

SEQ ID NO: 1185398 - RNA, 19 nt, Homo sapiens
  misc_RNA (1)...(19): siRNA sense strand
gagugugccugucgcaaug

SEQ ID NO: 1185399 - RNA, 19 nt, Homo sapiens
  misc_RNA (1)...(19): siRNA sense strand
uaacucuggucuucucguu

SEQ ID NO: 1185400 - RNA, 19 nt, Homo sapiens
  misc_RNA (1)...(19): siRNA sense strand
cugcagagccuugucguua

SEQ ID NO: 1185401 - RNA, 19 nt, Homo sapiens
  misc_RNA (1)...(19): siRNA sense strand
cuugugaucuucucuggaa

SEQ ID NO: 1185402 - RNA, 19 nt, Homo sapiens
  misc_RNA (1)...(19): siRNA sense strand
caggacagcugggcacaug

SEQ ID NO: 1185403 - RNA, 19 nt, Homo sapiens
  misc_RNA (1)...(19): siRNA sense strand
aagcugugcugccagaugu

SEQ ID NO: 1185404 - RNA, 19 nt, Homo sapiens
  misc_RNA (1)...(19): siRNA sense strand
cuacugggcucagggaaag

SEQ ID NO: 1185405 - RNA, 19 nt, Homo sapiens
  misc_RNA (1)...(19): siRNA sense strand
ccaggaggauuaccgaaaa

SEQ ID NO: 1185406 - RNA, 19 nt, Homo sapiens
  misc_RNA (1)...(19): siRNA sense strand
ggacugugaccagcauaga

SEQ ID NO: 1185407 - RNA, 19 nt, Homo sapiens
  misc_RNA (1)...(19): siRNA sense strand
ccacccacuuaccuuaugu

SEQ ID NO: 1185408 - RNA, 19 nt, Homo sapiens
  misc_RNA (1)...(19): siRNA sense strand
ggacagcugggcacaugca

SEQ ID NO: 1185409 - RNA, 19 nt, Homo sapiens
  misc_RNA (1)...(19): siRNA sense strand
gcccagagaggcacuacug

SEQ ID NO: 1185410 - RNA, 19 nt, Homo sapiens
  misc_RNA (1)...(19): siRNA sense strand
ugagagcugucggcacugu

SEQ ID NO: 1185411 - RNA, 19 nt, Homo sapiens
  misc_RNA (1)...(19): siRNA sense strand
uuuauucgcauccuuguga

SEQ ID NO: 1185412 - RNA, 19 nt, Homo sapiens
  misc_RNA (1)...(19): siRNA sense strand
caccaucacugccaaugcu

SEQ ID NO: 1185413 - RNA, 19 nt, Homo sapiens
  misc_RNA (1)...(19): siRNA sense strand
gcacuguaacucuggucuu

SEQ ID NO: 1185414 - RNA, 19 nt, Homo sapiens
  misc_RNA (1)...(19): siRNA sense strand
cacuguaacucuggucuuc

SEQ ID NO: 1185415 - RNA, 19 nt, Homo sapiens
  misc_RNA (1)...(19): siRNA sense strand
agugugauccucuuccaaa

SEQ ID NO: 1185416 - RNA, 19 nt, Homo sapiens
  misc_RNA (1)...(19): siRNA sense strand
gaucaaacaaaggagaaag

SEQ ID NO: 1185417 - RNA, 19 nt, Homo sapiens
  misc_RNA (1)...(19): siRNA sense strand
gugaucuucucuggaaugu

SEQ ID NO: 1185418 - RNA, 19 nt, Homo sapiens
  misc_RNA (1)...(19): siRNA sense strand
gacugugaccagcauagaa

SEQ ID NO: 1185419 - RNA, 19 nt, Homo sapiens
  misc_RNA (1)...(19): siRNA sense strand
uaccuuaugucagugagau

SEQ ID NO: 1185420 - RNA, 19 nt, Homo sapiens
  misc_RNA (1)...(19): siRNA sense strand
ucaacgaaggaaauauaga

SEQ ID NO: 1185421 - RNA, 19 nt, Homo sapiens
  misc_RNA (1)...(19): siRNA sense strand
acugugaccagcauagaaa

SEQ ID NO: 1185422 - RNA, 19 nt, Homo sapiens
  misc_RNA (1)...(19): siRNA sense strand
uagaucaaacaaaggagaa

SEQ ID NO: 1185423 - RNA, 19 nt, Homo sapiens
  misc_RNA (1)...(19): siRNA sense strand
gugcagcuccgauuuuauu

SEQ ID NO: 1185424 - RNA, 19 nt, Homo sapiens
  misc_RNA (1)...(19): siRNA sense strand
cgagugugauccucuucca

SEQ ID NO: 1185425 - RNA, 19 nt, Homo sapiens
  misc_RNA (1)...(19): siRNA sense strand
agagcugucggcacuguaa

SEQ ID NO: 1185426 - RNA, 19 nt, Homo sapiens
  misc_RNA (1)...(19): siRNA sense strand
gaagaaggcuggcacugua

SEQ ID NO: 1185427 - RNA, 19 nt, Homo sapiens
  misc_RNA (1)...(19): siRNA sense strand
gacagaaacuggugaguga

SEQ ID NO: 1185428 - RNA, 19 nt, Homo sapiens
  misc_RNA (1)...(19): siRNA sense strand
ccaagaagccaaccaauaa

SEQ ID NO: 1185429 - RNA, 19 nt, Homo sapiens
  misc_RNA (1)...(19): siRNA sense strand
gcaggagacuuuacaugga

SEQ ID NO: 1185430 - RNA, 19 nt, Homo sapiens
  misc_RNA (1)...(19): siRNA sense strand
gaaagcgaauuccuagaca

SEQ ID NO: 1185431 - RNA, 19 nt, Homo sapiens
  misc_RNA (1)...(19): siRNA sense strand
gccaagaagccaaccaaua

SEQ ID NO: 1185432 - RNA, 19 nt, Homo sapiens
  misc_RNA (1)...(19): siRNA sense strand
gaagggcaccucagaaaca

SEQ ID NO: 1185433 - RNA, 19 nt, Homo sapiens
  misc_RNA (1)...(19): siRNA sense strand
cagaagggcaccucagaaa

SEQ ID NO: 1185434 - RNA, 19 nt, Homo sapiens
  misc_RNA (1)...(19): siRNA sense strand
gcagaagggcaccucagaa

SEQ ID NO: 1185435 - RNA, 19 nt, Homo sapiens
  misc_RNA (1)...(19): siRNA sense strand
caucugcaccugugaagaa

SEQ ID NO: 1185436 - RNA, 19 nt, Homo sapiens
  misc_RNA (1)...(19): siRNA sense strand
ccaggaggauggcaaagag

SEQ ID NO: 1185437 - RNA, 19 nt, Homo sapiens
  misc_RNA (1)...(19): siRNA sense strand
agucagugcuguucuuugu

SEQ ID NO: 1185438 - RNA, 19 nt, Homo sapiens
  misc_RNA (1)...(19): siRNA sense strand
caggagacuuuacauggau

SEQ ID NO: 1185439 - RNA, 19 nt, Homo sapiens
  misc_RNA (1)...(19): siRNA sense strand
gugagugacugcacagagu

SEQ ID NO: 1185440 - RNA, 19 nt, Homo sapiens
  misc_RNA (1)...(19): siRNA sense strand
ugugucaucugcuuucgaa

SEQ ID NO: 1185441 - RNA, 19 nt, Homo sapiens
  misc_RNA (1)...(19): siRNA sense strand
ugagagcccugguggugau

SEQ ID NO: 1185442 - RNA, 19 nt, Homo sapiens
  misc_RNA (1)...(19): siRNA sense strand
gugcuggucuuuaucaaaa

SEQ ID NO: 1185443 - RNA, 19 nt, Homo sapiens
  misc_RNA (1)...(19): siRNA sense strand
guacgagugaggccuguga

SEQ ID NO: 1185444 - RNA, 19 nt, Homo sapiens
  misc_RNA (1)...(19): siRNA sense strand
gcugaccgcuguccaucca

SEQ ID NO: 1185445 - RNA, 19 nt, Homo sapiens
  misc_RNA (1)...(19): siRNA sense strand
caucuucgggauccuguuu

SEQ ID NO: 1185446 - RNA, 19 nt, Homo sapiens
  misc_RNA (1)...(19): siRNA sense strand
ugaagaaggcuggcacugu

SEQ ID NO: 1185447 - RNA, 19 nt, Homo sapiens
  misc_RNA (1)...(19): siRNA sense strand
caagaagccaaccaauaag

SEQ ID NO: 1185448 - RNA, 19 nt, Homo sapiens
  misc_RNA (1)...(19): siRNA sense strand
aacaguaccuaauaaacag

SEQ ID NO: 1185449 - RNA, 19 nt, Homo sapiens
  misc_RNA (1)...(19): siRNA sense strand
ggugcuggucuuuaucaaa

SEQ ID NO: 1185450 - RNA, 19 nt, Homo sapiens
  misc_RNA (1)...(19): siRNA sense strand
ucuuggugcuggucuuuau

SEQ ID NO: 1185451 - RNA, 19 nt, Homo sapiens
  misc_RNA (1)...(19): siRNA sense strand
uccaaugugucaucugcuu

SEQ ID NO: 1185452 - RNA, 19 nt, Homo sapiens
  misc_RNA (1)...(19): siRNA sense strand
caaugugucaucugcuuuc

SEQ ID NO: 1185453 - RNA, 19 nt, Homo sapiens
  misc_RNA (1)...(19): siRNA sense strand
ccaaugugucaucugcuuu

SEQ ID NO: 1185454 - RNA, 19 nt, Homo sapiens
  misc_RNA (1)...(19): siRNA sense strand
ugaaagcgaauuccuagac

SEQ ID NO: 1185455 - RNA, 19 nt, Homo sapiens
  misc_RNA (1)...(19): siRNA sense strand
cuacagggguuucugauac

SEQ ID NO: 1185456 - RNA, 19 nt, Homo sapiens
  misc_RNA (1)...(19): siRNA sense strand
gugcaggagacuuuacaug

SEQ ID NO: 1185457 - RNA, 19 nt, Homo sapiens
  misc_RNA (1)...(19): siRNA sense strand
gaagaaggcuggcacugua

SEQ ID NO: 1185458 - RNA, 19 nt, Homo sapiens
  misc_RNA (1)...(19): siRNA sense strand
gacagaaacuggugaguga

SEQ ID NO: 1185459 - RNA, 19 nt, Homo sapiens
  misc_RNA (1)...(19): siRNA sense strand
ccaagaagccaaccaauaa

SEQ ID NO: 1185460 - RNA, 19 nt, Homo sapiens
  misc_RNA (1)...(19): siRNA sense strand
gaaagcgaauuccuagaca

SEQ ID NO: 1185461 - RNA, 19 nt, Homo sapiens
  misc_RNA (1)...(19): siRNA sense strand
gccaagaagccaaccaaua

SEQ ID NO: 1185462 - RNA, 19 nt, Homo sapiens
  misc_RNA (1)...(19): siRNA sense strand
gaagggcaccucagaaaca

SEQ ID NO: 1185463 - RNA, 19 nt, Homo sapiens
  misc_RNA (1)...(19): siRNA sense strand
cagaagggcaccucagaaa

SEQ ID NO: 1185464 - RNA, 19 nt, Homo sapiens
  misc_RNA (1)...(19): siRNA sense strand
gcagaagggcaccucagaa

SEQ ID NO: 1185465 - RNA, 19 nt, Homo sapiens
  misc_RNA (1)...(19): siRNA sense strand
caucugcaccugugaagaa

SEQ ID NO: 1185466 - RNA, 19 nt, Homo sapiens
  misc_RNA (1)...(19): siRNA sense strand
agucagugcuguucuuugu

SEQ ID NO: 1185467 - RNA, 19 nt, Homo sapiens
  misc_RNA (1)...(19): siRNA sense strand
gugagugacugcacagagu

SEQ ID NO: 1185468 - RNA, 19 nt, Homo sapiens
  misc_RNA (1)...(19): siRNA sense strand
ugugucaucugcuuucgaa

SEQ ID NO: 1185469 - RNA, 19 nt, Homo sapiens
  misc_RNA (1)...(19): siRNA sense strand
ugagagcccugguggugau

SEQ ID NO: 1185470 - RNA, 19 nt, Homo sapiens
  misc_RNA (1)...(19): siRNA sense strand
gugcuggucuuuaucaaaa

SEQ ID NO: 1185471 - RNA, 19 nt, Homo sapiens
  misc_RNA (1)...(19): siRNA sense strand
guacgagugaggccuguga

SEQ ID NO: 1185472 - RNA, 19 nt, Homo sapiens
  misc_RNA (1)...(19): siRNA sense strand
gcugaccgcuguccaucca

SEQ ID NO: 1185473 - RNA, 19 nt, Homo sapiens
  misc_RNA (1)...(19): siRNA sense strand
caucuucgggauccuguuu

SEQ ID NO: 1185474 - RNA, 19 nt, Homo sapiens
  misc_RNA (1)...(19): siRNA sense strand
ugaagaaggcuggcacugu

SEQ ID NO: 1185475 - RNA, 19 nt, Homo sapiens
  misc_RNA (1)...(19): siRNA sense strand
aacaguaccuaauaaacag

SEQ ID NO: 1185476 - RNA, 19 nt, Homo sapiens
  misc_RNA (1)...(19): siRNA sense strand
ggugcuggucuuuaucaaa

SEQ ID NO: 1185477 - RNA, 19 nt, Homo sapiens
  misc_RNA (1)...(19): siRNA sense strand
ucuuggugcuggucuuuau

SEQ ID NO: 1185478 - RNA, 19 nt, Homo sapiens
  misc_RNA (1)...(19): siRNA sense strand
uccaaugugucaucugcuu

SEQ ID NO: 1185479 - RNA, 19 nt, Homo sapiens
  misc_RNA (1)...(19): siRNA sense strand
caaugugucaucugcuuuc

SEQ ID NO: 1185480 - RNA, 19 nt, Homo sapiens
  misc_RNA (1)...(19): siRNA sense strand
ccaaugugucaucugcuuu

SEQ ID NO: 1185481 - RNA, 19 nt, Homo sapiens
  misc_RNA (1)...(19): siRNA sense strand
ugaaagcgaauuccuagac

SEQ ID NO: 1185482 - RNA, 19 nt, Homo sapiens
  misc_RNA (1)...(19): siRNA sense strand
cuacagggguuucugauac

SEQ ID NO: 1185483 - RNA, 19 nt, Homo sapiens
  misc_RNA (1)...(19): siRNA sense strand
ggacaaagaucuuaacuca

SEQ ID NO: 1185484 - RNA, 19 nt, Homo sapiens
  misc_RNA (1)...(19): siRNA sense strand
caagaaaggugguguauga

SEQ ID NO: 1185485 - RNA, 19 nt, Homo sapiens
  misc_RNA (1)...(19): siRNA sense strand
ggaauuggcugcucuagaa

SEQ ID NO: 1185486 - RNA, 19 nt, Homo sapiens
  misc_RNA (1)...(19): siRNA sense strand
ggaaacagagcuccaauua

SEQ ID NO: 1185487 - RNA, 19 nt, Homo sapiens
  misc_RNA (1)...(19): siRNA sense strand
gaugacagcuugacugaaa

SEQ ID NO: 1185488 - RNA, 19 nt, Homo sapiens
  misc_RNA (1)...(19): siRNA sense strand
ggacuuggaugaauuguau

SEQ ID NO: 1185489 - RNA, 19 nt, Homo sapiens
  misc_RNA (1)...(19): siRNA sense strand
gcacgcagauuccaagaaa

SEQ ID NO: 1185490 - RNA, 19 nt, Homo sapiens
  misc_RNA (1)...(19): siRNA sense strand
ggaaucaaauccaagcuuu

SEQ ID NO: 1185491 - RNA, 19 nt, Homo sapiens
  misc_RNA (1)...(19): siRNA sense strand
gaagaucuccggaaaguga

SEQ ID NO: 1185492 - RNA, 19 nt, Homo sapiens
  misc_RNA (1)...(19): siRNA sense strand
aaacagagcuccaauuaac

SEQ ID NO: 1185493 - RNA, 19 nt, Homo sapiens
  misc_RNA (1)...(19): siRNA sense strand
gaugaagacuccuaucaga

SEQ ID NO: 1185494 - RNA, 19 nt, Homo sapiens
  misc_RNA (1)...(19): siRNA sense strand
gaagaggacuuggaugaau

SEQ ID NO: 1185495 - RNA, 19 nt, Homo sapiens
  misc_RNA (1)...(19): siRNA sense strand
gaaauggacaaagaucuua

SEQ ID NO: 1185496 - RNA, 19 nt, Homo sapiens
  misc_RNA (1)...(19): siRNA sense strand
acaaagaucuuaacucagu

SEQ ID NO: 1185497 - RNA, 19 nt, Homo sapiens
  misc_RNA (1)...(19): siRNA sense strand
gaaacagagcuccaauuaa

SEQ ID NO: 1185498 - RNA, 19 nt, Homo sapiens
  misc_RNA (1)...(19): siRNA sense strand
gaagaaacucgucaugcua

SEQ ID NO: 1185499 - RNA, 19 nt, Homo sapiens
  misc_RNA (1)...(19): siRNA sense strand
ggagugacaucaaguucuu

SEQ ID NO: 1185500 - RNA, 19 nt, Homo sapiens
  misc_RNA (1)...(19): siRNA sense strand
gacaguaaauacaguaguu

SEQ ID NO: 1185501 - RNA, 19 nt, Homo sapiens
  misc_RNA (1)...(19): siRNA sense strand
agacgaagaucuccggaaa

SEQ ID NO: 1185502 - RNA, 19 nt, Homo sapiens
  misc_RNA (1)...(19): siRNA sense strand
gaaggugggucugguugaa

SEQ ID NO: 1185503 - RNA, 19 nt, Homo sapiens
  misc_RNA (1)...(19): siRNA sense strand
cugaagcgguuuaaaguuu

SEQ ID NO: 1185504 - RNA, 19 nt, Homo sapiens
  misc_RNA (1)...(19): siRNA sense strand
gguuuaaaguuucagauga

SEQ ID NO: 1185505 - RNA, 19 nt, Homo sapiens
  misc_RNA (1)...(19): siRNA sense strand
ggcauaaguucccugauga

SEQ ID NO: 1185506 - RNA, 19 nt, Homo sapiens
  misc_RNA (1)...(19): siRNA sense strand
gaagaacacccucaagagu

SEQ ID NO: 1185507 - RNA, 19 nt, Homo sapiens
  misc_RNA (1)...(19): siRNA sense strand
aaaaggagguggauucuaa

SEQ ID NO: 1185508 - RNA, 19 nt, Homo sapiens
  misc_RNA (1)...(19): siRNA sense strand
ccaacaagcugcagaucau

SEQ ID NO: 1185509 - RNA, 19 nt, Homo sapiens
  misc_RNA (1)...(19): siRNA sense strand
gaacaggaaggcagugaug

SEQ ID NO: 1185510 - RNA, 19 nt, Homo sapiens
  misc_RNA (1)...(19): siRNA sense strand
ucaagucccuggccaacaa

SEQ ID NO: 1185511 - RNA, 19 nt, Homo sapiens
  misc_RNA (1)...(19): siRNA sense strand
ugacaauuauucugaggaa

SEQ ID NO: 1185512 - RNA, 19 nt, Homo sapiens
  misc_RNA (1)...(19): siRNA sense strand
gaagaagacccggaggaaa

SEQ ID NO: 1185513 - RNA, 19 nt, Homo sapiens
  misc_RNA (1)...(19): siRNA sense strand
gagaaaacguuacaagaau

SEQ ID NO: 1185514 - RNA, 19 nt, Homo sapiens
  misc_RNA (1)...(19): siRNA sense strand
caaccuaacaucaaacaga

SEQ ID NO: 1185515 - RNA, 19 nt, Homo sapiens
  misc_RNA (1)...(19): siRNA sense strand
cggcauaaguucccugaug

SEQ ID NO: 1185516 - RNA, 19 nt, Homo sapiens
  misc_RNA (1)...(19): siRNA sense strand
uggcagaaauaaagaucua

SEQ ID NO: 1185517 - RNA, 19 nt, Homo sapiens
  misc_RNA (1)...(19): siRNA sense strand
gaagacuccuaucagaagu

SEQ ID NO: 1185518 - RNA, 19 nt, Homo sapiens
  misc_RNA (1)...(19): siRNA sense strand
ucugaucguucuccugaua

SEQ ID NO: 1185519 - RNA, 19 nt, Homo sapiens
  misc_RNA (1)...(19): siRNA sense strand
gaaaguucccaccaucuuc

SEQ ID NO: 1185520 - RNA, 19 nt, Homo sapiens
  misc_RNA (1)...(19): siRNA sense strand
ucaguacccucauuuccuu

SEQ ID NO: 1185521 - RNA, 19 nt, Homo sapiens
  misc_RNA (1)...(19): siRNA sense strand
ccaagcagcagcagacuau

SEQ ID NO: 1185522 - RNA, 19 nt, Homo sapiens
  misc_RNA (1)...(19): siRNA sense strand
uacaugcgcuuccucauca

SEQ ID NO: 1185523 - RNA, 19 nt, Homo sapiens
  misc_RNA (1)...(19): siRNA sense strand
ggagaaaacguuacaagaa

SEQ ID NO: 1185524 - RNA, 19 nt, Homo sapiens
  misc_RNA (1)...(19): siRNA sense strand
uaagcgagaugccaacaag

SEQ ID NO: 1185525 - RNA, 19 nt, Homo sapiens
  misc_RNA (1)...(19): siRNA sense strand
caacauggcagaggugaug

SEQ ID NO: 1185526 - RNA, 19 nt, Homo sapiens
  misc_RNA (1)...(19): siRNA sense strand
ccgaagccaugcugacuug

SEQ ID NO: 1185527 - RNA, 19 nt, Homo sapiens
  misc_RNA (1)...(19): siRNA sense strand
ggaagaggacuuggaugaa

SEQ ID NO: 1185528 - RNA, 19 nt, Homo sapiens
  misc_RNA (1)...(19): siRNA sense strand
ugaagaaacucgucaugcu

SEQ ID NO: 1185529 - RNA, 19 nt, Homo sapiens
  misc_RNA (1)...(19): siRNA sense strand
ggaccaucuugggcuauaa

SEQ ID NO: 1185530 - RNA, 19 nt, Homo sapiens
  misc_RNA (1)...(19): siRNA sense strand
uaaguucccugaugaagac

SEQ ID NO: 1185531 - RNA, 19 nt, Homo sapiens
  misc_RNA (1)...(19): siRNA sense strand
aagaggacuuggaugaauu

SEQ ID NO: 1185532 - RNA, 19 nt, Homo sapiens
  misc_RNA (1)...(19): siRNA sense strand
gcuuugggcuggagcaugu

SEQ ID NO: 1185533 - RNA, 19 nt, Homo sapiens
  misc_RNA (1)...(19): siRNA sense strand
gaagcgguuuaaaguuuca

SEQ ID NO: 1185534 - RNA, 19 nt, Homo sapiens
  misc_RNA (1)...(19): siRNA sense strand
ggaaggcagugaugaucca

SEQ ID NO: 1185535 - RNA, 19 nt, Homo sapiens
  misc_RNA (1)...(19): siRNA sense strand
gccaacccauugaccauga

SEQ ID NO: 1185536 - RNA, 19 nt, Homo sapiens
  misc_RNA (1)...(19): siRNA sense strand
gagaucguccuuccagcua

SEQ ID NO: 1185537 - RNA, 19 nt, Homo sapiens
  misc_RNA (1)...(19): siRNA sense strand
caaggcaaccuaacaucaa

SEQ ID NO: 1185538 - RNA, 19 nt, Homo sapiens
  misc_RNA (1)...(19): siRNA sense strand
ucaaauccaagcuuucuga

SEQ ID NO: 1185539 - RNA, 19 nt, Homo sapiens
  misc_RNA (1)...(19): siRNA sense strand
guaguuccuuccuggauuc

SEQ ID NO: 1185540 - RNA, 19 nt, Homo sapiens
  misc_RNA (1)...(19): siRNA sense strand
aaccuaacaucaaacagaa

SEQ ID NO: 1185541 - RNA, 19 nt, Homo sapiens
  misc_RNA (1)...(19): siRNA sense strand
gagauuggcagccucaaca

SEQ ID NO: 1185542 - RNA, 19 nt, Homo sapiens
  misc_RNA (1)...(19): siRNA sense strand
ccaccagcccuauggaauu

SEQ ID NO: 1185543 - RNA, 19 nt, Homo sapiens
  misc_RNA (1)...(19): siRNA sense strand
cgacuggcuuggcuacaug

SEQ ID NO: 1185544 - RNA, 19 nt, Homo sapiens
  misc_RNA (1)...(19): siRNA sense strand
ucacugaccaggacauguu

SEQ ID NO: 1185545 - RNA, 19 nt, Homo sapiens
  misc_RNA (1)...(19): siRNA sense strand
caccagcccuauggaauug

SEQ ID NO: 1185546 - RNA, 19 nt, Homo sapiens
  misc_RNA (1)...(19): siRNA sense strand
ccuaggcuauucagcuuga

SEQ ID NO: 1185547 - RNA, 19 nt, Homo sapiens
  misc_RNA (1)...(19): siRNA sense strand
acaagaaaguucccaccau

SEQ ID NO: 1185548 - RNA, 19 nt, Homo sapiens
  misc_RNA (1)...(19): siRNA sense strand
gacgccagcucgaagaaca

SEQ ID NO: 1185549 - RNA, 19 nt, Homo sapiens
  misc_RNA (1)...(19): siRNA sense strand
aagaaacucgucaugcuaa

SEQ ID NO: 1185550 - RNA, 19 nt, Homo sapiens
  misc_RNA (1)...(19): siRNA sense strand
guaaauacaguaguuccuu

SEQ ID NO: 1185551 - RNA, 19 nt, Homo sapiens
  misc_RNA (1)...(19): siRNA sense strand
agcccaagcucaagccuuu

SEQ ID NO: 1185552 - RNA, 19 nt, Homo sapiens
  misc_RNA (1)...(19): siRNA sense strand
gcagauccgggaaguggaa

SEQ ID NO: 1185553 - RNA, 19 nt, Homo sapiens
  misc_RNA (1)...(19): siRNA sense strand
aaggcaaccuaacaucaaa

SEQ ID NO: 1185554 - RNA, 19 nt, Homo sapiens
  misc_RNA (1)...(19): siRNA sense strand
ugaagcgguuuaaaguuuc

SEQ ID NO: 1185555 - RNA, 19 nt, Homo sapiens
  misc_RNA (1)...(19): siRNA sense strand
agacuccuaucagaaguuu

SEQ ID NO: 1185556 - RNA, 19 nt, Homo sapiens
  misc_RNA (1)...(19): siRNA sense strand
uggaagaggacuuggauga

SEQ ID NO: 1185557 - RNA, 19 nt, Homo sapiens
  misc_RNA (1)...(19): siRNA sense strand
aggcagugaugauccauug

SEQ ID NO: 1185558 - RNA, 19 nt, Homo sapiens
  misc_RNA (1)...(19): siRNA sense strand
acgaagaucuccggaaagu

SEQ ID NO: 1185559 - RNA, 19 nt, Homo sapiens
  misc_RNA (1)...(19): siRNA sense strand
ccacccaugucaagcacuu

SEQ ID NO: 1185560 - RNA, 19 nt, Homo sapiens
  misc_RNA (1)...(19): siRNA sense strand
gcaagaaaccccgagaaaa

SEQ ID NO: 1185561 - RNA, 19 nt, Homo sapiens
  misc_RNA (1)...(19): siRNA sense strand
gcauaaguucccugaugaa

SEQ ID NO: 1185562 - RNA, 19 nt, Homo sapiens
  misc_RNA (1)...(19): siRNA sense strand
gaugcagcccucccagaaa

SEQ ID NO: 1185563 - RNA, 19 nt, Homo sapiens
  misc_RNA (1)...(19): siRNA sense strand
acaauuauucugaggaaga

SEQ ID NO: 1185564 - RNA, 19 nt, Homo sapiens
  misc_RNA (1)...(19): siRNA sense strand
cgaguggagugacaucaag

SEQ ID NO: 1185565 - RNA, 19 nt, Homo sapiens
  misc_RNA (1)...(19): siRNA sense strand
cuaagagccaggucauuga

SEQ ID NO: 1185566 - RNA, 19 nt, Homo sapiens
  misc_RNA (1)...(19): siRNA sense strand
agaaacucgucaugcuaaa

SEQ ID NO: 1185567 - RNA, 19 nt, Homo sapiens
  misc_RNA (1)...(19): siRNA sense strand
gagcuccaauuaaccuucu

SEQ ID NO: 1185568 - RNA, 19 nt, Homo sapiens
  misc_RNA (1)...(19): siRNA sense strand
gaauuggcugcucuagaaa

SEQ ID NO: 1185569 - RNA, 19 nt, Homo sapiens
  misc_RNA (1)...(19): siRNA sense strand
caagcucaagccuuucuuu

SEQ ID NO: 1185570 - RNA, 19 nt, Homo sapiens
  misc_RNA (1)...(19): siRNA sense strand
cagaugaggugggcuuugg

SEQ ID NO: 1185571 - RNA, 19 nt, Homo sapiens
  misc_RNA (1)...(19): siRNA sense strand
ggcaggacuuguucuacga

SEQ ID NO: 1185572 - RNA, 19 nt, Homo sapiens
  misc_RNA (1)...(19): siRNA sense strand
gaccaugaaggaaucaaau

SEQ ID NO: 1185573 - RNA, 19 nt, Homo sapiens
  misc_RNA (1)...(19): siRNA sense strand
cgaagaacacccucaagag

SEQ ID NO: 1185574 - RNA, 19 nt, Homo sapiens
  misc_RNA (1)...(19): siRNA sense strand
ugaagacuccuaucagaag

SEQ ID NO: 1185575 - RNA, 19 nt, Homo sapiens
  misc_RNA (1)...(19): siRNA sense strand
ggccacagcacgcagauuc

SEQ ID NO: 1185576 - RNA, 19 nt, Homo sapiens
  misc_RNA (1)...(19): siRNA sense strand
guuuaaaguuucagaugag

SEQ ID NO: 1185577 - RNA, 19 nt, Homo sapiens
  misc_RNA (1)...(19): siRNA sense strand
cgacaguggcccugagaug

SEQ ID NO: 1185578 - RNA, 19 nt, Homo sapiens
  misc_RNA (1)...(19): siRNA sense strand
uaagagccaggucauugaa

SEQ ID NO: 1185579 - RNA, 19 nt, Homo sapiens
  misc_RNA (1)...(19): siRNA sense strand
ucuaagagccaggucauug

SEQ ID NO: 1185580 - RNA, 19 nt, Homo sapiens
  misc_RNA (1)...(19): siRNA sense strand
ucgaagaacacccucaaga

SEQ ID NO: 1185581 - RNA, 19 nt, Homo sapiens
  misc_RNA (1)...(19): siRNA sense strand
gcuugacccugaagaaacu

SEQ ID NO: 1185582 - RNA, 19 nt, Homo sapiens
  misc_RNA (1)...(19): siRNA sense strand
ggucagucgacaguaaaua

SEQ ID NO: 1185583 - RNA, 19 nt, Homo sapiens
  misc_RNA (1)...(19): siRNA sense strand
gaaggaauuugaugaggau

SEQ ID NO: 1185584 - RNA, 19 nt, Homo sapiens
  misc_RNA (1)...(19): siRNA sense strand
ggaauuugaugaggauuug

SEQ ID NO: 1185585 - RNA, 19 nt, Homo sapiens
  misc_RNA (1)...(19): siRNA sense strand
gagcagaugcgcaagaaga

SEQ ID NO: 1185586 - RNA, 19 nt, Homo sapiens
  misc_RNA (1)...(19): siRNA sense strand
gggagcccauugagaagua

SEQ ID NO: 1185587 - RNA, 19 nt, Homo sapiens
  misc_RNA (1)...(19): siRNA sense strand
ccaagcggcucaaugacaa

SEQ ID NO: 1185588 - RNA, 19 nt, Homo sapiens
  misc_RNA (1)...(19): siRNA sense strand
gacaaggaguaccaaguga

SEQ ID NO: 1185589 - RNA, 19 nt, Homo sapiens
  misc_RNA (1)...(19): siRNA sense strand
caacaucgccaggaagaaa

SEQ ID NO: 1185590 - RNA, 19 nt, Homo sapiens
  misc_RNA (1)...(19): siRNA sense strand
ucaaggaagugacacacaa

SEQ ID NO: 1185591 - RNA, 19 nt, Homo sapiens
  misc_RNA (1)...(19): siRNA sense strand
ucaaugagcaguacgagaa

SEQ ID NO: 1185592 - RNA, 19 nt, Homo sapiens
  misc_RNA (1)...(19): siRNA sense strand
gcaagaagaccaugaagac

SEQ ID NO: 1185593 - RNA, 19 nt, Homo sapiens
  misc_RNA (1)...(19): siRNA sense strand
cacacaacauccacuauga

SEQ ID NO: 1185594 - RNA, 19 nt, Homo sapiens
  misc_RNA (1)...(19): siRNA sense strand
gaugaggauuuggaggaua

SEQ ID NO: 1185595 - RNA, 19 nt, Homo sapiens
  misc_RNA (1)...(19): siRNA sense strand
gggccaagcggcucaauga

SEQ ID NO: 1185596 - RNA, 19 nt, Homo sapiens
  misc_RNA (1)...(19): siRNA sense strand
gaucuugaguucaugaaac

SEQ ID NO: 1185597 - RNA, 19 nt, Homo sapiens
  misc_RNA (1)...(19): siRNA sense strand
ggaagugacacacaacauc

SEQ ID NO: 1185598 - RNA, 19 nt, Homo sapiens
  misc_RNA (1)...(19): siRNA sense strand
gaaggaggaggucaacauc

SEQ ID NO: 1185599 - RNA, 19 nt, Homo sapiens
  misc_RNA (1)...(19): siRNA sense strand
aggauaagacggagaauga

SEQ ID NO: 1185600 - RNA, 19 nt, Homo sapiens
  misc_RNA (1)...(19): siRNA sense strand
ugacaaggaguaccaagug

SEQ ID NO: 1185601 - RNA, 19 nt, Homo sapiens
  misc_RNA (1)...(19): siRNA sense strand
gguuucgacuucaacauca

SEQ ID NO: 1185602 - RNA, 19 nt, Homo sapiens
  misc_RNA (1)...(19): siRNA sense strand
gaagugacaaggaguacca

SEQ ID NO: 1185603 - RNA, 19 nt, Homo sapiens
  misc_RNA (1)...(19): siRNA sense strand
gauaagacggagaaugaca

SEQ ID NO: 1185604 - RNA, 19 nt, Homo sapiens
  misc_RNA (1)...(19): siRNA sense strand
caacauccacuaugagacu

SEQ ID NO: 1185605 - RNA, 19 nt, Homo sapiens
  misc_RNA (1)...(19): siRNA sense strand
caaggaguaccaagugaau

SEQ ID NO: 1185606 - RNA, 19 nt, Homo sapiens
  misc_RNA (1)...(19): siRNA sense strand
ugacacacaacauccacua

SEQ ID NO: 1185607 - RNA, 19 nt, Homo sapiens
  misc_RNA (1)...(19): siRNA sense strand
augaggauuuggaggauaa

SEQ ID NO: 1185608 - RNA, 19 nt, Homo sapiens
  misc_RNA (1)...(19): siRNA sense strand
ccacugcugccuuuacuuc

SEQ ID NO: 1185609 - RNA, 19 nt, Homo sapiens
  misc_RNA (1)...(19): siRNA sense strand
ccaugagcaucaacuccaa

SEQ ID NO: 1185610 - RNA, 19 nt, Homo sapiens
  misc_RNA (1)...(19): siRNA sense strand
uaagacggagaaugacaaa

SEQ ID NO: 1185611 - RNA, 19 nt, Homo sapiens
  misc_RNA (1)...(19): siRNA sense strand
cguguccacugcugccuuu

SEQ ID NO: 1185612 - RNA, 19 nt, Homo sapiens
  misc_RNA (1)...(19): siRNA sense strand
ucgagcagaugcgcaagaa

SEQ ID NO: 1185613 - RNA, 19 nt, Homo sapiens
  misc_RNA (1)...(19): siRNA sense strand
cacaacauccacuaugaga

SEQ ID NO: 1185614 - RNA, 19 nt, Homo sapiens
  misc_RNA (1)...(19): siRNA sense strand
acacacaacauccacuaug

SEQ ID NO: 1185615 - RNA, 19 nt, Homo sapiens
  misc_RNA (1)...(19): siRNA sense strand
ugaaggaggaggucaacau

SEQ ID NO: 1185616 - RNA, 19 nt, Homo sapiens
  misc_RNA (1)...(19): siRNA sense strand
uccaggaccucaaggaagu

SEQ ID NO: 1185617 - RNA, 19 nt, Homo sapiens
  misc_RNA (1)...(19): siRNA sense strand
gaggauaagacggagaaug

SEQ ID NO: 1185618 - RNA, 19 nt, Homo sapiens
  misc_RNA (1)...(19): siRNA sense strand
gccaagcggcucaaugaca

SEQ ID NO: 1185619 - RNA, 19 nt, Homo sapiens
  misc_RNA (1)...(19): siRNA sense strand
ggaucuugaguucaugaaa

SEQ ID NO: 1185620 - RNA, 19 nt, Homo sapiens
  misc_RNA (1)...(19): siRNA sense strand
gcggcucaaugacaaugga

SEQ ID NO: 1185621 - RNA, 19 nt, Homo sapiens
  misc_RNA (1)...(19): siRNA sense strand
cuucgagacuuugucauca

SEQ ID NO: 1185622 - RNA, 19 nt, Homo sapiens
  misc_RNA (1)...(19): siRNA sense strand
aagaaacgcaucccugaca

SEQ ID NO: 1185623 - RNA, 19 nt, Homo sapiens
  misc_RNA (1)...(19): siRNA sense strand
guacgagaaguuccugaag

SEQ ID NO: 1185624 - RNA, 19 nt, Homo sapiens
  misc_RNA (1)...(19): siRNA sense strand
ggaccucaaggaagugaca

SEQ ID NO: 1185625 - RNA, 19 nt, Homo sapiens
  misc_RNA (1)...(19): siRNA sense strand
agccagcggugcccaugaa

SEQ ID NO: 1185626 - RNA, 19 nt, Homo sapiens
  misc_RNA (1)...(19): siRNA sense strand
ccagaaggaauuugaugag

SEQ ID NO: 1185627 - RNA, 19 nt, Homo sapiens
  misc_RNA (1)...(19): siRNA sense strand
gucaacaucgccaggaaga

SEQ ID NO: 1185628 - RNA, 19 nt, Homo sapiens
  misc_RNA (1)...(19): siRNA sense strand
acaaggaguaccaagugaa

SEQ ID NO: 1185629 - RNA, 19 nt, Homo sapiens
  misc_RNA (1)...(19): siRNA sense strand
ucaugaaacaccucagcaa

SEQ ID NO: 1185630 - RNA, 19 nt, Homo sapiens
  misc_RNA (1)...(19): siRNA sense strand
caggagagcaugccuuuug

SEQ ID NO: 1185631 - RNA, 19 nt, Homo sapiens
  misc_RNA (1)...(19): siRNA sense strand
ugcgaccucuggaucuuga

SEQ ID NO: 1185632 - RNA, 19 nt, Homo sapiens
  misc_RNA (1)...(19): siRNA sense strand
cccagaaggaauuugauga

SEQ ID NO: 1185633 - RNA, 19 nt, Homo sapiens
  misc_RNA (1)...(19): siRNA sense strand
gaaggaauuugaugaggau

SEQ ID NO: 1185634 - RNA, 19 nt, Homo sapiens
  misc_RNA (1)...(19): siRNA sense strand
ggaauuugaugaggauuug

SEQ ID NO: 1185635 - RNA, 19 nt, Homo sapiens
  misc_RNA (1)...(19): siRNA sense strand
gagcagaugcgcaagaaga

SEQ ID NO: 1185636 - RNA, 19 nt, Homo sapiens
  misc_RNA (1)...(19): siRNA sense strand
gggagcccauugagaagua

SEQ ID NO: 1185637 - RNA, 19 nt, Homo sapiens
  misc_RNA (1)...(19): siRNA sense strand
ccaagcggcucaaugacaa

SEQ ID NO: 1185638 - RNA, 19 nt, Homo sapiens
  misc_RNA (1)...(19): siRNA sense strand
gacaaggaguaccaaguga

SEQ ID NO: 1185639 - RNA, 19 nt, Homo sapiens
  misc_RNA (1)...(19): siRNA sense strand
caacaucgccaggaagaaa

SEQ ID NO: 1185640 - RNA, 19 nt, Homo sapiens
  misc_RNA (1)...(19): siRNA sense strand
ucaaggaagugacacacaa

SEQ ID NO: 1185641 - RNA, 19 nt, Homo sapiens
  misc_RNA (1)...(19): siRNA sense strand
ucaaugagcaguacgagaa

SEQ ID NO: 1185642 - RNA, 19 nt, Homo sapiens
  misc_RNA (1)...(19): siRNA sense strand
gcaagaagaccaugaagac

SEQ ID NO: 1185643 - RNA, 19 nt, Homo sapiens
  misc_RNA (1)...(19): siRNA sense strand
cacacaacauccacuauga

SEQ ID NO: 1185644 - RNA, 19 nt, Homo sapiens
  misc_RNA (1)...(19): siRNA sense strand
gaugaggauuuggaggaua

SEQ ID NO: 1185645 - RNA, 19 nt, Homo sapiens
  misc_RNA (1)...(19): siRNA sense strand
gggccaagcggcucaauga

SEQ ID NO: 1185646 - RNA, 19 nt, Homo sapiens
  misc_RNA (1)...(19): siRNA sense strand
gaucuugaguucaugaaac

SEQ ID NO: 1185647 - RNA, 19 nt, Homo sapiens
  misc_RNA (1)...(19): siRNA sense strand
ggaagugacacacaacauc

SEQ ID NO: 1185648 - RNA, 19 nt, Homo sapiens
  misc_RNA (1)...(19): siRNA sense strand
gaaggaggaggucaacauc

SEQ ID NO: 1185649 - RNA, 19 nt, Homo sapiens
  misc_RNA (1)...(19): siRNA sense strand
aggauaagacggagaauga

SEQ ID NO: 1185650 - RNA, 19 nt, Homo sapiens
  misc_RNA (1)...(19): siRNA sense strand
ugacaaggaguaccaagug

SEQ ID NO: 1185651 - RNA, 19 nt, Homo sapiens
  misc_RNA (1)...(19): siRNA sense strand
gguuucgacuucaacauca

SEQ ID NO: 1185652 - RNA, 19 nt, Homo sapiens
  misc_RNA (1)...(19): siRNA sense strand
gaagugacaaggaguacca

SEQ ID NO: 1185653 - RNA, 19 nt, Homo sapiens
  misc_RNA (1)...(19): siRNA sense strand
gauaagacggagaaugaca

SEQ ID NO: 1185654 - RNA, 19 nt, Homo sapiens
  misc_RNA (1)...(19): siRNA sense strand
caacauccacuaugagacu

SEQ ID NO: 1185655 - RNA, 19 nt, Homo sapiens
  misc_RNA (1)...(19): siRNA sense strand
caaggaguaccaagugaau

SEQ ID NO: 1185656 - RNA, 19 nt, Homo sapiens
  misc_RNA (1)...(19): siRNA sense strand
ugacacacaacauccacua

SEQ ID NO: 1185657 - RNA, 19 nt, Homo sapiens
  misc_RNA (1)...(19): siRNA sense strand
augaggauuuggaggauaa

SEQ ID NO: 1185658 - RNA, 19 nt, Homo sapiens
  misc_RNA (1)...(19): siRNA sense strand
ccacugcugccuuuacuuc

SEQ ID NO: 1185659 - RNA, 19 nt, Homo sapiens
  misc_RNA (1)...(19): siRNA sense strand
ccaugagcaucaacuccaa

SEQ ID NO: 1185660 - RNA, 19 nt, Homo sapiens
  misc_RNA (1)...(19): siRNA sense strand
uaagacggagaaugacaaa

SEQ ID NO: 1185661 - RNA, 19 nt, Homo sapiens
  misc_RNA (1)...(19): siRNA sense strand
cguguccacugcugccuuu

SEQ ID NO: 1185662 - RNA, 19 nt, Homo sapiens
  misc_RNA (1)...(19): siRNA sense strand
ucgagcagaugcgcaagaa

SEQ ID NO: 1185663 - RNA, 19 nt, Homo sapiens
  misc_RNA (1)...(19): siRNA sense strand
cacaacauccacuaugaga

SEQ ID NO: 1185664 - RNA, 19 nt, Homo sapiens
  misc_RNA (1)...(19): siRNA sense strand
acacacaacauccacuaug

SEQ ID NO: 1185665 - RNA, 19 nt, Homo sapiens
  misc_RNA (1)...(19): siRNA sense strand
ugaaggaggaggucaacau

SEQ ID NO: 1185666 - RNA, 19 nt, Homo sapiens
  misc_RNA (1)...(19): siRNA sense strand
uccaggaccucaaggaagu

SEQ ID NO: 1185667 - RNA, 19 nt, Homo sapiens
  misc_RNA (1)...(19): siRNA sense strand
gaggauaagacggagaaug

SEQ ID NO: 1185668 - RNA, 19 nt, Homo sapiens
  misc_RNA (1)...(19): siRNA sense strand
gccaagcggcucaaugaca

SEQ ID NO: 1185669 - RNA, 19 nt, Homo sapiens
  misc_RNA (1)...(19): siRNA sense strand
ggaucuugaguucaugaaa

SEQ ID NO: 1185670 - RNA, 19 nt, Homo sapiens
  misc_RNA (1)...(19): siRNA sense strand
gcggcucaaugacaaugga

SEQ ID NO: 1185671 - RNA, 19 nt, Homo sapiens
  misc_RNA (1)...(19): siRNA sense strand
cuucgagacuuugucauca

SEQ ID NO: 1185672 - RNA, 19 nt, Homo sapiens
  misc_RNA (1)...(19): siRNA sense strand
aagaaacgcaucccugaca

SEQ ID NO: 1185673 - RNA, 19 nt, Homo sapiens
  misc_RNA (1)...(19): siRNA sense strand
guacgagaaguuccugaag

SEQ ID NO: 1185674 - RNA, 19 nt, Homo sapiens
  misc_RNA (1)...(19): siRNA sense strand
ggaccucaaggaagugaca

SEQ ID NO: 1185675 - RNA, 19 nt, Homo sapiens
  misc_RNA (1)...(19): siRNA sense strand
agccagcggugcccaugaa

SEQ ID NO: 1185676 - RNA, 19 nt, Homo sapiens
  misc_RNA (1)...(19): siRNA sense strand
ccagaaggaauuugaugag

SEQ ID NO: 1185677 - RNA, 19 nt, Homo sapiens
  misc_RNA (1)...(19): siRNA sense strand
gucaacaucgccaggaaga

SEQ ID NO: 1185678 - RNA, 19 nt, Homo sapiens
  misc_RNA (1)...(19): siRNA sense strand
acaaggaguaccaagugaa

SEQ ID NO: 1185679 - RNA, 19 nt, Homo sapiens
  misc_RNA (1)...(19): siRNA sense strand
ucaugaaacaccucagcaa

SEQ ID NO: 1185680 - RNA, 19 nt, Homo sapiens
  misc_RNA (1)...(19): siRNA sense strand
caggagagcaugccuuuug

SEQ ID NO: 1185681 - RNA, 19 nt, Homo sapiens
  misc_RNA (1)...(19): siRNA sense strand
ugcgaccucuggaucuuga

SEQ ID NO: 1185682 - RNA, 19 nt, Homo sapiens
  misc_RNA (1)...(19): siRNA sense strand
cccagaaggaauuugauga

SEQ ID NO: 1185683 - RNA, 19 nt, Homo sapiens
  misc_RNA (1)...(19): siRNA sense strand
gagcagaugcgcaagaaga

SEQ ID NO: 1185684 - RNA, 19 nt, Homo sapiens
  misc_RNA (1)...(19): siRNA sense strand
gggagcccauugagaagua

SEQ ID NO: 1185685 - RNA, 19 nt, Homo sapiens
  misc_RNA (1)...(19): siRNA sense strand
ucaaugagcaguacgagaa

SEQ ID NO: 1185686 - RNA, 19 nt, Homo sapiens
  misc_RNA (1)...(19): siRNA sense strand
gcaagaagaccaugaagac

SEQ ID NO: 1185687 - RNA, 19 nt, Homo sapiens
  misc_RNA (1)...(19): siRNA sense strand
gguuucgacuucaacauca

SEQ ID NO: 1185688 - RNA, 19 nt, Homo sapiens
  misc_RNA (1)...(19): siRNA sense strand
ccaugagcaucaacuccaa

SEQ ID NO: 1185689 - RNA, 19 nt, Homo sapiens
  misc_RNA (1)...(19): siRNA sense strand
ucgagcagaugcgcaagaa

SEQ ID NO: 1185690 - RNA, 19 nt, Homo sapiens
  misc_RNA (1)...(19): siRNA sense strand
agccagcggugcccaugaa

SEQ ID NO: 1185691 - RNA, 19 nt, Homo sapiens
  misc_RNA (1)...(19): siRNA sense strand
caaaguggauggcauauac

SEQ ID NO: 1185692 - RNA, 19 nt, Homo sapiens
  misc_RNA (1)...(19): siRNA sense strand
gugaugaccugguuccuuu

SEQ ID NO: 1185693 - RNA, 19 nt, Homo sapiens
  misc_RNA (1)...(19): siRNA sense strand
gauacaaacucacccuguu

SEQ ID NO: 1185694 - RNA, 19 nt, Homo sapiens
  misc_RNA (1)...(19): siRNA sense strand
ccaagccacugucaaauuc

SEQ ID NO: 1185695 - RNA, 19 nt, Homo sapiens
  misc_RNA (1)...(19): siRNA sense strand
caaccaagccacugucaaa

SEQ ID NO: 1185696 - RNA, 19 nt, Homo sapiens
  misc_RNA (1)...(19): siRNA sense strand
uaaaggagaaggaguuuga

SEQ ID NO: 1185697 - RNA, 19 nt, Homo sapiens
  misc_RNA (1)...(19): siRNA sense strand
gggcugagaccaucaaguu

SEQ ID NO: 1185698 - RNA, 19 nt, Homo sapiens
  misc_RNA (1)...(19): siRNA sense strand
ccacaguuaucgacaugaa

SEQ ID NO: 1185699 - RNA, 19 nt, Homo sapiens
  misc_RNA (1)...(19): siRNA sense strand
gacaugaaguggagauaca

SEQ ID NO: 1185700 - RNA, 19 nt, Homo sapiens
  misc_RNA (1)...(19): siRNA sense strand
ugacaaaguggauggcaua

SEQ ID NO: 1185701 - RNA, 19 nt, Homo sapiens
  misc_RNA (1)...(19): siRNA sense strand
gcacagcaacgugagaauu

SEQ ID NO: 1185702 - RNA, 19 nt, Homo sapiens
  misc_RNA (1)...(19): siRNA sense strand
gcauauaccuacucuaccu

SEQ ID NO: 1185703 - RNA, 19 nt, Homo sapiens
  misc_RNA (1)...(19): siRNA sense strand
gaccacaguuaucgacaug

SEQ ID NO: 1185704 - RNA, 19 nt, Homo sapiens
  misc_RNA (1)...(19): siRNA sense strand
ugugguaucucucuccaaa

SEQ ID NO: 1185705 - RNA, 19 nt, Homo sapiens
  misc_RNA (1)...(19): siRNA sense strand
gaacugaggacacuuuuau

SEQ ID NO: 1185706 - RNA, 19 nt, Homo sapiens
  misc_RNA (1)...(19): siRNA sense strand
aagcccagauugcacauuu

SEQ ID NO: 1185707 - RNA, 19 nt, Homo sapiens
  misc_RNA (1)...(19): siRNA sense strand
ggagaaggaguuugagcuu

SEQ ID NO: 1185708 - RNA, 19 nt, Homo sapiens
  misc_RNA (1)...(19): siRNA sense strand
agaaggaguuugagcuugu

SEQ ID NO: 1185709 - RNA, 19 nt, Homo sapiens
  misc_RNA (1)...(19): siRNA sense strand
ugauucagguagccaauau

SEQ ID NO: 1185710 - RNA, 19 nt, Homo sapiens
  misc_RNA (1)...(19): siRNA sense strand
ggaccacaguuaucgacau

SEQ ID NO: 1185711 - RNA, 19 nt, Homo sapiens
  misc_RNA (1)...(19): siRNA sense strand
cgugagaauugacaaagug

SEQ ID NO: 1185712 - RNA, 19 nt, Homo sapiens
  misc_RNA (1)...(19): siRNA sense strand
aaagagaacugaggacacu

SEQ ID NO: 1185713 - RNA, 19 nt, Homo sapiens
  misc_RNA (1)...(19): siRNA sense strand
gaaggaguuugagcuugug

SEQ ID NO: 1185714 - RNA, 19 nt, Homo sapiens
  misc_RNA (1)...(19): siRNA sense strand
gaaccuuccuggccaaaau

SEQ ID NO: 1185715 - RNA, 19 nt, Homo sapiens
  misc_RNA (1)...(19): siRNA sense strand
cuacugggguuuugaguuu

SEQ ID NO: 1185716 - RNA, 19 nt, Homo sapiens
  misc_RNA (1)...(19): siRNA sense strand
gagccgaacaucuuauauc

SEQ ID NO: 1185717 - RNA, 19 nt, Homo sapiens
  misc_RNA (1)...(19): siRNA sense strand
caacgugagaauugacaaa

SEQ ID NO: 1185718 - RNA, 19 nt, Homo sapiens
  misc_RNA (1)...(19): siRNA sense strand
cgaccuugauugagaucuu

SEQ ID NO: 1185719 - RNA, 19 nt, Homo sapiens
  misc_RNA (1)...(19): siRNA sense strand
gccagagccgaacaucuua

SEQ ID NO: 1185720 - RNA, 19 nt, Homo sapiens
  misc_RNA (1)...(19): siRNA sense strand
gcugagaccaucaaguuca

SEQ ID NO: 1185721 - RNA, 19 nt, Homo sapiens
  misc_RNA (1)...(19): siRNA sense strand
ucagucaguuugaacagau

SEQ ID NO: 1185722 - RNA, 19 nt, Homo sapiens
  misc_RNA (1)...(19): siRNA sense strand
cagagccgaacaucuuaua

SEQ ID NO: 1185723 - RNA, 19 nt, Homo sapiens
  misc_RNA (1)...(19): siRNA sense strand
ccagacaaccauuggcuau

SEQ ID NO: 1185724 - RNA, 19 nt, Homo sapiens
  misc_RNA (1)...(19): siRNA sense strand
aacagcaacucgaggagaa

SEQ ID NO: 1185725 - RNA, 19 nt, Homo sapiens
  misc_RNA (1)...(19): siRNA sense strand
ccuguugguugcucaguug

SEQ ID NO: 1185726 - RNA, 19 nt, Homo sapiens
  misc_RNA (1)...(19): siRNA sense strand
gaucagagggaaagagaac

SEQ ID NO: 1185727 - RNA, 19 nt, Homo sapiens
  misc_RNA (1)...(19): siRNA sense strand
gauggcauauaccuacucu

SEQ ID NO: 1185728 - RNA, 19 nt, Homo sapiens
  misc_RNA (1)...(19): siRNA sense strand
caaaaucgccagacccaaa

SEQ ID NO: 1185729 - RNA, 19 nt, Homo sapiens
  misc_RNA (1)...(19): siRNA sense strand
ucacgaccuugauugagau

SEQ ID NO: 1185730 - RNA, 19 nt, Homo sapiens
  misc_RNA (1)...(19): siRNA sense strand
gaaaucuacugggguuuug

SEQ ID NO: 1185731 - RNA, 19 nt, Homo sapiens
  misc_RNA (1)...(19): siRNA sense strand
gagaauugacaaaguggau

SEQ ID NO: 1185732 - RNA, 19 nt, Homo sapiens
  misc_RNA (1)...(19): siRNA sense strand
cacagcaacgugagaauug

SEQ ID NO: 1185733 - RNA, 19 nt, Homo sapiens
  misc_RNA (1)...(19): siRNA sense strand
gaaguggagauacaaacuc

SEQ ID NO: 1185734 - RNA, 19 nt, Homo sapiens
  misc_RNA (1)...(19): siRNA sense strand
ucaugaaaguggacucucu

SEQ ID NO: 1185735 - RNA, 19 nt, Homo sapiens
  misc_RNA (1)...(19): siRNA sense strand
gaccuugauugagaucuuc

SEQ ID NO: 1185736 - RNA, 19 nt, Homo sapiens
  misc_RNA (1)...(19): siRNA sense strand
gaggacacuuuuauuacaa

SEQ ID NO: 1185737 - RNA, 19 nt, Homo sapiens
  misc_RNA (1)...(19): siRNA sense strand
agagaacugaggacacuuu

SEQ ID NO: 1185738 - RNA, 19 nt, Homo sapiens
  misc_RNA (1)...(19): siRNA sense strand
acagcaacgugagaauuga

SEQ ID NO: 1185739 - RNA, 19 nt, Homo sapiens
  misc_RNA (1)...(19): siRNA sense strand
aaguggagauacaaacuca

SEQ ID NO: 1185740 - RNA, 19 nt, Homo sapiens
  misc_RNA (1)...(19): siRNA sense strand
ugccagagccgaacaucuu

SEQ ID NO: 1185741 - RNA, 19 nt, Homo sapiens
  misc_RNA (1)...(19): siRNA sense strand
ucuaccaugugcuggauga

SEQ ID NO: 1185742 - RNA, 19 nt, Homo sapiens
  misc_RNA (1)...(19): siRNA sense strand
agacccacgucaccaagga

SEQ ID NO: 1185743 - RNA, 19 nt, Homo sapiens
  misc_RNA (1)...(19): siRNA sense strand
acaaaguggauggcauaua

SEQ ID NO: 1185744 - RNA, 19 nt, Homo sapiens
  misc_RNA (1)...(19): siRNA sense strand
gugcagucaucaccaagca

SEQ ID NO: 1185745 - RNA, 19 nt, Homo sapiens
  misc_RNA (1)...(19): siRNA sense strand
guggacuccuccucugaga

SEQ ID NO: 1185746 - RNA, 19 nt, Homo sapiens
  misc_RNA (1)...(19): siRNA sense strand
gagagccccuuccucauuc

SEQ ID NO: 1185747 - RNA, 19 nt, Homo sapiens
  misc_RNA (1)...(19): siRNA sense strand
ggaaaucuacugggguuuu

SEQ ID NO: 1185748 - RNA, 19 nt, Homo sapiens
  misc_RNA (1)...(19): siRNA sense strand
ggaaucccagacaaccauu

SEQ ID NO: 1185749 - RNA, 19 nt, Homo sapiens
  misc_RNA (1)...(19): siRNA sense strand
gggcacagcaacgugagaa

SEQ ID NO: 1185750 - RNA, 19 nt, Homo sapiens
  misc_RNA (1)...(19): siRNA sense strand
ccuguucgcugccacuuuu

SEQ ID NO: 1185751 - RNA, 19 nt, Homo sapiens
  misc_RNA (1)...(19): siRNA sense strand
uggcauauaccuacucuac

SEQ ID NO: 1185752 - RNA, 19 nt, Homo sapiens
  misc_RNA (1)...(19): siRNA sense strand
caugaaguggagauacaaa

SEQ ID NO: 1185753 - RNA, 19 nt, Homo sapiens
  misc_RNA (1)...(19): siRNA sense strand
ugaggacacuuuuauuaca

SEQ ID NO: 1185754 - RNA, 19 nt, Homo sapiens
  misc_RNA (1)...(19): siRNA sense strand
gugauucagguagccaaua

SEQ ID NO: 1185755 - RNA, 19 nt, Homo sapiens
  misc_RNA (1)...(19): siRNA sense strand
gcccagauugcacauuuua

SEQ ID NO: 1185756 - RNA, 19 nt, Homo sapiens
  misc_RNA (1)...(19): siRNA sense strand
cagucaguuugaacagauu

SEQ ID NO: 1185757 - RNA, 19 nt, Homo sapiens
  misc_RNA (1)...(19): siRNA sense strand
cccaaaaccuaaaggagaa

SEQ ID NO: 1185758 - RNA, 19 nt, Homo sapiens
  misc_RNA (1)...(19): siRNA sense strand
gaaucccagacaaccauug

SEQ ID NO: 1185759 - RNA, 19 nt, Homo sapiens
  misc_RNA (1)...(19): siRNA sense strand
ccuaaaggagaaggaguuu

SEQ ID NO: 1185760 - RNA, 19 nt, Homo sapiens
  misc_RNA (1)...(19): siRNA sense strand
caaaguggauggcauauac

SEQ ID NO: 1185761 - RNA, 19 nt, Homo sapiens
  misc_RNA (1)...(19): siRNA sense strand
gugaugaccugguuccuuu

SEQ ID NO: 1185762 - RNA, 19 nt, Homo sapiens
  misc_RNA (1)...(19): siRNA sense strand
gauacaaacucacccuguu

SEQ ID NO: 1185763 - RNA, 19 nt, Homo sapiens
  misc_RNA (1)...(19): siRNA sense strand
ccaagccacugucaaauuc

SEQ ID NO: 1185764 - RNA, 19 nt, Homo sapiens
  misc_RNA (1)...(19): siRNA sense strand
caaccaagccacugucaaa

SEQ ID NO: 1185765 - RNA, 19 nt, Homo sapiens
  misc_RNA (1)...(19): siRNA sense strand
uaaaggagaaggaguuuga

SEQ ID NO: 1185766 - RNA, 19 nt, Homo sapiens
  misc_RNA (1)...(19): siRNA sense strand
gggcugagaccaucaaguu

SEQ ID NO: 1185767 - RNA, 19 nt, Homo sapiens
  misc_RNA (1)...(19): siRNA sense strand
ccacaguuaucgacaugaa

SEQ ID NO: 1185768 - RNA, 19 nt, Homo sapiens
  misc_RNA (1)...(19): siRNA sense strand
gacaugaaguggagauaca

SEQ ID NO: 1185769 - RNA, 19 nt, Homo sapiens
  misc_RNA (1)...(19): siRNA sense strand
ugacaaaguggauggcaua

SEQ ID NO: 1185770 - RNA, 19 nt, Homo sapiens
  misc_RNA (1)...(19): siRNA sense strand
gcacagcaacgugagaauu

SEQ ID NO: 1185771 - RNA, 19 nt, Homo sapiens
  misc_RNA (1)...(19): siRNA sense strand
gcauauaccuacucuaccu

SEQ ID NO: 1185772 - RNA, 19 nt, Homo sapiens
  misc_RNA (1)...(19): siRNA sense strand
gaccacaguuaucgacaug

SEQ ID NO: 1185773 - RNA, 19 nt, Homo sapiens
  misc_RNA (1)...(19): siRNA sense strand
ugugguaucucucuccaaa

SEQ ID NO: 1185774 - RNA, 19 nt, Homo sapiens
  misc_RNA (1)...(19): siRNA sense strand
gaacugaggacacuuuuau

SEQ ID NO: 1185775 - RNA, 19 nt, Homo sapiens
  misc_RNA (1)...(19): siRNA sense strand
aagcccagauugcacauuu

SEQ ID NO: 1185776 - RNA, 19 nt, Homo sapiens
  misc_RNA (1)...(19): siRNA sense strand
ggagaaggaguuugagcuu

SEQ ID NO: 1185777 - RNA, 19 nt, Homo sapiens
  misc_RNA (1)...(19): siRNA sense strand
agaaggaguuugagcuugu

SEQ ID NO: 1185778 - RNA, 19 nt, Homo sapiens
  misc_RNA (1)...(19): siRNA sense strand
ugauucagguagccaauau

SEQ ID NO: 1185779 - RNA, 19 nt, Homo sapiens
  misc_RNA (1)...(19): siRNA sense strand
ggaccacaguuaucgacau

SEQ ID NO: 1185780 - RNA, 19 nt, Homo sapiens
  misc_RNA (1)...(19): siRNA sense strand
cgugagaauugacaaagug

SEQ ID NO: 1185781 - RNA, 19 nt, Homo sapiens
  misc_RNA (1)...(19): siRNA sense strand
aaagagaacugaggacacu

SEQ ID NO: 1185782 - RNA, 19 nt, Homo sapiens
  misc_RNA (1)...(19): siRNA sense strand
gaaggaguuugagcuugug

SEQ ID NO: 1185783 - RNA, 19 nt, Homo sapiens
  misc_RNA (1)...(19): siRNA sense strand
gaaccuuccuggccaaaau

SEQ ID NO: 1185784 - RNA, 19 nt, Homo sapiens
  misc_RNA (1)...(19): siRNA sense strand
cuacugggguuuugaguuu

SEQ ID NO: 1185785 - RNA, 19 nt, Homo sapiens
  misc_RNA (1)...(19): siRNA sense strand
gagccgaacaucuuauauc

SEQ ID NO: 1185786 - RNA, 19 nt, Homo sapiens
  misc_RNA (1)...(19): siRNA sense strand
caacgugagaauugacaaa

SEQ ID NO: 1185787 - RNA, 19 nt, Homo sapiens
  misc_RNA (1)...(19): siRNA sense strand
cgaccuugauugagaucuu

SEQ ID NO: 1185788 - RNA, 19 nt, Homo sapiens
  misc_RNA (1)...(19): siRNA sense strand
gccagagccgaacaucuua

SEQ ID NO: 1185789 - RNA, 19 nt, Homo sapiens
  misc_RNA (1)...(19): siRNA sense strand
gcugagaccaucaaguuca

SEQ ID NO: 1185790 - RNA, 19 nt, Homo sapiens
  misc_RNA (1)...(19): siRNA sense strand
ucagucaguuugaacagau

SEQ ID NO: 1185791 - RNA, 19 nt, Homo sapiens
  misc_RNA (1)...(19): siRNA sense strand
cagagccgaacaucuuaua

SEQ ID NO: 1185792 - RNA, 19 nt, Homo sapiens
  misc_RNA (1)...(19): siRNA sense strand
ccagacaaccauuggcuau

SEQ ID NO: 1185793 - RNA, 19 nt, Homo sapiens
  misc_RNA (1)...(19): siRNA sense strand
aacagcaacucgaggagaa

SEQ ID NO: 1185794 - RNA, 19 nt, Homo sapiens
  misc_RNA (1)...(19): siRNA sense strand
ccuguugguugcucaguug

SEQ ID NO: 1185795 - RNA, 19 nt, Homo sapiens
  misc_RNA (1)...(19): siRNA sense strand
gaucagagggaaagagaac

SEQ ID NO: 1185796 - RNA, 19 nt, Homo sapiens
  misc_RNA (1)...(19): siRNA sense strand
gauggcauauaccuacucu

SEQ ID NO: 1185797 - RNA, 19 nt, Homo sapiens
  misc_RNA (1)...(19): siRNA sense strand
caaaaucgccagacccaaa

SEQ ID NO: 1185798 - RNA, 19 nt, Homo sapiens
  misc_RNA (1)...(19): siRNA sense strand
ucacgaccuugauugagau

SEQ ID NO: 1185799 - RNA, 19 nt, Homo sapiens
  misc_RNA (1)...(19): siRNA sense strand
gaaaucuacugggguuuug

SEQ ID NO: 1185800 - RNA, 19 nt, Homo sapiens
  misc_RNA (1)...(19): siRNA sense strand
gagaauugacaaaguggau

SEQ ID NO: 1185801 - RNA, 19 nt, Homo sapiens
  misc_RNA (1)...(19): siRNA sense strand
cacagcaacgugagaauug

SEQ ID NO: 1185802 - RNA, 19 nt, Homo sapiens
  misc_RNA (1)...(19): siRNA sense strand
gaaguggagauacaaacuc

SEQ ID NO: 1185803 - RNA, 19 nt, Homo sapiens
  misc_RNA (1)...(19): siRNA sense strand
ucaugaaaguggacucucu

SEQ ID NO: 1185804 - RNA, 19 nt, Homo sapiens
  misc_RNA (1)...(19): siRNA sense strand
gaccuugauugagaucuuc

SEQ ID NO: 1185805 - RNA, 19 nt, Homo sapiens
  misc_RNA (1)...(19): siRNA sense strand
gaggacacuuuuauuacaa

SEQ ID NO: 1185806 - RNA, 19 nt, Homo sapiens
  misc_RNA (1)...(19): siRNA sense strand
agagaacugaggacacuuu

SEQ ID NO: 1185807 - RNA, 19 nt, Homo sapiens
  misc_RNA (1)...(19): siRNA sense strand
acagcaacgugagaauuga

SEQ ID NO: 1185808 - RNA, 19 nt, Homo sapiens
  misc_RNA (1)...(19): siRNA sense strand
aaguggagauacaaacuca

SEQ ID NO: 1185809 - RNA, 19 nt, Homo sapiens
  misc_RNA (1)...(19): siRNA sense strand
ugccagagccgaacaucuu

SEQ ID NO: 1185810 - RNA, 19 nt, Homo sapiens
  misc_RNA (1)...(19): siRNA sense strand
ucuaccaugugcuggauga

SEQ ID NO: 1185811 - RNA, 19 nt, Homo sapiens
  misc_RNA (1)...(19): siRNA sense strand
agacccacgucaccaagga

SEQ ID NO: 1185812 - RNA, 19 nt, Homo sapiens
  misc_RNA (1)...(19): siRNA sense strand
acaaaguggauggcauaua

SEQ ID NO: 1185813 - RNA, 19 nt, Homo sapiens
  misc_RNA (1)...(19): siRNA sense strand
gugcagucaucaccaagca

SEQ ID NO: 1185814 - RNA, 19 nt, Homo sapiens
  misc_RNA (1)...(19): siRNA sense strand
guggacuccuccucugaga

SEQ ID NO: 1185815 - RNA, 19 nt, Homo sapiens
  misc_RNA (1)...(19): siRNA sense strand
gagagccccuuccucauuc

SEQ ID NO: 1185816 - RNA, 19 nt, Homo sapiens
  misc_RNA (1)...(19): siRNA sense strand
ggaaaucuacugggguuuu

SEQ ID NO: 1185817 - RNA, 19 nt, Homo sapiens
  misc_RNA (1)...(19): siRNA sense strand
ggaaucccagacaaccauu

SEQ ID NO: 1185818 - RNA, 19 nt, Homo sapiens
  misc_RNA (1)...(19): siRNA sense strand
gggcacagcaacgugagaa

SEQ ID NO: 1185819 - RNA, 19 nt, Homo sapiens
  misc_RNA (1)...(19): siRNA sense strand
ccuguucgcugccacuuuu

SEQ ID NO: 1185820 - RNA, 19 nt, Homo sapiens
  misc_RNA (1)...(19): siRNA sense strand
uggcauauaccuacucuac

SEQ ID NO: 1185821 - RNA, 19 nt, Homo sapiens
  misc_RNA (1)...(19): siRNA sense strand
caugaaguggagauacaaa

SEQ ID NO: 1185822 - RNA, 19 nt, Homo sapiens
  misc_RNA (1)...(19): siRNA sense strand
ugaggacacuuuuauuaca

SEQ ID NO: 1185823 - RNA, 19 nt, Homo sapiens
  misc_RNA (1)...(19): siRNA sense strand
gugauucagguagccaaua

SEQ ID NO: 1185824 - RNA, 19 nt, Homo sapiens
  misc_RNA (1)...(19): siRNA sense strand
gcccagauugcacauuuua

SEQ ID NO: 1185825 - RNA, 19 nt, Homo sapiens
  misc_RNA (1)...(19): siRNA sense strand
cagucaguuugaacagauu

SEQ ID NO: 1185826 - RNA, 19 nt, Homo sapiens
  misc_RNA (1)...(19): siRNA sense strand
cccaaaaccuaaaggagaa

SEQ ID NO: 1185827 - RNA, 19 nt, Homo sapiens
  misc_RNA (1)...(19): siRNA sense strand
gaaucccagacaaccauug

SEQ ID NO: 1185828 - RNA, 19 nt, Homo sapiens
  misc_RNA (1)...(19): siRNA sense strand
ccuaaaggagaaggaguuu

SEQ ID NO: 1185829 - RNA, 19 nt, Homo sapiens
  misc_RNA (1)...(19): siRNA sense strand
caaaguggauggcauauac

SEQ ID NO: 1185830 - RNA, 19 nt, Homo sapiens
  misc_RNA (1)...(19): siRNA sense strand
gugaugaccugguuccuuu

SEQ ID NO: 1185831 - RNA, 19 nt, Homo sapiens
  misc_RNA (1)...(19): siRNA sense strand
gauacaaacucacccuguu

SEQ ID NO: 1185832 - RNA, 19 nt, Homo sapiens
  misc_RNA (1)...(19): siRNA sense strand
ccaagccacugucaaauuc

SEQ ID NO: 1185833 - RNA, 19 nt, Homo sapiens
  misc_RNA (1)...(19): siRNA sense strand
caaccaagccacugucaaa

SEQ ID NO: 1185834 - RNA, 19 nt, Homo sapiens
  misc_RNA (1)...(19): siRNA sense strand
uaaaggagaaggaguuuga

SEQ ID NO: 1185835 - RNA, 19 nt, Homo sapiens
  misc_RNA (1)...(19): siRNA sense strand
gggcugagaccaucaaguu

SEQ ID NO: 1185836 - RNA, 19 nt, Homo sapiens
  misc_RNA (1)...(19): siRNA sense strand
ccacaguuaucgacaugaa

SEQ ID NO: 1185837 - RNA, 19 nt, Homo sapiens
  misc_RNA (1)...(19): siRNA sense strand
gacaugaaguggagauaca

SEQ ID NO: 1185838 - RNA, 19 nt, Homo sapiens
  misc_RNA (1)...(19): siRNA sense strand
ugacaaaguggauggcaua

SEQ ID NO: 1185839 - RNA, 19 nt, Homo sapiens
  misc_RNA (1)...(19): siRNA sense strand
gcacagcaacgugagaauu

SEQ ID NO: 1185840 - RNA, 19 nt, Homo sapiens
  misc_RNA (1)...(19): siRNA sense strand
gcauauaccuacucuaccu

SEQ ID NO: 1185841 - RNA, 19 nt, Homo sapiens
  misc_RNA (1)...(19): siRNA sense strand
gaccacaguuaucgacaug

SEQ ID NO: 1185842 - RNA, 19 nt, Homo sapiens
  misc_RNA (1)...(19): siRNA sense strand
ugugguaucucucuccaaa

SEQ ID NO: 1185843 - RNA, 19 nt, Homo sapiens
  misc_RNA (1)...(19): siRNA sense strand
gaacugaggacacuuuuau

SEQ ID NO: 1185844 - RNA, 19 nt, Homo sapiens
  misc_RNA (1)...(19): siRNA sense strand
aagcccagauugcacauuu

SEQ ID NO: 1185845 - RNA, 19 nt, Homo sapiens
  misc_RNA (1)...(19): siRNA sense strand
ggagaaggaguuugagcuu

SEQ ID NO: 1185846 - RNA, 19 nt, Homo sapiens
  misc_RNA (1)...(19): siRNA sense strand
agaaggaguuugagcuugu

SEQ ID NO: 1185847 - RNA, 19 nt, Homo sapiens
  misc_RNA (1)...(19): siRNA sense strand
ugauucagguagccaauau

SEQ ID NO: 1185848 - RNA, 19 nt, Homo sapiens
  misc_RNA (1)...(19): siRNA sense strand
ggaccacaguuaucgacau

SEQ ID NO: 1185849 - RNA, 19 nt, Homo sapiens
  misc_RNA (1)...(19): siRNA sense strand
cgugagaauugacaaagug

SEQ ID NO: 1185850 - RNA, 19 nt, Homo sapiens
  misc_RNA (1)...(19): siRNA sense strand
aaagagaacugaggacacu

SEQ ID NO: 1185851 - RNA, 19 nt, Homo sapiens
  misc_RNA (1)...(19): siRNA sense strand
gaaggaguuugagcuugug

SEQ ID NO: 1185852 - RNA, 19 nt, Homo sapiens
  misc_RNA (1)...(19): siRNA sense strand
gaaccuuccuggccaaaau

SEQ ID NO: 1185853 - RNA, 19 nt, Homo sapiens
  misc_RNA (1)...(19): siRNA sense strand
cuacugggguuuugaguuu

SEQ ID NO: 1185854 - RNA, 19 nt, Homo sapiens
  misc_RNA (1)...(19): siRNA sense strand
gagccgaacaucuuauauc

SEQ ID NO: 1185855 - RNA, 19 nt, Homo sapiens
  misc_RNA (1)...(19): siRNA sense strand
caacgugagaauugacaaa

SEQ ID NO: 1185856 - RNA, 19 nt, Homo sapiens
  misc_RNA (1)...(19): siRNA sense strand
cgaccuugauugagaucuu

SEQ ID NO: 1185857 - RNA, 19 nt, Homo sapiens
  misc_RNA (1)...(19): siRNA sense strand
gccagagccgaacaucuua

SEQ ID NO: 1185858 - RNA, 19 nt, Homo sapiens
  misc_RNA (1)...(19): siRNA sense strand
gcugagaccaucaaguuca

SEQ ID NO: 1185859 - RNA, 19 nt, Homo sapiens
  misc_RNA (1)...(19): siRNA sense strand
ucagucaguuugaacagau

SEQ ID NO: 1185860 - RNA, 19 nt, Homo sapiens
  misc_RNA (1)...(19): siRNA sense strand
cagagccgaacaucuuaua

SEQ ID NO: 1185861 - RNA, 19 nt, Homo sapiens
  misc_RNA (1)...(19): siRNA sense strand
ccagacaaccauuggcuau

SEQ ID NO: 1185862 - RNA, 19 nt, Homo sapiens
  misc_RNA (1)...(19): siRNA sense strand
aacagcaacucgaggagaa

SEQ ID NO: 1185863 - RNA, 19 nt, Homo sapiens
  misc_RNA (1)...(19): siRNA sense strand
ccuguugguugcucaguug

SEQ ID NO: 1185864 - RNA, 19 nt, Homo sapiens
  misc_RNA (1)...(19): siRNA sense strand
gaucagagggaaagagaac

SEQ ID NO: 1185865 - RNA, 19 nt, Homo sapiens
  misc_RNA (1)...(19): siRNA sense strand
gauggcauauaccuacucu

SEQ ID NO: 1185866 - RNA, 19 nt, Homo sapiens
  misc_RNA (1)...(19): siRNA sense strand
caaaaucgccagacccaaa

SEQ ID NO: 1185867 - RNA, 19 nt, Homo sapiens
  misc_RNA (1)...(19): siRNA sense strand
ucacgaccuugauugagau

SEQ ID NO: 1185868 - RNA, 19 nt, Homo sapiens
  misc_RNA (1)...(19): siRNA sense strand
gaaaucuacugggguuuug

SEQ ID NO: 1185869 - RNA, 19 nt, Homo sapiens
  misc_RNA (1)...(19): siRNA sense strand
gagaauugacaaaguggau

SEQ ID NO: 1185870 - RNA, 19 nt, Homo sapiens
  misc_RNA (1)...(19): siRNA sense strand
cacagcaacgugagaauug

SEQ ID NO: 1185871 - RNA, 19 nt, Homo sapiens
  misc_RNA (1)...(19): siRNA sense strand
gaaguggagauacaaacuc

SEQ ID NO: 1185872 - RNA, 19 nt, Homo sapiens
  misc_RNA (1)...(19): siRNA sense strand
ucaugaaaguggacucucu

SEQ ID NO: 1185873 - RNA, 19 nt, Homo sapiens
  misc_RNA (1)...(19): siRNA sense strand
gaccuugauugagaucuuc

SEQ ID NO: 1185874 - RNA, 19 nt, Homo sapiens
  misc_RNA (1)...(19): siRNA sense strand
gaggacacuuuuauuacaa

SEQ ID NO: 1185875 - RNA, 19 nt, Homo sapiens
  misc_RNA (1)...(19): siRNA sense strand
agagaacugaggacacuuu

SEQ ID NO: 1185876 - RNA, 19 nt, Homo sapiens
  misc_RNA (1)...(19): siRNA sense strand
acagcaacgugagaauuga

SEQ ID NO: 1185877 - RNA, 19 nt, Homo sapiens
  misc_RNA (1)...(19): siRNA sense strand
aaguggagauacaaacuca

SEQ ID NO: 1185878 - RNA, 19 nt, Homo sapiens
  misc_RNA (1)...(19): siRNA sense strand
ugccagagccgaacaucuu

SEQ ID NO: 1185879 - RNA, 19 nt, Homo sapiens
  misc_RNA (1)...(19): siRNA sense strand
ucuaccaugugcuggauga

SEQ ID NO: 1185880 - RNA, 19 nt, Homo sapiens
  misc_RNA (1)...(19): siRNA sense strand
agacccacgucaccaagga

SEQ ID NO: 1185881 - RNA, 19 nt, Homo sapiens
  misc_RNA (1)...(19): siRNA sense strand
acaaaguggauggcauaua

SEQ ID NO: 1185882 - RNA, 19 nt, Homo sapiens
  misc_RNA (1)...(19): siRNA sense strand
gugcagucaucaccaagca

SEQ ID NO: 1185883 - RNA, 19 nt, Homo sapiens
  misc_RNA (1)...(19): siRNA sense strand
guggacuccuccucugaga

SEQ ID NO: 1185884 - RNA, 19 nt, Homo sapiens
  misc_RNA (1)...(19): siRNA sense strand
gagagccccuuccucauuc

SEQ ID NO: 1185885 - RNA, 19 nt, Homo sapiens
  misc_RNA (1)...(19): siRNA sense strand
ggaaaucuacugggguuuu

SEQ ID NO: 1185886 - RNA, 19 nt, Homo sapiens
  misc_RNA (1)...(19): siRNA sense strand
ggaaucccagacaaccauu

SEQ ID NO: 1185887 - RNA, 19 nt, Homo sapiens
  misc_RNA (1)...(19): siRNA sense strand
gggcacagcaacgugagaa

SEQ ID NO: 1185888 - RNA, 19 nt, Homo sapiens
  misc_RNA (1)...(19): siRNA sense strand
ccuguucgcugccacuuuu

SEQ ID NO: 1185889 - RNA, 19 nt, Homo sapiens
  misc_RNA (1)...(19): siRNA sense strand
uggcauauaccuacucuac

SEQ ID NO: 1185890 - RNA, 19 nt, Homo sapiens
  misc_RNA (1)...(19): siRNA sense strand
caugaaguggagauacaaa

SEQ ID NO: 1185891 - RNA, 19 nt, Homo sapiens
  misc_RNA (1)...(19): siRNA sense strand
ugaggacacuuuuauuaca

SEQ ID NO: 1185892 - RNA, 19 nt, Homo sapiens
  misc_RNA (1)...(19): siRNA sense strand
gugauucagguagccaaua

SEQ ID NO: 1185893 - RNA, 19 nt, Homo sapiens
  misc_RNA (1)...(19): siRNA sense strand
gcccagauugcacauuuua

SEQ ID NO: 1185894 - RNA, 19 nt, Homo sapiens
  misc_RNA (1)...(19): siRNA sense strand
cagucaguuugaacagauu

SEQ ID NO: 1185895 - RNA, 19 nt, Homo sapiens
  misc_RNA (1)...(19): siRNA sense strand
cccaaaaccuaaaggagaa

SEQ ID NO: 1185896 - RNA, 19 nt, Homo sapiens
  misc_RNA (1)...(19): siRNA sense strand
gaaucccagacaaccauug

SEQ ID NO: 1185897 - RNA, 19 nt, Homo sapiens
  misc_RNA (1)...(19): siRNA sense strand
ccuaaaggagaaggaguuu

SEQ ID NO: 1185898 - RNA, 19 nt, Homo sapiens
  misc_RNA (1)...(19): siRNA sense strand
ggacguaacuaguaacuuu

SEQ ID NO: 1185899 - RNA, 19 nt, Homo sapiens
  misc_RNA (1)...(19): siRNA sense strand
acacaaagcugcuaaagaa

SEQ ID NO: 1185900 - RNA, 19 nt, Homo sapiens
  misc_RNA (1)...(19): siRNA sense strand
gcgaagaccuggagaagca

SEQ ID NO: 1185901 - RNA, 19 nt, Homo sapiens
  misc_RNA (1)...(19): siRNA sense strand
ggaaacaugguuaaucuau

SEQ ID NO: 1185902 - RNA, 19 nt, Homo sapiens
  misc_RNA (1)...(19): siRNA sense strand
ugaaaugccuuaucagucu

SEQ ID NO: 1185903 - RNA, 19 nt, Homo sapiens
  misc_RNA (1)...(19): siRNA sense strand
caagaaugcugcagccaau

SEQ ID NO: 1185904 - RNA, 19 nt, Homo sapiens
  misc_RNA (1)...(19): siRNA sense strand
gaagauugaccaugccaaa

SEQ ID NO: 1185905 - RNA, 19 nt, Homo sapiens
  misc_RNA (1)...(19): siRNA sense strand
ucaacaagaucaacuucaa

SEQ ID NO: 1185906 - RNA, 19 nt, Homo sapiens
  misc_RNA (1)...(19): siRNA sense strand
gaucaucgccuaccacaca

SEQ ID NO: 1185907 - RNA, 19 nt, Homo sapiens
  misc_RNA (1)...(19): siRNA sense strand
gcccugaaaugccuuauca

SEQ ID NO: 1185908 - RNA, 19 nt, Homo sapiens
  misc_RNA (1)...(19): siRNA sense strand
cagcaggacguaacuagua

SEQ ID NO: 1185909 - RNA, 19 nt, Homo sapiens
  misc_RNA (1)...(19): siRNA sense strand
cggagaagcacguucauaa

SEQ ID NO: 1185910 - RNA, 19 nt, Homo sapiens
  misc_RNA (1)...(19): siRNA sense strand
ggaaacaccagaggaaguu

SEQ ID NO: 1185911 - RNA, 19 nt, Homo sapiens
  misc_RNA (1)...(19): siRNA sense strand
caaagcugcuaaagaagau

SEQ ID NO: 1185912 - RNA, 19 nt, Homo sapiens
  misc_RNA (1)...(19): siRNA sense strand
gcggaugacuggcggauag

SEQ ID NO: 1185913 - RNA, 19 nt, Homo sapiens
  misc_RNA (1)...(19): siRNA sense strand
gaugcagaaugucauguau

SEQ ID NO: 1185914 - RNA, 19 nt, Homo sapiens
  misc_RNA (1)...(19): siRNA sense strand
gcacguucauaacuucaug

SEQ ID NO: 1185915 - RNA, 19 nt, Homo sapiens
  misc_RNA (1)...(19): siRNA sense strand
ugaagacgcucaugaccau

SEQ ID NO: 1185916 - RNA, 19 nt, Homo sapiens
  misc_RNA (1)...(19): siRNA sense strand
ggauagccaugaccuacga

SEQ ID NO: 1185917 - RNA, 19 nt, Homo sapiens
  misc_RNA (1)...(19): siRNA sense strand
ucacauuccuuuccauugg

SEQ ID NO: 1185918 - RNA, 19 nt, Homo sapiens
  misc_RNA (1)...(19): siRNA sense strand
ucaccaagcggaucaagaa

SEQ ID NO: 1185919 - RNA, 19 nt, Homo sapiens
  misc_RNA (1)...(19): siRNA sense strand
agaagcacguucauaacuu

SEQ ID NO: 1185920 - RNA, 19 nt, Homo sapiens
  misc_RNA (1)...(19): siRNA sense strand
cgggaaacaugguuaaucu

SEQ ID NO: 1185921 - RNA, 19 nt, Homo sapiens
  misc_RNA (1)...(19): siRNA sense strand
gcucaucuccaucacauuc

SEQ ID NO: 1185922 - RNA, 19 nt, Homo sapiens
  misc_RNA (1)...(19): siRNA sense strand
gauugaccaugccaaagug

SEQ ID NO: 1185923 - RNA, 19 nt, Homo sapiens
  misc_RNA (1)...(19): siRNA sense strand
gagaagcacguucauaacu

SEQ ID NO: 1185924 - RNA, 19 nt, Homo sapiens
  misc_RNA (1)...(19): siRNA sense strand
caacuucaacacccgcuuu

SEQ ID NO: 1185925 - RNA, 19 nt, Homo sapiens
  misc_RNA (1)...(19): siRNA sense strand
ccaagcggaucaagaaugc

SEQ ID NO: 1185926 - RNA, 19 nt, Homo sapiens
  misc_RNA (1)...(19): siRNA sense strand
gccaauguccuucgggaaa

SEQ ID NO: 1185927 - RNA, 19 nt, Homo sapiens
  misc_RNA (1)...(19): siRNA sense strand
gcuccugucugccaucauc

SEQ ID NO: 1185928 - RNA, 19 nt, Homo sapiens
  misc_RNA (1)...(19): siRNA sense strand
caacacccgcuuugucaug

SEQ ID NO: 1185929 - RNA, 19 nt, Homo sapiens
  misc_RNA (1)...(19): siRNA sense strand
agucgaagcuggagcaucu

SEQ ID NO: 1185930 - RNA, 19 nt, Homo sapiens
  misc_RNA (1)...(19): siRNA sense strand
acaaagcugcuaaagaaga

SEQ ID NO: 1185931 - RNA, 19 nt, Homo sapiens
  misc_RNA (1)...(19): siRNA sense strand
caagcuauccaccaguuga

SEQ ID NO: 1185932 - RNA, 19 nt, Homo sapiens
  misc_RNA (1)...(19): siRNA sense strand
ccauguggcucaucuccau

SEQ ID NO: 1185933 - RNA, 19 nt, Homo sapiens
  misc_RNA (1)...(19): siRNA sense strand
uuuccaagaugcagaaugu

SEQ ID NO: 1185934 - RNA, 19 nt, Homo sapiens
  misc_RNA (1)...(19): siRNA sense strand
aaacacacaaagcugcuaa

SEQ ID NO: 1185935 - RNA, 19 nt, Homo sapiens
  misc_RNA (1)...(19): siRNA sense strand
uacacaaguucaagcaguu

SEQ ID NO: 1185936 - RNA, 19 nt, Homo sapiens
  misc_RNA (1)...(19): siRNA sense strand
ugaggaaacaccagaggaa

SEQ ID NO: 1185937 - RNA, 19 nt, Homo sapiens
  misc_RNA (1)...(19): siRNA sense strand
gcggagaagcacguucaua

SEQ ID NO: 1185938 - RNA, 19 nt, Homo sapiens
  misc_RNA (1)...(19): siRNA sense strand
gggaaacaugguuaaucua

SEQ ID NO: 1185939 - RNA, 19 nt, Homo sapiens
  misc_RNA (1)...(19): siRNA sense strand
ggagaagcacguucauaac

SEQ ID NO: 1185940 - RNA, 19 nt, Homo sapiens
  misc_RNA (1)...(19): siRNA sense strand
agcaggacguaacuaguaa

SEQ ID NO: 1185941 - RNA, 19 nt, Homo sapiens
  misc_RNA (1)...(19): siRNA sense strand
uguaugacuuaaucacaga

SEQ ID NO: 1185942 - RNA, 19 nt, Homo sapiens
  misc_RNA (1)...(19): siRNA sense strand
ugaggagcgucaagaugga

SEQ ID NO: 1185943 - RNA, 19 nt, Homo sapiens
  misc_RNA (1)...(19): siRNA sense strand
caucacauuccuuuccauu

SEQ ID NO: 1185944 - RNA, 19 nt, Homo sapiens
  misc_RNA (1)...(19): siRNA sense strand
gagcgaagaccuggagaag

SEQ ID NO: 1185945 - RNA, 19 nt, Homo sapiens
  misc_RNA (1)...(19): siRNA sense strand
ccugaucgcccgagucaug

SEQ ID NO: 1185946 - RNA, 19 nt, Homo sapiens
  misc_RNA (1)...(19): siRNA sense strand
ggagcgaagaccuggagaa

SEQ ID NO: 1185947 - RNA, 19 nt, Homo sapiens
  misc_RNA (1)...(19): siRNA sense strand
caagaugcagaaugucaug

SEQ ID NO: 1185948 - RNA, 19 nt, Homo sapiens
  misc_RNA (1)...(19): siRNA sense strand
ucuccucacuggcaucaug

SEQ ID NO: 1185949 - RNA, 19 nt, Homo sapiens
  misc_RNA (1)...(19): siRNA sense strand
uccaagcuauccaccaguu

SEQ ID NO: 1185950 - RNA, 19 nt, Homo sapiens
  misc_RNA (1)...(19): siRNA sense strand
gaaguuccuccaagcuauc

SEQ ID NO: 1185951 - RNA, 19 nt, Homo sapiens
  misc_RNA (1)...(19): siRNA sense strand
cacacaaagcugcuaaaga

SEQ ID NO: 1185952 - RNA, 19 nt, Homo sapiens
  misc_RNA (1)...(19): siRNA sense strand
ucaaugaccggagcgaaga

SEQ ID NO: 1185953 - RNA, 19 nt, Homo sapiens
  misc_RNA (1)...(19): siRNA sense strand
uggcucaucuccaucacau

SEQ ID NO: 1185954 - RNA, 19 nt, Homo sapiens
  misc_RNA (1)...(19): siRNA sense strand
caacaagaucaacuucaac

SEQ ID NO: 1185955 - RNA, 19 nt, Homo sapiens
  misc_RNA (1)...(19): siRNA sense strand
cuuaaucacagaacucaau

SEQ ID NO: 1185956 - RNA, 19 nt, Homo sapiens
  misc_RNA (1)...(19): siRNA sense strand
gcaucucucuguggaucau

SEQ ID NO: 1185957 - RNA, 19 nt, Homo sapiens
  misc_RNA (1)...(19): siRNA sense strand
agaugcagaaugucaugua

SEQ ID NO: 1185958 - RNA, 19 nt, Homo sapiens
  misc_RNA (1)...(19): siRNA sense strand
gaaagcuggaacucaccaa

SEQ ID NO: 1185959 - RNA, 19 nt, Homo sapiens
  misc_RNA (1)...(19): siRNA sense strand
ccaauguccuucgggaaac

SEQ ID NO: 1185960 - RNA, 19 nt, Homo sapiens
  misc_RNA (1)...(19): siRNA sense strand
gcgaguacaaguucuucug

SEQ ID NO: 1185961 - RNA, 19 nt, Homo sapiens
  misc_RNA (1)...(19): siRNA sense strand
caauguccuucgggaaaca

SEQ ID NO: 1185962 - RNA, 19 nt, Homo sapiens
  misc_RNA (1)...(19): siRNA sense strand
ccauguuccugcgccugua

SEQ ID NO: 1185963 - RNA, 19 nt, Homo sapiens
  misc_RNA (1)...(19): siRNA sense strand
aggcugcacugcccuugug

SEQ ID NO: 1185964 - RNA, 19 nt, Homo sapiens
  misc_RNA (1)...(19): siRNA sense strand
acacucugguggaccuuuc

SEQ ID NO: 1185965 - RNA, 19 nt, Homo sapiens
  misc_RNA (1)...(19): siRNA sense strand
ggacguaacuaguaacuuu

SEQ ID NO: 1185966 - RNA, 19 nt, Homo sapiens
  misc_RNA (1)...(19): siRNA sense strand
acacaaagcugcuaaagaa

SEQ ID NO: 1185967 - RNA, 19 nt, Homo sapiens
  misc_RNA (1)...(19): siRNA sense strand
gcgaagaccuggagaagca

SEQ ID NO: 1185968 - RNA, 19 nt, Homo sapiens
  misc_RNA (1)...(19): siRNA sense strand
ggaaacaugguuaaucuau

SEQ ID NO: 1185969 - RNA, 19 nt, Homo sapiens
  misc_RNA (1)...(19): siRNA sense strand
ugaaaugccuuaucagucu

SEQ ID NO: 1185970 - RNA, 19 nt, Homo sapiens
  misc_RNA (1)...(19): siRNA sense strand
caagaaugcugcagccaau

SEQ ID NO: 1185971 - RNA, 19 nt, Homo sapiens
  misc_RNA (1)...(19): siRNA sense strand
gaagauugaccaugccaaa

SEQ ID NO: 1185972 - RNA, 19 nt, Homo sapiens
  misc_RNA (1)...(19): siRNA sense strand
ucaacaagaucaacuucaa

SEQ ID NO: 1185973 - RNA, 19 nt, Homo sapiens
  misc_RNA (1)...(19): siRNA sense strand
gaucaucgccuaccacaca

SEQ ID NO: 1185974 - RNA, 19 nt, Homo sapiens
  misc_RNA (1)...(19): siRNA sense strand
gcccugaaaugccuuauca

SEQ ID NO: 1185975 - RNA, 19 nt, Homo sapiens
  misc_RNA (1)...(19): siRNA sense strand
cagcaggacguaacuagua

SEQ ID NO: 1185976 - RNA, 19 nt, Homo sapiens
  misc_RNA (1)...(19): siRNA sense strand
cggagaagcacguucauaa

SEQ ID NO: 1185977 - RNA, 19 nt, Homo sapiens
  misc_RNA (1)...(19): siRNA sense strand
ggaaacaccagaggaaguu

SEQ ID NO: 1185978 - RNA, 19 nt, Homo sapiens
  misc_RNA (1)...(19): siRNA sense strand
caaagcugcuaaagaagau

SEQ ID NO: 1185979 - RNA, 19 nt, Homo sapiens
  misc_RNA (1)...(19): siRNA sense strand
gcggaugacuggcggauag

SEQ ID NO: 1185980 - RNA, 19 nt, Homo sapiens
  misc_RNA (1)...(19): siRNA sense strand
gaugcagaaugucauguau

SEQ ID NO: 1185981 - RNA, 19 nt, Homo sapiens
  misc_RNA (1)...(19): siRNA sense strand
gcacguucauaacuucaug

SEQ ID NO: 1185982 - RNA, 19 nt, Homo sapiens
  misc_RNA (1)...(19): siRNA sense strand
ugaagacgcucaugaccau

SEQ ID NO: 1185983 - RNA, 19 nt, Homo sapiens
  misc_RNA (1)...(19): siRNA sense strand
ggauagccaugaccuacga

SEQ ID NO: 1185984 - RNA, 19 nt, Homo sapiens
  misc_RNA (1)...(19): siRNA sense strand
ucacauuccuuuccauugg

SEQ ID NO: 1185985 - RNA, 19 nt, Homo sapiens
  misc_RNA (1)...(19): siRNA sense strand
ucaccaagcggaucaagaa

SEQ ID NO: 1185986 - RNA, 19 nt, Homo sapiens
  misc_RNA (1)...(19): siRNA sense strand
agaagcacguucauaacuu

SEQ ID NO: 1185987 - RNA, 19 nt, Homo sapiens
  misc_RNA (1)...(19): siRNA sense strand
cgggaaacaugguuaaucu

SEQ ID NO: 1185988 - RNA, 19 nt, Homo sapiens
  misc_RNA (1)...(19): siRNA sense strand
gcucaucuccaucacauuc

SEQ ID NO: 1185989 - RNA, 19 nt, Homo sapiens
  misc_RNA (1)...(19): siRNA sense strand
gauugaccaugccaaagug

SEQ ID NO: 1185990 - RNA, 19 nt, Homo sapiens
  misc_RNA (1)...(19): siRNA sense strand
gagaagcacguucauaacu

SEQ ID NO: 1185991 - RNA, 19 nt, Homo sapiens
  misc_RNA (1)...(19): siRNA sense strand
caacuucaacacccgcuuu

SEQ ID NO: 1185992 - RNA, 19 nt, Homo sapiens
  misc_RNA (1)...(19): siRNA sense strand
ccaagcggaucaagaaugc

SEQ ID NO: 1185993 - RNA, 19 nt, Homo sapiens
  misc_RNA (1)...(19): siRNA sense strand
gccaauguccuucgggaaa

SEQ ID NO: 1185994 - RNA, 19 nt, Homo sapiens
  misc_RNA (1)...(19): siRNA sense strand
gcuccugucugccaucauc

SEQ ID NO: 1185995 - RNA, 19 nt, Homo sapiens
  misc_RNA (1)...(19): siRNA sense strand
caacacccgcuuugucaug

SEQ ID NO: 1185996 - RNA, 19 nt, Homo sapiens
  misc_RNA (1)...(19): siRNA sense strand
agucgaagcuggagcaucu

SEQ ID NO: 1185997 - RNA, 19 nt, Homo sapiens
  misc_RNA (1)...(19): siRNA sense strand
acaaagcugcuaaagaaga

SEQ ID NO: 1185998 - RNA, 19 nt, Homo sapiens
  misc_RNA (1)...(19): siRNA sense strand
caagcuauccaccaguuga

SEQ ID NO: 1185999 - RNA, 19 nt, Homo sapiens
  misc_RNA (1)...(19): siRNA sense strand
ccauguggcucaucuccau

SEQ ID NO: 1186000 - RNA, 19 nt, Homo sapiens
  misc_RNA (1)...(19): siRNA sense strand
uuuccaagaugcagaaugu

SEQ ID NO: 1186001 - RNA, 19 nt, Homo sapiens
  misc_RNA (1)...(19): siRNA sense strand
aaacacacaaagcugcuaa

SEQ ID NO: 1186002 - RNA, 19 nt, Homo sapiens
  misc_RNA (1)...(19): siRNA sense strand
uacacaaguucaagcaguu

SEQ ID NO: 1186003 - RNA, 19 nt, Homo sapiens
  misc_RNA (1)...(19): siRNA sense strand
ugaggaaacaccagaggaa

SEQ ID NO: 1186004 - RNA, 19 nt, Homo sapiens
  misc_RNA (1)...(19): siRNA sense strand
gcggagaagcacguucaua

SEQ ID NO: 1186005 - RNA, 19 nt, Homo sapiens
  misc_RNA (1)...(19): siRNA sense strand
gggaaacaugguuaaucua

SEQ ID NO: 1186006 - RNA, 19 nt, Homo sapiens
  misc_RNA (1)...(19): siRNA sense strand
ggagaagcacguucauaac

SEQ ID NO: 1186007 - RNA, 19 nt, Homo sapiens
  misc_RNA (1)...(19): siRNA sense strand
agcaggacguaacuaguaa

SEQ ID NO: 1186008 - RNA, 19 nt, Homo sapiens
  misc_RNA (1)...(19): siRNA sense strand
uguaugacuuaaucacaga

SEQ ID NO: 1186009 - RNA, 19 nt, Homo sapiens
  misc_RNA (1)...(19): siRNA sense strand
ugaggagcgucaagaugga

SEQ ID NO: 1186010 - RNA, 19 nt, Homo sapiens
  misc_RNA (1)...(19): siRNA sense strand
caucacauuccuuuccauu

SEQ ID NO: 1186011 - RNA, 19 nt, Homo sapiens
  misc_RNA (1)...(19): siRNA sense strand
gagcgaagaccuggagaag

SEQ ID NO: 1186012 - RNA, 19 nt, Homo sapiens
  misc_RNA (1)...(19): siRNA sense strand
ccugaucgcccgagucaug

SEQ ID NO: 1186013 - RNA, 19 nt, Homo sapiens
  misc_RNA (1)...(19): siRNA sense strand
ggagcgaagaccuggagaa

SEQ ID NO: 1186014 - RNA, 19 nt, Homo sapiens
  misc_RNA (1)...(19): siRNA sense strand
caagaugcagaaugucaug

SEQ ID NO: 1186015 - RNA, 19 nt, Homo sapiens
  misc_RNA (1)...(19): siRNA sense strand
ucuccucacuggcaucaug

SEQ ID NO: 1186016 - RNA, 19 nt, Homo sapiens
  misc_RNA (1)...(19): siRNA sense strand
uccaagcuauccaccaguu

SEQ ID NO: 1186017 - RNA, 19 nt, Homo sapiens
  misc_RNA (1)...(19): siRNA sense strand
gaaguuccuccaagcuauc

SEQ ID NO: 1186018 - RNA, 19 nt, Homo sapiens
  misc_RNA (1)...(19): siRNA sense strand
cacacaaagcugcuaaaga

SEQ ID NO: 1186019 - RNA, 19 nt, Homo sapiens
  misc_RNA (1)...(19): siRNA sense strand
ucaaugaccggagcgaaga

SEQ ID NO: 1186020 - RNA, 19 nt, Homo sapiens
  misc_RNA (1)...(19): siRNA sense strand
uggcucaucuccaucacau

SEQ ID NO: 1186021 - RNA, 19 nt, Homo sapiens
  misc_RNA (1)...(19): siRNA sense strand
caacaagaucaacuucaac

SEQ ID NO: 1186022 - RNA, 19 nt, Homo sapiens
  misc_RNA (1)...(19): siRNA sense strand
cuuaaucacagaacucaau

SEQ ID NO: 1186023 - RNA, 19 nt, Homo sapiens
  misc_RNA (1)...(19): siRNA sense strand
gcaucucucuguggaucau

SEQ ID NO: 1186024 - RNA, 19 nt, Homo sapiens
  misc_RNA (1)...(19): siRNA sense strand
agaugcagaaugucaugua

SEQ ID NO: 1186025 - RNA, 19 nt, Homo sapiens
  misc_RNA (1)...(19): siRNA sense strand
gaaagcuggaacucaccaa

SEQ ID NO: 1186026 - RNA, 19 nt, Homo sapiens
  misc_RNA (1)...(19): siRNA sense strand
ccaauguccuucgggaaac

SEQ ID NO: 1186027 - RNA, 19 nt, Homo sapiens
  misc_RNA (1)...(19): siRNA sense strand
gcgaguacaaguucuucug

SEQ ID NO: 1186028 - RNA, 19 nt, Homo sapiens
  misc_RNA (1)...(19): siRNA sense strand
caauguccuucgggaaaca

SEQ ID NO: 1186029 - RNA, 19 nt, Homo sapiens
  misc_RNA (1)...(19): siRNA sense strand
ccauguuccugcgccugua

SEQ ID NO: 1186030 - RNA, 19 nt, Homo sapiens
  misc_RNA (1)...(19): siRNA sense strand
aggcugcacugcccuugug

SEQ ID NO: 1186031 - RNA, 19 nt, Homo sapiens
  misc_RNA (1)...(19): siRNA sense strand
acacucugguggaccuuuc

SEQ ID NO: 1186032 - RNA, 19 nt, Homo sapiens
  misc_RNA (1)...(19): siRNA sense strand
ggagauggaugccuuaaua

SEQ ID NO: 1186033 - RNA, 19 nt, Homo sapiens
  misc_RNA (1)...(19): siRNA sense strand
ggaagcaacucuacagcua

SEQ ID NO: 1186034 - RNA, 19 nt, Homo sapiens
  misc_RNA (1)...(19): siRNA sense strand
gaacagcugcuuccauuaa

SEQ ID NO: 1186035 - RNA, 19 nt, Homo sapiens
  misc_RNA (1)...(19): siRNA sense strand
gaaacacaaucuagcauga

SEQ ID NO: 1186036 - RNA, 19 nt, Homo sapiens
  misc_RNA (1)...(19): siRNA sense strand
caacaacacuauuuagaug

SEQ ID NO: 1186037 - RNA, 19 nt, Homo sapiens
  misc_RNA (1)...(19): siRNA sense strand
gaggaaaccuaugagaaua

SEQ ID NO: 1186038 - RNA, 19 nt, Homo sapiens
  misc_RNA (1)...(19): siRNA sense strand
gaacuggccaggaauuuaa

SEQ ID NO: 1186039 - RNA, 19 nt, Homo sapiens
  misc_RNA (1)...(19): siRNA sense strand
ccucagaucucuuacauga

SEQ ID NO: 1186040 - RNA, 19 nt, Homo sapiens
  misc_RNA (1)...(19): siRNA sense strand
gacugcagcugcuauguua

SEQ ID NO: 1186041 - RNA, 19 nt, Homo sapiens
  misc_RNA (1)...(19): siRNA sense strand
gauggucccuuuacugaaa

SEQ ID NO: 1186042 - RNA, 19 nt, Homo sapiens
  misc_RNA (1)...(19): siRNA sense strand
ggagguauauugaaagcaa

SEQ ID NO: 1186043 - RNA, 19 nt, Homo sapiens
  misc_RNA (1)...(19): siRNA sense strand
gaaaguaaucauccaauug

SEQ ID NO: 1186044 - RNA, 19 nt, Homo sapiens
  misc_RNA (1)...(19): siRNA sense strand
gaccaaugcuccaauaugu

SEQ ID NO: 1186045 - RNA, 19 nt, Homo sapiens
  misc_RNA (1)...(19): siRNA sense strand
gaaaugcacgaggcaauua

SEQ ID NO: 1186046 - RNA, 19 nt, Homo sapiens
  misc_RNA (1)...(19): siRNA sense strand
cagaugaacuagaagauga

SEQ ID NO: 1186047 - RNA, 19 nt, Homo sapiens
  misc_RNA (1)...(19): siRNA sense strand
gaacugggagguauauuga

SEQ ID NO: 1186048 - RNA, 19 nt, Homo sapiens
  misc_RNA (1)...(19): siRNA sense strand
uaagaccaaugcuccaaua

SEQ ID NO: 1186049 - RNA, 19 nt, Homo sapiens
  misc_RNA (1)...(19): siRNA sense strand
gcaaauggaaggaauucua

SEQ ID NO: 1186050 - RNA, 19 nt, Homo sapiens
  misc_RNA (1)...(19): siRNA sense strand
ugaagaggcuagacaaaug

SEQ ID NO: 1186051 - RNA, 19 nt, Homo sapiens
  misc_RNA (1)...(19): siRNA sense strand
ggacagauggcuacagauu

SEQ ID NO: 1186052 - RNA, 19 nt, Homo sapiens
  misc_RNA (1)...(19): siRNA sense strand
gaauaugagugaugaugau

SEQ ID NO: 1186053 - RNA, 19 nt, Homo sapiens
  misc_RNA (1)...(19): siRNA sense strand
uagcaaugaugguugauuu

SEQ ID NO: 1186054 - RNA, 19 nt, Homo sapiens
  misc_RNA (1)...(19): siRNA sense strand
caagaauuacgacaaguua

SEQ ID NO: 1186055 - RNA, 19 nt, Homo sapiens
  misc_RNA (1)...(19): siRNA sense strand
ucagaaaggcaccaaguua

SEQ ID NO: 1186056 - RNA, 19 nt, Homo sapiens
  misc_RNA (1)...(19): siRNA sense strand
gcacuucccucugauguuc

SEQ ID NO: 1186057 - RNA, 19 nt, Homo sapiens
  misc_RNA (1)...(19): siRNA sense strand
ccaaacgucuggccaaugu

SEQ ID NO: 1186058 - RNA, 19 nt, Homo sapiens
  misc_RNA (1)...(19): siRNA sense strand
guucaagccugacugugua

SEQ ID NO: 1186059 - RNA, 19 nt, Homo sapiens
  misc_RNA (1)...(19): siRNA sense strand
gcaaagugcauugaaguaa

SEQ ID NO: 1186060 - RNA, 19 nt, Homo sapiens
  misc_RNA (1)...(19): siRNA sense strand
guacagaaccagauucaga

SEQ ID NO: 1186061 - RNA, 19 nt, Homo sapiens
  misc_RNA (1)...(19): siRNA sense strand
gcaaaugagcauaauguug

SEQ ID NO: 1186062 - RNA, 19 nt, Homo sapiens
  misc_RNA (1)...(19): siRNA sense strand
caaugucguucgccaagua

SEQ ID NO: 1186063 - RNA, 19 nt, Homo sapiens
  misc_RNA (1)...(19): siRNA sense strand
aaacaucugcauuccauua

SEQ ID NO: 1186064 - RNA, 19 nt, Homo sapiens
  misc_RNA (1)...(19): siRNA sense strand
gaaggaauucuaaaugaga

SEQ ID NO: 1186065 - RNA, 19 nt, Homo sapiens
  misc_RNA (1)...(19): siRNA sense strand
uggaaggaauucuaaauga

SEQ ID NO: 1186066 - RNA, 19 nt, Homo sapiens
  misc_RNA (1)...(19): siRNA sense strand
caaagugcauugaaguaau

SEQ ID NO: 1186067 - RNA, 19 nt, Homo sapiens
  misc_RNA (1)...(19): siRNA sense strand
gaacagguugucaaacuga

SEQ ID NO: 1186068 - RNA, 19 nt, Homo sapiens
  misc_RNA (1)...(19): siRNA sense strand
gcaauaccuuccagugguu

SEQ ID NO: 1186069 - RNA, 19 nt, Homo sapiens
  misc_RNA (1)...(19): siRNA sense strand
uaacuuuacugaagacugu

SEQ ID NO: 1186070 - RNA, 19 nt, Homo sapiens
  misc_RNA (1)...(19): siRNA sense strand
uuacaagccaucagaaaua

SEQ ID NO: 1186071 - RNA, 19 nt, Homo sapiens
  misc_RNA (1)...(19): siRNA sense strand
ggaaggaauucuaaaugag

SEQ ID NO: 1186072 - RNA, 19 nt, Homo sapiens
  misc_RNA (1)...(19): siRNA sense strand
gaugaggacugggcaaaug

SEQ ID NO: 1186073 - RNA, 19 nt, Homo sapiens
  misc_RNA (1)...(19): siRNA sense strand
gaauguuaguucaguguau

SEQ ID NO: 1186074 - RNA, 19 nt, Homo sapiens
  misc_RNA (1)...(19): siRNA sense strand
caaauggaaggaauucuaa

SEQ ID NO: 1186075 - RNA, 19 nt, Homo sapiens
  misc_RNA (1)...(19): siRNA sense strand
aagaagcuguucagacuuu

SEQ ID NO: 1186076 - RNA, 19 nt, Homo sapiens
  misc_RNA (1)...(19): siRNA sense strand
cggcagaacuggccaggaa

SEQ ID NO: 1186077 - RNA, 19 nt, Homo sapiens
  misc_RNA (1)...(19): siRNA sense strand
ccucagauguuagcaauga

SEQ ID NO: 1186078 - RNA, 19 nt, Homo sapiens
  misc_RNA (1)...(19): siRNA sense strand
cagcugcuauguuaagaaa

SEQ ID NO: 1186079 - RNA, 19 nt, Homo sapiens
  misc_RNA (1)...(19): siRNA sense strand
aaaugcagaugaacuagaa

SEQ ID NO: 1186080 - RNA, 19 nt, Homo sapiens
  misc_RNA (1)...(19): siRNA sense strand
cccaagacauggagaauau

SEQ ID NO: 1186081 - RNA, 19 nt, Homo sapiens
  misc_RNA (1)...(19): siRNA sense strand
gcaacaacacuauuuagau

SEQ ID NO: 1186082 - RNA, 19 nt, Homo sapiens
  misc_RNA (1)...(19): siRNA sense strand
agaagaagcuguucagacu

SEQ ID NO: 1186083 - RNA, 19 nt, Homo sapiens
  misc_RNA (1)...(19): siRNA sense strand
ugaaacaucugcauuccau

SEQ ID NO: 1186084 - RNA, 19 nt, Homo sapiens
  misc_RNA (1)...(19): siRNA sense strand
gagcuacucaugauuauuc

SEQ ID NO: 1186085 - RNA, 19 nt, Homo sapiens
  misc_RNA (1)...(19): siRNA sense strand
gaugaugguugggaauuug

SEQ ID NO: 1186086 - RNA, 19 nt, Homo sapiens
  misc_RNA (1)...(19): siRNA sense strand
gaaguagcccuuuuagaua

SEQ ID NO: 1186087 - RNA, 19 nt, Homo sapiens
  misc_RNA (1)...(19): siRNA sense strand
gaaaggcaccaaguuaguu

SEQ ID NO: 1186088 - RNA, 19 nt, Homo sapiens
  misc_RNA (1)...(19): siRNA sense strand
gacuauuccucagauguua

SEQ ID NO: 1186089 - RNA, 19 nt, Homo sapiens
  misc_RNA (1)...(19): siRNA sense strand
ccaggaauuuaauagauga

SEQ ID NO: 1186090 - RNA, 19 nt, Homo sapiens
  misc_RNA (1)...(19): siRNA sense strand
gaucaaggaacacauuaug

SEQ ID NO: 1186091 - RNA, 19 nt, Homo sapiens
  misc_RNA (1)...(19): siRNA sense strand
gguaagaguuauucagucu

SEQ ID NO: 1186092 - RNA, 19 nt, Homo sapiens
  misc_RNA (1)...(19): siRNA sense strand
gaagcaacucuacagcuaa

SEQ ID NO: 1186093 - RNA, 19 nt, Homo sapiens
  misc_RNA (1)...(19): siRNA sense strand
aagacaagaugaagacuau

SEQ ID NO: 1186094 - RNA, 19 nt, Homo sapiens
  misc_RNA (1)...(19): siRNA sense strand
gauggaugccuuaauaaug

SEQ ID NO: 1186095 - RNA, 19 nt, Homo sapiens
  misc_RNA (1)...(19): siRNA sense strand
ucaaacugauggucccuuu

SEQ ID NO: 1186096 - RNA, 19 nt, Homo sapiens
  misc_RNA (1)...(19): siRNA sense strand
ggccaggaauuuaauagau

SEQ ID NO: 1186097 - RNA, 19 nt, Homo sapiens
  misc_RNA (1)...(19): siRNA sense strand
gaccaaagugucagauauu

SEQ ID NO: 1186098 - RNA, 19 nt, Homo sapiens
  misc_RNA (1)...(19): siRNA sense strand
gacguccucucagaaauaa

SEQ ID NO: 1186099 - RNA, 19 nt, Homo sapiens
  misc_RNA (1)...(19): siRNA sense strand
ugaagcacaucguugagaa

SEQ ID NO: 1186100 - RNA, 19 nt, Homo sapiens
  misc_RNA (1)...(19): siRNA sense strand
ggaaaccuaugagaauauc

SEQ ID NO: 1186101 - RNA, 19 nt, Homo sapiens
  misc_RNA (1)...(19): siRNA sense strand
gcacagacuauuccucaga

SEQ ID NO: 1186102 - RNA, 19 nt, Homo sapiens
  misc_RNA (1)...(19): siRNA sense strand
gcauaauguugcucuguuc

SEQ ID NO: 1186103 - RNA, 19 nt, Homo sapiens
  misc_RNA (1)...(19): siRNA sense strand
ugaagauccuugugccaaa

SEQ ID NO: 1186104 - RNA, 19 nt, Homo sapiens
  misc_RNA (1)...(19): siRNA sense strand
guucagacuuucaauuauc

SEQ ID NO: 1186105 - RNA, 19 nt, Homo sapiens
  misc_RNA (1)...(19): siRNA sense strand
ggaguacaccgaacagguu

SEQ ID NO: 1186106 - RNA, 19 nt, Homo sapiens
  misc_RNA (1)...(19): siRNA sense strand
agacugccaucaagaguga

SEQ ID NO: 1186107 - RNA, 19 nt, Homo sapiens
  misc_RNA (1)...(19): siRNA sense strand
gcacaguacgguggagaua

SEQ ID NO: 1186108 - RNA, 19 nt, Homo sapiens
  misc_RNA (1)...(19): siRNA sense strand
uugaacagcugcuuccauu

SEQ ID NO: 1186109 - RNA, 19 nt, Homo sapiens
  misc_RNA (1)...(19): siRNA sense strand
gaagagucacuacaagaug

SEQ ID NO: 1186110 - RNA, 19 nt, Homo sapiens
  misc_RNA (1)...(19): siRNA sense strand
gacaagaugaagacuauga

SEQ ID NO: 1186111 - RNA, 19 nt, Homo sapiens
  misc_RNA (1)...(19): siRNA sense strand
gagauggaugccuuaauaa

SEQ ID NO: 1186112 - RNA, 19 nt, Homo sapiens
  misc_RNA (1)...(19): siRNA sense strand
gccaggaauuuaauagaug

SEQ ID NO: 1186113 - RNA, 19 nt, Homo sapiens
  misc_RNA (1)...(19): siRNA sense strand
gaagaacugggagguauau

SEQ ID NO: 1186114 - RNA, 19 nt, Homo sapiens
  misc_RNA (1)...(19): siRNA sense strand
ugacauccauugcaucagu

SEQ ID NO: 1186115 - RNA, 19 nt, Homo sapiens
  misc_RNA (1)...(19): siRNA sense strand
ccagcaacaacacuauuua

SEQ ID NO: 1186116 - RNA, 19 nt, Homo sapiens
  misc_RNA (1)...(19): siRNA sense strand
uaugugugaugcucuaauu

SEQ ID NO: 1186117 - RNA, 19 nt, Homo sapiens
  misc_RNA (1)...(19): siRNA sense strand
caaaauccuuggaaaagaa

SEQ ID NO: 1186118 - RNA, 19 nt, Homo sapiens
  misc_RNA (1)...(19): siRNA sense strand
ucgaauggcuugcggacuu

SEQ ID NO: 1186119 - RNA, 19 nt, Homo sapiens
  misc_RNA (1)...(19): siRNA sense strand
gaugguugauuuggaagaa

SEQ ID NO: 1186120 - RNA, 19 nt, Homo sapiens
  misc_RNA (1)...(19): siRNA sense strand
guauuugcguccucacuug

SEQ ID NO: 1186121 - RNA, 19 nt, Homo sapiens
  misc_RNA (1)...(19): siRNA sense strand
uaauguugcucuguucaaa

SEQ ID NO: 1186122 - RNA, 19 nt, Homo sapiens
  misc_RNA (1)...(19): siRNA sense strand
ucaaacgaauguuaguuca

SEQ ID NO: 1186123 - RNA, 19 nt, Homo sapiens
  misc_RNA (1)...(19): siRNA sense strand
aagagucacuacaagauga

SEQ ID NO: 1186124 - RNA, 19 nt, Homo sapiens
  misc_RNA (1)...(19): siRNA sense strand
auggaugccuuaauaauga

SEQ ID NO: 1186125 - RNA, 19 nt, Homo sapiens
  misc_RNA (1)...(19): siRNA sense strand
gaauaucccaggccaguca

SEQ ID NO: 1186126 - RNA, 19 nt, Homo sapiens
  misc_RNA (1)...(19): siRNA sense strand
ucucagaaauaaugcauuc

SEQ ID NO: 1186127 - RNA, 19 nt, Homo sapiens
  misc_RNA (1)...(19): siRNA sense strand
acagcuaagucuaaaguug

SEQ ID NO: 1186128 - RNA, 19 nt, Homo sapiens
  misc_RNA (1)...(19): siRNA sense strand
gaucacauuccucuuacaa

SEQ ID NO: 1186129 - RNA, 19 nt, Homo sapiens
  misc_RNA (1)...(19): siRNA sense strand
ggaggacuguggacugagu

SEQ ID NO: 1186130 - RNA, 19 nt, Homo sapiens
  misc_RNA (1)...(19): siRNA sense strand
ccaaugcuccaauauguau

SEQ ID NO: 1186131 - RNA, 19 nt, Homo sapiens
  misc_RNA (1)...(19): siRNA sense strand
aagaugaggaugauaauga

SEQ ID NO: 1186132 - RNA, 19 nt, Homo sapiens
  misc_RNA (1)...(19): siRNA sense strand
gcacacagguucucuaauu

SEQ ID NO: 1186133 - RNA, 19 nt, Homo sapiens
  misc_RNA (1)...(19): siRNA sense strand
gaaaugaaauuccacauag

SEQ ID NO: 1186134 - RNA, 19 nt, Homo sapiens
  misc_RNA (1)...(19): siRNA sense strand
gaaaugagcagagaagaua

SEQ ID NO: 1186135 - RNA, 19 nt, Homo sapiens
  misc_RNA (1)...(19): siRNA sense strand
gcacaaguguccuuugauu

SEQ ID NO: 1186136 - RNA, 19 nt, Homo sapiens
  misc_RNA (1)...(19): siRNA sense strand
caaaggagcuuccauguac

SEQ ID NO: 1186137 - RNA, 19 nt, Homo sapiens
  misc_RNA (1)...(19): siRNA sense strand
gcaggauccucaaguagua

SEQ ID NO: 1186138 - RNA, 19 nt, Homo sapiens
  misc_RNA (1)...(19): siRNA sense strand
gauuucagcuguuuaaaga

SEQ ID NO: 1186139 - RNA, 19 nt, Homo sapiens
  misc_RNA (1)...(19): siRNA sense strand
gaauuaaccugccauugug

SEQ ID NO: 1186140 - RNA, 19 nt, Homo sapiens
  misc_RNA (1)...(19): siRNA sense strand
gagcacaaguguccuuuga

SEQ ID NO: 1186141 - RNA, 19 nt, Homo sapiens
  misc_RNA (1)...(19): siRNA sense strand
gaacaacuaacaacagaaa

SEQ ID NO: 1186142 - RNA, 19 nt, Homo sapiens
  misc_RNA (1)...(19): siRNA sense strand
gcaggucccuuaugaugaa

SEQ ID NO: 1186143 - RNA, 19 nt, Homo sapiens
  misc_RNA (1)...(19): siRNA sense strand
gaaaugcgguaaccauaca

SEQ ID NO: 1186144 - RNA, 19 nt, Homo sapiens
  misc_RNA (1)...(19): siRNA sense strand
gaugaaaucucugcuguuc

SEQ ID NO: 1186145 - RNA, 19 nt, Homo sapiens
  misc_RNA (1)...(19): siRNA sense strand
gagaagauacccacagaaa

SEQ ID NO: 1186146 - RNA, 19 nt, Homo sapiens
  misc_RNA (1)...(19): siRNA sense strand
gacaagcgguguaacaaga

SEQ ID NO: 1186147 - RNA, 19 nt, Homo sapiens
  misc_RNA (1)...(19): siRNA sense strand
gagauaugcuguguggaua

SEQ ID NO: 1186148 - RNA, 19 nt, Homo sapiens
  misc_RNA (1)...(19): siRNA sense strand
gaaucaaccuuggcagaaa

SEQ ID NO: 1186149 - RNA, 19 nt, Homo sapiens
  misc_RNA (1)...(19): siRNA sense strand
ggaaugagaagcaccauau

SEQ ID NO: 1186150 - RNA, 19 nt, Homo sapiens
  misc_RNA (1)...(19): siRNA sense strand
caagagaaaugcacuguac

SEQ ID NO: 1186151 - RNA, 19 nt, Homo sapiens
  misc_RNA (1)...(19): siRNA sense strand
ccaggcaggucccuuauga

SEQ ID NO: 1186152 - RNA, 19 nt, Homo sapiens
  misc_RNA (1)...(19): siRNA sense strand
cauuugaacugcauaaaga

SEQ ID NO: 1186153 - RNA, 19 nt, Homo sapiens
  misc_RNA (1)...(19): siRNA sense strand
gaagcaaaccuaagaguca

SEQ ID NO: 1186154 - RNA, 19 nt, Homo sapiens
  misc_RNA (1)...(19): siRNA sense strand
gcacuuuccuaacucagaa

SEQ ID NO: 1186155 - RNA, 19 nt, Homo sapiens
  misc_RNA (1)...(19): siRNA sense strand
caaaggaugaccucaauga

SEQ ID NO: 1186156 - RNA, 19 nt, Homo sapiens
  misc_RNA (1)...(19): siRNA sense strand
cggcauaaauguaaugaga

SEQ ID NO: 1186157 - RNA, 19 nt, Homo sapiens
  misc_RNA (1)...(19): siRNA sense strand
aggaaagucugauggauuu

SEQ ID NO: 1186158 - RNA, 19 nt, Homo sapiens
  misc_RNA (1)...(19): siRNA sense strand
gagcagaaaugaaauucca

SEQ ID NO: 1186159 - RNA, 19 nt, Homo sapiens
  misc_RNA (1)...(19): siRNA sense strand
ccuaauaccuacacuuguu

SEQ ID NO: 1186160 - RNA, 19 nt, Homo sapiens
  misc_RNA (1)...(19): siRNA sense strand
gagcauaguccuucugaga

SEQ ID NO: 1186161 - RNA, 19 nt, Homo sapiens
  misc_RNA (1)...(19): siRNA sense strand
caacacaguuuguauacag

SEQ ID NO: 1186162 - RNA, 19 nt, Homo sapiens
  misc_RNA (1)...(19): siRNA sense strand
cgagauguguuauguggaa

SEQ ID NO: 1186163 - RNA, 19 nt, Homo sapiens
  misc_RNA (1)...(19): siRNA sense strand
caauacagaugcugcugaa

SEQ ID NO: 1186164 - RNA, 19 nt, Homo sapiens
  misc_RNA (1)...(19): siRNA sense strand
ggccaggacugcccacauu

SEQ ID NO: 1186165 - RNA, 19 nt, Homo sapiens
  misc_RNA (1)...(19): siRNA sense strand
ccaccucccugucaccuuu

SEQ ID NO: 1186166 - RNA, 19 nt, Homo sapiens
  misc_RNA (1)...(19): siRNA sense strand
guaaugagauaugcugugu

SEQ ID NO: 1186167 - RNA, 19 nt, Homo sapiens
  misc_RNA (1)...(19): siRNA sense strand
gaaaagcucugccaugaag

SEQ ID NO: 1186168 - RNA, 19 nt, Homo sapiens
  misc_RNA (1)...(19): siRNA sense strand
uuagagagcucgaccagau

SEQ ID NO: 1186169 - RNA, 19 nt, Homo sapiens
  misc_RNA (1)...(19): siRNA sense strand
uguaauaaaucgcccaaga

SEQ ID NO: 1186170 - RNA, 19 nt, Homo sapiens
  misc_RNA (1)...(19): siRNA sense strand
aagugaagaugcuacauuu

SEQ ID NO: 1186171 - RNA, 19 nt, Homo sapiens
  misc_RNA (1)...(19): siRNA sense strand
gcagauggccagagugguu

SEQ ID NO: 1186172 - RNA, 19 nt, Homo sapiens
  misc_RNA (1)...(19): siRNA sense strand
ggaguugucagagcuguua

SEQ ID NO: 1186173 - RNA, 19 nt, Homo sapiens
  misc_RNA (1)...(19): siRNA sense strand
cagagaagauacccacaga

SEQ ID NO: 1186174 - RNA, 19 nt, Homo sapiens
  misc_RNA (1)...(19): siRNA sense strand
gagcagaccucagauacag

SEQ ID NO: 1186175 - RNA, 19 nt, Homo sapiens
  misc_RNA (1)...(19): siRNA sense strand
gccauggccuucagaauca

SEQ ID NO: 1186176 - RNA, 19 nt, Homo sapiens
  misc_RNA (1)...(19): siRNA sense strand
gaguggagcagaaaugaaa

SEQ ID NO: 1186177 - RNA, 19 nt, Homo sapiens
  misc_RNA (1)...(19): siRNA sense strand
ugaagaugcuacauuuaug

SEQ ID NO: 1186178 - RNA, 19 nt, Homo sapiens
  misc_RNA (1)...(19): siRNA sense strand
gaacuuggcagucaucaac

SEQ ID NO: 1186179 - RNA, 19 nt, Homo sapiens
  misc_RNA (1)...(19): siRNA sense strand
ggugagguuuguagaaaga

SEQ ID NO: 1186180 - RNA, 19 nt, Homo sapiens
  misc_RNA (1)...(19): siRNA sense strand
guuaccauguguuucauuu

SEQ ID NO: 1186181 - RNA, 19 nt, Homo sapiens
  misc_RNA (1)...(19): siRNA sense strand
uaccauguguuucauuuga

SEQ ID NO: 1186182 - RNA, 19 nt, Homo sapiens
  misc_RNA (1)...(19): siRNA sense strand
ugaauuaaccugccauugu

SEQ ID NO: 1186183 - RNA, 19 nt, Homo sapiens
  misc_RNA (1)...(19): siRNA sense strand
uggcagaaauugaggaaug

SEQ ID NO: 1186184 - RNA, 19 nt, Homo sapiens
  misc_RNA (1)...(19): siRNA sense strand
ccaguucccugugguacua

SEQ ID NO: 1186185 - RNA, 19 nt, Homo sapiens
  misc_RNA (1)...(19): siRNA sense strand
gugaagaugcuacauuuau

SEQ ID NO: 1186186 - RNA, 19 nt, Homo sapiens
  misc_RNA (1)...(19): siRNA sense strand
cagaugcucuuucagaaca

SEQ ID NO: 1186187 - RNA, 19 nt, Homo sapiens
  misc_RNA (1)...(19): siRNA sense strand
ccaggaggguugaccaaga

SEQ ID NO: 1186188 - RNA, 19 nt, Homo sapiens
  misc_RNA (1)...(19): siRNA sense strand
aaacagaaccaugugcuaa

SEQ ID NO: 1186189 - RNA, 19 nt, Homo sapiens
  misc_RNA (1)...(19): siRNA sense strand
gcauaguccuucugagagu

SEQ ID NO: 1186190 - RNA, 19 nt, Homo sapiens
  misc_RNA (1)...(19): siRNA sense strand
caaguaguaucuccuuucu

SEQ ID NO: 1186191 - RNA, 19 nt, Homo sapiens
  misc_RNA (1)...(19): siRNA sense strand
ugaagaaccuugucaucgu

SEQ ID NO: 1186192 - RNA, 19 nt, Homo sapiens
  misc_RNA (1)...(19): siRNA sense strand
guggugagguuuguagaaa

SEQ ID NO: 1186193 - RNA, 19 nt, Homo sapiens
  misc_RNA (1)...(19): siRNA sense strand
uaauaggauugguagaaga

SEQ ID NO: 1186194 - RNA, 19 nt, Homo sapiens
  misc_RNA (1)...(19): siRNA sense strand
gaaggagacuguggaccau

SEQ ID NO: 1186195 - RNA, 19 nt, Homo sapiens
  misc_RNA (1)...(19): siRNA sense strand
gaaccgauguaggaaaguc

SEQ ID NO: 1186196 - RNA, 19 nt, Homo sapiens
  misc_RNA (1)...(19): siRNA sense strand
ggcagaaauugaggaauga

SEQ ID NO: 1186197 - RNA, 19 nt, Homo sapiens
  misc_RNA (1)...(19): siRNA sense strand
acaaguguccuuugauuug

SEQ ID NO: 1186198 - RNA, 19 nt, Homo sapiens
  misc_RNA (1)...(19): siRNA sense strand
aaacuccucucagccaauu

SEQ ID NO: 1186199 - RNA, 19 nt, Homo sapiens
  misc_RNA (1)...(19): siRNA sense strand
uaacccaugugagaauauu

SEQ ID NO: 1186200 - RNA, 19 nt, Homo sapiens
  misc_RNA (1)...(19): siRNA sense strand
agauacagcuggauuagag

SEQ ID NO: 1186201 - RNA, 19 nt, Homo sapiens
  misc_RNA (1)...(19): siRNA sense strand
uacagaugcugcugaauuc

SEQ ID NO: 1186202 - RNA, 19 nt, Homo sapiens
  misc_RNA (1)...(19): siRNA sense strand
caagcgguguaacaagaaa

SEQ ID NO: 1186203 - RNA, 19 nt, Homo sapiens
  misc_RNA (1)...(19): siRNA sense strand
ggaccaugcucucgcacau

SEQ ID NO: 1186204 - RNA, 19 nt, Homo sapiens
  misc_RNA (1)...(19): siRNA sense strand
gagcuguuaccauguguuu

SEQ ID NO: 1186205 - RNA, 19 nt, Homo sapiens
  misc_RNA (1)...(19): siRNA sense strand
agaaccaugugcuaaagaa

SEQ ID NO: 1186206 - RNA, 19 nt, Homo sapiens
  misc_RNA (1)...(19): siRNA sense strand
gaucagagagugggacaga

SEQ ID NO: 1186207 - RNA, 19 nt, Homo sapiens
  misc_RNA (1)...(19): siRNA sense strand
acaaaggagcuuccaugua

SEQ ID NO: 1186208 - RNA, 19 nt, Homo sapiens
  misc_RNA (1)...(19): siRNA sense strand
ucaagcagauggccagagu

SEQ ID NO: 1186209 - RNA, 19 nt, Homo sapiens
  misc_RNA (1)...(19): siRNA sense strand
ggugugcugugaauugguu

SEQ ID NO: 1186210 - RNA, 19 nt, Homo sapiens
  misc_RNA (1)...(19): siRNA sense strand
caggagggccaccgacaua

SEQ ID NO: 1186211 - RNA, 19 nt, Homo sapiens
  misc_RNA (1)...(19): siRNA sense strand
gcaacacaguuuguauaca

SEQ ID NO: 1186212 - RNA, 19 nt, Homo sapiens
  misc_RNA (1)...(19): siRNA sense strand
gaccauccaguauaucauu

SEQ ID NO: 1186213 - RNA, 19 nt, Homo sapiens
  misc_RNA (1)...(19): siRNA sense strand
gugaaaagcucugccauga

SEQ ID NO: 1186214 - RNA, 19 nt, Homo sapiens
  misc_RNA (1)...(19): siRNA sense strand
ggcaaggucuccagcaucu

SEQ ID NO: 1186215 - RNA, 19 nt, Homo sapiens
  misc_RNA (1)...(19): siRNA sense strand
ugaacugcauaaagaaaug

SEQ ID NO: 1186216 - RNA, 19 nt, Homo sapiens
  misc_RNA (1)...(19): siRNA sense strand
gaaacucaaaugugaaugg

SEQ ID NO: 1186217 - RNA, 19 nt, Homo sapiens
  misc_RNA (1)...(19): siRNA sense strand
gguagaagaaauuacaguu

SEQ ID NO: 1186218 - RNA, 19 nt, Homo sapiens
  misc_RNA (1)...(19): siRNA sense strand
caaguguccuuugauuugu

SEQ ID NO: 1186219 - RNA, 19 nt, Homo sapiens
  misc_RNA (1)...(19): siRNA sense strand
ucaggaagcaaaccuaaga

SEQ ID NO: 1186220 - RNA, 19 nt, Homo sapiens
  misc_RNA (1)...(19): siRNA sense strand
uaccuacacuuguuucugu

SEQ ID NO: 1186221 - RNA, 19 nt, Homo sapiens
  misc_RNA (1)...(19): siRNA sense strand
auacagaugcugcugaauu

SEQ ID NO: 1186222 - RNA, 19 nt, Homo sapiens
  misc_RNA (1)...(19): siRNA sense strand
aagcaacacaguuuguaua

SEQ ID NO: 1186223 - RNA, 19 nt, Homo sapiens
  misc_RNA (1)...(19): siRNA sense strand
gagagcauaguccuucuga

SEQ ID NO: 1186224 - RNA, 19 nt, Homo sapiens
  misc_RNA (1)...(19): siRNA sense strand
guaccagucucaaaaguga

SEQ ID NO: 1186225 - RNA, 19 nt, Homo sapiens
  misc_RNA (1)...(19): siRNA sense strand
ucucgcacaucaguuauuu

SEQ ID NO: 1186226 - RNA, 19 nt, Homo sapiens
  misc_RNA (1)...(19): siRNA sense strand
ccacuguucuaacccaugu

SEQ ID NO: 1186227 - RNA, 19 nt, Homo sapiens
  misc_RNA (1)...(19): siRNA sense strand
ucagagcuguuaccaugug

SEQ ID NO: 1186228 - RNA, 19 nt, Homo sapiens
  misc_RNA (1)...(19): siRNA sense strand
cacacagguucucuaauug

SEQ ID NO: 1186229 - RNA, 19 nt, Homo sapiens
  misc_RNA (1)...(19): siRNA sense strand
caaacagaaccaugugcua

SEQ ID NO: 1186230 - RNA, 19 nt, Homo sapiens
  misc_RNA (1)...(19): siRNA sense strand
guagaagaaauuacaguuc

SEQ ID NO: 1186231 - RNA, 19 nt, Homo sapiens
  misc_RNA (1)...(19): siRNA sense strand
guggacggcauaaauguaa

SEQ ID NO: 1186232 - RNA, 19 nt, Homo sapiens
  misc_RNA (1)...(19): siRNA sense strand
gcacacagguucucuaauu

SEQ ID NO: 1186233 - RNA, 19 nt, Homo sapiens
  misc_RNA (1)...(19): siRNA sense strand
gaaaugaaauuccacauag

SEQ ID NO: 1186234 - RNA, 19 nt, Homo sapiens
  misc_RNA (1)...(19): siRNA sense strand
gaaaugagcagagaagaua

SEQ ID NO: 1186235 - RNA, 19 nt, Homo sapiens
  misc_RNA (1)...(19): siRNA sense strand
gcacaaguguccuuugauu

SEQ ID NO: 1186236 - RNA, 19 nt, Homo sapiens
  misc_RNA (1)...(19): siRNA sense strand
caaaggagcuuccauguac

SEQ ID NO: 1186237 - RNA, 19 nt, Homo sapiens
  misc_RNA (1)...(19): siRNA sense strand
gcaggauccucaaguagua

SEQ ID NO: 1186238 - RNA, 19 nt, Homo sapiens
  misc_RNA (1)...(19): siRNA sense strand
gauuucagcuguuuaaaga

SEQ ID NO: 1186239 - RNA, 19 nt, Homo sapiens
  misc_RNA (1)...(19): siRNA sense strand
gaauuaaccugccauugug

SEQ ID NO: 1186240 - RNA, 19 nt, Homo sapiens
  misc_RNA (1)...(19): siRNA sense strand
gagcacaaguguccuuuga

SEQ ID NO: 1186241 - RNA, 19 nt, Homo sapiens
  misc_RNA (1)...(19): siRNA sense strand
gaacaacuaacaacagaaa

SEQ ID NO: 1186242 - RNA, 19 nt, Homo sapiens
  misc_RNA (1)...(19): siRNA sense strand
gcaggucccuuaugaugaa

SEQ ID NO: 1186243 - RNA, 19 nt, Homo sapiens
  misc_RNA (1)...(19): siRNA sense strand
gaaaugcgguaaccauaca

SEQ ID NO: 1186244 - RNA, 19 nt, Homo sapiens
  misc_RNA (1)...(19): siRNA sense strand
gaugaaaucucugcuguuc

SEQ ID NO: 1186245 - RNA, 19 nt, Homo sapiens
  misc_RNA (1)...(19): siRNA sense strand
gagaagauacccacagaaa

SEQ ID NO: 1186246 - RNA, 19 nt, Homo sapiens
  misc_RNA (1)...(19): siRNA sense strand
gacaagcgguguaacaaga

SEQ ID NO: 1186247 - RNA, 19 nt, Homo sapiens
  misc_RNA (1)...(19): siRNA sense strand
gagauaugcuguguggaua

SEQ ID NO: 1186248 - RNA, 19 nt, Homo sapiens
  misc_RNA (1)...(19): siRNA sense strand
gaaucaaccuuggcagaaa

SEQ ID NO: 1186249 - RNA, 19 nt, Homo sapiens
  misc_RNA (1)...(19): siRNA sense strand
ggaaugagaagcaccauau

SEQ ID NO: 1186250 - RNA, 19 nt, Homo sapiens
  misc_RNA (1)...(19): siRNA sense strand
caagagaaaugcacuguac

SEQ ID NO: 1186251 - RNA, 19 nt, Homo sapiens
  misc_RNA (1)...(19): siRNA sense strand
ccaggcaggucccuuauga

SEQ ID NO: 1186252 - RNA, 19 nt, Homo sapiens
  misc_RNA (1)...(19): siRNA sense strand
cauuugaacugcauaaaga

SEQ ID NO: 1186253 - RNA, 19 nt, Homo sapiens
  misc_RNA (1)...(19): siRNA sense strand
gaagcaaaccuaagaguca

SEQ ID NO: 1186254 - RNA, 19 nt, Homo sapiens
  misc_RNA (1)...(19): siRNA sense strand
gcacuuuccuaacucagaa

SEQ ID NO: 1186255 - RNA, 19 nt, Homo sapiens
  misc_RNA (1)...(19): siRNA sense strand
caaaggaugaccucaauga

SEQ ID NO: 1186256 - RNA, 19 nt, Homo sapiens
  misc_RNA (1)...(19): siRNA sense strand
cggcauaaauguaaugaga

SEQ ID NO: 1186257 - RNA, 19 nt, Homo sapiens
  misc_RNA (1)...(19): siRNA sense strand
aggaaagucugauggauuu

SEQ ID NO: 1186258 - RNA, 19 nt, Homo sapiens
  misc_RNA (1)...(19): siRNA sense strand
gagcagaaaugaaauucca

SEQ ID NO: 1186259 - RNA, 19 nt, Homo sapiens
  misc_RNA (1)...(19): siRNA sense strand
ccuaauaccuacacuuguu

SEQ ID NO: 1186260 - RNA, 19 nt, Homo sapiens
  misc_RNA (1)...(19): siRNA sense strand
gagcauaguccuucugaga

SEQ ID NO: 1186261 - RNA, 19 nt, Homo sapiens
  misc_RNA (1)...(19): siRNA sense strand
caacacaguuuguauacag

SEQ ID NO: 1186262 - RNA, 19 nt, Homo sapiens
  misc_RNA (1)...(19): siRNA sense strand
cgagauguguuauguggaa

SEQ ID NO: 1186263 - RNA, 19 nt, Homo sapiens
  misc_RNA (1)...(19): siRNA sense strand
caauacagaugcugcugaa

SEQ ID NO: 1186264 - RNA, 19 nt, Homo sapiens
  misc_RNA (1)...(19): siRNA sense strand
ggccaggacugcccacauu

SEQ ID NO: 1186265 - RNA, 19 nt, Homo sapiens
  misc_RNA (1)...(19): siRNA sense strand
ccaccucccugucaccuuu

SEQ ID NO: 1186266 - RNA, 19 nt, Homo sapiens
  misc_RNA (1)...(19): siRNA sense strand
guaaugagauaugcugugu

SEQ ID NO: 1186267 - RNA, 19 nt, Homo sapiens
  misc_RNA (1)...(19): siRNA sense strand
gaaaagcucugccaugaag

SEQ ID NO: 1186268 - RNA, 19 nt, Homo sapiens
  misc_RNA (1)...(19): siRNA sense strand
uuagagagcucgaccagau

SEQ ID NO: 1186269 - RNA, 19 nt, Homo sapiens
  misc_RNA (1)...(19): siRNA sense strand
uguaauaaaucgcccaaga

SEQ ID NO: 1186270 - RNA, 19 nt, Homo sapiens
  misc_RNA (1)...(19): siRNA sense strand
aagugaagaugcuacauuu

SEQ ID NO: 1186271 - RNA, 19 nt, Homo sapiens
  misc_RNA (1)...(19): siRNA sense strand
gcagauggccagagugguu

SEQ ID NO: 1186272 - RNA, 19 nt, Homo sapiens
  misc_RNA (1)...(19): siRNA sense strand
ggaguugucagagcuguua

SEQ ID NO: 1186273 - RNA, 19 nt, Homo sapiens
  misc_RNA (1)...(19): siRNA sense strand
cagagaagauacccacaga

SEQ ID NO: 1186274 - RNA, 19 nt, Homo sapiens
  misc_RNA (1)...(19): siRNA sense strand
gagcagaccucagauacag

SEQ ID NO: 1186275 - RNA, 19 nt, Homo sapiens
  misc_RNA (1)...(19): siRNA sense strand
gccauggccuucagaauca

SEQ ID NO: 1186276 - RNA, 19 nt, Homo sapiens
  misc_RNA (1)...(19): siRNA sense strand
gaguggagcagaaaugaaa

SEQ ID NO: 1186277 - RNA, 19 nt, Homo sapiens
  misc_RNA (1)...(19): siRNA sense strand
ugaagaugcuacauuuaug

SEQ ID NO: 1186278 - RNA, 19 nt, Homo sapiens
  misc_RNA (1)...(19): siRNA sense strand
gaacuuggcagucaucaac

SEQ ID NO: 1186279 - RNA, 19 nt, Homo sapiens
  misc_RNA (1)...(19): siRNA sense strand
ggugagguuuguagaaaga

SEQ ID NO: 1186280 - RNA, 19 nt, Homo sapiens
  misc_RNA (1)...(19): siRNA sense strand
guuaccauguguuucauuu

SEQ ID NO: 1186281 - RNA, 19 nt, Homo sapiens
  misc_RNA (1)...(19): siRNA sense strand
uaccauguguuucauuuga

SEQ ID NO: 1186282 - RNA, 19 nt, Homo sapiens
  misc_RNA (1)...(19): siRNA sense strand
ugaauuaaccugccauugu

SEQ ID NO: 1186283 - RNA, 19 nt, Homo sapiens
  misc_RNA (1)...(19): siRNA sense strand
uggcagaaauugaggaaug

SEQ ID NO: 1186284 - RNA, 19 nt, Homo sapiens
  misc_RNA (1)...(19): siRNA sense strand
ccaguucccugugguacua

SEQ ID NO: 1186285 - RNA, 19 nt, Homo sapiens
  misc_RNA (1)...(19): siRNA sense strand
gugaagaugcuacauuuau

SEQ ID NO: 1186286 - RNA, 19 nt, Homo sapiens
  misc_RNA (1)...(19): siRNA sense strand
cagaugcucuuucagaaca

SEQ ID NO: 1186287 - RNA, 19 nt, Homo sapiens
  misc_RNA (1)...(19): siRNA sense strand
ccaggaggguugaccaaga

SEQ ID NO: 1186288 - RNA, 19 nt, Homo sapiens
  misc_RNA (1)...(19): siRNA sense strand
aaacagaaccaugugcuaa

SEQ ID NO: 1186289 - RNA, 19 nt, Homo sapiens
  misc_RNA (1)...(19): siRNA sense strand
gcauaguccuucugagagu

SEQ ID NO: 1186290 - RNA, 19 nt, Homo sapiens
  misc_RNA (1)...(19): siRNA sense strand
caaguaguaucuccuuucu

SEQ ID NO: 1186291 - RNA, 19 nt, Homo sapiens
  misc_RNA (1)...(19): siRNA sense strand
ugaagaaccuugucaucgu

SEQ ID NO: 1186292 - RNA, 19 nt, Homo sapiens
  misc_RNA (1)...(19): siRNA sense strand
guggugagguuuguagaaa

SEQ ID NO: 1186293 - RNA, 19 nt, Homo sapiens
  misc_RNA (1)...(19): siRNA sense strand
uaauaggauugguagaaga

SEQ ID NO: 1186294 - RNA, 19 nt, Homo sapiens
  misc_RNA (1)...(19): siRNA sense strand
gaaggagacuguggaccau

SEQ ID NO: 1186295 - RNA, 19 nt, Homo sapiens
  misc_RNA (1)...(19): siRNA sense strand
gaaccgauguaggaaaguc

SEQ ID NO: 1186296 - RNA, 19 nt, Homo sapiens
  misc_RNA (1)...(19): siRNA sense strand
ggcagaaauugaggaauga

SEQ ID NO: 1186297 - RNA, 19 nt, Homo sapiens
  misc_RNA (1)...(19): siRNA sense strand
acaaguguccuuugauuug

SEQ ID NO: 1186298 - RNA, 19 nt, Homo sapiens
  misc_RNA (1)...(19): siRNA sense strand
aaacuccucucagccaauu

SEQ ID NO: 1186299 - RNA, 19 nt, Homo sapiens
  misc_RNA (1)...(19): siRNA sense strand
uaacccaugugagaauauu

SEQ ID NO: 1186300 - RNA, 19 nt, Homo sapiens
  misc_RNA (1)...(19): siRNA sense strand
agauacagcuggauuagag

SEQ ID NO: 1186301 - RNA, 19 nt, Homo sapiens
  misc_RNA (1)...(19): siRNA sense strand
uacagaugcugcugaauuc

SEQ ID NO: 1186302 - RNA, 19 nt, Homo sapiens
  misc_RNA (1)...(19): siRNA sense strand
caagcgguguaacaagaaa

SEQ ID NO: 1186303 - RNA, 19 nt, Homo sapiens
  misc_RNA (1)...(19): siRNA sense strand
ggaccaugcucucgcacau

SEQ ID NO: 1186304 - RNA, 19 nt, Homo sapiens
  misc_RNA (1)...(19): siRNA sense strand
gagcuguuaccauguguuu

SEQ ID NO: 1186305 - RNA, 19 nt, Homo sapiens
  misc_RNA (1)...(19): siRNA sense strand
agaaccaugugcuaaagaa

SEQ ID NO: 1186306 - RNA, 19 nt, Homo sapiens
  misc_RNA (1)...(19): siRNA sense strand
gaucagagagugggacaga

SEQ ID NO: 1186307 - RNA, 19 nt, Homo sapiens
  misc_RNA (1)...(19): siRNA sense strand
acaaaggagcuuccaugua

SEQ ID NO: 1186308 - RNA, 19 nt, Homo sapiens
  misc_RNA (1)...(19): siRNA sense strand
ucaagcagauggccagagu

SEQ ID NO: 1186309 - RNA, 19 nt, Homo sapiens
  misc_RNA (1)...(19): siRNA sense strand
ggugugcugugaauugguu

SEQ ID NO: 1186310 - RNA, 19 nt, Homo sapiens
  misc_RNA (1)...(19): siRNA sense strand
caggagggccaccgacaua

SEQ ID NO: 1186311 - RNA, 19 nt, Homo sapiens
  misc_RNA (1)...(19): siRNA sense strand
gcaacacaguuuguauaca

SEQ ID NO: 1186312 - RNA, 19 nt, Homo sapiens
  misc_RNA (1)...(19): siRNA sense strand
gaccauccaguauaucauu

SEQ ID NO: 1186313 - RNA, 19 nt, Homo sapiens
  misc_RNA (1)...(19): siRNA sense strand
gugaaaagcucugccauga

SEQ ID NO: 1186314 - RNA, 19 nt, Homo sapiens
  misc_RNA (1)...(19): siRNA sense strand
ggcaaggucuccagcaucu

SEQ ID NO: 1186315 - RNA, 19 nt, Homo sapiens
  misc_RNA (1)...(19): siRNA sense strand
ugaacugcauaaagaaaug

SEQ ID NO: 1186316 - RNA, 19 nt, Homo sapiens
  misc_RNA (1)...(19): siRNA sense strand
gaaacucaaaugugaaugg

SEQ ID NO: 1186317 - RNA, 19 nt, Homo sapiens
  misc_RNA (1)...(19): siRNA sense strand
gguagaagaaauuacaguu

SEQ ID NO: 1186318 - RNA, 19 nt, Homo sapiens
  misc_RNA (1)...(19): siRNA sense strand
caaguguccuuugauuugu

SEQ ID NO: 1186319 - RNA, 19 nt, Homo sapiens
  misc_RNA (1)...(19): siRNA sense strand
ucaggaagcaaaccuaaga

SEQ ID NO: 1186320 - RNA, 19 nt, Homo sapiens
  misc_RNA (1)...(19): siRNA sense strand
uaccuacacuuguuucugu

SEQ ID NO: 1186321 - RNA, 19 nt, Homo sapiens
  misc_RNA (1)...(19): siRNA sense strand
auacagaugcugcugaauu

SEQ ID NO: 1186322 - RNA, 19 nt, Homo sapiens
  misc_RNA (1)...(19): siRNA sense strand
aagcaacacaguuuguaua

SEQ ID NO: 1186323 - RNA, 19 nt, Homo sapiens
  misc_RNA (1)...(19): siRNA sense strand
gagagcauaguccuucuga

SEQ ID NO: 1186324 - RNA, 19 nt, Homo sapiens
  misc_RNA (1)...(19): siRNA sense strand
guaccagucucaaaaguga

SEQ ID NO: 1186325 - RNA, 19 nt, Homo sapiens
  misc_RNA (1)...(19): siRNA sense strand
ucucgcacaucaguuauuu

SEQ ID NO: 1186326 - RNA, 19 nt, Homo sapiens
  misc_RNA (1)...(19): siRNA sense strand
ccacuguucuaacccaugu

SEQ ID NO: 1186327 - RNA, 19 nt, Homo sapiens
  misc_RNA (1)...(19): siRNA sense strand
ucagagcuguuaccaugug

SEQ ID NO: 1186328 - RNA, 19 nt, Homo sapiens
  misc_RNA (1)...(19): siRNA sense strand
cacacagguucucuaauug

SEQ ID NO: 1186329 - RNA, 19 nt, Homo sapiens
  misc_RNA (1)...(19): siRNA sense strand
caaacagaaccaugugcua

SEQ ID NO: 1186330 - RNA, 19 nt, Homo sapiens
  misc_RNA (1)...(19): siRNA sense strand
guagaagaaauuacaguuc

SEQ ID NO: 1186331 - RNA, 19 nt, Homo sapiens
  misc_RNA (1)...(19): siRNA sense strand
guggacggcauaaauguaa

SEQ ID NO: 1186332 - RNA, 19 nt, Homo sapiens
  misc_RNA (1)...(19): siRNA sense strand
gcacacagguucucuaauu

SEQ ID NO: 1186333 - RNA, 19 nt, Homo sapiens
  misc_RNA (1)...(19): siRNA sense strand
gaaaugaaauuccacauag

SEQ ID NO: 1186334 - RNA, 19 nt, Homo sapiens
  misc_RNA (1)...(19): siRNA sense strand
gaaaugagcagagaagaua

SEQ ID NO: 1186335 - RNA, 19 nt, Homo sapiens
  misc_RNA (1)...(19): siRNA sense strand
gcacaaguguccuuugauu

SEQ ID NO: 1186336 - RNA, 19 nt, Homo sapiens
  misc_RNA (1)...(19): siRNA sense strand
caaaggagcuuccauguac

SEQ ID NO: 1186337 - RNA, 19 nt, Homo sapiens
  misc_RNA (1)...(19): siRNA sense strand
gcaggauccucaaguagua

SEQ ID NO: 1186338 - RNA, 19 nt, Homo sapiens
  misc_RNA (1)...(19): siRNA sense strand
gauuucagcuguuuaaaga

SEQ ID NO: 1186339 - RNA, 19 nt, Homo sapiens
  misc_RNA (1)...(19): siRNA sense strand
gaauuaaccugccauugug

SEQ ID NO: 1186340 - RNA, 19 nt, Homo sapiens
  misc_RNA (1)...(19): siRNA sense strand
gagcacaaguguccuuuga

SEQ ID NO: 1186341 - RNA, 19 nt, Homo sapiens
  misc_RNA (1)...(19): siRNA sense strand
gaacaacuaacaacagaaa

SEQ ID NO: 1186342 - RNA, 19 nt, Homo sapiens
  misc_RNA (1)...(19): siRNA sense strand
gcaggucccuuaugaugaa

SEQ ID NO: 1186343 - RNA, 19 nt, Homo sapiens
  misc_RNA (1)...(19): siRNA sense strand
gaaaugcgguaaccauaca

SEQ ID NO: 1186344 - RNA, 19 nt, Homo sapiens
  misc_RNA (1)...(19): siRNA sense strand
gaugaaaucucugcuguuc

SEQ ID NO: 1186345 - RNA, 19 nt, Homo sapiens
  misc_RNA (1)...(19): siRNA sense strand
gagaagauacccacagaaa

SEQ ID NO: 1186346 - RNA, 19 nt, Homo sapiens
  misc_RNA (1)...(19): siRNA sense strand
gacaagcgguguaacaaga

SEQ ID NO: 1186347 - RNA, 19 nt, Homo sapiens
  misc_RNA (1)...(19): siRNA sense strand
gagauaugcuguguggaua

SEQ ID NO: 1186348 - RNA, 19 nt, Homo sapiens
  misc_RNA (1)...(19): siRNA sense strand
gaaucaaccuuggcagaaa

SEQ ID NO: 1186349 - RNA, 19 nt, Homo sapiens
  misc_RNA (1)...(19): siRNA sense strand
ggaaugagaagcaccauau

SEQ ID NO: 1186350 - RNA, 19 nt, Homo sapiens
  misc_RNA (1)...(19): siRNA sense strand
caagagaaaugcacuguac

SEQ ID NO: 1186351 - RNA, 19 nt, Homo sapiens
  misc_RNA (1)...(19): siRNA sense strand
ccaggcaggucccuuauga

SEQ ID NO: 1186352 - RNA, 19 nt, Homo sapiens
  misc_RNA (1)...(19): siRNA sense strand
cauuugaacugcauaaaga

SEQ ID NO: 1186353 - RNA, 19 nt, Homo sapiens
  misc_RNA (1)...(19): siRNA sense strand
gaagcaaaccuaagaguca

SEQ ID NO: 1186354 - RNA, 19 nt, Homo sapiens
  misc_RNA (1)...(19): siRNA sense strand
gcacuuuccuaacucagaa

SEQ ID NO: 1186355 - RNA, 19 nt, Homo sapiens
  misc_RNA (1)...(19): siRNA sense strand
caaaggaugaccucaauga

SEQ ID NO: 1186356 - RNA, 19 nt, Homo sapiens
  misc_RNA (1)...(19): siRNA sense strand
cggcauaaauguaaugaga

SEQ ID NO: 1186357 - RNA, 19 nt, Homo sapiens
  misc_RNA (1)...(19): siRNA sense strand
aggaaagucugauggauuu

SEQ ID NO: 1186358 - RNA, 19 nt, Homo sapiens
  misc_RNA (1)...(19): siRNA sense strand
gagcagaaaugaaauucca

SEQ ID NO: 1186359 - RNA, 19 nt, Homo sapiens
  misc_RNA (1)...(19): siRNA sense strand
ccuaauaccuacacuuguu

SEQ ID NO: 1186360 - RNA, 19 nt, Homo sapiens
  misc_RNA (1)...(19): siRNA sense strand
gagcauaguccuucugaga

SEQ ID NO: 1186361 - RNA, 19 nt, Homo sapiens
  misc_RNA (1)...(19): siRNA sense strand
caacacaguuuguauacag

SEQ ID NO: 1186362 - RNA, 19 nt, Homo sapiens
  misc_RNA (1)...(19): siRNA sense strand
cgagauguguuauguggaa

SEQ ID NO: 1186363 - RNA, 19 nt, Homo sapiens
  misc_RNA (1)...(19): siRNA sense strand
caauacagaugcugcugaa

SEQ ID NO: 1186364 - RNA, 19 nt, Homo sapiens
  misc_RNA (1)...(19): siRNA sense strand
ggccaggacugcccacauu

SEQ ID NO: 1186365 - RNA, 19 nt, Homo sapiens
  misc_RNA (1)...(19): siRNA sense strand
ccaccucccugucaccuuu

SEQ ID NO: 1186366 - RNA, 19 nt, Homo sapiens
  misc_RNA (1)...(19): siRNA sense strand
guaaugagauaugcugugu

SEQ ID NO: 1186367 - RNA, 19 nt, Homo sapiens
  misc_RNA (1)...(19): siRNA sense strand
gaaaagcucugccaugaag

SEQ ID NO: 1186368 - RNA, 19 nt, Homo sapiens
  misc_RNA (1)...(19): siRNA sense strand
uuagagagcucgaccagau

SEQ ID NO: 1186369 - RNA, 19 nt, Homo sapiens
  misc_RNA (1)...(19): siRNA sense strand
uguaauaaaucgcccaaga

SEQ ID NO: 1186370 - RNA, 19 nt, Homo sapiens
  misc_RNA (1)...(19): siRNA sense strand
aagugaagaugcuacauuu

SEQ ID NO: 1186371 - RNA, 19 nt, Homo sapiens
  misc_RNA (1)...(19): siRNA sense strand
gcagauggccagagugguu

SEQ ID NO: 1186372 - RNA, 19 nt, Homo sapiens
  misc_RNA (1)...(19): siRNA sense strand
ggaguugucagagcuguua

SEQ ID NO: 1186373 - RNA, 19 nt, Homo sapiens
  misc_RNA (1)...(19): siRNA sense strand
cagagaagauacccacaga

SEQ ID NO: 1186374 - RNA, 19 nt, Homo sapiens
  misc_RNA (1)...(19): siRNA sense strand
gagcagaccucagauacag

SEQ ID NO: 1186375 - RNA, 19 nt, Homo sapiens
  misc_RNA (1)...(19): siRNA sense strand
gccauggccuucagaauca

SEQ ID NO: 1186376 - RNA, 19 nt, Homo sapiens
  misc_RNA (1)...(19): siRNA sense strand
gaguggagcagaaaugaaa

SEQ ID NO: 1186377 - RNA, 19 nt, Homo sapiens
  misc_RNA (1)...(19): siRNA sense strand
ugaagaugcuacauuuaug

SEQ ID NO: 1186378 - RNA, 19 nt, Homo sapiens
  misc_RNA (1)...(19): siRNA sense strand
gaacuuggcagucaucaac

SEQ ID NO: 1186379 - RNA, 19 nt, Homo sapiens
  misc_RNA (1)...(19): siRNA sense strand
ggugagguuuguagaaaga

SEQ ID NO: 1186380 - RNA, 19 nt, Homo sapiens
  misc_RNA (1)...(19): siRNA sense strand
guuaccauguguuucauuu

SEQ ID NO: 1186381 - RNA, 19 nt, Homo sapiens
  misc_RNA (1)...(19): siRNA sense strand
uaccauguguuucauuuga

SEQ ID NO: 1186382 - RNA, 19 nt, Homo sapiens
  misc_RNA (1)...(19): siRNA sense strand
ugaauuaaccugccauugu

SEQ ID NO: 1186383 - RNA, 19 nt, Homo sapiens
  misc_RNA (1)...(19): siRNA sense strand
uggcagaaauugaggaaug

SEQ ID NO: 1186384 - RNA, 19 nt, Homo sapiens
  misc_RNA (1)...(19): siRNA sense strand
ccaguucccugugguacua

SEQ ID NO: 1186385 - RNA, 19 nt, Homo sapiens
  misc_RNA (1)...(19): siRNA sense strand
gugaagaugcuacauuuau

SEQ ID NO: 1186386 - RNA, 19 nt, Homo sapiens
  misc_RNA (1)...(19): siRNA sense strand
cagaugcucuuucagaaca

SEQ ID NO: 1186387 - RNA, 19 nt, Homo sapiens
  misc_RNA (1)...(19): siRNA sense strand
ccaggaggguugaccaaga

SEQ ID NO: 1186388 - RNA, 19 nt, Homo sapiens
  misc_RNA (1)...(19): siRNA sense strand
aaacagaaccaugugcuaa

SEQ ID NO: 1186389 - RNA, 19 nt, Homo sapiens
  misc_RNA (1)...(19): siRNA sense strand
gcauaguccuucugagagu

SEQ ID NO: 1186390 - RNA, 19 nt, Homo sapiens
  misc_RNA (1)...(19): siRNA sense strand
caaguaguaucuccuuucu

SEQ ID NO: 1186391 - RNA, 19 nt, Homo sapiens
  misc_RNA (1)...(19): siRNA sense strand
ugaagaaccuugucaucgu

SEQ ID NO: 1186392 - RNA, 19 nt, Homo sapiens
  misc_RNA (1)...(19): siRNA sense strand
guggugagguuuguagaaa

SEQ ID NO: 1186393 - RNA, 19 nt, Homo sapiens
  misc_RNA (1)...(19): siRNA sense strand
uaauaggauugguagaaga

SEQ ID NO: 1186394 - RNA, 19 nt, Homo sapiens
  misc_RNA (1)...(19): siRNA sense strand
gaaggagacuguggaccau

SEQ ID NO: 1186395 - RNA, 19 nt, Homo sapiens
  misc_RNA (1)...(19): siRNA sense strand
gaaccgauguaggaaaguc

SEQ ID NO: 1186396 - RNA, 19 nt, Homo sapiens
  misc_RNA (1)...(19): siRNA sense strand
ggcagaaauugaggaauga

SEQ ID NO: 1186397 - RNA, 19 nt, Homo sapiens
  misc_RNA (1)...(19): siRNA sense strand
acaaguguccuuugauuug

SEQ ID NO: 1186398 - RNA, 19 nt, Homo sapiens
  misc_RNA (1)...(19): siRNA sense strand
aaacuccucucagccaauu

SEQ ID NO: 1186399 - RNA, 19 nt, Homo sapiens
  misc_RNA (1)...(19): siRNA sense strand
uaacccaugugagaauauu

SEQ ID NO: 1186400 - RNA, 19 nt, Homo sapiens
  misc_RNA (1)...(19): siRNA sense strand
agauacagcuggauuagag

SEQ ID NO: 1186401 - RNA, 19 nt, Homo sapiens
  misc_RNA (1)...(19): siRNA sense strand
uacagaugcugcugaauuc

SEQ ID NO: 1186402 - RNA, 19 nt, Homo sapiens
  misc_RNA (1)...(19): siRNA sense strand
caagcgguguaacaagaaa

SEQ ID NO: 1186403 - RNA, 19 nt, Homo sapiens
  misc_RNA (1)...(19): siRNA sense strand
ggaccaugcucucgcacau

SEQ ID NO: 1186404 - RNA, 19 nt, Homo sapiens
  misc_RNA (1)...(19): siRNA sense strand
gagcuguuaccauguguuu

SEQ ID NO: 1186405 - RNA, 19 nt, Homo sapiens
  misc_RNA (1)...(19): siRNA sense strand
agaaccaugugcuaaagaa

SEQ ID NO: 1186406 - RNA, 19 nt, Homo sapiens
  misc_RNA (1)...(19): siRNA sense strand
gaucagagagugggacaga

SEQ ID NO: 1186407 - RNA, 19 nt, Homo sapiens
  misc_RNA (1)...(19): siRNA sense strand
acaaaggagcuuccaugua

SEQ ID NO: 1186408 - RNA, 19 nt, Homo sapiens
  misc_RNA (1)...(19): siRNA sense strand
ucaagcagauggccagagu

SEQ ID NO: 1186409 - RNA, 19 nt, Homo sapiens
  misc_RNA (1)...(19): siRNA sense strand
ggugugcugugaauugguu

SEQ ID NO: 1186410 - RNA, 19 nt, Homo sapiens
  misc_RNA (1)...(19): siRNA sense strand
caggagggccaccgacaua

SEQ ID NO: 1186411 - RNA, 19 nt, Homo sapiens
  misc_RNA (1)...(19): siRNA sense strand
gcaacacaguuuguauaca

SEQ ID NO: 1186412 - RNA, 19 nt, Homo sapiens
  misc_RNA (1)...(19): siRNA sense strand
gaccauccaguauaucauu

SEQ ID NO: 1186413 - RNA, 19 nt, Homo sapiens
  misc_RNA (1)...(19): siRNA sense strand
gugaaaagcucugccauga

SEQ ID NO: 1186414 - RNA, 19 nt, Homo sapiens
  misc_RNA (1)...(19): siRNA sense strand
ggcaaggucuccagcaucu

SEQ ID NO: 1186415 - RNA, 19 nt, Homo sapiens
  misc_RNA (1)...(19): siRNA sense strand
ugaacugcauaaagaaaug

SEQ ID NO: 1186416 - RNA, 19 nt, Homo sapiens
  misc_RNA (1)...(19): siRNA sense strand
gaaacucaaaugugaaugg

SEQ ID NO: 1186417 - RNA, 19 nt, Homo sapiens
  misc_RNA (1)...(19): siRNA sense strand
gguagaagaaauuacaguu

SEQ ID NO: 1186418 - RNA, 19 nt, Homo sapiens
  misc_RNA (1)...(19): siRNA sense strand
caaguguccuuugauuugu

SEQ ID NO: 1186419 - RNA, 19 nt, Homo sapiens
  misc_RNA (1)...(19): siRNA sense strand
ucaggaagcaaaccuaaga

SEQ ID NO: 1186420 - RNA, 19 nt, Homo sapiens
  misc_RNA (1)...(19): siRNA sense strand
uaccuacacuuguuucugu

SEQ ID NO: 1186421 - RNA, 19 nt, Homo sapiens
  misc_RNA (1)...(19): siRNA sense strand
auacagaugcugcugaauu

SEQ ID NO: 1186422 - RNA, 19 nt, Homo sapiens
  misc_RNA (1)...(19): siRNA sense strand
aagcaacacaguuuguaua

SEQ ID NO: 1186423 - RNA, 19 nt, Homo sapiens
  misc_RNA (1)...(19): siRNA sense strand
gagagcauaguccuucuga

SEQ ID NO: 1186424 - RNA, 19 nt, Homo sapiens
  misc_RNA (1)...(19): siRNA sense strand
guaccagucucaaaaguga

SEQ ID NO: 1186425 - RNA, 19 nt, Homo sapiens
  misc_RNA (1)...(19): siRNA sense strand
ucucgcacaucaguuauuu

SEQ ID NO: 1186426 - RNA, 19 nt, Homo sapiens
  misc_RNA (1)...(19): siRNA sense strand
ccacuguucuaacccaugu

SEQ ID NO: 1186427 - RNA, 19 nt, Homo sapiens
  misc_RNA (1)...(19): siRNA sense strand
ucagagcuguuaccaugug

SEQ ID NO: 1186428 - RNA, 19 nt, Homo sapiens
  misc_RNA (1)...(19): siRNA sense strand
cacacagguucucuaauug

SEQ ID NO: 1186429 - RNA, 19 nt, Homo sapiens
  misc_RNA (1)...(19): siRNA sense strand
caaacagaaccaugugcua

SEQ ID NO: 1186430 - RNA, 19 nt, Homo sapiens
  misc_RNA (1)...(19): siRNA sense strand
guagaagaaauuacaguuc

SEQ ID NO: 1186431 - RNA, 19 nt, Homo sapiens
  misc_RNA (1)...(19): siRNA sense strand
guggacggcauaaauguaa

SEQ ID NO: 1186432 - RNA, 19 nt, Homo sapiens
  misc_RNA (1)...(19): siRNA sense strand
caaagaggauucugaaaga

SEQ ID NO: 1186433 - RNA, 19 nt, Homo sapiens
  misc_RNA (1)...(19): siRNA sense strand
gaagauugauagucuaaug

SEQ ID NO: 1186434 - RNA, 19 nt, Homo sapiens
  misc_RNA (1)...(19): siRNA sense strand
uaacagaucuuguaaacca

SEQ ID NO: 1186435 - RNA, 19 nt, Homo sapiens
  misc_RNA (1)...(19): siRNA sense strand
gaagggagaccgagacaaa

SEQ ID NO: 1186436 - RNA, 19 nt, Homo sapiens
  misc_RNA (1)...(19): siRNA sense strand
uaagugaccucucuacaga

SEQ ID NO: 1186437 - RNA, 19 nt, Homo sapiens
  misc_RNA (1)...(19): siRNA sense strand
ccucugagcuuucuaaauc

SEQ ID NO: 1186438 - RNA, 19 nt, Homo sapiens
  misc_RNA (1)...(19): siRNA sense strand
gcaacucgcugacaaggau

SEQ ID NO: 1186439 - RNA, 19 nt, Homo sapiens
  misc_RNA (1)...(19): siRNA sense strand
aagaugagaugaacaaaga

SEQ ID NO: 1186440 - RNA, 19 nt, Homo sapiens
  misc_RNA (1)...(19): siRNA sense strand
agaacaagauccuuaaaga

SEQ ID NO: 1186441 - RNA, 19 nt, Homo sapiens
  misc_RNA (1)...(19): siRNA sense strand
gaaggcaguuccagucuca

SEQ ID NO: 1186442 - RNA, 19 nt, Homo sapiens
  misc_RNA (1)...(19): siRNA sense strand
gguaacagaucuuguaaac

SEQ ID NO: 1186443 - RNA, 19 nt, Homo sapiens
  misc_RNA (1)...(19): siRNA sense strand
gaacaagauccuuaaagau

SEQ ID NO: 1186444 - RNA, 19 nt, Homo sapiens
  misc_RNA (1)...(19): siRNA sense strand
gagaaggagugccucaugu

SEQ ID NO: 1186445 - RNA, 19 nt, Homo sapiens
  misc_RNA (1)...(19): siRNA sense strand
ggaaauuauuguccugaau

SEQ ID NO: 1186446 - RNA, 19 nt, Homo sapiens
  misc_RNA (1)...(19): siRNA sense strand
uuaugucgcugaagcuuua

SEQ ID NO: 1186447 - RNA, 19 nt, Homo sapiens
  misc_RNA (1)...(19): siRNA sense strand
ugaaggaguugaagcagaa

SEQ ID NO: 1186448 - RNA, 19 nt, Homo sapiens
  misc_RNA (1)...(19): siRNA sense strand
gcaaagaggauucugaaag

SEQ ID NO: 1186449 - RNA, 19 nt, Homo sapiens
  misc_RNA (1)...(19): siRNA sense strand
gaaauuauuguccugaaug

SEQ ID NO: 1186450 - RNA, 19 nt, Homo sapiens
  misc_RNA (1)...(19): siRNA sense strand
aaagagaacaagauccuua

SEQ ID NO: 1186451 - RNA, 19 nt, Homo sapiens
  misc_RNA (1)...(19): siRNA sense strand
ucacagccaucauaucaga

SEQ ID NO: 1186452 - RNA, 19 nt, Homo sapiens
  misc_RNA (1)...(19): siRNA sense strand
caaagaggcugagaacagu

SEQ ID NO: 1186453 - RNA, 19 nt, Homo sapiens
  misc_RNA (1)...(19): siRNA sense strand
acaagauccuuaaagauga

SEQ ID NO: 1186454 - RNA, 19 nt, Homo sapiens
  misc_RNA (1)...(19): siRNA sense strand
ggaaauacaaugugagaag

SEQ ID NO: 1186455 - RNA, 19 nt, Homo sapiens
  misc_RNA (1)...(19): siRNA sense strand
gaagaaacaccuacaacag

SEQ ID NO: 1186456 - RNA, 19 nt, Homo sapiens
  misc_RNA (1)...(19): siRNA sense strand
acaaagagagcuugaagaa

SEQ ID NO: 1186457 - RNA, 19 nt, Homo sapiens
  misc_RNA (1)...(19): siRNA sense strand
ccaagaauccaccucauug

SEQ ID NO: 1186458 - RNA, 19 nt, Homo sapiens
  misc_RNA (1)...(19): siRNA sense strand
uacagaagaugaugacuca

SEQ ID NO: 1186459 - RNA, 19 nt, Homo sapiens
  misc_RNA (1)...(19): siRNA sense strand
gaccuugagcuggaaauua

SEQ ID NO: 1186460 - RNA, 19 nt, Homo sapiens
  misc_RNA (1)...(19): siRNA sense strand
gcuagaacgcugugacaaa

SEQ ID NO: 1186461 - RNA, 19 nt, Homo sapiens
  misc_RNA (1)...(19): siRNA sense strand
uggagcagcugaaggaguu

SEQ ID NO: 1186462 - RNA, 19 nt, Homo sapiens
  misc_RNA (1)...(19): siRNA sense strand
ggagaaggagugccucaug

SEQ ID NO: 1186463 - RNA, 19 nt, Homo sapiens
  misc_RNA (1)...(19): siRNA sense strand
auuggaggcugaugaagua

SEQ ID NO: 1186464 - RNA, 19 nt, Homo sapiens
  misc_RNA (1)...(19): siRNA sense strand
aaagacagccucugagcuu

SEQ ID NO: 1186465 - RNA, 19 nt, Homo sapiens
  misc_RNA (1)...(19): siRNA sense strand
gcuaugagcggaagaacau

SEQ ID NO: 1186466 - RNA, 19 nt, Homo sapiens
  misc_RNA (1)...(19): siRNA sense strand
gcagcgggaaucagcauaa

SEQ ID NO: 1186467 - RNA, 19 nt, Homo sapiens
  misc_RNA (1)...(19): siRNA sense strand
cagaaaagcuggucucagu

SEQ ID NO: 1186468 - RNA, 19 nt, Homo sapiens
  misc_RNA (1)...(19): siRNA sense strand
ugaaugaccggguaacaga

SEQ ID NO: 1186469 - RNA, 19 nt, Homo sapiens
  misc_RNA (1)...(19): siRNA sense strand
ccaaagaggcugagaacag

SEQ ID NO: 1186470 - RNA, 19 nt, Homo sapiens
  misc_RNA (1)...(19): siRNA sense strand
ggaggccgacucagagaaa

SEQ ID NO: 1186471 - RNA, 19 nt, Homo sapiens
  misc_RNA (1)...(19): siRNA sense strand
agaggauucugaaagacua

SEQ ID NO: 1186472 - RNA, 19 nt, Homo sapiens
  misc_RNA (1)...(19): siRNA sense strand
ugcagaagcugagcacauu

SEQ ID NO: 1186473 - RNA, 19 nt, Homo sapiens
  misc_RNA (1)...(19): siRNA sense strand
cgaccucacagccaucaua

SEQ ID NO: 1186474 - RNA, 19 nt, Homo sapiens
  misc_RNA (1)...(19): siRNA sense strand
gaagaacaucgaccucaca

SEQ ID NO: 1186475 - RNA, 19 nt, Homo sapiens
  misc_RNA (1)...(19): siRNA sense strand
gagaugaacaaagagauug

SEQ ID NO: 1186476 - RNA, 19 nt, Homo sapiens
  misc_RNA (1)...(19): siRNA sense strand
gagaacaagauccuuaaag

SEQ ID NO: 1186477 - RNA, 19 nt, Homo sapiens
  misc_RNA (1)...(19): siRNA sense strand
aacaaacccuggaggagaa

SEQ ID NO: 1186478 - RNA, 19 nt, Homo sapiens
  misc_RNA (1)...(19): siRNA sense strand
gggaacagcacugcaaaga

SEQ ID NO: 1186479 - RNA, 19 nt, Homo sapiens
  misc_RNA (1)...(19): siRNA sense strand
ucaggucacuguaaaauga

SEQ ID NO: 1186480 - RNA, 19 nt, Homo sapiens
  misc_RNA (1)...(19): siRNA sense strand
ccucacagccaucauauca

SEQ ID NO: 1186481 - RNA, 19 nt, Homo sapiens
  misc_RNA (1)...(19): siRNA sense strand
aacaagauccuuaaagaug

SEQ ID NO: 1186482 - RNA, 19 nt, Homo sapiens
  misc_RNA (1)...(19): siRNA sense strand
ggaugauugacaacuauaa

SEQ ID NO: 1186483 - RNA, 19 nt, Homo sapiens
  misc_RNA (1)...(19): siRNA sense strand
gcaugaaggaggagaagga

SEQ ID NO: 1186484 - RNA, 19 nt, Homo sapiens
  misc_RNA (1)...(19): siRNA sense strand
caacaucgagcgcaugaag

SEQ ID NO: 1186485 - RNA, 19 nt, Homo sapiens
  misc_RNA (1)...(19): siRNA sense strand
cuagaacgcugugacaaag

SEQ ID NO: 1186486 - RNA, 19 nt, Homo sapiens
  misc_RNA (1)...(19): siRNA sense strand
gcgguuaagugaccucucu

SEQ ID NO: 1186487 - RNA, 19 nt, Homo sapiens
  misc_RNA (1)...(19): siRNA sense strand
gaugagaugaacaaagaga

SEQ ID NO: 1186488 - RNA, 19 nt, Homo sapiens
  misc_RNA (1)...(19): siRNA sense strand
ugaccucucuacagaagau

SEQ ID NO: 1186489 - RNA, 19 nt, Homo sapiens
  misc_RNA (1)...(19): siRNA sense strand
ucacaagcgaggaaugaaa

SEQ ID NO: 1186490 - RNA, 19 nt, Homo sapiens
  misc_RNA (1)...(19): siRNA sense strand
aagcaaagacagccucuga

SEQ ID NO: 1186491 - RNA, 19 nt, Homo sapiens
  misc_RNA (1)...(19): siRNA sense strand
ggacaucaacacccugaca

SEQ ID NO: 1186492 - RNA, 19 nt, Homo sapiens
  misc_RNA (1)...(19): siRNA sense strand
gauaagaagauugauaguc

SEQ ID NO: 1186493 - RNA, 19 nt, Homo sapiens
  misc_RNA (1)...(19): siRNA sense strand
gaaaagcuggucucaguga

SEQ ID NO: 1186494 - RNA, 19 nt, Homo sapiens
  misc_RNA (1)...(19): siRNA sense strand
ugacaaagagaacaagauc

SEQ ID NO: 1186495 - RNA, 19 nt, Homo sapiens
  misc_RNA (1)...(19): siRNA sense strand
gagaagagcgaggaguaug

SEQ ID NO: 1186496 - RNA, 19 nt, Homo sapiens
  misc_RNA (1)...(19): siRNA sense strand
gccugugcaugcagauuaa

SEQ ID NO: 1186497 - RNA, 19 nt, Homo sapiens
  misc_RNA (1)...(19): siRNA sense strand
gcagaagcugagcacauuu

SEQ ID NO: 1186498 - RNA, 19 nt, Homo sapiens
  misc_RNA (1)...(19): siRNA sense strand
ggccagcuuugcuccaaug

SEQ ID NO: 1186499 - RNA, 19 nt, Homo sapiens
  misc_RNA (1)...(19): siRNA sense strand
gcacagcuucgguccaaag

SEQ ID NO: 1186500 - RNA, 19 nt, Homo sapiens
  misc_RNA (1)...(19): siRNA sense strand
ugagaugaacaaagagauu

SEQ ID NO: 1186501 - RNA, 19 nt, Homo sapiens
  misc_RNA (1)...(19): siRNA sense strand
accuugagcuggaaauuau

SEQ ID NO: 1186502 - RNA, 19 nt, Homo sapiens
  misc_RNA (1)...(19): siRNA sense strand
ccgagaagagcgaggagua

SEQ ID NO: 1186503 - RNA, 19 nt, Homo sapiens
  misc_RNA (1)...(19): siRNA sense strand
gacaaagagagcuugaaga

SEQ ID NO: 1186504 - RNA, 19 nt, Homo sapiens
  misc_RNA (1)...(19): siRNA sense strand
uugguugucugaagucuga

SEQ ID NO: 1186505 - RNA, 19 nt, Homo sapiens
  misc_RNA (1)...(19): siRNA sense strand
caagauccuuaaagaugag

SEQ ID NO: 1186506 - RNA, 19 nt, Homo sapiens
  misc_RNA (1)...(19): siRNA sense strand
caggaaauacaaugugaga

SEQ ID NO: 1186507 - RNA, 19 nt, Homo sapiens
  misc_RNA (1)...(19): siRNA sense strand
gagggaacagcacugcaaa

SEQ ID NO: 1186508 - RNA, 19 nt, Homo sapiens
  misc_RNA (1)...(19): siRNA sense strand
agaagaaacaccuacaaca

SEQ ID NO: 1186509 - RNA, 19 nt, Homo sapiens
  misc_RNA (1)...(19): siRNA sense strand
ugaaggaggagaaggacuu

SEQ ID NO: 1186510 - RNA, 19 nt, Homo sapiens
  misc_RNA (1)...(19): siRNA sense strand
gauuggaggcugaugaagu

SEQ ID NO: 1186511 - RNA, 19 nt, Homo sapiens
  misc_RNA (1)...(19): siRNA sense strand
gggaugauugacaacuaua

SEQ ID NO: 1186512 - RNA, 19 nt, Homo sapiens
  misc_RNA (1)...(19): siRNA sense strand
ccggguaacagaucuugua

SEQ ID NO: 1186513 - RNA, 19 nt, Homo sapiens
  misc_RNA (1)...(19): siRNA sense strand
ucgcugacaaggaucuuua

SEQ ID NO: 1186514 - RNA, 19 nt, Homo sapiens
  misc_RNA (1)...(19): siRNA sense strand
gcacauuugaggagaccaa

SEQ ID NO: 1186515 - RNA, 19 nt, Homo sapiens
  misc_RNA (1)...(19): siRNA sense strand
ugaaugcgguugguugucu

SEQ ID NO: 1186516 - RNA, 19 nt, Homo sapiens
  misc_RNA (1)...(19): siRNA sense strand
ccucagugaagaacuauga

SEQ ID NO: 1186517 - RNA, 19 nt, Homo sapiens
  misc_RNA (1)...(19): siRNA sense strand
cagaagcugagcacauuug

SEQ ID NO: 1186518 - RNA, 19 nt, Homo sapiens
  misc_RNA (1)...(19): siRNA sense strand
ucagugaugcgguuaagug

SEQ ID NO: 1186519 - RNA, 19 nt, Homo sapiens
  misc_RNA (1)...(19): siRNA sense strand
gcgguugguugucugaagu

SEQ ID NO: 1186520 - RNA, 19 nt, Homo sapiens
  misc_RNA (1)...(19): siRNA sense strand
gaagucugaggucaagaug

SEQ ID NO: 1186521 - RNA, 19 nt, Homo sapiens
  misc_RNA (1)...(19): siRNA sense strand
aagagaacaagauccuuaa

SEQ ID NO: 1186522 - RNA, 19 nt, Homo sapiens
  misc_RNA (1)...(19): siRNA sense strand
gaucacgccaccaucuuca

SEQ ID NO: 1186523 - RNA, 19 nt, Homo sapiens
  misc_RNA (1)...(19): siRNA sense strand
agaaggagcgagccgagaa

SEQ ID NO: 1186524 - RNA, 19 nt, Homo sapiens
  misc_RNA (1)...(19): siRNA sense strand
ggagaccgagacaaagaga

SEQ ID NO: 1186525 - RNA, 19 nt, Homo sapiens
  misc_RNA (1)...(19): siRNA sense strand
ucauggagcagcugaagga

SEQ ID NO: 1186526 - RNA, 19 nt, Homo sapiens
  misc_RNA (1)...(19): siRNA sense strand
gaaucagcauaaggcagaa

SEQ ID NO: 1186527 - RNA, 19 nt, Homo sapiens
  misc_RNA (1)...(19): siRNA sense strand
ggacaaggagguggaagag

SEQ ID NO: 1186528 - RNA, 19 nt, Homo sapiens
  misc_RNA (1)...(19): siRNA sense strand
gaaaacggagaaacaaaug

SEQ ID NO: 1186529 - RNA, 19 nt, Homo sapiens
  misc_RNA (1)...(19): siRNA sense strand
uggaaauuauuguccugaa

SEQ ID NO: 1186530 - RNA, 19 nt, Homo sapiens
  misc_RNA (1)...(19): siRNA sense strand
ccagauuggaggcugauga

SEQ ID NO: 1186531 - RNA, 19 nt, Homo sapiens
  misc_RNA (1)...(19): siRNA sense strand
gagagacuacaccgucaga

SEQ ID NO: 1186532 - RNA, 19 nt, Homo sapiens
  misc_RNA (1)...(19): siRNA sense strand
caaagaggauucugaaaga

SEQ ID NO: 1186533 - RNA, 19 nt, Homo sapiens
  misc_RNA (1)...(19): siRNA sense strand
gaagauugauagucuaaug

SEQ ID NO: 1186534 - RNA, 19 nt, Homo sapiens
  misc_RNA (1)...(19): siRNA sense strand
uaacagaucuuguaaacca

SEQ ID NO: 1186535 - RNA, 19 nt, Homo sapiens
  misc_RNA (1)...(19): siRNA sense strand
gaagggagaccgagacaaa

SEQ ID NO: 1186536 - RNA, 19 nt, Homo sapiens
  misc_RNA (1)...(19): siRNA sense strand
uaagugaccucucuacaga

SEQ ID NO: 1186537 - RNA, 19 nt, Homo sapiens
  misc_RNA (1)...(19): siRNA sense strand
ccucugagcuuucuaaauc

SEQ ID NO: 1186538 - RNA, 19 nt, Homo sapiens
  misc_RNA (1)...(19): siRNA sense strand
uaacgagucucacgcagaa

SEQ ID NO: 1186539 - RNA, 19 nt, Homo sapiens
  misc_RNA (1)...(19): siRNA sense strand
gcaacucgcugacaaggau

SEQ ID NO: 1186540 - RNA, 19 nt, Homo sapiens
  misc_RNA (1)...(19): siRNA sense strand
aagaugagaugaacaaaga

SEQ ID NO: 1186541 - RNA, 19 nt, Homo sapiens
  misc_RNA (1)...(19): siRNA sense strand
agaacaagauccuuaaaga

SEQ ID NO: 1186542 - RNA, 19 nt, Homo sapiens
  misc_RNA (1)...(19): siRNA sense strand
gaaggcaguuccagucuca

SEQ ID NO: 1186543 - RNA, 19 nt, Homo sapiens
  misc_RNA (1)...(19): siRNA sense strand
gguaacagaucuuguaaac

SEQ ID NO: 1186544 - RNA, 19 nt, Homo sapiens
  misc_RNA (1)...(19): siRNA sense strand
gaacaagauccuuaaagau

SEQ ID NO: 1186545 - RNA, 19 nt, Homo sapiens
  misc_RNA (1)...(19): siRNA sense strand
gagaaggagugccucaugu

SEQ ID NO: 1186546 - RNA, 19 nt, Homo sapiens
  misc_RNA (1)...(19): siRNA sense strand
ggaaauuauuguccugaau

SEQ ID NO: 1186547 - RNA, 19 nt, Homo sapiens
  misc_RNA (1)...(19): siRNA sense strand
uuaugucgcugaagcuuua

SEQ ID NO: 1186548 - RNA, 19 nt, Homo sapiens
  misc_RNA (1)...(19): siRNA sense strand
ugaaggaguugaagcagaa

SEQ ID NO: 1186549 - RNA, 19 nt, Homo sapiens
  misc_RNA (1)...(19): siRNA sense strand
gcaaagaggauucugaaag

SEQ ID NO: 1186550 - RNA, 19 nt, Homo sapiens
  misc_RNA (1)...(19): siRNA sense strand
gaaauuauuguccugaaug

SEQ ID NO: 1186551 - RNA, 19 nt, Homo sapiens
  misc_RNA (1)...(19): siRNA sense strand
aaagagaacaagauccuua

SEQ ID NO: 1186552 - RNA, 19 nt, Homo sapiens
  misc_RNA (1)...(19): siRNA sense strand
ucacagccaucauaucaga

SEQ ID NO: 1186553 - RNA, 19 nt, Homo sapiens
  misc_RNA (1)...(19): siRNA sense strand
caaagaggcugagaacagu

SEQ ID NO: 1186554 - RNA, 19 nt, Homo sapiens
  misc_RNA (1)...(19): siRNA sense strand
acaagauccuuaaagauga

SEQ ID NO: 1186555 - RNA, 19 nt, Homo sapiens
  misc_RNA (1)...(19): siRNA sense strand
ggaaauacaaugugagaag

SEQ ID NO: 1186556 - RNA, 19 nt, Homo sapiens
  misc_RNA (1)...(19): siRNA sense strand
gaagaaacaccuacaacag

SEQ ID NO: 1186557 - RNA, 19 nt, Homo sapiens
  misc_RNA (1)...(19): siRNA sense strand
acaaagagagcuugaagaa

SEQ ID NO: 1186558 - RNA, 19 nt, Homo sapiens
  misc_RNA (1)...(19): siRNA sense strand
ccaagaauccaccucauug

SEQ ID NO: 1186559 - RNA, 19 nt, Homo sapiens
  misc_RNA (1)...(19): siRNA sense strand
uacagaagaugaugacuca

SEQ ID NO: 1186560 - RNA, 19 nt, Homo sapiens
  misc_RNA (1)...(19): siRNA sense strand
gaccuugagcuggaaauua

SEQ ID NO: 1186561 - RNA, 19 nt, Homo sapiens
  misc_RNA (1)...(19): siRNA sense strand
gcuagaacgcugugacaaa

SEQ ID NO: 1186562 - RNA, 19 nt, Homo sapiens
  misc_RNA (1)...(19): siRNA sense strand
uggagcagcugaaggaguu

SEQ ID NO: 1186563 - RNA, 19 nt, Homo sapiens
  misc_RNA (1)...(19): siRNA sense strand
ggagaaggagugccucaug

SEQ ID NO: 1186564 - RNA, 19 nt, Homo sapiens
  misc_RNA (1)...(19): siRNA sense strand
auuggaggcugaugaagua

SEQ ID NO: 1186565 - RNA, 19 nt, Homo sapiens
  misc_RNA (1)...(19): siRNA sense strand
aaagacagccucugagcuu

SEQ ID NO: 1186566 - RNA, 19 nt, Homo sapiens
  misc_RNA (1)...(19): siRNA sense strand
gcuaugagcggaagaacau

SEQ ID NO: 1186567 - RNA, 19 nt, Homo sapiens
  misc_RNA (1)...(19): siRNA sense strand
gcagcgggaaucagcauaa

SEQ ID NO: 1186568 - RNA, 19 nt, Homo sapiens
  misc_RNA (1)...(19): siRNA sense strand
cagaaaagcuggucucagu

SEQ ID NO: 1186569 - RNA, 19 nt, Homo sapiens
  misc_RNA (1)...(19): siRNA sense strand
ugaaugaccggguaacaga

SEQ ID NO: 1186570 - RNA, 19 nt, Homo sapiens
  misc_RNA (1)...(19): siRNA sense strand
ccaaagaggcugagaacag

SEQ ID NO: 1186571 - RNA, 19 nt, Homo sapiens
  misc_RNA (1)...(19): siRNA sense strand
ggaggccgacucagagaaa

SEQ ID NO: 1186572 - RNA, 19 nt, Homo sapiens
  misc_RNA (1)...(19): siRNA sense strand
agaggauucugaaagacua

SEQ ID NO: 1186573 - RNA, 19 nt, Homo sapiens
  misc_RNA (1)...(19): siRNA sense strand
ugcagaagcugagcacauu

SEQ ID NO: 1186574 - RNA, 19 nt, Homo sapiens
  misc_RNA (1)...(19): siRNA sense strand
cgaccucacagccaucaua

SEQ ID NO: 1186575 - RNA, 19 nt, Homo sapiens
  misc_RNA (1)...(19): siRNA sense strand
gaagaacaucgaccucaca

SEQ ID NO: 1186576 - RNA, 19 nt, Homo sapiens
  misc_RNA (1)...(19): siRNA sense strand
gagaugaacaaagagauug

SEQ ID NO: 1186577 - RNA, 19 nt, Homo sapiens
  misc_RNA (1)...(19): siRNA sense strand
gagaacaagauccuuaaag

SEQ ID NO: 1186578 - RNA, 19 nt, Homo sapiens
  misc_RNA (1)...(19): siRNA sense strand
aacaaacccuggaggagaa

SEQ ID NO: 1186579 - RNA, 19 nt, Homo sapiens
  misc_RNA (1)...(19): siRNA sense strand
gggaacagcacugcaaaga

SEQ ID NO: 1186580 - RNA, 19 nt, Homo sapiens
  misc_RNA (1)...(19): siRNA sense strand
ucaggucacuguaaaauga

SEQ ID NO: 1186581 - RNA, 19 nt, Homo sapiens
  misc_RNA (1)...(19): siRNA sense strand
ccucacagccaucauauca

SEQ ID NO: 1186582 - RNA, 19 nt, Homo sapiens
  misc_RNA (1)...(19): siRNA sense strand
aacaagauccuuaaagaug

SEQ ID NO: 1186583 - RNA, 19 nt, Homo sapiens
  misc_RNA (1)...(19): siRNA sense strand
ggaugauugacaacuauaa

SEQ ID NO: 1186584 - RNA, 19 nt, Homo sapiens
  misc_RNA (1)...(19): siRNA sense strand
gcaugaaggaggagaagga

SEQ ID NO: 1186585 - RNA, 19 nt, Homo sapiens
  misc_RNA (1)...(19): siRNA sense strand
caacaucgagcgcaugaag

SEQ ID NO: 1186586 - RNA, 19 nt, Homo sapiens
  misc_RNA (1)...(19): siRNA sense strand
cuagaacgcugugacaaag

SEQ ID NO: 1186587 - RNA, 19 nt, Homo sapiens
  misc_RNA (1)...(19): siRNA sense strand
gcgguuaagugaccucucu

SEQ ID NO: 1186588 - RNA, 19 nt, Homo sapiens
  misc_RNA (1)...(19): siRNA sense strand
gaugagaugaacaaagaga

SEQ ID NO: 1186589 - RNA, 19 nt, Homo sapiens
  misc_RNA (1)...(19): siRNA sense strand
ugaccucucuacagaagau

SEQ ID NO: 1186590 - RNA, 19 nt, Homo sapiens
  misc_RNA (1)...(19): siRNA sense strand
aagcaaagacagccucuga

SEQ ID NO: 1186591 - RNA, 19 nt, Homo sapiens
  misc_RNA (1)...(19): siRNA sense strand
ucacaagcgaggaaugaaa

SEQ ID NO: 1186592 - RNA, 19 nt, Homo sapiens
  misc_RNA (1)...(19): siRNA sense strand
ggacaucaacacccugaca

SEQ ID NO: 1186593 - RNA, 19 nt, Homo sapiens
  misc_RNA (1)...(19): siRNA sense strand
gauaagaagauugauaguc

SEQ ID NO: 1186594 - RNA, 19 nt, Homo sapiens
  misc_RNA (1)...(19): siRNA sense strand
gcagaagcugagcacauuu

SEQ ID NO: 1186595 - RNA, 19 nt, Homo sapiens
  misc_RNA (1)...(19): siRNA sense strand
ugacaaagagaacaagauc

SEQ ID NO: 1186596 - RNA, 19 nt, Homo sapiens
  misc_RNA (1)...(19): siRNA sense strand
gagaagagcgaggaguaug

SEQ ID NO: 1186597 - RNA, 19 nt, Homo sapiens
  misc_RNA (1)...(19): siRNA sense strand
gccugugcaugcagauuaa

SEQ ID NO: 1186598 - RNA, 19 nt, Homo sapiens
  misc_RNA (1)...(19): siRNA sense strand
gaaaagcuggucucaguga

SEQ ID NO: 1186599 - RNA, 19 nt, Homo sapiens
  misc_RNA (1)...(19): siRNA sense strand
ggccagcuuugcuccaaug

SEQ ID NO: 1186600 - RNA, 19 nt, Homo sapiens
  misc_RNA (1)...(19): siRNA sense strand
gcacagcuucgguccaaag

SEQ ID NO: 1186601 - RNA, 19 nt, Homo sapiens
  misc_RNA (1)...(19): siRNA sense strand
ugagaugaacaaagagauu

SEQ ID NO: 1186602 - RNA, 19 nt, Homo sapiens
  misc_RNA (1)...(19): siRNA sense strand
accuugagcuggaaauuau

SEQ ID NO: 1186603 - RNA, 19 nt, Homo sapiens
  misc_RNA (1)...(19): siRNA sense strand
ccgagaagagcgaggagua

SEQ ID NO: 1186604 - RNA, 19 nt, Homo sapiens
  misc_RNA (1)...(19): siRNA sense strand
gacaaagagagcuugaaga

SEQ ID NO: 1186605 - RNA, 19 nt, Homo sapiens
  misc_RNA (1)...(19): siRNA sense strand
uugguugucugaagucuga

SEQ ID NO: 1186606 - RNA, 19 nt, Homo sapiens
  misc_RNA (1)...(19): siRNA sense strand
caagauccuuaaagaugag

SEQ ID NO: 1186607 - RNA, 19 nt, Homo sapiens
  misc_RNA (1)...(19): siRNA sense strand
caggaaauacaaugugaga

SEQ ID NO: 1186608 - RNA, 19 nt, Homo sapiens
  misc_RNA (1)...(19): siRNA sense strand
gagggaacagcacugcaaa

SEQ ID NO: 1186609 - RNA, 19 nt, Homo sapiens
  misc_RNA (1)...(19): siRNA sense strand
agaagaaacaccuacaaca

SEQ ID NO: 1186610 - RNA, 19 nt, Homo sapiens
  misc_RNA (1)...(19): siRNA sense strand
ugaaggaggagaaggacuu

SEQ ID NO: 1186611 - RNA, 19 nt, Homo sapiens
  misc_RNA (1)...(19): siRNA sense strand
gauuggaggcugaugaagu

SEQ ID NO: 1186612 - RNA, 19 nt, Homo sapiens
  misc_RNA (1)...(19): siRNA sense strand
gggaugauugacaacuaua

SEQ ID NO: 1186613 - RNA, 19 nt, Homo sapiens
  misc_RNA (1)...(19): siRNA sense strand
ccggguaacagaucuugua

SEQ ID NO: 1186614 - RNA, 19 nt, Homo sapiens
  misc_RNA (1)...(19): siRNA sense strand
ucgcugacaaggaucuuua

SEQ ID NO: 1186615 - RNA, 19 nt, Homo sapiens
  misc_RNA (1)...(19): siRNA sense strand
gcacauuugaggagaccaa

SEQ ID NO: 1186616 - RNA, 19 nt, Homo sapiens
  misc_RNA (1)...(19): siRNA sense strand
ugaaugcgguugguugucu

SEQ ID NO: 1186617 - RNA, 19 nt, Homo sapiens
  misc_RNA (1)...(19): siRNA sense strand
ccucagugaagaacuauga

SEQ ID NO: 1186618 - RNA, 19 nt, Homo sapiens
  misc_RNA (1)...(19): siRNA sense strand
ucagugaugcgguuaagug

SEQ ID NO: 1186619 - RNA, 19 nt, Homo sapiens
  misc_RNA (1)...(19): siRNA sense strand
gggaagaacggaguaacga

SEQ ID NO: 1186620 - RNA, 19 nt, Homo sapiens
  misc_RNA (1)...(19): siRNA sense strand
cagaagcugagcacauuug

SEQ ID NO: 1186621 - RNA, 19 nt, Homo sapiens
  misc_RNA (1)...(19): siRNA sense strand
gcgguugguugucugaagu

SEQ ID NO: 1186622 - RNA, 19 nt, Homo sapiens
  misc_RNA (1)...(19): siRNA sense strand
gaagucugaggucaagaug

SEQ ID NO: 1186623 - RNA, 19 nt, Homo sapiens
  misc_RNA (1)...(19): siRNA sense strand
aagagaacaagauccuuaa

SEQ ID NO: 1186624 - RNA, 19 nt, Homo sapiens
  misc_RNA (1)...(19): siRNA sense strand
gaucacgccaccaucuuca

SEQ ID NO: 1186625 - RNA, 19 nt, Homo sapiens
  misc_RNA (1)...(19): siRNA sense strand
agaaggagcgagccgagaa

SEQ ID NO: 1186626 - RNA, 19 nt, Homo sapiens
  misc_RNA (1)...(19): siRNA sense strand
ggagaccgagacaaagaga

SEQ ID NO: 1186627 - RNA, 19 nt, Homo sapiens
  misc_RNA (1)...(19): siRNA sense strand
ucauggagcagcugaagga

SEQ ID NO: 1186628 - RNA, 19 nt, Homo sapiens
  misc_RNA (1)...(19): siRNA sense strand
gaaucagcauaaggcagaa

SEQ ID NO: 1186629 - RNA, 19 nt, Homo sapiens
  misc_RNA (1)...(19): siRNA sense strand
ggacaaggagguggaagag

SEQ ID NO: 1186630 - RNA, 19 nt, Homo sapiens
  misc_RNA (1)...(19): siRNA sense strand
gaaaacggagaaacaaaug

SEQ ID NO: 1186631 - RNA, 19 nt, Homo sapiens
  misc_RNA (1)...(19): siRNA sense strand
ccagauuggaggcugauga

SEQ ID NO: 1186632 - RNA, 19 nt, Homo sapiens
  misc_RNA (1)...(19): siRNA sense strand
ggagacaucuuccgagaaa

SEQ ID NO: 1186633 - RNA, 19 nt, Homo sapiens
  misc_RNA (1)...(19): siRNA sense strand
gaaagagccugucaucagu

SEQ ID NO: 1186634 - RNA, 19 nt, Homo sapiens
  misc_RNA (1)...(19): siRNA sense strand
ggagaagucugcaagaugu

SEQ ID NO: 1186635 - RNA, 19 nt, Homo sapiens
  misc_RNA (1)...(19): siRNA sense strand
ccucagagcuguucaggaa

SEQ ID NO: 1186636 - RNA, 19 nt, Homo sapiens
  misc_RNA (1)...(19): siRNA sense strand
gcgauggacuucacagauu

SEQ ID NO: 1186637 - RNA, 19 nt, Homo sapiens
  misc_RNA (1)...(19): siRNA sense strand
gcucaacccucuccuacuu

SEQ ID NO: 1186638 - RNA, 19 nt, Homo sapiens
  misc_RNA (1)...(19): siRNA sense strand
ucacugugcucaucaagaa

SEQ ID NO: 1186639 - RNA, 19 nt, Homo sapiens
  misc_RNA (1)...(19): siRNA sense strand
gagaaacggacucugauaa

SEQ ID NO: 1186640 - RNA, 19 nt, Homo sapiens
  misc_RNA (1)...(19): siRNA sense strand
gagaaacaggcgauaauuu

SEQ ID NO: 1186641 - RNA, 19 nt, Homo sapiens
  misc_RNA (1)...(19): siRNA sense strand
gaagcugccucccaucuca

SEQ ID NO: 1186642 - RNA, 19 nt, Homo sapiens
  misc_RNA (1)...(19): siRNA sense strand
ggaaagagccugucaucag

SEQ ID NO: 1186643 - RNA, 19 nt, Homo sapiens
  misc_RNA (1)...(19): siRNA sense strand
ccaccaacguguccuugua

SEQ ID NO: 1186644 - RNA, 19 nt, Homo sapiens
  misc_RNA (1)...(19): siRNA sense strand
ggaggaaaauuugacauua

SEQ ID NO: 1186645 - RNA, 19 nt, Homo sapiens
  misc_RNA (1)...(19): siRNA sense strand
caagaacaauaucgacuuc

SEQ ID NO: 1186646 - RNA, 19 nt, Homo sapiens
  misc_RNA (1)...(19): siRNA sense strand
ggauccagagcaugaauua

SEQ ID NO: 1186647 - RNA, 19 nt, Homo sapiens
  misc_RNA (1)...(19): siRNA sense strand
gaugacaaacuuucucaaa

SEQ ID NO: 1186648 - RNA, 19 nt, Homo sapiens
  misc_RNA (1)...(19): siRNA sense strand
caaagccgacauuaaagua

SEQ ID NO: 1186649 - RNA, 19 nt, Homo sapiens
  misc_RNA (1)...(19): siRNA sense strand
gcagugauguuuuccagua

SEQ ID NO: 1186650 - RNA, 19 nt, Homo sapiens
  misc_RNA (1)...(19): siRNA sense strand
agaauggagugaagaaguu

SEQ ID NO: 1186651 - RNA, 19 nt, Homo sapiens
  misc_RNA (1)...(19): siRNA sense strand
cgauggacuucacagauuu

SEQ ID NO: 1186652 - RNA, 19 nt, Homo sapiens
  misc_RNA (1)...(19): siRNA sense strand
gagccaaagccgacauuaa

SEQ ID NO: 1186653 - RNA, 19 nt, Homo sapiens
  misc_RNA (1)...(19): siRNA sense strand
gaauacuacuacaggaaga

SEQ ID NO: 1186654 - RNA, 19 nt, Homo sapiens
  misc_RNA (1)...(19): siRNA sense strand
gaaacggacucugauaaaa

SEQ ID NO: 1186655 - RNA, 19 nt, Homo sapiens
  misc_RNA (1)...(19): siRNA sense strand
aagaggagaucguggagaa

SEQ ID NO: 1186656 - RNA, 19 nt, Homo sapiens
  misc_RNA (1)...(19): siRNA sense strand
ucagauacgccaaguacua

SEQ ID NO: 1186657 - RNA, 19 nt, Homo sapiens
  misc_RNA (1)...(19): siRNA sense strand
gcuuugcucuggugaguga

SEQ ID NO: 1186658 - RNA, 19 nt, Homo sapiens
  misc_RNA (1)...(19): siRNA sense strand
gcaguacaguggcuucaag

SEQ ID NO: 1186659 - RNA, 19 nt, Homo sapiens
  misc_RNA (1)...(19): siRNA sense strand
gguuuaaacaucacuugua

SEQ ID NO: 1186660 - RNA, 19 nt, Homo sapiens
  misc_RNA (1)...(19): siRNA sense strand
gaacagugccgaaaacuuc

SEQ ID NO: 1186661 - RNA, 19 nt, Homo sapiens
  misc_RNA (1)...(19): siRNA sense strand
cuucaagaguccuuacuga

SEQ ID NO: 1186662 - RNA, 19 nt, Homo sapiens
  misc_RNA (1)...(19): siRNA sense strand
gaagaagugcgaguccauu

SEQ ID NO: 1186663 - RNA, 19 nt, Homo sapiens
  misc_RNA (1)...(19): siRNA sense strand
gagaauggagugaagaagu

SEQ ID NO: 1186664 - RNA, 19 nt, Homo sapiens
  misc_RNA (1)...(19): siRNA sense strand
ccuguguggucaacgaaua

SEQ ID NO: 1186665 - RNA, 19 nt, Homo sapiens
  misc_RNA (1)...(19): siRNA sense strand
gccaaguacuacaaggaaa

SEQ ID NO: 1186666 - RNA, 19 nt, Homo sapiens
  misc_RNA (1)...(19): siRNA sense strand
aaacuucacugugcucauc

SEQ ID NO: 1186667 - RNA, 19 nt, Homo sapiens
  misc_RNA (1)...(19): siRNA sense strand
agaaacggacucugauaaa

SEQ ID NO: 1186668 - RNA, 19 nt, Homo sapiens
  misc_RNA (1)...(19): siRNA sense strand
agccaaagccgacauuaaa

SEQ ID NO: 1186669 - RNA, 19 nt, Homo sapiens
  misc_RNA (1)...(19): siRNA sense strand
gaagugcgaguccauugug

SEQ ID NO: 1186670 - RNA, 19 nt, Homo sapiens
  misc_RNA (1)...(19): siRNA sense strand
gcgguugugucccgaguau

SEQ ID NO: 1186671 - RNA, 19 nt, Homo sapiens
  misc_RNA (1)...(19): siRNA sense strand
ugcugucgcucccauauuu

SEQ ID NO: 1186672 - RNA, 19 nt, Homo sapiens
  misc_RNA (1)...(19): siRNA sense strand
ugagaaacggacucugaua

SEQ ID NO: 1186673 - RNA, 19 nt, Homo sapiens
  misc_RNA (1)...(19): siRNA sense strand
ucacugccgucccaaauac

SEQ ID NO: 1186674 - RNA, 19 nt, Homo sapiens
  misc_RNA (1)...(19): siRNA sense strand
uuucagauguggcaauuca

SEQ ID NO: 1186675 - RNA, 19 nt, Homo sapiens
  misc_RNA (1)...(19): siRNA sense strand
guuuaaacaucacuuguac

SEQ ID NO: 1186676 - RNA, 19 nt, Homo sapiens
  misc_RNA (1)...(19): siRNA sense strand
gcuggaggauccggaaaga

SEQ ID NO: 1186677 - RNA, 19 nt, Homo sapiens
  misc_RNA (1)...(19): siRNA sense strand
gggagaagucugcaagaug

SEQ ID NO: 1186678 - RNA, 19 nt, Homo sapiens
  misc_RNA (1)...(19): siRNA sense strand
guugagaaacggacucuga

SEQ ID NO: 1186679 - RNA, 19 nt, Homo sapiens
  misc_RNA (1)...(19): siRNA sense strand
ggauagcagaggugaaaga

SEQ ID NO: 1186680 - RNA, 19 nt, Homo sapiens
  misc_RNA (1)...(19): siRNA sense strand
gagcugugcugccggaaaa

SEQ ID NO: 1186681 - RNA, 19 nt, Homo sapiens
  misc_RNA (1)...(19): siRNA sense strand
cgagaaacaggcgauaauu

SEQ ID NO: 1186682 - RNA, 19 nt, Homo sapiens
  misc_RNA (1)...(19): siRNA sense strand
ggauggacccgcagagcaa

SEQ ID NO: 1186683 - RNA, 19 nt, Homo sapiens
  misc_RNA (1)...(19): siRNA sense strand
ccacaagacucagaaucca

SEQ ID NO: 1186684 - RNA, 19 nt, Homo sapiens
  misc_RNA (1)...(19): siRNA sense strand
aauccacagugucccauuu

SEQ ID NO: 1186685 - RNA, 19 nt, Homo sapiens
  misc_RNA (1)...(19): siRNA sense strand
gaggagaucguggagaaug

SEQ ID NO: 1186686 - RNA, 19 nt, Homo sapiens
  misc_RNA (1)...(19): siRNA sense strand
gugcucaucaagaacaaua

SEQ ID NO: 1186687 - RNA, 19 nt, Homo sapiens
  misc_RNA (1)...(19): siRNA sense strand
ggaacucuuucuucgugau

SEQ ID NO: 1186688 - RNA, 19 nt, Homo sapiens
  misc_RNA (1)...(19): siRNA sense strand
agaaguuggugcacagugu

SEQ ID NO: 1186689 - RNA, 19 nt, Homo sapiens
  misc_RNA (1)...(19): siRNA sense strand
gaggauccggaaagaguuu

SEQ ID NO: 1186690 - RNA, 19 nt, Homo sapiens
  misc_RNA (1)...(19): siRNA sense strand
uuauccagcugguugugua

SEQ ID NO: 1186691 - RNA, 19 nt, Homo sapiens
  misc_RNA (1)...(19): siRNA sense strand
gaucaucuuuuccuacguu

SEQ ID NO: 1186692 - RNA, 19 nt, Homo sapiens
  misc_RNA (1)...(19): siRNA sense strand
guacaguggcuucaagagu

SEQ ID NO: 1186693 - RNA, 19 nt, Homo sapiens
  misc_RNA (1)...(19): siRNA sense strand
cuacugggacugcaaccua

SEQ ID NO: 1186694 - RNA, 19 nt, Homo sapiens
  misc_RNA (1)...(19): siRNA sense strand
ucaguucugugcacaccaa

SEQ ID NO: 1186695 - RNA, 19 nt, Homo sapiens
  misc_RNA (1)...(19): siRNA sense strand
gaugaaucccacauuagga

SEQ ID NO: 1186696 - RNA, 19 nt, Homo sapiens
  misc_RNA (1)...(19): siRNA sense strand
ccaaagccgacauuaaagu

SEQ ID NO: 1186697 - RNA, 19 nt, Homo sapiens
  misc_RNA (1)...(19): siRNA sense strand
ggucaacgaauacuacuac

SEQ ID NO: 1186698 - RNA, 19 nt, Homo sapiens
  misc_RNA (1)...(19): siRNA sense strand
agacuacaccuucccuuug

SEQ ID NO: 1186699 - RNA, 19 nt, Homo sapiens
  misc_RNA (1)...(19): siRNA sense strand
cagacuacaccuucccuuu

SEQ ID NO: 1186700 - RNA, 19 nt, Homo sapiens
  misc_RNA (1)...(19): siRNA sense strand
ggaagaagugcgaguccau

SEQ ID NO: 1186701 - RNA, 19 nt, Homo sapiens
  misc_RNA (1)...(19): siRNA sense strand
acaacuacaccacgagaaa

SEQ ID NO: 1186702 - RNA, 19 nt, Homo sapiens
  misc_RNA (1)...(19): siRNA sense strand
caaacuuucucaaaacaga

SEQ ID NO: 1186703 - RNA, 19 nt, Homo sapiens
  misc_RNA (1)...(19): siRNA sense strand
ggagccaaagccgacauua

SEQ ID NO: 1186704 - RNA, 19 nt, Homo sapiens
  misc_RNA (1)...(19): siRNA sense strand
guucaucgacuuccucauc

SEQ ID NO: 1186705 - RNA, 19 nt, Homo sapiens
  misc_RNA (1)...(19): siRNA sense strand
ucaagaacaauaucgacuu

SEQ ID NO: 1186706 - RNA, 19 nt, Homo sapiens
  misc_RNA (1)...(19): siRNA sense strand
gacuacaccuucccuuugc

SEQ ID NO: 1186707 - RNA, 19 nt, Homo sapiens
  misc_RNA (1)...(19): siRNA sense strand
ggaggauccggaaagaguu

SEQ ID NO: 1186708 - RNA, 19 nt, Homo sapiens
  misc_RNA (1)...(19): siRNA sense strand
aagccgacauuaaaguaug

SEQ ID NO: 1186709 - RNA, 19 nt, Homo sapiens
  misc_RNA (1)...(19): siRNA sense strand
gcggaaagagccugucauc

SEQ ID NO: 1186710 - RNA, 19 nt, Homo sapiens
  misc_RNA (1)...(19): siRNA sense strand
agaaacaggcgauaauuuu

SEQ ID NO: 1186711 - RNA, 19 nt, Homo sapiens
  misc_RNA (1)...(19): siRNA sense strand
gaacucuuucuucgugaug

SEQ ID NO: 1186712 - RNA, 19 nt, Homo sapiens
  misc_RNA (1)...(19): siRNA sense strand
ggccugcucucuugaacag

SEQ ID NO: 1186713 - RNA, 19 nt, Homo sapiens
  misc_RNA (1)...(19): siRNA sense strand
gaauggagugaagaaguug

SEQ ID NO: 1186714 - RNA, 19 nt, Homo sapiens
  misc_RNA (1)...(19): siRNA sense strand
gcugucgcucccauauuua

SEQ ID NO: 1186715 - RNA, 19 nt, Homo sapiens
  misc_RNA (1)...(19): siRNA sense strand
gggccaagaagucccaaga

SEQ ID NO: 1186716 - RNA, 19 nt, Homo sapiens
  misc_RNA (1)...(19): siRNA sense strand
ucacucggauccagagcau

SEQ ID NO: 1186717 - RNA, 19 nt, Homo sapiens
  misc_RNA (1)...(19): siRNA sense strand
gacaaacuuucucaaaaca

SEQ ID NO: 1186718 - RNA, 19 nt, Homo sapiens
  misc_RNA (1)...(19): siRNA sense strand
guauguguccuuuguggau

SEQ ID NO: 1186719 - RNA, 19 nt, Homo sapiens
  misc_RNA (1)...(19): siRNA sense strand
aguaugagacgaacaaagu

SEQ ID NO: 1186720 - RNA, 19 nt, Homo sapiens
  misc_RNA (1)...(19): siRNA sense strand
ugacaaacuuucucaaaac

SEQ ID NO: 1186721 - RNA, 19 nt, Homo sapiens
  misc_RNA (1)...(19): siRNA sense strand
ggagcugugcugccggaaa

SEQ ID NO: 1186722 - RNA, 19 nt, Homo sapiens
  misc_RNA (1)...(19): siRNA sense strand
gauacgccaaguacuacaa

SEQ ID NO: 1186723 - RNA, 19 nt, Homo sapiens
  misc_RNA (1)...(19): siRNA sense strand
caucacugccgucccaaau

SEQ ID NO: 1186724 - RNA, 19 nt, Homo sapiens
  misc_RNA (1)...(19): siRNA sense strand
gaccguugguuccaucacu

SEQ ID NO: 1186725 - RNA, 19 nt, Homo sapiens
  misc_RNA (1)...(19): siRNA sense strand
ccgagaaacaggcgauaau

SEQ ID NO: 1186726 - RNA, 19 nt, Homo sapiens
  misc_RNA (1)...(19): siRNA sense strand
caagaccugcgauggacuu

SEQ ID NO: 1186727 - RNA, 19 nt, Homo sapiens
  misc_RNA (1)...(19): siRNA sense strand
cccaggacauggcugacuu

SEQ ID NO: 1186728 - RNA, 19 nt, Homo sapiens
  misc_RNA (1)...(19): siRNA sense strand
gaauccacagugucccauu

SEQ ID NO: 1186729 - RNA, 19 nt, Homo sapiens
  misc_RNA (1)...(19): siRNA sense strand
aagaguuuccgaagaguga

SEQ ID NO: 1186730 - RNA, 19 nt, Homo sapiens
  misc_RNA (1)...(19): siRNA sense strand
gauggacuucacagauuug

SEQ ID NO: 1186731 - RNA, 19 nt, Homo sapiens
  misc_RNA (1)...(19): siRNA sense strand
agacaucuuccgagaaaca

SEQ ID NO: 1186732 - RNA, 19 nt, Homo sapiens
  misc_RNA (1)...(19): siRNA sense strand
gaaagagccugucaucagu

SEQ ID NO: 1186733 - RNA, 19 nt, Homo sapiens
  misc_RNA (1)...(19): siRNA sense strand
ggaaagagccugucaucag

SEQ ID NO: 1186734 - RNA, 19 nt, Homo sapiens
  misc_RNA (1)...(19): siRNA sense strand
ggauccagagcaugaauua

SEQ ID NO: 1186735 - RNA, 19 nt, Homo sapiens
  misc_RNA (1)...(19): siRNA sense strand
gaugacaaacuuucucaaa

SEQ ID NO: 1186736 - RNA, 19 nt, Homo sapiens
  misc_RNA (1)...(19): siRNA sense strand
gcagugauguuuuccagua

SEQ ID NO: 1186737 - RNA, 19 nt, Homo sapiens
  misc_RNA (1)...(19): siRNA sense strand
agaauggagugaagaaguu

SEQ ID NO: 1186738 - RNA, 19 nt, Homo sapiens
  misc_RNA (1)...(19): siRNA sense strand
aagaggagaucguggagaa

SEQ ID NO: 1186739 - RNA, 19 nt, Homo sapiens
  misc_RNA (1)...(19): siRNA sense strand
gcuuugcucuggugaguga

SEQ ID NO: 1186740 - RNA, 19 nt, Homo sapiens
  misc_RNA (1)...(19): siRNA sense strand
gagaauggagugaagaagu

SEQ ID NO: 1186741 - RNA, 19 nt, Homo sapiens
  misc_RNA (1)...(19): siRNA sense strand
gcgguugugucccgaguau

SEQ ID NO: 1186742 - RNA, 19 nt, Homo sapiens
  misc_RNA (1)...(19): siRNA sense strand
ggauagcagaggugaaaga

SEQ ID NO: 1186743 - RNA, 19 nt, Homo sapiens
  misc_RNA (1)...(19): siRNA sense strand
ggauggacccgcagagcaa

SEQ ID NO: 1186744 - RNA, 19 nt, Homo sapiens
  misc_RNA (1)...(19): siRNA sense strand
gaggagaucguggagaaug

SEQ ID NO: 1186745 - RNA, 19 nt, Homo sapiens
  misc_RNA (1)...(19): siRNA sense strand
ggaacucuuucuucgugau

SEQ ID NO: 1186746 - RNA, 19 nt, Homo sapiens
  misc_RNA (1)...(19): siRNA sense strand
agaaguuggugcacagugu

SEQ ID NO: 1186747 - RNA, 19 nt, Homo sapiens
  misc_RNA (1)...(19): siRNA sense strand
gaucaucuuuuccuacguu

SEQ ID NO: 1186748 - RNA, 19 nt, Homo sapiens
  misc_RNA (1)...(19): siRNA sense strand
ucaguucugugcacaccaa

SEQ ID NO: 1186749 - RNA, 19 nt, Homo sapiens
  misc_RNA (1)...(19): siRNA sense strand
agacuacaccuucccuuug

SEQ ID NO: 1186750 - RNA, 19 nt, Homo sapiens
  misc_RNA (1)...(19): siRNA sense strand
cagacuacaccuucccuuu

SEQ ID NO: 1186751 - RNA, 19 nt, Homo sapiens
  misc_RNA (1)...(19): siRNA sense strand
caaacuuucucaaaacaga

SEQ ID NO: 1186752 - RNA, 19 nt, Homo sapiens
  misc_RNA (1)...(19): siRNA sense strand
gcggaaagagccugucauc

SEQ ID NO: 1186753 - RNA, 19 nt, Homo sapiens
  misc_RNA (1)...(19): siRNA sense strand
gaacucuuucuucgugaug

SEQ ID NO: 1186754 - RNA, 19 nt, Homo sapiens
  misc_RNA (1)...(19): siRNA sense strand
gacuacaccuucccuuugc

SEQ ID NO: 1186755 - RNA, 19 nt, Homo sapiens
  misc_RNA (1)...(19): siRNA sense strand
gaauggagugaagaaguug

SEQ ID NO: 1186756 - RNA, 19 nt, Homo sapiens
  misc_RNA (1)...(19): siRNA sense strand
ucacucggauccagagcau

SEQ ID NO: 1186757 - RNA, 19 nt, Homo sapiens
  misc_RNA (1)...(19): siRNA sense strand
aguaugagacgaacaaagu

SEQ ID NO: 1186758 - RNA, 19 nt, Homo sapiens
  misc_RNA (1)...(19): siRNA sense strand
gacaaacuuucucaaaaca

SEQ ID NO: 1186759 - RNA, 19 nt, Homo sapiens
  misc_RNA (1)...(19): siRNA sense strand
ugacaaacuuucucaaaac

SEQ ID NO: 1186760 - RNA, 19 nt, Homo sapiens
  misc_RNA (1)...(19): siRNA sense strand
aagagccugucaucaguuc

SEQ ID NO: 1186761 - RNA, 19 nt, Homo sapiens
  misc_RNA (1)...(19): siRNA sense strand
gccaagagcagcgguugug

SEQ ID NO: 1186762 - RNA, 19 nt, Homo sapiens
  misc_RNA (1)...(19): siRNA sense strand
acucggauccagagcauga

SEQ ID NO: 1186763 - RNA, 19 nt, Homo sapiens
  misc_RNA (1)...(19): siRNA sense strand
ggagaucguggagaaugga

SEQ ID NO: 1186764 - RNA, 19 nt, Homo sapiens
  misc_RNA (1)...(19): siRNA sense strand
uccagagcaugaauuaugg

SEQ ID NO: 1186765 - RNA, 19 nt, Homo sapiens
  misc_RNA (1)...(19): siRNA sense strand
gaagaaagccaaccuacaa

SEQ ID NO: 1186766 - RNA, 19 nt, Homo sapiens
  misc_RNA (1)...(19): siRNA sense strand
gaacaaagacuccuaucug

SEQ ID NO: 1186767 - RNA, 19 nt, Homo sapiens
  misc_RNA (1)...(19): siRNA sense strand
ggaggauggugccaauauu

SEQ ID NO: 1186768 - RNA, 19 nt, Homo sapiens
  misc_RNA (1)...(19): siRNA sense strand
ggacaaugcuggagcuucu

SEQ ID NO: 1186769 - RNA, 19 nt, Homo sapiens
  misc_RNA (1)...(19): siRNA sense strand
gggaggaggugcucaagau

SEQ ID NO: 1186770 - RNA, 19 nt, Homo sapiens
  misc_RNA (1)...(19): siRNA sense strand
caaaaggggugcugaugua

SEQ ID NO: 1186771 - RNA, 19 nt, Homo sapiens
  misc_RNA (1)...(19): siRNA sense strand
caagugugcugugaucaaa

SEQ ID NO: 1186772 - RNA, 19 nt, Homo sapiens
  misc_RNA (1)...(19): siRNA sense strand
guacuuccuuccugugauu

SEQ ID NO: 1186773 - RNA, 19 nt, Homo sapiens
  misc_RNA (1)...(19): siRNA sense strand
gcacagaugacuucaaugg

SEQ ID NO: 1186774 - RNA, 19 nt, Homo sapiens
  misc_RNA (1)...(19): siRNA sense strand
caugaagagugaaguguug

SEQ ID NO: 1186775 - RNA, 19 nt, Homo sapiens
  misc_RNA (1)...(19): siRNA sense strand
aacaaagacuccuaucuga

SEQ ID NO: 1186776 - RNA, 19 nt, Homo sapiens
  misc_RNA (1)...(19): siRNA sense strand
ggagaaagcgcccucuauc

SEQ ID NO: 1186777 - RNA, 19 nt, Homo sapiens
  misc_RNA (1)...(19): siRNA sense strand
ccacggagcaauacaguga

SEQ ID NO: 1186778 - RNA, 19 nt, Homo sapiens
  misc_RNA (1)...(19): siRNA sense strand
caaagacuccuaucugauc

SEQ ID NO: 1186779 - RNA, 19 nt, Homo sapiens
  misc_RNA (1)...(19): siRNA sense strand
gagaaagcgcccucuauca

SEQ ID NO: 1186780 - RNA, 19 nt, Homo sapiens
  misc_RNA (1)...(19): siRNA sense strand
ucaagaucaugaagaguga

SEQ ID NO: 1186781 - RNA, 19 nt, Homo sapiens
  misc_RNA (1)...(19): siRNA sense strand
cagauccacucccgaaaga

SEQ ID NO: 1186782 - RNA, 19 nt, Homo sapiens
  misc_RNA (1)...(19): siRNA sense strand
gaaagcgcccucuaucauc

SEQ ID NO: 1186783 - RNA, 19 nt, Homo sapiens
  misc_RNA (1)...(19): siRNA sense strand
aagccaaccuacaauacua

SEQ ID NO: 1186784 - RNA, 19 nt, Homo sapiens
  misc_RNA (1)...(19): siRNA sense strand
gaaagccaaccuacaauac

SEQ ID NO: 1186785 - RNA, 19 nt, Homo sapiens
  misc_RNA (1)...(19): siRNA sense strand
gggcaagugugcugugauc

SEQ ID NO: 1186786 - RNA, 19 nt, Homo sapiens
  misc_RNA (1)...(19): siRNA sense strand
caacacccaaguuaaggua

SEQ ID NO: 1186787 - RNA, 19 nt, Homo sapiens
  misc_RNA (1)...(19): siRNA sense strand
gaggauggugccaauauug

SEQ ID NO: 1186788 - RNA, 19 nt, Homo sapiens
  misc_RNA (1)...(19): siRNA sense strand
agaaagccaaccuacaaua

SEQ ID NO: 1186789 - RNA, 19 nt, Homo sapiens
  misc_RNA (1)...(19): siRNA sense strand
gcaagugugcugugaucaa

SEQ ID NO: 1186790 - RNA, 19 nt, Homo sapiens
  misc_RNA (1)...(19): siRNA sense strand
gggaugaggccgagcaaga

SEQ ID NO: 1186791 - RNA, 19 nt, Homo sapiens
  misc_RNA (1)...(19): siRNA sense strand
gaaccacaaggagaaguuu

SEQ ID NO: 1186792 - RNA, 19 nt, Homo sapiens
  misc_RNA (1)...(19): siRNA sense strand
ccacgaggacuacauggaa

SEQ ID NO: 1186793 - RNA, 19 nt, Homo sapiens
  misc_RNA (1)...(19): siRNA sense strand
uggagacgcugcccacaga

SEQ ID NO: 1186794 - RNA, 19 nt, Homo sapiens
  misc_RNA (1)...(19): siRNA sense strand
caagaagaaagccaaccua

SEQ ID NO: 1186795 - RNA, 19 nt, Homo sapiens
  misc_RNA (1)...(19): siRNA sense strand
cugcacagaugacuucaau

SEQ ID NO: 1186796 - RNA, 19 nt, Homo sapiens
  misc_RNA (1)...(19): siRNA sense strand
caaugaaccacaaggagaa

SEQ ID NO: 1186797 - RNA, 19 nt, Homo sapiens
  misc_RNA (1)...(19): siRNA sense strand
ggagcaauacagugacauu

SEQ ID NO: 1186798 - RNA, 19 nt, Homo sapiens
  misc_RNA (1)...(19): siRNA sense strand
ccaagcgcuuugacaguga

SEQ ID NO: 1186799 - RNA, 19 nt, Homo sapiens
  misc_RNA (1)...(19): siRNA sense strand
ccaugaaggacaagauaaa

SEQ ID NO: 1186800 - RNA, 19 nt, Homo sapiens
  misc_RNA (1)...(19): siRNA sense strand
acaaggagaaguuugagaa

SEQ ID NO: 1186801 - RNA, 19 nt, Homo sapiens
  misc_RNA (1)...(19): siRNA sense strand
ugaaggccauggagguaga

SEQ ID NO: 1186802 - RNA, 19 nt, Homo sapiens
  misc_RNA (1)...(19): siRNA sense strand
gauccacucccgaaagaug

SEQ ID NO: 1186803 - RNA, 19 nt, Homo sapiens
  misc_RNA (1)...(19): siRNA sense strand
cagcccaacacccaaguua

SEQ ID NO: 1186804 - RNA, 19 nt, Homo sapiens
  misc_RNA (1)...(19): siRNA sense strand
ccucuaucaucuucauuga

SEQ ID NO: 1186805 - RNA, 19 nt, Homo sapiens
  misc_RNA (1)...(19): siRNA sense strand
gaagagugaaguguugaga

SEQ ID NO: 1186806 - RNA, 19 nt, Homo sapiens
  misc_RNA (1)...(19): siRNA sense strand
agagugaaguguugagagu

SEQ ID NO: 1186807 - RNA, 19 nt, Homo sapiens
  misc_RNA (1)...(19): siRNA sense strand
gguggaggccauugucuug

SEQ ID NO: 1186808 - RNA, 19 nt, Homo sapiens
  misc_RNA (1)...(19): siRNA sense strand
gcagauccacucccgaaag

SEQ ID NO: 1186809 - RNA, 19 nt, Homo sapiens
  misc_RNA (1)...(19): siRNA sense strand
gaggaggugcucaagaugu

SEQ ID NO: 1186810 - RNA, 19 nt, Homo sapiens
  misc_RNA (1)...(19): siRNA sense strand
gaucaugaagagugaagug

SEQ ID NO: 1186811 - RNA, 19 nt, Homo sapiens
  misc_RNA (1)...(19): siRNA sense strand
ggugaaggccauggaggua

SEQ ID NO: 1186812 - RNA, 19 nt, Homo sapiens
  misc_RNA (1)...(19): siRNA sense strand
agaaagcgcccucuaucau

SEQ ID NO: 1186813 - RNA, 19 nt, Homo sapiens
  misc_RNA (1)...(19): siRNA sense strand
guaauugcagccacaaaca

SEQ ID NO: 1186814 - RNA, 19 nt, Homo sapiens
  misc_RNA (1)...(19): siRNA sense strand
gccaugaaggacaagauaa

SEQ ID NO: 1186815 - RNA, 19 nt, Homo sapiens
  misc_RNA (1)...(19): siRNA sense strand
guccugacgugaacuacga

SEQ ID NO: 1186816 - RNA, 19 nt, Homo sapiens
  misc_RNA (1)...(19): siRNA sense strand
ugccguaccuugucuccaa

SEQ ID NO: 1186817 - RNA, 19 nt, Homo sapiens
  misc_RNA (1)...(19): siRNA sense strand
gaacagugagaaaaucaaa

SEQ ID NO: 1186818 - RNA, 19 nt, Homo sapiens
  misc_RNA (1)...(19): siRNA sense strand
aaagcgcccucuaucaucu

SEQ ID NO: 1186819 - RNA, 19 nt, Homo sapiens
  misc_RNA (1)...(19): siRNA sense strand
agaggaggauggugccaau

SEQ ID NO: 1186820 - RNA, 19 nt, Homo sapiens
  misc_RNA (1)...(19): siRNA sense strand
aaucugcugccgaauauug

SEQ ID NO: 1186821 - RNA, 19 nt, Homo sapiens
  misc_RNA (1)...(19): siRNA sense strand
ggaugaggccgagcaagau

SEQ ID NO: 1186822 - RNA, 19 nt, Homo sapiens
  misc_RNA (1)...(19): siRNA sense strand
gggccagaaucaugcagau

SEQ ID NO: 1186823 - RNA, 19 nt, Homo sapiens
  misc_RNA (1)...(19): siRNA sense strand
cacccaaguuaagguaauu

SEQ ID NO: 1186824 - RNA, 19 nt, Homo sapiens
  misc_RNA (1)...(19): siRNA sense strand
gauguucauuggagauggu

SEQ ID NO: 1186825 - RNA, 19 nt, Homo sapiens
  misc_RNA (1)...(19): siRNA sense strand
ggaggaggugcucaagaug

SEQ ID NO: 1186826 - RNA, 19 nt, Homo sapiens
  misc_RNA (1)...(19): siRNA sense strand
ccuggugggugugaacaaa

SEQ ID NO: 1186827 - RNA, 19 nt, Homo sapiens
  misc_RNA (1)...(19): siRNA sense strand
gcccaacacccaaguuaag

SEQ ID NO: 1186828 - RNA, 19 nt, Homo sapiens
  misc_RNA (1)...(19): siRNA sense strand
gaugaggccgagcaagaug

SEQ ID NO: 1186829 - RNA, 19 nt, Homo sapiens
  misc_RNA (1)...(19): siRNA sense strand
uggagauggugccaagcua

SEQ ID NO: 1186830 - RNA, 19 nt, Homo sapiens
  misc_RNA (1)...(19): siRNA sense strand
acacccaaguuaagguaau

SEQ ID NO: 1186831 - RNA, 19 nt, Homo sapiens
  misc_RNA (1)...(19): siRNA sense strand
gguggaugcugaaaagcua

SEQ ID NO: 1186832 - RNA, 19 nt, Homo sapiens
  misc_RNA (1)...(19): siRNA sense strand
caaacaggguggacauccu

SEQ ID NO: 1186833 - RNA, 19 nt, Homo sapiens
  misc_RNA (1)...(19): siRNA sense strand
gcuaguccgggaugccuuu

SEQ ID NO: 1186834 - RNA, 19 nt, Homo sapiens
  misc_RNA (1)...(19): siRNA sense strand
agugaaguguugagaguca

SEQ ID NO: 1186835 - RNA, 19 nt, Homo sapiens
  misc_RNA (1)...(19): siRNA sense strand
agacgcugcccacagagua

SEQ ID NO: 1186836 - RNA, 19 nt, Homo sapiens
  misc_RNA (1)...(19): siRNA sense strand
gcagauguucauuggagau

SEQ ID NO: 1186837 - RNA, 19 nt, Homo sapiens
  misc_RNA (1)...(19): siRNA sense strand
gugagaaaaucaaagugaa

SEQ ID NO: 1186838 - RNA, 19 nt, Homo sapiens
  misc_RNA (1)...(19): siRNA sense strand
cacggcugcuggacaguga

SEQ ID NO: 1186839 - RNA, 19 nt, Homo sapiens
  misc_RNA (1)...(19): siRNA sense strand
cuacacgacagacguacuu

SEQ ID NO: 1186840 - RNA, 19 nt, Homo sapiens
  misc_RNA (1)...(19): siRNA sense strand
gaggaggauggugccaaua

SEQ ID NO: 1186841 - RNA, 19 nt, Homo sapiens
  misc_RNA (1)...(19): siRNA sense strand
aaaucaaagugaacaagac

SEQ ID NO: 1186842 - RNA, 19 nt, Homo sapiens
  misc_RNA (1)...(19): siRNA sense strand
ugacucggcaggagaagau

SEQ ID NO: 1186843 - RNA, 19 nt, Homo sapiens
  misc_RNA (1)...(19): siRNA sense strand
gguaauugcagccacaaac

SEQ ID NO: 1186844 - RNA, 19 nt, Homo sapiens
  misc_RNA (1)...(19): siRNA sense strand
uccaagccaugaaggacaa

SEQ ID NO: 1186845 - RNA, 19 nt, Homo sapiens
  misc_RNA (1)...(19): siRNA sense strand
acaagacccugccguaccu

SEQ ID NO: 1186846 - RNA, 19 nt, Homo sapiens
  misc_RNA (1)...(19): siRNA sense strand
agaagaaagccaaccuaca

SEQ ID NO: 1186847 - RNA, 19 nt, Homo sapiens
  misc_RNA (1)...(19): siRNA sense strand
ccagaaucaugcagaucca

SEQ ID NO: 1186848 - RNA, 19 nt, Homo sapiens
  misc_RNA (1)...(19): siRNA sense strand
gagauggugccaagcuagu

SEQ ID NO: 1186849 - RNA, 19 nt, Homo sapiens
  misc_RNA (1)...(19): siRNA sense strand
acaaagacuccuaucugau

SEQ ID NO: 1186850 - RNA, 19 nt, Homo sapiens
  misc_RNA (1)...(19): siRNA sense strand
ucaugaagagugaaguguu

SEQ ID NO: 1186851 - RNA, 19 nt, Homo sapiens
  misc_RNA (1)...(19): siRNA sense strand
uaaaagagaacagugagaa

SEQ ID NO: 1186852 - RNA, 19 nt, Homo sapiens
  misc_RNA (1)...(19): siRNA sense strand
ugaacaaagacuccuaucu

SEQ ID NO: 1186853 - RNA, 19 nt, Homo sapiens
  misc_RNA (1)...(19): siRNA sense strand
gaggugcaggccaagaaga

SEQ ID NO: 1186854 - RNA, 19 nt, Homo sapiens
  misc_RNA (1)...(19): siRNA sense strand
uguugagagucacccauga

SEQ ID NO: 1186855 - RNA, 19 nt, Homo sapiens
  misc_RNA (1)...(19): siRNA sense strand
ccagaggaagggcaagugu

SEQ ID NO: 1186856 - RNA, 19 nt, Homo sapiens
  misc_RNA (1)...(19): siRNA sense strand
ugaaccacaaggagaaguu

SEQ ID NO: 1186857 - RNA, 19 nt, Homo sapiens
  misc_RNA (1)...(19): siRNA sense strand
uggugggugugaacaaaga

SEQ ID NO: 1186858 - RNA, 19 nt, Homo sapiens
  misc_RNA (1)...(19): siRNA sense strand
ccucuacacgacagacgua

SEQ ID NO: 1186859 - RNA, 19 nt, Homo sapiens
  misc_RNA (1)...(19): siRNA sense strand
ccacaagaccuucaaguuu

SEQ ID NO: 1186860 - RNA, 19 nt, Homo sapiens
  misc_RNA (1)...(19): siRNA sense strand
cacaagaccuucaaguuug

SEQ ID NO: 1186861 - RNA, 19 nt, Homo sapiens
  misc_RNA (1)...(19): siRNA sense strand
cagacucgcuguccacuuu

SEQ ID NO: 1186862 - RNA, 19 nt, Homo sapiens
  misc_RNA (1)...(19): siRNA sense strand
uaaaucagaugaagaagag

SEQ ID NO: 1186863 - RNA, 19 nt, Homo sapiens
  misc_RNA (1)...(19): siRNA sense strand
ugacaauucugcugagaug

SEQ ID NO: 1186864 - RNA, 19 nt, Homo sapiens
  misc_RNA (1)...(19): siRNA sense strand
gccaggagccggcagauuu

SEQ ID NO: 1186865 - RNA, 19 nt, Homo sapiens
  misc_RNA (1)...(19): siRNA sense strand
acacagcaaugggaacaua

SEQ ID NO: 1186866 - RNA, 19 nt, Homo sapiens
  misc_RNA (1)...(19): siRNA sense strand
gaugaaaugggucaacaaa

SEQ ID NO: 1186867 - RNA, 19 nt, Homo sapiens
  misc_RNA (1)...(19): siRNA sense strand
gcuguucuuugacaaguuu

SEQ ID NO: 1186868 - RNA, 19 nt, Homo sapiens
  misc_RNA (1)...(19): siRNA sense strand
caaagaaucaggcaaugga

SEQ ID NO: 1186869 - RNA, 19 nt, Homo sapiens
  misc_RNA (1)...(19): siRNA sense strand
ccaaugcuuccaacaauuu

SEQ ID NO: 1186870 - RNA, 19 nt, Homo sapiens
  misc_RNA (1)...(19): siRNA sense strand
gguggacucuggaaaguuc

SEQ ID NO: 1186871 - RNA, 19 nt, Homo sapiens
  misc_RNA (1)...(19): siRNA sense strand
caccaaugcuuccaacaau

SEQ ID NO: 1186872 - RNA, 19 nt, Homo sapiens
  misc_RNA (1)...(19): siRNA sense strand
guaaaucagaugaagaaga

SEQ ID NO: 1186873 - RNA, 19 nt, Homo sapiens
  misc_RNA (1)...(19): siRNA sense strand
ccagagggauggucaaggu

SEQ ID NO: 1186874 - RNA, 19 nt, Homo sapiens
  misc_RNA (1)...(19): siRNA sense strand
acaacgagauucugagcaa

SEQ ID NO: 1186875 - RNA, 19 nt, Homo sapiens
  misc_RNA (1)...(19): siRNA sense strand
ggcaauggacauaauauau

SEQ ID NO: 1186876 - RNA, 19 nt, Homo sapiens
  misc_RNA (1)...(19): siRNA sense strand
gaacuuuccggaaugacaa

SEQ ID NO: 1186877 - RNA, 19 nt, Homo sapiens
  misc_RNA (1)...(19): siRNA sense strand
ccacaaagaaucaggcaau

SEQ ID NO: 1186878 - RNA, 19 nt, Homo sapiens
  misc_RNA (1)...(19): siRNA sense strand
gcugagaugugccggaagu

SEQ ID NO: 1186879 - RNA, 19 nt, Homo sapiens
  misc_RNA (1)...(19): siRNA sense strand
gcgcuugggucuccuacga

SEQ ID NO: 1186880 - RNA, 19 nt, Homo sapiens
  misc_RNA (1)...(19): siRNA sense strand
gcauggacaggguguguuu

SEQ ID NO: 1186881 - RNA, 19 nt, Homo sapiens
  misc_RNA (1)...(19): siRNA sense strand
ugagaucgauguggucaga

SEQ ID NO: 1186882 - RNA, 19 nt, Homo sapiens
  misc_RNA (1)...(19): siRNA sense strand
guugguggcugugcugauu

SEQ ID NO: 1186883 - RNA, 19 nt, Homo sapiens
  misc_RNA (1)...(19): siRNA sense strand
gcucacaacgagauucuga

SEQ ID NO: 1186884 - RNA, 19 nt, Homo sapiens
  misc_RNA (1)...(19): siRNA sense strand
augcaaugcugaugaaaug

SEQ ID NO: 1186885 - RNA, 19 nt, Homo sapiens
  misc_RNA (1)...(19): siRNA sense strand
gaaucaggcaauggacaua

SEQ ID NO: 1186886 - RNA, 19 nt, Homo sapiens
  misc_RNA (1)...(19): siRNA sense strand
gcagcuggaccucacgaaa

SEQ ID NO: 1186887 - RNA, 19 nt, Homo sapiens
  misc_RNA (1)...(19): siRNA sense strand
gcucugccguguccuugga

SEQ ID NO: 1186888 - RNA, 19 nt, Homo sapiens
  misc_RNA (1)...(19): siRNA sense strand
gcaaccaucaaacuucaug

SEQ ID NO: 1186889 - RNA, 19 nt, Homo sapiens
  misc_RNA (1)...(19): siRNA sense strand
uguaugcaaugcugaugaa

SEQ ID NO: 1186890 - RNA, 19 nt, Homo sapiens
  misc_RNA (1)...(19): siRNA sense strand
gcacacagcaaugggaaca

SEQ ID NO: 1186891 - RNA, 19 nt, Homo sapiens
  misc_RNA (1)...(19): siRNA sense strand
gugcaaaccaggaacuuuc

SEQ ID NO: 1186892 - RNA, 19 nt, Homo sapiens
  misc_RNA (1)...(19): siRNA sense strand
gagggauggucaaggucaa

SEQ ID NO: 1186893 - RNA, 19 nt, Homo sapiens
  misc_RNA (1)...(19): siRNA sense strand
gggaugccuuguaugcaau

SEQ ID NO: 1186894 - RNA, 19 nt, Homo sapiens
  misc_RNA (1)...(19): siRNA sense strand
gguugugacuuugguuguu

SEQ ID NO: 1186895 - RNA, 19 nt, Homo sapiens
  misc_RNA (1)...(19): siRNA sense strand
ucaggcaauggacauaaua

SEQ ID NO: 1186896 - RNA, 19 nt, Homo sapiens
  misc_RNA (1)...(19): siRNA sense strand
cacaaagaaucaggcaaug

SEQ ID NO: 1186897 - RNA, 19 nt, Homo sapiens
  misc_RNA (1)...(19): siRNA sense strand
ggagaggauggaagagaga

SEQ ID NO: 1186898 - RNA, 19 nt, Homo sapiens
  misc_RNA (1)...(19): siRNA sense strand
gcuguccacuuucgucucu

SEQ ID NO: 1186899 - RNA, 19 nt, Homo sapiens
  misc_RNA (1)...(19): siRNA sense strand
ugaaaugggucaacaaaac

SEQ ID NO: 1186900 - RNA, 19 nt, Homo sapiens
  misc_RNA (1)...(19): siRNA sense strand
cugagacucugaugcuguu

SEQ ID NO: 1186901 - RNA, 19 nt, Homo sapiens
  misc_RNA (1)...(19): siRNA sense strand
gauguggucagagcuggua

SEQ ID NO: 1186902 - RNA, 19 nt, Homo sapiens
  misc_RNA (1)...(19): siRNA sense strand
cugcaaccaucaaacuuca

SEQ ID NO: 1186903 - RNA, 19 nt, Homo sapiens
  misc_RNA (1)...(19): siRNA sense strand
uggucaaggucaaggauug

SEQ ID NO: 1186904 - RNA, 19 nt, Homo sapiens
  misc_RNA (1)...(19): siRNA sense strand
ccaggagccggcagauuug

SEQ ID NO: 1186905 - RNA, 19 nt, Homo sapiens
  misc_RNA (1)...(19): siRNA sense strand
gcugcaaccaucaaacuuc

SEQ ID NO: 1186906 - RNA, 19 nt, Homo sapiens
  misc_RNA (1)...(19): siRNA sense strand
acaccaaugcuuccaacaa

SEQ ID NO: 1186907 - RNA, 19 nt, Homo sapiens
  misc_RNA (1)...(19): siRNA sense strand
ccacugagacucugaugcu

SEQ ID NO: 1186908 - RNA, 19 nt, Homo sapiens
  misc_RNA (1)...(19): siRNA sense strand
ucucugagcagcaaaugga

SEQ ID NO: 1186909 - RNA, 19 nt, Homo sapiens
  misc_RNA (1)...(19): siRNA sense strand
aggcaauggacauaauaua

SEQ ID NO: 1186910 - RNA, 19 nt, Homo sapiens
  misc_RNA (1)...(19): siRNA sense strand
gcuuguaaaucagaugaag

SEQ ID NO: 1186911 - RNA, 19 nt, Homo sapiens
  misc_RNA (1)...(19): siRNA sense strand
accaaugcuuccaacaauu

SEQ ID NO: 1186912 - RNA, 19 nt, Homo sapiens
  misc_RNA (1)...(19): siRNA sense strand
cugauugucuguuguugca

SEQ ID NO: 1186913 - RNA, 19 nt, Homo sapiens
  misc_RNA (1)...(19): siRNA sense strand
ccaggaacacagcauguca

SEQ ID NO: 1186914 - RNA, 19 nt, Homo sapiens
  misc_RNA (1)...(19): siRNA sense strand
ggggaugccuuguaugcaa

SEQ ID NO: 1186915 - RNA, 19 nt, Homo sapiens
  misc_RNA (1)...(19): siRNA sense strand
agacucugaugcuguucuu

SEQ ID NO: 1186916 - RNA, 19 nt, Homo sapiens
  misc_RNA (1)...(19): siRNA sense strand
gaccaggaacacagcaugu

SEQ ID NO: 1186917 - RNA, 19 nt, Homo sapiens
  misc_RNA (1)...(19): siRNA sense strand
guugugacuuugguuguuc

SEQ ID NO: 1186918 - RNA, 19 nt, Homo sapiens
  misc_RNA (1)...(19): siRNA sense strand
cacagcaugucagugcaaa

SEQ ID NO: 1186919 - RNA, 19 nt, Homo sapiens
  misc_RNA (1)...(19): siRNA sense strand
cagcuuguaaaucagauga

SEQ ID NO: 1186920 - RNA, 19 nt, Homo sapiens
  misc_RNA (1)...(19): siRNA sense strand
cugaugcuguucuuugaca

SEQ ID NO: 1186921 - RNA, 19 nt, Homo sapiens
  misc_RNA (1)...(19): siRNA sense strand
gcucagcugcaaccaucaa

SEQ ID NO: 1186922 - RNA, 19 nt, Homo sapiens
  misc_RNA (1)...(19): siRNA sense strand
gccaccaccagcuagagua

SEQ ID NO: 1186923 - RNA, 19 nt, Homo sapiens
  misc_RNA (1)...(19): siRNA sense strand
ggagccggcagauuugaca

SEQ ID NO: 1186924 - RNA, 19 nt, Homo sapiens
  misc_RNA (1)...(19): siRNA sense strand
gaugaagaagagagaaguc

SEQ ID NO: 1186925 - RNA, 19 nt, Homo sapiens
  misc_RNA (1)...(19): siRNA sense strand
gauggaagagagacaugca

SEQ ID NO: 1186926 - RNA, 19 nt, Homo sapiens
  misc_RNA (1)...(19): siRNA sense strand
uguccacuuucgucucuga

SEQ ID NO: 1186927 - RNA, 19 nt, Homo sapiens
  misc_RNA (1)...(19): siRNA sense strand
ugauuuugguugugacuuu

SEQ ID NO: 1186928 - RNA, 19 nt, Homo sapiens
  misc_RNA (1)...(19): siRNA sense strand
uccacaagaccuucaaguu

SEQ ID NO: 1186929 - RNA, 19 nt, Homo sapiens
  misc_RNA (1)...(19): siRNA sense strand
acaauucugcugagaugug

SEQ ID NO: 1186930 - RNA, 19 nt, Homo sapiens
  misc_RNA (1)...(19): siRNA sense strand
ucaaacuucaugaucaauc

SEQ ID NO: 1186931 - RNA, 19 nt, Homo sapiens
  misc_RNA (1)...(19): siRNA sense strand
caacauaccucaacuucug

SEQ ID NO: 1186932 - RNA, 19 nt, Homo sapiens
  misc_RNA (1)...(19): siRNA sense strand
gagcaaagccgucgagaug

SEQ ID NO: 1186933 - RNA, 19 nt, Homo sapiens
  misc_RNA (1)...(19): siRNA sense strand
gagagcaaguucuacaaga

SEQ ID NO: 1186934 - RNA, 19 nt, Homo sapiens
  misc_RNA (1)...(19): siRNA sense strand
caacuucuguucccgcaaa

SEQ ID NO: 1186935 - RNA, 19 nt, Homo sapiens
  misc_RNA (1)...(19): siRNA sense strand
agacaagugugccauuuga

SEQ ID NO: 1186936 - RNA, 19 nt, Homo sapiens
  misc_RNA (1)...(19): siRNA sense strand
ccaccaagcgccagaagua

SEQ ID NO: 1186937 - RNA, 19 nt, Homo sapiens
  misc_RNA (1)...(19): siRNA sense strand
gagaggaaggugaguauga

SEQ ID NO: 1186938 - RNA, 19 nt, Homo sapiens
  misc_RNA (1)...(19): siRNA sense strand
gaacggaucagcgagaaga

SEQ ID NO: 1186939 - RNA, 19 nt, Homo sapiens
  misc_RNA (1)...(19): siRNA sense strand
ccaucaagcuggagugugu

SEQ ID NO: 1186940 - RNA, 19 nt, Homo sapiens
  misc_RNA (1)...(19): siRNA sense strand
ucgaggaccuguucaacuu

SEQ ID NO: 1186941 - RNA, 19 nt, Homo sapiens
  misc_RNA (1)...(19): siRNA sense strand
gcuacgugcucauguacuu

SEQ ID NO: 1186942 - RNA, 19 nt, Homo sapiens
  misc_RNA (1)...(19): siRNA sense strand
cggcagggcuucuccuaug

SEQ ID NO: 1186943 - RNA, 19 nt, Homo sapiens
  misc_RNA (1)...(19): siRNA sense strand
cgacuacucuuaccuacgu

SEQ ID NO: 1186944 - RNA, 19 nt, Homo sapiens
  misc_RNA (1)...(19): siRNA sense strand
gcaaagccgucgagaugac

SEQ ID NO: 1186945 - RNA, 19 nt, Homo sapiens
  misc_RNA (1)...(19): siRNA sense strand
ccuccgaauucucaacaua

SEQ ID NO: 1186946 - RNA, 19 nt, Homo sapiens
  misc_RNA (1)...(19): siRNA sense strand
gcacaucgagagcaaguuc

SEQ ID NO: 1186947 - RNA, 19 nt, Homo sapiens
  misc_RNA (1)...(19): siRNA sense strand
gagcugagggcgacuacaa

SEQ ID NO: 1186948 - RNA, 19 nt, Homo sapiens
  misc_RNA (1)...(19): siRNA sense strand
gcucuuggccgaccagaug

SEQ ID NO: 1186949 - RNA, 19 nt, Homo sapiens
  misc_RNA (1)...(19): siRNA sense strand
acagacaagugugccauuu

SEQ ID NO: 1186950 - RNA, 19 nt, Homo sapiens
  misc_RNA (1)...(19): siRNA sense strand
acuggaacaugcugaaauu

SEQ ID NO: 1186951 - RNA, 19 nt, Homo sapiens
  misc_RNA (1)...(19): siRNA sense strand
gagcaaguucuacaagaug

SEQ ID NO: 1186952 - RNA, 19 nt, Homo sapiens
  misc_RNA (1)...(19): siRNA sense strand
gugaggaagucgccaucaa

SEQ ID NO: 1186953 - RNA, 19 nt, Homo sapiens
  misc_RNA (1)...(19): siRNA sense strand
ggcagggcuucuccuauga

SEQ ID NO: 1186954 - RNA, 19 nt, Homo sapiens
  misc_RNA (1)...(19): siRNA sense strand
uggagugugugaagacaaa

SEQ ID NO: 1186955 - RNA, 19 nt, Homo sapiens
  misc_RNA (1)...(19): siRNA sense strand
acacgcaccugggcauuga

SEQ ID NO: 1186956 - RNA, 19 nt, Homo sapiens
  misc_RNA (1)...(19): siRNA sense strand
gaucagccgcaucgaguau

SEQ ID NO: 1186957 - RNA, 19 nt, Homo sapiens
  misc_RNA (1)...(19): siRNA sense strand
ccaagcgccagaaguauga

SEQ ID NO: 1186958 - RNA, 19 nt, Homo sapiens
  misc_RNA (1)...(19): siRNA sense strand
cgacaagcccgacuacucu

SEQ ID NO: 1186959 - RNA, 19 nt, Homo sapiens
  misc_RNA (1)...(19): siRNA sense strand
gaucccagccucacagaca

SEQ ID NO: 1186960 - RNA, 19 nt, Homo sapiens
  misc_RNA (1)...(19): siRNA sense strand
agagcaaguucuacaagau

SEQ ID NO: 1186961 - RNA, 19 nt, Homo sapiens
  misc_RNA (1)...(19): siRNA sense strand
ccgcuacgcuuccaucaac

SEQ ID NO: 1186962 - RNA, 19 nt, Homo sapiens
  misc_RNA (1)...(19): siRNA sense strand
gagcggguccuucggagau

SEQ ID NO: 1186963 - RNA, 19 nt, Homo sapiens
  misc_RNA (1)...(19): siRNA sense strand
gggagaggaaggugaguau

SEQ ID NO: 1186964 - RNA, 19 nt, Homo sapiens
  misc_RNA (1)...(19): siRNA sense strand
gaggaccuguucaacuucu

SEQ ID NO: 1186965 - RNA, 19 nt, Homo sapiens
  misc_RNA (1)...(19): siRNA sense strand
gggcuucuccuaugacuac

SEQ ID NO: 1186966 - RNA, 19 nt, Homo sapiens
  misc_RNA (1)...(19): siRNA sense strand
cuaccugggugccaacauc

SEQ ID NO: 1186967 - RNA, 19 nt, Homo sapiens
  misc_RNA (1)...(19): siRNA sense strand
ucagccgcaucgaguauau

SEQ ID NO: 1186968 - RNA, 19 nt, Homo sapiens
  misc_RNA (1)...(19): siRNA sense strand
ugggcuacgugcucaugua

SEQ ID NO: 1186969 - RNA, 19 nt, Homo sapiens
  misc_RNA (1)...(19): siRNA sense strand
gcaaccuggucuacaucau

SEQ ID NO: 1186970 - RNA, 19 nt, Homo sapiens
  misc_RNA (1)...(19): siRNA sense strand
gcaccugggcauugagcaa

SEQ ID NO: 1186971 - RNA, 19 nt, Homo sapiens
  misc_RNA (1)...(19): siRNA sense strand
acaagcccgacuacucuua

SEQ ID NO: 1186972 - RNA, 19 nt, Homo sapiens
  misc_RNA (1)...(19): siRNA sense strand
caaccuggucuacaucauc

SEQ ID NO: 1186973 - RNA, 19 nt, Homo sapiens
  misc_RNA (1)...(19): siRNA sense strand
gggaucccguccaucaagu

SEQ ID NO: 1186974 - RNA, 19 nt, Homo sapiens
  misc_RNA (1)...(19): siRNA sense strand
gcgagaagaagaugucaac

SEQ ID NO: 1186975 - RNA, 19 nt, Homo sapiens
  misc_RNA (1)...(19): siRNA sense strand
gaucagcgagaagaagaug

SEQ ID NO: 1186976 - RNA, 19 nt, Homo sapiens
  misc_RNA (1)...(19): siRNA sense strand
uauauccacuccaagaacu

SEQ ID NO: 1186977 - RNA, 19 nt, Homo sapiens
  misc_RNA (1)...(19): siRNA sense strand
agcaaguucuacaagauga

SEQ ID NO: 1186978 - RNA, 19 nt, Homo sapiens
  misc_RNA (1)...(19): siRNA sense strand
gcccgacuacucuuaccua

SEQ ID NO: 1186979 - RNA, 19 nt, Homo sapiens
  misc_RNA (1)...(19): siRNA sense strand
cagacaagugugccauuug

SEQ ID NO: 1186980 - RNA, 19 nt, Homo sapiens
  misc_RNA (1)...(19): siRNA sense strand
gacuggaacaugcugaaau

SEQ ID NO: 1186981 - RNA, 19 nt, Homo sapiens
  misc_RNA (1)...(19): siRNA sense strand
acaacgugauggucaugga

SEQ ID NO: 1186982 - RNA, 19 nt, Homo sapiens
  misc_RNA (1)...(19): siRNA sense strand
uuaccuacgucagcucuuc

SEQ ID NO: 1186983 - RNA, 19 nt, Homo sapiens
  misc_RNA (1)...(19): siRNA sense strand
gcaaauucagccucaagac

SEQ ID NO: 1186984 - RNA, 19 nt, Homo sapiens
  misc_RNA (1)...(19): siRNA sense strand
agaggaaggugaguaugag

SEQ ID NO: 1186985 - RNA, 19 nt, Homo sapiens
  misc_RNA (1)...(19): siRNA sense strand
aaggcuaucccuccgaauu

SEQ ID NO: 1186986 - RNA, 19 nt, Homo sapiens
  misc_RNA (1)...(19): siRNA sense strand
caacacgcaccugggcauu

SEQ ID NO: 1186987 - RNA, 19 nt, Homo sapiens
  misc_RNA (1)...(19): siRNA sense strand
gaagggcaaccuggucuac

SEQ ID NO: 1186988 - RNA, 19 nt, Homo sapiens
  misc_RNA (1)...(19): siRNA sense strand
ccuaugacuacgucuuuga

SEQ ID NO: 1186989 - RNA, 19 nt, Homo sapiens
  misc_RNA (1)...(19): siRNA sense strand
ggaccuguucaacuucugu

SEQ ID NO: 1186990 - RNA, 19 nt, Homo sapiens
  misc_RNA (1)...(19): siRNA sense strand
ggagaggaaggugaguaug

SEQ ID NO: 1186991 - RNA, 19 nt, Homo sapiens
  misc_RNA (1)...(19): siRNA sense strand
gcuggagugugugaagaca

SEQ ID NO: 1186992 - RNA, 19 nt, Homo sapiens
  misc_RNA (1)...(19): siRNA sense strand
aagcuggagugugugaaga

SEQ ID NO: 1186993 - RNA, 19 nt, Homo sapiens
  misc_RNA (1)...(19): siRNA sense strand
caacauaccucaacuucug

SEQ ID NO: 1186994 - RNA, 19 nt, Homo sapiens
  misc_RNA (1)...(19): siRNA sense strand
gagcaaagccgucgagaug

SEQ ID NO: 1186995 - RNA, 19 nt, Homo sapiens
  misc_RNA (1)...(19): siRNA sense strand
gagagcaaguucuacaaga

SEQ ID NO: 1186996 - RNA, 19 nt, Homo sapiens
  misc_RNA (1)...(19): siRNA sense strand
caacuucuguucccgcaaa

SEQ ID NO: 1186997 - RNA, 19 nt, Homo sapiens
  misc_RNA (1)...(19): siRNA sense strand
agacaagugugccauuuga

SEQ ID NO: 1186998 - RNA, 19 nt, Homo sapiens
  misc_RNA (1)...(19): siRNA sense strand
ccaccaagcgccagaagua

SEQ ID NO: 1186999 - RNA, 19 nt, Homo sapiens
  misc_RNA (1)...(19): siRNA sense strand
gagaggaaggugaguauga

SEQ ID NO: 1187000 - RNA, 19 nt, Homo sapiens
  misc_RNA (1)...(19): siRNA sense strand
gaacggaucagcgagaaga

SEQ ID NO: 1187001 - RNA, 19 nt, Homo sapiens
  misc_RNA (1)...(19): siRNA sense strand
ccaucaagcuggagugugu

SEQ ID NO: 1187002 - RNA, 19 nt, Homo sapiens
  misc_RNA (1)...(19): siRNA sense strand
ucgaggaccuguucaacuu

SEQ ID NO: 1187003 - RNA, 19 nt, Homo sapiens
  misc_RNA (1)...(19): siRNA sense strand
gcuacgugcucauguacuu

SEQ ID NO: 1187004 - RNA, 19 nt, Homo sapiens
  misc_RNA (1)...(19): siRNA sense strand
cggcagggcuucuccuaug

SEQ ID NO: 1187005 - RNA, 19 nt, Homo sapiens
  misc_RNA (1)...(19): siRNA sense strand
cgacuacucuuaccuacgu

SEQ ID NO: 1187006 - RNA, 19 nt, Homo sapiens
  misc_RNA (1)...(19): siRNA sense strand
gcaaagccgucgagaugac

SEQ ID NO: 1187007 - RNA, 19 nt, Homo sapiens
  misc_RNA (1)...(19): siRNA sense strand
ccuccgaauucucaacaua

SEQ ID NO: 1187008 - RNA, 19 nt, Homo sapiens
  misc_RNA (1)...(19): siRNA sense strand
gcacaucgagagcaaguuc

SEQ ID NO: 1187009 - RNA, 19 nt, Homo sapiens
  misc_RNA (1)...(19): siRNA sense strand
gagcugagggcgacuacaa

SEQ ID NO: 1187010 - RNA, 19 nt, Homo sapiens
  misc_RNA (1)...(19): siRNA sense strand
gcucuuggccgaccagaug

SEQ ID NO: 1187011 - RNA, 19 nt, Homo sapiens
  misc_RNA (1)...(19): siRNA sense strand
acagacaagugugccauuu

SEQ ID NO: 1187012 - RNA, 19 nt, Homo sapiens
  misc_RNA (1)...(19): siRNA sense strand
acuggaacaugcugaaauu

SEQ ID NO: 1187013 - RNA, 19 nt, Homo sapiens
  misc_RNA (1)...(19): siRNA sense strand
gagcaaguucuacaagaug

SEQ ID NO: 1187014 - RNA, 19 nt, Homo sapiens
  misc_RNA (1)...(19): siRNA sense strand
gugaggaagucgccaucaa

SEQ ID NO: 1187015 - RNA, 19 nt, Homo sapiens
  misc_RNA (1)...(19): siRNA sense strand
ggcagggcuucuccuauga

SEQ ID NO: 1187016 - RNA, 19 nt, Homo sapiens
  misc_RNA (1)...(19): siRNA sense strand
uggagugugugaagacaaa

SEQ ID NO: 1187017 - RNA, 19 nt, Homo sapiens
  misc_RNA (1)...(19): siRNA sense strand
acacgcaccugggcauuga

SEQ ID NO: 1187018 - RNA, 19 nt, Homo sapiens
  misc_RNA (1)...(19): siRNA sense strand
gaucagccgcaucgaguau

SEQ ID NO: 1187019 - RNA, 19 nt, Homo sapiens
  misc_RNA (1)...(19): siRNA sense strand
ccaagcgccagaaguauga

SEQ ID NO: 1187020 - RNA, 19 nt, Homo sapiens
  misc_RNA (1)...(19): siRNA sense strand
cgacaagcccgacuacucu

SEQ ID NO: 1187021 - RNA, 19 nt, Homo sapiens
  misc_RNA (1)...(19): siRNA sense strand
gaucccagccucacagaca

SEQ ID NO: 1187022 - RNA, 19 nt, Homo sapiens
  misc_RNA (1)...(19): siRNA sense strand
agagcaaguucuacaagau

SEQ ID NO: 1187023 - RNA, 19 nt, Homo sapiens
  misc_RNA (1)...(19): siRNA sense strand
ccgcuacgcuuccaucaac

SEQ ID NO: 1187024 - RNA, 19 nt, Homo sapiens
  misc_RNA (1)...(19): siRNA sense strand
gagcggguccuucggagau

SEQ ID NO: 1187025 - RNA, 19 nt, Homo sapiens
  misc_RNA (1)...(19): siRNA sense strand
gggagaggaaggugaguau

SEQ ID NO: 1187026 - RNA, 19 nt, Homo sapiens
  misc_RNA (1)...(19): siRNA sense strand
gaggaccuguucaacuucu

SEQ ID NO: 1187027 - RNA, 19 nt, Homo sapiens
  misc_RNA (1)...(19): siRNA sense strand
gggcuucuccuaugacuac

SEQ ID NO: 1187028 - RNA, 19 nt, Homo sapiens
  misc_RNA (1)...(19): siRNA sense strand
cuaccugggugccaacauc

SEQ ID NO: 1187029 - RNA, 19 nt, Homo sapiens
  misc_RNA (1)...(19): siRNA sense strand
ucagccgcaucgaguauau

SEQ ID NO: 1187030 - RNA, 19 nt, Homo sapiens
  misc_RNA (1)...(19): siRNA sense strand
ugggcuacgugcucaugua

SEQ ID NO: 1187031 - RNA, 19 nt, Homo sapiens
  misc_RNA (1)...(19): siRNA sense strand
gcaaccuggucuacaucau

SEQ ID NO: 1187032 - RNA, 19 nt, Homo sapiens
  misc_RNA (1)...(19): siRNA sense strand
gcaccugggcauugagcaa

SEQ ID NO: 1187033 - RNA, 19 nt, Homo sapiens
  misc_RNA (1)...(19): siRNA sense strand
acaagcccgacuacucuua

SEQ ID NO: 1187034 - RNA, 19 nt, Homo sapiens
  misc_RNA (1)...(19): siRNA sense strand
caaccuggucuacaucauc

SEQ ID NO: 1187035 - RNA, 19 nt, Homo sapiens
  misc_RNA (1)...(19): siRNA sense strand
gggaucccguccaucaagu

SEQ ID NO: 1187036 - RNA, 19 nt, Homo sapiens
  misc_RNA (1)...(19): siRNA sense strand
gcgagaagaagaugucaac

SEQ ID NO: 1187037 - RNA, 19 nt, Homo sapiens
  misc_RNA (1)...(19): siRNA sense strand
gaucagcgagaagaagaug

SEQ ID NO: 1187038 - RNA, 19 nt, Homo sapiens
  misc_RNA (1)...(19): siRNA sense strand
uauauccacuccaagaacu

SEQ ID NO: 1187039 - RNA, 19 nt, Homo sapiens
  misc_RNA (1)...(19): siRNA sense strand
agcaaguucuacaagauga

SEQ ID NO: 1187040 - RNA, 19 nt, Homo sapiens
  misc_RNA (1)...(19): siRNA sense strand
gcccgacuacucuuaccua

SEQ ID NO: 1187041 - RNA, 19 nt, Homo sapiens
  misc_RNA (1)...(19): siRNA sense strand
cagacaagugugccauuug

SEQ ID NO: 1187042 - RNA, 19 nt, Homo sapiens
  misc_RNA (1)...(19): siRNA sense strand
gacuggaacaugcugaaau

SEQ ID NO: 1187043 - RNA, 19 nt, Homo sapiens
  misc_RNA (1)...(19): siRNA sense strand
acaacgugauggucaugga

SEQ ID NO: 1187044 - RNA, 19 nt, Homo sapiens
  misc_RNA (1)...(19): siRNA sense strand
uuaccuacgucagcucuuc

SEQ ID NO: 1187045 - RNA, 19 nt, Homo sapiens
  misc_RNA (1)...(19): siRNA sense strand
gcaaauucagccucaagac

SEQ ID NO: 1187046 - RNA, 19 nt, Homo sapiens
  misc_RNA (1)...(19): siRNA sense strand
agaggaaggugaguaugag

SEQ ID NO: 1187047 - RNA, 19 nt, Homo sapiens
  misc_RNA (1)...(19): siRNA sense strand
aaggcuaucccuccgaauu

SEQ ID NO: 1187048 - RNA, 19 nt, Homo sapiens
  misc_RNA (1)...(19): siRNA sense strand
caacacgcaccugggcauu

SEQ ID NO: 1187049 - RNA, 19 nt, Homo sapiens
  misc_RNA (1)...(19): siRNA sense strand
gaagggcaaccuggucuac

SEQ ID NO: 1187050 - RNA, 19 nt, Homo sapiens
  misc_RNA (1)...(19): siRNA sense strand
ccuaugacuacgucuuuga

SEQ ID NO: 1187051 - RNA, 19 nt, Homo sapiens
  misc_RNA (1)...(19): siRNA sense strand
ggaccuguucaacuucugu

SEQ ID NO: 1187052 - RNA, 19 nt, Homo sapiens
  misc_RNA (1)...(19): siRNA sense strand
ggagaggaaggugaguaug

SEQ ID NO: 1187053 - RNA, 19 nt, Homo sapiens
  misc_RNA (1)...(19): siRNA sense strand
gcuggagugugugaagaca

SEQ ID NO: 1187054 - RNA, 19 nt, Homo sapiens
  misc_RNA (1)...(19): siRNA sense strand
aagcuggagugugugaaga

SEQ ID NO: 1187055 - RNA, 19 nt, Homo sapiens
  misc_RNA (1)...(19): siRNA sense strand
gagcugauauuucuaugua

SEQ ID NO: 1187056 - RNA, 19 nt, Homo sapiens
  misc_RNA (1)...(19): siRNA sense strand
gcaaguggcaucugaauuu

SEQ ID NO: 1187057 - RNA, 19 nt, Homo sapiens
  misc_RNA (1)...(19): siRNA sense strand
gaauauagccguucuggaa

SEQ ID NO: 1187058 - RNA, 19 nt, Homo sapiens
  misc_RNA (1)...(19): siRNA sense strand
gcaguuccaucuccuauug

SEQ ID NO: 1187059 - RNA, 19 nt, Homo sapiens
  misc_RNA (1)...(19): siRNA sense strand
ggaaaucccacuaggaauu

SEQ ID NO: 1187060 - RNA, 19 nt, Homo sapiens
  misc_RNA (1)...(19): siRNA sense strand
ccacagugauguuguaaug

SEQ ID NO: 1187061 - RNA, 19 nt, Homo sapiens
  misc_RNA (1)...(19): siRNA sense strand
caucuccuauugauuguua

SEQ ID NO: 1187062 - RNA, 19 nt, Homo sapiens
  misc_RNA (1)...(19): siRNA sense strand
ggccuuugcuucagguuua

SEQ ID NO: 1187063 - RNA, 19 nt, Homo sapiens
  misc_RNA (1)...(19): siRNA sense strand
ucaagaaccuaaagcuauu

SEQ ID NO: 1187064 - RNA, 19 nt, Homo sapiens
  misc_RNA (1)...(19): siRNA sense strand
guacagggauggucaccuu

SEQ ID NO: 1187065 - RNA, 19 nt, Homo sapiens
  misc_RNA (1)...(19): siRNA sense strand
uaauagacuucguuucuug

SEQ ID NO: 1187066 - RNA, 19 nt, Homo sapiens
  misc_RNA (1)...(19): siRNA sense strand
agagauguccuuggaauua

SEQ ID NO: 1187067 - RNA, 19 nt, Homo sapiens
  misc_RNA (1)...(19): siRNA sense strand
gcacucggguuuugaauau

SEQ ID NO: 1187068 - RNA, 19 nt, Homo sapiens
  misc_RNA (1)...(19): siRNA sense strand
gaaaucccacuaggaauug

SEQ ID NO: 1187069 - RNA, 19 nt, Homo sapiens
  misc_RNA (1)...(19): siRNA sense strand
gaugauguguauggaggua

SEQ ID NO: 1187070 - RNA, 19 nt, Homo sapiens
  misc_RNA (1)...(19): siRNA sense strand
gcaucugaauuuggauuaa

SEQ ID NO: 1187071 - RNA, 19 nt, Homo sapiens
  misc_RNA (1)...(19): siRNA sense strand
caaguggcaucugaauuug

SEQ ID NO: 1187072 - RNA, 19 nt, Homo sapiens
  misc_RNA (1)...(19): siRNA sense strand
gcagccacuguaacuauua

SEQ ID NO: 1187073 - RNA, 19 nt, Homo sapiens
  misc_RNA (1)...(19): siRNA sense strand
agacuucguuucuugcaaa

SEQ ID NO: 1187074 - RNA, 19 nt, Homo sapiens
  misc_RNA (1)...(19): siRNA sense strand
cauaauagacuucguuucu

SEQ ID NO: 1187075 - RNA, 19 nt, Homo sapiens
  misc_RNA (1)...(19): siRNA sense strand
cuacauguccgaauggaaa

SEQ ID NO: 1187076 - RNA, 19 nt, Homo sapiens
  misc_RNA (1)...(19): siRNA sense strand
acucaugcaucaguucuua

SEQ ID NO: 1187077 - RNA, 19 nt, Homo sapiens
  misc_RNA (1)...(19): siRNA sense strand
uaaguacuguuuggccuuu

SEQ ID NO: 1187078 - RNA, 19 nt, Homo sapiens
  misc_RNA (1)...(19): siRNA sense strand
acagagauguccuuggaau

SEQ ID NO: 1187079 - RNA, 19 nt, Homo sapiens
  misc_RNA (1)...(19): siRNA sense strand
gagauguccuuggaauuag

SEQ ID NO: 1187080 - RNA, 19 nt, Homo sapiens
  misc_RNA (1)...(19): siRNA sense strand
aggaagaccuacuggaaga

SEQ ID NO: 1187081 - RNA, 19 nt, Homo sapiens
  misc_RNA (1)...(19): siRNA sense strand
uaaugggccuggugucugu

SEQ ID NO: 1187082 - RNA, 19 nt, Homo sapiens
  misc_RNA (1)...(19): siRNA sense strand
ucugggagcugauauuucu

SEQ ID NO: 1187083 - RNA, 19 nt, Homo sapiens
  misc_RNA (1)...(19): siRNA sense strand
gggcuuagaggaugaggaa

SEQ ID NO: 1187084 - RNA, 19 nt, Homo sapiens
  misc_RNA (1)...(19): siRNA sense strand
uaagggcacucuucagcau

SEQ ID NO: 1187085 - RNA, 19 nt, Homo sapiens
  misc_RNA (1)...(19): siRNA sense strand
ugaggaagaccuacuggaa

SEQ ID NO: 1187086 - RNA, 19 nt, Homo sapiens
  misc_RNA (1)...(19): siRNA sense strand
aaagcaggagaccaaauua

SEQ ID NO: 1187087 - RNA, 19 nt, Homo sapiens
  misc_RNA (1)...(19): siRNA sense strand
ggccuggugucuguuaauu

SEQ ID NO: 1187088 - RNA, 19 nt, Homo sapiens
  misc_RNA (1)...(19): siRNA sense strand
gcaacaaaauacaugaaug

SEQ ID NO: 1187089 - RNA, 19 nt, Homo sapiens
  misc_RNA (1)...(19): siRNA sense strand
gagcuugggaggauucgaa

SEQ ID NO: 1187090 - RNA, 19 nt, Homo sapiens
  misc_RNA (1)...(19): siRNA sense strand
gccgagagcuugggaggau

SEQ ID NO: 1187091 - RNA, 19 nt, Homo sapiens
  misc_RNA (1)...(19): siRNA sense strand
ccuggugucuguuaauugu

SEQ ID NO: 1187092 - RNA, 19 nt, Homo sapiens
  misc_RNA (1)...(19): siRNA sense strand
acuaggaauugccuugaaa

SEQ ID NO: 1187093 - RNA, 19 nt, Homo sapiens
  misc_RNA (1)...(19): siRNA sense strand
gagcuuccggcaaucauga

SEQ ID NO: 1187094 - RNA, 19 nt, Homo sapiens
  misc_RNA (1)...(19): siRNA sense strand
aaagacgccuccucacaag

SEQ ID NO: 1187095 - RNA, 19 nt, Homo sapiens
  misc_RNA (1)...(19): siRNA sense strand
gggccaggauccagagcaa

SEQ ID NO: 1187096 - RNA, 19 nt, Homo sapiens
  misc_RNA (1)...(19): siRNA sense strand
ugccacacuuccaacauuu

SEQ ID NO: 1187097 - RNA, 19 nt, Homo sapiens
  misc_RNA (1)...(19): siRNA sense strand
gcagcacacccuccaagug

SEQ ID NO: 1187098 - RNA, 19 nt, Homo sapiens
  misc_RNA (1)...(19): siRNA sense strand
gagcaguuccaucuccuau

SEQ ID NO: 1187099 - RNA, 19 nt, Homo sapiens
  misc_RNA (1)...(19): siRNA sense strand
gcaauuacaccagaaacca

SEQ ID NO: 1187100 - RNA, 19 nt, Homo sapiens
  misc_RNA (1)...(19): siRNA sense strand
gcagcaauuacaccagaaa

SEQ ID NO: 1187101 - RNA, 19 nt, Homo sapiens
  misc_RNA (1)...(19): siRNA sense strand
gcuuagaggaugaggaaga

SEQ ID NO: 1187102 - RNA, 19 nt, Homo sapiens
  misc_RNA (1)...(19): siRNA sense strand
uagcagccacuguaacuau

SEQ ID NO: 1187103 - RNA, 19 nt, Homo sapiens
  misc_RNA (1)...(19): siRNA sense strand
ccucaagaaccuaaagcua

SEQ ID NO: 1187104 - RNA, 19 nt, Homo sapiens
  misc_RNA (1)...(19): siRNA sense strand
cugccacacuuccaacauu

SEQ ID NO: 1187105 - RNA, 19 nt, Homo sapiens
  misc_RNA (1)...(19): siRNA sense strand
ccacgcaggcgauccaugu

SEQ ID NO: 1187106 - RNA, 19 nt, Homo sapiens
  misc_RNA (1)...(19): siRNA sense strand
uuacuagaggcagcaauua

SEQ ID NO: 1187107 - RNA, 19 nt, Homo sapiens
  misc_RNA (1)...(19): siRNA sense strand
aagcgucaguguacagguu

SEQ ID NO: 1187108 - RNA, 19 nt, Homo sapiens
  misc_RNA (1)...(19): siRNA sense strand
gacucuacauguccgaaug

SEQ ID NO: 1187109 - RNA, 19 nt, Homo sapiens
  misc_RNA (1)...(19): siRNA sense strand
auacaugaauggccacagu

SEQ ID NO: 1187110 - RNA, 19 nt, Homo sapiens
  misc_RNA (1)...(19): siRNA sense strand
ggcaucugaauuuggauua

SEQ ID NO: 1187111 - RNA, 19 nt, Homo sapiens
  misc_RNA (1)...(19): siRNA sense strand
uuguauggaugauguguau

SEQ ID NO: 1187112 - RNA, 19 nt, Homo sapiens
  misc_RNA (1)...(19): siRNA sense strand
caagaaccuaaagcuauuu

SEQ ID NO: 1187113 - RNA, 19 nt, Homo sapiens
  misc_RNA (1)...(19): siRNA sense strand
ucugaagacucuacauguc

SEQ ID NO: 1187114 - RNA, 19 nt, Homo sapiens
  misc_RNA (1)...(19): siRNA sense strand
uggccacagugauguugua

SEQ ID NO: 1187115 - RNA, 19 nt, Homo sapiens
  misc_RNA (1)...(19): siRNA sense strand
gaauggccacagugauguu

SEQ ID NO: 1187116 - RNA, 19 nt, Homo sapiens
  misc_RNA (1)...(19): siRNA sense strand
cuggaaaucccacuaggaa

SEQ ID NO: 1187117 - RNA, 19 nt, Homo sapiens
  misc_RNA (1)...(19): siRNA sense strand
cucaagaaccuaaagcuau

SEQ ID NO: 1187118 - RNA, 19 nt, Homo sapiens
  misc_RNA (1)...(19): siRNA sense strand
gauggucaccuuuuauauu

SEQ ID NO: 1187119 - RNA, 19 nt, Homo sapiens
  misc_RNA (1)...(19): siRNA sense strand
gaagaccuacuggaagauc

SEQ ID NO: 1187120 - RNA, 19 nt, Homo sapiens
  misc_RNA (1)...(19): siRNA sense strand
gccaggauccagagcaaug

SEQ ID NO: 1187121 - RNA, 19 nt, Homo sapiens
  misc_RNA (1)...(19): siRNA sense strand
gacacacugauucgacuuu

SEQ ID NO: 1187122 - RNA, 19 nt, Homo sapiens
  misc_RNA (1)...(19): siRNA sense strand
cacuaggaauugccuugaa

SEQ ID NO: 1187123 - RNA, 19 nt, Homo sapiens
  misc_RNA (1)...(19): siRNA sense strand
caauuacaccagaaaccaa

SEQ ID NO: 1187124 - RNA, 19 nt, Homo sapiens
  misc_RNA (1)...(19): siRNA sense strand
uauauuaagggcacucuuc

SEQ ID NO: 1187125 - RNA, 19 nt, Homo sapiens
  misc_RNA (1)...(19): siRNA sense strand
cagggauggucaccuuuua

SEQ ID NO: 1187126 - RNA, 19 nt, Homo sapiens
  misc_RNA (1)...(19): siRNA sense strand
uggugucuguuaauuguga

SEQ ID NO: 1187127 - RNA, 19 nt, Homo sapiens
  misc_RNA (1)...(19): siRNA sense strand
ggguagaaaagguuauuua

SEQ ID NO: 1187128 - RNA, 19 nt, Homo sapiens
  misc_RNA (1)...(19): siRNA sense strand
agcaggagaccaaauuauu

SEQ ID NO: 1187129 - RNA, 19 nt, Homo sapiens
  misc_RNA (1)...(19): siRNA sense strand
gggagcugauauuucuaug

SEQ ID NO: 1187130 - RNA, 19 nt, Homo sapiens
  misc_RNA (1)...(19): siRNA sense strand
ggcaaguggcaucugaauu

SEQ ID NO: 1187131 - RNA, 19 nt, Homo sapiens
  misc_RNA (1)...(19): siRNA sense strand
gggauggucaccuuuuaua

SEQ ID NO: 1187132 - RNA, 19 nt, Homo sapiens
  misc_RNA (1)...(19): siRNA sense strand
cuauguauucugcaacaaa

SEQ ID NO: 1187133 - RNA, 19 nt, Homo sapiens
  misc_RNA (1)...(19): siRNA sense strand
ggagcugauauuucuaugu

SEQ ID NO: 1187134 - RNA, 19 nt, Homo sapiens
  misc_RNA (1)...(19): siRNA sense strand
ggcagcaauuacaccagaa

SEQ ID NO: 1187135 - RNA, 19 nt, Homo sapiens
  misc_RNA (1)...(19): siRNA sense strand
aguggcaucugaauuugga

SEQ ID NO: 1187136 - RNA, 19 nt, Homo sapiens
  misc_RNA (1)...(19): siRNA sense strand
auauagccguucuggaaau

SEQ ID NO: 1187137 - RNA, 19 nt, Homo sapiens
  misc_RNA (1)...(19): siRNA sense strand
ggaugaggaagaccuacug

SEQ ID NO: 1187138 - RNA, 19 nt, Homo sapiens
  misc_RNA (1)...(19): siRNA sense strand
ucgacuuucugugggcuua

SEQ ID NO: 1187139 - RNA, 19 nt, Homo sapiens
  misc_RNA (1)...(19): siRNA sense strand
cagagauguccuuggaauu

SEQ ID NO: 1187140 - RNA, 19 nt, Homo sapiens
  misc_RNA (1)...(19): siRNA sense strand
aauauagccguucuggaaa

SEQ ID NO: 1187141 - RNA, 19 nt, Homo sapiens
  misc_RNA (1)...(19): siRNA sense strand
guauggaugauguguaugg

SEQ ID NO: 1187142 - RNA, 19 nt, Homo sapiens
  misc_RNA (1)...(19): siRNA sense strand
ccacuaggaauugccuuga

SEQ ID NO: 1187143 - RNA, 19 nt, Homo sapiens
  misc_RNA (1)...(19): siRNA sense strand
uuccaucuccuauugauug

SEQ ID NO: 1187144 - RNA, 19 nt, Homo sapiens
  misc_RNA (1)...(19): siRNA sense strand
gguuuagcagccacuguaa

SEQ ID NO: 1187145 - RNA, 19 nt, Homo sapiens
  misc_RNA (1)...(19): siRNA sense strand
aagcaggagaccaaauuau

SEQ ID NO: 1187146 - RNA, 19 nt, Homo sapiens
  misc_RNA (1)...(19): siRNA sense strand
ggugaagcgucaguguaca

SEQ ID NO: 1187147 - RNA, 19 nt, Homo sapiens
  misc_RNA (1)...(19): siRNA sense strand
caacaaaauacaugaaugg

SEQ ID NO: 1187148 - RNA, 19 nt, Homo sapiens
  misc_RNA (1)...(19): siRNA sense strand
aaaagcaggagaccaaauu

SEQ ID NO: 1187149 - RNA, 19 nt, Homo sapiens
  misc_RNA (1)...(19): siRNA sense strand
acacacugauucgacuuuc

SEQ ID NO: 1187150 - RNA, 19 nt, Homo sapiens
  misc_RNA (1)...(19): siRNA sense strand
ucuuaagaaugacagagau

SEQ ID NO: 1187151 - RNA, 19 nt, Homo sapiens
  misc_RNA (1)...(19): siRNA sense strand
gaaagccuucauaauagac

SEQ ID NO: 1187152 - RNA, 19 nt, Homo sapiens
  misc_RNA (1)...(19): siRNA sense strand
gagcugauauuucuaugua

SEQ ID NO: 1187153 - RNA, 19 nt, Homo sapiens
  misc_RNA (1)...(19): siRNA sense strand
gcaaguggcaucugaauuu

SEQ ID NO: 1187154 - RNA, 19 nt, Homo sapiens
  misc_RNA (1)...(19): siRNA sense strand
gaauauagccguucuggaa

SEQ ID NO: 1187155 - RNA, 19 nt, Homo sapiens
  misc_RNA (1)...(19): siRNA sense strand
gcaguuccaucuccuauug

SEQ ID NO: 1187156 - RNA, 19 nt, Homo sapiens
  misc_RNA (1)...(19): siRNA sense strand
ggaaaucccacuaggaauu

SEQ ID NO: 1187157 - RNA, 19 nt, Homo sapiens
  misc_RNA (1)...(19): siRNA sense strand
ccacagugauguuguaaug

SEQ ID NO: 1187158 - RNA, 19 nt, Homo sapiens
  misc_RNA (1)...(19): siRNA sense strand
caucuccuauugauuguua

SEQ ID NO: 1187159 - RNA, 19 nt, Homo sapiens
  misc_RNA (1)...(19): siRNA sense strand
ggccuuugcuucagguuua

SEQ ID NO: 1187160 - RNA, 19 nt, Homo sapiens
  misc_RNA (1)...(19): siRNA sense strand
ucaagaaccuaaagcuauu

SEQ ID NO: 1187161 - RNA, 19 nt, Homo sapiens
  misc_RNA (1)...(19): siRNA sense strand
guacagggauggucaccuu

SEQ ID NO: 1187162 - RNA, 19 nt, Homo sapiens
  misc_RNA (1)...(19): siRNA sense strand
uaauagacuucguuucuug

SEQ ID NO: 1187163 - RNA, 19 nt, Homo sapiens
  misc_RNA (1)...(19): siRNA sense strand
agagauguccuuggaauua

SEQ ID NO: 1187164 - RNA, 19 nt, Homo sapiens
  misc_RNA (1)...(19): siRNA sense strand
gcacucggguuuugaauau

SEQ ID NO: 1187165 - RNA, 19 nt, Homo sapiens
  misc_RNA (1)...(19): siRNA sense strand
gaaaucccacuaggaauug

SEQ ID NO: 1187166 - RNA, 19 nt, Homo sapiens
  misc_RNA (1)...(19): siRNA sense strand
gaugauguguauggaggua

SEQ ID NO: 1187167 - RNA, 19 nt, Homo sapiens
  misc_RNA (1)...(19): siRNA sense strand
gcaucugaauuuggauuaa

SEQ ID NO: 1187168 - RNA, 19 nt, Homo sapiens
  misc_RNA (1)...(19): siRNA sense strand
caaguggcaucugaauuug

SEQ ID NO: 1187169 - RNA, 19 nt, Homo sapiens
  misc_RNA (1)...(19): siRNA sense strand
gcagccacuguaacuauua

SEQ ID NO: 1187170 - RNA, 19 nt, Homo sapiens
  misc_RNA (1)...(19): siRNA sense strand
agacuucguuucuugcaaa

SEQ ID NO: 1187171 - RNA, 19 nt, Homo sapiens
  misc_RNA (1)...(19): siRNA sense strand
cauaauagacuucguuucu

SEQ ID NO: 1187172 - RNA, 19 nt, Homo sapiens
  misc_RNA (1)...(19): siRNA sense strand
cuacauguccgaauggaaa

SEQ ID NO: 1187173 - RNA, 19 nt, Homo sapiens
  misc_RNA (1)...(19): siRNA sense strand
acucaugcaucaguucuua

SEQ ID NO: 1187174 - RNA, 19 nt, Homo sapiens
  misc_RNA (1)...(19): siRNA sense strand
uaaguacuguuuggccuuu

SEQ ID NO: 1187175 - RNA, 19 nt, Homo sapiens
  misc_RNA (1)...(19): siRNA sense strand
acagagauguccuuggaau

SEQ ID NO: 1187176 - RNA, 19 nt, Homo sapiens
  misc_RNA (1)...(19): siRNA sense strand
gagauguccuuggaauuag

SEQ ID NO: 1187177 - RNA, 19 nt, Homo sapiens
  misc_RNA (1)...(19): siRNA sense strand
aggaagaccuacuggaaga

SEQ ID NO: 1187178 - RNA, 19 nt, Homo sapiens
  misc_RNA (1)...(19): siRNA sense strand
uaaugggccuggugucugu

SEQ ID NO: 1187179 - RNA, 19 nt, Homo sapiens
  misc_RNA (1)...(19): siRNA sense strand
ucugggagcugauauuucu

SEQ ID NO: 1187180 - RNA, 19 nt, Homo sapiens
  misc_RNA (1)...(19): siRNA sense strand
gggcuuagaggaugaggaa

SEQ ID NO: 1187181 - RNA, 19 nt, Homo sapiens
  misc_RNA (1)...(19): siRNA sense strand
uaagggcacucuucagcau

SEQ ID NO: 1187182 - RNA, 19 nt, Homo sapiens
  misc_RNA (1)...(19): siRNA sense strand
ugaggaagaccuacuggaa

SEQ ID NO: 1187183 - RNA, 19 nt, Homo sapiens
  misc_RNA (1)...(19): siRNA sense strand
aaagcaggagaccaaauua

SEQ ID NO: 1187184 - RNA, 19 nt, Homo sapiens
  misc_RNA (1)...(19): siRNA sense strand
ggccuggugucuguuaauu

SEQ ID NO: 1187185 - RNA, 19 nt, Homo sapiens
  misc_RNA (1)...(19): siRNA sense strand
gcaacaaaauacaugaaug

SEQ ID NO: 1187186 - RNA, 19 nt, Homo sapiens
  misc_RNA (1)...(19): siRNA sense strand
gagcuugggaggauucgaa

SEQ ID NO: 1187187 - RNA, 19 nt, Homo sapiens
  misc_RNA (1)...(19): siRNA sense strand
gccgagagcuugggaggau

SEQ ID NO: 1187188 - RNA, 19 nt, Homo sapiens
  misc_RNA (1)...(19): siRNA sense strand
ccuggugucuguuaauugu

SEQ ID NO: 1187189 - RNA, 19 nt, Homo sapiens
  misc_RNA (1)...(19): siRNA sense strand
acuaggaauugccuugaaa

SEQ ID NO: 1187190 - RNA, 19 nt, Homo sapiens
  misc_RNA (1)...(19): siRNA sense strand
gagcuuccggcaaucauga

SEQ ID NO: 1187191 - RNA, 19 nt, Homo sapiens
  misc_RNA (1)...(19): siRNA sense strand
aaagacgccuccucacaag

SEQ ID NO: 1187192 - RNA, 19 nt, Homo sapiens
  misc_RNA (1)...(19): siRNA sense strand
gggccaggauccagagcaa

SEQ ID NO: 1187193 - RNA, 19 nt, Homo sapiens
  misc_RNA (1)...(19): siRNA sense strand
ugccacacuuccaacauuu

SEQ ID NO: 1187194 - RNA, 19 nt, Homo sapiens
  misc_RNA (1)...(19): siRNA sense strand
gcagcacacccuccaagug

SEQ ID NO: 1187195 - RNA, 19 nt, Homo sapiens
  misc_RNA (1)...(19): siRNA sense strand
gagcaguuccaucuccuau

SEQ ID NO: 1187196 - RNA, 19 nt, Homo sapiens
  misc_RNA (1)...(19): siRNA sense strand
gcaauuacaccagaaacca

SEQ ID NO: 1187197 - RNA, 19 nt, Homo sapiens
  misc_RNA (1)...(19): siRNA sense strand
gcagcaauuacaccagaaa

SEQ ID NO: 1187198 - RNA, 19 nt, Homo sapiens
  misc_RNA (1)...(19): siRNA sense strand
gcuuagaggaugaggaaga

SEQ ID NO: 1187199 - RNA, 19 nt, Homo sapiens
  misc_RNA (1)...(19): siRNA sense strand
uagcagccacuguaacuau

SEQ ID NO: 1187200 - RNA, 19 nt, Homo sapiens
  misc_RNA (1)...(19): siRNA sense strand
ccucaagaaccuaaagcua

SEQ ID NO: 1187201 - RNA, 19 nt, Homo sapiens
  misc_RNA (1)...(19): siRNA sense strand
cugccacacuuccaacauu

SEQ ID NO: 1187202 - RNA, 19 nt, Homo sapiens
  misc_RNA (1)...(19): siRNA sense strand
ccacgcaggcgauccaugu

SEQ ID NO: 1187203 - RNA, 19 nt, Homo sapiens
  misc_RNA (1)...(19): siRNA sense strand
uuacuagaggcagcaauua

SEQ ID NO: 1187204 - RNA, 19 nt, Homo sapiens
  misc_RNA (1)...(19): siRNA sense strand
aagcgucaguguacagguu

SEQ ID NO: 1187205 - RNA, 19 nt, Homo sapiens
  misc_RNA (1)...(19): siRNA sense strand
gacucuacauguccgaaug

SEQ ID NO: 1187206 - RNA, 19 nt, Homo sapiens
  misc_RNA (1)...(19): siRNA sense strand
auacaugaauggccacagu

SEQ ID NO: 1187207 - RNA, 19 nt, Homo sapiens
  misc_RNA (1)...(19): siRNA sense strand
ggcaucugaauuuggauua

SEQ ID NO: 1187208 - RNA, 19 nt, Homo sapiens
  misc_RNA (1)...(19): siRNA sense strand
uuguauggaugauguguau

SEQ ID NO: 1187209 - RNA, 19 nt, Homo sapiens
  misc_RNA (1)...(19): siRNA sense strand
caagaaccuaaagcuauuu

SEQ ID NO: 1187210 - RNA, 19 nt, Homo sapiens
  misc_RNA (1)...(19): siRNA sense strand
ucugaagacucuacauguc

SEQ ID NO: 1187211 - RNA, 19 nt, Homo sapiens
  misc_RNA (1)...(19): siRNA sense strand
uggccacagugauguugua

SEQ ID NO: 1187212 - RNA, 19 nt, Homo sapiens
  misc_RNA (1)...(19): siRNA sense strand
gaauggccacagugauguu

SEQ ID NO: 1187213 - RNA, 19 nt, Homo sapiens
  misc_RNA (1)...(19): siRNA sense strand
cuggaaaucccacuaggaa

SEQ ID NO: 1187214 - RNA, 19 nt, Homo sapiens
  misc_RNA (1)...(19): siRNA sense strand
cucaagaaccuaaagcuau

SEQ ID NO: 1187215 - RNA, 19 nt, Homo sapiens
  misc_RNA (1)...(19): siRNA sense strand
gauggucaccuuuuauauu

SEQ ID NO: 1187216 - RNA, 19 nt, Homo sapiens
  misc_RNA (1)...(19): siRNA sense strand
gaagaccuacuggaagauc

SEQ ID NO: 1187217 - RNA, 19 nt, Homo sapiens
  misc_RNA (1)...(19): siRNA sense strand
gccaggauccagagcaaug

SEQ ID NO: 1187218 - RNA, 19 nt, Homo sapiens
  misc_RNA (1)...(19): siRNA sense strand
gacacacugauucgacuuu

SEQ ID NO: 1187219 - RNA, 19 nt, Homo sapiens
  misc_RNA (1)...(19): siRNA sense strand
cacuaggaauugccuugaa

SEQ ID NO: 1187220 - RNA, 19 nt, Homo sapiens
  misc_RNA (1)...(19): siRNA sense strand
caauuacaccagaaaccaa

SEQ ID NO: 1187221 - RNA, 19 nt, Homo sapiens
  misc_RNA (1)...(19): siRNA sense strand
uauauuaagggcacucuuc

SEQ ID NO: 1187222 - RNA, 19 nt, Homo sapiens
  misc_RNA (1)...(19): siRNA sense strand
cagggauggucaccuuuua

SEQ ID NO: 1187223 - RNA, 19 nt, Homo sapiens
  misc_RNA (1)...(19): siRNA sense strand
uggugucuguuaauuguga

SEQ ID NO: 1187224 - RNA, 19 nt, Homo sapiens
  misc_RNA (1)...(19): siRNA sense strand
ggguagaaaagguuauuua

SEQ ID NO: 1187225 - RNA, 19 nt, Homo sapiens
  misc_RNA (1)...(19): siRNA sense strand
agcaggagaccaaauuauu

SEQ ID NO: 1187226 - RNA, 19 nt, Homo sapiens
  misc_RNA (1)...(19): siRNA sense strand
gggagcugauauuucuaug

SEQ ID NO: 1187227 - RNA, 19 nt, Homo sapiens
  misc_RNA (1)...(19): siRNA sense strand
ggcaaguggcaucugaauu

SEQ ID NO: 1187228 - RNA, 19 nt, Homo sapiens
  misc_RNA (1)...(19): siRNA sense strand
gggauggucaccuuuuaua

SEQ ID NO: 1187229 - RNA, 19 nt, Homo sapiens
  misc_RNA (1)...(19): siRNA sense strand
cuauguauucugcaacaaa

SEQ ID NO: 1187230 - RNA, 19 nt, Homo sapiens
  misc_RNA (1)...(19): siRNA sense strand
ggagcugauauuucuaugu

SEQ ID NO: 1187231 - RNA, 19 nt, Homo sapiens
  misc_RNA (1)...(19): siRNA sense strand
ggcagcaauuacaccagaa

SEQ ID NO: 1187232 - RNA, 19 nt, Homo sapiens
  misc_RNA (1)...(19): siRNA sense strand
aguggcaucugaauuugga

SEQ ID NO: 1187233 - RNA, 19 nt, Homo sapiens
  misc_RNA (1)...(19): siRNA sense strand
auauagccguucuggaaau

SEQ ID NO: 1187234 - RNA, 19 nt, Homo sapiens
  misc_RNA (1)...(19): siRNA sense strand
ggaugaggaagaccuacug

SEQ ID NO: 1187235 - RNA, 19 nt, Homo sapiens
  misc_RNA (1)...(19): siRNA sense strand
ucgacuuucugugggcuua

SEQ ID NO: 1187236 - RNA, 19 nt, Homo sapiens
  misc_RNA (1)...(19): siRNA sense strand
cagagauguccuuggaauu

SEQ ID NO: 1187237 - RNA, 19 nt, Homo sapiens
  misc_RNA (1)...(19): siRNA sense strand
aauauagccguucuggaaa

SEQ ID NO: 1187238 - RNA, 19 nt, Homo sapiens
  misc_RNA (1)...(19): siRNA sense strand
guauggaugauguguaugg

SEQ ID NO: 1187239 - RNA, 19 nt, Homo sapiens
  misc_RNA (1)...(19): siRNA sense strand
ccacuaggaauugccuuga

SEQ ID NO: 1187240 - RNA, 19 nt, Homo sapiens
  misc_RNA (1)...(19): siRNA sense strand
uuccaucuccuauugauug

SEQ ID NO: 1187241 - RNA, 19 nt, Homo sapiens
  misc_RNA (1)...(19): siRNA sense strand
gguuuagcagccacuguaa

SEQ ID NO: 1187242 - RNA, 19 nt, Homo sapiens
  misc_RNA (1)...(19): siRNA sense strand
aagcaggagaccaaauuau

SEQ ID NO: 1187243 - RNA, 19 nt, Homo sapiens
  misc_RNA (1)...(19): siRNA sense strand
ggugaagcgucaguguaca

SEQ ID NO: 1187244 - RNA, 19 nt, Homo sapiens
  misc_RNA (1)...(19): siRNA sense strand
caacaaaauacaugaaugg

SEQ ID NO: 1187245 - RNA, 19 nt, Homo sapiens
  misc_RNA (1)...(19): siRNA sense strand
aaaagcaggagaccaaauu

SEQ ID NO: 1187246 - RNA, 19 nt, Homo sapiens
  misc_RNA (1)...(19): siRNA sense strand
acacacugauucgacuuuc

SEQ ID NO: 1187247 - RNA, 19 nt, Homo sapiens
  misc_RNA (1)...(19): siRNA sense strand
ucuuaagaaugacagagau

SEQ ID NO: 1187248 - RNA, 19 nt, Homo sapiens
  misc_RNA (1)...(19): siRNA sense strand
gaaagccuucauaauagac

SEQ ID NO: 1187249 - RNA, 19 nt, Homo sapiens
  misc_RNA (1)...(19): siRNA sense strand
gcaagaagcucuguacaug

SEQ ID NO: 1187250 - RNA, 19 nt, Homo sapiens
  misc_RNA (1)...(19): siRNA sense strand
gcauugaccuugacacuga

SEQ ID NO: 1187251 - RNA, 19 nt, Homo sapiens
  misc_RNA (1)...(19): siRNA sense strand
gcucagaguugucaagaau

SEQ ID NO: 1187252 - RNA, 19 nt, Homo sapiens
  misc_RNA (1)...(19): siRNA sense strand
gauaugaaguggaagaaca

SEQ ID NO: 1187253 - RNA, 19 nt, Homo sapiens
  misc_RNA (1)...(19): siRNA sense strand
ggcaagauaugaaguggaa

SEQ ID NO: 1187254 - RNA, 19 nt, Homo sapiens
  misc_RNA (1)...(19): siRNA sense strand
gcaacaacaucggcaaaga

SEQ ID NO: 1187255 - RNA, 19 nt, Homo sapiens
  misc_RNA (1)...(19): siRNA sense strand
gaucaaaucccaggaccua

SEQ ID NO: 1187256 - RNA, 19 nt, Homo sapiens
  misc_RNA (1)...(19): siRNA sense strand
aagaagcucuguacaugaa

SEQ ID NO: 1187257 - RNA, 19 nt, Homo sapiens
  misc_RNA (1)...(19): siRNA sense strand
gcgaggagcuggaguacag

SEQ ID NO: 1187258 - RNA, 19 nt, Homo sapiens
  misc_RNA (1)...(19): siRNA sense strand
gggaggugcucauccgaaa

SEQ ID NO: 1187259 - RNA, 19 nt, Homo sapiens
  misc_RNA (1)...(19): siRNA sense strand
gaccgaggcuuccgcuuca

SEQ ID NO: 1187260 - RNA, 19 nt, Homo sapiens
  misc_RNA (1)...(19): siRNA sense strand
ggucauguccaucaacaaa

SEQ ID NO: 1187261 - RNA, 19 nt, Homo sapiens
  misc_RNA (1)...(19): siRNA sense strand
cugaagggcuggcacaaga

SEQ ID NO: 1187262 - RNA, 19 nt, Homo sapiens
  misc_RNA (1)...(19): siRNA sense strand
gcaacaacccggcaagaca

SEQ ID NO: 1187263 - RNA, 19 nt, Homo sapiens
  misc_RNA (1)...(19): siRNA sense strand
gcaccagggcucagaguug

SEQ ID NO: 1187264 - RNA, 19 nt, Homo sapiens
  misc_RNA (1)...(19): siRNA sense strand
caagaagcucuguacauga

SEQ ID NO: 1187265 - RNA, 19 nt, Homo sapiens
  misc_RNA (1)...(19): siRNA sense strand
acaccaggcucgcuucuuc

SEQ ID NO: 1187266 - RNA, 19 nt, Homo sapiens
  misc_RNA (1)...(19): siRNA sense strand
gcaaagucauggaggaaaa

SEQ ID NO: 1187267 - RNA, 19 nt, Homo sapiens
  misc_RNA (1)...(19): siRNA sense strand
ggaacauucugcgcaacaa

SEQ ID NO: 1187268 - RNA, 19 nt, Homo sapiens
  misc_RNA (1)...(19): siRNA sense strand
ggacgggauccuucauuau

SEQ ID NO: 1187269 - RNA, 19 nt, Homo sapiens
  misc_RNA (1)...(19): siRNA sense strand
gacgggauccuucauuaug

SEQ ID NO: 1187270 - RNA, 19 nt, Homo sapiens
  misc_RNA (1)...(19): siRNA sense strand
caacaucuaccaccucaag

SEQ ID NO: 1187271 - RNA, 19 nt, Homo sapiens
  misc_RNA (1)...(19): siRNA sense strand
caagauaugaaguggaaga

SEQ ID NO: 1187272 - RNA, 19 nt, Homo sapiens
  misc_RNA (1)...(19): siRNA sense strand
ucaaaucccaggaccuauu

SEQ ID NO: 1187273 - RNA, 19 nt, Homo sapiens
  misc_RNA (1)...(19): siRNA sense strand
ugaaguggaagaacaaguu

SEQ ID NO: 1187274 - RNA, 19 nt, Homo sapiens
  misc_RNA (1)...(19): siRNA sense strand
gauagcagcgggaaagagu

SEQ ID NO: 1187275 - RNA, 19 nt, Homo sapiens
  misc_RNA (1)...(19): siRNA sense strand
gacgugagccuguggaaca

SEQ ID NO: 1187276 - RNA, 19 nt, Homo sapiens
  misc_RNA (1)...(19): siRNA sense strand
gaagggcuggcacaagaga

SEQ ID NO: 1187277 - RNA, 19 nt, Homo sapiens
  misc_RNA (1)...(19): siRNA sense strand
cgagacaggcgcaaaguca

SEQ ID NO: 1187278 - RNA, 19 nt, Homo sapiens
  misc_RNA (1)...(19): siRNA sense strand
caaggugacauccugcauu

SEQ ID NO: 1187279 - RNA, 19 nt, Homo sapiens
  misc_RNA (1)...(19): siRNA sense strand
ugccaaggaugacaccauu

SEQ ID NO: 1187280 - RNA, 19 nt, Homo sapiens
  misc_RNA (1)...(19): siRNA sense strand
ucagaguugucaagaaugg

SEQ ID NO: 1187281 - RNA, 19 nt, Homo sapiens
  misc_RNA (1)...(19): siRNA sense strand
gauccuucauuaugcaaca

SEQ ID NO: 1187282 - RNA, 19 nt, Homo sapiens
  misc_RNA (1)...(19): siRNA sense strand
caacaacccggcaagacau

SEQ ID NO: 1187283 - RNA, 19 nt, Homo sapiens
  misc_RNA (1)...(19): siRNA sense strand
aaggugacauccugcauuc

SEQ ID NO: 1187284 - RNA, 19 nt, Homo sapiens
  misc_RNA (1)...(19): siRNA sense strand
acacugaagacaacaucua

SEQ ID NO: 1187285 - RNA, 19 nt, Homo sapiens
  misc_RNA (1)...(19): siRNA sense strand
gcaagaucaccuucugcaa

SEQ ID NO: 1187286 - RNA, 19 nt, Homo sapiens
  misc_RNA (1)...(19): siRNA sense strand
ggaguccuguaccagugaa

SEQ ID NO: 1187287 - RNA, 19 nt, Homo sapiens
  misc_RNA (1)...(19): siRNA sense strand
caccagggcucagaguugu

SEQ ID NO: 1187288 - RNA, 19 nt, Homo sapiens
  misc_RNA (1)...(19): siRNA sense strand
ccagagcuuugccaaggau

SEQ ID NO: 1187289 - RNA, 19 nt, Homo sapiens
  misc_RNA (1)...(19): siRNA sense strand
caaccgaaagacccaagaa

SEQ ID NO: 1187290 - RNA, 19 nt, Homo sapiens
  misc_RNA (1)...(19): siRNA sense strand
caaaucccaggaccuauuc

SEQ ID NO: 1187291 - RNA, 19 nt, Homo sapiens
  misc_RNA (1)...(19): siRNA sense strand
guacaucgcagccuuugcu

SEQ ID NO: 1187292 - RNA, 19 nt, Homo sapiens
  misc_RNA (1)...(19): siRNA sense strand
gaggugcucauccgaaaca

SEQ ID NO: 1187293 - RNA, 19 nt, Homo sapiens
  misc_RNA (1)...(19): siRNA sense strand
gagggugucaugccugaga

SEQ ID NO: 1187294 - RNA, 19 nt, Homo sapiens
  misc_RNA (1)...(19): siRNA sense strand
acaccacggcggacucuuu

SEQ ID NO: 1187295 - RNA, 19 nt, Homo sapiens
  misc_RNA (1)...(19): siRNA sense strand
gcugaggcccagaagagaa

SEQ ID NO: 1187296 - RNA, 19 nt, Homo sapiens
  misc_RNA (1)...(19): siRNA sense strand
ucacccaguuugccuugga

SEQ ID NO: 1187297 - RNA, 19 nt, Homo sapiens
  misc_RNA (1)...(19): siRNA sense strand
ggucaccugcucaagaaga

SEQ ID NO: 1187298 - RNA, 19 nt, Homo sapiens
  misc_RNA (1)...(19): siRNA sense strand
gcgcaacaacaucggcaaa

SEQ ID NO: 1187299 - RNA, 19 nt, Homo sapiens
  misc_RNA (1)...(19): siRNA sense strand
caccaggccucagugacaa

SEQ ID NO: 1187300 - RNA, 19 nt, Homo sapiens
  misc_RNA (1)...(19): siRNA sense strand
gauugugccugugggaaca

SEQ ID NO: 1187301 - RNA, 19 nt, Homo sapiens
  misc_RNA (1)...(19): siRNA sense strand
gugagccuguggaacauuc

SEQ ID NO: 1187302 - RNA, 19 nt, Homo sapiens
  misc_RNA (1)...(19): siRNA sense strand
ucuaccaccucaagaucaa

SEQ ID NO: 1187303 - RNA, 19 nt, Homo sapiens
  misc_RNA (1)...(19): siRNA sense strand
ggaggaaaacaacaucgua

SEQ ID NO: 1187304 - RNA, 19 nt, Homo sapiens
  misc_RNA (1)...(19): siRNA sense strand
ccacacaccaggccucagu

SEQ ID NO: 1187305 - RNA, 19 nt, Homo sapiens
  misc_RNA (1)...(19): siRNA sense strand
cuggaccgcugcucucaug

SEQ ID NO: 1187306 - RNA, 19 nt, Homo sapiens
  misc_RNA (1)...(19): siRNA sense strand
aaacggacaagccgcaugu

SEQ ID NO: 1187307 - RNA, 19 nt, Homo sapiens
  misc_RNA (1)...(19): siRNA sense strand
caacaacaucggcaaagac

SEQ ID NO: 1187308 - RNA, 19 nt, Homo sapiens
  misc_RNA (1)...(19): siRNA sense strand
cagccugucugaggagaug

SEQ ID NO: 1187309 - RNA, 19 nt, Homo sapiens
  misc_RNA (1)...(19): siRNA sense strand
uggagucccugcaccgaau

SEQ ID NO: 1187310 - RNA, 19 nt, Homo sapiens
  misc_RNA (1)...(19): siRNA sense strand
gcgcaaagucauggaggaa

SEQ ID NO: 1187311 - RNA, 19 nt, Homo sapiens
  misc_RNA (1)...(19): siRNA sense strand
gcgagcgcaugguguacau

SEQ ID NO: 1187312 - RNA, 19 nt, Homo sapiens
  misc_RNA (1)...(19): siRNA sense strand
ucuggaaacccaacucaau

SEQ ID NO: 1187313 - RNA, 19 nt, Homo sapiens
  misc_RNA (1)...(19): siRNA sense strand
ccacacggaguucuucgau

SEQ ID NO: 1187314 - RNA, 19 nt, Homo sapiens
  misc_RNA (1)...(19): siRNA sense strand
gccaggcuaugggaacaug

SEQ ID NO: 1187315 - RNA, 19 nt, Homo sapiens
  misc_RNA (1)...(19): siRNA sense strand
gagcagcugcagcgagaca

SEQ ID NO: 1187316 - RNA, 19 nt, Homo sapiens
  misc_RNA (1)...(19): siRNA sense strand
ggcucagaguugucaagaa

SEQ ID NO: 1187317 - RNA, 19 nt, Homo sapiens
  misc_RNA (1)...(19): siRNA sense strand
gaacauucugcgcaacaac

SEQ ID NO: 1187318 - RNA, 19 nt, Homo sapiens
  misc_RNA (1)...(19): siRNA sense strand
gguguacaucgcagccuuu

SEQ ID NO: 1187319 - RNA, 19 nt, Homo sapiens
  misc_RNA (1)...(19): siRNA sense strand
gcagcgagacaggcgcaaa

SEQ ID NO: 1187320 - RNA, 19 nt, Homo sapiens
  misc_RNA (1)...(19): siRNA sense strand
cggccuacuccuccacaua

SEQ ID NO: 1187321 - RNA, 19 nt, Homo sapiens
  misc_RNA (1)...(19): siRNA sense strand
acaccaggccucagugaca

SEQ ID NO: 1187322 - RNA, 19 nt, Homo sapiens
  misc_RNA (1)...(19): siRNA sense strand
caccgacucuuugggaagu

SEQ ID NO: 1187323 - RNA, 19 nt, Homo sapiens
  misc_RNA (1)...(19): siRNA sense strand
caaugccugugcagcucaa

SEQ ID NO: 1187324 - RNA, 19 nt, Homo sapiens
  misc_RNA (1)...(19): siRNA sense strand
gcaagaagcucuguacaug

SEQ ID NO: 1187325 - RNA, 19 nt, Homo sapiens
  misc_RNA (1)...(19): siRNA sense strand
gcauugaccuugacacuga

SEQ ID NO: 1187326 - RNA, 19 nt, Homo sapiens
  misc_RNA (1)...(19): siRNA sense strand
gcucagaguugucaagaau

SEQ ID NO: 1187327 - RNA, 19 nt, Homo sapiens
  misc_RNA (1)...(19): siRNA sense strand
gauaugaaguggaagaaca

SEQ ID NO: 1187328 - RNA, 19 nt, Homo sapiens
  misc_RNA (1)...(19): siRNA sense strand
ggcaagauaugaaguggaa

SEQ ID NO: 1187329 - RNA, 19 nt, Homo sapiens
  misc_RNA (1)...(19): siRNA sense strand
gcaacaacaucggcaaaga

SEQ ID NO: 1187330 - RNA, 19 nt, Homo sapiens
  misc_RNA (1)...(19): siRNA sense strand
gaucaaaucccaggaccua

SEQ ID NO: 1187331 - RNA, 19 nt, Homo sapiens
  misc_RNA (1)...(19): siRNA sense strand
aagaagcucuguacaugaa

SEQ ID NO: 1187332 - RNA, 19 nt, Homo sapiens
  misc_RNA (1)...(19): siRNA sense strand
gcgaggagcuggaguacag

SEQ ID NO: 1187333 - RNA, 19 nt, Homo sapiens
  misc_RNA (1)...(19): siRNA sense strand
gggaggugcucauccgaaa

SEQ ID NO: 1187334 - RNA, 19 nt, Homo sapiens
  misc_RNA (1)...(19): siRNA sense strand
gaccgaggcuuccgcuuca

SEQ ID NO: 1187335 - RNA, 19 nt, Homo sapiens
  misc_RNA (1)...(19): siRNA sense strand
ggucauguccaucaacaaa

SEQ ID NO: 1187336 - RNA, 19 nt, Homo sapiens
  misc_RNA (1)...(19): siRNA sense strand
cugaagggcuggcacaaga

SEQ ID NO: 1187337 - RNA, 19 nt, Homo sapiens
  misc_RNA (1)...(19): siRNA sense strand
gcaacaacccggcaagaca

SEQ ID NO: 1187338 - RNA, 19 nt, Homo sapiens
  misc_RNA (1)...(19): siRNA sense strand
gcaccagggcucagaguug

SEQ ID NO: 1187339 - RNA, 19 nt, Homo sapiens
  misc_RNA (1)...(19): siRNA sense strand
caagaagcucuguacauga

SEQ ID NO: 1187340 - RNA, 19 nt, Homo sapiens
  misc_RNA (1)...(19): siRNA sense strand
acaccaggcucgcuucuuc

SEQ ID NO: 1187341 - RNA, 19 nt, Homo sapiens
  misc_RNA (1)...(19): siRNA sense strand
gcaaagucauggaggaaaa

SEQ ID NO: 1187342 - RNA, 19 nt, Homo sapiens
  misc_RNA (1)...(19): siRNA sense strand
ggaacauucugcgcaacaa

SEQ ID NO: 1187343 - RNA, 19 nt, Homo sapiens
  misc_RNA (1)...(19): siRNA sense strand
ggacgggauccuucauuau

SEQ ID NO: 1187344 - RNA, 19 nt, Homo sapiens
  misc_RNA (1)...(19): siRNA sense strand
gacgggauccuucauuaug

SEQ ID NO: 1187345 - RNA, 19 nt, Homo sapiens
  misc_RNA (1)...(19): siRNA sense strand
caacaucuaccaccucaag

SEQ ID NO: 1187346 - RNA, 19 nt, Homo sapiens
  misc_RNA (1)...(19): siRNA sense strand
caagauaugaaguggaaga

SEQ ID NO: 1187347 - RNA, 19 nt, Homo sapiens
  misc_RNA (1)...(19): siRNA sense strand
ucaaaucccaggaccuauu

SEQ ID NO: 1187348 - RNA, 19 nt, Homo sapiens
  misc_RNA (1)...(19): siRNA sense strand
ugaaguggaagaacaaguu

SEQ ID NO: 1187349 - RNA, 19 nt, Homo sapiens
  misc_RNA (1)...(19): siRNA sense strand
gauagcagcgggaaagagu

SEQ ID NO: 1187350 - RNA, 19 nt, Homo sapiens
  misc_RNA (1)...(19): siRNA sense strand
gacgugagccuguggaaca

SEQ ID NO: 1187351 - RNA, 19 nt, Homo sapiens
  misc_RNA (1)...(19): siRNA sense strand
gaagggcuggcacaagaga

SEQ ID NO: 1187352 - RNA, 19 nt, Homo sapiens
  misc_RNA (1)...(19): siRNA sense strand
cgagacaggcgcaaaguca

SEQ ID NO: 1187353 - RNA, 19 nt, Homo sapiens
  misc_RNA (1)...(19): siRNA sense strand
caaggugacauccugcauu

SEQ ID NO: 1187354 - RNA, 19 nt, Homo sapiens
  misc_RNA (1)...(19): siRNA sense strand
ugccaaggaugacaccauu

SEQ ID NO: 1187355 - RNA, 19 nt, Homo sapiens
  misc_RNA (1)...(19): siRNA sense strand
ucagaguugucaagaaugg

SEQ ID NO: 1187356 - RNA, 19 nt, Homo sapiens
  misc_RNA (1)...(19): siRNA sense strand
gauccuucauuaugcaaca

SEQ ID NO: 1187357 - RNA, 19 nt, Homo sapiens
  misc_RNA (1)...(19): siRNA sense strand
caacaacccggcaagacau

SEQ ID NO: 1187358 - RNA, 19 nt, Homo sapiens
  misc_RNA (1)...(19): siRNA sense strand
aaggugacauccugcauuc

SEQ ID NO: 1187359 - RNA, 19 nt, Homo sapiens
  misc_RNA (1)...(19): siRNA sense strand
acacugaagacaacaucua

SEQ ID NO: 1187360 - RNA, 19 nt, Homo sapiens
  misc_RNA (1)...(19): siRNA sense strand
gcaagaucaccuucugcaa

SEQ ID NO: 1187361 - RNA, 19 nt, Homo sapiens
  misc_RNA (1)...(19): siRNA sense strand
ggaguccuguaccagugaa

SEQ ID NO: 1187362 - RNA, 19 nt, Homo sapiens
  misc_RNA (1)...(19): siRNA sense strand
caccagggcucagaguugu

SEQ ID NO: 1187363 - RNA, 19 nt, Homo sapiens
  misc_RNA (1)...(19): siRNA sense strand
ccagagcuuugccaaggau

SEQ ID NO: 1187364 - RNA, 19 nt, Homo sapiens
  misc_RNA (1)...(19): siRNA sense strand
caaccgaaagacccaagaa

SEQ ID NO: 1187365 - RNA, 19 nt, Homo sapiens
  misc_RNA (1)...(19): siRNA sense strand
caaaucccaggaccuauuc

SEQ ID NO: 1187366 - RNA, 19 nt, Homo sapiens
  misc_RNA (1)...(19): siRNA sense strand
guacaucgcagccuuugcu

SEQ ID NO: 1187367 - RNA, 19 nt, Homo sapiens
  misc_RNA (1)...(19): siRNA sense strand
gaggugcucauccgaaaca

SEQ ID NO: 1187368 - RNA, 19 nt, Homo sapiens
  misc_RNA (1)...(19): siRNA sense strand
gagggugucaugccugaga

SEQ ID NO: 1187369 - RNA, 19 nt, Homo sapiens
  misc_RNA (1)...(19): siRNA sense strand
acaccacggcggacucuuu

SEQ ID NO: 1187370 - RNA, 19 nt, Homo sapiens
  misc_RNA (1)...(19): siRNA sense strand
gcugaggcccagaagagaa

SEQ ID NO: 1187371 - RNA, 19 nt, Homo sapiens
  misc_RNA (1)...(19): siRNA sense strand
ucacccaguuugccuugga

SEQ ID NO: 1187372 - RNA, 19 nt, Homo sapiens
  misc_RNA (1)...(19): siRNA sense strand
ggucaccugcucaagaaga

SEQ ID NO: 1187373 - RNA, 19 nt, Homo sapiens
  misc_RNA (1)...(19): siRNA sense strand
gcgcaacaacaucggcaaa

SEQ ID NO: 1187374 - RNA, 19 nt, Homo sapiens
  misc_RNA (1)...(19): siRNA sense strand
caccaggccucagugacaa

SEQ ID NO: 1187375 - RNA, 19 nt, Homo sapiens
  misc_RNA (1)...(19): siRNA sense strand
gauugugccugugggaaca

SEQ ID NO: 1187376 - RNA, 19 nt, Homo sapiens
  misc_RNA (1)...(19): siRNA sense strand
gugagccuguggaacauuc

SEQ ID NO: 1187377 - RNA, 19 nt, Homo sapiens
  misc_RNA (1)...(19): siRNA sense strand
ucuaccaccucaagaucaa

SEQ ID NO: 1187378 - RNA, 19 nt, Homo sapiens
  misc_RNA (1)...(19): siRNA sense strand
ggaggaaaacaacaucgua

SEQ ID NO: 1187379 - RNA, 19 nt, Homo sapiens
  misc_RNA (1)...(19): siRNA sense strand
ccacacaccaggccucagu

SEQ ID NO: 1187380 - RNA, 19 nt, Homo sapiens
  misc_RNA (1)...(19): siRNA sense strand
cuggaccgcugcucucaug

SEQ ID NO: 1187381 - RNA, 19 nt, Homo sapiens
  misc_RNA (1)...(19): siRNA sense strand
aaacggacaagccgcaugu

SEQ ID NO: 1187382 - RNA, 19 nt, Homo sapiens
  misc_RNA (1)...(19): siRNA sense strand
caacaacaucggcaaagac

SEQ ID NO: 1187383 - RNA, 19 nt, Homo sapiens
  misc_RNA (1)...(19): siRNA sense strand
cagccugucugaggagaug

SEQ ID NO: 1187384 - RNA, 19 nt, Homo sapiens
  misc_RNA (1)...(19): siRNA sense strand
uggagucccugcaccgaau

SEQ ID NO: 1187385 - RNA, 19 nt, Homo sapiens
  misc_RNA (1)...(19): siRNA sense strand
gcgcaaagucauggaggaa

SEQ ID NO: 1187386 - RNA, 19 nt, Homo sapiens
  misc_RNA (1)...(19): siRNA sense strand
gcgagcgcaugguguacau

SEQ ID NO: 1187387 - RNA, 19 nt, Homo sapiens
  misc_RNA (1)...(19): siRNA sense strand
ucuggaaacccaacucaau

SEQ ID NO: 1187388 - RNA, 19 nt, Homo sapiens
  misc_RNA (1)...(19): siRNA sense strand
ccacacggaguucuucgau

SEQ ID NO: 1187389 - RNA, 19 nt, Homo sapiens
  misc_RNA (1)...(19): siRNA sense strand
gccaggcuaugggaacaug

SEQ ID NO: 1187390 - RNA, 19 nt, Homo sapiens
  misc_RNA (1)...(19): siRNA sense strand
gagcagcugcagcgagaca

SEQ ID NO: 1187391 - RNA, 19 nt, Homo sapiens
  misc_RNA (1)...(19): siRNA sense strand
ggcucagaguugucaagaa

SEQ ID NO: 1187392 - RNA, 19 nt, Homo sapiens
  misc_RNA (1)...(19): siRNA sense strand
gaacauucugcgcaacaac

SEQ ID NO: 1187393 - RNA, 19 nt, Homo sapiens
  misc_RNA (1)...(19): siRNA sense strand
gguguacaucgcagccuuu

SEQ ID NO: 1187394 - RNA, 19 nt, Homo sapiens
  misc_RNA (1)...(19): siRNA sense strand
gcagcgagacaggcgcaaa

SEQ ID NO: 1187395 - RNA, 19 nt, Homo sapiens
  misc_RNA (1)...(19): siRNA sense strand
cggccuacuccuccacaua

SEQ ID NO: 1187396 - RNA, 19 nt, Homo sapiens
  misc_RNA (1)...(19): siRNA sense strand
acaccaggccucagugaca

SEQ ID NO: 1187397 - RNA, 19 nt, Homo sapiens
  misc_RNA (1)...(19): siRNA sense strand
caccgacucuuugggaagu

SEQ ID NO: 1187398 - RNA, 19 nt, Homo sapiens
  misc_RNA (1)...(19): siRNA sense strand
caaugccugugcagcucaa

SEQ ID NO: 1187399 - RNA, 19 nt, Homo sapiens
  misc_RNA (1)...(19): siRNA sense strand
gaaggccgcugugcugugu

SEQ ID NO: 1187400 - RNA, 19 nt, Homo sapiens
  misc_RNA (1)...(19): siRNA sense strand
caggagaguuugacaccuu

SEQ ID NO: 1187401 - RNA, 19 nt, Homo sapiens
  misc_RNA (1)...(19): siRNA sense strand
caguggcucugacuacuau

SEQ ID NO: 1187402 - RNA, 19 nt, Homo sapiens
  misc_RNA (1)...(19): siRNA sense strand
cagagcagcugcccaaagc

SEQ ID NO: 1187403 - RNA, 19 nt, Homo sapiens
  misc_RNA (1)...(19): siRNA sense strand
cuacggccuucccagguuu

SEQ ID NO: 1187404 - RNA, 19 nt, Homo sapiens
  misc_RNA (1)...(19): siRNA sense strand
ccacuucuccacaccuuga

SEQ ID NO: 1187405 - RNA, 19 nt, Homo sapiens
  misc_RNA (1)...(19): siRNA sense strand
ucgaggacuuccaggugua

SEQ ID NO: 1187406 - RNA, 19 nt, Homo sapiens
  misc_RNA (1)...(19): siRNA sense strand
cggcuacacaggagaguuu

SEQ ID NO: 1187407 - RNA, 19 nt, Homo sapiens
  misc_RNA (1)...(19): siRNA sense strand
ccuacggccuucccagguu

SEQ ID NO: 1187408 - RNA, 19 nt, Homo sapiens
  misc_RNA (1)...(19): siRNA sense strand
ccaguggcucugacuacua

SEQ ID NO: 1187409 - RNA, 19 nt, Homo sapiens
  misc_RNA (1)...(19): siRNA sense strand
gcacaugugagggcugcaa

SEQ ID NO: 1187410 - RNA, 19 nt, Homo sapiens
  misc_RNA (1)...(19): siRNA sense strand
ucaucaagcccaccaugga

SEQ ID NO: 1187411 - RNA, 19 nt, Homo sapiens
  misc_RNA (1)...(19): siRNA sense strand
gaaggccgcugugcugugu

SEQ ID NO: 1187412 - RNA, 19 nt, Homo sapiens
  misc_RNA (1)...(19): siRNA sense strand
caggagaguuugacaccuu

SEQ ID NO: 1187413 - RNA, 19 nt, Homo sapiens
  misc_RNA (1)...(19): siRNA sense strand
caguggcucugacuacuau

SEQ ID NO: 1187414 - RNA, 19 nt, Homo sapiens
  misc_RNA (1)...(19): siRNA sense strand
cagagcagcugcccaaagc

SEQ ID NO: 1187415 - RNA, 19 nt, Homo sapiens
  misc_RNA (1)...(19): siRNA sense strand
cuacggccuucccagguuu

SEQ ID NO: 1187416 - RNA, 19 nt, Homo sapiens
  misc_RNA (1)...(19): siRNA sense strand
ccacuucuccacaccuuga

SEQ ID NO: 1187417 - RNA, 19 nt, Homo sapiens
  misc_RNA (1)...(19): siRNA sense strand
ucgaggacuuccaggugua

SEQ ID NO: 1187418 - RNA, 19 nt, Homo sapiens
  misc_RNA (1)...(19): siRNA sense strand
cggcuacacaggagaguuu

SEQ ID NO: 1187419 - RNA, 19 nt, Homo sapiens
  misc_RNA (1)...(19): siRNA sense strand
ccuacggccuucccagguu

SEQ ID NO: 1187420 - RNA, 19 nt, Homo sapiens
  misc_RNA (1)...(19): siRNA sense strand
ccaguggcucugacuacua

SEQ ID NO: 1187421 - RNA, 19 nt, Homo sapiens
  misc_RNA (1)...(19): siRNA sense strand
gcacaugugagggcugcaa

SEQ ID NO: 1187422 - RNA, 19 nt, Homo sapiens
  misc_RNA (1)...(19): siRNA sense strand
ucaucaagcccaccaugga

SEQ ID NO: 1187423 - RNA, 19 nt, Homo sapiens
  misc_RNA (1)...(19): siRNA sense strand
gaaggccgcugugcugugu

SEQ ID NO: 1187424 - RNA, 19 nt, Homo sapiens
  misc_RNA (1)...(19): siRNA sense strand
caggagaguuugacaccuu

SEQ ID NO: 1187425 - RNA, 19 nt, Homo sapiens
  misc_RNA (1)...(19): siRNA sense strand
caguggcucugacuacuau

SEQ ID NO: 1187426 - RNA, 19 nt, Homo sapiens
  misc_RNA (1)...(19): siRNA sense strand
cagagcagcugcccaaagc

SEQ ID NO: 1187427 - RNA, 19 nt, Homo sapiens
  misc_RNA (1)...(19): siRNA sense strand
cuacggccuucccagguuu

SEQ ID NO: 1187428 - RNA, 19 nt, Homo sapiens
  misc_RNA (1)...(19): siRNA sense strand
ccacuucuccacaccuuga

SEQ ID NO: 1187429 - RNA, 19 nt, Homo sapiens
  misc_RNA (1)...(19): siRNA sense strand
ucgaggacuuccaggugua

SEQ ID NO: 1187430 - RNA, 19 nt, Homo sapiens
  misc_RNA (1)...(19): siRNA sense strand
cggcuacacaggagaguuu

SEQ ID NO: 1187431 - RNA, 19 nt, Homo sapiens
  misc_RNA (1)...(19): siRNA sense strand
ccuacggccuucccagguu

SEQ ID NO: 1187432 - RNA, 19 nt, Homo sapiens
  misc_RNA (1)...(19): siRNA sense strand
ccaguggcucugacuacua

SEQ ID NO: 1187433 - RNA, 19 nt, Homo sapiens
  misc_RNA (1)...(19): siRNA sense strand
gcacaugugagggcugcaa

SEQ ID NO: 1187434 - RNA, 19 nt, Homo sapiens
  misc_RNA (1)...(19): siRNA sense strand
ucaucaagcccaccaugga

SEQ ID NO: 1187435 - RNA, 19 nt, Homo sapiens
  misc_RNA (1)...(19): siRNA sense strand
ccagagaaguuccagaaua

SEQ ID NO: 1187436 - RNA, 19 nt, Homo sapiens
  misc_RNA (1)...(19): siRNA sense strand
cagagaaguuccagaauaa

SEQ ID NO: 1187437 - RNA, 19 nt, Homo sapiens
  misc_RNA (1)...(19): siRNA sense strand
gaacuuggcugagaacauc

SEQ ID NO: 1187438 - RNA, 19 nt, Homo sapiens
  misc_RNA (1)...(19): siRNA sense strand
ccaagaaggucaucaggaa

SEQ ID NO: 1187439 - RNA, 19 nt, Homo sapiens
  misc_RNA (1)...(19): siRNA sense strand
ggaaggagcugcggcugaa

SEQ ID NO: 1187440 - RNA, 19 nt, Homo sapiens
  misc_RNA (1)...(19): siRNA sense strand
ggugacagguugaaaguga

SEQ ID NO: 1187441 - RNA, 19 nt, Homo sapiens
  misc_RNA (1)...(19): siRNA sense strand
ugaagaggauccacgagua

SEQ ID NO: 1187442 - RNA, 19 nt, Homo sapiens
  misc_RNA (1)...(19): siRNA sense strand
gcccaggacuguuaugauu

SEQ ID NO: 1187443 - RNA, 19 nt, Homo sapiens
  misc_RNA (1)...(19): siRNA sense strand
gcacgcagcagcacuacua

SEQ ID NO: 1187444 - RNA, 19 nt, Homo sapiens
  misc_RNA (1)...(19): siRNA sense strand
ggaauccgcuaugaauuug

SEQ ID NO: 1187445 - RNA, 19 nt, Homo sapiens
  misc_RNA (1)...(19): siRNA sense strand
caacauggcccaccugugu

SEQ ID NO: 1187446 - RNA, 19 nt, Homo sapiens
  misc_RNA (1)...(19): siRNA sense strand
gaagaagaccugugcauac

SEQ ID NO: 1187447 - RNA, 19 nt, Homo sapiens
  misc_RNA (1)...(19): siRNA sense strand
gaaccuguuucgagacguu

SEQ ID NO: 1187448 - RNA, 19 nt, Homo sapiens
  misc_RNA (1)...(19): siRNA sense strand
ggacaaggccugggaaauc

SEQ ID NO: 1187449 - RNA, 19 nt, Homo sapiens
  misc_RNA (1)...(19): siRNA sense strand
ugaaguggcuggacacaca

SEQ ID NO: 1187450 - RNA, 19 nt, Homo sapiens
  misc_RNA (1)...(19): siRNA sense strand
gauaaucuaugccaucaac

SEQ ID NO: 1187451 - RNA, 19 nt, Homo sapiens
  misc_RNA (1)...(19): siRNA sense strand
gacaaggccugggaaauca

SEQ ID NO: 1187452 - RNA, 19 nt, Homo sapiens
  misc_RNA (1)...(19): siRNA sense strand
ugaaacagucggucuuuaa

SEQ ID NO: 1187453 - RNA, 19 nt, Homo sapiens
  misc_RNA (1)...(19): siRNA sense strand
gcacaggcaacaugaaguu

SEQ ID NO: 1187454 - RNA, 19 nt, Homo sapiens
  misc_RNA (1)...(19): siRNA sense strand
gugaaacagucggucuuua

SEQ ID NO: 1187455 - RNA, 19 nt, Homo sapiens
  misc_RNA (1)...(19): siRNA sense strand
gcuauggaauccgcuauga

SEQ ID NO: 1187456 - RNA, 19 nt, Homo sapiens
  misc_RNA (1)...(19): siRNA sense strand
caagguguuugcagacuau

SEQ ID NO: 1187457 - RNA, 19 nt, Homo sapiens
  misc_RNA (1)...(19): siRNA sense strand
cgaagaagaccugugcaua

SEQ ID NO: 1187458 - RNA, 19 nt, Homo sapiens
  misc_RNA (1)...(19): siRNA sense strand
gaccggaacuuggcugaga

SEQ ID NO: 1187459 - RNA, 19 nt, Homo sapiens
  misc_RNA (1)...(19): siRNA sense strand
gaaccugggccuucagaau

SEQ ID NO: 1187460 - RNA, 19 nt, Homo sapiens
  misc_RNA (1)...(19): siRNA sense strand
gagaaguuccagaauaaga

SEQ ID NO: 1187461 - RNA, 19 nt, Homo sapiens
  misc_RNA (1)...(19): siRNA sense strand
ccgagaaccucuucaucuu

SEQ ID NO: 1187462 - RNA, 19 nt, Homo sapiens
  misc_RNA (1)...(19): siRNA sense strand
ucaaggacaucgugaacau

SEQ ID NO: 1187463 - RNA, 19 nt, Homo sapiens
  misc_RNA (1)...(19): siRNA sense strand
ccugggaaaucacgaagaa

SEQ ID NO: 1187464 - RNA, 19 nt, Homo sapiens
  misc_RNA (1)...(19): siRNA sense strand
gaccugagccagcugaaga

SEQ ID NO: 1187465 - RNA, 19 nt, Homo sapiens
  misc_RNA (1)...(19): siRNA sense strand
ccaagcgcauuuauuaucu

SEQ ID NO: 1187466 - RNA, 19 nt, Homo sapiens
  misc_RNA (1)...(19): siRNA sense strand
ggaggaacucgaggagaua

SEQ ID NO: 1187467 - RNA, 19 nt, Homo sapiens
  misc_RNA (1)...(19): siRNA sense strand
gaaacagucggucuuuaag

SEQ ID NO: 1187468 - RNA, 19 nt, Homo sapiens
  misc_RNA (1)...(19): siRNA sense strand
uggaauccgcuaugaauuu

SEQ ID NO: 1187469 - RNA, 19 nt, Homo sapiens
  misc_RNA (1)...(19): siRNA sense strand
ucgaggagauagaagaaga

SEQ ID NO: 1187470 - RNA, 19 nt, Homo sapiens
  misc_RNA (1)...(19): siRNA sense strand
ucaagguguuugcagacua

SEQ ID NO: 1187471 - RNA, 19 nt, Homo sapiens
  misc_RNA (1)...(19): siRNA sense strand
ccaaggagccagacugcuu

SEQ ID NO: 1187472 - RNA, 19 nt, Homo sapiens
  misc_RNA (1)...(19): siRNA sense strand
ccaaggaguggaccaagaa

SEQ ID NO: 1187473 - RNA, 19 nt, Homo sapiens
  misc_RNA (1)...(19): siRNA sense strand
aagaagaccugugcauaca

SEQ ID NO: 1187474 - RNA, 19 nt, Homo sapiens
  misc_RNA (1)...(19): siRNA sense strand
acucggagaucgugaaaca

SEQ ID NO: 1187475 - RNA, 19 nt, Homo sapiens
  misc_RNA (1)...(19): siRNA sense strand
gcgagaagcggaagcagau

SEQ ID NO: 1187476 - RNA, 19 nt, Homo sapiens
  misc_RNA (1)...(19): siRNA sense strand
acaaucgaaucaagagaga

SEQ ID NO: 1187477 - RNA, 19 nt, Homo sapiens
  misc_RNA (1)...(19): siRNA sense strand
uggaggaacucgaggagau

SEQ ID NO: 1187478 - RNA, 19 nt, Homo sapiens
  misc_RNA (1)...(19): siRNA sense strand
ggagauagaagaagaugcu

SEQ ID NO: 1187479 - RNA, 19 nt, Homo sapiens
  misc_RNA (1)...(19): siRNA sense strand
caagcgcauuuauuaucuu

SEQ ID NO: 1187480 - RNA, 19 nt, Homo sapiens
  misc_RNA (1)...(19): siRNA sense strand
ccaggacuguuaugauugg

SEQ ID NO: 1187481 - RNA, 19 nt, Homo sapiens
  misc_RNA (1)...(19): siRNA sense strand
ucagaaugccugcgaugaa

SEQ ID NO: 1187482 - RNA, 19 nt, Homo sapiens
  misc_RNA (1)...(19): siRNA sense strand
cagaaugccugcgaugaag

SEQ ID NO: 1187483 - RNA, 19 nt, Homo sapiens
  misc_RNA (1)...(19): siRNA sense strand
gaagaggauccacgaguac

SEQ ID NO: 1187484 - RNA, 19 nt, Homo sapiens
  misc_RNA (1)...(19): siRNA sense strand
ggaacucgaggagauagaa

SEQ ID NO: 1187485 - RNA, 19 nt, Homo sapiens
  misc_RNA (1)...(19): siRNA sense strand
gagaagcggaagcagauca

SEQ ID NO: 1187486 - RNA, 19 nt, Homo sapiens
  misc_RNA (1)...(19): siRNA sense strand
aacagucggucuuuaagga

SEQ ID NO: 1187487 - RNA, 19 nt, Homo sapiens
  misc_RNA (1)...(19): siRNA sense strand
ucaaugguguggcgaggau

SEQ ID NO: 1187488 - RNA, 19 nt, Homo sapiens
  misc_RNA (1)...(19): siRNA sense strand
uauggaauccgcuaugaau

SEQ ID NO: 1187489 - RNA, 19 nt, Homo sapiens
  misc_RNA (1)...(19): siRNA sense strand
guccuuggcugagaaagug

SEQ ID NO: 1187490 - RNA, 19 nt, Homo sapiens
  misc_RNA (1)...(19): siRNA sense strand
gguccuguauccaaaugau

SEQ ID NO: 1187491 - RNA, 19 nt, Homo sapiens
  misc_RNA (1)...(19): siRNA sense strand
caacgugggagacuacauc

SEQ ID NO: 1187492 - RNA, 19 nt, Homo sapiens
  misc_RNA (1)...(19): siRNA sense strand
ccaaggcucccaacgacuu

SEQ ID NO: 1187493 - RNA, 19 nt, Homo sapiens
  misc_RNA (1)...(19): siRNA sense strand
ccuugggccuggcagcaua

SEQ ID NO: 1187494 - RNA, 19 nt, Homo sapiens
  misc_RNA (1)...(19): siRNA sense strand
ugaucuuccuggagaacua

SEQ ID NO: 1187495 - RNA, 19 nt, Homo sapiens
  misc_RNA (1)...(19): siRNA sense strand
aguacaaggugaagaucaa

SEQ ID NO: 1187496 - RNA, 19 nt, Homo sapiens
  misc_RNA (1)...(19): siRNA sense strand
cagucggucuuuaaggauu

SEQ ID NO: 1187497 - RNA, 19 nt, Homo sapiens
  misc_RNA (1)...(19): siRNA sense strand
cgggcaaguucuccaguga

SEQ ID NO: 1187498 - RNA, 19 nt, Homo sapiens
  misc_RNA (1)...(19): siRNA sense strand
cuggagaacuaccgugugu

SEQ ID NO: 1187499 - RNA, 19 nt, Homo sapiens
  misc_RNA (1)...(19): siRNA sense strand
gcuaugaauuugggauuuu

SEQ ID NO: 1187500 - RNA, 19 nt, Homo sapiens
  misc_RNA (1)...(19): siRNA sense strand
cccaaggaguggaccaaga

SEQ ID NO: 1187501 - RNA, 19 nt, Homo sapiens
  misc_RNA (1)...(19): siRNA sense strand
ccagaucagcaguggcuuu

SEQ ID NO: 1187502 - RNA, 19 nt, Homo sapiens
  misc_RNA (1)...(19): siRNA sense strand
gaccggaaaggguacaaug

SEQ ID NO: 1187503 - RNA, 19 nt, Homo sapiens
  misc_RNA (1)...(19): siRNA sense strand
gaagguggacugggacaag

SEQ ID NO: 1187504 - RNA, 19 nt, Homo sapiens
  misc_RNA (1)...(19): siRNA sense strand
gccgagaaccucuucaucu

SEQ ID NO: 1187505 - RNA, 19 nt, Homo sapiens
  misc_RNA (1)...(19): siRNA sense strand
gcgcauuuauuaucuuucc

SEQ ID NO: 1187506 - RNA, 19 nt, Homo sapiens
  misc_RNA (1)...(19): siRNA sense strand
ucaaguuggucaccuccau

SEQ ID NO: 1187507 - RNA, 19 nt, Homo sapiens
  misc_RNA (1)...(19): siRNA sense strand
gagcuucaaccggcacuug

SEQ ID NO: 1187508 - RNA, 19 nt, Homo sapiens
  misc_RNA (1)...(19): siRNA sense strand
ggaacuuggcugagaacau

SEQ ID NO: 1187509 - RNA, 19 nt, Homo sapiens
  misc_RNA (1)...(19): siRNA sense strand
gguguuugcagacuaugaa

SEQ ID NO: 1187510 - RNA, 19 nt, Homo sapiens
  misc_RNA (1)...(19): siRNA sense strand
gguacaaugccagggagua

SEQ ID NO: 1187511 - RNA, 19 nt, Homo sapiens
  misc_RNA (1)...(19): siRNA sense strand
cgagaaccucuucaucuuc

SEQ ID NO: 1187512 - RNA, 19 nt, Homo sapiens
  misc_RNA (1)...(19): siRNA sense strand
ccacauggccaagcugauc

SEQ ID NO: 1187513 - RNA, 19 nt, Homo sapiens
  misc_RNA (1)...(19): siRNA sense strand
augaagccaucuaucaguu

SEQ ID NO: 1187514 - RNA, 19 nt, Homo sapiens
  misc_RNA (1)...(19): siRNA sense strand
gguggcugcugcugugcaa

SEQ ID NO: 1187515 - RNA, 19 nt, Homo sapiens
  misc_RNA (1)...(19): siRNA sense strand
gcccaccugugugugauug

SEQ ID NO: 1187516 - RNA, 19 nt, Homo sapiens
  misc_RNA (1)...(19): siRNA sense strand
ugggaaaucacgaagaaga

SEQ ID NO: 1187517 - RNA, 19 nt, Homo sapiens
  misc_RNA (1)...(19): siRNA sense strand
cagacaagguggccaucca

SEQ ID NO: 1187518 - RNA, 19 nt, Homo sapiens
  misc_RNA (1)...(19): siRNA sense strand
ggagccagacugcuucaag

SEQ ID NO: 1187519 - RNA, 19 nt, Homo sapiens
  misc_RNA (1)...(19): siRNA sense strand
gaguacaaggugaagauca

SEQ ID NO: 1187520 - RNA, 19 nt, Homo sapiens
  misc_RNA (1)...(19): siRNA sense strand
acaaugccagggaguacua

SEQ ID NO: 1187521 - RNA, 19 nt, Homo sapiens
  misc_RNA (1)...(19): siRNA sense strand
gguuagacuuggaggaacu

SEQ ID NO: 1187522 - RNA, 19 nt, Homo sapiens
  misc_RNA (1)...(19): siRNA sense strand
gcacgcugcagaacacgau

SEQ ID NO: 1187523 - RNA, 19 nt, Homo sapiens
  misc_RNA (1)...(19): siRNA sense strand
guacaaucgaaucaagaga

SEQ ID NO: 1187524 - RNA, 19 nt, Homo sapiens
  misc_RNA (1)...(19): siRNA sense strand
gcacuucacgcuggucaag

SEQ ID NO: 1187525 - RNA, 19 nt, Homo sapiens
  misc_RNA (1)...(19): siRNA sense strand
gcuggcccguguccauguu

SEQ ID NO: 1187526 - RNA, 19 nt, Homo sapiens
  misc_RNA (1)...(19): siRNA sense strand
gaugcuggccuugggaaug

SEQ ID NO: 1187527 - RNA, 19 nt, Homo sapiens
  misc_RNA (1)...(19): siRNA sense strand
gugacgagguguucaucag

SEQ ID NO: 1187528 - RNA, 19 nt, Homo sapiens
  misc_RNA (1)...(19): siRNA sense strand
aaccggcacuugcacuuca

SEQ ID NO: 1187529 - RNA, 19 nt, Homo sapiens
  misc_RNA (1)...(19): siRNA sense strand
cccaagcgcauuuauuauc

SEQ ID NO: 1187530 - RNA, 19 nt, Homo sapiens
  misc_RNA (1)...(19): siRNA sense strand
gaggagauagaagaagaug

SEQ ID NO: 1187531 - RNA, 19 nt, Homo sapiens
  misc_RNA (1)...(19): siRNA sense strand
cgcuaugaauuugggauuu

SEQ ID NO: 1187532 - RNA, 19 nt, Homo sapiens
  misc_RNA (1)...(19): siRNA sense strand
ccuguacaaucgaaucaag

SEQ ID NO: 1187533 - RNA, 19 nt, Homo sapiens
  misc_RNA (1)...(19): siRNA sense strand
gcacgucgucacccuguac

SEQ ID NO: 1187534 - RNA, 19 nt, Homo sapiens
  misc_RNA (1)...(19): siRNA sense strand
agucggucuuuaaggauuu

SEQ ID NO: 1187535 - RNA, 19 nt, Homo sapiens
  misc_RNA (1)...(19): siRNA sense strand
gaaauacgcuuuaccauca

SEQ ID NO: 1187536 - RNA, 19 nt, Homo sapiens
  misc_RNA (1)...(19): siRNA sense strand
ucaagaagcaccaugauua

SEQ ID NO: 1187537 - RNA, 19 nt, Homo sapiens
  misc_RNA (1)...(19): siRNA sense strand
ccacaccgcuggccaagaa

SEQ ID NO: 1187538 - RNA, 19 nt, Homo sapiens
  misc_RNA (1)...(19): siRNA sense strand
gcaccaugauuacuacauu

SEQ ID NO: 1187539 - RNA, 19 nt, Homo sapiens
  misc_RNA (1)...(19): siRNA sense strand
gagacaagcuggacaucau

SEQ ID NO: 1187540 - RNA, 19 nt, Homo sapiens
  misc_RNA (1)...(19): siRNA sense strand
ggaagggcuuggugaucua

SEQ ID NO: 1187541 - RNA, 19 nt, Homo sapiens
  misc_RNA (1)...(19): siRNA sense strand
gagcaggaaauacgcuuua

SEQ ID NO: 1187542 - RNA, 19 nt, Homo sapiens
  misc_RNA (1)...(19): siRNA sense strand
caccaugauuacuacauua

SEQ ID NO: 1187543 - RNA, 19 nt, Homo sapiens
  misc_RNA (1)...(19): siRNA sense strand
ggacuacagagaacaacua

SEQ ID NO: 1187544 - RNA, 19 nt, Homo sapiens
  misc_RNA (1)...(19): siRNA sense strand
gaagcaccaugauuacuac

SEQ ID NO: 1187545 - RNA, 19 nt, Homo sapiens
  misc_RNA (1)...(19): siRNA sense strand
gggaagggcuuggugaucu

SEQ ID NO: 1187546 - RNA, 19 nt, Homo sapiens
  misc_RNA (1)...(19): siRNA sense strand
cggcgaacaucuacuacaa

SEQ ID NO: 1187547 - RNA, 19 nt, Homo sapiens
  misc_RNA (1)...(19): siRNA sense strand
cgacaucaucauucccuua

SEQ ID NO: 1187548 - RNA, 19 nt, Homo sapiens
  misc_RNA (1)...(19): siRNA sense strand
gcacacgcaccaugaagau

SEQ ID NO: 1187549 - RNA, 19 nt, Homo sapiens
  misc_RNA (1)...(19): siRNA sense strand
agaagcaccaugauuacua

SEQ ID NO: 1187550 - RNA, 19 nt, Homo sapiens
  misc_RNA (1)...(19): siRNA sense strand
ggacccugauggcuucuuc

SEQ ID NO: 1187551 - RNA, 19 nt, Homo sapiens
  misc_RNA (1)...(19): siRNA sense strand
cuacagagaacaacuacug

SEQ ID NO: 1187552 - RNA, 19 nt, Homo sapiens
  misc_RNA (1)...(19): siRNA sense strand
ccugauggcuucuucaacu

SEQ ID NO: 1187553 - RNA, 19 nt, Homo sapiens
  misc_RNA (1)...(19): siRNA sense strand
ccaucaaguuccaggaguu

SEQ ID NO: 1187554 - RNA, 19 nt, Homo sapiens
  misc_RNA (1)...(19): siRNA sense strand
gcugcccucucgcucagua

SEQ ID NO: 1187555 - RNA, 19 nt, Homo sapiens
  misc_RNA (1)...(19): siRNA sense strand
caagaagcaccaugauuac

SEQ ID NO: 1187556 - RNA, 19 nt, Homo sapiens
  misc_RNA (1)...(19): siRNA sense strand
gcaagcaugagacugugaa

SEQ ID NO: 1187557 - RNA, 19 nt, Homo sapiens
  misc_RNA (1)...(19): siRNA sense strand
ucaugaagguugggcaaga

SEQ ID NO: 1187558 - RNA, 19 nt, Homo sapiens
  misc_RNA (1)...(19): siRNA sense strand
ggagacaagcuggacauca

SEQ ID NO: 1187559 - RNA, 19 nt, Homo sapiens
  misc_RNA (1)...(19): siRNA sense strand
gcccagcgacaucaucauu

SEQ ID NO: 1187560 - RNA, 19 nt, Homo sapiens
  misc_RNA (1)...(19): siRNA sense strand
uacauuaccucaacaucca

SEQ ID NO: 1187561 - RNA, 19 nt, Homo sapiens
  misc_RNA (1)...(19): siRNA sense strand
acuccaagguggcauuguu

SEQ ID NO: 1187562 - RNA, 19 nt, Homo sapiens
  misc_RNA (1)...(19): siRNA sense strand
ugacgguccuacuacugaa

SEQ ID NO: 1187563 - RNA, 19 nt, Homo sapiens
  misc_RNA (1)...(19): siRNA sense strand
caagaucccaaugcuguga

SEQ ID NO: 1187564 - RNA, 19 nt, Homo sapiens
  misc_RNA (1)...(19): siRNA sense strand
gcaaggaggcagacaacac

SEQ ID NO: 1187565 - RNA, 19 nt, Homo sapiens
  misc_RNA (1)...(19): siRNA sense strand
caugaagguugggcaagau

SEQ ID NO: 1187566 - RNA, 19 nt, Homo sapiens
  misc_RNA (1)...(19): siRNA sense strand
gagcccagcgacaucauca

SEQ ID NO: 1187567 - RNA, 19 nt, Homo sapiens
  misc_RNA (1)...(19): siRNA sense strand
acaugggccuggaguucaa

SEQ ID NO: 1187568 - RNA, 19 nt, Homo sapiens
  misc_RNA (1)...(19): siRNA sense strand
gaaccaggaagagaagagu

SEQ ID NO: 1187569 - RNA, 19 nt, Homo sapiens
  misc_RNA (1)...(19): siRNA sense strand
caaggaggcagacaacacu

SEQ ID NO: 1187570 - RNA, 19 nt, Homo sapiens
  misc_RNA (1)...(19): siRNA sense strand
caggaaauacgcuuuacca

SEQ ID NO: 1187571 - RNA, 19 nt, Homo sapiens
  misc_RNA (1)...(19): siRNA sense strand
acacgcaccaugaagauca

SEQ ID NO: 1187572 - RNA, 19 nt, Homo sapiens
  misc_RNA (1)...(19): siRNA sense strand
guguuggucaccugcaaua

SEQ ID NO: 1187573 - RNA, 19 nt, Homo sapiens
  misc_RNA (1)...(19): siRNA sense strand
gaagggcuuggugaucuau

SEQ ID NO: 1187574 - RNA, 19 nt, Homo sapiens
  misc_RNA (1)...(19): siRNA sense strand
gccuggaguucaagaagca

SEQ ID NO: 1187575 - RNA, 19 nt, Homo sapiens
  misc_RNA (1)...(19): siRNA sense strand
aaauacgcuuuaccaucaa

SEQ ID NO: 1187576 - RNA, 19 nt, Homo sapiens
  misc_RNA (1)...(19): siRNA sense strand
cuacaugggccuggaguuc

SEQ ID NO: 1187577 - RNA, 19 nt, Homo sapiens
  misc_RNA (1)...(19): siRNA sense strand
gaaccuggagcccguaucc

SEQ ID NO: 1187578 - RNA, 19 nt, Homo sapiens
  misc_RNA (1)...(19): siRNA sense strand
aucauucccuuacggacua

SEQ ID NO: 1187579 - RNA, 19 nt, Homo sapiens
  misc_RNA (1)...(19): siRNA sense strand
ggccagagcaggaaauacg

SEQ ID NO: 1187580 - RNA, 19 nt, Homo sapiens
  misc_RNA (1)...(19): siRNA sense strand
caauaggccagagcaggaa

SEQ ID NO: 1187581 - RNA, 19 nt, Homo sapiens
  misc_RNA (1)...(19): siRNA sense strand
uuacuacauuaccucaaca

SEQ ID NO: 1187582 - RNA, 19 nt, Homo sapiens
  misc_RNA (1)...(19): siRNA sense strand
gacaucaucauucccuuac

SEQ ID NO: 1187583 - RNA, 19 nt, Homo sapiens
  misc_RNA (1)...(19): siRNA sense strand
caaagaaucuagcaucaua

SEQ ID NO: 1187584 - RNA, 19 nt, Homo sapiens
  misc_RNA (1)...(19): siRNA sense strand
caacauagauggaccaaau

SEQ ID NO: 1187585 - RNA, 19 nt, Homo sapiens
  misc_RNA (1)...(19): siRNA sense strand
gaggacggcuucccaauaa

SEQ ID NO: 1187586 - RNA, 19 nt, Homo sapiens
  misc_RNA (1)...(19): siRNA sense strand
gaauguggguuuauaaaug

SEQ ID NO: 1187587 - RNA, 19 nt, Homo sapiens
  misc_RNA (1)...(19): siRNA sense strand
gcugaagccucaauguuua

SEQ ID NO: 1187588 - RNA, 19 nt, Homo sapiens
  misc_RNA (1)...(19): siRNA sense strand
cagacgagcugaugaagua

SEQ ID NO: 1187589 - RNA, 19 nt, Homo sapiens
  misc_RNA (1)...(19): siRNA sense strand
gagggaaaguguaugauaa

SEQ ID NO: 1187590 - RNA, 19 nt, Homo sapiens
  misc_RNA (1)...(19): siRNA sense strand
caauaaagaugaagccaaa

SEQ ID NO: 1187591 - RNA, 19 nt, Homo sapiens
  misc_RNA (1)...(19): siRNA sense strand
gaacggaaaucuuaaacca

SEQ ID NO: 1187592 - RNA, 19 nt, Homo sapiens
  misc_RNA (1)...(19): siRNA sense strand
gcagaaagauacagcugaa

SEQ ID NO: 1187593 - RNA, 19 nt, Homo sapiens
  misc_RNA (1)...(19): siRNA sense strand
gcacuuacuaugacaauuu

SEQ ID NO: 1187594 - RNA, 19 nt, Homo sapiens
  misc_RNA (1)...(19): siRNA sense strand
guagacagguguaugaguu

SEQ ID NO: 1187595 - RNA, 19 nt, Homo sapiens
  misc_RNA (1)...(19): siRNA sense strand
ucaccgagaugauaaagaa

SEQ ID NO: 1187596 - RNA, 19 nt, Homo sapiens
  misc_RNA (1)...(19): siRNA sense strand
gauagagaauguggguuua

SEQ ID NO: 1187597 - RNA, 19 nt, Homo sapiens
  misc_RNA (1)...(19): siRNA sense strand
uaacggugaucacaggaua

SEQ ID NO: 1187598 - RNA, 19 nt, Homo sapiens
  misc_RNA (1)...(19): siRNA sense strand
gaagagggaaaguguauga

SEQ ID NO: 1187599 - RNA, 19 nt, Homo sapiens
  misc_RNA (1)...(19): siRNA sense strand
ugaaugcccuuggucaaua

SEQ ID NO: 1187600 - RNA, 19 nt, Homo sapiens
  misc_RNA (1)...(19): siRNA sense strand
aaacagcucuagacaacaa

SEQ ID NO: 1187601 - RNA, 19 nt, Homo sapiens
  misc_RNA (1)...(19): siRNA sense strand
ucaaagauccugugcagaa

SEQ ID NO: 1187602 - RNA, 19 nt, Homo sapiens
  misc_RNA (1)...(19): siRNA sense strand
ggauagagaauguggguuu

SEQ ID NO: 1187603 - RNA, 19 nt, Homo sapiens
  misc_RNA (1)...(19): siRNA sense strand
uuaaugugcuggaaucaaa

SEQ ID NO: 1187604 - RNA, 19 nt, Homo sapiens
  misc_RNA (1)...(19): siRNA sense strand
ucagagagagcaaagcuua

SEQ ID NO: 1187605 - RNA, 19 nt, Homo sapiens
  misc_RNA (1)...(19): siRNA sense strand
gcaaaucauucgguaaauc

SEQ ID NO: 1187606 - RNA, 19 nt, Homo sapiens
  misc_RNA (1)...(19): siRNA sense strand
gaucacaggauagguauuu

SEQ ID NO: 1187607 - RNA, 19 nt, Homo sapiens
  misc_RNA (1)...(19): siRNA sense strand
gguggaagaugaaacuguu

SEQ ID NO: 1187608 - RNA, 19 nt, Homo sapiens
  misc_RNA (1)...(19): siRNA sense strand
caacacccaacacuuauaa

SEQ ID NO: 1187609 - RNA, 19 nt, Homo sapiens
  misc_RNA (1)...(19): siRNA sense strand
gggcacagcagaagaacua

SEQ ID NO: 1187610 - RNA, 19 nt, Homo sapiens
  misc_RNA (1)...(19): siRNA sense strand
uagagaauguggguuuaua

SEQ ID NO: 1187611 - RNA, 19 nt, Homo sapiens
  misc_RNA (1)...(19): siRNA sense strand
gcagaagaacuaaaggaaa

SEQ ID NO: 1187612 - RNA, 19 nt, Homo sapiens
  misc_RNA (1)...(19): siRNA sense strand
agaugaagcugacagaaga

SEQ ID NO: 1187613 - RNA, 19 nt, Homo sapiens
  misc_RNA (1)...(19): siRNA sense strand
caaagauccugugcagaaa

SEQ ID NO: 1187614 - RNA, 19 nt, Homo sapiens
  misc_RNA (1)...(19): siRNA sense strand
gagagaacaaugauaaaga

SEQ ID NO: 1187615 - RNA, 19 nt, Homo sapiens
  misc_RNA (1)...(19): siRNA sense strand
auaaagaacucaccgaaca

SEQ ID NO: 1187616 - RNA, 19 nt, Homo sapiens
  misc_RNA (1)...(19): siRNA sense strand
gaacacagaaacagcucua

SEQ ID NO: 1187617 - RNA, 19 nt, Homo sapiens
  misc_RNA (1)...(19): siRNA sense strand
gagcuccucugaagcaaau

SEQ ID NO: 1187618 - RNA, 19 nt, Homo sapiens
  misc_RNA (1)...(19): siRNA sense strand
gagaauguggguuuauaaa

SEQ ID NO: 1187619 - RNA, 19 nt, Homo sapiens
  misc_RNA (1)...(19): siRNA sense strand
agaaacagcucuagacaac

SEQ ID NO: 1187620 - RNA, 19 nt, Homo sapiens
  misc_RNA (1)...(19): siRNA sense strand
gugcuggaaucaaaggaua

SEQ ID NO: 1187621 - RNA, 19 nt, Homo sapiens
  misc_RNA (1)...(19): siRNA sense strand
caaaggauacagacaguga

SEQ ID NO: 1187622 - RNA, 19 nt, Homo sapiens
  misc_RNA (1)...(19): siRNA sense strand
agaauacuguggagagauu

SEQ ID NO: 1187623 - RNA, 19 nt, Homo sapiens
  misc_RNA (1)...(19): siRNA sense strand
gaaugcccuuggucaauau

SEQ ID NO: 1187624 - RNA, 19 nt, Homo sapiens
  misc_RNA (1)...(19): siRNA sense strand
gcagcuuucuguucaacuu

SEQ ID NO: 1187625 - RNA, 19 nt, Homo sapiens
  misc_RNA (1)...(19): siRNA sense strand
gacccugaccucugucuua

SEQ ID NO: 1187626 - RNA, 19 nt, Homo sapiens
  misc_RNA (1)...(19): siRNA sense strand
cuaaccauguuuacaacua

SEQ ID NO: 1187627 - RNA, 19 nt, Homo sapiens
  misc_RNA (1)...(19): siRNA sense strand
ccucaauguuuccagauaa

SEQ ID NO: 1187628 - RNA, 19 nt, Homo sapiens
  misc_RNA (1)...(19): siRNA sense strand
gaccaaaugcuaaaucugu

SEQ ID NO: 1187629 - RNA, 19 nt, Homo sapiens
  misc_RNA (1)...(19): siRNA sense strand
gaagagaagaaagaugaaa

SEQ ID NO: 1187630 - RNA, 19 nt, Homo sapiens
  misc_RNA (1)...(19): siRNA sense strand
gcaacacccaacacuuaua

SEQ ID NO: 1187631 - RNA, 19 nt, Homo sapiens
  misc_RNA (1)...(19): siRNA sense strand
uaugggagaugaaguuuua

SEQ ID NO: 1187632 - RNA, 19 nt, Homo sapiens
  misc_RNA (1)...(19): siRNA sense strand
agacgauccugaagaaaga

SEQ ID NO: 1187633 - RNA, 19 nt, Homo sapiens
  misc_RNA (1)...(19): siRNA sense strand
cagaagaacuaaaggaaaa

SEQ ID NO: 1187634 - RNA, 19 nt, Homo sapiens
  misc_RNA (1)...(19): siRNA sense strand
ggaguggaguggugcugaa

SEQ ID NO: 1187635 - RNA, 19 nt, Homo sapiens
  misc_RNA (1)...(19): siRNA sense strand
ggagggagcaaaggaguuu

SEQ ID NO: 1187636 - RNA, 19 nt, Homo sapiens
  misc_RNA (1)...(19): siRNA sense strand
agacagguguaugaguuua

SEQ ID NO: 1187637 - RNA, 19 nt, Homo sapiens
  misc_RNA (1)...(19): siRNA sense strand
gagaugaaguuuuagauca

SEQ ID NO: 1187638 - RNA, 19 nt, Homo sapiens
  misc_RNA (1)...(19): siRNA sense strand
gcaaauucucggugucaaa

SEQ ID NO: 1187639 - RNA, 19 nt, Homo sapiens
  misc_RNA (1)...(19): siRNA sense strand
aagaagagaagaaagauga

SEQ ID NO: 1187640 - RNA, 19 nt, Homo sapiens
  misc_RNA (1)...(19): siRNA sense strand
uaaauaugacugcuuccua

SEQ ID NO: 1187641 - RNA, 19 nt, Homo sapiens
  misc_RNA (1)...(19): siRNA sense strand
gggaaaguguaugauaaau

SEQ ID NO: 1187642 - RNA, 19 nt, Homo sapiens
  misc_RNA (1)...(19): siRNA sense strand
uggagacgauccugaagaa

SEQ ID NO: 1187643 - RNA, 19 nt, Homo sapiens
  misc_RNA (1)...(19): siRNA sense strand
ggugaucacaggauaggua

SEQ ID NO: 1187644 - RNA, 19 nt, Homo sapiens
  misc_RNA (1)...(19): siRNA sense strand
gaagaagagaagaaagaug

SEQ ID NO: 1187645 - RNA, 19 nt, Homo sapiens
  misc_RNA (1)...(19): siRNA sense strand
uaaagaagaagaagagaag

SEQ ID NO: 1187646 - RNA, 19 nt, Homo sapiens
  misc_RNA (1)...(19): siRNA sense strand
ugucaaacaccaauaaaga

SEQ ID NO: 1187647 - RNA, 19 nt, Homo sapiens
  misc_RNA (1)...(19): siRNA sense strand
aagaugaagccaaauauug

SEQ ID NO: 1187648 - RNA, 19 nt, Homo sapiens
  misc_RNA (1)...(19): siRNA sense strand
gucaaagaaucuagcauca

SEQ ID NO: 1187649 - RNA, 19 nt, Homo sapiens
  misc_RNA (1)...(19): siRNA sense strand
ugacuucugugagcucauu

SEQ ID NO: 1187650 - RNA, 19 nt, Homo sapiens
  misc_RNA (1)...(19): siRNA sense strand
aauccaaacugcuaugcaa

SEQ ID NO: 1187651 - RNA, 19 nt, Homo sapiens
  misc_RNA (1)...(19): siRNA sense strand
uauugaaccuccugagaau

SEQ ID NO: 1187652 - RNA, 19 nt, Homo sapiens
  misc_RNA (1)...(19): siRNA sense strand
gagaagggaccaguuuguu

SEQ ID NO: 1187653 - RNA, 19 nt, Homo sapiens
  misc_RNA (1)...(19): siRNA sense strand
ccauuaaugugcuggaauc

SEQ ID NO: 1187654 - RNA, 19 nt, Homo sapiens
  misc_RNA (1)...(19): siRNA sense strand
gcacagcagaagaacuaaa

SEQ ID NO: 1187655 - RNA, 19 nt, Homo sapiens
  misc_RNA (1)...(19): siRNA sense strand
gagacgauccugaagaaag

SEQ ID NO: 1187656 - RNA, 19 nt, Homo sapiens
  misc_RNA (1)...(19): siRNA sense strand
caagagagccauccagacu

SEQ ID NO: 1187657 - RNA, 19 nt, Homo sapiens
  misc_RNA (1)...(19): siRNA sense strand
gaugaagccaaauauugaa

SEQ ID NO: 1187658 - RNA, 19 nt, Homo sapiens
  misc_RNA (1)...(19): siRNA sense strand
caaacaccaauaaagauga

SEQ ID NO: 1187659 - RNA, 19 nt, Homo sapiens
  misc_RNA (1)...(19): siRNA sense strand
gaauggaaacagcgaagga

SEQ ID NO: 1187660 - RNA, 19 nt, Homo sapiens
  misc_RNA (1)...(19): siRNA sense strand
gcugaugaaguaaagagua

SEQ ID NO: 1187661 - RNA, 19 nt, Homo sapiens
  misc_RNA (1)...(19): siRNA sense strand
ccacaguguuaccagcauu

SEQ ID NO: 1187662 - RNA, 19 nt, Homo sapiens
  misc_RNA (1)...(19): siRNA sense strand
cagaagagggaaaguguau

SEQ ID NO: 1187663 - RNA, 19 nt, Homo sapiens
  misc_RNA (1)...(19): siRNA sense strand
agaugaagccaaauauuga

SEQ ID NO: 1187664 - RNA, 19 nt, Homo sapiens
  misc_RNA (1)...(19): siRNA sense strand
ggagagaacaaugauaaag

SEQ ID NO: 1187665 - RNA, 19 nt, Homo sapiens
  misc_RNA (1)...(19): siRNA sense strand
augcaacacccaacacuua

SEQ ID NO: 1187666 - RNA, 19 nt, Homo sapiens
  misc_RNA (1)...(19): siRNA sense strand
gaaguaugucggcaucgaa

SEQ ID NO: 1187667 - RNA, 19 nt, Homo sapiens
  misc_RNA (1)...(19): siRNA sense strand
cugaugcccugaaguaugu

SEQ ID NO: 1187668 - RNA, 19 nt, Homo sapiens
  misc_RNA (1)...(19): siRNA sense strand
agagggaaaguguaugaua

SEQ ID NO: 1187669 - RNA, 19 nt, Homo sapiens
  misc_RNA (1)...(19): siRNA sense strand
aaacuucgagcuccucuga

SEQ ID NO: 1187670 - RNA, 19 nt, Homo sapiens
  misc_RNA (1)...(19): siRNA sense strand
gauaaagaccccaccaaaa

SEQ ID NO: 1187671 - RNA, 19 nt, Homo sapiens
  misc_RNA (1)...(19): siRNA sense strand
ucaggaugguacuuucauu

SEQ ID NO: 1187672 - RNA, 19 nt, Homo sapiens
  misc_RNA (1)...(19): siRNA sense strand
aaauacaugugcagcuuuc

SEQ ID NO: 1187673 - RNA, 19 nt, Homo sapiens
  misc_RNA (1)...(19): siRNA sense strand
gacagaagagggaaagugu

SEQ ID NO: 1187674 - RNA, 19 nt, Homo sapiens
  misc_RNA (1)...(19): siRNA sense strand
ucaauguaguucagagugu

SEQ ID NO: 1187675 - RNA, 19 nt, Homo sapiens
  misc_RNA (1)...(19): siRNA sense strand
ggacggcuccucuaaccau

SEQ ID NO: 1187676 - RNA, 19 nt, Homo sapiens
  misc_RNA (1)...(19): siRNA sense strand
gaguuuagagucaaagaau

SEQ ID NO: 1187677 - RNA, 19 nt, Homo sapiens
  misc_RNA (1)...(19): siRNA sense strand
aagaagaagagaagaaaga

SEQ ID NO: 1187678 - RNA, 19 nt, Homo sapiens
  misc_RNA (1)...(19): siRNA sense strand
gcaaaaguuaugaugguua

SEQ ID NO: 1187679 - RNA, 19 nt, Homo sapiens
  misc_RNA (1)...(19): siRNA sense strand
gcacacugcagaaagauac

SEQ ID NO: 1187680 - RNA, 19 nt, Homo sapiens
  misc_RNA (1)...(19): siRNA sense strand
guaugaguuuagagucaaa

SEQ ID NO: 1187681 - RNA, 19 nt, Homo sapiens
  misc_RNA (1)...(19): siRNA sense strand
ggaaacagcgaaggauaca

SEQ ID NO: 1187682 - RNA, 19 nt, Homo sapiens
  misc_RNA (1)...(19): siRNA sense strand
ucaaacaccaauaaagaug

SEQ ID NO: 1187683 - RNA, 19 nt, Homo sapiens
  misc_RNA (1)...(19): siRNA sense strand
caaagaaucuagcaucaua

SEQ ID NO: 1187684 - RNA, 19 nt, Homo sapiens
  misc_RNA (1)...(19): siRNA sense strand
caacauagauggaccaaau

SEQ ID NO: 1187685 - RNA, 19 nt, Homo sapiens
  misc_RNA (1)...(19): siRNA sense strand
gaggacggcuucccaauaa

SEQ ID NO: 1187686 - RNA, 19 nt, Homo sapiens
  misc_RNA (1)...(19): siRNA sense strand
gaauguggguuuauaaaug

SEQ ID NO: 1187687 - RNA, 19 nt, Homo sapiens
  misc_RNA (1)...(19): siRNA sense strand
gcugaagccucaauguuua

SEQ ID NO: 1187688 - RNA, 19 nt, Homo sapiens
  misc_RNA (1)...(19): siRNA sense strand
cagacgagcugaugaagua

SEQ ID NO: 1187689 - RNA, 19 nt, Homo sapiens
  misc_RNA (1)...(19): siRNA sense strand
gagggaaaguguaugauaa

SEQ ID NO: 1187690 - RNA, 19 nt, Homo sapiens
  misc_RNA (1)...(19): siRNA sense strand
caauaaagaugaagccaaa

SEQ ID NO: 1187691 - RNA, 19 nt, Homo sapiens
  misc_RNA (1)...(19): siRNA sense strand
gaacggaaaucuuaaacca

SEQ ID NO: 1187692 - RNA, 19 nt, Homo sapiens
  misc_RNA (1)...(19): siRNA sense strand
gcagaaagauacagcugaa

SEQ ID NO: 1187693 - RNA, 19 nt, Homo sapiens
  misc_RNA (1)...(19): siRNA sense strand
gcacuuacuaugacaauuu

SEQ ID NO: 1187694 - RNA, 19 nt, Homo sapiens
  misc_RNA (1)...(19): siRNA sense strand
guagacagguguaugaguu

SEQ ID NO: 1187695 - RNA, 19 nt, Homo sapiens
  misc_RNA (1)...(19): siRNA sense strand
ucaccgagaugauaaagaa

SEQ ID NO: 1187696 - RNA, 19 nt, Homo sapiens
  misc_RNA (1)...(19): siRNA sense strand
gauagagaauguggguuua

SEQ ID NO: 1187697 - RNA, 19 nt, Homo sapiens
  misc_RNA (1)...(19): siRNA sense strand
uaacggugaucacaggaua

SEQ ID NO: 1187698 - RNA, 19 nt, Homo sapiens
  misc_RNA (1)...(19): siRNA sense strand
gaagagggaaaguguauga

SEQ ID NO: 1187699 - RNA, 19 nt, Homo sapiens
  misc_RNA (1)...(19): siRNA sense strand
ugaaugcccuuggucaaua

SEQ ID NO: 1187700 - RNA, 19 nt, Homo sapiens
  misc_RNA (1)...(19): siRNA sense strand
aaacagcucuagacaacaa

SEQ ID NO: 1187701 - RNA, 19 nt, Homo sapiens
  misc_RNA (1)...(19): siRNA sense strand
ucaaagauccugugcagaa

SEQ ID NO: 1187702 - RNA, 19 nt, Homo sapiens
  misc_RNA (1)...(19): siRNA sense strand
ggauagagaauguggguuu

SEQ ID NO: 1187703 - RNA, 19 nt, Homo sapiens
  misc_RNA (1)...(19): siRNA sense strand
uuaaugugcuggaaucaaa

SEQ ID NO: 1187704 - RNA, 19 nt, Homo sapiens
  misc_RNA (1)...(19): siRNA sense strand
ucagagagagcaaagcuua

SEQ ID NO: 1187705 - RNA, 19 nt, Homo sapiens
  misc_RNA (1)...(19): siRNA sense strand
gcaaaucauucgguaaauc

SEQ ID NO: 1187706 - RNA, 19 nt, Homo sapiens
  misc_RNA (1)...(19): siRNA sense strand
gaucacaggauagguauuu

SEQ ID NO: 1187707 - RNA, 19 nt, Homo sapiens
  misc_RNA (1)...(19): siRNA sense strand
gguggaagaugaaacuguu

SEQ ID NO: 1187708 - RNA, 19 nt, Homo sapiens
  misc_RNA (1)...(19): siRNA sense strand
caacacccaacacuuauaa

SEQ ID NO: 1187709 - RNA, 19 nt, Homo sapiens
  misc_RNA (1)...(19): siRNA sense strand
gggcacagcagaagaacua

SEQ ID NO: 1187710 - RNA, 19 nt, Homo sapiens
  misc_RNA (1)...(19): siRNA sense strand
uagagaauguggguuuaua

SEQ ID NO: 1187711 - RNA, 19 nt, Homo sapiens
  misc_RNA (1)...(19): siRNA sense strand
gcagaagaacuaaaggaaa

SEQ ID NO: 1187712 - RNA, 19 nt, Homo sapiens
  misc_RNA (1)...(19): siRNA sense strand
agaugaagcugacagaaga

SEQ ID NO: 1187713 - RNA, 19 nt, Homo sapiens
  misc_RNA (1)...(19): siRNA sense strand
caaagauccugugcagaaa

SEQ ID NO: 1187714 - RNA, 19 nt, Homo sapiens
  misc_RNA (1)...(19): siRNA sense strand
gagagaacaaugauaaaga

SEQ ID NO: 1187715 - RNA, 19 nt, Homo sapiens
  misc_RNA (1)...(19): siRNA sense strand
auaaagaacucaccgaaca

SEQ ID NO: 1187716 - RNA, 19 nt, Homo sapiens
  misc_RNA (1)...(19): siRNA sense strand
gaacacagaaacagcucua

SEQ ID NO: 1187717 - RNA, 19 nt, Homo sapiens
  misc_RNA (1)...(19): siRNA sense strand
gagcuccucugaagcaaau

SEQ ID NO: 1187718 - RNA, 19 nt, Homo sapiens
  misc_RNA (1)...(19): siRNA sense strand
gagaauguggguuuauaaa

SEQ ID NO: 1187719 - RNA, 19 nt, Homo sapiens
  misc_RNA (1)...(19): siRNA sense strand
agaaacagcucuagacaac

SEQ ID NO: 1187720 - RNA, 19 nt, Homo sapiens
  misc_RNA (1)...(19): siRNA sense strand
gugcuggaaucaaaggaua

SEQ ID NO: 1187721 - RNA, 19 nt, Homo sapiens
  misc_RNA (1)...(19): siRNA sense strand
caaaggauacagacaguga

SEQ ID NO: 1187722 - RNA, 19 nt, Homo sapiens
  misc_RNA (1)...(19): siRNA sense strand
agaauacuguggagagauu

SEQ ID NO: 1187723 - RNA, 19 nt, Homo sapiens
  misc_RNA (1)...(19): siRNA sense strand
gaaugcccuuggucaauau

SEQ ID NO: 1187724 - RNA, 19 nt, Homo sapiens
  misc_RNA (1)...(19): siRNA sense strand
gcagcuuucuguucaacuu

SEQ ID NO: 1187725 - RNA, 19 nt, Homo sapiens
  misc_RNA (1)...(19): siRNA sense strand
gacccugaccucugucuua

SEQ ID NO: 1187726 - RNA, 19 nt, Homo sapiens
  misc_RNA (1)...(19): siRNA sense strand
cuaaccauguuuacaacua

SEQ ID NO: 1187727 - RNA, 19 nt, Homo sapiens
  misc_RNA (1)...(19): siRNA sense strand
ccucaauguuuccagauaa

SEQ ID NO: 1187728 - RNA, 19 nt, Homo sapiens
  misc_RNA (1)...(19): siRNA sense strand
gaccaaaugcuaaaucugu

SEQ ID NO: 1187729 - RNA, 19 nt, Homo sapiens
  misc_RNA (1)...(19): siRNA sense strand
gaagagaagaaagaugaaa

SEQ ID NO: 1187730 - RNA, 19 nt, Homo sapiens
  misc_RNA (1)...(19): siRNA sense strand
gcaacacccaacacuuaua

SEQ ID NO: 1187731 - RNA, 19 nt, Homo sapiens
  misc_RNA (1)...(19): siRNA sense strand
uaugggagaugaaguuuua

SEQ ID NO: 1187732 - RNA, 19 nt, Homo sapiens
  misc_RNA (1)...(19): siRNA sense strand
agacgauccugaagaaaga

SEQ ID NO: 1187733 - RNA, 19 nt, Homo sapiens
  misc_RNA (1)...(19): siRNA sense strand
cagaagaacuaaaggaaaa

SEQ ID NO: 1187734 - RNA, 19 nt, Homo sapiens
  misc_RNA (1)...(19): siRNA sense strand
ggaguggaguggugcugaa

SEQ ID NO: 1187735 - RNA, 19 nt, Homo sapiens
  misc_RNA (1)...(19): siRNA sense strand
ggagggagcaaaggaguuu

SEQ ID NO: 1187736 - RNA, 19 nt, Homo sapiens
  misc_RNA (1)...(19): siRNA sense strand
agacagguguaugaguuua

SEQ ID NO: 1187737 - RNA, 19 nt, Homo sapiens
  misc_RNA (1)...(19): siRNA sense strand
gagaugaaguuuuagauca

SEQ ID NO: 1187738 - RNA, 19 nt, Homo sapiens
  misc_RNA (1)...(19): siRNA sense strand
gcaaauucucggugucaaa

SEQ ID NO: 1187739 - RNA, 19 nt, Homo sapiens
  misc_RNA (1)...(19): siRNA sense strand
aagaagagaagaaagauga

SEQ ID NO: 1187740 - RNA, 19 nt, Homo sapiens
  misc_RNA (1)...(19): siRNA sense strand
uaaauaugacugcuuccua

SEQ ID NO: 1187741 - RNA, 19 nt, Homo sapiens
  misc_RNA (1)...(19): siRNA sense strand
gggaaaguguaugauaaau

SEQ ID NO: 1187742 - RNA, 19 nt, Homo sapiens
  misc_RNA (1)...(19): siRNA sense strand
uggagacgauccugaagaa

SEQ ID NO: 1187743 - RNA, 19 nt, Homo sapiens
  misc_RNA (1)...(19): siRNA sense strand
ggugaucacaggauaggua

SEQ ID NO: 1187744 - RNA, 19 nt, Homo sapiens
  misc_RNA (1)...(19): siRNA sense strand
gaagaagagaagaaagaug

SEQ ID NO: 1187745 - RNA, 19 nt, Homo sapiens
  misc_RNA (1)...(19): siRNA sense strand
uaaagaagaagaagagaag

SEQ ID NO: 1187746 - RNA, 19 nt, Homo sapiens
  misc_RNA (1)...(19): siRNA sense strand
ugucaaacaccaauaaaga

SEQ ID NO: 1187747 - RNA, 19 nt, Homo sapiens
  misc_RNA (1)...(19): siRNA sense strand
aagaugaagccaaauauug

SEQ ID NO: 1187748 - RNA, 19 nt, Homo sapiens
  misc_RNA (1)...(19): siRNA sense strand
gucaaagaaucuagcauca

SEQ ID NO: 1187749 - RNA, 19 nt, Homo sapiens
  misc_RNA (1)...(19): siRNA sense strand
ugacuucugugagcucauu

SEQ ID NO: 1187750 - RNA, 19 nt, Homo sapiens
  misc_RNA (1)...(19): siRNA sense strand
aauccaaacugcuaugcaa

SEQ ID NO: 1187751 - RNA, 19 nt, Homo sapiens
  misc_RNA (1)...(19): siRNA sense strand
uauugaaccuccugagaau

SEQ ID NO: 1187752 - RNA, 19 nt, Homo sapiens
  misc_RNA (1)...(19): siRNA sense strand
gagaagggaccaguuuguu

SEQ ID NO: 1187753 - RNA, 19 nt, Homo sapiens
  misc_RNA (1)...(19): siRNA sense strand
ccauuaaugugcuggaauc

SEQ ID NO: 1187754 - RNA, 19 nt, Homo sapiens
  misc_RNA (1)...(19): siRNA sense strand
gcacagcagaagaacuaaa

SEQ ID NO: 1187755 - RNA, 19 nt, Homo sapiens
  misc_RNA (1)...(19): siRNA sense strand
gagacgauccugaagaaag

SEQ ID NO: 1187756 - RNA, 19 nt, Homo sapiens
  misc_RNA (1)...(19): siRNA sense strand
caagagagccauccagacu

SEQ ID NO: 1187757 - RNA, 19 nt, Homo sapiens
  misc_RNA (1)...(19): siRNA sense strand
gaugaagccaaauauugaa

SEQ ID NO: 1187758 - RNA, 19 nt, Homo sapiens
  misc_RNA (1)...(19): siRNA sense strand
caaacaccaauaaagauga

SEQ ID NO: 1187759 - RNA, 19 nt, Homo sapiens
  misc_RNA (1)...(19): siRNA sense strand
gaauggaaacagcgaagga

SEQ ID NO: 1187760 - RNA, 19 nt, Homo sapiens
  misc_RNA (1)...(19): siRNA sense strand
gcugaugaaguaaagagua

SEQ ID NO: 1187761 - RNA, 19 nt, Homo sapiens
  misc_RNA (1)...(19): siRNA sense strand
ccacaguguuaccagcauu

SEQ ID NO: 1187762 - RNA, 19 nt, Homo sapiens
  misc_RNA (1)...(19): siRNA sense strand
cagaagagggaaaguguau

SEQ ID NO: 1187763 - RNA, 19 nt, Homo sapiens
  misc_RNA (1)...(19): siRNA sense strand
agaugaagccaaauauuga

SEQ ID NO: 1187764 - RNA, 19 nt, Homo sapiens
  misc_RNA (1)...(19): siRNA sense strand
ggagagaacaaugauaaag

SEQ ID NO: 1187765 - RNA, 19 nt, Homo sapiens
  misc_RNA (1)...(19): siRNA sense strand
augcaacacccaacacuua

SEQ ID NO: 1187766 - RNA, 19 nt, Homo sapiens
  misc_RNA (1)...(19): siRNA sense strand
gaaguaugucggcaucgaa

SEQ ID NO: 1187767 - RNA, 19 nt, Homo sapiens
  misc_RNA (1)...(19): siRNA sense strand
cugaugcccugaaguaugu

SEQ ID NO: 1187768 - RNA, 19 nt, Homo sapiens
  misc_RNA (1)...(19): siRNA sense strand
agagggaaaguguaugaua

SEQ ID NO: 1187769 - RNA, 19 nt, Homo sapiens
  misc_RNA (1)...(19): siRNA sense strand
aaacuucgagcuccucuga

SEQ ID NO: 1187770 - RNA, 19 nt, Homo sapiens
  misc_RNA (1)...(19): siRNA sense strand
gauaaagaccccaccaaaa

SEQ ID NO: 1187771 - RNA, 19 nt, Homo sapiens
  misc_RNA (1)...(19): siRNA sense strand
ucaggaugguacuuucauu

SEQ ID NO: 1187772 - RNA, 19 nt, Homo sapiens
  misc_RNA (1)...(19): siRNA sense strand
aaauacaugugcagcuuuc

SEQ ID NO: 1187773 - RNA, 19 nt, Homo sapiens
  misc_RNA (1)...(19): siRNA sense strand
gacagaagagggaaagugu

SEQ ID NO: 1187774 - RNA, 19 nt, Homo sapiens
  misc_RNA (1)...(19): siRNA sense strand
ucaauguaguucagagugu

SEQ ID NO: 1187775 - RNA, 19 nt, Homo sapiens
  misc_RNA (1)...(19): siRNA sense strand
ggacggcuccucuaaccau

SEQ ID NO: 1187776 - RNA, 19 nt, Homo sapiens
  misc_RNA (1)...(19): siRNA sense strand
gaguuuagagucaaagaau

SEQ ID NO: 1187777 - RNA, 19 nt, Homo sapiens
  misc_RNA (1)...(19): siRNA sense strand
aagaagaagagaagaaaga

SEQ ID NO: 1187778 - RNA, 19 nt, Homo sapiens
  misc_RNA (1)...(19): siRNA sense strand
gcaaaaguuaugaugguua

SEQ ID NO: 1187779 - RNA, 19 nt, Homo sapiens
  misc_RNA (1)...(19): siRNA sense strand
gcacacugcagaaagauac

SEQ ID NO: 1187780 - RNA, 19 nt, Homo sapiens
  misc_RNA (1)...(19): siRNA sense strand
guaugaguuuagagucaaa

SEQ ID NO: 1187781 - RNA, 19 nt, Homo sapiens
  misc_RNA (1)...(19): siRNA sense strand
ggaaacagcgaaggauaca

SEQ ID NO: 1187782 - RNA, 19 nt, Homo sapiens
  misc_RNA (1)...(19): siRNA sense strand
ucaaacaccaauaaagaug

SEQ ID NO: 1187783 - RNA, 19 nt, Homo sapiens
  misc_RNA (1)...(19): siRNA sense strand
uaagugacaucaacucaga

SEQ ID NO: 1187784 - RNA, 19 nt, Homo sapiens
  misc_RNA (1)...(19): siRNA sense strand
gguaaagcguuccauguca

SEQ ID NO: 1187785 - RNA, 19 nt, Homo sapiens
  misc_RNA (1)...(19): siRNA sense strand
ggaccuaagugacaucaac

SEQ ID NO: 1187786 - RNA, 19 nt, Homo sapiens
  misc_RNA (1)...(19): siRNA sense strand
ggacagcagcggauguguu

SEQ ID NO: 1187787 - RNA, 19 nt, Homo sapiens
  misc_RNA (1)...(19): siRNA sense strand
cagcggauguguucagucu

SEQ ID NO: 1187788 - RNA, 19 nt, Homo sapiens
  misc_RNA (1)...(19): siRNA sense strand
gaaccuccucagccuguuu

SEQ ID NO: 1187789 - RNA, 19 nt, Homo sapiens
  misc_RNA (1)...(19): siRNA sense strand
ugucaagccugccaacauc

SEQ ID NO: 1187790 - RNA, 19 nt, Homo sapiens
  misc_RNA (1)...(19): siRNA sense strand
gcugcaagcugggugacuu

SEQ ID NO: 1187791 - RNA, 19 nt, Homo sapiens
  misc_RNA (1)...(19): siRNA sense strand
gggaugcccuggaccuaag

SEQ ID NO: 1187792 - RNA, 19 nt, Homo sapiens
  misc_RNA (1)...(19): siRNA sense strand
gacagcagcggauguguuc

SEQ ID NO: 1187793 - RNA, 19 nt, Homo sapiens
  misc_RNA (1)...(19): siRNA sense strand
gcucaccacccugcaguuu

SEQ ID NO: 1187794 - RNA, 19 nt, Homo sapiens
  misc_RNA (1)...(19): siRNA sense strand
gcagagcccuggguaugac

SEQ ID NO: 1187795 - RNA, 19 nt, Homo sapiens
  misc_RNA (1)...(19): siRNA sense strand
guucuguccuugucaugau

SEQ ID NO: 1187796 - RNA, 19 nt, Homo sapiens
  misc_RNA (1)...(19): siRNA sense strand
acggagaggucuucaaggu

SEQ ID NO: 1187797 - RNA, 19 nt, Homo sapiens
  misc_RNA (1)...(19): siRNA sense strand
ccacgcagaaccuggauuc

SEQ ID NO: 1187798 - RNA, 19 nt, Homo sapiens
  misc_RNA (1)...(19): siRNA sense strand
gcgguaaagcguuccaugu

SEQ ID NO: 1187799 - RNA, 19 nt, Homo sapiens
  misc_RNA (1)...(19): siRNA sense strand
ccuggauucucccucaaga

SEQ ID NO: 1187800 - RNA, 19 nt, Homo sapiens
  misc_RNA (1)...(19): siRNA sense strand
ucaccacccugcaguuugc

SEQ ID NO: 1187801 - RNA, 19 nt, Homo sapiens
  misc_RNA (1)...(19): siRNA sense strand
ucaaggugcgcuccaagga

SEQ ID NO: 1187802 - RNA, 19 nt, Homo sapiens
  misc_RNA (1)...(19): siRNA sense strand
cgagcugcguucuguccuu

SEQ ID NO: 1187803 - RNA, 19 nt, Homo sapiens
  misc_RNA (1)...(19): siRNA sense strand
cuacggagaggucuucaag

SEQ ID NO: 1187804 - RNA, 19 nt, Homo sapiens
  misc_RNA (1)...(19): siRNA sense strand
acagcagccucuccagcaa

SEQ ID NO: 1187805 - RNA, 19 nt, Homo sapiens
  misc_RNA (1)...(19): siRNA sense strand
cuuccgagcugcguucugu

SEQ ID NO: 1187806 - RNA, 19 nt, Homo sapiens
  misc_RNA (1)...(19): siRNA sense strand
ggaaccuccucagccuguu

SEQ ID NO: 1187807 - RNA, 19 nt, Homo sapiens
  misc_RNA (1)...(19): siRNA sense strand
cuacuuccgccacgcagaa

SEQ ID NO: 1187808 - RNA, 19 nt, Homo sapiens
  misc_RNA (1)...(19): siRNA sense strand
gcccuggaccuaagugaca

SEQ ID NO: 1187809 - RNA, 19 nt, Homo sapiens
  misc_RNA (1)...(19): siRNA sense strand
gguaaagcguuccauguca

SEQ ID NO: 1187810 - RNA, 19 nt, Homo sapiens
  misc_RNA (1)...(19): siRNA sense strand
ggacagcagcggauguguu

SEQ ID NO: 1187811 - RNA, 19 nt, Homo sapiens
  misc_RNA (1)...(19): siRNA sense strand
cagcggauguguucagucu

SEQ ID NO: 1187812 - RNA, 19 nt, Homo sapiens
  misc_RNA (1)...(19): siRNA sense strand
ugucaagccugccaacauc

SEQ ID NO: 1187813 - RNA, 19 nt, Homo sapiens
  misc_RNA (1)...(19): siRNA sense strand
gcugcaagcugggugacuu

SEQ ID NO: 1187814 - RNA, 19 nt, Homo sapiens
  misc_RNA (1)...(19): siRNA sense strand
gacagcagcggauguguuc

SEQ ID NO: 1187815 - RNA, 19 nt, Homo sapiens
  misc_RNA (1)...(19): siRNA sense strand
gcucaccacccugcaguuu

SEQ ID NO: 1187816 - RNA, 19 nt, Homo sapiens
  misc_RNA (1)...(19): siRNA sense strand
gcagagcccuggguaugac

SEQ ID NO: 1187817 - RNA, 19 nt, Homo sapiens
  misc_RNA (1)...(19): siRNA sense strand
guucuguccuugucaugau

SEQ ID NO: 1187818 - RNA, 19 nt, Homo sapiens
  misc_RNA (1)...(19): siRNA sense strand
acggagaggucuucaaggu

SEQ ID NO: 1187819 - RNA, 19 nt, Homo sapiens
  misc_RNA (1)...(19): siRNA sense strand
ccacgcagaaccuggauuc

SEQ ID NO: 1187820 - RNA, 19 nt, Homo sapiens
  misc_RNA (1)...(19): siRNA sense strand
gcgguaaagcguuccaugu

SEQ ID NO: 1187821 - RNA, 19 nt, Homo sapiens
  misc_RNA (1)...(19): siRNA sense strand
ccuggauucucccucaaga

SEQ ID NO: 1187822 - RNA, 19 nt, Homo sapiens
  misc_RNA (1)...(19): siRNA sense strand
ucaccacccugcaguuugc

SEQ ID NO: 1187823 - RNA, 19 nt, Homo sapiens
  misc_RNA (1)...(19): siRNA sense strand
ucaaggugcgcuccaagga

SEQ ID NO: 1187824 - RNA, 19 nt, Homo sapiens
  misc_RNA (1)...(19): siRNA sense strand
cgagcugcguucuguccuu

SEQ ID NO: 1187825 - RNA, 19 nt, Homo sapiens
  misc_RNA (1)...(19): siRNA sense strand
cuacggagaggucuucaag

SEQ ID NO: 1187826 - RNA, 19 nt, Homo sapiens
  misc_RNA (1)...(19): siRNA sense strand
acagcagccucuccagcaa

SEQ ID NO: 1187827 - RNA, 19 nt, Homo sapiens
  misc_RNA (1)...(19): siRNA sense strand
cuuccgagcugcguucugu

SEQ ID NO: 1187828 - RNA, 19 nt, Homo sapiens
  misc_RNA (1)...(19): siRNA sense strand
cuacuuccgccacgcagaa

SEQ ID NO: 1187829 - RNA, 19 nt, Homo sapiens
  misc_RNA (1)...(19): siRNA sense strand
gaugugcgcuuccagcaaa

SEQ ID NO: 1187830 - RNA, 19 nt, Homo sapiens
  misc_RNA (1)...(19): siRNA sense strand
gcaccgacaugucacucuu

SEQ ID NO: 1187831 - RNA, 19 nt, Homo sapiens
  misc_RNA (1)...(19): siRNA sense strand
gagcugcgcugcguguuca

SEQ ID NO: 1187832 - RNA, 19 nt, Homo sapiens
  misc_RNA (1)...(19): siRNA sense strand
caacgagggcuacgugaac

SEQ ID NO: 1187833 - RNA, 19 nt, Homo sapiens
  misc_RNA (1)...(19): siRNA sense strand
ucaacgagggcuacgugaa

SEQ ID NO: 1187834 - RNA, 19 nt, Homo sapiens
  misc_RNA (1)...(19): siRNA sense strand
gagcaaagaugaugugauu

SEQ ID NO: 1187835 - RNA, 19 nt, Homo sapiens
  misc_RNA (1)...(19): siRNA sense strand
gaaaggaugugcccgauau

SEQ ID NO: 1187836 - RNA, 19 nt, Homo sapiens
  misc_RNA (1)...(19): siRNA sense strand
ccacaaacaugaaauugaa

SEQ ID NO: 1187837 - RNA, 19 nt, Homo sapiens
  misc_RNA (1)...(19): siRNA sense strand
ggaggagccugcugaguuu

SEQ ID NO: 1187838 - RNA, 19 nt, Homo sapiens
  misc_RNA (1)...(19): siRNA sense strand
gagcauggcggaacagaua

SEQ ID NO: 1187839 - RNA, 19 nt, Homo sapiens
  misc_RNA (1)...(19): siRNA sense strand
caacguggaugcuggcaaa

SEQ ID NO: 1187840 - RNA, 19 nt, Homo sapiens
  misc_RNA (1)...(19): siRNA sense strand
ggaccaagaucugugagaa

SEQ ID NO: 1187841 - RNA, 19 nt, Homo sapiens
  misc_RNA (1)...(19): siRNA sense strand
ggagagaccauauauguca

SEQ ID NO: 1187842 - RNA, 19 nt, Homo sapiens
  misc_RNA (1)...(19): siRNA sense strand
gaugaagccuccucuguag

SEQ ID NO: 1187843 - RNA, 19 nt, Homo sapiens
  misc_RNA (1)...(19): siRNA sense strand
gaaccuagaucugcugaag

SEQ ID NO: 1187844 - RNA, 19 nt, Homo sapiens
  misc_RNA (1)...(19): siRNA sense strand
caauguaccugucuuugug

SEQ ID NO: 1187845 - RNA, 19 nt, Homo sapiens
  misc_RNA (1)...(19): siRNA sense strand
gcaaagaugaugugauugu

SEQ ID NO: 1187846 - RNA, 19 nt, Homo sapiens
  misc_RNA (1)...(19): siRNA sense strand
ccacgaaagucauuaccuu

SEQ ID NO: 1187847 - RNA, 19 nt, Homo sapiens
  misc_RNA (1)...(19): siRNA sense strand
uuccagaucuccaacguua

SEQ ID NO: 1187848 - RNA, 19 nt, Homo sapiens
  misc_RNA (1)...(19): siRNA sense strand
gaaagucauuaccuucauc

SEQ ID NO: 1187849 - RNA, 19 nt, Homo sapiens
  misc_RNA (1)...(19): siRNA sense strand
ggacaauggccgaggcuuu

SEQ ID NO: 1187850 - RNA, 19 nt, Homo sapiens
  misc_RNA (1)...(19): siRNA sense strand
gcggagagaccauauaugu

SEQ ID NO: 1187851 - RNA, 19 nt, Homo sapiens
  misc_RNA (1)...(19): siRNA sense strand
ucaccaagauugacaugug

SEQ ID NO: 1187852 - RNA, 19 nt, Homo sapiens
  misc_RNA (1)...(19): siRNA sense strand
caaggccacuguacacuuc

SEQ ID NO: 1187853 - RNA, 19 nt, Homo sapiens
  misc_RNA (1)...(19): siRNA sense strand
cgacuuggcuggucaugag

SEQ ID NO: 1187854 - RNA, 19 nt, Homo sapiens
  misc_RNA (1)...(19): siRNA sense strand
ucaccaggcugccggaaga

SEQ ID NO: 1187855 - RNA, 19 nt, Homo sapiens
  misc_RNA (1)...(19): siRNA sense strand
gaaacgaguaggagacaau

SEQ ID NO: 1187856 - RNA, 19 nt, Homo sapiens
  misc_RNA (1)...(19): siRNA sense strand
gccaacauccugcaagaaa

SEQ ID NO: 1187857 - RNA, 19 nt, Homo sapiens
  misc_RNA (1)...(19): siRNA sense strand
gaaacucuuccgccacaaa

SEQ ID NO: 1187858 - RNA, 19 nt, Homo sapiens
  misc_RNA (1)...(19): siRNA sense strand
ccaagccgcagcagauuaa

SEQ ID NO: 1187859 - RNA, 19 nt, Homo sapiens
  misc_RNA (1)...(19): siRNA sense strand
cugaguaccugcacauaga

SEQ ID NO: 1187860 - RNA, 19 nt, Homo sapiens
  misc_RNA (1)...(19): siRNA sense strand
ggaagggcauggugauggu

SEQ ID NO: 1187861 - RNA, 19 nt, Homo sapiens
  misc_RNA (1)...(19): siRNA sense strand
aagaaacccugaagcuguu

SEQ ID NO: 1187862 - RNA, 19 nt, Homo sapiens
  misc_RNA (1)...(19): siRNA sense strand
caacgacauucugggcuuu

SEQ ID NO: 1187863 - RNA, 19 nt, Homo sapiens
  misc_RNA (1)...(19): siRNA sense strand
gagaugaagccuccucugu

SEQ ID NO: 1187864 - RNA, 19 nt, Homo sapiens
  misc_RNA (1)...(19): siRNA sense strand
gaaguccacgaaagucauu

SEQ ID NO: 1187865 - RNA, 19 nt, Homo sapiens
  misc_RNA (1)...(19): siRNA sense strand
gcaagcgcaugccugucaa

SEQ ID NO: 1187866 - RNA, 19 nt, Homo sapiens
  misc_RNA (1)...(19): siRNA sense strand
gacaauggccgaggcuuug

SEQ ID NO: 1187867 - RNA, 19 nt, Homo sapiens
  misc_RNA (1)...(19): siRNA sense strand
agaugaagccuccucugua

SEQ ID NO: 1187868 - RNA, 19 nt, Homo sapiens
  misc_RNA (1)...(19): siRNA sense strand
ggacaaggccacuguacac

SEQ ID NO: 1187869 - RNA, 19 nt, Homo sapiens
  misc_RNA (1)...(19): siRNA sense strand
cgaaagucauuaccuucau

SEQ ID NO: 1187870 - RNA, 19 nt, Homo sapiens
  misc_RNA (1)...(19): siRNA sense strand
gagaccauauaugucauug

SEQ ID NO: 1187871 - RNA, 19 nt, Homo sapiens
  misc_RNA (1)...(19): siRNA sense strand
ggaaacgaguaggagacaa

SEQ ID NO: 1187872 - RNA, 19 nt, Homo sapiens
  misc_RNA (1)...(19): siRNA sense strand
caaagaugaugugauuguc

SEQ ID NO: 1187873 - RNA, 19 nt, Homo sapiens
  misc_RNA (1)...(19): siRNA sense strand
gcacuggcacucaauguac

SEQ ID NO: 1187874 - RNA, 19 nt, Homo sapiens
  misc_RNA (1)...(19): siRNA sense strand
gagaaguccacgaaaguca

SEQ ID NO: 1187875 - RNA, 19 nt, Homo sapiens
  misc_RNA (1)...(19): siRNA sense strand
ugacagugaaggcaaugua

SEQ ID NO: 1187876 - RNA, 19 nt, Homo sapiens
  misc_RNA (1)...(19): siRNA sense strand
gccacaaacaugaaauuga

SEQ ID NO: 1187877 - RNA, 19 nt, Homo sapiens
  misc_RNA (1)...(19): siRNA sense strand
ugaagagcauggcggaaca

SEQ ID NO: 1187878 - RNA, 19 nt, Homo sapiens
  misc_RNA (1)...(19): siRNA sense strand
gguaacuuccuguccauug

SEQ ID NO: 1187879 - RNA, 19 nt, Homo sapiens
  misc_RNA (1)...(19): siRNA sense strand
ugagaggccugaucaagcu

SEQ ID NO: 1187880 - RNA, 19 nt, Homo sapiens
  misc_RNA (1)...(19): siRNA sense strand
gacgagggaugcggagaga

SEQ ID NO: 1187881 - RNA, 19 nt, Homo sapiens
  misc_RNA (1)...(19): siRNA sense strand
ugucacagccuccaacuuc

SEQ ID NO: 1187882 - RNA, 19 nt, Homo sapiens
  misc_RNA (1)...(19): siRNA sense strand
guacacuuccgcuucauca

SEQ ID NO: 1187883 - RNA, 19 nt, Homo sapiens
  misc_RNA (1)...(19): siRNA sense strand
gcagagcaaagaugaugug

SEQ ID NO: 1187884 - RNA, 19 nt, Homo sapiens
  misc_RNA (1)...(19): siRNA sense strand
ggaguuugaggccgagauu

SEQ ID NO: 1187885 - RNA, 19 nt, Homo sapiens
  misc_RNA (1)...(19): siRNA sense strand
ccuuugcgcugaagaagau

SEQ ID NO: 1187886 - RNA, 19 nt, Homo sapiens
  misc_RNA (1)...(19): siRNA sense strand
ugaaggcaauguagugaac

SEQ ID NO: 1187887 - RNA, 19 nt, Homo sapiens
  misc_RNA (1)...(19): siRNA sense strand
caccaagauugacaugugu

SEQ ID NO: 1187888 - RNA, 19 nt, Homo sapiens
  misc_RNA (1)...(19): siRNA sense strand
aaaaugcagucgacgaaaa

SEQ ID NO: 1187889 - RNA, 19 nt, Homo sapiens
  misc_RNA (1)...(19): siRNA sense strand
gagagaccauauaugucau

SEQ ID NO: 1187890 - RNA, 19 nt, Homo sapiens
  misc_RNA (1)...(19): siRNA sense strand
ggcacuggcacucaaugua

SEQ ID NO: 1187891 - RNA, 19 nt, Homo sapiens
  misc_RNA (1)...(19): siRNA sense strand
guaacuuccuguccauugc

SEQ ID NO: 1187892 - RNA, 19 nt, Homo sapiens
  misc_RNA (1)...(19): siRNA sense strand
ugaaaggaugugcccgaua

SEQ ID NO: 1187893 - RNA, 19 nt, Homo sapiens
  misc_RNA (1)...(19): siRNA sense strand
gaugcggagagaccauaua

SEQ ID NO: 1187894 - RNA, 19 nt, Homo sapiens
  misc_RNA (1)...(19): siRNA sense strand
acacugagaggccugauca

SEQ ID NO: 1187895 - RNA, 19 nt, Homo sapiens
  misc_RNA (1)...(19): siRNA sense strand
ucaauguaccugucuuugu

SEQ ID NO: 1187896 - RNA, 19 nt, Homo sapiens
  misc_RNA (1)...(19): siRNA sense strand
uggcuggucaugagaagua

SEQ ID NO: 1187897 - RNA, 19 nt, Homo sapiens
  misc_RNA (1)...(19): siRNA sense strand
ugugagaaguccacgaaag

SEQ ID NO: 1187898 - RNA, 19 nt, Homo sapiens
  misc_RNA (1)...(19): siRNA sense strand
cagaugggacugaguaugg

SEQ ID NO: 1187899 - RNA, 19 nt, Homo sapiens
  misc_RNA (1)...(19): siRNA sense strand
aggaggagccugcugaguu

SEQ ID NO: 1187900 - RNA, 19 nt, Homo sapiens
  misc_RNA (1)...(19): siRNA sense strand
gugagaaguccacgaaagu

SEQ ID NO: 1187901 - RNA, 19 nt, Homo sapiens
  misc_RNA (1)...(19): siRNA sense strand
cacuuccgcuucaucaaga

SEQ ID NO: 1187902 - RNA, 19 nt, Homo sapiens
  misc_RNA (1)...(19): siRNA sense strand
gagcauggacaaggacugu

SEQ ID NO: 1187903 - RNA, 19 nt, Homo sapiens
  misc_RNA (1)...(19): siRNA sense strand
guccauugcugucaaaucc

SEQ ID NO: 1187904 - RNA, 19 nt, Homo sapiens
  misc_RNA (1)...(19): siRNA sense strand
ccagaucuccaacguuaca

SEQ ID NO: 1187905 - RNA, 19 nt, Homo sapiens
  misc_RNA (1)...(19): siRNA sense strand
caugagaaguaccugaaaa

SEQ ID NO: 1187906 - RNA, 19 nt, Homo sapiens
  misc_RNA (1)...(19): siRNA sense strand
ccaacauccugcaagaaac

SEQ ID NO: 1187907 - RNA, 19 nt, Homo sapiens
  misc_RNA (1)...(19): siRNA sense strand
gaguaugggcugagugaag

SEQ ID NO: 1187908 - RNA, 19 nt, Homo sapiens
  misc_RNA (1)...(19): siRNA sense strand
ggccagacagcauccuuug

SEQ ID NO: 1187909 - RNA, 19 nt, Homo sapiens
  misc_RNA (1)...(19): siRNA sense strand
gugcagagcaaagaugaug

SEQ ID NO: 1187910 - RNA, 19 nt, Homo sapiens
  misc_RNA (1)...(19): siRNA sense strand
guagugaacaagccugaca

SEQ ID NO: 1187911 - RNA, 19 nt, Homo sapiens
  misc_RNA (1)...(19): siRNA sense strand
gcuuggcacuggcacucaa

SEQ ID NO: 1187912 - RNA, 19 nt, Homo sapiens
  misc_RNA (1)...(19): siRNA sense strand
ugagugaagcugacaugga

SEQ ID NO: 1187913 - RNA, 19 nt, Homo sapiens
  misc_RNA (1)...(19): siRNA sense strand
gggaugcggagagaccaua

SEQ ID NO: 1187914 - RNA, 19 nt, Homo sapiens
  misc_RNA (1)...(19): siRNA sense strand
cugccaacauccugcaaga

SEQ ID NO: 1187915 - RNA, 19 nt, Homo sapiens
  misc_RNA (1)...(19): siRNA sense strand
ggaguggaccaagaucugu

SEQ ID NO: 1187916 - RNA, 19 nt, Homo sapiens
  misc_RNA (1)...(19): siRNA sense strand
ccauugcugucaaauccau

SEQ ID NO: 1187917 - RNA, 19 nt, Homo sapiens
  misc_RNA (1)...(19): siRNA sense strand
accaagaucugugagaagu

SEQ ID NO: 1187918 - RNA, 19 nt, Homo sapiens
  misc_RNA (1)...(19): siRNA sense strand
ggccugaucaagcugaaug

SEQ ID NO: 1187919 - RNA, 19 nt, Homo sapiens
  misc_RNA (1)...(19): siRNA sense strand
aaagaugaugugauuguca

SEQ ID NO: 1187920 - RNA, 19 nt, Homo sapiens
  misc_RNA (1)...(19): siRNA sense strand
gcacucaauguaccugucu

SEQ ID NO: 1187921 - RNA, 19 nt, Homo sapiens
  misc_RNA (1)...(19): siRNA sense strand
gucacagccuccaacuuca

SEQ ID NO: 1187922 - RNA, 19 nt, Homo sapiens
  misc_RNA (1)...(19): siRNA sense strand
gggacaaggccacuguaca

SEQ ID NO: 1187923 - RNA, 19 nt, Homo sapiens
  misc_RNA (1)...(19): siRNA sense strand
gacagugaaggcaauguag

SEQ ID NO: 1187924 - RNA, 19 nt, Homo sapiens
  misc_RNA (1)...(19): siRNA sense strand
uccaagccgcagcagauua

SEQ ID NO: 1187925 - RNA, 19 nt, Homo sapiens
  misc_RNA (1)...(19): siRNA sense strand
gaggccugaucaagcugaa

SEQ ID NO: 1187926 - RNA, 19 nt, Homo sapiens
  misc_RNA (1)...(19): siRNA sense strand
gcauggcggaacagauaga

SEQ ID NO: 1187927 - RNA, 19 nt, Homo sapiens
  misc_RNA (1)...(19): siRNA sense strand
ucauuaccuucaucgacuu

SEQ ID NO: 1187928 - RNA, 19 nt, Homo sapiens
  misc_RNA (1)...(19): siRNA sense strand
gaccaagaucugugagaag

SEQ ID NO: 1187929 - RNA, 19 nt, Homo sapiens
  misc_RNA (1)...(19): siRNA sense strand
aaggcaauguagugaacaa

SEQ ID NO: 1187930 - RNA, 19 nt, Homo sapiens
  misc_RNA (1)...(19): siRNA sense strand
gucaugagaaguaccugaa

SEQ ID NO: 1187931 - RNA, 19 nt, Homo sapiens
  misc_RNA (1)...(19): siRNA sense strand
acuguacacuuccgcuuca

SEQ ID NO: 1187932 - RNA, 19 nt, Homo sapiens
  misc_RNA (1)...(19): siRNA sense strand
ggaugugcccgauauucca

SEQ ID NO: 1187933 - RNA, 19 nt, Homo sapiens
  misc_RNA (1)...(19): siRNA sense strand
gcaaccagcugccugcuua

SEQ ID NO: 1187934 - RNA, 19 nt, Homo sapiens
  misc_RNA (1)...(19): siRNA sense strand
gaaaugugcuuccucucuu

SEQ ID NO: 1187935 - RNA, 19 nt, Homo sapiens
  misc_RNA (1)...(19): siRNA sense strand
cacauucacuuucaacuuu

SEQ ID NO: 1187936 - RNA, 19 nt, Homo sapiens
  misc_RNA (1)...(19): siRNA sense strand
gcccaagucuccaucauga

SEQ ID NO: 1187937 - RNA, 19 nt, Homo sapiens
  misc_RNA (1)...(19): siRNA sense strand
cauggacuaugaagaauuu

SEQ ID NO: 1187938 - RNA, 19 nt, Homo sapiens
  misc_RNA (1)...(19): siRNA sense strand
acacuuggcugugcuauga

SEQ ID NO: 1187939 - RNA, 19 nt, Homo sapiens
  misc_RNA (1)...(19): siRNA sense strand
cagaucaccugguuuguau

SEQ ID NO: 1187940 - RNA, 19 nt, Homo sapiens
  misc_RNA (1)...(19): siRNA sense strand
uggcgaagcuggccgaauu

SEQ ID NO: 1187941 - RNA, 19 nt, Homo sapiens
  misc_RNA (1)...(19): siRNA sense strand
caaugaaggucagcaauuc

SEQ ID NO: 1187942 - RNA, 19 nt, Homo sapiens
  misc_RNA (1)...(19): siRNA sense strand
ggaccugguuccuucuuug

SEQ ID NO: 1187943 - RNA, 19 nt, Homo sapiens
  misc_RNA (1)...(19): siRNA sense strand
ccagacacauucacuuuca

SEQ ID NO: 1187944 - RNA, 19 nt, Homo sapiens
  misc_RNA (1)...(19): siRNA sense strand
gcacaugggcuuucuaugc

SEQ ID NO: 1187945 - RNA, 19 nt, Homo sapiens
  misc_RNA (1)...(19): siRNA sense strand
gcugugcuaugaagugaaa

SEQ ID NO: 1187946 - RNA, 19 nt, Homo sapiens
  misc_RNA (1)...(19): siRNA sense strand
gcaacgaggcuaagaaucu

SEQ ID NO: 1187947 - RNA, 19 nt, Homo sapiens
  misc_RNA (1)...(19): siRNA sense strand
gcaccuggguccugaugga

SEQ ID NO: 1187948 - RNA, 19 nt, Homo sapiens
  misc_RNA (1)...(19): siRNA sense strand
ggagaacacacacgugaga

SEQ ID NO: 1187949 - RNA, 19 nt, Homo sapiens
  misc_RNA (1)...(19): siRNA sense strand
gagcggauguaucgagaca

SEQ ID NO: 1187950 - RNA, 19 nt, Homo sapiens
  misc_RNA (1)...(19): siRNA sense strand
aaacgaacccauccucuau

SEQ ID NO: 1187951 - RNA, 19 nt, Homo sapiens
  misc_RNA (1)...(19): siRNA sense strand
gaggccagguguauuucaa

SEQ ID NO: 1187952 - RNA, 19 nt, Homo sapiens
  misc_RNA (1)...(19): siRNA sense strand
gcgugacgaucauggacua

SEQ ID NO: 1187953 - RNA, 19 nt, Homo sapiens
  misc_RNA (1)...(19): siRNA sense strand
uuacaaguguuuccagauc

SEQ ID NO: 1187954 - RNA, 19 nt, Homo sapiens
  misc_RNA (1)...(19): siRNA sense strand
gcggauguaucgagacaca

SEQ ID NO: 1187955 - RNA, 19 nt, Homo sapiens
  misc_RNA (1)...(19): siRNA sense strand
cacaugggcuuucuaugca

SEQ ID NO: 1187956 - RNA, 19 nt, Homo sapiens
  misc_RNA (1)...(19): siRNA sense strand
gagacacauucuacgacaa

SEQ ID NO: 1187957 - RNA, 19 nt, Homo sapiens
  misc_RNA (1)...(19): siRNA sense strand
acaaugaaggucagcaauu

SEQ ID NO: 1187958 - RNA, 19 nt, Homo sapiens
  misc_RNA (1)...(19): siRNA sense strand
agaccuacuugugcuauga

SEQ ID NO: 1187959 - RNA, 19 nt, Homo sapiens
  misc_RNA (1)...(19): siRNA sense strand
ccugauggauccagacaca

SEQ ID NO: 1187960 - RNA, 19 nt, Homo sapiens
  misc_RNA (1)...(19): siRNA sense strand
cacauucuacgacaacuuu

SEQ ID NO: 1187961 - RNA, 19 nt, Homo sapiens
  misc_RNA (1)...(19): siRNA sense strand
aaaugugcuuccucucuug

SEQ ID NO: 1187962 - RNA, 19 nt, Homo sapiens
  misc_RNA (1)...(19): siRNA sense strand
guacaaugaaggucagcaa

SEQ ID NO: 1187963 - RNA, 19 nt, Homo sapiens
  misc_RNA (1)...(19): siRNA sense strand
ccagcugccugcuuacaag

SEQ ID NO: 1187964 - RNA, 19 nt, Homo sapiens
  misc_RNA (1)...(19): siRNA sense strand
gcccugggauggacuagag

SEQ ID NO: 1187965 - RNA, 19 nt, Homo sapiens
  misc_RNA (1)...(19): siRNA sense strand
caugaccuacgaugaguuu

SEQ ID NO: 1187966 - RNA, 19 nt, Homo sapiens
  misc_RNA (1)...(19): siRNA sense strand
cgacaacuuugaaaacgaa

SEQ ID NO: 1187967 - RNA, 19 nt, Homo sapiens
  misc_RNA (1)...(19): siRNA sense strand
gcacagccaagcccugagu

SEQ ID NO: 1187968 - RNA, 19 nt, Homo sapiens
  misc_RNA (1)...(19): siRNA sense strand
ugauggauccagacacauu

SEQ ID NO: 1187969 - RNA, 19 nt, Homo sapiens
  misc_RNA (1)...(19): siRNA sense strand
auucaugccuugguacaaa

SEQ ID NO: 1187970 - RNA, 19 nt, Homo sapiens
  misc_RNA (1)...(19): siRNA sense strand
ggacuaugaagaauuugca

SEQ ID NO: 1187971 - RNA, 19 nt, Homo sapiens
  misc_RNA (1)...(19): siRNA sense strand
ugaccuacgaugaguuuga

SEQ ID NO: 1187972 - RNA, 19 nt, Homo sapiens
  misc_RNA (1)...(19): siRNA sense strand
uaaggaggcgcugcaaaug

SEQ ID NO: 1187973 - RNA, 19 nt, Homo sapiens
  misc_RNA (1)...(19): siRNA sense strand
cugcccgcaucuaugauua

SEQ ID NO: 1187974 - RNA, 19 nt, Homo sapiens
  misc_RNA (1)...(19): siRNA sense strand
uacaaguguuuccagauca

SEQ ID NO: 1187975 - RNA, 19 nt, Homo sapiens
  misc_RNA (1)...(19): siRNA sense strand
ucuacagggucacuugguu

SEQ ID NO: 1187976 - RNA, 19 nt, Homo sapiens
  misc_RNA (1)...(19): siRNA sense strand
cagcacaugggcuuucuau

SEQ ID NO: 1187977 - RNA, 19 nt, Homo sapiens
  misc_RNA (1)...(19): siRNA sense strand
gauccagacacauucacuu

SEQ ID NO: 1187978 - RNA, 19 nt, Homo sapiens
  misc_RNA (1)...(19): siRNA sense strand
gguacaaauucgaugaaaa

SEQ ID NO: 1187979 - RNA, 19 nt, Homo sapiens
  misc_RNA (1)...(19): siRNA sense strand
gaccuacgaugaguuugag

SEQ ID NO: 1187980 - RNA, 19 nt, Homo sapiens
  misc_RNA (1)...(19): siRNA sense strand
ucaguaccacgcagaaaug

SEQ ID NO: 1187981 - RNA, 19 nt, Homo sapiens
  misc_RNA (1)...(19): siRNA sense strand
auaaggaggcgcugcaaau

SEQ ID NO: 1187982 - RNA, 19 nt, Homo sapiens
  misc_RNA (1)...(19): siRNA sense strand
acacauucacuuucaacuu

SEQ ID NO: 1187983 - RNA, 19 nt, Homo sapiens
  misc_RNA (1)...(19): siRNA sense strand
gcugccugcuuacaagugu

SEQ ID NO: 1187984 - RNA, 19 nt, Homo sapiens
  misc_RNA (1)...(19): siRNA sense strand
cgaugaaaauuaugcauuc

SEQ ID NO: 1187985 - RNA, 19 nt, Homo sapiens
  misc_RNA (1)...(19): siRNA sense strand
uggccgaauuccugucuga

SEQ ID NO: 1187986 - RNA, 19 nt, Homo sapiens
  misc_RNA (1)...(19): siRNA sense strand
cagacacauucacuuucaa

SEQ ID NO: 1187987 - RNA, 19 nt, Homo sapiens
  misc_RNA (1)...(19): siRNA sense strand
augaagaauuugcauacug

SEQ ID NO: 1187988 - RNA, 19 nt, Homo sapiens
  misc_RNA (1)...(19): siRNA sense strand
cagggucacuugguucauc

SEQ ID NO: 1187989 - RNA, 19 nt, Homo sapiens
  misc_RNA (1)...(19): siRNA sense strand
agcaauucaugccuuggua

SEQ ID NO: 1187990 - RNA, 19 nt, Homo sapiens
  misc_RNA (1)...(19): siRNA sense strand
gauggauccagacacauuc

SEQ ID NO: 1187991 - RNA, 19 nt, Homo sapiens
  misc_RNA (1)...(19): siRNA sense strand
agaaaugugcuuccucucu

SEQ ID NO: 1187992 - RNA, 19 nt, Homo sapiens
  misc_RNA (1)...(19): siRNA sense strand
ucgcugcccgcaucuauga

SEQ ID NO: 1187993 - RNA, 19 nt, Homo sapiens
  misc_RNA (1)...(19): siRNA sense strand
uggcugugcuaugaaguga

SEQ ID NO: 1187994 - RNA, 19 nt, Homo sapiens
  misc_RNA (1)...(19): siRNA sense strand
ugguacaaauucgaugaaa

SEQ ID NO: 1187995 - RNA, 19 nt, Homo sapiens
  misc_RNA (1)...(19): siRNA sense strand
cuacuacuacugggaaaga

SEQ ID NO: 1187996 - RNA, 19 nt, Homo sapiens
  misc_RNA (1)...(19): siRNA sense strand
gaaucuucucuguggcuuu

SEQ ID NO: 1187997 - RNA, 19 nt, Homo sapiens
  misc_RNA (1)...(19): siRNA sense strand
uauaaggaggcgcugcaaa

SEQ ID NO: 1187998 - RNA, 19 nt, Homo sapiens
  misc_RNA (1)...(19): siRNA sense strand
uggaccugguuccuucuuu

SEQ ID NO: 1187999 - RNA, 19 nt, Homo sapiens
  misc_RNA (1)...(19): siRNA sense strand
guggagcgccuggacaaug

SEQ ID NO: 1188000 - RNA, 19 nt, Homo sapiens
  misc_RNA (1)...(19): siRNA sense strand
gcugcccgcaucuaugauu

SEQ ID NO: 1188001 - RNA, 19 nt, Homo sapiens
  misc_RNA (1)...(19): siRNA sense strand
uggagcgccuggacaaugg

SEQ ID NO: 1188002 - RNA, 19 nt, Homo sapiens
  misc_RNA (1)...(19): siRNA sense strand
acacagaucuuaacucuaa

SEQ ID NO: 1188003 - RNA, 19 nt, Homo sapiens
  misc_RNA (1)...(19): siRNA sense strand
gaucuuaacucuaaugaug

SEQ ID NO: 1188004 - RNA, 19 nt, Homo sapiens
  misc_RNA (1)...(19): siRNA sense strand
caacugagaucaacaaugg

SEQ ID NO: 1188005 - RNA, 19 nt, Homo sapiens
  misc_RNA (1)...(19): siRNA sense strand
ggaacagacuaaagacaaa

SEQ ID NO: 1188006 - RNA, 19 nt, Homo sapiens
  misc_RNA (1)...(19): siRNA sense strand
ggcaagagaugaguuaauu

SEQ ID NO: 1188007 - RNA, 19 nt, Homo sapiens
  misc_RNA (1)...(19): siRNA sense strand
guacacagaucuuaacucu

SEQ ID NO: 1188008 - RNA, 19 nt, Homo sapiens
  misc_RNA (1)...(19): siRNA sense strand
gcaaguacacagaucuuaa

SEQ ID NO: 1188009 - RNA, 19 nt, Homo sapiens
  misc_RNA (1)...(19): siRNA sense strand
ugauguaacuggccuaaga

SEQ ID NO: 1188010 - RNA, 19 nt, Homo sapiens
  misc_RNA (1)...(19): siRNA sense strand
aaugaaaggugaacuggaa

SEQ ID NO: 1188011 - RNA, 19 nt, Homo sapiens
  misc_RNA (1)...(19): siRNA sense strand
caagaagguucgauugagu

SEQ ID NO: 1188012 - RNA, 19 nt, Homo sapiens
  misc_RNA (1)...(19): siRNA sense strand
cugagugccuggaaguuua

SEQ ID NO: 1188013 - RNA, 19 nt, Homo sapiens
  misc_RNA (1)...(19): siRNA sense strand
gagaugaguuaauucuaag

SEQ ID NO: 1188014 - RNA, 19 nt, Homo sapiens
  misc_RNA (1)...(19): siRNA sense strand
ucaaaguuauggcaagaga

SEQ ID NO: 1188015 - RNA, 19 nt, Homo sapiens
  misc_RNA (1)...(19): siRNA sense strand
gaacaagagaugcaagagu

SEQ ID NO: 1188016 - RNA, 19 nt, Homo sapiens
  misc_RNA (1)...(19): siRNA sense strand
gaacuggaacagacuaaag

SEQ ID NO: 1188017 - RNA, 19 nt, Homo sapiens
  misc_RNA (1)...(19): siRNA sense strand
gaacugagugccuggaagu

SEQ ID NO: 1188018 - RNA, 19 nt, Homo sapiens
  misc_RNA (1)...(19): siRNA sense strand
ccuaagagagucugaagaa

SEQ ID NO: 1188019 - RNA, 19 nt, Homo sapiens
  misc_RNA (1)...(19): siRNA sense strand
aagguucgauugagugaaa

SEQ ID NO: 1188020 - RNA, 19 nt, Homo sapiens
  misc_RNA (1)...(19): siRNA sense strand
ggaacaagcccaaaaugaa

SEQ ID NO: 1188021 - RNA, 19 nt, Homo sapiens
  misc_RNA (1)...(19): siRNA sense strand
cuaagagagucugaagaaa

SEQ ID NO: 1188022 - RNA, 19 nt, Homo sapiens
  misc_RNA (1)...(19): siRNA sense strand
ccaagaagguucgauugag

SEQ ID NO: 1188023 - RNA, 19 nt, Homo sapiens
  misc_RNA (1)...(19): siRNA sense strand
caagagaugaguuaauucu

SEQ ID NO: 1188024 - RNA, 19 nt, Homo sapiens
  misc_RNA (1)...(19): siRNA sense strand
guaacuggccuaagagagu

SEQ ID NO: 1188025 - RNA, 19 nt, Homo sapiens
  misc_RNA (1)...(19): siRNA sense strand
caagagaugcaagagugua

SEQ ID NO: 1188026 - RNA, 19 nt, Homo sapiens
  misc_RNA (1)...(19): siRNA sense strand
gacuaaagacaaacuggaa

SEQ ID NO: 1188027 - RNA, 19 nt, Homo sapiens
  misc_RNA (1)...(19): siRNA sense strand
gcaagagaugaguuaauuc

SEQ ID NO: 1188028 - RNA, 19 nt, Homo sapiens
  misc_RNA (1)...(19): siRNA sense strand
ggaaguuuacgccugauag

SEQ ID NO: 1188029 - RNA, 19 nt, Homo sapiens
  misc_RNA (1)...(19): siRNA sense strand
gagaugcaagaguguacua

SEQ ID NO: 1188030 - RNA, 19 nt, Homo sapiens
  misc_RNA (1)...(19): siRNA sense strand
ugaagcauauguacaagcu

SEQ ID NO: 1188031 - RNA, 19 nt, Homo sapiens
  misc_RNA (1)...(19): siRNA sense strand
gggaaaacauccuuguaau

SEQ ID NO: 1188032 - RNA, 19 nt, Homo sapiens
  misc_RNA (1)...(19): siRNA sense strand
ggcaaguacacagaucuua

SEQ ID NO: 1188033 - RNA, 19 nt, Homo sapiens
  misc_RNA (1)...(19): siRNA sense strand
uaagagagucugaagaaaa

SEQ ID NO: 1188034 - RNA, 19 nt, Homo sapiens
  misc_RNA (1)...(19): siRNA sense strand
gagggcaaguacacagauc

SEQ ID NO: 1188035 - RNA, 19 nt, Homo sapiens
  misc_RNA (1)...(19): siRNA sense strand
uauggcaagagaugaguua

SEQ ID NO: 1188036 - RNA, 19 nt, Homo sapiens
  misc_RNA (1)...(19): siRNA sense strand
gcgacuagcaaccaaggaa

SEQ ID NO: 1188037 - RNA, 19 nt, Homo sapiens
  misc_RNA (1)...(19): siRNA sense strand
ggaaaacauccuuguaaug

SEQ ID NO: 1188038 - RNA, 19 nt, Homo sapiens
  misc_RNA (1)...(19): siRNA sense strand
uccaguaccucaagcaagu

SEQ ID NO: 1188039 - RNA, 19 nt, Homo sapiens
  misc_RNA (1)...(19): siRNA sense strand
aaaguuauggcaagagaug

SEQ ID NO: 1188040 - RNA, 19 nt, Homo sapiens
  misc_RNA (1)...(19): siRNA sense strand
gaaaacauccuuguaaugc

SEQ ID NO: 1188041 - RNA, 19 nt, Homo sapiens
  misc_RNA (1)...(19): siRNA sense strand
acccagcgaucaacuuguu

SEQ ID NO: 1188042 - RNA, 19 nt, Homo sapiens
  misc_RNA (1)...(19): siRNA sense strand
uggaacagacuaaagacaa

SEQ ID NO: 1188043 - RNA, 19 nt, Homo sapiens
  misc_RNA (1)...(19): siRNA sense strand
gaguuaauucuaagaugga

SEQ ID NO: 1188044 - RNA, 19 nt, Homo sapiens
  misc_RNA (1)...(19): siRNA sense strand
cuucaaaguuauggcaaga

SEQ ID NO: 1188045 - RNA, 19 nt, Homo sapiens
  misc_RNA (1)...(19): siRNA sense strand
caaccaaggaacaagagau

SEQ ID NO: 1188046 - RNA, 19 nt, Homo sapiens
  misc_RNA (1)...(19): siRNA sense strand
caaguacacagaucuuaac

SEQ ID NO: 1188047 - RNA, 19 nt, Homo sapiens
  misc_RNA (1)...(19): siRNA sense strand
uaaugcgacuagcaaccaa

SEQ ID NO: 1188048 - RNA, 19 nt, Homo sapiens
  misc_RNA (1)...(19): siRNA sense strand
cccaagaagguucgauuga

SEQ ID NO: 1188049 - RNA, 19 nt, Homo sapiens
  misc_RNA (1)...(19): siRNA sense strand
gcaaccaaggaacaagaga

SEQ ID NO: 1188050 - RNA, 19 nt, Homo sapiens
  misc_RNA (1)...(19): siRNA sense strand
gaacaagcccaaaaugaac

SEQ ID NO: 1188051 - RNA, 19 nt, Homo sapiens
  misc_RNA (1)...(19): siRNA sense strand
gaacagacuaaagacaaac

SEQ ID NO: 1188052 - RNA, 19 nt, Homo sapiens
  misc_RNA (1)...(19): siRNA sense strand
acugagaucaacaauggua

SEQ ID NO: 1188053 - RNA, 19 nt, Homo sapiens
  misc_RNA (1)...(19): siRNA sense strand
gggcaaguacacagaucuu

SEQ ID NO: 1188054 - RNA, 19 nt, Homo sapiens
  misc_RNA (1)...(19): siRNA sense strand
uaaagacaaacuggaacaa

SEQ ID NO: 1188055 - RNA, 19 nt, Homo sapiens
  misc_RNA (1)...(19): siRNA sense strand
ccaaggaacaagagaugca

SEQ ID NO: 1188056 - RNA, 19 nt, Homo sapiens
  misc_RNA (1)...(19): siRNA sense strand
uagcaaccaaggaacaaga

SEQ ID NO: 1188057 - RNA, 19 nt, Homo sapiens
  misc_RNA (1)...(19): siRNA sense strand
ggagggcaaguacacagau

SEQ ID NO: 1188058 - RNA, 19 nt, Homo sapiens
  misc_RNA (1)...(19): siRNA sense strand
cuaaagacaaacuggaaca

SEQ ID NO: 1188059 - RNA, 19 nt, Homo sapiens
  misc_RNA (1)...(19): siRNA sense strand
gcccaacugagaucaacaa

SEQ ID NO: 1188060 - RNA, 19 nt, Homo sapiens
  misc_RNA (1)...(19): siRNA sense strand
ucaaauccaguaccucaag

SEQ ID NO: 1188061 - RNA, 19 nt, Homo sapiens
  misc_RNA (1)...(19): siRNA sense strand
guaaugcgacuagcaacca

SEQ ID NO: 1188062 - RNA, 19 nt, Homo sapiens
  misc_RNA (1)...(19): siRNA sense strand
ccaacugagaucaacaaug

SEQ ID NO: 1188063 - RNA, 19 nt, Homo sapiens
  misc_RNA (1)...(19): siRNA sense strand
caaggaacaagagaugcaa

SEQ ID NO: 1188064 - RNA, 19 nt, Homo sapiens
  misc_RNA (1)...(19): siRNA sense strand
ugagaucaacaaugguaga

SEQ ID NO: 1188065 - RNA, 19 nt, Homo sapiens
  misc_RNA (1)...(19): siRNA sense strand
ggugaacuggaacagacua

SEQ ID NO: 1188066 - RNA, 19 nt, Homo sapiens
  misc_RNA (1)...(19): siRNA sense strand
agacccagcgaucaacuug

SEQ ID NO: 1188067 - RNA, 19 nt, Homo sapiens
  misc_RNA (1)...(19): siRNA sense strand
acacagaucuuaacucuaa

SEQ ID NO: 1188068 - RNA, 19 nt, Homo sapiens
  misc_RNA (1)...(19): siRNA sense strand
gaucuuaacucuaaugaug

SEQ ID NO: 1188069 - RNA, 19 nt, Homo sapiens
  misc_RNA (1)...(19): siRNA sense strand
caacugagaucaacaaugg

SEQ ID NO: 1188070 - RNA, 19 nt, Homo sapiens
  misc_RNA (1)...(19): siRNA sense strand
ggaacagacuaaagacaaa

SEQ ID NO: 1188071 - RNA, 19 nt, Homo sapiens
  misc_RNA (1)...(19): siRNA sense strand
ggcaagagaugaguuaauu

SEQ ID NO: 1188072 - RNA, 19 nt, Homo sapiens
  misc_RNA (1)...(19): siRNA sense strand
guacacagaucuuaacucu

SEQ ID NO: 1188073 - RNA, 19 nt, Homo sapiens
  misc_RNA (1)...(19): siRNA sense strand
gcaaguacacagaucuuaa

SEQ ID NO: 1188074 - RNA, 19 nt, Homo sapiens
  misc_RNA (1)...(19): siRNA sense strand
ugauguaacuggccuaaga

SEQ ID NO: 1188075 - RNA, 19 nt, Homo sapiens
  misc_RNA (1)...(19): siRNA sense strand
aaugaaaggugaacuggaa

SEQ ID NO: 1188076 - RNA, 19 nt, Homo sapiens
  misc_RNA (1)...(19): siRNA sense strand
caagaagguucgauugagu

SEQ ID NO: 1188077 - RNA, 19 nt, Homo sapiens
  misc_RNA (1)...(19): siRNA sense strand
cugagugccuggaaguuua

SEQ ID NO: 1188078 - RNA, 19 nt, Homo sapiens
  misc_RNA (1)...(19): siRNA sense strand
gagaugaguuaauucuaag

SEQ ID NO: 1188079 - RNA, 19 nt, Homo sapiens
  misc_RNA (1)...(19): siRNA sense strand
ucaaaguuauggcaagaga

SEQ ID NO: 1188080 - RNA, 19 nt, Homo sapiens
  misc_RNA (1)...(19): siRNA sense strand
gaacaagagaugcaagagu

SEQ ID NO: 1188081 - RNA, 19 nt, Homo sapiens
  misc_RNA (1)...(19): siRNA sense strand
gaacuggaacagacuaaag

SEQ ID NO: 1188082 - RNA, 19 nt, Homo sapiens
  misc_RNA (1)...(19): siRNA sense strand
gaacugagugccuggaagu

SEQ ID NO: 1188083 - RNA, 19 nt, Homo sapiens
  misc_RNA (1)...(19): siRNA sense strand
ccuaagagagucugaagaa

SEQ ID NO: 1188084 - RNA, 19 nt, Homo sapiens
  misc_RNA (1)...(19): siRNA sense strand
aagguucgauugagugaaa

SEQ ID NO: 1188085 - RNA, 19 nt, Homo sapiens
  misc_RNA (1)...(19): siRNA sense strand
ggaacaagcccaaaaugaa

SEQ ID NO: 1188086 - RNA, 19 nt, Homo sapiens
  misc_RNA (1)...(19): siRNA sense strand
cuaagagagucugaagaaa

SEQ ID NO: 1188087 - RNA, 19 nt, Homo sapiens
  misc_RNA (1)...(19): siRNA sense strand
ccaagaagguucgauugag

SEQ ID NO: 1188088 - RNA, 19 nt, Homo sapiens
  misc_RNA (1)...(19): siRNA sense strand
caagagaugaguuaauucu

SEQ ID NO: 1188089 - RNA, 19 nt, Homo sapiens
  misc_RNA (1)...(19): siRNA sense strand
guaacuggccuaagagagu

SEQ ID NO: 1188090 - RNA, 19 nt, Homo sapiens
  misc_RNA (1)...(19): siRNA sense strand
caagagaugcaagagugua

SEQ ID NO: 1188091 - RNA, 19 nt, Homo sapiens
  misc_RNA (1)...(19): siRNA sense strand
gacuaaagacaaacuggaa

SEQ ID NO: 1188092 - RNA, 19 nt, Homo sapiens
  misc_RNA (1)...(19): siRNA sense strand
gcaagagaugaguuaauuc

SEQ ID NO: 1188093 - RNA, 19 nt, Homo sapiens
  misc_RNA (1)...(19): siRNA sense strand
ggaaguuuacgccugauag

SEQ ID NO: 1188094 - RNA, 19 nt, Homo sapiens
  misc_RNA (1)...(19): siRNA sense strand
gagaugcaagaguguacua

SEQ ID NO: 1188095 - RNA, 19 nt, Homo sapiens
  misc_RNA (1)...(19): siRNA sense strand
ugaagcauauguacaagcu

SEQ ID NO: 1188096 - RNA, 19 nt, Homo sapiens
  misc_RNA (1)...(19): siRNA sense strand
gggaaaacauccuuguaau

SEQ ID NO: 1188097 - RNA, 19 nt, Homo sapiens
  misc_RNA (1)...(19): siRNA sense strand
ggcaaguacacagaucuua

SEQ ID NO: 1188098 - RNA, 19 nt, Homo sapiens
  misc_RNA (1)...(19): siRNA sense strand
uaagagagucugaagaaaa

SEQ ID NO: 1188099 - RNA, 19 nt, Homo sapiens
  misc_RNA (1)...(19): siRNA sense strand
gagggcaaguacacagauc

SEQ ID NO: 1188100 - RNA, 19 nt, Homo sapiens
  misc_RNA (1)...(19): siRNA sense strand
uauggcaagagaugaguua

SEQ ID NO: 1188101 - RNA, 19 nt, Homo sapiens
  misc_RNA (1)...(19): siRNA sense strand
gcgacuagcaaccaaggaa

SEQ ID NO: 1188102 - RNA, 19 nt, Homo sapiens
  misc_RNA (1)...(19): siRNA sense strand
ggaaaacauccuuguaaug

SEQ ID NO: 1188103 - RNA, 19 nt, Homo sapiens
  misc_RNA (1)...(19): siRNA sense strand
uccaguaccucaagcaagu

SEQ ID NO: 1188104 - RNA, 19 nt, Homo sapiens
  misc_RNA (1)...(19): siRNA sense strand
aaaguuauggcaagagaug

SEQ ID NO: 1188105 - RNA, 19 nt, Homo sapiens
  misc_RNA (1)...(19): siRNA sense strand
gaaaacauccuuguaaugc

SEQ ID NO: 1188106 - RNA, 19 nt, Homo sapiens
  misc_RNA (1)...(19): siRNA sense strand
acccagcgaucaacuuguu

SEQ ID NO: 1188107 - RNA, 19 nt, Homo sapiens
  misc_RNA (1)...(19): siRNA sense strand
uggaacagacuaaagacaa

SEQ ID NO: 1188108 - RNA, 19 nt, Homo sapiens
  misc_RNA (1)...(19): siRNA sense strand
gaguuaauucuaagaugga

SEQ ID NO: 1188109 - RNA, 19 nt, Homo sapiens
  misc_RNA (1)...(19): siRNA sense strand
cuucaaaguuauggcaaga

SEQ ID NO: 1188110 - RNA, 19 nt, Homo sapiens
  misc_RNA (1)...(19): siRNA sense strand
caaccaaggaacaagagau

SEQ ID NO: 1188111 - RNA, 19 nt, Homo sapiens
  misc_RNA (1)...(19): siRNA sense strand
caaguacacagaucuuaac

SEQ ID NO: 1188112 - RNA, 19 nt, Homo sapiens
  misc_RNA (1)...(19): siRNA sense strand
uaaugcgacuagcaaccaa

SEQ ID NO: 1188113 - RNA, 19 nt, Homo sapiens
  misc_RNA (1)...(19): siRNA sense strand
cccaagaagguucgauuga

SEQ ID NO: 1188114 - RNA, 19 nt, Homo sapiens
  misc_RNA (1)...(19): siRNA sense strand
gcaaccaaggaacaagaga

SEQ ID NO: 1188115 - RNA, 19 nt, Homo sapiens
  misc_RNA (1)...(19): siRNA sense strand
gaacaagcccaaaaugaac

SEQ ID NO: 1188116 - RNA, 19 nt, Homo sapiens
  misc_RNA (1)...(19): siRNA sense strand
gaacagacuaaagacaaac

SEQ ID NO: 1188117 - RNA, 19 nt, Homo sapiens
  misc_RNA (1)...(19): siRNA sense strand
acugagaucaacaauggua

SEQ ID NO: 1188118 - RNA, 19 nt, Homo sapiens
  misc_RNA (1)...(19): siRNA sense strand
gggcaaguacacagaucuu

SEQ ID NO: 1188119 - RNA, 19 nt, Homo sapiens
  misc_RNA (1)...(19): siRNA sense strand
uaaagacaaacuggaacaa

SEQ ID NO: 1188120 - RNA, 19 nt, Homo sapiens
  misc_RNA (1)...(19): siRNA sense strand
ccaaggaacaagagaugca

SEQ ID NO: 1188121 - RNA, 19 nt, Homo sapiens
  misc_RNA (1)...(19): siRNA sense strand
uagcaaccaaggaacaaga

SEQ ID NO: 1188122 - RNA, 19 nt, Homo sapiens
  misc_RNA (1)...(19): siRNA sense strand
ggagggcaaguacacagau

SEQ ID NO: 1188123 - RNA, 19 nt, Homo sapiens
  misc_RNA (1)...(19): siRNA sense strand
cuaaagacaaacuggaaca

SEQ ID NO: 1188124 - RNA, 19 nt, Homo sapiens
  misc_RNA (1)...(19): siRNA sense strand
gcccaacugagaucaacaa

SEQ ID NO: 1188125 - RNA, 19 nt, Homo sapiens
  misc_RNA (1)...(19): siRNA sense strand
ucaaauccaguaccucaag

SEQ ID NO: 1188126 - RNA, 19 nt, Homo sapiens
  misc_RNA (1)...(19): siRNA sense strand
guaaugcgacuagcaacca

SEQ ID NO: 1188127 - RNA, 19 nt, Homo sapiens
  misc_RNA (1)...(19): siRNA sense strand
ccaacugagaucaacaaug

SEQ ID NO: 1188128 - RNA, 19 nt, Homo sapiens
  misc_RNA (1)...(19): siRNA sense strand
caaggaacaagagaugcaa

SEQ ID NO: 1188129 - RNA, 19 nt, Homo sapiens
  misc_RNA (1)...(19): siRNA sense strand
ugagaucaacaaugguaga

SEQ ID NO: 1188130 - RNA, 19 nt, Homo sapiens
  misc_RNA (1)...(19): siRNA sense strand
ggugaacuggaacagacua

SEQ ID NO: 1188131 - RNA, 19 nt, Homo sapiens
  misc_RNA (1)...(19): siRNA sense strand
agacccagcgaucaacuug

SEQ ID NO: 1188132 - RNA, 19 nt, Homo sapiens
  misc_RNA (1)...(19): siRNA sense strand
acacagaucuuaacucuaa

SEQ ID NO: 1188133 - RNA, 19 nt, Homo sapiens
  misc_RNA (1)...(19): siRNA sense strand
gaucuuaacucuaaugaug

SEQ ID NO: 1188134 - RNA, 19 nt, Homo sapiens
  misc_RNA (1)...(19): siRNA sense strand
caacugagaucaacaaugg

SEQ ID NO: 1188135 - RNA, 19 nt, Homo sapiens
  misc_RNA (1)...(19): siRNA sense strand
ggaacagacuaaagacaaa

SEQ ID NO: 1188136 - RNA, 19 nt, Homo sapiens
  misc_RNA (1)...(19): siRNA sense strand
ggcaagagaugaguuaauu

SEQ ID NO: 1188137 - RNA, 19 nt, Homo sapiens
  misc_RNA (1)...(19): siRNA sense strand
guacacagaucuuaacucu

SEQ ID NO: 1188138 - RNA, 19 nt, Homo sapiens
  misc_RNA (1)...(19): siRNA sense strand
gcaaguacacagaucuuaa

SEQ ID NO: 1188139 - RNA, 19 nt, Homo sapiens
  misc_RNA (1)...(19): siRNA sense strand
ugauguaacuggccuaaga

SEQ ID NO: 1188140 - RNA, 19 nt, Homo sapiens
  misc_RNA (1)...(19): siRNA sense strand
aaugaaaggugaacuggaa

SEQ ID NO: 1188141 - RNA, 19 nt, Homo sapiens
  misc_RNA (1)...(19): siRNA sense strand
caagaagguucgauugagu

SEQ ID NO: 1188142 - RNA, 19 nt, Homo sapiens
  misc_RNA (1)...(19): siRNA sense strand
cugagugccuggaaguuua

SEQ ID NO: 1188143 - RNA, 19 nt, Homo sapiens
  misc_RNA (1)...(19): siRNA sense strand
gagaugaguuaauucuaag

SEQ ID NO: 1188144 - RNA, 19 nt, Homo sapiens
  misc_RNA (1)...(19): siRNA sense strand
ucaaaguuauggcaagaga

SEQ ID NO: 1188145 - RNA, 19 nt, Homo sapiens
  misc_RNA (1)...(19): siRNA sense strand
gaacaagagaugcaagagu

SEQ ID NO: 1188146 - RNA, 19 nt, Homo sapiens
  misc_RNA (1)...(19): siRNA sense strand
gaacuggaacagacuaaag

SEQ ID NO: 1188147 - RNA, 19 nt, Homo sapiens
  misc_RNA (1)...(19): siRNA sense strand
gaacugagugccuggaagu

SEQ ID NO: 1188148 - RNA, 19 nt, Homo sapiens
  misc_RNA (1)...(19): siRNA sense strand
ccuaagagagucugaagaa

SEQ ID NO: 1188149 - RNA, 19 nt, Homo sapiens
  misc_RNA (1)...(19): siRNA sense strand
aagguucgauugagugaaa

SEQ ID NO: 1188150 - RNA, 19 nt, Homo sapiens
  misc_RNA (1)...(19): siRNA sense strand
ggaacaagcccaaaaugaa

SEQ ID NO: 1188151 - RNA, 19 nt, Homo sapiens
  misc_RNA (1)...(19): siRNA sense strand
cuaagagagucugaagaaa

SEQ ID NO: 1188152 - RNA, 19 nt, Homo sapiens
  misc_RNA (1)...(19): siRNA sense strand
ccaagaagguucgauugag

SEQ ID NO: 1188153 - RNA, 19 nt, Homo sapiens
  misc_RNA (1)...(19): siRNA sense strand
caagagaugaguuaauucu

SEQ ID NO: 1188154 - RNA, 19 nt, Homo sapiens
  misc_RNA (1)...(19): siRNA sense strand
guaacuggccuaagagagu

SEQ ID NO: 1188155 - RNA, 19 nt, Homo sapiens
  misc_RNA (1)...(19): siRNA sense strand
caagagaugcaagagugua

SEQ ID NO: 1188156 - RNA, 19 nt, Homo sapiens
  misc_RNA (1)...(19): siRNA sense strand
gacuaaagacaaacuggaa

SEQ ID NO: 1188157 - RNA, 19 nt, Homo sapiens
  misc_RNA (1)...(19): siRNA sense strand
gcaagagaugaguuaauuc

SEQ ID NO: 1188158 - RNA, 19 nt, Homo sapiens
  misc_RNA (1)...(19): siRNA sense strand
ggaaguuuacgccugauag

SEQ ID NO: 1188159 - RNA, 19 nt, Homo sapiens
  misc_RNA (1)...(19): siRNA sense strand
gagaugcaagaguguacua

SEQ ID NO: 1188160 - RNA, 19 nt, Homo sapiens
  misc_RNA (1)...(19): siRNA sense strand
ugaagcauauguacaagcu

SEQ ID NO: 1188161 - RNA, 19 nt, Homo sapiens
  misc_RNA (1)...(19): siRNA sense strand
gggaaaacauccuuguaau

SEQ ID NO: 1188162 - RNA, 19 nt, Homo sapiens
  misc_RNA (1)...(19): siRNA sense strand
ggcaaguacacagaucuua

SEQ ID NO: 1188163 - RNA, 19 nt, Homo sapiens
  misc_RNA (1)...(19): siRNA sense strand
uaagagagucugaagaaaa

SEQ ID NO: 1188164 - RNA, 19 nt, Homo sapiens
  misc_RNA (1)...(19): siRNA sense strand
gagggcaaguacacagauc

SEQ ID NO: 1188165 - RNA, 19 nt, Homo sapiens
  misc_RNA (1)...(19): siRNA sense strand
uauggcaagagaugaguua

SEQ ID NO: 1188166 - RNA, 19 nt, Homo sapiens
  misc_RNA (1)...(19): siRNA sense strand
gcgacuagcaaccaaggaa

SEQ ID NO: 1188167 - RNA, 19 nt, Homo sapiens
  misc_RNA (1)...(19): siRNA sense strand
ggaaaacauccuuguaaug

SEQ ID NO: 1188168 - RNA, 19 nt, Homo sapiens
  misc_RNA (1)...(19): siRNA sense strand
uccaguaccucaagcaagu

SEQ ID NO: 1188169 - RNA, 19 nt, Homo sapiens
  misc_RNA (1)...(19): siRNA sense strand
aaaguuauggcaagagaug

SEQ ID NO: 1188170 - RNA, 19 nt, Homo sapiens
  misc_RNA (1)...(19): siRNA sense strand
gaaaacauccuuguaaugc

SEQ ID NO: 1188171 - RNA, 19 nt, Homo sapiens
  misc_RNA (1)...(19): siRNA sense strand
acccagcgaucaacuuguu

SEQ ID NO: 1188172 - RNA, 19 nt, Homo sapiens
  misc_RNA (1)...(19): siRNA sense strand
uggaacagacuaaagacaa

SEQ ID NO: 1188173 - RNA, 19 nt, Homo sapiens
  misc_RNA (1)...(19): siRNA sense strand
gaguuaauucuaagaugga

SEQ ID NO: 1188174 - RNA, 19 nt, Homo sapiens
  misc_RNA (1)...(19): siRNA sense strand
cuucaaaguuauggcaaga

SEQ ID NO: 1188175 - RNA, 19 nt, Homo sapiens
  misc_RNA (1)...(19): siRNA sense strand
caaccaaggaacaagagau

SEQ ID NO: 1188176 - RNA, 19 nt, Homo sapiens
  misc_RNA (1)...(19): siRNA sense strand
caaguacacagaucuuaac

SEQ ID NO: 1188177 - RNA, 19 nt, Homo sapiens
  misc_RNA (1)...(19): siRNA sense strand
uaaugcgacuagcaaccaa

SEQ ID NO: 1188178 - RNA, 19 nt, Homo sapiens
  misc_RNA (1)...(19): siRNA sense strand
cccaagaagguucgauuga

SEQ ID NO: 1188179 - RNA, 19 nt, Homo sapiens
  misc_RNA (1)...(19): siRNA sense strand
gcaaccaaggaacaagaga

SEQ ID NO: 1188180 - RNA, 19 nt, Homo sapiens
  misc_RNA (1)...(19): siRNA sense strand
gaacaagcccaaaaugaac

SEQ ID NO: 1188181 - RNA, 19 nt, Homo sapiens
  misc_RNA (1)...(19): siRNA sense strand
gaacagacuaaagacaaac

SEQ ID NO: 1188182 - RNA, 19 nt, Homo sapiens
  misc_RNA (1)...(19): siRNA sense strand
acugagaucaacaauggua

SEQ ID NO: 1188183 - RNA, 19 nt, Homo sapiens
  misc_RNA (1)...(19): siRNA sense strand
gggcaaguacacagaucuu

SEQ ID NO: 1188184 - RNA, 19 nt, Homo sapiens
  misc_RNA (1)...(19): siRNA sense strand
uaaagacaaacuggaacaa

SEQ ID NO: 1188185 - RNA, 19 nt, Homo sapiens
  misc_RNA (1)...(19): siRNA sense strand
ccaaggaacaagagaugca

SEQ ID NO: 1188186 - RNA, 19 nt, Homo sapiens
  misc_RNA (1)...(19): siRNA sense strand
uagcaaccaaggaacaaga

SEQ ID NO: 1188187 - RNA, 19 nt, Homo sapiens
  misc_RNA (1)...(19): siRNA sense strand
ggagggcaaguacacagau

SEQ ID NO: 1188188 - RNA, 19 nt, Homo sapiens
  misc_RNA (1)...(19): siRNA sense strand
cuaaagacaaacuggaaca

SEQ ID NO: 1188189 - RNA, 19 nt, Homo sapiens
  misc_RNA (1)...(19): siRNA sense strand
gcccaacugagaucaacaa

SEQ ID NO: 1188190 - RNA, 19 nt, Homo sapiens
  misc_RNA (1)...(19): siRNA sense strand
ucaaauccaguaccucaag

SEQ ID NO: 1188191 - RNA, 19 nt, Homo sapiens
  misc_RNA (1)...(19): siRNA sense strand
guaaugcgacuagcaacca

SEQ ID NO: 1188192 - RNA, 19 nt, Homo sapiens
  misc_RNA (1)...(19): siRNA sense strand
ccaacugagaucaacaaug

SEQ ID NO: 1188193 - RNA, 19 nt, Homo sapiens
  misc_RNA (1)...(19): siRNA sense strand
caaggaacaagagaugcaa

SEQ ID NO: 1188194 - RNA, 19 nt, Homo sapiens
  misc_RNA (1)...(19): siRNA sense strand
ugagaucaacaaugguaga

SEQ ID NO: 1188195 - RNA, 19 nt, Homo sapiens
  misc_RNA (1)...(19): siRNA sense strand
ggugaacuggaacagacua

SEQ ID NO: 1188196 - RNA, 19 nt, Homo sapiens
  misc_RNA (1)...(19): siRNA sense strand
agacccagcgaucaacuug

SEQ ID NO: 1188197 - RNA, 19 nt, Homo sapiens
  misc_RNA (1)...(19): siRNA sense strand
ucacagggcuugaggauuc

SEQ ID NO: 1188198 - RNA, 19 nt, Homo sapiens
  misc_RNA (1)...(19): siRNA sense strand
acgaagagcuggcuuucua

SEQ ID NO: 1188199 - RNA, 19 nt, Homo sapiens
  misc_RNA (1)...(19): siRNA sense strand
ggacggcgcuuugagacuu

SEQ ID NO: 1188200 - RNA, 19 nt, Homo sapiens
  misc_RNA (1)...(19): siRNA sense strand
gcacaaacaagaccaacuu

SEQ ID NO: 1188201 - RNA, 19 nt, Homo sapiens
  misc_RNA (1)...(19): siRNA sense strand
gagaagggcacaaacaaga

SEQ ID NO: 1188202 - RNA, 19 nt, Homo sapiens
  misc_RNA (1)...(19): siRNA sense strand
gccaugaguucacagauga

SEQ ID NO: 1188203 - RNA, 19 nt, Homo sapiens
  misc_RNA (1)...(19): siRNA sense strand
gucauuguguccaacuuua

SEQ ID NO: 1188204 - RNA, 19 nt, Homo sapiens
  misc_RNA (1)...(19): siRNA sense strand
caagaucucaucccuguga

SEQ ID NO: 1188205 - RNA, 19 nt, Homo sapiens
  misc_RNA (1)...(19): siRNA sense strand
ccaaugccuuccugcagua

SEQ ID NO: 1188206 - RNA, 19 nt, Homo sapiens
  misc_RNA (1)...(19): siRNA sense strand
gccaugugcugaacuucua

SEQ ID NO: 1188207 - RNA, 19 nt, Homo sapiens
  misc_RNA (1)...(19): siRNA sense strand
cgaugucucuggcgccuuu

SEQ ID NO: 1188208 - RNA, 19 nt, Homo sapiens
  misc_RNA (1)...(19): siRNA sense strand
acaaacaagaccaacuuua

SEQ ID NO: 1188209 - RNA, 19 nt, Homo sapiens
  misc_RNA (1)...(19): siRNA sense strand
cagaugagcucaccuucag

SEQ ID NO: 1188210 - RNA, 19 nt, Homo sapiens
  misc_RNA (1)...(19): siRNA sense strand
caaacaagaccaacuuuac

SEQ ID NO: 1188211 - RNA, 19 nt, Homo sapiens
  misc_RNA (1)...(19): siRNA sense strand
uuugagacuuggaagaaua

SEQ ID NO: 1188212 - RNA, 19 nt, Homo sapiens
  misc_RNA (1)...(19): siRNA sense strand
gcugggcuuucuccucuuu

SEQ ID NO: 1188213 - RNA, 19 nt, Homo sapiens
  misc_RNA (1)...(19): siRNA sense strand
gaagacaacgugccaugag

SEQ ID NO: 1188214 - RNA, 19 nt, Homo sapiens
  misc_RNA (1)...(19): siRNA sense strand
caagaacgacgaugucucu

SEQ ID NO: 1188215 - RNA, 19 nt, Homo sapiens
  misc_RNA (1)...(19): siRNA sense strand
acagcaacaucaccacuug

SEQ ID NO: 1188216 - RNA, 19 nt, Homo sapiens
  misc_RNA (1)...(19): siRNA sense strand
aaacaagaccaacuuuaca

SEQ ID NO: 1188217 - RNA, 19 nt, Homo sapiens
  misc_RNA (1)...(19): siRNA sense strand
gguauaccauugucaccau

SEQ ID NO: 1188218 - RNA, 19 nt, Homo sapiens
  misc_RNA (1)...(19): siRNA sense strand
gcagcucggagaaggaauu

SEQ ID NO: 1188219 - RNA, 19 nt, Homo sapiens
  misc_RNA (1)...(19): siRNA sense strand
ucgcgacccugacauguuc

SEQ ID NO: 1188220 - RNA, 19 nt, Homo sapiens
  misc_RNA (1)...(19): siRNA sense strand
cuucuacgaugcugacuca

SEQ ID NO: 1188221 - RNA, 19 nt, Homo sapiens
  misc_RNA (1)...(19): siRNA sense strand
ccugcggccuucugguaua

SEQ ID NO: 1188222 - RNA, 19 nt, Homo sapiens
  misc_RNA (1)...(19): siRNA sense strand
ccucugagcugggcuuucu

SEQ ID NO: 1188223 - RNA, 19 nt, Homo sapiens
  misc_RNA (1)...(19): siRNA sense strand
ggugacugcugccuugaag

SEQ ID NO: 1188224 - RNA, 19 nt, Homo sapiens
  misc_RNA (1)...(19): siRNA sense strand
cagccuguguacucauauu

SEQ ID NO: 1188225 - RNA, 19 nt, Homo sapiens
  misc_RNA (1)...(19): siRNA sense strand
cauccugcccuacuacauu

SEQ ID NO: 1188226 - RNA, 19 nt, Homo sapiens
  misc_RNA (1)...(19): siRNA sense strand
aagaccaacuuuacaagca

SEQ ID NO: 1188227 - RNA, 19 nt, Homo sapiens
  misc_RNA (1)...(19): siRNA sense strand
ucacagaugagcucaccuu

SEQ ID NO: 1188228 - RNA, 19 nt, Homo sapiens
  misc_RNA (1)...(19): siRNA sense strand
uugcugcacugucuagaga

SEQ ID NO: 1188229 - RNA, 19 nt, Homo sapiens
  misc_RNA (1)...(19): siRNA sense strand
gcugagaagggcacaaaca

SEQ ID NO: 1188230 - RNA, 19 nt, Homo sapiens
  misc_RNA (1)...(19): siRNA sense strand
gcuuugagacuuggaagaa

SEQ ID NO: 1188231 - RNA, 19 nt, Homo sapiens
  misc_RNA (1)...(19): siRNA sense strand
ccauggccaucaucaucuu

SEQ ID NO: 1188232 - RNA, 19 nt, Homo sapiens
  misc_RNA (1)...(19): siRNA sense strand
acugcugccuugaagagua

SEQ ID NO: 1188233 - RNA, 19 nt, Homo sapiens
  misc_RNA (1)...(19): siRNA sense strand
ugccaugaguucacagaug

SEQ ID NO: 1188234 - RNA, 19 nt, Homo sapiens
  misc_RNA (1)...(19): siRNA sense strand
ggguccaucugcucacuca

SEQ ID NO: 1188235 - RNA, 19 nt, Homo sapiens
  misc_RNA (1)...(19): siRNA sense strand
ugacagccuugaccugaac

SEQ ID NO: 1188236 - RNA, 19 nt, Homo sapiens
  misc_RNA (1)...(19): siRNA sense strand
gacaacgugccaugaguuc

SEQ ID NO: 1188237 - RNA, 19 nt, Homo sapiens
  misc_RNA (1)...(19): siRNA sense strand
gcagcacccucaggaacuc

SEQ ID NO: 1188238 - RNA, 19 nt, Homo sapiens
  misc_RNA (1)...(19): siRNA sense strand
cuuugccacugucauguuu

SEQ ID NO: 1188239 - RNA, 19 nt, Homo sapiens
  misc_RNA (1)...(19): siRNA sense strand
gaugagagccaaccuuccu

SEQ ID NO: 1188240 - RNA, 19 nt, Homo sapiens
  misc_RNA (1)...(19): siRNA sense strand
cacaaacaagaccaacuuu

SEQ ID NO: 1188241 - RNA, 19 nt, Homo sapiens
  misc_RNA (1)...(19): siRNA sense strand
caucuuugccacugucaug

SEQ ID NO: 1188242 - RNA, 19 nt, Homo sapiens
  misc_RNA (1)...(19): siRNA sense strand
gacggcgcuuugagacuug

SEQ ID NO: 1188243 - RNA, 19 nt, Homo sapiens
  misc_RNA (1)...(19): siRNA sense strand
ccgcagcccucguuuucua

SEQ ID NO: 1188244 - RNA, 19 nt, Homo sapiens
  misc_RNA (1)...(19): siRNA sense strand
agacaacgugccaugaguu

SEQ ID NO: 1188245 - RNA, 19 nt, Homo sapiens
  misc_RNA (1)...(19): siRNA sense strand
uggccauccugcccuacua

SEQ ID NO: 1188246 - RNA, 19 nt, Homo sapiens
  misc_RNA (1)...(19): siRNA sense strand
auucugggcuacacacuca

SEQ ID NO: 1188247 - RNA, 19 nt, Homo sapiens
  misc_RNA (1)...(19): siRNA sense strand
aagacaacgugccaugagu

SEQ ID NO: 1188248 - RNA, 19 nt, Homo sapiens
  misc_RNA (1)...(19): siRNA sense strand
caacuuuagccgcaucuac

SEQ ID NO: 1188249 - RNA, 19 nt, Homo sapiens
  misc_RNA (1)...(19): siRNA sense strand
agaccaacuuuacaagcau

SEQ ID NO: 1188250 - RNA, 19 nt, Homo sapiens
  misc_RNA (1)...(19): siRNA sense strand
aacaagaccaacuuuacaa

SEQ ID NO: 1188251 - RNA, 19 nt, Homo sapiens
  misc_RNA (1)...(19): siRNA sense strand
gggcagcucggagaaggaa

SEQ ID NO: 1188252 - RNA, 19 nt, Homo sapiens
  misc_RNA (1)...(19): siRNA sense strand
gcugcacugucuagagaag

SEQ ID NO: 1188253 - RNA, 19 nt, Homo sapiens
  misc_RNA (1)...(19): siRNA sense strand
cugcugccuugaagaguau

SEQ ID NO: 1188254 - RNA, 19 nt, Homo sapiens
  misc_RNA (1)...(19): siRNA sense strand
cgacgaagagcuggcuuuc

SEQ ID NO: 1188255 - RNA, 19 nt, Homo sapiens
  misc_RNA (1)...(19): siRNA sense strand
caaguucuccaggcacuca

SEQ ID NO: 1188256 - RNA, 19 nt, Homo sapiens
  misc_RNA (1)...(19): siRNA sense strand
gaucgcgacccugacaugu

SEQ ID NO: 1188257 - RNA, 19 nt, Homo sapiens
  misc_RNA (1)...(19): siRNA sense strand
ggaauucuucuacgaugcu

SEQ ID NO: 1188258 - RNA, 19 nt, Homo sapiens
  misc_RNA (1)...(19): siRNA sense strand
ccacguggcugccuuuugc

SEQ ID NO: 1188259 - RNA, 19 nt, Homo sapiens
  misc_RNA (1)...(19): siRNA sense strand
caggagagcuggucuuuga

SEQ ID NO: 1188260 - RNA, 19 nt, Homo sapiens
  misc_RNA (1)...(19): siRNA sense strand
gaaggagaauucaaacaga

SEQ ID NO: 1188261 - RNA, 19 nt, Homo sapiens
  misc_RNA (1)...(19): siRNA sense strand
ggacacccaugacuucaaa

SEQ ID NO: 1188262 - RNA, 19 nt, Homo sapiens
  misc_RNA (1)...(19): siRNA sense strand
gaauacaccugguucaaag

SEQ ID NO: 1188263 - RNA, 19 nt, Homo sapiens
  misc_RNA (1)...(19): siRNA sense strand
cgaguaagaaggugauuua

SEQ ID NO: 1188264 - RNA, 19 nt, Homo sapiens
  misc_RNA (1)...(19): siRNA sense strand
gaauaauccugugaaguug

SEQ ID NO: 1188265 - RNA, 19 nt, Homo sapiens
  misc_RNA (1)...(19): siRNA sense strand
agaauaauccugugaaguu

SEQ ID NO: 1188266 - RNA, 19 nt, Homo sapiens
  misc_RNA (1)...(19): siRNA sense strand
caacugguaucaccuucaa

SEQ ID NO: 1188267 - RNA, 19 nt, Homo sapiens
  misc_RNA (1)...(19): siRNA sense strand
ggauagugaugccuacgaa

SEQ ID NO: 1188268 - RNA, 19 nt, Homo sapiens
  misc_RNA (1)...(19): siRNA sense strand
gaaagggacuucgaguaag

SEQ ID NO: 1188269 - RNA, 19 nt, Homo sapiens
  misc_RNA (1)...(19): siRNA sense strand
guucaaagaugggauagug

SEQ ID NO: 1188270 - RNA, 19 nt, Homo sapiens
  misc_RNA (1)...(19): siRNA sense strand
agaaagggacuucgaguaa

SEQ ID NO: 1188271 - RNA, 19 nt, Homo sapiens
  misc_RNA (1)...(19): siRNA sense strand
cauccaagccuacaguuaa

SEQ ID NO: 1188272 - RNA, 19 nt, Homo sapiens
  misc_RNA (1)...(19): siRNA sense strand
gaacaaagaaagggacuuc

SEQ ID NO: 1188273 - RNA, 19 nt, Homo sapiens
  misc_RNA (1)...(19): siRNA sense strand
ucaaacagaccucgucauu

SEQ ID NO: 1188274 - RNA, 19 nt, Homo sapiens
  misc_RNA (1)...(19): siRNA sense strand
ggaagacacugggacauac

SEQ ID NO: 1188275 - RNA, 19 nt, Homo sapiens
  misc_RNA (1)...(19): siRNA sense strand
acacuuguauggucucuga

SEQ ID NO: 1188276 - RNA, 19 nt, Homo sapiens
  misc_RNA (1)...(19): siRNA sense strand
aaacagaccucgucauucc

SEQ ID NO: 1188277 - RNA, 19 nt, Homo sapiens
  misc_RNA (1)...(19): siRNA sense strand
aaagggacuucgaguaaga

SEQ ID NO: 1188278 - RNA, 19 nt, Homo sapiens
  misc_RNA (1)...(19): siRNA sense strand
gggaagacacugggacaua

SEQ ID NO: 1188279 - RNA, 19 nt, Homo sapiens
  misc_RNA (1)...(19): siRNA sense strand
cagcaacucuuccuauguc

SEQ ID NO: 1188280 - RNA, 19 nt, Homo sapiens
  misc_RNA (1)...(19): siRNA sense strand
gcaucugguuugccuauag

SEQ ID NO: 1188281 - RNA, 19 nt, Homo sapiens
  misc_RNA (1)...(19): siRNA sense strand
ggaaggcggcaacagcuau

SEQ ID NO: 1188282 - RNA, 19 nt, Homo sapiens
  misc_RNA (1)...(19): siRNA sense strand
aagaaagggacuucgagua

SEQ ID NO: 1188283 - RNA, 19 nt, Homo sapiens
  misc_RNA (1)...(19): siRNA sense strand
ccucugauacuggagaaua

SEQ ID NO: 1188284 - RNA, 19 nt, Homo sapiens
  misc_RNA (1)...(19): siRNA sense strand
uguugugccucuucauauu

SEQ ID NO: 1188285 - RNA, 19 nt, Homo sapiens
  misc_RNA (1)...(19): siRNA sense strand
gaagacacugggacauaca

SEQ ID NO: 1188286 - RNA, 19 nt, Homo sapiens
  misc_RNA (1)...(19): siRNA sense strand
ggagagcuggucuuugauc

SEQ ID NO: 1188287 - RNA, 19 nt, Homo sapiens
  misc_RNA (1)...(19): siRNA sense strand
aaacuguugugccucuuca

SEQ ID NO: 1188288 - RNA, 19 nt, Homo sapiens
  misc_RNA (1)...(19): siRNA sense strand
ccauccaagccuacaguua

SEQ ID NO: 1188289 - RNA, 19 nt, Homo sapiens
  misc_RNA (1)...(19): siRNA sense strand
gagaauaauccugugaagu

SEQ ID NO: 1188290 - RNA, 19 nt, Homo sapiens
  misc_RNA (1)...(19): siRNA sense strand
ugagaauaauccugugaag

SEQ ID NO: 1188291 - RNA, 19 nt, Homo sapiens
  misc_RNA (1)...(19): siRNA sense strand
gaaacuguugugccucuuc

SEQ ID NO: 1188292 - RNA, 19 nt, Homo sapiens
  misc_RNA (1)...(19): siRNA sense strand
cgaggccacuuugacagaa

SEQ ID NO: 1188293 - RNA, 19 nt, Homo sapiens
  misc_RNA (1)...(19): siRNA sense strand
gacaugcucagaacaagau

SEQ ID NO: 1188294 - RNA, 19 nt, Homo sapiens
  misc_RNA (1)...(19): siRNA sense strand
cguggcagccguccuugua

SEQ ID NO: 1188295 - RNA, 19 nt, Homo sapiens
  misc_RNA (1)...(19): siRNA sense strand
caaacagaccucgucauuc

SEQ ID NO: 1188296 - RNA, 19 nt, Homo sapiens
  misc_RNA (1)...(19): siRNA sense strand
acacugggacauacacuug

SEQ ID NO: 1188297 - RNA, 19 nt, Homo sapiens
  misc_RNA (1)...(19): siRNA sense strand
gaaccgggcagugcugaca

SEQ ID NO: 1188298 - RNA, 19 nt, Homo sapiens
  misc_RNA (1)...(19): siRNA sense strand
gaaggcggcaacagcuaug

SEQ ID NO: 1188299 - RNA, 19 nt, Homo sapiens
  misc_RNA (1)...(19): siRNA sense strand
ggaaacuguugugccucuu

SEQ ID NO: 1188300 - RNA, 19 nt, Homo sapiens
  misc_RNA (1)...(19): siRNA sense strand
ucaaagaugggauagugau

SEQ ID NO: 1188301 - RNA, 19 nt, Homo sapiens
  misc_RNA (1)...(19): siRNA sense strand
caaagaugggauagugaug

SEQ ID NO: 1188302 - RNA, 19 nt, Homo sapiens
  misc_RNA (1)...(19): siRNA sense strand
caacaggagagcuggucuu

SEQ ID NO: 1188303 - RNA, 19 nt, Homo sapiens
  misc_RNA (1)...(19): siRNA sense strand
caagaugguuccccaccuu

SEQ ID NO: 1188304 - RNA, 19 nt, Homo sapiens
  misc_RNA (1)...(19): siRNA sense strand
acaaagaaagggacuucga

SEQ ID NO: 1188305 - RNA, 19 nt, Homo sapiens
  misc_RNA (1)...(19): siRNA sense strand
ugacaugcucagaacaaga

SEQ ID NO: 1188306 - RNA, 19 nt, Homo sapiens
  misc_RNA (1)...(19): siRNA sense strand
guugugccucuucauauug

SEQ ID NO: 1188307 - RNA, 19 nt, Homo sapiens
  misc_RNA (1)...(19): siRNA sense strand
caucguggcagccguccuu

SEQ ID NO: 1188308 - RNA, 19 nt, Homo sapiens
  misc_RNA (1)...(19): siRNA sense strand
ggaccgggugaccuucuug

SEQ ID NO: 1188309 - RNA, 19 nt, Homo sapiens
  misc_RNA (1)...(19): siRNA sense strand
ccgaagugaaggagaauuc

SEQ ID NO: 1188310 - RNA, 19 nt, Homo sapiens
  misc_RNA (1)...(19): siRNA sense strand
aggcgcaagucgagaggaa

SEQ ID NO: 1188311 - RNA, 19 nt, Homo sapiens
  misc_RNA (1)...(19): siRNA sense strand
caggagagcuggucuuuga

SEQ ID NO: 1188312 - RNA, 19 nt, Homo sapiens
  misc_RNA (1)...(19): siRNA sense strand
gaaggagaauucaaacaga

SEQ ID NO: 1188313 - RNA, 19 nt, Homo sapiens
  misc_RNA (1)...(19): siRNA sense strand
ggacacccaugacuucaaa

SEQ ID NO: 1188314 - RNA, 19 nt, Homo sapiens
  misc_RNA (1)...(19): siRNA sense strand
gaauacaccugguucaaag

SEQ ID NO: 1188315 - RNA, 19 nt, Homo sapiens
  misc_RNA (1)...(19): siRNA sense strand
cgaguaagaaggugauuua

SEQ ID NO: 1188316 - RNA, 19 nt, Homo sapiens
  misc_RNA (1)...(19): siRNA sense strand
gaauaauccugugaaguug

SEQ ID NO: 1188317 - RNA, 19 nt, Homo sapiens
  misc_RNA (1)...(19): siRNA sense strand
agaauaauccugugaaguu

SEQ ID NO: 1188318 - RNA, 19 nt, Homo sapiens
  misc_RNA (1)...(19): siRNA sense strand
caacugguaucaccuucaa

SEQ ID NO: 1188319 - RNA, 19 nt, Homo sapiens
  misc_RNA (1)...(19): siRNA sense strand
ggauagugaugccuacgaa

SEQ ID NO: 1188320 - RNA, 19 nt, Homo sapiens
  misc_RNA (1)...(19): siRNA sense strand
gaaagggacuucgaguaag

SEQ ID NO: 1188321 - RNA, 19 nt, Homo sapiens
  misc_RNA (1)...(19): siRNA sense strand
guucaaagaugggauagug

SEQ ID NO: 1188322 - RNA, 19 nt, Homo sapiens
  misc_RNA (1)...(19): siRNA sense strand
agaaagggacuucgaguaa

SEQ ID NO: 1188323 - RNA, 19 nt, Homo sapiens
  misc_RNA (1)...(19): siRNA sense strand
cauccaagccuacaguuaa

SEQ ID NO: 1188324 - RNA, 19 nt, Homo sapiens
  misc_RNA (1)...(19): siRNA sense strand
gaacaaagaaagggacuuc

SEQ ID NO: 1188325 - RNA, 19 nt, Homo sapiens
  misc_RNA (1)...(19): siRNA sense strand
ucaaacagaccucgucauu

SEQ ID NO: 1188326 - RNA, 19 nt, Homo sapiens
  misc_RNA (1)...(19): siRNA sense strand
ggaagacacugggacauac

SEQ ID NO: 1188327 - RNA, 19 nt, Homo sapiens
  misc_RNA (1)...(19): siRNA sense strand
acacuuguauggucucuga

SEQ ID NO: 1188328 - RNA, 19 nt, Homo sapiens
  misc_RNA (1)...(19): siRNA sense strand
aaacagaccucgucauucc

SEQ ID NO: 1188329 - RNA, 19 nt, Homo sapiens
  misc_RNA (1)...(19): siRNA sense strand
aaagggacuucgaguaaga

SEQ ID NO: 1188330 - RNA, 19 nt, Homo sapiens
  misc_RNA (1)...(19): siRNA sense strand
gggaagacacugggacaua

SEQ ID NO: 1188331 - RNA, 19 nt, Homo sapiens
  misc_RNA (1)...(19): siRNA sense strand
cagcaacucuuccuauguc

SEQ ID NO: 1188332 - RNA, 19 nt, Homo sapiens
  misc_RNA (1)...(19): siRNA sense strand
gcaucugguuugccuauag

SEQ ID NO: 1188333 - RNA, 19 nt, Homo sapiens
  misc_RNA (1)...(19): siRNA sense strand
ggaaggcggcaacagcuau

SEQ ID NO: 1188334 - RNA, 19 nt, Homo sapiens
  misc_RNA (1)...(19): siRNA sense strand
aagaaagggacuucgagua

SEQ ID NO: 1188335 - RNA, 19 nt, Homo sapiens
  misc_RNA (1)...(19): siRNA sense strand
ccucugauacuggagaaua

SEQ ID NO: 1188336 - RNA, 19 nt, Homo sapiens
  misc_RNA (1)...(19): siRNA sense strand
uguugugccucuucauauu

SEQ ID NO: 1188337 - RNA, 19 nt, Homo sapiens
  misc_RNA (1)...(19): siRNA sense strand
gaagacacugggacauaca

SEQ ID NO: 1188338 - RNA, 19 nt, Homo sapiens
  misc_RNA (1)...(19): siRNA sense strand
ggagagcuggucuuugauc

SEQ ID NO: 1188339 - RNA, 19 nt, Homo sapiens
  misc_RNA (1)...(19): siRNA sense strand
aaacuguugugccucuuca

SEQ ID NO: 1188340 - RNA, 19 nt, Homo sapiens
  misc_RNA (1)...(19): siRNA sense strand
ccauccaagccuacaguua

SEQ ID NO: 1188341 - RNA, 19 nt, Homo sapiens
  misc_RNA (1)...(19): siRNA sense strand
gagaauaauccugugaagu

SEQ ID NO: 1188342 - RNA, 19 nt, Homo sapiens
  misc_RNA (1)...(19): siRNA sense strand
ugagaauaauccugugaag

SEQ ID NO: 1188343 - RNA, 19 nt, Homo sapiens
  misc_RNA (1)...(19): siRNA sense strand
gaaacuguugugccucuuc

SEQ ID NO: 1188344 - RNA, 19 nt, Homo sapiens
  misc_RNA (1)...(19): siRNA sense strand
cgaggccacuuugacagaa

SEQ ID NO: 1188345 - RNA, 19 nt, Homo sapiens
  misc_RNA (1)...(19): siRNA sense strand
gacaugcucagaacaagau

SEQ ID NO: 1188346 - RNA, 19 nt, Homo sapiens
  misc_RNA (1)...(19): siRNA sense strand
cguggcagccguccuugua

SEQ ID NO: 1188347 - RNA, 19 nt, Homo sapiens
  misc_RNA (1)...(19): siRNA sense strand
caaacagaccucgucauuc

SEQ ID NO: 1188348 - RNA, 19 nt, Homo sapiens
  misc_RNA (1)...(19): siRNA sense strand
acacugggacauacacuug

SEQ ID NO: 1188349 - RNA, 19 nt, Homo sapiens
  misc_RNA (1)...(19): siRNA sense strand
gaaccgggcagugcugaca

SEQ ID NO: 1188350 - RNA, 19 nt, Homo sapiens
  misc_RNA (1)...(19): siRNA sense strand
gaaggcggcaacagcuaug

SEQ ID NO: 1188351 - RNA, 19 nt, Homo sapiens
  misc_RNA (1)...(19): siRNA sense strand
ggaaacuguugugccucuu

SEQ ID NO: 1188352 - RNA, 19 nt, Homo sapiens
  misc_RNA (1)...(19): siRNA sense strand
ucaaagaugggauagugau

SEQ ID NO: 1188353 - RNA, 19 nt, Homo sapiens
  misc_RNA (1)...(19): siRNA sense strand
caaagaugggauagugaug

SEQ ID NO: 1188354 - RNA, 19 nt, Homo sapiens
  misc_RNA (1)...(19): siRNA sense strand
caacaggagagcuggucuu

SEQ ID NO: 1188355 - RNA, 19 nt, Homo sapiens
  misc_RNA (1)...(19): siRNA sense strand
caagaugguuccccaccuu

SEQ ID NO: 1188356 - RNA, 19 nt, Homo sapiens
  misc_RNA (1)...(19): siRNA sense strand
acaaagaaagggacuucga

SEQ ID NO: 1188357 - RNA, 19 nt, Homo sapiens
  misc_RNA (1)...(19): siRNA sense strand
ugacaugcucagaacaaga

SEQ ID NO: 1188358 - RNA, 19 nt, Homo sapiens
  misc_RNA (1)...(19): siRNA sense strand
guugugccucuucauauug

SEQ ID NO: 1188359 - RNA, 19 nt, Homo sapiens
  misc_RNA (1)...(19): siRNA sense strand
caucguggcagccguccuu

SEQ ID NO: 1188360 - RNA, 19 nt, Homo sapiens
  misc_RNA (1)...(19): siRNA sense strand
ggaccgggugaccuucuug

SEQ ID NO: 1188361 - RNA, 19 nt, Homo sapiens
  misc_RNA (1)...(19): siRNA sense strand
ccgaagugaaggagaauuc

SEQ ID NO: 1188362 - RNA, 19 nt, Homo sapiens
  misc_RNA (1)...(19): siRNA sense strand
aggcgcaagucgagaggaa

SEQ ID NO: 1188363 - RNA, 19 nt, Homo sapiens
  misc_RNA (1)...(19): siRNA sense strand
caggagagcuggucuuuga

SEQ ID NO: 1188364 - RNA, 19 nt, Homo sapiens
  misc_RNA (1)...(19): siRNA sense strand
gaaggagaauucaaacaga

SEQ ID NO: 1188365 - RNA, 19 nt, Homo sapiens
  misc_RNA (1)...(19): siRNA sense strand
ggacacccaugacuucaaa

SEQ ID NO: 1188366 - RNA, 19 nt, Homo sapiens
  misc_RNA (1)...(19): siRNA sense strand
gaauacaccugguucaaag

SEQ ID NO: 1188367 - RNA, 19 nt, Homo sapiens
  misc_RNA (1)...(19): siRNA sense strand
cgaguaagaaggugauuua

SEQ ID NO: 1188368 - RNA, 19 nt, Homo sapiens
  misc_RNA (1)...(19): siRNA sense strand
gaauaauccugugaaguug

SEQ ID NO: 1188369 - RNA, 19 nt, Homo sapiens
  misc_RNA (1)...(19): siRNA sense strand
agaauaauccugugaaguu

SEQ ID NO: 1188370 - RNA, 19 nt, Homo sapiens
  misc_RNA (1)...(19): siRNA sense strand
caacugguaucaccuucaa

SEQ ID NO: 1188371 - RNA, 19 nt, Homo sapiens
  misc_RNA (1)...(19): siRNA sense strand
ggauagugaugccuacgaa

SEQ ID NO: 1188372 - RNA, 19 nt, Homo sapiens
  misc_RNA (1)...(19): siRNA sense strand
gaaagggacuucgaguaag

SEQ ID NO: 1188373 - RNA, 19 nt, Homo sapiens
  misc_RNA (1)...(19): siRNA sense strand
guucaaagaugggauagug

SEQ ID NO: 1188374 - RNA, 19 nt, Homo sapiens
  misc_RNA (1)...(19): siRNA sense strand
agaaagggacuucgaguaa

SEQ ID NO: 1188375 - RNA, 19 nt, Homo sapiens
  misc_RNA (1)...(19): siRNA sense strand
cauccaagccuacaguuaa

SEQ ID NO: 1188376 - RNA, 19 nt, Homo sapiens
  misc_RNA (1)...(19): siRNA sense strand
gaacaaagaaagggacuuc

SEQ ID NO: 1188377 - RNA, 19 nt, Homo sapiens
  misc_RNA (1)...(19): siRNA sense strand
ucaaacagaccucgucauu

SEQ ID NO: 1188378 - RNA, 19 nt, Homo sapiens
  misc_RNA (1)...(19): siRNA sense strand
ggaagacacugggacauac

SEQ ID NO: 1188379 - RNA, 19 nt, Homo sapiens
  misc_RNA (1)...(19): siRNA sense strand
acacuuguauggucucuga

SEQ ID NO: 1188380 - RNA, 19 nt, Homo sapiens
  misc_RNA (1)...(19): siRNA sense strand
aaacagaccucgucauucc

SEQ ID NO: 1188381 - RNA, 19 nt, Homo sapiens
  misc_RNA (1)...(19): siRNA sense strand
aaagggacuucgaguaaga

SEQ ID NO: 1188382 - RNA, 19 nt, Homo sapiens
  misc_RNA (1)...(19): siRNA sense strand
gggaagacacugggacaua

SEQ ID NO: 1188383 - RNA, 19 nt, Homo sapiens
  misc_RNA (1)...(19): siRNA sense strand
cagcaacucuuccuauguc

SEQ ID NO: 1188384 - RNA, 19 nt, Homo sapiens
  misc_RNA (1)...(19): siRNA sense strand
gcaucugguuugccuauag

SEQ ID NO: 1188385 - RNA, 19 nt, Homo sapiens
  misc_RNA (1)...(19): siRNA sense strand
ggaaggcggcaacagcuau

SEQ ID NO: 1188386 - RNA, 19 nt, Homo sapiens
  misc_RNA (1)...(19): siRNA sense strand
aagaaagggacuucgagua

SEQ ID NO: 1188387 - RNA, 19 nt, Homo sapiens
  misc_RNA (1)...(19): siRNA sense strand
ccucugauacuggagaaua

SEQ ID NO: 1188388 - RNA, 19 nt, Homo sapiens
  misc_RNA (1)...(19): siRNA sense strand
uguugugccucuucauauu

SEQ ID NO: 1188389 - RNA, 19 nt, Homo sapiens
  misc_RNA (1)...(19): siRNA sense strand
gaagacacugggacauaca

SEQ ID NO: 1188390 - RNA, 19 nt, Homo sapiens
  misc_RNA (1)...(19): siRNA sense strand
ggagagcuggucuuugauc

SEQ ID NO: 1188391 - RNA, 19 nt, Homo sapiens
  misc_RNA (1)...(19): siRNA sense strand
aaacuguugugccucuuca

SEQ ID NO: 1188392 - RNA, 19 nt, Homo sapiens
  misc_RNA (1)...(19): siRNA sense strand
ccauccaagccuacaguua

SEQ ID NO: 1188393 - RNA, 19 nt, Homo sapiens
  misc_RNA (1)...(19): siRNA sense strand
gagaauaauccugugaagu

SEQ ID NO: 1188394 - RNA, 19 nt, Homo sapiens
  misc_RNA (1)...(19): siRNA sense strand
ugagaauaauccugugaag

SEQ ID NO: 1188395 - RNA, 19 nt, Homo sapiens
  misc_RNA (1)...(19): siRNA sense strand
gaaacuguugugccucuuc

SEQ ID NO: 1188396 - RNA, 19 nt, Homo sapiens
  misc_RNA (1)...(19): siRNA sense strand
cgaggccacuuugacagaa

SEQ ID NO: 1188397 - RNA, 19 nt, Homo sapiens
  misc_RNA (1)...(19): siRNA sense strand
gacaugcucagaacaagau

SEQ ID NO: 1188398 - RNA, 19 nt, Homo sapiens
  misc_RNA (1)...(19): siRNA sense strand
cguggcagccguccuugua

SEQ ID NO: 1188399 - RNA, 19 nt, Homo sapiens
  misc_RNA (1)...(19): siRNA sense strand
caaacagaccucgucauuc

SEQ ID NO: 1188400 - RNA, 19 nt, Homo sapiens
  misc_RNA (1)...(19): siRNA sense strand
acacugggacauacacuug

SEQ ID NO: 1188401 - RNA, 19 nt, Homo sapiens
  misc_RNA (1)...(19): siRNA sense strand
gaaccgggcagugcugaca

SEQ ID NO: 1188402 - RNA, 19 nt, Homo sapiens
  misc_RNA (1)...(19): siRNA sense strand
gaaggcggcaacagcuaug

SEQ ID NO: 1188403 - RNA, 19 nt, Homo sapiens
  misc_RNA (1)...(19): siRNA sense strand
ggaaacuguugugccucuu

SEQ ID NO: 1188404 - RNA, 19 nt, Homo sapiens
  misc_RNA (1)...(19): siRNA sense strand
ucaaagaugggauagugau

SEQ ID NO: 1188405 - RNA, 19 nt, Homo sapiens
  misc_RNA (1)...(19): siRNA sense strand
caaagaugggauagugaug

SEQ ID NO: 1188406 - RNA, 19 nt, Homo sapiens
  misc_RNA (1)...(19): siRNA sense strand
caacaggagagcuggucuu

SEQ ID NO: 1188407 - RNA, 19 nt, Homo sapiens
  misc_RNA (1)...(19): siRNA sense strand
caagaugguuccccaccuu

SEQ ID NO: 1188408 - RNA, 19 nt, Homo sapiens
  misc_RNA (1)...(19): siRNA sense strand
acaaagaaagggacuucga

SEQ ID NO: 1188409 - RNA, 19 nt, Homo sapiens
  misc_RNA (1)...(19): siRNA sense strand
ugacaugcucagaacaaga

SEQ ID NO: 1188410 - RNA, 19 nt, Homo sapiens
  misc_RNA (1)...(19): siRNA sense strand
guugugccucuucauauug

SEQ ID NO: 1188411 - RNA, 19 nt, Homo sapiens
  misc_RNA (1)...(19): siRNA sense strand
caucguggcagccguccuu

SEQ ID NO: 1188412 - RNA, 19 nt, Homo sapiens
  misc_RNA (1)...(19): siRNA sense strand
ggaccgggugaccuucuug

SEQ ID NO: 1188413 - RNA, 19 nt, Homo sapiens
  misc_RNA (1)...(19): siRNA sense strand
ccgaagugaaggagaauuc

SEQ ID NO: 1188414 - RNA, 19 nt, Homo sapiens
  misc_RNA (1)...(19): siRNA sense strand
aggcgcaagucgagaggaa

SEQ ID NO: 1188415 - RNA, 19 nt, Homo sapiens
  misc_RNA (1)...(19): siRNA sense strand
caggagagcuggucuuuga

SEQ ID NO: 1188416 - RNA, 19 nt, Homo sapiens
  misc_RNA (1)...(19): siRNA sense strand
gaaggagaauucaaacaga

SEQ ID NO: 1188417 - RNA, 19 nt, Homo sapiens
  misc_RNA (1)...(19): siRNA sense strand
ggacacccaugacuucaaa

SEQ ID NO: 1188418 - RNA, 19 nt, Homo sapiens
  misc_RNA (1)...(19): siRNA sense strand
gaauacaccugguucaaag

SEQ ID NO: 1188419 - RNA, 19 nt, Homo sapiens
  misc_RNA (1)...(19): siRNA sense strand
cgaguaagaaggugauuua

SEQ ID NO: 1188420 - RNA, 19 nt, Homo sapiens
  misc_RNA (1)...(19): siRNA sense strand
gaauaauccugugaaguug

SEQ ID NO: 1188421 - RNA, 19 nt, Homo sapiens
  misc_RNA (1)...(19): siRNA sense strand
agaauaauccugugaaguu

SEQ ID NO: 1188422 - RNA, 19 nt, Homo sapiens
  misc_RNA (1)...(19): siRNA sense strand
caacugguaucaccuucaa

SEQ ID NO: 1188423 - RNA, 19 nt, Homo sapiens
  misc_RNA (1)...(19): siRNA sense strand
ggauagugaugccuacgaa

SEQ ID NO: 1188424 - RNA, 19 nt, Homo sapiens
  misc_RNA (1)...(19): siRNA sense strand
gaaagggacuucgaguaag

SEQ ID NO: 1188425 - RNA, 19 nt, Homo sapiens
  misc_RNA (1)...(19): siRNA sense strand
guucaaagaugggauagug

SEQ ID NO: 1188426 - RNA, 19 nt, Homo sapiens
  misc_RNA (1)...(19): siRNA sense strand
agaaagggacuucgaguaa

SEQ ID NO: 1188427 - RNA, 19 nt, Homo sapiens
  misc_RNA (1)...(19): siRNA sense strand
cauccaagccuacaguuaa

SEQ ID NO: 1188428 - RNA, 19 nt, Homo sapiens
  misc_RNA (1)...(19): siRNA sense strand
gaacaaagaaagggacuuc

SEQ ID NO: 1188429 - RNA, 19 nt, Homo sapiens
  misc_RNA (1)...(19): siRNA sense strand
ucaaacagaccucgucauu

SEQ ID NO: 1188430 - RNA, 19 nt, Homo sapiens
  misc_RNA (1)...(19): siRNA sense strand
ggaagacacugggacauac

SEQ ID NO: 1188431 - RNA, 19 nt, Homo sapiens
  misc_RNA (1)...(19): siRNA sense strand
acacuuguauggucucuga

SEQ ID NO: 1188432 - RNA, 19 nt, Homo sapiens
  misc_RNA (1)...(19): siRNA sense strand
aaacagaccucgucauucc

SEQ ID NO: 1188433 - RNA, 19 nt, Homo sapiens
  misc_RNA (1)...(19): siRNA sense strand
aaagggacuucgaguaaga

SEQ ID NO: 1188434 - RNA, 19 nt, Homo sapiens
  misc_RNA (1)...(19): siRNA sense strand
gggaagacacugggacaua

SEQ ID NO: 1188435 - RNA, 19 nt, Homo sapiens
  misc_RNA (1)...(19): siRNA sense strand
cagcaacucuuccuauguc

SEQ ID NO: 1188436 - RNA, 19 nt, Homo sapiens
  misc_RNA (1)...(19): siRNA sense strand
gcaucugguuugccuauag

SEQ ID NO: 1188437 - RNA, 19 nt, Homo sapiens
  misc_RNA (1)...(19): siRNA sense strand
ggaaggcggcaacagcuau

SEQ ID NO: 1188438 - RNA, 19 nt, Homo sapiens
  misc_RNA (1)...(19): siRNA sense strand
aagaaagggacuucgagua

SEQ ID NO: 1188439 - RNA, 19 nt, Homo sapiens
  misc_RNA (1)...(19): siRNA sense strand
ccucugauacuggagaaua

SEQ ID NO: 1188440 - RNA, 19 nt, Homo sapiens
  misc_RNA (1)...(19): siRNA sense strand
uguugugccucuucauauu

SEQ ID NO: 1188441 - RNA, 19 nt, Homo sapiens
  misc_RNA (1)...(19): siRNA sense strand
gaagacacugggacauaca

SEQ ID NO: 1188442 - RNA, 19 nt, Homo sapiens
  misc_RNA (1)...(19): siRNA sense strand
ggagagcuggucuuugauc

SEQ ID NO: 1188443 - RNA, 19 nt, Homo sapiens
  misc_RNA (1)...(19): siRNA sense strand
aaacuguugugccucuuca

SEQ ID NO: 1188444 - RNA, 19 nt, Homo sapiens
  misc_RNA (1)...(19): siRNA sense strand
ccauccaagccuacaguua

SEQ ID NO: 1188445 - RNA, 19 nt, Homo sapiens
  misc_RNA (1)...(19): siRNA sense strand
gagaauaauccugugaagu

SEQ ID NO: 1188446 - RNA, 19 nt, Homo sapiens
  misc_RNA (1)...(19): siRNA sense strand
ugagaauaauccugugaag

SEQ ID NO: 1188447 - RNA, 19 nt, Homo sapiens
  misc_RNA (1)...(19): siRNA sense strand
gaaacuguugugccucuuc

SEQ ID NO: 1188448 - RNA, 19 nt, Homo sapiens
  misc_RNA (1)...(19): siRNA sense strand
cgaggccacuuugacagaa

SEQ ID NO: 1188449 - RNA, 19 nt, Homo sapiens
  misc_RNA (1)...(19): siRNA sense strand
gacaugcucagaacaagau

SEQ ID NO: 1188450 - RNA, 19 nt, Homo sapiens
  misc_RNA (1)...(19): siRNA sense strand
cguggcagccguccuugua

SEQ ID NO: 1188451 - RNA, 19 nt, Homo sapiens
  misc_RNA (1)...(19): siRNA sense strand
caaacagaccucgucauuc

SEQ ID NO: 1188452 - RNA, 19 nt, Homo sapiens
  misc_RNA (1)...(19): siRNA sense strand
acacugggacauacacuug

SEQ ID NO: 1188453 - RNA, 19 nt, Homo sapiens
  misc_RNA (1)...(19): siRNA sense strand
gaaccgggcagugcugaca

SEQ ID NO: 1188454 - RNA, 19 nt, Homo sapiens
  misc_RNA (1)...(19): siRNA sense strand
gaaggcggcaacagcuaug

SEQ ID NO: 1188455 - RNA, 19 nt, Homo sapiens
  misc_RNA (1)...(19): siRNA sense strand
ggaaacuguugugccucuu

SEQ ID NO: 1188456 - RNA, 19 nt, Homo sapiens
  misc_RNA (1)...(19): siRNA sense strand
ucaaagaugggauagugau

SEQ ID NO: 1188457 - RNA, 19 nt, Homo sapiens
  misc_RNA (1)...(19): siRNA sense strand
caaagaugggauagugaug

SEQ ID NO: 1188458 - RNA, 19 nt, Homo sapiens
  misc_RNA (1)...(19): siRNA sense strand
caacaggagagcuggucuu

SEQ ID NO: 1188459 - RNA, 19 nt, Homo sapiens
  misc_RNA (1)...(19): siRNA sense strand
caagaugguuccccaccuu

SEQ ID NO: 1188460 - RNA, 19 nt, Homo sapiens
  misc_RNA (1)...(19): siRNA sense strand
acaaagaaagggacuucga

SEQ ID NO: 1188461 - RNA, 19 nt, Homo sapiens
  misc_RNA (1)...(19): siRNA sense strand
ugacaugcucagaacaaga

SEQ ID NO: 1188462 - RNA, 19 nt, Homo sapiens
  misc_RNA (1)...(19): siRNA sense strand
guugugccucuucauauug

SEQ ID NO: 1188463 - RNA, 19 nt, Homo sapiens
  misc_RNA (1)...(19): siRNA sense strand
caucguggcagccguccuu

SEQ ID NO: 1188464 - RNA, 19 nt, Homo sapiens
  misc_RNA (1)...(19): siRNA sense strand
ggaccgggugaccuucuug

SEQ ID NO: 1188465 - RNA, 19 nt, Homo sapiens
  misc_RNA (1)...(19): siRNA sense strand
ccgaagugaaggagaauuc

SEQ ID NO: 1188466 - RNA, 19 nt, Homo sapiens
  misc_RNA (1)...(19): siRNA sense strand
aggcgcaagucgagaggaa

SEQ ID NO: 1188467 - RNA, 19 nt, Homo sapiens
  misc_RNA (1)...(19): siRNA sense strand
caggagagcuggucuuuga

SEQ ID NO: 1188468 - RNA, 19 nt, Homo sapiens
  misc_RNA (1)...(19): siRNA sense strand
gaaggagaauucaaacaga

SEQ ID NO: 1188469 - RNA, 19 nt, Homo sapiens
  misc_RNA (1)...(19): siRNA sense strand
ggacacccaugacuucaaa

SEQ ID NO: 1188470 - RNA, 19 nt, Homo sapiens
  misc_RNA (1)...(19): siRNA sense strand
gaauacaccugguucaaag

SEQ ID NO: 1188471 - RNA, 19 nt, Homo sapiens
  misc_RNA (1)...(19): siRNA sense strand
cgaguaagaaggugauuua

SEQ ID NO: 1188472 - RNA, 19 nt, Homo sapiens
  misc_RNA (1)...(19): siRNA sense strand
gaauaauccugugaaguug

SEQ ID NO: 1188473 - RNA, 19 nt, Homo sapiens
  misc_RNA (1)...(19): siRNA sense strand
agaauaauccugugaaguu

SEQ ID NO: 1188474 - RNA, 19 nt, Homo sapiens
  misc_RNA (1)...(19): siRNA sense strand
caacugguaucaccuucaa

SEQ ID NO: 1188475 - RNA, 19 nt, Homo sapiens
  misc_RNA (1)...(19): siRNA sense strand
ggauagugaugccuacgaa

SEQ ID NO: 1188476 - RNA, 19 nt, Homo sapiens
  misc_RNA (1)...(19): siRNA sense strand
gaaagggacuucgaguaag

SEQ ID NO: 1188477 - RNA, 19 nt, Homo sapiens
  misc_RNA (1)...(19): siRNA sense strand
guucaaagaugggauagug

SEQ ID NO: 1188478 - RNA, 19 nt, Homo sapiens
  misc_RNA (1)...(19): siRNA sense strand
agaaagggacuucgaguaa

SEQ ID NO: 1188479 - RNA, 19 nt, Homo sapiens
  misc_RNA (1)...(19): siRNA sense strand
cauccaagccuacaguuaa

SEQ ID NO: 1188480 - RNA, 19 nt, Homo sapiens
  misc_RNA (1)...(19): siRNA sense strand
gaacaaagaaagggacuuc

SEQ ID NO: 1188481 - RNA, 19 nt, Homo sapiens
  misc_RNA (1)...(19): siRNA sense strand
ucaaacagaccucgucauu

SEQ ID NO: 1188482 - RNA, 19 nt, Homo sapiens
  misc_RNA (1)...(19): siRNA sense strand
ggaagacacugggacauac

SEQ ID NO: 1188483 - RNA, 19 nt, Homo sapiens
  misc_RNA (1)...(19): siRNA sense strand
acacuuguauggucucuga

SEQ ID NO: 1188484 - RNA, 19 nt, Homo sapiens
  misc_RNA (1)...(19): siRNA sense strand
aaacagaccucgucauucc

SEQ ID NO: 1188485 - RNA, 19 nt, Homo sapiens
  misc_RNA (1)...(19): siRNA sense strand
aaagggacuucgaguaaga

SEQ ID NO: 1188486 - RNA, 19 nt, Homo sapiens
  misc_RNA (1)...(19): siRNA sense strand
gggaagacacugggacaua

SEQ ID NO: 1188487 - RNA, 19 nt, Homo sapiens
  misc_RNA (1)...(19): siRNA sense strand
cagcaacucuuccuauguc

SEQ ID NO: 1188488 - RNA, 19 nt, Homo sapiens
  misc_RNA (1)...(19): siRNA sense strand
gcaucugguuugccuauag

SEQ ID NO: 1188489 - RNA, 19 nt, Homo sapiens
  misc_RNA (1)...(19): siRNA sense strand
ggaaggcggcaacagcuau

SEQ ID NO: 1188490 - RNA, 19 nt, Homo sapiens
  misc_RNA (1)...(19): siRNA sense strand
aagaaagggacuucgagua

SEQ ID NO: 1188491 - RNA, 19 nt, Homo sapiens
  misc_RNA (1)...(19): siRNA sense strand
ccucugauacuggagaaua

SEQ ID NO: 1188492 - RNA, 19 nt, Homo sapiens
  misc_RNA (1)...(19): siRNA sense strand
uguugugccucuucauauu

SEQ ID NO: 1188493 - RNA, 19 nt, Homo sapiens
  misc_RNA (1)...(19): siRNA sense strand
gaagacacugggacauaca

SEQ ID NO: 1188494 - RNA, 19 nt, Homo sapiens
  misc_RNA (1)...(19): siRNA sense strand
ggagagcuggucuuugauc

SEQ ID NO: 1188495 - RNA, 19 nt, Homo sapiens
  misc_RNA (1)...(19): siRNA sense strand
aaacuguugugccucuuca

SEQ ID NO: 1188496 - RNA, 19 nt, Homo sapiens
  misc_RNA (1)...(19): siRNA sense strand
ccauccaagccuacaguua

SEQ ID NO: 1188497 - RNA, 19 nt, Homo sapiens
  misc_RNA (1)...(19): siRNA sense strand
gagaauaauccugugaagu

SEQ ID NO: 1188498 - RNA, 19 nt, Homo sapiens
  misc_RNA (1)...(19): siRNA sense strand
ugagaauaauccugugaag

SEQ ID NO: 1188499 - RNA, 19 nt, Homo sapiens
  misc_RNA (1)...(19): siRNA sense strand
gaaacuguugugccucuuc

SEQ ID NO: 1188500 - RNA, 19 nt, Homo sapiens
  misc_RNA (1)...(19): siRNA sense strand
cgaggccacuuugacagaa

SEQ ID NO: 1188501 - RNA, 19 nt, Homo sapiens
  misc_RNA (1)...(19): siRNA sense strand
gacaugcucagaacaagau

SEQ ID NO: 1188502 - RNA, 19 nt, Homo sapiens
  misc_RNA (1)...(19): siRNA sense strand
cguggcagccguccuugua

SEQ ID NO: 1188503 - RNA, 19 nt, Homo sapiens
  misc_RNA (1)...(19): siRNA sense strand
caaacagaccucgucauuc

SEQ ID NO: 1188504 - RNA, 19 nt, Homo sapiens
  misc_RNA (1)...(19): siRNA sense strand
acacugggacauacacuug

SEQ ID NO: 1188505 - RNA, 19 nt, Homo sapiens
  misc_RNA (1)...(19): siRNA sense strand
gaaccgggcagugcugaca

SEQ ID NO: 1188506 - RNA, 19 nt, Homo sapiens
  misc_RNA (1)...(19): siRNA sense strand
gaaggcggcaacagcuaug

SEQ ID NO: 1188507 - RNA, 19 nt, Homo sapiens
  misc_RNA (1)...(19): siRNA sense strand
ggaaacuguugugccucuu

SEQ ID NO: 1188508 - RNA, 19 nt, Homo sapiens
  misc_RNA (1)...(19): siRNA sense strand
ucaaagaugggauagugau

SEQ ID NO: 1188509 - RNA, 19 nt, Homo sapiens
  misc_RNA (1)...(19): siRNA sense strand
caaagaugggauagugaug

SEQ ID NO: 1188510 - RNA, 19 nt, Homo sapiens
  misc_RNA (1)...(19): siRNA sense strand
caacaggagagcuggucuu

SEQ ID NO: 1188511 - RNA, 19 nt, Homo sapiens
  misc_RNA (1)...(19): siRNA sense strand
caagaugguuccccaccuu

SEQ ID NO: 1188512 - RNA, 19 nt, Homo sapiens
  misc_RNA (1)...(19): siRNA sense strand
acaaagaaagggacuucga

SEQ ID NO: 1188513 - RNA, 19 nt, Homo sapiens
  misc_RNA (1)...(19): siRNA sense strand
ugacaugcucagaacaaga

SEQ ID NO: 1188514 - RNA, 19 nt, Homo sapiens
  misc_RNA (1)...(19): siRNA sense strand
guugugccucuucauauug

SEQ ID NO: 1188515 - RNA, 19 nt, Homo sapiens
  misc_RNA (1)...(19): siRNA sense strand
caucguggcagccguccuu

SEQ ID NO: 1188516 - RNA, 19 nt, Homo sapiens
  misc_RNA (1)...(19): siRNA sense strand
ggaccgggugaccuucuug

SEQ ID NO: 1188517 - RNA, 19 nt, Homo sapiens
  misc_RNA (1)...(19): siRNA sense strand
ccgaagugaaggagaauuc

SEQ ID NO: 1188518 - RNA, 19 nt, Homo sapiens
  misc_RNA (1)...(19): siRNA sense strand
aggcgcaagucgagaggaa

SEQ ID NO: 1188519 - RNA, 19 nt, Homo sapiens
  misc_RNA (1)...(19): siRNA sense strand
ggaaauaguucagcaguua

SEQ ID NO: 1188520 - RNA, 19 nt, Homo sapiens
  misc_RNA (1)...(19): siRNA sense strand
aaaccuggcucagaaauua

SEQ ID NO: 1188521 - RNA, 19 nt, Homo sapiens
  misc_RNA (1)...(19): siRNA sense strand
gcucagaaauuaucagguu

SEQ ID NO: 1188522 - RNA, 19 nt, Homo sapiens
  misc_RNA (1)...(19): siRNA sense strand
gcagaugguuuaauuguag

SEQ ID NO: 1188523 - RNA, 19 nt, Homo sapiens
  misc_RNA (1)...(19): siRNA sense strand
ugaauucccucucaacaaa

SEQ ID NO: 1188524 - RNA, 19 nt, Homo sapiens
  misc_RNA (1)...(19): siRNA sense strand
ucaguggucuuuaugaauu

SEQ ID NO: 1188525 - RNA, 19 nt, Homo sapiens
  misc_RNA (1)...(19): siRNA sense strand
uaaaggagaggaaauaguu

SEQ ID NO: 1188526 - RNA, 19 nt, Homo sapiens
  misc_RNA (1)...(19): siRNA sense strand
gaaagaaacgcagaugguu

SEQ ID NO: 1188527 - RNA, 19 nt, Homo sapiens
  misc_RNA (1)...(19): siRNA sense strand
acaccagccucaaaucuaa

SEQ ID NO: 1188528 - RNA, 19 nt, Homo sapiens
  misc_RNA (1)...(19): siRNA sense strand
ggacaagggcauuaaagga

SEQ ID NO: 1188529 - RNA, 19 nt, Homo sapiens
  misc_RNA (1)...(19): siRNA sense strand
ggaacugcauuugaaguga

SEQ ID NO: 1188530 - RNA, 19 nt, Homo sapiens
  misc_RNA (1)...(19): siRNA sense strand
ggaaacaauggaaacaauu

SEQ ID NO: 1188531 - RNA, 19 nt, Homo sapiens
  misc_RNA (1)...(19): siRNA sense strand
gcacugauaaucgaaauau

SEQ ID NO: 1188532 - RNA, 19 nt, Homo sapiens
  misc_RNA (1)...(19): siRNA sense strand
gaaauaguucagcaguuaa

SEQ ID NO: 1188533 - RNA, 19 nt, Homo sapiens
  misc_RNA (1)...(19): siRNA sense strand
gcugaaacgugaagaugug

SEQ ID NO: 1188534 - RNA, 19 nt, Homo sapiens
  misc_RNA (1)...(19): siRNA sense strand
agacagaauuugcccaaga

SEQ ID NO: 1188535 - RNA, 19 nt, Homo sapiens
  misc_RNA (1)...(19): siRNA sense strand
gaagccaucauuacuguug

SEQ ID NO: 1188536 - RNA, 19 nt, Homo sapiens
  misc_RNA (1)...(19): siRNA sense strand
gaaggacaagggcauuaaa

SEQ ID NO: 1188537 - RNA, 19 nt, Homo sapiens
  misc_RNA (1)...(19): siRNA sense strand
ggacagucuucuacaugga

SEQ ID NO: 1188538 - RNA, 19 nt, Homo sapiens
  misc_RNA (1)...(19): siRNA sense strand
gaaaccuggcucagaaauu

SEQ ID NO: 1188539 - RNA, 19 nt, Homo sapiens
  misc_RNA (1)...(19): siRNA sense strand
ggaaaucucagaaacuuac

SEQ ID NO: 1188540 - RNA, 19 nt, Homo sapiens
  misc_RNA (1)...(19): siRNA sense strand
ugcaagcacuuuagaauca

SEQ ID NO: 1188541 - RNA, 19 nt, Homo sapiens
  misc_RNA (1)...(19): siRNA sense strand
gacagaauuugcccaagau

SEQ ID NO: 1188542 - RNA, 19 nt, Homo sapiens
  misc_RNA (1)...(19): siRNA sense strand
uuauggaacugcauuugaa

SEQ ID NO: 1188543 - RNA, 19 nt, Homo sapiens
  misc_RNA (1)...(19): siRNA sense strand
caaaguggacagucuucua

SEQ ID NO: 1188544 - RNA, 19 nt, Homo sapiens
  misc_RNA (1)...(19): siRNA sense strand
gaaacuuacucaagaugac

SEQ ID NO: 1188545 - RNA, 19 nt, Homo sapiens
  misc_RNA (1)...(19): siRNA sense strand
gaugggaaaucucagaaac

SEQ ID NO: 1188546 - RNA, 19 nt, Homo sapiens
  misc_RNA (1)...(19): siRNA sense strand
ugaggagccugcagcuaaa

SEQ ID NO: 1188547 - RNA, 19 nt, Homo sapiens
  misc_RNA (1)...(19): siRNA sense strand
gugaagauguguuuaaagc

SEQ ID NO: 1188548 - RNA, 19 nt, Homo sapiens
  misc_RNA (1)...(19): siRNA sense strand
caucauuacuguugugaag

SEQ ID NO: 1188549 - RNA, 19 nt, Homo sapiens
  misc_RNA (1)...(19): siRNA sense strand
gaagugaccaguggaggaa

SEQ ID NO: 1188550 - RNA, 19 nt, Homo sapiens
  misc_RNA (1)...(19): siRNA sense strand
guacaaguccagcggagaa

SEQ ID NO: 1188551 - RNA, 19 nt, Homo sapiens
  misc_RNA (1)...(19): siRNA sense strand
agacagugcuuugguugaa

SEQ ID NO: 1188552 - RNA, 19 nt, Homo sapiens
  misc_RNA (1)...(19): siRNA sense strand
agaauuugcccaagauaaa

SEQ ID NO: 1188553 - RNA, 19 nt, Homo sapiens
  misc_RNA (1)...(19): siRNA sense strand
gcagacaccagccucaaau

SEQ ID NO: 1188554 - RNA, 19 nt, Homo sapiens
  misc_RNA (1)...(19): siRNA sense strand
gcuccauuauucagcuaua

SEQ ID NO: 1188555 - RNA, 19 nt, Homo sapiens
  misc_RNA (1)...(19): siRNA sense strand
caugagauacgauacacua

SEQ ID NO: 1188556 - RNA, 19 nt, Homo sapiens
  misc_RNA (1)...(19): siRNA sense strand
uauaguugaugaugggaaa

SEQ ID NO: 1188557 - RNA, 19 nt, Homo sapiens
  misc_RNA (1)...(19): siRNA sense strand
cagaagaccaggaaacaau

SEQ ID NO: 1188558 - RNA, 19 nt, Homo sapiens
  misc_RNA (1)...(19): siRNA sense strand
cucagaaacuuacucaaga

SEQ ID NO: 1188559 - RNA, 19 nt, Homo sapiens
  misc_RNA (1)...(19): siRNA sense strand
gacaccagccucaaaucua

SEQ ID NO: 1188560 - RNA, 19 nt, Homo sapiens
  misc_RNA (1)...(19): siRNA sense strand
cauuaaaggagaggaaaua

SEQ ID NO: 1188561 - RNA, 19 nt, Homo sapiens
  misc_RNA (1)...(19): siRNA sense strand
ucagaaacuuacucaagau

SEQ ID NO: 1188562 - RNA, 19 nt, Homo sapiens
  misc_RNA (1)...(19): siRNA sense strand
uauccgugcuggcaacaaa

SEQ ID NO: 1188563 - RNA, 19 nt, Homo sapiens
  misc_RNA (1)...(19): siRNA sense strand
caacaaaguggacagucuu

SEQ ID NO: 1188564 - RNA, 19 nt, Homo sapiens
  misc_RNA (1)...(19): siRNA sense strand
uaaagaagcgggcacugau

SEQ ID NO: 1188565 - RNA, 19 nt, Homo sapiens
  misc_RNA (1)...(19): siRNA sense strand
aaacagaggagacaagaag

SEQ ID NO: 1188566 - RNA, 19 nt, Homo sapiens
  misc_RNA (1)...(19): siRNA sense strand
cuaccuggauaacgucauu

SEQ ID NO: 1188567 - RNA, 19 nt, Homo sapiens
  misc_RNA (1)...(19): siRNA sense strand
cagaauuugcccaagauaa

SEQ ID NO: 1188568 - RNA, 19 nt, Homo sapiens
  misc_RNA (1)...(19): siRNA sense strand
ugggaaaucucagaaacuu

SEQ ID NO: 1188569 - RNA, 19 nt, Homo sapiens
  misc_RNA (1)...(19): siRNA sense strand
cgaaauauaguugaugaug

SEQ ID NO: 1188570 - RNA, 19 nt, Homo sapiens
  misc_RNA (1)...(19): siRNA sense strand
gacaagaagagcagaggaa

SEQ ID NO: 1188571 - RNA, 19 nt, Homo sapiens
  misc_RNA (1)...(19): siRNA sense strand
ucucaguggucuuuaugaa

SEQ ID NO: 1188572 - RNA, 19 nt, Homo sapiens
  misc_RNA (1)...(19): siRNA sense strand
guacaacauuccgagacaa

SEQ ID NO: 1188573 - RNA, 19 nt, Homo sapiens
  misc_RNA (1)...(19): siRNA sense strand
gauaacgucauuggccaua

SEQ ID NO: 1188574 - RNA, 19 nt, Homo sapiens
  misc_RNA (1)...(19): siRNA sense strand
aaagaagcgggcacugaua

SEQ ID NO: 1188575 - RNA, 19 nt, Homo sapiens
  misc_RNA (1)...(19): siRNA sense strand
uagaaucacacgagacuga

SEQ ID NO: 1188576 - RNA, 19 nt, Homo sapiens
  misc_RNA (1)...(19): siRNA sense strand
ccagaucgaagucauccua

SEQ ID NO: 1188577 - RNA, 19 nt, Homo sapiens
  misc_RNA (1)...(19): siRNA sense strand
cgcagaugguuuaauugua

SEQ ID NO: 1188578 - RNA, 19 nt, Homo sapiens
  misc_RNA (1)...(19): siRNA sense strand
gcaaugauggaacgaaugg

SEQ ID NO: 1188579 - RNA, 19 nt, Homo sapiens
  misc_RNA (1)...(19): siRNA sense strand
gggaaaucucagaaacuua

SEQ ID NO: 1188580 - RNA, 19 nt, Homo sapiens
  misc_RNA (1)...(19): siRNA sense strand
ggaagucuacagcccaaga

SEQ ID NO: 1188581 - RNA, 19 nt, Homo sapiens
  misc_RNA (1)...(19): siRNA sense strand
cugaggagccugcagcuaa

SEQ ID NO: 1188582 - RNA, 19 nt, Homo sapiens
  misc_RNA (1)...(19): siRNA sense strand
caaggccguuuguggucua

SEQ ID NO: 1188583 - RNA, 19 nt, Homo sapiens
  misc_RNA (1)...(19): siRNA sense strand
ucaacaaaguggacagucu

SEQ ID NO: 1188584 - RNA, 19 nt, Homo sapiens
  misc_RNA (1)...(19): siRNA sense strand
gugcaaugauggaacgaau

SEQ ID NO: 1188585 - RNA, 19 nt, Homo sapiens
  misc_RNA (1)...(19): siRNA sense strand
uaacgucauuggccauagu

SEQ ID NO: 1188586 - RNA, 19 nt, Homo sapiens
  misc_RNA (1)...(19): siRNA sense strand
gaagccauccacccguauu

SEQ ID NO: 1188587 - RNA, 19 nt, Homo sapiens
  misc_RNA (1)...(19): siRNA sense strand
gaagucuacagcccaagaa

SEQ ID NO: 1188588 - RNA, 19 nt, Homo sapiens
  misc_RNA (1)...(19): siRNA sense strand
uagcccagauguugacguu

SEQ ID NO: 1188589 - RNA, 19 nt, Homo sapiens
  misc_RNA (1)...(19): siRNA sense strand
ugucuuugcuggacuuugu

SEQ ID NO: 1188590 - RNA, 19 nt, Homo sapiens
  misc_RNA (1)...(19): siRNA sense strand
aggaaacaauggaaacaau

SEQ ID NO: 1188591 - RNA, 19 nt, Homo sapiens
  misc_RNA (1)...(19): siRNA sense strand
ggugcugggugcaaugaug

SEQ ID NO: 1188592 - RNA, 19 nt, Homo sapiens
  misc_RNA (1)...(19): siRNA sense strand
aagaagcgggcacugauaa

SEQ ID NO: 1188593 - RNA, 19 nt, Homo sapiens
  misc_RNA (1)...(19): siRNA sense strand
cucaagauccagaacauaa

SEQ ID NO: 1188594 - RNA, 19 nt, Homo sapiens
  misc_RNA (1)...(19): siRNA sense strand
gggcacugauaaucgaaau

SEQ ID NO: 1188595 - RNA, 19 nt, Homo sapiens
  misc_RNA (1)...(19): siRNA sense strand
gaugaugggaaaucucaga

SEQ ID NO: 1188596 - RNA, 19 nt, Homo sapiens
  misc_RNA (1)...(19): siRNA sense strand
uaaagagagaggaagcaaa

SEQ ID NO: 1188597 - RNA, 19 nt, Homo sapiens
  misc_RNA (1)...(19): siRNA sense strand
gaacauaaggggccuaaag

SEQ ID NO: 1188598 - RNA, 19 nt, Homo sapiens
  misc_RNA (1)...(19): siRNA sense strand
guuauggaacugcauuuga

SEQ ID NO: 1188599 - RNA, 19 nt, Homo sapiens
  misc_RNA (1)...(19): siRNA sense strand
acccguauucuuucaauua

SEQ ID NO: 1188600 - RNA, 19 nt, Homo sapiens
  misc_RNA (1)...(19): siRNA sense strand
gaagcgggcacugauaauc

SEQ ID NO: 1188601 - RNA, 19 nt, Homo sapiens
  misc_RNA (1)...(19): siRNA sense strand
gaccaggaaacaauggaaa

SEQ ID NO: 1188602 - RNA, 19 nt, Homo sapiens
  misc_RNA (1)...(19): siRNA sense strand
cuaaagaagcgggcacuga

SEQ ID NO: 1188603 - RNA, 19 nt, Homo sapiens
  misc_RNA (1)...(19): siRNA sense strand
ucuucuacauggaacauuu

SEQ ID NO: 1188604 - RNA, 19 nt, Homo sapiens
  misc_RNA (1)...(19): siRNA sense strand
ccacccguauucuuucaau

SEQ ID NO: 1188605 - RNA, 19 nt, Homo sapiens
  misc_RNA (1)...(19): siRNA sense strand
ccaagaagaagagggaaga

SEQ ID NO: 1188606 - RNA, 19 nt, Homo sapiens
  misc_RNA (1)...(19): siRNA sense strand
gaucgaagucauccuaaac

SEQ ID NO: 1188607 - RNA, 19 nt, Homo sapiens
  misc_RNA (1)...(19): siRNA sense strand
aauuguagcuagucguuuc

SEQ ID NO: 1188608 - RNA, 19 nt, Homo sapiens
  misc_RNA (1)...(19): siRNA sense strand
ugaaagaaacgcagauggu

SEQ ID NO: 1188609 - RNA, 19 nt, Homo sapiens
  misc_RNA (1)...(19): siRNA sense strand
gguuuuggcuccauuauuc

SEQ ID NO: 1188610 - RNA, 19 nt, Homo sapiens
  misc_RNA (1)...(19): siRNA sense strand
ugaaggacaagggcauuaa

SEQ ID NO: 1188611 - RNA, 19 nt, Homo sapiens
  misc_RNA (1)...(19): siRNA sense strand
guuuaaagcaguacaaguc

SEQ ID NO: 1188612 - RNA, 19 nt, Homo sapiens
  misc_RNA (1)...(19): siRNA sense strand
ccauccacccguauucuuu

SEQ ID NO: 1188613 - RNA, 19 nt, Homo sapiens
  misc_RNA (1)...(19): siRNA sense strand
gcagaggaaaagacauuua

SEQ ID NO: 1188614 - RNA, 19 nt, Homo sapiens
  misc_RNA (1)...(19): siRNA sense strand
agaucgaagucauccuaaa

SEQ ID NO: 1188615 - RNA, 19 nt, Homo sapiens
  misc_RNA (1)...(19): siRNA sense strand
cccguauucuuucaauuau

SEQ ID NO: 1188616 - RNA, 19 nt, Homo sapiens
  misc_RNA (1)...(19): siRNA sense strand
acagugcuuugguugaaga

SEQ ID NO: 1188617 - RNA, 19 nt, Homo sapiens
  misc_RNA (1)...(19): siRNA sense strand
gucuacagcccaagaagaa

SEQ ID NO: 1188618 - RNA, 19 nt, Homo sapiens
  misc_RNA (1)...(19): siRNA sense strand
ccacaugagauacgauaca

SEQ ID NO: 1188619 - RNA, 19 nt, Homo sapiens
  misc_RNA (1)...(19): siRNA sense strand
gaacugggcuuucuucucu

SEQ ID NO: 1188620 - RNA, 19 nt, Homo sapiens
  misc_RNA (1)...(19): siRNA sense strand
ccacacaccugcccaauuc

SEQ ID NO: 1188621 - RNA, 19 nt, Homo sapiens
  misc_RNA (1)...(19): siRNA sense strand
gcaacgggcuccucaacga

SEQ ID NO: 1188622 - RNA, 19 nt, Homo sapiens
  misc_RNA (1)...(19): siRNA sense strand
gagcagcccucccucacaa

SEQ ID NO: 1188623 - RNA, 19 nt, Homo sapiens
  misc_RNA (1)...(19): siRNA sense strand
gaacuacccauccacaaga

SEQ ID NO: 1188624 - RNA, 19 nt, Homo sapiens
  misc_RNA (1)...(19): siRNA sense strand
gugauuguuuccaacuuua

SEQ ID NO: 1188625 - RNA, 19 nt, Homo sapiens
  misc_RNA (1)...(19): siRNA sense strand
gcuccagccuuaauuugaa

SEQ ID NO: 1188626 - RNA, 19 nt, Homo sapiens
  misc_RNA (1)...(19): siRNA sense strand
aagcaucccugccucguuu

SEQ ID NO: 1188627 - RNA, 19 nt, Homo sapiens
  misc_RNA (1)...(19): siRNA sense strand
gauaaacgcagggcacaaa

SEQ ID NO: 1188628 - RNA, 19 nt, Homo sapiens
  misc_RNA (1)...(19): siRNA sense strand
cuacgugacuggcuucuuc

SEQ ID NO: 1188629 - RNA, 19 nt, Homo sapiens
  misc_RNA (1)...(19): siRNA sense strand
ggagacauggugccuaaga

SEQ ID NO: 1188630 - RNA, 19 nt, Homo sapiens
  misc_RNA (1)...(19): siRNA sense strand
accagucgcuccagccuua

SEQ ID NO: 1188631 - RNA, 19 nt, Homo sapiens
  misc_RNA (1)...(19): siRNA sense strand
cuacaucggucuggucaug

SEQ ID NO: 1188632 - RNA, 19 nt, Homo sapiens
  misc_RNA (1)...(19): siRNA sense strand
ccacagccaucaucagcau

SEQ ID NO: 1188633 - RNA, 19 nt, Homo sapiens
  misc_RNA (1)...(19): siRNA sense strand
gcugcgugcucaacuucua

SEQ ID NO: 1188634 - RNA, 19 nt, Homo sapiens
  misc_RNA (1)...(19): siRNA sense strand
acgacgagcuggccuucua

SEQ ID NO: 1188635 - RNA, 19 nt, Homo sapiens
  misc_RNA (1)...(19): siRNA sense strand
ugugauuguuuccaacuuu

SEQ ID NO: 1188636 - RNA, 19 nt, Homo sapiens
  misc_RNA (1)...(19): siRNA sense strand
cacgaacauuccuuccaua

SEQ ID NO: 1188637 - RNA, 19 nt, Homo sapiens
  misc_RNA (1)...(19): siRNA sense strand
agaacaagcggcaggauga

SEQ ID NO: 1188638 - RNA, 19 nt, Homo sapiens
  misc_RNA (1)...(19): siRNA sense strand
acggagacauggugccuaa

SEQ ID NO: 1188639 - RNA, 19 nt, Homo sapiens
  misc_RNA (1)...(19): siRNA sense strand
caucaugcccuacuacauc

SEQ ID NO: 1188640 - RNA, 19 nt, Homo sapiens
  misc_RNA (1)...(19): siRNA sense strand
acacgaacauuccuuccau

SEQ ID NO: 1188641 - RNA, 19 nt, Homo sapiens
  misc_RNA (1)...(19): siRNA sense strand
gcuacucgguggccuucuu

SEQ ID NO: 1188642 - RNA, 19 nt, Homo sapiens
  misc_RNA (1)...(19): siRNA sense strand
ccagcaauguugucaaggu

SEQ ID NO: 1188643 - RNA, 19 nt, Homo sapiens
  misc_RNA (1)...(19): siRNA sense strand
guaguaagaagaccacaca

SEQ ID NO: 1188644 - RNA, 19 nt, Homo sapiens
  misc_RNA (1)...(19): siRNA sense strand
ggcaagaccaccucacuca

SEQ ID NO: 1188645 - RNA, 19 nt, Homo sapiens
  misc_RNA (1)...(19): siRNA sense strand
gccagucccugugauuguu

SEQ ID NO: 1188646 - RNA, 19 nt, Homo sapiens
  misc_RNA (1)...(19): siRNA sense strand
caagaccaccucacucauc

SEQ ID NO: 1188647 - RNA, 19 nt, Homo sapiens
  misc_RNA (1)...(19): siRNA sense strand
gacaacgacucggagaaca

SEQ ID NO: 1188648 - RNA, 19 nt, Homo sapiens
  misc_RNA (1)...(19): siRNA sense strand
uugaugagcagauguuuga

SEQ ID NO: 1188649 - RNA, 19 nt, Homo sapiens
  misc_RNA (1)...(19): siRNA sense strand
gagcugugccuccgaacug

SEQ ID NO: 1188650 - RNA, 19 nt, Homo sapiens
  misc_RNA (1)...(19): siRNA sense strand
cugcugcacugccuggaaa

SEQ ID NO: 1188651 - RNA, 19 nt, Homo sapiens
  misc_RNA (1)...(19): siRNA sense strand
gcuacgaggaguacaagga

SEQ ID NO: 1188652 - RNA, 19 nt, Homo sapiens
  misc_RNA (1)...(19): siRNA sense strand
gaucaccacagccaucauc

SEQ ID NO: 1188653 - RNA, 19 nt, Homo sapiens
  misc_RNA (1)...(19): siRNA sense strand
ugcaagagcucagcacgau

SEQ ID NO: 1188654 - RNA, 19 nt, Homo sapiens
  misc_RNA (1)...(19): siRNA sense strand
gccagcaaguucacaagca

SEQ ID NO: 1188655 - RNA, 19 nt, Homo sapiens
  misc_RNA (1)...(19): siRNA sense strand
ccagcaaguucacaagcau

SEQ ID NO: 1188656 - RNA, 19 nt, Homo sapiens
  misc_RNA (1)...(19): siRNA sense strand
acaagaagucccucacugu

SEQ ID NO: 1188657 - RNA, 19 nt, Homo sapiens
  misc_RNA (1)...(19): siRNA sense strand
gcagauguuugagcagaac

SEQ ID NO: 1188658 - RNA, 19 nt, Homo sapiens
  misc_RNA (1)...(19): siRNA sense strand
ccauggccaucaucaucuu

SEQ ID NO: 1188659 - RNA, 19 nt, Homo sapiens
  misc_RNA (1)...(19): siRNA sense strand
gcggcaggaugagcugauu

SEQ ID NO: 1188660 - RNA, 19 nt, Homo sapiens
  misc_RNA (1)...(19): siRNA sense strand
accacgaguuuauugauga

SEQ ID NO: 1188661 - RNA, 19 nt, Homo sapiens
  misc_RNA (1)...(19): siRNA sense strand
gcagcacggagaaggaguu

SEQ ID NO: 1188662 - RNA, 19 nt, Homo sapiens
  misc_RNA (1)...(19): siRNA sense strand
gagacauggugccuaagac

SEQ ID NO: 1188663 - RNA, 19 nt, Homo sapiens
  misc_RNA (1)...(19): siRNA sense strand
ucaacgaggacaccaagga

SEQ ID NO: 1188664 - RNA, 19 nt, Homo sapiens
  misc_RNA (1)...(19): siRNA sense strand
caggauccguguggccaaa

SEQ ID NO: 1188665 - RNA, 19 nt, Homo sapiens
  misc_RNA (1)...(19): siRNA sense strand
aaccacgaguuuauugaug

SEQ ID NO: 1188666 - RNA, 19 nt, Homo sapiens
  misc_RNA (1)...(19): siRNA sense strand
gaucuucaccguggaguac

SEQ ID NO: 1188667 - RNA, 19 nt, Homo sapiens
  misc_RNA (1)...(19): siRNA sense strand
caccaaggaguacuucuuc

SEQ ID NO: 1188668 - RNA, 19 nt, Homo sapiens
  misc_RNA (1)...(19): siRNA sense strand
gguacaccauugucaccau

SEQ ID NO: 1188669 - RNA, 19 nt, Homo sapiens
  misc_RNA (1)...(19): siRNA sense strand
cuucaggaucuucaaguuu

SEQ ID NO: 1188670 - RNA, 19 nt, Homo sapiens
  misc_RNA (1)...(19): siRNA sense strand
ggacaccaaggaguacuuc

SEQ ID NO: 1188671 - RNA, 19 nt, Homo sapiens
  misc_RNA (1)...(19): siRNA sense strand
acacaccugcccaauucua

SEQ ID NO: 1188672 - RNA, 19 nt, Homo sapiens
  misc_RNA (1)...(19): siRNA sense strand
ccaaggaguacuucuucga

SEQ ID NO: 1188673 - RNA, 19 nt, Homo sapiens
  misc_RNA (1)...(19): siRNA sense strand
gcaagaccaccucacucau

SEQ ID NO: 1188674 - RNA, 19 nt, Homo sapiens
  misc_RNA (1)...(19): siRNA sense strand
gaggagcacaugggcaaga

SEQ ID NO: 1188675 - RNA, 19 nt, Homo sapiens
  misc_RNA (1)...(19): siRNA sense strand
cauggugccuaagacgauu

SEQ ID NO: 1188676 - RNA, 19 nt, Homo sapiens
  misc_RNA (1)...(19): siRNA sense strand
caccauggccaucaucauc

SEQ ID NO: 1188677 - RNA, 19 nt, Homo sapiens
  misc_RNA (1)...(19): siRNA sense strand
cggcgugcgucaugaucuu

SEQ ID NO: 1188678 - RNA, 19 nt, Homo sapiens
  misc_RNA (1)...(19): siRNA sense strand
acgaggacaccaaggagua

SEQ ID NO: 1188679 - RNA, 19 nt, Homo sapiens
  misc_RNA (1)...(19): siRNA sense strand
ucuucaggaucuucaaguu

SEQ ID NO: 1188680 - RNA, 19 nt, Homo sapiens
  misc_RNA (1)...(19): siRNA sense strand
gaacaagcggcaggaugag

SEQ ID NO: 1188681 - RNA, 19 nt, Homo sapiens
  misc_RNA (1)...(19): siRNA sense strand
ccacgaguuuauugaugag

SEQ ID NO: 1188682 - RNA, 19 nt, Homo sapiens
  misc_RNA (1)...(19): siRNA sense strand
aaacaggcaguucgaaugc

SEQ ID NO: 1188683 - RNA, 19 nt, Homo sapiens
  misc_RNA (1)...(19): siRNA sense strand
gcucagcacgauccacauc

SEQ ID NO: 1188684 - RNA, 19 nt, Homo sapiens
  misc_RNA (1)...(19): siRNA sense strand
ggcuccaucugcuccuuga

SEQ ID NO: 1188685 - RNA, 19 nt, Homo sapiens
  misc_RNA (1)...(19): siRNA sense strand
uuccauagccagcaauguu

SEQ ID NO: 1188686 - RNA, 19 nt, Homo sapiens
  misc_RNA (1)...(19): siRNA sense strand
guuuauugaugagcagaug

SEQ ID NO: 1188687 - RNA, 19 nt, Homo sapiens
  misc_RNA (1)...(19): siRNA sense strand
cgacgugguggccaucaug

SEQ ID NO: 1188688 - RNA, 19 nt, Homo sapiens
  misc_RNA (1)...(19): siRNA sense strand
caagcaucccugccucguu

SEQ ID NO: 1188689 - RNA, 19 nt, Homo sapiens
  misc_RNA (1)...(19): siRNA sense strand
gaacugggcuuucuucucu

SEQ ID NO: 1188690 - RNA, 19 nt, Homo sapiens
  misc_RNA (1)...(19): siRNA sense strand
ccacacaccugcccaauuc

SEQ ID NO: 1188691 - RNA, 19 nt, Homo sapiens
  misc_RNA (1)...(19): siRNA sense strand
gcaacgggcuccucaacga

SEQ ID NO: 1188692 - RNA, 19 nt, Homo sapiens
  misc_RNA (1)...(19): siRNA sense strand
gagcagcccucccucacaa

SEQ ID NO: 1188693 - RNA, 19 nt, Homo sapiens
  misc_RNA (1)...(19): siRNA sense strand
gaacuacccauccacaaga

SEQ ID NO: 1188694 - RNA, 19 nt, Homo sapiens
  misc_RNA (1)...(19): siRNA sense strand
gugauuguuuccaacuuua

SEQ ID NO: 1188695 - RNA, 19 nt, Homo sapiens
  misc_RNA (1)...(19): siRNA sense strand
gcuccagccuuaauuugaa

SEQ ID NO: 1188696 - RNA, 19 nt, Homo sapiens
  misc_RNA (1)...(19): siRNA sense strand
aagcaucccugccucguuu

SEQ ID NO: 1188697 - RNA, 19 nt, Homo sapiens
  misc_RNA (1)...(19): siRNA sense strand
gauaaacgcagggcacaaa

SEQ ID NO: 1188698 - RNA, 19 nt, Homo sapiens
  misc_RNA (1)...(19): siRNA sense strand
cuacgugacuggcuucuuc

SEQ ID NO: 1188699 - RNA, 19 nt, Homo sapiens
  misc_RNA (1)...(19): siRNA sense strand
ggagacauggugccuaaga

SEQ ID NO: 1188700 - RNA, 19 nt, Homo sapiens
  misc_RNA (1)...(19): siRNA sense strand
accagucgcuccagccuua

SEQ ID NO: 1188701 - RNA, 19 nt, Homo sapiens
  misc_RNA (1)...(19): siRNA sense strand
cuacaucggucuggucaug

SEQ ID NO: 1188702 - RNA, 19 nt, Homo sapiens
  misc_RNA (1)...(19): siRNA sense strand
ccacagccaucaucagcau

SEQ ID NO: 1188703 - RNA, 19 nt, Homo sapiens
  misc_RNA (1)...(19): siRNA sense strand
gcugcgugcucaacuucua

SEQ ID NO: 1188704 - RNA, 19 nt, Homo sapiens
  misc_RNA (1)...(19): siRNA sense strand
acgacgagcuggccuucua

SEQ ID NO: 1188705 - RNA, 19 nt, Homo sapiens
  misc_RNA (1)...(19): siRNA sense strand
ugugauuguuuccaacuuu

SEQ ID NO: 1188706 - RNA, 19 nt, Homo sapiens
  misc_RNA (1)...(19): siRNA sense strand
cacgaacauuccuuccaua

SEQ ID NO: 1188707 - RNA, 19 nt, Homo sapiens
  misc_RNA (1)...(19): siRNA sense strand
agaacaagcggcaggauga

SEQ ID NO: 1188708 - RNA, 19 nt, Homo sapiens
  misc_RNA (1)...(19): siRNA sense strand
acggagacauggugccuaa

SEQ ID NO: 1188709 - RNA, 19 nt, Homo sapiens
  misc_RNA (1)...(19): siRNA sense strand
caucaugcccuacuacauc

SEQ ID NO: 1188710 - RNA, 19 nt, Homo sapiens
  misc_RNA (1)...(19): siRNA sense strand
acacgaacauuccuuccau

SEQ ID NO: 1188711 - RNA, 19 nt, Homo sapiens
  misc_RNA (1)...(19): siRNA sense strand
gcuacucgguggccuucuu

SEQ ID NO: 1188712 - RNA, 19 nt, Homo sapiens
  misc_RNA (1)...(19): siRNA sense strand
ccagcaauguugucaaggu

SEQ ID NO: 1188713 - RNA, 19 nt, Homo sapiens
  misc_RNA (1)...(19): siRNA sense strand
guaguaagaagaccacaca

SEQ ID NO: 1188714 - RNA, 19 nt, Homo sapiens
  misc_RNA (1)...(19): siRNA sense strand
ggcaagaccaccucacuca

SEQ ID NO: 1188715 - RNA, 19 nt, Homo sapiens
  misc_RNA (1)...(19): siRNA sense strand
gccagucccugugauuguu

SEQ ID NO: 1188716 - RNA, 19 nt, Homo sapiens
  misc_RNA (1)...(19): siRNA sense strand
caagaccaccucacucauc

SEQ ID NO: 1188717 - RNA, 19 nt, Homo sapiens
  misc_RNA (1)...(19): siRNA sense strand
gacaacgacucggagaaca

SEQ ID NO: 1188718 - RNA, 19 nt, Homo sapiens
  misc_RNA (1)...(19): siRNA sense strand
uugaugagcagauguuuga

SEQ ID NO: 1188719 - RNA, 19 nt, Homo sapiens
  misc_RNA (1)...(19): siRNA sense strand
gagcugugccuccgaacug

SEQ ID NO: 1188720 - RNA, 19 nt, Homo sapiens
  misc_RNA (1)...(19): siRNA sense strand
cugcugcacugccuggaaa

SEQ ID NO: 1188721 - RNA, 19 nt, Homo sapiens
  misc_RNA (1)...(19): siRNA sense strand
gcuacgaggaguacaagga

SEQ ID NO: 1188722 - RNA, 19 nt, Homo sapiens
  misc_RNA (1)...(19): siRNA sense strand
gaucaccacagccaucauc

SEQ ID NO: 1188723 - RNA, 19 nt, Homo sapiens
  misc_RNA (1)...(19): siRNA sense strand
ugcaagagcucagcacgau

SEQ ID NO: 1188724 - RNA, 19 nt, Homo sapiens
  misc_RNA (1)...(19): siRNA sense strand
gccagcaaguucacaagca

SEQ ID NO: 1188725 - RNA, 19 nt, Homo sapiens
  misc_RNA (1)...(19): siRNA sense strand
ccagcaaguucacaagcau

SEQ ID NO: 1188726 - RNA, 19 nt, Homo sapiens
  misc_RNA (1)...(19): siRNA sense strand
acaagaagucccucacugu

SEQ ID NO: 1188727 - RNA, 19 nt, Homo sapiens
  misc_RNA (1)...(19): siRNA sense strand
gcagauguuugagcagaac

SEQ ID NO: 1188728 - RNA, 19 nt, Homo sapiens
  misc_RNA (1)...(19): siRNA sense strand
ccauggccaucaucaucuu

SEQ ID NO: 1188729 - RNA, 19 nt, Homo sapiens
  misc_RNA (1)...(19): siRNA sense strand
gcggcaggaugagcugauu

SEQ ID NO: 1188730 - RNA, 19 nt, Homo sapiens
  misc_RNA (1)...(19): siRNA sense strand
accacgaguuuauugauga

SEQ ID NO: 1188731 - RNA, 19 nt, Homo sapiens
  misc_RNA (1)...(19): siRNA sense strand
gcagcacggagaaggaguu

SEQ ID NO: 1188732 - RNA, 19 nt, Homo sapiens
  misc_RNA (1)...(19): siRNA sense strand
gagacauggugccuaagac

SEQ ID NO: 1188733 - RNA, 19 nt, Homo sapiens
  misc_RNA (1)...(19): siRNA sense strand
ucaacgaggacaccaagga

SEQ ID NO: 1188734 - RNA, 19 nt, Homo sapiens
  misc_RNA (1)...(19): siRNA sense strand
caggauccguguggccaaa

SEQ ID NO: 1188735 - RNA, 19 nt, Homo sapiens
  misc_RNA (1)...(19): siRNA sense strand
aaccacgaguuuauugaug

SEQ ID NO: 1188736 - RNA, 19 nt, Homo sapiens
  misc_RNA (1)...(19): siRNA sense strand
gaucuucaccguggaguac

SEQ ID NO: 1188737 - RNA, 19 nt, Homo sapiens
  misc_RNA (1)...(19): siRNA sense strand
caccaaggaguacuucuuc

SEQ ID NO: 1188738 - RNA, 19 nt, Homo sapiens
  misc_RNA (1)...(19): siRNA sense strand
gguacaccauugucaccau

SEQ ID NO: 1188739 - RNA, 19 nt, Homo sapiens
  misc_RNA (1)...(19): siRNA sense strand
cuucaggaucuucaaguuu

SEQ ID NO: 1188740 - RNA, 19 nt, Homo sapiens
  misc_RNA (1)...(19): siRNA sense strand
ggacaccaaggaguacuuc

SEQ ID NO: 1188741 - RNA, 19 nt, Homo sapiens
  misc_RNA (1)...(19): siRNA sense strand
acacaccugcccaauucua

SEQ ID NO: 1188742 - RNA, 19 nt, Homo sapiens
  misc_RNA (1)...(19): siRNA sense strand
ccaaggaguacuucuucga

SEQ ID NO: 1188743 - RNA, 19 nt, Homo sapiens
  misc_RNA (1)...(19): siRNA sense strand
gcaagaccaccucacucau

SEQ ID NO: 1188744 - RNA, 19 nt, Homo sapiens
  misc_RNA (1)...(19): siRNA sense strand
gaggagcacaugggcaaga

SEQ ID NO: 1188745 - RNA, 19 nt, Homo sapiens
  misc_RNA (1)...(19): siRNA sense strand
cauggugccuaagacgauu

SEQ ID NO: 1188746 - RNA, 19 nt, Homo sapiens
  misc_RNA (1)...(19): siRNA sense strand
caccauggccaucaucauc

SEQ ID NO: 1188747 - RNA, 19 nt, Homo sapiens
  misc_RNA (1)...(19): siRNA sense strand
cggcgugcgucaugaucuu

SEQ ID NO: 1188748 - RNA, 19 nt, Homo sapiens
  misc_RNA (1)...(19): siRNA sense strand
acgaggacaccaaggagua

SEQ ID NO: 1188749 - RNA, 19 nt, Homo sapiens
  misc_RNA (1)...(19): siRNA sense strand
ucuucaggaucuucaaguu

SEQ ID NO: 1188750 - RNA, 19 nt, Homo sapiens
  misc_RNA (1)...(19): siRNA sense strand
gaacaagcggcaggaugag

SEQ ID NO: 1188751 - RNA, 19 nt, Homo sapiens
  misc_RNA (1)...(19): siRNA sense strand
ccacgaguuuauugaugag

SEQ ID NO: 1188752 - RNA, 19 nt, Homo sapiens
  misc_RNA (1)...(19): siRNA sense strand
aaacaggcaguucgaaugc

SEQ ID NO: 1188753 - RNA, 19 nt, Homo sapiens
  misc_RNA (1)...(19): siRNA sense strand
gcucagcacgauccacauc

SEQ ID NO: 1188754 - RNA, 19 nt, Homo sapiens
  misc_RNA (1)...(19): siRNA sense strand
ggcuccaucugcuccuuga

SEQ ID NO: 1188755 - RNA, 19 nt, Homo sapiens
  misc_RNA (1)...(19): siRNA sense strand
uuccauagccagcaauguu

SEQ ID NO: 1188756 - RNA, 19 nt, Homo sapiens
  misc_RNA (1)...(19): siRNA sense strand
guuuauugaugagcagaug

SEQ ID NO: 1188757 - RNA, 19 nt, Homo sapiens
  misc_RNA (1)...(19): siRNA sense strand
cgacgugguggccaucaug

SEQ ID NO: 1188758 - RNA, 19 nt, Homo sapiens
  misc_RNA (1)...(19): siRNA sense strand
caagcaucccugccucguu

SEQ ID NO: 1188759 - RNA, 19 nt, Homo sapiens
  misc_RNA (1)...(19): siRNA sense strand
gagcacagcgacucagaaa

SEQ ID NO: 1188760 - RNA, 19 nt, Homo sapiens
  misc_RNA (1)...(19): siRNA sense strand
gccaagaccuuuccauucg

SEQ ID NO: 1188761 - RNA, 19 nt, Homo sapiens
  misc_RNA (1)...(19): siRNA sense strand
ccaaacagcacgccuccuu

SEQ ID NO: 1188762 - RNA, 19 nt, Homo sapiens
  misc_RNA (1)...(19): siRNA sense strand
gugcgggugugguucaaga

SEQ ID NO: 1188763 - RNA, 19 nt, Homo sapiens
  misc_RNA (1)...(19): siRNA sense strand
agaggacgguucgcugaaa

SEQ ID NO: 1188764 - RNA, 19 nt, Homo sapiens
  misc_RNA (1)...(19): siRNA sense strand
gcacagcgacucagaaaag

SEQ ID NO: 1188765 - RNA, 19 nt, Homo sapiens
  misc_RNA (1)...(19): siRNA sense strand
aaacagcacgccuccuuca

SEQ ID NO: 1188766 - RNA, 19 nt, Homo sapiens
  misc_RNA (1)...(19): siRNA sense strand
gcaggccgagcuaugcaaa

SEQ ID NO: 1188767 - RNA, 19 nt, Homo sapiens
  misc_RNA (1)...(19): siRNA sense strand
ggagcacagcgacucagaa

SEQ ID NO: 1188768 - RNA, 19 nt, Homo sapiens
  misc_RNA (1)...(19): siRNA sense strand
gaggacgguucgcugaaaa

SEQ ID NO: 1188769 - RNA, 19 nt, Homo sapiens
  misc_RNA (1)...(19): siRNA sense strand
cgccaagaccuuuccauuc

SEQ ID NO: 1188770 - RNA, 19 nt, Homo sapiens
  misc_RNA (1)...(19): siRNA sense strand
ccgccaagaccuuuccauu

SEQ ID NO: 1188771 - RNA, 19 nt, Homo sapiens
  misc_RNA (1)...(19): siRNA sense strand
gccguguccugcccuuaug

SEQ ID NO: 1188772 - RNA, 19 nt, Homo sapiens
  misc_RNA (1)...(19): siRNA sense strand
ggccguguccugcccuuau

SEQ ID NO: 1188773 - RNA, 19 nt, Homo sapiens
  misc_RNA (1)...(19): siRNA sense strand
cguggaaaggcccguauga

SEQ ID NO: 1188774 - RNA, 19 nt, Homo sapiens
  misc_RNA (1)...(19): siRNA sense strand
gguaugaacugcgggaauu

SEQ ID NO: 1188775 - RNA, 19 nt, Homo sapiens
  misc_RNA (1)...(19): siRNA sense strand
aaugggagcuccuuuguga

SEQ ID NO: 1188776 - RNA, 19 nt, Homo sapiens
  misc_RNA (1)...(19): siRNA sense strand
caacauugcugccgauacu

SEQ ID NO: 1188777 - RNA, 19 nt, Homo sapiens
  misc_RNA (1)...(19): siRNA sense strand
ggagcuccuuugugaguuu

SEQ ID NO: 1188778 - RNA, 19 nt, Homo sapiens
  misc_RNA (1)...(19): siRNA sense strand
gagcggaccuuggccuuuc

SEQ ID NO: 1188779 - RNA, 19 nt, Homo sapiens
  misc_RNA (1)...(19): siRNA sense strand
ggugggcaguuucaucauu

SEQ ID NO: 1188780 - RNA, 19 nt, Homo sapiens
  misc_RNA (1)...(19): siRNA sense strand
caaacaagccgcuccuaca

SEQ ID NO: 1188781 - RNA, 19 nt, Homo sapiens
  misc_RNA (1)...(19): siRNA sense strand
agaguggccugcaguccua

SEQ ID NO: 1188782 - RNA, 19 nt, Homo sapiens
  misc_RNA (1)...(19): siRNA sense strand
acaagccgcuccuacacuu

SEQ ID NO: 1188783 - RNA, 19 nt, Homo sapiens
  misc_RNA (1)...(19): siRNA sense strand
gugggcaguuucaucauug

SEQ ID NO: 1188784 - RNA, 19 nt, Homo sapiens
  misc_RNA (1)...(19): siRNA sense strand
cagauggccuccaaagacu

SEQ ID NO: 1188785 - RNA, 19 nt, Homo sapiens
  misc_RNA (1)...(19): siRNA sense strand
gagcccaugucuucuucga

SEQ ID NO: 1188786 - RNA, 19 nt, Homo sapiens
  misc_RNA (1)...(19): siRNA sense strand
aguccuaccugcuccaguu

SEQ ID NO: 1188787 - RNA, 19 nt, Homo sapiens
  misc_RNA (1)...(19): siRNA sense strand
cgaaagggagccaaacaag

SEQ ID NO: 1188788 - RNA, 19 nt, Homo sapiens
  misc_RNA (1)...(19): siRNA sense strand
gcagcucaaugccuacaac

SEQ ID NO: 1188789 - RNA, 19 nt, Homo sapiens
  misc_RNA (1)...(19): siRNA sense strand
gaaugggagcuccuuugug

SEQ ID NO: 1188790 - RNA, 19 nt, Homo sapiens
  misc_RNA (1)...(19): siRNA sense strand
ucagauggccuccaaagac

SEQ ID NO: 1188791 - RNA, 19 nt, Homo sapiens
  misc_RNA (1)...(19): siRNA sense strand
ggagcggaccuuggccuuu

SEQ ID NO: 1188792 - RNA, 19 nt, Homo sapiens
  misc_RNA (1)...(19): siRNA sense strand
uagagcccaugucuucuuc

SEQ ID NO: 1188793 - RNA, 19 nt, Homo sapiens
  misc_RNA (1)...(19): siRNA sense strand
gugaaugggagcuccuuug

SEQ ID NO: 1188794 - RNA, 19 nt, Homo sapiens
  misc_RNA (1)...(19): siRNA sense strand
ugaaugggagcuccuuugu

SEQ ID NO: 1188795 - RNA, 19 nt, Homo sapiens
  misc_RNA (1)...(19): siRNA sense strand
gacuucauaugcuccagau

SEQ ID NO: 1188796 - RNA, 19 nt, Homo sapiens
  misc_RNA (1)...(19): siRNA sense strand
cagguggacggcgauguua

SEQ ID NO: 1188797 - RNA, 19 nt, Homo sapiens
  misc_RNA (1)...(19): siRNA sense strand
ccaacaccacgaucauuca

SEQ ID NO: 1188798 - RNA, 19 nt, Homo sapiens
  misc_RNA (1)...(19): siRNA sense strand
gggagcuccuuugugaguu

SEQ ID NO: 1188799 - RNA, 19 nt, Homo sapiens
  misc_RNA (1)...(19): siRNA sense strand
ggccuccaaagacuucaua

SEQ ID NO: 1188800 - RNA, 19 nt, Homo sapiens
  misc_RNA (1)...(19): siRNA sense strand
gauggccuccaaagacuuc

SEQ ID NO: 1188801 - RNA, 19 nt, Homo sapiens
  misc_RNA (1)...(19): siRNA sense strand
cgccucagauggccuccaa

SEQ ID NO: 1188802 - RNA, 19 nt, Homo sapiens
  misc_RNA (1)...(19): siRNA sense strand
gagcuccuuugugaguuuc

SEQ ID NO: 1188803 - RNA, 19 nt, Homo sapiens
  misc_RNA (1)...(19): siRNA sense strand
gacaccaacaccacgauca

SEQ ID NO: 1188804 - RNA, 19 nt, Homo sapiens
  misc_RNA (1)...(19): siRNA sense strand
gacaacauugcugccgaua

SEQ ID NO: 1188805 - RNA, 19 nt, Homo sapiens
  misc_RNA (1)...(19): siRNA sense strand
cuagagcccaugucuucuu

SEQ ID NO: 1188806 - RNA, 19 nt, Homo sapiens
  misc_RNA (1)...(19): siRNA sense strand
uccaaagacuucauaugcu

SEQ ID NO: 1188807 - RNA, 19 nt, Homo sapiens
  misc_RNA (1)...(19): siRNA sense strand
ggugaagaaugcucagaug

SEQ ID NO: 1188808 - RNA, 19 nt, Homo sapiens
  misc_RNA (1)...(19): siRNA sense strand
gcugguggccugugagaaa

SEQ ID NO: 1188809 - RNA, 19 nt, Homo sapiens
  misc_RNA (1)...(19): siRNA sense strand
ugacugcggugaagaaugc

SEQ ID NO: 1188810 - RNA, 19 nt, Homo sapiens
  misc_RNA (1)...(19): siRNA sense strand
ggugugcgguucaucuuca

SEQ ID NO: 1188811 - RNA, 19 nt, Homo sapiens
  misc_RNA (1)...(19): siRNA sense strand
gcuggucggugggcacauu

SEQ ID NO: 1188812 - RNA, 19 nt, Homo sapiens
  misc_RNA (1)...(19): siRNA sense strand
gcuccaggcuguugaucag

SEQ ID NO: 1188813 - RNA, 19 nt, Homo sapiens
  misc_RNA (1)...(19): siRNA sense strand
ugaggucacggccgucuuu

SEQ ID NO: 1188814 - RNA, 19 nt, Homo sapiens
  misc_RNA (1)...(19): siRNA sense strand
guugaucagcugucccuuu

SEQ ID NO: 1188815 - RNA, 19 nt, Homo sapiens
  misc_RNA (1)...(19): siRNA sense strand
guggucaacauccucauug

SEQ ID NO: 1188816 - RNA, 19 nt, Homo sapiens
  misc_RNA (1)...(19): siRNA sense strand
ggugaagaaugcucagaug

SEQ ID NO: 1188817 - RNA, 19 nt, Homo sapiens
  misc_RNA (1)...(19): siRNA sense strand
gcugguggccugugagaaa

SEQ ID NO: 1188818 - RNA, 19 nt, Homo sapiens
  misc_RNA (1)...(19): siRNA sense strand
ugacugcggugaagaaugc

SEQ ID NO: 1188819 - RNA, 19 nt, Homo sapiens
  misc_RNA (1)...(19): siRNA sense strand
gguuuggagucucaucauu

SEQ ID NO: 1188820 - RNA, 19 nt, Homo sapiens
  misc_RNA (1)...(19): siRNA sense strand
ggugugcgguucaucuuca

SEQ ID NO: 1188821 - RNA, 19 nt, Homo sapiens
  misc_RNA (1)...(19): siRNA sense strand
gcuggucggugggcacauu

SEQ ID NO: 1188822 - RNA, 19 nt, Homo sapiens
  misc_RNA (1)...(19): siRNA sense strand
gcuccaggcuguugaucag

SEQ ID NO: 1188823 - RNA, 19 nt, Homo sapiens
  misc_RNA (1)...(19): siRNA sense strand
cagcugguuuggagucuca

SEQ ID NO: 1188824 - RNA, 19 nt, Homo sapiens
  misc_RNA (1)...(19): siRNA sense strand
ugaggucacggccgucuuu

SEQ ID NO: 1188825 - RNA, 19 nt, Homo sapiens
  misc_RNA (1)...(19): siRNA sense strand
guugaucagcugucccuuu

SEQ ID NO: 1188826 - RNA, 19 nt, Homo sapiens
  misc_RNA (1)...(19): siRNA sense strand
guuuggagucucaucauug

SEQ ID NO: 1188827 - RNA, 19 nt, Homo sapiens
  misc_RNA (1)...(19): siRNA sense strand
guggucaacauccucauug

SEQ ID NO: 1188828 - RNA, 19 nt, Homo sapiens
  misc_RNA (1)...(19): siRNA sense strand
gaaaguacgucgcuucuga

SEQ ID NO: 1188829 - RNA, 19 nt, Homo sapiens
  misc_RNA (1)...(19): siRNA sense strand
gcaacgaucucucaaaugu

SEQ ID NO: 1188830 - RNA, 19 nt, Homo sapiens
  misc_RNA (1)...(19): siRNA sense strand
ucaauaagcucgucuccua

SEQ ID NO: 1188831 - RNA, 19 nt, Homo sapiens
  misc_RNA (1)...(19): siRNA sense strand
gcauaaagguaggaaagua

SEQ ID NO: 1188832 - RNA, 19 nt, Homo sapiens
  misc_RNA (1)...(19): siRNA sense strand
acaaauggcuucagauguu

SEQ ID NO: 1188833 - RNA, 19 nt, Homo sapiens
  misc_RNA (1)...(19): siRNA sense strand
gaucagagccgagaacaaa

SEQ ID NO: 1188834 - RNA, 19 nt, Homo sapiens
  misc_RNA (1)...(19): siRNA sense strand
gaacaaauggcuucagaug

SEQ ID NO: 1188835 - RNA, 19 nt, Homo sapiens
  misc_RNA (1)...(19): siRNA sense strand
gagaacaaauggcuucaga

SEQ ID NO: 1188836 - RNA, 19 nt, Homo sapiens
  misc_RNA (1)...(19): siRNA sense strand
ucaaagaguugggcauaaa

SEQ ID NO: 1188837 - RNA, 19 nt, Homo sapiens
  misc_RNA (1)...(19): siRNA sense strand
gccgagagcugcugcuuug

SEQ ID NO: 1188838 - RNA, 19 nt, Homo sapiens
  misc_RNA (1)...(19): siRNA sense strand
ugaggaacaucacaaagaa

SEQ ID NO: 1188839 - RNA, 19 nt, Homo sapiens
  misc_RNA (1)...(19): siRNA sense strand
ccucccagcucuuaccuua

SEQ ID NO: 1188840 - RNA, 19 nt, Homo sapiens
  misc_RNA (1)...(19): siRNA sense strand
gcucuuaccuuaccaucga

SEQ ID NO: 1188841 - RNA, 19 nt, Homo sapiens
  misc_RNA (1)...(19): siRNA sense strand
ccaagcgccucaagacaaa

SEQ ID NO: 1188842 - RNA, 19 nt, Homo sapiens
  misc_RNA (1)...(19): siRNA sense strand
ggacuacuuugcaugugaa

SEQ ID NO: 1188843 - RNA, 19 nt, Homo sapiens
  misc_RNA (1)...(19): siRNA sense strand
uuuaccaccugcugaauua

SEQ ID NO: 1188844 - RNA, 19 nt, Homo sapiens
  misc_RNA (1)...(19): siRNA sense strand
cagcagcccuggagacuca

SEQ ID NO: 1188845 - RNA, 19 nt, Homo sapiens
  misc_RNA (1)...(19): siRNA sense strand
caagacaaauugcuauaac

SEQ ID NO: 1188846 - RNA, 19 nt, Homo sapiens
  misc_RNA (1)...(19): siRNA sense strand
gaaggacuacuuugcaugu

SEQ ID NO: 1188847 - RNA, 19 nt, Homo sapiens
  misc_RNA (1)...(19): siRNA sense strand
guaccaugcucuggagaaa

SEQ ID NO: 1188848 - RNA, 19 nt, Homo sapiens
  misc_RNA (1)...(19): siRNA sense strand
ggaguguaauccagugaug

SEQ ID NO: 1188849 - RNA, 19 nt, Homo sapiens
  misc_RNA (1)...(19): siRNA sense strand
caaauggcuucagauguug

SEQ ID NO: 1188850 - RNA, 19 nt, Homo sapiens
  misc_RNA (1)...(19): siRNA sense strand
gggaaggaguuuggaauag

SEQ ID NO: 1188851 - RNA, 19 nt, Homo sapiens
  misc_RNA (1)...(19): siRNA sense strand
ggaaggaguuuggaauagg

SEQ ID NO: 1188852 - RNA, 19 nt, Homo sapiens
  misc_RNA (1)...(19): siRNA sense strand
ucagccagcacuuuaauuu

SEQ ID NO: 1188853 - RNA, 19 nt, Homo sapiens
  misc_RNA (1)...(19): siRNA sense strand
aacgaucucucaaauguga

SEQ ID NO: 1188854 - RNA, 19 nt, Homo sapiens
  misc_RNA (1)...(19): siRNA sense strand
gacgauggcuaucagucuu

SEQ ID NO: 1188855 - RNA, 19 nt, Homo sapiens
  misc_RNA (1)...(19): siRNA sense strand
acacggggcuugaauauga

SEQ ID NO: 1188856 - RNA, 19 nt, Homo sapiens
  misc_RNA (1)...(19): siRNA sense strand
acgcacagcugacgacuca

SEQ ID NO: 1188857 - RNA, 19 nt, Homo sapiens
  misc_RNA (1)...(19): siRNA sense strand
ccuggaagauggcuguuug

SEQ ID NO: 1188858 - RNA, 19 nt, Homo sapiens
  misc_RNA (1)...(19): siRNA sense strand
uuacauguaugaugacgau

SEQ ID NO: 1188859 - RNA, 19 nt, Homo sapiens
  misc_RNA (1)...(19): siRNA sense strand
ccauuugacuuggugauug

SEQ ID NO: 1188860 - RNA, 19 nt, Homo sapiens
  misc_RNA (1)...(19): siRNA sense strand
aaccaggacucguucagaa

SEQ ID NO: 1188861 - RNA, 19 nt, Homo sapiens
  misc_RNA (1)...(19): siRNA sense strand
ggagguguccagucugcua

SEQ ID NO: 1188862 - RNA, 19 nt, Homo sapiens
  misc_RNA (1)...(19): siRNA sense strand
ggagacaguucagaguauc

SEQ ID NO: 1188863 - RNA, 19 nt, Homo sapiens
  misc_RNA (1)...(19): siRNA sense strand
gcaacagcaucggcaggaa

SEQ ID NO: 1188864 - RNA, 19 nt, Homo sapiens
  misc_RNA (1)...(19): siRNA sense strand
cgaaauaacaacagugucu

SEQ ID NO: 1188865 - RNA, 19 nt, Homo sapiens
  misc_RNA (1)...(19): siRNA sense strand
caacaagagcagccuggaa

SEQ ID NO: 1188866 - RNA, 19 nt, Homo sapiens
  misc_RNA (1)...(19): siRNA sense strand
gcuguccgaacucgaaaua

SEQ ID NO: 1188867 - RNA, 19 nt, Homo sapiens
  misc_RNA (1)...(19): siRNA sense strand
ggagaucagaggccgaaga

SEQ ID NO: 1188868 - RNA, 19 nt, Homo sapiens
  misc_RNA (1)...(19): siRNA sense strand
cacgguuccuggaguguaa

SEQ ID NO: 1188869 - RNA, 19 nt, Homo sapiens
  misc_RNA (1)...(19): siRNA sense strand
cgaguccugucauuguuug

SEQ ID NO: 1188870 - RNA, 19 nt, Homo sapiens
  misc_RNA (1)...(19): siRNA sense strand
uggagacaguucagaguau

SEQ ID NO: 1188871 - RNA, 19 nt, Homo sapiens
  misc_RNA (1)...(19): siRNA sense strand
ggaagauggcuguuugucu

SEQ ID NO: 1188872 - RNA, 19 nt, Homo sapiens
  misc_RNA (1)...(19): siRNA sense strand
gagaucagaggccgaagau

SEQ ID NO: 1188873 - RNA, 19 nt, Homo sapiens
  misc_RNA (1)...(19): siRNA sense strand
gaggaacaucacaaagaaa

SEQ ID NO: 1188874 - RNA, 19 nt, Homo sapiens
  misc_RNA (1)...(19): siRNA sense strand
uguccagucugcuaagcua

SEQ ID NO: 1188875 - RNA, 19 nt, Homo sapiens
  misc_RNA (1)...(19): siRNA sense strand
agagggagguguccagucu

SEQ ID NO: 1188876 - RNA, 19 nt, Homo sapiens
  misc_RNA (1)...(19): siRNA sense strand
aagcucgucuccuaucgaa

SEQ ID NO: 1188877 - RNA, 19 nt, Homo sapiens
  misc_RNA (1)...(19): siRNA sense strand
ccucaaagaguugggcaua

SEQ ID NO: 1188878 - RNA, 19 nt, Homo sapiens
  misc_RNA (1)...(19): siRNA sense strand
caccaggcaucucaaugga

SEQ ID NO: 1188879 - RNA, 19 nt, Homo sapiens
  misc_RNA (1)...(19): siRNA sense strand
caguggagauggagacagu

SEQ ID NO: 1188880 - RNA, 19 nt, Homo sapiens
  misc_RNA (1)...(19): siRNA sense strand
cuacuuugcaugugaauag

SEQ ID NO: 1188881 - RNA, 19 nt, Homo sapiens
  misc_RNA (1)...(19): siRNA sense strand
ccaugaagguuggcgacaa

SEQ ID NO: 1188882 - RNA, 19 nt, Homo sapiens
  misc_RNA (1)...(19): siRNA sense strand
gggcauaaagguaggaaag

SEQ ID NO: 1188883 - RNA, 19 nt, Homo sapiens
  misc_RNA (1)...(19): siRNA sense strand
ccauucgaguccugucauu

SEQ ID NO: 1188884 - RNA, 19 nt, Homo sapiens
  misc_RNA (1)...(19): siRNA sense strand
cccuggagcuguuacaugu

SEQ ID NO: 1188885 - RNA, 19 nt, Homo sapiens
  misc_RNA (1)...(19): siRNA sense strand
gcacccaagcgccucaaga

SEQ ID NO: 1188886 - RNA, 19 nt, Homo sapiens
  misc_RNA (1)...(19): siRNA sense strand
ugggaaggaguuuggaaua

SEQ ID NO: 1188887 - RNA, 19 nt, Homo sapiens
  misc_RNA (1)...(19): siRNA sense strand
cgacaagagggacaucuca

SEQ ID NO: 1188888 - RNA, 19 nt, Homo sapiens
  misc_RNA (1)...(19): siRNA sense strand
caugaagguuggcgacaag

SEQ ID NO: 1188889 - RNA, 19 nt, Homo sapiens
  misc_RNA (1)...(19): siRNA sense strand
augcaacgaucucucaaau

SEQ ID NO: 1188890 - RNA, 19 nt, Homo sapiens
  misc_RNA (1)...(19): siRNA sense strand
gaauaucaaauacgugaac

SEQ ID NO: 1188891 - RNA, 19 nt, Homo sapiens
  misc_RNA (1)...(19): siRNA sense strand
ccaugguggugucuuggaa

SEQ ID NO: 1188892 - RNA, 19 nt, Homo sapiens
  misc_RNA (1)...(19): siRNA sense strand
uaauuuggccaccuucaau

SEQ ID NO: 1188893 - RNA, 19 nt, Homo sapiens
  misc_RNA (1)...(19): siRNA sense strand
gauguuugagaauguugua

SEQ ID NO: 1188894 - RNA, 19 nt, Homo sapiens
  misc_RNA (1)...(19): siRNA sense strand
ggcagacaguggagaugga

SEQ ID NO: 1188895 - RNA, 19 nt, Homo sapiens
  misc_RNA (1)...(19): siRNA sense strand
gaagaucagagccgagaac

SEQ ID NO: 1188896 - RNA, 19 nt, Homo sapiens
  misc_RNA (1)...(19): siRNA sense strand
gcuauaacaacggcaaaga

SEQ ID NO: 1188897 - RNA, 19 nt, Homo sapiens
  misc_RNA (1)...(19): siRNA sense strand
guuuggcgauggcaaguuc

SEQ ID NO: 1188898 - RNA, 19 nt, Homo sapiens
  misc_RNA (1)...(19): siRNA sense strand
gagaauguuguagccauga

SEQ ID NO: 1188899 - RNA, 19 nt, Homo sapiens
  misc_RNA (1)...(19): siRNA sense strand
gaacucgaaauaacaacag

SEQ ID NO: 1188900 - RNA, 19 nt, Homo sapiens
  misc_RNA (1)...(19): siRNA sense strand
agaucaagcucgcgacucu

SEQ ID NO: 1188901 - RNA, 19 nt, Homo sapiens
  misc_RNA (1)...(19): siRNA sense strand
gagguguccagucugcuaa

SEQ ID NO: 1188902 - RNA, 19 nt, Homo sapiens
  misc_RNA (1)...(19): siRNA sense strand
agaguugggcauaaaggua

SEQ ID NO: 1188903 - RNA, 19 nt, Homo sapiens
  misc_RNA (1)...(19): siRNA sense strand
ggaaagaucaagggcuucu

SEQ ID NO: 1188904 - RNA, 19 nt, Homo sapiens
  misc_RNA (1)...(19): siRNA sense strand
gcuaccuaguccucaaaga

SEQ ID NO: 1188905 - RNA, 19 nt, Homo sapiens
  misc_RNA (1)...(19): siRNA sense strand
cucaaagaguugggcauaa

SEQ ID NO: 1188906 - RNA, 19 nt, Homo sapiens
  misc_RNA (1)...(19): siRNA sense strand
ggaggcagacaguggagau

SEQ ID NO: 1188907 - RNA, 19 nt, Homo sapiens
  misc_RNA (1)...(19): siRNA sense strand
aggacuacuuugcauguga

SEQ ID NO: 1188908 - RNA, 19 nt, Homo sapiens
  misc_RNA (1)...(19): siRNA sense strand
agaauguuguagccaugaa

SEQ ID NO: 1188909 - RNA, 19 nt, Homo sapiens
  misc_RNA (1)...(19): siRNA sense strand
uguccgaacucgaaauaac

SEQ ID NO: 1188910 - RNA, 19 nt, Homo sapiens
  misc_RNA (1)...(19): siRNA sense strand
caaagaguugggcauaaag

SEQ ID NO: 1188911 - RNA, 19 nt, Homo sapiens
  misc_RNA (1)...(19): siRNA sense strand
ucagagccgagaacaaaug

SEQ ID NO: 1188912 - RNA, 19 nt, Homo sapiens
  misc_RNA (1)...(19): siRNA sense strand
agccagcacuuuaauuugg

SEQ ID NO: 1188913 - RNA, 19 nt, Homo sapiens
  misc_RNA (1)...(19): siRNA sense strand
gaugggaaggaguuuggaa

SEQ ID NO: 1188914 - RNA, 19 nt, Homo sapiens
  misc_RNA (1)...(19): siRNA sense strand
cgacacagaggacacacau

SEQ ID NO: 1188915 - RNA, 19 nt, Homo sapiens
  misc_RNA (1)...(19): siRNA sense strand
caauaagcucgucuccuau

SEQ ID NO: 1188916 - RNA, 19 nt, Homo sapiens
  misc_RNA (1)...(19): siRNA sense strand
cagccagcacuuuaauuug

SEQ ID NO: 1188917 - RNA, 19 nt, Homo sapiens
  misc_RNA (1)...(19): siRNA sense strand
gauggagacaguucagagu

SEQ ID NO: 1188918 - RNA, 19 nt, Homo sapiens
  misc_RNA (1)...(19): siRNA sense strand
gcagguggaggcagacagu

SEQ ID NO: 1188919 - RNA, 19 nt, Homo sapiens
  misc_RNA (1)...(19): siRNA sense strand
ccagcuguccgaacucgaa

SEQ ID NO: 1188920 - RNA, 19 nt, Homo sapiens
  misc_RNA (1)...(19): siRNA sense strand
cgggaaaccaggacucguu

SEQ ID NO: 1188921 - RNA, 19 nt, Homo sapiens
  misc_RNA (1)...(19): siRNA sense strand
cccaagcgccucaagacaa

SEQ ID NO: 1188922 - RNA, 19 nt, Homo sapiens
  misc_RNA (1)...(19): siRNA sense strand
caagagcagccuggaagau

SEQ ID NO: 1188923 - RNA, 19 nt, Homo sapiens
  misc_RNA (1)...(19): siRNA sense strand
ugaacgacgugaggaacau

SEQ ID NO: 1188924 - RNA, 19 nt, Homo sapiens
  misc_RNA (1)...(19): siRNA sense strand
ggaauaucaaauacgugaa

SEQ ID NO: 1188925 - RNA, 19 nt, Homo sapiens
  misc_RNA (1)...(19): siRNA sense strand
caagcuguacccugccauu

SEQ ID NO: 1188926 - RNA, 19 nt, Homo sapiens
  misc_RNA (1)...(19): siRNA sense strand
cuggagcuguuacaugugu

SEQ ID NO: 1188927 - RNA, 19 nt, Homo sapiens
  misc_RNA (1)...(19): siRNA sense strand
gauggcuguuugucuugug

SEQ ID NO: 1188928 - RNA, 19 nt, Homo sapiens
  misc_RNA (1)...(19): siRNA sense strand
gaaaguacgucgcuucuga

SEQ ID NO: 1188929 - RNA, 19 nt, Homo sapiens
  misc_RNA (1)...(19): siRNA sense strand
gcaacgaucucucaaaugu

SEQ ID NO: 1188930 - RNA, 19 nt, Homo sapiens
  misc_RNA (1)...(19): siRNA sense strand
ucaauaagcucgucuccua

SEQ ID NO: 1188931 - RNA, 19 nt, Homo sapiens
  misc_RNA (1)...(19): siRNA sense strand
gcauaaagguaggaaagua

SEQ ID NO: 1188932 - RNA, 19 nt, Homo sapiens
  misc_RNA (1)...(19): siRNA sense strand
acaaauggcuucagauguu

SEQ ID NO: 1188933 - RNA, 19 nt, Homo sapiens
  misc_RNA (1)...(19): siRNA sense strand
gaucagagccgagaacaaa

SEQ ID NO: 1188934 - RNA, 19 nt, Homo sapiens
  misc_RNA (1)...(19): siRNA sense strand
gaacaaauggcuucagaug

SEQ ID NO: 1188935 - RNA, 19 nt, Homo sapiens
  misc_RNA (1)...(19): siRNA sense strand
gagaacaaauggcuucaga

SEQ ID NO: 1188936 - RNA, 19 nt, Homo sapiens
  misc_RNA (1)...(19): siRNA sense strand
ucaaagaguugggcauaaa

SEQ ID NO: 1188937 - RNA, 19 nt, Homo sapiens
  misc_RNA (1)...(19): siRNA sense strand
gccgagagcugcugcuuug

SEQ ID NO: 1188938 - RNA, 19 nt, Homo sapiens
  misc_RNA (1)...(19): siRNA sense strand
ugaggaacaucacaaagaa

SEQ ID NO: 1188939 - RNA, 19 nt, Homo sapiens
  misc_RNA (1)...(19): siRNA sense strand
ccucccagcucuuaccuua

SEQ ID NO: 1188940 - RNA, 19 nt, Homo sapiens
  misc_RNA (1)...(19): siRNA sense strand
gcucuuaccuuaccaucga

SEQ ID NO: 1188941 - RNA, 19 nt, Homo sapiens
  misc_RNA (1)...(19): siRNA sense strand
ccaagcgccucaagacaaa

SEQ ID NO: 1188942 - RNA, 19 nt, Homo sapiens
  misc_RNA (1)...(19): siRNA sense strand
ggacuacuuugcaugugaa

SEQ ID NO: 1188943 - RNA, 19 nt, Homo sapiens
  misc_RNA (1)...(19): siRNA sense strand
uuuaccaccugcugaauua

SEQ ID NO: 1188944 - RNA, 19 nt, Homo sapiens
  misc_RNA (1)...(19): siRNA sense strand
cagcagcccuggagacuca

SEQ ID NO: 1188945 - RNA, 19 nt, Homo sapiens
  misc_RNA (1)...(19): siRNA sense strand
caagacaaauugcuauaac

SEQ ID NO: 1188946 - RNA, 19 nt, Homo sapiens
  misc_RNA (1)...(19): siRNA sense strand
gaaggacuacuuugcaugu

SEQ ID NO: 1188947 - RNA, 19 nt, Homo sapiens
  misc_RNA (1)...(19): siRNA sense strand
guaccaugcucuggagaaa

SEQ ID NO: 1188948 - RNA, 19 nt, Homo sapiens
  misc_RNA (1)...(19): siRNA sense strand
ggaguguaauccagugaug

SEQ ID NO: 1188949 - RNA, 19 nt, Homo sapiens
  misc_RNA (1)...(19): siRNA sense strand
caaauggcuucagauguug

SEQ ID NO: 1188950 - RNA, 19 nt, Homo sapiens
  misc_RNA (1)...(19): siRNA sense strand
gggaaggaguuuggaauag

SEQ ID NO: 1188951 - RNA, 19 nt, Homo sapiens
  misc_RNA (1)...(19): siRNA sense strand
ggaaggaguuuggaauagg

SEQ ID NO: 1188952 - RNA, 19 nt, Homo sapiens
  misc_RNA (1)...(19): siRNA sense strand
ucagccagcacuuuaauuu

SEQ ID NO: 1188953 - RNA, 19 nt, Homo sapiens
  misc_RNA (1)...(19): siRNA sense strand
aacgaucucucaaauguga

SEQ ID NO: 1188954 - RNA, 19 nt, Homo sapiens
  misc_RNA (1)...(19): siRNA sense strand
gacgauggcuaucagucuu

SEQ ID NO: 1188955 - RNA, 19 nt, Homo sapiens
  misc_RNA (1)...(19): siRNA sense strand
acacggggcuugaauauga

SEQ ID NO: 1188956 - RNA, 19 nt, Homo sapiens
  misc_RNA (1)...(19): siRNA sense strand
acgcacagcugacgacuca

SEQ ID NO: 1188957 - RNA, 19 nt, Homo sapiens
  misc_RNA (1)...(19): siRNA sense strand
ccuggaagauggcuguuug

SEQ ID NO: 1188958 - RNA, 19 nt, Homo sapiens
  misc_RNA (1)...(19): siRNA sense strand
uuacauguaugaugacgau

SEQ ID NO: 1188959 - RNA, 19 nt, Homo sapiens
  misc_RNA (1)...(19): siRNA sense strand
ccauuugacuuggugauug

SEQ ID NO: 1188960 - RNA, 19 nt, Homo sapiens
  misc_RNA (1)...(19): siRNA sense strand
aaccaggacucguucagaa

SEQ ID NO: 1188961 - RNA, 19 nt, Homo sapiens
  misc_RNA (1)...(19): siRNA sense strand
ggagguguccagucugcua

SEQ ID NO: 1188962 - RNA, 19 nt, Homo sapiens
  misc_RNA (1)...(19): siRNA sense strand
ggagacaguucagaguauc

SEQ ID NO: 1188963 - RNA, 19 nt, Homo sapiens
  misc_RNA (1)...(19): siRNA sense strand
gcaacagcaucggcaggaa

SEQ ID NO: 1188964 - RNA, 19 nt, Homo sapiens
  misc_RNA (1)...(19): siRNA sense strand
cgaaauaacaacagugucu

SEQ ID NO: 1188965 - RNA, 19 nt, Homo sapiens
  misc_RNA (1)...(19): siRNA sense strand
caacaagagcagccuggaa

SEQ ID NO: 1188966 - RNA, 19 nt, Homo sapiens
  misc_RNA (1)...(19): siRNA sense strand
gcuguccgaacucgaaaua

SEQ ID NO: 1188967 - RNA, 19 nt, Homo sapiens
  misc_RNA (1)...(19): siRNA sense strand
ggagaucagaggccgaaga

SEQ ID NO: 1188968 - RNA, 19 nt, Homo sapiens
  misc_RNA (1)...(19): siRNA sense strand
cacgguuccuggaguguaa

SEQ ID NO: 1188969 - RNA, 19 nt, Homo sapiens
  misc_RNA (1)...(19): siRNA sense strand
cgaguccugucauuguuug

SEQ ID NO: 1188970 - RNA, 19 nt, Homo sapiens
  misc_RNA (1)...(19): siRNA sense strand
uggagacaguucagaguau

SEQ ID NO: 1188971 - RNA, 19 nt, Homo sapiens
  misc_RNA (1)...(19): siRNA sense strand
ggaagauggcuguuugucu

SEQ ID NO: 1188972 - RNA, 19 nt, Homo sapiens
  misc_RNA (1)...(19): siRNA sense strand
gagaucagaggccgaagau

SEQ ID NO: 1188973 - RNA, 19 nt, Homo sapiens
  misc_RNA (1)...(19): siRNA sense strand
gaggaacaucacaaagaaa

SEQ ID NO: 1188974 - RNA, 19 nt, Homo sapiens
  misc_RNA (1)...(19): siRNA sense strand
uguccagucugcuaagcua

SEQ ID NO: 1188975 - RNA, 19 nt, Homo sapiens
  misc_RNA (1)...(19): siRNA sense strand
agagggagguguccagucu

SEQ ID NO: 1188976 - RNA, 19 nt, Homo sapiens
  misc_RNA (1)...(19): siRNA sense strand
aagcucgucuccuaucgaa

SEQ ID NO: 1188977 - RNA, 19 nt, Homo sapiens
  misc_RNA (1)...(19): siRNA sense strand
ccucaaagaguugggcaua

SEQ ID NO: 1188978 - RNA, 19 nt, Homo sapiens
  misc_RNA (1)...(19): siRNA sense strand
caccaggcaucucaaugga

SEQ ID NO: 1188979 - RNA, 19 nt, Homo sapiens
  misc_RNA (1)...(19): siRNA sense strand
caguggagauggagacagu

SEQ ID NO: 1188980 - RNA, 19 nt, Homo sapiens
  misc_RNA (1)...(19): siRNA sense strand
cuacuuugcaugugaauag

SEQ ID NO: 1188981 - RNA, 19 nt, Homo sapiens
  misc_RNA (1)...(19): siRNA sense strand
ccaugaagguuggcgacaa

SEQ ID NO: 1188982 - RNA, 19 nt, Homo sapiens
  misc_RNA (1)...(19): siRNA sense strand
gggcauaaagguaggaaag

SEQ ID NO: 1188983 - RNA, 19 nt, Homo sapiens
  misc_RNA (1)...(19): siRNA sense strand
ccauucgaguccugucauu

SEQ ID NO: 1188984 - RNA, 19 nt, Homo sapiens
  misc_RNA (1)...(19): siRNA sense strand
cccuggagcuguuacaugu

SEQ ID NO: 1188985 - RNA, 19 nt, Homo sapiens
  misc_RNA (1)...(19): siRNA sense strand
gcacccaagcgccucaaga

SEQ ID NO: 1188986 - RNA, 19 nt, Homo sapiens
  misc_RNA (1)...(19): siRNA sense strand
ugggaaggaguuuggaaua

SEQ ID NO: 1188987 - RNA, 19 nt, Homo sapiens
  misc_RNA (1)...(19): siRNA sense strand
cgacaagagggacaucuca

SEQ ID NO: 1188988 - RNA, 19 nt, Homo sapiens
  misc_RNA (1)...(19): siRNA sense strand
caugaagguuggcgacaag

SEQ ID NO: 1188989 - RNA, 19 nt, Homo sapiens
  misc_RNA (1)...(19): siRNA sense strand
augcaacgaucucucaaau

SEQ ID NO: 1188990 - RNA, 19 nt, Homo sapiens
  misc_RNA (1)...(19): siRNA sense strand
gaauaucaaauacgugaac

SEQ ID NO: 1188991 - RNA, 19 nt, Homo sapiens
  misc_RNA (1)...(19): siRNA sense strand
ccaugguggugucuuggaa

SEQ ID NO: 1188992 - RNA, 19 nt, Homo sapiens
  misc_RNA (1)...(19): siRNA sense strand
uaauuuggccaccuucaau

SEQ ID NO: 1188993 - RNA, 19 nt, Homo sapiens
  misc_RNA (1)...(19): siRNA sense strand
gauguuugagaauguugua

SEQ ID NO: 1188994 - RNA, 19 nt, Homo sapiens
  misc_RNA (1)...(19): siRNA sense strand
ggcagacaguggagaugga

SEQ ID NO: 1188995 - RNA, 19 nt, Homo sapiens
  misc_RNA (1)...(19): siRNA sense strand
gaagaucagagccgagaac

SEQ ID NO: 1188996 - RNA, 19 nt, Homo sapiens
  misc_RNA (1)...(19): siRNA sense strand
gcuauaacaacggcaaaga

SEQ ID NO: 1188997 - RNA, 19 nt, Homo sapiens
  misc_RNA (1)...(19): siRNA sense strand
guuuggcgauggcaaguuc

SEQ ID NO: 1188998 - RNA, 19 nt, Homo sapiens
  misc_RNA (1)...(19): siRNA sense strand
gagaauguuguagccauga

SEQ ID NO: 1188999 - RNA, 19 nt, Homo sapiens
  misc_RNA (1)...(19): siRNA sense strand
gaacucgaaauaacaacag

SEQ ID NO: 1189000 - RNA, 19 nt, Homo sapiens
  misc_RNA (1)...(19): siRNA sense strand
agaucaagcucgcgacucu

SEQ ID NO: 1189001 - RNA, 19 nt, Homo sapiens
  misc_RNA (1)...(19): siRNA sense strand
gagguguccagucugcuaa

SEQ ID NO: 1189002 - RNA, 19 nt, Homo sapiens
  misc_RNA (1)...(19): siRNA sense strand
agaguugggcauaaaggua

SEQ ID NO: 1189003 - RNA, 19 nt, Homo sapiens
  misc_RNA (1)...(19): siRNA sense strand
ggaaagaucaagggcuucu

SEQ ID NO: 1189004 - RNA, 19 nt, Homo sapiens
  misc_RNA (1)...(19): siRNA sense strand
gcuaccuaguccucaaaga

SEQ ID NO: 1189005 - RNA, 19 nt, Homo sapiens
  misc_RNA (1)...(19): siRNA sense strand
cucaaagaguugggcauaa

SEQ ID NO: 1189006 - RNA, 19 nt, Homo sapiens
  misc_RNA (1)...(19): siRNA sense strand
ggaggcagacaguggagau

SEQ ID NO: 1189007 - RNA, 19 nt, Homo sapiens
  misc_RNA (1)...(19): siRNA sense strand
aggacuacuuugcauguga

SEQ ID NO: 1189008 - RNA, 19 nt, Homo sapiens
  misc_RNA (1)...(19): siRNA sense strand
agaauguuguagccaugaa

SEQ ID NO: 1189009 - RNA, 19 nt, Homo sapiens
  misc_RNA (1)...(19): siRNA sense strand
uguccgaacucgaaauaac

SEQ ID NO: 1189010 - RNA, 19 nt, Homo sapiens
  misc_RNA (1)...(19): siRNA sense strand
caaagaguugggcauaaag

SEQ ID NO: 1189011 - RNA, 19 nt, Homo sapiens
  misc_RNA (1)...(19): siRNA sense strand
ucagagccgagaacaaaug

SEQ ID NO: 1189012 - RNA, 19 nt, Homo sapiens
  misc_RNA (1)...(19): siRNA sense strand
agccagcacuuuaauuugg

SEQ ID NO: 1189013 - RNA, 19 nt, Homo sapiens
  misc_RNA (1)...(19): siRNA sense strand
gaugggaaggaguuuggaa

SEQ ID NO: 1189014 - RNA, 19 nt, Homo sapiens
  misc_RNA (1)...(19): siRNA sense strand
cgacacagaggacacacau

SEQ ID NO: 1189015 - RNA, 19 nt, Homo sapiens
  misc_RNA (1)...(19): siRNA sense strand
caauaagcucgucuccuau

SEQ ID NO: 1189016 - RNA, 19 nt, Homo sapiens
  misc_RNA (1)...(19): siRNA sense strand
cagccagcacuuuaauuug

SEQ ID NO: 1189017 - RNA, 19 nt, Homo sapiens
  misc_RNA (1)...(19): siRNA sense strand
gauggagacaguucagagu

SEQ ID NO: 1189018 - RNA, 19 nt, Homo sapiens
  misc_RNA (1)...(19): siRNA sense strand
gcagguggaggcagacagu

SEQ ID NO: 1189019 - RNA, 19 nt, Homo sapiens
  misc_RNA (1)...(19): siRNA sense strand
ccagcuguccgaacucgaa

SEQ ID NO: 1189020 - RNA, 19 nt, Homo sapiens
  misc_RNA (1)...(19): siRNA sense strand
cgggaaaccaggacucguu

SEQ ID NO: 1189021 - RNA, 19 nt, Homo sapiens
  misc_RNA (1)...(19): siRNA sense strand
cccaagcgccucaagacaa

SEQ ID NO: 1189022 - RNA, 19 nt, Homo sapiens
  misc_RNA (1)...(19): siRNA sense strand
caagagcagccuggaagau

SEQ ID NO: 1189023 - RNA, 19 nt, Homo sapiens
  misc_RNA (1)...(19): siRNA sense strand
ugaacgacgugaggaacau

SEQ ID NO: 1189024 - RNA, 19 nt, Homo sapiens
  misc_RNA (1)...(19): siRNA sense strand
ggaauaucaaauacgugaa

SEQ ID NO: 1189025 - RNA, 19 nt, Homo sapiens
  misc_RNA (1)...(19): siRNA sense strand
caagcuguacccugccauu

SEQ ID NO: 1189026 - RNA, 19 nt, Homo sapiens
  misc_RNA (1)...(19): siRNA sense strand
cuggagcuguuacaugugu

SEQ ID NO: 1189027 - RNA, 19 nt, Homo sapiens
  misc_RNA (1)...(19): siRNA sense strand
gauggcuguuugucuugug

SEQ ID NO: 1189028 - RNA, 19 nt, Homo sapiens
  misc_RNA (1)...(19): siRNA sense strand
gaaaguacgucgcuucuga

SEQ ID NO: 1189029 - RNA, 19 nt, Homo sapiens
  misc_RNA (1)...(19): siRNA sense strand
gcaacgaucucucaaaugu

SEQ ID NO: 1189030 - RNA, 19 nt, Homo sapiens
  misc_RNA (1)...(19): siRNA sense strand
ucaauaagcucgucuccua

SEQ ID NO: 1189031 - RNA, 19 nt, Homo sapiens
  misc_RNA (1)...(19): siRNA sense strand
gcauaaagguaggaaagua

SEQ ID NO: 1189032 - RNA, 19 nt, Homo sapiens
  misc_RNA (1)...(19): siRNA sense strand
acaaauggcuucagauguu

SEQ ID NO: 1189033 - RNA, 19 nt, Homo sapiens
  misc_RNA (1)...(19): siRNA sense strand
gaucagagccgagaacaaa

SEQ ID NO: 1189034 - RNA, 19 nt, Homo sapiens
  misc_RNA (1)...(19): siRNA sense strand
gaacaaauggcuucagaug

SEQ ID NO: 1189035 - RNA, 19 nt, Homo sapiens
  misc_RNA (1)...(19): siRNA sense strand
gagaacaaauggcuucaga

SEQ ID NO: 1189036 - RNA, 19 nt, Homo sapiens
  misc_RNA (1)...(19): siRNA sense strand
ucaaagaguugggcauaaa

SEQ ID NO: 1189037 - RNA, 19 nt, Homo sapiens
  misc_RNA (1)...(19): siRNA sense strand
gccgagagcugcugcuuug

SEQ ID NO: 1189038 - RNA, 19 nt, Homo sapiens
  misc_RNA (1)...(19): siRNA sense strand
ugaggaacaucacaaagaa

SEQ ID NO: 1189039 - RNA, 19 nt, Homo sapiens
  misc_RNA (1)...(19): siRNA sense strand
ccucccagcucuuaccuua

SEQ ID NO: 1189040 - RNA, 19 nt, Homo sapiens
  misc_RNA (1)...(19): siRNA sense strand
gcucuuaccuuaccaucga

SEQ ID NO: 1189041 - RNA, 19 nt, Homo sapiens
  misc_RNA (1)...(19): siRNA sense strand
ccaagcgccucaagacaaa

SEQ ID NO: 1189042 - RNA, 19 nt, Homo sapiens
  misc_RNA (1)...(19): siRNA sense strand
ggacuacuuugcaugugaa

SEQ ID NO: 1189043 - RNA, 19 nt, Homo sapiens
  misc_RNA (1)...(19): siRNA sense strand
uuuaccaccugcugaauua

SEQ ID NO: 1189044 - RNA, 19 nt, Homo sapiens
  misc_RNA (1)...(19): siRNA sense strand
cagcagcccuggagacuca

SEQ ID NO: 1189045 - RNA, 19 nt, Homo sapiens
  misc_RNA (1)...(19): siRNA sense strand
caagacaaauugcuauaac

SEQ ID NO: 1189046 - RNA, 19 nt, Homo sapiens
  misc_RNA (1)...(19): siRNA sense strand
gaaggacuacuuugcaugu

SEQ ID NO: 1189047 - RNA, 19 nt, Homo sapiens
  misc_RNA (1)...(19): siRNA sense strand
guaccaugcucuggagaaa

SEQ ID NO: 1189048 - RNA, 19 nt, Homo sapiens
  misc_RNA (1)...(19): siRNA sense strand
ggaguguaauccagugaug

SEQ ID NO: 1189049 - RNA, 19 nt, Homo sapiens
  misc_RNA (1)...(19): siRNA sense strand
caaauggcuucagauguug

SEQ ID NO: 1189050 - RNA, 19 nt, Homo sapiens
  misc_RNA (1)...(19): siRNA sense strand
gggaaggaguuuggaauag

SEQ ID NO: 1189051 - RNA, 19 nt, Homo sapiens
  misc_RNA (1)...(19): siRNA sense strand
ggaaggaguuuggaauagg

SEQ ID NO: 1189052 - RNA, 19 nt, Homo sapiens
  misc_RNA (1)...(19): siRNA sense strand
ucagccagcacuuuaauuu

SEQ ID NO: 1189053 - RNA, 19 nt, Homo sapiens
  misc_RNA (1)...(19): siRNA sense strand
aacgaucucucaaauguga

SEQ ID NO: 1189054 - RNA, 19 nt, Homo sapiens
  misc_RNA (1)...(19): siRNA sense strand
gacgauggcuaucagucuu

SEQ ID NO: 1189055 - RNA, 19 nt, Homo sapiens
  misc_RNA (1)...(19): siRNA sense strand
acacggggcuugaauauga

SEQ ID NO: 1189056 - RNA, 19 nt, Homo sapiens
  misc_RNA (1)...(19): siRNA sense strand
acgcacagcugacgacuca

SEQ ID NO: 1189057 - RNA, 19 nt, Homo sapiens
  misc_RNA (1)...(19): siRNA sense strand
ccuggaagauggcuguuug

SEQ ID NO: 1189058 - RNA, 19 nt, Homo sapiens
  misc_RNA (1)...(19): siRNA sense strand
uuacauguaugaugacgau

SEQ ID NO: 1189059 - RNA, 19 nt, Homo sapiens
  misc_RNA (1)...(19): siRNA sense strand
ccauuugacuuggugauug

SEQ ID NO: 1189060 - RNA, 19 nt, Homo sapiens
  misc_RNA (1)...(19): siRNA sense strand
aaccaggacucguucagaa

SEQ ID NO: 1189061 - RNA, 19 nt, Homo sapiens
  misc_RNA (1)...(19): siRNA sense strand
ggagguguccagucugcua

SEQ ID NO: 1189062 - RNA, 19 nt, Homo sapiens
  misc_RNA (1)...(19): siRNA sense strand
ggagacaguucagaguauc

SEQ ID NO: 1189063 - RNA, 19 nt, Homo sapiens
  misc_RNA (1)...(19): siRNA sense strand
gcaacagcaucggcaggaa

SEQ ID NO: 1189064 - RNA, 19 nt, Homo sapiens
  misc_RNA (1)...(19): siRNA sense strand
cgaaauaacaacagugucu

SEQ ID NO: 1189065 - RNA, 19 nt, Homo sapiens
  misc_RNA (1)...(19): siRNA sense strand
caacaagagcagccuggaa

SEQ ID NO: 1189066 - RNA, 19 nt, Homo sapiens
  misc_RNA (1)...(19): siRNA sense strand
gcuguccgaacucgaaaua

SEQ ID NO: 1189067 - RNA, 19 nt, Homo sapiens
  misc_RNA (1)...(19): siRNA sense strand
ggagaucagaggccgaaga

SEQ ID NO: 1189068 - RNA, 19 nt, Homo sapiens
  misc_RNA (1)...(19): siRNA sense strand
cacgguuccuggaguguaa

SEQ ID NO: 1189069 - RNA, 19 nt, Homo sapiens
  misc_RNA (1)...(19): siRNA sense strand
cgaguccugucauuguuug

SEQ ID NO: 1189070 - RNA, 19 nt, Homo sapiens
  misc_RNA (1)...(19): siRNA sense strand
uggagacaguucagaguau

SEQ ID NO: 1189071 - RNA, 19 nt, Homo sapiens
  misc_RNA (1)...(19): siRNA sense strand
ggaagauggcuguuugucu

SEQ ID NO: 1189072 - RNA, 19 nt, Homo sapiens
  misc_RNA (1)...(19): siRNA sense strand
gagaucagaggccgaagau

SEQ ID NO: 1189073 - RNA, 19 nt, Homo sapiens
  misc_RNA (1)...(19): siRNA sense strand
gaggaacaucacaaagaaa

SEQ ID NO: 1189074 - RNA, 19 nt, Homo sapiens
  misc_RNA (1)...(19): siRNA sense strand
uguccagucugcuaagcua

SEQ ID NO: 1189075 - RNA, 19 nt, Homo sapiens
  misc_RNA (1)...(19): siRNA sense strand
agagggagguguccagucu

SEQ ID NO: 1189076 - RNA, 19 nt, Homo sapiens
  misc_RNA (1)...(19): siRNA sense strand
aagcucgucuccuaucgaa

SEQ ID NO: 1189077 - RNA, 19 nt, Homo sapiens
  misc_RNA (1)...(19): siRNA sense strand
ccucaaagaguugggcaua

SEQ ID NO: 1189078 - RNA, 19 nt, Homo sapiens
  misc_RNA (1)...(19): siRNA sense strand
caccaggcaucucaaugga

SEQ ID NO: 1189079 - RNA, 19 nt, Homo sapiens
  misc_RNA (1)...(19): siRNA sense strand
caguggagauggagacagu

SEQ ID NO: 1189080 - RNA, 19 nt, Homo sapiens
  misc_RNA (1)...(19): siRNA sense strand
cuacuuugcaugugaauag

SEQ ID NO: 1189081 - RNA, 19 nt, Homo sapiens
  misc_RNA (1)...(19): siRNA sense strand
ccaugaagguuggcgacaa

SEQ ID NO: 1189082 - RNA, 19 nt, Homo sapiens
  misc_RNA (1)...(19): siRNA sense strand
gggcauaaagguaggaaag

SEQ ID NO: 1189083 - RNA, 19 nt, Homo sapiens
  misc_RNA (1)...(19): siRNA sense strand
ccauucgaguccugucauu

SEQ ID NO: 1189084 - RNA, 19 nt, Homo sapiens
  misc_RNA (1)...(19): siRNA sense strand
cccuggagcuguuacaugu

SEQ ID NO: 1189085 - RNA, 19 nt, Homo sapiens
  misc_RNA (1)...(19): siRNA sense strand
gcacccaagcgccucaaga

SEQ ID NO: 1189086 - RNA, 19 nt, Homo sapiens
  misc_RNA (1)...(19): siRNA sense strand
ugggaaggaguuuggaaua

SEQ ID NO: 1189087 - RNA, 19 nt, Homo sapiens
  misc_RNA (1)...(19): siRNA sense strand
cgacaagagggacaucuca

SEQ ID NO: 1189088 - RNA, 19 nt, Homo sapiens
  misc_RNA (1)...(19): siRNA sense strand
caugaagguuggcgacaag

SEQ ID NO: 1189089 - RNA, 19 nt, Homo sapiens
  misc_RNA (1)...(19): siRNA sense strand
augcaacgaucucucaaau

SEQ ID NO: 1189090 - RNA, 19 nt, Homo sapiens
  misc_RNA (1)...(19): siRNA sense strand
gaauaucaaauacgugaac

SEQ ID NO: 1189091 - RNA, 19 nt, Homo sapiens
  misc_RNA (1)...(19): siRNA sense strand
ccaugguggugucuuggaa

SEQ ID NO: 1189092 - RNA, 19 nt, Homo sapiens
  misc_RNA (1)...(19): siRNA sense strand
uaauuuggccaccuucaau

SEQ ID NO: 1189093 - RNA, 19 nt, Homo sapiens
  misc_RNA (1)...(19): siRNA sense strand
gauguuugagaauguugua

SEQ ID NO: 1189094 - RNA, 19 nt, Homo sapiens
  misc_RNA (1)...(19): siRNA sense strand
ggcagacaguggagaugga

SEQ ID NO: 1189095 - RNA, 19 nt, Homo sapiens
  misc_RNA (1)...(19): siRNA sense strand
gaagaucagagccgagaac

SEQ ID NO: 1189096 - RNA, 19 nt, Homo sapiens
  misc_RNA (1)...(19): siRNA sense strand
gcuauaacaacggcaaaga

SEQ ID NO: 1189097 - RNA, 19 nt, Homo sapiens
  misc_RNA (1)...(19): siRNA sense strand
guuuggcgauggcaaguuc

SEQ ID NO: 1189098 - RNA, 19 nt, Homo sapiens
  misc_RNA (1)...(19): siRNA sense strand
gagaauguuguagccauga

SEQ ID NO: 1189099 - RNA, 19 nt, Homo sapiens
  misc_RNA (1)...(19): siRNA sense strand
gaacucgaaauaacaacag

SEQ ID NO: 1189100 - RNA, 19 nt, Homo sapiens
  misc_RNA (1)...(19): siRNA sense strand
agaucaagcucgcgacucu

SEQ ID NO: 1189101 - RNA, 19 nt, Homo sapiens
  misc_RNA (1)...(19): siRNA sense strand
gagguguccagucugcuaa

SEQ ID NO: 1189102 - RNA, 19 nt, Homo sapiens
  misc_RNA (1)...(19): siRNA sense strand
agaguugggcauaaaggua

SEQ ID NO: 1189103 - RNA, 19 nt, Homo sapiens
  misc_RNA (1)...(19): siRNA sense strand
ggaaagaucaagggcuucu

SEQ ID NO: 1189104 - RNA, 19 nt, Homo sapiens
  misc_RNA (1)...(19): siRNA sense strand
gcuaccuaguccucaaaga

SEQ ID NO: 1189105 - RNA, 19 nt, Homo sapiens
  misc_RNA (1)...(19): siRNA sense strand
cucaaagaguugggcauaa

SEQ ID NO: 1189106 - RNA, 19 nt, Homo sapiens
  misc_RNA (1)...(19): siRNA sense strand
ggaggcagacaguggagau

SEQ ID NO: 1189107 - RNA, 19 nt, Homo sapiens
  misc_RNA (1)...(19): siRNA sense strand
aggacuacuuugcauguga

SEQ ID NO: 1189108 - RNA, 19 nt, Homo sapiens
  misc_RNA (1)...(19): siRNA sense strand
agaauguuguagccaugaa

SEQ ID NO: 1189109 - RNA, 19 nt, Homo sapiens
  misc_RNA (1)...(19): siRNA sense strand
uguccgaacucgaaauaac

SEQ ID NO: 1189110 - RNA, 19 nt, Homo sapiens
  misc_RNA (1)...(19): siRNA sense strand
caaagaguugggcauaaag

SEQ ID NO: 1189111 - RNA, 19 nt, Homo sapiens
  misc_RNA (1)...(19): siRNA sense strand
ucagagccgagaacaaaug

SEQ ID NO: 1189112 - RNA, 19 nt, Homo sapiens
  misc_RNA (1)...(19): siRNA sense strand
agccagcacuuuaauuugg

SEQ ID NO: 1189113 - RNA, 19 nt, Homo sapiens
  misc_RNA (1)...(19): siRNA sense strand
gaugggaaggaguuuggaa

SEQ ID NO: 1189114 - RNA, 19 nt, Homo sapiens
  misc_RNA (1)...(19): siRNA sense strand
cgacacagaggacacacau

SEQ ID NO: 1189115 - RNA, 19 nt, Homo sapiens
  misc_RNA (1)...(19): siRNA sense strand
caauaagcucgucuccuau

SEQ ID NO: 1189116 - RNA, 19 nt, Homo sapiens
  misc_RNA (1)...(19): siRNA sense strand
cagccagcacuuuaauuug

SEQ ID NO: 1189117 - RNA, 19 nt, Homo sapiens
  misc_RNA (1)...(19): siRNA sense strand
gauggagacaguucagagu

SEQ ID NO: 1189118 - RNA, 19 nt, Homo sapiens
  misc_RNA (1)...(19): siRNA sense strand
gcagguggaggcagacagu

SEQ ID NO: 1189119 - RNA, 19 nt, Homo sapiens
  misc_RNA (1)...(19): siRNA sense strand
ccagcuguccgaacucgaa

SEQ ID NO: 1189120 - RNA, 19 nt, Homo sapiens
  misc_RNA (1)...(19): siRNA sense strand
cgggaaaccaggacucguu

SEQ ID NO: 1189121 - RNA, 19 nt, Homo sapiens
  misc_RNA (1)...(19): siRNA sense strand
cccaagcgccucaagacaa

SEQ ID NO: 1189122 - RNA, 19 nt, Homo sapiens
  misc_RNA (1)...(19): siRNA sense strand
caagagcagccuggaagau

SEQ ID NO: 1189123 - RNA, 19 nt, Homo sapiens
  misc_RNA (1)...(19): siRNA sense strand
ugaacgacgugaggaacau

SEQ ID NO: 1189124 - RNA, 19 nt, Homo sapiens
  misc_RNA (1)...(19): siRNA sense strand
ggaauaucaaauacgugaa

SEQ ID NO: 1189125 - RNA, 19 nt, Homo sapiens
  misc_RNA (1)...(19): siRNA sense strand
caagcuguacccugccauu

SEQ ID NO: 1189126 - RNA, 19 nt, Homo sapiens
  misc_RNA (1)...(19): siRNA sense strand
cuggagcuguuacaugugu

SEQ ID NO: 1189127 - RNA, 19 nt, Homo sapiens
  misc_RNA (1)...(19): siRNA sense strand
gauggcuguuugucuugug

SEQ ID NO: 1189128 - RNA, 19 nt, Homo sapiens
  misc_RNA (1)...(19): siRNA sense strand
gaaaguacgucgcuucuga

SEQ ID NO: 1189129 - RNA, 19 nt, Homo sapiens
  misc_RNA (1)...(19): siRNA sense strand
gcaacgaucucucaaaugu

SEQ ID NO: 1189130 - RNA, 19 nt, Homo sapiens
  misc_RNA (1)...(19): siRNA sense strand
ucaauaagcucgucuccua

SEQ ID NO: 1189131 - RNA, 19 nt, Homo sapiens
  misc_RNA (1)...(19): siRNA sense strand
gcauaaagguaggaaagua

SEQ ID NO: 1189132 - RNA, 19 nt, Homo sapiens
  misc_RNA (1)...(19): siRNA sense strand
acaaauggcuucagauguu

SEQ ID NO: 1189133 - RNA, 19 nt, Homo sapiens
  misc_RNA (1)...(19): siRNA sense strand
gaucagagccgagaacaaa

SEQ ID NO: 1189134 - RNA, 19 nt, Homo sapiens
  misc_RNA (1)...(19): siRNA sense strand
gaacaaauggcuucagaug

SEQ ID NO: 1189135 - RNA, 19 nt, Homo sapiens
  misc_RNA (1)...(19): siRNA sense strand
gagaacaaauggcuucaga

SEQ ID NO: 1189136 - RNA, 19 nt, Homo sapiens
  misc_RNA (1)...(19): siRNA sense strand
ucaaagaguugggcauaaa

SEQ ID NO: 1189137 - RNA, 19 nt, Homo sapiens
  misc_RNA (1)...(19): siRNA sense strand
gccgagagcugcugcuuug

SEQ ID NO: 1189138 - RNA, 19 nt, Homo sapiens
  misc_RNA (1)...(19): siRNA sense strand
ugaggaacaucacaaagaa

SEQ ID NO: 1189139 - RNA, 19 nt, Homo sapiens
  misc_RNA (1)...(19): siRNA sense strand
ccucccagcucuuaccuua

SEQ ID NO: 1189140 - RNA, 19 nt, Homo sapiens
  misc_RNA (1)...(19): siRNA sense strand
gcucuuaccuuaccaucga

SEQ ID NO: 1189141 - RNA, 19 nt, Homo sapiens
  misc_RNA (1)...(19): siRNA sense strand
ccaagcgccucaagacaaa

SEQ ID NO: 1189142 - RNA, 19 nt, Homo sapiens
  misc_RNA (1)...(19): siRNA sense strand
ggacuacuuugcaugugaa

SEQ ID NO: 1189143 - RNA, 19 nt, Homo sapiens
  misc_RNA (1)...(19): siRNA sense strand
uuuaccaccugcugaauua

SEQ ID NO: 1189144 - RNA, 19 nt, Homo sapiens
  misc_RNA (1)...(19): siRNA sense strand
cagcagcccuggagacuca

SEQ ID NO: 1189145 - RNA, 19 nt, Homo sapiens
  misc_RNA (1)...(19): siRNA sense strand
caagacaaauugcuauaac

SEQ ID NO: 1189146 - RNA, 19 nt, Homo sapiens
  misc_RNA (1)...(19): siRNA sense strand
gaaggacuacuuugcaugu

SEQ ID NO: 1189147 - RNA, 19 nt, Homo sapiens
  misc_RNA (1)...(19): siRNA sense strand
guaccaugcucuggagaaa

SEQ ID NO: 1189148 - RNA, 19 nt, Homo sapiens
  misc_RNA (1)...(19): siRNA sense strand
ggaguguaauccagugaug

SEQ ID NO: 1189149 - RNA, 19 nt, Homo sapiens
  misc_RNA (1)...(19): siRNA sense strand
caaauggcuucagauguug

SEQ ID NO: 1189150 - RNA, 19 nt, Homo sapiens
  misc_RNA (1)...(19): siRNA sense strand
gggaaggaguuuggaauag

SEQ ID NO: 1189151 - RNA, 19 nt, Homo sapiens
  misc_RNA (1)...(19): siRNA sense strand
ggaaggaguuuggaauagg

SEQ ID NO: 1189152 - RNA, 19 nt, Homo sapiens
  misc_RNA (1)...(19): siRNA sense strand
ucagccagcacuuuaauuu

SEQ ID NO: 1189153 - RNA, 19 nt, Homo sapiens
  misc_RNA (1)...(19): siRNA sense strand
aacgaucucucaaauguga

SEQ ID NO: 1189154 - RNA, 19 nt, Homo sapiens
  misc_RNA (1)...(19): siRNA sense strand
gacgauggcuaucagucuu

SEQ ID NO: 1189155 - RNA, 19 nt, Homo sapiens
  misc_RNA (1)...(19): siRNA sense strand
acacggggcuugaauauga

SEQ ID NO: 1189156 - RNA, 19 nt, Homo sapiens
  misc_RNA (1)...(19): siRNA sense strand
acgcacagcugacgacuca

SEQ ID NO: 1189157 - RNA, 19 nt, Homo sapiens
  misc_RNA (1)...(19): siRNA sense strand
ccuggaagauggcuguuug

SEQ ID NO: 1189158 - RNA, 19 nt, Homo sapiens
  misc_RNA (1)...(19): siRNA sense strand
uuacauguaugaugacgau

SEQ ID NO: 1189159 - RNA, 19 nt, Homo sapiens
  misc_RNA (1)...(19): siRNA sense strand
ccauuugacuuggugauug

SEQ ID NO: 1189160 - RNA, 19 nt, Homo sapiens
  misc_RNA (1)...(19): siRNA sense strand
aaccaggacucguucagaa

SEQ ID NO: 1189161 - RNA, 19 nt, Homo sapiens
  misc_RNA (1)...(19): siRNA sense strand
ggagguguccagucugcua

SEQ ID NO: 1189162 - RNA, 19 nt, Homo sapiens
  misc_RNA (1)...(19): siRNA sense strand
ggagacaguucagaguauc

SEQ ID NO: 1189163 - RNA, 19 nt, Homo sapiens
  misc_RNA (1)...(19): siRNA sense strand
gcaacagcaucggcaggaa

SEQ ID NO: 1189164 - RNA, 19 nt, Homo sapiens
  misc_RNA (1)...(19): siRNA sense strand
cgaaauaacaacagugucu

SEQ ID NO: 1189165 - RNA, 19 nt, Homo sapiens
  misc_RNA (1)...(19): siRNA sense strand
caacaagagcagccuggaa

SEQ ID NO: 1189166 - RNA, 19 nt, Homo sapiens
  misc_RNA (1)...(19): siRNA sense strand
gcuguccgaacucgaaaua

SEQ ID NO: 1189167 - RNA, 19 nt, Homo sapiens
  misc_RNA (1)...(19): siRNA sense strand
ggagaucagaggccgaaga

SEQ ID NO: 1189168 - RNA, 19 nt, Homo sapiens
  misc_RNA (1)...(19): siRNA sense strand
cacgguuccuggaguguaa

SEQ ID NO: 1189169 - RNA, 19 nt, Homo sapiens
  misc_RNA (1)...(19): siRNA sense strand
cgaguccugucauuguuug

SEQ ID NO: 1189170 - RNA, 19 nt, Homo sapiens
  misc_RNA (1)...(19): siRNA sense strand
uggagacaguucagaguau

SEQ ID NO: 1189171 - RNA, 19 nt, Homo sapiens
  misc_RNA (1)...(19): siRNA sense strand
ggaagauggcuguuugucu

SEQ ID NO: 1189172 - RNA, 19 nt, Homo sapiens
  misc_RNA (1)...(19): siRNA sense strand
agagggagguguccagucu

SEQ ID NO: 1189173 - RNA, 19 nt, Homo sapiens
  misc_RNA (1)...(19): siRNA sense strand
gagaucagaggccgaagau

SEQ ID NO: 1189174 - RNA, 19 nt, Homo sapiens
  misc_RNA (1)...(19): siRNA sense strand
gaggaacaucacaaagaaa

SEQ ID NO: 1189175 - RNA, 19 nt, Homo sapiens
  misc_RNA (1)...(19): siRNA sense strand
uguccagucugcuaagcua

SEQ ID NO: 1189176 - RNA, 19 nt, Homo sapiens
  misc_RNA (1)...(19): siRNA sense strand
aagcucgucuccuaucgaa

SEQ ID NO: 1189177 - RNA, 19 nt, Homo sapiens
  misc_RNA (1)...(19): siRNA sense strand
ccucaaagaguugggcaua

SEQ ID NO: 1189178 - RNA, 19 nt, Homo sapiens
  misc_RNA (1)...(19): siRNA sense strand
caccaggcaucucaaugga

SEQ ID NO: 1189179 - RNA, 19 nt, Homo sapiens
  misc_RNA (1)...(19): siRNA sense strand
caguggagauggagacagu

SEQ ID NO: 1189180 - RNA, 19 nt, Homo sapiens
  misc_RNA (1)...(19): siRNA sense strand
cuacuuugcaugugaauag

SEQ ID NO: 1189181 - RNA, 19 nt, Homo sapiens
  misc_RNA (1)...(19): siRNA sense strand
ccaugaagguuggcgacaa

SEQ ID NO: 1189182 - RNA, 19 nt, Homo sapiens
  misc_RNA (1)...(19): siRNA sense strand
gggcauaaagguaggaaag

SEQ ID NO: 1189183 - RNA, 19 nt, Homo sapiens
  misc_RNA (1)...(19): siRNA sense strand
ccauucgaguccugucauu

SEQ ID NO: 1189184 - RNA, 19 nt, Homo sapiens
  misc_RNA (1)...(19): siRNA sense strand
cccuggagcuguuacaugu

SEQ ID NO: 1189185 - RNA, 19 nt, Homo sapiens
  misc_RNA (1)...(19): siRNA sense strand
gcacccaagcgccucaaga

SEQ ID NO: 1189186 - RNA, 19 nt, Homo sapiens
  misc_RNA (1)...(19): siRNA sense strand
ugggaaggaguuuggaaua

SEQ ID NO: 1189187 - RNA, 19 nt, Homo sapiens
  misc_RNA (1)...(19): siRNA sense strand
cgacaagagggacaucuca

SEQ ID NO: 1189188 - RNA, 19 nt, Homo sapiens
  misc_RNA (1)...(19): siRNA sense strand
caugaagguuggcgacaag

SEQ ID NO: 1189189 - RNA, 19 nt, Homo sapiens
  misc_RNA (1)...(19): siRNA sense strand
augcaacgaucucucaaau

SEQ ID NO: 1189190 - RNA, 19 nt, Homo sapiens
  misc_RNA (1)...(19): siRNA sense strand
gaauaucaaauacgugaac

SEQ ID NO: 1189191 - RNA, 19 nt, Homo sapiens
  misc_RNA (1)...(19): siRNA sense strand
ccaugguggugucuuggaa

SEQ ID NO: 1189192 - RNA, 19 nt, Homo sapiens
  misc_RNA (1)...(19): siRNA sense strand
uaauuuggccaccuucaau

SEQ ID NO: 1189193 - RNA, 19 nt, Homo sapiens
  misc_RNA (1)...(19): siRNA sense strand
gauguuugagaauguugua

SEQ ID NO: 1189194 - RNA, 19 nt, Homo sapiens
  misc_RNA (1)...(19): siRNA sense strand
ggcagacaguggagaugga

SEQ ID NO: 1189195 - RNA, 19 nt, Homo sapiens
  misc_RNA (1)...(19): siRNA sense strand
gaagaucagagccgagaac

SEQ ID NO: 1189196 - RNA, 19 nt, Homo sapiens
  misc_RNA (1)...(19): siRNA sense strand
gcuauaacaacggcaaaga

SEQ ID NO: 1189197 - RNA, 19 nt, Homo sapiens
  misc_RNA (1)...(19): siRNA sense strand
guuuggcgauggcaaguuc

SEQ ID NO: 1189198 - RNA, 19 nt, Homo sapiens
  misc_RNA (1)...(19): siRNA sense strand
agaucaagcucgcgacucu

SEQ ID NO: 1189199 - RNA, 19 nt, Homo sapiens
  misc_RNA (1)...(19): siRNA sense strand
gagaauguuguagccauga

SEQ ID NO: 1189200 - RNA, 19 nt, Homo sapiens
  misc_RNA (1)...(19): siRNA sense strand
gaacucgaaauaacaacag

SEQ ID NO: 1189201 - RNA, 19 nt, Homo sapiens
  misc_RNA (1)...(19): siRNA sense strand
gagguguccagucugcuaa

SEQ ID NO: 1189202 - RNA, 19 nt, Homo sapiens
  misc_RNA (1)...(19): siRNA sense strand
agaguugggcauaaaggua

SEQ ID NO: 1189203 - RNA, 19 nt, Homo sapiens
  misc_RNA (1)...(19): siRNA sense strand
ggaaagaucaagggcuucu

SEQ ID NO: 1189204 - RNA, 19 nt, Homo sapiens
  misc_RNA (1)...(19): siRNA sense strand
gcuaccuaguccucaaaga

SEQ ID NO: 1189205 - RNA, 19 nt, Homo sapiens
  misc_RNA (1)...(19): siRNA sense strand
cucaaagaguugggcauaa

SEQ ID NO: 1189206 - RNA, 19 nt, Homo sapiens
  misc_RNA (1)...(19): siRNA sense strand
ggaggcagacaguggagau

SEQ ID NO: 1189207 - RNA, 19 nt, Homo sapiens
  misc_RNA (1)...(19): siRNA sense strand
aggacuacuuugcauguga

SEQ ID NO: 1189208 - RNA, 19 nt, Homo sapiens
  misc_RNA (1)...(19): siRNA sense strand
agaauguuguagccaugaa

SEQ ID NO: 1189209 - RNA, 19 nt, Homo sapiens
  misc_RNA (1)...(19): siRNA sense strand
caaagaguugggcauaaag

SEQ ID NO: 1189210 - RNA, 19 nt, Homo sapiens
  misc_RNA (1)...(19): siRNA sense strand
ucagagccgagaacaaaug

SEQ ID NO: 1189211 - RNA, 19 nt, Homo sapiens
  misc_RNA (1)...(19): siRNA sense strand
agccagcacuuuaauuugg

SEQ ID NO: 1189212 - RNA, 19 nt, Homo sapiens
  misc_RNA (1)...(19): siRNA sense strand
uguccgaacucgaaauaac

SEQ ID NO: 1189213 - RNA, 19 nt, Homo sapiens
  misc_RNA (1)...(19): siRNA sense strand
gaugggaaggaguuuggaa

SEQ ID NO: 1189214 - RNA, 19 nt, Homo sapiens
  misc_RNA (1)...(19): siRNA sense strand
cgacacagaggacacacau

SEQ ID NO: 1189215 - RNA, 19 nt, Homo sapiens
  misc_RNA (1)...(19): siRNA sense strand
caauaagcucgucuccuau

SEQ ID NO: 1189216 - RNA, 19 nt, Homo sapiens
  misc_RNA (1)...(19): siRNA sense strand
cagccagcacuuuaauuug

SEQ ID NO: 1189217 - RNA, 19 nt, Homo sapiens
  misc_RNA (1)...(19): siRNA sense strand
gauggagacaguucagagu

SEQ ID NO: 1189218 - RNA, 19 nt, Homo sapiens
  misc_RNA (1)...(19): siRNA sense strand
gcagguggaggcagacagu

SEQ ID NO: 1189219 - RNA, 19 nt, Homo sapiens
  misc_RNA (1)...(19): siRNA sense strand
ccagcuguccgaacucgaa

SEQ ID NO: 1189220 - RNA, 19 nt, Homo sapiens
  misc_RNA (1)...(19): siRNA sense strand
cccaagcgccucaagacaa

SEQ ID NO: 1189221 - RNA, 19 nt, Homo sapiens
  misc_RNA (1)...(19): siRNA sense strand
cgggaaaccaggacucguu

SEQ ID NO: 1189222 - RNA, 19 nt, Homo sapiens
  misc_RNA (1)...(19): siRNA sense strand
caagagcagccuggaagau

SEQ ID NO: 1189223 - RNA, 19 nt, Homo sapiens
  misc_RNA (1)...(19): siRNA sense strand
ugaacgacgugaggaacau

SEQ ID NO: 1189224 - RNA, 19 nt, Homo sapiens
  misc_RNA (1)...(19): siRNA sense strand
ggaauaucaaauacgugaa

SEQ ID NO: 1189225 - RNA, 19 nt, Homo sapiens
  misc_RNA (1)...(19): siRNA sense strand
caagcuguacccugccauu

SEQ ID NO: 1189226 - RNA, 19 nt, Homo sapiens
  misc_RNA (1)...(19): siRNA sense strand
cuggagcuguuacaugugu

SEQ ID NO: 1189227 - RNA, 19 nt, Homo sapiens
  misc_RNA (1)...(19): siRNA sense strand
gauggcuguuugucuugug

SEQ ID NO: 1189228 - RNA, 19 nt, Homo sapiens
  misc_RNA (1)...(19): siRNA sense strand
ggaauacuaugaggaagaa

SEQ ID NO: 1189229 - RNA, 19 nt, Homo sapiens
  misc_RNA (1)...(19): siRNA sense strand
gagagaacgucauguuugu

SEQ ID NO: 1189230 - RNA, 19 nt, Homo sapiens
  misc_RNA (1)...(19): siRNA sense strand
gaaggaauacuaugaggaa

SEQ ID NO: 1189231 - RNA, 19 nt, Homo sapiens
  misc_RNA (1)...(19): siRNA sense strand
caggaaaccuucaugcaau

SEQ ID NO: 1189232 - RNA, 19 nt, Homo sapiens
  misc_RNA (1)...(19): siRNA sense strand
gagaugauaucaccauggu

SEQ ID NO: 1189233 - RNA, 19 nt, Homo sapiens
  misc_RNA (1)...(19): siRNA sense strand
gaaagucuucuaaccauuc

SEQ ID NO: 1189234 - RNA, 19 nt, Homo sapiens
  misc_RNA (1)...(19): siRNA sense strand
guaacauugugugcaaaua

SEQ ID NO: 1189235 - RNA, 19 nt, Homo sapiens
  misc_RNA (1)...(19): siRNA sense strand
auaacucccugaaggaaua

SEQ ID NO: 1189236 - RNA, 19 nt, Homo sapiens
  misc_RNA (1)...(19): siRNA sense strand
gcacugagggcccaggaaa

SEQ ID NO: 1189237 - RNA, 19 nt, Homo sapiens
  misc_RNA (1)...(19): siRNA sense strand
ggaaguuucacggcuauaa

SEQ ID NO: 1189238 - RNA, 19 nt, Homo sapiens
  misc_RNA (1)...(19): siRNA sense strand
gaaacgagagaacgucaug

SEQ ID NO: 1189239 - RNA, 19 nt, Homo sapiens
  misc_RNA (1)...(19): siRNA sense strand
caccggaaguucaucacua

SEQ ID NO: 1189240 - RNA, 19 nt, Homo sapiens
  misc_RNA (1)...(19): siRNA sense strand
ugacauggauggauaagcu

SEQ ID NO: 1189241 - RNA, 19 nt, Homo sapiens
  misc_RNA (1)...(19): siRNA sense strand
cgagagaacgucauguuug

SEQ ID NO: 1189242 - RNA, 19 nt, Homo sapiens
  misc_RNA (1)...(19): siRNA sense strand
gaggaaguuucacggcuau

SEQ ID NO: 1189243 - RNA, 19 nt, Homo sapiens
  misc_RNA (1)...(19): siRNA sense strand
ggaaguucaucacuauguc

SEQ ID NO: 1189244 - RNA, 19 nt, Homo sapiens
  misc_RNA (1)...(19): siRNA sense strand
ggaguacgccaacgccauu

SEQ ID NO: 1189245 - RNA, 19 nt, Homo sapiens
  misc_RNA (1)...(19): siRNA sense strand
cagccugggugguaacauu

SEQ ID NO: 1189246 - RNA, 19 nt, Homo sapiens
  misc_RNA (1)...(19): siRNA sense strand
gcacuguguuggagaugau

SEQ ID NO: 1189247 - RNA, 19 nt, Homo sapiens
  misc_RNA (1)...(19): siRNA sense strand
ugaggucgccacauccuua

SEQ ID NO: 1189248 - RNA, 19 nt, Homo sapiens
  misc_RNA (1)...(19): siRNA sense strand
ccacgcauguucaccuaug

SEQ ID NO: 1189249 - RNA, 19 nt, Homo sapiens
  misc_RNA (1)...(19): siRNA sense strand
ggucaucugcccuggaauu

SEQ ID NO: 1189250 - RNA, 19 nt, Homo sapiens
  misc_RNA (1)...(19): siRNA sense strand
ugaaagucuucuaaccauu

SEQ ID NO: 1189251 - RNA, 19 nt, Homo sapiens
  misc_RNA (1)...(19): siRNA sense strand
ggauuuauguuccucucau

SEQ ID NO: 1189252 - RNA, 19 nt, Homo sapiens
  misc_RNA (1)...(19): siRNA sense strand
ccaggaaaccuucaugcaa

SEQ ID NO: 1189253 - RNA, 19 nt, Homo sapiens
  misc_RNA (1)...(19): siRNA sense strand
uggagaccauguuaagaaa

SEQ ID NO: 1189254 - RNA, 19 nt, Homo sapiens
  misc_RNA (1)...(19): siRNA sense strand
gugcaugaaagucuucuaa

SEQ ID NO: 1189255 - RNA, 19 nt, Homo sapiens
  misc_RNA (1)...(19): siRNA sense strand
gugguaacauugugugcaa

SEQ ID NO: 1189256 - RNA, 19 nt, Homo sapiens
  misc_RNA (1)...(19): siRNA sense strand
gcugacaacaugaagaaga

SEQ ID NO: 1189257 - RNA, 19 nt, Homo sapiens
  misc_RNA (1)...(19): siRNA sense strand
gcaugaaagucuucuaacc

SEQ ID NO: 1189258 - RNA, 19 nt, Homo sapiens
  misc_RNA (1)...(19): siRNA sense strand
ugaugcagauugaugacaa

SEQ ID NO: 1189259 - RNA, 19 nt, Homo sapiens
  misc_RNA (1)...(19): siRNA sense strand
ugaacuacaucaagaagac

SEQ ID NO: 1189260 - RNA, 19 nt, Homo sapiens
  misc_RNA (1)...(19): siRNA sense strand
acaaugugaugaggaaguu

SEQ ID NO: 1189261 - RNA, 19 nt, Homo sapiens
  misc_RNA (1)...(19): siRNA sense strand
gcccuuggcugagcacugu

SEQ ID NO: 1189262 - RNA, 19 nt, Homo sapiens
  misc_RNA (1)...(19): siRNA sense strand
aaugggagcguaacaaguu

SEQ ID NO: 1189263 - RNA, 19 nt, Homo sapiens
  misc_RNA (1)...(19): siRNA sense strand
gauuuauguuccucucaug

SEQ ID NO: 1189264 - RNA, 19 nt, Homo sapiens
  misc_RNA (1)...(19): siRNA sense strand
gagccauggugaacuacau

SEQ ID NO: 1189265 - RNA, 19 nt, Homo sapiens
  misc_RNA (1)...(19): siRNA sense strand
gcucaaguccuguccucuu

SEQ ID NO: 1189266 - RNA, 19 nt, Homo sapiens
  misc_RNA (1)...(19): siRNA sense strand
cgaacucccagccguguuu

SEQ ID NO: 1189267 - RNA, 19 nt, Homo sapiens
  misc_RNA (1)...(19): siRNA sense strand
gcuauaacucccugaagga

SEQ ID NO: 1189268 - RNA, 19 nt, Homo sapiens
  misc_RNA (1)...(19): siRNA sense strand
gcaauacauccgcacuuuc

SEQ ID NO: 1189269 - RNA, 19 nt, Homo sapiens
  misc_RNA (1)...(19): siRNA sense strand
agcaauacauccgcacuuu

SEQ ID NO: 1189270 - RNA, 19 nt, Homo sapiens
  misc_RNA (1)...(19): siRNA sense strand
guuccucucaugcugguua

SEQ ID NO: 1189271 - RNA, 19 nt, Homo sapiens
  misc_RNA (1)...(19): siRNA sense strand
uggagccacuucuacauuc

SEQ ID NO: 1189272 - RNA, 19 nt, Homo sapiens
  misc_RNA (1)...(19): siRNA sense strand
ugagggcucugugcuguuc

SEQ ID NO: 1189273 - RNA, 19 nt, Homo sapiens
  misc_RNA (1)...(19): siRNA sense strand
caccugaccucuacuucca

SEQ ID NO: 1189274 - RNA, 19 nt, Homo sapiens
  misc_RNA (1)...(19): siRNA sense strand
uaacauugugugcaaauac

SEQ ID NO: 1189275 - RNA, 19 nt, Homo sapiens
  misc_RNA (1)...(19): siRNA sense strand
uuggagccauggugaacua

SEQ ID NO: 1189276 - RNA, 19 nt, Homo sapiens
  misc_RNA (1)...(19): siRNA sense strand
auaagcuggugguggagua

SEQ ID NO: 1189277 - RNA, 19 nt, Homo sapiens
  misc_RNA (1)...(19): siRNA sense strand
caaguccuguccucuucug

SEQ ID NO: 1189278 - RNA, 19 nt, Homo sapiens
  misc_RNA (1)...(19): siRNA sense strand
cugacaacaugaagaagau

SEQ ID NO: 1189279 - RNA, 19 nt, Homo sapiens
  misc_RNA (1)...(19): siRNA sense strand
gagaccauguuaagaaacc

SEQ ID NO: 1189280 - RNA, 19 nt, Homo sapiens
  misc_RNA (1)...(19): siRNA sense strand
gugaucguccgguguuuga

SEQ ID NO: 1189281 - RNA, 19 nt, Homo sapiens
  misc_RNA (1)...(19): siRNA sense strand
caugaaagucuucuaacca

SEQ ID NO: 1189282 - RNA, 19 nt, Homo sapiens
  misc_RNA (1)...(19): siRNA sense strand
gaaguucaucacuaugucu

SEQ ID NO: 1189283 - RNA, 19 nt, Homo sapiens
  misc_RNA (1)...(19): siRNA sense strand
aggaaaccuucaugcaaug

SEQ ID NO: 1189284 - RNA, 19 nt, Homo sapiens
  misc_RNA (1)...(19): siRNA sense strand
gguaacauugugugcaaau

SEQ ID NO: 1189285 - RNA, 19 nt, Homo sapiens
  misc_RNA (1)...(19): siRNA sense strand
caauacauccgcacuuucg

SEQ ID NO: 1189286 - RNA, 19 nt, Homo sapiens
  misc_RNA (1)...(19): siRNA sense strand
guucuacaacuuccucaug

SEQ ID NO: 1189287 - RNA, 19 nt, Homo sapiens
  misc_RNA (1)...(19): siRNA sense strand
ccacuugggcuucuuugag

SEQ ID NO: 1189288 - RNA, 19 nt, Homo sapiens
  misc_RNA (1)...(19): siRNA sense strand
uuggagaccauguuaagaa

SEQ ID NO: 1189289 - RNA, 19 nt, Homo sapiens
  misc_RNA (1)...(19): siRNA sense strand
gacaacaugaagaagauca

SEQ ID NO: 1189290 - RNA, 19 nt, Homo sapiens
  misc_RNA (1)...(19): siRNA sense strand
gauggagccacuucuacau

SEQ ID NO: 1189291 - RNA, 19 nt, Homo sapiens
  misc_RNA (1)...(19): siRNA sense strand
ccaaugggagcguaacaag

SEQ ID NO: 1189292 - RNA, 19 nt, Homo sapiens
  misc_RNA (1)...(19): siRNA sense strand
augaaagucuucuaaccau

SEQ ID NO: 1189293 - RNA, 19 nt, Homo sapiens
  misc_RNA (1)...(19): siRNA sense strand
gaaguuucacggcuauaac

SEQ ID NO: 1189294 - RNA, 19 nt, Homo sapiens
  misc_RNA (1)...(19): siRNA sense strand
gaacuacaucaagaagaca

SEQ ID NO: 1189295 - RNA, 19 nt, Homo sapiens
  misc_RNA (1)...(19): siRNA sense strand
cgccacgcauguucaccua

SEQ ID NO: 1189296 - RNA, 19 nt, Homo sapiens
  misc_RNA (1)...(19): siRNA sense strand
gacaaugugaugaggaagu

SEQ ID NO: 1189297 - RNA, 19 nt, Homo sapiens
  misc_RNA (1)...(19): siRNA sense strand
agacucaggcaaaccaaga

SEQ ID NO: 1189298 - RNA, 19 nt, Homo sapiens
  misc_RNA (1)...(19): siRNA sense strand
gcuucagccugggugguaa

SEQ ID NO: 1189299 - RNA, 19 nt, Homo sapiens
  misc_RNA (1)...(19): siRNA sense strand
auggugaacuacaucaaga

SEQ ID NO: 1189300 - RNA, 19 nt, Homo sapiens
  misc_RNA (1)...(19): siRNA sense strand
accggaaguucaucacuau

SEQ ID NO: 1189301 - RNA, 19 nt, Homo sapiens
  misc_RNA (1)...(19): siRNA sense strand
guuggugcaugaaagucuu

SEQ ID NO: 1189302 - RNA, 19 nt, Homo sapiens
  misc_RNA (1)...(19): siRNA sense strand
uggcugacaacaugaagaa

SEQ ID NO: 1189303 - RNA, 19 nt, Homo sapiens
  misc_RNA (1)...(19): siRNA sense strand
ggggaaaaguggacacauc

SEQ ID NO: 1189304 - RNA, 19 nt, Homo sapiens
  misc_RNA (1)...(19): siRNA sense strand
cggaaguucaucacuaugu

SEQ ID NO: 1189305 - RNA, 19 nt, Homo sapiens
  misc_RNA (1)...(19): siRNA sense strand
ggagccacuucuacauucg

SEQ ID NO: 1189306 - RNA, 19 nt, Homo sapiens
  misc_RNA (1)...(19): siRNA sense strand
acgagagaacgucauguuu

SEQ ID NO: 1189307 - RNA, 19 nt, Homo sapiens
  misc_RNA (1)...(19): siRNA sense strand
cauccagacagccuuguau

SEQ ID NO: 1189308 - RNA, 19 nt, Homo sapiens
  misc_RNA (1)...(19): siRNA sense strand
gaacucccagccguguuug

SEQ ID NO: 1189309 - RNA, 19 nt, Homo sapiens
  misc_RNA (1)...(19): siRNA sense strand
ccuguccucuucugaccaa

SEQ ID NO: 1189310 - RNA, 19 nt, Homo sapiens
  misc_RNA (1)...(19): siRNA sense strand
ugagcacuguguuggagau

SEQ ID NO: 1189311 - RNA, 19 nt, Homo sapiens
  misc_RNA (1)...(19): siRNA sense strand
cucaaguccuguccucuuc

SEQ ID NO: 1189312 - RNA, 19 nt, Homo sapiens
  misc_RNA (1)...(19): siRNA sense strand
augacaaugugaugaggaa

SEQ ID NO: 1189313 - RNA, 19 nt, Homo sapiens
  misc_RNA (1)...(19): siRNA sense strand
gauaucaccauggucaucu

SEQ ID NO: 1189314 - RNA, 19 nt, Homo sapiens
  misc_RNA (1)...(19): siRNA sense strand
agggugaggucgccacauc

SEQ ID NO: 1189315 - RNA, 19 nt, Homo sapiens
  misc_RNA (1)...(19): siRNA sense strand
acgauccguuggugcauga

SEQ ID NO: 1189316 - RNA, 19 nt, Homo sapiens
  misc_RNA (1)...(19): siRNA sense strand
cauccgcacuuucguugac

SEQ ID NO: 1189317 - RNA, 19 nt, Homo sapiens
  misc_RNA (1)...(19): siRNA sense strand
ggaauacuaugaggaagaa

SEQ ID NO: 1189318 - RNA, 19 nt, Homo sapiens
  misc_RNA (1)...(19): siRNA sense strand
gagagaacgucauguuugu

SEQ ID NO: 1189319 - RNA, 19 nt, Homo sapiens
  misc_RNA (1)...(19): siRNA sense strand
gaaggaauacuaugaggaa

SEQ ID NO: 1189320 - RNA, 19 nt, Homo sapiens
  misc_RNA (1)...(19): siRNA sense strand
caggaaaccuucaugcaau

SEQ ID NO: 1189321 - RNA, 19 nt, Homo sapiens
  misc_RNA (1)...(19): siRNA sense strand
gagaugauaucaccauggu

SEQ ID NO: 1189322 - RNA, 19 nt, Homo sapiens
  misc_RNA (1)...(19): siRNA sense strand
gaaagucuucuaaccauuc

SEQ ID NO: 1189323 - RNA, 19 nt, Homo sapiens
  misc_RNA (1)...(19): siRNA sense strand
guaacauugugugcaaaua

SEQ ID NO: 1189324 - RNA, 19 nt, Homo sapiens
  misc_RNA (1)...(19): siRNA sense strand
auaacucccugaaggaaua

SEQ ID NO: 1189325 - RNA, 19 nt, Homo sapiens
  misc_RNA (1)...(19): siRNA sense strand
gcacugagggcccaggaaa

SEQ ID NO: 1189326 - RNA, 19 nt, Homo sapiens
  misc_RNA (1)...(19): siRNA sense strand
ggaaguuucacggcuauaa

SEQ ID NO: 1189327 - RNA, 19 nt, Homo sapiens
  misc_RNA (1)...(19): siRNA sense strand
gaaacgagagaacgucaug

SEQ ID NO: 1189328 - RNA, 19 nt, Homo sapiens
  misc_RNA (1)...(19): siRNA sense strand
caccggaaguucaucacua

SEQ ID NO: 1189329 - RNA, 19 nt, Homo sapiens
  misc_RNA (1)...(19): siRNA sense strand
ugacauggauggauaagcu

SEQ ID NO: 1189330 - RNA, 19 nt, Homo sapiens
  misc_RNA (1)...(19): siRNA sense strand
cgagagaacgucauguuug

SEQ ID NO: 1189331 - RNA, 19 nt, Homo sapiens
  misc_RNA (1)...(19): siRNA sense strand
gaggaaguuucacggcuau

SEQ ID NO: 1189332 - RNA, 19 nt, Homo sapiens
  misc_RNA (1)...(19): siRNA sense strand
ggaaguucaucacuauguc

SEQ ID NO: 1189333 - RNA, 19 nt, Homo sapiens
  misc_RNA (1)...(19): siRNA sense strand
ggaguacgccaacgccauu

SEQ ID NO: 1189334 - RNA, 19 nt, Homo sapiens
  misc_RNA (1)...(19): siRNA sense strand
cagccugggugguaacauu

SEQ ID NO: 1189335 - RNA, 19 nt, Homo sapiens
  misc_RNA (1)...(19): siRNA sense strand
gcacuguguuggagaugau

SEQ ID NO: 1189336 - RNA, 19 nt, Homo sapiens
  misc_RNA (1)...(19): siRNA sense strand
ugaggucgccacauccuua

SEQ ID NO: 1189337 - RNA, 19 nt, Homo sapiens
  misc_RNA (1)...(19): siRNA sense strand
ccacgcauguucaccuaug

SEQ ID NO: 1189338 - RNA, 19 nt, Homo sapiens
  misc_RNA (1)...(19): siRNA sense strand
ggucaucugcccuggaauu

SEQ ID NO: 1189339 - RNA, 19 nt, Homo sapiens
  misc_RNA (1)...(19): siRNA sense strand
ugaaagucuucuaaccauu

SEQ ID NO: 1189340 - RNA, 19 nt, Homo sapiens
  misc_RNA (1)...(19): siRNA sense strand
ggauuuauguuccucucau

SEQ ID NO: 1189341 - RNA, 19 nt, Homo sapiens
  misc_RNA (1)...(19): siRNA sense strand
ccaggaaaccuucaugcaa

SEQ ID NO: 1189342 - RNA, 19 nt, Homo sapiens
  misc_RNA (1)...(19): siRNA sense strand
uggagaccauguuaagaaa

SEQ ID NO: 1189343 - RNA, 19 nt, Homo sapiens
  misc_RNA (1)...(19): siRNA sense strand
gugcaugaaagucuucuaa

SEQ ID NO: 1189344 - RNA, 19 nt, Homo sapiens
  misc_RNA (1)...(19): siRNA sense strand
gugguaacauugugugcaa

SEQ ID NO: 1189345 - RNA, 19 nt, Homo sapiens
  misc_RNA (1)...(19): siRNA sense strand
gcugacaacaugaagaaga

SEQ ID NO: 1189346 - RNA, 19 nt, Homo sapiens
  misc_RNA (1)...(19): siRNA sense strand
gcaugaaagucuucuaacc

SEQ ID NO: 1189347 - RNA, 19 nt, Homo sapiens
  misc_RNA (1)...(19): siRNA sense strand
ugaugcagauugaugacaa

SEQ ID NO: 1189348 - RNA, 19 nt, Homo sapiens
  misc_RNA (1)...(19): siRNA sense strand
ugaacuacaucaagaagac

SEQ ID NO: 1189349 - RNA, 19 nt, Homo sapiens
  misc_RNA (1)...(19): siRNA sense strand
acaaugugaugaggaaguu

SEQ ID NO: 1189350 - RNA, 19 nt, Homo sapiens
  misc_RNA (1)...(19): siRNA sense strand
gcccuuggcugagcacugu

SEQ ID NO: 1189351 - RNA, 19 nt, Homo sapiens
  misc_RNA (1)...(19): siRNA sense strand
aaugggagcguaacaaguu

SEQ ID NO: 1189352 - RNA, 19 nt, Homo sapiens
  misc_RNA (1)...(19): siRNA sense strand
gauuuauguuccucucaug

SEQ ID NO: 1189353 - RNA, 19 nt, Homo sapiens
  misc_RNA (1)...(19): siRNA sense strand
gagccauggugaacuacau

SEQ ID NO: 1189354 - RNA, 19 nt, Homo sapiens
  misc_RNA (1)...(19): siRNA sense strand
gcucaaguccuguccucuu

SEQ ID NO: 1189355 - RNA, 19 nt, Homo sapiens
  misc_RNA (1)...(19): siRNA sense strand
cgaacucccagccguguuu

SEQ ID NO: 1189356 - RNA, 19 nt, Homo sapiens
  misc_RNA (1)...(19): siRNA sense strand
gcuauaacucccugaagga

SEQ ID NO: 1189357 - RNA, 19 nt, Homo sapiens
  misc_RNA (1)...(19): siRNA sense strand
gcaauacauccgcacuuuc

SEQ ID NO: 1189358 - RNA, 19 nt, Homo sapiens
  misc_RNA (1)...(19): siRNA sense strand
agcaauacauccgcacuuu

SEQ ID NO: 1189359 - RNA, 19 nt, Homo sapiens
  misc_RNA (1)...(19): siRNA sense strand
guuccucucaugcugguua

SEQ ID NO: 1189360 - RNA, 19 nt, Homo sapiens
  misc_RNA (1)...(19): siRNA sense strand
uggagccacuucuacauuc

SEQ ID NO: 1189361 - RNA, 19 nt, Homo sapiens
  misc_RNA (1)...(19): siRNA sense strand
ugagggcucugugcuguuc

SEQ ID NO: 1189362 - RNA, 19 nt, Homo sapiens
  misc_RNA (1)...(19): siRNA sense strand
caccugaccucuacuucca

SEQ ID NO: 1189363 - RNA, 19 nt, Homo sapiens
  misc_RNA (1)...(19): siRNA sense strand
uaacauugugugcaaauac

SEQ ID NO: 1189364 - RNA, 19 nt, Homo sapiens
  misc_RNA (1)...(19): siRNA sense strand
uuggagccauggugaacua

SEQ ID NO: 1189365 - RNA, 19 nt, Homo sapiens
  misc_RNA (1)...(19): siRNA sense strand
auaagcuggugguggagua

SEQ ID NO: 1189366 - RNA, 19 nt, Homo sapiens
  misc_RNA (1)...(19): siRNA sense strand
caaguccuguccucuucug

SEQ ID NO: 1189367 - RNA, 19 nt, Homo sapiens
  misc_RNA (1)...(19): siRNA sense strand
cugacaacaugaagaagau

SEQ ID NO: 1189368 - RNA, 19 nt, Homo sapiens
  misc_RNA (1)...(19): siRNA sense strand
gagaccauguuaagaaacc

SEQ ID NO: 1189369 - RNA, 19 nt, Homo sapiens
  misc_RNA (1)...(19): siRNA sense strand
gugaucguccgguguuuga

SEQ ID NO: 1189370 - RNA, 19 nt, Homo sapiens
  misc_RNA (1)...(19): siRNA sense strand
caugaaagucuucuaacca

SEQ ID NO: 1189371 - RNA, 19 nt, Homo sapiens
  misc_RNA (1)...(19): siRNA sense strand
gaaguucaucacuaugucu

SEQ ID NO: 1189372 - RNA, 19 nt, Homo sapiens
  misc_RNA (1)...(19): siRNA sense strand
aggaaaccuucaugcaaug

SEQ ID NO: 1189373 - RNA, 19 nt, Homo sapiens
  misc_RNA (1)...(19): siRNA sense strand
gguaacauugugugcaaau

SEQ ID NO: 1189374 - RNA, 19 nt, Homo sapiens
  misc_RNA (1)...(19): siRNA sense strand
caauacauccgcacuuucg

SEQ ID NO: 1189375 - RNA, 19 nt, Homo sapiens
  misc_RNA (1)...(19): siRNA sense strand
guucuacaacuuccucaug

SEQ ID NO: 1189376 - RNA, 19 nt, Homo sapiens
  misc_RNA (1)...(19): siRNA sense strand
ccacuugggcuucuuugag

SEQ ID NO: 1189377 - RNA, 19 nt, Homo sapiens
  misc_RNA (1)...(19): siRNA sense strand
uuggagaccauguuaagaa

SEQ ID NO: 1189378 - RNA, 19 nt, Homo sapiens
  misc_RNA (1)...(19): siRNA sense strand
gacaacaugaagaagauca

SEQ ID NO: 1189379 - RNA, 19 nt, Homo sapiens
  misc_RNA (1)...(19): siRNA sense strand
gauggagccacuucuacau

SEQ ID NO: 1189380 - RNA, 19 nt, Homo sapiens
  misc_RNA (1)...(19): siRNA sense strand
ccaaugggagcguaacaag

SEQ ID NO: 1189381 - RNA, 19 nt, Homo sapiens
  misc_RNA (1)...(19): siRNA sense strand
augaaagucuucuaaccau

SEQ ID NO: 1189382 - RNA, 19 nt, Homo sapiens
  misc_RNA (1)...(19): siRNA sense strand
gaaguuucacggcuauaac

SEQ ID NO: 1189383 - RNA, 19 nt, Homo sapiens
  misc_RNA (1)...(19): siRNA sense strand
gaacuacaucaagaagaca

SEQ ID NO: 1189384 - RNA, 19 nt, Homo sapiens
  misc_RNA (1)...(19): siRNA sense strand
cgccacgcauguucaccua

SEQ ID NO: 1189385 - RNA, 19 nt, Homo sapiens
  misc_RNA (1)...(19): siRNA sense strand
gacaaugugaugaggaagu

SEQ ID NO: 1189386 - RNA, 19 nt, Homo sapiens
  misc_RNA (1)...(19): siRNA sense strand
agacucaggcaaaccaaga

SEQ ID NO: 1189387 - RNA, 19 nt, Homo sapiens
  misc_RNA (1)...(19): siRNA sense strand
gcuucagccugggugguaa

SEQ ID NO: 1189388 - RNA, 19 nt, Homo sapiens
  misc_RNA (1)...(19): siRNA sense strand
auggugaacuacaucaaga

SEQ ID NO: 1189389 - RNA, 19 nt, Homo sapiens
  misc_RNA (1)...(19): siRNA sense strand
accggaaguucaucacuau

SEQ ID NO: 1189390 - RNA, 19 nt, Homo sapiens
  misc_RNA (1)...(19): siRNA sense strand
guuggugcaugaaagucuu

SEQ ID NO: 1189391 - RNA, 19 nt, Homo sapiens
  misc_RNA (1)...(19): siRNA sense strand
uggcugacaacaugaagaa

SEQ ID NO: 1189392 - RNA, 19 nt, Homo sapiens
  misc_RNA (1)...(19): siRNA sense strand
ggggaaaaguggacacauc

SEQ ID NO: 1189393 - RNA, 19 nt, Homo sapiens
  misc_RNA (1)...(19): siRNA sense strand
cggaaguucaucacuaugu

SEQ ID NO: 1189394 - RNA, 19 nt, Homo sapiens
  misc_RNA (1)...(19): siRNA sense strand
ggagccacuucuacauucg

SEQ ID NO: 1189395 - RNA, 19 nt, Homo sapiens
  misc_RNA (1)...(19): siRNA sense strand
acgagagaacgucauguuu

SEQ ID NO: 1189396 - RNA, 19 nt, Homo sapiens
  misc_RNA (1)...(19): siRNA sense strand
cauccagacagccuuguau

SEQ ID NO: 1189397 - RNA, 19 nt, Homo sapiens
  misc_RNA (1)...(19): siRNA sense strand
gaacucccagccguguuug

SEQ ID NO: 1189398 - RNA, 19 nt, Homo sapiens
  misc_RNA (1)...(19): siRNA sense strand
ccuguccucuucugaccaa

SEQ ID NO: 1189399 - RNA, 19 nt, Homo sapiens
  misc_RNA (1)...(19): siRNA sense strand
ugagcacuguguuggagau

SEQ ID NO: 1189400 - RNA, 19 nt, Homo sapiens
  misc_RNA (1)...(19): siRNA sense strand
cucaaguccuguccucuuc

SEQ ID NO: 1189401 - RNA, 19 nt, Homo sapiens
  misc_RNA (1)...(19): siRNA sense strand
augacaaugugaugaggaa

SEQ ID NO: 1189402 - RNA, 19 nt, Homo sapiens
  misc_RNA (1)...(19): siRNA sense strand
gauaucaccauggucaucu

SEQ ID NO: 1189403 - RNA, 19 nt, Homo sapiens
  misc_RNA (1)...(19): siRNA sense strand
agggugaggucgccacauc

SEQ ID NO: 1189404 - RNA, 19 nt, Homo sapiens
  misc_RNA (1)...(19): siRNA sense strand
acgauccguuggugcauga

SEQ ID NO: 1189405 - RNA, 19 nt, Homo sapiens
  misc_RNA (1)...(19): siRNA sense strand
cauccgcacuuucguugac

SEQ ID NO: 1189406 - RNA, 19 nt, Homo sapiens
  misc_RNA (1)...(19): siRNA sense strand
ugacaaaccugaagacaua

SEQ ID NO: 1189407 - RNA, 19 nt, Homo sapiens
  misc_RNA (1)...(19): siRNA sense strand
caagaaagcuguauagaug

SEQ ID NO: 1189408 - RNA, 19 nt, Homo sapiens
  misc_RNA (1)...(19): siRNA sense strand
gaagggauuucauauaaga

SEQ ID NO: 1189409 - RNA, 19 nt, Homo sapiens
  misc_RNA (1)...(19): siRNA sense strand
gaugaaugcucuaaggaua

SEQ ID NO: 1189410 - RNA, 19 nt, Homo sapiens
  misc_RNA (1)...(19): siRNA sense strand
gaaagaauguguguggaaa

SEQ ID NO: 1189411 - RNA, 19 nt, Homo sapiens
  misc_RNA (1)...(19): siRNA sense strand
ugaauugggucaugugaua

SEQ ID NO: 1189412 - RNA, 19 nt, Homo sapiens
  misc_RNA (1)...(19): siRNA sense strand
ccacguaacuaucauaaga

SEQ ID NO: 1189413 - RNA, 19 nt, Homo sapiens
  misc_RNA (1)...(19): siRNA sense strand
caagagaucuguacucaca

SEQ ID NO: 1189414 - RNA, 19 nt, Homo sapiens
  misc_RNA (1)...(19): siRNA sense strand
ggaguggucuuuccucuga

SEQ ID NO: 1189415 - RNA, 19 nt, Homo sapiens
  misc_RNA (1)...(19): siRNA sense strand
gauggagccuggagaagua

SEQ ID NO: 1189416 - RNA, 19 nt, Homo sapiens
  misc_RNA (1)...(19): siRNA sense strand
caaauuagccuuuagugaa

SEQ ID NO: 1189417 - RNA, 19 nt, Homo sapiens
  misc_RNA (1)...(19): siRNA sense strand
ggaugaaguuuguuucuga

SEQ ID NO: 1189418 - RNA, 19 nt, Homo sapiens
  misc_RNA (1)...(19): siRNA sense strand
gaauuucugugaaguuuga

SEQ ID NO: 1189419 - RNA, 19 nt, Homo sapiens
  misc_RNA (1)...(19): siRNA sense strand
guacucacaugcucaguuu

SEQ ID NO: 1189420 - RNA, 19 nt, Homo sapiens
  misc_RNA (1)...(19): siRNA sense strand
gauaugauuucgacaguau

SEQ ID NO: 1189421 - RNA, 19 nt, Homo sapiens
  misc_RNA (1)...(19): siRNA sense strand
uuacaacgauggaucuaua

SEQ ID NO: 1189422 - RNA, 19 nt, Homo sapiens
  misc_RNA (1)...(19): siRNA sense strand
gaagugaugaagagaguua

SEQ ID NO: 1189423 - RNA, 19 nt, Homo sapiens
  misc_RNA (1)...(19): siRNA sense strand
caaauugccugaaguucuu

SEQ ID NO: 1189424 - RNA, 19 nt, Homo sapiens
  misc_RNA (1)...(19): siRNA sense strand
gcgcuggccucgauuauga

SEQ ID NO: 1189425 - RNA, 19 nt, Homo sapiens
  misc_RNA (1)...(19): siRNA sense strand
ugaaagacaugacaauugu

SEQ ID NO: 1189426 - RNA, 19 nt, Homo sapiens
  misc_RNA (1)...(19): siRNA sense strand
caauugaccuuacgcagaa

SEQ ID NO: 1189427 - RNA, 19 nt, Homo sapiens
  misc_RNA (1)...(19): siRNA sense strand
gaaaauagcccuuugauag

SEQ ID NO: 1189428 - RNA, 19 nt, Homo sapiens
  misc_RNA (1)...(19): siRNA sense strand
caagaagggauuucauaua

SEQ ID NO: 1189429 - RNA, 19 nt, Homo sapiens
  misc_RNA (1)...(19): siRNA sense strand
gagaaacucuacaagaauc

SEQ ID NO: 1189430 - RNA, 19 nt, Homo sapiens
  misc_RNA (1)...(19): siRNA sense strand
ccaauuauccugaugacua

SEQ ID NO: 1189431 - RNA, 19 nt, Homo sapiens
  misc_RNA (1)...(19): siRNA sense strand
cgaaucaaauuagccuuua

SEQ ID NO: 1189432 - RNA, 19 nt, Homo sapiens
  misc_RNA (1)...(19): siRNA sense strand
gagcagcgaugucugaaca

SEQ ID NO: 1189433 - RNA, 19 nt, Homo sapiens
  misc_RNA (1)...(19): siRNA sense strand
gaacggggcucucgacuug

SEQ ID NO: 1189434 - RNA, 19 nt, Homo sapiens
  misc_RNA (1)...(19): siRNA sense strand
gcaaggaagcugaguguga

SEQ ID NO: 1189435 - RNA, 19 nt, Homo sapiens
  misc_RNA (1)...(19): siRNA sense strand
ggcaagaacugugauaaau

SEQ ID NO: 1189436 - RNA, 19 nt, Homo sapiens
  misc_RNA (1)...(19): siRNA sense strand
caaggaagcugagugugaa

SEQ ID NO: 1189437 - RNA, 19 nt, Homo sapiens
  misc_RNA (1)...(19): siRNA sense strand
ugacggaacugugaacaaa

SEQ ID NO: 1189438 - RNA, 19 nt, Homo sapiens
  misc_RNA (1)...(19): siRNA sense strand
gcaagaacugugauaaauu

SEQ ID NO: 1189439 - RNA, 19 nt, Homo sapiens
  misc_RNA (1)...(19): siRNA sense strand
guguaaagccgcuguauuu

SEQ ID NO: 1189440 - RNA, 19 nt, Homo sapiens
  misc_RNA (1)...(19): siRNA sense strand
aaacuuaacggcaccauaa

SEQ ID NO: 1189441 - RNA, 19 nt, Homo sapiens
  misc_RNA (1)...(19): siRNA sense strand
uggagaaacucuacaagaa

SEQ ID NO: 1189442 - RNA, 19 nt, Homo sapiens
  misc_RNA (1)...(19): siRNA sense strand
gauauugccuuagaugaug

SEQ ID NO: 1189443 - RNA, 19 nt, Homo sapiens
  misc_RNA (1)...(19): siRNA sense strand
ggacuucuuaccaaacuua

SEQ ID NO: 1189444 - RNA, 19 nt, Homo sapiens
  misc_RNA (1)...(19): siRNA sense strand
gcaagaaagcuguauagau

SEQ ID NO: 1189445 - RNA, 19 nt, Homo sapiens
  misc_RNA (1)...(19): siRNA sense strand
gagauaaccacguaacuau

SEQ ID NO: 1189446 - RNA, 19 nt, Homo sapiens
  misc_RNA (1)...(19): siRNA sense strand
ggacaaauugccugaaguu

SEQ ID NO: 1189447 - RNA, 19 nt, Homo sapiens
  misc_RNA (1)...(19): siRNA sense strand
gaaauggaccucaggcaau

SEQ ID NO: 1189448 - RNA, 19 nt, Homo sapiens
  misc_RNA (1)...(19): siRNA sense strand
cauaagaucuaccuccaau

SEQ ID NO: 1189449 - RNA, 19 nt, Homo sapiens
  misc_RNA (1)...(19): siRNA sense strand
guauagauguccagcaugu

SEQ ID NO: 1189450 - RNA, 19 nt, Homo sapiens
  misc_RNA (1)...(19): siRNA sense strand
ugaacacucugggcaguua

SEQ ID NO: 1189451 - RNA, 19 nt, Homo sapiens
  misc_RNA (1)...(19): siRNA sense strand
gaauguguguggaaaauaa

SEQ ID NO: 1189452 - RNA, 19 nt, Homo sapiens
  misc_RNA (1)...(19): siRNA sense strand
gaagauggagccuggagaa

SEQ ID NO: 1189453 - RNA, 19 nt, Homo sapiens
  misc_RNA (1)...(19): siRNA sense strand
uaaacugcauggcaaauuc

SEQ ID NO: 1189454 - RNA, 19 nt, Homo sapiens
  misc_RNA (1)...(19): siRNA sense strand
caaauucuguggcgcugaa

SEQ ID NO: 1189455 - RNA, 19 nt, Homo sapiens
  misc_RNA (1)...(19): siRNA sense strand
ucaaugccguaauggauuu

SEQ ID NO: 1189456 - RNA, 19 nt, Homo sapiens
  misc_RNA (1)...(19): siRNA sense strand
cuuagaugaugaagacuua

SEQ ID NO: 1189457 - RNA, 19 nt, Homo sapiens
  misc_RNA (1)...(19): siRNA sense strand
caauuauccugaugacuau

SEQ ID NO: 1189458 - RNA, 19 nt, Homo sapiens
  misc_RNA (1)...(19): siRNA sense strand
gggagaagauuguuuuaaa

SEQ ID NO: 1189459 - RNA, 19 nt, Homo sapiens
  misc_RNA (1)...(19): siRNA sense strand
agaaagaagugaugaagag

SEQ ID NO: 1189460 - RNA, 19 nt, Homo sapiens
  misc_RNA (1)...(19): siRNA sense strand
aaaaguaccucuacaauuc

SEQ ID NO: 1189461 - RNA, 19 nt, Homo sapiens
  misc_RNA (1)...(19): siRNA sense strand
gauaagaagaauuggcuuu

SEQ ID NO: 1189462 - RNA, 19 nt, Homo sapiens
  misc_RNA (1)...(19): siRNA sense strand
ggauuguuguucaugaauu

SEQ ID NO: 1189463 - RNA, 19 nt, Homo sapiens
  misc_RNA (1)...(19): siRNA sense strand
aaacucacuuggagaaaga

SEQ ID NO: 1189464 - RNA, 19 nt, Homo sapiens
  misc_RNA (1)...(19): siRNA sense strand
ugaugcaucuguucaaaga

SEQ ID NO: 1189465 - RNA, 19 nt, Homo sapiens
  misc_RNA (1)...(19): siRNA sense strand
cagauucagucucccaauu

SEQ ID NO: 1189466 - RNA, 19 nt, Homo sapiens
  misc_RNA (1)...(19): siRNA sense strand
ggagaaacucuacaagaau

SEQ ID NO: 1189467 - RNA, 19 nt, Homo sapiens
  misc_RNA (1)...(19): siRNA sense strand
uggcauacguccugcaauu

SEQ ID NO: 1189468 - RNA, 19 nt, Homo sapiens
  misc_RNA (1)...(19): siRNA sense strand
gaauguggauugaguuucg

SEQ ID NO: 1189469 - RNA, 19 nt, Homo sapiens
  misc_RNA (1)...(19): siRNA sense strand
agaaguauuugauggagaa

SEQ ID NO: 1189470 - RNA, 19 nt, Homo sapiens
  misc_RNA (1)...(19): siRNA sense strand
uaaacaugauugcaaggaa

SEQ ID NO: 1189471 - RNA, 19 nt, Homo sapiens
  misc_RNA (1)...(19): siRNA sense strand
gauaggacaauugaccuua

SEQ ID NO: 1189472 - RNA, 19 nt, Homo sapiens
  misc_RNA (1)...(19): siRNA sense strand
ugaagugccugaagugauc

SEQ ID NO: 1189473 - RNA, 19 nt, Homo sapiens
  misc_RNA (1)...(19): siRNA sense strand
gugcugguaugacuauauu

SEQ ID NO: 1189474 - RNA, 19 nt, Homo sapiens
  misc_RNA (1)...(19): siRNA sense strand
gauuguuguucaugaauug

SEQ ID NO: 1189475 - RNA, 19 nt, Homo sapiens
  misc_RNA (1)...(19): siRNA sense strand
gacaggauaagaagaauug

SEQ ID NO: 1189476 - RNA, 19 nt, Homo sapiens
  misc_RNA (1)...(19): siRNA sense strand
gugaauggcuauuaguauc

SEQ ID NO: 1189477 - RNA, 19 nt, Homo sapiens
  misc_RNA (1)...(19): siRNA sense strand
gaucuaccuccaauacuuu

SEQ ID NO: 1189478 - RNA, 19 nt, Homo sapiens
  misc_RNA (1)...(19): siRNA sense strand
gauucagucucccaauuau

SEQ ID NO: 1189479 - RNA, 19 nt, Homo sapiens
  misc_RNA (1)...(19): siRNA sense strand
gaacacacaagaccagauc

SEQ ID NO: 1189480 - RNA, 19 nt, Homo sapiens
  misc_RNA (1)...(19): siRNA sense strand
gaaaaguaccucuacaauu

SEQ ID NO: 1189481 - RNA, 19 nt, Homo sapiens
  misc_RNA (1)...(19): siRNA sense strand
gagcaaaacaacacaguua

SEQ ID NO: 1189482 - RNA, 19 nt, Homo sapiens
  misc_RNA (1)...(19): siRNA sense strand
gcaccaacccaguacagaa

SEQ ID NO: 1189483 - RNA, 19 nt, Homo sapiens
  misc_RNA (1)...(19): siRNA sense strand
ccaacuggccagacaagua

SEQ ID NO: 1189484 - RNA, 19 nt, Homo sapiens
  misc_RNA (1)...(19): siRNA sense strand
caucccaguucaacaauau

SEQ ID NO: 1189485 - RNA, 19 nt, Homo sapiens
  misc_RNA (1)...(19): siRNA sense strand
ggucagcgaacccgucuaa

SEQ ID NO: 1189486 - RNA, 19 nt, Homo sapiens
  misc_RNA (1)...(19): siRNA sense strand
caauugugcuuaugacuac

SEQ ID NO: 1189487 - RNA, 19 nt, Homo sapiens
  misc_RNA (1)...(19): siRNA sense strand
caaauagauaggacaauug

SEQ ID NO: 1189488 - RNA, 19 nt, Homo sapiens
  misc_RNA (1)...(19): siRNA sense strand
gaauuauccuuccagacau

SEQ ID NO: 1189489 - RNA, 19 nt, Homo sapiens
  misc_RNA (1)...(19): siRNA sense strand
ugaauuauccuuccagaca

SEQ ID NO: 1189490 - RNA, 19 nt, Homo sapiens
  misc_RNA (1)...(19): siRNA sense strand
gcucucgacuugaauuauc

SEQ ID NO: 1189491 - RNA, 19 nt, Homo sapiens
  misc_RNA (1)...(19): siRNA sense strand
ggagcuacaugugucaaug

SEQ ID NO: 1189492 - RNA, 19 nt, Homo sapiens
  misc_RNA (1)...(19): siRNA sense strand
gcgaacccgucuaagcaaa

SEQ ID NO: 1189493 - RNA, 19 nt, Homo sapiens
  misc_RNA (1)...(19): siRNA sense strand
gaagaugagugugccaaac

SEQ ID NO: 1189494 - RNA, 19 nt, Homo sapiens
  misc_RNA (1)...(19): siRNA sense strand
gaagcagacuguggcuaug

SEQ ID NO: 1189495 - RNA, 19 nt, Homo sapiens
  misc_RNA (1)...(19): siRNA sense strand
ggaggaagaagcagacugu

SEQ ID NO: 1189496 - RNA, 19 nt, Homo sapiens
  misc_RNA (1)...(19): siRNA sense strand
gaagcugagugugaacaga

SEQ ID NO: 1189497 - RNA, 19 nt, Homo sapiens
  misc_RNA (1)...(19): siRNA sense strand
ccaacccaguacagaauuu

SEQ ID NO: 1189498 - RNA, 19 nt, Homo sapiens
  misc_RNA (1)...(19): siRNA sense strand
ggcguuauuccuuauguua

SEQ ID NO: 1189499 - RNA, 19 nt, Homo sapiens
  misc_RNA (1)...(19): siRNA sense strand
uaauucauuuccacacuga

SEQ ID NO: 1189500 - RNA, 19 nt, Homo sapiens
  misc_RNA (1)...(19): siRNA sense strand
gaaucaaauuagccuuuag

SEQ ID NO: 1189501 - RNA, 19 nt, Homo sapiens
  misc_RNA (1)...(19): siRNA sense strand
aaagaugaaugcucuaagg

SEQ ID NO: 1189502 - RNA, 19 nt, Homo sapiens
  misc_RNA (1)...(19): siRNA sense strand
gcgcugaagugccugaagu

SEQ ID NO: 1189503 - RNA, 19 nt, Homo sapiens
  misc_RNA (1)...(19): siRNA sense strand
cgagauaaccacguaacua

SEQ ID NO: 1189504 - RNA, 19 nt, Homo sapiens
  misc_RNA (1)...(19): siRNA sense strand
gaugaagagaguuacauug

SEQ ID NO: 1189505 - RNA, 19 nt, Homo sapiens
  misc_RNA (1)...(19): siRNA sense strand
gaaugcacuugggaaauca

SEQ ID NO: 1189506 - RNA, 19 nt, Homo sapiens
  misc_RNA (1)...(19): siRNA sense strand
ucacagagcuccagaaagc

SEQ ID NO: 1189507 - RNA, 19 nt, Homo sapiens
  misc_RNA (1)...(19): siRNA sense strand
gaguggaguucuuugauga

SEQ ID NO: 1189508 - RNA, 19 nt, Homo sapiens
  misc_RNA (1)...(19): siRNA sense strand
ggaguggaguucuuugaug

SEQ ID NO: 1189509 - RNA, 19 nt, Homo sapiens
  misc_RNA (1)...(19): siRNA sense strand
ccaagucucugcagaagau

SEQ ID NO: 1189510 - RNA, 19 nt, Homo sapiens
  misc_RNA (1)...(19): siRNA sense strand
ucaagaagcuguccaccau

SEQ ID NO: 1189511 - RNA, 19 nt, Homo sapiens
  misc_RNA (1)...(19): siRNA sense strand
gcaucaaugugcugucuga

SEQ ID NO: 1189512 - RNA, 19 nt, Homo sapiens
  misc_RNA (1)...(19): siRNA sense strand
gagcuucugccuuuccuua

SEQ ID NO: 1189513 - RNA, 19 nt, Homo sapiens
  misc_RNA (1)...(19): siRNA sense strand
gcuuguggaucauguauau

SEQ ID NO: 1189514 - RNA, 19 nt, Homo sapiens
  misc_RNA (1)...(19): siRNA sense strand
uggcucagcugaaggauga

SEQ ID NO: 1189515 - RNA, 19 nt, Homo sapiens
  misc_RNA (1)...(19): siRNA sense strand
caugguggcugacaaguuc

SEQ ID NO: 1189516 - RNA, 19 nt, Homo sapiens
  misc_RNA (1)...(19): siRNA sense strand
caaccaacaugucaagucu

SEQ ID NO: 1189517 - RNA, 19 nt, Homo sapiens
  misc_RNA (1)...(19): siRNA sense strand
gaacaucgcccagcuucug

SEQ ID NO: 1189518 - RNA, 19 nt, Homo sapiens
  misc_RNA (1)...(19): siRNA sense strand
gucaaagaguucugugaaa

SEQ ID NO: 1189519 - RNA, 19 nt, Homo sapiens
  misc_RNA (1)...(19): siRNA sense strand
uccagaaccugaugaaaga

SEQ ID NO: 1189520 - RNA, 19 nt, Homo sapiens
  misc_RNA (1)...(19): siRNA sense strand
ugacuacgcucuucugcau

SEQ ID NO: 1189521 - RNA, 19 nt, Homo sapiens
  misc_RNA (1)...(19): siRNA sense strand
ugaagaagcuaguggaaaa

SEQ ID NO: 1189522 - RNA, 19 nt, Homo sapiens
  misc_RNA (1)...(19): siRNA sense strand
ggcugaacaucaucucuaa

SEQ ID NO: 1189523 - RNA, 19 nt, Homo sapiens
  misc_RNA (1)...(19): siRNA sense strand
cagaacagcugggaaccuu

SEQ ID NO: 1189524 - RNA, 19 nt, Homo sapiens
  misc_RNA (1)...(19): siRNA sense strand
ggucaaagaguucugugaa

SEQ ID NO: 1189525 - RNA, 19 nt, Homo sapiens
  misc_RNA (1)...(19): siRNA sense strand
uagacgaacuccgcaauga

SEQ ID NO: 1189526 - RNA, 19 nt, Homo sapiens
  misc_RNA (1)...(19): siRNA sense strand
gaacagcugggaaccuuca

SEQ ID NO: 1189527 - RNA, 19 nt, Homo sapiens
  misc_RNA (1)...(19): siRNA sense strand
ucucuaaccuggacugugu

SEQ ID NO: 1189528 - RNA, 19 nt, Homo sapiens
  misc_RNA (1)...(19): siRNA sense strand
gggagaaugugaucauguc

SEQ ID NO: 1189529 - RNA, 19 nt, Homo sapiens
  misc_RNA (1)...(19): siRNA sense strand
gcaaagacaacaccaucga

SEQ ID NO: 1189530 - RNA, 19 nt, Homo sapiens
  misc_RNA (1)...(19): siRNA sense strand
ucuccaaccuggccucuga

SEQ ID NO: 1189531 - RNA, 19 nt, Homo sapiens
  misc_RNA (1)...(19): siRNA sense strand
ggcaggacaucaccaccaa

SEQ ID NO: 1189532 - RNA, 19 nt, Homo sapiens
  misc_RNA (1)...(19): siRNA sense strand
ccaggaggcucugacuguu

SEQ ID NO: 1189533 - RNA, 19 nt, Homo sapiens
  misc_RNA (1)...(19): siRNA sense strand
aggcggaacuucgacagua

SEQ ID NO: 1189534 - RNA, 19 nt, Homo sapiens
  misc_RNA (1)...(19): siRNA sense strand
ucaagcccauccuagagaa

SEQ ID NO: 1189535 - RNA, 19 nt, Homo sapiens
  misc_RNA (1)...(19): siRNA sense strand
gccaauguccgcuucaaug

SEQ ID NO: 1189536 - RNA, 19 nt, Homo sapiens
  misc_RNA (1)...(19): siRNA sense strand
uggacaacgucaagaguga

SEQ ID NO: 1189537 - RNA, 19 nt, Homo sapiens
  misc_RNA (1)...(19): siRNA sense strand
ggauguggacgucaaauac

SEQ ID NO: 1189538 - RNA, 19 nt, Homo sapiens
  misc_RNA (1)...(19): siRNA sense strand
gagguacggcugaacauca

SEQ ID NO: 1189539 - RNA, 19 nt, Homo sapiens
  misc_RNA (1)...(19): siRNA sense strand
ggaugagugcccugaggua

SEQ ID NO: 1189540 - RNA, 19 nt, Homo sapiens
  misc_RNA (1)...(19): siRNA sense strand
ucaaagaguucugugaaaa

SEQ ID NO: 1189541 - RNA, 19 nt, Homo sapiens
  misc_RNA (1)...(19): siRNA sense strand
ggccugagaucaccaagac

SEQ ID NO: 1189542 - RNA, 19 nt, Homo sapiens
  misc_RNA (1)...(19): siRNA sense strand
guucacagagcuccagaaa

SEQ ID NO: 1189543 - RNA, 19 nt, Homo sapiens
  misc_RNA (1)...(19): siRNA sense strand
ccaggccgcugaagacaag

SEQ ID NO: 1189544 - RNA, 19 nt, Homo sapiens
  misc_RNA (1)...(19): siRNA sense strand
cccacaaggucaaagaguu

SEQ ID NO: 1189545 - RNA, 19 nt, Homo sapiens
  misc_RNA (1)...(19): siRNA sense strand
caacagcaccuugcagagu

SEQ ID NO: 1189546 - RNA, 19 nt, Homo sapiens
  misc_RNA (1)...(19): siRNA sense strand
ccagcaaccugaagaagcu

SEQ ID NO: 1189547 - RNA, 19 nt, Homo sapiens
  misc_RNA (1)...(19): siRNA sense strand
augagaaacuuaacuccuu

SEQ ID NO: 1189548 - RNA, 19 nt, Homo sapiens
  misc_RNA (1)...(19): siRNA sense strand
gggucucucucccaucuug

SEQ ID NO: 1189549 - RNA, 19 nt, Homo sapiens
  misc_RNA (1)...(19): siRNA sense strand
gggacccgguugccaaugu

SEQ ID NO: 1189550 - RNA, 19 nt, Homo sapiens
  misc_RNA (1)...(19): siRNA sense strand
ccacaaggucaaagaguuc

SEQ ID NO: 1189551 - RNA, 19 nt, Homo sapiens
  misc_RNA (1)...(19): siRNA sense strand
uggccuggcuuguggauca

SEQ ID NO: 1189552 - RNA, 19 nt, Homo sapiens
  misc_RNA (1)...(19): siRNA sense strand
ggcuggccaucauugagua

SEQ ID NO: 1189553 - RNA, 19 nt, Homo sapiens
  misc_RNA (1)...(19): siRNA sense strand
gaagcuaguggaaaaguuu

SEQ ID NO: 1189554 - RNA, 19 nt, Homo sapiens
  misc_RNA (1)...(19): siRNA sense strand
uggagucgcuggccacagu

SEQ ID NO: 1189555 - RNA, 19 nt, Homo sapiens
  misc_RNA (1)...(19): siRNA sense strand
ggccaagucucugcagaag

SEQ ID NO: 1189556 - RNA, 19 nt, Homo sapiens
  misc_RNA (1)...(19): siRNA sense strand
gguguccgaugccaaccaa

SEQ ID NO: 1189557 - RNA, 19 nt, Homo sapiens
  misc_RNA (1)...(19): siRNA sense strand
gcuacaugguggcugacaa

SEQ ID NO: 1189558 - RNA, 19 nt, Homo sapiens
  misc_RNA (1)...(19): siRNA sense strand
ccaauguccgcuucaaugu

SEQ ID NO: 1189559 - RNA, 19 nt, Homo sapiens
  misc_RNA (1)...(19): siRNA sense strand
guggaguucuuugaugaga

SEQ ID NO: 1189560 - RNA, 19 nt, Homo sapiens
  misc_RNA (1)...(19): siRNA sense strand
ccaucgcggugcucauaga

SEQ ID NO: 1189561 - RNA, 19 nt, Homo sapiens
  misc_RNA (1)...(19): siRNA sense strand
cggaaccugugcucagaug

SEQ ID NO: 1189562 - RNA, 19 nt, Homo sapiens
  misc_RNA (1)...(19): siRNA sense strand
gcccuggccucagucauca

SEQ ID NO: 1189563 - RNA, 19 nt, Homo sapiens
  misc_RNA (1)...(19): siRNA sense strand
guugaaaggacccgaagug

SEQ ID NO: 1189564 - RNA, 19 nt, Homo sapiens
  misc_RNA (1)...(19): siRNA sense strand
caaugaggacguucagcuu

SEQ ID NO: 1189565 - RNA, 19 nt, Homo sapiens
  misc_RNA (1)...(19): siRNA sense strand
cagcugggaaccuucacua

SEQ ID NO: 1189566 - RNA, 19 nt, Homo sapiens
  misc_RNA (1)...(19): siRNA sense strand
ggacccgguugccaauguc

SEQ ID NO: 1189567 - RNA, 19 nt, Homo sapiens
  misc_RNA (1)...(19): siRNA sense strand
ggccaucauugaguacaug

SEQ ID NO: 1189568 - RNA, 19 nt, Homo sapiens
  misc_RNA (1)...(19): siRNA sense strand
cggcugaacaucaucucua

SEQ ID NO: 1189569 - RNA, 19 nt, Homo sapiens
  misc_RNA (1)...(19): siRNA sense strand
caccaucgagcaccucuug

SEQ ID NO: 1189570 - RNA, 19 nt, Homo sapiens
  misc_RNA (1)...(19): siRNA sense strand
gcuucugccuuuccuuaca

SEQ ID NO: 1189571 - RNA, 19 nt, Homo sapiens
  misc_RNA (1)...(19): siRNA sense strand
ccgcaugacuacgcucuuc

SEQ ID NO: 1189572 - RNA, 19 nt, Homo sapiens
  misc_RNA (1)...(19): siRNA sense strand
ugaagucaagcccauccua

SEQ ID NO: 1189573 - RNA, 19 nt, Homo sapiens
  misc_RNA (1)...(19): siRNA sense strand
cgucaagagugagaucauc

SEQ ID NO: 1189574 - RNA, 19 nt, Homo sapiens
  misc_RNA (1)...(19): siRNA sense strand
gcuucaauguggccaaguc

SEQ ID NO: 1189575 - RNA, 19 nt, Homo sapiens
  misc_RNA (1)...(19): siRNA sense strand
acuacgcucuucugcauca

SEQ ID NO: 1189576 - RNA, 19 nt, Homo sapiens
  misc_RNA (1)...(19): siRNA sense strand
gaaaaccucucagcugacu

SEQ ID NO: 1189577 - RNA, 19 nt, Homo sapiens
  misc_RNA (1)...(19): siRNA sense strand
gaugccaaccaacauguca

SEQ ID NO: 1189578 - RNA, 19 nt, Homo sapiens
  misc_RNA (1)...(19): siRNA sense strand
gggaguggaguucuuugau

SEQ ID NO: 1189579 - RNA, 19 nt, Homo sapiens
  misc_RNA (1)...(19): siRNA sense strand
gcugggaguggaguucuuu

SEQ ID NO: 1189580 - RNA, 19 nt, Homo sapiens
  misc_RNA (1)...(19): siRNA sense strand
gaaccugugcucagaugac

SEQ ID NO: 1189581 - RNA, 19 nt, Homo sapiens
  misc_RNA (1)...(19): siRNA sense strand
ucaacagcaucaagaagcu

SEQ ID NO: 1189582 - RNA, 19 nt, Homo sapiens
  misc_RNA (1)...(19): siRNA sense strand
gcccugagguacggcugaa

SEQ ID NO: 1189583 - RNA, 19 nt, Homo sapiens
  misc_RNA (1)...(19): siRNA sense strand
gaaccugaugaaagacugu

SEQ ID NO: 1189584 - RNA, 19 nt, Homo sapiens
  misc_RNA (1)...(19): siRNA sense strand
gacaacgucaagagugaga

SEQ ID NO: 1189585 - RNA, 19 nt, Homo sapiens
  misc_RNA (1)...(19): siRNA sense strand
ccaaccaacaugucaaguc

SEQ ID NO: 1189586 - RNA, 19 nt, Homo sapiens
  misc_RNA (1)...(19): siRNA sense strand
agacaguggugcgggacaa

SEQ ID NO: 1189587 - RNA, 19 nt, Homo sapiens
  misc_RNA (1)...(19): siRNA sense strand
uaccugcaccgcaugacua

SEQ ID NO: 1189588 - RNA, 19 nt, Homo sapiens
  misc_RNA (1)...(19): siRNA sense strand
ccaccagcaaccugaagaa

SEQ ID NO: 1189589 - RNA, 19 nt, Homo sapiens
  misc_RNA (1)...(19): siRNA sense strand
aaaccucucagcugacugu

SEQ ID NO: 1189590 - RNA, 19 nt, Homo sapiens
  misc_RNA (1)...(19): siRNA sense strand
gucaagcccauccuagaga

SEQ ID NO: 1189591 - RNA, 19 nt, Homo sapiens
  misc_RNA (1)...(19): siRNA sense strand
acagcaccuugcagaguga

SEQ ID NO: 1189592 - RNA, 19 nt, Homo sapiens
  misc_RNA (1)...(19): siRNA sense strand
gugcauggccuggcuugug

SEQ ID NO: 1189593 - RNA, 19 nt, Homo sapiens
  misc_RNA (1)...(19): siRNA sense strand
caacgucaagagugagauc

SEQ ID NO: 1189594 - RNA, 19 nt, Homo sapiens
  misc_RNA (1)...(19): siRNA sense strand
gauguggacgucaaauacu

SEQ ID NO: 1189595 - RNA, 19 nt, Homo sapiens
  misc_RNA (1)...(19): siRNA sense strand
aggauguggacgucaaaua

SEQ ID NO: 1189596 - RNA, 19 nt, Homo sapiens
  misc_RNA (1)...(19): siRNA sense strand
caauguccgcuucaaugug

SEQ ID NO: 1189597 - RNA, 19 nt, Homo sapiens
  misc_RNA (1)...(19): siRNA sense strand
ggcggaacuucgacaguac

SEQ ID NO: 1189598 - RNA, 19 nt, Homo sapiens
  misc_RNA (1)...(19): siRNA sense strand
uaaccuggacugugugaac

SEQ ID NO: 1189599 - RNA, 19 nt, Homo sapiens
  misc_RNA (1)...(19): siRNA sense strand
gaacgaaucuacccauuac

SEQ ID NO: 1189600 - RNA, 19 nt, Homo sapiens
  misc_RNA (1)...(19): siRNA sense strand
gaacaccaaugaacguuug

SEQ ID NO: 1189601 - RNA, 19 nt, Homo sapiens
  misc_RNA (1)...(19): siRNA sense strand
ggaacgaaucuacccauua

SEQ ID NO: 1189602 - RNA, 19 nt, Homo sapiens
  misc_RNA (1)...(19): siRNA sense strand
ccucgagggugcagaguua

SEQ ID NO: 1189603 - RNA, 19 nt, Homo sapiens
  misc_RNA (1)...(19): siRNA sense strand
gcaccuacguagucugcua

SEQ ID NO: 1189604 - RNA, 19 nt, Homo sapiens
  misc_RNA (1)...(19): siRNA sense strand
caaaggaccugcagaucca

SEQ ID NO: 1189605 - RNA, 19 nt, Homo sapiens
  misc_RNA (1)...(19): siRNA sense strand
ucacggaaauggaggaaga

SEQ ID NO: 1189606 - RNA, 19 nt, Homo sapiens
  misc_RNA (1)...(19): siRNA sense strand
gaaccacaguugcuuugag

SEQ ID NO: 1189607 - RNA, 19 nt, Homo sapiens
  misc_RNA (1)...(19): siRNA sense strand
gagcaacucuaagaucauc

SEQ ID NO: 1189608 - RNA, 19 nt, Homo sapiens
  misc_RNA (1)...(19): siRNA sense strand
ggagaaccacaguugcuuu

SEQ ID NO: 1189609 - RNA, 19 nt, Homo sapiens
  misc_RNA (1)...(19): siRNA sense strand
cagaaccaauuccggacua

SEQ ID NO: 1189610 - RNA, 19 nt, Homo sapiens
  misc_RNA (1)...(19): siRNA sense strand
aauaugaggugaccguuca

SEQ ID NO: 1189611 - RNA, 19 nt, Homo sapiens
  misc_RNA (1)...(19): siRNA sense strand
acagugaugacaccaaaua

SEQ ID NO: 1189612 - RNA, 19 nt, Homo sapiens
  misc_RNA (1)...(19): siRNA sense strand
gaaauagcguccucuuccu

SEQ ID NO: 1189613 - RNA, 19 nt, Homo sapiens
  misc_RNA (1)...(19): siRNA sense strand
caaaccaccaguccaagaa

SEQ ID NO: 1189614 - RNA, 19 nt, Homo sapiens
  misc_RNA (1)...(19): siRNA sense strand
gagcagcaguggcaaagcu

SEQ ID NO: 1189615 - RNA, 19 nt, Homo sapiens
  misc_RNA (1)...(19): siRNA sense strand
auacagugaugacaccaaa

SEQ ID NO: 1189616 - RNA, 19 nt, Homo sapiens
  misc_RNA (1)...(19): siRNA sense strand
caacgucacacucacucua

SEQ ID NO: 1189617 - RNA, 19 nt, Homo sapiens
  misc_RNA (1)...(19): siRNA sense strand
gguuugaguuucuguccaa

SEQ ID NO: 1189618 - RNA, 19 nt, Homo sapiens
  misc_RNA (1)...(19): siRNA sense strand
gagaaccacaguugcuuug

SEQ ID NO: 1189619 - RNA, 19 nt, Homo sapiens
  misc_RNA (1)...(19): siRNA sense strand
gaaccucuacucagcagau

SEQ ID NO: 1189620 - RNA, 19 nt, Homo sapiens
  misc_RNA (1)...(19): siRNA sense strand
gaauaguaccugccuggau

SEQ ID NO: 1189621 - RNA, 19 nt, Homo sapiens
  misc_RNA (1)...(19): siRNA sense strand
ccgagggacucacggaaau

SEQ ID NO: 1189622 - RNA, 19 nt, Homo sapiens
  misc_RNA (1)...(19): siRNA sense strand
uaaacugcacggucaagaa

SEQ ID NO: 1189623 - RNA, 19 nt, Homo sapiens
  misc_RNA (1)...(19): siRNA sense strand
gcagauccagcccuucuuc

SEQ ID NO: 1189624 - RNA, 19 nt, Homo sapiens
  misc_RNA (1)...(19): siRNA sense strand
gcccagaccagaagaguuc

SEQ ID NO: 1189625 - RNA, 19 nt, Homo sapiens
  misc_RNA (1)...(19): siRNA sense strand
gcacauggagaaccacagu

SEQ ID NO: 1189626 - RNA, 19 nt, Homo sapiens
  misc_RNA (1)...(19): siRNA sense strand
aauggacacugcagacaga

SEQ ID NO: 1189627 - RNA, 19 nt, Homo sapiens
  misc_RNA (1)...(19): siRNA sense strand
guaaccacgccaugcauga

SEQ ID NO: 1189628 - RNA, 19 nt, Homo sapiens
  misc_RNA (1)...(19): siRNA sense strand
gcaccucgaaggcuugaug

SEQ ID NO: 1189629 - RNA, 19 nt, Homo sapiens
  misc_RNA (1)...(19): siRNA sense strand
ccaaaccaccaguccaaga

SEQ ID NO: 1189630 - RNA, 19 nt, Homo sapiens
  misc_RNA (1)...(19): siRNA sense strand
aaacugcacggucaagaau

SEQ ID NO: 1189631 - RNA, 19 nt, Homo sapiens
  misc_RNA (1)...(19): siRNA sense strand
gccagacacuccagaacca

SEQ ID NO: 1189632 - RNA, 19 nt, Homo sapiens
  misc_RNA (1)...(19): siRNA sense strand
ccgacugguucgaauguga

SEQ ID NO: 1189633 - RNA, 19 nt, Homo sapiens
  misc_RNA (1)...(19): siRNA sense strand
uaucuguccugcagcugaa

SEQ ID NO: 1189634 - RNA, 19 nt, Homo sapiens
  misc_RNA (1)...(19): siRNA sense strand
aggaaggucuggaucaucu

SEQ ID NO: 1189635 - RNA, 19 nt, Homo sapiens
  misc_RNA (1)...(19): siRNA sense strand
uggaacgaaucuacccauu

SEQ ID NO: 1189636 - RNA, 19 nt, Homo sapiens
  misc_RNA (1)...(19): siRNA sense strand
cacaggcgguggcguuuua

SEQ ID NO: 1189637 - RNA, 19 nt, Homo sapiens
  misc_RNA (1)...(19): siRNA sense strand
gcacaugcaccacauaccu

SEQ ID NO: 1189638 - RNA, 19 nt, Homo sapiens
  misc_RNA (1)...(19): siRNA sense strand
aaccaccaguccaagaauu

SEQ ID NO: 1189639 - RNA, 19 nt, Homo sapiens
  misc_RNA (1)...(19): siRNA sense strand
ggacgaagagguguuugag

SEQ ID NO: 1189640 - RNA, 19 nt, Homo sapiens
  misc_RNA (1)...(19): siRNA sense strand
gcaguagacccgccauggu

SEQ ID NO: 1189641 - RNA, 19 nt, Homo sapiens
  misc_RNA (1)...(19): siRNA sense strand
gugcgucagguuugaguuu

SEQ ID NO: 1189642 - RNA, 19 nt, Homo sapiens
  misc_RNA (1)...(19): siRNA sense strand
uagcugggccuggaaguga

SEQ ID NO: 1189643 - RNA, 19 nt, Homo sapiens
  misc_RNA (1)...(19): siRNA sense strand
uguccaaacugaggcauca

SEQ ID NO: 1189644 - RNA, 19 nt, Homo sapiens
  misc_RNA (1)...(19): siRNA sense strand
gcgaaauagcguccucuuc

SEQ ID NO: 1189645 - RNA, 19 nt, Homo sapiens
  misc_RNA (1)...(19): siRNA sense strand
gaggagcagcaguggcaaa

SEQ ID NO: 1189646 - RNA, 19 nt, Homo sapiens
  misc_RNA (1)...(19): siRNA sense strand
gagcacaugcaccacauac

SEQ ID NO: 1189647 - RNA, 19 nt, Homo sapiens
  misc_RNA (1)...(19): siRNA sense strand
agauccugcugaccaguuu

SEQ ID NO: 1189648 - RNA, 19 nt, Homo sapiens
  misc_RNA (1)...(19): siRNA sense strand
gcuugaugcucucgcucuu

SEQ ID NO: 1189649 - RNA, 19 nt, Homo sapiens
  misc_RNA (1)...(19): siRNA sense strand
ggaaggucuggaucaucua

SEQ ID NO: 1189650 - RNA, 19 nt, Homo sapiens
  misc_RNA (1)...(19): siRNA sense strand
ggaggaagaggaggaagag

SEQ ID NO: 1189651 - RNA, 19 nt, Homo sapiens
  misc_RNA (1)...(19): siRNA sense strand
gcagcugaacaccaaugaa

SEQ ID NO: 1189652 - RNA, 19 nt, Homo sapiens
  misc_RNA (1)...(19): siRNA sense strand
uccgccagcugcagaagaa

SEQ ID NO: 1189653 - RNA, 19 nt, Homo sapiens
  misc_RNA (1)...(19): siRNA sense strand
gaaggucuggaucaucuac

SEQ ID NO: 1189654 - RNA, 19 nt, Homo sapiens
  misc_RNA (1)...(19): siRNA sense strand
ugaacaccaaugaacguuu

SEQ ID NO: 1189655 - RNA, 19 nt, Homo sapiens
  misc_RNA (1)...(19): siRNA sense strand
acauggagaaccacaguug

SEQ ID NO: 1189656 - RNA, 19 nt, Homo sapiens
  misc_RNA (1)...(19): siRNA sense strand
cccuggaccugcuggaaga

SEQ ID NO: 1189657 - RNA, 19 nt, Homo sapiens
  misc_RNA (1)...(19): siRNA sense strand
agacacuccgcgacuguuu

SEQ ID NO: 1189658 - RNA, 19 nt, Homo sapiens
  misc_RNA (1)...(19): siRNA sense strand
cagcugaacaccaaugaac

SEQ ID NO: 1189659 - RNA, 19 nt, Homo sapiens
  misc_RNA (1)...(19): siRNA sense strand
gaaccaauuccggacuaca

SEQ ID NO: 1189660 - RNA, 19 nt, Homo sapiens
  misc_RNA (1)...(19): siRNA sense strand
gcacggucaagaauaguac

SEQ ID NO: 1189661 - RNA, 19 nt, Homo sapiens
  misc_RNA (1)...(19): siRNA sense strand
uggguguacugguucauca

SEQ ID NO: 1189662 - RNA, 19 nt, Homo sapiens
  misc_RNA (1)...(19): siRNA sense strand
agacacuccagaaccaauu

SEQ ID NO: 1189663 - RNA, 19 nt, Homo sapiens
  misc_RNA (1)...(19): siRNA sense strand
ucacucuacgcaaccuuaa

SEQ ID NO: 1189664 - RNA, 19 nt, Homo sapiens
  misc_RNA (1)...(19): siRNA sense strand
gugaggagaucguggucua

SEQ ID NO: 1189665 - RNA, 19 nt, Homo sapiens
  misc_RNA (1)...(19): siRNA sense strand
gaagaggcccaucguguuc

SEQ ID NO: 1189666 - RNA, 19 nt, Homo sapiens
  misc_RNA (1)...(19): siRNA sense strand
gcgcaacuauucacacuac

SEQ ID NO: 1189667 - RNA, 19 nt, Homo sapiens
  misc_RNA (1)...(19): siRNA sense strand
gagacacgcucuacauggu

SEQ ID NO: 1189668 - RNA, 19 nt, Homo sapiens
  misc_RNA (1)...(19): siRNA sense strand
ggucuucucugccgucuac

SEQ ID NO: 1189669 - RNA, 19 nt, Homo sapiens
  misc_RNA (1)...(19): siRNA sense strand
cuagaugagugucagaugu

SEQ ID NO: 1189670 - RNA, 19 nt, Homo sapiens
  misc_RNA (1)...(19): siRNA sense strand
caacuauucacacuacuuc

SEQ ID NO: 1189671 - RNA, 19 nt, Homo sapiens
  misc_RNA (1)...(19): siRNA sense strand
gcaacuauucacacuacuu

SEQ ID NO: 1189672 - RNA, 19 nt, Homo sapiens
  misc_RNA (1)...(19): siRNA sense strand
uagaugagugucagaugua

SEQ ID NO: 1189673 - RNA, 19 nt, Homo sapiens
  misc_RNA (1)...(19): siRNA sense strand
agaagaggcccaucguguu

SEQ ID NO: 1189674 - RNA, 19 nt, Homo sapiens
  misc_RNA (1)...(19): siRNA sense strand
gaggagaucguggucuaug

SEQ ID NO: 1189675 - RNA, 19 nt, Homo sapiens
  misc_RNA (1)...(19): siRNA sense strand
guccagcuccggccaaaug

SEQ ID NO: 1189676 - RNA, 19 nt, Homo sapiens
  misc_RNA (1)...(19): siRNA sense strand
ggacgagacgggcaagaac

SEQ ID NO: 1189677 - RNA, 19 nt, Homo sapiens
  misc_RNA (1)...(19): siRNA sense strand
ggucggcucgugcucauca

SEQ ID NO: 1189678 - RNA, 19 nt, Homo sapiens
  misc_RNA (1)...(19): siRNA sense strand
ggagcugugugaggagauc

SEQ ID NO: 1189679 - RNA, 19 nt, Homo sapiens
  misc_RNA (1)...(19): siRNA sense strand
ugccuuaccacuacuuuga

SEQ ID NO: 1189680 - RNA, 19 nt, Homo sapiens
  misc_RNA (1)...(19): siRNA sense strand
ccuuaccacuacuuugaga

SEQ ID NO: 1189681 - RNA, 19 nt, Homo sapiens
  misc_RNA (1)...(19): siRNA sense strand
ucacugagaaggcggucuu

SEQ ID NO: 1189682 - RNA, 19 nt, Homo sapiens
  misc_RNA (1)...(19): siRNA sense strand
gcuagaugagugucagaug

SEQ ID NO: 1189683 - RNA, 19 nt, Homo sapiens
  misc_RNA (1)...(19): siRNA sense strand
gugaggagaucguggucua

SEQ ID NO: 1189684 - RNA, 19 nt, Homo sapiens
  misc_RNA (1)...(19): siRNA sense strand
gaagaggcccaucguguuc

SEQ ID NO: 1189685 - RNA, 19 nt, Homo sapiens
  misc_RNA (1)...(19): siRNA sense strand
gcgcaacuauucacacuac

SEQ ID NO: 1189686 - RNA, 19 nt, Homo sapiens
  misc_RNA (1)...(19): siRNA sense strand
gagacacgcucuacauggu

SEQ ID NO: 1189687 - RNA, 19 nt, Homo sapiens
  misc_RNA (1)...(19): siRNA sense strand
ggucuucucugccgucuac

SEQ ID NO: 1189688 - RNA, 19 nt, Homo sapiens
  misc_RNA (1)...(19): siRNA sense strand
cuagaugagugucagaugu

SEQ ID NO: 1189689 - RNA, 19 nt, Homo sapiens
  misc_RNA (1)...(19): siRNA sense strand
caacuauucacacuacuuc

SEQ ID NO: 1189690 - RNA, 19 nt, Homo sapiens
  misc_RNA (1)...(19): siRNA sense strand
gcaacuauucacacuacuu

SEQ ID NO: 1189691 - RNA, 19 nt, Homo sapiens
  misc_RNA (1)...(19): siRNA sense strand
uagaugagugucagaugua

SEQ ID NO: 1189692 - RNA, 19 nt, Homo sapiens
  misc_RNA (1)...(19): siRNA sense strand
agaagaggcccaucguguu

SEQ ID NO: 1189693 - RNA, 19 nt, Homo sapiens
  misc_RNA (1)...(19): siRNA sense strand
gaggagaucguggucuaug

SEQ ID NO: 1189694 - RNA, 19 nt, Homo sapiens
  misc_RNA (1)...(19): siRNA sense strand
guccagcuccggccaaaug

SEQ ID NO: 1189695 - RNA, 19 nt, Homo sapiens
  misc_RNA (1)...(19): siRNA sense strand
ggacgagacgggcaagaac

SEQ ID NO: 1189696 - RNA, 19 nt, Homo sapiens
  misc_RNA (1)...(19): siRNA sense strand
ggucggcucgugcucauca

SEQ ID NO: 1189697 - RNA, 19 nt, Homo sapiens
  misc_RNA (1)...(19): siRNA sense strand
ggagcugugugaggagauc

SEQ ID NO: 1189698 - RNA, 19 nt, Homo sapiens
  misc_RNA (1)...(19): siRNA sense strand
ugccuuaccacuacuuuga

SEQ ID NO: 1189699 - RNA, 19 nt, Homo sapiens
  misc_RNA (1)...(19): siRNA sense strand
ccuuaccacuacuuugaga

SEQ ID NO: 1189700 - RNA, 19 nt, Homo sapiens
  misc_RNA (1)...(19): siRNA sense strand
ucacugagaaggcggucuu

SEQ ID NO: 1189701 - RNA, 19 nt, Homo sapiens
  misc_RNA (1)...(19): siRNA sense strand
gcuagaugagugucagaug

SEQ ID NO: 1189702 - RNA, 19 nt, Homo sapiens
  misc_RNA (1)...(19): siRNA sense strand
gugaggagaucguggucua

SEQ ID NO: 1189703 - RNA, 19 nt, Homo sapiens
  misc_RNA (1)...(19): siRNA sense strand
gaagaggcccaucguguuc

SEQ ID NO: 1189704 - RNA, 19 nt, Homo sapiens
  misc_RNA (1)...(19): siRNA sense strand
gcgcaacuauucacacuac

SEQ ID NO: 1189705 - RNA, 19 nt, Homo sapiens
  misc_RNA (1)...(19): siRNA sense strand
gagacacgcucuacauggu

SEQ ID NO: 1189706 - RNA, 19 nt, Homo sapiens
  misc_RNA (1)...(19): siRNA sense strand
cuagaugagugucagaugu

SEQ ID NO: 1189707 - RNA, 19 nt, Homo sapiens
  misc_RNA (1)...(19): siRNA sense strand
caacuauucacacuacuuc

SEQ ID NO: 1189708 - RNA, 19 nt, Homo sapiens
  misc_RNA (1)...(19): siRNA sense strand
gcaacuauucacacuacuu

SEQ ID NO: 1189709 - RNA, 19 nt, Homo sapiens
  misc_RNA (1)...(19): siRNA sense strand
uagaugagugucagaugua

SEQ ID NO: 1189710 - RNA, 19 nt, Homo sapiens
  misc_RNA (1)...(19): siRNA sense strand
agaagaggcccaucguguu

SEQ ID NO: 1189711 - RNA, 19 nt, Homo sapiens
  misc_RNA (1)...(19): siRNA sense strand
gaggagaucguggucuaug

SEQ ID NO: 1189712 - RNA, 19 nt, Homo sapiens
  misc_RNA (1)...(19): siRNA sense strand
ggacgagacgggcaagaac

SEQ ID NO: 1189713 - RNA, 19 nt, Homo sapiens
  misc_RNA (1)...(19): siRNA sense strand
ggagcugugugaggagauc

SEQ ID NO: 1189714 - RNA, 19 nt, Homo sapiens
  misc_RNA (1)...(19): siRNA sense strand
ugccuuaccacuacuuuga

SEQ ID NO: 1189715 - RNA, 19 nt, Homo sapiens
  misc_RNA (1)...(19): siRNA sense strand
ccuuaccacuacuuugaga

SEQ ID NO: 1189716 - RNA, 19 nt, Homo sapiens
  misc_RNA (1)...(19): siRNA sense strand
ucacugagaaggcggucuu

SEQ ID NO: 1189717 - RNA, 19 nt, Homo sapiens
  misc_RNA (1)...(19): siRNA sense strand
gcuagaugagugucagaug

SEQ ID NO: 1189718 - RNA, 19 nt, Homo sapiens
  misc_RNA (1)...(19): siRNA sense strand
gcacaucacugcugucuug

SEQ ID NO: 1189719 - RNA, 19 nt, Homo sapiens
  misc_RNA (1)...(19): siRNA sense strand
gaaaagcccugaagaagaa

SEQ ID NO: 1189720 - RNA, 19 nt, Homo sapiens
  misc_RNA (1)...(19): siRNA sense strand
ggagugcccucggcugaua

SEQ ID NO: 1189721 - RNA, 19 nt, Homo sapiens
  misc_RNA (1)...(19): siRNA sense strand
ggacgaggaugaagaaugc

SEQ ID NO: 1189722 - RNA, 19 nt, Homo sapiens
  misc_RNA (1)...(19): siRNA sense strand
acuauaagcuucccaauuc

SEQ ID NO: 1189723 - RNA, 19 nt, Homo sapiens
  misc_RNA (1)...(19): siRNA sense strand
ucacugcugucuugacuaa

SEQ ID NO: 1189724 - RNA, 19 nt, Homo sapiens
  misc_RNA (1)...(19): siRNA sense strand
ucaagaagcugagcaggaa

SEQ ID NO: 1189725 - RNA, 19 nt, Homo sapiens
  misc_RNA (1)...(19): siRNA sense strand
gcccuccucucucuucuua

SEQ ID NO: 1189726 - RNA, 19 nt, Homo sapiens
  misc_RNA (1)...(19): siRNA sense strand
ccaacuuccuggaucauuu

SEQ ID NO: 1189727 - RNA, 19 nt, Homo sapiens
  misc_RNA (1)...(19): siRNA sense strand
gcaacccgcuguccugugu

SEQ ID NO: 1189728 - RNA, 19 nt, Homo sapiens
  misc_RNA (1)...(19): siRNA sense strand
gaccagcugucguuaggaa

SEQ ID NO: 1189729 - RNA, 19 nt, Homo sapiens
  misc_RNA (1)...(19): siRNA sense strand
gucaauagcuucaucuucu

SEQ ID NO: 1189730 - RNA, 19 nt, Homo sapiens
  misc_RNA (1)...(19): siRNA sense strand
aagaauggcugcacaugga

SEQ ID NO: 1189731 - RNA, 19 nt, Homo sapiens
  misc_RNA (1)...(19): siRNA sense strand
gcuagcaggcagugucuua

SEQ ID NO: 1189732 - RNA, 19 nt, Homo sapiens
  misc_RNA (1)...(19): siRNA sense strand
gacuauaguucgagaguuc

SEQ ID NO: 1189733 - RNA, 19 nt, Homo sapiens
  misc_RNA (1)...(19): siRNA sense strand
cagcuugguugcuuucuug

SEQ ID NO: 1189734 - RNA, 19 nt, Homo sapiens
  misc_RNA (1)...(19): siRNA sense strand
gaagaaugcccagcaggaa

SEQ ID NO: 1189735 - RNA, 19 nt, Homo sapiens
  misc_RNA (1)...(19): siRNA sense strand
gcucaugcccggaggauug

SEQ ID NO: 1189736 - RNA, 19 nt, Homo sapiens
  misc_RNA (1)...(19): siRNA sense strand
gccaagggcccaucaguug

SEQ ID NO: 1189737 - RNA, 19 nt, Homo sapiens
  misc_RNA (1)...(19): siRNA sense strand
gcuuugacguucccucuga

SEQ ID NO: 1189738 - RNA, 19 nt, Homo sapiens
  misc_RNA (1)...(19): siRNA sense strand
gaugcaggcucgauucagu

SEQ ID NO: 1189739 - RNA, 19 nt, Homo sapiens
  misc_RNA (1)...(19): siRNA sense strand
gcucagggaucaagaagcu

SEQ ID NO: 1189740 - RNA, 19 nt, Homo sapiens
  misc_RNA (1)...(19): siRNA sense strand
cagcgucgguucaguguca

SEQ ID NO: 1189741 - RNA, 19 nt, Homo sapiens
  misc_RNA (1)...(19): siRNA sense strand
gaaagaauggcugcacaug

SEQ ID NO: 1189742 - RNA, 19 nt, Homo sapiens
  misc_RNA (1)...(19): siRNA sense strand
gcacuuccagagucaguuu

SEQ ID NO: 1189743 - RNA, 19 nt, Homo sapiens
  misc_RNA (1)...(19): siRNA sense strand
caacagugcuccaaaaugg

SEQ ID NO: 1189744 - RNA, 19 nt, Homo sapiens
  misc_RNA (1)...(19): siRNA sense strand
gcagugcaguuggugaaga

SEQ ID NO: 1189745 - RNA, 19 nt, Homo sapiens
  misc_RNA (1)...(19): siRNA sense strand
gcacggcucaugugugugu

SEQ ID NO: 1189746 - RNA, 19 nt, Homo sapiens
  misc_RNA (1)...(19): siRNA sense strand
gaagagaacauagcaagac

SEQ ID NO: 1189747 - RNA, 19 nt, Homo sapiens
  misc_RNA (1)...(19): siRNA sense strand
gcacuggcacugcaugugu

SEQ ID NO: 1189748 - RNA, 19 nt, Homo sapiens
  misc_RNA (1)...(19): siRNA sense strand
cagcaccuccugcacuaua

SEQ ID NO: 1189749 - RNA, 19 nt, Homo sapiens
  misc_RNA (1)...(19): siRNA sense strand
gacagcaccuucucuuggu

SEQ ID NO: 1189750 - RNA, 19 nt, Homo sapiens
  misc_RNA (1)...(19): siRNA sense strand
ucacugcccuccucucucu

SEQ ID NO: 1189751 - RNA, 19 nt, Homo sapiens
  misc_RNA (1)...(19): siRNA sense strand
ggccagggcgguuaccuuu

SEQ ID NO: 1189752 - RNA, 19 nt, Homo sapiens
  misc_RNA (1)...(19): siRNA sense strand
ggaaaagcccugaagaaga

SEQ ID NO: 1189753 - RNA, 19 nt, Homo sapiens
  misc_RNA (1)...(19): siRNA sense strand
gggauguggugauguugga

SEQ ID NO: 1189754 - RNA, 19 nt, Homo sapiens
  misc_RNA (1)...(19): siRNA sense strand
cugugucccuggaguguua

SEQ ID NO: 1189755 - RNA, 19 nt, Homo sapiens
  misc_RNA (1)...(19): siRNA sense strand
gagcaggaagcccagacua

SEQ ID NO: 1189756 - RNA, 19 nt, Homo sapiens
  misc_RNA (1)...(19): siRNA sense strand
uggcacggcucaugugugu

SEQ ID NO: 1189757 - RNA, 19 nt, Homo sapiens
  misc_RNA (1)...(19): siRNA sense strand
ccagggcgguuaccuuuac

SEQ ID NO: 1189758 - RNA, 19 nt, Homo sapiens
  misc_RNA (1)...(19): siRNA sense strand
gcaggaagcccagacuauc

SEQ ID NO: 1189759 - RNA, 19 nt, Homo sapiens
  misc_RNA (1)...(19): siRNA sense strand
ucccuggccugacgucuuu

SEQ ID NO: 1189760 - RNA, 19 nt, Homo sapiens
  misc_RNA (1)...(19): siRNA sense strand
ugaccucuaugccaacuuc

SEQ ID NO: 1189761 - RNA, 19 nt, Homo sapiens
  misc_RNA (1)...(19): siRNA sense strand
agcaacaucugguaagaga

SEQ ID NO: 1189762 - RNA, 19 nt, Homo sapiens
  misc_RNA (1)...(19): siRNA sense strand
ggcuguggcucaugucaau

SEQ ID NO: 1189763 - RNA, 19 nt, Homo sapiens
  misc_RNA (1)...(19): siRNA sense strand
acacagugccuccugaaga

SEQ ID NO: 1189764 - RNA, 19 nt, Homo sapiens
  misc_RNA (1)...(19): siRNA sense strand
cugcuaaugucaccaagga

SEQ ID NO: 1189765 - RNA, 19 nt, Homo sapiens
  misc_RNA (1)...(19): siRNA sense strand
caacaucugguaagagaag

SEQ ID NO: 1189766 - RNA, 19 nt, Homo sapiens
  misc_RNA (1)...(19): siRNA sense strand
gaugaggacccagaagaga

SEQ ID NO: 1189767 - RNA, 19 nt, Homo sapiens
  misc_RNA (1)...(19): siRNA sense strand
ccuccucucucuucuuaau

SEQ ID NO: 1189768 - RNA, 19 nt, Homo sapiens
  misc_RNA (1)...(19): siRNA sense strand
ggaugcugguuuccucuuc

SEQ ID NO: 1189769 - RNA, 19 nt, Homo sapiens
  misc_RNA (1)...(19): siRNA sense strand
ggaaggggcucagggauca

SEQ ID NO: 1189770 - RNA, 19 nt, Homo sapiens
  misc_RNA (1)...(19): siRNA sense strand
ucagcaacaucugguaaga

SEQ ID NO: 1189771 - RNA, 19 nt, Homo sapiens
  misc_RNA (1)...(19): siRNA sense strand
caucuuugcccaggaaauu

SEQ ID NO: 1189772 - RNA, 19 nt, Homo sapiens
  misc_RNA (1)...(19): siRNA sense strand
gcccagugguguugcuuuc

SEQ ID NO: 1189773 - RNA, 19 nt, Homo sapiens
  misc_RNA (1)...(19): siRNA sense strand
acugcuaccugacucauug

SEQ ID NO: 1189774 - RNA, 19 nt, Homo sapiens
  misc_RNA (1)...(19): siRNA sense strand
cagugcaguuggugaagaa

SEQ ID NO: 1189775 - RNA, 19 nt, Homo sapiens
  misc_RNA (1)...(19): siRNA sense strand
gcaaggaggauagcugaag

SEQ ID NO: 1189776 - RNA, 19 nt, Homo sapiens
  misc_RNA (1)...(19): siRNA sense strand
caggcucgauucagucuuc

SEQ ID NO: 1189777 - RNA, 19 nt, Homo sapiens
  misc_RNA (1)...(19): siRNA sense strand
gcugcccucuaucauggua

SEQ ID NO: 1189778 - RNA, 19 nt, Homo sapiens
  misc_RNA (1)...(19): siRNA sense strand
gaccuggcccgacaugaug

SEQ ID NO: 1189779 - RNA, 19 nt, Homo sapiens
  misc_RNA (1)...(19): siRNA sense strand
aagcaucuuugcccaggaa

SEQ ID NO: 1189780 - RNA, 19 nt, Homo sapiens
  misc_RNA (1)...(19): siRNA sense strand
gaauuacuuccuccagugu

SEQ ID NO: 1189781 - RNA, 19 nt, Homo sapiens
  misc_RNA (1)...(19): siRNA sense strand
caucacugcugucuugacu

SEQ ID NO: 1189782 - RNA, 19 nt, Homo sapiens
  misc_RNA (1)...(19): siRNA sense strand
ggcuguggcugccuccuau

SEQ ID NO: 1189783 - RNA, 19 nt, Homo sapiens
  misc_RNA (1)...(19): siRNA sense strand
cuugguugcuuucuugaga

SEQ ID NO: 1189784 - RNA, 19 nt, Homo sapiens
  misc_RNA (1)...(19): siRNA sense strand
cacccaugcugcccucuau

SEQ ID NO: 1189785 - RNA, 19 nt, Homo sapiens
  misc_RNA (1)...(19): siRNA sense strand
gcuccagccucuuguugag

SEQ ID NO: 1189786 - RNA, 19 nt, Homo sapiens
  misc_RNA (1)...(19): siRNA sense strand
ugaggacgaggaugaagaa

SEQ ID NO: 1189787 - RNA, 19 nt, Homo sapiens
  misc_RNA (1)...(19): siRNA sense strand
ggaguaugcugcagaaaac

SEQ ID NO: 1189788 - RNA, 19 nt, Homo sapiens
  misc_RNA (1)...(19): siRNA sense strand
gagacacccacuccuagga

SEQ ID NO: 1189789 - RNA, 19 nt, Homo sapiens
  misc_RNA (1)...(19): siRNA sense strand
cacuauaagcuucccaauu

SEQ ID NO: 1189790 - RNA, 19 nt, Homo sapiens
  misc_RNA (1)...(19): siRNA sense strand
gcucaugucaauagcuuca

SEQ ID NO: 1189791 - RNA, 19 nt, Homo sapiens
  misc_RNA (1)...(19): siRNA sense strand
cauccuggcugugcucauc

SEQ ID NO: 1189792 - RNA, 19 nt, Homo sapiens
  misc_RNA (1)...(19): siRNA sense strand
cccagacuauccaugaaga

SEQ ID NO: 1189793 - RNA, 19 nt, Homo sapiens
  misc_RNA (1)...(19): siRNA sense strand
gggagcagccacagcuuuc

SEQ ID NO: 1189794 - RNA, 19 nt, Homo sapiens
  misc_RNA (1)...(19): siRNA sense strand
caaaaugggguaucagaga

SEQ ID NO: 1189795 - RNA, 19 nt, Homo sapiens
  misc_RNA (1)...(19): siRNA sense strand
gucuuucccugaccucuau

SEQ ID NO: 1189796 - RNA, 19 nt, Homo sapiens
  misc_RNA (1)...(19): siRNA sense strand
gaggaugcaggcucgauuc

SEQ ID NO: 1189797 - RNA, 19 nt, Homo sapiens
  misc_RNA (1)...(19): siRNA sense strand
ggaugaggacccagaagag

SEQ ID NO: 1189798 - RNA, 19 nt, Homo sapiens
  misc_RNA (1)...(19): siRNA sense strand
uggcucaugucaauagcuu

SEQ ID NO: 1189799 - RNA, 19 nt, Homo sapiens
  misc_RNA (1)...(19): siRNA sense strand
gccagggcgguuaccuuua

SEQ ID NO: 1189800 - RNA, 19 nt, Homo sapiens
  misc_RNA (1)...(19): siRNA sense strand
gagacuauaguucgagagu

SEQ ID NO: 1189801 - RNA, 19 nt, Homo sapiens
  misc_RNA (1)...(19): siRNA sense strand
acagcaccuucucuuggua

SEQ ID NO: 1189802 - RNA, 19 nt, Homo sapiens
  misc_RNA (1)...(19): siRNA sense strand
ccagcuugguugcuuucuu

SEQ ID NO: 1189803 - RNA, 19 nt, Homo sapiens
  misc_RNA (1)...(19): siRNA sense strand
ugaagagaacauagcaaga

SEQ ID NO: 1189804 - RNA, 19 nt, Homo sapiens
  misc_RNA (1)...(19): siRNA sense strand
gacuauccaugaagagaac

SEQ ID NO: 1189805 - RNA, 19 nt, Homo sapiens
  misc_RNA (1)...(19): siRNA sense strand
aaucagcaacaucugguaa

SEQ ID NO: 1189806 - RNA, 19 nt, Homo sapiens
  misc_RNA (1)...(19): siRNA sense strand
ggaugaggacgaggaugaa

SEQ ID NO: 1189807 - RNA, 19 nt, Homo sapiens
  misc_RNA (1)...(19): siRNA sense strand
ccagugagcccaggaagag

SEQ ID NO: 1189808 - RNA, 19 nt, Homo sapiens
  misc_RNA (1)...(19): siRNA sense strand
cagcagugcaguuggugaa

SEQ ID NO: 1189809 - RNA, 19 nt, Homo sapiens
  misc_RNA (1)...(19): siRNA sense strand
gcacuauaagcuucccaau

SEQ ID NO: 1189810 - RNA, 19 nt, Homo sapiens
  misc_RNA (1)...(19): siRNA sense strand
ucaauagcuucaucuucuc

SEQ ID NO: 1189811 - RNA, 19 nt, Homo sapiens
  misc_RNA (1)...(19): siRNA sense strand
gacuaagauuauugaacga

SEQ ID NO: 1189812 - RNA, 19 nt, Homo sapiens
  misc_RNA (1)...(19): siRNA sense strand
aggauuggcuccaggacau

SEQ ID NO: 1189813 - RNA, 19 nt, Homo sapiens
  misc_RNA (1)...(19): siRNA sense strand
uagccucacugcucacucu

SEQ ID NO: 1189814 - RNA, 19 nt, Homo sapiens
  misc_RNA (1)...(19): siRNA sense strand
ucagcugggaggaauauug

SEQ ID NO: 1189815 - RNA, 19 nt, Homo sapiens
  misc_RNA (1)...(19): siRNA sense strand
uacaaaguacccugugcua

SEQ ID NO: 1189816 - RNA, 19 nt, Homo sapiens
  misc_RNA (1)...(19): siRNA sense strand
ccuagucuauacaaaguac

SEQ ID NO: 1189817 - RNA, 19 nt, Homo sapiens
  misc_RNA (1)...(19): siRNA sense strand
cacagugccuccugaagac

SEQ ID NO: 1189818 - RNA, 19 nt, Homo sapiens
  misc_RNA (1)...(19): siRNA sense strand
gaaggaugcugguuucuua

SEQ ID NO: 1189819 - RNA, 19 nt, Homo sapiens
  misc_RNA (1)...(19): siRNA sense strand
ggacagacaucaaauuauu

SEQ ID NO: 1189820 - RNA, 19 nt, Homo sapiens
  misc_RNA (1)...(19): siRNA sense strand
gcaaaugccuagagagaua

SEQ ID NO: 1189821 - RNA, 19 nt, Homo sapiens
  misc_RNA (1)...(19): siRNA sense strand
gaaauggagucaacagaaa

SEQ ID NO: 1189822 - RNA, 19 nt, Homo sapiens
  misc_RNA (1)...(19): siRNA sense strand
gcacagaucccaaguacua

SEQ ID NO: 1189823 - RNA, 19 nt, Homo sapiens
  misc_RNA (1)...(19): siRNA sense strand
ggacuuggacuaugagaua

SEQ ID NO: 1189824 - RNA, 19 nt, Homo sapiens
  misc_RNA (1)...(19): siRNA sense strand
gaacgcaacugcacagauc

SEQ ID NO: 1189825 - RNA, 19 nt, Homo sapiens
  misc_RNA (1)...(19): siRNA sense strand
ggaaagugcucgcaaacau

SEQ ID NO: 1189826 - RNA, 19 nt, Homo sapiens
  misc_RNA (1)...(19): siRNA sense strand
ggacaaggccaagcuauaa

SEQ ID NO: 1189827 - RNA, 19 nt, Homo sapiens
  misc_RNA (1)...(19): siRNA sense strand
ggucacaucuggguucaua

SEQ ID NO: 1189828 - RNA, 19 nt, Homo sapiens
  misc_RNA (1)...(19): siRNA sense strand
gaaacuagcgcugacauuu

SEQ ID NO: 1189829 - RNA, 19 nt, Homo sapiens
  misc_RNA (1)...(19): siRNA sense strand
accaagagauucacaaaua

SEQ ID NO: 1189830 - RNA, 19 nt, Homo sapiens
  misc_RNA (1)...(19): siRNA sense strand
gaaauuagagcccucaaau

SEQ ID NO: 1189831 - RNA, 19 nt, Homo sapiens
  misc_RNA (1)...(19): siRNA sense strand
caaacccacuggaagcuua

SEQ ID NO: 1189832 - RNA, 19 nt, Homo sapiens
  misc_RNA (1)...(19): siRNA sense strand
ccauauagauucagaaaca

SEQ ID NO: 1189833 - RNA, 19 nt, Homo sapiens
  misc_RNA (1)...(19): siRNA sense strand
ggauguggcuacgauauaa

SEQ ID NO: 1189834 - RNA, 19 nt, Homo sapiens
  misc_RNA (1)...(19): siRNA sense strand
gagauuacauuaccuugga

SEQ ID NO: 1189835 - RNA, 19 nt, Homo sapiens
  misc_RNA (1)...(19): siRNA sense strand
caaagauguuggugcauuu

SEQ ID NO: 1189836 - RNA, 19 nt, Homo sapiens
  misc_RNA (1)...(19): siRNA sense strand
gcacgagguucgcuuccua

SEQ ID NO: 1189837 - RNA, 19 nt, Homo sapiens
  misc_RNA (1)...(19): siRNA sense strand
gcgcugacauuucuuucua

SEQ ID NO: 1189838 - RNA, 19 nt, Homo sapiens
  misc_RNA (1)...(19): siRNA sense strand
gcacuucucuacuuuccaa

SEQ ID NO: 1189839 - RNA, 19 nt, Homo sapiens
  misc_RNA (1)...(19): siRNA sense strand
gaagggauguggcuacgau

SEQ ID NO: 1189840 - RNA, 19 nt, Homo sapiens
  misc_RNA (1)...(19): siRNA sense strand
ucacagagaccauugauga

SEQ ID NO: 1189841 - RNA, 19 nt, Homo sapiens
  misc_RNA (1)...(19): siRNA sense strand
gggaauaucugggcauuuc

SEQ ID NO: 1189842 - RNA, 19 nt, Homo sapiens
  misc_RNA (1)...(19): siRNA sense strand
cauagugucucaugacuug

SEQ ID NO: 1189843 - RNA, 19 nt, Homo sapiens
  misc_RNA (1)...(19): siRNA sense strand
ugauggccauguuguauua

SEQ ID NO: 1189844 - RNA, 19 nt, Homo sapiens
  misc_RNA (1)...(19): siRNA sense strand
gucauugccuugaacuuua

SEQ ID NO: 1189845 - RNA, 19 nt, Homo sapiens
  misc_RNA (1)...(19): siRNA sense strand
caaaguggguguucacauc

SEQ ID NO: 1189846 - RNA, 19 nt, Homo sapiens
  misc_RNA (1)...(19): siRNA sense strand
ugacauuucuuucuacuuc

SEQ ID NO: 1189847 - RNA, 19 nt, Homo sapiens
  misc_RNA (1)...(19): siRNA sense strand
ucagucaguuuccaguuua

SEQ ID NO: 1189848 - RNA, 19 nt, Homo sapiens
  misc_RNA (1)...(19): siRNA sense strand
gcucuaauacugcauauga

SEQ ID NO: 1189849 - RNA, 19 nt, Homo sapiens
  misc_RNA (1)...(19): siRNA sense strand
caacuuugauggccauguu

SEQ ID NO: 1189850 - RNA, 19 nt, Homo sapiens
  misc_RNA (1)...(19): siRNA sense strand
gaccauugaugaaagcaaa

SEQ ID NO: 1189851 - RNA, 19 nt, Homo sapiens
  misc_RNA (1)...(19): siRNA sense strand
ugacaugugugcgaucaua

SEQ ID NO: 1189852 - RNA, 19 nt, Homo sapiens
  misc_RNA (1)...(19): siRNA sense strand
gcaugcagcucauucaagu

SEQ ID NO: 1189853 - RNA, 19 nt, Homo sapiens
  misc_RNA (1)...(19): siRNA sense strand
gagauugaccucacugaaa

SEQ ID NO: 1189854 - RNA, 19 nt, Homo sapiens
  misc_RNA (1)...(19): siRNA sense strand
gaauuacagcauccgauua

SEQ ID NO: 1189855 - RNA, 19 nt, Homo sapiens
  misc_RNA (1)...(19): siRNA sense strand
cgagagccauacaauauug

SEQ ID NO: 1189856 - RNA, 19 nt, Homo sapiens
  misc_RNA (1)...(19): siRNA sense strand
caucagacagcgaccauua

SEQ ID NO: 1189857 - RNA, 19 nt, Homo sapiens
  misc_RNA (1)...(19): siRNA sense strand
aaaggaagauuucaucaag

SEQ ID NO: 1189858 - RNA, 19 nt, Homo sapiens
  misc_RNA (1)...(19): siRNA sense strand
caaaugcacuugugaugag

SEQ ID NO: 1189859 - RNA, 19 nt, Homo sapiens
  misc_RNA (1)...(19): siRNA sense strand
gaaacccuaucaucaagau

SEQ ID NO: 1189860 - RNA, 19 nt, Homo sapiens
  misc_RNA (1)...(19): siRNA sense strand
gcauuggacucagaauuga

SEQ ID NO: 1189861 - RNA, 19 nt, Homo sapiens
  misc_RNA (1)...(19): siRNA sense strand
gagauccgcuucagcuuca

SEQ ID NO: 1189862 - RNA, 19 nt, Homo sapiens
  misc_RNA (1)...(19): siRNA sense strand
gaaaugggccaguagagau

SEQ ID NO: 1189863 - RNA, 19 nt, Homo sapiens
  misc_RNA (1)...(19): siRNA sense strand
gaggaaggaugcugguuuc

SEQ ID NO: 1189864 - RNA, 19 nt, Homo sapiens
  misc_RNA (1)...(19): siRNA sense strand
ugacacagcucguuuacag

SEQ ID NO: 1189865 - RNA, 19 nt, Homo sapiens
  misc_RNA (1)...(19): siRNA sense strand
gcaaggagauuacauuacc

SEQ ID NO: 1189866 - RNA, 19 nt, Homo sapiens
  misc_RNA (1)...(19): siRNA sense strand
ccggaaacauuaacucuga

SEQ ID NO: 1189867 - RNA, 19 nt, Homo sapiens
  misc_RNA (1)...(19): siRNA sense strand
ggacaaaguguggaccaua

SEQ ID NO: 1189868 - RNA, 19 nt, Homo sapiens
  misc_RNA (1)...(19): siRNA sense strand
aaaguuuacugcaacauga

SEQ ID NO: 1189869 - RNA, 19 nt, Homo sapiens
  misc_RNA (1)...(19): siRNA sense strand
uaagacgucugaaagugaa

SEQ ID NO: 1189870 - RNA, 19 nt, Homo sapiens
  misc_RNA (1)...(19): siRNA sense strand
ggaggaaggaugcugguuu

SEQ ID NO: 1189871 - RNA, 19 nt, Homo sapiens
  misc_RNA (1)...(19): siRNA sense strand
uaggacagacaucaaauua

SEQ ID NO: 1189872 - RNA, 19 nt, Homo sapiens
  misc_RNA (1)...(19): siRNA sense strand
gaaagcaucaacuacaaug

SEQ ID NO: 1189873 - RNA, 19 nt, Homo sapiens
  misc_RNA (1)...(19): siRNA sense strand
ggacucagaauugaaguuu

SEQ ID NO: 1189874 - RNA, 19 nt, Homo sapiens
  misc_RNA (1)...(19): siRNA sense strand
gauggaagcccuuacacuu

SEQ ID NO: 1189875 - RNA, 19 nt, Homo sapiens
  misc_RNA (1)...(19): siRNA sense strand
ggaccauagugucucauga

SEQ ID NO: 1189876 - RNA, 19 nt, Homo sapiens
  misc_RNA (1)...(19): siRNA sense strand
cagcaaggagauuacauua

SEQ ID NO: 1189877 - RNA, 19 nt, Homo sapiens
  misc_RNA (1)...(19): siRNA sense strand
gacaaaguguggaccauag

SEQ ID NO: 1189878 - RNA, 19 nt, Homo sapiens
  misc_RNA (1)...(19): siRNA sense strand
gcauagugccucuggauug

SEQ ID NO: 1189879 - RNA, 19 nt, Homo sapiens
  misc_RNA (1)...(19): siRNA sense strand
gcaccuggaucaccuggau

SEQ ID NO: 1189880 - RNA, 19 nt, Homo sapiens
  misc_RNA (1)...(19): siRNA sense strand
gaaaguuuacugcaacaug

SEQ ID NO: 1189881 - RNA, 19 nt, Homo sapiens
  misc_RNA (1)...(19): siRNA sense strand
ugaccucacugaaagcaaa

SEQ ID NO: 1189882 - RNA, 19 nt, Homo sapiens
  misc_RNA (1)...(19): siRNA sense strand
uuacugggcugauguuauc

SEQ ID NO: 1189883 - RNA, 19 nt, Homo sapiens
  misc_RNA (1)...(19): siRNA sense strand
acaaagauguuggugcauu

SEQ ID NO: 1189884 - RNA, 19 nt, Homo sapiens
  misc_RNA (1)...(19): siRNA sense strand
ggaaaugggccaguagaga

SEQ ID NO: 1189885 - RNA, 19 nt, Homo sapiens
  misc_RNA (1)...(19): siRNA sense strand
gcagaucagugccauugca

SEQ ID NO: 1189886 - RNA, 19 nt, Homo sapiens
  misc_RNA (1)...(19): siRNA sense strand
gguggaaagugcucgcaaa

SEQ ID NO: 1189887 - RNA, 19 nt, Homo sapiens
  misc_RNA (1)...(19): siRNA sense strand
aaaggaagccgggaaguuu

SEQ ID NO: 1189888 - RNA, 19 nt, Homo sapiens
  misc_RNA (1)...(19): siRNA sense strand
ccaagcugguccucaguuu

SEQ ID NO: 1189889 - RNA, 19 nt, Homo sapiens
  misc_RNA (1)...(19): siRNA sense strand
gcacuuccguaccaaugga

SEQ ID NO: 1189890 - RNA, 19 nt, Homo sapiens
  misc_RNA (1)...(19): siRNA sense strand
gaaguguccuuuucauuug

SEQ ID NO: 1189891 - RNA, 19 nt, Homo sapiens
  misc_RNA (1)...(19): siRNA sense strand
uuacugaucuugccagaag

SEQ ID NO: 1189892 - RNA, 19 nt, Homo sapiens
  misc_RNA (1)...(19): siRNA sense strand
aagaugagccaaaucgaua

SEQ ID NO: 1189893 - RNA, 19 nt, Homo sapiens
  misc_RNA (1)...(19): siRNA sense strand
caacaugacagaggacaaa

SEQ ID NO: 1189894 - RNA, 19 nt, Homo sapiens
  misc_RNA (1)...(19): siRNA sense strand
gaaagugcucgcaaacaug

SEQ ID NO: 1189895 - RNA, 19 nt, Homo sapiens
  misc_RNA (1)...(19): siRNA sense strand
gcacggagaaggacagcaa

SEQ ID NO: 1189896 - RNA, 19 nt, Homo sapiens
  misc_RNA (1)...(19): siRNA sense strand
gaaaauugaccaagagauu

SEQ ID NO: 1189897 - RNA, 19 nt, Homo sapiens
  misc_RNA (1)...(19): siRNA sense strand
gccauacaauauugacgua

SEQ ID NO: 1189898 - RNA, 19 nt, Homo sapiens
  misc_RNA (1)...(19): siRNA sense strand
acuggaagcuuacagauuc

SEQ ID NO: 1189899 - RNA, 19 nt, Homo sapiens
  misc_RNA (1)...(19): siRNA sense strand
ggaacaaacugugaaaaug

SEQ ID NO: 1189900 - RNA, 19 nt, Homo sapiens
  misc_RNA (1)...(19): siRNA sense strand
agacaggaauuauuggaau

SEQ ID NO: 1189901 - RNA, 19 nt, Homo sapiens
  misc_RNA (1)...(19): siRNA sense strand
caaggagacaggaauuauu

SEQ ID NO: 1189902 - RNA, 19 nt, Homo sapiens
  misc_RNA (1)...(19): siRNA sense strand
caagaugucaagauuguug

SEQ ID NO: 1189903 - RNA, 19 nt, Homo sapiens
  misc_RNA (1)...(19): siRNA sense strand
agcaguaugucuccuauuu

SEQ ID NO: 1189904 - RNA, 19 nt, Homo sapiens
  misc_RNA (1)...(19): siRNA sense strand
ccaauggucuccuggucuu

SEQ ID NO: 1189905 - RNA, 19 nt, Homo sapiens
  misc_RNA (1)...(19): siRNA sense strand
uacauuaccuuggaacuga

SEQ ID NO: 1189906 - RNA, 19 nt, Homo sapiens
  misc_RNA (1)...(19): siRNA sense strand
gacucagaauugaaguuua

SEQ ID NO: 1189907 - RNA, 19 nt, Homo sapiens
  misc_RNA (1)...(19): siRNA sense strand
gaaacucggcuaucauugg

SEQ ID NO: 1189908 - RNA, 19 nt, Homo sapiens
  misc_RNA (1)...(19): siRNA sense strand
uauaagaaauggagucaac

SEQ ID NO: 1189909 - RNA, 19 nt, Homo sapiens
  misc_RNA (1)...(19): siRNA sense strand
ccaagagauucacaaauac

SEQ ID NO: 1189910 - RNA, 19 nt, Homo sapiens
  misc_RNA (1)...(19): siRNA sense strand
cauacaauauugacguaga

SEQ ID NO: 1189911 - RNA, 19 nt, Homo sapiens
  misc_RNA (1)...(19): siRNA sense strand
gaagcuuacagauucgaua

SEQ ID NO: 1189912 - RNA, 19 nt, Homo sapiens
  misc_RNA (1)...(19): siRNA sense strand
ggaaagagcaaaggucaca

SEQ ID NO: 1189913 - RNA, 19 nt, Homo sapiens
  misc_RNA (1)...(19): siRNA sense strand
ucagucacuuugcggauaa

SEQ ID NO: 1189914 - RNA, 19 nt, Homo sapiens
  misc_RNA (1)...(19): siRNA sense strand
gcauggaaagcaucaacua

SEQ ID NO: 1189915 - RNA, 19 nt, Homo sapiens
  misc_RNA (1)...(19): siRNA sense strand
gaaacuggaaacccuauca

SEQ ID NO: 1189916 - RNA, 19 nt, Homo sapiens
  misc_RNA (1)...(19): siRNA sense strand
aaacucggcuaucauugga

SEQ ID NO: 1189917 - RNA, 19 nt, Homo sapiens
  misc_RNA (1)...(19): siRNA sense strand
gacaggaauuauuggaaug

SEQ ID NO: 1189918 - RNA, 19 nt, Homo sapiens
  misc_RNA (1)...(19): siRNA sense strand
gaaacgauguuguggagaa

SEQ ID NO: 1189919 - RNA, 19 nt, Homo sapiens
  misc_RNA (1)...(19): siRNA sense strand
gcuggaaacugacaaacua

SEQ ID NO: 1189920 - RNA, 19 nt, Homo sapiens
  misc_RNA (1)...(19): siRNA sense strand
ggaagccaguggaaagaua

SEQ ID NO: 1189921 - RNA, 19 nt, Homo sapiens
  misc_RNA (1)...(19): siRNA sense strand
ggacagagacugaggaugu

SEQ ID NO: 1189922 - RNA, 19 nt, Homo sapiens
  misc_RNA (1)...(19): siRNA sense strand
gaccggcuauucgaaauua

SEQ ID NO: 1189923 - RNA, 19 nt, Homo sapiens
  misc_RNA (1)...(19): siRNA sense strand
ccacccagcuggaaacuga

SEQ ID NO: 1189924 - RNA, 19 nt, Homo sapiens
  misc_RNA (1)...(19): siRNA sense strand
gaaaugccaugacuguagu

SEQ ID NO: 1189925 - RNA, 19 nt, Homo sapiens
  misc_RNA (1)...(19): siRNA sense strand
ggcaugaacucaacagaau

SEQ ID NO: 1189926 - RNA, 19 nt, Homo sapiens
  misc_RNA (1)...(19): siRNA sense strand
cagaaggccucgaaucuca

SEQ ID NO: 1189927 - RNA, 19 nt, Homo sapiens
  misc_RNA (1)...(19): siRNA sense strand
gaacagaaggccucgaauc

SEQ ID NO: 1189928 - RNA, 19 nt, Homo sapiens
  misc_RNA (1)...(19): siRNA sense strand
gaacaagacccucccaaac

SEQ ID NO: 1189929 - RNA, 19 nt, Homo sapiens
  misc_RNA (1)...(19): siRNA sense strand
agaaauggaucuacuacug

SEQ ID NO: 1189930 - RNA, 19 nt, Homo sapiens
  misc_RNA (1)...(19): siRNA sense strand
agagggagguugcugcuuu

SEQ ID NO: 1189931 - RNA, 19 nt, Homo sapiens
  misc_RNA (1)...(19): siRNA sense strand
caacagaauccaacucuuc

SEQ ID NO: 1189932 - RNA, 19 nt, Homo sapiens
  misc_RNA (1)...(19): siRNA sense strand
ccacuuauguucccaaagg

SEQ ID NO: 1189933 - RNA, 19 nt, Homo sapiens
  misc_RNA (1)...(19): siRNA sense strand
acgcgaaacuugagaauuc

SEQ ID NO: 1189934 - RNA, 19 nt, Homo sapiens
  misc_RNA (1)...(19): siRNA sense strand
gacagaaccuacacaagca

SEQ ID NO: 1189935 - RNA, 19 nt, Homo sapiens
  misc_RNA (1)...(19): siRNA sense strand
ggaaggaagacgugaacaa

SEQ ID NO: 1189936 - RNA, 19 nt, Homo sapiens
  misc_RNA (1)...(19): siRNA sense strand
gaugugccuucuaguguga

SEQ ID NO: 1189937 - RNA, 19 nt, Homo sapiens
  misc_RNA (1)...(19): siRNA sense strand
gacagucccugacaacaca

SEQ ID NO: 1189938 - RNA, 19 nt, Homo sapiens
  misc_RNA (1)...(19): siRNA sense strand
gaagauucgugggcugaug

SEQ ID NO: 1189939 - RNA, 19 nt, Homo sapiens
  misc_RNA (1)...(19): siRNA sense strand
gacaugcuccacuuucuaa

SEQ ID NO: 1189940 - RNA, 19 nt, Homo sapiens
  misc_RNA (1)...(19): siRNA sense strand
gagaauggcauagagaaau

SEQ ID NO: 1189941 - RNA, 19 nt, Homo sapiens
  misc_RNA (1)...(19): siRNA sense strand
gaaauuauuggagucaaga

SEQ ID NO: 1189942 - RNA, 19 nt, Homo sapiens
  misc_RNA (1)...(19): siRNA sense strand
aggcagggcugaagaaauc

SEQ ID NO: 1189943 - RNA, 19 nt, Homo sapiens
  misc_RNA (1)...(19): siRNA sense strand
gcuaaccugugacaagugu

SEQ ID NO: 1189944 - RNA, 19 nt, Homo sapiens
  misc_RNA (1)...(19): siRNA sense strand
ccaaaggcaugaacucaac

SEQ ID NO: 1189945 - RNA, 19 nt, Homo sapiens
  misc_RNA (1)...(19): siRNA sense strand
gaaggaagacgugaacaag

SEQ ID NO: 1189946 - RNA, 19 nt, Homo sapiens
  misc_RNA (1)...(19): siRNA sense strand
ucucagaugugccuucuag

SEQ ID NO: 1189947 - RNA, 19 nt, Homo sapiens
  misc_RNA (1)...(19): siRNA sense strand
caaacuagaccggcuauuc

SEQ ID NO: 1189948 - RNA, 19 nt, Homo sapiens
  misc_RNA (1)...(19): siRNA sense strand
cauuugcccuggaugauug

SEQ ID NO: 1189949 - RNA, 19 nt, Homo sapiens
  misc_RNA (1)...(19): siRNA sense strand
caacucuucugccucuguu

SEQ ID NO: 1189950 - RNA, 19 nt, Homo sapiens
  misc_RNA (1)...(19): siRNA sense strand
agaauggcauagagaaaug

SEQ ID NO: 1189951 - RNA, 19 nt, Homo sapiens
  misc_RNA (1)...(19): siRNA sense strand
caccacagcucagccagaa

SEQ ID NO: 1189952 - RNA, 19 nt, Homo sapiens
  misc_RNA (1)...(19): siRNA sense strand
gcaugagaauggcauagag

SEQ ID NO: 1189953 - RNA, 19 nt, Homo sapiens
  misc_RNA (1)...(19): siRNA sense strand
gagcauuugcccuggauga

SEQ ID NO: 1189954 - RNA, 19 nt, Homo sapiens
  misc_RNA (1)...(19): siRNA sense strand
ggaccaaggagacagacaa

SEQ ID NO: 1189955 - RNA, 19 nt, Homo sapiens
  misc_RNA (1)...(19): siRNA sense strand
gaagaaagggacagagacu

SEQ ID NO: 1189956 - RNA, 19 nt, Homo sapiens
  misc_RNA (1)...(19): siRNA sense strand
gcgggugauugaagagauu

SEQ ID NO: 1189957 - RNA, 19 nt, Homo sapiens
  misc_RNA (1)...(19): siRNA sense strand
gagaaaugccaugacugua

SEQ ID NO: 1189958 - RNA, 19 nt, Homo sapiens
  misc_RNA (1)...(19): siRNA sense strand
gaaggccucgaaucucauu

SEQ ID NO: 1189959 - RNA, 19 nt, Homo sapiens
  misc_RNA (1)...(19): siRNA sense strand
cgaaucucauuggcacaua

SEQ ID NO: 1189960 - RNA, 19 nt, Homo sapiens
  misc_RNA (1)...(19): siRNA sense strand
gagggagguugcugcuuuc

SEQ ID NO: 1189961 - RNA, 19 nt, Homo sapiens
  misc_RNA (1)...(19): siRNA sense strand
gaagccaguggaaagauau

SEQ ID NO: 1189962 - RNA, 19 nt, Homo sapiens
  misc_RNA (1)...(19): siRNA sense strand
gggagaaauggaucuacua

SEQ ID NO: 1189963 - RNA, 19 nt, Homo sapiens
  misc_RNA (1)...(19): siRNA sense strand
ugaacaagacccucccaaa

SEQ ID NO: 1189964 - RNA, 19 nt, Homo sapiens
  misc_RNA (1)...(19): siRNA sense strand
gugcuaaccugugacaagu

SEQ ID NO: 1189965 - RNA, 19 nt, Homo sapiens
  misc_RNA (1)...(19): siRNA sense strand
cgaaauuauuggagucaag

SEQ ID NO: 1189966 - RNA, 19 nt, Homo sapiens
  misc_RNA (1)...(19): siRNA sense strand
cuucuagugugaugaaaug

SEQ ID NO: 1189967 - RNA, 19 nt, Homo sapiens
  misc_RNA (1)...(19): siRNA sense strand
agaaagggacagagacuga

SEQ ID NO: 1189968 - RNA, 19 nt, Homo sapiens
  misc_RNA (1)...(19): siRNA sense strand
gacagagacugaggaugug

SEQ ID NO: 1189969 - RNA, 19 nt, Homo sapiens
  misc_RNA (1)...(19): siRNA sense strand
cagccuaucuuugaugaca

SEQ ID NO: 1189970 - RNA, 19 nt, Homo sapiens
  misc_RNA (1)...(19): siRNA sense strand
ugacuugcagccuaucuuu

SEQ ID NO: 1189971 - RNA, 19 nt, Homo sapiens
  misc_RNA (1)...(19): siRNA sense strand
gcauuugcccuggaugauu

SEQ ID NO: 1189972 - RNA, 19 nt, Homo sapiens
  misc_RNA (1)...(19): siRNA sense strand
ggagaaauggaucuacuac

SEQ ID NO: 1189973 - RNA, 19 nt, Homo sapiens
  misc_RNA (1)...(19): siRNA sense strand
caauggccaugguaucgau

SEQ ID NO: 1189974 - RNA, 19 nt, Homo sapiens
  misc_RNA (1)...(19): siRNA sense strand
gaaucucauuggcacauac

SEQ ID NO: 1189975 - RNA, 19 nt, Homo sapiens
  misc_RNA (1)...(19): siRNA sense strand
ugacaugcuccacuuucua

SEQ ID NO: 1189976 - RNA, 19 nt, Homo sapiens
  misc_RNA (1)...(19): siRNA sense strand
gaugacaugcuccacuuuc

SEQ ID NO: 1189977 - RNA, 19 nt, Homo sapiens
  misc_RNA (1)...(19): siRNA sense strand
cagcucagccagaacagaa

SEQ ID NO: 1189978 - RNA, 19 nt, Homo sapiens
  misc_RNA (1)...(19): siRNA sense strand
agagaaaugccaugacugu

SEQ ID NO: 1189979 - RNA, 19 nt, Homo sapiens
  misc_RNA (1)...(19): siRNA sense strand
ucuaucaguuucuuugcaa

SEQ ID NO: 1189980 - RNA, 19 nt, Homo sapiens
  misc_RNA (1)...(19): siRNA sense strand
cuagugugaugaaaugcaa

SEQ ID NO: 1189981 - RNA, 19 nt, Homo sapiens
  misc_RNA (1)...(19): siRNA sense strand
cugaggaugugcgguguaa

SEQ ID NO: 1189982 - RNA, 19 nt, Homo sapiens
  misc_RNA (1)...(19): siRNA sense strand
agaaaugccaugacuguag

SEQ ID NO: 1189983 - RNA, 19 nt, Homo sapiens
  misc_RNA (1)...(19): siRNA sense strand
gucagaaccugguggugau

SEQ ID NO: 1189984 - RNA, 19 nt, Homo sapiens
  misc_RNA (1)...(19): siRNA sense strand
cuccuggacucuguuuaua

SEQ ID NO: 1189985 - RNA, 19 nt, Homo sapiens
  misc_RNA (1)...(19): siRNA sense strand
cagaacagaaggccucgaa

SEQ ID NO: 1189986 - RNA, 19 nt, Homo sapiens
  misc_RNA (1)...(19): siRNA sense strand
gggcugaagaaauccauga

SEQ ID NO: 1189987 - RNA, 19 nt, Homo sapiens
  misc_RNA (1)...(19): siRNA sense strand
ggugugcaguauccggaaa

SEQ ID NO: 1189988 - RNA, 19 nt, Homo sapiens
  misc_RNA (1)...(19): siRNA sense strand
ccacagcucagccagaaca

SEQ ID NO: 1189989 - RNA, 19 nt, Homo sapiens
  misc_RNA (1)...(19): siRNA sense strand
cagaugugccuucuagugu

SEQ ID NO: 1189990 - RNA, 19 nt, Homo sapiens
  misc_RNA (1)...(19): siRNA sense strand
ccacagacacauccugaag

SEQ ID NO: 1189991 - RNA, 19 nt, Homo sapiens
  misc_RNA (1)...(19): siRNA sense strand
ucaacagaauccaacucuu

SEQ ID NO: 1189992 - RNA, 19 nt, Homo sapiens
  misc_RNA (1)...(19): siRNA sense strand
aaacuagcucucccgauga

SEQ ID NO: 1189993 - RNA, 19 nt, Homo sapiens
  misc_RNA (1)...(19): siRNA sense strand
ugagaauggcauagagaaa

SEQ ID NO: 1189994 - RNA, 19 nt, Homo sapiens
  misc_RNA (1)...(19): siRNA sense strand
ucagaugugccuucuagug

SEQ ID NO: 1189995 - RNA, 19 nt, Homo sapiens
  misc_RNA (1)...(19): siRNA sense strand
ugccuugacugaccgagaa

SEQ ID NO: 1189996 - RNA, 19 nt, Homo sapiens
  misc_RNA (1)...(19): siRNA sense strand
auagagaaaugccaugacu

SEQ ID NO: 1189997 - RNA, 19 nt, Homo sapiens
  misc_RNA (1)...(19): siRNA sense strand
cagccucgcccagcuaauu

SEQ ID NO: 1189998 - RNA, 19 nt, Homo sapiens
  misc_RNA (1)...(19): siRNA sense strand
ccaguggaaagauaucuau

SEQ ID NO: 1189999 - RNA, 19 nt, Homo sapiens
  misc_RNA (1)...(19): siRNA sense strand
gaaaaggcagggcugaaga

SEQ ID NO: 1190000 - RNA, 19 nt, Homo sapiens
  misc_RNA (1)...(19): siRNA sense strand
uagaccggcuauucgaaau

SEQ ID NO: 1190001 - RNA, 19 nt, Homo sapiens
  misc_RNA (1)...(19): siRNA sense strand
cggaagaaagggacagaga

SEQ ID NO: 1190002 - RNA, 19 nt, Homo sapiens
  misc_RNA (1)...(19): siRNA sense strand
gcuauucgaaauuauugga

SEQ ID NO: 1190003 - RNA, 19 nt, Homo sapiens
  misc_RNA (1)...(19): siRNA sense strand
gagcugcgggugauugaag

SEQ ID NO: 1190004 - RNA, 19 nt, Homo sapiens
  misc_RNA (1)...(19): siRNA sense strand
gccuaucuuugaugacaug

SEQ ID NO: 1190005 - RNA, 19 nt, Homo sapiens
  misc_RNA (1)...(19): siRNA sense strand
gcaggaucccagugccauu

SEQ ID NO: 1190006 - RNA, 19 nt, Homo sapiens
  misc_RNA (1)...(19): siRNA sense strand
ccaaggagacagacaacgu

SEQ ID NO: 1190007 - RNA, 19 nt, Homo sapiens
  misc_RNA (1)...(19): siRNA sense strand
cuagaccggcuauucgaaa

SEQ ID NO: 1190008 - RNA, 19 nt, Homo sapiens
  misc_RNA (1)...(19): siRNA sense strand
gaggagcugcgggugauug

SEQ ID NO: 1190009 - RNA, 19 nt, Homo sapiens
  misc_RNA (1)...(19): siRNA sense strand
auugagaaauuaccuugug

SEQ ID NO: 1190010 - RNA, 19 nt, Homo sapiens
  misc_RNA (1)...(19): siRNA sense strand
uugaugacaugcuccacuu

SEQ ID NO: 1190011 - RNA, 19 nt, Homo sapiens
  misc_RNA (1)...(19): siRNA sense strand
guaucgauauccugaagcu

SEQ ID NO: 1190012 - RNA, 19 nt, Homo sapiens
  misc_RNA (1)...(19): siRNA sense strand
gugauuguggugugcagua

SEQ ID NO: 1190013 - RNA, 19 nt, Homo sapiens
  misc_RNA (1)...(19): siRNA sense strand
aggaagacgugaacaagac

SEQ ID NO: 1190014 - RNA, 19 nt, Homo sapiens
  misc_RNA (1)...(19): siRNA sense strand
ccagugccauuguggaaaa

SEQ ID NO: 1190015 - RNA, 19 nt, Homo sapiens
  misc_RNA (1)...(19): siRNA sense strand
ccugugacuugcagccuau

SEQ ID NO: 1190016 - RNA, 19 nt, Homo sapiens
  misc_RNA (1)...(19): siRNA sense strand
caacgcgaaacuugagaau

SEQ ID NO: 1190017 - RNA, 19 nt, Homo sapiens
  misc_RNA (1)...(19): siRNA sense strand
cuacugcaauggccauggu

SEQ ID NO: 1190018 - RNA, 19 nt, Homo sapiens
  misc_RNA (1)...(19): siRNA sense strand
gaaaguacaucgccuucua

SEQ ID NO: 1190019 - RNA, 19 nt, Homo sapiens
  misc_RNA (1)...(19): siRNA sense strand
uaaaggagcugcaggagaa

SEQ ID NO: 1190020 - RNA, 19 nt, Homo sapiens
  misc_RNA (1)...(19): siRNA sense strand
ggaaggagcuggagagagu

SEQ ID NO: 1190021 - RNA, 19 nt, Homo sapiens
  misc_RNA (1)...(19): siRNA sense strand
ggaccuguaucacaugaaa

SEQ ID NO: 1190022 - RNA, 19 nt, Homo sapiens
  misc_RNA (1)...(19): siRNA sense strand
ggagagagaucaauaugcu

SEQ ID NO: 1190023 - RNA, 19 nt, Homo sapiens
  misc_RNA (1)...(19): siRNA sense strand
gcaggagguuugcacauug

SEQ ID NO: 1190024 - RNA, 19 nt, Homo sapiens
  misc_RNA (1)...(19): siRNA sense strand
gaaagcaaacaaugagaaa

SEQ ID NO: 1190025 - RNA, 19 nt, Homo sapiens
  misc_RNA (1)...(19): siRNA sense strand
gaaggagucgcuuaaagaa

SEQ ID NO: 1190026 - RNA, 19 nt, Homo sapiens
  misc_RNA (1)...(19): siRNA sense strand
gaaacauucucucagauac

SEQ ID NO: 1190027 - RNA, 19 nt, Homo sapiens
  misc_RNA (1)...(19): siRNA sense strand
caugaaacauucucucaga

SEQ ID NO: 1190028 - RNA, 19 nt, Homo sapiens
  misc_RNA (1)...(19): siRNA sense strand
ucagauacuuugaagaaga

SEQ ID NO: 1190029 - RNA, 19 nt, Homo sapiens
  misc_RNA (1)...(19): siRNA sense strand
agaaacaaguggaacauca

SEQ ID NO: 1190030 - RNA, 19 nt, Homo sapiens
  misc_RNA (1)...(19): siRNA sense strand
cgacaagcauggugaucuu

SEQ ID NO: 1190031 - RNA, 19 nt, Homo sapiens
  misc_RNA (1)...(19): siRNA sense strand
ugaaacauucucucagaua

SEQ ID NO: 1190032 - RNA, 19 nt, Homo sapiens
  misc_RNA (1)...(19): siRNA sense strand
gaggagaagaagcaugaua

SEQ ID NO: 1190033 - RNA, 19 nt, Homo sapiens
  misc_RNA (1)...(19): siRNA sense strand
gaaacuggaacuuggauuc

SEQ ID NO: 1190034 - RNA, 19 nt, Homo sapiens
  misc_RNA (1)...(19): siRNA sense strand
gcaguuagagcaguccaua

SEQ ID NO: 1190035 - RNA, 19 nt, Homo sapiens
  misc_RNA (1)...(19): siRNA sense strand
guacaucgccuucuaacag

SEQ ID NO: 1190036 - RNA, 19 nt, Homo sapiens
  misc_RNA (1)...(19): siRNA sense strand
ugaaggagucgcuuaaaga

SEQ ID NO: 1190037 - RNA, 19 nt, Homo sapiens
  misc_RNA (1)...(19): siRNA sense strand
gagcuuguccagacucaaa

SEQ ID NO: 1190038 - RNA, 19 nt, Homo sapiens
  misc_RNA (1)...(19): siRNA sense strand
gaaaagaaagcaaacaaug

SEQ ID NO: 1190039 - RNA, 19 nt, Homo sapiens
  misc_RNA (1)...(19): siRNA sense strand
gcacauugaaggaggagaa

SEQ ID NO: 1190040 - RNA, 19 nt, Homo sapiens
  misc_RNA (1)...(19): siRNA sense strand
aacaucagcuggaagaaga

SEQ ID NO: 1190041 - RNA, 19 nt, Homo sapiens
  misc_RNA (1)...(19): siRNA sense strand
caaacaaugagaaacagaa

SEQ ID NO: 1190042 - RNA, 19 nt, Homo sapiens
  misc_RNA (1)...(19): siRNA sense strand
ucucagauacuuugaagaa

SEQ ID NO: 1190043 - RNA, 19 nt, Homo sapiens
  misc_RNA (1)...(19): siRNA sense strand
ugaaugacaccaucaaauc

SEQ ID NO: 1190044 - RNA, 19 nt, Homo sapiens
  misc_RNA (1)...(19): siRNA sense strand
gcaguuggagcagcaagua

SEQ ID NO: 1190045 - RNA, 19 nt, Homo sapiens
  misc_RNA (1)...(19): siRNA sense strand
gagauugaacacagagaaa

SEQ ID NO: 1190046 - RNA, 19 nt, Homo sapiens
  misc_RNA (1)...(19): siRNA sense strand
gaacaucagcuggaagaag

SEQ ID NO: 1190047 - RNA, 19 nt, Homo sapiens
  misc_RNA (1)...(19): siRNA sense strand
caggagguuugcacauuga

SEQ ID NO: 1190048 - RNA, 19 nt, Homo sapiens
  misc_RNA (1)...(19): siRNA sense strand
gaaugacaccaucaaaucu

SEQ ID NO: 1190049 - RNA, 19 nt, Homo sapiens
  misc_RNA (1)...(19): siRNA sense strand
gagggagcauguggagaaa

SEQ ID NO: 1190050 - RNA, 19 nt, Homo sapiens
  misc_RNA (1)...(19): siRNA sense strand
caagagcgcacugcaguug

SEQ ID NO: 1190051 - RNA, 19 nt, Homo sapiens
  misc_RNA (1)...(19): siRNA sense strand
gaagaaacaaguggaacau

SEQ ID NO: 1190052 - RNA, 19 nt, Homo sapiens
  misc_RNA (1)...(19): siRNA sense strand
caagcauggugaucuuugu

SEQ ID NO: 1190053 - RNA, 19 nt, Homo sapiens
  misc_RNA (1)...(19): siRNA sense strand
ggagcuagagggucaaauc

SEQ ID NO: 1190054 - RNA, 19 nt, Homo sapiens
  misc_RNA (1)...(19): siRNA sense strand
ugagggagcauguggagaa

SEQ ID NO: 1190055 - RNA, 19 nt, Homo sapiens
  misc_RNA (1)...(19): siRNA sense strand
gcaaacaaugagaaacaga

SEQ ID NO: 1190056 - RNA, 19 nt, Homo sapiens
  misc_RNA (1)...(19): siRNA sense strand
uguaucacaugaaacauuc

SEQ ID NO: 1190057 - RNA, 19 nt, Homo sapiens
  misc_RNA (1)...(19): siRNA sense strand
ggacacgugacacaguuga

SEQ ID NO: 1190058 - RNA, 19 nt, Homo sapiens
  misc_RNA (1)...(19): siRNA sense strand
ggagaaacuggaacuugga

SEQ ID NO: 1190059 - RNA, 19 nt, Homo sapiens
  misc_RNA (1)...(19): siRNA sense strand
aggagucgcuuaaagaagu

SEQ ID NO: 1190060 - RNA, 19 nt, Homo sapiens
  misc_RNA (1)...(19): siRNA sense strand
gcagcuccuuggugagaug

SEQ ID NO: 1190061 - RNA, 19 nt, Homo sapiens
  misc_RNA (1)...(19): siRNA sense strand
gggagcauguggagaaacu

SEQ ID NO: 1190062 - RNA, 19 nt, Homo sapiens
  misc_RNA (1)...(19): siRNA sense strand
cgcaggagguuugcacauu

SEQ ID NO: 1190063 - RNA, 19 nt, Homo sapiens
  misc_RNA (1)...(19): siRNA sense strand
aaagaaagcaaacaaugag

SEQ ID NO: 1190064 - RNA, 19 nt, Homo sapiens
  misc_RNA (1)...(19): siRNA sense strand
aaaguacaucgccuucuaa

SEQ ID NO: 1190065 - RNA, 19 nt, Homo sapiens
  misc_RNA (1)...(19): siRNA sense strand
gaaacagaaagcugaaagg

SEQ ID NO: 1190066 - RNA, 19 nt, Homo sapiens
  misc_RNA (1)...(19): siRNA sense strand
ccggaacccugcugcugaa

SEQ ID NO: 1190067 - RNA, 19 nt, Homo sapiens
  misc_RNA (1)...(19): siRNA sense strand
uacaucgccuucuaacaga

SEQ ID NO: 1190068 - RNA, 19 nt, Homo sapiens
  misc_RNA (1)...(19): siRNA sense strand
ucagagcccgugccaagaa

SEQ ID NO: 1190069 - RNA, 19 nt, Homo sapiens
  misc_RNA (1)...(19): siRNA sense strand
ugcaagaccugaggaagga

SEQ ID NO: 1190070 - RNA, 19 nt, Homo sapiens
  misc_RNA (1)...(19): siRNA sense strand
agaucaauaugcugaacaa

SEQ ID NO: 1190071 - RNA, 19 nt, Homo sapiens
  misc_RNA (1)...(19): siRNA sense strand
gcaguaaagcacuucucaa

SEQ ID NO: 1190072 - RNA, 19 nt, Homo sapiens
  misc_RNA (1)...(19): siRNA sense strand
ugaagaagaguccaaggau

SEQ ID NO: 1190073 - RNA, 19 nt, Homo sapiens
  misc_RNA (1)...(19): siRNA sense strand
cagauacuuugaagaagag

SEQ ID NO: 1190074 - RNA, 19 nt, Homo sapiens
  misc_RNA (1)...(19): siRNA sense strand
cguggagccugcacaagga

SEQ ID NO: 1190075 - RNA, 19 nt, Homo sapiens
  misc_RNA (1)...(19): siRNA sense strand
agaaagcaaacaaugagaa

SEQ ID NO: 1190076 - RNA, 19 nt, Homo sapiens
  misc_RNA (1)...(19): siRNA sense strand
aaggacacgugacacaguu

SEQ ID NO: 1190077 - RNA, 19 nt, Homo sapiens
  misc_RNA (1)...(19): siRNA sense strand
gcugaaaggacacgugaca

SEQ ID NO: 1190078 - RNA, 19 nt, Homo sapiens
  misc_RNA (1)...(19): siRNA sense strand
ugaaaggacacgugacaca

SEQ ID NO: 1190079 - RNA, 19 nt, Homo sapiens
  misc_RNA (1)...(19): siRNA sense strand
ugaaggaggagaagaagca

SEQ ID NO: 1190080 - RNA, 19 nt, Homo sapiens
  misc_RNA (1)...(19): siRNA sense strand
gagccgcaguaaagcacuu

SEQ ID NO: 1190081 - RNA, 19 nt, Homo sapiens
  misc_RNA (1)...(19): siRNA sense strand
gaaacaaguggaacaucag

SEQ ID NO: 1190082 - RNA, 19 nt, Homo sapiens
  misc_RNA (1)...(19): siRNA sense strand
caguaaagcacuucucaag

SEQ ID NO: 1190083 - RNA, 19 nt, Homo sapiens
  misc_RNA (1)...(19): siRNA sense strand
aagcaaacaaugagaaaca

SEQ ID NO: 1190084 - RNA, 19 nt, Homo sapiens
  misc_RNA (1)...(19): siRNA sense strand
gagaaacagaaagcugaaa

SEQ ID NO: 1190085 - RNA, 19 nt, Homo sapiens
  misc_RNA (1)...(19): siRNA sense strand
ugaacucgagguccauaaa

SEQ ID NO: 1190086 - RNA, 19 nt, Homo sapiens
  misc_RNA (1)...(19): siRNA sense strand
gcuggagagagaucaauau

SEQ ID NO: 1190087 - RNA, 19 nt, Homo sapiens
  misc_RNA (1)...(19): siRNA sense strand
cauugaaggaggagaagaa

SEQ ID NO: 1190088 - RNA, 19 nt, Homo sapiens
  misc_RNA (1)...(19): siRNA sense strand
aacauucucucagauacuu

SEQ ID NO: 1190089 - RNA, 19 nt, Homo sapiens
  misc_RNA (1)...(19): siRNA sense strand
gaacucgagguccauaaaa

SEQ ID NO: 1190090 - RNA, 19 nt, Homo sapiens
  misc_RNA (1)...(19): siRNA sense strand
gcagcguauaggagaguua

SEQ ID NO: 1190091 - RNA, 19 nt, Homo sapiens
  misc_RNA (1)...(19): siRNA sense strand
uugaaggagucgcuuaaag

SEQ ID NO: 1190092 - RNA, 19 nt, Homo sapiens
  misc_RNA (1)...(19): siRNA sense strand
gagucuagcggccuuaugg

SEQ ID NO: 1190093 - RNA, 19 nt, Homo sapiens
  misc_RNA (1)...(19): siRNA sense strand
gaaaaugucgcaggagguu

SEQ ID NO: 1190094 - RNA, 19 nt, Homo sapiens
  misc_RNA (1)...(19): siRNA sense strand
ggagucgcuuaaagaaguc

SEQ ID NO: 1190095 - RNA, 19 nt, Homo sapiens
  misc_RNA (1)...(19): siRNA sense strand
ucucucagauacuuugaag

SEQ ID NO: 1190096 - RNA, 19 nt, Homo sapiens
  misc_RNA (1)...(19): siRNA sense strand
guggagaaacuggaacuug

SEQ ID NO: 1190097 - RNA, 19 nt, Homo sapiens
  misc_RNA (1)...(19): siRNA sense strand
gcauguggagaaacuggaa

SEQ ID NO: 1190098 - RNA, 19 nt, Homo sapiens
  misc_RNA (1)...(19): siRNA sense strand
augacaccaucaaaucuuu

SEQ ID NO: 1190099 - RNA, 19 nt, Homo sapiens
  misc_RNA (1)...(19): siRNA sense strand
gaacaaauaaaaggagaga

SEQ ID NO: 1190100 - RNA, 19 nt, Homo sapiens
  misc_RNA (1)...(19): siRNA sense strand
gacaagcauggugaucuuu

SEQ ID NO: 1190101 - RNA, 19 nt, Homo sapiens
  misc_RNA (1)...(19): siRNA sense strand
gagaaacuggaacuuggau

SEQ ID NO: 1190102 - RNA, 19 nt, Homo sapiens
  misc_RNA (1)...(19): siRNA sense strand
aaaugucgcaggagguuug

SEQ ID NO: 1190103 - RNA, 19 nt, Homo sapiens
  misc_RNA (1)...(19): siRNA sense strand
aagcagcaguccugaacuc

SEQ ID NO: 1190104 - RNA, 19 nt, Homo sapiens
  misc_RNA (1)...(19): siRNA sense strand
agaagaaacaaguggaaca

SEQ ID NO: 1190105 - RNA, 19 nt, Homo sapiens
  misc_RNA (1)...(19): siRNA sense strand
agagcgcacugcaguugga

SEQ ID NO: 1190106 - RNA, 19 nt, Homo sapiens
  misc_RNA (1)...(19): siRNA sense strand
gaaaacaaucagugcauca

SEQ ID NO: 1190107 - RNA, 19 nt, Homo sapiens
  misc_RNA (1)...(19): siRNA sense strand
gaggaaggagcuggagaga

SEQ ID NO: 1190108 - RNA, 19 nt, Homo sapiens
  misc_RNA (1)...(19): siRNA sense strand
aggaggagaagaagcauga

SEQ ID NO: 1190109 - RNA, 19 nt, Homo sapiens
  misc_RNA (1)...(19): siRNA sense strand
aagaagaguccaaggaucu

SEQ ID NO: 1190110 - RNA, 19 nt, Homo sapiens
  misc_RNA (1)...(19): siRNA sense strand
gugcagcuccuuggugaga

SEQ ID NO: 1190111 - RNA, 19 nt, Homo sapiens
  misc_RNA (1)...(19): siRNA sense strand
uggaacaucagcuggaaga

SEQ ID NO: 1190112 - RNA, 19 nt, Homo sapiens
  misc_RNA (1)...(19): siRNA sense strand
gaucaauaugcugaacaaa

SEQ ID NO: 1190113 - RNA, 19 nt, Homo sapiens
  misc_RNA (1)...(19): siRNA sense strand
guccauacgggagcagaua

SEQ ID NO: 1190114 - RNA, 19 nt, Homo sapiens
  misc_RNA (1)...(19): siRNA sense strand
gagaucaauaugcugaaca

SEQ ID NO: 1190115 - RNA, 19 nt, Homo sapiens
  misc_RNA (1)...(19): siRNA sense strand
cacaugaaacauucucuca

SEQ ID NO: 1190116 - RNA, 19 nt, Homo sapiens
  misc_RNA (1)...(19): siRNA sense strand
aaacuggaacuuggauuca

SEQ ID NO: 1190117 - RNA, 19 nt, Homo sapiens
  misc_RNA (1)...(19): siRNA sense strand
cagcagaggaugaggaaaa

SEQ ID NO: 1190118 - RNA, 19 nt, Homo sapiens
  misc_RNA (1)...(19): siRNA sense strand
gaaaguacaucgccuucua

SEQ ID NO: 1190119 - RNA, 19 nt, Homo sapiens
  misc_RNA (1)...(19): siRNA sense strand
uaaaggagcugcaggagaa

SEQ ID NO: 1190120 - RNA, 19 nt, Homo sapiens
  misc_RNA (1)...(19): siRNA sense strand
ggaaggagcuggagagagu

SEQ ID NO: 1190121 - RNA, 19 nt, Homo sapiens
  misc_RNA (1)...(19): siRNA sense strand
ggagagagaucaauaugcu

SEQ ID NO: 1190122 - RNA, 19 nt, Homo sapiens
  misc_RNA (1)...(19): siRNA sense strand
gcaggagguuugcacauug

SEQ ID NO: 1190123 - RNA, 19 nt, Homo sapiens
  misc_RNA (1)...(19): siRNA sense strand
gaaggagucgcuuaaagaa

SEQ ID NO: 1190124 - RNA, 19 nt, Homo sapiens
  misc_RNA (1)...(19): siRNA sense strand
gaaacauucucucagauac

SEQ ID NO: 1190125 - RNA, 19 nt, Homo sapiens
  misc_RNA (1)...(19): siRNA sense strand
ucagauacuuugaagaaga

SEQ ID NO: 1190126 - RNA, 19 nt, Homo sapiens
  misc_RNA (1)...(19): siRNA sense strand
cgacaagcauggugaucuu

SEQ ID NO: 1190127 - RNA, 19 nt, Homo sapiens
  misc_RNA (1)...(19): siRNA sense strand
gaggagaagaagcaugaua

SEQ ID NO: 1190128 - RNA, 19 nt, Homo sapiens
  misc_RNA (1)...(19): siRNA sense strand
gaaacuggaacuuggauuc

SEQ ID NO: 1190129 - RNA, 19 nt, Homo sapiens
  misc_RNA (1)...(19): siRNA sense strand
gcaguuagagcaguccaua

SEQ ID NO: 1190130 - RNA, 19 nt, Homo sapiens
  misc_RNA (1)...(19): siRNA sense strand
guacaucgccuucuaacag

SEQ ID NO: 1190131 - RNA, 19 nt, Homo sapiens
  misc_RNA (1)...(19): siRNA sense strand
ugaaggagucgcuuaaaga

SEQ ID NO: 1190132 - RNA, 19 nt, Homo sapiens
  misc_RNA (1)...(19): siRNA sense strand
gagcuuguccagacucaaa

SEQ ID NO: 1190133 - RNA, 19 nt, Homo sapiens
  misc_RNA (1)...(19): siRNA sense strand
gcacauugaaggaggagaa

SEQ ID NO: 1190134 - RNA, 19 nt, Homo sapiens
  misc_RNA (1)...(19): siRNA sense strand
ucucagauacuuugaagaa

SEQ ID NO: 1190135 - RNA, 19 nt, Homo sapiens
  misc_RNA (1)...(19): siRNA sense strand
gcaguuggagcagcaagua

SEQ ID NO: 1190136 - RNA, 19 nt, Homo sapiens
  misc_RNA (1)...(19): siRNA sense strand
caggagguuugcacauuga

SEQ ID NO: 1190137 - RNA, 19 nt, Homo sapiens
  misc_RNA (1)...(19): siRNA sense strand
caagagcgcacugcaguug

SEQ ID NO: 1190138 - RNA, 19 nt, Homo sapiens
  misc_RNA (1)...(19): siRNA sense strand
gagggagcauguggagaaa

SEQ ID NO: 1190139 - RNA, 19 nt, Homo sapiens
  misc_RNA (1)...(19): siRNA sense strand
caagcauggugaucuuugu

SEQ ID NO: 1190140 - RNA, 19 nt, Homo sapiens
  misc_RNA (1)...(19): siRNA sense strand
ugagggagcauguggagaa

SEQ ID NO: 1190141 - RNA, 19 nt, Homo sapiens
  misc_RNA (1)...(19): siRNA sense strand
ggacacgugacacaguuga

SEQ ID NO: 1190142 - RNA, 19 nt, Homo sapiens
  misc_RNA (1)...(19): siRNA sense strand
ggagaaacuggaacuugga

SEQ ID NO: 1190143 - RNA, 19 nt, Homo sapiens
  misc_RNA (1)...(19): siRNA sense strand
aggagucgcuuaaagaagu

SEQ ID NO: 1190144 - RNA, 19 nt, Homo sapiens
  misc_RNA (1)...(19): siRNA sense strand
gcagcuccuuggugagaug

SEQ ID NO: 1190145 - RNA, 19 nt, Homo sapiens
  misc_RNA (1)...(19): siRNA sense strand
gggagcauguggagaaacu

SEQ ID NO: 1190146 - RNA, 19 nt, Homo sapiens
  misc_RNA (1)...(19): siRNA sense strand
cgcaggagguuugcacauu

SEQ ID NO: 1190147 - RNA, 19 nt, Homo sapiens
  misc_RNA (1)...(19): siRNA sense strand
aaaguacaucgccuucuaa

SEQ ID NO: 1190148 - RNA, 19 nt, Homo sapiens
  misc_RNA (1)...(19): siRNA sense strand
gcaguaaagcacuucucaa

SEQ ID NO: 1190149 - RNA, 19 nt, Homo sapiens
  misc_RNA (1)...(19): siRNA sense strand
ccggaacccugcugcugaa

SEQ ID NO: 1190150 - RNA, 19 nt, Homo sapiens
  misc_RNA (1)...(19): siRNA sense strand
uacaucgccuucuaacaga

SEQ ID NO: 1190151 - RNA, 19 nt, Homo sapiens
  misc_RNA (1)...(19): siRNA sense strand
ugaagaagaguccaaggau

SEQ ID NO: 1190152 - RNA, 19 nt, Homo sapiens
  misc_RNA (1)...(19): siRNA sense strand
ugcaagaccugaggaagga

SEQ ID NO: 1190153 - RNA, 19 nt, Homo sapiens
  misc_RNA (1)...(19): siRNA sense strand
agaucaauaugcugaacaa

SEQ ID NO: 1190154 - RNA, 19 nt, Homo sapiens
  misc_RNA (1)...(19): siRNA sense strand
cagauacuuugaagaagag

SEQ ID NO: 1190155 - RNA, 19 nt, Homo sapiens
  misc_RNA (1)...(19): siRNA sense strand
cguggagccugcacaagga

SEQ ID NO: 1190156 - RNA, 19 nt, Homo sapiens
  misc_RNA (1)...(19): siRNA sense strand
aaggacacgugacacaguu

SEQ ID NO: 1190157 - RNA, 19 nt, Homo sapiens
  misc_RNA (1)...(19): siRNA sense strand
gcugaaaggacacgugaca

SEQ ID NO: 1190158 - RNA, 19 nt, Homo sapiens
  misc_RNA (1)...(19): siRNA sense strand
ugaaaggacacgugacaca

SEQ ID NO: 1190159 - RNA, 19 nt, Homo sapiens
  misc_RNA (1)...(19): siRNA sense strand
ugaaggaggagaagaagca

SEQ ID NO: 1190160 - RNA, 19 nt, Homo sapiens
  misc_RNA (1)...(19): siRNA sense strand
caguaaagcacuucucaag

SEQ ID NO: 1190161 - RNA, 19 nt, Homo sapiens
  misc_RNA (1)...(19): siRNA sense strand
gagccgcaguaaagcacuu

SEQ ID NO: 1190162 - RNA, 19 nt, Homo sapiens
  misc_RNA (1)...(19): siRNA sense strand
gcuggagagagaucaauau

SEQ ID NO: 1190163 - RNA, 19 nt, Homo sapiens
  misc_RNA (1)...(19): siRNA sense strand
cauugaaggaggagaagaa

SEQ ID NO: 1190164 - RNA, 19 nt, Homo sapiens
  misc_RNA (1)...(19): siRNA sense strand
aacauucucucagauacuu

SEQ ID NO: 1190165 - RNA, 19 nt, Homo sapiens
  misc_RNA (1)...(19): siRNA sense strand
gcagcguauaggagaguua

SEQ ID NO: 1190166 - RNA, 19 nt, Homo sapiens
  misc_RNA (1)...(19): siRNA sense strand
uugaaggagucgcuuaaag

SEQ ID NO: 1190167 - RNA, 19 nt, Homo sapiens
  misc_RNA (1)...(19): siRNA sense strand
gagucuagcggccuuaugg

SEQ ID NO: 1190168 - RNA, 19 nt, Homo sapiens
  misc_RNA (1)...(19): siRNA sense strand
gaaaaugucgcaggagguu

SEQ ID NO: 1190169 - RNA, 19 nt, Homo sapiens
  misc_RNA (1)...(19): siRNA sense strand
ggagucgcuuaaagaaguc

SEQ ID NO: 1190170 - RNA, 19 nt, Homo sapiens
  misc_RNA (1)...(19): siRNA sense strand
gcauguggagaaacuggaa

SEQ ID NO: 1190171 - RNA, 19 nt, Homo sapiens
  misc_RNA (1)...(19): siRNA sense strand
ucucucagauacuuugaag

SEQ ID NO: 1190172 - RNA, 19 nt, Homo sapiens
  misc_RNA (1)...(19): siRNA sense strand
guggagaaacuggaacuug

SEQ ID NO: 1190173 - RNA, 19 nt, Homo sapiens
  misc_RNA (1)...(19): siRNA sense strand
gaacaaauaaaaggagaga

SEQ ID NO: 1190174 - RNA, 19 nt, Homo sapiens
  misc_RNA (1)...(19): siRNA sense strand
gacaagcauggugaucuuu

SEQ ID NO: 1190175 - RNA, 19 nt, Homo sapiens
  misc_RNA (1)...(19): siRNA sense strand
gagaaacuggaacuuggau

SEQ ID NO: 1190176 - RNA, 19 nt, Homo sapiens
  misc_RNA (1)...(19): siRNA sense strand
aaaugucgcaggagguuug

SEQ ID NO: 1190177 - RNA, 19 nt, Homo sapiens
  misc_RNA (1)...(19): siRNA sense strand
aggaggagaagaagcauga

SEQ ID NO: 1190178 - RNA, 19 nt, Homo sapiens
  misc_RNA (1)...(19): siRNA sense strand
agagcgcacugcaguugga

SEQ ID NO: 1190179 - RNA, 19 nt, Homo sapiens
  misc_RNA (1)...(19): siRNA sense strand
gaaaacaaucagugcauca

SEQ ID NO: 1190180 - RNA, 19 nt, Homo sapiens
  misc_RNA (1)...(19): siRNA sense strand
gaggaaggagcuggagaga

SEQ ID NO: 1190181 - RNA, 19 nt, Homo sapiens
  misc_RNA (1)...(19): siRNA sense strand
gaucaauaugcugaacaaa

SEQ ID NO: 1190182 - RNA, 19 nt, Homo sapiens
  misc_RNA (1)...(19): siRNA sense strand
gugcagcuccuuggugaga

SEQ ID NO: 1190183 - RNA, 19 nt, Homo sapiens
  misc_RNA (1)...(19): siRNA sense strand
aagaagaguccaaggaucu

SEQ ID NO: 1190184 - RNA, 19 nt, Homo sapiens
  misc_RNA (1)...(19): siRNA sense strand
guccauacgggagcagaua

SEQ ID NO: 1190185 - RNA, 19 nt, Homo sapiens
  misc_RNA (1)...(19): siRNA sense strand
gagaucaauaugcugaaca

SEQ ID NO: 1190186 - RNA, 19 nt, Homo sapiens
  misc_RNA (1)...(19): siRNA sense strand
aaacuggaacuuggauuca

SEQ ID NO: 1190187 - RNA, 19 nt, Homo sapiens
  misc_RNA (1)...(19): siRNA sense strand
cagcagaggaugaggaaaa

SEQ ID NO: 1190188 - RNA, 19 nt, Homo sapiens
  misc_RNA (1)...(19): siRNA sense strand
gagagaucaauaugcugaa

SEQ ID NO: 1190189 - RNA, 19 nt, Homo sapiens
  misc_RNA (1)...(19): siRNA sense strand
ggcagcagaggaugaggaa

SEQ ID NO: 1190190 - RNA, 19 nt, Homo sapiens
  misc_RNA (1)...(19): siRNA sense strand
gggaggaggccaucaucag

SEQ ID NO: 1190191 - RNA, 19 nt, Homo sapiens
  misc_RNA (1)...(19): siRNA sense strand
gaaaguacaucgccuucua

SEQ ID NO: 1190192 - RNA, 19 nt, Homo sapiens
  misc_RNA (1)...(19): siRNA sense strand
uaaaggagcugcaggagaa

SEQ ID NO: 1190193 - RNA, 19 nt, Homo sapiens
  misc_RNA (1)...(19): siRNA sense strand
ggaaggagcuggagagagu

SEQ ID NO: 1190194 - RNA, 19 nt, Homo sapiens
  misc_RNA (1)...(19): siRNA sense strand
ggaccuguaucacaugaaa

SEQ ID NO: 1190195 - RNA, 19 nt, Homo sapiens
  misc_RNA (1)...(19): siRNA sense strand
ggagagagaucaauaugcu

SEQ ID NO: 1190196 - RNA, 19 nt, Homo sapiens
  misc_RNA (1)...(19): siRNA sense strand
gcaggagguuugcacauug

SEQ ID NO: 1190197 - RNA, 19 nt, Homo sapiens
  misc_RNA (1)...(19): siRNA sense strand
gaaagcaaacaaugagaaa

SEQ ID NO: 1190198 - RNA, 19 nt, Homo sapiens
  misc_RNA (1)...(19): siRNA sense strand
gaaggagucgcuuaaagaa

SEQ ID NO: 1190199 - RNA, 19 nt, Homo sapiens
  misc_RNA (1)...(19): siRNA sense strand
gaaacauucucucagauac

SEQ ID NO: 1190200 - RNA, 19 nt, Homo sapiens
  misc_RNA (1)...(19): siRNA sense strand
caugaaacauucucucaga

SEQ ID NO: 1190201 - RNA, 19 nt, Homo sapiens
  misc_RNA (1)...(19): siRNA sense strand
ucagauacuuugaagaaga

SEQ ID NO: 1190202 - RNA, 19 nt, Homo sapiens
  misc_RNA (1)...(19): siRNA sense strand
agaaacaaguggaacauca

SEQ ID NO: 1190203 - RNA, 19 nt, Homo sapiens
  misc_RNA (1)...(19): siRNA sense strand
cgacaagcauggugaucuu

SEQ ID NO: 1190204 - RNA, 19 nt, Homo sapiens
  misc_RNA (1)...(19): siRNA sense strand
ugaaacauucucucagaua

SEQ ID NO: 1190205 - RNA, 19 nt, Homo sapiens
  misc_RNA (1)...(19): siRNA sense strand
gaggagaagaagcaugaua

SEQ ID NO: 1190206 - RNA, 19 nt, Homo sapiens
  misc_RNA (1)...(19): siRNA sense strand
gaaacuggaacuuggauuc

SEQ ID NO: 1190207 - RNA, 19 nt, Homo sapiens
  misc_RNA (1)...(19): siRNA sense strand
gcaguuagagcaguccaua

SEQ ID NO: 1190208 - RNA, 19 nt, Homo sapiens
  misc_RNA (1)...(19): siRNA sense strand
guacaucgccuucuaacag

SEQ ID NO: 1190209 - RNA, 19 nt, Homo sapiens
  misc_RNA (1)...(19): siRNA sense strand
ugaaggagucgcuuaaaga

SEQ ID NO: 1190210 - RNA, 19 nt, Homo sapiens
  misc_RNA (1)...(19): siRNA sense strand
gagcuuguccagacucaaa

SEQ ID NO: 1190211 - RNA, 19 nt, Homo sapiens
  misc_RNA (1)...(19): siRNA sense strand
gaaaagaaagcaaacaaug

SEQ ID NO: 1190212 - RNA, 19 nt, Homo sapiens
  misc_RNA (1)...(19): siRNA sense strand
gcacauugaaggaggagaa

SEQ ID NO: 1190213 - RNA, 19 nt, Homo sapiens
  misc_RNA (1)...(19): siRNA sense strand
aacaucagcuggaagaaga

SEQ ID NO: 1190214 - RNA, 19 nt, Homo sapiens
  misc_RNA (1)...(19): siRNA sense strand
caaacaaugagaaacagaa

SEQ ID NO: 1190215 - RNA, 19 nt, Homo sapiens
  misc_RNA (1)...(19): siRNA sense strand
ucucagauacuuugaagaa

SEQ ID NO: 1190216 - RNA, 19 nt, Homo sapiens
  misc_RNA (1)...(19): siRNA sense strand
ugaaugacaccaucaaauc

SEQ ID NO: 1190217 - RNA, 19 nt, Homo sapiens
  misc_RNA (1)...(19): siRNA sense strand
gcaguuggagcagcaagua

SEQ ID NO: 1190218 - RNA, 19 nt, Homo sapiens
  misc_RNA (1)...(19): siRNA sense strand
gagauugaacacagagaaa

SEQ ID NO: 1190219 - RNA, 19 nt, Homo sapiens
  misc_RNA (1)...(19): siRNA sense strand
gaacaucagcuggaagaag

SEQ ID NO: 1190220 - RNA, 19 nt, Homo sapiens
  misc_RNA (1)...(19): siRNA sense strand
caggagguuugcacauuga

SEQ ID NO: 1190221 - RNA, 19 nt, Homo sapiens
  misc_RNA (1)...(19): siRNA sense strand
gaaugacaccaucaaaucu

SEQ ID NO: 1190222 - RNA, 19 nt, Homo sapiens
  misc_RNA (1)...(19): siRNA sense strand
gagggagcauguggagaaa

SEQ ID NO: 1190223 - RNA, 19 nt, Homo sapiens
  misc_RNA (1)...(19): siRNA sense strand
caagagcgcacugcaguug

SEQ ID NO: 1190224 - RNA, 19 nt, Homo sapiens
  misc_RNA (1)...(19): siRNA sense strand
gaagaaacaaguggaacau

SEQ ID NO: 1190225 - RNA, 19 nt, Homo sapiens
  misc_RNA (1)...(19): siRNA sense strand
caagcauggugaucuuugu

SEQ ID NO: 1190226 - RNA, 19 nt, Homo sapiens
  misc_RNA (1)...(19): siRNA sense strand
ggagcuagagggucaaauc

SEQ ID NO: 1190227 - RNA, 19 nt, Homo sapiens
  misc_RNA (1)...(19): siRNA sense strand
ugagggagcauguggagaa

SEQ ID NO: 1190228 - RNA, 19 nt, Homo sapiens
  misc_RNA (1)...(19): siRNA sense strand
gcaaacaaugagaaacaga

SEQ ID NO: 1190229 - RNA, 19 nt, Homo sapiens
  misc_RNA (1)...(19): siRNA sense strand
uguaucacaugaaacauuc

SEQ ID NO: 1190230 - RNA, 19 nt, Homo sapiens
  misc_RNA (1)...(19): siRNA sense strand
ggacacgugacacaguuga

SEQ ID NO: 1190231 - RNA, 19 nt, Homo sapiens
  misc_RNA (1)...(19): siRNA sense strand
ggagaaacuggaacuugga

SEQ ID NO: 1190232 - RNA, 19 nt, Homo sapiens
  misc_RNA (1)...(19): siRNA sense strand
aggagucgcuuaaagaagu

SEQ ID NO: 1190233 - RNA, 19 nt, Homo sapiens
  misc_RNA (1)...(19): siRNA sense strand
gcagcuccuuggugagaug

SEQ ID NO: 1190234 - RNA, 19 nt, Homo sapiens
  misc_RNA (1)...(19): siRNA sense strand
gggagcauguggagaaacu

SEQ ID NO: 1190235 - RNA, 19 nt, Homo sapiens
  misc_RNA (1)...(19): siRNA sense strand
cgcaggagguuugcacauu

SEQ ID NO: 1190236 - RNA, 19 nt, Homo sapiens
  misc_RNA (1)...(19): siRNA sense strand
aaagaaagcaaacaaugag

SEQ ID NO: 1190237 - RNA, 19 nt, Homo sapiens
  misc_RNA (1)...(19): siRNA sense strand
aaaguacaucgccuucuaa

SEQ ID NO: 1190238 - RNA, 19 nt, Homo sapiens
  misc_RNA (1)...(19): siRNA sense strand
gaaacagaaagcugaaagg

SEQ ID NO: 1190239 - RNA, 19 nt, Homo sapiens
  misc_RNA (1)...(19): siRNA sense strand
ccggaacccugcugcugaa

SEQ ID NO: 1190240 - RNA, 19 nt, Homo sapiens
  misc_RNA (1)...(19): siRNA sense strand
uacaucgccuucuaacaga

SEQ ID NO: 1190241 - RNA, 19 nt, Homo sapiens
  misc_RNA (1)...(19): siRNA sense strand
ucagagcccgugccaagaa

SEQ ID NO: 1190242 - RNA, 19 nt, Homo sapiens
  misc_RNA (1)...(19): siRNA sense strand
ugcaagaccugaggaagga

SEQ ID NO: 1190243 - RNA, 19 nt, Homo sapiens
  misc_RNA (1)...(19): siRNA sense strand
agaucaauaugcugaacaa

SEQ ID NO: 1190244 - RNA, 19 nt, Homo sapiens
  misc_RNA (1)...(19): siRNA sense strand
gcaguaaagcacuucucaa

SEQ ID NO: 1190245 - RNA, 19 nt, Homo sapiens
  misc_RNA (1)...(19): siRNA sense strand
ugaagaagaguccaaggau

SEQ ID NO: 1190246 - RNA, 19 nt, Homo sapiens
  misc_RNA (1)...(19): siRNA sense strand
cagauacuuugaagaagag

SEQ ID NO: 1190247 - RNA, 19 nt, Homo sapiens
  misc_RNA (1)...(19): siRNA sense strand
cguggagccugcacaagga

SEQ ID NO: 1190248 - RNA, 19 nt, Homo sapiens
  misc_RNA (1)...(19): siRNA sense strand
agaaagcaaacaaugagaa

SEQ ID NO: 1190249 - RNA, 19 nt, Homo sapiens
  misc_RNA (1)...(19): siRNA sense strand
aaggacacgugacacaguu

SEQ ID NO: 1190250 - RNA, 19 nt, Homo sapiens
  misc_RNA (1)...(19): siRNA sense strand
gcugaaaggacacgugaca

SEQ ID NO: 1190251 - RNA, 19 nt, Homo sapiens
  misc_RNA (1)...(19): siRNA sense strand
ugaaaggacacgugacaca

SEQ ID NO: 1190252 - RNA, 19 nt, Homo sapiens
  misc_RNA (1)...(19): siRNA sense strand
ugaaggaggagaagaagca

SEQ ID NO: 1190253 - RNA, 19 nt, Homo sapiens
  misc_RNA (1)...(19): siRNA sense strand
gagccgcaguaaagcacuu

SEQ ID NO: 1190254 - RNA, 19 nt, Homo sapiens
  misc_RNA (1)...(19): siRNA sense strand
gaaacaaguggaacaucag

SEQ ID NO: 1190255 - RNA, 19 nt, Homo sapiens
  misc_RNA (1)...(19): siRNA sense strand
caguaaagcacuucucaag

SEQ ID NO: 1190256 - RNA, 19 nt, Homo sapiens
  misc_RNA (1)...(19): siRNA sense strand
aagcaaacaaugagaaaca

SEQ ID NO: 1190257 - RNA, 19 nt, Homo sapiens
  misc_RNA (1)...(19): siRNA sense strand
gagaaacagaaagcugaaa

SEQ ID NO: 1190258 - RNA, 19 nt, Homo sapiens
  misc_RNA (1)...(19): siRNA sense strand
ugaacucgagguccauaaa

SEQ ID NO: 1190259 - RNA, 19 nt, Homo sapiens
  misc_RNA (1)...(19): siRNA sense strand
gcuggagagagaucaauau

SEQ ID NO: 1190260 - RNA, 19 nt, Homo sapiens
  misc_RNA (1)...(19): siRNA sense strand
cauugaaggaggagaagaa

SEQ ID NO: 1190261 - RNA, 19 nt, Homo sapiens
  misc_RNA (1)...(19): siRNA sense strand
aacauucucucagauacuu

SEQ ID NO: 1190262 - RNA, 19 nt, Homo sapiens
  misc_RNA (1)...(19): siRNA sense strand
gaacucgagguccauaaaa

SEQ ID NO: 1190263 - RNA, 19 nt, Homo sapiens
  misc_RNA (1)...(19): siRNA sense strand
gcagcguauaggagaguua

SEQ ID NO: 1190264 - RNA, 19 nt, Homo sapiens
  misc_RNA (1)...(19): siRNA sense strand
uugaaggagucgcuuaaag

SEQ ID NO: 1190265 - RNA, 19 nt, Homo sapiens
  misc_RNA (1)...(19): siRNA sense strand
gagucuagcggccuuaugg

SEQ ID NO: 1190266 - RNA, 19 nt, Homo sapiens
  misc_RNA (1)...(19): siRNA sense strand
gaaaaugucgcaggagguu

SEQ ID NO: 1190267 - RNA, 19 nt, Homo sapiens
  misc_RNA (1)...(19): siRNA sense strand
ggagucgcuuaaagaaguc

SEQ ID NO: 1190268 - RNA, 19 nt, Homo sapiens
  misc_RNA (1)...(19): siRNA sense strand
ucucucagauacuuugaag

SEQ ID NO: 1190269 - RNA, 19 nt, Homo sapiens
  misc_RNA (1)...(19): siRNA sense strand
guggagaaacuggaacuug

SEQ ID NO: 1190270 - RNA, 19 nt, Homo sapiens
  misc_RNA (1)...(19): siRNA sense strand
gcauguggagaaacuggaa

SEQ ID NO: 1190271 - RNA, 19 nt, Homo sapiens
  misc_RNA (1)...(19): siRNA sense strand
augacaccaucaaaucuuu

SEQ ID NO: 1190272 - RNA, 19 nt, Homo sapiens
  misc_RNA (1)...(19): siRNA sense strand
gaacaaauaaaaggagaga

SEQ ID NO: 1190273 - RNA, 19 nt, Homo sapiens
  misc_RNA (1)...(19): siRNA sense strand
gacaagcauggugaucuuu

SEQ ID NO: 1190274 - RNA, 19 nt, Homo sapiens
  misc_RNA (1)...(19): siRNA sense strand
gagaaacuggaacuuggau

SEQ ID NO: 1190275 - RNA, 19 nt, Homo sapiens
  misc_RNA (1)...(19): siRNA sense strand
aaaugucgcaggagguuug

SEQ ID NO: 1190276 - RNA, 19 nt, Homo sapiens
  misc_RNA (1)...(19): siRNA sense strand
aagcagcaguccugaacuc

SEQ ID NO: 1190277 - RNA, 19 nt, Homo sapiens
  misc_RNA (1)...(19): siRNA sense strand
agaagaaacaaguggaaca

SEQ ID NO: 1190278 - RNA, 19 nt, Homo sapiens
  misc_RNA (1)...(19): siRNA sense strand
agagcgcacugcaguugga

SEQ ID NO: 1190279 - RNA, 19 nt, Homo sapiens
  misc_RNA (1)...(19): siRNA sense strand
gaaaacaaucagugcauca

SEQ ID NO: 1190280 - RNA, 19 nt, Homo sapiens
  misc_RNA (1)...(19): siRNA sense strand
gaggaaggagcuggagaga

SEQ ID NO: 1190281 - RNA, 19 nt, Homo sapiens
  misc_RNA (1)...(19): siRNA sense strand
aggaggagaagaagcauga

SEQ ID NO: 1190282 - RNA, 19 nt, Homo sapiens
  misc_RNA (1)...(19): siRNA sense strand
aagaagaguccaaggaucu

SEQ ID NO: 1190283 - RNA, 19 nt, Homo sapiens
  misc_RNA (1)...(19): siRNA sense strand
gugcagcuccuuggugaga

SEQ ID NO: 1190284 - RNA, 19 nt, Homo sapiens
  misc_RNA (1)...(19): siRNA sense strand
uggaacaucagcuggaaga

SEQ ID NO: 1190285 - RNA, 19 nt, Homo sapiens
  misc_RNA (1)...(19): siRNA sense strand
gaucaauaugcugaacaaa

SEQ ID NO: 1190286 - RNA, 19 nt, Homo sapiens
  misc_RNA (1)...(19): siRNA sense strand
guccauacgggagcagaua

SEQ ID NO: 1190287 - RNA, 19 nt, Homo sapiens
  misc_RNA (1)...(19): siRNA sense strand
gagaucaauaugcugaaca

SEQ ID NO: 1190288 - RNA, 19 nt, Homo sapiens
  misc_RNA (1)...(19): siRNA sense strand
cacaugaaacauucucuca

SEQ ID NO: 1190289 - RNA, 19 nt, Homo sapiens
  misc_RNA (1)...(19): siRNA sense strand
aaacuggaacuuggauuca

SEQ ID NO: 1190290 - RNA, 19 nt, Homo sapiens
  misc_RNA (1)...(19): siRNA sense strand
cagcagaggaugaggaaaa

SEQ ID NO: 1190291 - RNA, 19 nt, Homo sapiens
  misc_RNA (1)...(19): siRNA sense strand
gcacaagacuggucgaauu

SEQ ID NO: 1190292 - RNA, 19 nt, Homo sapiens
  misc_RNA (1)...(19): siRNA sense strand
gggaagcccuuauaaacuu

SEQ ID NO: 1190293 - RNA, 19 nt, Homo sapiens
  misc_RNA (1)...(19): siRNA sense strand
gagaaagugugaaccuauu

SEQ ID NO: 1190294 - RNA, 19 nt, Homo sapiens
  misc_RNA (1)...(19): siRNA sense strand
ggagaaagcacaugaagga

SEQ ID NO: 1190295 - RNA, 19 nt, Homo sapiens
  misc_RNA (1)...(19): siRNA sense strand
ugacaaaucuuacccuaca

SEQ ID NO: 1190296 - RNA, 19 nt, Homo sapiens
  misc_RNA (1)...(19): siRNA sense strand
gagagaaagugugaaccua

SEQ ID NO: 1190297 - RNA, 19 nt, Homo sapiens
  misc_RNA (1)...(19): siRNA sense strand
ggacugcacggucauggua

SEQ ID NO: 1190298 - RNA, 19 nt, Homo sapiens
  misc_RNA (1)...(19): siRNA sense strand
gacuugauguuaacaaaug

SEQ ID NO: 1190299 - RNA, 19 nt, Homo sapiens
  misc_RNA (1)...(19): siRNA sense strand
gaccugggauaguuccuuu

SEQ ID NO: 1190300 - RNA, 19 nt, Homo sapiens
  misc_RNA (1)...(19): siRNA sense strand
cagcaucauuuacuuaugu

SEQ ID NO: 1190301 - RNA, 19 nt, Homo sapiens
  misc_RNA (1)...(19): siRNA sense strand
gcagcuggcucucuggaau

SEQ ID NO: 1190302 - RNA, 19 nt, Homo sapiens
  misc_RNA (1)...(19): siRNA sense strand
gaaaauggacucacccuuu

SEQ ID NO: 1190303 - RNA, 19 nt, Homo sapiens
  misc_RNA (1)...(19): siRNA sense strand
gagcaaguuucggcaugua

SEQ ID NO: 1190304 - RNA, 19 nt, Homo sapiens
  misc_RNA (1)...(19): siRNA sense strand
ucaagguggucaagaagaa

SEQ ID NO: 1190305 - RNA, 19 nt, Homo sapiens
  misc_RNA (1)...(19): siRNA sense strand
aaugugagauugccagauu

SEQ ID NO: 1190306 - RNA, 19 nt, Homo sapiens
  misc_RNA (1)...(19): siRNA sense strand
gacacaaucugcaaucaag

SEQ ID NO: 1190307 - RNA, 19 nt, Homo sapiens
  misc_RNA (1)...(19): siRNA sense strand
gagcguauuuccaaguuag

SEQ ID NO: 1190308 - RNA, 19 nt, Homo sapiens
  misc_RNA (1)...(19): siRNA sense strand
cuuauaaacuuggacgaua

SEQ ID NO: 1190309 - RNA, 19 nt, Homo sapiens
  misc_RNA (1)...(19): siRNA sense strand
caauugcucuucaugagau

SEQ ID NO: 1190310 - RNA, 19 nt, Homo sapiens
  misc_RNA (1)...(19): siRNA sense strand
caaguuggaugagauuuua

SEQ ID NO: 1190311 - RNA, 19 nt, Homo sapiens
  misc_RNA (1)...(19): siRNA sense strand
gggacuugauguuaacaaa

SEQ ID NO: 1190312 - RNA, 19 nt, Homo sapiens
  misc_RNA (1)...(19): siRNA sense strand
ggaagcccuuauaaacuug

SEQ ID NO: 1190313 - RNA, 19 nt, Homo sapiens
  misc_RNA (1)...(19): siRNA sense strand
gaacagcagauggcaaaga

SEQ ID NO: 1190314 - RNA, 19 nt, Homo sapiens
  misc_RNA (1)...(19): siRNA sense strand
gaaagugugaaccuauuau

SEQ ID NO: 1190315 - RNA, 19 nt, Homo sapiens
  misc_RNA (1)...(19): siRNA sense strand
guuaacaaaugugagauug

SEQ ID NO: 1190316 - RNA, 19 nt, Homo sapiens
  misc_RNA (1)...(19): siRNA sense strand
gauaugcauucagacauga

SEQ ID NO: 1190317 - RNA, 19 nt, Homo sapiens
  misc_RNA (1)...(19): siRNA sense strand
ggaaggccacucaaagaga

SEQ ID NO: 1190318 - RNA, 19 nt, Homo sapiens
  misc_RNA (1)...(19): siRNA sense strand
ggaaagggugacagcagua

SEQ ID NO: 1190319 - RNA, 19 nt, Homo sapiens
  misc_RNA (1)...(19): siRNA sense strand
cgauaugcauucagacaug

SEQ ID NO: 1190320 - RNA, 19 nt, Homo sapiens
  misc_RNA (1)...(19): siRNA sense strand
caagaaagugagagucauu

SEQ ID NO: 1190321 - RNA, 19 nt, Homo sapiens
  misc_RNA (1)...(19): siRNA sense strand
gaaggagcaagacccauga

SEQ ID NO: 1190322 - RNA, 19 nt, Homo sapiens
  misc_RNA (1)...(19): siRNA sense strand
ugacagcaguauucgcuau

SEQ ID NO: 1190323 - RNA, 19 nt, Homo sapiens
  misc_RNA (1)...(19): siRNA sense strand
gacugaaccuguggugauu

SEQ ID NO: 1190324 - RNA, 19 nt, Homo sapiens
  misc_RNA (1)...(19): siRNA sense strand
caaucaagaugagcguauu

SEQ ID NO: 1190325 - RNA, 19 nt, Homo sapiens
  misc_RNA (1)...(19): siRNA sense strand
gauguuaacaaaugugaga

SEQ ID NO: 1190326 - RNA, 19 nt, Homo sapiens
  misc_RNA (1)...(19): siRNA sense strand
gaaccaauugcucuucaug

SEQ ID NO: 1190327 - RNA, 19 nt, Homo sapiens
  misc_RNA (1)...(19): siRNA sense strand
gaaggagaaagcacaugaa

SEQ ID NO: 1190328 - RNA, 19 nt, Homo sapiens
  misc_RNA (1)...(19): siRNA sense strand
gaaagugagagucauugau

SEQ ID NO: 1190329 - RNA, 19 nt, Homo sapiens
  misc_RNA (1)...(19): siRNA sense strand
ccagauuuguugccauaau

SEQ ID NO: 1190330 - RNA, 19 nt, Homo sapiens
  misc_RNA (1)...(19): siRNA sense strand
gccagauucuucaaacuuc

SEQ ID NO: 1190331 - RNA, 19 nt, Homo sapiens
  misc_RNA (1)...(19): siRNA sense strand
gcacagcuuccaaagacaa

SEQ ID NO: 1190332 - RNA, 19 nt, Homo sapiens
  misc_RNA (1)...(19): siRNA sense strand
gaucugcacagcuuccaaa

SEQ ID NO: 1190333 - RNA, 19 nt, Homo sapiens
  misc_RNA (1)...(19): siRNA sense strand
gcaaguuucggcauguauu

SEQ ID NO: 1190334 - RNA, 19 nt, Homo sapiens
  misc_RNA (1)...(19): siRNA sense strand
gacaagaaagugagaguca

SEQ ID NO: 1190335 - RNA, 19 nt, Homo sapiens
  misc_RNA (1)...(19): siRNA sense strand
gagauggacacuagcaaug

SEQ ID NO: 1190336 - RNA, 19 nt, Homo sapiens
  misc_RNA (1)...(19): siRNA sense strand
ucccagauuuguugccaua

SEQ ID NO: 1190337 - RNA, 19 nt, Homo sapiens
  misc_RNA (1)...(19): siRNA sense strand
ggguguugcugccuuucua

SEQ ID NO: 1190338 - RNA, 19 nt, Homo sapiens
  misc_RNA (1)...(19): siRNA sense strand
uagaacagcagauggcaaa

SEQ ID NO: 1190339 - RNA, 19 nt, Homo sapiens
  misc_RNA (1)...(19): siRNA sense strand
gcaaucaagaugagcguau

SEQ ID NO: 1190340 - RNA, 19 nt, Homo sapiens
  misc_RNA (1)...(19): siRNA sense strand
gugugaaccuauuauuaug

SEQ ID NO: 1190341 - RNA, 19 nt, Homo sapiens
  misc_RNA (1)...(19): siRNA sense strand
cuucaaacuucaugagaga

SEQ ID NO: 1190342 - RNA, 19 nt, Homo sapiens
  misc_RNA (1)...(19): siRNA sense strand
gcaagaaugcagacccaau

SEQ ID NO: 1190343 - RNA, 19 nt, Homo sapiens
  misc_RNA (1)...(19): siRNA sense strand
caaguuucggcauguauuu

SEQ ID NO: 1190344 - RNA, 19 nt, Homo sapiens
  misc_RNA (1)...(19): siRNA sense strand
uccacuaccucaacacauu

SEQ ID NO: 1190345 - RNA, 19 nt, Homo sapiens
  misc_RNA (1)...(19): siRNA sense strand
agaaagugugaaccuauua

SEQ ID NO: 1190346 - RNA, 19 nt, Homo sapiens
  misc_RNA (1)...(19): siRNA sense strand
caaaucuuacccuacagua

SEQ ID NO: 1190347 - RNA, 19 nt, Homo sapiens
  misc_RNA (1)...(19): siRNA sense strand
ugagcguauuuccaaguua

SEQ ID NO: 1190348 - RNA, 19 nt, Homo sapiens
  misc_RNA (1)...(19): siRNA sense strand
ggacuugauguuaacaaau

SEQ ID NO: 1190349 - RNA, 19 nt, Homo sapiens
  misc_RNA (1)...(19): siRNA sense strand
gaaagggugacagcaguau

SEQ ID NO: 1190350 - RNA, 19 nt, Homo sapiens
  misc_RNA (1)...(19): siRNA sense strand
cgugugaccugggauaguu

SEQ ID NO: 1190351 - RNA, 19 nt, Homo sapiens
  misc_RNA (1)...(19): siRNA sense strand
acauaacgaucaggucauu

SEQ ID NO: 1190352 - RNA, 19 nt, Homo sapiens
  misc_RNA (1)...(19): siRNA sense strand
agucugaucugcacagcuu

SEQ ID NO: 1190353 - RNA, 19 nt, Homo sapiens
  misc_RNA (1)...(19): siRNA sense strand
gcaagcccacugcaaacaa

SEQ ID NO: 1190354 - RNA, 19 nt, Homo sapiens
  misc_RNA (1)...(19): siRNA sense strand
gagauugccagauucuuca

SEQ ID NO: 1190355 - RNA, 19 nt, Homo sapiens
  misc_RNA (1)...(19): siRNA sense strand
acaccagcaucauuuacuu

SEQ ID NO: 1190356 - RNA, 19 nt, Homo sapiens
  misc_RNA (1)...(19): siRNA sense strand
uuuccaagaugaccuguau

SEQ ID NO: 1190357 - RNA, 19 nt, Homo sapiens
  misc_RNA (1)...(19): siRNA sense strand
ggaaccaauugcucuucau

SEQ ID NO: 1190358 - RNA, 19 nt, Homo sapiens
  misc_RNA (1)...(19): siRNA sense strand
caagaaugcagacccaauc

SEQ ID NO: 1190359 - RNA, 19 nt, Homo sapiens
  misc_RNA (1)...(19): siRNA sense strand
auagacuggugcccacaua

SEQ ID NO: 1190360 - RNA, 19 nt, Homo sapiens
  misc_RNA (1)...(19): siRNA sense strand
caaguuagaacagcagaug

SEQ ID NO: 1190361 - RNA, 19 nt, Homo sapiens
  misc_RNA (1)...(19): siRNA sense strand
aagaugagcguauuuccaa

SEQ ID NO: 1190362 - RNA, 19 nt, Homo sapiens
  misc_RNA (1)...(19): siRNA sense strand
acagcaguauucgcuauuu

SEQ ID NO: 1190363 - RNA, 19 nt, Homo sapiens
  misc_RNA (1)...(19): siRNA sense strand
caccagcaucauuuacuua

SEQ ID NO: 1190364 - RNA, 19 nt, Homo sapiens
  misc_RNA (1)...(19): siRNA sense strand
uggacgauaugcauucaga

SEQ ID NO: 1190365 - RNA, 19 nt, Homo sapiens
  misc_RNA (1)...(19): siRNA sense strand
caagaagugcgaccugauc

SEQ ID NO: 1190366 - RNA, 19 nt, Homo sapiens
  misc_RNA (1)...(19): siRNA sense strand
gaccagugcuaugaugaca

SEQ ID NO: 1190367 - RNA, 19 nt, Homo sapiens
  misc_RNA (1)...(19): siRNA sense strand
agaaggagaaagcacauga

SEQ ID NO: 1190368 - RNA, 19 nt, Homo sapiens
  misc_RNA (1)...(19): siRNA sense strand
cugcacagcuuccaaagac

SEQ ID NO: 1190369 - RNA, 19 nt, Homo sapiens
  misc_RNA (1)...(19): siRNA sense strand
ugacugaaccuguggugau

SEQ ID NO: 1190370 - RNA, 19 nt, Homo sapiens
  misc_RNA (1)...(19): siRNA sense strand
cagcagauggcaaagauag

SEQ ID NO: 1190371 - RNA, 19 nt, Homo sapiens
  misc_RNA (1)...(19): siRNA sense strand
caagcccacugcaaacaag

SEQ ID NO: 1190372 - RNA, 19 nt, Homo sapiens
  misc_RNA (1)...(19): siRNA sense strand
ucaaacuucaugagagaaa

SEQ ID NO: 1190373 - RNA, 19 nt, Homo sapiens
  misc_RNA (1)...(19): siRNA sense strand
ccugacaccagcaucauuu

SEQ ID NO: 1190374 - RNA, 19 nt, Homo sapiens
  misc_RNA (1)...(19): siRNA sense strand
agucauugaucccaggaaa

SEQ ID NO: 1190375 - RNA, 19 nt, Homo sapiens
  misc_RNA (1)...(19): siRNA sense strand
aaagugagagucauugauc

SEQ ID NO: 1190376 - RNA, 19 nt, Homo sapiens
  misc_RNA (1)...(19): siRNA sense strand
caaagacaagaaagugaga

SEQ ID NO: 1190377 - RNA, 19 nt, Homo sapiens
  misc_RNA (1)...(19): siRNA sense strand
aaucuuacccuacaguaug

SEQ ID NO: 1190378 - RNA, 19 nt, Homo sapiens
  misc_RNA (1)...(19): siRNA sense strand
ccagauucuucaaacuuca

SEQ ID NO: 1190379 - RNA, 19 nt, Homo sapiens
  misc_RNA (1)...(19): siRNA sense strand
gauagcaagcccacugcaa

SEQ ID NO: 1190380 - RNA, 19 nt, Homo sapiens
  misc_RNA (1)...(19): siRNA sense strand
gaugaccuguauccugaca

SEQ ID NO: 1190381 - RNA, 19 nt, Homo sapiens
  misc_RNA (1)...(19): siRNA sense strand
gcaggaaccaauugcucuu

SEQ ID NO: 1190382 - RNA, 19 nt, Homo sapiens
  misc_RNA (1)...(19): siRNA sense strand
ccaauugcucuucaugaga

SEQ ID NO: 1190383 - RNA, 19 nt, Homo sapiens
  misc_RNA (1)...(19): siRNA sense strand
cacaagacuggucgaauug

SEQ ID NO: 1190384 - RNA, 19 nt, Homo sapiens
  misc_RNA (1)...(19): siRNA sense strand
gcagauggcaaagauagca

SEQ ID NO: 1190385 - RNA, 19 nt, Homo sapiens
  misc_RNA (1)...(19): siRNA sense strand
aacagcagauggcaaagau

SEQ ID NO: 1190386 - RNA, 19 nt, Homo sapiens
  misc_RNA (1)...(19): siRNA sense strand
ugaccuguauccugacaca

SEQ ID NO: 1190387 - RNA, 19 nt, Homo sapiens
  misc_RNA (1)...(19): siRNA sense strand
ugagauugccagauucuuc

SEQ ID NO: 1190388 - RNA, 19 nt, Homo sapiens
  misc_RNA (1)...(19): siRNA sense strand
cagcaaggagccucagaga

SEQ ID NO: 1190389 - RNA, 19 nt, Homo sapiens
  misc_RNA (1)...(19): siRNA sense strand
ccagcaucauuuacuuaug

SEQ ID NO: 1190390 - RNA, 19 nt, Homo sapiens
  misc_RNA (1)...(19): siRNA sense strand
ccaauccucaucuccuuga

SEQ ID NO: 1190391 - RNA, 19 nt, Homo sapiens
  misc_RNA (1)...(19): siRNA sense strand
gagaaacacugaccuuaua

SEQ ID NO: 1190392 - RNA, 19 nt, Homo sapiens
  misc_RNA (1)...(19): siRNA sense strand
acacugaccuuauauguga

SEQ ID NO: 1190393 - RNA, 19 nt, Homo sapiens
  misc_RNA (1)...(19): siRNA sense strand
gggcagugcuguuguuguu

SEQ ID NO: 1190394 - RNA, 19 nt, Homo sapiens
  misc_RNA (1)...(19): siRNA sense strand
gcagugcuguuguuguugu

SEQ ID NO: 1190395 - RNA, 19 nt, Homo sapiens
  misc_RNA (1)...(19): siRNA sense strand
ucgcagaugugguggagaa

SEQ ID NO: 1190396 - RNA, 19 nt, Homo sapiens
  misc_RNA (1)...(19): siRNA sense strand
cgagaaacacugaccuuau

SEQ ID NO: 1190397 - RNA, 19 nt, Homo sapiens
  misc_RNA (1)...(19): siRNA sense strand
gaaacacugaccuuauaug

SEQ ID NO: 1190398 - RNA, 19 nt, Homo sapiens
  misc_RNA (1)...(19): siRNA sense strand
gcgcagaguccgugugaga

SEQ ID NO: 1190399 - RNA, 19 nt, Homo sapiens
  misc_RNA (1)...(19): siRNA sense strand
gaaggucacagcuggaauc

SEQ ID NO: 1190400 - RNA, 19 nt, Homo sapiens
  misc_RNA (1)...(19): siRNA sense strand
caccugccguggucuauau

SEQ ID NO: 1190401 - RNA, 19 nt, Homo sapiens
  misc_RNA (1)...(19): siRNA sense strand
gcuaagcggcgacacguau

SEQ ID NO: 1190402 - RNA, 19 nt, Homo sapiens
  misc_RNA (1)...(19): siRNA sense strand
ggaccggcacccuuucuug

SEQ ID NO: 1190403 - RNA, 19 nt, Homo sapiens
  misc_RNA (1)...(19): siRNA sense strand
ucgcaacgcugaggauuca

SEQ ID NO: 1190404 - RNA, 19 nt, Homo sapiens
  misc_RNA (1)...(19): siRNA sense strand
gggagcagaugguacaaaa

SEQ ID NO: 1190405 - RNA, 19 nt, Homo sapiens
  misc_RNA (1)...(19): siRNA sense strand
aaacacugaccuuauaugu

SEQ ID NO: 1190406 - RNA, 19 nt, Homo sapiens
  misc_RNA (1)...(19): siRNA sense strand
acaaaaugcugaagauguu

SEQ ID NO: 1190407 - RNA, 19 nt, Homo sapiens
  misc_RNA (1)...(19): siRNA sense strand
gcaccugccguggucuaua

SEQ ID NO: 1190408 - RNA, 19 nt, Homo sapiens
  misc_RNA (1)...(19): siRNA sense strand
ggaggugauuggagugaac

SEQ ID NO: 1190409 - RNA, 19 nt, Homo sapiens
  misc_RNA (1)...(19): siRNA sense strand
gagcagaugguacaaaaug

SEQ ID NO: 1190410 - RNA, 19 nt, Homo sapiens
  misc_RNA (1)...(19): siRNA sense strand
ugcugaagauguuuaugaa

SEQ ID NO: 1190411 - RNA, 19 nt, Homo sapiens
  misc_RNA (1)...(19): siRNA sense strand
gcagaugugguggagaaga

SEQ ID NO: 1190412 - RNA, 19 nt, Homo sapiens
  misc_RNA (1)...(19): siRNA sense strand
gggaggugauuggagugaa

SEQ ID NO: 1190413 - RNA, 19 nt, Homo sapiens
  misc_RNA (1)...(19): siRNA sense strand
ugaagauguuuaugaagcu

SEQ ID NO: 1190414 - RNA, 19 nt, Homo sapiens
  misc_RNA (1)...(19): siRNA sense strand
gccgaugggcucauuguca

SEQ ID NO: 1190415 - RNA, 19 nt, Homo sapiens
  misc_RNA (1)...(19): siRNA sense strand
cagcuggaaucuccuuugc

SEQ ID NO: 1190416 - RNA, 19 nt, Homo sapiens
  misc_RNA (1)...(19): siRNA sense strand
ccuuugccaucccuucuga

SEQ ID NO: 1190417 - RNA, 19 nt, Homo sapiens
  misc_RNA (1)...(19): siRNA sense strand
acgagaaacacugaccuua

SEQ ID NO: 1190418 - RNA, 19 nt, Homo sapiens
  misc_RNA (1)...(19): siRNA sense strand
gacgagaaacacugaccuu

SEQ ID NO: 1190419 - RNA, 19 nt, Homo sapiens
  misc_RNA (1)...(19): siRNA sense strand
gguacaaaaugcugaagau

SEQ ID NO: 1190420 - RNA, 19 nt, Homo sapiens
  misc_RNA (1)...(19): siRNA sense strand
gagugaacaccaugaaggu

SEQ ID NO: 1190421 - RNA, 19 nt, Homo sapiens
  misc_RNA (1)...(19): siRNA sense strand
gaagcuguucgaacccaau

SEQ ID NO: 1190422 - RNA, 19 nt, Homo sapiens
  misc_RNA (1)...(19): siRNA sense strand
agaaacacugaccuuauau

SEQ ID NO: 1190423 - RNA, 19 nt, Homo sapiens
  misc_RNA (1)...(19): siRNA sense strand
cagaugugguggagaagac

SEQ ID NO: 1190424 - RNA, 19 nt, Homo sapiens
  misc_RNA (1)...(19): siRNA sense strand
guacaacuucaucgcagau

SEQ ID NO: 1190425 - RNA, 19 nt, Homo sapiens
  misc_RNA (1)...(19): siRNA sense strand
uaagcggcgacacguauga

SEQ ID NO: 1190426 - RNA, 19 nt, Homo sapiens
  misc_RNA (1)...(19): siRNA sense strand
gcggccuggugaugugauu

SEQ ID NO: 1190427 - RNA, 19 nt, Homo sapiens
  misc_RNA (1)...(19): siRNA sense strand
gggaggagaccccguuuga

SEQ ID NO: 1190428 - RNA, 19 nt, Homo sapiens
  misc_RNA (1)...(19): siRNA sense strand
ggagucaguacaacuucau

SEQ ID NO: 1190429 - RNA, 19 nt, Homo sapiens
  misc_RNA (1)...(19): siRNA sense strand
gaugugauuuuggccauug

SEQ ID NO: 1190430 - RNA, 19 nt, Homo sapiens
  misc_RNA (1)...(19): siRNA sense strand
cggagucaguacaacuuca

SEQ ID NO: 1190431 - RNA, 19 nt, Homo sapiens
  misc_RNA (1)...(19): siRNA sense strand
gagaaacacugaccuuaua

SEQ ID NO: 1190432 - RNA, 19 nt, Homo sapiens
  misc_RNA (1)...(19): siRNA sense strand
acacugaccuuauauguga

SEQ ID NO: 1190433 - RNA, 19 nt, Homo sapiens
  misc_RNA (1)...(19): siRNA sense strand
gggcagugcuguuguuguu

SEQ ID NO: 1190434 - RNA, 19 nt, Homo sapiens
  misc_RNA (1)...(19): siRNA sense strand
gcagugcuguuguuguugu

SEQ ID NO: 1190435 - RNA, 19 nt, Homo sapiens
  misc_RNA (1)...(19): siRNA sense strand
ucgcagaugugguggagaa

SEQ ID NO: 1190436 - RNA, 19 nt, Homo sapiens
  misc_RNA (1)...(19): siRNA sense strand
cgagaaacacugaccuuau

SEQ ID NO: 1190437 - RNA, 19 nt, Homo sapiens
  misc_RNA (1)...(19): siRNA sense strand
gaaacacugaccuuauaug

SEQ ID NO: 1190438 - RNA, 19 nt, Homo sapiens
  misc_RNA (1)...(19): siRNA sense strand
gcgcagaguccgugugaga

SEQ ID NO: 1190439 - RNA, 19 nt, Homo sapiens
  misc_RNA (1)...(19): siRNA sense strand
gaaggucacagcuggaauc

SEQ ID NO: 1190440 - RNA, 19 nt, Homo sapiens
  misc_RNA (1)...(19): siRNA sense strand
caccugccguggucuauau

SEQ ID NO: 1190441 - RNA, 19 nt, Homo sapiens
  misc_RNA (1)...(19): siRNA sense strand
gcuaagcggcgacacguau

SEQ ID NO: 1190442 - RNA, 19 nt, Homo sapiens
  misc_RNA (1)...(19): siRNA sense strand
ggaccggcacccuuucuug

SEQ ID NO: 1190443 - RNA, 19 nt, Homo sapiens
  misc_RNA (1)...(19): siRNA sense strand
ucgcaacgcugaggauuca

SEQ ID NO: 1190444 - RNA, 19 nt, Homo sapiens
  misc_RNA (1)...(19): siRNA sense strand
gggagcagaugguacaaaa

SEQ ID NO: 1190445 - RNA, 19 nt, Homo sapiens
  misc_RNA (1)...(19): siRNA sense strand
aaacacugaccuuauaugu

SEQ ID NO: 1190446 - RNA, 19 nt, Homo sapiens
  misc_RNA (1)...(19): siRNA sense strand
acaaaaugcugaagauguu

SEQ ID NO: 1190447 - RNA, 19 nt, Homo sapiens
  misc_RNA (1)...(19): siRNA sense strand
gcaccugccguggucuaua

SEQ ID NO: 1190448 - RNA, 19 nt, Homo sapiens
  misc_RNA (1)...(19): siRNA sense strand
ggaggugauuggagugaac

SEQ ID NO: 1190449 - RNA, 19 nt, Homo sapiens
  misc_RNA (1)...(19): siRNA sense strand
gagcagaugguacaaaaug

SEQ ID NO: 1190450 - RNA, 19 nt, Homo sapiens
  misc_RNA (1)...(19): siRNA sense strand
ugcugaagauguuuaugaa

SEQ ID NO: 1190451 - RNA, 19 nt, Homo sapiens
  misc_RNA (1)...(19): siRNA sense strand
gcagaugugguggagaaga

SEQ ID NO: 1190452 - RNA, 19 nt, Homo sapiens
  misc_RNA (1)...(19): siRNA sense strand
gggaggugauuggagugaa

SEQ ID NO: 1190453 - RNA, 19 nt, Homo sapiens
  misc_RNA (1)...(19): siRNA sense strand
ugaagauguuuaugaagcu

SEQ ID NO: 1190454 - RNA, 19 nt, Homo sapiens
  misc_RNA (1)...(19): siRNA sense strand
gccgaugggcucauuguca

SEQ ID NO: 1190455 - RNA, 19 nt, Homo sapiens
  misc_RNA (1)...(19): siRNA sense strand
cagcuggaaucuccuuugc

SEQ ID NO: 1190456 - RNA, 19 nt, Homo sapiens
  misc_RNA (1)...(19): siRNA sense strand
ccuuugccaucccuucuga

SEQ ID NO: 1190457 - RNA, 19 nt, Homo sapiens
  misc_RNA (1)...(19): siRNA sense strand
acgagaaacacugaccuua

SEQ ID NO: 1190458 - RNA, 19 nt, Homo sapiens
  misc_RNA (1)...(19): siRNA sense strand
gacgagaaacacugaccuu

SEQ ID NO: 1190459 - RNA, 19 nt, Homo sapiens
  misc_RNA (1)...(19): siRNA sense strand
gguacaaaaugcugaagau

SEQ ID NO: 1190460 - RNA, 19 nt, Homo sapiens
  misc_RNA (1)...(19): siRNA sense strand
gagugaacaccaugaaggu

SEQ ID NO: 1190461 - RNA, 19 nt, Homo sapiens
  misc_RNA (1)...(19): siRNA sense strand
gaagcuguucgaacccaau

SEQ ID NO: 1190462 - RNA, 19 nt, Homo sapiens
  misc_RNA (1)...(19): siRNA sense strand
agaaacacugaccuuauau

SEQ ID NO: 1190463 - RNA, 19 nt, Homo sapiens
  misc_RNA (1)...(19): siRNA sense strand
cagaugugguggagaagac

SEQ ID NO: 1190464 - RNA, 19 nt, Homo sapiens
  misc_RNA (1)...(19): siRNA sense strand
guacaacuucaucgcagau

SEQ ID NO: 1190465 - RNA, 19 nt, Homo sapiens
  misc_RNA (1)...(19): siRNA sense strand
uaagcggcgacacguauga

SEQ ID NO: 1190466 - RNA, 19 nt, Homo sapiens
  misc_RNA (1)...(19): siRNA sense strand
gcggccuggugaugugauu

SEQ ID NO: 1190467 - RNA, 19 nt, Homo sapiens
  misc_RNA (1)...(19): siRNA sense strand
gggaggagaccccguuuga

SEQ ID NO: 1190468 - RNA, 19 nt, Homo sapiens
  misc_RNA (1)...(19): siRNA sense strand
ggagucaguacaacuucau

SEQ ID NO: 1190469 - RNA, 19 nt, Homo sapiens
  misc_RNA (1)...(19): siRNA sense strand
gaugugauuuuggccauug

SEQ ID NO: 1190470 - RNA, 19 nt, Homo sapiens
  misc_RNA (1)...(19): siRNA sense strand
cggagucaguacaacuuca

SEQ ID NO: 1190471 - RNA, 19 nt, Homo sapiens
  misc_RNA (1)...(19): siRNA sense strand
ccaugcagcuguuugagaa

SEQ ID NO: 1190472 - RNA, 19 nt, Homo sapiens
  misc_RNA (1)...(19): siRNA sense strand
agaaggagcugcagucucu

SEQ ID NO: 1190473 - RNA, 19 nt, Homo sapiens
  misc_RNA (1)...(19): siRNA sense strand
ccacagggcucagauagca

SEQ ID NO: 1190474 - RNA, 19 nt, Homo sapiens
  misc_RNA (1)...(19): siRNA sense strand
agaccaaguucaccaagaa

SEQ ID NO: 1190475 - RNA, 19 nt, Homo sapiens
  misc_RNA (1)...(19): siRNA sense strand
acacaccacuuagcaagaa

SEQ ID NO: 1190476 - RNA, 19 nt, Homo sapiens
  misc_RNA (1)...(19): siRNA sense strand
gaugcugccuggucaagug

SEQ ID NO: 1190477 - RNA, 19 nt, Homo sapiens
  misc_RNA (1)...(19): siRNA sense strand
gagcugcagucucucuaca

SEQ ID NO: 1190478 - RNA, 19 nt, Homo sapiens
  misc_RNA (1)...(19): siRNA sense strand
gcaagaaggaggguaucaa

SEQ ID NO: 1190479 - RNA, 19 nt, Homo sapiens
  misc_RNA (1)...(19): siRNA sense strand
ggagaugccaccaccuaug

SEQ ID NO: 1190480 - RNA, 19 nt, Homo sapiens
  misc_RNA (1)...(19): siRNA sense strand
ucuacgacauuaacaagga

SEQ ID NO: 1190481 - RNA, 19 nt, Homo sapiens
  misc_RNA (1)...(19): siRNA sense strand
ugaaguccaucuaugacau

SEQ ID NO: 1190482 - RNA, 19 nt, Homo sapiens
  misc_RNA (1)...(19): siRNA sense strand
cagaccaaguucaccaaga

SEQ ID NO: 1190483 - RNA, 19 nt, Homo sapiens
  misc_RNA (1)...(19): siRNA sense strand
caagaaggaggguaucaag

SEQ ID NO: 1190484 - RNA, 19 nt, Homo sapiens
  misc_RNA (1)...(19): siRNA sense strand
gaaguccaucuaugacaug

SEQ ID NO: 1190485 - RNA, 19 nt, Homo sapiens
  misc_RNA (1)...(19): siRNA sense strand
caucaugaaguccaucuau

SEQ ID NO: 1190486 - RNA, 19 nt, Homo sapiens
  misc_RNA (1)...(19): siRNA sense strand
caagugggccuuuaaucuc

SEQ ID NO: 1190487 - RNA, 19 nt, Homo sapiens
  misc_RNA (1)...(19): siRNA sense strand
ucaagugggccuuuaaucu

SEQ ID NO: 1190488 - RNA, 19 nt, Homo sapiens
  misc_RNA (1)...(19): siRNA sense strand
aagcucaagugggccuuua

SEQ ID NO: 1190489 - RNA, 19 nt, Homo sapiens
  misc_RNA (1)...(19): siRNA sense strand
agaaggaggguaucaagug

SEQ ID NO: 1190490 - RNA, 19 nt, Homo sapiens
  misc_RNA (1)...(19): siRNA sense strand
gccaggcuuugaugagaug

SEQ ID NO: 1190491 - RNA, 19 nt, Homo sapiens
  misc_RNA (1)...(19): siRNA sense strand
caccaccuaugcacacuuc

SEQ ID NO: 1190492 - RNA, 19 nt, Homo sapiens
  misc_RNA (1)...(19): siRNA sense strand
ccuuuaaucucuacgacau

SEQ ID NO: 1190493 - RNA, 19 nt, Homo sapiens
  misc_RNA (1)...(19): siRNA sense strand
gcagccggcuaaggaagug

SEQ ID NO: 1190494 - RNA, 19 nt, Homo sapiens
  misc_RNA (1)...(19): siRNA sense strand
ccgccaggcuuugaugaga

SEQ ID NO: 1190495 - RNA, 19 nt, Homo sapiens
  misc_RNA (1)...(19): siRNA sense strand
cggagcacguggagagguu

SEQ ID NO: 1190496 - RNA, 19 nt, Homo sapiens
  misc_RNA (1)...(19): siRNA sense strand
gcucaagugggccuuuaau

SEQ ID NO: 1190497 - RNA, 19 nt, Homo sapiens
  misc_RNA (1)...(19): siRNA sense strand
cauccacuuugaggacuuu

SEQ ID NO: 1190498 - RNA, 19 nt, Homo sapiens
  misc_RNA (1)...(19): siRNA sense strand
gggcacacaccacuuagca

SEQ ID NO: 1190499 - RNA, 19 nt, Homo sapiens
  misc_RNA (1)...(19): siRNA sense strand
gaaccaggaugggguagug

SEQ ID NO: 1190500 - RNA, 19 nt, Homo sapiens
  misc_RNA (1)...(19): siRNA sense strand
uaugcacacuuccucuuca

SEQ ID NO: 1190501 - RNA, 19 nt, Homo sapiens
  misc_RNA (1)...(19): siRNA sense strand
guuugagaaugucaucuag

SEQ ID NO: 1190502 - RNA, 19 nt, Homo sapiens
  misc_RNA (1)...(19): siRNA sense strand
gcuccaugcagcuguuuga

SEQ ID NO: 1190503 - RNA, 19 nt, Homo sapiens
  misc_RNA (1)...(19): siRNA sense strand
uagugaccauugaagaguu

SEQ ID NO: 1190504 - RNA, 19 nt, Homo sapiens
  misc_RNA (1)...(19): siRNA sense strand
ccaaguucaccaagaagga

SEQ ID NO: 1190505 - RNA, 19 nt, Homo sapiens
  misc_RNA (1)...(19): siRNA sense strand
cggcuaaggaagugacaaa

SEQ ID NO: 1190506 - RNA, 19 nt, Homo sapiens
  misc_RNA (1)...(19): siRNA sense strand
gagaugccaccaccuaugc

SEQ ID NO: 1190507 - RNA, 19 nt, Homo sapiens
  misc_RNA (1)...(19): siRNA sense strand
gcacaguccacgagaagcu

SEQ ID NO: 1190508 - RNA, 19 nt, Homo sapiens
  misc_RNA (1)...(19): siRNA sense strand
gguagugaccauugaagag

SEQ ID NO: 1190509 - RNA, 19 nt, Homo sapiens
  misc_RNA (1)...(19): siRNA sense strand
gcuaaggaagugacaaagg

SEQ ID NO: 1190510 - RNA, 19 nt, Homo sapiens
  misc_RNA (1)...(19): siRNA sense strand
guagugaccauugaagagu

SEQ ID NO: 1190511 - RNA, 19 nt, Homo sapiens
  misc_RNA (1)...(19): siRNA sense strand
gaagcucaagugggccuuu

SEQ ID NO: 1190512 - RNA, 19 nt, Homo sapiens
  misc_RNA (1)...(19): siRNA sense strand
cagauagcagcgacaguga

SEQ ID NO: 1190513 - RNA, 19 nt, Homo sapiens
  misc_RNA (1)...(19): siRNA sense strand
gggagaugccaccaccuau

SEQ ID NO: 1190514 - RNA, 19 nt, Homo sapiens
  misc_RNA (1)...(19): siRNA sense strand
ggaggccugucagaaggau

SEQ ID NO: 1190515 - RNA, 19 nt, Homo sapiens
  misc_RNA (1)...(19): siRNA sense strand
gcacguggagagguucuuc

SEQ ID NO: 1190516 - RNA, 19 nt, Homo sapiens
  misc_RNA (1)...(19): siRNA sense strand
gggcacaguccacgagaag

SEQ ID NO: 1190517 - RNA, 19 nt, Homo sapiens
  misc_RNA (1)...(19): siRNA sense strand
uacaggggcuuuaagaaug

SEQ ID NO: 1190518 - RNA, 19 nt, Homo sapiens
  misc_RNA (1)...(19): siRNA sense strand
ggguagugaccauugaaga

SEQ ID NO: 1190519 - RNA, 19 nt, Homo sapiens
  misc_RNA (1)...(19): siRNA sense strand
cuacgacauuaacaaggau

SEQ ID NO: 1190520 - RNA, 19 nt, Homo sapiens
  misc_RNA (1)...(19): siRNA sense strand
ggaaaugcuugacaucaug

SEQ ID NO: 1190521 - RNA, 19 nt, Homo sapiens
  misc_RNA (1)...(19): siRNA sense strand
cagcguggacgaugaauuu

SEQ ID NO: 1190522 - RNA, 19 nt, Homo sapiens
  misc_RNA (1)...(19): siRNA sense strand
gaagauggacagaaacaag

SEQ ID NO: 1190523 - RNA, 19 nt, Homo sapiens
  misc_RNA (1)...(19): siRNA sense strand
caugauggcucggucaguu

SEQ ID NO: 1190524 - RNA, 19 nt, Homo sapiens
  misc_RNA (1)...(19): siRNA sense strand
gggaacacguggagagcuu

SEQ ID NO: 1190525 - RNA, 19 nt, Homo sapiens
  misc_RNA (1)...(19): siRNA sense strand
gaaaugcuugacaucauga

SEQ ID NO: 1190526 - RNA, 19 nt, Homo sapiens
  misc_RNA (1)...(19): siRNA sense strand
ggaauucauugagucuugu

SEQ ID NO: 1190527 - RNA, 19 nt, Homo sapiens
  misc_RNA (1)...(19): siRNA sense strand
cguggacgaugaauuugaa

SEQ ID NO: 1190528 - RNA, 19 nt, Homo sapiens
  misc_RNA (1)...(19): siRNA sense strand
gaccauugaggaauucauu

SEQ ID NO: 1190529 - RNA, 19 nt, Homo sapiens
  misc_RNA (1)...(19): siRNA sense strand
gaaugucccagcggaauug

SEQ ID NO: 1190530 - RNA, 19 nt, Homo sapiens
  misc_RNA (1)...(19): siRNA sense strand
gaggaaaugcuugacauca

SEQ ID NO: 1190531 - RNA, 19 nt, Homo sapiens
  misc_RNA (1)...(19): siRNA sense strand
gauuuacucccaguucuuu

SEQ ID NO: 1190532 - RNA, 19 nt, Homo sapiens
  misc_RNA (1)...(19): siRNA sense strand
gcagauuuacucccaguuc

SEQ ID NO: 1190533 - RNA, 19 nt, Homo sapiens
  misc_RNA (1)...(19): siRNA sense strand
ucaaugaggagaacuucaa

SEQ ID NO: 1190534 - RNA, 19 nt, Homo sapiens
  misc_RNA (1)...(19): siRNA sense strand
gagaacuucaagcagauuu

SEQ ID NO: 1190535 - RNA, 19 nt, Homo sapiens
  misc_RNA (1)...(19): siRNA sense strand
ugaaguccaucuaugacau

SEQ ID NO: 1190536 - RNA, 19 nt, Homo sapiens
  misc_RNA (1)...(19): siRNA sense strand
caucaugaaguccaucuau

SEQ ID NO: 1190537 - RNA, 19 nt, Homo sapiens
  misc_RNA (1)...(19): siRNA sense strand
gaaguccaucuaugacaug

SEQ ID NO: 1190538 - RNA, 19 nt, Homo sapiens
  misc_RNA (1)...(19): siRNA sense strand
aggaauucauugagucuug

SEQ ID NO: 1190539 - RNA, 19 nt, Homo sapiens
  misc_RNA (1)...(19): siRNA sense strand
gaacuucaagcagauuuac

SEQ ID NO: 1190540 - RNA, 19 nt, Homo sapiens
  misc_RNA (1)...(19): siRNA sense strand
ccauugaggaauucauuga

SEQ ID NO: 1190541 - RNA, 19 nt, Homo sapiens
  misc_RNA (1)...(19): siRNA sense strand
gcaggagcaaaccaaauuc

SEQ ID NO: 1190542 - RNA, 19 nt, Homo sapiens
  misc_RNA (1)...(19): siRNA sense strand
cagauuuacucccaguucu

SEQ ID NO: 1190543 - RNA, 19 nt, Homo sapiens
  misc_RNA (1)...(19): siRNA sense strand
ggacagaaacaaggauggu

SEQ ID NO: 1190544 - RNA, 19 nt, Homo sapiens
  misc_RNA (1)...(19): siRNA sense strand
aggaaaugcuugacaucau

SEQ ID NO: 1190545 - RNA, 19 nt, Homo sapiens
  misc_RNA (1)...(19): siRNA sense strand
ggagaacuucaagcagauu

SEQ ID NO: 1190546 - RNA, 19 nt, Homo sapiens
  misc_RNA (1)...(19): siRNA sense strand
ugaauuguccaccgugugu

SEQ ID NO: 1190547 - RNA, 19 nt, Homo sapiens
  misc_RNA (1)...(19): siRNA sense strand
cagaagauggacagaaaca

SEQ ID NO: 1190548 - RNA, 19 nt, Homo sapiens
  misc_RNA (1)...(19): siRNA sense strand
ugcaggagcaaaccaaauu

SEQ ID NO: 1190549 - RNA, 19 nt, Homo sapiens
  misc_RNA (1)...(19): siRNA sense strand
ggugaccauugaggaauuc

SEQ ID NO: 1190550 - RNA, 19 nt, Homo sapiens
  misc_RNA (1)...(19): siRNA sense strand
agaacuucaagcagauuua

SEQ ID NO: 1190551 - RNA, 19 nt, Homo sapiens
  misc_RNA (1)...(19): siRNA sense strand
gcguggacgaugaauuuga

SEQ ID NO: 1190552 - RNA, 19 nt, Homo sapiens
  misc_RNA (1)...(19): siRNA sense strand
gagcagcugcaggagcaaa

SEQ ID NO: 1190553 - RNA, 19 nt, Homo sapiens
  misc_RNA (1)...(19): siRNA sense strand
cagcaccuaugccacuuuu

SEQ ID NO: 1190554 - RNA, 19 nt, Homo sapiens
  misc_RNA (1)...(19): siRNA sense strand
ggaaaugcuugacaucaug

SEQ ID NO: 1190555 - RNA, 19 nt, Homo sapiens
  misc_RNA (1)...(19): siRNA sense strand
cagcguggacgaugaauuu

SEQ ID NO: 1190556 - RNA, 19 nt, Homo sapiens
  misc_RNA (1)...(19): siRNA sense strand
gaagauggacagaaacaag

SEQ ID NO: 1190557 - RNA, 19 nt, Homo sapiens
  misc_RNA (1)...(19): siRNA sense strand
caugauggcucggucaguu

SEQ ID NO: 1190558 - RNA, 19 nt, Homo sapiens
  misc_RNA (1)...(19): siRNA sense strand
gggaacacguggagagcuu

SEQ ID NO: 1190559 - RNA, 19 nt, Homo sapiens
  misc_RNA (1)...(19): siRNA sense strand
gaaaugcuugacaucauga

SEQ ID NO: 1190560 - RNA, 19 nt, Homo sapiens
  misc_RNA (1)...(19): siRNA sense strand
ggaauucauugagucuugu

SEQ ID NO: 1190561 - RNA, 19 nt, Homo sapiens
  misc_RNA (1)...(19): siRNA sense strand
cguggacgaugaauuugaa

SEQ ID NO: 1190562 - RNA, 19 nt, Homo sapiens
  misc_RNA (1)...(19): siRNA sense strand
gaccauugaggaauucauu

SEQ ID NO: 1190563 - RNA, 19 nt, Homo sapiens
  misc_RNA (1)...(19): siRNA sense strand
gaaugucccagcggaauug

SEQ ID NO: 1190564 - RNA, 19 nt, Homo sapiens
  misc_RNA (1)...(19): siRNA sense strand
gaggaaaugcuugacauca

SEQ ID NO: 1190565 - RNA, 19 nt, Homo sapiens
  misc_RNA (1)...(19): siRNA sense strand
gauuuacucccaguucuuu

SEQ ID NO: 1190566 - RNA, 19 nt, Homo sapiens
  misc_RNA (1)...(19): siRNA sense strand
gcagauuuacucccaguuc

SEQ ID NO: 1190567 - RNA, 19 nt, Homo sapiens
  misc_RNA (1)...(19): siRNA sense strand
ucaaugaggagaacuucaa

SEQ ID NO: 1190568 - RNA, 19 nt, Homo sapiens
  misc_RNA (1)...(19): siRNA sense strand
gagaacuucaagcagauuu

SEQ ID NO: 1190569 - RNA, 19 nt, Homo sapiens
  misc_RNA (1)...(19): siRNA sense strand
ugaaguccaucuaugacau

SEQ ID NO: 1190570 - RNA, 19 nt, Homo sapiens
  misc_RNA (1)...(19): siRNA sense strand
caucaugaaguccaucuau

SEQ ID NO: 1190571 - RNA, 19 nt, Homo sapiens
  misc_RNA (1)...(19): siRNA sense strand
gaaguccaucuaugacaug

SEQ ID NO: 1190572 - RNA, 19 nt, Homo sapiens
  misc_RNA (1)...(19): siRNA sense strand
aggaauucauugagucuug

SEQ ID NO: 1190573 - RNA, 19 nt, Homo sapiens
  misc_RNA (1)...(19): siRNA sense strand
gaacuucaagcagauuuac

SEQ ID NO: 1190574 - RNA, 19 nt, Homo sapiens
  misc_RNA (1)...(19): siRNA sense strand
ccauugaggaauucauuga

SEQ ID NO: 1190575 - RNA, 19 nt, Homo sapiens
  misc_RNA (1)...(19): siRNA sense strand
gcaggagcaaaccaaauuc

SEQ ID NO: 1190576 - RNA, 19 nt, Homo sapiens
  misc_RNA (1)...(19): siRNA sense strand
cagauuuacucccaguucu

SEQ ID NO: 1190577 - RNA, 19 nt, Homo sapiens
  misc_RNA (1)...(19): siRNA sense strand
ggacagaaacaaggauggu

SEQ ID NO: 1190578 - RNA, 19 nt, Homo sapiens
  misc_RNA (1)...(19): siRNA sense strand
aggaaaugcuugacaucau

SEQ ID NO: 1190579 - RNA, 19 nt, Homo sapiens
  misc_RNA (1)...(19): siRNA sense strand
ggagaacuucaagcagauu

SEQ ID NO: 1190580 - RNA, 19 nt, Homo sapiens
  misc_RNA (1)...(19): siRNA sense strand
ugaauuguccaccgugugu

SEQ ID NO: 1190581 - RNA, 19 nt, Homo sapiens
  misc_RNA (1)...(19): siRNA sense strand
cagaagauggacagaaaca

SEQ ID NO: 1190582 - RNA, 19 nt, Homo sapiens
  misc_RNA (1)...(19): siRNA sense strand
ugcaggagcaaaccaaauu

SEQ ID NO: 1190583 - RNA, 19 nt, Homo sapiens
  misc_RNA (1)...(19): siRNA sense strand
ggugaccauugaggaauuc

SEQ ID NO: 1190584 - RNA, 19 nt, Homo sapiens
  misc_RNA (1)...(19): siRNA sense strand
agaacuucaagcagauuua

SEQ ID NO: 1190585 - RNA, 19 nt, Homo sapiens
  misc_RNA (1)...(19): siRNA sense strand
gcguggacgaugaauuuga

SEQ ID NO: 1190586 - RNA, 19 nt, Homo sapiens
  misc_RNA (1)...(19): siRNA sense strand
gagcagcugcaggagcaaa

SEQ ID NO: 1190587 - RNA, 19 nt, Homo sapiens
  misc_RNA (1)...(19): siRNA sense strand
cagcaccuaugccacuuuu

SEQ ID NO: 1190588 - RNA, 19 nt, Homo sapiens
  misc_RNA (1)...(19): siRNA sense strand
ggaaaugcuugacaucaug

SEQ ID NO: 1190589 - RNA, 19 nt, Homo sapiens
  misc_RNA (1)...(19): siRNA sense strand
cagcguggacgaugaauuu

SEQ ID NO: 1190590 - RNA, 19 nt, Homo sapiens
  misc_RNA (1)...(19): siRNA sense strand
gaagauggacagaaacaag

SEQ ID NO: 1190591 - RNA, 19 nt, Homo sapiens
  misc_RNA (1)...(19): siRNA sense strand
caugauggcucggucaguu

SEQ ID NO: 1190592 - RNA, 19 nt, Homo sapiens
  misc_RNA (1)...(19): siRNA sense strand
gggaacacguggagagcuu

SEQ ID NO: 1190593 - RNA, 19 nt, Homo sapiens
  misc_RNA (1)...(19): siRNA sense strand
gaaaugcuugacaucauga

SEQ ID NO: 1190594 - RNA, 19 nt, Homo sapiens
  misc_RNA (1)...(19): siRNA sense strand
ggaauucauugagucuugu

SEQ ID NO: 1190595 - RNA, 19 nt, Homo sapiens
  misc_RNA (1)...(19): siRNA sense strand
cguggacgaugaauuugaa

SEQ ID NO: 1190596 - RNA, 19 nt, Homo sapiens
  misc_RNA (1)...(19): siRNA sense strand
gaccauugaggaauucauu

SEQ ID NO: 1190597 - RNA, 19 nt, Homo sapiens
  misc_RNA (1)...(19): siRNA sense strand
gaaugucccagcggaauug

SEQ ID NO: 1190598 - RNA, 19 nt, Homo sapiens
  misc_RNA (1)...(19): siRNA sense strand
gaggaaaugcuugacauca

SEQ ID NO: 1190599 - RNA, 19 nt, Homo sapiens
  misc_RNA (1)...(19): siRNA sense strand
gauuuacucccaguucuuu

SEQ ID NO: 1190600 - RNA, 19 nt, Homo sapiens
  misc_RNA (1)...(19): siRNA sense strand
gcagauuuacucccaguuc

SEQ ID NO: 1190601 - RNA, 19 nt, Homo sapiens
  misc_RNA (1)...(19): siRNA sense strand
ucaaugaggagaacuucaa

SEQ ID NO: 1190602 - RNA, 19 nt, Homo sapiens
  misc_RNA (1)...(19): siRNA sense strand
gagaacuucaagcagauuu

SEQ ID NO: 1190603 - RNA, 19 nt, Homo sapiens
  misc_RNA (1)...(19): siRNA sense strand
ugaaguccaucuaugacau

SEQ ID NO: 1190604 - RNA, 19 nt, Homo sapiens
  misc_RNA (1)...(19): siRNA sense strand
caucaugaaguccaucuau

SEQ ID NO: 1190605 - RNA, 19 nt, Homo sapiens
  misc_RNA (1)...(19): siRNA sense strand
gaaguccaucuaugacaug

SEQ ID NO: 1190606 - RNA, 19 nt, Homo sapiens
  misc_RNA (1)...(19): siRNA sense strand
aggaauucauugagucuug

SEQ ID NO: 1190607 - RNA, 19 nt, Homo sapiens
  misc_RNA (1)...(19): siRNA sense strand
gaacuucaagcagauuuac

SEQ ID NO: 1190608 - RNA, 19 nt, Homo sapiens
  misc_RNA (1)...(19): siRNA sense strand
ccauugaggaauucauuga

SEQ ID NO: 1190609 - RNA, 19 nt, Homo sapiens
  misc_RNA (1)...(19): siRNA sense strand
gcaggagcaaaccaaauuc

SEQ ID NO: 1190610 - RNA, 19 nt, Homo sapiens
  misc_RNA (1)...(19): siRNA sense strand
cagauuuacucccaguucu

SEQ ID NO: 1190611 - RNA, 19 nt, Homo sapiens
  misc_RNA (1)...(19): siRNA sense strand
ggacagaaacaaggauggu

SEQ ID NO: 1190612 - RNA, 19 nt, Homo sapiens
  misc_RNA (1)...(19): siRNA sense strand
aggaaaugcuugacaucau

SEQ ID NO: 1190613 - RNA, 19 nt, Homo sapiens
  misc_RNA (1)...(19): siRNA sense strand
ggagaacuucaagcagauu

SEQ ID NO: 1190614 - RNA, 19 nt, Homo sapiens
  misc_RNA (1)...(19): siRNA sense strand
ugaauuguccaccgugugu

SEQ ID NO: 1190615 - RNA, 19 nt, Homo sapiens
  misc_RNA (1)...(19): siRNA sense strand
cagaagauggacagaaaca

SEQ ID NO: 1190616 - RNA, 19 nt, Homo sapiens
  misc_RNA (1)...(19): siRNA sense strand
ugcaggagcaaaccaaauu

SEQ ID NO: 1190617 - RNA, 19 nt, Homo sapiens
  misc_RNA (1)...(19): siRNA sense strand
ggugaccauugaggaauuc

SEQ ID NO: 1190618 - RNA, 19 nt, Homo sapiens
  misc_RNA (1)...(19): siRNA sense strand
agaacuucaagcagauuua

SEQ ID NO: 1190619 - RNA, 19 nt, Homo sapiens
  misc_RNA (1)...(19): siRNA sense strand
gcguggacgaugaauuuga

SEQ ID NO: 1190620 - RNA, 19 nt, Homo sapiens
  misc_RNA (1)...(19): siRNA sense strand
gagcagcugcaggagcaaa

SEQ ID NO: 1190621 - RNA, 19 nt, Homo sapiens
  misc_RNA (1)...(19): siRNA sense strand
cagcaccuaugccacuuuu

SEQ ID NO: 1190622 - RNA, 19 nt, Homo sapiens
  misc_RNA (1)...(19): siRNA sense strand
ggaaaugcuugacaucaug

SEQ ID NO: 1190623 - RNA, 19 nt, Homo sapiens
  misc_RNA (1)...(19): siRNA sense strand
cagcguggacgaugaauuu

SEQ ID NO: 1190624 - RNA, 19 nt, Homo sapiens
  misc_RNA (1)...(19): siRNA sense strand
gaagauggacagaaacaag

SEQ ID NO: 1190625 - RNA, 19 nt, Homo sapiens
  misc_RNA (1)...(19): siRNA sense strand
caugauggcucggucaguu

SEQ ID NO: 1190626 - RNA, 19 nt, Homo sapiens
  misc_RNA (1)...(19): siRNA sense strand
gggaacacguggagagcuu

SEQ ID NO: 1190627 - RNA, 19 nt, Homo sapiens
  misc_RNA (1)...(19): siRNA sense strand
gaaaugcuugacaucauga

SEQ ID NO: 1190628 - RNA, 19 nt, Homo sapiens
  misc_RNA (1)...(19): siRNA sense strand
ggaauucauugagucuugu

SEQ ID NO: 1190629 - RNA, 19 nt, Homo sapiens
  misc_RNA (1)...(19): siRNA sense strand
cguggacgaugaauuugaa

SEQ ID NO: 1190630 - RNA, 19 nt, Homo sapiens
  misc_RNA (1)...(19): siRNA sense strand
gaccauugaggaauucauu

SEQ ID NO: 1190631 - RNA, 19 nt, Homo sapiens
  misc_RNA (1)...(19): siRNA sense strand
gaaugucccagcggaauug

SEQ ID NO: 1190632 - RNA, 19 nt, Homo sapiens
  misc_RNA (1)...(19): siRNA sense strand
gaggaaaugcuugacauca

SEQ ID NO: 1190633 - RNA, 19 nt, Homo sapiens
  misc_RNA (1)...(19): siRNA sense strand
gauuuacucccaguucuuu

SEQ ID NO: 1190634 - RNA, 19 nt, Homo sapiens
  misc_RNA (1)...(19): siRNA sense strand
gcagauuuacucccaguuc

SEQ ID NO: 1190635 - RNA, 19 nt, Homo sapiens
  misc_RNA (1)...(19): siRNA sense strand
ucaaugaggagaacuucaa

SEQ ID NO: 1190636 - RNA, 19 nt, Homo sapiens
  misc_RNA (1)...(19): siRNA sense strand
gagaacuucaagcagauuu

SEQ ID NO: 1190637 - RNA, 19 nt, Homo sapiens
  misc_RNA (1)...(19): siRNA sense strand
ugaaguccaucuaugacau

SEQ ID NO: 1190638 - RNA, 19 nt, Homo sapiens
  misc_RNA (1)...(19): siRNA sense strand
caucaugaaguccaucuau

SEQ ID NO: 1190639 - RNA, 19 nt, Homo sapiens
  misc_RNA (1)...(19): siRNA sense strand
gaaguccaucuaugacaug

SEQ ID NO: 1190640 - RNA, 19 nt, Homo sapiens
  misc_RNA (1)...(19): siRNA sense strand
aggaauucauugagucuug

SEQ ID NO: 1190641 - RNA, 19 nt, Homo sapiens
  misc_RNA (1)...(19): siRNA sense strand
gaacuucaagcagauuuac

SEQ ID NO: 1190642 - RNA, 19 nt, Homo sapiens
  misc_RNA (1)...(19): siRNA sense strand
ccauugaggaauucauuga

SEQ ID NO: 1190643 - RNA, 19 nt, Homo sapiens
  misc_RNA (1)...(19): siRNA sense strand
gcaggagcaaaccaaauuc

SEQ ID NO: 1190644 - RNA, 19 nt, Homo sapiens
  misc_RNA (1)...(19): siRNA sense strand
cagauuuacucccaguucu

SEQ ID NO: 1190645 - RNA, 19 nt, Homo sapiens
  misc_RNA (1)...(19): siRNA sense strand
ggacagaaacaaggauggu

SEQ ID NO: 1190646 - RNA, 19 nt, Homo sapiens
  misc_RNA (1)...(19): siRNA sense strand
aggaaaugcuugacaucau

SEQ ID NO: 1190647 - RNA, 19 nt, Homo sapiens
  misc_RNA (1)...(19): siRNA sense strand
ggagaacuucaagcagauu

SEQ ID NO: 1190648 - RNA, 19 nt, Homo sapiens
  misc_RNA (1)...(19): siRNA sense strand
ugaauuguccaccgugugu

SEQ ID NO: 1190649 - RNA, 19 nt, Homo sapiens
  misc_RNA (1)...(19): siRNA sense strand
cagaagauggacagaaaca

SEQ ID NO: 1190650 - RNA, 19 nt, Homo sapiens
  misc_RNA (1)...(19): siRNA sense strand
ugcaggagcaaaccaaauu

SEQ ID NO: 1190651 - RNA, 19 nt, Homo sapiens
  misc_RNA (1)...(19): siRNA sense strand
ggugaccauugaggaauuc

SEQ ID NO: 1190652 - RNA, 19 nt, Homo sapiens
  misc_RNA (1)...(19): siRNA sense strand
agaacuucaagcagauuua

SEQ ID NO: 1190653 - RNA, 19 nt, Homo sapiens
  misc_RNA (1)...(19): siRNA sense strand
gcguggacgaugaauuuga

SEQ ID NO: 1190654 - RNA, 19 nt, Homo sapiens
  misc_RNA (1)...(19): siRNA sense strand
gagcagcugcaggagcaaa

SEQ ID NO: 1190655 - RNA, 19 nt, Homo sapiens
  misc_RNA (1)...(19): siRNA sense strand
cagcaccuaugccacuuuu

SEQ ID NO: 1190656 - RNA, 19 nt, Homo sapiens
  misc_RNA (1)...(19): siRNA sense strand
ggaaaugcuugacaucaug

SEQ ID NO: 1190657 - RNA, 19 nt, Homo sapiens
  misc_RNA (1)...(19): siRNA sense strand
cagcguggacgaugaauuu

SEQ ID NO: 1190658 - RNA, 19 nt, Homo sapiens
  misc_RNA (1)...(19): siRNA sense strand
gaagauggacagaaacaag

SEQ ID NO: 1190659 - RNA, 19 nt, Homo sapiens
  misc_RNA (1)...(19): siRNA sense strand
caugauggcucggucaguu

SEQ ID NO: 1190660 - RNA, 19 nt, Homo sapiens
  misc_RNA (1)...(19): siRNA sense strand
gggaacacguggagagcuu

SEQ ID NO: 1190661 - RNA, 19 nt, Homo sapiens
  misc_RNA (1)...(19): siRNA sense strand
gaaaugcuugacaucauga

SEQ ID NO: 1190662 - RNA, 19 nt, Homo sapiens
  misc_RNA (1)...(19): siRNA sense strand
ggaauucauugagucuugu

SEQ ID NO: 1190663 - RNA, 19 nt, Homo sapiens
  misc_RNA (1)...(19): siRNA sense strand
cguggacgaugaauuugaa

SEQ ID NO: 1190664 - RNA, 19 nt, Homo sapiens
  misc_RNA (1)...(19): siRNA sense strand
gaccauugaggaauucauu

SEQ ID NO: 1190665 - RNA, 19 nt, Homo sapiens
  misc_RNA (1)...(19): siRNA sense strand
gaaugucccagcggaauug

SEQ ID NO: 1190666 - RNA, 19 nt, Homo sapiens
  misc_RNA (1)...(19): siRNA sense strand
gaggaaaugcuugacauca

SEQ ID NO: 1190667 - RNA, 19 nt, Homo sapiens
  misc_RNA (1)...(19): siRNA sense strand
gauuuacucccaguucuuu

SEQ ID NO: 1190668 - RNA, 19 nt, Homo sapiens
  misc_RNA (1)...(19): siRNA sense strand
gcagauuuacucccaguuc

SEQ ID NO: 1190669 - RNA, 19 nt, Homo sapiens
  misc_RNA (1)...(19): siRNA sense strand
ucaaugaggagaacuucaa

SEQ ID NO: 1190670 - RNA, 19 nt, Homo sapiens
  misc_RNA (1)...(19): siRNA sense strand
gagaacuucaagcagauuu

SEQ ID NO: 1190671 - RNA, 19 nt, Homo sapiens
  misc_RNA (1)...(19): siRNA sense strand
ugaaguccaucuaugacau

SEQ ID NO: 1190672 - RNA, 19 nt, Homo sapiens
  misc_RNA (1)...(19): siRNA sense strand
caucaugaaguccaucuau

SEQ ID NO: 1190673 - RNA, 19 nt, Homo sapiens
  misc_RNA (1)...(19): siRNA sense strand
gaaguccaucuaugacaug

SEQ ID NO: 1190674 - RNA, 19 nt, Homo sapiens
  misc_RNA (1)...(19): siRNA sense strand
aggaauucauugagucuug

SEQ ID NO: 1190675 - RNA, 19 nt, Homo sapiens
  misc_RNA (1)...(19): siRNA sense strand
gaacuucaagcagauuuac

SEQ ID NO: 1190676 - RNA, 19 nt, Homo sapiens
  misc_RNA (1)...(19): siRNA sense strand
ccauugaggaauucauuga

SEQ ID NO: 1190677 - RNA, 19 nt, Homo sapiens
  misc_RNA (1)...(19): siRNA sense strand
gcaggagcaaaccaaauuc

SEQ ID NO: 1190678 - RNA, 19 nt, Homo sapiens
  misc_RNA (1)...(19): siRNA sense strand
cagauuuacucccaguucu

SEQ ID NO: 1190679 - RNA, 19 nt, Homo sapiens
  misc_RNA (1)...(19): siRNA sense strand
ggacagaaacaaggauggu

SEQ ID NO: 1190680 - RNA, 19 nt, Homo sapiens
  misc_RNA (1)...(19): siRNA sense strand
aggaaaugcuugacaucau

SEQ ID NO: 1190681 - RNA, 19 nt, Homo sapiens
  misc_RNA (1)...(19): siRNA sense strand
ggagaacuucaagcagauu

SEQ ID NO: 1190682 - RNA, 19 nt, Homo sapiens
  misc_RNA (1)...(19): siRNA sense strand
ugaauuguccaccgugugu

SEQ ID NO: 1190683 - RNA, 19 nt, Homo sapiens
  misc_RNA (1)...(19): siRNA sense strand
cagaagauggacagaaaca

SEQ ID NO: 1190684 - RNA, 19 nt, Homo sapiens
  misc_RNA (1)...(19): siRNA sense strand
ugcaggagcaaaccaaauu

SEQ ID NO: 1190685 - RNA, 19 nt, Homo sapiens
  misc_RNA (1)...(19): siRNA sense strand
ggugaccauugaggaauuc

SEQ ID NO: 1190686 - RNA, 19 nt, Homo sapiens
  misc_RNA (1)...(19): siRNA sense strand
agaacuucaagcagauuua

SEQ ID NO: 1190687 - RNA, 19 nt, Homo sapiens
  misc_RNA (1)...(19): siRNA sense strand
gcguggacgaugaauuuga

SEQ ID NO: 1190688 - RNA, 19 nt, Homo sapiens
  misc_RNA (1)...(19): siRNA sense strand
gagcagcugcaggagcaaa

SEQ ID NO: 1190689 - RNA, 19 nt, Homo sapiens
  misc_RNA (1)...(19): siRNA sense strand
cagcaccuaugccacuuuu

SEQ ID NO: 1190690 - RNA, 19 nt, Homo sapiens
  misc_RNA (1)...(19): siRNA sense strand
ggaaaugcuugacaucaug

SEQ ID NO: 1190691 - RNA, 19 nt, Homo sapiens
  misc_RNA (1)...(19): siRNA sense strand
cagcguggacgaugaauuu

SEQ ID NO: 1190692 - RNA, 19 nt, Homo sapiens
  misc_RNA (1)...(19): siRNA sense strand
gaagauggacagaaacaag

SEQ ID NO: 1190693 - RNA, 19 nt, Homo sapiens
  misc_RNA (1)...(19): siRNA sense strand
caugauggcucggucaguu

SEQ ID NO: 1190694 - RNA, 19 nt, Homo sapiens
  misc_RNA (1)...(19): siRNA sense strand
gggaacacguggagagcuu

SEQ ID NO: 1190695 - RNA, 19 nt, Homo sapiens
  misc_RNA (1)...(19): siRNA sense strand
gaaaugcuugacaucauga

SEQ ID NO: 1190696 - RNA, 19 nt, Homo sapiens
  misc_RNA (1)...(19): siRNA sense strand
ggaauucauugagucuugu

SEQ ID NO: 1190697 - RNA, 19 nt, Homo sapiens
  misc_RNA (1)...(19): siRNA sense strand
cguggacgaugaauuugaa

SEQ ID NO: 1190698 - RNA, 19 nt, Homo sapiens
  misc_RNA (1)...(19): siRNA sense strand
gaccauugaggaauucauu

SEQ ID NO: 1190699 - RNA, 19 nt, Homo sapiens
  misc_RNA (1)...(19): siRNA sense strand
gaaugucccagcggaauug

SEQ ID NO: 1190700 - RNA, 19 nt, Homo sapiens
  misc_RNA (1)...(19): siRNA sense strand
gaggaaaugcuugacauca

SEQ ID NO: 1190701 - RNA, 19 nt, Homo sapiens
  misc_RNA (1)...(19): siRNA sense strand
gauuuacucccaguucuuu

SEQ ID NO: 1190702 - RNA, 19 nt, Homo sapiens
  misc_RNA (1)...(19): siRNA sense strand
gcagauuuacucccaguuc

SEQ ID NO: 1190703 - RNA, 19 nt, Homo sapiens
  misc_RNA (1)...(19): siRNA sense strand
ucaaugaggagaacuucaa

SEQ ID NO: 1190704 - RNA, 19 nt, Homo sapiens
  misc_RNA (1)...(19): siRNA sense strand
gagaacuucaagcagauuu

SEQ ID NO: 1190705 - RNA, 19 nt, Homo sapiens
  misc_RNA (1)...(19): siRNA sense strand
ugaaguccaucuaugacau

SEQ ID NO: 1190706 - RNA, 19 nt, Homo sapiens
  misc_RNA (1)...(19): siRNA sense strand
caucaugaaguccaucuau

SEQ ID NO: 1190707 - RNA, 19 nt, Homo sapiens
  misc_RNA (1)...(19): siRNA sense strand
gaaguccaucuaugacaug

SEQ ID NO: 1190708 - RNA, 19 nt, Homo sapiens
  misc_RNA (1)...(19): siRNA sense strand
aggaauucauugagucuug

SEQ ID NO: 1190709 - RNA, 19 nt, Homo sapiens
  misc_RNA (1)...(19): siRNA sense strand
gaacuucaagcagauuuac

SEQ ID NO: 1190710 - RNA, 19 nt, Homo sapiens
  misc_RNA (1)...(19): siRNA sense strand
ccauugaggaauucauuga

SEQ ID NO: 1190711 - RNA, 19 nt, Homo sapiens
  misc_RNA (1)...(19): siRNA sense strand
gcaggagcaaaccaaauuc

SEQ ID NO: 1190712 - RNA, 19 nt, Homo sapiens
  misc_RNA (1)...(19): siRNA sense strand
cagauuuacucccaguucu

SEQ ID NO: 1190713 - RNA, 19 nt, Homo sapiens
  misc_RNA (1)...(19): siRNA sense strand
ggacagaaacaaggauggu

SEQ ID NO: 1190714 - RNA, 19 nt, Homo sapiens
  misc_RNA (1)...(19): siRNA sense strand
aggaaaugcuugacaucau

SEQ ID NO: 1190715 - RNA, 19 nt, Homo sapiens
  misc_RNA (1)...(19): siRNA sense strand
ggagaacuucaagcagauu

SEQ ID NO: 1190716 - RNA, 19 nt, Homo sapiens
  misc_RNA (1)...(19): siRNA sense strand
ugaauuguccaccgugugu

SEQ ID NO: 1190717 - RNA, 19 nt, Homo sapiens
  misc_RNA (1)...(19): siRNA sense strand
cagaagauggacagaaaca

SEQ ID NO: 1190718 - RNA, 19 nt, Homo sapiens
  misc_RNA (1)...(19): siRNA sense strand
ugcaggagcaaaccaaauu

SEQ ID NO: 1190719 - RNA, 19 nt, Homo sapiens
  misc_RNA (1)...(19): siRNA sense strand
ggugaccauugaggaauuc

SEQ ID NO: 1190720 - RNA, 19 nt, Homo sapiens
  misc_RNA (1)...(19): siRNA sense strand
agaacuucaagcagauuua

SEQ ID NO: 1190721 - RNA, 19 nt, Homo sapiens
  misc_RNA (1)...(19): siRNA sense strand
gcguggacgaugaauuuga

SEQ ID NO: 1190722 - RNA, 19 nt, Homo sapiens
  misc_RNA (1)...(19): siRNA sense strand
gagcagcugcaggagcaaa

SEQ ID NO: 1190723 - RNA, 19 nt, Homo sapiens
  misc_RNA (1)...(19): siRNA sense strand
cagcaccuaugccacuuuu

SEQ ID NO: 1190724 - RNA, 19 nt, Homo sapiens
  misc_RNA (1)...(19): siRNA sense strand
ggaaaugcuugacaucaug

SEQ ID NO: 1190725 - RNA, 19 nt, Homo sapiens
  misc_RNA (1)...(19): siRNA sense strand
cagcguggacgaugaauuu

SEQ ID NO: 1190726 - RNA, 19 nt, Homo sapiens
  misc_RNA (1)...(19): siRNA sense strand
gaagauggacagaaacaag

SEQ ID NO: 1190727 - RNA, 19 nt, Homo sapiens
  misc_RNA (1)...(19): siRNA sense strand
caugauggcucggucaguu

SEQ ID NO: 1190728 - RNA, 19 nt, Homo sapiens
  misc_RNA (1)...(19): siRNA sense strand
gggaacacguggagagcuu

SEQ ID NO: 1190729 - RNA, 19 nt, Homo sapiens
  misc_RNA (1)...(19): siRNA sense strand
gaaaugcuugacaucauga

SEQ ID NO: 1190730 - RNA, 19 nt, Homo sapiens
  misc_RNA (1)...(19): siRNA sense strand
ggaauucauugagucuugu

SEQ ID NO: 1190731 - RNA, 19 nt, Homo sapiens
  misc_RNA (1)...(19): siRNA sense strand
cguggacgaugaauuugaa

SEQ ID NO: 1190732 - RNA, 19 nt, Homo sapiens
  misc_RNA (1)...(19): siRNA sense strand
gaccauugaggaauucauu

SEQ ID NO: 1190733 - RNA, 19 nt, Homo sapiens
  misc_RNA (1)...(19): siRNA sense strand
gaaugucccagcggaauug

SEQ ID NO: 1190734 - RNA, 19 nt, Homo sapiens
  misc_RNA (1)...(19): siRNA sense strand
gaggaaaugcuugacauca

SEQ ID NO: 1190735 - RNA, 19 nt, Homo sapiens
  misc_RNA (1)...(19): siRNA sense strand
gauuuacucccaguucuuu

SEQ ID NO: 1190736 - RNA, 19 nt, Homo sapiens
  misc_RNA (1)...(19): siRNA sense strand
gcagauuuacucccaguuc

SEQ ID NO: 1190737 - RNA, 19 nt, Homo sapiens
  misc_RNA (1)...(19): siRNA sense strand
ucaaugaggagaacuucaa

SEQ ID NO: 1190738 - RNA, 19 nt, Homo sapiens
  misc_RNA (1)...(19): siRNA sense strand
gagaacuucaagcagauuu

SEQ ID NO: 1190739 - RNA, 19 nt, Homo sapiens
  misc_RNA (1)...(19): siRNA sense strand
ugaaguccaucuaugacau

SEQ ID NO: 1190740 - RNA, 19 nt, Homo sapiens
  misc_RNA (1)...(19): siRNA sense strand
caucaugaaguccaucuau

SEQ ID NO: 1190741 - RNA, 19 nt, Homo sapiens
  misc_RNA (1)...(19): siRNA sense strand
gaaguccaucuaugacaug

SEQ ID NO: 1190742 - RNA, 19 nt, Homo sapiens
  misc_RNA (1)...(19): siRNA sense strand
aggaauucauugagucuug

SEQ ID NO: 1190743 - RNA, 19 nt, Homo sapiens
  misc_RNA (1)...(19): siRNA sense strand
gaacuucaagcagauuuac

SEQ ID NO: 1190744 - RNA, 19 nt, Homo sapiens
  misc_RNA (1)...(19): siRNA sense strand
ccauugaggaauucauuga

SEQ ID NO: 1190745 - RNA, 19 nt, Homo sapiens
  misc_RNA (1)...(19): siRNA sense strand
gcaggagcaaaccaaauuc

SEQ ID NO: 1190746 - RNA, 19 nt, Homo sapiens
  misc_RNA (1)...(19): siRNA sense strand
cagauuuacucccaguucu

SEQ ID NO: 1190747 - RNA, 19 nt, Homo sapiens
  misc_RNA (1)...(19): siRNA sense strand
ggacagaaacaaggauggu

SEQ ID NO: 1190748 - RNA, 19 nt, Homo sapiens
  misc_RNA (1)...(19): siRNA sense strand
aggaaaugcuugacaucau

SEQ ID NO: 1190749 - RNA, 19 nt, Homo sapiens
  misc_RNA (1)...(19): siRNA sense strand
ggagaacuucaagcagauu

SEQ ID NO: 1190750 - RNA, 19 nt, Homo sapiens
  misc_RNA (1)...(19): siRNA sense strand
ugaauuguccaccgugugu

SEQ ID NO: 1190751 - RNA, 19 nt, Homo sapiens
  misc_RNA (1)...(19): siRNA sense strand
cagaagauggacagaaaca

SEQ ID NO: 1190752 - RNA, 19 nt, Homo sapiens
  misc_RNA (1)...(19): siRNA sense strand
ugcaggagcaaaccaaauu

SEQ ID NO: 1190753 - RNA, 19 nt, Homo sapiens
  misc_RNA (1)...(19): siRNA sense strand
ggugaccauugaggaauuc

SEQ ID NO: 1190754 - RNA, 19 nt, Homo sapiens
  misc_RNA (1)...(19): siRNA sense strand
agaacuucaagcagauuua

SEQ ID NO: 1190755 - RNA, 19 nt, Homo sapiens
  misc_RNA (1)...(19): siRNA sense strand
gcguggacgaugaauuuga

SEQ ID NO: 1190756 - RNA, 19 nt, Homo sapiens
  misc_RNA (1)...(19): siRNA sense strand
gagcagcugcaggagcaaa

SEQ ID NO: 1190757 - RNA, 19 nt, Homo sapiens
  misc_RNA (1)...(19): siRNA sense strand
cagcaccuaugccacuuuu

SEQ ID NO: 1190758 - RNA, 19 nt, Homo sapiens
  misc_RNA (1)...(19): siRNA sense strand
cagcguggacgaugaauuu

SEQ ID NO: 1190759 - RNA, 19 nt, Homo sapiens
  misc_RNA (1)...(19): siRNA sense strand
cguggacgaugaauuugaa

SEQ ID NO: 1190760 - RNA, 19 nt, Homo sapiens
  misc_RNA (1)...(19): siRNA sense strand
gaaugucccagcggaauug

SEQ ID NO: 1190761 - RNA, 19 nt, Homo sapiens
  misc_RNA (1)...(19): siRNA sense strand
gcaggagcaaaccaaauuc

SEQ ID NO: 1190762 - RNA, 19 nt, Homo sapiens
  misc_RNA (1)...(19): siRNA sense strand
ugaauuguccaccgugugu

SEQ ID NO: 1190763 - RNA, 19 nt, Homo sapiens
  misc_RNA (1)...(19): siRNA sense strand
ugcaggagcaaaccaaauu

SEQ ID NO: 1190764 - RNA, 19 nt, Homo sapiens
  misc_RNA (1)...(19): siRNA sense strand
gcguggacgaugaauuuga

SEQ ID NO: 1190765 - RNA, 19 nt, Homo sapiens
  misc_RNA (1)...(19): siRNA sense strand
gagcagcugcaggagcaaa

SEQ ID NO: 1190766 - RNA, 19 nt, Homo sapiens
  misc_RNA (1)...(19): siRNA sense strand
gaagaagcaucgagacuug

SEQ ID NO: 1190767 - RNA, 19 nt, Homo sapiens
  misc_RNA (1)...(19): siRNA sense strand
gggaagaucugauuaaggu

SEQ ID NO: 1190768 - RNA, 19 nt, Homo sapiens
  misc_RNA (1)...(19): siRNA sense strand
gauaguggaugguaagaug

SEQ ID NO: 1190769 - RNA, 19 nt, Homo sapiens
  misc_RNA (1)...(19): siRNA sense strand
gaaucaaagucgagcauga

SEQ ID NO: 1190770 - RNA, 19 nt, Homo sapiens
  misc_RNA (1)...(19): siRNA sense strand
gcagaacaaugaauaccaa

SEQ ID NO: 1190771 - RNA, 19 nt, Homo sapiens
  misc_RNA (1)...(19): siRNA sense strand
agaaggaaaucaccacgua

SEQ ID NO: 1190772 - RNA, 19 nt, Homo sapiens
  misc_RNA (1)...(19): siRNA sense strand
gaccaucaacggaagauua

SEQ ID NO: 1190773 - RNA, 19 nt, Homo sapiens
  misc_RNA (1)...(19): siRNA sense strand
gaccaaugcucagauuauu

SEQ ID NO: 1190774 - RNA, 19 nt, Homo sapiens
  misc_RNA (1)...(19): siRNA sense strand
gaacaaugaauaccaagug

SEQ ID NO: 1190775 - RNA, 19 nt, Homo sapiens
  misc_RNA (1)...(19): siRNA sense strand
cacgaaaucugcuuuggaa

SEQ ID NO: 1190776 - RNA, 19 nt, Homo sapiens
  misc_RNA (1)...(19): siRNA sense strand
gaugaccaaugcucagauu

SEQ ID NO: 1190777 - RNA, 19 nt, Homo sapiens
  misc_RNA (1)...(19): siRNA sense strand
ucaagugaaugaaauccaa

SEQ ID NO: 1190778 - RNA, 19 nt, Homo sapiens
  misc_RNA (1)...(19): siRNA sense strand
aaacccaccuggagaagga

SEQ ID NO: 1190779 - RNA, 19 nt, Homo sapiens
  misc_RNA (1)...(19): siRNA sense strand
ccaaagaucaaggccauaa

SEQ ID NO: 1190780 - RNA, 19 nt, Homo sapiens
  misc_RNA (1)...(19): siRNA sense strand
gcacgaaaucugcuuugga

SEQ ID NO: 1190781 - RNA, 19 nt, Homo sapiens
  misc_RNA (1)...(19): siRNA sense strand
ggacacgggaagaaucaaa

SEQ ID NO: 1190782 - RNA, 19 nt, Homo sapiens
  misc_RNA (1)...(19): siRNA sense strand
ccagggaagaucugauuaa

SEQ ID NO: 1190783 - RNA, 19 nt, Homo sapiens
  misc_RNA (1)...(19): siRNA sense strand
gaacuggagcggcagaaca

SEQ ID NO: 1190784 - RNA, 19 nt, Homo sapiens
  misc_RNA (1)...(19): siRNA sense strand
caaagucgagcaugaaagu

SEQ ID NO: 1190785 - RNA, 19 nt, Homo sapiens
  misc_RNA (1)...(19): siRNA sense strand
gaaauggagaagcaucaug

SEQ ID NO: 1190786 - RNA, 19 nt, Homo sapiens
  misc_RNA (1)...(19): siRNA sense strand
cagauuauucuucucauug

SEQ ID NO: 1190787 - RNA, 19 nt, Homo sapiens
  misc_RNA (1)...(19): siRNA sense strand
ggauggcaguggaugacuu

SEQ ID NO: 1190788 - RNA, 19 nt, Homo sapiens
  misc_RNA (1)...(19): siRNA sense strand
ggacacuugguauaaagaa

SEQ ID NO: 1190789 - RNA, 19 nt, Homo sapiens
  misc_RNA (1)...(19): siRNA sense strand
gagcagacaaggugacauc

SEQ ID NO: 1190790 - RNA, 19 nt, Homo sapiens
  misc_RNA (1)...(19): siRNA sense strand
gaagggacacgggaagaau

SEQ ID NO: 1190791 - RNA, 19 nt, Homo sapiens
  misc_RNA (1)...(19): siRNA sense strand
gaacugaagcgcacauucc

SEQ ID NO: 1190792 - RNA, 19 nt, Homo sapiens
  misc_RNA (1)...(19): siRNA sense strand
gcucagauuauucuucuca

SEQ ID NO: 1190793 - RNA, 19 nt, Homo sapiens
  misc_RNA (1)...(19): siRNA sense strand
ugaccaaugcucagauuau

SEQ ID NO: 1190794 - RNA, 19 nt, Homo sapiens
  misc_RNA (1)...(19): siRNA sense strand
uuaguucuuugucaaguga

SEQ ID NO: 1190795 - RNA, 19 nt, Homo sapiens
  misc_RNA (1)...(19): siRNA sense strand
caucaacggaagauuaguu

SEQ ID NO: 1190796 - RNA, 19 nt, Homo sapiens
  misc_RNA (1)...(19): siRNA sense strand
caucgagacuuggacacuu

SEQ ID NO: 1190797 - RNA, 19 nt, Homo sapiens
  misc_RNA (1)...(19): siRNA sense strand
cagggaagaucugauuaag

SEQ ID NO: 1190798 - RNA, 19 nt, Homo sapiens
  misc_RNA (1)...(19): siRNA sense strand
gauuaguucuuugucaagu

SEQ ID NO: 1190799 - RNA, 19 nt, Homo sapiens
  misc_RNA (1)...(19): siRNA sense strand
ggcaguggaugacuucaac

SEQ ID NO: 1190800 - RNA, 19 nt, Homo sapiens
  misc_RNA (1)...(19): siRNA sense strand
ccaaugcucagauuauucu

SEQ ID NO: 1190801 - RNA, 19 nt, Homo sapiens
  misc_RNA (1)...(19): siRNA sense strand
gagacuuggacacuuggua

SEQ ID NO: 1190802 - RNA, 19 nt, Homo sapiens
  misc_RNA (1)...(19): siRNA sense strand
ggacaugcaagagaucauc

SEQ ID NO: 1190803 - RNA, 19 nt, Homo sapiens
  misc_RNA (1)...(19): siRNA sense strand
ugaaugaaauccaaaagca

SEQ ID NO: 1190804 - RNA, 19 nt, Homo sapiens
  misc_RNA (1)...(19): siRNA sense strand
caagugaaugaaauccaaa

SEQ ID NO: 1190805 - RNA, 19 nt, Homo sapiens
  misc_RNA (1)...(19): siRNA sense strand
gacuuggacacuugguaua

SEQ ID NO: 1190806 - RNA, 19 nt, Homo sapiens
  misc_RNA (1)...(19): siRNA sense strand
cuuggacacuugguauaaa

SEQ ID NO: 1190807 - RNA, 19 nt, Homo sapiens
  misc_RNA (1)...(19): siRNA sense strand
gaaaucugcuuuggaaaac

SEQ ID NO: 1190808 - RNA, 19 nt, Homo sapiens
  misc_RNA (1)...(19): siRNA sense strand
cgaaaucugcuuuggaaaa

SEQ ID NO: 1190809 - RNA, 19 nt, Homo sapiens
  misc_RNA (1)...(19): siRNA sense strand
ugacauccacgaacugaag

SEQ ID NO: 1190810 - RNA, 19 nt, Homo sapiens
  misc_RNA (1)...(19): siRNA sense strand
aaauggagaagcaucaugu

SEQ ID NO: 1190811 - RNA, 19 nt, Homo sapiens
  misc_RNA (1)...(19): siRNA sense strand
agaagaagcaucgagacuu

SEQ ID NO: 1190812 - RNA, 19 nt, Homo sapiens
  misc_RNA (1)...(19): siRNA sense strand
ggugacauccacgaacuga

SEQ ID NO: 1190813 - RNA, 19 nt, Homo sapiens
  misc_RNA (1)...(19): siRNA sense strand
gaagcaucaugugccaagu

SEQ ID NO: 1190814 - RNA, 19 nt, Homo sapiens
  misc_RNA (1)...(19): siRNA sense strand
uggagcggcagaacaauga

SEQ ID NO: 1190815 - RNA, 19 nt, Homo sapiens
  misc_RNA (1)...(19): siRNA sense strand
aaucaaagucgagcaugaa

SEQ ID NO: 1190816 - RNA, 19 nt, Homo sapiens
  misc_RNA (1)...(19): siRNA sense strand
agacuuggacacuugguau

SEQ ID NO: 1190817 - RNA, 19 nt, Homo sapiens
  misc_RNA (1)...(19): siRNA sense strand
agcaucaugugccaaguga

SEQ ID NO: 1190818 - RNA, 19 nt, Homo sapiens
  misc_RNA (1)...(19): siRNA sense strand
gauggcaguggaugacuuc

SEQ ID NO: 1190819 - RNA, 19 nt, Homo sapiens
  misc_RNA (1)...(19): siRNA sense strand
ugaagggacacgggaagaa

SEQ ID NO: 1190820 - RNA, 19 nt, Homo sapiens
  misc_RNA (1)...(19): siRNA sense strand
uggaugacuucaaccucaa

SEQ ID NO: 1190821 - RNA, 19 nt, Homo sapiens
  misc_RNA (1)...(19): siRNA sense strand
uccaggacaugcaagagau

SEQ ID NO: 1190822 - RNA, 19 nt, Homo sapiens
  misc_RNA (1)...(19): siRNA sense strand
ggagaccaucaacggaaga

SEQ ID NO: 1190823 - RNA, 19 nt, Homo sapiens
  misc_RNA (1)...(19): siRNA sense strand
uaacccaggagaccaucaa

SEQ ID NO: 1190824 - RNA, 19 nt, Homo sapiens
  misc_RNA (1)...(19): siRNA sense strand
gaagaagcaucgagacuug

SEQ ID NO: 1190825 - RNA, 19 nt, Homo sapiens
  misc_RNA (1)...(19): siRNA sense strand
gggaagaucugauuaaggu

SEQ ID NO: 1190826 - RNA, 19 nt, Homo sapiens
  misc_RNA (1)...(19): siRNA sense strand
gaaucaaagucgagcauga

SEQ ID NO: 1190827 - RNA, 19 nt, Homo sapiens
  misc_RNA (1)...(19): siRNA sense strand
gcagaacaaugaauaccaa

SEQ ID NO: 1190828 - RNA, 19 nt, Homo sapiens
  misc_RNA (1)...(19): siRNA sense strand
agaaggaaaucaccacgua

SEQ ID NO: 1190829 - RNA, 19 nt, Homo sapiens
  misc_RNA (1)...(19): siRNA sense strand
gaccaucaacggaagauua

SEQ ID NO: 1190830 - RNA, 19 nt, Homo sapiens
  misc_RNA (1)...(19): siRNA sense strand
gaacaaugaauaccaagug

SEQ ID NO: 1190831 - RNA, 19 nt, Homo sapiens
  misc_RNA (1)...(19): siRNA sense strand
cacgaaaucugcuuuggaa

SEQ ID NO: 1190832 - RNA, 19 nt, Homo sapiens
  misc_RNA (1)...(19): siRNA sense strand
ucaagugaaugaaauccaa

SEQ ID NO: 1190833 - RNA, 19 nt, Homo sapiens
  misc_RNA (1)...(19): siRNA sense strand
aaacccaccuggagaagga

SEQ ID NO: 1190834 - RNA, 19 nt, Homo sapiens
  misc_RNA (1)...(19): siRNA sense strand
ccaaagaucaaggccauaa

SEQ ID NO: 1190835 - RNA, 19 nt, Homo sapiens
  misc_RNA (1)...(19): siRNA sense strand
gcacgaaaucugcuuugga

SEQ ID NO: 1190836 - RNA, 19 nt, Homo sapiens
  misc_RNA (1)...(19): siRNA sense strand
ggacacgggaagaaucaaa

SEQ ID NO: 1190837 - RNA, 19 nt, Homo sapiens
  misc_RNA (1)...(19): siRNA sense strand
ccagggaagaucugauuaa

SEQ ID NO: 1190838 - RNA, 19 nt, Homo sapiens
  misc_RNA (1)...(19): siRNA sense strand
gaacuggagcggcagaaca

SEQ ID NO: 1190839 - RNA, 19 nt, Homo sapiens
  misc_RNA (1)...(19): siRNA sense strand
caaagucgagcaugaaagu

SEQ ID NO: 1190840 - RNA, 19 nt, Homo sapiens
  misc_RNA (1)...(19): siRNA sense strand
ggacacuugguauaaagaa

SEQ ID NO: 1190841 - RNA, 19 nt, Homo sapiens
  misc_RNA (1)...(19): siRNA sense strand
gagcagacaaggugacauc

SEQ ID NO: 1190842 - RNA, 19 nt, Homo sapiens
  misc_RNA (1)...(19): siRNA sense strand
gaagggacacgggaagaau

SEQ ID NO: 1190843 - RNA, 19 nt, Homo sapiens
  misc_RNA (1)...(19): siRNA sense strand
gaacugaagcgcacauucc

SEQ ID NO: 1190844 - RNA, 19 nt, Homo sapiens
  misc_RNA (1)...(19): siRNA sense strand
uuaguucuuugucaaguga

SEQ ID NO: 1190845 - RNA, 19 nt, Homo sapiens
  misc_RNA (1)...(19): siRNA sense strand
caucaacggaagauuaguu

SEQ ID NO: 1190846 - RNA, 19 nt, Homo sapiens
  misc_RNA (1)...(19): siRNA sense strand
caucgagacuuggacacuu

SEQ ID NO: 1190847 - RNA, 19 nt, Homo sapiens
  misc_RNA (1)...(19): siRNA sense strand
cagggaagaucugauuaag

SEQ ID NO: 1190848 - RNA, 19 nt, Homo sapiens
  misc_RNA (1)...(19): siRNA sense strand
gauuaguucuuugucaagu

SEQ ID NO: 1190849 - RNA, 19 nt, Homo sapiens
  misc_RNA (1)...(19): siRNA sense strand
gagacuuggacacuuggua

SEQ ID NO: 1190850 - RNA, 19 nt, Homo sapiens
  misc_RNA (1)...(19): siRNA sense strand
ggacaugcaagagaucauc

SEQ ID NO: 1190851 - RNA, 19 nt, Homo sapiens
  misc_RNA (1)...(19): siRNA sense strand
ugaaugaaauccaaaagca

SEQ ID NO: 1190852 - RNA, 19 nt, Homo sapiens
  misc_RNA (1)...(19): siRNA sense strand
caagugaaugaaauccaaa

SEQ ID NO: 1190853 - RNA, 19 nt, Homo sapiens
  misc_RNA (1)...(19): siRNA sense strand
gacuuggacacuugguaua

SEQ ID NO: 1190854 - RNA, 19 nt, Homo sapiens
  misc_RNA (1)...(19): siRNA sense strand
ugacauccacgaacugaag

SEQ ID NO: 1190855 - RNA, 19 nt, Homo sapiens
  misc_RNA (1)...(19): siRNA sense strand
cuuggacacuugguauaaa

SEQ ID NO: 1190856 - RNA, 19 nt, Homo sapiens
  misc_RNA (1)...(19): siRNA sense strand
gaaaucugcuuuggaaaac

SEQ ID NO: 1190857 - RNA, 19 nt, Homo sapiens
  misc_RNA (1)...(19): siRNA sense strand
cgaaaucugcuuuggaaaa

SEQ ID NO: 1190858 - RNA, 19 nt, Homo sapiens
  misc_RNA (1)...(19): siRNA sense strand
agaagaagcaucgagacuu

SEQ ID NO: 1190859 - RNA, 19 nt, Homo sapiens
  misc_RNA (1)...(19): siRNA sense strand
ggugacauccacgaacuga

SEQ ID NO: 1190860 - RNA, 19 nt, Homo sapiens
  misc_RNA (1)...(19): siRNA sense strand
gaagcaucaugugccaagu

SEQ ID NO: 1190861 - RNA, 19 nt, Homo sapiens
  misc_RNA (1)...(19): siRNA sense strand
uggagcggcagaacaauga

SEQ ID NO: 1190862 - RNA, 19 nt, Homo sapiens
  misc_RNA (1)...(19): siRNA sense strand
aaucaaagucgagcaugaa

SEQ ID NO: 1190863 - RNA, 19 nt, Homo sapiens
  misc_RNA (1)...(19): siRNA sense strand
agcaucaugugccaaguga

SEQ ID NO: 1190864 - RNA, 19 nt, Homo sapiens
  misc_RNA (1)...(19): siRNA sense strand
agacuuggacacuugguau

SEQ ID NO: 1190865 - RNA, 19 nt, Homo sapiens
  misc_RNA (1)...(19): siRNA sense strand
ugaagggacacgggaagaa

SEQ ID NO: 1190866 - RNA, 19 nt, Homo sapiens
  misc_RNA (1)...(19): siRNA sense strand
uccaggacaugcaagagau

SEQ ID NO: 1190867 - RNA, 19 nt, Homo sapiens
  misc_RNA (1)...(19): siRNA sense strand
ggagaccaucaacggaaga

SEQ ID NO: 1190868 - RNA, 19 nt, Homo sapiens
  misc_RNA (1)...(19): siRNA sense strand
uaacccaggagaccaucaa

SEQ ID NO: 1190869 - RNA, 19 nt, Homo sapiens
  misc_RNA (1)...(19): siRNA sense strand
gaaagaaagugacaaacua

SEQ ID NO: 1190870 - RNA, 19 nt, Homo sapiens
  misc_RNA (1)...(19): siRNA sense strand
ggaaaggccuugcagaguu

SEQ ID NO: 1190871 - RNA, 19 nt, Homo sapiens
  misc_RNA (1)...(19): siRNA sense strand
caaauccucuuccuacuuu

SEQ ID NO: 1190872 - RNA, 19 nt, Homo sapiens
  misc_RNA (1)...(19): siRNA sense strand
gaaaggccuugcagaguuu

SEQ ID NO: 1190873 - RNA, 19 nt, Homo sapiens
  misc_RNA (1)...(19): siRNA sense strand
guaaccggaucuaugauua

SEQ ID NO: 1190874 - RNA, 19 nt, Homo sapiens
  misc_RNA (1)...(19): siRNA sense strand
ggagaaaucaucacaauca

SEQ ID NO: 1190875 - RNA, 19 nt, Homo sapiens
  misc_RNA (1)...(19): siRNA sense strand
ggaaagacuuaugaagaaa

SEQ ID NO: 1190876 - RNA, 19 nt, Homo sapiens
  misc_RNA (1)...(19): siRNA sense strand
auaaugaacugacgguuaa

SEQ ID NO: 1190877 - RNA, 19 nt, Homo sapiens
  misc_RNA (1)...(19): siRNA sense strand
cuaaagagcuacaucgaau

SEQ ID NO: 1190878 - RNA, 19 nt, Homo sapiens
  misc_RNA (1)...(19): siRNA sense strand
caaagaaagaucuccauuu

SEQ ID NO: 1190879 - RNA, 19 nt, Homo sapiens
  misc_RNA (1)...(19): siRNA sense strand
ggaauguaaucacgaguau

SEQ ID NO: 1190880 - RNA, 19 nt, Homo sapiens
  misc_RNA (1)...(19): siRNA sense strand
gaaaucaucacaaucacaa

SEQ ID NO: 1190881 - RNA, 19 nt, Homo sapiens
  misc_RNA (1)...(19): siRNA sense strand
gaaagugacaaacuaguug

SEQ ID NO: 1190882 - RNA, 19 nt, Homo sapiens
  misc_RNA (1)...(19): siRNA sense strand
ugaaacagaucucaaugau

SEQ ID NO: 1190883 - RNA, 19 nt, Homo sapiens
  misc_RNA (1)...(19): siRNA sense strand
gguagcagaucccaggaaa

SEQ ID NO: 1190884 - RNA, 19 nt, Homo sapiens
  misc_RNA (1)...(19): siRNA sense strand
gagucagcaucaugucuua

SEQ ID NO: 1190885 - RNA, 19 nt, Homo sapiens
  misc_RNA (1)...(19): siRNA sense strand
gaagagagucagcaucaug

SEQ ID NO: 1190886 - RNA, 19 nt, Homo sapiens
  misc_RNA (1)...(19): siRNA sense strand
caaacuaguugcaacaagu

SEQ ID NO: 1190887 - RNA, 19 nt, Homo sapiens
  misc_RNA (1)...(19): siRNA sense strand
aggaaagacuuaugaagaa

SEQ ID NO: 1190888 - RNA, 19 nt, Homo sapiens
  misc_RNA (1)...(19): siRNA sense strand
gaauaucagcuaacaccua

SEQ ID NO: 1190889 - RNA, 19 nt, Homo sapiens
  misc_RNA (1)...(19): siRNA sense strand
uaacaccuacuaacacuaa

SEQ ID NO: 1190890 - RNA, 19 nt, Homo sapiens
  misc_RNA (1)...(19): siRNA sense strand
ccaguaaucucagaaagug

SEQ ID NO: 1190891 - RNA, 19 nt, Homo sapiens
  misc_RNA (1)...(19): siRNA sense strand
gaucuaugauuacaacagu

SEQ ID NO: 1190892 - RNA, 19 nt, Homo sapiens
  misc_RNA (1)...(19): siRNA sense strand
ggaaggaagaaacaucaaa

SEQ ID NO: 1190893 - RNA, 19 nt, Homo sapiens
  misc_RNA (1)...(19): siRNA sense strand
gagaugagaaggaauggaa

SEQ ID NO: 1190894 - RNA, 19 nt, Homo sapiens
  misc_RNA (1)...(19): siRNA sense strand
ccacagguauaagcacuuu

SEQ ID NO: 1190895 - RNA, 19 nt, Homo sapiens
  misc_RNA (1)...(19): siRNA sense strand
uaacacuaaucgaucugua

SEQ ID NO: 1190896 - RNA, 19 nt, Homo sapiens
  misc_RNA (1)...(19): siRNA sense strand
gaacugacgguuaaugaag

SEQ ID NO: 1190897 - RNA, 19 nt, Homo sapiens
  misc_RNA (1)...(19): siRNA sense strand
cagaacagccaaagaaaga

SEQ ID NO: 1190898 - RNA, 19 nt, Homo sapiens
  misc_RNA (1)...(19): siRNA sense strand
cagcaacaaucaccagguu

SEQ ID NO: 1190899 - RNA, 19 nt, Homo sapiens
  misc_RNA (1)...(19): siRNA sense strand
uaagcacuuugacugguua

SEQ ID NO: 1190900 - RNA, 19 nt, Homo sapiens
  misc_RNA (1)...(19): siRNA sense strand
gcacagcucaggccaguuc

SEQ ID NO: 1190901 - RNA, 19 nt, Homo sapiens
  misc_RNA (1)...(19): siRNA sense strand
caggaaagacuuaugaaga

SEQ ID NO: 1190902 - RNA, 19 nt, Homo sapiens
  misc_RNA (1)...(19): siRNA sense strand
caucauuguuggagauuau

SEQ ID NO: 1190903 - RNA, 19 nt, Homo sapiens
  misc_RNA (1)...(19): siRNA sense strand
gaaaauuccccuuaacaaa

SEQ ID NO: 1190904 - RNA, 19 nt, Homo sapiens
  misc_RNA (1)...(19): siRNA sense strand
gaaacagucgugcuaguuc

SEQ ID NO: 1190905 - RNA, 19 nt, Homo sapiens
  misc_RNA (1)...(19): siRNA sense strand
ggaaacagucgugcuaguu

SEQ ID NO: 1190906 - RNA, 19 nt, Homo sapiens
  misc_RNA (1)...(19): siRNA sense strand
ugacuuggacuuaguagaa

SEQ ID NO: 1190907 - RNA, 19 nt, Homo sapiens
  misc_RNA (1)...(19): siRNA sense strand
gaacugggaaagcucagaa

SEQ ID NO: 1190908 - RNA, 19 nt, Homo sapiens
  misc_RNA (1)...(19): siRNA sense strand
aagcugagaugaaucacuu

SEQ ID NO: 1190909 - RNA, 19 nt, Homo sapiens
  misc_RNA (1)...(19): siRNA sense strand
gcacuuugacugguuauau

SEQ ID NO: 1190910 - RNA, 19 nt, Homo sapiens
  misc_RNA (1)...(19): siRNA sense strand
ggacuuaguagaaauagag

SEQ ID NO: 1190911 - RNA, 19 nt, Homo sapiens
  misc_RNA (1)...(19): siRNA sense strand
aauaaugaacugacgguua

SEQ ID NO: 1190912 - RNA, 19 nt, Homo sapiens
  misc_RNA (1)...(19): siRNA sense strand
aaggagaaaucaucacaau

SEQ ID NO: 1190913 - RNA, 19 nt, Homo sapiens
  misc_RNA (1)...(19): siRNA sense strand
ucacaagggagcaauagaa

SEQ ID NO: 1190914 - RNA, 19 nt, Homo sapiens
  misc_RNA (1)...(19): siRNA sense strand
gcccauuacccaaggaaua

SEQ ID NO: 1190915 - RNA, 19 nt, Homo sapiens
  misc_RNA (1)...(19): siRNA sense strand
gaugaugacugggaugaag

SEQ ID NO: 1190916 - RNA, 19 nt, Homo sapiens
  misc_RNA (1)...(19): siRNA sense strand
gaaggaagaaacaucaaag

SEQ ID NO: 1190917 - RNA, 19 nt, Homo sapiens
  misc_RNA (1)...(19): siRNA sense strand
caacuggugaugaugauga

SEQ ID NO: 1190918 - RNA, 19 nt, Homo sapiens
  misc_RNA (1)...(19): siRNA sense strand
ccaaggcucggguuaugua

SEQ ID NO: 1190919 - RNA, 19 nt, Homo sapiens
  misc_RNA (1)...(19): siRNA sense strand
gaaacagaucucaaugaug

SEQ ID NO: 1190920 - RNA, 19 nt, Homo sapiens
  misc_RNA (1)...(19): siRNA sense strand
caaaauguauggucuaaag

SEQ ID NO: 1190921 - RNA, 19 nt, Homo sapiens
  misc_RNA (1)...(19): siRNA sense strand
uaaagagcuacaucgaaua

SEQ ID NO: 1190922 - RNA, 19 nt, Homo sapiens
  misc_RNA (1)...(19): siRNA sense strand
acaguaaccggaucuauga

SEQ ID NO: 1190923 - RNA, 19 nt, Homo sapiens
  misc_RNA (1)...(19): siRNA sense strand
uccagcaguuccuaaauuu

SEQ ID NO: 1190924 - RNA, 19 nt, Homo sapiens
  misc_RNA (1)...(19): siRNA sense strand
gcuaacaccuacuaacacu

SEQ ID NO: 1190925 - RNA, 19 nt, Homo sapiens
  misc_RNA (1)...(19): siRNA sense strand
caucgaauaucagcuaaca

SEQ ID NO: 1190926 - RNA, 19 nt, Homo sapiens
  misc_RNA (1)...(19): siRNA sense strand
agagcuacaucgaauauca

SEQ ID NO: 1190927 - RNA, 19 nt, Homo sapiens
  misc_RNA (1)...(19): siRNA sense strand
acacaaacacucccaacaa

SEQ ID NO: 1190928 - RNA, 19 nt, Homo sapiens
  misc_RNA (1)...(19): siRNA sense strand
aaacagaacauggugaaga

SEQ ID NO: 1190929 - RNA, 19 nt, Homo sapiens
  misc_RNA (1)...(19): siRNA sense strand
gaacagccaaagaaagauc

SEQ ID NO: 1190930 - RNA, 19 nt, Homo sapiens
  misc_RNA (1)...(19): siRNA sense strand
gcaccugacuuggacuuag

SEQ ID NO: 1190931 - RNA, 19 nt, Homo sapiens
  misc_RNA (1)...(19): siRNA sense strand
cuacaucgaauaucagcua

SEQ ID NO: 1190932 - RNA, 19 nt, Homo sapiens
  misc_RNA (1)...(19): siRNA sense strand
cugcuucccugacaucauu

SEQ ID NO: 1190933 - RNA, 19 nt, Homo sapiens
  misc_RNA (1)...(19): siRNA sense strand
cagaagcaggaaagacuua

SEQ ID NO: 1190934 - RNA, 19 nt, Homo sapiens
  misc_RNA (1)...(19): siRNA sense strand
ucaccaaggccauggauga

SEQ ID NO: 1190935 - RNA, 19 nt, Homo sapiens
  misc_RNA (1)...(19): siRNA sense strand
gaaggagaaaucaucacaa

SEQ ID NO: 1190936 - RNA, 19 nt, Homo sapiens
  misc_RNA (1)...(19): siRNA sense strand
ccaaagaaagaucuccauu

SEQ ID NO: 1190937 - RNA, 19 nt, Homo sapiens
  misc_RNA (1)...(19): siRNA sense strand
ucucaaugaugcaauaaca

SEQ ID NO: 1190938 - RNA, 19 nt, Homo sapiens
  misc_RNA (1)...(19): siRNA sense strand
gacuuggacuuaguagaaa

SEQ ID NO: 1190939 - RNA, 19 nt, Homo sapiens
  misc_RNA (1)...(19): siRNA sense strand
aaucacaaauccggaugua

SEQ ID NO: 1190940 - RNA, 19 nt, Homo sapiens
  misc_RNA (1)...(19): siRNA sense strand
caccaaggcucggguuaug

SEQ ID NO: 1190941 - RNA, 19 nt, Homo sapiens
  misc_RNA (1)...(19): siRNA sense strand
cgaggaaacagucgugcua

SEQ ID NO: 1190942 - RNA, 19 nt, Homo sapiens
  misc_RNA (1)...(19): siRNA sense strand
gcagaacagccaaagaaag

SEQ ID NO: 1190943 - RNA, 19 nt, Homo sapiens
  misc_RNA (1)...(19): siRNA sense strand
gugaaacagaucucaauga

SEQ ID NO: 1190944 - RNA, 19 nt, Homo sapiens
  misc_RNA (1)...(19): siRNA sense strand
uguauggucuaaagagcua

SEQ ID NO: 1190945 - RNA, 19 nt, Homo sapiens
  misc_RNA (1)...(19): siRNA sense strand
agaucucaaugaugcaaua

SEQ ID NO: 1190946 - RNA, 19 nt, Homo sapiens
  misc_RNA (1)...(19): siRNA sense strand
gugaagagagucagcauca

SEQ ID NO: 1190947 - RNA, 19 nt, Homo sapiens
  misc_RNA (1)...(19): siRNA sense strand
aaacuaguugcaacaagua

SEQ ID NO: 1190948 - RNA, 19 nt, Homo sapiens
  misc_RNA (1)...(19): siRNA sense strand
gaaaggcuccaaaauguau

SEQ ID NO: 1190949 - RNA, 19 nt, Homo sapiens
  misc_RNA (1)...(19): siRNA sense strand
ucaaugaugcaauaacaga

SEQ ID NO: 1190950 - RNA, 19 nt, Homo sapiens
  misc_RNA (1)...(19): siRNA sense strand
aaagagcuacaucgaauau

SEQ ID NO: 1190951 - RNA, 19 nt, Homo sapiens
  misc_RNA (1)...(19): siRNA sense strand
caaacacucccaacaacug

SEQ ID NO: 1190952 - RNA, 19 nt, Homo sapiens
  misc_RNA (1)...(19): siRNA sense strand
guugcaagcugagaugaau

SEQ ID NO: 1190953 - RNA, 19 nt, Homo sapiens
  misc_RNA (1)...(19): siRNA sense strand
uaguagaaauagagcagaa

SEQ ID NO: 1190954 - RNA, 19 nt, Homo sapiens
  misc_RNA (1)...(19): siRNA sense strand
ucacaggccgcuuugaaga

SEQ ID NO: 1190955 - RNA, 19 nt, Homo sapiens
  misc_RNA (1)...(19): siRNA sense strand
cacaaacacucccaacaac

SEQ ID NO: 1190956 - RNA, 19 nt, Homo sapiens
  misc_RNA (1)...(19): siRNA sense strand
cugcugaaccuggaaauaa

SEQ ID NO: 1190957 - RNA, 19 nt, Homo sapiens
  misc_RNA (1)...(19): siRNA sense strand
gaauguaaucacgaguaua

SEQ ID NO: 1190958 - RNA, 19 nt, Homo sapiens
  misc_RNA (1)...(19): siRNA sense strand
gcaggaaagacuuaugaag

SEQ ID NO: 1190959 - RNA, 19 nt, Homo sapiens
  misc_RNA (1)...(19): siRNA sense strand
guuccuaaauuuccgagau

SEQ ID NO: 1190960 - RNA, 19 nt, Homo sapiens
  misc_RNA (1)...(19): siRNA sense strand
uaugagcgucuccugguua

SEQ ID NO: 1190961 - RNA, 19 nt, Homo sapiens
  misc_RNA (1)...(19): siRNA sense strand
cagcuaacaccuacuaaca

SEQ ID NO: 1190962 - RNA, 19 nt, Homo sapiens
  misc_RNA (1)...(19): siRNA sense strand
aggcucggguuauguauga

SEQ ID NO: 1190963 - RNA, 19 nt, Homo sapiens
  misc_RNA (1)...(19): siRNA sense strand
ccaaauccucuuccuacuu

SEQ ID NO: 1190964 - RNA, 19 nt, Homo sapiens
  misc_RNA (1)...(19): siRNA sense strand
gagauuauggcccaaugug

SEQ ID NO: 1190965 - RNA, 19 nt, Homo sapiens
  misc_RNA (1)...(19): siRNA sense strand
cagacuacguugaaauuuu

SEQ ID NO: 1190966 - RNA, 19 nt, Homo sapiens
  misc_RNA (1)...(19): siRNA sense strand
cacaagggagcaauagaaa

SEQ ID NO: 1190967 - RNA, 19 nt, Homo sapiens
  misc_RNA (1)...(19): siRNA sense strand
caagugcaauuuuacgaaa

SEQ ID NO: 1190968 - RNA, 19 nt, Homo sapiens
  misc_RNA (1)...(19): siRNA sense strand
ugaaagaaagugacaaacu

SEQ ID NO: 1190969 - RNA, 19 nt, Homo sapiens
  misc_RNA (1)...(19): siRNA sense strand
gaaauuggcuuuacgauga

SEQ ID NO: 1190970 - RNA, 19 nt, Homo sapiens
  misc_RNA (1)...(19): siRNA sense strand
gaacaaaccuuggaaaugu

SEQ ID NO: 1190971 - RNA, 19 nt, Homo sapiens
  misc_RNA (1)...(19): siRNA sense strand
ugacauggcuggagaaauu

SEQ ID NO: 1190972 - RNA, 19 nt, Homo sapiens
  misc_RNA (1)...(19): siRNA sense strand
ggaacuugauguccaaaua

SEQ ID NO: 1190973 - RNA, 19 nt, Homo sapiens
  misc_RNA (1)...(19): siRNA sense strand
gccaaggucuuacuacaua

SEQ ID NO: 1190974 - RNA, 19 nt, Homo sapiens
  misc_RNA (1)...(19): siRNA sense strand
gaaccagccuucauguauu

SEQ ID NO: 1190975 - RNA, 19 nt, Homo sapiens
  misc_RNA (1)...(19): siRNA sense strand
gcaaagaaucucaaguaua

SEQ ID NO: 1190976 - RNA, 19 nt, Homo sapiens
  misc_RNA (1)...(19): siRNA sense strand
gaagaugagccucuguuua

SEQ ID NO: 1190977 - RNA, 19 nt, Homo sapiens
  misc_RNA (1)...(19): siRNA sense strand
ugaaauggcuuuagugcaa

SEQ ID NO: 1190978 - RNA, 19 nt, Homo sapiens
  misc_RNA (1)...(19): siRNA sense strand
gaaagauugugaagaaaca

SEQ ID NO: 1190979 - RNA, 19 nt, Homo sapiens
  misc_RNA (1)...(19): siRNA sense strand
uaaacugucugaggacuua

SEQ ID NO: 1190980 - RNA, 19 nt, Homo sapiens
  misc_RNA (1)...(19): siRNA sense strand
gcacuacccugaagaacug

SEQ ID NO: 1190981 - RNA, 19 nt, Homo sapiens
  misc_RNA (1)...(19): siRNA sense strand
guggaaagcugucuucuuc

SEQ ID NO: 1190982 - RNA, 19 nt, Homo sapiens
  misc_RNA (1)...(19): siRNA sense strand
gaacuugauguccaaauaa

SEQ ID NO: 1190983 - RNA, 19 nt, Homo sapiens
  misc_RNA (1)...(19): siRNA sense strand
gaugcaagaugcuggaauu

SEQ ID NO: 1190984 - RNA, 19 nt, Homo sapiens
  misc_RNA (1)...(19): siRNA sense strand
gcaagugucucagauaaag

SEQ ID NO: 1190985 - RNA, 19 nt, Homo sapiens
  misc_RNA (1)...(19): siRNA sense strand
ggaagagguuaaucauguu

SEQ ID NO: 1190986 - RNA, 19 nt, Homo sapiens
  misc_RNA (1)...(19): siRNA sense strand
gaagagguuaaucauguua

SEQ ID NO: 1190987 - RNA, 19 nt, Homo sapiens
  misc_RNA (1)...(19): siRNA sense strand
gaauguaguggcucagaua

SEQ ID NO: 1190988 - RNA, 19 nt, Homo sapiens
  misc_RNA (1)...(19): siRNA sense strand
gcaaagaaaguuguugaaa

SEQ ID NO: 1190989 - RNA, 19 nt, Homo sapiens
  misc_RNA (1)...(19): siRNA sense strand
caacucugcuccagcugua

SEQ ID NO: 1190990 - RNA, 19 nt, Homo sapiens
  misc_RNA (1)...(19): siRNA sense strand
guaggcaucucuuggaaug

SEQ ID NO: 1190991 - RNA, 19 nt, Homo sapiens
  misc_RNA (1)...(19): siRNA sense strand
ugaauauccugacauguga

SEQ ID NO: 1190992 - RNA, 19 nt, Homo sapiens
  misc_RNA (1)...(19): siRNA sense strand
gcaagaugcuggaauuacu

SEQ ID NO: 1190993 - RNA, 19 nt, Homo sapiens
  misc_RNA (1)...(19): siRNA sense strand
gagcagauucuuuccauga

SEQ ID NO: 1190994 - RNA, 19 nt, Homo sapiens
  misc_RNA (1)...(19): siRNA sense strand
ugaaggaucugguguuaag

SEQ ID NO: 1190995 - RNA, 19 nt, Homo sapiens
  misc_RNA (1)...(19): siRNA sense strand
gcaagcaagugucucagau

SEQ ID NO: 1190996 - RNA, 19 nt, Homo sapiens
  misc_RNA (1)...(19): siRNA sense strand
uggaagagguuaaucaugu

SEQ ID NO: 1190997 - RNA, 19 nt, Homo sapiens
  misc_RNA (1)...(19): siRNA sense strand
aagcaagugucucagauaa

SEQ ID NO: 1190998 - RNA, 19 nt, Homo sapiens
  misc_RNA (1)...(19): siRNA sense strand
gaagaaacacagucaaugg

SEQ ID NO: 1190999 - RNA, 19 nt, Homo sapiens
  misc_RNA (1)...(19): siRNA sense strand
ggauuugcuuguuccagua

SEQ ID NO: 1191000 - RNA, 19 nt, Homo sapiens
  misc_RNA (1)...(19): siRNA sense strand
aaccagccuucauguauua

SEQ ID NO: 1191001 - RNA, 19 nt, Homo sapiens
  misc_RNA (1)...(19): siRNA sense strand
ggaacaaaccuuggaaaug

SEQ ID NO: 1191002 - RNA, 19 nt, Homo sapiens
  misc_RNA (1)...(19): siRNA sense strand
ggaaugugcuaaggaacuu

SEQ ID NO: 1191003 - RNA, 19 nt, Homo sapiens
  misc_RNA (1)...(19): siRNA sense strand
gcauucagcugagccaaga

SEQ ID NO: 1191004 - RNA, 19 nt, Homo sapiens
  misc_RNA (1)...(19): siRNA sense strand
gcauuuacacucgcaguua

SEQ ID NO: 1191005 - RNA, 19 nt, Homo sapiens
  misc_RNA (1)...(19): siRNA sense strand
cuaugugucuucugcauuu

SEQ ID NO: 1191006 - RNA, 19 nt, Homo sapiens
  misc_RNA (1)...(19): siRNA sense strand
ccugaaggaucugguguua

SEQ ID NO: 1191007 - RNA, 19 nt, Homo sapiens
  misc_RNA (1)...(19): siRNA sense strand
gagugaauauccugacaug

SEQ ID NO: 1191008 - RNA, 19 nt, Homo sapiens
  misc_RNA (1)...(19): siRNA sense strand
gauaaaguaugcagcaaaa

SEQ ID NO: 1191009 - RNA, 19 nt, Homo sapiens
  misc_RNA (1)...(19): siRNA sense strand
ggacuuaaauaccauucca

SEQ ID NO: 1191010 - RNA, 19 nt, Homo sapiens
  misc_RNA (1)...(19): siRNA sense strand
uuggaaagauugugaagaa

SEQ ID NO: 1191011 - RNA, 19 nt, Homo sapiens
  misc_RNA (1)...(19): siRNA sense strand
uaaauuucccucuggagua

SEQ ID NO: 1191012 - RNA, 19 nt, Homo sapiens
  misc_RNA (1)...(19): siRNA sense strand
ggaagaugagccucuguuu

SEQ ID NO: 1191013 - RNA, 19 nt, Homo sapiens
  misc_RNA (1)...(19): siRNA sense strand
caacagaagauaauauugg

SEQ ID NO: 1191014 - RNA, 19 nt, Homo sapiens
  misc_RNA (1)...(19): siRNA sense strand
cauuuacacucgcaguuaa

SEQ ID NO: 1191015 - RNA, 19 nt, Homo sapiens
  misc_RNA (1)...(19): siRNA sense strand
ggaauuacuucagacucaa

SEQ ID NO: 1191016 - RNA, 19 nt, Homo sapiens
  misc_RNA (1)...(19): siRNA sense strand
gauaaagccauucuacaca

SEQ ID NO: 1191017 - RNA, 19 nt, Homo sapiens
  misc_RNA (1)...(19): siRNA sense strand
agaaauacaaggaagauga

SEQ ID NO: 1191018 - RNA, 19 nt, Homo sapiens
  misc_RNA (1)...(19): siRNA sense strand
uaaggaacuugauguccaa

SEQ ID NO: 1191019 - RNA, 19 nt, Homo sapiens
  misc_RNA (1)...(19): siRNA sense strand
caagcaagugucucagaua

SEQ ID NO: 1191020 - RNA, 19 nt, Homo sapiens
  misc_RNA (1)...(19): siRNA sense strand
gagccaagaagacagcuuu

SEQ ID NO: 1191021 - RNA, 19 nt, Homo sapiens
  misc_RNA (1)...(19): siRNA sense strand
cagacucaaugaugaagaa

SEQ ID NO: 1191022 - RNA, 19 nt, Homo sapiens
  misc_RNA (1)...(19): siRNA sense strand
gcuuuacgaugaacauguu

SEQ ID NO: 1191023 - RNA, 19 nt, Homo sapiens
  misc_RNA (1)...(19): siRNA sense strand
gaggguaacaugaaguuug

SEQ ID NO: 1191024 - RNA, 19 nt, Homo sapiens
  misc_RNA (1)...(19): siRNA sense strand
gcacguaaucacccaaaug

SEQ ID NO: 1191025 - RNA, 19 nt, Homo sapiens
  misc_RNA (1)...(19): siRNA sense strand
gugaauauccugacaugug

SEQ ID NO: 1191026 - RNA, 19 nt, Homo sapiens
  misc_RNA (1)...(19): siRNA sense strand
agacauugguggaggauuc

SEQ ID NO: 1191027 - RNA, 19 nt, Homo sapiens
  misc_RNA (1)...(19): siRNA sense strand
gaagaaaauugcacguaau

SEQ ID NO: 1191028 - RNA, 19 nt, Homo sapiens
  misc_RNA (1)...(19): siRNA sense strand
gaacuguaggcaucucuug

SEQ ID NO: 1191029 - RNA, 19 nt, Homo sapiens
  misc_RNA (1)...(19): siRNA sense strand
uuccagagguucacaagaa

SEQ ID NO: 1191030 - RNA, 19 nt, Homo sapiens
  misc_RNA (1)...(19): siRNA sense strand
gaaugaugguguuuauggu

SEQ ID NO: 1191031 - RNA, 19 nt, Homo sapiens
  misc_RNA (1)...(19): siRNA sense strand
gggguuaaauuucauguuu

SEQ ID NO: 1191032 - RNA, 19 nt, Homo sapiens
  misc_RNA (1)...(19): siRNA sense strand
ugaagaaaauugcacguaa

SEQ ID NO: 1191033 - RNA, 19 nt, Homo sapiens
  misc_RNA (1)...(19): siRNA sense strand
cagagguucacaagaaaua

SEQ ID NO: 1191034 - RNA, 19 nt, Homo sapiens
  misc_RNA (1)...(19): siRNA sense strand
gauaucuacuuuccugaag

SEQ ID NO: 1191035 - RNA, 19 nt, Homo sapiens
  misc_RNA (1)...(19): siRNA sense strand
gcaacagaagauaauauug

SEQ ID NO: 1191036 - RNA, 19 nt, Homo sapiens
  misc_RNA (1)...(19): siRNA sense strand
ggaaccggauuugcuuguu

SEQ ID NO: 1191037 - RNA, 19 nt, Homo sapiens
  misc_RNA (1)...(19): siRNA sense strand
gggagcagauucuuuccau

SEQ ID NO: 1191038 - RNA, 19 nt, Homo sapiens
  misc_RNA (1)...(19): siRNA sense strand
uugcaaagaaucucaagua

SEQ ID NO: 1191039 - RNA, 19 nt, Homo sapiens
  misc_RNA (1)...(19): siRNA sense strand
gugaagaggguaacaugaa

SEQ ID NO: 1191040 - RNA, 19 nt, Homo sapiens
  misc_RNA (1)...(19): siRNA sense strand
ucuguuggauaucuacuuu

SEQ ID NO: 1191041 - RNA, 19 nt, Homo sapiens
  misc_RNA (1)...(19): siRNA sense strand
guacaugcucuaucugaug

SEQ ID NO: 1191042 - RNA, 19 nt, Homo sapiens
  misc_RNA (1)...(19): siRNA sense strand
uggaauuacuucagacuca

SEQ ID NO: 1191043 - RNA, 19 nt, Homo sapiens
  misc_RNA (1)...(19): siRNA sense strand
ggccagccauuuauuacau

SEQ ID NO: 1191044 - RNA, 19 nt, Homo sapiens
  misc_RNA (1)...(19): siRNA sense strand
gagccucuguuuacaagca

SEQ ID NO: 1191045 - RNA, 19 nt, Homo sapiens
  misc_RNA (1)...(19): siRNA sense strand
ggaaagauugugaagaaac

SEQ ID NO: 1191046 - RNA, 19 nt, Homo sapiens
  misc_RNA (1)...(19): siRNA sense strand
cagccuucauguauuauau

SEQ ID NO: 1191047 - RNA, 19 nt, Homo sapiens
  misc_RNA (1)...(19): siRNA sense strand
ggauaucuacuuuccugaa

SEQ ID NO: 1191048 - RNA, 19 nt, Homo sapiens
  misc_RNA (1)...(19): siRNA sense strand
ggagaaauuggcuuuacga

SEQ ID NO: 1191049 - RNA, 19 nt, Homo sapiens
  misc_RNA (1)...(19): siRNA sense strand
ucaaguauauguacaugcu

SEQ ID NO: 1191050 - RNA, 19 nt, Homo sapiens
  misc_RNA (1)...(19): siRNA sense strand
ccugacaugugacaaugaa

SEQ ID NO: 1191051 - RNA, 19 nt, Homo sapiens
  misc_RNA (1)...(19): siRNA sense strand
gaaauacaaggaagaugag

SEQ ID NO: 1191052 - RNA, 19 nt, Homo sapiens
  misc_RNA (1)...(19): siRNA sense strand
acucgcaguuaauaucaua

SEQ ID NO: 1191053 - RNA, 19 nt, Homo sapiens
  misc_RNA (1)...(19): siRNA sense strand
ugcaaagaaucucaaguau

SEQ ID NO: 1191054 - RNA, 19 nt, Homo sapiens
  misc_RNA (1)...(19): siRNA sense strand
ugaagaggguaacaugaag

SEQ ID NO: 1191055 - RNA, 19 nt, Homo sapiens
  misc_RNA (1)...(19): siRNA sense strand
gacaugugacaaugaaauu

SEQ ID NO: 1191056 - RNA, 19 nt, Homo sapiens
  misc_RNA (1)...(19): siRNA sense strand
gcaguuaauaucauagcaa

SEQ ID NO: 1191057 - RNA, 19 nt, Homo sapiens
  misc_RNA (1)...(19): siRNA sense strand
agaggccagccauuuauua

SEQ ID NO: 1191058 - RNA, 19 nt, Homo sapiens
  misc_RNA (1)...(19): siRNA sense strand
ucacaagaaauacaaggaa

SEQ ID NO: 1191059 - RNA, 19 nt, Homo sapiens
  misc_RNA (1)...(19): siRNA sense strand
acaaaccuuggaaauguua

SEQ ID NO: 1191060 - RNA, 19 nt, Homo sapiens
  misc_RNA (1)...(19): siRNA sense strand
acucaaugaugaagaacuu

SEQ ID NO: 1191061 - RNA, 19 nt, Homo sapiens
  misc_RNA (1)...(19): siRNA sense strand
uagcaaagaaaguuguuga

SEQ ID NO: 1191062 - RNA, 19 nt, Homo sapiens
  misc_RNA (1)...(19): siRNA sense strand
gaugcucgauguguguuug

SEQ ID NO: 1191063 - RNA, 19 nt, Homo sapiens
  misc_RNA (1)...(19): siRNA sense strand
ggguuaaauuucauguuuc

SEQ ID NO: 1191064 - RNA, 19 nt, Homo sapiens
  misc_RNA (1)...(19): siRNA sense strand
gauaacaugggagcagauu

SEQ ID NO: 1191065 - RNA, 19 nt, Homo sapiens
  misc_RNA (1)...(19): siRNA sense strand
gaugagccucuguuuacaa

SEQ ID NO: 1191066 - RNA, 19 nt, Homo sapiens
  misc_RNA (1)...(19): siRNA sense strand
uguaguggcucagauaaag

SEQ ID NO: 1191067 - RNA, 19 nt, Homo sapiens
  misc_RNA (1)...(19): siRNA sense strand
gcagauucuuuccaugaac

SEQ ID NO: 1191068 - RNA, 19 nt, Homo sapiens
  misc_RNA (1)...(19): siRNA sense strand
uaacaugggagcagauucu

SEQ ID NO: 1191069 - RNA, 19 nt, Homo sapiens
  misc_RNA (1)...(19): siRNA sense strand
gaaauuggcuuuacgauga

SEQ ID NO: 1191070 - RNA, 19 nt, Homo sapiens
  misc_RNA (1)...(19): siRNA sense strand
gaacaaaccuuggaaaugu

SEQ ID NO: 1191071 - RNA, 19 nt, Homo sapiens
  misc_RNA (1)...(19): siRNA sense strand
ugacauggcuggagaaauu

SEQ ID NO: 1191072 - RNA, 19 nt, Homo sapiens
  misc_RNA (1)...(19): siRNA sense strand
ggaacuugauguccaaaua

SEQ ID NO: 1191073 - RNA, 19 nt, Homo sapiens
  misc_RNA (1)...(19): siRNA sense strand
gccaaggucuuacuacaua

SEQ ID NO: 1191074 - RNA, 19 nt, Homo sapiens
  misc_RNA (1)...(19): siRNA sense strand
gaaccagccuucauguauu

SEQ ID NO: 1191075 - RNA, 19 nt, Homo sapiens
  misc_RNA (1)...(19): siRNA sense strand
gcaaagaaucucaaguaua

SEQ ID NO: 1191076 - RNA, 19 nt, Homo sapiens
  misc_RNA (1)...(19): siRNA sense strand
gaagaugagccucuguuua

SEQ ID NO: 1191077 - RNA, 19 nt, Homo sapiens
  misc_RNA (1)...(19): siRNA sense strand
ugaaauggcuuuagugcaa

SEQ ID NO: 1191078 - RNA, 19 nt, Homo sapiens
  misc_RNA (1)...(19): siRNA sense strand
gaaagauugugaagaaaca

SEQ ID NO: 1191079 - RNA, 19 nt, Homo sapiens
  misc_RNA (1)...(19): siRNA sense strand
uaaacugucugaggacuua

SEQ ID NO: 1191080 - RNA, 19 nt, Homo sapiens
  misc_RNA (1)...(19): siRNA sense strand
gcacuacccugaagaacug

SEQ ID NO: 1191081 - RNA, 19 nt, Homo sapiens
  misc_RNA (1)...(19): siRNA sense strand
guggaaagcugucuucuuc

SEQ ID NO: 1191082 - RNA, 19 nt, Homo sapiens
  misc_RNA (1)...(19): siRNA sense strand
gaacuugauguccaaauaa

SEQ ID NO: 1191083 - RNA, 19 nt, Homo sapiens
  misc_RNA (1)...(19): siRNA sense strand
gaugcaagaugcuggaauu

SEQ ID NO: 1191084 - RNA, 19 nt, Homo sapiens
  misc_RNA (1)...(19): siRNA sense strand
gcaagugucucagauaaag

SEQ ID NO: 1191085 - RNA, 19 nt, Homo sapiens
  misc_RNA (1)...(19): siRNA sense strand
ggaagagguuaaucauguu

SEQ ID NO: 1191086 - RNA, 19 nt, Homo sapiens
  misc_RNA (1)...(19): siRNA sense strand
gaagagguuaaucauguua

SEQ ID NO: 1191087 - RNA, 19 nt, Homo sapiens
  misc_RNA (1)...(19): siRNA sense strand
gaauguaguggcucagaua

SEQ ID NO: 1191088 - RNA, 19 nt, Homo sapiens
  misc_RNA (1)...(19): siRNA sense strand
gcaaagaaaguuguugaaa

SEQ ID NO: 1191089 - RNA, 19 nt, Homo sapiens
  misc_RNA (1)...(19): siRNA sense strand
caacucugcuccagcugua

SEQ ID NO: 1191090 - RNA, 19 nt, Homo sapiens
  misc_RNA (1)...(19): siRNA sense strand
guaggcaucucuuggaaug

SEQ ID NO: 1191091 - RNA, 19 nt, Homo sapiens
  misc_RNA (1)...(19): siRNA sense strand
ugaauauccugacauguga

SEQ ID NO: 1191092 - RNA, 19 nt, Homo sapiens
  misc_RNA (1)...(19): siRNA sense strand
gcaagaugcuggaauuacu

SEQ ID NO: 1191093 - RNA, 19 nt, Homo sapiens
  misc_RNA (1)...(19): siRNA sense strand
gagcagauucuuuccauga

SEQ ID NO: 1191094 - RNA, 19 nt, Homo sapiens
  misc_RNA (1)...(19): siRNA sense strand
ugaaggaucugguguuaag

SEQ ID NO: 1191095 - RNA, 19 nt, Homo sapiens
  misc_RNA (1)...(19): siRNA sense strand
gcaagcaagugucucagau

SEQ ID NO: 1191096 - RNA, 19 nt, Homo sapiens
  misc_RNA (1)...(19): siRNA sense strand
uggaagagguuaaucaugu

SEQ ID NO: 1191097 - RNA, 19 nt, Homo sapiens
  misc_RNA (1)...(19): siRNA sense strand
aagcaagugucucagauaa

SEQ ID NO: 1191098 - RNA, 19 nt, Homo sapiens
  misc_RNA (1)...(19): siRNA sense strand
gaagaaacacagucaaugg

SEQ ID NO: 1191099 - RNA, 19 nt, Homo sapiens
  misc_RNA (1)...(19): siRNA sense strand
ggauuugcuuguuccagua

SEQ ID NO: 1191100 - RNA, 19 nt, Homo sapiens
  misc_RNA (1)...(19): siRNA sense strand
aaccagccuucauguauua

SEQ ID NO: 1191101 - RNA, 19 nt, Homo sapiens
  misc_RNA (1)...(19): siRNA sense strand
ggaacaaaccuuggaaaug

SEQ ID NO: 1191102 - RNA, 19 nt, Homo sapiens
  misc_RNA (1)...(19): siRNA sense strand
ggaaugugcuaaggaacuu

SEQ ID NO: 1191103 - RNA, 19 nt, Homo sapiens
  misc_RNA (1)...(19): siRNA sense strand
gcauucagcugagccaaga

SEQ ID NO: 1191104 - RNA, 19 nt, Homo sapiens
  misc_RNA (1)...(19): siRNA sense strand
gcauuuacacucgcaguua

SEQ ID NO: 1191105 - RNA, 19 nt, Homo sapiens
  misc_RNA (1)...(19): siRNA sense strand
cuaugugucuucugcauuu

SEQ ID NO: 1191106 - RNA, 19 nt, Homo sapiens
  misc_RNA (1)...(19): siRNA sense strand
ccugaaggaucugguguua

SEQ ID NO: 1191107 - RNA, 19 nt, Homo sapiens
  misc_RNA (1)...(19): siRNA sense strand
gagugaauauccugacaug

SEQ ID NO: 1191108 - RNA, 19 nt, Homo sapiens
  misc_RNA (1)...(19): siRNA sense strand
gauaaaguaugcagcaaaa

SEQ ID NO: 1191109 - RNA, 19 nt, Homo sapiens
  misc_RNA (1)...(19): siRNA sense strand
ggacuuaaauaccauucca

SEQ ID NO: 1191110 - RNA, 19 nt, Homo sapiens
  misc_RNA (1)...(19): siRNA sense strand
uuggaaagauugugaagaa

SEQ ID NO: 1191111 - RNA, 19 nt, Homo sapiens
  misc_RNA (1)...(19): siRNA sense strand
uaaauuucccucuggagua

SEQ ID NO: 1191112 - RNA, 19 nt, Homo sapiens
  misc_RNA (1)...(19): siRNA sense strand
ggaagaugagccucuguuu

SEQ ID NO: 1191113 - RNA, 19 nt, Homo sapiens
  misc_RNA (1)...(19): siRNA sense strand
caacagaagauaauauugg

SEQ ID NO: 1191114 - RNA, 19 nt, Homo sapiens
  misc_RNA (1)...(19): siRNA sense strand
cauuuacacucgcaguuaa

SEQ ID NO: 1191115 - RNA, 19 nt, Homo sapiens
  misc_RNA (1)...(19): siRNA sense strand
ggaauuacuucagacucaa

SEQ ID NO: 1191116 - RNA, 19 nt, Homo sapiens
  misc_RNA (1)...(19): siRNA sense strand
gauaaagccauucuacaca

SEQ ID NO: 1191117 - RNA, 19 nt, Homo sapiens
  misc_RNA (1)...(19): siRNA sense strand
agaaauacaaggaagauga

SEQ ID NO: 1191118 - RNA, 19 nt, Homo sapiens
  misc_RNA (1)...(19): siRNA sense strand
uaaggaacuugauguccaa

SEQ ID NO: 1191119 - RNA, 19 nt, Homo sapiens
  misc_RNA (1)...(19): siRNA sense strand
caagcaagugucucagaua

SEQ ID NO: 1191120 - RNA, 19 nt, Homo sapiens
  misc_RNA (1)...(19): siRNA sense strand
gagccaagaagacagcuuu

SEQ ID NO: 1191121 - RNA, 19 nt, Homo sapiens
  misc_RNA (1)...(19): siRNA sense strand
cagacucaaugaugaagaa

SEQ ID NO: 1191122 - RNA, 19 nt, Homo sapiens
  misc_RNA (1)...(19): siRNA sense strand
gcuuuacgaugaacauguu

SEQ ID NO: 1191123 - RNA, 19 nt, Homo sapiens
  misc_RNA (1)...(19): siRNA sense strand
gaggguaacaugaaguuug

SEQ ID NO: 1191124 - RNA, 19 nt, Homo sapiens
  misc_RNA (1)...(19): siRNA sense strand
gcacguaaucacccaaaug

SEQ ID NO: 1191125 - RNA, 19 nt, Homo sapiens
  misc_RNA (1)...(19): siRNA sense strand
gugaauauccugacaugug

SEQ ID NO: 1191126 - RNA, 19 nt, Homo sapiens
  misc_RNA (1)...(19): siRNA sense strand
agacauugguggaggauuc

SEQ ID NO: 1191127 - RNA, 19 nt, Homo sapiens
  misc_RNA (1)...(19): siRNA sense strand
gaagaaaauugcacguaau

SEQ ID NO: 1191128 - RNA, 19 nt, Homo sapiens
  misc_RNA (1)...(19): siRNA sense strand
gaacuguaggcaucucuug

SEQ ID NO: 1191129 - RNA, 19 nt, Homo sapiens
  misc_RNA (1)...(19): siRNA sense strand
uuccagagguucacaagaa

SEQ ID NO: 1191130 - RNA, 19 nt, Homo sapiens
  misc_RNA (1)...(19): siRNA sense strand
gaaugaugguguuuauggu

SEQ ID NO: 1191131 - RNA, 19 nt, Homo sapiens
  misc_RNA (1)...(19): siRNA sense strand
gggguuaaauuucauguuu

SEQ ID NO: 1191132 - RNA, 19 nt, Homo sapiens
  misc_RNA (1)...(19): siRNA sense strand
ugaagaaaauugcacguaa

SEQ ID NO: 1191133 - RNA, 19 nt, Homo sapiens
  misc_RNA (1)...(19): siRNA sense strand
cagagguucacaagaaaua

SEQ ID NO: 1191134 - RNA, 19 nt, Homo sapiens
  misc_RNA (1)...(19): siRNA sense strand
gauaucuacuuuccugaag

SEQ ID NO: 1191135 - RNA, 19 nt, Homo sapiens
  misc_RNA (1)...(19): siRNA sense strand
gcaacagaagauaauauug

SEQ ID NO: 1191136 - RNA, 19 nt, Homo sapiens
  misc_RNA (1)...(19): siRNA sense strand
ggaaccggauuugcuuguu

SEQ ID NO: 1191137 - RNA, 19 nt, Homo sapiens
  misc_RNA (1)...(19): siRNA sense strand
gggagcagauucuuuccau

SEQ ID NO: 1191138 - RNA, 19 nt, Homo sapiens
  misc_RNA (1)...(19): siRNA sense strand
uugcaaagaaucucaagua

SEQ ID NO: 1191139 - RNA, 19 nt, Homo sapiens
  misc_RNA (1)...(19): siRNA sense strand
gugaagaggguaacaugaa

SEQ ID NO: 1191140 - RNA, 19 nt, Homo sapiens
  misc_RNA (1)...(19): siRNA sense strand
ucuguuggauaucuacuuu

SEQ ID NO: 1191141 - RNA, 19 nt, Homo sapiens
  misc_RNA (1)...(19): siRNA sense strand
guacaugcucuaucugaug

SEQ ID NO: 1191142 - RNA, 19 nt, Homo sapiens
  misc_RNA (1)...(19): siRNA sense strand
uggaauuacuucagacuca

SEQ ID NO: 1191143 - RNA, 19 nt, Homo sapiens
  misc_RNA (1)...(19): siRNA sense strand
ggccagccauuuauuacau

SEQ ID NO: 1191144 - RNA, 19 nt, Homo sapiens
  misc_RNA (1)...(19): siRNA sense strand
gagccucuguuuacaagca

SEQ ID NO: 1191145 - RNA, 19 nt, Homo sapiens
  misc_RNA (1)...(19): siRNA sense strand
ggaaagauugugaagaaac

SEQ ID NO: 1191146 - RNA, 19 nt, Homo sapiens
  misc_RNA (1)...(19): siRNA sense strand
cagccuucauguauuauau

SEQ ID NO: 1191147 - RNA, 19 nt, Homo sapiens
  misc_RNA (1)...(19): siRNA sense strand
ggauaucuacuuuccugaa

SEQ ID NO: 1191148 - RNA, 19 nt, Homo sapiens
  misc_RNA (1)...(19): siRNA sense strand
ggagaaauuggcuuuacga

SEQ ID NO: 1191149 - RNA, 19 nt, Homo sapiens
  misc_RNA (1)...(19): siRNA sense strand
ucaaguauauguacaugcu

SEQ ID NO: 1191150 - RNA, 19 nt, Homo sapiens
  misc_RNA (1)...(19): siRNA sense strand
ccugacaugugacaaugaa

SEQ ID NO: 1191151 - RNA, 19 nt, Homo sapiens
  misc_RNA (1)...(19): siRNA sense strand
gaaauacaaggaagaugag

SEQ ID NO: 1191152 - RNA, 19 nt, Homo sapiens
  misc_RNA (1)...(19): siRNA sense strand
acucgcaguuaauaucaua

SEQ ID NO: 1191153 - RNA, 19 nt, Homo sapiens
  misc_RNA (1)...(19): siRNA sense strand
ugcaaagaaucucaaguau

SEQ ID NO: 1191154 - RNA, 19 nt, Homo sapiens
  misc_RNA (1)...(19): siRNA sense strand
ugaagaggguaacaugaag

SEQ ID NO: 1191155 - RNA, 19 nt, Homo sapiens
  misc_RNA (1)...(19): siRNA sense strand
gacaugugacaaugaaauu

SEQ ID NO: 1191156 - RNA, 19 nt, Homo sapiens
  misc_RNA (1)...(19): siRNA sense strand
gcaguuaauaucauagcaa

SEQ ID NO: 1191157 - RNA, 19 nt, Homo sapiens
  misc_RNA (1)...(19): siRNA sense strand
agaggccagccauuuauua

SEQ ID NO: 1191158 - RNA, 19 nt, Homo sapiens
  misc_RNA (1)...(19): siRNA sense strand
ucacaagaaauacaaggaa

SEQ ID NO: 1191159 - RNA, 19 nt, Homo sapiens
  misc_RNA (1)...(19): siRNA sense strand
acaaaccuuggaaauguua

SEQ ID NO: 1191160 - RNA, 19 nt, Homo sapiens
  misc_RNA (1)...(19): siRNA sense strand
acucaaugaugaagaacuu

SEQ ID NO: 1191161 - RNA, 19 nt, Homo sapiens
  misc_RNA (1)...(19): siRNA sense strand
uagcaaagaaaguuguuga

SEQ ID NO: 1191162 - RNA, 19 nt, Homo sapiens
  misc_RNA (1)...(19): siRNA sense strand
gaugcucgauguguguuug

SEQ ID NO: 1191163 - RNA, 19 nt, Homo sapiens
  misc_RNA (1)...(19): siRNA sense strand
ggguuaaauuucauguuuc

SEQ ID NO: 1191164 - RNA, 19 nt, Homo sapiens
  misc_RNA (1)...(19): siRNA sense strand
gauaacaugggagcagauu

SEQ ID NO: 1191165 - RNA, 19 nt, Homo sapiens
  misc_RNA (1)...(19): siRNA sense strand
gaugagccucuguuuacaa

SEQ ID NO: 1191166 - RNA, 19 nt, Homo sapiens
  misc_RNA (1)...(19): siRNA sense strand
uguaguggcucagauaaag

SEQ ID NO: 1191167 - RNA, 19 nt, Homo sapiens
  misc_RNA (1)...(19): siRNA sense strand
gcagauucuuuccaugaac

SEQ ID NO: 1191168 - RNA, 19 nt, Homo sapiens
  misc_RNA (1)...(19): siRNA sense strand
uaacaugggagcagauucu

SEQ ID NO: 1191169 - RNA, 19 nt, Homo sapiens
  misc_RNA (1)...(19): siRNA sense strand
gaaggaguuucacuacaau

SEQ ID NO: 1191170 - RNA, 19 nt, Homo sapiens
  misc_RNA (1)...(19): siRNA sense strand
agaaggaguuucacuacaa

SEQ ID NO: 1191171 - RNA, 19 nt, Homo sapiens
  misc_RNA (1)...(19): siRNA sense strand
gagaaggaguuucacuaca

SEQ ID NO: 1191172 - RNA, 19 nt, Homo sapiens
  misc_RNA (1)...(19): siRNA sense strand
gacaagggcuuugccacuu

SEQ ID NO: 1191173 - RNA, 19 nt, Homo sapiens
  misc_RNA (1)...(19): siRNA sense strand
ggagaggcagaucaagaua

SEQ ID NO: 1191174 - RNA, 19 nt, Homo sapiens
  misc_RNA (1)...(19): siRNA sense strand
ggaugcagcggaugaauuc

SEQ ID NO: 1191175 - RNA, 19 nt, Homo sapiens
  misc_RNA (1)...(19): siRNA sense strand
agaggcagaucaagauaug

SEQ ID NO: 1191176 - RNA, 19 nt, Homo sapiens
  misc_RNA (1)...(19): siRNA sense strand
ggagaaggaguuucacuac

SEQ ID NO: 1191177 - RNA, 19 nt, Homo sapiens
  misc_RNA (1)...(19): siRNA sense strand
cggacccgcugagacauua

SEQ ID NO: 1191178 - RNA, 19 nt, Homo sapiens
  misc_RNA (1)...(19): siRNA sense strand
gagaggcagaucaagauau

SEQ ID NO: 1191179 - RNA, 19 nt, Homo sapiens
  misc_RNA (1)...(19): siRNA sense strand
agacagaagagcagaagug

SEQ ID NO: 1191180 - RNA, 19 nt, Homo sapiens
  misc_RNA (1)...(19): siRNA sense strand
cgccagacauacacacguu

SEQ ID NO: 1191181 - RNA, 19 nt, Homo sapiens
  misc_RNA (1)...(19): siRNA sense strand
cgcuggagcuggagaagga

SEQ ID NO: 1191182 - RNA, 19 nt, Homo sapiens
  misc_RNA (1)...(19): siRNA sense strand
acaagggcuuugccacuuc

SEQ ID NO: 1191183 - RNA, 19 nt, Homo sapiens
  misc_RNA (1)...(19): siRNA sense strand
ugacggagaggcagaucaa

SEQ ID NO: 1191184 - RNA, 19 nt, Homo sapiens
  misc_RNA (1)...(19): siRNA sense strand
cggaugaauucgugcaaca

SEQ ID NO: 1191185 - RNA, 19 nt, Homo sapiens
  misc_RNA (1)...(19): siRNA sense strand
uggagaaggaguuucacua

SEQ ID NO: 1191186 - RNA, 19 nt, Homo sapiens
  misc_RNA (1)...(19): siRNA sense strand
gaugaauucgugcaacagu

SEQ ID NO: 1191187 - RNA, 19 nt, Homo sapiens
  misc_RNA (1)...(19): siRNA sense strand
ggccagcuaccgcucuauu

SEQ ID NO: 1191188 - RNA, 19 nt, Homo sapiens
  misc_RNA (1)...(19): siRNA sense strand
uuccagaaccgacgcauga

SEQ ID NO: 1191189 - RNA, 19 nt, Homo sapiens
  misc_RNA (1)...(19): siRNA sense strand
gccagacauacacacguua

SEQ ID NO: 1191190 - RNA, 19 nt, Homo sapiens
  misc_RNA (1)...(19): siRNA sense strand
cggagaggcagaucaagau

SEQ ID NO: 1191191 - RNA, 19 nt, Homo sapiens
  misc_RNA (1)...(19): siRNA sense strand
ggagcuggagaaggaguuu

SEQ ID NO: 1191192 - RNA, 19 nt, Homo sapiens
  misc_RNA (1)...(19): siRNA sense strand
cagaaccgacgcaugaagu

SEQ ID NO: 1191193 - RNA, 19 nt, Homo sapiens
  misc_RNA (1)...(19): siRNA sense strand
gcaggacaagagcguguuc

SEQ ID NO: 1191194 - RNA, 19 nt, Homo sapiens
  misc_RNA (1)...(19): siRNA sense strand
gacaagggcuuugccacuu

SEQ ID NO: 1191195 - RNA, 19 nt, Homo sapiens
  misc_RNA (1)...(19): siRNA sense strand
ggaugcagcggaugaauuc

SEQ ID NO: 1191196 - RNA, 19 nt, Homo sapiens
  misc_RNA (1)...(19): siRNA sense strand
cggacccgcugagacauua

SEQ ID NO: 1191197 - RNA, 19 nt, Homo sapiens
  misc_RNA (1)...(19): siRNA sense strand
agacagaagagcagaagug

SEQ ID NO: 1191198 - RNA, 19 nt, Homo sapiens
  misc_RNA (1)...(19): siRNA sense strand
acaagggcuuugccacuuc

SEQ ID NO: 1191199 - RNA, 19 nt, Homo sapiens
  misc_RNA (1)...(19): siRNA sense strand
cggaugaauucgugcaaca

SEQ ID NO: 1191200 - RNA, 19 nt, Homo sapiens
  misc_RNA (1)...(19): siRNA sense strand
gaugaauucgugcaacagu

SEQ ID NO: 1191201 - RNA, 19 nt, Homo sapiens
  misc_RNA (1)...(19): siRNA sense strand
ggccagcuaccgcucuauu

SEQ ID NO: 1191202 - RNA, 19 nt, Homo sapiens
  misc_RNA (1)...(19): siRNA sense strand
gcaggacaagagcguguuc

SEQ ID NO: 1191203 - RNA, 19 nt, Homo sapiens
  misc_RNA (1)...(19): siRNA sense strand
gaaggaguuucacuacaau

SEQ ID NO: 1191204 - RNA, 19 nt, Homo sapiens
  misc_RNA (1)...(19): siRNA sense strand
agaaggaguuucacuacaa

SEQ ID NO: 1191205 - RNA, 19 nt, Homo sapiens
  misc_RNA (1)...(19): siRNA sense strand
gagaaggaguuucacuaca

SEQ ID NO: 1191206 - RNA, 19 nt, Homo sapiens
  misc_RNA (1)...(19): siRNA sense strand
gacaagggcuuugccacuu

SEQ ID NO: 1191207 - RNA, 19 nt, Homo sapiens
  misc_RNA (1)...(19): siRNA sense strand
ggagaggcagaucaagaua

SEQ ID NO: 1191208 - RNA, 19 nt, Homo sapiens
  misc_RNA (1)...(19): siRNA sense strand
ggaugcagcggaugaauuc

SEQ ID NO: 1191209 - RNA, 19 nt, Homo sapiens
  misc_RNA (1)...(19): siRNA sense strand
agaggcagaucaagauaug

SEQ ID NO: 1191210 - RNA, 19 nt, Homo sapiens
  misc_RNA (1)...(19): siRNA sense strand
ggagaaggaguuucacuac

SEQ ID NO: 1191211 - RNA, 19 nt, Homo sapiens
  misc_RNA (1)...(19): siRNA sense strand
cggacccgcugagacauua

SEQ ID NO: 1191212 - RNA, 19 nt, Homo sapiens
  misc_RNA (1)...(19): siRNA sense strand
gagaggcagaucaagauau

SEQ ID NO: 1191213 - RNA, 19 nt, Homo sapiens
  misc_RNA (1)...(19): siRNA sense strand
agacagaagagcagaagug

SEQ ID NO: 1191214 - RNA, 19 nt, Homo sapiens
  misc_RNA (1)...(19): siRNA sense strand
cgccagacauacacacguu

SEQ ID NO: 1191215 - RNA, 19 nt, Homo sapiens
  misc_RNA (1)...(19): siRNA sense strand
cgcuggagcuggagaagga

SEQ ID NO: 1191216 - RNA, 19 nt, Homo sapiens
  misc_RNA (1)...(19): siRNA sense strand
acaagggcuuugccacuuc

SEQ ID NO: 1191217 - RNA, 19 nt, Homo sapiens
  misc_RNA (1)...(19): siRNA sense strand
ugacggagaggcagaucaa

SEQ ID NO: 1191218 - RNA, 19 nt, Homo sapiens
  misc_RNA (1)...(19): siRNA sense strand
cggaugaauucgugcaaca

SEQ ID NO: 1191219 - RNA, 19 nt, Homo sapiens
  misc_RNA (1)...(19): siRNA sense strand
uggagaaggaguuucacua

SEQ ID NO: 1191220 - RNA, 19 nt, Homo sapiens
  misc_RNA (1)...(19): siRNA sense strand
gaugaauucgugcaacagu

SEQ ID NO: 1191221 - RNA, 19 nt, Homo sapiens
  misc_RNA (1)...(19): siRNA sense strand
ggccagcuaccgcucuauu

SEQ ID NO: 1191222 - RNA, 19 nt, Homo sapiens
  misc_RNA (1)...(19): siRNA sense strand
uuccagaaccgacgcauga

SEQ ID NO: 1191223 - RNA, 19 nt, Homo sapiens
  misc_RNA (1)...(19): siRNA sense strand
gccagacauacacacguua

SEQ ID NO: 1191224 - RNA, 19 nt, Homo sapiens
  misc_RNA (1)...(19): siRNA sense strand
cggagaggcagaucaagau

SEQ ID NO: 1191225 - RNA, 19 nt, Homo sapiens
  misc_RNA (1)...(19): siRNA sense strand
ggagcuggagaaggaguuu

SEQ ID NO: 1191226 - RNA, 19 nt, Homo sapiens
  misc_RNA (1)...(19): siRNA sense strand
cagaaccgacgcaugaagu

SEQ ID NO: 1191227 - RNA, 19 nt, Homo sapiens
  misc_RNA (1)...(19): siRNA sense strand
gcaggacaagagcguguuc

SEQ ID NO: 1191228 - RNA, 19 nt, Homo sapiens
  misc_RNA (1)...(19): siRNA sense strand
cgaagccuuugaagaauua

SEQ ID NO: 1191229 - RNA, 19 nt, Homo sapiens
  misc_RNA (1)...(19): siRNA sense strand
gagcucagacccuaaagua

SEQ ID NO: 1191230 - RNA, 19 nt, Homo sapiens
  misc_RNA (1)...(19): siRNA sense strand
agacgaagccuuugaagaa

SEQ ID NO: 1191231 - RNA, 19 nt, Homo sapiens
  misc_RNA (1)...(19): siRNA sense strand
uaagaaaguucagaaagug

SEQ ID NO: 1191232 - RNA, 19 nt, Homo sapiens
  misc_RNA (1)...(19): siRNA sense strand
agaaagugauugcugauga

SEQ ID NO: 1191233 - RNA, 19 nt, Homo sapiens
  misc_RNA (1)...(19): siRNA sense strand
uaaaguaacucgggaccaa

SEQ ID NO: 1191234 - RNA, 19 nt, Homo sapiens
  misc_RNA (1)...(19): siRNA sense strand
gggagaaacugaggcagaa

SEQ ID NO: 1191235 - RNA, 19 nt, Homo sapiens
  misc_RNA (1)...(19): siRNA sense strand
gaccaaaugaagauguuua

SEQ ID NO: 1191236 - RNA, 19 nt, Homo sapiens
  misc_RNA (1)...(19): siRNA sense strand
cgaagaagacaaccaagaa

SEQ ID NO: 1191237 - RNA, 19 nt, Homo sapiens
  misc_RNA (1)...(19): siRNA sense strand
gaaagugauugcugaugag

SEQ ID NO: 1191238 - RNA, 19 nt, Homo sapiens
  misc_RNA (1)...(19): siRNA sense strand
gaagacagcgaggaagaaa

SEQ ID NO: 1191239 - RNA, 19 nt, Homo sapiens
  misc_RNA (1)...(19): siRNA sense strand
gcaggaauuuaagaaaguu

SEQ ID NO: 1191240 - RNA, 19 nt, Homo sapiens
  misc_RNA (1)...(19): siRNA sense strand
gaaggccgcuaugaucgaa

SEQ ID NO: 1191241 - RNA, 19 nt, Homo sapiens
  misc_RNA (1)...(19): siRNA sense strand
gcucaucuguguccugugu

SEQ ID NO: 1191242 - RNA, 19 nt, Homo sapiens
  misc_RNA (1)...(19): siRNA sense strand
aggaagaaauggaggauga

SEQ ID NO: 1191243 - RNA, 19 nt, Homo sapiens
  misc_RNA (1)...(19): siRNA sense strand
gaggaagugugccgagaau

SEQ ID NO: 1191244 - RNA, 19 nt, Homo sapiens
  misc_RNA (1)...(19): siRNA sense strand
cuugauaccucuaaugaau

SEQ ID NO: 1191245 - RNA, 19 nt, Homo sapiens
  misc_RNA (1)...(19): siRNA sense strand
aaacugaggcagaaaguga

SEQ ID NO: 1191246 - RNA, 19 nt, Homo sapiens
  misc_RNA (1)...(19): siRNA sense strand
ugaagaagaggacacauga

SEQ ID NO: 1191247 - RNA, 19 nt, Homo sapiens
  misc_RNA (1)...(19): siRNA sense strand
cagcaggaauuuaagaaag

SEQ ID NO: 1191248 - RNA, 19 nt, Homo sapiens
  misc_RNA (1)...(19): siRNA sense strand
ggcagaaguuccucaguca

SEQ ID NO: 1191249 - RNA, 19 nt, Homo sapiens
  misc_RNA (1)...(19): siRNA sense strand
ccacauggauagguugaug

SEQ ID NO: 1191250 - RNA, 19 nt, Homo sapiens
  misc_RNA (1)...(19): siRNA sense strand
ggacugaaggccgcuauga

SEQ ID NO: 1191251 - RNA, 19 nt, Homo sapiens
  misc_RNA (1)...(19): siRNA sense strand
gacgaagccuuugaagaau

SEQ ID NO: 1191252 - RNA, 19 nt, Homo sapiens
  misc_RNA (1)...(19): siRNA sense strand
gucaccaucuggccgaaua

SEQ ID NO: 1191253 - RNA, 19 nt, Homo sapiens
  misc_RNA (1)...(19): siRNA sense strand
caagagcucagacccuaaa

SEQ ID NO: 1191254 - RNA, 19 nt, Homo sapiens
  misc_RNA (1)...(19): siRNA sense strand
gaagaagacaaccaagaag

SEQ ID NO: 1191255 - RNA, 19 nt, Homo sapiens
  misc_RNA (1)...(19): siRNA sense strand
ugaaucagcugagccaaag

SEQ ID NO: 1191256 - RNA, 19 nt, Homo sapiens
  misc_RNA (1)...(19): siRNA sense strand
gaaaguucagaaagugauu

SEQ ID NO: 1191257 - RNA, 19 nt, Homo sapiens
  misc_RNA (1)...(19): siRNA sense strand
gggaccaaaugaagauguu

SEQ ID NO: 1191258 - RNA, 19 nt, Homo sapiens
  misc_RNA (1)...(19): siRNA sense strand
gcagagagaguggccaaga

SEQ ID NO: 1191259 - RNA, 19 nt, Homo sapiens
  misc_RNA (1)...(19): siRNA sense strand
gaacaacuugauaccucua

SEQ ID NO: 1191260 - RNA, 19 nt, Homo sapiens
  misc_RNA (1)...(19): siRNA sense strand
ggaagaagcggaggucaag

SEQ ID NO: 1191261 - RNA, 19 nt, Homo sapiens
  misc_RNA (1)...(19): siRNA sense strand
gaccaugggcuugauuuga

SEQ ID NO: 1191262 - RNA, 19 nt, Homo sapiens
  misc_RNA (1)...(19): siRNA sense strand
gaaugcggcuucugcuacu

SEQ ID NO: 1191263 - RNA, 19 nt, Homo sapiens
  misc_RNA (1)...(19): siRNA sense strand
gaauuaagaagcaaagacu

SEQ ID NO: 1191264 - RNA, 19 nt, Homo sapiens
  misc_RNA (1)...(19): siRNA sense strand
gaguaccuauugccaggaa

SEQ ID NO: 1191265 - RNA, 19 nt, Homo sapiens
  misc_RNA (1)...(19): siRNA sense strand
auaggcagcucaucugugu

SEQ ID NO: 1191266 - RNA, 19 nt, Homo sapiens
  misc_RNA (1)...(19): siRNA sense strand
agacagaggaagagaguga

SEQ ID NO: 1191267 - RNA, 19 nt, Homo sapiens
  misc_RNA (1)...(19): siRNA sense strand
gaagacaaccaagaagaag

SEQ ID NO: 1191268 - RNA, 19 nt, Homo sapiens
  misc_RNA (1)...(19): siRNA sense strand
ugaagaagacagcgaggaa

SEQ ID NO: 1191269 - RNA, 19 nt, Homo sapiens
  misc_RNA (1)...(19): siRNA sense strand
gaagagagugaggaugaga

SEQ ID NO: 1191270 - RNA, 19 nt, Homo sapiens
  misc_RNA (1)...(19): siRNA sense strand
caacuugauaccucuaaug

SEQ ID NO: 1191271 - RNA, 19 nt, Homo sapiens
  misc_RNA (1)...(19): siRNA sense strand
gcucagacccuaaaguaac

SEQ ID NO: 1191272 - RNA, 19 nt, Homo sapiens
  misc_RNA (1)...(19): siRNA sense strand
ucgaauugguggaaagguu

SEQ ID NO: 1191273 - RNA, 19 nt, Homo sapiens
  misc_RNA (1)...(19): siRNA sense strand
agacagcgaggaagaaaug

SEQ ID NO: 1191274 - RNA, 19 nt, Homo sapiens
  misc_RNA (1)...(19): siRNA sense strand
gaagaauuaagaagcaaag

SEQ ID NO: 1191275 - RNA, 19 nt, Homo sapiens
  misc_RNA (1)...(19): siRNA sense strand
ggaggaagagagcgaguca

SEQ ID NO: 1191276 - RNA, 19 nt, Homo sapiens
  misc_RNA (1)...(19): siRNA sense strand
ggaagagagugaggaugag

SEQ ID NO: 1191277 - RNA, 19 nt, Homo sapiens
  misc_RNA (1)...(19): siRNA sense strand
gauacuggcagacauccaa

SEQ ID NO: 1191278 - RNA, 19 nt, Homo sapiens
  misc_RNA (1)...(19): siRNA sense strand
ugaggcagaaagugaauuu

SEQ ID NO: 1191279 - RNA, 19 nt, Homo sapiens
  misc_RNA (1)...(19): siRNA sense strand
agaagacaaccaagaagaa

SEQ ID NO: 1191280 - RNA, 19 nt, Homo sapiens
  misc_RNA (1)...(19): siRNA sense strand
agaaagcgaggccgaagaa

SEQ ID NO: 1191281 - RNA, 19 nt, Homo sapiens
  misc_RNA (1)...(19): siRNA sense strand
agaaauggaagcagagaga

SEQ ID NO: 1191282 - RNA, 19 nt, Homo sapiens
  misc_RNA (1)...(19): siRNA sense strand
ggaagugugccgagaaugc

SEQ ID NO: 1191283 - RNA, 19 nt, Homo sapiens
  misc_RNA (1)...(19): siRNA sense strand
guaacucgggaccaaauga

SEQ ID NO: 1191284 - RNA, 19 nt, Homo sapiens
  misc_RNA (1)...(19): siRNA sense strand
acgaagccuuugaagaauu

SEQ ID NO: 1191285 - RNA, 19 nt, Homo sapiens
  misc_RNA (1)...(19): siRNA sense strand
caggagagggagauagaaa

SEQ ID NO: 1191286 - RNA, 19 nt, Homo sapiens
  misc_RNA (1)...(19): siRNA sense strand
ggaccaugggcuugauuug

SEQ ID NO: 1191287 - RNA, 19 nt, Homo sapiens
  misc_RNA (1)...(19): siRNA sense strand
gcaauggccacagcucaug

SEQ ID NO: 1191288 - RNA, 19 nt, Homo sapiens
  misc_RNA (1)...(19): siRNA sense strand
ggacauccaagaggcaaug

SEQ ID NO: 1191289 - RNA, 19 nt, Homo sapiens
  misc_RNA (1)...(19): siRNA sense strand
aggaagagagugaggauga

SEQ ID NO: 1191290 - RNA, 19 nt, Homo sapiens
  misc_RNA (1)...(19): siRNA sense strand
uggauagguugaugacuca

SEQ ID NO: 1191291 - RNA, 19 nt, Homo sapiens
  misc_RNA (1)...(19): siRNA sense strand
ggcagaaagugaauuugac

SEQ ID NO: 1191292 - RNA, 19 nt, Homo sapiens
  misc_RNA (1)...(19): siRNA sense strand
gugaagaagaggacacaug

SEQ ID NO: 1191293 - RNA, 19 nt, Homo sapiens
  misc_RNA (1)...(19): siRNA sense strand
aaagcgaggccgaagaaga

SEQ ID NO: 1191294 - RNA, 19 nt, Homo sapiens
  misc_RNA (1)...(19): siRNA sense strand
ugagagcgaugaggagagu

SEQ ID NO: 1191295 - RNA, 19 nt, Homo sapiens
  misc_RNA (1)...(19): siRNA sense strand
uaacucgggaccaaaugaa

SEQ ID NO: 1191296 - RNA, 19 nt, Homo sapiens
  misc_RNA (1)...(19): siRNA sense strand
gagaaacugaggcagaaag

SEQ ID NO: 1191297 - RNA, 19 nt, Homo sapiens
  misc_RNA (1)...(19): siRNA sense strand
agaaauggaggaugagcaa

SEQ ID NO: 1191298 - RNA, 19 nt, Homo sapiens
  misc_RNA (1)...(19): siRNA sense strand
ggaccaaaugaagauguuu

SEQ ID NO: 1191299 - RNA, 19 nt, Homo sapiens
  misc_RNA (1)...(19): siRNA sense strand
cacccuagacgaagccuuu

SEQ ID NO: 1191300 - RNA, 19 nt, Homo sapiens
  misc_RNA (1)...(19): siRNA sense strand
cagagagaguggccaagag

SEQ ID NO: 1191301 - RNA, 19 nt, Homo sapiens
  misc_RNA (1)...(19): siRNA sense strand
aagaagacaaccaagaaga

SEQ ID NO: 1191302 - RNA, 19 nt, Homo sapiens
  misc_RNA (1)...(19): siRNA sense strand
aauggaggaugagcaagaa

SEQ ID NO: 1191303 - RNA, 19 nt, Homo sapiens
  misc_RNA (1)...(19): siRNA sense strand
ccgaagaagacaaccaaga

SEQ ID NO: 1191304 - RNA, 19 nt, Homo sapiens
  misc_RNA (1)...(19): siRNA sense strand
guuuauacagcaggaauuu

SEQ ID NO: 1191305 - RNA, 19 nt, Homo sapiens
  misc_RNA (1)...(19): siRNA sense strand
aggcagaaagugaauuuga

SEQ ID NO: 1191306 - RNA, 19 nt, Homo sapiens
  misc_RNA (1)...(19): siRNA sense strand
aaauggaggaugagcaaga

SEQ ID NO: 1191307 - RNA, 19 nt, Homo sapiens
  misc_RNA (1)...(19): siRNA sense strand
gcgaugaggagagugaaga

SEQ ID NO: 1191308 - RNA, 19 nt, Homo sapiens
  misc_RNA (1)...(19): siRNA sense strand
gaauugguggaaagguuga

SEQ ID NO: 1191309 - RNA, 19 nt, Homo sapiens
  misc_RNA (1)...(19): siRNA sense strand
gaaacugaggcagaaagug

SEQ ID NO: 1191310 - RNA, 19 nt, Homo sapiens
  misc_RNA (1)...(19): siRNA sense strand
ggagaaacugaggcagaaa

SEQ ID NO: 1191311 - RNA, 19 nt, Homo sapiens
  misc_RNA (1)...(19): siRNA sense strand
uguccuguguccagucauu

SEQ ID NO: 1191312 - RNA, 19 nt, Homo sapiens
  misc_RNA (1)...(19): siRNA sense strand
cgaggaagugugccgagaa

SEQ ID NO: 1191313 - RNA, 19 nt, Homo sapiens
  misc_RNA (1)...(19): siRNA sense strand
gcaggagagggagauagaa

SEQ ID NO: 1191314 - RNA, 19 nt, Homo sapiens
  misc_RNA (1)...(19): siRNA sense strand
ggccgaagaagacaaccaa

SEQ ID NO: 1191315 - RNA, 19 nt, Homo sapiens
  misc_RNA (1)...(19): siRNA sense strand
agagggcgaugaggaagga

SEQ ID NO: 1191316 - RNA, 19 nt, Homo sapiens
  misc_RNA (1)...(19): siRNA sense strand
ggcagagggcgaugaggaa

SEQ ID NO: 1191317 - RNA, 19 nt, Homo sapiens
  misc_RNA (1)...(19): siRNA sense strand
gauagguugaugacucaga

SEQ ID NO: 1191318 - RNA, 19 nt, Homo sapiens
  misc_RNA (1)...(19): siRNA sense strand
cgagacagaggaagagagu

SEQ ID NO: 1191319 - RNA, 19 nt, Homo sapiens
  misc_RNA (1)...(19): siRNA sense strand
guaccuauugccaggaaga

SEQ ID NO: 1191320 - RNA, 19 nt, Homo sapiens
  misc_RNA (1)...(19): siRNA sense strand
aagaagacagcgaggaaga

SEQ ID NO: 1191321 - RNA, 19 nt, Homo sapiens
  misc_RNA (1)...(19): siRNA sense strand
agagugagucggaggaaga

SEQ ID NO: 1191322 - RNA, 19 nt, Homo sapiens
  misc_RNA (1)...(19): siRNA sense strand
caaaggcagagggcgauga

SEQ ID NO: 1191323 - RNA, 19 nt, Homo sapiens
  misc_RNA (1)...(19): siRNA sense strand
ucaugugacugagauacug

SEQ ID NO: 1191324 - RNA, 19 nt, Homo sapiens
  misc_RNA (1)...(19): siRNA sense strand
ugaggagagugaagaagac

SEQ ID NO: 1191325 - RNA, 19 nt, Homo sapiens
  misc_RNA (1)...(19): siRNA sense strand
uagacgaagccuuugaaga

SEQ ID NO: 1191326 - RNA, 19 nt, Homo sapiens
  misc_RNA (1)...(19): siRNA sense strand
gaggaaguguccggaccau

SEQ ID NO: 1191327 - RNA, 19 nt, Homo sapiens
  misc_RNA (1)...(19): siRNA sense strand
ggagagggagauagaaagc

SEQ ID NO: 1191328 - RNA, 19 nt, Homo sapiens
  misc_RNA (1)...(19): siRNA sense strand
caaagaaccuaguagagaa

SEQ ID NO: 1191329 - RNA, 19 nt, Homo sapiens
  misc_RNA (1)...(19): siRNA sense strand
gauauccgccuuacucuua

SEQ ID NO: 1191330 - RNA, 19 nt, Homo sapiens
  misc_RNA (1)...(19): siRNA sense strand
guacacaucuuucuggaau

SEQ ID NO: 1191331 - RNA, 19 nt, Homo sapiens
  misc_RNA (1)...(19): siRNA sense strand
gaaagguacugcuaaaguc

SEQ ID NO: 1191332 - RNA, 19 nt, Homo sapiens
  misc_RNA (1)...(19): siRNA sense strand
gcaaagaaccuaguagaga

SEQ ID NO: 1191333 - RNA, 19 nt, Homo sapiens
  misc_RNA (1)...(19): siRNA sense strand
gcacugaaauaagcaagaa

SEQ ID NO: 1191334 - RNA, 19 nt, Homo sapiens
  misc_RNA (1)...(19): siRNA sense strand
ccacugagaagcagaauuu

SEQ ID NO: 1191335 - RNA, 19 nt, Homo sapiens
  misc_RNA (1)...(19): siRNA sense strand
gaaucgagccaaggacuua

SEQ ID NO: 1191336 - RNA, 19 nt, Homo sapiens
  misc_RNA (1)...(19): siRNA sense strand
uaaaugacccucagcguau

SEQ ID NO: 1191337 - RNA, 19 nt, Homo sapiens
  misc_RNA (1)...(19): siRNA sense strand
ugacagaugacaaguauga

SEQ ID NO: 1191338 - RNA, 19 nt, Homo sapiens
  misc_RNA (1)...(19): siRNA sense strand
acagaaagguacugcuaaa

SEQ ID NO: 1191339 - RNA, 19 nt, Homo sapiens
  misc_RNA (1)...(19): siRNA sense strand
ccacuccucugaugugcua

SEQ ID NO: 1191340 - RNA, 19 nt, Homo sapiens
  misc_RNA (1)...(19): siRNA sense strand
gagaaacagcgacuaguga

SEQ ID NO: 1191341 - RNA, 19 nt, Homo sapiens
  misc_RNA (1)...(19): siRNA sense strand
agaauuuccugcuauuuga

SEQ ID NO: 1191342 - RNA, 19 nt, Homo sapiens
  misc_RNA (1)...(19): siRNA sense strand
aaaagaagauggaaaguga

SEQ ID NO: 1191343 - RNA, 19 nt, Homo sapiens
  misc_RNA (1)...(19): siRNA sense strand
cagaaacuguccaaacaug

SEQ ID NO: 1191344 - RNA, 19 nt, Homo sapiens
  misc_RNA (1)...(19): siRNA sense strand
gagagcgcaucgcaaagaa

SEQ ID NO: 1191345 - RNA, 19 nt, Homo sapiens
  misc_RNA (1)...(19): siRNA sense strand
gaagauggaaagugaggaa

SEQ ID NO: 1191346 - RNA, 19 nt, Homo sapiens
  misc_RNA (1)...(19): siRNA sense strand
gaaacagcgacuagugaaa

SEQ ID NO: 1191347 - RNA, 19 nt, Homo sapiens
  misc_RNA (1)...(19): siRNA sense strand
ggagaaaaguccagacaau

SEQ ID NO: 1191348 - RNA, 19 nt, Homo sapiens
  misc_RNA (1)...(19): siRNA sense strand
guaagaagcgacuacuaga

SEQ ID NO: 1191349 - RNA, 19 nt, Homo sapiens
  misc_RNA (1)...(19): siRNA sense strand
gcaacugaacccacagaaa

SEQ ID NO: 1191350 - RNA, 19 nt, Homo sapiens
  misc_RNA (1)...(19): siRNA sense strand
caacugaacccacagaaac

SEQ ID NO: 1191351 - RNA, 19 nt, Homo sapiens
  misc_RNA (1)...(19): siRNA sense strand
ucuggagacucuaaggaua

SEQ ID NO: 1191352 - RNA, 19 nt, Homo sapiens
  misc_RNA (1)...(19): siRNA sense strand
acacaucuuucuggaauga

SEQ ID NO: 1191353 - RNA, 19 nt, Homo sapiens
  misc_RNA (1)...(19): siRNA sense strand
cagaauuuccugcuauuug

SEQ ID NO: 1191354 - RNA, 19 nt, Homo sapiens
  misc_RNA (1)...(19): siRNA sense strand
guacuagagcgguggguaa

SEQ ID NO: 1191355 - RNA, 19 nt, Homo sapiens
  misc_RNA (1)...(19): siRNA sense strand
gacagaaagguacugcuaa

SEQ ID NO: 1191356 - RNA, 19 nt, Homo sapiens
  misc_RNA (1)...(19): siRNA sense strand
aaagugaggaagacaguaa

SEQ ID NO: 1191357 - RNA, 19 nt, Homo sapiens
  misc_RNA (1)...(19): siRNA sense strand
cuagagcgguggguaaaug

SEQ ID NO: 1191358 - RNA, 19 nt, Homo sapiens
  misc_RNA (1)...(19): siRNA sense strand
gaaagugaggaagacagua

SEQ ID NO: 1191359 - RNA, 19 nt, Homo sapiens
  misc_RNA (1)...(19): siRNA sense strand
caaguaugauguggcaaug

SEQ ID NO: 1191360 - RNA, 19 nt, Homo sapiens
  misc_RNA (1)...(19): siRNA sense strand
caagaacucugaaaagaag

SEQ ID NO: 1191361 - RNA, 19 nt, Homo sapiens
  misc_RNA (1)...(19): siRNA sense strand
aguaugauguggcaaugaa

SEQ ID NO: 1191362 - RNA, 19 nt, Homo sapiens
  misc_RNA (1)...(19): siRNA sense strand
gaugaaacucugaaacaca

SEQ ID NO: 1191363 - RNA, 19 nt, Homo sapiens
  misc_RNA (1)...(19): siRNA sense strand
agacagaaagguacugcua

SEQ ID NO: 1191364 - RNA, 19 nt, Homo sapiens
  misc_RNA (1)...(19): siRNA sense strand
gaagggacaaagccuagug

SEQ ID NO: 1191365 - RNA, 19 nt, Homo sapiens
  misc_RNA (1)...(19): siRNA sense strand
ugaagauucuggagacucu

SEQ ID NO: 1191366 - RNA, 19 nt, Homo sapiens
  misc_RNA (1)...(19): siRNA sense strand
uauuugacaugacuacuca

SEQ ID NO: 1191367 - RNA, 19 nt, Homo sapiens
  misc_RNA (1)...(19): siRNA sense strand
ggaugaaacucugaaacac

SEQ ID NO: 1191368 - RNA, 19 nt, Homo sapiens
  misc_RNA (1)...(19): siRNA sense strand
ggaaagugaggaagacagu

SEQ ID NO: 1191369 - RNA, 19 nt, Homo sapiens
  misc_RNA (1)...(19): siRNA sense strand
agacaguaauugggagaaa

SEQ ID NO: 1191370 - RNA, 19 nt, Homo sapiens
  misc_RNA (1)...(19): siRNA sense strand
aaacauggauagagcuacu

SEQ ID NO: 1191371 - RNA, 19 nt, Homo sapiens
  misc_RNA (1)...(19): siRNA sense strand
gcccgucgcacugaaauaa

SEQ ID NO: 1191372 - RNA, 19 nt, Homo sapiens
  misc_RNA (1)...(19): siRNA sense strand
uuucuggaaugacugcaua

SEQ ID NO: 1191373 - RNA, 19 nt, Homo sapiens
  misc_RNA (1)...(19): siRNA sense strand
gaaacucugaaacacauca

SEQ ID NO: 1191374 - RNA, 19 nt, Homo sapiens
  misc_RNA (1)...(19): siRNA sense strand
gagccaaggacuuaguaga

SEQ ID NO: 1191375 - RNA, 19 nt, Homo sapiens
  misc_RNA (1)...(19): siRNA sense strand
gcaagaacucugaaaagaa

SEQ ID NO: 1191376 - RNA, 19 nt, Homo sapiens
  misc_RNA (1)...(19): siRNA sense strand
gaagcgacuacuagacaga

SEQ ID NO: 1191377 - RNA, 19 nt, Homo sapiens
  misc_RNA (1)...(19): siRNA sense strand
cgagagcgcaucgcaaaga

SEQ ID NO: 1191378 - RNA, 19 nt, Homo sapiens
  misc_RNA (1)...(19): siRNA sense strand
gaaaaguccagacaaugaa

SEQ ID NO: 1191379 - RNA, 19 nt, Homo sapiens
  misc_RNA (1)...(19): siRNA sense strand
ccaaacauggauagagcua

SEQ ID NO: 1191380 - RNA, 19 nt, Homo sapiens
  misc_RNA (1)...(19): siRNA sense strand
agaaagguacugcuaaagu

SEQ ID NO: 1191381 - RNA, 19 nt, Homo sapiens
  misc_RNA (1)...(19): siRNA sense strand
cguaagaagcgacuacuag

SEQ ID NO: 1191382 - RNA, 19 nt, Homo sapiens
  misc_RNA (1)...(19): siRNA sense strand
gaccaauacaacagagaaa

SEQ ID NO: 1191383 - RNA, 19 nt, Homo sapiens
  misc_RNA (1)...(19): siRNA sense strand
uacaguaccagcugagaaa

SEQ ID NO: 1191384 - RNA, 19 nt, Homo sapiens
  misc_RNA (1)...(19): siRNA sense strand
uggcagccuucaauaaauc

SEQ ID NO: 1191385 - RNA, 19 nt, Homo sapiens
  misc_RNA (1)...(19): siRNA sense strand
gauggaaagugaggaagac

SEQ ID NO: 1191386 - RNA, 19 nt, Homo sapiens
  misc_RNA (1)...(19): siRNA sense strand
ccaauacaacagagaaaca

SEQ ID NO: 1191387 - RNA, 19 nt, Homo sapiens
  misc_RNA (1)...(19): siRNA sense strand
gaaaagaagauggaaagug

SEQ ID NO: 1191388 - RNA, 19 nt, Homo sapiens
  misc_RNA (1)...(19): siRNA sense strand
ccaaggacuuaguagaacu

SEQ ID NO: 1191389 - RNA, 19 nt, Homo sapiens
  misc_RNA (1)...(19): siRNA sense strand
gccaaggacuuaguagaac

SEQ ID NO: 1191390 - RNA, 19 nt, Homo sapiens
  misc_RNA (1)...(19): siRNA sense strand
caaugaaucgagccaagga

SEQ ID NO: 1191391 - RNA, 19 nt, Homo sapiens
  misc_RNA (1)...(19): siRNA sense strand
cagaugacaaguaugaugu

SEQ ID NO: 1191392 - RNA, 19 nt, Homo sapiens
  misc_RNA (1)...(19): siRNA sense strand
cugaugugcuagagaaugu

SEQ ID NO: 1191393 - RNA, 19 nt, Homo sapiens
  misc_RNA (1)...(19): siRNA sense strand
agaaacagcgacuagugaa

SEQ ID NO: 1191394 - RNA, 19 nt, Homo sapiens
  misc_RNA (1)...(19): siRNA sense strand
uacgagagcgcaucgcaaa

SEQ ID NO: 1191395 - RNA, 19 nt, Homo sapiens
  misc_RNA (1)...(19): siRNA sense strand
ggacaagcgaacacuagca

SEQ ID NO: 1191396 - RNA, 19 nt, Homo sapiens
  misc_RNA (1)...(19): siRNA sense strand
aaauaagcaagaacucuga

SEQ ID NO: 1191397 - RNA, 19 nt, Homo sapiens
  misc_RNA (1)...(19): siRNA sense strand
aaagaaccuaguagagaaa

SEQ ID NO: 1191398 - RNA, 19 nt, Homo sapiens
  misc_RNA (1)...(19): siRNA sense strand
gcgcaucgcaaagaaccua

SEQ ID NO: 1191399 - RNA, 19 nt, Homo sapiens
  misc_RNA (1)...(19): siRNA sense strand
caucgcaaagaaccuagua

SEQ ID NO: 1191400 - RNA, 19 nt, Homo sapiens
  misc_RNA (1)...(19): siRNA sense strand
cagccuucaauaaaucuua

SEQ ID NO: 1191401 - RNA, 19 nt, Homo sapiens
  misc_RNA (1)...(19): siRNA sense strand
gguauucuaaccacugaga

SEQ ID NO: 1191402 - RNA, 19 nt, Homo sapiens
  misc_RNA (1)...(19): siRNA sense strand
ccgccuuacucuuauggaa

SEQ ID NO: 1191403 - RNA, 19 nt, Homo sapiens
  misc_RNA (1)...(19): siRNA sense strand
ggauauccgccuuacucuu

SEQ ID NO: 1191404 - RNA, 19 nt, Homo sapiens
  misc_RNA (1)...(19): siRNA sense strand
aagguauucuaaccacuga

SEQ ID NO: 1191405 - RNA, 19 nt, Homo sapiens
  misc_RNA (1)...(19): siRNA sense strand
aguaccagcugagaaaugu

SEQ ID NO: 1191406 - RNA, 19 nt, Homo sapiens
  misc_RNA (1)...(19): siRNA sense strand
ugaccaauacaacagagaa

SEQ ID NO: 1191407 - RNA, 19 nt, Homo sapiens
  misc_RNA (1)...(19): siRNA sense strand
ucgcaaagaaccuaguaga

SEQ ID NO: 1191408 - RNA, 19 nt, Homo sapiens
  misc_RNA (1)...(19): siRNA sense strand
gcguaagaagcgacuacua

SEQ ID NO: 1191409 - RNA, 19 nt, Homo sapiens
  misc_RNA (1)...(19): siRNA sense strand
acuggacccugaaguggaa

SEQ ID NO: 1191410 - RNA, 19 nt, Homo sapiens
  misc_RNA (1)...(19): siRNA sense strand
agagaaacagcgacuagug

SEQ ID NO: 1191411 - RNA, 19 nt, Homo sapiens
  misc_RNA (1)...(19): siRNA sense strand
acucauccagugaccaaua

SEQ ID NO: 1191412 - RNA, 19 nt, Homo sapiens
  misc_RNA (1)...(19): siRNA sense strand
uggaugaaacucugaaaca

SEQ ID NO: 1191413 - RNA, 19 nt, Homo sapiens
  misc_RNA (1)...(19): siRNA sense strand
gugaggaagacaguaauug

SEQ ID NO: 1191414 - RNA, 19 nt, Homo sapiens
  misc_RNA (1)...(19): siRNA sense strand
aagaagcgacuacuagaca

SEQ ID NO: 1191415 - RNA, 19 nt, Homo sapiens
  misc_RNA (1)...(19): siRNA sense strand
augaaacucugaaacacau

SEQ ID NO: 1191416 - RNA, 19 nt, Homo sapiens
  misc_RNA (1)...(19): siRNA sense strand
cuggcagccuucaauaaau

SEQ ID NO: 1191417 - RNA, 19 nt, Homo sapiens
  misc_RNA (1)...(19): siRNA sense strand
caaagccuagugccacaga

SEQ ID NO: 1191418 - RNA, 19 nt, Homo sapiens
  misc_RNA (1)...(19): siRNA sense strand
aaugucuucuccucucuga

SEQ ID NO: 1191419 - RNA, 19 nt, Homo sapiens
  misc_RNA (1)...(19): siRNA sense strand
ccuaguagagaaagguauu

SEQ ID NO: 1191420 - RNA, 19 nt, Homo sapiens
  misc_RNA (1)...(19): siRNA sense strand
guccagacaaugaagauuc

SEQ ID NO: 1191421 - RNA, 19 nt, Homo sapiens
  misc_RNA (1)...(19): siRNA sense strand
uauggaagaaguauugcuu

SEQ ID NO: 1191422 - RNA, 19 nt, Homo sapiens
  misc_RNA (1)...(19): siRNA sense strand
gaaguggaagggacaaagc

SEQ ID NO: 1191423 - RNA, 19 nt, Homo sapiens
  misc_RNA (1)...(19): siRNA sense strand
ugaggaagacaguaauugg

SEQ ID NO: 1191424 - RNA, 19 nt, Homo sapiens
  misc_RNA (1)...(19): siRNA sense strand
acacaucaaagcaacugaa

SEQ ID NO: 1191425 - RNA, 19 nt, Homo sapiens
  misc_RNA (1)...(19): siRNA sense strand
agccaaggacuuaguagaa

SEQ ID NO: 1191426 - RNA, 19 nt, Homo sapiens
  misc_RNA (1)...(19): siRNA sense strand
aaaugacccucagcguaug

SEQ ID NO: 1191427 - RNA, 19 nt, Homo sapiens
  misc_RNA (1)...(19): siRNA sense strand
uaaccacugagaagcagaa

SEQ ID NO: 1191428 - RNA, 19 nt, Homo sapiens
  misc_RNA (1)...(19): siRNA sense strand
gaaaugaagugucugauga

SEQ ID NO: 1191429 - RNA, 19 nt, Homo sapiens
  misc_RNA (1)...(19): siRNA sense strand
gaaaggaguucgugaagug

SEQ ID NO: 1191430 - RNA, 19 nt, Homo sapiens
  misc_RNA (1)...(19): siRNA sense strand
ggaaagaaguggcauaucu

SEQ ID NO: 1191431 - RNA, 19 nt, Homo sapiens
  misc_RNA (1)...(19): siRNA sense strand
agacugggauggagaauua

SEQ ID NO: 1191432 - RNA, 19 nt, Homo sapiens
  misc_RNA (1)...(19): siRNA sense strand
gaccgaaccucugaauuua

SEQ ID NO: 1191433 - RNA, 19 nt, Homo sapiens
  misc_RNA (1)...(19): siRNA sense strand
gaauguggccaaacaauuu

SEQ ID NO: 1191434 - RNA, 19 nt, Homo sapiens
  misc_RNA (1)...(19): siRNA sense strand
gagcacauuugccuacuaa

SEQ ID NO: 1191435 - RNA, 19 nt, Homo sapiens
  misc_RNA (1)...(19): siRNA sense strand
gcaaagagaagcuuaagga

SEQ ID NO: 1191436 - RNA, 19 nt, Homo sapiens
  misc_RNA (1)...(19): siRNA sense strand
gauauugauuggccuauug

SEQ ID NO: 1191437 - RNA, 19 nt, Homo sapiens
  misc_RNA (1)...(19): siRNA sense strand
gaaagggccuguucaaagc

SEQ ID NO: 1191438 - RNA, 19 nt, Homo sapiens
  misc_RNA (1)...(19): siRNA sense strand
gacagaccaugaugaaauu

SEQ ID NO: 1191439 - RNA, 19 nt, Homo sapiens
  misc_RNA (1)...(19): siRNA sense strand
aagagaagcuuaaggaaau

SEQ ID NO: 1191440 - RNA, 19 nt, Homo sapiens
  misc_RNA (1)...(19): siRNA sense strand
gaaaugcgagcugaacaua

SEQ ID NO: 1191441 - RNA, 19 nt, Homo sapiens
  misc_RNA (1)...(19): siRNA sense strand
gagcaaagaguauuaagau

SEQ ID NO: 1191442 - RNA, 19 nt, Homo sapiens
  misc_RNA (1)...(19): siRNA sense strand
uggcauaucuuggaaauga

SEQ ID NO: 1191443 - RNA, 19 nt, Homo sapiens
  misc_RNA (1)...(19): siRNA sense strand
gaacauaguguggauauag

SEQ ID NO: 1191444 - RNA, 19 nt, Homo sapiens
  misc_RNA (1)...(19): siRNA sense strand
gaugaagagugcuugaaga

SEQ ID NO: 1191445 - RNA, 19 nt, Homo sapiens
  misc_RNA (1)...(19): siRNA sense strand
gaaguggcauaucuuggaa

SEQ ID NO: 1191446 - RNA, 19 nt, Homo sapiens
  misc_RNA (1)...(19): siRNA sense strand
ugaccgaaccucugaauuu

SEQ ID NO: 1191447 - RNA, 19 nt, Homo sapiens
  misc_RNA (1)...(19): siRNA sense strand
ccagaaggcuguuggauac

SEQ ID NO: 1191448 - RNA, 19 nt, Homo sapiens
  misc_RNA (1)...(19): siRNA sense strand
gaagugaccgaaccucuga

SEQ ID NO: 1191449 - RNA, 19 nt, Homo sapiens
  misc_RNA (1)...(19): siRNA sense strand
ccgaaccucugaauuuaaa

SEQ ID NO: 1191450 - RNA, 19 nt, Homo sapiens
  misc_RNA (1)...(19): siRNA sense strand
gcaccuggcagcccuaauu

SEQ ID NO: 1191451 - RNA, 19 nt, Homo sapiens
  misc_RNA (1)...(19): siRNA sense strand
agaaaugauucgagaagaa

SEQ ID NO: 1191452 - RNA, 19 nt, Homo sapiens
  misc_RNA (1)...(19): siRNA sense strand
gaaggcuguuggauacauu

SEQ ID NO: 1191453 - RNA, 19 nt, Homo sapiens
  misc_RNA (1)...(19): siRNA sense strand
cgacagaccaugaugaaau

SEQ ID NO: 1191454 - RNA, 19 nt, Homo sapiens
  misc_RNA (1)...(19): siRNA sense strand
gcuagcaguuguagaugaa

SEQ ID NO: 1191455 - RNA, 19 nt, Homo sapiens
  misc_RNA (1)...(19): siRNA sense strand
agacagcucuaccucacua

SEQ ID NO: 1191456 - RNA, 19 nt, Homo sapiens
  misc_RNA (1)...(19): siRNA sense strand
ggaaaugaagugucugaug

SEQ ID NO: 1191457 - RNA, 19 nt, Homo sapiens
  misc_RNA (1)...(19): siRNA sense strand
gaagagagugggccuaagu

SEQ ID NO: 1191458 - RNA, 19 nt, Homo sapiens
  misc_RNA (1)...(19): siRNA sense strand
gcugaugccuguucuacug

SEQ ID NO: 1191459 - RNA, 19 nt, Homo sapiens
  misc_RNA (1)...(19): siRNA sense strand
ggauggagaauuauaugaa

SEQ ID NO: 1191460 - RNA, 19 nt, Homo sapiens
  misc_RNA (1)...(19): siRNA sense strand
ugaagugucugaugaagag

SEQ ID NO: 1191461 - RNA, 19 nt, Homo sapiens
  misc_RNA (1)...(19): siRNA sense strand
acaauuuggugcacaaguu

SEQ ID NO: 1191462 - RNA, 19 nt, Homo sapiens
  misc_RNA (1)...(19): siRNA sense strand
aaagagaagcuuaaggaaa

SEQ ID NO: 1191463 - RNA, 19 nt, Homo sapiens
  misc_RNA (1)...(19): siRNA sense strand
gcacaaguucaucgaagaa

SEQ ID NO: 1191464 - RNA, 19 nt, Homo sapiens
  misc_RNA (1)...(19): siRNA sense strand
gaaauauucaagcuacuuc

SEQ ID NO: 1191465 - RNA, 19 nt, Homo sapiens
  misc_RNA (1)...(19): siRNA sense strand
ggauauugauuggccuauu

SEQ ID NO: 1191466 - RNA, 19 nt, Homo sapiens
  misc_RNA (1)...(19): siRNA sense strand
ugauagagauggguuacuu

SEQ ID NO: 1191467 - RNA, 19 nt, Homo sapiens
  misc_RNA (1)...(19): siRNA sense strand
uaaacggccucgucgacaa

SEQ ID NO: 1191468 - RNA, 19 nt, Homo sapiens
  misc_RNA (1)...(19): siRNA sense strand
caagcuacuucuccauguu

SEQ ID NO: 1191469 - RNA, 19 nt, Homo sapiens
  misc_RNA (1)...(19): siRNA sense strand
gagaagaaggauaugauuc

SEQ ID NO: 1191470 - RNA, 19 nt, Homo sapiens
  misc_RNA (1)...(19): siRNA sense strand
gcagagcaaagaguauuaa

SEQ ID NO: 1191471 - RNA, 19 nt, Homo sapiens
  misc_RNA (1)...(19): siRNA sense strand
caagcuagcaguuguagau

SEQ ID NO: 1191472 - RNA, 19 nt, Homo sapiens
  misc_RNA (1)...(19): siRNA sense strand
gcagaaaugauucgagaag

SEQ ID NO: 1191473 - RNA, 19 nt, Homo sapiens
  misc_RNA (1)...(19): siRNA sense strand
ggaaauauucaagcuacuu

SEQ ID NO: 1191474 - RNA, 19 nt, Homo sapiens
  misc_RNA (1)...(19): siRNA sense strand
cagaaaugauucgagaaga

SEQ ID NO: 1191475 - RNA, 19 nt, Homo sapiens
  misc_RNA (1)...(19): siRNA sense strand
caaagagaagcuuaaggaa

SEQ ID NO: 1191476 - RNA, 19 nt, Homo sapiens
  misc_RNA (1)...(19): siRNA sense strand
gaaaugauucgagaagaag

SEQ ID NO: 1191477 - RNA, 19 nt, Homo sapiens
  misc_RNA (1)...(19): siRNA sense strand
gaauuugcagagcacauuu

SEQ ID NO: 1191478 - RNA, 19 nt, Homo sapiens
  misc_RNA (1)...(19): siRNA sense strand
agagaagcuuaaggaaaua

SEQ ID NO: 1191479 - RNA, 19 nt, Homo sapiens
  misc_RNA (1)...(19): siRNA sense strand
guguauggguuucgacaga

SEQ ID NO: 1191480 - RNA, 19 nt, Homo sapiens
  misc_RNA (1)...(19): siRNA sense strand
agaaagggccuguucaaag

SEQ ID NO: 1191481 - RNA, 19 nt, Homo sapiens
  misc_RNA (1)...(19): siRNA sense strand
cgagaagaaggauaugauu

SEQ ID NO: 1191482 - RNA, 19 nt, Homo sapiens
  misc_RNA (1)...(19): siRNA sense strand
gagaauguggccaaacaau

SEQ ID NO: 1191483 - RNA, 19 nt, Homo sapiens
  misc_RNA (1)...(19): siRNA sense strand
caaguucaucgaagaaguu

SEQ ID NO: 1191484 - RNA, 19 nt, Homo sapiens
  misc_RNA (1)...(19): siRNA sense strand
gacauuguaggaaauauuc

SEQ ID NO: 1191485 - RNA, 19 nt, Homo sapiens
  misc_RNA (1)...(19): siRNA sense strand
gaagucaguguaucagaca

SEQ ID NO: 1191486 - RNA, 19 nt, Homo sapiens
  misc_RNA (1)...(19): siRNA sense strand
guauugaggugaggcuaau

SEQ ID NO: 1191487 - RNA, 19 nt, Homo sapiens
  misc_RNA (1)...(19): siRNA sense strand
aaaagaugcuauugggaua

SEQ ID NO: 1191488 - RNA, 19 nt, Homo sapiens
  misc_RNA (1)...(19): siRNA sense strand
gaaccucugaauuuaaauc

SEQ ID NO: 1191489 - RNA, 19 nt, Homo sapiens
  misc_RNA (1)...(19): siRNA sense strand
guaggaaauauucaagcua

SEQ ID NO: 1191490 - RNA, 19 nt, Homo sapiens
  misc_RNA (1)...(19): siRNA sense strand
ugaacauaguguggauaua

SEQ ID NO: 1191491 - RNA, 19 nt, Homo sapiens
  misc_RNA (1)...(19): siRNA sense strand
ucaagcuacuucuccaugu

SEQ ID NO: 1191492 - RNA, 19 nt, Homo sapiens
  misc_RNA (1)...(19): siRNA sense strand
ucagaaaggaguucgugaa

SEQ ID NO: 1191493 - RNA, 19 nt, Homo sapiens
  misc_RNA (1)...(19): siRNA sense strand
cagaaagggccuguucaaa

SEQ ID NO: 1191494 - RNA, 19 nt, Homo sapiens
  misc_RNA (1)...(19): siRNA sense strand
gagaagcuuaaggaaauaa

SEQ ID NO: 1191495 - RNA, 19 nt, Homo sapiens
  misc_RNA (1)...(19): siRNA sense strand
aaugcgagcugaacauagu

SEQ ID NO: 1191496 - RNA, 19 nt, Homo sapiens
  misc_RNA (1)...(19): siRNA sense strand
cccagaaggcuguuggaua

SEQ ID NO: 1191497 - RNA, 19 nt, Homo sapiens
  misc_RNA (1)...(19): siRNA sense strand
gaaggauaugauucuguuu

SEQ ID NO: 1191498 - RNA, 19 nt, Homo sapiens
  misc_RNA (1)...(19): siRNA sense strand
ggccugugcuggaaagaag

SEQ ID NO: 1191499 - RNA, 19 nt, Homo sapiens
  misc_RNA (1)...(19): siRNA sense strand
aaaacuggauugcaaaaug

SEQ ID NO: 1191500 - RNA, 19 nt, Homo sapiens
  misc_RNA (1)...(19): siRNA sense strand
gauagagauggguuacuug

SEQ ID NO: 1191501 - RNA, 19 nt, Homo sapiens
  misc_RNA (1)...(19): siRNA sense strand
gggauggagaauuauauga

SEQ ID NO: 1191502 - RNA, 19 nt, Homo sapiens
  misc_RNA (1)...(19): siRNA sense strand
ugugagacgccaucaguuu

SEQ ID NO: 1191503 - RNA, 19 nt, Homo sapiens
  misc_RNA (1)...(19): siRNA sense strand
ugauggaugucucaccaau

SEQ ID NO: 1191504 - RNA, 19 nt, Homo sapiens
  misc_RNA (1)...(19): siRNA sense strand
ucagaaagggccuguucaa

SEQ ID NO: 1191505 - RNA, 19 nt, Homo sapiens
  misc_RNA (1)...(19): siRNA sense strand
gguauugaggugaggcuaa

SEQ ID NO: 1191506 - RNA, 19 nt, Homo sapiens
  misc_RNA (1)...(19): siRNA sense strand
gauucgagaagaaggauau

SEQ ID NO: 1191507 - RNA, 19 nt, Homo sapiens
  misc_RNA (1)...(19): siRNA sense strand
agaauguggccaaacaauu

SEQ ID NO: 1191508 - RNA, 19 nt, Homo sapiens
  misc_RNA (1)...(19): siRNA sense strand
caaaauggaagucagugua

SEQ ID NO: 1191509 - RNA, 19 nt, Homo sapiens
  misc_RNA (1)...(19): siRNA sense strand
gacgcugucuucuuuaaaa

SEQ ID NO: 1191510 - RNA, 19 nt, Homo sapiens
  misc_RNA (1)...(19): siRNA sense strand
gaaauucagaaaggaguuc

SEQ ID NO: 1191511 - RNA, 19 nt, Homo sapiens
  misc_RNA (1)...(19): siRNA sense strand
aacauaguguggauauaga

SEQ ID NO: 1191512 - RNA, 19 nt, Homo sapiens
  misc_RNA (1)...(19): siRNA sense strand
gcuguuggauacauuugca

SEQ ID NO: 1191513 - RNA, 19 nt, Homo sapiens
  misc_RNA (1)...(19): siRNA sense strand
agaaguggcauaucuugga

SEQ ID NO: 1191514 - RNA, 19 nt, Homo sapiens
  misc_RNA (1)...(19): siRNA sense strand
guagaugaauggagaaaag

SEQ ID NO: 1191515 - RNA, 19 nt, Homo sapiens
  misc_RNA (1)...(19): siRNA sense strand
uugagaauguggccaaaca

SEQ ID NO: 1191516 - RNA, 19 nt, Homo sapiens
  misc_RNA (1)...(19): siRNA sense strand
uagcaguuguagaugaaug

SEQ ID NO: 1191517 - RNA, 19 nt, Homo sapiens
  misc_RNA (1)...(19): siRNA sense strand
agaaaggaguucgugaagu

SEQ ID NO: 1191518 - RNA, 19 nt, Homo sapiens
  misc_RNA (1)...(19): siRNA sense strand
gaugcuauugggauaaguu

SEQ ID NO: 1191519 - RNA, 19 nt, Homo sapiens
  misc_RNA (1)...(19): siRNA sense strand
agagcacauuugccuacua

SEQ ID NO: 1191520 - RNA, 19 nt, Homo sapiens
  misc_RNA (1)...(19): siRNA sense strand
caguguaucagacaagcua

SEQ ID NO: 1191521 - RNA, 19 nt, Homo sapiens
  misc_RNA (1)...(19): siRNA sense strand
ggcauaucuuggaaaugaa

SEQ ID NO: 1191522 - RNA, 19 nt, Homo sapiens
  misc_RNA (1)...(19): siRNA sense strand
gcuggaaagaaguggcaua

SEQ ID NO: 1191523 - RNA, 19 nt, Homo sapiens
  misc_RNA (1)...(19): siRNA sense strand
gguugacauuguaggaaau

SEQ ID NO: 1191524 - RNA, 19 nt, Homo sapiens
  misc_RNA (1)...(19): siRNA sense strand
aaaugggccugugcuggaa

SEQ ID NO: 1191525 - RNA, 19 nt, Homo sapiens
  misc_RNA (1)...(19): siRNA sense strand
gcuaaaagacauuugauag

SEQ ID NO: 1191526 - RNA, 19 nt, Homo sapiens
  misc_RNA (1)...(19): siRNA sense strand
acaaguucaucgaagaagu

SEQ ID NO: 1191527 - RNA, 19 nt, Homo sapiens
  misc_RNA (1)...(19): siRNA sense strand
cagaaaggaguucgugaag

SEQ ID NO: 1191528 - RNA, 19 nt, Homo sapiens
  misc_RNA (1)...(19): siRNA sense strand
gcacaacccuggcaauuug

SEQ ID NO: 1191529 - RNA, 19 nt, Homo sapiens
  misc_RNA (1)...(19): siRNA sense strand
gaaacugccuuaacuugaa

SEQ ID NO: 1191530 - RNA, 19 nt, Homo sapiens
  misc_RNA (1)...(19): siRNA sense strand
ggaauaagaagaacuguuu

SEQ ID NO: 1191531 - RNA, 19 nt, Homo sapiens
  misc_RNA (1)...(19): siRNA sense strand
gcaagaaacugccuuaacu

SEQ ID NO: 1191532 - RNA, 19 nt, Homo sapiens
  misc_RNA (1)...(19): siRNA sense strand
ugacagguaugaaagguua

SEQ ID NO: 1191533 - RNA, 19 nt, Homo sapiens
  misc_RNA (1)...(19): siRNA sense strand
gaaccugaaugccuacuug

SEQ ID NO: 1191534 - RNA, 19 nt, Homo sapiens
  misc_RNA (1)...(19): siRNA sense strand
caaguugucccucacauua

SEQ ID NO: 1191535 - RNA, 19 nt, Homo sapiens
  misc_RNA (1)...(19): siRNA sense strand
gaagauauaucagcaugug

SEQ ID NO: 1191536 - RNA, 19 nt, Homo sapiens
  misc_RNA (1)...(19): siRNA sense strand
gaaauauggcugacaggua

SEQ ID NO: 1191537 - RNA, 19 nt, Homo sapiens
  misc_RNA (1)...(19): siRNA sense strand
ugauagaguuugcaagaaa

SEQ ID NO: 1191538 - RNA, 19 nt, Homo sapiens
  misc_RNA (1)...(19): siRNA sense strand
gaagaaagacacagacauc

SEQ ID NO: 1191539 - RNA, 19 nt, Homo sapiens
  misc_RNA (1)...(19): siRNA sense strand
gaaacuuuauggugauguu

SEQ ID NO: 1191540 - RNA, 19 nt, Homo sapiens
  misc_RNA (1)...(19): siRNA sense strand
aaauauggcugacagguau

SEQ ID NO: 1191541 - RNA, 19 nt, Homo sapiens
  misc_RNA (1)...(19): siRNA sense strand
cgaggacccugugaaauuu

SEQ ID NO: 1191542 - RNA, 19 nt, Homo sapiens
  misc_RNA (1)...(19): siRNA sense strand
guacauagacuccauugau

SEQ ID NO: 1191543 - RNA, 19 nt, Homo sapiens
  misc_RNA (1)...(19): siRNA sense strand
ucauugaacuggcaaauca

SEQ ID NO: 1191544 - RNA, 19 nt, Homo sapiens
  misc_RNA (1)...(19): siRNA sense strand
ccacagaguuuaggccaaa

SEQ ID NO: 1191545 - RNA, 19 nt, Homo sapiens
  misc_RNA (1)...(19): siRNA sense strand
ccaguuccauccugaguuu

SEQ ID NO: 1191546 - RNA, 19 nt, Homo sapiens
  misc_RNA (1)...(19): siRNA sense strand
guggagaaguugauuuaga

SEQ ID NO: 1191547 - RNA, 19 nt, Homo sapiens
  misc_RNA (1)...(19): siRNA sense strand
augcaaagcugaugguauu

SEQ ID NO: 1191548 - RNA, 19 nt, Homo sapiens
  misc_RNA (1)...(19): siRNA sense strand
acaaugagacugggaauaa

SEQ ID NO: 1191549 - RNA, 19 nt, Homo sapiens
  misc_RNA (1)...(19): siRNA sense strand
gguaaacccuaaccugauc

SEQ ID NO: 1191550 - RNA, 19 nt, Homo sapiens
  misc_RNA (1)...(19): siRNA sense strand
gcucagugcuaccggagaa

SEQ ID NO: 1191551 - RNA, 19 nt, Homo sapiens
  misc_RNA (1)...(19): siRNA sense strand
agacaucgguucgagguaa

SEQ ID NO: 1191552 - RNA, 19 nt, Homo sapiens
  misc_RNA (1)...(19): siRNA sense strand
gaacaggucauauguaucc

SEQ ID NO: 1191553 - RNA, 19 nt, Homo sapiens
  misc_RNA (1)...(19): siRNA sense strand
cugaacaggucauauguau

SEQ ID NO: 1191554 - RNA, 19 nt, Homo sapiens
  misc_RNA (1)...(19): siRNA sense strand
aaggauagcugaguuggaa

SEQ ID NO: 1191555 - RNA, 19 nt, Homo sapiens
  misc_RNA (1)...(19): siRNA sense strand
gagcacaacccuggcaauu

SEQ ID NO: 1191556 - RNA, 19 nt, Homo sapiens
  misc_RNA (1)...(19): siRNA sense strand
ggauggaaaucauugaacu

SEQ ID NO: 1191557 - RNA, 19 nt, Homo sapiens
  misc_RNA (1)...(19): siRNA sense strand
cagaaugacuuaaguuuug

SEQ ID NO: 1191558 - RNA, 19 nt, Homo sapiens
  misc_RNA (1)...(19): siRNA sense strand
ccgaggacccugugaaauu

SEQ ID NO: 1191559 - RNA, 19 nt, Homo sapiens
  misc_RNA (1)...(19): siRNA sense strand
caaagcugaugguauucuu

SEQ ID NO: 1191560 - RNA, 19 nt, Homo sapiens
  misc_RNA (1)...(19): siRNA sense strand
gaucauugccagcagcauu

SEQ ID NO: 1191561 - RNA, 19 nt, Homo sapiens
  misc_RNA (1)...(19): siRNA sense strand
ugccuuaacuugaaagaug

SEQ ID NO: 1191562 - RNA, 19 nt, Homo sapiens
  misc_RNA (1)...(19): siRNA sense strand
aaacugccuuaacuugaaa

SEQ ID NO: 1191563 - RNA, 19 nt, Homo sapiens
  misc_RNA (1)...(19): siRNA sense strand
ccuuggaaauuaugaaaga

SEQ ID NO: 1191564 - RNA, 19 nt, Homo sapiens
  misc_RNA (1)...(19): siRNA sense strand
gcaaggacaaagaagauuc

SEQ ID NO: 1191565 - RNA, 19 nt, Homo sapiens
  misc_RNA (1)...(19): siRNA sense strand
gcaaguugucccucacauu

SEQ ID NO: 1191566 - RNA, 19 nt, Homo sapiens
  misc_RNA (1)...(19): siRNA sense strand
cagcagcauuggaacgauu

SEQ ID NO: 1191567 - RNA, 19 nt, Homo sapiens
  misc_RNA (1)...(19): siRNA sense strand
gagacaggauggaaaucau

SEQ ID NO: 1191568 - RNA, 19 nt, Homo sapiens
  misc_RNA (1)...(19): siRNA sense strand
gagcagaaugacuuaaguu

SEQ ID NO: 1191569 - RNA, 19 nt, Homo sapiens
  misc_RNA (1)...(19): siRNA sense strand
ugaaucugauguacauaga

SEQ ID NO: 1191570 - RNA, 19 nt, Homo sapiens
  misc_RNA (1)...(19): siRNA sense strand
aaccacaaguugaaucuga

SEQ ID NO: 1191571 - RNA, 19 nt, Homo sapiens
  misc_RNA (1)...(19): siRNA sense strand
cugauugucugccgaaguu

SEQ ID NO: 1191572 - RNA, 19 nt, Homo sapiens
  misc_RNA (1)...(19): siRNA sense strand
uagcugaguuggaaauaag

SEQ ID NO: 1191573 - RNA, 19 nt, Homo sapiens
  misc_RNA (1)...(19): siRNA sense strand
aaagagaggcguggugauu

SEQ ID NO: 1191574 - RNA, 19 nt, Homo sapiens
  misc_RNA (1)...(19): siRNA sense strand
ggagacaggauggaaauca

SEQ ID NO: 1191575 - RNA, 19 nt, Homo sapiens
  misc_RNA (1)...(19): siRNA sense strand
caagaaacugccuuaacuu

SEQ ID NO: 1191576 - RNA, 19 nt, Homo sapiens
  misc_RNA (1)...(19): siRNA sense strand
ggaaucagaggaacauugg

SEQ ID NO: 1191577 - RNA, 19 nt, Homo sapiens
  misc_RNA (1)...(19): siRNA sense strand
gguaugaaagguuacagaa

SEQ ID NO: 1191578 - RNA, 19 nt, Homo sapiens
  misc_RNA (1)...(19): siRNA sense strand
aaaugaugguggagaaguu

SEQ ID NO: 1191579 - RNA, 19 nt, Homo sapiens
  misc_RNA (1)...(19): siRNA sense strand
aggaguggguuaugaauca

SEQ ID NO: 1191580 - RNA, 19 nt, Homo sapiens
  misc_RNA (1)...(19): siRNA sense strand
aaaaucgaccccuauauua

SEQ ID NO: 1191581 - RNA, 19 nt, Homo sapiens
  misc_RNA (1)...(19): siRNA sense strand
ggaaaacagugcaaguugu

SEQ ID NO: 1191582 - RNA, 19 nt, Homo sapiens
  misc_RNA (1)...(19): siRNA sense strand
agaaguugauuuagaccuu

SEQ ID NO: 1191583 - RNA, 19 nt, Homo sapiens
  misc_RNA (1)...(19): siRNA sense strand
gagcugggaggcaccauug

SEQ ID NO: 1191584 - RNA, 19 nt, Homo sapiens
  misc_RNA (1)...(19): siRNA sense strand
gacaucgguucgagguaaa

SEQ ID NO: 1191585 - RNA, 19 nt, Homo sapiens
  misc_RNA (1)...(19): siRNA sense strand
gugauagaguuugcaagaa

SEQ ID NO: 1191586 - RNA, 19 nt, Homo sapiens
  misc_RNA (1)...(19): siRNA sense strand
guaugaaagguuacagaaa

SEQ ID NO: 1191587 - RNA, 19 nt, Homo sapiens
  misc_RNA (1)...(19): siRNA sense strand
ggaggcguuuagacaauuc

SEQ ID NO: 1191588 - RNA, 19 nt, Homo sapiens
  misc_RNA (1)...(19): siRNA sense strand
agugauagauacagugaug

SEQ ID NO: 1191589 - RNA, 19 nt, Homo sapiens
  misc_RNA (1)...(19): siRNA sense strand
gaacaaugagacugggaau

SEQ ID NO: 1191590 - RNA, 19 nt, Homo sapiens
  misc_RNA (1)...(19): siRNA sense strand
gcauuggaacgauucuaaa

SEQ ID NO: 1191591 - RNA, 19 nt, Homo sapiens
  misc_RNA (1)...(19): siRNA sense strand
cuuaaaugaugguggagaa

SEQ ID NO: 1191592 - RNA, 19 nt, Homo sapiens
  misc_RNA (1)...(19): siRNA sense strand
gcaacuagcagugauagag

SEQ ID NO: 1191593 - RNA, 19 nt, Homo sapiens
  misc_RNA (1)...(19): siRNA sense strand
uacauagacuccauugauc

SEQ ID NO: 1191594 - RNA, 19 nt, Homo sapiens
  misc_RNA (1)...(19): siRNA sense strand
cuacgccucuguguucaaa

SEQ ID NO: 1191595 - RNA, 19 nt, Homo sapiens
  misc_RNA (1)...(19): siRNA sense strand
gaccuuggaaauuaugaaa

SEQ ID NO: 1191596 - RNA, 19 nt, Homo sapiens
  misc_RNA (1)...(19): siRNA sense strand
ccuggaggcuuuggaauca

SEQ ID NO: 1191597 - RNA, 19 nt, Homo sapiens
  misc_RNA (1)...(19): siRNA sense strand
caaguugaaucugauguac

SEQ ID NO: 1191598 - RNA, 19 nt, Homo sapiens
  misc_RNA (1)...(19): siRNA sense strand
guggaggcguuuagacaau

SEQ ID NO: 1191599 - RNA, 19 nt, Homo sapiens
  misc_RNA (1)...(19): siRNA sense strand
guccaggaguggguuauga

SEQ ID NO: 1191600 - RNA, 19 nt, Homo sapiens
  misc_RNA (1)...(19): siRNA sense strand
gaacuggcaaaucauccuu

SEQ ID NO: 1191601 - RNA, 19 nt, Homo sapiens
  misc_RNA (1)...(19): siRNA sense strand
gauggagacaggauggaaa

SEQ ID NO: 1191602 - RNA, 19 nt, Homo sapiens
  misc_RNA (1)...(19): siRNA sense strand
cuaaccugaucaaacaauu

SEQ ID NO: 1191603 - RNA, 19 nt, Homo sapiens
  misc_RNA (1)...(19): siRNA sense strand
acccuaaccugaucaaaca

SEQ ID NO: 1191604 - RNA, 19 nt, Homo sapiens
  misc_RNA (1)...(19): siRNA sense strand
agacugggaauaagaagaa

SEQ ID NO: 1191605 - RNA, 19 nt, Homo sapiens
  misc_RNA (1)...(19): siRNA sense strand
agaaacugccuuaacuuga

SEQ ID NO: 1191606 - RNA, 19 nt, Homo sapiens
  misc_RNA (1)...(19): siRNA sense strand
ggaugcaacuagcagugau

SEQ ID NO: 1191607 - RNA, 19 nt, Homo sapiens
  misc_RNA (1)...(19): siRNA sense strand
gggcaaggacaaagaagau

SEQ ID NO: 1191608 - RNA, 19 nt, Homo sapiens
  misc_RNA (1)...(19): siRNA sense strand
ucaugaagcuuggcagaag

SEQ ID NO: 1191609 - RNA, 19 nt, Homo sapiens
  misc_RNA (1)...(19): siRNA sense strand
uaaggaagagccccaaaua

SEQ ID NO: 1191610 - RNA, 19 nt, Homo sapiens
  misc_RNA (1)...(19): siRNA sense strand
aagagaggcguggugauua

SEQ ID NO: 1191611 - RNA, 19 nt, Homo sapiens
  misc_RNA (1)...(19): siRNA sense strand
gauagcugaguuggaaaua

SEQ ID NO: 1191612 - RNA, 19 nt, Homo sapiens
  misc_RNA (1)...(19): siRNA sense strand
caguuccucuggugauuga

SEQ ID NO: 1191613 - RNA, 19 nt, Homo sapiens
  misc_RNA (1)...(19): siRNA sense strand
gaugcaacuagcagugaua

SEQ ID NO: 1191614 - RNA, 19 nt, Homo sapiens
  misc_RNA (1)...(19): siRNA sense strand
uggagaagaucacugaaac

SEQ ID NO: 1191615 - RNA, 19 nt, Homo sapiens
  misc_RNA (1)...(19): siRNA sense strand
caaauacaccaagcucaga

SEQ ID NO: 1191616 - RNA, 19 nt, Homo sapiens
  misc_RNA (1)...(19): siRNA sense strand
guuuagacaauuccaguuu

SEQ ID NO: 1191617 - RNA, 19 nt, Homo sapiens
  misc_RNA (1)...(19): siRNA sense strand
gguggaugguaauaaggaa

SEQ ID NO: 1191618 - RNA, 19 nt, Homo sapiens
  misc_RNA (1)...(19): siRNA sense strand
ggaguggguuaugaaucaa

SEQ ID NO: 1191619 - RNA, 19 nt, Homo sapiens
  misc_RNA (1)...(19): siRNA sense strand
caaugagacugggaauaag

SEQ ID NO: 1191620 - RNA, 19 nt, Homo sapiens
  misc_RNA (1)...(19): siRNA sense strand
aagaaacugccuuaacuug

SEQ ID NO: 1191621 - RNA, 19 nt, Homo sapiens
  misc_RNA (1)...(19): siRNA sense strand
ucgaaggaaugccguuugu

SEQ ID NO: 1191622 - RNA, 19 nt, Homo sapiens
  misc_RNA (1)...(19): siRNA sense strand
gcagaaugacuuaaguuuu

SEQ ID NO: 1191623 - RNA, 19 nt, Homo sapiens
  misc_RNA (1)...(19): siRNA sense strand
gacaggauggaaaucauug

SEQ ID NO: 1191624 - RNA, 19 nt, Homo sapiens
  misc_RNA (1)...(19): siRNA sense strand
ugguggagaaguugauuua

SEQ ID NO: 1191625 - RNA, 19 nt, Homo sapiens
  misc_RNA (1)...(19): siRNA sense strand
ugccagugaugacagcuuu

SEQ ID NO: 1191626 - RNA, 19 nt, Homo sapiens
  misc_RNA (1)...(19): siRNA sense strand
ugagcagaaugacuuaagu

SEQ ID NO: 1191627 - RNA, 19 nt, Homo sapiens
  misc_RNA (1)...(19): siRNA sense strand
gcagugauagaguuugcaa

SEQ ID NO: 1191628 - RNA, 19 nt, Homo sapiens
  misc_RNA (1)...(19): siRNA sense strand
gcacaacccuggcaauuug

SEQ ID NO: 1191629 - RNA, 19 nt, Homo sapiens
  misc_RNA (1)...(19): siRNA sense strand
gaaacugccuuaacuugaa

SEQ ID NO: 1191630 - RNA, 19 nt, Homo sapiens
  misc_RNA (1)...(19): siRNA sense strand
ggaauaagaagaacuguuu

SEQ ID NO: 1191631 - RNA, 19 nt, Homo sapiens
  misc_RNA (1)...(19): siRNA sense strand
gcaagaaacugccuuaacu

SEQ ID NO: 1191632 - RNA, 19 nt, Homo sapiens
  misc_RNA (1)...(19): siRNA sense strand
ugacagguaugaaagguua

SEQ ID NO: 1191633 - RNA, 19 nt, Homo sapiens
  misc_RNA (1)...(19): siRNA sense strand
gaaccugaaugccuacuug

SEQ ID NO: 1191634 - RNA, 19 nt, Homo sapiens
  misc_RNA (1)...(19): siRNA sense strand
caaguugucccucacauua

SEQ ID NO: 1191635 - RNA, 19 nt, Homo sapiens
  misc_RNA (1)...(19): siRNA sense strand
gaagauauaucagcaugug

SEQ ID NO: 1191636 - RNA, 19 nt, Homo sapiens
  misc_RNA (1)...(19): siRNA sense strand
gaaauauggcugacaggua

SEQ ID NO: 1191637 - RNA, 19 nt, Homo sapiens
  misc_RNA (1)...(19): siRNA sense strand
ugauagaguuugcaagaaa

SEQ ID NO: 1191638 - RNA, 19 nt, Homo sapiens
  misc_RNA (1)...(19): siRNA sense strand
gaagaaagacacagacauc

SEQ ID NO: 1191639 - RNA, 19 nt, Homo sapiens
  misc_RNA (1)...(19): siRNA sense strand
gaaacuuuauggugauguu

SEQ ID NO: 1191640 - RNA, 19 nt, Homo sapiens
  misc_RNA (1)...(19): siRNA sense strand
aaauauggcugacagguau

SEQ ID NO: 1191641 - RNA, 19 nt, Homo sapiens
  misc_RNA (1)...(19): siRNA sense strand
cgaggacccugugaaauuu

SEQ ID NO: 1191642 - RNA, 19 nt, Homo sapiens
  misc_RNA (1)...(19): siRNA sense strand
guacauagacuccauugau

SEQ ID NO: 1191643 - RNA, 19 nt, Homo sapiens
  misc_RNA (1)...(19): siRNA sense strand
ucauugaacuggcaaauca

SEQ ID NO: 1191644 - RNA, 19 nt, Homo sapiens
  misc_RNA (1)...(19): siRNA sense strand
ccacagaguuuaggccaaa

SEQ ID NO: 1191645 - RNA, 19 nt, Homo sapiens
  misc_RNA (1)...(19): siRNA sense strand
ccaguuccauccugaguuu

SEQ ID NO: 1191646 - RNA, 19 nt, Homo sapiens
  misc_RNA (1)...(19): siRNA sense strand
guggagaaguugauuuaga

SEQ ID NO: 1191647 - RNA, 19 nt, Homo sapiens
  misc_RNA (1)...(19): siRNA sense strand
augcaaagcugaugguauu

SEQ ID NO: 1191648 - RNA, 19 nt, Homo sapiens
  misc_RNA (1)...(19): siRNA sense strand
acaaugagacugggaauaa

SEQ ID NO: 1191649 - RNA, 19 nt, Homo sapiens
  misc_RNA (1)...(19): siRNA sense strand
gguaaacccuaaccugauc

SEQ ID NO: 1191650 - RNA, 19 nt, Homo sapiens
  misc_RNA (1)...(19): siRNA sense strand
gcucagugcuaccggagaa

SEQ ID NO: 1191651 - RNA, 19 nt, Homo sapiens
  misc_RNA (1)...(19): siRNA sense strand
agacaucgguucgagguaa

SEQ ID NO: 1191652 - RNA, 19 nt, Homo sapiens
  misc_RNA (1)...(19): siRNA sense strand
gaacaggucauauguaucc

SEQ ID NO: 1191653 - RNA, 19 nt, Homo sapiens
  misc_RNA (1)...(19): siRNA sense strand
cugaacaggucauauguau

SEQ ID NO: 1191654 - RNA, 19 nt, Homo sapiens
  misc_RNA (1)...(19): siRNA sense strand
aaggauagcugaguuggaa

SEQ ID NO: 1191655 - RNA, 19 nt, Homo sapiens
  misc_RNA (1)...(19): siRNA sense strand
gagcacaacccuggcaauu

SEQ ID NO: 1191656 - RNA, 19 nt, Homo sapiens
  misc_RNA (1)...(19): siRNA sense strand
ggauggaaaucauugaacu

SEQ ID NO: 1191657 - RNA, 19 nt, Homo sapiens
  misc_RNA (1)...(19): siRNA sense strand
cagaaugacuuaaguuuug

SEQ ID NO: 1191658 - RNA, 19 nt, Homo sapiens
  misc_RNA (1)...(19): siRNA sense strand
ccgaggacccugugaaauu

SEQ ID NO: 1191659 - RNA, 19 nt, Homo sapiens
  misc_RNA (1)...(19): siRNA sense strand
caaagcugaugguauucuu

SEQ ID NO: 1191660 - RNA, 19 nt, Homo sapiens
  misc_RNA (1)...(19): siRNA sense strand
gaucauugccagcagcauu

SEQ ID NO: 1191661 - RNA, 19 nt, Homo sapiens
  misc_RNA (1)...(19): siRNA sense strand
ugccuuaacuugaaagaug

SEQ ID NO: 1191662 - RNA, 19 nt, Homo sapiens
  misc_RNA (1)...(19): siRNA sense strand
aaacugccuuaacuugaaa

SEQ ID NO: 1191663 - RNA, 19 nt, Homo sapiens
  misc_RNA (1)...(19): siRNA sense strand
ccuuggaaauuaugaaaga

SEQ ID NO: 1191664 - RNA, 19 nt, Homo sapiens
  misc_RNA (1)...(19): siRNA sense strand
gcaaggacaaagaagauuc

SEQ ID NO: 1191665 - RNA, 19 nt, Homo sapiens
  misc_RNA (1)...(19): siRNA sense strand
gcaaguugucccucacauu

SEQ ID NO: 1191666 - RNA, 19 nt, Homo sapiens
  misc_RNA (1)...(19): siRNA sense strand
cagcagcauuggaacgauu

SEQ ID NO: 1191667 - RNA, 19 nt, Homo sapiens
  misc_RNA (1)...(19): siRNA sense strand
gagacaggauggaaaucau

SEQ ID NO: 1191668 - RNA, 19 nt, Homo sapiens
  misc_RNA (1)...(19): siRNA sense strand
gagcagaaugacuuaaguu

SEQ ID NO: 1191669 - RNA, 19 nt, Homo sapiens
  misc_RNA (1)...(19): siRNA sense strand
ugaaucugauguacauaga

SEQ ID NO: 1191670 - RNA, 19 nt, Homo sapiens
  misc_RNA (1)...(19): siRNA sense strand
aaccacaaguugaaucuga

SEQ ID NO: 1191671 - RNA, 19 nt, Homo sapiens
  misc_RNA (1)...(19): siRNA sense strand
cugauugucugccgaaguu

SEQ ID NO: 1191672 - RNA, 19 nt, Homo sapiens
  misc_RNA (1)...(19): siRNA sense strand
uagcugaguuggaaauaag

SEQ ID NO: 1191673 - RNA, 19 nt, Homo sapiens
  misc_RNA (1)...(19): siRNA sense strand
aaagagaggcguggugauu

SEQ ID NO: 1191674 - RNA, 19 nt, Homo sapiens
  misc_RNA (1)...(19): siRNA sense strand
ggagacaggauggaaauca

SEQ ID NO: 1191675 - RNA, 19 nt, Homo sapiens
  misc_RNA (1)...(19): siRNA sense strand
caagaaacugccuuaacuu

SEQ ID NO: 1191676 - RNA, 19 nt, Homo sapiens
  misc_RNA (1)...(19): siRNA sense strand
ggaaucagaggaacauugg

SEQ ID NO: 1191677 - RNA, 19 nt, Homo sapiens
  misc_RNA (1)...(19): siRNA sense strand
gguaugaaagguuacagaa

SEQ ID NO: 1191678 - RNA, 19 nt, Homo sapiens
  misc_RNA (1)...(19): siRNA sense strand
aaaugaugguggagaaguu

SEQ ID NO: 1191679 - RNA, 19 nt, Homo sapiens
  misc_RNA (1)...(19): siRNA sense strand
aggaguggguuaugaauca

SEQ ID NO: 1191680 - RNA, 19 nt, Homo sapiens
  misc_RNA (1)...(19): siRNA sense strand
aaaaucgaccccuauauua

SEQ ID NO: 1191681 - RNA, 19 nt, Homo sapiens
  misc_RNA (1)...(19): siRNA sense strand
ggaaaacagugcaaguugu

SEQ ID NO: 1191682 - RNA, 19 nt, Homo sapiens
  misc_RNA (1)...(19): siRNA sense strand
agaaguugauuuagaccuu

SEQ ID NO: 1191683 - RNA, 19 nt, Homo sapiens
  misc_RNA (1)...(19): siRNA sense strand
gagcugggaggcaccauug

SEQ ID NO: 1191684 - RNA, 19 nt, Homo sapiens
  misc_RNA (1)...(19): siRNA sense strand
gacaucgguucgagguaaa

SEQ ID NO: 1191685 - RNA, 19 nt, Homo sapiens
  misc_RNA (1)...(19): siRNA sense strand
gugauagaguuugcaagaa

SEQ ID NO: 1191686 - RNA, 19 nt, Homo sapiens
  misc_RNA (1)...(19): siRNA sense strand
guaugaaagguuacagaaa

SEQ ID NO: 1191687 - RNA, 19 nt, Homo sapiens
  misc_RNA (1)...(19): siRNA sense strand
ggaggcguuuagacaauuc

SEQ ID NO: 1191688 - RNA, 19 nt, Homo sapiens
  misc_RNA (1)...(19): siRNA sense strand
agugauagauacagugaug

SEQ ID NO: 1191689 - RNA, 19 nt, Homo sapiens
  misc_RNA (1)...(19): siRNA sense strand
gaacaaugagacugggaau

SEQ ID NO: 1191690 - RNA, 19 nt, Homo sapiens
  misc_RNA (1)...(19): siRNA sense strand
gcauuggaacgauucuaaa

SEQ ID NO: 1191691 - RNA, 19 nt, Homo sapiens
  misc_RNA (1)...(19): siRNA sense strand
cuuaaaugaugguggagaa

SEQ ID NO: 1191692 - RNA, 19 nt, Homo sapiens
  misc_RNA (1)...(19): siRNA sense strand
gcaacuagcagugauagag

SEQ ID NO: 1191693 - RNA, 19 nt, Homo sapiens
  misc_RNA (1)...(19): siRNA sense strand
uacauagacuccauugauc

SEQ ID NO: 1191694 - RNA, 19 nt, Homo sapiens
  misc_RNA (1)...(19): siRNA sense strand
cuacgccucuguguucaaa

SEQ ID NO: 1191695 - RNA, 19 nt, Homo sapiens
  misc_RNA (1)...(19): siRNA sense strand
gaccuuggaaauuaugaaa

SEQ ID NO: 1191696 - RNA, 19 nt, Homo sapiens
  misc_RNA (1)...(19): siRNA sense strand
ccuggaggcuuuggaauca

SEQ ID NO: 1191697 - RNA, 19 nt, Homo sapiens
  misc_RNA (1)...(19): siRNA sense strand
caaguugaaucugauguac

SEQ ID NO: 1191698 - RNA, 19 nt, Homo sapiens
  misc_RNA (1)...(19): siRNA sense strand
guggaggcguuuagacaau

SEQ ID NO: 1191699 - RNA, 19 nt, Homo sapiens
  misc_RNA (1)...(19): siRNA sense strand
guccaggaguggguuauga

SEQ ID NO: 1191700 - RNA, 19 nt, Homo sapiens
  misc_RNA (1)...(19): siRNA sense strand
gaacuggcaaaucauccuu

SEQ ID NO: 1191701 - RNA, 19 nt, Homo sapiens
  misc_RNA (1)...(19): siRNA sense strand
gauggagacaggauggaaa

SEQ ID NO: 1191702 - RNA, 19 nt, Homo sapiens
  misc_RNA (1)...(19): siRNA sense strand
cuaaccugaucaaacaauu

SEQ ID NO: 1191703 - RNA, 19 nt, Homo sapiens
  misc_RNA (1)...(19): siRNA sense strand
acccuaaccugaucaaaca

SEQ ID NO: 1191704 - RNA, 19 nt, Homo sapiens
  misc_RNA (1)...(19): siRNA sense strand
agacugggaauaagaagaa

SEQ ID NO: 1191705 - RNA, 19 nt, Homo sapiens
  misc_RNA (1)...(19): siRNA sense strand
agaaacugccuuaacuuga

SEQ ID NO: 1191706 - RNA, 19 nt, Homo sapiens
  misc_RNA (1)...(19): siRNA sense strand
ggaugcaacuagcagugau

SEQ ID NO: 1191707 - RNA, 19 nt, Homo sapiens
  misc_RNA (1)...(19): siRNA sense strand
gggcaaggacaaagaagau

SEQ ID NO: 1191708 - RNA, 19 nt, Homo sapiens
  misc_RNA (1)...(19): siRNA sense strand
ucaugaagcuuggcagaag

SEQ ID NO: 1191709 - RNA, 19 nt, Homo sapiens
  misc_RNA (1)...(19): siRNA sense strand
uaaggaagagccccaaaua

SEQ ID NO: 1191710 - RNA, 19 nt, Homo sapiens
  misc_RNA (1)...(19): siRNA sense strand
aagagaggcguggugauua

SEQ ID NO: 1191711 - RNA, 19 nt, Homo sapiens
  misc_RNA (1)...(19): siRNA sense strand
gauagcugaguuggaaaua

SEQ ID NO: 1191712 - RNA, 19 nt, Homo sapiens
  misc_RNA (1)...(19): siRNA sense strand
caguuccucuggugauuga

SEQ ID NO: 1191713 - RNA, 19 nt, Homo sapiens
  misc_RNA (1)...(19): siRNA sense strand
gaugcaacuagcagugaua

SEQ ID NO: 1191714 - RNA, 19 nt, Homo sapiens
  misc_RNA (1)...(19): siRNA sense strand
uggagaagaucacugaaac

SEQ ID NO: 1191715 - RNA, 19 nt, Homo sapiens
  misc_RNA (1)...(19): siRNA sense strand
caaauacaccaagcucaga

SEQ ID NO: 1191716 - RNA, 19 nt, Homo sapiens
  misc_RNA (1)...(19): siRNA sense strand
guuuagacaauuccaguuu

SEQ ID NO: 1191717 - RNA, 19 nt, Homo sapiens
  misc_RNA (1)...(19): siRNA sense strand
gguggaugguaauaaggaa

SEQ ID NO: 1191718 - RNA, 19 nt, Homo sapiens
  misc_RNA (1)...(19): siRNA sense strand
ggaguggguuaugaaucaa

SEQ ID NO: 1191719 - RNA, 19 nt, Homo sapiens
  misc_RNA (1)...(19): siRNA sense strand
caaugagacugggaauaag

SEQ ID NO: 1191720 - RNA, 19 nt, Homo sapiens
  misc_RNA (1)...(19): siRNA sense strand
aagaaacugccuuaacuug

SEQ ID NO: 1191721 - RNA, 19 nt, Homo sapiens
  misc_RNA (1)...(19): siRNA sense strand
ucgaaggaaugccguuugu

SEQ ID NO: 1191722 - RNA, 19 nt, Homo sapiens
  misc_RNA (1)...(19): siRNA sense strand
gcagaaugacuuaaguuuu

SEQ ID NO: 1191723 - RNA, 19 nt, Homo sapiens
  misc_RNA (1)...(19): siRNA sense strand
gacaggauggaaaucauug

SEQ ID NO: 1191724 - RNA, 19 nt, Homo sapiens
  misc_RNA (1)...(19): siRNA sense strand
ugguggagaaguugauuua

SEQ ID NO: 1191725 - RNA, 19 nt, Homo sapiens
  misc_RNA (1)...(19): siRNA sense strand
ugccagugaugacagcuuu

SEQ ID NO: 1191726 - RNA, 19 nt, Homo sapiens
  misc_RNA (1)...(19): siRNA sense strand
ugagcagaaugacuuaagu

SEQ ID NO: 1191727 - RNA, 19 nt, Homo sapiens
  misc_RNA (1)...(19): siRNA sense strand
gcagugauagaguuugcaa

SEQ ID NO: 1191728 - RNA, 19 nt, Homo sapiens
  misc_RNA (1)...(19): siRNA sense strand
gcacggagguuucacauca

SEQ ID NO: 1191729 - RNA, 19 nt, Homo sapiens
  misc_RNA (1)...(19): siRNA sense strand
gcacaaccauacuguuaag

SEQ ID NO: 1191730 - RNA, 19 nt, Homo sapiens
  misc_RNA (1)...(19): siRNA sense strand
ggaaagagugaauaugugu

SEQ ID NO: 1191731 - RNA, 19 nt, Homo sapiens
  misc_RNA (1)...(19): siRNA sense strand
cgaaacauacggccauaaa

SEQ ID NO: 1191732 - RNA, 19 nt, Homo sapiens
  misc_RNA (1)...(19): siRNA sense strand
ccgcacaaccauacuguua

SEQ ID NO: 1191733 - RNA, 19 nt, Homo sapiens
  misc_RNA (1)...(19): siRNA sense strand
gaaggcuccuggaaagagu

SEQ ID NO: 1191734 - RNA, 19 nt, Homo sapiens
  misc_RNA (1)...(19): siRNA sense strand
ggagguuucacaucauauu

SEQ ID NO: 1191735 - RNA, 19 nt, Homo sapiens
  misc_RNA (1)...(19): siRNA sense strand
agugcaagcugccaagaaa

SEQ ID NO: 1191736 - RNA, 19 nt, Homo sapiens
  misc_RNA (1)...(19): siRNA sense strand
guuaagcaguggaugaaag

SEQ ID NO: 1191737 - RNA, 19 nt, Homo sapiens
  misc_RNA (1)...(19): siRNA sense strand
gagguuucacaucauauuu

SEQ ID NO: 1191738 - RNA, 19 nt, Homo sapiens
  misc_RNA (1)...(19): siRNA sense strand
uggaaagagugaauaugug

SEQ ID NO: 1191739 - RNA, 19 nt, Homo sapiens
  misc_RNA (1)...(19): siRNA sense strand
ggcccuacaugccucagaa

SEQ ID NO: 1191740 - RNA, 19 nt, Homo sapiens
  misc_RNA (1)...(19): siRNA sense strand
acggagguuucacaucaua

SEQ ID NO: 1191741 - RNA, 19 nt, Homo sapiens
  misc_RNA (1)...(19): siRNA sense strand
gcugucauccuucauguca

SEQ ID NO: 1191742 - RNA, 19 nt, Homo sapiens
  misc_RNA (1)...(19): siRNA sense strand
gaaauguuugccacaggaa

SEQ ID NO: 1191743 - RNA, 19 nt, Homo sapiens
  misc_RNA (1)...(19): siRNA sense strand
cacgaaacauacggccaua

SEQ ID NO: 1191744 - RNA, 19 nt, Homo sapiens
  misc_RNA (1)...(19): siRNA sense strand
cacaucauauuuccagaag

SEQ ID NO: 1191745 - RNA, 19 nt, Homo sapiens
  misc_RNA (1)...(19): siRNA sense strand
ucacaucauauuuccagaa

SEQ ID NO: 1191746 - RNA, 19 nt, Homo sapiens
  misc_RNA (1)...(19): siRNA sense strand
gaaacauacggccauaaaa

SEQ ID NO: 1191747 - RNA, 19 nt, Homo sapiens
  misc_RNA (1)...(19): siRNA sense strand
ggcaagaggaacaguaaca

SEQ ID NO: 1191748 - RNA, 19 nt, Homo sapiens
  misc_RNA (1)...(19): siRNA sense strand
cuggaaagagugaauaugu

SEQ ID NO: 1191749 - RNA, 19 nt, Homo sapiens
  misc_RNA (1)...(19): siRNA sense strand
cccauugccuccagcuguu

SEQ ID NO: 1191750 - RNA, 19 nt, Homo sapiens
  misc_RNA (1)...(19): siRNA sense strand
gucaagcgcagaagaaucu

SEQ ID NO: 1191751 - RNA, 19 nt, Homo sapiens
  misc_RNA (1)...(19): siRNA sense strand
caugucaagcgcagaagaa

SEQ ID NO: 1191752 - RNA, 19 nt, Homo sapiens
  misc_RNA (1)...(19): siRNA sense strand
agagaggacucgccaucgu

SEQ ID NO: 1191753 - RNA, 19 nt, Homo sapiens
  misc_RNA (1)...(19): siRNA sense strand
ugucauccuucaugucaag

SEQ ID NO: 1191754 - RNA, 19 nt, Homo sapiens
  misc_RNA (1)...(19): siRNA sense strand
cgcacaaccauacuguuaa

SEQ ID NO: 1191755 - RNA, 19 nt, Homo sapiens
  misc_RNA (1)...(19): siRNA sense strand
gcaagaggaacaguaacag

SEQ ID NO: 1191756 - RNA, 19 nt, Homo sapiens
  misc_RNA (1)...(19): siRNA sense strand
cauggcaagaggaacagua

SEQ ID NO: 1191757 - RNA, 19 nt, Homo sapiens
  misc_RNA (1)...(19): siRNA sense strand
uggcugcugucauccuuca

SEQ ID NO: 1191758 - RNA, 19 nt, Homo sapiens
  misc_RNA (1)...(19): siRNA sense strand
gcacggagguuucacauca

SEQ ID NO: 1191759 - RNA, 19 nt, Homo sapiens
  misc_RNA (1)...(19): siRNA sense strand
gcacaaccauacuguuaag

SEQ ID NO: 1191760 - RNA, 19 nt, Homo sapiens
  misc_RNA (1)...(19): siRNA sense strand
ggaaagagugaauaugugu

SEQ ID NO: 1191761 - RNA, 19 nt, Homo sapiens
  misc_RNA (1)...(19): siRNA sense strand
cgaaacauacggccauaaa

SEQ ID NO: 1191762 - RNA, 19 nt, Homo sapiens
  misc_RNA (1)...(19): siRNA sense strand
ccgcacaaccauacuguua

SEQ ID NO: 1191763 - RNA, 19 nt, Homo sapiens
  misc_RNA (1)...(19): siRNA sense strand
gaaggcuccuggaaagagu

SEQ ID NO: 1191764 - RNA, 19 nt, Homo sapiens
  misc_RNA (1)...(19): siRNA sense strand
ggagguuucacaucauauu

SEQ ID NO: 1191765 - RNA, 19 nt, Homo sapiens
  misc_RNA (1)...(19): siRNA sense strand
agugcaagcugccaagaaa

SEQ ID NO: 1191766 - RNA, 19 nt, Homo sapiens
  misc_RNA (1)...(19): siRNA sense strand
guuaagcaguggaugaaag

SEQ ID NO: 1191767 - RNA, 19 nt, Homo sapiens
  misc_RNA (1)...(19): siRNA sense strand
gagguuucacaucauauuu

SEQ ID NO: 1191768 - RNA, 19 nt, Homo sapiens
  misc_RNA (1)...(19): siRNA sense strand
uggaaagagugaauaugug

SEQ ID NO: 1191769 - RNA, 19 nt, Homo sapiens
  misc_RNA (1)...(19): siRNA sense strand
ggcccuacaugccucagaa

SEQ ID NO: 1191770 - RNA, 19 nt, Homo sapiens
  misc_RNA (1)...(19): siRNA sense strand
acggagguuucacaucaua

SEQ ID NO: 1191771 - RNA, 19 nt, Homo sapiens
  misc_RNA (1)...(19): siRNA sense strand
gcugucauccuucauguca

SEQ ID NO: 1191772 - RNA, 19 nt, Homo sapiens
  misc_RNA (1)...(19): siRNA sense strand
gaaauguuugccacaggaa

SEQ ID NO: 1191773 - RNA, 19 nt, Homo sapiens
  misc_RNA (1)...(19): siRNA sense strand
cacgaaacauacggccaua

SEQ ID NO: 1191774 - RNA, 19 nt, Homo sapiens
  misc_RNA (1)...(19): siRNA sense strand
cacaucauauuuccagaag

SEQ ID NO: 1191775 - RNA, 19 nt, Homo sapiens
  misc_RNA (1)...(19): siRNA sense strand
ucacaucauauuuccagaa

SEQ ID NO: 1191776 - RNA, 19 nt, Homo sapiens
  misc_RNA (1)...(19): siRNA sense strand
gaaacauacggccauaaaa

SEQ ID NO: 1191777 - RNA, 19 nt, Homo sapiens
  misc_RNA (1)...(19): siRNA sense strand
ggcaagaggaacaguaaca

SEQ ID NO: 1191778 - RNA, 19 nt, Homo sapiens
  misc_RNA (1)...(19): siRNA sense strand
cuggaaagagugaauaugu

SEQ ID NO: 1191779 - RNA, 19 nt, Homo sapiens
  misc_RNA (1)...(19): siRNA sense strand
cccauugccuccagcuguu

SEQ ID NO: 1191780 - RNA, 19 nt, Homo sapiens
  misc_RNA (1)...(19): siRNA sense strand
gucaagcgcagaagaaucu

SEQ ID NO: 1191781 - RNA, 19 nt, Homo sapiens
  misc_RNA (1)...(19): siRNA sense strand
caugucaagcgcagaagaa

SEQ ID NO: 1191782 - RNA, 19 nt, Homo sapiens
  misc_RNA (1)...(19): siRNA sense strand
agagaggacucgccaucgu

SEQ ID NO: 1191783 - RNA, 19 nt, Homo sapiens
  misc_RNA (1)...(19): siRNA sense strand
ugucauccuucaugucaag

SEQ ID NO: 1191784 - RNA, 19 nt, Homo sapiens
  misc_RNA (1)...(19): siRNA sense strand
cgcacaaccauacuguuaa

SEQ ID NO: 1191785 - RNA, 19 nt, Homo sapiens
  misc_RNA (1)...(19): siRNA sense strand
gcaagaggaacaguaacag

SEQ ID NO: 1191786 - RNA, 19 nt, Homo sapiens
  misc_RNA (1)...(19): siRNA sense strand
cauggcaagaggaacagua

SEQ ID NO: 1191787 - RNA, 19 nt, Homo sapiens
  misc_RNA (1)...(19): siRNA sense strand
uggcugcugucauccuuca

SEQ ID NO: 1191788 - RNA, 19 nt, Homo sapiens
  misc_RNA (1)...(19): siRNA sense strand
gaaagcaacuggugauuua

SEQ ID NO: 1191789 - RNA, 19 nt, Homo sapiens
  misc_RNA (1)...(19): siRNA sense strand
gaacggagacgaugccuuu

SEQ ID NO: 1191790 - RNA, 19 nt, Homo sapiens
  misc_RNA (1)...(19): siRNA sense strand
ucaggaagaugacgaguaa

SEQ ID NO: 1191791 - RNA, 19 nt, Homo sapiens
  misc_RNA (1)...(19): siRNA sense strand
caagacaucuggacccaaa

SEQ ID NO: 1191792 - RNA, 19 nt, Homo sapiens
  misc_RNA (1)...(19): siRNA sense strand
gaugaaagccucggagaaa

SEQ ID NO: 1191793 - RNA, 19 nt, Homo sapiens
  misc_RNA (1)...(19): siRNA sense strand
uaggguugguucucaaaua

SEQ ID NO: 1191794 - RNA, 19 nt, Homo sapiens
  misc_RNA (1)...(19): siRNA sense strand
cggagacgaugccuuugua

SEQ ID NO: 1191795 - RNA, 19 nt, Homo sapiens
  misc_RNA (1)...(19): siRNA sense strand
gaucagcgacccucaggaa

SEQ ID NO: 1191796 - RNA, 19 nt, Homo sapiens
  misc_RNA (1)...(19): siRNA sense strand
gcagaggaaggaaaugauu

SEQ ID NO: 1191797 - RNA, 19 nt, Homo sapiens
  misc_RNA (1)...(19): siRNA sense strand
gaagaucacgcccgagaag

SEQ ID NO: 1191798 - RNA, 19 nt, Homo sapiens
  misc_RNA (1)...(19): siRNA sense strand
ccaccuuucaugcguaaua

SEQ ID NO: 1191799 - RNA, 19 nt, Homo sapiens
  misc_RNA (1)...(19): siRNA sense strand
ucaaauaccagagaagaug

SEQ ID NO: 1191800 - RNA, 19 nt, Homo sapiens
  misc_RNA (1)...(19): siRNA sense strand
ccacagagugcgugagaga

SEQ ID NO: 1191801 - RNA, 19 nt, Homo sapiens
  misc_RNA (1)...(19): siRNA sense strand
gaccuaggguugguucuca

SEQ ID NO: 1191802 - RNA, 19 nt, Homo sapiens
  misc_RNA (1)...(19): siRNA sense strand
ggccaugacuaaacuaggu

SEQ ID NO: 1191803 - RNA, 19 nt, Homo sapiens
  misc_RNA (1)...(19): siRNA sense strand
aguaugaggccaugacuaa

SEQ ID NO: 1191804 - RNA, 19 nt, Homo sapiens
  misc_RNA (1)...(19): siRNA sense strand
gaagggagugccagaagca

SEQ ID NO: 1191805 - RNA, 19 nt, Homo sapiens
  misc_RNA (1)...(19): siRNA sense strand
ggugauuuaugaagagauc

SEQ ID NO: 1191806 - RNA, 19 nt, Homo sapiens
  misc_RNA (1)...(19): siRNA sense strand
gagaaaaucaucuaugugu

SEQ ID NO: 1191807 - RNA, 19 nt, Homo sapiens
  misc_RNA (1)...(19): siRNA sense strand
gaaaguaugaggccaugac

SEQ ID NO: 1191808 - RNA, 19 nt, Homo sapiens
  misc_RNA (1)...(19): siRNA sense strand
agaaagcaacuggugauuu

SEQ ID NO: 1191809 - RNA, 19 nt, Homo sapiens
  misc_RNA (1)...(19): siRNA sense strand
ugagaagguuaacaagaca

SEQ ID NO: 1191810 - RNA, 19 nt, Homo sapiens
  misc_RNA (1)...(19): siRNA sense strand
caccuuucaugcguaauaa

SEQ ID NO: 1191811 - RNA, 19 nt, Homo sapiens
  misc_RNA (1)...(19): siRNA sense strand
gagaaagcaacuggugauu

SEQ ID NO: 1191812 - RNA, 19 nt, Homo sapiens
  misc_RNA (1)...(19): siRNA sense strand
gagaaagagugggaaaaga

SEQ ID NO: 1191813 - RNA, 19 nt, Homo sapiens
  misc_RNA (1)...(19): siRNA sense strand
cagcagaggaaggaaauga

SEQ ID NO: 1191814 - RNA, 19 nt, Homo sapiens
  misc_RNA (1)...(19): siRNA sense strand
cgagaagccagcagaggaa

SEQ ID NO: 1191815 - RNA, 19 nt, Homo sapiens
  misc_RNA (1)...(19): siRNA sense strand
aaacuaaauaccucugaga

SEQ ID NO: 1191816 - RNA, 19 nt, Homo sapiens
  misc_RNA (1)...(19): siRNA sense strand
gaagccagcagaggaagga

SEQ ID NO: 1191817 - RNA, 19 nt, Homo sapiens
  misc_RNA (1)...(19): siRNA sense strand
cagcgacccucaggaagau

SEQ ID NO: 1191818 - RNA, 19 nt, Homo sapiens
  misc_RNA (1)...(19): siRNA sense strand
auaaacgggucgcagacuu

SEQ ID NO: 1191819 - RNA, 19 nt, Homo sapiens
  misc_RNA (1)...(19): siRNA sense strand
caacuggugauuuaugaag

SEQ ID NO: 1191820 - RNA, 19 nt, Homo sapiens
  misc_RNA (1)...(19): siRNA sense strand
cugagaagguuaacaagac

SEQ ID NO: 1191821 - RNA, 19 nt, Homo sapiens
  misc_RNA (1)...(19): siRNA sense strand
ccucugagaagguuaacaa

SEQ ID NO: 1191822 - RNA, 19 nt, Homo sapiens
  misc_RNA (1)...(19): siRNA sense strand
acagagugcgugagagaaa

SEQ ID NO: 1191823 - RNA, 19 nt, Homo sapiens
  misc_RNA (1)...(19): siRNA sense strand
agcaacuggugauuuauga

SEQ ID NO: 1191824 - RNA, 19 nt, Homo sapiens
  misc_RNA (1)...(19): siRNA sense strand
gcaacuggugauuuaugaa

SEQ ID NO: 1191825 - RNA, 19 nt, Homo sapiens
  misc_RNA (1)...(19): siRNA sense strand
ucagcgacccucaggaaga

SEQ ID NO: 1191826 - RNA, 19 nt, Homo sapiens
  misc_RNA (1)...(19): siRNA sense strand
cggagaaaaucaucuaugu

SEQ ID NO: 1191827 - RNA, 19 nt, Homo sapiens
  misc_RNA (1)...(19): siRNA sense strand
uaaacgggucgcagacuuc

SEQ ID NO: 1191828 - RNA, 19 nt, Homo sapiens
  misc_RNA (1)...(19): siRNA sense strand
gaaagagugggaaaagaug

SEQ ID NO: 1191829 - RNA, 19 nt, Homo sapiens
  misc_RNA (1)...(19): siRNA sense strand
aggccacccucccaccuuu

SEQ ID NO: 1191830 - RNA, 19 nt, Homo sapiens
  misc_RNA (1)...(19): siRNA sense strand
gaaaacuaaauaccucuga

SEQ ID NO: 1191831 - RNA, 19 nt, Homo sapiens
  misc_RNA (1)...(19): siRNA sense strand
ggggaaugauuuugauaau

SEQ ID NO: 1191832 - RNA, 19 nt, Homo sapiens
  misc_RNA (1)...(19): siRNA sense strand
gggaaugauuuugauaaug

SEQ ID NO: 1191833 - RNA, 19 nt, Homo sapiens
  misc_RNA (1)...(19): siRNA sense strand
guaugaggccaugacuaaa

SEQ ID NO: 1191834 - RNA, 19 nt, Homo sapiens
  misc_RNA (1)...(19): siRNA sense strand
cagaggaaggaaaugauuc

SEQ ID NO: 1191835 - RNA, 19 nt, Homo sapiens
  misc_RNA (1)...(19): siRNA sense strand
gaaucagguugaacauccu

SEQ ID NO: 1191836 - RNA, 19 nt, Homo sapiens
  misc_RNA (1)...(19): siRNA sense strand
agagaaagcaacuggugau

SEQ ID NO: 1191837 - RNA, 19 nt, Homo sapiens
  misc_RNA (1)...(19): siRNA sense strand
ucugagaagguuaacaaga

SEQ ID NO: 1191838 - RNA, 19 nt, Homo sapiens
  misc_RNA (1)...(19): siRNA sense strand
cuucgaugauauugccaaa

SEQ ID NO: 1191839 - RNA, 19 nt, Homo sapiens
  misc_RNA (1)...(19): siRNA sense strand
cgaagaucacgcccgagaa

SEQ ID NO: 1191840 - RNA, 19 nt, Homo sapiens
  misc_RNA (1)...(19): siRNA sense strand
gaaagcaacuggugauuua

SEQ ID NO: 1191841 - RNA, 19 nt, Homo sapiens
  misc_RNA (1)...(19): siRNA sense strand
gaacggagacgaugccuuu

SEQ ID NO: 1191842 - RNA, 19 nt, Homo sapiens
  misc_RNA (1)...(19): siRNA sense strand
ucaggaagaugacgaguaa

SEQ ID NO: 1191843 - RNA, 19 nt, Homo sapiens
  misc_RNA (1)...(19): siRNA sense strand
caagacaucuggacccaaa

SEQ ID NO: 1191844 - RNA, 19 nt, Homo sapiens
  misc_RNA (1)...(19): siRNA sense strand
gaugaaagccucggagaaa

SEQ ID NO: 1191845 - RNA, 19 nt, Homo sapiens
  misc_RNA (1)...(19): siRNA sense strand
uaggguugguucucaaaua

SEQ ID NO: 1191846 - RNA, 19 nt, Homo sapiens
  misc_RNA (1)...(19): siRNA sense strand
cggagacgaugccuuugua

SEQ ID NO: 1191847 - RNA, 19 nt, Homo sapiens
  misc_RNA (1)...(19): siRNA sense strand
gaucagcgacccucaggaa

SEQ ID NO: 1191848 - RNA, 19 nt, Homo sapiens
  misc_RNA (1)...(19): siRNA sense strand
gcagaggaaggaaaugauu

SEQ ID NO: 1191849 - RNA, 19 nt, Homo sapiens
  misc_RNA (1)...(19): siRNA sense strand
gaagaucacgcccgagaag

SEQ ID NO: 1191850 - RNA, 19 nt, Homo sapiens
  misc_RNA (1)...(19): siRNA sense strand
ccaccuuucaugcguaaua

SEQ ID NO: 1191851 - RNA, 19 nt, Homo sapiens
  misc_RNA (1)...(19): siRNA sense strand
ucaaauaccagagaagaug

SEQ ID NO: 1191852 - RNA, 19 nt, Homo sapiens
  misc_RNA (1)...(19): siRNA sense strand
ccacagagugcgugagaga

SEQ ID NO: 1191853 - RNA, 19 nt, Homo sapiens
  misc_RNA (1)...(19): siRNA sense strand
gaccuaggguugguucuca

SEQ ID NO: 1191854 - RNA, 19 nt, Homo sapiens
  misc_RNA (1)...(19): siRNA sense strand
ggccaugacuaaacuaggu

SEQ ID NO: 1191855 - RNA, 19 nt, Homo sapiens
  misc_RNA (1)...(19): siRNA sense strand
aguaugaggccaugacuaa

SEQ ID NO: 1191856 - RNA, 19 nt, Homo sapiens
  misc_RNA (1)...(19): siRNA sense strand
gaagggagugccagaagca

SEQ ID NO: 1191857 - RNA, 19 nt, Homo sapiens
  misc_RNA (1)...(19): siRNA sense strand
ggugauuuaugaagagauc

SEQ ID NO: 1191858 - RNA, 19 nt, Homo sapiens
  misc_RNA (1)...(19): siRNA sense strand
gagaaaaucaucuaugugu

SEQ ID NO: 1191859 - RNA, 19 nt, Homo sapiens
  misc_RNA (1)...(19): siRNA sense strand
gaaaguaugaggccaugac

SEQ ID NO: 1191860 - RNA, 19 nt, Homo sapiens
  misc_RNA (1)...(19): siRNA sense strand
agaaagcaacuggugauuu

SEQ ID NO: 1191861 - RNA, 19 nt, Homo sapiens
  misc_RNA (1)...(19): siRNA sense strand
ugagaagguuaacaagaca

SEQ ID NO: 1191862 - RNA, 19 nt, Homo sapiens
  misc_RNA (1)...(19): siRNA sense strand
caccuuucaugcguaauaa

SEQ ID NO: 1191863 - RNA, 19 nt, Homo sapiens
  misc_RNA (1)...(19): siRNA sense strand
gagaaagcaacuggugauu

SEQ ID NO: 1191864 - RNA, 19 nt, Homo sapiens
  misc_RNA (1)...(19): siRNA sense strand
gagaaagagugggaaaaga

SEQ ID NO: 1191865 - RNA, 19 nt, Homo sapiens
  misc_RNA (1)...(19): siRNA sense strand
cagcagaggaaggaaauga

SEQ ID NO: 1191866 - RNA, 19 nt, Homo sapiens
  misc_RNA (1)...(19): siRNA sense strand
cgagaagccagcagaggaa

SEQ ID NO: 1191867 - RNA, 19 nt, Homo sapiens
  misc_RNA (1)...(19): siRNA sense strand
aaacuaaauaccucugaga

SEQ ID NO: 1191868 - RNA, 19 nt, Homo sapiens
  misc_RNA (1)...(19): siRNA sense strand
gaagccagcagaggaagga

SEQ ID NO: 1191869 - RNA, 19 nt, Homo sapiens
  misc_RNA (1)...(19): siRNA sense strand
cagcgacccucaggaagau

SEQ ID NO: 1191870 - RNA, 19 nt, Homo sapiens
  misc_RNA (1)...(19): siRNA sense strand
auaaacgggucgcagacuu

SEQ ID NO: 1191871 - RNA, 19 nt, Homo sapiens
  misc_RNA (1)...(19): siRNA sense strand
caacuggugauuuaugaag

SEQ ID NO: 1191872 - RNA, 19 nt, Homo sapiens
  misc_RNA (1)...(19): siRNA sense strand
cugagaagguuaacaagac

SEQ ID NO: 1191873 - RNA, 19 nt, Homo sapiens
  misc_RNA (1)...(19): siRNA sense strand
ccucugagaagguuaacaa

SEQ ID NO: 1191874 - RNA, 19 nt, Homo sapiens
  misc_RNA (1)...(19): siRNA sense strand
acagagugcgugagagaaa

SEQ ID NO: 1191875 - RNA, 19 nt, Homo sapiens
  misc_RNA (1)...(19): siRNA sense strand
agcaacuggugauuuauga

SEQ ID NO: 1191876 - RNA, 19 nt, Homo sapiens
  misc_RNA (1)...(19): siRNA sense strand
gcaacuggugauuuaugaa

SEQ ID NO: 1191877 - RNA, 19 nt, Homo sapiens
  misc_RNA (1)...(19): siRNA sense strand
ucagcgacccucaggaaga

SEQ ID NO: 1191878 - RNA, 19 nt, Homo sapiens
  misc_RNA (1)...(19): siRNA sense strand
cggagaaaaucaucuaugu

SEQ ID NO: 1191879 - RNA, 19 nt, Homo sapiens
  misc_RNA (1)...(19): siRNA sense strand
uaaacgggucgcagacuuc

SEQ ID NO: 1191880 - RNA, 19 nt, Homo sapiens
  misc_RNA (1)...(19): siRNA sense strand
gaaagagugggaaaagaug

SEQ ID NO: 1191881 - RNA, 19 nt, Homo sapiens
  misc_RNA (1)...(19): siRNA sense strand
aggccacccucccaccuuu

SEQ ID NO: 1191882 - RNA, 19 nt, Homo sapiens
  misc_RNA (1)...(19): siRNA sense strand
gaaaacuaaauaccucuga

SEQ ID NO: 1191883 - RNA, 19 nt, Homo sapiens
  misc_RNA (1)...(19): siRNA sense strand
ggggaaugauuuugauaau

SEQ ID NO: 1191884 - RNA, 19 nt, Homo sapiens
  misc_RNA (1)...(19): siRNA sense strand
gggaaugauuuugauaaug

SEQ ID NO: 1191885 - RNA, 19 nt, Homo sapiens
  misc_RNA (1)...(19): siRNA sense strand
guaugaggccaugacuaaa

SEQ ID NO: 1191886 - RNA, 19 nt, Homo sapiens
  misc_RNA (1)...(19): siRNA sense strand
cagaggaaggaaaugauuc

SEQ ID NO: 1191887 - RNA, 19 nt, Homo sapiens
  misc_RNA (1)...(19): siRNA sense strand
gaaucagguugaacauccu

SEQ ID NO: 1191888 - RNA, 19 nt, Homo sapiens
  misc_RNA (1)...(19): siRNA sense strand
agagaaagcaacuggugau

SEQ ID NO: 1191889 - RNA, 19 nt, Homo sapiens
  misc_RNA (1)...(19): siRNA sense strand
ucugagaagguuaacaaga

SEQ ID NO: 1191890 - RNA, 19 nt, Homo sapiens
  misc_RNA (1)...(19): siRNA sense strand
cuucgaugauauugccaaa

SEQ ID NO: 1191891 - RNA, 19 nt, Homo sapiens
  misc_RNA (1)...(19): siRNA sense strand
cgaagaucacgcccgagaa

SEQ ID NO: 1191892 - RNA, 19 nt, Homo sapiens
  misc_RNA (1)...(19): siRNA sense strand
ggaaauauauucagaguca

SEQ ID NO: 1191893 - RNA, 19 nt, Homo sapiens
  misc_RNA (1)...(19): siRNA sense strand
gcagagacauugaaucaga

SEQ ID NO: 1191894 - RNA, 19 nt, Homo sapiens
  misc_RNA (1)...(19): siRNA sense strand
ccaaugugcuggaagauga

SEQ ID NO: 1191895 - RNA, 19 nt, Homo sapiens
  misc_RNA (1)...(19): siRNA sense strand
gaaacuccauguugccaau

SEQ ID NO: 1191896 - RNA, 19 nt, Homo sapiens
  misc_RNA (1)...(19): siRNA sense strand
gaggaaauauauucagagu

SEQ ID NO: 1191897 - RNA, 19 nt, Homo sapiens
  misc_RNA (1)...(19): siRNA sense strand
uuaaggaucucgaggaagu

SEQ ID NO: 1191898 - RNA, 19 nt, Homo sapiens
  misc_RNA (1)...(19): siRNA sense strand
cugauuugcuggacucuuu

SEQ ID NO: 1191899 - RNA, 19 nt, Homo sapiens
  misc_RNA (1)...(19): siRNA sense strand
gaaggaaggauggcagaga

SEQ ID NO: 1191900 - RNA, 19 nt, Homo sapiens
  misc_RNA (1)...(19): siRNA sense strand
gaaggauggcagagacauu

SEQ ID NO: 1191901 - RNA, 19 nt, Homo sapiens
  misc_RNA (1)...(19): siRNA sense strand
aaucagaaacuccauguug

SEQ ID NO: 1191902 - RNA, 19 nt, Homo sapiens
  misc_RNA (1)...(19): siRNA sense strand
cagagacauugaaucagaa

SEQ ID NO: 1191903 - RNA, 19 nt, Homo sapiens
  misc_RNA (1)...(19): siRNA sense strand
cuaccuaccucacgucuac

SEQ ID NO: 1191904 - RNA, 19 nt, Homo sapiens
  misc_RNA (1)...(19): siRNA sense strand
cgacuccguuugaggaaau

SEQ ID NO: 1191905 - RNA, 19 nt, Homo sapiens
  misc_RNA (1)...(19): siRNA sense strand
ggaguugcaaccugauuug

SEQ ID NO: 1191906 - RNA, 19 nt, Homo sapiens
  misc_RNA (1)...(19): siRNA sense strand
uuacccagaugccacaaug

SEQ ID NO: 1191907 - RNA, 19 nt, Homo sapiens
  misc_RNA (1)...(19): siRNA sense strand
agucagguguuccuuccua

SEQ ID NO: 1191908 - RNA, 19 nt, Homo sapiens
  misc_RNA (1)...(19): siRNA sense strand
uggcagagacauugaauca

SEQ ID NO: 1191909 - RNA, 19 nt, Homo sapiens
  misc_RNA (1)...(19): siRNA sense strand
ggacccacgcagggaguua

SEQ ID NO: 1191910 - RNA, 19 nt, Homo sapiens
  misc_RNA (1)...(19): siRNA sense strand
gcuggacucuuuggguuca

SEQ ID NO: 1191911 - RNA, 19 nt, Homo sapiens
  misc_RNA (1)...(19): siRNA sense strand
gacauugaaucagaaacuc

SEQ ID NO: 1191912 - RNA, 19 nt, Homo sapiens
  misc_RNA (1)...(19): siRNA sense strand
aguuaaggaucucgaggaa

SEQ ID NO: 1191913 - RNA, 19 nt, Homo sapiens
  misc_RNA (1)...(19): siRNA sense strand
gucagguguuccuuccuaa

SEQ ID NO: 1191914 - RNA, 19 nt, Homo sapiens
  misc_RNA (1)...(19): siRNA sense strand
gaaucagaaacuccauguu

SEQ ID NO: 1191915 - RNA, 19 nt, Homo sapiens
  misc_RNA (1)...(19): siRNA sense strand
gcgacuccguuugaggaaa

SEQ ID NO: 1191916 - RNA, 19 nt, Homo sapiens
  misc_RNA (1)...(19): siRNA sense strand
ggauggcagagacauugaa

SEQ ID NO: 1191917 - RNA, 19 nt, Homo sapiens
  misc_RNA (1)...(19): siRNA sense strand
gcagggaguuaaggaucuc

SEQ ID NO: 1191918 - RNA, 19 nt, Homo sapiens
  misc_RNA (1)...(19): siRNA sense strand
gauggcagagacauugaau

SEQ ID NO: 1191919 - RNA, 19 nt, Homo sapiens
  misc_RNA (1)...(19): siRNA sense strand
ccacgcagggaguuaagga

SEQ ID NO: 1191920 - RNA, 19 nt, Homo sapiens
  misc_RNA (1)...(19): siRNA sense strand
ugaaucagaaacuccaugu

SEQ ID NO: 1191921 - RNA, 19 nt, Homo sapiens
  misc_RNA (1)...(19): siRNA sense strand
gguuauggcaagcccuuug

SEQ ID NO: 1191922 - RNA, 19 nt, Homo sapiens
  misc_RNA (1)...(19): siRNA sense strand
uacacucuacuccugcuua

SEQ ID NO: 1191923 - RNA, 19 nt, Homo sapiens
  misc_RNA (1)...(19): siRNA sense strand
uugccaaugugcuggaaga

SEQ ID NO: 1191924 - RNA, 19 nt, Homo sapiens
  misc_RNA (1)...(19): siRNA sense strand
guuauggcaagcccuuuga

SEQ ID NO: 1191925 - RNA, 19 nt, Homo sapiens
  misc_RNA (1)...(19): siRNA sense strand
ggaaggauggcagagacau

SEQ ID NO: 1191926 - RNA, 19 nt, Homo sapiens
  misc_RNA (1)...(19): siRNA sense strand
gacccacgcagggaguuaa

SEQ ID NO: 1191927 - RNA, 19 nt, Homo sapiens
  misc_RNA (1)...(19): siRNA sense strand
ggaaauauauucagaguca

SEQ ID NO: 1191928 - RNA, 19 nt, Homo sapiens
  misc_RNA (1)...(19): siRNA sense strand
gcagagacauugaaucaga

SEQ ID NO: 1191929 - RNA, 19 nt, Homo sapiens
  misc_RNA (1)...(19): siRNA sense strand
ccaaugugcuggaagauga

SEQ ID NO: 1191930 - RNA, 19 nt, Homo sapiens
  misc_RNA (1)...(19): siRNA sense strand
gaaacuccauguugccaau

SEQ ID NO: 1191931 - RNA, 19 nt, Homo sapiens
  misc_RNA (1)...(19): siRNA sense strand
gaggaaauauauucagagu

SEQ ID NO: 1191932 - RNA, 19 nt, Homo sapiens
  misc_RNA (1)...(19): siRNA sense strand
uuaaggaucucgaggaagu

SEQ ID NO: 1191933 - RNA, 19 nt, Homo sapiens
  misc_RNA (1)...(19): siRNA sense strand
cugauuugcuggacucuuu

SEQ ID NO: 1191934 - RNA, 19 nt, Homo sapiens
  misc_RNA (1)...(19): siRNA sense strand
gaaggaaggauggcagaga

SEQ ID NO: 1191935 - RNA, 19 nt, Homo sapiens
  misc_RNA (1)...(19): siRNA sense strand
gaaggauggcagagacauu

SEQ ID NO: 1191936 - RNA, 19 nt, Homo sapiens
  misc_RNA (1)...(19): siRNA sense strand
aaucagaaacuccauguug

SEQ ID NO: 1191937 - RNA, 19 nt, Homo sapiens
  misc_RNA (1)...(19): siRNA sense strand
cagagacauugaaucagaa

SEQ ID NO: 1191938 - RNA, 19 nt, Homo sapiens
  misc_RNA (1)...(19): siRNA sense strand
cuaccuaccucacgucuac

SEQ ID NO: 1191939 - RNA, 19 nt, Homo sapiens
  misc_RNA (1)...(19): siRNA sense strand
cgacuccguuugaggaaau

SEQ ID NO: 1191940 - RNA, 19 nt, Homo sapiens
  misc_RNA (1)...(19): siRNA sense strand
ggaguugcaaccugauuug

SEQ ID NO: 1191941 - RNA, 19 nt, Homo sapiens
  misc_RNA (1)...(19): siRNA sense strand
uuacccagaugccacaaug

SEQ ID NO: 1191942 - RNA, 19 nt, Homo sapiens
  misc_RNA (1)...(19): siRNA sense strand
agucagguguuccuuccua

SEQ ID NO: 1191943 - RNA, 19 nt, Homo sapiens
  misc_RNA (1)...(19): siRNA sense strand
uggcagagacauugaauca

SEQ ID NO: 1191944 - RNA, 19 nt, Homo sapiens
  misc_RNA (1)...(19): siRNA sense strand
ggacccacgcagggaguua

SEQ ID NO: 1191945 - RNA, 19 nt, Homo sapiens
  misc_RNA (1)...(19): siRNA sense strand
gcuggacucuuuggguuca

SEQ ID NO: 1191946 - RNA, 19 nt, Homo sapiens
  misc_RNA (1)...(19): siRNA sense strand
gacauugaaucagaaacuc

SEQ ID NO: 1191947 - RNA, 19 nt, Homo sapiens
  misc_RNA (1)...(19): siRNA sense strand
aguuaaggaucucgaggaa

SEQ ID NO: 1191948 - RNA, 19 nt, Homo sapiens
  misc_RNA (1)...(19): siRNA sense strand
gucagguguuccuuccuaa

SEQ ID NO: 1191949 - RNA, 19 nt, Homo sapiens
  misc_RNA (1)...(19): siRNA sense strand
gaaucagaaacuccauguu

SEQ ID NO: 1191950 - RNA, 19 nt, Homo sapiens
  misc_RNA (1)...(19): siRNA sense strand
gcgacuccguuugaggaaa

SEQ ID NO: 1191951 - RNA, 19 nt, Homo sapiens
  misc_RNA (1)...(19): siRNA sense strand
ggauggcagagacauugaa

SEQ ID NO: 1191952 - RNA, 19 nt, Homo sapiens
  misc_RNA (1)...(19): siRNA sense strand
gcagggaguuaaggaucuc

SEQ ID NO: 1191953 - RNA, 19 nt, Homo sapiens
  misc_RNA (1)...(19): siRNA sense strand
gauggcagagacauugaau

SEQ ID NO: 1191954 - RNA, 19 nt, Homo sapiens
  misc_RNA (1)...(19): siRNA sense strand
ccacgcagggaguuaagga

SEQ ID NO: 1191955 - RNA, 19 nt, Homo sapiens
  misc_RNA (1)...(19): siRNA sense strand
ugaaucagaaacuccaugu

SEQ ID NO: 1191956 - RNA, 19 nt, Homo sapiens
  misc_RNA (1)...(19): siRNA sense strand
gguuauggcaagcccuuug

SEQ ID NO: 1191957 - RNA, 19 nt, Homo sapiens
  misc_RNA (1)...(19): siRNA sense strand
uacacucuacuccugcuua

SEQ ID NO: 1191958 - RNA, 19 nt, Homo sapiens
  misc_RNA (1)...(19): siRNA sense strand
uugccaaugugcuggaaga

SEQ ID NO: 1191959 - RNA, 19 nt, Homo sapiens
  misc_RNA (1)...(19): siRNA sense strand
guuauggcaagcccuuuga

SEQ ID NO: 1191960 - RNA, 19 nt, Homo sapiens
  misc_RNA (1)...(19): siRNA sense strand
ggaaggauggcagagacau

SEQ ID NO: 1191961 - RNA, 19 nt, Homo sapiens
  misc_RNA (1)...(19): siRNA sense strand
gacccacgcagggaguuaa

SEQ ID NO: 1191962 - RNA, 19 nt, Homo sapiens
  misc_RNA (1)...(19): siRNA sense strand
gaaccaaguuuguauaaag

SEQ ID NO: 1191963 - RNA, 19 nt, Homo sapiens
  misc_RNA (1)...(19): siRNA sense strand
gggauuaaauggaauggaa

SEQ ID NO: 1191964 - RNA, 19 nt, Homo sapiens
  misc_RNA (1)...(19): siRNA sense strand
ggucagacaucgcuggaaa

SEQ ID NO: 1191965 - RNA, 19 nt, Homo sapiens
  misc_RNA (1)...(19): siRNA sense strand
gggaagaccucgucaccau

SEQ ID NO: 1191966 - RNA, 19 nt, Homo sapiens
  misc_RNA (1)...(19): siRNA sense strand
cccaaaggcuucaauacuu

SEQ ID NO: 1191967 - RNA, 19 nt, Homo sapiens
  misc_RNA (1)...(19): siRNA sense strand
gaauugaaccaaguuugua

SEQ ID NO: 1191968 - RNA, 19 nt, Homo sapiens
  misc_RNA (1)...(19): siRNA sense strand
ccaaaggcuucaauacuuc

SEQ ID NO: 1191969 - RNA, 19 nt, Homo sapiens
  misc_RNA (1)...(19): siRNA sense strand
caacggagguagucuuguc

SEQ ID NO: 1191970 - RNA, 19 nt, Homo sapiens
  misc_RNA (1)...(19): siRNA sense strand
ggaauugaaccaaguuugu

SEQ ID NO: 1191971 - RNA, 19 nt, Homo sapiens
  misc_RNA (1)...(19): siRNA sense strand
uaaaggagacaucugguau

SEQ ID NO: 1191972 - RNA, 19 nt, Homo sapiens
  misc_RNA (1)...(19): siRNA sense strand
cuacauagacacguacuuu

SEQ ID NO: 1191973 - RNA, 19 nt, Homo sapiens
  misc_RNA (1)...(19): siRNA sense strand
ggauguagccagcaacugu

SEQ ID NO: 1191974 - RNA, 19 nt, Homo sapiens
  misc_RNA (1)...(19): siRNA sense strand
acacguacuuugacacaga

SEQ ID NO: 1191975 - RNA, 19 nt, Homo sapiens
  misc_RNA (1)...(19): siRNA sense strand
acagagaggucuagcacau

SEQ ID NO: 1191976 - RNA, 19 nt, Homo sapiens
  misc_RNA (1)...(19): siRNA sense strand
acccugaggucgucaauga

SEQ ID NO: 1191977 - RNA, 19 nt, Homo sapiens
  misc_RNA (1)...(19): siRNA sense strand
guacuaccagauagaaauu

SEQ ID NO: 1191978 - RNA, 19 nt, Homo sapiens
  misc_RNA (1)...(19): siRNA sense strand
ugucuuggguggaauugaa

SEQ ID NO: 1191979 - RNA, 19 nt, Homo sapiens
  misc_RNA (1)...(19): siRNA sense strand
gcugcagugucugaaauuu

SEQ ID NO: 1191980 - RNA, 19 nt, Homo sapiens
  misc_RNA (1)...(19): siRNA sense strand
aaaggagacaucugguaua

SEQ ID NO: 1191981 - RNA, 19 nt, Homo sapiens
  misc_RNA (1)...(19): siRNA sense strand
gaauacuuggccuagcuua

SEQ ID NO: 1191982 - RNA, 19 nt, Homo sapiens
  misc_RNA (1)...(19): siRNA sense strand
gagaguauaacgcagacaa

SEQ ID NO: 1191983 - RNA, 19 nt, Homo sapiens
  misc_RNA (1)...(19): siRNA sense strand
caacuucuuggccauggua

SEQ ID NO: 1191984 - RNA, 19 nt, Homo sapiens
  misc_RNA (1)...(19): siRNA sense strand
gugcugcagugucugaaau

SEQ ID NO: 1191985 - RNA, 19 nt, Homo sapiens
  misc_RNA (1)...(19): siRNA sense strand
acauagacacguacuuuga

SEQ ID NO: 1191986 - RNA, 19 nt, Homo sapiens
  misc_RNA (1)...(19): siRNA sense strand
cagaggauguagccagcaa

SEQ ID NO: 1191987 - RNA, 19 nt, Homo sapiens
  misc_RNA (1)...(19): siRNA sense strand
gaagcuacagauucucguu

SEQ ID NO: 1191988 - RNA, 19 nt, Homo sapiens
  misc_RNA (1)...(19): siRNA sense strand
caagggcuuugacgucaca

SEQ ID NO: 1191989 - RNA, 19 nt, Homo sapiens
  misc_RNA (1)...(19): siRNA sense strand
gcuacuaccuggagaugcu

SEQ ID NO: 1191990 - RNA, 19 nt, Homo sapiens
  misc_RNA (1)...(19): siRNA sense strand
ugucaacauugccacuauu

SEQ ID NO: 1191991 - RNA, 19 nt, Homo sapiens
  misc_RNA (1)...(19): siRNA sense strand
agagaggucuagcacauac

SEQ ID NO: 1191992 - RNA, 19 nt, Homo sapiens
  misc_RNA (1)...(19): siRNA sense strand
ccgcagaagcuacagauuc

SEQ ID NO: 1191993 - RNA, 19 nt, Homo sapiens
  misc_RNA (1)...(19): siRNA sense strand
ugccugggauuaaauggaa

SEQ ID NO: 1191994 - RNA, 19 nt, Homo sapiens
  misc_RNA (1)...(19): siRNA sense strand
gagccauccuccuugucuu

SEQ ID NO: 1191995 - RNA, 19 nt, Homo sapiens
  misc_RNA (1)...(19): siRNA sense strand
cagagaggucuagcacaua

SEQ ID NO: 1191996 - RNA, 19 nt, Homo sapiens
  misc_RNA (1)...(19): siRNA sense strand
cggagguagucuugucuug

SEQ ID NO: 1191997 - RNA, 19 nt, Homo sapiens
  misc_RNA (1)...(19): siRNA sense strand
gucaacauugccacuauuu

SEQ ID NO: 1191998 - RNA, 19 nt, Homo sapiens
  misc_RNA (1)...(19): siRNA sense strand
cauccuccuugucuuaauc

SEQ ID NO: 1191999 - RNA, 19 nt, Homo sapiens
  misc_RNA (1)...(19): siRNA sense strand
acuccuacauagacacgua

SEQ ID NO: 1192000 - RNA, 19 nt, Homo sapiens
  misc_RNA (1)...(19): siRNA sense strand
auaaaggagacaucuggua

SEQ ID NO: 1192001 - RNA, 19 nt, Homo sapiens
  misc_RNA (1)...(19): siRNA sense strand
acagugaaguacacacaag

SEQ ID NO: 1192002 - RNA, 19 nt, Homo sapiens
  misc_RNA (1)...(19): siRNA sense strand
aaggagacaucugguauac

SEQ ID NO: 1192003 - RNA, 19 nt, Homo sapiens
  misc_RNA (1)...(19): siRNA sense strand
ggaauacuuggccuagcuu

SEQ ID NO: 1192004 - RNA, 19 nt, Homo sapiens
  misc_RNA (1)...(19): siRNA sense strand
gccaagccaucaaguucuc

SEQ ID NO: 1192005 - RNA, 19 nt, Homo sapiens
  misc_RNA (1)...(19): siRNA sense strand
ggauuaaauggaauggaau

SEQ ID NO: 1192006 - RNA, 19 nt, Homo sapiens
  misc_RNA (1)...(19): siRNA sense strand
ggguggaauugaaccaagu

SEQ ID NO: 1192007 - RNA, 19 nt, Homo sapiens
  misc_RNA (1)...(19): siRNA sense strand
gugaaguacacacaaggaa

SEQ ID NO: 1192008 - RNA, 19 nt, Homo sapiens
  misc_RNA (1)...(19): siRNA sense strand
ucagacaucgcuggaaaug

SEQ ID NO: 1192009 - RNA, 19 nt, Homo sapiens
  misc_RNA (1)...(19): siRNA sense strand
cuauuaaggaagaguggua

SEQ ID NO: 1192010 - RNA, 19 nt, Homo sapiens
  misc_RNA (1)...(19): siRNA sense strand
aaauggaauggaauacuug

SEQ ID NO: 1192011 - RNA, 19 nt, Homo sapiens
  misc_RNA (1)...(19): siRNA sense strand
cugaggucgucaaugauga

SEQ ID NO: 1192012 - RNA, 19 nt, Homo sapiens
  misc_RNA (1)...(19): siRNA sense strand
agucuugucuuggguggaa

SEQ ID NO: 1192013 - RNA, 19 nt, Homo sapiens
  misc_RNA (1)...(19): siRNA sense strand
gaccaacggagguagucuu

SEQ ID NO: 1192014 - RNA, 19 nt, Homo sapiens
  misc_RNA (1)...(19): siRNA sense strand
uuaaggaagagugguacua

SEQ ID NO: 1192015 - RNA, 19 nt, Homo sapiens
  misc_RNA (1)...(19): siRNA sense strand
ucaaugaugaguccucucu

SEQ ID NO: 1192016 - RNA, 19 nt, Homo sapiens
  misc_RNA (1)...(19): siRNA sense strand
uggaauacuuggccuagcu

SEQ ID NO: 1192017 - RNA, 19 nt, Homo sapiens
  misc_RNA (1)...(19): siRNA sense strand
aaccaaguuuguauaaagg

SEQ ID NO: 1192018 - RNA, 19 nt, Homo sapiens
  misc_RNA (1)...(19): siRNA sense strand
auacuuggccuagcuuaug

SEQ ID NO: 1192019 - RNA, 19 nt, Homo sapiens
  misc_RNA (1)...(19): siRNA sense strand
auagacacguacuuugaca

SEQ ID NO: 1192020 - RNA, 19 nt, Homo sapiens
  misc_RNA (1)...(19): siRNA sense strand
uaaggaagagugguacuac

SEQ ID NO: 1192021 - RNA, 19 nt, Homo sapiens
  misc_RNA (1)...(19): siRNA sense strand
gaaccaaguuuguauaaag

SEQ ID NO: 1192022 - RNA, 19 nt, Homo sapiens
  misc_RNA (1)...(19): siRNA sense strand
gggauuaaauggaauggaa

SEQ ID NO: 1192023 - RNA, 19 nt, Homo sapiens
  misc_RNA (1)...(19): siRNA sense strand
ggucagacaucgcuggaaa

SEQ ID NO: 1192024 - RNA, 19 nt, Homo sapiens
  misc_RNA (1)...(19): siRNA sense strand
gggaagaccucgucaccau

SEQ ID NO: 1192025 - RNA, 19 nt, Homo sapiens
  misc_RNA (1)...(19): siRNA sense strand
cccaaaggcuucaauacuu

SEQ ID NO: 1192026 - RNA, 19 nt, Homo sapiens
  misc_RNA (1)...(19): siRNA sense strand
gaauugaaccaaguuugua

SEQ ID NO: 1192027 - RNA, 19 nt, Homo sapiens
  misc_RNA (1)...(19): siRNA sense strand
ccaaaggcuucaauacuuc

SEQ ID NO: 1192028 - RNA, 19 nt, Homo sapiens
  misc_RNA (1)...(19): siRNA sense strand
caacggagguagucuuguc

SEQ ID NO: 1192029 - RNA, 19 nt, Homo sapiens
  misc_RNA (1)...(19): siRNA sense strand
ggaauugaaccaaguuugu

SEQ ID NO: 1192030 - RNA, 19 nt, Homo sapiens
  misc_RNA (1)...(19): siRNA sense strand
uaaaggagacaucugguau

SEQ ID NO: 1192031 - RNA, 19 nt, Homo sapiens
  misc_RNA (1)...(19): siRNA sense strand
cuacauagacacguacuuu

SEQ ID NO: 1192032 - RNA, 19 nt, Homo sapiens
  misc_RNA (1)...(19): siRNA sense strand
ggauguagccagcaacugu

SEQ ID NO: 1192033 - RNA, 19 nt, Homo sapiens
  misc_RNA (1)...(19): siRNA sense strand
acacguacuuugacacaga

SEQ ID NO: 1192034 - RNA, 19 nt, Homo sapiens
  misc_RNA (1)...(19): siRNA sense strand
acagagaggucuagcacau

SEQ ID NO: 1192035 - RNA, 19 nt, Homo sapiens
  misc_RNA (1)...(19): siRNA sense strand
acccugaggucgucaauga

SEQ ID NO: 1192036 - RNA, 19 nt, Homo sapiens
  misc_RNA (1)...(19): siRNA sense strand
guacuaccagauagaaauu

SEQ ID NO: 1192037 - RNA, 19 nt, Homo sapiens
  misc_RNA (1)...(19): siRNA sense strand
ugucuuggguggaauugaa

SEQ ID NO: 1192038 - RNA, 19 nt, Homo sapiens
  misc_RNA (1)...(19): siRNA sense strand
gcugcagugucugaaauuu

SEQ ID NO: 1192039 - RNA, 19 nt, Homo sapiens
  misc_RNA (1)...(19): siRNA sense strand
aaaggagacaucugguaua

SEQ ID NO: 1192040 - RNA, 19 nt, Homo sapiens
  misc_RNA (1)...(19): siRNA sense strand
gaauacuuggccuagcuua

SEQ ID NO: 1192041 - RNA, 19 nt, Homo sapiens
  misc_RNA (1)...(19): siRNA sense strand
gagaguauaacgcagacaa

SEQ ID NO: 1192042 - RNA, 19 nt, Homo sapiens
  misc_RNA (1)...(19): siRNA sense strand
caacuucuuggccauggua

SEQ ID NO: 1192043 - RNA, 19 nt, Homo sapiens
  misc_RNA (1)...(19): siRNA sense strand
gugcugcagugucugaaau

SEQ ID NO: 1192044 - RNA, 19 nt, Homo sapiens
  misc_RNA (1)...(19): siRNA sense strand
acauagacacguacuuuga

SEQ ID NO: 1192045 - RNA, 19 nt, Homo sapiens
  misc_RNA (1)...(19): siRNA sense strand
cagaggauguagccagcaa

SEQ ID NO: 1192046 - RNA, 19 nt, Homo sapiens
  misc_RNA (1)...(19): siRNA sense strand
gaagcuacagauucucguu

SEQ ID NO: 1192047 - RNA, 19 nt, Homo sapiens
  misc_RNA (1)...(19): siRNA sense strand
caagggcuuugacgucaca

SEQ ID NO: 1192048 - RNA, 19 nt, Homo sapiens
  misc_RNA (1)...(19): siRNA sense strand
gcuacuaccuggagaugcu

SEQ ID NO: 1192049 - RNA, 19 nt, Homo sapiens
  misc_RNA (1)...(19): siRNA sense strand
ugucaacauugccacuauu

SEQ ID NO: 1192050 - RNA, 19 nt, Homo sapiens
  misc_RNA (1)...(19): siRNA sense strand
agagaggucuagcacauac

SEQ ID NO: 1192051 - RNA, 19 nt, Homo sapiens
  misc_RNA (1)...(19): siRNA sense strand
ccgcagaagcuacagauuc

SEQ ID NO: 1192052 - RNA, 19 nt, Homo sapiens
  misc_RNA (1)...(19): siRNA sense strand
ugccugggauuaaauggaa

SEQ ID NO: 1192053 - RNA, 19 nt, Homo sapiens
  misc_RNA (1)...(19): siRNA sense strand
gagccauccuccuugucuu

SEQ ID NO: 1192054 - RNA, 19 nt, Homo sapiens
  misc_RNA (1)...(19): siRNA sense strand
cagagaggucuagcacaua

SEQ ID NO: 1192055 - RNA, 19 nt, Homo sapiens
  misc_RNA (1)...(19): siRNA sense strand
cggagguagucuugucuug

SEQ ID NO: 1192056 - RNA, 19 nt, Homo sapiens
  misc_RNA (1)...(19): siRNA sense strand
gucaacauugccacuauuu

SEQ ID NO: 1192057 - RNA, 19 nt, Homo sapiens
  misc_RNA (1)...(19): siRNA sense strand
cauccuccuugucuuaauc

SEQ ID NO: 1192058 - RNA, 19 nt, Homo sapiens
  misc_RNA (1)...(19): siRNA sense strand
acuccuacauagacacgua

SEQ ID NO: 1192059 - RNA, 19 nt, Homo sapiens
  misc_RNA (1)...(19): siRNA sense strand
auaaaggagacaucuggua

SEQ ID NO: 1192060 - RNA, 19 nt, Homo sapiens
  misc_RNA (1)...(19): siRNA sense strand
acagugaaguacacacaag

SEQ ID NO: 1192061 - RNA, 19 nt, Homo sapiens
  misc_RNA (1)...(19): siRNA sense strand
aaggagacaucugguauac

SEQ ID NO: 1192062 - RNA, 19 nt, Homo sapiens
  misc_RNA (1)...(19): siRNA sense strand
ggaauacuuggccuagcuu

SEQ ID NO: 1192063 - RNA, 19 nt, Homo sapiens
  misc_RNA (1)...(19): siRNA sense strand
gccaagccaucaaguucuc

SEQ ID NO: 1192064 - RNA, 19 nt, Homo sapiens
  misc_RNA (1)...(19): siRNA sense strand
ggauuaaauggaauggaau

SEQ ID NO: 1192065 - RNA, 19 nt, Homo sapiens
  misc_RNA (1)...(19): siRNA sense strand
ggguggaauugaaccaagu

SEQ ID NO: 1192066 - RNA, 19 nt, Homo sapiens
  misc_RNA (1)...(19): siRNA sense strand
gugaaguacacacaaggaa

SEQ ID NO: 1192067 - RNA, 19 nt, Homo sapiens
  misc_RNA (1)...(19): siRNA sense strand
ucagacaucgcuggaaaug

SEQ ID NO: 1192068 - RNA, 19 nt, Homo sapiens
  misc_RNA (1)...(19): siRNA sense strand
cuauuaaggaagaguggua

SEQ ID NO: 1192069 - RNA, 19 nt, Homo sapiens
  misc_RNA (1)...(19): siRNA sense strand
aaauggaauggaauacuug

SEQ ID NO: 1192070 - RNA, 19 nt, Homo sapiens
  misc_RNA (1)...(19): siRNA sense strand
cugaggucgucaaugauga

SEQ ID NO: 1192071 - RNA, 19 nt, Homo sapiens
  misc_RNA (1)...(19): siRNA sense strand
agucuugucuuggguggaa

SEQ ID NO: 1192072 - RNA, 19 nt, Homo sapiens
  misc_RNA (1)...(19): siRNA sense strand
gaccaacggagguagucuu

SEQ ID NO: 1192073 - RNA, 19 nt, Homo sapiens
  misc_RNA (1)...(19): siRNA sense strand
uuaaggaagagugguacua

SEQ ID NO: 1192074 - RNA, 19 nt, Homo sapiens
  misc_RNA (1)...(19): siRNA sense strand
ucaaugaugaguccucucu

SEQ ID NO: 1192075 - RNA, 19 nt, Homo sapiens
  misc_RNA (1)...(19): siRNA sense strand
uggaauacuuggccuagcu

SEQ ID NO: 1192076 - RNA, 19 nt, Homo sapiens
  misc_RNA (1)...(19): siRNA sense strand
aaccaaguuuguauaaagg

SEQ ID NO: 1192077 - RNA, 19 nt, Homo sapiens
  misc_RNA (1)...(19): siRNA sense strand
auacuuggccuagcuuaug

SEQ ID NO: 1192078 - RNA, 19 nt, Homo sapiens
  misc_RNA (1)...(19): siRNA sense strand
auagacacguacuuugaca

SEQ ID NO: 1192079 - RNA, 19 nt, Homo sapiens
  misc_RNA (1)...(19): siRNA sense strand
uaaggaagagugguacuac

SEQ ID NO: 1192080 - RNA, 19 nt, Homo sapiens
  misc_RNA (1)...(19): siRNA sense strand
gaaccaaguuuguauaaag

SEQ ID NO: 1192081 - RNA, 19 nt, Homo sapiens
  misc_RNA (1)...(19): siRNA sense strand
gggauuaaauggaauggaa

SEQ ID NO: 1192082 - RNA, 19 nt, Homo sapiens
  misc_RNA (1)...(19): siRNA sense strand
gggaagaccucgucaccau

SEQ ID NO: 1192083 - RNA, 19 nt, Homo sapiens
  misc_RNA (1)...(19): siRNA sense strand
cccaaaggcuucaauacuu

SEQ ID NO: 1192084 - RNA, 19 nt, Homo sapiens
  misc_RNA (1)...(19): siRNA sense strand
gaauugaaccaaguuugua

SEQ ID NO: 1192085 - RNA, 19 nt, Homo sapiens
  misc_RNA (1)...(19): siRNA sense strand
ccaaaggcuucaauacuuc

SEQ ID NO: 1192086 - RNA, 19 nt, Homo sapiens
  misc_RNA (1)...(19): siRNA sense strand
caacggagguagucuuguc

SEQ ID NO: 1192087 - RNA, 19 nt, Homo sapiens
  misc_RNA (1)...(19): siRNA sense strand
ggaauugaaccaaguuugu

SEQ ID NO: 1192088 - RNA, 19 nt, Homo sapiens
  misc_RNA (1)...(19): siRNA sense strand
uaaaggagacaucugguau

SEQ ID NO: 1192089 - RNA, 19 nt, Homo sapiens
  misc_RNA (1)...(19): siRNA sense strand
cuacauagacacguacuuu

SEQ ID NO: 1192090 - RNA, 19 nt, Homo sapiens
  misc_RNA (1)...(19): siRNA sense strand
acacguacuuugacacaga

SEQ ID NO: 1192091 - RNA, 19 nt, Homo sapiens
  misc_RNA (1)...(19): siRNA sense strand
acagagaggucuagcacau

SEQ ID NO: 1192092 - RNA, 19 nt, Homo sapiens
  misc_RNA (1)...(19): siRNA sense strand
guacuaccagauagaaauu

SEQ ID NO: 1192093 - RNA, 19 nt, Homo sapiens
  misc_RNA (1)...(19): siRNA sense strand
ugucuuggguggaauugaa

SEQ ID NO: 1192094 - RNA, 19 nt, Homo sapiens
  misc_RNA (1)...(19): siRNA sense strand
gcugcagugucugaaauuu

SEQ ID NO: 1192095 - RNA, 19 nt, Homo sapiens
  misc_RNA (1)...(19): siRNA sense strand
aaaggagacaucugguaua

SEQ ID NO: 1192096 - RNA, 19 nt, Homo sapiens
  misc_RNA (1)...(19): siRNA sense strand
gaauacuuggccuagcuua

SEQ ID NO: 1192097 - RNA, 19 nt, Homo sapiens
  misc_RNA (1)...(19): siRNA sense strand
gagaguauaacgcagacaa

SEQ ID NO: 1192098 - RNA, 19 nt, Homo sapiens
  misc_RNA (1)...(19): siRNA sense strand
caacuucuuggccauggua

SEQ ID NO: 1192099 - RNA, 19 nt, Homo sapiens
  misc_RNA (1)...(19): siRNA sense strand
gugcugcagugucugaaau

SEQ ID NO: 1192100 - RNA, 19 nt, Homo sapiens
  misc_RNA (1)...(19): siRNA sense strand
acauagacacguacuuuga

SEQ ID NO: 1192101 - RNA, 19 nt, Homo sapiens
  misc_RNA (1)...(19): siRNA sense strand
gaagcuacagauucucguu

SEQ ID NO: 1192102 - RNA, 19 nt, Homo sapiens
  misc_RNA (1)...(19): siRNA sense strand
caagggcuuugacgucaca

SEQ ID NO: 1192103 - RNA, 19 nt, Homo sapiens
  misc_RNA (1)...(19): siRNA sense strand
gcuacuaccuggagaugcu

SEQ ID NO: 1192104 - RNA, 19 nt, Homo sapiens
  misc_RNA (1)...(19): siRNA sense strand
ugucaacauugccacuauu

SEQ ID NO: 1192105 - RNA, 19 nt, Homo sapiens
  misc_RNA (1)...(19): siRNA sense strand
agagaggucuagcacauac

SEQ ID NO: 1192106 - RNA, 19 nt, Homo sapiens
  misc_RNA (1)...(19): siRNA sense strand
ccgcagaagcuacagauuc

SEQ ID NO: 1192107 - RNA, 19 nt, Homo sapiens
  misc_RNA (1)...(19): siRNA sense strand
ugccugggauuaaauggaa

SEQ ID NO: 1192108 - RNA, 19 nt, Homo sapiens
  misc_RNA (1)...(19): siRNA sense strand
cagagaggucuagcacaua

SEQ ID NO: 1192109 - RNA, 19 nt, Homo sapiens
  misc_RNA (1)...(19): siRNA sense strand
cggagguagucuugucuug

SEQ ID NO: 1192110 - RNA, 19 nt, Homo sapiens
  misc_RNA (1)...(19): siRNA sense strand
acuccuacauagacacgua

SEQ ID NO: 1192111 - RNA, 19 nt, Homo sapiens
  misc_RNA (1)...(19): siRNA sense strand
auaaaggagacaucuggua

SEQ ID NO: 1192112 - RNA, 19 nt, Homo sapiens
  misc_RNA (1)...(19): siRNA sense strand
gucaacauugccacuauuu

SEQ ID NO: 1192113 - RNA, 19 nt, Homo sapiens
  misc_RNA (1)...(19): siRNA sense strand
acagugaaguacacacaag

SEQ ID NO: 1192114 - RNA, 19 nt, Homo sapiens
  misc_RNA (1)...(19): siRNA sense strand
aaggagacaucugguauac

SEQ ID NO: 1192115 - RNA, 19 nt, Homo sapiens
  misc_RNA (1)...(19): siRNA sense strand
ggaauacuuggccuagcuu

SEQ ID NO: 1192116 - RNA, 19 nt, Homo sapiens
  misc_RNA (1)...(19): siRNA sense strand
gccaagccaucaaguucuc

SEQ ID NO: 1192117 - RNA, 19 nt, Homo sapiens
  misc_RNA (1)...(19): siRNA sense strand
ggauuaaauggaauggaau

SEQ ID NO: 1192118 - RNA, 19 nt, Homo sapiens
  misc_RNA (1)...(19): siRNA sense strand
ggguggaauugaaccaagu

SEQ ID NO: 1192119 - RNA, 19 nt, Homo sapiens
  misc_RNA (1)...(19): siRNA sense strand
gugaaguacacacaaggaa

SEQ ID NO: 1192120 - RNA, 19 nt, Homo sapiens
  misc_RNA (1)...(19): siRNA sense strand
cuauuaaggaagaguggua

SEQ ID NO: 1192121 - RNA, 19 nt, Homo sapiens
  misc_RNA (1)...(19): siRNA sense strand
aaauggaauggaauacuug

SEQ ID NO: 1192122 - RNA, 19 nt, Homo sapiens
  misc_RNA (1)...(19): siRNA sense strand
agucuugucuuggguggaa

SEQ ID NO: 1192123 - RNA, 19 nt, Homo sapiens
  misc_RNA (1)...(19): siRNA sense strand
gaccaacggagguagucuu

SEQ ID NO: 1192124 - RNA, 19 nt, Homo sapiens
  misc_RNA (1)...(19): siRNA sense strand
uuaaggaagagugguacua

SEQ ID NO: 1192125 - RNA, 19 nt, Homo sapiens
  misc_RNA (1)...(19): siRNA sense strand
uggaauacuuggccuagcu

SEQ ID NO: 1192126 - RNA, 19 nt, Homo sapiens
  misc_RNA (1)...(19): siRNA sense strand
aaccaaguuuguauaaagg

SEQ ID NO: 1192127 - RNA, 19 nt, Homo sapiens
  misc_RNA (1)...(19): siRNA sense strand
auacuuggccuagcuuaug

SEQ ID NO: 1192128 - RNA, 19 nt, Homo sapiens
  misc_RNA (1)...(19): siRNA sense strand
auagacacguacuuugaca

SEQ ID NO: 1192129 - RNA, 19 nt, Homo sapiens
  misc_RNA (1)...(19): siRNA sense strand
uaaggaagagugguacuac

SEQ ID NO: 1192130 - RNA, 19 nt, Homo sapiens
  misc_RNA (1)...(19): siRNA sense strand
uuggagcccucaacauuua

SEQ ID NO: 1192131 - RNA, 19 nt, Homo sapiens
  misc_RNA (1)...(19): siRNA sense strand
ucagaaaggucuacaccau

SEQ ID NO: 1192132 - RNA, 19 nt, Homo sapiens
  misc_RNA (1)...(19): siRNA sense strand
gacaucaucuauaucuuca

SEQ ID NO: 1192133 - RNA, 19 nt, Homo sapiens
  misc_RNA (1)...(19): siRNA sense strand
caugagcucuucaccacuu

SEQ ID NO: 1192134 - RNA, 19 nt, Homo sapiens
  misc_RNA (1)...(19): siRNA sense strand
gcugagcccugaggaguau

SEQ ID NO: 1192135 - RNA, 19 nt, Homo sapiens
  misc_RNA (1)...(19): siRNA sense strand
gcaggugcauggcgagaag

SEQ ID NO: 1192136 - RNA, 19 nt, Homo sapiens
  misc_RNA (1)...(19): siRNA sense strand
gugcuucucaugacucuuu

SEQ ID NO: 1192137 - RNA, 19 nt, Homo sapiens
  misc_RNA (1)...(19): siRNA sense strand
ucguggcucucuuuacuuu

SEQ ID NO: 1192138 - RNA, 19 nt, Homo sapiens
  misc_RNA (1)...(19): siRNA sense strand
caacauuuaccuagacauc

SEQ ID NO: 1192139 - RNA, 19 nt, Homo sapiens
  misc_RNA (1)...(19): siRNA sense strand
ccuccuacccuuccaauau

SEQ ID NO: 1192140 - RNA, 19 nt, Homo sapiens
  misc_RNA (1)...(19): siRNA sense strand
cgucgagucuuugucagaa

SEQ ID NO: 1192141 - RNA, 19 nt, Homo sapiens
  misc_RNA (1)...(19): siRNA sense strand
acugggagcggguguauuu

SEQ ID NO: 1192142 - RNA, 19 nt, Homo sapiens
  misc_RNA (1)...(19): siRNA sense strand
gacccuggcuugcuguucu

SEQ ID NO: 1192143 - RNA, 19 nt, Homo sapiens
  misc_RNA (1)...(19): siRNA sense strand
gaaagcucuccguggcuaa

SEQ ID NO: 1192144 - RNA, 19 nt, Homo sapiens
  misc_RNA (1)...(19): siRNA sense strand
gcacugggagcggguguau

SEQ ID NO: 1192145 - RNA, 19 nt, Homo sapiens
  misc_RNA (1)...(19): siRNA sense strand
ucaucuauaucuucaccuu

SEQ ID NO: 1192146 - RNA, 19 nt, Homo sapiens
  misc_RNA (1)...(19): siRNA sense strand
agacaucaucuauaucuuc

SEQ ID NO: 1192147 - RNA, 19 nt, Homo sapiens
  misc_RNA (1)...(19): siRNA sense strand
ugucguggcucucuuuacu

SEQ ID NO: 1192148 - RNA, 19 nt, Homo sapiens
  misc_RNA (1)...(19): siRNA sense strand
acaccauccugcugauuca

SEQ ID NO: 1192149 - RNA, 19 nt, Homo sapiens
  misc_RNA (1)...(19): siRNA sense strand
cauuguuccuggcacuuga

SEQ ID NO: 1192150 - RNA, 19 nt, Homo sapiens
  misc_RNA (1)...(19): siRNA sense strand
ccagcuaugacaacgguuu

SEQ ID NO: 1192151 - RNA, 19 nt, Homo sapiens
  misc_RNA (1)...(19): siRNA sense strand
acauuuaccuagacaucau

SEQ ID NO: 1192152 - RNA, 19 nt, Homo sapiens
  misc_RNA (1)...(19): siRNA sense strand
cuccuacccuuccaauaug

SEQ ID NO: 1192153 - RNA, 19 nt, Homo sapiens
  misc_RNA (1)...(19): siRNA sense strand
cacccuagcugggccuaug

SEQ ID NO: 1192154 - RNA, 19 nt, Homo sapiens
  misc_RNA (1)...(19): siRNA sense strand
ucucaugacucuuuucuuc

SEQ ID NO: 1192155 - RNA, 19 nt, Homo sapiens
  misc_RNA (1)...(19): siRNA sense strand
guggcucucuuuacuuucu

SEQ ID NO: 1192156 - RNA, 19 nt, Homo sapiens
  misc_RNA (1)...(19): siRNA sense strand
cauccuggccauccuccua

SEQ ID NO: 1192157 - RNA, 19 nt, Homo sapiens
  misc_RNA (1)...(19): siRNA sense strand
guucgucgagucuuuguca

SEQ ID NO: 1192158 - RNA, 19 nt, Homo sapiens
  misc_RNA (1)...(19): siRNA sense strand
ccucaacauuuaccuagac

SEQ ID NO: 1192159 - RNA, 19 nt, Homo sapiens
  misc_RNA (1)...(19): siRNA sense strand
gcucuucgugcuucucaug

SEQ ID NO: 1192160 - RNA, 19 nt, Homo sapiens
  misc_RNA (1)...(19): siRNA sense strand
gcugucguggcucucuuua

SEQ ID NO: 1192161 - RNA, 19 nt, Homo sapiens
  misc_RNA (1)...(19): siRNA sense strand
cauccuaugcuguguucuu

SEQ ID NO: 1192162 - RNA, 19 nt, Homo sapiens
  misc_RNA (1)...(19): siRNA sense strand
gucgagucuuugucagaaa

SEQ ID NO: 1192163 - RNA, 19 nt, Homo sapiens
  misc_RNA (1)...(19): siRNA sense strand
uaugcuguguucuuugcaa

SEQ ID NO: 1192164 - RNA, 19 nt, Homo sapiens
  misc_RNA (1)...(19): siRNA sense strand
ccuaugcuguguucuuugc

SEQ ID NO: 1192165 - RNA, 19 nt, Homo sapiens
  misc_RNA (1)...(19): siRNA sense strand
gagcucuucaccacuuuca

SEQ ID NO: 1192166 - RNA, 19 nt, Homo sapiens
  misc_RNA (1)...(19): siRNA sense strand
uuuggagcccucaacauuu

SEQ ID NO: 1192167 - RNA, 19 nt, Homo sapiens
  misc_RNA (1)...(19): siRNA sense strand
caacauuccaucacuaaua

SEQ ID NO: 1192168 - RNA, 19 nt, Homo sapiens
  misc_RNA (1)...(19): siRNA sense strand
gcagggcccuugcuuagaa

SEQ ID NO: 1192169 - RNA, 19 nt, Homo sapiens
  misc_RNA (1)...(19): siRNA sense strand
gauccgagaugacccagaa

SEQ ID NO: 1192170 - RNA, 19 nt, Homo sapiens
  misc_RNA (1)...(19): siRNA sense strand
aaacaguacuucagugaga

SEQ ID NO: 1192171 - RNA, 19 nt, Homo sapiens
  misc_RNA (1)...(19): siRNA sense strand
ggaacgggcugcuggugau

SEQ ID NO: 1192172 - RNA, 19 nt, Homo sapiens
  misc_RNA (1)...(19): siRNA sense strand
ggccagaacuucgagauca

SEQ ID NO: 1192173 - RNA, 19 nt, Homo sapiens
  misc_RNA (1)...(19): siRNA sense strand
gcacaggaagcucaaacuu

SEQ ID NO: 1192174 - RNA, 19 nt, Homo sapiens
  misc_RNA (1)...(19): siRNA sense strand
gaaaaucauugccaaguac

SEQ ID NO: 1192175 - RNA, 19 nt, Homo sapiens
  misc_RNA (1)...(19): siRNA sense strand
cacaggaagcucaaacuuu

SEQ ID NO: 1192176 - RNA, 19 nt, Homo sapiens
  misc_RNA (1)...(19): siRNA sense strand
ucaaacaguacuucaguga

SEQ ID NO: 1192177 - RNA, 19 nt, Homo sapiens
  misc_RNA (1)...(19): siRNA sense strand
ggaagguugugugcaggaa

SEQ ID NO: 1192178 - RNA, 19 nt, Homo sapiens
  misc_RNA (1)...(19): siRNA sense strand
gaaacaaugggcagucucu

SEQ ID NO: 1192179 - RNA, 19 nt, Homo sapiens
  misc_RNA (1)...(19): siRNA sense strand
gggaggaugacaugacuga

SEQ ID NO: 1192180 - RNA, 19 nt, Homo sapiens
  misc_RNA (1)...(19): siRNA sense strand
ggguggaggugcugaacga

SEQ ID NO: 1192181 - RNA, 19 nt, Homo sapiens
  misc_RNA (1)...(19): siRNA sense strand
auaccgaauuuccaacauu

SEQ ID NO: 1192182 - RNA, 19 nt, Homo sapiens
  misc_RNA (1)...(19): siRNA sense strand
ccaaguacaaagccaaaga

SEQ ID NO: 1192183 - RNA, 19 nt, Homo sapiens
  misc_RNA (1)...(19): siRNA sense strand
gcugcugggucucuacuuc

SEQ ID NO: 1192184 - RNA, 19 nt, Homo sapiens
  misc_RNA (1)...(19): siRNA sense strand
ucaaccggcuguacggaau

SEQ ID NO: 1192185 - RNA, 19 nt, Homo sapiens
  misc_RNA (1)...(19): siRNA sense strand
uggaggccuuugugaauga

SEQ ID NO: 1192186 - RNA, 19 nt, Homo sapiens
  misc_RNA (1)...(19): siRNA sense strand
guggaggccuuugugaaug

SEQ ID NO: 1192187 - RNA, 19 nt, Homo sapiens
  misc_RNA (1)...(19): siRNA sense strand
ucacgugggcgucuauuuc

SEQ ID NO: 1192188 - RNA, 19 nt, Homo sapiens
  misc_RNA (1)...(19): siRNA sense strand
acaaggagaagcacaggaa

SEQ ID NO: 1192189 - RNA, 19 nt, Homo sapiens
  misc_RNA (1)...(19): siRNA sense strand
cugacucccugcgagauua

SEQ ID NO: 1192190 - RNA, 19 nt, Homo sapiens
  misc_RNA (1)...(19): siRNA sense strand
agaaaaucauugccaagua

SEQ ID NO: 1192191 - RNA, 19 nt, Homo sapiens
  misc_RNA (1)...(19): siRNA sense strand
ggaggcaggccagaacuuc

SEQ ID NO: 1192192 - RNA, 19 nt, Homo sapiens
  misc_RNA (1)...(19): siRNA sense strand
guggaauccuaccggaaga

SEQ ID NO: 1192193 - RNA, 19 nt, Homo sapiens
  misc_RNA (1)...(19): siRNA sense strand
gccgauagcugagaaaauc

SEQ ID NO: 1192194 - RNA, 19 nt, Homo sapiens
  misc_RNA (1)...(19): siRNA sense strand
ucaaaccggagcccaucua

SEQ ID NO: 1192195 - RNA, 19 nt, Homo sapiens
  misc_RNA (1)...(19): siRNA sense strand
ugauggacguggaggagau

SEQ ID NO: 1192196 - RNA, 19 nt, Homo sapiens
  misc_RNA (1)...(19): siRNA sense strand
ggcccuugcuuagaaacaa

SEQ ID NO: 1192197 - RNA, 19 nt, Homo sapiens
  misc_RNA (1)...(19): siRNA sense strand
ggucucacgugggcgucua

SEQ ID NO: 1192198 - RNA, 19 nt, Homo sapiens
  misc_RNA (1)...(19): siRNA sense strand
gccagaacuucgagaucau

SEQ ID NO: 1192199 - RNA, 19 nt, Homo sapiens
  misc_RNA (1)...(19): siRNA sense strand
gaggaugacaugacugacu

SEQ ID NO: 1192200 - RNA, 19 nt, Homo sapiens
  misc_RNA (1)...(19): siRNA sense strand
uagaaacaaugggcagucu

SEQ ID NO: 1192201 - RNA, 19 nt, Homo sapiens
  misc_RNA (1)...(19): siRNA sense strand
cguggaggccuuugugaau

SEQ ID NO: 1192202 - RNA, 19 nt, Homo sapiens
  misc_RNA (1)...(19): siRNA sense strand
cagggcccuugcuuagaaa

SEQ ID NO: 1192203 - RNA, 19 nt, Homo sapiens
  misc_RNA (1)...(19): siRNA sense strand
gcccuugcuuagaaacaau

SEQ ID NO: 1192204 - RNA, 19 nt, Homo sapiens
  misc_RNA (1)...(19): siRNA sense strand
caaggaggcaggccagaac

SEQ ID NO: 1192205 - RNA, 19 nt, Homo sapiens
  misc_RNA (1)...(19): siRNA sense strand
aaucauugccaaguacaaa

SEQ ID NO: 1192206 - RNA, 19 nt, Homo sapiens
  misc_RNA (1)...(19): siRNA sense strand
cggccaagcagcugauuca

SEQ ID NO: 1192207 - RNA, 19 nt, Homo sapiens
  misc_RNA (1)...(19): siRNA sense strand
ggacuucgugcgggacaug

SEQ ID NO: 1192208 - RNA, 19 nt, Homo sapiens
  misc_RNA (1)...(19): siRNA sense strand
ucaccauccuggacauguc

SEQ ID NO: 1192209 - RNA, 19 nt, Homo sapiens
  misc_RNA (1)...(19): siRNA sense strand
uccaacauuccaucacuaa

SEQ ID NO: 1192210 - RNA, 19 nt, Homo sapiens
  misc_RNA (1)...(19): siRNA sense strand
caaguacaaagccaaagag

SEQ ID NO: 1192211 - RNA, 19 nt, Homo sapiens
  misc_RNA (1)...(19): siRNA sense strand
gaauccuaccggaagauca

SEQ ID NO: 1192212 - RNA, 19 nt, Homo sapiens
  misc_RNA (1)...(19): siRNA sense strand
ucaaggaggcaggccagaa

SEQ ID NO: 1192213 - RNA, 19 nt, Homo sapiens
  misc_RNA (1)...(19): siRNA sense strand
gaugugagcuaccugaaga

SEQ ID NO: 1192214 - RNA, 19 nt, Homo sapiens
  misc_RNA (1)...(19): siRNA sense strand
gggagagccugguucugua

SEQ ID NO: 1192215 - RNA, 19 nt, Homo sapiens
  misc_RNA (1)...(19): siRNA sense strand
gcgacaacaucaucaguga

SEQ ID NO: 1192216 - RNA, 19 nt, Homo sapiens
  misc_RNA (1)...(19): siRNA sense strand
ccacggaccucaugaaacu

SEQ ID NO: 1192217 - RNA, 19 nt, Homo sapiens
  misc_RNA (1)...(19): siRNA sense strand
agaggaagcuggagaacga

SEQ ID NO: 1192218 - RNA, 19 nt, Homo sapiens
  misc_RNA (1)...(19): siRNA sense strand
ugagcuaccugaagaagau

SEQ ID NO: 1192219 - RNA, 19 nt, Homo sapiens
  misc_RNA (1)...(19): siRNA sense strand
cgagauccgcagacauuua

SEQ ID NO: 1192220 - RNA, 19 nt, Homo sapiens
  misc_RNA (1)...(19): siRNA sense strand
gaaacuggaccaugaagag

SEQ ID NO: 1192221 - RNA, 19 nt, Homo sapiens
  misc_RNA (1)...(19): siRNA sense strand
gacgugagccugccacaga

SEQ ID NO: 1192222 - RNA, 19 nt, Homo sapiens
  misc_RNA (1)...(19): siRNA sense strand
ccgcagacauuuagccaau

SEQ ID NO: 1192223 - RNA, 19 nt, Homo sapiens
  misc_RNA (1)...(19): siRNA sense strand
gccgagauccgcagacauu

SEQ ID NO: 1192224 - RNA, 19 nt, Homo sapiens
  misc_RNA (1)...(19): siRNA sense strand
ggaaaguccugggugacau

SEQ ID NO: 1192225 - RNA, 19 nt, Homo sapiens
  misc_RNA (1)...(19): siRNA sense strand
caacaucaucagugacuau

SEQ ID NO: 1192226 - RNA, 19 nt, Homo sapiens
  misc_RNA (1)...(19): siRNA sense strand
caagaaauacugggaagau

SEQ ID NO: 1192227 - RNA, 19 nt, Homo sapiens
  misc_RNA (1)...(19): siRNA sense strand
ccagaucauugacuaugug

SEQ ID NO: 1192228 - RNA, 19 nt, Homo sapiens
  misc_RNA (1)...(19): siRNA sense strand
caaccugcaguccuucuuu

SEQ ID NO: 1192229 - RNA, 19 nt, Homo sapiens
  misc_RNA (1)...(19): siRNA sense strand
ggaggugcccgucaucauc

SEQ ID NO: 1192230 - RNA, 19 nt, Homo sapiens
  misc_RNA (1)...(19): siRNA sense strand
gagauccgcagacauuuag

SEQ ID NO: 1192231 - RNA, 19 nt, Homo sapiens
  misc_RNA (1)...(19): siRNA sense strand
ggcccaaccugcaguccuu

SEQ ID NO: 1192232 - RNA, 19 nt, Homo sapiens
  misc_RNA (1)...(19): siRNA sense strand
gcccuaccuuucuaaacaa

SEQ ID NO: 1192233 - RNA, 19 nt, Homo sapiens
  misc_RNA (1)...(19): siRNA sense strand
aggcggagcuggagaagag

SEQ ID NO: 1192234 - RNA, 19 nt, Homo sapiens
  misc_RNA (1)...(19): siRNA sense strand
cuacugguaccucaagaaa

SEQ ID NO: 1192235 - RNA, 19 nt, Homo sapiens
  misc_RNA (1)...(19): siRNA sense strand
gaucuuggagcaugaugau

SEQ ID NO: 1192236 - RNA, 19 nt, Homo sapiens
  misc_RNA (1)...(19): siRNA sense strand
cugcaguccuucuuugaga

SEQ ID NO: 1192237 - RNA, 19 nt, Homo sapiens
  misc_RNA (1)...(19): siRNA sense strand
gaccagaucauugacuaug

SEQ ID NO: 1192238 - RNA, 19 nt, Homo sapiens
  misc_RNA (1)...(19): siRNA sense strand
gaaaguccugggugacauc

SEQ ID NO: 1192239 - RNA, 19 nt, Homo sapiens
  misc_RNA (1)...(19): siRNA sense strand
aagaaauacugggaagaug

SEQ ID NO: 1192240 - RNA, 19 nt, Homo sapiens
  misc_RNA (1)...(19): siRNA sense strand
caaggagcccugguucaug

SEQ ID NO: 1192241 - RNA, 19 nt, Homo sapiens
  misc_RNA (1)...(19): siRNA sense strand
caccacggaccucaugaaa

SEQ ID NO: 1192242 - RNA, 19 nt, Homo sapiens
  misc_RNA (1)...(19): siRNA sense strand
agcccuaccuuucuaaaca

SEQ ID NO: 1192243 - RNA, 19 nt, Homo sapiens
  misc_RNA (1)...(19): siRNA sense strand
gacaacaucaucagugacu

SEQ ID NO: 1192244 - RNA, 19 nt, Homo sapiens
  misc_RNA (1)...(19): siRNA sense strand
agaagaggaagcuggagaa

SEQ ID NO: 1192245 - RNA, 19 nt, Homo sapiens
  misc_RNA (1)...(19): siRNA sense strand
aaccugcaguccuucuuug

SEQ ID NO: 1192246 - RNA, 19 nt, Homo sapiens
  misc_RNA (1)...(19): siRNA sense strand
gcuacuuugccuacuggua

SEQ ID NO: 1192247 - RNA, 19 nt, Homo sapiens
  misc_RNA (1)...(19): siRNA sense strand
uccgagcccuaccuuucua

SEQ ID NO: 1192248 - RNA, 19 nt, Homo sapiens
  misc_RNA (1)...(19): siRNA sense strand
ggugggaugggcuacuuug

SEQ ID NO: 1192249 - RNA, 19 nt, Homo sapiens
  misc_RNA (1)...(19): siRNA sense strand
cagugacuaugaccagauc

SEQ ID NO: 1192250 - RNA, 19 nt, Homo sapiens
  misc_RNA (1)...(19): siRNA sense strand
ccaccacggaccucaugaa

SEQ ID NO: 1192251 - RNA, 19 nt, Homo sapiens
  misc_RNA (1)...(19): siRNA sense strand
ugaaacuggaccaugaaga

SEQ ID NO: 1192252 - RNA, 19 nt, Homo sapiens
  misc_RNA (1)...(19): siRNA sense strand
gggaaacucuuaccuuugu

SEQ ID NO: 1192253 - RNA, 19 nt, Homo sapiens
  misc_RNA (1)...(19): siRNA sense strand
gaagucagcagccuccaua

SEQ ID NO: 1192254 - RNA, 19 nt, Homo sapiens
  misc_RNA (1)...(19): siRNA sense strand
cagaugacuuugauuauga

SEQ ID NO: 1192255 - RNA, 19 nt, Homo sapiens
  misc_RNA (1)...(19): siRNA sense strand
caagugggaugcagaugaa

SEQ ID NO: 1192256 - RNA, 19 nt, Homo sapiens
  misc_RNA (1)...(19): siRNA sense strand
ggaugcagaugaagauguu

SEQ ID NO: 1192257 - RNA, 19 nt, Homo sapiens
  misc_RNA (1)...(19): siRNA sense strand
uaacucagaugacuuugau

SEQ ID NO: 1192258 - RNA, 19 nt, Homo sapiens
  misc_RNA (1)...(19): siRNA sense strand
gcaagugggaugcagauga

SEQ ID NO: 1192259 - RNA, 19 nt, Homo sapiens
  misc_RNA (1)...(19): siRNA sense strand
guggguacuugaagauuaa

SEQ ID NO: 1192260 - RNA, 19 nt, Homo sapiens
  misc_RNA (1)...(19): siRNA sense strand
ucagaugacuuugauuaug

SEQ ID NO: 1192261 - RNA, 19 nt, Homo sapiens
  misc_RNA (1)...(19): siRNA sense strand
uguggguacuugaagauua

SEQ ID NO: 1192262 - RNA, 19 nt, Homo sapiens
  misc_RNA (1)...(19): siRNA sense strand
augaagagcugaagaaugg

SEQ ID NO: 1192263 - RNA, 19 nt, Homo sapiens
  misc_RNA (1)...(19): siRNA sense strand
gugcacccaucuaugaauu

SEQ ID NO: 1192264 - RNA, 19 nt, Homo sapiens
  misc_RNA (1)...(19): siRNA sense strand
acgggaaacucuuaccuuu

SEQ ID NO: 1192265 - RNA, 19 nt, Homo sapiens
  misc_RNA (1)...(19): siRNA sense strand
ccauagagggcuacuacua

SEQ ID NO: 1192266 - RNA, 19 nt, Homo sapiens
  misc_RNA (1)...(19): siRNA sense strand
acucagaugacuuugauua

SEQ ID NO: 1192267 - RNA, 19 nt, Homo sapiens
  misc_RNA (1)...(19): siRNA sense strand
uaucagucccucaaucuaa

SEQ ID NO: 1192268 - RNA, 19 nt, Homo sapiens
  misc_RNA (1)...(19): siRNA sense strand
ugacuuugauuaugaagag

SEQ ID NO: 1192269 - RNA, 19 nt, Homo sapiens
  misc_RNA (1)...(19): siRNA sense strand
gaacacagugcacccaucu

SEQ ID NO: 1192270 - RNA, 19 nt, Homo sapiens
  misc_RNA (1)...(19): siRNA sense strand
ugaagauguugaucggaaa

SEQ ID NO: 1192271 - RNA, 19 nt, Homo sapiens
  misc_RNA (1)...(19): siRNA sense strand
gcugaagaauggagacuac

SEQ ID NO: 1192272 - RNA, 19 nt, Homo sapiens
  misc_RNA (1)...(19): siRNA sense strand
gagggcuacuacuaccaua

SEQ ID NO: 1192273 - RNA, 19 nt, Homo sapiens
  misc_RNA (1)...(19): siRNA sense strand
acagugcacccaucuauga

SEQ ID NO: 1192274 - RNA, 19 nt, Homo sapiens
  misc_RNA (1)...(19): siRNA sense strand
gaggaguauccaacccuua

SEQ ID NO: 1192275 - RNA, 19 nt, Homo sapiens
  misc_RNA (1)...(19): siRNA sense strand
gagguggaaggaacaguuu

SEQ ID NO: 1192276 - RNA, 19 nt, Homo sapiens
  misc_RNA (1)...(19): siRNA sense strand
ggagaaauaaucagcaaaa

SEQ ID NO: 1192277 - RNA, 19 nt, Homo sapiens
  misc_RNA (1)...(19): siRNA sense strand
cuacagcggcuccaaguuc

SEQ ID NO: 1192278 - RNA, 19 nt, Homo sapiens
  misc_RNA (1)...(19): siRNA sense strand
aaggagaaauaaucagcaa

SEQ ID NO: 1192279 - RNA, 19 nt, Homo sapiens
  misc_RNA (1)...(19): siRNA sense strand
acacagugcacccaucuau

SEQ ID NO: 1192280 - RNA, 19 nt, Homo sapiens
  misc_RNA (1)...(19): siRNA sense strand
ggaaacucuuaccuuugug

SEQ ID NO: 1192281 - RNA, 19 nt, Homo sapiens
  misc_RNA (1)...(19): siRNA sense strand
aaacacccuuucuuaacuc

SEQ ID NO: 1192282 - RNA, 19 nt, Homo sapiens
  misc_RNA (1)...(19): siRNA sense strand
agacaucaguggugcuucu

SEQ ID NO: 1192283 - RNA, 19 nt, Homo sapiens
  misc_RNA (1)...(19): siRNA sense strand
ccaccagccugcucuacag

SEQ ID NO: 1192284 - RNA, 19 nt, Homo sapiens
  misc_RNA (1)...(19): siRNA sense strand
caucaguggugcuucuuuu

SEQ ID NO: 1192285 - RNA, 19 nt, Homo sapiens
  misc_RNA (1)...(19): siRNA sense strand
guaucagucccucaaucua

SEQ ID NO: 1192286 - RNA, 19 nt, Homo sapiens
  misc_RNA (1)...(19): siRNA sense strand
uaccauaggaguucagaau

SEQ ID NO: 1192287 - RNA, 19 nt, Homo sapiens
  misc_RNA (1)...(19): siRNA sense strand
cauaggaguucagaauggu

SEQ ID NO: 1192288 - RNA, 19 nt, Homo sapiens
  misc_RNA (1)...(19): siRNA sense strand
gguaucagucccucaaucu

SEQ ID NO: 1192289 - RNA, 19 nt, Homo sapiens
  misc_RNA (1)...(19): siRNA sense strand
gaguauccaacccuuacaa

SEQ ID NO: 1192290 - RNA, 19 nt, Homo sapiens
  misc_RNA (1)...(19): siRNA sense strand
ucuaacccauguuccugaa

SEQ ID NO: 1192291 - RNA, 19 nt, Homo sapiens
  misc_RNA (1)...(19): siRNA sense strand
cauagagggcuacuacuac

SEQ ID NO: 1192292 - RNA, 19 nt, Homo sapiens
  misc_RNA (1)...(19): siRNA sense strand
guucuacuacaucugcuuu

SEQ ID NO: 1192293 - RNA, 19 nt, Homo sapiens
  misc_RNA (1)...(19): siRNA sense strand
uaugaagagcugaagaaug

SEQ ID NO: 1192294 - RNA, 19 nt, Homo sapiens
  misc_RNA (1)...(19): siRNA sense strand
gaagauuaaaggccuuacu

SEQ ID NO: 1192295 - RNA, 19 nt, Homo sapiens
  misc_RNA (1)...(19): siRNA sense strand
ccuuacaaccuucuucgaa

SEQ ID NO: 1192296 - RNA, 19 nt, Homo sapiens
  misc_RNA (1)...(19): siRNA sense strand
cuucgaaggagaaauaauc

SEQ ID NO: 1192297 - RNA, 19 nt, Homo sapiens
  misc_RNA (1)...(19): siRNA sense strand
gggaugcagaugaagaugu

SEQ ID NO: 1192298 - RNA, 19 nt, Homo sapiens
  misc_RNA (1)...(19): siRNA sense strand
gcacccaucuaugaauucc

SEQ ID NO: 1192299 - RNA, 19 nt, Homo sapiens
  misc_RNA (1)...(19): siRNA sense strand
agauuaaaggccuuacuga

SEQ ID NO: 1192300 - RNA, 19 nt, Homo sapiens
  misc_RNA (1)...(19): siRNA sense strand
ugagguggaaggaacaguu

SEQ ID NO: 1192301 - RNA, 19 nt, Homo sapiens
  misc_RNA (1)...(19): siRNA sense strand
gauuaugaagagcugaaga

SEQ ID NO: 1192302 - RNA, 19 nt, Homo sapiens
  misc_RNA (1)...(19): siRNA sense strand
ucuacuacaucugcuuuca

SEQ ID NO: 1192303 - RNA, 19 nt, Homo sapiens
  misc_RNA (1)...(19): siRNA sense strand
ggacacgggaaacucuuac

SEQ ID NO: 1192304 - RNA, 19 nt, Homo sapiens
  misc_RNA (1)...(19): siRNA sense strand
cgggaaacucuuaccuuug

SEQ ID NO: 1192305 - RNA, 19 nt, Homo sapiens
  misc_RNA (1)...(19): siRNA sense strand
caacauagauccugaaauu

SEQ ID NO: 1192306 - RNA, 19 nt, Homo sapiens
  misc_RNA (1)...(19): siRNA sense strand
gaacauagaucaagacacu

SEQ ID NO: 1192307 - RNA, 19 nt, Homo sapiens
  misc_RNA (1)...(19): siRNA sense strand
gcaaggagcuggagaaucu

SEQ ID NO: 1192308 - RNA, 19 nt, Homo sapiens
  misc_RNA (1)...(19): siRNA sense strand
ccaaggagcuggaugcauu

SEQ ID NO: 1192309 - RNA, 19 nt, Homo sapiens
  misc_RNA (1)...(19): siRNA sense strand
gcaacgaucuugucuucuu

SEQ ID NO: 1192310 - RNA, 19 nt, Homo sapiens
  misc_RNA (1)...(19): siRNA sense strand
ggacuggacuucauguuuc

SEQ ID NO: 1192311 - RNA, 19 nt, Homo sapiens
  misc_RNA (1)...(19): siRNA sense strand
gaauaugacucgauuucug

SEQ ID NO: 1192312 - RNA, 19 nt, Homo sapiens
  misc_RNA (1)...(19): siRNA sense strand
ggacuucccaguuuccuua

SEQ ID NO: 1192313 - RNA, 19 nt, Homo sapiens
  misc_RNA (1)...(19): siRNA sense strand
ccagugacuuugagauuaa

SEQ ID NO: 1192314 - RNA, 19 nt, Homo sapiens
  misc_RNA (1)...(19): siRNA sense strand
gccagugacuuugagauua

SEQ ID NO: 1192315 - RNA, 19 nt, Homo sapiens
  misc_RNA (1)...(19): siRNA sense strand
ucaaggauuugcuaaagaa

SEQ ID NO: 1192316 - RNA, 19 nt, Homo sapiens
  misc_RNA (1)...(19): siRNA sense strand
gaaacuggauuuggaagau

SEQ ID NO: 1192317 - RNA, 19 nt, Homo sapiens
  misc_RNA (1)...(19): siRNA sense strand
ggacauugcccaagaguuc

SEQ ID NO: 1192318 - RNA, 19 nt, Homo sapiens
  misc_RNA (1)...(19): siRNA sense strand
gaucuugucuucuucuauc

SEQ ID NO: 1192319 - RNA, 19 nt, Homo sapiens
  misc_RNA (1)...(19): siRNA sense strand
cugauuggcuuccuucuuu

SEQ ID NO: 1192320 - RNA, 19 nt, Homo sapiens
  misc_RNA (1)...(19): siRNA sense strand
ccaaacaggaugagaauau

SEQ ID NO: 1192321 - RNA, 19 nt, Homo sapiens
  misc_RNA (1)...(19): siRNA sense strand
ggguugaacuggaagacua

SEQ ID NO: 1192322 - RNA, 19 nt, Homo sapiens
  misc_RNA (1)...(19): siRNA sense strand
gagaauaugacucgauuuc

SEQ ID NO: 1192323 - RNA, 19 nt, Homo sapiens
  misc_RNA (1)...(19): siRNA sense strand
gacauuaguggauaaguuu

SEQ ID NO: 1192324 - RNA, 19 nt, Homo sapiens
  misc_RNA (1)...(19): siRNA sense strand
gaagagcauauaccucaaa

SEQ ID NO: 1192325 - RNA, 19 nt, Homo sapiens
  misc_RNA (1)...(19): siRNA sense strand
caaacaggaugagaauaug

SEQ ID NO: 1192326 - RNA, 19 nt, Homo sapiens
  misc_RNA (1)...(19): siRNA sense strand
agacauuaguggauaaguu

SEQ ID NO: 1192327 - RNA, 19 nt, Homo sapiens
  misc_RNA (1)...(19): siRNA sense strand
cgaaagcagugaacaaugc

SEQ ID NO: 1192328 - RNA, 19 nt, Homo sapiens
  misc_RNA (1)...(19): siRNA sense strand
gguagaggccagugacuuu

SEQ ID NO: 1192329 - RNA, 19 nt, Homo sapiens
  misc_RNA (1)...(19): siRNA sense strand
gaacuggaagacuauaaug

SEQ ID NO: 1192330 - RNA, 19 nt, Homo sapiens
  misc_RNA (1)...(19): siRNA sense strand
gcaaacaacgccuccuuuc

SEQ ID NO: 1192331 - RNA, 19 nt, Homo sapiens
  misc_RNA (1)...(19): siRNA sense strand
ggcacgagcagcugucuua

SEQ ID NO: 1192332 - RNA, 19 nt, Homo sapiens
  misc_RNA (1)...(19): siRNA sense strand
ugacucaucuggugaacau

SEQ ID NO: 1192333 - RNA, 19 nt, Homo sapiens
  misc_RNA (1)...(19): siRNA sense strand
aggagacgcugcugaugua

SEQ ID NO: 1192334 - RNA, 19 nt, Homo sapiens
  misc_RNA (1)...(19): siRNA sense strand
cugaugaccugcaccauau

SEQ ID NO: 1192335 - RNA, 19 nt, Homo sapiens
  misc_RNA (1)...(19): siRNA sense strand
uaaagaagaaccaaaugga

SEQ ID NO: 1192336 - RNA, 19 nt, Homo sapiens
  misc_RNA (1)...(19): siRNA sense strand
ggaagagcauauaccucaa

SEQ ID NO: 1192337 - RNA, 19 nt, Homo sapiens
  misc_RNA (1)...(19): siRNA sense strand
ggacaaagggagggucaaa

SEQ ID NO: 1192338 - RNA, 19 nt, Homo sapiens
  misc_RNA (1)...(19): siRNA sense strand
gagaagcugcacuaucgua

SEQ ID NO: 1192339 - RNA, 19 nt, Homo sapiens
  misc_RNA (1)...(19): siRNA sense strand
acauagauccugaaauuga

SEQ ID NO: 1192340 - RNA, 19 nt, Homo sapiens
  misc_RNA (1)...(19): siRNA sense strand
aaucuggacucccguauuc

SEQ ID NO: 1192341 - RNA, 19 nt, Homo sapiens
  misc_RNA (1)...(19): siRNA sense strand
gguccuuauugaugaauuu

SEQ ID NO: 1192342 - RNA, 19 nt, Homo sapiens
  misc_RNA (1)...(19): siRNA sense strand
acauagaucaagacacuua

SEQ ID NO: 1192343 - RNA, 19 nt, Homo sapiens
  misc_RNA (1)...(19): siRNA sense strand
cacagucgcugguccuuau

SEQ ID NO: 1192344 - RNA, 19 nt, Homo sapiens
  misc_RNA (1)...(19): siRNA sense strand
ugucuuaacccgaguauug

SEQ ID NO: 1192345 - RNA, 19 nt, Homo sapiens
  misc_RNA (1)...(19): siRNA sense strand
uuacaguguucuacagauu

SEQ ID NO: 1192346 - RNA, 19 nt, Homo sapiens
  misc_RNA (1)...(19): siRNA sense strand
gcacagagagccuaaaaga

SEQ ID NO: 1192347 - RNA, 19 nt, Homo sapiens
  misc_RNA (1)...(19): siRNA sense strand
uggcaacgaucuugucuuc

SEQ ID NO: 1192348 - RNA, 19 nt, Homo sapiens
  misc_RNA (1)...(19): siRNA sense strand
aaacaacgccuccuuucug

SEQ ID NO: 1192349 - RNA, 19 nt, Homo sapiens
  misc_RNA (1)...(19): siRNA sense strand
caacgaucuugucuucuuc

SEQ ID NO: 1192350 - RNA, 19 nt, Homo sapiens
  misc_RNA (1)...(19): siRNA sense strand
gcacagucgcugguccuua

SEQ ID NO: 1192351 - RNA, 19 nt, Homo sapiens
  misc_RNA (1)...(19): siRNA sense strand
gagcauauaccucaaacag

SEQ ID NO: 1192352 - RNA, 19 nt, Homo sapiens
  misc_RNA (1)...(19): siRNA sense strand
caacgccuccuuucuggaa

SEQ ID NO: 1192353 - RNA, 19 nt, Homo sapiens
  misc_RNA (1)...(19): siRNA sense strand
aaccuggacuugaacguuu

SEQ ID NO: 1192354 - RNA, 19 nt, Homo sapiens
  misc_RNA (1)...(19): siRNA sense strand
uuaugaaacuggauuugga

SEQ ID NO: 1192355 - RNA, 19 nt, Homo sapiens
  misc_RNA (1)...(19): siRNA sense strand
gucaaggauuugcuaaaga

SEQ ID NO: 1192356 - RNA, 19 nt, Homo sapiens
  misc_RNA (1)...(19): siRNA sense strand
ucacacguccgacucauga

SEQ ID NO: 1192357 - RNA, 19 nt, Homo sapiens
  misc_RNA (1)...(19): siRNA sense strand
gagaagcugcucaggcuau

SEQ ID NO: 1192358 - RNA, 19 nt, Homo sapiens
  misc_RNA (1)...(19): siRNA sense strand
uuggagggcugcugaaguu

SEQ ID NO: 1192359 - RNA, 19 nt, Homo sapiens
  misc_RNA (1)...(19): siRNA sense strand
aagaagaaccaaauggaaa

SEQ ID NO: 1192360 - RNA, 19 nt, Homo sapiens
  misc_RNA (1)...(19): siRNA sense strand
cauagauccugaaauugau

SEQ ID NO: 1192361 - RNA, 19 nt, Homo sapiens
  misc_RNA (1)...(19): siRNA sense strand
gacgccaucuucacacgaa

SEQ ID NO: 1192362 - RNA, 19 nt, Homo sapiens
  misc_RNA (1)...(19): siRNA sense strand
aaagaagaaccaaauggaa

SEQ ID NO: 1192363 - RNA, 19 nt, Homo sapiens
  misc_RNA (1)...(19): siRNA sense strand
ccgccugccuuccauggua

SEQ ID NO: 1192364 - RNA, 19 nt, Homo sapiens
  misc_RNA (1)...(19): siRNA sense strand
gccagacauuaguggauaa

SEQ ID NO: 1192365 - RNA, 19 nt, Homo sapiens
  misc_RNA (1)...(19): siRNA sense strand
cagguaggcuugaucacau

SEQ ID NO: 1192366 - RNA, 19 nt, Homo sapiens
  misc_RNA (1)...(19): siRNA sense strand
ccauaucgccagccucauu

SEQ ID NO: 1192367 - RNA, 19 nt, Homo sapiens
  misc_RNA (1)...(19): siRNA sense strand
gauccuaaccuggacuuga

SEQ ID NO: 1192368 - RNA, 19 nt, Homo sapiens
  misc_RNA (1)...(19): siRNA sense strand
caucagggaagagcauaua

SEQ ID NO: 1192369 - RNA, 19 nt, Homo sapiens
  misc_RNA (1)...(19): siRNA sense strand
gaaccuuugugcccaacuc

SEQ ID NO: 1192370 - RNA, 19 nt, Homo sapiens
  misc_RNA (1)...(19): siRNA sense strand
ugacuccacuauccacuuc

SEQ ID NO: 1192371 - RNA, 19 nt, Homo sapiens
  misc_RNA (1)...(19): siRNA sense strand
aggagaagcugcacuaucg

SEQ ID NO: 1192372 - RNA, 19 nt, Homo sapiens
  misc_RNA (1)...(19): siRNA sense strand
ggacucccguauuccuuca

SEQ ID NO: 1192373 - RNA, 19 nt, Homo sapiens
  misc_RNA (1)...(19): siRNA sense strand
gaaucuggacucccguauu

SEQ ID NO: 1192374 - RNA, 19 nt, Homo sapiens
  misc_RNA (1)...(19): siRNA sense strand
cuuccucucuuccauuauu

SEQ ID NO: 1192375 - RNA, 19 nt, Homo sapiens
  misc_RNA (1)...(19): siRNA sense strand
ugccagacauuaguggaua

SEQ ID NO: 1192376 - RNA, 19 nt, Homo sapiens
  misc_RNA (1)...(19): siRNA sense strand
aggauuugcuaaagaagaa

SEQ ID NO: 1192377 - RNA, 19 nt, Homo sapiens
  misc_RNA (1)...(19): siRNA sense strand
guuccugggucgaagaaga

SEQ ID NO: 1192378 - RNA, 19 nt, Homo sapiens
  misc_RNA (1)...(19): siRNA sense strand
cagaggagaagcugcacua

SEQ ID NO: 1192379 - RNA, 19 nt, Homo sapiens
  misc_RNA (1)...(19): siRNA sense strand
gaaaauugccagacauuag

SEQ ID NO: 1192380 - RNA, 19 nt, Homo sapiens
  misc_RNA (1)...(19): siRNA sense strand
uuaauggacuggacuucau

SEQ ID NO: 1192381 - RNA, 19 nt, Homo sapiens
  misc_RNA (1)...(19): siRNA sense strand
ggcaguagacgccaucuuc

SEQ ID NO: 1192382 - RNA, 19 nt, Homo sapiens
  misc_RNA (1)...(19): siRNA sense strand
gcagaggaggccgaaauug

SEQ ID NO: 1192383 - RNA, 19 nt, Homo sapiens
  misc_RNA (1)...(19): siRNA sense strand
ggacuucauguuucucuca

SEQ ID NO: 1192384 - RNA, 19 nt, Homo sapiens
  misc_RNA (1)...(19): siRNA sense strand
gaagaagaaucgggguuga

SEQ ID NO: 1192385 - RNA, 19 nt, Homo sapiens
  misc_RNA (1)...(19): siRNA sense strand
gcuaaagaagaaccaaaug

SEQ ID NO: 1192386 - RNA, 19 nt, Homo sapiens
  misc_RNA (1)...(19): siRNA sense strand
ugucaaggauuugcuaaag

SEQ ID NO: 1192387 - RNA, 19 nt, Homo sapiens
  misc_RNA (1)...(19): siRNA sense strand
gcaguagacgccaucuuca

SEQ ID NO: 1192388 - RNA, 19 nt, Homo sapiens
  misc_RNA (1)...(19): siRNA sense strand
gugcccaacuccacagaau

SEQ ID NO: 1192389 - RNA, 19 nt, Homo sapiens
  misc_RNA (1)...(19): siRNA sense strand
aaacaggaugagaauauga

SEQ ID NO: 1192390 - RNA, 19 nt, Homo sapiens
  misc_RNA (1)...(19): siRNA sense strand
aggaggagcuggccgagau

SEQ ID NO: 1192391 - RNA, 19 nt, Homo sapiens
  misc_RNA (1)...(19): siRNA sense strand
ugaaacgcaugaaguuguc

SEQ ID NO: 1192392 - RNA, 19 nt, Homo sapiens
  misc_RNA (1)...(19): siRNA sense strand
gcuccugggucacaucaag

SEQ ID NO: 1192393 - RNA, 19 nt, Homo sapiens
  misc_RNA (1)...(19): siRNA sense strand
cauccugggcuuuaagaaa

SEQ ID NO: 1192394 - RNA, 19 nt, Homo sapiens
  misc_RNA (1)...(19): siRNA sense strand
agagaguucuggaugagau

SEQ ID NO: 1192395 - RNA, 19 nt, Homo sapiens
  misc_RNA (1)...(19): siRNA sense strand
gcuguggaauucaggauac

SEQ ID NO: 1192396 - RNA, 19 nt, Homo sapiens
  misc_RNA (1)...(19): siRNA sense strand
cagcagaggaggccgaaau

SEQ ID NO: 1192397 - RNA, 19 nt, Homo sapiens
  misc_RNA (1)...(19): siRNA sense strand
gaggagaagcugcacuauc

SEQ ID NO: 1192398 - RNA, 19 nt, Homo sapiens
  misc_RNA (1)...(19): siRNA sense strand
ggccagugacuuugagauu

SEQ ID NO: 1192399 - RNA, 19 nt, Homo sapiens
  misc_RNA (1)...(19): siRNA sense strand
ucugaugaccugcaccaua

SEQ ID NO: 1192400 - RNA, 19 nt, Homo sapiens
  misc_RNA (1)...(19): siRNA sense strand
ggaaaauugccagacauua

SEQ ID NO: 1192401 - RNA, 19 nt, Homo sapiens
  misc_RNA (1)...(19): siRNA sense strand
gcgaaagcagugaacaaug

SEQ ID NO: 1192402 - RNA, 19 nt, Homo sapiens
  misc_RNA (1)...(19): siRNA sense strand
aaacagguaggcuugauca

SEQ ID NO: 1192403 - RNA, 19 nt, Homo sapiens
  misc_RNA (1)...(19): siRNA sense strand
aaagggagggucaaaguca

SEQ ID NO: 1192404 - RNA, 19 nt, Homo sapiens
  misc_RNA (1)...(19): siRNA sense strand
gcacgagcagcugucuuaa

SEQ ID NO: 1192405 - RNA, 19 nt, Homo sapiens
  misc_RNA (1)...(19): siRNA sense strand
caacauagauccugaaauu

SEQ ID NO: 1192406 - RNA, 19 nt, Homo sapiens
  misc_RNA (1)...(19): siRNA sense strand
gaacauagaucaagacacu

SEQ ID NO: 1192407 - RNA, 19 nt, Homo sapiens
  misc_RNA (1)...(19): siRNA sense strand
gcaaggagcuggagaaucu

SEQ ID NO: 1192408 - RNA, 19 nt, Homo sapiens
  misc_RNA (1)...(19): siRNA sense strand
ccaaggagcuggaugcauu

SEQ ID NO: 1192409 - RNA, 19 nt, Homo sapiens
  misc_RNA (1)...(19): siRNA sense strand
gcaacgaucuugucuucuu

SEQ ID NO: 1192410 - RNA, 19 nt, Homo sapiens
  misc_RNA (1)...(19): siRNA sense strand
ggacuggacuucauguuuc

SEQ ID NO: 1192411 - RNA, 19 nt, Homo sapiens
  misc_RNA (1)...(19): siRNA sense strand
gaauaugacucgauuucug

SEQ ID NO: 1192412 - RNA, 19 nt, Homo sapiens
  misc_RNA (1)...(19): siRNA sense strand
ggacuucccaguuuccuua

SEQ ID NO: 1192413 - RNA, 19 nt, Homo sapiens
  misc_RNA (1)...(19): siRNA sense strand
ccagugacuuugagauuaa

SEQ ID NO: 1192414 - RNA, 19 nt, Homo sapiens
  misc_RNA (1)...(19): siRNA sense strand
gccagugacuuugagauua

SEQ ID NO: 1192415 - RNA, 19 nt, Homo sapiens
  misc_RNA (1)...(19): siRNA sense strand
ucaaggauuugcuaaagaa

SEQ ID NO: 1192416 - RNA, 19 nt, Homo sapiens
  misc_RNA (1)...(19): siRNA sense strand
gaaacuggauuuggaagau

SEQ ID NO: 1192417 - RNA, 19 nt, Homo sapiens
  misc_RNA (1)...(19): siRNA sense strand
ggacauugcccaagaguuc

SEQ ID NO: 1192418 - RNA, 19 nt, Homo sapiens
  misc_RNA (1)...(19): siRNA sense strand
gaucuugucuucuucuauc

SEQ ID NO: 1192419 - RNA, 19 nt, Homo sapiens
  misc_RNA (1)...(19): siRNA sense strand
cugauuggcuuccuucuuu

SEQ ID NO: 1192420 - RNA, 19 nt, Homo sapiens
  misc_RNA (1)...(19): siRNA sense strand
ccaaacaggaugagaauau

SEQ ID NO: 1192421 - RNA, 19 nt, Homo sapiens
  misc_RNA (1)...(19): siRNA sense strand
ggguugaacuggaagacua

SEQ ID NO: 1192422 - RNA, 19 nt, Homo sapiens
  misc_RNA (1)...(19): siRNA sense strand
gagaauaugacucgauuuc

SEQ ID NO: 1192423 - RNA, 19 nt, Homo sapiens
  misc_RNA (1)...(19): siRNA sense strand
gacauuaguggauaaguuu

SEQ ID NO: 1192424 - RNA, 19 nt, Homo sapiens
  misc_RNA (1)...(19): siRNA sense strand
gaagagcauauaccucaaa

SEQ ID NO: 1192425 - RNA, 19 nt, Homo sapiens
  misc_RNA (1)...(19): siRNA sense strand
caaacaggaugagaauaug

SEQ ID NO: 1192426 - RNA, 19 nt, Homo sapiens
  misc_RNA (1)...(19): siRNA sense strand
agacauuaguggauaaguu

SEQ ID NO: 1192427 - RNA, 19 nt, Homo sapiens
  misc_RNA (1)...(19): siRNA sense strand
cgaaagcagugaacaaugc

SEQ ID NO: 1192428 - RNA, 19 nt, Homo sapiens
  misc_RNA (1)...(19): siRNA sense strand
gguagaggccagugacuuu

SEQ ID NO: 1192429 - RNA, 19 nt, Homo sapiens
  misc_RNA (1)...(19): siRNA sense strand
gaacuggaagacuauaaug

SEQ ID NO: 1192430 - RNA, 19 nt, Homo sapiens
  misc_RNA (1)...(19): siRNA sense strand
gcaaacaacgccuccuuuc

SEQ ID NO: 1192431 - RNA, 19 nt, Homo sapiens
  misc_RNA (1)...(19): siRNA sense strand
ggcacgagcagcugucuua

SEQ ID NO: 1192432 - RNA, 19 nt, Homo sapiens
  misc_RNA (1)...(19): siRNA sense strand
ugacucaucuggugaacau

SEQ ID NO: 1192433 - RNA, 19 nt, Homo sapiens
  misc_RNA (1)...(19): siRNA sense strand
aggagacgcugcugaugua

SEQ ID NO: 1192434 - RNA, 19 nt, Homo sapiens
  misc_RNA (1)...(19): siRNA sense strand
cugaugaccugcaccauau

SEQ ID NO: 1192435 - RNA, 19 nt, Homo sapiens
  misc_RNA (1)...(19): siRNA sense strand
uaaagaagaaccaaaugga

SEQ ID NO: 1192436 - RNA, 19 nt, Homo sapiens
  misc_RNA (1)...(19): siRNA sense strand
ggaagagcauauaccucaa

SEQ ID NO: 1192437 - RNA, 19 nt, Homo sapiens
  misc_RNA (1)...(19): siRNA sense strand
ggacaaagggagggucaaa

SEQ ID NO: 1192438 - RNA, 19 nt, Homo sapiens
  misc_RNA (1)...(19): siRNA sense strand
gagaagcugcacuaucgua

SEQ ID NO: 1192439 - RNA, 19 nt, Homo sapiens
  misc_RNA (1)...(19): siRNA sense strand
acauagauccugaaauuga

SEQ ID NO: 1192440 - RNA, 19 nt, Homo sapiens
  misc_RNA (1)...(19): siRNA sense strand
aaucuggacucccguauuc

SEQ ID NO: 1192441 - RNA, 19 nt, Homo sapiens
  misc_RNA (1)...(19): siRNA sense strand
gguccuuauugaugaauuu

SEQ ID NO: 1192442 - RNA, 19 nt, Homo sapiens
  misc_RNA (1)...(19): siRNA sense strand
acauagaucaagacacuua

SEQ ID NO: 1192443 - RNA, 19 nt, Homo sapiens
  misc_RNA (1)...(19): siRNA sense strand
cacagucgcugguccuuau

SEQ ID NO: 1192444 - RNA, 19 nt, Homo sapiens
  misc_RNA (1)...(19): siRNA sense strand
ugucuuaacccgaguauug

SEQ ID NO: 1192445 - RNA, 19 nt, Homo sapiens
  misc_RNA (1)...(19): siRNA sense strand
uuacaguguucuacagauu

SEQ ID NO: 1192446 - RNA, 19 nt, Homo sapiens
  misc_RNA (1)...(19): siRNA sense strand
gcacagagagccuaaaaga

SEQ ID NO: 1192447 - RNA, 19 nt, Homo sapiens
  misc_RNA (1)...(19): siRNA sense strand
uggcaacgaucuugucuuc

SEQ ID NO: 1192448 - RNA, 19 nt, Homo sapiens
  misc_RNA (1)...(19): siRNA sense strand
aaacaacgccuccuuucug

SEQ ID NO: 1192449 - RNA, 19 nt, Homo sapiens
  misc_RNA (1)...(19): siRNA sense strand
caacgaucuugucuucuuc

SEQ ID NO: 1192450 - RNA, 19 nt, Homo sapiens
  misc_RNA (1)...(19): siRNA sense strand
gcacagucgcugguccuua

SEQ ID NO: 1192451 - RNA, 19 nt, Homo sapiens
  misc_RNA (1)...(19): siRNA sense strand
gagcauauaccucaaacag

SEQ ID NO: 1192452 - RNA, 19 nt, Homo sapiens
  misc_RNA (1)...(19): siRNA sense strand
caacgccuccuuucuggaa

SEQ ID NO: 1192453 - RNA, 19 nt, Homo sapiens
  misc_RNA (1)...(19): siRNA sense strand
aaccuggacuugaacguuu

SEQ ID NO: 1192454 - RNA, 19 nt, Homo sapiens
  misc_RNA (1)...(19): siRNA sense strand
uuaugaaacuggauuugga

SEQ ID NO: 1192455 - RNA, 19 nt, Homo sapiens
  misc_RNA (1)...(19): siRNA sense strand
gucaaggauuugcuaaaga

SEQ ID NO: 1192456 - RNA, 19 nt, Homo sapiens
  misc_RNA (1)...(19): siRNA sense strand
ucacacguccgacucauga

SEQ ID NO: 1192457 - RNA, 19 nt, Homo sapiens
  misc_RNA (1)...(19): siRNA sense strand
gagaagcugcucaggcuau

SEQ ID NO: 1192458 - RNA, 19 nt, Homo sapiens
  misc_RNA (1)...(19): siRNA sense strand
uuggagggcugcugaaguu

SEQ ID NO: 1192459 - RNA, 19 nt, Homo sapiens
  misc_RNA (1)...(19): siRNA sense strand
aagaagaaccaaauggaaa

SEQ ID NO: 1192460 - RNA, 19 nt, Homo sapiens
  misc_RNA (1)...(19): siRNA sense strand
cauagauccugaaauugau

SEQ ID NO: 1192461 - RNA, 19 nt, Homo sapiens
  misc_RNA (1)...(19): siRNA sense strand
gacgccaucuucacacgaa

SEQ ID NO: 1192462 - RNA, 19 nt, Homo sapiens
  misc_RNA (1)...(19): siRNA sense strand
aaagaagaaccaaauggaa

SEQ ID NO: 1192463 - RNA, 19 nt, Homo sapiens
  misc_RNA (1)...(19): siRNA sense strand
ccgccugccuuccauggua

SEQ ID NO: 1192464 - RNA, 19 nt, Homo sapiens
  misc_RNA (1)...(19): siRNA sense strand
gccagacauuaguggauaa

SEQ ID NO: 1192465 - RNA, 19 nt, Homo sapiens
  misc_RNA (1)...(19): siRNA sense strand
cagguaggcuugaucacau

SEQ ID NO: 1192466 - RNA, 19 nt, Homo sapiens
  misc_RNA (1)...(19): siRNA sense strand
ccauaucgccagccucauu

SEQ ID NO: 1192467 - RNA, 19 nt, Homo sapiens
  misc_RNA (1)...(19): siRNA sense strand
gauccuaaccuggacuuga

SEQ ID NO: 1192468 - RNA, 19 nt, Homo sapiens
  misc_RNA (1)...(19): siRNA sense strand
caucagggaagagcauaua

SEQ ID NO: 1192469 - RNA, 19 nt, Homo sapiens
  misc_RNA (1)...(19): siRNA sense strand
gaaccuuugugcccaacuc

SEQ ID NO: 1192470 - RNA, 19 nt, Homo sapiens
  misc_RNA (1)...(19): siRNA sense strand
ugacuccacuauccacuuc

SEQ ID NO: 1192471 - RNA, 19 nt, Homo sapiens
  misc_RNA (1)...(19): siRNA sense strand
aggagaagcugcacuaucg

SEQ ID NO: 1192472 - RNA, 19 nt, Homo sapiens
  misc_RNA (1)...(19): siRNA sense strand
ggacucccguauuccuuca

SEQ ID NO: 1192473 - RNA, 19 nt, Homo sapiens
  misc_RNA (1)...(19): siRNA sense strand
gaaucuggacucccguauu

SEQ ID NO: 1192474 - RNA, 19 nt, Homo sapiens
  misc_RNA (1)...(19): siRNA sense strand
cuuccucucuuccauuauu

SEQ ID NO: 1192475 - RNA, 19 nt, Homo sapiens
  misc_RNA (1)...(19): siRNA sense strand
ugccagacauuaguggaua

SEQ ID NO: 1192476 - RNA, 19 nt, Homo sapiens
  misc_RNA (1)...(19): siRNA sense strand
aggauuugcuaaagaagaa

SEQ ID NO: 1192477 - RNA, 19 nt, Homo sapiens
  misc_RNA (1)...(19): siRNA sense strand
guuccugggucgaagaaga

SEQ ID NO: 1192478 - RNA, 19 nt, Homo sapiens
  misc_RNA (1)...(19): siRNA sense strand
cagaggagaagcugcacua

SEQ ID NO: 1192479 - RNA, 19 nt, Homo sapiens
  misc_RNA (1)...(19): siRNA sense strand
gaaaauugccagacauuag

SEQ ID NO: 1192480 - RNA, 19 nt, Homo sapiens
  misc_RNA (1)...(19): siRNA sense strand
uuaauggacuggacuucau

SEQ ID NO: 1192481 - RNA, 19 nt, Homo sapiens
  misc_RNA (1)...(19): siRNA sense strand
ggcaguagacgccaucuuc

SEQ ID NO: 1192482 - RNA, 19 nt, Homo sapiens
  misc_RNA (1)...(19): siRNA sense strand
gcagaggaggccgaaauug

SEQ ID NO: 1192483 - RNA, 19 nt, Homo sapiens
  misc_RNA (1)...(19): siRNA sense strand
ggacuucauguuucucuca

SEQ ID NO: 1192484 - RNA, 19 nt, Homo sapiens
  misc_RNA (1)...(19): siRNA sense strand
gaagaagaaucgggguuga

SEQ ID NO: 1192485 - RNA, 19 nt, Homo sapiens
  misc_RNA (1)...(19): siRNA sense strand
gcuaaagaagaaccaaaug

SEQ ID NO: 1192486 - RNA, 19 nt, Homo sapiens
  misc_RNA (1)...(19): siRNA sense strand
ugucaaggauuugcuaaag

SEQ ID NO: 1192487 - RNA, 19 nt, Homo sapiens
  misc_RNA (1)...(19): siRNA sense strand
gcaguagacgccaucuuca

SEQ ID NO: 1192488 - RNA, 19 nt, Homo sapiens
  misc_RNA (1)...(19): siRNA sense strand
gugcccaacuccacagaau

SEQ ID NO: 1192489 - RNA, 19 nt, Homo sapiens
  misc_RNA (1)...(19): siRNA sense strand
aaacaggaugagaauauga

SEQ ID NO: 1192490 - RNA, 19 nt, Homo sapiens
  misc_RNA (1)...(19): siRNA sense strand
aggaggagcuggccgagau

SEQ ID NO: 1192491 - RNA, 19 nt, Homo sapiens
  misc_RNA (1)...(19): siRNA sense strand
ugaaacgcaugaaguuguc

SEQ ID NO: 1192492 - RNA, 19 nt, Homo sapiens
  misc_RNA (1)...(19): siRNA sense strand
gcuccugggucacaucaag

SEQ ID NO: 1192493 - RNA, 19 nt, Homo sapiens
  misc_RNA (1)...(19): siRNA sense strand
cauccugggcuuuaagaaa

SEQ ID NO: 1192494 - RNA, 19 nt, Homo sapiens
  misc_RNA (1)...(19): siRNA sense strand
agagaguucuggaugagau

SEQ ID NO: 1192495 - RNA, 19 nt, Homo sapiens
  misc_RNA (1)...(19): siRNA sense strand
gcuguggaauucaggauac

SEQ ID NO: 1192496 - RNA, 19 nt, Homo sapiens
  misc_RNA (1)...(19): siRNA sense strand
cagcagaggaggccgaaau

SEQ ID NO: 1192497 - RNA, 19 nt, Homo sapiens
  misc_RNA (1)...(19): siRNA sense strand
gaggagaagcugcacuauc

SEQ ID NO: 1192498 - RNA, 19 nt, Homo sapiens
  misc_RNA (1)...(19): siRNA sense strand
ggccagugacuuugagauu

SEQ ID NO: 1192499 - RNA, 19 nt, Homo sapiens
  misc_RNA (1)...(19): siRNA sense strand
ucugaugaccugcaccaua

SEQ ID NO: 1192500 - RNA, 19 nt, Homo sapiens
  misc_RNA (1)...(19): siRNA sense strand
ggaaaauugccagacauua

SEQ ID NO: 1192501 - RNA, 19 nt, Homo sapiens
  misc_RNA (1)...(19): siRNA sense strand
gcgaaagcagugaacaaug

SEQ ID NO: 1192502 - RNA, 19 nt, Homo sapiens
  misc_RNA (1)...(19): siRNA sense strand
aaacagguaggcuugauca

SEQ ID NO: 1192503 - RNA, 19 nt, Homo sapiens
  misc_RNA (1)...(19): siRNA sense strand
aaagggagggucaaaguca

SEQ ID NO: 1192504 - RNA, 19 nt, Homo sapiens
  misc_RNA (1)...(19): siRNA sense strand
gcacgagcagcugucuuaa

SEQ ID NO: 1192505 - RNA, 19 nt, Homo sapiens
  misc_RNA (1)...(19): siRNA sense strand
caacauagauccugaaauu

SEQ ID NO: 1192506 - RNA, 19 nt, Homo sapiens
  misc_RNA (1)...(19): siRNA sense strand
gaacauagaucaagacacu

SEQ ID NO: 1192507 - RNA, 19 nt, Homo sapiens
  misc_RNA (1)...(19): siRNA sense strand
gcaaggagcuggagaaucu

SEQ ID NO: 1192508 - RNA, 19 nt, Homo sapiens
  misc_RNA (1)...(19): siRNA sense strand
ccaaggagcuggaugcauu

SEQ ID NO: 1192509 - RNA, 19 nt, Homo sapiens
  misc_RNA (1)...(19): siRNA sense strand
gcaacgaucuugucuucuu

SEQ ID NO: 1192510 - RNA, 19 nt, Homo sapiens
  misc_RNA (1)...(19): siRNA sense strand
ggacuggacuucauguuuc

SEQ ID NO: 1192511 - RNA, 19 nt, Homo sapiens
  misc_RNA (1)...(19): siRNA sense strand
gaauaugacucgauuucug

SEQ ID NO: 1192512 - RNA, 19 nt, Homo sapiens
  misc_RNA (1)...(19): siRNA sense strand
ggacuucccaguuuccuua

SEQ ID NO: 1192513 - RNA, 19 nt, Homo sapiens
  misc_RNA (1)...(19): siRNA sense strand
ccagugacuuugagauuaa

SEQ ID NO: 1192514 - RNA, 19 nt, Homo sapiens
  misc_RNA (1)...(19): siRNA sense strand
gccagugacuuugagauua

SEQ ID NO: 1192515 - RNA, 19 nt, Homo sapiens
  misc_RNA (1)...(19): siRNA sense strand
ucaaggauuugcuaaagaa

SEQ ID NO: 1192516 - RNA, 19 nt, Homo sapiens
  misc_RNA (1)...(19): siRNA sense strand
gaaacuggauuuggaagau

SEQ ID NO: 1192517 - RNA, 19 nt, Homo sapiens
  misc_RNA (1)...(19): siRNA sense strand
ggacauugcccaagaguuc

SEQ ID NO: 1192518 - RNA, 19 nt, Homo sapiens
  misc_RNA (1)...(19): siRNA sense strand
gaucuugucuucuucuauc

SEQ ID NO: 1192519 - RNA, 19 nt, Homo sapiens
  misc_RNA (1)...(19): siRNA sense strand
cugauuggcuuccuucuuu

SEQ ID NO: 1192520 - RNA, 19 nt, Homo sapiens
  misc_RNA (1)...(19): siRNA sense strand
ccaaacaggaugagaauau

SEQ ID NO: 1192521 - RNA, 19 nt, Homo sapiens
  misc_RNA (1)...(19): siRNA sense strand
ggguugaacuggaagacua

SEQ ID NO: 1192522 - RNA, 19 nt, Homo sapiens
  misc_RNA (1)...(19): siRNA sense strand
gagaauaugacucgauuuc

SEQ ID NO: 1192523 - RNA, 19 nt, Homo sapiens
  misc_RNA (1)...(19): siRNA sense strand
gacauuaguggauaaguuu

SEQ ID NO: 1192524 - RNA, 19 nt, Homo sapiens
  misc_RNA (1)...(19): siRNA sense strand
gaagagcauauaccucaaa

SEQ ID NO: 1192525 - RNA, 19 nt, Homo sapiens
  misc_RNA (1)...(19): siRNA sense strand
caaacaggaugagaauaug

SEQ ID NO: 1192526 - RNA, 19 nt, Homo sapiens
  misc_RNA (1)...(19): siRNA sense strand
agacauuaguggauaaguu

SEQ ID NO: 1192527 - RNA, 19 nt, Homo sapiens
  misc_RNA (1)...(19): siRNA sense strand
cgaaagcagugaacaaugc

SEQ ID NO: 1192528 - RNA, 19 nt, Homo sapiens
  misc_RNA (1)...(19): siRNA sense strand
gguagaggccagugacuuu

SEQ ID NO: 1192529 - RNA, 19 nt, Homo sapiens
  misc_RNA (1)...(19): siRNA sense strand
gaacuggaagacuauaaug

SEQ ID NO: 1192530 - RNA, 19 nt, Homo sapiens
  misc_RNA (1)...(19): siRNA sense strand
gcaaacaacgccuccuuuc

SEQ ID NO: 1192531 - RNA, 19 nt, Homo sapiens
  misc_RNA (1)...(19): siRNA sense strand
ggcacgagcagcugucuua

SEQ ID NO: 1192532 - RNA, 19 nt, Homo sapiens
  misc_RNA (1)...(19): siRNA sense strand
ugacucaucuggugaacau

SEQ ID NO: 1192533 - RNA, 19 nt, Homo sapiens
  misc_RNA (1)...(19): siRNA sense strand
aggagacgcugcugaugua

SEQ ID NO: 1192534 - RNA, 19 nt, Homo sapiens
  misc_RNA (1)...(19): siRNA sense strand
cugaugaccugcaccauau

SEQ ID NO: 1192535 - RNA, 19 nt, Homo sapiens
  misc_RNA (1)...(19): siRNA sense strand
uaaagaagaaccaaaugga

SEQ ID NO: 1192536 - RNA, 19 nt, Homo sapiens
  misc_RNA (1)...(19): siRNA sense strand
ggaagagcauauaccucaa

SEQ ID NO: 1192537 - RNA, 19 nt, Homo sapiens
  misc_RNA (1)...(19): siRNA sense strand
ggacaaagggagggucaaa

SEQ ID NO: 1192538 - RNA, 19 nt, Homo sapiens
  misc_RNA (1)...(19): siRNA sense strand
gagaagcugcacuaucgua

SEQ ID NO: 1192539 - RNA, 19 nt, Homo sapiens
  misc_RNA (1)...(19): siRNA sense strand
acauagauccugaaauuga

SEQ ID NO: 1192540 - RNA, 19 nt, Homo sapiens
  misc_RNA (1)...(19): siRNA sense strand
aaucuggacucccguauuc

SEQ ID NO: 1192541 - RNA, 19 nt, Homo sapiens
  misc_RNA (1)...(19): siRNA sense strand
gguccuuauugaugaauuu

SEQ ID NO: 1192542 - RNA, 19 nt, Homo sapiens
  misc_RNA (1)...(19): siRNA sense strand
acauagaucaagacacuua

SEQ ID NO: 1192543 - RNA, 19 nt, Homo sapiens
  misc_RNA (1)...(19): siRNA sense strand
cacagucgcugguccuuau

SEQ ID NO: 1192544 - RNA, 19 nt, Homo sapiens
  misc_RNA (1)...(19): siRNA sense strand
ugucuuaacccgaguauug

SEQ ID NO: 1192545 - RNA, 19 nt, Homo sapiens
  misc_RNA (1)...(19): siRNA sense strand
uuacaguguucuacagauu

SEQ ID NO: 1192546 - RNA, 19 nt, Homo sapiens
  misc_RNA (1)...(19): siRNA sense strand
gcacagagagccuaaaaga

SEQ ID NO: 1192547 - RNA, 19 nt, Homo sapiens
  misc_RNA (1)...(19): siRNA sense strand
uggcaacgaucuugucuuc

SEQ ID NO: 1192548 - RNA, 19 nt, Homo sapiens
  misc_RNA (1)...(19): siRNA sense strand
aaacaacgccuccuuucug

SEQ ID NO: 1192549 - RNA, 19 nt, Homo sapiens
  misc_RNA (1)...(19): siRNA sense strand
caacgaucuugucuucuuc

SEQ ID NO: 1192550 - RNA, 19 nt, Homo sapiens
  misc_RNA (1)...(19): siRNA sense strand
gcacagucgcugguccuua

SEQ ID NO: 1192551 - RNA, 19 nt, Homo sapiens
  misc_RNA (1)...(19): siRNA sense strand
gagcauauaccucaaacag

SEQ ID NO: 1192552 - RNA, 19 nt, Homo sapiens
  misc_RNA (1)...(19): siRNA sense strand
caacgccuccuuucuggaa

SEQ ID NO: 1192553 - RNA, 19 nt, Homo sapiens
  misc_RNA (1)...(19): siRNA sense strand
aaccuggacuugaacguuu

SEQ ID NO: 1192554 - RNA, 19 nt, Homo sapiens
  misc_RNA (1)...(19): siRNA sense strand
uuaugaaacuggauuugga

SEQ ID NO: 1192555 - RNA, 19 nt, Homo sapiens
  misc_RNA (1)...(19): siRNA sense strand
gucaaggauuugcuaaaga

SEQ ID NO: 1192556 - RNA, 19 nt, Homo sapiens
  misc_RNA (1)...(19): siRNA sense strand
ucacacguccgacucauga

SEQ ID NO: 1192557 - RNA, 19 nt, Homo sapiens
  misc_RNA (1)...(19): siRNA sense strand
gagaagcugcucaggcuau

SEQ ID NO: 1192558 - RNA, 19 nt, Homo sapiens
  misc_RNA (1)...(19): siRNA sense strand
uuggagggcugcugaaguu

SEQ ID NO: 1192559 - RNA, 19 nt, Homo sapiens
  misc_RNA (1)...(19): siRNA sense strand
aagaagaaccaaauggaaa

SEQ ID NO: 1192560 - RNA, 19 nt, Homo sapiens
  misc_RNA (1)...(19): siRNA sense strand
cauagauccugaaauugau

SEQ ID NO: 1192561 - RNA, 19 nt, Homo sapiens
  misc_RNA (1)...(19): siRNA sense strand
gacgccaucuucacacgaa

SEQ ID NO: 1192562 - RNA, 19 nt, Homo sapiens
  misc_RNA (1)...(19): siRNA sense strand
aaagaagaaccaaauggaa

SEQ ID NO: 1192563 - RNA, 19 nt, Homo sapiens
  misc_RNA (1)...(19): siRNA sense strand
ccgccugccuuccauggua

SEQ ID NO: 1192564 - RNA, 19 nt, Homo sapiens
  misc_RNA (1)...(19): siRNA sense strand
gccagacauuaguggauaa

SEQ ID NO: 1192565 - RNA, 19 nt, Homo sapiens
  misc_RNA (1)...(19): siRNA sense strand
cagguaggcuugaucacau

SEQ ID NO: 1192566 - RNA, 19 nt, Homo sapiens
  misc_RNA (1)...(19): siRNA sense strand
ccauaucgccagccucauu

SEQ ID NO: 1192567 - RNA, 19 nt, Homo sapiens
  misc_RNA (1)...(19): siRNA sense strand
gauccuaaccuggacuuga

SEQ ID NO: 1192568 - RNA, 19 nt, Homo sapiens
  misc_RNA (1)...(19): siRNA sense strand
caucagggaagagcauaua

SEQ ID NO: 1192569 - RNA, 19 nt, Homo sapiens
  misc_RNA (1)...(19): siRNA sense strand
gaaccuuugugcccaacuc

SEQ ID NO: 1192570 - RNA, 19 nt, Homo sapiens
  misc_RNA (1)...(19): siRNA sense strand
ugacuccacuauccacuuc

SEQ ID NO: 1192571 - RNA, 19 nt, Homo sapiens
  misc_RNA (1)...(19): siRNA sense strand
aggagaagcugcacuaucg

SEQ ID NO: 1192572 - RNA, 19 nt, Homo sapiens
  misc_RNA (1)...(19): siRNA sense strand
ggacucccguauuccuuca

SEQ ID NO: 1192573 - RNA, 19 nt, Homo sapiens
  misc_RNA (1)...(19): siRNA sense strand
gaaucuggacucccguauu

SEQ ID NO: 1192574 - RNA, 19 nt, Homo sapiens
  misc_RNA (1)...(19): siRNA sense strand
cuuccucucuuccauuauu

SEQ ID NO: 1192575 - RNA, 19 nt, Homo sapiens
  misc_RNA (1)...(19): siRNA sense strand
ugccagacauuaguggaua

SEQ ID NO: 1192576 - RNA, 19 nt, Homo sapiens
  misc_RNA (1)...(19): siRNA sense strand
aggauuugcuaaagaagaa

SEQ ID NO: 1192577 - RNA, 19 nt, Homo sapiens
  misc_RNA (1)...(19): siRNA sense strand
guuccugggucgaagaaga

SEQ ID NO: 1192578 - RNA, 19 nt, Homo sapiens
  misc_RNA (1)...(19): siRNA sense strand
cagaggagaagcugcacua

SEQ ID NO: 1192579 - RNA, 19 nt, Homo sapiens
  misc_RNA (1)...(19): siRNA sense strand
gaaaauugccagacauuag

SEQ ID NO: 1192580 - RNA, 19 nt, Homo sapiens
  misc_RNA (1)...(19): siRNA sense strand
uuaauggacuggacuucau

SEQ ID NO: 1192581 - RNA, 19 nt, Homo sapiens
  misc_RNA (1)...(19): siRNA sense strand
ggcaguagacgccaucuuc

SEQ ID NO: 1192582 - RNA, 19 nt, Homo sapiens
  misc_RNA (1)...(19): siRNA sense strand
gcagaggaggccgaaauug

SEQ ID NO: 1192583 - RNA, 19 nt, Homo sapiens
  misc_RNA (1)...(19): siRNA sense strand
ggacuucauguuucucuca

SEQ ID NO: 1192584 - RNA, 19 nt, Homo sapiens
  misc_RNA (1)...(19): siRNA sense strand
gaagaagaaucgggguuga

SEQ ID NO: 1192585 - RNA, 19 nt, Homo sapiens
  misc_RNA (1)...(19): siRNA sense strand
gcuaaagaagaaccaaaug

SEQ ID NO: 1192586 - RNA, 19 nt, Homo sapiens
  misc_RNA (1)...(19): siRNA sense strand
ugucaaggauuugcuaaag

SEQ ID NO: 1192587 - RNA, 19 nt, Homo sapiens
  misc_RNA (1)...(19): siRNA sense strand
gcaguagacgccaucuuca

SEQ ID NO: 1192588 - RNA, 19 nt, Homo sapiens
  misc_RNA (1)...(19): siRNA sense strand
gugcccaacuccacagaau

SEQ ID NO: 1192589 - RNA, 19 nt, Homo sapiens
  misc_RNA (1)...(19): siRNA sense strand
aaacaggaugagaauauga

SEQ ID NO: 1192590 - RNA, 19 nt, Homo sapiens
  misc_RNA (1)...(19): siRNA sense strand
aggaggagcuggccgagau

SEQ ID NO: 1192591 - RNA, 19 nt, Homo sapiens
  misc_RNA (1)...(19): siRNA sense strand
ugaaacgcaugaaguuguc

SEQ ID NO: 1192592 - RNA, 19 nt, Homo sapiens
  misc_RNA (1)...(19): siRNA sense strand
gcuccugggucacaucaag

SEQ ID NO: 1192593 - RNA, 19 nt, Homo sapiens
  misc_RNA (1)...(19): siRNA sense strand
cauccugggcuuuaagaaa

SEQ ID NO: 1192594 - RNA, 19 nt, Homo sapiens
  misc_RNA (1)...(19): siRNA sense strand
agagaguucuggaugagau

SEQ ID NO: 1192595 - RNA, 19 nt, Homo sapiens
  misc_RNA (1)...(19): siRNA sense strand
gcuguggaauucaggauac

SEQ ID NO: 1192596 - RNA, 19 nt, Homo sapiens
  misc_RNA (1)...(19): siRNA sense strand
cagcagaggaggccgaaau

SEQ ID NO: 1192597 - RNA, 19 nt, Homo sapiens
  misc_RNA (1)...(19): siRNA sense strand
gaggagaagcugcacuauc

SEQ ID NO: 1192598 - RNA, 19 nt, Homo sapiens
  misc_RNA (1)...(19): siRNA sense strand
ggccagugacuuugagauu

SEQ ID NO: 1192599 - RNA, 19 nt, Homo sapiens
  misc_RNA (1)...(19): siRNA sense strand
ucugaugaccugcaccaua

SEQ ID NO: 1192600 - RNA, 19 nt, Homo sapiens
  misc_RNA (1)...(19): siRNA sense strand
ggaaaauugccagacauua

SEQ ID NO: 1192601 - RNA, 19 nt, Homo sapiens
  misc_RNA (1)...(19): siRNA sense strand
gcgaaagcagugaacaaug

SEQ ID NO: 1192602 - RNA, 19 nt, Homo sapiens
  misc_RNA (1)...(19): siRNA sense strand
aaacagguaggcuugauca

SEQ ID NO: 1192603 - RNA, 19 nt, Homo sapiens
  misc_RNA (1)...(19): siRNA sense strand
aaagggagggucaaaguca

SEQ ID NO: 1192604 - RNA, 19 nt, Homo sapiens
  misc_RNA (1)...(19): siRNA sense strand
gcacgagcagcugucuuaa

SEQ ID NO: 1192605 - RNA, 19 nt, Homo sapiens
  misc_RNA (1)...(19): siRNA sense strand
caacauagauccugaaauu

SEQ ID NO: 1192606 - RNA, 19 nt, Homo sapiens
  misc_RNA (1)...(19): siRNA sense strand
gaacauagaucaagacacu

SEQ ID NO: 1192607 - RNA, 19 nt, Homo sapiens
  misc_RNA (1)...(19): siRNA sense strand
gcaaggagcuggagaaucu

SEQ ID NO: 1192608 - RNA, 19 nt, Homo sapiens
  misc_RNA (1)...(19): siRNA sense strand
ccaaggagcuggaugcauu

SEQ ID NO: 1192609 - RNA, 19 nt, Homo sapiens
  misc_RNA (1)...(19): siRNA sense strand
gcaacgaucuugucuucuu

SEQ ID NO: 1192610 - RNA, 19 nt, Homo sapiens
  misc_RNA (1)...(19): siRNA sense strand
ggacuggacuucauguuuc

SEQ ID NO: 1192611 - RNA, 19 nt, Homo sapiens
  misc_RNA (1)...(19): siRNA sense strand
gaauaugacucgauuucug

SEQ ID NO: 1192612 - RNA, 19 nt, Homo sapiens
  misc_RNA (1)...(19): siRNA sense strand
ggacuucccaguuuccuua

SEQ ID NO: 1192613 - RNA, 19 nt, Homo sapiens
  misc_RNA (1)...(19): siRNA sense strand
ccagugacuuugagauuaa

SEQ ID NO: 1192614 - RNA, 19 nt, Homo sapiens
  misc_RNA (1)...(19): siRNA sense strand
gccagugacuuugagauua

SEQ ID NO: 1192615 - RNA, 19 nt, Homo sapiens
  misc_RNA (1)...(19): siRNA sense strand
ucaaggauuugcuaaagaa

SEQ ID NO: 1192616 - RNA, 19 nt, Homo sapiens
  misc_RNA (1)...(19): siRNA sense strand
gaaacuggauuuggaagau

SEQ ID NO: 1192617 - RNA, 19 nt, Homo sapiens
  misc_RNA (1)...(19): siRNA sense strand
ggacauugcccaagaguuc

SEQ ID NO: 1192618 - RNA, 19 nt, Homo sapiens
  misc_RNA (1)...(19): siRNA sense strand
gaucuugucuucuucuauc

SEQ ID NO: 1192619 - RNA, 19 nt, Homo sapiens
  misc_RNA (1)...(19): siRNA sense strand
cugauuggcuuccuucuuu

SEQ ID NO: 1192620 - RNA, 19 nt, Homo sapiens
  misc_RNA (1)...(19): siRNA sense strand
ccaaacaggaugagaauau

SEQ ID NO: 1192621 - RNA, 19 nt, Homo sapiens
  misc_RNA (1)...(19): siRNA sense strand
ggguugaacuggaagacua

SEQ ID NO: 1192622 - RNA, 19 nt, Homo sapiens
  misc_RNA (1)...(19): siRNA sense strand
gagaauaugacucgauuuc

SEQ ID NO: 1192623 - RNA, 19 nt, Homo sapiens
  misc_RNA (1)...(19): siRNA sense strand
gacauuaguggauaaguuu

SEQ ID NO: 1192624 - RNA, 19 nt, Homo sapiens
  misc_RNA (1)...(19): siRNA sense strand
gaagagcauauaccucaaa

SEQ ID NO: 1192625 - RNA, 19 nt, Homo sapiens
  misc_RNA (1)...(19): siRNA sense strand
caaacaggaugagaauaug

SEQ ID NO: 1192626 - RNA, 19 nt, Homo sapiens
  misc_RNA (1)...(19): siRNA sense strand
agacauuaguggauaaguu

SEQ ID NO: 1192627 - RNA, 19 nt, Homo sapiens
  misc_RNA (1)...(19): siRNA sense strand
cgaaagcagugaacaaugc

SEQ ID NO: 1192628 - RNA, 19 nt, Homo sapiens
  misc_RNA (1)...(19): siRNA sense strand
gguagaggccagugacuuu

SEQ ID NO: 1192629 - RNA, 19 nt, Homo sapiens
  misc_RNA (1)...(19): siRNA sense strand
gaacuggaagacuauaaug

SEQ ID NO: 1192630 - RNA, 19 nt, Homo sapiens
  misc_RNA (1)...(19): siRNA sense strand
gcaaacaacgccuccuuuc

SEQ ID NO: 1192631 - RNA, 19 nt, Homo sapiens
  misc_RNA (1)...(19): siRNA sense strand
ggcacgagcagcugucuua

SEQ ID NO: 1192632 - RNA, 19 nt, Homo sapiens
  misc_RNA (1)...(19): siRNA sense strand
ugacucaucuggugaacau

SEQ ID NO: 1192633 - RNA, 19 nt, Homo sapiens
  misc_RNA (1)...(19): siRNA sense strand
aggagacgcugcugaugua

SEQ ID NO: 1192634 - RNA, 19 nt, Homo sapiens
  misc_RNA (1)...(19): siRNA sense strand
cugaugaccugcaccauau

SEQ ID NO: 1192635 - RNA, 19 nt, Homo sapiens
  misc_RNA (1)...(19): siRNA sense strand
uaaagaagaaccaaaugga

SEQ ID NO: 1192636 - RNA, 19 nt, Homo sapiens
  misc_RNA (1)...(19): siRNA sense strand
ggaagagcauauaccucaa

SEQ ID NO: 1192637 - RNA, 19 nt, Homo sapiens
  misc_RNA (1)...(19): siRNA sense strand
ggacaaagggagggucaaa

SEQ ID NO: 1192638 - RNA, 19 nt, Homo sapiens
  misc_RNA (1)...(19): siRNA sense strand
gagaagcugcacuaucgua

SEQ ID NO: 1192639 - RNA, 19 nt, Homo sapiens
  misc_RNA (1)...(19): siRNA sense strand
acauagauccugaaauuga

SEQ ID NO: 1192640 - RNA, 19 nt, Homo sapiens
  misc_RNA (1)...(19): siRNA sense strand
aaucuggacucccguauuc

SEQ ID NO: 1192641 - RNA, 19 nt, Homo sapiens
  misc_RNA (1)...(19): siRNA sense strand
gguccuuauugaugaauuu

SEQ ID NO: 1192642 - RNA, 19 nt, Homo sapiens
  misc_RNA (1)...(19): siRNA sense strand
acauagaucaagacacuua

SEQ ID NO: 1192643 - RNA, 19 nt, Homo sapiens
  misc_RNA (1)...(19): siRNA sense strand
cacagucgcugguccuuau

SEQ ID NO: 1192644 - RNA, 19 nt, Homo sapiens
  misc_RNA (1)...(19): siRNA sense strand
ugucuuaacccgaguauug

SEQ ID NO: 1192645 - RNA, 19 nt, Homo sapiens
  misc_RNA (1)...(19): siRNA sense strand
uuacaguguucuacagauu

SEQ ID NO: 1192646 - RNA, 19 nt, Homo sapiens
  misc_RNA (1)...(19): siRNA sense strand
gcacagagagccuaaaaga

SEQ ID NO: 1192647 - RNA, 19 nt, Homo sapiens
  misc_RNA (1)...(19): siRNA sense strand
uggcaacgaucuugucuuc

SEQ ID NO: 1192648 - RNA, 19 nt, Homo sapiens
  misc_RNA (1)...(19): siRNA sense strand
aaacaacgccuccuuucug

SEQ ID NO: 1192649 - RNA, 19 nt, Homo sapiens
  misc_RNA (1)...(19): siRNA sense strand
caacgaucuugucuucuuc

SEQ ID NO: 1192650 - RNA, 19 nt, Homo sapiens
  misc_RNA (1)...(19): siRNA sense strand
gcacagucgcugguccuua

SEQ ID NO: 1192651 - RNA, 19 nt, Homo sapiens
  misc_RNA (1)...(19): siRNA sense strand
gagcauauaccucaaacag

SEQ ID NO: 1192652 - RNA, 19 nt, Homo sapiens
  misc_RNA (1)...(19): siRNA sense strand
caacgccuccuuucuggaa

SEQ ID NO: 1192653 - RNA, 19 nt, Homo sapiens
  misc_RNA (1)...(19): siRNA sense strand
aaccuggacuugaacguuu

SEQ ID NO: 1192654 - RNA, 19 nt, Homo sapiens
  misc_RNA (1)...(19): siRNA sense strand
uuaugaaacuggauuugga

SEQ ID NO: 1192655 - RNA, 19 nt, Homo sapiens
  misc_RNA (1)...(19): siRNA sense strand
gucaaggauuugcuaaaga

SEQ ID NO: 1192656 - RNA, 19 nt, Homo sapiens
  misc_RNA (1)...(19): siRNA sense strand
ucacacguccgacucauga

SEQ ID NO: 1192657 - RNA, 19 nt, Homo sapiens
  misc_RNA (1)...(19): siRNA sense strand
gagaagcugcucaggcuau

SEQ ID NO: 1192658 - RNA, 19 nt, Homo sapiens
  misc_RNA (1)...(19): siRNA sense strand
uuggagggcugcugaaguu

SEQ ID NO: 1192659 - RNA, 19 nt, Homo sapiens
  misc_RNA (1)...(19): siRNA sense strand
aagaagaaccaaauggaaa

SEQ ID NO: 1192660 - RNA, 19 nt, Homo sapiens
  misc_RNA (1)...(19): siRNA sense strand
cauagauccugaaauugau

SEQ ID NO: 1192661 - RNA, 19 nt, Homo sapiens
  misc_RNA (1)...(19): siRNA sense strand
gacgccaucuucacacgaa

SEQ ID NO: 1192662 - RNA, 19 nt, Homo sapiens
  misc_RNA (1)...(19): siRNA sense strand
aaagaagaaccaaauggaa

SEQ ID NO: 1192663 - RNA, 19 nt, Homo sapiens
  misc_RNA (1)...(19): siRNA sense strand
ccgccugccuuccauggua

SEQ ID NO: 1192664 - RNA, 19 nt, Homo sapiens
  misc_RNA (1)...(19): siRNA sense strand
gccagacauuaguggauaa

SEQ ID NO: 1192665 - RNA, 19 nt, Homo sapiens
  misc_RNA (1)...(19): siRNA sense strand
cagguaggcuugaucacau

SEQ ID NO: 1192666 - RNA, 19 nt, Homo sapiens
  misc_RNA (1)...(19): siRNA sense strand
ccauaucgccagccucauu

SEQ ID NO: 1192667 - RNA, 19 nt, Homo sapiens
  misc_RNA (1)...(19): siRNA sense strand
gauccuaaccuggacuuga

SEQ ID NO: 1192668 - RNA, 19 nt, Homo sapiens
  misc_RNA (1)...(19): siRNA sense strand
caucagggaagagcauaua

SEQ ID NO: 1192669 - RNA, 19 nt, Homo sapiens
  misc_RNA (1)...(19): siRNA sense strand
gaaccuuugugcccaacuc

SEQ ID NO: 1192670 - RNA, 19 nt, Homo sapiens
  misc_RNA (1)...(19): siRNA sense strand
ugacuccacuauccacuuc

SEQ ID NO: 1192671 - RNA, 19 nt, Homo sapiens
  misc_RNA (1)...(19): siRNA sense strand
aggagaagcugcacuaucg

SEQ ID NO: 1192672 - RNA, 19 nt, Homo sapiens
  misc_RNA (1)...(19): siRNA sense strand
ggacucccguauuccuuca

SEQ ID NO: 1192673 - RNA, 19 nt, Homo sapiens
  misc_RNA (1)...(19): siRNA sense strand
gaaucuggacucccguauu

SEQ ID NO: 1192674 - RNA, 19 nt, Homo sapiens
  misc_RNA (1)...(19): siRNA sense strand
cuuccucucuuccauuauu

SEQ ID NO: 1192675 - RNA, 19 nt, Homo sapiens
  misc_RNA (1)...(19): siRNA sense strand
ugccagacauuaguggaua

SEQ ID NO: 1192676 - RNA, 19 nt, Homo sapiens
  misc_RNA (1)...(19): siRNA sense strand
aggauuugcuaaagaagaa

SEQ ID NO: 1192677 - RNA, 19 nt, Homo sapiens
  misc_RNA (1)...(19): siRNA sense strand
guuccugggucgaagaaga

SEQ ID NO: 1192678 - RNA, 19 nt, Homo sapiens
  misc_RNA (1)...(19): siRNA sense strand
cagaggagaagcugcacua

SEQ ID NO: 1192679 - RNA, 19 nt, Homo sapiens
  misc_RNA (1)...(19): siRNA sense strand
gaaaauugccagacauuag

SEQ ID NO: 1192680 - RNA, 19 nt, Homo sapiens
  misc_RNA (1)...(19): siRNA sense strand
uuaauggacuggacuucau

SEQ ID NO: 1192681 - RNA, 19 nt, Homo sapiens
  misc_RNA (1)...(19): siRNA sense strand
ggcaguagacgccaucuuc

SEQ ID NO: 1192682 - RNA, 19 nt, Homo sapiens
  misc_RNA (1)...(19): siRNA sense strand
gcagaggaggccgaaauug

SEQ ID NO: 1192683 - RNA, 19 nt, Homo sapiens
  misc_RNA (1)...(19): siRNA sense strand
ggacuucauguuucucuca

SEQ ID NO: 1192684 - RNA, 19 nt, Homo sapiens
  misc_RNA (1)...(19): siRNA sense strand
gaagaagaaucgggguuga

SEQ ID NO: 1192685 - RNA, 19 nt, Homo sapiens
  misc_RNA (1)...(19): siRNA sense strand
gcuaaagaagaaccaaaug

SEQ ID NO: 1192686 - RNA, 19 nt, Homo sapiens
  misc_RNA (1)...(19): siRNA sense strand
ugucaaggauuugcuaaag

SEQ ID NO: 1192687 - RNA, 19 nt, Homo sapiens
  misc_RNA (1)...(19): siRNA sense strand
gcaguagacgccaucuuca

SEQ ID NO: 1192688 - RNA, 19 nt, Homo sapiens
  misc_RNA (1)...(19): siRNA sense strand
gugcccaacuccacagaau

SEQ ID NO: 1192689 - RNA, 19 nt, Homo sapiens
  misc_RNA (1)...(19): siRNA sense strand
aaacaggaugagaauauga

SEQ ID NO: 1192690 - RNA, 19 nt, Homo sapiens
  misc_RNA (1)...(19): siRNA sense strand
aggaggagcuggccgagau

SEQ ID NO: 1192691 - RNA, 19 nt, Homo sapiens
  misc_RNA (1)...(19): siRNA sense strand
ugaaacgcaugaaguuguc

SEQ ID NO: 1192692 - RNA, 19 nt, Homo sapiens
  misc_RNA (1)...(19): siRNA sense strand
gcuccugggucacaucaag

SEQ ID NO: 1192693 - RNA, 19 nt, Homo sapiens
  misc_RNA (1)...(19): siRNA sense strand
cauccugggcuuuaagaaa

SEQ ID NO: 1192694 - RNA, 19 nt, Homo sapiens
  misc_RNA (1)...(19): siRNA sense strand
agagaguucuggaugagau

SEQ ID NO: 1192695 - RNA, 19 nt, Homo sapiens
  misc_RNA (1)...(19): siRNA sense strand
gcuguggaauucaggauac

SEQ ID NO: 1192696 - RNA, 19 nt, Homo sapiens
  misc_RNA (1)...(19): siRNA sense strand
cagcagaggaggccgaaau

SEQ ID NO: 1192697 - RNA, 19 nt, Homo sapiens
  misc_RNA (1)...(19): siRNA sense strand
gaggagaagcugcacuauc

SEQ ID NO: 1192698 - RNA, 19 nt, Homo sapiens
  misc_RNA (1)...(19): siRNA sense strand
ggccagugacuuugagauu

SEQ ID NO: 1192699 - RNA, 19 nt, Homo sapiens
  misc_RNA (1)...(19): siRNA sense strand
ucugaugaccugcaccaua

SEQ ID NO: 1192700 - RNA, 19 nt, Homo sapiens
  misc_RNA (1)...(19): siRNA sense strand
ggaaaauugccagacauua

SEQ ID NO: 1192701 - RNA, 19 nt, Homo sapiens
  misc_RNA (1)...(19): siRNA sense strand
gcgaaagcagugaacaaug

SEQ ID NO: 1192702 - RNA, 19 nt, Homo sapiens
  misc_RNA (1)...(19): siRNA sense strand
aaacagguaggcuugauca

SEQ ID NO: 1192703 - RNA, 19 nt, Homo sapiens
  misc_RNA (1)...(19): siRNA sense strand
aaagggagggucaaaguca

SEQ ID NO: 1192704 - RNA, 19 nt, Homo sapiens
  misc_RNA (1)...(19): siRNA sense strand
gcacgagcagcugucuuaa

SEQ ID NO: 1192705 - RNA, 19 nt, Homo sapiens
  misc_RNA (1)...(19): siRNA sense strand
caaagaaguugcucaggua

SEQ ID NO: 1192706 - RNA, 19 nt, Homo sapiens
  misc_RNA (1)...(19): siRNA sense strand
gcaacuagcacugguauua

SEQ ID NO: 1192707 - RNA, 19 nt, Homo sapiens
  misc_RNA (1)...(19): siRNA sense strand
gaaagucaguuugucuuaa

SEQ ID NO: 1192708 - RNA, 19 nt, Homo sapiens
  misc_RNA (1)...(19): siRNA sense strand
gaacaacugcgagcaaaua

SEQ ID NO: 1192709 - RNA, 19 nt, Homo sapiens
  misc_RNA (1)...(19): siRNA sense strand
gguagaagcuaacaaugaa

SEQ ID NO: 1192710 - RNA, 19 nt, Homo sapiens
  misc_RNA (1)...(19): siRNA sense strand
gcagauacaugguguucaa

SEQ ID NO: 1192711 - RNA, 19 nt, Homo sapiens
  misc_RNA (1)...(19): siRNA sense strand
ggaccuagguacucucuau

SEQ ID NO: 1192712 - RNA, 19 nt, Homo sapiens
  misc_RNA (1)...(19): siRNA sense strand
ggaagguguuauucaagua

SEQ ID NO: 1192713 - RNA, 19 nt, Homo sapiens
  misc_RNA (1)...(19): siRNA sense strand
ggaaguaucauucugcaaa

SEQ ID NO: 1192714 - RNA, 19 nt, Homo sapiens
  misc_RNA (1)...(19): siRNA sense strand
ucaagggacuuucuaauca

SEQ ID NO: 1192715 - RNA, 19 nt, Homo sapiens
  misc_RNA (1)...(19): siRNA sense strand
gaacauaugguagaaguga

SEQ ID NO: 1192716 - RNA, 19 nt, Homo sapiens
  misc_RNA (1)...(19): siRNA sense strand
caagauguccuuuauguug

SEQ ID NO: 1192717 - RNA, 19 nt, Homo sapiens
  misc_RNA (1)...(19): siRNA sense strand
caauagaucucauacuaca

SEQ ID NO: 1192718 - RNA, 19 nt, Homo sapiens
  misc_RNA (1)...(19): siRNA sense strand
ugcuggagcucuuaaauua

SEQ ID NO: 1192719 - RNA, 19 nt, Homo sapiens
  misc_RNA (1)...(19): siRNA sense strand
gaaauuacagcacuuggaa

SEQ ID NO: 1192720 - RNA, 19 nt, Homo sapiens
  misc_RNA (1)...(19): siRNA sense strand
gaaagcaauagaucucaua

SEQ ID NO: 1192721 - RNA, 19 nt, Homo sapiens
  misc_RNA (1)...(19): siRNA sense strand
uaauauggaucuaguagga

SEQ ID NO: 1192722 - RNA, 19 nt, Homo sapiens
  misc_RNA (1)...(19): siRNA sense strand
uaaacgugaugcuuucuuu

SEQ ID NO: 1192723 - RNA, 19 nt, Homo sapiens
  misc_RNA (1)...(19): siRNA sense strand
ggaggcauaugaacaacuu

SEQ ID NO: 1192724 - RNA, 19 nt, Homo sapiens
  misc_RNA (1)...(19): siRNA sense strand
gcucuuaaauuagaucuug

SEQ ID NO: 1192725 - RNA, 19 nt, Homo sapiens
  misc_RNA (1)...(19): siRNA sense strand
gaacuacuggaauucauaa

SEQ ID NO: 1192726 - RNA, 19 nt, Homo sapiens
  misc_RNA (1)...(19): siRNA sense strand
caauagguguguuguauca

SEQ ID NO: 1192727 - RNA, 19 nt, Homo sapiens
  misc_RNA (1)...(19): siRNA sense strand
gcaaaugagacacaaagaa

SEQ ID NO: 1192728 - RNA, 19 nt, Homo sapiens
  misc_RNA (1)...(19): siRNA sense strand
gaaacaagcaggcauacug

SEQ ID NO: 1192729 - RNA, 19 nt, Homo sapiens
  misc_RNA (1)...(19): siRNA sense strand
gaagugaaaguaauggaaa

SEQ ID NO: 1192730 - RNA, 19 nt, Homo sapiens
  misc_RNA (1)...(19): siRNA sense strand
gguacgaacuacuggaauu

SEQ ID NO: 1192731 - RNA, 19 nt, Homo sapiens
  misc_RNA (1)...(19): siRNA sense strand
ccaauuaggucacuucaac

SEQ ID NO: 1192732 - RNA, 19 nt, Homo sapiens
  misc_RNA (1)...(19): siRNA sense strand
agcaauagaucucauacua

SEQ ID NO: 1192733 - RNA, 19 nt, Homo sapiens
  misc_RNA (1)...(19): siRNA sense strand
gagcagagaagcauaaaca

SEQ ID NO: 1192734 - RNA, 19 nt, Homo sapiens
  misc_RNA (1)...(19): siRNA sense strand
gaagcaaacguuguaguaa

SEQ ID NO: 1192735 - RNA, 19 nt, Homo sapiens
  misc_RNA (1)...(19): siRNA sense strand
gggcucauguucaaaguga

SEQ ID NO: 1192736 - RNA, 19 nt, Homo sapiens
  misc_RNA (1)...(19): siRNA sense strand
gaagauggcgccagaacga

SEQ ID NO: 1192737 - RNA, 19 nt, Homo sapiens
  misc_RNA (1)...(19): siRNA sense strand
gaaaauggcggaaggaaaa

SEQ ID NO: 1192738 - RNA, 19 nt, Homo sapiens
  misc_RNA (1)...(19): siRNA sense strand
uagguuggaugcaucauaa

SEQ ID NO: 1192739 - RNA, 19 nt, Homo sapiens
  misc_RNA (1)...(19): siRNA sense strand
aaaccuuccugcacaagua

SEQ ID NO: 1192740 - RNA, 19 nt, Homo sapiens
  misc_RNA (1)...(19): siRNA sense strand
cuacaagucuaguuuaaag

SEQ ID NO: 1192741 - RNA, 19 nt, Homo sapiens
  misc_RNA (1)...(19): siRNA sense strand
gaucuuaccaucaauguca

SEQ ID NO: 1192742 - RNA, 19 nt, Homo sapiens
  misc_RNA (1)...(19): siRNA sense strand
ucucagaucuuaccaucaa

SEQ ID NO: 1192743 - RNA, 19 nt, Homo sapiens
  misc_RNA (1)...(19): siRNA sense strand
gaaaacagcuaucuaacuc

SEQ ID NO: 1192744 - RNA, 19 nt, Homo sapiens
  misc_RNA (1)...(19): siRNA sense strand
gcuaggcaguaauuguaua

SEQ ID NO: 1192745 - RNA, 19 nt, Homo sapiens
  misc_RNA (1)...(19): siRNA sense strand
ggaggcagauccuaauucu

SEQ ID NO: 1192746 - RNA, 19 nt, Homo sapiens
  misc_RNA (1)...(19): siRNA sense strand
ggaaagcuaugcuauucag

SEQ ID NO: 1192747 - RNA, 19 nt, Homo sapiens
  misc_RNA (1)...(19): siRNA sense strand
ggacaacaaggcauuaugu

SEQ ID NO: 1192748 - RNA, 19 nt, Homo sapiens
  misc_RNA (1)...(19): siRNA sense strand
gcuagaagcaaacguugua

SEQ ID NO: 1192749 - RNA, 19 nt, Homo sapiens
  misc_RNA (1)...(19): siRNA sense strand
gauacaugguguucaauag

SEQ ID NO: 1192750 - RNA, 19 nt, Homo sapiens
  misc_RNA (1)...(19): siRNA sense strand
gcaacaccuucuccuaaau

SEQ ID NO: 1192751 - RNA, 19 nt, Homo sapiens
  misc_RNA (1)...(19): siRNA sense strand
gcauuauguuuaccaaaga

SEQ ID NO: 1192752 - RNA, 19 nt, Homo sapiens
  misc_RNA (1)...(19): siRNA sense strand
agacaaagccacaaaggaa

SEQ ID NO: 1192753 - RNA, 19 nt, Homo sapiens
  misc_RNA (1)...(19): siRNA sense strand
gaagcuaacaaugaacaua

SEQ ID NO: 1192754 - RNA, 19 nt, Homo sapiens
  misc_RNA (1)...(19): siRNA sense strand
ucacagagcucuacaaaag

SEQ ID NO: 1192755 - RNA, 19 nt, Homo sapiens
  misc_RNA (1)...(19): siRNA sense strand
ccauggagauucaccaaau

SEQ ID NO: 1192756 - RNA, 19 nt, Homo sapiens
  misc_RNA (1)...(19): siRNA sense strand
guaauggaaaugugccuua

SEQ ID NO: 1192757 - RNA, 19 nt, Homo sapiens
  misc_RNA (1)...(19): siRNA sense strand
gcaaggcuguucgcugcua

SEQ ID NO: 1192758 - RNA, 19 nt, Homo sapiens
  misc_RNA (1)...(19): siRNA sense strand
aaacuuugguagaagcuaa

SEQ ID NO: 1192759 - RNA, 19 nt, Homo sapiens
  misc_RNA (1)...(19): siRNA sense strand
cuacaaacucugucucuaa

SEQ ID NO: 1192760 - RNA, 19 nt, Homo sapiens
  misc_RNA (1)...(19): siRNA sense strand
agcaaacguuguaguaaua

SEQ ID NO: 1192761 - RNA, 19 nt, Homo sapiens
  misc_RNA (1)...(19): siRNA sense strand
caggaugccuuuauaucuu

SEQ ID NO: 1192762 - RNA, 19 nt, Homo sapiens
  misc_RNA (1)...(19): siRNA sense strand
gaaguaucauucugcaaag

SEQ ID NO: 1192763 - RNA, 19 nt, Homo sapiens
  misc_RNA (1)...(19): siRNA sense strand
ggagaaaacagcuaucuaa

SEQ ID NO: 1192764 - RNA, 19 nt, Homo sapiens
  misc_RNA (1)...(19): siRNA sense strand
cagcaacaccuucuccuaa

SEQ ID NO: 1192765 - RNA, 19 nt, Homo sapiens
  misc_RNA (1)...(19): siRNA sense strand
cuaaucauguucaucaguu

SEQ ID NO: 1192766 - RNA, 19 nt, Homo sapiens
  misc_RNA (1)...(19): siRNA sense strand
gcaauuaaagcauuucaag

SEQ ID NO: 1192767 - RNA, 19 nt, Homo sapiens
  misc_RNA (1)...(19): siRNA sense strand
aaauaaacgugaugcuuuc

SEQ ID NO: 1192768 - RNA, 19 nt, Homo sapiens
  misc_RNA (1)...(19): siRNA sense strand
guauuaagaaggcgaauga

SEQ ID NO: 1192769 - RNA, 19 nt, Homo sapiens
  misc_RNA (1)...(19): siRNA sense strand
gucaggaccuaaugaagaa

SEQ ID NO: 1192770 - RNA, 19 nt, Homo sapiens
  misc_RNA (1)...(19): siRNA sense strand
gccagagucuuucacauca

SEQ ID NO: 1192771 - RNA, 19 nt, Homo sapiens
  misc_RNA (1)...(19): siRNA sense strand
gcuaugcuauucaguaucu

SEQ ID NO: 1192772 - RNA, 19 nt, Homo sapiens
  misc_RNA (1)...(19): siRNA sense strand
aaggaaagcuaugcuauuc

SEQ ID NO: 1192773 - RNA, 19 nt, Homo sapiens
  misc_RNA (1)...(19): siRNA sense strand
caaugucagugucuauaug

SEQ ID NO: 1192774 - RNA, 19 nt, Homo sapiens
  misc_RNA (1)...(19): siRNA sense strand
cuuaaaagcugaaggaaaa

SEQ ID NO: 1192775 - RNA, 19 nt, Homo sapiens
  misc_RNA (1)...(19): siRNA sense strand
ggagauucaccaaauuuau

SEQ ID NO: 1192776 - RNA, 19 nt, Homo sapiens
  misc_RNA (1)...(19): siRNA sense strand
agucaccucuccugucaua

SEQ ID NO: 1192777 - RNA, 19 nt, Homo sapiens
  misc_RNA (1)...(19): siRNA sense strand
caaaggaaagcuaugcuau

SEQ ID NO: 1192778 - RNA, 19 nt, Homo sapiens
  misc_RNA (1)...(19): siRNA sense strand
ucacccagcuguucauaca

SEQ ID NO: 1192779 - RNA, 19 nt, Homo sapiens
  misc_RNA (1)...(19): siRNA sense strand
caacuagcacugguauuaa

SEQ ID NO: 1192780 - RNA, 19 nt, Homo sapiens
  misc_RNA (1)...(19): siRNA sense strand
ggaagugaaaguaauggaa

SEQ ID NO: 1192781 - RNA, 19 nt, Homo sapiens
  misc_RNA (1)...(19): siRNA sense strand
caaaugagacacaaagaag

SEQ ID NO: 1192782 - RNA, 19 nt, Homo sapiens
  misc_RNA (1)...(19): siRNA sense strand
aaaugcagcuagaagcaaa

SEQ ID NO: 1192783 - RNA, 19 nt, Homo sapiens
  misc_RNA (1)...(19): siRNA sense strand
gcuauucaguaucuccaaa

SEQ ID NO: 1192784 - RNA, 19 nt, Homo sapiens
  misc_RNA (1)...(19): siRNA sense strand
caaaggaggcauaugaaca

SEQ ID NO: 1192785 - RNA, 19 nt, Homo sapiens
  misc_RNA (1)...(19): siRNA sense strand
auacaaagacugaucauuc

SEQ ID NO: 1192786 - RNA, 19 nt, Homo sapiens
  misc_RNA (1)...(19): siRNA sense strand
ucagcucucugcuuuguug

SEQ ID NO: 1192787 - RNA, 19 nt, Homo sapiens
  misc_RNA (1)...(19): siRNA sense strand
ggcauuauguuuaccaaag

SEQ ID NO: 1192788 - RNA, 19 nt, Homo sapiens
  misc_RNA (1)...(19): siRNA sense strand
ugacuucuuuugccaauua

SEQ ID NO: 1192789 - RNA, 19 nt, Homo sapiens
  misc_RNA (1)...(19): siRNA sense strand
aagcaaacguuguaguaau

SEQ ID NO: 1192790 - RNA, 19 nt, Homo sapiens
  misc_RNA (1)...(19): siRNA sense strand
aggaugccuuuauaucuua

SEQ ID NO: 1192791 - RNA, 19 nt, Homo sapiens
  misc_RNA (1)...(19): siRNA sense strand
gcaaguuuauucguugugu

SEQ ID NO: 1192792 - RNA, 19 nt, Homo sapiens
  misc_RNA (1)...(19): siRNA sense strand
caaugaacauaugguagaa

SEQ ID NO: 1192793 - RNA, 19 nt, Homo sapiens
  misc_RNA (1)...(19): siRNA sense strand
uaaauccacugagcagaga

SEQ ID NO: 1192794 - RNA, 19 nt, Homo sapiens
  misc_RNA (1)...(19): siRNA sense strand
cagaagagccauggagaaa

SEQ ID NO: 1192795 - RNA, 19 nt, Homo sapiens
  misc_RNA (1)...(19): siRNA sense strand
agaagcaaacguuguagua

SEQ ID NO: 1192796 - RNA, 19 nt, Homo sapiens
  misc_RNA (1)...(19): siRNA sense strand
cauggagauucaccaaauu

SEQ ID NO: 1192797 - RNA, 19 nt, Homo sapiens
  misc_RNA (1)...(19): siRNA sense strand
aaagucagaguucauguuu

SEQ ID NO: 1192798 - RNA, 19 nt, Homo sapiens
  misc_RNA (1)...(19): siRNA sense strand
ugaaaguaauggaaaugug

SEQ ID NO: 1192799 - RNA, 19 nt, Homo sapiens
  misc_RNA (1)...(19): siRNA sense strand
gacaaagccacaaaggaaa

SEQ ID NO: 1192800 - RNA, 19 nt, Homo sapiens
  misc_RNA (1)...(19): siRNA sense strand
ccacccacaccuaguauuu

SEQ ID NO: 1192801 - RNA, 19 nt, Homo sapiens
  misc_RNA (1)...(19): siRNA sense strand
gcucucugcuuuguugauu

SEQ ID NO: 1192802 - RNA, 19 nt, Homo sapiens
  misc_RNA (1)...(19): siRNA sense strand
uacaaacucugucucuaau

SEQ ID NO: 1192803 - RNA, 19 nt, Homo sapiens
  misc_RNA (1)...(19): siRNA sense strand
auucaucacugccuacaaa

SEQ ID NO: 1192804 - RNA, 19 nt, Homo sapiens
  misc_RNA (1)...(19): siRNA sense strand
gaagguguuauucaaguau

SEQ ID NO: 1192805 - RNA, 19 nt, Homo sapiens
  misc_RNA (1)...(19): siRNA sense strand
caaagaaguugcucaggua

SEQ ID NO: 1192806 - RNA, 19 nt, Homo sapiens
  misc_RNA (1)...(19): siRNA sense strand
gcaacuagcacugguauua

SEQ ID NO: 1192807 - RNA, 19 nt, Homo sapiens
  misc_RNA (1)...(19): siRNA sense strand
gaaagucaguuugucuuaa

SEQ ID NO: 1192808 - RNA, 19 nt, Homo sapiens
  misc_RNA (1)...(19): siRNA sense strand
gaacaacugcgagcaaaua

SEQ ID NO: 1192809 - RNA, 19 nt, Homo sapiens
  misc_RNA (1)...(19): siRNA sense strand
gguagaagcuaacaaugaa

SEQ ID NO: 1192810 - RNA, 19 nt, Homo sapiens
  misc_RNA (1)...(19): siRNA sense strand
gcagauacaugguguucaa

SEQ ID NO: 1192811 - RNA, 19 nt, Homo sapiens
  misc_RNA (1)...(19): siRNA sense strand
ggaccuagguacucucuau

SEQ ID NO: 1192812 - RNA, 19 nt, Homo sapiens
  misc_RNA (1)...(19): siRNA sense strand
ggaagguguuauucaagua

SEQ ID NO: 1192813 - RNA, 19 nt, Homo sapiens
  misc_RNA (1)...(19): siRNA sense strand
ggaaguaucauucugcaaa

SEQ ID NO: 1192814 - RNA, 19 nt, Homo sapiens
  misc_RNA (1)...(19): siRNA sense strand
ucaagggacuuucuaauca

SEQ ID NO: 1192815 - RNA, 19 nt, Homo sapiens
  misc_RNA (1)...(19): siRNA sense strand
gaacauaugguagaaguga

SEQ ID NO: 1192816 - RNA, 19 nt, Homo sapiens
  misc_RNA (1)...(19): siRNA sense strand
caagauguccuuuauguug

SEQ ID NO: 1192817 - RNA, 19 nt, Homo sapiens
  misc_RNA (1)...(19): siRNA sense strand
caauagaucucauacuaca

SEQ ID NO: 1192818 - RNA, 19 nt, Homo sapiens
  misc_RNA (1)...(19): siRNA sense strand
ugcuggagcucuuaaauua

SEQ ID NO: 1192819 - RNA, 19 nt, Homo sapiens
  misc_RNA (1)...(19): siRNA sense strand
gaaauuacagcacuuggaa

SEQ ID NO: 1192820 - RNA, 19 nt, Homo sapiens
  misc_RNA (1)...(19): siRNA sense strand
gaaagcaauagaucucaua

SEQ ID NO: 1192821 - RNA, 19 nt, Homo sapiens
  misc_RNA (1)...(19): siRNA sense strand
uaauauggaucuaguagga

SEQ ID NO: 1192822 - RNA, 19 nt, Homo sapiens
  misc_RNA (1)...(19): siRNA sense strand
uaaacgugaugcuuucuuu

SEQ ID NO: 1192823 - RNA, 19 nt, Homo sapiens
  misc_RNA (1)...(19): siRNA sense strand
ggaggcauaugaacaacuu

SEQ ID NO: 1192824 - RNA, 19 nt, Homo sapiens
  misc_RNA (1)...(19): siRNA sense strand
gcucuuaaauuagaucuug

SEQ ID NO: 1192825 - RNA, 19 nt, Homo sapiens
  misc_RNA (1)...(19): siRNA sense strand
gaacuacuggaauucauaa

SEQ ID NO: 1192826 - RNA, 19 nt, Homo sapiens
  misc_RNA (1)...(19): siRNA sense strand
caauagguguguuguauca

SEQ ID NO: 1192827 - RNA, 19 nt, Homo sapiens
  misc_RNA (1)...(19): siRNA sense strand
gcaaaugagacacaaagaa

SEQ ID NO: 1192828 - RNA, 19 nt, Homo sapiens
  misc_RNA (1)...(19): siRNA sense strand
gaaacaagcaggcauacug

SEQ ID NO: 1192829 - RNA, 19 nt, Homo sapiens
  misc_RNA (1)...(19): siRNA sense strand
gaagugaaaguaauggaaa

SEQ ID NO: 1192830 - RNA, 19 nt, Homo sapiens
  misc_RNA (1)...(19): siRNA sense strand
gguacgaacuacuggaauu

SEQ ID NO: 1192831 - RNA, 19 nt, Homo sapiens
  misc_RNA (1)...(19): siRNA sense strand
ccaauuaggucacuucaac

SEQ ID NO: 1192832 - RNA, 19 nt, Homo sapiens
  misc_RNA (1)...(19): siRNA sense strand
agcaauagaucucauacua

SEQ ID NO: 1192833 - RNA, 19 nt, Homo sapiens
  misc_RNA (1)...(19): siRNA sense strand
gagcagagaagcauaaaca

SEQ ID NO: 1192834 - RNA, 19 nt, Homo sapiens
  misc_RNA (1)...(19): siRNA sense strand
gaagcaaacguuguaguaa

SEQ ID NO: 1192835 - RNA, 19 nt, Homo sapiens
  misc_RNA (1)...(19): siRNA sense strand
gggcucauguucaaaguga

SEQ ID NO: 1192836 - RNA, 19 nt, Homo sapiens
  misc_RNA (1)...(19): siRNA sense strand
gaagauggcgccagaacga

SEQ ID NO: 1192837 - RNA, 19 nt, Homo sapiens
  misc_RNA (1)...(19): siRNA sense strand
gaaaauggcggaaggaaaa

SEQ ID NO: 1192838 - RNA, 19 nt, Homo sapiens
  misc_RNA (1)...(19): siRNA sense strand
uagguuggaugcaucauaa

SEQ ID NO: 1192839 - RNA, 19 nt, Homo sapiens
  misc_RNA (1)...(19): siRNA sense strand
aaaccuuccugcacaagua

SEQ ID NO: 1192840 - RNA, 19 nt, Homo sapiens
  misc_RNA (1)...(19): siRNA sense strand
cuacaagucuaguuuaaag

SEQ ID NO: 1192841 - RNA, 19 nt, Homo sapiens
  misc_RNA (1)...(19): siRNA sense strand
gaucuuaccaucaauguca

SEQ ID NO: 1192842 - RNA, 19 nt, Homo sapiens
  misc_RNA (1)...(19): siRNA sense strand
ucucagaucuuaccaucaa

SEQ ID NO: 1192843 - RNA, 19 nt, Homo sapiens
  misc_RNA (1)...(19): siRNA sense strand
gaaaacagcuaucuaacuc

SEQ ID NO: 1192844 - RNA, 19 nt, Homo sapiens
  misc_RNA (1)...(19): siRNA sense strand
gcuaggcaguaauuguaua

SEQ ID NO: 1192845 - RNA, 19 nt, Homo sapiens
  misc_RNA (1)...(19): siRNA sense strand
ggaggcagauccuaauucu

SEQ ID NO: 1192846 - RNA, 19 nt, Homo sapiens
  misc_RNA (1)...(19): siRNA sense strand
ggaaagcuaugcuauucag

SEQ ID NO: 1192847 - RNA, 19 nt, Homo sapiens
  misc_RNA (1)...(19): siRNA sense strand
ggacaacaaggcauuaugu

SEQ ID NO: 1192848 - RNA, 19 nt, Homo sapiens
  misc_RNA (1)...(19): siRNA sense strand
gcuagaagcaaacguugua

SEQ ID NO: 1192849 - RNA, 19 nt, Homo sapiens
  misc_RNA (1)...(19): siRNA sense strand
gauacaugguguucaauag

SEQ ID NO: 1192850 - RNA, 19 nt, Homo sapiens
  misc_RNA (1)...(19): siRNA sense strand
gcaacaccuucuccuaaau

SEQ ID NO: 1192851 - RNA, 19 nt, Homo sapiens
  misc_RNA (1)...(19): siRNA sense strand
gcauuauguuuaccaaaga

SEQ ID NO: 1192852 - RNA, 19 nt, Homo sapiens
  misc_RNA (1)...(19): siRNA sense strand
agacaaagccacaaaggaa

SEQ ID NO: 1192853 - RNA, 19 nt, Homo sapiens
  misc_RNA (1)...(19): siRNA sense strand
gaagcuaacaaugaacaua

SEQ ID NO: 1192854 - RNA, 19 nt, Homo sapiens
  misc_RNA (1)...(19): siRNA sense strand
ucacagagcucuacaaaag

SEQ ID NO: 1192855 - RNA, 19 nt, Homo sapiens
  misc_RNA (1)...(19): siRNA sense strand
ccauggagauucaccaaau

SEQ ID NO: 1192856 - RNA, 19 nt, Homo sapiens
  misc_RNA (1)...(19): siRNA sense strand
guaauggaaaugugccuua

SEQ ID NO: 1192857 - RNA, 19 nt, Homo sapiens
  misc_RNA (1)...(19): siRNA sense strand
gcaaggcuguucgcugcua

SEQ ID NO: 1192858 - RNA, 19 nt, Homo sapiens
  misc_RNA (1)...(19): siRNA sense strand
aaacuuugguagaagcuaa

SEQ ID NO: 1192859 - RNA, 19 nt, Homo sapiens
  misc_RNA (1)...(19): siRNA sense strand
cuacaaacucugucucuaa

SEQ ID NO: 1192860 - RNA, 19 nt, Homo sapiens
  misc_RNA (1)...(19): siRNA sense strand
agcaaacguuguaguaaua

SEQ ID NO: 1192861 - RNA, 19 nt, Homo sapiens
  misc_RNA (1)...(19): siRNA sense strand
caggaugccuuuauaucuu

SEQ ID NO: 1192862 - RNA, 19 nt, Homo sapiens
  misc_RNA (1)...(19): siRNA sense strand
gaaguaucauucugcaaag

SEQ ID NO: 1192863 - RNA, 19 nt, Homo sapiens
  misc_RNA (1)...(19): siRNA sense strand
ggagaaaacagcuaucuaa

SEQ ID NO: 1192864 - RNA, 19 nt, Homo sapiens
  misc_RNA (1)...(19): siRNA sense strand
cagcaacaccuucuccuaa

SEQ ID NO: 1192865 - RNA, 19 nt, Homo sapiens
  misc_RNA (1)...(19): siRNA sense strand
cuaaucauguucaucaguu

SEQ ID NO: 1192866 - RNA, 19 nt, Homo sapiens
  misc_RNA (1)...(19): siRNA sense strand
gcaauuaaagcauuucaag

SEQ ID NO: 1192867 - RNA, 19 nt, Homo sapiens
  misc_RNA (1)...(19): siRNA sense strand
aaauaaacgugaugcuuuc

SEQ ID NO: 1192868 - RNA, 19 nt, Homo sapiens
  misc_RNA (1)...(19): siRNA sense strand
guauuaagaaggcgaauga

SEQ ID NO: 1192869 - RNA, 19 nt, Homo sapiens
  misc_RNA (1)...(19): siRNA sense strand
gucaggaccuaaugaagaa

SEQ ID NO: 1192870 - RNA, 19 nt, Homo sapiens
  misc_RNA (1)...(19): siRNA sense strand
gccagagucuuucacauca

SEQ ID NO: 1192871 - RNA, 19 nt, Homo sapiens
  misc_RNA (1)...(19): siRNA sense strand
gcuaugcuauucaguaucu

SEQ ID NO: 1192872 - RNA, 19 nt, Homo sapiens
  misc_RNA (1)...(19): siRNA sense strand
aaggaaagcuaugcuauuc

SEQ ID NO: 1192873 - RNA, 19 nt, Homo sapiens
  misc_RNA (1)...(19): siRNA sense strand
caaugucagugucuauaug

SEQ ID NO: 1192874 - RNA, 19 nt, Homo sapiens
  misc_RNA (1)...(19): siRNA sense strand
cuuaaaagcugaaggaaaa

SEQ ID NO: 1192875 - RNA, 19 nt, Homo sapiens
  misc_RNA (1)...(19): siRNA sense strand
ggagauucaccaaauuuau

SEQ ID NO: 1192876 - RNA, 19 nt, Homo sapiens
  misc_RNA (1)...(19): siRNA sense strand
agucaccucuccugucaua

SEQ ID NO: 1192877 - RNA, 19 nt, Homo sapiens
  misc_RNA (1)...(19): siRNA sense strand
caaaggaaagcuaugcuau

SEQ ID NO: 1192878 - RNA, 19 nt, Homo sapiens
  misc_RNA (1)...(19): siRNA sense strand
ucacccagcuguucauaca

SEQ ID NO: 1192879 - RNA, 19 nt, Homo sapiens
  misc_RNA (1)...(19): siRNA sense strand
caacuagcacugguauuaa

SEQ ID NO: 1192880 - RNA, 19 nt, Homo sapiens
  misc_RNA (1)...(19): siRNA sense strand
ggaagugaaaguaauggaa

SEQ ID NO: 1192881 - RNA, 19 nt, Homo sapiens
  misc_RNA (1)...(19): siRNA sense strand
caaaugagacacaaagaag

SEQ ID NO: 1192882 - RNA, 19 nt, Homo sapiens
  misc_RNA (1)...(19): siRNA sense strand
aaaugcagcuagaagcaaa

SEQ ID NO: 1192883 - RNA, 19 nt, Homo sapiens
  misc_RNA (1)...(19): siRNA sense strand
gcuauucaguaucuccaaa

SEQ ID NO: 1192884 - RNA, 19 nt, Homo sapiens
  misc_RNA (1)...(19): siRNA sense strand
caaaggaggcauaugaaca

SEQ ID NO: 1192885 - RNA, 19 nt, Homo sapiens
  misc_RNA (1)...(19): siRNA sense strand
auacaaagacugaucauuc

SEQ ID NO: 1192886 - RNA, 19 nt, Homo sapiens
  misc_RNA (1)...(19): siRNA sense strand
ucagcucucugcuuuguug

SEQ ID NO: 1192887 - RNA, 19 nt, Homo sapiens
  misc_RNA (1)...(19): siRNA sense strand
ggcauuauguuuaccaaag

SEQ ID NO: 1192888 - RNA, 19 nt, Homo sapiens
  misc_RNA (1)...(19): siRNA sense strand
ugacuucuuuugccaauua

SEQ ID NO: 1192889 - RNA, 19 nt, Homo sapiens
  misc_RNA (1)...(19): siRNA sense strand
aagcaaacguuguaguaau

SEQ ID NO: 1192890 - RNA, 19 nt, Homo sapiens
  misc_RNA (1)...(19): siRNA sense strand
aggaugccuuuauaucuua

SEQ ID NO: 1192891 - RNA, 19 nt, Homo sapiens
  misc_RNA (1)...(19): siRNA sense strand
gcaaguuuauucguugugu

SEQ ID NO: 1192892 - RNA, 19 nt, Homo sapiens
  misc_RNA (1)...(19): siRNA sense strand
caaugaacauaugguagaa

SEQ ID NO: 1192893 - RNA, 19 nt, Homo sapiens
  misc_RNA (1)...(19): siRNA sense strand
uaaauccacugagcagaga

SEQ ID NO: 1192894 - RNA, 19 nt, Homo sapiens
  misc_RNA (1)...(19): siRNA sense strand
cagaagagccauggagaaa

SEQ ID NO: 1192895 - RNA, 19 nt, Homo sapiens
  misc_RNA (1)...(19): siRNA sense strand
agaagcaaacguuguagua

SEQ ID NO: 1192896 - RNA, 19 nt, Homo sapiens
  misc_RNA (1)...(19): siRNA sense strand
cauggagauucaccaaauu

SEQ ID NO: 1192897 - RNA, 19 nt, Homo sapiens
  misc_RNA (1)...(19): siRNA sense strand
aaagucagaguucauguuu

SEQ ID NO: 1192898 - RNA, 19 nt, Homo sapiens
  misc_RNA (1)...(19): siRNA sense strand
ugaaaguaauggaaaugug

SEQ ID NO: 1192899 - RNA, 19 nt, Homo sapiens
  misc_RNA (1)...(19): siRNA sense strand
gacaaagccacaaaggaaa

SEQ ID NO: 1192900 - RNA, 19 nt, Homo sapiens
  misc_RNA (1)...(19): siRNA sense strand
ccacccacaccuaguauuu

SEQ ID NO: 1192901 - RNA, 19 nt, Homo sapiens
  misc_RNA (1)...(19): siRNA sense strand
gcucucugcuuuguugauu

SEQ ID NO: 1192902 - RNA, 19 nt, Homo sapiens
  misc_RNA (1)...(19): siRNA sense strand
uacaaacucugucucuaau

SEQ ID NO: 1192903 - RNA, 19 nt, Homo sapiens
  misc_RNA (1)...(19): siRNA sense strand
auucaucacugccuacaaa

SEQ ID NO: 1192904 - RNA, 19 nt, Homo sapiens
  misc_RNA (1)...(19): siRNA sense strand
gaagguguuauucaaguau

SEQ ID NO: 1192905 - RNA, 19 nt, Homo sapiens
  misc_RNA (1)...(19): siRNA sense strand
caaagaaguugcucaggua

SEQ ID NO: 1192906 - RNA, 19 nt, Homo sapiens
  misc_RNA (1)...(19): siRNA sense strand
gcaacuagcacugguauua

SEQ ID NO: 1192907 - RNA, 19 nt, Homo sapiens
  misc_RNA (1)...(19): siRNA sense strand
gaaagucaguuugucuuaa

SEQ ID NO: 1192908 - RNA, 19 nt, Homo sapiens
  misc_RNA (1)...(19): siRNA sense strand
gaacaacugcgagcaaaua

SEQ ID NO: 1192909 - RNA, 19 nt, Homo sapiens
  misc_RNA (1)...(19): siRNA sense strand
gguagaagcuaacaaugaa

SEQ ID NO: 1192910 - RNA, 19 nt, Homo sapiens
  misc_RNA (1)...(19): siRNA sense strand
gcagauacaugguguucaa

SEQ ID NO: 1192911 - RNA, 19 nt, Homo sapiens
  misc_RNA (1)...(19): siRNA sense strand
ggaccuagguacucucuau

SEQ ID NO: 1192912 - RNA, 19 nt, Homo sapiens
  misc_RNA (1)...(19): siRNA sense strand
ggaagguguuauucaagua

SEQ ID NO: 1192913 - RNA, 19 nt, Homo sapiens
  misc_RNA (1)...(19): siRNA sense strand
ggaaguaucauucugcaaa

SEQ ID NO: 1192914 - RNA, 19 nt, Homo sapiens
  misc_RNA (1)...(19): siRNA sense strand
ucaagggacuuucuaauca

SEQ ID NO: 1192915 - RNA, 19 nt, Homo sapiens
  misc_RNA (1)...(19): siRNA sense strand
gaacauaugguagaaguga

SEQ ID NO: 1192916 - RNA, 19 nt, Homo sapiens
  misc_RNA (1)...(19): siRNA sense strand
caagauguccuuuauguug

SEQ ID NO: 1192917 - RNA, 19 nt, Homo sapiens
  misc_RNA (1)...(19): siRNA sense strand
caauagaucucauacuaca

SEQ ID NO: 1192918 - RNA, 19 nt, Homo sapiens
  misc_RNA (1)...(19): siRNA sense strand
ugcuggagcucuuaaauua

SEQ ID NO: 1192919 - RNA, 19 nt, Homo sapiens
  misc_RNA (1)...(19): siRNA sense strand
gaaauuacagcacuuggaa

SEQ ID NO: 1192920 - RNA, 19 nt, Homo sapiens
  misc_RNA (1)...(19): siRNA sense strand
gaaagcaauagaucucaua

SEQ ID NO: 1192921 - RNA, 19 nt, Homo sapiens
  misc_RNA (1)...(19): siRNA sense strand
uaauauggaucuaguagga

SEQ ID NO: 1192922 - RNA, 19 nt, Homo sapiens
  misc_RNA (1)...(19): siRNA sense strand
uaaacgugaugcuuucuuu

SEQ ID NO: 1192923 - RNA, 19 nt, Homo sapiens
  misc_RNA (1)...(19): siRNA sense strand
ggaggcauaugaacaacuu

SEQ ID NO: 1192924 - RNA, 19 nt, Homo sapiens
  misc_RNA (1)...(19): siRNA sense strand
gcucuuaaauuagaucuug

SEQ ID NO: 1192925 - RNA, 19 nt, Homo sapiens
  misc_RNA (1)...(19): siRNA sense strand
gaacuacuggaauucauaa

SEQ ID NO: 1192926 - RNA, 19 nt, Homo sapiens
  misc_RNA (1)...(19): siRNA sense strand
caauagguguguuguauca

SEQ ID NO: 1192927 - RNA, 19 nt, Homo sapiens
  misc_RNA (1)...(19): siRNA sense strand
gcaaaugagacacaaagaa

SEQ ID NO: 1192928 - RNA, 19 nt, Homo sapiens
  misc_RNA (1)...(19): siRNA sense strand
gaaacaagcaggcauacug

SEQ ID NO: 1192929 - RNA, 19 nt, Homo sapiens
  misc_RNA (1)...(19): siRNA sense strand
gaagugaaaguaauggaaa

SEQ ID NO: 1192930 - RNA, 19 nt, Homo sapiens
  misc_RNA (1)...(19): siRNA sense strand
gguacgaacuacuggaauu

SEQ ID NO: 1192931 - RNA, 19 nt, Homo sapiens
  misc_RNA (1)...(19): siRNA sense strand
ccaauuaggucacuucaac

SEQ ID NO: 1192932 - RNA, 19 nt, Homo sapiens
  misc_RNA (1)...(19): siRNA sense strand
agcaauagaucucauacua

SEQ ID NO: 1192933 - RNA, 19 nt, Homo sapiens
  misc_RNA (1)...(19): siRNA sense strand
gagcagagaagcauaaaca

SEQ ID NO: 1192934 - RNA, 19 nt, Homo sapiens
  misc_RNA (1)...(19): siRNA sense strand
gaagcaaacguuguaguaa

SEQ ID NO: 1192935 - RNA, 19 nt, Homo sapiens
  misc_RNA (1)...(19): siRNA sense strand
gggcucauguucaaaguga

SEQ ID NO: 1192936 - RNA, 19 nt, Homo sapiens
  misc_RNA (1)...(19): siRNA sense strand
gaagauggcgccagaacga

SEQ ID NO: 1192937 - RNA, 19 nt, Homo sapiens
  misc_RNA (1)...(19): siRNA sense strand
gaaaauggcggaaggaaaa

SEQ ID NO: 1192938 - RNA, 19 nt, Homo sapiens
  misc_RNA (1)...(19): siRNA sense strand
uagguuggaugcaucauaa

SEQ ID NO: 1192939 - RNA, 19 nt, Homo sapiens
  misc_RNA (1)...(19): siRNA sense strand
aaaccuuccugcacaagua

SEQ ID NO: 1192940 - RNA, 19 nt, Homo sapiens
  misc_RNA (1)...(19): siRNA sense strand
cuacaagucuaguuuaaag

SEQ ID NO: 1192941 - RNA, 19 nt, Homo sapiens
  misc_RNA (1)...(19): siRNA sense strand
gaucuuaccaucaauguca

SEQ ID NO: 1192942 - RNA, 19 nt, Homo sapiens
  misc_RNA (1)...(19): siRNA sense strand
ucucagaucuuaccaucaa

SEQ ID NO: 1192943 - RNA, 19 nt, Homo sapiens
  misc_RNA (1)...(19): siRNA sense strand
gaaaacagcuaucuaacuc

SEQ ID NO: 1192944 - RNA, 19 nt, Homo sapiens
  misc_RNA (1)...(19): siRNA sense strand
gcuaggcaguaauuguaua

SEQ ID NO: 1192945 - RNA, 19 nt, Homo sapiens
  misc_RNA (1)...(19): siRNA sense strand
ggaggcagauccuaauucu

SEQ ID NO: 1192946 - RNA, 19 nt, Homo sapiens
  misc_RNA (1)...(19): siRNA sense strand
ggaaagcuaugcuauucag

SEQ ID NO: 1192947 - RNA, 19 nt, Homo sapiens
  misc_RNA (1)...(19): siRNA sense strand
ggacaacaaggcauuaugu

SEQ ID NO: 1192948 - RNA, 19 nt, Homo sapiens
  misc_RNA (1)...(19): siRNA sense strand
gcuagaagcaaacguugua

SEQ ID NO: 1192949 - RNA, 19 nt, Homo sapiens
  misc_RNA (1)...(19): siRNA sense strand
gauacaugguguucaauag

SEQ ID NO: 1192950 - RNA, 19 nt, Homo sapiens
  misc_RNA (1)...(19): siRNA sense strand
gcaacaccuucuccuaaau

SEQ ID NO: 1192951 - RNA, 19 nt, Homo sapiens
  misc_RNA (1)...(19): siRNA sense strand
gcauuauguuuaccaaaga

SEQ ID NO: 1192952 - RNA, 19 nt, Homo sapiens
  misc_RNA (1)...(19): siRNA sense strand
agacaaagccacaaaggaa

SEQ ID NO: 1192953 - RNA, 19 nt, Homo sapiens
  misc_RNA (1)...(19): siRNA sense strand
gaagcuaacaaugaacaua

SEQ ID NO: 1192954 - RNA, 19 nt, Homo sapiens
  misc_RNA (1)...(19): siRNA sense strand
ucacagagcucuacaaaag

SEQ ID NO: 1192955 - RNA, 19 nt, Homo sapiens
  misc_RNA (1)...(19): siRNA sense strand
ccauggagauucaccaaau

SEQ ID NO: 1192956 - RNA, 19 nt, Homo sapiens
  misc_RNA (1)...(19): siRNA sense strand
guaauggaaaugugccuua

SEQ ID NO: 1192957 - RNA, 19 nt, Homo sapiens
  misc_RNA (1)...(19): siRNA sense strand
gcaaggcuguucgcugcua

SEQ ID NO: 1192958 - RNA, 19 nt, Homo sapiens
  misc_RNA (1)...(19): siRNA sense strand
aaacuuugguagaagcuaa

SEQ ID NO: 1192959 - RNA, 19 nt, Homo sapiens
  misc_RNA (1)...(19): siRNA sense strand
cuacaaacucugucucuaa

SEQ ID NO: 1192960 - RNA, 19 nt, Homo sapiens
  misc_RNA (1)...(19): siRNA sense strand
agcaaacguuguaguaaua

SEQ ID NO: 1192961 - RNA, 19 nt, Homo sapiens
  misc_RNA (1)...(19): siRNA sense strand
caggaugccuuuauaucuu

SEQ ID NO: 1192962 - RNA, 19 nt, Homo sapiens
  misc_RNA (1)...(19): siRNA sense strand
gaaguaucauucugcaaag

SEQ ID NO: 1192963 - RNA, 19 nt, Homo sapiens
  misc_RNA (1)...(19): siRNA sense strand
ggagaaaacagcuaucuaa

SEQ ID NO: 1192964 - RNA, 19 nt, Homo sapiens
  misc_RNA (1)...(19): siRNA sense strand
cagcaacaccuucuccuaa

SEQ ID NO: 1192965 - RNA, 19 nt, Homo sapiens
  misc_RNA (1)...(19): siRNA sense strand
cuaaucauguucaucaguu

SEQ ID NO: 1192966 - RNA, 19 nt, Homo sapiens
  misc_RNA (1)...(19): siRNA sense strand
gcaauuaaagcauuucaag

SEQ ID NO: 1192967 - RNA, 19 nt, Homo sapiens
  misc_RNA (1)...(19): siRNA sense strand
aaauaaacgugaugcuuuc

SEQ ID NO: 1192968 - RNA, 19 nt, Homo sapiens
  misc_RNA (1)...(19): siRNA sense strand
guauuaagaaggcgaauga

SEQ ID NO: 1192969 - RNA, 19 nt, Homo sapiens
  misc_RNA (1)...(19): siRNA sense strand
gucaggaccuaaugaagaa

SEQ ID NO: 1192970 - RNA, 19 nt, Homo sapiens
  misc_RNA (1)...(19): siRNA sense strand
gccagagucuuucacauca

SEQ ID NO: 1192971 - RNA, 19 nt, Homo sapiens
  misc_RNA (1)...(19): siRNA sense strand
gcuaugcuauucaguaucu

SEQ ID NO: 1192972 - RNA, 19 nt, Homo sapiens
  misc_RNA (1)...(19): siRNA sense strand
aaggaaagcuaugcuauuc

SEQ ID NO: 1192973 - RNA, 19 nt, Homo sapiens
  misc_RNA (1)...(19): siRNA sense strand
caaugucagugucuauaug

SEQ ID NO: 1192974 - RNA, 19 nt, Homo sapiens
  misc_RNA (1)...(19): siRNA sense strand
cuuaaaagcugaaggaaaa

SEQ ID NO: 1192975 - RNA, 19 nt, Homo sapiens
  misc_RNA (1)...(19): siRNA sense strand
ggagauucaccaaauuuau

SEQ ID NO: 1192976 - RNA, 19 nt, Homo sapiens
  misc_RNA (1)...(19): siRNA sense strand
agucaccucuccugucaua

SEQ ID NO: 1192977 - RNA, 19 nt, Homo sapiens
  misc_RNA (1)...(19): siRNA sense strand
caaaggaaagcuaugcuau

SEQ ID NO: 1192978 - RNA, 19 nt, Homo sapiens
  misc_RNA (1)...(19): siRNA sense strand
ucacccagcuguucauaca

SEQ ID NO: 1192979 - RNA, 19 nt, Homo sapiens
  misc_RNA (1)...(19): siRNA sense strand
caacuagcacugguauuaa

SEQ ID NO: 1192980 - RNA, 19 nt, Homo sapiens
  misc_RNA (1)...(19): siRNA sense strand
ggaagugaaaguaauggaa

SEQ ID NO: 1192981 - RNA, 19 nt, Homo sapiens
  misc_RNA (1)...(19): siRNA sense strand
caaaugagacacaaagaag

SEQ ID NO: 1192982 - RNA, 19 nt, Homo sapiens
  misc_RNA (1)...(19): siRNA sense strand
aaaugcagcuagaagcaaa

SEQ ID NO: 1192983 - RNA, 19 nt, Homo sapiens
  misc_RNA (1)...(19): siRNA sense strand
gcuauucaguaucuccaaa

SEQ ID NO: 1192984 - RNA, 19 nt, Homo sapiens
  misc_RNA (1)...(19): siRNA sense strand
caaaggaggcauaugaaca

SEQ ID NO: 1192985 - RNA, 19 nt, Homo sapiens
  misc_RNA (1)...(19): siRNA sense strand
auacaaagacugaucauuc

SEQ ID NO: 1192986 - RNA, 19 nt, Homo sapiens
  misc_RNA (1)...(19): siRNA sense strand
ucagcucucugcuuuguug

SEQ ID NO: 1192987 - RNA, 19 nt, Homo sapiens
  misc_RNA (1)...(19): siRNA sense strand
ggcauuauguuuaccaaag

SEQ ID NO: 1192988 - RNA, 19 nt, Homo sapiens
  misc_RNA (1)...(19): siRNA sense strand
ugacuucuuuugccaauua

SEQ ID NO: 1192989 - RNA, 19 nt, Homo sapiens
  misc_RNA (1)...(19): siRNA sense strand
aagcaaacguuguaguaau

SEQ ID NO: 1192990 - RNA, 19 nt, Homo sapiens
  misc_RNA (1)...(19): siRNA sense strand
aggaugccuuuauaucuua

SEQ ID NO: 1192991 - RNA, 19 nt, Homo sapiens
  misc_RNA (1)...(19): siRNA sense strand
gcaaguuuauucguugugu

SEQ ID NO: 1192992 - RNA, 19 nt, Homo sapiens
  misc_RNA (1)...(19): siRNA sense strand
caaugaacauaugguagaa

SEQ ID NO: 1192993 - RNA, 19 nt, Homo sapiens
  misc_RNA (1)...(19): siRNA sense strand
uaaauccacugagcagaga

SEQ ID NO: 1192994 - RNA, 19 nt, Homo sapiens
  misc_RNA (1)...(19): siRNA sense strand
cagaagagccauggagaaa

SEQ ID NO: 1192995 - RNA, 19 nt, Homo sapiens
  misc_RNA (1)...(19): siRNA sense strand
agaagcaaacguuguagua

SEQ ID NO: 1192996 - RNA, 19 nt, Homo sapiens
  misc_RNA (1)...(19): siRNA sense strand
cauggagauucaccaaauu

SEQ ID NO: 1192997 - RNA, 19 nt, Homo sapiens
  misc_RNA (1)...(19): siRNA sense strand
aaagucagaguucauguuu

SEQ ID NO: 1192998 - RNA, 19 nt, Homo sapiens
  misc_RNA (1)...(19): siRNA sense strand
ugaaaguaauggaaaugug

SEQ ID NO: 1192999 - RNA, 19 nt, Homo sapiens
  misc_RNA (1)...(19): siRNA sense strand
gacaaagccacaaaggaaa

SEQ ID NO: 1193000 - RNA, 19 nt, Homo sapiens
  misc_RNA (1)...(19): siRNA sense strand
ccacccacaccuaguauuu

SEQ ID NO: 1193001 - RNA, 19 nt, Homo sapiens
  misc_RNA (1)...(19): siRNA sense strand
gcucucugcuuuguugauu

SEQ ID NO: 1193002 - RNA, 19 nt, Homo sapiens
  misc_RNA (1)...(19): siRNA sense strand
uacaaacucugucucuaau

SEQ ID NO: 1193003 - RNA, 19 nt, Homo sapiens
  misc_RNA (1)...(19): siRNA sense strand
auucaucacugccuacaaa

SEQ ID NO: 1193004 - RNA, 19 nt, Homo sapiens
  misc_RNA (1)...(19): siRNA sense strand
gaagguguuauucaaguau

SEQ ID NO: 1193005 - RNA, 19 nt, Homo sapiens
  misc_RNA (1)...(19): siRNA sense strand
caaaggagcugaacucaau

SEQ ID NO: 1193006 - RNA, 19 nt, Homo sapiens
  misc_RNA (1)...(19): siRNA sense strand
gaaagagucucgacagaac

SEQ ID NO: 1193007 - RNA, 19 nt, Homo sapiens
  misc_RNA (1)...(19): siRNA sense strand
gaaggcugcuuacuaugaa

SEQ ID NO: 1193008 - RNA, 19 nt, Homo sapiens
  misc_RNA (1)...(19): siRNA sense strand
gcgcgcagcugguggaauu

SEQ ID NO: 1193009 - RNA, 19 nt, Homo sapiens
  misc_RNA (1)...(19): siRNA sense strand
ccaaaucacagcccaauau

SEQ ID NO: 1193010 - RNA, 19 nt, Homo sapiens
  misc_RNA (1)...(19): siRNA sense strand
aaucacagcccaauaugua

SEQ ID NO: 1193011 - RNA, 19 nt, Homo sapiens
  misc_RNA (1)...(19): siRNA sense strand
gcaaaacuacggacacuua

SEQ ID NO: 1193012 - RNA, 19 nt, Homo sapiens
  misc_RNA (1)...(19): siRNA sense strand
gaaaaggaauuccacuuca

SEQ ID NO: 1193013 - RNA, 19 nt, Homo sapiens
  misc_RNA (1)...(19): siRNA sense strand
gacacugacuauccagguu

SEQ ID NO: 1193014 - RNA, 19 nt, Homo sapiens
  misc_RNA (1)...(19): siRNA sense strand
agaaggcugcuuacuauga

SEQ ID NO: 1193015 - RNA, 19 nt, Homo sapiens
  misc_RNA (1)...(19): siRNA sense strand
ccacuucaaccgcuacuug

SEQ ID NO: 1193016 - RNA, 19 nt, Homo sapiens
  misc_RNA (1)...(19): siRNA sense strand
gcaugaaguacaagaagga

SEQ ID NO: 1193017 - RNA, 19 nt, Homo sapiens
  misc_RNA (1)...(19): siRNA sense strand
caaaucacagcccaauaug

SEQ ID NO: 1193018 - RNA, 19 nt, Homo sapiens
  misc_RNA (1)...(19): siRNA sense strand
ccacaaaggagcugaacuc

SEQ ID NO: 1193019 - RNA, 19 nt, Homo sapiens
  misc_RNA (1)...(19): siRNA sense strand
ugaaagagucucgacagaa

SEQ ID NO: 1193020 - RNA, 19 nt, Homo sapiens
  misc_RNA (1)...(19): siRNA sense strand
ccaaacugacgcaucugua

SEQ ID NO: 1193021 - RNA, 19 nt, Homo sapiens
  misc_RNA (1)...(19): siRNA sense strand
caaacugacgcaucuguag

SEQ ID NO: 1193022 - RNA, 19 nt, Homo sapiens
  misc_RNA (1)...(19): siRNA sense strand
gacagaacuccaagcagaa

SEQ ID NO: 1193023 - RNA, 19 nt, Homo sapiens
  misc_RNA (1)...(19): siRNA sense strand
uggccaaccugcugaaucu

SEQ ID NO: 1193024 - RNA, 19 nt, Homo sapiens
  misc_RNA (1)...(19): siRNA sense strand
ucacggaacgccagaucaa

SEQ ID NO: 1193025 - RNA, 19 nt, Homo sapiens
  misc_RNA (1)...(19): siRNA sense strand
guggagugccugccaagaa

SEQ ID NO: 1193026 - RNA, 19 nt, Homo sapiens
  misc_RNA (1)...(19): siRNA sense strand
guacaagaaggaccagaag

SEQ ID NO: 1193027 - RNA, 19 nt, Homo sapiens
  misc_RNA (1)...(19): siRNA sense strand
gcaacuucgucgaguccau

SEQ ID NO: 1193028 - RNA, 19 nt, Homo sapiens
  misc_RNA (1)...(19): siRNA sense strand
gccaaaucacagcccaaua

SEQ ID NO: 1193029 - RNA, 19 nt, Homo sapiens
  misc_RNA (1)...(19): siRNA sense strand
caucccaccuacacagauc

SEQ ID NO: 1193030 - RNA, 19 nt, Homo sapiens
  misc_RNA (1)...(19): siRNA sense strand
uggagugccugccaagaag

SEQ ID NO: 1193031 - RNA, 19 nt, Homo sapiens
  misc_RNA (1)...(19): siRNA sense strand
augaaagagucucgacaga

SEQ ID NO: 1193032 - RNA, 19 nt, Homo sapiens
  misc_RNA (1)...(19): siRNA sense strand
gagcagcagccaccacaac

SEQ ID NO: 1193033 - RNA, 19 nt, Homo sapiens
  misc_RNA (1)...(19): siRNA sense strand
gcgcaugaaguacaagaag

SEQ ID NO: 1193034 - RNA, 19 nt, Homo sapiens
  misc_RNA (1)...(19): siRNA sense strand
aaaaggaauuccacuucaa

SEQ ID NO: 1193035 - RNA, 19 nt, Homo sapiens
  misc_RNA (1)...(19): siRNA sense strand
gcagcugguggaauuggaa

SEQ ID NO: 1193036 - RNA, 19 nt, Homo sapiens
  misc_RNA (1)...(19): siRNA sense strand
aaaggugggcccaaugcuu

SEQ ID NO: 1193037 - RNA, 19 nt, Homo sapiens
  misc_RNA (1)...(19): siRNA sense strand
acaaaggagcugaacucaa

SEQ ID NO: 1193038 - RNA, 19 nt, Homo sapiens
  misc_RNA (1)...(19): siRNA sense strand
ggcuauggcuacagcaaaa

SEQ ID NO: 1193039 - RNA, 19 nt, Homo sapiens
  misc_RNA (1)...(19): siRNA sense strand
gaagaaagguuacaucaaa

SEQ ID NO: 1193040 - RNA, 19 nt, Homo sapiens
  misc_RNA (1)...(19): siRNA sense strand
gaauugaucuugacagugu

SEQ ID NO: 1193041 - RNA, 19 nt, Homo sapiens
  misc_RNA (1)...(19): siRNA sense strand
ggaggcagcuguguucuaa

SEQ ID NO: 1193042 - RNA, 19 nt, Homo sapiens
  misc_RNA (1)...(19): siRNA sense strand
gagaaggaauugaucuuga

SEQ ID NO: 1193043 - RNA, 19 nt, Homo sapiens
  misc_RNA (1)...(19): siRNA sense strand
gaacaguacuacagaccaa

SEQ ID NO: 1193044 - RNA, 19 nt, Homo sapiens
  misc_RNA (1)...(19): siRNA sense strand
gcagaauggugagaaguuu

SEQ ID NO: 1193045 - RNA, 19 nt, Homo sapiens
  misc_RNA (1)...(19): siRNA sense strand
gugagaaguuugugguaua

SEQ ID NO: 1193046 - RNA, 19 nt, Homo sapiens
  misc_RNA (1)...(19): siRNA sense strand
guacgacagugaauuacuu

SEQ ID NO: 1193047 - RNA, 19 nt, Homo sapiens
  misc_RNA (1)...(19): siRNA sense strand
gaagcuauacgaacaaaga

SEQ ID NO: 1193048 - RNA, 19 nt, Homo sapiens
  misc_RNA (1)...(19): siRNA sense strand
gacaaugaccuugcuguua

SEQ ID NO: 1193049 - RNA, 19 nt, Homo sapiens
  misc_RNA (1)...(19): siRNA sense strand
gaagaaaaguccuaucaau

SEQ ID NO: 1193050 - RNA, 19 nt, Homo sapiens
  misc_RNA (1)...(19): siRNA sense strand
guacguaaauuggcaccua

SEQ ID NO: 1193051 - RNA, 19 nt, Homo sapiens
  misc_RNA (1)...(19): siRNA sense strand
ggagaaaagaggaauauua

SEQ ID NO: 1193052 - RNA, 19 nt, Homo sapiens
  misc_RNA (1)...(19): siRNA sense strand
gagaguagcauuaccagau

SEQ ID NO: 1193053 - RNA, 19 nt, Homo sapiens
  misc_RNA (1)...(19): siRNA sense strand
guaaauuggcaccuaauga

SEQ ID NO: 1193054 - RNA, 19 nt, Homo sapiens
  misc_RNA (1)...(19): siRNA sense strand
acaaacauguggagcagaa

SEQ ID NO: 1193055 - RNA, 19 nt, Homo sapiens
  misc_RNA (1)...(19): siRNA sense strand
ggccuucuguuucgaauau

SEQ ID NO: 1193056 - RNA, 19 nt, Homo sapiens
  misc_RNA (1)...(19): siRNA sense strand
ccagguaauugcauuugaa

SEQ ID NO: 1193057 - RNA, 19 nt, Homo sapiens
  misc_RNA (1)...(19): siRNA sense strand
ccagauggaacaacgguua

SEQ ID NO: 1193058 - RNA, 19 nt, Homo sapiens
  misc_RNA (1)...(19): siRNA sense strand
gaaguggccauuuucauua

SEQ ID NO: 1193059 - RNA, 19 nt, Homo sapiens
  misc_RNA (1)...(19): siRNA sense strand
cacaaacucuacauucaga

SEQ ID NO: 1193060 - RNA, 19 nt, Homo sapiens
  misc_RNA (1)...(19): siRNA sense strand
gcuguuaccuacuucuuuc

SEQ ID NO: 1193061 - RNA, 19 nt, Homo sapiens
  misc_RNA (1)...(19): siRNA sense strand
acaguacgacagugaauua

SEQ ID NO: 1193062 - RNA, 19 nt, Homo sapiens
  misc_RNA (1)...(19): siRNA sense strand
ugugagggcuacaaugaaa

SEQ ID NO: 1193063 - RNA, 19 nt, Homo sapiens
  misc_RNA (1)...(19): siRNA sense strand
gaucagucacuccuuugua

SEQ ID NO: 1193064 - RNA, 19 nt, Homo sapiens
  misc_RNA (1)...(19): siRNA sense strand
cagcaaagguuggcaugga

SEQ ID NO: 1193065 - RNA, 19 nt, Homo sapiens
  misc_RNA (1)...(19): siRNA sense strand
gaaccagguaauugcauuu

SEQ ID NO: 1193066 - RNA, 19 nt, Homo sapiens
  misc_RNA (1)...(19): siRNA sense strand
acaaugaccuugcuguuac

SEQ ID NO: 1193067 - RNA, 19 nt, Homo sapiens
  misc_RNA (1)...(19): siRNA sense strand
ggugagaaguuugugguau

SEQ ID NO: 1193068 - RNA, 19 nt, Homo sapiens
  misc_RNA (1)...(19): siRNA sense strand
gaaccugaagagagaguuu

SEQ ID NO: 1193069 - RNA, 19 nt, Homo sapiens
  misc_RNA (1)...(19): siRNA sense strand
cuacagaccaaguauauca

SEQ ID NO: 1193070 - RNA, 19 nt, Homo sapiens
  misc_RNA (1)...(19): siRNA sense strand
cagcaucacgcacuuuaaa

SEQ ID NO: 1193071 - RNA, 19 nt, Homo sapiens
  misc_RNA (1)...(19): siRNA sense strand
uacagaagcuauacgaaca

SEQ ID NO: 1193072 - RNA, 19 nt, Homo sapiens
  misc_RNA (1)...(19): siRNA sense strand
gagcaggcgagaaggaauu

SEQ ID NO: 1193073 - RNA, 19 nt, Homo sapiens
  misc_RNA (1)...(19): siRNA sense strand
gaaaaguccuaucaauuac

SEQ ID NO: 1193074 - RNA, 19 nt, Homo sapiens
  misc_RNA (1)...(19): siRNA sense strand
ugagaaguuugugguauau

SEQ ID NO: 1193075 - RNA, 19 nt, Homo sapiens
  misc_RNA (1)...(19): siRNA sense strand
ugaaccacgugaauguuga

SEQ ID NO: 1193076 - RNA, 19 nt, Homo sapiens
  misc_RNA (1)...(19): siRNA sense strand
cagaagcuauacgaacaaa

SEQ ID NO: 1193077 - RNA, 19 nt, Homo sapiens
  misc_RNA (1)...(19): siRNA sense strand
ggaacaacgguuacaguca

SEQ ID NO: 1193078 - RNA, 19 nt, Homo sapiens
  misc_RNA (1)...(19): siRNA sense strand
gggauuggaagaauaucua

SEQ ID NO: 1193079 - RNA, 19 nt, Homo sapiens
  misc_RNA (1)...(19): siRNA sense strand
cgacguagagcugagagua

SEQ ID NO: 1193080 - RNA, 19 nt, Homo sapiens
  misc_RNA (1)...(19): siRNA sense strand
ggaaguggccauuuucauu

SEQ ID NO: 1193081 - RNA, 19 nt, Homo sapiens
  misc_RNA (1)...(19): siRNA sense strand
ucacgccauauuucaauua

SEQ ID NO: 1193082 - RNA, 19 nt, Homo sapiens
  misc_RNA (1)...(19): siRNA sense strand
ccaaguauaucaggcuauc

SEQ ID NO: 1193083 - RNA, 19 nt, Homo sapiens
  misc_RNA (1)...(19): siRNA sense strand
ggagcagaauggugagaag

SEQ ID NO: 1193084 - RNA, 19 nt, Homo sapiens
  misc_RNA (1)...(19): siRNA sense strand
gugaauuacuuugccuuau

SEQ ID NO: 1193085 - RNA, 19 nt, Homo sapiens
  misc_RNA (1)...(19): siRNA sense strand
ugaggcagauaaccuagau

SEQ ID NO: 1193086 - RNA, 19 nt, Homo sapiens
  misc_RNA (1)...(19): siRNA sense strand
gggauggccuucuguuucg

SEQ ID NO: 1193087 - RNA, 19 nt, Homo sapiens
  misc_RNA (1)...(19): siRNA sense strand
ggcagucgaugaugugaag

SEQ ID NO: 1193088 - RNA, 19 nt, Homo sapiens
  misc_RNA (1)...(19): siRNA sense strand
uauuugaagugaucaguca

SEQ ID NO: 1193089 - RNA, 19 nt, Homo sapiens
  misc_RNA (1)...(19): siRNA sense strand
cagaauccgaugagaacua

SEQ ID NO: 1193090 - RNA, 19 nt, Homo sapiens
  misc_RNA (1)...(19): siRNA sense strand
agaguagcauuaccagaug

SEQ ID NO: 1193091 - RNA, 19 nt, Homo sapiens
  misc_RNA (1)...(19): siRNA sense strand
agaaccagguaauugcauu

SEQ ID NO: 1193092 - RNA, 19 nt, Homo sapiens
  misc_RNA (1)...(19): siRNA sense strand
gugaagaaagguuacauca

SEQ ID NO: 1193093 - RNA, 19 nt, Homo sapiens
  misc_RNA (1)...(19): siRNA sense strand
uaaauuggcaccuaaugag

SEQ ID NO: 1193094 - RNA, 19 nt, Homo sapiens
  misc_RNA (1)...(19): siRNA sense strand
gcagggaggcagcuguguu

SEQ ID NO: 1193095 - RNA, 19 nt, Homo sapiens
  misc_RNA (1)...(19): siRNA sense strand
gaauaugcacgaggagaga

SEQ ID NO: 1193096 - RNA, 19 nt, Homo sapiens
  misc_RNA (1)...(19): siRNA sense strand
uuaccuacuucuuucauca

SEQ ID NO: 1193097 - RNA, 19 nt, Homo sapiens
  misc_RNA (1)...(19): siRNA sense strand
ggaggugaaccacgugaau

SEQ ID NO: 1193098 - RNA, 19 nt, Homo sapiens
  misc_RNA (1)...(19): siRNA sense strand
ggacaguacgacagugaau

SEQ ID NO: 1193099 - RNA, 19 nt, Homo sapiens
  misc_RNA (1)...(19): siRNA sense strand
ccagggaaguggccauuuu

SEQ ID NO: 1193100 - RNA, 19 nt, Homo sapiens
  misc_RNA (1)...(19): siRNA sense strand
accagaaccugaagagaga

SEQ ID NO: 1193101 - RNA, 19 nt, Homo sapiens
  misc_RNA (1)...(19): siRNA sense strand
ggaguuugcuauccuacac

SEQ ID NO: 1193102 - RNA, 19 nt, Homo sapiens
  misc_RNA (1)...(19): siRNA sense strand
uaucagaauccgaugagaa

SEQ ID NO: 1193103 - RNA, 19 nt, Homo sapiens
  misc_RNA (1)...(19): siRNA sense strand
gagaaaagaggaauauuag

SEQ ID NO: 1193104 - RNA, 19 nt, Homo sapiens
  misc_RNA (1)...(19): siRNA sense strand
gaaagguuacaucaaagca

SEQ ID NO: 1193105 - RNA, 19 nt, Homo sapiens
  misc_RNA (1)...(19): siRNA sense strand
uacguaaauuggcaccuaa

SEQ ID NO: 1193106 - RNA, 19 nt, Homo sapiens
  misc_RNA (1)...(19): siRNA sense strand
ucacuccuuuguacguaaa

SEQ ID NO: 1193107 - RNA, 19 nt, Homo sapiens
  misc_RNA (1)...(19): siRNA sense strand
aaggacagcuggagaacca

SEQ ID NO: 1193108 - RNA, 19 nt, Homo sapiens
  misc_RNA (1)...(19): siRNA sense strand
cgccauauuucaauuacau

SEQ ID NO: 1193109 - RNA, 19 nt, Homo sapiens
  misc_RNA (1)...(19): siRNA sense strand
gaugggacacagaugaaga

SEQ ID NO: 1193110 - RNA, 19 nt, Homo sapiens
  misc_RNA (1)...(19): siRNA sense strand
ucgaugaugugaagaaagg

SEQ ID NO: 1193111 - RNA, 19 nt, Homo sapiens
  misc_RNA (1)...(19): siRNA sense strand
uuacaucaaagcagaagaa

SEQ ID NO: 1193112 - RNA, 19 nt, Homo sapiens
  misc_RNA (1)...(19): siRNA sense strand
ugaagaaagguuacaucaa

SEQ ID NO: 1193113 - RNA, 19 nt, Homo sapiens
  misc_RNA (1)...(19): siRNA sense strand
cgagaaggaauugaucuug

SEQ ID NO: 1193114 - RNA, 19 nt, Homo sapiens
  misc_RNA (1)...(19): siRNA sense strand
ucaacaugcuaaggacuug

SEQ ID NO: 1193115 - RNA, 19 nt, Homo sapiens
  misc_RNA (1)...(19): siRNA sense strand
gaaggaauugaucuugaca

SEQ ID NO: 1193116 - RNA, 19 nt, Homo sapiens
  misc_RNA (1)...(19): siRNA sense strand
gagaaguuugugguauaua

SEQ ID NO: 1193117 - RNA, 19 nt, Homo sapiens
  misc_RNA (1)...(19): siRNA sense strand
gggcaacugcggagcauca

SEQ ID NO: 1193118 - RNA, 19 nt, Homo sapiens
  misc_RNA (1)...(19): siRNA sense strand
cucacaaacucuacauuca

SEQ ID NO: 1193119 - RNA, 19 nt, Homo sapiens
  misc_RNA (1)...(19): siRNA sense strand
aaagcaagcagugcccaua

SEQ ID NO: 1193120 - RNA, 19 nt, Homo sapiens
  misc_RNA (1)...(19): siRNA sense strand
gugaaccacgugaauguug

SEQ ID NO: 1193121 - RNA, 19 nt, Homo sapiens
  misc_RNA (1)...(19): siRNA sense strand
ugacaaugaccuugcuguu

SEQ ID NO: 1193122 - RNA, 19 nt, Homo sapiens
  misc_RNA (1)...(19): siRNA sense strand
gggaggcagcuguguucua

SEQ ID NO: 1193123 - RNA, 19 nt, Homo sapiens
  misc_RNA (1)...(19): siRNA sense strand
ucaugaggcagauaaccua

SEQ ID NO: 1193124 - RNA, 19 nt, Homo sapiens
  misc_RNA (1)...(19): siRNA sense strand
gcgaugggacacagaugaa

SEQ ID NO: 1193125 - RNA, 19 nt, Homo sapiens
  misc_RNA (1)...(19): siRNA sense strand
ugccugcacugaagaagga

SEQ ID NO: 1193126 - RNA, 19 nt, Homo sapiens
  misc_RNA (1)...(19): siRNA sense strand
aagaaagguuacaucaaag

SEQ ID NO: 1193127 - RNA, 19 nt, Homo sapiens
  misc_RNA (1)...(19): siRNA sense strand
ccucacaaacucuacauuc

SEQ ID NO: 1193128 - RNA, 19 nt, Homo sapiens
  misc_RNA (1)...(19): siRNA sense strand
uaucuguaccuccucauga

SEQ ID NO: 1193129 - RNA, 19 nt, Homo sapiens
  misc_RNA (1)...(19): siRNA sense strand
gaucuugacaguguuaucu

SEQ ID NO: 1193130 - RNA, 19 nt, Homo sapiens
  misc_RNA (1)...(19): siRNA sense strand
gcgagaaggaauugaucuu

SEQ ID NO: 1193131 - RNA, 19 nt, Homo sapiens
  misc_RNA (1)...(19): siRNA sense strand
ggagaaccagguaauugca

SEQ ID NO: 1193132 - RNA, 19 nt, Homo sapiens
  misc_RNA (1)...(19): siRNA sense strand
gaugaugugaagaaagguu

SEQ ID NO: 1193133 - RNA, 19 nt, Homo sapiens
  misc_RNA (1)...(19): siRNA sense strand
gugacaucaugcaggaauu

SEQ ID NO: 1193134 - RNA, 19 nt, Homo sapiens
  misc_RNA (1)...(19): siRNA sense strand
ucagaacaacaauuagaug

SEQ ID NO: 1193135 - RNA, 19 nt, Homo sapiens
  misc_RNA (1)...(19): siRNA sense strand
gagcugagaguagcauuac

SEQ ID NO: 1193136 - RNA, 19 nt, Homo sapiens
  misc_RNA (1)...(19): siRNA sense strand
gaggugaaccacgugaaug

SEQ ID NO: 1193137 - RNA, 19 nt, Homo sapiens
  misc_RNA (1)...(19): siRNA sense strand
caucaaagcagaagaaaag

SEQ ID NO: 1193138 - RNA, 19 nt, Homo sapiens
  misc_RNA (1)...(19): siRNA sense strand
gacaguacgacagugaauu

SEQ ID NO: 1193139 - RNA, 19 nt, Homo sapiens
  misc_RNA (1)...(19): siRNA sense strand
guggugggcuugguucuuu

SEQ ID NO: 1193140 - RNA, 19 nt, Homo sapiens
  misc_RNA (1)...(19): siRNA sense strand
gggcuugguucuuuacauc

SEQ ID NO: 1193141 - RNA, 19 nt, Homo sapiens
  misc_RNA (1)...(19): siRNA sense strand
agaggaccauucuggcuuu

SEQ ID NO: 1193142 - RNA, 19 nt, Homo sapiens
  misc_RNA (1)...(19): siRNA sense strand
ggcaucuucuucauacuau

SEQ ID NO: 1193143 - RNA, 19 nt, Homo sapiens
  misc_RNA (1)...(19): siRNA sense strand
cgacguguccauccaaaug

SEQ ID NO: 1193144 - RNA, 19 nt, Homo sapiens
  misc_RNA (1)...(19): siRNA sense strand
uggcgagucugcuucuuug

SEQ ID NO: 1193145 - RNA, 19 nt, Homo sapiens
  misc_RNA (1)...(19): siRNA sense strand
gcuguguggccucagaaua

SEQ ID NO: 1193146 - RNA, 19 nt, Homo sapiens
  misc_RNA (1)...(19): siRNA sense strand
gaaaacacggagaauauuc

SEQ ID NO: 1193147 - RNA, 19 nt, Homo sapiens
  misc_RNA (1)...(19): siRNA sense strand
ccguguaccuguucaccaa

SEQ ID NO: 1193148 - RNA, 19 nt, Homo sapiens
  misc_RNA (1)...(19): siRNA sense strand
gaaccggagaucaauuugg

SEQ ID NO: 1193149 - RNA, 19 nt, Homo sapiens
  misc_RNA (1)...(19): siRNA sense strand
cgacuacucgggccaguuc

SEQ ID NO: 1193150 - RNA, 19 nt, Homo sapiens
  misc_RNA (1)...(19): siRNA sense strand
gcacugacuacuggcugua

SEQ ID NO: 1193151 - RNA, 19 nt, Homo sapiens
  misc_RNA (1)...(19): siRNA sense strand
ggaaaacacggagaauauu

SEQ ID NO: 1193152 - RNA, 19 nt, Homo sapiens
  misc_RNA (1)...(19): siRNA sense strand
cuuuacaucuccagcauca

SEQ ID NO: 1193153 - RNA, 19 nt, Homo sapiens
  misc_RNA (1)...(19): siRNA sense strand
acuacuggcuguacaugga

SEQ ID NO: 1193154 - RNA, 19 nt, Homo sapiens
  misc_RNA (1)...(19): siRNA sense strand
ccauccaaaugacgcagaa

SEQ ID NO: 1193155 - RNA, 19 nt, Homo sapiens
  misc_RNA (1)...(19): siRNA sense strand
ucaauuuggugacggaaaa

SEQ ID NO: 1193156 - RNA, 19 nt, Homo sapiens
  misc_RNA (1)...(19): siRNA sense strand
uguguggccucagaauauu

SEQ ID NO: 1193157 - RNA, 19 nt, Homo sapiens
  misc_RNA (1)...(19): siRNA sense strand
gacguguccauccaaauga

SEQ ID NO: 1193158 - RNA, 19 nt, Homo sapiens
  misc_RNA (1)...(19): siRNA sense strand
guucacggccuucgucauc

SEQ ID NO: 1193159 - RNA, 19 nt, Homo sapiens
  misc_RNA (1)...(19): siRNA sense strand
aaccggagaucaauuuggu

SEQ ID NO: 1193160 - RNA, 19 nt, Homo sapiens
  misc_RNA (1)...(19): siRNA sense strand
ucuggcaucuucuucauac

SEQ ID NO: 1193161 - RNA, 19 nt, Homo sapiens
  misc_RNA (1)...(19): siRNA sense strand
caucaacgacgaggucaug

SEQ ID NO: 1193162 - RNA, 19 nt, Homo sapiens
  misc_RNA (1)...(19): siRNA sense strand
uaucgggccucuccuuggu

SEQ ID NO: 1193163 - RNA, 19 nt, Homo sapiens
  misc_RNA (1)...(19): siRNA sense strand
uggcaucuucuucauacua

SEQ ID NO: 1193164 - RNA, 19 nt, Homo sapiens
  misc_RNA (1)...(19): siRNA sense strand
ggaccauucuggcuuuugu

SEQ ID NO: 1193165 - RNA, 19 nt, Homo sapiens
  misc_RNA (1)...(19): siRNA sense strand
caacgacgaggucaugaac

SEQ ID NO: 1193166 - RNA, 19 nt, Homo sapiens
  misc_RNA (1)...(19): siRNA sense strand
ccuccuuccuacucaaaga

SEQ ID NO: 1193167 - RNA, 19 nt, Homo sapiens
  misc_RNA (1)...(19): siRNA sense strand
ccaaaugacgcagaacuac

SEQ ID NO: 1193168 - RNA, 19 nt, Homo sapiens
  misc_RNA (1)...(19): siRNA sense strand
ugauguccguguaccuguu

SEQ ID NO: 1193169 - RNA, 19 nt, Homo sapiens
  misc_RNA (1)...(19): siRNA sense strand
uggugggcuugguucuuua

SEQ ID NO: 1193170 - RNA, 19 nt, Homo sapiens
  misc_RNA (1)...(19): siRNA sense strand
ucaacgacgaggucaugaa

SEQ ID NO: 1193171 - RNA, 19 nt, Homo sapiens
  misc_RNA (1)...(19): siRNA sense strand
acgcggaggaggagaugua

SEQ ID NO: 1193172 - RNA, 19 nt, Homo sapiens
  misc_RNA (1)...(19): siRNA sense strand
uccaaaugacgcagaacua

SEQ ID NO: 1193173 - RNA, 19 nt, Homo sapiens
  misc_RNA (1)...(19): siRNA sense strand
gcagaaagaucucagagua

SEQ ID NO: 1193174 - RNA, 19 nt, Homo sapiens
  misc_RNA (1)...(19): siRNA sense strand
gaagauauauaaccguuca

SEQ ID NO: 1193175 - RNA, 19 nt, Homo sapiens
  misc_RNA (1)...(19): siRNA sense strand
gagaacgucugcagcaauu

SEQ ID NO: 1193176 - RNA, 19 nt, Homo sapiens
  misc_RNA (1)...(19): siRNA sense strand
gaagaugaccugcccagaa

SEQ ID NO: 1193177 - RNA, 19 nt, Homo sapiens
  misc_RNA (1)...(19): siRNA sense strand
gaaugugcaugccuacuug

SEQ ID NO: 1193178 - RNA, 19 nt, Homo sapiens
  misc_RNA (1)...(19): siRNA sense strand
agaaagaucucagaguaaa

SEQ ID NO: 1193179 - RNA, 19 nt, Homo sapiens
  misc_RNA (1)...(19): siRNA sense strand
caacuccgauucagaagau

SEQ ID NO: 1193180 - RNA, 19 nt, Homo sapiens
  misc_RNA (1)...(19): siRNA sense strand
acucaugucugaauuagaa

SEQ ID NO: 1193181 - RNA, 19 nt, Homo sapiens
  misc_RNA (1)...(19): siRNA sense strand
gaugaaaguggaaugaauu

SEQ ID NO: 1193182 - RNA, 19 nt, Homo sapiens
  misc_RNA (1)...(19): siRNA sense strand
ggaagaggauaaguacaug

SEQ ID NO: 1193183 - RNA, 19 nt, Homo sapiens
  misc_RNA (1)...(19): siRNA sense strand
gaagacuauugauaccaaa

SEQ ID NO: 1193184 - RNA, 19 nt, Homo sapiens
  misc_RNA (1)...(19): siRNA sense strand
ucagauaugugaaguugau

SEQ ID NO: 1193185 - RNA, 19 nt, Homo sapiens
  misc_RNA (1)...(19): siRNA sense strand
gaagaugaaaguggaauga

SEQ ID NO: 1193186 - RNA, 19 nt, Homo sapiens
  misc_RNA (1)...(19): siRNA sense strand
uaucauggcuuugggaaug

SEQ ID NO: 1193187 - RNA, 19 nt, Homo sapiens
  misc_RNA (1)...(19): siRNA sense strand
ugacaguugugacagcuuu

SEQ ID NO: 1193188 - RNA, 19 nt, Homo sapiens
  misc_RNA (1)...(19): siRNA sense strand
cagcuuugcuucugauaau

SEQ ID NO: 1193189 - RNA, 19 nt, Homo sapiens
  misc_RNA (1)...(19): siRNA sense strand
gaccguggauggcuacaug

SEQ ID NO: 1193190 - RNA, 19 nt, Homo sapiens
  misc_RNA (1)...(19): siRNA sense strand
guggauggcuacaugaaug

SEQ ID NO: 1193191 - RNA, 19 nt, Homo sapiens
  misc_RNA (1)...(19): siRNA sense strand
ucacugggcucuacuuguc

SEQ ID NO: 1193192 - RNA, 19 nt, Homo sapiens
  misc_RNA (1)...(19): siRNA sense strand
cgucagaagacuauugaua

SEQ ID NO: 1193193 - RNA, 19 nt, Homo sapiens
  misc_RNA (1)...(19): siRNA sense strand
gaucucagaguaaagaaga

SEQ ID NO: 1193194 - RNA, 19 nt, Homo sapiens
  misc_RNA (1)...(19): siRNA sense strand
ggaaugugcaugccuacuu

SEQ ID NO: 1193195 - RNA, 19 nt, Homo sapiens
  misc_RNA (1)...(19): siRNA sense strand
ugaaguugauuuccaugga

SEQ ID NO: 1193196 - RNA, 19 nt, Homo sapiens
  misc_RNA (1)...(19): siRNA sense strand
agaagacuauugauaccaa

SEQ ID NO: 1193197 - RNA, 19 nt, Homo sapiens
  misc_RNA (1)...(19): siRNA sense strand
cagaaagaucucagaguaa

SEQ ID NO: 1193198 - RNA, 19 nt, Homo sapiens
  misc_RNA (1)...(19): siRNA sense strand
ggaggaagaggauaaguac

SEQ ID NO: 1193199 - RNA, 19 nt, Homo sapiens
  misc_RNA (1)...(19): siRNA sense strand
caucaaugccgucagaaga

SEQ ID NO: 1193200 - RNA, 19 nt, Homo sapiens
  misc_RNA (1)...(19): siRNA sense strand
aaacucaugucugaauuag

SEQ ID NO: 1193201 - RNA, 19 nt, Homo sapiens
  misc_RNA (1)...(19): siRNA sense strand
aagaugaccugcccagaag

SEQ ID NO: 1193202 - RNA, 19 nt, Homo sapiens
  misc_RNA (1)...(19): siRNA sense strand
agaugaaaguggaaugaau

SEQ ID NO: 1193203 - RNA, 19 nt, Homo sapiens
  misc_RNA (1)...(19): siRNA sense strand
ugucaucaaugccgucaga

SEQ ID NO: 1193204 - RNA, 19 nt, Homo sapiens
  misc_RNA (1)...(19): siRNA sense strand
ggagaacgucugcagcaau

SEQ ID NO: 1193205 - RNA, 19 nt, Homo sapiens
  misc_RNA (1)...(19): siRNA sense strand
cagaguaaagaagaacuua

SEQ ID NO: 1193206 - RNA, 19 nt, Homo sapiens
  misc_RNA (1)...(19): siRNA sense strand
gauaugugaaguugauuuc

SEQ ID NO: 1193207 - RNA, 19 nt, Homo sapiens
  misc_RNA (1)...(19): siRNA sense strand
gaacgucugcagcaauucu

SEQ ID NO: 1193208 - RNA, 19 nt, Homo sapiens
  misc_RNA (1)...(19): siRNA sense strand
cucgagagaagauauauaa

SEQ ID NO: 1193209 - RNA, 19 nt, Homo sapiens
  misc_RNA (1)...(19): siRNA sense strand
aaagaucucagaguaaaga

SEQ ID NO: 1193210 - RNA, 19 nt, Homo sapiens
  misc_RNA (1)...(19): siRNA sense strand
ucgaaaccguuauggugaa

SEQ ID NO: 1193211 - RNA, 19 nt, Homo sapiens
  misc_RNA (1)...(19): siRNA sense strand
gcuuugcuucugauaauuu

SEQ ID NO: 1193212 - RNA, 19 nt, Homo sapiens
  misc_RNA (1)...(19): siRNA sense strand
gggcucuacuugucaucaa

SEQ ID NO: 1193213 - RNA, 19 nt, Homo sapiens
  misc_RNA (1)...(19): siRNA sense strand
cagaggaggaguuggagaa

SEQ ID NO: 1193214 - RNA, 19 nt, Homo sapiens
  misc_RNA (1)...(19): siRNA sense strand
cuacaugaaugaagaugac

SEQ ID NO: 1193215 - RNA, 19 nt, Homo sapiens
  misc_RNA (1)...(19): siRNA sense strand
gaagaggauaaguacaugu

SEQ ID NO: 1193216 - RNA, 19 nt, Homo sapiens
  misc_RNA (1)...(19): siRNA sense strand
caaaacucaugucugaauu

SEQ ID NO: 1193217 - RNA, 19 nt, Homo sapiens
  misc_RNA (1)...(19): siRNA sense strand
ugacagcuuugcuucugau

SEQ ID NO: 1193218 - RNA, 19 nt, Homo sapiens
  misc_RNA (1)...(19): siRNA sense strand
gguguugcuuccaggagaa

SEQ ID NO: 1193219 - RNA, 19 nt, Homo sapiens
  misc_RNA (1)...(19): siRNA sense strand
gcaaaacucaugucugaau

SEQ ID NO: 1193220 - RNA, 19 nt, Homo sapiens
  misc_RNA (1)...(19): siRNA sense strand
cgccagcccucagagaauu

SEQ ID NO: 1193221 - RNA, 19 nt, Homo sapiens
  misc_RNA (1)...(19): siRNA sense strand
cgacugggguccuugugua

SEQ ID NO: 1193222 - RNA, 19 nt, Homo sapiens
  misc_RNA (1)...(19): siRNA sense strand
uugcaaaacucaugucuga

SEQ ID NO: 1193223 - RNA, 19 nt, Homo sapiens
  misc_RNA (1)...(19): siRNA sense strand
gagaauucugugacugauu

SEQ ID NO: 1193224 - RNA, 19 nt, Homo sapiens
  misc_RNA (1)...(19): siRNA sense strand
gugacagcuuugcuucuga

SEQ ID NO: 1193225 - RNA, 19 nt, Homo sapiens
  misc_RNA (1)...(19): siRNA sense strand
gugcaugccuacuugaaaa

SEQ ID NO: 1193226 - RNA, 19 nt, Homo sapiens
  misc_RNA (1)...(19): siRNA sense strand
gaaagaucucagaguaaag

SEQ ID NO: 1193227 - RNA, 19 nt, Homo sapiens
  misc_RNA (1)...(19): siRNA sense strand
uuacagaggaggaguugga

SEQ ID NO: 1193228 - RNA, 19 nt, Homo sapiens
  misc_RNA (1)...(19): siRNA sense strand
ggaggaggaggaagaggau

SEQ ID NO: 1193229 - RNA, 19 nt, Homo sapiens
  misc_RNA (1)...(19): siRNA sense strand
ccgugacccuuccgcauau

SEQ ID NO: 1193230 - RNA, 19 nt, Homo sapiens
  misc_RNA (1)...(19): siRNA sense strand
gucagaagacuauugauac

SEQ ID NO: 1193231 - RNA, 19 nt, Homo sapiens
  misc_RNA (1)...(19): siRNA sense strand
uaugugaaguugauuucca

SEQ ID NO: 1193232 - RNA, 19 nt, Homo sapiens
  misc_RNA (1)...(19): siRNA sense strand
gacccuuccgcauauaauu

SEQ ID NO: 1193233 - RNA, 19 nt, Homo sapiens
  misc_RNA (1)...(19): siRNA sense strand
aggaggaagaggauaagua

SEQ ID NO: 1193234 - RNA, 19 nt, Homo sapiens
  misc_RNA (1)...(19): siRNA sense strand
ccuuguguauuuagccaaa

SEQ ID NO: 1193235 - RNA, 19 nt, Homo sapiens
  misc_RNA (1)...(19): siRNA sense strand
gcuacaugaaugaagauga

SEQ ID NO: 1193236 - RNA, 19 nt, Homo sapiens
  misc_RNA (1)...(19): siRNA sense strand
ugucugaauuagaaagcuu

SEQ ID NO: 1193237 - RNA, 19 nt, Homo sapiens
  misc_RNA (1)...(19): siRNA sense strand
ugugacagcuuugcuucug

SEQ ID NO: 1193238 - RNA, 19 nt, Homo sapiens
  misc_RNA (1)...(19): siRNA sense strand
ucagaagacuauugauacc

SEQ ID NO: 1193239 - RNA, 19 nt, Homo sapiens
  misc_RNA (1)...(19): siRNA sense strand
gccgucagaagacuauuga

SEQ ID NO: 1193240 - RNA, 19 nt, Homo sapiens
  misc_RNA (1)...(19): siRNA sense strand
aagaggauaaguacauguu

SEQ ID NO: 1193241 - RNA, 19 nt, Homo sapiens
  misc_RNA (1)...(19): siRNA sense strand
ucaggguggcgaugaaguu

SEQ ID NO: 1193242 - RNA, 19 nt, Homo sapiens
  misc_RNA (1)...(19): siRNA sense strand
aaaccguuauggugaagag

SEQ ID NO: 1193243 - RNA, 19 nt, Homo sapiens
  misc_RNA (1)...(19): siRNA sense strand
aaaccucgucauccucuga

SEQ ID NO: 1193244 - RNA, 19 nt, Homo sapiens
  misc_RNA (1)...(19): siRNA sense strand
cgaaaccguuauggugaag

SEQ ID NO: 1193245 - RNA, 19 nt, Homo sapiens
  misc_RNA (1)...(19): siRNA sense strand
gcucuacuugucaucaaug

SEQ ID NO: 1193246 - RNA, 19 nt, Homo sapiens
  misc_RNA (1)...(19): siRNA sense strand
uauaauucgcccaguggaa

SEQ ID NO: 1193247 - RNA, 19 nt, Homo sapiens
  misc_RNA (1)...(19): siRNA sense strand
uccgugacccuuccgcaua

SEQ ID NO: 1193248 - RNA, 19 nt, Homo sapiens
  misc_RNA (1)...(19): siRNA sense strand
aggaggaggaagaggauaa

SEQ ID NO: 1193249 - RNA, 19 nt, Homo sapiens
  misc_RNA (1)...(19): siRNA sense strand
gcagaaagaucucagagua

SEQ ID NO: 1193250 - RNA, 19 nt, Homo sapiens
  misc_RNA (1)...(19): siRNA sense strand
gaagauauauaaccguuca

SEQ ID NO: 1193251 - RNA, 19 nt, Homo sapiens
  misc_RNA (1)...(19): siRNA sense strand
gagaacgucugcagcaauu

SEQ ID NO: 1193252 - RNA, 19 nt, Homo sapiens
  misc_RNA (1)...(19): siRNA sense strand
gaagaugaccugcccagaa

SEQ ID NO: 1193253 - RNA, 19 nt, Homo sapiens
  misc_RNA (1)...(19): siRNA sense strand
gaaugugcaugccuacuug

SEQ ID NO: 1193254 - RNA, 19 nt, Homo sapiens
  misc_RNA (1)...(19): siRNA sense strand
agaaagaucucagaguaaa

SEQ ID NO: 1193255 - RNA, 19 nt, Homo sapiens
  misc_RNA (1)...(19): siRNA sense strand
caacuccgauucagaagau

SEQ ID NO: 1193256 - RNA, 19 nt, Homo sapiens
  misc_RNA (1)...(19): siRNA sense strand
acucaugucugaauuagaa

SEQ ID NO: 1193257 - RNA, 19 nt, Homo sapiens
  misc_RNA (1)...(19): siRNA sense strand
gaugaaaguggaaugaauu

SEQ ID NO: 1193258 - RNA, 19 nt, Homo sapiens
  misc_RNA (1)...(19): siRNA sense strand
ggaagaggauaaguacaug

SEQ ID NO: 1193259 - RNA, 19 nt, Homo sapiens
  misc_RNA (1)...(19): siRNA sense strand
gaagacuauugauaccaaa

SEQ ID NO: 1193260 - RNA, 19 nt, Homo sapiens
  misc_RNA (1)...(19): siRNA sense strand
ucagauaugugaaguugau

SEQ ID NO: 1193261 - RNA, 19 nt, Homo sapiens
  misc_RNA (1)...(19): siRNA sense strand
gaagaugaaaguggaauga

SEQ ID NO: 1193262 - RNA, 19 nt, Homo sapiens
  misc_RNA (1)...(19): siRNA sense strand
uaucauggcuuugggaaug

SEQ ID NO: 1193263 - RNA, 19 nt, Homo sapiens
  misc_RNA (1)...(19): siRNA sense strand
ugacaguugugacagcuuu

SEQ ID NO: 1193264 - RNA, 19 nt, Homo sapiens
  misc_RNA (1)...(19): siRNA sense strand
cagcuuugcuucugauaau

SEQ ID NO: 1193265 - RNA, 19 nt, Homo sapiens
  misc_RNA (1)...(19): siRNA sense strand
gaccguggauggcuacaug

SEQ ID NO: 1193266 - RNA, 19 nt, Homo sapiens
  misc_RNA (1)...(19): siRNA sense strand
guggauggcuacaugaaug

SEQ ID NO: 1193267 - RNA, 19 nt, Homo sapiens
  misc_RNA (1)...(19): siRNA sense strand
ucacugggcucuacuuguc

SEQ ID NO: 1193268 - RNA, 19 nt, Homo sapiens
  misc_RNA (1)...(19): siRNA sense strand
cgucagaagacuauugaua

SEQ ID NO: 1193269 - RNA, 19 nt, Homo sapiens
  misc_RNA (1)...(19): siRNA sense strand
gaucucagaguaaagaaga

SEQ ID NO: 1193270 - RNA, 19 nt, Homo sapiens
  misc_RNA (1)...(19): siRNA sense strand
ggaaugugcaugccuacuu

SEQ ID NO: 1193271 - RNA, 19 nt, Homo sapiens
  misc_RNA (1)...(19): siRNA sense strand
ugaaguugauuuccaugga

SEQ ID NO: 1193272 - RNA, 19 nt, Homo sapiens
  misc_RNA (1)...(19): siRNA sense strand
agaagacuauugauaccaa

SEQ ID NO: 1193273 - RNA, 19 nt, Homo sapiens
  misc_RNA (1)...(19): siRNA sense strand
cagaaagaucucagaguaa

SEQ ID NO: 1193274 - RNA, 19 nt, Homo sapiens
  misc_RNA (1)...(19): siRNA sense strand
ggaggaagaggauaaguac

SEQ ID NO: 1193275 - RNA, 19 nt, Homo sapiens
  misc_RNA (1)...(19): siRNA sense strand
caucaaugccgucagaaga

SEQ ID NO: 1193276 - RNA, 19 nt, Homo sapiens
  misc_RNA (1)...(19): siRNA sense strand
aaacucaugucugaauuag

SEQ ID NO: 1193277 - RNA, 19 nt, Homo sapiens
  misc_RNA (1)...(19): siRNA sense strand
aagaugaccugcccagaag

SEQ ID NO: 1193278 - RNA, 19 nt, Homo sapiens
  misc_RNA (1)...(19): siRNA sense strand
agaugaaaguggaaugaau

SEQ ID NO: 1193279 - RNA, 19 nt, Homo sapiens
  misc_RNA (1)...(19): siRNA sense strand
ugucaucaaugccgucaga

SEQ ID NO: 1193280 - RNA, 19 nt, Homo sapiens
  misc_RNA (1)...(19): siRNA sense strand
ggagaacgucugcagcaau

SEQ ID NO: 1193281 - RNA, 19 nt, Homo sapiens
  misc_RNA (1)...(19): siRNA sense strand
cagaguaaagaagaacuua

SEQ ID NO: 1193282 - RNA, 19 nt, Homo sapiens
  misc_RNA (1)...(19): siRNA sense strand
gauaugugaaguugauuuc

SEQ ID NO: 1193283 - RNA, 19 nt, Homo sapiens
  misc_RNA (1)...(19): siRNA sense strand
gaacgucugcagcaauucu

SEQ ID NO: 1193284 - RNA, 19 nt, Homo sapiens
  misc_RNA (1)...(19): siRNA sense strand
cucgagagaagauauauaa

SEQ ID NO: 1193285 - RNA, 19 nt, Homo sapiens
  misc_RNA (1)...(19): siRNA sense strand
aaagaucucagaguaaaga

SEQ ID NO: 1193286 - RNA, 19 nt, Homo sapiens
  misc_RNA (1)...(19): siRNA sense strand
ucgaaaccguuauggugaa

SEQ ID NO: 1193287 - RNA, 19 nt, Homo sapiens
  misc_RNA (1)...(19): siRNA sense strand
gcuuugcuucugauaauuu

SEQ ID NO: 1193288 - RNA, 19 nt, Homo sapiens
  misc_RNA (1)...(19): siRNA sense strand
gggcucuacuugucaucaa

SEQ ID NO: 1193289 - RNA, 19 nt, Homo sapiens
  misc_RNA (1)...(19): siRNA sense strand
cagaggaggaguuggagaa

SEQ ID NO: 1193290 - RNA, 19 nt, Homo sapiens
  misc_RNA (1)...(19): siRNA sense strand
cuacaugaaugaagaugac

SEQ ID NO: 1193291 - RNA, 19 nt, Homo sapiens
  misc_RNA (1)...(19): siRNA sense strand
gaagaggauaaguacaugu

SEQ ID NO: 1193292 - RNA, 19 nt, Homo sapiens
  misc_RNA (1)...(19): siRNA sense strand
caaaacucaugucugaauu

SEQ ID NO: 1193293 - RNA, 19 nt, Homo sapiens
  misc_RNA (1)...(19): siRNA sense strand
ugacagcuuugcuucugau

SEQ ID NO: 1193294 - RNA, 19 nt, Homo sapiens
  misc_RNA (1)...(19): siRNA sense strand
gguguugcuuccaggagaa

SEQ ID NO: 1193295 - RNA, 19 nt, Homo sapiens
  misc_RNA (1)...(19): siRNA sense strand
gcaaaacucaugucugaau

SEQ ID NO: 1193296 - RNA, 19 nt, Homo sapiens
  misc_RNA (1)...(19): siRNA sense strand
cgccagcccucagagaauu

SEQ ID NO: 1193297 - RNA, 19 nt, Homo sapiens
  misc_RNA (1)...(19): siRNA sense strand
cgacugggguccuugugua

SEQ ID NO: 1193298 - RNA, 19 nt, Homo sapiens
  misc_RNA (1)...(19): siRNA sense strand
uugcaaaacucaugucuga

SEQ ID NO: 1193299 - RNA, 19 nt, Homo sapiens
  misc_RNA (1)...(19): siRNA sense strand
gagaauucugugacugauu

SEQ ID NO: 1193300 - RNA, 19 nt, Homo sapiens
  misc_RNA (1)...(19): siRNA sense strand
gugacagcuuugcuucuga

SEQ ID NO: 1193301 - RNA, 19 nt, Homo sapiens
  misc_RNA (1)...(19): siRNA sense strand
gugcaugccuacuugaaaa

SEQ ID NO: 1193302 - RNA, 19 nt, Homo sapiens
  misc_RNA (1)...(19): siRNA sense strand
gaaagaucucagaguaaag

SEQ ID NO: 1193303 - RNA, 19 nt, Homo sapiens
  misc_RNA (1)...(19): siRNA sense strand
uuacagaggaggaguugga

SEQ ID NO: 1193304 - RNA, 19 nt, Homo sapiens
  misc_RNA (1)...(19): siRNA sense strand
ggaggaggaggaagaggau

SEQ ID NO: 1193305 - RNA, 19 nt, Homo sapiens
  misc_RNA (1)...(19): siRNA sense strand
ccgugacccuuccgcauau

SEQ ID NO: 1193306 - RNA, 19 nt, Homo sapiens
  misc_RNA (1)...(19): siRNA sense strand
gucagaagacuauugauac

SEQ ID NO: 1193307 - RNA, 19 nt, Homo sapiens
  misc_RNA (1)...(19): siRNA sense strand
uaugugaaguugauuucca

SEQ ID NO: 1193308 - RNA, 19 nt, Homo sapiens
  misc_RNA (1)...(19): siRNA sense strand
gacccuuccgcauauaauu

SEQ ID NO: 1193309 - RNA, 19 nt, Homo sapiens
  misc_RNA (1)...(19): siRNA sense strand
aggaggaagaggauaagua

SEQ ID NO: 1193310 - RNA, 19 nt, Homo sapiens
  misc_RNA (1)...(19): siRNA sense strand
ccuuguguauuuagccaaa

SEQ ID NO: 1193311 - RNA, 19 nt, Homo sapiens
  misc_RNA (1)...(19): siRNA sense strand
gcuacaugaaugaagauga

SEQ ID NO: 1193312 - RNA, 19 nt, Homo sapiens
  misc_RNA (1)...(19): siRNA sense strand
ugucugaauuagaaagcuu

SEQ ID NO: 1193313 - RNA, 19 nt, Homo sapiens
  misc_RNA (1)...(19): siRNA sense strand
ugugacagcuuugcuucug

SEQ ID NO: 1193314 - RNA, 19 nt, Homo sapiens
  misc_RNA (1)...(19): siRNA sense strand
ucagaagacuauugauacc

SEQ ID NO: 1193315 - RNA, 19 nt, Homo sapiens
  misc_RNA (1)...(19): siRNA sense strand
gccgucagaagacuauuga

SEQ ID NO: 1193316 - RNA, 19 nt, Homo sapiens
  misc_RNA (1)...(19): siRNA sense strand
aagaggauaaguacauguu

SEQ ID NO: 1193317 - RNA, 19 nt, Homo sapiens
  misc_RNA (1)...(19): siRNA sense strand
ucaggguggcgaugaaguu

SEQ ID NO: 1193318 - RNA, 19 nt, Homo sapiens
  misc_RNA (1)...(19): siRNA sense strand
aaaccguuauggugaagag

SEQ ID NO: 1193319 - RNA, 19 nt, Homo sapiens
  misc_RNA (1)...(19): siRNA sense strand
aaaccucgucauccucuga

SEQ ID NO: 1193320 - RNA, 19 nt, Homo sapiens
  misc_RNA (1)...(19): siRNA sense strand
cgaaaccguuauggugaag

SEQ ID NO: 1193321 - RNA, 19 nt, Homo sapiens
  misc_RNA (1)...(19): siRNA sense strand
gcucuacuugucaucaaug

SEQ ID NO: 1193322 - RNA, 19 nt, Homo sapiens
  misc_RNA (1)...(19): siRNA sense strand
uauaauucgcccaguggaa

SEQ ID NO: 1193323 - RNA, 19 nt, Homo sapiens
  misc_RNA (1)...(19): siRNA sense strand
uccgugacccuuccgcaua

SEQ ID NO: 1193324 - RNA, 19 nt, Homo sapiens
  misc_RNA (1)...(19): siRNA sense strand
aggaggaggaagaggauaa

SEQ ID NO: 1193325 - RNA, 19 nt, Homo sapiens
  misc_RNA (1)...(19): siRNA sense strand
gcacaacuauugcagaaau

SEQ ID NO: 1193326 - RNA, 19 nt, Homo sapiens
  misc_RNA (1)...(19): siRNA sense strand
gagcacaacuauugcagaa

SEQ ID NO: 1193327 - RNA, 19 nt, Homo sapiens
  misc_RNA (1)...(19): siRNA sense strand
gaacgagacuuuccagcau

SEQ ID NO: 1193328 - RNA, 19 nt, Homo sapiens
  misc_RNA (1)...(19): siRNA sense strand
gcacgaggauggugucuac

SEQ ID NO: 1193329 - RNA, 19 nt, Homo sapiens
  misc_RNA (1)...(19): siRNA sense strand
gaacuggacagcacuacaa

SEQ ID NO: 1193330 - RNA, 19 nt, Homo sapiens
  misc_RNA (1)...(19): siRNA sense strand
ggaaacccaccuccucuaa

SEQ ID NO: 1193331 - RNA, 19 nt, Homo sapiens
  misc_RNA (1)...(19): siRNA sense strand
ucacagccauuguagcaaa

SEQ ID NO: 1193332 - RNA, 19 nt, Homo sapiens
  misc_RNA (1)...(19): siRNA sense strand
ccaacaaacucaccauaca

SEQ ID NO: 1193333 - RNA, 19 nt, Homo sapiens
  misc_RNA (1)...(19): siRNA sense strand
cauacaacacucugaaaua

SEQ ID NO: 1193334 - RNA, 19 nt, Homo sapiens
  misc_RNA (1)...(19): siRNA sense strand
caacgucucucuggacuuc

SEQ ID NO: 1193335 - RNA, 19 nt, Homo sapiens
  misc_RNA (1)...(19): siRNA sense strand
gcccagggauuugcuguuu

SEQ ID NO: 1193336 - RNA, 19 nt, Homo sapiens
  misc_RNA (1)...(19): siRNA sense strand
agucagagguucaaguuug

SEQ ID NO: 1193337 - RNA, 19 nt, Homo sapiens
  misc_RNA (1)...(19): siRNA sense strand
ccacuucaauuuccaucuu

SEQ ID NO: 1193338 - RNA, 19 nt, Homo sapiens
  misc_RNA (1)...(19): siRNA sense strand
cauacaaacuugcaucagu

SEQ ID NO: 1193339 - RNA, 19 nt, Homo sapiens
  misc_RNA (1)...(19): siRNA sense strand
uuacaagccuuccacuuca

SEQ ID NO: 1193340 - RNA, 19 nt, Homo sapiens
  misc_RNA (1)...(19): siRNA sense strand
ggagucagagguucaaguu

SEQ ID NO: 1193341 - RNA, 19 nt, Homo sapiens
  misc_RNA (1)...(19): siRNA sense strand
ucaacaagaugaccgcaau

SEQ ID NO: 1193342 - RNA, 19 nt, Homo sapiens
  misc_RNA (1)...(19): siRNA sense strand
caacaaacucaccauacaa

SEQ ID NO: 1193343 - RNA, 19 nt, Homo sapiens
  misc_RNA (1)...(19): siRNA sense strand
gaacuacucagccaugucu

SEQ ID NO: 1193344 - RNA, 19 nt, Homo sapiens
  misc_RNA (1)...(19): siRNA sense strand
cuacaaggaucauggaaac

SEQ ID NO: 1193345 - RNA, 19 nt, Homo sapiens
  misc_RNA (1)...(19): siRNA sense strand
ggacuucgucaucuuguau

SEQ ID NO: 1193346 - RNA, 19 nt, Homo sapiens
  misc_RNA (1)...(19): siRNA sense strand
gcuggaagccacagaguug

SEQ ID NO: 1193347 - RNA, 19 nt, Homo sapiens
  misc_RNA (1)...(19): siRNA sense strand
gauaccugcuugccagaug

SEQ ID NO: 1193348 - RNA, 19 nt, Homo sapiens
  misc_RNA (1)...(19): siRNA sense strand
ccagggauuugcuguuuua

SEQ ID NO: 1193349 - RNA, 19 nt, Homo sapiens
  misc_RNA (1)...(19): siRNA sense strand
gauggugucuacuggaagu

SEQ ID NO: 1193350 - RNA, 19 nt, Homo sapiens
  misc_RNA (1)...(19): siRNA sense strand
caucuuguauuucuucucu

SEQ ID NO: 1193351 - RNA, 19 nt, Homo sapiens
  misc_RNA (1)...(19): siRNA sense strand
auacaacacucugaaauac

SEQ ID NO: 1193352 - RNA, 19 nt, Homo sapiens
  misc_RNA (1)...(19): siRNA sense strand
ggucagagucaacaagaug

SEQ ID NO: 1193353 - RNA, 19 nt, Homo sapiens
  misc_RNA (1)...(19): siRNA sense strand
ccaaaguccucuaugucau

SEQ ID NO: 1193354 - RNA, 19 nt, Homo sapiens
  misc_RNA (1)...(19): siRNA sense strand
aaacucaccauacaaacuu

SEQ ID NO: 1193355 - RNA, 19 nt, Homo sapiens
  misc_RNA (1)...(19): siRNA sense strand
ccuccaaaguccucuaugu

SEQ ID NO: 1193356 - RNA, 19 nt, Homo sapiens
  misc_RNA (1)...(19): siRNA sense strand
ccaauggugcggauuauag

SEQ ID NO: 1193357 - RNA, 19 nt, Homo sapiens
  misc_RNA (1)...(19): siRNA sense strand
cagccaauggugcggauua

SEQ ID NO: 1193358 - RNA, 19 nt, Homo sapiens
  misc_RNA (1)...(19): siRNA sense strand
ugucuucuguggucuauuc

SEQ ID NO: 1193359 - RNA, 19 nt, Homo sapiens
  misc_RNA (1)...(19): siRNA sense strand
aaacccaccuccucuaacu

SEQ ID NO: 1193360 - RNA, 19 nt, Homo sapiens
  misc_RNA (1)...(19): siRNA sense strand
guugaaggauggacagucu

SEQ ID NO: 1193361 - RNA, 19 nt, Homo sapiens
  misc_RNA (1)...(19): siRNA sense strand
gcccaccucuguccuucaa

SEQ ID NO: 1193362 - RNA, 19 nt, Homo sapiens
  misc_RNA (1)...(19): siRNA sense strand
ugggugagcacaacuauug

SEQ ID NO: 1193363 - RNA, 19 nt, Homo sapiens
  misc_RNA (1)...(19): siRNA sense strand
gcuacaaggaucauggaaa

SEQ ID NO: 1193364 - RNA, 19 nt, Homo sapiens
  misc_RNA (1)...(19): siRNA sense strand
gggaagccaugucuguuuu

SEQ ID NO: 1193365 - RNA, 19 nt, Homo sapiens
  misc_RNA (1)...(19): siRNA sense strand
cuggaaaccuuggcugcua

SEQ ID NO: 1193366 - RNA, 19 nt, Homo sapiens
  misc_RNA (1)...(19): siRNA sense strand
gcacgucacauucaaaucc

SEQ ID NO: 1193367 - RNA, 19 nt, Homo sapiens
  misc_RNA (1)...(19): siRNA sense strand
gaaguacugugagauaccu

SEQ ID NO: 1193368 - RNA, 19 nt, Homo sapiens
  misc_RNA (1)...(19): siRNA sense strand
auaccaagccgucaaggaa

SEQ ID NO: 1193369 - RNA, 19 nt, Homo sapiens
  misc_RNA (1)...(19): siRNA sense strand
uaugcuugcuucuguggaa

SEQ ID NO: 1193370 - RNA, 19 nt, Homo sapiens
  misc_RNA (1)...(19): siRNA sense strand
ccuuagggauugucaucaa

SEQ ID NO: 1193371 - RNA, 19 nt, Homo sapiens
  misc_RNA (1)...(19): siRNA sense strand
gggauuugcuguuuuauac

SEQ ID NO: 1193372 - RNA, 19 nt, Homo sapiens
  misc_RNA (1)...(19): siRNA sense strand
caaaguccucuaugucauc

SEQ ID NO: 1193373 - RNA, 19 nt, Homo sapiens
  misc_RNA (1)...(19): siRNA sense strand
ccauacaacacucugaaau

SEQ ID NO: 1193374 - RNA, 19 nt, Homo sapiens
  misc_RNA (1)...(19): siRNA sense strand
cacuucaauuuccaucuuu

SEQ ID NO: 1193375 - RNA, 19 nt, Homo sapiens
  misc_RNA (1)...(19): siRNA sense strand
ucuuguauuucuucucuga

SEQ ID NO: 1193376 - RNA, 19 nt, Homo sapiens
  misc_RNA (1)...(19): siRNA sense strand
cgggaagccaugucuguuu

SEQ ID NO: 1193377 - RNA, 19 nt, Homo sapiens
  misc_RNA (1)...(19): siRNA sense strand
aacaaacucaccauacaaa

SEQ ID NO: 1193378 - RNA, 19 nt, Homo sapiens
  misc_RNA (1)...(19): siRNA sense strand
ucuauggucuggcaacucu

SEQ ID NO: 1193379 - RNA, 19 nt, Homo sapiens
  misc_RNA (1)...(19): siRNA sense strand
acucagccaugucuucugu

SEQ ID NO: 1193380 - RNA, 19 nt, Homo sapiens
  misc_RNA (1)...(19): siRNA sense strand
gggaacuacucagccaugu

SEQ ID NO: 1193381 - RNA, 19 nt, Homo sapiens
  misc_RNA (1)...(19): siRNA sense strand
aggcuaugcuugcuucugu

SEQ ID NO: 1193382 - RNA, 19 nt, Homo sapiens
  misc_RNA (1)...(19): siRNA sense strand
caaacucaccauacaaacu

SEQ ID NO: 1193383 - RNA, 19 nt, Homo sapiens
  misc_RNA (1)...(19): siRNA sense strand
cacagucacagccauugua

SEQ ID NO: 1193384 - RNA, 19 nt, Homo sapiens
  misc_RNA (1)...(19): siRNA sense strand
cuggaaguacugugagaua

SEQ ID NO: 1193385 - RNA, 19 nt, Homo sapiens
  misc_RNA (1)...(19): siRNA sense strand
ugaaggauggacagucuau

SEQ ID NO: 1193386 - RNA, 19 nt, Homo sapiens
  misc_RNA (1)...(19): siRNA sense strand
agacuuuccagcauccaua

SEQ ID NO: 1193387 - RNA, 19 nt, Homo sapiens
  misc_RNA (1)...(19): siRNA sense strand
aggauggugucuacuggaa

SEQ ID NO: 1193388 - RNA, 19 nt, Homo sapiens
  misc_RNA (1)...(19): siRNA sense strand
gaccuuagggauugucauc

SEQ ID NO: 1193389 - RNA, 19 nt, Homo sapiens
  misc_RNA (1)...(19): siRNA sense strand
gggauggagucaggcuaug

SEQ ID NO: 1193390 - RNA, 19 nt, Homo sapiens
  misc_RNA (1)...(19): siRNA sense strand
guccaacaaacucaccaua

SEQ ID NO: 1193391 - RNA, 19 nt, Homo sapiens
  misc_RNA (1)...(19): siRNA sense strand
gccaauggugcggauuaua

SEQ ID NO: 1193392 - RNA, 19 nt, Homo sapiens
  misc_RNA (1)...(19): siRNA sense strand
ggagcaggccaaccucagu

SEQ ID NO: 1193393 - RNA, 19 nt, Homo sapiens
  misc_RNA (1)...(19): siRNA sense strand
ccucagacugucccaggua

SEQ ID NO: 1193394 - RNA, 19 nt, Homo sapiens
  misc_RNA (1)...(19): siRNA sense strand
aaaguccucuaugucauca

SEQ ID NO: 1193395 - RNA, 19 nt, Homo sapiens
  misc_RNA (1)...(19): siRNA sense strand
gaaacccaccuccucuaac

SEQ ID NO: 1193396 - RNA, 19 nt, Homo sapiens
  misc_RNA (1)...(19): siRNA sense strand
uacaagccuuccacuucaa

SEQ ID NO: 1193397 - RNA, 19 nt, Homo sapiens
  misc_RNA (1)...(19): siRNA sense strand
uuuacaagccuuccacuuc

SEQ ID NO: 1193398 - RNA, 19 nt, Homo sapiens
  misc_RNA (1)...(19): siRNA sense strand
ucuggcaacucuccucauc

SEQ ID NO: 1193399 - RNA, 19 nt, Homo sapiens
  misc_RNA (1)...(19): siRNA sense strand
uccaaaguccucuauguca

SEQ ID NO: 1193400 - RNA, 19 nt, Homo sapiens
  misc_RNA (1)...(19): siRNA sense strand
auucaaaucccaucguguu

SEQ ID NO: 1193401 - RNA, 19 nt, Homo sapiens
  misc_RNA (1)...(19): siRNA sense strand
gagucagagguucaaguuu

SEQ ID NO: 1193402 - RNA, 19 nt, Homo sapiens
  misc_RNA (1)...(19): siRNA sense strand
uggacuucgucaucuugua

SEQ ID NO: 1193403 - RNA, 19 nt, Homo sapiens
  misc_RNA (1)...(19): siRNA sense strand
uugcuucuguggaaacaau

SEQ ID NO: 1193404 - RNA, 19 nt, Homo sapiens
  misc_RNA (1)...(19): siRNA sense strand
accaagccgucaaggaaga

SEQ ID NO: 1193405 - RNA, 19 nt, Homo sapiens
  misc_RNA (1)...(19): siRNA sense strand
gggucagagucaacaagau

SEQ ID NO: 1193406 - RNA, 19 nt, Homo sapiens
  misc_RNA (1)...(19): siRNA sense strand
caaaucccaucguguuccu

SEQ ID NO: 1193407 - RNA, 19 nt, Homo sapiens
  misc_RNA (1)...(19): siRNA sense strand
gcacaacuauugcagaaau

SEQ ID NO: 1193408 - RNA, 19 nt, Homo sapiens
  misc_RNA (1)...(19): siRNA sense strand
gagcacaacuauugcagaa

SEQ ID NO: 1193409 - RNA, 19 nt, Homo sapiens
  misc_RNA (1)...(19): siRNA sense strand
gaacgagacuuuccagcau

SEQ ID NO: 1193410 - RNA, 19 nt, Homo sapiens
  misc_RNA (1)...(19): siRNA sense strand
gcacgaggauggugucuac

SEQ ID NO: 1193411 - RNA, 19 nt, Homo sapiens
  misc_RNA (1)...(19): siRNA sense strand
gaacuggacagcacuacaa

SEQ ID NO: 1193412 - RNA, 19 nt, Homo sapiens
  misc_RNA (1)...(19): siRNA sense strand
ggaaacccaccuccucuaa

SEQ ID NO: 1193413 - RNA, 19 nt, Homo sapiens
  misc_RNA (1)...(19): siRNA sense strand
ucacagccauuguagcaaa

SEQ ID NO: 1193414 - RNA, 19 nt, Homo sapiens
  misc_RNA (1)...(19): siRNA sense strand
ccaacaaacucaccauaca

SEQ ID NO: 1193415 - RNA, 19 nt, Homo sapiens
  misc_RNA (1)...(19): siRNA sense strand
cauacaacacucugaaaua

SEQ ID NO: 1193416 - RNA, 19 nt, Homo sapiens
  misc_RNA (1)...(19): siRNA sense strand
caacgucucucuggacuuc

SEQ ID NO: 1193417 - RNA, 19 nt, Homo sapiens
  misc_RNA (1)...(19): siRNA sense strand
gcccagggauuugcuguuu

SEQ ID NO: 1193418 - RNA, 19 nt, Homo sapiens
  misc_RNA (1)...(19): siRNA sense strand
agucagagguucaaguuug

SEQ ID NO: 1193419 - RNA, 19 nt, Homo sapiens
  misc_RNA (1)...(19): siRNA sense strand
ccacuucaauuuccaucuu

SEQ ID NO: 1193420 - RNA, 19 nt, Homo sapiens
  misc_RNA (1)...(19): siRNA sense strand
cauacaaacuugcaucagu

SEQ ID NO: 1193421 - RNA, 19 nt, Homo sapiens
  misc_RNA (1)...(19): siRNA sense strand
uuacaagccuuccacuuca

SEQ ID NO: 1193422 - RNA, 19 nt, Homo sapiens
  misc_RNA (1)...(19): siRNA sense strand
ggagucagagguucaaguu

SEQ ID NO: 1193423 - RNA, 19 nt, Homo sapiens
  misc_RNA (1)...(19): siRNA sense strand
ucaacaagaugaccgcaau

SEQ ID NO: 1193424 - RNA, 19 nt, Homo sapiens
  misc_RNA (1)...(19): siRNA sense strand
caacaaacucaccauacaa

SEQ ID NO: 1193425 - RNA, 19 nt, Homo sapiens
  misc_RNA (1)...(19): siRNA sense strand
gaacuacucagccaugucu

SEQ ID NO: 1193426 - RNA, 19 nt, Homo sapiens
  misc_RNA (1)...(19): siRNA sense strand
cuacaaggaucauggaaac

SEQ ID NO: 1193427 - RNA, 19 nt, Homo sapiens
  misc_RNA (1)...(19): siRNA sense strand
ggacuucgucaucuuguau

SEQ ID NO: 1193428 - RNA, 19 nt, Homo sapiens
  misc_RNA (1)...(19): siRNA sense strand
gcuggaagccacagaguug

SEQ ID NO: 1193429 - RNA, 19 nt, Homo sapiens
  misc_RNA (1)...(19): siRNA sense strand
gauaccugcuugccagaug

SEQ ID NO: 1193430 - RNA, 19 nt, Homo sapiens
  misc_RNA (1)...(19): siRNA sense strand
ccagggauuugcuguuuua

SEQ ID NO: 1193431 - RNA, 19 nt, Homo sapiens
  misc_RNA (1)...(19): siRNA sense strand
gauggugucuacuggaagu

SEQ ID NO: 1193432 - RNA, 19 nt, Homo sapiens
  misc_RNA (1)...(19): siRNA sense strand
caucuuguauuucuucucu

SEQ ID NO: 1193433 - RNA, 19 nt, Homo sapiens
  misc_RNA (1)...(19): siRNA sense strand
auacaacacucugaaauac

SEQ ID NO: 1193434 - RNA, 19 nt, Homo sapiens
  misc_RNA (1)...(19): siRNA sense strand
ggucagagucaacaagaug

SEQ ID NO: 1193435 - RNA, 19 nt, Homo sapiens
  misc_RNA (1)...(19): siRNA sense strand
ccaaaguccucuaugucau

SEQ ID NO: 1193436 - RNA, 19 nt, Homo sapiens
  misc_RNA (1)...(19): siRNA sense strand
aaacucaccauacaaacuu

SEQ ID NO: 1193437 - RNA, 19 nt, Homo sapiens
  misc_RNA (1)...(19): siRNA sense strand
ccuccaaaguccucuaugu

SEQ ID NO: 1193438 - RNA, 19 nt, Homo sapiens
  misc_RNA (1)...(19): siRNA sense strand
ccaauggugcggauuauag

SEQ ID NO: 1193439 - RNA, 19 nt, Homo sapiens
  misc_RNA (1)...(19): siRNA sense strand
cagccaauggugcggauua

SEQ ID NO: 1193440 - RNA, 19 nt, Homo sapiens
  misc_RNA (1)...(19): siRNA sense strand
ugucuucuguggucuauuc

SEQ ID NO: 1193441 - RNA, 19 nt, Homo sapiens
  misc_RNA (1)...(19): siRNA sense strand
aaacccaccuccucuaacu

SEQ ID NO: 1193442 - RNA, 19 nt, Homo sapiens
  misc_RNA (1)...(19): siRNA sense strand
guugaaggauggacagucu

SEQ ID NO: 1193443 - RNA, 19 nt, Homo sapiens
  misc_RNA (1)...(19): siRNA sense strand
gcccaccucuguccuucaa

SEQ ID NO: 1193444 - RNA, 19 nt, Homo sapiens
  misc_RNA (1)...(19): siRNA sense strand
ugggugagcacaacuauug

SEQ ID NO: 1193445 - RNA, 19 nt, Homo sapiens
  misc_RNA (1)...(19): siRNA sense strand
gcuacaaggaucauggaaa

SEQ ID NO: 1193446 - RNA, 19 nt, Homo sapiens
  misc_RNA (1)...(19): siRNA sense strand
gggaagccaugucuguuuu

SEQ ID NO: 1193447 - RNA, 19 nt, Homo sapiens
  misc_RNA (1)...(19): siRNA sense strand
cuggaaaccuuggcugcua

SEQ ID NO: 1193448 - RNA, 19 nt, Homo sapiens
  misc_RNA (1)...(19): siRNA sense strand
gcacgucacauucaaaucc

SEQ ID NO: 1193449 - RNA, 19 nt, Homo sapiens
  misc_RNA (1)...(19): siRNA sense strand
gaaguacugugagauaccu

SEQ ID NO: 1193450 - RNA, 19 nt, Homo sapiens
  misc_RNA (1)...(19): siRNA sense strand
auaccaagccgucaaggaa

SEQ ID NO: 1193451 - RNA, 19 nt, Homo sapiens
  misc_RNA (1)...(19): siRNA sense strand
uaugcuugcuucuguggaa

SEQ ID NO: 1193452 - RNA, 19 nt, Homo sapiens
  misc_RNA (1)...(19): siRNA sense strand
ccuuagggauugucaucaa

SEQ ID NO: 1193453 - RNA, 19 nt, Homo sapiens
  misc_RNA (1)...(19): siRNA sense strand
gggauuugcuguuuuauac

SEQ ID NO: 1193454 - RNA, 19 nt, Homo sapiens
  misc_RNA (1)...(19): siRNA sense strand
caaaguccucuaugucauc

SEQ ID NO: 1193455 - RNA, 19 nt, Homo sapiens
  misc_RNA (1)...(19): siRNA sense strand
ccauacaacacucugaaau

SEQ ID NO: 1193456 - RNA, 19 nt, Homo sapiens
  misc_RNA (1)...(19): siRNA sense strand
cacuucaauuuccaucuuu

SEQ ID NO: 1193457 - RNA, 19 nt, Homo sapiens
  misc_RNA (1)...(19): siRNA sense strand
ucuuguauuucuucucuga

SEQ ID NO: 1193458 - RNA, 19 nt, Homo sapiens
  misc_RNA (1)...(19): siRNA sense strand
cgggaagccaugucuguuu

SEQ ID NO: 1193459 - RNA, 19 nt, Homo sapiens
  misc_RNA (1)...(19): siRNA sense strand
aacaaacucaccauacaaa

SEQ ID NO: 1193460 - RNA, 19 nt, Homo sapiens
  misc_RNA (1)...(19): siRNA sense strand
ucuauggucuggcaacucu

SEQ ID NO: 1193461 - RNA, 19 nt, Homo sapiens
  misc_RNA (1)...(19): siRNA sense strand
acucagccaugucuucugu

SEQ ID NO: 1193462 - RNA, 19 nt, Homo sapiens
  misc_RNA (1)...(19): siRNA sense strand
gggaacuacucagccaugu

SEQ ID NO: 1193463 - RNA, 19 nt, Homo sapiens
  misc_RNA (1)...(19): siRNA sense strand
aggcuaugcuugcuucugu

SEQ ID NO: 1193464 - RNA, 19 nt, Homo sapiens
  misc_RNA (1)...(19): siRNA sense strand
caaacucaccauacaaacu

SEQ ID NO: 1193465 - RNA, 19 nt, Homo sapiens
  misc_RNA (1)...(19): siRNA sense strand
cacagucacagccauugua

SEQ ID NO: 1193466 - RNA, 19 nt, Homo sapiens
  misc_RNA (1)...(19): siRNA sense strand
cuggaaguacugugagaua

SEQ ID NO: 1193467 - RNA, 19 nt, Homo sapiens
  misc_RNA (1)...(19): siRNA sense strand
ugaaggauggacagucuau

SEQ ID NO: 1193468 - RNA, 19 nt, Homo sapiens
  misc_RNA (1)...(19): siRNA sense strand
agacuuuccagcauccaua

SEQ ID NO: 1193469 - RNA, 19 nt, Homo sapiens
  misc_RNA (1)...(19): siRNA sense strand
aggauggugucuacuggaa

SEQ ID NO: 1193470 - RNA, 19 nt, Homo sapiens
  misc_RNA (1)...(19): siRNA sense strand
gaccuuagggauugucauc

SEQ ID NO: 1193471 - RNA, 19 nt, Homo sapiens
  misc_RNA (1)...(19): siRNA sense strand
gggauggagucaggcuaug

SEQ ID NO: 1193472 - RNA, 19 nt, Homo sapiens
  misc_RNA (1)...(19): siRNA sense strand
guccaacaaacucaccaua

SEQ ID NO: 1193473 - RNA, 19 nt, Homo sapiens
  misc_RNA (1)...(19): siRNA sense strand
gccaauggugcggauuaua

SEQ ID NO: 1193474 - RNA, 19 nt, Homo sapiens
  misc_RNA (1)...(19): siRNA sense strand
ggagcaggccaaccucagu

SEQ ID NO: 1193475 - RNA, 19 nt, Homo sapiens
  misc_RNA (1)...(19): siRNA sense strand
ccucagacugucccaggua

SEQ ID NO: 1193476 - RNA, 19 nt, Homo sapiens
  misc_RNA (1)...(19): siRNA sense strand
aaaguccucuaugucauca

SEQ ID NO: 1193477 - RNA, 19 nt, Homo sapiens
  misc_RNA (1)...(19): siRNA sense strand
gaaacccaccuccucuaac

SEQ ID NO: 1193478 - RNA, 19 nt, Homo sapiens
  misc_RNA (1)...(19): siRNA sense strand
uacaagccuuccacuucaa

SEQ ID NO: 1193479 - RNA, 19 nt, Homo sapiens
  misc_RNA (1)...(19): siRNA sense strand
uuuacaagccuuccacuuc

SEQ ID NO: 1193480 - RNA, 19 nt, Homo sapiens
  misc_RNA (1)...(19): siRNA sense strand
ucuggcaacucuccucauc

SEQ ID NO: 1193481 - RNA, 19 nt, Homo sapiens
  misc_RNA (1)...(19): siRNA sense strand
uccaaaguccucuauguca

SEQ ID NO: 1193482 - RNA, 19 nt, Homo sapiens
  misc_RNA (1)...(19): siRNA sense strand
auucaaaucccaucguguu

SEQ ID NO: 1193483 - RNA, 19 nt, Homo sapiens
  misc_RNA (1)...(19): siRNA sense strand
gagucagagguucaaguuu

SEQ ID NO: 1193484 - RNA, 19 nt, Homo sapiens
  misc_RNA (1)...(19): siRNA sense strand
uggacuucgucaucuugua

SEQ ID NO: 1193485 - RNA, 19 nt, Homo sapiens
  misc_RNA (1)...(19): siRNA sense strand
uugcuucuguggaaacaau

SEQ ID NO: 1193486 - RNA, 19 nt, Homo sapiens
  misc_RNA (1)...(19): siRNA sense strand
accaagccgucaaggaaga

SEQ ID NO: 1193487 - RNA, 19 nt, Homo sapiens
  misc_RNA (1)...(19): siRNA sense strand
gggucagagucaacaagau

SEQ ID NO: 1193488 - RNA, 19 nt, Homo sapiens
  misc_RNA (1)...(19): siRNA sense strand
caaaucccaucguguuccu

SEQ ID NO: 1193489 - RNA, 19 nt, Homo sapiens
  misc_RNA (1)...(19): siRNA sense strand
gaacagauauuuccuuaga

SEQ ID NO: 1193490 - RNA, 19 nt, Homo sapiens
  misc_RNA (1)...(19): siRNA sense strand
gaagugagcucaaaucaga

SEQ ID NO: 1193491 - RNA, 19 nt, Homo sapiens
  misc_RNA (1)...(19): siRNA sense strand
ggaaaucucuguugccuuu

SEQ ID NO: 1193492 - RNA, 19 nt, Homo sapiens
  misc_RNA (1)...(19): siRNA sense strand
guagauaugugcagucuua

SEQ ID NO: 1193493 - RNA, 19 nt, Homo sapiens
  misc_RNA (1)...(19): siRNA sense strand
gaaaguggguuuguagaua

SEQ ID NO: 1193494 - RNA, 19 nt, Homo sapiens
  misc_RNA (1)...(19): siRNA sense strand
gaagagauguucaggagaa

SEQ ID NO: 1193495 - RNA, 19 nt, Homo sapiens
  misc_RNA (1)...(19): siRNA sense strand
uaaagaaacugcagucuau

SEQ ID NO: 1193496 - RNA, 19 nt, Homo sapiens
  misc_RNA (1)...(19): siRNA sense strand
gggaugaacuggcuucuuu

SEQ ID NO: 1193497 - RNA, 19 nt, Homo sapiens
  misc_RNA (1)...(19): siRNA sense strand
gagaagcaguugucaaauu

SEQ ID NO: 1193498 - RNA, 19 nt, Homo sapiens
  misc_RNA (1)...(19): siRNA sense strand
gggaggagguaacacauua

SEQ ID NO: 1193499 - RNA, 19 nt, Homo sapiens
  misc_RNA (1)...(19): siRNA sense strand
gcaaagcugugaaggugua

SEQ ID NO: 1193500 - RNA, 19 nt, Homo sapiens
  misc_RNA (1)...(19): siRNA sense strand
gaaagaggcaacacagaua

SEQ ID NO: 1193501 - RNA, 19 nt, Homo sapiens
  misc_RNA (1)...(19): siRNA sense strand
cagaacagauauuuccuua

SEQ ID NO: 1193502 - RNA, 19 nt, Homo sapiens
  misc_RNA (1)...(19): siRNA sense strand
aaagaaaccugucaucaga

SEQ ID NO: 1193503 - RNA, 19 nt, Homo sapiens
  misc_RNA (1)...(19): siRNA sense strand
gaaccuugcucccaaacaa

SEQ ID NO: 1193504 - RNA, 19 nt, Homo sapiens
  misc_RNA (1)...(19): siRNA sense strand
gcugaaagaugauguggaa

SEQ ID NO: 1193505 - RNA, 19 nt, Homo sapiens
  misc_RNA (1)...(19): siRNA sense strand
gaaagcagaccaaacacua

SEQ ID NO: 1193506 - RNA, 19 nt, Homo sapiens
  misc_RNA (1)...(19): siRNA sense strand
gaacauaaagugcuucuca

SEQ ID NO: 1193507 - RNA, 19 nt, Homo sapiens
  misc_RNA (1)...(19): siRNA sense strand
ggaagaagaagaagacaaa

SEQ ID NO: 1193508 - RNA, 19 nt, Homo sapiens
  misc_RNA (1)...(19): siRNA sense strand
uggaggagcucuucaguuu

SEQ ID NO: 1193509 - RNA, 19 nt, Homo sapiens
  misc_RNA (1)...(19): siRNA sense strand
gauauuggguucaggaaga

SEQ ID NO: 1193510 - RNA, 19 nt, Homo sapiens
  misc_RNA (1)...(19): siRNA sense strand
ggaaacagaacagauauuu

SEQ ID NO: 1193511 - RNA, 19 nt, Homo sapiens
  misc_RNA (1)...(19): siRNA sense strand
ggacaaggcuguucuucag

SEQ ID NO: 1193512 - RNA, 19 nt, Homo sapiens
  misc_RNA (1)...(19): siRNA sense strand
agaagcaguugucaaauuu

SEQ ID NO: 1193513 - RNA, 19 nt, Homo sapiens
  misc_RNA (1)...(19): siRNA sense strand
ucacggagcccacuacuaa

SEQ ID NO: 1193514 - RNA, 19 nt, Homo sapiens
  misc_RNA (1)...(19): siRNA sense strand
guacuggagugaagaagaa

SEQ ID NO: 1193515 - RNA, 19 nt, Homo sapiens
  misc_RNA (1)...(19): siRNA sense strand
gaaagcuuguguugauuga

SEQ ID NO: 1193516 - RNA, 19 nt, Homo sapiens
  misc_RNA (1)...(19): siRNA sense strand
caaguucucccugaaauua

SEQ ID NO: 1193517 - RNA, 19 nt, Homo sapiens
  misc_RNA (1)...(19): siRNA sense strand
gaucacaccuaccaaagau

SEQ ID NO: 1193518 - RNA, 19 nt, Homo sapiens
  misc_RNA (1)...(19): siRNA sense strand
gaggagcucuucaguuugu

SEQ ID NO: 1193519 - RNA, 19 nt, Homo sapiens
  misc_RNA (1)...(19): siRNA sense strand
guaccgcauugaacuguua

SEQ ID NO: 1193520 - RNA, 19 nt, Homo sapiens
  misc_RNA (1)...(19): siRNA sense strand
caggaaagcuuguguugau

SEQ ID NO: 1193521 - RNA, 19 nt, Homo sapiens
  misc_RNA (1)...(19): siRNA sense strand
cagaagaucaagcgauuua

SEQ ID NO: 1193522 - RNA, 19 nt, Homo sapiens
  misc_RNA (1)...(19): siRNA sense strand
cuucuuagcuccaguauuc

SEQ ID NO: 1193523 - RNA, 19 nt, Homo sapiens
  misc_RNA (1)...(19): siRNA sense strand
gaacaagcagacuucuaua

SEQ ID NO: 1193524 - RNA, 19 nt, Homo sapiens
  misc_RNA (1)...(19): siRNA sense strand
gaaauggaccucaucaaca

SEQ ID NO: 1193525 - RNA, 19 nt, Homo sapiens
  misc_RNA (1)...(19): siRNA sense strand
ucaaagugguggaugauga

SEQ ID NO: 1193526 - RNA, 19 nt, Homo sapiens
  misc_RNA (1)...(19): siRNA sense strand
gaaccaaggcuuccaagau

SEQ ID NO: 1193527 - RNA, 19 nt, Homo sapiens
  misc_RNA (1)...(19): siRNA sense strand
gaucaagaguuucauuugg

SEQ ID NO: 1193528 - RNA, 19 nt, Homo sapiens
  misc_RNA (1)...(19): siRNA sense strand
aaacugcagucuauccuaa

SEQ ID NO: 1193529 - RNA, 19 nt, Homo sapiens
  misc_RNA (1)...(19): siRNA sense strand
gaaagcauuugaaggaucu

SEQ ID NO: 1193530 - RNA, 19 nt, Homo sapiens
  misc_RNA (1)...(19): siRNA sense strand
gcggaaacauguugaagga

SEQ ID NO: 1193531 - RNA, 19 nt, Homo sapiens
  misc_RNA (1)...(19): siRNA sense strand
ggagcugugugauaauuga

SEQ ID NO: 1193532 - RNA, 19 nt, Homo sapiens
  misc_RNA (1)...(19): siRNA sense strand
ccucgagaaugaugaauuu

SEQ ID NO: 1193533 - RNA, 19 nt, Homo sapiens
  misc_RNA (1)...(19): siRNA sense strand
gucaucagaucagcaauua

SEQ ID NO: 1193534 - RNA, 19 nt, Homo sapiens
  misc_RNA (1)...(19): siRNA sense strand
aaacagcacugcaacaaag

SEQ ID NO: 1193535 - RNA, 19 nt, Homo sapiens
  misc_RNA (1)...(19): siRNA sense strand
acgagaagaucaagaguuu

SEQ ID NO: 1193536 - RNA, 19 nt, Homo sapiens
  misc_RNA (1)...(19): siRNA sense strand
guaaagaaacugcagucua

SEQ ID NO: 1193537 - RNA, 19 nt, Homo sapiens
  misc_RNA (1)...(19): siRNA sense strand
guucaugaauggacugauu

SEQ ID NO: 1193538 - RNA, 19 nt, Homo sapiens
  misc_RNA (1)...(19): siRNA sense strand
cgagaaugaugaauuugaa

SEQ ID NO: 1193539 - RNA, 19 nt, Homo sapiens
  misc_RNA (1)...(19): siRNA sense strand
caaaagagguggacuagga

SEQ ID NO: 1193540 - RNA, 19 nt, Homo sapiens
  misc_RNA (1)...(19): siRNA sense strand
gaugaaggcuccaaguucu

SEQ ID NO: 1193541 - RNA, 19 nt, Homo sapiens
  misc_RNA (1)...(19): siRNA sense strand
gaagguguaucgccucauc

SEQ ID NO: 1193542 - RNA, 19 nt, Homo sapiens
  misc_RNA (1)...(19): siRNA sense strand
ccaacaacgacaccaauua

SEQ ID NO: 1193543 - RNA, 19 nt, Homo sapiens
  misc_RNA (1)...(19): siRNA sense strand
gaguagccaugaugugaaa

SEQ ID NO: 1193544 - RNA, 19 nt, Homo sapiens
  misc_RNA (1)...(19): siRNA sense strand
ccucacagcucgucucaga

SEQ ID NO: 1193545 - RNA, 19 nt, Homo sapiens
  misc_RNA (1)...(19): siRNA sense strand
gagguggucuugcaugaug

SEQ ID NO: 1193546 - RNA, 19 nt, Homo sapiens
  misc_RNA (1)...(19): siRNA sense strand
uagcugaacuagacacuga

SEQ ID NO: 1193547 - RNA, 19 nt, Homo sapiens
  misc_RNA (1)...(19): siRNA sense strand
aauaggaacugcaaacuuc

SEQ ID NO: 1193548 - RNA, 19 nt, Homo sapiens
  misc_RNA (1)...(19): siRNA sense strand
cuucagaacaugagaaaua

SEQ ID NO: 1193549 - RNA, 19 nt, Homo sapiens
  misc_RNA (1)...(19): siRNA sense strand
ccacaaggagagcuucuua

SEQ ID NO: 1193550 - RNA, 19 nt, Homo sapiens
  misc_RNA (1)...(19): siRNA sense strand
auaauuaaccgccuagaua

SEQ ID NO: 1193551 - RNA, 19 nt, Homo sapiens
  misc_RNA (1)...(19): siRNA sense strand
gaaccgcacugacuguuac

SEQ ID NO: 1193552 - RNA, 19 nt, Homo sapiens
  misc_RNA (1)...(19): siRNA sense strand
aaauggaccucaucaacaa

SEQ ID NO: 1193553 - RNA, 19 nt, Homo sapiens
  misc_RNA (1)...(19): siRNA sense strand
caacacagauaaagaagac

SEQ ID NO: 1193554 - RNA, 19 nt, Homo sapiens
  misc_RNA (1)...(19): siRNA sense strand
gaugauggcuauaagaaac

SEQ ID NO: 1193555 - RNA, 19 nt, Homo sapiens
  misc_RNA (1)...(19): siRNA sense strand
gcuaaaggaugcagauugg

SEQ ID NO: 1193556 - RNA, 19 nt, Homo sapiens
  misc_RNA (1)...(19): siRNA sense strand
ggacauggacagagaugaa

SEQ ID NO: 1193557 - RNA, 19 nt, Homo sapiens
  misc_RNA (1)...(19): siRNA sense strand
gggagaagcagcugagaaa

SEQ ID NO: 1193558 - RNA, 19 nt, Homo sapiens
  misc_RNA (1)...(19): siRNA sense strand
gagaagaaccugcucaucu

SEQ ID NO: 1193559 - RNA, 19 nt, Homo sapiens
  misc_RNA (1)...(19): siRNA sense strand
aagcuuguguugauugaua

SEQ ID NO: 1193560 - RNA, 19 nt, Homo sapiens
  misc_RNA (1)...(19): siRNA sense strand
gcacugaucaagaagagaa

SEQ ID NO: 1193561 - RNA, 19 nt, Homo sapiens
  misc_RNA (1)...(19): siRNA sense strand
gaaaacaaguucaaucaca

SEQ ID NO: 1193562 - RNA, 19 nt, Homo sapiens
  misc_RNA (1)...(19): siRNA sense strand
aaagaaccuuggaaagaaa

SEQ ID NO: 1193563 - RNA, 19 nt, Homo sapiens
  misc_RNA (1)...(19): siRNA sense strand
ggaaaggccagagguauug

SEQ ID NO: 1193564 - RNA, 19 nt, Homo sapiens
  misc_RNA (1)...(19): siRNA sense strand
ugagaaagcauuugaagga

SEQ ID NO: 1193565 - RNA, 19 nt, Homo sapiens
  misc_RNA (1)...(19): siRNA sense strand
caucacaguuuccuucaga

SEQ ID NO: 1193566 - RNA, 19 nt, Homo sapiens
  misc_RNA (1)...(19): siRNA sense strand
gcccacagacugaagaaua

SEQ ID NO: 1193567 - RNA, 19 nt, Homo sapiens
  misc_RNA (1)...(19): siRNA sense strand
cacagaagaucaagcgauu

SEQ ID NO: 1193568 - RNA, 19 nt, Homo sapiens
  misc_RNA (1)...(19): siRNA sense strand
cacauuaccuggugaagug

SEQ ID NO: 1193569 - RNA, 19 nt, Homo sapiens
  misc_RNA (1)...(19): siRNA sense strand
gaaccugcaauaacuacua

SEQ ID NO: 1193570 - RNA, 19 nt, Homo sapiens
  misc_RNA (1)...(19): siRNA sense strand
gcucaaaucagaagacaug

SEQ ID NO: 1193571 - RNA, 19 nt, Homo sapiens
  misc_RNA (1)...(19): siRNA sense strand
gaugggaccucagacauuc

SEQ ID NO: 1193572 - RNA, 19 nt, Homo sapiens
  misc_RNA (1)...(19): siRNA sense strand
gaacugaucacaccuacca

SEQ ID NO: 1193573 - RNA, 19 nt, Homo sapiens
  misc_RNA (1)...(19): siRNA sense strand
gaagaucaagaguuucauu

SEQ ID NO: 1193574 - RNA, 19 nt, Homo sapiens
  misc_RNA (1)...(19): siRNA sense strand
uaaaauagcugaacuagac

SEQ ID NO: 1193575 - RNA, 19 nt, Homo sapiens
  misc_RNA (1)...(19): siRNA sense strand
ucaggaaacagaacagaua

SEQ ID NO: 1193576 - RNA, 19 nt, Homo sapiens
  misc_RNA (1)...(19): siRNA sense strand
gaagcaguugucaaauuua

SEQ ID NO: 1193577 - RNA, 19 nt, Homo sapiens
  misc_RNA (1)...(19): siRNA sense strand
gcccagaguugaagaagau

SEQ ID NO: 1193578 - RNA, 19 nt, Homo sapiens
  misc_RNA (1)...(19): siRNA sense strand
gauugcagguggccacaaa

SEQ ID NO: 1193579 - RNA, 19 nt, Homo sapiens
  misc_RNA (1)...(19): siRNA sense strand
uaauuaaccgccuagauaa

SEQ ID NO: 1193580 - RNA, 19 nt, Homo sapiens
  misc_RNA (1)...(19): siRNA sense strand
gacaagaagucggaugaga

SEQ ID NO: 1193581 - RNA, 19 nt, Homo sapiens
  misc_RNA (1)...(19): siRNA sense strand
ggaagaagacgaagaacca

SEQ ID NO: 1193582 - RNA, 19 nt, Homo sapiens
  misc_RNA (1)...(19): siRNA sense strand
gagaagaucaagaguuuca

SEQ ID NO: 1193583 - RNA, 19 nt, Homo sapiens
  misc_RNA (1)...(19): siRNA sense strand
cagaggagcagguaaagaa

SEQ ID NO: 1193584 - RNA, 19 nt, Homo sapiens
  misc_RNA (1)...(19): siRNA sense strand
ugaaggaagugagcucaaa

SEQ ID NO: 1193585 - RNA, 19 nt, Homo sapiens
  misc_RNA (1)...(19): siRNA sense strand
ccagagguauugcaucuca

SEQ ID NO: 1193586 - RNA, 19 nt, Homo sapiens
  misc_RNA (1)...(19): siRNA sense strand
aaaguggguuuguagauau

SEQ ID NO: 1193587 - RNA, 19 nt, Homo sapiens
  misc_RNA (1)...(19): siRNA sense strand
agacaaugcugaggacaaa

SEQ ID NO: 1193588 - RNA, 19 nt, Homo sapiens
  misc_RNA (1)...(19): siRNA sense strand
gagcagacccagcacuuug

SEQ ID NO: 1193589 - RNA, 19 nt, Homo sapiens
  misc_RNA (1)...(19): siRNA sense strand
gaacugucuugcaucauua

SEQ ID NO: 1193590 - RNA, 19 nt, Homo sapiens
  misc_RNA (1)...(19): siRNA sense strand
ggaacugucuugcaucauu

SEQ ID NO: 1193591 - RNA, 19 nt, Homo sapiens
  misc_RNA (1)...(19): siRNA sense strand
gcaaggaaauugaugagau

SEQ ID NO: 1193592 - RNA, 19 nt, Homo sapiens
  misc_RNA (1)...(19): siRNA sense strand
gaacauuggcggaauuauu

SEQ ID NO: 1193593 - RNA, 19 nt, Homo sapiens
  misc_RNA (1)...(19): siRNA sense strand
gaaaugaccgcaaggaaau

SEQ ID NO: 1193594 - RNA, 19 nt, Homo sapiens
  misc_RNA (1)...(19): siRNA sense strand
caaggaaauugaugagauu

SEQ ID NO: 1193595 - RNA, 19 nt, Homo sapiens
  misc_RNA (1)...(19): siRNA sense strand
ggaagaaaauucaagauga

SEQ ID NO: 1193596 - RNA, 19 nt, Homo sapiens
  misc_RNA (1)...(19): siRNA sense strand
caauucuucuuuccacuua

SEQ ID NO: 1193597 - RNA, 19 nt, Homo sapiens
  misc_RNA (1)...(19): siRNA sense strand
gccgaaggcuguaccagua

SEQ ID NO: 1193598 - RNA, 19 nt, Homo sapiens
  misc_RNA (1)...(19): siRNA sense strand
cugaagaucuggaauguga

SEQ ID NO: 1193599 - RNA, 19 nt, Homo sapiens
  misc_RNA (1)...(19): siRNA sense strand
gaaaccagauggaguuaac

SEQ ID NO: 1193600 - RNA, 19 nt, Homo sapiens
  misc_RNA (1)...(19): siRNA sense strand
ggaaauugaugagauugug

SEQ ID NO: 1193601 - RNA, 19 nt, Homo sapiens
  misc_RNA (1)...(19): siRNA sense strand
guacaggaauuugaaagug

SEQ ID NO: 1193602 - RNA, 19 nt, Homo sapiens
  misc_RNA (1)...(19): siRNA sense strand
gcuacuucaucaacaauaa

SEQ ID NO: 1193603 - RNA, 19 nt, Homo sapiens
  misc_RNA (1)...(19): siRNA sense strand
uaaacaggauggagaaagu

SEQ ID NO: 1193604 - RNA, 19 nt, Homo sapiens
  misc_RNA (1)...(19): siRNA sense strand
ggagagacucagcccuuua

SEQ ID NO: 1193605 - RNA, 19 nt, Homo sapiens
  misc_RNA (1)...(19): siRNA sense strand
cgaaaugaccgcaaggaaa

SEQ ID NO: 1193606 - RNA, 19 nt, Homo sapiens
  misc_RNA (1)...(19): siRNA sense strand
cgaguuaacugugcaagug

SEQ ID NO: 1193607 - RNA, 19 nt, Homo sapiens
  misc_RNA (1)...(19): siRNA sense strand
ggaagucuaugaccugaac

SEQ ID NO: 1193608 - RNA, 19 nt, Homo sapiens
  misc_RNA (1)...(19): siRNA sense strand
agacacaagucaucguuug

SEQ ID NO: 1193609 - RNA, 19 nt, Homo sapiens
  misc_RNA (1)...(19): siRNA sense strand
agacguggcuacuucauca

SEQ ID NO: 1193610 - RNA, 19 nt, Homo sapiens
  misc_RNA (1)...(19): siRNA sense strand
ccacuuaaacucugaaaca

SEQ ID NO: 1193611 - RNA, 19 nt, Homo sapiens
  misc_RNA (1)...(19): siRNA sense strand
gaagacaucccugaagauc

SEQ ID NO: 1193612 - RNA, 19 nt, Homo sapiens
  misc_RNA (1)...(19): siRNA sense strand
auacagacguggcuacuuc

SEQ ID NO: 1193613 - RNA, 19 nt, Homo sapiens
  misc_RNA (1)...(19): siRNA sense strand
ucacugcuguucacaagga

SEQ ID NO: 1193614 - RNA, 19 nt, Homo sapiens
  misc_RNA (1)...(19): siRNA sense strand
gaaauugaugagauuguga

SEQ ID NO: 1193615 - RNA, 19 nt, Homo sapiens
  misc_RNA (1)...(19): siRNA sense strand
ggacgacucugggcaguac

SEQ ID NO: 1193616 - RNA, 19 nt, Homo sapiens
  misc_RNA (1)...(19): siRNA sense strand
agacaucccugaagaucug

SEQ ID NO: 1193617 - RNA, 19 nt, Homo sapiens
  misc_RNA (1)...(19): siRNA sense strand
gagagacucagcccuuuau

SEQ ID NO: 1193618 - RNA, 19 nt, Homo sapiens
  misc_RNA (1)...(19): siRNA sense strand
ucuaugaccugaacauugg

SEQ ID NO: 1193619 - RNA, 19 nt, Homo sapiens
  misc_RNA (1)...(19): siRNA sense strand
caauaaacaggauggagaa

SEQ ID NO: 1193620 - RNA, 19 nt, Homo sapiens
  misc_RNA (1)...(19): siRNA sense strand
caucaacaauaaacaggau

SEQ ID NO: 1193621 - RNA, 19 nt, Homo sapiens
  misc_RNA (1)...(19): siRNA sense strand
aagaugaacaaaccacaua

SEQ ID NO: 1193622 - RNA, 19 nt, Homo sapiens
  misc_RNA (1)...(19): siRNA sense strand
gcaauucuucuuuccacuu

SEQ ID NO: 1193623 - RNA, 19 nt, Homo sapiens
  misc_RNA (1)...(19): siRNA sense strand
guggaacugucuugcauca

SEQ ID NO: 1193624 - RNA, 19 nt, Homo sapiens
  misc_RNA (1)...(19): siRNA sense strand
cagauggaguuaacuacau

SEQ ID NO: 1193625 - RNA, 19 nt, Homo sapiens
  misc_RNA (1)...(19): siRNA sense strand
ggcgggucgugcagaaaua

SEQ ID NO: 1193626 - RNA, 19 nt, Homo sapiens
  misc_RNA (1)...(19): siRNA sense strand
gagggcgacuucagacaca

SEQ ID NO: 1193627 - RNA, 19 nt, Homo sapiens
  misc_RNA (1)...(19): siRNA sense strand
ggaagacaucccugaagau

SEQ ID NO: 1193628 - RNA, 19 nt, Homo sapiens
  misc_RNA (1)...(19): siRNA sense strand
gaugaacaaaccacauaug

SEQ ID NO: 1193629 - RNA, 19 nt, Homo sapiens
  misc_RNA (1)...(19): siRNA sense strand
guucacugcuguucacaag

SEQ ID NO: 1193630 - RNA, 19 nt, Homo sapiens
  misc_RNA (1)...(19): siRNA sense strand
ggaauuugaaaguguggaa

SEQ ID NO: 1193631 - RNA, 19 nt, Homo sapiens
  misc_RNA (1)...(19): siRNA sense strand
ggaaaccagauggaguuaa

SEQ ID NO: 1193632 - RNA, 19 nt, Homo sapiens
  misc_RNA (1)...(19): siRNA sense strand
ugaggucguugcucgaaau

SEQ ID NO: 1193633 - RNA, 19 nt, Homo sapiens
  misc_RNA (1)...(19): siRNA sense strand
gaagaucuggaaugugaca

SEQ ID NO: 1193634 - RNA, 19 nt, Homo sapiens
  misc_RNA (1)...(19): siRNA sense strand
uacaggaauuugaaagugu

SEQ ID NO: 1193635 - RNA, 19 nt, Homo sapiens
  misc_RNA (1)...(19): siRNA sense strand
caagucaucguuugugauc

SEQ ID NO: 1193636 - RNA, 19 nt, Homo sapiens
  misc_RNA (1)...(19): siRNA sense strand
gcugguaucgcaaugaugu

SEQ ID NO: 1193637 - RNA, 19 nt, Homo sapiens
  misc_RNA (1)...(19): siRNA sense strand
cggagagacucagcccuuu

SEQ ID NO: 1193638 - RNA, 19 nt, Homo sapiens
  misc_RNA (1)...(19): siRNA sense strand
cggauucgcagacaaguga

SEQ ID NO: 1193639 - RNA, 19 nt, Homo sapiens
  misc_RNA (1)...(19): siRNA sense strand
uuaacuacauccgcacuga

SEQ ID NO: 1193640 - RNA, 19 nt, Homo sapiens
  misc_RNA (1)...(19): siRNA sense strand
aacauuggcggaauuauug

SEQ ID NO: 1193641 - RNA, 19 nt, Homo sapiens
  misc_RNA (1)...(19): siRNA sense strand
ccugaacauuggcggaauu

SEQ ID NO: 1193642 - RNA, 19 nt, Homo sapiens
  misc_RNA (1)...(19): siRNA sense strand
cagcugguaucgcaaugau

SEQ ID NO: 1193643 - RNA, 19 nt, Homo sapiens
  misc_RNA (1)...(19): siRNA sense strand
ggucguugcucgaaaugac

SEQ ID NO: 1193644 - RNA, 19 nt, Homo sapiens
  misc_RNA (1)...(19): siRNA sense strand
gggaaaccagauggaguua

SEQ ID NO: 1193645 - RNA, 19 nt, Homo sapiens
  misc_RNA (1)...(19): siRNA sense strand
uugaugagauugugaucga

SEQ ID NO: 1193646 - RNA, 19 nt, Homo sapiens
  misc_RNA (1)...(19): siRNA sense strand
gauggagaaaguuacaaga

SEQ ID NO: 1193647 - RNA, 19 nt, Homo sapiens
  misc_RNA (1)...(19): siRNA sense strand
aaucucaaauccagcaauc

SEQ ID NO: 1193648 - RNA, 19 nt, Homo sapiens
  misc_RNA (1)...(19): siRNA sense strand
gugaggagcaggagaugga

SEQ ID NO: 1193649 - RNA, 19 nt, Homo sapiens
  misc_RNA (1)...(19): siRNA sense strand
gagauugugaucgaguuaa

SEQ ID NO: 1193650 - RNA, 19 nt, Homo sapiens
  misc_RNA (1)...(19): siRNA sense strand
gaaaguguggaacugucuu

SEQ ID NO: 1193651 - RNA, 19 nt, Homo sapiens
  misc_RNA (1)...(19): siRNA sense strand
uuacaagaacccagggaaa

SEQ ID NO: 1193652 - RNA, 19 nt, Homo sapiens
  misc_RNA (1)...(19): siRNA sense strand
agcaggagauggaagucua

SEQ ID NO: 1193653 - RNA, 19 nt, Homo sapiens
  misc_RNA (1)...(19): siRNA sense strand
ccagauuucgcaauucuuc

SEQ ID NO: 1193654 - RNA, 19 nt, Homo sapiens
  misc_RNA (1)...(19): siRNA sense strand
ugagauugugaucgaguua

SEQ ID NO: 1193655 - RNA, 19 nt, Homo sapiens
  misc_RNA (1)...(19): siRNA sense strand
cgaggagggcgacuucaga

SEQ ID NO: 1193656 - RNA, 19 nt, Homo sapiens
  misc_RNA (1)...(19): siRNA sense strand
uggagaaaguuacaagaac

SEQ ID NO: 1193657 - RNA, 19 nt, Homo sapiens
  misc_RNA (1)...(19): siRNA sense strand
gauaggggcuguaaaucuc

SEQ ID NO: 1193658 - RNA, 19 nt, Homo sapiens
  misc_RNA (1)...(19): siRNA sense strand
gcaggagauggaagucuau

SEQ ID NO: 1193659 - RNA, 19 nt, Homo sapiens
  misc_RNA (1)...(19): siRNA sense strand
gugaggucguugcucgaaa

SEQ ID NO: 1193660 - RNA, 19 nt, Homo sapiens
  misc_RNA (1)...(19): siRNA sense strand
gaacccagggaaaccagau

SEQ ID NO: 1193661 - RNA, 19 nt, Homo sapiens
  misc_RNA (1)...(19): siRNA sense strand
guguggaacugucuugcau

SEQ ID NO: 1193662 - RNA, 19 nt, Homo sapiens
  misc_RNA (1)...(19): siRNA sense strand
guggcuacuucaucaacaa

SEQ ID NO: 1193663 - RNA, 19 nt, Homo sapiens
  misc_RNA (1)...(19): siRNA sense strand
ggagauggaagucuaugac

SEQ ID NO: 1193664 - RNA, 19 nt, Homo sapiens
  misc_RNA (1)...(19): siRNA sense strand
gaguuaacugugcaaguga

SEQ ID NO: 1193665 - RNA, 19 nt, Homo sapiens
  misc_RNA (1)...(19): siRNA sense strand
gauuucgcaauucuucuuu

SEQ ID NO: 1193666 - RNA, 19 nt, Homo sapiens
  misc_RNA (1)...(19): siRNA sense strand
ggauggagaaaguuacaag

SEQ ID NO: 1193667 - RNA, 19 nt, Homo sapiens
  misc_RNA (1)...(19): siRNA sense strand
gggcaucugcugugcauac

SEQ ID NO: 1193668 - RNA, 19 nt, Homo sapiens
  misc_RNA (1)...(19): siRNA sense strand
gguacaggaauuugaaagu

SEQ ID NO: 1193669 - RNA, 19 nt, Homo sapiens
  misc_RNA (1)...(19): siRNA sense strand
ccagauggaguuaacuaca

SEQ ID NO: 1193670 - RNA, 19 nt, Homo sapiens
  misc_RNA (1)...(19): siRNA sense strand
aacaggauggagaaaguua

SEQ ID NO: 1193671 - RNA, 19 nt, Homo sapiens
  misc_RNA (1)...(19): siRNA sense strand
guaccacugcccacggauu

SEQ ID NO: 1193672 - RNA, 19 nt, Homo sapiens
  misc_RNA (1)...(19): siRNA sense strand
caagaugaacaaaccacau

SEQ ID NO: 1193673 - RNA, 19 nt, Homo sapiens
  misc_RNA (1)...(19): siRNA sense strand
ucagacacaagucaucguu

SEQ ID NO: 1193674 - RNA, 19 nt, Homo sapiens
  misc_RNA (1)...(19): siRNA sense strand
gucuaugaccugaacauug

SEQ ID NO: 1193675 - RNA, 19 nt, Homo sapiens
  misc_RNA (1)...(19): siRNA sense strand
ggaaugugacacggagaga

SEQ ID NO: 1193676 - RNA, 19 nt, Homo sapiens
  misc_RNA (1)...(19): siRNA sense strand
gguguucacugcuguucac

SEQ ID NO: 1193677 - RNA, 19 nt, Homo sapiens
  misc_RNA (1)...(19): siRNA sense strand
agucaucguuugugaucug

SEQ ID NO: 1193678 - RNA, 19 nt, Homo sapiens
  misc_RNA (1)...(19): siRNA sense strand
ugacgaggagggcgacuuc

SEQ ID NO: 1193679 - RNA, 19 nt, Homo sapiens
  misc_RNA (1)...(19): siRNA sense strand
uaggcaagauggcaacacu

SEQ ID NO: 1193680 - RNA, 19 nt, Homo sapiens
  misc_RNA (1)...(19): siRNA sense strand
aaacaggauggagaaaguu

SEQ ID NO: 1193681 - RNA, 19 nt, Homo sapiens
  misc_RNA (1)...(19): siRNA sense strand
ucucaaauccagcaaucga

SEQ ID NO: 1193682 - RNA, 19 nt, Homo sapiens
  misc_RNA (1)...(19): siRNA sense strand
caggaucgaguggaagaaa

SEQ ID NO: 1193683 - RNA, 19 nt, Homo sapiens
  misc_RNA (1)...(19): siRNA sense strand
guaucgcaaugauguacca

SEQ ID NO: 1193684 - RNA, 19 nt, Homo sapiens
  misc_RNA (1)...(19): siRNA sense strand
aaccagauggaguuaacua

SEQ ID NO: 1193685 - RNA, 19 nt, Homo sapiens
  misc_RNA (1)...(19): siRNA sense strand
ggugugaggagcaggagau

SEQ ID NO: 1193686 - RNA, 19 nt, Homo sapiens
  misc_RNA (1)...(19): siRNA sense strand
ucccagauuucgcaauucu

SEQ ID NO: 1193687 - RNA, 19 nt, Homo sapiens
  misc_RNA (1)...(19): siRNA sense strand
gaacagagaugaagaugaa

SEQ ID NO: 1193688 - RNA, 19 nt, Homo sapiens
  misc_RNA (1)...(19): siRNA sense strand
gaagacauauggcaaguuu

SEQ ID NO: 1193689 - RNA, 19 nt, Homo sapiens
  misc_RNA (1)...(19): siRNA sense strand
caaagaauauugcagugua

SEQ ID NO: 1193690 - RNA, 19 nt, Homo sapiens
  misc_RNA (1)...(19): siRNA sense strand
cgaaacagcuggauucaga

SEQ ID NO: 1193691 - RNA, 19 nt, Homo sapiens
  misc_RNA (1)...(19): siRNA sense strand
caacauaaccagucuguaa

SEQ ID NO: 1193692 - RNA, 19 nt, Homo sapiens
  misc_RNA (1)...(19): siRNA sense strand
caacagugaucucuuuaaa

SEQ ID NO: 1193693 - RNA, 19 nt, Homo sapiens
  misc_RNA (1)...(19): siRNA sense strand
ucaacagacucacuaaaua

SEQ ID NO: 1193694 - RNA, 19 nt, Homo sapiens
  misc_RNA (1)...(19): siRNA sense strand
caccagagcccgagaauua

SEQ ID NO: 1193695 - RNA, 19 nt, Homo sapiens
  misc_RNA (1)...(19): siRNA sense strand
gaaagagguucaagcaguu

SEQ ID NO: 1193696 - RNA, 19 nt, Homo sapiens
  misc_RNA (1)...(19): siRNA sense strand
gauaauagacagcaaguuu

SEQ ID NO: 1193697 - RNA, 19 nt, Homo sapiens
  misc_RNA (1)...(19): siRNA sense strand
gcagaacguuuaaagaaga

SEQ ID NO: 1193698 - RNA, 19 nt, Homo sapiens
  misc_RNA (1)...(19): siRNA sense strand
gaagaguggucagauguuu

SEQ ID NO: 1193699 - RNA, 19 nt, Homo sapiens
  misc_RNA (1)...(19): siRNA sense strand
caacaaagaugccuauacu

SEQ ID NO: 1193700 - RNA, 19 nt, Homo sapiens
  misc_RNA (1)...(19): siRNA sense strand
gaccagaagucaacaguga

SEQ ID NO: 1193701 - RNA, 19 nt, Homo sapiens
  misc_RNA (1)...(19): siRNA sense strand
cacaguaccuuccacaaua

SEQ ID NO: 1193702 - RNA, 19 nt, Homo sapiens
  misc_RNA (1)...(19): siRNA sense strand
gauagcaagucaaucauga

SEQ ID NO: 1193703 - RNA, 19 nt, Homo sapiens
  misc_RNA (1)...(19): siRNA sense strand
ggcaagaaguaauauauga

SEQ ID NO: 1193704 - RNA, 19 nt, Homo sapiens
  misc_RNA (1)...(19): siRNA sense strand
gcauauugcuuguaacuca

SEQ ID NO: 1193705 - RNA, 19 nt, Homo sapiens
  misc_RNA (1)...(19): siRNA sense strand
gaagagaacuauaauuucc

SEQ ID NO: 1193706 - RNA, 19 nt, Homo sapiens
  misc_RNA (1)...(19): siRNA sense strand
caacagacucacuaaauaa

SEQ ID NO: 1193707 - RNA, 19 nt, Homo sapiens
  misc_RNA (1)...(19): siRNA sense strand
aaagaaagauguggucaaa

SEQ ID NO: 1193708 - RNA, 19 nt, Homo sapiens
  misc_RNA (1)...(19): siRNA sense strand
gaacgaaacagcuggauuc

SEQ ID NO: 1193709 - RNA, 19 nt, Homo sapiens
  misc_RNA (1)...(19): siRNA sense strand
guacaucuuugcaucauug

SEQ ID NO: 1193710 - RNA, 19 nt, Homo sapiens
  misc_RNA (1)...(19): siRNA sense strand
gaagagaaggagaugauuu

SEQ ID NO: 1193711 - RNA, 19 nt, Homo sapiens
  misc_RNA (1)...(19): siRNA sense strand
ucagcuacaucaagaauaa

SEQ ID NO: 1193712 - RNA, 19 nt, Homo sapiens
  misc_RNA (1)...(19): siRNA sense strand
gaugacagauccagagaug

SEQ ID NO: 1193713 - RNA, 19 nt, Homo sapiens
  misc_RNA (1)...(19): siRNA sense strand
gggaugugcuuguaaauca

SEQ ID NO: 1193714 - RNA, 19 nt, Homo sapiens
  misc_RNA (1)...(19): siRNA sense strand
cacaaaggcugccgagaaa

SEQ ID NO: 1193715 - RNA, 19 nt, Homo sapiens
  misc_RNA (1)...(19): siRNA sense strand
gagcugaucaguauccaua

SEQ ID NO: 1193716 - RNA, 19 nt, Homo sapiens
  misc_RNA (1)...(19): siRNA sense strand
gaaagauucuaaagacaag

SEQ ID NO: 1193717 - RNA, 19 nt, Homo sapiens
  misc_RNA (1)...(19): siRNA sense strand
ugagagaaguggcacauga

SEQ ID NO: 1193718 - RNA, 19 nt, Homo sapiens
  misc_RNA (1)...(19): siRNA sense strand
uggaugagcugaucaguau

SEQ ID NO: 1193719 - RNA, 19 nt, Homo sapiens
  misc_RNA (1)...(19): siRNA sense strand
ucacggcccuuccacagua

SEQ ID NO: 1193720 - RNA, 19 nt, Homo sapiens
  misc_RNA (1)...(19): siRNA sense strand
gaugauggccaagaucuua

SEQ ID NO: 1193721 - RNA, 19 nt, Homo sapiens
  misc_RNA (1)...(19): siRNA sense strand
gcagagaccuuuggaggau

SEQ ID NO: 1193722 - RNA, 19 nt, Homo sapiens
  misc_RNA (1)...(19): siRNA sense strand
agacagaguuucaucaugu

SEQ ID NO: 1193723 - RNA, 19 nt, Homo sapiens
  misc_RNA (1)...(19): siRNA sense strand
gcaagucaaucaugaggau

SEQ ID NO: 1193724 - RNA, 19 nt, Homo sapiens
  misc_RNA (1)...(19): siRNA sense strand
gaugagcaguucaguuguu

SEQ ID NO: 1193725 - RNA, 19 nt, Homo sapiens
  misc_RNA (1)...(19): siRNA sense strand
gagugcauauugcuuguaa

SEQ ID NO: 1193726 - RNA, 19 nt, Homo sapiens
  misc_RNA (1)...(19): siRNA sense strand
acagcaaaguggcaaguua

SEQ ID NO: 1193727 - RNA, 19 nt, Homo sapiens
  misc_RNA (1)...(19): siRNA sense strand
acacauagcccuagaguuc

SEQ ID NO: 1193728 - RNA, 19 nt, Homo sapiens
  misc_RNA (1)...(19): siRNA sense strand
gaccagaaguacaucuuug

SEQ ID NO: 1193729 - RNA, 19 nt, Homo sapiens
  misc_RNA (1)...(19): siRNA sense strand
ggucaaacggcaagaagua

SEQ ID NO: 1193730 - RNA, 19 nt, Homo sapiens
  misc_RNA (1)...(19): siRNA sense strand
gaugaagaguggucagaug

SEQ ID NO: 1193731 - RNA, 19 nt, Homo sapiens
  misc_RNA (1)...(19): siRNA sense strand
ccacaaaggcugccgagaa

SEQ ID NO: 1193732 - RNA, 19 nt, Homo sapiens
  misc_RNA (1)...(19): siRNA sense strand
aggaggaccuuuaaugaaa

SEQ ID NO: 1193733 - RNA, 19 nt, Homo sapiens
  misc_RNA (1)...(19): siRNA sense strand
aagaacaacuucaccagaa

SEQ ID NO: 1193734 - RNA, 19 nt, Homo sapiens
  misc_RNA (1)...(19): siRNA sense strand
agaugaagaugaaggaauu

SEQ ID NO: 1193735 - RNA, 19 nt, Homo sapiens
  misc_RNA (1)...(19): siRNA sense strand
gaucaugagugguguguac

SEQ ID NO: 1193736 - RNA, 19 nt, Homo sapiens
  misc_RNA (1)...(19): siRNA sense strand
gggaguagguacagacaug

SEQ ID NO: 1193737 - RNA, 19 nt, Homo sapiens
  misc_RNA (1)...(19): siRNA sense strand
gaugagaacaugucaaaca

SEQ ID NO: 1193738 - RNA, 19 nt, Homo sapiens
  misc_RNA (1)...(19): siRNA sense strand
caacagaaucacuuacuga

SEQ ID NO: 1193739 - RNA, 19 nt, Homo sapiens
  misc_RNA (1)...(19): siRNA sense strand
gcaguucaguuguuagaag

SEQ ID NO: 1193740 - RNA, 19 nt, Homo sapiens
  misc_RNA (1)...(19): siRNA sense strand
gaaaugcuaaccugguauu

SEQ ID NO: 1193741 - RNA, 19 nt, Homo sapiens
  misc_RNA (1)...(19): siRNA sense strand
gaagaagcuuguacgugau

SEQ ID NO: 1193742 - RNA, 19 nt, Homo sapiens
  misc_RNA (1)...(19): siRNA sense strand
acaaagaugccuauacuug

SEQ ID NO: 1193743 - RNA, 19 nt, Homo sapiens
  misc_RNA (1)...(19): siRNA sense strand
ccacauaccaagcugauga

SEQ ID NO: 1193744 - RNA, 19 nt, Homo sapiens
  misc_RNA (1)...(19): siRNA sense strand
aaagacagauagcaaguca

SEQ ID NO: 1193745 - RNA, 19 nt, Homo sapiens
  misc_RNA (1)...(19): siRNA sense strand
gaaggagucucugguggau

SEQ ID NO: 1193746 - RNA, 19 nt, Homo sapiens
  misc_RNA (1)...(19): siRNA sense strand
caaacggcaagaaguaaua

SEQ ID NO: 1193747 - RNA, 19 nt, Homo sapiens
  misc_RNA (1)...(19): siRNA sense strand
uaaccagucuguaaacuac

SEQ ID NO: 1193748 - RNA, 19 nt, Homo sapiens
  misc_RNA (1)...(19): siRNA sense strand
uuaaagaagcugauuguga

SEQ ID NO: 1193749 - RNA, 19 nt, Homo sapiens
  misc_RNA (1)...(19): siRNA sense strand
gggaguguguuucugaaga

SEQ ID NO: 1193750 - RNA, 19 nt, Homo sapiens
  misc_RNA (1)...(19): siRNA sense strand
ggagaaagauaagaagacu

SEQ ID NO: 1193751 - RNA, 19 nt, Homo sapiens
  misc_RNA (1)...(19): siRNA sense strand
uauaauuuccugccacaua

SEQ ID NO: 1193752 - RNA, 19 nt, Homo sapiens
  misc_RNA (1)...(19): siRNA sense strand
gaagaugagcaguucaguu

SEQ ID NO: 1193753 - RNA, 19 nt, Homo sapiens
  misc_RNA (1)...(19): siRNA sense strand
ugagaaugcagaacguuua

SEQ ID NO: 1193754 - RNA, 19 nt, Homo sapiens
  misc_RNA (1)...(19): siRNA sense strand
uaacaaagccaaaggaaaa

SEQ ID NO: 1193755 - RNA, 19 nt, Homo sapiens
  misc_RNA (1)...(19): siRNA sense strand
gaaggaagagggagaugau

SEQ ID NO: 1193756 - RNA, 19 nt, Homo sapiens
  misc_RNA (1)...(19): siRNA sense strand
agucaacagugaucucuuu

SEQ ID NO: 1193757 - RNA, 19 nt, Homo sapiens
  misc_RNA (1)...(19): siRNA sense strand
caaaguggcaaguuaugaa

SEQ ID NO: 1193758 - RNA, 19 nt, Homo sapiens
  misc_RNA (1)...(19): siRNA sense strand
aaagaugccuauacuugug

SEQ ID NO: 1193759 - RNA, 19 nt, Homo sapiens
  misc_RNA (1)...(19): siRNA sense strand
uggaaaugcuaaccuggua

SEQ ID NO: 1193760 - RNA, 19 nt, Homo sapiens
  misc_RNA (1)...(19): siRNA sense strand
ucaacacccugaacagaga

SEQ ID NO: 1193761 - RNA, 19 nt, Homo sapiens
  misc_RNA (1)...(19): siRNA sense strand
agaagaagaugagcaguuc

SEQ ID NO: 1193762 - RNA, 19 nt, Homo sapiens
  misc_RNA (1)...(19): siRNA sense strand
gagaaugcagaacguuuaa

SEQ ID NO: 1193763 - RNA, 19 nt, Homo sapiens
  misc_RNA (1)...(19): siRNA sense strand
agacaugaaugaaggacaa

SEQ ID NO: 1193764 - RNA, 19 nt, Homo sapiens
  misc_RNA (1)...(19): siRNA sense strand
gaaaagcuguuccccuguu

SEQ ID NO: 1193765 - RNA, 19 nt, Homo sapiens
  misc_RNA (1)...(19): siRNA sense strand
aaccugguauuuaugcuua

SEQ ID NO: 1193766 - RNA, 19 nt, Homo sapiens
  misc_RNA (1)...(19): siRNA sense strand
gcaaaguggcaaguuauga

SEQ ID NO: 1193767 - RNA, 19 nt, Homo sapiens
  misc_RNA (1)...(19): siRNA sense strand
aggagucucugguggauaa

SEQ ID NO: 1193768 - RNA, 19 nt, Homo sapiens
  misc_RNA (1)...(19): siRNA sense strand
caaagaugccuauacuugu

SEQ ID NO: 1193769 - RNA, 19 nt, Homo sapiens
  misc_RNA (1)...(19): siRNA sense strand
agaaagugcgucucaauga

SEQ ID NO: 1193770 - RNA, 19 nt, Homo sapiens
  misc_RNA (1)...(19): siRNA sense strand
cuaaagacaaggagaaaga

SEQ ID NO: 1193771 - RNA, 19 nt, Homo sapiens
  misc_RNA (1)...(19): siRNA sense strand
ugacugagaguauaacaga

SEQ ID NO: 1193772 - RNA, 19 nt, Homo sapiens
  misc_RNA (1)...(19): siRNA sense strand
gaaguacaucuuugcauca

SEQ ID NO: 1193773 - RNA, 19 nt, Homo sapiens
  misc_RNA (1)...(19): siRNA sense strand
ggaugugauuggagcugua

SEQ ID NO: 1193774 - RNA, 19 nt, Homo sapiens
  misc_RNA (1)...(19): siRNA sense strand
gaaugaaggacaacuacug

SEQ ID NO: 1193775 - RNA, 19 nt, Homo sapiens
  misc_RNA (1)...(19): siRNA sense strand
gaaauuccugucucauuca

SEQ ID NO: 1193776 - RNA, 19 nt, Homo sapiens
  misc_RNA (1)...(19): siRNA sense strand
ucauuggacucagaacuuu

SEQ ID NO: 1193777 - RNA, 19 nt, Homo sapiens
  misc_RNA (1)...(19): siRNA sense strand
uaacucagcggauuaccaa

SEQ ID NO: 1193778 - RNA, 19 nt, Homo sapiens
  misc_RNA (1)...(19): siRNA sense strand
gcaagaagagcaaagaaaa

SEQ ID NO: 1193779 - RNA, 19 nt, Homo sapiens
  misc_RNA (1)...(19): siRNA sense strand
augcuaaccugguauuuau

SEQ ID NO: 1193780 - RNA, 19 nt, Homo sapiens
  misc_RNA (1)...(19): siRNA sense strand
uaaaugagguggagauccu

SEQ ID NO: 1193781 - RNA, 19 nt, Homo sapiens
  misc_RNA (1)...(19): siRNA sense strand
acagauagcaagucaauca

SEQ ID NO: 1193782 - RNA, 19 nt, Homo sapiens
  misc_RNA (1)...(19): siRNA sense strand
aagaugagcaguucaguug

SEQ ID NO: 1193783 - RNA, 19 nt, Homo sapiens
  misc_RNA (1)...(19): siRNA sense strand
auaccaagcugaugaggau

SEQ ID NO: 1193784 - RNA, 19 nt, Homo sapiens
  misc_RNA (1)...(19): siRNA sense strand
gaucuuaggagaacggaau

SEQ ID NO: 1193785 - RNA, 19 nt, Homo sapiens
  misc_RNA (1)...(19): siRNA sense strand
ggagauccuucaggguuug

SEQ ID NO: 1193786 - RNA, 19 nt, Homo sapiens
  misc_RNA (1)...(19): siRNA sense strand
uaaucugacugagaguaua

SEQ ID NO: 1193787 - RNA, 19 nt, Homo sapiens
  misc_RNA (1)...(19): siRNA sense strand
gaacagagaugaagaugaa

SEQ ID NO: 1193788 - RNA, 19 nt, Homo sapiens
  misc_RNA (1)...(19): siRNA sense strand
gaagacauauggcaaguuu

SEQ ID NO: 1193789 - RNA, 19 nt, Homo sapiens
  misc_RNA (1)...(19): siRNA sense strand
caaagaauauugcagugua

SEQ ID NO: 1193790 - RNA, 19 nt, Homo sapiens
  misc_RNA (1)...(19): siRNA sense strand
cgaaacagcuggauucaga

SEQ ID NO: 1193791 - RNA, 19 nt, Homo sapiens
  misc_RNA (1)...(19): siRNA sense strand
caacauaaccagucuguaa

SEQ ID NO: 1193792 - RNA, 19 nt, Homo sapiens
  misc_RNA (1)...(19): siRNA sense strand
caacagugaucucuuuaaa

SEQ ID NO: 1193793 - RNA, 19 nt, Homo sapiens
  misc_RNA (1)...(19): siRNA sense strand
ucaacagacucacuaaaua

SEQ ID NO: 1193794 - RNA, 19 nt, Homo sapiens
  misc_RNA (1)...(19): siRNA sense strand
caccagagcccgagaauua

SEQ ID NO: 1193795 - RNA, 19 nt, Homo sapiens
  misc_RNA (1)...(19): siRNA sense strand
gaaagagguucaagcaguu

SEQ ID NO: 1193796 - RNA, 19 nt, Homo sapiens
  misc_RNA (1)...(19): siRNA sense strand
gauaauagacagcaaguuu

SEQ ID NO: 1193797 - RNA, 19 nt, Homo sapiens
  misc_RNA (1)...(19): siRNA sense strand
gcagaacguuuaaagaaga

SEQ ID NO: 1193798 - RNA, 19 nt, Homo sapiens
  misc_RNA (1)...(19): siRNA sense strand
gaagaguggucagauguuu

SEQ ID NO: 1193799 - RNA, 19 nt, Homo sapiens
  misc_RNA (1)...(19): siRNA sense strand
caacaaagaugccuauacu

SEQ ID NO: 1193800 - RNA, 19 nt, Homo sapiens
  misc_RNA (1)...(19): siRNA sense strand
gaccagaagucaacaguga

SEQ ID NO: 1193801 - RNA, 19 nt, Homo sapiens
  misc_RNA (1)...(19): siRNA sense strand
cacaguaccuuccacaaua

SEQ ID NO: 1193802 - RNA, 19 nt, Homo sapiens
  misc_RNA (1)...(19): siRNA sense strand
gauagcaagucaaucauga

SEQ ID NO: 1193803 - RNA, 19 nt, Homo sapiens
  misc_RNA (1)...(19): siRNA sense strand
ggcaagaaguaauauauga

SEQ ID NO: 1193804 - RNA, 19 nt, Homo sapiens
  misc_RNA (1)...(19): siRNA sense strand
gcauauugcuuguaacuca

SEQ ID NO: 1193805 - RNA, 19 nt, Homo sapiens
  misc_RNA (1)...(19): siRNA sense strand
gaagagaacuauaauuucc

SEQ ID NO: 1193806 - RNA, 19 nt, Homo sapiens
  misc_RNA (1)...(19): siRNA sense strand
caacagacucacuaaauaa

SEQ ID NO: 1193807 - RNA, 19 nt, Homo sapiens
  misc_RNA (1)...(19): siRNA sense strand
aaagaaagauguggucaaa

SEQ ID NO: 1193808 - RNA, 19 nt, Homo sapiens
  misc_RNA (1)...(19): siRNA sense strand
gaacgaaacagcuggauuc

SEQ ID NO: 1193809 - RNA, 19 nt, Homo sapiens
  misc_RNA (1)...(19): siRNA sense strand
guacaucuuugcaucauug

SEQ ID NO: 1193810 - RNA, 19 nt, Homo sapiens
  misc_RNA (1)...(19): siRNA sense strand
gaagagaaggagaugauuu

SEQ ID NO: 1193811 - RNA, 19 nt, Homo sapiens
  misc_RNA (1)...(19): siRNA sense strand
ucagcuacaucaagaauaa

SEQ ID NO: 1193812 - RNA, 19 nt, Homo sapiens
  misc_RNA (1)...(19): siRNA sense strand
gaugacagauccagagaug

SEQ ID NO: 1193813 - RNA, 19 nt, Homo sapiens
  misc_RNA (1)...(19): siRNA sense strand
gggaugugcuuguaaauca

SEQ ID NO: 1193814 - RNA, 19 nt, Homo sapiens
  misc_RNA (1)...(19): siRNA sense strand
cacaaaggcugccgagaaa

SEQ ID NO: 1193815 - RNA, 19 nt, Homo sapiens
  misc_RNA (1)...(19): siRNA sense strand
gagcugaucaguauccaua

SEQ ID NO: 1193816 - RNA, 19 nt, Homo sapiens
  misc_RNA (1)...(19): siRNA sense strand
gaaagauucuaaagacaag

SEQ ID NO: 1193817 - RNA, 19 nt, Homo sapiens
  misc_RNA (1)...(19): siRNA sense strand
ugagagaaguggcacauga

SEQ ID NO: 1193818 - RNA, 19 nt, Homo sapiens
  misc_RNA (1)...(19): siRNA sense strand
uggaugagcugaucaguau

SEQ ID NO: 1193819 - RNA, 19 nt, Homo sapiens
  misc_RNA (1)...(19): siRNA sense strand
ucacggcccuuccacagua

SEQ ID NO: 1193820 - RNA, 19 nt, Homo sapiens
  misc_RNA (1)...(19): siRNA sense strand
gaugauggccaagaucuua

SEQ ID NO: 1193821 - RNA, 19 nt, Homo sapiens
  misc_RNA (1)...(19): siRNA sense strand
gcagagaccuuuggaggau

SEQ ID NO: 1193822 - RNA, 19 nt, Homo sapiens
  misc_RNA (1)...(19): siRNA sense strand
agacagaguuucaucaugu

SEQ ID NO: 1193823 - RNA, 19 nt, Homo sapiens
  misc_RNA (1)...(19): siRNA sense strand
gcaagucaaucaugaggau

SEQ ID NO: 1193824 - RNA, 19 nt, Homo sapiens
  misc_RNA (1)...(19): siRNA sense strand
gaugagcaguucaguuguu

SEQ ID NO: 1193825 - RNA, 19 nt, Homo sapiens
  misc_RNA (1)...(19): siRNA sense strand
gagugcauauugcuuguaa

SEQ ID NO: 1193826 - RNA, 19 nt, Homo sapiens
  misc_RNA (1)...(19): siRNA sense strand
acagcaaaguggcaaguua

SEQ ID NO: 1193827 - RNA, 19 nt, Homo sapiens
  misc_RNA (1)...(19): siRNA sense strand
acacauagcccuagaguuc

SEQ ID NO: 1193828 - RNA, 19 nt, Homo sapiens
  misc_RNA (1)...(19): siRNA sense strand
gaccagaaguacaucuuug

SEQ ID NO: 1193829 - RNA, 19 nt, Homo sapiens
  misc_RNA (1)...(19): siRNA sense strand
ggucaaacggcaagaagua

SEQ ID NO: 1193830 - RNA, 19 nt, Homo sapiens
  misc_RNA (1)...(19): siRNA sense strand
gaugaagaguggucagaug

SEQ ID NO: 1193831 - RNA, 19 nt, Homo sapiens
  misc_RNA (1)...(19): siRNA sense strand
ccacaaaggcugccgagaa

SEQ ID NO: 1193832 - RNA, 19 nt, Homo sapiens
  misc_RNA (1)...(19): siRNA sense strand
aggaggaccuuuaaugaaa

SEQ ID NO: 1193833 - RNA, 19 nt, Homo sapiens
  misc_RNA (1)...(19): siRNA sense strand
aagaacaacuucaccagaa

SEQ ID NO: 1193834 - RNA, 19 nt, Homo sapiens
  misc_RNA (1)...(19): siRNA sense strand
agaugaagaugaaggaauu

SEQ ID NO: 1193835 - RNA, 19 nt, Homo sapiens
  misc_RNA (1)...(19): siRNA sense strand
gaucaugagugguguguac

SEQ ID NO: 1193836 - RNA, 19 nt, Homo sapiens
  misc_RNA (1)...(19): siRNA sense strand
gggaguagguacagacaug

SEQ ID NO: 1193837 - RNA, 19 nt, Homo sapiens
  misc_RNA (1)...(19): siRNA sense strand
gaugagaacaugucaaaca

SEQ ID NO: 1193838 - RNA, 19 nt, Homo sapiens
  misc_RNA (1)...(19): siRNA sense strand
caacagaaucacuuacuga

SEQ ID NO: 1193839 - RNA, 19 nt, Homo sapiens
  misc_RNA (1)...(19): siRNA sense strand
gcaguucaguuguuagaag

SEQ ID NO: 1193840 - RNA, 19 nt, Homo sapiens
  misc_RNA (1)...(19): siRNA sense strand
gaaaugcuaaccugguauu

SEQ ID NO: 1193841 - RNA, 19 nt, Homo sapiens
  misc_RNA (1)...(19): siRNA sense strand
gaagaagcuuguacgugau

SEQ ID NO: 1193842 - RNA, 19 nt, Homo sapiens
  misc_RNA (1)...(19): siRNA sense strand
acaaagaugccuauacuug

SEQ ID NO: 1193843 - RNA, 19 nt, Homo sapiens
  misc_RNA (1)...(19): siRNA sense strand
ccacauaccaagcugauga

SEQ ID NO: 1193844 - RNA, 19 nt, Homo sapiens
  misc_RNA (1)...(19): siRNA sense strand
aaagacagauagcaaguca

SEQ ID NO: 1193845 - RNA, 19 nt, Homo sapiens
  misc_RNA (1)...(19): siRNA sense strand
gaaggagucucugguggau

SEQ ID NO: 1193846 - RNA, 19 nt, Homo sapiens
  misc_RNA (1)...(19): siRNA sense strand
caaacggcaagaaguaaua

SEQ ID NO: 1193847 - RNA, 19 nt, Homo sapiens
  misc_RNA (1)...(19): siRNA sense strand
uaaccagucuguaaacuac

SEQ ID NO: 1193848 - RNA, 19 nt, Homo sapiens
  misc_RNA (1)...(19): siRNA sense strand
uuaaagaagcugauuguga

SEQ ID NO: 1193849 - RNA, 19 nt, Homo sapiens
  misc_RNA (1)...(19): siRNA sense strand
gggaguguguuucugaaga

SEQ ID NO: 1193850 - RNA, 19 nt, Homo sapiens
  misc_RNA (1)...(19): siRNA sense strand
ggagaaagauaagaagacu

SEQ ID NO: 1193851 - RNA, 19 nt, Homo sapiens
  misc_RNA (1)...(19): siRNA sense strand
uauaauuuccugccacaua

SEQ ID NO: 1193852 - RNA, 19 nt, Homo sapiens
  misc_RNA (1)...(19): siRNA sense strand
gaagaugagcaguucaguu

SEQ ID NO: 1193853 - RNA, 19 nt, Homo sapiens
  misc_RNA (1)...(19): siRNA sense strand
ugagaaugcagaacguuua

SEQ ID NO: 1193854 - RNA, 19 nt, Homo sapiens
  misc_RNA (1)...(19): siRNA sense strand
uaacaaagccaaaggaaaa

SEQ ID NO: 1193855 - RNA, 19 nt, Homo sapiens
  misc_RNA (1)...(19): siRNA sense strand
gaaggaagagggagaugau

SEQ ID NO: 1193856 - RNA, 19 nt, Homo sapiens
  misc_RNA (1)...(19): siRNA sense strand
agucaacagugaucucuuu

SEQ ID NO: 1193857 - RNA, 19 nt, Homo sapiens
  misc_RNA (1)...(19): siRNA sense strand
caaaguggcaaguuaugaa

SEQ ID NO: 1193858 - RNA, 19 nt, Homo sapiens
  misc_RNA (1)...(19): siRNA sense strand
aaagaugccuauacuugug

SEQ ID NO: 1193859 - RNA, 19 nt, Homo sapiens
  misc_RNA (1)...(19): siRNA sense strand
uggaaaugcuaaccuggua

SEQ ID NO: 1193860 - RNA, 19 nt, Homo sapiens
  misc_RNA (1)...(19): siRNA sense strand
ucaacacccugaacagaga

SEQ ID NO: 1193861 - RNA, 19 nt, Homo sapiens
  misc_RNA (1)...(19): siRNA sense strand
agaagaagaugagcaguuc

SEQ ID NO: 1193862 - RNA, 19 nt, Homo sapiens
  misc_RNA (1)...(19): siRNA sense strand
gagaaugcagaacguuuaa

SEQ ID NO: 1193863 - RNA, 19 nt, Homo sapiens
  misc_RNA (1)...(19): siRNA sense strand
agacaugaaugaaggacaa

SEQ ID NO: 1193864 - RNA, 19 nt, Homo sapiens
  misc_RNA (1)...(19): siRNA sense strand
gaaaagcuguuccccuguu

SEQ ID NO: 1193865 - RNA, 19 nt, Homo sapiens
  misc_RNA (1)...(19): siRNA sense strand
aaccugguauuuaugcuua

SEQ ID NO: 1193866 - RNA, 19 nt, Homo sapiens
  misc_RNA (1)...(19): siRNA sense strand
gcaaaguggcaaguuauga

SEQ ID NO: 1193867 - RNA, 19 nt, Homo sapiens
  misc_RNA (1)...(19): siRNA sense strand
aggagucucugguggauaa

SEQ ID NO: 1193868 - RNA, 19 nt, Homo sapiens
  misc_RNA (1)...(19): siRNA sense strand
caaagaugccuauacuugu

SEQ ID NO: 1193869 - RNA, 19 nt, Homo sapiens
  misc_RNA (1)...(19): siRNA sense strand
agaaagugcgucucaauga

SEQ ID NO: 1193870 - RNA, 19 nt, Homo sapiens
  misc_RNA (1)...(19): siRNA sense strand
cuaaagacaaggagaaaga

SEQ ID NO: 1193871 - RNA, 19 nt, Homo sapiens
  misc_RNA (1)...(19): siRNA sense strand
ugacugagaguauaacaga

SEQ ID NO: 1193872 - RNA, 19 nt, Homo sapiens
  misc_RNA (1)...(19): siRNA sense strand
gaaguacaucuuugcauca

SEQ ID NO: 1193873 - RNA, 19 nt, Homo sapiens
  misc_RNA (1)...(19): siRNA sense strand
ggaugugauuggagcugua

SEQ ID NO: 1193874 - RNA, 19 nt, Homo sapiens
  misc_RNA (1)...(19): siRNA sense strand
gaaugaaggacaacuacug

SEQ ID NO: 1193875 - RNA, 19 nt, Homo sapiens
  misc_RNA (1)...(19): siRNA sense strand
gaaauuccugucucauuca

SEQ ID NO: 1193876 - RNA, 19 nt, Homo sapiens
  misc_RNA (1)...(19): siRNA sense strand
ucauuggacucagaacuuu

SEQ ID NO: 1193877 - RNA, 19 nt, Homo sapiens
  misc_RNA (1)...(19): siRNA sense strand
uaacucagcggauuaccaa

SEQ ID NO: 1193878 - RNA, 19 nt, Homo sapiens
  misc_RNA (1)...(19): siRNA sense strand
gcaagaagagcaaagaaaa

SEQ ID NO: 1193879 - RNA, 19 nt, Homo sapiens
  misc_RNA (1)...(19): siRNA sense strand
augcuaaccugguauuuau

SEQ ID NO: 1193880 - RNA, 19 nt, Homo sapiens
  misc_RNA (1)...(19): siRNA sense strand
uaaaugagguggagauccu

SEQ ID NO: 1193881 - RNA, 19 nt, Homo sapiens
  misc_RNA (1)...(19): siRNA sense strand
acagauagcaagucaauca

SEQ ID NO: 1193882 - RNA, 19 nt, Homo sapiens
  misc_RNA (1)...(19): siRNA sense strand
aagaugagcaguucaguug

SEQ ID NO: 1193883 - RNA, 19 nt, Homo sapiens
  misc_RNA (1)...(19): siRNA sense strand
auaccaagcugaugaggau

SEQ ID NO: 1193884 - RNA, 19 nt, Homo sapiens
  misc_RNA (1)...(19): siRNA sense strand
gaucuuaggagaacggaau

SEQ ID NO: 1193885 - RNA, 19 nt, Homo sapiens
  misc_RNA (1)...(19): siRNA sense strand
ggagauccuucaggguuug

SEQ ID NO: 1193886 - RNA, 19 nt, Homo sapiens
  misc_RNA (1)...(19): siRNA sense strand
uaaucugacugagaguaua

SEQ ID NO: 1193887 - RNA, 19 nt, Homo sapiens
  misc_RNA (1)...(19): siRNA sense strand
gaacagagaugaagaugaa

SEQ ID NO: 1193888 - RNA, 19 nt, Homo sapiens
  misc_RNA (1)...(19): siRNA sense strand
gaagacauauggcaaguuu

SEQ ID NO: 1193889 - RNA, 19 nt, Homo sapiens
  misc_RNA (1)...(19): siRNA sense strand
caaagaauauugcagugua

SEQ ID NO: 1193890 - RNA, 19 nt, Homo sapiens
  misc_RNA (1)...(19): siRNA sense strand
cgaaacagcuggauucaga

SEQ ID NO: 1193891 - RNA, 19 nt, Homo sapiens
  misc_RNA (1)...(19): siRNA sense strand
caacauaaccagucuguaa

SEQ ID NO: 1193892 - RNA, 19 nt, Homo sapiens
  misc_RNA (1)...(19): siRNA sense strand
caacagugaucucuuuaaa

SEQ ID NO: 1193893 - RNA, 19 nt, Homo sapiens
  misc_RNA (1)...(19): siRNA sense strand
ucaacagacucacuaaaua

SEQ ID NO: 1193894 - RNA, 19 nt, Homo sapiens
  misc_RNA (1)...(19): siRNA sense strand
caccagagcccgagaauua

SEQ ID NO: 1193895 - RNA, 19 nt, Homo sapiens
  misc_RNA (1)...(19): siRNA sense strand
gaaagagguucaagcaguu

SEQ ID NO: 1193896 - RNA, 19 nt, Homo sapiens
  misc_RNA (1)...(19): siRNA sense strand
gauaauagacagcaaguuu

SEQ ID NO: 1193897 - RNA, 19 nt, Homo sapiens
  misc_RNA (1)...(19): siRNA sense strand
gcagaacguuuaaagaaga

SEQ ID NO: 1193898 - RNA, 19 nt, Homo sapiens
  misc_RNA (1)...(19): siRNA sense strand
gaagaguggucagauguuu

SEQ ID NO: 1193899 - RNA, 19 nt, Homo sapiens
  misc_RNA (1)...(19): siRNA sense strand
caacaaagaugccuauacu

SEQ ID NO: 1193900 - RNA, 19 nt, Homo sapiens
  misc_RNA (1)...(19): siRNA sense strand
gaccagaagucaacaguga

SEQ ID NO: 1193901 - RNA, 19 nt, Homo sapiens
  misc_RNA (1)...(19): siRNA sense strand
gauagcaagucaaucauga

SEQ ID NO: 1193902 - RNA, 19 nt, Homo sapiens
  misc_RNA (1)...(19): siRNA sense strand
ggcaagaaguaauauauga

SEQ ID NO: 1193903 - RNA, 19 nt, Homo sapiens
  misc_RNA (1)...(19): siRNA sense strand
gcauauugcuuguaacuca

SEQ ID NO: 1193904 - RNA, 19 nt, Homo sapiens
  misc_RNA (1)...(19): siRNA sense strand
caacagacucacuaaauaa

SEQ ID NO: 1193905 - RNA, 19 nt, Homo sapiens
  misc_RNA (1)...(19): siRNA sense strand
aaagaaagauguggucaaa

SEQ ID NO: 1193906 - RNA, 19 nt, Homo sapiens
  misc_RNA (1)...(19): siRNA sense strand
gaacgaaacagcuggauuc

SEQ ID NO: 1193907 - RNA, 19 nt, Homo sapiens
  misc_RNA (1)...(19): siRNA sense strand
guacaucuuugcaucauug

SEQ ID NO: 1193908 - RNA, 19 nt, Homo sapiens
  misc_RNA (1)...(19): siRNA sense strand
gaagagaaggagaugauuu

SEQ ID NO: 1193909 - RNA, 19 nt, Homo sapiens
  misc_RNA (1)...(19): siRNA sense strand
gaugacagauccagagaug

SEQ ID NO: 1193910 - RNA, 19 nt, Homo sapiens
  misc_RNA (1)...(19): siRNA sense strand
gggaugugcuuguaaauca

SEQ ID NO: 1193911 - RNA, 19 nt, Homo sapiens
  misc_RNA (1)...(19): siRNA sense strand
cacaaaggcugccgagaaa

SEQ ID NO: 1193912 - RNA, 19 nt, Homo sapiens
  misc_RNA (1)...(19): siRNA sense strand
gagcugaucaguauccaua

SEQ ID NO: 1193913 - RNA, 19 nt, Homo sapiens
  misc_RNA (1)...(19): siRNA sense strand
uggaugagcugaucaguau

SEQ ID NO: 1193914 - RNA, 19 nt, Homo sapiens
  misc_RNA (1)...(19): siRNA sense strand
gaaagauucuaaagacaag

SEQ ID NO: 1193915 - RNA, 19 nt, Homo sapiens
  misc_RNA (1)...(19): siRNA sense strand
ugagagaaguggcacauga

SEQ ID NO: 1193916 - RNA, 19 nt, Homo sapiens
  misc_RNA (1)...(19): siRNA sense strand
gcagagaccuuuggaggau

SEQ ID NO: 1193917 - RNA, 19 nt, Homo sapiens
  misc_RNA (1)...(19): siRNA sense strand
gaugauggccaagaucuua

SEQ ID NO: 1193918 - RNA, 19 nt, Homo sapiens
  misc_RNA (1)...(19): siRNA sense strand
agacagaguuucaucaugu

SEQ ID NO: 1193919 - RNA, 19 nt, Homo sapiens
  misc_RNA (1)...(19): siRNA sense strand
gcaagucaaucaugaggau

SEQ ID NO: 1193920 - RNA, 19 nt, Homo sapiens
  misc_RNA (1)...(19): siRNA sense strand
gaugagcaguucaguuguu

SEQ ID NO: 1193921 - RNA, 19 nt, Homo sapiens
  misc_RNA (1)...(19): siRNA sense strand
gagugcauauugcuuguaa

SEQ ID NO: 1193922 - RNA, 19 nt, Homo sapiens
  misc_RNA (1)...(19): siRNA sense strand
acagcaaaguggcaaguua

SEQ ID NO: 1193923 - RNA, 19 nt, Homo sapiens
  misc_RNA (1)...(19): siRNA sense strand
acacauagcccuagaguuc

SEQ ID NO: 1193924 - RNA, 19 nt, Homo sapiens
  misc_RNA (1)...(19): siRNA sense strand
gaccagaaguacaucuuug

SEQ ID NO: 1193925 - RNA, 19 nt, Homo sapiens
  misc_RNA (1)...(19): siRNA sense strand
ggucaaacggcaagaagua

SEQ ID NO: 1193926 - RNA, 19 nt, Homo sapiens
  misc_RNA (1)...(19): siRNA sense strand
gaugaagaguggucagaug

SEQ ID NO: 1193927 - RNA, 19 nt, Homo sapiens
  misc_RNA (1)...(19): siRNA sense strand
ccacaaaggcugccgagaa

SEQ ID NO: 1193928 - RNA, 19 nt, Homo sapiens
  misc_RNA (1)...(19): siRNA sense strand
aggaggaccuuuaaugaaa

SEQ ID NO: 1193929 - RNA, 19 nt, Homo sapiens
  misc_RNA (1)...(19): siRNA sense strand
aagaacaacuucaccagaa

SEQ ID NO: 1193930 - RNA, 19 nt, Homo sapiens
  misc_RNA (1)...(19): siRNA sense strand
agaugaagaugaaggaauu

SEQ ID NO: 1193931 - RNA, 19 nt, Homo sapiens
  misc_RNA (1)...(19): siRNA sense strand
gaucaugagugguguguac

SEQ ID NO: 1193932 - RNA, 19 nt, Homo sapiens
  misc_RNA (1)...(19): siRNA sense strand
gggaguagguacagacaug

SEQ ID NO: 1193933 - RNA, 19 nt, Homo sapiens
  misc_RNA (1)...(19): siRNA sense strand
gaugagaacaugucaaaca

SEQ ID NO: 1193934 - RNA, 19 nt, Homo sapiens
  misc_RNA (1)...(19): siRNA sense strand
caacagaaucacuuacuga

SEQ ID NO: 1193935 - RNA, 19 nt, Homo sapiens
  misc_RNA (1)...(19): siRNA sense strand
gcaguucaguuguuagaag

SEQ ID NO: 1193936 - RNA, 19 nt, Homo sapiens
  misc_RNA (1)...(19): siRNA sense strand
gaaaugcuaaccugguauu

SEQ ID NO: 1193937 - RNA, 19 nt, Homo sapiens
  misc_RNA (1)...(19): siRNA sense strand
gaagaagcuuguacgugau

SEQ ID NO: 1193938 - RNA, 19 nt, Homo sapiens
  misc_RNA (1)...(19): siRNA sense strand
acaaagaugccuauacuug

SEQ ID NO: 1193939 - RNA, 19 nt, Homo sapiens
  misc_RNA (1)...(19): siRNA sense strand
ccacauaccaagcugauga

SEQ ID NO: 1193940 - RNA, 19 nt, Homo sapiens
  misc_RNA (1)...(19): siRNA sense strand
aaagacagauagcaaguca

SEQ ID NO: 1193941 - RNA, 19 nt, Homo sapiens
  misc_RNA (1)...(19): siRNA sense strand
gaaggagucucugguggau

SEQ ID NO: 1193942 - RNA, 19 nt, Homo sapiens
  misc_RNA (1)...(19): siRNA sense strand
caaacggcaagaaguaaua

SEQ ID NO: 1193943 - RNA, 19 nt, Homo sapiens
  misc_RNA (1)...(19): siRNA sense strand
uaaccagucuguaaacuac

SEQ ID NO: 1193944 - RNA, 19 nt, Homo sapiens
  misc_RNA (1)...(19): siRNA sense strand
uuaaagaagcugauuguga

SEQ ID NO: 1193945 - RNA, 19 nt, Homo sapiens
  misc_RNA (1)...(19): siRNA sense strand
gggaguguguuucugaaga

SEQ ID NO: 1193946 - RNA, 19 nt, Homo sapiens
  misc_RNA (1)...(19): siRNA sense strand
gaagaugagcaguucaguu

SEQ ID NO: 1193947 - RNA, 19 nt, Homo sapiens
  misc_RNA (1)...(19): siRNA sense strand
ggagaaagauaagaagacu

SEQ ID NO: 1193948 - RNA, 19 nt, Homo sapiens
  misc_RNA (1)...(19): siRNA sense strand
ugagaaugcagaacguuua

SEQ ID NO: 1193949 - RNA, 19 nt, Homo sapiens
  misc_RNA (1)...(19): siRNA sense strand
uaacaaagccaaaggaaaa

SEQ ID NO: 1193950 - RNA, 19 nt, Homo sapiens
  misc_RNA (1)...(19): siRNA sense strand
gaaggaagagggagaugau

SEQ ID NO: 1193951 - RNA, 19 nt, Homo sapiens
  misc_RNA (1)...(19): siRNA sense strand
agucaacagugaucucuuu

SEQ ID NO: 1193952 - RNA, 19 nt, Homo sapiens
  misc_RNA (1)...(19): siRNA sense strand
caaaguggcaaguuaugaa

SEQ ID NO: 1193953 - RNA, 19 nt, Homo sapiens
  misc_RNA (1)...(19): siRNA sense strand
aaagaugccuauacuugug

SEQ ID NO: 1193954 - RNA, 19 nt, Homo sapiens
  misc_RNA (1)...(19): siRNA sense strand
uggaaaugcuaaccuggua

SEQ ID NO: 1193955 - RNA, 19 nt, Homo sapiens
  misc_RNA (1)...(19): siRNA sense strand
ucaacacccugaacagaga

SEQ ID NO: 1193956 - RNA, 19 nt, Homo sapiens
  misc_RNA (1)...(19): siRNA sense strand
agaagaagaugagcaguuc

SEQ ID NO: 1193957 - RNA, 19 nt, Homo sapiens
  misc_RNA (1)...(19): siRNA sense strand
gagaaugcagaacguuuaa

SEQ ID NO: 1193958 - RNA, 19 nt, Homo sapiens
  misc_RNA (1)...(19): siRNA sense strand
agacaugaaugaaggacaa

SEQ ID NO: 1193959 - RNA, 19 nt, Homo sapiens
  misc_RNA (1)...(19): siRNA sense strand
gaaaagcuguuccccuguu

SEQ ID NO: 1193960 - RNA, 19 nt, Homo sapiens
  misc_RNA (1)...(19): siRNA sense strand
aaccugguauuuaugcuua

SEQ ID NO: 1193961 - RNA, 19 nt, Homo sapiens
  misc_RNA (1)...(19): siRNA sense strand
gcaaaguggcaaguuauga

SEQ ID NO: 1193962 - RNA, 19 nt, Homo sapiens
  misc_RNA (1)...(19): siRNA sense strand
aggagucucugguggauaa

SEQ ID NO: 1193963 - RNA, 19 nt, Homo sapiens
  misc_RNA (1)...(19): siRNA sense strand
caaagaugccuauacuugu

SEQ ID NO: 1193964 - RNA, 19 nt, Homo sapiens
  misc_RNA (1)...(19): siRNA sense strand
agaaagugcgucucaauga

SEQ ID NO: 1193965 - RNA, 19 nt, Homo sapiens
  misc_RNA (1)...(19): siRNA sense strand
cuaaagacaaggagaaaga

SEQ ID NO: 1193966 - RNA, 19 nt, Homo sapiens
  misc_RNA (1)...(19): siRNA sense strand
gaaguacaucuuugcauca

SEQ ID NO: 1193967 - RNA, 19 nt, Homo sapiens
  misc_RNA (1)...(19): siRNA sense strand
ggaugugauuggagcugua

SEQ ID NO: 1193968 - RNA, 19 nt, Homo sapiens
  misc_RNA (1)...(19): siRNA sense strand
gaaugaaggacaacuacug

SEQ ID NO: 1193969 - RNA, 19 nt, Homo sapiens
  misc_RNA (1)...(19): siRNA sense strand
gaaauuccugucucauuca

SEQ ID NO: 1193970 - RNA, 19 nt, Homo sapiens
  misc_RNA (1)...(19): siRNA sense strand
ucauuggacucagaacuuu

SEQ ID NO: 1193971 - RNA, 19 nt, Homo sapiens
  misc_RNA (1)...(19): siRNA sense strand
uaacucagcggauuaccaa

SEQ ID NO: 1193972 - RNA, 19 nt, Homo sapiens
  misc_RNA (1)...(19): siRNA sense strand
acagauagcaagucaauca

SEQ ID NO: 1193973 - RNA, 19 nt, Homo sapiens
  misc_RNA (1)...(19): siRNA sense strand
augcuaaccugguauuuau

SEQ ID NO: 1193974 - RNA, 19 nt, Homo sapiens
  misc_RNA (1)...(19): siRNA sense strand
uaaaugagguggagauccu

SEQ ID NO: 1193975 - RNA, 19 nt, Homo sapiens
  misc_RNA (1)...(19): siRNA sense strand
gcaagaagagcaaagaaaa

SEQ ID NO: 1193976 - RNA, 19 nt, Homo sapiens
  misc_RNA (1)...(19): siRNA sense strand
gugcaaaggucaaaaugaa

SEQ ID NO: 1193977 - RNA, 19 nt, Homo sapiens
  misc_RNA (1)...(19): siRNA sense strand
auaccaagcugaugaggau

SEQ ID NO: 1193978 - RNA, 19 nt, Homo sapiens
  misc_RNA (1)...(19): siRNA sense strand
gaucuuaggagaacggaau

SEQ ID NO: 1193979 - RNA, 19 nt, Homo sapiens
  misc_RNA (1)...(19): siRNA sense strand
ggagauccuucaggguuug

SEQ ID NO: 1193980 - RNA, 19 nt, Homo sapiens
  misc_RNA (1)...(19): siRNA sense strand
aagaugagcaguucaguug

SEQ ID NO: 1193981 - RNA, 19 nt, Homo sapiens
  misc_RNA (1)...(19): siRNA sense strand
agaaagauguggucaaacg

SEQ ID NO: 1193982 - RNA, 19 nt, Homo sapiens
  misc_RNA (1)...(19): siRNA sense strand
gaugauggcggaucugcuu

SEQ ID NO: 1193983 - RNA, 19 nt, Homo sapiens
  misc_RNA (1)...(19): siRNA sense strand
cccaguaccucgaggagaa

SEQ ID NO: 1193984 - RNA, 19 nt, Homo sapiens
  misc_RNA (1)...(19): siRNA sense strand
gaugggaguguguuucuga

SEQ ID NO: 1193985 - RNA, 19 nt, Homo sapiens
  misc_RNA (1)...(19): siRNA sense strand
ucagauguuugccaaggaa

SEQ ID NO: 1193986 - RNA, 19 nt, Homo sapiens
  misc_RNA (1)...(19): siRNA sense strand
gaaugcagaacguuuaaag

SEQ ID NO: 1193987 - RNA, 19 nt, Homo sapiens
  misc_RNA (1)...(19): siRNA sense strand
gaacaauacugcauuagaa

SEQ ID NO: 1193988 - RNA, 19 nt, Homo sapiens
  misc_RNA (1)...(19): siRNA sense strand
ggaagaagacaacgaauaa

SEQ ID NO: 1193989 - RNA, 19 nt, Homo sapiens
  misc_RNA (1)...(19): siRNA sense strand
ggauaaagcuguguccaaa

SEQ ID NO: 1193990 - RNA, 19 nt, Homo sapiens
  misc_RNA (1)...(19): siRNA sense strand
ucacagagcagauagauuu

SEQ ID NO: 1193991 - RNA, 19 nt, Homo sapiens
  misc_RNA (1)...(19): siRNA sense strand
ggauggagaugcaguaaau

SEQ ID NO: 1193992 - RNA, 19 nt, Homo sapiens
  misc_RNA (1)...(19): siRNA sense strand
ucaagaaucugacgugaug

SEQ ID NO: 1193993 - RNA, 19 nt, Homo sapiens
  misc_RNA (1)...(19): siRNA sense strand
gaagcuauuucagcaagua

SEQ ID NO: 1193994 - RNA, 19 nt, Homo sapiens
  misc_RNA (1)...(19): siRNA sense strand
gaaagaggcagacugaaau

SEQ ID NO: 1193995 - RNA, 19 nt, Homo sapiens
  misc_RNA (1)...(19): siRNA sense strand
gaaagaacaauacugcauu

SEQ ID NO: 1193996 - RNA, 19 nt, Homo sapiens
  misc_RNA (1)...(19): siRNA sense strand
gaaauacaaacgcuagaaa

SEQ ID NO: 1193997 - RNA, 19 nt, Homo sapiens
  misc_RNA (1)...(19): siRNA sense strand
gagaauggaugauaguagu

SEQ ID NO: 1193998 - RNA, 19 nt, Homo sapiens
  misc_RNA (1)...(19): siRNA sense strand
caagaagaauccuggcauu

SEQ ID NO: 1193999 - RNA, 19 nt, Homo sapiens
  misc_RNA (1)...(19): siRNA sense strand
gagcaaaucauccuagaga

SEQ ID NO: 1194000 - RNA, 19 nt, Homo sapiens
  misc_RNA (1)...(19): siRNA sense strand
gaggcagacugaaauagaa

SEQ ID NO: 1194001 - RNA, 19 nt, Homo sapiens
  misc_RNA (1)...(19): siRNA sense strand
gcaaaucauccuagagaaa

SEQ ID NO: 1194002 - RNA, 19 nt, Homo sapiens
  misc_RNA (1)...(19): siRNA sense strand
gggagaaugugcugcuaaa

SEQ ID NO: 1194003 - RNA, 19 nt, Homo sapiens
  misc_RNA (1)...(19): siRNA sense strand
gaagaauccuggcauugca

SEQ ID NO: 1194004 - RNA, 19 nt, Homo sapiens
  misc_RNA (1)...(19): siRNA sense strand
gaaauugaggugucuguug

SEQ ID NO: 1194005 - RNA, 19 nt, Homo sapiens
  misc_RNA (1)...(19): siRNA sense strand
uacaaacgcuagaaaguga

SEQ ID NO: 1194006 - RNA, 19 nt, Homo sapiens
  misc_RNA (1)...(19): siRNA sense strand
gaggaugaguucagaguca

SEQ ID NO: 1194007 - RNA, 19 nt, Homo sapiens
  misc_RNA (1)...(19): siRNA sense strand
gcaaacaauuucagcugau

SEQ ID NO: 1194008 - RNA, 19 nt, Homo sapiens
  misc_RNA (1)...(19): siRNA sense strand
ccaauccucuguucacgaa

SEQ ID NO: 1194009 - RNA, 19 nt, Homo sapiens
  misc_RNA (1)...(19): siRNA sense strand
gcaggcaccuccucacauc

SEQ ID NO: 1194010 - RNA, 19 nt, Homo sapiens
  misc_RNA (1)...(19): siRNA sense strand
gauggaacguacaauggaa

SEQ ID NO: 1194011 - RNA, 19 nt, Homo sapiens
  misc_RNA (1)...(19): siRNA sense strand
gaaaagggauguauuacca

SEQ ID NO: 1194012 - RNA, 19 nt, Homo sapiens
  misc_RNA (1)...(19): siRNA sense strand
ccaaagugcuucgggagaa

SEQ ID NO: 1194013 - RNA, 19 nt, Homo sapiens
  misc_RNA (1)...(19): siRNA sense strand
agaaugugcugcuaaagga

SEQ ID NO: 1194014 - RNA, 19 nt, Homo sapiens
  misc_RNA (1)...(19): siRNA sense strand
ggaggaagaagacaacgaa

SEQ ID NO: 1194015 - RNA, 19 nt, Homo sapiens
  misc_RNA (1)...(19): siRNA sense strand
ggaaacagcggacuuuguc

SEQ ID NO: 1194016 - RNA, 19 nt, Homo sapiens
  misc_RNA (1)...(19): siRNA sense strand
gcgcaagcaugauugacaa

SEQ ID NO: 1194017 - RNA, 19 nt, Homo sapiens
  misc_RNA (1)...(19): siRNA sense strand
gcccagacaugacuaucaa

SEQ ID NO: 1194018 - RNA, 19 nt, Homo sapiens
  misc_RNA (1)...(19): siRNA sense strand
aaagaaagaggcagacuga

SEQ ID NO: 1194019 - RNA, 19 nt, Homo sapiens
  misc_RNA (1)...(19): siRNA sense strand
ucacuguggucaaggauga

SEQ ID NO: 1194020 - RNA, 19 nt, Homo sapiens
  misc_RNA (1)...(19): siRNA sense strand
auaauggccuccuuacuga

SEQ ID NO: 1194021 - RNA, 19 nt, Homo sapiens
  misc_RNA (1)...(19): siRNA sense strand
ggcugaggauggagaauuu

SEQ ID NO: 1194022 - RNA, 19 nt, Homo sapiens
  misc_RNA (1)...(19): siRNA sense strand
aaagggauguauuaccaaa

SEQ ID NO: 1194023 - RNA, 19 nt, Homo sapiens
  misc_RNA (1)...(19): siRNA sense strand
agaaagaggcagacugaaa

SEQ ID NO: 1194024 - RNA, 19 nt, Homo sapiens
  misc_RNA (1)...(19): siRNA sense strand
ugaagcgacuguagaggaa

SEQ ID NO: 1194025 - RNA, 19 nt, Homo sapiens
  misc_RNA (1)...(19): siRNA sense strand
cagacaagccacugacuaa

SEQ ID NO: 1194026 - RNA, 19 nt, Homo sapiens
  misc_RNA (1)...(19): siRNA sense strand
gagacccuauccaaugauu

SEQ ID NO: 1194027 - RNA, 19 nt, Homo sapiens
  misc_RNA (1)...(19): siRNA sense strand
gcgagagaauggaugauag

SEQ ID NO: 1194028 - RNA, 19 nt, Homo sapiens
  misc_RNA (1)...(19): siRNA sense strand
uagagaaacugaaggaaac

SEQ ID NO: 1194029 - RNA, 19 nt, Homo sapiens
  misc_RNA (1)...(19): siRNA sense strand
auaaugauguugccagaga

SEQ ID NO: 1194030 - RNA, 19 nt, Homo sapiens
  misc_RNA (1)...(19): siRNA sense strand
gaaacugaaggaaacagaa

SEQ ID NO: 1194031 - RNA, 19 nt, Homo sapiens
  misc_RNA (1)...(19): siRNA sense strand
gaggcuggagcaagaaaua

SEQ ID NO: 1194032 - RNA, 19 nt, Homo sapiens
  misc_RNA (1)...(19): siRNA sense strand
caaagugcuucgggagaaa

SEQ ID NO: 1194033 - RNA, 19 nt, Homo sapiens
  misc_RNA (1)...(19): siRNA sense strand
cauaauggccuccuuacug

SEQ ID NO: 1194034 - RNA, 19 nt, Homo sapiens
  misc_RNA (1)...(19): siRNA sense strand
agacaugacuaucaagaag

SEQ ID NO: 1194035 - RNA, 19 nt, Homo sapiens
  misc_RNA (1)...(19): siRNA sense strand
gggcacagcaggaacaguu

SEQ ID NO: 1194036 - RNA, 19 nt, Homo sapiens
  misc_RNA (1)...(19): siRNA sense strand
caaacaauuucagcugaug

SEQ ID NO: 1194037 - RNA, 19 nt, Homo sapiens
  misc_RNA (1)...(19): siRNA sense strand
ucacugcccuccagaacau

SEQ ID NO: 1194038 - RNA, 19 nt, Homo sapiens
  misc_RNA (1)...(19): siRNA sense strand
gcaacuugaagauaacauu

SEQ ID NO: 1194039 - RNA, 19 nt, Homo sapiens
  misc_RNA (1)...(19): siRNA sense strand
gaaggcgucuccaagucau

SEQ ID NO: 1194040 - RNA, 19 nt, Homo sapiens
  misc_RNA (1)...(19): siRNA sense strand
gaugaugaccaugggauuu

SEQ ID NO: 1194041 - RNA, 19 nt, Homo sapiens
  misc_RNA (1)...(19): siRNA sense strand
gaacgcgcaagcaugauug

SEQ ID NO: 1194042 - RNA, 19 nt, Homo sapiens
  misc_RNA (1)...(19): siRNA sense strand
ugacgagcaugagaaagaa

SEQ ID NO: 1194043 - RNA, 19 nt, Homo sapiens
  misc_RNA (1)...(19): siRNA sense strand
gccaggccgucaagaagaa

SEQ ID NO: 1194044 - RNA, 19 nt, Homo sapiens
  misc_RNA (1)...(19): siRNA sense strand
aaacgugggcccuuaucua

SEQ ID NO: 1194045 - RNA, 19 nt, Homo sapiens
  misc_RNA (1)...(19): siRNA sense strand
aaagaggcagacugaaaua

SEQ ID NO: 1194046 - RNA, 19 nt, Homo sapiens
  misc_RNA (1)...(19): siRNA sense strand
gagagaauggaugauagua

SEQ ID NO: 1194047 - RNA, 19 nt, Homo sapiens
  misc_RNA (1)...(19): siRNA sense strand
gcauggacaacaucaguga

SEQ ID NO: 1194048 - RNA, 19 nt, Homo sapiens
  misc_RNA (1)...(19): siRNA sense strand
acaaccagcucacgguguu

SEQ ID NO: 1194049 - RNA, 19 nt, Homo sapiens
  misc_RNA (1)...(19): siRNA sense strand
gaacguacaauggaacauc

SEQ ID NO: 1194050 - RNA, 19 nt, Homo sapiens
  misc_RNA (1)...(19): siRNA sense strand
cuagagaaacugaaggaaa

SEQ ID NO: 1194051 - RNA, 19 nt, Homo sapiens
  misc_RNA (1)...(19): siRNA sense strand
ggaugacgagcaugagaaa

SEQ ID NO: 1194052 - RNA, 19 nt, Homo sapiens
  misc_RNA (1)...(19): siRNA sense strand
uagccgagcagguggauaa

SEQ ID NO: 1194053 - RNA, 19 nt, Homo sapiens
  misc_RNA (1)...(19): siRNA sense strand
acucuggucuggacgaauu

SEQ ID NO: 1194054 - RNA, 19 nt, Homo sapiens
  misc_RNA (1)...(19): siRNA sense strand
aauuucagcugauggagaa

SEQ ID NO: 1194055 - RNA, 19 nt, Homo sapiens
  misc_RNA (1)...(19): siRNA sense strand
gagaagggcacagcaggaa

SEQ ID NO: 1194056 - RNA, 19 nt, Homo sapiens
  misc_RNA (1)...(19): siRNA sense strand
gcuaaaggaaggugaguca

SEQ ID NO: 1194057 - RNA, 19 nt, Homo sapiens
  misc_RNA (1)...(19): siRNA sense strand
caaaacugcuccagggaaa

SEQ ID NO: 1194058 - RNA, 19 nt, Homo sapiens
  misc_RNA (1)...(19): siRNA sense strand
ggauguauuaccaaagauu

SEQ ID NO: 1194059 - RNA, 19 nt, Homo sapiens
  misc_RNA (1)...(19): siRNA sense strand
ccaaugcccuccaggaaaa

SEQ ID NO: 1194060 - RNA, 19 nt, Homo sapiens
  misc_RNA (1)...(19): siRNA sense strand
gcagccaggccgucaagaa

SEQ ID NO: 1194061 - RNA, 19 nt, Homo sapiens
  misc_RNA (1)...(19): siRNA sense strand
ggauggaacguacaaugga

SEQ ID NO: 1194062 - RNA, 19 nt, Homo sapiens
  misc_RNA (1)...(19): siRNA sense strand
aaacugaaggaaacagaaa

SEQ ID NO: 1194063 - RNA, 19 nt, Homo sapiens
  misc_RNA (1)...(19): siRNA sense strand
cagcuugcagccugacuua

SEQ ID NO: 1194064 - RNA, 19 nt, Homo sapiens
  misc_RNA (1)...(19): siRNA sense strand
ccaaugauuucagcaugga

SEQ ID NO: 1194065 - RNA, 19 nt, Homo sapiens
  misc_RNA (1)...(19): siRNA sense strand
gaagggcacagcaggaaca

SEQ ID NO: 1194066 - RNA, 19 nt, Homo sapiens
  misc_RNA (1)...(19): siRNA sense strand
gagaaugugcugcuaaagg

SEQ ID NO: 1194067 - RNA, 19 nt, Homo sapiens
  misc_RNA (1)...(19): siRNA sense strand
ggagucgggugggagaaug

SEQ ID NO: 1194068 - RNA, 19 nt, Homo sapiens
  misc_RNA (1)...(19): siRNA sense strand
gacaagccacugacuaauc

SEQ ID NO: 1194069 - RNA, 19 nt, Homo sapiens
  misc_RNA (1)...(19): siRNA sense strand
gccagaacccacugaaaga

SEQ ID NO: 1194070 - RNA, 19 nt, Homo sapiens
  misc_RNA (1)...(19): siRNA sense strand
ccaagucauuuagugauca

SEQ ID NO: 1194071 - RNA, 19 nt, Homo sapiens
  misc_RNA (1)...(19): siRNA sense strand
aggaagaagacaacgaaua

SEQ ID NO: 1194072 - RNA, 19 nt, Homo sapiens
  misc_RNA (1)...(19): siRNA sense strand
agggauguauuaccaaaga

SEQ ID NO: 1194073 - RNA, 19 nt, Homo sapiens
  misc_RNA (1)...(19): siRNA sense strand
gaccaucccuccgcuuucu

SEQ ID NO: 1194074 - RNA, 19 nt, Homo sapiens
  misc_RNA (1)...(19): siRNA sense strand
ccaggaaacagcggacuuu

SEQ ID NO: 1194075 - RNA, 19 nt, Homo sapiens
  misc_RNA (1)...(19): siRNA sense strand
cagcgagccuucuaaacgu

SEQ ID NO: 1194076 - RNA, 19 nt, Homo sapiens
  misc_RNA (1)...(19): siRNA sense strand
ggaggcggcagucugaaga

SEQ ID NO: 1194077 - RNA, 19 nt, Homo sapiens
  misc_RNA (1)...(19): siRNA sense strand
guacaaggagcgcaaagag

SEQ ID NO: 1194078 - RNA, 19 nt, Homo sapiens
  misc_RNA (1)...(19): siRNA sense strand
acaucgagcucaguaauag

SEQ ID NO: 1194079 - RNA, 19 nt, Homo sapiens
  misc_RNA (1)...(19): siRNA sense strand
caaagagcaaaucauccua

SEQ ID NO: 1194080 - RNA, 19 nt, Homo sapiens
  misc_RNA (1)...(19): siRNA sense strand
gggaagaggagcugaagag

SEQ ID NO: 1194081 - RNA, 19 nt, Homo sapiens
  misc_RNA (1)...(19): siRNA sense strand
ccaaugagacaaccaaugc

SEQ ID NO: 1194082 - RNA, 19 nt, Homo sapiens
  misc_RNA (1)...(19): siRNA sense strand
caacuugaagauaacauuc

SEQ ID NO: 1194083 - RNA, 19 nt, Homo sapiens
  misc_RNA (1)...(19): siRNA sense strand
cuacagcgagccuucuaaa

SEQ ID NO: 1194084 - RNA, 19 nt, Homo sapiens
  misc_RNA (1)...(19): siRNA sense strand
agagaaaagggauguauua

SEQ ID NO: 1194085 - RNA, 19 nt, Homo sapiens
  misc_RNA (1)...(19): siRNA sense strand
gacccuauccaaugauuuc

SEQ ID NO: 1194086 - RNA, 19 nt, Homo sapiens
  misc_RNA (1)...(19): siRNA sense strand
cucaagaucugucaauguc

SEQ ID NO: 1194087 - RNA, 19 nt, Homo sapiens
  misc_RNA (1)...(19): siRNA sense strand
gaacaauacugcauuagaa

SEQ ID NO: 1194088 - RNA, 19 nt, Homo sapiens
  misc_RNA (1)...(19): siRNA sense strand
ggaagaagacaacgaauaa

SEQ ID NO: 1194089 - RNA, 19 nt, Homo sapiens
  misc_RNA (1)...(19): siRNA sense strand
ggauaaagcuguguccaaa

SEQ ID NO: 1194090 - RNA, 19 nt, Homo sapiens
  misc_RNA (1)...(19): siRNA sense strand
ucacagagcagauagauuu

SEQ ID NO: 1194091 - RNA, 19 nt, Homo sapiens
  misc_RNA (1)...(19): siRNA sense strand
ggauggagaugcaguaaau

SEQ ID NO: 1194092 - RNA, 19 nt, Homo sapiens
  misc_RNA (1)...(19): siRNA sense strand
ucaagaaucugacgugaug

SEQ ID NO: 1194093 - RNA, 19 nt, Homo sapiens
  misc_RNA (1)...(19): siRNA sense strand
gaagcuauuucagcaagua

SEQ ID NO: 1194094 - RNA, 19 nt, Homo sapiens
  misc_RNA (1)...(19): siRNA sense strand
gaaagaggcagacugaaau

SEQ ID NO: 1194095 - RNA, 19 nt, Homo sapiens
  misc_RNA (1)...(19): siRNA sense strand
gaaagaacaauacugcauu

SEQ ID NO: 1194096 - RNA, 19 nt, Homo sapiens
  misc_RNA (1)...(19): siRNA sense strand
gaaauacaaacgcuagaaa

SEQ ID NO: 1194097 - RNA, 19 nt, Homo sapiens
  misc_RNA (1)...(19): siRNA sense strand
gagaauggaugauaguagu

SEQ ID NO: 1194098 - RNA, 19 nt, Homo sapiens
  misc_RNA (1)...(19): siRNA sense strand
caagaagaauccuggcauu

SEQ ID NO: 1194099 - RNA, 19 nt, Homo sapiens
  misc_RNA (1)...(19): siRNA sense strand
gagcaaaucauccuagaga

SEQ ID NO: 1194100 - RNA, 19 nt, Homo sapiens
  misc_RNA (1)...(19): siRNA sense strand
gaggcagacugaaauagaa

SEQ ID NO: 1194101 - RNA, 19 nt, Homo sapiens
  misc_RNA (1)...(19): siRNA sense strand
gcaaaucauccuagagaaa

SEQ ID NO: 1194102 - RNA, 19 nt, Homo sapiens
  misc_RNA (1)...(19): siRNA sense strand
gggagaaugugcugcuaaa

SEQ ID NO: 1194103 - RNA, 19 nt, Homo sapiens
  misc_RNA (1)...(19): siRNA sense strand
gaagaauccuggcauugca

SEQ ID NO: 1194104 - RNA, 19 nt, Homo sapiens
  misc_RNA (1)...(19): siRNA sense strand
gaaauugaggugucuguug

SEQ ID NO: 1194105 - RNA, 19 nt, Homo sapiens
  misc_RNA (1)...(19): siRNA sense strand
uacaaacgcuagaaaguga

SEQ ID NO: 1194106 - RNA, 19 nt, Homo sapiens
  misc_RNA (1)...(19): siRNA sense strand
gaggaugaguucagaguca

SEQ ID NO: 1194107 - RNA, 19 nt, Homo sapiens
  misc_RNA (1)...(19): siRNA sense strand
gcaaacaauuucagcugau

SEQ ID NO: 1194108 - RNA, 19 nt, Homo sapiens
  misc_RNA (1)...(19): siRNA sense strand
ccaauccucuguucacgaa

SEQ ID NO: 1194109 - RNA, 19 nt, Homo sapiens
  misc_RNA (1)...(19): siRNA sense strand
gcaggcaccuccucacauc

SEQ ID NO: 1194110 - RNA, 19 nt, Homo sapiens
  misc_RNA (1)...(19): siRNA sense strand
gauggaacguacaauggaa

SEQ ID NO: 1194111 - RNA, 19 nt, Homo sapiens
  misc_RNA (1)...(19): siRNA sense strand
gaaaagggauguauuacca

SEQ ID NO: 1194112 - RNA, 19 nt, Homo sapiens
  misc_RNA (1)...(19): siRNA sense strand
ccaaagugcuucgggagaa

SEQ ID NO: 1194113 - RNA, 19 nt, Homo sapiens
  misc_RNA (1)...(19): siRNA sense strand
agaaugugcugcuaaagga

SEQ ID NO: 1194114 - RNA, 19 nt, Homo sapiens
  misc_RNA (1)...(19): siRNA sense strand
ggaggaagaagacaacgaa

SEQ ID NO: 1194115 - RNA, 19 nt, Homo sapiens
  misc_RNA (1)...(19): siRNA sense strand
ggaaacagcggacuuuguc

SEQ ID NO: 1194116 - RNA, 19 nt, Homo sapiens
  misc_RNA (1)...(19): siRNA sense strand
gcgcaagcaugauugacaa

SEQ ID NO: 1194117 - RNA, 19 nt, Homo sapiens
  misc_RNA (1)...(19): siRNA sense strand
gcccagacaugacuaucaa

SEQ ID NO: 1194118 - RNA, 19 nt, Homo sapiens
  misc_RNA (1)...(19): siRNA sense strand
aaagaaagaggcagacuga

SEQ ID NO: 1194119 - RNA, 19 nt, Homo sapiens
  misc_RNA (1)...(19): siRNA sense strand
ucacuguggucaaggauga

SEQ ID NO: 1194120 - RNA, 19 nt, Homo sapiens
  misc_RNA (1)...(19): siRNA sense strand
auaauggccuccuuacuga

SEQ ID NO: 1194121 - RNA, 19 nt, Homo sapiens
  misc_RNA (1)...(19): siRNA sense strand
ggcugaggauggagaauuu

SEQ ID NO: 1194122 - RNA, 19 nt, Homo sapiens
  misc_RNA (1)...(19): siRNA sense strand
aaagggauguauuaccaaa

SEQ ID NO: 1194123 - RNA, 19 nt, Homo sapiens
  misc_RNA (1)...(19): siRNA sense strand
agaaagaggcagacugaaa

SEQ ID NO: 1194124 - RNA, 19 nt, Homo sapiens
  misc_RNA (1)...(19): siRNA sense strand
ugaagcgacuguagaggaa

SEQ ID NO: 1194125 - RNA, 19 nt, Homo sapiens
  misc_RNA (1)...(19): siRNA sense strand
cagacaagccacugacuaa

SEQ ID NO: 1194126 - RNA, 19 nt, Homo sapiens
  misc_RNA (1)...(19): siRNA sense strand
gagacccuauccaaugauu

SEQ ID NO: 1194127 - RNA, 19 nt, Homo sapiens
  misc_RNA (1)...(19): siRNA sense strand
gcgagagaauggaugauag

SEQ ID NO: 1194128 - RNA, 19 nt, Homo sapiens
  misc_RNA (1)...(19): siRNA sense strand
uagagaaacugaaggaaac

SEQ ID NO: 1194129 - RNA, 19 nt, Homo sapiens
  misc_RNA (1)...(19): siRNA sense strand
auaaugauguugccagaga

SEQ ID NO: 1194130 - RNA, 19 nt, Homo sapiens
  misc_RNA (1)...(19): siRNA sense strand
gaaacugaaggaaacagaa

SEQ ID NO: 1194131 - RNA, 19 nt, Homo sapiens
  misc_RNA (1)...(19): siRNA sense strand
gaggcuggagcaagaaaua

SEQ ID NO: 1194132 - RNA, 19 nt, Homo sapiens
  misc_RNA (1)...(19): siRNA sense strand
caaagugcuucgggagaaa

SEQ ID NO: 1194133 - RNA, 19 nt, Homo sapiens
  misc_RNA (1)...(19): siRNA sense strand
cauaauggccuccuuacug

SEQ ID NO: 1194134 - RNA, 19 nt, Homo sapiens
  misc_RNA (1)...(19): siRNA sense strand
agacaugacuaucaagaag

SEQ ID NO: 1194135 - RNA, 19 nt, Homo sapiens
  misc_RNA (1)...(19): siRNA sense strand
gggcacagcaggaacaguu

SEQ ID NO: 1194136 - RNA, 19 nt, Homo sapiens
  misc_RNA (1)...(19): siRNA sense strand
caaacaauuucagcugaug

SEQ ID NO: 1194137 - RNA, 19 nt, Homo sapiens
  misc_RNA (1)...(19): siRNA sense strand
ucacugcccuccagaacau

SEQ ID NO: 1194138 - RNA, 19 nt, Homo sapiens
  misc_RNA (1)...(19): siRNA sense strand
gcaacuugaagauaacauu

SEQ ID NO: 1194139 - RNA, 19 nt, Homo sapiens
  misc_RNA (1)...(19): siRNA sense strand
gaaggcgucuccaagucau

SEQ ID NO: 1194140 - RNA, 19 nt, Homo sapiens
  misc_RNA (1)...(19): siRNA sense strand
gaugaugaccaugggauuu

SEQ ID NO: 1194141 - RNA, 19 nt, Homo sapiens
  misc_RNA (1)...(19): siRNA sense strand
gaacgcgcaagcaugauug

SEQ ID NO: 1194142 - RNA, 19 nt, Homo sapiens
  misc_RNA (1)...(19): siRNA sense strand
ugacgagcaugagaaagaa

SEQ ID NO: 1194143 - RNA, 19 nt, Homo sapiens
  misc_RNA (1)...(19): siRNA sense strand
gccaggccgucaagaagaa

SEQ ID NO: 1194144 - RNA, 19 nt, Homo sapiens
  misc_RNA (1)...(19): siRNA sense strand
aaacgugggcccuuaucua

SEQ ID NO: 1194145 - RNA, 19 nt, Homo sapiens
  misc_RNA (1)...(19): siRNA sense strand
aaagaggcagacugaaaua

SEQ ID NO: 1194146 - RNA, 19 nt, Homo sapiens
  misc_RNA (1)...(19): siRNA sense strand
gagagaauggaugauagua

SEQ ID NO: 1194147 - RNA, 19 nt, Homo sapiens
  misc_RNA (1)...(19): siRNA sense strand
gcauggacaacaucaguga

SEQ ID NO: 1194148 - RNA, 19 nt, Homo sapiens
  misc_RNA (1)...(19): siRNA sense strand
acaaccagcucacgguguu

SEQ ID NO: 1194149 - RNA, 19 nt, Homo sapiens
  misc_RNA (1)...(19): siRNA sense strand
gaacguacaauggaacauc

SEQ ID NO: 1194150 - RNA, 19 nt, Homo sapiens
  misc_RNA (1)...(19): siRNA sense strand
cuagagaaacugaaggaaa

SEQ ID NO: 1194151 - RNA, 19 nt, Homo sapiens
  misc_RNA (1)...(19): siRNA sense strand
ggaugacgagcaugagaaa

SEQ ID NO: 1194152 - RNA, 19 nt, Homo sapiens
  misc_RNA (1)...(19): siRNA sense strand
uagccgagcagguggauaa

SEQ ID NO: 1194153 - RNA, 19 nt, Homo sapiens
  misc_RNA (1)...(19): siRNA sense strand
acucuggucuggacgaauu

SEQ ID NO: 1194154 - RNA, 19 nt, Homo sapiens
  misc_RNA (1)...(19): siRNA sense strand
aauuucagcugauggagaa

SEQ ID NO: 1194155 - RNA, 19 nt, Homo sapiens
  misc_RNA (1)...(19): siRNA sense strand
gagaagggcacagcaggaa

SEQ ID NO: 1194156 - RNA, 19 nt, Homo sapiens
  misc_RNA (1)...(19): siRNA sense strand
gcuaaaggaaggugaguca

SEQ ID NO: 1194157 - RNA, 19 nt, Homo sapiens
  misc_RNA (1)...(19): siRNA sense strand
caaaacugcuccagggaaa

SEQ ID NO: 1194158 - RNA, 19 nt, Homo sapiens
  misc_RNA (1)...(19): siRNA sense strand
ggauguauuaccaaagauu

SEQ ID NO: 1194159 - RNA, 19 nt, Homo sapiens
  misc_RNA (1)...(19): siRNA sense strand
ccaaugcccuccaggaaaa

SEQ ID NO: 1194160 - RNA, 19 nt, Homo sapiens
  misc_RNA (1)...(19): siRNA sense strand
gcagccaggccgucaagaa

SEQ ID NO: 1194161 - RNA, 19 nt, Homo sapiens
  misc_RNA (1)...(19): siRNA sense strand
ggauggaacguacaaugga

SEQ ID NO: 1194162 - RNA, 19 nt, Homo sapiens
  misc_RNA (1)...(19): siRNA sense strand
aaacugaaggaaacagaaa

SEQ ID NO: 1194163 - RNA, 19 nt, Homo sapiens
  misc_RNA (1)...(19): siRNA sense strand
cagcuugcagccugacuua

SEQ ID NO: 1194164 - RNA, 19 nt, Homo sapiens
  misc_RNA (1)...(19): siRNA sense strand
ccaaugauuucagcaugga

SEQ ID NO: 1194165 - RNA, 19 nt, Homo sapiens
  misc_RNA (1)...(19): siRNA sense strand
gaagggcacagcaggaaca

SEQ ID NO: 1194166 - RNA, 19 nt, Homo sapiens
  misc_RNA (1)...(19): siRNA sense strand
gagaaugugcugcuaaagg

SEQ ID NO: 1194167 - RNA, 19 nt, Homo sapiens
  misc_RNA (1)...(19): siRNA sense strand
ggagucgggugggagaaug

SEQ ID NO: 1194168 - RNA, 19 nt, Homo sapiens
  misc_RNA (1)...(19): siRNA sense strand
gacaagccacugacuaauc

SEQ ID NO: 1194169 - RNA, 19 nt, Homo sapiens
  misc_RNA (1)...(19): siRNA sense strand
gccagaacccacugaaaga

SEQ ID NO: 1194170 - RNA, 19 nt, Homo sapiens
  misc_RNA (1)...(19): siRNA sense strand
ccaagucauuuagugauca

SEQ ID NO: 1194171 - RNA, 19 nt, Homo sapiens
  misc_RNA (1)...(19): siRNA sense strand
aggaagaagacaacgaaua

SEQ ID NO: 1194172 - RNA, 19 nt, Homo sapiens
  misc_RNA (1)...(19): siRNA sense strand
agggauguauuaccaaaga

SEQ ID NO: 1194173 - RNA, 19 nt, Homo sapiens
  misc_RNA (1)...(19): siRNA sense strand
gaccaucccuccgcuuucu

SEQ ID NO: 1194174 - RNA, 19 nt, Homo sapiens
  misc_RNA (1)...(19): siRNA sense strand
ccaggaaacagcggacuuu

SEQ ID NO: 1194175 - RNA, 19 nt, Homo sapiens
  misc_RNA (1)...(19): siRNA sense strand
cagcgagccuucuaaacgu

SEQ ID NO: 1194176 - RNA, 19 nt, Homo sapiens
  misc_RNA (1)...(19): siRNA sense strand
ggaggcggcagucugaaga

SEQ ID NO: 1194177 - RNA, 19 nt, Homo sapiens
  misc_RNA (1)...(19): siRNA sense strand
guacaaggagcgcaaagag

SEQ ID NO: 1194178 - RNA, 19 nt, Homo sapiens
  misc_RNA (1)...(19): siRNA sense strand
acaucgagcucaguaauag

SEQ ID NO: 1194179 - RNA, 19 nt, Homo sapiens
  misc_RNA (1)...(19): siRNA sense strand
caaagagcaaaucauccua

SEQ ID NO: 1194180 - RNA, 19 nt, Homo sapiens
  misc_RNA (1)...(19): siRNA sense strand
gggaagaggagcugaagag

SEQ ID NO: 1194181 - RNA, 19 nt, Homo sapiens
  misc_RNA (1)...(19): siRNA sense strand
ccaaugagacaaccaaugc

SEQ ID NO: 1194182 - RNA, 19 nt, Homo sapiens
  misc_RNA (1)...(19): siRNA sense strand
caacuugaagauaacauuc

SEQ ID NO: 1194183 - RNA, 19 nt, Homo sapiens
  misc_RNA (1)...(19): siRNA sense strand
cuacagcgagccuucuaaa

SEQ ID NO: 1194184 - RNA, 19 nt, Homo sapiens
  misc_RNA (1)...(19): siRNA sense strand
agagaaaagggauguauua

SEQ ID NO: 1194185 - RNA, 19 nt, Homo sapiens
  misc_RNA (1)...(19): siRNA sense strand
gacccuauccaaugauuuc

SEQ ID NO: 1194186 - RNA, 19 nt, Homo sapiens
  misc_RNA (1)...(19): siRNA sense strand
cucaagaucugucaauguc

SEQ ID NO: 1194187 - RNA, 19 nt, Homo sapiens
  misc_RNA (1)...(19): siRNA sense strand
ugagagggcuugcaaagac

SEQ ID NO: 1194188 - RNA, 19 nt, Homo sapiens
  misc_RNA (1)...(19): siRNA sense strand
gacaccacguucaccaaga

SEQ ID NO: 1194189 - RNA, 19 nt, Homo sapiens
  misc_RNA (1)...(19): siRNA sense strand
caacgugaaccuggcauau

SEQ ID NO: 1194190 - RNA, 19 nt, Homo sapiens
  misc_RNA (1)...(19): siRNA sense strand
acgccucgcucaggaagua

SEQ ID NO: 1194191 - RNA, 19 nt, Homo sapiens
  misc_RNA (1)...(19): siRNA sense strand
acaccacguucaccaagau

SEQ ID NO: 1194192 - RNA, 19 nt, Homo sapiens
  misc_RNA (1)...(19): siRNA sense strand
gcugagagggcuugcaaag

SEQ ID NO: 1194193 - RNA, 19 nt, Homo sapiens
  misc_RNA (1)...(19): siRNA sense strand
ggccugccguaccacacua

SEQ ID NO: 1194194 - RNA, 19 nt, Homo sapiens
  misc_RNA (1)...(19): siRNA sense strand
cagcugagagggcuugcaa

SEQ ID NO: 1194195 - RNA, 19 nt, Homo sapiens
  misc_RNA (1)...(19): siRNA sense strand
ccacuuucgugcaguacca

SEQ ID NO: 1194196 - RNA, 19 nt, Homo sapiens
  misc_RNA (1)...(19): siRNA sense strand
uguccucgcccuacauuga

SEQ ID NO: 1194197 - RNA, 19 nt, Homo sapiens
  misc_RNA (1)...(19): siRNA sense strand
cagaaggacaccacguuca

SEQ ID NO: 1194198 - RNA, 19 nt, Homo sapiens
  misc_RNA (1)...(19): siRNA sense strand
ggccaccuaugaccaguac

SEQ ID NO: 1194199 - RNA, 19 nt, Homo sapiens
  misc_RNA (1)...(19): siRNA sense strand
ccaacgugaaccuggcaua

SEQ ID NO: 1194200 - RNA, 19 nt, Homo sapiens
  misc_RNA (1)...(19): siRNA sense strand
acgugaaccuggcauaucu

SEQ ID NO: 1194201 - RNA, 19 nt, Homo sapiens
  misc_RNA (1)...(19): siRNA sense strand
guacccaccggccaccuau

SEQ ID NO: 1194202 - RNA, 19 nt, Homo sapiens
  misc_RNA (1)...(19): siRNA sense strand
gaggaggccguggucauca

SEQ ID NO: 1194203 - RNA, 19 nt, Homo sapiens
  misc_RNA (1)...(19): siRNA sense strand
ugagagggcuugcaaagac

SEQ ID NO: 1194204 - RNA, 19 nt, Homo sapiens
  misc_RNA (1)...(19): siRNA sense strand
gacaccacguucaccaaga

SEQ ID NO: 1194205 - RNA, 19 nt, Homo sapiens
  misc_RNA (1)...(19): siRNA sense strand
caacgugaaccuggcauau

SEQ ID NO: 1194206 - RNA, 19 nt, Homo sapiens
  misc_RNA (1)...(19): siRNA sense strand
acgccucgcucaggaagua

SEQ ID NO: 1194207 - RNA, 19 nt, Homo sapiens
  misc_RNA (1)...(19): siRNA sense strand
acaccacguucaccaagau

SEQ ID NO: 1194208 - RNA, 19 nt, Homo sapiens
  misc_RNA (1)...(19): siRNA sense strand
gcugagagggcuugcaaag

SEQ ID NO: 1194209 - RNA, 19 nt, Homo sapiens
  misc_RNA (1)...(19): siRNA sense strand
ggccugccguaccacacua

SEQ ID NO: 1194210 - RNA, 19 nt, Homo sapiens
  misc_RNA (1)...(19): siRNA sense strand
cagcugagagggcuugcaa

SEQ ID NO: 1194211 - RNA, 19 nt, Homo sapiens
  misc_RNA (1)...(19): siRNA sense strand
cagaaggacaccacguuca

SEQ ID NO: 1194212 - RNA, 19 nt, Homo sapiens
  misc_RNA (1)...(19): siRNA sense strand
ccaacgugaaccuggcaua

SEQ ID NO: 1194213 - RNA, 19 nt, Homo sapiens
  misc_RNA (1)...(19): siRNA sense strand
acgugaaccuggcauaucu

SEQ ID NO: 1194214 - RNA, 19 nt, Homo sapiens
  misc_RNA (1)...(19): siRNA sense strand
gaggaggccguggucauca

SEQ ID NO: 1194215 - RNA, 19 nt, Homo sapiens
  misc_RNA (1)...(19): siRNA sense strand
gaacucgacuugucugaaa

SEQ ID NO: 1194216 - RNA, 19 nt, Homo sapiens
  misc_RNA (1)...(19): siRNA sense strand
gagcacaucugcccugaaa

SEQ ID NO: 1194217 - RNA, 19 nt, Homo sapiens
  misc_RNA (1)...(19): siRNA sense strand
ggaaggaacuagucuuucu

SEQ ID NO: 1194218 - RNA, 19 nt, Homo sapiens
  misc_RNA (1)...(19): siRNA sense strand
ugacgaagcuuguccagau

SEQ ID NO: 1194219 - RNA, 19 nt, Homo sapiens
  misc_RNA (1)...(19): siRNA sense strand
ggaguuguccgcuguguuu

SEQ ID NO: 1194220 - RNA, 19 nt, Homo sapiens
  misc_RNA (1)...(19): siRNA sense strand
caagagcuggcauuuguua

SEQ ID NO: 1194221 - RNA, 19 nt, Homo sapiens
  misc_RNA (1)...(19): siRNA sense strand
gcacaucugcccugaaaga

SEQ ID NO: 1194222 - RNA, 19 nt, Homo sapiens
  misc_RNA (1)...(19): siRNA sense strand
gaagaaggcgauccaacaa

SEQ ID NO: 1194223 - RNA, 19 nt, Homo sapiens
  misc_RNA (1)...(19): siRNA sense strand
ggaagaaggcgauccaaca

SEQ ID NO: 1194224 - RNA, 19 nt, Homo sapiens
  misc_RNA (1)...(19): siRNA sense strand
ucagcuaguuggauucuuu

SEQ ID NO: 1194225 - RNA, 19 nt, Homo sapiens
  misc_RNA (1)...(19): siRNA sense strand
gacaaggucucuagcaucu

SEQ ID NO: 1194226 - RNA, 19 nt, Homo sapiens
  misc_RNA (1)...(19): siRNA sense strand
gcaagcgguuucuggauca

SEQ ID NO: 1194227 - RNA, 19 nt, Homo sapiens
  misc_RNA (1)...(19): siRNA sense strand
agaaggcgauccaacaaga

SEQ ID NO: 1194228 - RNA, 19 nt, Homo sapiens
  misc_RNA (1)...(19): siRNA sense strand
ggaaauggccucaggucau

SEQ ID NO: 1194229 - RNA, 19 nt, Homo sapiens
  misc_RNA (1)...(19): siRNA sense strand
uaugaugguuccaagguaa

SEQ ID NO: 1194230 - RNA, 19 nt, Homo sapiens
  misc_RNA (1)...(19): siRNA sense strand
gaccaaagaggaagccauu

SEQ ID NO: 1194231 - RNA, 19 nt, Homo sapiens
  misc_RNA (1)...(19): siRNA sense strand
aagaagaacucgacuuguc

SEQ ID NO: 1194232 - RNA, 19 nt, Homo sapiens
  misc_RNA (1)...(19): siRNA sense strand
gagcuggcauuuguuacuu

SEQ ID NO: 1194233 - RNA, 19 nt, Homo sapiens
  misc_RNA (1)...(19): siRNA sense strand
ggaacuagucuuucuccaa

SEQ ID NO: 1194234 - RNA, 19 nt, Homo sapiens
  misc_RNA (1)...(19): siRNA sense strand
ccauuagucuccacgaguu

SEQ ID NO: 1194235 - RNA, 19 nt, Homo sapiens
  misc_RNA (1)...(19): siRNA sense strand
gaaggcagcccgcauucug

SEQ ID NO: 1194236 - RNA, 19 nt, Homo sapiens
  misc_RNA (1)...(19): siRNA sense strand
caacaagagcuggcauuug

SEQ ID NO: 1194237 - RNA, 19 nt, Homo sapiens
  misc_RNA (1)...(19): siRNA sense strand
uauaaaggacugauuguca

SEQ ID NO: 1194238 - RNA, 19 nt, Homo sapiens
  misc_RNA (1)...(19): siRNA sense strand
uggaucagcuaguuggauu

SEQ ID NO: 1194239 - RNA, 19 nt, Homo sapiens
  misc_RNA (1)...(19): siRNA sense strand
gccaugaucuggagagcau

SEQ ID NO: 1194240 - RNA, 19 nt, Homo sapiens
  misc_RNA (1)...(19): siRNA sense strand
ggacagauugcuggaguug

SEQ ID NO: 1194241 - RNA, 19 nt, Homo sapiens
  misc_RNA (1)...(19): siRNA sense strand
ugauggagauuaccuuugg

SEQ ID NO: 1194242 - RNA, 19 nt, Homo sapiens
  misc_RNA (1)...(19): siRNA sense strand
ggaccuguuucccuagcuu

SEQ ID NO: 1194243 - RNA, 19 nt, Homo sapiens
  misc_RNA (1)...(19): siRNA sense strand
ccaaagaggaagccauuag

SEQ ID NO: 1194244 - RNA, 19 nt, Homo sapiens
  misc_RNA (1)...(19): siRNA sense strand
gacgaagcuuguccagaug

SEQ ID NO: 1194245 - RNA, 19 nt, Homo sapiens
  misc_RNA (1)...(19): siRNA sense strand
gcacggagugggacaccuu

SEQ ID NO: 1194246 - RNA, 19 nt, Homo sapiens
  misc_RNA (1)...(19): siRNA sense strand
ggaaggagaacggaugcuu

SEQ ID NO: 1194247 - RNA, 19 nt, Homo sapiens
  misc_RNA (1)...(19): siRNA sense strand
acagauugcuggaguuguc

SEQ ID NO: 1194248 - RNA, 19 nt, Homo sapiens
  misc_RNA (1)...(19): siRNA sense strand
ggagaacggaugcuugucu

SEQ ID NO: 1194249 - RNA, 19 nt, Homo sapiens
  misc_RNA (1)...(19): siRNA sense strand
caucugcccugaaagaaaa

SEQ ID NO: 1194250 - RNA, 19 nt, Homo sapiens
  misc_RNA (1)...(19): siRNA sense strand
ccaacaagagcuggcauuu

SEQ ID NO: 1194251 - RNA, 19 nt, Homo sapiens
  misc_RNA (1)...(19): siRNA sense strand
caaagaggaagccauuagu

SEQ ID NO: 1194252 - RNA, 19 nt, Homo sapiens
  misc_RNA (1)...(19): siRNA sense strand
gaaguuugccauaaaaguu

SEQ ID NO: 1194253 - RNA, 19 nt, Homo sapiens
  misc_RNA (1)...(19): siRNA sense strand
gaagaccauccuggccaua

SEQ ID NO: 1194254 - RNA, 19 nt, Homo sapiens
  misc_RNA (1)...(19): siRNA sense strand
aaacaccagugaucugcau

SEQ ID NO: 1194255 - RNA, 19 nt, Homo sapiens
  misc_RNA (1)...(19): siRNA sense strand
uuaugaugguuccaaggua

SEQ ID NO: 1194256 - RNA, 19 nt, Homo sapiens
  misc_RNA (1)...(19): siRNA sense strand
cauaaaaguugauggagau

SEQ ID NO: 1194257 - RNA, 19 nt, Homo sapiens
  misc_RNA (1)...(19): siRNA sense strand
cagcuaguuggauucuuua

SEQ ID NO: 1194258 - RNA, 19 nt, Homo sapiens
  misc_RNA (1)...(19): siRNA sense strand
ccgcuguguuucugacauu

SEQ ID NO: 1194259 - RNA, 19 nt, Homo sapiens
  misc_RNA (1)...(19): siRNA sense strand
cagauggcagggcuccuua

SEQ ID NO: 1194260 - RNA, 19 nt, Homo sapiens
  misc_RNA (1)...(19): siRNA sense strand
cuguggagcucccugaugu

SEQ ID NO: 1194261 - RNA, 19 nt, Homo sapiens
  misc_RNA (1)...(19): siRNA sense strand
ccgccaagguccugcuuca

SEQ ID NO: 1194262 - RNA, 19 nt, Homo sapiens
  misc_RNA (1)...(19): siRNA sense strand
ggagugggacaccuucauc

SEQ ID NO: 1194263 - RNA, 19 nt, Homo sapiens
  misc_RNA (1)...(19): siRNA sense strand
gaccuguuucccuagcuua

SEQ ID NO: 1194264 - RNA, 19 nt, Homo sapiens
  misc_RNA (1)...(19): siRNA sense strand
guccagauuaucccuguuu

SEQ ID NO: 1194265 - RNA, 19 nt, Homo sapiens
  misc_RNA (1)...(19): siRNA sense strand
cuggcugcauccucuauaa

SEQ ID NO: 1194266 - RNA, 19 nt, Homo sapiens
  misc_RNA (1)...(19): siRNA sense strand
guugauggagauuaccuuu

SEQ ID NO: 1194267 - RNA, 19 nt, Homo sapiens
  misc_RNA (1)...(19): siRNA sense strand
acacagccaucagcagcuu

SEQ ID NO: 1194268 - RNA, 19 nt, Homo sapiens
  misc_RNA (1)...(19): siRNA sense strand
cuguuucccuagcuuauga

SEQ ID NO: 1194269 - RNA, 19 nt, Homo sapiens
  misc_RNA (1)...(19): siRNA sense strand
gcuaguuggauucuuuaau

SEQ ID NO: 1194270 - RNA, 19 nt, Homo sapiens
  misc_RNA (1)...(19): siRNA sense strand
acaugugccuguuccagau

SEQ ID NO: 1194271 - RNA, 19 nt, Homo sapiens
  misc_RNA (1)...(19): siRNA sense strand
gaaggaacuagucuuucuc

SEQ ID NO: 1194272 - RNA, 19 nt, Homo sapiens
  misc_RNA (1)...(19): siRNA sense strand
gaugacaaggucucuagca

SEQ ID NO: 1194273 - RNA, 19 nt, Homo sapiens
  misc_RNA (1)...(19): siRNA sense strand
cagaugacaaggucucuag

SEQ ID NO: 1194274 - RNA, 19 nt, Homo sapiens
  misc_RNA (1)...(19): siRNA sense strand
gcaggacuccaggaugguu

SEQ ID NO: 1194275 - RNA, 19 nt, Homo sapiens
  misc_RNA (1)...(19): siRNA sense strand
ugacucuccuccuacucuu

SEQ ID NO: 1194276 - RNA, 19 nt, Homo sapiens
  misc_RNA (1)...(19): siRNA sense strand
gcugcauccucuauaaagg

SEQ ID NO: 1194277 - RNA, 19 nt, Homo sapiens
  misc_RNA (1)...(19): siRNA sense strand
gcgcucgccucacauucuc

SEQ ID NO: 1194278 - RNA, 19 nt, Homo sapiens
  misc_RNA (1)...(19): siRNA sense strand
cagcccagcaccauccaaa

SEQ ID NO: 1194279 - RNA, 19 nt, Homo sapiens
  misc_RNA (1)...(19): siRNA sense strand
ggacaccuucaucgagcaa

SEQ ID NO: 1194280 - RNA, 19 nt, Homo sapiens
  misc_RNA (1)...(19): siRNA sense strand
gcuggcugcauccucuaua

SEQ ID NO: 1194281 - RNA, 19 nt, Homo sapiens
  misc_RNA (1)...(19): siRNA sense strand
acaccagugaucugcauaa

SEQ ID NO: 1194282 - RNA, 19 nt, Homo sapiens
  misc_RNA (1)...(19): siRNA sense strand
caucgagcaaauucugaaa

SEQ ID NO: 1194283 - RNA, 19 nt, Homo sapiens
  misc_RNA (1)...(19): siRNA sense strand
uccagaggcucaggaagug

SEQ ID NO: 1194284 - RNA, 19 nt, Homo sapiens
  misc_RNA (1)...(19): siRNA sense strand
gggaaggaacuagucuuuc

SEQ ID NO: 1194285 - RNA, 19 nt, Homo sapiens
  misc_RNA (1)...(19): siRNA sense strand
gaguugcuuuguggacaga

SEQ ID NO: 1194286 - RNA, 19 nt, Homo sapiens
  misc_RNA (1)...(19): siRNA sense strand
guugcuuuguggacagauu

SEQ ID NO: 1194287 - RNA, 19 nt, Homo sapiens
  misc_RNA (1)...(19): siRNA sense strand
acaccuucaucgagcaaau

SEQ ID NO: 1194288 - RNA, 19 nt, Homo sapiens
  misc_RNA (1)...(19): siRNA sense strand
aaagaggaagccauuaguc

SEQ ID NO: 1194289 - RNA, 19 nt, Homo sapiens
  misc_RNA (1)...(19): siRNA sense strand
gaaggcgauccaacaagag

SEQ ID NO: 1194290 - RNA, 19 nt, Homo sapiens
  misc_RNA (1)...(19): siRNA sense strand
gguccugcuucaccgaaca

SEQ ID NO: 1194291 - RNA, 19 nt, Homo sapiens
  misc_RNA (1)...(19): siRNA sense strand
ggaguuguccgcuguguuu

SEQ ID NO: 1194292 - RNA, 19 nt, Homo sapiens
  misc_RNA (1)...(19): siRNA sense strand
caagagcuggcauuuguua

SEQ ID NO: 1194293 - RNA, 19 nt, Homo sapiens
  misc_RNA (1)...(19): siRNA sense strand
gaagaaggcgauccaacaa

SEQ ID NO: 1194294 - RNA, 19 nt, Homo sapiens
  misc_RNA (1)...(19): siRNA sense strand
ggaagaaggcgauccaaca

SEQ ID NO: 1194295 - RNA, 19 nt, Homo sapiens
  misc_RNA (1)...(19): siRNA sense strand
ucagcuaguuggauucuuu

SEQ ID NO: 1194296 - RNA, 19 nt, Homo sapiens
  misc_RNA (1)...(19): siRNA sense strand
gcaagcgguuucuggauca

SEQ ID NO: 1194297 - RNA, 19 nt, Homo sapiens
  misc_RNA (1)...(19): siRNA sense strand
uaugaugguuccaagguaa

SEQ ID NO: 1194298 - RNA, 19 nt, Homo sapiens
  misc_RNA (1)...(19): siRNA sense strand
agaaggcgauccaacaaga

SEQ ID NO: 1194299 - RNA, 19 nt, Homo sapiens
  misc_RNA (1)...(19): siRNA sense strand
gagcuggcauuuguuacuu

SEQ ID NO: 1194300 - RNA, 19 nt, Homo sapiens
  misc_RNA (1)...(19): siRNA sense strand
caacaagagcuggcauuug

SEQ ID NO: 1194301 - RNA, 19 nt, Homo sapiens
  misc_RNA (1)...(19): siRNA sense strand
uggaucagcuaguuggauu

SEQ ID NO: 1194302 - RNA, 19 nt, Homo sapiens
  misc_RNA (1)...(19): siRNA sense strand
ggacagauugcuggaguug

SEQ ID NO: 1194303 - RNA, 19 nt, Homo sapiens
  misc_RNA (1)...(19): siRNA sense strand
ugauggagauuaccuuugg

SEQ ID NO: 1194304 - RNA, 19 nt, Homo sapiens
  misc_RNA (1)...(19): siRNA sense strand
ggaccuguuucccuagcuu

SEQ ID NO: 1194305 - RNA, 19 nt, Homo sapiens
  misc_RNA (1)...(19): siRNA sense strand
gcacggagugggacaccuu

SEQ ID NO: 1194306 - RNA, 19 nt, Homo sapiens
  misc_RNA (1)...(19): siRNA sense strand
ccaacaagagcuggcauuu

SEQ ID NO: 1194307 - RNA, 19 nt, Homo sapiens
  misc_RNA (1)...(19): siRNA sense strand
acagauugcuggaguuguc

SEQ ID NO: 1194308 - RNA, 19 nt, Homo sapiens
  misc_RNA (1)...(19): siRNA sense strand
gaaguuugccauaaaaguu

SEQ ID NO: 1194309 - RNA, 19 nt, Homo sapiens
  misc_RNA (1)...(19): siRNA sense strand
aaacaccagugaucugcau

SEQ ID NO: 1194310 - RNA, 19 nt, Homo sapiens
  misc_RNA (1)...(19): siRNA sense strand
uuaugaugguuccaaggua

SEQ ID NO: 1194311 - RNA, 19 nt, Homo sapiens
  misc_RNA (1)...(19): siRNA sense strand
cauaaaaguugauggagau

SEQ ID NO: 1194312 - RNA, 19 nt, Homo sapiens
  misc_RNA (1)...(19): siRNA sense strand
cagcuaguuggauucuuua

SEQ ID NO: 1194313 - RNA, 19 nt, Homo sapiens
  misc_RNA (1)...(19): siRNA sense strand
ccgcuguguuucugacauu

SEQ ID NO: 1194314 - RNA, 19 nt, Homo sapiens
  misc_RNA (1)...(19): siRNA sense strand
cuguggagcucccugaugu

SEQ ID NO: 1194315 - RNA, 19 nt, Homo sapiens
  misc_RNA (1)...(19): siRNA sense strand
ggagugggacaccuucauc

SEQ ID NO: 1194316 - RNA, 19 nt, Homo sapiens
  misc_RNA (1)...(19): siRNA sense strand
gaccuguuucccuagcuua

SEQ ID NO: 1194317 - RNA, 19 nt, Homo sapiens
  misc_RNA (1)...(19): siRNA sense strand
guugauggagauuaccuuu

SEQ ID NO: 1194318 - RNA, 19 nt, Homo sapiens
  misc_RNA (1)...(19): siRNA sense strand
cuguuucccuagcuuauga

SEQ ID NO: 1194319 - RNA, 19 nt, Homo sapiens
  misc_RNA (1)...(19): siRNA sense strand
gcuaguuggauucuuuaau

SEQ ID NO: 1194320 - RNA, 19 nt, Homo sapiens
  misc_RNA (1)...(19): siRNA sense strand
ugacucuccuccuacucuu

SEQ ID NO: 1194321 - RNA, 19 nt, Homo sapiens
  misc_RNA (1)...(19): siRNA sense strand
ggacaccuucaucgagcaa

SEQ ID NO: 1194322 - RNA, 19 nt, Homo sapiens
  misc_RNA (1)...(19): siRNA sense strand
acaccagugaucugcauaa

SEQ ID NO: 1194323 - RNA, 19 nt, Homo sapiens
  misc_RNA (1)...(19): siRNA sense strand
gaguugcuuuguggacaga

SEQ ID NO: 1194324 - RNA, 19 nt, Homo sapiens
  misc_RNA (1)...(19): siRNA sense strand
caucgagcaaauucugaaa

SEQ ID NO: 1194325 - RNA, 19 nt, Homo sapiens
  misc_RNA (1)...(19): siRNA sense strand
guugcuuuguggacagauu

SEQ ID NO: 1194326 - RNA, 19 nt, Homo sapiens
  misc_RNA (1)...(19): siRNA sense strand
gaaggcgauccaacaagag

SEQ ID NO: 1194327 - RNA, 19 nt, Homo sapiens
  misc_RNA (1)...(19): siRNA sense strand
acaccuucaucgagcaaau

SEQ ID NO: 1194328 - RNA, 19 nt, Homo sapiens
  misc_RNA (1)...(19): siRNA sense strand
gaacucgacuugucugaaa

SEQ ID NO: 1194329 - RNA, 19 nt, Homo sapiens
  misc_RNA (1)...(19): siRNA sense strand
gagcacaucugcccugaaa

SEQ ID NO: 1194330 - RNA, 19 nt, Homo sapiens
  misc_RNA (1)...(19): siRNA sense strand
ggaaggaacuagucuuucu

SEQ ID NO: 1194331 - RNA, 19 nt, Homo sapiens
  misc_RNA (1)...(19): siRNA sense strand
ugacgaagcuuguccagau

SEQ ID NO: 1194332 - RNA, 19 nt, Homo sapiens
  misc_RNA (1)...(19): siRNA sense strand
ggaguuguccgcuguguuu

SEQ ID NO: 1194333 - RNA, 19 nt, Homo sapiens
  misc_RNA (1)...(19): siRNA sense strand
caagagcuggcauuuguua

SEQ ID NO: 1194334 - RNA, 19 nt, Homo sapiens
  misc_RNA (1)...(19): siRNA sense strand
gcacaucugcccugaaaga

SEQ ID NO: 1194335 - RNA, 19 nt, Homo sapiens
  misc_RNA (1)...(19): siRNA sense strand
gaagaaggcgauccaacaa

SEQ ID NO: 1194336 - RNA, 19 nt, Homo sapiens
  misc_RNA (1)...(19): siRNA sense strand
ggaagaaggcgauccaaca

SEQ ID NO: 1194337 - RNA, 19 nt, Homo sapiens
  misc_RNA (1)...(19): siRNA sense strand
ucagcuaguuggauucuuu

SEQ ID NO: 1194338 - RNA, 19 nt, Homo sapiens
  misc_RNA (1)...(19): siRNA sense strand
gacaaggucucuagcaucu

SEQ ID NO: 1194339 - RNA, 19 nt, Homo sapiens
  misc_RNA (1)...(19): siRNA sense strand
gcaagcgguuucuggauca

SEQ ID NO: 1194340 - RNA, 19 nt, Homo sapiens
  misc_RNA (1)...(19): siRNA sense strand
agaaggcgauccaacaaga

SEQ ID NO: 1194341 - RNA, 19 nt, Homo sapiens
  misc_RNA (1)...(19): siRNA sense strand
ggaaauggccucaggucau

SEQ ID NO: 1194342 - RNA, 19 nt, Homo sapiens
  misc_RNA (1)...(19): siRNA sense strand
uaugaugguuccaagguaa

SEQ ID NO: 1194343 - RNA, 19 nt, Homo sapiens
  misc_RNA (1)...(19): siRNA sense strand
gaccaaagaggaagccauu

SEQ ID NO: 1194344 - RNA, 19 nt, Homo sapiens
  misc_RNA (1)...(19): siRNA sense strand
aagaagaacucgacuuguc

SEQ ID NO: 1194345 - RNA, 19 nt, Homo sapiens
  misc_RNA (1)...(19): siRNA sense strand
gagcuggcauuuguuacuu

SEQ ID NO: 1194346 - RNA, 19 nt, Homo sapiens
  misc_RNA (1)...(19): siRNA sense strand
ggaacuagucuuucuccaa

SEQ ID NO: 1194347 - RNA, 19 nt, Homo sapiens
  misc_RNA (1)...(19): siRNA sense strand
ccauuagucuccacgaguu

SEQ ID NO: 1194348 - RNA, 19 nt, Homo sapiens
  misc_RNA (1)...(19): siRNA sense strand
gaaggcagcccgcauucug

SEQ ID NO: 1194349 - RNA, 19 nt, Homo sapiens
  misc_RNA (1)...(19): siRNA sense strand
caacaagagcuggcauuug

SEQ ID NO: 1194350 - RNA, 19 nt, Homo sapiens
  misc_RNA (1)...(19): siRNA sense strand
uauaaaggacugauuguca

SEQ ID NO: 1194351 - RNA, 19 nt, Homo sapiens
  misc_RNA (1)...(19): siRNA sense strand
uggaucagcuaguuggauu

SEQ ID NO: 1194352 - RNA, 19 nt, Homo sapiens
  misc_RNA (1)...(19): siRNA sense strand
gccaugaucuggagagcau

SEQ ID NO: 1194353 - RNA, 19 nt, Homo sapiens
  misc_RNA (1)...(19): siRNA sense strand
ggacagauugcuggaguug

SEQ ID NO: 1194354 - RNA, 19 nt, Homo sapiens
  misc_RNA (1)...(19): siRNA sense strand
ugauggagauuaccuuugg

SEQ ID NO: 1194355 - RNA, 19 nt, Homo sapiens
  misc_RNA (1)...(19): siRNA sense strand
ggaccuguuucccuagcuu

SEQ ID NO: 1194356 - RNA, 19 nt, Homo sapiens
  misc_RNA (1)...(19): siRNA sense strand
ccaaagaggaagccauuag

SEQ ID NO: 1194357 - RNA, 19 nt, Homo sapiens
  misc_RNA (1)...(19): siRNA sense strand
gacgaagcuuguccagaug

SEQ ID NO: 1194358 - RNA, 19 nt, Homo sapiens
  misc_RNA (1)...(19): siRNA sense strand
gcacggagugggacaccuu

SEQ ID NO: 1194359 - RNA, 19 nt, Homo sapiens
  misc_RNA (1)...(19): siRNA sense strand
ggaaggagaacggaugcuu

SEQ ID NO: 1194360 - RNA, 19 nt, Homo sapiens
  misc_RNA (1)...(19): siRNA sense strand
acagauugcuggaguuguc

SEQ ID NO: 1194361 - RNA, 19 nt, Homo sapiens
  misc_RNA (1)...(19): siRNA sense strand
ggagaacggaugcuugucu

SEQ ID NO: 1194362 - RNA, 19 nt, Homo sapiens
  misc_RNA (1)...(19): siRNA sense strand
caucugcccugaaagaaaa

SEQ ID NO: 1194363 - RNA, 19 nt, Homo sapiens
  misc_RNA (1)...(19): siRNA sense strand
ccaacaagagcuggcauuu

SEQ ID NO: 1194364 - RNA, 19 nt, Homo sapiens
  misc_RNA (1)...(19): siRNA sense strand
caaagaggaagccauuagu

SEQ ID NO: 1194365 - RNA, 19 nt, Homo sapiens
  misc_RNA (1)...(19): siRNA sense strand
gaaguuugccauaaaaguu

SEQ ID NO: 1194366 - RNA, 19 nt, Homo sapiens
  misc_RNA (1)...(19): siRNA sense strand
gaagaccauccuggccaua

SEQ ID NO: 1194367 - RNA, 19 nt, Homo sapiens
  misc_RNA (1)...(19): siRNA sense strand
aaacaccagugaucugcau

SEQ ID NO: 1194368 - RNA, 19 nt, Homo sapiens
  misc_RNA (1)...(19): siRNA sense strand
uuaugaugguuccaaggua

SEQ ID NO: 1194369 - RNA, 19 nt, Homo sapiens
  misc_RNA (1)...(19): siRNA sense strand
cauaaaaguugauggagau

SEQ ID NO: 1194370 - RNA, 19 nt, Homo sapiens
  misc_RNA (1)...(19): siRNA sense strand
cagcuaguuggauucuuua

SEQ ID NO: 1194371 - RNA, 19 nt, Homo sapiens
  misc_RNA (1)...(19): siRNA sense strand
ccgcuguguuucugacauu

SEQ ID NO: 1194372 - RNA, 19 nt, Homo sapiens
  misc_RNA (1)...(19): siRNA sense strand
cagauggcagggcuccuua

SEQ ID NO: 1194373 - RNA, 19 nt, Homo sapiens
  misc_RNA (1)...(19): siRNA sense strand
cuguggagcucccugaugu

SEQ ID NO: 1194374 - RNA, 19 nt, Homo sapiens
  misc_RNA (1)...(19): siRNA sense strand
ccgccaagguccugcuuca

SEQ ID NO: 1194375 - RNA, 19 nt, Homo sapiens
  misc_RNA (1)...(19): siRNA sense strand
ggagugggacaccuucauc

SEQ ID NO: 1194376 - RNA, 19 nt, Homo sapiens
  misc_RNA (1)...(19): siRNA sense strand
gaccuguuucccuagcuua

SEQ ID NO: 1194377 - RNA, 19 nt, Homo sapiens
  misc_RNA (1)...(19): siRNA sense strand
guccagauuaucccuguuu

SEQ ID NO: 1194378 - RNA, 19 nt, Homo sapiens
  misc_RNA (1)...(19): siRNA sense strand
cuggcugcauccucuauaa

SEQ ID NO: 1194379 - RNA, 19 nt, Homo sapiens
  misc_RNA (1)...(19): siRNA sense strand
guugauggagauuaccuuu

SEQ ID NO: 1194380 - RNA, 19 nt, Homo sapiens
  misc_RNA (1)...(19): siRNA sense strand
acacagccaucagcagcuu

SEQ ID NO: 1194381 - RNA, 19 nt, Homo sapiens
  misc_RNA (1)...(19): siRNA sense strand
cuguuucccuagcuuauga

SEQ ID NO: 1194382 - RNA, 19 nt, Homo sapiens
  misc_RNA (1)...(19): siRNA sense strand
gcuaguuggauucuuuaau

SEQ ID NO: 1194383 - RNA, 19 nt, Homo sapiens
  misc_RNA (1)...(19): siRNA sense strand
acaugugccuguuccagau

SEQ ID NO: 1194384 - RNA, 19 nt, Homo sapiens
  misc_RNA (1)...(19): siRNA sense strand
gaaggaacuagucuuucuc

SEQ ID NO: 1194385 - RNA, 19 nt, Homo sapiens
  misc_RNA (1)...(19): siRNA sense strand
gaugacaaggucucuagca

SEQ ID NO: 1194386 - RNA, 19 nt, Homo sapiens
  misc_RNA (1)...(19): siRNA sense strand
cagaugacaaggucucuag

SEQ ID NO: 1194387 - RNA, 19 nt, Homo sapiens
  misc_RNA (1)...(19): siRNA sense strand
gcaggacuccaggaugguu

SEQ ID NO: 1194388 - RNA, 19 nt, Homo sapiens
  misc_RNA (1)...(19): siRNA sense strand
ugacucuccuccuacucuu

SEQ ID NO: 1194389 - RNA, 19 nt, Homo sapiens
  misc_RNA (1)...(19): siRNA sense strand
gcugcauccucuauaaagg

SEQ ID NO: 1194390 - RNA, 19 nt, Homo sapiens
  misc_RNA (1)...(19): siRNA sense strand
gcgcucgccucacauucuc

SEQ ID NO: 1194391 - RNA, 19 nt, Homo sapiens
  misc_RNA (1)...(19): siRNA sense strand
cagcccagcaccauccaaa

SEQ ID NO: 1194392 - RNA, 19 nt, Homo sapiens
  misc_RNA (1)...(19): siRNA sense strand
ggacaccuucaucgagcaa

SEQ ID NO: 1194393 - RNA, 19 nt, Homo sapiens
  misc_RNA (1)...(19): siRNA sense strand
gcuggcugcauccucuaua

SEQ ID NO: 1194394 - RNA, 19 nt, Homo sapiens
  misc_RNA (1)...(19): siRNA sense strand
acaccagugaucugcauaa

SEQ ID NO: 1194395 - RNA, 19 nt, Homo sapiens
  misc_RNA (1)...(19): siRNA sense strand
caucgagcaaauucugaaa

SEQ ID NO: 1194396 - RNA, 19 nt, Homo sapiens
  misc_RNA (1)...(19): siRNA sense strand
uccagaggcucaggaagug

SEQ ID NO: 1194397 - RNA, 19 nt, Homo sapiens
  misc_RNA (1)...(19): siRNA sense strand
gggaaggaacuagucuuuc

SEQ ID NO: 1194398 - RNA, 19 nt, Homo sapiens
  misc_RNA (1)...(19): siRNA sense strand
gaguugcuuuguggacaga

SEQ ID NO: 1194399 - RNA, 19 nt, Homo sapiens
  misc_RNA (1)...(19): siRNA sense strand
guugcuuuguggacagauu

SEQ ID NO: 1194400 - RNA, 19 nt, Homo sapiens
  misc_RNA (1)...(19): siRNA sense strand
acaccuucaucgagcaaau

SEQ ID NO: 1194401 - RNA, 19 nt, Homo sapiens
  misc_RNA (1)...(19): siRNA sense strand
aaagaggaagccauuaguc

SEQ ID NO: 1194402 - RNA, 19 nt, Homo sapiens
  misc_RNA (1)...(19): siRNA sense strand
gaaggcgauccaacaagag

SEQ ID NO: 1194403 - RNA, 19 nt, Homo sapiens
  misc_RNA (1)...(19): siRNA sense strand
gguccugcuucaccgaaca

SEQ ID NO: 1194404 - RNA, 19 nt, Homo sapiens
  misc_RNA (1)...(19): siRNA sense strand
ggaguuguccgcuguguuu

SEQ ID NO: 1194405 - RNA, 19 nt, Homo sapiens
  misc_RNA (1)...(19): siRNA sense strand
caagagcuggcauuuguua

SEQ ID NO: 1194406 - RNA, 19 nt, Homo sapiens
  misc_RNA (1)...(19): siRNA sense strand
gaagaaggcgauccaacaa

SEQ ID NO: 1194407 - RNA, 19 nt, Homo sapiens
  misc_RNA (1)...(19): siRNA sense strand
ggaagaaggcgauccaaca

SEQ ID NO: 1194408 - RNA, 19 nt, Homo sapiens
  misc_RNA (1)...(19): siRNA sense strand
ucagcuaguuggauucuuu

SEQ ID NO: 1194409 - RNA, 19 nt, Homo sapiens
  misc_RNA (1)...(19): siRNA sense strand
gcaagcgguuucuggauca

SEQ ID NO: 1194410 - RNA, 19 nt, Homo sapiens
  misc_RNA (1)...(19): siRNA sense strand
uaugaugguuccaagguaa

SEQ ID NO: 1194411 - RNA, 19 nt, Homo sapiens
  misc_RNA (1)...(19): siRNA sense strand
agaaggcgauccaacaaga

SEQ ID NO: 1194412 - RNA, 19 nt, Homo sapiens
  misc_RNA (1)...(19): siRNA sense strand
gagcuggcauuuguuacuu

SEQ ID NO: 1194413 - RNA, 19 nt, Homo sapiens
  misc_RNA (1)...(19): siRNA sense strand
gaaggcagcccgcauucug

SEQ ID NO: 1194414 - RNA, 19 nt, Homo sapiens
  misc_RNA (1)...(19): siRNA sense strand
caacaagagcuggcauuug

SEQ ID NO: 1194415 - RNA, 19 nt, Homo sapiens
  misc_RNA (1)...(19): siRNA sense strand
uauaaaggacugauuguca

SEQ ID NO: 1194416 - RNA, 19 nt, Homo sapiens
  misc_RNA (1)...(19): siRNA sense strand
uggaucagcuaguuggauu

SEQ ID NO: 1194417 - RNA, 19 nt, Homo sapiens
  misc_RNA (1)...(19): siRNA sense strand
ggacagauugcuggaguug

SEQ ID NO: 1194418 - RNA, 19 nt, Homo sapiens
  misc_RNA (1)...(19): siRNA sense strand
ugauggagauuaccuuugg

SEQ ID NO: 1194419 - RNA, 19 nt, Homo sapiens
  misc_RNA (1)...(19): siRNA sense strand
ggaccuguuucccuagcuu

SEQ ID NO: 1194420 - RNA, 19 nt, Homo sapiens
  misc_RNA (1)...(19): siRNA sense strand
gcacggagugggacaccuu

SEQ ID NO: 1194421 - RNA, 19 nt, Homo sapiens
  misc_RNA (1)...(19): siRNA sense strand
ccaacaagagcuggcauuu

SEQ ID NO: 1194422 - RNA, 19 nt, Homo sapiens
  misc_RNA (1)...(19): siRNA sense strand
acagauugcuggaguuguc

SEQ ID NO: 1194423 - RNA, 19 nt, Homo sapiens
  misc_RNA (1)...(19): siRNA sense strand
gaaguuugccauaaaaguu

SEQ ID NO: 1194424 - RNA, 19 nt, Homo sapiens
  misc_RNA (1)...(19): siRNA sense strand
aaacaccagugaucugcau

SEQ ID NO: 1194425 - RNA, 19 nt, Homo sapiens
  misc_RNA (1)...(19): siRNA sense strand
uuaugaugguuccaaggua

SEQ ID NO: 1194426 - RNA, 19 nt, Homo sapiens
  misc_RNA (1)...(19): siRNA sense strand
cauaaaaguugauggagau

SEQ ID NO: 1194427 - RNA, 19 nt, Homo sapiens
  misc_RNA (1)...(19): siRNA sense strand
cagcuaguuggauucuuua

SEQ ID NO: 1194428 - RNA, 19 nt, Homo sapiens
  misc_RNA (1)...(19): siRNA sense strand
ccgcuguguuucugacauu

SEQ ID NO: 1194429 - RNA, 19 nt, Homo sapiens
  misc_RNA (1)...(19): siRNA sense strand
cuguggagcucccugaugu

SEQ ID NO: 1194430 - RNA, 19 nt, Homo sapiens
  misc_RNA (1)...(19): siRNA sense strand
ccgccaagguccugcuuca

SEQ ID NO: 1194431 - RNA, 19 nt, Homo sapiens
  misc_RNA (1)...(19): siRNA sense strand
ggagugggacaccuucauc

SEQ ID NO: 1194432 - RNA, 19 nt, Homo sapiens
  misc_RNA (1)...(19): siRNA sense strand
gaccuguuucccuagcuua

SEQ ID NO: 1194433 - RNA, 19 nt, Homo sapiens
  misc_RNA (1)...(19): siRNA sense strand
cuggcugcauccucuauaa

SEQ ID NO: 1194434 - RNA, 19 nt, Homo sapiens
  misc_RNA (1)...(19): siRNA sense strand
guugauggagauuaccuuu

SEQ ID NO: 1194435 - RNA, 19 nt, Homo sapiens
  misc_RNA (1)...(19): siRNA sense strand
cuguuucccuagcuuauga

SEQ ID NO: 1194436 - RNA, 19 nt, Homo sapiens
  misc_RNA (1)...(19): siRNA sense strand
gcuaguuggauucuuuaau

SEQ ID NO: 1194437 - RNA, 19 nt, Homo sapiens
  misc_RNA (1)...(19): siRNA sense strand
ugacucuccuccuacucuu

SEQ ID NO: 1194438 - RNA, 19 nt, Homo sapiens
  misc_RNA (1)...(19): siRNA sense strand
gcugcauccucuauaaagg

SEQ ID NO: 1194439 - RNA, 19 nt, Homo sapiens
  misc_RNA (1)...(19): siRNA sense strand
gcgcucgccucacauucuc

SEQ ID NO: 1194440 - RNA, 19 nt, Homo sapiens
  misc_RNA (1)...(19): siRNA sense strand
ggacaccuucaucgagcaa

SEQ ID NO: 1194441 - RNA, 19 nt, Homo sapiens
  misc_RNA (1)...(19): siRNA sense strand
gcuggcugcauccucuaua

SEQ ID NO: 1194442 - RNA, 19 nt, Homo sapiens
  misc_RNA (1)...(19): siRNA sense strand
acaccagugaucugcauaa

SEQ ID NO: 1194443 - RNA, 19 nt, Homo sapiens
  misc_RNA (1)...(19): siRNA sense strand
guugcuuuguggacagauu

SEQ ID NO: 1194444 - RNA, 19 nt, Homo sapiens
  misc_RNA (1)...(19): siRNA sense strand
gaguugcuuuguggacaga

SEQ ID NO: 1194445 - RNA, 19 nt, Homo sapiens
  misc_RNA (1)...(19): siRNA sense strand
caucgagcaaauucugaaa

SEQ ID NO: 1194446 - RNA, 19 nt, Homo sapiens
  misc_RNA (1)...(19): siRNA sense strand
gaaggcgauccaacaagag

SEQ ID NO: 1194447 - RNA, 19 nt, Homo sapiens
  misc_RNA (1)...(19): siRNA sense strand
gguccugcuucaccgaaca

SEQ ID NO: 1194448 - RNA, 19 nt, Homo sapiens
  misc_RNA (1)...(19): siRNA sense strand
acaccuucaucgagcaaau

SEQ ID NO: 1194449 - RNA, 19 nt, Homo sapiens
  misc_RNA (1)...(19): siRNA sense strand
gaacucgacuugucugaaa

SEQ ID NO: 1194450 - RNA, 19 nt, Homo sapiens
  misc_RNA (1)...(19): siRNA sense strand
gagcacaucugcccugaaa

SEQ ID NO: 1194451 - RNA, 19 nt, Homo sapiens
  misc_RNA (1)...(19): siRNA sense strand
ggaaggaacuagucuuucu

SEQ ID NO: 1194452 - RNA, 19 nt, Homo sapiens
  misc_RNA (1)...(19): siRNA sense strand
ugacgaagcuuguccagau

SEQ ID NO: 1194453 - RNA, 19 nt, Homo sapiens
  misc_RNA (1)...(19): siRNA sense strand
gagacagacugcaggauga

SEQ ID NO: 1194454 - RNA, 19 nt, Homo sapiens
  misc_RNA (1)...(19): siRNA sense strand
ggaguuguccgcuguguuu

SEQ ID NO: 1194455 - RNA, 19 nt, Homo sapiens
  misc_RNA (1)...(19): siRNA sense strand
caagagcuggcauuuguua

SEQ ID NO: 1194456 - RNA, 19 nt, Homo sapiens
  misc_RNA (1)...(19): siRNA sense strand
gcacaucugcccugaaaga

SEQ ID NO: 1194457 - RNA, 19 nt, Homo sapiens
  misc_RNA (1)...(19): siRNA sense strand
gaagaaggcgauccaacaa

SEQ ID NO: 1194458 - RNA, 19 nt, Homo sapiens
  misc_RNA (1)...(19): siRNA sense strand
ggaagaaggcgauccaaca

SEQ ID NO: 1194459 - RNA, 19 nt, Homo sapiens
  misc_RNA (1)...(19): siRNA sense strand
ucagcuaguuggauucuuu

SEQ ID NO: 1194460 - RNA, 19 nt, Homo sapiens
  misc_RNA (1)...(19): siRNA sense strand
ccucaguucuauuacguua

SEQ ID NO: 1194461 - RNA, 19 nt, Homo sapiens
  misc_RNA (1)...(19): siRNA sense strand
gacaaggucucuagcaucu

SEQ ID NO: 1194462 - RNA, 19 nt, Homo sapiens
  misc_RNA (1)...(19): siRNA sense strand
gcaagcgguuucuggauca

SEQ ID NO: 1194463 - RNA, 19 nt, Homo sapiens
  misc_RNA (1)...(19): siRNA sense strand
agaaggcgauccaacaaga

SEQ ID NO: 1194464 - RNA, 19 nt, Homo sapiens
  misc_RNA (1)...(19): siRNA sense strand
uaugaugguuccaagguaa

SEQ ID NO: 1194465 - RNA, 19 nt, Homo sapiens
  misc_RNA (1)...(19): siRNA sense strand
ggaaauggccucaggucau

SEQ ID NO: 1194466 - RNA, 19 nt, Homo sapiens
  misc_RNA (1)...(19): siRNA sense strand
gaccaaagaggaagccauu

SEQ ID NO: 1194467 - RNA, 19 nt, Homo sapiens
  misc_RNA (1)...(19): siRNA sense strand
aagaagaacucgacuuguc

SEQ ID NO: 1194468 - RNA, 19 nt, Homo sapiens
  misc_RNA (1)...(19): siRNA sense strand
gagcuggcauuuguuacuu

SEQ ID NO: 1194469 - RNA, 19 nt, Homo sapiens
  misc_RNA (1)...(19): siRNA sense strand
ggaacuagucuuucuccaa

SEQ ID NO: 1194470 - RNA, 19 nt, Homo sapiens
  misc_RNA (1)...(19): siRNA sense strand
ccauuagucuccacgaguu

SEQ ID NO: 1194471 - RNA, 19 nt, Homo sapiens
  misc_RNA (1)...(19): siRNA sense strand
gaaggcagcccgcauucug

SEQ ID NO: 1194472 - RNA, 19 nt, Homo sapiens
  misc_RNA (1)...(19): siRNA sense strand
uauaaaggacugauuguca

SEQ ID NO: 1194473 - RNA, 19 nt, Homo sapiens
  misc_RNA (1)...(19): siRNA sense strand
caacaagagcuggcauuug

SEQ ID NO: 1194474 - RNA, 19 nt, Homo sapiens
  misc_RNA (1)...(19): siRNA sense strand
uggaucagcuaguuggauu

SEQ ID NO: 1194475 - RNA, 19 nt, Homo sapiens
  misc_RNA (1)...(19): siRNA sense strand
gccaugaucuggagagcau

SEQ ID NO: 1194476 - RNA, 19 nt, Homo sapiens
  misc_RNA (1)...(19): siRNA sense strand
ggacagauugcuggaguug

SEQ ID NO: 1194477 - RNA, 19 nt, Homo sapiens
  misc_RNA (1)...(19): siRNA sense strand
ugauggagauuaccuuugg

SEQ ID NO: 1194478 - RNA, 19 nt, Homo sapiens
  misc_RNA (1)...(19): siRNA sense strand
ggaccuguuucccuagcuu

SEQ ID NO: 1194479 - RNA, 19 nt, Homo sapiens
  misc_RNA (1)...(19): siRNA sense strand
ccaaagaggaagccauuag

SEQ ID NO: 1194480 - RNA, 19 nt, Homo sapiens
  misc_RNA (1)...(19): siRNA sense strand
gggcuugugugguacuuag

SEQ ID NO: 1194481 - RNA, 19 nt, Homo sapiens
  misc_RNA (1)...(19): siRNA sense strand
gacgaagcuuguccagaug

SEQ ID NO: 1194482 - RNA, 19 nt, Homo sapiens
  misc_RNA (1)...(19): siRNA sense strand
gcacggagugggacaccuu

SEQ ID NO: 1194483 - RNA, 19 nt, Homo sapiens
  misc_RNA (1)...(19): siRNA sense strand
uuccugggcuuguguggua

SEQ ID NO: 1194484 - RNA, 19 nt, Homo sapiens
  misc_RNA (1)...(19): siRNA sense strand
ggaaggagaacggaugcuu

SEQ ID NO: 1194485 - RNA, 19 nt, Homo sapiens
  misc_RNA (1)...(19): siRNA sense strand
acagauugcuggaguuguc

SEQ ID NO: 1194486 - RNA, 19 nt, Homo sapiens
  misc_RNA (1)...(19): siRNA sense strand
ggagaacggaugcuugucu

SEQ ID NO: 1194487 - RNA, 19 nt, Homo sapiens
  misc_RNA (1)...(19): siRNA sense strand
caucugcccugaaagaaaa

SEQ ID NO: 1194488 - RNA, 19 nt, Homo sapiens
  misc_RNA (1)...(19): siRNA sense strand
caaagaggaagccauuagu

SEQ ID NO: 1194489 - RNA, 19 nt, Homo sapiens
  misc_RNA (1)...(19): siRNA sense strand
ccaacaagagcuggcauuu

SEQ ID NO: 1194490 - RNA, 19 nt, Homo sapiens
  misc_RNA (1)...(19): siRNA sense strand
gaaguuugccauaaaaguu

SEQ ID NO: 1194491 - RNA, 19 nt, Homo sapiens
  misc_RNA (1)...(19): siRNA sense strand
ugaaagggagcgacacuca

SEQ ID NO: 1194492 - RNA, 19 nt, Homo sapiens
  misc_RNA (1)...(19): siRNA sense strand
gaagaccauccuggccaua

SEQ ID NO: 1194493 - RNA, 19 nt, Homo sapiens
  misc_RNA (1)...(19): siRNA sense strand
aaacaccagugaucugcau

SEQ ID NO: 1194494 - RNA, 19 nt, Homo sapiens
  misc_RNA (1)...(19): siRNA sense strand
uuaugaugguuccaaggua

SEQ ID NO: 1194495 - RNA, 19 nt, Homo sapiens
  misc_RNA (1)...(19): siRNA sense strand
cauaaaaguugauggagau

SEQ ID NO: 1194496 - RNA, 19 nt, Homo sapiens
  misc_RNA (1)...(19): siRNA sense strand
cagcuaguuggauucuuua

SEQ ID NO: 1194497 - RNA, 19 nt, Homo sapiens
  misc_RNA (1)...(19): siRNA sense strand
ccgcuguguuucugacauu

SEQ ID NO: 1194498 - RNA, 19 nt, Homo sapiens
  misc_RNA (1)...(19): siRNA sense strand
cagauggcagggcuccuua

SEQ ID NO: 1194499 - RNA, 19 nt, Homo sapiens
  misc_RNA (1)...(19): siRNA sense strand
cuguggagcucccugaugu

SEQ ID NO: 1194500 - RNA, 19 nt, Homo sapiens
  misc_RNA (1)...(19): siRNA sense strand
ccgccaagguccugcuuca

SEQ ID NO: 1194501 - RNA, 19 nt, Homo sapiens
  misc_RNA (1)...(19): siRNA sense strand
ggagugggacaccuucauc

SEQ ID NO: 1194502 - RNA, 19 nt, Homo sapiens
  misc_RNA (1)...(19): siRNA sense strand
gaccuguuucccuagcuua

SEQ ID NO: 1194503 - RNA, 19 nt, Homo sapiens
  misc_RNA (1)...(19): siRNA sense strand
guccagauuaucccuguuu

SEQ ID NO: 1194504 - RNA, 19 nt, Homo sapiens
  misc_RNA (1)...(19): siRNA sense strand
cuggcugcauccucuauaa

SEQ ID NO: 1194505 - RNA, 19 nt, Homo sapiens
  misc_RNA (1)...(19): siRNA sense strand
guugauggagauuaccuuu

SEQ ID NO: 1194506 - RNA, 19 nt, Homo sapiens
  misc_RNA (1)...(19): siRNA sense strand
acacagccaucagcagcuu

SEQ ID NO: 1194507 - RNA, 19 nt, Homo sapiens
  misc_RNA (1)...(19): siRNA sense strand
cuguuucccuagcuuauga

SEQ ID NO: 1194508 - RNA, 19 nt, Homo sapiens
  misc_RNA (1)...(19): siRNA sense strand
gcuaguuggauucuuuaau

SEQ ID NO: 1194509 - RNA, 19 nt, Homo sapiens
  misc_RNA (1)...(19): siRNA sense strand
acaugugccuguuccagau

SEQ ID NO: 1194510 - RNA, 19 nt, Homo sapiens
  misc_RNA (1)...(19): siRNA sense strand
gaaggaacuagucuuucuc

SEQ ID NO: 1194511 - RNA, 19 nt, Homo sapiens
  misc_RNA (1)...(19): siRNA sense strand
gaugacaaggucucuagca

SEQ ID NO: 1194512 - RNA, 19 nt, Homo sapiens
  misc_RNA (1)...(19): siRNA sense strand
cagaugacaaggucucuag

SEQ ID NO: 1194513 - RNA, 19 nt, Homo sapiens
  misc_RNA (1)...(19): siRNA sense strand
gcaggacuccaggaugguu

SEQ ID NO: 1194514 - RNA, 19 nt, Homo sapiens
  misc_RNA (1)...(19): siRNA sense strand
ugacucuccuccuacucuu

SEQ ID NO: 1194515 - RNA, 19 nt, Homo sapiens
  misc_RNA (1)...(19): siRNA sense strand
gcugcauccucuauaaagg

SEQ ID NO: 1194516 - RNA, 19 nt, Homo sapiens
  misc_RNA (1)...(19): siRNA sense strand
gcgcucgccucacauucuc

SEQ ID NO: 1194517 - RNA, 19 nt, Homo sapiens
  misc_RNA (1)...(19): siRNA sense strand
cagcccagcaccauccaaa

SEQ ID NO: 1194518 - RNA, 19 nt, Homo sapiens
  misc_RNA (1)...(19): siRNA sense strand
ggacaccuucaucgagcaa

SEQ ID NO: 1194519 - RNA, 19 nt, Homo sapiens
  misc_RNA (1)...(19): siRNA sense strand
gcuggcugcauccucuaua

SEQ ID NO: 1194520 - RNA, 19 nt, Homo sapiens
  misc_RNA (1)...(19): siRNA sense strand
acaccagugaucugcauaa

SEQ ID NO: 1194521 - RNA, 19 nt, Homo sapiens
  misc_RNA (1)...(19): siRNA sense strand
caucgagcaaauucugaaa

SEQ ID NO: 1194522 - RNA, 19 nt, Homo sapiens
  misc_RNA (1)...(19): siRNA sense strand
uccagaggcucaggaagug

SEQ ID NO: 1194523 - RNA, 19 nt, Homo sapiens
  misc_RNA (1)...(19): siRNA sense strand
gggaaggaacuagucuuuc

SEQ ID NO: 1194524 - RNA, 19 nt, Homo sapiens
  misc_RNA (1)...(19): siRNA sense strand
gaguugcuuuguggacaga

SEQ ID NO: 1194525 - RNA, 19 nt, Homo sapiens
  misc_RNA (1)...(19): siRNA sense strand
guugcuuuguggacagauu

SEQ ID NO: 1194526 - RNA, 19 nt, Homo sapiens
  misc_RNA (1)...(19): siRNA sense strand
acaccuucaucgagcaaau

SEQ ID NO: 1194527 - RNA, 19 nt, Homo sapiens
  misc_RNA (1)...(19): siRNA sense strand
gaaggcgauccaacaagag

SEQ ID NO: 1194528 - RNA, 19 nt, Homo sapiens
  misc_RNA (1)...(19): siRNA sense strand
aaagaggaagccauuaguc

SEQ ID NO: 1194529 - RNA, 19 nt, Homo sapiens
  misc_RNA (1)...(19): siRNA sense strand
gguccugcuucaccgaaca

SEQ ID NO: 1194530 - RNA, 19 nt, Homo sapiens
  misc_RNA (1)...(19): siRNA sense strand
caaagaagguugucagaug

SEQ ID NO: 1194531 - RNA, 19 nt, Homo sapiens
  misc_RNA (1)...(19): siRNA sense strand
gaauacaucuuccauccaa

SEQ ID NO: 1194532 - RNA, 19 nt, Homo sapiens
  misc_RNA (1)...(19): siRNA sense strand
gagcuuggcugaagaggaa

SEQ ID NO: 1194533 - RNA, 19 nt, Homo sapiens
  misc_RNA (1)...(19): siRNA sense strand
uaaaugaaaucucggaaga

SEQ ID NO: 1194534 - RNA, 19 nt, Homo sapiens
  misc_RNA (1)...(19): siRNA sense strand
gaacaugagaugaaugaaa

SEQ ID NO: 1194535 - RNA, 19 nt, Homo sapiens
  misc_RNA (1)...(19): siRNA sense strand
caagagcucuccgaaauga

SEQ ID NO: 1194536 - RNA, 19 nt, Homo sapiens
  misc_RNA (1)...(19): siRNA sense strand
cgaaguauguccagaaugu

SEQ ID NO: 1194537 - RNA, 19 nt, Homo sapiens
  misc_RNA (1)...(19): siRNA sense strand
gcucaccauugaacaguua

SEQ ID NO: 1194538 - RNA, 19 nt, Homo sapiens
  misc_RNA (1)...(19): siRNA sense strand
gaacacagaaacacuaaau

SEQ ID NO: 1194539 - RNA, 19 nt, Homo sapiens
  misc_RNA (1)...(19): siRNA sense strand
cgaaaugaaacacaacuua

SEQ ID NO: 1194540 - RNA, 19 nt, Homo sapiens
  misc_RNA (1)...(19): siRNA sense strand
aaagaaaccuggcuuacug

SEQ ID NO: 1194541 - RNA, 19 nt, Homo sapiens
  misc_RNA (1)...(19): siRNA sense strand
ugucauagauuuaggagaa

SEQ ID NO: 1194542 - RNA, 19 nt, Homo sapiens
  misc_RNA (1)...(19): siRNA sense strand
ugcaagagauggagguuua

SEQ ID NO: 1194543 - RNA, 19 nt, Homo sapiens
  misc_RNA (1)...(19): siRNA sense strand
ccucaugucuaaagaaauu

SEQ ID NO: 1194544 - RNA, 19 nt, Homo sapiens
  misc_RNA (1)...(19): siRNA sense strand
gcaaauagcgaaaguaguc

SEQ ID NO: 1194545 - RNA, 19 nt, Homo sapiens
  misc_RNA (1)...(19): siRNA sense strand
gcaaagcugagauggauuu

SEQ ID NO: 1194546 - RNA, 19 nt, Homo sapiens
  misc_RNA (1)...(19): siRNA sense strand
ccgcugauauugccaagua

SEQ ID NO: 1194547 - RNA, 19 nt, Homo sapiens
  misc_RNA (1)...(19): siRNA sense strand
ccacagagcuuggcugaag

SEQ ID NO: 1194548 - RNA, 19 nt, Homo sapiens
  misc_RNA (1)...(19): siRNA sense strand
aaagagccaucugcuguua

SEQ ID NO: 1194549 - RNA, 19 nt, Homo sapiens
  misc_RNA (1)...(19): siRNA sense strand
gcaggucgaugcccgauuc

SEQ ID NO: 1194550 - RNA, 19 nt, Homo sapiens
  misc_RNA (1)...(19): siRNA sense strand
gcagcauccugaaucuuaa

SEQ ID NO: 1194551 - RNA, 19 nt, Homo sapiens
  misc_RNA (1)...(19): siRNA sense strand
ggacagaugcauuccagaa

SEQ ID NO: 1194552 - RNA, 19 nt, Homo sapiens
  misc_RNA (1)...(19): siRNA sense strand
caaagaaccaucucccaaa

SEQ ID NO: 1194553 - RNA, 19 nt, Homo sapiens
  misc_RNA (1)...(19): siRNA sense strand
gagcgaacuugucauagau

SEQ ID NO: 1194554 - RNA, 19 nt, Homo sapiens
  misc_RNA (1)...(19): siRNA sense strand
ugaaugaaaucgaaguaug

SEQ ID NO: 1194555 - RNA, 19 nt, Homo sapiens
  misc_RNA (1)...(19): siRNA sense strand
uaaccuggaucgaagcaaa

SEQ ID NO: 1194556 - RNA, 19 nt, Homo sapiens
  misc_RNA (1)...(19): siRNA sense strand
ugacagaaauauacaacga

SEQ ID NO: 1194557 - RNA, 19 nt, Homo sapiens
  misc_RNA (1)...(19): siRNA sense strand
caaacccaguggagauuaa

SEQ ID NO: 1194558 - RNA, 19 nt, Homo sapiens
  misc_RNA (1)...(19): siRNA sense strand
uauccuaccugcucaaguu

SEQ ID NO: 1194559 - RNA, 19 nt, Homo sapiens
  misc_RNA (1)...(19): siRNA sense strand
gaaaugaaacacaacuuag

SEQ ID NO: 1194560 - RNA, 19 nt, Homo sapiens
  misc_RNA (1)...(19): siRNA sense strand
ggcagcauccugaaucuua

SEQ ID NO: 1194561 - RNA, 19 nt, Homo sapiens
  misc_RNA (1)...(19): siRNA sense strand
ugagaugaaugaaaucgaa

SEQ ID NO: 1194562 - RNA, 19 nt, Homo sapiens
  misc_RNA (1)...(19): siRNA sense strand
gcacaacugcaucauuuau

SEQ ID NO: 1194563 - RNA, 19 nt, Homo sapiens
  misc_RNA (1)...(19): siRNA sense strand
gcgaacuugucauagauuu

SEQ ID NO: 1194564 - RNA, 19 nt, Homo sapiens
  misc_RNA (1)...(19): siRNA sense strand
gcacagcgauucggaggau

SEQ ID NO: 1194565 - RNA, 19 nt, Homo sapiens
  misc_RNA (1)...(19): siRNA sense strand
aagcugagauggauuugaa

SEQ ID NO: 1194566 - RNA, 19 nt, Homo sapiens
  misc_RNA (1)...(19): siRNA sense strand
gaacauccgcaggaaguuu

SEQ ID NO: 1194567 - RNA, 19 nt, Homo sapiens
  misc_RNA (1)...(19): siRNA sense strand
cagaaacacuaaauaaguc

SEQ ID NO: 1194568 - RNA, 19 nt, Homo sapiens
  misc_RNA (1)...(19): siRNA sense strand
aaaccuggcuuacugaaca

SEQ ID NO: 1194569 - RNA, 19 nt, Homo sapiens
  misc_RNA (1)...(19): siRNA sense strand
gagcagcagugaugagaag

SEQ ID NO: 1194570 - RNA, 19 nt, Homo sapiens
  misc_RNA (1)...(19): siRNA sense strand
gaacagcacccugacuaug

SEQ ID NO: 1194571 - RNA, 19 nt, Homo sapiens
  misc_RNA (1)...(19): siRNA sense strand
caucaacuguccagcagaa

SEQ ID NO: 1194572 - RNA, 19 nt, Homo sapiens
  misc_RNA (1)...(19): siRNA sense strand
gggccuggguuccaauaaa

SEQ ID NO: 1194573 - RNA, 19 nt, Homo sapiens
  misc_RNA (1)...(19): siRNA sense strand
gaaugaaaucgaaguaugu

SEQ ID NO: 1194574 - RNA, 19 nt, Homo sapiens
  misc_RNA (1)...(19): siRNA sense strand
gcaucgagacccagaguaa

SEQ ID NO: 1194575 - RNA, 19 nt, Homo sapiens
  misc_RNA (1)...(19): siRNA sense strand
agaagcagcuggaguugga

SEQ ID NO: 1194576 - RNA, 19 nt, Homo sapiens
  misc_RNA (1)...(19): siRNA sense strand
ggacaagcagggaguuuau

SEQ ID NO: 1194577 - RNA, 19 nt, Homo sapiens
  misc_RNA (1)...(19): siRNA sense strand
caacagccaguaucaaaug

SEQ ID NO: 1194578 - RNA, 19 nt, Homo sapiens
  misc_RNA (1)...(19): siRNA sense strand
ccauggacuuccuggauaa

SEQ ID NO: 1194579 - RNA, 19 nt, Homo sapiens
  misc_RNA (1)...(19): siRNA sense strand
gagacgcccuccuccauuc

SEQ ID NO: 1194580 - RNA, 19 nt, Homo sapiens
  misc_RNA (1)...(19): siRNA sense strand
gaacuugucauagauuuag

SEQ ID NO: 1194581 - RNA, 19 nt, Homo sapiens
  misc_RNA (1)...(19): siRNA sense strand
aggauaaacugaagggaaa

SEQ ID NO: 1194582 - RNA, 19 nt, Homo sapiens
  misc_RNA (1)...(19): siRNA sense strand
caaagcacaauuaggcaua

SEQ ID NO: 1194583 - RNA, 19 nt, Homo sapiens
  misc_RNA (1)...(19): siRNA sense strand
ggucgaugcccgauucuuu

SEQ ID NO: 1194584 - RNA, 19 nt, Homo sapiens
  misc_RNA (1)...(19): siRNA sense strand
cauaaaggauaaacugaag

SEQ ID NO: 1194585 - RNA, 19 nt, Homo sapiens
  misc_RNA (1)...(19): siRNA sense strand
gcacaauuaggcauaaaug

SEQ ID NO: 1194586 - RNA, 19 nt, Homo sapiens
  misc_RNA (1)...(19): siRNA sense strand
aaucacaaauugacgcaaa

SEQ ID NO: 1194587 - RNA, 19 nt, Homo sapiens
  misc_RNA (1)...(19): siRNA sense strand
gcucgacccuugaccuuuc

SEQ ID NO: 1194588 - RNA, 19 nt, Homo sapiens
  misc_RNA (1)...(19): siRNA sense strand
ugaagaagcagcuggaguu

SEQ ID NO: 1194589 - RNA, 19 nt, Homo sapiens
  misc_RNA (1)...(19): siRNA sense strand
uaagaaggaacccaaagaa

SEQ ID NO: 1194590 - RNA, 19 nt, Homo sapiens
  misc_RNA (1)...(19): siRNA sense strand
gaacgagccagaagacaca

SEQ ID NO: 1194591 - RNA, 19 nt, Homo sapiens
  misc_RNA (1)...(19): siRNA sense strand
gaguugcaaagcacaauua

SEQ ID NO: 1194592 - RNA, 19 nt, Homo sapiens
  misc_RNA (1)...(19): siRNA sense strand
ggauuuccuugucggauau

SEQ ID NO: 1194593 - RNA, 19 nt, Homo sapiens
  misc_RNA (1)...(19): siRNA sense strand
gaacagcccagaaaagaaa

SEQ ID NO: 1194594 - RNA, 19 nt, Homo sapiens
  misc_RNA (1)...(19): siRNA sense strand
aagcaaagcugagauggau

SEQ ID NO: 1194595 - RNA, 19 nt, Homo sapiens
  misc_RNA (1)...(19): siRNA sense strand
ccagaagcccguuccauug

SEQ ID NO: 1194596 - RNA, 19 nt, Homo sapiens
  misc_RNA (1)...(19): siRNA sense strand
agcaagagcucuccgaaau

SEQ ID NO: 1194597 - RNA, 19 nt, Homo sapiens
  misc_RNA (1)...(19): siRNA sense strand
agagcgaacuugucauaga

SEQ ID NO: 1194598 - RNA, 19 nt, Homo sapiens
  misc_RNA (1)...(19): siRNA sense strand
ccaagauccugaugagcaa

SEQ ID NO: 1194599 - RNA, 19 nt, Homo sapiens
  misc_RNA (1)...(19): siRNA sense strand
caaaagcucuaagggauaa

SEQ ID NO: 1194600 - RNA, 19 nt, Homo sapiens
  misc_RNA (1)...(19): siRNA sense strand
caaguuugccauucagaaa

SEQ ID NO: 1194601 - RNA, 19 nt, Homo sapiens
  misc_RNA (1)...(19): siRNA sense strand
ggaguaauaaauccaguug

SEQ ID NO: 1194602 - RNA, 19 nt, Homo sapiens
  misc_RNA (1)...(19): siRNA sense strand
ggagacgucagcugagaaa

SEQ ID NO: 1194603 - RNA, 19 nt, Homo sapiens
  misc_RNA (1)...(19): siRNA sense strand
gaaggaacccaaagaacca

SEQ ID NO: 1194604 - RNA, 19 nt, Homo sapiens
  misc_RNA (1)...(19): siRNA sense strand
cggauuuccuugucggaua

SEQ ID NO: 1194605 - RNA, 19 nt, Homo sapiens
  misc_RNA (1)...(19): siRNA sense strand
gagaacauccgcaggaagu

SEQ ID NO: 1194606 - RNA, 19 nt, Homo sapiens
  misc_RNA (1)...(19): siRNA sense strand
gauaguagcgauagugagu

SEQ ID NO: 1194607 - RNA, 19 nt, Homo sapiens
  misc_RNA (1)...(19): siRNA sense strand
ggaacaaugacagaaauau

SEQ ID NO: 1194608 - RNA, 19 nt, Homo sapiens
  misc_RNA (1)...(19): siRNA sense strand
gcaauaaaaggaacaauga

SEQ ID NO: 1194609 - RNA, 19 nt, Homo sapiens
  misc_RNA (1)...(19): siRNA sense strand
gaugaaugaaaucgaagua

SEQ ID NO: 1194610 - RNA, 19 nt, Homo sapiens
  misc_RNA (1)...(19): siRNA sense strand
gaagagccuccucccgaaa

SEQ ID NO: 1194611 - RNA, 19 nt, Homo sapiens
  misc_RNA (1)...(19): siRNA sense strand
gcaagagcucuccgaaaug

SEQ ID NO: 1194612 - RNA, 19 nt, Homo sapiens
  misc_RNA (1)...(19): siRNA sense strand
gcccugagccugagaagga

SEQ ID NO: 1194613 - RNA, 19 nt, Homo sapiens
  misc_RNA (1)...(19): siRNA sense strand
gguuccagcugaaucuuga

SEQ ID NO: 1194614 - RNA, 19 nt, Homo sapiens
  misc_RNA (1)...(19): siRNA sense strand
gaagcaaagcugagaugga

SEQ ID NO: 1194615 - RNA, 19 nt, Homo sapiens
  misc_RNA (1)...(19): siRNA sense strand
guaaagccaugacaaugcu

SEQ ID NO: 1194616 - RNA, 19 nt, Homo sapiens
  misc_RNA (1)...(19): siRNA sense strand
agagccaucugcuguuaaa

SEQ ID NO: 1194617 - RNA, 19 nt, Homo sapiens
  misc_RNA (1)...(19): siRNA sense strand
gaccauagagaguugcaaa

SEQ ID NO: 1194618 - RNA, 19 nt, Homo sapiens
  misc_RNA (1)...(19): siRNA sense strand
gcgagucgguccagcaaca

SEQ ID NO: 1194619 - RNA, 19 nt, Homo sapiens
  misc_RNA (1)...(19): siRNA sense strand
gggacaagcagggaguuua

SEQ ID NO: 1194620 - RNA, 19 nt, Homo sapiens
  misc_RNA (1)...(19): siRNA sense strand
ucaccagccuccaccaaga

SEQ ID NO: 1194621 - RNA, 19 nt, Homo sapiens
  misc_RNA (1)...(19): siRNA sense strand
uaccucaugucuaaagaaa

SEQ ID NO: 1194622 - RNA, 19 nt, Homo sapiens
  misc_RNA (1)...(19): siRNA sense strand
aauaauugcuaccucaugu

SEQ ID NO: 1194623 - RNA, 19 nt, Homo sapiens
  misc_RNA (1)...(19): siRNA sense strand
ggccuggguuccaauaaau

SEQ ID NO: 1194624 - RNA, 19 nt, Homo sapiens
  misc_RNA (1)...(19): siRNA sense strand
guagcaauccacauccuuu

SEQ ID NO: 1194625 - RNA, 19 nt, Homo sapiens
  misc_RNA (1)...(19): siRNA sense strand
ccacuggccugagcacaug

SEQ ID NO: 1194626 - RNA, 19 nt, Homo sapiens
  misc_RNA (1)...(19): siRNA sense strand
gaagcacaauagcugagau

SEQ ID NO: 1194627 - RNA, 19 nt, Homo sapiens
  misc_RNA (1)...(19): siRNA sense strand
gauauugccaaguacacua

SEQ ID NO: 1194628 - RNA, 19 nt, Homo sapiens
  misc_RNA (1)...(19): siRNA sense strand
agagagcgaacuugucaua

SEQ ID NO: 1194629 - RNA, 19 nt, Homo sapiens
  misc_RNA (1)...(19): siRNA sense strand
gcaggaugcugagaagaag

SEQ ID NO: 1194630 - RNA, 19 nt, Homo sapiens
  misc_RNA (1)...(19): siRNA sense strand
caaagaagguugucagaug

SEQ ID NO: 1194631 - RNA, 19 nt, Homo sapiens
  misc_RNA (1)...(19): siRNA sense strand
gaauacaucuuccauccaa

SEQ ID NO: 1194632 - RNA, 19 nt, Homo sapiens
  misc_RNA (1)...(19): siRNA sense strand
gagcuuggcugaagaggaa

SEQ ID NO: 1194633 - RNA, 19 nt, Homo sapiens
  misc_RNA (1)...(19): siRNA sense strand
uaaaugaaaucucggaaga

SEQ ID NO: 1194634 - RNA, 19 nt, Homo sapiens
  misc_RNA (1)...(19): siRNA sense strand
gaacaugagaugaaugaaa

SEQ ID NO: 1194635 - RNA, 19 nt, Homo sapiens
  misc_RNA (1)...(19): siRNA sense strand
caagagcucuccgaaauga

SEQ ID NO: 1194636 - RNA, 19 nt, Homo sapiens
  misc_RNA (1)...(19): siRNA sense strand
cgaaguauguccagaaugu

SEQ ID NO: 1194637 - RNA, 19 nt, Homo sapiens
  misc_RNA (1)...(19): siRNA sense strand
gcucaccauugaacaguua

SEQ ID NO: 1194638 - RNA, 19 nt, Homo sapiens
  misc_RNA (1)...(19): siRNA sense strand
gaacacagaaacacuaaau

SEQ ID NO: 1194639 - RNA, 19 nt, Homo sapiens
  misc_RNA (1)...(19): siRNA sense strand
cgaaaugaaacacaacuua

SEQ ID NO: 1194640 - RNA, 19 nt, Homo sapiens
  misc_RNA (1)...(19): siRNA sense strand
aaagaaaccuggcuuacug

SEQ ID NO: 1194641 - RNA, 19 nt, Homo sapiens
  misc_RNA (1)...(19): siRNA sense strand
ugucauagauuuaggagaa

SEQ ID NO: 1194642 - RNA, 19 nt, Homo sapiens
  misc_RNA (1)...(19): siRNA sense strand
ugcaagagauggagguuua

SEQ ID NO: 1194643 - RNA, 19 nt, Homo sapiens
  misc_RNA (1)...(19): siRNA sense strand
ccucaugucuaaagaaauu

SEQ ID NO: 1194644 - RNA, 19 nt, Homo sapiens
  misc_RNA (1)...(19): siRNA sense strand
gcaaauagcgaaaguaguc

SEQ ID NO: 1194645 - RNA, 19 nt, Homo sapiens
  misc_RNA (1)...(19): siRNA sense strand
gcaaagcugagauggauuu

SEQ ID NO: 1194646 - RNA, 19 nt, Homo sapiens
  misc_RNA (1)...(19): siRNA sense strand
ccgcugauauugccaagua

SEQ ID NO: 1194647 - RNA, 19 nt, Homo sapiens
  misc_RNA (1)...(19): siRNA sense strand
ccacagagcuuggcugaag

SEQ ID NO: 1194648 - RNA, 19 nt, Homo sapiens
  misc_RNA (1)...(19): siRNA sense strand
aaagagccaucugcuguua

SEQ ID NO: 1194649 - RNA, 19 nt, Homo sapiens
  misc_RNA (1)...(19): siRNA sense strand
gcaggucgaugcccgauuc

SEQ ID NO: 1194650 - RNA, 19 nt, Homo sapiens
  misc_RNA (1)...(19): siRNA sense strand
gcagcauccugaaucuuaa

SEQ ID NO: 1194651 - RNA, 19 nt, Homo sapiens
  misc_RNA (1)...(19): siRNA sense strand
ggacagaugcauuccagaa

SEQ ID NO: 1194652 - RNA, 19 nt, Homo sapiens
  misc_RNA (1)...(19): siRNA sense strand
caaagaaccaucucccaaa

SEQ ID NO: 1194653 - RNA, 19 nt, Homo sapiens
  misc_RNA (1)...(19): siRNA sense strand
gagcgaacuugucauagau

SEQ ID NO: 1194654 - RNA, 19 nt, Homo sapiens
  misc_RNA (1)...(19): siRNA sense strand
ugaaugaaaucgaaguaug

SEQ ID NO: 1194655 - RNA, 19 nt, Homo sapiens
  misc_RNA (1)...(19): siRNA sense strand
uaaccuggaucgaagcaaa

SEQ ID NO: 1194656 - RNA, 19 nt, Homo sapiens
  misc_RNA (1)...(19): siRNA sense strand
ugacagaaauauacaacga

SEQ ID NO: 1194657 - RNA, 19 nt, Homo sapiens
  misc_RNA (1)...(19): siRNA sense strand
caaacccaguggagauuaa

SEQ ID NO: 1194658 - RNA, 19 nt, Homo sapiens
  misc_RNA (1)...(19): siRNA sense strand
uauccuaccugcucaaguu

SEQ ID NO: 1194659 - RNA, 19 nt, Homo sapiens
  misc_RNA (1)...(19): siRNA sense strand
gaaaugaaacacaacuuag

SEQ ID NO: 1194660 - RNA, 19 nt, Homo sapiens
  misc_RNA (1)...(19): siRNA sense strand
ggcagcauccugaaucuua

SEQ ID NO: 1194661 - RNA, 19 nt, Homo sapiens
  misc_RNA (1)...(19): siRNA sense strand
ugagaugaaugaaaucgaa

SEQ ID NO: 1194662 - RNA, 19 nt, Homo sapiens
  misc_RNA (1)...(19): siRNA sense strand
gcacaacugcaucauuuau

SEQ ID NO: 1194663 - RNA, 19 nt, Homo sapiens
  misc_RNA (1)...(19): siRNA sense strand
gcgaacuugucauagauuu

SEQ ID NO: 1194664 - RNA, 19 nt, Homo sapiens
  misc_RNA (1)...(19): siRNA sense strand
gcacagcgauucggaggau

SEQ ID NO: 1194665 - RNA, 19 nt, Homo sapiens
  misc_RNA (1)...(19): siRNA sense strand
aagcugagauggauuugaa

SEQ ID NO: 1194666 - RNA, 19 nt, Homo sapiens
  misc_RNA (1)...(19): siRNA sense strand
gaacauccgcaggaaguuu

SEQ ID NO: 1194667 - RNA, 19 nt, Homo sapiens
  misc_RNA (1)...(19): siRNA sense strand
cagaaacacuaaauaaguc

SEQ ID NO: 1194668 - RNA, 19 nt, Homo sapiens
  misc_RNA (1)...(19): siRNA sense strand
aaaccuggcuuacugaaca

SEQ ID NO: 1194669 - RNA, 19 nt, Homo sapiens
  misc_RNA (1)...(19): siRNA sense strand
gagcagcagugaugagaag

SEQ ID NO: 1194670 - RNA, 19 nt, Homo sapiens
  misc_RNA (1)...(19): siRNA sense strand
gaacagcacccugacuaug

SEQ ID NO: 1194671 - RNA, 19 nt, Homo sapiens
  misc_RNA (1)...(19): siRNA sense strand
caucaacuguccagcagaa

SEQ ID NO: 1194672 - RNA, 19 nt, Homo sapiens
  misc_RNA (1)...(19): siRNA sense strand
gggccuggguuccaauaaa

SEQ ID NO: 1194673 - RNA, 19 nt, Homo sapiens
  misc_RNA (1)...(19): siRNA sense strand
gaaugaaaucgaaguaugu

SEQ ID NO: 1194674 - RNA, 19 nt, Homo sapiens
  misc_RNA (1)...(19): siRNA sense strand
gcaucgagacccagaguaa

SEQ ID NO: 1194675 - RNA, 19 nt, Homo sapiens
  misc_RNA (1)...(19): siRNA sense strand
agaagcagcuggaguugga

SEQ ID NO: 1194676 - RNA, 19 nt, Homo sapiens
  misc_RNA (1)...(19): siRNA sense strand
ggacaagcagggaguuuau

SEQ ID NO: 1194677 - RNA, 19 nt, Homo sapiens
  misc_RNA (1)...(19): siRNA sense strand
caacagccaguaucaaaug

SEQ ID NO: 1194678 - RNA, 19 nt, Homo sapiens
  misc_RNA (1)...(19): siRNA sense strand
ccauggacuuccuggauaa

SEQ ID NO: 1194679 - RNA, 19 nt, Homo sapiens
  misc_RNA (1)...(19): siRNA sense strand
gagacgcccuccuccauuc

SEQ ID NO: 1194680 - RNA, 19 nt, Homo sapiens
  misc_RNA (1)...(19): siRNA sense strand
gaacuugucauagauuuag

SEQ ID NO: 1194681 - RNA, 19 nt, Homo sapiens
  misc_RNA (1)...(19): siRNA sense strand
aggauaaacugaagggaaa

SEQ ID NO: 1194682 - RNA, 19 nt, Homo sapiens
  misc_RNA (1)...(19): siRNA sense strand
caaagcacaauuaggcaua

SEQ ID NO: 1194683 - RNA, 19 nt, Homo sapiens
  misc_RNA (1)...(19): siRNA sense strand
ggucgaugcccgauucuuu

SEQ ID NO: 1194684 - RNA, 19 nt, Homo sapiens
  misc_RNA (1)...(19): siRNA sense strand
cauaaaggauaaacugaag

SEQ ID NO: 1194685 - RNA, 19 nt, Homo sapiens
  misc_RNA (1)...(19): siRNA sense strand
gcacaauuaggcauaaaug

SEQ ID NO: 1194686 - RNA, 19 nt, Homo sapiens
  misc_RNA (1)...(19): siRNA sense strand
aaucacaaauugacgcaaa

SEQ ID NO: 1194687 - RNA, 19 nt, Homo sapiens
  misc_RNA (1)...(19): siRNA sense strand
gcucgacccuugaccuuuc

SEQ ID NO: 1194688 - RNA, 19 nt, Homo sapiens
  misc_RNA (1)...(19): siRNA sense strand
ugaagaagcagcuggaguu

SEQ ID NO: 1194689 - RNA, 19 nt, Homo sapiens
  misc_RNA (1)...(19): siRNA sense strand
uaagaaggaacccaaagaa

SEQ ID NO: 1194690 - RNA, 19 nt, Homo sapiens
  misc_RNA (1)...(19): siRNA sense strand
gaacgagccagaagacaca

SEQ ID NO: 1194691 - RNA, 19 nt, Homo sapiens
  misc_RNA (1)...(19): siRNA sense strand
gaguugcaaagcacaauua

SEQ ID NO: 1194692 - RNA, 19 nt, Homo sapiens
  misc_RNA (1)...(19): siRNA sense strand
ggauuuccuugucggauau

SEQ ID NO: 1194693 - RNA, 19 nt, Homo sapiens
  misc_RNA (1)...(19): siRNA sense strand
gaacagcccagaaaagaaa

SEQ ID NO: 1194694 - RNA, 19 nt, Homo sapiens
  misc_RNA (1)...(19): siRNA sense strand
aagcaaagcugagauggau

SEQ ID NO: 1194695 - RNA, 19 nt, Homo sapiens
  misc_RNA (1)...(19): siRNA sense strand
ccagaagcccguuccauug

SEQ ID NO: 1194696 - RNA, 19 nt, Homo sapiens
  misc_RNA (1)...(19): siRNA sense strand
agcaagagcucuccgaaau

SEQ ID NO: 1194697 - RNA, 19 nt, Homo sapiens
  misc_RNA (1)...(19): siRNA sense strand
agagcgaacuugucauaga

SEQ ID NO: 1194698 - RNA, 19 nt, Homo sapiens
  misc_RNA (1)...(19): siRNA sense strand
ccaagauccugaugagcaa

SEQ ID NO: 1194699 - RNA, 19 nt, Homo sapiens
  misc_RNA (1)...(19): siRNA sense strand
caaaagcucuaagggauaa

SEQ ID NO: 1194700 - RNA, 19 nt, Homo sapiens
  misc_RNA (1)...(19): siRNA sense strand
caaguuugccauucagaaa

SEQ ID NO: 1194701 - RNA, 19 nt, Homo sapiens
  misc_RNA (1)...(19): siRNA sense strand
ggaguaauaaauccaguug

SEQ ID NO: 1194702 - RNA, 19 nt, Homo sapiens
  misc_RNA (1)...(19): siRNA sense strand
ggagacgucagcugagaaa

SEQ ID NO: 1194703 - RNA, 19 nt, Homo sapiens
  misc_RNA (1)...(19): siRNA sense strand
gaaggaacccaaagaacca

SEQ ID NO: 1194704 - RNA, 19 nt, Homo sapiens
  misc_RNA (1)...(19): siRNA sense strand
cggauuuccuugucggaua

SEQ ID NO: 1194705 - RNA, 19 nt, Homo sapiens
  misc_RNA (1)...(19): siRNA sense strand
gagaacauccgcaggaagu

SEQ ID NO: 1194706 - RNA, 19 nt, Homo sapiens
  misc_RNA (1)...(19): siRNA sense strand
gauaguagcgauagugagu

SEQ ID NO: 1194707 - RNA, 19 nt, Homo sapiens
  misc_RNA (1)...(19): siRNA sense strand
ggaacaaugacagaaauau

SEQ ID NO: 1194708 - RNA, 19 nt, Homo sapiens
  misc_RNA (1)...(19): siRNA sense strand
gcaauaaaaggaacaauga

SEQ ID NO: 1194709 - RNA, 19 nt, Homo sapiens
  misc_RNA (1)...(19): siRNA sense strand
gaugaaugaaaucgaagua

SEQ ID NO: 1194710 - RNA, 19 nt, Homo sapiens
  misc_RNA (1)...(19): siRNA sense strand
gaagagccuccucccgaaa

SEQ ID NO: 1194711 - RNA, 19 nt, Homo sapiens
  misc_RNA (1)...(19): siRNA sense strand
gcaagagcucuccgaaaug

SEQ ID NO: 1194712 - RNA, 19 nt, Homo sapiens
  misc_RNA (1)...(19): siRNA sense strand
gcccugagccugagaagga

SEQ ID NO: 1194713 - RNA, 19 nt, Homo sapiens
  misc_RNA (1)...(19): siRNA sense strand
gguuccagcugaaucuuga

SEQ ID NO: 1194714 - RNA, 19 nt, Homo sapiens
  misc_RNA (1)...(19): siRNA sense strand
gaagcaaagcugagaugga

SEQ ID NO: 1194715 - RNA, 19 nt, Homo sapiens
  misc_RNA (1)...(19): siRNA sense strand
guaaagccaugacaaugcu

SEQ ID NO: 1194716 - RNA, 19 nt, Homo sapiens
  misc_RNA (1)...(19): siRNA sense strand
agagccaucugcuguuaaa

SEQ ID NO: 1194717 - RNA, 19 nt, Homo sapiens
  misc_RNA (1)...(19): siRNA sense strand
gaccauagagaguugcaaa

SEQ ID NO: 1194718 - RNA, 19 nt, Homo sapiens
  misc_RNA (1)...(19): siRNA sense strand
gcgagucgguccagcaaca

SEQ ID NO: 1194719 - RNA, 19 nt, Homo sapiens
  misc_RNA (1)...(19): siRNA sense strand
gggacaagcagggaguuua

SEQ ID NO: 1194720 - RNA, 19 nt, Homo sapiens
  misc_RNA (1)...(19): siRNA sense strand
ucaccagccuccaccaaga

SEQ ID NO: 1194721 - RNA, 19 nt, Homo sapiens
  misc_RNA (1)...(19): siRNA sense strand
uaccucaugucuaaagaaa

SEQ ID NO: 1194722 - RNA, 19 nt, Homo sapiens
  misc_RNA (1)...(19): siRNA sense strand
aauaauugcuaccucaugu

SEQ ID NO: 1194723 - RNA, 19 nt, Homo sapiens
  misc_RNA (1)...(19): siRNA sense strand
ggccuggguuccaauaaau

SEQ ID NO: 1194724 - RNA, 19 nt, Homo sapiens
  misc_RNA (1)...(19): siRNA sense strand
guagcaauccacauccuuu

SEQ ID NO: 1194725 - RNA, 19 nt, Homo sapiens
  misc_RNA (1)...(19): siRNA sense strand
ccacuggccugagcacaug

SEQ ID NO: 1194726 - RNA, 19 nt, Homo sapiens
  misc_RNA (1)...(19): siRNA sense strand
gaagcacaauagcugagau

SEQ ID NO: 1194727 - RNA, 19 nt, Homo sapiens
  misc_RNA (1)...(19): siRNA sense strand
gauauugccaaguacacua

SEQ ID NO: 1194728 - RNA, 19 nt, Homo sapiens
  misc_RNA (1)...(19): siRNA sense strand
agagagcgaacuugucaua

SEQ ID NO: 1194729 - RNA, 19 nt, Homo sapiens
  misc_RNA (1)...(19): siRNA sense strand
gcaggaugcugagaagaag

SEQ ID NO: 1194730 - RNA, 19 nt, Homo sapiens
  misc_RNA (1)...(19): siRNA sense strand
caaagaagguugucagaug

SEQ ID NO: 1194731 - RNA, 19 nt, Homo sapiens
  misc_RNA (1)...(19): siRNA sense strand
gaauacaucuuccauccaa

SEQ ID NO: 1194732 - RNA, 19 nt, Homo sapiens
  misc_RNA (1)...(19): siRNA sense strand
gagcuuggcugaagaggaa

SEQ ID NO: 1194733 - RNA, 19 nt, Homo sapiens
  misc_RNA (1)...(19): siRNA sense strand
uaaaugaaaucucggaaga

SEQ ID NO: 1194734 - RNA, 19 nt, Homo sapiens
  misc_RNA (1)...(19): siRNA sense strand
gaacaugagaugaaugaaa

SEQ ID NO: 1194735 - RNA, 19 nt, Homo sapiens
  misc_RNA (1)...(19): siRNA sense strand
caagagcucuccgaaauga

SEQ ID NO: 1194736 - RNA, 19 nt, Homo sapiens
  misc_RNA (1)...(19): siRNA sense strand
cgaaguauguccagaaugu

SEQ ID NO: 1194737 - RNA, 19 nt, Homo sapiens
  misc_RNA (1)...(19): siRNA sense strand
gcucaccauugaacaguua

SEQ ID NO: 1194738 - RNA, 19 nt, Homo sapiens
  misc_RNA (1)...(19): siRNA sense strand
gaacacagaaacacuaaau

SEQ ID NO: 1194739 - RNA, 19 nt, Homo sapiens
  misc_RNA (1)...(19): siRNA sense strand
cgaaaugaaacacaacuua

SEQ ID NO: 1194740 - RNA, 19 nt, Homo sapiens
  misc_RNA (1)...(19): siRNA sense strand
aaagaaaccuggcuuacug

SEQ ID NO: 1194741 - RNA, 19 nt, Homo sapiens
  misc_RNA (1)...(19): siRNA sense strand
ugucauagauuuaggagaa

SEQ ID NO: 1194742 - RNA, 19 nt, Homo sapiens
  misc_RNA (1)...(19): siRNA sense strand
ugcaagagauggagguuua

SEQ ID NO: 1194743 - RNA, 19 nt, Homo sapiens
  misc_RNA (1)...(19): siRNA sense strand
ccucaugucuaaagaaauu

SEQ ID NO: 1194744 - RNA, 19 nt, Homo sapiens
  misc_RNA (1)...(19): siRNA sense strand
gcaaauagcgaaaguaguc

SEQ ID NO: 1194745 - RNA, 19 nt, Homo sapiens
  misc_RNA (1)...(19): siRNA sense strand
gcaaagcugagauggauuu

SEQ ID NO: 1194746 - RNA, 19 nt, Homo sapiens
  misc_RNA (1)...(19): siRNA sense strand
ccgcugauauugccaagua

SEQ ID NO: 1194747 - RNA, 19 nt, Homo sapiens
  misc_RNA (1)...(19): siRNA sense strand
ccacagagcuuggcugaag

SEQ ID NO: 1194748 - RNA, 19 nt, Homo sapiens
  misc_RNA (1)...(19): siRNA sense strand
aaagagccaucugcuguua

SEQ ID NO: 1194749 - RNA, 19 nt, Homo sapiens
  misc_RNA (1)...(19): siRNA sense strand
gcaggucgaugcccgauuc

SEQ ID NO: 1194750 - RNA, 19 nt, Homo sapiens
  misc_RNA (1)...(19): siRNA sense strand
gcagcauccugaaucuuaa

SEQ ID NO: 1194751 - RNA, 19 nt, Homo sapiens
  misc_RNA (1)...(19): siRNA sense strand
ggacagaugcauuccagaa

SEQ ID NO: 1194752 - RNA, 19 nt, Homo sapiens
  misc_RNA (1)...(19): siRNA sense strand
caaagaaccaucucccaaa

SEQ ID NO: 1194753 - RNA, 19 nt, Homo sapiens
  misc_RNA (1)...(19): siRNA sense strand
gagcgaacuugucauagau

SEQ ID NO: 1194754 - RNA, 19 nt, Homo sapiens
  misc_RNA (1)...(19): siRNA sense strand
ugaaugaaaucgaaguaug

SEQ ID NO: 1194755 - RNA, 19 nt, Homo sapiens
  misc_RNA (1)...(19): siRNA sense strand
uaaccuggaucgaagcaaa

SEQ ID NO: 1194756 - RNA, 19 nt, Homo sapiens
  misc_RNA (1)...(19): siRNA sense strand
ugacagaaauauacaacga

SEQ ID NO: 1194757 - RNA, 19 nt, Homo sapiens
  misc_RNA (1)...(19): siRNA sense strand
caaacccaguggagauuaa

SEQ ID NO: 1194758 - RNA, 19 nt, Homo sapiens
  misc_RNA (1)...(19): siRNA sense strand
uauccuaccugcucaaguu

SEQ ID NO: 1194759 - RNA, 19 nt, Homo sapiens
  misc_RNA (1)...(19): siRNA sense strand
gaaaugaaacacaacuuag

SEQ ID NO: 1194760 - RNA, 19 nt, Homo sapiens
  misc_RNA (1)...(19): siRNA sense strand
ggcagcauccugaaucuua

SEQ ID NO: 1194761 - RNA, 19 nt, Homo sapiens
  misc_RNA (1)...(19): siRNA sense strand
ugagaugaaugaaaucgaa

SEQ ID NO: 1194762 - RNA, 19 nt, Homo sapiens
  misc_RNA (1)...(19): siRNA sense strand
gcacaacugcaucauuuau

SEQ ID NO: 1194763 - RNA, 19 nt, Homo sapiens
  misc_RNA (1)...(19): siRNA sense strand
gcgaacuugucauagauuu

SEQ ID NO: 1194764 - RNA, 19 nt, Homo sapiens
  misc_RNA (1)...(19): siRNA sense strand
gcacagcgauucggaggau

SEQ ID NO: 1194765 - RNA, 19 nt, Homo sapiens
  misc_RNA (1)...(19): siRNA sense strand
aagcugagauggauuugaa

SEQ ID NO: 1194766 - RNA, 19 nt, Homo sapiens
  misc_RNA (1)...(19): siRNA sense strand
gaacauccgcaggaaguuu

SEQ ID NO: 1194767 - RNA, 19 nt, Homo sapiens
  misc_RNA (1)...(19): siRNA sense strand
cagaaacacuaaauaaguc

SEQ ID NO: 1194768 - RNA, 19 nt, Homo sapiens
  misc_RNA (1)...(19): siRNA sense strand
aaaccuggcuuacugaaca

SEQ ID NO: 1194769 - RNA, 19 nt, Homo sapiens
  misc_RNA (1)...(19): siRNA sense strand
gagcagcagugaugagaag

SEQ ID NO: 1194770 - RNA, 19 nt, Homo sapiens
  misc_RNA (1)...(19): siRNA sense strand
gaacagcacccugacuaug

SEQ ID NO: 1194771 - RNA, 19 nt, Homo sapiens
  misc_RNA (1)...(19): siRNA sense strand
caucaacuguccagcagaa

SEQ ID NO: 1194772 - RNA, 19 nt, Homo sapiens
  misc_RNA (1)...(19): siRNA sense strand
gggccuggguuccaauaaa

SEQ ID NO: 1194773 - RNA, 19 nt, Homo sapiens
  misc_RNA (1)...(19): siRNA sense strand
gaaugaaaucgaaguaugu

SEQ ID NO: 1194774 - RNA, 19 nt, Homo sapiens
  misc_RNA (1)...(19): siRNA sense strand
gcaucgagacccagaguaa

SEQ ID NO: 1194775 - RNA, 19 nt, Homo sapiens
  misc_RNA (1)...(19): siRNA sense strand
agaagcagcuggaguugga

SEQ ID NO: 1194776 - RNA, 19 nt, Homo sapiens
  misc_RNA (1)...(19): siRNA sense strand
ggacaagcagggaguuuau

SEQ ID NO: 1194777 - RNA, 19 nt, Homo sapiens
  misc_RNA (1)...(19): siRNA sense strand
caacagccaguaucaaaug

SEQ ID NO: 1194778 - RNA, 19 nt, Homo sapiens
  misc_RNA (1)...(19): siRNA sense strand
ccauggacuuccuggauaa

SEQ ID NO: 1194779 - RNA, 19 nt, Homo sapiens
  misc_RNA (1)...(19): siRNA sense strand
gagacgcccuccuccauuc

SEQ ID NO: 1194780 - RNA, 19 nt, Homo sapiens
  misc_RNA (1)...(19): siRNA sense strand
gaacuugucauagauuuag

SEQ ID NO: 1194781 - RNA, 19 nt, Homo sapiens
  misc_RNA (1)...(19): siRNA sense strand
aggauaaacugaagggaaa

SEQ ID NO: 1194782 - RNA, 19 nt, Homo sapiens
  misc_RNA (1)...(19): siRNA sense strand
caaagcacaauuaggcaua

SEQ ID NO: 1194783 - RNA, 19 nt, Homo sapiens
  misc_RNA (1)...(19): siRNA sense strand
ggucgaugcccgauucuuu

SEQ ID NO: 1194784 - RNA, 19 nt, Homo sapiens
  misc_RNA (1)...(19): siRNA sense strand
cauaaaggauaaacugaag

SEQ ID NO: 1194785 - RNA, 19 nt, Homo sapiens
  misc_RNA (1)...(19): siRNA sense strand
gcacaauuaggcauaaaug

SEQ ID NO: 1194786 - RNA, 19 nt, Homo sapiens
  misc_RNA (1)...(19): siRNA sense strand
aaucacaaauugacgcaaa

SEQ ID NO: 1194787 - RNA, 19 nt, Homo sapiens
  misc_RNA (1)...(19): siRNA sense strand
gcucgacccuugaccuuuc

SEQ ID NO: 1194788 - RNA, 19 nt, Homo sapiens
  misc_RNA (1)...(19): siRNA sense strand
ugaagaagcagcuggaguu

SEQ ID NO: 1194789 - RNA, 19 nt, Homo sapiens
  misc_RNA (1)...(19): siRNA sense strand
uaagaaggaacccaaagaa

SEQ ID NO: 1194790 - RNA, 19 nt, Homo sapiens
  misc_RNA (1)...(19): siRNA sense strand
gaacgagccagaagacaca

SEQ ID NO: 1194791 - RNA, 19 nt, Homo sapiens
  misc_RNA (1)...(19): siRNA sense strand
gaguugcaaagcacaauua

SEQ ID NO: 1194792 - RNA, 19 nt, Homo sapiens
  misc_RNA (1)...(19): siRNA sense strand
ggauuuccuugucggauau

SEQ ID NO: 1194793 - RNA, 19 nt, Homo sapiens
  misc_RNA (1)...(19): siRNA sense strand
gaacagcccagaaaagaaa

SEQ ID NO: 1194794 - RNA, 19 nt, Homo sapiens
  misc_RNA (1)...(19): siRNA sense strand
aagcaaagcugagauggau

SEQ ID NO: 1194795 - RNA, 19 nt, Homo sapiens
  misc_RNA (1)...(19): siRNA sense strand
ccagaagcccguuccauug

SEQ ID NO: 1194796 - RNA, 19 nt, Homo sapiens
  misc_RNA (1)...(19): siRNA sense strand
agcaagagcucuccgaaau

SEQ ID NO: 1194797 - RNA, 19 nt, Homo sapiens
  misc_RNA (1)...(19): siRNA sense strand
agagcgaacuugucauaga

SEQ ID NO: 1194798 - RNA, 19 nt, Homo sapiens
  misc_RNA (1)...(19): siRNA sense strand
ccaagauccugaugagcaa

SEQ ID NO: 1194799 - RNA, 19 nt, Homo sapiens
  misc_RNA (1)...(19): siRNA sense strand
caaaagcucuaagggauaa

SEQ ID NO: 1194800 - RNA, 19 nt, Homo sapiens
  misc_RNA (1)...(19): siRNA sense strand
caaguuugccauucagaaa

SEQ ID NO: 1194801 - RNA, 19 nt, Homo sapiens
  misc_RNA (1)...(19): siRNA sense strand
ggaguaauaaauccaguug

SEQ ID NO: 1194802 - RNA, 19 nt, Homo sapiens
  misc_RNA (1)...(19): siRNA sense strand
ggagacgucagcugagaaa

SEQ ID NO: 1194803 - RNA, 19 nt, Homo sapiens
  misc_RNA (1)...(19): siRNA sense strand
gaaggaacccaaagaacca

SEQ ID NO: 1194804 - RNA, 19 nt, Homo sapiens
  misc_RNA (1)...(19): siRNA sense strand
cggauuuccuugucggaua

SEQ ID NO: 1194805 - RNA, 19 nt, Homo sapiens
  misc_RNA (1)...(19): siRNA sense strand
gagaacauccgcaggaagu

SEQ ID NO: 1194806 - RNA, 19 nt, Homo sapiens
  misc_RNA (1)...(19): siRNA sense strand
gauaguagcgauagugagu

SEQ ID NO: 1194807 - RNA, 19 nt, Homo sapiens
  misc_RNA (1)...(19): siRNA sense strand
ggaacaaugacagaaauau

SEQ ID NO: 1194808 - RNA, 19 nt, Homo sapiens
  misc_RNA (1)...(19): siRNA sense strand
gcaauaaaaggaacaauga

SEQ ID NO: 1194809 - RNA, 19 nt, Homo sapiens
  misc_RNA (1)...(19): siRNA sense strand
gaugaaugaaaucgaagua

SEQ ID NO: 1194810 - RNA, 19 nt, Homo sapiens
  misc_RNA (1)...(19): siRNA sense strand
gaagagccuccucccgaaa

SEQ ID NO: 1194811 - RNA, 19 nt, Homo sapiens
  misc_RNA (1)...(19): siRNA sense strand
gcaagagcucuccgaaaug

SEQ ID NO: 1194812 - RNA, 19 nt, Homo sapiens
  misc_RNA (1)...(19): siRNA sense strand
gcccugagccugagaagga

SEQ ID NO: 1194813 - RNA, 19 nt, Homo sapiens
  misc_RNA (1)...(19): siRNA sense strand
gguuccagcugaaucuuga

SEQ ID NO: 1194814 - RNA, 19 nt, Homo sapiens
  misc_RNA (1)...(19): siRNA sense strand
gaagcaaagcugagaugga

SEQ ID NO: 1194815 - RNA, 19 nt, Homo sapiens
  misc_RNA (1)...(19): siRNA sense strand
guaaagccaugacaaugcu

SEQ ID NO: 1194816 - RNA, 19 nt, Homo sapiens
  misc_RNA (1)...(19): siRNA sense strand
agagccaucugcuguuaaa

SEQ ID NO: 1194817 - RNA, 19 nt, Homo sapiens
  misc_RNA (1)...(19): siRNA sense strand
gaccauagagaguugcaaa

SEQ ID NO: 1194818 - RNA, 19 nt, Homo sapiens
  misc_RNA (1)...(19): siRNA sense strand
gcgagucgguccagcaaca

SEQ ID NO: 1194819 - RNA, 19 nt, Homo sapiens
  misc_RNA (1)...(19): siRNA sense strand
gggacaagcagggaguuua

SEQ ID NO: 1194820 - RNA, 19 nt, Homo sapiens
  misc_RNA (1)...(19): siRNA sense strand
ucaccagccuccaccaaga

SEQ ID NO: 1194821 - RNA, 19 nt, Homo sapiens
  misc_RNA (1)...(19): siRNA sense strand
uaccucaugucuaaagaaa

SEQ ID NO: 1194822 - RNA, 19 nt, Homo sapiens
  misc_RNA (1)...(19): siRNA sense strand
aauaauugcuaccucaugu

SEQ ID NO: 1194823 - RNA, 19 nt, Homo sapiens
  misc_RNA (1)...(19): siRNA sense strand
ggccuggguuccaauaaau

SEQ ID NO: 1194824 - RNA, 19 nt, Homo sapiens
  misc_RNA (1)...(19): siRNA sense strand
guagcaauccacauccuuu

SEQ ID NO: 1194825 - RNA, 19 nt, Homo sapiens
  misc_RNA (1)...(19): siRNA sense strand
ccacuggccugagcacaug

SEQ ID NO: 1194826 - RNA, 19 nt, Homo sapiens
  misc_RNA (1)...(19): siRNA sense strand
gaagcacaauagcugagau

SEQ ID NO: 1194827 - RNA, 19 nt, Homo sapiens
  misc_RNA (1)...(19): siRNA sense strand
gauauugccaaguacacua

SEQ ID NO: 1194828 - RNA, 19 nt, Homo sapiens
  misc_RNA (1)...(19): siRNA sense strand
agagagcgaacuugucaua

SEQ ID NO: 1194829 - RNA, 19 nt, Homo sapiens
  misc_RNA (1)...(19): siRNA sense strand
gcaggaugcugagaagaag

SEQ ID NO: 1194830 - RNA, 19 nt, Homo sapiens
  misc_RNA (1)...(19): siRNA sense strand
gagaaaggcaagaagauuu

SEQ ID NO: 1194831 - RNA, 19 nt, Homo sapiens
  misc_RNA (1)...(19): siRNA sense strand
gcacaagacugggccaaau

SEQ ID NO: 1194832 - RNA, 19 nt, Homo sapiens
  misc_RNA (1)...(19): siRNA sense strand
guacaucccuggaacaaaa

SEQ ID NO: 1194833 - RNA, 19 nt, Homo sapiens
  misc_RNA (1)...(19): siRNA sense strand
uggagaaucccaagaagua

SEQ ID NO: 1194834 - RNA, 19 nt, Homo sapiens
  misc_RNA (1)...(19): siRNA sense strand
gcauuaagaagaaggaaga

SEQ ID NO: 1194835 - RNA, 19 nt, Homo sapiens
  misc_RNA (1)...(19): siRNA sense strand
aggauacacugauggagua

SEQ ID NO: 1194836 - RNA, 19 nt, Homo sapiens
  misc_RNA (1)...(19): siRNA sense strand
gggagaggauacacugaug

SEQ ID NO: 1194837 - RNA, 19 nt, Homo sapiens
  misc_RNA (1)...(19): siRNA sense strand
aaaucuccauggucucuuu

SEQ ID NO: 1194838 - RNA, 19 nt, Homo sapiens
  misc_RNA (1)...(19): siRNA sense strand
gauggaguauuuggagaau

SEQ ID NO: 1194839 - RNA, 19 nt, Homo sapiens
  misc_RNA (1)...(19): siRNA sense strand
acacagccgccaauaagaa

SEQ ID NO: 1194840 - RNA, 19 nt, Homo sapiens
  misc_RNA (1)...(19): siRNA sense strand
ugagaaaggcaagaagauu

SEQ ID NO: 1194841 - RNA, 19 nt, Homo sapiens
  misc_RNA (1)...(19): siRNA sense strand
uuacacagccgccaauaag

SEQ ID NO: 1194842 - RNA, 19 nt, Homo sapiens
  misc_RNA (1)...(19): siRNA sense strand
gagaggauacacugaugga

SEQ ID NO: 1194843 - RNA, 19 nt, Homo sapiens
  misc_RNA (1)...(19): siRNA sense strand
gaaguacaucccuggaaca

SEQ ID NO: 1194844 - RNA, 19 nt, Homo sapiens
  misc_RNA (1)...(19): siRNA sense strand
gagaaucccaagaaguaca

SEQ ID NO: 1194845 - RNA, 19 nt, Homo sapiens
  misc_RNA (1)...(19): siRNA sense strand
guugagaaaggcaagaaga

SEQ ID NO: 1194846 - RNA, 19 nt, Homo sapiens
  misc_RNA (1)...(19): siRNA sense strand
uaagaacaaaggcaucauc

SEQ ID NO: 1194847 - RNA, 19 nt, Homo sapiens
  misc_RNA (1)...(19): siRNA sense strand
uuaagaagaaggaagaaag

SEQ ID NO: 1194848 - RNA, 19 nt, Homo sapiens
  misc_RNA (1)...(19): siRNA sense strand
uaagaagaaggaagaaagg

SEQ ID NO: 1194849 - RNA, 19 nt, Homo sapiens
  misc_RNA (1)...(19): siRNA sense strand
gaucuuugucggcauuaag

SEQ ID NO: 1194850 - RNA, 19 nt, Homo sapiens
  misc_RNA (1)...(19): siRNA sense strand
ccaaaucuccauggucucu

SEQ ID NO: 1194851 - RNA, 19 nt, Homo sapiens
  misc_RNA (1)...(19): siRNA sense strand
ugauggaguauuuggagaa

SEQ ID NO: 1194852 - RNA, 19 nt, Homo sapiens
  misc_RNA (1)...(19): siRNA sense strand
gaagagugguuguguguuc

SEQ ID NO: 1194853 - RNA, 19 nt, Homo sapiens
  misc_RNA (1)...(19): siRNA sense strand
gaagaugacagagggauua

SEQ ID NO: 1194854 - RNA, 19 nt, Homo sapiens
  misc_RNA (1)...(19): siRNA sense strand
gaucuacagugaugaccua

SEQ ID NO: 1194855 - RNA, 19 nt, Homo sapiens
  misc_RNA (1)...(19): siRNA sense strand
gugcagaggucauggaaga

SEQ ID NO: 1194856 - RNA, 19 nt, Homo sapiens
  misc_RNA (1)...(19): siRNA sense strand
gcaagagugugagcagauu

SEQ ID NO: 1194857 - RNA, 19 nt, Homo sapiens
  misc_RNA (1)...(19): siRNA sense strand
gaacccaagccaauucaaa

SEQ ID NO: 1194858 - RNA, 19 nt, Homo sapiens
  misc_RNA (1)...(19): siRNA sense strand
gagcuacagaccaauauaa

SEQ ID NO: 1194859 - RNA, 19 nt, Homo sapiens
  misc_RNA (1)...(19): siRNA sense strand
ggaccaagcaagaguguga

SEQ ID NO: 1194860 - RNA, 19 nt, Homo sapiens
  misc_RNA (1)...(19): siRNA sense strand
ggagugaggugagggacuu

SEQ ID NO: 1194861 - RNA, 19 nt, Homo sapiens
  misc_RNA (1)...(19): siRNA sense strand
gcaccaugguagacucauu

SEQ ID NO: 1194862 - RNA, 19 nt, Homo sapiens
  misc_RNA (1)...(19): siRNA sense strand
uggaagaagugacaacaug

SEQ ID NO: 1194863 - RNA, 19 nt, Homo sapiens
  misc_RNA (1)...(19): siRNA sense strand
ggaggaggagggcuuguuu

SEQ ID NO: 1194864 - RNA, 19 nt, Homo sapiens
  misc_RNA (1)...(19): siRNA sense strand
ucacagagcgucaacagau

SEQ ID NO: 1194865 - RNA, 19 nt, Homo sapiens
  misc_RNA (1)...(19): siRNA sense strand
aaucauggcucuuguacuc

SEQ ID NO: 1194866 - RNA, 19 nt, Homo sapiens
  misc_RNA (1)...(19): siRNA sense strand
gcuuccagcuaccauguaa

SEQ ID NO: 1194867 - RNA, 19 nt, Homo sapiens
  misc_RNA (1)...(19): siRNA sense strand
gcccaugguuacaguagaa

SEQ ID NO: 1194868 - RNA, 19 nt, Homo sapiens
  misc_RNA (1)...(19): siRNA sense strand
ccaggacucuagcagcaaa

SEQ ID NO: 1194869 - RNA, 19 nt, Homo sapiens
  misc_RNA (1)...(19): siRNA sense strand
gaugcuggauguucaugga

SEQ ID NO: 1194870 - RNA, 19 nt, Homo sapiens
  misc_RNA (1)...(19): siRNA sense strand
gaaacagaggguugaccua

SEQ ID NO: 1194871 - RNA, 19 nt, Homo sapiens
  misc_RNA (1)...(19): siRNA sense strand
gaagcacugggccacauuu

SEQ ID NO: 1194872 - RNA, 19 nt, Homo sapiens
  misc_RNA (1)...(19): siRNA sense strand
caaagaugcacccaccauu

SEQ ID NO: 1194873 - RNA, 19 nt, Homo sapiens
  misc_RNA (1)...(19): siRNA sense strand
caccaugguagacucauua

SEQ ID NO: 1194874 - RNA, 19 nt, Homo sapiens
  misc_RNA (1)...(19): siRNA sense strand
ugaccauggugaaggcuuu

SEQ ID NO: 1194875 - RNA, 19 nt, Homo sapiens
  misc_RNA (1)...(19): siRNA sense strand
cacagagcgucaacagauu

SEQ ID NO: 1194876 - RNA, 19 nt, Homo sapiens
  misc_RNA (1)...(19): siRNA sense strand
gguaggaacccaagccaau

SEQ ID NO: 1194877 - RNA, 19 nt, Homo sapiens
  misc_RNA (1)...(19): siRNA sense strand
ucaggaugcuggauguuca

SEQ ID NO: 1194878 - RNA, 19 nt, Homo sapiens
  misc_RNA (1)...(19): siRNA sense strand
aagggagugugguaaguuu

SEQ ID NO: 1194879 - RNA, 19 nt, Homo sapiens
  misc_RNA (1)...(19): siRNA sense strand
cugaugaucuacagugaug

SEQ ID NO: 1194880 - RNA, 19 nt, Homo sapiens
  misc_RNA (1)...(19): siRNA sense strand
gcaaagaugcacccaccau

SEQ ID NO: 1194881 - RNA, 19 nt, Homo sapiens
  misc_RNA (1)...(19): siRNA sense strand
ggaagaugacagagggauu

SEQ ID NO: 1194882 - RNA, 19 nt, Homo sapiens
  misc_RNA (1)...(19): siRNA sense strand
gcagugcccggacaccaaa

SEQ ID NO: 1194883 - RNA, 19 nt, Homo sapiens
  misc_RNA (1)...(19): siRNA sense strand
gcuacagaccaauauaaga

SEQ ID NO: 1194884 - RNA, 19 nt, Homo sapiens
  misc_RNA (1)...(19): siRNA sense strand
gaggagagaugaggaugcu

SEQ ID NO: 1194885 - RNA, 19 nt, Homo sapiens
  misc_RNA (1)...(19): siRNA sense strand
acaacaugcuccuucaaca

SEQ ID NO: 1194886 - RNA, 19 nt, Homo sapiens
  misc_RNA (1)...(19): siRNA sense strand
guaggaacccaagccaauu

SEQ ID NO: 1194887 - RNA, 19 nt, Homo sapiens
  misc_RNA (1)...(19): siRNA sense strand
auaccgagcuacagaccaa

SEQ ID NO: 1194888 - RNA, 19 nt, Homo sapiens
  misc_RNA (1)...(19): siRNA sense strand
aggcgaggguugaggauug

SEQ ID NO: 1194889 - RNA, 19 nt, Homo sapiens
  misc_RNA (1)...(19): siRNA sense strand
ggguugaccuagguaucua

SEQ ID NO: 1194890 - RNA, 19 nt, Homo sapiens
  misc_RNA (1)...(19): siRNA sense strand
ggugauaccgagcuacaga

SEQ ID NO: 1194891 - RNA, 19 nt, Homo sapiens
  misc_RNA (1)...(19): siRNA sense strand
ccaagggagugugguaagu

SEQ ID NO: 1194892 - RNA, 19 nt, Homo sapiens
  misc_RNA (1)...(19): siRNA sense strand
cucauuaggcccaugguua

SEQ ID NO: 1194893 - RNA, 19 nt, Homo sapiens
  misc_RNA (1)...(19): siRNA sense strand
gugacaacaugcuccuuca

SEQ ID NO: 1194894 - RNA, 19 nt, Homo sapiens
  misc_RNA (1)...(19): siRNA sense strand
cagaagagugguugugugu

SEQ ID NO: 1194895 - RNA, 19 nt, Homo sapiens
  misc_RNA (1)...(19): siRNA sense strand
gccacccugugcuauauug

SEQ ID NO: 1194896 - RNA, 19 nt, Homo sapiens
  misc_RNA (1)...(19): siRNA sense strand
aaccuuugcucaacucuca

SEQ ID NO: 1194897 - RNA, 19 nt, Homo sapiens
  misc_RNA (1)...(19): siRNA sense strand
cuacagaccaauauaagag

SEQ ID NO: 1194898 - RNA, 19 nt, Homo sapiens
  misc_RNA (1)...(19): siRNA sense strand
guaggaaacagaggguuga

SEQ ID NO: 1194899 - RNA, 19 nt, Homo sapiens
  misc_RNA (1)...(19): siRNA sense strand
aaagaugcacccaccauuc

SEQ ID NO: 1194900 - RNA, 19 nt, Homo sapiens
  misc_RNA (1)...(19): siRNA sense strand
caagggagugugguaaguu

SEQ ID NO: 1194901 - RNA, 19 nt, Homo sapiens
  misc_RNA (1)...(19): siRNA sense strand
cagaaucauggcucuugua

SEQ ID NO: 1194902 - RNA, 19 nt, Homo sapiens
  misc_RNA (1)...(19): siRNA sense strand
gcacugggccacauuugcu

SEQ ID NO: 1194903 - RNA, 19 nt, Homo sapiens
  misc_RNA (1)...(19): siRNA sense strand
ugaccuagguaucuaucuc

SEQ ID NO: 1194904 - RNA, 19 nt, Homo sapiens
  misc_RNA (1)...(19): siRNA sense strand
acagaggguugaccuaggu

SEQ ID NO: 1194905 - RNA, 19 nt, Homo sapiens
  misc_RNA (1)...(19): siRNA sense strand
ucagaaucauggcucuugu

SEQ ID NO: 1194906 - RNA, 19 nt, Homo sapiens
  misc_RNA (1)...(19): siRNA sense strand
cgagcuacagaccaauaua

SEQ ID NO: 1194907 - RNA, 19 nt, Homo sapiens
  misc_RNA (1)...(19): siRNA sense strand
aaaccaggccucauucucu

SEQ ID NO: 1194908 - RNA, 19 nt, Homo sapiens
  misc_RNA (1)...(19): siRNA sense strand
gagcgucaacagauugugu

SEQ ID NO: 1194909 - RNA, 19 nt, Homo sapiens
  misc_RNA (1)...(19): siRNA sense strand
gaagaagugacaacaugcu

SEQ ID NO: 1194910 - RNA, 19 nt, Homo sapiens
  misc_RNA (1)...(19): siRNA sense strand
gaggaggagggcuuguuug

SEQ ID NO: 1194911 - RNA, 19 nt, Homo sapiens
  misc_RNA (1)...(19): siRNA sense strand
gcagaggucauggaagaag

SEQ ID NO: 1194912 - RNA, 19 nt, Homo sapiens
  misc_RNA (1)...(19): siRNA sense strand
gggcuuguuuggguguuug

SEQ ID NO: 1194913 - RNA, 19 nt, Homo sapiens
  misc_RNA (1)...(19): siRNA sense strand
gugguuguguguuccuguu

SEQ ID NO: 1194914 - RNA, 19 nt, Homo sapiens
  misc_RNA (1)...(19): siRNA sense strand
gagcagaagagugguugug

SEQ ID NO: 1194915 - RNA, 19 nt, Homo sapiens
  misc_RNA (1)...(19): siRNA sense strand
ggauugggcaguugguaca

SEQ ID NO: 1194916 - RNA, 19 nt, Homo sapiens
  misc_RNA (1)...(19): siRNA sense strand
gguugaggauugggcaguu

SEQ ID NO: 1194917 - RNA, 19 nt, Homo sapiens
  misc_RNA (1)...(19): siRNA sense strand
caacaugcuccuucaacag

SEQ ID NO: 1194918 - RNA, 19 nt, Homo sapiens
  misc_RNA (1)...(19): siRNA sense strand
ucguugccguuaccuguuu

SEQ ID NO: 1194919 - RNA, 19 nt, Homo sapiens
  misc_RNA (1)...(19): siRNA sense strand
uacaguagaaugugaagug

SEQ ID NO: 1194920 - RNA, 19 nt, Homo sapiens
  misc_RNA (1)...(19): siRNA sense strand
gggaaccuuugcucaacuc

SEQ ID NO: 1194921 - RNA, 19 nt, Homo sapiens
  misc_RNA (1)...(19): siRNA sense strand
gaccuagguaucuaucuca

SEQ ID NO: 1194922 - RNA, 19 nt, Homo sapiens
  misc_RNA (1)...(19): siRNA sense strand
gacucuagcagcaaagaug

SEQ ID NO: 1194923 - RNA, 19 nt, Homo sapiens
  misc_RNA (1)...(19): siRNA sense strand
gaagcuuuaggcggugaua

SEQ ID NO: 1194924 - RNA, 19 nt, Homo sapiens
  misc_RNA (1)...(19): siRNA sense strand
gaggauugggcaguuggua

SEQ ID NO: 1194925 - RNA, 19 nt, Homo sapiens
  misc_RNA (1)...(19): siRNA sense strand
cagaggucauggaagaagu

SEQ ID NO: 1194926 - RNA, 19 nt, Homo sapiens
  misc_RNA (1)...(19): siRNA sense strand
uggccacccugugcuauau

SEQ ID NO: 1194927 - RNA, 19 nt, Homo sapiens
  misc_RNA (1)...(19): siRNA sense strand
gacaacaugcuccuucaac

SEQ ID NO: 1194928 - RNA, 19 nt, Homo sapiens
  misc_RNA (1)...(19): siRNA sense strand
aagaugcacccaccauuca

SEQ ID NO: 1194929 - RNA, 19 nt, Homo sapiens
  misc_RNA (1)...(19): siRNA sense strand
guugaggauugggcaguug

SEQ ID NO: 1194930 - RNA, 19 nt, Homo sapiens
  misc_RNA (1)...(19): siRNA sense strand
ucccagcccugcucuacau

SEQ ID NO: 1194931 - RNA, 19 nt, Homo sapiens
  misc_RNA (1)...(19): siRNA sense strand
gcuguccagggaagcuuua

SEQ ID NO: 1194932 - RNA, 19 nt, Homo sapiens
  misc_RNA (1)...(19): siRNA sense strand
caagagugugagcagauug

SEQ ID NO: 1194933 - RNA, 19 nt, Homo sapiens
  misc_RNA (1)...(19): siRNA sense strand
acagagcgucaacagauug

SEQ ID NO: 1194934 - RNA, 19 nt, Homo sapiens
  misc_RNA (1)...(19): siRNA sense strand
ggcccaugguuacaguaga

SEQ ID NO: 1194935 - RNA, 19 nt, Homo sapiens
  misc_RNA (1)...(19): siRNA sense strand
cagucaggaugcuggaugu

SEQ ID NO: 1194936 - RNA, 19 nt, Homo sapiens
  misc_RNA (1)...(19): siRNA sense strand
cgccuuugcuucaucuaca

SEQ ID NO: 1194937 - RNA, 19 nt, Homo sapiens
  misc_RNA (1)...(19): siRNA sense strand
gugcugaggcgaggguuga

SEQ ID NO: 1194938 - RNA, 19 nt, Homo sapiens
  misc_RNA (1)...(19): siRNA sense strand
cccuggagaucccacauag

SEQ ID NO: 1194939 - RNA, 19 nt, Homo sapiens
  misc_RNA (1)...(19): siRNA sense strand
gaaccccuguccuguaugg

SEQ ID NO: 1194940 - RNA, 19 nt, Homo sapiens
  misc_RNA (1)...(19): siRNA sense strand
ccaagaaacugaagggaaa

SEQ ID NO: 1194941 - RNA, 19 nt, Homo sapiens
  misc_RNA (1)...(19): siRNA sense strand
gggaagaggugguucauca

SEQ ID NO: 1194942 - RNA, 19 nt, Homo sapiens
  misc_RNA (1)...(19): siRNA sense strand
gcucgaggaugcugacaua

SEQ ID NO: 1194943 - RNA, 19 nt, Homo sapiens
  misc_RNA (1)...(19): siRNA sense strand
cagggacgcugaagacaua

SEQ ID NO: 1194944 - RNA, 19 nt, Homo sapiens
  misc_RNA (1)...(19): siRNA sense strand
ggacaucugcuccggcuua

SEQ ID NO: 1194945 - RNA, 19 nt, Homo sapiens
  misc_RNA (1)...(19): siRNA sense strand
ggacgcacccgaugaaauu

SEQ ID NO: 1194946 - RNA, 19 nt, Homo sapiens
  misc_RNA (1)...(19): siRNA sense strand
gaccugaaaugugacaaua

SEQ ID NO: 1194947 - RNA, 19 nt, Homo sapiens
  misc_RNA (1)...(19): siRNA sense strand
ggccaaggcuggacgguuu

SEQ ID NO: 1194948 - RNA, 19 nt, Homo sapiens
  misc_RNA (1)...(19): siRNA sense strand
gaacaacccagcuuucuag

SEQ ID NO: 1194949 - RNA, 19 nt, Homo sapiens
  misc_RNA (1)...(19): siRNA sense strand
ccugaaaugugacaauauu

SEQ ID NO: 1194950 - RNA, 19 nt, Homo sapiens
  misc_RNA (1)...(19): siRNA sense strand
gaaauugccacguauaugg

SEQ ID NO: 1194951 - RNA, 19 nt, Homo sapiens
  misc_RNA (1)...(19): siRNA sense strand
ggaguaugcuaggcuauga

SEQ ID NO: 1194952 - RNA, 19 nt, Homo sapiens
  misc_RNA (1)...(19): siRNA sense strand
gcacgauccugaaaucaag

SEQ ID NO: 1194953 - RNA, 19 nt, Homo sapiens
  misc_RNA (1)...(19): siRNA sense strand
gaaggaacaacccagcuuu

SEQ ID NO: 1194954 - RNA, 19 nt, Homo sapiens
  misc_RNA (1)...(19): siRNA sense strand
ccgaugaaauugccacgua

SEQ ID NO: 1194955 - RNA, 19 nt, Homo sapiens
  misc_RNA (1)...(19): siRNA sense strand
ucaagagccuggacgagaa

SEQ ID NO: 1194956 - RNA, 19 nt, Homo sapiens
  misc_RNA (1)...(19): siRNA sense strand
agaaggagcugcagagucu

SEQ ID NO: 1194957 - RNA, 19 nt, Homo sapiens
  misc_RNA (1)...(19): siRNA sense strand
agacagggaugguggagaa

SEQ ID NO: 1194958 - RNA, 19 nt, Homo sapiens
  misc_RNA (1)...(19): siRNA sense strand
gauugagucuggauucuuc

SEQ ID NO: 1194959 - RNA, 19 nt, Homo sapiens
  misc_RNA (1)...(19): siRNA sense strand
ggaaagguacgagaucaaa

SEQ ID NO: 1194960 - RNA, 19 nt, Homo sapiens
  misc_RNA (1)...(19): siRNA sense strand
ggaacaacccagcuuucua

SEQ ID NO: 1194961 - RNA, 19 nt, Homo sapiens
  misc_RNA (1)...(19): siRNA sense strand
caaaugcaccggccacuau

SEQ ID NO: 1194962 - RNA, 19 nt, Homo sapiens
  misc_RNA (1)...(19): siRNA sense strand
gaggaaagguacgagauca

SEQ ID NO: 1194963 - RNA, 19 nt, Homo sapiens
  misc_RNA (1)...(19): siRNA sense strand
gcaaagaacacagcaguag

SEQ ID NO: 1194964 - RNA, 19 nt, Homo sapiens
  misc_RNA (1)...(19): siRNA sense strand
gaaagugcacgauccugaa

SEQ ID NO: 1194965 - RNA, 19 nt, Homo sapiens
  misc_RNA (1)...(19): siRNA sense strand
cgaggaugcugacauaaag

SEQ ID NO: 1194966 - RNA, 19 nt, Homo sapiens
  misc_RNA (1)...(19): siRNA sense strand
gcucuaccguguacucaga

SEQ ID NO: 1194967 - RNA, 19 nt, Homo sapiens
  misc_RNA (1)...(19): siRNA sense strand
caccagauccugagaguga

SEQ ID NO: 1194968 - RNA, 19 nt, Homo sapiens
  misc_RNA (1)...(19): siRNA sense strand
gaacaacagcaacaacaag

SEQ ID NO: 1194969 - RNA, 19 nt, Homo sapiens
  misc_RNA (1)...(19): siRNA sense strand
ggacaaggcagaggacaug

SEQ ID NO: 1194970 - RNA, 19 nt, Homo sapiens
  misc_RNA (1)...(19): siRNA sense strand
gaugaaauugccacguaua

SEQ ID NO: 1194971 - RNA, 19 nt, Homo sapiens
  misc_RNA (1)...(19): siRNA sense strand
gggagaagcaccugaagga

SEQ ID NO: 1194972 - RNA, 19 nt, Homo sapiens
  misc_RNA (1)...(19): siRNA sense strand
gcaaaccucgugcucgauu

SEQ ID NO: 1194973 - RNA, 19 nt, Homo sapiens
  misc_RNA (1)...(19): siRNA sense strand
cugagagagugaccuauaa

SEQ ID NO: 1194974 - RNA, 19 nt, Homo sapiens
  misc_RNA (1)...(19): siRNA sense strand
cggaugagguggcccaaga

SEQ ID NO: 1194975 - RNA, 19 nt, Homo sapiens
  misc_RNA (1)...(19): siRNA sense strand
agagugaccuauaagucua

SEQ ID NO: 1194976 - RNA, 19 nt, Homo sapiens
  misc_RNA (1)...(19): siRNA sense strand
ccaaggagcagcaggaugu

SEQ ID NO: 1194977 - RNA, 19 nt, Homo sapiens
  misc_RNA (1)...(19): siRNA sense strand
cuauaagucuaguagcaaa

SEQ ID NO: 1194978 - RNA, 19 nt, Homo sapiens
  misc_RNA (1)...(19): siRNA sense strand
agaaggagacgccggauga

SEQ ID NO: 1194979 - RNA, 19 nt, Homo sapiens
  misc_RNA (1)...(19): siRNA sense strand
gaagaggugguucaucauc

SEQ ID NO: 1194980 - RNA, 19 nt, Homo sapiens
  misc_RNA (1)...(19): siRNA sense strand
gauggugaccuucaaguuc

SEQ ID NO: 1194981 - RNA, 19 nt, Homo sapiens
  misc_RNA (1)...(19): siRNA sense strand
caaggaagaggcugagaug

SEQ ID NO: 1194982 - RNA, 19 nt, Homo sapiens
  misc_RNA (1)...(19): siRNA sense strand
accgagaccugaaauguga

SEQ ID NO: 1194983 - RNA, 19 nt, Homo sapiens
  misc_RNA (1)...(19): siRNA sense strand
gagagugaccuauaagucu

SEQ ID NO: 1194984 - RNA, 19 nt, Homo sapiens
  misc_RNA (1)...(19): siRNA sense strand
agaagcaccugaaggagau

SEQ ID NO: 1194985 - RNA, 19 nt, Homo sapiens
  misc_RNA (1)...(19): siRNA sense strand
caucacacggugcagaaua

SEQ ID NO: 1194986 - RNA, 19 nt, Homo sapiens
  misc_RNA (1)...(19): siRNA sense strand
ccauagaguucaccuucga

SEQ ID NO: 1194987 - RNA, 19 nt, Homo sapiens
  misc_RNA (1)...(19): siRNA sense strand
ccaagacugugggccguuu

SEQ ID NO: 1194988 - RNA, 19 nt, Homo sapiens
  misc_RNA (1)...(19): siRNA sense strand
gcuaggcuaugacagagau

SEQ ID NO: 1194989 - RNA, 19 nt, Homo sapiens
  misc_RNA (1)...(19): siRNA sense strand
cguauaugguggagcauga

SEQ ID NO: 1194990 - RNA, 19 nt, Homo sapiens
  misc_RNA (1)...(19): siRNA sense strand
ccagaagccagccaagauu

SEQ ID NO: 1194991 - RNA, 19 nt, Homo sapiens
  misc_RNA (1)...(19): siRNA sense strand
caacugggucugugaagau

SEQ ID NO: 1194992 - RNA, 19 nt, Homo sapiens
  misc_RNA (1)...(19): siRNA sense strand
caucuggucugcccugaag

SEQ ID NO: 1194993 - RNA, 19 nt, Homo sapiens
  misc_RNA (1)...(19): siRNA sense strand
uggagaagcuggagaaagc

SEQ ID NO: 1194994 - RNA, 19 nt, Homo sapiens
  misc_RNA (1)...(19): siRNA sense strand
aagaccagcuguccucgaa

SEQ ID NO: 1194995 - RNA, 19 nt, Homo sapiens
  misc_RNA (1)...(19): siRNA sense strand
ggaugugcaugcuggagau

SEQ ID NO: 1194996 - RNA, 19 nt, Homo sapiens
  misc_RNA (1)...(19): siRNA sense strand
ggcacguccucgucaauga

SEQ ID NO: 1194997 - RNA, 19 nt, Homo sapiens
  misc_RNA (1)...(19): siRNA sense strand
ucaagucccuccgcagaug

SEQ ID NO: 1194998 - RNA, 19 nt, Homo sapiens
  misc_RNA (1)...(19): siRNA sense strand
ccacgagagugacgucaag

SEQ ID NO: 1194999 - RNA, 19 nt, Homo sapiens
  misc_RNA (1)...(19): siRNA sense strand
ccaacugggucugugaaga

SEQ ID NO: 1195000 - RNA, 19 nt, Homo sapiens
  misc_RNA (1)...(19): siRNA sense strand
ggagaucgaagcucuguac

SEQ ID NO: 1195001 - RNA, 19 nt, Homo sapiens
  misc_RNA (1)...(19): siRNA sense strand
cgaugaaauugccacguau

SEQ ID NO: 1195002 - RNA, 19 nt, Homo sapiens
  misc_RNA (1)...(19): siRNA sense strand
ggucaccugugguaucaag

SEQ ID NO: 1195003 - RNA, 19 nt, Homo sapiens
  misc_RNA (1)...(19): siRNA sense strand
cccagaagcugcaagacau

SEQ ID NO: 1195004 - RNA, 19 nt, Homo sapiens
  misc_RNA (1)...(19): siRNA sense strand
aaagguacgagaucaaaga

SEQ ID NO: 1195005 - RNA, 19 nt, Homo sapiens
  misc_RNA (1)...(19): siRNA sense strand
ugugagagcuauggagguu

SEQ ID NO: 1195006 - RNA, 19 nt, Homo sapiens
  misc_RNA (1)...(19): siRNA sense strand
ggauguaccugcuuuugug

SEQ ID NO: 1195007 - RNA, 19 nt, Homo sapiens
  misc_RNA (1)...(19): siRNA sense strand
aagauucagcgcccuauaa

SEQ ID NO: 1195008 - RNA, 19 nt, Homo sapiens
  misc_RNA (1)...(19): siRNA sense strand
ucgagcagaugaaggaugu

SEQ ID NO: 1195009 - RNA, 19 nt, Homo sapiens
  misc_RNA (1)...(19): siRNA sense strand
gguggagcaugacuuuauc

SEQ ID NO: 1195010 - RNA, 19 nt, Homo sapiens
  misc_RNA (1)...(19): siRNA sense strand
ggaggaaagguacgagauc

SEQ ID NO: 1195011 - RNA, 19 nt, Homo sapiens
  misc_RNA (1)...(19): siRNA sense strand
caacagcaacaacaagaag

SEQ ID NO: 1195012 - RNA, 19 nt, Homo sapiens
  misc_RNA (1)...(19): siRNA sense strand
ucugagagagugaccuaua

SEQ ID NO: 1195013 - RNA, 19 nt, Homo sapiens
  misc_RNA (1)...(19): siRNA sense strand
caggcaagcugcuaaaucc

SEQ ID NO: 1195014 - RNA, 19 nt, Homo sapiens
  misc_RNA (1)...(19): siRNA sense strand
acaagauggugaccuucaa

SEQ ID NO: 1195015 - RNA, 19 nt, Homo sapiens
  misc_RNA (1)...(19): siRNA sense strand
ugagguggcccaagagaug

SEQ ID NO: 1195016 - RNA, 19 nt, Homo sapiens
  misc_RNA (1)...(19): siRNA sense strand
gaggagcacuacgaugagu

SEQ ID NO: 1195017 - RNA, 19 nt, Homo sapiens
  misc_RNA (1)...(19): siRNA sense strand
caagauucagcgcccuaua

SEQ ID NO: 1195018 - RNA, 19 nt, Homo sapiens
  misc_RNA (1)...(19): siRNA sense strand
gaaagcccaaggacaaugg

SEQ ID NO: 1195019 - RNA, 19 nt, Homo sapiens
  misc_RNA (1)...(19): siRNA sense strand
ggaaagcccaaggacaaug

SEQ ID NO: 1195020 - RNA, 19 nt, Homo sapiens
  misc_RNA (1)...(19): siRNA sense strand
gaaagguacgagaucaaag

SEQ ID NO: 1195021 - RNA, 19 nt, Homo sapiens
  misc_RNA (1)...(19): siRNA sense strand
gccagaagccagccaagau

SEQ ID NO: 1195022 - RNA, 19 nt, Homo sapiens
  misc_RNA (1)...(19): siRNA sense strand
uggcugcccuguccauuca

SEQ ID NO: 1195023 - RNA, 19 nt, Homo sapiens
  misc_RNA (1)...(19): siRNA sense strand
gaugauugagucuggauuc

SEQ ID NO: 1195024 - RNA, 19 nt, Homo sapiens
  misc_RNA (1)...(19): siRNA sense strand
auucagcgcccuauaaaga

SEQ ID NO: 1195025 - RNA, 19 nt, Homo sapiens
  misc_RNA (1)...(19): siRNA sense strand
ggcaaagaacacagcagua

SEQ ID NO: 1195026 - RNA, 19 nt, Homo sapiens
  misc_RNA (1)...(19): siRNA sense strand
guccagagcagcaggaugu

SEQ ID NO: 1195027 - RNA, 19 nt, Homo sapiens
  misc_RNA (1)...(19): siRNA sense strand
acgaggagcacuacgauga

SEQ ID NO: 1195028 - RNA, 19 nt, Homo sapiens
  misc_RNA (1)...(19): siRNA sense strand
ccaccgagaccugaaaugu

SEQ ID NO: 1195029 - RNA, 19 nt, Homo sapiens
  misc_RNA (1)...(19): siRNA sense strand
gagagagugaccuauaagu

SEQ ID NO: 1195030 - RNA, 19 nt, Homo sapiens
  misc_RNA (1)...(19): siRNA sense strand
guggacagcaccaucaaga

SEQ ID NO: 1195031 - RNA, 19 nt, Homo sapiens
  misc_RNA (1)...(19): siRNA sense strand
aaacguucaucgagcagau

SEQ ID NO: 1195032 - RNA, 19 nt, Homo sapiens
  misc_RNA (1)...(19): siRNA sense strand
caacaucgugcgcuucuac

SEQ ID NO: 1195033 - RNA, 19 nt, Homo sapiens
  misc_RNA (1)...(19): siRNA sense strand
cuauggagguucugauguc

SEQ ID NO: 1195034 - RNA, 19 nt, Homo sapiens
  misc_RNA (1)...(19): siRNA sense strand
aggcugagaugcugaaagg

SEQ ID NO: 1195035 - RNA, 19 nt, Homo sapiens
  misc_RNA (1)...(19): siRNA sense strand
ucgaggaugcugacauaaa

SEQ ID NO: 1195036 - RNA, 19 nt, Homo sapiens
  misc_RNA (1)...(19): siRNA sense strand
ccacccagcucccuaugcu

SEQ ID NO: 1195037 - RNA, 19 nt, Homo sapiens
  misc_RNA (1)...(19): siRNA sense strand
ccacagauggcgccuacug

SEQ ID NO: 1195038 - RNA, 19 nt, Homo sapiens
  misc_RNA (1)...(19): siRNA sense strand
cagcaccuccugccaccua

SEQ ID NO: 1195039 - RNA, 19 nt, Homo sapiens
  misc_RNA (1)...(19): siRNA sense strand
ugagagcuauggagguucu

SEQ ID NO: 1195040 - RNA, 19 nt, Homo sapiens
  misc_RNA (1)...(19): siRNA sense strand
gauaaaggaugaucuugaa

SEQ ID NO: 1195041 - RNA, 19 nt, Homo sapiens
  misc_RNA (1)...(19): siRNA sense strand
gcacucaccuuguaguuga

SEQ ID NO: 1195042 - RNA, 19 nt, Homo sapiens
  misc_RNA (1)...(19): siRNA sense strand
caaaugugcuacucaguuu

SEQ ID NO: 1195043 - RNA, 19 nt, Homo sapiens
  misc_RNA (1)...(19): siRNA sense strand
ggaagaauuugaagguuug

SEQ ID NO: 1195044 - RNA, 19 nt, Homo sapiens
  misc_RNA (1)...(19): siRNA sense strand
gaagagaugccucagauug

SEQ ID NO: 1195045 - RNA, 19 nt, Homo sapiens
  misc_RNA (1)...(19): siRNA sense strand
caacagagcaggcaaaugu

SEQ ID NO: 1195046 - RNA, 19 nt, Homo sapiens
  misc_RNA (1)...(19): siRNA sense strand
gaagggcucuuaugacauc

SEQ ID NO: 1195047 - RNA, 19 nt, Homo sapiens
  misc_RNA (1)...(19): siRNA sense strand
ucacauggguggaguuauu

SEQ ID NO: 1195048 - RNA, 19 nt, Homo sapiens
  misc_RNA (1)...(19): siRNA sense strand
cagaggagauuaagacuau

SEQ ID NO: 1195049 - RNA, 19 nt, Homo sapiens
  misc_RNA (1)...(19): siRNA sense strand
ggaaugaacaggauuucua

SEQ ID NO: 1195050 - RNA, 19 nt, Homo sapiens
  misc_RNA (1)...(19): siRNA sense strand
guacaaguaugaugaaucu

SEQ ID NO: 1195051 - RNA, 19 nt, Homo sapiens
  misc_RNA (1)...(19): siRNA sense strand
gacagaagauugccauaau

SEQ ID NO: 1195052 - RNA, 19 nt, Homo sapiens
  misc_RNA (1)...(19): siRNA sense strand
guagauggaugcccagcua

SEQ ID NO: 1195053 - RNA, 19 nt, Homo sapiens
  misc_RNA (1)...(19): siRNA sense strand
acacuaagauaaaggauga

SEQ ID NO: 1195054 - RNA, 19 nt, Homo sapiens
  misc_RNA (1)...(19): siRNA sense strand
guugaugacuuuagaaaug

SEQ ID NO: 1195055 - RNA, 19 nt, Homo sapiens
  misc_RNA (1)...(19): siRNA sense strand
ugacagaggagaacaagua

SEQ ID NO: 1195056 - RNA, 19 nt, Homo sapiens
  misc_RNA (1)...(19): siRNA sense strand
aaggagaagucauacguua

SEQ ID NO: 1195057 - RNA, 19 nt, Homo sapiens
  misc_RNA (1)...(19): siRNA sense strand
agaaaugacugaaaugcaa

SEQ ID NO: 1195058 - RNA, 19 nt, Homo sapiens
  misc_RNA (1)...(19): siRNA sense strand
ggcaacaauuauucaguua

SEQ ID NO: 1195059 - RNA, 19 nt, Homo sapiens
  misc_RNA (1)...(19): siRNA sense strand
uuacugagauuuccaagga

SEQ ID NO: 1195060 - RNA, 19 nt, Homo sapiens
  misc_RNA (1)...(19): siRNA sense strand
guacuaugcuuuacuggau

SEQ ID NO: 1195061 - RNA, 19 nt, Homo sapiens
  misc_RNA (1)...(19): siRNA sense strand
gaaaugagcaaggaaacaa

SEQ ID NO: 1195062 - RNA, 19 nt, Homo sapiens
  misc_RNA (1)...(19): siRNA sense strand
gcaaaugugcuacucaguu

SEQ ID NO: 1195063 - RNA, 19 nt, Homo sapiens
  misc_RNA (1)...(19): siRNA sense strand
uaacagcaaucgcaaacga

SEQ ID NO: 1195064 - RNA, 19 nt, Homo sapiens
  misc_RNA (1)...(19): siRNA sense strand
aaaccaagauuucaugcuu

SEQ ID NO: 1195065 - RNA, 19 nt, Homo sapiens
  misc_RNA (1)...(19): siRNA sense strand
gaccaccaguuguauuaaa

SEQ ID NO: 1195066 - RNA, 19 nt, Homo sapiens
  misc_RNA (1)...(19): siRNA sense strand
ccagaauccuuugaaguaa

SEQ ID NO: 1195067 - RNA, 19 nt, Homo sapiens
  misc_RNA (1)...(19): siRNA sense strand
gcagagccuuguugaacuu

SEQ ID NO: 1195068 - RNA, 19 nt, Homo sapiens
  misc_RNA (1)...(19): siRNA sense strand
acaccagagucuagcauua

SEQ ID NO: 1195069 - RNA, 19 nt, Homo sapiens
  misc_RNA (1)...(19): siRNA sense strand
guaaugagucgucuuucua

SEQ ID NO: 1195070 - RNA, 19 nt, Homo sapiens
  misc_RNA (1)...(19): siRNA sense strand
uaagagagacagaagauug

SEQ ID NO: 1195071 - RNA, 19 nt, Homo sapiens
  misc_RNA (1)...(19): siRNA sense strand
ccagauaucuuugauguac

SEQ ID NO: 1195072 - RNA, 19 nt, Homo sapiens
  misc_RNA (1)...(19): siRNA sense strand
gcauacagcugaugaaaau

SEQ ID NO: 1195073 - RNA, 19 nt, Homo sapiens
  misc_RNA (1)...(19): siRNA sense strand
gauguacacacuaagauaa

SEQ ID NO: 1195074 - RNA, 19 nt, Homo sapiens
  misc_RNA (1)...(19): siRNA sense strand
ggagucaguggaagaauuu

SEQ ID NO: 1195075 - RNA, 19 nt, Homo sapiens
  misc_RNA (1)...(19): siRNA sense strand
aaagaaaacuggcuaaaga

SEQ ID NO: 1195076 - RNA, 19 nt, Homo sapiens
  misc_RNA (1)...(19): siRNA sense strand
gaagguauuggacauaaga

SEQ ID NO: 1195077 - RNA, 19 nt, Homo sapiens
  misc_RNA (1)...(19): siRNA sense strand
uaaaguuccuccauuucaa

SEQ ID NO: 1195078 - RNA, 19 nt, Homo sapiens
  misc_RNA (1)...(19): siRNA sense strand
aagaagaacuagucagguu

SEQ ID NO: 1195079 - RNA, 19 nt, Homo sapiens
  misc_RNA (1)...(19): siRNA sense strand
gaaacaagagugauauugg

SEQ ID NO: 1195080 - RNA, 19 nt, Homo sapiens
  misc_RNA (1)...(19): siRNA sense strand
gauauggacaguacauuga

SEQ ID NO: 1195081 - RNA, 19 nt, Homo sapiens
  misc_RNA (1)...(19): siRNA sense strand
gaagauugccauaaugcuu

SEQ ID NO: 1195082 - RNA, 19 nt, Homo sapiens
  misc_RNA (1)...(19): siRNA sense strand
aagaugcacucaccuugua

SEQ ID NO: 1195083 - RNA, 19 nt, Homo sapiens
  misc_RNA (1)...(19): siRNA sense strand
uggaagaauuugaagguuu

SEQ ID NO: 1195084 - RNA, 19 nt, Homo sapiens
  misc_RNA (1)...(19): siRNA sense strand
gaaaggagaagucauacgu

SEQ ID NO: 1195085 - RNA, 19 nt, Homo sapiens
  misc_RNA (1)...(19): siRNA sense strand
cuacucaguuuccagauga

SEQ ID NO: 1195086 - RNA, 19 nt, Homo sapiens
  misc_RNA (1)...(19): siRNA sense strand
guaacucucuuccucuuca

SEQ ID NO: 1195087 - RNA, 19 nt, Homo sapiens
  misc_RNA (1)...(19): siRNA sense strand
ugucaaugcuuucucuaaa

SEQ ID NO: 1195088 - RNA, 19 nt, Homo sapiens
  misc_RNA (1)...(19): siRNA sense strand
gaaacuuuauguugucaag

SEQ ID NO: 1195089 - RNA, 19 nt, Homo sapiens
  misc_RNA (1)...(19): siRNA sense strand
ggauuucuaugcagcaguu

SEQ ID NO: 1195090 - RNA, 19 nt, Homo sapiens
  misc_RNA (1)...(19): siRNA sense strand
gaaugaacaggauuucuau

SEQ ID NO: 1195091 - RNA, 19 nt, Homo sapiens
  misc_RNA (1)...(19): siRNA sense strand
ucaagaagcuggaaaacaa

SEQ ID NO: 1195092 - RNA, 19 nt, Homo sapiens
  misc_RNA (1)...(19): siRNA sense strand
gaagucauacguuaaguag

SEQ ID NO: 1195093 - RNA, 19 nt, Homo sapiens
  misc_RNA (1)...(19): siRNA sense strand
cagaauggauuuauaaagc

SEQ ID NO: 1195094 - RNA, 19 nt, Homo sapiens
  misc_RNA (1)...(19): siRNA sense strand
uggaagaaaugacugaaau

SEQ ID NO: 1195095 - RNA, 19 nt, Homo sapiens
  misc_RNA (1)...(19): siRNA sense strand
gacaguacauugaguagag

SEQ ID NO: 1195096 - RNA, 19 nt, Homo sapiens
  misc_RNA (1)...(19): siRNA sense strand
cagaauccuuugaaguaaa

SEQ ID NO: 1195097 - RNA, 19 nt, Homo sapiens
  misc_RNA (1)...(19): siRNA sense strand
gagcaaggaaacaauuauu

SEQ ID NO: 1195098 - RNA, 19 nt, Homo sapiens
  misc_RNA (1)...(19): siRNA sense strand
ucagcaagguggcaaguug

SEQ ID NO: 1195099 - RNA, 19 nt, Homo sapiens
  misc_RNA (1)...(19): siRNA sense strand
gaucuucccuuugaaccuu

SEQ ID NO: 1195100 - RNA, 19 nt, Homo sapiens
  misc_RNA (1)...(19): siRNA sense strand
gcucagcuuucaagagaga

SEQ ID NO: 1195101 - RNA, 19 nt, Homo sapiens
  misc_RNA (1)...(19): siRNA sense strand
aagaagagaugccucagau

SEQ ID NO: 1195102 - RNA, 19 nt, Homo sapiens
  misc_RNA (1)...(19): siRNA sense strand
uagcuaacaccauuuguaa

SEQ ID NO: 1195103 - RNA, 19 nt, Homo sapiens
  misc_RNA (1)...(19): siRNA sense strand
gaugcugugucgacaugua

SEQ ID NO: 1195104 - RNA, 19 nt, Homo sapiens
  misc_RNA (1)...(19): siRNA sense strand
ccacuccaguuccuucaaa

SEQ ID NO: 1195105 - RNA, 19 nt, Homo sapiens
  misc_RNA (1)...(19): siRNA sense strand
gaagaagagaugccucaga

SEQ ID NO: 1195106 - RNA, 19 nt, Homo sapiens
  misc_RNA (1)...(19): siRNA sense strand
gauugaaacaagagugaua

SEQ ID NO: 1195107 - RNA, 19 nt, Homo sapiens
  misc_RNA (1)...(19): siRNA sense strand
gccuagagauagcaagaaa

SEQ ID NO: 1195108 - RNA, 19 nt, Homo sapiens
  misc_RNA (1)...(19): siRNA sense strand
cuugaagaccuuauaguua

SEQ ID NO: 1195109 - RNA, 19 nt, Homo sapiens
  misc_RNA (1)...(19): siRNA sense strand
gaggagauuaagacuauuu

SEQ ID NO: 1195110 - RNA, 19 nt, Homo sapiens
  misc_RNA (1)...(19): siRNA sense strand
gaaaucagugucaaugcuu

SEQ ID NO: 1195111 - RNA, 19 nt, Homo sapiens
  misc_RNA (1)...(19): siRNA sense strand
gcaaugauaagcauguaau

SEQ ID NO: 1195112 - RNA, 19 nt, Homo sapiens
  misc_RNA (1)...(19): siRNA sense strand
ucgaagggcucuuaugaca

SEQ ID NO: 1195113 - RNA, 19 nt, Homo sapiens
  misc_RNA (1)...(19): siRNA sense strand
guagcuaacaccauuugua

SEQ ID NO: 1195114 - RNA, 19 nt, Homo sapiens
  misc_RNA (1)...(19): siRNA sense strand
acauguagcuaacaccauu

SEQ ID NO: 1195115 - RNA, 19 nt, Homo sapiens
  misc_RNA (1)...(19): siRNA sense strand
guauuaacauccacuacug

SEQ ID NO: 1195116 - RNA, 19 nt, Homo sapiens
  misc_RNA (1)...(19): siRNA sense strand
ggacauaagagagacagaa

SEQ ID NO: 1195117 - RNA, 19 nt, Homo sapiens
  misc_RNA (1)...(19): siRNA sense strand
aaacaagagugauauuggu

SEQ ID NO: 1195118 - RNA, 19 nt, Homo sapiens
  misc_RNA (1)...(19): siRNA sense strand
ucacggacuuucaggauuc

SEQ ID NO: 1195119 - RNA, 19 nt, Homo sapiens
  misc_RNA (1)...(19): siRNA sense strand
cagaugaacuuccaaaaga

SEQ ID NO: 1195120 - RNA, 19 nt, Homo sapiens
  misc_RNA (1)...(19): siRNA sense strand
aagaagguauuggacauaa

SEQ ID NO: 1195121 - RNA, 19 nt, Homo sapiens
  misc_RNA (1)...(19): siRNA sense strand
gaaucuaguacuaugcuuu

SEQ ID NO: 1195122 - RNA, 19 nt, Homo sapiens
  misc_RNA (1)...(19): siRNA sense strand
guuacccaguguugcauua

SEQ ID NO: 1195123 - RNA, 19 nt, Homo sapiens
  misc_RNA (1)...(19): siRNA sense strand
uagcaucccagauaucuuu

SEQ ID NO: 1195124 - RNA, 19 nt, Homo sapiens
  misc_RNA (1)...(19): siRNA sense strand
caagaaaucagugucaaug

SEQ ID NO: 1195125 - RNA, 19 nt, Homo sapiens
  misc_RNA (1)...(19): siRNA sense strand
caagagugauauugguuca

SEQ ID NO: 1195126 - RNA, 19 nt, Homo sapiens
  misc_RNA (1)...(19): siRNA sense strand
aggauucugucuuuaauga

SEQ ID NO: 1195127 - RNA, 19 nt, Homo sapiens
  misc_RNA (1)...(19): siRNA sense strand
agucauacguuaaguagau

SEQ ID NO: 1195128 - RNA, 19 nt, Homo sapiens
  misc_RNA (1)...(19): siRNA sense strand
cagccuuccuuccuucuuu

SEQ ID NO: 1195129 - RNA, 19 nt, Homo sapiens
  misc_RNA (1)...(19): siRNA sense strand
gauauugguucaagaagcu

SEQ ID NO: 1195130 - RNA, 19 nt, Homo sapiens
  misc_RNA (1)...(19): siRNA sense strand
caaaagauauggacaguac

SEQ ID NO: 1195131 - RNA, 19 nt, Homo sapiens
  misc_RNA (1)...(19): siRNA sense strand
uggcaacaauuauucaguu

SEQ ID NO: 1195132 - RNA, 19 nt, Homo sapiens
  misc_RNA (1)...(19): siRNA sense strand
aagccagaauggauuuaua

SEQ ID NO: 1195133 - RNA, 19 nt, Homo sapiens
  misc_RNA (1)...(19): siRNA sense strand
ggaagaaaugacugaaaug

SEQ ID NO: 1195134 - RNA, 19 nt, Homo sapiens
  misc_RNA (1)...(19): siRNA sense strand
uaacaccauuuguaaagca

SEQ ID NO: 1195135 - RNA, 19 nt, Homo sapiens
  misc_RNA (1)...(19): siRNA sense strand
cagcuaaucuuuuaucuuc

SEQ ID NO: 1195136 - RNA, 19 nt, Homo sapiens
  misc_RNA (1)...(19): siRNA sense strand
ggagaagucauacguuaag

SEQ ID NO: 1195137 - RNA, 19 nt, Homo sapiens
  misc_RNA (1)...(19): siRNA sense strand
uccagaauccuuugaagua

SEQ ID NO: 1195138 - RNA, 19 nt, Homo sapiens
  misc_RNA (1)...(19): siRNA sense strand
gcuaacaccauuuguaaag

SEQ ID NO: 1195139 - RNA, 19 nt, Homo sapiens
  misc_RNA (1)...(19): siRNA sense strand
acagaagauugccauaaug

SEQ ID NO: 1195140 - RNA, 19 nt, Homo sapiens
  misc_RNA (1)...(19): siRNA sense strand
ugaaagaucugaaagguaa

SEQ ID NO: 1195141 - RNA, 19 nt, Homo sapiens
  misc_RNA (1)...(19): siRNA sense strand
gaaagcagaucccaucguu

SEQ ID NO: 1195142 - RNA, 19 nt, Homo sapiens
  misc_RNA (1)...(19): siRNA sense strand
aaacaaggauugaagcuuu

SEQ ID NO: 1195143 - RNA, 19 nt, Homo sapiens
  misc_RNA (1)...(19): siRNA sense strand
gauugaagcuuuaagagaa

SEQ ID NO: 1195144 - RNA, 19 nt, Homo sapiens
  misc_RNA (1)...(19): siRNA sense strand
cgucacaccuuccuaaaua

SEQ ID NO: 1195145 - RNA, 19 nt, Homo sapiens
  misc_RNA (1)...(19): siRNA sense strand
gcacacggcggaagaaaua

SEQ ID NO: 1195146 - RNA, 19 nt, Homo sapiens
  misc_RNA (1)...(19): siRNA sense strand
gaaagcaagucaaguuuua

SEQ ID NO: 1195147 - RNA, 19 nt, Homo sapiens
  misc_RNA (1)...(19): siRNA sense strand
gaauggaugucugcaagua

SEQ ID NO: 1195148 - RNA, 19 nt, Homo sapiens
  misc_RNA (1)...(19): siRNA sense strand
cagcuaagcaucaauauaa

SEQ ID NO: 1195149 - RNA, 19 nt, Homo sapiens
  misc_RNA (1)...(19): siRNA sense strand
aaagaagacuggauuguug

SEQ ID NO: 1195150 - RNA, 19 nt, Homo sapiens
  misc_RNA (1)...(19): siRNA sense strand
caacaggugucagaaacua

SEQ ID NO: 1195151 - RNA, 19 nt, Homo sapiens
  misc_RNA (1)...(19): siRNA sense strand
gcagaaggacuuagaaaug

SEQ ID NO: 1195152 - RNA, 19 nt, Homo sapiens
  misc_RNA (1)...(19): siRNA sense strand
gaacgucacaccuuccuaa

SEQ ID NO: 1195153 - RNA, 19 nt, Homo sapiens
  misc_RNA (1)...(19): siRNA sense strand
gaaaggcggucucaguaca

SEQ ID NO: 1195154 - RNA, 19 nt, Homo sapiens
  misc_RNA (1)...(19): siRNA sense strand
uggaagagcuccugaacaa

SEQ ID NO: 1195155 - RNA, 19 nt, Homo sapiens
  misc_RNA (1)...(19): siRNA sense strand
cuacacaucucucuguuga

SEQ ID NO: 1195156 - RNA, 19 nt, Homo sapiens
  misc_RNA (1)...(19): siRNA sense strand
gaaagaacuagaucaaaga

SEQ ID NO: 1195157 - RNA, 19 nt, Homo sapiens
  misc_RNA (1)...(19): siRNA sense strand
caaccuuccucuaaauauu

SEQ ID NO: 1195158 - RNA, 19 nt, Homo sapiens
  misc_RNA (1)...(19): siRNA sense strand
aagaagcacuggugaauau

SEQ ID NO: 1195159 - RNA, 19 nt, Homo sapiens
  misc_RNA (1)...(19): siRNA sense strand
ugaaagaacuagaucaaag

SEQ ID NO: 1195160 - RNA, 19 nt, Homo sapiens
  misc_RNA (1)...(19): siRNA sense strand
ucagcagccugguaucuua

SEQ ID NO: 1195161 - RNA, 19 nt, Homo sapiens
  misc_RNA (1)...(19): siRNA sense strand
caucuuggaucuccgagua

SEQ ID NO: 1195162 - RNA, 19 nt, Homo sapiens
  misc_RNA (1)...(19): siRNA sense strand
gcagacacauuguuucaag

SEQ ID NO: 1195163 - RNA, 19 nt, Homo sapiens
  misc_RNA (1)...(19): siRNA sense strand
ggacgaaggucacaaucag

SEQ ID NO: 1195164 - RNA, 19 nt, Homo sapiens
  misc_RNA (1)...(19): siRNA sense strand
ugacaaaggagacauuauu

SEQ ID NO: 1195165 - RNA, 19 nt, Homo sapiens
  misc_RNA (1)...(19): siRNA sense strand
gcaaagagggcuacgugaa

SEQ ID NO: 1195166 - RNA, 19 nt, Homo sapiens
  misc_RNA (1)...(19): siRNA sense strand
ggaaagacaaggcagauuc

SEQ ID NO: 1195167 - RNA, 19 nt, Homo sapiens
  misc_RNA (1)...(19): siRNA sense strand
gaagagcuccugaacaagu

SEQ ID NO: 1195168 - RNA, 19 nt, Homo sapiens
  misc_RNA (1)...(19): siRNA sense strand
ggaggagguuugccagcua

SEQ ID NO: 1195169 - RNA, 19 nt, Homo sapiens
  misc_RNA (1)...(19): siRNA sense strand
cggaagaaauaaagagauu

SEQ ID NO: 1195170 - RNA, 19 nt, Homo sapiens
  misc_RNA (1)...(19): siRNA sense strand
caaagagggcuacgugaaa

SEQ ID NO: 1195171 - RNA, 19 nt, Homo sapiens
  misc_RNA (1)...(19): siRNA sense strand
ucaaugugcuucagcgauu

SEQ ID NO: 1195172 - RNA, 19 nt, Homo sapiens
  misc_RNA (1)...(19): siRNA sense strand
gaagcacuggugaauauaa

SEQ ID NO: 1195173 - RNA, 19 nt, Homo sapiens
  misc_RNA (1)...(19): siRNA sense strand
gaaaaugauucaggaagua

SEQ ID NO: 1195174 - RNA, 19 nt, Homo sapiens
  misc_RNA (1)...(19): siRNA sense strand
caaggcagauuccacuaga

SEQ ID NO: 1195175 - RNA, 19 nt, Homo sapiens
  misc_RNA (1)...(19): siRNA sense strand
gaauauaauugccgugcau

SEQ ID NO: 1195176 - RNA, 19 nt, Homo sapiens
  misc_RNA (1)...(19): siRNA sense strand
cuuagaaccuggaauuuau

SEQ ID NO: 1195177 - RNA, 19 nt, Homo sapiens
  misc_RNA (1)...(19): siRNA sense strand
ccugguaucuuauagagaa

SEQ ID NO: 1195178 - RNA, 19 nt, Homo sapiens
  misc_RNA (1)...(19): siRNA sense strand
uagcauggccucauugaaa

SEQ ID NO: 1195179 - RNA, 19 nt, Homo sapiens
  misc_RNA (1)...(19): siRNA sense strand
cggcaucucuccaaaugaa

SEQ ID NO: 1195180 - RNA, 19 nt, Homo sapiens
  misc_RNA (1)...(19): siRNA sense strand
gggacacuguggcuguuua

SEQ ID NO: 1195181 - RNA, 19 nt, Homo sapiens
  misc_RNA (1)...(19): siRNA sense strand
gaggagguuugccagcuaa

SEQ ID NO: 1195182 - RNA, 19 nt, Homo sapiens
  misc_RNA (1)...(19): siRNA sense strand
uguuggaucuugauaauga

SEQ ID NO: 1195183 - RNA, 19 nt, Homo sapiens
  misc_RNA (1)...(19): siRNA sense strand
gaaccucaacagucucuuu

SEQ ID NO: 1195184 - RNA, 19 nt, Homo sapiens
  misc_RNA (1)...(19): siRNA sense strand
gaaguagaaacaaggauug

SEQ ID NO: 1195185 - RNA, 19 nt, Homo sapiens
  misc_RNA (1)...(19): siRNA sense strand
ugagacaccaucaacuuua

SEQ ID NO: 1195186 - RNA, 19 nt, Homo sapiens
  misc_RNA (1)...(19): siRNA sense strand
gaacagcgccuuuugauag

SEQ ID NO: 1195187 - RNA, 19 nt, Homo sapiens
  misc_RNA (1)...(19): siRNA sense strand
ggacugacuucucuaccau

SEQ ID NO: 1195188 - RNA, 19 nt, Homo sapiens
  misc_RNA (1)...(19): siRNA sense strand
cacauuguuucaagaagua

SEQ ID NO: 1195189 - RNA, 19 nt, Homo sapiens
  misc_RNA (1)...(19): siRNA sense strand
cucauaggcuugaccauuu

SEQ ID NO: 1195190 - RNA, 19 nt, Homo sapiens
  misc_RNA (1)...(19): siRNA sense strand
cgcagaaacuggagaaugu

SEQ ID NO: 1195191 - RNA, 19 nt, Homo sapiens
  misc_RNA (1)...(19): siRNA sense strand
gcacuggugaauauaauug

SEQ ID NO: 1195192 - RNA, 19 nt, Homo sapiens
  misc_RNA (1)...(19): siRNA sense strand
caagccugaugcagauaua

SEQ ID NO: 1195193 - RNA, 19 nt, Homo sapiens
  misc_RNA (1)...(19): siRNA sense strand
gagacaggcuaacaagaag

SEQ ID NO: 1195194 - RNA, 19 nt, Homo sapiens
  misc_RNA (1)...(19): siRNA sense strand
cauguuggaucuugauaau

SEQ ID NO: 1195195 - RNA, 19 nt, Homo sapiens
  misc_RNA (1)...(19): siRNA sense strand
ggauugaagcuuuaagaga

SEQ ID NO: 1195196 - RNA, 19 nt, Homo sapiens
  misc_RNA (1)...(19): siRNA sense strand
gcagauuccacuagaaaug

SEQ ID NO: 1195197 - RNA, 19 nt, Homo sapiens
  misc_RNA (1)...(19): siRNA sense strand
gugaaaggcggucucagua

SEQ ID NO: 1195198 - RNA, 19 nt, Homo sapiens
  misc_RNA (1)...(19): siRNA sense strand
gacaaaggagacauuauug

SEQ ID NO: 1195199 - RNA, 19 nt, Homo sapiens
  misc_RNA (1)...(19): siRNA sense strand
ggacuuagaaaugcuauuc

SEQ ID NO: 1195200 - RNA, 19 nt, Homo sapiens
  misc_RNA (1)...(19): siRNA sense strand
gaccauuuguggacauaau

SEQ ID NO: 1195201 - RNA, 19 nt, Homo sapiens
  misc_RNA (1)...(19): siRNA sense strand
cuaaauaucgcagaacauu

SEQ ID NO: 1195202 - RNA, 19 nt, Homo sapiens
  misc_RNA (1)...(19): siRNA sense strand
aacaaggauugaagcuuua

SEQ ID NO: 1195203 - RNA, 19 nt, Homo sapiens
  misc_RNA (1)...(19): siRNA sense strand
ugagccagcugccuaacuu

SEQ ID NO: 1195204 - RNA, 19 nt, Homo sapiens
  misc_RNA (1)...(19): siRNA sense strand
caaccaugaugaaaacaua

SEQ ID NO: 1195205 - RNA, 19 nt, Homo sapiens
  misc_RNA (1)...(19): siRNA sense strand
cuugaaaucugugcuuuga

SEQ ID NO: 1195206 - RNA, 19 nt, Homo sapiens
  misc_RNA (1)...(19): siRNA sense strand
gaagucaggccagauugaa

SEQ ID NO: 1195207 - RNA, 19 nt, Homo sapiens
  misc_RNA (1)...(19): siRNA sense strand
ggguugaugaaaugaauua

SEQ ID NO: 1195208 - RNA, 19 nt, Homo sapiens
  misc_RNA (1)...(19): siRNA sense strand
caaagaauguaaggcaaag

SEQ ID NO: 1195209 - RNA, 19 nt, Homo sapiens
  misc_RNA (1)...(19): siRNA sense strand
cugaacagagcaaguaaua

SEQ ID NO: 1195210 - RNA, 19 nt, Homo sapiens
  misc_RNA (1)...(19): siRNA sense strand
uaaagagacaggcuaacaa

SEQ ID NO: 1195211 - RNA, 19 nt, Homo sapiens
  misc_RNA (1)...(19): siRNA sense strand
ucaccaaccuaaagagaca

SEQ ID NO: 1195212 - RNA, 19 nt, Homo sapiens
  misc_RNA (1)...(19): siRNA sense strand
ccuuagaaccuggaauuua

SEQ ID NO: 1195213 - RNA, 19 nt, Homo sapiens
  misc_RNA (1)...(19): siRNA sense strand
gaaacaaggauugaagcuu

SEQ ID NO: 1195214 - RNA, 19 nt, Homo sapiens
  misc_RNA (1)...(19): siRNA sense strand
aacagucucuuucaagcua

SEQ ID NO: 1195215 - RNA, 19 nt, Homo sapiens
  misc_RNA (1)...(19): siRNA sense strand
guucaccauuuccaaagaa

SEQ ID NO: 1195216 - RNA, 19 nt, Homo sapiens
  misc_RNA (1)...(19): siRNA sense strand
ucccaucguuggcuccuua

SEQ ID NO: 1195217 - RNA, 19 nt, Homo sapiens
  misc_RNA (1)...(19): siRNA sense strand
aguaauugcugcuaucuag

SEQ ID NO: 1195218 - RNA, 19 nt, Homo sapiens
  misc_RNA (1)...(19): siRNA sense strand
gaauguaaggcaaagacaa

SEQ ID NO: 1195219 - RNA, 19 nt, Homo sapiens
  misc_RNA (1)...(19): siRNA sense strand
cuggauaaauugcuugaga

SEQ ID NO: 1195220 - RNA, 19 nt, Homo sapiens
  misc_RNA (1)...(19): siRNA sense strand
gaaggacuuagaaaugcua

SEQ ID NO: 1195221 - RNA, 19 nt, Homo sapiens
  misc_RNA (1)...(19): siRNA sense strand
cagaaggacuuagaaaugc

SEQ ID NO: 1195222 - RNA, 19 nt, Homo sapiens
  misc_RNA (1)...(19): siRNA sense strand
gcagucaccaaccuaaaga

SEQ ID NO: 1195223 - RNA, 19 nt, Homo sapiens
  misc_RNA (1)...(19): siRNA sense strand
cauccagacuguaagacuu

SEQ ID NO: 1195224 - RNA, 19 nt, Homo sapiens
  misc_RNA (1)...(19): siRNA sense strand
guaccugucugaccuucau

SEQ ID NO: 1195225 - RNA, 19 nt, Homo sapiens
  misc_RNA (1)...(19): siRNA sense strand
gagacaccaucaacuuuac

SEQ ID NO: 1195226 - RNA, 19 nt, Homo sapiens
  misc_RNA (1)...(19): siRNA sense strand
cuucagcgauuuaaguuuc

SEQ ID NO: 1195227 - RNA, 19 nt, Homo sapiens
  misc_RNA (1)...(19): siRNA sense strand
guaauacugcagacacauu

SEQ ID NO: 1195228 - RNA, 19 nt, Homo sapiens
  misc_RNA (1)...(19): siRNA sense strand
agagacaggcuaacaagaa

SEQ ID NO: 1195229 - RNA, 19 nt, Homo sapiens
  misc_RNA (1)...(19): siRNA sense strand
gaauuccgcccuuguccuu

SEQ ID NO: 1195230 - RNA, 19 nt, Homo sapiens
  misc_RNA (1)...(19): siRNA sense strand
gacuugaaaucugugcuuu

SEQ ID NO: 1195231 - RNA, 19 nt, Homo sapiens
  misc_RNA (1)...(19): siRNA sense strand
caccaagccugaugcagau

SEQ ID NO: 1195232 - RNA, 19 nt, Homo sapiens
  misc_RNA (1)...(19): siRNA sense strand
gagacgacacguggagaua

SEQ ID NO: 1195233 - RNA, 19 nt, Homo sapiens
  misc_RNA (1)...(19): siRNA sense strand
ccucaacagucucuuucaa

SEQ ID NO: 1195234 - RNA, 19 nt, Homo sapiens
  misc_RNA (1)...(19): siRNA sense strand
gcacugacaggaacaaagg

SEQ ID NO: 1195235 - RNA, 19 nt, Homo sapiens
  misc_RNA (1)...(19): siRNA sense strand
ggcgagacuugaaaucugu

SEQ ID NO: 1195236 - RNA, 19 nt, Homo sapiens
  misc_RNA (1)...(19): siRNA sense strand
aaagaagcacuggugaaua

SEQ ID NO: 1195237 - RNA, 19 nt, Homo sapiens
  misc_RNA (1)...(19): siRNA sense strand
ccagcuaagcaucaauaua

SEQ ID NO: 1195238 - RNA, 19 nt, Homo sapiens
  misc_RNA (1)...(19): siRNA sense strand
ucaaagaauguaaggcaaa

SEQ ID NO: 1195239 - RNA, 19 nt, Homo sapiens
  misc_RNA (1)...(19): siRNA sense strand
cagccuggccuaugugaaa

SEQ ID NO: 1195240 - RNA, 19 nt, Homo sapiens
  misc_RNA (1)...(19): siRNA sense strand
cgaauucucuggugguuga

SEQ ID NO: 1195241 - RNA, 19 nt, Homo sapiens
  misc_RNA (1)...(19): siRNA sense strand
cguaugagcuucggauuga

SEQ ID NO: 1195242 - RNA, 19 nt, Homo sapiens
  misc_RNA (1)...(19): siRNA sense strand
gcagcugcauggcuacuug

SEQ ID NO: 1195243 - RNA, 19 nt, Homo sapiens
  misc_RNA (1)...(19): siRNA sense strand
cagaaacuccgacauugaa

SEQ ID NO: 1195244 - RNA, 19 nt, Homo sapiens
  misc_RNA (1)...(19): siRNA sense strand
gcagagcacggacagcuau

SEQ ID NO: 1195245 - RNA, 19 nt, Homo sapiens
  misc_RNA (1)...(19): siRNA sense strand
ucagaaacuccgacauuga

SEQ ID NO: 1195246 - RNA, 19 nt, Homo sapiens
  misc_RNA (1)...(19): siRNA sense strand
cgacauugaacuucggaaa

SEQ ID NO: 1195247 - RNA, 19 nt, Homo sapiens
  misc_RNA (1)...(19): siRNA sense strand
gaagccaguaccagcguuu

SEQ ID NO: 1195248 - RNA, 19 nt, Homo sapiens
  misc_RNA (1)...(19): siRNA sense strand
gaaaggagagacggacauc

SEQ ID NO: 1195249 - RNA, 19 nt, Homo sapiens
  misc_RNA (1)...(19): siRNA sense strand
gaacuucggaaaggagaga

SEQ ID NO: 1195250 - RNA, 19 nt, Homo sapiens
  misc_RNA (1)...(19): siRNA sense strand
agacggacaucgggaggaa

SEQ ID NO: 1195251 - RNA, 19 nt, Homo sapiens
  misc_RNA (1)...(19): siRNA sense strand
gcaggacuccaaggucauu

SEQ ID NO: 1195252 - RNA, 19 nt, Homo sapiens
  misc_RNA (1)...(19): siRNA sense strand
acaccaaaguccuggagau

SEQ ID NO: 1195253 - RNA, 19 nt, Homo sapiens
  misc_RNA (1)...(19): siRNA sense strand
agagaaagcgaagccagua

SEQ ID NO: 1195254 - RNA, 19 nt, Homo sapiens
  misc_RNA (1)...(19): siRNA sense strand
acucagaaacuccgacauu

SEQ ID NO: 1195255 - RNA, 19 nt, Homo sapiens
  misc_RNA (1)...(19): siRNA sense strand
gccggaauccugaaacuca

SEQ ID NO: 1195256 - RNA, 19 nt, Homo sapiens
  misc_RNA (1)...(19): siRNA sense strand
cucagaaacuccgacauug

SEQ ID NO: 1195257 - RNA, 19 nt, Homo sapiens
  misc_RNA (1)...(19): siRNA sense strand
ggaaaggagagacggacau

SEQ ID NO: 1195258 - RNA, 19 nt, Homo sapiens
  misc_RNA (1)...(19): siRNA sense strand
cagcaugcgagccgucauu

SEQ ID NO: 1195259 - RNA, 19 nt, Homo sapiens
  misc_RNA (1)...(19): siRNA sense strand
aaacuccgacauugaacuu

SEQ ID NO: 1195260 - RNA, 19 nt, Homo sapiens
  misc_RNA (1)...(19): siRNA sense strand
agaaugagccgcugaugcu

SEQ ID NO: 1195261 - RNA, 19 nt, Homo sapiens
  misc_RNA (1)...(19): siRNA sense strand
gccgaauucucuggugguu

SEQ ID NO: 1195262 - RNA, 19 nt, Homo sapiens
  misc_RNA (1)...(19): siRNA sense strand
acauugaacuucggaaagg

SEQ ID NO: 1195263 - RNA, 19 nt, Homo sapiens
  misc_RNA (1)...(19): siRNA sense strand
gacauugaacuucggaaag

SEQ ID NO: 1195264 - RNA, 19 nt, Homo sapiens
  misc_RNA (1)...(19): siRNA sense strand
gaaacuccgacauugaacu

SEQ ID NO: 1195265 - RNA, 19 nt, Homo sapiens
  misc_RNA (1)...(19): siRNA sense strand
gcaugcgagccgucauuga

SEQ ID NO: 1195266 - RNA, 19 nt, Homo sapiens
  misc_RNA (1)...(19): siRNA sense strand
gaccugugcaagccgaauu

SEQ ID NO: 1195267 - RNA, 19 nt, Homo sapiens
  misc_RNA (1)...(19): siRNA sense strand
gaaagcgaagccaguacca

SEQ ID NO: 1195268 - RNA, 19 nt, Homo sapiens
  misc_RNA (1)...(19): siRNA sense strand
ggagaaugagccgcugaug

SEQ ID NO: 1195269 - RNA, 19 nt, Homo sapiens
  misc_RNA (1)...(19): siRNA sense strand
cgaauucucuggugguuga

SEQ ID NO: 1195270 - RNA, 19 nt, Homo sapiens
  misc_RNA (1)...(19): siRNA sense strand
cguaugagcuucggauuga

SEQ ID NO: 1195271 - RNA, 19 nt, Homo sapiens
  misc_RNA (1)...(19): siRNA sense strand
gcagcugcauggcuacuug

SEQ ID NO: 1195272 - RNA, 19 nt, Homo sapiens
  misc_RNA (1)...(19): siRNA sense strand
cagaaacuccgacauugaa

SEQ ID NO: 1195273 - RNA, 19 nt, Homo sapiens
  misc_RNA (1)...(19): siRNA sense strand
gcagagcacggacagcuau

SEQ ID NO: 1195274 - RNA, 19 nt, Homo sapiens
  misc_RNA (1)...(19): siRNA sense strand
ucagaaacuccgacauuga

SEQ ID NO: 1195275 - RNA, 19 nt, Homo sapiens
  misc_RNA (1)...(19): siRNA sense strand
cgacauugaacuucggaaa

SEQ ID NO: 1195276 - RNA, 19 nt, Homo sapiens
  misc_RNA (1)...(19): siRNA sense strand
gaagccaguaccagcguuu

SEQ ID NO: 1195277 - RNA, 19 nt, Homo sapiens
  misc_RNA (1)...(19): siRNA sense strand
gaaaggagagacggacauc

SEQ ID NO: 1195278 - RNA, 19 nt, Homo sapiens
  misc_RNA (1)...(19): siRNA sense strand
gaacuucggaaaggagaga

SEQ ID NO: 1195279 - RNA, 19 nt, Homo sapiens
  misc_RNA (1)...(19): siRNA sense strand
agacggacaucgggaggaa

SEQ ID NO: 1195280 - RNA, 19 nt, Homo sapiens
  misc_RNA (1)...(19): siRNA sense strand
gcaggacuccaaggucauu

SEQ ID NO: 1195281 - RNA, 19 nt, Homo sapiens
  misc_RNA (1)...(19): siRNA sense strand
acaccaaaguccuggagau

SEQ ID NO: 1195282 - RNA, 19 nt, Homo sapiens
  misc_RNA (1)...(19): siRNA sense strand
agagaaagcgaagccagua

SEQ ID NO: 1195283 - RNA, 19 nt, Homo sapiens
  misc_RNA (1)...(19): siRNA sense strand
acucagaaacuccgacauu

SEQ ID NO: 1195284 - RNA, 19 nt, Homo sapiens
  misc_RNA (1)...(19): siRNA sense strand
gccggaauccugaaacuca

SEQ ID NO: 1195285 - RNA, 19 nt, Homo sapiens
  misc_RNA (1)...(19): siRNA sense strand
cucagaaacuccgacauug

SEQ ID NO: 1195286 - RNA, 19 nt, Homo sapiens
  misc_RNA (1)...(19): siRNA sense strand
ggaaaggagagacggacau

SEQ ID NO: 1195287 - RNA, 19 nt, Homo sapiens
  misc_RNA (1)...(19): siRNA sense strand
cagcaugcgagccgucauu

SEQ ID NO: 1195288 - RNA, 19 nt, Homo sapiens
  misc_RNA (1)...(19): siRNA sense strand
aaacuccgacauugaacuu

SEQ ID NO: 1195289 - RNA, 19 nt, Homo sapiens
  misc_RNA (1)...(19): siRNA sense strand
agaaugagccgcugaugcu

SEQ ID NO: 1195290 - RNA, 19 nt, Homo sapiens
  misc_RNA (1)...(19): siRNA sense strand
gccgaauucucuggugguu

SEQ ID NO: 1195291 - RNA, 19 nt, Homo sapiens
  misc_RNA (1)...(19): siRNA sense strand
acauugaacuucggaaagg

SEQ ID NO: 1195292 - RNA, 19 nt, Homo sapiens
  misc_RNA (1)...(19): siRNA sense strand
gacauugaacuucggaaag

SEQ ID NO: 1195293 - RNA, 19 nt, Homo sapiens
  misc_RNA (1)...(19): siRNA sense strand
gaaacuccgacauugaacu

SEQ ID NO: 1195294 - RNA, 19 nt, Homo sapiens
  misc_RNA (1)...(19): siRNA sense strand
gcaugcgagccgucauuga

SEQ ID NO: 1195295 - RNA, 19 nt, Homo sapiens
  misc_RNA (1)...(19): siRNA sense strand
gaccugugcaagccgaauu

SEQ ID NO: 1195296 - RNA, 19 nt, Homo sapiens
  misc_RNA (1)...(19): siRNA sense strand
gaaagcgaagccaguacca

SEQ ID NO: 1195297 - RNA, 19 nt, Homo sapiens
  misc_RNA (1)...(19): siRNA sense strand
ggagaaugagccgcugaug

SEQ ID NO: 1195298 - RNA, 19 nt, Homo sapiens
  misc_RNA (1)...(19): siRNA sense strand
cgaauucucuggugguuga

SEQ ID NO: 1195299 - RNA, 19 nt, Homo sapiens
  misc_RNA (1)...(19): siRNA sense strand
cagaaacuccgacauugaa

SEQ ID NO: 1195300 - RNA, 19 nt, Homo sapiens
  misc_RNA (1)...(19): siRNA sense strand
gcagagcacggacagcuau

SEQ ID NO: 1195301 - RNA, 19 nt, Homo sapiens
  misc_RNA (1)...(19): siRNA sense strand
ucagaaacuccgacauuga

SEQ ID NO: 1195302 - RNA, 19 nt, Homo sapiens
  misc_RNA (1)...(19): siRNA sense strand
cgacauugaacuucggaaa

SEQ ID NO: 1195303 - RNA, 19 nt, Homo sapiens
  misc_RNA (1)...(19): siRNA sense strand
gaagccaguaccagcguuu

SEQ ID NO: 1195304 - RNA, 19 nt, Homo sapiens
  misc_RNA (1)...(19): siRNA sense strand
gaaaggagagacggacauc

SEQ ID NO: 1195305 - RNA, 19 nt, Homo sapiens
  misc_RNA (1)...(19): siRNA sense strand
gaacuucggaaaggagaga

SEQ ID NO: 1195306 - RNA, 19 nt, Homo sapiens
  misc_RNA (1)...(19): siRNA sense strand
agacggacaucgggaggaa

SEQ ID NO: 1195307 - RNA, 19 nt, Homo sapiens
  misc_RNA (1)...(19): siRNA sense strand
gcaggacuccaaggucauu

SEQ ID NO: 1195308 - RNA, 19 nt, Homo sapiens
  misc_RNA (1)...(19): siRNA sense strand
gccggaauccugaaacuca

SEQ ID NO: 1195309 - RNA, 19 nt, Homo sapiens
  misc_RNA (1)...(19): siRNA sense strand
agagaaagcgaagccagua

SEQ ID NO: 1195310 - RNA, 19 nt, Homo sapiens
  misc_RNA (1)...(19): siRNA sense strand
acucagaaacuccgacauu

SEQ ID NO: 1195311 - RNA, 19 nt, Homo sapiens
  misc_RNA (1)...(19): siRNA sense strand
acaccaaaguccuggagau

SEQ ID NO: 1195312 - RNA, 19 nt, Homo sapiens
  misc_RNA (1)...(19): siRNA sense strand
cucagaaacuccgacauug

SEQ ID NO: 1195313 - RNA, 19 nt, Homo sapiens
  misc_RNA (1)...(19): siRNA sense strand
ggaaaggagagacggacau

SEQ ID NO: 1195314 - RNA, 19 nt, Homo sapiens
  misc_RNA (1)...(19): siRNA sense strand
cagcaugcgagccgucauu

SEQ ID NO: 1195315 - RNA, 19 nt, Homo sapiens
  misc_RNA (1)...(19): siRNA sense strand
aaacuccgacauugaacuu

SEQ ID NO: 1195316 - RNA, 19 nt, Homo sapiens
  misc_RNA (1)...(19): siRNA sense strand
gcaugcgagccgucauuga

SEQ ID NO: 1195317 - RNA, 19 nt, Homo sapiens
  misc_RNA (1)...(19): siRNA sense strand
gccgaauucucuggugguu

SEQ ID NO: 1195318 - RNA, 19 nt, Homo sapiens
  misc_RNA (1)...(19): siRNA sense strand
acauugaacuucggaaagg

SEQ ID NO: 1195319 - RNA, 19 nt, Homo sapiens
  misc_RNA (1)...(19): siRNA sense strand
gacauugaacuucggaaag

SEQ ID NO: 1195320 - RNA, 19 nt, Homo sapiens
  misc_RNA (1)...(19): siRNA sense strand
gaaacuccgacauugaacu

SEQ ID NO: 1195321 - RNA, 19 nt, Homo sapiens
  misc_RNA (1)...(19): siRNA sense strand
gaccugugcaagccgaauu

SEQ ID NO: 1195322 - RNA, 19 nt, Homo sapiens
  misc_RNA (1)...(19): siRNA sense strand
gaaagcgaagccaguacca

SEQ ID NO: 1195323 - RNA, 19 nt, Homo sapiens
  misc_RNA (1)...(19): siRNA sense strand
cgaauucucuggugguuga

SEQ ID NO: 1195324 - RNA, 19 nt, Homo sapiens
  misc_RNA (1)...(19): siRNA sense strand
cguaugagcuucggauuga

SEQ ID NO: 1195325 - RNA, 19 nt, Homo sapiens
  misc_RNA (1)...(19): siRNA sense strand
gcagcugcauggcuacuug

SEQ ID NO: 1195326 - RNA, 19 nt, Homo sapiens
  misc_RNA (1)...(19): siRNA sense strand
cagaaacuccgacauugaa

SEQ ID NO: 1195327 - RNA, 19 nt, Homo sapiens
  misc_RNA (1)...(19): siRNA sense strand
gcagagcacggacagcuau

SEQ ID NO: 1195328 - RNA, 19 nt, Homo sapiens
  misc_RNA (1)...(19): siRNA sense strand
ucagaaacuccgacauuga

SEQ ID NO: 1195329 - RNA, 19 nt, Homo sapiens
  misc_RNA (1)...(19): siRNA sense strand
cgacauugaacuucggaaa

SEQ ID NO: 1195330 - RNA, 19 nt, Homo sapiens
  misc_RNA (1)...(19): siRNA sense strand
gaagccaguaccagcguuu

SEQ ID NO: 1195331 - RNA, 19 nt, Homo sapiens
  misc_RNA (1)...(19): siRNA sense strand
gaaaggagagacggacauc

SEQ ID NO: 1195332 - RNA, 19 nt, Homo sapiens
  misc_RNA (1)...(19): siRNA sense strand
gaacuucggaaaggagaga

SEQ ID NO: 1195333 - RNA, 19 nt, Homo sapiens
  misc_RNA (1)...(19): siRNA sense strand
agacggacaucgggaggaa

SEQ ID NO: 1195334 - RNA, 19 nt, Homo sapiens
  misc_RNA (1)...(19): siRNA sense strand
gcaggacuccaaggucauu

SEQ ID NO: 1195335 - RNA, 19 nt, Homo sapiens
  misc_RNA (1)...(19): siRNA sense strand
acaccaaaguccuggagau

SEQ ID NO: 1195336 - RNA, 19 nt, Homo sapiens
  misc_RNA (1)...(19): siRNA sense strand
agagaaagcgaagccagua

SEQ ID NO: 1195337 - RNA, 19 nt, Homo sapiens
  misc_RNA (1)...(19): siRNA sense strand
acucagaaacuccgacauu

SEQ ID NO: 1195338 - RNA, 19 nt, Homo sapiens
  misc_RNA (1)...(19): siRNA sense strand
gccggaauccugaaacuca

SEQ ID NO: 1195339 - RNA, 19 nt, Homo sapiens
  misc_RNA (1)...(19): siRNA sense strand
cucagaaacuccgacauug

SEQ ID NO: 1195340 - RNA, 19 nt, Homo sapiens
  misc_RNA (1)...(19): siRNA sense strand
ggaaaggagagacggacau

SEQ ID NO: 1195341 - RNA, 19 nt, Homo sapiens
  misc_RNA (1)...(19): siRNA sense strand
cagcaugcgagccgucauu

SEQ ID NO: 1195342 - RNA, 19 nt, Homo sapiens
  misc_RNA (1)...(19): siRNA sense strand
aaacuccgacauugaacuu

SEQ ID NO: 1195343 - RNA, 19 nt, Homo sapiens
  misc_RNA (1)...(19): siRNA sense strand
agaaugagccgcugaugcu

SEQ ID NO: 1195344 - RNA, 19 nt, Homo sapiens
  misc_RNA (1)...(19): siRNA sense strand
gccgaauucucuggugguu

SEQ ID NO: 1195345 - RNA, 19 nt, Homo sapiens
  misc_RNA (1)...(19): siRNA sense strand
acauugaacuucggaaagg

SEQ ID NO: 1195346 - RNA, 19 nt, Homo sapiens
  misc_RNA (1)...(19): siRNA sense strand
gacauugaacuucggaaag

SEQ ID NO: 1195347 - RNA, 19 nt, Homo sapiens
  misc_RNA (1)...(19): siRNA sense strand
gaaacuccgacauugaacu

SEQ ID NO: 1195348 - RNA, 19 nt, Homo sapiens
  misc_RNA (1)...(19): siRNA sense strand
gcaugcgagccgucauuga

SEQ ID NO: 1195349 - RNA, 19 nt, Homo sapiens
  misc_RNA (1)...(19): siRNA sense strand
gaccugugcaagccgaauu

SEQ ID NO: 1195350 - RNA, 19 nt, Homo sapiens
  misc_RNA (1)...(19): siRNA sense strand
gaaagcgaagccaguacca

SEQ ID NO: 1195351 - RNA, 19 nt, Homo sapiens
  misc_RNA (1)...(19): siRNA sense strand
ggagaaugagccgcugaug

SEQ ID NO: 1195352 - RNA, 19 nt, Homo sapiens
  misc_RNA (1)...(19): siRNA sense strand
cgaauucucuggugguuga

SEQ ID NO: 1195353 - RNA, 19 nt, Homo sapiens
  misc_RNA (1)...(19): siRNA sense strand
cguaugagcuucggauuga

SEQ ID NO: 1195354 - RNA, 19 nt, Homo sapiens
  misc_RNA (1)...(19): siRNA sense strand
gcagcugcauggcuacuug

SEQ ID NO: 1195355 - RNA, 19 nt, Homo sapiens
  misc_RNA (1)...(19): siRNA sense strand
cagaaacuccgacauugaa

SEQ ID NO: 1195356 - RNA, 19 nt, Homo sapiens
  misc_RNA (1)...(19): siRNA sense strand
gcagagcacggacagcuau

SEQ ID NO: 1195357 - RNA, 19 nt, Homo sapiens
  misc_RNA (1)...(19): siRNA sense strand
ucagaaacuccgacauuga

SEQ ID NO: 1195358 - RNA, 19 nt, Homo sapiens
  misc_RNA (1)...(19): siRNA sense strand
cgacauugaacuucggaaa

SEQ ID NO: 1195359 - RNA, 19 nt, Homo sapiens
  misc_RNA (1)...(19): siRNA sense strand
gaagccaguaccagcguuu

SEQ ID NO: 1195360 - RNA, 19 nt, Homo sapiens
  misc_RNA (1)...(19): siRNA sense strand
gaaaggagagacggacauc

SEQ ID NO: 1195361 - RNA, 19 nt, Homo sapiens
  misc_RNA (1)...(19): siRNA sense strand
gaacuucggaaaggagaga

SEQ ID NO: 1195362 - RNA, 19 nt, Homo sapiens
  misc_RNA (1)...(19): siRNA sense strand
agacggacaucgggaggaa

SEQ ID NO: 1195363 - RNA, 19 nt, Homo sapiens
  misc_RNA (1)...(19): siRNA sense strand
gcaggacuccaaggucauu

SEQ ID NO: 1195364 - RNA, 19 nt, Homo sapiens
  misc_RNA (1)...(19): siRNA sense strand
acaccaaaguccuggagau

SEQ ID NO: 1195365 - RNA, 19 nt, Homo sapiens
  misc_RNA (1)...(19): siRNA sense strand
agagaaagcgaagccagua

SEQ ID NO: 1195366 - RNA, 19 nt, Homo sapiens
  misc_RNA (1)...(19): siRNA sense strand
acucagaaacuccgacauu

SEQ ID NO: 1195367 - RNA, 19 nt, Homo sapiens
  misc_RNA (1)...(19): siRNA sense strand
gccggaauccugaaacuca

SEQ ID NO: 1195368 - RNA, 19 nt, Homo sapiens
  misc_RNA (1)...(19): siRNA sense strand
cucagaaacuccgacauug

SEQ ID NO: 1195369 - RNA, 19 nt, Homo sapiens
  misc_RNA (1)...(19): siRNA sense strand
ggaaaggagagacggacau

SEQ ID NO: 1195370 - RNA, 19 nt, Homo sapiens
  misc_RNA (1)...(19): siRNA sense strand
cagcaugcgagccgucauu

SEQ ID NO: 1195371 - RNA, 19 nt, Homo sapiens
  misc_RNA (1)...(19): siRNA sense strand
aaacuccgacauugaacuu

SEQ ID NO: 1195372 - RNA, 19 nt, Homo sapiens
  misc_RNA (1)...(19): siRNA sense strand
agaaugagccgcugaugcu

SEQ ID NO: 1195373 - RNA, 19 nt, Homo sapiens
  misc_RNA (1)...(19): siRNA sense strand
gccgaauucucuggugguu

SEQ ID NO: 1195374 - RNA, 19 nt, Homo sapiens
  misc_RNA (1)...(19): siRNA sense strand
acauugaacuucggaaagg

SEQ ID NO: 1195375 - RNA, 19 nt, Homo sapiens
  misc_RNA (1)...(19): siRNA sense strand
gacauugaacuucggaaag

SEQ ID NO: 1195376 - RNA, 19 nt, Homo sapiens
  misc_RNA (1)...(19): siRNA sense strand
gaaacuccgacauugaacu

SEQ ID NO: 1195377 - RNA, 19 nt, Homo sapiens
  misc_RNA (1)...(19): siRNA sense strand
gcaugcgagccgucauuga

SEQ ID NO: 1195378 - RNA, 19 nt, Homo sapiens
  misc_RNA (1)...(19): siRNA sense strand
gaccugugcaagccgaauu

SEQ ID NO: 1195379 - RNA, 19 nt, Homo sapiens
  misc_RNA (1)...(19): siRNA sense strand
gaaagcgaagccaguacca

SEQ ID NO: 1195380 - RNA, 19 nt, Homo sapiens
  misc_RNA (1)...(19): siRNA sense strand
ggagaaugagccgcugaug

SEQ ID NO: 1195381 - RNA, 19 nt, Homo sapiens
  misc_RNA (1)...(19): siRNA sense strand
ggagauauuuccuuucuuc

SEQ ID NO: 1195382 - RNA, 19 nt, Homo sapiens
  misc_RNA (1)...(19): siRNA sense strand
gaaagcagccaauaacaag

SEQ ID NO: 1195383 - RNA, 19 nt, Homo sapiens
  misc_RNA (1)...(19): siRNA sense strand
gaucuugggcccucacuuu

SEQ ID NO: 1195384 - RNA, 19 nt, Homo sapiens
  misc_RNA (1)...(19): siRNA sense strand
caagggaacuacgagcuuu

SEQ ID NO: 1195385 - RNA, 19 nt, Homo sapiens
  misc_RNA (1)...(19): siRNA sense strand
gauauuuccuuucuucaag

SEQ ID NO: 1195386 - RNA, 19 nt, Homo sapiens
  misc_RNA (1)...(19): siRNA sense strand
gaugaggugcugaauguaa

SEQ ID NO: 1195387 - RNA, 19 nt, Homo sapiens
  misc_RNA (1)...(19): siRNA sense strand
uggaugaggugcugaaugu

SEQ ID NO: 1195388 - RNA, 19 nt, Homo sapiens
  misc_RNA (1)...(19): siRNA sense strand
gcucucauguugcccuuau

SEQ ID NO: 1195389 - RNA, 19 nt, Homo sapiens
  misc_RNA (1)...(19): siRNA sense strand
ccaauaacaagaaaggaaa

SEQ ID NO: 1195390 - RNA, 19 nt, Homo sapiens
  misc_RNA (1)...(19): siRNA sense strand
aaagcagucuguuggagaa

SEQ ID NO: 1195391 - RNA, 19 nt, Homo sapiens
  misc_RNA (1)...(19): siRNA sense strand
ugaaagcagccaauaacaa

SEQ ID NO: 1195392 - RNA, 19 nt, Homo sapiens
  misc_RNA (1)...(19): siRNA sense strand
ccagugacauuuaauucca

SEQ ID NO: 1195393 - RNA, 19 nt, Homo sapiens
  misc_RNA (1)...(19): siRNA sense strand
gccaauaacaagaaaggaa

SEQ ID NO: 1195394 - RNA, 19 nt, Homo sapiens
  misc_RNA (1)...(19): siRNA sense strand
gcagucuguuggagaaugg

SEQ ID NO: 1195395 - RNA, 19 nt, Homo sapiens
  misc_RNA (1)...(19): siRNA sense strand
gagucccucucugaccuua

SEQ ID NO: 1195396 - RNA, 19 nt, Homo sapiens
  misc_RNA (1)...(19): siRNA sense strand
aaacugagggacauucugu

SEQ ID NO: 1195397 - RNA, 19 nt, Homo sapiens
  misc_RNA (1)...(19): siRNA sense strand
gugcugaauguaauggaua

SEQ ID NO: 1195398 - RNA, 19 nt, Homo sapiens
  misc_RNA (1)...(19): siRNA sense strand
caacagcaccucggacucu

SEQ ID NO: 1195399 - RNA, 19 nt, Homo sapiens
  misc_RNA (1)...(19): siRNA sense strand
cauguugcccuuauuguca

SEQ ID NO: 1195400 - RNA, 19 nt, Homo sapiens
  misc_RNA (1)...(19): siRNA sense strand
cauucugucuccugauaug

SEQ ID NO: 1195401 - RNA, 19 nt, Homo sapiens
  misc_RNA (1)...(19): siRNA sense strand
cagccgaggacauguuuga

SEQ ID NO: 1195402 - RNA, 19 nt, Homo sapiens
  misc_RNA (1)...(19): siRNA sense strand
gacauuuaauuccaaacag

SEQ ID NO: 1195403 - RNA, 19 nt, Homo sapiens
  misc_RNA (1)...(19): siRNA sense strand
aucccaagcucucauguug

SEQ ID NO: 1195404 - RNA, 19 nt, Homo sapiens
  misc_RNA (1)...(19): siRNA sense strand
gaucccaagcucucauguu

SEQ ID NO: 1195405 - RNA, 19 nt, Homo sapiens
  misc_RNA (1)...(19): siRNA sense strand
gcaccucggacucuguguu

SEQ ID NO: 1195406 - RNA, 19 nt, Homo sapiens
  misc_RNA (1)...(19): siRNA sense strand
cagccaagaccccaauuua

SEQ ID NO: 1195407 - RNA, 19 nt, Homo sapiens
  misc_RNA (1)...(19): siRNA sense strand
gcgagcucaucaagggaaa

SEQ ID NO: 1195408 - RNA, 19 nt, Homo sapiens
  misc_RNA (1)...(19): siRNA sense strand
ggagaaaagcagucuguug

SEQ ID NO: 1195409 - RNA, 19 nt, Homo sapiens
  misc_RNA (1)...(19): siRNA sense strand
ggugcugaauguaauggau

SEQ ID NO: 1195410 - RNA, 19 nt, Homo sapiens
  misc_RNA (1)...(19): siRNA sense strand
gagcucaucaagggaaaga

SEQ ID NO: 1195411 - RNA, 19 nt, Homo sapiens
  misc_RNA (1)...(19): siRNA sense strand
aagcagccaauaacaagaa

SEQ ID NO: 1195412 - RNA, 19 nt, Homo sapiens
  misc_RNA (1)...(19): siRNA sense strand
ugcugaauguaauggauaa

SEQ ID NO: 1195413 - RNA, 19 nt, Homo sapiens
  misc_RNA (1)...(19): siRNA sense strand
caaagagggccagcacgau

SEQ ID NO: 1195414 - RNA, 19 nt, Homo sapiens
  misc_RNA (1)...(19): siRNA sense strand
caccagugacauuuaauuc

SEQ ID NO: 1195415 - RNA, 19 nt, Homo sapiens
  misc_RNA (1)...(19): siRNA sense strand
ucaagggaacuacgagcuu

SEQ ID NO: 1195416 - RNA, 19 nt, Homo sapiens
  misc_RNA (1)...(19): siRNA sense strand
ucaucaagggaaagacuaa

SEQ ID NO: 1195417 - RNA, 19 nt, Homo sapiens
  misc_RNA (1)...(19): siRNA sense strand
gagauauuuccuuucuuca

SEQ ID NO: 1195418 - RNA, 19 nt, Homo sapiens
  misc_RNA (1)...(19): siRNA sense strand
ggaugaggugcugaaugua

SEQ ID NO: 1195419 - RNA, 19 nt, Homo sapiens
  misc_RNA (1)...(19): siRNA sense strand
gccagccgaggacauguuu

SEQ ID NO: 1195420 - RNA, 19 nt, Homo sapiens
  misc_RNA (1)...(19): siRNA sense strand
ccuccagccuguccgaaca

SEQ ID NO: 1195421 - RNA, 19 nt, Homo sapiens
  misc_RNA (1)...(19): siRNA sense strand
ccugaaagcagccaauaac

SEQ ID NO: 1195422 - RNA, 19 nt, Homo sapiens
  misc_RNA (1)...(19): siRNA sense strand
cagugacauuuaauuccaa

SEQ ID NO: 1195423 - RNA, 19 nt, Homo sapiens
  misc_RNA (1)...(19): siRNA sense strand
ccauccacauuggcaaaga

SEQ ID NO: 1195424 - RNA, 19 nt, Homo sapiens
  misc_RNA (1)...(19): siRNA sense strand
gucccucucugaccuuaca

SEQ ID NO: 1195425 - RNA, 19 nt, Homo sapiens
  misc_RNA (1)...(19): siRNA sense strand
cgccacaccauccacauug

SEQ ID NO: 1195426 - RNA, 19 nt, Homo sapiens
  misc_RNA (1)...(19): siRNA sense strand
ggaccuggauuucuguuca

SEQ ID NO: 1195427 - RNA, 19 nt, Homo sapiens
  misc_RNA (1)...(19): siRNA sense strand
caucaacguucgggacuuu

SEQ ID NO: 1195428 - RNA, 19 nt, Homo sapiens
  misc_RNA (1)...(19): siRNA sense strand
ucauggaccucgccaauac

SEQ ID NO: 1195429 - RNA, 19 nt, Homo sapiens
  misc_RNA (1)...(19): siRNA sense strand
gcaaguuccaggagaagga

SEQ ID NO: 1195430 - RNA, 19 nt, Homo sapiens
  misc_RNA (1)...(19): siRNA sense strand
gcauaccacaccagacaga

SEQ ID NO: 1195431 - RNA, 19 nt, Homo sapiens
  misc_RNA (1)...(19): siRNA sense strand
agacuucgguuguguucca

SEQ ID NO: 1195432 - RNA, 19 nt, Homo sapiens
  misc_RNA (1)...(19): siRNA sense strand
agucggaccuggauuucug

SEQ ID NO: 1195433 - RNA, 19 nt, Homo sapiens
  misc_RNA (1)...(19): siRNA sense strand
gaugaagggcaaacugucu

SEQ ID NO: 1195434 - RNA, 19 nt, Homo sapiens
  misc_RNA (1)...(19): siRNA sense strand
gauguggucaugaaggaau

SEQ ID NO: 1195435 - RNA, 19 nt, Homo sapiens
  misc_RNA (1)...(19): siRNA sense strand
ucgauguggucaugaagga

SEQ ID NO: 1195436 - RNA, 19 nt, Homo sapiens
  misc_RNA (1)...(19): siRNA sense strand
gcuguggcuucaacaucaa

SEQ ID NO: 1195437 - RNA, 19 nt, Homo sapiens
  misc_RNA (1)...(19): siRNA sense strand
uguauucgcuguggcuuca

SEQ ID NO: 1195438 - RNA, 19 nt, Homo sapiens
  misc_RNA (1)...(19): siRNA sense strand
aauacuugcuccagcuuuc

SEQ ID NO: 1195439 - RNA, 19 nt, Homo sapiens
  misc_RNA (1)...(19): siRNA sense strand
ggcaaacugucuucuacac

SEQ ID NO: 1195440 - RNA, 19 nt, Homo sapiens
  misc_RNA (1)...(19): siRNA sense strand
cgcuguggcuucaacauca

SEQ ID NO: 1195441 - RNA, 19 nt, Homo sapiens
  misc_RNA (1)...(19): siRNA sense strand
gucauggaccucgccaaua

SEQ ID NO: 1195442 - RNA, 19 nt, Homo sapiens
  misc_RNA (1)...(19): siRNA sense strand
gggacagccaugccuaugu

SEQ ID NO: 1195443 - RNA, 19 nt, Homo sapiens
  misc_RNA (1)...(19): siRNA sense strand
caauacuugcuccagcuuu

SEQ ID NO: 1195444 - RNA, 19 nt, Homo sapiens
  misc_RNA (1)...(19): siRNA sense strand
uggcauaccacaccagaca

SEQ ID NO: 1195445 - RNA, 19 nt, Homo sapiens
  misc_RNA (1)...(19): siRNA sense strand
gggcaaacugucuucuaca

SEQ ID NO: 1195446 - RNA, 19 nt, Homo sapiens
  misc_RNA (1)...(19): siRNA sense strand
ggaccuggauuucuguuca

SEQ ID NO: 1195447 - RNA, 19 nt, Homo sapiens
  misc_RNA (1)...(19): siRNA sense strand
caucaacguucgggacuuu

SEQ ID NO: 1195448 - RNA, 19 nt, Homo sapiens
  misc_RNA (1)...(19): siRNA sense strand
ucauggaccucgccaauac

SEQ ID NO: 1195449 - RNA, 19 nt, Homo sapiens
  misc_RNA (1)...(19): siRNA sense strand
gcaaguuccaggagaagga

SEQ ID NO: 1195450 - RNA, 19 nt, Homo sapiens
  misc_RNA (1)...(19): siRNA sense strand
gcauaccacaccagacaga

SEQ ID NO: 1195451 - RNA, 19 nt, Homo sapiens
  misc_RNA (1)...(19): siRNA sense strand
agacuucgguuguguucca

SEQ ID NO: 1195452 - RNA, 19 nt, Homo sapiens
  misc_RNA (1)...(19): siRNA sense strand
agucggaccuggauuucug

SEQ ID NO: 1195453 - RNA, 19 nt, Homo sapiens
  misc_RNA (1)...(19): siRNA sense strand
gaugaagggcaaacugucu

SEQ ID NO: 1195454 - RNA, 19 nt, Homo sapiens
  misc_RNA (1)...(19): siRNA sense strand
gauguggucaugaaggaau

SEQ ID NO: 1195455 - RNA, 19 nt, Homo sapiens
  misc_RNA (1)...(19): siRNA sense strand
ucgauguggucaugaagga

SEQ ID NO: 1195456 - RNA, 19 nt, Homo sapiens
  misc_RNA (1)...(19): siRNA sense strand
gcuguggcuucaacaucaa

SEQ ID NO: 1195457 - RNA, 19 nt, Homo sapiens
  misc_RNA (1)...(19): siRNA sense strand
uguauucgcuguggcuuca

SEQ ID NO: 1195458 - RNA, 19 nt, Homo sapiens
  misc_RNA (1)...(19): siRNA sense strand
aauacuugcuccagcuuuc

SEQ ID NO: 1195459 - RNA, 19 nt, Homo sapiens
  misc_RNA (1)...(19): siRNA sense strand
ggcaaacugucuucuacac

SEQ ID NO: 1195460 - RNA, 19 nt, Homo sapiens
  misc_RNA (1)...(19): siRNA sense strand
cgcuguggcuucaacauca

SEQ ID NO: 1195461 - RNA, 19 nt, Homo sapiens
  misc_RNA (1)...(19): siRNA sense strand
gucauggaccucgccaaua

SEQ ID NO: 1195462 - RNA, 19 nt, Homo sapiens
  misc_RNA (1)...(19): siRNA sense strand
gggacagccaugccuaugu

SEQ ID NO: 1195463 - RNA, 19 nt, Homo sapiens
  misc_RNA (1)...(19): siRNA sense strand
caauacuugcuccagcuuu

SEQ ID NO: 1195464 - RNA, 19 nt, Homo sapiens
  misc_RNA (1)...(19): siRNA sense strand
uggcauaccacaccagaca

SEQ ID NO: 1195465 - RNA, 19 nt, Homo sapiens
  misc_RNA (1)...(19): siRNA sense strand
gggcaaacugucuucuaca

SEQ ID NO: 1195466 - RNA, 19 nt, Homo sapiens
  misc_RNA (1)...(19): siRNA sense strand
gaagaaagccagggagaga

SEQ ID NO: 1195467 - RNA, 19 nt, Homo sapiens
  misc_RNA (1)...(19): siRNA sense strand
gaaacgagaaauccacaug

SEQ ID NO: 1195468 - RNA, 19 nt, Homo sapiens
  misc_RNA (1)...(19): siRNA sense strand
ugacaaggaucaggucuca

SEQ ID NO: 1195469 - RNA, 19 nt, Homo sapiens
  misc_RNA (1)...(19): siRNA sense strand
gcauuuggagagcgucuua

SEQ ID NO: 1195470 - RNA, 19 nt, Homo sapiens
  misc_RNA (1)...(19): siRNA sense strand
guucaaguccacugcauuu

SEQ ID NO: 1195471 - RNA, 19 nt, Homo sapiens
  misc_RNA (1)...(19): siRNA sense strand
ggaggccggugacaaggau

SEQ ID NO: 1195472 - RNA, 19 nt, Homo sapiens
  misc_RNA (1)...(19): siRNA sense strand
gagagcgucuuaaguaucc

SEQ ID NO: 1195473 - RNA, 19 nt, Homo sapiens
  misc_RNA (1)...(19): siRNA sense strand
uuggagagcgucuuaagua

SEQ ID NO: 1195474 - RNA, 19 nt, Homo sapiens
  misc_RNA (1)...(19): siRNA sense strand
ggagagcgucuuaaguauc

SEQ ID NO: 1195475 - RNA, 19 nt, Homo sapiens
  misc_RNA (1)...(19): siRNA sense strand
gggacgagcaccuggagaa

SEQ ID NO: 1195476 - RNA, 19 nt, Homo sapiens
  misc_RNA (1)...(19): siRNA sense strand
uggagagcgucuuaaguau

SEQ ID NO: 1195477 - RNA, 19 nt, Homo sapiens
  misc_RNA (1)...(19): siRNA sense strand
ccaaggagaagguucaagu

SEQ ID NO: 1195478 - RNA, 19 nt, Homo sapiens
  misc_RNA (1)...(19): siRNA sense strand
aaccugcguucaccucuuu

SEQ ID NO: 1195479 - RNA, 19 nt, Homo sapiens
  misc_RNA (1)...(19): siRNA sense strand
uuacagaagaaacgagaaa

SEQ ID NO: 1195480 - RNA, 19 nt, Homo sapiens
  misc_RNA (1)...(19): siRNA sense strand
ccaggagggugaagaaagc

SEQ ID NO: 1195481 - RNA, 19 nt, Homo sapiens
  misc_RNA (1)...(19): siRNA sense strand
ggugacuccugcagauauc

SEQ ID NO: 1195482 - RNA, 19 nt, Homo sapiens
  misc_RNA (1)...(19): siRNA sense strand
acaaggaucaggucucauc

SEQ ID NO: 1195483 - RNA, 19 nt, Homo sapiens
  misc_RNA (1)...(19): siRNA sense strand
ggucucauccugacaacca

SEQ ID NO: 1195484 - RNA, 19 nt, Homo sapiens
  misc_RNA (1)...(19): siRNA sense strand
cgucuuaaguauccuugca

SEQ ID NO: 1195485 - RNA, 19 nt, Homo sapiens
  misc_RNA (1)...(19): siRNA sense strand
ggacggccagugaaucucu

SEQ ID NO: 1195486 - RNA, 19 nt, Homo sapiens
  misc_RNA (1)...(19): siRNA sense strand
uggggaagcucaaaaggaa

SEQ ID NO: 1195487 - RNA, 19 nt, Homo sapiens
  misc_RNA (1)...(19): siRNA sense strand
gagaagccgcagcaacucu

SEQ ID NO: 1195488 - RNA, 19 nt, Homo sapiens
  misc_RNA (1)...(19): siRNA sense strand
caaggagaagguucaaguc

SEQ ID NO: 1195489 - RNA, 19 nt, Homo sapiens
  misc_RNA (1)...(19): siRNA sense strand
ggccaggcaggcagaaaug

SEQ ID NO: 1195490 - RNA, 19 nt, Homo sapiens
  misc_RNA (1)...(19): siRNA sense strand
acagaagaaacgagaaauc

SEQ ID NO: 1195491 - RNA, 19 nt, Homo sapiens
  misc_RNA (1)...(19): siRNA sense strand
cugcagauauccggagaca

SEQ ID NO: 1195492 - RNA, 19 nt, Homo sapiens
  misc_RNA (1)...(19): siRNA sense strand
ucaaguccacugcauuugg

SEQ ID NO: 1195493 - RNA, 19 nt, Homo sapiens
  misc_RNA (1)...(19): siRNA sense strand
ggacaagggauuaauagua

SEQ ID NO: 1195494 - RNA, 19 nt, Homo sapiens
  misc_RNA (1)...(19): siRNA sense strand
gacaagggauuaauaguau

SEQ ID NO: 1195495 - RNA, 19 nt, Homo sapiens
  misc_RNA (1)...(19): siRNA sense strand
ggaauuccaugacuccaaa

SEQ ID NO: 1195496 - RNA, 19 nt, Homo sapiens
  misc_RNA (1)...(19): siRNA sense strand
ggaaaccucuggaccucua

SEQ ID NO: 1195497 - RNA, 19 nt, Homo sapiens
  misc_RNA (1)...(19): siRNA sense strand
gaauaccucugacaugaug

SEQ ID NO: 1195498 - RNA, 19 nt, Homo sapiens
  misc_RNA (1)...(19): siRNA sense strand
caacauggcggacaacaaa

SEQ ID NO: 1195499 - RNA, 19 nt, Homo sapiens
  misc_RNA (1)...(19): siRNA sense strand
aggagaagcugaucaguaa

SEQ ID NO: 1195500 - RNA, 19 nt, Homo sapiens
  misc_RNA (1)...(19): siRNA sense strand
gcaacgacaugauuccuau

SEQ ID NO: 1195501 - RNA, 19 nt, Homo sapiens
  misc_RNA (1)...(19): siRNA sense strand
gaaggagauugguggauug

SEQ ID NO: 1195502 - RNA, 19 nt, Homo sapiens
  misc_RNA (1)...(19): siRNA sense strand
guaaagaucguacagaaga

SEQ ID NO: 1195503 - RNA, 19 nt, Homo sapiens
  misc_RNA (1)...(19): siRNA sense strand
ugaucuaucugguucaaua

SEQ ID NO: 1195504 - RNA, 19 nt, Homo sapiens
  misc_RNA (1)...(19): siRNA sense strand
ggaagaagaagaggaagua

SEQ ID NO: 1195505 - RNA, 19 nt, Homo sapiens
  misc_RNA (1)...(19): siRNA sense strand
gaauagggccugagggaaa

SEQ ID NO: 1195506 - RNA, 19 nt, Homo sapiens
  misc_RNA (1)...(19): siRNA sense strand
gagguuauaugcagaggaa

SEQ ID NO: 1195507 - RNA, 19 nt, Homo sapiens
  misc_RNA (1)...(19): siRNA sense strand
ggaagaagaagaagaacuu

SEQ ID NO: 1195508 - RNA, 19 nt, Homo sapiens
  misc_RNA (1)...(19): siRNA sense strand
gaacuggaccuccuuaugg

SEQ ID NO: 1195509 - RNA, 19 nt, Homo sapiens
  misc_RNA (1)...(19): siRNA sense strand
gcagauuccuccuuaugga

SEQ ID NO: 1195510 - RNA, 19 nt, Homo sapiens
  misc_RNA (1)...(19): siRNA sense strand
ggagauggcugugguacug

SEQ ID NO: 1195511 - RNA, 19 nt, Homo sapiens
  misc_RNA (1)...(19): siRNA sense strand
cacagcagauuccuccuua

SEQ ID NO: 1195512 - RNA, 19 nt, Homo sapiens
  misc_RNA (1)...(19): siRNA sense strand
gcacagagccaccggaaca

SEQ ID NO: 1195513 - RNA, 19 nt, Homo sapiens
  misc_RNA (1)...(19): siRNA sense strand
gaggagaagcugaucagua

SEQ ID NO: 1195514 - RNA, 19 nt, Homo sapiens
  misc_RNA (1)...(19): siRNA sense strand
guaaugaugucccucaagu

SEQ ID NO: 1195515 - RNA, 19 nt, Homo sapiens
  misc_RNA (1)...(19): siRNA sense strand
gcccuaacauggccaauau

SEQ ID NO: 1195516 - RNA, 19 nt, Homo sapiens
  misc_RNA (1)...(19): siRNA sense strand
caguaaagaucguacagaa

SEQ ID NO: 1195517 - RNA, 19 nt, Homo sapiens
  misc_RNA (1)...(19): siRNA sense strand
uauaaugccuugcccaaug

SEQ ID NO: 1195518 - RNA, 19 nt, Homo sapiens
  misc_RNA (1)...(19): siRNA sense strand
gcaaugacuuugagauguc

SEQ ID NO: 1195519 - RNA, 19 nt, Homo sapiens
  misc_RNA (1)...(19): siRNA sense strand
ggaccucuaucgccucuau

SEQ ID NO: 1195520 - RNA, 19 nt, Homo sapiens
  misc_RNA (1)...(19): siRNA sense strand
gaucagaugggcaagauga

SEQ ID NO: 1195521 - RNA, 19 nt, Homo sapiens
  misc_RNA (1)...(19): siRNA sense strand
caggaugccuuuaaugaug

SEQ ID NO: 1195522 - RNA, 19 nt, Homo sapiens
  misc_RNA (1)...(19): siRNA sense strand
ucaaugaccuccaguaagg

SEQ ID NO: 1195523 - RNA, 19 nt, Homo sapiens
  misc_RNA (1)...(19): siRNA sense strand
ccaggcagccaaacuauaa

SEQ ID NO: 1195524 - RNA, 19 nt, Homo sapiens
  misc_RNA (1)...(19): siRNA sense strand
gugguggacugcucagaua

SEQ ID NO: 1195525 - RNA, 19 nt, Homo sapiens
  misc_RNA (1)...(19): siRNA sense strand
aggcauggcuggaggcaua

SEQ ID NO: 1195526 - RNA, 19 nt, Homo sapiens
  misc_RNA (1)...(19): siRNA sense strand
gagcagcaaguuuccauuu

SEQ ID NO: 1195527 - RNA, 19 nt, Homo sapiens
  misc_RNA (1)...(19): siRNA sense strand
ugaaggagauugguggauu

SEQ ID NO: 1195528 - RNA, 19 nt, Homo sapiens
  misc_RNA (1)...(19): siRNA sense strand
gagaaguuguauagcacua

SEQ ID NO: 1195529 - RNA, 19 nt, Homo sapiens
  misc_RNA (1)...(19): siRNA sense strand
gaauccaaauccaagaaau

SEQ ID NO: 1195530 - RNA, 19 nt, Homo sapiens
  misc_RNA (1)...(19): siRNA sense strand
caacuaguguggacaugau

SEQ ID NO: 1195531 - RNA, 19 nt, Homo sapiens
  misc_RNA (1)...(19): siRNA sense strand
gaagaucaccaaguuguau

SEQ ID NO: 1195532 - RNA, 19 nt, Homo sapiens
  misc_RNA (1)...(19): siRNA sense strand
gagaagaucaccaaguugu

SEQ ID NO: 1195533 - RNA, 19 nt, Homo sapiens
  misc_RNA (1)...(19): siRNA sense strand
ggacaccacugagcauauc

SEQ ID NO: 1195534 - RNA, 19 nt, Homo sapiens
  misc_RNA (1)...(19): siRNA sense strand
ucaacauccugcuguauga

SEQ ID NO: 1195535 - RNA, 19 nt, Homo sapiens
  misc_RNA (1)...(19): siRNA sense strand
cgacagcacuaucccuaug

SEQ ID NO: 1195536 - RNA, 19 nt, Homo sapiens
  misc_RNA (1)...(19): siRNA sense strand
ggcagaaggaggagacuua

SEQ ID NO: 1195537 - RNA, 19 nt, Homo sapiens
  misc_RNA (1)...(19): siRNA sense strand
ggacauggccucgcagugu

SEQ ID NO: 1195538 - RNA, 19 nt, Homo sapiens
  misc_RNA (1)...(19): siRNA sense strand
gaaccauggccaacaauuc

SEQ ID NO: 1195539 - RNA, 19 nt, Homo sapiens
  misc_RNA (1)...(19): siRNA sense strand
gcagcaaguuuccauuugg

SEQ ID NO: 1195540 - RNA, 19 nt, Homo sapiens
  misc_RNA (1)...(19): siRNA sense strand
uaucagcccaguaugaaua

SEQ ID NO: 1195541 - RNA, 19 nt, Homo sapiens
  misc_RNA (1)...(19): siRNA sense strand
gacgaugccugauugagau

SEQ ID NO: 1195542 - RNA, 19 nt, Homo sapiens
  misc_RNA (1)...(19): siRNA sense strand
cagcuugccugaucuaucu

SEQ ID NO: 1195543 - RNA, 19 nt, Homo sapiens
  misc_RNA (1)...(19): siRNA sense strand
ggauggagcuaagaguuca

SEQ ID NO: 1195544 - RNA, 19 nt, Homo sapiens
  misc_RNA (1)...(19): siRNA sense strand
uaaagaucguacagaagaa

SEQ ID NO: 1195545 - RNA, 19 nt, Homo sapiens
  misc_RNA (1)...(19): siRNA sense strand
gaagaggaaguaguugaaa

SEQ ID NO: 1195546 - RNA, 19 nt, Homo sapiens
  misc_RNA (1)...(19): siRNA sense strand
uagagcuccuuguagaaua

SEQ ID NO: 1195547 - RNA, 19 nt, Homo sapiens
  misc_RNA (1)...(19): siRNA sense strand
gaucacagccacuauggau

SEQ ID NO: 1195548 - RNA, 19 nt, Homo sapiens
  misc_RNA (1)...(19): siRNA sense strand
gacauggccucgcaguguu

SEQ ID NO: 1195549 - RNA, 19 nt, Homo sapiens
  misc_RNA (1)...(19): siRNA sense strand
ggaaguaguugaaaaugau

SEQ ID NO: 1195550 - RNA, 19 nt, Homo sapiens
  misc_RNA (1)...(19): siRNA sense strand
gcacaugggcauuagauac

SEQ ID NO: 1195551 - RNA, 19 nt, Homo sapiens
  misc_RNA (1)...(19): siRNA sense strand
ggagauugguggauugacu

SEQ ID NO: 1195552 - RNA, 19 nt, Homo sapiens
  misc_RNA (1)...(19): siRNA sense strand
agauguggguggaccguua

SEQ ID NO: 1195553 - RNA, 19 nt, Homo sapiens
  misc_RNA (1)...(19): siRNA sense strand
gaaauccaguucuucuacu

SEQ ID NO: 1195554 - RNA, 19 nt, Homo sapiens
  misc_RNA (1)...(19): siRNA sense strand
ggcaugagcaggagcaauu

SEQ ID NO: 1195555 - RNA, 19 nt, Homo sapiens
  misc_RNA (1)...(19): siRNA sense strand
ggcaaugacuuugagaugu

SEQ ID NO: 1195556 - RNA, 19 nt, Homo sapiens
  misc_RNA (1)...(19): siRNA sense strand
guucagaggccaucaagga

SEQ ID NO: 1195557 - RNA, 19 nt, Homo sapiens
  misc_RNA (1)...(19): siRNA sense strand
ggagugaucccuucauguc

SEQ ID NO: 1195558 - RNA, 19 nt, Homo sapiens
  misc_RNA (1)...(19): siRNA sense strand
gcugccaacucuauccaaa

SEQ ID NO: 1195559 - RNA, 19 nt, Homo sapiens
  misc_RNA (1)...(19): siRNA sense strand
cauuugugauguacuguuu

SEQ ID NO: 1195560 - RNA, 19 nt, Homo sapiens
  misc_RNA (1)...(19): siRNA sense strand
ccaacaacauggcggacaa

SEQ ID NO: 1195561 - RNA, 19 nt, Homo sapiens
  misc_RNA (1)...(19): siRNA sense strand
ggacugcucagauaagcuu

SEQ ID NO: 1195562 - RNA, 19 nt, Homo sapiens
  misc_RNA (1)...(19): siRNA sense strand
ugacaagcuuccaguaaag

SEQ ID NO: 1195563 - RNA, 19 nt, Homo sapiens
  misc_RNA (1)...(19): siRNA sense strand
agaagaagaggaaguaguu

SEQ ID NO: 1195564 - RNA, 19 nt, Homo sapiens
  misc_RNA (1)...(19): siRNA sense strand
ggaacuggaccuccuuaug

SEQ ID NO: 1195565 - RNA, 19 nt, Homo sapiens
  misc_RNA (1)...(19): siRNA sense strand
cgcaggagcuaucucaaga

SEQ ID NO: 1195566 - RNA, 19 nt, Homo sapiens
  misc_RNA (1)...(19): siRNA sense strand
gcaccacuaacuuaugaaa

SEQ ID NO: 1195567 - RNA, 19 nt, Homo sapiens
  misc_RNA (1)...(19): siRNA sense strand
ucacagccacuauggauga

SEQ ID NO: 1195568 - RNA, 19 nt, Homo sapiens
  misc_RNA (1)...(19): siRNA sense strand
uugacaagcuuccaguaaa

SEQ ID NO: 1195569 - RNA, 19 nt, Homo sapiens
  misc_RNA (1)...(19): siRNA sense strand
gcagaaggaggagacuuaa

SEQ ID NO: 1195570 - RNA, 19 nt, Homo sapiens
  misc_RNA (1)...(19): siRNA sense strand
aaucaagcauugcccaaga

SEQ ID NO: 1195571 - RNA, 19 nt, Homo sapiens
  misc_RNA (1)...(19): siRNA sense strand
cacuauggaugacauguug

SEQ ID NO: 1195572 - RNA, 19 nt, Homo sapiens
  misc_RNA (1)...(19): siRNA sense strand
ccucggagcugaagaaagc

SEQ ID NO: 1195573 - RNA, 19 nt, Homo sapiens
  misc_RNA (1)...(19): siRNA sense strand
augagaagaucaccaaguu

SEQ ID NO: 1195574 - RNA, 19 nt, Homo sapiens
  misc_RNA (1)...(19): siRNA sense strand
ccaaugagaagaucaccaa

SEQ ID NO: 1195575 - RNA, 19 nt, Homo sapiens
  misc_RNA (1)...(19): siRNA sense strand
gaggacggagccuggaaua

SEQ ID NO: 1195576 - RNA, 19 nt, Homo sapiens
  misc_RNA (1)...(19): siRNA sense strand
ggcgggaacuugcaaccaa

SEQ ID NO: 1195577 - RNA, 19 nt, Homo sapiens
  misc_RNA (1)...(19): siRNA sense strand
augaauaccucugacauga

SEQ ID NO: 1195578 - RNA, 19 nt, Homo sapiens
  misc_RNA (1)...(19): siRNA sense strand
gaacucauugguuucacaa

SEQ ID NO: 1195579 - RNA, 19 nt, Homo sapiens
  misc_RNA (1)...(19): siRNA sense strand
guacgaaucacggcuguug

SEQ ID NO: 1195580 - RNA, 19 nt, Homo sapiens
  misc_RNA (1)...(19): siRNA sense strand
gaacaucaagauccuagag

SEQ ID NO: 1195581 - RNA, 19 nt, Homo sapiens
  misc_RNA (1)...(19): siRNA sense strand
gaggauggagcuaagaguu

SEQ ID NO: 1195582 - RNA, 19 nt, Homo sapiens
  misc_RNA (1)...(19): siRNA sense strand
auugagaucuuuggcauuu

SEQ ID NO: 1195583 - RNA, 19 nt, Homo sapiens
  misc_RNA (1)...(19): siRNA sense strand
cgacgaugccugauugaga

SEQ ID NO: 1195584 - RNA, 19 nt, Homo sapiens
  misc_RNA (1)...(19): siRNA sense strand
ccuaugagccaaauaagga

SEQ ID NO: 1195585 - RNA, 19 nt, Homo sapiens
  misc_RNA (1)...(19): siRNA sense strand
aaauccaguucuucuacua

SEQ ID NO: 1195586 - RNA, 19 nt, Homo sapiens
  misc_RNA (1)...(19): siRNA sense strand
caacaauguggaccugauu

SEQ ID NO: 1195587 - RNA, 19 nt, Homo sapiens
  misc_RNA (1)...(19): siRNA sense strand
gcaggcaccacuaacuuau

SEQ ID NO: 1195588 - RNA, 19 nt, Homo sapiens
  misc_RNA (1)...(19): siRNA sense strand
gaagcugaucaguaaguuu

SEQ ID NO: 1195589 - RNA, 19 nt, Homo sapiens
  misc_RNA (1)...(19): siRNA sense strand
ugagaucuuuggcauuuua

SEQ ID NO: 1195590 - RNA, 19 nt, Homo sapiens
  misc_RNA (1)...(19): siRNA sense strand
ccaucaacauccugcugua

SEQ ID NO: 1195591 - RNA, 19 nt, Homo sapiens
  misc_RNA (1)...(19): siRNA sense strand
ggacggagccuggaauagg

SEQ ID NO: 1195592 - RNA, 19 nt, Homo sapiens
  misc_RNA (1)...(19): siRNA sense strand
gaagcggaauuccaugacu

SEQ ID NO: 1195593 - RNA, 19 nt, Homo sapiens
  misc_RNA (1)...(19): siRNA sense strand
ggacaagggauuaauagua

SEQ ID NO: 1195594 - RNA, 19 nt, Homo sapiens
  misc_RNA (1)...(19): siRNA sense strand
gacaagggauuaauaguau

SEQ ID NO: 1195595 - RNA, 19 nt, Homo sapiens
  misc_RNA (1)...(19): siRNA sense strand
ggaauuccaugacuccaaa

SEQ ID NO: 1195596 - RNA, 19 nt, Homo sapiens
  misc_RNA (1)...(19): siRNA sense strand
ggaaaccucuggaccucua

SEQ ID NO: 1195597 - RNA, 19 nt, Homo sapiens
  misc_RNA (1)...(19): siRNA sense strand
gaauaccucugacaugaug

SEQ ID NO: 1195598 - RNA, 19 nt, Homo sapiens
  misc_RNA (1)...(19): siRNA sense strand
caacauggcggacaacaaa

SEQ ID NO: 1195599 - RNA, 19 nt, Homo sapiens
  misc_RNA (1)...(19): siRNA sense strand
gcaacgacaugauuccuau

SEQ ID NO: 1195600 - RNA, 19 nt, Homo sapiens
  misc_RNA (1)...(19): siRNA sense strand
gaaggagauugguggauug

SEQ ID NO: 1195601 - RNA, 19 nt, Homo sapiens
  misc_RNA (1)...(19): siRNA sense strand
ugaucuaucugguucaaua

SEQ ID NO: 1195602 - RNA, 19 nt, Homo sapiens
  misc_RNA (1)...(19): siRNA sense strand
gaauagggccugagggaaa

SEQ ID NO: 1195603 - RNA, 19 nt, Homo sapiens
  misc_RNA (1)...(19): siRNA sense strand
gagguuauaugcagaggaa

SEQ ID NO: 1195604 - RNA, 19 nt, Homo sapiens
  misc_RNA (1)...(19): siRNA sense strand
gaacuggaccuccuuaugg

SEQ ID NO: 1195605 - RNA, 19 nt, Homo sapiens
  misc_RNA (1)...(19): siRNA sense strand
gcagauuccuccuuaugga

SEQ ID NO: 1195606 - RNA, 19 nt, Homo sapiens
  misc_RNA (1)...(19): siRNA sense strand
cacagcagauuccuccuua

SEQ ID NO: 1195607 - RNA, 19 nt, Homo sapiens
  misc_RNA (1)...(19): siRNA sense strand
gcccuaacauggccaauau

SEQ ID NO: 1195608 - RNA, 19 nt, Homo sapiens
  misc_RNA (1)...(19): siRNA sense strand
uauaaugccuugcccaaug

SEQ ID NO: 1195609 - RNA, 19 nt, Homo sapiens
  misc_RNA (1)...(19): siRNA sense strand
ggaccucuaucgccucuau

SEQ ID NO: 1195610 - RNA, 19 nt, Homo sapiens
  misc_RNA (1)...(19): siRNA sense strand
gaucagaugggcaagauga

SEQ ID NO: 1195611 - RNA, 19 nt, Homo sapiens
  misc_RNA (1)...(19): siRNA sense strand
caggaugccuuuaaugaug

SEQ ID NO: 1195612 - RNA, 19 nt, Homo sapiens
  misc_RNA (1)...(19): siRNA sense strand
ucaaugaccuccaguaagg

SEQ ID NO: 1195613 - RNA, 19 nt, Homo sapiens
  misc_RNA (1)...(19): siRNA sense strand
ccaggcagccaaacuauaa

SEQ ID NO: 1195614 - RNA, 19 nt, Homo sapiens
  misc_RNA (1)...(19): siRNA sense strand
aggcauggcuggaggcaua

SEQ ID NO: 1195615 - RNA, 19 nt, Homo sapiens
  misc_RNA (1)...(19): siRNA sense strand
ugaaggagauugguggauu

SEQ ID NO: 1195616 - RNA, 19 nt, Homo sapiens
  misc_RNA (1)...(19): siRNA sense strand
gaauccaaauccaagaaau

SEQ ID NO: 1195617 - RNA, 19 nt, Homo sapiens
  misc_RNA (1)...(19): siRNA sense strand
gaagaucaccaaguuguau

SEQ ID NO: 1195618 - RNA, 19 nt, Homo sapiens
  misc_RNA (1)...(19): siRNA sense strand
gagaagaucaccaaguugu

SEQ ID NO: 1195619 - RNA, 19 nt, Homo sapiens
  misc_RNA (1)...(19): siRNA sense strand
cgacagcacuaucccuaug

SEQ ID NO: 1195620 - RNA, 19 nt, Homo sapiens
  misc_RNA (1)...(19): siRNA sense strand
ggcagaaggaggagacuua

SEQ ID NO: 1195621 - RNA, 19 nt, Homo sapiens
  misc_RNA (1)...(19): siRNA sense strand
ggacauggccucgcagugu

SEQ ID NO: 1195622 - RNA, 19 nt, Homo sapiens
  misc_RNA (1)...(19): siRNA sense strand
gaaccauggccaacaauuc

SEQ ID NO: 1195623 - RNA, 19 nt, Homo sapiens
  misc_RNA (1)...(19): siRNA sense strand
uaucagcccaguaugaaua

SEQ ID NO: 1195624 - RNA, 19 nt, Homo sapiens
  misc_RNA (1)...(19): siRNA sense strand
cagcuugccugaucuaucu

SEQ ID NO: 1195625 - RNA, 19 nt, Homo sapiens
  misc_RNA (1)...(19): siRNA sense strand
gacauggccucgcaguguu

SEQ ID NO: 1195626 - RNA, 19 nt, Homo sapiens
  misc_RNA (1)...(19): siRNA sense strand
ggagauugguggauugacu

SEQ ID NO: 1195627 - RNA, 19 nt, Homo sapiens
  misc_RNA (1)...(19): siRNA sense strand
agauguggguggaccguua

SEQ ID NO: 1195628 - RNA, 19 nt, Homo sapiens
  misc_RNA (1)...(19): siRNA sense strand
gaaauccaguucuucuacu

SEQ ID NO: 1195629 - RNA, 19 nt, Homo sapiens
  misc_RNA (1)...(19): siRNA sense strand
ggcaugagcaggagcaauu

SEQ ID NO: 1195630 - RNA, 19 nt, Homo sapiens
  misc_RNA (1)...(19): siRNA sense strand
ggagugaucccuucauguc

SEQ ID NO: 1195631 - RNA, 19 nt, Homo sapiens
  misc_RNA (1)...(19): siRNA sense strand
ccaacaacauggcggacaa

SEQ ID NO: 1195632 - RNA, 19 nt, Homo sapiens
  misc_RNA (1)...(19): siRNA sense strand
ggaacuggaccuccuuaug

SEQ ID NO: 1195633 - RNA, 19 nt, Homo sapiens
  misc_RNA (1)...(19): siRNA sense strand
gcugccaacucuauccaaa

SEQ ID NO: 1195634 - RNA, 19 nt, Homo sapiens
  misc_RNA (1)...(19): siRNA sense strand
cgcaggagcuaucucaaga

SEQ ID NO: 1195635 - RNA, 19 nt, Homo sapiens
  misc_RNA (1)...(19): siRNA sense strand
gcagaaggaggagacuuaa

SEQ ID NO: 1195636 - RNA, 19 nt, Homo sapiens
  misc_RNA (1)...(19): siRNA sense strand
aaucaagcauugcccaaga

SEQ ID NO: 1195637 - RNA, 19 nt, Homo sapiens
  misc_RNA (1)...(19): siRNA sense strand
ccucggagcugaagaaagc

SEQ ID NO: 1195638 - RNA, 19 nt, Homo sapiens
  misc_RNA (1)...(19): siRNA sense strand
augagaagaucaccaaguu

SEQ ID NO: 1195639 - RNA, 19 nt, Homo sapiens
  misc_RNA (1)...(19): siRNA sense strand
ccaaugagaagaucaccaa

SEQ ID NO: 1195640 - RNA, 19 nt, Homo sapiens
  misc_RNA (1)...(19): siRNA sense strand
gaggacggagccuggaaua

SEQ ID NO: 1195641 - RNA, 19 nt, Homo sapiens
  misc_RNA (1)...(19): siRNA sense strand
ggcgggaacuugcaaccaa

SEQ ID NO: 1195642 - RNA, 19 nt, Homo sapiens
  misc_RNA (1)...(19): siRNA sense strand
augaauaccucugacauga

SEQ ID NO: 1195643 - RNA, 19 nt, Homo sapiens
  misc_RNA (1)...(19): siRNA sense strand
ccuaugagccaaauaagga

SEQ ID NO: 1195644 - RNA, 19 nt, Homo sapiens
  misc_RNA (1)...(19): siRNA sense strand
uaguauggcuggcaugauc

SEQ ID NO: 1195645 - RNA, 19 nt, Homo sapiens
  misc_RNA (1)...(19): siRNA sense strand
ggacggagccuggaauagg

SEQ ID NO: 1195646 - RNA, 19 nt, Homo sapiens
  misc_RNA (1)...(19): siRNA sense strand
gaagcggaauuccaugacu

SEQ ID NO: 1195647 - RNA, 19 nt, Homo sapiens
  misc_RNA (1)...(19): siRNA sense strand
aaauccaguucuucuacua

SEQ ID NO: 1195648 - RNA, 19 nt, Homo sapiens
  misc_RNA (1)...(19): siRNA sense strand
gugagcacaucagggauuu

SEQ ID NO: 1195649 - RNA, 19 nt, Homo sapiens
  misc_RNA (1)...(19): siRNA sense strand
cagcagcaacgacaugauu

SEQ ID NO: 1195650 - RNA, 19 nt, Homo sapiens
  misc_RNA (1)...(19): siRNA sense strand
caacagggccagacuccau

SEQ ID NO: 1195651 - RNA, 19 nt, Homo sapiens
  misc_RNA (1)...(19): siRNA sense strand
gguaucagcccaguaugaa

SEQ ID NO: 1195652 - RNA, 19 nt, Homo sapiens
  misc_RNA (1)...(19): siRNA sense strand
gagcaggagcaauucaguu

SEQ ID NO: 1195653 - RNA, 19 nt, Homo sapiens
  misc_RNA (1)...(19): siRNA sense strand
guggugagccugagaggaa

SEQ ID NO: 1195654 - RNA, 19 nt, Homo sapiens
  misc_RNA (1)...(19): siRNA sense strand
ggaaccauggccaacaauu

SEQ ID NO: 1195655 - RNA, 19 nt, Homo sapiens
  misc_RNA (1)...(19): siRNA sense strand
ucuccuuucucuccucaua

SEQ ID NO: 1195656 - RNA, 19 nt, Homo sapiens
  misc_RNA (1)...(19): siRNA sense strand
gggccagacuccauauuac

SEQ ID NO: 1195657 - RNA, 19 nt, Homo sapiens
  misc_RNA (1)...(19): siRNA sense strand
caagaucgagguuauaugc

SEQ ID NO: 1195658 - RNA, 19 nt, Homo sapiens
  misc_RNA (1)...(19): siRNA sense strand
gcagccagcccagagauga

SEQ ID NO: 1195659 - RNA, 19 nt, Homo sapiens
  misc_RNA (1)...(19): siRNA sense strand
guggaaccauggccaacaa

SEQ ID NO: 1195660 - RNA, 19 nt, Homo sapiens
  misc_RNA (1)...(19): siRNA sense strand
ccucaaugaccuccaguaa

SEQ ID NO: 1195661 - RNA, 19 nt, Homo sapiens
  misc_RNA (1)...(19): siRNA sense strand
ucucagcagucccagcaaa

SEQ ID NO: 1195662 - RNA, 19 nt, Homo sapiens
  misc_RNA (1)...(19): siRNA sense strand
uaagggagggcaagaagau

SEQ ID NO: 1195663 - RNA, 19 nt, Homo sapiens
  misc_RNA (1)...(19): siRNA sense strand
uauggacaagggauuaaua

SEQ ID NO: 1195664 - RNA, 19 nt, Homo sapiens
  misc_RNA (1)...(19): siRNA sense strand
cagcagauuccuccuuaug

SEQ ID NO: 1195665 - RNA, 19 nt, Homo sapiens
  misc_RNA (1)...(19): siRNA sense strand
ggguaucagcccaguauga

SEQ ID NO: 1195666 - RNA, 19 nt, Homo sapiens
  misc_RNA (1)...(19): siRNA sense strand
gcaauucaguugggaucca

SEQ ID NO: 1195667 - RNA, 19 nt, Homo sapiens
  misc_RNA (1)...(19): siRNA sense strand
gccuuugaaugcaagauug

SEQ ID NO: 1195668 - RNA, 19 nt, Homo sapiens
  misc_RNA (1)...(19): siRNA sense strand
acacaggcaugggcuccua

SEQ ID NO: 1195669 - RNA, 19 nt, Homo sapiens
  misc_RNA (1)...(19): siRNA sense strand
cacaggcucagucuccuua

SEQ ID NO: 1195670 - RNA, 19 nt, Homo sapiens
  misc_RNA (1)...(19): siRNA sense strand
ccucagccauccaguccaa

SEQ ID NO: 1195671 - RNA, 19 nt, Homo sapiens
  misc_RNA (1)...(19): siRNA sense strand
gccaaggagagcagaguaa

SEQ ID NO: 1195672 - RNA, 19 nt, Homo sapiens
  misc_RNA (1)...(19): siRNA sense strand
aaacugcugucgccaugca

SEQ ID NO: 1195673 - RNA, 19 nt, Homo sapiens
  misc_RNA (1)...(19): siRNA sense strand
cagaagcggaauuccauga

SEQ ID NO: 1195674 - RNA, 19 nt, Homo sapiens
  misc_RNA (1)...(19): siRNA sense strand
agaaggaggagacuuaaag

SEQ ID NO: 1195675 - RNA, 19 nt, Homo sapiens
  misc_RNA (1)...(19): siRNA sense strand
cuacuacaaccaaugagaa

SEQ ID NO: 1195676 - RNA, 19 nt, Homo sapiens
  misc_RNA (1)...(19): siRNA sense strand
agacagaauccaaauccaa

SEQ ID NO: 1195677 - RNA, 19 nt, Homo sapiens
  misc_RNA (1)...(19): siRNA sense strand
gcucugaguccuggaguga

SEQ ID NO: 1195678 - RNA, 19 nt, Homo sapiens
  misc_RNA (1)...(19): siRNA sense strand
guauauccagugucucuau

SEQ ID NO: 1195679 - RNA, 19 nt, Homo sapiens
  misc_RNA (1)...(19): siRNA sense strand
ccaccaaaaugaacaacaa

SEQ ID NO: 1195680 - RNA, 19 nt, Homo sapiens
  misc_RNA (1)...(19): siRNA sense strand
guaagggagggcaagaaga

SEQ ID NO: 1195681 - RNA, 19 nt, Homo sapiens
  misc_RNA (1)...(19): siRNA sense strand
uggagguccuuaugacaga

SEQ ID NO: 1195682 - RNA, 19 nt, Homo sapiens
  misc_RNA (1)...(19): siRNA sense strand
gaagugacuccacauucca

SEQ ID NO: 1195683 - RNA, 19 nt, Homo sapiens
  misc_RNA (1)...(19): siRNA sense strand
ggacacccaagacagaauc

SEQ ID NO: 1195684 - RNA, 19 nt, Homo sapiens
  misc_RNA (1)...(19): siRNA sense strand
caucccagccuccacauca

SEQ ID NO: 1195685 - RNA, 19 nt, Homo sapiens
  misc_RNA (1)...(19): siRNA sense strand
ccagcaaacugccuauucc

SEQ ID NO: 1195686 - RNA, 19 nt, Homo sapiens
  misc_RNA (1)...(19): siRNA sense strand
caagacagaauccaaaucc

SEQ ID NO: 1195687 - RNA, 19 nt, Homo sapiens
  misc_RNA (1)...(19): siRNA sense strand
uguccuaugagccaaauaa

SEQ ID NO: 1195688 - RNA, 19 nt, Homo sapiens
  misc_RNA (1)...(19): siRNA sense strand
ccaggaugccuuuaaugau

SEQ ID NO: 1195689 - RNA, 19 nt, Homo sapiens
  misc_RNA (1)...(19): siRNA sense strand
uccaggaugccuuuaauga

SEQ ID NO: 1195690 - RNA, 19 nt, Homo sapiens
  misc_RNA (1)...(19): siRNA sense strand
cagaauccaaauccaagaa

SEQ ID NO: 1195691 - RNA, 19 nt, Homo sapiens
  misc_RNA (1)...(19): siRNA sense strand
gccagacuccauauuacaa

SEQ ID NO: 1195692 - RNA, 19 nt, Homo sapiens
  misc_RNA (1)...(19): siRNA sense strand
cgaaucucaugccuuccaa

SEQ ID NO: 1195693 - RNA, 19 nt, Homo sapiens
  misc_RNA (1)...(19): siRNA sense strand
ggacaagggauuaauagua

SEQ ID NO: 1195694 - RNA, 19 nt, Homo sapiens
  misc_RNA (1)...(19): siRNA sense strand
gacaagggauuaauaguau

SEQ ID NO: 1195695 - RNA, 19 nt, Homo sapiens
  misc_RNA (1)...(19): siRNA sense strand
ggaauuccaugacuccaaa

SEQ ID NO: 1195696 - RNA, 19 nt, Homo sapiens
  misc_RNA (1)...(19): siRNA sense strand
ggaaaccucuggaccucua

SEQ ID NO: 1195697 - RNA, 19 nt, Homo sapiens
  misc_RNA (1)...(19): siRNA sense strand
gaauaccucugacaugaug

SEQ ID NO: 1195698 - RNA, 19 nt, Homo sapiens
  misc_RNA (1)...(19): siRNA sense strand
caacauggcggacaacaaa

SEQ ID NO: 1195699 - RNA, 19 nt, Homo sapiens
  misc_RNA (1)...(19): siRNA sense strand
aggagaagcugaucaguaa

SEQ ID NO: 1195700 - RNA, 19 nt, Homo sapiens
  misc_RNA (1)...(19): siRNA sense strand
gcaacgacaugauuccuau

SEQ ID NO: 1195701 - RNA, 19 nt, Homo sapiens
  misc_RNA (1)...(19): siRNA sense strand
gaaggagauugguggauug

SEQ ID NO: 1195702 - RNA, 19 nt, Homo sapiens
  misc_RNA (1)...(19): siRNA sense strand
guaaagaucguacagaaga

SEQ ID NO: 1195703 - RNA, 19 nt, Homo sapiens
  misc_RNA (1)...(19): siRNA sense strand
ugaucuaucugguucaaua

SEQ ID NO: 1195704 - RNA, 19 nt, Homo sapiens
  misc_RNA (1)...(19): siRNA sense strand
ggaagaagaagaggaagua

SEQ ID NO: 1195705 - RNA, 19 nt, Homo sapiens
  misc_RNA (1)...(19): siRNA sense strand
gaauagggccugagggaaa

SEQ ID NO: 1195706 - RNA, 19 nt, Homo sapiens
  misc_RNA (1)...(19): siRNA sense strand
gagguuauaugcagaggaa

SEQ ID NO: 1195707 - RNA, 19 nt, Homo sapiens
  misc_RNA (1)...(19): siRNA sense strand
ggaagaagaagaagaacuu

SEQ ID NO: 1195708 - RNA, 19 nt, Homo sapiens
  misc_RNA (1)...(19): siRNA sense strand
gaacuggaccuccuuaugg

SEQ ID NO: 1195709 - RNA, 19 nt, Homo sapiens
  misc_RNA (1)...(19): siRNA sense strand
gcagauuccuccuuaugga

SEQ ID NO: 1195710 - RNA, 19 nt, Homo sapiens
  misc_RNA (1)...(19): siRNA sense strand
ggagauggcugugguacug

SEQ ID NO: 1195711 - RNA, 19 nt, Homo sapiens
  misc_RNA (1)...(19): siRNA sense strand
cacagcagauuccuccuua

SEQ ID NO: 1195712 - RNA, 19 nt, Homo sapiens
  misc_RNA (1)...(19): siRNA sense strand
gcacagagccaccggaaca

SEQ ID NO: 1195713 - RNA, 19 nt, Homo sapiens
  misc_RNA (1)...(19): siRNA sense strand
gaggagaagcugaucagua

SEQ ID NO: 1195714 - RNA, 19 nt, Homo sapiens
  misc_RNA (1)...(19): siRNA sense strand
guaaugaugucccucaagu

SEQ ID NO: 1195715 - RNA, 19 nt, Homo sapiens
  misc_RNA (1)...(19): siRNA sense strand
gcccuaacauggccaauau

SEQ ID NO: 1195716 - RNA, 19 nt, Homo sapiens
  misc_RNA (1)...(19): siRNA sense strand
caguaaagaucguacagaa

SEQ ID NO: 1195717 - RNA, 19 nt, Homo sapiens
  misc_RNA (1)...(19): siRNA sense strand
uauaaugccuugcccaaug

SEQ ID NO: 1195718 - RNA, 19 nt, Homo sapiens
  misc_RNA (1)...(19): siRNA sense strand
gcaaugacuuugagauguc

SEQ ID NO: 1195719 - RNA, 19 nt, Homo sapiens
  misc_RNA (1)...(19): siRNA sense strand
ggaccucuaucgccucuau

SEQ ID NO: 1195720 - RNA, 19 nt, Homo sapiens
  misc_RNA (1)...(19): siRNA sense strand
gaucagaugggcaagauga

SEQ ID NO: 1195721 - RNA, 19 nt, Homo sapiens
  misc_RNA (1)...(19): siRNA sense strand
caggaugccuuuaaugaug

SEQ ID NO: 1195722 - RNA, 19 nt, Homo sapiens
  misc_RNA (1)...(19): siRNA sense strand
ucaaugaccuccaguaagg

SEQ ID NO: 1195723 - RNA, 19 nt, Homo sapiens
  misc_RNA (1)...(19): siRNA sense strand
ccaggcagccaaacuauaa

SEQ ID NO: 1195724 - RNA, 19 nt, Homo sapiens
  misc_RNA (1)...(19): siRNA sense strand
gugguggacugcucagaua

SEQ ID NO: 1195725 - RNA, 19 nt, Homo sapiens
  misc_RNA (1)...(19): siRNA sense strand
aggcauggcuggaggcaua

SEQ ID NO: 1195726 - RNA, 19 nt, Homo sapiens
  misc_RNA (1)...(19): siRNA sense strand
gagcagcaaguuuccauuu

SEQ ID NO: 1195727 - RNA, 19 nt, Homo sapiens
  misc_RNA (1)...(19): siRNA sense strand
ugaaggagauugguggauu

SEQ ID NO: 1195728 - RNA, 19 nt, Homo sapiens
  misc_RNA (1)...(19): siRNA sense strand
gagaaguuguauagcacua

SEQ ID NO: 1195729 - RNA, 19 nt, Homo sapiens
  misc_RNA (1)...(19): siRNA sense strand
gaauccaaauccaagaaau

SEQ ID NO: 1195730 - RNA, 19 nt, Homo sapiens
  misc_RNA (1)...(19): siRNA sense strand
caacuaguguggacaugau

SEQ ID NO: 1195731 - RNA, 19 nt, Homo sapiens
  misc_RNA (1)...(19): siRNA sense strand
gaagaucaccaaguuguau

SEQ ID NO: 1195732 - RNA, 19 nt, Homo sapiens
  misc_RNA (1)...(19): siRNA sense strand
gagaagaucaccaaguugu

SEQ ID NO: 1195733 - RNA, 19 nt, Homo sapiens
  misc_RNA (1)...(19): siRNA sense strand
ggacaccacugagcauauc

SEQ ID NO: 1195734 - RNA, 19 nt, Homo sapiens
  misc_RNA (1)...(19): siRNA sense strand
ucaacauccugcuguauga

SEQ ID NO: 1195735 - RNA, 19 nt, Homo sapiens
  misc_RNA (1)...(19): siRNA sense strand
cgacagcacuaucccuaug

SEQ ID NO: 1195736 - RNA, 19 nt, Homo sapiens
  misc_RNA (1)...(19): siRNA sense strand
ggcagaaggaggagacuua

SEQ ID NO: 1195737 - RNA, 19 nt, Homo sapiens
  misc_RNA (1)...(19): siRNA sense strand
ggacauggccucgcagugu

SEQ ID NO: 1195738 - RNA, 19 nt, Homo sapiens
  misc_RNA (1)...(19): siRNA sense strand
gaaccauggccaacaauuc

SEQ ID NO: 1195739 - RNA, 19 nt, Homo sapiens
  misc_RNA (1)...(19): siRNA sense strand
gcagcaaguuuccauuugg

SEQ ID NO: 1195740 - RNA, 19 nt, Homo sapiens
  misc_RNA (1)...(19): siRNA sense strand
uaucagcccaguaugaaua

SEQ ID NO: 1195741 - RNA, 19 nt, Homo sapiens
  misc_RNA (1)...(19): siRNA sense strand
gacgaugccugauugagau

SEQ ID NO: 1195742 - RNA, 19 nt, Homo sapiens
  misc_RNA (1)...(19): siRNA sense strand
cagcuugccugaucuaucu

SEQ ID NO: 1195743 - RNA, 19 nt, Homo sapiens
  misc_RNA (1)...(19): siRNA sense strand
ggauggagcuaagaguuca

SEQ ID NO: 1195744 - RNA, 19 nt, Homo sapiens
  misc_RNA (1)...(19): siRNA sense strand
uaaagaucguacagaagaa

SEQ ID NO: 1195745 - RNA, 19 nt, Homo sapiens
  misc_RNA (1)...(19): siRNA sense strand
gaagaggaaguaguugaaa

SEQ ID NO: 1195746 - RNA, 19 nt, Homo sapiens
  misc_RNA (1)...(19): siRNA sense strand
uagagcuccuuguagaaua

SEQ ID NO: 1195747 - RNA, 19 nt, Homo sapiens
  misc_RNA (1)...(19): siRNA sense strand
gaucacagccacuauggau

SEQ ID NO: 1195748 - RNA, 19 nt, Homo sapiens
  misc_RNA (1)...(19): siRNA sense strand
gacauggccucgcaguguu

SEQ ID NO: 1195749 - RNA, 19 nt, Homo sapiens
  misc_RNA (1)...(19): siRNA sense strand
ggaaguaguugaaaaugau

SEQ ID NO: 1195750 - RNA, 19 nt, Homo sapiens
  misc_RNA (1)...(19): siRNA sense strand
gcacaugggcauuagauac

SEQ ID NO: 1195751 - RNA, 19 nt, Homo sapiens
  misc_RNA (1)...(19): siRNA sense strand
ggagauugguggauugacu

SEQ ID NO: 1195752 - RNA, 19 nt, Homo sapiens
  misc_RNA (1)...(19): siRNA sense strand
agauguggguggaccguua

SEQ ID NO: 1195753 - RNA, 19 nt, Homo sapiens
  misc_RNA (1)...(19): siRNA sense strand
gaaauccaguucuucuacu

SEQ ID NO: 1195754 - RNA, 19 nt, Homo sapiens
  misc_RNA (1)...(19): siRNA sense strand
ggcaugagcaggagcaauu

SEQ ID NO: 1195755 - RNA, 19 nt, Homo sapiens
  misc_RNA (1)...(19): siRNA sense strand
ggcaaugacuuugagaugu

SEQ ID NO: 1195756 - RNA, 19 nt, Homo sapiens
  misc_RNA (1)...(19): siRNA sense strand
guucagaggccaucaagga

SEQ ID NO: 1195757 - RNA, 19 nt, Homo sapiens
  misc_RNA (1)...(19): siRNA sense strand
ggagugaucccuucauguc

SEQ ID NO: 1195758 - RNA, 19 nt, Homo sapiens
  misc_RNA (1)...(19): siRNA sense strand
gcugccaacucuauccaaa

SEQ ID NO: 1195759 - RNA, 19 nt, Homo sapiens
  misc_RNA (1)...(19): siRNA sense strand
cauuugugauguacuguuu

SEQ ID NO: 1195760 - RNA, 19 nt, Homo sapiens
  misc_RNA (1)...(19): siRNA sense strand
ccaacaacauggcggacaa

SEQ ID NO: 1195761 - RNA, 19 nt, Homo sapiens
  misc_RNA (1)...(19): siRNA sense strand
ggacugcucagauaagcuu

SEQ ID NO: 1195762 - RNA, 19 nt, Homo sapiens
  misc_RNA (1)...(19): siRNA sense strand
ugacaagcuuccaguaaag

SEQ ID NO: 1195763 - RNA, 19 nt, Homo sapiens
  misc_RNA (1)...(19): siRNA sense strand
agaagaagaggaaguaguu

SEQ ID NO: 1195764 - RNA, 19 nt, Homo sapiens
  misc_RNA (1)...(19): siRNA sense strand
ggaacuggaccuccuuaug

SEQ ID NO: 1195765 - RNA, 19 nt, Homo sapiens
  misc_RNA (1)...(19): siRNA sense strand
cgcaggagcuaucucaaga

SEQ ID NO: 1195766 - RNA, 19 nt, Homo sapiens
  misc_RNA (1)...(19): siRNA sense strand
gcaccacuaacuuaugaaa

SEQ ID NO: 1195767 - RNA, 19 nt, Homo sapiens
  misc_RNA (1)...(19): siRNA sense strand
ucacagccacuauggauga

SEQ ID NO: 1195768 - RNA, 19 nt, Homo sapiens
  misc_RNA (1)...(19): siRNA sense strand
uugacaagcuuccaguaaa

SEQ ID NO: 1195769 - RNA, 19 nt, Homo sapiens
  misc_RNA (1)...(19): siRNA sense strand
gcagaaggaggagacuuaa

SEQ ID NO: 1195770 - RNA, 19 nt, Homo sapiens
  misc_RNA (1)...(19): siRNA sense strand
aaucaagcauugcccaaga

SEQ ID NO: 1195771 - RNA, 19 nt, Homo sapiens
  misc_RNA (1)...(19): siRNA sense strand
cacuauggaugacauguug

SEQ ID NO: 1195772 - RNA, 19 nt, Homo sapiens
  misc_RNA (1)...(19): siRNA sense strand
ccucggagcugaagaaagc

SEQ ID NO: 1195773 - RNA, 19 nt, Homo sapiens
  misc_RNA (1)...(19): siRNA sense strand
augagaagaucaccaaguu

SEQ ID NO: 1195774 - RNA, 19 nt, Homo sapiens
  misc_RNA (1)...(19): siRNA sense strand
ccaaugagaagaucaccaa

SEQ ID NO: 1195775 - RNA, 19 nt, Homo sapiens
  misc_RNA (1)...(19): siRNA sense strand
gaggacggagccuggaaua

SEQ ID NO: 1195776 - RNA, 19 nt, Homo sapiens
  misc_RNA (1)...(19): siRNA sense strand
ggcgggaacuugcaaccaa

SEQ ID NO: 1195777 - RNA, 19 nt, Homo sapiens
  misc_RNA (1)...(19): siRNA sense strand
augaauaccucugacauga

SEQ ID NO: 1195778 - RNA, 19 nt, Homo sapiens
  misc_RNA (1)...(19): siRNA sense strand
gaacucauugguuucacaa

SEQ ID NO: 1195779 - RNA, 19 nt, Homo sapiens
  misc_RNA (1)...(19): siRNA sense strand
guacgaaucacggcuguug

SEQ ID NO: 1195780 - RNA, 19 nt, Homo sapiens
  misc_RNA (1)...(19): siRNA sense strand
gaacaucaagauccuagag

SEQ ID NO: 1195781 - RNA, 19 nt, Homo sapiens
  misc_RNA (1)...(19): siRNA sense strand
gaggauggagcuaagaguu

SEQ ID NO: 1195782 - RNA, 19 nt, Homo sapiens
  misc_RNA (1)...(19): siRNA sense strand
auugagaucuuuggcauuu

SEQ ID NO: 1195783 - RNA, 19 nt, Homo sapiens
  misc_RNA (1)...(19): siRNA sense strand
cgacgaugccugauugaga

SEQ ID NO: 1195784 - RNA, 19 nt, Homo sapiens
  misc_RNA (1)...(19): siRNA sense strand
ccuaugagccaaauaagga

SEQ ID NO: 1195785 - RNA, 19 nt, Homo sapiens
  misc_RNA (1)...(19): siRNA sense strand
aaauccaguucuucuacua

SEQ ID NO: 1195786 - RNA, 19 nt, Homo sapiens
  misc_RNA (1)...(19): siRNA sense strand
caacaauguggaccugauu

SEQ ID NO: 1195787 - RNA, 19 nt, Homo sapiens
  misc_RNA (1)...(19): siRNA sense strand
gcaggcaccacuaacuuau

SEQ ID NO: 1195788 - RNA, 19 nt, Homo sapiens
  misc_RNA (1)...(19): siRNA sense strand
gaagcugaucaguaaguuu

SEQ ID NO: 1195789 - RNA, 19 nt, Homo sapiens
  misc_RNA (1)...(19): siRNA sense strand
ugagaucuuuggcauuuua

SEQ ID NO: 1195790 - RNA, 19 nt, Homo sapiens
  misc_RNA (1)...(19): siRNA sense strand
ccaucaacauccugcugua

SEQ ID NO: 1195791 - RNA, 19 nt, Homo sapiens
  misc_RNA (1)...(19): siRNA sense strand
ggacggagccuggaauagg

SEQ ID NO: 1195792 - RNA, 19 nt, Homo sapiens
  misc_RNA (1)...(19): siRNA sense strand
gaagcggaauuccaugacu

SEQ ID NO: 1195793 - RNA, 19 nt, Homo sapiens
  misc_RNA (1)...(19): siRNA sense strand
gaaaugaggcugacuauaa

SEQ ID NO: 1195794 - RNA, 19 nt, Homo sapiens
  misc_RNA (1)...(19): siRNA sense strand
gaacagcuccuccaaauau

SEQ ID NO: 1195795 - RNA, 19 nt, Homo sapiens
  misc_RNA (1)...(19): siRNA sense strand
ugaaagggcuaccauuuga

SEQ ID NO: 1195796 - RNA, 19 nt, Homo sapiens
  misc_RNA (1)...(19): siRNA sense strand
gaucaaaggaagccaauaa

SEQ ID NO: 1195797 - RNA, 19 nt, Homo sapiens
  misc_RNA (1)...(19): siRNA sense strand
ccauuuaacuuuccuggua

SEQ ID NO: 1195798 - RNA, 19 nt, Homo sapiens
  misc_RNA (1)...(19): siRNA sense strand
ggaauggauugguuaaguu

SEQ ID NO: 1195799 - RNA, 19 nt, Homo sapiens
  misc_RNA (1)...(19): siRNA sense strand
gcgcacaggugguacaauu

SEQ ID NO: 1195800 - RNA, 19 nt, Homo sapiens
  misc_RNA (1)...(19): siRNA sense strand
ccaccuagcucaggaauga

SEQ ID NO: 1195801 - RNA, 19 nt, Homo sapiens
  misc_RNA (1)...(19): siRNA sense strand
gaucauguaggucgaaaua

SEQ ID NO: 1195802 - RNA, 19 nt, Homo sapiens
  misc_RNA (1)...(19): siRNA sense strand
gaaauaaugggaauggauu

SEQ ID NO: 1195803 - RNA, 19 nt, Homo sapiens
  misc_RNA (1)...(19): siRNA sense strand
gcacaggugguacaauuaa

SEQ ID NO: 1195804 - RNA, 19 nt, Homo sapiens
  misc_RNA (1)...(19): siRNA sense strand
uaagaaagguaugcuagaa

SEQ ID NO: 1195805 - RNA, 19 nt, Homo sapiens
  misc_RNA (1)...(19): siRNA sense strand
agacggaaaugcagaauau

SEQ ID NO: 1195806 - RNA, 19 nt, Homo sapiens
  misc_RNA (1)...(19): siRNA sense strand
gaaacugccaacuuagaua

SEQ ID NO: 1195807 - RNA, 19 nt, Homo sapiens
  misc_RNA (1)...(19): siRNA sense strand
gagcaccuaugaauuugaa

SEQ ID NO: 1195808 - RNA, 19 nt, Homo sapiens
  misc_RNA (1)...(19): siRNA sense strand
gaaacagaaugcugaugau

SEQ ID NO: 1195809 - RNA, 19 nt, Homo sapiens
  misc_RNA (1)...(19): siRNA sense strand
ggcaaucgcuuuauucaag

SEQ ID NO: 1195810 - RNA, 19 nt, Homo sapiens
  misc_RNA (1)...(19): siRNA sense strand
guaguuacccuagaagaua

SEQ ID NO: 1195811 - RNA, 19 nt, Homo sapiens
  misc_RNA (1)...(19): siRNA sense strand
caagauacauuugaagcuu

SEQ ID NO: 1195812 - RNA, 19 nt, Homo sapiens
  misc_RNA (1)...(19): siRNA sense strand
aaauggcccugguagcuua

SEQ ID NO: 1195813 - RNA, 19 nt, Homo sapiens
  misc_RNA (1)...(19): siRNA sense strand
ggaaugaguagcaggguaa

SEQ ID NO: 1195814 - RNA, 19 nt, Homo sapiens
  misc_RNA (1)...(19): siRNA sense strand
gaagauaugagagagauug

SEQ ID NO: 1195815 - RNA, 19 nt, Homo sapiens
  misc_RNA (1)...(19): siRNA sense strand
gaauaugauugaacugagu

SEQ ID NO: 1195816 - RNA, 19 nt, Homo sapiens
  misc_RNA (1)...(19): siRNA sense strand
ggagguggaccaaacaauu

SEQ ID NO: 1195817 - RNA, 19 nt, Homo sapiens
  misc_RNA (1)...(19): siRNA sense strand
acaacaguauccaacuuua

SEQ ID NO: 1195818 - RNA, 19 nt, Homo sapiens
  misc_RNA (1)...(19): siRNA sense strand
ggaaaugcagaauaugauu

SEQ ID NO: 1195819 - RNA, 19 nt, Homo sapiens
  misc_RNA (1)...(19): siRNA sense strand
gagguggaccaaacaauuu

SEQ ID NO: 1195820 - RNA, 19 nt, Homo sapiens
  misc_RNA (1)...(19): siRNA sense strand
gaauggauugguuaaguuu

SEQ ID NO: 1195821 - RNA, 19 nt, Homo sapiens
  misc_RNA (1)...(19): siRNA sense strand
guugaaagaucauguaggu

SEQ ID NO: 1195822 - RNA, 19 nt, Homo sapiens
  misc_RNA (1)...(19): siRNA sense strand
gaaaugcagaauaugauug

SEQ ID NO: 1195823 - RNA, 19 nt, Homo sapiens
  misc_RNA (1)...(19): siRNA sense strand
ccacaacaguauccaacuu

SEQ ID NO: 1195824 - RNA, 19 nt, Homo sapiens
  misc_RNA (1)...(19): siRNA sense strand
cgaaacagaaugcugauga

SEQ ID NO: 1195825 - RNA, 19 nt, Homo sapiens
  misc_RNA (1)...(19): siRNA sense strand
ggaacagcuccuccaaaua

SEQ ID NO: 1195826 - RNA, 19 nt, Homo sapiens
  misc_RNA (1)...(19): siRNA sense strand
gggaauggauugguuaagu

SEQ ID NO: 1195827 - RNA, 19 nt, Homo sapiens
  misc_RNA (1)...(19): siRNA sense strand
caaaggaagccaauaaugg

SEQ ID NO: 1195828 - RNA, 19 nt, Homo sapiens
  misc_RNA (1)...(19): siRNA sense strand
uuacaaagauggauguucu

SEQ ID NO: 1195829 - RNA, 19 nt, Homo sapiens
  misc_RNA (1)...(19): siRNA sense strand
guacaugggcaaucgcuuu

SEQ ID NO: 1195830 - RNA, 19 nt, Homo sapiens
  misc_RNA (1)...(19): siRNA sense strand
caacaguauccaacuuuaa

SEQ ID NO: 1195831 - RNA, 19 nt, Homo sapiens
  misc_RNA (1)...(19): siRNA sense strand
agagggaaaugauacuaaa

SEQ ID NO: 1195832 - RNA, 19 nt, Homo sapiens
  misc_RNA (1)...(19): siRNA sense strand
ucauguaggucgaaauaau

SEQ ID NO: 1195833 - RNA, 19 nt, Homo sapiens
  misc_RNA (1)...(19): siRNA sense strand
gggugaggcuuucaucguu

SEQ ID NO: 1195834 - RNA, 19 nt, Homo sapiens
  misc_RNA (1)...(19): siRNA sense strand
ggacaggcauugguucagu

SEQ ID NO: 1195835 - RNA, 19 nt, Homo sapiens
  misc_RNA (1)...(19): siRNA sense strand
guacauguucuuguugaua

SEQ ID NO: 1195836 - RNA, 19 nt, Homo sapiens
  misc_RNA (1)...(19): siRNA sense strand
cuauaaggcugcucugugu

SEQ ID NO: 1195837 - RNA, 19 nt, Homo sapiens
  misc_RNA (1)...(19): siRNA sense strand
gcgaaggcuuuguagaguu

SEQ ID NO: 1195838 - RNA, 19 nt, Homo sapiens
  misc_RNA (1)...(19): siRNA sense strand
ggugaggcuuucaucguuu

SEQ ID NO: 1195839 - RNA, 19 nt, Homo sapiens
  misc_RNA (1)...(19): siRNA sense strand
gauaugagagagauugaga

SEQ ID NO: 1195840 - RNA, 19 nt, Homo sapiens
  misc_RNA (1)...(19): siRNA sense strand
ugacaggccuauagguuca

SEQ ID NO: 1195841 - RNA, 19 nt, Homo sapiens
  misc_RNA (1)...(19): siRNA sense strand
ggaccaaacaauuuaagug

SEQ ID NO: 1195842 - RNA, 19 nt, Homo sapiens
  misc_RNA (1)...(19): siRNA sense strand
ccacuucuguucaugaaag

SEQ ID NO: 1195843 - RNA, 19 nt, Homo sapiens
  misc_RNA (1)...(19): siRNA sense strand
gagagaagcuuuuguucau

SEQ ID NO: 1195844 - RNA, 19 nt, Homo sapiens
  misc_RNA (1)...(19): siRNA sense strand
aggcauugguucaguuuaa

SEQ ID NO: 1195845 - RNA, 19 nt, Homo sapiens
  misc_RNA (1)...(19): siRNA sense strand
cugcagaacuucagcuaug

SEQ ID NO: 1195846 - RNA, 19 nt, Homo sapiens
  misc_RNA (1)...(19): siRNA sense strand
gcugcucugugucgucaua

SEQ ID NO: 1195847 - RNA, 19 nt, Homo sapiens
  misc_RNA (1)...(19): siRNA sense strand
gcacagccucuccaaugaa

SEQ ID NO: 1195848 - RNA, 19 nt, Homo sapiens
  misc_RNA (1)...(19): siRNA sense strand
gcaaucgcuuuauucaagu

SEQ ID NO: 1195849 - RNA, 19 nt, Homo sapiens
  misc_RNA (1)...(19): siRNA sense strand
aaaugaggcugacuauaag

SEQ ID NO: 1195850 - RNA, 19 nt, Homo sapiens
  misc_RNA (1)...(19): siRNA sense strand
aaacuugcccacaacagua

SEQ ID NO: 1195851 - RNA, 19 nt, Homo sapiens
  misc_RNA (1)...(19): siRNA sense strand
gaaauggcccugguagcuu

SEQ ID NO: 1195852 - RNA, 19 nt, Homo sapiens
  misc_RNA (1)...(19): siRNA sense strand
gacuggauguuccggguuu

SEQ ID NO: 1195853 - RNA, 19 nt, Homo sapiens
  misc_RNA (1)...(19): siRNA sense strand
caaguucauccaauuacua

SEQ ID NO: 1195854 - RNA, 19 nt, Homo sapiens
  misc_RNA (1)...(19): siRNA sense strand
cgaaggcuuuguagaguuc

SEQ ID NO: 1195855 - RNA, 19 nt, Homo sapiens
  misc_RNA (1)...(19): siRNA sense strand
gcagugcauuuguugaaag

SEQ ID NO: 1195856 - RNA, 19 nt, Homo sapiens
  misc_RNA (1)...(19): siRNA sense strand
caacccugaugaucuguau

SEQ ID NO: 1195857 - RNA, 19 nt, Homo sapiens
  misc_RNA (1)...(19): siRNA sense strand
ggauugaccauuccugaug

SEQ ID NO: 1195858 - RNA, 19 nt, Homo sapiens
  misc_RNA (1)...(19): siRNA sense strand
cauuuaacuuuccugguaa

SEQ ID NO: 1195859 - RNA, 19 nt, Homo sapiens
  misc_RNA (1)...(19): siRNA sense strand
caugggcaaucgcuuuauu

SEQ ID NO: 1195860 - RNA, 19 nt, Homo sapiens
  misc_RNA (1)...(19): siRNA sense strand
uaugggaccuucuggacaa

SEQ ID NO: 1195861 - RNA, 19 nt, Homo sapiens
  misc_RNA (1)...(19): siRNA sense strand
ggaaugcccuuuucugcaa

SEQ ID NO: 1195862 - RNA, 19 nt, Homo sapiens
  misc_RNA (1)...(19): siRNA sense strand
uaaugggaauggauugguu

SEQ ID NO: 1195863 - RNA, 19 nt, Homo sapiens
  misc_RNA (1)...(19): siRNA sense strand
gacaguaauuaaagugcaa

SEQ ID NO: 1195864 - RNA, 19 nt, Homo sapiens
  misc_RNA (1)...(19): siRNA sense strand
aaaccaggaccgacaguaa

SEQ ID NO: 1195865 - RNA, 19 nt, Homo sapiens
  misc_RNA (1)...(19): siRNA sense strand
gaaagggcuaccauuugaa

SEQ ID NO: 1195866 - RNA, 19 nt, Homo sapiens
  misc_RNA (1)...(19): siRNA sense strand
ggacauucgccacuucuuc

SEQ ID NO: 1195867 - RNA, 19 nt, Homo sapiens
  misc_RNA (1)...(19): siRNA sense strand
gcugaugauucaacgcuau

SEQ ID NO: 1195868 - RNA, 19 nt, Homo sapiens
  misc_RNA (1)...(19): siRNA sense strand
ucauguaguuacccuagaa

SEQ ID NO: 1195869 - RNA, 19 nt, Homo sapiens
  misc_RNA (1)...(19): siRNA sense strand
gauggauguucuucaguuc

SEQ ID NO: 1195870 - RNA, 19 nt, Homo sapiens
  misc_RNA (1)...(19): siRNA sense strand
ugucaacucugccaaaguc

SEQ ID NO: 1195871 - RNA, 19 nt, Homo sapiens
  misc_RNA (1)...(19): siRNA sense strand
gaccgacaguaauuaaagu

SEQ ID NO: 1195872 - RNA, 19 nt, Homo sapiens
  misc_RNA (1)...(19): siRNA sense strand
ggaccgacaguaauuaaag

SEQ ID NO: 1195873 - RNA, 19 nt, Homo sapiens
  misc_RNA (1)...(19): siRNA sense strand
ugaaaaugcuguacauguu

SEQ ID NO: 1195874 - RNA, 19 nt, Homo sapiens
  misc_RNA (1)...(19): siRNA sense strand
ccauucagcauuacaaaga

SEQ ID NO: 1195875 - RNA, 19 nt, Homo sapiens
  misc_RNA (1)...(19): siRNA sense strand
ugaauccuguuaacccuau

SEQ ID NO: 1195876 - RNA, 19 nt, Homo sapiens
  misc_RNA (1)...(19): siRNA sense strand
ucaaaggaagccaauaaug

SEQ ID NO: 1195877 - RNA, 19 nt, Homo sapiens
  misc_RNA (1)...(19): siRNA sense strand
uagaagauaugagagagau

SEQ ID NO: 1195878 - RNA, 19 nt, Homo sapiens
  misc_RNA (1)...(19): siRNA sense strand
gaagaugaugcacguaagu

SEQ ID NO: 1195879 - RNA, 19 nt, Homo sapiens
  misc_RNA (1)...(19): siRNA sense strand
gacaggcauugguucaguu

SEQ ID NO: 1195880 - RNA, 19 nt, Homo sapiens
  misc_RNA (1)...(19): siRNA sense strand
ggaaaaugaugucagagau

SEQ ID NO: 1195881 - RNA, 19 nt, Homo sapiens
  misc_RNA (1)...(19): siRNA sense strand
cuggagcaccuaugaauuu

SEQ ID NO: 1195882 - RNA, 19 nt, Homo sapiens
  misc_RNA (1)...(19): siRNA sense strand
ggaaauggcccugguagcu

SEQ ID NO: 1195883 - RNA, 19 nt, Homo sapiens
  misc_RNA (1)...(19): siRNA sense strand
ggcauugguucaguuuaaa

SEQ ID NO: 1195884 - RNA, 19 nt, Homo sapiens
  misc_RNA (1)...(19): siRNA sense strand
agauggauguucuucaguu

SEQ ID NO: 1195885 - RNA, 19 nt, Homo sapiens
  misc_RNA (1)...(19): siRNA sense strand
acguuuagcucaacuguuc

SEQ ID NO: 1195886 - RNA, 19 nt, Homo sapiens
  misc_RNA (1)...(19): siRNA sense strand
gaugucaacucugccaaag

SEQ ID NO: 1195887 - RNA, 19 nt, Homo sapiens
  misc_RNA (1)...(19): siRNA sense strand
guaguaagacggaaaugca

SEQ ID NO: 1195888 - RNA, 19 nt, Homo sapiens
  misc_RNA (1)...(19): siRNA sense strand
aagcacagccucuccaaug

SEQ ID NO: 1195889 - RNA, 19 nt, Homo sapiens
  misc_RNA (1)...(19): siRNA sense strand
ccaauuacuaagaaaggua

SEQ ID NO: 1195890 - RNA, 19 nt, Homo sapiens
  misc_RNA (1)...(19): siRNA sense strand
ggucaaaaguaacacuauu

SEQ ID NO: 1195891 - RNA, 19 nt, Homo sapiens
  misc_RNA (1)...(19): siRNA sense strand
aaagcuggauauuguggaa

SEQ ID NO: 1195892 - RNA, 19 nt, Homo sapiens
  misc_RNA (1)...(19): siRNA sense strand
cagaauaugauugaacuga

SEQ ID NO: 1195893 - RNA, 19 nt, Homo sapiens
  misc_RNA (1)...(19): siRNA sense strand
gaaaugaggcugacuauaa

SEQ ID NO: 1195894 - RNA, 19 nt, Homo sapiens
  misc_RNA (1)...(19): siRNA sense strand
gaacagcuccuccaaauau

SEQ ID NO: 1195895 - RNA, 19 nt, Homo sapiens
  misc_RNA (1)...(19): siRNA sense strand
ugaaagggcuaccauuuga

SEQ ID NO: 1195896 - RNA, 19 nt, Homo sapiens
  misc_RNA (1)...(19): siRNA sense strand
gaucaaaggaagccaauaa

SEQ ID NO: 1195897 - RNA, 19 nt, Homo sapiens
  misc_RNA (1)...(19): siRNA sense strand
ccauuuaacuuuccuggua

SEQ ID NO: 1195898 - RNA, 19 nt, Homo sapiens
  misc_RNA (1)...(19): siRNA sense strand
ggaauggauugguuaaguu

SEQ ID NO: 1195899 - RNA, 19 nt, Homo sapiens
  misc_RNA (1)...(19): siRNA sense strand
gcgcacaggugguacaauu

SEQ ID NO: 1195900 - RNA, 19 nt, Homo sapiens
  misc_RNA (1)...(19): siRNA sense strand
ccaccuagcucaggaauga

SEQ ID NO: 1195901 - RNA, 19 nt, Homo sapiens
  misc_RNA (1)...(19): siRNA sense strand
gaucauguaggucgaaaua

SEQ ID NO: 1195902 - RNA, 19 nt, Homo sapiens
  misc_RNA (1)...(19): siRNA sense strand
gaaauaaugggaauggauu

SEQ ID NO: 1195903 - RNA, 19 nt, Homo sapiens
  misc_RNA (1)...(19): siRNA sense strand
gcacaggugguacaauuaa

SEQ ID NO: 1195904 - RNA, 19 nt, Homo sapiens
  misc_RNA (1)...(19): siRNA sense strand
uaagaaagguaugcuagaa

SEQ ID NO: 1195905 - RNA, 19 nt, Homo sapiens
  misc_RNA (1)...(19): siRNA sense strand
agacggaaaugcagaauau

SEQ ID NO: 1195906 - RNA, 19 nt, Homo sapiens
  misc_RNA (1)...(19): siRNA sense strand
gaaacugccaacuuagaua

SEQ ID NO: 1195907 - RNA, 19 nt, Homo sapiens
  misc_RNA (1)...(19): siRNA sense strand
gagcaccuaugaauuugaa

SEQ ID NO: 1195908 - RNA, 19 nt, Homo sapiens
  misc_RNA (1)...(19): siRNA sense strand
gaaacagaaugcugaugau

SEQ ID NO: 1195909 - RNA, 19 nt, Homo sapiens
  misc_RNA (1)...(19): siRNA sense strand
ggcaaucgcuuuauucaag

SEQ ID NO: 1195910 - RNA, 19 nt, Homo sapiens
  misc_RNA (1)...(19): siRNA sense strand
guaguuacccuagaagaua

SEQ ID NO: 1195911 - RNA, 19 nt, Homo sapiens
  misc_RNA (1)...(19): siRNA sense strand
caagauacauuugaagcuu

SEQ ID NO: 1195912 - RNA, 19 nt, Homo sapiens
  misc_RNA (1)...(19): siRNA sense strand
aaauggcccugguagcuua

SEQ ID NO: 1195913 - RNA, 19 nt, Homo sapiens
  misc_RNA (1)...(19): siRNA sense strand
ggaaugaguagcaggguaa

SEQ ID NO: 1195914 - RNA, 19 nt, Homo sapiens
  misc_RNA (1)...(19): siRNA sense strand
gaagauaugagagagauug

SEQ ID NO: 1195915 - RNA, 19 nt, Homo sapiens
  misc_RNA (1)...(19): siRNA sense strand
gaauaugauugaacugagu

SEQ ID NO: 1195916 - RNA, 19 nt, Homo sapiens
  misc_RNA (1)...(19): siRNA sense strand
ggagguggaccaaacaauu

SEQ ID NO: 1195917 - RNA, 19 nt, Homo sapiens
  misc_RNA (1)...(19): siRNA sense strand
acaacaguauccaacuuua

SEQ ID NO: 1195918 - RNA, 19 nt, Homo sapiens
  misc_RNA (1)...(19): siRNA sense strand
ggaaaugcagaauaugauu

SEQ ID NO: 1195919 - RNA, 19 nt, Homo sapiens
  misc_RNA (1)...(19): siRNA sense strand
gagguggaccaaacaauuu

SEQ ID NO: 1195920 - RNA, 19 nt, Homo sapiens
  misc_RNA (1)...(19): siRNA sense strand
gaauggauugguuaaguuu

SEQ ID NO: 1195921 - RNA, 19 nt, Homo sapiens
  misc_RNA (1)...(19): siRNA sense strand
guugaaagaucauguaggu

SEQ ID NO: 1195922 - RNA, 19 nt, Homo sapiens
  misc_RNA (1)...(19): siRNA sense strand
gaaaugcagaauaugauug

SEQ ID NO: 1195923 - RNA, 19 nt, Homo sapiens
  misc_RNA (1)...(19): siRNA sense strand
ccacaacaguauccaacuu

SEQ ID NO: 1195924 - RNA, 19 nt, Homo sapiens
  misc_RNA (1)...(19): siRNA sense strand
cgaaacagaaugcugauga

SEQ ID NO: 1195925 - RNA, 19 nt, Homo sapiens
  misc_RNA (1)...(19): siRNA sense strand
ggaacagcuccuccaaaua

SEQ ID NO: 1195926 - RNA, 19 nt, Homo sapiens
  misc_RNA (1)...(19): siRNA sense strand
gggaauggauugguuaagu

SEQ ID NO: 1195927 - RNA, 19 nt, Homo sapiens
  misc_RNA (1)...(19): siRNA sense strand
caaaggaagccaauaaugg

SEQ ID NO: 1195928 - RNA, 19 nt, Homo sapiens
  misc_RNA (1)...(19): siRNA sense strand
uuacaaagauggauguucu

SEQ ID NO: 1195929 - RNA, 19 nt, Homo sapiens
  misc_RNA (1)...(19): siRNA sense strand
guacaugggcaaucgcuuu

SEQ ID NO: 1195930 - RNA, 19 nt, Homo sapiens
  misc_RNA (1)...(19): siRNA sense strand
caacaguauccaacuuuaa

SEQ ID NO: 1195931 - RNA, 19 nt, Homo sapiens
  misc_RNA (1)...(19): siRNA sense strand
agagggaaaugauacuaaa

SEQ ID NO: 1195932 - RNA, 19 nt, Homo sapiens
  misc_RNA (1)...(19): siRNA sense strand
ucauguaggucgaaauaau

SEQ ID NO: 1195933 - RNA, 19 nt, Homo sapiens
  misc_RNA (1)...(19): siRNA sense strand
gggugaggcuuucaucguu

SEQ ID NO: 1195934 - RNA, 19 nt, Homo sapiens
  misc_RNA (1)...(19): siRNA sense strand
ggacaggcauugguucagu

SEQ ID NO: 1195935 - RNA, 19 nt, Homo sapiens
  misc_RNA (1)...(19): siRNA sense strand
guacauguucuuguugaua

SEQ ID NO: 1195936 - RNA, 19 nt, Homo sapiens
  misc_RNA (1)...(19): siRNA sense strand
cuauaaggcugcucugugu

SEQ ID NO: 1195937 - RNA, 19 nt, Homo sapiens
  misc_RNA (1)...(19): siRNA sense strand
gcgaaggcuuuguagaguu

SEQ ID NO: 1195938 - RNA, 19 nt, Homo sapiens
  misc_RNA (1)...(19): siRNA sense strand
ggugaggcuuucaucguuu

SEQ ID NO: 1195939 - RNA, 19 nt, Homo sapiens
  misc_RNA (1)...(19): siRNA sense strand
gauaugagagagauugaga

SEQ ID NO: 1195940 - RNA, 19 nt, Homo sapiens
  misc_RNA (1)...(19): siRNA sense strand
ugacaggccuauagguuca

SEQ ID NO: 1195941 - RNA, 19 nt, Homo sapiens
  misc_RNA (1)...(19): siRNA sense strand
ggaccaaacaauuuaagug

SEQ ID NO: 1195942 - RNA, 19 nt, Homo sapiens
  misc_RNA (1)...(19): siRNA sense strand
ccacuucuguucaugaaag

SEQ ID NO: 1195943 - RNA, 19 nt, Homo sapiens
  misc_RNA (1)...(19): siRNA sense strand
gagagaagcuuuuguucau

SEQ ID NO: 1195944 - RNA, 19 nt, Homo sapiens
  misc_RNA (1)...(19): siRNA sense strand
aggcauugguucaguuuaa

SEQ ID NO: 1195945 - RNA, 19 nt, Homo sapiens
  misc_RNA (1)...(19): siRNA sense strand
cugcagaacuucagcuaug

SEQ ID NO: 1195946 - RNA, 19 nt, Homo sapiens
  misc_RNA (1)...(19): siRNA sense strand
gcugcucugugucgucaua

SEQ ID NO: 1195947 - RNA, 19 nt, Homo sapiens
  misc_RNA (1)...(19): siRNA sense strand
gcacagccucuccaaugaa

SEQ ID NO: 1195948 - RNA, 19 nt, Homo sapiens
  misc_RNA (1)...(19): siRNA sense strand
gcaaucgcuuuauucaagu

SEQ ID NO: 1195949 - RNA, 19 nt, Homo sapiens
  misc_RNA (1)...(19): siRNA sense strand
aaaugaggcugacuauaag

SEQ ID NO: 1195950 - RNA, 19 nt, Homo sapiens
  misc_RNA (1)...(19): siRNA sense strand
aaacuugcccacaacagua

SEQ ID NO: 1195951 - RNA, 19 nt, Homo sapiens
  misc_RNA (1)...(19): siRNA sense strand
gaaauggcccugguagcuu

SEQ ID NO: 1195952 - RNA, 19 nt, Homo sapiens
  misc_RNA (1)...(19): siRNA sense strand
gacuggauguuccggguuu

SEQ ID NO: 1195953 - RNA, 19 nt, Homo sapiens
  misc_RNA (1)...(19): siRNA sense strand
caaguucauccaauuacua

SEQ ID NO: 1195954 - RNA, 19 nt, Homo sapiens
  misc_RNA (1)...(19): siRNA sense strand
cgaaggcuuuguagaguuc

SEQ ID NO: 1195955 - RNA, 19 nt, Homo sapiens
  misc_RNA (1)...(19): siRNA sense strand
gcagugcauuuguugaaag

SEQ ID NO: 1195956 - RNA, 19 nt, Homo sapiens
  misc_RNA (1)...(19): siRNA sense strand
caacccugaugaucuguau

SEQ ID NO: 1195957 - RNA, 19 nt, Homo sapiens
  misc_RNA (1)...(19): siRNA sense strand
ggauugaccauuccugaug

SEQ ID NO: 1195958 - RNA, 19 nt, Homo sapiens
  misc_RNA (1)...(19): siRNA sense strand
cauuuaacuuuccugguaa

SEQ ID NO: 1195959 - RNA, 19 nt, Homo sapiens
  misc_RNA (1)...(19): siRNA sense strand
caugggcaaucgcuuuauu

SEQ ID NO: 1195960 - RNA, 19 nt, Homo sapiens
  misc_RNA (1)...(19): siRNA sense strand
uaugggaccuucuggacaa

SEQ ID NO: 1195961 - RNA, 19 nt, Homo sapiens
  misc_RNA (1)...(19): siRNA sense strand
ggaaugcccuuuucugcaa

SEQ ID NO: 1195962 - RNA, 19 nt, Homo sapiens
  misc_RNA (1)...(19): siRNA sense strand
uaaugggaauggauugguu

SEQ ID NO: 1195963 - RNA, 19 nt, Homo sapiens
  misc_RNA (1)...(19): siRNA sense strand
gacaguaauuaaagugcaa

SEQ ID NO: 1195964 - RNA, 19 nt, Homo sapiens
  misc_RNA (1)...(19): siRNA sense strand
aaaccaggaccgacaguaa

SEQ ID NO: 1195965 - RNA, 19 nt, Homo sapiens
  misc_RNA (1)...(19): siRNA sense strand
gaaagggcuaccauuugaa

SEQ ID NO: 1195966 - RNA, 19 nt, Homo sapiens
  misc_RNA (1)...(19): siRNA sense strand
ggacauucgccacuucuuc

SEQ ID NO: 1195967 - RNA, 19 nt, Homo sapiens
  misc_RNA (1)...(19): siRNA sense strand
gcugaugauucaacgcuau

SEQ ID NO: 1195968 - RNA, 19 nt, Homo sapiens
  misc_RNA (1)...(19): siRNA sense strand
ucauguaguuacccuagaa

SEQ ID NO: 1195969 - RNA, 19 nt, Homo sapiens
  misc_RNA (1)...(19): siRNA sense strand
gauggauguucuucaguuc

SEQ ID NO: 1195970 - RNA, 19 nt, Homo sapiens
  misc_RNA (1)...(19): siRNA sense strand
ugucaacucugccaaaguc

SEQ ID NO: 1195971 - RNA, 19 nt, Homo sapiens
  misc_RNA (1)...(19): siRNA sense strand
gaccgacaguaauuaaagu

SEQ ID NO: 1195972 - RNA, 19 nt, Homo sapiens
  misc_RNA (1)...(19): siRNA sense strand
ggaccgacaguaauuaaag

SEQ ID NO: 1195973 - RNA, 19 nt, Homo sapiens
  misc_RNA (1)...(19): siRNA sense strand
ugaaaaugcuguacauguu

SEQ ID NO: 1195974 - RNA, 19 nt, Homo sapiens
  misc_RNA (1)...(19): siRNA sense strand
ccauucagcauuacaaaga

SEQ ID NO: 1195975 - RNA, 19 nt, Homo sapiens
  misc_RNA (1)...(19): siRNA sense strand
ugaauccuguuaacccuau

SEQ ID NO: 1195976 - RNA, 19 nt, Homo sapiens
  misc_RNA (1)...(19): siRNA sense strand
ucaaaggaagccaauaaug

SEQ ID NO: 1195977 - RNA, 19 nt, Homo sapiens
  misc_RNA (1)...(19): siRNA sense strand
uagaagauaugagagagau

SEQ ID NO: 1195978 - RNA, 19 nt, Homo sapiens
  misc_RNA (1)...(19): siRNA sense strand
gaagaugaugcacguaagu

SEQ ID NO: 1195979 - RNA, 19 nt, Homo sapiens
  misc_RNA (1)...(19): siRNA sense strand
gacaggcauugguucaguu

SEQ ID NO: 1195980 - RNA, 19 nt, Homo sapiens
  misc_RNA (1)...(19): siRNA sense strand
ggaaaaugaugucagagau

SEQ ID NO: 1195981 - RNA, 19 nt, Homo sapiens
  misc_RNA (1)...(19): siRNA sense strand
cuggagcaccuaugaauuu

SEQ ID NO: 1195982 - RNA, 19 nt, Homo sapiens
  misc_RNA (1)...(19): siRNA sense strand
ggaaauggcccugguagcu

SEQ ID NO: 1195983 - RNA, 19 nt, Homo sapiens
  misc_RNA (1)...(19): siRNA sense strand
ggcauugguucaguuuaaa

SEQ ID NO: 1195984 - RNA, 19 nt, Homo sapiens
  misc_RNA (1)...(19): siRNA sense strand
agauggauguucuucaguu

SEQ ID NO: 1195985 - RNA, 19 nt, Homo sapiens
  misc_RNA (1)...(19): siRNA sense strand
acguuuagcucaacuguuc

SEQ ID NO: 1195986 - RNA, 19 nt, Homo sapiens
  misc_RNA (1)...(19): siRNA sense strand
gaugucaacucugccaaag

SEQ ID NO: 1195987 - RNA, 19 nt, Homo sapiens
  misc_RNA (1)...(19): siRNA sense strand
guaguaagacggaaaugca

SEQ ID NO: 1195988 - RNA, 19 nt, Homo sapiens
  misc_RNA (1)...(19): siRNA sense strand
aagcacagccucuccaaug

SEQ ID NO: 1195989 - RNA, 19 nt, Homo sapiens
  misc_RNA (1)...(19): siRNA sense strand
ccaauuacuaagaaaggua

SEQ ID NO: 1195990 - RNA, 19 nt, Homo sapiens
  misc_RNA (1)...(19): siRNA sense strand
ggucaaaaguaacacuauu

SEQ ID NO: 1195991 - RNA, 19 nt, Homo sapiens
  misc_RNA (1)...(19): siRNA sense strand
aaagcuggauauuguggaa

SEQ ID NO: 1195992 - RNA, 19 nt, Homo sapiens
  misc_RNA (1)...(19): siRNA sense strand
cagaauaugauugaacuga

SEQ ID NO: 1195993 - RNA, 19 nt, Homo sapiens
  misc_RNA (1)...(19): siRNA sense strand
ggacauaugugacaaaguu

SEQ ID NO: 1195994 - RNA, 19 nt, Homo sapiens
  misc_RNA (1)...(19): siRNA sense strand
caaagaggaugaagacaua

SEQ ID NO: 1195995 - RNA, 19 nt, Homo sapiens
  misc_RNA (1)...(19): siRNA sense strand
gaacucaccuuuaaacaug

SEQ ID NO: 1195996 - RNA, 19 nt, Homo sapiens
  misc_RNA (1)...(19): siRNA sense strand
gaacacuacuuccaauuug

SEQ ID NO: 1195997 - RNA, 19 nt, Homo sapiens
  misc_RNA (1)...(19): siRNA sense strand
acaaugaacucaccuuuaa

SEQ ID NO: 1195998 - RNA, 19 nt, Homo sapiens
  misc_RNA (1)...(19): siRNA sense strand
uaaggcacauccuaaagua

SEQ ID NO: 1195999 - RNA, 19 nt, Homo sapiens
  misc_RNA (1)...(19): siRNA sense strand
acagauggguccaaugaua

SEQ ID NO: 1196000 - RNA, 19 nt, Homo sapiens
  misc_RNA (1)...(19): siRNA sense strand
guacaacacuacagaagau

SEQ ID NO: 1196001 - RNA, 19 nt, Homo sapiens
  misc_RNA (1)...(19): siRNA sense strand
ggcaaacuguggaaagaua

SEQ ID NO: 1196002 - RNA, 19 nt, Homo sapiens
  misc_RNA (1)...(19): siRNA sense strand
caacagauggguccaauga

SEQ ID NO: 1196003 - RNA, 19 nt, Homo sapiens
  misc_RNA (1)...(19): siRNA sense strand
gaaguauguucccgugauu

SEQ ID NO: 1196004 - RNA, 19 nt, Homo sapiens
  misc_RNA (1)...(19): siRNA sense strand
ggaguggucagaagaauuu

SEQ ID NO: 1196005 - RNA, 19 nt, Homo sapiens
  misc_RNA (1)...(19): siRNA sense strand
gcagacauauccaguucaa

SEQ ID NO: 1196006 - RNA, 19 nt, Homo sapiens
  misc_RNA (1)...(19): siRNA sense strand
gaguauagauccaacagau

SEQ ID NO: 1196007 - RNA, 19 nt, Homo sapiens
  misc_RNA (1)...(19): siRNA sense strand
guggacaaauugaauguaa

SEQ ID NO: 1196008 - RNA, 19 nt, Homo sapiens
  misc_RNA (1)...(19): siRNA sense strand
cuacuuauaugaaccagaa

SEQ ID NO: 1196009 - RNA, 19 nt, Homo sapiens
  misc_RNA (1)...(19): siRNA sense strand
cagaaggacccucaguuua

SEQ ID NO: 1196010 - RNA, 19 nt, Homo sapiens
  misc_RNA (1)...(19): siRNA sense strand
uggaagcucuggaacuaua

SEQ ID NO: 1196011 - RNA, 19 nt, Homo sapiens
  misc_RNA (1)...(19): siRNA sense strand
ggauagagcccugcaggua

SEQ ID NO: 1196012 - RNA, 19 nt, Homo sapiens
  misc_RNA (1)...(19): siRNA sense strand
gacaaugaacucaccuuua

SEQ ID NO: 1196013 - RNA, 19 nt, Homo sapiens
  misc_RNA (1)...(19): siRNA sense strand
gaacagaaacagcaacaca

SEQ ID NO: 1196014 - RNA, 19 nt, Homo sapiens
  misc_RNA (1)...(19): siRNA sense strand
agaaguacgugcugugauu

SEQ ID NO: 1196015 - RNA, 19 nt, Homo sapiens
  misc_RNA (1)...(19): siRNA sense strand
gcacagcagcacacaaauu

SEQ ID NO: 1196016 - RNA, 19 nt, Homo sapiens
  misc_RNA (1)...(19): siRNA sense strand
cagaagaauuucagaagga

SEQ ID NO: 1196017 - RNA, 19 nt, Homo sapiens
  misc_RNA (1)...(19): siRNA sense strand
ugagaucucugccuccaaa

SEQ ID NO: 1196018 - RNA, 19 nt, Homo sapiens
  misc_RNA (1)...(19): siRNA sense strand
cacagcagcacacaaauua

SEQ ID NO: 1196019 - RNA, 19 nt, Homo sapiens
  misc_RNA (1)...(19): siRNA sense strand
ucugauaucugcaacuauu

SEQ ID NO: 1196020 - RNA, 19 nt, Homo sapiens
  misc_RNA (1)...(19): siRNA sense strand
ucagagcauucaccaagua

SEQ ID NO: 1196021 - RNA, 19 nt, Homo sapiens
  misc_RNA (1)...(19): siRNA sense strand
gaaagaagaaggaauuacu

SEQ ID NO: 1196022 - RNA, 19 nt, Homo sapiens
  misc_RNA (1)...(19): siRNA sense strand
ggacaaugaacucaccuuu

SEQ ID NO: 1196023 - RNA, 19 nt, Homo sapiens
  misc_RNA (1)...(19): siRNA sense strand
gcacacaaauuaccaucag

SEQ ID NO: 1196024 - RNA, 19 nt, Homo sapiens
  misc_RNA (1)...(19): siRNA sense strand
ucaaauugguccacugaga

SEQ ID NO: 1196025 - RNA, 19 nt, Homo sapiens
  misc_RNA (1)...(19): siRNA sense strand
aaacauagagacugaggua

SEQ ID NO: 1196026 - RNA, 19 nt, Homo sapiens
  misc_RNA (1)...(19): siRNA sense strand
gaaguacgugcugugauua

SEQ ID NO: 1196027 - RNA, 19 nt, Homo sapiens
  misc_RNA (1)...(19): siRNA sense strand
gaaccagaacucuaaccua

SEQ ID NO: 1196028 - RNA, 19 nt, Homo sapiens
  misc_RNA (1)...(19): siRNA sense strand
gaaggacccucaguuuagu

SEQ ID NO: 1196029 - RNA, 19 nt, Homo sapiens
  misc_RNA (1)...(19): siRNA sense strand
gccugagccuguuuauaua

SEQ ID NO: 1196030 - RNA, 19 nt, Homo sapiens
  misc_RNA (1)...(19): siRNA sense strand
ccaaagcuauagccuagga

SEQ ID NO: 1196031 - RNA, 19 nt, Homo sapiens
  misc_RNA (1)...(19): siRNA sense strand
uaauaagguugcacggaaa

SEQ ID NO: 1196032 - RNA, 19 nt, Homo sapiens
  misc_RNA (1)...(19): siRNA sense strand
gaucaaauugguccacuga

SEQ ID NO: 1196033 - RNA, 19 nt, Homo sapiens
  misc_RNA (1)...(19): siRNA sense strand
ggaggaaauuaagaaauca

SEQ ID NO: 1196034 - RNA, 19 nt, Homo sapiens
  misc_RNA (1)...(19): siRNA sense strand
agugagagcuuuauaugau

SEQ ID NO: 1196035 - RNA, 19 nt, Homo sapiens
  misc_RNA (1)...(19): siRNA sense strand
gaaugaagcaccaguguac

SEQ ID NO: 1196036 - RNA, 19 nt, Homo sapiens
  misc_RNA (1)...(19): siRNA sense strand
ccuggaagcucuggaacua

SEQ ID NO: 1196037 - RNA, 19 nt, Homo sapiens
  misc_RNA (1)...(19): siRNA sense strand
ucagaaggacccucaguuu

SEQ ID NO: 1196038 - RNA, 19 nt, Homo sapiens
  misc_RNA (1)...(19): siRNA sense strand
ccuaggacccgaucaaauu

SEQ ID NO: 1196039 - RNA, 19 nt, Homo sapiens
  misc_RNA (1)...(19): siRNA sense strand
uagcggcuguggacaaauu

SEQ ID NO: 1196040 - RNA, 19 nt, Homo sapiens
  misc_RNA (1)...(19): siRNA sense strand
gaaauugauaggaagcauu

SEQ ID NO: 1196041 - RNA, 19 nt, Homo sapiens
  misc_RNA (1)...(19): siRNA sense strand
gguagcggcuguggacaaa

SEQ ID NO: 1196042 - RNA, 19 nt, Homo sapiens
  misc_RNA (1)...(19): siRNA sense strand
acaagacacuguuuccaau

SEQ ID NO: 1196043 - RNA, 19 nt, Homo sapiens
  misc_RNA (1)...(19): siRNA sense strand
ggaugaagacauagcuaaa

SEQ ID NO: 1196044 - RNA, 19 nt, Homo sapiens
  misc_RNA (1)...(19): siRNA sense strand
cuguggauaugucaucuua

SEQ ID NO: 1196045 - RNA, 19 nt, Homo sapiens
  misc_RNA (1)...(19): siRNA sense strand
uggaggaaauuaagaaauc

SEQ ID NO: 1196046 - RNA, 19 nt, Homo sapiens
  misc_RNA (1)...(19): siRNA sense strand
gugagagcuuuauaugauu

SEQ ID NO: 1196047 - RNA, 19 nt, Homo sapiens
  misc_RNA (1)...(19): siRNA sense strand
guauagauccaacagauuc

SEQ ID NO: 1196048 - RNA, 19 nt, Homo sapiens
  misc_RNA (1)...(19): siRNA sense strand
ugacaaaguuggaaguacu

SEQ ID NO: 1196049 - RNA, 19 nt, Homo sapiens
  misc_RNA (1)...(19): siRNA sense strand
gacaagacacuguuuccaa

SEQ ID NO: 1196050 - RNA, 19 nt, Homo sapiens
  misc_RNA (1)...(19): siRNA sense strand
gaugauguggaggaaauua

SEQ ID NO: 1196051 - RNA, 19 nt, Homo sapiens
  misc_RNA (1)...(19): siRNA sense strand
ucagaacacuacuuccaau

SEQ ID NO: 1196052 - RNA, 19 nt, Homo sapiens
  misc_RNA (1)...(19): siRNA sense strand
ucacaugguggaaacuaua

SEQ ID NO: 1196053 - RNA, 19 nt, Homo sapiens
  misc_RNA (1)...(19): siRNA sense strand
gaagcucuggaacuauaua

SEQ ID NO: 1196054 - RNA, 19 nt, Homo sapiens
  misc_RNA (1)...(19): siRNA sense strand
gaaacagcaacacacagaa

SEQ ID NO: 1196055 - RNA, 19 nt, Homo sapiens
  misc_RNA (1)...(19): siRNA sense strand
aaggguaaaucauaagguu

SEQ ID NO: 1196056 - RNA, 19 nt, Homo sapiens
  misc_RNA (1)...(19): siRNA sense strand
guacaacugcuuacacaca

SEQ ID NO: 1196057 - RNA, 19 nt, Homo sapiens
  misc_RNA (1)...(19): siRNA sense strand
ugacagugaugccaauugg

SEQ ID NO: 1196058 - RNA, 19 nt, Homo sapiens
  misc_RNA (1)...(19): siRNA sense strand
gcacggaaagugagagcuu

SEQ ID NO: 1196059 - RNA, 19 nt, Homo sapiens
  misc_RNA (1)...(19): siRNA sense strand
ucauaagguuccacauguu

SEQ ID NO: 1196060 - RNA, 19 nt, Homo sapiens
  misc_RNA (1)...(19): siRNA sense strand
aaacagcaacacacagaaa

SEQ ID NO: 1196061 - RNA, 19 nt, Homo sapiens
  misc_RNA (1)...(19): siRNA sense strand
gaucucugccuccaaaugu

SEQ ID NO: 1196062 - RNA, 19 nt, Homo sapiens
  misc_RNA (1)...(19): siRNA sense strand
ggaugacagugaugccaau

SEQ ID NO: 1196063 - RNA, 19 nt, Homo sapiens
  misc_RNA (1)...(19): siRNA sense strand
aaauaaggcacauccuaaa

SEQ ID NO: 1196064 - RNA, 19 nt, Homo sapiens
  misc_RNA (1)...(19): siRNA sense strand
agaacacuacuuccaauuu

SEQ ID NO: 1196065 - RNA, 19 nt, Homo sapiens
  misc_RNA (1)...(19): siRNA sense strand
agacauauccaguucaauc

SEQ ID NO: 1196066 - RNA, 19 nt, Homo sapiens
  misc_RNA (1)...(19): siRNA sense strand
ggguuccaaugcagacaua

SEQ ID NO: 1196067 - RNA, 19 nt, Homo sapiens
  misc_RNA (1)...(19): siRNA sense strand
ugaauuaucgcugcaagaa

SEQ ID NO: 1196068 - RNA, 19 nt, Homo sapiens
  misc_RNA (1)...(19): siRNA sense strand
agaaggacccucaguuuag

SEQ ID NO: 1196069 - RNA, 19 nt, Homo sapiens
  misc_RNA (1)...(19): siRNA sense strand
uagaagauaucugccaaca

SEQ ID NO: 1196070 - RNA, 19 nt, Homo sapiens
  misc_RNA (1)...(19): siRNA sense strand
gcaagaacagaaacagcaa

SEQ ID NO: 1196071 - RNA, 19 nt, Homo sapiens
  misc_RNA (1)...(19): siRNA sense strand
aauuaucgcugcaagaaca

SEQ ID NO: 1196072 - RNA, 19 nt, Homo sapiens
  misc_RNA (1)...(19): siRNA sense strand
gggcuuguguggcaaacug

SEQ ID NO: 1196073 - RNA, 19 nt, Homo sapiens
  misc_RNA (1)...(19): siRNA sense strand
gaacucuaaccuacaguca

SEQ ID NO: 1196074 - RNA, 19 nt, Homo sapiens
  misc_RNA (1)...(19): siRNA sense strand
ccagaacucuaaccuacag

SEQ ID NO: 1196075 - RNA, 19 nt, Homo sapiens
  misc_RNA (1)...(19): siRNA sense strand
aaugugaauuccucaguga

SEQ ID NO: 1196076 - RNA, 19 nt, Homo sapiens
  misc_RNA (1)...(19): siRNA sense strand
aaacaaagaggaugaagac

SEQ ID NO: 1196077 - RNA, 19 nt, Homo sapiens
  misc_RNA (1)...(19): siRNA sense strand
ggucagaagaauuucagaa

SEQ ID NO: 1196078 - RNA, 19 nt, Homo sapiens
  misc_RNA (1)...(19): siRNA sense strand
gcaaacuguggaaagauau

SEQ ID NO: 1196079 - RNA, 19 nt, Homo sapiens
  misc_RNA (1)...(19): siRNA sense strand
caucagcagccucuccuuu

SEQ ID NO: 1196080 - RNA, 19 nt, Homo sapiens
  misc_RNA (1)...(19): siRNA sense strand
ggaugucuguggauauguc

SEQ ID NO: 1196081 - RNA, 19 nt, Homo sapiens
  misc_RNA (1)...(19): siRNA sense strand
gacacuguuuccaauccua

SEQ ID NO: 1196082 - RNA, 19 nt, Homo sapiens
  misc_RNA (1)...(19): siRNA sense strand
gcacagccugcucaaacuu

SEQ ID NO: 1196083 - RNA, 19 nt, Homo sapiens
  misc_RNA (1)...(19): siRNA sense strand
gcacauuacccaccugcau

SEQ ID NO: 1196084 - RNA, 19 nt, Homo sapiens
  misc_RNA (1)...(19): siRNA sense strand
agaaguauguucccgugau

SEQ ID NO: 1196085 - RNA, 19 nt, Homo sapiens
  misc_RNA (1)...(19): siRNA sense strand
gaagaaggaauuacuuuuc

SEQ ID NO: 1196086 - RNA, 19 nt, Homo sapiens
  misc_RNA (1)...(19): siRNA sense strand
gcacuggacaagacacugu

SEQ ID NO: 1196087 - RNA, 19 nt, Homo sapiens
  misc_RNA (1)...(19): siRNA sense strand
caaauugguccacugagau

SEQ ID NO: 1196088 - RNA, 19 nt, Homo sapiens
  misc_RNA (1)...(19): siRNA sense strand
gcucuggaacuauauaaca

SEQ ID NO: 1196089 - RNA, 19 nt, Homo sapiens
  misc_RNA (1)...(19): siRNA sense strand
gagccuguuuauauagaug

SEQ ID NO: 1196090 - RNA, 19 nt, Homo sapiens
  misc_RNA (1)...(19): siRNA sense strand
agccugagccuguuuauau

SEQ ID NO: 1196091 - RNA, 19 nt, Homo sapiens
  misc_RNA (1)...(19): siRNA sense strand
guggcaaacuguggaaaga

SEQ ID NO: 1196092 - RNA, 19 nt, Homo sapiens
  misc_RNA (1)...(19): siRNA sense strand
uguaauugaugaugaugug

SEQ ID NO: 1196093 - RNA, 19 nt, Homo sapiens
  misc_RNA (1)...(19): siRNA sense strand
gaacacagcuucuauuuag

SEQ ID NO: 1196094 - RNA, 19 nt, Homo sapiens
  misc_RNA (1)...(19): siRNA sense strand
gaaauguucuccaaagaua

SEQ ID NO: 1196095 - RNA, 19 nt, Homo sapiens
  misc_RNA (1)...(19): siRNA sense strand
gacaauagcugaacaagaa

SEQ ID NO: 1196096 - RNA, 19 nt, Homo sapiens
  misc_RNA (1)...(19): siRNA sense strand
acaaagagauggcauuaua

SEQ ID NO: 1196097 - RNA, 19 nt, Homo sapiens
  misc_RNA (1)...(19): siRNA sense strand
uagcacagcugcagacuua

SEQ ID NO: 1196098 - RNA, 19 nt, Homo sapiens
  misc_RNA (1)...(19): siRNA sense strand
caaguaagcucuuuauuag

SEQ ID NO: 1196099 - RNA, 19 nt, Homo sapiens
  misc_RNA (1)...(19): siRNA sense strand
gcagacagaugguaugaaa

SEQ ID NO: 1196100 - RNA, 19 nt, Homo sapiens
  misc_RNA (1)...(19): siRNA sense strand
guucgaaacugauauagua

SEQ ID NO: 1196101 - RNA, 19 nt, Homo sapiens
  misc_RNA (1)...(19): siRNA sense strand
gaagaacaguuggaagaua

SEQ ID NO: 1196102 - RNA, 19 nt, Homo sapiens
  misc_RNA (1)...(19): siRNA sense strand
acaaaggaaucaucacuua

SEQ ID NO: 1196103 - RNA, 19 nt, Homo sapiens
  misc_RNA (1)...(19): siRNA sense strand
caggaaagccuacaaauuu

SEQ ID NO: 1196104 - RNA, 19 nt, Homo sapiens
  misc_RNA (1)...(19): siRNA sense strand
gaagagaaaucauaaagac

SEQ ID NO: 1196105 - RNA, 19 nt, Homo sapiens
  misc_RNA (1)...(19): siRNA sense strand
gaaguuaacuaucaagagu

SEQ ID NO: 1196106 - RNA, 19 nt, Homo sapiens
  misc_RNA (1)...(19): siRNA sense strand
gaagagcuuuccaaacuga

SEQ ID NO: 1196107 - RNA, 19 nt, Homo sapiens
  misc_RNA (1)...(19): siRNA sense strand
gaagaacuaggacuaauuu

SEQ ID NO: 1196108 - RNA, 19 nt, Homo sapiens
  misc_RNA (1)...(19): siRNA sense strand
gaagaagaauuugguguug

SEQ ID NO: 1196109 - RNA, 19 nt, Homo sapiens
  misc_RNA (1)...(19): siRNA sense strand
gaacaaguuucauugagau

SEQ ID NO: 1196110 - RNA, 19 nt, Homo sapiens
  misc_RNA (1)...(19): siRNA sense strand
aaacugaacugucuagaau

SEQ ID NO: 1196111 - RNA, 19 nt, Homo sapiens
  misc_RNA (1)...(19): siRNA sense strand
caaguuaucuucucugcaa

SEQ ID NO: 1196112 - RNA, 19 nt, Homo sapiens
  misc_RNA (1)...(19): siRNA sense strand
gcagauagaugguuuacag

SEQ ID NO: 1196113 - RNA, 19 nt, Homo sapiens
  misc_RNA (1)...(19): siRNA sense strand
gaagaaguagcuaagguua

SEQ ID NO: 1196114 - RNA, 19 nt, Homo sapiens
  misc_RNA (1)...(19): siRNA sense strand
caacagaacucauggaaaa

SEQ ID NO: 1196115 - RNA, 19 nt, Homo sapiens
  misc_RNA (1)...(19): siRNA sense strand
uaacccagcucacugcuaa

SEQ ID NO: 1196116 - RNA, 19 nt, Homo sapiens
  misc_RNA (1)...(19): siRNA sense strand
gaaaugacucuucaaauca

SEQ ID NO: 1196117 - RNA, 19 nt, Homo sapiens
  misc_RNA (1)...(19): siRNA sense strand
gggcagagcuggaugagau

SEQ ID NO: 1196118 - RNA, 19 nt, Homo sapiens
  misc_RNA (1)...(19): siRNA sense strand
gaacaagaaacacaaagaa

SEQ ID NO: 1196119 - RNA, 19 nt, Homo sapiens
  misc_RNA (1)...(19): siRNA sense strand
ccagcucacugcuaauuua

SEQ ID NO: 1196120 - RNA, 19 nt, Homo sapiens
  misc_RNA (1)...(19): siRNA sense strand
cagaaaggaacuagaauua

SEQ ID NO: 1196121 - RNA, 19 nt, Homo sapiens
  misc_RNA (1)...(19): siRNA sense strand
ggaaaugggugagguuguu

SEQ ID NO: 1196122 - RNA, 19 nt, Homo sapiens
  misc_RNA (1)...(19): siRNA sense strand
acagagagcuggaagaaau

SEQ ID NO: 1196123 - RNA, 19 nt, Homo sapiens
  misc_RNA (1)...(19): siRNA sense strand
gaacauggaaaggaaauuu

SEQ ID NO: 1196124 - RNA, 19 nt, Homo sapiens
  misc_RNA (1)...(19): siRNA sense strand
agaacaagaccacuuauua

SEQ ID NO: 1196125 - RNA, 19 nt, Homo sapiens
  misc_RNA (1)...(19): siRNA sense strand
gaacaagaccacuuauuag

SEQ ID NO: 1196126 - RNA, 19 nt, Homo sapiens
  misc_RNA (1)...(19): siRNA sense strand
gacaguggaugugaaauuu

SEQ ID NO: 1196127 - RNA, 19 nt, Homo sapiens
  misc_RNA (1)...(19): siRNA sense strand
cagaauggcugaaucacaa

SEQ ID NO: 1196128 - RNA, 19 nt, Homo sapiens
  misc_RNA (1)...(19): siRNA sense strand
ggaagcagcaugagauuga

SEQ ID NO: 1196129 - RNA, 19 nt, Homo sapiens
  misc_RNA (1)...(19): siRNA sense strand
agaaaugacucuucaaauc

SEQ ID NO: 1196130 - RNA, 19 nt, Homo sapiens
  misc_RNA (1)...(19): siRNA sense strand
gaacaggaaagccuacaaa

SEQ ID NO: 1196131 - RNA, 19 nt, Homo sapiens
  misc_RNA (1)...(19): siRNA sense strand
acaagaagcugaauuagag

SEQ ID NO: 1196132 - RNA, 19 nt, Homo sapiens
  misc_RNA (1)...(19): siRNA sense strand
guagagagcuagaaaucau

SEQ ID NO: 1196133 - RNA, 19 nt, Homo sapiens
  misc_RNA (1)...(19): siRNA sense strand
gaaagaaacugaacaaaac

SEQ ID NO: 1196134 - RNA, 19 nt, Homo sapiens
  misc_RNA (1)...(19): siRNA sense strand
gaaaugaggguuaccuaug

SEQ ID NO: 1196135 - RNA, 19 nt, Homo sapiens
  misc_RNA (1)...(19): siRNA sense strand
ggaaacaaauaucguuaag

SEQ ID NO: 1196136 - RNA, 19 nt, Homo sapiens
  misc_RNA (1)...(19): siRNA sense strand
gcagauagugcaaaugaaa

SEQ ID NO: 1196137 - RNA, 19 nt, Homo sapiens
  misc_RNA (1)...(19): siRNA sense strand
caacagauccucacucauc

SEQ ID NO: 1196138 - RNA, 19 nt, Homo sapiens
  misc_RNA (1)...(19): siRNA sense strand
aggaaagccuacaaauuua

SEQ ID NO: 1196139 - RNA, 19 nt, Homo sapiens
  misc_RNA (1)...(19): siRNA sense strand
gauccagaauuacaagauu

SEQ ID NO: 1196140 - RNA, 19 nt, Homo sapiens
  misc_RNA (1)...(19): siRNA sense strand
guacuuaaaucagaacaga

SEQ ID NO: 1196141 - RNA, 19 nt, Homo sapiens
  misc_RNA (1)...(19): siRNA sense strand
gaacagauucagagagcua

SEQ ID NO: 1196142 - RNA, 19 nt, Homo sapiens
  misc_RNA (1)...(19): siRNA sense strand
ggcaauaaaugaacugaau

SEQ ID NO: 1196143 - RNA, 19 nt, Homo sapiens
  misc_RNA (1)...(19): siRNA sense strand
agaaacagcacucauagua

SEQ ID NO: 1196144 - RNA, 19 nt, Homo sapiens
  misc_RNA (1)...(19): siRNA sense strand
gaacuggaaagugaaauuu

SEQ ID NO: 1196145 - RNA, 19 nt, Homo sapiens
  misc_RNA (1)...(19): siRNA sense strand
aggcagagauccacuguuu

SEQ ID NO: 1196146 - RNA, 19 nt, Homo sapiens
  misc_RNA (1)...(19): siRNA sense strand
gcaguguccuuggugaaua

SEQ ID NO: 1196147 - RNA, 19 nt, Homo sapiens
  misc_RNA (1)...(19): siRNA sense strand
acagaaacauggugagauu

SEQ ID NO: 1196148 - RNA, 19 nt, Homo sapiens
  misc_RNA (1)...(19): siRNA sense strand
gagcuucauuugcaaagaa

SEQ ID NO: 1196149 - RNA, 19 nt, Homo sapiens
  misc_RNA (1)...(19): siRNA sense strand
aagaagagcuuuccaaacu

SEQ ID NO: 1196150 - RNA, 19 nt, Homo sapiens
  misc_RNA (1)...(19): siRNA sense strand
agaaacaggugaugaagga

SEQ ID NO: 1196151 - RNA, 19 nt, Homo sapiens
  misc_RNA (1)...(19): siRNA sense strand
gauagaugguuuacagaau

SEQ ID NO: 1196152 - RNA, 19 nt, Homo sapiens
  misc_RNA (1)...(19): siRNA sense strand
agaaguagcuaagguuauu

SEQ ID NO: 1196153 - RNA, 19 nt, Homo sapiens
  misc_RNA (1)...(19): siRNA sense strand
gaauucuggugauuacauu

SEQ ID NO: 1196154 - RNA, 19 nt, Homo sapiens
  misc_RNA (1)...(19): siRNA sense strand
gaucaaggaacuucagaaa

SEQ ID NO: 1196155 - RNA, 19 nt, Homo sapiens
  misc_RNA (1)...(19): siRNA sense strand
caaguuucauugagaugua

SEQ ID NO: 1196156 - RNA, 19 nt, Homo sapiens
  misc_RNA (1)...(19): siRNA sense strand
gcaaaagaaccaagaaaua

SEQ ID NO: 1196157 - RNA, 19 nt, Homo sapiens
  misc_RNA (1)...(19): siRNA sense strand
guaugaaacuugaauuugg

SEQ ID NO: 1196158 - RNA, 19 nt, Homo sapiens
  misc_RNA (1)...(19): siRNA sense strand
caaaguaacagaagaauac

SEQ ID NO: 1196159 - RNA, 19 nt, Homo sapiens
  misc_RNA (1)...(19): siRNA sense strand
aaauaugacuguuggagaa

SEQ ID NO: 1196160 - RNA, 19 nt, Homo sapiens
  misc_RNA (1)...(19): siRNA sense strand
ggaagaacuaggacuaauu

SEQ ID NO: 1196161 - RNA, 19 nt, Homo sapiens
  misc_RNA (1)...(19): siRNA sense strand
guuaaugaauguggcaaua

SEQ ID NO: 1196162 - RNA, 19 nt, Homo sapiens
  misc_RNA (1)...(19): siRNA sense strand
ggaagaagaauuugguguu

SEQ ID NO: 1196163 - RNA, 19 nt, Homo sapiens
  misc_RNA (1)...(19): siRNA sense strand
gauggaagcccaacgcauu

SEQ ID NO: 1196164 - RNA, 19 nt, Homo sapiens
  misc_RNA (1)...(19): siRNA sense strand
ucagagagcuagacagaca

SEQ ID NO: 1196165 - RNA, 19 nt, Homo sapiens
  misc_RNA (1)...(19): siRNA sense strand
caagaccacuuauuagaag

SEQ ID NO: 1196166 - RNA, 19 nt, Homo sapiens
  misc_RNA (1)...(19): siRNA sense strand
ugaagaacaagaccacuua

SEQ ID NO: 1196167 - RNA, 19 nt, Homo sapiens
  misc_RNA (1)...(19): siRNA sense strand
gaacaaggagcacaagaca

SEQ ID NO: 1196168 - RNA, 19 nt, Homo sapiens
  misc_RNA (1)...(19): siRNA sense strand
ugacugcaguucagaggua

SEQ ID NO: 1196169 - RNA, 19 nt, Homo sapiens
  misc_RNA (1)...(19): siRNA sense strand
caguggaugugaaauuuaa

SEQ ID NO: 1196170 - RNA, 19 nt, Homo sapiens
  misc_RNA (1)...(19): siRNA sense strand
gaaauuaucacaggaucaa

SEQ ID NO: 1196171 - RNA, 19 nt, Homo sapiens
  misc_RNA (1)...(19): siRNA sense strand
gaggaaacaaauaucguua

SEQ ID NO: 1196172 - RNA, 19 nt, Homo sapiens
  misc_RNA (1)...(19): siRNA sense strand
caacaaaguaacagaagaa

SEQ ID NO: 1196173 - RNA, 19 nt, Homo sapiens
  misc_RNA (1)...(19): siRNA sense strand
gaauaaauccaacuacagu

SEQ ID NO: 1196174 - RNA, 19 nt, Homo sapiens
  misc_RNA (1)...(19): siRNA sense strand
aaacaaagagauggcauua

SEQ ID NO: 1196175 - RNA, 19 nt, Homo sapiens
  misc_RNA (1)...(19): siRNA sense strand
caaacugaaggaagauuua

SEQ ID NO: 1196176 - RNA, 19 nt, Homo sapiens
  misc_RNA (1)...(19): siRNA sense strand
ccgccaagcuuaccuguug

SEQ ID NO: 1196177 - RNA, 19 nt, Homo sapiens
  misc_RNA (1)...(19): siRNA sense strand
gaaagaacucaauguacuu

SEQ ID NO: 1196178 - RNA, 19 nt, Homo sapiens
  misc_RNA (1)...(19): siRNA sense strand
ucagaaagaacucaaugua

SEQ ID NO: 1196179 - RNA, 19 nt, Homo sapiens
  misc_RNA (1)...(19): siRNA sense strand
gagaagaaaguaagcaaga

SEQ ID NO: 1196180 - RNA, 19 nt, Homo sapiens
  misc_RNA (1)...(19): siRNA sense strand
caagagaaagaacaaguuu

SEQ ID NO: 1196181 - RNA, 19 nt, Homo sapiens
  misc_RNA (1)...(19): siRNA sense strand
gaaaauacauacuccuguu

SEQ ID NO: 1196182 - RNA, 19 nt, Homo sapiens
  misc_RNA (1)...(19): siRNA sense strand
gaaauacucagacaagaag

SEQ ID NO: 1196183 - RNA, 19 nt, Homo sapiens
  misc_RNA (1)...(19): siRNA sense strand
gcacacucuucucaacaaa

SEQ ID NO: 1196184 - RNA, 19 nt, Homo sapiens
  misc_RNA (1)...(19): siRNA sense strand
uaaccaagcgagagaaauu

SEQ ID NO: 1196185 - RNA, 19 nt, Homo sapiens
  misc_RNA (1)...(19): siRNA sense strand
gaagcugccauuaaacaaa

SEQ ID NO: 1196186 - RNA, 19 nt, Homo sapiens
  misc_RNA (1)...(19): siRNA sense strand
ggcagugucugaagaaugu

SEQ ID NO: 1196187 - RNA, 19 nt, Homo sapiens
  misc_RNA (1)...(19): siRNA sense strand
ggaucaguuucuaaaguaa

SEQ ID NO: 1196188 - RNA, 19 nt, Homo sapiens
  misc_RNA (1)...(19): siRNA sense strand
caccaugauuugaauauug

SEQ ID NO: 1196189 - RNA, 19 nt, Homo sapiens
  misc_RNA (1)...(19): siRNA sense strand
caacaagcaagaagagaaa

SEQ ID NO: 1196190 - RNA, 19 nt, Homo sapiens
  misc_RNA (1)...(19): siRNA sense strand
caaagagauggcauuauaa

SEQ ID NO: 1196191 - RNA, 19 nt, Homo sapiens
  misc_RNA (1)...(19): siRNA sense strand
uugaagaccuuguugaaga

SEQ ID NO: 1196192 - RNA, 19 nt, Homo sapiens
  misc_RNA (1)...(19): siRNA sense strand
ucagcuaaaugaagagauu

SEQ ID NO: 1196193 - RNA, 19 nt, Homo sapiens
  misc_RNA (1)...(19): siRNA sense strand
gaacacagcuucuauuuag

SEQ ID NO: 1196194 - RNA, 19 nt, Homo sapiens
  misc_RNA (1)...(19): siRNA sense strand
gaaauguucuccaaagaua

SEQ ID NO: 1196195 - RNA, 19 nt, Homo sapiens
  misc_RNA (1)...(19): siRNA sense strand
gacaauagcugaacaagaa

SEQ ID NO: 1196196 - RNA, 19 nt, Homo sapiens
  misc_RNA (1)...(19): siRNA sense strand
acaaagagauggcauuaua

SEQ ID NO: 1196197 - RNA, 19 nt, Homo sapiens
  misc_RNA (1)...(19): siRNA sense strand
uagcacagcugcagacuua

SEQ ID NO: 1196198 - RNA, 19 nt, Homo sapiens
  misc_RNA (1)...(19): siRNA sense strand
caaguaagcucuuuauuag

SEQ ID NO: 1196199 - RNA, 19 nt, Homo sapiens
  misc_RNA (1)...(19): siRNA sense strand
gcagacagaugguaugaaa

SEQ ID NO: 1196200 - RNA, 19 nt, Homo sapiens
  misc_RNA (1)...(19): siRNA sense strand
guucgaaacugauauagua

SEQ ID NO: 1196201 - RNA, 19 nt, Homo sapiens
  misc_RNA (1)...(19): siRNA sense strand
gaagaacaguuggaagaua

SEQ ID NO: 1196202 - RNA, 19 nt, Homo sapiens
  misc_RNA (1)...(19): siRNA sense strand
acaaaggaaucaucacuua

SEQ ID NO: 1196203 - RNA, 19 nt, Homo sapiens
  misc_RNA (1)...(19): siRNA sense strand
caggaaagccuacaaauuu

SEQ ID NO: 1196204 - RNA, 19 nt, Homo sapiens
  misc_RNA (1)...(19): siRNA sense strand
gaagagaaaucauaaagac

SEQ ID NO: 1196205 - RNA, 19 nt, Homo sapiens
  misc_RNA (1)...(19): siRNA sense strand
gaaguuaacuaucaagagu

SEQ ID NO: 1196206 - RNA, 19 nt, Homo sapiens
  misc_RNA (1)...(19): siRNA sense strand
gaagagcuuuccaaacuga

SEQ ID NO: 1196207 - RNA, 19 nt, Homo sapiens
  misc_RNA (1)...(19): siRNA sense strand
gaagaacuaggacuaauuu

SEQ ID NO: 1196208 - RNA, 19 nt, Homo sapiens
  misc_RNA (1)...(19): siRNA sense strand
gaagaagaauuugguguug

SEQ ID NO: 1196209 - RNA, 19 nt, Homo sapiens
  misc_RNA (1)...(19): siRNA sense strand
gaacaaguuucauugagau

SEQ ID NO: 1196210 - RNA, 19 nt, Homo sapiens
  misc_RNA (1)...(19): siRNA sense strand
aaacugaacugucuagaau

SEQ ID NO: 1196211 - RNA, 19 nt, Homo sapiens
  misc_RNA (1)...(19): siRNA sense strand
caaguuaucuucucugcaa

SEQ ID NO: 1196212 - RNA, 19 nt, Homo sapiens
  misc_RNA (1)...(19): siRNA sense strand
gcagauagaugguuuacag

SEQ ID NO: 1196213 - RNA, 19 nt, Homo sapiens
  misc_RNA (1)...(19): siRNA sense strand
gaagaaguagcuaagguua

SEQ ID NO: 1196214 - RNA, 19 nt, Homo sapiens
  misc_RNA (1)...(19): siRNA sense strand
caacagaacucauggaaaa

SEQ ID NO: 1196215 - RNA, 19 nt, Homo sapiens
  misc_RNA (1)...(19): siRNA sense strand
uaacccagcucacugcuaa

SEQ ID NO: 1196216 - RNA, 19 nt, Homo sapiens
  misc_RNA (1)...(19): siRNA sense strand
gaaaugacucuucaaauca

SEQ ID NO: 1196217 - RNA, 19 nt, Homo sapiens
  misc_RNA (1)...(19): siRNA sense strand
gggcagagcuggaugagau

SEQ ID NO: 1196218 - RNA, 19 nt, Homo sapiens
  misc_RNA (1)...(19): siRNA sense strand
gaacaagaaacacaaagaa

SEQ ID NO: 1196219 - RNA, 19 nt, Homo sapiens
  misc_RNA (1)...(19): siRNA sense strand
ccagcucacugcuaauuua

SEQ ID NO: 1196220 - RNA, 19 nt, Homo sapiens
  misc_RNA (1)...(19): siRNA sense strand
cagaaaggaacuagaauua

SEQ ID NO: 1196221 - RNA, 19 nt, Homo sapiens
  misc_RNA (1)...(19): siRNA sense strand
ggaaaugggugagguuguu

SEQ ID NO: 1196222 - RNA, 19 nt, Homo sapiens
  misc_RNA (1)...(19): siRNA sense strand
acagagagcuggaagaaau

SEQ ID NO: 1196223 - RNA, 19 nt, Homo sapiens
  misc_RNA (1)...(19): siRNA sense strand
gaacauggaaaggaaauuu

SEQ ID NO: 1196224 - RNA, 19 nt, Homo sapiens
  misc_RNA (1)...(19): siRNA sense strand
agaacaagaccacuuauua

SEQ ID NO: 1196225 - RNA, 19 nt, Homo sapiens
  misc_RNA (1)...(19): siRNA sense strand
gaacaagaccacuuauuag

SEQ ID NO: 1196226 - RNA, 19 nt, Homo sapiens
  misc_RNA (1)...(19): siRNA sense strand
gacaguggaugugaaauuu

SEQ ID NO: 1196227 - RNA, 19 nt, Homo sapiens
  misc_RNA (1)...(19): siRNA sense strand
cagaauggcugaaucacaa

SEQ ID NO: 1196228 - RNA, 19 nt, Homo sapiens
  misc_RNA (1)...(19): siRNA sense strand
ggaagcagcaugagauuga

SEQ ID NO: 1196229 - RNA, 19 nt, Homo sapiens
  misc_RNA (1)...(19): siRNA sense strand
agaaaugacucuucaaauc

SEQ ID NO: 1196230 - RNA, 19 nt, Homo sapiens
  misc_RNA (1)...(19): siRNA sense strand
gaacaggaaagccuacaaa

SEQ ID NO: 1196231 - RNA, 19 nt, Homo sapiens
  misc_RNA (1)...(19): siRNA sense strand
acaagaagcugaauuagag

SEQ ID NO: 1196232 - RNA, 19 nt, Homo sapiens
  misc_RNA (1)...(19): siRNA sense strand
guagagagcuagaaaucau

SEQ ID NO: 1196233 - RNA, 19 nt, Homo sapiens
  misc_RNA (1)...(19): siRNA sense strand
gaaagaaacugaacaaaac

SEQ ID NO: 1196234 - RNA, 19 nt, Homo sapiens
  misc_RNA (1)...(19): siRNA sense strand
gaaaugaggguuaccuaug

SEQ ID NO: 1196235 - RNA, 19 nt, Homo sapiens
  misc_RNA (1)...(19): siRNA sense strand
ggaaacaaauaucguuaag

SEQ ID NO: 1196236 - RNA, 19 nt, Homo sapiens
  misc_RNA (1)...(19): siRNA sense strand
gcagauagugcaaaugaaa

SEQ ID NO: 1196237 - RNA, 19 nt, Homo sapiens
  misc_RNA (1)...(19): siRNA sense strand
caacagauccucacucauc

SEQ ID NO: 1196238 - RNA, 19 nt, Homo sapiens
  misc_RNA (1)...(19): siRNA sense strand
aggaaagccuacaaauuua

SEQ ID NO: 1196239 - RNA, 19 nt, Homo sapiens
  misc_RNA (1)...(19): siRNA sense strand
gauccagaauuacaagauu

SEQ ID NO: 1196240 - RNA, 19 nt, Homo sapiens
  misc_RNA (1)...(19): siRNA sense strand
guacuuaaaucagaacaga

SEQ ID NO: 1196241 - RNA, 19 nt, Homo sapiens
  misc_RNA (1)...(19): siRNA sense strand
gaacagauucagagagcua

SEQ ID NO: 1196242 - RNA, 19 nt, Homo sapiens
  misc_RNA (1)...(19): siRNA sense strand
ggcaauaaaugaacugaau

SEQ ID NO: 1196243 - RNA, 19 nt, Homo sapiens
  misc_RNA (1)...(19): siRNA sense strand
agaaacagcacucauagua

SEQ ID NO: 1196244 - RNA, 19 nt, Homo sapiens
  misc_RNA (1)...(19): siRNA sense strand
gaacuggaaagugaaauuu

SEQ ID NO: 1196245 - RNA, 19 nt, Homo sapiens
  misc_RNA (1)...(19): siRNA sense strand
aggcagagauccacuguuu

SEQ ID NO: 1196246 - RNA, 19 nt, Homo sapiens
  misc_RNA (1)...(19): siRNA sense strand
gcaguguccuuggugaaua

SEQ ID NO: 1196247 - RNA, 19 nt, Homo sapiens
  misc_RNA (1)...(19): siRNA sense strand
acagaaacauggugagauu

SEQ ID NO: 1196248 - RNA, 19 nt, Homo sapiens
  misc_RNA (1)...(19): siRNA sense strand
gagcuucauuugcaaagaa

SEQ ID NO: 1196249 - RNA, 19 nt, Homo sapiens
  misc_RNA (1)...(19): siRNA sense strand
aagaagagcuuuccaaacu

SEQ ID NO: 1196250 - RNA, 19 nt, Homo sapiens
  misc_RNA (1)...(19): siRNA sense strand
agaaacaggugaugaagga

SEQ ID NO: 1196251 - RNA, 19 nt, Homo sapiens
  misc_RNA (1)...(19): siRNA sense strand
gauagaugguuuacagaau

SEQ ID NO: 1196252 - RNA, 19 nt, Homo sapiens
  misc_RNA (1)...(19): siRNA sense strand
agaaguagcuaagguuauu

SEQ ID NO: 1196253 - RNA, 19 nt, Homo sapiens
  misc_RNA (1)...(19): siRNA sense strand
gaauucuggugauuacauu

SEQ ID NO: 1196254 - RNA, 19 nt, Homo sapiens
  misc_RNA (1)...(19): siRNA sense strand
gaucaaggaacuucagaaa

SEQ ID NO: 1196255 - RNA, 19 nt, Homo sapiens
  misc_RNA (1)...(19): siRNA sense strand
caaguuucauugagaugua

SEQ ID NO: 1196256 - RNA, 19 nt, Homo sapiens
  misc_RNA (1)...(19): siRNA sense strand
gcaaaagaaccaagaaaua

SEQ ID NO: 1196257 - RNA, 19 nt, Homo sapiens
  misc_RNA (1)...(19): siRNA sense strand
guaugaaacuugaauuugg

SEQ ID NO: 1196258 - RNA, 19 nt, Homo sapiens
  misc_RNA (1)...(19): siRNA sense strand
caaaguaacagaagaauac

SEQ ID NO: 1196259 - RNA, 19 nt, Homo sapiens
  misc_RNA (1)...(19): siRNA sense strand
aaauaugacuguuggagaa

SEQ ID NO: 1196260 - RNA, 19 nt, Homo sapiens
  misc_RNA (1)...(19): siRNA sense strand
ggaagaacuaggacuaauu

SEQ ID NO: 1196261 - RNA, 19 nt, Homo sapiens
  misc_RNA (1)...(19): siRNA sense strand
guuaaugaauguggcaaua

SEQ ID NO: 1196262 - RNA, 19 nt, Homo sapiens
  misc_RNA (1)...(19): siRNA sense strand
ggaagaagaauuugguguu

SEQ ID NO: 1196263 - RNA, 19 nt, Homo sapiens
  misc_RNA (1)...(19): siRNA sense strand
gauggaagcccaacgcauu

SEQ ID NO: 1196264 - RNA, 19 nt, Homo sapiens
  misc_RNA (1)...(19): siRNA sense strand
ucagagagcuagacagaca

SEQ ID NO: 1196265 - RNA, 19 nt, Homo sapiens
  misc_RNA (1)...(19): siRNA sense strand
caagaccacuuauuagaag

SEQ ID NO: 1196266 - RNA, 19 nt, Homo sapiens
  misc_RNA (1)...(19): siRNA sense strand
ugaagaacaagaccacuua

SEQ ID NO: 1196267 - RNA, 19 nt, Homo sapiens
  misc_RNA (1)...(19): siRNA sense strand
gaacaaggagcacaagaca

SEQ ID NO: 1196268 - RNA, 19 nt, Homo sapiens
  misc_RNA (1)...(19): siRNA sense strand
ugacugcaguucagaggua

SEQ ID NO: 1196269 - RNA, 19 nt, Homo sapiens
  misc_RNA (1)...(19): siRNA sense strand
caguggaugugaaauuuaa

SEQ ID NO: 1196270 - RNA, 19 nt, Homo sapiens
  misc_RNA (1)...(19): siRNA sense strand
gaaauuaucacaggaucaa

SEQ ID NO: 1196271 - RNA, 19 nt, Homo sapiens
  misc_RNA (1)...(19): siRNA sense strand
gaggaaacaaauaucguua

SEQ ID NO: 1196272 - RNA, 19 nt, Homo sapiens
  misc_RNA (1)...(19): siRNA sense strand
caacaaaguaacagaagaa

SEQ ID NO: 1196273 - RNA, 19 nt, Homo sapiens
  misc_RNA (1)...(19): siRNA sense strand
gaauaaauccaacuacagu

SEQ ID NO: 1196274 - RNA, 19 nt, Homo sapiens
  misc_RNA (1)...(19): siRNA sense strand
aaacaaagagauggcauua

SEQ ID NO: 1196275 - RNA, 19 nt, Homo sapiens
  misc_RNA (1)...(19): siRNA sense strand
caaacugaaggaagauuua

SEQ ID NO: 1196276 - RNA, 19 nt, Homo sapiens
  misc_RNA (1)...(19): siRNA sense strand
ccgccaagcuuaccuguug

SEQ ID NO: 1196277 - RNA, 19 nt, Homo sapiens
  misc_RNA (1)...(19): siRNA sense strand
gaaagaacucaauguacuu

SEQ ID NO: 1196278 - RNA, 19 nt, Homo sapiens
  misc_RNA (1)...(19): siRNA sense strand
ucagaaagaacucaaugua

SEQ ID NO: 1196279 - RNA, 19 nt, Homo sapiens
  misc_RNA (1)...(19): siRNA sense strand
gagaagaaaguaagcaaga

SEQ ID NO: 1196280 - RNA, 19 nt, Homo sapiens
  misc_RNA (1)...(19): siRNA sense strand
caagagaaagaacaaguuu

SEQ ID NO: 1196281 - RNA, 19 nt, Homo sapiens
  misc_RNA (1)...(19): siRNA sense strand
gaaaauacauacuccuguu

SEQ ID NO: 1196282 - RNA, 19 nt, Homo sapiens
  misc_RNA (1)...(19): siRNA sense strand
gaaauacucagacaagaag

SEQ ID NO: 1196283 - RNA, 19 nt, Homo sapiens
  misc_RNA (1)...(19): siRNA sense strand
gcacacucuucucaacaaa

SEQ ID NO: 1196284 - RNA, 19 nt, Homo sapiens
  misc_RNA (1)...(19): siRNA sense strand
uaaccaagcgagagaaauu

SEQ ID NO: 1196285 - RNA, 19 nt, Homo sapiens
  misc_RNA (1)...(19): siRNA sense strand
gaagcugccauuaaacaaa

SEQ ID NO: 1196286 - RNA, 19 nt, Homo sapiens
  misc_RNA (1)...(19): siRNA sense strand
ggcagugucugaagaaugu

SEQ ID NO: 1196287 - RNA, 19 nt, Homo sapiens
  misc_RNA (1)...(19): siRNA sense strand
ggaucaguuucuaaaguaa

SEQ ID NO: 1196288 - RNA, 19 nt, Homo sapiens
  misc_RNA (1)...(19): siRNA sense strand
caccaugauuugaauauug

SEQ ID NO: 1196289 - RNA, 19 nt, Homo sapiens
  misc_RNA (1)...(19): siRNA sense strand
caacaagcaagaagagaaa

SEQ ID NO: 1196290 - RNA, 19 nt, Homo sapiens
  misc_RNA (1)...(19): siRNA sense strand
caaagagauggcauuauaa

SEQ ID NO: 1196291 - RNA, 19 nt, Homo sapiens
  misc_RNA (1)...(19): siRNA sense strand
uugaagaccuuguugaaga

SEQ ID NO: 1196292 - RNA, 19 nt, Homo sapiens
  misc_RNA (1)...(19): siRNA sense strand
ucagcuaaaugaagagauu

SEQ ID NO: 1196293 - RNA, 19 nt, Homo sapiens
  misc_RNA (1)...(19): siRNA sense strand
gaacacagcuucuauuuag

SEQ ID NO: 1196294 - RNA, 19 nt, Homo sapiens
  misc_RNA (1)...(19): siRNA sense strand
gaaauguucuccaaagaua

SEQ ID NO: 1196295 - RNA, 19 nt, Homo sapiens
  misc_RNA (1)...(19): siRNA sense strand
gacaauagcugaacaagaa

SEQ ID NO: 1196296 - RNA, 19 nt, Homo sapiens
  misc_RNA (1)...(19): siRNA sense strand
acaaagagauggcauuaua

SEQ ID NO: 1196297 - RNA, 19 nt, Homo sapiens
  misc_RNA (1)...(19): siRNA sense strand
uagcacagcugcagacuua

SEQ ID NO: 1196298 - RNA, 19 nt, Homo sapiens
  misc_RNA (1)...(19): siRNA sense strand
caaguaagcucuuuauuag

SEQ ID NO: 1196299 - RNA, 19 nt, Homo sapiens
  misc_RNA (1)...(19): siRNA sense strand
gcagacagaugguaugaaa

SEQ ID NO: 1196300 - RNA, 19 nt, Homo sapiens
  misc_RNA (1)...(19): siRNA sense strand
guucgaaacugauauagua

SEQ ID NO: 1196301 - RNA, 19 nt, Homo sapiens
  misc_RNA (1)...(19): siRNA sense strand
gaagaacaguuggaagaua

SEQ ID NO: 1196302 - RNA, 19 nt, Homo sapiens
  misc_RNA (1)...(19): siRNA sense strand
acaaaggaaucaucacuua

SEQ ID NO: 1196303 - RNA, 19 nt, Homo sapiens
  misc_RNA (1)...(19): siRNA sense strand
caggaaagccuacaaauuu

SEQ ID NO: 1196304 - RNA, 19 nt, Homo sapiens
  misc_RNA (1)...(19): siRNA sense strand
gaagagaaaucauaaagac

SEQ ID NO: 1196305 - RNA, 19 nt, Homo sapiens
  misc_RNA (1)...(19): siRNA sense strand
gaaguuaacuaucaagagu

SEQ ID NO: 1196306 - RNA, 19 nt, Homo sapiens
  misc_RNA (1)...(19): siRNA sense strand
gaagagcuuuccaaacuga

SEQ ID NO: 1196307 - RNA, 19 nt, Homo sapiens
  misc_RNA (1)...(19): siRNA sense strand
gaagaacuaggacuaauuu

SEQ ID NO: 1196308 - RNA, 19 nt, Homo sapiens
  misc_RNA (1)...(19): siRNA sense strand
gaagaagaauuugguguug

SEQ ID NO: 1196309 - RNA, 19 nt, Homo sapiens
  misc_RNA (1)...(19): siRNA sense strand
gaacaaguuucauugagau

SEQ ID NO: 1196310 - RNA, 19 nt, Homo sapiens
  misc_RNA (1)...(19): siRNA sense strand
aaacugaacugucuagaau

SEQ ID NO: 1196311 - RNA, 19 nt, Homo sapiens
  misc_RNA (1)...(19): siRNA sense strand
caaguuaucuucucugcaa

SEQ ID NO: 1196312 - RNA, 19 nt, Homo sapiens
  misc_RNA (1)...(19): siRNA sense strand
gcagauagaugguuuacag

SEQ ID NO: 1196313 - RNA, 19 nt, Homo sapiens
  misc_RNA (1)...(19): siRNA sense strand
gaagaaguagcuaagguua

SEQ ID NO: 1196314 - RNA, 19 nt, Homo sapiens
  misc_RNA (1)...(19): siRNA sense strand
caacagaacucauggaaaa

SEQ ID NO: 1196315 - RNA, 19 nt, Homo sapiens
  misc_RNA (1)...(19): siRNA sense strand
uaacccagcucacugcuaa

SEQ ID NO: 1196316 - RNA, 19 nt, Homo sapiens
  misc_RNA (1)...(19): siRNA sense strand
gaaaugacucuucaaauca

SEQ ID NO: 1196317 - RNA, 19 nt, Homo sapiens
  misc_RNA (1)...(19): siRNA sense strand
gggcagagcuggaugagau

SEQ ID NO: 1196318 - RNA, 19 nt, Homo sapiens
  misc_RNA (1)...(19): siRNA sense strand
gaacaagaaacacaaagaa

SEQ ID NO: 1196319 - RNA, 19 nt, Homo sapiens
  misc_RNA (1)...(19): siRNA sense strand
ccagcucacugcuaauuua

SEQ ID NO: 1196320 - RNA, 19 nt, Homo sapiens
  misc_RNA (1)...(19): siRNA sense strand
cagaaaggaacuagaauua

SEQ ID NO: 1196321 - RNA, 19 nt, Homo sapiens
  misc_RNA (1)...(19): siRNA sense strand
ggaaaugggugagguuguu

SEQ ID NO: 1196322 - RNA, 19 nt, Homo sapiens
  misc_RNA (1)...(19): siRNA sense strand
acagagagcuggaagaaau

SEQ ID NO: 1196323 - RNA, 19 nt, Homo sapiens
  misc_RNA (1)...(19): siRNA sense strand
gaacauggaaaggaaauuu

SEQ ID NO: 1196324 - RNA, 19 nt, Homo sapiens
  misc_RNA (1)...(19): siRNA sense strand
agaacaagaccacuuauua

SEQ ID NO: 1196325 - RNA, 19 nt, Homo sapiens
  misc_RNA (1)...(19): siRNA sense strand
gaacaagaccacuuauuag

SEQ ID NO: 1196326 - RNA, 19 nt, Homo sapiens
  misc_RNA (1)...(19): siRNA sense strand
gacaguggaugugaaauuu

SEQ ID NO: 1196327 - RNA, 19 nt, Homo sapiens
  misc_RNA (1)...(19): siRNA sense strand
cagaauggcugaaucacaa

SEQ ID NO: 1196328 - RNA, 19 nt, Homo sapiens
  misc_RNA (1)...(19): siRNA sense strand
ggaagcagcaugagauuga

SEQ ID NO: 1196329 - RNA, 19 nt, Homo sapiens
  misc_RNA (1)...(19): siRNA sense strand
agaaaugacucuucaaauc

SEQ ID NO: 1196330 - RNA, 19 nt, Homo sapiens
  misc_RNA (1)...(19): siRNA sense strand
gaacaggaaagccuacaaa

SEQ ID NO: 1196331 - RNA, 19 nt, Homo sapiens
  misc_RNA (1)...(19): siRNA sense strand
acaagaagcugaauuagag

SEQ ID NO: 1196332 - RNA, 19 nt, Homo sapiens
  misc_RNA (1)...(19): siRNA sense strand
guagagagcuagaaaucau

SEQ ID NO: 1196333 - RNA, 19 nt, Homo sapiens
  misc_RNA (1)...(19): siRNA sense strand
gaaagaaacugaacaaaac

SEQ ID NO: 1196334 - RNA, 19 nt, Homo sapiens
  misc_RNA (1)...(19): siRNA sense strand
gaaaugaggguuaccuaug

SEQ ID NO: 1196335 - RNA, 19 nt, Homo sapiens
  misc_RNA (1)...(19): siRNA sense strand
ggaaacaaauaucguuaag

SEQ ID NO: 1196336 - RNA, 19 nt, Homo sapiens
  misc_RNA (1)...(19): siRNA sense strand
gcagauagugcaaaugaaa

SEQ ID NO: 1196337 - RNA, 19 nt, Homo sapiens
  misc_RNA (1)...(19): siRNA sense strand
caacagauccucacucauc

SEQ ID NO: 1196338 - RNA, 19 nt, Homo sapiens
  misc_RNA (1)...(19): siRNA sense strand
aggaaagccuacaaauuua

SEQ ID NO: 1196339 - RNA, 19 nt, Homo sapiens
  misc_RNA (1)...(19): siRNA sense strand
gauccagaauuacaagauu

SEQ ID NO: 1196340 - RNA, 19 nt, Homo sapiens
  misc_RNA (1)...(19): siRNA sense strand
guacuuaaaucagaacaga

SEQ ID NO: 1196341 - RNA, 19 nt, Homo sapiens
  misc_RNA (1)...(19): siRNA sense strand
gaacagauucagagagcua

SEQ ID NO: 1196342 - RNA, 19 nt, Homo sapiens
  misc_RNA (1)...(19): siRNA sense strand
ggcaauaaaugaacugaau

SEQ ID NO: 1196343 - RNA, 19 nt, Homo sapiens
  misc_RNA (1)...(19): siRNA sense strand
agaaacagcacucauagua

SEQ ID NO: 1196344 - RNA, 19 nt, Homo sapiens
  misc_RNA (1)...(19): siRNA sense strand
gaacuggaaagugaaauuu

SEQ ID NO: 1196345 - RNA, 19 nt, Homo sapiens
  misc_RNA (1)...(19): siRNA sense strand
aggcagagauccacuguuu

SEQ ID NO: 1196346 - RNA, 19 nt, Homo sapiens
  misc_RNA (1)...(19): siRNA sense strand
gcaguguccuuggugaaua

SEQ ID NO: 1196347 - RNA, 19 nt, Homo sapiens
  misc_RNA (1)...(19): siRNA sense strand
acagaaacauggugagauu

SEQ ID NO: 1196348 - RNA, 19 nt, Homo sapiens
  misc_RNA (1)...(19): siRNA sense strand
gagcuucauuugcaaagaa

SEQ ID NO: 1196349 - RNA, 19 nt, Homo sapiens
  misc_RNA (1)...(19): siRNA sense strand
aagaagagcuuuccaaacu

SEQ ID NO: 1196350 - RNA, 19 nt, Homo sapiens
  misc_RNA (1)...(19): siRNA sense strand
agaaacaggugaugaagga

SEQ ID NO: 1196351 - RNA, 19 nt, Homo sapiens
  misc_RNA (1)...(19): siRNA sense strand
gauagaugguuuacagaau

SEQ ID NO: 1196352 - RNA, 19 nt, Homo sapiens
  misc_RNA (1)...(19): siRNA sense strand
agaaguagcuaagguuauu

SEQ ID NO: 1196353 - RNA, 19 nt, Homo sapiens
  misc_RNA (1)...(19): siRNA sense strand
gaauucuggugauuacauu

SEQ ID NO: 1196354 - RNA, 19 nt, Homo sapiens
  misc_RNA (1)...(19): siRNA sense strand
gaucaaggaacuucagaaa

SEQ ID NO: 1196355 - RNA, 19 nt, Homo sapiens
  misc_RNA (1)...(19): siRNA sense strand
caaguuucauugagaugua

SEQ ID NO: 1196356 - RNA, 19 nt, Homo sapiens
  misc_RNA (1)...(19): siRNA sense strand
gcaaaagaaccaagaaaua

SEQ ID NO: 1196357 - RNA, 19 nt, Homo sapiens
  misc_RNA (1)...(19): siRNA sense strand
guaugaaacuugaauuugg

SEQ ID NO: 1196358 - RNA, 19 nt, Homo sapiens
  misc_RNA (1)...(19): siRNA sense strand
caaaguaacagaagaauac

SEQ ID NO: 1196359 - RNA, 19 nt, Homo sapiens
  misc_RNA (1)...(19): siRNA sense strand
aaauaugacuguuggagaa

SEQ ID NO: 1196360 - RNA, 19 nt, Homo sapiens
  misc_RNA (1)...(19): siRNA sense strand
ggaagaacuaggacuaauu

SEQ ID NO: 1196361 - RNA, 19 nt, Homo sapiens
  misc_RNA (1)...(19): siRNA sense strand
guuaaugaauguggcaaua

SEQ ID NO: 1196362 - RNA, 19 nt, Homo sapiens
  misc_RNA (1)...(19): siRNA sense strand
ggaagaagaauuugguguu

SEQ ID NO: 1196363 - RNA, 19 nt, Homo sapiens
  misc_RNA (1)...(19): siRNA sense strand
gauggaagcccaacgcauu

SEQ ID NO: 1196364 - RNA, 19 nt, Homo sapiens
  misc_RNA (1)...(19): siRNA sense strand
ucagagagcuagacagaca

SEQ ID NO: 1196365 - RNA, 19 nt, Homo sapiens
  misc_RNA (1)...(19): siRNA sense strand
caagaccacuuauuagaag

SEQ ID NO: 1196366 - RNA, 19 nt, Homo sapiens
  misc_RNA (1)...(19): siRNA sense strand
ugaagaacaagaccacuua

SEQ ID NO: 1196367 - RNA, 19 nt, Homo sapiens
  misc_RNA (1)...(19): siRNA sense strand
gaacaaggagcacaagaca

SEQ ID NO: 1196368 - RNA, 19 nt, Homo sapiens
  misc_RNA (1)...(19): siRNA sense strand
ugacugcaguucagaggua

SEQ ID NO: 1196369 - RNA, 19 nt, Homo sapiens
  misc_RNA (1)...(19): siRNA sense strand
caguggaugugaaauuuaa

SEQ ID NO: 1196370 - RNA, 19 nt, Homo sapiens
  misc_RNA (1)...(19): siRNA sense strand
gaaauuaucacaggaucaa

SEQ ID NO: 1196371 - RNA, 19 nt, Homo sapiens
  misc_RNA (1)...(19): siRNA sense strand
gaggaaacaaauaucguua

SEQ ID NO: 1196372 - RNA, 19 nt, Homo sapiens
  misc_RNA (1)...(19): siRNA sense strand
caacaaaguaacagaagaa

SEQ ID NO: 1196373 - RNA, 19 nt, Homo sapiens
  misc_RNA (1)...(19): siRNA sense strand
gaauaaauccaacuacagu

SEQ ID NO: 1196374 - RNA, 19 nt, Homo sapiens
  misc_RNA (1)...(19): siRNA sense strand
aaacaaagagauggcauua

SEQ ID NO: 1196375 - RNA, 19 nt, Homo sapiens
  misc_RNA (1)...(19): siRNA sense strand
caaacugaaggaagauuua

SEQ ID NO: 1196376 - RNA, 19 nt, Homo sapiens
  misc_RNA (1)...(19): siRNA sense strand
ccgccaagcuuaccuguug

SEQ ID NO: 1196377 - RNA, 19 nt, Homo sapiens
  misc_RNA (1)...(19): siRNA sense strand
gaaagaacucaauguacuu

SEQ ID NO: 1196378 - RNA, 19 nt, Homo sapiens
  misc_RNA (1)...(19): siRNA sense strand
ucagaaagaacucaaugua

SEQ ID NO: 1196379 - RNA, 19 nt, Homo sapiens
  misc_RNA (1)...(19): siRNA sense strand
gagaagaaaguaagcaaga

SEQ ID NO: 1196380 - RNA, 19 nt, Homo sapiens
  misc_RNA (1)...(19): siRNA sense strand
caagagaaagaacaaguuu

SEQ ID NO: 1196381 - RNA, 19 nt, Homo sapiens
  misc_RNA (1)...(19): siRNA sense strand
gaaaauacauacuccuguu

SEQ ID NO: 1196382 - RNA, 19 nt, Homo sapiens
  misc_RNA (1)...(19): siRNA sense strand
gaaauacucagacaagaag

SEQ ID NO: 1196383 - RNA, 19 nt, Homo sapiens
  misc_RNA (1)...(19): siRNA sense strand
gcacacucuucucaacaaa

SEQ ID NO: 1196384 - RNA, 19 nt, Homo sapiens
  misc_RNA (1)...(19): siRNA sense strand
uaaccaagcgagagaaauu

SEQ ID NO: 1196385 - RNA, 19 nt, Homo sapiens
  misc_RNA (1)...(19): siRNA sense strand
gaagcugccauuaaacaaa

SEQ ID NO: 1196386 - RNA, 19 nt, Homo sapiens
  misc_RNA (1)...(19): siRNA sense strand
ggcagugucugaagaaugu

SEQ ID NO: 1196387 - RNA, 19 nt, Homo sapiens
  misc_RNA (1)...(19): siRNA sense strand
ggaucaguuucuaaaguaa

SEQ ID NO: 1196388 - RNA, 19 nt, Homo sapiens
  misc_RNA (1)...(19): siRNA sense strand
caccaugauuugaauauug

SEQ ID NO: 1196389 - RNA, 19 nt, Homo sapiens
  misc_RNA (1)...(19): siRNA sense strand
caacaagcaagaagagaaa

SEQ ID NO: 1196390 - RNA, 19 nt, Homo sapiens
  misc_RNA (1)...(19): siRNA sense strand
caaagagauggcauuauaa

SEQ ID NO: 1196391 - RNA, 19 nt, Homo sapiens
  misc_RNA (1)...(19): siRNA sense strand
uugaagaccuuguugaaga

SEQ ID NO: 1196392 - RNA, 19 nt, Homo sapiens
  misc_RNA (1)...(19): siRNA sense strand
ucagcuaaaugaagagauu

SEQ ID NO: 1196393 - RNA, 19 nt, Homo sapiens
  misc_RNA (1)...(19): siRNA sense strand
gaacacagcuucuauuuag

SEQ ID NO: 1196394 - RNA, 19 nt, Homo sapiens
  misc_RNA (1)...(19): siRNA sense strand
gaaauguucuccaaagaua

SEQ ID NO: 1196395 - RNA, 19 nt, Homo sapiens
  misc_RNA (1)...(19): siRNA sense strand
gacaauagcugaacaagaa

SEQ ID NO: 1196396 - RNA, 19 nt, Homo sapiens
  misc_RNA (1)...(19): siRNA sense strand
acaaagagauggcauuaua

SEQ ID NO: 1196397 - RNA, 19 nt, Homo sapiens
  misc_RNA (1)...(19): siRNA sense strand
uagcacagcugcagacuua

SEQ ID NO: 1196398 - RNA, 19 nt, Homo sapiens
  misc_RNA (1)...(19): siRNA sense strand
caaguaagcucuuuauuag

SEQ ID NO: 1196399 - RNA, 19 nt, Homo sapiens
  misc_RNA (1)...(19): siRNA sense strand
gcagacagaugguaugaaa

SEQ ID NO: 1196400 - RNA, 19 nt, Homo sapiens
  misc_RNA (1)...(19): siRNA sense strand
guucgaaacugauauagua

SEQ ID NO: 1196401 - RNA, 19 nt, Homo sapiens
  misc_RNA (1)...(19): siRNA sense strand
gaagaacaguuggaagaua

SEQ ID NO: 1196402 - RNA, 19 nt, Homo sapiens
  misc_RNA (1)...(19): siRNA sense strand
acaaaggaaucaucacuua

SEQ ID NO: 1196403 - RNA, 19 nt, Homo sapiens
  misc_RNA (1)...(19): siRNA sense strand
caggaaagccuacaaauuu

SEQ ID NO: 1196404 - RNA, 19 nt, Homo sapiens
  misc_RNA (1)...(19): siRNA sense strand
gaagagaaaucauaaagac

SEQ ID NO: 1196405 - RNA, 19 nt, Homo sapiens
  misc_RNA (1)...(19): siRNA sense strand
gaaguuaacuaucaagagu

SEQ ID NO: 1196406 - RNA, 19 nt, Homo sapiens
  misc_RNA (1)...(19): siRNA sense strand
gaagagcuuuccaaacuga

SEQ ID NO: 1196407 - RNA, 19 nt, Homo sapiens
  misc_RNA (1)...(19): siRNA sense strand
gaagaacuaggacuaauuu

SEQ ID NO: 1196408 - RNA, 19 nt, Homo sapiens
  misc_RNA (1)...(19): siRNA sense strand
gaagaagaauuugguguug

SEQ ID NO: 1196409 - RNA, 19 nt, Homo sapiens
  misc_RNA (1)...(19): siRNA sense strand
gaacaaguuucauugagau

SEQ ID NO: 1196410 - RNA, 19 nt, Homo sapiens
  misc_RNA (1)...(19): siRNA sense strand
aaacugaacugucuagaau

SEQ ID NO: 1196411 - RNA, 19 nt, Homo sapiens
  misc_RNA (1)...(19): siRNA sense strand
caaguuaucuucucugcaa

SEQ ID NO: 1196412 - RNA, 19 nt, Homo sapiens
  misc_RNA (1)...(19): siRNA sense strand
gcagauagaugguuuacag

SEQ ID NO: 1196413 - RNA, 19 nt, Homo sapiens
  misc_RNA (1)...(19): siRNA sense strand
gaagaaguagcuaagguua

SEQ ID NO: 1196414 - RNA, 19 nt, Homo sapiens
  misc_RNA (1)...(19): siRNA sense strand
caacagaacucauggaaaa

SEQ ID NO: 1196415 - RNA, 19 nt, Homo sapiens
  misc_RNA (1)...(19): siRNA sense strand
uaacccagcucacugcuaa

SEQ ID NO: 1196416 - RNA, 19 nt, Homo sapiens
  misc_RNA (1)...(19): siRNA sense strand
gaaaugacucuucaaauca

SEQ ID NO: 1196417 - RNA, 19 nt, Homo sapiens
  misc_RNA (1)...(19): siRNA sense strand
gggcagagcuggaugagau

SEQ ID NO: 1196418 - RNA, 19 nt, Homo sapiens
  misc_RNA (1)...(19): siRNA sense strand
gaacaagaaacacaaagaa

SEQ ID NO: 1196419 - RNA, 19 nt, Homo sapiens
  misc_RNA (1)...(19): siRNA sense strand
ccagcucacugcuaauuua

SEQ ID NO: 1196420 - RNA, 19 nt, Homo sapiens
  misc_RNA (1)...(19): siRNA sense strand
cagaaaggaacuagaauua

SEQ ID NO: 1196421 - RNA, 19 nt, Homo sapiens
  misc_RNA (1)...(19): siRNA sense strand
ggaaaugggugagguuguu

SEQ ID NO: 1196422 - RNA, 19 nt, Homo sapiens
  misc_RNA (1)...(19): siRNA sense strand
acagagagcuggaagaaau

SEQ ID NO: 1196423 - RNA, 19 nt, Homo sapiens
  misc_RNA (1)...(19): siRNA sense strand
gaacauggaaaggaaauuu

SEQ ID NO: 1196424 - RNA, 19 nt, Homo sapiens
  misc_RNA (1)...(19): siRNA sense strand
agaacaagaccacuuauua

SEQ ID NO: 1196425 - RNA, 19 nt, Homo sapiens
  misc_RNA (1)...(19): siRNA sense strand
gaacaagaccacuuauuag

SEQ ID NO: 1196426 - RNA, 19 nt, Homo sapiens
  misc_RNA (1)...(19): siRNA sense strand
gacaguggaugugaaauuu

SEQ ID NO: 1196427 - RNA, 19 nt, Homo sapiens
  misc_RNA (1)...(19): siRNA sense strand
cagaauggcugaaucacaa

SEQ ID NO: 1196428 - RNA, 19 nt, Homo sapiens
  misc_RNA (1)...(19): siRNA sense strand
ggaagcagcaugagauuga

SEQ ID NO: 1196429 - RNA, 19 nt, Homo sapiens
  misc_RNA (1)...(19): siRNA sense strand
agaaaugacucuucaaauc

SEQ ID NO: 1196430 - RNA, 19 nt, Homo sapiens
  misc_RNA (1)...(19): siRNA sense strand
gaacaggaaagccuacaaa

SEQ ID NO: 1196431 - RNA, 19 nt, Homo sapiens
  misc_RNA (1)...(19): siRNA sense strand
acaagaagcugaauuagag

SEQ ID NO: 1196432 - RNA, 19 nt, Homo sapiens
  misc_RNA (1)...(19): siRNA sense strand
guagagagcuagaaaucau

SEQ ID NO: 1196433 - RNA, 19 nt, Homo sapiens
  misc_RNA (1)...(19): siRNA sense strand
gaaagaaacugaacaaaac

SEQ ID NO: 1196434 - RNA, 19 nt, Homo sapiens
  misc_RNA (1)...(19): siRNA sense strand
gaaaugaggguuaccuaug

SEQ ID NO: 1196435 - RNA, 19 nt, Homo sapiens
  misc_RNA (1)...(19): siRNA sense strand
ggaaacaaauaucguuaag

SEQ ID NO: 1196436 - RNA, 19 nt, Homo sapiens
  misc_RNA (1)...(19): siRNA sense strand
gcagauagugcaaaugaaa

SEQ ID NO: 1196437 - RNA, 19 nt, Homo sapiens
  misc_RNA (1)...(19): siRNA sense strand
caacagauccucacucauc

SEQ ID NO: 1196438 - RNA, 19 nt, Homo sapiens
  misc_RNA (1)...(19): siRNA sense strand
aggaaagccuacaaauuua

SEQ ID NO: 1196439 - RNA, 19 nt, Homo sapiens
  misc_RNA (1)...(19): siRNA sense strand
gauccagaauuacaagauu

SEQ ID NO: 1196440 - RNA, 19 nt, Homo sapiens
  misc_RNA (1)...(19): siRNA sense strand
guacuuaaaucagaacaga

SEQ ID NO: 1196441 - RNA, 19 nt, Homo sapiens
  misc_RNA (1)...(19): siRNA sense strand
gaacagauucagagagcua

SEQ ID NO: 1196442 - RNA, 19 nt, Homo sapiens
  misc_RNA (1)...(19): siRNA sense strand
ggcaauaaaugaacugaau

SEQ ID NO: 1196443 - RNA, 19 nt, Homo sapiens
  misc_RNA (1)...(19): siRNA sense strand
agaaacagcacucauagua

SEQ ID NO: 1196444 - RNA, 19 nt, Homo sapiens
  misc_RNA (1)...(19): siRNA sense strand
gaacuggaaagugaaauuu

SEQ ID NO: 1196445 - RNA, 19 nt, Homo sapiens
  misc_RNA (1)...(19): siRNA sense strand
aggcagagauccacuguuu

SEQ ID NO: 1196446 - RNA, 19 nt, Homo sapiens
  misc_RNA (1)...(19): siRNA sense strand
gcaguguccuuggugaaua

SEQ ID NO: 1196447 - RNA, 19 nt, Homo sapiens
  misc_RNA (1)...(19): siRNA sense strand
acagaaacauggugagauu

SEQ ID NO: 1196448 - RNA, 19 nt, Homo sapiens
  misc_RNA (1)...(19): siRNA sense strand
gagcuucauuugcaaagaa

SEQ ID NO: 1196449 - RNA, 19 nt, Homo sapiens
  misc_RNA (1)...(19): siRNA sense strand
aagaagagcuuuccaaacu

SEQ ID NO: 1196450 - RNA, 19 nt, Homo sapiens
  misc_RNA (1)...(19): siRNA sense strand
agaaacaggugaugaagga

SEQ ID NO: 1196451 - RNA, 19 nt, Homo sapiens
  misc_RNA (1)...(19): siRNA sense strand
gauagaugguuuacagaau

SEQ ID NO: 1196452 - RNA, 19 nt, Homo sapiens
  misc_RNA (1)...(19): siRNA sense strand
agaaguagcuaagguuauu

SEQ ID NO: 1196453 - RNA, 19 nt, Homo sapiens
  misc_RNA (1)...(19): siRNA sense strand
gaauucuggugauuacauu

SEQ ID NO: 1196454 - RNA, 19 nt, Homo sapiens
  misc_RNA (1)...(19): siRNA sense strand
gaucaaggaacuucagaaa

SEQ ID NO: 1196455 - RNA, 19 nt, Homo sapiens
  misc_RNA (1)...(19): siRNA sense strand
caaguuucauugagaugua

SEQ ID NO: 1196456 - RNA, 19 nt, Homo sapiens
  misc_RNA (1)...(19): siRNA sense strand
gcaaaagaaccaagaaaua

SEQ ID NO: 1196457 - RNA, 19 nt, Homo sapiens
  misc_RNA (1)...(19): siRNA sense strand
guaugaaacuugaauuugg

SEQ ID NO: 1196458 - RNA, 19 nt, Homo sapiens
  misc_RNA (1)...(19): siRNA sense strand
caaaguaacagaagaauac

SEQ ID NO: 1196459 - RNA, 19 nt, Homo sapiens
  misc_RNA (1)...(19): siRNA sense strand
aaauaugacuguuggagaa

SEQ ID NO: 1196460 - RNA, 19 nt, Homo sapiens
  misc_RNA (1)...(19): siRNA sense strand
ggaagaacuaggacuaauu

SEQ ID NO: 1196461 - RNA, 19 nt, Homo sapiens
  misc_RNA (1)...(19): siRNA sense strand
guuaaugaauguggcaaua

SEQ ID NO: 1196462 - RNA, 19 nt, Homo sapiens
  misc_RNA (1)...(19): siRNA sense strand
ggaagaagaauuugguguu

SEQ ID NO: 1196463 - RNA, 19 nt, Homo sapiens
  misc_RNA (1)...(19): siRNA sense strand
gauggaagcccaacgcauu

SEQ ID NO: 1196464 - RNA, 19 nt, Homo sapiens
  misc_RNA (1)...(19): siRNA sense strand
ucagagagcuagacagaca

SEQ ID NO: 1196465 - RNA, 19 nt, Homo sapiens
  misc_RNA (1)...(19): siRNA sense strand
caagaccacuuauuagaag

SEQ ID NO: 1196466 - RNA, 19 nt, Homo sapiens
  misc_RNA (1)...(19): siRNA sense strand
ugaagaacaagaccacuua

SEQ ID NO: 1196467 - RNA, 19 nt, Homo sapiens
  misc_RNA (1)...(19): siRNA sense strand
gaacaaggagcacaagaca

SEQ ID NO: 1196468 - RNA, 19 nt, Homo sapiens
  misc_RNA (1)...(19): siRNA sense strand
ugacugcaguucagaggua

SEQ ID NO: 1196469 - RNA, 19 nt, Homo sapiens
  misc_RNA (1)...(19): siRNA sense strand
caguggaugugaaauuuaa

SEQ ID NO: 1196470 - RNA, 19 nt, Homo sapiens
  misc_RNA (1)...(19): siRNA sense strand
gaaauuaucacaggaucaa

SEQ ID NO: 1196471 - RNA, 19 nt, Homo sapiens
  misc_RNA (1)...(19): siRNA sense strand
gaggaaacaaauaucguua

SEQ ID NO: 1196472 - RNA, 19 nt, Homo sapiens
  misc_RNA (1)...(19): siRNA sense strand
caacaaaguaacagaagaa

SEQ ID NO: 1196473 - RNA, 19 nt, Homo sapiens
  misc_RNA (1)...(19): siRNA sense strand
gaauaaauccaacuacagu

SEQ ID NO: 1196474 - RNA, 19 nt, Homo sapiens
  misc_RNA (1)...(19): siRNA sense strand
aaacaaagagauggcauua

SEQ ID NO: 1196475 - RNA, 19 nt, Homo sapiens
  misc_RNA (1)...(19): siRNA sense strand
caaacugaaggaagauuua

SEQ ID NO: 1196476 - RNA, 19 nt, Homo sapiens
  misc_RNA (1)...(19): siRNA sense strand
ccgccaagcuuaccuguug

SEQ ID NO: 1196477 - RNA, 19 nt, Homo sapiens
  misc_RNA (1)...(19): siRNA sense strand
gaaagaacucaauguacuu

SEQ ID NO: 1196478 - RNA, 19 nt, Homo sapiens
  misc_RNA (1)...(19): siRNA sense strand
ucagaaagaacucaaugua

SEQ ID NO: 1196479 - RNA, 19 nt, Homo sapiens
  misc_RNA (1)...(19): siRNA sense strand
gagaagaaaguaagcaaga

SEQ ID NO: 1196480 - RNA, 19 nt, Homo sapiens
  misc_RNA (1)...(19): siRNA sense strand
caagagaaagaacaaguuu

SEQ ID NO: 1196481 - RNA, 19 nt, Homo sapiens
  misc_RNA (1)...(19): siRNA sense strand
gaaaauacauacuccuguu

SEQ ID NO: 1196482 - RNA, 19 nt, Homo sapiens
  misc_RNA (1)...(19): siRNA sense strand
gaaauacucagacaagaag

SEQ ID NO: 1196483 - RNA, 19 nt, Homo sapiens
  misc_RNA (1)...(19): siRNA sense strand
gcacacucuucucaacaaa

SEQ ID NO: 1196484 - RNA, 19 nt, Homo sapiens
  misc_RNA (1)...(19): siRNA sense strand
uaaccaagcgagagaaauu

SEQ ID NO: 1196485 - RNA, 19 nt, Homo sapiens
  misc_RNA (1)...(19): siRNA sense strand
gaagcugccauuaaacaaa

SEQ ID NO: 1196486 - RNA, 19 nt, Homo sapiens
  misc_RNA (1)...(19): siRNA sense strand
ggcagugucugaagaaugu

SEQ ID NO: 1196487 - RNA, 19 nt, Homo sapiens
  misc_RNA (1)...(19): siRNA sense strand
ggaucaguuucuaaaguaa

SEQ ID NO: 1196488 - RNA, 19 nt, Homo sapiens
  misc_RNA (1)...(19): siRNA sense strand
caccaugauuugaauauug

SEQ ID NO: 1196489 - RNA, 19 nt, Homo sapiens
  misc_RNA (1)...(19): siRNA sense strand
caacaagcaagaagagaaa

SEQ ID NO: 1196490 - RNA, 19 nt, Homo sapiens
  misc_RNA (1)...(19): siRNA sense strand
caaagagauggcauuauaa

SEQ ID NO: 1196491 - RNA, 19 nt, Homo sapiens
  misc_RNA (1)...(19): siRNA sense strand
uugaagaccuuguugaaga

SEQ ID NO: 1196492 - RNA, 19 nt, Homo sapiens
  misc_RNA (1)...(19): siRNA sense strand
ucagcuaaaugaagagauu

SEQ ID NO: 1196493 - RNA, 19 nt, Homo sapiens
  misc_RNA (1)...(19): siRNA sense strand
gaacugaagucaugcagaa

SEQ ID NO: 1196494 - RNA, 19 nt, Homo sapiens
  misc_RNA (1)...(19): siRNA sense strand
uaaacaaacucaacaguga

SEQ ID NO: 1196495 - RNA, 19 nt, Homo sapiens
  misc_RNA (1)...(19): siRNA sense strand
gaacgucucugcuaauaca

SEQ ID NO: 1196496 - RNA, 19 nt, Homo sapiens
  misc_RNA (1)...(19): siRNA sense strand
cagcagaagugaaagauaa

SEQ ID NO: 1196497 - RNA, 19 nt, Homo sapiens
  misc_RNA (1)...(19): siRNA sense strand
gaacuaaggaucugaaaga

SEQ ID NO: 1196498 - RNA, 19 nt, Homo sapiens
  misc_RNA (1)...(19): siRNA sense strand
ggaaacaucuuugcaccua

SEQ ID NO: 1196499 - RNA, 19 nt, Homo sapiens
  misc_RNA (1)...(19): siRNA sense strand
gaagauuacuccagaagau

SEQ ID NO: 1196500 - RNA, 19 nt, Homo sapiens
  misc_RNA (1)...(19): siRNA sense strand
gagaagaacuugaaauugc

SEQ ID NO: 1196501 - RNA, 19 nt, Homo sapiens
  misc_RNA (1)...(19): siRNA sense strand
gcaaaucuaucaauuaagg

SEQ ID NO: 1196502 - RNA, 19 nt, Homo sapiens
  misc_RNA (1)...(19): siRNA sense strand
gcaguaauaucaccucaga

SEQ ID NO: 1196503 - RNA, 19 nt, Homo sapiens
  misc_RNA (1)...(19): siRNA sense strand
ggaaagagaagaacuugaa

SEQ ID NO: 1196504 - RNA, 19 nt, Homo sapiens
  misc_RNA (1)...(19): siRNA sense strand
gaugugauaucaagacuau

SEQ ID NO: 1196505 - RNA, 19 nt, Homo sapiens
  misc_RNA (1)...(19): siRNA sense strand
caaacaaccuggucaguca

SEQ ID NO: 1196506 - RNA, 19 nt, Homo sapiens
  misc_RNA (1)...(19): siRNA sense strand
ggagcaaaucuaucaauua

SEQ ID NO: 1196507 - RNA, 19 nt, Homo sapiens
  misc_RNA (1)...(19): siRNA sense strand
ccaagaaggucauuugcaa

SEQ ID NO: 1196508 - RNA, 19 nt, Homo sapiens
  misc_RNA (1)...(19): siRNA sense strand
gggaacgucucugcuaaua

SEQ ID NO: 1196509 - RNA, 19 nt, Homo sapiens
  misc_RNA (1)...(19): siRNA sense strand
gauccgaagugccuauauu

SEQ ID NO: 1196510 - RNA, 19 nt, Homo sapiens
  misc_RNA (1)...(19): siRNA sense strand
cagcaagucuggccaaguu

SEQ ID NO: 1196511 - RNA, 19 nt, Homo sapiens
  misc_RNA (1)...(19): siRNA sense strand
acaaggagaucuuacaguu

SEQ ID NO: 1196512 - RNA, 19 nt, Homo sapiens
  misc_RNA (1)...(19): siRNA sense strand
agaggaugcucgaauauuu

SEQ ID NO: 1196513 - RNA, 19 nt, Homo sapiens
  misc_RNA (1)...(19): siRNA sense strand
caagaccaaugcagaugua

SEQ ID NO: 1196514 - RNA, 19 nt, Homo sapiens
  misc_RNA (1)...(19): siRNA sense strand
ggaaacagcagugaagaaa

SEQ ID NO: 1196515 - RNA, 19 nt, Homo sapiens
  misc_RNA (1)...(19): siRNA sense strand
caaguuaucuuugaagcaa

SEQ ID NO: 1196516 - RNA, 19 nt, Homo sapiens
  misc_RNA (1)...(19): siRNA sense strand
cagaauaugcucacaaauu

SEQ ID NO: 1196517 - RNA, 19 nt, Homo sapiens
  misc_RNA (1)...(19): siRNA sense strand
gaucagagcccagaauuuc

SEQ ID NO: 1196518 - RNA, 19 nt, Homo sapiens
  misc_RNA (1)...(19): siRNA sense strand
cagcaacucucucaucuuc

SEQ ID NO: 1196519 - RNA, 19 nt, Homo sapiens
  misc_RNA (1)...(19): siRNA sense strand
acagugaacuuuaucauuc

SEQ ID NO: 1196520 - RNA, 19 nt, Homo sapiens
  misc_RNA (1)...(19): siRNA sense strand
caacugaugcuucaaauag

SEQ ID NO: 1196521 - RNA, 19 nt, Homo sapiens
  misc_RNA (1)...(19): siRNA sense strand
aaacaaaucuauggucuca

SEQ ID NO: 1196522 - RNA, 19 nt, Homo sapiens
  misc_RNA (1)...(19): siRNA sense strand
aaacagcagugaagaaagu

SEQ ID NO: 1196523 - RNA, 19 nt, Homo sapiens
  misc_RNA (1)...(19): siRNA sense strand
ucaggaaguuucucaguug

SEQ ID NO: 1196524 - RNA, 19 nt, Homo sapiens
  misc_RNA (1)...(19): siRNA sense strand
gagcagggacccacuuuga

SEQ ID NO: 1196525 - RNA, 19 nt, Homo sapiens
  misc_RNA (1)...(19): siRNA sense strand
ggaauggcaucagcuucua

SEQ ID NO: 1196526 - RNA, 19 nt, Homo sapiens
  misc_RNA (1)...(19): siRNA sense strand
gaaaugugauccagcuucu

SEQ ID NO: 1196527 - RNA, 19 nt, Homo sapiens
  misc_RNA (1)...(19): siRNA sense strand
gagaaggucaugagaguga

SEQ ID NO: 1196528 - RNA, 19 nt, Homo sapiens
  misc_RNA (1)...(19): siRNA sense strand
uggaagacauucagcauga

SEQ ID NO: 1196529 - RNA, 19 nt, Homo sapiens
  misc_RNA (1)...(19): siRNA sense strand
gaagacaaagucaaaggaa

SEQ ID NO: 1196530 - RNA, 19 nt, Homo sapiens
  misc_RNA (1)...(19): siRNA sense strand
gugcaucucuccacauuca

SEQ ID NO: 1196531 - RNA, 19 nt, Homo sapiens
  misc_RNA (1)...(19): siRNA sense strand
caagggaaauggcaacauc

SEQ ID NO: 1196532 - RNA, 19 nt, Homo sapiens
  misc_RNA (1)...(19): siRNA sense strand
gaaaggggauuuaauugga

SEQ ID NO: 1196533 - RNA, 19 nt, Homo sapiens
  misc_RNA (1)...(19): siRNA sense strand
gaaagauaacaaagccaua

SEQ ID NO: 1196534 - RNA, 19 nt, Homo sapiens
  misc_RNA (1)...(19): siRNA sense strand
gcaacucucucaucuucug

SEQ ID NO: 1196535 - RNA, 19 nt, Homo sapiens
  misc_RNA (1)...(19): siRNA sense strand
gaaagagaagaacuugaaa

SEQ ID NO: 1196536 - RNA, 19 nt, Homo sapiens
  misc_RNA (1)...(19): siRNA sense strand
cagcauuuccggaguauaa

SEQ ID NO: 1196537 - RNA, 19 nt, Homo sapiens
  misc_RNA (1)...(19): siRNA sense strand
gauaacaaagccauaaaug

SEQ ID NO: 1196538 - RNA, 19 nt, Homo sapiens
  misc_RNA (1)...(19): siRNA sense strand
caagaagguuggaagcaau

SEQ ID NO: 1196539 - RNA, 19 nt, Homo sapiens
  misc_RNA (1)...(19): siRNA sense strand
gaaauggcaacaucaacaa

SEQ ID NO: 1196540 - RNA, 19 nt, Homo sapiens
  misc_RNA (1)...(19): siRNA sense strand
aaacgugacagcaaucaua

SEQ ID NO: 1196541 - RNA, 19 nt, Homo sapiens
  misc_RNA (1)...(19): siRNA sense strand
ggaaauggcaacaucaaca

SEQ ID NO: 1196542 - RNA, 19 nt, Homo sapiens
  misc_RNA (1)...(19): siRNA sense strand
caacuuuguagcaguaaua

SEQ ID NO: 1196543 - RNA, 19 nt, Homo sapiens
  misc_RNA (1)...(19): siRNA sense strand
gguaaagacaugagaaaug

SEQ ID NO: 1196544 - RNA, 19 nt, Homo sapiens
  misc_RNA (1)...(19): siRNA sense strand
acagugagguaacaacauu

SEQ ID NO: 1196545 - RNA, 19 nt, Homo sapiens
  misc_RNA (1)...(19): siRNA sense strand
aaaccaagcaggaaauuga

SEQ ID NO: 1196546 - RNA, 19 nt, Homo sapiens
  misc_RNA (1)...(19): siRNA sense strand
caauuugcauccacuaugu

SEQ ID NO: 1196547 - RNA, 19 nt, Homo sapiens
  misc_RNA (1)...(19): siRNA sense strand
gcaacugaugcuucaaaua

SEQ ID NO: 1196548 - RNA, 19 nt, Homo sapiens
  misc_RNA (1)...(19): siRNA sense strand
uaauaucaccucagacauu

SEQ ID NO: 1196549 - RNA, 19 nt, Homo sapiens
  misc_RNA (1)...(19): siRNA sense strand
ucaugagagugaugugaua

SEQ ID NO: 1196550 - RNA, 19 nt, Homo sapiens
  misc_RNA (1)...(19): siRNA sense strand
ugacaucacuaugcacuug

SEQ ID NO: 1196551 - RNA, 19 nt, Homo sapiens
  misc_RNA (1)...(19): siRNA sense strand
guauaaaguuucugaugca

SEQ ID NO: 1196552 - RNA, 19 nt, Homo sapiens
  misc_RNA (1)...(19): siRNA sense strand
gagcaguccuuuaucacau

SEQ ID NO: 1196553 - RNA, 19 nt, Homo sapiens
  misc_RNA (1)...(19): siRNA sense strand
caaaggagaaauuauguuc

SEQ ID NO: 1196554 - RNA, 19 nt, Homo sapiens
  misc_RNA (1)...(19): siRNA sense strand
gaaggucauuugcaauuuu

SEQ ID NO: 1196555 - RNA, 19 nt, Homo sapiens
  misc_RNA (1)...(19): siRNA sense strand
ggcugggacuggcuuauuu

SEQ ID NO: 1196556 - RNA, 19 nt, Homo sapiens
  misc_RNA (1)...(19): siRNA sense strand
aauaucaccucagacauuu

SEQ ID NO: 1196557 - RNA, 19 nt, Homo sapiens
  misc_RNA (1)...(19): siRNA sense strand
ggauauuguucccauaaag

SEQ ID NO: 1196558 - RNA, 19 nt, Homo sapiens
  misc_RNA (1)...(19): siRNA sense strand
ccaagcagcagauaaacaa

SEQ ID NO: 1196559 - RNA, 19 nt, Homo sapiens
  misc_RNA (1)...(19): siRNA sense strand
ggagaaaacagaauucaaa

SEQ ID NO: 1196560 - RNA, 19 nt, Homo sapiens
  misc_RNA (1)...(19): siRNA sense strand
aaggagaucuuacaguugu

SEQ ID NO: 1196561 - RNA, 19 nt, Homo sapiens
  misc_RNA (1)...(19): siRNA sense strand
gugcgccucuugcgucuuu

SEQ ID NO: 1196562 - RNA, 19 nt, Homo sapiens
  misc_RNA (1)...(19): siRNA sense strand
gaacaacuuaugucagcaa

SEQ ID NO: 1196563 - RNA, 19 nt, Homo sapiens
  misc_RNA (1)...(19): siRNA sense strand
gauauuguucccauaaaga

SEQ ID NO: 1196564 - RNA, 19 nt, Homo sapiens
  misc_RNA (1)...(19): siRNA sense strand
gcuguucucuucaucaaag

SEQ ID NO: 1196565 - RNA, 19 nt, Homo sapiens
  misc_RNA (1)...(19): siRNA sense strand
gauuggagcugcuguucuc

SEQ ID NO: 1196566 - RNA, 19 nt, Homo sapiens
  misc_RNA (1)...(19): siRNA sense strand
gauuguugauggaauugaa

SEQ ID NO: 1196567 - RNA, 19 nt, Homo sapiens
  misc_RNA (1)...(19): siRNA sense strand
acaaaucuauggucucaca

SEQ ID NO: 1196568 - RNA, 19 nt, Homo sapiens
  misc_RNA (1)...(19): siRNA sense strand
caaauucguggaagacauu

SEQ ID NO: 1196569 - RNA, 19 nt, Homo sapiens
  misc_RNA (1)...(19): siRNA sense strand
uugaagugcuagaccuuua

SEQ ID NO: 1196570 - RNA, 19 nt, Homo sapiens
  misc_RNA (1)...(19): siRNA sense strand
gaaaacagaauucaaagga

SEQ ID NO: 1196571 - RNA, 19 nt, Homo sapiens
  misc_RNA (1)...(19): siRNA sense strand
gcacagcagaagugaaaga

SEQ ID NO: 1196572 - RNA, 19 nt, Homo sapiens
  misc_RNA (1)...(19): siRNA sense strand
gaacacauagcaacuucau

SEQ ID NO: 1196573 - RNA, 19 nt, Homo sapiens
  misc_RNA (1)...(19): siRNA sense strand
cccagaauaugcucacaaa

SEQ ID NO: 1196574 - RNA, 19 nt, Homo sapiens
  misc_RNA (1)...(19): siRNA sense strand
aaaaggagauguaguacuu

SEQ ID NO: 1196575 - RNA, 19 nt, Homo sapiens
  misc_RNA (1)...(19): siRNA sense strand
gcugauuggugccuugaug

SEQ ID NO: 1196576 - RNA, 19 nt, Homo sapiens
  misc_RNA (1)...(19): siRNA sense strand
gaaggaauggcaucagcuu

SEQ ID NO: 1196577 - RNA, 19 nt, Homo sapiens
  misc_RNA (1)...(19): siRNA sense strand
gacagugaacuuuaucauu

SEQ ID NO: 1196578 - RNA, 19 nt, Homo sapiens
  misc_RNA (1)...(19): siRNA sense strand
uggagcaaaucuaucaauu

SEQ ID NO: 1196579 - RNA, 19 nt, Homo sapiens
  misc_RNA (1)...(19): siRNA sense strand
gaaguuagaccgcuauucc

SEQ ID NO: 1196580 - RNA, 19 nt, Homo sapiens
  misc_RNA (1)...(19): siRNA sense strand
agaaggucauuugcaauuu

SEQ ID NO: 1196581 - RNA, 19 nt, Homo sapiens
  misc_RNA (1)...(19): siRNA sense strand
gaagucaugcagaagaguu

SEQ ID NO: 1196582 - RNA, 19 nt, Homo sapiens
  misc_RNA (1)...(19): siRNA sense strand
gaacuugaaauugcaacuu

SEQ ID NO: 1196583 - RNA, 19 nt, Homo sapiens
  misc_RNA (1)...(19): siRNA sense strand
acaagaagguuggaagcaa

SEQ ID NO: 1196584 - RNA, 19 nt, Homo sapiens
  misc_RNA (1)...(19): siRNA sense strand
gcuagaccuuuacccagaa

SEQ ID NO: 1196585 - RNA, 19 nt, Homo sapiens
  misc_RNA (1)...(19): siRNA sense strand
gcauggugcuggcuauucu

SEQ ID NO: 1196586 - RNA, 19 nt, Homo sapiens
  misc_RNA (1)...(19): siRNA sense strand
gaacaaggagaucuuacag

SEQ ID NO: 1196587 - RNA, 19 nt, Homo sapiens
  misc_RNA (1)...(19): siRNA sense strand
gcagaggaugcucgaauau

SEQ ID NO: 1196588 - RNA, 19 nt, Homo sapiens
  misc_RNA (1)...(19): siRNA sense strand
agaccaagcagcagauaaa

SEQ ID NO: 1196589 - RNA, 19 nt, Homo sapiens
  misc_RNA (1)...(19): siRNA sense strand
ccgagaaggucaugagagu

SEQ ID NO: 1196590 - RNA, 19 nt, Homo sapiens
  misc_RNA (1)...(19): siRNA sense strand
gaucaagaccaaugcagau

SEQ ID NO: 1196591 - RNA, 19 nt, Homo sapiens
  misc_RNA (1)...(19): siRNA sense strand
aagcacagcagaagugaaa

SEQ ID NO: 1196592 - RNA, 19 nt, Homo sapiens
  misc_RNA (1)...(19): siRNA sense strand
gaagugaaagauaacaaag

SEQ ID NO: 1196593 - RNA, 19 nt, Homo sapiens
  misc_RNA (1)...(19): siRNA sense strand
gagaagagccaucacauuu

SEQ ID NO: 1196594 - RNA, 19 nt, Homo sapiens
  misc_RNA (1)...(19): siRNA sense strand
gcaaagaccucccgaaugc

SEQ ID NO: 1196595 - RNA, 19 nt, Homo sapiens
  misc_RNA (1)...(19): siRNA sense strand
ucagaugggugguauguuu

SEQ ID NO: 1196596 - RNA, 19 nt, Homo sapiens
  misc_RNA (1)...(19): siRNA sense strand
gcggucagauguccaguuu

SEQ ID NO: 1196597 - RNA, 19 nt, Homo sapiens
  misc_RNA (1)...(19): siRNA sense strand
ggacuucgcucuaaaagga

SEQ ID NO: 1196598 - RNA, 19 nt, Homo sapiens
  misc_RNA (1)...(19): siRNA sense strand
cuguagagcugccuuauga

SEQ ID NO: 1196599 - RNA, 19 nt, Homo sapiens
  misc_RNA (1)...(19): siRNA sense strand
caagggacuucgcucuaaa

SEQ ID NO: 1196600 - RNA, 19 nt, Homo sapiens
  misc_RNA (1)...(19): siRNA sense strand
gacccgaguucuccuuuga

SEQ ID NO: 1196601 - RNA, 19 nt, Homo sapiens
  misc_RNA (1)...(19): siRNA sense strand
acaagggacuucgcucuaa

SEQ ID NO: 1196602 - RNA, 19 nt, Homo sapiens
  misc_RNA (1)...(19): siRNA sense strand
gaagagccaucacauuucc

SEQ ID NO: 1196603 - RNA, 19 nt, Homo sapiens
  misc_RNA (1)...(19): siRNA sense strand
gaggucagcgugcgucuuu

SEQ ID NO: 1196604 - RNA, 19 nt, Homo sapiens
  misc_RNA (1)...(19): siRNA sense strand
acacuccgcugcccacuga

SEQ ID NO: 1196605 - RNA, 19 nt, Homo sapiens
  misc_RNA (1)...(19): siRNA sense strand
ggucagauguccaguuugc

SEQ ID NO: 1196606 - RNA, 19 nt, Homo sapiens
  misc_RNA (1)...(19): siRNA sense strand
gagcugagcagucccuaug

SEQ ID NO: 1196607 - RNA, 19 nt, Homo sapiens
  misc_RNA (1)...(19): siRNA sense strand
cgaguucuccuuugauuug

SEQ ID NO: 1196608 - RNA, 19 nt, Homo sapiens
  misc_RNA (1)...(19): siRNA sense strand
ggacccgaguucuccuuug

SEQ ID NO: 1196609 - RNA, 19 nt, Homo sapiens
  misc_RNA (1)...(19): siRNA sense strand
agagcugccuuaugaauuc

SEQ ID NO: 1196610 - RNA, 19 nt, Homo sapiens
  misc_RNA (1)...(19): siRNA sense strand
gcagcugauucuucacuuc

SEQ ID NO: 1196611 - RNA, 19 nt, Homo sapiens
  misc_RNA (1)...(19): siRNA sense strand
ucacuagaccucaucauuc

SEQ ID NO: 1196612 - RNA, 19 nt, Homo sapiens
  misc_RNA (1)...(19): siRNA sense strand
ccagagacaugggaaaguc

SEQ ID NO: 1196613 - RNA, 19 nt, Homo sapiens
  misc_RNA (1)...(19): siRNA sense strand
ugccacagcucgagaguca

SEQ ID NO: 1196614 - RNA, 19 nt, Homo sapiens
  misc_RNA (1)...(19): siRNA sense strand
gaaagucuucccagauugg

SEQ ID NO: 1196615 - RNA, 19 nt, Homo sapiens
  misc_RNA (1)...(19): siRNA sense strand
cagcagccauguugaaugc

SEQ ID NO: 1196616 - RNA, 19 nt, Homo sapiens
  misc_RNA (1)...(19): siRNA sense strand
guagagcugccuuaugaau

SEQ ID NO: 1196617 - RNA, 19 nt, Homo sapiens
  misc_RNA (1)...(19): siRNA sense strand
ugagaagagccaucacauu

SEQ ID NO: 1196618 - RNA, 19 nt, Homo sapiens
  misc_RNA (1)...(19): siRNA sense strand
gcugagcagucccuaugau

SEQ ID NO: 1196619 - RNA, 19 nt, Homo sapiens
  misc_RNA (1)...(19): siRNA sense strand
gcuauucgggugaccauau

SEQ ID NO: 1196620 - RNA, 19 nt, Homo sapiens
  misc_RNA (1)...(19): siRNA sense strand
caagaaugcaugccaccuu

SEQ ID NO: 1196621 - RNA, 19 nt, Homo sapiens
  misc_RNA (1)...(19): siRNA sense strand
acauucaaguucuauagga

SEQ ID NO: 1196622 - RNA, 19 nt, Homo sapiens
  misc_RNA (1)...(19): siRNA sense strand
gagcuggccagaagccuau

SEQ ID NO: 1196623 - RNA, 19 nt, Homo sapiens
  misc_RNA (1)...(19): siRNA sense strand
gcauggaggacccgaguuc

SEQ ID NO: 1196624 - RNA, 19 nt, Homo sapiens
  misc_RNA (1)...(19): siRNA sense strand
ccacauucaaguucuauag

SEQ ID NO: 1196625 - RNA, 19 nt, Homo sapiens
  misc_RNA (1)...(19): siRNA sense strand
ccacagcucgagagucaga

SEQ ID NO: 1196626 - RNA, 19 nt, Homo sapiens
  misc_RNA (1)...(19): siRNA sense strand
cccgaguucuccuuugauu

SEQ ID NO: 1196627 - RNA, 19 nt, Homo sapiens
  misc_RNA (1)...(19): siRNA sense strand
gucgucaccugucugagaa

SEQ ID NO: 1196628 - RNA, 19 nt, Homo sapiens
  misc_RNA (1)...(19): siRNA sense strand
gagcagucccuaugauguc

SEQ ID NO: 1196629 - RNA, 19 nt, Homo sapiens
  misc_RNA (1)...(19): siRNA sense strand
ucucucacauccuggaaug

SEQ ID NO: 1196630 - RNA, 19 nt, Homo sapiens
  misc_RNA (1)...(19): siRNA sense strand
gucacuagaccucaucauu

SEQ ID NO: 1196631 - RNA, 19 nt, Homo sapiens
  misc_RNA (1)...(19): siRNA sense strand
uagagcugccuuaugaauu

SEQ ID NO: 1196632 - RNA, 19 nt, Homo sapiens
  misc_RNA (1)...(19): siRNA sense strand
ggugguauguuuuggagaa

SEQ ID NO: 1196633 - RNA, 19 nt, Homo sapiens
  misc_RNA (1)...(19): siRNA sense strand
agaagagccaucacauuuc

SEQ ID NO: 1196634 - RNA, 19 nt, Homo sapiens
  misc_RNA (1)...(19): siRNA sense strand
uggaauguaagcauggaua

SEQ ID NO: 1196635 - RNA, 19 nt, Homo sapiens
  misc_RNA (1)...(19): siRNA sense strand
ucccuaugauguccagaaa

SEQ ID NO: 1196636 - RNA, 19 nt, Homo sapiens
  misc_RNA (1)...(19): siRNA sense strand
cacaagggacuucgcucua

SEQ ID NO: 1196637 - RNA, 19 nt, Homo sapiens
  misc_RNA (1)...(19): siRNA sense strand
gagagucagauggguggua

SEQ ID NO: 1196638 - RNA, 19 nt, Homo sapiens
  misc_RNA (1)...(19): siRNA sense strand
agagucagaugggugguau

SEQ ID NO: 1196639 - RNA, 19 nt, Homo sapiens
  misc_RNA (1)...(19): siRNA sense strand
cagauuggacucacaaagg

SEQ ID NO: 1196640 - RNA, 19 nt, Homo sapiens
  misc_RNA (1)...(19): siRNA sense strand
caaguucucuuuuggaaac

SEQ ID NO: 1196641 - RNA, 19 nt, Homo sapiens
  misc_RNA (1)...(19): siRNA sense strand
ccuaugauguccagaaaau

SEQ ID NO: 1196642 - RNA, 19 nt, Homo sapiens
  misc_RNA (1)...(19): siRNA sense strand
cgucgucaccugucugaga

SEQ ID NO: 1196643 - RNA, 19 nt, Homo sapiens
  misc_RNA (1)...(19): siRNA sense strand
ggaauguaagcauggauac

SEQ ID NO: 1196644 - RNA, 19 nt, Homo sapiens
  misc_RNA (1)...(19): siRNA sense strand
cagcucugcuucaaguucu

SEQ ID NO: 1196645 - RNA, 19 nt, Homo sapiens
  misc_RNA (1)...(19): siRNA sense strand
cagaggcacgacuggcaua

SEQ ID NO: 1196646 - RNA, 19 nt, Homo sapiens
  misc_RNA (1)...(19): siRNA sense strand
gauccagagacaugggaaa

SEQ ID NO: 1196647 - RNA, 19 nt, Homo sapiens
  misc_RNA (1)...(19): siRNA sense strand
ggucagcgugcgucuuugu

SEQ ID NO: 1196648 - RNA, 19 nt, Homo sapiens
  misc_RNA (1)...(19): siRNA sense strand
cgacuggcauacccuuugc

SEQ ID NO: 1196649 - RNA, 19 nt, Homo sapiens
  misc_RNA (1)...(19): siRNA sense strand
gcauagaggcauccuaccu

SEQ ID NO: 1196650 - RNA, 19 nt, Homo sapiens
  misc_RNA (1)...(19): siRNA sense strand
guccggaugucucuuacag

SEQ ID NO: 1196651 - RNA, 19 nt, Homo sapiens
  misc_RNA (1)...(19): siRNA sense strand
acacuguagagcugccuua

SEQ ID NO: 1196652 - RNA, 19 nt, Homo sapiens
  misc_RNA (1)...(19): siRNA sense strand
cacuagaccucaucauucc

SEQ ID NO: 1196653 - RNA, 19 nt, Homo sapiens
  misc_RNA (1)...(19): siRNA sense strand
gacccaaccuucggaucca

SEQ ID NO: 1196654 - RNA, 19 nt, Homo sapiens
  misc_RNA (1)...(19): siRNA sense strand
cgucaccugucugagaaga

SEQ ID NO: 1196655 - RNA, 19 nt, Homo sapiens
  misc_RNA (1)...(19): siRNA sense strand
ugagcagucccuaugaugu

SEQ ID NO: 1196656 - RNA, 19 nt, Homo sapiens
  misc_RNA (1)...(19): siRNA sense strand
gagaagagccaucacauuu

SEQ ID NO: 1196657 - RNA, 19 nt, Homo sapiens
  misc_RNA (1)...(19): siRNA sense strand
gcaaagaccucccgaaugc

SEQ ID NO: 1196658 - RNA, 19 nt, Homo sapiens
  misc_RNA (1)...(19): siRNA sense strand
ucagaugggugguauguuu

SEQ ID NO: 1196659 - RNA, 19 nt, Homo sapiens
  misc_RNA (1)...(19): siRNA sense strand
gcggucagauguccaguuu

SEQ ID NO: 1196660 - RNA, 19 nt, Homo sapiens
  misc_RNA (1)...(19): siRNA sense strand
ggacuucgcucuaaaagga

SEQ ID NO: 1196661 - RNA, 19 nt, Homo sapiens
  misc_RNA (1)...(19): siRNA sense strand
cuguagagcugccuuauga

SEQ ID NO: 1196662 - RNA, 19 nt, Homo sapiens
  misc_RNA (1)...(19): siRNA sense strand
caagggacuucgcucuaaa

SEQ ID NO: 1196663 - RNA, 19 nt, Homo sapiens
  misc_RNA (1)...(19): siRNA sense strand
gacccgaguucuccuuuga

SEQ ID NO: 1196664 - RNA, 19 nt, Homo sapiens
  misc_RNA (1)...(19): siRNA sense strand
acaagggacuucgcucuaa

SEQ ID NO: 1196665 - RNA, 19 nt, Homo sapiens
  misc_RNA (1)...(19): siRNA sense strand
gaagagccaucacauuucc

SEQ ID NO: 1196666 - RNA, 19 nt, Homo sapiens
  misc_RNA (1)...(19): siRNA sense strand
gaggucagcgugcgucuuu

SEQ ID NO: 1196667 - RNA, 19 nt, Homo sapiens
  misc_RNA (1)...(19): siRNA sense strand
acacuccgcugcccacuga

SEQ ID NO: 1196668 - RNA, 19 nt, Homo sapiens
  misc_RNA (1)...(19): siRNA sense strand
ggucagauguccaguuugc

SEQ ID NO: 1196669 - RNA, 19 nt, Homo sapiens
  misc_RNA (1)...(19): siRNA sense strand
gagcugagcagucccuaug

SEQ ID NO: 1196670 - RNA, 19 nt, Homo sapiens
  misc_RNA (1)...(19): siRNA sense strand
cgaguucuccuuugauuug

SEQ ID NO: 1196671 - RNA, 19 nt, Homo sapiens
  misc_RNA (1)...(19): siRNA sense strand
ggacccgaguucuccuuug

SEQ ID NO: 1196672 - RNA, 19 nt, Homo sapiens
  misc_RNA (1)...(19): siRNA sense strand
agagcugccuuaugaauuc

SEQ ID NO: 1196673 - RNA, 19 nt, Homo sapiens
  misc_RNA (1)...(19): siRNA sense strand
gcagcugauucuucacuuc

SEQ ID NO: 1196674 - RNA, 19 nt, Homo sapiens
  misc_RNA (1)...(19): siRNA sense strand
ucacuagaccucaucauuc

SEQ ID NO: 1196675 - RNA, 19 nt, Homo sapiens
  misc_RNA (1)...(19): siRNA sense strand
ccagagacaugggaaaguc

SEQ ID NO: 1196676 - RNA, 19 nt, Homo sapiens
  misc_RNA (1)...(19): siRNA sense strand
gcugcucgcuuacuucagu

SEQ ID NO: 1196677 - RNA, 19 nt, Homo sapiens
  misc_RNA (1)...(19): siRNA sense strand
gaaagucuucccagauugg

SEQ ID NO: 1196678 - RNA, 19 nt, Homo sapiens
  misc_RNA (1)...(19): siRNA sense strand
cagcagccauguugaaugc

SEQ ID NO: 1196679 - RNA, 19 nt, Homo sapiens
  misc_RNA (1)...(19): siRNA sense strand
guagagcugccuuaugaau

SEQ ID NO: 1196680 - RNA, 19 nt, Homo sapiens
  misc_RNA (1)...(19): siRNA sense strand
ugagaagagccaucacauu

SEQ ID NO: 1196681 - RNA, 19 nt, Homo sapiens
  misc_RNA (1)...(19): siRNA sense strand
gcugagcagucccuaugau

SEQ ID NO: 1196682 - RNA, 19 nt, Homo sapiens
  misc_RNA (1)...(19): siRNA sense strand
gcuauucgggugaccauau

SEQ ID NO: 1196683 - RNA, 19 nt, Homo sapiens
  misc_RNA (1)...(19): siRNA sense strand
caagaaugcaugccaccuu

SEQ ID NO: 1196684 - RNA, 19 nt, Homo sapiens
  misc_RNA (1)...(19): siRNA sense strand
acauucaaguucuauagga

SEQ ID NO: 1196685 - RNA, 19 nt, Homo sapiens
  misc_RNA (1)...(19): siRNA sense strand
gagcuggccagaagccuau

SEQ ID NO: 1196686 - RNA, 19 nt, Homo sapiens
  misc_RNA (1)...(19): siRNA sense strand
gcauggaggacccgaguuc

SEQ ID NO: 1196687 - RNA, 19 nt, Homo sapiens
  misc_RNA (1)...(19): siRNA sense strand
ccacauucaaguucuauag

SEQ ID NO: 1196688 - RNA, 19 nt, Homo sapiens
  misc_RNA (1)...(19): siRNA sense strand
cccgaguucuccuuugauu

SEQ ID NO: 1196689 - RNA, 19 nt, Homo sapiens
  misc_RNA (1)...(19): siRNA sense strand
gucgucaccugucugagaa

SEQ ID NO: 1196690 - RNA, 19 nt, Homo sapiens
  misc_RNA (1)...(19): siRNA sense strand
gagcagucccuaugauguc

SEQ ID NO: 1196691 - RNA, 19 nt, Homo sapiens
  misc_RNA (1)...(19): siRNA sense strand
ucucucacauccuggaaug

SEQ ID NO: 1196692 - RNA, 19 nt, Homo sapiens
  misc_RNA (1)...(19): siRNA sense strand
gucacuagaccucaucauu

SEQ ID NO: 1196693 - RNA, 19 nt, Homo sapiens
  misc_RNA (1)...(19): siRNA sense strand
uagagcugccuuaugaauu

SEQ ID NO: 1196694 - RNA, 19 nt, Homo sapiens
  misc_RNA (1)...(19): siRNA sense strand
ggugguauguuuuggagaa

SEQ ID NO: 1196695 - RNA, 19 nt, Homo sapiens
  misc_RNA (1)...(19): siRNA sense strand
agaagagccaucacauuuc

SEQ ID NO: 1196696 - RNA, 19 nt, Homo sapiens
  misc_RNA (1)...(19): siRNA sense strand
uggaauguaagcauggaua

SEQ ID NO: 1196697 - RNA, 19 nt, Homo sapiens
  misc_RNA (1)...(19): siRNA sense strand
ucccuaugauguccagaaa

SEQ ID NO: 1196698 - RNA, 19 nt, Homo sapiens
  misc_RNA (1)...(19): siRNA sense strand
cacaagggacuucgcucua

SEQ ID NO: 1196699 - RNA, 19 nt, Homo sapiens
  misc_RNA (1)...(19): siRNA sense strand
gagagucagauggguggua

SEQ ID NO: 1196700 - RNA, 19 nt, Homo sapiens
  misc_RNA (1)...(19): siRNA sense strand
agagucagaugggugguau

SEQ ID NO: 1196701 - RNA, 19 nt, Homo sapiens
  misc_RNA (1)...(19): siRNA sense strand
cagauuggacucacaaagg

SEQ ID NO: 1196702 - RNA, 19 nt, Homo sapiens
  misc_RNA (1)...(19): siRNA sense strand
caaguucucuuuuggaaac

SEQ ID NO: 1196703 - RNA, 19 nt, Homo sapiens
  misc_RNA (1)...(19): siRNA sense strand
ccuaugauguccagaaaau

SEQ ID NO: 1196704 - RNA, 19 nt, Homo sapiens
  misc_RNA (1)...(19): siRNA sense strand
cagaggcacgacuggcaua

SEQ ID NO: 1196705 - RNA, 19 nt, Homo sapiens
  misc_RNA (1)...(19): siRNA sense strand
ggaauguaagcauggauac

SEQ ID NO: 1196706 - RNA, 19 nt, Homo sapiens
  misc_RNA (1)...(19): siRNA sense strand
cgucgucaccugucugaga

SEQ ID NO: 1196707 - RNA, 19 nt, Homo sapiens
  misc_RNA (1)...(19): siRNA sense strand
cagcucugcuucaaguucu

SEQ ID NO: 1196708 - RNA, 19 nt, Homo sapiens
  misc_RNA (1)...(19): siRNA sense strand
gauccagagacaugggaaa

SEQ ID NO: 1196709 - RNA, 19 nt, Homo sapiens
  misc_RNA (1)...(19): siRNA sense strand
ggucagcgugcgucuuugu

SEQ ID NO: 1196710 - RNA, 19 nt, Homo sapiens
  misc_RNA (1)...(19): siRNA sense strand
cgacuggcauacccuuugc

SEQ ID NO: 1196711 - RNA, 19 nt, Homo sapiens
  misc_RNA (1)...(19): siRNA sense strand
ugggagcgcuggcugaacu

SEQ ID NO: 1196712 - RNA, 19 nt, Homo sapiens
  misc_RNA (1)...(19): siRNA sense strand
gcauagaggcauccuaccu

SEQ ID NO: 1196713 - RNA, 19 nt, Homo sapiens
  misc_RNA (1)...(19): siRNA sense strand
acacuguagagcugccuua

SEQ ID NO: 1196714 - RNA, 19 nt, Homo sapiens
  misc_RNA (1)...(19): siRNA sense strand
cacuagaccucaucauucc

SEQ ID NO: 1196715 - RNA, 19 nt, Homo sapiens
  misc_RNA (1)...(19): siRNA sense strand
gacccaaccuucggaucca

SEQ ID NO: 1196716 - RNA, 19 nt, Homo sapiens
  misc_RNA (1)...(19): siRNA sense strand
ccuacuggguguuguucug

SEQ ID NO: 1196717 - RNA, 19 nt, Homo sapiens
  misc_RNA (1)...(19): siRNA sense strand
cgucaccugucugagaaga

SEQ ID NO: 1196718 - RNA, 19 nt, Homo sapiens
  misc_RNA (1)...(19): siRNA sense strand
ugagcagucccuaugaugu

SEQ ID NO: 1196719 - RNA, 19 nt, Homo sapiens
  misc_RNA (1)...(19): siRNA sense strand
gagaagagccaucacauuu

SEQ ID NO: 1196720 - RNA, 19 nt, Homo sapiens
  misc_RNA (1)...(19): siRNA sense strand
gcaaagaccucccgaaugc

SEQ ID NO: 1196721 - RNA, 19 nt, Homo sapiens
  misc_RNA (1)...(19): siRNA sense strand
ucagaugggugguauguuu

SEQ ID NO: 1196722 - RNA, 19 nt, Homo sapiens
  misc_RNA (1)...(19): siRNA sense strand
gcggucagauguccaguuu

SEQ ID NO: 1196723 - RNA, 19 nt, Homo sapiens
  misc_RNA (1)...(19): siRNA sense strand
ggacuucgcucuaaaagga

SEQ ID NO: 1196724 - RNA, 19 nt, Homo sapiens
  misc_RNA (1)...(19): siRNA sense strand
cuguagagcugccuuauga

SEQ ID NO: 1196725 - RNA, 19 nt, Homo sapiens
  misc_RNA (1)...(19): siRNA sense strand
caagggacuucgcucuaaa

SEQ ID NO: 1196726 - RNA, 19 nt, Homo sapiens
  misc_RNA (1)...(19): siRNA sense strand
gacccgaguucuccuuuga

SEQ ID NO: 1196727 - RNA, 19 nt, Homo sapiens
  misc_RNA (1)...(19): siRNA sense strand
acaagggacuucgcucuaa

SEQ ID NO: 1196728 - RNA, 19 nt, Homo sapiens
  misc_RNA (1)...(19): siRNA sense strand
gaagagccaucacauuucc

SEQ ID NO: 1196729 - RNA, 19 nt, Homo sapiens
  misc_RNA (1)...(19): siRNA sense strand
gaggucagcgugcgucuuu

SEQ ID NO: 1196730 - RNA, 19 nt, Homo sapiens
  misc_RNA (1)...(19): siRNA sense strand
acacuccgcugcccacuga

SEQ ID NO: 1196731 - RNA, 19 nt, Homo sapiens
  misc_RNA (1)...(19): siRNA sense strand
ggucagauguccaguuugc

SEQ ID NO: 1196732 - RNA, 19 nt, Homo sapiens
  misc_RNA (1)...(19): siRNA sense strand
gagcugagcagucccuaug

SEQ ID NO: 1196733 - RNA, 19 nt, Homo sapiens
  misc_RNA (1)...(19): siRNA sense strand
cgaguucuccuuugauuug

SEQ ID NO: 1196734 - RNA, 19 nt, Homo sapiens
  misc_RNA (1)...(19): siRNA sense strand
ggacccgaguucuccuuug

SEQ ID NO: 1196735 - RNA, 19 nt, Homo sapiens
  misc_RNA (1)...(19): siRNA sense strand
agagcugccuuaugaauuc

SEQ ID NO: 1196736 - RNA, 19 nt, Homo sapiens
  misc_RNA (1)...(19): siRNA sense strand
gcagcugauucuucacuuc

SEQ ID NO: 1196737 - RNA, 19 nt, Homo sapiens
  misc_RNA (1)...(19): siRNA sense strand
ucacuagaccucaucauuc

SEQ ID NO: 1196738 - RNA, 19 nt, Homo sapiens
  misc_RNA (1)...(19): siRNA sense strand
ccagagacaugggaaaguc

SEQ ID NO: 1196739 - RNA, 19 nt, Homo sapiens
  misc_RNA (1)...(19): siRNA sense strand
gcugcucgcuuacuucagu

SEQ ID NO: 1196740 - RNA, 19 nt, Homo sapiens
  misc_RNA (1)...(19): siRNA sense strand
gaaagucuucccagauugg

SEQ ID NO: 1196741 - RNA, 19 nt, Homo sapiens
  misc_RNA (1)...(19): siRNA sense strand
cagcagccauguugaaugc

SEQ ID NO: 1196742 - RNA, 19 nt, Homo sapiens
  misc_RNA (1)...(19): siRNA sense strand
guagagcugccuuaugaau

SEQ ID NO: 1196743 - RNA, 19 nt, Homo sapiens
  misc_RNA (1)...(19): siRNA sense strand
gcugagcagucccuaugau

SEQ ID NO: 1196744 - RNA, 19 nt, Homo sapiens
  misc_RNA (1)...(19): siRNA sense strand
ugagaagagccaucacauu

SEQ ID NO: 1196745 - RNA, 19 nt, Homo sapiens
  misc_RNA (1)...(19): siRNA sense strand
gcuauucgggugaccauau

SEQ ID NO: 1196746 - RNA, 19 nt, Homo sapiens
  misc_RNA (1)...(19): siRNA sense strand
caagaaugcaugccaccuu

SEQ ID NO: 1196747 - RNA, 19 nt, Homo sapiens
  misc_RNA (1)...(19): siRNA sense strand
gcauggaggacccgaguuc

SEQ ID NO: 1196748 - RNA, 19 nt, Homo sapiens
  misc_RNA (1)...(19): siRNA sense strand
gagcuggccagaagccuau

SEQ ID NO: 1196749 - RNA, 19 nt, Homo sapiens
  misc_RNA (1)...(19): siRNA sense strand
gucgucaccugucugagaa

SEQ ID NO: 1196750 - RNA, 19 nt, Homo sapiens
  misc_RNA (1)...(19): siRNA sense strand
cccgaguucuccuuugauu

SEQ ID NO: 1196751 - RNA, 19 nt, Homo sapiens
  misc_RNA (1)...(19): siRNA sense strand
gagcagucccuaugauguc

SEQ ID NO: 1196752 - RNA, 19 nt, Homo sapiens
  misc_RNA (1)...(19): siRNA sense strand
ucucucacauccuggaaug

SEQ ID NO: 1196753 - RNA, 19 nt, Homo sapiens
  misc_RNA (1)...(19): siRNA sense strand
gucacuagaccucaucauu

SEQ ID NO: 1196754 - RNA, 19 nt, Homo sapiens
  misc_RNA (1)...(19): siRNA sense strand
uagagcugccuuaugaauu

SEQ ID NO: 1196755 - RNA, 19 nt, Homo sapiens
  misc_RNA (1)...(19): siRNA sense strand
ggugguauguuuuggagaa

SEQ ID NO: 1196756 - RNA, 19 nt, Homo sapiens
  misc_RNA (1)...(19): siRNA sense strand
agaagagccaucacauuuc

SEQ ID NO: 1196757 - RNA, 19 nt, Homo sapiens
  misc_RNA (1)...(19): siRNA sense strand
uggaauguaagcauggaua

SEQ ID NO: 1196758 - RNA, 19 nt, Homo sapiens
  misc_RNA (1)...(19): siRNA sense strand
ucccuaugauguccagaaa

SEQ ID NO: 1196759 - RNA, 19 nt, Homo sapiens
  misc_RNA (1)...(19): siRNA sense strand
cacaagggacuucgcucua

SEQ ID NO: 1196760 - RNA, 19 nt, Homo sapiens
  misc_RNA (1)...(19): siRNA sense strand
gagagucagauggguggua

SEQ ID NO: 1196761 - RNA, 19 nt, Homo sapiens
  misc_RNA (1)...(19): siRNA sense strand
agagucagaugggugguau

SEQ ID NO: 1196762 - RNA, 19 nt, Homo sapiens
  misc_RNA (1)...(19): siRNA sense strand
cagauuggacucacaaagg

SEQ ID NO: 1196763 - RNA, 19 nt, Homo sapiens
  misc_RNA (1)...(19): siRNA sense strand
caaguucucuuuuggaaac

SEQ ID NO: 1196764 - RNA, 19 nt, Homo sapiens
  misc_RNA (1)...(19): siRNA sense strand
ccuaugauguccagaaaau

SEQ ID NO: 1196765 - RNA, 19 nt, Homo sapiens
  misc_RNA (1)...(19): siRNA sense strand
cagaggcacgacuggcaua

SEQ ID NO: 1196766 - RNA, 19 nt, Homo sapiens
  misc_RNA (1)...(19): siRNA sense strand
cgucgucaccugucugaga

SEQ ID NO: 1196767 - RNA, 19 nt, Homo sapiens
  misc_RNA (1)...(19): siRNA sense strand
ggaauguaagcauggauac

SEQ ID NO: 1196768 - RNA, 19 nt, Homo sapiens
  misc_RNA (1)...(19): siRNA sense strand
cagcucugcuucaaguucu

SEQ ID NO: 1196769 - RNA, 19 nt, Homo sapiens
  misc_RNA (1)...(19): siRNA sense strand
ggucagcgugcgucuuugu

SEQ ID NO: 1196770 - RNA, 19 nt, Homo sapiens
  misc_RNA (1)...(19): siRNA sense strand
gauccagagacaugggaaa

SEQ ID NO: 1196771 - RNA, 19 nt, Homo sapiens
  misc_RNA (1)...(19): siRNA sense strand
cgacuggcauacccuuugc

SEQ ID NO: 1196772 - RNA, 19 nt, Homo sapiens
  misc_RNA (1)...(19): siRNA sense strand
ugggagcgcuggcugaacu

SEQ ID NO: 1196773 - RNA, 19 nt, Homo sapiens
  misc_RNA (1)...(19): siRNA sense strand
gcauagaggcauccuaccu

SEQ ID NO: 1196774 - RNA, 19 nt, Homo sapiens
  misc_RNA (1)...(19): siRNA sense strand
acacuguagagcugccuua

SEQ ID NO: 1196775 - RNA, 19 nt, Homo sapiens
  misc_RNA (1)...(19): siRNA sense strand
cacuagaccucaucauucc

SEQ ID NO: 1196776 - RNA, 19 nt, Homo sapiens
  misc_RNA (1)...(19): siRNA sense strand
ugagcagucccuaugaugu

SEQ ID NO: 1196777 - RNA, 19 nt, Homo sapiens
  misc_RNA (1)...(19): siRNA sense strand
ccuacuggguguuguucug

SEQ ID NO: 1196778 - RNA, 19 nt, Homo sapiens
  misc_RNA (1)...(19): siRNA sense strand
gacccaaccuucggaucca

SEQ ID NO: 1196779 - RNA, 19 nt, Homo sapiens
  misc_RNA (1)...(19): siRNA sense strand
cgucaccugucugagaaga

SEQ ID NO: 1196780 - RNA, 19 nt, Homo sapiens
  misc_RNA (1)...(19): siRNA sense strand
gagaagagccaucacauuu

SEQ ID NO: 1196781 - RNA, 19 nt, Homo sapiens
  misc_RNA (1)...(19): siRNA sense strand
gcaaagaccucccgaaugc

SEQ ID NO: 1196782 - RNA, 19 nt, Homo sapiens
  misc_RNA (1)...(19): siRNA sense strand
ucagaugggugguauguuu

SEQ ID NO: 1196783 - RNA, 19 nt, Homo sapiens
  misc_RNA (1)...(19): siRNA sense strand
gcggucagauguccaguuu

SEQ ID NO: 1196784 - RNA, 19 nt, Homo sapiens
  misc_RNA (1)...(19): siRNA sense strand
ggacuucgcucuaaaagga

SEQ ID NO: 1196785 - RNA, 19 nt, Homo sapiens
  misc_RNA (1)...(19): siRNA sense strand
cuguagagcugccuuauga

SEQ ID NO: 1196786 - RNA, 19 nt, Homo sapiens
  misc_RNA (1)...(19): siRNA sense strand
caagggacuucgcucuaaa

SEQ ID NO: 1196787 - RNA, 19 nt, Homo sapiens
  misc_RNA (1)...(19): siRNA sense strand
gacccgaguucuccuuuga

SEQ ID NO: 1196788 - RNA, 19 nt, Homo sapiens
  misc_RNA (1)...(19): siRNA sense strand
acaagggacuucgcucuaa

SEQ ID NO: 1196789 - RNA, 19 nt, Homo sapiens
  misc_RNA (1)...(19): siRNA sense strand
gaagagccaucacauuucc

SEQ ID NO: 1196790 - RNA, 19 nt, Homo sapiens
  misc_RNA (1)...(19): siRNA sense strand
gaggucagcgugcgucuuu

SEQ ID NO: 1196791 - RNA, 19 nt, Homo sapiens
  misc_RNA (1)...(19): siRNA sense strand
acacuccgcugcccacuga

SEQ ID NO: 1196792 - RNA, 19 nt, Homo sapiens
  misc_RNA (1)...(19): siRNA sense strand
ggucagauguccaguuugc

SEQ ID NO: 1196793 - RNA, 19 nt, Homo sapiens
  misc_RNA (1)...(19): siRNA sense strand
gagcugagcagucccuaug

SEQ ID NO: 1196794 - RNA, 19 nt, Homo sapiens
  misc_RNA (1)...(19): siRNA sense strand
cgaguucuccuuugauuug

SEQ ID NO: 1196795 - RNA, 19 nt, Homo sapiens
  misc_RNA (1)...(19): siRNA sense strand
ggacccgaguucuccuuug

SEQ ID NO: 1196796 - RNA, 19 nt, Homo sapiens
  misc_RNA (1)...(19): siRNA sense strand
agagcugccuuaugaauuc

SEQ ID NO: 1196797 - RNA, 19 nt, Homo sapiens
  misc_RNA (1)...(19): siRNA sense strand
gcagcugauucuucacuuc

SEQ ID NO: 1196798 - RNA, 19 nt, Homo sapiens
  misc_RNA (1)...(19): siRNA sense strand
ucacuagaccucaucauuc

SEQ ID NO: 1196799 - RNA, 19 nt, Homo sapiens
  misc_RNA (1)...(19): siRNA sense strand
ccagagacaugggaaaguc

SEQ ID NO: 1196800 - RNA, 19 nt, Homo sapiens
  misc_RNA (1)...(19): siRNA sense strand
gaaagucuucccagauugg

SEQ ID NO: 1196801 - RNA, 19 nt, Homo sapiens
  misc_RNA (1)...(19): siRNA sense strand
cagcagccauguugaaugc

SEQ ID NO: 1196802 - RNA, 19 nt, Homo sapiens
  misc_RNA (1)...(19): siRNA sense strand
guagagcugccuuaugaau

SEQ ID NO: 1196803 - RNA, 19 nt, Homo sapiens
  misc_RNA (1)...(19): siRNA sense strand
gcugagcagucccuaugau

SEQ ID NO: 1196804 - RNA, 19 nt, Homo sapiens
  misc_RNA (1)...(19): siRNA sense strand
ugagaagagccaucacauu

SEQ ID NO: 1196805 - RNA, 19 nt, Homo sapiens
  misc_RNA (1)...(19): siRNA sense strand
gcuauucgggugaccauau

SEQ ID NO: 1196806 - RNA, 19 nt, Homo sapiens
  misc_RNA (1)...(19): siRNA sense strand
caagaaugcaugccaccuu

SEQ ID NO: 1196807 - RNA, 19 nt, Homo sapiens
  misc_RNA (1)...(19): siRNA sense strand
gcauggaggacccgaguuc

SEQ ID NO: 1196808 - RNA, 19 nt, Homo sapiens
  misc_RNA (1)...(19): siRNA sense strand
gagcuggccagaagccuau

SEQ ID NO: 1196809 - RNA, 19 nt, Homo sapiens
  misc_RNA (1)...(19): siRNA sense strand
gucgucaccugucugagaa

SEQ ID NO: 1196810 - RNA, 19 nt, Homo sapiens
  misc_RNA (1)...(19): siRNA sense strand
cccgaguucuccuuugauu

SEQ ID NO: 1196811 - RNA, 19 nt, Homo sapiens
  misc_RNA (1)...(19): siRNA sense strand
gagcagucccuaugauguc

SEQ ID NO: 1196812 - RNA, 19 nt, Homo sapiens
  misc_RNA (1)...(19): siRNA sense strand
ucucucacauccuggaaug

SEQ ID NO: 1196813 - RNA, 19 nt, Homo sapiens
  misc_RNA (1)...(19): siRNA sense strand
gucacuagaccucaucauu

SEQ ID NO: 1196814 - RNA, 19 nt, Homo sapiens
  misc_RNA (1)...(19): siRNA sense strand
uagagcugccuuaugaauu

SEQ ID NO: 1196815 - RNA, 19 nt, Homo sapiens
  misc_RNA (1)...(19): siRNA sense strand
ggugguauguuuuggagaa

SEQ ID NO: 1196816 - RNA, 19 nt, Homo sapiens
  misc_RNA (1)...(19): siRNA sense strand
agaagagccaucacauuuc

SEQ ID NO: 1196817 - RNA, 19 nt, Homo sapiens
  misc_RNA (1)...(19): siRNA sense strand
uggaauguaagcauggaua

SEQ ID NO: 1196818 - RNA, 19 nt, Homo sapiens
  misc_RNA (1)...(19): siRNA sense strand
ucccuaugauguccagaaa

SEQ ID NO: 1196819 - RNA, 19 nt, Homo sapiens
  misc_RNA (1)...(19): siRNA sense strand
cacaagggacuucgcucua

SEQ ID NO: 1196820 - RNA, 19 nt, Homo sapiens
  misc_RNA (1)...(19): siRNA sense strand
gagagucagauggguggua

SEQ ID NO: 1196821 - RNA, 19 nt, Homo sapiens
  misc_RNA (1)...(19): siRNA sense strand
agagucagaugggugguau

SEQ ID NO: 1196822 - RNA, 19 nt, Homo sapiens
  misc_RNA (1)...(19): siRNA sense strand
cagauuggacucacaaagg

SEQ ID NO: 1196823 - RNA, 19 nt, Homo sapiens
  misc_RNA (1)...(19): siRNA sense strand
caaguucucuuuuggaaac

SEQ ID NO: 1196824 - RNA, 19 nt, Homo sapiens
  misc_RNA (1)...(19): siRNA sense strand
ccuaugauguccagaaaau

SEQ ID NO: 1196825 - RNA, 19 nt, Homo sapiens
  misc_RNA (1)...(19): siRNA sense strand
cagaggcacgacuggcaua

SEQ ID NO: 1196826 - RNA, 19 nt, Homo sapiens
  misc_RNA (1)...(19): siRNA sense strand
cgucgucaccugucugaga

SEQ ID NO: 1196827 - RNA, 19 nt, Homo sapiens
  misc_RNA (1)...(19): siRNA sense strand
ggaauguaagcauggauac

SEQ ID NO: 1196828 - RNA, 19 nt, Homo sapiens
  misc_RNA (1)...(19): siRNA sense strand
cagcucugcuucaaguucu

SEQ ID NO: 1196829 - RNA, 19 nt, Homo sapiens
  misc_RNA (1)...(19): siRNA sense strand
gauccagagacaugggaaa

SEQ ID NO: 1196830 - RNA, 19 nt, Homo sapiens
  misc_RNA (1)...(19): siRNA sense strand
ggucagcgugcgucuuugu

SEQ ID NO: 1196831 - RNA, 19 nt, Homo sapiens
  misc_RNA (1)...(19): siRNA sense strand
cgacuggcauacccuuugc

SEQ ID NO: 1196832 - RNA, 19 nt, Homo sapiens
  misc_RNA (1)...(19): siRNA sense strand
gcauagaggcauccuaccu

SEQ ID NO: 1196833 - RNA, 19 nt, Homo sapiens
  misc_RNA (1)...(19): siRNA sense strand
acacuguagagcugccuua

SEQ ID NO: 1196834 - RNA, 19 nt, Homo sapiens
  misc_RNA (1)...(19): siRNA sense strand
cacuagaccucaucauucc

SEQ ID NO: 1196835 - RNA, 19 nt, Homo sapiens
  misc_RNA (1)...(19): siRNA sense strand
ugagcagucccuaugaugu

SEQ ID NO: 1196836 - RNA, 19 nt, Homo sapiens
  misc_RNA (1)...(19): siRNA sense strand
gacccaaccuucggaucca

SEQ ID NO: 1196837 - RNA, 19 nt, Homo sapiens
  misc_RNA (1)...(19): siRNA sense strand
cgucaccugucugagaaga

SEQ ID NO: 1196838 - RNA, 19 nt, Homo sapiens
  misc_RNA (1)...(19): siRNA sense strand
gagaagagccaucacauuu

SEQ ID NO: 1196839 - RNA, 19 nt, Homo sapiens
  misc_RNA (1)...(19): siRNA sense strand
gcaaagaccucccgaaugc

SEQ ID NO: 1196840 - RNA, 19 nt, Homo sapiens
  misc_RNA (1)...(19): siRNA sense strand
ucagaugggugguauguuu

SEQ ID NO: 1196841 - RNA, 19 nt, Homo sapiens
  misc_RNA (1)...(19): siRNA sense strand
gcggucagauguccaguuu

SEQ ID NO: 1196842 - RNA, 19 nt, Homo sapiens
  misc_RNA (1)...(19): siRNA sense strand
ggacuucgcucuaaaagga

SEQ ID NO: 1196843 - RNA, 19 nt, Homo sapiens
  misc_RNA (1)...(19): siRNA sense strand
cuguagagcugccuuauga

SEQ ID NO: 1196844 - RNA, 19 nt, Homo sapiens
  misc_RNA (1)...(19): siRNA sense strand
caagggacuucgcucuaaa

SEQ ID NO: 1196845 - RNA, 19 nt, Homo sapiens
  misc_RNA (1)...(19): siRNA sense strand
gacccgaguucuccuuuga

SEQ ID NO: 1196846 - RNA, 19 nt, Homo sapiens
  misc_RNA (1)...(19): siRNA sense strand
acaagggacuucgcucuaa

SEQ ID NO: 1196847 - RNA, 19 nt, Homo sapiens
  misc_RNA (1)...(19): siRNA sense strand
gaagagccaucacauuucc

SEQ ID NO: 1196848 - RNA, 19 nt, Homo sapiens
  misc_RNA (1)...(19): siRNA sense strand
gaggucagcgugcgucuuu

SEQ ID NO: 1196849 - RNA, 19 nt, Homo sapiens
  misc_RNA (1)...(19): siRNA sense strand
acacuccgcugcccacuga

SEQ ID NO: 1196850 - RNA, 19 nt, Homo sapiens
  misc_RNA (1)...(19): siRNA sense strand
ggucagauguccaguuugc

SEQ ID NO: 1196851 - RNA, 19 nt, Homo sapiens
  misc_RNA (1)...(19): siRNA sense strand
gagcugagcagucccuaug

SEQ ID NO: 1196852 - RNA, 19 nt, Homo sapiens
  misc_RNA (1)...(19): siRNA sense strand
cgaguucuccuuugauuug

SEQ ID NO: 1196853 - RNA, 19 nt, Homo sapiens
  misc_RNA (1)...(19): siRNA sense strand
ggacccgaguucuccuuug

SEQ ID NO: 1196854 - RNA, 19 nt, Homo sapiens
  misc_RNA (1)...(19): siRNA sense strand
agagcugccuuaugaauuc

SEQ ID NO: 1196855 - RNA, 19 nt, Homo sapiens
  misc_RNA (1)...(19): siRNA sense strand
gcagcugauucuucacuuc

SEQ ID NO: 1196856 - RNA, 19 nt, Homo sapiens
  misc_RNA (1)...(19): siRNA sense strand
ucacuagaccucaucauuc

SEQ ID NO: 1196857 - RNA, 19 nt, Homo sapiens
  misc_RNA (1)...(19): siRNA sense strand
ccagagacaugggaaaguc

SEQ ID NO: 1196858 - RNA, 19 nt, Homo sapiens
  misc_RNA (1)...(19): siRNA sense strand
gcugcucgcuuacuucagu

SEQ ID NO: 1196859 - RNA, 19 nt, Homo sapiens
  misc_RNA (1)...(19): siRNA sense strand
gaaagucuucccagauugg

SEQ ID NO: 1196860 - RNA, 19 nt, Homo sapiens
  misc_RNA (1)...(19): siRNA sense strand
cagcagccauguugaaugc

SEQ ID NO: 1196861 - RNA, 19 nt, Homo sapiens
  misc_RNA (1)...(19): siRNA sense strand
guagagcugccuuaugaau

SEQ ID NO: 1196862 - RNA, 19 nt, Homo sapiens
  misc_RNA (1)...(19): siRNA sense strand
ugagaagagccaucacauu

SEQ ID NO: 1196863 - RNA, 19 nt, Homo sapiens
  misc_RNA (1)...(19): siRNA sense strand
gcugagcagucccuaugau

SEQ ID NO: 1196864 - RNA, 19 nt, Homo sapiens
  misc_RNA (1)...(19): siRNA sense strand
gcuauucgggugaccauau

SEQ ID NO: 1196865 - RNA, 19 nt, Homo sapiens
  misc_RNA (1)...(19): siRNA sense strand
caagaaugcaugccaccuu

SEQ ID NO: 1196866 - RNA, 19 nt, Homo sapiens
  misc_RNA (1)...(19): siRNA sense strand
acauucaaguucuauagga

SEQ ID NO: 1196867 - RNA, 19 nt, Homo sapiens
  misc_RNA (1)...(19): siRNA sense strand
gagcuggccagaagccuau

SEQ ID NO: 1196868 - RNA, 19 nt, Homo sapiens
  misc_RNA (1)...(19): siRNA sense strand
gcauggaggacccgaguuc

SEQ ID NO: 1196869 - RNA, 19 nt, Homo sapiens
  misc_RNA (1)...(19): siRNA sense strand
ccacauucaaguucuauag

SEQ ID NO: 1196870 - RNA, 19 nt, Homo sapiens
  misc_RNA (1)...(19): siRNA sense strand
cccgaguucuccuuugauu

SEQ ID NO: 1196871 - RNA, 19 nt, Homo sapiens
  misc_RNA (1)...(19): siRNA sense strand
gucgucaccugucugagaa

SEQ ID NO: 1196872 - RNA, 19 nt, Homo sapiens
  misc_RNA (1)...(19): siRNA sense strand
gagcagucccuaugauguc

SEQ ID NO: 1196873 - RNA, 19 nt, Homo sapiens
  misc_RNA (1)...(19): siRNA sense strand
ucucucacauccuggaaug

SEQ ID NO: 1196874 - RNA, 19 nt, Homo sapiens
  misc_RNA (1)...(19): siRNA sense strand
gucacuagaccucaucauu

SEQ ID NO: 1196875 - RNA, 19 nt, Homo sapiens
  misc_RNA (1)...(19): siRNA sense strand
uagagcugccuuaugaauu

SEQ ID NO: 1196876 - RNA, 19 nt, Homo sapiens
  misc_RNA (1)...(19): siRNA sense strand
ggugguauguuuuggagaa

SEQ ID NO: 1196877 - RNA, 19 nt, Homo sapiens
  misc_RNA (1)...(19): siRNA sense strand
agaagagccaucacauuuc

SEQ ID NO: 1196878 - RNA, 19 nt, Homo sapiens
  misc_RNA (1)...(19): siRNA sense strand
uggaauguaagcauggaua

SEQ ID NO: 1196879 - RNA, 19 nt, Homo sapiens
  misc_RNA (1)...(19): siRNA sense strand
ucccuaugauguccagaaa

SEQ ID NO: 1196880 - RNA, 19 nt, Homo sapiens
  misc_RNA (1)...(19): siRNA sense strand
cacaagggacuucgcucua

SEQ ID NO: 1196881 - RNA, 19 nt, Homo sapiens
  misc_RNA (1)...(19): siRNA sense strand
gagagucagauggguggua

SEQ ID NO: 1196882 - RNA, 19 nt, Homo sapiens
  misc_RNA (1)...(19): siRNA sense strand
agagucagaugggugguau

SEQ ID NO: 1196883 - RNA, 19 nt, Homo sapiens
  misc_RNA (1)...(19): siRNA sense strand
cagauuggacucacaaagg

SEQ ID NO: 1196884 - RNA, 19 nt, Homo sapiens
  misc_RNA (1)...(19): siRNA sense strand
caaguucucuuuuggaaac

SEQ ID NO: 1196885 - RNA, 19 nt, Homo sapiens
  misc_RNA (1)...(19): siRNA sense strand
ccuaugauguccagaaaau

SEQ ID NO: 1196886 - RNA, 19 nt, Homo sapiens
  misc_RNA (1)...(19): siRNA sense strand
cagaggcacgacuggcaua

SEQ ID NO: 1196887 - RNA, 19 nt, Homo sapiens
  misc_RNA (1)...(19): siRNA sense strand
ggaauguaagcauggauac

SEQ ID NO: 1196888 - RNA, 19 nt, Homo sapiens
  misc_RNA (1)...(19): siRNA sense strand
cgucgucaccugucugaga

SEQ ID NO: 1196889 - RNA, 19 nt, Homo sapiens
  misc_RNA (1)...(19): siRNA sense strand
cagcucugcuucaaguucu

SEQ ID NO: 1196890 - RNA, 19 nt, Homo sapiens
  misc_RNA (1)...(19): siRNA sense strand
gauccagagacaugggaaa

SEQ ID NO: 1196891 - RNA, 19 nt, Homo sapiens
  misc_RNA (1)...(19): siRNA sense strand
ggucagcgugcgucuuugu

SEQ ID NO: 1196892 - RNA, 19 nt, Homo sapiens
  misc_RNA (1)...(19): siRNA sense strand
cgacuggcauacccuuugc

SEQ ID NO: 1196893 - RNA, 19 nt, Homo sapiens
  misc_RNA (1)...(19): siRNA sense strand
ugggagcgcuggcugaacu

SEQ ID NO: 1196894 - RNA, 19 nt, Homo sapiens
  misc_RNA (1)...(19): siRNA sense strand
gcauagaggcauccuaccu

SEQ ID NO: 1196895 - RNA, 19 nt, Homo sapiens
  misc_RNA (1)...(19): siRNA sense strand
acacuguagagcugccuua

SEQ ID NO: 1196896 - RNA, 19 nt, Homo sapiens
  misc_RNA (1)...(19): siRNA sense strand
cacuagaccucaucauucc

SEQ ID NO: 1196897 - RNA, 19 nt, Homo sapiens
  misc_RNA (1)...(19): siRNA sense strand
gacccaaccuucggaucca

SEQ ID NO: 1196898 - RNA, 19 nt, Homo sapiens
  misc_RNA (1)...(19): siRNA sense strand
ccuacuggguguuguucug

SEQ ID NO: 1196899 - RNA, 19 nt, Homo sapiens
  misc_RNA (1)...(19): siRNA sense strand
cgucaccugucugagaaga

SEQ ID NO: 1196900 - RNA, 19 nt, Homo sapiens
  misc_RNA (1)...(19): siRNA sense strand
ugagcagucccuaugaugu

SEQ ID NO: 1196901 - RNA, 19 nt, Homo sapiens
  misc_RNA (1)...(19): siRNA sense strand
gaaaugggcuuuacagaug

SEQ ID NO: 1196902 - RNA, 19 nt, Homo sapiens
  misc_RNA (1)...(19): siRNA sense strand
gaaagaagccauauugaaa

SEQ ID NO: 1196903 - RNA, 19 nt, Homo sapiens
  misc_RNA (1)...(19): siRNA sense strand
gaagagagcuaccaaccaa

SEQ ID NO: 1196904 - RNA, 19 nt, Homo sapiens
  misc_RNA (1)...(19): siRNA sense strand
cuacauagaugcucaguuu

SEQ ID NO: 1196905 - RNA, 19 nt, Homo sapiens
  misc_RNA (1)...(19): siRNA sense strand
ggaaaguaauguucaauug

SEQ ID NO: 1196906 - RNA, 19 nt, Homo sapiens
  misc_RNA (1)...(19): siRNA sense strand
caagguuucugcuuuaaua

SEQ ID NO: 1196907 - RNA, 19 nt, Homo sapiens
  misc_RNA (1)...(19): siRNA sense strand
gcaauggcguccagauaua

SEQ ID NO: 1196908 - RNA, 19 nt, Homo sapiens
  misc_RNA (1)...(19): siRNA sense strand
caagaagaacugaagauua

SEQ ID NO: 1196909 - RNA, 19 nt, Homo sapiens
  misc_RNA (1)...(19): siRNA sense strand
ggagaaagaagccauauug

SEQ ID NO: 1196910 - RNA, 19 nt, Homo sapiens
  misc_RNA (1)...(19): siRNA sense strand
gaaggaagaagaaaugaaa

SEQ ID NO: 1196911 - RNA, 19 nt, Homo sapiens
  misc_RNA (1)...(19): siRNA sense strand
ggucaacgcugcaaugaau

SEQ ID NO: 1196912 - RNA, 19 nt, Homo sapiens
  misc_RNA (1)...(19): siRNA sense strand
gaaugaagcuugaagaaaa

SEQ ID NO: 1196913 - RNA, 19 nt, Homo sapiens
  misc_RNA (1)...(19): siRNA sense strand
gaacagauccauucagcaa

SEQ ID NO: 1196914 - RNA, 19 nt, Homo sapiens
  misc_RNA (1)...(19): siRNA sense strand
ggucaaagcucgccaguac

SEQ ID NO: 1196915 - RNA, 19 nt, Homo sapiens
  misc_RNA (1)...(19): siRNA sense strand
gaaacaagauggucaaagc

SEQ ID NO: 1196916 - RNA, 19 nt, Homo sapiens
  misc_RNA (1)...(19): siRNA sense strand
caacacugauugacacauu

SEQ ID NO: 1196917 - RNA, 19 nt, Homo sapiens
  misc_RNA (1)...(19): siRNA sense strand
uaagagacuucaccaagaa

SEQ ID NO: 1196918 - RNA, 19 nt, Homo sapiens
  misc_RNA (1)...(19): siRNA sense strand
gauuaagcguucucucuuu

SEQ ID NO: 1196919 - RNA, 19 nt, Homo sapiens
  misc_RNA (1)...(19): siRNA sense strand
ugaagaaccuugacagcaa

SEQ ID NO: 1196920 - RNA, 19 nt, Homo sapiens
  misc_RNA (1)...(19): siRNA sense strand
gaaauugaccauugugaau

SEQ ID NO: 1196921 - RNA, 19 nt, Homo sapiens
  misc_RNA (1)...(19): siRNA sense strand
gaaagcuaccuccgagaua

SEQ ID NO: 1196922 - RNA, 19 nt, Homo sapiens
  misc_RNA (1)...(19): siRNA sense strand
ggaaaugggcuuuacagau

SEQ ID NO: 1196923 - RNA, 19 nt, Homo sapiens
  misc_RNA (1)...(19): siRNA sense strand
gaagaagaaaugaaacaga

SEQ ID NO: 1196924 - RNA, 19 nt, Homo sapiens
  misc_RNA (1)...(19): siRNA sense strand
cauaugaacuccaggaaag

SEQ ID NO: 1196925 - RNA, 19 nt, Homo sapiens
  misc_RNA (1)...(19): siRNA sense strand
ggaaggacaaggaccguaa

SEQ ID NO: 1196926 - RNA, 19 nt, Homo sapiens
  misc_RNA (1)...(19): siRNA sense strand
aaaccacugugacuuugua

SEQ ID NO: 1196927 - RNA, 19 nt, Homo sapiens
  misc_RNA (1)...(19): siRNA sense strand
gaagccauauugaaagaag

SEQ ID NO: 1196928 - RNA, 19 nt, Homo sapiens
  misc_RNA (1)...(19): siRNA sense strand
gaagaaaugaaacagaugu

SEQ ID NO: 1196929 - RNA, 19 nt, Homo sapiens
  misc_RNA (1)...(19): siRNA sense strand
agaucaagcucaugaguga

SEQ ID NO: 1196930 - RNA, 19 nt, Homo sapiens
  misc_RNA (1)...(19): siRNA sense strand
uuaagagacuucaccaaga

SEQ ID NO: 1196931 - RNA, 19 nt, Homo sapiens
  misc_RNA (1)...(19): siRNA sense strand
gagaaagaagccauauuga

SEQ ID NO: 1196932 - RNA, 19 nt, Homo sapiens
  misc_RNA (1)...(19): siRNA sense strand
gcagcaaccugaggaagga

SEQ ID NO: 1196933 - RNA, 19 nt, Homo sapiens
  misc_RNA (1)...(19): siRNA sense strand
gagaaugaagcuugaagaa

SEQ ID NO: 1196934 - RNA, 19 nt, Homo sapiens
  misc_RNA (1)...(19): siRNA sense strand
gacagcaagguaaacauua

SEQ ID NO: 1196935 - RNA, 19 nt, Homo sapiens
  misc_RNA (1)...(19): siRNA sense strand
gaugaugacacuauugcua

SEQ ID NO: 1196936 - RNA, 19 nt, Homo sapiens
  misc_RNA (1)...(19): siRNA sense strand
gacuaugaauccucacauu

SEQ ID NO: 1196937 - RNA, 19 nt, Homo sapiens
  misc_RNA (1)...(19): siRNA sense strand
uuaaagcucagacauauga

SEQ ID NO: 1196938 - RNA, 19 nt, Homo sapiens
  misc_RNA (1)...(19): siRNA sense strand
ugaaagaagcugagagaga

SEQ ID NO: 1196939 - RNA, 19 nt, Homo sapiens
  misc_RNA (1)...(19): siRNA sense strand
gcugcaaacuggaggaaau

SEQ ID NO: 1196940 - RNA, 19 nt, Homo sapiens
  misc_RNA (1)...(19): siRNA sense strand
caacggaugaugacacuau

SEQ ID NO: 1196941 - RNA, 19 nt, Homo sapiens
  misc_RNA (1)...(19): siRNA sense strand
aagcagauacgguuucuaa

SEQ ID NO: 1196942 - RNA, 19 nt, Homo sapiens
  misc_RNA (1)...(19): siRNA sense strand
gcuuuaauauucucugugu

SEQ ID NO: 1196943 - RNA, 19 nt, Homo sapiens
  misc_RNA (1)...(19): siRNA sense strand
agaaagaagccauauugaa

SEQ ID NO: 1196944 - RNA, 19 nt, Homo sapiens
  misc_RNA (1)...(19): siRNA sense strand
gaggaaggaagaagaaaug

SEQ ID NO: 1196945 - RNA, 19 nt, Homo sapiens
  misc_RNA (1)...(19): siRNA sense strand
gacuaugucuggccauguu

SEQ ID NO: 1196946 - RNA, 19 nt, Homo sapiens
  misc_RNA (1)...(19): siRNA sense strand
ggaaggaagaagaaaugaa

SEQ ID NO: 1196947 - RNA, 19 nt, Homo sapiens
  misc_RNA (1)...(19): siRNA sense strand
ggacaaggaccguaagaac

SEQ ID NO: 1196948 - RNA, 19 nt, Homo sapiens
  misc_RNA (1)...(19): siRNA sense strand
gguuucugcuuuaauauuc

SEQ ID NO: 1196949 - RNA, 19 nt, Homo sapiens
  misc_RNA (1)...(19): siRNA sense strand
guaaacauuauaccaguga

SEQ ID NO: 1196950 - RNA, 19 nt, Homo sapiens
  misc_RNA (1)...(19): siRNA sense strand
auuaagcguucucucuuua

SEQ ID NO: 1196951 - RNA, 19 nt, Homo sapiens
  misc_RNA (1)...(19): siRNA sense strand
ccaggaaaguaauguucaa

SEQ ID NO: 1196952 - RNA, 19 nt, Homo sapiens
  misc_RNA (1)...(19): siRNA sense strand
aagaagccauauugaaaga

SEQ ID NO: 1196953 - RNA, 19 nt, Homo sapiens
  misc_RNA (1)...(19): siRNA sense strand
gaaaaccacugugacuuug

SEQ ID NO: 1196954 - RNA, 19 nt, Homo sapiens
  misc_RNA (1)...(19): siRNA sense strand
cagcaauggcguccagaua

SEQ ID NO: 1196955 - RNA, 19 nt, Homo sapiens
  misc_RNA (1)...(19): siRNA sense strand
aaagcuaccuccgagauau

SEQ ID NO: 1196956 - RNA, 19 nt, Homo sapiens
  misc_RNA (1)...(19): siRNA sense strand
gaaguauggaugagguaaa

SEQ ID NO: 1196957 - RNA, 19 nt, Homo sapiens
  misc_RNA (1)...(19): siRNA sense strand
ccaagaagaacugaagauu

SEQ ID NO: 1196958 - RNA, 19 nt, Homo sapiens
  misc_RNA (1)...(19): siRNA sense strand
acagcaagguaaacauuau

SEQ ID NO: 1196959 - RNA, 19 nt, Homo sapiens
  misc_RNA (1)...(19): siRNA sense strand
agagagcuaccaaccaaua

SEQ ID NO: 1196960 - RNA, 19 nt, Homo sapiens
  misc_RNA (1)...(19): siRNA sense strand
gugugucucuacuucauuu

SEQ ID NO: 1196961 - RNA, 19 nt, Homo sapiens
  misc_RNA (1)...(19): siRNA sense strand
acuuaaagcucagacauau

SEQ ID NO: 1196962 - RNA, 19 nt, Homo sapiens
  misc_RNA (1)...(19): siRNA sense strand
gcagauacgguuucuaaaa

SEQ ID NO: 1196963 - RNA, 19 nt, Homo sapiens
  misc_RNA (1)...(19): siRNA sense strand
gagcuaccaaccaauaguu

SEQ ID NO: 1196964 - RNA, 19 nt, Homo sapiens
  misc_RNA (1)...(19): siRNA sense strand
ugacagcaagguaaacauu

SEQ ID NO: 1196965 - RNA, 19 nt, Homo sapiens
  misc_RNA (1)...(19): siRNA sense strand
gaacuccaggaaaguaaug

SEQ ID NO: 1196966 - RNA, 19 nt, Homo sapiens
  misc_RNA (1)...(19): siRNA sense strand
gagaaaacauucguucguu

SEQ ID NO: 1196967 - RNA, 19 nt, Homo sapiens
  misc_RNA (1)...(19): siRNA sense strand
ggaaguauggaugagguaa

SEQ ID NO: 1196968 - RNA, 19 nt, Homo sapiens
  misc_RNA (1)...(19): siRNA sense strand
cagcaagguaaacauuaua

SEQ ID NO: 1196969 - RNA, 19 nt, Homo sapiens
  misc_RNA (1)...(19): siRNA sense strand
gagcuacaggccaaauuug

SEQ ID NO: 1196970 - RNA, 19 nt, Homo sapiens
  misc_RNA (1)...(19): siRNA sense strand
aagagagaaugaagcuuga

SEQ ID NO: 1196971 - RNA, 19 nt, Homo sapiens
  misc_RNA (1)...(19): siRNA sense strand
uaaagaagagagcuaccaa

SEQ ID NO: 1196972 - RNA, 19 nt, Homo sapiens
  misc_RNA (1)...(19): siRNA sense strand
gagaagacuuuuggaagaa

SEQ ID NO: 1196973 - RNA, 19 nt, Homo sapiens
  misc_RNA (1)...(19): siRNA sense strand
ugcaaugaauggacaguug

SEQ ID NO: 1196974 - RNA, 19 nt, Homo sapiens
  misc_RNA (1)...(19): siRNA sense strand
caaagcagauacgguuucu

SEQ ID NO: 1196975 - RNA, 19 nt, Homo sapiens
  misc_RNA (1)...(19): siRNA sense strand
ugaaauugaccauugugaa

SEQ ID NO: 1196976 - RNA, 19 nt, Homo sapiens
  misc_RNA (1)...(19): siRNA sense strand
ccaugugugucucuacuuc

SEQ ID NO: 1196977 - RNA, 19 nt, Homo sapiens
  misc_RNA (1)...(19): siRNA sense strand
ugaggccuaucuccaagaa

SEQ ID NO: 1196978 - RNA, 19 nt, Homo sapiens
  misc_RNA (1)...(19): siRNA sense strand
acauagaugcucaguuuga

SEQ ID NO: 1196979 - RNA, 19 nt, Homo sapiens
  misc_RNA (1)...(19): siRNA sense strand
ccaaauuugagcaccuuaa

SEQ ID NO: 1196980 - RNA, 19 nt, Homo sapiens
  misc_RNA (1)...(19): siRNA sense strand
agagaccuaugaagccaaa

SEQ ID NO: 1196981 - RNA, 19 nt, Homo sapiens
  misc_RNA (1)...(19): siRNA sense strand
gaauggacaguugccguuu

SEQ ID NO: 1196982 - RNA, 19 nt, Homo sapiens
  misc_RNA (1)...(19): siRNA sense strand
aggccuaucuccaagaaga

SEQ ID NO: 1196983 - RNA, 19 nt, Homo sapiens
  misc_RNA (1)...(19): siRNA sense strand
gaaaacauucguucguuga

SEQ ID NO: 1196984 - RNA, 19 nt, Homo sapiens
  misc_RNA (1)...(19): siRNA sense strand
agaaugaagcuugaagaaa

SEQ ID NO: 1196985 - RNA, 19 nt, Homo sapiens
  misc_RNA (1)...(19): siRNA sense strand
cugauugacacauuguuua

SEQ ID NO: 1196986 - RNA, 19 nt, Homo sapiens
  misc_RNA (1)...(19): siRNA sense strand
cgacaggccacucucugaa

SEQ ID NO: 1196987 - RNA, 19 nt, Homo sapiens
  misc_RNA (1)...(19): siRNA sense strand
ggaagaagaaauaauugcu

SEQ ID NO: 1196988 - RNA, 19 nt, Homo sapiens
  misc_RNA (1)...(19): siRNA sense strand
acaggccacucucugaaga

SEQ ID NO: 1196989 - RNA, 19 nt, Homo sapiens
  misc_RNA (1)...(19): siRNA sense strand
gagagcuacaggccaaauu

SEQ ID NO: 1196990 - RNA, 19 nt, Homo sapiens
  misc_RNA (1)...(19): siRNA sense strand
aacauucguucguugacua

SEQ ID NO: 1196991 - RNA, 19 nt, Homo sapiens
  misc_RNA (1)...(19): siRNA sense strand
aaagaagccauauugaaag

SEQ ID NO: 1196992 - RNA, 19 nt, Homo sapiens
  misc_RNA (1)...(19): siRNA sense strand
gcaagguuucugcuuuaau

SEQ ID NO: 1196993 - RNA, 19 nt, Homo sapiens
  misc_RNA (1)...(19): siRNA sense strand
gaccguaagaacuccaauu

SEQ ID NO: 1196994 - RNA, 19 nt, Homo sapiens
  misc_RNA (1)...(19): siRNA sense strand
gacaaggaccguaagaacu

SEQ ID NO: 1196995 - RNA, 19 nt, Homo sapiens
  misc_RNA (1)...(19): siRNA sense strand
gauccauucagcaagguuu

SEQ ID NO: 1196996 - RNA, 19 nt, Homo sapiens
  misc_RNA (1)...(19): siRNA sense strand
gaucagcuggugaacagau

SEQ ID NO: 1196997 - RNA, 19 nt, Homo sapiens
  misc_RNA (1)...(19): siRNA sense strand
aaaggagaaagaagccaua

SEQ ID NO: 1196998 - RNA, 19 nt, Homo sapiens
  misc_RNA (1)...(19): siRNA sense strand
gcgaguaaaggagaaagaa

SEQ ID NO: 1196999 - RNA, 19 nt, Homo sapiens
  misc_RNA (1)...(19): siRNA sense strand
ucagaggaaggaagaagaa

SEQ ID NO: 1197000 - RNA, 19 nt, Homo sapiens
  misc_RNA (1)...(19): siRNA sense strand
agagaagacuuuuggaaga

SEQ ID NO: 1197001 - RNA, 19 nt, Homo sapiens
  misc_RNA (1)...(19): siRNA sense strand
gaaaugggcuuuacagaug

SEQ ID NO: 1197002 - RNA, 19 nt, Homo sapiens
  misc_RNA (1)...(19): siRNA sense strand
gaaagaagccauauugaaa

SEQ ID NO: 1197003 - RNA, 19 nt, Homo sapiens
  misc_RNA (1)...(19): siRNA sense strand
gaagagagcuaccaaccaa

SEQ ID NO: 1197004 - RNA, 19 nt, Homo sapiens
  misc_RNA (1)...(19): siRNA sense strand
cuacauagaugcucaguuu

SEQ ID NO: 1197005 - RNA, 19 nt, Homo sapiens
  misc_RNA (1)...(19): siRNA sense strand
ggaaaguaauguucaauug

SEQ ID NO: 1197006 - RNA, 19 nt, Homo sapiens
  misc_RNA (1)...(19): siRNA sense strand
caagguuucugcuuuaaua

SEQ ID NO: 1197007 - RNA, 19 nt, Homo sapiens
  misc_RNA (1)...(19): siRNA sense strand
gcaauggcguccagauaua

SEQ ID NO: 1197008 - RNA, 19 nt, Homo sapiens
  misc_RNA (1)...(19): siRNA sense strand
caagaagaacugaagauua

SEQ ID NO: 1197009 - RNA, 19 nt, Homo sapiens
  misc_RNA (1)...(19): siRNA sense strand
ggagaaagaagccauauug

SEQ ID NO: 1197010 - RNA, 19 nt, Homo sapiens
  misc_RNA (1)...(19): siRNA sense strand
gaaggaagaagaaaugaaa

SEQ ID NO: 1197011 - RNA, 19 nt, Homo sapiens
  misc_RNA (1)...(19): siRNA sense strand
ggucaacgcugcaaugaau

SEQ ID NO: 1197012 - RNA, 19 nt, Homo sapiens
  misc_RNA (1)...(19): siRNA sense strand
gaaugaagcuugaagaaaa

SEQ ID NO: 1197013 - RNA, 19 nt, Homo sapiens
  misc_RNA (1)...(19): siRNA sense strand
gaacagauccauucagcaa

SEQ ID NO: 1197014 - RNA, 19 nt, Homo sapiens
  misc_RNA (1)...(19): siRNA sense strand
ggucaaagcucgccaguac

SEQ ID NO: 1197015 - RNA, 19 nt, Homo sapiens
  misc_RNA (1)...(19): siRNA sense strand
gaaacaagauggucaaagc

SEQ ID NO: 1197016 - RNA, 19 nt, Homo sapiens
  misc_RNA (1)...(19): siRNA sense strand
caacacugauugacacauu

SEQ ID NO: 1197017 - RNA, 19 nt, Homo sapiens
  misc_RNA (1)...(19): siRNA sense strand
uaagagacuucaccaagaa

SEQ ID NO: 1197018 - RNA, 19 nt, Homo sapiens
  misc_RNA (1)...(19): siRNA sense strand
gauuaagcguucucucuuu

SEQ ID NO: 1197019 - RNA, 19 nt, Homo sapiens
  misc_RNA (1)...(19): siRNA sense strand
ugaagaaccuugacagcaa

SEQ ID NO: 1197020 - RNA, 19 nt, Homo sapiens
  misc_RNA (1)...(19): siRNA sense strand
gaaauugaccauugugaau

SEQ ID NO: 1197021 - RNA, 19 nt, Homo sapiens
  misc_RNA (1)...(19): siRNA sense strand
gaaagcuaccuccgagaua

SEQ ID NO: 1197022 - RNA, 19 nt, Homo sapiens
  misc_RNA (1)...(19): siRNA sense strand
ggaaaugggcuuuacagau

SEQ ID NO: 1197023 - RNA, 19 nt, Homo sapiens
  misc_RNA (1)...(19): siRNA sense strand
gaagaagaaaugaaacaga

SEQ ID NO: 1197024 - RNA, 19 nt, Homo sapiens
  misc_RNA (1)...(19): siRNA sense strand
cauaugaacuccaggaaag

SEQ ID NO: 1197025 - RNA, 19 nt, Homo sapiens
  misc_RNA (1)...(19): siRNA sense strand
ggaaggacaaggaccguaa

SEQ ID NO: 1197026 - RNA, 19 nt, Homo sapiens
  misc_RNA (1)...(19): siRNA sense strand
aaaccacugugacuuugua

SEQ ID NO: 1197027 - RNA, 19 nt, Homo sapiens
  misc_RNA (1)...(19): siRNA sense strand
gaagccauauugaaagaag

SEQ ID NO: 1197028 - RNA, 19 nt, Homo sapiens
  misc_RNA (1)...(19): siRNA sense strand
gaagaaaugaaacagaugu

SEQ ID NO: 1197029 - RNA, 19 nt, Homo sapiens
  misc_RNA (1)...(19): siRNA sense strand
agaucaagcucaugaguga

SEQ ID NO: 1197030 - RNA, 19 nt, Homo sapiens
  misc_RNA (1)...(19): siRNA sense strand
uuaagagacuucaccaaga

SEQ ID NO: 1197031 - RNA, 19 nt, Homo sapiens
  misc_RNA (1)...(19): siRNA sense strand
gagaaagaagccauauuga

SEQ ID NO: 1197032 - RNA, 19 nt, Homo sapiens
  misc_RNA (1)...(19): siRNA sense strand
gcagcaaccugaggaagga

SEQ ID NO: 1197033 - RNA, 19 nt, Homo sapiens
  misc_RNA (1)...(19): siRNA sense strand
gagaaugaagcuugaagaa

SEQ ID NO: 1197034 - RNA, 19 nt, Homo sapiens
  misc_RNA (1)...(19): siRNA sense strand
gacagcaagguaaacauua

SEQ ID NO: 1197035 - RNA, 19 nt, Homo sapiens
  misc_RNA (1)...(19): siRNA sense strand
gaugaugacacuauugcua

SEQ ID NO: 1197036 - RNA, 19 nt, Homo sapiens
  misc_RNA (1)...(19): siRNA sense strand
gacuaugaauccucacauu

SEQ ID NO: 1197037 - RNA, 19 nt, Homo sapiens
  misc_RNA (1)...(19): siRNA sense strand
uuaaagcucagacauauga

SEQ ID NO: 1197038 - RNA, 19 nt, Homo sapiens
  misc_RNA (1)...(19): siRNA sense strand
ugaaagaagcugagagaga

SEQ ID NO: 1197039 - RNA, 19 nt, Homo sapiens
  misc_RNA (1)...(19): siRNA sense strand
gcugcaaacuggaggaaau

SEQ ID NO: 1197040 - RNA, 19 nt, Homo sapiens
  misc_RNA (1)...(19): siRNA sense strand
caacggaugaugacacuau

SEQ ID NO: 1197041 - RNA, 19 nt, Homo sapiens
  misc_RNA (1)...(19): siRNA sense strand
aagcagauacgguuucuaa

SEQ ID NO: 1197042 - RNA, 19 nt, Homo sapiens
  misc_RNA (1)...(19): siRNA sense strand
gcuuuaauauucucugugu

SEQ ID NO: 1197043 - RNA, 19 nt, Homo sapiens
  misc_RNA (1)...(19): siRNA sense strand
agaaagaagccauauugaa

SEQ ID NO: 1197044 - RNA, 19 nt, Homo sapiens
  misc_RNA (1)...(19): siRNA sense strand
gaggaaggaagaagaaaug

SEQ ID NO: 1197045 - RNA, 19 nt, Homo sapiens
  misc_RNA (1)...(19): siRNA sense strand
gacuaugucuggccauguu

SEQ ID NO: 1197046 - RNA, 19 nt, Homo sapiens
  misc_RNA (1)...(19): siRNA sense strand
ggaaggaagaagaaaugaa

SEQ ID NO: 1197047 - RNA, 19 nt, Homo sapiens
  misc_RNA (1)...(19): siRNA sense strand
ggacaaggaccguaagaac

SEQ ID NO: 1197048 - RNA, 19 nt, Homo sapiens
  misc_RNA (1)...(19): siRNA sense strand
gguuucugcuuuaauauuc

SEQ ID NO: 1197049 - RNA, 19 nt, Homo sapiens
  misc_RNA (1)...(19): siRNA sense strand
guaaacauuauaccaguga

SEQ ID NO: 1197050 - RNA, 19 nt, Homo sapiens
  misc_RNA (1)...(19): siRNA sense strand
auuaagcguucucucuuua

SEQ ID NO: 1197051 - RNA, 19 nt, Homo sapiens
  misc_RNA (1)...(19): siRNA sense strand
ccaggaaaguaauguucaa

SEQ ID NO: 1197052 - RNA, 19 nt, Homo sapiens
  misc_RNA (1)...(19): siRNA sense strand
aagaagccauauugaaaga

SEQ ID NO: 1197053 - RNA, 19 nt, Homo sapiens
  misc_RNA (1)...(19): siRNA sense strand
gaaaaccacugugacuuug

SEQ ID NO: 1197054 - RNA, 19 nt, Homo sapiens
  misc_RNA (1)...(19): siRNA sense strand
cagcaauggcguccagaua

SEQ ID NO: 1197055 - RNA, 19 nt, Homo sapiens
  misc_RNA (1)...(19): siRNA sense strand
aaagcuaccuccgagauau

SEQ ID NO: 1197056 - RNA, 19 nt, Homo sapiens
  misc_RNA (1)...(19): siRNA sense strand
gaaguauggaugagguaaa

SEQ ID NO: 1197057 - RNA, 19 nt, Homo sapiens
  misc_RNA (1)...(19): siRNA sense strand
ccaagaagaacugaagauu

SEQ ID NO: 1197058 - RNA, 19 nt, Homo sapiens
  misc_RNA (1)...(19): siRNA sense strand
acagcaagguaaacauuau

SEQ ID NO: 1197059 - RNA, 19 nt, Homo sapiens
  misc_RNA (1)...(19): siRNA sense strand
agagagcuaccaaccaaua

SEQ ID NO: 1197060 - RNA, 19 nt, Homo sapiens
  misc_RNA (1)...(19): siRNA sense strand
gugugucucuacuucauuu

SEQ ID NO: 1197061 - RNA, 19 nt, Homo sapiens
  misc_RNA (1)...(19): siRNA sense strand
acuuaaagcucagacauau

SEQ ID NO: 1197062 - RNA, 19 nt, Homo sapiens
  misc_RNA (1)...(19): siRNA sense strand
gcagauacgguuucuaaaa

SEQ ID NO: 1197063 - RNA, 19 nt, Homo sapiens
  misc_RNA (1)...(19): siRNA sense strand
gagcuaccaaccaauaguu

SEQ ID NO: 1197064 - RNA, 19 nt, Homo sapiens
  misc_RNA (1)...(19): siRNA sense strand
ugacagcaagguaaacauu

SEQ ID NO: 1197065 - RNA, 19 nt, Homo sapiens
  misc_RNA (1)...(19): siRNA sense strand
gaacuccaggaaaguaaug

SEQ ID NO: 1197066 - RNA, 19 nt, Homo sapiens
  misc_RNA (1)...(19): siRNA sense strand
gagaaaacauucguucguu

SEQ ID NO: 1197067 - RNA, 19 nt, Homo sapiens
  misc_RNA (1)...(19): siRNA sense strand
ggaaguauggaugagguaa

SEQ ID NO: 1197068 - RNA, 19 nt, Homo sapiens
  misc_RNA (1)...(19): siRNA sense strand
cagcaagguaaacauuaua

SEQ ID NO: 1197069 - RNA, 19 nt, Homo sapiens
  misc_RNA (1)...(19): siRNA sense strand
gagcuacaggccaaauuug

SEQ ID NO: 1197070 - RNA, 19 nt, Homo sapiens
  misc_RNA (1)...(19): siRNA sense strand
aagagagaaugaagcuuga

SEQ ID NO: 1197071 - RNA, 19 nt, Homo sapiens
  misc_RNA (1)...(19): siRNA sense strand
uaaagaagagagcuaccaa

SEQ ID NO: 1197072 - RNA, 19 nt, Homo sapiens
  misc_RNA (1)...(19): siRNA sense strand
gagaagacuuuuggaagaa

SEQ ID NO: 1197073 - RNA, 19 nt, Homo sapiens
  misc_RNA (1)...(19): siRNA sense strand
ugcaaugaauggacaguug

SEQ ID NO: 1197074 - RNA, 19 nt, Homo sapiens
  misc_RNA (1)...(19): siRNA sense strand
caaagcagauacgguuucu

SEQ ID NO: 1197075 - RNA, 19 nt, Homo sapiens
  misc_RNA (1)...(19): siRNA sense strand
ugaaauugaccauugugaa

SEQ ID NO: 1197076 - RNA, 19 nt, Homo sapiens
  misc_RNA (1)...(19): siRNA sense strand
ccaugugugucucuacuuc

SEQ ID NO: 1197077 - RNA, 19 nt, Homo sapiens
  misc_RNA (1)...(19): siRNA sense strand
ugaggccuaucuccaagaa

SEQ ID NO: 1197078 - RNA, 19 nt, Homo sapiens
  misc_RNA (1)...(19): siRNA sense strand
acauagaugcucaguuuga

SEQ ID NO: 1197079 - RNA, 19 nt, Homo sapiens
  misc_RNA (1)...(19): siRNA sense strand
ccaaauuugagcaccuuaa

SEQ ID NO: 1197080 - RNA, 19 nt, Homo sapiens
  misc_RNA (1)...(19): siRNA sense strand
agagaccuaugaagccaaa

SEQ ID NO: 1197081 - RNA, 19 nt, Homo sapiens
  misc_RNA (1)...(19): siRNA sense strand
gaauggacaguugccguuu

SEQ ID NO: 1197082 - RNA, 19 nt, Homo sapiens
  misc_RNA (1)...(19): siRNA sense strand
aggccuaucuccaagaaga

SEQ ID NO: 1197083 - RNA, 19 nt, Homo sapiens
  misc_RNA (1)...(19): siRNA sense strand
gaaaacauucguucguuga

SEQ ID NO: 1197084 - RNA, 19 nt, Homo sapiens
  misc_RNA (1)...(19): siRNA sense strand
agaaugaagcuugaagaaa

SEQ ID NO: 1197085 - RNA, 19 nt, Homo sapiens
  misc_RNA (1)...(19): siRNA sense strand
cugauugacacauuguuua

SEQ ID NO: 1197086 - RNA, 19 nt, Homo sapiens
  misc_RNA (1)...(19): siRNA sense strand
cgacaggccacucucugaa

SEQ ID NO: 1197087 - RNA, 19 nt, Homo sapiens
  misc_RNA (1)...(19): siRNA sense strand
ggaagaagaaauaauugcu

SEQ ID NO: 1197088 - RNA, 19 nt, Homo sapiens
  misc_RNA (1)...(19): siRNA sense strand
acaggccacucucugaaga

SEQ ID NO: 1197089 - RNA, 19 nt, Homo sapiens
  misc_RNA (1)...(19): siRNA sense strand
gagagcuacaggccaaauu

SEQ ID NO: 1197090 - RNA, 19 nt, Homo sapiens
  misc_RNA (1)...(19): siRNA sense strand
aacauucguucguugacua

SEQ ID NO: 1197091 - RNA, 19 nt, Homo sapiens
  misc_RNA (1)...(19): siRNA sense strand
aaagaagccauauugaaag

SEQ ID NO: 1197092 - RNA, 19 nt, Homo sapiens
  misc_RNA (1)...(19): siRNA sense strand
gcaagguuucugcuuuaau

SEQ ID NO: 1197093 - RNA, 19 nt, Homo sapiens
  misc_RNA (1)...(19): siRNA sense strand
gaccguaagaacuccaauu

SEQ ID NO: 1197094 - RNA, 19 nt, Homo sapiens
  misc_RNA (1)...(19): siRNA sense strand
gacaaggaccguaagaacu

SEQ ID NO: 1197095 - RNA, 19 nt, Homo sapiens
  misc_RNA (1)...(19): siRNA sense strand
gauccauucagcaagguuu

SEQ ID NO: 1197096 - RNA, 19 nt, Homo sapiens
  misc_RNA (1)...(19): siRNA sense strand
gaucagcuggugaacagau

SEQ ID NO: 1197097 - RNA, 19 nt, Homo sapiens
  misc_RNA (1)...(19): siRNA sense strand
aaaggagaaagaagccaua

SEQ ID NO: 1197098 - RNA, 19 nt, Homo sapiens
  misc_RNA (1)...(19): siRNA sense strand
gcgaguaaaggagaaagaa

SEQ ID NO: 1197099 - RNA, 19 nt, Homo sapiens
  misc_RNA (1)...(19): siRNA sense strand
ucagaggaaggaagaagaa

SEQ ID NO: 1197100 - RNA, 19 nt, Homo sapiens
  misc_RNA (1)...(19): siRNA sense strand
agagaagacuuuuggaaga

SEQ ID NO: 1197101 - RNA, 19 nt, Homo sapiens
  misc_RNA (1)...(19): siRNA sense strand
ggcaaugucuguacuaaua

SEQ ID NO: 1197102 - RNA, 19 nt, Homo sapiens
  misc_RNA (1)...(19): siRNA sense strand
gaagggcaaugaaaccaua

SEQ ID NO: 1197103 - RNA, 19 nt, Homo sapiens
  misc_RNA (1)...(19): siRNA sense strand
gagaagcugugaacaauau

SEQ ID NO: 1197104 - RNA, 19 nt, Homo sapiens
  misc_RNA (1)...(19): siRNA sense strand
ggacacaaacggacaauaa

SEQ ID NO: 1197105 - RNA, 19 nt, Homo sapiens
  misc_RNA (1)...(19): siRNA sense strand
ccaaauggcuaguggauug

SEQ ID NO: 1197106 - RNA, 19 nt, Homo sapiens
  misc_RNA (1)...(19): siRNA sense strand
cgauacaacuccuaugaua

SEQ ID NO: 1197107 - RNA, 19 nt, Homo sapiens
  misc_RNA (1)...(19): siRNA sense strand
ugaaacaacugaccagauu

SEQ ID NO: 1197108 - RNA, 19 nt, Homo sapiens
  misc_RNA (1)...(19): siRNA sense strand
gcaagaggcacgaaguuua

SEQ ID NO: 1197109 - RNA, 19 nt, Homo sapiens
  misc_RNA (1)...(19): siRNA sense strand
ggacaucuauauaucagaa

SEQ ID NO: 1197110 - RNA, 19 nt, Homo sapiens
  misc_RNA (1)...(19): siRNA sense strand
ugaaagacuuggucaauga

SEQ ID NO: 1197111 - RNA, 19 nt, Homo sapiens
  misc_RNA (1)...(19): siRNA sense strand
ugaguugccugaagaauuu

SEQ ID NO: 1197112 - RNA, 19 nt, Homo sapiens
  misc_RNA (1)...(19): siRNA sense strand
agaaagugguugcuuauuu

SEQ ID NO: 1197113 - RNA, 19 nt, Homo sapiens
  misc_RNA (1)...(19): siRNA sense strand
ccagcaaacugaagaauau

SEQ ID NO: 1197114 - RNA, 19 nt, Homo sapiens
  misc_RNA (1)...(19): siRNA sense strand
ucaaugcuguggacuauuu

SEQ ID NO: 1197115 - RNA, 19 nt, Homo sapiens
  misc_RNA (1)...(19): siRNA sense strand
gaagaacauucaaauccaa

SEQ ID NO: 1197116 - RNA, 19 nt, Homo sapiens
  misc_RNA (1)...(19): siRNA sense strand
uagagaaagugguugcuua

SEQ ID NO: 1197117 - RNA, 19 nt, Homo sapiens
  misc_RNA (1)...(19): siRNA sense strand
ggaggucacugaaauuuua

SEQ ID NO: 1197118 - RNA, 19 nt, Homo sapiens
  misc_RNA (1)...(19): siRNA sense strand
gcaaauccuucucuacuca

SEQ ID NO: 1197119 - RNA, 19 nt, Homo sapiens
  misc_RNA (1)...(19): siRNA sense strand
gagcaucacuucacugaca

SEQ ID NO: 1197120 - RNA, 19 nt, Homo sapiens
  misc_RNA (1)...(19): siRNA sense strand
ggagagaauucuuauugga

SEQ ID NO: 1197121 - RNA, 19 nt, Homo sapiens
  misc_RNA (1)...(19): siRNA sense strand
gcacaacgcugagcauuac

SEQ ID NO: 1197122 - RNA, 19 nt, Homo sapiens
  misc_RNA (1)...(19): siRNA sense strand
gcuaggagauugagcauca

SEQ ID NO: 1197123 - RNA, 19 nt, Homo sapiens
  misc_RNA (1)...(19): siRNA sense strand
ugagugagaucaagacuga

SEQ ID NO: 1197124 - RNA, 19 nt, Homo sapiens
  misc_RNA (1)...(19): siRNA sense strand
gauaagauaaggcuguaua

SEQ ID NO: 1197125 - RNA, 19 nt, Homo sapiens
  misc_RNA (1)...(19): siRNA sense strand
gaaagugguugcuuauuuu

SEQ ID NO: 1197126 - RNA, 19 nt, Homo sapiens
  misc_RNA (1)...(19): siRNA sense strand
ggucagaaaugaaaucaca

SEQ ID NO: 1197127 - RNA, 19 nt, Homo sapiens
  misc_RNA (1)...(19): siRNA sense strand
ggucuuugcugcuuccuuu

SEQ ID NO: 1197128 - RNA, 19 nt, Homo sapiens
  misc_RNA (1)...(19): siRNA sense strand
caacaggaccaaccaguaa

SEQ ID NO: 1197129 - RNA, 19 nt, Homo sapiens
  misc_RNA (1)...(19): siRNA sense strand
gaaggcaucaccacacuuu

SEQ ID NO: 1197130 - RNA, 19 nt, Homo sapiens
  misc_RNA (1)...(19): siRNA sense strand
gaccaacuguaaauucgua

SEQ ID NO: 1197131 - RNA, 19 nt, Homo sapiens
  misc_RNA (1)...(19): siRNA sense strand
agauaaggcuguauaaugu

SEQ ID NO: 1197132 - RNA, 19 nt, Homo sapiens
  misc_RNA (1)...(19): siRNA sense strand
gcagauacaagaaggaauu

SEQ ID NO: 1197133 - RNA, 19 nt, Homo sapiens
  misc_RNA (1)...(19): siRNA sense strand
ccaaaguucucgcccacua

SEQ ID NO: 1197134 - RNA, 19 nt, Homo sapiens
  misc_RNA (1)...(19): siRNA sense strand
caaaggaguggauguguaa

SEQ ID NO: 1197135 - RNA, 19 nt, Homo sapiens
  misc_RNA (1)...(19): siRNA sense strand
ucaaaggaguggaugugua

SEQ ID NO: 1197136 - RNA, 19 nt, Homo sapiens
  misc_RNA (1)...(19): siRNA sense strand
ucacuucacugacaggaaa

SEQ ID NO: 1197137 - RNA, 19 nt, Homo sapiens
  misc_RNA (1)...(19): siRNA sense strand
ccacuauccucagaauaua

SEQ ID NO: 1197138 - RNA, 19 nt, Homo sapiens
  misc_RNA (1)...(19): siRNA sense strand
ggagauacaacuucccuuu

SEQ ID NO: 1197139 - RNA, 19 nt, Homo sapiens
  misc_RNA (1)...(19): siRNA sense strand
gcagacacuuuaccagaug

SEQ ID NO: 1197140 - RNA, 19 nt, Homo sapiens
  misc_RNA (1)...(19): siRNA sense strand
gcuaguggauugugucaug

SEQ ID NO: 1197141 - RNA, 19 nt, Homo sapiens
  misc_RNA (1)...(19): siRNA sense strand
gagaguaccagcaaacuga

SEQ ID NO: 1197142 - RNA, 19 nt, Homo sapiens
  misc_RNA (1)...(19): siRNA sense strand
ucaagaggcuaauuugugu

SEQ ID NO: 1197143 - RNA, 19 nt, Homo sapiens
  misc_RNA (1)...(19): siRNA sense strand
gcagagacacccuguaugu

SEQ ID NO: 1197144 - RNA, 19 nt, Homo sapiens
  misc_RNA (1)...(19): siRNA sense strand
gaaaauuggucaaggcaaa

SEQ ID NO: 1197145 - RNA, 19 nt, Homo sapiens
  misc_RNA (1)...(19): siRNA sense strand
ccagggaggucacugaaau

SEQ ID NO: 1197146 - RNA, 19 nt, Homo sapiens
  misc_RNA (1)...(19): siRNA sense strand
gaugauguccuuauucaga

SEQ ID NO: 1197147 - RNA, 19 nt, Homo sapiens
  misc_RNA (1)...(19): siRNA sense strand
ugaagaugauguccuuauu

SEQ ID NO: 1197148 - RNA, 19 nt, Homo sapiens
  misc_RNA (1)...(19): siRNA sense strand
uaaugaagaugauguccuu

SEQ ID NO: 1197149 - RNA, 19 nt, Homo sapiens
  misc_RNA (1)...(19): siRNA sense strand
gcaaugcaauaaucacauc

SEQ ID NO: 1197150 - RNA, 19 nt, Homo sapiens
  misc_RNA (1)...(19): siRNA sense strand
aagcaaaucugcacagcaa

SEQ ID NO: 1197151 - RNA, 19 nt, Homo sapiens
  misc_RNA (1)...(19): siRNA sense strand
ucaccaagaagcuuuauaa

SEQ ID NO: 1197152 - RNA, 19 nt, Homo sapiens
  misc_RNA (1)...(19): siRNA sense strand
ggacagagaagagaaacaa

SEQ ID NO: 1197153 - RNA, 19 nt, Homo sapiens
  misc_RNA (1)...(19): siRNA sense strand
gaagacaaagcgcauguug

SEQ ID NO: 1197154 - RNA, 19 nt, Homo sapiens
  misc_RNA (1)...(19): siRNA sense strand
gcaacaggaccaaccagua

SEQ ID NO: 1197155 - RNA, 19 nt, Homo sapiens
  misc_RNA (1)...(19): siRNA sense strand
gaaauuccuuauccagcuu

SEQ ID NO: 1197156 - RNA, 19 nt, Homo sapiens
  misc_RNA (1)...(19): siRNA sense strand
cauuugagcuccugggauu

SEQ ID NO: 1197157 - RNA, 19 nt, Homo sapiens
  misc_RNA (1)...(19): siRNA sense strand
gcacagcaaugcagacacu

SEQ ID NO: 1197158 - RNA, 19 nt, Homo sapiens
  misc_RNA (1)...(19): siRNA sense strand
gcaagaaauuccuuaucca

SEQ ID NO: 1197159 - RNA, 19 nt, Homo sapiens
  misc_RNA (1)...(19): siRNA sense strand
cuagaaggaucacucauca

SEQ ID NO: 1197160 - RNA, 19 nt, Homo sapiens
  misc_RNA (1)...(19): siRNA sense strand
caaaucugcccgcaucuuu

SEQ ID NO: 1197161 - RNA, 19 nt, Homo sapiens
  misc_RNA (1)...(19): siRNA sense strand
ggacauacauacagauucc

SEQ ID NO: 1197162 - RNA, 19 nt, Homo sapiens
  misc_RNA (1)...(19): siRNA sense strand
uaaauucguagaaggcuua

SEQ ID NO: 1197163 - RNA, 19 nt, Homo sapiens
  misc_RNA (1)...(19): siRNA sense strand
uaucagaaaugcagcacuu

SEQ ID NO: 1197164 - RNA, 19 nt, Homo sapiens
  misc_RNA (1)...(19): siRNA sense strand
ugaagaauuuccacaguuc

SEQ ID NO: 1197165 - RNA, 19 nt, Homo sapiens
  misc_RNA (1)...(19): siRNA sense strand
gagacacccuguauguuuc

SEQ ID NO: 1197166 - RNA, 19 nt, Homo sapiens
  misc_RNA (1)...(19): siRNA sense strand
gaagaugauguccuuauuc

SEQ ID NO: 1197167 - RNA, 19 nt, Homo sapiens
  misc_RNA (1)...(19): siRNA sense strand
ggagaagcugugaacaaua

SEQ ID NO: 1197168 - RNA, 19 nt, Homo sapiens
  misc_RNA (1)...(19): siRNA sense strand
gcugagcaaugcaauaauc

SEQ ID NO: 1197169 - RNA, 19 nt, Homo sapiens
  misc_RNA (1)...(19): siRNA sense strand
gaauguagaaugaagacaa

SEQ ID NO: 1197170 - RNA, 19 nt, Homo sapiens
  misc_RNA (1)...(19): siRNA sense strand
guagaaggcuuauuaaaag

SEQ ID NO: 1197171 - RNA, 19 nt, Homo sapiens
  misc_RNA (1)...(19): siRNA sense strand
ccaccacccuugccacuug

SEQ ID NO: 1197172 - RNA, 19 nt, Homo sapiens
  misc_RNA (1)...(19): siRNA sense strand
cagcaaugcagacacuuua

SEQ ID NO: 1197173 - RNA, 19 nt, Homo sapiens
  misc_RNA (1)...(19): siRNA sense strand
caacugaccagauucuaga

SEQ ID NO: 1197174 - RNA, 19 nt, Homo sapiens
  misc_RNA (1)...(19): siRNA sense strand
gacaugaggcauauucaaa

SEQ ID NO: 1197175 - RNA, 19 nt, Homo sapiens
  misc_RNA (1)...(19): siRNA sense strand
ggacuaccagcucaaugua

SEQ ID NO: 1197176 - RNA, 19 nt, Homo sapiens
  misc_RNA (1)...(19): siRNA sense strand
cugcuucucugcuacauuu

SEQ ID NO: 1197177 - RNA, 19 nt, Homo sapiens
  misc_RNA (1)...(19): siRNA sense strand
gaucacaccguuaccauuc

SEQ ID NO: 1197178 - RNA, 19 nt, Homo sapiens
  misc_RNA (1)...(19): siRNA sense strand
guucaccacuaucaugauu

SEQ ID NO: 1197179 - RNA, 19 nt, Homo sapiens
  misc_RNA (1)...(19): siRNA sense strand
ggagaaauauaugcaagag

SEQ ID NO: 1197180 - RNA, 19 nt, Homo sapiens
  misc_RNA (1)...(19): siRNA sense strand
agaagcagcccaaucaauu

SEQ ID NO: 1197181 - RNA, 19 nt, Homo sapiens
  misc_RNA (1)...(19): siRNA sense strand
cagaaaugcagcacuuuaa

SEQ ID NO: 1197182 - RNA, 19 nt, Homo sapiens
  misc_RNA (1)...(19): siRNA sense strand
ucagaaaugcagcacuuua

SEQ ID NO: 1197183 - RNA, 19 nt, Homo sapiens
  misc_RNA (1)...(19): siRNA sense strand
gaacggcaaugucuguacu

SEQ ID NO: 1197184 - RNA, 19 nt, Homo sapiens
  misc_RNA (1)...(19): siRNA sense strand
ugaaagcuauauccacaau

SEQ ID NO: 1197185 - RNA, 19 nt, Homo sapiens
  misc_RNA (1)...(19): siRNA sense strand
gauaaggcuguauaaugua

SEQ ID NO: 1197186 - RNA, 19 nt, Homo sapiens
  misc_RNA (1)...(19): siRNA sense strand
gcaaugucuguacuaauaa

SEQ ID NO: 1197187 - RNA, 19 nt, Homo sapiens
  misc_RNA (1)...(19): siRNA sense strand
agagacacccuguauguuu

SEQ ID NO: 1197188 - RNA, 19 nt, Homo sapiens
  misc_RNA (1)...(19): siRNA sense strand
gaccagaguccuuugagaa

SEQ ID NO: 1197189 - RNA, 19 nt, Homo sapiens
  misc_RNA (1)...(19): siRNA sense strand
gcaguugcuuucuaaccaa

SEQ ID NO: 1197190 - RNA, 19 nt, Homo sapiens
  misc_RNA (1)...(19): siRNA sense strand
ccacaucuacuugauauga

SEQ ID NO: 1197191 - RNA, 19 nt, Homo sapiens
  misc_RNA (1)...(19): siRNA sense strand
gcaaaucugcacagcaaug

SEQ ID NO: 1197192 - RNA, 19 nt, Homo sapiens
  misc_RNA (1)...(19): siRNA sense strand
aagaugauguccuuauuca

SEQ ID NO: 1197193 - RNA, 19 nt, Homo sapiens
  misc_RNA (1)...(19): siRNA sense strand
guguuuaccuguguucuuu

SEQ ID NO: 1197194 - RNA, 19 nt, Homo sapiens
  misc_RNA (1)...(19): siRNA sense strand
ugaugggccuucagucaaa

SEQ ID NO: 1197195 - RNA, 19 nt, Homo sapiens
  misc_RNA (1)...(19): siRNA sense strand
agaaggaucacucaucaaa

SEQ ID NO: 1197196 - RNA, 19 nt, Homo sapiens
  misc_RNA (1)...(19): siRNA sense strand
ucagaaaucauccugcaaa

SEQ ID NO: 1197197 - RNA, 19 nt, Homo sapiens
  misc_RNA (1)...(19): siRNA sense strand
gagaagaacauucaaaucc

SEQ ID NO: 1197198 - RNA, 19 nt, Homo sapiens
  misc_RNA (1)...(19): siRNA sense strand
gagagcaguuucuuuacca

SEQ ID NO: 1197199 - RNA, 19 nt, Homo sapiens
  misc_RNA (1)...(19): siRNA sense strand
gagcagagacugaugaaaa

SEQ ID NO: 1197200 - RNA, 19 nt, Homo sapiens
  misc_RNA (1)...(19): siRNA sense strand
ggucagugaucaucccaau

SEQ ID NO: 1197201 - RNA, 19 nt, Homo sapiens
  misc_RNA (1)...(19): siRNA sense strand
ggaaucagcuaaugguaaa

SEQ ID NO: 1197202 - RNA, 19 nt, Homo sapiens
  misc_RNA (1)...(19): siRNA sense strand
agaaggagcuuuaggagaa

SEQ ID NO: 1197203 - RNA, 19 nt, Homo sapiens
  misc_RNA (1)...(19): siRNA sense strand
gguagaaccacuuaauaua

SEQ ID NO: 1197204 - RNA, 19 nt, Homo sapiens
  misc_RNA (1)...(19): siRNA sense strand
gaaugucuaucucuggaaa

SEQ ID NO: 1197205 - RNA, 19 nt, Homo sapiens
  misc_RNA (1)...(19): siRNA sense strand
gaacaagagaaacaagaaa

SEQ ID NO: 1197206 - RNA, 19 nt, Homo sapiens
  misc_RNA (1)...(19): siRNA sense strand
aggagaagcugaugucauu

SEQ ID NO: 1197207 - RNA, 19 nt, Homo sapiens
  misc_RNA (1)...(19): siRNA sense strand
gaaagaaaauugacaaguc

SEQ ID NO: 1197208 - RNA, 19 nt, Homo sapiens
  misc_RNA (1)...(19): siRNA sense strand
gcugccaccugaaacauaa

SEQ ID NO: 1197209 - RNA, 19 nt, Homo sapiens
  misc_RNA (1)...(19): siRNA sense strand
ggagcaggcugaacucgau

SEQ ID NO: 1197210 - RNA, 19 nt, Homo sapiens
  misc_RNA (1)...(19): siRNA sense strand
uaacagugaugcucaugau

SEQ ID NO: 1197211 - RNA, 19 nt, Homo sapiens
  misc_RNA (1)...(19): siRNA sense strand
acacagcaguuaaagaaug

SEQ ID NO: 1197212 - RNA, 19 nt, Homo sapiens
  misc_RNA (1)...(19): siRNA sense strand
gcagcgugcucuugaggaa

SEQ ID NO: 1197213 - RNA, 19 nt, Homo sapiens
  misc_RNA (1)...(19): siRNA sense strand
ggaacaagagaaacaagaa

SEQ ID NO: 1197214 - RNA, 19 nt, Homo sapiens
  misc_RNA (1)...(19): siRNA sense strand
gccaauagcaucuguaauc

SEQ ID NO: 1197215 - RNA, 19 nt, Homo sapiens
  misc_RNA (1)...(19): siRNA sense strand
ccaauagcaucuguaauca

SEQ ID NO: 1197216 - RNA, 19 nt, Homo sapiens
  misc_RNA (1)...(19): siRNA sense strand
guagaaccacuuaauauag

SEQ ID NO: 1197217 - RNA, 19 nt, Homo sapiens
  misc_RNA (1)...(19): siRNA sense strand
gaauuuggacuaguagaaa

SEQ ID NO: 1197218 - RNA, 19 nt, Homo sapiens
  misc_RNA (1)...(19): siRNA sense strand
uagcaucuguaaucauuga

SEQ ID NO: 1197219 - RNA, 19 nt, Homo sapiens
  misc_RNA (1)...(19): siRNA sense strand
agacuuugaugccuuaaau

SEQ ID NO: 1197220 - RNA, 19 nt, Homo sapiens
  misc_RNA (1)...(19): siRNA sense strand
gagaagcugaugucauuga

SEQ ID NO: 1197221 - RNA, 19 nt, Homo sapiens
  misc_RNA (1)...(19): siRNA sense strand
gaaacaagaaagagcugaa

SEQ ID NO: 1197222 - RNA, 19 nt, Homo sapiens
  misc_RNA (1)...(19): siRNA sense strand
ggguagaaccacuuaauau

SEQ ID NO: 1197223 - RNA, 19 nt, Homo sapiens
  misc_RNA (1)...(19): siRNA sense strand
aagagacuuugaugccuua

SEQ ID NO: 1197224 - RNA, 19 nt, Homo sapiens
  misc_RNA (1)...(19): siRNA sense strand
agacagaccggccaucauu

SEQ ID NO: 1197225 - RNA, 19 nt, Homo sapiens
  misc_RNA (1)...(19): siRNA sense strand
cacagcaguuaaagaauga

SEQ ID NO: 1197226 - RNA, 19 nt, Homo sapiens
  misc_RNA (1)...(19): siRNA sense strand
ggugaaacacaucauaaug

SEQ ID NO: 1197227 - RNA, 19 nt, Homo sapiens
  misc_RNA (1)...(19): siRNA sense strand
caucuguaaucauugagaa

SEQ ID NO: 1197228 - RNA, 19 nt, Homo sapiens
  misc_RNA (1)...(19): siRNA sense strand
ugacugugcuccugagagu

SEQ ID NO: 1197229 - RNA, 19 nt, Homo sapiens
  misc_RNA (1)...(19): siRNA sense strand
gagcaugagcaaauagaga

SEQ ID NO: 1197230 - RNA, 19 nt, Homo sapiens
  misc_RNA (1)...(19): siRNA sense strand
uuuauuggcugcuacaugu

SEQ ID NO: 1197231 - RNA, 19 nt, Homo sapiens
  misc_RNA (1)...(19): siRNA sense strand
gagcugaacgagugcgaaa

SEQ ID NO: 1197232 - RNA, 19 nt, Homo sapiens
  misc_RNA (1)...(19): siRNA sense strand
guuaaagaaugaagaugag

SEQ ID NO: 1197233 - RNA, 19 nt, Homo sapiens
  misc_RNA (1)...(19): siRNA sense strand
gcaguuaaagaaugaagau

SEQ ID NO: 1197234 - RNA, 19 nt, Homo sapiens
  misc_RNA (1)...(19): siRNA sense strand
aauggagcaugagcaaaua

SEQ ID NO: 1197235 - RNA, 19 nt, Homo sapiens
  misc_RNA (1)...(19): siRNA sense strand
gagacacaaggccagguua

SEQ ID NO: 1197236 - RNA, 19 nt, Homo sapiens
  misc_RNA (1)...(19): siRNA sense strand
gaaggagcuuuaggagaag

SEQ ID NO: 1197237 - RNA, 19 nt, Homo sapiens
  misc_RNA (1)...(19): siRNA sense strand
gaccggccaucauuggaau

SEQ ID NO: 1197238 - RNA, 19 nt, Homo sapiens
  misc_RNA (1)...(19): siRNA sense strand
caagugccugugucagaua

SEQ ID NO: 1197239 - RNA, 19 nt, Homo sapiens
  misc_RNA (1)...(19): siRNA sense strand
cggguagaaccacuuaaua

SEQ ID NO: 1197240 - RNA, 19 nt, Homo sapiens
  misc_RNA (1)...(19): siRNA sense strand
aaauggagcaugagcaaau

SEQ ID NO: 1197241 - RNA, 19 nt, Homo sapiens
  misc_RNA (1)...(19): siRNA sense strand
uaaaugaacgcauccaaaa

SEQ ID NO: 1197242 - RNA, 19 nt, Homo sapiens
  misc_RNA (1)...(19): siRNA sense strand
uuaaaugaacgcauccaaa

SEQ ID NO: 1197243 - RNA, 19 nt, Homo sapiens
  misc_RNA (1)...(19): siRNA sense strand
cagccaauagcaucuguaa

SEQ ID NO: 1197244 - RNA, 19 nt, Homo sapiens
  misc_RNA (1)...(19): siRNA sense strand
agaagcugaugucauugaa

SEQ ID NO: 1197245 - RNA, 19 nt, Homo sapiens
  misc_RNA (1)...(19): siRNA sense strand
cagaaccaacgaauccuuu

SEQ ID NO: 1197246 - RNA, 19 nt, Homo sapiens
  misc_RNA (1)...(19): siRNA sense strand
gagcaaauagagacacaag

SEQ ID NO: 1197247 - RNA, 19 nt, Homo sapiens
  misc_RNA (1)...(19): siRNA sense strand
aaggaaaacuugaaagaga

SEQ ID NO: 1197248 - RNA, 19 nt, Homo sapiens
  misc_RNA (1)...(19): siRNA sense strand
uggaaucagcuaaugguaa

SEQ ID NO: 1197249 - RNA, 19 nt, Homo sapiens
  misc_RNA (1)...(19): siRNA sense strand
ugaauuuggacuaguagaa

SEQ ID NO: 1197250 - RNA, 19 nt, Homo sapiens
  misc_RNA (1)...(19): siRNA sense strand
gcugcuacauguuauugca

SEQ ID NO: 1197251 - RNA, 19 nt, Homo sapiens
  misc_RNA (1)...(19): siRNA sense strand
uauuggcugcuacauguua

SEQ ID NO: 1197252 - RNA, 19 nt, Homo sapiens
  misc_RNA (1)...(19): siRNA sense strand
agaaugaagaugagacaga

SEQ ID NO: 1197253 - RNA, 19 nt, Homo sapiens
  misc_RNA (1)...(19): siRNA sense strand
cacaaggccagguuaauca

SEQ ID NO: 1197254 - RNA, 19 nt, Homo sapiens
  misc_RNA (1)...(19): siRNA sense strand
acaagagaaacaagaaaga

SEQ ID NO: 1197255 - RNA, 19 nt, Homo sapiens
  misc_RNA (1)...(19): siRNA sense strand
gaaccacuuaauauagaug

SEQ ID NO: 1197256 - RNA, 19 nt, Homo sapiens
  misc_RNA (1)...(19): siRNA sense strand
agacacaaggccagguuaa

SEQ ID NO: 1197257 - RNA, 19 nt, Homo sapiens
  misc_RNA (1)...(19): siRNA sense strand
acaagugccugugucagau

SEQ ID NO: 1197258 - RNA, 19 nt, Homo sapiens
  misc_RNA (1)...(19): siRNA sense strand
guuggcaaauaaacaagau

SEQ ID NO: 1197259 - RNA, 19 nt, Homo sapiens
  misc_RNA (1)...(19): siRNA sense strand
cagugaugcucaugaugug

SEQ ID NO: 1197260 - RNA, 19 nt, Homo sapiens
  misc_RNA (1)...(19): siRNA sense strand
ggacccagaaccaacgaau

SEQ ID NO: 1197261 - RNA, 19 nt, Homo sapiens
  misc_RNA (1)...(19): siRNA sense strand
gcuacauguuauugcaaga

SEQ ID NO: 1197262 - RNA, 19 nt, Homo sapiens
  misc_RNA (1)...(19): siRNA sense strand
aaauggagaaagacaguga

SEQ ID NO: 1197263 - RNA, 19 nt, Homo sapiens
  misc_RNA (1)...(19): siRNA sense strand
ugaacgagugcgaaaauua

SEQ ID NO: 1197264 - RNA, 19 nt, Homo sapiens
  misc_RNA (1)...(19): siRNA sense strand
uacauguuauugcaagaga

SEQ ID NO: 1197265 - RNA, 19 nt, Homo sapiens
  misc_RNA (1)...(19): siRNA sense strand
caucauuggaaucagcuaa

SEQ ID NO: 1197266 - RNA, 19 nt, Homo sapiens
  misc_RNA (1)...(19): siRNA sense strand
acacaaggccagguuaauc

SEQ ID NO: 1197267 - RNA, 19 nt, Homo sapiens
  misc_RNA (1)...(19): siRNA sense strand
gaagcugaugucauugaau

SEQ ID NO: 1197268 - RNA, 19 nt, Homo sapiens
  misc_RNA (1)...(19): siRNA sense strand
cgaauccuuuccagccaau

SEQ ID NO: 1197269 - RNA, 19 nt, Homo sapiens
  misc_RNA (1)...(19): siRNA sense strand
caagagaaacaagaaagag

SEQ ID NO: 1197270 - RNA, 19 nt, Homo sapiens
  misc_RNA (1)...(19): siRNA sense strand
acagugaugcucaugaugu

SEQ ID NO: 1197271 - RNA, 19 nt, Homo sapiens
  misc_RNA (1)...(19): siRNA sense strand
gagaaugaaggaaaacuug

SEQ ID NO: 1197272 - RNA, 19 nt, Homo sapiens
  misc_RNA (1)...(19): siRNA sense strand
gugccugugucagauagaa

SEQ ID NO: 1197273 - RNA, 19 nt, Homo sapiens
  misc_RNA (1)...(19): siRNA sense strand
gacagaccggccaucauug

SEQ ID NO: 1197274 - RNA, 19 nt, Homo sapiens
  misc_RNA (1)...(19): siRNA sense strand
gagacuuugaugccuuaaa

SEQ ID NO: 1197275 - RNA, 19 nt, Homo sapiens
  misc_RNA (1)...(19): siRNA sense strand
cacagcgaccuaacaguga

SEQ ID NO: 1197276 - RNA, 19 nt, Homo sapiens
  misc_RNA (1)...(19): siRNA sense strand
ucacuagacuuccaaaacu

SEQ ID NO: 1197277 - RNA, 19 nt, Homo sapiens
  misc_RNA (1)...(19): siRNA sense strand
uuugaugccuuaaaugaac

SEQ ID NO: 1197278 - RNA, 19 nt, Homo sapiens
  misc_RNA (1)...(19): siRNA sense strand
caagauaaagaaggagcuu

SEQ ID NO: 1197279 - RNA, 19 nt, Homo sapiens
  misc_RNA (1)...(19): siRNA sense strand
gacacaaggccagguuaau

SEQ ID NO: 1197280 - RNA, 19 nt, Homo sapiens
  misc_RNA (1)...(19): siRNA sense strand
gcaucuguaaucauugaga

SEQ ID NO: 1197281 - RNA, 19 nt, Homo sapiens
  misc_RNA (1)...(19): siRNA sense strand
gaacgagugcgaaaauuac

SEQ ID NO: 1197282 - RNA, 19 nt, Homo sapiens
  misc_RNA (1)...(19): siRNA sense strand
acaagaaagagcugaacga

SEQ ID NO: 1197283 - RNA, 19 nt, Homo sapiens
  misc_RNA (1)...(19): siRNA sense strand
gaacaggagcaggcugaac

SEQ ID NO: 1197284 - RNA, 19 nt, Homo sapiens
  misc_RNA (1)...(19): siRNA sense strand
gaaccaccggguagaacca

SEQ ID NO: 1197285 - RNA, 19 nt, Homo sapiens
  misc_RNA (1)...(19): siRNA sense strand
acuuugaugccuuaaauga

SEQ ID NO: 1197286 - RNA, 19 nt, Homo sapiens
  misc_RNA (1)...(19): siRNA sense strand
aaagaaugaagaugagaca

SEQ ID NO: 1197287 - RNA, 19 nt, Homo sapiens
  misc_RNA (1)...(19): siRNA sense strand
aaggccagguuaaucacaa

SEQ ID NO: 1197288 - RNA, 19 nt, Homo sapiens
  misc_RNA (1)...(19): siRNA sense strand
ggcugccaccugaaacaua

SEQ ID NO: 1197289 - RNA, 19 nt, Homo sapiens
  misc_RNA (1)...(19): siRNA sense strand
gaaugaaggaaaacuugaa

SEQ ID NO: 1197290 - RNA, 19 nt, Homo sapiens
  misc_RNA (1)...(19): siRNA sense strand
ccagaaccaacgaauccuu

SEQ ID NO: 1197291 - RNA, 19 nt, Homo sapiens
  misc_RNA (1)...(19): siRNA sense strand
aacauaaaauggagcauga

SEQ ID NO: 1197292 - RNA, 19 nt, Homo sapiens
  misc_RNA (1)...(19): siRNA sense strand
gaaaauugacaaguccauu

SEQ ID NO: 1197293 - RNA, 19 nt, Homo sapiens
  misc_RNA (1)...(19): siRNA sense strand
caccggguagaaccacuua

SEQ ID NO: 1197294 - RNA, 19 nt, Homo sapiens
  misc_RNA (1)...(19): siRNA sense strand
auaaggaggcauuaacaca

SEQ ID NO: 1197295 - RNA, 19 nt, Homo sapiens
  misc_RNA (1)...(19): siRNA sense strand
ggaaucagcuaaugguaaa

SEQ ID NO: 1197296 - RNA, 19 nt, Homo sapiens
  misc_RNA (1)...(19): siRNA sense strand
agaaggagcuuuaggagaa

SEQ ID NO: 1197297 - RNA, 19 nt, Homo sapiens
  misc_RNA (1)...(19): siRNA sense strand
gguagaaccacuuaauaua

SEQ ID NO: 1197298 - RNA, 19 nt, Homo sapiens
  misc_RNA (1)...(19): siRNA sense strand
gaaugucuaucucuggaaa

SEQ ID NO: 1197299 - RNA, 19 nt, Homo sapiens
  misc_RNA (1)...(19): siRNA sense strand
gaacaagagaaacaagaaa

SEQ ID NO: 1197300 - RNA, 19 nt, Homo sapiens
  misc_RNA (1)...(19): siRNA sense strand
aggagaagcugaugucauu

SEQ ID NO: 1197301 - RNA, 19 nt, Homo sapiens
  misc_RNA (1)...(19): siRNA sense strand
gaaagaaaauugacaaguc

SEQ ID NO: 1197302 - RNA, 19 nt, Homo sapiens
  misc_RNA (1)...(19): siRNA sense strand
gcugccaccugaaacauaa

SEQ ID NO: 1197303 - RNA, 19 nt, Homo sapiens
  misc_RNA (1)...(19): siRNA sense strand
ggagcaggcugaacucgau

SEQ ID NO: 1197304 - RNA, 19 nt, Homo sapiens
  misc_RNA (1)...(19): siRNA sense strand
uaacagugaugcucaugau

SEQ ID NO: 1197305 - RNA, 19 nt, Homo sapiens
  misc_RNA (1)...(19): siRNA sense strand
acacagcaguuaaagaaug

SEQ ID NO: 1197306 - RNA, 19 nt, Homo sapiens
  misc_RNA (1)...(19): siRNA sense strand
gcagcgugcucuugaggaa

SEQ ID NO: 1197307 - RNA, 19 nt, Homo sapiens
  misc_RNA (1)...(19): siRNA sense strand
ggaacaagagaaacaagaa

SEQ ID NO: 1197308 - RNA, 19 nt, Homo sapiens
  misc_RNA (1)...(19): siRNA sense strand
gccaauagcaucuguaauc

SEQ ID NO: 1197309 - RNA, 19 nt, Homo sapiens
  misc_RNA (1)...(19): siRNA sense strand
ccaauagcaucuguaauca

SEQ ID NO: 1197310 - RNA, 19 nt, Homo sapiens
  misc_RNA (1)...(19): siRNA sense strand
guagaaccacuuaauauag

SEQ ID NO: 1197311 - RNA, 19 nt, Homo sapiens
  misc_RNA (1)...(19): siRNA sense strand
gaauuuggacuaguagaaa

SEQ ID NO: 1197312 - RNA, 19 nt, Homo sapiens
  misc_RNA (1)...(19): siRNA sense strand
uagcaucuguaaucauuga

SEQ ID NO: 1197313 - RNA, 19 nt, Homo sapiens
  misc_RNA (1)...(19): siRNA sense strand
agacuuugaugccuuaaau

SEQ ID NO: 1197314 - RNA, 19 nt, Homo sapiens
  misc_RNA (1)...(19): siRNA sense strand
gagaagcugaugucauuga

SEQ ID NO: 1197315 - RNA, 19 nt, Homo sapiens
  misc_RNA (1)...(19): siRNA sense strand
gaaacaagaaagagcugaa

SEQ ID NO: 1197316 - RNA, 19 nt, Homo sapiens
  misc_RNA (1)...(19): siRNA sense strand
ggguagaaccacuuaauau

SEQ ID NO: 1197317 - RNA, 19 nt, Homo sapiens
  misc_RNA (1)...(19): siRNA sense strand
aagagacuuugaugccuua

SEQ ID NO: 1197318 - RNA, 19 nt, Homo sapiens
  misc_RNA (1)...(19): siRNA sense strand
agacagaccggccaucauu

SEQ ID NO: 1197319 - RNA, 19 nt, Homo sapiens
  misc_RNA (1)...(19): siRNA sense strand
cacagcaguuaaagaauga

SEQ ID NO: 1197320 - RNA, 19 nt, Homo sapiens
  misc_RNA (1)...(19): siRNA sense strand
ggugaaacacaucauaaug

SEQ ID NO: 1197321 - RNA, 19 nt, Homo sapiens
  misc_RNA (1)...(19): siRNA sense strand
caucuguaaucauugagaa

SEQ ID NO: 1197322 - RNA, 19 nt, Homo sapiens
  misc_RNA (1)...(19): siRNA sense strand
ugacugugcuccugagagu

SEQ ID NO: 1197323 - RNA, 19 nt, Homo sapiens
  misc_RNA (1)...(19): siRNA sense strand
gagcaugagcaaauagaga

SEQ ID NO: 1197324 - RNA, 19 nt, Homo sapiens
  misc_RNA (1)...(19): siRNA sense strand
uuuauuggcugcuacaugu

SEQ ID NO: 1197325 - RNA, 19 nt, Homo sapiens
  misc_RNA (1)...(19): siRNA sense strand
gagcugaacgagugcgaaa

SEQ ID NO: 1197326 - RNA, 19 nt, Homo sapiens
  misc_RNA (1)...(19): siRNA sense strand
guuaaagaaugaagaugag

SEQ ID NO: 1197327 - RNA, 19 nt, Homo sapiens
  misc_RNA (1)...(19): siRNA sense strand
gcaguuaaagaaugaagau

SEQ ID NO: 1197328 - RNA, 19 nt, Homo sapiens
  misc_RNA (1)...(19): siRNA sense strand
aauggagcaugagcaaaua

SEQ ID NO: 1197329 - RNA, 19 nt, Homo sapiens
  misc_RNA (1)...(19): siRNA sense strand
gagacacaaggccagguua

SEQ ID NO: 1197330 - RNA, 19 nt, Homo sapiens
  misc_RNA (1)...(19): siRNA sense strand
gaaggagcuuuaggagaag

SEQ ID NO: 1197331 - RNA, 19 nt, Homo sapiens
  misc_RNA (1)...(19): siRNA sense strand
gaccggccaucauuggaau

SEQ ID NO: 1197332 - RNA, 19 nt, Homo sapiens
  misc_RNA (1)...(19): siRNA sense strand
caagugccugugucagaua

SEQ ID NO: 1197333 - RNA, 19 nt, Homo sapiens
  misc_RNA (1)...(19): siRNA sense strand
cggguagaaccacuuaaua

SEQ ID NO: 1197334 - RNA, 19 nt, Homo sapiens
  misc_RNA (1)...(19): siRNA sense strand
aaauggagcaugagcaaau

SEQ ID NO: 1197335 - RNA, 19 nt, Homo sapiens
  misc_RNA (1)...(19): siRNA sense strand
uaaaugaacgcauccaaaa

SEQ ID NO: 1197336 - RNA, 19 nt, Homo sapiens
  misc_RNA (1)...(19): siRNA sense strand
uuaaaugaacgcauccaaa

SEQ ID NO: 1197337 - RNA, 19 nt, Homo sapiens
  misc_RNA (1)...(19): siRNA sense strand
cagccaauagcaucuguaa

SEQ ID NO: 1197338 - RNA, 19 nt, Homo sapiens
  misc_RNA (1)...(19): siRNA sense strand
agaagcugaugucauugaa

SEQ ID NO: 1197339 - RNA, 19 nt, Homo sapiens
  misc_RNA (1)...(19): siRNA sense strand
cagaaccaacgaauccuuu

SEQ ID NO: 1197340 - RNA, 19 nt, Homo sapiens
  misc_RNA (1)...(19): siRNA sense strand
gagcaaauagagacacaag

SEQ ID NO: 1197341 - RNA, 19 nt, Homo sapiens
  misc_RNA (1)...(19): siRNA sense strand
aaggaaaacuugaaagaga

SEQ ID NO: 1197342 - RNA, 19 nt, Homo sapiens
  misc_RNA (1)...(19): siRNA sense strand
uggaaucagcuaaugguaa

SEQ ID NO: 1197343 - RNA, 19 nt, Homo sapiens
  misc_RNA (1)...(19): siRNA sense strand
ugaauuuggacuaguagaa

SEQ ID NO: 1197344 - RNA, 19 nt, Homo sapiens
  misc_RNA (1)...(19): siRNA sense strand
gcugcuacauguuauugca

SEQ ID NO: 1197345 - RNA, 19 nt, Homo sapiens
  misc_RNA (1)...(19): siRNA sense strand
uauuggcugcuacauguua

SEQ ID NO: 1197346 - RNA, 19 nt, Homo sapiens
  misc_RNA (1)...(19): siRNA sense strand
agaaugaagaugagacaga

SEQ ID NO: 1197347 - RNA, 19 nt, Homo sapiens
  misc_RNA (1)...(19): siRNA sense strand
cacaaggccagguuaauca

SEQ ID NO: 1197348 - RNA, 19 nt, Homo sapiens
  misc_RNA (1)...(19): siRNA sense strand
acaagagaaacaagaaaga

SEQ ID NO: 1197349 - RNA, 19 nt, Homo sapiens
  misc_RNA (1)...(19): siRNA sense strand
gaaccacuuaauauagaug

SEQ ID NO: 1197350 - RNA, 19 nt, Homo sapiens
  misc_RNA (1)...(19): siRNA sense strand
agacacaaggccagguuaa

SEQ ID NO: 1197351 - RNA, 19 nt, Homo sapiens
  misc_RNA (1)...(19): siRNA sense strand
acaagugccugugucagau

SEQ ID NO: 1197352 - RNA, 19 nt, Homo sapiens
  misc_RNA (1)...(19): siRNA sense strand
guuggcaaauaaacaagau

SEQ ID NO: 1197353 - RNA, 19 nt, Homo sapiens
  misc_RNA (1)...(19): siRNA sense strand
cagugaugcucaugaugug

SEQ ID NO: 1197354 - RNA, 19 nt, Homo sapiens
  misc_RNA (1)...(19): siRNA sense strand
ggacccagaaccaacgaau

SEQ ID NO: 1197355 - RNA, 19 nt, Homo sapiens
  misc_RNA (1)...(19): siRNA sense strand
gcuacauguuauugcaaga

SEQ ID NO: 1197356 - RNA, 19 nt, Homo sapiens
  misc_RNA (1)...(19): siRNA sense strand
aaauggagaaagacaguga

SEQ ID NO: 1197357 - RNA, 19 nt, Homo sapiens
  misc_RNA (1)...(19): siRNA sense strand
ugaacgagugcgaaaauua

SEQ ID NO: 1197358 - RNA, 19 nt, Homo sapiens
  misc_RNA (1)...(19): siRNA sense strand
uacauguuauugcaagaga

SEQ ID NO: 1197359 - RNA, 19 nt, Homo sapiens
  misc_RNA (1)...(19): siRNA sense strand
caucauuggaaucagcuaa

SEQ ID NO: 1197360 - RNA, 19 nt, Homo sapiens
  misc_RNA (1)...(19): siRNA sense strand
acacaaggccagguuaauc

SEQ ID NO: 1197361 - RNA, 19 nt, Homo sapiens
  misc_RNA (1)...(19): siRNA sense strand
gaagcugaugucauugaau

SEQ ID NO: 1197362 - RNA, 19 nt, Homo sapiens
  misc_RNA (1)...(19): siRNA sense strand
cgaauccuuuccagccaau

SEQ ID NO: 1197363 - RNA, 19 nt, Homo sapiens
  misc_RNA (1)...(19): siRNA sense strand
caagagaaacaagaaagag

SEQ ID NO: 1197364 - RNA, 19 nt, Homo sapiens
  misc_RNA (1)...(19): siRNA sense strand
acagugaugcucaugaugu

SEQ ID NO: 1197365 - RNA, 19 nt, Homo sapiens
  misc_RNA (1)...(19): siRNA sense strand
gagaaugaaggaaaacuug

SEQ ID NO: 1197366 - RNA, 19 nt, Homo sapiens
  misc_RNA (1)...(19): siRNA sense strand
gugccugugucagauagaa

SEQ ID NO: 1197367 - RNA, 19 nt, Homo sapiens
  misc_RNA (1)...(19): siRNA sense strand
gacagaccggccaucauug

SEQ ID NO: 1197368 - RNA, 19 nt, Homo sapiens
  misc_RNA (1)...(19): siRNA sense strand
gagacuuugaugccuuaaa

SEQ ID NO: 1197369 - RNA, 19 nt, Homo sapiens
  misc_RNA (1)...(19): siRNA sense strand
cacagcgaccuaacaguga

SEQ ID NO: 1197370 - RNA, 19 nt, Homo sapiens
  misc_RNA (1)...(19): siRNA sense strand
ucacuagacuuccaaaacu

SEQ ID NO: 1197371 - RNA, 19 nt, Homo sapiens
  misc_RNA (1)...(19): siRNA sense strand
uuugaugccuuaaaugaac

SEQ ID NO: 1197372 - RNA, 19 nt, Homo sapiens
  misc_RNA (1)...(19): siRNA sense strand
caagauaaagaaggagcuu

SEQ ID NO: 1197373 - RNA, 19 nt, Homo sapiens
  misc_RNA (1)...(19): siRNA sense strand
gacacaaggccagguuaau

SEQ ID NO: 1197374 - RNA, 19 nt, Homo sapiens
  misc_RNA (1)...(19): siRNA sense strand
gcaucuguaaucauugaga

SEQ ID NO: 1197375 - RNA, 19 nt, Homo sapiens
  misc_RNA (1)...(19): siRNA sense strand
gaacgagugcgaaaauuac

SEQ ID NO: 1197376 - RNA, 19 nt, Homo sapiens
  misc_RNA (1)...(19): siRNA sense strand
acaagaaagagcugaacga

SEQ ID NO: 1197377 - RNA, 19 nt, Homo sapiens
  misc_RNA (1)...(19): siRNA sense strand
gaacaggagcaggcugaac

SEQ ID NO: 1197378 - RNA, 19 nt, Homo sapiens
  misc_RNA (1)...(19): siRNA sense strand
gaaccaccggguagaacca

SEQ ID NO: 1197379 - RNA, 19 nt, Homo sapiens
  misc_RNA (1)...(19): siRNA sense strand
acuuugaugccuuaaauga

SEQ ID NO: 1197380 - RNA, 19 nt, Homo sapiens
  misc_RNA (1)...(19): siRNA sense strand
aaagaaugaagaugagaca

SEQ ID NO: 1197381 - RNA, 19 nt, Homo sapiens
  misc_RNA (1)...(19): siRNA sense strand
aaggccagguuaaucacaa

SEQ ID NO: 1197382 - RNA, 19 nt, Homo sapiens
  misc_RNA (1)...(19): siRNA sense strand
ggcugccaccugaaacaua

SEQ ID NO: 1197383 - RNA, 19 nt, Homo sapiens
  misc_RNA (1)...(19): siRNA sense strand
gaaugaaggaaaacuugaa

SEQ ID NO: 1197384 - RNA, 19 nt, Homo sapiens
  misc_RNA (1)...(19): siRNA sense strand
ccagaaccaacgaauccuu

SEQ ID NO: 1197385 - RNA, 19 nt, Homo sapiens
  misc_RNA (1)...(19): siRNA sense strand
aacauaaaauggagcauga

SEQ ID NO: 1197386 - RNA, 19 nt, Homo sapiens
  misc_RNA (1)...(19): siRNA sense strand
gaaaauugacaaguccauu

SEQ ID NO: 1197387 - RNA, 19 nt, Homo sapiens
  misc_RNA (1)...(19): siRNA sense strand
caccggguagaaccacuua

SEQ ID NO: 1197388 - RNA, 19 nt, Homo sapiens
  misc_RNA (1)...(19): siRNA sense strand
auaaggaggcauuaacaca

SEQ ID NO: 1197389 - RNA, 19 nt, Homo sapiens
  misc_RNA (1)...(19): siRNA sense strand
gaaaguggcugaguuaguu

SEQ ID NO: 1197390 - RNA, 19 nt, Homo sapiens
  misc_RNA (1)...(19): siRNA sense strand
gggaagcacuugaugagaa

SEQ ID NO: 1197391 - RNA, 19 nt, Homo sapiens
  misc_RNA (1)...(19): siRNA sense strand
ggaagcacuugaugagaaa

SEQ ID NO: 1197392 - RNA, 19 nt, Homo sapiens
  misc_RNA (1)...(19): siRNA sense strand
aagaaccacuuuccugaua

SEQ ID NO: 1197393 - RNA, 19 nt, Homo sapiens
  misc_RNA (1)...(19): siRNA sense strand
ggaagcugcucacccaaga

SEQ ID NO: 1197394 - RNA, 19 nt, Homo sapiens
  misc_RNA (1)...(19): siRNA sense strand
cagaaaugcuugagagugu

SEQ ID NO: 1197395 - RNA, 19 nt, Homo sapiens
  misc_RNA (1)...(19): siRNA sense strand
ugagaaaguggcugaguua

SEQ ID NO: 1197396 - RNA, 19 nt, Homo sapiens
  misc_RNA (1)...(19): siRNA sense strand
caccagggcuuauggaugu

SEQ ID NO: 1197397 - RNA, 19 nt, Homo sapiens
  misc_RNA (1)...(19): siRNA sense strand
gaaaccagcuaugugaaag

SEQ ID NO: 1197398 - RNA, 19 nt, Homo sapiens
  misc_RNA (1)...(19): siRNA sense strand
ccacuuuccugauaucuuc

SEQ ID NO: 1197399 - RNA, 19 nt, Homo sapiens
  misc_RNA (1)...(19): siRNA sense strand
uuaaggagccggucacaaa

SEQ ID NO: 1197400 - RNA, 19 nt, Homo sapiens
  misc_RNA (1)...(19): siRNA sense strand
gcauugaugugaaggaagu

SEQ ID NO: 1197401 - RNA, 19 nt, Homo sapiens
  misc_RNA (1)...(19): siRNA sense strand
gaaccacuuuccugauauc

SEQ ID NO: 1197402 - RNA, 19 nt, Homo sapiens
  misc_RNA (1)...(19): siRNA sense strand
caagaccggccuccugaua

SEQ ID NO: 1197403 - RNA, 19 nt, Homo sapiens
  misc_RNA (1)...(19): siRNA sense strand
ccgcaaauaucaaauuaag

SEQ ID NO: 1197404 - RNA, 19 nt, Homo sapiens
  misc_RNA (1)...(19): siRNA sense strand
ugaaaguccuggagcaugu

SEQ ID NO: 1197405 - RNA, 19 nt, Homo sapiens
  misc_RNA (1)...(19): siRNA sense strand
caggugaucuuuggcauug

SEQ ID NO: 1197406 - RNA, 19 nt, Homo sapiens
  misc_RNA (1)...(19): siRNA sense strand
gcaugcaggugaucuuugg

SEQ ID NO: 1197407 - RNA, 19 nt, Homo sapiens
  misc_RNA (1)...(19): siRNA sense strand
gcuuauggaugugcagauu

SEQ ID NO: 1197408 - RNA, 19 nt, Homo sapiens
  misc_RNA (1)...(19): siRNA sense strand
ggagaggcaccagggcuua

SEQ ID NO: 1197409 - RNA, 19 nt, Homo sapiens
  misc_RNA (1)...(19): siRNA sense strand
cuccgcaaauaucaaauua

SEQ ID NO: 1197410 - RNA, 19 nt, Homo sapiens
  misc_RNA (1)...(19): siRNA sense strand
caagaguucgcauuuccua

SEQ ID NO: 1197411 - RNA, 19 nt, Homo sapiens
  misc_RNA (1)...(19): siRNA sense strand
ggagggagcacagugucua

SEQ ID NO: 1197412 - RNA, 19 nt, Homo sapiens
  misc_RNA (1)...(19): siRNA sense strand
uggcugaguuaguucguuu

SEQ ID NO: 1197413 - RNA, 19 nt, Homo sapiens
  misc_RNA (1)...(19): siRNA sense strand
ugaaaccagcuaugugaaa

SEQ ID NO: 1197414 - RNA, 19 nt, Homo sapiens
  misc_RNA (1)...(19): siRNA sense strand
gccugggccucuccuauga

SEQ ID NO: 1197415 - RNA, 19 nt, Homo sapiens
  misc_RNA (1)...(19): siRNA sense strand
ggucacaaaggcagaaaug

SEQ ID NO: 1197416 - RNA, 19 nt, Homo sapiens
  misc_RNA (1)...(19): siRNA sense strand
aagagugggugcaggagaa

SEQ ID NO: 1197417 - RNA, 19 nt, Homo sapiens
  misc_RNA (1)...(19): siRNA sense strand
ggagcacagugucuauugg

SEQ ID NO: 1197418 - RNA, 19 nt, Homo sapiens
  misc_RNA (1)...(19): siRNA sense strand
uugaggaggugacugauuc

SEQ ID NO: 1197419 - RNA, 19 nt, Homo sapiens
  misc_RNA (1)...(19): siRNA sense strand
cagggucaaugcaagaguu

SEQ ID NO: 1197420 - RNA, 19 nt, Homo sapiens
  misc_RNA (1)...(19): siRNA sense strand
ggugaucuuuggcauugau

SEQ ID NO: 1197421 - RNA, 19 nt, Homo sapiens
  misc_RNA (1)...(19): siRNA sense strand
gagcacagugucuauugga

SEQ ID NO: 1197422 - RNA, 19 nt, Homo sapiens
  misc_RNA (1)...(19): siRNA sense strand
gggagcacagugucuauug

SEQ ID NO: 1197423 - RNA, 19 nt, Homo sapiens
  misc_RNA (1)...(19): siRNA sense strand
agaccggccuccugauaau

SEQ ID NO: 1197424 - RNA, 19 nt, Homo sapiens
  misc_RNA (1)...(19): siRNA sense strand
gaaaugcuugagaguguca

SEQ ID NO: 1197425 - RNA, 19 nt, Homo sapiens
  misc_RNA (1)...(19): siRNA sense strand
gcaggugaucuuuggcauu

SEQ ID NO: 1197426 - RNA, 19 nt, Homo sapiens
  misc_RNA (1)...(19): siRNA sense strand
gcuccgcaaauaucaaauu

SEQ ID NO: 1197427 - RNA, 19 nt, Homo sapiens
  misc_RNA (1)...(19): siRNA sense strand
agaaccacuuuccugauau

SEQ ID NO: 1197428 - RNA, 19 nt, Homo sapiens
  misc_RNA (1)...(19): siRNA sense strand
cacaaaggcagaaaugcuu

SEQ ID NO: 1197429 - RNA, 19 nt, Homo sapiens
  misc_RNA (1)...(19): siRNA sense strand
ggagaggagaaaggaguuu

SEQ ID NO: 1197430 - RNA, 19 nt, Homo sapiens
  misc_RNA (1)...(19): siRNA sense strand
acccaucccugcaugaaga

SEQ ID NO: 1197431 - RNA, 19 nt, Homo sapiens
  misc_RNA (1)...(19): siRNA sense strand
gauucugggucaccaaguc

SEQ ID NO: 1197432 - RNA, 19 nt, Homo sapiens
  misc_RNA (1)...(19): siRNA sense strand
caagaaccacuuuccugau

SEQ ID NO: 1197433 - RNA, 19 nt, Homo sapiens
  misc_RNA (1)...(19): siRNA sense strand
guccugggcaugaucuuaa

SEQ ID NO: 1197434 - RNA, 19 nt, Homo sapiens
  misc_RNA (1)...(19): siRNA sense strand
ccacagcugaggagcagaa

SEQ ID NO: 1197435 - RNA, 19 nt, Homo sapiens
  misc_RNA (1)...(19): siRNA sense strand
gcaaagccucugagugcau

SEQ ID NO: 1197436 - RNA, 19 nt, Homo sapiens
  misc_RNA (1)...(19): siRNA sense strand
caaaggcagaaaugcuuga

SEQ ID NO: 1197437 - RNA, 19 nt, Homo sapiens
  misc_RNA (1)...(19): siRNA sense strand
ggucagggucaaugcaaga

SEQ ID NO: 1197438 - RNA, 19 nt, Homo sapiens
  misc_RNA (1)...(19): siRNA sense strand
gagaggagaaaggaguuug

SEQ ID NO: 1197439 - RNA, 19 nt, Homo sapiens
  misc_RNA (1)...(19): siRNA sense strand
gaagagucagcgcuacaag

SEQ ID NO: 1197440 - RNA, 19 nt, Homo sapiens
  misc_RNA (1)...(19): siRNA sense strand
augagaaaguggcugaguu

SEQ ID NO: 1197441 - RNA, 19 nt, Homo sapiens
  misc_RNA (1)...(19): siRNA sense strand
uggcauugaugugaaggaa

SEQ ID NO: 1197442 - RNA, 19 nt, Homo sapiens
  misc_RNA (1)...(19): siRNA sense strand
gaucuuuggcauugaugug

SEQ ID NO: 1197443 - RNA, 19 nt, Homo sapiens
  misc_RNA (1)...(19): siRNA sense strand
ggagaacuaccuggaguac

SEQ ID NO: 1197444 - RNA, 19 nt, Homo sapiens
  misc_RNA (1)...(19): siRNA sense strand
gcugcauccuccuccucua

SEQ ID NO: 1197445 - RNA, 19 nt, Homo sapiens
  misc_RNA (1)...(19): siRNA sense strand
aagaccggccuccugauaa

SEQ ID NO: 1197446 - RNA, 19 nt, Homo sapiens
  misc_RNA (1)...(19): siRNA sense strand
ucacaaaggcagaaaugcu

SEQ ID NO: 1197447 - RNA, 19 nt, Homo sapiens
  misc_RNA (1)...(19): siRNA sense strand
gagggagcacagugucuau

SEQ ID NO: 1197448 - RNA, 19 nt, Homo sapiens
  misc_RNA (1)...(19): siRNA sense strand
gugcaugcaggugaucuuu

SEQ ID NO: 1197449 - RNA, 19 nt, Homo sapiens
  misc_RNA (1)...(19): siRNA sense strand
gggagaggagaaaggaguu

SEQ ID NO: 1197450 - RNA, 19 nt, Homo sapiens
  misc_RNA (1)...(19): siRNA sense strand
agaaaguggcugaguuagu

SEQ ID NO: 1197451 - RNA, 19 nt, Homo sapiens
  misc_RNA (1)...(19): siRNA sense strand
gcgcuacaaggcugaggaa

SEQ ID NO: 1197452 - RNA, 19 nt, Homo sapiens
  misc_RNA (1)...(19): siRNA sense strand
guuuccugcuccgcaaaua

SEQ ID NO: 1197453 - RNA, 19 nt, Homo sapiens
  misc_RNA (1)...(19): siRNA sense strand
gaugagaaaguggcugagu

SEQ ID NO: 1197454 - RNA, 19 nt, Homo sapiens
  misc_RNA (1)...(19): siRNA sense strand
gaucaugggaacccuugag

SEQ ID NO: 1197455 - RNA, 19 nt, Homo sapiens
  misc_RNA (1)...(19): siRNA sense strand
uaaggagccggucacaaag

SEQ ID NO: 1197456 - RNA, 19 nt, Homo sapiens
  misc_RNA (1)...(19): siRNA sense strand
ggacaaagauggccacaua

SEQ ID NO: 1197457 - RNA, 19 nt, Homo sapiens
  misc_RNA (1)...(19): siRNA sense strand
gaagacagauggcucauuc

SEQ ID NO: 1197458 - RNA, 19 nt, Homo sapiens
  misc_RNA (1)...(19): siRNA sense strand
ggaguaaacuggcaagaug

SEQ ID NO: 1197459 - RNA, 19 nt, Homo sapiens
  misc_RNA (1)...(19): siRNA sense strand
gaaagcagaguauuaaaga

SEQ ID NO: 1197460 - RNA, 19 nt, Homo sapiens
  misc_RNA (1)...(19): siRNA sense strand
ggcaagauguauaugauaa

SEQ ID NO: 1197461 - RNA, 19 nt, Homo sapiens
  misc_RNA (1)...(19): siRNA sense strand
gacauuaaauuuccucgaa

SEQ ID NO: 1197462 - RNA, 19 nt, Homo sapiens
  misc_RNA (1)...(19): siRNA sense strand
gaaauuaugagacacaguu

SEQ ID NO: 1197463 - RNA, 19 nt, Homo sapiens
  misc_RNA (1)...(19): siRNA sense strand
gaccaaagccaaacacauu

SEQ ID NO: 1197464 - RNA, 19 nt, Homo sapiens
  misc_RNA (1)...(19): siRNA sense strand
gaggagagaaugaauugua

SEQ ID NO: 1197465 - RNA, 19 nt, Homo sapiens
  misc_RNA (1)...(19): siRNA sense strand
acagauggcucauucauag

SEQ ID NO: 1197466 - RNA, 19 nt, Homo sapiens
  misc_RNA (1)...(19): siRNA sense strand
gcaaagaagggaucacaga

SEQ ID NO: 1197467 - RNA, 19 nt, Homo sapiens
  misc_RNA (1)...(19): siRNA sense strand
gaagaggagagaaugaauu

SEQ ID NO: 1197468 - RNA, 19 nt, Homo sapiens
  misc_RNA (1)...(19): siRNA sense strand
ccagagguguuagaagaua

SEQ ID NO: 1197469 - RNA, 19 nt, Homo sapiens
  misc_RNA (1)...(19): siRNA sense strand
gcacacacucuaacugaaa

SEQ ID NO: 1197470 - RNA, 19 nt, Homo sapiens
  misc_RNA (1)...(19): siRNA sense strand
agagaaaccucaagaugug

SEQ ID NO: 1197471 - RNA, 19 nt, Homo sapiens
  misc_RNA (1)...(19): siRNA sense strand
ugagacagauacuagauau

SEQ ID NO: 1197472 - RNA, 19 nt, Homo sapiens
  misc_RNA (1)...(19): siRNA sense strand
uuucagggcucuugauaaa

SEQ ID NO: 1197473 - RNA, 19 nt, Homo sapiens
  misc_RNA (1)...(19): siRNA sense strand
gaaagaagguuggguucag

SEQ ID NO: 1197474 - RNA, 19 nt, Homo sapiens
  misc_RNA (1)...(19): siRNA sense strand
gaaauauuccuuccagaca

SEQ ID NO: 1197475 - RNA, 19 nt, Homo sapiens
  misc_RNA (1)...(19): siRNA sense strand
cgaacacucucuucagaug

SEQ ID NO: 1197476 - RNA, 19 nt, Homo sapiens
  misc_RNA (1)...(19): siRNA sense strand
ccaaagccaaacacauuua

SEQ ID NO: 1197477 - RNA, 19 nt, Homo sapiens
  misc_RNA (1)...(19): siRNA sense strand
gcucauucauaggauauaa

SEQ ID NO: 1197478 - RNA, 19 nt, Homo sapiens
  misc_RNA (1)...(19): siRNA sense strand
gaauuuacagcucagacua

SEQ ID NO: 1197479 - RNA, 19 nt, Homo sapiens
  misc_RNA (1)...(19): siRNA sense strand
guaccgugaucucaaguug

SEQ ID NO: 1197480 - RNA, 19 nt, Homo sapiens
  misc_RNA (1)...(19): siRNA sense strand
gaaagaagucauuauugca

SEQ ID NO: 1197481 - RNA, 19 nt, Homo sapiens
  misc_RNA (1)...(19): siRNA sense strand
agaaagaagucauuauugc

SEQ ID NO: 1197482 - RNA, 19 nt, Homo sapiens
  misc_RNA (1)...(19): siRNA sense strand
gaagaggggagaauauaua

SEQ ID NO: 1197483 - RNA, 19 nt, Homo sapiens
  misc_RNA (1)...(19): siRNA sense strand
caaccaggaccaugagaaa

SEQ ID NO: 1197484 - RNA, 19 nt, Homo sapiens
  misc_RNA (1)...(19): siRNA sense strand
gacagauggcucauucaua

SEQ ID NO: 1197485 - RNA, 19 nt, Homo sapiens
  misc_RNA (1)...(19): siRNA sense strand
gcaagaagaggagagaaug

SEQ ID NO: 1197486 - RNA, 19 nt, Homo sapiens
  misc_RNA (1)...(19): siRNA sense strand
aaagagaaaccucaagaug

SEQ ID NO: 1197487 - RNA, 19 nt, Homo sapiens
  misc_RNA (1)...(19): siRNA sense strand
uaaacuggcaagauguaua

SEQ ID NO: 1197488 - RNA, 19 nt, Homo sapiens
  misc_RNA (1)...(19): siRNA sense strand
gcaaaaugccaguuaauga

SEQ ID NO: 1197489 - RNA, 19 nt, Homo sapiens
  misc_RNA (1)...(19): siRNA sense strand
agaaugaauuguaguccaa

SEQ ID NO: 1197490 - RNA, 19 nt, Homo sapiens
  misc_RNA (1)...(19): siRNA sense strand
acaauaacaccaccugaaa

SEQ ID NO: 1197491 - RNA, 19 nt, Homo sapiens
  misc_RNA (1)...(19): siRNA sense strand
gaacacuagacaucccuuu

SEQ ID NO: 1197492 - RNA, 19 nt, Homo sapiens
  misc_RNA (1)...(19): siRNA sense strand
ggaaaauacuaugcuauga

SEQ ID NO: 1197493 - RNA, 19 nt, Homo sapiens
  misc_RNA (1)...(19): siRNA sense strand
gaauuguaguccaacuuca

SEQ ID NO: 1197494 - RNA, 19 nt, Homo sapiens
  misc_RNA (1)...(19): siRNA sense strand
acaaagauggccacauaaa

SEQ ID NO: 1197495 - RNA, 19 nt, Homo sapiens
  misc_RNA (1)...(19): siRNA sense strand
caagaagaggagagaauga

SEQ ID NO: 1197496 - RNA, 19 nt, Homo sapiens
  misc_RNA (1)...(19): siRNA sense strand
cagagguguuagaagauaa

SEQ ID NO: 1197497 - RNA, 19 nt, Homo sapiens
  misc_RNA (1)...(19): siRNA sense strand
ggaccgcacacguuucuau

SEQ ID NO: 1197498 - RNA, 19 nt, Homo sapiens
  misc_RNA (1)...(19): siRNA sense strand
caagauacuuccuuuugaa

SEQ ID NO: 1197499 - RNA, 19 nt, Homo sapiens
  misc_RNA (1)...(19): siRNA sense strand
uaguccaacuucacaaauu

SEQ ID NO: 1197500 - RNA, 19 nt, Homo sapiens
  misc_RNA (1)...(19): siRNA sense strand
aaauauuccuuccagacaa

SEQ ID NO: 1197501 - RNA, 19 nt, Homo sapiens
  misc_RNA (1)...(19): siRNA sense strand
gauguggauuuaccuuauc

SEQ ID NO: 1197502 - RNA, 19 nt, Homo sapiens
  misc_RNA (1)...(19): siRNA sense strand
gaagguuggguucagaaga

SEQ ID NO: 1197503 - RNA, 19 nt, Homo sapiens
  misc_RNA (1)...(19): siRNA sense strand
ucagggcucuugauaaagg

SEQ ID NO: 1197504 - RNA, 19 nt, Homo sapiens
  misc_RNA (1)...(19): siRNA sense strand
cagccaccaugaagacauu

SEQ ID NO: 1197505 - RNA, 19 nt, Homo sapiens
  misc_RNA (1)...(19): siRNA sense strand
gcuaugaagauucugaaga

SEQ ID NO: 1197506 - RNA, 19 nt, Homo sapiens
  misc_RNA (1)...(19): siRNA sense strand
gccaaacacauuuauaauc

SEQ ID NO: 1197507 - RNA, 19 nt, Homo sapiens
  misc_RNA (1)...(19): siRNA sense strand
gaagaauggacagaagcua

SEQ ID NO: 1197508 - RNA, 19 nt, Homo sapiens
  misc_RNA (1)...(19): siRNA sense strand
aaagaagguuggguucaga

SEQ ID NO: 1197509 - RNA, 19 nt, Homo sapiens
  misc_RNA (1)...(19): siRNA sense strand
aaacuggcaagauguauau

SEQ ID NO: 1197510 - RNA, 19 nt, Homo sapiens
  misc_RNA (1)...(19): siRNA sense strand
uuaaagaacacuagacauc

SEQ ID NO: 1197511 - RNA, 19 nt, Homo sapiens
  misc_RNA (1)...(19): siRNA sense strand
gaaggcaaguggaaaauac

SEQ ID NO: 1197512 - RNA, 19 nt, Homo sapiens
  misc_RNA (1)...(19): siRNA sense strand
ucaaguaacaucugagaca

SEQ ID NO: 1197513 - RNA, 19 nt, Homo sapiens
  misc_RNA (1)...(19): siRNA sense strand
aaugaugugugggagguua

SEQ ID NO: 1197514 - RNA, 19 nt, Homo sapiens
  misc_RNA (1)...(19): siRNA sense strand
gacaaagauggccacauaa

SEQ ID NO: 1197515 - RNA, 19 nt, Homo sapiens
  misc_RNA (1)...(19): siRNA sense strand
caaguuggagaaucuaaug

SEQ ID NO: 1197516 - RNA, 19 nt, Homo sapiens
  misc_RNA (1)...(19): siRNA sense strand
aauauuccuuccagacaaa

SEQ ID NO: 1197517 - RNA, 19 nt, Homo sapiens
  misc_RNA (1)...(19): siRNA sense strand
agauguggauuuaccuuau

SEQ ID NO: 1197518 - RNA, 19 nt, Homo sapiens
  misc_RNA (1)...(19): siRNA sense strand
uaaaggauccaaauaaacg

SEQ ID NO: 1197519 - RNA, 19 nt, Homo sapiens
  misc_RNA (1)...(19): siRNA sense strand
caaagaagggaucacagau

SEQ ID NO: 1197520 - RNA, 19 nt, Homo sapiens
  misc_RNA (1)...(19): siRNA sense strand
gaacgaccaaagccaaaca

SEQ ID NO: 1197521 - RNA, 19 nt, Homo sapiens
  misc_RNA (1)...(19): siRNA sense strand
ccaagauacuuccuuuuga

SEQ ID NO: 1197522 - RNA, 19 nt, Homo sapiens
  misc_RNA (1)...(19): siRNA sense strand
cagcucagacuauuacaau

SEQ ID NO: 1197523 - RNA, 19 nt, Homo sapiens
  misc_RNA (1)...(19): siRNA sense strand
gcuuguaccuccuuuuaaa

SEQ ID NO: 1197524 - RNA, 19 nt, Homo sapiens
  misc_RNA (1)...(19): siRNA sense strand
cauuaaauuuccucgaaca

SEQ ID NO: 1197525 - RNA, 19 nt, Homo sapiens
  misc_RNA (1)...(19): siRNA sense strand
aagagaaaccucaagaugu

SEQ ID NO: 1197526 - RNA, 19 nt, Homo sapiens
  misc_RNA (1)...(19): siRNA sense strand
ggcacacacucuaacugaa

SEQ ID NO: 1197527 - RNA, 19 nt, Homo sapiens
  misc_RNA (1)...(19): siRNA sense strand
gagagaaggcaaguggaaa

SEQ ID NO: 1197528 - RNA, 19 nt, Homo sapiens
  misc_RNA (1)...(19): siRNA sense strand
caaagccaaacacauuuau

SEQ ID NO: 1197529 - RNA, 19 nt, Homo sapiens
  misc_RNA (1)...(19): siRNA sense strand
cgagagaaggcaaguggaa

SEQ ID NO: 1197530 - RNA, 19 nt, Homo sapiens
  misc_RNA (1)...(19): siRNA sense strand
ccucuacaacccaucauaa

SEQ ID NO: 1197531 - RNA, 19 nt, Homo sapiens
  misc_RNA (1)...(19): siRNA sense strand
gaggggagaauauauaaaa

SEQ ID NO: 1197532 - RNA, 19 nt, Homo sapiens
  misc_RNA (1)...(19): siRNA sense strand
aguccaacuucacaaauug

SEQ ID NO: 1197533 - RNA, 19 nt, Homo sapiens
  misc_RNA (1)...(19): siRNA sense strand
ugacuauggccgagcagua

SEQ ID NO: 1197534 - RNA, 19 nt, Homo sapiens
  misc_RNA (1)...(19): siRNA sense strand
uagaagauaaugacuaugg

SEQ ID NO: 1197535 - RNA, 19 nt, Homo sapiens
  misc_RNA (1)...(19): siRNA sense strand
aaagaagggaucacagaug

SEQ ID NO: 1197536 - RNA, 19 nt, Homo sapiens
  misc_RNA (1)...(19): siRNA sense strand
cuacauuccggaaagauug

SEQ ID NO: 1197537 - RNA, 19 nt, Homo sapiens
  misc_RNA (1)...(19): siRNA sense strand
gccuuggacuaucuacauu

SEQ ID NO: 1197538 - RNA, 19 nt, Homo sapiens
  misc_RNA (1)...(19): siRNA sense strand
acugaaagcagaguauuaa

SEQ ID NO: 1197539 - RNA, 19 nt, Homo sapiens
  misc_RNA (1)...(19): siRNA sense strand
uguagauacuccagaggaa

SEQ ID NO: 1197540 - RNA, 19 nt, Homo sapiens
  misc_RNA (1)...(19): siRNA sense strand
aggccaagauacuuccuuu

SEQ ID NO: 1197541 - RNA, 19 nt, Homo sapiens
  misc_RNA (1)...(19): siRNA sense strand
gcuuucagggcucuugaua

SEQ ID NO: 1197542 - RNA, 19 nt, Homo sapiens
  misc_RNA (1)...(19): siRNA sense strand
uaaagagaaaccucaagau

SEQ ID NO: 1197543 - RNA, 19 nt, Homo sapiens
  misc_RNA (1)...(19): siRNA sense strand
ugaaagcagaguauuaaag

SEQ ID NO: 1197544 - RNA, 19 nt, Homo sapiens
  misc_RNA (1)...(19): siRNA sense strand
uaacugaaagcagaguauu

SEQ ID NO: 1197545 - RNA, 19 nt, Homo sapiens
  misc_RNA (1)...(19): siRNA sense strand
caaaaugccaguuaaugaa

SEQ ID NO: 1197546 - RNA, 19 nt, Homo sapiens
  misc_RNA (1)...(19): siRNA sense strand
uauaggagaggaagagaug

SEQ ID NO: 1197547 - RNA, 19 nt, Homo sapiens
  misc_RNA (1)...(19): siRNA sense strand
aagaggagagaaugaauug

SEQ ID NO: 1197548 - RNA, 19 nt, Homo sapiens
  misc_RNA (1)...(19): siRNA sense strand
gaagcuauccaggcuguag

SEQ ID NO: 1197549 - RNA, 19 nt, Homo sapiens
  misc_RNA (1)...(19): siRNA sense strand
ccaggaccaugagaaacuu

SEQ ID NO: 1197550 - RNA, 19 nt, Homo sapiens
  misc_RNA (1)...(19): siRNA sense strand
gugauggaauauguuaaug

SEQ ID NO: 1197551 - RNA, 19 nt, Homo sapiens
  misc_RNA (1)...(19): siRNA sense strand
auagagagaacauuucaug

SEQ ID NO: 1197552 - RNA, 19 nt, Homo sapiens
  misc_RNA (1)...(19): siRNA sense strand
gagcgauguuaccauugug

SEQ ID NO: 1197553 - RNA, 19 nt, Homo sapiens
  misc_RNA (1)...(19): siRNA sense strand
gagagaaugaauuguaguc

SEQ ID NO: 1197554 - RNA, 19 nt, Homo sapiens
  misc_RNA (1)...(19): siRNA sense strand
guagauacuccagaggaaa

SEQ ID NO: 1197555 - RNA, 19 nt, Homo sapiens
  misc_RNA (1)...(19): siRNA sense strand
auaaagagaaaccucaaga

SEQ ID NO: 1197556 - RNA, 19 nt, Homo sapiens
  misc_RNA (1)...(19): siRNA sense strand
ggacaaagauggccacaua

SEQ ID NO: 1197557 - RNA, 19 nt, Homo sapiens
  misc_RNA (1)...(19): siRNA sense strand
gaagacagauggcucauuc

SEQ ID NO: 1197558 - RNA, 19 nt, Homo sapiens
  misc_RNA (1)...(19): siRNA sense strand
ggaguaaacuggcaagaug

SEQ ID NO: 1197559 - RNA, 19 nt, Homo sapiens
  misc_RNA (1)...(19): siRNA sense strand
gaaagcagaguauuaaaga

SEQ ID NO: 1197560 - RNA, 19 nt, Homo sapiens
  misc_RNA (1)...(19): siRNA sense strand
ggcaagauguauaugauaa

SEQ ID NO: 1197561 - RNA, 19 nt, Homo sapiens
  misc_RNA (1)...(19): siRNA sense strand
gacauuaaauuuccucgaa

SEQ ID NO: 1197562 - RNA, 19 nt, Homo sapiens
  misc_RNA (1)...(19): siRNA sense strand
gaaauuaugagacacaguu

SEQ ID NO: 1197563 - RNA, 19 nt, Homo sapiens
  misc_RNA (1)...(19): siRNA sense strand
gaccaaagccaaacacauu

SEQ ID NO: 1197564 - RNA, 19 nt, Homo sapiens
  misc_RNA (1)...(19): siRNA sense strand
gaggagagaaugaauugua

SEQ ID NO: 1197565 - RNA, 19 nt, Homo sapiens
  misc_RNA (1)...(19): siRNA sense strand
acagauggcucauucauag

SEQ ID NO: 1197566 - RNA, 19 nt, Homo sapiens
  misc_RNA (1)...(19): siRNA sense strand
gcaaagaagggaucacaga

SEQ ID NO: 1197567 - RNA, 19 nt, Homo sapiens
  misc_RNA (1)...(19): siRNA sense strand
gaagaggagagaaugaauu

SEQ ID NO: 1197568 - RNA, 19 nt, Homo sapiens
  misc_RNA (1)...(19): siRNA sense strand
ccagagguguuagaagaua

SEQ ID NO: 1197569 - RNA, 19 nt, Homo sapiens
  misc_RNA (1)...(19): siRNA sense strand
gcacacacucuaacugaaa

SEQ ID NO: 1197570 - RNA, 19 nt, Homo sapiens
  misc_RNA (1)...(19): siRNA sense strand
agagaaaccucaagaugug

SEQ ID NO: 1197571 - RNA, 19 nt, Homo sapiens
  misc_RNA (1)...(19): siRNA sense strand
ugagacagauacuagauau

SEQ ID NO: 1197572 - RNA, 19 nt, Homo sapiens
  misc_RNA (1)...(19): siRNA sense strand
uuucagggcucuugauaaa

SEQ ID NO: 1197573 - RNA, 19 nt, Homo sapiens
  misc_RNA (1)...(19): siRNA sense strand
gaaagaagguuggguucag

SEQ ID NO: 1197574 - RNA, 19 nt, Homo sapiens
  misc_RNA (1)...(19): siRNA sense strand
gaaauauuccuuccagaca

SEQ ID NO: 1197575 - RNA, 19 nt, Homo sapiens
  misc_RNA (1)...(19): siRNA sense strand
cgaacacucucuucagaug

SEQ ID NO: 1197576 - RNA, 19 nt, Homo sapiens
  misc_RNA (1)...(19): siRNA sense strand
ccaaagccaaacacauuua

SEQ ID NO: 1197577 - RNA, 19 nt, Homo sapiens
  misc_RNA (1)...(19): siRNA sense strand
gcucauucauaggauauaa

SEQ ID NO: 1197578 - RNA, 19 nt, Homo sapiens
  misc_RNA (1)...(19): siRNA sense strand
gaauuuacagcucagacua

SEQ ID NO: 1197579 - RNA, 19 nt, Homo sapiens
  misc_RNA (1)...(19): siRNA sense strand
guaccgugaucucaaguug

SEQ ID NO: 1197580 - RNA, 19 nt, Homo sapiens
  misc_RNA (1)...(19): siRNA sense strand
gaaagaagucauuauugca

SEQ ID NO: 1197581 - RNA, 19 nt, Homo sapiens
  misc_RNA (1)...(19): siRNA sense strand
agaaagaagucauuauugc

SEQ ID NO: 1197582 - RNA, 19 nt, Homo sapiens
  misc_RNA (1)...(19): siRNA sense strand
gaagaggggagaauauaua

SEQ ID NO: 1197583 - RNA, 19 nt, Homo sapiens
  misc_RNA (1)...(19): siRNA sense strand
caaccaggaccaugagaaa

SEQ ID NO: 1197584 - RNA, 19 nt, Homo sapiens
  misc_RNA (1)...(19): siRNA sense strand
gacagauggcucauucaua

SEQ ID NO: 1197585 - RNA, 19 nt, Homo sapiens
  misc_RNA (1)...(19): siRNA sense strand
gcaagaagaggagagaaug

SEQ ID NO: 1197586 - RNA, 19 nt, Homo sapiens
  misc_RNA (1)...(19): siRNA sense strand
aaagagaaaccucaagaug

SEQ ID NO: 1197587 - RNA, 19 nt, Homo sapiens
  misc_RNA (1)...(19): siRNA sense strand
uaaacuggcaagauguaua

SEQ ID NO: 1197588 - RNA, 19 nt, Homo sapiens
  misc_RNA (1)...(19): siRNA sense strand
gcaaaaugccaguuaauga

SEQ ID NO: 1197589 - RNA, 19 nt, Homo sapiens
  misc_RNA (1)...(19): siRNA sense strand
agaaugaauuguaguccaa

SEQ ID NO: 1197590 - RNA, 19 nt, Homo sapiens
  misc_RNA (1)...(19): siRNA sense strand
acaauaacaccaccugaaa

SEQ ID NO: 1197591 - RNA, 19 nt, Homo sapiens
  misc_RNA (1)...(19): siRNA sense strand
gaacacuagacaucccuuu

SEQ ID NO: 1197592 - RNA, 19 nt, Homo sapiens
  misc_RNA (1)...(19): siRNA sense strand
ggaaaauacuaugcuauga

SEQ ID NO: 1197593 - RNA, 19 nt, Homo sapiens
  misc_RNA (1)...(19): siRNA sense strand
gaauuguaguccaacuuca

SEQ ID NO: 1197594 - RNA, 19 nt, Homo sapiens
  misc_RNA (1)...(19): siRNA sense strand
acaaagauggccacauaaa

SEQ ID NO: 1197595 - RNA, 19 nt, Homo sapiens
  misc_RNA (1)...(19): siRNA sense strand
caagaagaggagagaauga

SEQ ID NO: 1197596 - RNA, 19 nt, Homo sapiens
  misc_RNA (1)...(19): siRNA sense strand
cagagguguuagaagauaa

SEQ ID NO: 1197597 - RNA, 19 nt, Homo sapiens
  misc_RNA (1)...(19): siRNA sense strand
ggaccgcacacguuucuau

SEQ ID NO: 1197598 - RNA, 19 nt, Homo sapiens
  misc_RNA (1)...(19): siRNA sense strand
caagauacuuccuuuugaa

SEQ ID NO: 1197599 - RNA, 19 nt, Homo sapiens
  misc_RNA (1)...(19): siRNA sense strand
uaguccaacuucacaaauu

SEQ ID NO: 1197600 - RNA, 19 nt, Homo sapiens
  misc_RNA (1)...(19): siRNA sense strand
aaauauuccuuccagacaa

SEQ ID NO: 1197601 - RNA, 19 nt, Homo sapiens
  misc_RNA (1)...(19): siRNA sense strand
gauguggauuuaccuuauc

SEQ ID NO: 1197602 - RNA, 19 nt, Homo sapiens
  misc_RNA (1)...(19): siRNA sense strand
gaagguuggguucagaaga

SEQ ID NO: 1197603 - RNA, 19 nt, Homo sapiens
  misc_RNA (1)...(19): siRNA sense strand
ucagggcucuugauaaagg

SEQ ID NO: 1197604 - RNA, 19 nt, Homo sapiens
  misc_RNA (1)...(19): siRNA sense strand
cagccaccaugaagacauu

SEQ ID NO: 1197605 - RNA, 19 nt, Homo sapiens
  misc_RNA (1)...(19): siRNA sense strand
gcuaugaagauucugaaga

SEQ ID NO: 1197606 - RNA, 19 nt, Homo sapiens
  misc_RNA (1)...(19): siRNA sense strand
gccaaacacauuuauaauc

SEQ ID NO: 1197607 - RNA, 19 nt, Homo sapiens
  misc_RNA (1)...(19): siRNA sense strand
gaagaauggacagaagcua

SEQ ID NO: 1197608 - RNA, 19 nt, Homo sapiens
  misc_RNA (1)...(19): siRNA sense strand
aaagaagguuggguucaga

SEQ ID NO: 1197609 - RNA, 19 nt, Homo sapiens
  misc_RNA (1)...(19): siRNA sense strand
aaacuggcaagauguauau

SEQ ID NO: 1197610 - RNA, 19 nt, Homo sapiens
  misc_RNA (1)...(19): siRNA sense strand
uuaaagaacacuagacauc

SEQ ID NO: 1197611 - RNA, 19 nt, Homo sapiens
  misc_RNA (1)...(19): siRNA sense strand
gaaggcaaguggaaaauac

SEQ ID NO: 1197612 - RNA, 19 nt, Homo sapiens
  misc_RNA (1)...(19): siRNA sense strand
ucaaguaacaucugagaca

SEQ ID NO: 1197613 - RNA, 19 nt, Homo sapiens
  misc_RNA (1)...(19): siRNA sense strand
aaugaugugugggagguua

SEQ ID NO: 1197614 - RNA, 19 nt, Homo sapiens
  misc_RNA (1)...(19): siRNA sense strand
gacaaagauggccacauaa

SEQ ID NO: 1197615 - RNA, 19 nt, Homo sapiens
  misc_RNA (1)...(19): siRNA sense strand
caaguuggagaaucuaaug

SEQ ID NO: 1197616 - RNA, 19 nt, Homo sapiens
  misc_RNA (1)...(19): siRNA sense strand
aauauuccuuccagacaaa

SEQ ID NO: 1197617 - RNA, 19 nt, Homo sapiens
  misc_RNA (1)...(19): siRNA sense strand
agauguggauuuaccuuau

SEQ ID NO: 1197618 - RNA, 19 nt, Homo sapiens
  misc_RNA (1)...(19): siRNA sense strand
uaaaggauccaaauaaacg

SEQ ID NO: 1197619 - RNA, 19 nt, Homo sapiens
  misc_RNA (1)...(19): siRNA sense strand
caaagaagggaucacagau

SEQ ID NO: 1197620 - RNA, 19 nt, Homo sapiens
  misc_RNA (1)...(19): siRNA sense strand
gaacgaccaaagccaaaca

SEQ ID NO: 1197621 - RNA, 19 nt, Homo sapiens
  misc_RNA (1)...(19): siRNA sense strand
ccaagauacuuccuuuuga

SEQ ID NO: 1197622 - RNA, 19 nt, Homo sapiens
  misc_RNA (1)...(19): siRNA sense strand
cagcucagacuauuacaau

SEQ ID NO: 1197623 - RNA, 19 nt, Homo sapiens
  misc_RNA (1)...(19): siRNA sense strand
gcuuguaccuccuuuuaaa

SEQ ID NO: 1197624 - RNA, 19 nt, Homo sapiens
  misc_RNA (1)...(19): siRNA sense strand
cauuaaauuuccucgaaca

SEQ ID NO: 1197625 - RNA, 19 nt, Homo sapiens
  misc_RNA (1)...(19): siRNA sense strand
aagagaaaccucaagaugu

SEQ ID NO: 1197626 - RNA, 19 nt, Homo sapiens
  misc_RNA (1)...(19): siRNA sense strand
ggcacacacucuaacugaa

SEQ ID NO: 1197627 - RNA, 19 nt, Homo sapiens
  misc_RNA (1)...(19): siRNA sense strand
gagagaaggcaaguggaaa

SEQ ID NO: 1197628 - RNA, 19 nt, Homo sapiens
  misc_RNA (1)...(19): siRNA sense strand
caaagccaaacacauuuau

SEQ ID NO: 1197629 - RNA, 19 nt, Homo sapiens
  misc_RNA (1)...(19): siRNA sense strand
cgagagaaggcaaguggaa

SEQ ID NO: 1197630 - RNA, 19 nt, Homo sapiens
  misc_RNA (1)...(19): siRNA sense strand
ccucuacaacccaucauaa

SEQ ID NO: 1197631 - RNA, 19 nt, Homo sapiens
  misc_RNA (1)...(19): siRNA sense strand
gaggggagaauauauaaaa

SEQ ID NO: 1197632 - RNA, 19 nt, Homo sapiens
  misc_RNA (1)...(19): siRNA sense strand
aguccaacuucacaaauug

SEQ ID NO: 1197633 - RNA, 19 nt, Homo sapiens
  misc_RNA (1)...(19): siRNA sense strand
ugacuauggccgagcagua

SEQ ID NO: 1197634 - RNA, 19 nt, Homo sapiens
  misc_RNA (1)...(19): siRNA sense strand
uagaagauaaugacuaugg

SEQ ID NO: 1197635 - RNA, 19 nt, Homo sapiens
  misc_RNA (1)...(19): siRNA sense strand
aaagaagggaucacagaug

SEQ ID NO: 1197636 - RNA, 19 nt, Homo sapiens
  misc_RNA (1)...(19): siRNA sense strand
cuacauuccggaaagauug

SEQ ID NO: 1197637 - RNA, 19 nt, Homo sapiens
  misc_RNA (1)...(19): siRNA sense strand
gccuuggacuaucuacauu

SEQ ID NO: 1197638 - RNA, 19 nt, Homo sapiens
  misc_RNA (1)...(19): siRNA sense strand
acugaaagcagaguauuaa

SEQ ID NO: 1197639 - RNA, 19 nt, Homo sapiens
  misc_RNA (1)...(19): siRNA sense strand
uguagauacuccagaggaa

SEQ ID NO: 1197640 - RNA, 19 nt, Homo sapiens
  misc_RNA (1)...(19): siRNA sense strand
aggccaagauacuuccuuu

SEQ ID NO: 1197641 - RNA, 19 nt, Homo sapiens
  misc_RNA (1)...(19): siRNA sense strand
gcuuucagggcucuugaua

SEQ ID NO: 1197642 - RNA, 19 nt, Homo sapiens
  misc_RNA (1)...(19): siRNA sense strand
uaaagagaaaccucaagau

SEQ ID NO: 1197643 - RNA, 19 nt, Homo sapiens
  misc_RNA (1)...(19): siRNA sense strand
ugaaagcagaguauuaaag

SEQ ID NO: 1197644 - RNA, 19 nt, Homo sapiens
  misc_RNA (1)...(19): siRNA sense strand
uaacugaaagcagaguauu

SEQ ID NO: 1197645 - RNA, 19 nt, Homo sapiens
  misc_RNA (1)...(19): siRNA sense strand
caaaaugccaguuaaugaa

SEQ ID NO: 1197646 - RNA, 19 nt, Homo sapiens
  misc_RNA (1)...(19): siRNA sense strand
uauaggagaggaagagaug

SEQ ID NO: 1197647 - RNA, 19 nt, Homo sapiens
  misc_RNA (1)...(19): siRNA sense strand
aagaggagagaaugaauug

SEQ ID NO: 1197648 - RNA, 19 nt, Homo sapiens
  misc_RNA (1)...(19): siRNA sense strand
gaagcuauccaggcuguag

SEQ ID NO: 1197649 - RNA, 19 nt, Homo sapiens
  misc_RNA (1)...(19): siRNA sense strand
ccaggaccaugagaaacuu

SEQ ID NO: 1197650 - RNA, 19 nt, Homo sapiens
  misc_RNA (1)...(19): siRNA sense strand
gugauggaauauguuaaug

SEQ ID NO: 1197651 - RNA, 19 nt, Homo sapiens
  misc_RNA (1)...(19): siRNA sense strand
auagagagaacauuucaug

SEQ ID NO: 1197652 - RNA, 19 nt, Homo sapiens
  misc_RNA (1)...(19): siRNA sense strand
gagcgauguuaccauugug

SEQ ID NO: 1197653 - RNA, 19 nt, Homo sapiens
  misc_RNA (1)...(19): siRNA sense strand
gagagaaugaauuguaguc

SEQ ID NO: 1197654 - RNA, 19 nt, Homo sapiens
  misc_RNA (1)...(19): siRNA sense strand
guagauacuccagaggaaa

SEQ ID NO: 1197655 - RNA, 19 nt, Homo sapiens
  misc_RNA (1)...(19): siRNA sense strand
auaaagagaaaccucaaga

SEQ ID NO: 1197656 - RNA, 19 nt, Homo sapiens
  misc_RNA (1)...(19): siRNA sense strand
agaaaggccuguucaacua

SEQ ID NO: 1197657 - RNA, 19 nt, Homo sapiens
  misc_RNA (1)...(19): siRNA sense strand
gaccaugacugaugcuuau

SEQ ID NO: 1197658 - RNA, 19 nt, Homo sapiens
  misc_RNA (1)...(19): siRNA sense strand
gaacaucggcuacgucauc

SEQ ID NO: 1197659 - RNA, 19 nt, Homo sapiens
  misc_RNA (1)...(19): siRNA sense strand
aaaggcaaacgaccaauua

SEQ ID NO: 1197660 - RNA, 19 nt, Homo sapiens
  misc_RNA (1)...(19): siRNA sense strand
cgagaauccuuacaccaaa

SEQ ID NO: 1197661 - RNA, 19 nt, Homo sapiens
  misc_RNA (1)...(19): siRNA sense strand
gagaaaggccuguucaacu

SEQ ID NO: 1197662 - RNA, 19 nt, Homo sapiens
  misc_RNA (1)...(19): siRNA sense strand
ccaccaucgucaucgcuua

SEQ ID NO: 1197663 - RNA, 19 nt, Homo sapiens
  misc_RNA (1)...(19): siRNA sense strand
caugacugaugcuuauaaa

SEQ ID NO: 1197664 - RNA, 19 nt, Homo sapiens
  misc_RNA (1)...(19): siRNA sense strand
caaaggcaaacgaccaauu

SEQ ID NO: 1197665 - RNA, 19 nt, Homo sapiens
  misc_RNA (1)...(19): siRNA sense strand
gagaauccuuacaccaaag

SEQ ID NO: 1197666 - RNA, 19 nt, Homo sapiens
  misc_RNA (1)...(19): siRNA sense strand
ugaagaggcuuuugaguuc

SEQ ID NO: 1197667 - RNA, 19 nt, Homo sapiens
  misc_RNA (1)...(19): siRNA sense strand
caacgucaccacucaucuu

SEQ ID NO: 1197668 - RNA, 19 nt, Homo sapiens
  misc_RNA (1)...(19): siRNA sense strand
ggcaaacgaccaauuaucu

SEQ ID NO: 1197669 - RNA, 19 nt, Homo sapiens
  misc_RNA (1)...(19): siRNA sense strand
ugaccaugacugaugcuua

SEQ ID NO: 1197670 - RNA, 19 nt, Homo sapiens
  misc_RNA (1)...(19): siRNA sense strand
ccaugacugaugcuuauaa

SEQ ID NO: 1197671 - RNA, 19 nt, Homo sapiens
  misc_RNA (1)...(19): siRNA sense strand
caucuugcccuuccuguuc

SEQ ID NO: 1197672 - RNA, 19 nt, Homo sapiens
  misc_RNA (1)...(19): siRNA sense strand
ccgagaauccuuacaccaa

SEQ ID NO: 1197673 - RNA, 19 nt, Homo sapiens
  misc_RNA (1)...(19): siRNA sense strand
gaaaggccuguucaacuac

SEQ ID NO: 1197674 - RNA, 19 nt, Homo sapiens
  misc_RNA (1)...(19): siRNA sense strand
gcaaacgaccaauuaucuc

SEQ ID NO: 1197675 - RNA, 19 nt, Homo sapiens
  misc_RNA (1)...(19): siRNA sense strand
ccacucaucuuccccucua

SEQ ID NO: 1197676 - RNA, 19 nt, Homo sapiens
  misc_RNA (1)...(19): siRNA sense strand
cgaggaagaccuaaacaac

SEQ ID NO: 1197677 - RNA, 19 nt, Homo sapiens
  misc_RNA (1)...(19): siRNA sense strand
ucaucaacgucaccacuca

SEQ ID NO: 1197678 - RNA, 19 nt, Homo sapiens
  misc_RNA (1)...(19): siRNA sense strand
ccucuaccacuaugagaaa

SEQ ID NO: 1197679 - RNA, 19 nt, Homo sapiens
  misc_RNA (1)...(19): siRNA sense strand
ccacugacagcaacaagca

SEQ ID NO: 1197680 - RNA, 19 nt, Homo sapiens
  misc_RNA (1)...(19): siRNA sense strand
gaaaaccucugugacaacu

SEQ ID NO: 1197681 - RNA, 19 nt, Homo sapiens
  misc_RNA (1)...(19): siRNA sense strand
gaccuaaacaacgguguga

SEQ ID NO: 1197682 - RNA, 19 nt, Homo sapiens
  misc_RNA (1)...(19): siRNA sense strand
cggaugaccaugacugaug

SEQ ID NO: 1197683 - RNA, 19 nt, Homo sapiens
  misc_RNA (1)...(19): siRNA sense strand
caucgucaucgcuuacuug

SEQ ID NO: 1197684 - RNA, 19 nt, Homo sapiens
  misc_RNA (1)...(19): siRNA sense strand
ggcaguugcuagaguucga

SEQ ID NO: 1197685 - RNA, 19 nt, Homo sapiens
  misc_RNA (1)...(19): siRNA sense strand
ugcuagaguucgaggaaga

SEQ ID NO: 1197686 - RNA, 19 nt, Homo sapiens
  misc_RNA (1)...(19): siRNA sense strand
gugacaccgagaauccuua

SEQ ID NO: 1197687 - RNA, 19 nt, Homo sapiens
  misc_RNA (1)...(19): siRNA sense strand
aaaggccuguucaacuaca

SEQ ID NO: 1197688 - RNA, 19 nt, Homo sapiens
  misc_RNA (1)...(19): siRNA sense strand
agaguucgaggaagaccua

SEQ ID NO: 1197689 - RNA, 19 nt, Homo sapiens
  misc_RNA (1)...(19): siRNA sense strand
ccaauuaucuccccaaacc

SEQ ID NO: 1197690 - RNA, 19 nt, Homo sapiens
  misc_RNA (1)...(19): siRNA sense strand
gaccaauuaucuccccaaa

SEQ ID NO: 1197691 - RNA, 19 nt, Homo sapiens
  misc_RNA (1)...(19): siRNA sense strand
gaagaggcuuuugaguuca

SEQ ID NO: 1197692 - RNA, 19 nt, Homo sapiens
  misc_RNA (1)...(19): siRNA sense strand
cccaaaccuuaacuucaug

SEQ ID NO: 1197693 - RNA, 19 nt, Homo sapiens
  misc_RNA (1)...(19): siRNA sense strand
agaaaggccuguucaacua

SEQ ID NO: 1197694 - RNA, 19 nt, Homo sapiens
  misc_RNA (1)...(19): siRNA sense strand
gaccaugacugaugcuuau

SEQ ID NO: 1197695 - RNA, 19 nt, Homo sapiens
  misc_RNA (1)...(19): siRNA sense strand
gaacaucggcuacgucauc

SEQ ID NO: 1197696 - RNA, 19 nt, Homo sapiens
  misc_RNA (1)...(19): siRNA sense strand
aaaggcaaacgaccaauua

SEQ ID NO: 1197697 - RNA, 19 nt, Homo sapiens
  misc_RNA (1)...(19): siRNA sense strand
cgagaauccuuacaccaaa

SEQ ID NO: 1197698 - RNA, 19 nt, Homo sapiens
  misc_RNA (1)...(19): siRNA sense strand
gagaaaggccuguucaacu

SEQ ID NO: 1197699 - RNA, 19 nt, Homo sapiens
  misc_RNA (1)...(19): siRNA sense strand
ccaccaucgucaucgcuua

SEQ ID NO: 1197700 - RNA, 19 nt, Homo sapiens
  misc_RNA (1)...(19): siRNA sense strand
caugacugaugcuuauaaa

SEQ ID NO: 1197701 - RNA, 19 nt, Homo sapiens
  misc_RNA (1)...(19): siRNA sense strand
caaaggcaaacgaccaauu

SEQ ID NO: 1197702 - RNA, 19 nt, Homo sapiens
  misc_RNA (1)...(19): siRNA sense strand
gagaauccuuacaccaaag

SEQ ID NO: 1197703 - RNA, 19 nt, Homo sapiens
  misc_RNA (1)...(19): siRNA sense strand
ugaagaggcuuuugaguuc

SEQ ID NO: 1197704 - RNA, 19 nt, Homo sapiens
  misc_RNA (1)...(19): siRNA sense strand
caacgucaccacucaucuu

SEQ ID NO: 1197705 - RNA, 19 nt, Homo sapiens
  misc_RNA (1)...(19): siRNA sense strand
ggcaaacgaccaauuaucu

SEQ ID NO: 1197706 - RNA, 19 nt, Homo sapiens
  misc_RNA (1)...(19): siRNA sense strand
ugaccaugacugaugcuua

SEQ ID NO: 1197707 - RNA, 19 nt, Homo sapiens
  misc_RNA (1)...(19): siRNA sense strand
ccaugacugaugcuuauaa

SEQ ID NO: 1197708 - RNA, 19 nt, Homo sapiens
  misc_RNA (1)...(19): siRNA sense strand
ccgagaauccuuacaccaa

SEQ ID NO: 1197709 - RNA, 19 nt, Homo sapiens
  misc_RNA (1)...(19): siRNA sense strand
gaaaggccuguucaacuac

SEQ ID NO: 1197710 - RNA, 19 nt, Homo sapiens
  misc_RNA (1)...(19): siRNA sense strand
gcaaacgaccaauuaucuc

SEQ ID NO: 1197711 - RNA, 19 nt, Homo sapiens
  misc_RNA (1)...(19): siRNA sense strand
ccacucaucuuccccucua

SEQ ID NO: 1197712 - RNA, 19 nt, Homo sapiens
  misc_RNA (1)...(19): siRNA sense strand
cgaggaagaccuaaacaac

SEQ ID NO: 1197713 - RNA, 19 nt, Homo sapiens
  misc_RNA (1)...(19): siRNA sense strand
ucaucaacgucaccacuca

SEQ ID NO: 1197714 - RNA, 19 nt, Homo sapiens
  misc_RNA (1)...(19): siRNA sense strand
ccucuaccacuaugagaaa

SEQ ID NO: 1197715 - RNA, 19 nt, Homo sapiens
  misc_RNA (1)...(19): siRNA sense strand
ccacugacagcaacaagca

SEQ ID NO: 1197716 - RNA, 19 nt, Homo sapiens
  misc_RNA (1)...(19): siRNA sense strand
gaccuaaacaacgguguga

SEQ ID NO: 1197717 - RNA, 19 nt, Homo sapiens
  misc_RNA (1)...(19): siRNA sense strand
cggaugaccaugacugaug

SEQ ID NO: 1197718 - RNA, 19 nt, Homo sapiens
  misc_RNA (1)...(19): siRNA sense strand
caucgucaucgcuuacuug

SEQ ID NO: 1197719 - RNA, 19 nt, Homo sapiens
  misc_RNA (1)...(19): siRNA sense strand
ggcaguugcuagaguucga

SEQ ID NO: 1197720 - RNA, 19 nt, Homo sapiens
  misc_RNA (1)...(19): siRNA sense strand
ugcuagaguucgaggaaga

SEQ ID NO: 1197721 - RNA, 19 nt, Homo sapiens
  misc_RNA (1)...(19): siRNA sense strand
gugacaccgagaauccuua

SEQ ID NO: 1197722 - RNA, 19 nt, Homo sapiens
  misc_RNA (1)...(19): siRNA sense strand
aaaggccuguucaacuaca

SEQ ID NO: 1197723 - RNA, 19 nt, Homo sapiens
  misc_RNA (1)...(19): siRNA sense strand
agaguucgaggaagaccua

SEQ ID NO: 1197724 - RNA, 19 nt, Homo sapiens
  misc_RNA (1)...(19): siRNA sense strand
ccaauuaucuccccaaacc

SEQ ID NO: 1197725 - RNA, 19 nt, Homo sapiens
  misc_RNA (1)...(19): siRNA sense strand
gaccaauuaucuccccaaa

SEQ ID NO: 1197726 - RNA, 19 nt, Homo sapiens
  misc_RNA (1)...(19): siRNA sense strand
gaagaggcuuuugaguuca

SEQ ID NO: 1197727 - RNA, 19 nt, Homo sapiens
  misc_RNA (1)...(19): siRNA sense strand
cccaaaccuuaacuucaug

SEQ ID NO: 1197728 - RNA, 19 nt, Homo sapiens
  misc_RNA (1)...(19): siRNA sense strand
agaaaggccuguucaacua

SEQ ID NO: 1197729 - RNA, 19 nt, Homo sapiens
  misc_RNA (1)...(19): siRNA sense strand
gaccaugacugaugcuuau

SEQ ID NO: 1197730 - RNA, 19 nt, Homo sapiens
  misc_RNA (1)...(19): siRNA sense strand
gaacaucggcuacgucauc

SEQ ID NO: 1197731 - RNA, 19 nt, Homo sapiens
  misc_RNA (1)...(19): siRNA sense strand
aaaggcaaacgaccaauua

SEQ ID NO: 1197732 - RNA, 19 nt, Homo sapiens
  misc_RNA (1)...(19): siRNA sense strand
cgagaauccuuacaccaaa

SEQ ID NO: 1197733 - RNA, 19 nt, Homo sapiens
  misc_RNA (1)...(19): siRNA sense strand
gagaaaggccuguucaacu

SEQ ID NO: 1197734 - RNA, 19 nt, Homo sapiens
  misc_RNA (1)...(19): siRNA sense strand
ccaccaucgucaucgcuua

SEQ ID NO: 1197735 - RNA, 19 nt, Homo sapiens
  misc_RNA (1)...(19): siRNA sense strand
caugacugaugcuuauaaa

SEQ ID NO: 1197736 - RNA, 19 nt, Homo sapiens
  misc_RNA (1)...(19): siRNA sense strand
caaaggcaaacgaccaauu

SEQ ID NO: 1197737 - RNA, 19 nt, Homo sapiens
  misc_RNA (1)...(19): siRNA sense strand
gagaauccuuacaccaaag

SEQ ID NO: 1197738 - RNA, 19 nt, Homo sapiens
  misc_RNA (1)...(19): siRNA sense strand
ugaagaggcuuuugaguuc

SEQ ID NO: 1197739 - RNA, 19 nt, Homo sapiens
  misc_RNA (1)...(19): siRNA sense strand
caacgucaccacucaucuu

SEQ ID NO: 1197740 - RNA, 19 nt, Homo sapiens
  misc_RNA (1)...(19): siRNA sense strand
ggcaaacgaccaauuaucu

SEQ ID NO: 1197741 - RNA, 19 nt, Homo sapiens
  misc_RNA (1)...(19): siRNA sense strand
ugaccaugacugaugcuua

SEQ ID NO: 1197742 - RNA, 19 nt, Homo sapiens
  misc_RNA (1)...(19): siRNA sense strand
ccaugacugaugcuuauaa

SEQ ID NO: 1197743 - RNA, 19 nt, Homo sapiens
  misc_RNA (1)...(19): siRNA sense strand
ccgagaauccuuacaccaa

SEQ ID NO: 1197744 - RNA, 19 nt, Homo sapiens
  misc_RNA (1)...(19): siRNA sense strand
gaaaggccuguucaacuac

SEQ ID NO: 1197745 - RNA, 19 nt, Homo sapiens
  misc_RNA (1)...(19): siRNA sense strand
gcaaacgaccaauuaucuc

SEQ ID NO: 1197746 - RNA, 19 nt, Homo sapiens
  misc_RNA (1)...(19): siRNA sense strand
ccacucaucuuccccucua

SEQ ID NO: 1197747 - RNA, 19 nt, Homo sapiens
  misc_RNA (1)...(19): siRNA sense strand
cgaggaagaccuaaacaac

SEQ ID NO: 1197748 - RNA, 19 nt, Homo sapiens
  misc_RNA (1)...(19): siRNA sense strand
ucaucaacgucaccacuca

SEQ ID NO: 1197749 - RNA, 19 nt, Homo sapiens
  misc_RNA (1)...(19): siRNA sense strand
ccucuaccacuaugagaaa

SEQ ID NO: 1197750 - RNA, 19 nt, Homo sapiens
  misc_RNA (1)...(19): siRNA sense strand
ccacugacagcaacaagca

SEQ ID NO: 1197751 - RNA, 19 nt, Homo sapiens
  misc_RNA (1)...(19): siRNA sense strand
gaccuaaacaacgguguga

SEQ ID NO: 1197752 - RNA, 19 nt, Homo sapiens
  misc_RNA (1)...(19): siRNA sense strand
cggaugaccaugacugaug

SEQ ID NO: 1197753 - RNA, 19 nt, Homo sapiens
  misc_RNA (1)...(19): siRNA sense strand
caucgucaucgcuuacuug

SEQ ID NO: 1197754 - RNA, 19 nt, Homo sapiens
  misc_RNA (1)...(19): siRNA sense strand
ggcaguugcuagaguucga

SEQ ID NO: 1197755 - RNA, 19 nt, Homo sapiens
  misc_RNA (1)...(19): siRNA sense strand
ugcuagaguucgaggaaga

SEQ ID NO: 1197756 - RNA, 19 nt, Homo sapiens
  misc_RNA (1)...(19): siRNA sense strand
gugacaccgagaauccuua

SEQ ID NO: 1197757 - RNA, 19 nt, Homo sapiens
  misc_RNA (1)...(19): siRNA sense strand
aaaggccuguucaacuaca

SEQ ID NO: 1197758 - RNA, 19 nt, Homo sapiens
  misc_RNA (1)...(19): siRNA sense strand
agaguucgaggaagaccua

SEQ ID NO: 1197759 - RNA, 19 nt, Homo sapiens
  misc_RNA (1)...(19): siRNA sense strand
ccaauuaucuccccaaacc

SEQ ID NO: 1197760 - RNA, 19 nt, Homo sapiens
  misc_RNA (1)...(19): siRNA sense strand
gaccaauuaucuccccaaa

SEQ ID NO: 1197761 - RNA, 19 nt, Homo sapiens
  misc_RNA (1)...(19): siRNA sense strand
gaagaggcuuuugaguuca

SEQ ID NO: 1197762 - RNA, 19 nt, Homo sapiens
  misc_RNA (1)...(19): siRNA sense strand
cccaaaccuuaacuucaug

SEQ ID NO: 1197763 - RNA, 19 nt, Homo sapiens
  misc_RNA (1)...(19): siRNA sense strand
agaaaggccuguucaacua

SEQ ID NO: 1197764 - RNA, 19 nt, Homo sapiens
  misc_RNA (1)...(19): siRNA sense strand
gaccaugacugaugcuuau

SEQ ID NO: 1197765 - RNA, 19 nt, Homo sapiens
  misc_RNA (1)...(19): siRNA sense strand
gaacaucggcuacgucauc

SEQ ID NO: 1197766 - RNA, 19 nt, Homo sapiens
  misc_RNA (1)...(19): siRNA sense strand
aaaggcaaacgaccaauua

SEQ ID NO: 1197767 - RNA, 19 nt, Homo sapiens
  misc_RNA (1)...(19): siRNA sense strand
cgagaauccuuacaccaaa

SEQ ID NO: 1197768 - RNA, 19 nt, Homo sapiens
  misc_RNA (1)...(19): siRNA sense strand
gagaaaggccuguucaacu

SEQ ID NO: 1197769 - RNA, 19 nt, Homo sapiens
  misc_RNA (1)...(19): siRNA sense strand
ccaccaucgucaucgcuua

SEQ ID NO: 1197770 - RNA, 19 nt, Homo sapiens
  misc_RNA (1)...(19): siRNA sense strand
caugacugaugcuuauaaa

SEQ ID NO: 1197771 - RNA, 19 nt, Homo sapiens
  misc_RNA (1)...(19): siRNA sense strand
caaaggcaaacgaccaauu

SEQ ID NO: 1197772 - RNA, 19 nt, Homo sapiens
  misc_RNA (1)...(19): siRNA sense strand
gagaauccuuacaccaaag

SEQ ID NO: 1197773 - RNA, 19 nt, Homo sapiens
  misc_RNA (1)...(19): siRNA sense strand
ugaagaggcuuuugaguuc

SEQ ID NO: 1197774 - RNA, 19 nt, Homo sapiens
  misc_RNA (1)...(19): siRNA sense strand
caacgucaccacucaucuu

SEQ ID NO: 1197775 - RNA, 19 nt, Homo sapiens
  misc_RNA (1)...(19): siRNA sense strand
ggcaaacgaccaauuaucu

SEQ ID NO: 1197776 - RNA, 19 nt, Homo sapiens
  misc_RNA (1)...(19): siRNA sense strand
ugaccaugacugaugcuua

SEQ ID NO: 1197777 - RNA, 19 nt, Homo sapiens
  misc_RNA (1)...(19): siRNA sense strand
ccaugacugaugcuuauaa

SEQ ID NO: 1197778 - RNA, 19 nt, Homo sapiens
  misc_RNA (1)...(19): siRNA sense strand
caucuugcccuuccuguuc

SEQ ID NO: 1197779 - RNA, 19 nt, Homo sapiens
  misc_RNA (1)...(19): siRNA sense strand
ccgagaauccuuacaccaa

SEQ ID NO: 1197780 - RNA, 19 nt, Homo sapiens
  misc_RNA (1)...(19): siRNA sense strand
gaaaggccuguucaacuac

SEQ ID NO: 1197781 - RNA, 19 nt, Homo sapiens
  misc_RNA (1)...(19): siRNA sense strand
gcaaacgaccaauuaucuc

SEQ ID NO: 1197782 - RNA, 19 nt, Homo sapiens
  misc_RNA (1)...(19): siRNA sense strand
ccacucaucuuccccucua

SEQ ID NO: 1197783 - RNA, 19 nt, Homo sapiens
  misc_RNA (1)...(19): siRNA sense strand
cgaggaagaccuaaacaac

SEQ ID NO: 1197784 - RNA, 19 nt, Homo sapiens
  misc_RNA (1)...(19): siRNA sense strand
ucaucaacgucaccacuca

SEQ ID NO: 1197785 - RNA, 19 nt, Homo sapiens
  misc_RNA (1)...(19): siRNA sense strand
ccucuaccacuaugagaaa

SEQ ID NO: 1197786 - RNA, 19 nt, Homo sapiens
  misc_RNA (1)...(19): siRNA sense strand
ccacugacagcaacaagca

SEQ ID NO: 1197787 - RNA, 19 nt, Homo sapiens
  misc_RNA (1)...(19): siRNA sense strand
gaaaaccucugugacaacu

SEQ ID NO: 1197788 - RNA, 19 nt, Homo sapiens
  misc_RNA (1)...(19): siRNA sense strand
gaccuaaacaacgguguga

SEQ ID NO: 1197789 - RNA, 19 nt, Homo sapiens
  misc_RNA (1)...(19): siRNA sense strand
cggaugaccaugacugaug

SEQ ID NO: 1197790 - RNA, 19 nt, Homo sapiens
  misc_RNA (1)...(19): siRNA sense strand
caucgucaucgcuuacuug

SEQ ID NO: 1197791 - RNA, 19 nt, Homo sapiens
  misc_RNA (1)...(19): siRNA sense strand
ggcaguugcuagaguucga

SEQ ID NO: 1197792 - RNA, 19 nt, Homo sapiens
  misc_RNA (1)...(19): siRNA sense strand
ugcuagaguucgaggaaga

SEQ ID NO: 1197793 - RNA, 19 nt, Homo sapiens
  misc_RNA (1)...(19): siRNA sense strand
gugacaccgagaauccuua

SEQ ID NO: 1197794 - RNA, 19 nt, Homo sapiens
  misc_RNA (1)...(19): siRNA sense strand
aaaggccuguucaacuaca

SEQ ID NO: 1197795 - RNA, 19 nt, Homo sapiens
  misc_RNA (1)...(19): siRNA sense strand
agaguucgaggaagaccua

SEQ ID NO: 1197796 - RNA, 19 nt, Homo sapiens
  misc_RNA (1)...(19): siRNA sense strand
ccaauuaucuccccaaacc

SEQ ID NO: 1197797 - RNA, 19 nt, Homo sapiens
  misc_RNA (1)...(19): siRNA sense strand
gaccaauuaucuccccaaa

SEQ ID NO: 1197798 - RNA, 19 nt, Homo sapiens
  misc_RNA (1)...(19): siRNA sense strand
gaagaggcuuuugaguuca

SEQ ID NO: 1197799 - RNA, 19 nt, Homo sapiens
  misc_RNA (1)...(19): siRNA sense strand
cccaaaccuuaacuucaug

SEQ ID NO: 1197800 - RNA, 19 nt, Homo sapiens
  misc_RNA (1)...(19): siRNA sense strand
agaaaggccuguucaacua

SEQ ID NO: 1197801 - RNA, 19 nt, Homo sapiens
  misc_RNA (1)...(19): siRNA sense strand
gaccaugacugaugcuuau

SEQ ID NO: 1197802 - RNA, 19 nt, Homo sapiens
  misc_RNA (1)...(19): siRNA sense strand
gaacaucggcuacgucauc

SEQ ID NO: 1197803 - RNA, 19 nt, Homo sapiens
  misc_RNA (1)...(19): siRNA sense strand
aaaggcaaacgaccaauua

SEQ ID NO: 1197804 - RNA, 19 nt, Homo sapiens
  misc_RNA (1)...(19): siRNA sense strand
cgagaauccuuacaccaaa

SEQ ID NO: 1197805 - RNA, 19 nt, Homo sapiens
  misc_RNA (1)...(19): siRNA sense strand
gagaaaggccuguucaacu

SEQ ID NO: 1197806 - RNA, 19 nt, Homo sapiens
  misc_RNA (1)...(19): siRNA sense strand
ccaccaucgucaucgcuua

SEQ ID NO: 1197807 - RNA, 19 nt, Homo sapiens
  misc_RNA (1)...(19): siRNA sense strand
caugacugaugcuuauaaa

SEQ ID NO: 1197808 - RNA, 19 nt, Homo sapiens
  misc_RNA (1)...(19): siRNA sense strand
caaaggcaaacgaccaauu

SEQ ID NO: 1197809 - RNA, 19 nt, Homo sapiens
  misc_RNA (1)...(19): siRNA sense strand
gagaauccuuacaccaaag

SEQ ID NO: 1197810 - RNA, 19 nt, Homo sapiens
  misc_RNA (1)...(19): siRNA sense strand
ugaagaggcuuuugaguuc

SEQ ID NO: 1197811 - RNA, 19 nt, Homo sapiens
  misc_RNA (1)...(19): siRNA sense strand
caacgucaccacucaucuu

SEQ ID NO: 1197812 - RNA, 19 nt, Homo sapiens
  misc_RNA (1)...(19): siRNA sense strand
ggcaaacgaccaauuaucu

SEQ ID NO: 1197813 - RNA, 19 nt, Homo sapiens
  misc_RNA (1)...(19): siRNA sense strand
ugaccaugacugaugcuua

SEQ ID NO: 1197814 - RNA, 19 nt, Homo sapiens
  misc_RNA (1)...(19): siRNA sense strand
ccaugacugaugcuuauaa

SEQ ID NO: 1197815 - RNA, 19 nt, Homo sapiens
  misc_RNA (1)...(19): siRNA sense strand
ccgagaauccuuacaccaa

SEQ ID NO: 1197816 - RNA, 19 nt, Homo sapiens
  misc_RNA (1)...(19): siRNA sense strand
gaaaggccuguucaacuac

SEQ ID NO: 1197817 - RNA, 19 nt, Homo sapiens
  misc_RNA (1)...(19): siRNA sense strand
gcaaacgaccaauuaucuc

SEQ ID NO: 1197818 - RNA, 19 nt, Homo sapiens
  misc_RNA (1)...(19): siRNA sense strand
ccacucaucuuccccucua

SEQ ID NO: 1197819 - RNA, 19 nt, Homo sapiens
  misc_RNA (1)...(19): siRNA sense strand
cgaggaagaccuaaacaac

SEQ ID NO: 1197820 - RNA, 19 nt, Homo sapiens
  misc_RNA (1)...(19): siRNA sense strand
ucaucaacgucaccacuca

SEQ ID NO: 1197821 - RNA, 19 nt, Homo sapiens
  misc_RNA (1)...(19): siRNA sense strand
ccucuaccacuaugagaaa

SEQ ID NO: 1197822 - RNA, 19 nt, Homo sapiens
  misc_RNA (1)...(19): siRNA sense strand
ccacugacagcaacaagca

SEQ ID NO: 1197823 - RNA, 19 nt, Homo sapiens
  misc_RNA (1)...(19): siRNA sense strand
gaccuaaacaacgguguga

SEQ ID NO: 1197824 - RNA, 19 nt, Homo sapiens
  misc_RNA (1)...(19): siRNA sense strand
cggaugaccaugacugaug

SEQ ID NO: 1197825 - RNA, 19 nt, Homo sapiens
  misc_RNA (1)...(19): siRNA sense strand
caucgucaucgcuuacuug

SEQ ID NO: 1197826 - RNA, 19 nt, Homo sapiens
  misc_RNA (1)...(19): siRNA sense strand
ggcaguugcuagaguucga

SEQ ID NO: 1197827 - RNA, 19 nt, Homo sapiens
  misc_RNA (1)...(19): siRNA sense strand
ugcuagaguucgaggaaga

SEQ ID NO: 1197828 - RNA, 19 nt, Homo sapiens
  misc_RNA (1)...(19): siRNA sense strand
gugacaccgagaauccuua

SEQ ID NO: 1197829 - RNA, 19 nt, Homo sapiens
  misc_RNA (1)...(19): siRNA sense strand
aaaggccuguucaacuaca

SEQ ID NO: 1197830 - RNA, 19 nt, Homo sapiens
  misc_RNA (1)...(19): siRNA sense strand
agaguucgaggaagaccua

SEQ ID NO: 1197831 - RNA, 19 nt, Homo sapiens
  misc_RNA (1)...(19): siRNA sense strand
ccaauuaucuccccaaacc

SEQ ID NO: 1197832 - RNA, 19 nt, Homo sapiens
  misc_RNA (1)...(19): siRNA sense strand
gaccaauuaucuccccaaa

SEQ ID NO: 1197833 - RNA, 19 nt, Homo sapiens
  misc_RNA (1)...(19): siRNA sense strand
gaagaggcuuuugaguuca

SEQ ID NO: 1197834 - RNA, 19 nt, Homo sapiens
  misc_RNA (1)...(19): siRNA sense strand
cccaaaccuuaacuucaug

SEQ ID NO: 1197835 - RNA, 19 nt, Homo sapiens
  misc_RNA (1)...(19): siRNA sense strand
agaaaggccuguucaacua

SEQ ID NO: 1197836 - RNA, 19 nt, Homo sapiens
  misc_RNA (1)...(19): siRNA sense strand
gaccaugacugaugcuuau

SEQ ID NO: 1197837 - RNA, 19 nt, Homo sapiens
  misc_RNA (1)...(19): siRNA sense strand
gaacaucggcuacgucauc

SEQ ID NO: 1197838 - RNA, 19 nt, Homo sapiens
  misc_RNA (1)...(19): siRNA sense strand
aaaggcaaacgaccaauua

SEQ ID NO: 1197839 - RNA, 19 nt, Homo sapiens
  misc_RNA (1)...(19): siRNA sense strand
cgagaauccuuacaccaaa

SEQ ID NO: 1197840 - RNA, 19 nt, Homo sapiens
  misc_RNA (1)...(19): siRNA sense strand
gagaaaggccuguucaacu

SEQ ID NO: 1197841 - RNA, 19 nt, Homo sapiens
  misc_RNA (1)...(19): siRNA sense strand
ccaccaucgucaucgcuua

SEQ ID NO: 1197842 - RNA, 19 nt, Homo sapiens
  misc_RNA (1)...(19): siRNA sense strand
caugacugaugcuuauaaa

SEQ ID NO: 1197843 - RNA, 19 nt, Homo sapiens
  misc_RNA (1)...(19): siRNA sense strand
caaaggcaaacgaccaauu

SEQ ID NO: 1197844 - RNA, 19 nt, Homo sapiens
  misc_RNA (1)...(19): siRNA sense strand
gagaauccuuacaccaaag

SEQ ID NO: 1197845 - RNA, 19 nt, Homo sapiens
  misc_RNA (1)...(19): siRNA sense strand
ugaagaggcuuuugaguuc

SEQ ID NO: 1197846 - RNA, 19 nt, Homo sapiens
  misc_RNA (1)...(19): siRNA sense strand
caacgucaccacucaucuu

SEQ ID NO: 1197847 - RNA, 19 nt, Homo sapiens
  misc_RNA (1)...(19): siRNA sense strand
ggcaaacgaccaauuaucu

SEQ ID NO: 1197848 - RNA, 19 nt, Homo sapiens
  misc_RNA (1)...(19): siRNA sense strand
ugaccaugacugaugcuua

SEQ ID NO: 1197849 - RNA, 19 nt, Homo sapiens
  misc_RNA (1)...(19): siRNA sense strand
ccaugacugaugcuuauaa

SEQ ID NO: 1197850 - RNA, 19 nt, Homo sapiens
  misc_RNA (1)...(19): siRNA sense strand
ccgagaauccuuacaccaa

SEQ ID NO: 1197851 - RNA, 19 nt, Homo sapiens
  misc_RNA (1)...(19): siRNA sense strand
gaaaggccuguucaacuac

SEQ ID NO: 1197852 - RNA, 19 nt, Homo sapiens
  misc_RNA (1)...(19): siRNA sense strand
gcaaacgaccaauuaucuc

SEQ ID NO: 1197853 - RNA, 19 nt, Homo sapiens
  misc_RNA (1)...(19): siRNA sense strand
ccacucaucuuccccucua

SEQ ID NO: 1197854 - RNA, 19 nt, Homo sapiens
  misc_RNA (1)...(19): siRNA sense strand
cgaggaagaccuaaacaac

SEQ ID NO: 1197855 - RNA, 19 nt, Homo sapiens
  misc_RNA (1)...(19): siRNA sense strand
ucaucaacgucaccacuca

SEQ ID NO: 1197856 - RNA, 19 nt, Homo sapiens
  misc_RNA (1)...(19): siRNA sense strand
ccucuaccacuaugagaaa

SEQ ID NO: 1197857 - RNA, 19 nt, Homo sapiens
  misc_RNA (1)...(19): siRNA sense strand
ccacugacagcaacaagca

SEQ ID NO: 1197858 - RNA, 19 nt, Homo sapiens
  misc_RNA (1)...(19): siRNA sense strand
gaccuaaacaacgguguga

SEQ ID NO: 1197859 - RNA, 19 nt, Homo sapiens
  misc_RNA (1)...(19): siRNA sense strand
cggaugaccaugacugaug

SEQ ID NO: 1197860 - RNA, 19 nt, Homo sapiens
  misc_RNA (1)...(19): siRNA sense strand
caucgucaucgcuuacuug

SEQ ID NO: 1197861 - RNA, 19 nt, Homo sapiens
  misc_RNA (1)...(19): siRNA sense strand
ggcaguugcuagaguucga

SEQ ID NO: 1197862 - RNA, 19 nt, Homo sapiens
  misc_RNA (1)...(19): siRNA sense strand
ugcuagaguucgaggaaga

SEQ ID NO: 1197863 - RNA, 19 nt, Homo sapiens
  misc_RNA (1)...(19): siRNA sense strand
gugacaccgagaauccuua

SEQ ID NO: 1197864 - RNA, 19 nt, Homo sapiens
  misc_RNA (1)...(19): siRNA sense strand
aaaggccuguucaacuaca

SEQ ID NO: 1197865 - RNA, 19 nt, Homo sapiens
  misc_RNA (1)...(19): siRNA sense strand
agaguucgaggaagaccua

SEQ ID NO: 1197866 - RNA, 19 nt, Homo sapiens
  misc_RNA (1)...(19): siRNA sense strand
ccaauuaucuccccaaacc

SEQ ID NO: 1197867 - RNA, 19 nt, Homo sapiens
  misc_RNA (1)...(19): siRNA sense strand
gaccaauuaucuccccaaa

SEQ ID NO: 1197868 - RNA, 19 nt, Homo sapiens
  misc_RNA (1)...(19): siRNA sense strand
gaagaggcuuuugaguuca

SEQ ID NO: 1197869 - RNA, 19 nt, Homo sapiens
  misc_RNA (1)...(19): siRNA sense strand
cccaaaccuuaacuucaug

SEQ ID NO: 1197870 - RNA, 19 nt, Homo sapiens
  misc_RNA (1)...(19): siRNA sense strand
gcccagcuauaaccaguau

SEQ ID NO: 1197871 - RNA, 19 nt, Homo sapiens
  misc_RNA (1)...(19): siRNA sense strand
uaaccaguaucagcaguau

SEQ ID NO: 1197872 - RNA, 19 nt, Homo sapiens
  misc_RNA (1)...(19): siRNA sense strand
acacaggguggcacaagua

SEQ ID NO: 1197873 - RNA, 19 nt, Homo sapiens
  misc_RNA (1)...(19): siRNA sense strand
ggaaccaguacuaucagaa

SEQ ID NO: 1197874 - RNA, 19 nt, Homo sapiens
  misc_RNA (1)...(19): siRNA sense strand
gaaccaguacuaucagaac

SEQ ID NO: 1197875 - RNA, 19 nt, Homo sapiens
  misc_RNA (1)...(19): siRNA sense strand
gcaguggaaccaguacuau

SEQ ID NO: 1197876 - RNA, 19 nt, Homo sapiens
  misc_RNA (1)...(19): siRNA sense strand
ccagcuauaaccaguauca

SEQ ID NO: 1197877 - RNA, 19 nt, Homo sapiens
  misc_RNA (1)...(19): siRNA sense strand
uggcacaaguacacaguag

SEQ ID NO: 1197878 - RNA, 19 nt, Homo sapiens
  misc_RNA (1)...(19): siRNA sense strand
gagcuacuccgggaacaca

SEQ ID NO: 1197879 - RNA, 19 nt, Homo sapiens
  misc_RNA (1)...(19): siRNA sense strand
uggaaccaguacuaucaga

SEQ ID NO: 1197880 - RNA, 19 nt, Homo sapiens
  misc_RNA (1)...(19): siRNA sense strand
gcccagcuauaaccaguau

SEQ ID NO: 1197881 - RNA, 19 nt, Homo sapiens
  misc_RNA (1)...(19): siRNA sense strand
uaaccaguaucagcaguau

SEQ ID NO: 1197882 - RNA, 19 nt, Homo sapiens
  misc_RNA (1)...(19): siRNA sense strand
acacaggguggcacaagua

SEQ ID NO: 1197883 - RNA, 19 nt, Homo sapiens
  misc_RNA (1)...(19): siRNA sense strand
ggaaccaguacuaucagaa

SEQ ID NO: 1197884 - RNA, 19 nt, Homo sapiens
  misc_RNA (1)...(19): siRNA sense strand
gaaccaguacuaucagaac

SEQ ID NO: 1197885 - RNA, 19 nt, Homo sapiens
  misc_RNA (1)...(19): siRNA sense strand
gcaguggaaccaguacuau

SEQ ID NO: 1197886 - RNA, 19 nt, Homo sapiens
  misc_RNA (1)...(19): siRNA sense strand
ccagcuauaaccaguauca

SEQ ID NO: 1197887 - RNA, 19 nt, Homo sapiens
  misc_RNA (1)...(19): siRNA sense strand
uggcacaaguacacaguag

SEQ ID NO: 1197888 - RNA, 19 nt, Homo sapiens
  misc_RNA (1)...(19): siRNA sense strand
gagcuacuccgggaacaca

SEQ ID NO: 1197889 - RNA, 19 nt, Homo sapiens
  misc_RNA (1)...(19): siRNA sense strand
uggaaccaguacuaucaga

SEQ ID NO: 1197890 - RNA, 19 nt, Homo sapiens
  misc_RNA (1)...(19): siRNA sense strand
gcccagcuauaaccaguau

SEQ ID NO: 1197891 - RNA, 19 nt, Homo sapiens
  misc_RNA (1)...(19): siRNA sense strand
uaaccaguaucagcaguau

SEQ ID NO: 1197892 - RNA, 19 nt, Homo sapiens
  misc_RNA (1)...(19): siRNA sense strand
acacaggguggcacaagua

SEQ ID NO: 1197893 - RNA, 19 nt, Homo sapiens
  misc_RNA (1)...(19): siRNA sense strand
ggaaccaguacuaucagaa

SEQ ID NO: 1197894 - RNA, 19 nt, Homo sapiens
  misc_RNA (1)...(19): siRNA sense strand
gaaccaguacuaucagaac

SEQ ID NO: 1197895 - RNA, 19 nt, Homo sapiens
  misc_RNA (1)...(19): siRNA sense strand
gcaguggaaccaguacuau

SEQ ID NO: 1197896 - RNA, 19 nt, Homo sapiens
  misc_RNA (1)...(19): siRNA sense strand
ccagcuauaaccaguauca

SEQ ID NO: 1197897 - RNA, 19 nt, Homo sapiens
  misc_RNA (1)...(19): siRNA sense strand
uggcacaaguacacaguag

SEQ ID NO: 1197898 - RNA, 19 nt, Homo sapiens
  misc_RNA (1)...(19): siRNA sense strand
gagcuacuccgggaacaca

SEQ ID NO: 1197899 - RNA, 19 nt, Homo sapiens
  misc_RNA (1)...(19): siRNA sense strand
uggaaccaguacuaucaga

SEQ ID NO: 1197900 - RNA, 19 nt, Homo sapiens
  misc_RNA (1)...(19): siRNA sense strand
gcccagcuauaaccaguau

SEQ ID NO: 1197901 - RNA, 19 nt, Homo sapiens
  misc_RNA (1)...(19): siRNA sense strand
uaaccaguaucagcaguau

SEQ ID NO: 1197902 - RNA, 19 nt, Homo sapiens
  misc_RNA (1)...(19): siRNA sense strand
acacaggguggcacaagua

SEQ ID NO: 1197903 - RNA, 19 nt, Homo sapiens
  misc_RNA (1)...(19): siRNA sense strand
ggaaccaguacuaucagaa

SEQ ID NO: 1197904 - RNA, 19 nt, Homo sapiens
  misc_RNA (1)...(19): siRNA sense strand
gaaccaguacuaucagaac

SEQ ID NO: 1197905 - RNA, 19 nt, Homo sapiens
  misc_RNA (1)...(19): siRNA sense strand
gcaguggaaccaguacuau

SEQ ID NO: 1197906 - RNA, 19 nt, Homo sapiens
  misc_RNA (1)...(19): siRNA sense strand
ccagcuauaaccaguauca

SEQ ID NO: 1197907 - RNA, 19 nt, Homo sapiens
  misc_RNA (1)...(19): siRNA sense strand
uggcacaaguacacaguag

SEQ ID NO: 1197908 - RNA, 19 nt, Homo sapiens
  misc_RNA (1)...(19): siRNA sense strand
gagcuacuccgggaacaca

SEQ ID NO: 1197909 - RNA, 19 nt, Homo sapiens
  misc_RNA (1)...(19): siRNA sense strand
uggaaccaguacuaucaga

SEQ ID NO: 1197910 - RNA, 19 nt, Homo sapiens
  misc_RNA (1)...(19): siRNA sense strand
gcccagcuauaaccaguau

SEQ ID NO: 1197911 - RNA, 19 nt, Homo sapiens
  misc_RNA (1)...(19): siRNA sense strand
uaaccaguaucagcaguau

SEQ ID NO: 1197912 - RNA, 19 nt, Homo sapiens
  misc_RNA (1)...(19): siRNA sense strand
acacaggguggcacaagua

SEQ ID NO: 1197913 - RNA, 19 nt, Homo sapiens
  misc_RNA (1)...(19): siRNA sense strand
ggaaccaguacuaucagaa

SEQ ID NO: 1197914 - RNA, 19 nt, Homo sapiens
  misc_RNA (1)...(19): siRNA sense strand
gaaccaguacuaucagaac

SEQ ID NO: 1197915 - RNA, 19 nt, Homo sapiens
  misc_RNA (1)...(19): siRNA sense strand
gcaguggaaccaguacuau

SEQ ID NO: 1197916 - RNA, 19 nt, Homo sapiens
  misc_RNA (1)...(19): siRNA sense strand
ccagcuauaaccaguauca

SEQ ID NO: 1197917 - RNA, 19 nt, Homo sapiens
  misc_RNA (1)...(19): siRNA sense strand
uggcacaaguacacaguag

SEQ ID NO: 1197918 - RNA, 19 nt, Homo sapiens
  misc_RNA (1)...(19): siRNA sense strand
gagcuacuccgggaacaca

SEQ ID NO: 1197919 - RNA, 19 nt, Homo sapiens
  misc_RNA (1)...(19): siRNA sense strand
uggaaccaguacuaucaga

SEQ ID NO: 1197920 - RNA, 19 nt, Homo sapiens
  misc_RNA (1)...(19): siRNA sense strand
gcccagcuauaaccaguau

SEQ ID NO: 1197921 - RNA, 19 nt, Homo sapiens
  misc_RNA (1)...(19): siRNA sense strand
uaaccaguaucagcaguau

SEQ ID NO: 1197922 - RNA, 19 nt, Homo sapiens
  misc_RNA (1)...(19): siRNA sense strand
acacaggguggcacaagua

SEQ ID NO: 1197923 - RNA, 19 nt, Homo sapiens
  misc_RNA (1)...(19): siRNA sense strand
ggaaccaguacuaucagaa

SEQ ID NO: 1197924 - RNA, 19 nt, Homo sapiens
  misc_RNA (1)...(19): siRNA sense strand
gaaccaguacuaucagaac

SEQ ID NO: 1197925 - RNA, 19 nt, Homo sapiens
  misc_RNA (1)...(19): siRNA sense strand
gcaguggaaccaguacuau

SEQ ID NO: 1197926 - RNA, 19 nt, Homo sapiens
  misc_RNA (1)...(19): siRNA sense strand
ccagcuauaaccaguauca

SEQ ID NO: 1197927 - RNA, 19 nt, Homo sapiens
  misc_RNA (1)...(19): siRNA sense strand
uggcacaaguacacaguag

SEQ ID NO: 1197928 - RNA, 19 nt, Homo sapiens
  misc_RNA (1)...(19): siRNA sense strand
gagcuacuccgggaacaca

SEQ ID NO: 1197929 - RNA, 19 nt, Homo sapiens
  misc_RNA (1)...(19): siRNA sense strand
uggaaccaguacuaucaga

SEQ ID NO: 1197930 - RNA, 19 nt, Homo sapiens
  misc_RNA (1)...(19): siRNA sense strand
ggagagaccuuuaugagaa

SEQ ID NO: 1197931 - RNA, 19 nt, Homo sapiens
  misc_RNA (1)...(19): siRNA sense strand
gaaauuaaguugcaagauc

SEQ ID NO: 1197932 - RNA, 19 nt, Homo sapiens
  misc_RNA (1)...(19): siRNA sense strand
gaaauggauugaagugaaa

SEQ ID NO: 1197933 - RNA, 19 nt, Homo sapiens
  misc_RNA (1)...(19): siRNA sense strand
gaaaagggguauuugauuu

SEQ ID NO: 1197934 - RNA, 19 nt, Homo sapiens
  misc_RNA (1)...(19): siRNA sense strand
ccacaugguuucuuccuuu

SEQ ID NO: 1197935 - RNA, 19 nt, Homo sapiens
  misc_RNA (1)...(19): siRNA sense strand
gagaagaaauuaaguugca

SEQ ID NO: 1197936 - RNA, 19 nt, Homo sapiens
  misc_RNA (1)...(19): siRNA sense strand
ugaaauggauugaagugaa

SEQ ID NO: 1197937 - RNA, 19 nt, Homo sapiens
  misc_RNA (1)...(19): siRNA sense strand
gcugcaagcuggccaggua

SEQ ID NO: 1197938 - RNA, 19 nt, Homo sapiens
  misc_RNA (1)...(19): siRNA sense strand
gauguggacuugaagaaau

SEQ ID NO: 1197939 - RNA, 19 nt, Homo sapiens
  misc_RNA (1)...(19): siRNA sense strand
gagagaccuuuaugagaaa

SEQ ID NO: 1197940 - RNA, 19 nt, Homo sapiens
  misc_RNA (1)...(19): siRNA sense strand
ggaucaaacuacucuguga

SEQ ID NO: 1197941 - RNA, 19 nt, Homo sapiens
  misc_RNA (1)...(19): siRNA sense strand
aaagggccauggacuauuu

SEQ ID NO: 1197942 - RNA, 19 nt, Homo sapiens
  misc_RNA (1)...(19): siRNA sense strand
ucaaguacuucucugauga

SEQ ID NO: 1197943 - RNA, 19 nt, Homo sapiens
  misc_RNA (1)...(19): siRNA sense strand
caagaucucucagcaaauc

SEQ ID NO: 1197944 - RNA, 19 nt, Homo sapiens
  misc_RNA (1)...(19): siRNA sense strand
ccaggaagaugauguugga

SEQ ID NO: 1197945 - RNA, 19 nt, Homo sapiens
  misc_RNA (1)...(19): siRNA sense strand
gaagugaaagccaaagcua

SEQ ID NO: 1197946 - RNA, 19 nt, Homo sapiens
  misc_RNA (1)...(19): siRNA sense strand
ggaaaacuauggcaaauuc

SEQ ID NO: 1197947 - RNA, 19 nt, Homo sapiens
  misc_RNA (1)...(19): siRNA sense strand
gaggaggacuucgugcaaa

SEQ ID NO: 1197948 - RNA, 19 nt, Homo sapiens
  misc_RNA (1)...(19): siRNA sense strand
guacucagcacuaaucaga

SEQ ID NO: 1197949 - RNA, 19 nt, Homo sapiens
  misc_RNA (1)...(19): siRNA sense strand
gcaaagggccauggacuau

SEQ ID NO: 1197950 - RNA, 19 nt, Homo sapiens
  misc_RNA (1)...(19): siRNA sense strand
gaaguggacugcgagaagu

SEQ ID NO: 1197951 - RNA, 19 nt, Homo sapiens
  misc_RNA (1)...(19): siRNA sense strand
gcuguggccucucgcauga

SEQ ID NO: 1197952 - RNA, 19 nt, Homo sapiens
  misc_RNA (1)...(19): siRNA sense strand
gaauuguucuacuguuugu

SEQ ID NO: 1197953 - RNA, 19 nt, Homo sapiens
  misc_RNA (1)...(19): siRNA sense strand
ggcuggagcugcugaaaug

SEQ ID NO: 1197954 - RNA, 19 nt, Homo sapiens
  misc_RNA (1)...(19): siRNA sense strand
guaagaaguacagaaagua

SEQ ID NO: 1197955 - RNA, 19 nt, Homo sapiens
  misc_RNA (1)...(19): siRNA sense strand
ugcaagaucucucagcaaa

SEQ ID NO: 1197956 - RNA, 19 nt, Homo sapiens
  misc_RNA (1)...(19): siRNA sense strand
uggaguaccuuucgagaau

SEQ ID NO: 1197957 - RNA, 19 nt, Homo sapiens
  misc_RNA (1)...(19): siRNA sense strand
guuagaaacacuucaagaa

SEQ ID NO: 1197958 - RNA, 19 nt, Homo sapiens
  misc_RNA (1)...(19): siRNA sense strand
caacaggagagaccuuuau

SEQ ID NO: 1197959 - RNA, 19 nt, Homo sapiens
  misc_RNA (1)...(19): siRNA sense strand
ggaauuguucuacuguuug

SEQ ID NO: 1197960 - RNA, 19 nt, Homo sapiens
  misc_RNA (1)...(19): siRNA sense strand
uggaauuguucuacuguuu

SEQ ID NO: 1197961 - RNA, 19 nt, Homo sapiens
  misc_RNA (1)...(19): siRNA sense strand
gaagugggguucagauaau

SEQ ID NO: 1197962 - RNA, 19 nt, Homo sapiens
  misc_RNA (1)...(19): siRNA sense strand
ugaagaagcucugguuggu

SEQ ID NO: 1197963 - RNA, 19 nt, Homo sapiens
  misc_RNA (1)...(19): siRNA sense strand
caagacagguuugacuauc

SEQ ID NO: 1197964 - RNA, 19 nt, Homo sapiens
  misc_RNA (1)...(19): siRNA sense strand
gcaagaccaagacguguga

SEQ ID NO: 1197965 - RNA, 19 nt, Homo sapiens
  misc_RNA (1)...(19): siRNA sense strand
gaaggcagaccauguggau

SEQ ID NO: 1197966 - RNA, 19 nt, Homo sapiens
  misc_RNA (1)...(19): siRNA sense strand
cguaagaaguacagaaagu

SEQ ID NO: 1197967 - RNA, 19 nt, Homo sapiens
  misc_RNA (1)...(19): siRNA sense strand
gcagaaggcggaugugucu

SEQ ID NO: 1197968 - RNA, 19 nt, Homo sapiens
  misc_RNA (1)...(19): siRNA sense strand
agauggaguugcuguuuga

SEQ ID NO: 1197969 - RNA, 19 nt, Homo sapiens
  misc_RNA (1)...(19): siRNA sense strand
ggaaguggacugcgagaag

SEQ ID NO: 1197970 - RNA, 19 nt, Homo sapiens
  misc_RNA (1)...(19): siRNA sense strand
cgugugcacuggacugaaa

SEQ ID NO: 1197971 - RNA, 19 nt, Homo sapiens
  misc_RNA (1)...(19): siRNA sense strand
uggagaaacugcagcacuu

SEQ ID NO: 1197972 - RNA, 19 nt, Homo sapiens
  misc_RNA (1)...(19): siRNA sense strand
uaagauggaguugcuguuu

SEQ ID NO: 1197973 - RNA, 19 nt, Homo sapiens
  misc_RNA (1)...(19): siRNA sense strand
gcugggaucuuuccacacu

SEQ ID NO: 1197974 - RNA, 19 nt, Homo sapiens
  misc_RNA (1)...(19): siRNA sense strand
cagaaucucacgcaccuuu

SEQ ID NO: 1197975 - RNA, 19 nt, Homo sapiens
  misc_RNA (1)...(19): siRNA sense strand
ggaccgcucugcacugacu

SEQ ID NO: 1197976 - RNA, 19 nt, Homo sapiens
  misc_RNA (1)...(19): siRNA sense strand
guguacgucuucuuccuuu

SEQ ID NO: 1197977 - RNA, 19 nt, Homo sapiens
  misc_RNA (1)...(19): siRNA sense strand
gaucuuuccacacuucuga

SEQ ID NO: 1197978 - RNA, 19 nt, Homo sapiens
  misc_RNA (1)...(19): siRNA sense strand
uggaggaccuggaggaugu

SEQ ID NO: 1197979 - RNA, 19 nt, Homo sapiens
  misc_RNA (1)...(19): siRNA sense strand
uguacuaccugcuggaaga

SEQ ID NO: 1197980 - RNA, 19 nt, Homo sapiens
  misc_RNA (1)...(19): siRNA sense strand
ucagauaaugcacguguuu

SEQ ID NO: 1197981 - RNA, 19 nt, Homo sapiens
  misc_RNA (1)...(19): siRNA sense strand
cuacuuggagaagaaauua

SEQ ID NO: 1197982 - RNA, 19 nt, Homo sapiens
  misc_RNA (1)...(19): siRNA sense strand
uguuguacguuuccucuuu

SEQ ID NO: 1197983 - RNA, 19 nt, Homo sapiens
  misc_RNA (1)...(19): siRNA sense strand
ggaggaggacuucgugcaa

SEQ ID NO: 1197984 - RNA, 19 nt, Homo sapiens
  misc_RNA (1)...(19): siRNA sense strand
uggaggauguggacuugaa

SEQ ID NO: 1197985 - RNA, 19 nt, Homo sapiens
  misc_RNA (1)...(19): siRNA sense strand
uccacaagaucgugagaaa

SEQ ID NO: 1197986 - RNA, 19 nt, Homo sapiens
  misc_RNA (1)...(19): siRNA sense strand
aggcggaugugucugcuuu

SEQ ID NO: 1197987 - RNA, 19 nt, Homo sapiens
  misc_RNA (1)...(19): siRNA sense strand
ggacugaagcaccuguugu

SEQ ID NO: 1197988 - RNA, 19 nt, Homo sapiens
  misc_RNA (1)...(19): siRNA sense strand
gagcuggaccugagugaca

SEQ ID NO: 1197989 - RNA, 19 nt, Homo sapiens
  misc_RNA (1)...(19): siRNA sense strand
ggauguggacuugaagaaa

SEQ ID NO: 1197990 - RNA, 19 nt, Homo sapiens
  misc_RNA (1)...(19): siRNA sense strand
ccaggaagacagcauugaa

SEQ ID NO: 1197991 - RNA, 19 nt, Homo sapiens
  misc_RNA (1)...(19): siRNA sense strand
ucuuugagccuucuuggua

SEQ ID NO: 1197992 - RNA, 19 nt, Homo sapiens
  misc_RNA (1)...(19): siRNA sense strand
uaggaccgcucugcacuga

SEQ ID NO: 1197993 - RNA, 19 nt, Homo sapiens
  misc_RNA (1)...(19): siRNA sense strand
guuguacguuuccucuuug

SEQ ID NO: 1197994 - RNA, 19 nt, Homo sapiens
  misc_RNA (1)...(19): siRNA sense strand
aagauggaguugcuguuug

SEQ ID NO: 1197995 - RNA, 19 nt, Homo sapiens
  misc_RNA (1)...(19): siRNA sense strand
acucagcacuaaucagaau

SEQ ID NO: 1197996 - RNA, 19 nt, Homo sapiens
  misc_RNA (1)...(19): siRNA sense strand
ggaggaagaggaggaggaa

SEQ ID NO: 1197997 - RNA, 19 nt, Homo sapiens
  misc_RNA (1)...(19): siRNA sense strand
ugacaguccuucuggaaaa

SEQ ID NO: 1197998 - RNA, 19 nt, Homo sapiens
  misc_RNA (1)...(19): siRNA sense strand
uaaugcacguguuucgaau

SEQ ID NO: 1197999 - RNA, 19 nt, Homo sapiens
  misc_RNA (1)...(19): siRNA sense strand
gagcugaccgucgucuuug

SEQ ID NO: 1198000 - RNA, 19 nt, Homo sapiens
  misc_RNA (1)...(19): siRNA sense strand
gucaugauguucugugaag

SEQ ID NO: 1198001 - RNA, 19 nt, Homo sapiens
  misc_RNA (1)...(19): siRNA sense strand
cuaaugaucgacuucaaug

SEQ ID NO: 1198002 - RNA, 19 nt, Homo sapiens
  misc_RNA (1)...(19): siRNA sense strand
ggaaucauggacugcagaa

SEQ ID NO: 1198003 - RNA, 19 nt, Homo sapiens
  misc_RNA (1)...(19): siRNA sense strand
ggagaaacugcagcacuug

SEQ ID NO: 1198004 - RNA, 19 nt, Homo sapiens
  misc_RNA (1)...(19): siRNA sense strand
ccaagacagguuugacuau

SEQ ID NO: 1198005 - RNA, 19 nt, Homo sapiens
  misc_RNA (1)...(19): siRNA sense strand
gcuaaugaucgacuucaau

SEQ ID NO: 1198006 - RNA, 19 nt, Homo sapiens
  misc_RNA (1)...(19): siRNA sense strand
gcagauuccagugcauuga

SEQ ID NO: 1198007 - RNA, 19 nt, Homo sapiens
  misc_RNA (1)...(19): siRNA sense strand
gaagcagauuccagugcau

SEQ ID NO: 1198008 - RNA, 19 nt, Homo sapiens
  misc_RNA (1)...(19): siRNA sense strand
gagaaaacccuccagaauc

SEQ ID NO: 1198009 - RNA, 19 nt, Homo sapiens
  misc_RNA (1)...(19): siRNA sense strand
ucugugaagugcugaaaca

SEQ ID NO: 1198010 - RNA, 19 nt, Homo sapiens
  misc_RNA (1)...(19): siRNA sense strand
ccucgguacucagcacuaa

SEQ ID NO: 1198011 - RNA, 19 nt, Homo sapiens
  misc_RNA (1)...(19): siRNA sense strand
gccgacaccuugauauggu

SEQ ID NO: 1198012 - RNA, 19 nt, Homo sapiens
  misc_RNA (1)...(19): siRNA sense strand
uaacaugcccaaggaggaa

SEQ ID NO: 1198013 - RNA, 19 nt, Homo sapiens
  misc_RNA (1)...(19): siRNA sense strand
ggaguaccuuucgagaauc

SEQ ID NO: 1198014 - RNA, 19 nt, Homo sapiens
  misc_RNA (1)...(19): siRNA sense strand
aaagagaugagccgaagug

SEQ ID NO: 1198015 - RNA, 19 nt, Homo sapiens
  misc_RNA (1)...(19): siRNA sense strand
ugagcugaccgucgucuuu

SEQ ID NO: 1198016 - RNA, 19 nt, Homo sapiens
  misc_RNA (1)...(19): siRNA sense strand
gggacacucuaccaagaca

SEQ ID NO: 1198017 - RNA, 19 nt, Homo sapiens
  misc_RNA (1)...(19): siRNA sense strand
ggaagacagcauugaagag

SEQ ID NO: 1198018 - RNA, 19 nt, Homo sapiens
  misc_RNA (1)...(19): siRNA sense strand
gggguugucugaaauguau

SEQ ID NO: 1198019 - RNA, 19 nt, Homo sapiens
  misc_RNA (1)...(19): siRNA sense strand
caccuguugugcaaucuga

SEQ ID NO: 1198020 - RNA, 19 nt, Homo sapiens
  misc_RNA (1)...(19): siRNA sense strand
uccauaacaugcccaagga

SEQ ID NO: 1198021 - RNA, 19 nt, Homo sapiens
  misc_RNA (1)...(19): siRNA sense strand
caaagggccauggacuauu

SEQ ID NO: 1198022 - RNA, 19 nt, Homo sapiens
  misc_RNA (1)...(19): siRNA sense strand
ggacuugaagaaauuuaag

SEQ ID NO: 1198023 - RNA, 19 nt, Homo sapiens
  misc_RNA (1)...(19): siRNA sense strand
agugaaagccaaagcuaaa

SEQ ID NO: 1198024 - RNA, 19 nt, Homo sapiens
  misc_RNA (1)...(19): siRNA sense strand
gacugcgucucaucaagga

SEQ ID NO: 1198025 - RNA, 19 nt, Homo sapiens
  misc_RNA (1)...(19): siRNA sense strand
agacagguuugacuaucug

SEQ ID NO: 1198026 - RNA, 19 nt, Homo sapiens
  misc_RNA (1)...(19): siRNA sense strand
cucccaagcuccucucaug

SEQ ID NO: 1198027 - RNA, 19 nt, Homo sapiens
  misc_RNA (1)...(19): siRNA sense strand
ucaacaggagagaccuuua

SEQ ID NO: 1198028 - RNA, 19 nt, Homo sapiens
  misc_RNA (1)...(19): siRNA sense strand
ccagaauccucuuccucau

SEQ ID NO: 1198029 - RNA, 19 nt, Homo sapiens
  misc_RNA (1)...(19): siRNA sense strand
gggucaugauguucuguga

SEQ ID NO: 1198030 - RNA, 19 nt, Homo sapiens
  misc_RNA (1)...(19): siRNA sense strand
ggagagaccuuuaugagaa

SEQ ID NO: 1198031 - RNA, 19 nt, Homo sapiens
  misc_RNA (1)...(19): siRNA sense strand
gaaauuaaguugcaagauc

SEQ ID NO: 1198032 - RNA, 19 nt, Homo sapiens
  misc_RNA (1)...(19): siRNA sense strand
gaaauggauugaagugaaa

SEQ ID NO: 1198033 - RNA, 19 nt, Homo sapiens
  misc_RNA (1)...(19): siRNA sense strand
gaaaagggguauuugauuu

SEQ ID NO: 1198034 - RNA, 19 nt, Homo sapiens
  misc_RNA (1)...(19): siRNA sense strand
ccacaugguuucuuccuuu

SEQ ID NO: 1198035 - RNA, 19 nt, Homo sapiens
  misc_RNA (1)...(19): siRNA sense strand
gagaagaaauuaaguugca

SEQ ID NO: 1198036 - RNA, 19 nt, Homo sapiens
  misc_RNA (1)...(19): siRNA sense strand
ugaaauggauugaagugaa

SEQ ID NO: 1198037 - RNA, 19 nt, Homo sapiens
  misc_RNA (1)...(19): siRNA sense strand
gcugcaagcuggccaggua

SEQ ID NO: 1198038 - RNA, 19 nt, Homo sapiens
  misc_RNA (1)...(19): siRNA sense strand
gauguggacuugaagaaau

SEQ ID NO: 1198039 - RNA, 19 nt, Homo sapiens
  misc_RNA (1)...(19): siRNA sense strand
gagagaccuuuaugagaaa

SEQ ID NO: 1198040 - RNA, 19 nt, Homo sapiens
  misc_RNA (1)...(19): siRNA sense strand
ggaucaaacuacucuguga

SEQ ID NO: 1198041 - RNA, 19 nt, Homo sapiens
  misc_RNA (1)...(19): siRNA sense strand
aaagggccauggacuauuu

SEQ ID NO: 1198042 - RNA, 19 nt, Homo sapiens
  misc_RNA (1)...(19): siRNA sense strand
ucaaguacuucucugauga

SEQ ID NO: 1198043 - RNA, 19 nt, Homo sapiens
  misc_RNA (1)...(19): siRNA sense strand
caagaucucucagcaaauc

SEQ ID NO: 1198044 - RNA, 19 nt, Homo sapiens
  misc_RNA (1)...(19): siRNA sense strand
ccaggaagaugauguugga

SEQ ID NO: 1198045 - RNA, 19 nt, Homo sapiens
  misc_RNA (1)...(19): siRNA sense strand
gaagugaaagccaaagcua

SEQ ID NO: 1198046 - RNA, 19 nt, Homo sapiens
  misc_RNA (1)...(19): siRNA sense strand
ggaaaacuauggcaaauuc

SEQ ID NO: 1198047 - RNA, 19 nt, Homo sapiens
  misc_RNA (1)...(19): siRNA sense strand
gaggaggacuucgugcaaa

SEQ ID NO: 1198048 - RNA, 19 nt, Homo sapiens
  misc_RNA (1)...(19): siRNA sense strand
guacucagcacuaaucaga

SEQ ID NO: 1198049 - RNA, 19 nt, Homo sapiens
  misc_RNA (1)...(19): siRNA sense strand
gcaaagggccauggacuau

SEQ ID NO: 1198050 - RNA, 19 nt, Homo sapiens
  misc_RNA (1)...(19): siRNA sense strand
gaaguggacugcgagaagu

SEQ ID NO: 1198051 - RNA, 19 nt, Homo sapiens
  misc_RNA (1)...(19): siRNA sense strand
gcuguggccucucgcauga

SEQ ID NO: 1198052 - RNA, 19 nt, Homo sapiens
  misc_RNA (1)...(19): siRNA sense strand
gaauuguucuacuguuugu

SEQ ID NO: 1198053 - RNA, 19 nt, Homo sapiens
  misc_RNA (1)...(19): siRNA sense strand
ggcuggagcugcugaaaug

SEQ ID NO: 1198054 - RNA, 19 nt, Homo sapiens
  misc_RNA (1)...(19): siRNA sense strand
guaagaaguacagaaagua

SEQ ID NO: 1198055 - RNA, 19 nt, Homo sapiens
  misc_RNA (1)...(19): siRNA sense strand
ugcaagaucucucagcaaa

SEQ ID NO: 1198056 - RNA, 19 nt, Homo sapiens
  misc_RNA (1)...(19): siRNA sense strand
uggaguaccuuucgagaau

SEQ ID NO: 1198057 - RNA, 19 nt, Homo sapiens
  misc_RNA (1)...(19): siRNA sense strand
guuagaaacacuucaagaa

SEQ ID NO: 1198058 - RNA, 19 nt, Homo sapiens
  misc_RNA (1)...(19): siRNA sense strand
caacaggagagaccuuuau

SEQ ID NO: 1198059 - RNA, 19 nt, Homo sapiens
  misc_RNA (1)...(19): siRNA sense strand
ggaauuguucuacuguuug

SEQ ID NO: 1198060 - RNA, 19 nt, Homo sapiens
  misc_RNA (1)...(19): siRNA sense strand
uggaauuguucuacuguuu

SEQ ID NO: 1198061 - RNA, 19 nt, Homo sapiens
  misc_RNA (1)...(19): siRNA sense strand
gaagugggguucagauaau

SEQ ID NO: 1198062 - RNA, 19 nt, Homo sapiens
  misc_RNA (1)...(19): siRNA sense strand
ugaagaagcucugguuggu

SEQ ID NO: 1198063 - RNA, 19 nt, Homo sapiens
  misc_RNA (1)...(19): siRNA sense strand
caagacagguuugacuauc

SEQ ID NO: 1198064 - RNA, 19 nt, Homo sapiens
  misc_RNA (1)...(19): siRNA sense strand
gcaagaccaagacguguga

SEQ ID NO: 1198065 - RNA, 19 nt, Homo sapiens
  misc_RNA (1)...(19): siRNA sense strand
gaaggcagaccauguggau

SEQ ID NO: 1198066 - RNA, 19 nt, Homo sapiens
  misc_RNA (1)...(19): siRNA sense strand
cguaagaaguacagaaagu

SEQ ID NO: 1198067 - RNA, 19 nt, Homo sapiens
  misc_RNA (1)...(19): siRNA sense strand
gcagaaggcggaugugucu

SEQ ID NO: 1198068 - RNA, 19 nt, Homo sapiens
  misc_RNA (1)...(19): siRNA sense strand
agauggaguugcuguuuga

SEQ ID NO: 1198069 - RNA, 19 nt, Homo sapiens
  misc_RNA (1)...(19): siRNA sense strand
ggaaguggacugcgagaag

SEQ ID NO: 1198070 - RNA, 19 nt, Homo sapiens
  misc_RNA (1)...(19): siRNA sense strand
cgugugcacuggacugaaa

SEQ ID NO: 1198071 - RNA, 19 nt, Homo sapiens
  misc_RNA (1)...(19): siRNA sense strand
uggagaaacugcagcacuu

SEQ ID NO: 1198072 - RNA, 19 nt, Homo sapiens
  misc_RNA (1)...(19): siRNA sense strand
uaagauggaguugcuguuu

SEQ ID NO: 1198073 - RNA, 19 nt, Homo sapiens
  misc_RNA (1)...(19): siRNA sense strand
gcugggaucuuuccacacu

SEQ ID NO: 1198074 - RNA, 19 nt, Homo sapiens
  misc_RNA (1)...(19): siRNA sense strand
cagaaucucacgcaccuuu

SEQ ID NO: 1198075 - RNA, 19 nt, Homo sapiens
  misc_RNA (1)...(19): siRNA sense strand
ggaccgcucugcacugacu

SEQ ID NO: 1198076 - RNA, 19 nt, Homo sapiens
  misc_RNA (1)...(19): siRNA sense strand
guguacgucuucuuccuuu

SEQ ID NO: 1198077 - RNA, 19 nt, Homo sapiens
  misc_RNA (1)...(19): siRNA sense strand
gaucuuuccacacuucuga

SEQ ID NO: 1198078 - RNA, 19 nt, Homo sapiens
  misc_RNA (1)...(19): siRNA sense strand
uggaggaccuggaggaugu

SEQ ID NO: 1198079 - RNA, 19 nt, Homo sapiens
  misc_RNA (1)...(19): siRNA sense strand
uguacuaccugcuggaaga

SEQ ID NO: 1198080 - RNA, 19 nt, Homo sapiens
  misc_RNA (1)...(19): siRNA sense strand
ucagauaaugcacguguuu

SEQ ID NO: 1198081 - RNA, 19 nt, Homo sapiens
  misc_RNA (1)...(19): siRNA sense strand
cuacuuggagaagaaauua

SEQ ID NO: 1198082 - RNA, 19 nt, Homo sapiens
  misc_RNA (1)...(19): siRNA sense strand
uguuguacguuuccucuuu

SEQ ID NO: 1198083 - RNA, 19 nt, Homo sapiens
  misc_RNA (1)...(19): siRNA sense strand
ggaggaggacuucgugcaa

SEQ ID NO: 1198084 - RNA, 19 nt, Homo sapiens
  misc_RNA (1)...(19): siRNA sense strand
uggaggauguggacuugaa

SEQ ID NO: 1198085 - RNA, 19 nt, Homo sapiens
  misc_RNA (1)...(19): siRNA sense strand
uccacaagaucgugagaaa

SEQ ID NO: 1198086 - RNA, 19 nt, Homo sapiens
  misc_RNA (1)...(19): siRNA sense strand
aggcggaugugucugcuuu

SEQ ID NO: 1198087 - RNA, 19 nt, Homo sapiens
  misc_RNA (1)...(19): siRNA sense strand
ggacugaagcaccuguugu

SEQ ID NO: 1198088 - RNA, 19 nt, Homo sapiens
  misc_RNA (1)...(19): siRNA sense strand
gagcuggaccugagugaca

SEQ ID NO: 1198089 - RNA, 19 nt, Homo sapiens
  misc_RNA (1)...(19): siRNA sense strand
ggauguggacuugaagaaa

SEQ ID NO: 1198090 - RNA, 19 nt, Homo sapiens
  misc_RNA (1)...(19): siRNA sense strand
ccaggaagacagcauugaa

SEQ ID NO: 1198091 - RNA, 19 nt, Homo sapiens
  misc_RNA (1)...(19): siRNA sense strand
ucuuugagccuucuuggua

SEQ ID NO: 1198092 - RNA, 19 nt, Homo sapiens
  misc_RNA (1)...(19): siRNA sense strand
uaggaccgcucugcacuga

SEQ ID NO: 1198093 - RNA, 19 nt, Homo sapiens
  misc_RNA (1)...(19): siRNA sense strand
guuguacguuuccucuuug

SEQ ID NO: 1198094 - RNA, 19 nt, Homo sapiens
  misc_RNA (1)...(19): siRNA sense strand
aagauggaguugcuguuug

SEQ ID NO: 1198095 - RNA, 19 nt, Homo sapiens
  misc_RNA (1)...(19): siRNA sense strand
acucagcacuaaucagaau

SEQ ID NO: 1198096 - RNA, 19 nt, Homo sapiens
  misc_RNA (1)...(19): siRNA sense strand
ggaggaagaggaggaggaa

SEQ ID NO: 1198097 - RNA, 19 nt, Homo sapiens
  misc_RNA (1)...(19): siRNA sense strand
ugacaguccuucuggaaaa

SEQ ID NO: 1198098 - RNA, 19 nt, Homo sapiens
  misc_RNA (1)...(19): siRNA sense strand
uaaugcacguguuucgaau

SEQ ID NO: 1198099 - RNA, 19 nt, Homo sapiens
  misc_RNA (1)...(19): siRNA sense strand
gagcugaccgucgucuuug

SEQ ID NO: 1198100 - RNA, 19 nt, Homo sapiens
  misc_RNA (1)...(19): siRNA sense strand
gucaugauguucugugaag

SEQ ID NO: 1198101 - RNA, 19 nt, Homo sapiens
  misc_RNA (1)...(19): siRNA sense strand
cuaaugaucgacuucaaug

SEQ ID NO: 1198102 - RNA, 19 nt, Homo sapiens
  misc_RNA (1)...(19): siRNA sense strand
ggaaucauggacugcagaa

SEQ ID NO: 1198103 - RNA, 19 nt, Homo sapiens
  misc_RNA (1)...(19): siRNA sense strand
ggagaaacugcagcacuug

SEQ ID NO: 1198104 - RNA, 19 nt, Homo sapiens
  misc_RNA (1)...(19): siRNA sense strand
ccaagacagguuugacuau

SEQ ID NO: 1198105 - RNA, 19 nt, Homo sapiens
  misc_RNA (1)...(19): siRNA sense strand
gcuaaugaucgacuucaau

SEQ ID NO: 1198106 - RNA, 19 nt, Homo sapiens
  misc_RNA (1)...(19): siRNA sense strand
gcagauuccagugcauuga

SEQ ID NO: 1198107 - RNA, 19 nt, Homo sapiens
  misc_RNA (1)...(19): siRNA sense strand
gaagcagauuccagugcau

SEQ ID NO: 1198108 - RNA, 19 nt, Homo sapiens
  misc_RNA (1)...(19): siRNA sense strand
gagaaaacccuccagaauc

SEQ ID NO: 1198109 - RNA, 19 nt, Homo sapiens
  misc_RNA (1)...(19): siRNA sense strand
ucugugaagugcugaaaca

SEQ ID NO: 1198110 - RNA, 19 nt, Homo sapiens
  misc_RNA (1)...(19): siRNA sense strand
ccucgguacucagcacuaa

SEQ ID NO: 1198111 - RNA, 19 nt, Homo sapiens
  misc_RNA (1)...(19): siRNA sense strand
gccgacaccuugauauggu

SEQ ID NO: 1198112 - RNA, 19 nt, Homo sapiens
  misc_RNA (1)...(19): siRNA sense strand
uaacaugcccaaggaggaa

SEQ ID NO: 1198113 - RNA, 19 nt, Homo sapiens
  misc_RNA (1)...(19): siRNA sense strand
ggaguaccuuucgagaauc

SEQ ID NO: 1198114 - RNA, 19 nt, Homo sapiens
  misc_RNA (1)...(19): siRNA sense strand
aaagagaugagccgaagug

SEQ ID NO: 1198115 - RNA, 19 nt, Homo sapiens
  misc_RNA (1)...(19): siRNA sense strand
ugagcugaccgucgucuuu

SEQ ID NO: 1198116 - RNA, 19 nt, Homo sapiens
  misc_RNA (1)...(19): siRNA sense strand
gggacacucuaccaagaca

SEQ ID NO: 1198117 - RNA, 19 nt, Homo sapiens
  misc_RNA (1)...(19): siRNA sense strand
ggaagacagcauugaagag

SEQ ID NO: 1198118 - RNA, 19 nt, Homo sapiens
  misc_RNA (1)...(19): siRNA sense strand
gggguugucugaaauguau

SEQ ID NO: 1198119 - RNA, 19 nt, Homo sapiens
  misc_RNA (1)...(19): siRNA sense strand
caccuguugugcaaucuga

SEQ ID NO: 1198120 - RNA, 19 nt, Homo sapiens
  misc_RNA (1)...(19): siRNA sense strand
uccauaacaugcccaagga

SEQ ID NO: 1198121 - RNA, 19 nt, Homo sapiens
  misc_RNA (1)...(19): siRNA sense strand
caaagggccauggacuauu

SEQ ID NO: 1198122 - RNA, 19 nt, Homo sapiens
  misc_RNA (1)...(19): siRNA sense strand
ggacuugaagaaauuuaag

SEQ ID NO: 1198123 - RNA, 19 nt, Homo sapiens
  misc_RNA (1)...(19): siRNA sense strand
agugaaagccaaagcuaaa

SEQ ID NO: 1198124 - RNA, 19 nt, Homo sapiens
  misc_RNA (1)...(19): siRNA sense strand
gacugcgucucaucaagga

SEQ ID NO: 1198125 - RNA, 19 nt, Homo sapiens
  misc_RNA (1)...(19): siRNA sense strand
agacagguuugacuaucug

SEQ ID NO: 1198126 - RNA, 19 nt, Homo sapiens
  misc_RNA (1)...(19): siRNA sense strand
cucccaagcuccucucaug

SEQ ID NO: 1198127 - RNA, 19 nt, Homo sapiens
  misc_RNA (1)...(19): siRNA sense strand
ucaacaggagagaccuuua

SEQ ID NO: 1198128 - RNA, 19 nt, Homo sapiens
  misc_RNA (1)...(19): siRNA sense strand
ccagaauccucuuccucau

SEQ ID NO: 1198129 - RNA, 19 nt, Homo sapiens
  misc_RNA (1)...(19): siRNA sense strand
gggucaugauguucuguga

SEQ ID NO: 1198130 - RNA, 19 nt, Homo sapiens
  misc_RNA (1)...(19): siRNA sense strand
ggaagggaauggaaggauu

SEQ ID NO: 1198131 - RNA, 19 nt, Homo sapiens
  misc_RNA (1)...(19): siRNA sense strand
gcacucugcucaacaccua

SEQ ID NO: 1198132 - RNA, 19 nt, Homo sapiens
  misc_RNA (1)...(19): siRNA sense strand
gacaagcgacgucuuagua

SEQ ID NO: 1198133 - RNA, 19 nt, Homo sapiens
  misc_RNA (1)...(19): siRNA sense strand
gggaugagcaggcugauuu

SEQ ID NO: 1198134 - RNA, 19 nt, Homo sapiens
  misc_RNA (1)...(19): siRNA sense strand
gcacugucccuccuccuua

SEQ ID NO: 1198135 - RNA, 19 nt, Homo sapiens
  misc_RNA (1)...(19): siRNA sense strand
ucacuguccucuucauauu

SEQ ID NO: 1198136 - RNA, 19 nt, Homo sapiens
  misc_RNA (1)...(19): siRNA sense strand
aauauggccucccaacaaa

SEQ ID NO: 1198137 - RNA, 19 nt, Homo sapiens
  misc_RNA (1)...(19): siRNA sense strand
gaagaucagacagcgauuu

SEQ ID NO: 1198138 - RNA, 19 nt, Homo sapiens
  misc_RNA (1)...(19): siRNA sense strand
gaagggaauggaaggauug

SEQ ID NO: 1198139 - RNA, 19 nt, Homo sapiens
  misc_RNA (1)...(19): siRNA sense strand
uucaaucccuucagcaaua

SEQ ID NO: 1198140 - RNA, 19 nt, Homo sapiens
  misc_RNA (1)...(19): siRNA sense strand
caccugggcuggaagaaga

SEQ ID NO: 1198141 - RNA, 19 nt, Homo sapiens
  misc_RNA (1)...(19): siRNA sense strand
uaauauggccucccaacaa

SEQ ID NO: 1198142 - RNA, 19 nt, Homo sapiens
  misc_RNA (1)...(19): siRNA sense strand
gcugauuuccggugugaua

SEQ ID NO: 1198143 - RNA, 19 nt, Homo sapiens
  misc_RNA (1)...(19): siRNA sense strand
gcaaggcaaggucagauga

SEQ ID NO: 1198144 - RNA, 19 nt, Homo sapiens
  misc_RNA (1)...(19): siRNA sense strand
ggucaacuguuacguaucc

SEQ ID NO: 1198145 - RNA, 19 nt, Homo sapiens
  misc_RNA (1)...(19): siRNA sense strand
ucaaucccuucagcaauaa

SEQ ID NO: 1198146 - RNA, 19 nt, Homo sapiens
  misc_RNA (1)...(19): siRNA sense strand
ucagaugaccuaucagugu

SEQ ID NO: 1198147 - RNA, 19 nt, Homo sapiens
  misc_RNA (1)...(19): siRNA sense strand
ggaggugggcuucauugug

SEQ ID NO: 1198148 - RNA, 19 nt, Homo sapiens
  misc_RNA (1)...(19): siRNA sense strand
ccggucaacuguuacguau

SEQ ID NO: 1198149 - RNA, 19 nt, Homo sapiens
  misc_RNA (1)...(19): siRNA sense strand
ggcagcacauggcuaagug

SEQ ID NO: 1198150 - RNA, 19 nt, Homo sapiens
  misc_RNA (1)...(19): siRNA sense strand
gcucacuguccucuucaua

SEQ ID NO: 1198151 - RNA, 19 nt, Homo sapiens
  misc_RNA (1)...(19): siRNA sense strand
gcuacugggugcugcagau

SEQ ID NO: 1198152 - RNA, 19 nt, Homo sapiens
  misc_RNA (1)...(19): siRNA sense strand
cccacccggucaacuguua

SEQ ID NO: 1198153 - RNA, 19 nt, Homo sapiens
  misc_RNA (1)...(19): siRNA sense strand
gcaggagaagcgcaagcua

SEQ ID NO: 1198154 - RNA, 19 nt, Homo sapiens
  misc_RNA (1)...(19): siRNA sense strand
acaagcgacgucuuaguaa

SEQ ID NO: 1198155 - RNA, 19 nt, Homo sapiens
  misc_RNA (1)...(19): siRNA sense strand
gcagagaaggcagaacugu

SEQ ID NO: 1198156 - RNA, 19 nt, Homo sapiens
  misc_RNA (1)...(19): siRNA sense strand
ugucuucauugucuuuaug

SEQ ID NO: 1198157 - RNA, 19 nt, Homo sapiens
  misc_RNA (1)...(19): siRNA sense strand
agugacaagcgacgucuua

SEQ ID NO: 1198158 - RNA, 19 nt, Homo sapiens
  misc_RNA (1)...(19): siRNA sense strand
guacuucaucuacggaauc

SEQ ID NO: 1198159 - RNA, 19 nt, Homo sapiens
  misc_RNA (1)...(19): siRNA sense strand
gcuggaagaagaucagaca

SEQ ID NO: 1198160 - RNA, 19 nt, Homo sapiens
  misc_RNA (1)...(19): siRNA sense strand
caagcacucgaccguggua

SEQ ID NO: 1198161 - RNA, 19 nt, Homo sapiens
  misc_RNA (1)...(19): siRNA sense strand
gcagcaaggcaaggucaga

SEQ ID NO: 1198162 - RNA, 19 nt, Homo sapiens
  misc_RNA (1)...(19): siRNA sense strand
uggaggaaguacacaagca

SEQ ID NO: 1198163 - RNA, 19 nt, Homo sapiens
  misc_RNA (1)...(19): siRNA sense strand
gcuaagugccagcuuucug

SEQ ID NO: 1198164 - RNA, 19 nt, Homo sapiens
  misc_RNA (1)...(19): siRNA sense strand
gauuuccggugugauacga

SEQ ID NO: 1198165 - RNA, 19 nt, Homo sapiens
  misc_RNA (1)...(19): siRNA sense strand
agccugaggugcccaaugg

SEQ ID NO: 1198166 - RNA, 19 nt, Homo sapiens
  misc_RNA (1)...(19): siRNA sense strand
aagaucagacagcgauuug

SEQ ID NO: 1198167 - RNA, 19 nt, Homo sapiens
  misc_RNA (1)...(19): siRNA sense strand
ggaugagcaggcugauuuc

SEQ ID NO: 1198168 - RNA, 19 nt, Homo sapiens
  misc_RNA (1)...(19): siRNA sense strand
gccacgccaugcacacugu

SEQ ID NO: 1198169 - RNA, 19 nt, Homo sapiens
  misc_RNA (1)...(19): siRNA sense strand
ggaagguuucauccagguu

SEQ ID NO: 1198170 - RNA, 19 nt, Homo sapiens
  misc_RNA (1)...(19): siRNA sense strand
ggucaccgagcaaguacga

SEQ ID NO: 1198171 - RNA, 19 nt, Homo sapiens
  misc_RNA (1)...(19): siRNA sense strand
ggaagggaauggaaggauu

SEQ ID NO: 1198172 - RNA, 19 nt, Homo sapiens
  misc_RNA (1)...(19): siRNA sense strand
gcacucugcucaacaccua

SEQ ID NO: 1198173 - RNA, 19 nt, Homo sapiens
  misc_RNA (1)...(19): siRNA sense strand
gacaagcgacgucuuagua

SEQ ID NO: 1198174 - RNA, 19 nt, Homo sapiens
  misc_RNA (1)...(19): siRNA sense strand
gggaugagcaggcugauuu

SEQ ID NO: 1198175 - RNA, 19 nt, Homo sapiens
  misc_RNA (1)...(19): siRNA sense strand
gcacugucccuccuccuua

SEQ ID NO: 1198176 - RNA, 19 nt, Homo sapiens
  misc_RNA (1)...(19): siRNA sense strand
ucacuguccucuucauauu

SEQ ID NO: 1198177 - RNA, 19 nt, Homo sapiens
  misc_RNA (1)...(19): siRNA sense strand
aauauggccucccaacaaa

SEQ ID NO: 1198178 - RNA, 19 nt, Homo sapiens
  misc_RNA (1)...(19): siRNA sense strand
gaagaucagacagcgauuu

SEQ ID NO: 1198179 - RNA, 19 nt, Homo sapiens
  misc_RNA (1)...(19): siRNA sense strand
gaagggaauggaaggauug

SEQ ID NO: 1198180 - RNA, 19 nt, Homo sapiens
  misc_RNA (1)...(19): siRNA sense strand
uucaaucccuucagcaaua

SEQ ID NO: 1198181 - RNA, 19 nt, Homo sapiens
  misc_RNA (1)...(19): siRNA sense strand
caccugggcuggaagaaga

SEQ ID NO: 1198182 - RNA, 19 nt, Homo sapiens
  misc_RNA (1)...(19): siRNA sense strand
uaauauggccucccaacaa

SEQ ID NO: 1198183 - RNA, 19 nt, Homo sapiens
  misc_RNA (1)...(19): siRNA sense strand
gcugauuuccggugugaua

SEQ ID NO: 1198184 - RNA, 19 nt, Homo sapiens
  misc_RNA (1)...(19): siRNA sense strand
gcaaggcaaggucagauga

SEQ ID NO: 1198185 - RNA, 19 nt, Homo sapiens
  misc_RNA (1)...(19): siRNA sense strand
ggucaacuguuacguaucc

SEQ ID NO: 1198186 - RNA, 19 nt, Homo sapiens
  misc_RNA (1)...(19): siRNA sense strand
ucaaucccuucagcaauaa

SEQ ID NO: 1198187 - RNA, 19 nt, Homo sapiens
  misc_RNA (1)...(19): siRNA sense strand
ucagaugaccuaucagugu

SEQ ID NO: 1198188 - RNA, 19 nt, Homo sapiens
  misc_RNA (1)...(19): siRNA sense strand
ggaggugggcuucauugug

SEQ ID NO: 1198189 - RNA, 19 nt, Homo sapiens
  misc_RNA (1)...(19): siRNA sense strand
ccggucaacuguuacguau

SEQ ID NO: 1198190 - RNA, 19 nt, Homo sapiens
  misc_RNA (1)...(19): siRNA sense strand
ggcagcacauggcuaagug

SEQ ID NO: 1198191 - RNA, 19 nt, Homo sapiens
  misc_RNA (1)...(19): siRNA sense strand
gcucacuguccucuucaua

SEQ ID NO: 1198192 - RNA, 19 nt, Homo sapiens
  misc_RNA (1)...(19): siRNA sense strand
gcuacugggugcugcagau

SEQ ID NO: 1198193 - RNA, 19 nt, Homo sapiens
  misc_RNA (1)...(19): siRNA sense strand
cccacccggucaacuguua

SEQ ID NO: 1198194 - RNA, 19 nt, Homo sapiens
  misc_RNA (1)...(19): siRNA sense strand
gcaggagaagcgcaagcua

SEQ ID NO: 1198195 - RNA, 19 nt, Homo sapiens
  misc_RNA (1)...(19): siRNA sense strand
acaagcgacgucuuaguaa

SEQ ID NO: 1198196 - RNA, 19 nt, Homo sapiens
  misc_RNA (1)...(19): siRNA sense strand
gcagagaaggcagaacugu

SEQ ID NO: 1198197 - RNA, 19 nt, Homo sapiens
  misc_RNA (1)...(19): siRNA sense strand
ugucuucauugucuuuaug

SEQ ID NO: 1198198 - RNA, 19 nt, Homo sapiens
  misc_RNA (1)...(19): siRNA sense strand
agugacaagcgacgucuua

SEQ ID NO: 1198199 - RNA, 19 nt, Homo sapiens
  misc_RNA (1)...(19): siRNA sense strand
guacuucaucuacggaauc

SEQ ID NO: 1198200 - RNA, 19 nt, Homo sapiens
  misc_RNA (1)...(19): siRNA sense strand
gcuggaagaagaucagaca

SEQ ID NO: 1198201 - RNA, 19 nt, Homo sapiens
  misc_RNA (1)...(19): siRNA sense strand
caagcacucgaccguggua

SEQ ID NO: 1198202 - RNA, 19 nt, Homo sapiens
  misc_RNA (1)...(19): siRNA sense strand
gcagcaaggcaaggucaga

SEQ ID NO: 1198203 - RNA, 19 nt, Homo sapiens
  misc_RNA (1)...(19): siRNA sense strand
uggaggaaguacacaagca

SEQ ID NO: 1198204 - RNA, 19 nt, Homo sapiens
  misc_RNA (1)...(19): siRNA sense strand
gcuaagugccagcuuucug

SEQ ID NO: 1198205 - RNA, 19 nt, Homo sapiens
  misc_RNA (1)...(19): siRNA sense strand
gauuuccggugugauacga

SEQ ID NO: 1198206 - RNA, 19 nt, Homo sapiens
  misc_RNA (1)...(19): siRNA sense strand
agccugaggugcccaaugg

SEQ ID NO: 1198207 - RNA, 19 nt, Homo sapiens
  misc_RNA (1)...(19): siRNA sense strand
aagaucagacagcgauuug

SEQ ID NO: 1198208 - RNA, 19 nt, Homo sapiens
  misc_RNA (1)...(19): siRNA sense strand
ggaugagcaggcugauuuc

SEQ ID NO: 1198209 - RNA, 19 nt, Homo sapiens
  misc_RNA (1)...(19): siRNA sense strand
gccacgccaugcacacugu

SEQ ID NO: 1198210 - RNA, 19 nt, Homo sapiens
  misc_RNA (1)...(19): siRNA sense strand
ggaagguuucauccagguu

SEQ ID NO: 1198211 - RNA, 19 nt, Homo sapiens
  misc_RNA (1)...(19): siRNA sense strand
ggucaccgagcaaguacga

SEQ ID NO: 1198212 - RNA, 19 nt, Homo sapiens
  misc_RNA (1)...(19): siRNA sense strand
gcccagcuauaaccaguau

SEQ ID NO: 1198213 - RNA, 19 nt, Homo sapiens
  misc_RNA (1)...(19): siRNA sense strand
uaaccaguaucagcaguau

SEQ ID NO: 1198214 - RNA, 19 nt, Homo sapiens
  misc_RNA (1)...(19): siRNA sense strand
acacaggguggcacaagua

SEQ ID NO: 1198215 - RNA, 19 nt, Homo sapiens
  misc_RNA (1)...(19): siRNA sense strand
ggaaccaguacuaucagaa

SEQ ID NO: 1198216 - RNA, 19 nt, Homo sapiens
  misc_RNA (1)...(19): siRNA sense strand
gaaccaguacuaucagaac

SEQ ID NO: 1198217 - RNA, 19 nt, Homo sapiens
  misc_RNA (1)...(19): siRNA sense strand
gcaguggaaccaguacuau

SEQ ID NO: 1198218 - RNA, 19 nt, Homo sapiens
  misc_RNA (1)...(19): siRNA sense strand
ccagcuauaaccaguauca

SEQ ID NO: 1198219 - RNA, 19 nt, Homo sapiens
  misc_RNA (1)...(19): siRNA sense strand
uggcacaaguacacaguag

SEQ ID NO: 1198220 - RNA, 19 nt, Homo sapiens
  misc_RNA (1)...(19): siRNA sense strand
gagcuacuccgggaacaca

SEQ ID NO: 1198221 - RNA, 19 nt, Homo sapiens
  misc_RNA (1)...(19): siRNA sense strand
uggaaccaguacuaucaga

SEQ ID NO: 1198222 - RNA, 19 nt, Homo sapiens
  misc_RNA (1)...(19): siRNA sense strand
gcccagcuauaaccaguau

SEQ ID NO: 1198223 - RNA, 19 nt, Homo sapiens
  misc_RNA (1)...(19): siRNA sense strand
uaaccaguaucagcaguau

SEQ ID NO: 1198224 - RNA, 19 nt, Homo sapiens
  misc_RNA (1)...(19): siRNA sense strand
acacaggguggcacaagua

SEQ ID NO: 1198225 - RNA, 19 nt, Homo sapiens
  misc_RNA (1)...(19): siRNA sense strand
ggaaccaguacuaucagaa

SEQ ID NO: 1198226 - RNA, 19 nt, Homo sapiens
  misc_RNA (1)...(19): siRNA sense strand
gaaccaguacuaucagaac

SEQ ID NO: 1198227 - RNA, 19 nt, Homo sapiens
  misc_RNA (1)...(19): siRNA sense strand
gcaguggaaccaguacuau

SEQ ID NO: 1198228 - RNA, 19 nt, Homo sapiens
  misc_RNA (1)...(19): siRNA sense strand
ccagcuauaaccaguauca

SEQ ID NO: 1198229 - RNA, 19 nt, Homo sapiens
  misc_RNA (1)...(19): siRNA sense strand
uggcacaaguacacaguag

SEQ ID NO: 1198230 - RNA, 19 nt, Homo sapiens
  misc_RNA (1)...(19): siRNA sense strand
gagcuacuccgggaacaca

SEQ ID NO: 1198231 - RNA, 19 nt, Homo sapiens
  misc_RNA (1)...(19): siRNA sense strand
uggaaccaguacuaucaga

SEQ ID NO: 1198232 - RNA, 19 nt, Homo sapiens
  misc_RNA (1)...(19): siRNA sense strand
gcccagcuauaaccaguau

SEQ ID NO: 1198233 - RNA, 19 nt, Homo sapiens
  misc_RNA (1)...(19): siRNA sense strand
uaaccaguaucagcaguau

SEQ ID NO: 1198234 - RNA, 19 nt, Homo sapiens
  misc_RNA (1)...(19): siRNA sense strand
acacaggguggcacaagua

SEQ ID NO: 1198235 - RNA, 19 nt, Homo sapiens
  misc_RNA (1)...(19): siRNA sense strand
ggaaccaguacuaucagaa

SEQ ID NO: 1198236 - RNA, 19 nt, Homo sapiens
  misc_RNA (1)...(19): siRNA sense strand
gaaccaguacuaucagaac

SEQ ID NO: 1198237 - RNA, 19 nt, Homo sapiens
  misc_RNA (1)...(19): siRNA sense strand
gcaguggaaccaguacuau

SEQ ID NO: 1198238 - RNA, 19 nt, Homo sapiens
  misc_RNA (1)...(19): siRNA sense strand
ccagcuauaaccaguauca

SEQ ID NO: 1198239 - RNA, 19 nt, Homo sapiens
  misc_RNA (1)...(19): siRNA sense strand
uggcacaaguacacaguag

SEQ ID NO: 1198240 - RNA, 19 nt, Homo sapiens
  misc_RNA (1)...(19): siRNA sense strand
gagcuacuccgggaacaca

SEQ ID NO: 1198241 - RNA, 19 nt, Homo sapiens
  misc_RNA (1)...(19): siRNA sense strand
uggaaccaguacuaucaga

SEQ ID NO: 1198242 - RNA, 19 nt, Homo sapiens
  misc_RNA (1)...(19): siRNA sense strand
ggagagagauuuaacuuuu

SEQ ID NO: 1198243 - RNA, 19 nt, Homo sapiens
  misc_RNA (1)...(19): siRNA sense strand
gcaguuacuucaaggauau

SEQ ID NO: 1198244 - RNA, 19 nt, Homo sapiens
  misc_RNA (1)...(19): siRNA sense strand
gaagaugggagagagauuu

SEQ ID NO: 1198245 - RNA, 19 nt, Homo sapiens
  misc_RNA (1)...(19): siRNA sense strand
ggaaugcacgucagucaaa

SEQ ID NO: 1198246 - RNA, 19 nt, Homo sapiens
  misc_RNA (1)...(19): siRNA sense strand
uaaaucaaaugagccauca

SEQ ID NO: 1198247 - RNA, 19 nt, Homo sapiens
  misc_RNA (1)...(19): siRNA sense strand
gaagauaucagaggaaugc

SEQ ID NO: 1198248 - RNA, 19 nt, Homo sapiens
  misc_RNA (1)...(19): siRNA sense strand
ucaaaugagccaucaguga

SEQ ID NO: 1198249 - RNA, 19 nt, Homo sapiens
  misc_RNA (1)...(19): siRNA sense strand
guuaaugaauccaaagaag

SEQ ID NO: 1198250 - RNA, 19 nt, Homo sapiens
  misc_RNA (1)...(19): siRNA sense strand
gggagagagauuuaacuuu

SEQ ID NO: 1198251 - RNA, 19 nt, Homo sapiens
  misc_RNA (1)...(19): siRNA sense strand
caagguggaagauaucaga

SEQ ID NO: 1198252 - RNA, 19 nt, Homo sapiens
  misc_RNA (1)...(19): siRNA sense strand
ugaacuugcuuggcaguga

SEQ ID NO: 1198253 - RNA, 19 nt, Homo sapiens
  misc_RNA (1)...(19): siRNA sense strand
gaggaaugcacgucaguca

SEQ ID NO: 1198254 - RNA, 19 nt, Homo sapiens
  misc_RNA (1)...(19): siRNA sense strand
aagaugggagagagauuua

SEQ ID NO: 1198255 - RNA, 19 nt, Homo sapiens
  misc_RNA (1)...(19): siRNA sense strand
guagcuggguuuagugaac

SEQ ID NO: 1198256 - RNA, 19 nt, Homo sapiens
  misc_RNA (1)...(19): siRNA sense strand
ccaaagaagaugggagaga

SEQ ID NO: 1198257 - RNA, 19 nt, Homo sapiens
  misc_RNA (1)...(19): siRNA sense strand
guauugauguccggcugaa

SEQ ID NO: 1198258 - RNA, 19 nt, Homo sapiens
  misc_RNA (1)...(19): siRNA sense strand
agcaguuacuucaaggaua

SEQ ID NO: 1198259 - RNA, 19 nt, Homo sapiens
  misc_RNA (1)...(19): siRNA sense strand
uggaagauaucagaggaau

SEQ ID NO: 1198260 - RNA, 19 nt, Homo sapiens
  misc_RNA (1)...(19): siRNA sense strand
cuugcuaccucaucagaga

SEQ ID NO: 1198261 - RNA, 19 nt, Homo sapiens
  misc_RNA (1)...(19): siRNA sense strand
gaaugcacgucagucaaaa

SEQ ID NO: 1198262 - RNA, 19 nt, Homo sapiens
  misc_RNA (1)...(19): siRNA sense strand
gcugaagguucuuuuagau

SEQ ID NO: 1198263 - RNA, 19 nt, Homo sapiens
  misc_RNA (1)...(19): siRNA sense strand
cguuguagcuggguuuagu

SEQ ID NO: 1198264 - RNA, 19 nt, Homo sapiens
  misc_RNA (1)...(19): siRNA sense strand
ugaggcagcaguuacuuca

SEQ ID NO: 1198265 - RNA, 19 nt, Homo sapiens
  misc_RNA (1)...(19): siRNA sense strand
ggaagauaucagaggaaug

SEQ ID NO: 1198266 - RNA, 19 nt, Homo sapiens
  misc_RNA (1)...(19): siRNA sense strand
aggcagcaguuacuucaag

SEQ ID NO: 1198267 - RNA, 19 nt, Homo sapiens
  misc_RNA (1)...(19): siRNA sense strand
caucagugaggcagcaguu

SEQ ID NO: 1198268 - RNA, 19 nt, Homo sapiens
  misc_RNA (1)...(19): siRNA sense strand
gaugggagagagauuuaac

SEQ ID NO: 1198269 - RNA, 19 nt, Homo sapiens
  misc_RNA (1)...(19): siRNA sense strand
gaacaaagacagauaccuu

SEQ ID NO: 1198270 - RNA, 19 nt, Homo sapiens
  misc_RNA (1)...(19): siRNA sense strand
gauguggacuucaguuauu

SEQ ID NO: 1198271 - RNA, 19 nt, Homo sapiens
  misc_RNA (1)...(19): siRNA sense strand
ggagagagauuuaacuuuu

SEQ ID NO: 1198272 - RNA, 19 nt, Homo sapiens
  misc_RNA (1)...(19): siRNA sense strand
gcaguuacuucaaggauau

SEQ ID NO: 1198273 - RNA, 19 nt, Homo sapiens
  misc_RNA (1)...(19): siRNA sense strand
caagcuucaugaugucuua

SEQ ID NO: 1198274 - RNA, 19 nt, Homo sapiens
  misc_RNA (1)...(19): siRNA sense strand
ggaacuuucucaacgcauu

SEQ ID NO: 1198275 - RNA, 19 nt, Homo sapiens
  misc_RNA (1)...(19): siRNA sense strand
gaagaugggagagagauuu

SEQ ID NO: 1198276 - RNA, 19 nt, Homo sapiens
  misc_RNA (1)...(19): siRNA sense strand
ggaaugcacgucagucaaa

SEQ ID NO: 1198277 - RNA, 19 nt, Homo sapiens
  misc_RNA (1)...(19): siRNA sense strand
ugacauugauccacagguu

SEQ ID NO: 1198278 - RNA, 19 nt, Homo sapiens
  misc_RNA (1)...(19): siRNA sense strand
aaagacagauaccuucaga

SEQ ID NO: 1198279 - RNA, 19 nt, Homo sapiens
  misc_RNA (1)...(19): siRNA sense strand
ccacagggauggcgagaag

SEQ ID NO: 1198280 - RNA, 19 nt, Homo sapiens
  misc_RNA (1)...(19): siRNA sense strand
uaaaucaaaugagccauca

SEQ ID NO: 1198281 - RNA, 19 nt, Homo sapiens
  misc_RNA (1)...(19): siRNA sense strand
gaagauaucagaggaaugc

SEQ ID NO: 1198282 - RNA, 19 nt, Homo sapiens
  misc_RNA (1)...(19): siRNA sense strand
cauacaacaugacgaaaca

SEQ ID NO: 1198283 - RNA, 19 nt, Homo sapiens
  misc_RNA (1)...(19): siRNA sense strand
gguguucacucaacuugga

SEQ ID NO: 1198284 - RNA, 19 nt, Homo sapiens
  misc_RNA (1)...(19): siRNA sense strand
ucaaaugagccaucaguga

SEQ ID NO: 1198285 - RNA, 19 nt, Homo sapiens
  misc_RNA (1)...(19): siRNA sense strand
guuaaugaauccaaagaag

SEQ ID NO: 1198286 - RNA, 19 nt, Homo sapiens
  misc_RNA (1)...(19): siRNA sense strand
gauggaacaaagacagaua

SEQ ID NO: 1198287 - RNA, 19 nt, Homo sapiens
  misc_RNA (1)...(19): siRNA sense strand
gaagaauggcacagggaaa

SEQ ID NO: 1198288 - RNA, 19 nt, Homo sapiens
  misc_RNA (1)...(19): siRNA sense strand
ggcgagaaguauuuguuga

SEQ ID NO: 1198289 - RNA, 19 nt, Homo sapiens
  misc_RNA (1)...(19): siRNA sense strand
cugcacugguugcugauua

SEQ ID NO: 1198290 - RNA, 19 nt, Homo sapiens
  misc_RNA (1)...(19): siRNA sense strand
ucacucaacuuggaucugu

SEQ ID NO: 1198291 - RNA, 19 nt, Homo sapiens
  misc_RNA (1)...(19): siRNA sense strand
gggauggcgagaaguauuu

SEQ ID NO: 1198292 - RNA, 19 nt, Homo sapiens
  misc_RNA (1)...(19): siRNA sense strand
gggagagagauuuaacuuu

SEQ ID NO: 1198293 - RNA, 19 nt, Homo sapiens
  misc_RNA (1)...(19): siRNA sense strand
gauccacagguuucugaua

SEQ ID NO: 1198294 - RNA, 19 nt, Homo sapiens
  misc_RNA (1)...(19): siRNA sense strand
ggguacagcuuuuaucuug

SEQ ID NO: 1198295 - RNA, 19 nt, Homo sapiens
  misc_RNA (1)...(19): siRNA sense strand
gcuucaugaugucuuaauu

SEQ ID NO: 1198296 - RNA, 19 nt, Homo sapiens
  misc_RNA (1)...(19): siRNA sense strand
caagggaucauguugaagu

SEQ ID NO: 1198297 - RNA, 19 nt, Homo sapiens
  misc_RNA (1)...(19): siRNA sense strand
guugaaguguguccugaug

SEQ ID NO: 1198298 - RNA, 19 nt, Homo sapiens
  misc_RNA (1)...(19): siRNA sense strand
auccacagguuucugauaa

SEQ ID NO: 1198299 - RNA, 19 nt, Homo sapiens
  misc_RNA (1)...(19): siRNA sense strand
ugaacuugcuuggcaguga

SEQ ID NO: 1198300 - RNA, 19 nt, Homo sapiens
  misc_RNA (1)...(19): siRNA sense strand
caagguggaagauaucaga

SEQ ID NO: 1198301 - RNA, 19 nt, Homo sapiens
  misc_RNA (1)...(19): siRNA sense strand
ccacaagcuucaugauguc

SEQ ID NO: 1198302 - RNA, 19 nt, Homo sapiens
  misc_RNA (1)...(19): siRNA sense strand
cgagaaguauuuguugaca

SEQ ID NO: 1198303 - RNA, 19 nt, Homo sapiens
  misc_RNA (1)...(19): siRNA sense strand
gcuuuuaucuugcacauga

SEQ ID NO: 1198304 - RNA, 19 nt, Homo sapiens
  misc_RNA (1)...(19): siRNA sense strand
gaccacaagcuucaugaug

SEQ ID NO: 1198305 - RNA, 19 nt, Homo sapiens
  misc_RNA (1)...(19): siRNA sense strand
gagaaguauuuguugacau

SEQ ID NO: 1198306 - RNA, 19 nt, Homo sapiens
  misc_RNA (1)...(19): siRNA sense strand
gaacuuucucaacgcauug

SEQ ID NO: 1198307 - RNA, 19 nt, Homo sapiens
  misc_RNA (1)...(19): siRNA sense strand
gaggaaugcacgucaguca

SEQ ID NO: 1198308 - RNA, 19 nt, Homo sapiens
  misc_RNA (1)...(19): siRNA sense strand
ucucaacgcauugcauuaa

SEQ ID NO: 1198309 - RNA, 19 nt, Homo sapiens
  misc_RNA (1)...(19): siRNA sense strand
ggucaugauggaacaaaga

SEQ ID NO: 1198310 - RNA, 19 nt, Homo sapiens
  misc_RNA (1)...(19): siRNA sense strand
accacaagcuucaugaugu

SEQ ID NO: 1198311 - RNA, 19 nt, Homo sapiens
  misc_RNA (1)...(19): siRNA sense strand
aagaugggagagagauuua

SEQ ID NO: 1198312 - RNA, 19 nt, Homo sapiens
  misc_RNA (1)...(19): siRNA sense strand
guagcuggguuuagugaac

SEQ ID NO: 1198313 - RNA, 19 nt, Homo sapiens
  misc_RNA (1)...(19): siRNA sense strand
gacauugauccacagguuu

SEQ ID NO: 1198314 - RNA, 19 nt, Homo sapiens
  misc_RNA (1)...(19): siRNA sense strand
ccaaagaagaugggagaga

SEQ ID NO: 1198315 - RNA, 19 nt, Homo sapiens
  misc_RNA (1)...(19): siRNA sense strand
ucaguuauuugcgaagaau

SEQ ID NO: 1198316 - RNA, 19 nt, Homo sapiens
  misc_RNA (1)...(19): siRNA sense strand
uaacagcugauguggacuu

SEQ ID NO: 1198317 - RNA, 19 nt, Homo sapiens
  misc_RNA (1)...(19): siRNA sense strand
acagggauggcgagaagua

SEQ ID NO: 1198318 - RNA, 19 nt, Homo sapiens
  misc_RNA (1)...(19): siRNA sense strand
guauugauguccggcugaa

SEQ ID NO: 1198319 - RNA, 19 nt, Homo sapiens
  misc_RNA (1)...(19): siRNA sense strand
ggaucauguugaagugugu

SEQ ID NO: 1198320 - RNA, 19 nt, Homo sapiens
  misc_RNA (1)...(19): siRNA sense strand
uggaagauaucagaggaau

SEQ ID NO: 1198321 - RNA, 19 nt, Homo sapiens
  misc_RNA (1)...(19): siRNA sense strand
cuugcuaccucaucagaga

SEQ ID NO: 1198322 - RNA, 19 nt, Homo sapiens
  misc_RNA (1)...(19): siRNA sense strand
agcaguuacuucaaggaua

SEQ ID NO: 1198323 - RNA, 19 nt, Homo sapiens
  misc_RNA (1)...(19): siRNA sense strand
ccaggaacagcagaucuaa

SEQ ID NO: 1198324 - RNA, 19 nt, Homo sapiens
  misc_RNA (1)...(19): siRNA sense strand
gcagaucuaacagcugaug

SEQ ID NO: 1198325 - RNA, 19 nt, Homo sapiens
  misc_RNA (1)...(19): siRNA sense strand
ugauuauggucaugaugga

SEQ ID NO: 1198326 - RNA, 19 nt, Homo sapiens
  misc_RNA (1)...(19): siRNA sense strand
gaaugcacgucagucaaaa

SEQ ID NO: 1198327 - RNA, 19 nt, Homo sapiens
  misc_RNA (1)...(19): siRNA sense strand
aggaacagcagaucuaaca

SEQ ID NO: 1198328 - RNA, 19 nt, Homo sapiens
  misc_RNA (1)...(19): siRNA sense strand
gauguucuuccugugcaua

SEQ ID NO: 1198329 - RNA, 19 nt, Homo sapiens
  misc_RNA (1)...(19): siRNA sense strand
cguuguagcuggguuuagu

SEQ ID NO: 1198330 - RNA, 19 nt, Homo sapiens
  misc_RNA (1)...(19): siRNA sense strand
gaaguauuuguugacauug

SEQ ID NO: 1198331 - RNA, 19 nt, Homo sapiens
  misc_RNA (1)...(19): siRNA sense strand
ugaggcagcaguuacuuca

SEQ ID NO: 1198332 - RNA, 19 nt, Homo sapiens
  misc_RNA (1)...(19): siRNA sense strand
gcugaagguucuuuuagau

SEQ ID NO: 1198333 - RNA, 19 nt, Homo sapiens
  misc_RNA (1)...(19): siRNA sense strand
caacgcauugcauuaacug

SEQ ID NO: 1198334 - RNA, 19 nt, Homo sapiens
  misc_RNA (1)...(19): siRNA sense strand
acuuggaucugugcugaaa

SEQ ID NO: 1198335 - RNA, 19 nt, Homo sapiens
  misc_RNA (1)...(19): siRNA sense strand
ggaagauaucagaggaaug

SEQ ID NO: 1198336 - RNA, 19 nt, Homo sapiens
  misc_RNA (1)...(19): siRNA sense strand
ugaaguguguccugaugcu

SEQ ID NO: 1198337 - RNA, 19 nt, Homo sapiens
  misc_RNA (1)...(19): siRNA sense strand
aggcagcaguuacuucaag

SEQ ID NO: 1198338 - RNA, 19 nt, Homo sapiens
  misc_RNA (1)...(19): siRNA sense strand
ugauguggacuucaguuau

SEQ ID NO: 1198339 - RNA, 19 nt, Homo sapiens
  misc_RNA (1)...(19): siRNA sense strand
uccacagguuucugauaaa

SEQ ID NO: 1198340 - RNA, 19 nt, Homo sapiens
  misc_RNA (1)...(19): siRNA sense strand
ucaacgcauugcauuaacu

SEQ ID NO: 1198341 - RNA, 19 nt, Homo sapiens
  misc_RNA (1)...(19): siRNA sense strand
uaucaucgaggaacuuucu

SEQ ID NO: 1198342 - RNA, 19 nt, Homo sapiens
  misc_RNA (1)...(19): siRNA sense strand
acaaagacagauaccuuca

SEQ ID NO: 1198343 - RNA, 19 nt, Homo sapiens
  misc_RNA (1)...(19): siRNA sense strand
guuaucaucgaggaacuuu

SEQ ID NO: 1198344 - RNA, 19 nt, Homo sapiens
  misc_RNA (1)...(19): siRNA sense strand
caucagugaggcagcaguu

SEQ ID NO: 1198345 - RNA, 19 nt, Homo sapiens
  misc_RNA (1)...(19): siRNA sense strand
cccaggaacagcagaucua

SEQ ID NO: 1198346 - RNA, 19 nt, Homo sapiens
  misc_RNA (1)...(19): siRNA sense strand
cuucaugaugucuuaauug

SEQ ID NO: 1198347 - RNA, 19 nt, Homo sapiens
  misc_RNA (1)...(19): siRNA sense strand
gcacugguugcugauuaug

SEQ ID NO: 1198348 - RNA, 19 nt, Homo sapiens
  misc_RNA (1)...(19): siRNA sense strand
gaugggagagagauuuaac

SEQ ID NO: 1198349 - RNA, 19 nt, Homo sapiens
  misc_RNA (1)...(19): siRNA sense strand
guacagcuuuuaucuugca

SEQ ID NO: 1198350 - RNA, 19 nt, Homo sapiens
  misc_RNA (1)...(19): siRNA sense strand
gcgaccacaagcuucauga

SEQ ID NO: 1198351 - RNA, 19 nt, Homo sapiens
  misc_RNA (1)...(19): siRNA sense strand
ugacauuucaguacaucug

SEQ ID NO: 1198352 - RNA, 19 nt, Homo sapiens
  misc_RNA (1)...(19): siRNA sense strand
gagcaaaguuuccucaaug

SEQ ID NO: 1198353 - RNA, 19 nt, Homo sapiens
  misc_RNA (1)...(19): siRNA sense strand
ggagagguuucguagcuua

SEQ ID NO: 1198354 - RNA, 19 nt, Homo sapiens
  misc_RNA (1)...(19): siRNA sense strand
gaaagaggaggaagccaua

SEQ ID NO: 1198355 - RNA, 19 nt, Homo sapiens
  misc_RNA (1)...(19): siRNA sense strand
ccaguguacuuuaccaaua

SEQ ID NO: 1198356 - RNA, 19 nt, Homo sapiens
  misc_RNA (1)...(19): siRNA sense strand
aaacauaagccaagcaauu

SEQ ID NO: 1198357 - RNA, 19 nt, Homo sapiens
  misc_RNA (1)...(19): siRNA sense strand
ggaagaccaguguacuuua

SEQ ID NO: 1198358 - RNA, 19 nt, Homo sapiens
  misc_RNA (1)...(19): siRNA sense strand
cgacagcguucuucagaga

SEQ ID NO: 1198359 - RNA, 19 nt, Homo sapiens
  misc_RNA (1)...(19): siRNA sense strand
gaagaccaguguacuuuac

SEQ ID NO: 1198360 - RNA, 19 nt, Homo sapiens
  misc_RNA (1)...(19): siRNA sense strand
ugacaaaugagcaaaguuu

SEQ ID NO: 1198361 - RNA, 19 nt, Homo sapiens
  misc_RNA (1)...(19): siRNA sense strand
gaauccaccugcaguuaug

SEQ ID NO: 1198362 - RNA, 19 nt, Homo sapiens
  misc_RNA (1)...(19): siRNA sense strand
gagaauccaccugcaguua

SEQ ID NO: 1198363 - RNA, 19 nt, Homo sapiens
  misc_RNA (1)...(19): siRNA sense strand
caacagugggcauugauuu

SEQ ID NO: 1198364 - RNA, 19 nt, Homo sapiens
  misc_RNA (1)...(19): siRNA sense strand
ccauagcacucgcagagaa

SEQ ID NO: 1198365 - RNA, 19 nt, Homo sapiens
  misc_RNA (1)...(19): siRNA sense strand
gggaagaccaguguacuuu

SEQ ID NO: 1198366 - RNA, 19 nt, Homo sapiens
  misc_RNA (1)...(19): siRNA sense strand
ccaaauuuaucacaacagu

SEQ ID NO: 1198367 - RNA, 19 nt, Homo sapiens
  misc_RNA (1)...(19): siRNA sense strand
ucacaacagugggcauuga

SEQ ID NO: 1198368 - RNA, 19 nt, Homo sapiens
  misc_RNA (1)...(19): siRNA sense strand
ucagagaugcuauggguuu

SEQ ID NO: 1198369 - RNA, 19 nt, Homo sapiens
  misc_RNA (1)...(19): siRNA sense strand
caaaguuuccucaauguca

SEQ ID NO: 1198370 - RNA, 19 nt, Homo sapiens
  misc_RNA (1)...(19): siRNA sense strand
cuacggaucaguuaaguga

SEQ ID NO: 1198371 - RNA, 19 nt, Homo sapiens
  misc_RNA (1)...(19): siRNA sense strand
gauaaugaagcgaauggaa

SEQ ID NO: 1198372 - RNA, 19 nt, Homo sapiens
  misc_RNA (1)...(19): siRNA sense strand
gccaaugggacaaacauaa

SEQ ID NO: 1198373 - RNA, 19 nt, Homo sapiens
  misc_RNA (1)...(19): siRNA sense strand
ugauggagauuaugauuac

SEQ ID NO: 1198374 - RNA, 19 nt, Homo sapiens
  misc_RNA (1)...(19): siRNA sense strand
caguguacuuuaccaauau

SEQ ID NO: 1198375 - RNA, 19 nt, Homo sapiens
  misc_RNA (1)...(19): siRNA sense strand
ggaguggugcgaucaaaug

SEQ ID NO: 1198376 - RNA, 19 nt, Homo sapiens
  misc_RNA (1)...(19): siRNA sense strand
gauauagugcuguguggaa

SEQ ID NO: 1198377 - RNA, 19 nt, Homo sapiens
  misc_RNA (1)...(19): siRNA sense strand
caggagagguuucguagcu

SEQ ID NO: 1198378 - RNA, 19 nt, Homo sapiens
  misc_RNA (1)...(19): siRNA sense strand
gauaagccagcuacagaug

SEQ ID NO: 1198379 - RNA, 19 nt, Homo sapiens
  misc_RNA (1)...(19): siRNA sense strand
ggaauccccuacuuugaaa

SEQ ID NO: 1198380 - RNA, 19 nt, Homo sapiens
  misc_RNA (1)...(19): siRNA sense strand
gcagagaaauauggaaucc

SEQ ID NO: 1198381 - RNA, 19 nt, Homo sapiens
  misc_RNA (1)...(19): siRNA sense strand
ggaccagagaguagugaaa

SEQ ID NO: 1198382 - RNA, 19 nt, Homo sapiens
  misc_RNA (1)...(19): siRNA sense strand
gggcaggagagguuucgua

SEQ ID NO: 1198383 - RNA, 19 nt, Homo sapiens
  misc_RNA (1)...(19): siRNA sense strand
gaaacuagugcugccaaug

SEQ ID NO: 1198384 - RNA, 19 nt, Homo sapiens
  misc_RNA (1)...(19): siRNA sense strand
cagcagggcaggagagguu

SEQ ID NO: 1198385 - RNA, 19 nt, Homo sapiens
  misc_RNA (1)...(19): siRNA sense strand
caaauggucaugccucuac

SEQ ID NO: 1198386 - RNA, 19 nt, Homo sapiens
  misc_RNA (1)...(19): siRNA sense strand
ccaauauacagaugguaaa

SEQ ID NO: 1198387 - RNA, 19 nt, Homo sapiens
  misc_RNA (1)...(19): siRNA sense strand
cuucuggaccugauaauga

SEQ ID NO: 1198388 - RNA, 19 nt, Homo sapiens
  misc_RNA (1)...(19): siRNA sense strand
ggauaagccagcuacagau

SEQ ID NO: 1198389 - RNA, 19 nt, Homo sapiens
  misc_RNA (1)...(19): siRNA sense strand
gaaggaguggugcgaucaa

SEQ ID NO: 1198390 - RNA, 19 nt, Homo sapiens
  misc_RNA (1)...(19): siRNA sense strand
uaagccagcuacagaugca

SEQ ID NO: 1198391 - RNA, 19 nt, Homo sapiens
  misc_RNA (1)...(19): siRNA sense strand
uggauaagccagcuacaga

SEQ ID NO: 1198392 - RNA, 19 nt, Homo sapiens
  misc_RNA (1)...(19): siRNA sense strand
cugauggagauuaugauua

SEQ ID NO: 1198393 - RNA, 19 nt, Homo sapiens
  misc_RNA (1)...(19): siRNA sense strand
gagagguuucguagcuuaa

SEQ ID NO: 1198394 - RNA, 19 nt, Homo sapiens
  misc_RNA (1)...(19): siRNA sense strand
gaucaguuaagugaagaaa

SEQ ID NO: 1198395 - RNA, 19 nt, Homo sapiens
  misc_RNA (1)...(19): siRNA sense strand
ggaacgguguguggacaag

SEQ ID NO: 1198396 - RNA, 19 nt, Homo sapiens
  misc_RNA (1)...(19): siRNA sense strand
aaacuagugcugccaaugg

SEQ ID NO: 1198397 - RNA, 19 nt, Homo sapiens
  misc_RNA (1)...(19): siRNA sense strand
aacauaagccaagcaauug

SEQ ID NO: 1198398 - RNA, 19 nt, Homo sapiens
  misc_RNA (1)...(19): siRNA sense strand
gacaaaugagcaaaguuuc

SEQ ID NO: 1198399 - RNA, 19 nt, Homo sapiens
  misc_RNA (1)...(19): siRNA sense strand
ccaaugggacaaacauaag

SEQ ID NO: 1198400 - RNA, 19 nt, Homo sapiens
  misc_RNA (1)...(19): siRNA sense strand
ugaaacuagugcugccaau

SEQ ID NO: 1198401 - RNA, 19 nt, Homo sapiens
  misc_RNA (1)...(19): siRNA sense strand
gcaaaguuuccucaauguc

SEQ ID NO: 1198402 - RNA, 19 nt, Homo sapiens
  misc_RNA (1)...(19): siRNA sense strand
gaccagagaguagugaaag

SEQ ID NO: 1198403 - RNA, 19 nt, Homo sapiens
  misc_RNA (1)...(19): siRNA sense strand
gaucugacaaaugagcaaa

SEQ ID NO: 1198404 - RNA, 19 nt, Homo sapiens
  misc_RNA (1)...(19): siRNA sense strand
ucaguuaagugaagaaaag

SEQ ID NO: 1198405 - RNA, 19 nt, Homo sapiens
  misc_RNA (1)...(19): siRNA sense strand
caaugucagaaacuggaua

SEQ ID NO: 1198406 - RNA, 19 nt, Homo sapiens
  misc_RNA (1)...(19): siRNA sense strand
cauagcacucgcagagaaa

SEQ ID NO: 1198407 - RNA, 19 nt, Homo sapiens
  misc_RNA (1)...(19): siRNA sense strand
acagcguucuucagagaug

SEQ ID NO: 1198408 - RNA, 19 nt, Homo sapiens
  misc_RNA (1)...(19): siRNA sense strand
agaauccaccugcaguuau

SEQ ID NO: 1198409 - RNA, 19 nt, Homo sapiens
  misc_RNA (1)...(19): siRNA sense strand
agcaaaguuuccucaaugu

SEQ ID NO: 1198410 - RNA, 19 nt, Homo sapiens
  misc_RNA (1)...(19): siRNA sense strand
aaggaguggugcgaucaaa

SEQ ID NO: 1198411 - RNA, 19 nt, Homo sapiens
  misc_RNA (1)...(19): siRNA sense strand
acaaacauaagccaagcaa

SEQ ID NO: 1198412 - RNA, 19 nt, Homo sapiens
  misc_RNA (1)...(19): siRNA sense strand
gcacucgcagagaaauaug

SEQ ID NO: 1198413 - RNA, 19 nt, Homo sapiens
  misc_RNA (1)...(19): siRNA sense strand
auauagugcuguguggaaa

SEQ ID NO: 1198414 - RNA, 19 nt, Homo sapiens
  misc_RNA (1)...(19): siRNA sense strand
guacuuuaccaauauacag

SEQ ID NO: 1198415 - RNA, 19 nt, Homo sapiens
  misc_RNA (1)...(19): siRNA sense strand
uagcacucgcagagaaaua

SEQ ID NO: 1198416 - RNA, 19 nt, Homo sapiens
  misc_RNA (1)...(19): siRNA sense strand
guagggaagaccaguguac

SEQ ID NO: 1198417 - RNA, 19 nt, Homo sapiens
  misc_RNA (1)...(19): siRNA sense strand
ggaggaccagagaguagug

SEQ ID NO: 1198418 - RNA, 19 nt, Homo sapiens
  misc_RNA (1)...(19): siRNA sense strand
gagcaaaguuuccucaaug

SEQ ID NO: 1198419 - RNA, 19 nt, Homo sapiens
  misc_RNA (1)...(19): siRNA sense strand
ggagagguuucguagcuua

SEQ ID NO: 1198420 - RNA, 19 nt, Homo sapiens
  misc_RNA (1)...(19): siRNA sense strand
gaaagaggaggaagccaua

SEQ ID NO: 1198421 - RNA, 19 nt, Homo sapiens
  misc_RNA (1)...(19): siRNA sense strand
ccaguguacuuuaccaaua

SEQ ID NO: 1198422 - RNA, 19 nt, Homo sapiens
  misc_RNA (1)...(19): siRNA sense strand
aaacauaagccaagcaauu

SEQ ID NO: 1198423 - RNA, 19 nt, Homo sapiens
  misc_RNA (1)...(19): siRNA sense strand
ggaagaccaguguacuuua

SEQ ID NO: 1198424 - RNA, 19 nt, Homo sapiens
  misc_RNA (1)...(19): siRNA sense strand
cgacagcguucuucagaga

SEQ ID NO: 1198425 - RNA, 19 nt, Homo sapiens
  misc_RNA (1)...(19): siRNA sense strand
gaagaccaguguacuuuac

SEQ ID NO: 1198426 - RNA, 19 nt, Homo sapiens
  misc_RNA (1)...(19): siRNA sense strand
ugacaaaugagcaaaguuu

SEQ ID NO: 1198427 - RNA, 19 nt, Homo sapiens
  misc_RNA (1)...(19): siRNA sense strand
gaauccaccugcaguuaug

SEQ ID NO: 1198428 - RNA, 19 nt, Homo sapiens
  misc_RNA (1)...(19): siRNA sense strand
gagaauccaccugcaguua

SEQ ID NO: 1198429 - RNA, 19 nt, Homo sapiens
  misc_RNA (1)...(19): siRNA sense strand
caacagugggcauugauuu

SEQ ID NO: 1198430 - RNA, 19 nt, Homo sapiens
  misc_RNA (1)...(19): siRNA sense strand
ccauagcacucgcagagaa

SEQ ID NO: 1198431 - RNA, 19 nt, Homo sapiens
  misc_RNA (1)...(19): siRNA sense strand
gggaagaccaguguacuuu

SEQ ID NO: 1198432 - RNA, 19 nt, Homo sapiens
  misc_RNA (1)...(19): siRNA sense strand
ccaaauuuaucacaacagu

SEQ ID NO: 1198433 - RNA, 19 nt, Homo sapiens
  misc_RNA (1)...(19): siRNA sense strand
ucacaacagugggcauuga

SEQ ID NO: 1198434 - RNA, 19 nt, Homo sapiens
  misc_RNA (1)...(19): siRNA sense strand
ucagagaugcuauggguuu

SEQ ID NO: 1198435 - RNA, 19 nt, Homo sapiens
  misc_RNA (1)...(19): siRNA sense strand
caaaguuuccucaauguca

SEQ ID NO: 1198436 - RNA, 19 nt, Homo sapiens
  misc_RNA (1)...(19): siRNA sense strand
cuacggaucaguuaaguga

SEQ ID NO: 1198437 - RNA, 19 nt, Homo sapiens
  misc_RNA (1)...(19): siRNA sense strand
gauaaugaagcgaauggaa

SEQ ID NO: 1198438 - RNA, 19 nt, Homo sapiens
  misc_RNA (1)...(19): siRNA sense strand
gccaaugggacaaacauaa

SEQ ID NO: 1198439 - RNA, 19 nt, Homo sapiens
  misc_RNA (1)...(19): siRNA sense strand
ugauggagauuaugauuac

SEQ ID NO: 1198440 - RNA, 19 nt, Homo sapiens
  misc_RNA (1)...(19): siRNA sense strand
caguguacuuuaccaauau

SEQ ID NO: 1198441 - RNA, 19 nt, Homo sapiens
  misc_RNA (1)...(19): siRNA sense strand
ggaguggugcgaucaaaug

SEQ ID NO: 1198442 - RNA, 19 nt, Homo sapiens
  misc_RNA (1)...(19): siRNA sense strand
gauauagugcuguguggaa

SEQ ID NO: 1198443 - RNA, 19 nt, Homo sapiens
  misc_RNA (1)...(19): siRNA sense strand
caggagagguuucguagcu

SEQ ID NO: 1198444 - RNA, 19 nt, Homo sapiens
  misc_RNA (1)...(19): siRNA sense strand
gauaagccagcuacagaug

SEQ ID NO: 1198445 - RNA, 19 nt, Homo sapiens
  misc_RNA (1)...(19): siRNA sense strand
ggaauccccuacuuugaaa

SEQ ID NO: 1198446 - RNA, 19 nt, Homo sapiens
  misc_RNA (1)...(19): siRNA sense strand
gcagagaaauauggaaucc

SEQ ID NO: 1198447 - RNA, 19 nt, Homo sapiens
  misc_RNA (1)...(19): siRNA sense strand
ggaccagagaguagugaaa

SEQ ID NO: 1198448 - RNA, 19 nt, Homo sapiens
  misc_RNA (1)...(19): siRNA sense strand
gggcaggagagguuucgua

SEQ ID NO: 1198449 - RNA, 19 nt, Homo sapiens
  misc_RNA (1)...(19): siRNA sense strand
gaaacuagugcugccaaug

SEQ ID NO: 1198450 - RNA, 19 nt, Homo sapiens
  misc_RNA (1)...(19): siRNA sense strand
cagcagggcaggagagguu

SEQ ID NO: 1198451 - RNA, 19 nt, Homo sapiens
  misc_RNA (1)...(19): siRNA sense strand
caaauggucaugccucuac

SEQ ID NO: 1198452 - RNA, 19 nt, Homo sapiens
  misc_RNA (1)...(19): siRNA sense strand
ccaauauacagaugguaaa

SEQ ID NO: 1198453 - RNA, 19 nt, Homo sapiens
  misc_RNA (1)...(19): siRNA sense strand
cuucuggaccugauaauga

SEQ ID NO: 1198454 - RNA, 19 nt, Homo sapiens
  misc_RNA (1)...(19): siRNA sense strand
ggauaagccagcuacagau

SEQ ID NO: 1198455 - RNA, 19 nt, Homo sapiens
  misc_RNA (1)...(19): siRNA sense strand
gaaggaguggugcgaucaa

SEQ ID NO: 1198456 - RNA, 19 nt, Homo sapiens
  misc_RNA (1)...(19): siRNA sense strand
uaagccagcuacagaugca

SEQ ID NO: 1198457 - RNA, 19 nt, Homo sapiens
  misc_RNA (1)...(19): siRNA sense strand
uggauaagccagcuacaga

SEQ ID NO: 1198458 - RNA, 19 nt, Homo sapiens
  misc_RNA (1)...(19): siRNA sense strand
cugauggagauuaugauua

SEQ ID NO: 1198459 - RNA, 19 nt, Homo sapiens
  misc_RNA (1)...(19): siRNA sense strand
gagagguuucguagcuuaa

SEQ ID NO: 1198460 - RNA, 19 nt, Homo sapiens
  misc_RNA (1)...(19): siRNA sense strand
gaucaguuaagugaagaaa

SEQ ID NO: 1198461 - RNA, 19 nt, Homo sapiens
  misc_RNA (1)...(19): siRNA sense strand
ggaacgguguguggacaag

SEQ ID NO: 1198462 - RNA, 19 nt, Homo sapiens
  misc_RNA (1)...(19): siRNA sense strand
aaacuagugcugccaaugg

SEQ ID NO: 1198463 - RNA, 19 nt, Homo sapiens
  misc_RNA (1)...(19): siRNA sense strand
aacauaagccaagcaauug

SEQ ID NO: 1198464 - RNA, 19 nt, Homo sapiens
  misc_RNA (1)...(19): siRNA sense strand
gacaaaugagcaaaguuuc

SEQ ID NO: 1198465 - RNA, 19 nt, Homo sapiens
  misc_RNA (1)...(19): siRNA sense strand
ccaaugggacaaacauaag

SEQ ID NO: 1198466 - RNA, 19 nt, Homo sapiens
  misc_RNA (1)...(19): siRNA sense strand
ugaaacuagugcugccaau

SEQ ID NO: 1198467 - RNA, 19 nt, Homo sapiens
  misc_RNA (1)...(19): siRNA sense strand
gcaaaguuuccucaauguc

SEQ ID NO: 1198468 - RNA, 19 nt, Homo sapiens
  misc_RNA (1)...(19): siRNA sense strand
gaccagagaguagugaaag

SEQ ID NO: 1198469 - RNA, 19 nt, Homo sapiens
  misc_RNA (1)...(19): siRNA sense strand
gaucugacaaaugagcaaa

SEQ ID NO: 1198470 - RNA, 19 nt, Homo sapiens
  misc_RNA (1)...(19): siRNA sense strand
ucaguuaagugaagaaaag

SEQ ID NO: 1198471 - RNA, 19 nt, Homo sapiens
  misc_RNA (1)...(19): siRNA sense strand
caaugucagaaacuggaua

SEQ ID NO: 1198472 - RNA, 19 nt, Homo sapiens
  misc_RNA (1)...(19): siRNA sense strand
cauagcacucgcagagaaa

SEQ ID NO: 1198473 - RNA, 19 nt, Homo sapiens
  misc_RNA (1)...(19): siRNA sense strand
acagcguucuucagagaug

SEQ ID NO: 1198474 - RNA, 19 nt, Homo sapiens
  misc_RNA (1)...(19): siRNA sense strand
agaauccaccugcaguuau

SEQ ID NO: 1198475 - RNA, 19 nt, Homo sapiens
  misc_RNA (1)...(19): siRNA sense strand
agcaaaguuuccucaaugu

SEQ ID NO: 1198476 - RNA, 19 nt, Homo sapiens
  misc_RNA (1)...(19): siRNA sense strand
aaggaguggugcgaucaaa

SEQ ID NO: 1198477 - RNA, 19 nt, Homo sapiens
  misc_RNA (1)...(19): siRNA sense strand
acaaacauaagccaagcaa

SEQ ID NO: 1198478 - RNA, 19 nt, Homo sapiens
  misc_RNA (1)...(19): siRNA sense strand
gcacucgcagagaaauaug

SEQ ID NO: 1198479 - RNA, 19 nt, Homo sapiens
  misc_RNA (1)...(19): siRNA sense strand
auauagugcuguguggaaa

SEQ ID NO: 1198480 - RNA, 19 nt, Homo sapiens
  misc_RNA (1)...(19): siRNA sense strand
guacuuuaccaauauacag

SEQ ID NO: 1198481 - RNA, 19 nt, Homo sapiens
  misc_RNA (1)...(19): siRNA sense strand
uagcacucgcagagaaaua

SEQ ID NO: 1198482 - RNA, 19 nt, Homo sapiens
  misc_RNA (1)...(19): siRNA sense strand
guagggaagaccaguguac

SEQ ID NO: 1198483 - RNA, 19 nt, Homo sapiens
  misc_RNA (1)...(19): siRNA sense strand
ggaggaccagagaguagug

SEQ ID NO: 1198484 - RNA, 19 nt, Homo sapiens
  misc_RNA (1)...(19): siRNA sense strand
gagcaaaguuuccucaaug

SEQ ID NO: 1198485 - RNA, 19 nt, Homo sapiens
  misc_RNA (1)...(19): siRNA sense strand
ggagagguuucguagcuua

SEQ ID NO: 1198486 - RNA, 19 nt, Homo sapiens
  misc_RNA (1)...(19): siRNA sense strand
gaaagaggaggaagccaua

SEQ ID NO: 1198487 - RNA, 19 nt, Homo sapiens
  misc_RNA (1)...(19): siRNA sense strand
ccaguguacuuuaccaaua

SEQ ID NO: 1198488 - RNA, 19 nt, Homo sapiens
  misc_RNA (1)...(19): siRNA sense strand
aaacauaagccaagcaauu

SEQ ID NO: 1198489 - RNA, 19 nt, Homo sapiens
  misc_RNA (1)...(19): siRNA sense strand
ggaagaccaguguacuuua

SEQ ID NO: 1198490 - RNA, 19 nt, Homo sapiens
  misc_RNA (1)...(19): siRNA sense strand
cgacagcguucuucagaga

SEQ ID NO: 1198491 - RNA, 19 nt, Homo sapiens
  misc_RNA (1)...(19): siRNA sense strand
gaagaccaguguacuuuac

SEQ ID NO: 1198492 - RNA, 19 nt, Homo sapiens
  misc_RNA (1)...(19): siRNA sense strand
ugacaaaugagcaaaguuu

SEQ ID NO: 1198493 - RNA, 19 nt, Homo sapiens
  misc_RNA (1)...(19): siRNA sense strand
gaauccaccugcaguuaug

SEQ ID NO: 1198494 - RNA, 19 nt, Homo sapiens
  misc_RNA (1)...(19): siRNA sense strand
gagaauccaccugcaguua

SEQ ID NO: 1198495 - RNA, 19 nt, Homo sapiens
  misc_RNA (1)...(19): siRNA sense strand
caacagugggcauugauuu

SEQ ID NO: 1198496 - RNA, 19 nt, Homo sapiens
  misc_RNA (1)...(19): siRNA sense strand
ccauagcacucgcagagaa

SEQ ID NO: 1198497 - RNA, 19 nt, Homo sapiens
  misc_RNA (1)...(19): siRNA sense strand
gggaagaccaguguacuuu

SEQ ID NO: 1198498 - RNA, 19 nt, Homo sapiens
  misc_RNA (1)...(19): siRNA sense strand
ccaaauuuaucacaacagu

SEQ ID NO: 1198499 - RNA, 19 nt, Homo sapiens
  misc_RNA (1)...(19): siRNA sense strand
ucacaacagugggcauuga

SEQ ID NO: 1198500 - RNA, 19 nt, Homo sapiens
  misc_RNA (1)...(19): siRNA sense strand
ucagagaugcuauggguuu

SEQ ID NO: 1198501 - RNA, 19 nt, Homo sapiens
  misc_RNA (1)...(19): siRNA sense strand
caaaguuuccucaauguca

SEQ ID NO: 1198502 - RNA, 19 nt, Homo sapiens
  misc_RNA (1)...(19): siRNA sense strand
cuacggaucaguuaaguga

SEQ ID NO: 1198503 - RNA, 19 nt, Homo sapiens
  misc_RNA (1)...(19): siRNA sense strand
gauaaugaagcgaauggaa

SEQ ID NO: 1198504 - RNA, 19 nt, Homo sapiens
  misc_RNA (1)...(19): siRNA sense strand
gccaaugggacaaacauaa

SEQ ID NO: 1198505 - RNA, 19 nt, Homo sapiens
  misc_RNA (1)...(19): siRNA sense strand
ugauggagauuaugauuac

SEQ ID NO: 1198506 - RNA, 19 nt, Homo sapiens
  misc_RNA (1)...(19): siRNA sense strand
caguguacuuuaccaauau

SEQ ID NO: 1198507 - RNA, 19 nt, Homo sapiens
  misc_RNA (1)...(19): siRNA sense strand
ggaguggugcgaucaaaug

SEQ ID NO: 1198508 - RNA, 19 nt, Homo sapiens
  misc_RNA (1)...(19): siRNA sense strand
gauauagugcuguguggaa

SEQ ID NO: 1198509 - RNA, 19 nt, Homo sapiens
  misc_RNA (1)...(19): siRNA sense strand
caggagagguuucguagcu

SEQ ID NO: 1198510 - RNA, 19 nt, Homo sapiens
  misc_RNA (1)...(19): siRNA sense strand
gauaagccagcuacagaug

SEQ ID NO: 1198511 - RNA, 19 nt, Homo sapiens
  misc_RNA (1)...(19): siRNA sense strand
ggaauccccuacuuugaaa

SEQ ID NO: 1198512 - RNA, 19 nt, Homo sapiens
  misc_RNA (1)...(19): siRNA sense strand
gcagagaaauauggaaucc

SEQ ID NO: 1198513 - RNA, 19 nt, Homo sapiens
  misc_RNA (1)...(19): siRNA sense strand
ggaccagagaguagugaaa

SEQ ID NO: 1198514 - RNA, 19 nt, Homo sapiens
  misc_RNA (1)...(19): siRNA sense strand
gggcaggagagguuucgua

SEQ ID NO: 1198515 - RNA, 19 nt, Homo sapiens
  misc_RNA (1)...(19): siRNA sense strand
gaaacuagugcugccaaug

SEQ ID NO: 1198516 - RNA, 19 nt, Homo sapiens
  misc_RNA (1)...(19): siRNA sense strand
cagcagggcaggagagguu

SEQ ID NO: 1198517 - RNA, 19 nt, Homo sapiens
  misc_RNA (1)...(19): siRNA sense strand
caaauggucaugccucuac

SEQ ID NO: 1198518 - RNA, 19 nt, Homo sapiens
  misc_RNA (1)...(19): siRNA sense strand
ccaauauacagaugguaaa

SEQ ID NO: 1198519 - RNA, 19 nt, Homo sapiens
  misc_RNA (1)...(19): siRNA sense strand
cuucuggaccugauaauga

SEQ ID NO: 1198520 - RNA, 19 nt, Homo sapiens
  misc_RNA (1)...(19): siRNA sense strand
ggauaagccagcuacagau

SEQ ID NO: 1198521 - RNA, 19 nt, Homo sapiens
  misc_RNA (1)...(19): siRNA sense strand
gaaggaguggugcgaucaa

SEQ ID NO: 1198522 - RNA, 19 nt, Homo sapiens
  misc_RNA (1)...(19): siRNA sense strand
uaagccagcuacagaugca

SEQ ID NO: 1198523 - RNA, 19 nt, Homo sapiens
  misc_RNA (1)...(19): siRNA sense strand
uggauaagccagcuacaga

SEQ ID NO: 1198524 - RNA, 19 nt, Homo sapiens
  misc_RNA (1)...(19): siRNA sense strand
cugauggagauuaugauua

SEQ ID NO: 1198525 - RNA, 19 nt, Homo sapiens
  misc_RNA (1)...(19): siRNA sense strand
gagagguuucguagcuuaa

SEQ ID NO: 1198526 - RNA, 19 nt, Homo sapiens
  misc_RNA (1)...(19): siRNA sense strand
gaucaguuaagugaagaaa

SEQ ID NO: 1198527 - RNA, 19 nt, Homo sapiens
  misc_RNA (1)...(19): siRNA sense strand
ggaacgguguguggacaag

SEQ ID NO: 1198528 - RNA, 19 nt, Homo sapiens
  misc_RNA (1)...(19): siRNA sense strand
aaacuagugcugccaaugg

SEQ ID NO: 1198529 - RNA, 19 nt, Homo sapiens
  misc_RNA (1)...(19): siRNA sense strand
aacauaagccaagcaauug

SEQ ID NO: 1198530 - RNA, 19 nt, Homo sapiens
  misc_RNA (1)...(19): siRNA sense strand
gacaaaugagcaaaguuuc

SEQ ID NO: 1198531 - RNA, 19 nt, Homo sapiens
  misc_RNA (1)...(19): siRNA sense strand
ccaaugggacaaacauaag

SEQ ID NO: 1198532 - RNA, 19 nt, Homo sapiens
  misc_RNA (1)...(19): siRNA sense strand
ugaaacuagugcugccaau

SEQ ID NO: 1198533 - RNA, 19 nt, Homo sapiens
  misc_RNA (1)...(19): siRNA sense strand
gcaaaguuuccucaauguc

SEQ ID NO: 1198534 - RNA, 19 nt, Homo sapiens
  misc_RNA (1)...(19): siRNA sense strand
gaccagagaguagugaaag

SEQ ID NO: 1198535 - RNA, 19 nt, Homo sapiens
  misc_RNA (1)...(19): siRNA sense strand
gaucugacaaaugagcaaa

SEQ ID NO: 1198536 - RNA, 19 nt, Homo sapiens
  misc_RNA (1)...(19): siRNA sense strand
ucaguuaagugaagaaaag

SEQ ID NO: 1198537 - RNA, 19 nt, Homo sapiens
  misc_RNA (1)...(19): siRNA sense strand
caaugucagaaacuggaua

SEQ ID NO: 1198538 - RNA, 19 nt, Homo sapiens
  misc_RNA (1)...(19): siRNA sense strand
cauagcacucgcagagaaa

SEQ ID NO: 1198539 - RNA, 19 nt, Homo sapiens
  misc_RNA (1)...(19): siRNA sense strand
acagcguucuucagagaug

SEQ ID NO: 1198540 - RNA, 19 nt, Homo sapiens
  misc_RNA (1)...(19): siRNA sense strand
agaauccaccugcaguuau

SEQ ID NO: 1198541 - RNA, 19 nt, Homo sapiens
  misc_RNA (1)...(19): siRNA sense strand
agcaaaguuuccucaaugu

SEQ ID NO: 1198542 - RNA, 19 nt, Homo sapiens
  misc_RNA (1)...(19): siRNA sense strand
aaggaguggugcgaucaaa

SEQ ID NO: 1198543 - RNA, 19 nt, Homo sapiens
  misc_RNA (1)...(19): siRNA sense strand
acaaacauaagccaagcaa

SEQ ID NO: 1198544 - RNA, 19 nt, Homo sapiens
  misc_RNA (1)...(19): siRNA sense strand
gcacucgcagagaaauaug

SEQ ID NO: 1198545 - RNA, 19 nt, Homo sapiens
  misc_RNA (1)...(19): siRNA sense strand
auauagugcuguguggaaa

SEQ ID NO: 1198546 - RNA, 19 nt, Homo sapiens
  misc_RNA (1)...(19): siRNA sense strand
guacuuuaccaauauacag

SEQ ID NO: 1198547 - RNA, 19 nt, Homo sapiens
  misc_RNA (1)...(19): siRNA sense strand
uagcacucgcagagaaaua

SEQ ID NO: 1198548 - RNA, 19 nt, Homo sapiens
  misc_RNA (1)...(19): siRNA sense strand
guagggaagaccaguguac

SEQ ID NO: 1198549 - RNA, 19 nt, Homo sapiens
  misc_RNA (1)...(19): siRNA sense strand
ggaggaccagagaguagug

SEQ ID NO: 1198550 - RNA, 19 nt, Homo sapiens
  misc_RNA (1)...(19): siRNA sense strand
gagcaaaguuuccucaaug

SEQ ID NO: 1198551 - RNA, 19 nt, Homo sapiens
  misc_RNA (1)...(19): siRNA sense strand
ggagagguuucguagcuua

SEQ ID NO: 1198552 - RNA, 19 nt, Homo sapiens
  misc_RNA (1)...(19): siRNA sense strand
gaaagaggaggaagccaua

SEQ ID NO: 1198553 - RNA, 19 nt, Homo sapiens
  misc_RNA (1)...(19): siRNA sense strand
ccaguguacuuuaccaaua

SEQ ID NO: 1198554 - RNA, 19 nt, Homo sapiens
  misc_RNA (1)...(19): siRNA sense strand
aaacauaagccaagcaauu

SEQ ID NO: 1198555 - RNA, 19 nt, Homo sapiens
  misc_RNA (1)...(19): siRNA sense strand
ggaagaccaguguacuuua

SEQ ID NO: 1198556 - RNA, 19 nt, Homo sapiens
  misc_RNA (1)...(19): siRNA sense strand
cgacagcguucuucagaga

SEQ ID NO: 1198557 - RNA, 19 nt, Homo sapiens
  misc_RNA (1)...(19): siRNA sense strand
gaagaccaguguacuuuac

SEQ ID NO: 1198558 - RNA, 19 nt, Homo sapiens
  misc_RNA (1)...(19): siRNA sense strand
ugacaaaugagcaaaguuu

SEQ ID NO: 1198559 - RNA, 19 nt, Homo sapiens
  misc_RNA (1)...(19): siRNA sense strand
gaauccaccugcaguuaug

SEQ ID NO: 1198560 - RNA, 19 nt, Homo sapiens
  misc_RNA (1)...(19): siRNA sense strand
gagaauccaccugcaguua

SEQ ID NO: 1198561 - RNA, 19 nt, Homo sapiens
  misc_RNA (1)...(19): siRNA sense strand
caacagugggcauugauuu

SEQ ID NO: 1198562 - RNA, 19 nt, Homo sapiens
  misc_RNA (1)...(19): siRNA sense strand
ccauagcacucgcagagaa

SEQ ID NO: 1198563 - RNA, 19 nt, Homo sapiens
  misc_RNA (1)...(19): siRNA sense strand
gggaagaccaguguacuuu

SEQ ID NO: 1198564 - RNA, 19 nt, Homo sapiens
  misc_RNA (1)...(19): siRNA sense strand
ccaaauuuaucacaacagu

SEQ ID NO: 1198565 - RNA, 19 nt, Homo sapiens
  misc_RNA (1)...(19): siRNA sense strand
ucacaacagugggcauuga

SEQ ID NO: 1198566 - RNA, 19 nt, Homo sapiens
  misc_RNA (1)...(19): siRNA sense strand
ucagagaugcuauggguuu

SEQ ID NO: 1198567 - RNA, 19 nt, Homo sapiens
  misc_RNA (1)...(19): siRNA sense strand
caaaguuuccucaauguca

SEQ ID NO: 1198568 - RNA, 19 nt, Homo sapiens
  misc_RNA (1)...(19): siRNA sense strand
cuacggaucaguuaaguga

SEQ ID NO: 1198569 - RNA, 19 nt, Homo sapiens
  misc_RNA (1)...(19): siRNA sense strand
gauaaugaagcgaauggaa

SEQ ID NO: 1198570 - RNA, 19 nt, Homo sapiens
  misc_RNA (1)...(19): siRNA sense strand
gccaaugggacaaacauaa

SEQ ID NO: 1198571 - RNA, 19 nt, Homo sapiens
  misc_RNA (1)...(19): siRNA sense strand
ugauggagauuaugauuac

SEQ ID NO: 1198572 - RNA, 19 nt, Homo sapiens
  misc_RNA (1)...(19): siRNA sense strand
caguguacuuuaccaauau

SEQ ID NO: 1198573 - RNA, 19 nt, Homo sapiens
  misc_RNA (1)...(19): siRNA sense strand
ggaguggugcgaucaaaug

SEQ ID NO: 1198574 - RNA, 19 nt, Homo sapiens
  misc_RNA (1)...(19): siRNA sense strand
gauauagugcuguguggaa

SEQ ID NO: 1198575 - RNA, 19 nt, Homo sapiens
  misc_RNA (1)...(19): siRNA sense strand
caggagagguuucguagcu

SEQ ID NO: 1198576 - RNA, 19 nt, Homo sapiens
  misc_RNA (1)...(19): siRNA sense strand
gauaagccagcuacagaug

SEQ ID NO: 1198577 - RNA, 19 nt, Homo sapiens
  misc_RNA (1)...(19): siRNA sense strand
ggaauccccuacuuugaaa

SEQ ID NO: 1198578 - RNA, 19 nt, Homo sapiens
  misc_RNA (1)...(19): siRNA sense strand
gcagagaaauauggaaucc

SEQ ID NO: 1198579 - RNA, 19 nt, Homo sapiens
  misc_RNA (1)...(19): siRNA sense strand
ggaccagagaguagugaaa

SEQ ID NO: 1198580 - RNA, 19 nt, Homo sapiens
  misc_RNA (1)...(19): siRNA sense strand
gggcaggagagguuucgua

SEQ ID NO: 1198581 - RNA, 19 nt, Homo sapiens
  misc_RNA (1)...(19): siRNA sense strand
gaaacuagugcugccaaug

SEQ ID NO: 1198582 - RNA, 19 nt, Homo sapiens
  misc_RNA (1)...(19): siRNA sense strand
cagcagggcaggagagguu

SEQ ID NO: 1198583 - RNA, 19 nt, Homo sapiens
  misc_RNA (1)...(19): siRNA sense strand
caaauggucaugccucuac

SEQ ID NO: 1198584 - RNA, 19 nt, Homo sapiens
  misc_RNA (1)...(19): siRNA sense strand
ccaauauacagaugguaaa

SEQ ID NO: 1198585 - RNA, 19 nt, Homo sapiens
  misc_RNA (1)...(19): siRNA sense strand
cuucuggaccugauaauga

SEQ ID NO: 1198586 - RNA, 19 nt, Homo sapiens
  misc_RNA (1)...(19): siRNA sense strand
ggauaagccagcuacagau

SEQ ID NO: 1198587 - RNA, 19 nt, Homo sapiens
  misc_RNA (1)...(19): siRNA sense strand
gaaggaguggugcgaucaa

SEQ ID NO: 1198588 - RNA, 19 nt, Homo sapiens
  misc_RNA (1)...(19): siRNA sense strand
uaagccagcuacagaugca

SEQ ID NO: 1198589 - RNA, 19 nt, Homo sapiens
  misc_RNA (1)...(19): siRNA sense strand
uggauaagccagcuacaga

SEQ ID NO: 1198590 - RNA, 19 nt, Homo sapiens
  misc_RNA (1)...(19): siRNA sense strand
cugauggagauuaugauua

SEQ ID NO: 1198591 - RNA, 19 nt, Homo sapiens
  misc_RNA (1)...(19): siRNA sense strand
gagagguuucguagcuuaa

SEQ ID NO: 1198592 - RNA, 19 nt, Homo sapiens
  misc_RNA (1)...(19): siRNA sense strand
gaucaguuaagugaagaaa

SEQ ID NO: 1198593 - RNA, 19 nt, Homo sapiens
  misc_RNA (1)...(19): siRNA sense strand
ggaacgguguguggacaag

SEQ ID NO: 1198594 - RNA, 19 nt, Homo sapiens
  misc_RNA (1)...(19): siRNA sense strand
aaacuagugcugccaaugg

SEQ ID NO: 1198595 - RNA, 19 nt, Homo sapiens
  misc_RNA (1)...(19): siRNA sense strand
aacauaagccaagcaauug

SEQ ID NO: 1198596 - RNA, 19 nt, Homo sapiens
  misc_RNA (1)...(19): siRNA sense strand
gacaaaugagcaaaguuuc

SEQ ID NO: 1198597 - RNA, 19 nt, Homo sapiens
  misc_RNA (1)...(19): siRNA sense strand
ccaaugggacaaacauaag

SEQ ID NO: 1198598 - RNA, 19 nt, Homo sapiens
  misc_RNA (1)...(19): siRNA sense strand
ugaaacuagugcugccaau

SEQ ID NO: 1198599 - RNA, 19 nt, Homo sapiens
  misc_RNA (1)...(19): siRNA sense strand
gcaaaguuuccucaauguc

SEQ ID NO: 1198600 - RNA, 19 nt, Homo sapiens
  misc_RNA (1)...(19): siRNA sense strand
gaccagagaguagugaaag

SEQ ID NO: 1198601 - RNA, 19 nt, Homo sapiens
  misc_RNA (1)...(19): siRNA sense strand
gaucugacaaaugagcaaa

SEQ ID NO: 1198602 - RNA, 19 nt, Homo sapiens
  misc_RNA (1)...(19): siRNA sense strand
ucaguuaagugaagaaaag

SEQ ID NO: 1198603 - RNA, 19 nt, Homo sapiens
  misc_RNA (1)...(19): siRNA sense strand
caaugucagaaacuggaua

SEQ ID NO: 1198604 - RNA, 19 nt, Homo sapiens
  misc_RNA (1)...(19): siRNA sense strand
cauagcacucgcagagaaa

SEQ ID NO: 1198605 - RNA, 19 nt, Homo sapiens
  misc_RNA (1)...(19): siRNA sense strand
acagcguucuucagagaug

SEQ ID NO: 1198606 - RNA, 19 nt, Homo sapiens
  misc_RNA (1)...(19): siRNA sense strand
agaauccaccugcaguuau

SEQ ID NO: 1198607 - RNA, 19 nt, Homo sapiens
  misc_RNA (1)...(19): siRNA sense strand
agcaaaguuuccucaaugu

SEQ ID NO: 1198608 - RNA, 19 nt, Homo sapiens
  misc_RNA (1)...(19): siRNA sense strand
aaggaguggugcgaucaaa

SEQ ID NO: 1198609 - RNA, 19 nt, Homo sapiens
  misc_RNA (1)...(19): siRNA sense strand
acaaacauaagccaagcaa

SEQ ID NO: 1198610 - RNA, 19 nt, Homo sapiens
  misc_RNA (1)...(19): siRNA sense strand
gcacucgcagagaaauaug

SEQ ID NO: 1198611 - RNA, 19 nt, Homo sapiens
  misc_RNA (1)...(19): siRNA sense strand
auauagugcuguguggaaa

SEQ ID NO: 1198612 - RNA, 19 nt, Homo sapiens
  misc_RNA (1)...(19): siRNA sense strand
guacuuuaccaauauacag

SEQ ID NO: 1198613 - RNA, 19 nt, Homo sapiens
  misc_RNA (1)...(19): siRNA sense strand
uagcacucgcagagaaaua

SEQ ID NO: 1198614 - RNA, 19 nt, Homo sapiens
  misc_RNA (1)...(19): siRNA sense strand
guagggaagaccaguguac

SEQ ID NO: 1198615 - RNA, 19 nt, Homo sapiens
  misc_RNA (1)...(19): siRNA sense strand
ggaggaccagagaguagug

SEQ ID NO: 1198616 - RNA, 19 nt, Homo sapiens
  misc_RNA (1)...(19): siRNA sense strand
gcaauagaaucguucaaga

SEQ ID NO: 1198617 - RNA, 19 nt, Homo sapiens
  misc_RNA (1)...(19): siRNA sense strand
ggugcgauauuucuucuug

SEQ ID NO: 1198618 - RNA, 19 nt, Homo sapiens
  misc_RNA (1)...(19): siRNA sense strand
caauagaaucguucaagaa

SEQ ID NO: 1198619 - RNA, 19 nt, Homo sapiens
  misc_RNA (1)...(19): siRNA sense strand
ggagugauagcaaucuuug

SEQ ID NO: 1198620 - RNA, 19 nt, Homo sapiens
  misc_RNA (1)...(19): siRNA sense strand
ugaaguguaugaagugcuu

SEQ ID NO: 1198621 - RNA, 19 nt, Homo sapiens
  misc_RNA (1)...(19): siRNA sense strand
ggcaugaaguguaugaagu

SEQ ID NO: 1198622 - RNA, 19 nt, Homo sapiens
  misc_RNA (1)...(19): siRNA sense strand
caccaaggcccuauccaaa

SEQ ID NO: 1198623 - RNA, 19 nt, Homo sapiens
  misc_RNA (1)...(19): siRNA sense strand
cgggaaagacuacguguga

SEQ ID NO: 1198624 - RNA, 19 nt, Homo sapiens
  misc_RNA (1)...(19): siRNA sense strand
agaauucuaugacccuaug

SEQ ID NO: 1198625 - RNA, 19 nt, Homo sapiens
  misc_RNA (1)...(19): siRNA sense strand
acgaugaggugcagaagau

SEQ ID NO: 1198626 - RNA, 19 nt, Homo sapiens
  misc_RNA (1)...(19): siRNA sense strand
gaugaggugcagaagauga

SEQ ID NO: 1198627 - RNA, 19 nt, Homo sapiens
  misc_RNA (1)...(19): siRNA sense strand
gcaugaaguguaugaagug

SEQ ID NO: 1198628 - RNA, 19 nt, Homo sapiens
  misc_RNA (1)...(19): siRNA sense strand
guauggcaauagaaucguu

SEQ ID NO: 1198629 - RNA, 19 nt, Homo sapiens
  misc_RNA (1)...(19): siRNA sense strand
gggcagauccagugcaaag

SEQ ID NO: 1198630 - RNA, 19 nt, Homo sapiens
  misc_RNA (1)...(19): siRNA sense strand
ucugggaggugcccuacuu

SEQ ID NO: 1198631 - RNA, 19 nt, Homo sapiens
  misc_RNA (1)...(19): siRNA sense strand
gcagauccagugcaaaguc

SEQ ID NO: 1198632 - RNA, 19 nt, Homo sapiens
  misc_RNA (1)...(19): siRNA sense strand
gggagugauagcaaucuuu

SEQ ID NO: 1198633 - RNA, 19 nt, Homo sapiens
  misc_RNA (1)...(19): siRNA sense strand
ucaaugccagguacgaauu

SEQ ID NO: 1198634 - RNA, 19 nt, Homo sapiens
  misc_RNA (1)...(19): siRNA sense strand
caaugccagguacgaauuu

SEQ ID NO: 1198635 - RNA, 19 nt, Homo sapiens
  misc_RNA (1)...(19): siRNA sense strand
gaaucugagcagcacauug

SEQ ID NO: 1198636 - RNA, 19 nt, Homo sapiens
  misc_RNA (1)...(19): siRNA sense strand
guaugaagugcuuggaaga

SEQ ID NO: 1198637 - RNA, 19 nt, Homo sapiens
  misc_RNA (1)...(19): siRNA sense strand
gagcagcacauugcaagca

SEQ ID NO: 1198638 - RNA, 19 nt, Homo sapiens
  misc_RNA (1)...(19): siRNA sense strand
aacaaccucuuacccaaca

SEQ ID NO: 1198639 - RNA, 19 nt, Homo sapiens
  misc_RNA (1)...(19): siRNA sense strand
gaagugcuuggaagacgau

SEQ ID NO: 1198640 - RNA, 19 nt, Homo sapiens
  misc_RNA (1)...(19): siRNA sense strand
ccgggcagauccagugcaa

SEQ ID NO: 1198641 - RNA, 19 nt, Homo sapiens
  misc_RNA (1)...(19): siRNA sense strand
acaccaaggcccuauccaa

SEQ ID NO: 1198642 - RNA, 19 nt, Homo sapiens
  misc_RNA (1)...(19): siRNA sense strand
uugcaggucuggcuauuuu

SEQ ID NO: 1198643 - RNA, 19 nt, Homo sapiens
  misc_RNA (1)...(19): siRNA sense strand
cagauccagugcaaagucu

SEQ ID NO: 1198644 - RNA, 19 nt, Homo sapiens
  misc_RNA (1)...(19): siRNA sense strand
ccguuggcaugaaguguau

SEQ ID NO: 1198645 - RNA, 19 nt, Homo sapiens
  misc_RNA (1)...(19): siRNA sense strand
ugaccgcccaggccaugua

SEQ ID NO: 1198646 - RNA, 19 nt, Homo sapiens
  misc_RNA (1)...(19): siRNA sense strand
ggaggugcccuacuuugcu

SEQ ID NO: 1198647 - RNA, 19 nt, Homo sapiens
  misc_RNA (1)...(19): siRNA sense strand
uggcugggcugcugcuucu

SEQ ID NO: 1198648 - RNA, 19 nt, Homo sapiens
  misc_RNA (1)...(19): siRNA sense strand
caugguauggcaauagaau

SEQ ID NO: 1198649 - RNA, 19 nt, Homo sapiens
  misc_RNA (1)...(19): siRNA sense strand
gacgaugaggugcagaaga

SEQ ID NO: 1198650 - RNA, 19 nt, Homo sapiens
  misc_RNA (1)...(19): siRNA sense strand
ggcaauagaaucguucaag

SEQ ID NO: 1198651 - RNA, 19 nt, Homo sapiens
  misc_RNA (1)...(19): siRNA sense strand
gcagcuguugggcuucauu

SEQ ID NO: 1198652 - RNA, 19 nt, Homo sapiens
  misc_RNA (1)...(19): siRNA sense strand
gaacagagaugaagaugaa

SEQ ID NO: 1198653 - RNA, 19 nt, Homo sapiens
  misc_RNA (1)...(19): siRNA sense strand
gaagacauauggcaaguuu

SEQ ID NO: 1198654 - RNA, 19 nt, Homo sapiens
  misc_RNA (1)...(19): siRNA sense strand
caaagaauauugcagugua

SEQ ID NO: 1198655 - RNA, 19 nt, Homo sapiens
  misc_RNA (1)...(19): siRNA sense strand
cgaaacagcuggauucaga

SEQ ID NO: 1198656 - RNA, 19 nt, Homo sapiens
  misc_RNA (1)...(19): siRNA sense strand
caacauaaccagucuguaa

SEQ ID NO: 1198657 - RNA, 19 nt, Homo sapiens
  misc_RNA (1)...(19): siRNA sense strand
caacagugaucucuuuaaa

SEQ ID NO: 1198658 - RNA, 19 nt, Homo sapiens
  misc_RNA (1)...(19): siRNA sense strand
ucaacagacucacuaaaua

SEQ ID NO: 1198659 - RNA, 19 nt, Homo sapiens
  misc_RNA (1)...(19): siRNA sense strand
caccagagcccgagaauua

SEQ ID NO: 1198660 - RNA, 19 nt, Homo sapiens
  misc_RNA (1)...(19): siRNA sense strand
gaaagagguucaagcaguu

SEQ ID NO: 1198661 - RNA, 19 nt, Homo sapiens
  misc_RNA (1)...(19): siRNA sense strand
gauaauagacagcaaguuu

SEQ ID NO: 1198662 - RNA, 19 nt, Homo sapiens
  misc_RNA (1)...(19): siRNA sense strand
gcagaacguuuaaagaaga

SEQ ID NO: 1198663 - RNA, 19 nt, Homo sapiens
  misc_RNA (1)...(19): siRNA sense strand
gaagaguggucagauguuu

SEQ ID NO: 1198664 - RNA, 19 nt, Homo sapiens
  misc_RNA (1)...(19): siRNA sense strand
caacaaagaugccuauacu

SEQ ID NO: 1198665 - RNA, 19 nt, Homo sapiens
  misc_RNA (1)...(19): siRNA sense strand
gaccagaagucaacaguga

SEQ ID NO: 1198666 - RNA, 19 nt, Homo sapiens
  misc_RNA (1)...(19): siRNA sense strand
cacaguaccuuccacaaua

SEQ ID NO: 1198667 - RNA, 19 nt, Homo sapiens
  misc_RNA (1)...(19): siRNA sense strand
gauagcaagucaaucauga

SEQ ID NO: 1198668 - RNA, 19 nt, Homo sapiens
  misc_RNA (1)...(19): siRNA sense strand
ggcaagaaguaauauauga

SEQ ID NO: 1198669 - RNA, 19 nt, Homo sapiens
  misc_RNA (1)...(19): siRNA sense strand
gcauauugcuuguaacuca

SEQ ID NO: 1198670 - RNA, 19 nt, Homo sapiens
  misc_RNA (1)...(19): siRNA sense strand
gaagagaacuauaauuucc

SEQ ID NO: 1198671 - RNA, 19 nt, Homo sapiens
  misc_RNA (1)...(19): siRNA sense strand
caacagacucacuaaauaa

SEQ ID NO: 1198672 - RNA, 19 nt, Homo sapiens
  misc_RNA (1)...(19): siRNA sense strand
aaagaaagauguggucaaa

SEQ ID NO: 1198673 - RNA, 19 nt, Homo sapiens
  misc_RNA (1)...(19): siRNA sense strand
gaacgaaacagcuggauuc

SEQ ID NO: 1198674 - RNA, 19 nt, Homo sapiens
  misc_RNA (1)...(19): siRNA sense strand
guacaucuuugcaucauug

SEQ ID NO: 1198675 - RNA, 19 nt, Homo sapiens
  misc_RNA (1)...(19): siRNA sense strand
gaagagaaggagaugauuu

SEQ ID NO: 1198676 - RNA, 19 nt, Homo sapiens
  misc_RNA (1)...(19): siRNA sense strand
ucagcuacaucaagaauaa

SEQ ID NO: 1198677 - RNA, 19 nt, Homo sapiens
  misc_RNA (1)...(19): siRNA sense strand
gaugacagauccagagaug

SEQ ID NO: 1198678 - RNA, 19 nt, Homo sapiens
  misc_RNA (1)...(19): siRNA sense strand
gggaugugcuuguaaauca

SEQ ID NO: 1198679 - RNA, 19 nt, Homo sapiens
  misc_RNA (1)...(19): siRNA sense strand
cacaaaggcugccgagaaa

SEQ ID NO: 1198680 - RNA, 19 nt, Homo sapiens
  misc_RNA (1)...(19): siRNA sense strand
gagcugaucaguauccaua

SEQ ID NO: 1198681 - RNA, 19 nt, Homo sapiens
  misc_RNA (1)...(19): siRNA sense strand
gaaagauucuaaagacaag

SEQ ID NO: 1198682 - RNA, 19 nt, Homo sapiens
  misc_RNA (1)...(19): siRNA sense strand
ugagagaaguggcacauga

SEQ ID NO: 1198683 - RNA, 19 nt, Homo sapiens
  misc_RNA (1)...(19): siRNA sense strand
uggaugagcugaucaguau

SEQ ID NO: 1198684 - RNA, 19 nt, Homo sapiens
  misc_RNA (1)...(19): siRNA sense strand
ucacggcccuuccacagua

SEQ ID NO: 1198685 - RNA, 19 nt, Homo sapiens
  misc_RNA (1)...(19): siRNA sense strand
gaugauggccaagaucuua

SEQ ID NO: 1198686 - RNA, 19 nt, Homo sapiens
  misc_RNA (1)...(19): siRNA sense strand
gcagagaccuuuggaggau

SEQ ID NO: 1198687 - RNA, 19 nt, Homo sapiens
  misc_RNA (1)...(19): siRNA sense strand
agacagaguuucaucaugu

SEQ ID NO: 1198688 - RNA, 19 nt, Homo sapiens
  misc_RNA (1)...(19): siRNA sense strand
gcaagucaaucaugaggau

SEQ ID NO: 1198689 - RNA, 19 nt, Homo sapiens
  misc_RNA (1)...(19): siRNA sense strand
gaugagcaguucaguuguu

SEQ ID NO: 1198690 - RNA, 19 nt, Homo sapiens
  misc_RNA (1)...(19): siRNA sense strand
gagugcauauugcuuguaa

SEQ ID NO: 1198691 - RNA, 19 nt, Homo sapiens
  misc_RNA (1)...(19): siRNA sense strand
acagcaaaguggcaaguua

SEQ ID NO: 1198692 - RNA, 19 nt, Homo sapiens
  misc_RNA (1)...(19): siRNA sense strand
acacauagcccuagaguuc

SEQ ID NO: 1198693 - RNA, 19 nt, Homo sapiens
  misc_RNA (1)...(19): siRNA sense strand
gaccagaaguacaucuuug

SEQ ID NO: 1198694 - RNA, 19 nt, Homo sapiens
  misc_RNA (1)...(19): siRNA sense strand
ggucaaacggcaagaagua

SEQ ID NO: 1198695 - RNA, 19 nt, Homo sapiens
  misc_RNA (1)...(19): siRNA sense strand
gaugaagaguggucagaug

SEQ ID NO: 1198696 - RNA, 19 nt, Homo sapiens
  misc_RNA (1)...(19): siRNA sense strand
ccacaaaggcugccgagaa

SEQ ID NO: 1198697 - RNA, 19 nt, Homo sapiens
  misc_RNA (1)...(19): siRNA sense strand
aggaggaccuuuaaugaaa

SEQ ID NO: 1198698 - RNA, 19 nt, Homo sapiens
  misc_RNA (1)...(19): siRNA sense strand
aagaacaacuucaccagaa

SEQ ID NO: 1198699 - RNA, 19 nt, Homo sapiens
  misc_RNA (1)...(19): siRNA sense strand
agaugaagaugaaggaauu

SEQ ID NO: 1198700 - RNA, 19 nt, Homo sapiens
  misc_RNA (1)...(19): siRNA sense strand
gaucaugagugguguguac

SEQ ID NO: 1198701 - RNA, 19 nt, Homo sapiens
  misc_RNA (1)...(19): siRNA sense strand
gggaguagguacagacaug

SEQ ID NO: 1198702 - RNA, 19 nt, Homo sapiens
  misc_RNA (1)...(19): siRNA sense strand
gaugagaacaugucaaaca

SEQ ID NO: 1198703 - RNA, 19 nt, Homo sapiens
  misc_RNA (1)...(19): siRNA sense strand
caacagaaucacuuacuga

SEQ ID NO: 1198704 - RNA, 19 nt, Homo sapiens
  misc_RNA (1)...(19): siRNA sense strand
gcaguucaguuguuagaag

SEQ ID NO: 1198705 - RNA, 19 nt, Homo sapiens
  misc_RNA (1)...(19): siRNA sense strand
gaaaugcuaaccugguauu

SEQ ID NO: 1198706 - RNA, 19 nt, Homo sapiens
  misc_RNA (1)...(19): siRNA sense strand
gaagaagcuuguacgugau

SEQ ID NO: 1198707 - RNA, 19 nt, Homo sapiens
  misc_RNA (1)...(19): siRNA sense strand
acaaagaugccuauacuug

SEQ ID NO: 1198708 - RNA, 19 nt, Homo sapiens
  misc_RNA (1)...(19): siRNA sense strand
ccacauaccaagcugauga

SEQ ID NO: 1198709 - RNA, 19 nt, Homo sapiens
  misc_RNA (1)...(19): siRNA sense strand
aaagacagauagcaaguca

SEQ ID NO: 1198710 - RNA, 19 nt, Homo sapiens
  misc_RNA (1)...(19): siRNA sense strand
gaaggagucucugguggau

SEQ ID NO: 1198711 - RNA, 19 nt, Homo sapiens
  misc_RNA (1)...(19): siRNA sense strand
caaacggcaagaaguaaua

SEQ ID NO: 1198712 - RNA, 19 nt, Homo sapiens
  misc_RNA (1)...(19): siRNA sense strand
uaaccagucuguaaacuac

SEQ ID NO: 1198713 - RNA, 19 nt, Homo sapiens
  misc_RNA (1)...(19): siRNA sense strand
uuaaagaagcugauuguga

SEQ ID NO: 1198714 - RNA, 19 nt, Homo sapiens
  misc_RNA (1)...(19): siRNA sense strand
gggaguguguuucugaaga

SEQ ID NO: 1198715 - RNA, 19 nt, Homo sapiens
  misc_RNA (1)...(19): siRNA sense strand
ggagaaagauaagaagacu

SEQ ID NO: 1198716 - RNA, 19 nt, Homo sapiens
  misc_RNA (1)...(19): siRNA sense strand
uauaauuuccugccacaua

SEQ ID NO: 1198717 - RNA, 19 nt, Homo sapiens
  misc_RNA (1)...(19): siRNA sense strand
gaagaugagcaguucaguu

SEQ ID NO: 1198718 - RNA, 19 nt, Homo sapiens
  misc_RNA (1)...(19): siRNA sense strand
ugagaaugcagaacguuua

SEQ ID NO: 1198719 - RNA, 19 nt, Homo sapiens
  misc_RNA (1)...(19): siRNA sense strand
uaacaaagccaaaggaaaa

SEQ ID NO: 1198720 - RNA, 19 nt, Homo sapiens
  misc_RNA (1)...(19): siRNA sense strand
gaaggaagagggagaugau

SEQ ID NO: 1198721 - RNA, 19 nt, Homo sapiens
  misc_RNA (1)...(19): siRNA sense strand
agucaacagugaucucuuu

SEQ ID NO: 1198722 - RNA, 19 nt, Homo sapiens
  misc_RNA (1)...(19): siRNA sense strand
caaaguggcaaguuaugaa

SEQ ID NO: 1198723 - RNA, 19 nt, Homo sapiens
  misc_RNA (1)...(19): siRNA sense strand
aaagaugccuauacuugug

SEQ ID NO: 1198724 - RNA, 19 nt, Homo sapiens
  misc_RNA (1)...(19): siRNA sense strand
uggaaaugcuaaccuggua

SEQ ID NO: 1198725 - RNA, 19 nt, Homo sapiens
  misc_RNA (1)...(19): siRNA sense strand
ucaacacccugaacagaga

SEQ ID NO: 1198726 - RNA, 19 nt, Homo sapiens
  misc_RNA (1)...(19): siRNA sense strand
agaagaagaugagcaguuc

SEQ ID NO: 1198727 - RNA, 19 nt, Homo sapiens
  misc_RNA (1)...(19): siRNA sense strand
gagaaugcagaacguuuaa

SEQ ID NO: 1198728 - RNA, 19 nt, Homo sapiens
  misc_RNA (1)...(19): siRNA sense strand
agacaugaaugaaggacaa

SEQ ID NO: 1198729 - RNA, 19 nt, Homo sapiens
  misc_RNA (1)...(19): siRNA sense strand
gaaaagcuguuccccuguu

SEQ ID NO: 1198730 - RNA, 19 nt, Homo sapiens
  misc_RNA (1)...(19): siRNA sense strand
aaccugguauuuaugcuua

SEQ ID NO: 1198731 - RNA, 19 nt, Homo sapiens
  misc_RNA (1)...(19): siRNA sense strand
gcaaaguggcaaguuauga

SEQ ID NO: 1198732 - RNA, 19 nt, Homo sapiens
  misc_RNA (1)...(19): siRNA sense strand
aggagucucugguggauaa

SEQ ID NO: 1198733 - RNA, 19 nt, Homo sapiens
  misc_RNA (1)...(19): siRNA sense strand
caaagaugccuauacuugu

SEQ ID NO: 1198734 - RNA, 19 nt, Homo sapiens
  misc_RNA (1)...(19): siRNA sense strand
agaaagugcgucucaauga

SEQ ID NO: 1198735 - RNA, 19 nt, Homo sapiens
  misc_RNA (1)...(19): siRNA sense strand
cuaaagacaaggagaaaga

SEQ ID NO: 1198736 - RNA, 19 nt, Homo sapiens
  misc_RNA (1)...(19): siRNA sense strand
ugacugagaguauaacaga

SEQ ID NO: 1198737 - RNA, 19 nt, Homo sapiens
  misc_RNA (1)...(19): siRNA sense strand
gaaguacaucuuugcauca

SEQ ID NO: 1198738 - RNA, 19 nt, Homo sapiens
  misc_RNA (1)...(19): siRNA sense strand
ggaugugauuggagcugua

SEQ ID NO: 1198739 - RNA, 19 nt, Homo sapiens
  misc_RNA (1)...(19): siRNA sense strand
gaaugaaggacaacuacug

SEQ ID NO: 1198740 - RNA, 19 nt, Homo sapiens
  misc_RNA (1)...(19): siRNA sense strand
gaaauuccugucucauuca

SEQ ID NO: 1198741 - RNA, 19 nt, Homo sapiens
  misc_RNA (1)...(19): siRNA sense strand
ucauuggacucagaacuuu

SEQ ID NO: 1198742 - RNA, 19 nt, Homo sapiens
  misc_RNA (1)...(19): siRNA sense strand
uaacucagcggauuaccaa

SEQ ID NO: 1198743 - RNA, 19 nt, Homo sapiens
  misc_RNA (1)...(19): siRNA sense strand
gcaagaagagcaaagaaaa

SEQ ID NO: 1198744 - RNA, 19 nt, Homo sapiens
  misc_RNA (1)...(19): siRNA sense strand
augcuaaccugguauuuau

SEQ ID NO: 1198745 - RNA, 19 nt, Homo sapiens
  misc_RNA (1)...(19): siRNA sense strand
uaaaugagguggagauccu

SEQ ID NO: 1198746 - RNA, 19 nt, Homo sapiens
  misc_RNA (1)...(19): siRNA sense strand
acagauagcaagucaauca

SEQ ID NO: 1198747 - RNA, 19 nt, Homo sapiens
  misc_RNA (1)...(19): siRNA sense strand
aagaugagcaguucaguug

SEQ ID NO: 1198748 - RNA, 19 nt, Homo sapiens
  misc_RNA (1)...(19): siRNA sense strand
auaccaagcugaugaggau

SEQ ID NO: 1198749 - RNA, 19 nt, Homo sapiens
  misc_RNA (1)...(19): siRNA sense strand
gaucuuaggagaacggaau

SEQ ID NO: 1198750 - RNA, 19 nt, Homo sapiens
  misc_RNA (1)...(19): siRNA sense strand
ggagauccuucaggguuug

SEQ ID NO: 1198751 - RNA, 19 nt, Homo sapiens
  misc_RNA (1)...(19): siRNA sense strand
uaaucugacugagaguaua

SEQ ID NO: 1198752 - RNA, 19 nt, Homo sapiens
  misc_RNA (1)...(19): siRNA sense strand
gaacagagaugaagaugaa

SEQ ID NO: 1198753 - RNA, 19 nt, Homo sapiens
  misc_RNA (1)...(19): siRNA sense strand
gaagacauauggcaaguuu

SEQ ID NO: 1198754 - RNA, 19 nt, Homo sapiens
  misc_RNA (1)...(19): siRNA sense strand
caaagaauauugcagugua

SEQ ID NO: 1198755 - RNA, 19 nt, Homo sapiens
  misc_RNA (1)...(19): siRNA sense strand
cgaaacagcuggauucaga

SEQ ID NO: 1198756 - RNA, 19 nt, Homo sapiens
  misc_RNA (1)...(19): siRNA sense strand
caacauaaccagucuguaa

SEQ ID NO: 1198757 - RNA, 19 nt, Homo sapiens
  misc_RNA (1)...(19): siRNA sense strand
caacagugaucucuuuaaa

SEQ ID NO: 1198758 - RNA, 19 nt, Homo sapiens
  misc_RNA (1)...(19): siRNA sense strand
ucaacagacucacuaaaua

SEQ ID NO: 1198759 - RNA, 19 nt, Homo sapiens
  misc_RNA (1)...(19): siRNA sense strand
caccagagcccgagaauua

SEQ ID NO: 1198760 - RNA, 19 nt, Homo sapiens
  misc_RNA (1)...(19): siRNA sense strand
gaaagagguucaagcaguu

SEQ ID NO: 1198761 - RNA, 19 nt, Homo sapiens
  misc_RNA (1)...(19): siRNA sense strand
gauaauagacagcaaguuu

SEQ ID NO: 1198762 - RNA, 19 nt, Homo sapiens
  misc_RNA (1)...(19): siRNA sense strand
gcagaacguuuaaagaaga

SEQ ID NO: 1198763 - RNA, 19 nt, Homo sapiens
  misc_RNA (1)...(19): siRNA sense strand
gaagaguggucagauguuu

SEQ ID NO: 1198764 - RNA, 19 nt, Homo sapiens
  misc_RNA (1)...(19): siRNA sense strand
caacaaagaugccuauacu

SEQ ID NO: 1198765 - RNA, 19 nt, Homo sapiens
  misc_RNA (1)...(19): siRNA sense strand
gaccagaagucaacaguga

SEQ ID NO: 1198766 - RNA, 19 nt, Homo sapiens
  misc_RNA (1)...(19): siRNA sense strand
cacaguaccuuccacaaua

SEQ ID NO: 1198767 - RNA, 19 nt, Homo sapiens
  misc_RNA (1)...(19): siRNA sense strand
gauagcaagucaaucauga

SEQ ID NO: 1198768 - RNA, 19 nt, Homo sapiens
  misc_RNA (1)...(19): siRNA sense strand
ggcaagaaguaauauauga

SEQ ID NO: 1198769 - RNA, 19 nt, Homo sapiens
  misc_RNA (1)...(19): siRNA sense strand
gcauauugcuuguaacuca

SEQ ID NO: 1198770 - RNA, 19 nt, Homo sapiens
  misc_RNA (1)...(19): siRNA sense strand
gaagagaacuauaauuucc

SEQ ID NO: 1198771 - RNA, 19 nt, Homo sapiens
  misc_RNA (1)...(19): siRNA sense strand
caacagacucacuaaauaa

SEQ ID NO: 1198772 - RNA, 19 nt, Homo sapiens
  misc_RNA (1)...(19): siRNA sense strand
aaagaaagauguggucaaa

SEQ ID NO: 1198773 - RNA, 19 nt, Homo sapiens
  misc_RNA (1)...(19): siRNA sense strand
gaacgaaacagcuggauuc

SEQ ID NO: 1198774 - RNA, 19 nt, Homo sapiens
  misc_RNA (1)...(19): siRNA sense strand
guacaucuuugcaucauug

SEQ ID NO: 1198775 - RNA, 19 nt, Homo sapiens
  misc_RNA (1)...(19): siRNA sense strand
gaagagaaggagaugauuu

SEQ ID NO: 1198776 - RNA, 19 nt, Homo sapiens
  misc_RNA (1)...(19): siRNA sense strand
ucagcuacaucaagaauaa

SEQ ID NO: 1198777 - RNA, 19 nt, Homo sapiens
  misc_RNA (1)...(19): siRNA sense strand
gaugacagauccagagaug

SEQ ID NO: 1198778 - RNA, 19 nt, Homo sapiens
  misc_RNA (1)...(19): siRNA sense strand
gggaugugcuuguaaauca

SEQ ID NO: 1198779 - RNA, 19 nt, Homo sapiens
  misc_RNA (1)...(19): siRNA sense strand
cacaaaggcugccgagaaa

SEQ ID NO: 1198780 - RNA, 19 nt, Homo sapiens
  misc_RNA (1)...(19): siRNA sense strand
gagcugaucaguauccaua

SEQ ID NO: 1198781 - RNA, 19 nt, Homo sapiens
  misc_RNA (1)...(19): siRNA sense strand
gaaagauucuaaagacaag

SEQ ID NO: 1198782 - RNA, 19 nt, Homo sapiens
  misc_RNA (1)...(19): siRNA sense strand
ugagagaaguggcacauga

SEQ ID NO: 1198783 - RNA, 19 nt, Homo sapiens
  misc_RNA (1)...(19): siRNA sense strand
uggaugagcugaucaguau

SEQ ID NO: 1198784 - RNA, 19 nt, Homo sapiens
  misc_RNA (1)...(19): siRNA sense strand
ucacggcccuuccacagua

SEQ ID NO: 1198785 - RNA, 19 nt, Homo sapiens
  misc_RNA (1)...(19): siRNA sense strand
gaugauggccaagaucuua

SEQ ID NO: 1198786 - RNA, 19 nt, Homo sapiens
  misc_RNA (1)...(19): siRNA sense strand
gcagagaccuuuggaggau

SEQ ID NO: 1198787 - RNA, 19 nt, Homo sapiens
  misc_RNA (1)...(19): siRNA sense strand
agacagaguuucaucaugu

SEQ ID NO: 1198788 - RNA, 19 nt, Homo sapiens
  misc_RNA (1)...(19): siRNA sense strand
gcaagucaaucaugaggau

SEQ ID NO: 1198789 - RNA, 19 nt, Homo sapiens
  misc_RNA (1)...(19): siRNA sense strand
gaugagcaguucaguuguu

SEQ ID NO: 1198790 - RNA, 19 nt, Homo sapiens
  misc_RNA (1)...(19): siRNA sense strand
gagugcauauugcuuguaa

SEQ ID NO: 1198791 - RNA, 19 nt, Homo sapiens
  misc_RNA (1)...(19): siRNA sense strand
acagcaaaguggcaaguua

SEQ ID NO: 1198792 - RNA, 19 nt, Homo sapiens
  misc_RNA (1)...(19): siRNA sense strand
acacauagcccuagaguuc

SEQ ID NO: 1198793 - RNA, 19 nt, Homo sapiens
  misc_RNA (1)...(19): siRNA sense strand
gaccagaaguacaucuuug

SEQ ID NO: 1198794 - RNA, 19 nt, Homo sapiens
  misc_RNA (1)...(19): siRNA sense strand
ggucaaacggcaagaagua

SEQ ID NO: 1198795 - RNA, 19 nt, Homo sapiens
  misc_RNA (1)...(19): siRNA sense strand
gaugaagaguggucagaug

SEQ ID NO: 1198796 - RNA, 19 nt, Homo sapiens
  misc_RNA (1)...(19): siRNA sense strand
ccacaaaggcugccgagaa

SEQ ID NO: 1198797 - RNA, 19 nt, Homo sapiens
  misc_RNA (1)...(19): siRNA sense strand
aggaggaccuuuaaugaaa

SEQ ID NO: 1198798 - RNA, 19 nt, Homo sapiens
  misc_RNA (1)...(19): siRNA sense strand
aagaacaacuucaccagaa

SEQ ID NO: 1198799 - RNA, 19 nt, Homo sapiens
  misc_RNA (1)...(19): siRNA sense strand
agaugaagaugaaggaauu

SEQ ID NO: 1198800 - RNA, 19 nt, Homo sapiens
  misc_RNA (1)...(19): siRNA sense strand
gaucaugagugguguguac

SEQ ID NO: 1198801 - RNA, 19 nt, Homo sapiens
  misc_RNA (1)...(19): siRNA sense strand
gggaguagguacagacaug

SEQ ID NO: 1198802 - RNA, 19 nt, Homo sapiens
  misc_RNA (1)...(19): siRNA sense strand
gaugagaacaugucaaaca

SEQ ID NO: 1198803 - RNA, 19 nt, Homo sapiens
  misc_RNA (1)...(19): siRNA sense strand
caacagaaucacuuacuga

SEQ ID NO: 1198804 - RNA, 19 nt, Homo sapiens
  misc_RNA (1)...(19): siRNA sense strand
gcaguucaguuguuagaag

SEQ ID NO: 1198805 - RNA, 19 nt, Homo sapiens
  misc_RNA (1)...(19): siRNA sense strand
gaaaugcuaaccugguauu

SEQ ID NO: 1198806 - RNA, 19 nt, Homo sapiens
  misc_RNA (1)...(19): siRNA sense strand
gaagaagcuuguacgugau

SEQ ID NO: 1198807 - RNA, 19 nt, Homo sapiens
  misc_RNA (1)...(19): siRNA sense strand
acaaagaugccuauacuug

SEQ ID NO: 1198808 - RNA, 19 nt, Homo sapiens
  misc_RNA (1)...(19): siRNA sense strand
ccacauaccaagcugauga

SEQ ID NO: 1198809 - RNA, 19 nt, Homo sapiens
  misc_RNA (1)...(19): siRNA sense strand
aaagacagauagcaaguca

SEQ ID NO: 1198810 - RNA, 19 nt, Homo sapiens
  misc_RNA (1)...(19): siRNA sense strand
gaaggagucucugguggau

SEQ ID NO: 1198811 - RNA, 19 nt, Homo sapiens
  misc_RNA (1)...(19): siRNA sense strand
caaacggcaagaaguaaua

SEQ ID NO: 1198812 - RNA, 19 nt, Homo sapiens
  misc_RNA (1)...(19): siRNA sense strand
uaaccagucuguaaacuac

SEQ ID NO: 1198813 - RNA, 19 nt, Homo sapiens
  misc_RNA (1)...(19): siRNA sense strand
uuaaagaagcugauuguga

SEQ ID NO: 1198814 - RNA, 19 nt, Homo sapiens
  misc_RNA (1)...(19): siRNA sense strand
gggaguguguuucugaaga

SEQ ID NO: 1198815 - RNA, 19 nt, Homo sapiens
  misc_RNA (1)...(19): siRNA sense strand
ggagaaagauaagaagacu

SEQ ID NO: 1198816 - RNA, 19 nt, Homo sapiens
  misc_RNA (1)...(19): siRNA sense strand
uauaauuuccugccacaua

SEQ ID NO: 1198817 - RNA, 19 nt, Homo sapiens
  misc_RNA (1)...(19): siRNA sense strand
gaagaugagcaguucaguu

SEQ ID NO: 1198818 - RNA, 19 nt, Homo sapiens
  misc_RNA (1)...(19): siRNA sense strand
ugagaaugcagaacguuua

SEQ ID NO: 1198819 - RNA, 19 nt, Homo sapiens
  misc_RNA (1)...(19): siRNA sense strand
uaacaaagccaaaggaaaa

SEQ ID NO: 1198820 - RNA, 19 nt, Homo sapiens
  misc_RNA (1)...(19): siRNA sense strand
gaaggaagagggagaugau

SEQ ID NO: 1198821 - RNA, 19 nt, Homo sapiens
  misc_RNA (1)...(19): siRNA sense strand
agucaacagugaucucuuu

SEQ ID NO: 1198822 - RNA, 19 nt, Homo sapiens
  misc_RNA (1)...(19): siRNA sense strand
caaaguggcaaguuaugaa

SEQ ID NO: 1198823 - RNA, 19 nt, Homo sapiens
  misc_RNA (1)...(19): siRNA sense strand
aaagaugccuauacuugug

SEQ ID NO: 1198824 - RNA, 19 nt, Homo sapiens
  misc_RNA (1)...(19): siRNA sense strand
uggaaaugcuaaccuggua

SEQ ID NO: 1198825 - RNA, 19 nt, Homo sapiens
  misc_RNA (1)...(19): siRNA sense strand
ucaacacccugaacagaga

SEQ ID NO: 1198826 - RNA, 19 nt, Homo sapiens
  misc_RNA (1)...(19): siRNA sense strand
agaagaagaugagcaguuc

SEQ ID NO: 1198827 - RNA, 19 nt, Homo sapiens
  misc_RNA (1)...(19): siRNA sense strand
gagaaugcagaacguuuaa

SEQ ID NO: 1198828 - RNA, 19 nt, Homo sapiens
  misc_RNA (1)...(19): siRNA sense strand
agacaugaaugaaggacaa

SEQ ID NO: 1198829 - RNA, 19 nt, Homo sapiens
  misc_RNA (1)...(19): siRNA sense strand
gaaaagcuguuccccuguu

SEQ ID NO: 1198830 - RNA, 19 nt, Homo sapiens
  misc_RNA (1)...(19): siRNA sense strand
aaccugguauuuaugcuua

SEQ ID NO: 1198831 - RNA, 19 nt, Homo sapiens
  misc_RNA (1)...(19): siRNA sense strand
gcaaaguggcaaguuauga

SEQ ID NO: 1198832 - RNA, 19 nt, Homo sapiens
  misc_RNA (1)...(19): siRNA sense strand
aggagucucugguggauaa

SEQ ID NO: 1198833 - RNA, 19 nt, Homo sapiens
  misc_RNA (1)...(19): siRNA sense strand
caaagaugccuauacuugu

SEQ ID NO: 1198834 - RNA, 19 nt, Homo sapiens
  misc_RNA (1)...(19): siRNA sense strand
agaaagugcgucucaauga

SEQ ID NO: 1198835 - RNA, 19 nt, Homo sapiens
  misc_RNA (1)...(19): siRNA sense strand
cuaaagacaaggagaaaga

SEQ ID NO: 1198836 - RNA, 19 nt, Homo sapiens
  misc_RNA (1)...(19): siRNA sense strand
ugacugagaguauaacaga

SEQ ID NO: 1198837 - RNA, 19 nt, Homo sapiens
  misc_RNA (1)...(19): siRNA sense strand
gaaguacaucuuugcauca

SEQ ID NO: 1198838 - RNA, 19 nt, Homo sapiens
  misc_RNA (1)...(19): siRNA sense strand
ggaugugauuggagcugua

SEQ ID NO: 1198839 - RNA, 19 nt, Homo sapiens
  misc_RNA (1)...(19): siRNA sense strand
gaaugaaggacaacuacug

SEQ ID NO: 1198840 - RNA, 19 nt, Homo sapiens
  misc_RNA (1)...(19): siRNA sense strand
gaaauuccugucucauuca

SEQ ID NO: 1198841 - RNA, 19 nt, Homo sapiens
  misc_RNA (1)...(19): siRNA sense strand
ucauuggacucagaacuuu

SEQ ID NO: 1198842 - RNA, 19 nt, Homo sapiens
  misc_RNA (1)...(19): siRNA sense strand
uaacucagcggauuaccaa

SEQ ID NO: 1198843 - RNA, 19 nt, Homo sapiens
  misc_RNA (1)...(19): siRNA sense strand
gcaagaagagcaaagaaaa

SEQ ID NO: 1198844 - RNA, 19 nt, Homo sapiens
  misc_RNA (1)...(19): siRNA sense strand
augcuaaccugguauuuau

SEQ ID NO: 1198845 - RNA, 19 nt, Homo sapiens
  misc_RNA (1)...(19): siRNA sense strand
uaaaugagguggagauccu

SEQ ID NO: 1198846 - RNA, 19 nt, Homo sapiens
  misc_RNA (1)...(19): siRNA sense strand
acagauagcaagucaauca

SEQ ID NO: 1198847 - RNA, 19 nt, Homo sapiens
  misc_RNA (1)...(19): siRNA sense strand
aagaugagcaguucaguug

SEQ ID NO: 1198848 - RNA, 19 nt, Homo sapiens
  misc_RNA (1)...(19): siRNA sense strand
auaccaagcugaugaggau

SEQ ID NO: 1198849 - RNA, 19 nt, Homo sapiens
  misc_RNA (1)...(19): siRNA sense strand
gaucuuaggagaacggaau

SEQ ID NO: 1198850 - RNA, 19 nt, Homo sapiens
  misc_RNA (1)...(19): siRNA sense strand
ggagauccuucaggguuug

SEQ ID NO: 1198851 - RNA, 19 nt, Homo sapiens
  misc_RNA (1)...(19): siRNA sense strand
uaaucugacugagaguaua

SEQ ID NO: 1198852 - RNA, 19 nt, Homo sapiens
  misc_RNA (1)...(19): siRNA sense strand
gaacagagaugaagaugaa

SEQ ID NO: 1198853 - RNA, 19 nt, Homo sapiens
  misc_RNA (1)...(19): siRNA sense strand
gaagacauauggcaaguuu

SEQ ID NO: 1198854 - RNA, 19 nt, Homo sapiens
  misc_RNA (1)...(19): siRNA sense strand
caaagaauauugcagugua

SEQ ID NO: 1198855 - RNA, 19 nt, Homo sapiens
  misc_RNA (1)...(19): siRNA sense strand
cgaaacagcuggauucaga

SEQ ID NO: 1198856 - RNA, 19 nt, Homo sapiens
  misc_RNA (1)...(19): siRNA sense strand
caacauaaccagucuguaa

SEQ ID NO: 1198857 - RNA, 19 nt, Homo sapiens
  misc_RNA (1)...(19): siRNA sense strand
caacagugaucucuuuaaa

SEQ ID NO: 1198858 - RNA, 19 nt, Homo sapiens
  misc_RNA (1)...(19): siRNA sense strand
ucaacagacucacuaaaua

SEQ ID NO: 1198859 - RNA, 19 nt, Homo sapiens
  misc_RNA (1)...(19): siRNA sense strand
caccagagcccgagaauua

SEQ ID NO: 1198860 - RNA, 19 nt, Homo sapiens
  misc_RNA (1)...(19): siRNA sense strand
gaaagagguucaagcaguu

SEQ ID NO: 1198861 - RNA, 19 nt, Homo sapiens
  misc_RNA (1)...(19): siRNA sense strand
gauaauagacagcaaguuu

SEQ ID NO: 1198862 - RNA, 19 nt, Homo sapiens
  misc_RNA (1)...(19): siRNA sense strand
gcagaacguuuaaagaaga

SEQ ID NO: 1198863 - RNA, 19 nt, Homo sapiens
  misc_RNA (1)...(19): siRNA sense strand
gaagaguggucagauguuu

SEQ ID NO: 1198864 - RNA, 19 nt, Homo sapiens
  misc_RNA (1)...(19): siRNA sense strand
caacaaagaugccuauacu

SEQ ID NO: 1198865 - RNA, 19 nt, Homo sapiens
  misc_RNA (1)...(19): siRNA sense strand
gaccagaagucaacaguga

SEQ ID NO: 1198866 - RNA, 19 nt, Homo sapiens
  misc_RNA (1)...(19): siRNA sense strand
gauagcaagucaaucauga

SEQ ID NO: 1198867 - RNA, 19 nt, Homo sapiens
  misc_RNA (1)...(19): siRNA sense strand
ggcaagaaguaauauauga

SEQ ID NO: 1198868 - RNA, 19 nt, Homo sapiens
  misc_RNA (1)...(19): siRNA sense strand
gcauauugcuuguaacuca

SEQ ID NO: 1198869 - RNA, 19 nt, Homo sapiens
  misc_RNA (1)...(19): siRNA sense strand
caacagacucacuaaauaa

SEQ ID NO: 1198870 - RNA, 19 nt, Homo sapiens
  misc_RNA (1)...(19): siRNA sense strand
aaagaaagauguggucaaa

SEQ ID NO: 1198871 - RNA, 19 nt, Homo sapiens
  misc_RNA (1)...(19): siRNA sense strand
gaacgaaacagcuggauuc

SEQ ID NO: 1198872 - RNA, 19 nt, Homo sapiens
  misc_RNA (1)...(19): siRNA sense strand
guacaucuuugcaucauug

SEQ ID NO: 1198873 - RNA, 19 nt, Homo sapiens
  misc_RNA (1)...(19): siRNA sense strand
gaagagaaggagaugauuu

SEQ ID NO: 1198874 - RNA, 19 nt, Homo sapiens
  misc_RNA (1)...(19): siRNA sense strand
gaugacagauccagagaug

SEQ ID NO: 1198875 - RNA, 19 nt, Homo sapiens
  misc_RNA (1)...(19): siRNA sense strand
gggaugugcuuguaaauca

SEQ ID NO: 1198876 - RNA, 19 nt, Homo sapiens
  misc_RNA (1)...(19): siRNA sense strand
cacaaaggcugccgagaaa

SEQ ID NO: 1198877 - RNA, 19 nt, Homo sapiens
  misc_RNA (1)...(19): siRNA sense strand
gagcugaucaguauccaua

SEQ ID NO: 1198878 - RNA, 19 nt, Homo sapiens
  misc_RNA (1)...(19): siRNA sense strand
uggaugagcugaucaguau

SEQ ID NO: 1198879 - RNA, 19 nt, Homo sapiens
  misc_RNA (1)...(19): siRNA sense strand
gaaagauucuaaagacaag

SEQ ID NO: 1198880 - RNA, 19 nt, Homo sapiens
  misc_RNA (1)...(19): siRNA sense strand
ugagagaaguggcacauga

SEQ ID NO: 1198881 - RNA, 19 nt, Homo sapiens
  misc_RNA (1)...(19): siRNA sense strand
gcagagaccuuuggaggau

SEQ ID NO: 1198882 - RNA, 19 nt, Homo sapiens
  misc_RNA (1)...(19): siRNA sense strand
gaugauggccaagaucuua

SEQ ID NO: 1198883 - RNA, 19 nt, Homo sapiens
  misc_RNA (1)...(19): siRNA sense strand
agacagaguuucaucaugu

SEQ ID NO: 1198884 - RNA, 19 nt, Homo sapiens
  misc_RNA (1)...(19): siRNA sense strand
gcaagucaaucaugaggau

SEQ ID NO: 1198885 - RNA, 19 nt, Homo sapiens
  misc_RNA (1)...(19): siRNA sense strand
gaugagcaguucaguuguu

SEQ ID NO: 1198886 - RNA, 19 nt, Homo sapiens
  misc_RNA (1)...(19): siRNA sense strand
gagugcauauugcuuguaa

SEQ ID NO: 1198887 - RNA, 19 nt, Homo sapiens
  misc_RNA (1)...(19): siRNA sense strand
acagcaaaguggcaaguua

SEQ ID NO: 1198888 - RNA, 19 nt, Homo sapiens
  misc_RNA (1)...(19): siRNA sense strand
acacauagcccuagaguuc

SEQ ID NO: 1198889 - RNA, 19 nt, Homo sapiens
  misc_RNA (1)...(19): siRNA sense strand
gaccagaaguacaucuuug

SEQ ID NO: 1198890 - RNA, 19 nt, Homo sapiens
  misc_RNA (1)...(19): siRNA sense strand
ggucaaacggcaagaagua

SEQ ID NO: 1198891 - RNA, 19 nt, Homo sapiens
  misc_RNA (1)...(19): siRNA sense strand
gaugaagaguggucagaug

SEQ ID NO: 1198892 - RNA, 19 nt, Homo sapiens
  misc_RNA (1)...(19): siRNA sense strand
ccacaaaggcugccgagaa

SEQ ID NO: 1198893 - RNA, 19 nt, Homo sapiens
  misc_RNA (1)...(19): siRNA sense strand
aggaggaccuuuaaugaaa

SEQ ID NO: 1198894 - RNA, 19 nt, Homo sapiens
  misc_RNA (1)...(19): siRNA sense strand
aagaacaacuucaccagaa

SEQ ID NO: 1198895 - RNA, 19 nt, Homo sapiens
  misc_RNA (1)...(19): siRNA sense strand
agaugaagaugaaggaauu

SEQ ID NO: 1198896 - RNA, 19 nt, Homo sapiens
  misc_RNA (1)...(19): siRNA sense strand
gaucaugagugguguguac

SEQ ID NO: 1198897 - RNA, 19 nt, Homo sapiens
  misc_RNA (1)...(19): siRNA sense strand
gggaguagguacagacaug

SEQ ID NO: 1198898 - RNA, 19 nt, Homo sapiens
  misc_RNA (1)...(19): siRNA sense strand
gaugagaacaugucaaaca

SEQ ID NO: 1198899 - RNA, 19 nt, Homo sapiens
  misc_RNA (1)...(19): siRNA sense strand
caacagaaucacuuacuga

SEQ ID NO: 1198900 - RNA, 19 nt, Homo sapiens
  misc_RNA (1)...(19): siRNA sense strand
gcaguucaguuguuagaag

SEQ ID NO: 1198901 - RNA, 19 nt, Homo sapiens
  misc_RNA (1)...(19): siRNA sense strand
gaaaugcuaaccugguauu

SEQ ID NO: 1198902 - RNA, 19 nt, Homo sapiens
  misc_RNA (1)...(19): siRNA sense strand
gaagaagcuuguacgugau

SEQ ID NO: 1198903 - RNA, 19 nt, Homo sapiens
  misc_RNA (1)...(19): siRNA sense strand
acaaagaugccuauacuug

SEQ ID NO: 1198904 - RNA, 19 nt, Homo sapiens
  misc_RNA (1)...(19): siRNA sense strand
ccacauaccaagcugauga

SEQ ID NO: 1198905 - RNA, 19 nt, Homo sapiens
  misc_RNA (1)...(19): siRNA sense strand
aaagacagauagcaaguca

SEQ ID NO: 1198906 - RNA, 19 nt, Homo sapiens
  misc_RNA (1)...(19): siRNA sense strand
gaaggagucucugguggau

SEQ ID NO: 1198907 - RNA, 19 nt, Homo sapiens
  misc_RNA (1)...(19): siRNA sense strand
caaacggcaagaaguaaua

SEQ ID NO: 1198908 - RNA, 19 nt, Homo sapiens
  misc_RNA (1)...(19): siRNA sense strand
uaaccagucuguaaacuac

SEQ ID NO: 1198909 - RNA, 19 nt, Homo sapiens
  misc_RNA (1)...(19): siRNA sense strand
uuaaagaagcugauuguga

SEQ ID NO: 1198910 - RNA, 19 nt, Homo sapiens
  misc_RNA (1)...(19): siRNA sense strand
gggaguguguuucugaaga

SEQ ID NO: 1198911 - RNA, 19 nt, Homo sapiens
  misc_RNA (1)...(19): siRNA sense strand
gaagaugagcaguucaguu

SEQ ID NO: 1198912 - RNA, 19 nt, Homo sapiens
  misc_RNA (1)...(19): siRNA sense strand
ggagaaagauaagaagacu

SEQ ID NO: 1198913 - RNA, 19 nt, Homo sapiens
  misc_RNA (1)...(19): siRNA sense strand
ugagaaugcagaacguuua

SEQ ID NO: 1198914 - RNA, 19 nt, Homo sapiens
  misc_RNA (1)...(19): siRNA sense strand
uaacaaagccaaaggaaaa

SEQ ID NO: 1198915 - RNA, 19 nt, Homo sapiens
  misc_RNA (1)...(19): siRNA sense strand
gaaggaagagggagaugau

SEQ ID NO: 1198916 - RNA, 19 nt, Homo sapiens
  misc_RNA (1)...(19): siRNA sense strand
agucaacagugaucucuuu

SEQ ID NO: 1198917 - RNA, 19 nt, Homo sapiens
  misc_RNA (1)...(19): siRNA sense strand
caaaguggcaaguuaugaa

SEQ ID NO: 1198918 - RNA, 19 nt, Homo sapiens
  misc_RNA (1)...(19): siRNA sense strand
aaagaugccuauacuugug

SEQ ID NO: 1198919 - RNA, 19 nt, Homo sapiens
  misc_RNA (1)...(19): siRNA sense strand
uggaaaugcuaaccuggua

SEQ ID NO: 1198920 - RNA, 19 nt, Homo sapiens
  misc_RNA (1)...(19): siRNA sense strand
ucaacacccugaacagaga

SEQ ID NO: 1198921 - RNA, 19 nt, Homo sapiens
  misc_RNA (1)...(19): siRNA sense strand
agaagaagaugagcaguuc

SEQ ID NO: 1198922 - RNA, 19 nt, Homo sapiens
  misc_RNA (1)...(19): siRNA sense strand
gagaaugcagaacguuuaa

SEQ ID NO: 1198923 - RNA, 19 nt, Homo sapiens
  misc_RNA (1)...(19): siRNA sense strand
agacaugaaugaaggacaa

SEQ ID NO: 1198924 - RNA, 19 nt, Homo sapiens
  misc_RNA (1)...(19): siRNA sense strand
gaaaagcuguuccccuguu

SEQ ID NO: 1198925 - RNA, 19 nt, Homo sapiens
  misc_RNA (1)...(19): siRNA sense strand
aaccugguauuuaugcuua

SEQ ID NO: 1198926 - RNA, 19 nt, Homo sapiens
  misc_RNA (1)...(19): siRNA sense strand
gcaaaguggcaaguuauga

SEQ ID NO: 1198927 - RNA, 19 nt, Homo sapiens
  misc_RNA (1)...(19): siRNA sense strand
aggagucucugguggauaa

SEQ ID NO: 1198928 - RNA, 19 nt, Homo sapiens
  misc_RNA (1)...(19): siRNA sense strand
caaagaugccuauacuugu

SEQ ID NO: 1198929 - RNA, 19 nt, Homo sapiens
  misc_RNA (1)...(19): siRNA sense strand
agaaagugcgucucaauga

SEQ ID NO: 1198930 - RNA, 19 nt, Homo sapiens
  misc_RNA (1)...(19): siRNA sense strand
cuaaagacaaggagaaaga

SEQ ID NO: 1198931 - RNA, 19 nt, Homo sapiens
  misc_RNA (1)...(19): siRNA sense strand
gaaguacaucuuugcauca

SEQ ID NO: 1198932 - RNA, 19 nt, Homo sapiens
  misc_RNA (1)...(19): siRNA sense strand
ggaugugauuggagcugua

SEQ ID NO: 1198933 - RNA, 19 nt, Homo sapiens
  misc_RNA (1)...(19): siRNA sense strand
gaaugaaggacaacuacug

SEQ ID NO: 1198934 - RNA, 19 nt, Homo sapiens
  misc_RNA (1)...(19): siRNA sense strand
gaaauuccugucucauuca

SEQ ID NO: 1198935 - RNA, 19 nt, Homo sapiens
  misc_RNA (1)...(19): siRNA sense strand
ucauuggacucagaacuuu

SEQ ID NO: 1198936 - RNA, 19 nt, Homo sapiens
  misc_RNA (1)...(19): siRNA sense strand
uaacucagcggauuaccaa

SEQ ID NO: 1198937 - RNA, 19 nt, Homo sapiens
  misc_RNA (1)...(19): siRNA sense strand
acagauagcaagucaauca

SEQ ID NO: 1198938 - RNA, 19 nt, Homo sapiens
  misc_RNA (1)...(19): siRNA sense strand
augcuaaccugguauuuau

SEQ ID NO: 1198939 - RNA, 19 nt, Homo sapiens
  misc_RNA (1)...(19): siRNA sense strand
uaaaugagguggagauccu

SEQ ID NO: 1198940 - RNA, 19 nt, Homo sapiens
  misc_RNA (1)...(19): siRNA sense strand
gcaagaagagcaaagaaaa

SEQ ID NO: 1198941 - RNA, 19 nt, Homo sapiens
  misc_RNA (1)...(19): siRNA sense strand
gugcaaaggucaaaaugaa

SEQ ID NO: 1198942 - RNA, 19 nt, Homo sapiens
  misc_RNA (1)...(19): siRNA sense strand
auaccaagcugaugaggau

SEQ ID NO: 1198943 - RNA, 19 nt, Homo sapiens
  misc_RNA (1)...(19): siRNA sense strand
gaucuuaggagaacggaau

SEQ ID NO: 1198944 - RNA, 19 nt, Homo sapiens
  misc_RNA (1)...(19): siRNA sense strand
ggagauccuucaggguuug

SEQ ID NO: 1198945 - RNA, 19 nt, Homo sapiens
  misc_RNA (1)...(19): siRNA sense strand
aagaugagcaguucaguug

SEQ ID NO: 1198946 - RNA, 19 nt, Homo sapiens
  misc_RNA (1)...(19): siRNA sense strand
agaaagauguggucaaacg

SEQ ID NO: 1198947 - RNA, 19 nt, Homo sapiens
  misc_RNA (1)...(19): siRNA sense strand
gaugauggcggaucugcuu

SEQ ID NO: 1198948 - RNA, 19 nt, Homo sapiens
  misc_RNA (1)...(19): siRNA sense strand
cccaguaccucgaggagaa

SEQ ID NO: 1198949 - RNA, 19 nt, Homo sapiens
  misc_RNA (1)...(19): siRNA sense strand
gaugggaguguguuucuga

SEQ ID NO: 1198950 - RNA, 19 nt, Homo sapiens
  misc_RNA (1)...(19): siRNA sense strand
ucagauguuugccaaggaa

SEQ ID NO: 1198951 - RNA, 19 nt, Homo sapiens
  misc_RNA (1)...(19): siRNA sense strand
gaaugcagaacguuuaaag

SEQ ID NO: 1198952 - RNA, 19 nt, Homo sapiens
  misc_RNA (1)...(19): siRNA sense strand
gcgcggagcugucuaguga

SEQ ID NO: 1198953 - RNA, 19 nt, Homo sapiens
  misc_RNA (1)...(19): siRNA sense strand
gaacaucucuuucaaugac

SEQ ID NO: 1198954 - RNA, 19 nt, Homo sapiens
  misc_RNA (1)...(19): siRNA sense strand
gaaggcaccugacuuugug

SEQ ID NO: 1198955 - RNA, 19 nt, Homo sapiens
  misc_RNA (1)...(19): siRNA sense strand
gcucaaagauaaugcuaug

SEQ ID NO: 1198956 - RNA, 19 nt, Homo sapiens
  misc_RNA (1)...(19): siRNA sense strand
ggcaacagcuggaaacaga

SEQ ID NO: 1198957 - RNA, 19 nt, Homo sapiens
  misc_RNA (1)...(19): siRNA sense strand
caagaaggcaccugacuuu

SEQ ID NO: 1198958 - RNA, 19 nt, Homo sapiens
  misc_RNA (1)...(19): siRNA sense strand
caaagauaaugcuauguug

SEQ ID NO: 1198959 - RNA, 19 nt, Homo sapiens
  misc_RNA (1)...(19): siRNA sense strand
caaggaggaugaaguugaa

SEQ ID NO: 1198960 - RNA, 19 nt, Homo sapiens
  misc_RNA (1)...(19): siRNA sense strand
ggaaauguauggaaucaac

SEQ ID NO: 1198961 - RNA, 19 nt, Homo sapiens
  misc_RNA (1)...(19): siRNA sense strand
gcaaggaggaugaaguuga

SEQ ID NO: 1198962 - RNA, 19 nt, Homo sapiens
  misc_RNA (1)...(19): siRNA sense strand
ggcugaagcuggauaagaa

SEQ ID NO: 1198963 - RNA, 19 nt, Homo sapiens
  misc_RNA (1)...(19): siRNA sense strand
ccaaagaagcccaggauga

SEQ ID NO: 1198964 - RNA, 19 nt, Homo sapiens
  misc_RNA (1)...(19): siRNA sense strand
gugggaugcucaaagauaa

SEQ ID NO: 1198965 - RNA, 19 nt, Homo sapiens
  misc_RNA (1)...(19): siRNA sense strand
acaaagaagugcacaaguc

SEQ ID NO: 1198966 - RNA, 19 nt, Homo sapiens
  misc_RNA (1)...(19): siRNA sense strand
ggacaucacccagaaacuu

SEQ ID NO: 1198967 - RNA, 19 nt, Homo sapiens
  misc_RNA (1)...(19): siRNA sense strand
gcccuuggacugaauauuu

SEQ ID NO: 1198968 - RNA, 19 nt, Homo sapiens
  misc_RNA (1)...(19): siRNA sense strand
caaagaaggcagagagaga

SEQ ID NO: 1198969 - RNA, 19 nt, Homo sapiens
  misc_RNA (1)...(19): siRNA sense strand
ggacugaauauuuaugaga

SEQ ID NO: 1198970 - RNA, 19 nt, Homo sapiens
  misc_RNA (1)...(19): siRNA sense strand
ggagugaaaucaggaacau

SEQ ID NO: 1198971 - RNA, 19 nt, Homo sapiens
  misc_RNA (1)...(19): siRNA sense strand
caagauugcccuccuggaa

SEQ ID NO: 1198972 - RNA, 19 nt, Homo sapiens
  misc_RNA (1)...(19): siRNA sense strand
cccuuggacugaauauuua

SEQ ID NO: 1198973 - RNA, 19 nt, Homo sapiens
  misc_RNA (1)...(19): siRNA sense strand
aggaacaucucuuucaaug

SEQ ID NO: 1198974 - RNA, 19 nt, Homo sapiens
  misc_RNA (1)...(19): siRNA sense strand
ucaggaacaucucuuucaa

SEQ ID NO: 1198975 - RNA, 19 nt, Homo sapiens
  misc_RNA (1)...(19): siRNA sense strand
aagauuggcuuuccuugga

SEQ ID NO: 1198976 - RNA, 19 nt, Homo sapiens
  misc_RNA (1)...(19): siRNA sense strand
gaucaggugguaaagacua

SEQ ID NO: 1198977 - RNA, 19 nt, Homo sapiens
  misc_RNA (1)...(19): siRNA sense strand
uuaaacccaucgacaagaa

SEQ ID NO: 1198978 - RNA, 19 nt, Homo sapiens
  misc_RNA (1)...(19): siRNA sense strand
gacaucacccagaaacuuu

SEQ ID NO: 1198979 - RNA, 19 nt, Homo sapiens
  misc_RNA (1)...(19): siRNA sense strand
ccaaucaauguccgaguua

SEQ ID NO: 1198980 - RNA, 19 nt, Homo sapiens
  misc_RNA (1)...(19): siRNA sense strand
guucuacccugaagaugug

SEQ ID NO: 1198981 - RNA, 19 nt, Homo sapiens
  misc_RNA (1)...(19): siRNA sense strand
ucacugaggcagagaagaa

SEQ ID NO: 1198982 - RNA, 19 nt, Homo sapiens
  misc_RNA (1)...(19): siRNA sense strand
gcgcaaggaggaugaaguu

SEQ ID NO: 1198983 - RNA, 19 nt, Homo sapiens
  misc_RNA (1)...(19): siRNA sense strand
uggaauaccugaagauugc

SEQ ID NO: 1198984 - RNA, 19 nt, Homo sapiens
  misc_RNA (1)...(19): siRNA sense strand
ggacuacaacaaagaagug

SEQ ID NO: 1198985 - RNA, 19 nt, Homo sapiens
  misc_RNA (1)...(19): siRNA sense strand
ccuagaggcugaccguaug

SEQ ID NO: 1198986 - RNA, 19 nt, Homo sapiens
  misc_RNA (1)...(19): siRNA sense strand
gcaauccagccaaauacaa

SEQ ID NO: 1198987 - RNA, 19 nt, Homo sapiens
  misc_RNA (1)...(19): siRNA sense strand
gacaggcgguggaucagau

SEQ ID NO: 1198988 - RNA, 19 nt, Homo sapiens
  misc_RNA (1)...(19): siRNA sense strand
caacaaagaagugcacaag

SEQ ID NO: 1198989 - RNA, 19 nt, Homo sapiens
  misc_RNA (1)...(19): siRNA sense strand
gggaggagaagcaucagaa

SEQ ID NO: 1198990 - RNA, 19 nt, Homo sapiens
  misc_RNA (1)...(19): siRNA sense strand
gaaaucaggaacaucucuu

SEQ ID NO: 1198991 - RNA, 19 nt, Homo sapiens
  misc_RNA (1)...(19): siRNA sense strand
guacuuuggccuccacuau

SEQ ID NO: 1198992 - RNA, 19 nt, Homo sapiens
  misc_RNA (1)...(19): siRNA sense strand
aggaggagcuggagagaca

SEQ ID NO: 1198993 - RNA, 19 nt, Homo sapiens
  misc_RNA (1)...(19): siRNA sense strand
ggaacaucucuuucaauga

SEQ ID NO: 1198994 - RNA, 19 nt, Homo sapiens
  misc_RNA (1)...(19): siRNA sense strand
auaagaggacccacaauga

SEQ ID NO: 1198995 - RNA, 19 nt, Homo sapiens
  misc_RNA (1)...(19): siRNA sense strand
caaagaagugcacaagucu

SEQ ID NO: 1198996 - RNA, 19 nt, Homo sapiens
  misc_RNA (1)...(19): siRNA sense strand
cgaguucgaggcccuguaa

SEQ ID NO: 1198997 - RNA, 19 nt, Homo sapiens
  misc_RNA (1)...(19): siRNA sense strand
cgugggaugcucaaagaua

SEQ ID NO: 1198998 - RNA, 19 nt, Homo sapiens
  misc_RNA (1)...(19): siRNA sense strand
gcaccugacuuuguguuuu

SEQ ID NO: 1198999 - RNA, 19 nt, Homo sapiens
  misc_RNA (1)...(19): siRNA sense strand
cuauguggauaauaaagga

SEQ ID NO: 1199000 - RNA, 19 nt, Homo sapiens
  misc_RNA (1)...(19): siRNA sense strand
gcaggacuaugaggagaag

SEQ ID NO: 1199001 - RNA, 19 nt, Homo sapiens
  misc_RNA (1)...(19): siRNA sense strand
caacagcuggaaacagaga

SEQ ID NO: 1199002 - RNA, 19 nt, Homo sapiens
  misc_RNA (1)...(19): siRNA sense strand
caccugacuuuguguuuua

SEQ ID NO: 1199003 - RNA, 19 nt, Homo sapiens
  misc_RNA (1)...(19): siRNA sense strand
uaaguuaaccccaaagauu

SEQ ID NO: 1199004 - RNA, 19 nt, Homo sapiens
  misc_RNA (1)...(19): siRNA sense strand
caaguucuacccugaagau

SEQ ID NO: 1199005 - RNA, 19 nt, Homo sapiens
  misc_RNA (1)...(19): siRNA sense strand
gaaagaugauaaguuaacc

SEQ ID NO: 1199006 - RNA, 19 nt, Homo sapiens
  misc_RNA (1)...(19): siRNA sense strand
aauaagaggacccacaaug

SEQ ID NO: 1199007 - RNA, 19 nt, Homo sapiens
  misc_RNA (1)...(19): siRNA sense strand
gagcggcugaucccucaaa

SEQ ID NO: 1199008 - RNA, 19 nt, Homo sapiens
  misc_RNA (1)...(19): siRNA sense strand
caaagaagcccaggaugac

SEQ ID NO: 1199009 - RNA, 19 nt, Homo sapiens
  misc_RNA (1)...(19): siRNA sense strand
agauugcccuccuggaaga

SEQ ID NO: 1199010 - RNA, 19 nt, Homo sapiens
  misc_RNA (1)...(19): siRNA sense strand
gagaagaaaaggagagaaa

SEQ ID NO: 1199011 - RNA, 19 nt, Homo sapiens
  misc_RNA (1)...(19): siRNA sense strand
gcuggaaacagagaagaaa

SEQ ID NO: 1199012 - RNA, 19 nt, Homo sapiens
  misc_RNA (1)...(19): siRNA sense strand
ucauuaaacccaucgacaa

SEQ ID NO: 1199013 - RNA, 19 nt, Homo sapiens
  misc_RNA (1)...(19): siRNA sense strand
aggagaagcgcaucacuga

SEQ ID NO: 1199014 - RNA, 19 nt, Homo sapiens
  misc_RNA (1)...(19): siRNA sense strand
gacaaagaaggcagagaga

SEQ ID NO: 1199015 - RNA, 19 nt, Homo sapiens
  misc_RNA (1)...(19): siRNA sense strand
augcagagcuggaguuugc

SEQ ID NO: 1199016 - RNA, 19 nt, Homo sapiens
  misc_RNA (1)...(19): siRNA sense strand
agaauaagaggacccacaa

SEQ ID NO: 1199017 - RNA, 19 nt, Homo sapiens
  misc_RNA (1)...(19): siRNA sense strand
gauaaugcuauguuggaau

SEQ ID NO: 1199018 - RNA, 19 nt, Homo sapiens
  misc_RNA (1)...(19): siRNA sense strand
gaauaagaggacccacaau

SEQ ID NO: 1199019 - RNA, 19 nt, Homo sapiens
  misc_RNA (1)...(19): siRNA sense strand
ggaugcagagcuggaguuu

SEQ ID NO: 1199020 - RNA, 19 nt, Homo sapiens
  misc_RNA (1)...(19): siRNA sense strand
ccaucgaggugcagcagau

SEQ ID NO: 1199021 - RNA, 19 nt, Homo sapiens
  misc_RNA (1)...(19): siRNA sense strand
agaaggcaccugacuuugu

SEQ ID NO: 1199022 - RNA, 19 nt, Homo sapiens
  misc_RNA (1)...(19): siRNA sense strand
gcgagaaggaggaguugau

SEQ ID NO: 1199023 - RNA, 19 nt, Homo sapiens
  misc_RNA (1)...(19): siRNA sense strand
uccaggacaucacccagaa

SEQ ID NO: 1199024 - RNA, 19 nt, Homo sapiens
  misc_RNA (1)...(19): siRNA sense strand
acuaugaggagaagacaaa

SEQ ID NO: 1199025 - RNA, 19 nt, Homo sapiens
  misc_RNA (1)...(19): siRNA sense strand
gccaaguucuacccugaag

SEQ ID NO: 1199026 - RNA, 19 nt, Homo sapiens
  misc_RNA (1)...(19): siRNA sense strand
gcagcacagggccaaagaa

SEQ ID NO: 1199027 - RNA, 19 nt, Homo sapiens
  misc_RNA (1)...(19): siRNA sense strand
uggcugcacugcgggcuaa

SEQ ID NO: 1199028 - RNA, 19 nt, Homo sapiens
  misc_RNA (1)...(19): siRNA sense strand
gagcggcaacagcuggaaa

SEQ ID NO: 1199029 - RNA, 19 nt, Homo sapiens
  misc_RNA (1)...(19): siRNA sense strand
aaccaugaguuguauaugc

SEQ ID NO: 1199030 - RNA, 19 nt, Homo sapiens
  misc_RNA (1)...(19): siRNA sense strand
gaccuggaaauguauggaa

SEQ ID NO: 1199031 - RNA, 19 nt, Homo sapiens
  misc_RNA (1)...(19): siRNA sense strand
agauaaugcuauguuggaa

SEQ ID NO: 1199032 - RNA, 19 nt, Homo sapiens
  misc_RNA (1)...(19): siRNA sense strand
aagauaaugcuauguugga

SEQ ID NO: 1199033 - RNA, 19 nt, Homo sapiens
  misc_RNA (1)...(19): siRNA sense strand
aaaucaggaacaucucuuu

SEQ ID NO: 1199034 - RNA, 19 nt, Homo sapiens
  misc_RNA (1)...(19): siRNA sense strand
aggaugaccuggugaagac

SEQ ID NO: 1199035 - RNA, 19 nt, Homo sapiens
  misc_RNA (1)...(19): siRNA sense strand
ggccaaagaagcccaggau

SEQ ID NO: 1199036 - RNA, 19 nt, Homo sapiens
  misc_RNA (1)...(19): siRNA sense strand
agagacaggcgguggauca

SEQ ID NO: 1199037 - RNA, 19 nt, Homo sapiens
  misc_RNA (1)...(19): siRNA sense strand
acaagaaggcaccugacuu

SEQ ID NO: 1199038 - RNA, 19 nt, Homo sapiens
  misc_RNA (1)...(19): siRNA sense strand
accaaucaauguccgaguu

SEQ ID NO: 1199039 - RNA, 19 nt, Homo sapiens
  misc_RNA (1)...(19): siRNA sense strand
gcagagcuggaguuugcaa

SEQ ID NO: 1199040 - RNA, 19 nt, Homo sapiens
  misc_RNA (1)...(19): siRNA sense strand
uaagaggacccacaaugac

SEQ ID NO: 1199041 - RNA, 19 nt, Homo sapiens
  misc_RNA (1)...(19): siRNA sense strand
cccaggaggucaggaagga

SEQ ID NO: 1199042 - RNA, 19 nt, Homo sapiens
  misc_RNA (1)...(19): siRNA sense strand
gagcucauccaggacauca

SEQ ID NO: 1199043 - RNA, 19 nt, Homo sapiens
  misc_RNA (1)...(19): siRNA sense strand
gagcuggaguuugcaaucc

SEQ ID NO: 1199044 - RNA, 19 nt, Homo sapiens
  misc_RNA (1)...(19): siRNA sense strand
guugaugcccuuggacuga

SEQ ID NO: 1199045 - RNA, 19 nt, Homo sapiens
  misc_RNA (1)...(19): siRNA sense strand
gauggaccagcacaaacuu

SEQ ID NO: 1199046 - RNA, 19 nt, Homo sapiens
  misc_RNA (1)...(19): siRNA sense strand
cggcugaucccucaaagag

SEQ ID NO: 1199047 - RNA, 19 nt, Homo sapiens
  misc_RNA (1)...(19): siRNA sense strand
ggcccgagaugagaauaag

SEQ ID NO: 1199048 - RNA, 19 nt, Homo sapiens
  misc_RNA (1)...(19): siRNA sense strand
ggaggcgcaaggaggauga

SEQ ID NO: 1199049 - RNA, 19 nt, Homo sapiens
  misc_RNA (1)...(19): siRNA sense strand
cuggaaauguauggaauca

SEQ ID NO: 1199050 - RNA, 19 nt, Homo sapiens
  misc_RNA (1)...(19): siRNA sense strand
ggaggagaagcaucagaag

SEQ ID NO: 1199051 - RNA, 19 nt, Homo sapiens
  misc_RNA (1)...(19): siRNA sense strand
ggcgguggaucagauaaag

SEQ ID NO: 1199052 - RNA, 19 nt, Homo sapiens
  misc_RNA (1)...(19): siRNA sense strand
ggacuucgauucuuuggaa

SEQ ID NO: 1199053 - RNA, 19 nt, Homo sapiens
  misc_RNA (1)...(19): siRNA sense strand
gaaguuucauggacgguuu

SEQ ID NO: 1199054 - RNA, 19 nt, Homo sapiens
  misc_RNA (1)...(19): siRNA sense strand
ggagggcagugacgcauug

SEQ ID NO: 1199055 - RNA, 19 nt, Homo sapiens
  misc_RNA (1)...(19): siRNA sense strand
ucaccacacuuaaggagaa

SEQ ID NO: 1199056 - RNA, 19 nt, Homo sapiens
  misc_RNA (1)...(19): siRNA sense strand
aagaggaccuggacccuau

SEQ ID NO: 1199057 - RNA, 19 nt, Homo sapiens
  misc_RNA (1)...(19): siRNA sense strand
uggaggacuucgauucuuu

SEQ ID NO: 1199058 - RNA, 19 nt, Homo sapiens
  misc_RNA (1)...(19): siRNA sense strand
auaaugagguucuggagau

SEQ ID NO: 1199059 - RNA, 19 nt, Homo sapiens
  misc_RNA (1)...(19): siRNA sense strand
uggcaugacugacucugaa

SEQ ID NO: 1199060 - RNA, 19 nt, Homo sapiens
  misc_RNA (1)...(19): siRNA sense strand
acacuuaaggagaacauaa

SEQ ID NO: 1199061 - RNA, 19 nt, Homo sapiens
  misc_RNA (1)...(19): siRNA sense strand
gacgguuucaccacacuua

SEQ ID NO: 1199062 - RNA, 19 nt, Homo sapiens
  misc_RNA (1)...(19): siRNA sense strand
ggaggacuucgauucuuug

SEQ ID NO: 1199063 - RNA, 19 nt, Homo sapiens
  misc_RNA (1)...(19): siRNA sense strand
gggucuggcuuucaucuac

SEQ ID NO: 1199064 - RNA, 19 nt, Homo sapiens
  misc_RNA (1)...(19): siRNA sense strand
aggagaacauaaugagguu

SEQ ID NO: 1199065 - RNA, 19 nt, Homo sapiens
  misc_RNA (1)...(19): siRNA sense strand
cgaccagacugaggacauc

SEQ ID NO: 1199066 - RNA, 19 nt, Homo sapiens
  misc_RNA (1)...(19): siRNA sense strand
gcaccugcugcucaaguga

SEQ ID NO: 1199067 - RNA, 19 nt, Homo sapiens
  misc_RNA (1)...(19): siRNA sense strand
gcaugacugacucugaaga

SEQ ID NO: 1199068 - RNA, 19 nt, Homo sapiens
  misc_RNA (1)...(19): siRNA sense strand
uuaaggagaacauaaugag

SEQ ID NO: 1199069 - RNA, 19 nt, Homo sapiens
  misc_RNA (1)...(19): siRNA sense strand
uaaugagguucuggagauc

SEQ ID NO: 1199070 - RNA, 19 nt, Homo sapiens
  misc_RNA (1)...(19): siRNA sense strand
ggagguucuuggcaugacu

SEQ ID NO: 1199071 - RNA, 19 nt, Homo sapiens
  misc_RNA (1)...(19): siRNA sense strand
cuuaaggagaacauaauga

SEQ ID NO: 1199072 - RNA, 19 nt, Homo sapiens
  misc_RNA (1)...(19): siRNA sense strand
cgaaagagcucauaaagug

SEQ ID NO: 1199073 - RNA, 19 nt, Homo sapiens
  misc_RNA (1)...(19): siRNA sense strand
ccacauagaucccuuccaa

SEQ ID NO: 1199074 - RNA, 19 nt, Homo sapiens
  misc_RNA (1)...(19): siRNA sense strand
uagcagcuguggaaauuua

SEQ ID NO: 1199075 - RNA, 19 nt, Homo sapiens
  misc_RNA (1)...(19): siRNA sense strand
gaacccaccugauguugau

SEQ ID NO: 1199076 - RNA, 19 nt, Homo sapiens
  misc_RNA (1)...(19): siRNA sense strand
uauagcagcuguggaaauu

SEQ ID NO: 1199077 - RNA, 19 nt, Homo sapiens
  misc_RNA (1)...(19): siRNA sense strand
ggacagaugcucgguuaaa

SEQ ID NO: 1199078 - RNA, 19 nt, Homo sapiens
  misc_RNA (1)...(19): siRNA sense strand
gaagaacccaccugauguu

SEQ ID NO: 1199079 - RNA, 19 nt, Homo sapiens
  misc_RNA (1)...(19): siRNA sense strand
ugggacagaugcucgguua

SEQ ID NO: 1199080 - RNA, 19 nt, Homo sapiens
  misc_RNA (1)...(19): siRNA sense strand
gaccugagcaguuuguauu

SEQ ID NO: 1199081 - RNA, 19 nt, Homo sapiens
  misc_RNA (1)...(19): siRNA sense strand
uaacagugaccuggaauuu

SEQ ID NO: 1199082 - RNA, 19 nt, Homo sapiens
  misc_RNA (1)...(19): siRNA sense strand
aggaaaggcucaaccaaga

SEQ ID NO: 1199083 - RNA, 19 nt, Homo sapiens
  misc_RNA (1)...(19): siRNA sense strand
gaaaggcucaaccaagaga

SEQ ID NO: 1199084 - RNA, 19 nt, Homo sapiens
  misc_RNA (1)...(19): siRNA sense strand
auaaagugguggagauaaa

SEQ ID NO: 1199085 - RNA, 19 nt, Homo sapiens
  misc_RNA (1)...(19): siRNA sense strand
ucacagcucuuuggccuau

SEQ ID NO: 1199086 - RNA, 19 nt, Homo sapiens
  misc_RNA (1)...(19): siRNA sense strand
gugaagaacccaccugaug

SEQ ID NO: 1199087 - RNA, 19 nt, Homo sapiens
  misc_RNA (1)...(19): siRNA sense strand
ggucucuguuuauuuagaa

SEQ ID NO: 1199088 - RNA, 19 nt, Homo sapiens
  misc_RNA (1)...(19): siRNA sense strand
gcagcuguggaaauuuaua

SEQ ID NO: 1199089 - RNA, 19 nt, Homo sapiens
  misc_RNA (1)...(19): siRNA sense strand
ugaagaacccaccugaugu

SEQ ID NO: 1199090 - RNA, 19 nt, Homo sapiens
  misc_RNA (1)...(19): siRNA sense strand
uguauucuacuaccacaua

SEQ ID NO: 1199091 - RNA, 19 nt, Homo sapiens
  misc_RNA (1)...(19): siRNA sense strand
cugagcaguuuguauucua

SEQ ID NO: 1199092 - RNA, 19 nt, Homo sapiens
  misc_RNA (1)...(19): siRNA sense strand
uuaaggaccgggugucuug

SEQ ID NO: 1199093 - RNA, 19 nt, Homo sapiens
  misc_RNA (1)...(19): siRNA sense strand
ggaccugagcaguuuguau

SEQ ID NO: 1199094 - RNA, 19 nt, Homo sapiens
  misc_RNA (1)...(19): siRNA sense strand
ggugaugcucuaacaguga

SEQ ID NO: 1199095 - RNA, 19 nt, Homo sapiens
  misc_RNA (1)...(19): siRNA sense strand
cauaaagugguggagauaa

SEQ ID NO: 1199096 - RNA, 19 nt, Homo sapiens
  misc_RNA (1)...(19): siRNA sense strand
gccuauagcagcuguggaa

SEQ ID NO: 1199097 - RNA, 19 nt, Homo sapiens
  misc_RNA (1)...(19): siRNA sense strand
ugagugggcgguuuaagga

SEQ ID NO: 1199098 - RNA, 19 nt, Homo sapiens
  misc_RNA (1)...(19): siRNA sense strand
gugguccucuuccagcauu

SEQ ID NO: 1199099 - RNA, 19 nt, Homo sapiens
  misc_RNA (1)...(19): siRNA sense strand
gacagaugcucgguuaaaa

SEQ ID NO: 1199100 - RNA, 19 nt, Homo sapiens
  misc_RNA (1)...(19): siRNA sense strand
ucauaaagugguggagaua

SEQ ID NO: 1199101 - RNA, 19 nt, Homo sapiens
  misc_RNA (1)...(19): siRNA sense strand
gccgaaagagcucauaaag

SEQ ID NO: 1199102 - RNA, 19 nt, Homo sapiens
  misc_RNA (1)...(19): siRNA sense strand
ggccgaaagagcucauaaa

SEQ ID NO: 1199103 - RNA, 19 nt, Homo sapiens
  misc_RNA (1)...(19): siRNA sense strand
cgacgacaaugggacauac

SEQ ID NO: 1199104 - RNA, 19 nt, Homo sapiens
  misc_RNA (1)...(19): siRNA sense strand
acagugaccuggaauuuuc

SEQ ID NO: 1199105 - RNA, 19 nt, Homo sapiens
  misc_RNA (1)...(19): siRNA sense strand
ggaaaggcucaaccaagag

SEQ ID NO: 1199106 - RNA, 19 nt, Homo sapiens
  misc_RNA (1)...(19): siRNA sense strand
gggccgaaagagcucauaa

SEQ ID NO: 1199107 - RNA, 19 nt, Homo sapiens
  misc_RNA (1)...(19): siRNA sense strand
ccgaaagagcucauaaagu

SEQ ID NO: 1199108 - RNA, 19 nt, Homo sapiens
  misc_RNA (1)...(19): siRNA sense strand
guauucuacuaccacauag

SEQ ID NO: 1199109 - RNA, 19 nt, Homo sapiens
  misc_RNA (1)...(19): siRNA sense strand
acacuguacgcuucucuga

SEQ ID NO: 1199110 - RNA, 19 nt, Homo sapiens
  misc_RNA (1)...(19): siRNA sense strand
aaagcgaugggccgaaaga

SEQ ID NO: 1199111 - RNA, 19 nt, Homo sapiens
  misc_RNA (1)...(19): siRNA sense strand
cucauaaagugguggagau

SEQ ID NO: 1199112 - RNA, 19 nt, Homo sapiens
  misc_RNA (1)...(19): siRNA sense strand
cgaaagagcucauaaagug

SEQ ID NO: 1199113 - RNA, 19 nt, Homo sapiens
  misc_RNA (1)...(19): siRNA sense strand
ccacauagaucccuuccaa

SEQ ID NO: 1199114 - RNA, 19 nt, Homo sapiens
  misc_RNA (1)...(19): siRNA sense strand
uagcagcuguggaaauuua

SEQ ID NO: 1199115 - RNA, 19 nt, Homo sapiens
  misc_RNA (1)...(19): siRNA sense strand
gaacccaccugauguugau

SEQ ID NO: 1199116 - RNA, 19 nt, Homo sapiens
  misc_RNA (1)...(19): siRNA sense strand
uauagcagcuguggaaauu

SEQ ID NO: 1199117 - RNA, 19 nt, Homo sapiens
  misc_RNA (1)...(19): siRNA sense strand
ggacagaugcucgguuaaa

SEQ ID NO: 1199118 - RNA, 19 nt, Homo sapiens
  misc_RNA (1)...(19): siRNA sense strand
gaagaacccaccugauguu

SEQ ID NO: 1199119 - RNA, 19 nt, Homo sapiens
  misc_RNA (1)...(19): siRNA sense strand
ugggacagaugcucgguua

SEQ ID NO: 1199120 - RNA, 19 nt, Homo sapiens
  misc_RNA (1)...(19): siRNA sense strand
gaccugagcaguuuguauu

SEQ ID NO: 1199121 - RNA, 19 nt, Homo sapiens
  misc_RNA (1)...(19): siRNA sense strand
uaacagugaccuggaauuu

SEQ ID NO: 1199122 - RNA, 19 nt, Homo sapiens
  misc_RNA (1)...(19): siRNA sense strand
aggaaaggcucaaccaaga

SEQ ID NO: 1199123 - RNA, 19 nt, Homo sapiens
  misc_RNA (1)...(19): siRNA sense strand
gaaaggcucaaccaagaga

SEQ ID NO: 1199124 - RNA, 19 nt, Homo sapiens
  misc_RNA (1)...(19): siRNA sense strand
auaaagugguggagauaaa

SEQ ID NO: 1199125 - RNA, 19 nt, Homo sapiens
  misc_RNA (1)...(19): siRNA sense strand
ucacagcucuuuggccuau

SEQ ID NO: 1199126 - RNA, 19 nt, Homo sapiens
  misc_RNA (1)...(19): siRNA sense strand
gugaagaacccaccugaug

SEQ ID NO: 1199127 - RNA, 19 nt, Homo sapiens
  misc_RNA (1)...(19): siRNA sense strand
ggucucuguuuauuuagaa

SEQ ID NO: 1199128 - RNA, 19 nt, Homo sapiens
  misc_RNA (1)...(19): siRNA sense strand
gcagcuguggaaauuuaua

SEQ ID NO: 1199129 - RNA, 19 nt, Homo sapiens
  misc_RNA (1)...(19): siRNA sense strand
ugaagaacccaccugaugu

SEQ ID NO: 1199130 - RNA, 19 nt, Homo sapiens
  misc_RNA (1)...(19): siRNA sense strand
uguauucuacuaccacaua

SEQ ID NO: 1199131 - RNA, 19 nt, Homo sapiens
  misc_RNA (1)...(19): siRNA sense strand
cugagcaguuuguauucua

SEQ ID NO: 1199132 - RNA, 19 nt, Homo sapiens
  misc_RNA (1)...(19): siRNA sense strand
uuaaggaccgggugucuug

SEQ ID NO: 1199133 - RNA, 19 nt, Homo sapiens
  misc_RNA (1)...(19): siRNA sense strand
ggaccugagcaguuuguau

SEQ ID NO: 1199134 - RNA, 19 nt, Homo sapiens
  misc_RNA (1)...(19): siRNA sense strand
ggugaugcucuaacaguga

SEQ ID NO: 1199135 - RNA, 19 nt, Homo sapiens
  misc_RNA (1)...(19): siRNA sense strand
cauaaagugguggagauaa

SEQ ID NO: 1199136 - RNA, 19 nt, Homo sapiens
  misc_RNA (1)...(19): siRNA sense strand
gccuauagcagcuguggaa

SEQ ID NO: 1199137 - RNA, 19 nt, Homo sapiens
  misc_RNA (1)...(19): siRNA sense strand
ugagugggcgguuuaagga

SEQ ID NO: 1199138 - RNA, 19 nt, Homo sapiens
  misc_RNA (1)...(19): siRNA sense strand
gugguccucuuccagcauu

SEQ ID NO: 1199139 - RNA, 19 nt, Homo sapiens
  misc_RNA (1)...(19): siRNA sense strand
gacagaugcucgguuaaaa

SEQ ID NO: 1199140 - RNA, 19 nt, Homo sapiens
  misc_RNA (1)...(19): siRNA sense strand
ucauaaagugguggagaua

SEQ ID NO: 1199141 - RNA, 19 nt, Homo sapiens
  misc_RNA (1)...(19): siRNA sense strand
gccgaaagagcucauaaag

SEQ ID NO: 1199142 - RNA, 19 nt, Homo sapiens
  misc_RNA (1)...(19): siRNA sense strand
ggccgaaagagcucauaaa

SEQ ID NO: 1199143 - RNA, 19 nt, Homo sapiens
  misc_RNA (1)...(19): siRNA sense strand
cgacgacaaugggacauac

SEQ ID NO: 1199144 - RNA, 19 nt, Homo sapiens
  misc_RNA (1)...(19): siRNA sense strand
acagugaccuggaauuuuc

SEQ ID NO: 1199145 - RNA, 19 nt, Homo sapiens
  misc_RNA (1)...(19): siRNA sense strand
ggaaaggcucaaccaagag

SEQ ID NO: 1199146 - RNA, 19 nt, Homo sapiens
  misc_RNA (1)...(19): siRNA sense strand
gggccgaaagagcucauaa

SEQ ID NO: 1199147 - RNA, 19 nt, Homo sapiens
  misc_RNA (1)...(19): siRNA sense strand
ccgaaagagcucauaaagu

SEQ ID NO: 1199148 - RNA, 19 nt, Homo sapiens
  misc_RNA (1)...(19): siRNA sense strand
guauucuacuaccacauag

SEQ ID NO: 1199149 - RNA, 19 nt, Homo sapiens
  misc_RNA (1)...(19): siRNA sense strand
acacuguacgcuucucuga

SEQ ID NO: 1199150 - RNA, 19 nt, Homo sapiens
  misc_RNA (1)...(19): siRNA sense strand
aaagcgaugggccgaaaga

SEQ ID NO: 1199151 - RNA, 19 nt, Homo sapiens
  misc_RNA (1)...(19): siRNA sense strand
cucauaaagugguggagau

SEQ ID NO: 1199152 - RNA, 19 nt, Homo sapiens
  misc_RNA (1)...(19): siRNA sense strand
cgaaagagcucauaaagug

SEQ ID NO: 1199153 - RNA, 19 nt, Homo sapiens
  misc_RNA (1)...(19): siRNA sense strand
ccacauagaucccuuccaa

SEQ ID NO: 1199154 - RNA, 19 nt, Homo sapiens
  misc_RNA (1)...(19): siRNA sense strand
uagcagcuguggaaauuua

SEQ ID NO: 1199155 - RNA, 19 nt, Homo sapiens
  misc_RNA (1)...(19): siRNA sense strand
gaacccaccugauguugau

SEQ ID NO: 1199156 - RNA, 19 nt, Homo sapiens
  misc_RNA (1)...(19): siRNA sense strand
uauagcagcuguggaaauu

SEQ ID NO: 1199157 - RNA, 19 nt, Homo sapiens
  misc_RNA (1)...(19): siRNA sense strand
ggacagaugcucgguuaaa

SEQ ID NO: 1199158 - RNA, 19 nt, Homo sapiens
  misc_RNA (1)...(19): siRNA sense strand
gaagaacccaccugauguu

SEQ ID NO: 1199159 - RNA, 19 nt, Homo sapiens
  misc_RNA (1)...(19): siRNA sense strand
ugggacagaugcucgguua

SEQ ID NO: 1199160 - RNA, 19 nt, Homo sapiens
  misc_RNA (1)...(19): siRNA sense strand
gaccugagcaguuuguauu

SEQ ID NO: 1199161 - RNA, 19 nt, Homo sapiens
  misc_RNA (1)...(19): siRNA sense strand
uaacagugaccuggaauuu

SEQ ID NO: 1199162 - RNA, 19 nt, Homo sapiens
  misc_RNA (1)...(19): siRNA sense strand
aggaaaggcucaaccaaga

SEQ ID NO: 1199163 - RNA, 19 nt, Homo sapiens
  misc_RNA (1)...(19): siRNA sense strand
gaaaggcucaaccaagaga

SEQ ID NO: 1199164 - RNA, 19 nt, Homo sapiens
  misc_RNA (1)...(19): siRNA sense strand
auaaagugguggagauaaa

SEQ ID NO: 1199165 - RNA, 19 nt, Homo sapiens
  misc_RNA (1)...(19): siRNA sense strand
ucacagcucuuuggccuau

SEQ ID NO: 1199166 - RNA, 19 nt, Homo sapiens
  misc_RNA (1)...(19): siRNA sense strand
gugaagaacccaccugaug

SEQ ID NO: 1199167 - RNA, 19 nt, Homo sapiens
  misc_RNA (1)...(19): siRNA sense strand
ggucucuguuuauuuagaa

SEQ ID NO: 1199168 - RNA, 19 nt, Homo sapiens
  misc_RNA (1)...(19): siRNA sense strand
gcagcuguggaaauuuaua

SEQ ID NO: 1199169 - RNA, 19 nt, Homo sapiens
  misc_RNA (1)...(19): siRNA sense strand
ugaagaacccaccugaugu

SEQ ID NO: 1199170 - RNA, 19 nt, Homo sapiens
  misc_RNA (1)...(19): siRNA sense strand
uguauucuacuaccacaua

SEQ ID NO: 1199171 - RNA, 19 nt, Homo sapiens
  misc_RNA (1)...(19): siRNA sense strand
cugagcaguuuguauucua

SEQ ID NO: 1199172 - RNA, 19 nt, Homo sapiens
  misc_RNA (1)...(19): siRNA sense strand
uuaaggaccgggugucuug

SEQ ID NO: 1199173 - RNA, 19 nt, Homo sapiens
  misc_RNA (1)...(19): siRNA sense strand
ggaccugagcaguuuguau

SEQ ID NO: 1199174 - RNA, 19 nt, Homo sapiens
  misc_RNA (1)...(19): siRNA sense strand
ggugaugcucuaacaguga

SEQ ID NO: 1199175 - RNA, 19 nt, Homo sapiens
  misc_RNA (1)...(19): siRNA sense strand
cauaaagugguggagauaa

SEQ ID NO: 1199176 - RNA, 19 nt, Homo sapiens
  misc_RNA (1)...(19): siRNA sense strand
gccuauagcagcuguggaa

SEQ ID NO: 1199177 - RNA, 19 nt, Homo sapiens
  misc_RNA (1)...(19): siRNA sense strand
ugagugggcgguuuaagga

SEQ ID NO: 1199178 - RNA, 19 nt, Homo sapiens
  misc_RNA (1)...(19): siRNA sense strand
gugguccucuuccagcauu

SEQ ID NO: 1199179 - RNA, 19 nt, Homo sapiens
  misc_RNA (1)...(19): siRNA sense strand
gacagaugcucgguuaaaa

SEQ ID NO: 1199180 - RNA, 19 nt, Homo sapiens
  misc_RNA (1)...(19): siRNA sense strand
ucauaaagugguggagaua

SEQ ID NO: 1199181 - RNA, 19 nt, Homo sapiens
  misc_RNA (1)...(19): siRNA sense strand
gccgaaagagcucauaaag

SEQ ID NO: 1199182 - RNA, 19 nt, Homo sapiens
  misc_RNA (1)...(19): siRNA sense strand
ggccgaaagagcucauaaa

SEQ ID NO: 1199183 - RNA, 19 nt, Homo sapiens
  misc_RNA (1)...(19): siRNA sense strand
cgacgacaaugggacauac

SEQ ID NO: 1199184 - RNA, 19 nt, Homo sapiens
  misc_RNA (1)...(19): siRNA sense strand
acagugaccuggaauuuuc

SEQ ID NO: 1199185 - RNA, 19 nt, Homo sapiens
  misc_RNA (1)...(19): siRNA sense strand
ggaaaggcucaaccaagag

SEQ ID NO: 1199186 - RNA, 19 nt, Homo sapiens
  misc_RNA (1)...(19): siRNA sense strand
gggccgaaagagcucauaa

SEQ ID NO: 1199187 - RNA, 19 nt, Homo sapiens
  misc_RNA (1)...(19): siRNA sense strand
ccgaaagagcucauaaagu

SEQ ID NO: 1199188 - RNA, 19 nt, Homo sapiens
  misc_RNA (1)...(19): siRNA sense strand
guauucuacuaccacauag

SEQ ID NO: 1199189 - RNA, 19 nt, Homo sapiens
  misc_RNA (1)...(19): siRNA sense strand
acacuguacgcuucucuga

SEQ ID NO: 1199190 - RNA, 19 nt, Homo sapiens
  misc_RNA (1)...(19): siRNA sense strand
aaagcgaugggccgaaaga

SEQ ID NO: 1199191 - RNA, 19 nt, Homo sapiens
  misc_RNA (1)...(19): siRNA sense strand
cucauaaagugguggagau

SEQ ID NO: 1199192 - RNA, 19 nt, Homo sapiens
  misc_RNA (1)...(19): siRNA sense strand
cgaaagagcucauaaagug

SEQ ID NO: 1199193 - RNA, 19 nt, Homo sapiens
  misc_RNA (1)...(19): siRNA sense strand
ccacauagaucccuuccaa

SEQ ID NO: 1199194 - RNA, 19 nt, Homo sapiens
  misc_RNA (1)...(19): siRNA sense strand
uagcagcuguggaaauuua

SEQ ID NO: 1199195 - RNA, 19 nt, Homo sapiens
  misc_RNA (1)...(19): siRNA sense strand
gaacccaccugauguugau

SEQ ID NO: 1199196 - RNA, 19 nt, Homo sapiens
  misc_RNA (1)...(19): siRNA sense strand
uauagcagcuguggaaauu

SEQ ID NO: 1199197 - RNA, 19 nt, Homo sapiens
  misc_RNA (1)...(19): siRNA sense strand
ggacagaugcucgguuaaa

SEQ ID NO: 1199198 - RNA, 19 nt, Homo sapiens
  misc_RNA (1)...(19): siRNA sense strand
gaagaacccaccugauguu

SEQ ID NO: 1199199 - RNA, 19 nt, Homo sapiens
  misc_RNA (1)...(19): siRNA sense strand
ugggacagaugcucgguua

SEQ ID NO: 1199200 - RNA, 19 nt, Homo sapiens
  misc_RNA (1)...(19): siRNA sense strand
gaccugagcaguuuguauu

SEQ ID NO: 1199201 - RNA, 19 nt, Homo sapiens
  misc_RNA (1)...(19): siRNA sense strand
uaacagugaccuggaauuu

SEQ ID NO: 1199202 - RNA, 19 nt, Homo sapiens
  misc_RNA (1)...(19): siRNA sense strand
aggaaaggcucaaccaaga

SEQ ID NO: 1199203 - RNA, 19 nt, Homo sapiens
  misc_RNA (1)...(19): siRNA sense strand
gaaaggcucaaccaagaga

SEQ ID NO: 1199204 - RNA, 19 nt, Homo sapiens
  misc_RNA (1)...(19): siRNA sense strand
auaaagugguggagauaaa

SEQ ID NO: 1199205 - RNA, 19 nt, Homo sapiens
  misc_RNA (1)...(19): siRNA sense strand
ucacagcucuuuggccuau

SEQ ID NO: 1199206 - RNA, 19 nt, Homo sapiens
  misc_RNA (1)...(19): siRNA sense strand
gugaagaacccaccugaug

SEQ ID NO: 1199207 - RNA, 19 nt, Homo sapiens
  misc_RNA (1)...(19): siRNA sense strand
ggucucuguuuauuuagaa

SEQ ID NO: 1199208 - RNA, 19 nt, Homo sapiens
  misc_RNA (1)...(19): siRNA sense strand
gcagcuguggaaauuuaua

SEQ ID NO: 1199209 - RNA, 19 nt, Homo sapiens
  misc_RNA (1)...(19): siRNA sense strand
ugaagaacccaccugaugu

SEQ ID NO: 1199210 - RNA, 19 nt, Homo sapiens
  misc_RNA (1)...(19): siRNA sense strand
uguauucuacuaccacaua

SEQ ID NO: 1199211 - RNA, 19 nt, Homo sapiens
  misc_RNA (1)...(19): siRNA sense strand
cugagcaguuuguauucua

SEQ ID NO: 1199212 - RNA, 19 nt, Homo sapiens
  misc_RNA (1)...(19): siRNA sense strand
uuaaggaccgggugucuug

SEQ ID NO: 1199213 - RNA, 19 nt, Homo sapiens
  misc_RNA (1)...(19): siRNA sense strand
ggaccugagcaguuuguau

SEQ ID NO: 1199214 - RNA, 19 nt, Homo sapiens
  misc_RNA (1)...(19): siRNA sense strand
ggugaugcucuaacaguga

SEQ ID NO: 1199215 - RNA, 19 nt, Homo sapiens
  misc_RNA (1)...(19): siRNA sense strand
cauaaagugguggagauaa

SEQ ID NO: 1199216 - RNA, 19 nt, Homo sapiens
  misc_RNA (1)...(19): siRNA sense strand
gccuauagcagcuguggaa

SEQ ID NO: 1199217 - RNA, 19 nt, Homo sapiens
  misc_RNA (1)...(19): siRNA sense strand
ugagugggcgguuuaagga

SEQ ID NO: 1199218 - RNA, 19 nt, Homo sapiens
  misc_RNA (1)...(19): siRNA sense strand
gugguccucuuccagcauu

SEQ ID NO: 1199219 - RNA, 19 nt, Homo sapiens
  misc_RNA (1)...(19): siRNA sense strand
gacagaugcucgguuaaaa

SEQ ID NO: 1199220 - RNA, 19 nt, Homo sapiens
  misc_RNA (1)...(19): siRNA sense strand
ucauaaagugguggagaua

SEQ ID NO: 1199221 - RNA, 19 nt, Homo sapiens
  misc_RNA (1)...(19): siRNA sense strand
gccgaaagagcucauaaag

SEQ ID NO: 1199222 - RNA, 19 nt, Homo sapiens
  misc_RNA (1)...(19): siRNA sense strand
ggccgaaagagcucauaaa

SEQ ID NO: 1199223 - RNA, 19 nt, Homo sapiens
  misc_RNA (1)...(19): siRNA sense strand
cgacgacaaugggacauac

SEQ ID NO: 1199224 - RNA, 19 nt, Homo sapiens
  misc_RNA (1)...(19): siRNA sense strand
acagugaccuggaauuuuc

SEQ ID NO: 1199225 - RNA, 19 nt, Homo sapiens
  misc_RNA (1)...(19): siRNA sense strand
ggaaaggcucaaccaagag

SEQ ID NO: 1199226 - RNA, 19 nt, Homo sapiens
  misc_RNA (1)...(19): siRNA sense strand
gggccgaaagagcucauaa

SEQ ID NO: 1199227 - RNA, 19 nt, Homo sapiens
  misc_RNA (1)...(19): siRNA sense strand
ccgaaagagcucauaaagu

SEQ ID NO: 1199228 - RNA, 19 nt, Homo sapiens
  misc_RNA (1)...(19): siRNA sense strand
guauucuacuaccacauag

SEQ ID NO: 1199229 - RNA, 19 nt, Homo sapiens
  misc_RNA (1)...(19): siRNA sense strand
acacuguacgcuucucuga

SEQ ID NO: 1199230 - RNA, 19 nt, Homo sapiens
  misc_RNA (1)...(19): siRNA sense strand
aaagcgaugggccgaaaga

SEQ ID NO: 1199231 - RNA, 19 nt, Homo sapiens
  misc_RNA (1)...(19): siRNA sense strand
cucauaaagugguggagau

SEQ ID NO: 1199232 - RNA, 19 nt, Homo sapiens
  misc_RNA (1)...(19): siRNA sense strand
gauuaggccuggcucuuaa

SEQ ID NO: 1199233 - RNA, 19 nt, Homo sapiens
  misc_RNA (1)...(19): siRNA sense strand
gcaaaguguucuaccugaa

SEQ ID NO: 1199234 - RNA, 19 nt, Homo sapiens
  misc_RNA (1)...(19): siRNA sense strand
gggagaagauagagaagga

SEQ ID NO: 1199235 - RNA, 19 nt, Homo sapiens
  misc_RNA (1)...(19): siRNA sense strand
auaacuaccugaucaagaa

SEQ ID NO: 1199236 - RNA, 19 nt, Homo sapiens
  misc_RNA (1)...(19): siRNA sense strand
gcgagcaacuggugcagaa

SEQ ID NO: 1199237 - RNA, 19 nt, Homo sapiens
  misc_RNA (1)...(19): siRNA sense strand
gugcugagccugcuggaua

SEQ ID NO: 1199238 - RNA, 19 nt, Homo sapiens
  misc_RNA (1)...(19): siRNA sense strand
gaagauagagaaggaguug

SEQ ID NO: 1199239 - RNA, 19 nt, Homo sapiens
  misc_RNA (1)...(19): siRNA sense strand
ugaaugagccacugucgaa

SEQ ID NO: 1199240 - RNA, 19 nt, Homo sapiens
  misc_RNA (1)...(19): siRNA sense strand
agaagaagauugagauggu

SEQ ID NO: 1199241 - RNA, 19 nt, Homo sapiens
  misc_RNA (1)...(19): siRNA sense strand
gcauugagcagaagacauc

SEQ ID NO: 1199242 - RNA, 19 nt, Homo sapiens
  misc_RNA (1)...(19): siRNA sense strand
gauaacuaccugaucaaga

SEQ ID NO: 1199243 - RNA, 19 nt, Homo sapiens
  misc_RNA (1)...(19): siRNA sense strand
cgauuaggccuggcucuua

SEQ ID NO: 1199244 - RNA, 19 nt, Homo sapiens
  misc_RNA (1)...(19): siRNA sense strand
ucaguagcauugagcagaa

SEQ ID NO: 1199245 - RNA, 19 nt, Homo sapiens
  misc_RNA (1)...(19): siRNA sense strand
gcggcgaaggcaacaauua

SEQ ID NO: 1199246 - RNA, 19 nt, Homo sapiens
  misc_RNA (1)...(19): siRNA sense strand
aacgaaaccuucugucugu

SEQ ID NO: 1199247 - RNA, 19 nt, Homo sapiens
  misc_RNA (1)...(19): siRNA sense strand
gaacgugacagagcugaau

SEQ ID NO: 1199248 - RNA, 19 nt, Homo sapiens
  misc_RNA (1)...(19): siRNA sense strand
uaacuacuccgucuucuac

SEQ ID NO: 1199249 - RNA, 19 nt, Homo sapiens
  misc_RNA (1)...(19): siRNA sense strand
cagcgaagcccacgagauc

SEQ ID NO: 1199250 - RNA, 19 nt, Homo sapiens
  misc_RNA (1)...(19): siRNA sense strand
cggcgaaggcaacaauuaa

SEQ ID NO: 1199251 - RNA, 19 nt, Homo sapiens
  misc_RNA (1)...(19): siRNA sense strand
ggaacgaaaccuucugucu

SEQ ID NO: 1199252 - RNA, 19 nt, Homo sapiens
  misc_RNA (1)...(19): siRNA sense strand
cuggauaacuaccugauca

SEQ ID NO: 1199253 - RNA, 19 nt, Homo sapiens
  misc_RNA (1)...(19): siRNA sense strand
ugagccugcuggauaacua

SEQ ID NO: 1199254 - RNA, 19 nt, Homo sapiens
  misc_RNA (1)...(19): siRNA sense strand
ggacuccacgcucaucaug

SEQ ID NO: 1199255 - RNA, 19 nt, Homo sapiens
  misc_RNA (1)...(19): siRNA sense strand
aaaguguucuaccugaaga

SEQ ID NO: 1199256 - RNA, 19 nt, Homo sapiens
  misc_RNA (1)...(19): siRNA sense strand
gaaugaggaacgaaaccuu

SEQ ID NO: 1199257 - RNA, 19 nt, Homo sapiens
  misc_RNA (1)...(19): siRNA sense strand
gcagcgagacccaguacga

SEQ ID NO: 1199258 - RNA, 19 nt, Homo sapiens
  misc_RNA (1)...(19): siRNA sense strand
ggucaucaguagcauugag

SEQ ID NO: 1199259 - RNA, 19 nt, Homo sapiens
  misc_RNA (1)...(19): siRNA sense strand
gaaguggccaccggagaga

SEQ ID NO: 1199260 - RNA, 19 nt, Homo sapiens
  misc_RNA (1)...(19): siRNA sense strand
guacgagagcaaaguguuc

SEQ ID NO: 1199261 - RNA, 19 nt, Homo sapiens
  misc_RNA (1)...(19): siRNA sense strand
ccuggagggucaucaguag

SEQ ID NO: 1199262 - RNA, 19 nt, Homo sapiens
  misc_RNA (1)...(19): siRNA sense strand
uguucuaccugaagaugaa

SEQ ID NO: 1199263 - RNA, 19 nt, Homo sapiens
  misc_RNA (1)...(19): siRNA sense strand
ccaugaagaacgugacaga

SEQ ID NO: 1199264 - RNA, 19 nt, Homo sapiens
  misc_RNA (1)...(19): siRNA sense strand
gagcaacuggugcagaaag

SEQ ID NO: 1199265 - RNA, 19 nt, Homo sapiens
  misc_RNA (1)...(19): siRNA sense strand
augagccacugucgaauga

SEQ ID NO: 1199266 - RNA, 19 nt, Homo sapiens
  misc_RNA (1)...(19): siRNA sense strand
gaggaacgaaaccuucugu

SEQ ID NO: 1199267 - RNA, 19 nt, Homo sapiens
  misc_RNA (1)...(19): siRNA sense strand
caaaguguucuaccugaag

SEQ ID NO: 1199268 - RNA, 19 nt, Homo sapiens
  misc_RNA (1)...(19): siRNA sense strand
acuacuccgucuucuacua

SEQ ID NO: 1199269 - RNA, 19 nt, Homo sapiens
  misc_RNA (1)...(19): siRNA sense strand
gcagacggcaaugagaaga

SEQ ID NO: 1199270 - RNA, 19 nt, Homo sapiens
  misc_RNA (1)...(19): siRNA sense strand
gaucagcaaagagcacaug

SEQ ID NO: 1199271 - RNA, 19 nt, Homo sapiens
  misc_RNA (1)...(19): siRNA sense strand
cccacgagaucagcaaaga

SEQ ID NO: 1199272 - RNA, 19 nt, Homo sapiens
  misc_RNA (1)...(19): siRNA sense strand
gugcguaccgggagaagau

SEQ ID NO: 1199273 - RNA, 19 nt, Homo sapiens
  misc_RNA (1)...(19): siRNA sense strand
ggagcgcuacgacgacaug

SEQ ID NO: 1199274 - RNA, 19 nt, Homo sapiens
  misc_RNA (1)...(19): siRNA sense strand
ugcugagccugcuggauaa

SEQ ID NO: 1199275 - RNA, 19 nt, Homo sapiens
  misc_RNA (1)...(19): siRNA sense strand
aggccuggcucuuaacuac

SEQ ID NO: 1199276 - RNA, 19 nt, Homo sapiens
  misc_RNA (1)...(19): siRNA sense strand
cuacuccgucuucuacuau

SEQ ID NO: 1199277 - RNA, 19 nt, Homo sapiens
  misc_RNA (1)...(19): siRNA sense strand
agauagagaaggaguugga

SEQ ID NO: 1199278 - RNA, 19 nt, Homo sapiens
  misc_RNA (1)...(19): siRNA sense strand
acuaccugaucaagaauug

SEQ ID NO: 1199279 - RNA, 19 nt, Homo sapiens
  misc_RNA (1)...(19): siRNA sense strand
ggauaacuaccugaucaag

SEQ ID NO: 1199280 - RNA, 19 nt, Homo sapiens
  misc_RNA (1)...(19): siRNA sense strand
gaaugagccacugucgaau

SEQ ID NO: 1199281 - RNA, 19 nt, Homo sapiens
  misc_RNA (1)...(19): siRNA sense strand
cuagagagauuaacauuga

SEQ ID NO: 1199282 - RNA, 19 nt, Homo sapiens
  misc_RNA (1)...(19): siRNA sense strand
ugaagaagcucagaaaaua

SEQ ID NO: 1199283 - RNA, 19 nt, Homo sapiens
  misc_RNA (1)...(19): siRNA sense strand
gagagacuaucaucaggaa

SEQ ID NO: 1199284 - RNA, 19 nt, Homo sapiens
  misc_RNA (1)...(19): siRNA sense strand
ggaacccacugaaacaugu

SEQ ID NO: 1199285 - RNA, 19 nt, Homo sapiens
  misc_RNA (1)...(19): siRNA sense strand
ggaauuguuggauuuguaa

SEQ ID NO: 1199286 - RNA, 19 nt, Homo sapiens
  misc_RNA (1)...(19): siRNA sense strand
gauggcaugugaaaccuau

SEQ ID NO: 1199287 - RNA, 19 nt, Homo sapiens
  misc_RNA (1)...(19): siRNA sense strand
uguaagaugugcagagaug

SEQ ID NO: 1199288 - RNA, 19 nt, Homo sapiens
  misc_RNA (1)...(19): siRNA sense strand
ccagauuucuaaagucaga

SEQ ID NO: 1199289 - RNA, 19 nt, Homo sapiens
  misc_RNA (1)...(19): siRNA sense strand
gcacagugacgagaauauu

SEQ ID NO: 1199290 - RNA, 19 nt, Homo sapiens
  misc_RNA (1)...(19): siRNA sense strand
cggaauuguuggauuugua

SEQ ID NO: 1199291 - RNA, 19 nt, Homo sapiens
  misc_RNA (1)...(19): siRNA sense strand
gagauuaacauugacaguu

SEQ ID NO: 1199292 - RNA, 19 nt, Homo sapiens
  misc_RNA (1)...(19): siRNA sense strand
ggagcacagugacgagaau

SEQ ID NO: 1199293 - RNA, 19 nt, Homo sapiens
  misc_RNA (1)...(19): siRNA sense strand
caugugaaaccuauaagaa

SEQ ID NO: 1199294 - RNA, 19 nt, Homo sapiens
  misc_RNA (1)...(19): siRNA sense strand
agauuaacauugacaguuc

SEQ ID NO: 1199295 - RNA, 19 nt, Homo sapiens
  misc_RNA (1)...(19): siRNA sense strand
caagagagacuaucaucag

SEQ ID NO: 1199296 - RNA, 19 nt, Homo sapiens
  misc_RNA (1)...(19): siRNA sense strand
aggcggaauuguuggauuu

SEQ ID NO: 1199297 - RNA, 19 nt, Homo sapiens
  misc_RNA (1)...(19): siRNA sense strand
gagacuaucaucaggaaca

SEQ ID NO: 1199298 - RNA, 19 nt, Homo sapiens
  misc_RNA (1)...(19): siRNA sense strand
gugacgagaauauucaauu

SEQ ID NO: 1199299 - RNA, 19 nt, Homo sapiens
  misc_RNA (1)...(19): siRNA sense strand
gcaugugaaaccuauaaga

SEQ ID NO: 1199300 - RNA, 19 nt, Homo sapiens
  misc_RNA (1)...(19): siRNA sense strand
uacaaaauaugguccagua

SEQ ID NO: 1199301 - RNA, 19 nt, Homo sapiens
  misc_RNA (1)...(19): siRNA sense strand
aaacuaugcaguccaacaa

SEQ ID NO: 1199302 - RNA, 19 nt, Homo sapiens
  misc_RNA (1)...(19): siRNA sense strand
gacaagagagacuaucauc

SEQ ID NO: 1199303 - RNA, 19 nt, Homo sapiens
  misc_RNA (1)...(19): siRNA sense strand
ucacgguggagcagaauuu

SEQ ID NO: 1199304 - RNA, 19 nt, Homo sapiens
  misc_RNA (1)...(19): siRNA sense strand
gagcacagugacgagaaua

SEQ ID NO: 1199305 - RNA, 19 nt, Homo sapiens
  misc_RNA (1)...(19): siRNA sense strand
uaagaugugcagagaugaa

SEQ ID NO: 1199306 - RNA, 19 nt, Homo sapiens
  misc_RNA (1)...(19): siRNA sense strand
aaaccuuacuuuggaggaa

SEQ ID NO: 1199307 - RNA, 19 nt, Homo sapiens
  misc_RNA (1)...(19): siRNA sense strand
caucaggaacauucaggaa

SEQ ID NO: 1199308 - RNA, 19 nt, Homo sapiens
  misc_RNA (1)...(19): siRNA sense strand
agucagaaauguaccaaaa

SEQ ID NO: 1199309 - RNA, 19 nt, Homo sapiens
  misc_RNA (1)...(19): siRNA sense strand
uacagugggcccagucuuu

SEQ ID NO: 1199310 - RNA, 19 nt, Homo sapiens
  misc_RNA (1)...(19): siRNA sense strand
caggcggaauuguuggauu

SEQ ID NO: 1199311 - RNA, 19 nt, Homo sapiens
  misc_RNA (1)...(19): siRNA sense strand
uggcaugugaaaccuauaa

SEQ ID NO: 1199312 - RNA, 19 nt, Homo sapiens
  misc_RNA (1)...(19): siRNA sense strand
ugaaaacuaugcaguccaa

SEQ ID NO: 1199313 - RNA, 19 nt, Homo sapiens
  misc_RNA (1)...(19): siRNA sense strand
gcggaauuguuggauuugu

SEQ ID NO: 1199314 - RNA, 19 nt, Homo sapiens
  misc_RNA (1)...(19): siRNA sense strand
aauucuggauggcauguga

SEQ ID NO: 1199315 - RNA, 19 nt, Homo sapiens
  misc_RNA (1)...(19): siRNA sense strand
gaacccacugaaacauguu

SEQ ID NO: 1199316 - RNA, 19 nt, Homo sapiens
  misc_RNA (1)...(19): siRNA sense strand
uuuguaagaugugcagaga

SEQ ID NO: 1199317 - RNA, 19 nt, Homo sapiens
  misc_RNA (1)...(19): siRNA sense strand
ccuagagagauuaacauug

SEQ ID NO: 1199318 - RNA, 19 nt, Homo sapiens
  misc_RNA (1)...(19): siRNA sense strand
guccaacaacaguuucuga

SEQ ID NO: 1199319 - RNA, 19 nt, Homo sapiens
  misc_RNA (1)...(19): siRNA sense strand
acagugacgagaauauuca

SEQ ID NO: 1199320 - RNA, 19 nt, Homo sapiens
  misc_RNA (1)...(19): siRNA sense strand
ucuaaagucagaaauguac

SEQ ID NO: 1199321 - RNA, 19 nt, Homo sapiens
  misc_RNA (1)...(19): siRNA sense strand
cgacaagagagacuaucau

SEQ ID NO: 1199322 - RNA, 19 nt, Homo sapiens
  misc_RNA (1)...(19): siRNA sense strand
ggauggcaugugaaaccua

SEQ ID NO: 1199323 - RNA, 19 nt, Homo sapiens
  misc_RNA (1)...(19): siRNA sense strand
uguuggauuuguaagaugu

SEQ ID NO: 1199324 - RNA, 19 nt, Homo sapiens
  misc_RNA (1)...(19): siRNA sense strand
acuaugcaguccaacaaca

SEQ ID NO: 1199325 - RNA, 19 nt, Homo sapiens
  misc_RNA (1)...(19): siRNA sense strand
gaagaagcucagaaaauag

SEQ ID NO: 1199326 - RNA, 19 nt, Homo sapiens
  misc_RNA (1)...(19): siRNA sense strand
acaagagagacuaucauca

SEQ ID NO: 1199327 - RNA, 19 nt, Homo sapiens
  misc_RNA (1)...(19): siRNA sense strand
cuagagagauuaacauuga

SEQ ID NO: 1199328 - RNA, 19 nt, Homo sapiens
  misc_RNA (1)...(19): siRNA sense strand
ugaagaagcucagaaaaua

SEQ ID NO: 1199329 - RNA, 19 nt, Homo sapiens
  misc_RNA (1)...(19): siRNA sense strand
gagagacuaucaucaggaa

SEQ ID NO: 1199330 - RNA, 19 nt, Homo sapiens
  misc_RNA (1)...(19): siRNA sense strand
ggaacccacugaaacaugu

SEQ ID NO: 1199331 - RNA, 19 nt, Homo sapiens
  misc_RNA (1)...(19): siRNA sense strand
ggaauuguuggauuuguaa

SEQ ID NO: 1199332 - RNA, 19 nt, Homo sapiens
  misc_RNA (1)...(19): siRNA sense strand
gauggcaugugaaaccuau

SEQ ID NO: 1199333 - RNA, 19 nt, Homo sapiens
  misc_RNA (1)...(19): siRNA sense strand
uguaagaugugcagagaug

SEQ ID NO: 1199334 - RNA, 19 nt, Homo sapiens
  misc_RNA (1)...(19): siRNA sense strand
ccagauuucuaaagucaga

SEQ ID NO: 1199335 - RNA, 19 nt, Homo sapiens
  misc_RNA (1)...(19): siRNA sense strand
gcacagugacgagaauauu

SEQ ID NO: 1199336 - RNA, 19 nt, Homo sapiens
  misc_RNA (1)...(19): siRNA sense strand
cggaauuguuggauuugua

SEQ ID NO: 1199337 - RNA, 19 nt, Homo sapiens
  misc_RNA (1)...(19): siRNA sense strand
gagauuaacauugacaguu

SEQ ID NO: 1199338 - RNA, 19 nt, Homo sapiens
  misc_RNA (1)...(19): siRNA sense strand
ggagcacagugacgagaau

SEQ ID NO: 1199339 - RNA, 19 nt, Homo sapiens
  misc_RNA (1)...(19): siRNA sense strand
caugugaaaccuauaagaa

SEQ ID NO: 1199340 - RNA, 19 nt, Homo sapiens
  misc_RNA (1)...(19): siRNA sense strand
agauuaacauugacaguuc

SEQ ID NO: 1199341 - RNA, 19 nt, Homo sapiens
  misc_RNA (1)...(19): siRNA sense strand
caagagagacuaucaucag

SEQ ID NO: 1199342 - RNA, 19 nt, Homo sapiens
  misc_RNA (1)...(19): siRNA sense strand
aggcggaauuguuggauuu

SEQ ID NO: 1199343 - RNA, 19 nt, Homo sapiens
  misc_RNA (1)...(19): siRNA sense strand
gagacuaucaucaggaaca

SEQ ID NO: 1199344 - RNA, 19 nt, Homo sapiens
  misc_RNA (1)...(19): siRNA sense strand
gugacgagaauauucaauu

SEQ ID NO: 1199345 - RNA, 19 nt, Homo sapiens
  misc_RNA (1)...(19): siRNA sense strand
gcaugugaaaccuauaaga

SEQ ID NO: 1199346 - RNA, 19 nt, Homo sapiens
  misc_RNA (1)...(19): siRNA sense strand
uacaaaauaugguccagua

SEQ ID NO: 1199347 - RNA, 19 nt, Homo sapiens
  misc_RNA (1)...(19): siRNA sense strand
aaacuaugcaguccaacaa

SEQ ID NO: 1199348 - RNA, 19 nt, Homo sapiens
  misc_RNA (1)...(19): siRNA sense strand
gacaagagagacuaucauc

SEQ ID NO: 1199349 - RNA, 19 nt, Homo sapiens
  misc_RNA (1)...(19): siRNA sense strand
ucacgguggagcagaauuu

SEQ ID NO: 1199350 - RNA, 19 nt, Homo sapiens
  misc_RNA (1)...(19): siRNA sense strand
gagcacagugacgagaaua

SEQ ID NO: 1199351 - RNA, 19 nt, Homo sapiens
  misc_RNA (1)...(19): siRNA sense strand
uaagaugugcagagaugaa

SEQ ID NO: 1199352 - RNA, 19 nt, Homo sapiens
  misc_RNA (1)...(19): siRNA sense strand
aaaccuuacuuuggaggaa

SEQ ID NO: 1199353 - RNA, 19 nt, Homo sapiens
  misc_RNA (1)...(19): siRNA sense strand
caucaggaacauucaggaa

SEQ ID NO: 1199354 - RNA, 19 nt, Homo sapiens
  misc_RNA (1)...(19): siRNA sense strand
agucagaaauguaccaaaa

SEQ ID NO: 1199355 - RNA, 19 nt, Homo sapiens
  misc_RNA (1)...(19): siRNA sense strand
uacagugggcccagucuuu

SEQ ID NO: 1199356 - RNA, 19 nt, Homo sapiens
  misc_RNA (1)...(19): siRNA sense strand
caggcggaauuguuggauu

SEQ ID NO: 1199357 - RNA, 19 nt, Homo sapiens
  misc_RNA (1)...(19): siRNA sense strand
uggcaugugaaaccuauaa

SEQ ID NO: 1199358 - RNA, 19 nt, Homo sapiens
  misc_RNA (1)...(19): siRNA sense strand
ugaaaacuaugcaguccaa

SEQ ID NO: 1199359 - RNA, 19 nt, Homo sapiens
  misc_RNA (1)...(19): siRNA sense strand
gcggaauuguuggauuugu

SEQ ID NO: 1199360 - RNA, 19 nt, Homo sapiens
  misc_RNA (1)...(19): siRNA sense strand
aauucuggauggcauguga

SEQ ID NO: 1199361 - RNA, 19 nt, Homo sapiens
  misc_RNA (1)...(19): siRNA sense strand
gaacccacugaaacauguu

SEQ ID NO: 1199362 - RNA, 19 nt, Homo sapiens
  misc_RNA (1)...(19): siRNA sense strand
uuuguaagaugugcagaga

SEQ ID NO: 1199363 - RNA, 19 nt, Homo sapiens
  misc_RNA (1)...(19): siRNA sense strand
ccuagagagauuaacauug

SEQ ID NO: 1199364 - RNA, 19 nt, Homo sapiens
  misc_RNA (1)...(19): siRNA sense strand
guccaacaacaguuucuga

SEQ ID NO: 1199365 - RNA, 19 nt, Homo sapiens
  misc_RNA (1)...(19): siRNA sense strand
acagugacgagaauauuca

SEQ ID NO: 1199366 - RNA, 19 nt, Homo sapiens
  misc_RNA (1)...(19): siRNA sense strand
ucuaaagucagaaauguac

SEQ ID NO: 1199367 - RNA, 19 nt, Homo sapiens
  misc_RNA (1)...(19): siRNA sense strand
cgacaagagagacuaucau

SEQ ID NO: 1199368 - RNA, 19 nt, Homo sapiens
  misc_RNA (1)...(19): siRNA sense strand
ggauggcaugugaaaccua

SEQ ID NO: 1199369 - RNA, 19 nt, Homo sapiens
  misc_RNA (1)...(19): siRNA sense strand
uguuggauuuguaagaugu

SEQ ID NO: 1199370 - RNA, 19 nt, Homo sapiens
  misc_RNA (1)...(19): siRNA sense strand
acuaugcaguccaacaaca

SEQ ID NO: 1199371 - RNA, 19 nt, Homo sapiens
  misc_RNA (1)...(19): siRNA sense strand
gaagaagcucagaaaauag

SEQ ID NO: 1199372 - RNA, 19 nt, Homo sapiens
  misc_RNA (1)...(19): siRNA sense strand
acaagagagacuaucauca

SEQ ID NO: 1199373 - RNA, 19 nt, Homo sapiens
  misc_RNA (1)...(19): siRNA sense strand
gaacagagaugaagaugaa

SEQ ID NO: 1199374 - RNA, 19 nt, Homo sapiens
  misc_RNA (1)...(19): siRNA sense strand
gaagacauauggcaaguuu

SEQ ID NO: 1199375 - RNA, 19 nt, Homo sapiens
  misc_RNA (1)...(19): siRNA sense strand
caaagaauauugcagugua

SEQ ID NO: 1199376 - RNA, 19 nt, Homo sapiens
  misc_RNA (1)...(19): siRNA sense strand
cgaaacagcuggauucaga

SEQ ID NO: 1199377 - RNA, 19 nt, Homo sapiens
  misc_RNA (1)...(19): siRNA sense strand
caacauaaccagucuguaa

SEQ ID NO: 1199378 - RNA, 19 nt, Homo sapiens
  misc_RNA (1)...(19): siRNA sense strand
caacagugaucucuuuaaa

SEQ ID NO: 1199379 - RNA, 19 nt, Homo sapiens
  misc_RNA (1)...(19): siRNA sense strand
ucaacagacucacuaaaua

SEQ ID NO: 1199380 - RNA, 19 nt, Homo sapiens
  misc_RNA (1)...(19): siRNA sense strand
caccagagcccgagaauua

SEQ ID NO: 1199381 - RNA, 19 nt, Homo sapiens
  misc_RNA (1)...(19): siRNA sense strand
gaaagagguucaagcaguu

SEQ ID NO: 1199382 - RNA, 19 nt, Homo sapiens
  misc_RNA (1)...(19): siRNA sense strand
gauaauagacagcaaguuu

SEQ ID NO: 1199383 - RNA, 19 nt, Homo sapiens
  misc_RNA (1)...(19): siRNA sense strand
gcagaacguuuaaagaaga

SEQ ID NO: 1199384 - RNA, 19 nt, Homo sapiens
  misc_RNA (1)...(19): siRNA sense strand
gaagaguggucagauguuu

SEQ ID NO: 1199385 - RNA, 19 nt, Homo sapiens
  misc_RNA (1)...(19): siRNA sense strand
caacaaagaugccuauacu

SEQ ID NO: 1199386 - RNA, 19 nt, Homo sapiens
  misc_RNA (1)...(19): siRNA sense strand
gaccagaagucaacaguga

SEQ ID NO: 1199387 - RNA, 19 nt, Homo sapiens
  misc_RNA (1)...(19): siRNA sense strand
cacaguaccuuccacaaua

SEQ ID NO: 1199388 - RNA, 19 nt, Homo sapiens
  misc_RNA (1)...(19): siRNA sense strand
gauagcaagucaaucauga

SEQ ID NO: 1199389 - RNA, 19 nt, Homo sapiens
  misc_RNA (1)...(19): siRNA sense strand
ggcaagaaguaauauauga

SEQ ID NO: 1199390 - RNA, 19 nt, Homo sapiens
  misc_RNA (1)...(19): siRNA sense strand
gcauauugcuuguaacuca

SEQ ID NO: 1199391 - RNA, 19 nt, Homo sapiens
  misc_RNA (1)...(19): siRNA sense strand
gaagagaacuauaauuucc

SEQ ID NO: 1199392 - RNA, 19 nt, Homo sapiens
  misc_RNA (1)...(19): siRNA sense strand
caacagacucacuaaauaa

SEQ ID NO: 1199393 - RNA, 19 nt, Homo sapiens
  misc_RNA (1)...(19): siRNA sense strand
aaagaaagauguggucaaa

SEQ ID NO: 1199394 - RNA, 19 nt, Homo sapiens
  misc_RNA (1)...(19): siRNA sense strand
gaacgaaacagcuggauuc

SEQ ID NO: 1199395 - RNA, 19 nt, Homo sapiens
  misc_RNA (1)...(19): siRNA sense strand
guacaucuuugcaucauug

SEQ ID NO: 1199396 - RNA, 19 nt, Homo sapiens
  misc_RNA (1)...(19): siRNA sense strand
gaagagaaggagaugauuu

SEQ ID NO: 1199397 - RNA, 19 nt, Homo sapiens
  misc_RNA (1)...(19): siRNA sense strand
ucagcuacaucaagaauaa

SEQ ID NO: 1199398 - RNA, 19 nt, Homo sapiens
  misc_RNA (1)...(19): siRNA sense strand
gaugacagauccagagaug

SEQ ID NO: 1199399 - RNA, 19 nt, Homo sapiens
  misc_RNA (1)...(19): siRNA sense strand
gggaugugcuuguaaauca

SEQ ID NO: 1199400 - RNA, 19 nt, Homo sapiens
  misc_RNA (1)...(19): siRNA sense strand
cacaaaggcugccgagaaa

SEQ ID NO: 1199401 - RNA, 19 nt, Homo sapiens
  misc_RNA (1)...(19): siRNA sense strand
gagcugaucaguauccaua

SEQ ID NO: 1199402 - RNA, 19 nt, Homo sapiens
  misc_RNA (1)...(19): siRNA sense strand
gaaagauucuaaagacaag

SEQ ID NO: 1199403 - RNA, 19 nt, Homo sapiens
  misc_RNA (1)...(19): siRNA sense strand
ugagagaaguggcacauga

SEQ ID NO: 1199404 - RNA, 19 nt, Homo sapiens
  misc_RNA (1)...(19): siRNA sense strand
uggaugagcugaucaguau

SEQ ID NO: 1199405 - RNA, 19 nt, Homo sapiens
  misc_RNA (1)...(19): siRNA sense strand
ucacggcccuuccacagua

SEQ ID NO: 1199406 - RNA, 19 nt, Homo sapiens
  misc_RNA (1)...(19): siRNA sense strand
gaugauggccaagaucuua

SEQ ID NO: 1199407 - RNA, 19 nt, Homo sapiens
  misc_RNA (1)...(19): siRNA sense strand
gcagagaccuuuggaggau

SEQ ID NO: 1199408 - RNA, 19 nt, Homo sapiens
  misc_RNA (1)...(19): siRNA sense strand
agacagaguuucaucaugu

SEQ ID NO: 1199409 - RNA, 19 nt, Homo sapiens
  misc_RNA (1)...(19): siRNA sense strand
gcaagucaaucaugaggau

SEQ ID NO: 1199410 - RNA, 19 nt, Homo sapiens
  misc_RNA (1)...(19): siRNA sense strand
gaugagcaguucaguuguu

SEQ ID NO: 1199411 - RNA, 19 nt, Homo sapiens
  misc_RNA (1)...(19): siRNA sense strand
gagugcauauugcuuguaa

SEQ ID NO: 1199412 - RNA, 19 nt, Homo sapiens
  misc_RNA (1)...(19): siRNA sense strand
acagcaaaguggcaaguua

SEQ ID NO: 1199413 - RNA, 19 nt, Homo sapiens
  misc_RNA (1)...(19): siRNA sense strand
acacauagcccuagaguuc

SEQ ID NO: 1199414 - RNA, 19 nt, Homo sapiens
  misc_RNA (1)...(19): siRNA sense strand
gaccagaaguacaucuuug

SEQ ID NO: 1199415 - RNA, 19 nt, Homo sapiens
  misc_RNA (1)...(19): siRNA sense strand
ggucaaacggcaagaagua

SEQ ID NO: 1199416 - RNA, 19 nt, Homo sapiens
  misc_RNA (1)...(19): siRNA sense strand
gaugaagaguggucagaug

SEQ ID NO: 1199417 - RNA, 19 nt, Homo sapiens
  misc_RNA (1)...(19): siRNA sense strand
ccacaaaggcugccgagaa

SEQ ID NO: 1199418 - RNA, 19 nt, Homo sapiens
  misc_RNA (1)...(19): siRNA sense strand
aggaggaccuuuaaugaaa

SEQ ID NO: 1199419 - RNA, 19 nt, Homo sapiens
  misc_RNA (1)...(19): siRNA sense strand
aagaacaacuucaccagaa

SEQ ID NO: 1199420 - RNA, 19 nt, Homo sapiens
  misc_RNA (1)...(19): siRNA sense strand
agaugaagaugaaggaauu

SEQ ID NO: 1199421 - RNA, 19 nt, Homo sapiens
  misc_RNA (1)...(19): siRNA sense strand
gaucaugagugguguguac

SEQ ID NO: 1199422 - RNA, 19 nt, Homo sapiens
  misc_RNA (1)...(19): siRNA sense strand
gggaguagguacagacaug

SEQ ID NO: 1199423 - RNA, 19 nt, Homo sapiens
  misc_RNA (1)...(19): siRNA sense strand
gaugagaacaugucaaaca

SEQ ID NO: 1199424 - RNA, 19 nt, Homo sapiens
  misc_RNA (1)...(19): siRNA sense strand
caacagaaucacuuacuga

SEQ ID NO: 1199425 - RNA, 19 nt, Homo sapiens
  misc_RNA (1)...(19): siRNA sense strand
gcaguucaguuguuagaag

SEQ ID NO: 1199426 - RNA, 19 nt, Homo sapiens
  misc_RNA (1)...(19): siRNA sense strand
gaaaugcuaaccugguauu

SEQ ID NO: 1199427 - RNA, 19 nt, Homo sapiens
  misc_RNA (1)...(19): siRNA sense strand
gaagaagcuuguacgugau

SEQ ID NO: 1199428 - RNA, 19 nt, Homo sapiens
  misc_RNA (1)...(19): siRNA sense strand
acaaagaugccuauacuug

SEQ ID NO: 1199429 - RNA, 19 nt, Homo sapiens
  misc_RNA (1)...(19): siRNA sense strand
ccacauaccaagcugauga

SEQ ID NO: 1199430 - RNA, 19 nt, Homo sapiens
  misc_RNA (1)...(19): siRNA sense strand
aaagacagauagcaaguca

SEQ ID NO: 1199431 - RNA, 19 nt, Homo sapiens
  misc_RNA (1)...(19): siRNA sense strand
gaaggagucucugguggau

SEQ ID NO: 1199432 - RNA, 19 nt, Homo sapiens
  misc_RNA (1)...(19): siRNA sense strand
caaacggcaagaaguaaua

SEQ ID NO: 1199433 - RNA, 19 nt, Homo sapiens
  misc_RNA (1)...(19): siRNA sense strand
uaaccagucuguaaacuac

SEQ ID NO: 1199434 - RNA, 19 nt, Homo sapiens
  misc_RNA (1)...(19): siRNA sense strand
uuaaagaagcugauuguga

SEQ ID NO: 1199435 - RNA, 19 nt, Homo sapiens
  misc_RNA (1)...(19): siRNA sense strand
gggaguguguuucugaaga

SEQ ID NO: 1199436 - RNA, 19 nt, Homo sapiens
  misc_RNA (1)...(19): siRNA sense strand
ggagaaagauaagaagacu

SEQ ID NO: 1199437 - RNA, 19 nt, Homo sapiens
  misc_RNA (1)...(19): siRNA sense strand
uauaauuuccugccacaua

SEQ ID NO: 1199438 - RNA, 19 nt, Homo sapiens
  misc_RNA (1)...(19): siRNA sense strand
gaagaugagcaguucaguu

SEQ ID NO: 1199439 - RNA, 19 nt, Homo sapiens
  misc_RNA (1)...(19): siRNA sense strand
ugagaaugcagaacguuua

SEQ ID NO: 1199440 - RNA, 19 nt, Homo sapiens
  misc_RNA (1)...(19): siRNA sense strand
uaacaaagccaaaggaaaa

SEQ ID NO: 1199441 - RNA, 19 nt, Homo sapiens
  misc_RNA (1)...(19): siRNA sense strand
gaaggaagagggagaugau

SEQ ID NO: 1199442 - RNA, 19 nt, Homo sapiens
  misc_RNA (1)...(19): siRNA sense strand
agucaacagugaucucuuu

SEQ ID NO: 1199443 - RNA, 19 nt, Homo sapiens
  misc_RNA (1)...(19): siRNA sense strand
caaaguggcaaguuaugaa

SEQ ID NO: 1199444 - RNA, 19 nt, Homo sapiens
  misc_RNA (1)...(19): siRNA sense strand
aaagaugccuauacuugug

SEQ ID NO: 1199445 - RNA, 19 nt, Homo sapiens
  misc_RNA (1)...(19): siRNA sense strand
uggaaaugcuaaccuggua

SEQ ID NO: 1199446 - RNA, 19 nt, Homo sapiens
  misc_RNA (1)...(19): siRNA sense strand
ucaacacccugaacagaga

SEQ ID NO: 1199447 - RNA, 19 nt, Homo sapiens
  misc_RNA (1)...(19): siRNA sense strand
agaagaagaugagcaguuc

SEQ ID NO: 1199448 - RNA, 19 nt, Homo sapiens
  misc_RNA (1)...(19): siRNA sense strand
gagaaugcagaacguuuaa

SEQ ID NO: 1199449 - RNA, 19 nt, Homo sapiens
  misc_RNA (1)...(19): siRNA sense strand
agacaugaaugaaggacaa

SEQ ID NO: 1199450 - RNA, 19 nt, Homo sapiens
  misc_RNA (1)...(19): siRNA sense strand
gaaaagcuguuccccuguu

SEQ ID NO: 1199451 - RNA, 19 nt, Homo sapiens
  misc_RNA (1)...(19): siRNA sense strand
aaccugguauuuaugcuua

SEQ ID NO: 1199452 - RNA, 19 nt, Homo sapiens
  misc_RNA (1)...(19): siRNA sense strand
gcaaaguggcaaguuauga

SEQ ID NO: 1199453 - RNA, 19 nt, Homo sapiens
  misc_RNA (1)...(19): siRNA sense strand
aggagucucugguggauaa

SEQ ID NO: 1199454 - RNA, 19 nt, Homo sapiens
  misc_RNA (1)...(19): siRNA sense strand
caaagaugccuauacuugu

SEQ ID NO: 1199455 - RNA, 19 nt, Homo sapiens
  misc_RNA (1)...(19): siRNA sense strand
agaaagugcgucucaauga

SEQ ID NO: 1199456 - RNA, 19 nt, Homo sapiens
  misc_RNA (1)...(19): siRNA sense strand
cuaaagacaaggagaaaga

SEQ ID NO: 1199457 - RNA, 19 nt, Homo sapiens
  misc_RNA (1)...(19): siRNA sense strand
ugacugagaguauaacaga

SEQ ID NO: 1199458 - RNA, 19 nt, Homo sapiens
  misc_RNA (1)...(19): siRNA sense strand
gaaguacaucuuugcauca

SEQ ID NO: 1199459 - RNA, 19 nt, Homo sapiens
  misc_RNA (1)...(19): siRNA sense strand
ggaugugauuggagcugua

SEQ ID NO: 1199460 - RNA, 19 nt, Homo sapiens
  misc_RNA (1)...(19): siRNA sense strand
gaaugaaggacaacuacug

SEQ ID NO: 1199461 - RNA, 19 nt, Homo sapiens
  misc_RNA (1)...(19): siRNA sense strand
gaaauuccugucucauuca

SEQ ID NO: 1199462 - RNA, 19 nt, Homo sapiens
  misc_RNA (1)...(19): siRNA sense strand
ucauuggacucagaacuuu

SEQ ID NO: 1199463 - RNA, 19 nt, Homo sapiens
  misc_RNA (1)...(19): siRNA sense strand
uaacucagcggauuaccaa

SEQ ID NO: 1199464 - RNA, 19 nt, Homo sapiens
  misc_RNA (1)...(19): siRNA sense strand
gcaagaagagcaaagaaaa

SEQ ID NO: 1199465 - RNA, 19 nt, Homo sapiens
  misc_RNA (1)...(19): siRNA sense strand
augcuaaccugguauuuau

SEQ ID NO: 1199466 - RNA, 19 nt, Homo sapiens
  misc_RNA (1)...(19): siRNA sense strand
uaaaugagguggagauccu

SEQ ID NO: 1199467 - RNA, 19 nt, Homo sapiens
  misc_RNA (1)...(19): siRNA sense strand
acagauagcaagucaauca

SEQ ID NO: 1199468 - RNA, 19 nt, Homo sapiens
  misc_RNA (1)...(19): siRNA sense strand
aagaugagcaguucaguug

SEQ ID NO: 1199469 - RNA, 19 nt, Homo sapiens
  misc_RNA (1)...(19): siRNA sense strand
auaccaagcugaugaggau

SEQ ID NO: 1199470 - RNA, 19 nt, Homo sapiens
  misc_RNA (1)...(19): siRNA sense strand
gaucuuaggagaacggaau

SEQ ID NO: 1199471 - RNA, 19 nt, Homo sapiens
  misc_RNA (1)...(19): siRNA sense strand
ggagauccuucaggguuug

SEQ ID NO: 1199472 - RNA, 19 nt, Homo sapiens
  misc_RNA (1)...(19): siRNA sense strand
uaaucugacugagaguaua

SEQ ID NO: 1199473 - RNA, 19 nt, Homo sapiens
  misc_RNA (1)...(19): siRNA sense strand
gaacagagaugaagaugaa

SEQ ID NO: 1199474 - RNA, 19 nt, Homo sapiens
  misc_RNA (1)...(19): siRNA sense strand
gaagacauauggcaaguuu

SEQ ID NO: 1199475 - RNA, 19 nt, Homo sapiens
  misc_RNA (1)...(19): siRNA sense strand
caaagaauauugcagugua

SEQ ID NO: 1199476 - RNA, 19 nt, Homo sapiens
  misc_RNA (1)...(19): siRNA sense strand
cgaaacagcuggauucaga

SEQ ID NO: 1199477 - RNA, 19 nt, Homo sapiens
  misc_RNA (1)...(19): siRNA sense strand
caacauaaccagucuguaa

SEQ ID NO: 1199478 - RNA, 19 nt, Homo sapiens
  misc_RNA (1)...(19): siRNA sense strand
caacagugaucucuuuaaa

SEQ ID NO: 1199479 - RNA, 19 nt, Homo sapiens
  misc_RNA (1)...(19): siRNA sense strand
ucaacagacucacuaaaua

SEQ ID NO: 1199480 - RNA, 19 nt, Homo sapiens
  misc_RNA (1)...(19): siRNA sense strand
caccagagcccgagaauua

SEQ ID NO: 1199481 - RNA, 19 nt, Homo sapiens
  misc_RNA (1)...(19): siRNA sense strand
gaaagagguucaagcaguu

SEQ ID NO: 1199482 - RNA, 19 nt, Homo sapiens
  misc_RNA (1)...(19): siRNA sense strand
gauaauagacagcaaguuu

SEQ ID NO: 1199483 - RNA, 19 nt, Homo sapiens
  misc_RNA (1)...(19): siRNA sense strand
gcagaacguuuaaagaaga

SEQ ID NO: 1199484 - RNA, 19 nt, Homo sapiens
  misc_RNA (1)...(19): siRNA sense strand
gaagaguggucagauguuu

SEQ ID NO: 1199485 - RNA, 19 nt, Homo sapiens
  misc_RNA (1)...(19): siRNA sense strand
caacaaagaugccuauacu

SEQ ID NO: 1199486 - RNA, 19 nt, Homo sapiens
  misc_RNA (1)...(19): siRNA sense strand
gaccagaagucaacaguga

SEQ ID NO: 1199487 - RNA, 19 nt, Homo sapiens
  misc_RNA (1)...(19): siRNA sense strand
cacaguaccuuccacaaua

SEQ ID NO: 1199488 - RNA, 19 nt, Homo sapiens
  misc_RNA (1)...(19): siRNA sense strand
gauagcaagucaaucauga

SEQ ID NO: 1199489 - RNA, 19 nt, Homo sapiens
  misc_RNA (1)...(19): siRNA sense strand
ggcaagaaguaauauauga

SEQ ID NO: 1199490 - RNA, 19 nt, Homo sapiens
  misc_RNA (1)...(19): siRNA sense strand
gcauauugcuuguaacuca

SEQ ID NO: 1199491 - RNA, 19 nt, Homo sapiens
  misc_RNA (1)...(19): siRNA sense strand
gaagagaacuauaauuucc

SEQ ID NO: 1199492 - RNA, 19 nt, Homo sapiens
  misc_RNA (1)...(19): siRNA sense strand
caacagacucacuaaauaa

SEQ ID NO: 1199493 - RNA, 19 nt, Homo sapiens
  misc_RNA (1)...(19): siRNA sense strand
aaagaaagauguggucaaa

SEQ ID NO: 1199494 - RNA, 19 nt, Homo sapiens
  misc_RNA (1)...(19): siRNA sense strand
gaacgaaacagcuggauuc

SEQ ID NO: 1199495 - RNA, 19 nt, Homo sapiens
  misc_RNA (1)...(19): siRNA sense strand
guacaucuuugcaucauug

SEQ ID NO: 1199496 - RNA, 19 nt, Homo sapiens
  misc_RNA (1)...(19): siRNA sense strand
gaagagaaggagaugauuu

SEQ ID NO: 1199497 - RNA, 19 nt, Homo sapiens
  misc_RNA (1)...(19): siRNA sense strand
ucagcuacaucaagaauaa

SEQ ID NO: 1199498 - RNA, 19 nt, Homo sapiens
  misc_RNA (1)...(19): siRNA sense strand
gaugacagauccagagaug

SEQ ID NO: 1199499 - RNA, 19 nt, Homo sapiens
  misc_RNA (1)...(19): siRNA sense strand
gggaugugcuuguaaauca

SEQ ID NO: 1199500 - RNA, 19 nt, Homo sapiens
  misc_RNA (1)...(19): siRNA sense strand
cacaaaggcugccgagaaa

SEQ ID NO: 1199501 - RNA, 19 nt, Homo sapiens
  misc_RNA (1)...(19): siRNA sense strand
gagcugaucaguauccaua

SEQ ID NO: 1199502 - RNA, 19 nt, Homo sapiens
  misc_RNA (1)...(19): siRNA sense strand
gaaagauucuaaagacaag

SEQ ID NO: 1199503 - RNA, 19 nt, Homo sapiens
  misc_RNA (1)...(19): siRNA sense strand
ugagagaaguggcacauga

SEQ ID NO: 1199504 - RNA, 19 nt, Homo sapiens
  misc_RNA (1)...(19): siRNA sense strand
uggaugagcugaucaguau

SEQ ID NO: 1199505 - RNA, 19 nt, Homo sapiens
  misc_RNA (1)...(19): siRNA sense strand
ucacggcccuuccacagua

SEQ ID NO: 1199506 - RNA, 19 nt, Homo sapiens
  misc_RNA (1)...(19): siRNA sense strand
gaugauggccaagaucuua

SEQ ID NO: 1199507 - RNA, 19 nt, Homo sapiens
  misc_RNA (1)...(19): siRNA sense strand
gcagagaccuuuggaggau

SEQ ID NO: 1199508 - RNA, 19 nt, Homo sapiens
  misc_RNA (1)...(19): siRNA sense strand
agacagaguuucaucaugu

SEQ ID NO: 1199509 - RNA, 19 nt, Homo sapiens
  misc_RNA (1)...(19): siRNA sense strand
gcaagucaaucaugaggau

SEQ ID NO: 1199510 - RNA, 19 nt, Homo sapiens
  misc_RNA (1)...(19): siRNA sense strand
gaugagcaguucaguuguu

SEQ ID NO: 1199511 - RNA, 19 nt, Homo sapiens
  misc_RNA (1)...(19): siRNA sense strand
gagugcauauugcuuguaa

SEQ ID NO: 1199512 - RNA, 19 nt, Homo sapiens
  misc_RNA (1)...(19): siRNA sense strand
acagcaaaguggcaaguua

SEQ ID NO: 1199513 - RNA, 19 nt, Homo sapiens
  misc_RNA (1)...(19): siRNA sense strand
acacauagcccuagaguuc

SEQ ID NO: 1199514 - RNA, 19 nt, Homo sapiens
  misc_RNA (1)...(19): siRNA sense strand
gaccagaaguacaucuuug

SEQ ID NO: 1199515 - RNA, 19 nt, Homo sapiens
  misc_RNA (1)...(19): siRNA sense strand
ggucaaacggcaagaagua

SEQ ID NO: 1199516 - RNA, 19 nt, Homo sapiens
  misc_RNA (1)...(19): siRNA sense strand
gaugaagaguggucagaug

SEQ ID NO: 1199517 - RNA, 19 nt, Homo sapiens
  misc_RNA (1)...(19): siRNA sense strand
ccacaaaggcugccgagaa

SEQ ID NO: 1199518 - RNA, 19 nt, Homo sapiens
  misc_RNA (1)...(19): siRNA sense strand
aggaggaccuuuaaugaaa

SEQ ID NO: 1199519 - RNA, 19 nt, Homo sapiens
  misc_RNA (1)...(19): siRNA sense strand
aagaacaacuucaccagaa

SEQ ID NO: 1199520 - RNA, 19 nt, Homo sapiens
  misc_RNA (1)...(19): siRNA sense strand
agaugaagaugaaggaauu

SEQ ID NO: 1199521 - RNA, 19 nt, Homo sapiens
  misc_RNA (1)...(19): siRNA sense strand
gaucaugagugguguguac

SEQ ID NO: 1199522 - RNA, 19 nt, Homo sapiens
  misc_RNA (1)...(19): siRNA sense strand
gggaguagguacagacaug

SEQ ID NO: 1199523 - RNA, 19 nt, Homo sapiens
  misc_RNA (1)...(19): siRNA sense strand
gaugagaacaugucaaaca

SEQ ID NO: 1199524 - RNA, 19 nt, Homo sapiens
  misc_RNA (1)...(19): siRNA sense strand
caacagaaucacuuacuga

SEQ ID NO: 1199525 - RNA, 19 nt, Homo sapiens
  misc_RNA (1)...(19): siRNA sense strand
gcaguucaguuguuagaag

SEQ ID NO: 1199526 - RNA, 19 nt, Homo sapiens
  misc_RNA (1)...(19): siRNA sense strand
gaaaugcuaaccugguauu

SEQ ID NO: 1199527 - RNA, 19 nt, Homo sapiens
  misc_RNA (1)...(19): siRNA sense strand
gaagaagcuuguacgugau

SEQ ID NO: 1199528 - RNA, 19 nt, Homo sapiens
  misc_RNA (1)...(19): siRNA sense strand
acaaagaugccuauacuug

SEQ ID NO: 1199529 - RNA, 19 nt, Homo sapiens
  misc_RNA (1)...(19): siRNA sense strand
ccacauaccaagcugauga

SEQ ID NO: 1199530 - RNA, 19 nt, Homo sapiens
  misc_RNA (1)...(19): siRNA sense strand
aaagacagauagcaaguca

SEQ ID NO: 1199531 - RNA, 19 nt, Homo sapiens
  misc_RNA (1)...(19): siRNA sense strand
gaaggagucucugguggau

SEQ ID NO: 1199532 - RNA, 19 nt, Homo sapiens
  misc_RNA (1)...(19): siRNA sense strand
caaacggcaagaaguaaua

SEQ ID NO: 1199533 - RNA, 19 nt, Homo sapiens
  misc_RNA (1)...(19): siRNA sense strand
uaaccagucuguaaacuac

SEQ ID NO: 1199534 - RNA, 19 nt, Homo sapiens
  misc_RNA (1)...(19): siRNA sense strand
uuaaagaagcugauuguga

SEQ ID NO: 1199535 - RNA, 19 nt, Homo sapiens
  misc_RNA (1)...(19): siRNA sense strand
gggaguguguuucugaaga

SEQ ID NO: 1199536 - RNA, 19 nt, Homo sapiens
  misc_RNA (1)...(19): siRNA sense strand
ggagaaagauaagaagacu

SEQ ID NO: 1199537 - RNA, 19 nt, Homo sapiens
  misc_RNA (1)...(19): siRNA sense strand
uauaauuuccugccacaua

SEQ ID NO: 1199538 - RNA, 19 nt, Homo sapiens
  misc_RNA (1)...(19): siRNA sense strand
gaagaugagcaguucaguu

SEQ ID NO: 1199539 - RNA, 19 nt, Homo sapiens
  misc_RNA (1)...(19): siRNA sense strand
ugagaaugcagaacguuua

SEQ ID NO: 1199540 - RNA, 19 nt, Homo sapiens
  misc_RNA (1)...(19): siRNA sense strand
uaacaaagccaaaggaaaa

SEQ ID NO: 1199541 - RNA, 19 nt, Homo sapiens
  misc_RNA (1)...(19): siRNA sense strand
gaaggaagagggagaugau

SEQ ID NO: 1199542 - RNA, 19 nt, Homo sapiens
  misc_RNA (1)...(19): siRNA sense strand
agucaacagugaucucuuu

SEQ ID NO: 1199543 - RNA, 19 nt, Homo sapiens
  misc_RNA (1)...(19): siRNA sense strand
caaaguggcaaguuaugaa

SEQ ID NO: 1199544 - RNA, 19 nt, Homo sapiens
  misc_RNA (1)...(19): siRNA sense strand
aaagaugccuauacuugug

SEQ ID NO: 1199545 - RNA, 19 nt, Homo sapiens
  misc_RNA (1)...(19): siRNA sense strand
uggaaaugcuaaccuggua

SEQ ID NO: 1199546 - RNA, 19 nt, Homo sapiens
  misc_RNA (1)...(19): siRNA sense strand
ucaacacccugaacagaga

SEQ ID NO: 1199547 - RNA, 19 nt, Homo sapiens
  misc_RNA (1)...(19): siRNA sense strand
agaagaagaugagcaguuc

SEQ ID NO: 1199548 - RNA, 19 nt, Homo sapiens
  misc_RNA (1)...(19): siRNA sense strand
gagaaugcagaacguuuaa

SEQ ID NO: 1199549 - RNA, 19 nt, Homo sapiens
  misc_RNA (1)...(19): siRNA sense strand
agacaugaaugaaggacaa

SEQ ID NO: 1199550 - RNA, 19 nt, Homo sapiens
  misc_RNA (1)...(19): siRNA sense strand
gaaaagcuguuccccuguu

SEQ ID NO: 1199551 - RNA, 19 nt, Homo sapiens
  misc_RNA (1)...(19): siRNA sense strand
aaccugguauuuaugcuua

SEQ ID NO: 1199552 - RNA, 19 nt, Homo sapiens
  misc_RNA (1)...(19): siRNA sense strand
gcaaaguggcaaguuauga

SEQ ID NO: 1199553 - RNA, 19 nt, Homo sapiens
  misc_RNA (1)...(19): siRNA sense strand
aggagucucugguggauaa

SEQ ID NO: 1199554 - RNA, 19 nt, Homo sapiens
  misc_RNA (1)...(19): siRNA sense strand
caaagaugccuauacuugu

SEQ ID NO: 1199555 - RNA, 19 nt, Homo sapiens
  misc_RNA (1)...(19): siRNA sense strand
agaaagugcgucucaauga

SEQ ID NO: 1199556 - RNA, 19 nt, Homo sapiens
  misc_RNA (1)...(19): siRNA sense strand
cuaaagacaaggagaaaga

SEQ ID NO: 1199557 - RNA, 19 nt, Homo sapiens
  misc_RNA (1)...(19): siRNA sense strand
ugacugagaguauaacaga

SEQ ID NO: 1199558 - RNA, 19 nt, Homo sapiens
  misc_RNA (1)...(19): siRNA sense strand
gaaguacaucuuugcauca

SEQ ID NO: 1199559 - RNA, 19 nt, Homo sapiens
  misc_RNA (1)...(19): siRNA sense strand
ggaugugauuggagcugua

SEQ ID NO: 1199560 - RNA, 19 nt, Homo sapiens
  misc_RNA (1)...(19): siRNA sense strand
gaaugaaggacaacuacug

SEQ ID NO: 1199561 - RNA, 19 nt, Homo sapiens
  misc_RNA (1)...(19): siRNA sense strand
gaaauuccugucucauuca

SEQ ID NO: 1199562 - RNA, 19 nt, Homo sapiens
  misc_RNA (1)...(19): siRNA sense strand
ucauuggacucagaacuuu

SEQ ID NO: 1199563 - RNA, 19 nt, Homo sapiens
  misc_RNA (1)...(19): siRNA sense strand
uaacucagcggauuaccaa

SEQ ID NO: 1199564 - RNA, 19 nt, Homo sapiens
  misc_RNA (1)...(19): siRNA sense strand
gcaagaagagcaaagaaaa

SEQ ID NO: 1199565 - RNA, 19 nt, Homo sapiens
  misc_RNA (1)...(19): siRNA sense strand
augcuaaccugguauuuau

SEQ ID NO: 1199566 - RNA, 19 nt, Homo sapiens
  misc_RNA (1)...(19): siRNA sense strand
uaaaugagguggagauccu

SEQ ID NO: 1199567 - RNA, 19 nt, Homo sapiens
  misc_RNA (1)...(19): siRNA sense strand
acagauagcaagucaauca

SEQ ID NO: 1199568 - RNA, 19 nt, Homo sapiens
  misc_RNA (1)...(19): siRNA sense strand
aagaugagcaguucaguug

SEQ ID NO: 1199569 - RNA, 19 nt, Homo sapiens
  misc_RNA (1)...(19): siRNA sense strand
auaccaagcugaugaggau

SEQ ID NO: 1199570 - RNA, 19 nt, Homo sapiens
  misc_RNA (1)...(19): siRNA sense strand
gaucuuaggagaacggaau

SEQ ID NO: 1199571 - RNA, 19 nt, Homo sapiens
  misc_RNA (1)...(19): siRNA sense strand
ggagauccuucaggguuug

SEQ ID NO: 1199572 - RNA, 19 nt, Homo sapiens
  misc_RNA (1)...(19): siRNA sense strand
uaaucugacugagaguaua

SEQ ID NO: 1199573 - RNA, 19 nt, Homo sapiens
  misc_RNA (1)...(19): siRNA sense strand
gaacagagaugaagaugaa

SEQ ID NO: 1199574 - RNA, 19 nt, Homo sapiens
  misc_RNA (1)...(19): siRNA sense strand
gaagacauauggcaaguuu

SEQ ID NO: 1199575 - RNA, 19 nt, Homo sapiens
  misc_RNA (1)...(19): siRNA sense strand
caaagaauauugcagugua

SEQ ID NO: 1199576 - RNA, 19 nt, Homo sapiens
  misc_RNA (1)...(19): siRNA sense strand
cgaaacagcuggauucaga

SEQ ID NO: 1199577 - RNA, 19 nt, Homo sapiens
  misc_RNA (1)...(19): siRNA sense strand
caacauaaccagucuguaa

SEQ ID NO: 1199578 - RNA, 19 nt, Homo sapiens
  misc_RNA (1)...(19): siRNA sense strand
caacagugaucucuuuaaa

SEQ ID NO: 1199579 - RNA, 19 nt, Homo sapiens
  misc_RNA (1)...(19): siRNA sense strand
ucaacagacucacuaaaua

SEQ ID NO: 1199580 - RNA, 19 nt, Homo sapiens
  misc_RNA (1)...(19): siRNA sense strand
caccagagcccgagaauua

SEQ ID NO: 1199581 - RNA, 19 nt, Homo sapiens
  misc_RNA (1)...(19): siRNA sense strand
gaaagagguucaagcaguu

SEQ ID NO: 1199582 - RNA, 19 nt, Homo sapiens
  misc_RNA (1)...(19): siRNA sense strand
gauaauagacagcaaguuu

SEQ ID NO: 1199583 - RNA, 19 nt, Homo sapiens
  misc_RNA (1)...(19): siRNA sense strand
gcagaacguuuaaagaaga

SEQ ID NO: 1199584 - RNA, 19 nt, Homo sapiens
  misc_RNA (1)...(19): siRNA sense strand
gaagaguggucagauguuu

SEQ ID NO: 1199585 - RNA, 19 nt, Homo sapiens
  misc_RNA (1)...(19): siRNA sense strand
caacaaagaugccuauacu

SEQ ID NO: 1199586 - RNA, 19 nt, Homo sapiens
  misc_RNA (1)...(19): siRNA sense strand
gaccagaagucaacaguga

SEQ ID NO: 1199587 - RNA, 19 nt, Homo sapiens
  misc_RNA (1)...(19): siRNA sense strand
gauagcaagucaaucauga

SEQ ID NO: 1199588 - RNA, 19 nt, Homo sapiens
  misc_RNA (1)...(19): siRNA sense strand
ggcaagaaguaauauauga

SEQ ID NO: 1199589 - RNA, 19 nt, Homo sapiens
  misc_RNA (1)...(19): siRNA sense strand
gcauauugcuuguaacuca

SEQ ID NO: 1199590 - RNA, 19 nt, Homo sapiens
  misc_RNA (1)...(19): siRNA sense strand
caacagacucacuaaauaa

SEQ ID NO: 1199591 - RNA, 19 nt, Homo sapiens
  misc_RNA (1)...(19): siRNA sense strand
aaagaaagauguggucaaa

SEQ ID NO: 1199592 - RNA, 19 nt, Homo sapiens
  misc_RNA (1)...(19): siRNA sense strand
gaacgaaacagcuggauuc

SEQ ID NO: 1199593 - RNA, 19 nt, Homo sapiens
  misc_RNA (1)...(19): siRNA sense strand
guacaucuuugcaucauug

SEQ ID NO: 1199594 - RNA, 19 nt, Homo sapiens
  misc_RNA (1)...(19): siRNA sense strand
gaagagaaggagaugauuu

SEQ ID NO: 1199595 - RNA, 19 nt, Homo sapiens
  misc_RNA (1)...(19): siRNA sense strand
gaugacagauccagagaug

SEQ ID NO: 1199596 - RNA, 19 nt, Homo sapiens
  misc_RNA (1)...(19): siRNA sense strand
gggaugugcuuguaaauca

SEQ ID NO: 1199597 - RNA, 19 nt, Homo sapiens
  misc_RNA (1)...(19): siRNA sense strand
cacaaaggcugccgagaaa

SEQ ID NO: 1199598 - RNA, 19 nt, Homo sapiens
  misc_RNA (1)...(19): siRNA sense strand
gagcugaucaguauccaua

SEQ ID NO: 1199599 - RNA, 19 nt, Homo sapiens
  misc_RNA (1)...(19): siRNA sense strand
uggaugagcugaucaguau

SEQ ID NO: 1199600 - RNA, 19 nt, Homo sapiens
  misc_RNA (1)...(19): siRNA sense strand
gaaagauucuaaagacaag

SEQ ID NO: 1199601 - RNA, 19 nt, Homo sapiens
  misc_RNA (1)...(19): siRNA sense strand
ugagagaaguggcacauga

SEQ ID NO: 1199602 - RNA, 19 nt, Homo sapiens
  misc_RNA (1)...(19): siRNA sense strand
gcagagaccuuuggaggau

SEQ ID NO: 1199603 - RNA, 19 nt, Homo sapiens
  misc_RNA (1)...(19): siRNA sense strand
gaugauggccaagaucuua

SEQ ID NO: 1199604 - RNA, 19 nt, Homo sapiens
  misc_RNA (1)...(19): siRNA sense strand
agacagaguuucaucaugu

SEQ ID NO: 1199605 - RNA, 19 nt, Homo sapiens
  misc_RNA (1)...(19): siRNA sense strand
gcaagucaaucaugaggau

SEQ ID NO: 1199606 - RNA, 19 nt, Homo sapiens
  misc_RNA (1)...(19): siRNA sense strand
gaugagcaguucaguuguu

SEQ ID NO: 1199607 - RNA, 19 nt, Homo sapiens
  misc_RNA (1)...(19): siRNA sense strand
gagugcauauugcuuguaa

SEQ ID NO: 1199608 - RNA, 19 nt, Homo sapiens
  misc_RNA (1)...(19): siRNA sense strand
acagcaaaguggcaaguua

SEQ ID NO: 1199609 - RNA, 19 nt, Homo sapiens
  misc_RNA (1)...(19): siRNA sense strand
acacauagcccuagaguuc

SEQ ID NO: 1199610 - RNA, 19 nt, Homo sapiens
  misc_RNA (1)...(19): siRNA sense strand
gaccagaaguacaucuuug

SEQ ID NO: 1199611 - RNA, 19 nt, Homo sapiens
  misc_RNA (1)...(19): siRNA sense strand
ggucaaacggcaagaagua

SEQ ID NO: 1199612 - RNA, 19 nt, Homo sapiens
  misc_RNA (1)...(19): siRNA sense strand
gaugaagaguggucagaug

SEQ ID NO: 1199613 - RNA, 19 nt, Homo sapiens
  misc_RNA (1)...(19): siRNA sense strand
ccacaaaggcugccgagaa

SEQ ID NO: 1199614 - RNA, 19 nt, Homo sapiens
  misc_RNA (1)...(19): siRNA sense strand
aggaggaccuuuaaugaaa

SEQ ID NO: 1199615 - RNA, 19 nt, Homo sapiens
  misc_RNA (1)...(19): siRNA sense strand
aagaacaacuucaccagaa

SEQ ID NO: 1199616 - RNA, 19 nt, Homo sapiens
  misc_RNA (1)...(19): siRNA sense strand
agaugaagaugaaggaauu

SEQ ID NO: 1199617 - RNA, 19 nt, Homo sapiens
  misc_RNA (1)...(19): siRNA sense strand
gaucaugagugguguguac

SEQ ID NO: 1199618 - RNA, 19 nt, Homo sapiens
  misc_RNA (1)...(19): siRNA sense strand
gggaguagguacagacaug

SEQ ID NO: 1199619 - RNA, 19 nt, Homo sapiens
  misc_RNA (1)...(19): siRNA sense strand
gaugagaacaugucaaaca

SEQ ID NO: 1199620 - RNA, 19 nt, Homo sapiens
  misc_RNA (1)...(19): siRNA sense strand
caacagaaucacuuacuga

SEQ ID NO: 1199621 - RNA, 19 nt, Homo sapiens
  misc_RNA (1)...(19): siRNA sense strand
gcaguucaguuguuagaag

SEQ ID NO: 1199622 - RNA, 19 nt, Homo sapiens
  misc_RNA (1)...(19): siRNA sense strand
gaaaugcuaaccugguauu

SEQ ID NO: 1199623 - RNA, 19 nt, Homo sapiens
  misc_RNA (1)...(19): siRNA sense strand
gaagaagcuuguacgugau

SEQ ID NO: 1199624 - RNA, 19 nt, Homo sapiens
  misc_RNA (1)...(19): siRNA sense strand
acaaagaugccuauacuug

SEQ ID NO: 1199625 - RNA, 19 nt, Homo sapiens
  misc_RNA (1)...(19): siRNA sense strand
ccacauaccaagcugauga

SEQ ID NO: 1199626 - RNA, 19 nt, Homo sapiens
  misc_RNA (1)...(19): siRNA sense strand
aaagacagauagcaaguca

SEQ ID NO: 1199627 - RNA, 19 nt, Homo sapiens
  misc_RNA (1)...(19): siRNA sense strand
gaaggagucucugguggau

SEQ ID NO: 1199628 - RNA, 19 nt, Homo sapiens
  misc_RNA (1)...(19): siRNA sense strand
caaacggcaagaaguaaua

SEQ ID NO: 1199629 - RNA, 19 nt, Homo sapiens
  misc_RNA (1)...(19): siRNA sense strand
uaaccagucuguaaacuac

SEQ ID NO: 1199630 - RNA, 19 nt, Homo sapiens
  misc_RNA (1)...(19): siRNA sense strand
uuaaagaagcugauuguga

SEQ ID NO: 1199631 - RNA, 19 nt, Homo sapiens
  misc_RNA (1)...(19): siRNA sense strand
gggaguguguuucugaaga

SEQ ID NO: 1199632 - RNA, 19 nt, Homo sapiens
  misc_RNA (1)...(19): siRNA sense strand
gaagaugagcaguucaguu

SEQ ID NO: 1199633 - RNA, 19 nt, Homo sapiens
  misc_RNA (1)...(19): siRNA sense strand
ggagaaagauaagaagacu

SEQ ID NO: 1199634 - RNA, 19 nt, Homo sapiens
  misc_RNA (1)...(19): siRNA sense strand
ugagaaugcagaacguuua

SEQ ID NO: 1199635 - RNA, 19 nt, Homo sapiens
  misc_RNA (1)...(19): siRNA sense strand
uaacaaagccaaaggaaaa

SEQ ID NO: 1199636 - RNA, 19 nt, Homo sapiens
  misc_RNA (1)...(19): siRNA sense strand
gaaggaagagggagaugau

SEQ ID NO: 1199637 - RNA, 19 nt, Homo sapiens
  misc_RNA (1)...(19): siRNA sense strand
agucaacagugaucucuuu

SEQ ID NO: 1199638 - RNA, 19 nt, Homo sapiens
  misc_RNA (1)...(19): siRNA sense strand
caaaguggcaaguuaugaa

SEQ ID NO: 1199639 - RNA, 19 nt, Homo sapiens
  misc_RNA (1)...(19): siRNA sense strand
aaagaugccuauacuugug

SEQ ID NO: 1199640 - RNA, 19 nt, Homo sapiens
  misc_RNA (1)...(19): siRNA sense strand
uggaaaugcuaaccuggua

SEQ ID NO: 1199641 - RNA, 19 nt, Homo sapiens
  misc_RNA (1)...(19): siRNA sense strand
ucaacacccugaacagaga

SEQ ID NO: 1199642 - RNA, 19 nt, Homo sapiens
  misc_RNA (1)...(19): siRNA sense strand
agaagaagaugagcaguuc

SEQ ID NO: 1199643 - RNA, 19 nt, Homo sapiens
  misc_RNA (1)...(19): siRNA sense strand
gagaaugcagaacguuuaa

SEQ ID NO: 1199644 - RNA, 19 nt, Homo sapiens
  misc_RNA (1)...(19): siRNA sense strand
agacaugaaugaaggacaa

SEQ ID NO: 1199645 - RNA, 19 nt, Homo sapiens
  misc_RNA (1)...(19): siRNA sense strand
gaaaagcuguuccccuguu

SEQ ID NO: 1199646 - RNA, 19 nt, Homo sapiens
  misc_RNA (1)...(19): siRNA sense strand
aaccugguauuuaugcuua

SEQ ID NO: 1199647 - RNA, 19 nt, Homo sapiens
  misc_RNA (1)...(19): siRNA sense strand
gcaaaguggcaaguuauga

SEQ ID NO: 1199648 - RNA, 19 nt, Homo sapiens
  misc_RNA (1)...(19): siRNA sense strand
aggagucucugguggauaa

SEQ ID NO: 1199649 - RNA, 19 nt, Homo sapiens
  misc_RNA (1)...(19): siRNA sense strand
caaagaugccuauacuugu

SEQ ID NO: 1199650 - RNA, 19 nt, Homo sapiens
  misc_RNA (1)...(19): siRNA sense strand
agaaagugcgucucaauga

SEQ ID NO: 1199651 - RNA, 19 nt, Homo sapiens
  misc_RNA (1)...(19): siRNA sense strand
cuaaagacaaggagaaaga

SEQ ID NO: 1199652 - RNA, 19 nt, Homo sapiens
  misc_RNA (1)...(19): siRNA sense strand
gaaguacaucuuugcauca

SEQ ID NO: 1199653 - RNA, 19 nt, Homo sapiens
  misc_RNA (1)...(19): siRNA sense strand
ggaugugauuggagcugua

SEQ ID NO: 1199654 - RNA, 19 nt, Homo sapiens
  misc_RNA (1)...(19): siRNA sense strand
gaaugaaggacaacuacug

SEQ ID NO: 1199655 - RNA, 19 nt, Homo sapiens
  misc_RNA (1)...(19): siRNA sense strand
gaaauuccugucucauuca

SEQ ID NO: 1199656 - RNA, 19 nt, Homo sapiens
  misc_RNA (1)...(19): siRNA sense strand
ucauuggacucagaacuuu

SEQ ID NO: 1199657 - RNA, 19 nt, Homo sapiens
  misc_RNA (1)...(19): siRNA sense strand
uaacucagcggauuaccaa

SEQ ID NO: 1199658 - RNA, 19 nt, Homo sapiens
  misc_RNA (1)...(19): siRNA sense strand
acagauagcaagucaauca

SEQ ID NO: 1199659 - RNA, 19 nt, Homo sapiens
  misc_RNA (1)...(19): siRNA sense strand
augcuaaccugguauuuau

SEQ ID NO: 1199660 - RNA, 19 nt, Homo sapiens
  misc_RNA (1)...(19): siRNA sense strand
uaaaugagguggagauccu

SEQ ID NO: 1199661 - RNA, 19 nt, Homo sapiens
  misc_RNA (1)...(19): siRNA sense strand
gcaagaagagcaaagaaaa

SEQ ID NO: 1199662 - RNA, 19 nt, Homo sapiens
  misc_RNA (1)...(19): siRNA sense strand
gugcaaaggucaaaaugaa

SEQ ID NO: 1199663 - RNA, 19 nt, Homo sapiens
  misc_RNA (1)...(19): siRNA sense strand
auaccaagcugaugaggau

SEQ ID NO: 1199664 - RNA, 19 nt, Homo sapiens
  misc_RNA (1)...(19): siRNA sense strand
gaucuuaggagaacggaau

SEQ ID NO: 1199665 - RNA, 19 nt, Homo sapiens
  misc_RNA (1)...(19): siRNA sense strand
ggagauccuucaggguuug

SEQ ID NO: 1199666 - RNA, 19 nt, Homo sapiens
  misc_RNA (1)...(19): siRNA sense strand
aagaugagcaguucaguug

SEQ ID NO: 1199667 - RNA, 19 nt, Homo sapiens
  misc_RNA (1)...(19): siRNA sense strand
agaaagauguggucaaacg

SEQ ID NO: 1199668 - RNA, 19 nt, Homo sapiens
  misc_RNA (1)...(19): siRNA sense strand
gaugauggcggaucugcuu

SEQ ID NO: 1199669 - RNA, 19 nt, Homo sapiens
  misc_RNA (1)...(19): siRNA sense strand
cccaguaccucgaggagaa

SEQ ID NO: 1199670 - RNA, 19 nt, Homo sapiens
  misc_RNA (1)...(19): siRNA sense strand
gaugggaguguguuucuga

SEQ ID NO: 1199671 - RNA, 19 nt, Homo sapiens
  misc_RNA (1)...(19): siRNA sense strand
ucagauguuugccaaggaa

SEQ ID NO: 1199672 - RNA, 19 nt, Homo sapiens
  misc_RNA (1)...(19): siRNA sense strand
gaaugcagaacguuuaaag

SEQ ID NO: 1199673 - RNA, 19 nt, Homo sapiens
  misc_RNA (1)...(19): siRNA sense strand
gcaaugauuuccaguauga

SEQ ID NO: 1199674 - RNA, 19 nt, Homo sapiens
  misc_RNA (1)...(19): siRNA sense strand
gaaugaaccucucuccaau

SEQ ID NO: 1199675 - RNA, 19 nt, Homo sapiens
  misc_RNA (1)...(19): siRNA sense strand
gggagaagauugagaagga

SEQ ID NO: 1199676 - RNA, 19 nt, Homo sapiens
  misc_RNA (1)...(19): siRNA sense strand
gaaccucucuccaaugaag

SEQ ID NO: 1199677 - RNA, 19 nt, Homo sapiens
  misc_RNA (1)...(19): siRNA sense strand
gcaaugauguccugucucu

SEQ ID NO: 1199678 - RNA, 19 nt, Homo sapiens
  misc_RNA (1)...(19): siRNA sense strand
uggagaaaguuaaagcuua

SEQ ID NO: 1199679 - RNA, 19 nt, Homo sapiens
  misc_RNA (1)...(19): siRNA sense strand
gagcaagccugccucuuag

SEQ ID NO: 1199680 - RNA, 19 nt, Homo sapiens
  misc_RNA (1)...(19): siRNA sense strand
ggagacaguuugcaaugau

SEQ ID NO: 1199681 - RNA, 19 nt, Homo sapiens
  misc_RNA (1)...(19): siRNA sense strand
ugagcaagccugccucuua

SEQ ID NO: 1199682 - RNA, 19 nt, Homo sapiens
  misc_RNA (1)...(19): siRNA sense strand
ggagaaaguuaaagcuuac

SEQ ID NO: 1199683 - RNA, 19 nt, Homo sapiens
  misc_RNA (1)...(19): siRNA sense strand
agaaggagcuggagacagu

SEQ ID NO: 1199684 - RNA, 19 nt, Homo sapiens
  misc_RNA (1)...(19): siRNA sense strand
aaacaagccuucgaugaug

SEQ ID NO: 1199685 - RNA, 19 nt, Homo sapiens
  misc_RNA (1)...(19): siRNA sense strand
caaacaagccuucgaugau

SEQ ID NO: 1199686 - RNA, 19 nt, Homo sapiens
  misc_RNA (1)...(19): siRNA sense strand
gacauggccuccgcuauga

SEQ ID NO: 1199687 - RNA, 19 nt, Homo sapiens
  misc_RNA (1)...(19): siRNA sense strand
acaaguuccugaucaagaa

SEQ ID NO: 1199688 - RNA, 19 nt, Homo sapiens
  misc_RNA (1)...(19): siRNA sense strand
ccaaacaagccuucgauga

SEQ ID NO: 1199689 - RNA, 19 nt, Homo sapiens
  misc_RNA (1)...(19): siRNA sense strand
gaaaagaaauuggagaaag

SEQ ID NO: 1199690 - RNA, 19 nt, Homo sapiens
  misc_RNA (1)...(19): siRNA sense strand
cgacauggccuccgcuaug

SEQ ID NO: 1199691 - RNA, 19 nt, Homo sapiens
  misc_RNA (1)...(19): siRNA sense strand
ugaaugaaccucucuccaa

SEQ ID NO: 1199692 - RNA, 19 nt, Homo sapiens
  misc_RNA (1)...(19): siRNA sense strand
gagacaguuugcaaugaug

SEQ ID NO: 1199693 - RNA, 19 nt, Homo sapiens
  misc_RNA (1)...(19): siRNA sense strand
ggaugaagaagcaggagaa

SEQ ID NO: 1199694 - RNA, 19 nt, Homo sapiens
  misc_RNA (1)...(19): siRNA sense strand
ucaagaacugcaaugauuu

SEQ ID NO: 1199695 - RNA, 19 nt, Homo sapiens
  misc_RNA (1)...(19): siRNA sense strand
aaaugaagggugauuacua

SEQ ID NO: 1199696 - RNA, 19 nt, Homo sapiens
  misc_RNA (1)...(19): siRNA sense strand
gacaaguuccugaucaaga

SEQ ID NO: 1199697 - RNA, 19 nt, Homo sapiens
  misc_RNA (1)...(19): siRNA sense strand
ugauuacuaccgcuacuua

SEQ ID NO: 1199698 - RNA, 19 nt, Homo sapiens
  misc_RNA (1)...(19): siRNA sense strand
cugcaaugauuuccaguau

SEQ ID NO: 1199699 - RNA, 19 nt, Homo sapiens
  misc_RNA (1)...(19): siRNA sense strand
augaaccucucuccaauga

SEQ ID NO: 1199700 - RNA, 19 nt, Homo sapiens
  misc_RNA (1)...(19): siRNA sense strand
ccacgcugaucaugcaguu

SEQ ID NO: 1199701 - RNA, 19 nt, Homo sapiens
  misc_RNA (1)...(19): siRNA sense strand
caagaacugcaaugauuuc

SEQ ID NO: 1199702 - RNA, 19 nt, Homo sapiens
  misc_RNA (1)...(19): siRNA sense strand
aaugaagggugauuacuac

SEQ ID NO: 1199703 - RNA, 19 nt, Homo sapiens
  misc_RNA (1)...(19): siRNA sense strand
acuaugagauccagaaugc

SEQ ID NO: 1199704 - RNA, 19 nt, Homo sapiens
  misc_RNA (1)...(19): siRNA sense strand
ccagcaggaugaagaagca

SEQ ID NO: 1199705 - RNA, 19 nt, Homo sapiens
  misc_RNA (1)...(19): siRNA sense strand
agccuucgaugaugccaua

SEQ ID NO: 1199706 - RNA, 19 nt, Homo sapiens
  misc_RNA (1)...(19): siRNA sense strand
gagggucauuagcagcauu

SEQ ID NO: 1199707 - RNA, 19 nt, Homo sapiens
  misc_RNA (1)...(19): siRNA sense strand
uggagacaguuugcaauga

SEQ ID NO: 1199708 - RNA, 19 nt, Homo sapiens
  misc_RNA (1)...(19): siRNA sense strand
uagcagcauugagcagaaa

SEQ ID NO: 1199709 - RNA, 19 nt, Homo sapiens
  misc_RNA (1)...(19): siRNA sense strand
caacuucuccguguucuac

SEQ ID NO: 1199710 - RNA, 19 nt, Homo sapiens
  misc_RNA (1)...(19): siRNA sense strand
cgagcgaccagcaggauga

SEQ ID NO: 1199711 - RNA, 19 nt, Homo sapiens
  misc_RNA (1)...(19): siRNA sense strand
gcgaccagcaggaugaaga

SEQ ID NO: 1199712 - RNA, 19 nt, Homo sapiens
  misc_RNA (1)...(19): siRNA sense strand
ugaagcugccuacaaggaa

SEQ ID NO: 1199713 - RNA, 19 nt, Homo sapiens
  misc_RNA (1)...(19): siRNA sense strand
ccagaaugcaccugagcaa

SEQ ID NO: 1199714 - RNA, 19 nt, Homo sapiens
  misc_RNA (1)...(19): siRNA sense strand
gcugagcuggacacacuaa

SEQ ID NO: 1199715 - RNA, 19 nt, Homo sapiens
  misc_RNA (1)...(19): siRNA sense strand
cauggcugauggaaacgaa

SEQ ID NO: 1199716 - RNA, 19 nt, Homo sapiens
  misc_RNA (1)...(19): siRNA sense strand
ucuccguguucuacuauga

SEQ ID NO: 1199717 - RNA, 19 nt, Homo sapiens
  misc_RNA (1)...(19): siRNA sense strand
cagcaaagagcagaugcaa

SEQ ID NO: 1199718 - RNA, 19 nt, Homo sapiens
  misc_RNA (1)...(19): siRNA sense strand
cuaugaaggcggugacaga

SEQ ID NO: 1199719 - RNA, 19 nt, Homo sapiens
  misc_RNA (1)...(19): siRNA sense strand
aucgaaaucuccucucugu

SEQ ID NO: 1199720 - RNA, 19 nt, Homo sapiens
  misc_RNA (1)...(19): siRNA sense strand
ggacuccacgcugaucaug

SEQ ID NO: 1199721 - RNA, 19 nt, Homo sapiens
  misc_RNA (1)...(19): siRNA sense strand
cuacaagaaugugguuggu

SEQ ID NO: 1199722 - RNA, 19 nt, Homo sapiens
  misc_RNA (1)...(19): siRNA sense strand
ggagcgcuacgacgacaug

SEQ ID NO: 1199723 - RNA, 19 nt, Homo sapiens
  misc_RNA (1)...(19): siRNA sense strand
gaaaaugaagggugauuac

SEQ ID NO: 1199724 - RNA, 19 nt, Homo sapiens
  misc_RNA (1)...(19): siRNA sense strand
uuagcagcauugagcagaa

SEQ ID NO: 1199725 - RNA, 19 nt, Homo sapiens
  misc_RNA (1)...(19): siRNA sense strand
ucuguggccuacaagaaug

SEQ ID NO: 1199726 - RNA, 19 nt, Homo sapiens
  misc_RNA (1)...(19): siRNA sense strand
gaaacgaaaagaaauugga

SEQ ID NO: 1199727 - RNA, 19 nt, Homo sapiens
  misc_RNA (1)...(19): siRNA sense strand
aagcuuaccgggagaagau

SEQ ID NO: 1199728 - RNA, 19 nt, Homo sapiens
  misc_RNA (1)...(19): siRNA sense strand
cgaccagcaggaugaagaa

SEQ ID NO: 1199729 - RNA, 19 nt, Homo sapiens
  misc_RNA (1)...(19): siRNA sense strand
gagcuggacacacuaaacg

SEQ ID NO: 1199730 - RNA, 19 nt, Homo sapiens
  misc_RNA (1)...(19): siRNA sense strand
ggacacacuaaacgaggau

SEQ ID NO: 1199731 - RNA, 19 nt, Homo sapiens
  misc_RNA (1)...(19): siRNA sense strand
ggugacagagcugaaugaa

SEQ ID NO: 1199732 - RNA, 19 nt, Homo sapiens
  misc_RNA (1)...(19): siRNA sense strand
agaugaaccucuacuauga

SEQ ID NO: 1199733 - RNA, 19 nt, Homo sapiens
  misc_RNA (1)...(19): siRNA sense strand
gaucugugcucagccaauu

SEQ ID NO: 1199734 - RNA, 19 nt, Homo sapiens
  misc_RNA (1)...(19): siRNA sense strand
gagaugaaccucuacuaug

SEQ ID NO: 1199735 - RNA, 19 nt, Homo sapiens
  misc_RNA (1)...(19): siRNA sense strand
ccaccaacaugcucagcua

SEQ ID NO: 1199736 - RNA, 19 nt, Homo sapiens
  misc_RNA (1)...(19): siRNA sense strand
guacguggccgacaacuuc

SEQ ID NO: 1199737 - RNA, 19 nt, Homo sapiens
  misc_RNA (1)...(19): siRNA sense strand
gacaagcgccucacucuca

SEQ ID NO: 1199738 - RNA, 19 nt, Homo sapiens
  misc_RNA (1)...(19): siRNA sense strand
ucagccagaucuaccagua

SEQ ID NO: 1199739 - RNA, 19 nt, Homo sapiens
  misc_RNA (1)...(19): siRNA sense strand
cgagaugaaccucuacuau

SEQ ID NO: 1199740 - RNA, 19 nt, Homo sapiens
  misc_RNA (1)...(19): siRNA sense strand
agaacucacugaccuucaa

SEQ ID NO: 1199741 - RNA, 19 nt, Homo sapiens
  misc_RNA (1)...(19): siRNA sense strand
gcucaacgacugcuucaag

SEQ ID NO: 1199742 - RNA, 19 nt, Homo sapiens
  misc_RNA (1)...(19): siRNA sense strand
gaaccucuacuaugagaac

SEQ ID NO: 1199743 - RNA, 19 nt, Homo sapiens
  misc_RNA (1)...(19): siRNA sense strand
gccacaaccugucgcucaa

SEQ ID NO: 1199744 - RNA, 19 nt, Homo sapiens
  misc_RNA (1)...(19): siRNA sense strand
ccaauucagcccucacuuc

SEQ ID NO: 1199745 - RNA, 19 nt, Homo sapiens
  misc_RNA (1)...(19): siRNA sense strand
ucaccaaccucagcaacca

SEQ ID NO: 1199746 - RNA, 19 nt, Homo sapiens
  misc_RNA (1)...(19): siRNA sense strand
caauucagcccucacuucu

SEQ ID NO: 1199747 - RNA, 19 nt, Homo sapiens
  misc_RNA (1)...(19): siRNA sense strand
cucaacgacugcuucaaga

SEQ ID NO: 1199748 - RNA, 19 nt, Homo sapiens
  misc_RNA (1)...(19): siRNA sense strand
ccucuacuaugagaacuuc

SEQ ID NO: 1199749 - RNA, 19 nt, Homo sapiens
  misc_RNA (1)...(19): siRNA sense strand
gcccugagcccagugacaa

SEQ ID NO: 1199750 - RNA, 19 nt, Homo sapiens
  misc_RNA (1)...(19): siRNA sense strand
gcucagcuacggaggaucu

SEQ ID NO: 1199751 - RNA, 19 nt, Homo sapiens
  misc_RNA (1)...(19): siRNA sense strand
ucaacgacugcuucaagaa

SEQ ID NO: 1199752 - RNA, 19 nt, Homo sapiens
  misc_RNA (1)...(19): siRNA sense strand
auucagcccucacuucuac

SEQ ID NO: 1199753 - RNA, 19 nt, Homo sapiens
  misc_RNA (1)...(19): siRNA sense strand
augaaccucuacuaugaga

SEQ ID NO: 1199754 - RNA, 19 nt, Homo sapiens
  misc_RNA (1)...(19): siRNA sense strand
agaugaaccucuacuauga

SEQ ID NO: 1199755 - RNA, 19 nt, Homo sapiens
  misc_RNA (1)...(19): siRNA sense strand
gaucugugcucagccaauu

SEQ ID NO: 1199756 - RNA, 19 nt, Homo sapiens
  misc_RNA (1)...(19): siRNA sense strand
gagaugaaccucuacuaug

SEQ ID NO: 1199757 - RNA, 19 nt, Homo sapiens
  misc_RNA (1)...(19): siRNA sense strand
ccaccaacaugcucagcua

SEQ ID NO: 1199758 - RNA, 19 nt, Homo sapiens
  misc_RNA (1)...(19): siRNA sense strand
guacguggccgacaacuuc

SEQ ID NO: 1199759 - RNA, 19 nt, Homo sapiens
  misc_RNA (1)...(19): siRNA sense strand
gacaagcgccucacucuca

SEQ ID NO: 1199760 - RNA, 19 nt, Homo sapiens
  misc_RNA (1)...(19): siRNA sense strand
ucagccagaucuaccagua

SEQ ID NO: 1199761 - RNA, 19 nt, Homo sapiens
  misc_RNA (1)...(19): siRNA sense strand
cgagaugaaccucuacuau

SEQ ID NO: 1199762 - RNA, 19 nt, Homo sapiens
  misc_RNA (1)...(19): siRNA sense strand
agaacucacugaccuucaa

SEQ ID NO: 1199763 - RNA, 19 nt, Homo sapiens
  misc_RNA (1)...(19): siRNA sense strand
gcucaacgacugcuucaag

SEQ ID NO: 1199764 - RNA, 19 nt, Homo sapiens
  misc_RNA (1)...(19): siRNA sense strand
gaaccucuacuaugagaac

SEQ ID NO: 1199765 - RNA, 19 nt, Homo sapiens
  misc_RNA (1)...(19): siRNA sense strand
gccacaaccugucgcucaa

SEQ ID NO: 1199766 - RNA, 19 nt, Homo sapiens
  misc_RNA (1)...(19): siRNA sense strand
ccaauucagcccucacuuc

SEQ ID NO: 1199767 - RNA, 19 nt, Homo sapiens
  misc_RNA (1)...(19): siRNA sense strand
ucaccaaccucagcaacca

SEQ ID NO: 1199768 - RNA, 19 nt, Homo sapiens
  misc_RNA (1)...(19): siRNA sense strand
caauucagcccucacuucu

SEQ ID NO: 1199769 - RNA, 19 nt, Homo sapiens
  misc_RNA (1)...(19): siRNA sense strand
cucaacgacugcuucaaga

SEQ ID NO: 1199770 - RNA, 19 nt, Homo sapiens
  misc_RNA (1)...(19): siRNA sense strand
ccucuacuaugagaacuuc

SEQ ID NO: 1199771 - RNA, 19 nt, Homo sapiens
  misc_RNA (1)...(19): siRNA sense strand
gcccugagcccagugacaa

SEQ ID NO: 1199772 - RNA, 19 nt, Homo sapiens
  misc_RNA (1)...(19): siRNA sense strand
gcucagcuacggaggaucu

SEQ ID NO: 1199773 - RNA, 19 nt, Homo sapiens
  misc_RNA (1)...(19): siRNA sense strand
ucaacgacugcuucaagaa

SEQ ID NO: 1199774 - RNA, 19 nt, Homo sapiens
  misc_RNA (1)...(19): siRNA sense strand
auucagcccucacuucuac

SEQ ID NO: 1199775 - RNA, 19 nt, Homo sapiens
  misc_RNA (1)...(19): siRNA sense strand
augaaccucuacuaugaga

SEQ ID NO: 1199776 - RNA, 19 nt, Homo sapiens
  misc_RNA (1)...(19): siRNA sense strand
gaagaaagccaacgacaaa

SEQ ID NO: 1199777 - RNA, 19 nt, Homo sapiens
  misc_RNA (1)...(19): siRNA sense strand
ggagagcgauggucaguug

SEQ ID NO: 1199778 - RNA, 19 nt, Homo sapiens
  misc_RNA (1)...(19): siRNA sense strand
aaacggagauccagaagaa

SEQ ID NO: 1199779 - RNA, 19 nt, Homo sapiens
  misc_RNA (1)...(19): siRNA sense strand
ggacagugcuacacacaga

SEQ ID NO: 1199780 - RNA, 19 nt, Homo sapiens
  misc_RNA (1)...(19): siRNA sense strand
aagaagagccuuacaauga

SEQ ID NO: 1199781 - RNA, 19 nt, Homo sapiens
  misc_RNA (1)...(19): siRNA sense strand
ggagaaacaagaaagcaua

SEQ ID NO: 1199782 - RNA, 19 nt, Homo sapiens
  misc_RNA (1)...(19): siRNA sense strand
ucgagggacuucauucuua

SEQ ID NO: 1199783 - RNA, 19 nt, Homo sapiens
  misc_RNA (1)...(19): siRNA sense strand
caagaaagcauacccucua

SEQ ID NO: 1199784 - RNA, 19 nt, Homo sapiens
  misc_RNA (1)...(19): siRNA sense strand
gugaaggguuucccgcuua

SEQ ID NO: 1199785 - RNA, 19 nt, Homo sapiens
  misc_RNA (1)...(19): siRNA sense strand
ggaagaguaugaagaagag

SEQ ID NO: 1199786 - RNA, 19 nt, Homo sapiens
  misc_RNA (1)...(19): siRNA sense strand
gaagaagagccuuacaaug

SEQ ID NO: 1199787 - RNA, 19 nt, Homo sapiens
  misc_RNA (1)...(19): siRNA sense strand
gaagaaucauauccagaug

SEQ ID NO: 1199788 - RNA, 19 nt, Homo sapiens
  misc_RNA (1)...(19): siRNA sense strand
caagugccauuaaugaaga

SEQ ID NO: 1199789 - RNA, 19 nt, Homo sapiens
  misc_RNA (1)...(19): siRNA sense strand
ccaaagaggaagaguauga

SEQ ID NO: 1199790 - RNA, 19 nt, Homo sapiens
  misc_RNA (1)...(19): siRNA sense strand
uuucagaaguggaagcuua

SEQ ID NO: 1199791 - RNA, 19 nt, Homo sapiens
  misc_RNA (1)...(19): siRNA sense strand
ugaagcagauccgcucaua

SEQ ID NO: 1199792 - RNA, 19 nt, Homo sapiens
  misc_RNA (1)...(19): siRNA sense strand
caaaguccaccaaguguuu

SEQ ID NO: 1199793 - RNA, 19 nt, Homo sapiens
  misc_RNA (1)...(19): siRNA sense strand
gaggaaggcagcauagaaa

SEQ ID NO: 1199794 - RNA, 19 nt, Homo sapiens
  misc_RNA (1)...(19): siRNA sense strand
gaaaacaccccaucacaaa

SEQ ID NO: 1199795 - RNA, 19 nt, Homo sapiens
  misc_RNA (1)...(19): siRNA sense strand
ccaccuccgugcuuucuaa

SEQ ID NO: 1199796 - RNA, 19 nt, Homo sapiens
  misc_RNA (1)...(19): siRNA sense strand
cccaauuccuaaaguguua

SEQ ID NO: 1199797 - RNA, 19 nt, Homo sapiens
  misc_RNA (1)...(19): siRNA sense strand
gagaugaggaguacaagga

SEQ ID NO: 1199798 - RNA, 19 nt, Homo sapiens
  misc_RNA (1)...(19): siRNA sense strand
cagcaguggugaaaguauu

SEQ ID NO: 1199799 - RNA, 19 nt, Homo sapiens
  misc_RNA (1)...(19): siRNA sense strand
acaagaaguugaagaccuu

SEQ ID NO: 1199800 - RNA, 19 nt, Homo sapiens
  misc_RNA (1)...(19): siRNA sense strand
ugacugcacuggcuaucuu

SEQ ID NO: 1199801 - RNA, 19 nt, Homo sapiens
  misc_RNA (1)...(19): siRNA sense strand
aagaaagcauacccucuaa

SEQ ID NO: 1199802 - RNA, 19 nt, Homo sapiens
  misc_RNA (1)...(19): siRNA sense strand
gcuaagcccgugaaacauu

SEQ ID NO: 1199803 - RNA, 19 nt, Homo sapiens
  misc_RNA (1)...(19): siRNA sense strand
gaagaugaggccauaguca

SEQ ID NO: 1199804 - RNA, 19 nt, Homo sapiens
  misc_RNA (1)...(19): siRNA sense strand
gaaauccaccuccgugcuu

SEQ ID NO: 1199805 - RNA, 19 nt, Homo sapiens
  misc_RNA (1)...(19): siRNA sense strand
guaguggccuucaccaaag

SEQ ID NO: 1199806 - RNA, 19 nt, Homo sapiens
  misc_RNA (1)...(19): siRNA sense strand
cgagggacuucauucuuau

SEQ ID NO: 1199807 - RNA, 19 nt, Homo sapiens
  misc_RNA (1)...(19): siRNA sense strand
aaagagggcuggccagaac

SEQ ID NO: 1199808 - RNA, 19 nt, Homo sapiens
  misc_RNA (1)...(19): siRNA sense strand
uuacucaucucaggcaauu

SEQ ID NO: 1199809 - RNA, 19 nt, Homo sapiens
  misc_RNA (1)...(19): siRNA sense strand
ugagaaagccaaugaacug

SEQ ID NO: 1199810 - RNA, 19 nt, Homo sapiens
  misc_RNA (1)...(19): siRNA sense strand
uaucagcaguggugaaagu

SEQ ID NO: 1199811 - RNA, 19 nt, Homo sapiens
  misc_RNA (1)...(19): siRNA sense strand
gcucagcucagccacauug

SEQ ID NO: 1199812 - RNA, 19 nt, Homo sapiens
  misc_RNA (1)...(19): siRNA sense strand
guauugaaguccucaguac

SEQ ID NO: 1199813 - RNA, 19 nt, Homo sapiens
  misc_RNA (1)...(19): siRNA sense strand
ucagaggagaccuguguua

SEQ ID NO: 1199814 - RNA, 19 nt, Homo sapiens
  misc_RNA (1)...(19): siRNA sense strand
ggagcucugugacacugaa

SEQ ID NO: 1199815 - RNA, 19 nt, Homo sapiens
  misc_RNA (1)...(19): siRNA sense strand
ggagcuuucagccgaauuu

SEQ ID NO: 1199816 - RNA, 19 nt, Homo sapiens
  misc_RNA (1)...(19): siRNA sense strand
ggugaaaguauugaaguuu

SEQ ID NO: 1199817 - RNA, 19 nt, Homo sapiens
  misc_RNA (1)...(19): siRNA sense strand
gaaagcauacccucuaagc

SEQ ID NO: 1199818 - RNA, 19 nt, Homo sapiens
  misc_RNA (1)...(19): siRNA sense strand
ugaagaagagccuuacaau

SEQ ID NO: 1199819 - RNA, 19 nt, Homo sapiens
  misc_RNA (1)...(19): siRNA sense strand
gcaaaguccaccaaguguu

SEQ ID NO: 1199820 - RNA, 19 nt, Homo sapiens
  misc_RNA (1)...(19): siRNA sense strand
ggacuucauucuuauuucc

SEQ ID NO: 1199821 - RNA, 19 nt, Homo sapiens
  misc_RNA (1)...(19): siRNA sense strand
cuaagcccgugaaacauug

SEQ ID NO: 1199822 - RNA, 19 nt, Homo sapiens
  misc_RNA (1)...(19): siRNA sense strand
aagcaucaguccuccagaa

SEQ ID NO: 1199823 - RNA, 19 nt, Homo sapiens
  misc_RNA (1)...(19): siRNA sense strand
caccaaagaggaagaguau

SEQ ID NO: 1199824 - RNA, 19 nt, Homo sapiens
  misc_RNA (1)...(19): siRNA sense strand
ucugugacacugaauauuu

SEQ ID NO: 1199825 - RNA, 19 nt, Homo sapiens
  misc_RNA (1)...(19): siRNA sense strand
gaaacggagauccagaaga

SEQ ID NO: 1199826 - RNA, 19 nt, Homo sapiens
  misc_RNA (1)...(19): siRNA sense strand
uugcauggcuuauaucucu

SEQ ID NO: 1199827 - RNA, 19 nt, Homo sapiens
  misc_RNA (1)...(19): siRNA sense strand
ugaaagacuuggauuacac

SEQ ID NO: 1199828 - RNA, 19 nt, Homo sapiens
  misc_RNA (1)...(19): siRNA sense strand
gcuggccugucuuccgaua

SEQ ID NO: 1199829 - RNA, 19 nt, Homo sapiens
  misc_RNA (1)...(19): siRNA sense strand
gacagaggaaggcagcaua

SEQ ID NO: 1199830 - RNA, 19 nt, Homo sapiens
  misc_RNA (1)...(19): siRNA sense strand
agaagagccuuacaaugag

SEQ ID NO: 1199831 - RNA, 19 nt, Homo sapiens
  misc_RNA (1)...(19): siRNA sense strand
agaggaagaguaugaagaa

SEQ ID NO: 1199832 - RNA, 19 nt, Homo sapiens
  misc_RNA (1)...(19): siRNA sense strand
uaucaugucuguggauuac

SEQ ID NO: 1199833 - RNA, 19 nt, Homo sapiens
  misc_RNA (1)...(19): siRNA sense strand
gaggagaccuguguuaccu

SEQ ID NO: 1199834 - RNA, 19 nt, Homo sapiens
  misc_RNA (1)...(19): siRNA sense strand
gaaggggcaugauuugugu

SEQ ID NO: 1199835 - RNA, 19 nt, Homo sapiens
  misc_RNA (1)...(19): siRNA sense strand
cagcauauaacaaacuuuc

SEQ ID NO: 1199836 - RNA, 19 nt, Homo sapiens
  misc_RNA (1)...(19): siRNA sense strand
gcauacgugcaccaccuua

SEQ ID NO: 1199837 - RNA, 19 nt, Homo sapiens
  misc_RNA (1)...(19): siRNA sense strand
caaagaggaagaguaugaa

SEQ ID NO: 1199838 - RNA, 19 nt, Homo sapiens
  misc_RNA (1)...(19): siRNA sense strand
ggaguacaaggaaguggaa

SEQ ID NO: 1199839 - RNA, 19 nt, Homo sapiens
  misc_RNA (1)...(19): siRNA sense strand
gagucuguguugaucaaga

SEQ ID NO: 1199840 - RNA, 19 nt, Homo sapiens
  misc_RNA (1)...(19): siRNA sense strand
cguaguggccuucaccaaa

SEQ ID NO: 1199841 - RNA, 19 nt, Homo sapiens
  misc_RNA (1)...(19): siRNA sense strand
cagaaacggagauccagaa

SEQ ID NO: 1199842 - RNA, 19 nt, Homo sapiens
  misc_RNA (1)...(19): siRNA sense strand
ccagaacgccuuaaaauuc

SEQ ID NO: 1199843 - RNA, 19 nt, Homo sapiens
  misc_RNA (1)...(19): siRNA sense strand
ugaaggguuucccgcuuau

SEQ ID NO: 1199844 - RNA, 19 nt, Homo sapiens
  misc_RNA (1)...(19): siRNA sense strand
gggacuucauucuuauuuc

SEQ ID NO: 1199845 - RNA, 19 nt, Homo sapiens
  misc_RNA (1)...(19): siRNA sense strand
uggacuaccuggauaugga

SEQ ID NO: 1199846 - RNA, 19 nt, Homo sapiens
  misc_RNA (1)...(19): siRNA sense strand
aaagcaaaguccaccaagu

SEQ ID NO: 1199847 - RNA, 19 nt, Homo sapiens
  misc_RNA (1)...(19): siRNA sense strand
gcaccaccuuacccuauac

SEQ ID NO: 1199848 - RNA, 19 nt, Homo sapiens
  misc_RNA (1)...(19): siRNA sense strand
agaagaaucauauccagau

SEQ ID NO: 1199849 - RNA, 19 nt, Homo sapiens
  misc_RNA (1)...(19): siRNA sense strand
caucagcgaggacaguauu

SEQ ID NO: 1199850 - RNA, 19 nt, Homo sapiens
  misc_RNA (1)...(19): siRNA sense strand
ccuccgugcuuucuaaauc

SEQ ID NO: 1199851 - RNA, 19 nt, Homo sapiens
  misc_RNA (1)...(19): siRNA sense strand
ucaccaaagaggaagagua

SEQ ID NO: 1199852 - RNA, 19 nt, Homo sapiens
  misc_RNA (1)...(19): siRNA sense strand
cccaaugacaccaaaguuu

SEQ ID NO: 1199853 - RNA, 19 nt, Homo sapiens
  misc_RNA (1)...(19): siRNA sense strand
guacaaggaaguggaagug

SEQ ID NO: 1199854 - RNA, 19 nt, Homo sapiens
  misc_RNA (1)...(19): siRNA sense strand
gaugguggagaaacaagaa

SEQ ID NO: 1199855 - RNA, 19 nt, Homo sapiens
  misc_RNA (1)...(19): siRNA sense strand
ucagauugauagagcacuu

SEQ ID NO: 1199856 - RNA, 19 nt, Homo sapiens
  misc_RNA (1)...(19): siRNA sense strand
guucagaggagaccugugu

SEQ ID NO: 1199857 - RNA, 19 nt, Homo sapiens
  misc_RNA (1)...(19): siRNA sense strand
ucuagaagaaugcccaauu

SEQ ID NO: 1199858 - RNA, 19 nt, Homo sapiens
  misc_RNA (1)...(19): siRNA sense strand
aaacuuggacuaccuggau

SEQ ID NO: 1199859 - RNA, 19 nt, Homo sapiens
  misc_RNA (1)...(19): siRNA sense strand
gaaguggaagugacugagu

SEQ ID NO: 1199860 - RNA, 19 nt, Homo sapiens
  misc_RNA (1)...(19): siRNA sense strand
gcucugugacacugaauau

SEQ ID NO: 1199861 - RNA, 19 nt, Homo sapiens
  misc_RNA (1)...(19): siRNA sense strand
ugccauuaaugaagaagaa

SEQ ID NO: 1199862 - RNA, 19 nt, Homo sapiens
  misc_RNA (1)...(19): siRNA sense strand
cuacccaagugccauuaau

SEQ ID NO: 1199863 - RNA, 19 nt, Homo sapiens
  misc_RNA (1)...(19): siRNA sense strand
ccucuaagcccagucaaga

SEQ ID NO: 1199864 - RNA, 19 nt, Homo sapiens
  misc_RNA (1)...(19): siRNA sense strand
ugcaccaccuuacccuaua

SEQ ID NO: 1199865 - RNA, 19 nt, Homo sapiens
  misc_RNA (1)...(19): siRNA sense strand
agaggaaggcagcauagaa

SEQ ID NO: 1199866 - RNA, 19 nt, Homo sapiens
  misc_RNA (1)...(19): siRNA sense strand
ccaagugccauuaaugaag

SEQ ID NO: 1199867 - RNA, 19 nt, Homo sapiens
  misc_RNA (1)...(19): siRNA sense strand
gcauauaacaaacuuucuc

SEQ ID NO: 1199868 - RNA, 19 nt, Homo sapiens
  misc_RNA (1)...(19): siRNA sense strand
aagcaaaguccaccaagug

SEQ ID NO: 1199869 - RNA, 19 nt, Homo sapiens
  misc_RNA (1)...(19): siRNA sense strand
caacagcauauaacaaacu

SEQ ID NO: 1199870 - RNA, 19 nt, Homo sapiens
  misc_RNA (1)...(19): siRNA sense strand
cuuugcacauuauggauuu

SEQ ID NO: 1199871 - RNA, 19 nt, Homo sapiens
  misc_RNA (1)...(19): siRNA sense strand
acgcuaagcccgugaaaca

SEQ ID NO: 1199872 - RNA, 19 nt, Homo sapiens
  misc_RNA (1)...(19): siRNA sense strand
ggaagaugaggccauaguc

SEQ ID NO: 1199873 - RNA, 19 nt, Homo sapiens
  misc_RNA (1)...(19): siRNA sense strand
aaacaccccaucacaaaua

SEQ ID NO: 1199874 - RNA, 19 nt, Homo sapiens
  misc_RNA (1)...(19): siRNA sense strand
guaucaugucuguggauua

SEQ ID NO: 1199875 - RNA, 19 nt, Homo sapiens
  misc_RNA (1)...(19): siRNA sense strand
cgaggacaguauugaaguc

SEQ ID NO: 1199876 - RNA, 19 nt, Homo sapiens
  misc_RNA (1)...(19): siRNA sense strand
uugcagagcugacauuaaa

SEQ ID NO: 1199877 - RNA, 19 nt, Homo sapiens
  misc_RNA (1)...(19): siRNA sense strand
gaacagaaacugacauuuu

SEQ ID NO: 1199878 - RNA, 19 nt, Homo sapiens
  misc_RNA (1)...(19): siRNA sense strand
guacauggcauccaccuuu

SEQ ID NO: 1199879 - RNA, 19 nt, Homo sapiens
  misc_RNA (1)...(19): siRNA sense strand
gaagaggugcggaagauga

SEQ ID NO: 1199880 - RNA, 19 nt, Homo sapiens
  misc_RNA (1)...(19): siRNA sense strand
guugaagacuccacugauu

SEQ ID NO: 1199881 - RNA, 19 nt, Homo sapiens
  misc_RNA (1)...(19): siRNA sense strand
ccaaaguccuggagguuga

SEQ ID NO: 1199882 - RNA, 19 nt, Homo sapiens
  misc_RNA (1)...(19): siRNA sense strand
ggccaggguucuucuuuga

SEQ ID NO: 1199883 - RNA, 19 nt, Homo sapiens
  misc_RNA (1)...(19): siRNA sense strand
gcugaucgcugagggcaaa

SEQ ID NO: 1199884 - RNA, 19 nt, Homo sapiens
  misc_RNA (1)...(19): siRNA sense strand
ggaacacaguggugaucaa

SEQ ID NO: 1199885 - RNA, 19 nt, Homo sapiens
  misc_RNA (1)...(19): siRNA sense strand
acucaacgcugaacacuuc

SEQ ID NO: 1199886 - RNA, 19 nt, Homo sapiens
  misc_RNA (1)...(19): siRNA sense strand
ggacuucauccagcuguua

SEQ ID NO: 1199887 - RNA, 19 nt, Homo sapiens
  misc_RNA (1)...(19): siRNA sense strand
ccacugauuucuucaaguc

SEQ ID NO: 1199888 - RNA, 19 nt, Homo sapiens
  misc_RNA (1)...(19): siRNA sense strand
gaaggagggccacgaagug

SEQ ID NO: 1199889 - RNA, 19 nt, Homo sapiens
  misc_RNA (1)...(19): siRNA sense strand
gaagaccacauguucauag

SEQ ID NO: 1199890 - RNA, 19 nt, Homo sapiens
  misc_RNA (1)...(19): siRNA sense strand
caaaggagagaauugcauu

SEQ ID NO: 1199891 - RNA, 19 nt, Homo sapiens
  misc_RNA (1)...(19): siRNA sense strand
gugauggccuggaguuaga

SEQ ID NO: 1199892 - RNA, 19 nt, Homo sapiens
  misc_RNA (1)...(19): siRNA sense strand
gagugccgguauucaagua

SEQ ID NO: 1199893 - RNA, 19 nt, Homo sapiens
  misc_RNA (1)...(19): siRNA sense strand
agacagugaccuucgaaua

SEQ ID NO: 1199894 - RNA, 19 nt, Homo sapiens
  misc_RNA (1)...(19): siRNA sense strand
ggaaggagccaccuaugag

SEQ ID NO: 1199895 - RNA, 19 nt, Homo sapiens
  misc_RNA (1)...(19): siRNA sense strand
uagaagaggugcggaagau

SEQ ID NO: 1199896 - RNA, 19 nt, Homo sapiens
  misc_RNA (1)...(19): siRNA sense strand
ggaagaccacauguucaua

SEQ ID NO: 1199897 - RNA, 19 nt, Homo sapiens
  misc_RNA (1)...(19): siRNA sense strand
agacuccacugauuucuuc

SEQ ID NO: 1199898 - RNA, 19 nt, Homo sapiens
  misc_RNA (1)...(19): siRNA sense strand
ccaaaggugugguuaacgu

SEQ ID NO: 1199899 - RNA, 19 nt, Homo sapiens
  misc_RNA (1)...(19): siRNA sense strand
ggaaauggcagugaacaag

SEQ ID NO: 1199900 - RNA, 19 nt, Homo sapiens
  misc_RNA (1)...(19): siRNA sense strand
guacaaccgcuuccucuuc

SEQ ID NO: 1199901 - RNA, 19 nt, Homo sapiens
  misc_RNA (1)...(19): siRNA sense strand
uugugaagcugauggagua

SEQ ID NO: 1199902 - RNA, 19 nt, Homo sapiens
  misc_RNA (1)...(19): siRNA sense strand
gcagcaggccgacucuuug

SEQ ID NO: 1199903 - RNA, 19 nt, Homo sapiens
  misc_RNA (1)...(19): siRNA sense strand
gaaggagacagccaagauc

SEQ ID NO: 1199904 - RNA, 19 nt, Homo sapiens
  misc_RNA (1)...(19): siRNA sense strand
ggaaggagggccacgaagu

SEQ ID NO: 1199905 - RNA, 19 nt, Homo sapiens
  misc_RNA (1)...(19): siRNA sense strand
gaagauugcagugauugga

SEQ ID NO: 1199906 - RNA, 19 nt, Homo sapiens
  misc_RNA (1)...(19): siRNA sense strand
caacaaggcccuguauguc

SEQ ID NO: 1199907 - RNA, 19 nt, Homo sapiens
  misc_RNA (1)...(19): siRNA sense strand
ucaacaaggcccuguaugu

SEQ ID NO: 1199908 - RNA, 19 nt, Homo sapiens
  misc_RNA (1)...(19): siRNA sense strand
aaaugcugcuggugaagaa

SEQ ID NO: 1199909 - RNA, 19 nt, Homo sapiens
  misc_RNA (1)...(19): siRNA sense strand
aggcggcucugaacgagua

SEQ ID NO: 1199910 - RNA, 19 nt, Homo sapiens
  misc_RNA (1)...(19): siRNA sense strand
gaaucaccaugcccaccuu

SEQ ID NO: 1199911 - RNA, 19 nt, Homo sapiens
  misc_RNA (1)...(19): siRNA sense strand
gagggcgagugcagcauug

SEQ ID NO: 1199912 - RNA, 19 nt, Homo sapiens
  misc_RNA (1)...(19): siRNA sense strand
ugaugaugcuguccuggaa

SEQ ID NO: 1199913 - RNA, 19 nt, Homo sapiens
  misc_RNA (1)...(19): siRNA sense strand
gaucaucucucgguuugcu

SEQ ID NO: 1199914 - RNA, 19 nt, Homo sapiens
  misc_RNA (1)...(19): siRNA sense strand
gcaagcacaucaugaaaag

SEQ ID NO: 1199915 - RNA, 19 nt, Homo sapiens
  misc_RNA (1)...(19): siRNA sense strand
gggcaagcacaucaugaaa

SEQ ID NO: 1199916 - RNA, 19 nt, Homo sapiens
  misc_RNA (1)...(19): siRNA sense strand
gacagugaccuucgaauac

SEQ ID NO: 1199917 - RNA, 19 nt, Homo sapiens
  misc_RNA (1)...(19): siRNA sense strand
cagaggccauucacaacug

SEQ ID NO: 1199918 - RNA, 19 nt, Homo sapiens
  misc_RNA (1)...(19): siRNA sense strand
ucaagacagugaccuucga

SEQ ID NO: 1199919 - RNA, 19 nt, Homo sapiens
  misc_RNA (1)...(19): siRNA sense strand
gaugaguucuguuuucuuc

SEQ ID NO: 1199920 - RNA, 19 nt, Homo sapiens
  misc_RNA (1)...(19): siRNA sense strand
acucacagccuugaaguuu

SEQ ID NO: 1199921 - RNA, 19 nt, Homo sapiens
  misc_RNA (1)...(19): siRNA sense strand
gaacacaguggugaucaag

SEQ ID NO: 1199922 - RNA, 19 nt, Homo sapiens
  misc_RNA (1)...(19): siRNA sense strand
ggagggcgagugcagcauu

SEQ ID NO: 1199923 - RNA, 19 nt, Homo sapiens
  misc_RNA (1)...(19): siRNA sense strand
caccaaagcaggacucauc

SEQ ID NO: 1199924 - RNA, 19 nt, Homo sapiens
  misc_RNA (1)...(19): siRNA sense strand
gaggaaggagggccacgaa

SEQ ID NO: 1199925 - RNA, 19 nt, Homo sapiens
  misc_RNA (1)...(19): siRNA sense strand
ccaggcaggcacuguguuu

SEQ ID NO: 1199926 - RNA, 19 nt, Homo sapiens
  misc_RNA (1)...(19): siRNA sense strand
caacaaaggagagaauugc

SEQ ID NO: 1199927 - RNA, 19 nt, Homo sapiens
  misc_RNA (1)...(19): siRNA sense strand
cggcagaggccauucacaa

SEQ ID NO: 1199928 - RNA, 19 nt, Homo sapiens
  misc_RNA (1)...(19): siRNA sense strand
gucaacacguacaacaaga

SEQ ID NO: 1199929 - RNA, 19 nt, Homo sapiens
  misc_RNA (1)...(19): siRNA sense strand
gggccaaugccacggaauu

SEQ ID NO: 1199930 - RNA, 19 nt, Homo sapiens
  misc_RNA (1)...(19): siRNA sense strand
gugaacagaaacugacauu

SEQ ID NO: 1199931 - RNA, 19 nt, Homo sapiens
  misc_RNA (1)...(19): siRNA sense strand
gcagagcugacauuaaagg

SEQ ID NO: 1199932 - RNA, 19 nt, Homo sapiens
  misc_RNA (1)...(19): siRNA sense strand
cagcauugacuacguggaa

SEQ ID NO: 1199933 - RNA, 19 nt, Homo sapiens
  misc_RNA (1)...(19): siRNA sense strand
ugaagacuccacugauuuc

SEQ ID NO: 1199934 - RNA, 19 nt, Homo sapiens
  misc_RNA (1)...(19): siRNA sense strand
aaaugauccuggccucgaa

SEQ ID NO: 1199935 - RNA, 19 nt, Homo sapiens
  misc_RNA (1)...(19): siRNA sense strand
gcagaggccauucacaacu

SEQ ID NO: 1199936 - RNA, 19 nt, Homo sapiens
  misc_RNA (1)...(19): siRNA sense strand
gauucaaacagucuggauu

SEQ ID NO: 1199937 - RNA, 19 nt, Homo sapiens
  misc_RNA (1)...(19): siRNA sense strand
ggccaaugccacggaauuu

SEQ ID NO: 1199938 - RNA, 19 nt, Homo sapiens
  misc_RNA (1)...(19): siRNA sense strand
gauccuggccucgaacuuc

SEQ ID NO: 1199939 - RNA, 19 nt, Homo sapiens
  misc_RNA (1)...(19): siRNA sense strand
gaggcugugcggaguguuu

SEQ ID NO: 1199940 - RNA, 19 nt, Homo sapiens
  misc_RNA (1)...(19): siRNA sense strand
gaauuuggccuggcuucug

SEQ ID NO: 1199941 - RNA, 19 nt, Homo sapiens
  misc_RNA (1)...(19): siRNA sense strand
guggguguguucacuguuc

SEQ ID NO: 1199942 - RNA, 19 nt, Homo sapiens
  misc_RNA (1)...(19): siRNA sense strand
cggccaggguucuucuuug

SEQ ID NO: 1199943 - RNA, 19 nt, Homo sapiens
  misc_RNA (1)...(19): siRNA sense strand
guagaagaggugcggaaga

SEQ ID NO: 1199944 - RNA, 19 nt, Homo sapiens
  misc_RNA (1)...(19): siRNA sense strand
ucaacaaaggagagaauug

SEQ ID NO: 1199945 - RNA, 19 nt, Homo sapiens
  misc_RNA (1)...(19): siRNA sense strand
ucacagccuugaaguuugc

SEQ ID NO: 1199946 - RNA, 19 nt, Homo sapiens
  misc_RNA (1)...(19): siRNA sense strand
gaggaaggagccaccuaug

SEQ ID NO: 1199947 - RNA, 19 nt, Homo sapiens
  misc_RNA (1)...(19): siRNA sense strand
caucaacaaggcccuguau

SEQ ID NO: 1199948 - RNA, 19 nt, Homo sapiens
  misc_RNA (1)...(19): siRNA sense strand
agaaggagacagccaagau

SEQ ID NO: 1199949 - RNA, 19 nt, Homo sapiens
  misc_RNA (1)...(19): siRNA sense strand
ugaagcugauggaguacug

SEQ ID NO: 1199950 - RNA, 19 nt, Homo sapiens
  misc_RNA (1)...(19): siRNA sense strand
ucuggaagcugagaaggau

SEQ ID NO: 1199951 - RNA, 19 nt, Homo sapiens
  misc_RNA (1)...(19): siRNA sense strand
gaaguuugcagagcugaca

SEQ ID NO: 1199952 - RNA, 19 nt, Homo sapiens
  misc_RNA (1)...(19): siRNA sense strand
uacauggcauccaccuuug

SEQ ID NO: 1199953 - RNA, 19 nt, Homo sapiens
  misc_RNA (1)...(19): siRNA sense strand
uugaagacuccacugauuu

SEQ ID NO: 1199954 - RNA, 19 nt, Homo sapiens
  misc_RNA (1)...(19): siRNA sense strand
ggagacagccaagaucaac

SEQ ID NO: 1199955 - RNA, 19 nt, Homo sapiens
  misc_RNA (1)...(19): siRNA sense strand
caagacagugaccuucgaa

SEQ ID NO: 1199956 - RNA, 19 nt, Homo sapiens
  misc_RNA (1)...(19): siRNA sense strand
augaucaucucucgguuug

SEQ ID NO: 1199957 - RNA, 19 nt, Homo sapiens
  misc_RNA (1)...(19): siRNA sense strand
caugaucaucucucgguuu

SEQ ID NO: 1199958 - RNA, 19 nt, Homo sapiens
  misc_RNA (1)...(19): siRNA sense strand
caccaugcccaccuuguga

SEQ ID NO: 1199959 - RNA, 19 nt, Homo sapiens
  misc_RNA (1)...(19): siRNA sense strand
gaggugggcaagcacauca

SEQ ID NO: 1199960 - RNA, 19 nt, Homo sapiens
  misc_RNA (1)...(19): siRNA sense strand
gugaaggagcugugugaug

SEQ ID NO: 1199961 - RNA, 19 nt, Homo sapiens
  misc_RNA (1)...(19): siRNA sense strand
gcuggaggauggcaaaaug

SEQ ID NO: 1199962 - RNA, 19 nt, Homo sapiens
  misc_RNA (1)...(19): siRNA sense strand
auucaaacagucuggauuu

SEQ ID NO: 1199963 - RNA, 19 nt, Homo sapiens
  misc_RNA (1)...(19): siRNA sense strand
gcgagugcagcauugacua

SEQ ID NO: 1199964 - RNA, 19 nt, Homo sapiens
  misc_RNA (1)...(19): siRNA sense strand
ucaacuggacccucauuca

SEQ ID NO: 1199965 - RNA, 19 nt, Homo sapiens
  misc_RNA (1)...(19): siRNA sense strand
ugaggaaggagccaccuau

SEQ ID NO: 1199966 - RNA, 19 nt, Homo sapiens
  misc_RNA (1)...(19): siRNA sense strand
gccucgaacuucuuuaagg

SEQ ID NO: 1199967 - RNA, 19 nt, Homo sapiens
  misc_RNA (1)...(19): siRNA sense strand
acaaaaugcugcuggugaa

SEQ ID NO: 1199968 - RNA, 19 nt, Homo sapiens
  misc_RNA (1)...(19): siRNA sense strand
aggaaggagccaccuauga

SEQ ID NO: 1199969 - RNA, 19 nt, Homo sapiens
  misc_RNA (1)...(19): siRNA sense strand
acagugaccuucgaauacu

SEQ ID NO: 1199970 - RNA, 19 nt, Homo sapiens
  misc_RNA (1)...(19): siRNA sense strand
cuucgggccugucaugauc

SEQ ID NO: 1199971 - RNA, 19 nt, Homo sapiens
  misc_RNA (1)...(19): siRNA sense strand
agugucaucugccagguau

SEQ ID NO: 1199972 - RNA, 19 nt, Homo sapiens
  misc_RNA (1)...(19): siRNA sense strand
gcauugacuacguggaaau

SEQ ID NO: 1199973 - RNA, 19 nt, Homo sapiens
  misc_RNA (1)...(19): siRNA sense strand
ggaagugaaggagcugugu

SEQ ID NO: 1199974 - RNA, 19 nt, Homo sapiens
  misc_RNA (1)...(19): siRNA sense strand
guuagaaaaugaagaugug

SEQ ID NO: 1199975 - RNA, 19 nt, Homo sapiens
  misc_RNA (1)...(19): siRNA sense strand
ggagugccgguauucaagu

SEQ ID NO: 1199976 - RNA, 19 nt, Homo sapiens
  misc_RNA (1)...(19): siRNA sense strand
gaacagaaacugacauuuu

SEQ ID NO: 1199977 - RNA, 19 nt, Homo sapiens
  misc_RNA (1)...(19): siRNA sense strand
guacauggcauccaccuuu

SEQ ID NO: 1199978 - RNA, 19 nt, Homo sapiens
  misc_RNA (1)...(19): siRNA sense strand
guugaagacuccacugauu

SEQ ID NO: 1199979 - RNA, 19 nt, Homo sapiens
  misc_RNA (1)...(19): siRNA sense strand
ccaaaguccuggagguuga

SEQ ID NO: 1199980 - RNA, 19 nt, Homo sapiens
  misc_RNA (1)...(19): siRNA sense strand
gcugaucgcugagggcaaa

SEQ ID NO: 1199981 - RNA, 19 nt, Homo sapiens
  misc_RNA (1)...(19): siRNA sense strand
acucaacgcugaacacuuc

SEQ ID NO: 1199982 - RNA, 19 nt, Homo sapiens
  misc_RNA (1)...(19): siRNA sense strand
ggacuucauccagcuguua

SEQ ID NO: 1199983 - RNA, 19 nt, Homo sapiens
  misc_RNA (1)...(19): siRNA sense strand
ccacugauuucuucaaguc

SEQ ID NO: 1199984 - RNA, 19 nt, Homo sapiens
  misc_RNA (1)...(19): siRNA sense strand
gaaggagggccacgaagug

SEQ ID NO: 1199985 - RNA, 19 nt, Homo sapiens
  misc_RNA (1)...(19): siRNA sense strand
gugauggccuggaguuaga

SEQ ID NO: 1199986 - RNA, 19 nt, Homo sapiens
  misc_RNA (1)...(19): siRNA sense strand
gagugccgguauucaagua

SEQ ID NO: 1199987 - RNA, 19 nt, Homo sapiens
  misc_RNA (1)...(19): siRNA sense strand
ggaaggagccaccuaugag

SEQ ID NO: 1199988 - RNA, 19 nt, Homo sapiens
  misc_RNA (1)...(19): siRNA sense strand
agacuccacugauuucuuc

SEQ ID NO: 1199989 - RNA, 19 nt, Homo sapiens
  misc_RNA (1)...(19): siRNA sense strand
ggaaauggcagugaacaag

SEQ ID NO: 1199990 - RNA, 19 nt, Homo sapiens
  misc_RNA (1)...(19): siRNA sense strand
guacaaccgcuuccucuuc

SEQ ID NO: 1199991 - RNA, 19 nt, Homo sapiens
  misc_RNA (1)...(19): siRNA sense strand
ggaaggagggccacgaagu

SEQ ID NO: 1199992 - RNA, 19 nt, Homo sapiens
  misc_RNA (1)...(19): siRNA sense strand
gaaggagacagccaagauc

SEQ ID NO: 1199993 - RNA, 19 nt, Homo sapiens
  misc_RNA (1)...(19): siRNA sense strand
gaagauugcagugauugga

SEQ ID NO: 1199994 - RNA, 19 nt, Homo sapiens
  misc_RNA (1)...(19): siRNA sense strand
aaaugcugcuggugaagaa

SEQ ID NO: 1199995 - RNA, 19 nt, Homo sapiens
  misc_RNA (1)...(19): siRNA sense strand
gagggcgagugcagcauug

SEQ ID NO: 1199996 - RNA, 19 nt, Homo sapiens
  misc_RNA (1)...(19): siRNA sense strand
cagaggccauucacaacug

SEQ ID NO: 1199997 - RNA, 19 nt, Homo sapiens
  misc_RNA (1)...(19): siRNA sense strand
ggagggcgagugcagcauu

SEQ ID NO: 1199998 - RNA, 19 nt, Homo sapiens
  misc_RNA (1)...(19): siRNA sense strand
caccaaagcaggacucauc

SEQ ID NO: 1199999 - RNA, 19 nt, Homo sapiens
  misc_RNA (1)...(19): siRNA sense strand
gaggaaggagggccacgaa

SEQ ID NO: 1200000 - RNA, 19 nt, Homo sapiens
  misc_RNA (1)...(19): siRNA sense strand
cggcagaggccauucacaa

SEQ ID NO: 1200001 - RNA, 19 nt, Homo sapiens
  misc_RNA (1)...(19): siRNA sense strand
gugaacagaaacugacauu

SEQ ID NO: 1200002 - RNA, 19 nt, Homo sapiens
  misc_RNA (1)...(19): siRNA sense strand
cagcauugacuacguggaa

SEQ ID NO: 1200003 - RNA, 19 nt, Homo sapiens
  misc_RNA (1)...(19): siRNA sense strand
ugaagacuccacugauuuc

SEQ ID NO: 1200004 - RNA, 19 nt, Homo sapiens
  misc_RNA (1)...(19): siRNA sense strand
aaaugauccuggccucgaa

SEQ ID NO: 1200005 - RNA, 19 nt, Homo sapiens
  misc_RNA (1)...(19): siRNA sense strand
gcagaggccauucacaacu

SEQ ID NO: 1200006 - RNA, 19 nt, Homo sapiens
  misc_RNA (1)...(19): siRNA sense strand
gauccuggccucgaacuuc

SEQ ID NO: 1200007 - RNA, 19 nt, Homo sapiens
  misc_RNA (1)...(19): siRNA sense strand
guggguguguucacuguuc

SEQ ID NO: 1200008 - RNA, 19 nt, Homo sapiens
  misc_RNA (1)...(19): siRNA sense strand
gaggcugugcggaguguuu

SEQ ID NO: 1200009 - RNA, 19 nt, Homo sapiens
  misc_RNA (1)...(19): siRNA sense strand
gaggaaggagccaccuaug

SEQ ID NO: 1200010 - RNA, 19 nt, Homo sapiens
  misc_RNA (1)...(19): siRNA sense strand
agaaggagacagccaagau

SEQ ID NO: 1200011 - RNA, 19 nt, Homo sapiens
  misc_RNA (1)...(19): siRNA sense strand
uacauggcauccaccuuug

SEQ ID NO: 1200012 - RNA, 19 nt, Homo sapiens
  misc_RNA (1)...(19): siRNA sense strand
uugaagacuccacugauuu

SEQ ID NO: 1200013 - RNA, 19 nt, Homo sapiens
  misc_RNA (1)...(19): siRNA sense strand
ucuggaagcugagaaggau

SEQ ID NO: 1200014 - RNA, 19 nt, Homo sapiens
  misc_RNA (1)...(19): siRNA sense strand
ggagacagccaagaucaac

SEQ ID NO: 1200015 - RNA, 19 nt, Homo sapiens
  misc_RNA (1)...(19): siRNA sense strand
gugaaggagcugugugaug

SEQ ID NO: 1200016 - RNA, 19 nt, Homo sapiens
  misc_RNA (1)...(19): siRNA sense strand
ucaacuggacccucauuca

SEQ ID NO: 1200017 - RNA, 19 nt, Homo sapiens
  misc_RNA (1)...(19): siRNA sense strand
gcgagugcagcauugacua

SEQ ID NO: 1200018 - RNA, 19 nt, Homo sapiens
  misc_RNA (1)...(19): siRNA sense strand
gcuggaggauggcaaaaug

SEQ ID NO: 1200019 - RNA, 19 nt, Homo sapiens
  misc_RNA (1)...(19): siRNA sense strand
ugaggaaggagccaccuau

SEQ ID NO: 1200020 - RNA, 19 nt, Homo sapiens
  misc_RNA (1)...(19): siRNA sense strand
gccucgaacuucuuuaagg

SEQ ID NO: 1200021 - RNA, 19 nt, Homo sapiens
  misc_RNA (1)...(19): siRNA sense strand
acaaaaugcugcuggugaa

SEQ ID NO: 1200022 - RNA, 19 nt, Homo sapiens
  misc_RNA (1)...(19): siRNA sense strand
aggaaggagccaccuauga

SEQ ID NO: 1200023 - RNA, 19 nt, Homo sapiens
  misc_RNA (1)...(19): siRNA sense strand
agugucaucugccagguau

SEQ ID NO: 1200024 - RNA, 19 nt, Homo sapiens
  misc_RNA (1)...(19): siRNA sense strand
gcauugacuacguggaaau

SEQ ID NO: 1200025 - RNA, 19 nt, Homo sapiens
  misc_RNA (1)...(19): siRNA sense strand
ggaagugaaggagcugugu

SEQ ID NO: 1200026 - RNA, 19 nt, Homo sapiens
  misc_RNA (1)...(19): siRNA sense strand
guuagaaaaugaagaugug

SEQ ID NO: 1200027 - RNA, 19 nt, Homo sapiens
  misc_RNA (1)...(19): siRNA sense strand
caucaacuggacccucauu

SEQ ID NO: 1200028 - RNA, 19 nt, Homo sapiens
  misc_RNA (1)...(19): siRNA sense strand
gacagaggcagagcugguu

SEQ ID NO: 1200029 - RNA, 19 nt, Homo sapiens
  misc_RNA (1)...(19): siRNA sense strand
ggagugccgguauucaagu

SEQ ID NO: 1200030 - RNA, 19 nt, Homo sapiens
  misc_RNA (1)...(19): siRNA sense strand
cgaagugguggguguguuc

SEQ ID NO: 1200031 - RNA, 19 nt, Homo sapiens
  misc_RNA (1)...(19): siRNA sense strand
caacuggacccucauucac

SEQ ID NO: 1200032 - RNA, 19 nt, Homo sapiens
  misc_RNA (1)...(19): siRNA sense strand
cccaccagcucuucauugg

SEQ ID NO: 1200033 - RNA, 19 nt, Homo sapiens
  misc_RNA (1)...(19): siRNA sense strand
ggauggagugccgguauuc

SEQ ID NO: 1200034 - RNA, 19 nt, Homo sapiens
  misc_RNA (1)...(19): siRNA sense strand
acagaggcagagcugguua

SEQ ID NO: 1200035 - RNA, 19 nt, Homo sapiens
  misc_RNA (1)...(19): siRNA sense strand
gggacuucauccagcuguu

SEQ ID NO: 1200036 - RNA, 19 nt, Homo sapiens
  misc_RNA (1)...(19): siRNA sense strand
aggauggagugccgguauu

SEQ ID NO: 1200037 - RNA, 19 nt, Homo sapiens
  misc_RNA (1)...(19): siRNA sense strand
ucacuguuccagacaagga

SEQ ID NO: 1200038 - RNA, 19 nt, Homo sapiens
  misc_RNA (1)...(19): siRNA sense strand
cugaugugguggcaaaaua

SEQ ID NO: 1200039 - RNA, 19 nt, Homo sapiens
  misc_RNA (1)...(19): siRNA sense strand
gaagauuacucagagauua

SEQ ID NO: 1200040 - RNA, 19 nt, Homo sapiens
  misc_RNA (1)...(19): siRNA sense strand
gcucaucucugcaggguuu

SEQ ID NO: 1200041 - RNA, 19 nt, Homo sapiens
  misc_RNA (1)...(19): siRNA sense strand
ggaaucaacuacccaggaa

SEQ ID NO: 1200042 - RNA, 19 nt, Homo sapiens
  misc_RNA (1)...(19): siRNA sense strand
gaucaucuggaccauauaa

SEQ ID NO: 1200043 - RNA, 19 nt, Homo sapiens
  misc_RNA (1)...(19): siRNA sense strand
cauaugagccaccuucuga

SEQ ID NO: 1200044 - RNA, 19 nt, Homo sapiens
  misc_RNA (1)...(19): siRNA sense strand
gacuggagauugggacaua

SEQ ID NO: 1200045 - RNA, 19 nt, Homo sapiens
  misc_RNA (1)...(19): siRNA sense strand
ggaagauuacucagagauu

SEQ ID NO: 1200046 - RNA, 19 nt, Homo sapiens
  misc_RNA (1)...(19): siRNA sense strand
gaaacagaagaugagauua

SEQ ID NO: 1200047 - RNA, 19 nt, Homo sapiens
  misc_RNA (1)...(19): siRNA sense strand
agaaacagaagaugagauu

SEQ ID NO: 1200048 - RNA, 19 nt, Homo sapiens
  misc_RNA (1)...(19): siRNA sense strand
cagugugucuccagcuuaa

SEQ ID NO: 1200049 - RNA, 19 nt, Homo sapiens
  misc_RNA (1)...(19): siRNA sense strand
caggguuuguggcuguuua

SEQ ID NO: 1200050 - RNA, 19 nt, Homo sapiens
  misc_RNA (1)...(19): siRNA sense strand
gaaacaggagaaucagugu

SEQ ID NO: 1200051 - RNA, 19 nt, Homo sapiens
  misc_RNA (1)...(19): siRNA sense strand
gauuaugccugagguugug

SEQ ID NO: 1200052 - RNA, 19 nt, Homo sapiens
  misc_RNA (1)...(19): siRNA sense strand
caucuggaccauauaauuc

SEQ ID NO: 1200053 - RNA, 19 nt, Homo sapiens
  misc_RNA (1)...(19): siRNA sense strand
aacagaagaugagauuaug

SEQ ID NO: 1200054 - RNA, 19 nt, Homo sapiens
  misc_RNA (1)...(19): siRNA sense strand
ggaaaaggaagauuacuca

SEQ ID NO: 1200055 - RNA, 19 nt, Homo sapiens
  misc_RNA (1)...(19): siRNA sense strand
ucaucuggaccauauaauu

SEQ ID NO: 1200056 - RNA, 19 nt, Homo sapiens
  misc_RNA (1)...(19): siRNA sense strand
gacccuagacuggagauug

SEQ ID NO: 1200057 - RNA, 19 nt, Homo sapiens
  misc_RNA (1)...(19): siRNA sense strand
gcuuaagucuggugcucau

SEQ ID NO: 1200058 - RNA, 19 nt, Homo sapiens
  misc_RNA (1)...(19): siRNA sense strand
gaaucaacuacccaggaaa

SEQ ID NO: 1200059 - RNA, 19 nt, Homo sapiens
  misc_RNA (1)...(19): siRNA sense strand
ucagugugucuccagcuua

SEQ ID NO: 1200060 - RNA, 19 nt, Homo sapiens
  misc_RNA (1)...(19): siRNA sense strand
guaauagaaacagaagaug

SEQ ID NO: 1200061 - RNA, 19 nt, Homo sapiens
  misc_RNA (1)...(19): siRNA sense strand
cccagaaacaggagaauca

SEQ ID NO: 1200062 - RNA, 19 nt, Homo sapiens
  misc_RNA (1)...(19): siRNA sense strand
ccagaccacaacuuccuuu

SEQ ID NO: 1200063 - RNA, 19 nt, Homo sapiens
  misc_RNA (1)...(19): siRNA sense strand
ggagauugggacauaagca

SEQ ID NO: 1200064 - RNA, 19 nt, Homo sapiens
  misc_RNA (1)...(19): siRNA sense strand
uaugagccaccuucugaga

SEQ ID NO: 1200065 - RNA, 19 nt, Homo sapiens
  misc_RNA (1)...(19): siRNA sense strand
aaggaagauuacucagaga

SEQ ID NO: 1200066 - RNA, 19 nt, Homo sapiens
  misc_RNA (1)...(19): siRNA sense strand
gaagauuacucagagauua

SEQ ID NO: 1200067 - RNA, 19 nt, Homo sapiens
  misc_RNA (1)...(19): siRNA sense strand
gcucaucucugcaggguuu

SEQ ID NO: 1200068 - RNA, 19 nt, Homo sapiens
  misc_RNA (1)...(19): siRNA sense strand
ggaaucaacuacccaggaa

SEQ ID NO: 1200069 - RNA, 19 nt, Homo sapiens
  misc_RNA (1)...(19): siRNA sense strand
gaucaucuggaccauauaa

SEQ ID NO: 1200070 - RNA, 19 nt, Homo sapiens
  misc_RNA (1)...(19): siRNA sense strand
cauaugagccaccuucuga

SEQ ID NO: 1200071 - RNA, 19 nt, Homo sapiens
  misc_RNA (1)...(19): siRNA sense strand
gacuggagauugggacaua

SEQ ID NO: 1200072 - RNA, 19 nt, Homo sapiens
  misc_RNA (1)...(19): siRNA sense strand
ggaagauuacucagagauu

SEQ ID NO: 1200073 - RNA, 19 nt, Homo sapiens
  misc_RNA (1)...(19): siRNA sense strand
gaaacagaagaugagauua

SEQ ID NO: 1200074 - RNA, 19 nt, Homo sapiens
  misc_RNA (1)...(19): siRNA sense strand
agaaacagaagaugagauu

SEQ ID NO: 1200075 - RNA, 19 nt, Homo sapiens
  misc_RNA (1)...(19): siRNA sense strand
cagugugucuccagcuuaa

SEQ ID NO: 1200076 - RNA, 19 nt, Homo sapiens
  misc_RNA (1)...(19): siRNA sense strand
caggguuuguggcuguuua

SEQ ID NO: 1200077 - RNA, 19 nt, Homo sapiens
  misc_RNA (1)...(19): siRNA sense strand
gaaacaggagaaucagugu

SEQ ID NO: 1200078 - RNA, 19 nt, Homo sapiens
  misc_RNA (1)...(19): siRNA sense strand
gauuaugccugagguugug

SEQ ID NO: 1200079 - RNA, 19 nt, Homo sapiens
  misc_RNA (1)...(19): siRNA sense strand
caucuggaccauauaauuc

SEQ ID NO: 1200080 - RNA, 19 nt, Homo sapiens
  misc_RNA (1)...(19): siRNA sense strand
aacagaagaugagauuaug

SEQ ID NO: 1200081 - RNA, 19 nt, Homo sapiens
  misc_RNA (1)...(19): siRNA sense strand
ggaaaaggaagauuacuca

SEQ ID NO: 1200082 - RNA, 19 nt, Homo sapiens
  misc_RNA (1)...(19): siRNA sense strand
ucaucuggaccauauaauu

SEQ ID NO: 1200083 - RNA, 19 nt, Homo sapiens
  misc_RNA (1)...(19): siRNA sense strand
gacccuagacuggagauug

SEQ ID NO: 1200084 - RNA, 19 nt, Homo sapiens
  misc_RNA (1)...(19): siRNA sense strand
gcuuaagucuggugcucau

SEQ ID NO: 1200085 - RNA, 19 nt, Homo sapiens
  misc_RNA (1)...(19): siRNA sense strand
gaaucaacuacccaggaaa

SEQ ID NO: 1200086 - RNA, 19 nt, Homo sapiens
  misc_RNA (1)...(19): siRNA sense strand
ucagugugucuccagcuua

SEQ ID NO: 1200087 - RNA, 19 nt, Homo sapiens
  misc_RNA (1)...(19): siRNA sense strand
guaauagaaacagaagaug

SEQ ID NO: 1200088 - RNA, 19 nt, Homo sapiens
  misc_RNA (1)...(19): siRNA sense strand
cccagaaacaggagaauca

SEQ ID NO: 1200089 - RNA, 19 nt, Homo sapiens
  misc_RNA (1)...(19): siRNA sense strand
ccagaccacaacuuccuuu

SEQ ID NO: 1200090 - RNA, 19 nt, Homo sapiens
  misc_RNA (1)...(19): siRNA sense strand
ggagauugggacauaagca

SEQ ID NO: 1200091 - RNA, 19 nt, Homo sapiens
  misc_RNA (1)...(19): siRNA sense strand
uaugagccaccuucugaga

SEQ ID NO: 1200092 - RNA, 19 nt, Homo sapiens
  misc_RNA (1)...(19): siRNA sense strand
aaggaagauuacucagaga

SEQ ID NO: 1200093 - RNA, 19 nt, Homo sapiens
  misc_RNA (1)...(19): siRNA sense strand
caacagaucugcugaaaga

SEQ ID NO: 1200094 - RNA, 19 nt, Homo sapiens
  misc_RNA (1)...(19): siRNA sense strand
ggacauauguggagaauag

SEQ ID NO: 1200095 - RNA, 19 nt, Homo sapiens
  misc_RNA (1)...(19): siRNA sense strand
ccaaagaccuuaauaacuu

SEQ ID NO: 1200096 - RNA, 19 nt, Homo sapiens
  misc_RNA (1)...(19): siRNA sense strand
caaaguaaauccugcagua

SEQ ID NO: 1200097 - RNA, 19 nt, Homo sapiens
  misc_RNA (1)...(19): siRNA sense strand
gaaacgcccugaagaagaa

SEQ ID NO: 1200098 - RNA, 19 nt, Homo sapiens
  misc_RNA (1)...(19): siRNA sense strand
gauaacaguuggauaaaga

SEQ ID NO: 1200099 - RNA, 19 nt, Homo sapiens
  misc_RNA (1)...(19): siRNA sense strand
gcagauacauccaccuaaa

SEQ ID NO: 1200100 - RNA, 19 nt, Homo sapiens
  misc_RNA (1)...(19): siRNA sense strand
uaaagugacuccugaaaga

SEQ ID NO: 1200101 - RNA, 19 nt, Homo sapiens
  misc_RNA (1)...(19): siRNA sense strand
caaauuugcugccauucua

SEQ ID NO: 1200102 - RNA, 19 nt, Homo sapiens
  misc_RNA (1)...(19): siRNA sense strand
aaagagauaugugcacuua

SEQ ID NO: 1200103 - RNA, 19 nt, Homo sapiens
  misc_RNA (1)...(19): siRNA sense strand
gaaguaaauucucaugugu

SEQ ID NO: 1200104 - RNA, 19 nt, Homo sapiens
  misc_RNA (1)...(19): siRNA sense strand
gaaaguaaaugagagagau

SEQ ID NO: 1200105 - RNA, 19 nt, Homo sapiens
  misc_RNA (1)...(19): siRNA sense strand
caaggugaauccugaaauu

SEQ ID NO: 1200106 - RNA, 19 nt, Homo sapiens
  misc_RNA (1)...(19): siRNA sense strand
ggaaguccgauuaaaguua

SEQ ID NO: 1200107 - RNA, 19 nt, Homo sapiens
  misc_RNA (1)...(19): siRNA sense strand
gaagugaagaccuugauaa

SEQ ID NO: 1200108 - RNA, 19 nt, Homo sapiens
  misc_RNA (1)...(19): siRNA sense strand
gaacuuucuuacaggauaa

SEQ ID NO: 1200109 - RNA, 19 nt, Homo sapiens
  misc_RNA (1)...(19): siRNA sense strand
uaaaguggauccugaaaca

SEQ ID NO: 1200110 - RNA, 19 nt, Homo sapiens
  misc_RNA (1)...(19): siRNA sense strand
gauaaucucaucaaaguga

SEQ ID NO: 1200111 - RNA, 19 nt, Homo sapiens
  misc_RNA (1)...(19): siRNA sense strand
cgacauaauucccaugaug

SEQ ID NO: 1200112 - RNA, 19 nt, Homo sapiens
  misc_RNA (1)...(19): siRNA sense strand
gauaaccaacuaaccaaua

SEQ ID NO: 1200113 - RNA, 19 nt, Homo sapiens
  misc_RNA (1)...(19): siRNA sense strand
ugaaguaaaucccaaagga

SEQ ID NO: 1200114 - RNA, 19 nt, Homo sapiens
  misc_RNA (1)...(19): siRNA sense strand
gugaagaccuugauaaugc

SEQ ID NO: 1200115 - RNA, 19 nt, Homo sapiens
  misc_RNA (1)...(19): siRNA sense strand
gaauaggaaucaaggucuu

SEQ ID NO: 1200116 - RNA, 19 nt, Homo sapiens
  misc_RNA (1)...(19): siRNA sense strand
ugaaguaaauucucaugug

SEQ ID NO: 1200117 - RNA, 19 nt, Homo sapiens
  misc_RNA (1)...(19): siRNA sense strand
cagagcaaauccaaaggua

SEQ ID NO: 1200118 - RNA, 19 nt, Homo sapiens
  misc_RNA (1)...(19): siRNA sense strand
cagaagaagugaagaccuu

SEQ ID NO: 1200119 - RNA, 19 nt, Homo sapiens
  misc_RNA (1)...(19): siRNA sense strand
caggauaacaguuggauaa

SEQ ID NO: 1200120 - RNA, 19 nt, Homo sapiens
  misc_RNA (1)...(19): siRNA sense strand
caaaguguauccaggaaca

SEQ ID NO: 1200121 - RNA, 19 nt, Homo sapiens
  misc_RNA (1)...(19): siRNA sense strand
agauaaagauggcaaagga

SEQ ID NO: 1200122 - RNA, 19 nt, Homo sapiens
  misc_RNA (1)...(19): siRNA sense strand
gacaggaucucagacagaa

SEQ ID NO: 1200123 - RNA, 19 nt, Homo sapiens
  misc_RNA (1)...(19): siRNA sense strand
gauaauaggcagauacauc

SEQ ID NO: 1200124 - RNA, 19 nt, Homo sapiens
  misc_RNA (1)...(19): siRNA sense strand
ucucgaaucuguugcuaaa

SEQ ID NO: 1200125 - RNA, 19 nt, Homo sapiens
  misc_RNA (1)...(19): siRNA sense strand
gagcaaauccaaagguaga

SEQ ID NO: 1200126 - RNA, 19 nt, Homo sapiens
  misc_RNA (1)...(19): siRNA sense strand
cagaaaugaugcugcuaaa

SEQ ID NO: 1200127 - RNA, 19 nt, Homo sapiens
  misc_RNA (1)...(19): siRNA sense strand
ggugauaguauuuggauuu

SEQ ID NO: 1200128 - RNA, 19 nt, Homo sapiens
  misc_RNA (1)...(19): siRNA sense strand
uaaauucucaugugucuga

SEQ ID NO: 1200129 - RNA, 19 nt, Homo sapiens
  misc_RNA (1)...(19): siRNA sense strand
gaagaggcaguccugguuu

SEQ ID NO: 1200130 - RNA, 19 nt, Homo sapiens
  misc_RNA (1)...(19): siRNA sense strand
gaaccuugcuacucuaaaa

SEQ ID NO: 1200131 - RNA, 19 nt, Homo sapiens
  misc_RNA (1)...(19): siRNA sense strand
uuacaaauuugcugccauu

SEQ ID NO: 1200132 - RNA, 19 nt, Homo sapiens
  misc_RNA (1)...(19): siRNA sense strand
ugauaggucugucauugaa

SEQ ID NO: 1200133 - RNA, 19 nt, Homo sapiens
  misc_RNA (1)...(19): siRNA sense strand
uaaagaaacgcccugaaga

SEQ ID NO: 1200134 - RNA, 19 nt, Homo sapiens
  misc_RNA (1)...(19): siRNA sense strand
gaauaucucuggaaaauac

SEQ ID NO: 1200135 - RNA, 19 nt, Homo sapiens
  misc_RNA (1)...(19): siRNA sense strand
gcaguaaucagaaacaauc

SEQ ID NO: 1200136 - RNA, 19 nt, Homo sapiens
  misc_RNA (1)...(19): siRNA sense strand
ucacaaacaaccaaagaaa

SEQ ID NO: 1200137 - RNA, 19 nt, Homo sapiens
  misc_RNA (1)...(19): siRNA sense strand
caacaccuccaacaccaua

SEQ ID NO: 1200138 - RNA, 19 nt, Homo sapiens
  misc_RNA (1)...(19): siRNA sense strand
gugaagaauuggauaaucu

SEQ ID NO: 1200139 - RNA, 19 nt, Homo sapiens
  misc_RNA (1)...(19): siRNA sense strand
gcuaaccucaucaaaguaa

SEQ ID NO: 1200140 - RNA, 19 nt, Homo sapiens
  misc_RNA (1)...(19): siRNA sense strand
caaagaccuuaauaacuuc

SEQ ID NO: 1200141 - RNA, 19 nt, Homo sapiens
  misc_RNA (1)...(19): siRNA sense strand
gcauuggacaggaaaguaa

SEQ ID NO: 1200142 - RNA, 19 nt, Homo sapiens
  misc_RNA (1)...(19): siRNA sense strand
gugaaugccaggaugaaua

SEQ ID NO: 1200143 - RNA, 19 nt, Homo sapiens
  misc_RNA (1)...(19): siRNA sense strand
gacaaaaucucgaaucugu

SEQ ID NO: 1200144 - RNA, 19 nt, Homo sapiens
  misc_RNA (1)...(19): siRNA sense strand
aaagaaacgcccugaagaa

SEQ ID NO: 1200145 - RNA, 19 nt, Homo sapiens
  misc_RNA (1)...(19): siRNA sense strand
gaaacaaucagagccaaga

SEQ ID NO: 1200146 - RNA, 19 nt, Homo sapiens
  misc_RNA (1)...(19): siRNA sense strand
gaaagaaacagaacuaacc

SEQ ID NO: 1200147 - RNA, 19 nt, Homo sapiens
  misc_RNA (1)...(19): siRNA sense strand
guacaguucugaugacacu

SEQ ID NO: 1200148 - RNA, 19 nt, Homo sapiens
  misc_RNA (1)...(19): siRNA sense strand
cuacuacuccuguaaagaa

SEQ ID NO: 1200149 - RNA, 19 nt, Homo sapiens
  misc_RNA (1)...(19): siRNA sense strand
gugcucaaccgacauaauu

SEQ ID NO: 1200150 - RNA, 19 nt, Homo sapiens
  misc_RNA (1)...(19): siRNA sense strand
gcaagcagccuuuggaaaa

SEQ ID NO: 1200151 - RNA, 19 nt, Homo sapiens
  misc_RNA (1)...(19): siRNA sense strand
ggauaacaguuggauaaag

SEQ ID NO: 1200152 - RNA, 19 nt, Homo sapiens
  misc_RNA (1)...(19): siRNA sense strand
ggacaggaucucagacaga

SEQ ID NO: 1200153 - RNA, 19 nt, Homo sapiens
  misc_RNA (1)...(19): siRNA sense strand
cagcugagacaggauaaua

SEQ ID NO: 1200154 - RNA, 19 nt, Homo sapiens
  misc_RNA (1)...(19): siRNA sense strand
ggauggauaucaggagaau

SEQ ID NO: 1200155 - RNA, 19 nt, Homo sapiens
  misc_RNA (1)...(19): siRNA sense strand
gccagagccuugauaaucu

SEQ ID NO: 1200156 - RNA, 19 nt, Homo sapiens
  misc_RNA (1)...(19): siRNA sense strand
gaccuugaugggcuuauua

SEQ ID NO: 1200157 - RNA, 19 nt, Homo sapiens
  misc_RNA (1)...(19): siRNA sense strand
ugaaugccaggaugaauaa

SEQ ID NO: 1200158 - RNA, 19 nt, Homo sapiens
  misc_RNA (1)...(19): siRNA sense strand
gguagaagaaagagagaaa

SEQ ID NO: 1200159 - RNA, 19 nt, Homo sapiens
  misc_RNA (1)...(19): siRNA sense strand
aaagagaaguaaccaaggu

SEQ ID NO: 1200160 - RNA, 19 nt, Homo sapiens
  misc_RNA (1)...(19): siRNA sense strand
ggaaaguaaaugagagaga

SEQ ID NO: 1200161 - RNA, 19 nt, Homo sapiens
  misc_RNA (1)...(19): siRNA sense strand
ucugauaggucugucauug

SEQ ID NO: 1200162 - RNA, 19 nt, Homo sapiens
  misc_RNA (1)...(19): siRNA sense strand
ggucuugaugaacauauua

SEQ ID NO: 1200163 - RNA, 19 nt, Homo sapiens
  misc_RNA (1)...(19): siRNA sense strand
cagaucugcugaaagaaau

SEQ ID NO: 1200164 - RNA, 19 nt, Homo sapiens
  misc_RNA (1)...(19): siRNA sense strand
aaacauauaaggccaauac

SEQ ID NO: 1200165 - RNA, 19 nt, Homo sapiens
  misc_RNA (1)...(19): siRNA sense strand
gaagaagugaagaccuuga

SEQ ID NO: 1200166 - RNA, 19 nt, Homo sapiens
  misc_RNA (1)...(19): siRNA sense strand
ggucugucauugaaagaga

SEQ ID NO: 1200167 - RNA, 19 nt, Homo sapiens
  misc_RNA (1)...(19): siRNA sense strand
uugaugggcuuauuaaagu

SEQ ID NO: 1200168 - RNA, 19 nt, Homo sapiens
  misc_RNA (1)...(19): siRNA sense strand
agaauuggauaaucucauc

SEQ ID NO: 1200169 - RNA, 19 nt, Homo sapiens
  misc_RNA (1)...(19): siRNA sense strand
ggccagagccuugauaauc

SEQ ID NO: 1200170 - RNA, 19 nt, Homo sapiens
  misc_RNA (1)...(19): siRNA sense strand
caaagugaccccugaagua

SEQ ID NO: 1200171 - RNA, 19 nt, Homo sapiens
  misc_RNA (1)...(19): siRNA sense strand
uugcuaaccucaucaaagu

SEQ ID NO: 1200172 - RNA, 19 nt, Homo sapiens
  misc_RNA (1)...(19): siRNA sense strand
guuccaaagaccuuaauaa

SEQ ID NO: 1200173 - RNA, 19 nt, Homo sapiens
  misc_RNA (1)...(19): siRNA sense strand
uaauucccaugaugcauug

SEQ ID NO: 1200174 - RNA, 19 nt, Homo sapiens
  misc_RNA (1)...(19): siRNA sense strand
aaagugaucccuucagcaa

SEQ ID NO: 1200175 - RNA, 19 nt, Homo sapiens
  misc_RNA (1)...(19): siRNA sense strand
gacaggaaaguaaaugaga

SEQ ID NO: 1200176 - RNA, 19 nt, Homo sapiens
  misc_RNA (1)...(19): siRNA sense strand
gaaagagauaugugcacuu

SEQ ID NO: 1200177 - RNA, 19 nt, Homo sapiens
  misc_RNA (1)...(19): siRNA sense strand
guaaucagaaacaaucaga

SEQ ID NO: 1200178 - RNA, 19 nt, Homo sapiens
  misc_RNA (1)...(19): siRNA sense strand
ucgaaucuguugcuaaagu

SEQ ID NO: 1200179 - RNA, 19 nt, Homo sapiens
  misc_RNA (1)...(19): siRNA sense strand
aacaaaagcuugaauagga

SEQ ID NO: 1200180 - RNA, 19 nt, Homo sapiens
  misc_RNA (1)...(19): siRNA sense strand
acaauuagucgguacaguu

SEQ ID NO: 1200181 - RNA, 19 nt, Homo sapiens
  misc_RNA (1)...(19): siRNA sense strand
cacggaagcagcaggauuu

SEQ ID NO: 1200182 - RNA, 19 nt, Homo sapiens
  misc_RNA (1)...(19): siRNA sense strand
gauaaagauggcaaaggaa

SEQ ID NO: 1200183 - RNA, 19 nt, Homo sapiens
  misc_RNA (1)...(19): siRNA sense strand
ccaguucuccuguuucuuc

SEQ ID NO: 1200184 - RNA, 19 nt, Homo sapiens
  misc_RNA (1)...(19): siRNA sense strand
ggaaguaacaaaguugcaa

SEQ ID NO: 1200185 - RNA, 19 nt, Homo sapiens
  misc_RNA (1)...(19): siRNA sense strand
acagaaaugaugcugcuaa

SEQ ID NO: 1200186 - RNA, 19 nt, Homo sapiens
  misc_RNA (1)...(19): siRNA sense strand
acaauacacugugaaccuu

SEQ ID NO: 1200187 - RNA, 19 nt, Homo sapiens
  misc_RNA (1)...(19): siRNA sense strand
agagauaugugcacuuacu

SEQ ID NO: 1200188 - RNA, 19 nt, Homo sapiens
  misc_RNA (1)...(19): siRNA sense strand
ccacaggaaaugagaugaa

SEQ ID NO: 1200189 - RNA, 19 nt, Homo sapiens
  misc_RNA (1)...(19): siRNA sense strand
ugaguacccggacagauaa

SEQ ID NO: 1200190 - RNA, 19 nt, Homo sapiens
  misc_RNA (1)...(19): siRNA sense strand
ccuugaaagucucaucuau

SEQ ID NO: 1200191 - RNA, 19 nt, Homo sapiens
  misc_RNA (1)...(19): siRNA sense strand
cauauguggagaauaguaa

SEQ ID NO: 1200192 - RNA, 19 nt, Homo sapiens
  misc_RNA (1)...(19): siRNA sense strand
gauaaagaaacgcccugaa

SEQ ID NO: 1200193 - RNA, 19 nt, Homo sapiens
  misc_RNA (1)...(19): siRNA sense strand
caacagaucugcugaaaga

SEQ ID NO: 1200194 - RNA, 19 nt, Homo sapiens
  misc_RNA (1)...(19): siRNA sense strand
ggacauauguggagaauag

SEQ ID NO: 1200195 - RNA, 19 nt, Homo sapiens
  misc_RNA (1)...(19): siRNA sense strand
ccaaagaccuuaauaacuu

SEQ ID NO: 1200196 - RNA, 19 nt, Homo sapiens
  misc_RNA (1)...(19): siRNA sense strand
caaaguaaauccugcagua

SEQ ID NO: 1200197 - RNA, 19 nt, Homo sapiens
  misc_RNA (1)...(19): siRNA sense strand
gaaacgcccugaagaagaa

SEQ ID NO: 1200198 - RNA, 19 nt, Homo sapiens
  misc_RNA (1)...(19): siRNA sense strand
gauaacaguuggauaaaga

SEQ ID NO: 1200199 - RNA, 19 nt, Homo sapiens
  misc_RNA (1)...(19): siRNA sense strand
gcagauacauccaccuaaa

SEQ ID NO: 1200200 - RNA, 19 nt, Homo sapiens
  misc_RNA (1)...(19): siRNA sense strand
uaaagugacuccugaaaga

SEQ ID NO: 1200201 - RNA, 19 nt, Homo sapiens
  misc_RNA (1)...(19): siRNA sense strand
caaauuugcugccauucua

SEQ ID NO: 1200202 - RNA, 19 nt, Homo sapiens
  misc_RNA (1)...(19): siRNA sense strand
aaagagauaugugcacuua

SEQ ID NO: 1200203 - RNA, 19 nt, Homo sapiens
  misc_RNA (1)...(19): siRNA sense strand
gaaguaaauucucaugugu

SEQ ID NO: 1200204 - RNA, 19 nt, Homo sapiens
  misc_RNA (1)...(19): siRNA sense strand
gaaaguaaaugagagagau

SEQ ID NO: 1200205 - RNA, 19 nt, Homo sapiens
  misc_RNA (1)...(19): siRNA sense strand
caaggugaauccugaaauu

SEQ ID NO: 1200206 - RNA, 19 nt, Homo sapiens
  misc_RNA (1)...(19): siRNA sense strand
ggaaguccgauuaaaguua

SEQ ID NO: 1200207 - RNA, 19 nt, Homo sapiens
  misc_RNA (1)...(19): siRNA sense strand
gaagugaagaccuugauaa

SEQ ID NO: 1200208 - RNA, 19 nt, Homo sapiens
  misc_RNA (1)...(19): siRNA sense strand
gaacuuucuuacaggauaa

SEQ ID NO: 1200209 - RNA, 19 nt, Homo sapiens
  misc_RNA (1)...(19): siRNA sense strand
uaaaguggauccugaaaca

SEQ ID NO: 1200210 - RNA, 19 nt, Homo sapiens
  misc_RNA (1)...(19): siRNA sense strand
gauaaucucaucaaaguga

SEQ ID NO: 1200211 - RNA, 19 nt, Homo sapiens
  misc_RNA (1)...(19): siRNA sense strand
cgacauaauucccaugaug

SEQ ID NO: 1200212 - RNA, 19 nt, Homo sapiens
  misc_RNA (1)...(19): siRNA sense strand
gauaaccaacuaaccaaua

SEQ ID NO: 1200213 - RNA, 19 nt, Homo sapiens
  misc_RNA (1)...(19): siRNA sense strand
ugaaguaaaucccaaagga

SEQ ID NO: 1200214 - RNA, 19 nt, Homo sapiens
  misc_RNA (1)...(19): siRNA sense strand
gugaagaccuugauaaugc

SEQ ID NO: 1200215 - RNA, 19 nt, Homo sapiens
  misc_RNA (1)...(19): siRNA sense strand
gaauaggaaucaaggucuu

SEQ ID NO: 1200216 - RNA, 19 nt, Homo sapiens
  misc_RNA (1)...(19): siRNA sense strand
ugaaguaaauucucaugug

SEQ ID NO: 1200217 - RNA, 19 nt, Homo sapiens
  misc_RNA (1)...(19): siRNA sense strand
cagagcaaauccaaaggua

SEQ ID NO: 1200218 - RNA, 19 nt, Homo sapiens
  misc_RNA (1)...(19): siRNA sense strand
cagaagaagugaagaccuu

SEQ ID NO: 1200219 - RNA, 19 nt, Homo sapiens
  misc_RNA (1)...(19): siRNA sense strand
caggauaacaguuggauaa

SEQ ID NO: 1200220 - RNA, 19 nt, Homo sapiens
  misc_RNA (1)...(19): siRNA sense strand
caaaguguauccaggaaca

SEQ ID NO: 1200221 - RNA, 19 nt, Homo sapiens
  misc_RNA (1)...(19): siRNA sense strand
agauaaagauggcaaagga

SEQ ID NO: 1200222 - RNA, 19 nt, Homo sapiens
  misc_RNA (1)...(19): siRNA sense strand
gacaggaucucagacagaa

SEQ ID NO: 1200223 - RNA, 19 nt, Homo sapiens
  misc_RNA (1)...(19): siRNA sense strand
gauaauaggcagauacauc

SEQ ID NO: 1200224 - RNA, 19 nt, Homo sapiens
  misc_RNA (1)...(19): siRNA sense strand
ucucgaaucuguugcuaaa

SEQ ID NO: 1200225 - RNA, 19 nt, Homo sapiens
  misc_RNA (1)...(19): siRNA sense strand
gagcaaauccaaagguaga

SEQ ID NO: 1200226 - RNA, 19 nt, Homo sapiens
  misc_RNA (1)...(19): siRNA sense strand
cagaaaugaugcugcuaaa

SEQ ID NO: 1200227 - RNA, 19 nt, Homo sapiens
  misc_RNA (1)...(19): siRNA sense strand
ggugauaguauuuggauuu

SEQ ID NO: 1200228 - RNA, 19 nt, Homo sapiens
  misc_RNA (1)...(19): siRNA sense strand
uaaauucucaugugucuga

SEQ ID NO: 1200229 - RNA, 19 nt, Homo sapiens
  misc_RNA (1)...(19): siRNA sense strand
gaagaggcaguccugguuu

SEQ ID NO: 1200230 - RNA, 19 nt, Homo sapiens
  misc_RNA (1)...(19): siRNA sense strand
gaaccuugcuacucuaaaa

SEQ ID NO: 1200231 - RNA, 19 nt, Homo sapiens
  misc_RNA (1)...(19): siRNA sense strand
uuacaaauuugcugccauu

SEQ ID NO: 1200232 - RNA, 19 nt, Homo sapiens
  misc_RNA (1)...(19): siRNA sense strand
ugauaggucugucauugaa

SEQ ID NO: 1200233 - RNA, 19 nt, Homo sapiens
  misc_RNA (1)...(19): siRNA sense strand
uaaagaaacgcccugaaga

SEQ ID NO: 1200234 - RNA, 19 nt, Homo sapiens
  misc_RNA (1)...(19): siRNA sense strand
gaauaucucuggaaaauac

SEQ ID NO: 1200235 - RNA, 19 nt, Homo sapiens
  misc_RNA (1)...(19): siRNA sense strand
gcaguaaucagaaacaauc

SEQ ID NO: 1200236 - RNA, 19 nt, Homo sapiens
  misc_RNA (1)...(19): siRNA sense strand
ucacaaacaaccaaagaaa

SEQ ID NO: 1200237 - RNA, 19 nt, Homo sapiens
  misc_RNA (1)...(19): siRNA sense strand
caacaccuccaacaccaua

SEQ ID NO: 1200238 - RNA, 19 nt, Homo sapiens
  misc_RNA (1)...(19): siRNA sense strand
gugaagaauuggauaaucu

SEQ ID NO: 1200239 - RNA, 19 nt, Homo sapiens
  misc_RNA (1)...(19): siRNA sense strand
gcuaaccucaucaaaguaa

SEQ ID NO: 1200240 - RNA, 19 nt, Homo sapiens
  misc_RNA (1)...(19): siRNA sense strand
caaagaccuuaauaacuuc

SEQ ID NO: 1200241 - RNA, 19 nt, Homo sapiens
  misc_RNA (1)...(19): siRNA sense strand
gcauuggacaggaaaguaa

SEQ ID NO: 1200242 - RNA, 19 nt, Homo sapiens
  misc_RNA (1)...(19): siRNA sense strand
gugaaugccaggaugaaua

SEQ ID NO: 1200243 - RNA, 19 nt, Homo sapiens
  misc_RNA (1)...(19): siRNA sense strand
gacaaaaucucgaaucugu

SEQ ID NO: 1200244 - RNA, 19 nt, Homo sapiens
  misc_RNA (1)...(19): siRNA sense strand
aaagaaacgcccugaagaa

SEQ ID NO: 1200245 - RNA, 19 nt, Homo sapiens
  misc_RNA (1)...(19): siRNA sense strand
gaaacaaucagagccaaga

SEQ ID NO: 1200246 - RNA, 19 nt, Homo sapiens
  misc_RNA (1)...(19): siRNA sense strand
gaaagaaacagaacuaacc

SEQ ID NO: 1200247 - RNA, 19 nt, Homo sapiens
  misc_RNA (1)...(19): siRNA sense strand
guacaguucugaugacacu

SEQ ID NO: 1200248 - RNA, 19 nt, Homo sapiens
  misc_RNA (1)...(19): siRNA sense strand
cuacuacuccuguaaagaa

SEQ ID NO: 1200249 - RNA, 19 nt, Homo sapiens
  misc_RNA (1)...(19): siRNA sense strand
gugcucaaccgacauaauu

SEQ ID NO: 1200250 - RNA, 19 nt, Homo sapiens
  misc_RNA (1)...(19): siRNA sense strand
gcaagcagccuuuggaaaa

SEQ ID NO: 1200251 - RNA, 19 nt, Homo sapiens
  misc_RNA (1)...(19): siRNA sense strand
ggauaacaguuggauaaag

SEQ ID NO: 1200252 - RNA, 19 nt, Homo sapiens
  misc_RNA (1)...(19): siRNA sense strand
ggacaggaucucagacaga

SEQ ID NO: 1200253 - RNA, 19 nt, Homo sapiens
  misc_RNA (1)...(19): siRNA sense strand
cagcugagacaggauaaua

SEQ ID NO: 1200254 - RNA, 19 nt, Homo sapiens
  misc_RNA (1)...(19): siRNA sense strand
ggauggauaucaggagaau

SEQ ID NO: 1200255 - RNA, 19 nt, Homo sapiens
  misc_RNA (1)...(19): siRNA sense strand
gccagagccuugauaaucu

SEQ ID NO: 1200256 - RNA, 19 nt, Homo sapiens
  misc_RNA (1)...(19): siRNA sense strand
gaccuugaugggcuuauua

SEQ ID NO: 1200257 - RNA, 19 nt, Homo sapiens
  misc_RNA (1)...(19): siRNA sense strand
ugaaugccaggaugaauaa

SEQ ID NO: 1200258 - RNA, 19 nt, Homo sapiens
  misc_RNA (1)...(19): siRNA sense strand
gguagaagaaagagagaaa

SEQ ID NO: 1200259 - RNA, 19 nt, Homo sapiens
  misc_RNA (1)...(19): siRNA sense strand
aaagagaaguaaccaaggu

SEQ ID NO: 1200260 - RNA, 19 nt, Homo sapiens
  misc_RNA (1)...(19): siRNA sense strand
ggaaaguaaaugagagaga

SEQ ID NO: 1200261 - RNA, 19 nt, Homo sapiens
  misc_RNA (1)...(19): siRNA sense strand
ucugauaggucugucauug

SEQ ID NO: 1200262 - RNA, 19 nt, Homo sapiens
  misc_RNA (1)...(19): siRNA sense strand
ggucuugaugaacauauua

SEQ ID NO: 1200263 - RNA, 19 nt, Homo sapiens
  misc_RNA (1)...(19): siRNA sense strand
cagaucugcugaaagaaau

SEQ ID NO: 1200264 - RNA, 19 nt, Homo sapiens
  misc_RNA (1)...(19): siRNA sense strand
aaacauauaaggccaauac

SEQ ID NO: 1200265 - RNA, 19 nt, Homo sapiens
  misc_RNA (1)...(19): siRNA sense strand
gaagaagugaagaccuuga

SEQ ID NO: 1200266 - RNA, 19 nt, Homo sapiens
  misc_RNA (1)...(19): siRNA sense strand
ggucugucauugaaagaga

SEQ ID NO: 1200267 - RNA, 19 nt, Homo sapiens
  misc_RNA (1)...(19): siRNA sense strand
uugaugggcuuauuaaagu

SEQ ID NO: 1200268 - RNA, 19 nt, Homo sapiens
  misc_RNA (1)...(19): siRNA sense strand
agaauuggauaaucucauc

SEQ ID NO: 1200269 - RNA, 19 nt, Homo sapiens
  misc_RNA (1)...(19): siRNA sense strand
ggccagagccuugauaauc

SEQ ID NO: 1200270 - RNA, 19 nt, Homo sapiens
  misc_RNA (1)...(19): siRNA sense strand
caaagugaccccugaagua

SEQ ID NO: 1200271 - RNA, 19 nt, Homo sapiens
  misc_RNA (1)...(19): siRNA sense strand
uugcuaaccucaucaaagu

SEQ ID NO: 1200272 - RNA, 19 nt, Homo sapiens
  misc_RNA (1)...(19): siRNA sense strand
guuccaaagaccuuaauaa

SEQ ID NO: 1200273 - RNA, 19 nt, Homo sapiens
  misc_RNA (1)...(19): siRNA sense strand
uaauucccaugaugcauug

SEQ ID NO: 1200274 - RNA, 19 nt, Homo sapiens
  misc_RNA (1)...(19): siRNA sense strand
aaagugaucccuucagcaa

SEQ ID NO: 1200275 - RNA, 19 nt, Homo sapiens
  misc_RNA (1)...(19): siRNA sense strand
gacaggaaaguaaaugaga

SEQ ID NO: 1200276 - RNA, 19 nt, Homo sapiens
  misc_RNA (1)...(19): siRNA sense strand
gaaagagauaugugcacuu

SEQ ID NO: 1200277 - RNA, 19 nt, Homo sapiens
  misc_RNA (1)...(19): siRNA sense strand
guaaucagaaacaaucaga

SEQ ID NO: 1200278 - RNA, 19 nt, Homo sapiens
  misc_RNA (1)...(19): siRNA sense strand
ucgaaucuguugcuaaagu

SEQ ID NO: 1200279 - RNA, 19 nt, Homo sapiens
  misc_RNA (1)...(19): siRNA sense strand
aacaaaagcuugaauagga

SEQ ID NO: 1200280 - RNA, 19 nt, Homo sapiens
  misc_RNA (1)...(19): siRNA sense strand
acaauuagucgguacaguu

SEQ ID NO: 1200281 - RNA, 19 nt, Homo sapiens
  misc_RNA (1)...(19): siRNA sense strand
cacggaagcagcaggauuu

SEQ ID NO: 1200282 - RNA, 19 nt, Homo sapiens
  misc_RNA (1)...(19): siRNA sense strand
gauaaagauggcaaaggaa

SEQ ID NO: 1200283 - RNA, 19 nt, Homo sapiens
  misc_RNA (1)...(19): siRNA sense strand
ccaguucuccuguuucuuc

SEQ ID NO: 1200284 - RNA, 19 nt, Homo sapiens
  misc_RNA (1)...(19): siRNA sense strand
ggaaguaacaaaguugcaa

SEQ ID NO: 1200285 - RNA, 19 nt, Homo sapiens
  misc_RNA (1)...(19): siRNA sense strand
acagaaaugaugcugcuaa

SEQ ID NO: 1200286 - RNA, 19 nt, Homo sapiens
  misc_RNA (1)...(19): siRNA sense strand
acaauacacugugaaccuu

SEQ ID NO: 1200287 - RNA, 19 nt, Homo sapiens
  misc_RNA (1)...(19): siRNA sense strand
agagauaugugcacuuacu

SEQ ID NO: 1200288 - RNA, 19 nt, Homo sapiens
  misc_RNA (1)...(19): siRNA sense strand
ccacaggaaaugagaugaa

SEQ ID NO: 1200289 - RNA, 19 nt, Homo sapiens
  misc_RNA (1)...(19): siRNA sense strand
ugaguacccggacagauaa

SEQ ID NO: 1200290 - RNA, 19 nt, Homo sapiens
  misc_RNA (1)...(19): siRNA sense strand
ccuugaaagucucaucuau

SEQ ID NO: 1200291 - RNA, 19 nt, Homo sapiens
  misc_RNA (1)...(19): siRNA sense strand
cauauguggagaauaguaa

SEQ ID NO: 1200292 - RNA, 19 nt, Homo sapiens
  misc_RNA (1)...(19): siRNA sense strand
gauaaagaaacgcccugaa

SEQ ID NO: 1200293 - RNA, 19 nt, Homo sapiens
  misc_RNA (1)...(19): siRNA sense strand
gcgauaugcucuucuguua

SEQ ID NO: 1200294 - RNA, 19 nt, Homo sapiens
  misc_RNA (1)...(19): siRNA sense strand
gauaugcucuucuguuaga

SEQ ID NO: 1200295 - RNA, 19 nt, Homo sapiens
  misc_RNA (1)...(19): siRNA sense strand
cagaagaaauucacaggaa

SEQ ID NO: 1200296 - RNA, 19 nt, Homo sapiens
  misc_RNA (1)...(19): siRNA sense strand
caaagucauugcugcgaua

SEQ ID NO: 1200297 - RNA, 19 nt, Homo sapiens
  misc_RNA (1)...(19): siRNA sense strand
gcuugaaacugcagaagaa

SEQ ID NO: 1200298 - RNA, 19 nt, Homo sapiens
  misc_RNA (1)...(19): siRNA sense strand
uugcaaagcuucagucaga

SEQ ID NO: 1200299 - RNA, 19 nt, Homo sapiens
  misc_RNA (1)...(19): siRNA sense strand
gaacguugaaccaaauauu

SEQ ID NO: 1200300 - RNA, 19 nt, Homo sapiens
  misc_RNA (1)...(19): siRNA sense strand
ucaacacugucgcuaauga

SEQ ID NO: 1200301 - RNA, 19 nt, Homo sapiens
  misc_RNA (1)...(19): siRNA sense strand
aaagaacguugaaccaaau

SEQ ID NO: 1200302 - RNA, 19 nt, Homo sapiens
  misc_RNA (1)...(19): siRNA sense strand
caaauucaaggcuacgaua

SEQ ID NO: 1200303 - RNA, 19 nt, Homo sapiens
  misc_RNA (1)...(19): siRNA sense strand
cagaggaugugcagguuga

SEQ ID NO: 1200304 - RNA, 19 nt, Homo sapiens
  misc_RNA (1)...(19): siRNA sense strand
agaagaaauucacaggaaa

SEQ ID NO: 1200305 - RNA, 19 nt, Homo sapiens
  misc_RNA (1)...(19): siRNA sense strand
gacgugaaccaguaucuuu

SEQ ID NO: 1200306 - RNA, 19 nt, Homo sapiens
  misc_RNA (1)...(19): siRNA sense strand
cuacaaaucccuuaccaau

SEQ ID NO: 1200307 - RNA, 19 nt, Homo sapiens
  misc_RNA (1)...(19): siRNA sense strand
uagcuuugauggcagcaua

SEQ ID NO: 1200308 - RNA, 19 nt, Homo sapiens
  misc_RNA (1)...(19): siRNA sense strand
gcucuucuguuagacauug

SEQ ID NO: 1200309 - RNA, 19 nt, Homo sapiens
  misc_RNA (1)...(19): siRNA sense strand
cacugucgcuaaugaagua

SEQ ID NO: 1200310 - RNA, 19 nt, Homo sapiens
  misc_RNA (1)...(19): siRNA sense strand
ugaaacugcagaagaaauu

SEQ ID NO: 1200311 - RNA, 19 nt, Homo sapiens
  misc_RNA (1)...(19): siRNA sense strand
gcugagagaaagcuguaua

SEQ ID NO: 1200312 - RNA, 19 nt, Homo sapiens
  misc_RNA (1)...(19): siRNA sense strand
gaagauaacagugaaacag

SEQ ID NO: 1200313 - RNA, 19 nt, Homo sapiens
  misc_RNA (1)...(19): siRNA sense strand
auucaaggcuacgauauuu

SEQ ID NO: 1200314 - RNA, 19 nt, Homo sapiens
  misc_RNA (1)...(19): siRNA sense strand
gauauuucacuccuaaaga

SEQ ID NO: 1200315 - RNA, 19 nt, Homo sapiens
  misc_RNA (1)...(19): siRNA sense strand
auagugaucucucugugaa

SEQ ID NO: 1200316 - RNA, 19 nt, Homo sapiens
  misc_RNA (1)...(19): siRNA sense strand
caacgugcauguaguagcu

SEQ ID NO: 1200317 - RNA, 19 nt, Homo sapiens
  misc_RNA (1)...(19): siRNA sense strand
agaaauagcaaaucuccuu

SEQ ID NO: 1200318 - RNA, 19 nt, Homo sapiens
  misc_RNA (1)...(19): siRNA sense strand
gauagugaucucucuguga

SEQ ID NO: 1200319 - RNA, 19 nt, Homo sapiens
  misc_RNA (1)...(19): siRNA sense strand
caagaagaacagauaacaa

SEQ ID NO: 1200320 - RNA, 19 nt, Homo sapiens
  misc_RNA (1)...(19): siRNA sense strand
gaagguccgugugcuuuac

SEQ ID NO: 1200321 - RNA, 19 nt, Homo sapiens
  misc_RNA (1)...(19): siRNA sense strand
cggauuuccugagaagaua

SEQ ID NO: 1200322 - RNA, 19 nt, Homo sapiens
  misc_RNA (1)...(19): siRNA sense strand
gaguucggauuuccugaga

SEQ ID NO: 1200323 - RNA, 19 nt, Homo sapiens
  misc_RNA (1)...(19): siRNA sense strand
ucacaagaagaacagauaa

SEQ ID NO: 1200324 - RNA, 19 nt, Homo sapiens
  misc_RNA (1)...(19): siRNA sense strand
ucagagccauuacccuuuc

SEQ ID NO: 1200325 - RNA, 19 nt, Homo sapiens
  misc_RNA (1)...(19): siRNA sense strand
ugucaacacugucgcuaau

SEQ ID NO: 1200326 - RNA, 19 nt, Homo sapiens
  misc_RNA (1)...(19): siRNA sense strand
aaaagaacguugaaccaaa

SEQ ID NO: 1200327 - RNA, 19 nt, Homo sapiens
  misc_RNA (1)...(19): siRNA sense strand
gguugagaauaucuacaaa

SEQ ID NO: 1200328 - RNA, 19 nt, Homo sapiens
  misc_RNA (1)...(19): siRNA sense strand
guucagcccacuuguagaa

SEQ ID NO: 1200329 - RNA, 19 nt, Homo sapiens
  misc_RNA (1)...(19): siRNA sense strand
gaagaacagauaacaaagc

SEQ ID NO: 1200330 - RNA, 19 nt, Homo sapiens
  misc_RNA (1)...(19): siRNA sense strand
cuguauaccugcacaagug

SEQ ID NO: 1200331 - RNA, 19 nt, Homo sapiens
  misc_RNA (1)...(19): siRNA sense strand
gcauacaguguucuggaaa

SEQ ID NO: 1200332 - RNA, 19 nt, Homo sapiens
  misc_RNA (1)...(19): siRNA sense strand
gauggcagcauacaguguu

SEQ ID NO: 1200333 - RNA, 19 nt, Homo sapiens
  misc_RNA (1)...(19): siRNA sense strand
gaaaagaacguugaaccaa

SEQ ID NO: 1200334 - RNA, 19 nt, Homo sapiens
  misc_RNA (1)...(19): siRNA sense strand
guuaucgccuacuuggaaa

SEQ ID NO: 1200335 - RNA, 19 nt, Homo sapiens
  misc_RNA (1)...(19): siRNA sense strand
gaagaaauucacaggaaaa

SEQ ID NO: 1200336 - RNA, 19 nt, Homo sapiens
  misc_RNA (1)...(19): siRNA sense strand
aauaugcaauggauguaga

SEQ ID NO: 1200337 - RNA, 19 nt, Homo sapiens
  misc_RNA (1)...(19): siRNA sense strand
cugagaagauaacagugaa

SEQ ID NO: 1200338 - RNA, 19 nt, Homo sapiens
  misc_RNA (1)...(19): siRNA sense strand
ugcgauauuucacuccuaa

SEQ ID NO: 1200339 - RNA, 19 nt, Homo sapiens
  misc_RNA (1)...(19): siRNA sense strand
gucacaagaagaacagaua

SEQ ID NO: 1200340 - RNA, 19 nt, Homo sapiens
  misc_RNA (1)...(19): siRNA sense strand
gcgcugagagaaagcugua

SEQ ID NO: 1200341 - RNA, 19 nt, Homo sapiens
  misc_RNA (1)...(19): siRNA sense strand
gaaucuguacauccacaaa

SEQ ID NO: 1200342 - RNA, 19 nt, Homo sapiens
  misc_RNA (1)...(19): siRNA sense strand
caacacugucgcuaaugaa

SEQ ID NO: 1200343 - RNA, 19 nt, Homo sapiens
  misc_RNA (1)...(19): siRNA sense strand
gcuaaugaaguauacaagu

SEQ ID NO: 1200344 - RNA, 19 nt, Homo sapiens
  misc_RNA (1)...(19): siRNA sense strand
guucggauuuccugagaag

SEQ ID NO: 1200345 - RNA, 19 nt, Homo sapiens
  misc_RNA (1)...(19): siRNA sense strand
aauagcaaaucuccuugga

SEQ ID NO: 1200346 - RNA, 19 nt, Homo sapiens
  misc_RNA (1)...(19): siRNA sense strand
guuacagacugcagaggau

SEQ ID NO: 1200347 - RNA, 19 nt, Homo sapiens
  misc_RNA (1)...(19): siRNA sense strand
gcaccacgcgcugagagaa

SEQ ID NO: 1200348 - RNA, 19 nt, Homo sapiens
  misc_RNA (1)...(19): siRNA sense strand
ucucaacgugcauguagua

SEQ ID NO: 1200349 - RNA, 19 nt, Homo sapiens
  misc_RNA (1)...(19): siRNA sense strand
uacaaaucccuuaccaauu

SEQ ID NO: 1200350 - RNA, 19 nt, Homo sapiens
  misc_RNA (1)...(19): siRNA sense strand
gaugugcagguugagaaua

SEQ ID NO: 1200351 - RNA, 19 nt, Homo sapiens
  misc_RNA (1)...(19): siRNA sense strand
agaagguccgugugcuuua

SEQ ID NO: 1200352 - RNA, 19 nt, Homo sapiens
  misc_RNA (1)...(19): siRNA sense strand
uagaagguccgugugcuuu

SEQ ID NO: 1200353 - RNA, 19 nt, Homo sapiens
  misc_RNA (1)...(19): siRNA sense strand
guagaagguccgugugcuu

SEQ ID NO: 1200354 - RNA, 19 nt, Homo sapiens
  misc_RNA (1)...(19): siRNA sense strand
ccugagaagauaacaguga

SEQ ID NO: 1200355 - RNA, 19 nt, Homo sapiens
  misc_RNA (1)...(19): siRNA sense strand
gaaacugcagaagaaauuc

SEQ ID NO: 1200356 - RNA, 19 nt, Homo sapiens
  misc_RNA (1)...(19): siRNA sense strand
cguuaucgccuacuuggaa

SEQ ID NO: 1200357 - RNA, 19 nt, Homo sapiens
  misc_RNA (1)...(19): siRNA sense strand
aagaacagauaacaaagcu

SEQ ID NO: 1200358 - RNA, 19 nt, Homo sapiens
  misc_RNA (1)...(19): siRNA sense strand
gaaccaguaucuuuuacca

SEQ ID NO: 1200359 - RNA, 19 nt, Homo sapiens
  misc_RNA (1)...(19): siRNA sense strand
gagagaaagcuguauaccu

SEQ ID NO: 1200360 - RNA, 19 nt, Homo sapiens
  misc_RNA (1)...(19): siRNA sense strand
gcugcgauaugcucuucug

SEQ ID NO: 1200361 - RNA, 19 nt, Homo sapiens
  misc_RNA (1)...(19): siRNA sense strand
aggcuacgauauuuucuua

SEQ ID NO: 1200362 - RNA, 19 nt, Homo sapiens
  misc_RNA (1)...(19): siRNA sense strand
ggauuuccugagaagauaa

SEQ ID NO: 1200363 - RNA, 19 nt, Homo sapiens
  misc_RNA (1)...(19): siRNA sense strand
acaagaagaacagauaaca

SEQ ID NO: 1200364 - RNA, 19 nt, Homo sapiens
  misc_RNA (1)...(19): siRNA sense strand
ccucuugauacaaacaaua

SEQ ID NO: 1200365 - RNA, 19 nt, Homo sapiens
  misc_RNA (1)...(19): siRNA sense strand
gagaagauaacagugaaac

SEQ ID NO: 1200366 - RNA, 19 nt, Homo sapiens
  misc_RNA (1)...(19): siRNA sense strand
ugcgggugcuggagcuaua

SEQ ID NO: 1200367 - RNA, 19 nt, Homo sapiens
  misc_RNA (1)...(19): siRNA sense strand
uaucgccuacuuggaaaua

SEQ ID NO: 1200368 - RNA, 19 nt, Homo sapiens
  misc_RNA (1)...(19): siRNA sense strand
ccucacacacaguuacuug

SEQ ID NO: 1200369 - RNA, 19 nt, Homo sapiens
  misc_RNA (1)...(19): siRNA sense strand
aauugaaucuguacaucca

SEQ ID NO: 1200370 - RNA, 19 nt, Homo sapiens
  misc_RNA (1)...(19): siRNA sense strand
cuuaaacugcgauauuuca

SEQ ID NO: 1200371 - RNA, 19 nt, Homo sapiens
  misc_RNA (1)...(19): siRNA sense strand
gcaauggauguagaaaaua

SEQ ID NO: 1200372 - RNA, 19 nt, Homo sapiens
  misc_RNA (1)...(19): siRNA sense strand
gucagagccauuacccuuu

SEQ ID NO: 1200373 - RNA, 19 nt, Homo sapiens
  misc_RNA (1)...(19): siRNA sense strand
caaccucucuuggcauucc

SEQ ID NO: 1200374 - RNA, 19 nt, Homo sapiens
  misc_RNA (1)...(19): siRNA sense strand
ggaugugcagguugagaau

SEQ ID NO: 1200375 - RNA, 19 nt, Homo sapiens
  misc_RNA (1)...(19): siRNA sense strand
aagaugacacugacgugaa

SEQ ID NO: 1200376 - RNA, 19 nt, Homo sapiens
  misc_RNA (1)...(19): siRNA sense strand
cuacuuggaaauagucuca

SEQ ID NO: 1200377 - RNA, 19 nt, Homo sapiens
  misc_RNA (1)...(19): siRNA sense strand
aaacugcagaagaaauuca

SEQ ID NO: 1200378 - RNA, 19 nt, Homo sapiens
  misc_RNA (1)...(19): siRNA sense strand
augugcagguugagaauau

SEQ ID NO: 1200379 - RNA, 19 nt, Homo sapiens
  misc_RNA (1)...(19): siRNA sense strand
ccaaaggauauggaagcua

SEQ ID NO: 1200380 - RNA, 19 nt, Homo sapiens
  misc_RNA (1)...(19): siRNA sense strand
gcgauaugcucuucuguua

SEQ ID NO: 1200381 - RNA, 19 nt, Homo sapiens
  misc_RNA (1)...(19): siRNA sense strand
gauaugcucuucuguuaga

SEQ ID NO: 1200382 - RNA, 19 nt, Homo sapiens
  misc_RNA (1)...(19): siRNA sense strand
cagaagaaauucacaggaa

SEQ ID NO: 1200383 - RNA, 19 nt, Homo sapiens
  misc_RNA (1)...(19): siRNA sense strand
caaagucauugcugcgaua

SEQ ID NO: 1200384 - RNA, 19 nt, Homo sapiens
  misc_RNA (1)...(19): siRNA sense strand
gcuugaaacugcagaagaa

SEQ ID NO: 1200385 - RNA, 19 nt, Homo sapiens
  misc_RNA (1)...(19): siRNA sense strand
uugcaaagcuucagucaga

SEQ ID NO: 1200386 - RNA, 19 nt, Homo sapiens
  misc_RNA (1)...(19): siRNA sense strand
gaacguugaaccaaauauu

SEQ ID NO: 1200387 - RNA, 19 nt, Homo sapiens
  misc_RNA (1)...(19): siRNA sense strand
ucaacacugucgcuaauga

SEQ ID NO: 1200388 - RNA, 19 nt, Homo sapiens
  misc_RNA (1)...(19): siRNA sense strand
aaagaacguugaaccaaau

SEQ ID NO: 1200389 - RNA, 19 nt, Homo sapiens
  misc_RNA (1)...(19): siRNA sense strand
caaauucaaggcuacgaua

SEQ ID NO: 1200390 - RNA, 19 nt, Homo sapiens
  misc_RNA (1)...(19): siRNA sense strand
cagaggaugugcagguuga

SEQ ID NO: 1200391 - RNA, 19 nt, Homo sapiens
  misc_RNA (1)...(19): siRNA sense strand
agaagaaauucacaggaaa

SEQ ID NO: 1200392 - RNA, 19 nt, Homo sapiens
  misc_RNA (1)...(19): siRNA sense strand
gacgugaaccaguaucuuu

SEQ ID NO: 1200393 - RNA, 19 nt, Homo sapiens
  misc_RNA (1)...(19): siRNA sense strand
cuacaaaucccuuaccaau

SEQ ID NO: 1200394 - RNA, 19 nt, Homo sapiens
  misc_RNA (1)...(19): siRNA sense strand
uagcuuugauggcagcaua

SEQ ID NO: 1200395 - RNA, 19 nt, Homo sapiens
  misc_RNA (1)...(19): siRNA sense strand
gcucuucuguuagacauug

SEQ ID NO: 1200396 - RNA, 19 nt, Homo sapiens
  misc_RNA (1)...(19): siRNA sense strand
cacugucgcuaaugaagua

SEQ ID NO: 1200397 - RNA, 19 nt, Homo sapiens
  misc_RNA (1)...(19): siRNA sense strand
ugaaacugcagaagaaauu

SEQ ID NO: 1200398 - RNA, 19 nt, Homo sapiens
  misc_RNA (1)...(19): siRNA sense strand
gcugagagaaagcuguaua

SEQ ID NO: 1200399 - RNA, 19 nt, Homo sapiens
  misc_RNA (1)...(19): siRNA sense strand
gaagauaacagugaaacag

SEQ ID NO: 1200400 - RNA, 19 nt, Homo sapiens
  misc_RNA (1)...(19): siRNA sense strand
auucaaggcuacgauauuu

SEQ ID NO: 1200401 - RNA, 19 nt, Homo sapiens
  misc_RNA (1)...(19): siRNA sense strand
gauauuucacuccuaaaga

SEQ ID NO: 1200402 - RNA, 19 nt, Homo sapiens
  misc_RNA (1)...(19): siRNA sense strand
auagugaucucucugugaa

SEQ ID NO: 1200403 - RNA, 19 nt, Homo sapiens
  misc_RNA (1)...(19): siRNA sense strand
caacgugcauguaguagcu

SEQ ID NO: 1200404 - RNA, 19 nt, Homo sapiens
  misc_RNA (1)...(19): siRNA sense strand
agaaauagcaaaucuccuu

SEQ ID NO: 1200405 - RNA, 19 nt, Homo sapiens
  misc_RNA (1)...(19): siRNA sense strand
gauagugaucucucuguga

SEQ ID NO: 1200406 - RNA, 19 nt, Homo sapiens
  misc_RNA (1)...(19): siRNA sense strand
caagaagaacagauaacaa

SEQ ID NO: 1200407 - RNA, 19 nt, Homo sapiens
  misc_RNA (1)...(19): siRNA sense strand
gaagguccgugugcuuuac

SEQ ID NO: 1200408 - RNA, 19 nt, Homo sapiens
  misc_RNA (1)...(19): siRNA sense strand
cggauuuccugagaagaua

SEQ ID NO: 1200409 - RNA, 19 nt, Homo sapiens
  misc_RNA (1)...(19): siRNA sense strand
gaguucggauuuccugaga

SEQ ID NO: 1200410 - RNA, 19 nt, Homo sapiens
  misc_RNA (1)...(19): siRNA sense strand
ucacaagaagaacagauaa

SEQ ID NO: 1200411 - RNA, 19 nt, Homo sapiens
  misc_RNA (1)...(19): siRNA sense strand
ucagagccauuacccuuuc

SEQ ID NO: 1200412 - RNA, 19 nt, Homo sapiens
  misc_RNA (1)...(19): siRNA sense strand
ugucaacacugucgcuaau

SEQ ID NO: 1200413 - RNA, 19 nt, Homo sapiens
  misc_RNA (1)...(19): siRNA sense strand
aaaagaacguugaaccaaa

SEQ ID NO: 1200414 - RNA, 19 nt, Homo sapiens
  misc_RNA (1)...(19): siRNA sense strand
gguugagaauaucuacaaa

SEQ ID NO: 1200415 - RNA, 19 nt, Homo sapiens
  misc_RNA (1)...(19): siRNA sense strand
guucagcccacuuguagaa

SEQ ID NO: 1200416 - RNA, 19 nt, Homo sapiens
  misc_RNA (1)...(19): siRNA sense strand
gaagaacagauaacaaagc

SEQ ID NO: 1200417 - RNA, 19 nt, Homo sapiens
  misc_RNA (1)...(19): siRNA sense strand
cuguauaccugcacaagug

SEQ ID NO: 1200418 - RNA, 19 nt, Homo sapiens
  misc_RNA (1)...(19): siRNA sense strand
gcauacaguguucuggaaa

SEQ ID NO: 1200419 - RNA, 19 nt, Homo sapiens
  misc_RNA (1)...(19): siRNA sense strand
gauggcagcauacaguguu

SEQ ID NO: 1200420 - RNA, 19 nt, Homo sapiens
  misc_RNA (1)...(19): siRNA sense strand
gaaaagaacguugaaccaa

SEQ ID NO: 1200421 - RNA, 19 nt, Homo sapiens
  misc_RNA (1)...(19): siRNA sense strand
guuaucgccuacuuggaaa

SEQ ID NO: 1200422 - RNA, 19 nt, Homo sapiens
  misc_RNA (1)...(19): siRNA sense strand
gaagaaauucacaggaaaa

SEQ ID NO: 1200423 - RNA, 19 nt, Homo sapiens
  misc_RNA (1)...(19): siRNA sense strand
aauaugcaauggauguaga

SEQ ID NO: 1200424 - RNA, 19 nt, Homo sapiens
  misc_RNA (1)...(19): siRNA sense strand
cugagaagauaacagugaa

SEQ ID NO: 1200425 - RNA, 19 nt, Homo sapiens
  misc_RNA (1)...(19): siRNA sense strand
ugcgauauuucacuccuaa

SEQ ID NO: 1200426 - RNA, 19 nt, Homo sapiens
  misc_RNA (1)...(19): siRNA sense strand
gucacaagaagaacagaua

SEQ ID NO: 1200427 - RNA, 19 nt, Homo sapiens
  misc_RNA (1)...(19): siRNA sense strand
gcgcugagagaaagcugua

SEQ ID NO: 1200428 - RNA, 19 nt, Homo sapiens
  misc_RNA (1)...(19): siRNA sense strand
gaaucuguacauccacaaa

SEQ ID NO: 1200429 - RNA, 19 nt, Homo sapiens
  misc_RNA (1)...(19): siRNA sense strand
caacacugucgcuaaugaa

SEQ ID NO: 1200430 - RNA, 19 nt, Homo sapiens
  misc_RNA (1)...(19): siRNA sense strand
gcuaaugaaguauacaagu

SEQ ID NO: 1200431 - RNA, 19 nt, Homo sapiens
  misc_RNA (1)...(19): siRNA sense strand
guucggauuuccugagaag

SEQ ID NO: 1200432 - RNA, 19 nt, Homo sapiens
  misc_RNA (1)...(19): siRNA sense strand
aauagcaaaucuccuugga

SEQ ID NO: 1200433 - RNA, 19 nt, Homo sapiens
  misc_RNA (1)...(19): siRNA sense strand
guuacagacugcagaggau

SEQ ID NO: 1200434 - RNA, 19 nt, Homo sapiens
  misc_RNA (1)...(19): siRNA sense strand
gcaccacgcgcugagagaa

SEQ ID NO: 1200435 - RNA, 19 nt, Homo sapiens
  misc_RNA (1)...(19): siRNA sense strand
ucucaacgugcauguagua

SEQ ID NO: 1200436 - RNA, 19 nt, Homo sapiens
  misc_RNA (1)...(19): siRNA sense strand
uacaaaucccuuaccaauu

SEQ ID NO: 1200437 - RNA, 19 nt, Homo sapiens
  misc_RNA (1)...(19): siRNA sense strand
gaugugcagguugagaaua

SEQ ID NO: 1200438 - RNA, 19 nt, Homo sapiens
  misc_RNA (1)...(19): siRNA sense strand
agaagguccgugugcuuua

SEQ ID NO: 1200439 - RNA, 19 nt, Homo sapiens
  misc_RNA (1)...(19): siRNA sense strand
uagaagguccgugugcuuu

SEQ ID NO: 1200440 - RNA, 19 nt, Homo sapiens
  misc_RNA (1)...(19): siRNA sense strand
guagaagguccgugugcuu

SEQ ID NO: 1200441 - RNA, 19 nt, Homo sapiens
  misc_RNA (1)...(19): siRNA sense strand
ccugagaagauaacaguga

SEQ ID NO: 1200442 - RNA, 19 nt, Homo sapiens
  misc_RNA (1)...(19): siRNA sense strand
gaaacugcagaagaaauuc

SEQ ID NO: 1200443 - RNA, 19 nt, Homo sapiens
  misc_RNA (1)...(19): siRNA sense strand
cguuaucgccuacuuggaa

SEQ ID NO: 1200444 - RNA, 19 nt, Homo sapiens
  misc_RNA (1)...(19): siRNA sense strand
aagaacagauaacaaagcu

SEQ ID NO: 1200445 - RNA, 19 nt, Homo sapiens
  misc_RNA (1)...(19): siRNA sense strand
gaaccaguaucuuuuacca

SEQ ID NO: 1200446 - RNA, 19 nt, Homo sapiens
  misc_RNA (1)...(19): siRNA sense strand
gagagaaagcuguauaccu

SEQ ID NO: 1200447 - RNA, 19 nt, Homo sapiens
  misc_RNA (1)...(19): siRNA sense strand
gcugcgauaugcucuucug

SEQ ID NO: 1200448 - RNA, 19 nt, Homo sapiens
  misc_RNA (1)...(19): siRNA sense strand
aggcuacgauauuuucuua

SEQ ID NO: 1200449 - RNA, 19 nt, Homo sapiens
  misc_RNA (1)...(19): siRNA sense strand
ggauuuccugagaagauaa

SEQ ID NO: 1200450 - RNA, 19 nt, Homo sapiens
  misc_RNA (1)...(19): siRNA sense strand
acaagaagaacagauaaca

SEQ ID NO: 1200451 - RNA, 19 nt, Homo sapiens
  misc_RNA (1)...(19): siRNA sense strand
ccucuugauacaaacaaua

SEQ ID NO: 1200452 - RNA, 19 nt, Homo sapiens
  misc_RNA (1)...(19): siRNA sense strand
gagaagauaacagugaaac

SEQ ID NO: 1200453 - RNA, 19 nt, Homo sapiens
  misc_RNA (1)...(19): siRNA sense strand
ugcgggugcuggagcuaua

SEQ ID NO: 1200454 - RNA, 19 nt, Homo sapiens
  misc_RNA (1)...(19): siRNA sense strand
uaucgccuacuuggaaaua

SEQ ID NO: 1200455 - RNA, 19 nt, Homo sapiens
  misc_RNA (1)...(19): siRNA sense strand
ccucacacacaguuacuug

SEQ ID NO: 1200456 - RNA, 19 nt, Homo sapiens
  misc_RNA (1)...(19): siRNA sense strand
aauugaaucuguacaucca

SEQ ID NO: 1200457 - RNA, 19 nt, Homo sapiens
  misc_RNA (1)...(19): siRNA sense strand
cuuaaacugcgauauuuca

SEQ ID NO: 1200458 - RNA, 19 nt, Homo sapiens
  misc_RNA (1)...(19): siRNA sense strand
gcaauggauguagaaaaua

SEQ ID NO: 1200459 - RNA, 19 nt, Homo sapiens
  misc_RNA (1)...(19): siRNA sense strand
gucagagccauuacccuuu

SEQ ID NO: 1200460 - RNA, 19 nt, Homo sapiens
  misc_RNA (1)...(19): siRNA sense strand
caaccucucuuggcauucc

SEQ ID NO: 1200461 - RNA, 19 nt, Homo sapiens
  misc_RNA (1)...(19): siRNA sense strand
ggaugugcagguugagaau

SEQ ID NO: 1200462 - RNA, 19 nt, Homo sapiens
  misc_RNA (1)...(19): siRNA sense strand
aagaugacacugacgugaa

SEQ ID NO: 1200463 - RNA, 19 nt, Homo sapiens
  misc_RNA (1)...(19): siRNA sense strand
cuacuuggaaauagucuca

SEQ ID NO: 1200464 - RNA, 19 nt, Homo sapiens
  misc_RNA (1)...(19): siRNA sense strand
aaacugcagaagaaauuca

SEQ ID NO: 1200465 - RNA, 19 nt, Homo sapiens
  misc_RNA (1)...(19): siRNA sense strand
augugcagguugagaauau

SEQ ID NO: 1200466 - RNA, 19 nt, Homo sapiens
  misc_RNA (1)...(19): siRNA sense strand
ccaaaggauauggaagcua

SEQ ID NO: 1200467 - RNA, 19 nt, Homo sapiens
  misc_RNA (1)...(19): siRNA sense strand
gcgauaugcucuucuguua

SEQ ID NO: 1200468 - RNA, 19 nt, Homo sapiens
  misc_RNA (1)...(19): siRNA sense strand
gauaugcucuucuguuaga

SEQ ID NO: 1200469 - RNA, 19 nt, Homo sapiens
  misc_RNA (1)...(19): siRNA sense strand
cagaagaaauucacaggaa

SEQ ID NO: 1200470 - RNA, 19 nt, Homo sapiens
  misc_RNA (1)...(19): siRNA sense strand
caaagucauugcugcgaua

SEQ ID NO: 1200471 - RNA, 19 nt, Homo sapiens
  misc_RNA (1)...(19): siRNA sense strand
gcuugaaacugcagaagaa

SEQ ID NO: 1200472 - RNA, 19 nt, Homo sapiens
  misc_RNA (1)...(19): siRNA sense strand
uugcaaagcuucagucaga

SEQ ID NO: 1200473 - RNA, 19 nt, Homo sapiens
  misc_RNA (1)...(19): siRNA sense strand
gaacguugaaccaaauauu

SEQ ID NO: 1200474 - RNA, 19 nt, Homo sapiens
  misc_RNA (1)...(19): siRNA sense strand
ucaacacugucgcuaauga

SEQ ID NO: 1200475 - RNA, 19 nt, Homo sapiens
  misc_RNA (1)...(19): siRNA sense strand
aaagaacguugaaccaaau

SEQ ID NO: 1200476 - RNA, 19 nt, Homo sapiens
  misc_RNA (1)...(19): siRNA sense strand
caaauucaaggcuacgaua

SEQ ID NO: 1200477 - RNA, 19 nt, Homo sapiens
  misc_RNA (1)...(19): siRNA sense strand
cagaggaugugcagguuga

SEQ ID NO: 1200478 - RNA, 19 nt, Homo sapiens
  misc_RNA (1)...(19): siRNA sense strand
agaagaaauucacaggaaa

SEQ ID NO: 1200479 - RNA, 19 nt, Homo sapiens
  misc_RNA (1)...(19): siRNA sense strand
gacgugaaccaguaucuuu

SEQ ID NO: 1200480 - RNA, 19 nt, Homo sapiens
  misc_RNA (1)...(19): siRNA sense strand
cuacaaaucccuuaccaau

SEQ ID NO: 1200481 - RNA, 19 nt, Homo sapiens
  misc_RNA (1)...(19): siRNA sense strand
uagcuuugauggcagcaua

SEQ ID NO: 1200482 - RNA, 19 nt, Homo sapiens
  misc_RNA (1)...(19): siRNA sense strand
gcucuucuguuagacauug

SEQ ID NO: 1200483 - RNA, 19 nt, Homo sapiens
  misc_RNA (1)...(19): siRNA sense strand
cacugucgcuaaugaagua

SEQ ID NO: 1200484 - RNA, 19 nt, Homo sapiens
  misc_RNA (1)...(19): siRNA sense strand
ugaaacugcagaagaaauu

SEQ ID NO: 1200485 - RNA, 19 nt, Homo sapiens
  misc_RNA (1)...(19): siRNA sense strand
gcugagagaaagcuguaua

SEQ ID NO: 1200486 - RNA, 19 nt, Homo sapiens
  misc_RNA (1)...(19): siRNA sense strand
gaagauaacagugaaacag

SEQ ID NO: 1200487 - RNA, 19 nt, Homo sapiens
  misc_RNA (1)...(19): siRNA sense strand
auucaaggcuacgauauuu

SEQ ID NO: 1200488 - RNA, 19 nt, Homo sapiens
  misc_RNA (1)...(19): siRNA sense strand
gauauuucacuccuaaaga

SEQ ID NO: 1200489 - RNA, 19 nt, Homo sapiens
  misc_RNA (1)...(19): siRNA sense strand
auagugaucucucugugaa

SEQ ID NO: 1200490 - RNA, 19 nt, Homo sapiens
  misc_RNA (1)...(19): siRNA sense strand
caacgugcauguaguagcu

SEQ ID NO: 1200491 - RNA, 19 nt, Homo sapiens
  misc_RNA (1)...(19): siRNA sense strand
agaaauagcaaaucuccuu

SEQ ID NO: 1200492 - RNA, 19 nt, Homo sapiens
  misc_RNA (1)...(19): siRNA sense strand
gauagugaucucucuguga

SEQ ID NO: 1200493 - RNA, 19 nt, Homo sapiens
  misc_RNA (1)...(19): siRNA sense strand
caagaagaacagauaacaa

SEQ ID NO: 1200494 - RNA, 19 nt, Homo sapiens
  misc_RNA (1)...(19): siRNA sense strand
gaagguccgugugcuuuac

SEQ ID NO: 1200495 - RNA, 19 nt, Homo sapiens
  misc_RNA (1)...(19): siRNA sense strand
cggauuuccugagaagaua

SEQ ID NO: 1200496 - RNA, 19 nt, Homo sapiens
  misc_RNA (1)...(19): siRNA sense strand
gaguucggauuuccugaga

SEQ ID NO: 1200497 - RNA, 19 nt, Homo sapiens
  misc_RNA (1)...(19): siRNA sense strand
ucacaagaagaacagauaa

SEQ ID NO: 1200498 - RNA, 19 nt, Homo sapiens
  misc_RNA (1)...(19): siRNA sense strand
ucagagccauuacccuuuc

SEQ ID NO: 1200499 - RNA, 19 nt, Homo sapiens
  misc_RNA (1)...(19): siRNA sense strand
ugucaacacugucgcuaau

SEQ ID NO: 1200500 - RNA, 19 nt, Homo sapiens
  misc_RNA (1)...(19): siRNA sense strand
aaaagaacguugaaccaaa

SEQ ID NO: 1200501 - RNA, 19 nt, Homo sapiens
  misc_RNA (1)...(19): siRNA sense strand
gguugagaauaucuacaaa

SEQ ID NO: 1200502 - RNA, 19 nt, Homo sapiens
  misc_RNA (1)...(19): siRNA sense strand
guucagcccacuuguagaa

SEQ ID NO: 1200503 - RNA, 19 nt, Homo sapiens
  misc_RNA (1)...(19): siRNA sense strand
gaagaacagauaacaaagc

SEQ ID NO: 1200504 - RNA, 19 nt, Homo sapiens
  misc_RNA (1)...(19): siRNA sense strand
cuguauaccugcacaagug

SEQ ID NO: 1200505 - RNA, 19 nt, Homo sapiens
  misc_RNA (1)...(19): siRNA sense strand
gcauacaguguucuggaaa

SEQ ID NO: 1200506 - RNA, 19 nt, Homo sapiens
  misc_RNA (1)...(19): siRNA sense strand
gauggcagcauacaguguu

SEQ ID NO: 1200507 - RNA, 19 nt, Homo sapiens
  misc_RNA (1)...(19): siRNA sense strand
gaaaagaacguugaaccaa

SEQ ID NO: 1200508 - RNA, 19 nt, Homo sapiens
  misc_RNA (1)...(19): siRNA sense strand
guuaucgccuacuuggaaa

SEQ ID NO: 1200509 - RNA, 19 nt, Homo sapiens
  misc_RNA (1)...(19): siRNA sense strand
gaagaaauucacaggaaaa

SEQ ID NO: 1200510 - RNA, 19 nt, Homo sapiens
  misc_RNA (1)...(19): siRNA sense strand
aauaugcaauggauguaga

SEQ ID NO: 1200511 - RNA, 19 nt, Homo sapiens
  misc_RNA (1)...(19): siRNA sense strand
cugagaagauaacagugaa

SEQ ID NO: 1200512 - RNA, 19 nt, Homo sapiens
  misc_RNA (1)...(19): siRNA sense strand
ugcgauauuucacuccuaa

SEQ ID NO: 1200513 - RNA, 19 nt, Homo sapiens
  misc_RNA (1)...(19): siRNA sense strand
gucacaagaagaacagaua

SEQ ID NO: 1200514 - RNA, 19 nt, Homo sapiens
  misc_RNA (1)...(19): siRNA sense strand
gcgcugagagaaagcugua

SEQ ID NO: 1200515 - RNA, 19 nt, Homo sapiens
  misc_RNA (1)...(19): siRNA sense strand
gaaucuguacauccacaaa

SEQ ID NO: 1200516 - RNA, 19 nt, Homo sapiens
  misc_RNA (1)...(19): siRNA sense strand
caacacugucgcuaaugaa

SEQ ID NO: 1200517 - RNA, 19 nt, Homo sapiens
  misc_RNA (1)...(19): siRNA sense strand
gcuaaugaaguauacaagu

SEQ ID NO: 1200518 - RNA, 19 nt, Homo sapiens
  misc_RNA (1)...(19): siRNA sense strand
guucggauuuccugagaag

SEQ ID NO: 1200519 - RNA, 19 nt, Homo sapiens
  misc_RNA (1)...(19): siRNA sense strand
aauagcaaaucuccuugga

SEQ ID NO: 1200520 - RNA, 19 nt, Homo sapiens
  misc_RNA (1)...(19): siRNA sense strand
guuacagacugcagaggau

SEQ ID NO: 1200521 - RNA, 19 nt, Homo sapiens
  misc_RNA (1)...(19): siRNA sense strand
gcaccacgcgcugagagaa

SEQ ID NO: 1200522 - RNA, 19 nt, Homo sapiens
  misc_RNA (1)...(19): siRNA sense strand
ucucaacgugcauguagua

SEQ ID NO: 1200523 - RNA, 19 nt, Homo sapiens
  misc_RNA (1)...(19): siRNA sense strand
uacaaaucccuuaccaauu

SEQ ID NO: 1200524 - RNA, 19 nt, Homo sapiens
  misc_RNA (1)...(19): siRNA sense strand
gaugugcagguugagaaua

SEQ ID NO: 1200525 - RNA, 19 nt, Homo sapiens
  misc_RNA (1)...(19): siRNA sense strand
agaagguccgugugcuuua

SEQ ID NO: 1200526 - RNA, 19 nt, Homo sapiens
  misc_RNA (1)...(19): siRNA sense strand
uagaagguccgugugcuuu

SEQ ID NO: 1200527 - RNA, 19 nt, Homo sapiens
  misc_RNA (1)...(19): siRNA sense strand
guagaagguccgugugcuu

SEQ ID NO: 1200528 - RNA, 19 nt, Homo sapiens
  misc_RNA (1)...(19): siRNA sense strand
ccugagaagauaacaguga

SEQ ID NO: 1200529 - RNA, 19 nt, Homo sapiens
  misc_RNA (1)...(19): siRNA sense strand
gaaacugcagaagaaauuc

SEQ ID NO: 1200530 - RNA, 19 nt, Homo sapiens
  misc_RNA (1)...(19): siRNA sense strand
cguuaucgccuacuuggaa

SEQ ID NO: 1200531 - RNA, 19 nt, Homo sapiens
  misc_RNA (1)...(19): siRNA sense strand
aagaacagauaacaaagcu

SEQ ID NO: 1200532 - RNA, 19 nt, Homo sapiens
  misc_RNA (1)...(19): siRNA sense strand
gaaccaguaucuuuuacca

SEQ ID NO: 1200533 - RNA, 19 nt, Homo sapiens
  misc_RNA (1)...(19): siRNA sense strand
gagagaaagcuguauaccu

SEQ ID NO: 1200534 - RNA, 19 nt, Homo sapiens
  misc_RNA (1)...(19): siRNA sense strand
gcugcgauaugcucuucug

SEQ ID NO: 1200535 - RNA, 19 nt, Homo sapiens
  misc_RNA (1)...(19): siRNA sense strand
aggcuacgauauuuucuua

SEQ ID NO: 1200536 - RNA, 19 nt, Homo sapiens
  misc_RNA (1)...(19): siRNA sense strand
ggauuuccugagaagauaa

SEQ ID NO: 1200537 - RNA, 19 nt, Homo sapiens
  misc_RNA (1)...(19): siRNA sense strand
acaagaagaacagauaaca

SEQ ID NO: 1200538 - RNA, 19 nt, Homo sapiens
  misc_RNA (1)...(19): siRNA sense strand
ccucuugauacaaacaaua

SEQ ID NO: 1200539 - RNA, 19 nt, Homo sapiens
  misc_RNA (1)...(19): siRNA sense strand
gagaagauaacagugaaac

SEQ ID NO: 1200540 - RNA, 19 nt, Homo sapiens
  misc_RNA (1)...(19): siRNA sense strand
ugcgggugcuggagcuaua

SEQ ID NO: 1200541 - RNA, 19 nt, Homo sapiens
  misc_RNA (1)...(19): siRNA sense strand
uaucgccuacuuggaaaua

SEQ ID NO: 1200542 - RNA, 19 nt, Homo sapiens
  misc_RNA (1)...(19): siRNA sense strand
ccucacacacaguuacuug

SEQ ID NO: 1200543 - RNA, 19 nt, Homo sapiens
  misc_RNA (1)...(19): siRNA sense strand
aauugaaucuguacaucca

SEQ ID NO: 1200544 - RNA, 19 nt, Homo sapiens
  misc_RNA (1)...(19): siRNA sense strand
cuuaaacugcgauauuuca

SEQ ID NO: 1200545 - RNA, 19 nt, Homo sapiens
  misc_RNA (1)...(19): siRNA sense strand
gcaauggauguagaaaaua

SEQ ID NO: 1200546 - RNA, 19 nt, Homo sapiens
  misc_RNA (1)...(19): siRNA sense strand
gucagagccauuacccuuu

SEQ ID NO: 1200547 - RNA, 19 nt, Homo sapiens
  misc_RNA (1)...(19): siRNA sense strand
caaccucucuuggcauucc

SEQ ID NO: 1200548 - RNA, 19 nt, Homo sapiens
  misc_RNA (1)...(19): siRNA sense strand
ggaugugcagguugagaau

SEQ ID NO: 1200549 - RNA, 19 nt, Homo sapiens
  misc_RNA (1)...(19): siRNA sense strand
aagaugacacugacgugaa

SEQ ID NO: 1200550 - RNA, 19 nt, Homo sapiens
  misc_RNA (1)...(19): siRNA sense strand
cuacuuggaaauagucuca

SEQ ID NO: 1200551 - RNA, 19 nt, Homo sapiens
  misc_RNA (1)...(19): siRNA sense strand
aaacugcagaagaaauuca

SEQ ID NO: 1200552 - RNA, 19 nt, Homo sapiens
  misc_RNA (1)...(19): siRNA sense strand
augugcagguugagaauau

SEQ ID NO: 1200553 - RNA, 19 nt, Homo sapiens
  misc_RNA (1)...(19): siRNA sense strand
ccaaaggauauggaagcua

SEQ ID NO: 1200554 - RNA, 19 nt, Homo sapiens
  misc_RNA (1)...(19): siRNA sense strand
ucaacacugucgcuaauga

SEQ ID NO: 1200555 - RNA, 19 nt, Homo sapiens
  misc_RNA (1)...(19): siRNA sense strand
cacugucgcuaaugaagua

SEQ ID NO: 1200556 - RNA, 19 nt, Homo sapiens
  misc_RNA (1)...(19): siRNA sense strand
gcugagagaaagcuguaua

SEQ ID NO: 1200557 - RNA, 19 nt, Homo sapiens
  misc_RNA (1)...(19): siRNA sense strand
ugucaacacugucgcuaau

SEQ ID NO: 1200558 - RNA, 19 nt, Homo sapiens
  misc_RNA (1)...(19): siRNA sense strand
cuguauaccugcacaagug

SEQ ID NO: 1200559 - RNA, 19 nt, Homo sapiens
  misc_RNA (1)...(19): siRNA sense strand
gcgcugagagaaagcugua

SEQ ID NO: 1200560 - RNA, 19 nt, Homo sapiens
  misc_RNA (1)...(19): siRNA sense strand
caacacugucgcuaaugaa

SEQ ID NO: 1200561 - RNA, 19 nt, Homo sapiens
  misc_RNA (1)...(19): siRNA sense strand
gcuaaugaaguauacaagu

SEQ ID NO: 1200562 - RNA, 19 nt, Homo sapiens
  misc_RNA (1)...(19): siRNA sense strand
gcaccacgcgcugagagaa

SEQ ID NO: 1200563 - RNA, 19 nt, Homo sapiens
  misc_RNA (1)...(19): siRNA sense strand
gagagaaagcuguauaccu

SEQ ID NO: 1200564 - RNA, 19 nt, Homo sapiens
  misc_RNA (1)...(19): siRNA sense strand
ugcgggugcuggagcuaua

SEQ ID NO: 1200565 - RNA, 19 nt, Homo sapiens
  misc_RNA (1)...(19): siRNA sense strand
ccucacacacaguuacuug

SEQ ID NO: 1200566 - RNA, 19 nt, Homo sapiens
  misc_RNA (1)...(19): siRNA sense strand
ucaacacugucgcuaauga

SEQ ID NO: 1200567 - RNA, 19 nt, Homo sapiens
  misc_RNA (1)...(19): siRNA sense strand
cacugucgcuaaugaagua

SEQ ID NO: 1200568 - RNA, 19 nt, Homo sapiens
  misc_RNA (1)...(19): siRNA sense strand
gcugagagaaagcuguaua

SEQ ID NO: 1200569 - RNA, 19 nt, Homo sapiens
  misc_RNA (1)...(19): siRNA sense strand
ugucaacacugucgcuaau

SEQ ID NO: 1200570 - RNA, 19 nt, Homo sapiens
  misc_RNA (1)...(19): siRNA sense strand
cuguauaccugcacaagug

SEQ ID NO: 1200571 - RNA, 19 nt, Homo sapiens
  misc_RNA (1)...(19): siRNA sense strand
gcgcugagagaaagcugua

SEQ ID NO: 1200572 - RNA, 19 nt, Homo sapiens
  misc_RNA (1)...(19): siRNA sense strand
caacacugucgcuaaugaa

SEQ ID NO: 1200573 - RNA, 19 nt, Homo sapiens
  misc_RNA (1)...(19): siRNA sense strand
gcuaaugaaguauacaagu

SEQ ID NO: 1200574 - RNA, 19 nt, Homo sapiens
  misc_RNA (1)...(19): siRNA sense strand
gcaccacgcgcugagagaa

SEQ ID NO: 1200575 - RNA, 19 nt, Homo sapiens
  misc_RNA (1)...(19): siRNA sense strand
gagagaaagcuguauaccu

SEQ ID NO: 1200576 - RNA, 19 nt, Homo sapiens
  misc_RNA (1)...(19): siRNA sense strand
ugcgggugcuggagcuaua

SEQ ID NO: 1200577 - RNA, 19 nt, Homo sapiens
  misc_RNA (1)...(19): siRNA sense strand
ccucacacacaguuacuug

SEQ ID NO: 1200578 - RNA, 19 nt, Homo sapiens
  misc_RNA (1)...(19): siRNA sense strand
uugcaaagcuucagucaga

SEQ ID NO: 1200579 - RNA, 19 nt, Homo sapiens
  misc_RNA (1)...(19): siRNA sense strand
ucaacacugucgcuaauga

SEQ ID NO: 1200580 - RNA, 19 nt, Homo sapiens
  misc_RNA (1)...(19): siRNA sense strand
caaauucaaggcuacgaua

SEQ ID NO: 1200581 - RNA, 19 nt, Homo sapiens
  misc_RNA (1)...(19): siRNA sense strand
cacugucgcuaaugaagua

SEQ ID NO: 1200582 - RNA, 19 nt, Homo sapiens
  misc_RNA (1)...(19): siRNA sense strand
gcugagagaaagcuguaua

SEQ ID NO: 1200583 - RNA, 19 nt, Homo sapiens
  misc_RNA (1)...(19): siRNA sense strand
auucaaggcuacgauauuu

SEQ ID NO: 1200584 - RNA, 19 nt, Homo sapiens
  misc_RNA (1)...(19): siRNA sense strand
ugucaacacugucgcuaau

SEQ ID NO: 1200585 - RNA, 19 nt, Homo sapiens
  misc_RNA (1)...(19): siRNA sense strand
ucagagccauuacccuuuc

SEQ ID NO: 1200586 - RNA, 19 nt, Homo sapiens
  misc_RNA (1)...(19): siRNA sense strand
cuguauaccugcacaagug

SEQ ID NO: 1200587 - RNA, 19 nt, Homo sapiens
  misc_RNA (1)...(19): siRNA sense strand
gcgcugagagaaagcugua

SEQ ID NO: 1200588 - RNA, 19 nt, Homo sapiens
  misc_RNA (1)...(19): siRNA sense strand
caacacugucgcuaaugaa

SEQ ID NO: 1200589 - RNA, 19 nt, Homo sapiens
  misc_RNA (1)...(19): siRNA sense strand
gcuaaugaaguauacaagu

SEQ ID NO: 1200590 - RNA, 19 nt, Homo sapiens
  misc_RNA (1)...(19): siRNA sense strand
gcaccacgcgcugagagaa

SEQ ID NO: 1200591 - RNA, 19 nt, Homo sapiens
  misc_RNA (1)...(19): siRNA sense strand
gagagaaagcuguauaccu

SEQ ID NO: 1200592 - RNA, 19 nt, Homo sapiens
  misc_RNA (1)...(19): siRNA sense strand
ccucuugauacaaacaaua

SEQ ID NO: 1200593 - RNA, 19 nt, Homo sapiens
  misc_RNA (1)...(19): siRNA sense strand
aggcuacgauauuuucuua

SEQ ID NO: 1200594 - RNA, 19 nt, Homo sapiens
  misc_RNA (1)...(19): siRNA sense strand
ugcgggugcuggagcuaua

SEQ ID NO: 1200595 - RNA, 19 nt, Homo sapiens
  misc_RNA (1)...(19): siRNA sense strand
ccucacacacaguuacuug

SEQ ID NO: 1200596 - RNA, 19 nt, Homo sapiens
  misc_RNA (1)...(19): siRNA sense strand
caaccucucuuggcauucc

SEQ ID NO: 1200597 - RNA, 19 nt, Homo sapiens
  misc_RNA (1)...(19): siRNA sense strand
gucagagccauuacccuuu

SEQ ID NO: 1200598 - RNA, 19 nt, Homo sapiens
  misc_RNA (1)...(19): siRNA sense strand
agaaucagcuccuuugaaa

SEQ ID NO: 1200599 - RNA, 19 nt, Homo sapiens
  misc_RNA (1)...(19): siRNA sense strand
gcaaugagguucuuuccau

SEQ ID NO: 1200600 - RNA, 19 nt, Homo sapiens
  misc_RNA (1)...(19): siRNA sense strand
gcaaaugguucugcugaaa

SEQ ID NO: 1200601 - RNA, 19 nt, Homo sapiens
  misc_RNA (1)...(19): siRNA sense strand
gaagcaacauuaaagcaau

SEQ ID NO: 1200602 - RNA, 19 nt, Homo sapiens
  misc_RNA (1)...(19): siRNA sense strand
ccagcaaacucuauucuau

SEQ ID NO: 1200603 - RNA, 19 nt, Homo sapiens
  misc_RNA (1)...(19): siRNA sense strand
cgccaaagcuugaaagguu

SEQ ID NO: 1200604 - RNA, 19 nt, Homo sapiens
  misc_RNA (1)...(19): siRNA sense strand
caauggcacucccaaaguu

SEQ ID NO: 1200605 - RNA, 19 nt, Homo sapiens
  misc_RNA (1)...(19): siRNA sense strand
ggaggaaggugcuggucuu

SEQ ID NO: 1200606 - RNA, 19 nt, Homo sapiens
  misc_RNA (1)...(19): siRNA sense strand
agacaagccucucaccauu

SEQ ID NO: 1200607 - RNA, 19 nt, Homo sapiens
  misc_RNA (1)...(19): siRNA sense strand
ggaagggacuauucagaag

SEQ ID NO: 1200608 - RNA, 19 nt, Homo sapiens
  misc_RNA (1)...(19): siRNA sense strand
acaagccucucaccauuaa

SEQ ID NO: 1200609 - RNA, 19 nt, Homo sapiens
  misc_RNA (1)...(19): siRNA sense strand
cagcagcacugugaagaaa

SEQ ID NO: 1200610 - RNA, 19 nt, Homo sapiens
  misc_RNA (1)...(19): siRNA sense strand
gagcagaucuagaaaacaa

SEQ ID NO: 1200611 - RNA, 19 nt, Homo sapiens
  misc_RNA (1)...(19): siRNA sense strand
ccagugauguuucuguaga

SEQ ID NO: 1200612 - RNA, 19 nt, Homo sapiens
  misc_RNA (1)...(19): siRNA sense strand
gacaagccucucaccauua

SEQ ID NO: 1200613 - RNA, 19 nt, Homo sapiens
  misc_RNA (1)...(19): siRNA sense strand
gcaauuagacggcauccau

SEQ ID NO: 1200614 - RNA, 19 nt, Homo sapiens
  misc_RNA (1)...(19): siRNA sense strand
ggagcagccucagaacaaa

SEQ ID NO: 1200615 - RNA, 19 nt, Homo sapiens
  misc_RNA (1)...(19): siRNA sense strand
gagaaucagcuccuuugaa

SEQ ID NO: 1200616 - RNA, 19 nt, Homo sapiens
  misc_RNA (1)...(19): siRNA sense strand
gccaaagcuugaaagguuu

SEQ ID NO: 1200617 - RNA, 19 nt, Homo sapiens
  misc_RNA (1)...(19): siRNA sense strand
ugauggaccugucacgauu

SEQ ID NO: 1200618 - RNA, 19 nt, Homo sapiens
  misc_RNA (1)...(19): siRNA sense strand
caacacaggcugaggaauc

SEQ ID NO: 1200619 - RNA, 19 nt, Homo sapiens
  misc_RNA (1)...(19): siRNA sense strand
ucaacugccugacaaagga

SEQ ID NO: 1200620 - RNA, 19 nt, Homo sapiens
  misc_RNA (1)...(19): siRNA sense strand
gcagagaaucagcuccuuu

SEQ ID NO: 1200621 - RNA, 19 nt, Homo sapiens
  misc_RNA (1)...(19): siRNA sense strand
gaagggcaaugagguucuu

SEQ ID NO: 1200622 - RNA, 19 nt, Homo sapiens
  misc_RNA (1)...(19): siRNA sense strand
gacuauagcuuugauacca

SEQ ID NO: 1200623 - RNA, 19 nt, Homo sapiens
  misc_RNA (1)...(19): siRNA sense strand
ggaugaagcaacauuaaag

SEQ ID NO: 1200624 - RNA, 19 nt, Homo sapiens
  misc_RNA (1)...(19): siRNA sense strand
cagccugaaugaagaagaa

SEQ ID NO: 1200625 - RNA, 19 nt, Homo sapiens
  misc_RNA (1)...(19): siRNA sense strand
gaccacaguucccuucagu

SEQ ID NO: 1200626 - RNA, 19 nt, Homo sapiens
  misc_RNA (1)...(19): siRNA sense strand
agacucagcugcaaauggu

SEQ ID NO: 1200627 - RNA, 19 nt, Homo sapiens
  misc_RNA (1)...(19): siRNA sense strand
ccagcagccugagcaagua

SEQ ID NO: 1200628 - RNA, 19 nt, Homo sapiens
  misc_RNA (1)...(19): siRNA sense strand
ugacaaaggagcccagaga

SEQ ID NO: 1200629 - RNA, 19 nt, Homo sapiens
  misc_RNA (1)...(19): siRNA sense strand
caucggcugucaugaaauc

SEQ ID NO: 1200630 - RNA, 19 nt, Homo sapiens
  misc_RNA (1)...(19): siRNA sense strand
cacagaguguuuccaaaug

SEQ ID NO: 1200631 - RNA, 19 nt, Homo sapiens
  misc_RNA (1)...(19): siRNA sense strand
ucccaaaguuuacaaguca

SEQ ID NO: 1200632 - RNA, 19 nt, Homo sapiens
  misc_RNA (1)...(19): siRNA sense strand
gcaccuaggaucacacauc

SEQ ID NO: 1200633 - RNA, 19 nt, Homo sapiens
  misc_RNA (1)...(19): siRNA sense strand
ucacagaguguuuccaaau

SEQ ID NO: 1200634 - RNA, 19 nt, Homo sapiens
  misc_RNA (1)...(19): siRNA sense strand
gaaaagaccagcaaacucu

SEQ ID NO: 1200635 - RNA, 19 nt, Homo sapiens
  misc_RNA (1)...(19): siRNA sense strand
gcagcacugugaagaaagg

SEQ ID NO: 1200636 - RNA, 19 nt, Homo sapiens
  misc_RNA (1)...(19): siRNA sense strand
ggaccugucacgauuguca

SEQ ID NO: 1200637 - RNA, 19 nt, Homo sapiens
  misc_RNA (1)...(19): siRNA sense strand
ccaaugccagccugaauga

SEQ ID NO: 1200638 - RNA, 19 nt, Homo sapiens
  misc_RNA (1)...(19): siRNA sense strand
ccucucaacugccugacaa

SEQ ID NO: 1200639 - RNA, 19 nt, Homo sapiens
  misc_RNA (1)...(19): siRNA sense strand
cagagaaucagcuccuuug

SEQ ID NO: 1200640 - RNA, 19 nt, Homo sapiens
  misc_RNA (1)...(19): siRNA sense strand
ggugaagguucuggaugaa

SEQ ID NO: 1200641 - RNA, 19 nt, Homo sapiens
  misc_RNA (1)...(19): siRNA sense strand
uaaggcugcugucaacaca

SEQ ID NO: 1200642 - RNA, 19 nt, Homo sapiens
  misc_RNA (1)...(19): siRNA sense strand
gcaugaggaaggacgguuu

SEQ ID NO: 1200643 - RNA, 19 nt, Homo sapiens
  misc_RNA (1)...(19): siRNA sense strand
ucacggaagccaaggaaga

SEQ ID NO: 1200644 - RNA, 19 nt, Homo sapiens
  misc_RNA (1)...(19): siRNA sense strand
agcaaacucuauucuauca

SEQ ID NO: 1200645 - RNA, 19 nt, Homo sapiens
  misc_RNA (1)...(19): siRNA sense strand
cagcuccuuugaaaccuuu

SEQ ID NO: 1200646 - RNA, 19 nt, Homo sapiens
  misc_RNA (1)...(19): siRNA sense strand
ugaggaaucgugcuucaga

SEQ ID NO: 1200647 - RNA, 19 nt, Homo sapiens
  misc_RNA (1)...(19): siRNA sense strand
aaaugguucugcugaaaca

SEQ ID NO: 1200648 - RNA, 19 nt, Homo sapiens
  misc_RNA (1)...(19): siRNA sense strand
cgaagacucagcugcaaau

SEQ ID NO: 1200649 - RNA, 19 nt, Homo sapiens
  misc_RNA (1)...(19): siRNA sense strand
acaaggugauuacgguuca

SEQ ID NO: 1200650 - RNA, 19 nt, Homo sapiens
  misc_RNA (1)...(19): siRNA sense strand
gcauccaugucaccaucuu

SEQ ID NO: 1200651 - RNA, 19 nt, Homo sapiens
  misc_RNA (1)...(19): siRNA sense strand
ugaagcaacauuaaagcaa

SEQ ID NO: 1200652 - RNA, 19 nt, Homo sapiens
  misc_RNA (1)...(19): siRNA sense strand
gagcucagaagaauuaaaa

SEQ ID NO: 1200653 - RNA, 19 nt, Homo sapiens
  misc_RNA (1)...(19): siRNA sense strand
gcacggugacacuggagaa

SEQ ID NO: 1200654 - RNA, 19 nt, Homo sapiens
  misc_RNA (1)...(19): siRNA sense strand
aggaggagcagaucuagaa

SEQ ID NO: 1200655 - RNA, 19 nt, Homo sapiens
  misc_RNA (1)...(19): siRNA sense strand
aggugaagguucuggauga

SEQ ID NO: 1200656 - RNA, 19 nt, Homo sapiens
  misc_RNA (1)...(19): siRNA sense strand
acacagggccacccagaug

SEQ ID NO: 1200657 - RNA, 19 nt, Homo sapiens
  misc_RNA (1)...(19): siRNA sense strand
uuugaagccuggaacauca

SEQ ID NO: 1200658 - RNA, 19 nt, Homo sapiens
  misc_RNA (1)...(19): siRNA sense strand
ugauuacgguucacagagu

SEQ ID NO: 1200659 - RNA, 19 nt, Homo sapiens
  misc_RNA (1)...(19): siRNA sense strand
ggaggagcagaucuagaaa

SEQ ID NO: 1200660 - RNA, 19 nt, Homo sapiens
  misc_RNA (1)...(19): siRNA sense strand
gggcaucuccaacaucauc

SEQ ID NO: 1200661 - RNA, 19 nt, Homo sapiens
  misc_RNA (1)...(19): siRNA sense strand
gaagcuacuugacgaaaag

SEQ ID NO: 1200662 - RNA, 19 nt, Homo sapiens
  misc_RNA (1)...(19): siRNA sense strand
acagaguguuuccaaaugg

SEQ ID NO: 1200663 - RNA, 19 nt, Homo sapiens
  misc_RNA (1)...(19): siRNA sense strand
ggcaggaggagcagaucua

SEQ ID NO: 1200664 - RNA, 19 nt, Homo sapiens
  misc_RNA (1)...(19): siRNA sense strand
ggaccacaguucccuucag

SEQ ID NO: 1200665 - RNA, 19 nt, Homo sapiens
  misc_RNA (1)...(19): siRNA sense strand
caacaucaucauccaacga

SEQ ID NO: 1200666 - RNA, 19 nt, Homo sapiens
  misc_RNA (1)...(19): siRNA sense strand
ccaauggcacucccaaagu

SEQ ID NO: 1200667 - RNA, 19 nt, Homo sapiens
  misc_RNA (1)...(19): siRNA sense strand
gaauauacagagggucuca

SEQ ID NO: 1200668 - RNA, 19 nt, Homo sapiens
  misc_RNA (1)...(19): siRNA sense strand
caucaucauccaacgaaga

SEQ ID NO: 1200669 - RNA, 19 nt, Homo sapiens
  misc_RNA (1)...(19): siRNA sense strand
aaaggagcccagagacuga

SEQ ID NO: 1200670 - RNA, 19 nt, Homo sapiens
  misc_RNA (1)...(19): siRNA sense strand
gagcugagagaauauacag

SEQ ID NO: 1200671 - RNA, 19 nt, Homo sapiens
  misc_RNA (1)...(19): siRNA sense strand
ucagaagggcaaugagguu

SEQ ID NO: 1200672 - RNA, 19 nt, Homo sapiens
  misc_RNA (1)...(19): siRNA sense strand
guucacagaguguuuccaa

SEQ ID NO: 1200673 - RNA, 19 nt, Homo sapiens
  misc_RNA (1)...(19): siRNA sense strand
ccacaguucccuucagucu

SEQ ID NO: 1200674 - RNA, 19 nt, Homo sapiens
  misc_RNA (1)...(19): siRNA sense strand
ggcggcagcccaaucagaa

SEQ ID NO: 1200675 - RNA, 19 nt, Homo sapiens
  misc_RNA (1)...(19): siRNA sense strand
caggaagggacuauucaga

SEQ ID NO: 1200676 - RNA, 19 nt, Homo sapiens
  misc_RNA (1)...(19): siRNA sense strand
ucgaggaggugaagguucu

SEQ ID NO: 1200677 - RNA, 19 nt, Homo sapiens
  misc_RNA (1)...(19): siRNA sense strand
cuugaaagguuugaggaau

SEQ ID NO: 1200678 - RNA, 19 nt, Homo sapiens
  misc_RNA (1)...(19): siRNA sense strand
cagcaaacucuauucuauc

SEQ ID NO: 1200679 - RNA, 19 nt, Homo sapiens
  misc_RNA (1)...(19): siRNA sense strand
uaucagcagccaaguguca

SEQ ID NO: 1200680 - RNA, 19 nt, Homo sapiens
  misc_RNA (1)...(19): siRNA sense strand
agccagugauguuucugua

SEQ ID NO: 1200681 - RNA, 19 nt, Homo sapiens
  misc_RNA (1)...(19): siRNA sense strand
caggcaagcugugauuguc

SEQ ID NO: 1200682 - RNA, 19 nt, Homo sapiens
  misc_RNA (1)...(19): siRNA sense strand
aggaagggacuauucagaa

SEQ ID NO: 1200683 - RNA, 19 nt, Homo sapiens
  misc_RNA (1)...(19): siRNA sense strand
uggaugaagcaacauuaaa

SEQ ID NO: 1200684 - RNA, 19 nt, Homo sapiens
  misc_RNA (1)...(19): siRNA sense strand
uugaaagguuugaggaauc

SEQ ID NO: 1200685 - RNA, 19 nt, Homo sapiens
  misc_RNA (1)...(19): siRNA sense strand
gaaggggcaucuccaacau

SEQ ID NO: 1200686 - RNA, 19 nt, Homo sapiens
  misc_RNA (1)...(19): siRNA sense strand
gggagcaccuaggaucaca

SEQ ID NO: 1200687 - RNA, 19 nt, Homo sapiens
  misc_RNA (1)...(19): siRNA sense strand
gcacucccaaaguuuacaa

SEQ ID NO: 1200688 - RNA, 19 nt, Homo sapiens
  misc_RNA (1)...(19): siRNA sense strand
gguucuggaugaagcaaca

SEQ ID NO: 1200689 - RNA, 19 nt, Homo sapiens
  misc_RNA (1)...(19): siRNA sense strand
caagugucaucggcuguca

SEQ ID NO: 1200690 - RNA, 19 nt, Homo sapiens
  misc_RNA (1)...(19): siRNA sense strand
gggcugcacccacucuugu

SEQ ID NO: 1200691 - RNA, 19 nt, Homo sapiens
  misc_RNA (1)...(19): siRNA sense strand
caucaugagugagaaccau

SEQ ID NO: 1200692 - RNA, 19 nt, Homo sapiens
  misc_RNA (1)...(19): siRNA sense strand
cgaagcuacuugacgaaaa

SEQ ID NO: 1200693 - RNA, 19 nt, Homo sapiens
  misc_RNA (1)...(19): siRNA sense strand
ugaaagguuugaggaaucg

SEQ ID NO: 1200694 - RNA, 19 nt, Homo sapiens
  misc_RNA (1)...(19): siRNA sense strand
gugagacgaagcuacuuga

SEQ ID NO: 1200695 - RNA, 19 nt, Homo sapiens
  misc_RNA (1)...(19): siRNA sense strand
cggugacacuggagaagau

SEQ ID NO: 1200696 - RNA, 19 nt, Homo sapiens
  misc_RNA (1)...(19): siRNA sense strand
caacggcaagucucucaag

SEQ ID NO: 1200697 - RNA, 19 nt, Homo sapiens
  misc_RNA (1)...(19): siRNA sense strand
gauuucugacugcaucaaa

SEQ ID NO: 1200698 - RNA, 19 nt, Homo sapiens
  misc_RNA (1)...(19): siRNA sense strand
agaaucagcuccuuugaaa

SEQ ID NO: 1200699 - RNA, 19 nt, Homo sapiens
  misc_RNA (1)...(19): siRNA sense strand
gcaaugagguucuuuccau

SEQ ID NO: 1200700 - RNA, 19 nt, Homo sapiens
  misc_RNA (1)...(19): siRNA sense strand
gcaaaugguucugcugaaa

SEQ ID NO: 1200701 - RNA, 19 nt, Homo sapiens
  misc_RNA (1)...(19): siRNA sense strand
gaagcaacauuaaagcaau

SEQ ID NO: 1200702 - RNA, 19 nt, Homo sapiens
  misc_RNA (1)...(19): siRNA sense strand
ccagcaaacucuauucuau

SEQ ID NO: 1200703 - RNA, 19 nt, Homo sapiens
  misc_RNA (1)...(19): siRNA sense strand
cgccaaagcuugaaagguu

SEQ ID NO: 1200704 - RNA, 19 nt, Homo sapiens
  misc_RNA (1)...(19): siRNA sense strand
caauggcacucccaaaguu

SEQ ID NO: 1200705 - RNA, 19 nt, Homo sapiens
  misc_RNA (1)...(19): siRNA sense strand
ggaggaaggugcuggucuu

SEQ ID NO: 1200706 - RNA, 19 nt, Homo sapiens
  misc_RNA (1)...(19): siRNA sense strand
agacaagccucucaccauu

SEQ ID NO: 1200707 - RNA, 19 nt, Homo sapiens
  misc_RNA (1)...(19): siRNA sense strand
ggaagggacuauucagaag

SEQ ID NO: 1200708 - RNA, 19 nt, Homo sapiens
  misc_RNA (1)...(19): siRNA sense strand
acaagccucucaccauuaa

SEQ ID NO: 1200709 - RNA, 19 nt, Homo sapiens
  misc_RNA (1)...(19): siRNA sense strand
cagcagcacugugaagaaa

SEQ ID NO: 1200710 - RNA, 19 nt, Homo sapiens
  misc_RNA (1)...(19): siRNA sense strand
gagcagaucuagaaaacaa

SEQ ID NO: 1200711 - RNA, 19 nt, Homo sapiens
  misc_RNA (1)...(19): siRNA sense strand
ccagugauguuucuguaga

SEQ ID NO: 1200712 - RNA, 19 nt, Homo sapiens
  misc_RNA (1)...(19): siRNA sense strand
gacaagccucucaccauua

SEQ ID NO: 1200713 - RNA, 19 nt, Homo sapiens
  misc_RNA (1)...(19): siRNA sense strand
gcaauuagacggcauccau

SEQ ID NO: 1200714 - RNA, 19 nt, Homo sapiens
  misc_RNA (1)...(19): siRNA sense strand
gagaaucagcuccuuugaa

SEQ ID NO: 1200715 - RNA, 19 nt, Homo sapiens
  misc_RNA (1)...(19): siRNA sense strand
gccaaagcuugaaagguuu

SEQ ID NO: 1200716 - RNA, 19 nt, Homo sapiens
  misc_RNA (1)...(19): siRNA sense strand
caacacaggcugaggaauc

SEQ ID NO: 1200717 - RNA, 19 nt, Homo sapiens
  misc_RNA (1)...(19): siRNA sense strand
ucaacugccugacaaagga

SEQ ID NO: 1200718 - RNA, 19 nt, Homo sapiens
  misc_RNA (1)...(19): siRNA sense strand
gcagagaaucagcuccuuu

SEQ ID NO: 1200719 - RNA, 19 nt, Homo sapiens
  misc_RNA (1)...(19): siRNA sense strand
gaagggcaaugagguucuu

SEQ ID NO: 1200720 - RNA, 19 nt, Homo sapiens
  misc_RNA (1)...(19): siRNA sense strand
gacuauagcuuugauacca

SEQ ID NO: 1200721 - RNA, 19 nt, Homo sapiens
  misc_RNA (1)...(19): siRNA sense strand
ggaugaagcaacauuaaag

SEQ ID NO: 1200722 - RNA, 19 nt, Homo sapiens
  misc_RNA (1)...(19): siRNA sense strand
cagccugaaugaagaagaa

SEQ ID NO: 1200723 - RNA, 19 nt, Homo sapiens
  misc_RNA (1)...(19): siRNA sense strand
gaccacaguucccuucagu

SEQ ID NO: 1200724 - RNA, 19 nt, Homo sapiens
  misc_RNA (1)...(19): siRNA sense strand
agacucagcugcaaauggu

SEQ ID NO: 1200725 - RNA, 19 nt, Homo sapiens
  misc_RNA (1)...(19): siRNA sense strand
ccagcagccugagcaagua

SEQ ID NO: 1200726 - RNA, 19 nt, Homo sapiens
  misc_RNA (1)...(19): siRNA sense strand
ugacaaaggagcccagaga

SEQ ID NO: 1200727 - RNA, 19 nt, Homo sapiens
  misc_RNA (1)...(19): siRNA sense strand
caucggcugucaugaaauc

SEQ ID NO: 1200728 - RNA, 19 nt, Homo sapiens
  misc_RNA (1)...(19): siRNA sense strand
cacagaguguuuccaaaug

SEQ ID NO: 1200729 - RNA, 19 nt, Homo sapiens
  misc_RNA (1)...(19): siRNA sense strand
ucccaaaguuuacaaguca

SEQ ID NO: 1200730 - RNA, 19 nt, Homo sapiens
  misc_RNA (1)...(19): siRNA sense strand
gcaccuaggaucacacauc

SEQ ID NO: 1200731 - RNA, 19 nt, Homo sapiens
  misc_RNA (1)...(19): siRNA sense strand
ucacagaguguuuccaaau

SEQ ID NO: 1200732 - RNA, 19 nt, Homo sapiens
  misc_RNA (1)...(19): siRNA sense strand
gaaaagaccagcaaacucu

SEQ ID NO: 1200733 - RNA, 19 nt, Homo sapiens
  misc_RNA (1)...(19): siRNA sense strand
gagccaggguggagaagag

SEQ ID NO: 1200734 - RNA, 19 nt, Homo sapiens
  misc_RNA (1)...(19): siRNA sense strand
ccaaugccagccugaauga

SEQ ID NO: 1200735 - RNA, 19 nt, Homo sapiens
  misc_RNA (1)...(19): siRNA sense strand
ccucucaacugccugacaa

SEQ ID NO: 1200736 - RNA, 19 nt, Homo sapiens
  misc_RNA (1)...(19): siRNA sense strand
aaacacccacugcuuaaga

SEQ ID NO: 1200737 - RNA, 19 nt, Homo sapiens
  misc_RNA (1)...(19): siRNA sense strand
gcagcacugugaagaaagg

SEQ ID NO: 1200738 - RNA, 19 nt, Homo sapiens
  misc_RNA (1)...(19): siRNA sense strand
cggauggacuauagcuuug

SEQ ID NO: 1200739 - RNA, 19 nt, Homo sapiens
  misc_RNA (1)...(19): siRNA sense strand
ggugaagguucuggaugaa

SEQ ID NO: 1200740 - RNA, 19 nt, Homo sapiens
  misc_RNA (1)...(19): siRNA sense strand
uaaggcugcugucaacaca

SEQ ID NO: 1200741 - RNA, 19 nt, Homo sapiens
  misc_RNA (1)...(19): siRNA sense strand
cagagaaucagcuccuuug

SEQ ID NO: 1200742 - RNA, 19 nt, Homo sapiens
  misc_RNA (1)...(19): siRNA sense strand
gauggacuauagcuuugau

SEQ ID NO: 1200743 - RNA, 19 nt, Homo sapiens
  misc_RNA (1)...(19): siRNA sense strand
ucacggaagccaaggaaga

SEQ ID NO: 1200744 - RNA, 19 nt, Homo sapiens
  misc_RNA (1)...(19): siRNA sense strand
agcaaacucuauucuauca

SEQ ID NO: 1200745 - RNA, 19 nt, Homo sapiens
  misc_RNA (1)...(19): siRNA sense strand
gcaugaggaaggacgguuu

SEQ ID NO: 1200746 - RNA, 19 nt, Homo sapiens
  misc_RNA (1)...(19): siRNA sense strand
cagcuccuuugaaaccuuu

SEQ ID NO: 1200747 - RNA, 19 nt, Homo sapiens
  misc_RNA (1)...(19): siRNA sense strand
ugaggaaucgugcuucaga

SEQ ID NO: 1200748 - RNA, 19 nt, Homo sapiens
  misc_RNA (1)...(19): siRNA sense strand
gaagacacagcagggagaa

SEQ ID NO: 1200749 - RNA, 19 nt, Homo sapiens
  misc_RNA (1)...(19): siRNA sense strand
aaaugguucugcugaaaca

SEQ ID NO: 1200750 - RNA, 19 nt, Homo sapiens
  misc_RNA (1)...(19): siRNA sense strand
cgaagacucagcugcaaau

SEQ ID NO: 1200751 - RNA, 19 nt, Homo sapiens
  misc_RNA (1)...(19): siRNA sense strand
acaaggugauuacgguuca

SEQ ID NO: 1200752 - RNA, 19 nt, Homo sapiens
  misc_RNA (1)...(19): siRNA sense strand
gcauccaugucaccaucuu

SEQ ID NO: 1200753 - RNA, 19 nt, Homo sapiens
  misc_RNA (1)...(19): siRNA sense strand
ugaagcaacauuaaagcaa

SEQ ID NO: 1200754 - RNA, 19 nt, Homo sapiens
  misc_RNA (1)...(19): siRNA sense strand
gagcucagaagaauuaaaa

SEQ ID NO: 1200755 - RNA, 19 nt, Homo sapiens
  misc_RNA (1)...(19): siRNA sense strand
gcacggugacacuggagaa

SEQ ID NO: 1200756 - RNA, 19 nt, Homo sapiens
  misc_RNA (1)...(19): siRNA sense strand
aggaggagcagaucuagaa

SEQ ID NO: 1200757 - RNA, 19 nt, Homo sapiens
  misc_RNA (1)...(19): siRNA sense strand
aggugaagguucuggauga

SEQ ID NO: 1200758 - RNA, 19 nt, Homo sapiens
  misc_RNA (1)...(19): siRNA sense strand
acacagggccacccagaug

SEQ ID NO: 1200759 - RNA, 19 nt, Homo sapiens
  misc_RNA (1)...(19): siRNA sense strand
ugauuacgguucacagagu

SEQ ID NO: 1200760 - RNA, 19 nt, Homo sapiens
  misc_RNA (1)...(19): siRNA sense strand
ggaggagcagaucuagaaa

SEQ ID NO: 1200761 - RNA, 19 nt, Homo sapiens
  misc_RNA (1)...(19): siRNA sense strand
gggcaucuccaacaucauc

SEQ ID NO: 1200762 - RNA, 19 nt, Homo sapiens
  misc_RNA (1)...(19): siRNA sense strand
gaagcuacuugacgaaaag

SEQ ID NO: 1200763 - RNA, 19 nt, Homo sapiens
  misc_RNA (1)...(19): siRNA sense strand
acagaguguuuccaaaugg

SEQ ID NO: 1200764 - RNA, 19 nt, Homo sapiens
  misc_RNA (1)...(19): siRNA sense strand
ggcaggaggagcagaucua

SEQ ID NO: 1200765 - RNA, 19 nt, Homo sapiens
  misc_RNA (1)...(19): siRNA sense strand
ggaccacaguucccuucag

SEQ ID NO: 1200766 - RNA, 19 nt, Homo sapiens
  misc_RNA (1)...(19): siRNA sense strand
ucggauggacuauagcuuu

SEQ ID NO: 1200767 - RNA, 19 nt, Homo sapiens
  misc_RNA (1)...(19): siRNA sense strand
caacaucaucauccaacga

SEQ ID NO: 1200768 - RNA, 19 nt, Homo sapiens
  misc_RNA (1)...(19): siRNA sense strand
ccaauggcacucccaaagu

SEQ ID NO: 1200769 - RNA, 19 nt, Homo sapiens
  misc_RNA (1)...(19): siRNA sense strand
gaauauacagagggucuca

SEQ ID NO: 1200770 - RNA, 19 nt, Homo sapiens
  misc_RNA (1)...(19): siRNA sense strand
caucaucauccaacgaaga

SEQ ID NO: 1200771 - RNA, 19 nt, Homo sapiens
  misc_RNA (1)...(19): siRNA sense strand
aaaggagcccagagacuga

SEQ ID NO: 1200772 - RNA, 19 nt, Homo sapiens
  misc_RNA (1)...(19): siRNA sense strand
uaaaacacccacugcuuaa

SEQ ID NO: 1200773 - RNA, 19 nt, Homo sapiens
  misc_RNA (1)...(19): siRNA sense strand
gagcugagagaauauacag

SEQ ID NO: 1200774 - RNA, 19 nt, Homo sapiens
  misc_RNA (1)...(19): siRNA sense strand
ucagaagggcaaugagguu

SEQ ID NO: 1200775 - RNA, 19 nt, Homo sapiens
  misc_RNA (1)...(19): siRNA sense strand
guucacagaguguuuccaa

SEQ ID NO: 1200776 - RNA, 19 nt, Homo sapiens
  misc_RNA (1)...(19): siRNA sense strand
ccacaguucccuucagucu

SEQ ID NO: 1200777 - RNA, 19 nt, Homo sapiens
  misc_RNA (1)...(19): siRNA sense strand
cuugaaagguuugaggaau

SEQ ID NO: 1200778 - RNA, 19 nt, Homo sapiens
  misc_RNA (1)...(19): siRNA sense strand
caggaagggacuauucaga

SEQ ID NO: 1200779 - RNA, 19 nt, Homo sapiens
  misc_RNA (1)...(19): siRNA sense strand
ucgaggaggugaagguucu

SEQ ID NO: 1200780 - RNA, 19 nt, Homo sapiens
  misc_RNA (1)...(19): siRNA sense strand
ccaaacauccccgauaaaa

SEQ ID NO: 1200781 - RNA, 19 nt, Homo sapiens
  misc_RNA (1)...(19): siRNA sense strand
cagcaaacucuauucuauc

SEQ ID NO: 1200782 - RNA, 19 nt, Homo sapiens
  misc_RNA (1)...(19): siRNA sense strand
ggcggcagcccaaucagaa

SEQ ID NO: 1200783 - RNA, 19 nt, Homo sapiens
  misc_RNA (1)...(19): siRNA sense strand
agaagagccagcccaguga

SEQ ID NO: 1200784 - RNA, 19 nt, Homo sapiens
  misc_RNA (1)...(19): siRNA sense strand
uugaaagguuugaggaauc

SEQ ID NO: 1200785 - RNA, 19 nt, Homo sapiens
  misc_RNA (1)...(19): siRNA sense strand
agccagugauguuucugua

SEQ ID NO: 1200786 - RNA, 19 nt, Homo sapiens
  misc_RNA (1)...(19): siRNA sense strand
caggcaagcugugauuguc

SEQ ID NO: 1200787 - RNA, 19 nt, Homo sapiens
  misc_RNA (1)...(19): siRNA sense strand
aggaagggacuauucagaa

SEQ ID NO: 1200788 - RNA, 19 nt, Homo sapiens
  misc_RNA (1)...(19): siRNA sense strand
uggaugaagcaacauuaaa

SEQ ID NO: 1200789 - RNA, 19 nt, Homo sapiens
  misc_RNA (1)...(19): siRNA sense strand
gaaggggcaucuccaacau

SEQ ID NO: 1200790 - RNA, 19 nt, Homo sapiens
  misc_RNA (1)...(19): siRNA sense strand
uaucagcagccaaguguca

SEQ ID NO: 1200791 - RNA, 19 nt, Homo sapiens
  misc_RNA (1)...(19): siRNA sense strand
caucaugagugagaaccau

SEQ ID NO: 1200792 - RNA, 19 nt, Homo sapiens
  misc_RNA (1)...(19): siRNA sense strand
gauaaaacacccacugcuu

SEQ ID NO: 1200793 - RNA, 19 nt, Homo sapiens
  misc_RNA (1)...(19): siRNA sense strand
gguucuggaugaagcaaca

SEQ ID NO: 1200794 - RNA, 19 nt, Homo sapiens
  misc_RNA (1)...(19): siRNA sense strand
auaaaacacccacugcuua

SEQ ID NO: 1200795 - RNA, 19 nt, Homo sapiens
  misc_RNA (1)...(19): siRNA sense strand
caagugucaucggcuguca

SEQ ID NO: 1200796 - RNA, 19 nt, Homo sapiens
  misc_RNA (1)...(19): siRNA sense strand
gggcugcacccacucuugu

SEQ ID NO: 1200797 - RNA, 19 nt, Homo sapiens
  misc_RNA (1)...(19): siRNA sense strand
gggagcaccuaggaucaca

SEQ ID NO: 1200798 - RNA, 19 nt, Homo sapiens
  misc_RNA (1)...(19): siRNA sense strand
ccaagcagcugguggauga

SEQ ID NO: 1200799 - RNA, 19 nt, Homo sapiens
  misc_RNA (1)...(19): siRNA sense strand
gagaagaucuggaacucau

SEQ ID NO: 1200800 - RNA, 19 nt, Homo sapiens
  misc_RNA (1)...(19): siRNA sense strand
ccaagaagcugcgguucaa

SEQ ID NO: 1200801 - RNA, 19 nt, Homo sapiens
  misc_RNA (1)...(19): siRNA sense strand
gaagaaacccgagcuugug

SEQ ID NO: 1200802 - RNA, 19 nt, Homo sapiens
  misc_RNA (1)...(19): siRNA sense strand
ggaagccacugugcaugaa

SEQ ID NO: 1200803 - RNA, 19 nt, Homo sapiens
  misc_RNA (1)...(19): siRNA sense strand
gcaugaaccaguacuauca

SEQ ID NO: 1200804 - RNA, 19 nt, Homo sapiens
  misc_RNA (1)...(19): siRNA sense strand
acaacacccucaucaaaga

SEQ ID NO: 1200805 - RNA, 19 nt, Homo sapiens
  misc_RNA (1)...(19): siRNA sense strand
gcuacggugucugcuauaa

SEQ ID NO: 1200806 - RNA, 19 nt, Homo sapiens
  misc_RNA (1)...(19): siRNA sense strand
ggacacagucagcaacuuc

SEQ ID NO: 1200807 - RNA, 19 nt, Homo sapiens
  misc_RNA (1)...(19): siRNA sense strand
gaaccaguacuaucagauc

SEQ ID NO: 1200808 - RNA, 19 nt, Homo sapiens
  misc_RNA (1)...(19): siRNA sense strand
auacaacacccucaucaaa

SEQ ID NO: 1200809 - RNA, 19 nt, Homo sapiens
  misc_RNA (1)...(19): siRNA sense strand
gggaagccacugugcauga

SEQ ID NO: 1200810 - RNA, 19 nt, Homo sapiens
  misc_RNA (1)...(19): siRNA sense strand
gucagcaacuucagcaaga

SEQ ID NO: 1200811 - RNA, 19 nt, Homo sapiens
  misc_RNA (1)...(19): siRNA sense strand
ccaguacuaucagaucuug

SEQ ID NO: 1200812 - RNA, 19 nt, Homo sapiens
  misc_RNA (1)...(19): siRNA sense strand
gcauacaacacccucauca

SEQ ID NO: 1200813 - RNA, 19 nt, Homo sapiens
  misc_RNA (1)...(19): siRNA sense strand
gcaugugccaccuaugaaa

SEQ ID NO: 1200814 - RNA, 19 nt, Homo sapiens
  misc_RNA (1)...(19): siRNA sense strand
aagcagaaccucagcauca

SEQ ID NO: 1200815 - RNA, 19 nt, Homo sapiens
  misc_RNA (1)...(19): siRNA sense strand
aagcugcgguucaacauca

SEQ ID NO: 1200816 - RNA, 19 nt, Homo sapiens
  misc_RNA (1)...(19): siRNA sense strand
agaaggcgcuccuggacau

SEQ ID NO: 1200817 - RNA, 19 nt, Homo sapiens
  misc_RNA (1)...(19): siRNA sense strand
ggauuucaaggucaugauu

SEQ ID NO: 1200818 - RNA, 19 nt, Homo sapiens
  misc_RNA (1)...(19): siRNA sense strand
cggcuacggugucugcuau

SEQ ID NO: 1200819 - RNA, 19 nt, Homo sapiens
  misc_RNA (1)...(19): siRNA sense strand
gagaagcuaagcccagaug

SEQ ID NO: 1200820 - RNA, 19 nt, Homo sapiens
  misc_RNA (1)...(19): siRNA sense strand
gaggguguguuggauuuca

SEQ ID NO: 1200821 - RNA, 19 nt, Homo sapiens
  misc_RNA (1)...(19): siRNA sense strand
uugaggguguguuggauuu

SEQ ID NO: 1200822 - RNA, 19 nt, Homo sapiens
  misc_RNA (1)...(19): siRNA sense strand
cuuugcagcuggccuacua

SEQ ID NO: 1200823 - RNA, 19 nt, Homo sapiens
  misc_RNA (1)...(19): siRNA sense strand
ucaccgugguacacaacua

SEQ ID NO: 1200824 - RNA, 19 nt, Homo sapiens
  misc_RNA (1)...(19): siRNA sense strand
gcagcugguggaugaguuu

SEQ ID NO: 1200825 - RNA, 19 nt, Homo sapiens
  misc_RNA (1)...(19): siRNA sense strand
cagaaccucagcaucauga

SEQ ID NO: 1200826 - RNA, 19 nt, Homo sapiens
  misc_RNA (1)...(19): siRNA sense strand
ucacggagcaccagaaggu

SEQ ID NO: 1200827 - RNA, 19 nt, Homo sapiens
  misc_RNA (1)...(19): siRNA sense strand
ccaggaagacggagaacug

SEQ ID NO: 1200828 - RNA, 19 nt, Homo sapiens
  misc_RNA (1)...(19): siRNA sense strand
gaaccucagcaucaugauc

SEQ ID NO: 1200829 - RNA, 19 nt, Homo sapiens
  misc_RNA (1)...(19): siRNA sense strand
gcagggucagcuccgauuu

SEQ ID NO: 1200830 - RNA, 19 nt, Homo sapiens
  misc_RNA (1)...(19): siRNA sense strand
cagacugugucauguucuu

SEQ ID NO: 1200831 - RNA, 19 nt, Homo sapiens
  misc_RNA (1)...(19): siRNA sense strand
caagagcgacaucgagaag

SEQ ID NO: 1200832 - RNA, 19 nt, Homo sapiens
  misc_RNA (1)...(19): siRNA sense strand
gcagaaccucagcaucaug

SEQ ID NO: 1200833 - RNA, 19 nt, Homo sapiens
  misc_RNA (1)...(19): siRNA sense strand
gccagccuguggucaucua

SEQ ID NO: 1200834 - RNA, 19 nt, Homo sapiens
  misc_RNA (1)...(19): siRNA sense strand
gauuucaaggucaugauug

SEQ ID NO: 1200835 - RNA, 19 nt, Homo sapiens
  misc_RNA (1)...(19): siRNA sense strand
ucgagaaggccaagcagaa

SEQ ID NO: 1200836 - RNA, 19 nt, Homo sapiens
  misc_RNA (1)...(19): siRNA sense strand
ggagaagaucuggaacuca

SEQ ID NO: 1200837 - RNA, 19 nt, Homo sapiens
  misc_RNA (1)...(19): siRNA sense strand
uggacucacucaccuuugu

SEQ ID NO: 1200838 - RNA, 19 nt, Homo sapiens
  misc_RNA (1)...(19): siRNA sense strand
cauggacucacucaccuuu

SEQ ID NO: 1200839 - RNA, 19 nt, Homo sapiens
  misc_RNA (1)...(19): siRNA sense strand
acucaucccuacagaccaa

SEQ ID NO: 1200840 - RNA, 19 nt, Homo sapiens
  misc_RNA (1)...(19): siRNA sense strand
gcacaucaccgugguacac

SEQ ID NO: 1200841 - RNA, 19 nt, Homo sapiens
  misc_RNA (1)...(19): siRNA sense strand
ccauggaggcccacaucaa

SEQ ID NO: 1200842 - RNA, 19 nt, Homo sapiens
  misc_RNA (1)...(19): siRNA sense strand
gaagcugcgguucaacauc

SEQ ID NO: 1200843 - RNA, 19 nt, Homo sapiens
  misc_RNA (1)...(19): siRNA sense strand
gagaacuggcugucugagu

SEQ ID NO: 1200844 - RNA, 19 nt, Homo sapiens
  misc_RNA (1)...(19): siRNA sense strand
gugcaugaaccaguacuau

SEQ ID NO: 1200845 - RNA, 19 nt, Homo sapiens
  misc_RNA (1)...(19): siRNA sense strand
cauacaacacccucaucaa

SEQ ID NO: 1200846 - RNA, 19 nt, Homo sapiens
  misc_RNA (1)...(19): siRNA sense strand
uggagaagaucuggaacuc

SEQ ID NO: 1200847 - RNA, 19 nt, Homo sapiens
  misc_RNA (1)...(19): siRNA sense strand
gaucuacggacaggcaugu

SEQ ID NO: 1200848 - RNA, 19 nt, Homo sapiens
  misc_RNA (1)...(19): siRNA sense strand
ucaagagcgacaucgagaa

SEQ ID NO: 1200849 - RNA, 19 nt, Homo sapiens
  misc_RNA (1)...(19): siRNA sense strand
uacaacacccucaucaaag

SEQ ID NO: 1200850 - RNA, 19 nt, Homo sapiens
  misc_RNA (1)...(19): siRNA sense strand
aagcccuucuccuugauga

SEQ ID NO: 1200851 - RNA, 19 nt, Homo sapiens
  misc_RNA (1)...(19): siRNA sense strand
ccaagcagcugguggauga

SEQ ID NO: 1200852 - RNA, 19 nt, Homo sapiens
  misc_RNA (1)...(19): siRNA sense strand
gagaagaucuggaacucau

SEQ ID NO: 1200853 - RNA, 19 nt, Homo sapiens
  misc_RNA (1)...(19): siRNA sense strand
ccaagaagcugcgguucaa

SEQ ID NO: 1200854 - RNA, 19 nt, Homo sapiens
  misc_RNA (1)...(19): siRNA sense strand
gaagaaacccgagcuugug

SEQ ID NO: 1200855 - RNA, 19 nt, Homo sapiens
  misc_RNA (1)...(19): siRNA sense strand
ggaagccacugugcaugaa

SEQ ID NO: 1200856 - RNA, 19 nt, Homo sapiens
  misc_RNA (1)...(19): siRNA sense strand
gcaugaaccaguacuauca

SEQ ID NO: 1200857 - RNA, 19 nt, Homo sapiens
  misc_RNA (1)...(19): siRNA sense strand
acaacacccucaucaaaga

SEQ ID NO: 1200858 - RNA, 19 nt, Homo sapiens
  misc_RNA (1)...(19): siRNA sense strand
gcuacggugucugcuauaa

SEQ ID NO: 1200859 - RNA, 19 nt, Homo sapiens
  misc_RNA (1)...(19): siRNA sense strand
ggacacagucagcaacuuc

SEQ ID NO: 1200860 - RNA, 19 nt, Homo sapiens
  misc_RNA (1)...(19): siRNA sense strand
gaaccaguacuaucagauc

SEQ ID NO: 1200861 - RNA, 19 nt, Homo sapiens
  misc_RNA (1)...(19): siRNA sense strand
auacaacacccucaucaaa

SEQ ID NO: 1200862 - RNA, 19 nt, Homo sapiens
  misc_RNA (1)...(19): siRNA sense strand
gggaagccacugugcauga

SEQ ID NO: 1200863 - RNA, 19 nt, Homo sapiens
  misc_RNA (1)...(19): siRNA sense strand
gucagcaacuucagcaaga

SEQ ID NO: 1200864 - RNA, 19 nt, Homo sapiens
  misc_RNA (1)...(19): siRNA sense strand
ccaguacuaucagaucuug

SEQ ID NO: 1200865 - RNA, 19 nt, Homo sapiens
  misc_RNA (1)...(19): siRNA sense strand
gcauacaacacccucauca

SEQ ID NO: 1200866 - RNA, 19 nt, Homo sapiens
  misc_RNA (1)...(19): siRNA sense strand
gcaugugccaccuaugaaa

SEQ ID NO: 1200867 - RNA, 19 nt, Homo sapiens
  misc_RNA (1)...(19): siRNA sense strand
aagcagaaccucagcauca

SEQ ID NO: 1200868 - RNA, 19 nt, Homo sapiens
  misc_RNA (1)...(19): siRNA sense strand
aagcugcgguucaacauca

SEQ ID NO: 1200869 - RNA, 19 nt, Homo sapiens
  misc_RNA (1)...(19): siRNA sense strand
agaaggcgcuccuggacau

SEQ ID NO: 1200870 - RNA, 19 nt, Homo sapiens
  misc_RNA (1)...(19): siRNA sense strand
ggauuucaaggucaugauu

SEQ ID NO: 1200871 - RNA, 19 nt, Homo sapiens
  misc_RNA (1)...(19): siRNA sense strand
cggcuacggugucugcuau

SEQ ID NO: 1200872 - RNA, 19 nt, Homo sapiens
  misc_RNA (1)...(19): siRNA sense strand
gagaagcuaagcccagaug

SEQ ID NO: 1200873 - RNA, 19 nt, Homo sapiens
  misc_RNA (1)...(19): siRNA sense strand
gaggguguguuggauuuca

SEQ ID NO: 1200874 - RNA, 19 nt, Homo sapiens
  misc_RNA (1)...(19): siRNA sense strand
uugaggguguguuggauuu

SEQ ID NO: 1200875 - RNA, 19 nt, Homo sapiens
  misc_RNA (1)...(19): siRNA sense strand
cuuugcagcuggccuacua

SEQ ID NO: 1200876 - RNA, 19 nt, Homo sapiens
  misc_RNA (1)...(19): siRNA sense strand
gcagcugguggaugaguuu

SEQ ID NO: 1200877 - RNA, 19 nt, Homo sapiens
  misc_RNA (1)...(19): siRNA sense strand
ucaccgugguacacaacua

SEQ ID NO: 1200878 - RNA, 19 nt, Homo sapiens
  misc_RNA (1)...(19): siRNA sense strand
cagaaccucagcaucauga

SEQ ID NO: 1200879 - RNA, 19 nt, Homo sapiens
  misc_RNA (1)...(19): siRNA sense strand
ccaggaagacggagaacug

SEQ ID NO: 1200880 - RNA, 19 nt, Homo sapiens
  misc_RNA (1)...(19): siRNA sense strand
ucacggagcaccagaaggu

SEQ ID NO: 1200881 - RNA, 19 nt, Homo sapiens
  misc_RNA (1)...(19): siRNA sense strand
gaaccucagcaucaugauc

SEQ ID NO: 1200882 - RNA, 19 nt, Homo sapiens
  misc_RNA (1)...(19): siRNA sense strand
gcagggucagcuccgauuu

SEQ ID NO: 1200883 - RNA, 19 nt, Homo sapiens
  misc_RNA (1)...(19): siRNA sense strand
cagacugugucauguucuu

SEQ ID NO: 1200884 - RNA, 19 nt, Homo sapiens
  misc_RNA (1)...(19): siRNA sense strand
caagagcgacaucgagaag

SEQ ID NO: 1200885 - RNA, 19 nt, Homo sapiens
  misc_RNA (1)...(19): siRNA sense strand
gcagaaccucagcaucaug

SEQ ID NO: 1200886 - RNA, 19 nt, Homo sapiens
  misc_RNA (1)...(19): siRNA sense strand
gccagccuguggucaucua

SEQ ID NO: 1200887 - RNA, 19 nt, Homo sapiens
  misc_RNA (1)...(19): siRNA sense strand
gauuucaaggucaugauug

SEQ ID NO: 1200888 - RNA, 19 nt, Homo sapiens
  misc_RNA (1)...(19): siRNA sense strand
ucgagaaggccaagcagaa

SEQ ID NO: 1200889 - RNA, 19 nt, Homo sapiens
  misc_RNA (1)...(19): siRNA sense strand
ggagaagaucuggaacuca

SEQ ID NO: 1200890 - RNA, 19 nt, Homo sapiens
  misc_RNA (1)...(19): siRNA sense strand
uggacucacucaccuuugu

SEQ ID NO: 1200891 - RNA, 19 nt, Homo sapiens
  misc_RNA (1)...(19): siRNA sense strand
cauggacucacucaccuuu

SEQ ID NO: 1200892 - RNA, 19 nt, Homo sapiens
  misc_RNA (1)...(19): siRNA sense strand
acucaucccuacagaccaa

SEQ ID NO: 1200893 - RNA, 19 nt, Homo sapiens
  misc_RNA (1)...(19): siRNA sense strand
gcacaucaccgugguacac

SEQ ID NO: 1200894 - RNA, 19 nt, Homo sapiens
  misc_RNA (1)...(19): siRNA sense strand
ccauggaggcccacaucaa

SEQ ID NO: 1200895 - RNA, 19 nt, Homo sapiens
  misc_RNA (1)...(19): siRNA sense strand
gagaacuggcugucugagu

SEQ ID NO: 1200896 - RNA, 19 nt, Homo sapiens
  misc_RNA (1)...(19): siRNA sense strand
gaagcugcgguucaacauc

SEQ ID NO: 1200897 - RNA, 19 nt, Homo sapiens
  misc_RNA (1)...(19): siRNA sense strand
gugcaugaaccaguacuau

SEQ ID NO: 1200898 - RNA, 19 nt, Homo sapiens
  misc_RNA (1)...(19): siRNA sense strand
cauacaacacccucaucaa

SEQ ID NO: 1200899 - RNA, 19 nt, Homo sapiens
  misc_RNA (1)...(19): siRNA sense strand
uggagaagaucuggaacuc

SEQ ID NO: 1200900 - RNA, 19 nt, Homo sapiens
  misc_RNA (1)...(19): siRNA sense strand
gaucuacggacaggcaugu

SEQ ID NO: 1200901 - RNA, 19 nt, Homo sapiens
  misc_RNA (1)...(19): siRNA sense strand
ucaagagcgacaucgagaa

SEQ ID NO: 1200902 - RNA, 19 nt, Homo sapiens
  misc_RNA (1)...(19): siRNA sense strand
uacaacacccucaucaaag

SEQ ID NO: 1200903 - RNA, 19 nt, Homo sapiens
  misc_RNA (1)...(19): siRNA sense strand
ccaagcagcugguggauga

SEQ ID NO: 1200904 - RNA, 19 nt, Homo sapiens
  misc_RNA (1)...(19): siRNA sense strand
gagaagaucuggaacucau

SEQ ID NO: 1200905 - RNA, 19 nt, Homo sapiens
  misc_RNA (1)...(19): siRNA sense strand
ccaagaagcugcgguucaa

SEQ ID NO: 1200906 - RNA, 19 nt, Homo sapiens
  misc_RNA (1)...(19): siRNA sense strand
gaagaaacccgagcuugug

SEQ ID NO: 1200907 - RNA, 19 nt, Homo sapiens
  misc_RNA (1)...(19): siRNA sense strand
ggaagccacugugcaugaa

SEQ ID NO: 1200908 - RNA, 19 nt, Homo sapiens
  misc_RNA (1)...(19): siRNA sense strand
gcaugaaccaguacuauca

SEQ ID NO: 1200909 - RNA, 19 nt, Homo sapiens
  misc_RNA (1)...(19): siRNA sense strand
acaacacccucaucaaaga

SEQ ID NO: 1200910 - RNA, 19 nt, Homo sapiens
  misc_RNA (1)...(19): siRNA sense strand
gcuacggugucugcuauaa

SEQ ID NO: 1200911 - RNA, 19 nt, Homo sapiens
  misc_RNA (1)...(19): siRNA sense strand
ggacacagucagcaacuuc

SEQ ID NO: 1200912 - RNA, 19 nt, Homo sapiens
  misc_RNA (1)...(19): siRNA sense strand
gaaccaguacuaucagauc

SEQ ID NO: 1200913 - RNA, 19 nt, Homo sapiens
  misc_RNA (1)...(19): siRNA sense strand
auacaacacccucaucaaa

SEQ ID NO: 1200914 - RNA, 19 nt, Homo sapiens
  misc_RNA (1)...(19): siRNA sense strand
gggaagccacugugcauga

SEQ ID NO: 1200915 - RNA, 19 nt, Homo sapiens
  misc_RNA (1)...(19): siRNA sense strand
gucagcaacuucagcaaga

SEQ ID NO: 1200916 - RNA, 19 nt, Homo sapiens
  misc_RNA (1)...(19): siRNA sense strand
ccaguacuaucagaucuug

SEQ ID NO: 1200917 - RNA, 19 nt, Homo sapiens
  misc_RNA (1)...(19): siRNA sense strand
gcauacaacacccucauca

SEQ ID NO: 1200918 - RNA, 19 nt, Homo sapiens
  misc_RNA (1)...(19): siRNA sense strand
gcaugugccaccuaugaaa

SEQ ID NO: 1200919 - RNA, 19 nt, Homo sapiens
  misc_RNA (1)...(19): siRNA sense strand
aagcagaaccucagcauca

SEQ ID NO: 1200920 - RNA, 19 nt, Homo sapiens
  misc_RNA (1)...(19): siRNA sense strand
aagcugcgguucaacauca

SEQ ID NO: 1200921 - RNA, 19 nt, Homo sapiens
  misc_RNA (1)...(19): siRNA sense strand
agaaggcgcuccuggacau

SEQ ID NO: 1200922 - RNA, 19 nt, Homo sapiens
  misc_RNA (1)...(19): siRNA sense strand
ggauuucaaggucaugauu

SEQ ID NO: 1200923 - RNA, 19 nt, Homo sapiens
  misc_RNA (1)...(19): siRNA sense strand
cggcuacggugucugcuau

SEQ ID NO: 1200924 - RNA, 19 nt, Homo sapiens
  misc_RNA (1)...(19): siRNA sense strand
gagaagcuaagcccagaug

SEQ ID NO: 1200925 - RNA, 19 nt, Homo sapiens
  misc_RNA (1)...(19): siRNA sense strand
gaggguguguuggauuuca

SEQ ID NO: 1200926 - RNA, 19 nt, Homo sapiens
  misc_RNA (1)...(19): siRNA sense strand
uugaggguguguuggauuu

SEQ ID NO: 1200927 - RNA, 19 nt, Homo sapiens
  misc_RNA (1)...(19): siRNA sense strand
cuuugcagcuggccuacua

SEQ ID NO: 1200928 - RNA, 19 nt, Homo sapiens
  misc_RNA (1)...(19): siRNA sense strand
ucaccgugguacacaacua

SEQ ID NO: 1200929 - RNA, 19 nt, Homo sapiens
  misc_RNA (1)...(19): siRNA sense strand
gcagcugguggaugaguuu

SEQ ID NO: 1200930 - RNA, 19 nt, Homo sapiens
  misc_RNA (1)...(19): siRNA sense strand
cagaaccucagcaucauga

SEQ ID NO: 1200931 - RNA, 19 nt, Homo sapiens
  misc_RNA (1)...(19): siRNA sense strand
ucacggagcaccagaaggu

SEQ ID NO: 1200932 - RNA, 19 nt, Homo sapiens
  misc_RNA (1)...(19): siRNA sense strand
ccaggaagacggagaacug

SEQ ID NO: 1200933 - RNA, 19 nt, Homo sapiens
  misc_RNA (1)...(19): siRNA sense strand
gaaccucagcaucaugauc

SEQ ID NO: 1200934 - RNA, 19 nt, Homo sapiens
  misc_RNA (1)...(19): siRNA sense strand
gcagggucagcuccgauuu

SEQ ID NO: 1200935 - RNA, 19 nt, Homo sapiens
  misc_RNA (1)...(19): siRNA sense strand
cagacugugucauguucuu

SEQ ID NO: 1200936 - RNA, 19 nt, Homo sapiens
  misc_RNA (1)...(19): siRNA sense strand
caagagcgacaucgagaag

SEQ ID NO: 1200937 - RNA, 19 nt, Homo sapiens
  misc_RNA (1)...(19): siRNA sense strand
gcagaaccucagcaucaug

SEQ ID NO: 1200938 - RNA, 19 nt, Homo sapiens
  misc_RNA (1)...(19): siRNA sense strand
gccagccuguggucaucua

SEQ ID NO: 1200939 - RNA, 19 nt, Homo sapiens
  misc_RNA (1)...(19): siRNA sense strand
gauuucaaggucaugauug

SEQ ID NO: 1200940 - RNA, 19 nt, Homo sapiens
  misc_RNA (1)...(19): siRNA sense strand
ucgagaaggccaagcagaa

SEQ ID NO: 1200941 - RNA, 19 nt, Homo sapiens
  misc_RNA (1)...(19): siRNA sense strand
ggagaagaucuggaacuca

SEQ ID NO: 1200942 - RNA, 19 nt, Homo sapiens
  misc_RNA (1)...(19): siRNA sense strand
uggacucacucaccuuugu

SEQ ID NO: 1200943 - RNA, 19 nt, Homo sapiens
  misc_RNA (1)...(19): siRNA sense strand
cauggacucacucaccuuu

SEQ ID NO: 1200944 - RNA, 19 nt, Homo sapiens
  misc_RNA (1)...(19): siRNA sense strand
acucaucccuacagaccaa

SEQ ID NO: 1200945 - RNA, 19 nt, Homo sapiens
  misc_RNA (1)...(19): siRNA sense strand
gcacaucaccgugguacac

SEQ ID NO: 1200946 - RNA, 19 nt, Homo sapiens
  misc_RNA (1)...(19): siRNA sense strand
ccauggaggcccacaucaa

SEQ ID NO: 1200947 - RNA, 19 nt, Homo sapiens
  misc_RNA (1)...(19): siRNA sense strand
gaagcugcgguucaacauc

SEQ ID NO: 1200948 - RNA, 19 nt, Homo sapiens
  misc_RNA (1)...(19): siRNA sense strand
gagaacuggcugucugagu

SEQ ID NO: 1200949 - RNA, 19 nt, Homo sapiens
  misc_RNA (1)...(19): siRNA sense strand
gugcaugaaccaguacuau

SEQ ID NO: 1200950 - RNA, 19 nt, Homo sapiens
  misc_RNA (1)...(19): siRNA sense strand
cauacaacacccucaucaa

SEQ ID NO: 1200951 - RNA, 19 nt, Homo sapiens
  misc_RNA (1)...(19): siRNA sense strand
uggagaagaucuggaacuc

SEQ ID NO: 1200952 - RNA, 19 nt, Homo sapiens
  misc_RNA (1)...(19): siRNA sense strand
gaucuacggacaggcaugu

SEQ ID NO: 1200953 - RNA, 19 nt, Homo sapiens
  misc_RNA (1)...(19): siRNA sense strand
ucaagagcgacaucgagaa

SEQ ID NO: 1200954 - RNA, 19 nt, Homo sapiens
  misc_RNA (1)...(19): siRNA sense strand
uacaacacccucaucaaag

SEQ ID NO: 1200955 - RNA, 19 nt, Homo sapiens
  misc_RNA (1)...(19): siRNA sense strand
aagcccuucuccuugauga

SEQ ID NO: 1200956 - RNA, 19 nt, Homo sapiens
  misc_RNA (1)...(19): siRNA sense strand
ccaagcagcugguggauga

SEQ ID NO: 1200957 - RNA, 19 nt, Homo sapiens
  misc_RNA (1)...(19): siRNA sense strand
gagaagaucuggaacucau

SEQ ID NO: 1200958 - RNA, 19 nt, Homo sapiens
  misc_RNA (1)...(19): siRNA sense strand
ccaagaagcugcgguucaa

SEQ ID NO: 1200959 - RNA, 19 nt, Homo sapiens
  misc_RNA (1)...(19): siRNA sense strand
gaagaaacccgagcuugug

SEQ ID NO: 1200960 - RNA, 19 nt, Homo sapiens
  misc_RNA (1)...(19): siRNA sense strand
ggaagccacugugcaugaa

SEQ ID NO: 1200961 - RNA, 19 nt, Homo sapiens
  misc_RNA (1)...(19): siRNA sense strand
gcaugaaccaguacuauca

SEQ ID NO: 1200962 - RNA, 19 nt, Homo sapiens
  misc_RNA (1)...(19): siRNA sense strand
acaacacccucaucaaaga

SEQ ID NO: 1200963 - RNA, 19 nt, Homo sapiens
  misc_RNA (1)...(19): siRNA sense strand
gcuacggugucugcuauaa

SEQ ID NO: 1200964 - RNA, 19 nt, Homo sapiens
  misc_RNA (1)...(19): siRNA sense strand
ggacacagucagcaacuuc

SEQ ID NO: 1200965 - RNA, 19 nt, Homo sapiens
  misc_RNA (1)...(19): siRNA sense strand
gaaccaguacuaucagauc

SEQ ID NO: 1200966 - RNA, 19 nt, Homo sapiens
  misc_RNA (1)...(19): siRNA sense strand
auacaacacccucaucaaa

SEQ ID NO: 1200967 - RNA, 19 nt, Homo sapiens
  misc_RNA (1)...(19): siRNA sense strand
gggaagccacugugcauga

SEQ ID NO: 1200968 - RNA, 19 nt, Homo sapiens
  misc_RNA (1)...(19): siRNA sense strand
gucagcaacuucagcaaga

SEQ ID NO: 1200969 - RNA, 19 nt, Homo sapiens
  misc_RNA (1)...(19): siRNA sense strand
ccaguacuaucagaucuug

SEQ ID NO: 1200970 - RNA, 19 nt, Homo sapiens
  misc_RNA (1)...(19): siRNA sense strand
gcauacaacacccucauca

SEQ ID NO: 1200971 - RNA, 19 nt, Homo sapiens
  misc_RNA (1)...(19): siRNA sense strand
gcaugugccaccuaugaaa

SEQ ID NO: 1200972 - RNA, 19 nt, Homo sapiens
  misc_RNA (1)...(19): siRNA sense strand
aagcagaaccucagcauca

SEQ ID NO: 1200973 - RNA, 19 nt, Homo sapiens
  misc_RNA (1)...(19): siRNA sense strand
aagcugcgguucaacauca

SEQ ID NO: 1200974 - RNA, 19 nt, Homo sapiens
  misc_RNA (1)...(19): siRNA sense strand
agaaggcgcuccuggacau

SEQ ID NO: 1200975 - RNA, 19 nt, Homo sapiens
  misc_RNA (1)...(19): siRNA sense strand
ggauuucaaggucaugauu

SEQ ID NO: 1200976 - RNA, 19 nt, Homo sapiens
  misc_RNA (1)...(19): siRNA sense strand
cggcuacggugucugcuau

SEQ ID NO: 1200977 - RNA, 19 nt, Homo sapiens
  misc_RNA (1)...(19): siRNA sense strand
gagaagcuaagcccagaug

SEQ ID NO: 1200978 - RNA, 19 nt, Homo sapiens
  misc_RNA (1)...(19): siRNA sense strand
gaggguguguuggauuuca

SEQ ID NO: 1200979 - RNA, 19 nt, Homo sapiens
  misc_RNA (1)...(19): siRNA sense strand
uugaggguguguuggauuu

SEQ ID NO: 1200980 - RNA, 19 nt, Homo sapiens
  misc_RNA (1)...(19): siRNA sense strand
cuuugcagcuggccuacua

SEQ ID NO: 1200981 - RNA, 19 nt, Homo sapiens
  misc_RNA (1)...(19): siRNA sense strand
ucaccgugguacacaacua

SEQ ID NO: 1200982 - RNA, 19 nt, Homo sapiens
  misc_RNA (1)...(19): siRNA sense strand
gcagcugguggaugaguuu

SEQ ID NO: 1200983 - RNA, 19 nt, Homo sapiens
  misc_RNA (1)...(19): siRNA sense strand
cagaaccucagcaucauga

SEQ ID NO: 1200984 - RNA, 19 nt, Homo sapiens
  misc_RNA (1)...(19): siRNA sense strand
ucacggagcaccagaaggu

SEQ ID NO: 1200985 - RNA, 19 nt, Homo sapiens
  misc_RNA (1)...(19): siRNA sense strand
ccaggaagacggagaacug

SEQ ID NO: 1200986 - RNA, 19 nt, Homo sapiens
  misc_RNA (1)...(19): siRNA sense strand
gaaccucagcaucaugauc

SEQ ID NO: 1200987 - RNA, 19 nt, Homo sapiens
  misc_RNA (1)...(19): siRNA sense strand
gcagggucagcuccgauuu

SEQ ID NO: 1200988 - RNA, 19 nt, Homo sapiens
  misc_RNA (1)...(19): siRNA sense strand
cagacugugucauguucuu

SEQ ID NO: 1200989 - RNA, 19 nt, Homo sapiens
  misc_RNA (1)...(19): siRNA sense strand
caagagcgacaucgagaag

SEQ ID NO: 1200990 - RNA, 19 nt, Homo sapiens
  misc_RNA (1)...(19): siRNA sense strand
gcagaaccucagcaucaug

SEQ ID NO: 1200991 - RNA, 19 nt, Homo sapiens
  misc_RNA (1)...(19): siRNA sense strand
gccagccuguggucaucua

SEQ ID NO: 1200992 - RNA, 19 nt, Homo sapiens
  misc_RNA (1)...(19): siRNA sense strand
gauuucaaggucaugauug

SEQ ID NO: 1200993 - RNA, 19 nt, Homo sapiens
  misc_RNA (1)...(19): siRNA sense strand
ucgagaaggccaagcagaa

SEQ ID NO: 1200994 - RNA, 19 nt, Homo sapiens
  misc_RNA (1)...(19): siRNA sense strand
ggagaagaucuggaacuca

SEQ ID NO: 1200995 - RNA, 19 nt, Homo sapiens
  misc_RNA (1)...(19): siRNA sense strand
uggacucacucaccuuugu

SEQ ID NO: 1200996 - RNA, 19 nt, Homo sapiens
  misc_RNA (1)...(19): siRNA sense strand
cauggacucacucaccuuu

SEQ ID NO: 1200997 - RNA, 19 nt, Homo sapiens
  misc_RNA (1)...(19): siRNA sense strand
acucaucccuacagaccaa

SEQ ID NO: 1200998 - RNA, 19 nt, Homo sapiens
  misc_RNA (1)...(19): siRNA sense strand
gcacaucaccgugguacac

SEQ ID NO: 1200999 - RNA, 19 nt, Homo sapiens
  misc_RNA (1)...(19): siRNA sense strand
ccauggaggcccacaucaa

SEQ ID NO: 1201000 - RNA, 19 nt, Homo sapiens
  misc_RNA (1)...(19): siRNA sense strand
gaagcugcgguucaacauc

SEQ ID NO: 1201001 - RNA, 19 nt, Homo sapiens
  misc_RNA (1)...(19): siRNA sense strand
gagaacuggcugucugagu

SEQ ID NO: 1201002 - RNA, 19 nt, Homo sapiens
  misc_RNA (1)...(19): siRNA sense strand
gugcaugaaccaguacuau

SEQ ID NO: 1201003 - RNA, 19 nt, Homo sapiens
  misc_RNA (1)...(19): siRNA sense strand
cauacaacacccucaucaa

SEQ ID NO: 1201004 - RNA, 19 nt, Homo sapiens
  misc_RNA (1)...(19): siRNA sense strand
uggagaagaucuggaacuc

SEQ ID NO: 1201005 - RNA, 19 nt, Homo sapiens
  misc_RNA (1)...(19): siRNA sense strand
gaucuacggacaggcaugu

SEQ ID NO: 1201006 - RNA, 19 nt, Homo sapiens
  misc_RNA (1)...(19): siRNA sense strand
ucaagagcgacaucgagaa

SEQ ID NO: 1201007 - RNA, 19 nt, Homo sapiens
  misc_RNA (1)...(19): siRNA sense strand
uacaacacccucaucaaag

SEQ ID NO: 1201008 - RNA, 19 nt, Homo sapiens
  misc_RNA (1)...(19): siRNA sense strand
aagcccuucuccuugauga

SEQ ID NO: 1201009 - RNA, 19 nt, Homo sapiens
  misc_RNA (1)...(19): siRNA sense strand
ccaagcagcugguggauga

SEQ ID NO: 1201010 - RNA, 19 nt, Homo sapiens
  misc_RNA (1)...(19): siRNA sense strand
gagaagaucuggaacucau

SEQ ID NO: 1201011 - RNA, 19 nt, Homo sapiens
  misc_RNA (1)...(19): siRNA sense strand
ccaagaagcugcgguucaa

SEQ ID NO: 1201012 - RNA, 19 nt, Homo sapiens
  misc_RNA (1)...(19): siRNA sense strand
gaagaaacccgagcuugug

SEQ ID NO: 1201013 - RNA, 19 nt, Homo sapiens
  misc_RNA (1)...(19): siRNA sense strand
ggaagccacugugcaugaa

SEQ ID NO: 1201014 - RNA, 19 nt, Homo sapiens
  misc_RNA (1)...(19): siRNA sense strand
gcaugaaccaguacuauca

SEQ ID NO: 1201015 - RNA, 19 nt, Homo sapiens
  misc_RNA (1)...(19): siRNA sense strand
acaacacccucaucaaaga

SEQ ID NO: 1201016 - RNA, 19 nt, Homo sapiens
  misc_RNA (1)...(19): siRNA sense strand
gcuacggugucugcuauaa

SEQ ID NO: 1201017 - RNA, 19 nt, Homo sapiens
  misc_RNA (1)...(19): siRNA sense strand
ggacacagucagcaacuuc

SEQ ID NO: 1201018 - RNA, 19 nt, Homo sapiens
  misc_RNA (1)...(19): siRNA sense strand
gaaccaguacuaucagauc

SEQ ID NO: 1201019 - RNA, 19 nt, Homo sapiens
  misc_RNA (1)...(19): siRNA sense strand
auacaacacccucaucaaa

SEQ ID NO: 1201020 - RNA, 19 nt, Homo sapiens
  misc_RNA (1)...(19): siRNA sense strand
gggaagccacugugcauga

SEQ ID NO: 1201021 - RNA, 19 nt, Homo sapiens
  misc_RNA (1)...(19): siRNA sense strand
gucagcaacuucagcaaga

SEQ ID NO: 1201022 - RNA, 19 nt, Homo sapiens
  misc_RNA (1)...(19): siRNA sense strand
ccaguacuaucagaucuug

SEQ ID NO: 1201023 - RNA, 19 nt, Homo sapiens
  misc_RNA (1)...(19): siRNA sense strand
gcauacaacacccucauca

SEQ ID NO: 1201024 - RNA, 19 nt, Homo sapiens
  misc_RNA (1)...(19): siRNA sense strand
gcaugugccaccuaugaaa

SEQ ID NO: 1201025 - RNA, 19 nt, Homo sapiens
  misc_RNA (1)...(19): siRNA sense strand
aagcagaaccucagcauca

SEQ ID NO: 1201026 - RNA, 19 nt, Homo sapiens
  misc_RNA (1)...(19): siRNA sense strand
aagcugcgguucaacauca

SEQ ID NO: 1201027 - RNA, 19 nt, Homo sapiens
  misc_RNA (1)...(19): siRNA sense strand
agaaggcgcuccuggacau

SEQ ID NO: 1201028 - RNA, 19 nt, Homo sapiens
  misc_RNA (1)...(19): siRNA sense strand
ggauuucaaggucaugauu

SEQ ID NO: 1201029 - RNA, 19 nt, Homo sapiens
  misc_RNA (1)...(19): siRNA sense strand
cggcuacggugucugcuau

SEQ ID NO: 1201030 - RNA, 19 nt, Homo sapiens
  misc_RNA (1)...(19): siRNA sense strand
gagaagcuaagcccagaug

SEQ ID NO: 1201031 - RNA, 19 nt, Homo sapiens
  misc_RNA (1)...(19): siRNA sense strand
gaggguguguuggauuuca

SEQ ID NO: 1201032 - RNA, 19 nt, Homo sapiens
  misc_RNA (1)...(19): siRNA sense strand
uugaggguguguuggauuu

SEQ ID NO: 1201033 - RNA, 19 nt, Homo sapiens
  misc_RNA (1)...(19): siRNA sense strand
cuuugcagcuggccuacua

SEQ ID NO: 1201034 - RNA, 19 nt, Homo sapiens
  misc_RNA (1)...(19): siRNA sense strand
gcagcugguggaugaguuu

SEQ ID NO: 1201035 - RNA, 19 nt, Homo sapiens
  misc_RNA (1)...(19): siRNA sense strand
ucaccgugguacacaacua

SEQ ID NO: 1201036 - RNA, 19 nt, Homo sapiens
  misc_RNA (1)...(19): siRNA sense strand
cagaaccucagcaucauga

SEQ ID NO: 1201037 - RNA, 19 nt, Homo sapiens
  misc_RNA (1)...(19): siRNA sense strand
ccaggaagacggagaacug

SEQ ID NO: 1201038 - RNA, 19 nt, Homo sapiens
  misc_RNA (1)...(19): siRNA sense strand
ucacggagcaccagaaggu

SEQ ID NO: 1201039 - RNA, 19 nt, Homo sapiens
  misc_RNA (1)...(19): siRNA sense strand
gaaccucagcaucaugauc

SEQ ID NO: 1201040 - RNA, 19 nt, Homo sapiens
  misc_RNA (1)...(19): siRNA sense strand
gcagggucagcuccgauuu

SEQ ID NO: 1201041 - RNA, 19 nt, Homo sapiens
  misc_RNA (1)...(19): siRNA sense strand
cagacugugucauguucuu

SEQ ID NO: 1201042 - RNA, 19 nt, Homo sapiens
  misc_RNA (1)...(19): siRNA sense strand
caagagcgacaucgagaag

SEQ ID NO: 1201043 - RNA, 19 nt, Homo sapiens
  misc_RNA (1)...(19): siRNA sense strand
gcagaaccucagcaucaug

SEQ ID NO: 1201044 - RNA, 19 nt, Homo sapiens
  misc_RNA (1)...(19): siRNA sense strand
gccagccuguggucaucua

SEQ ID NO: 1201045 - RNA, 19 nt, Homo sapiens
  misc_RNA (1)...(19): siRNA sense strand
gauuucaaggucaugauug

SEQ ID NO: 1201046 - RNA, 19 nt, Homo sapiens
  misc_RNA (1)...(19): siRNA sense strand
ucgagaaggccaagcagaa

SEQ ID NO: 1201047 - RNA, 19 nt, Homo sapiens
  misc_RNA (1)...(19): siRNA sense strand
ggagaagaucuggaacuca

SEQ ID NO: 1201048 - RNA, 19 nt, Homo sapiens
  misc_RNA (1)...(19): siRNA sense strand
uggacucacucaccuuugu

SEQ ID NO: 1201049 - RNA, 19 nt, Homo sapiens
  misc_RNA (1)...(19): siRNA sense strand
cauggacucacucaccuuu

SEQ ID NO: 1201050 - RNA, 19 nt, Homo sapiens
  misc_RNA (1)...(19): siRNA sense strand
acucaucccuacagaccaa

SEQ ID NO: 1201051 - RNA, 19 nt, Homo sapiens
  misc_RNA (1)...(19): siRNA sense strand
gcacaucaccgugguacac

SEQ ID NO: 1201052 - RNA, 19 nt, Homo sapiens
  misc_RNA (1)...(19): siRNA sense strand
ccauggaggcccacaucaa

SEQ ID NO: 1201053 - RNA, 19 nt, Homo sapiens
  misc_RNA (1)...(19): siRNA sense strand
gagaacuggcugucugagu

SEQ ID NO: 1201054 - RNA, 19 nt, Homo sapiens
  misc_RNA (1)...(19): siRNA sense strand
gaagcugcgguucaacauc

SEQ ID NO: 1201055 - RNA, 19 nt, Homo sapiens
  misc_RNA (1)...(19): siRNA sense strand
gugcaugaaccaguacuau

SEQ ID NO: 1201056 - RNA, 19 nt, Homo sapiens
  misc_RNA (1)...(19): siRNA sense strand
cauacaacacccucaucaa

SEQ ID NO: 1201057 - RNA, 19 nt, Homo sapiens
  misc_RNA (1)...(19): siRNA sense strand
uggagaagaucuggaacuc

SEQ ID NO: 1201058 - RNA, 19 nt, Homo sapiens
  misc_RNA (1)...(19): siRNA sense strand
gaucuacggacaggcaugu

SEQ ID NO: 1201059 - RNA, 19 nt, Homo sapiens
  misc_RNA (1)...(19): siRNA sense strand
ucaagagcgacaucgagaa

SEQ ID NO: 1201060 - RNA, 19 nt, Homo sapiens
  misc_RNA (1)...(19): siRNA sense strand
uacaacacccucaucaaag

SEQ ID NO: 1201061 - RNA, 19 nt, Homo sapiens
  misc_RNA (1)...(19): siRNA sense strand
ccaagcagcugguggauga

SEQ ID NO: 1201062 - RNA, 19 nt, Homo sapiens
  misc_RNA (1)...(19): siRNA sense strand
gagaagaucuggaacucau

SEQ ID NO: 1201063 - RNA, 19 nt, Homo sapiens
  misc_RNA (1)...(19): siRNA sense strand
ccaagaagcugcgguucaa

SEQ ID NO: 1201064 - RNA, 19 nt, Homo sapiens
  misc_RNA (1)...(19): siRNA sense strand
gaagaaacccgagcuugug

SEQ ID NO: 1201065 - RNA, 19 nt, Homo sapiens
  misc_RNA (1)...(19): siRNA sense strand
ggaagccacugugcaugaa

SEQ ID NO: 1201066 - RNA, 19 nt, Homo sapiens
  misc_RNA (1)...(19): siRNA sense strand
gcaugaaccaguacuauca

SEQ ID NO: 1201067 - RNA, 19 nt, Homo sapiens
  misc_RNA (1)...(19): siRNA sense strand
acaacacccucaucaaaga

SEQ ID NO: 1201068 - RNA, 19 nt, Homo sapiens
  misc_RNA (1)...(19): siRNA sense strand
gcuacggugucugcuauaa

SEQ ID NO: 1201069 - RNA, 19 nt, Homo sapiens
  misc_RNA (1)...(19): siRNA sense strand
ggacacagucagcaacuuc

SEQ ID NO: 1201070 - RNA, 19 nt, Homo sapiens
  misc_RNA (1)...(19): siRNA sense strand
gaaccaguacuaucagauc

SEQ ID NO: 1201071 - RNA, 19 nt, Homo sapiens
  misc_RNA (1)...(19): siRNA sense strand
auacaacacccucaucaaa

SEQ ID NO: 1201072 - RNA, 19 nt, Homo sapiens
  misc_RNA (1)...(19): siRNA sense strand
gggaagccacugugcauga

SEQ ID NO: 1201073 - RNA, 19 nt, Homo sapiens
  misc_RNA (1)...(19): siRNA sense strand
gucagcaacuucagcaaga

SEQ ID NO: 1201074 - RNA, 19 nt, Homo sapiens
  misc_RNA (1)...(19): siRNA sense strand
ccaguacuaucagaucuug

SEQ ID NO: 1201075 - RNA, 19 nt, Homo sapiens
  misc_RNA (1)...(19): siRNA sense strand
gcauacaacacccucauca

SEQ ID NO: 1201076 - RNA, 19 nt, Homo sapiens
  misc_RNA (1)...(19): siRNA sense strand
gcaugugccaccuaugaaa

SEQ ID NO: 1201077 - RNA, 19 nt, Homo sapiens
  misc_RNA (1)...(19): siRNA sense strand
aagcagaaccucagcauca

SEQ ID NO: 1201078 - RNA, 19 nt, Homo sapiens
  misc_RNA (1)...(19): siRNA sense strand
aagcugcgguucaacauca

SEQ ID NO: 1201079 - RNA, 19 nt, Homo sapiens
  misc_RNA (1)...(19): siRNA sense strand
agaaggcgcuccuggacau

SEQ ID NO: 1201080 - RNA, 19 nt, Homo sapiens
  misc_RNA (1)...(19): siRNA sense strand
ggauuucaaggucaugauu

SEQ ID NO: 1201081 - RNA, 19 nt, Homo sapiens
  misc_RNA (1)...(19): siRNA sense strand
cggcuacggugucugcuau

SEQ ID NO: 1201082 - RNA, 19 nt, Homo sapiens
  misc_RNA (1)...(19): siRNA sense strand
gagaagcuaagcccagaug

SEQ ID NO: 1201083 - RNA, 19 nt, Homo sapiens
  misc_RNA (1)...(19): siRNA sense strand
gaggguguguuggauuuca

SEQ ID NO: 1201084 - RNA, 19 nt, Homo sapiens
  misc_RNA (1)...(19): siRNA sense strand
uugaggguguguuggauuu

SEQ ID NO: 1201085 - RNA, 19 nt, Homo sapiens
  misc_RNA (1)...(19): siRNA sense strand
cuuugcagcuggccuacua

SEQ ID NO: 1201086 - RNA, 19 nt, Homo sapiens
  misc_RNA (1)...(19): siRNA sense strand
ucaccgugguacacaacua

SEQ ID NO: 1201087 - RNA, 19 nt, Homo sapiens
  misc_RNA (1)...(19): siRNA sense strand
gcagcugguggaugaguuu

SEQ ID NO: 1201088 - RNA, 19 nt, Homo sapiens
  misc_RNA (1)...(19): siRNA sense strand
cagaaccucagcaucauga

SEQ ID NO: 1201089 - RNA, 19 nt, Homo sapiens
  misc_RNA (1)...(19): siRNA sense strand
ucacggagcaccagaaggu

SEQ ID NO: 1201090 - RNA, 19 nt, Homo sapiens
  misc_RNA (1)...(19): siRNA sense strand
ccaggaagacggagaacug

SEQ ID NO: 1201091 - RNA, 19 nt, Homo sapiens
  misc_RNA (1)...(19): siRNA sense strand
gaaccucagcaucaugauc

SEQ ID NO: 1201092 - RNA, 19 nt, Homo sapiens
  misc_RNA (1)...(19): siRNA sense strand
gcagggucagcuccgauuu

SEQ ID NO: 1201093 - RNA, 19 nt, Homo sapiens
  misc_RNA (1)...(19): siRNA sense strand
cagacugugucauguucuu

SEQ ID NO: 1201094 - RNA, 19 nt, Homo sapiens
  misc_RNA (1)...(19): siRNA sense strand
caagagcgacaucgagaag

SEQ ID NO: 1201095 - RNA, 19 nt, Homo sapiens
  misc_RNA (1)...(19): siRNA sense strand
gcagaaccucagcaucaug

SEQ ID NO: 1201096 - RNA, 19 nt, Homo sapiens
  misc_RNA (1)...(19): siRNA sense strand
gccagccuguggucaucua

SEQ ID NO: 1201097 - RNA, 19 nt, Homo sapiens
  misc_RNA (1)...(19): siRNA sense strand
gauuucaaggucaugauug

SEQ ID NO: 1201098 - RNA, 19 nt, Homo sapiens
  misc_RNA (1)...(19): siRNA sense strand
ucgagaaggccaagcagaa

SEQ ID NO: 1201099 - RNA, 19 nt, Homo sapiens
  misc_RNA (1)...(19): siRNA sense strand
ggagaagaucuggaacuca

SEQ ID NO: 1201100 - RNA, 19 nt, Homo sapiens
  misc_RNA (1)...(19): siRNA sense strand
uggacucacucaccuuugu

SEQ ID NO: 1201101 - RNA, 19 nt, Homo sapiens
  misc_RNA (1)...(19): siRNA sense strand
cauggacucacucaccuuu

SEQ ID NO: 1201102 - RNA, 19 nt, Homo sapiens
  misc_RNA (1)...(19): siRNA sense strand
acucaucccuacagaccaa

SEQ ID NO: 1201103 - RNA, 19 nt, Homo sapiens
  misc_RNA (1)...(19): siRNA sense strand
gcacaucaccgugguacac

SEQ ID NO: 1201104 - RNA, 19 nt, Homo sapiens
  misc_RNA (1)...(19): siRNA sense strand
ccauggaggcccacaucaa

SEQ ID NO: 1201105 - RNA, 19 nt, Homo sapiens
  misc_RNA (1)...(19): siRNA sense strand
gaagcugcgguucaacauc

SEQ ID NO: 1201106 - RNA, 19 nt, Homo sapiens
  misc_RNA (1)...(19): siRNA sense strand
gagaacuggcugucugagu

SEQ ID NO: 1201107 - RNA, 19 nt, Homo sapiens
  misc_RNA (1)...(19): siRNA sense strand
gugcaugaaccaguacuau

SEQ ID NO: 1201108 - RNA, 19 nt, Homo sapiens
  misc_RNA (1)...(19): siRNA sense strand
cauacaacacccucaucaa

SEQ ID NO: 1201109 - RNA, 19 nt, Homo sapiens
  misc_RNA (1)...(19): siRNA sense strand
uggagaagaucuggaacuc

SEQ ID NO: 1201110 - RNA, 19 nt, Homo sapiens
  misc_RNA (1)...(19): siRNA sense strand
gaucuacggacaggcaugu

SEQ ID NO: 1201111 - RNA, 19 nt, Homo sapiens
  misc_RNA (1)...(19): siRNA sense strand
ucaagagcgacaucgagaa

SEQ ID NO: 1201112 - RNA, 19 nt, Homo sapiens
  misc_RNA (1)...(19): siRNA sense strand
uacaacacccucaucaaag

SEQ ID NO: 1201113 - RNA, 19 nt, Homo sapiens
  misc_RNA (1)...(19): siRNA sense strand
aagcccuucuccuugauga

SEQ ID NO: 1201114 - RNA, 19 nt, Homo sapiens
  misc_RNA (1)...(19): siRNA sense strand
gagauaaaguccuugauga

SEQ ID NO: 1201115 - RNA, 19 nt, Homo sapiens
  misc_RNA (1)...(19): siRNA sense strand
ggaauuaaauccuuagucu

SEQ ID NO: 1201116 - RNA, 19 nt, Homo sapiens
  misc_RNA (1)...(19): siRNA sense strand
gaugaaaccugaucccaau

SEQ ID NO: 1201117 - RNA, 19 nt, Homo sapiens
  misc_RNA (1)...(19): siRNA sense strand
gggauuccauauucaauuu

SEQ ID NO: 1201118 - RNA, 19 nt, Homo sapiens
  misc_RNA (1)...(19): siRNA sense strand
ucacuacaauuccuggaua

SEQ ID NO: 1201119 - RNA, 19 nt, Homo sapiens
  misc_RNA (1)...(19): siRNA sense strand
gagagauggugcuggagua

SEQ ID NO: 1201120 - RNA, 19 nt, Homo sapiens
  misc_RNA (1)...(19): siRNA sense strand
ugugauggaugauacaaua

SEQ ID NO: 1201121 - RNA, 19 nt, Homo sapiens
  misc_RNA (1)...(19): siRNA sense strand
gggagauccuggcaaagua

SEQ ID NO: 1201122 - RNA, 19 nt, Homo sapiens
  misc_RNA (1)...(19): siRNA sense strand
gaaaccugaucccaauuug

SEQ ID NO: 1201123 - RNA, 19 nt, Homo sapiens
  misc_RNA (1)...(19): siRNA sense strand
uuacguaucuggaaguuau

SEQ ID NO: 1201124 - RNA, 19 nt, Homo sapiens
  misc_RNA (1)...(19): siRNA sense strand
gauaaaguccuugaugaaa

SEQ ID NO: 1201125 - RNA, 19 nt, Homo sapiens
  misc_RNA (1)...(19): siRNA sense strand
gaaaauagcagcugaauac

SEQ ID NO: 1201126 - RNA, 19 nt, Homo sapiens
  misc_RNA (1)...(19): siRNA sense strand
caaccucccucacuacaau

SEQ ID NO: 1201127 - RNA, 19 nt, Homo sapiens
  misc_RNA (1)...(19): siRNA sense strand
uggaaucgcugguuuggaa

SEQ ID NO: 1201128 - RNA, 19 nt, Homo sapiens
  misc_RNA (1)...(19): siRNA sense strand
caaugacucuggcuauuca

SEQ ID NO: 1201129 - RNA, 19 nt, Homo sapiens
  misc_RNA (1)...(19): siRNA sense strand
caauuuccuuuaagaggua

SEQ ID NO: 1201130 - RNA, 19 nt, Homo sapiens
  misc_RNA (1)...(19): siRNA sense strand
gagcauuacauguucuuaa

SEQ ID NO: 1201131 - RNA, 19 nt, Homo sapiens
  misc_RNA (1)...(19): siRNA sense strand
gguaucacauggaucauca

SEQ ID NO: 1201132 - RNA, 19 nt, Homo sapiens
  misc_RNA (1)...(19): siRNA sense strand
ccaaaccaauuacguaucu

SEQ ID NO: 1201133 - RNA, 19 nt, Homo sapiens
  misc_RNA (1)...(19): siRNA sense strand
ggauaaaaguacuguauga

SEQ ID NO: 1201134 - RNA, 19 nt, Homo sapiens
  misc_RNA (1)...(19): siRNA sense strand
gcaaagcaauguggaaucg

SEQ ID NO: 1201135 - RNA, 19 nt, Homo sapiens
  misc_RNA (1)...(19): siRNA sense strand
uaagagguaucacauggau

SEQ ID NO: 1201136 - RNA, 19 nt, Homo sapiens
  misc_RNA (1)...(19): siRNA sense strand
uacaauaagucccuacuca

SEQ ID NO: 1201137 - RNA, 19 nt, Homo sapiens
  misc_RNA (1)...(19): siRNA sense strand
gcguuuggcaguugcauua

SEQ ID NO: 1201138 - RNA, 19 nt, Homo sapiens
  misc_RNA (1)...(19): siRNA sense strand
cauguuggcagcaucuuua

SEQ ID NO: 1201139 - RNA, 19 nt, Homo sapiens
  misc_RNA (1)...(19): siRNA sense strand
gguuuggaauguuugcuaa

SEQ ID NO: 1201140 - RNA, 19 nt, Homo sapiens
  misc_RNA (1)...(19): siRNA sense strand
cuauugggauuccauauuc

SEQ ID NO: 1201141 - RNA, 19 nt, Homo sapiens
  misc_RNA (1)...(19): siRNA sense strand
uggcgucgauguagauauu

SEQ ID NO: 1201142 - RNA, 19 nt, Homo sapiens
  misc_RNA (1)...(19): siRNA sense strand
ggacuggaaaugggucaua

SEQ ID NO: 1201143 - RNA, 19 nt, Homo sapiens
  misc_RNA (1)...(19): siRNA sense strand
auaagucccuacucaagaa

SEQ ID NO: 1201144 - RNA, 19 nt, Homo sapiens
  misc_RNA (1)...(19): siRNA sense strand
uuaugggccucugaauuua

SEQ ID NO: 1201145 - RNA, 19 nt, Homo sapiens
  misc_RNA (1)...(19): siRNA sense strand
uagcugagcauuacauguu

SEQ ID NO: 1201146 - RNA, 19 nt, Homo sapiens
  misc_RNA (1)...(19): siRNA sense strand
gccgggagauccuggcaaa

SEQ ID NO: 1201147 - RNA, 19 nt, Homo sapiens
  misc_RNA (1)...(19): siRNA sense strand
gauggaugauacaauaagu

SEQ ID NO: 1201148 - RNA, 19 nt, Homo sapiens
  misc_RNA (1)...(19): siRNA sense strand
ugaaaccugaucccaauuu

SEQ ID NO: 1201149 - RNA, 19 nt, Homo sapiens
  misc_RNA (1)...(19): siRNA sense strand
uaaaagacuuggacuggaa

SEQ ID NO: 1201150 - RNA, 19 nt, Homo sapiens
  misc_RNA (1)...(19): siRNA sense strand
gaucccaauuugauaugga

SEQ ID NO: 1201151 - RNA, 19 nt, Homo sapiens
  misc_RNA (1)...(19): siRNA sense strand
uagauauuccuaccgauuu

SEQ ID NO: 1201152 - RNA, 19 nt, Homo sapiens
  misc_RNA (1)...(19): siRNA sense strand
aaauagcagcugaauacua

SEQ ID NO: 1201153 - RNA, 19 nt, Homo sapiens
  misc_RNA (1)...(19): siRNA sense strand
gagggcugguucuucugua

SEQ ID NO: 1201154 - RNA, 19 nt, Homo sapiens
  misc_RNA (1)...(19): siRNA sense strand
auuaugggccucugaauuu

SEQ ID NO: 1201155 - RNA, 19 nt, Homo sapiens
  misc_RNA (1)...(19): siRNA sense strand
caauaagucccuacucaag

SEQ ID NO: 1201156 - RNA, 19 nt, Homo sapiens
  misc_RNA (1)...(19): siRNA sense strand
ucgcugguuuggaauguuu

SEQ ID NO: 1201157 - RNA, 19 nt, Homo sapiens
  misc_RNA (1)...(19): siRNA sense strand
ggagauccuggcaaaguau

SEQ ID NO: 1201158 - RNA, 19 nt, Homo sapiens
  misc_RNA (1)...(19): siRNA sense strand
gcagcugaauacuaugaca

SEQ ID NO: 1201159 - RNA, 19 nt, Homo sapiens
  misc_RNA (1)...(19): siRNA sense strand
uugcuaaucuuccuauugg

SEQ ID NO: 1201160 - RNA, 19 nt, Homo sapiens
  misc_RNA (1)...(19): siRNA sense strand
cacuacaauuccuggauaa

SEQ ID NO: 1201161 - RNA, 19 nt, Homo sapiens
  misc_RNA (1)...(19): siRNA sense strand
gacuggaaaugggucauau

SEQ ID NO: 1201162 - RNA, 19 nt, Homo sapiens
  misc_RNA (1)...(19): siRNA sense strand
cauuacauguucuuaaagg

SEQ ID NO: 1201163 - RNA, 19 nt, Homo sapiens
  misc_RNA (1)...(19): siRNA sense strand
gcacccaauuucuggacau

SEQ ID NO: 1201164 - RNA, 19 nt, Homo sapiens
  misc_RNA (1)...(19): siRNA sense strand
gagcugauggcgucgaugu

SEQ ID NO: 1201165 - RNA, 19 nt, Homo sapiens
  misc_RNA (1)...(19): siRNA sense strand
aauguggaaucgcugguuu

SEQ ID NO: 1201166 - RNA, 19 nt, Homo sapiens
  misc_RNA (1)...(19): siRNA sense strand
agauaaaguccuugaugaa

SEQ ID NO: 1201167 - RNA, 19 nt, Homo sapiens
  misc_RNA (1)...(19): siRNA sense strand
gaaugaagaggcaccaaaa

SEQ ID NO: 1201168 - RNA, 19 nt, Homo sapiens
  misc_RNA (1)...(19): siRNA sense strand
agagauaaaguccuugaug

SEQ ID NO: 1201169 - RNA, 19 nt, Homo sapiens
  misc_RNA (1)...(19): siRNA sense strand
ccagagauaaaguccuuga

SEQ ID NO: 1201170 - RNA, 19 nt, Homo sapiens
  misc_RNA (1)...(19): siRNA sense strand
gggccucugaauuuacuua

SEQ ID NO: 1201171 - RNA, 19 nt, Homo sapiens
  misc_RNA (1)...(19): siRNA sense strand
uggaauguuugcuaaucuu

SEQ ID NO: 1201172 - RNA, 19 nt, Homo sapiens
  misc_RNA (1)...(19): siRNA sense strand
auaaaguccuugaugaaac

SEQ ID NO: 1201173 - RNA, 19 nt, Homo sapiens
  misc_RNA (1)...(19): siRNA sense strand
ggaaaauagcagcugaaua

SEQ ID NO: 1201174 - RNA, 19 nt, Homo sapiens
  misc_RNA (1)...(19): siRNA sense strand
uauuaugggccucugaauu

SEQ ID NO: 1201175 - RNA, 19 nt, Homo sapiens
  misc_RNA (1)...(19): siRNA sense strand
guucuuaaagggucaugaa

SEQ ID NO: 1201176 - RNA, 19 nt, Homo sapiens
  misc_RNA (1)...(19): siRNA sense strand
ccuauugggauuccauauu

SEQ ID NO: 1201177 - RNA, 19 nt, Homo sapiens
  misc_RNA (1)...(19): siRNA sense strand
ugaugguucucacccaguu

SEQ ID NO: 1201178 - RNA, 19 nt, Homo sapiens
  misc_RNA (1)...(19): siRNA sense strand
agagguaucacauggauca

SEQ ID NO: 1201179 - RNA, 19 nt, Homo sapiens
  misc_RNA (1)...(19): siRNA sense strand
ggaauguuugcuaaucuuc

SEQ ID NO: 1201180 - RNA, 19 nt, Homo sapiens
  misc_RNA (1)...(19): siRNA sense strand
agaaugaagaggcaccaaa

SEQ ID NO: 1201181 - RNA, 19 nt, Homo sapiens
  misc_RNA (1)...(19): siRNA sense strand
augacaaccucccucacua

SEQ ID NO: 1201182 - RNA, 19 nt, Homo sapiens
  misc_RNA (1)...(19): siRNA sense strand
uagcagcugaauacuauga

SEQ ID NO: 1201183 - RNA, 19 nt, Homo sapiens
  misc_RNA (1)...(19): siRNA sense strand
cccaauuugauauggauua

SEQ ID NO: 1201184 - RNA, 19 nt, Homo sapiens
  misc_RNA (1)...(19): siRNA sense strand
ugacucuggcuauucauga

SEQ ID NO: 1201185 - RNA, 19 nt, Homo sapiens
  misc_RNA (1)...(19): siRNA sense strand
aauaagucccuacucaaga

SEQ ID NO: 1201186 - RNA, 19 nt, Homo sapiens
  misc_RNA (1)...(19): siRNA sense strand
ccuaugcguuuggcaguug

SEQ ID NO: 1201187 - RNA, 19 nt, Homo sapiens
  misc_RNA (1)...(19): siRNA sense strand
guuggcagcaucuuuacuu

SEQ ID NO: 1201188 - RNA, 19 nt, Homo sapiens
  misc_RNA (1)...(19): siRNA sense strand
uaaaguccuugaugaaacc

SEQ ID NO: 1201189 - RNA, 19 nt, Homo sapiens
  misc_RNA (1)...(19): siRNA sense strand
acaauaagucccuacucaa

SEQ ID NO: 1201190 - RNA, 19 nt, Homo sapiens
  misc_RNA (1)...(19): siRNA sense strand
uucaugagauugcccacaa

SEQ ID NO: 1201191 - RNA, 19 nt, Homo sapiens
  misc_RNA (1)...(19): siRNA sense strand
aaaccugaucccaauuuga

SEQ ID NO: 1201192 - RNA, 19 nt, Homo sapiens
  misc_RNA (1)...(19): siRNA sense strand
ucaaugacucuggcuauuc

SEQ ID NO: 1201193 - RNA, 19 nt, Homo sapiens
  misc_RNA (1)...(19): siRNA sense strand
guucuucuguaccgcuuuc

SEQ ID NO: 1201194 - RNA, 19 nt, Homo sapiens
  misc_RNA (1)...(19): siRNA sense strand
gugauggaugauacaauaa

SEQ ID NO: 1201195 - RNA, 19 nt, Homo sapiens
  misc_RNA (1)...(19): siRNA sense strand
uggcacaggucacuuuuga

SEQ ID NO: 1201196 - RNA, 19 nt, Homo sapiens
  misc_RNA (1)...(19): siRNA sense strand
gaaucgcugguuuggaaug

SEQ ID NO: 1201197 - RNA, 19 nt, Homo sapiens
  misc_RNA (1)...(19): siRNA sense strand
cucaaugacucuggcuauu

SEQ ID NO: 1201198 - RNA, 19 nt, Homo sapiens
  misc_RNA (1)...(19): siRNA sense strand
gcugauggcgucgauguag

SEQ ID NO: 1201199 - RNA, 19 nt, Homo sapiens
  misc_RNA (1)...(19): siRNA sense strand
gacaaccucccucacuaca

SEQ ID NO: 1201200 - RNA, 19 nt, Homo sapiens
  misc_RNA (1)...(19): siRNA sense strand
cccaauuucuggacauuuu

SEQ ID NO: 1201201 - RNA, 19 nt, Homo sapiens
  misc_RNA (1)...(19): siRNA sense strand
cacccaauuucuggacauu

SEQ ID NO: 1201202 - RNA, 19 nt, Homo sapiens
  misc_RNA (1)...(19): siRNA sense strand
gcauuacauguucuuaaag

SEQ ID NO: 1201203 - RNA, 19 nt, Homo sapiens
  misc_RNA (1)...(19): siRNA sense strand
uuugagggcugguucuucu

SEQ ID NO: 1201204 - RNA, 19 nt, Homo sapiens
  misc_RNA (1)...(19): siRNA sense strand
agucccuacucaagaauga

SEQ ID NO: 1201205 - RNA, 19 nt, Homo sapiens
  misc_RNA (1)...(19): siRNA sense strand
gauggcgucgauguagaua

SEQ ID NO: 1201206 - RNA, 19 nt, Homo sapiens
  misc_RNA (1)...(19): siRNA sense strand
aaccugaucccaauuugau

SEQ ID NO: 1201207 - RNA, 19 nt, Homo sapiens
  misc_RNA (1)...(19): siRNA sense strand
auccagagauaaaguccuu

SEQ ID NO: 1201208 - RNA, 19 nt, Homo sapiens
  misc_RNA (1)...(19): siRNA sense strand
ccugaucccaauuugauau

SEQ ID NO: 1201209 - RNA, 19 nt, Homo sapiens
  misc_RNA (1)...(19): siRNA sense strand
gggaauuaaauccuuaguc

SEQ ID NO: 1201210 - RNA, 19 nt, Homo sapiens
  misc_RNA (1)...(19): siRNA sense strand
gagauaaaguccuugauga

SEQ ID NO: 1201211 - RNA, 19 nt, Homo sapiens
  misc_RNA (1)...(19): siRNA sense strand
ggaauuaaauccuuagucu

SEQ ID NO: 1201212 - RNA, 19 nt, Homo sapiens
  misc_RNA (1)...(19): siRNA sense strand
gaugaaaccugaucccaau

SEQ ID NO: 1201213 - RNA, 19 nt, Homo sapiens
  misc_RNA (1)...(19): siRNA sense strand
gggauuccauauucaauuu

SEQ ID NO: 1201214 - RNA, 19 nt, Homo sapiens
  misc_RNA (1)...(19): siRNA sense strand
ucacuacaauuccuggaua

SEQ ID NO: 1201215 - RNA, 19 nt, Homo sapiens
  misc_RNA (1)...(19): siRNA sense strand
gagagauggugcuggagua

SEQ ID NO: 1201216 - RNA, 19 nt, Homo sapiens
  misc_RNA (1)...(19): siRNA sense strand
ugugauggaugauacaaua

SEQ ID NO: 1201217 - RNA, 19 nt, Homo sapiens
  misc_RNA (1)...(19): siRNA sense strand
gggagauccuggcaaagua

SEQ ID NO: 1201218 - RNA, 19 nt, Homo sapiens
  misc_RNA (1)...(19): siRNA sense strand
gaaaccugaucccaauuug

SEQ ID NO: 1201219 - RNA, 19 nt, Homo sapiens
  misc_RNA (1)...(19): siRNA sense strand
uuacguaucuggaaguuau

SEQ ID NO: 1201220 - RNA, 19 nt, Homo sapiens
  misc_RNA (1)...(19): siRNA sense strand
gauaaaguccuugaugaaa

SEQ ID NO: 1201221 - RNA, 19 nt, Homo sapiens
  misc_RNA (1)...(19): siRNA sense strand
gaaaauagcagcugaauac

SEQ ID NO: 1201222 - RNA, 19 nt, Homo sapiens
  misc_RNA (1)...(19): siRNA sense strand
caaccucccucacuacaau

SEQ ID NO: 1201223 - RNA, 19 nt, Homo sapiens
  misc_RNA (1)...(19): siRNA sense strand
uggaaucgcugguuuggaa

SEQ ID NO: 1201224 - RNA, 19 nt, Homo sapiens
  misc_RNA (1)...(19): siRNA sense strand
caaugacucuggcuauuca

SEQ ID NO: 1201225 - RNA, 19 nt, Homo sapiens
  misc_RNA (1)...(19): siRNA sense strand
caauuuccuuuaagaggua

SEQ ID NO: 1201226 - RNA, 19 nt, Homo sapiens
  misc_RNA (1)...(19): siRNA sense strand
gagcauuacauguucuuaa

SEQ ID NO: 1201227 - RNA, 19 nt, Homo sapiens
  misc_RNA (1)...(19): siRNA sense strand
gguaucacauggaucauca

SEQ ID NO: 1201228 - RNA, 19 nt, Homo sapiens
  misc_RNA (1)...(19): siRNA sense strand
ccaaaccaauuacguaucu

SEQ ID NO: 1201229 - RNA, 19 nt, Homo sapiens
  misc_RNA (1)...(19): siRNA sense strand
ggauaaaaguacuguauga

SEQ ID NO: 1201230 - RNA, 19 nt, Homo sapiens
  misc_RNA (1)...(19): siRNA sense strand
gcaaagcaauguggaaucg

SEQ ID NO: 1201231 - RNA, 19 nt, Homo sapiens
  misc_RNA (1)...(19): siRNA sense strand
uaagagguaucacauggau

SEQ ID NO: 1201232 - RNA, 19 nt, Homo sapiens
  misc_RNA (1)...(19): siRNA sense strand
uacaauaagucccuacuca

SEQ ID NO: 1201233 - RNA, 19 nt, Homo sapiens
  misc_RNA (1)...(19): siRNA sense strand
gcguuuggcaguugcauua

SEQ ID NO: 1201234 - RNA, 19 nt, Homo sapiens
  misc_RNA (1)...(19): siRNA sense strand
cauguuggcagcaucuuua

SEQ ID NO: 1201235 - RNA, 19 nt, Homo sapiens
  misc_RNA (1)...(19): siRNA sense strand
gguuuggaauguuugcuaa

SEQ ID NO: 1201236 - RNA, 19 nt, Homo sapiens
  misc_RNA (1)...(19): siRNA sense strand
cuauugggauuccauauuc

SEQ ID NO: 1201237 - RNA, 19 nt, Homo sapiens
  misc_RNA (1)...(19): siRNA sense strand
uggcgucgauguagauauu

SEQ ID NO: 1201238 - RNA, 19 nt, Homo sapiens
  misc_RNA (1)...(19): siRNA sense strand
ggacuggaaaugggucaua

SEQ ID NO: 1201239 - RNA, 19 nt, Homo sapiens
  misc_RNA (1)...(19): siRNA sense strand
auaagucccuacucaagaa

SEQ ID NO: 1201240 - RNA, 19 nt, Homo sapiens
  misc_RNA (1)...(19): siRNA sense strand
uuaugggccucugaauuua

SEQ ID NO: 1201241 - RNA, 19 nt, Homo sapiens
  misc_RNA (1)...(19): siRNA sense strand
uagcugagcauuacauguu

SEQ ID NO: 1201242 - RNA, 19 nt, Homo sapiens
  misc_RNA (1)...(19): siRNA sense strand
gccgggagauccuggcaaa

SEQ ID NO: 1201243 - RNA, 19 nt, Homo sapiens
  misc_RNA (1)...(19): siRNA sense strand
gauggaugauacaauaagu

SEQ ID NO: 1201244 - RNA, 19 nt, Homo sapiens
  misc_RNA (1)...(19): siRNA sense strand
ugaaaccugaucccaauuu

SEQ ID NO: 1201245 - RNA, 19 nt, Homo sapiens
  misc_RNA (1)...(19): siRNA sense strand
uaaaagacuuggacuggaa

SEQ ID NO: 1201246 - RNA, 19 nt, Homo sapiens
  misc_RNA (1)...(19): siRNA sense strand
gaucccaauuugauaugga

SEQ ID NO: 1201247 - RNA, 19 nt, Homo sapiens
  misc_RNA (1)...(19): siRNA sense strand
uagauauuccuaccgauuu

SEQ ID NO: 1201248 - RNA, 19 nt, Homo sapiens
  misc_RNA (1)...(19): siRNA sense strand
aaauagcagcugaauacua

SEQ ID NO: 1201249 - RNA, 19 nt, Homo sapiens
  misc_RNA (1)...(19): siRNA sense strand
gagggcugguucuucugua

SEQ ID NO: 1201250 - RNA, 19 nt, Homo sapiens
  misc_RNA (1)...(19): siRNA sense strand
auuaugggccucugaauuu

SEQ ID NO: 1201251 - RNA, 19 nt, Homo sapiens
  misc_RNA (1)...(19): siRNA sense strand
caauaagucccuacucaag

SEQ ID NO: 1201252 - RNA, 19 nt, Homo sapiens
  misc_RNA (1)...(19): siRNA sense strand
ucgcugguuuggaauguuu

SEQ ID NO: 1201253 - RNA, 19 nt, Homo sapiens
  misc_RNA (1)...(19): siRNA sense strand
ggagauccuggcaaaguau

SEQ ID NO: 1201254 - RNA, 19 nt, Homo sapiens
  misc_RNA (1)...(19): siRNA sense strand
gcagcugaauacuaugaca

SEQ ID NO: 1201255 - RNA, 19 nt, Homo sapiens
  misc_RNA (1)...(19): siRNA sense strand
uugcuaaucuuccuauugg

SEQ ID NO: 1201256 - RNA, 19 nt, Homo sapiens
  misc_RNA (1)...(19): siRNA sense strand
cacuacaauuccuggauaa

SEQ ID NO: 1201257 - RNA, 19 nt, Homo sapiens
  misc_RNA (1)...(19): siRNA sense strand
gacuggaaaugggucauau

SEQ ID NO: 1201258 - RNA, 19 nt, Homo sapiens
  misc_RNA (1)...(19): siRNA sense strand
cauuacauguucuuaaagg

SEQ ID NO: 1201259 - RNA, 19 nt, Homo sapiens
  misc_RNA (1)...(19): siRNA sense strand
gcacccaauuucuggacau

SEQ ID NO: 1201260 - RNA, 19 nt, Homo sapiens
  misc_RNA (1)...(19): siRNA sense strand
gagcugauggcgucgaugu

SEQ ID NO: 1201261 - RNA, 19 nt, Homo sapiens
  misc_RNA (1)...(19): siRNA sense strand
aauguggaaucgcugguuu

SEQ ID NO: 1201262 - RNA, 19 nt, Homo sapiens
  misc_RNA (1)...(19): siRNA sense strand
agauaaaguccuugaugaa

SEQ ID NO: 1201263 - RNA, 19 nt, Homo sapiens
  misc_RNA (1)...(19): siRNA sense strand
gaaugaagaggcaccaaaa

SEQ ID NO: 1201264 - RNA, 19 nt, Homo sapiens
  misc_RNA (1)...(19): siRNA sense strand
agagauaaaguccuugaug

SEQ ID NO: 1201265 - RNA, 19 nt, Homo sapiens
  misc_RNA (1)...(19): siRNA sense strand
ccagagauaaaguccuuga

SEQ ID NO: 1201266 - RNA, 19 nt, Homo sapiens
  misc_RNA (1)...(19): siRNA sense strand
gggccucugaauuuacuua

SEQ ID NO: 1201267 - RNA, 19 nt, Homo sapiens
  misc_RNA (1)...(19): siRNA sense strand
uggaauguuugcuaaucuu

SEQ ID NO: 1201268 - RNA, 19 nt, Homo sapiens
  misc_RNA (1)...(19): siRNA sense strand
auaaaguccuugaugaaac

SEQ ID NO: 1201269 - RNA, 19 nt, Homo sapiens
  misc_RNA (1)...(19): siRNA sense strand
ggaaaauagcagcugaaua

SEQ ID NO: 1201270 - RNA, 19 nt, Homo sapiens
  misc_RNA (1)...(19): siRNA sense strand
uauuaugggccucugaauu

SEQ ID NO: 1201271 - RNA, 19 nt, Homo sapiens
  misc_RNA (1)...(19): siRNA sense strand
guucuuaaagggucaugaa

SEQ ID NO: 1201272 - RNA, 19 nt, Homo sapiens
  misc_RNA (1)...(19): siRNA sense strand
ccuauugggauuccauauu

SEQ ID NO: 1201273 - RNA, 19 nt, Homo sapiens
  misc_RNA (1)...(19): siRNA sense strand
ugaugguucucacccaguu

SEQ ID NO: 1201274 - RNA, 19 nt, Homo sapiens
  misc_RNA (1)...(19): siRNA sense strand
agagguaucacauggauca

SEQ ID NO: 1201275 - RNA, 19 nt, Homo sapiens
  misc_RNA (1)...(19): siRNA sense strand
ggaauguuugcuaaucuuc

SEQ ID NO: 1201276 - RNA, 19 nt, Homo sapiens
  misc_RNA (1)...(19): siRNA sense strand
agaaugaagaggcaccaaa

SEQ ID NO: 1201277 - RNA, 19 nt, Homo sapiens
  misc_RNA (1)...(19): siRNA sense strand
augacaaccucccucacua

SEQ ID NO: 1201278 - RNA, 19 nt, Homo sapiens
  misc_RNA (1)...(19): siRNA sense strand
uagcagcugaauacuauga

SEQ ID NO: 1201279 - RNA, 19 nt, Homo sapiens
  misc_RNA (1)...(19): siRNA sense strand
cccaauuugauauggauua

SEQ ID NO: 1201280 - RNA, 19 nt, Homo sapiens
  misc_RNA (1)...(19): siRNA sense strand
ugacucuggcuauucauga

SEQ ID NO: 1201281 - RNA, 19 nt, Homo sapiens
  misc_RNA (1)...(19): siRNA sense strand
aauaagucccuacucaaga

SEQ ID NO: 1201282 - RNA, 19 nt, Homo sapiens
  misc_RNA (1)...(19): siRNA sense strand
ccuaugcguuuggcaguug

SEQ ID NO: 1201283 - RNA, 19 nt, Homo sapiens
  misc_RNA (1)...(19): siRNA sense strand
guuggcagcaucuuuacuu

SEQ ID NO: 1201284 - RNA, 19 nt, Homo sapiens
  misc_RNA (1)...(19): siRNA sense strand
uaaaguccuugaugaaacc

SEQ ID NO: 1201285 - RNA, 19 nt, Homo sapiens
  misc_RNA (1)...(19): siRNA sense strand
acaauaagucccuacucaa

SEQ ID NO: 1201286 - RNA, 19 nt, Homo sapiens
  misc_RNA (1)...(19): siRNA sense strand
uucaugagauugcccacaa

SEQ ID NO: 1201287 - RNA, 19 nt, Homo sapiens
  misc_RNA (1)...(19): siRNA sense strand
aaaccugaucccaauuuga

SEQ ID NO: 1201288 - RNA, 19 nt, Homo sapiens
  misc_RNA (1)...(19): siRNA sense strand
ucaaugacucuggcuauuc

SEQ ID NO: 1201289 - RNA, 19 nt, Homo sapiens
  misc_RNA (1)...(19): siRNA sense strand
guucuucuguaccgcuuuc

SEQ ID NO: 1201290 - RNA, 19 nt, Homo sapiens
  misc_RNA (1)...(19): siRNA sense strand
gugauggaugauacaauaa

SEQ ID NO: 1201291 - RNA, 19 nt, Homo sapiens
  misc_RNA (1)...(19): siRNA sense strand
uggcacaggucacuuuuga

SEQ ID NO: 1201292 - RNA, 19 nt, Homo sapiens
  misc_RNA (1)...(19): siRNA sense strand
gaaucgcugguuuggaaug

SEQ ID NO: 1201293 - RNA, 19 nt, Homo sapiens
  misc_RNA (1)...(19): siRNA sense strand
cucaaugacucuggcuauu

SEQ ID NO: 1201294 - RNA, 19 nt, Homo sapiens
  misc_RNA (1)...(19): siRNA sense strand
gcugauggcgucgauguag

SEQ ID NO: 1201295 - RNA, 19 nt, Homo sapiens
  misc_RNA (1)...(19): siRNA sense strand
gacaaccucccucacuaca

SEQ ID NO: 1201296 - RNA, 19 nt, Homo sapiens
  misc_RNA (1)...(19): siRNA sense strand
cccaauuucuggacauuuu

SEQ ID NO: 1201297 - RNA, 19 nt, Homo sapiens
  misc_RNA (1)...(19): siRNA sense strand
cacccaauuucuggacauu

SEQ ID NO: 1201298 - RNA, 19 nt, Homo sapiens
  misc_RNA (1)...(19): siRNA sense strand
gcauuacauguucuuaaag

SEQ ID NO: 1201299 - RNA, 19 nt, Homo sapiens
  misc_RNA (1)...(19): siRNA sense strand
uuugagggcugguucuucu

SEQ ID NO: 1201300 - RNA, 19 nt, Homo sapiens
  misc_RNA (1)...(19): siRNA sense strand
agucccuacucaagaauga

SEQ ID NO: 1201301 - RNA, 19 nt, Homo sapiens
  misc_RNA (1)...(19): siRNA sense strand
gauggcgucgauguagaua

SEQ ID NO: 1201302 - RNA, 19 nt, Homo sapiens
  misc_RNA (1)...(19): siRNA sense strand
aaccugaucccaauuugau

SEQ ID NO: 1201303 - RNA, 19 nt, Homo sapiens
  misc_RNA (1)...(19): siRNA sense strand
auccagagauaaaguccuu

SEQ ID NO: 1201304 - RNA, 19 nt, Homo sapiens
  misc_RNA (1)...(19): siRNA sense strand
ccugaucccaauuugauau

SEQ ID NO: 1201305 - RNA, 19 nt, Homo sapiens
  misc_RNA (1)...(19): siRNA sense strand
gggaauuaaauccuuaguc

SEQ ID NO: 1201306 - RNA, 19 nt, Homo sapiens
  misc_RNA (1)...(19): siRNA sense strand
gaagauuacucagagauua

SEQ ID NO: 1201307 - RNA, 19 nt, Homo sapiens
  misc_RNA (1)...(19): siRNA sense strand
gcucaucucugcaggguuu

SEQ ID NO: 1201308 - RNA, 19 nt, Homo sapiens
  misc_RNA (1)...(19): siRNA sense strand
ggaaucaacuacccaggaa

SEQ ID NO: 1201309 - RNA, 19 nt, Homo sapiens
  misc_RNA (1)...(19): siRNA sense strand
gaucaucuggaccauauaa

SEQ ID NO: 1201310 - RNA, 19 nt, Homo sapiens
  misc_RNA (1)...(19): siRNA sense strand
cauaugagccaccuucuga

SEQ ID NO: 1201311 - RNA, 19 nt, Homo sapiens
  misc_RNA (1)...(19): siRNA sense strand
gacuggagauugggacaua

SEQ ID NO: 1201312 - RNA, 19 nt, Homo sapiens
  misc_RNA (1)...(19): siRNA sense strand
ggaagauuacucagagauu

SEQ ID NO: 1201313 - RNA, 19 nt, Homo sapiens
  misc_RNA (1)...(19): siRNA sense strand
gaaacagaagaugagauua

SEQ ID NO: 1201314 - RNA, 19 nt, Homo sapiens
  misc_RNA (1)...(19): siRNA sense strand
agaaacagaagaugagauu

SEQ ID NO: 1201315 - RNA, 19 nt, Homo sapiens
  misc_RNA (1)...(19): siRNA sense strand
cagugugucuccagcuuaa

SEQ ID NO: 1201316 - RNA, 19 nt, Homo sapiens
  misc_RNA (1)...(19): siRNA sense strand
caggguuuguggcuguuua

SEQ ID NO: 1201317 - RNA, 19 nt, Homo sapiens
  misc_RNA (1)...(19): siRNA sense strand
gaaacaggagaaucagugu

SEQ ID NO: 1201318 - RNA, 19 nt, Homo sapiens
  misc_RNA (1)...(19): siRNA sense strand
gauuaugccugagguugug

SEQ ID NO: 1201319 - RNA, 19 nt, Homo sapiens
  misc_RNA (1)...(19): siRNA sense strand
caucuggaccauauaauuc

SEQ ID NO: 1201320 - RNA, 19 nt, Homo sapiens
  misc_RNA (1)...(19): siRNA sense strand
aacagaagaugagauuaug

SEQ ID NO: 1201321 - RNA, 19 nt, Homo sapiens
  misc_RNA (1)...(19): siRNA sense strand
ggaaaaggaagauuacuca

SEQ ID NO: 1201322 - RNA, 19 nt, Homo sapiens
  misc_RNA (1)...(19): siRNA sense strand
ucaucuggaccauauaauu

SEQ ID NO: 1201323 - RNA, 19 nt, Homo sapiens
  misc_RNA (1)...(19): siRNA sense strand
gacccuagacuggagauug

SEQ ID NO: 1201324 - RNA, 19 nt, Homo sapiens
  misc_RNA (1)...(19): siRNA sense strand
gcuuaagucuggugcucau

SEQ ID NO: 1201325 - RNA, 19 nt, Homo sapiens
  misc_RNA (1)...(19): siRNA sense strand
gaaucaacuacccaggaaa

SEQ ID NO: 1201326 - RNA, 19 nt, Homo sapiens
  misc_RNA (1)...(19): siRNA sense strand
ucagugugucuccagcuua

SEQ ID NO: 1201327 - RNA, 19 nt, Homo sapiens
  misc_RNA (1)...(19): siRNA sense strand
guaauagaaacagaagaug

SEQ ID NO: 1201328 - RNA, 19 nt, Homo sapiens
  misc_RNA (1)...(19): siRNA sense strand
cccagaaacaggagaauca

SEQ ID NO: 1201329 - RNA, 19 nt, Homo sapiens
  misc_RNA (1)...(19): siRNA sense strand
ccagaccacaacuuccuuu

SEQ ID NO: 1201330 - RNA, 19 nt, Homo sapiens
  misc_RNA (1)...(19): siRNA sense strand
ggagauugggacauaagca

SEQ ID NO: 1201331 - RNA, 19 nt, Homo sapiens
  misc_RNA (1)...(19): siRNA sense strand
uaugagccaccuucugaga

SEQ ID NO: 1201332 - RNA, 19 nt, Homo sapiens
  misc_RNA (1)...(19): siRNA sense strand
aaggaagauuacucagaga

SEQ ID NO: 1201333 - RNA, 19 nt, Homo sapiens
  misc_RNA (1)...(19): siRNA sense strand
gaagauuacucagagauua

SEQ ID NO: 1201334 - RNA, 19 nt, Homo sapiens
  misc_RNA (1)...(19): siRNA sense strand
gcucaucucugcaggguuu

SEQ ID NO: 1201335 - RNA, 19 nt, Homo sapiens
  misc_RNA (1)...(19): siRNA sense strand
ggaaucaacuacccaggaa

SEQ ID NO: 1201336 - RNA, 19 nt, Homo sapiens
  misc_RNA (1)...(19): siRNA sense strand
gaucaucuggaccauauaa

SEQ ID NO: 1201337 - RNA, 19 nt, Homo sapiens
  misc_RNA (1)...(19): siRNA sense strand
cauaugagccaccuucuga

SEQ ID NO: 1201338 - RNA, 19 nt, Homo sapiens
  misc_RNA (1)...(19): siRNA sense strand
gacuggagauugggacaua

SEQ ID NO: 1201339 - RNA, 19 nt, Homo sapiens
  misc_RNA (1)...(19): siRNA sense strand
ggaagauuacucagagauu

SEQ ID NO: 1201340 - RNA, 19 nt, Homo sapiens
  misc_RNA (1)...(19): siRNA sense strand
gaaacagaagaugagauua

SEQ ID NO: 1201341 - RNA, 19 nt, Homo sapiens
  misc_RNA (1)...(19): siRNA sense strand
agaaacagaagaugagauu

SEQ ID NO: 1201342 - RNA, 19 nt, Homo sapiens
  misc_RNA (1)...(19): siRNA sense strand
cagugugucuccagcuuaa

SEQ ID NO: 1201343 - RNA, 19 nt, Homo sapiens
  misc_RNA (1)...(19): siRNA sense strand
caggguuuguggcuguuua

SEQ ID NO: 1201344 - RNA, 19 nt, Homo sapiens
  misc_RNA (1)...(19): siRNA sense strand
gaaacaggagaaucagugu

SEQ ID NO: 1201345 - RNA, 19 nt, Homo sapiens
  misc_RNA (1)...(19): siRNA sense strand
gauuaugccugagguugug

SEQ ID NO: 1201346 - RNA, 19 nt, Homo sapiens
  misc_RNA (1)...(19): siRNA sense strand
caucuggaccauauaauuc

SEQ ID NO: 1201347 - RNA, 19 nt, Homo sapiens
  misc_RNA (1)...(19): siRNA sense strand
aacagaagaugagauuaug

SEQ ID NO: 1201348 - RNA, 19 nt, Homo sapiens
  misc_RNA (1)...(19): siRNA sense strand
ggaaaaggaagauuacuca

SEQ ID NO: 1201349 - RNA, 19 nt, Homo sapiens
  misc_RNA (1)...(19): siRNA sense strand
ucaucuggaccauauaauu

SEQ ID NO: 1201350 - RNA, 19 nt, Homo sapiens
  misc_RNA (1)...(19): siRNA sense strand
gacccuagacuggagauug

SEQ ID NO: 1201351 - RNA, 19 nt, Homo sapiens
  misc_RNA (1)...(19): siRNA sense strand
gcuuaagucuggugcucau

SEQ ID NO: 1201352 - RNA, 19 nt, Homo sapiens
  misc_RNA (1)...(19): siRNA sense strand
gaaucaacuacccaggaaa

SEQ ID NO: 1201353 - RNA, 19 nt, Homo sapiens
  misc_RNA (1)...(19): siRNA sense strand
ucagugugucuccagcuua

SEQ ID NO: 1201354 - RNA, 19 nt, Homo sapiens
  misc_RNA (1)...(19): siRNA sense strand
guaauagaaacagaagaug

SEQ ID NO: 1201355 - RNA, 19 nt, Homo sapiens
  misc_RNA (1)...(19): siRNA sense strand
cccagaaacaggagaauca

SEQ ID NO: 1201356 - RNA, 19 nt, Homo sapiens
  misc_RNA (1)...(19): siRNA sense strand
ccagaccacaacuuccuuu

SEQ ID NO: 1201357 - RNA, 19 nt, Homo sapiens
  misc_RNA (1)...(19): siRNA sense strand
ggagauugggacauaagca

SEQ ID NO: 1201358 - RNA, 19 nt, Homo sapiens
  misc_RNA (1)...(19): siRNA sense strand
uaugagccaccuucugaga

SEQ ID NO: 1201359 - RNA, 19 nt, Homo sapiens
  misc_RNA (1)...(19): siRNA sense strand
aaggaagauuacucagaga

SEQ ID NO: 1201360 - RNA, 19 nt, Homo sapiens
  misc_RNA (1)...(19): siRNA sense strand
ccaagcagcugguggauga

SEQ ID NO: 1201361 - RNA, 19 nt, Homo sapiens
  misc_RNA (1)...(19): siRNA sense strand
gagaagaucuggaacucau

SEQ ID NO: 1201362 - RNA, 19 nt, Homo sapiens
  misc_RNA (1)...(19): siRNA sense strand
ccaagaagcugcgguucaa

SEQ ID NO: 1201363 - RNA, 19 nt, Homo sapiens
  misc_RNA (1)...(19): siRNA sense strand
gaagaaacccgagcuugug

SEQ ID NO: 1201364 - RNA, 19 nt, Homo sapiens
  misc_RNA (1)...(19): siRNA sense strand
ggaagccacugugcaugaa

SEQ ID NO: 1201365 - RNA, 19 nt, Homo sapiens
  misc_RNA (1)...(19): siRNA sense strand
gcaugaaccaguacuauca

SEQ ID NO: 1201366 - RNA, 19 nt, Homo sapiens
  misc_RNA (1)...(19): siRNA sense strand
acaacacccucaucaaaga

SEQ ID NO: 1201367 - RNA, 19 nt, Homo sapiens
  misc_RNA (1)...(19): siRNA sense strand
gcuacggugucugcuauaa

SEQ ID NO: 1201368 - RNA, 19 nt, Homo sapiens
  misc_RNA (1)...(19): siRNA sense strand
ggacacagucagcaacuuc

SEQ ID NO: 1201369 - RNA, 19 nt, Homo sapiens
  misc_RNA (1)...(19): siRNA sense strand
gaaccaguacuaucagauc

SEQ ID NO: 1201370 - RNA, 19 nt, Homo sapiens
  misc_RNA (1)...(19): siRNA sense strand
auacaacacccucaucaaa

SEQ ID NO: 1201371 - RNA, 19 nt, Homo sapiens
  misc_RNA (1)...(19): siRNA sense strand
gggaagccacugugcauga

SEQ ID NO: 1201372 - RNA, 19 nt, Homo sapiens
  misc_RNA (1)...(19): siRNA sense strand
gucagcaacuucagcaaga

SEQ ID NO: 1201373 - RNA, 19 nt, Homo sapiens
  misc_RNA (1)...(19): siRNA sense strand
ccaguacuaucagaucuug

SEQ ID NO: 1201374 - RNA, 19 nt, Homo sapiens
  misc_RNA (1)...(19): siRNA sense strand
gcauacaacacccucauca

SEQ ID NO: 1201375 - RNA, 19 nt, Homo sapiens
  misc_RNA (1)...(19): siRNA sense strand
gcaugugccaccuaugaaa

SEQ ID NO: 1201376 - RNA, 19 nt, Homo sapiens
  misc_RNA (1)...(19): siRNA sense strand
aagcagaaccucagcauca

SEQ ID NO: 1201377 - RNA, 19 nt, Homo sapiens
  misc_RNA (1)...(19): siRNA sense strand
aagcugcgguucaacauca

SEQ ID NO: 1201378 - RNA, 19 nt, Homo sapiens
  misc_RNA (1)...(19): siRNA sense strand
agaaggcgcuccuggacau

SEQ ID NO: 1201379 - RNA, 19 nt, Homo sapiens
  misc_RNA (1)...(19): siRNA sense strand
ggauuucaaggucaugauu

SEQ ID NO: 1201380 - RNA, 19 nt, Homo sapiens
  misc_RNA (1)...(19): siRNA sense strand
cggcuacggugucugcuau

SEQ ID NO: 1201381 - RNA, 19 nt, Homo sapiens
  misc_RNA (1)...(19): siRNA sense strand
gagaagcuaagcccagaug

SEQ ID NO: 1201382 - RNA, 19 nt, Homo sapiens
  misc_RNA (1)...(19): siRNA sense strand
gaggguguguuggauuuca

SEQ ID NO: 1201383 - RNA, 19 nt, Homo sapiens
  misc_RNA (1)...(19): siRNA sense strand
uugaggguguguuggauuu

SEQ ID NO: 1201384 - RNA, 19 nt, Homo sapiens
  misc_RNA (1)...(19): siRNA sense strand
cuuugcagcuggccuacua

SEQ ID NO: 1201385 - RNA, 19 nt, Homo sapiens
  misc_RNA (1)...(19): siRNA sense strand
ucaccgugguacacaacua

SEQ ID NO: 1201386 - RNA, 19 nt, Homo sapiens
  misc_RNA (1)...(19): siRNA sense strand
gcagcugguggaugaguuu

SEQ ID NO: 1201387 - RNA, 19 nt, Homo sapiens
  misc_RNA (1)...(19): siRNA sense strand
cagaaccucagcaucauga

SEQ ID NO: 1201388 - RNA, 19 nt, Homo sapiens
  misc_RNA (1)...(19): siRNA sense strand
ucacggagcaccagaaggu

SEQ ID NO: 1201389 - RNA, 19 nt, Homo sapiens
  misc_RNA (1)...(19): siRNA sense strand
ccaggaagacggagaacug

SEQ ID NO: 1201390 - RNA, 19 nt, Homo sapiens
  misc_RNA (1)...(19): siRNA sense strand
gaaccucagcaucaugauc

SEQ ID NO: 1201391 - RNA, 19 nt, Homo sapiens
  misc_RNA (1)...(19): siRNA sense strand
gcagggucagcuccgauuu

SEQ ID NO: 1201392 - RNA, 19 nt, Homo sapiens
  misc_RNA (1)...(19): siRNA sense strand
cagacugugucauguucuu

SEQ ID NO: 1201393 - RNA, 19 nt, Homo sapiens
  misc_RNA (1)...(19): siRNA sense strand
caagagcgacaucgagaag

SEQ ID NO: 1201394 - RNA, 19 nt, Homo sapiens
  misc_RNA (1)...(19): siRNA sense strand
gcagaaccucagcaucaug

SEQ ID NO: 1201395 - RNA, 19 nt, Homo sapiens
  misc_RNA (1)...(19): siRNA sense strand
gccagccuguggucaucua

SEQ ID NO: 1201396 - RNA, 19 nt, Homo sapiens
  misc_RNA (1)...(19): siRNA sense strand
gauuucaaggucaugauug

SEQ ID NO: 1201397 - RNA, 19 nt, Homo sapiens
  misc_RNA (1)...(19): siRNA sense strand
ucgagaaggccaagcagaa

SEQ ID NO: 1201398 - RNA, 19 nt, Homo sapiens
  misc_RNA (1)...(19): siRNA sense strand
ggagaagaucuggaacuca

SEQ ID NO: 1201399 - RNA, 19 nt, Homo sapiens
  misc_RNA (1)...(19): siRNA sense strand
uggacucacucaccuuugu

SEQ ID NO: 1201400 - RNA, 19 nt, Homo sapiens
  misc_RNA (1)...(19): siRNA sense strand
cauggacucacucaccuuu

SEQ ID NO: 1201401 - RNA, 19 nt, Homo sapiens
  misc_RNA (1)...(19): siRNA sense strand
acucaucccuacagaccaa

SEQ ID NO: 1201402 - RNA, 19 nt, Homo sapiens
  misc_RNA (1)...(19): siRNA sense strand
gcacaucaccgugguacac

SEQ ID NO: 1201403 - RNA, 19 nt, Homo sapiens
  misc_RNA (1)...(19): siRNA sense strand
ccauggaggcccacaucaa

SEQ ID NO: 1201404 - RNA, 19 nt, Homo sapiens
  misc_RNA (1)...(19): siRNA sense strand
gaagcugcgguucaacauc

SEQ ID NO: 1201405 - RNA, 19 nt, Homo sapiens
  misc_RNA (1)...(19): siRNA sense strand
gagaacuggcugucugagu

SEQ ID NO: 1201406 - RNA, 19 nt, Homo sapiens
  misc_RNA (1)...(19): siRNA sense strand
gugcaugaaccaguacuau

SEQ ID NO: 1201407 - RNA, 19 nt, Homo sapiens
  misc_RNA (1)...(19): siRNA sense strand
cauacaacacccucaucaa

SEQ ID NO: 1201408 - RNA, 19 nt, Homo sapiens
  misc_RNA (1)...(19): siRNA sense strand
uggagaagaucuggaacuc

SEQ ID NO: 1201409 - RNA, 19 nt, Homo sapiens
  misc_RNA (1)...(19): siRNA sense strand
gaucuacggacaggcaugu

SEQ ID NO: 1201410 - RNA, 19 nt, Homo sapiens
  misc_RNA (1)...(19): siRNA sense strand
ucaagagcgacaucgagaa

SEQ ID NO: 1201411 - RNA, 19 nt, Homo sapiens
  misc_RNA (1)...(19): siRNA sense strand
uacaacacccucaucaaag

SEQ ID NO: 1201412 - RNA, 19 nt, Homo sapiens
  misc_RNA (1)...(19): siRNA sense strand
aagcccuucuccuugauga

SEQ ID NO: 1201413 - RNA, 19 nt, Homo sapiens
  misc_RNA (1)...(19): siRNA sense strand
ccaagcagcugguggauga

SEQ ID NO: 1201414 - RNA, 19 nt, Homo sapiens
  misc_RNA (1)...(19): siRNA sense strand
gagaagaucuggaacucau

SEQ ID NO: 1201415 - RNA, 19 nt, Homo sapiens
  misc_RNA (1)...(19): siRNA sense strand
ccaagaagcugcgguucaa

SEQ ID NO: 1201416 - RNA, 19 nt, Homo sapiens
  misc_RNA (1)...(19): siRNA sense strand
gaagaaacccgagcuugug

SEQ ID NO: 1201417 - RNA, 19 nt, Homo sapiens
  misc_RNA (1)...(19): siRNA sense strand
ggaagccacugugcaugaa

SEQ ID NO: 1201418 - RNA, 19 nt, Homo sapiens
  misc_RNA (1)...(19): siRNA sense strand
gcaugaaccaguacuauca

SEQ ID NO: 1201419 - RNA, 19 nt, Homo sapiens
  misc_RNA (1)...(19): siRNA sense strand
acaacacccucaucaaaga

SEQ ID NO: 1201420 - RNA, 19 nt, Homo sapiens
  misc_RNA (1)...(19): siRNA sense strand
gcuacggugucugcuauaa

SEQ ID NO: 1201421 - RNA, 19 nt, Homo sapiens
  misc_RNA (1)...(19): siRNA sense strand
ggacacagucagcaacuuc

SEQ ID NO: 1201422 - RNA, 19 nt, Homo sapiens
  misc_RNA (1)...(19): siRNA sense strand
gaaccaguacuaucagauc

SEQ ID NO: 1201423 - RNA, 19 nt, Homo sapiens
  misc_RNA (1)...(19): siRNA sense strand
auacaacacccucaucaaa

SEQ ID NO: 1201424 - RNA, 19 nt, Homo sapiens
  misc_RNA (1)...(19): siRNA sense strand
gggaagccacugugcauga

SEQ ID NO: 1201425 - RNA, 19 nt, Homo sapiens
  misc_RNA (1)...(19): siRNA sense strand
gucagcaacuucagcaaga

SEQ ID NO: 1201426 - RNA, 19 nt, Homo sapiens
  misc_RNA (1)...(19): siRNA sense strand
ccaguacuaucagaucuug

SEQ ID NO: 1201427 - RNA, 19 nt, Homo sapiens
  misc_RNA (1)...(19): siRNA sense strand
gcauacaacacccucauca

SEQ ID NO: 1201428 - RNA, 19 nt, Homo sapiens
  misc_RNA (1)...(19): siRNA sense strand
gcaugugccaccuaugaaa

SEQ ID NO: 1201429 - RNA, 19 nt, Homo sapiens
  misc_RNA (1)...(19): siRNA sense strand
aagcagaaccucagcauca

SEQ ID NO: 1201430 - RNA, 19 nt, Homo sapiens
  misc_RNA (1)...(19): siRNA sense strand
aagcugcgguucaacauca

SEQ ID NO: 1201431 - RNA, 19 nt, Homo sapiens
  misc_RNA (1)...(19): siRNA sense strand
agaaggcgcuccuggacau

SEQ ID NO: 1201432 - RNA, 19 nt, Homo sapiens
  misc_RNA (1)...(19): siRNA sense strand
ggauuucaaggucaugauu

SEQ ID NO: 1201433 - RNA, 19 nt, Homo sapiens
  misc_RNA (1)...(19): siRNA sense strand
cggcuacggugucugcuau

SEQ ID NO: 1201434 - RNA, 19 nt, Homo sapiens
  misc_RNA (1)...(19): siRNA sense strand
gagaagcuaagcccagaug

SEQ ID NO: 1201435 - RNA, 19 nt, Homo sapiens
  misc_RNA (1)...(19): siRNA sense strand
gaggguguguuggauuuca

SEQ ID NO: 1201436 - RNA, 19 nt, Homo sapiens
  misc_RNA (1)...(19): siRNA sense strand
uugaggguguguuggauuu

SEQ ID NO: 1201437 - RNA, 19 nt, Homo sapiens
  misc_RNA (1)...(19): siRNA sense strand
cuuugcagcuggccuacua

SEQ ID NO: 1201438 - RNA, 19 nt, Homo sapiens
  misc_RNA (1)...(19): siRNA sense strand
gcagcugguggaugaguuu

SEQ ID NO: 1201439 - RNA, 19 nt, Homo sapiens
  misc_RNA (1)...(19): siRNA sense strand
ucaccgugguacacaacua

SEQ ID NO: 1201440 - RNA, 19 nt, Homo sapiens
  misc_RNA (1)...(19): siRNA sense strand
cagaaccucagcaucauga

SEQ ID NO: 1201441 - RNA, 19 nt, Homo sapiens
  misc_RNA (1)...(19): siRNA sense strand
ccaggaagacggagaacug

SEQ ID NO: 1201442 - RNA, 19 nt, Homo sapiens
  misc_RNA (1)...(19): siRNA sense strand
ucacggagcaccagaaggu

SEQ ID NO: 1201443 - RNA, 19 nt, Homo sapiens
  misc_RNA (1)...(19): siRNA sense strand
gaaccucagcaucaugauc

SEQ ID NO: 1201444 - RNA, 19 nt, Homo sapiens
  misc_RNA (1)...(19): siRNA sense strand
gcagggucagcuccgauuu

SEQ ID NO: 1201445 - RNA, 19 nt, Homo sapiens
  misc_RNA (1)...(19): siRNA sense strand
cagacugugucauguucuu

SEQ ID NO: 1201446 - RNA, 19 nt, Homo sapiens
  misc_RNA (1)...(19): siRNA sense strand
caagagcgacaucgagaag

SEQ ID NO: 1201447 - RNA, 19 nt, Homo sapiens
  misc_RNA (1)...(19): siRNA sense strand
gcagaaccucagcaucaug

SEQ ID NO: 1201448 - RNA, 19 nt, Homo sapiens
  misc_RNA (1)...(19): siRNA sense strand
gccagccuguggucaucua

SEQ ID NO: 1201449 - RNA, 19 nt, Homo sapiens
  misc_RNA (1)...(19): siRNA sense strand
gauuucaaggucaugauug

SEQ ID NO: 1201450 - RNA, 19 nt, Homo sapiens
  misc_RNA (1)...(19): siRNA sense strand
ucgagaaggccaagcagaa

SEQ ID NO: 1201451 - RNA, 19 nt, Homo sapiens
  misc_RNA (1)...(19): siRNA sense strand
ggagaagaucuggaacuca

SEQ ID NO: 1201452 - RNA, 19 nt, Homo sapiens
  misc_RNA (1)...(19): siRNA sense strand
uggacucacucaccuuugu

SEQ ID NO: 1201453 - RNA, 19 nt, Homo sapiens
  misc_RNA (1)...(19): siRNA sense strand
cauggacucacucaccuuu

SEQ ID NO: 1201454 - RNA, 19 nt, Homo sapiens
  misc_RNA (1)...(19): siRNA sense strand
acucaucccuacagaccaa

SEQ ID NO: 1201455 - RNA, 19 nt, Homo sapiens
  misc_RNA (1)...(19): siRNA sense strand
gcacaucaccgugguacac

SEQ ID NO: 1201456 - RNA, 19 nt, Homo sapiens
  misc_RNA (1)...(19): siRNA sense strand
ccauggaggcccacaucaa

SEQ ID NO: 1201457 - RNA, 19 nt, Homo sapiens
  misc_RNA (1)...(19): siRNA sense strand
gagaacuggcugucugagu

SEQ ID NO: 1201458 - RNA, 19 nt, Homo sapiens
  misc_RNA (1)...(19): siRNA sense strand
gaagcugcgguucaacauc

SEQ ID NO: 1201459 - RNA, 19 nt, Homo sapiens
  misc_RNA (1)...(19): siRNA sense strand
gugcaugaaccaguacuau

SEQ ID NO: 1201460 - RNA, 19 nt, Homo sapiens
  misc_RNA (1)...(19): siRNA sense strand
cauacaacacccucaucaa

SEQ ID NO: 1201461 - RNA, 19 nt, Homo sapiens
  misc_RNA (1)...(19): siRNA sense strand
uggagaagaucuggaacuc

SEQ ID NO: 1201462 - RNA, 19 nt, Homo sapiens
  misc_RNA (1)...(19): siRNA sense strand
gaucuacggacaggcaugu

SEQ ID NO: 1201463 - RNA, 19 nt, Homo sapiens
  misc_RNA (1)...(19): siRNA sense strand
ucaagagcgacaucgagaa

SEQ ID NO: 1201464 - RNA, 19 nt, Homo sapiens
  misc_RNA (1)...(19): siRNA sense strand
uacaacacccucaucaaag

SEQ ID NO: 1201465 - RNA, 19 nt, Homo sapiens
  misc_RNA (1)...(19): siRNA sense strand
ccaagcagcugguggauga

SEQ ID NO: 1201466 - RNA, 19 nt, Homo sapiens
  misc_RNA (1)...(19): siRNA sense strand
gagaagaucuggaacucau

SEQ ID NO: 1201467 - RNA, 19 nt, Homo sapiens
  misc_RNA (1)...(19): siRNA sense strand
ccaagaagcugcgguucaa

SEQ ID NO: 1201468 - RNA, 19 nt, Homo sapiens
  misc_RNA (1)...(19): siRNA sense strand
gaagaaacccgagcuugug

SEQ ID NO: 1201469 - RNA, 19 nt, Homo sapiens
  misc_RNA (1)...(19): siRNA sense strand
ggaagccacugugcaugaa

SEQ ID NO: 1201470 - RNA, 19 nt, Homo sapiens
  misc_RNA (1)...(19): siRNA sense strand
gcaugaaccaguacuauca

SEQ ID NO: 1201471 - RNA, 19 nt, Homo sapiens
  misc_RNA (1)...(19): siRNA sense strand
acaacacccucaucaaaga

SEQ ID NO: 1201472 - RNA, 19 nt, Homo sapiens
  misc_RNA (1)...(19): siRNA sense strand
gcuacggugucugcuauaa

SEQ ID NO: 1201473 - RNA, 19 nt, Homo sapiens
  misc_RNA (1)...(19): siRNA sense strand
ggacacagucagcaacuuc

SEQ ID NO: 1201474 - RNA, 19 nt, Homo sapiens
  misc_RNA (1)...(19): siRNA sense strand
gaaccaguacuaucagauc

SEQ ID NO: 1201475 - RNA, 19 nt, Homo sapiens
  misc_RNA (1)...(19): siRNA sense strand
auacaacacccucaucaaa

SEQ ID NO: 1201476 - RNA, 19 nt, Homo sapiens
  misc_RNA (1)...(19): siRNA sense strand
gggaagccacugugcauga

SEQ ID NO: 1201477 - RNA, 19 nt, Homo sapiens
  misc_RNA (1)...(19): siRNA sense strand
gucagcaacuucagcaaga

SEQ ID NO: 1201478 - RNA, 19 nt, Homo sapiens
  misc_RNA (1)...(19): siRNA sense strand
ccaguacuaucagaucuug

SEQ ID NO: 1201479 - RNA, 19 nt, Homo sapiens
  misc_RNA (1)...(19): siRNA sense strand
gcauacaacacccucauca

SEQ ID NO: 1201480 - RNA, 19 nt, Homo sapiens
  misc_RNA (1)...(19): siRNA sense strand
gcaugugccaccuaugaaa

SEQ ID NO: 1201481 - RNA, 19 nt, Homo sapiens
  misc_RNA (1)...(19): siRNA sense strand
aagcagaaccucagcauca

SEQ ID NO: 1201482 - RNA, 19 nt, Homo sapiens
  misc_RNA (1)...(19): siRNA sense strand
aagcugcgguucaacauca

SEQ ID NO: 1201483 - RNA, 19 nt, Homo sapiens
  misc_RNA (1)...(19): siRNA sense strand
agaaggcgcuccuggacau

SEQ ID NO: 1201484 - RNA, 19 nt, Homo sapiens
  misc_RNA (1)...(19): siRNA sense strand
ggauuucaaggucaugauu

SEQ ID NO: 1201485 - RNA, 19 nt, Homo sapiens
  misc_RNA (1)...(19): siRNA sense strand
cggcuacggugucugcuau

SEQ ID NO: 1201486 - RNA, 19 nt, Homo sapiens
  misc_RNA (1)...(19): siRNA sense strand
gagaagcuaagcccagaug

SEQ ID NO: 1201487 - RNA, 19 nt, Homo sapiens
  misc_RNA (1)...(19): siRNA sense strand
gaggguguguuggauuuca

SEQ ID NO: 1201488 - RNA, 19 nt, Homo sapiens
  misc_RNA (1)...(19): siRNA sense strand
uugaggguguguuggauuu

SEQ ID NO: 1201489 - RNA, 19 nt, Homo sapiens
  misc_RNA (1)...(19): siRNA sense strand
cuuugcagcuggccuacua

SEQ ID NO: 1201490 - RNA, 19 nt, Homo sapiens
  misc_RNA (1)...(19): siRNA sense strand
ucaccgugguacacaacua

SEQ ID NO: 1201491 - RNA, 19 nt, Homo sapiens
  misc_RNA (1)...(19): siRNA sense strand
gcagcugguggaugaguuu

SEQ ID NO: 1201492 - RNA, 19 nt, Homo sapiens
  misc_RNA (1)...(19): siRNA sense strand
cagaaccucagcaucauga

SEQ ID NO: 1201493 - RNA, 19 nt, Homo sapiens
  misc_RNA (1)...(19): siRNA sense strand
ucacggagcaccagaaggu

SEQ ID NO: 1201494 - RNA, 19 nt, Homo sapiens
  misc_RNA (1)...(19): siRNA sense strand
ccaggaagacggagaacug

SEQ ID NO: 1201495 - RNA, 19 nt, Homo sapiens
  misc_RNA (1)...(19): siRNA sense strand
gaaccucagcaucaugauc

SEQ ID NO: 1201496 - RNA, 19 nt, Homo sapiens
  misc_RNA (1)...(19): siRNA sense strand
gcagggucagcuccgauuu

SEQ ID NO: 1201497 - RNA, 19 nt, Homo sapiens
  misc_RNA (1)...(19): siRNA sense strand
cagacugugucauguucuu

SEQ ID NO: 1201498 - RNA, 19 nt, Homo sapiens
  misc_RNA (1)...(19): siRNA sense strand
caagagcgacaucgagaag

SEQ ID NO: 1201499 - RNA, 19 nt, Homo sapiens
  misc_RNA (1)...(19): siRNA sense strand
gcagaaccucagcaucaug

SEQ ID NO: 1201500 - RNA, 19 nt, Homo sapiens
  misc_RNA (1)...(19): siRNA sense strand
gccagccuguggucaucua

SEQ ID NO: 1201501 - RNA, 19 nt, Homo sapiens
  misc_RNA (1)...(19): siRNA sense strand
gauuucaaggucaugauug

SEQ ID NO: 1201502 - RNA, 19 nt, Homo sapiens
  misc_RNA (1)...(19): siRNA sense strand
ucgagaaggccaagcagaa

SEQ ID NO: 1201503 - RNA, 19 nt, Homo sapiens
  misc_RNA (1)...(19): siRNA sense strand
ggagaagaucuggaacuca

SEQ ID NO: 1201504 - RNA, 19 nt, Homo sapiens
  misc_RNA (1)...(19): siRNA sense strand
uggacucacucaccuuugu

SEQ ID NO: 1201505 - RNA, 19 nt, Homo sapiens
  misc_RNA (1)...(19): siRNA sense strand
cauggacucacucaccuuu

SEQ ID NO: 1201506 - RNA, 19 nt, Homo sapiens
  misc_RNA (1)...(19): siRNA sense strand
acucaucccuacagaccaa

SEQ ID NO: 1201507 - RNA, 19 nt, Homo sapiens
  misc_RNA (1)...(19): siRNA sense strand
gcacaucaccgugguacac

SEQ ID NO: 1201508 - RNA, 19 nt, Homo sapiens
  misc_RNA (1)...(19): siRNA sense strand
ccauggaggcccacaucaa

SEQ ID NO: 1201509 - RNA, 19 nt, Homo sapiens
  misc_RNA (1)...(19): siRNA sense strand
gaagcugcgguucaacauc

SEQ ID NO: 1201510 - RNA, 19 nt, Homo sapiens
  misc_RNA (1)...(19): siRNA sense strand
gagaacuggcugucugagu

SEQ ID NO: 1201511 - RNA, 19 nt, Homo sapiens
  misc_RNA (1)...(19): siRNA sense strand
gugcaugaaccaguacuau

SEQ ID NO: 1201512 - RNA, 19 nt, Homo sapiens
  misc_RNA (1)...(19): siRNA sense strand
cauacaacacccucaucaa

SEQ ID NO: 1201513 - RNA, 19 nt, Homo sapiens
  misc_RNA (1)...(19): siRNA sense strand
uggagaagaucuggaacuc

SEQ ID NO: 1201514 - RNA, 19 nt, Homo sapiens
  misc_RNA (1)...(19): siRNA sense strand
gaucuacggacaggcaugu

SEQ ID NO: 1201515 - RNA, 19 nt, Homo sapiens
  misc_RNA (1)...(19): siRNA sense strand
ucaagagcgacaucgagaa

SEQ ID NO: 1201516 - RNA, 19 nt, Homo sapiens
  misc_RNA (1)...(19): siRNA sense strand
uacaacacccucaucaaag

SEQ ID NO: 1201517 - RNA, 19 nt, Homo sapiens
  misc_RNA (1)...(19): siRNA sense strand
aagcccuucuccuugauga

SEQ ID NO: 1201518 - RNA, 19 nt, Homo sapiens
  misc_RNA (1)...(19): siRNA sense strand
gcaaggagauggugcagaa

SEQ ID NO: 1201519 - RNA, 19 nt, Homo sapiens
  misc_RNA (1)...(19): siRNA sense strand
gagaguggguuuccaguau

SEQ ID NO: 1201520 - RNA, 19 nt, Homo sapiens
  misc_RNA (1)...(19): siRNA sense strand
ccaagaugaugaccaagaa

SEQ ID NO: 1201521 - RNA, 19 nt, Homo sapiens
  misc_RNA (1)...(19): siRNA sense strand
caacaucgccugcguuauc

SEQ ID NO: 1201522 - RNA, 19 nt, Homo sapiens
  misc_RNA (1)...(19): siRNA sense strand
cgugaggccuggcguauuu

SEQ ID NO: 1201523 - RNA, 19 nt, Homo sapiens
  misc_RNA (1)...(19): siRNA sense strand
acacacauauucaucauca

SEQ ID NO: 1201524 - RNA, 19 nt, Homo sapiens
  misc_RNA (1)...(19): siRNA sense strand
gacaacaucgccugcguua

SEQ ID NO: 1201525 - RNA, 19 nt, Homo sapiens
  misc_RNA (1)...(19): siRNA sense strand
cagacgagcugaugaagag

SEQ ID NO: 1201526 - RNA, 19 nt, Homo sapiens
  misc_RNA (1)...(19): siRNA sense strand
ucagucggauacacacaua

SEQ ID NO: 1201527 - RNA, 19 nt, Homo sapiens
  misc_RNA (1)...(19): siRNA sense strand
cgggugaccuggccaagaa

SEQ ID NO: 1201528 - RNA, 19 nt, Homo sapiens
  misc_RNA (1)...(19): siRNA sense strand
acaccaagaugaugaccaa

SEQ ID NO: 1201529 - RNA, 19 nt, Homo sapiens
  misc_RNA (1)...(19): siRNA sense strand
gaguggguuuccaguauga

SEQ ID NO: 1201530 - RNA, 19 nt, Homo sapiens
  misc_RNA (1)...(19): siRNA sense strand
cagaugacguccgugauga

SEQ ID NO: 1201531 - RNA, 19 nt, Homo sapiens
  misc_RNA (1)...(19): siRNA sense strand
gcugacauccgcaaacaga

SEQ ID NO: 1201532 - RNA, 19 nt, Homo sapiens
  misc_RNA (1)...(19): siRNA sense strand
gauacacacauauucauca

SEQ ID NO: 1201533 - RNA, 19 nt, Homo sapiens
  misc_RNA (1)...(19): siRNA sense strand
caagcuggaggacuucuuu

SEQ ID NO: 1201534 - RNA, 19 nt, Homo sapiens
  misc_RNA (1)...(19): siRNA sense strand
gcagacgagcugaugaaga

SEQ ID NO: 1201535 - RNA, 19 nt, Homo sapiens
  misc_RNA (1)...(19): siRNA sense strand
agagugagcccuucuucaa

SEQ ID NO: 1201536 - RNA, 19 nt, Homo sapiens
  misc_RNA (1)...(19): siRNA sense strand
ugaccuacggcaacagaua

SEQ ID NO: 1201537 - RNA, 19 nt, Homo sapiens
  misc_RNA (1)...(19): siRNA sense strand
gugcugagauuugccaaca

SEQ ID NO: 1201538 - RNA, 19 nt, Homo sapiens
  misc_RNA (1)...(19): siRNA sense strand
gggcuauuucgaugaauuu

SEQ ID NO: 1201539 - RNA, 19 nt, Homo sapiens
  misc_RNA (1)...(19): siRNA sense strand
ugacguccgugaugagaag

SEQ ID NO: 1201540 - RNA, 19 nt, Homo sapiens
  misc_RNA (1)...(19): siRNA sense strand
gaccugaccuacggcaaca

SEQ ID NO: 1201541 - RNA, 19 nt, Homo sapiens
  misc_RNA (1)...(19): siRNA sense strand
acacauauucaucaucaug

SEQ ID NO: 1201542 - RNA, 19 nt, Homo sapiens
  misc_RNA (1)...(19): siRNA sense strand
ggagccagaugcacuucgu

SEQ ID NO: 1201543 - RNA, 19 nt, Homo sapiens
  misc_RNA (1)...(19): siRNA sense strand
ggauacacacauauucauc

SEQ ID NO: 1201544 - RNA, 19 nt, Homo sapiens
  misc_RNA (1)...(19): siRNA sense strand
ccagggcgaugccuuccau

SEQ ID NO: 1201545 - RNA, 19 nt, Homo sapiens
  misc_RNA (1)...(19): siRNA sense strand
ucagaugacguccgugaug

SEQ ID NO: 1201546 - RNA, 19 nt, Homo sapiens
  misc_RNA (1)...(19): siRNA sense strand
ggaggcagacgagcugaug

SEQ ID NO: 1201547 - RNA, 19 nt, Homo sapiens
  misc_RNA (1)...(19): siRNA sense strand
augagaaggucaagguguu

SEQ ID NO: 1201548 - RNA, 19 nt, Homo sapiens
  misc_RNA (1)...(19): siRNA sense strand
ccacugcugcaccagauug

SEQ ID NO: 1201549 - RNA, 19 nt, Homo sapiens
  misc_RNA (1)...(19): siRNA sense strand
agaguggguuuccaguaug

SEQ ID NO: 1201550 - RNA, 19 nt, Homo sapiens
  misc_RNA (1)...(19): siRNA sense strand
gcguuauccucaccuucaa

SEQ ID NO: 1201551 - RNA, 19 nt, Homo sapiens
  misc_RNA (1)...(19): siRNA sense strand
gaugacguccgugaugaga

SEQ ID NO: 1201552 - RNA, 19 nt, Homo sapiens
  misc_RNA (1)...(19): siRNA sense strand
acgaggccgucaccaagaa

SEQ ID NO: 1201553 - RNA, 19 nt, Homo sapiens
  misc_RNA (1)...(19): siRNA sense strand
gauacaagaacgugaagcu

SEQ ID NO: 1201554 - RNA, 19 nt, Homo sapiens
  misc_RNA (1)...(19): siRNA sense strand
acagauacaagaacgugaa

SEQ ID NO: 1201555 - RNA, 19 nt, Homo sapiens
  misc_RNA (1)...(19): siRNA sense strand
agaaccaccuacugcagau

SEQ ID NO: 1201556 - RNA, 19 nt, Homo sapiens
  misc_RNA (1)...(19): siRNA sense strand
agagaguggguuuccagua

SEQ ID NO: 1201557 - RNA, 19 nt, Homo sapiens
  misc_RNA (1)...(19): siRNA sense strand
gugaugagaaggucaaggu

SEQ ID NO: 1201558 - RNA, 19 nt, Homo sapiens
  misc_RNA (1)...(19): siRNA sense strand
ugaugaagagaguggguuu

SEQ ID NO: 1201559 - RNA, 19 nt, Homo sapiens
  misc_RNA (1)...(19): siRNA sense strand
uggcugacauccgcaaaca

SEQ ID NO: 1201560 - RNA, 19 nt, Homo sapiens
  misc_RNA (1)...(19): siRNA sense strand
ccaagcccauccccuauau

SEQ ID NO: 1201561 - RNA, 19 nt, Homo sapiens
  misc_RNA (1)...(19): siRNA sense strand
gaccuggccaagaagaaga

SEQ ID NO: 1201562 - RNA, 19 nt, Homo sapiens
  misc_RNA (1)...(19): siRNA sense strand
gagugagcccuucuucaag

SEQ ID NO: 1201563 - RNA, 19 nt, Homo sapiens
  misc_RNA (1)...(19): siRNA sense strand
cagccgucguccucuaugu

SEQ ID NO: 1201564 - RNA, 19 nt, Homo sapiens
  misc_RNA (1)...(19): siRNA sense strand
uaugagggcaccuacaagu

SEQ ID NO: 1201565 - RNA, 19 nt, Homo sapiens
  misc_RNA (1)...(19): siRNA sense strand
auucacgaguccugcauga

SEQ ID NO: 1201566 - RNA, 19 nt, Homo sapiens
  misc_RNA (1)...(19): siRNA sense strand
uccucuauguggagaauga

SEQ ID NO: 1201567 - RNA, 19 nt, Homo sapiens
  misc_RNA (1)...(19): siRNA sense strand
gaggugcaggccaacaaug

SEQ ID NO: 1201568 - RNA, 19 nt, Homo sapiens
  misc_RNA (1)...(19): siRNA sense strand
cagaggugcaggccaacaa

SEQ ID NO: 1201569 - RNA, 19 nt, Homo sapiens
  misc_RNA (1)...(19): siRNA sense strand
gcaaauauguggacuggau

SEQ ID NO: 1201570 - RNA, 19 nt, Homo sapiens
  misc_RNA (1)...(19): siRNA sense strand
acacgaaagucugcaaaua

SEQ ID NO: 1201571 - RNA, 19 nt, Homo sapiens
  misc_RNA (1)...(19): siRNA sense strand
caacaaagaccaccgcaau

SEQ ID NO: 1201572 - RNA, 19 nt, Homo sapiens
  misc_RNA (1)...(19): siRNA sense strand
ggagagaccaggaucauca

SEQ ID NO: 1201573 - RNA, 19 nt, Homo sapiens
  misc_RNA (1)...(19): siRNA sense strand
agacgaugaagaacaauua

SEQ ID NO: 1201574 - RNA, 19 nt, Homo sapiens
  misc_RNA (1)...(19): siRNA sense strand
acgaaagucugcaaauaug

SEQ ID NO: 1201575 - RNA, 19 nt, Homo sapiens
  misc_RNA (1)...(19): siRNA sense strand
gaaagucugcaaauaugug

SEQ ID NO: 1201576 - RNA, 19 nt, Homo sapiens
  misc_RNA (1)...(19): siRNA sense strand
acaaagaccaccgcaauga

SEQ ID NO: 1201577 - RNA, 19 nt, Homo sapiens
  misc_RNA (1)...(19): siRNA sense strand
gagaagacgcggcuacucu

SEQ ID NO: 1201578 - RNA, 19 nt, Homo sapiens
  misc_RNA (1)...(19): siRNA sense strand
cacgaaagucugcaaauau

SEQ ID NO: 1201579 - RNA, 19 nt, Homo sapiens
  misc_RNA (1)...(19): siRNA sense strand
gccaacaucaccaucauug

SEQ ID NO: 1201580 - RNA, 19 nt, Homo sapiens
  misc_RNA (1)...(19): siRNA sense strand
ccgaaagccuggugucuac

SEQ ID NO: 1201581 - RNA, 19 nt, Homo sapiens
  misc_RNA (1)...(19): siRNA sense strand
caacaucaccaucauugag

SEQ ID NO: 1201582 - RNA, 19 nt, Homo sapiens
  misc_RNA (1)...(19): siRNA sense strand
aggcagcccuguucgagaa

SEQ ID NO: 1201583 - RNA, 19 nt, Homo sapiens
  misc_RNA (1)...(19): siRNA sense strand
aggagacgaugaagaacaa

SEQ ID NO: 1201584 - RNA, 19 nt, Homo sapiens
  misc_RNA (1)...(19): siRNA sense strand
gagacgaugaagaacaauu

SEQ ID NO: 1201585 - RNA, 19 nt, Homo sapiens
  misc_RNA (1)...(19): siRNA sense strand
cgugugcgaucacccgaaa

SEQ ID NO: 1201586 - RNA, 19 nt, Homo sapiens
  misc_RNA (1)...(19): siRNA sense strand
gaagacgcggcuacucugu

SEQ ID NO: 1201587 - RNA, 19 nt, Homo sapiens
  misc_RNA (1)...(19): siRNA sense strand
ucauugagcaccagaagug

SEQ ID NO: 1201588 - RNA, 19 nt, Homo sapiens
  misc_RNA (1)...(19): siRNA sense strand
gcgccaacaucaccaucau

SEQ ID NO: 1201589 - RNA, 19 nt, Homo sapiens
  misc_RNA (1)...(19): siRNA sense strand
uccaggagacgaugaagaa

SEQ ID NO: 1201590 - RNA, 19 nt, Homo sapiens
  misc_RNA (1)...(19): siRNA sense strand
gagagaccaggaucaucaa

SEQ ID NO: 1201591 - RNA, 19 nt, Homo sapiens
  misc_RNA (1)...(19): siRNA sense strand
aaagaccaccgcaaugaca

SEQ ID NO: 1201592 - RNA, 19 nt, Homo sapiens
  misc_RNA (1)...(19): siRNA sense strand
cgaaagucugcaaauaugu

SEQ ID NO: 1201593 - RNA, 19 nt, Homo sapiens
  misc_RNA (1)...(19): siRNA sense strand
ccaacaucaccaucauuga

SEQ ID NO: 1201594 - RNA, 19 nt, Homo sapiens
  misc_RNA (1)...(19): siRNA sense strand
agcacaaccuccagaagga

SEQ ID NO: 1201595 - RNA, 19 nt, Homo sapiens
  misc_RNA (1)...(19): siRNA sense strand
gcagcccuguucgagaaga

SEQ ID NO: 1201596 - RNA, 19 nt, Homo sapiens
  misc_RNA (1)...(19): siRNA sense strand
acaucaugcuggugaagau

SEQ ID NO: 1201597 - RNA, 19 nt, Homo sapiens
  misc_RNA (1)...(19): siRNA sense strand
uguaaccagucucuucaag

SEQ ID NO: 1201598 - RNA, 19 nt, Homo sapiens
  misc_RNA (1)...(19): siRNA sense strand
agaaggaggagggcuguga

SEQ ID NO: 1201599 - RNA, 19 nt, Homo sapiens
  misc_RNA (1)...(19): siRNA sense strand
ggauccaggagacgaugaa

SEQ ID NO: 1201600 - RNA, 19 nt, Homo sapiens
  misc_RNA (1)...(19): siRNA sense strand
caggagacgaugaagaaca

SEQ ID NO: 1201601 - RNA, 19 nt, Homo sapiens
  misc_RNA (1)...(19): siRNA sense strand
gcaaauauguggacuggau

SEQ ID NO: 1201602 - RNA, 19 nt, Homo sapiens
  misc_RNA (1)...(19): siRNA sense strand
acacgaaagucugcaaaua

SEQ ID NO: 1201603 - RNA, 19 nt, Homo sapiens
  misc_RNA (1)...(19): siRNA sense strand
caacaaagaccaccgcaau

SEQ ID NO: 1201604 - RNA, 19 nt, Homo sapiens
  misc_RNA (1)...(19): siRNA sense strand
ggagagaccaggaucauca

SEQ ID NO: 1201605 - RNA, 19 nt, Homo sapiens
  misc_RNA (1)...(19): siRNA sense strand
agacgaugaagaacaauua

SEQ ID NO: 1201606 - RNA, 19 nt, Homo sapiens
  misc_RNA (1)...(19): siRNA sense strand
caugaggauucugcaguua

SEQ ID NO: 1201607 - RNA, 19 nt, Homo sapiens
  misc_RNA (1)...(19): siRNA sense strand
acgaaagucugcaaauaug

SEQ ID NO: 1201608 - RNA, 19 nt, Homo sapiens
  misc_RNA (1)...(19): siRNA sense strand
gaaagucugcaaauaugug

SEQ ID NO: 1201609 - RNA, 19 nt, Homo sapiens
  misc_RNA (1)...(19): siRNA sense strand
ccaugaggauucugcaguu

SEQ ID NO: 1201610 - RNA, 19 nt, Homo sapiens
  misc_RNA (1)...(19): siRNA sense strand
acaaagaccaccgcaauga

SEQ ID NO: 1201611 - RNA, 19 nt, Homo sapiens
  misc_RNA (1)...(19): siRNA sense strand
gagaagacgcggcuacucu

SEQ ID NO: 1201612 - RNA, 19 nt, Homo sapiens
  misc_RNA (1)...(19): siRNA sense strand
cacgaaagucugcaaauau

SEQ ID NO: 1201613 - RNA, 19 nt, Homo sapiens
  misc_RNA (1)...(19): siRNA sense strand
gccaacaucaccaucauug

SEQ ID NO: 1201614 - RNA, 19 nt, Homo sapiens
  misc_RNA (1)...(19): siRNA sense strand
ugaggauucugcaguuaau

SEQ ID NO: 1201615 - RNA, 19 nt, Homo sapiens
  misc_RNA (1)...(19): siRNA sense strand
ccgaaagccuggugucuac

SEQ ID NO: 1201616 - RNA, 19 nt, Homo sapiens
  misc_RNA (1)...(19): siRNA sense strand
caacaucaccaucauugag

SEQ ID NO: 1201617 - RNA, 19 nt, Homo sapiens
  misc_RNA (1)...(19): siRNA sense strand
aggcagcccuguucgagaa

SEQ ID NO: 1201618 - RNA, 19 nt, Homo sapiens
  misc_RNA (1)...(19): siRNA sense strand
aggagacgaugaagaacaa

SEQ ID NO: 1201619 - RNA, 19 nt, Homo sapiens
  misc_RNA (1)...(19): siRNA sense strand
gagacgaugaagaacaauu

SEQ ID NO: 1201620 - RNA, 19 nt, Homo sapiens
  misc_RNA (1)...(19): siRNA sense strand
cgugugcgaucacccgaaa

SEQ ID NO: 1201621 - RNA, 19 nt, Homo sapiens
  misc_RNA (1)...(19): siRNA sense strand
gaagacgcggcuacucugu

SEQ ID NO: 1201622 - RNA, 19 nt, Homo sapiens
  misc_RNA (1)...(19): siRNA sense strand
ucauugagcaccagaagug

SEQ ID NO: 1201623 - RNA, 19 nt, Homo sapiens
  misc_RNA (1)...(19): siRNA sense strand
gcgccaacaucaccaucau

SEQ ID NO: 1201624 - RNA, 19 nt, Homo sapiens
  misc_RNA (1)...(19): siRNA sense strand
uccaggagacgaugaagaa

SEQ ID NO: 1201625 - RNA, 19 nt, Homo sapiens
  misc_RNA (1)...(19): siRNA sense strand
gagagaccaggaucaucaa

SEQ ID NO: 1201626 - RNA, 19 nt, Homo sapiens
  misc_RNA (1)...(19): siRNA sense strand
aaagaccaccgcaaugaca

SEQ ID NO: 1201627 - RNA, 19 nt, Homo sapiens
  misc_RNA (1)...(19): siRNA sense strand
cgaaagucugcaaauaugu

SEQ ID NO: 1201628 - RNA, 19 nt, Homo sapiens
  misc_RNA (1)...(19): siRNA sense strand
ccaacaucaccaucauuga

SEQ ID NO: 1201629 - RNA, 19 nt, Homo sapiens
  misc_RNA (1)...(19): siRNA sense strand
agcacaaccuccagaagga

SEQ ID NO: 1201630 - RNA, 19 nt, Homo sapiens
  misc_RNA (1)...(19): siRNA sense strand
gcagcccuguucgagaaga

SEQ ID NO: 1201631 - RNA, 19 nt, Homo sapiens
  misc_RNA (1)...(19): siRNA sense strand
agaaggaggagggcuguga

SEQ ID NO: 1201632 - RNA, 19 nt, Homo sapiens
  misc_RNA (1)...(19): siRNA sense strand
uguaaccagucucuucaag

SEQ ID NO: 1201633 - RNA, 19 nt, Homo sapiens
  misc_RNA (1)...(19): siRNA sense strand
acaucaugcuggugaagau

SEQ ID NO: 1201634 - RNA, 19 nt, Homo sapiens
  misc_RNA (1)...(19): siRNA sense strand
ggauccaggagacgaugaa

SEQ ID NO: 1201635 - RNA, 19 nt, Homo sapiens
  misc_RNA (1)...(19): siRNA sense strand
caggagacgaugaagaaca

SEQ ID NO: 1201636 - RNA, 19 nt, Homo sapiens
  misc_RNA (1)...(19): siRNA sense strand
gcaaauauguggacuggau

SEQ ID NO: 1201637 - RNA, 19 nt, Homo sapiens
  misc_RNA (1)...(19): siRNA sense strand
acacgaaagucugcaaaua

SEQ ID NO: 1201638 - RNA, 19 nt, Homo sapiens
  misc_RNA (1)...(19): siRNA sense strand
caacaaagaccaccgcaau

SEQ ID NO: 1201639 - RNA, 19 nt, Homo sapiens
  misc_RNA (1)...(19): siRNA sense strand
ggagagaccaggaucauca

SEQ ID NO: 1201640 - RNA, 19 nt, Homo sapiens
  misc_RNA (1)...(19): siRNA sense strand
agacgaugaagaacaauua

SEQ ID NO: 1201641 - RNA, 19 nt, Homo sapiens
  misc_RNA (1)...(19): siRNA sense strand
acgaaagucugcaaauaug

SEQ ID NO: 1201642 - RNA, 19 nt, Homo sapiens
  misc_RNA (1)...(19): siRNA sense strand
gaaagucugcaaauaugug

SEQ ID NO: 1201643 - RNA, 19 nt, Homo sapiens
  misc_RNA (1)...(19): siRNA sense strand
acaaagaccaccgcaauga

SEQ ID NO: 1201644 - RNA, 19 nt, Homo sapiens
  misc_RNA (1)...(19): siRNA sense strand
gagaagacgcggcuacucu

SEQ ID NO: 1201645 - RNA, 19 nt, Homo sapiens
  misc_RNA (1)...(19): siRNA sense strand
cacgaaagucugcaaauau

SEQ ID NO: 1201646 - RNA, 19 nt, Homo sapiens
  misc_RNA (1)...(19): siRNA sense strand
gccaacaucaccaucauug

SEQ ID NO: 1201647 - RNA, 19 nt, Homo sapiens
  misc_RNA (1)...(19): siRNA sense strand
ccgaaagccuggugucuac

SEQ ID NO: 1201648 - RNA, 19 nt, Homo sapiens
  misc_RNA (1)...(19): siRNA sense strand
caacaucaccaucauugag

SEQ ID NO: 1201649 - RNA, 19 nt, Homo sapiens
  misc_RNA (1)...(19): siRNA sense strand
aggcagcccuguucgagaa

SEQ ID NO: 1201650 - RNA, 19 nt, Homo sapiens
  misc_RNA (1)...(19): siRNA sense strand
aggagacgaugaagaacaa

SEQ ID NO: 1201651 - RNA, 19 nt, Homo sapiens
  misc_RNA (1)...(19): siRNA sense strand
gagacgaugaagaacaauu

SEQ ID NO: 1201652 - RNA, 19 nt, Homo sapiens
  misc_RNA (1)...(19): siRNA sense strand
cgugugcgaucacccgaaa

SEQ ID NO: 1201653 - RNA, 19 nt, Homo sapiens
  misc_RNA (1)...(19): siRNA sense strand
gaagacgcggcuacucugu

SEQ ID NO: 1201654 - RNA, 19 nt, Homo sapiens
  misc_RNA (1)...(19): siRNA sense strand
ucauugagcaccagaagug

SEQ ID NO: 1201655 - RNA, 19 nt, Homo sapiens
  misc_RNA (1)...(19): siRNA sense strand
gcgccaacaucaccaucau

SEQ ID NO: 1201656 - RNA, 19 nt, Homo sapiens
  misc_RNA (1)...(19): siRNA sense strand
uccaggagacgaugaagaa

SEQ ID NO: 1201657 - RNA, 19 nt, Homo sapiens
  misc_RNA (1)...(19): siRNA sense strand
gagagaccaggaucaucaa

SEQ ID NO: 1201658 - RNA, 19 nt, Homo sapiens
  misc_RNA (1)...(19): siRNA sense strand
aaagaccaccgcaaugaca

SEQ ID NO: 1201659 - RNA, 19 nt, Homo sapiens
  misc_RNA (1)...(19): siRNA sense strand
cgaaagucugcaaauaugu

SEQ ID NO: 1201660 - RNA, 19 nt, Homo sapiens
  misc_RNA (1)...(19): siRNA sense strand
ccaacaucaccaucauuga

SEQ ID NO: 1201661 - RNA, 19 nt, Homo sapiens
  misc_RNA (1)...(19): siRNA sense strand
agcacaaccuccagaagga

SEQ ID NO: 1201662 - RNA, 19 nt, Homo sapiens
  misc_RNA (1)...(19): siRNA sense strand
gcagcccuguucgagaaga

SEQ ID NO: 1201663 - RNA, 19 nt, Homo sapiens
  misc_RNA (1)...(19): siRNA sense strand
acaucaugcuggugaagau

SEQ ID NO: 1201664 - RNA, 19 nt, Homo sapiens
  misc_RNA (1)...(19): siRNA sense strand
uguaaccagucucuucaag

SEQ ID NO: 1201665 - RNA, 19 nt, Homo sapiens
  misc_RNA (1)...(19): siRNA sense strand
agaaggaggagggcuguga

SEQ ID NO: 1201666 - RNA, 19 nt, Homo sapiens
  misc_RNA (1)...(19): siRNA sense strand
ggauccaggagacgaugaa

SEQ ID NO: 1201667 - RNA, 19 nt, Homo sapiens
  misc_RNA (1)...(19): siRNA sense strand
caggagacgaugaagaaca

SEQ ID NO: 1201668 - RNA, 19 nt, Homo sapiens
  misc_RNA (1)...(19): siRNA sense strand
gcaaauauguggacuggau

SEQ ID NO: 1201669 - RNA, 19 nt, Homo sapiens
  misc_RNA (1)...(19): siRNA sense strand
acacgaaagucugcaaaua

SEQ ID NO: 1201670 - RNA, 19 nt, Homo sapiens
  misc_RNA (1)...(19): siRNA sense strand
caacaaagaccaccgcaau

SEQ ID NO: 1201671 - RNA, 19 nt, Homo sapiens
  misc_RNA (1)...(19): siRNA sense strand
ggagagaccaggaucauca

SEQ ID NO: 1201672 - RNA, 19 nt, Homo sapiens
  misc_RNA (1)...(19): siRNA sense strand
agacgaugaagaacaauua

SEQ ID NO: 1201673 - RNA, 19 nt, Homo sapiens
  misc_RNA (1)...(19): siRNA sense strand
caugaggauucugcaguua

SEQ ID NO: 1201674 - RNA, 19 nt, Homo sapiens
  misc_RNA (1)...(19): siRNA sense strand
acgaaagucugcaaauaug

SEQ ID NO: 1201675 - RNA, 19 nt, Homo sapiens
  misc_RNA (1)...(19): siRNA sense strand
gaaagucugcaaauaugug

SEQ ID NO: 1201676 - RNA, 19 nt, Homo sapiens
  misc_RNA (1)...(19): siRNA sense strand
ccaugaggauucugcaguu

SEQ ID NO: 1201677 - RNA, 19 nt, Homo sapiens
  misc_RNA (1)...(19): siRNA sense strand
acaaagaccaccgcaauga

SEQ ID NO: 1201678 - RNA, 19 nt, Homo sapiens
  misc_RNA (1)...(19): siRNA sense strand
gagaagacgcggcuacucu

SEQ ID NO: 1201679 - RNA, 19 nt, Homo sapiens
  misc_RNA (1)...(19): siRNA sense strand
cacgaaagucugcaaauau

SEQ ID NO: 1201680 - RNA, 19 nt, Homo sapiens
  misc_RNA (1)...(19): siRNA sense strand
gccaacaucaccaucauug

SEQ ID NO: 1201681 - RNA, 19 nt, Homo sapiens
  misc_RNA (1)...(19): siRNA sense strand
ugaggauucugcaguuaau

SEQ ID NO: 1201682 - RNA, 19 nt, Homo sapiens
  misc_RNA (1)...(19): siRNA sense strand
ccgaaagccuggugucuac

SEQ ID NO: 1201683 - RNA, 19 nt, Homo sapiens
  misc_RNA (1)...(19): siRNA sense strand
caacaucaccaucauugag

SEQ ID NO: 1201684 - RNA, 19 nt, Homo sapiens
  misc_RNA (1)...(19): siRNA sense strand
aggcagcccuguucgagaa

SEQ ID NO: 1201685 - RNA, 19 nt, Homo sapiens
  misc_RNA (1)...(19): siRNA sense strand
aggagacgaugaagaacaa

SEQ ID NO: 1201686 - RNA, 19 nt, Homo sapiens
  misc_RNA (1)...(19): siRNA sense strand
gagacgaugaagaacaauu

SEQ ID NO: 1201687 - RNA, 19 nt, Homo sapiens
  misc_RNA (1)...(19): siRNA sense strand
cgugugcgaucacccgaaa

SEQ ID NO: 1201688 - RNA, 19 nt, Homo sapiens
  misc_RNA (1)...(19): siRNA sense strand
gaagacgcggcuacucugu

SEQ ID NO: 1201689 - RNA, 19 nt, Homo sapiens
  misc_RNA (1)...(19): siRNA sense strand
ucauugagcaccagaagug

SEQ ID NO: 1201690 - RNA, 19 nt, Homo sapiens
  misc_RNA (1)...(19): siRNA sense strand
gcgccaacaucaccaucau

SEQ ID NO: 1201691 - RNA, 19 nt, Homo sapiens
  misc_RNA (1)...(19): siRNA sense strand
uccaggagacgaugaagaa

SEQ ID NO: 1201692 - RNA, 19 nt, Homo sapiens
  misc_RNA (1)...(19): siRNA sense strand
gagagaccaggaucaucaa

SEQ ID NO: 1201693 - RNA, 19 nt, Homo sapiens
  misc_RNA (1)...(19): siRNA sense strand
aaagaccaccgcaaugaca

SEQ ID NO: 1201694 - RNA, 19 nt, Homo sapiens
  misc_RNA (1)...(19): siRNA sense strand
cgaaagucugcaaauaugu

SEQ ID NO: 1201695 - RNA, 19 nt, Homo sapiens
  misc_RNA (1)...(19): siRNA sense strand
ccaacaucaccaucauuga

SEQ ID NO: 1201696 - RNA, 19 nt, Homo sapiens
  misc_RNA (1)...(19): siRNA sense strand
agcacaaccuccagaagga

SEQ ID NO: 1201697 - RNA, 19 nt, Homo sapiens
  misc_RNA (1)...(19): siRNA sense strand
gcagcccuguucgagaaga

SEQ ID NO: 1201698 - RNA, 19 nt, Homo sapiens
  misc_RNA (1)...(19): siRNA sense strand
agaaggaggagggcuguga

SEQ ID NO: 1201699 - RNA, 19 nt, Homo sapiens
  misc_RNA (1)...(19): siRNA sense strand
uguaaccagucucuucaag

SEQ ID NO: 1201700 - RNA, 19 nt, Homo sapiens
  misc_RNA (1)...(19): siRNA sense strand
acaucaugcuggugaagau

SEQ ID NO: 1201701 - RNA, 19 nt, Homo sapiens
  misc_RNA (1)...(19): siRNA sense strand
ggauccaggagacgaugaa

SEQ ID NO: 1201702 - RNA, 19 nt, Homo sapiens
  misc_RNA (1)...(19): siRNA sense strand
caggagacgaugaagaaca

SEQ ID NO: 1201703 - RNA, 19 nt, Homo sapiens
  misc_RNA (1)...(19): siRNA sense strand
caacaaagcagucccuuaa

SEQ ID NO: 1201704 - RNA, 19 nt, Homo sapiens
  misc_RNA (1)...(19): siRNA sense strand
gaagauaggcuuagagaga

SEQ ID NO: 1201705 - RNA, 19 nt, Homo sapiens
  misc_RNA (1)...(19): siRNA sense strand
agacagagguugcaggaua

SEQ ID NO: 1201706 - RNA, 19 nt, Homo sapiens
  misc_RNA (1)...(19): siRNA sense strand
gcaguggaaucacaacuuu

SEQ ID NO: 1201707 - RNA, 19 nt, Homo sapiens
  misc_RNA (1)...(19): siRNA sense strand
ggaggaagccguagugaaa

SEQ ID NO: 1201708 - RNA, 19 nt, Homo sapiens
  misc_RNA (1)...(19): siRNA sense strand
gagagaaggcggcuuagua

SEQ ID NO: 1201709 - RNA, 19 nt, Homo sapiens
  misc_RNA (1)...(19): siRNA sense strand
gaaggcggcuuaguauuga

SEQ ID NO: 1201710 - RNA, 19 nt, Homo sapiens
  misc_RNA (1)...(19): siRNA sense strand
ccacagaaaucccucaaau

SEQ ID NO: 1201711 - RNA, 19 nt, Homo sapiens
  misc_RNA (1)...(19): siRNA sense strand
ggaagucgcucucuaagac

SEQ ID NO: 1201712 - RNA, 19 nt, Homo sapiens
  misc_RNA (1)...(19): siRNA sense strand
agaaaucccucaaauuguu

SEQ ID NO: 1201713 - RNA, 19 nt, Homo sapiens
  misc_RNA (1)...(19): siRNA sense strand
gagcccacauucaacauuu

SEQ ID NO: 1201714 - RNA, 19 nt, Homo sapiens
  misc_RNA (1)...(19): siRNA sense strand
gacaugaacuccaacagau

SEQ ID NO: 1201715 - RNA, 19 nt, Homo sapiens
  misc_RNA (1)...(19): siRNA sense strand
cagcagaacuguaggaagu

SEQ ID NO: 1201716 - RNA, 19 nt, Homo sapiens
  misc_RNA (1)...(19): siRNA sense strand
ggauuaagcccuucgaaga

SEQ ID NO: 1201717 - RNA, 19 nt, Homo sapiens
  misc_RNA (1)...(19): siRNA sense strand
acagaaaucccucaaauug

SEQ ID NO: 1201718 - RNA, 19 nt, Homo sapiens
  misc_RNA (1)...(19): siRNA sense strand
ggaauaacuucaaauacag

SEQ ID NO: 1201719 - RNA, 19 nt, Homo sapiens
  misc_RNA (1)...(19): siRNA sense strand
uaaauaggacuuucccuuu

SEQ ID NO: 1201720 - RNA, 19 nt, Homo sapiens
  misc_RNA (1)...(19): siRNA sense strand
ggacaugaacuccaacaga

SEQ ID NO: 1201721 - RNA, 19 nt, Homo sapiens
  misc_RNA (1)...(19): siRNA sense strand
acaaagcagucccuuaaga

SEQ ID NO: 1201722 - RNA, 19 nt, Homo sapiens
  misc_RNA (1)...(19): siRNA sense strand
gcaacaaagcagucccuua

SEQ ID NO: 1201723 - RNA, 19 nt, Homo sapiens
  misc_RNA (1)...(19): siRNA sense strand
gagaaccagucaaggcaaa

SEQ ID NO: 1201724 - RNA, 19 nt, Homo sapiens
  misc_RNA (1)...(19): siRNA sense strand
ggauaaugauucuuguguu

SEQ ID NO: 1201725 - RNA, 19 nt, Homo sapiens
  misc_RNA (1)...(19): siRNA sense strand
gaaaguccacacacagauu

SEQ ID NO: 1201726 - RNA, 19 nt, Homo sapiens
  misc_RNA (1)...(19): siRNA sense strand
gcagaagcagcgucagaua

SEQ ID NO: 1201727 - RNA, 19 nt, Homo sapiens
  misc_RNA (1)...(19): siRNA sense strand
acacacagauugauuacau

SEQ ID NO: 1201728 - RNA, 19 nt, Homo sapiens
  misc_RNA (1)...(19): siRNA sense strand
guaggaagucgcucucuaa

SEQ ID NO: 1201729 - RNA, 19 nt, Homo sapiens
  misc_RNA (1)...(19): siRNA sense strand
gaauugagcaguggaauca

SEQ ID NO: 1201730 - RNA, 19 nt, Homo sapiens
  misc_RNA (1)...(19): siRNA sense strand
aaaauuagcuccuggaaug

SEQ ID NO: 1201731 - RNA, 19 nt, Homo sapiens
  misc_RNA (1)...(19): siRNA sense strand
uauauaaacugggaccaaa

SEQ ID NO: 1201732 - RNA, 19 nt, Homo sapiens
  misc_RNA (1)...(19): siRNA sense strand
gaaccauugcuuacuauau

SEQ ID NO: 1201733 - RNA, 19 nt, Homo sapiens
  misc_RNA (1)...(19): siRNA sense strand
ggacaguucugcaauucca

SEQ ID NO: 1201734 - RNA, 19 nt, Homo sapiens
  misc_RNA (1)...(19): siRNA sense strand
uggaaugacugaaauaagu

SEQ ID NO: 1201735 - RNA, 19 nt, Homo sapiens
  misc_RNA (1)...(19): siRNA sense strand
gcaggugcacuacguauga

SEQ ID NO: 1201736 - RNA, 19 nt, Homo sapiens
  misc_RNA (1)...(19): siRNA sense strand
gauuaagcccuucgaagaa

SEQ ID NO: 1201737 - RNA, 19 nt, Homo sapiens
  misc_RNA (1)...(19): siRNA sense strand
gaagcuacugcacagguua

SEQ ID NO: 1201738 - RNA, 19 nt, Homo sapiens
  misc_RNA (1)...(19): siRNA sense strand
uacagaagaugaagaagau

SEQ ID NO: 1201739 - RNA, 19 nt, Homo sapiens
  misc_RNA (1)...(19): siRNA sense strand
cuacaaagacccagaguuc

SEQ ID NO: 1201740 - RNA, 19 nt, Homo sapiens
  misc_RNA (1)...(19): siRNA sense strand
ccaucucucugaauuaaug

SEQ ID NO: 1201741 - RNA, 19 nt, Homo sapiens
  misc_RNA (1)...(19): siRNA sense strand
cagaaucucuucggucaug

SEQ ID NO: 1201742 - RNA, 19 nt, Homo sapiens
  misc_RNA (1)...(19): siRNA sense strand
caucuuugguuucuacaga

SEQ ID NO: 1201743 - RNA, 19 nt, Homo sapiens
  misc_RNA (1)...(19): siRNA sense strand
gacuaccucuucucuguga

SEQ ID NO: 1201744 - RNA, 19 nt, Homo sapiens
  misc_RNA (1)...(19): siRNA sense strand
ggaccguuaugaagcagaa

SEQ ID NO: 1201745 - RNA, 19 nt, Homo sapiens
  misc_RNA (1)...(19): siRNA sense strand
ugaagaagauaggcuuaga

SEQ ID NO: 1201746 - RNA, 19 nt, Homo sapiens
  misc_RNA (1)...(19): siRNA sense strand
gagaaaauauugccuuaca

SEQ ID NO: 1201747 - RNA, 19 nt, Homo sapiens
  misc_RNA (1)...(19): siRNA sense strand
aaauacaggugucagaauc

SEQ ID NO: 1201748 - RNA, 19 nt, Homo sapiens
  misc_RNA (1)...(19): siRNA sense strand
agagagagaaggcggcuua

SEQ ID NO: 1201749 - RNA, 19 nt, Homo sapiens
  misc_RNA (1)...(19): siRNA sense strand
aaauccaucucucugaauu

SEQ ID NO: 1201750 - RNA, 19 nt, Homo sapiens
  misc_RNA (1)...(19): siRNA sense strand
agacucaacuccucagcaa

SEQ ID NO: 1201751 - RNA, 19 nt, Homo sapiens
  misc_RNA (1)...(19): siRNA sense strand
gaugaagaagauaggcuua

SEQ ID NO: 1201752 - RNA, 19 nt, Homo sapiens
  misc_RNA (1)...(19): siRNA sense strand
cugcacagguuaauccauu

SEQ ID NO: 1201753 - RNA, 19 nt, Homo sapiens
  misc_RNA (1)...(19): siRNA sense strand
agaaggcggcuuaguauug

SEQ ID NO: 1201754 - RNA, 19 nt, Homo sapiens
  misc_RNA (1)...(19): siRNA sense strand
gauggaccguuaugaagca

SEQ ID NO: 1201755 - RNA, 19 nt, Homo sapiens
  misc_RNA (1)...(19): siRNA sense strand
gaucccaguucgugcaugu

SEQ ID NO: 1201756 - RNA, 19 nt, Homo sapiens
  misc_RNA (1)...(19): siRNA sense strand
gaaaucccucaaauuguug

SEQ ID NO: 1201757 - RNA, 19 nt, Homo sapiens
  misc_RNA (1)...(19): siRNA sense strand
ggacuucaaaggagagaga

SEQ ID NO: 1201758 - RNA, 19 nt, Homo sapiens
  misc_RNA (1)...(19): siRNA sense strand
gacaguguuuccagcagaa

SEQ ID NO: 1201759 - RNA, 19 nt, Homo sapiens
  misc_RNA (1)...(19): siRNA sense strand
ccucaauguuacaggauuu

SEQ ID NO: 1201760 - RNA, 19 nt, Homo sapiens
  misc_RNA (1)...(19): siRNA sense strand
cacacagauugauuacaua

SEQ ID NO: 1201761 - RNA, 19 nt, Homo sapiens
  misc_RNA (1)...(19): siRNA sense strand
caaagacccagaguucauu

SEQ ID NO: 1201762 - RNA, 19 nt, Homo sapiens
  misc_RNA (1)...(19): siRNA sense strand
cuacagaagaugaagaaga

SEQ ID NO: 1201763 - RNA, 19 nt, Homo sapiens
  misc_RNA (1)...(19): siRNA sense strand
gagaaggcggcuuaguauu

SEQ ID NO: 1201764 - RNA, 19 nt, Homo sapiens
  misc_RNA (1)...(19): siRNA sense strand
ccaugacccguguguauuu

SEQ ID NO: 1201765 - RNA, 19 nt, Homo sapiens
  misc_RNA (1)...(19): siRNA sense strand
acagggagcuuggaaaguc

SEQ ID NO: 1201766 - RNA, 19 nt, Homo sapiens
  misc_RNA (1)...(19): siRNA sense strand
gaagcagcgucagauaucu

SEQ ID NO: 1201767 - RNA, 19 nt, Homo sapiens
  misc_RNA (1)...(19): siRNA sense strand
ggaaugacugaaauaagug

SEQ ID NO: 1201768 - RNA, 19 nt, Homo sapiens
  misc_RNA (1)...(19): siRNA sense strand
agacagccauacccauguu

SEQ ID NO: 1201769 - RNA, 19 nt, Homo sapiens
  misc_RNA (1)...(19): siRNA sense strand
aaccauugcuuacuauauc

SEQ ID NO: 1201770 - RNA, 19 nt, Homo sapiens
  misc_RNA (1)...(19): siRNA sense strand
gcccaugacccguguguau

SEQ ID NO: 1201771 - RNA, 19 nt, Homo sapiens
  misc_RNA (1)...(19): siRNA sense strand
ggaaaguccacacacagau

SEQ ID NO: 1201772 - RNA, 19 nt, Homo sapiens
  misc_RNA (1)...(19): siRNA sense strand
guucauuggaugcugauaa

SEQ ID NO: 1201773 - RNA, 19 nt, Homo sapiens
  misc_RNA (1)...(19): siRNA sense strand
ggaacgagaaccagucaag

SEQ ID NO: 1201774 - RNA, 19 nt, Homo sapiens
  misc_RNA (1)...(19): siRNA sense strand
uuugaaccauugcuuacua

SEQ ID NO: 1201775 - RNA, 19 nt, Homo sapiens
  misc_RNA (1)...(19): siRNA sense strand
ccucgugccugauuugcuu

SEQ ID NO: 1201776 - RNA, 19 nt, Homo sapiens
  misc_RNA (1)...(19): siRNA sense strand
agagaaggcggcuuaguau

SEQ ID NO: 1201777 - RNA, 19 nt, Homo sapiens
  misc_RNA (1)...(19): siRNA sense strand
caaauacaggugucagaau

SEQ ID NO: 1201778 - RNA, 19 nt, Homo sapiens
  misc_RNA (1)...(19): siRNA sense strand
uguaggaagucgcucucua

SEQ ID NO: 1201779 - RNA, 19 nt, Homo sapiens
  misc_RNA (1)...(19): siRNA sense strand
gcagacagggagcuuggaa

SEQ ID NO: 1201780 - RNA, 19 nt, Homo sapiens
  misc_RNA (1)...(19): siRNA sense strand
cagaagcagcgucagauau

SEQ ID NO: 1201781 - RNA, 19 nt, Homo sapiens
  misc_RNA (1)...(19): siRNA sense strand
ugaagcuacugcacagguu

SEQ ID NO: 1201782 - RNA, 19 nt, Homo sapiens
  misc_RNA (1)...(19): siRNA sense strand
gacagagguugcaggauac

SEQ ID NO: 1201783 - RNA, 19 nt, Homo sapiens
  misc_RNA (1)...(19): siRNA sense strand
uaaacugggaccaaaauua

SEQ ID NO: 1201784 - RNA, 19 nt, Homo sapiens
  misc_RNA (1)...(19): siRNA sense strand
aaauaggacuuucccuuuu

SEQ ID NO: 1201785 - RNA, 19 nt, Homo sapiens
  misc_RNA (1)...(19): siRNA sense strand
auacaaccacccuguguuu

SEQ ID NO: 1201786 - RNA, 19 nt, Homo sapiens
  misc_RNA (1)...(19): siRNA sense strand
gauacaaccacccuguguu

SEQ ID NO: 1201787 - RNA, 19 nt, Homo sapiens
  misc_RNA (1)...(19): siRNA sense strand
ggauacaaccacccugugu

SEQ ID NO: 1201788 - RNA, 19 nt, Homo sapiens
  misc_RNA (1)...(19): siRNA sense strand
uuugauccaucuuugguuu

SEQ ID NO: 1201789 - RNA, 19 nt, Homo sapiens
  misc_RNA (1)...(19): siRNA sense strand
gcacuacguaugauggaau

SEQ ID NO: 1201790 - RNA, 19 nt, Homo sapiens
  misc_RNA (1)...(19): siRNA sense strand
aauaggacuuucccuuuua

SEQ ID NO: 1201791 - RNA, 19 nt, Homo sapiens
  misc_RNA (1)...(19): siRNA sense strand
uaacgggacuuuuagaaca

SEQ ID NO: 1201792 - RNA, 19 nt, Homo sapiens
  misc_RNA (1)...(19): siRNA sense strand
agcagucccuuaagagaaa

SEQ ID NO: 1201793 - RNA, 19 nt, Homo sapiens
  misc_RNA (1)...(19): siRNA sense strand
cacagaaaucccucaaauu

SEQ ID NO: 1201794 - RNA, 19 nt, Homo sapiens
  misc_RNA (1)...(19): siRNA sense strand
cagaaaucccucaaauugu

SEQ ID NO: 1201795 - RNA, 19 nt, Homo sapiens
  misc_RNA (1)...(19): siRNA sense strand
gaagaagauaggcuuagag

SEQ ID NO: 1201796 - RNA, 19 nt, Homo sapiens
  misc_RNA (1)...(19): siRNA sense strand
caaagcagucccuuaagag

SEQ ID NO: 1201797 - RNA, 19 nt, Homo sapiens
  misc_RNA (1)...(19): siRNA sense strand
uucauuggaugcugauaaa

SEQ ID NO: 1201798 - RNA, 19 nt, Homo sapiens
  misc_RNA (1)...(19): siRNA sense strand
uuucacuccuccacuguaa

SEQ ID NO: 1201799 - RNA, 19 nt, Homo sapiens
  misc_RNA (1)...(19): siRNA sense strand
guugaaauaagcaucgaaa

SEQ ID NO: 1201800 - RNA, 19 nt, Homo sapiens
  misc_RNA (1)...(19): siRNA sense strand
gaaauaagcaucgaaaagg

SEQ ID NO: 1201801 - RNA, 19 nt, Homo sapiens
  misc_RNA (1)...(19): siRNA sense strand
aggacuaccucuucucugu

SEQ ID NO: 1201802 - RNA, 19 nt, Homo sapiens
  misc_RNA (1)...(19): siRNA sense strand
caaccacccuguguuugca

SEQ ID NO: 1201803 - RNA, 19 nt, Homo sapiens
  misc_RNA (1)...(19): siRNA sense strand
caacaaagcagucccuuaa

SEQ ID NO: 1201804 - RNA, 19 nt, Homo sapiens
  misc_RNA (1)...(19): siRNA sense strand
gaagauaggcuuagagaga

SEQ ID NO: 1201805 - RNA, 19 nt, Homo sapiens
  misc_RNA (1)...(19): siRNA sense strand
agacagagguugcaggaua

SEQ ID NO: 1201806 - RNA, 19 nt, Homo sapiens
  misc_RNA (1)...(19): siRNA sense strand
gcaguggaaucacaacuuu

SEQ ID NO: 1201807 - RNA, 19 nt, Homo sapiens
  misc_RNA (1)...(19): siRNA sense strand
ggaggaagccguagugaaa

SEQ ID NO: 1201808 - RNA, 19 nt, Homo sapiens
  misc_RNA (1)...(19): siRNA sense strand
gagagaaggcggcuuagua

SEQ ID NO: 1201809 - RNA, 19 nt, Homo sapiens
  misc_RNA (1)...(19): siRNA sense strand
gaaggcggcuuaguauuga

SEQ ID NO: 1201810 - RNA, 19 nt, Homo sapiens
  misc_RNA (1)...(19): siRNA sense strand
ccacagaaaucccucaaau

SEQ ID NO: 1201811 - RNA, 19 nt, Homo sapiens
  misc_RNA (1)...(19): siRNA sense strand
ggaagucgcucucuaagac

SEQ ID NO: 1201812 - RNA, 19 nt, Homo sapiens
  misc_RNA (1)...(19): siRNA sense strand
agaaaucccucaaauuguu

SEQ ID NO: 1201813 - RNA, 19 nt, Homo sapiens
  misc_RNA (1)...(19): siRNA sense strand
gagcccacauucaacauuu

SEQ ID NO: 1201814 - RNA, 19 nt, Homo sapiens
  misc_RNA (1)...(19): siRNA sense strand
gacaugaacuccaacagau

SEQ ID NO: 1201815 - RNA, 19 nt, Homo sapiens
  misc_RNA (1)...(19): siRNA sense strand
cagcagaacuguaggaagu

SEQ ID NO: 1201816 - RNA, 19 nt, Homo sapiens
  misc_RNA (1)...(19): siRNA sense strand
ggauuaagcccuucgaaga

SEQ ID NO: 1201817 - RNA, 19 nt, Homo sapiens
  misc_RNA (1)...(19): siRNA sense strand
acagaaaucccucaaauug

SEQ ID NO: 1201818 - RNA, 19 nt, Homo sapiens
  misc_RNA (1)...(19): siRNA sense strand
ggaauaacuucaaauacag

SEQ ID NO: 1201819 - RNA, 19 nt, Homo sapiens
  misc_RNA (1)...(19): siRNA sense strand
uaaauaggacuuucccuuu

SEQ ID NO: 1201820 - RNA, 19 nt, Homo sapiens
  misc_RNA (1)...(19): siRNA sense strand
ggacaugaacuccaacaga

SEQ ID NO: 1201821 - RNA, 19 nt, Homo sapiens
  misc_RNA (1)...(19): siRNA sense strand
acaaagcagucccuuaaga

SEQ ID NO: 1201822 - RNA, 19 nt, Homo sapiens
  misc_RNA (1)...(19): siRNA sense strand
gcaacaaagcagucccuua

SEQ ID NO: 1201823 - RNA, 19 nt, Homo sapiens
  misc_RNA (1)...(19): siRNA sense strand
gagaaccagucaaggcaaa

SEQ ID NO: 1201824 - RNA, 19 nt, Homo sapiens
  misc_RNA (1)...(19): siRNA sense strand
ggauaaugauucuuguguu

SEQ ID NO: 1201825 - RNA, 19 nt, Homo sapiens
  misc_RNA (1)...(19): siRNA sense strand
gaaaguccacacacagauu

SEQ ID NO: 1201826 - RNA, 19 nt, Homo sapiens
  misc_RNA (1)...(19): siRNA sense strand
gcagaagcagcgucagaua

SEQ ID NO: 1201827 - RNA, 19 nt, Homo sapiens
  misc_RNA (1)...(19): siRNA sense strand
acacacagauugauuacau

SEQ ID NO: 1201828 - RNA, 19 nt, Homo sapiens
  misc_RNA (1)...(19): siRNA sense strand
guaggaagucgcucucuaa

SEQ ID NO: 1201829 - RNA, 19 nt, Homo sapiens
  misc_RNA (1)...(19): siRNA sense strand
gaauugagcaguggaauca

SEQ ID NO: 1201830 - RNA, 19 nt, Homo sapiens
  misc_RNA (1)...(19): siRNA sense strand
aaaauuagcuccuggaaug

SEQ ID NO: 1201831 - RNA, 19 nt, Homo sapiens
  misc_RNA (1)...(19): siRNA sense strand
uauauaaacugggaccaaa

SEQ ID NO: 1201832 - RNA, 19 nt, Homo sapiens
  misc_RNA (1)...(19): siRNA sense strand
gaaccauugcuuacuauau

SEQ ID NO: 1201833 - RNA, 19 nt, Homo sapiens
  misc_RNA (1)...(19): siRNA sense strand
ggacaguucugcaauucca

SEQ ID NO: 1201834 - RNA, 19 nt, Homo sapiens
  misc_RNA (1)...(19): siRNA sense strand
uggaaugacugaaauaagu

SEQ ID NO: 1201835 - RNA, 19 nt, Homo sapiens
  misc_RNA (1)...(19): siRNA sense strand
gcaggugcacuacguauga

SEQ ID NO: 1201836 - RNA, 19 nt, Homo sapiens
  misc_RNA (1)...(19): siRNA sense strand
gauuaagcccuucgaagaa

SEQ ID NO: 1201837 - RNA, 19 nt, Homo sapiens
  misc_RNA (1)...(19): siRNA sense strand
gaagcuacugcacagguua

SEQ ID NO: 1201838 - RNA, 19 nt, Homo sapiens
  misc_RNA (1)...(19): siRNA sense strand
uacagaagaugaagaagau

SEQ ID NO: 1201839 - RNA, 19 nt, Homo sapiens
  misc_RNA (1)...(19): siRNA sense strand
cuacaaagacccagaguuc

SEQ ID NO: 1201840 - RNA, 19 nt, Homo sapiens
  misc_RNA (1)...(19): siRNA sense strand
ccaucucucugaauuaaug

SEQ ID NO: 1201841 - RNA, 19 nt, Homo sapiens
  misc_RNA (1)...(19): siRNA sense strand
cagaaucucuucggucaug

SEQ ID NO: 1201842 - RNA, 19 nt, Homo sapiens
  misc_RNA (1)...(19): siRNA sense strand
caucuuugguuucuacaga

SEQ ID NO: 1201843 - RNA, 19 nt, Homo sapiens
  misc_RNA (1)...(19): siRNA sense strand
gacuaccucuucucuguga

SEQ ID NO: 1201844 - RNA, 19 nt, Homo sapiens
  misc_RNA (1)...(19): siRNA sense strand
ggaccguuaugaagcagaa

SEQ ID NO: 1201845 - RNA, 19 nt, Homo sapiens
  misc_RNA (1)...(19): siRNA sense strand
ugaagaagauaggcuuaga

SEQ ID NO: 1201846 - RNA, 19 nt, Homo sapiens
  misc_RNA (1)...(19): siRNA sense strand
gagaaaauauugccuuaca

SEQ ID NO: 1201847 - RNA, 19 nt, Homo sapiens
  misc_RNA (1)...(19): siRNA sense strand
aaauacaggugucagaauc

SEQ ID NO: 1201848 - RNA, 19 nt, Homo sapiens
  misc_RNA (1)...(19): siRNA sense strand
agagagagaaggcggcuua

SEQ ID NO: 1201849 - RNA, 19 nt, Homo sapiens
  misc_RNA (1)...(19): siRNA sense strand
aaauccaucucucugaauu

SEQ ID NO: 1201850 - RNA, 19 nt, Homo sapiens
  misc_RNA (1)...(19): siRNA sense strand
agacucaacuccucagcaa

SEQ ID NO: 1201851 - RNA, 19 nt, Homo sapiens
  misc_RNA (1)...(19): siRNA sense strand
gaugaagaagauaggcuua

SEQ ID NO: 1201852 - RNA, 19 nt, Homo sapiens
  misc_RNA (1)...(19): siRNA sense strand
cugcacagguuaauccauu

SEQ ID NO: 1201853 - RNA, 19 nt, Homo sapiens
  misc_RNA (1)...(19): siRNA sense strand
agaaggcggcuuaguauug

SEQ ID NO: 1201854 - RNA, 19 nt, Homo sapiens
  misc_RNA (1)...(19): siRNA sense strand
gauggaccguuaugaagca

SEQ ID NO: 1201855 - RNA, 19 nt, Homo sapiens
  misc_RNA (1)...(19): siRNA sense strand
gaucccaguucgugcaugu

SEQ ID NO: 1201856 - RNA, 19 nt, Homo sapiens
  misc_RNA (1)...(19): siRNA sense strand
gaaaucccucaaauuguug

SEQ ID NO: 1201857 - RNA, 19 nt, Homo sapiens
  misc_RNA (1)...(19): siRNA sense strand
ggacuucaaaggagagaga

SEQ ID NO: 1201858 - RNA, 19 nt, Homo sapiens
  misc_RNA (1)...(19): siRNA sense strand
gacaguguuuccagcagaa

SEQ ID NO: 1201859 - RNA, 19 nt, Homo sapiens
  misc_RNA (1)...(19): siRNA sense strand
ccucaauguuacaggauuu

SEQ ID NO: 1201860 - RNA, 19 nt, Homo sapiens
  misc_RNA (1)...(19): siRNA sense strand
cacacagauugauuacaua

SEQ ID NO: 1201861 - RNA, 19 nt, Homo sapiens
  misc_RNA (1)...(19): siRNA sense strand
caaagacccagaguucauu

SEQ ID NO: 1201862 - RNA, 19 nt, Homo sapiens
  misc_RNA (1)...(19): siRNA sense strand
cuacagaagaugaagaaga

SEQ ID NO: 1201863 - RNA, 19 nt, Homo sapiens
  misc_RNA (1)...(19): siRNA sense strand
gagaaggcggcuuaguauu

SEQ ID NO: 1201864 - RNA, 19 nt, Homo sapiens
  misc_RNA (1)...(19): siRNA sense strand
ccaugacccguguguauuu

SEQ ID NO: 1201865 - RNA, 19 nt, Homo sapiens
  misc_RNA (1)...(19): siRNA sense strand
acagggagcuuggaaaguc

SEQ ID NO: 1201866 - RNA, 19 nt, Homo sapiens
  misc_RNA (1)...(19): siRNA sense strand
gaagcagcgucagauaucu

SEQ ID NO: 1201867 - RNA, 19 nt, Homo sapiens
  misc_RNA (1)...(19): siRNA sense strand
ggaaugacugaaauaagug

SEQ ID NO: 1201868 - RNA, 19 nt, Homo sapiens
  misc_RNA (1)...(19): siRNA sense strand
agacagccauacccauguu

SEQ ID NO: 1201869 - RNA, 19 nt, Homo sapiens
  misc_RNA (1)...(19): siRNA sense strand
aaccauugcuuacuauauc

SEQ ID NO: 1201870 - RNA, 19 nt, Homo sapiens
  misc_RNA (1)...(19): siRNA sense strand
gcccaugacccguguguau

SEQ ID NO: 1201871 - RNA, 19 nt, Homo sapiens
  misc_RNA (1)...(19): siRNA sense strand
ggaaaguccacacacagau

SEQ ID NO: 1201872 - RNA, 19 nt, Homo sapiens
  misc_RNA (1)...(19): siRNA sense strand
guucauuggaugcugauaa

SEQ ID NO: 1201873 - RNA, 19 nt, Homo sapiens
  misc_RNA (1)...(19): siRNA sense strand
ggaacgagaaccagucaag

SEQ ID NO: 1201874 - RNA, 19 nt, Homo sapiens
  misc_RNA (1)...(19): siRNA sense strand
uuugaaccauugcuuacua

SEQ ID NO: 1201875 - RNA, 19 nt, Homo sapiens
  misc_RNA (1)...(19): siRNA sense strand
ccucgugccugauuugcuu

SEQ ID NO: 1201876 - RNA, 19 nt, Homo sapiens
  misc_RNA (1)...(19): siRNA sense strand
agagaaggcggcuuaguau

SEQ ID NO: 1201877 - RNA, 19 nt, Homo sapiens
  misc_RNA (1)...(19): siRNA sense strand
caaauacaggugucagaau

SEQ ID NO: 1201878 - RNA, 19 nt, Homo sapiens
  misc_RNA (1)...(19): siRNA sense strand
uguaggaagucgcucucua

SEQ ID NO: 1201879 - RNA, 19 nt, Homo sapiens
  misc_RNA (1)...(19): siRNA sense strand
gcagacagggagcuuggaa

SEQ ID NO: 1201880 - RNA, 19 nt, Homo sapiens
  misc_RNA (1)...(19): siRNA sense strand
cagaagcagcgucagauau

SEQ ID NO: 1201881 - RNA, 19 nt, Homo sapiens
  misc_RNA (1)...(19): siRNA sense strand
ugaagcuacugcacagguu

SEQ ID NO: 1201882 - RNA, 19 nt, Homo sapiens
  misc_RNA (1)...(19): siRNA sense strand
gacagagguugcaggauac

SEQ ID NO: 1201883 - RNA, 19 nt, Homo sapiens
  misc_RNA (1)...(19): siRNA sense strand
uaaacugggaccaaaauua

SEQ ID NO: 1201884 - RNA, 19 nt, Homo sapiens
  misc_RNA (1)...(19): siRNA sense strand
aaauaggacuuucccuuuu

SEQ ID NO: 1201885 - RNA, 19 nt, Homo sapiens
  misc_RNA (1)...(19): siRNA sense strand
auacaaccacccuguguuu

SEQ ID NO: 1201886 - RNA, 19 nt, Homo sapiens
  misc_RNA (1)...(19): siRNA sense strand
gauacaaccacccuguguu

SEQ ID NO: 1201887 - RNA, 19 nt, Homo sapiens
  misc_RNA (1)...(19): siRNA sense strand
ggauacaaccacccugugu

SEQ ID NO: 1201888 - RNA, 19 nt, Homo sapiens
  misc_RNA (1)...(19): siRNA sense strand
uuugauccaucuuugguuu

SEQ ID NO: 1201889 - RNA, 19 nt, Homo sapiens
  misc_RNA (1)...(19): siRNA sense strand
gcacuacguaugauggaau

SEQ ID NO: 1201890 - RNA, 19 nt, Homo sapiens
  misc_RNA (1)...(19): siRNA sense strand
aauaggacuuucccuuuua

SEQ ID NO: 1201891 - RNA, 19 nt, Homo sapiens
  misc_RNA (1)...(19): siRNA sense strand
uaacgggacuuuuagaaca

SEQ ID NO: 1201892 - RNA, 19 nt, Homo sapiens
  misc_RNA (1)...(19): siRNA sense strand
agcagucccuuaagagaaa

SEQ ID NO: 1201893 - RNA, 19 nt, Homo sapiens
  misc_RNA (1)...(19): siRNA sense strand
cacagaaaucccucaaauu

SEQ ID NO: 1201894 - RNA, 19 nt, Homo sapiens
  misc_RNA (1)...(19): siRNA sense strand
cagaaaucccucaaauugu

SEQ ID NO: 1201895 - RNA, 19 nt, Homo sapiens
  misc_RNA (1)...(19): siRNA sense strand
gaagaagauaggcuuagag

SEQ ID NO: 1201896 - RNA, 19 nt, Homo sapiens
  misc_RNA (1)...(19): siRNA sense strand
caaagcagucccuuaagag

SEQ ID NO: 1201897 - RNA, 19 nt, Homo sapiens
  misc_RNA (1)...(19): siRNA sense strand
uucauuggaugcugauaaa

SEQ ID NO: 1201898 - RNA, 19 nt, Homo sapiens
  misc_RNA (1)...(19): siRNA sense strand
uuucacuccuccacuguaa

SEQ ID NO: 1201899 - RNA, 19 nt, Homo sapiens
  misc_RNA (1)...(19): siRNA sense strand
guugaaauaagcaucgaaa

SEQ ID NO: 1201900 - RNA, 19 nt, Homo sapiens
  misc_RNA (1)...(19): siRNA sense strand
gaaauaagcaucgaaaagg

SEQ ID NO: 1201901 - RNA, 19 nt, Homo sapiens
  misc_RNA (1)...(19): siRNA sense strand
aggacuaccucuucucugu

SEQ ID NO: 1201902 - RNA, 19 nt, Homo sapiens
  misc_RNA (1)...(19): siRNA sense strand
caaccacccuguguuugca

SEQ ID NO: 1201903 - RNA, 19 nt, Homo sapiens
  misc_RNA (1)...(19): siRNA sense strand
caacaaagcagucccuuaa

SEQ ID NO: 1201904 - RNA, 19 nt, Homo sapiens
  misc_RNA (1)...(19): siRNA sense strand
gaagauaggcuuagagaga

SEQ ID NO: 1201905 - RNA, 19 nt, Homo sapiens
  misc_RNA (1)...(19): siRNA sense strand
agacagagguugcaggaua

SEQ ID NO: 1201906 - RNA, 19 nt, Homo sapiens
  misc_RNA (1)...(19): siRNA sense strand
gcaguggaaucacaacuuu

SEQ ID NO: 1201907 - RNA, 19 nt, Homo sapiens
  misc_RNA (1)...(19): siRNA sense strand
ggaggaagccguagugaaa

SEQ ID NO: 1201908 - RNA, 19 nt, Homo sapiens
  misc_RNA (1)...(19): siRNA sense strand
gagagaaggcggcuuagua

SEQ ID NO: 1201909 - RNA, 19 nt, Homo sapiens
  misc_RNA (1)...(19): siRNA sense strand
gaaggcggcuuaguauuga

SEQ ID NO: 1201910 - RNA, 19 nt, Homo sapiens
  misc_RNA (1)...(19): siRNA sense strand
ccacagaaaucccucaaau

SEQ ID NO: 1201911 - RNA, 19 nt, Homo sapiens
  misc_RNA (1)...(19): siRNA sense strand
ggaagucgcucucuaagac

SEQ ID NO: 1201912 - RNA, 19 nt, Homo sapiens
  misc_RNA (1)...(19): siRNA sense strand
agaaaucccucaaauuguu

SEQ ID NO: 1201913 - RNA, 19 nt, Homo sapiens
  misc_RNA (1)...(19): siRNA sense strand
gagcccacauucaacauuu

SEQ ID NO: 1201914 - RNA, 19 nt, Homo sapiens
  misc_RNA (1)...(19): siRNA sense strand
gacaugaacuccaacagau

SEQ ID NO: 1201915 - RNA, 19 nt, Homo sapiens
  misc_RNA (1)...(19): siRNA sense strand
cagcagaacuguaggaagu

SEQ ID NO: 1201916 - RNA, 19 nt, Homo sapiens
  misc_RNA (1)...(19): siRNA sense strand
ggauuaagcccuucgaaga

SEQ ID NO: 1201917 - RNA, 19 nt, Homo sapiens
  misc_RNA (1)...(19): siRNA sense strand
acagaaaucccucaaauug

SEQ ID NO: 1201918 - RNA, 19 nt, Homo sapiens
  misc_RNA (1)...(19): siRNA sense strand
ggaauaacuucaaauacag

SEQ ID NO: 1201919 - RNA, 19 nt, Homo sapiens
  misc_RNA (1)...(19): siRNA sense strand
uaaauaggacuuucccuuu

SEQ ID NO: 1201920 - RNA, 19 nt, Homo sapiens
  misc_RNA (1)...(19): siRNA sense strand
ggacaugaacuccaacaga

SEQ ID NO: 1201921 - RNA, 19 nt, Homo sapiens
  misc_RNA (1)...(19): siRNA sense strand
acaaagcagucccuuaaga

SEQ ID NO: 1201922 - RNA, 19 nt, Homo sapiens
  misc_RNA (1)...(19): siRNA sense strand
gcaacaaagcagucccuua

SEQ ID NO: 1201923 - RNA, 19 nt, Homo sapiens
  misc_RNA (1)...(19): siRNA sense strand
gagaaccagucaaggcaaa

SEQ ID NO: 1201924 - RNA, 19 nt, Homo sapiens
  misc_RNA (1)...(19): siRNA sense strand
ggauaaugauucuuguguu

SEQ ID NO: 1201925 - RNA, 19 nt, Homo sapiens
  misc_RNA (1)...(19): siRNA sense strand
gaaaguccacacacagauu

SEQ ID NO: 1201926 - RNA, 19 nt, Homo sapiens
  misc_RNA (1)...(19): siRNA sense strand
gcagaagcagcgucagaua

SEQ ID NO: 1201927 - RNA, 19 nt, Homo sapiens
  misc_RNA (1)...(19): siRNA sense strand
acacacagauugauuacau

SEQ ID NO: 1201928 - RNA, 19 nt, Homo sapiens
  misc_RNA (1)...(19): siRNA sense strand
guaggaagucgcucucuaa

SEQ ID NO: 1201929 - RNA, 19 nt, Homo sapiens
  misc_RNA (1)...(19): siRNA sense strand
gaauugagcaguggaauca

SEQ ID NO: 1201930 - RNA, 19 nt, Homo sapiens
  misc_RNA (1)...(19): siRNA sense strand
aaaauuagcuccuggaaug

SEQ ID NO: 1201931 - RNA, 19 nt, Homo sapiens
  misc_RNA (1)...(19): siRNA sense strand
uauauaaacugggaccaaa

SEQ ID NO: 1201932 - RNA, 19 nt, Homo sapiens
  misc_RNA (1)...(19): siRNA sense strand
gaaccauugcuuacuauau

SEQ ID NO: 1201933 - RNA, 19 nt, Homo sapiens
  misc_RNA (1)...(19): siRNA sense strand
ggacaguucugcaauucca

SEQ ID NO: 1201934 - RNA, 19 nt, Homo sapiens
  misc_RNA (1)...(19): siRNA sense strand
uggaaugacugaaauaagu

SEQ ID NO: 1201935 - RNA, 19 nt, Homo sapiens
  misc_RNA (1)...(19): siRNA sense strand
gcaggugcacuacguauga

SEQ ID NO: 1201936 - RNA, 19 nt, Homo sapiens
  misc_RNA (1)...(19): siRNA sense strand
gauuaagcccuucgaagaa

SEQ ID NO: 1201937 - RNA, 19 nt, Homo sapiens
  misc_RNA (1)...(19): siRNA sense strand
gaagcuacugcacagguua

SEQ ID NO: 1201938 - RNA, 19 nt, Homo sapiens
  misc_RNA (1)...(19): siRNA sense strand
uacagaagaugaagaagau

SEQ ID NO: 1201939 - RNA, 19 nt, Homo sapiens
  misc_RNA (1)...(19): siRNA sense strand
cuacaaagacccagaguuc

SEQ ID NO: 1201940 - RNA, 19 nt, Homo sapiens
  misc_RNA (1)...(19): siRNA sense strand
ccaucucucugaauuaaug

SEQ ID NO: 1201941 - RNA, 19 nt, Homo sapiens
  misc_RNA (1)...(19): siRNA sense strand
cagaaucucuucggucaug

SEQ ID NO: 1201942 - RNA, 19 nt, Homo sapiens
  misc_RNA (1)...(19): siRNA sense strand
caucuuugguuucuacaga

SEQ ID NO: 1201943 - RNA, 19 nt, Homo sapiens
  misc_RNA (1)...(19): siRNA sense strand
gacuaccucuucucuguga

SEQ ID NO: 1201944 - RNA, 19 nt, Homo sapiens
  misc_RNA (1)...(19): siRNA sense strand
ggaccguuaugaagcagaa

SEQ ID NO: 1201945 - RNA, 19 nt, Homo sapiens
  misc_RNA (1)...(19): siRNA sense strand
ugaagaagauaggcuuaga

SEQ ID NO: 1201946 - RNA, 19 nt, Homo sapiens
  misc_RNA (1)...(19): siRNA sense strand
gagaaaauauugccuuaca

SEQ ID NO: 1201947 - RNA, 19 nt, Homo sapiens
  misc_RNA (1)...(19): siRNA sense strand
aaauacaggugucagaauc

SEQ ID NO: 1201948 - RNA, 19 nt, Homo sapiens
  misc_RNA (1)...(19): siRNA sense strand
agagagagaaggcggcuua

SEQ ID NO: 1201949 - RNA, 19 nt, Homo sapiens
  misc_RNA (1)...(19): siRNA sense strand
aaauccaucucucugaauu

SEQ ID NO: 1201950 - RNA, 19 nt, Homo sapiens
  misc_RNA (1)...(19): siRNA sense strand
agacucaacuccucagcaa

SEQ ID NO: 1201951 - RNA, 19 nt, Homo sapiens
  misc_RNA (1)...(19): siRNA sense strand
gaugaagaagauaggcuua

SEQ ID NO: 1201952 - RNA, 19 nt, Homo sapiens
  misc_RNA (1)...(19): siRNA sense strand
cugcacagguuaauccauu

SEQ ID NO: 1201953 - RNA, 19 nt, Homo sapiens
  misc_RNA (1)...(19): siRNA sense strand
agaaggcggcuuaguauug

SEQ ID NO: 1201954 - RNA, 19 nt, Homo sapiens
  misc_RNA (1)...(19): siRNA sense strand
gauggaccguuaugaagca

SEQ ID NO: 1201955 - RNA, 19 nt, Homo sapiens
  misc_RNA (1)...(19): siRNA sense strand
gaucccaguucgugcaugu

SEQ ID NO: 1201956 - RNA, 19 nt, Homo sapiens
  misc_RNA (1)...(19): siRNA sense strand
gaaaucccucaaauuguug

SEQ ID NO: 1201957 - RNA, 19 nt, Homo sapiens
  misc_RNA (1)...(19): siRNA sense strand
ggacuucaaaggagagaga

SEQ ID NO: 1201958 - RNA, 19 nt, Homo sapiens
  misc_RNA (1)...(19): siRNA sense strand
gacaguguuuccagcagaa

SEQ ID NO: 1201959 - RNA, 19 nt, Homo sapiens
  misc_RNA (1)...(19): siRNA sense strand
ccucaauguuacaggauuu

SEQ ID NO: 1201960 - RNA, 19 nt, Homo sapiens
  misc_RNA (1)...(19): siRNA sense strand
cacacagauugauuacaua

SEQ ID NO: 1201961 - RNA, 19 nt, Homo sapiens
  misc_RNA (1)...(19): siRNA sense strand
caaagacccagaguucauu

SEQ ID NO: 1201962 - RNA, 19 nt, Homo sapiens
  misc_RNA (1)...(19): siRNA sense strand
cuacagaagaugaagaaga

SEQ ID NO: 1201963 - RNA, 19 nt, Homo sapiens
  misc_RNA (1)...(19): siRNA sense strand
gagaaggcggcuuaguauu

SEQ ID NO: 1201964 - RNA, 19 nt, Homo sapiens
  misc_RNA (1)...(19): siRNA sense strand
ccaugacccguguguauuu

SEQ ID NO: 1201965 - RNA, 19 nt, Homo sapiens
  misc_RNA (1)...(19): siRNA sense strand
acagggagcuuggaaaguc

SEQ ID NO: 1201966 - RNA, 19 nt, Homo sapiens
  misc_RNA (1)...(19): siRNA sense strand
gaagcagcgucagauaucu

SEQ ID NO: 1201967 - RNA, 19 nt, Homo sapiens
  misc_RNA (1)...(19): siRNA sense strand
ggaaugacugaaauaagug

SEQ ID NO: 1201968 - RNA, 19 nt, Homo sapiens
  misc_RNA (1)...(19): siRNA sense strand
agacagccauacccauguu

SEQ ID NO: 1201969 - RNA, 19 nt, Homo sapiens
  misc_RNA (1)...(19): siRNA sense strand
aaccauugcuuacuauauc

SEQ ID NO: 1201970 - RNA, 19 nt, Homo sapiens
  misc_RNA (1)...(19): siRNA sense strand
gcccaugacccguguguau

SEQ ID NO: 1201971 - RNA, 19 nt, Homo sapiens
  misc_RNA (1)...(19): siRNA sense strand
ggaaaguccacacacagau

SEQ ID NO: 1201972 - RNA, 19 nt, Homo sapiens
  misc_RNA (1)...(19): siRNA sense strand
guucauuggaugcugauaa

SEQ ID NO: 1201973 - RNA, 19 nt, Homo sapiens
  misc_RNA (1)...(19): siRNA sense strand
ggaacgagaaccagucaag

SEQ ID NO: 1201974 - RNA, 19 nt, Homo sapiens
  misc_RNA (1)...(19): siRNA sense strand
uuugaaccauugcuuacua

SEQ ID NO: 1201975 - RNA, 19 nt, Homo sapiens
  misc_RNA (1)...(19): siRNA sense strand
ccucgugccugauuugcuu

SEQ ID NO: 1201976 - RNA, 19 nt, Homo sapiens
  misc_RNA (1)...(19): siRNA sense strand
agagaaggcggcuuaguau

SEQ ID NO: 1201977 - RNA, 19 nt, Homo sapiens
  misc_RNA (1)...(19): siRNA sense strand
caaauacaggugucagaau

SEQ ID NO: 1201978 - RNA, 19 nt, Homo sapiens
  misc_RNA (1)...(19): siRNA sense strand
uguaggaagucgcucucua

SEQ ID NO: 1201979 - RNA, 19 nt, Homo sapiens
  misc_RNA (1)...(19): siRNA sense strand
gcagacagggagcuuggaa

SEQ ID NO: 1201980 - RNA, 19 nt, Homo sapiens
  misc_RNA (1)...(19): siRNA sense strand
cagaagcagcgucagauau

SEQ ID NO: 1201981 - RNA, 19 nt, Homo sapiens
  misc_RNA (1)...(19): siRNA sense strand
ugaagcuacugcacagguu

SEQ ID NO: 1201982 - RNA, 19 nt, Homo sapiens
  misc_RNA (1)...(19): siRNA sense strand
gacagagguugcaggauac

SEQ ID NO: 1201983 - RNA, 19 nt, Homo sapiens
  misc_RNA (1)...(19): siRNA sense strand
uaaacugggaccaaaauua

SEQ ID NO: 1201984 - RNA, 19 nt, Homo sapiens
  misc_RNA (1)...(19): siRNA sense strand
aaauaggacuuucccuuuu

SEQ ID NO: 1201985 - RNA, 19 nt, Homo sapiens
  misc_RNA (1)...(19): siRNA sense strand
auacaaccacccuguguuu

SEQ ID NO: 1201986 - RNA, 19 nt, Homo sapiens
  misc_RNA (1)...(19): siRNA sense strand
gauacaaccacccuguguu

SEQ ID NO: 1201987 - RNA, 19 nt, Homo sapiens
  misc_RNA (1)...(19): siRNA sense strand
ggauacaaccacccugugu

SEQ ID NO: 1201988 - RNA, 19 nt, Homo sapiens
  misc_RNA (1)...(19): siRNA sense strand
uuugauccaucuuugguuu

SEQ ID NO: 1201989 - RNA, 19 nt, Homo sapiens
  misc_RNA (1)...(19): siRNA sense strand
gcacuacguaugauggaau

SEQ ID NO: 1201990 - RNA, 19 nt, Homo sapiens
  misc_RNA (1)...(19): siRNA sense strand
aauaggacuuucccuuuua

SEQ ID NO: 1201991 - RNA, 19 nt, Homo sapiens
  misc_RNA (1)...(19): siRNA sense strand
uaacgggacuuuuagaaca

SEQ ID NO: 1201992 - RNA, 19 nt, Homo sapiens
  misc_RNA (1)...(19): siRNA sense strand
agcagucccuuaagagaaa

SEQ ID NO: 1201993 - RNA, 19 nt, Homo sapiens
  misc_RNA (1)...(19): siRNA sense strand
cacagaaaucccucaaauu

SEQ ID NO: 1201994 - RNA, 19 nt, Homo sapiens
  misc_RNA (1)...(19): siRNA sense strand
cagaaaucccucaaauugu

SEQ ID NO: 1201995 - RNA, 19 nt, Homo sapiens
  misc_RNA (1)...(19): siRNA sense strand
gaagaagauaggcuuagag

SEQ ID NO: 1201996 - RNA, 19 nt, Homo sapiens
  misc_RNA (1)...(19): siRNA sense strand
caaagcagucccuuaagag

SEQ ID NO: 1201997 - RNA, 19 nt, Homo sapiens
  misc_RNA (1)...(19): siRNA sense strand
uucauuggaugcugauaaa

SEQ ID NO: 1201998 - RNA, 19 nt, Homo sapiens
  misc_RNA (1)...(19): siRNA sense strand
uuucacuccuccacuguaa

SEQ ID NO: 1201999 - RNA, 19 nt, Homo sapiens
  misc_RNA (1)...(19): siRNA sense strand
guugaaauaagcaucgaaa

SEQ ID NO: 1202000 - RNA, 19 nt, Homo sapiens
  misc_RNA (1)...(19): siRNA sense strand
gaaauaagcaucgaaaagg

SEQ ID NO: 1202001 - RNA, 19 nt, Homo sapiens
  misc_RNA (1)...(19): siRNA sense strand
aggacuaccucuucucugu

SEQ ID NO: 1202002 - RNA, 19 nt, Homo sapiens
  misc_RNA (1)...(19): siRNA sense strand
caaccacccuguguuugca

SEQ ID NO: 1202003 - RNA, 19 nt, Homo sapiens
  misc_RNA (1)...(19): siRNA sense strand
caacaaagcagucccuuaa

SEQ ID NO: 1202004 - RNA, 19 nt, Homo sapiens
  misc_RNA (1)...(19): siRNA sense strand
gaagauaggcuuagagaga

SEQ ID NO: 1202005 - RNA, 19 nt, Homo sapiens
  misc_RNA (1)...(19): siRNA sense strand
agacagagguugcaggaua

SEQ ID NO: 1202006 - RNA, 19 nt, Homo sapiens
  misc_RNA (1)...(19): siRNA sense strand
gcaguggaaucacaacuuu

SEQ ID NO: 1202007 - RNA, 19 nt, Homo sapiens
  misc_RNA (1)...(19): siRNA sense strand
ggaggaagccguagugaaa

SEQ ID NO: 1202008 - RNA, 19 nt, Homo sapiens
  misc_RNA (1)...(19): siRNA sense strand
gagagaaggcggcuuagua

SEQ ID NO: 1202009 - RNA, 19 nt, Homo sapiens
  misc_RNA (1)...(19): siRNA sense strand
gaaggcggcuuaguauuga

SEQ ID NO: 1202010 - RNA, 19 nt, Homo sapiens
  misc_RNA (1)...(19): siRNA sense strand
ccacagaaaucccucaaau

SEQ ID NO: 1202011 - RNA, 19 nt, Homo sapiens
  misc_RNA (1)...(19): siRNA sense strand
ggaagucgcucucuaagac

SEQ ID NO: 1202012 - RNA, 19 nt, Homo sapiens
  misc_RNA (1)...(19): siRNA sense strand
agaaaucccucaaauuguu

SEQ ID NO: 1202013 - RNA, 19 nt, Homo sapiens
  misc_RNA (1)...(19): siRNA sense strand
gagcccacauucaacauuu

SEQ ID NO: 1202014 - RNA, 19 nt, Homo sapiens
  misc_RNA (1)...(19): siRNA sense strand
gacaugaacuccaacagau

SEQ ID NO: 1202015 - RNA, 19 nt, Homo sapiens
  misc_RNA (1)...(19): siRNA sense strand
cagcagaacuguaggaagu

SEQ ID NO: 1202016 - RNA, 19 nt, Homo sapiens
  misc_RNA (1)...(19): siRNA sense strand
ggauuaagcccuucgaaga

SEQ ID NO: 1202017 - RNA, 19 nt, Homo sapiens
  misc_RNA (1)...(19): siRNA sense strand
acagaaaucccucaaauug

SEQ ID NO: 1202018 - RNA, 19 nt, Homo sapiens
  misc_RNA (1)...(19): siRNA sense strand
ggaauaacuucaaauacag

SEQ ID NO: 1202019 - RNA, 19 nt, Homo sapiens
  misc_RNA (1)...(19): siRNA sense strand
uaaauaggacuuucccuuu

SEQ ID NO: 1202020 - RNA, 19 nt, Homo sapiens
  misc_RNA (1)...(19): siRNA sense strand
ggacaugaacuccaacaga

SEQ ID NO: 1202021 - RNA, 19 nt, Homo sapiens
  misc_RNA (1)...(19): siRNA sense strand
acaaagcagucccuuaaga

SEQ ID NO: 1202022 - RNA, 19 nt, Homo sapiens
  misc_RNA (1)...(19): siRNA sense strand
gcaacaaagcagucccuua

SEQ ID NO: 1202023 - RNA, 19 nt, Homo sapiens
  misc_RNA (1)...(19): siRNA sense strand
gagaaccagucaaggcaaa

SEQ ID NO: 1202024 - RNA, 19 nt, Homo sapiens
  misc_RNA (1)...(19): siRNA sense strand
ggauaaugauucuuguguu

SEQ ID NO: 1202025 - RNA, 19 nt, Homo sapiens
  misc_RNA (1)...(19): siRNA sense strand
gaaaguccacacacagauu

SEQ ID NO: 1202026 - RNA, 19 nt, Homo sapiens
  misc_RNA (1)...(19): siRNA sense strand
gcagaagcagcgucagaua

SEQ ID NO: 1202027 - RNA, 19 nt, Homo sapiens
  misc_RNA (1)...(19): siRNA sense strand
acacacagauugauuacau

SEQ ID NO: 1202028 - RNA, 19 nt, Homo sapiens
  misc_RNA (1)...(19): siRNA sense strand
guaggaagucgcucucuaa

SEQ ID NO: 1202029 - RNA, 19 nt, Homo sapiens
  misc_RNA (1)...(19): siRNA sense strand
gaauugagcaguggaauca

SEQ ID NO: 1202030 - RNA, 19 nt, Homo sapiens
  misc_RNA (1)...(19): siRNA sense strand
aaaauuagcuccuggaaug

SEQ ID NO: 1202031 - RNA, 19 nt, Homo sapiens
  misc_RNA (1)...(19): siRNA sense strand
uauauaaacugggaccaaa

SEQ ID NO: 1202032 - RNA, 19 nt, Homo sapiens
  misc_RNA (1)...(19): siRNA sense strand
gaaccauugcuuacuauau

SEQ ID NO: 1202033 - RNA, 19 nt, Homo sapiens
  misc_RNA (1)...(19): siRNA sense strand
ggacaguucugcaauucca

SEQ ID NO: 1202034 - RNA, 19 nt, Homo sapiens
  misc_RNA (1)...(19): siRNA sense strand
uggaaugacugaaauaagu

SEQ ID NO: 1202035 - RNA, 19 nt, Homo sapiens
  misc_RNA (1)...(19): siRNA sense strand
gcaggugcacuacguauga

SEQ ID NO: 1202036 - RNA, 19 nt, Homo sapiens
  misc_RNA (1)...(19): siRNA sense strand
gauuaagcccuucgaagaa

SEQ ID NO: 1202037 - RNA, 19 nt, Homo sapiens
  misc_RNA (1)...(19): siRNA sense strand
gaagcuacugcacagguua

SEQ ID NO: 1202038 - RNA, 19 nt, Homo sapiens
  misc_RNA (1)...(19): siRNA sense strand
uacagaagaugaagaagau

SEQ ID NO: 1202039 - RNA, 19 nt, Homo sapiens
  misc_RNA (1)...(19): siRNA sense strand
cuacaaagacccagaguuc

SEQ ID NO: 1202040 - RNA, 19 nt, Homo sapiens
  misc_RNA (1)...(19): siRNA sense strand
ccaucucucugaauuaaug

SEQ ID NO: 1202041 - RNA, 19 nt, Homo sapiens
  misc_RNA (1)...(19): siRNA sense strand
cagaaucucuucggucaug

SEQ ID NO: 1202042 - RNA, 19 nt, Homo sapiens
  misc_RNA (1)...(19): siRNA sense strand
caucuuugguuucuacaga

SEQ ID NO: 1202043 - RNA, 19 nt, Homo sapiens
  misc_RNA (1)...(19): siRNA sense strand
gacuaccucuucucuguga

SEQ ID NO: 1202044 - RNA, 19 nt, Homo sapiens
  misc_RNA (1)...(19): siRNA sense strand
ggaccguuaugaagcagaa

SEQ ID NO: 1202045 - RNA, 19 nt, Homo sapiens
  misc_RNA (1)...(19): siRNA sense strand
ugaagaagauaggcuuaga

SEQ ID NO: 1202046 - RNA, 19 nt, Homo sapiens
  misc_RNA (1)...(19): siRNA sense strand
gagaaaauauugccuuaca

SEQ ID NO: 1202047 - RNA, 19 nt, Homo sapiens
  misc_RNA (1)...(19): siRNA sense strand
aaauacaggugucagaauc

SEQ ID NO: 1202048 - RNA, 19 nt, Homo sapiens
  misc_RNA (1)...(19): siRNA sense strand
agagagagaaggcggcuua

SEQ ID NO: 1202049 - RNA, 19 nt, Homo sapiens
  misc_RNA (1)...(19): siRNA sense strand
aaauccaucucucugaauu

SEQ ID NO: 1202050 - RNA, 19 nt, Homo sapiens
  misc_RNA (1)...(19): siRNA sense strand
agacucaacuccucagcaa

SEQ ID NO: 1202051 - RNA, 19 nt, Homo sapiens
  misc_RNA (1)...(19): siRNA sense strand
gaugaagaagauaggcuua

SEQ ID NO: 1202052 - RNA, 19 nt, Homo sapiens
  misc_RNA (1)...(19): siRNA sense strand
cugcacagguuaauccauu

SEQ ID NO: 1202053 - RNA, 19 nt, Homo sapiens
  misc_RNA (1)...(19): siRNA sense strand
agaaggcggcuuaguauug

SEQ ID NO: 1202054 - RNA, 19 nt, Homo sapiens
  misc_RNA (1)...(19): siRNA sense strand
gauggaccguuaugaagca

SEQ ID NO: 1202055 - RNA, 19 nt, Homo sapiens
  misc_RNA (1)...(19): siRNA sense strand
gaucccaguucgugcaugu

SEQ ID NO: 1202056 - RNA, 19 nt, Homo sapiens
  misc_RNA (1)...(19): siRNA sense strand
gaaaucccucaaauuguug

SEQ ID NO: 1202057 - RNA, 19 nt, Homo sapiens
  misc_RNA (1)...(19): siRNA sense strand
ggacuucaaaggagagaga

SEQ ID NO: 1202058 - RNA, 19 nt, Homo sapiens
  misc_RNA (1)...(19): siRNA sense strand
gacaguguuuccagcagaa

SEQ ID NO: 1202059 - RNA, 19 nt, Homo sapiens
  misc_RNA (1)...(19): siRNA sense strand
ccucaauguuacaggauuu

SEQ ID NO: 1202060 - RNA, 19 nt, Homo sapiens
  misc_RNA (1)...(19): siRNA sense strand
cacacagauugauuacaua

SEQ ID NO: 1202061 - RNA, 19 nt, Homo sapiens
  misc_RNA (1)...(19): siRNA sense strand
caaagacccagaguucauu

SEQ ID NO: 1202062 - RNA, 19 nt, Homo sapiens
  misc_RNA (1)...(19): siRNA sense strand
cuacagaagaugaagaaga

SEQ ID NO: 1202063 - RNA, 19 nt, Homo sapiens
  misc_RNA (1)...(19): siRNA sense strand
gagaaggcggcuuaguauu

SEQ ID NO: 1202064 - RNA, 19 nt, Homo sapiens
  misc_RNA (1)...(19): siRNA sense strand
ccaugacccguguguauuu

SEQ ID NO: 1202065 - RNA, 19 nt, Homo sapiens
  misc_RNA (1)...(19): siRNA sense strand
acagggagcuuggaaaguc

SEQ ID NO: 1202066 - RNA, 19 nt, Homo sapiens
  misc_RNA (1)...(19): siRNA sense strand
gaagcagcgucagauaucu

SEQ ID NO: 1202067 - RNA, 19 nt, Homo sapiens
  misc_RNA (1)...(19): siRNA sense strand
ggaaugacugaaauaagug

SEQ ID NO: 1202068 - RNA, 19 nt, Homo sapiens
  misc_RNA (1)...(19): siRNA sense strand
agacagccauacccauguu

SEQ ID NO: 1202069 - RNA, 19 nt, Homo sapiens
  misc_RNA (1)...(19): siRNA sense strand
aaccauugcuuacuauauc

SEQ ID NO: 1202070 - RNA, 19 nt, Homo sapiens
  misc_RNA (1)...(19): siRNA sense strand
gcccaugacccguguguau

SEQ ID NO: 1202071 - RNA, 19 nt, Homo sapiens
  misc_RNA (1)...(19): siRNA sense strand
ggaaaguccacacacagau

SEQ ID NO: 1202072 - RNA, 19 nt, Homo sapiens
  misc_RNA (1)...(19): siRNA sense strand
guucauuggaugcugauaa

SEQ ID NO: 1202073 - RNA, 19 nt, Homo sapiens
  misc_RNA (1)...(19): siRNA sense strand
ggaacgagaaccagucaag

SEQ ID NO: 1202074 - RNA, 19 nt, Homo sapiens
  misc_RNA (1)...(19): siRNA sense strand
uuugaaccauugcuuacua

SEQ ID NO: 1202075 - RNA, 19 nt, Homo sapiens
  misc_RNA (1)...(19): siRNA sense strand
ccucgugccugauuugcuu

SEQ ID NO: 1202076 - RNA, 19 nt, Homo sapiens
  misc_RNA (1)...(19): siRNA sense strand
agagaaggcggcuuaguau

SEQ ID NO: 1202077 - RNA, 19 nt, Homo sapiens
  misc_RNA (1)...(19): siRNA sense strand
caaauacaggugucagaau

SEQ ID NO: 1202078 - RNA, 19 nt, Homo sapiens
  misc_RNA (1)...(19): siRNA sense strand
uguaggaagucgcucucua

SEQ ID NO: 1202079 - RNA, 19 nt, Homo sapiens
  misc_RNA (1)...(19): siRNA sense strand
gcagacagggagcuuggaa

SEQ ID NO: 1202080 - RNA, 19 nt, Homo sapiens
  misc_RNA (1)...(19): siRNA sense strand
cagaagcagcgucagauau

SEQ ID NO: 1202081 - RNA, 19 nt, Homo sapiens
  misc_RNA (1)...(19): siRNA sense strand
ugaagcuacugcacagguu

SEQ ID NO: 1202082 - RNA, 19 nt, Homo sapiens
  misc_RNA (1)...(19): siRNA sense strand
gacagagguugcaggauac

SEQ ID NO: 1202083 - RNA, 19 nt, Homo sapiens
  misc_RNA (1)...(19): siRNA sense strand
uaaacugggaccaaaauua

SEQ ID NO: 1202084 - RNA, 19 nt, Homo sapiens
  misc_RNA (1)...(19): siRNA sense strand
aaauaggacuuucccuuuu

SEQ ID NO: 1202085 - RNA, 19 nt, Homo sapiens
  misc_RNA (1)...(19): siRNA sense strand
auacaaccacccuguguuu

SEQ ID NO: 1202086 - RNA, 19 nt, Homo sapiens
  misc_RNA (1)...(19): siRNA sense strand
gauacaaccacccuguguu
